United States Patent Application Publication US 2007/0054278 A1 - sequence listing, part 138

SEQ ID NO: 429544 - DNA, 201 bp, Homo sapiens
aactctgaattcagcagttaatgtacaaaaaggaggaaaaggaaatgtaaagattaatacatgtaaaaatcataaaagtaagttttttcttgcaaaactaygggaaaaaaagagaaagtaaaggtcaatttatatttgttcatataaatagtaagctcacttctgtaatccatgtgagctagcccaaagaaaggtaaacta

SEQ ID NO: 429545 - DNA, 201 bp, Homo sapiens
cagtaactcgagcaaagagaaaaggaagatgtaaaagtatctttattcacagacaacatggcagtctgggtaaaaaatctgacaaaatttccaagctactkctactaatagagtccagtaagattaaaagatataaaataaaagtatttttaaaacccactgcatttctagatactagcaccgaaaattgaaattttaaaa

SEQ ID NO: 429546 - DNA, 201 bp, Homo sapiens
actaaaagcatgaattctaagttgtggcttatttatagcaagttatctgttccacgttttttaatattgccacataaatacacaatcctatagagcatttsaggaatggataatctgggacccatatttctatctagaagatattattatgttttttagatagttaagcttttagttaattttaccactctgctagtttca

SEQ ID NO: 429547 - DNA, 201 bp, Homo sapiens
ttcagctggaggctttagccagttcagtaactcgagcaaagagaaaaggaagatgtaaaagtatctttattcacagacaacatggcagtctgggtaaaaamtctgacaaaatttccaagctacttctactaatagagtccagtaagattaaaagatataaaataaaagtatttttaaaacccactgcatttctagatacta

SEQ ID NO: 429548 - DNA, 201 bp, Homo sapiens
gtaatctgctttagcccactgctttaaatgttcatctcatctaaaagatacttcatagactctagaataatgtttacccacatatctgggtactgtggccyaccaacgttgacccataaaatgagtcatcacaaagtctttcaaacaggatattctctggctgcaaaactgaactttttggtatttgacaaggtagtcagg

SEQ ID NO: 429549 - DNA, 201 bp, Homo sapiens
gaacaaacaggcctttctaagtttcctctatgatcccaatagattatatcttttcagtccaatcatacttctacatgactatttatttgttcatcgcaccwatgaaaaaaaaaatacacagttttccctgggtctttaagtcttcatttctgagggctcttgtgtcagataaaacttcggttaaataaatttgttaggctt

SEQ ID NO: 429550 - DNA, 201 bp, Homo sapiens
acattctacagtaggatacatttaaccttctaagtggatcactcaccagaatcctacataccacaaaacaggatcaaatggagtactagttaggttattaytccaaaagctgttaatctgcaagcctcgcctgacccaaagtctagttacataaaatatttctaaggctaacccctgtatcttcaacatcattcatttcac

SEQ ID NO: 429551 - DNA, 201 bp, Homo sapiens
tttccccaagatatatccagtccttctaccagactggaaaacattgtaatttatggagaaatagactgggtattcagaaggactttgtctcactagtgaartaattatgagccatggaccagatgctgttcttgtactgttcaaaactttttaaagcaagatccaaaaggataaaattatttctatataacttaagtgcat

SEQ ID NO: 429552 - DNA, 201 bp, Homo sapiens
tccatagtgtatacatgccccattttctttatccagtcatctattgatgaatacttaggttgattccatgactttgctatttccaagactatttccattgratagtattctgttaaacatacaagcacaagtctctttttgataccatttcttttcctttggggagatattcagtagtgggagtgcttggtcaaatgatag

SEQ ID NO: 429553 - DNA, 201 bp, Homo sapiens
taagcaaaaagaacaaagctagaggcatcatgttacctgacttcaaactatactacaaggctacagtaaccaaaacagcatggtactgctacccaaaacaratatatagaccaatggaacagaacagaggcctcggaaataatgccacacatacaaccatctgatccttgacaaacctgacaaaaacaagcaatgggtaat

SEQ ID NO: 429554 - DNA, 201 bp, Homo sapiens
gtgtcaccagacccactataacgaagttttgataaaagcctcaaaaaatgaagctaaaccacagtagctttgacagcactcaaaacaaatttcaaaaaatktaaaagaagataataaaatctagacaatagtataatagtcataatatccaacatccaataaaaaatttcagatatgaattttaaaatgtgattcataaat

SEQ ID NO: 429555 - DNA, 201 bp, Homo sapiens
ctgagtactagtgagctcagagcttggcagagaaaaactccagaaatcttcacagaggccccttacgccaatagctaactactaagttacacatatacacrgaggagaaaattctatgagactgggtgacctattactggggagctgcaagctaaataattcccagtggtctcactgggctgcaagatgcttgagttctga

SEQ ID NO: 429556 - DNA, 201 bp, Homo sapiens
atacaaatgaaaaccacaatgagataccatctcatgctagttagaatggcaattattaaaaagtcaggaaacagcagatgctggagaggatgtggagaaayaggaacacttttacactgttggtgggagtgtaagttagttcaaccactgtgaaagacattgtggtgattcctcaaggatctagaactagaaataccattt

SEQ ID NO: 429557 - DNA, 201 bp, Homo sapiens
tactgggtatatactcaaatcattctactaaaaagacacatgcacacgtatgtttattacagcaatgttcacaatagcaaagacttggaaccaacccaaaygcccatcaatgacagactggatagagaaattgtggcacatatataccatggaatactatgcagccataaaaaggataagttcatgtcctttgcagggaca

SEQ ID NO: 429558 - DNA, 201 bp, Homo sapiens
agaaaaccaaacaccacatgttctcattcataatttggagttgaacaatgagatcacatggacacagggaggggaacatcacacaccagggcctgtcagcrggtggggatttaggcgagggatagcattaggagaaatacctaatgtagatgacaggttgatgggtgcagcaaaccaccatggcacatgtatacctatgta

SEQ ID NO: 429559 - DNA, 201 bp, Homo sapiens
taagatttctgtgcttctgccagataggaagaacatgaagaaaaaaaaaaaaaaagagagagagagaaagaagtccatatagttcaaggatctttaaagcttggtgaaaaggtatttaattatcttaacagccaaagaaatagaaaatccaatcaagtattacagacaacattctacaaatgaatagaataggggtataga

SEQ ID NO: 429560 - DNA, 201 bp, Homo sapiens
agatttctgtgcttctgccagataggaagaacatgaagaaaaaaaaaaaaaaagagagagagagaaagaagtccatatagttcaaggatctttaaagcttggtgaaaaggtatttaattatcttaacagccaaagaaatagaaaatccaatcaagtattacagacaacattctacaaatgaatagaataggggtatagacc

SEQ ID NO: 429561 - DNA, 201 bp, Homo sapiens
gatttctgtgcttctgccagataggaagaacatgaagaaaaaaaaaaaaaaagagagagagagaaagaagtccatatagttcaaggatctttaaagcttggtgaaaaggtatttaattatcttaacagccaaagaaatagaaaatccaatcaagtattacagacaacattctacaaatgaatagaataggggtatagacca

SEQ ID NO: 429562 - DNA, 201 bp, Homo sapiens
atggaaccaagttggaaaacactctgtaggatattatccaggaaaacttccccaatctagcaaggcaggccaacattcaaattcaggaaatacagagaackccacaaagatactccttgagaagagcaactccaagacacataattgtcaaattcaccaaagttgaaatgaaggaaaaaatgttaagggcagccagagaga

SEQ ID NO: 429563 - DNA, 201 bp, Homo sapiens
atgtactccaagaatttcttttctcccattctatctagcaaaatcatttattttcaaaattcttccttccttaggacacagtcttccaagaatgttgtcartaatcttaacaggattgaactcagaaacataaaaatgtttaagagataaggaacttcaagttttaacccctgtcaagcatgacacccaagcagctagact

SEQ ID NO: 429564 - DNA, 201 bp, Homo sapiens
gataaattaaatagaataatatgaaattcaacatgaataaagttaagaaatcaacctttacatagaaaataaaagatctaaaattctacttctatggcacrcaggtttttgtttagaaataaactagaaccaaagaatattaacactcaatatgtttacaataaaaagaaggttcttaattgcagctaattttctcttgaa

SEQ ID NO: 429565 - DNA, 201 bp, Homo sapiens
tttatatataaatctacaaaaacaaataatgtatatgcacacaaacatacatggctatgtgctaaggcatccagaaaatccatacacttaggtgattttakaggatttgcaatcgctattgacaagatatacttcttgttctttcaaccatgtgccaagcatgaagagtagttaacttagactgcttgaattcatctctgg

SEQ ID NO: 429566 - DNA, 201 bp, Homo sapiens
tggattttagaaaaggggttcattcaacaaatcttcattatttgattttacaaagtatattaaaatatttgacatatttcatttacctggttatgaagcayaggtcataaaacataaaaatttaaaaggaaatccaatttaaatgttataccatcggctgggcacagtggttcacgcctataatctcagcactttgggagg

SEQ ID NO: 429567 - DNA, 201 bp, Homo sapiens
tgggaggctgaggcaggagaattacttgagccccagaggtcagggctgcagtgagccatgactgcatcactgcactacagccagggtgacagagcaagacmttgtctcaaaaaaaattaattaaattaacaaaaaacaagaaactttaaatatttctattacaaataaataccagtaaacatctgaaataatctgctgtca

SEQ ID NO: 429568 - DNA, 201 bp, Homo sapiens
aattaaaattaaataaaaagaagagtgagtgcaccacctccctacacacaccagcatgcccctccttctaactttccttttaccttccaaagtaataaacyctccatcggtagaattattcaagcagaagctgaaacatcatctgtcaggagtatgctactgaagggcttcctgaagtgactgggaaatgacgctagatta

SEQ ID NO: 429569 - DNA, 201 bp, Homo sapiens
atgaattgtgtaaattcacattattcagaatggacaagattttcttagtacacatgaggcctaaaattaaaaatatgcgattattttaattctgtatgtayattaagagaatttctacaaatccatcacttttgacaagaaaagcatcaaaatacactaactgaaccctttttgttttatatagtatggacctgtgtctag

SEQ ID NO: 429570 - DNA, 201 bp, Homo sapiens
acttgaacccaggaggcagaggttacagtgagccgagattgcaccactgcactccagcctaggcaacagagtgagattctgtctcaaaaaaaaaaaaaaamcaaaacacaacacagacacacacacacacacaaacaaaaacaaacaaacaaacaaagtattcaggcaataactagtgtgatgaataaaatagtacctcac

SEQ ID NO: 429571 - DNA, 201 bp, Homo sapiens
ggtaagaaattcaaggcttcaagaggcacacttgtccaacctgacagaatatcaagtacctctcgatgttaccattattattactagttaatgatatttawtagtaatatagactatatagtaatatgctccaacagacaatacatagtaaactaaataaatatctgcttcaaatcactcatcttatagatggttacagta

SEQ ID NO: 429572 - DNA, 201 bp, Homo sapiens
atgtttaagaatgagtcactttacactagacctcttccactcagatgcagtttcaaagacctctagcttcaaggatcttaatccttaaaaaaaaaaaaaamaaaaaaaaaacaaaaaaaactacagcctgtccagaggtaaatggaaatgttgaacattttataaatctgcagcaaagctaaaagaacagcttcaagctac

SEQ ID NO: 429573 - DNA, 201 bp, Homo sapiens
ccacatcattaatggggaagggttatgtgaaagaaagatgggacataggaacattgtttatccaggacaggtagcgtggtccttccaacctggtttgaacytgaagtgtgttaacttactccatagctttcctcttgcttctggatttgtgtttaactggtttggtaaatcatgtgattcaagcattttaatttgttttct

SEQ ID NO: 429574 - DNA, 201 bp, Homo sapiens
taaatttatagtttgcataaatttaggcagcttccatcatgtgttaatttacagtctttctttaaagtggtaaatgttaccaaattgacatcttttcatamcaatttgacatgaaatttaaaaaatttaagggcttttcctttaaattgtatgtggatgaatctttgaataatgaaccactctatatccttgtatctaaaa

SEQ ID NO: 429575 - DNA, 201 bp, Homo sapiens
tcatccttaaaggccacttattattcctgtggctgacccatcgagaacccagctgcaccctgtcttcctctccatacattcctagggacaggcaaagcacyaaggcaaaacagccataaaatgacggcaaagacagagggactatgttattatggaagacactattgtcatactatggagcccaaagcttattttctaact

SEQ ID NO: 429576 - DNA, 201 bp, Homo sapiens
caattgttcaagtcaaagagaaaatgaaagtaaaaataaaaaatatagactatttatgaagtgatgaaaatgagaagaatgcacgttgaaacgagatgtgsccaaaggcataataagagacaggttcataattttaactgctctcatatttaaacaatcaagtatgacaataaattcagcattggtttcaagaagttagaa

SEQ ID NO: 429577 - DNA, 201 bp, Homo sapiens
tgaaatctccatactgtcacaccattaaataatttcttcctgcaactatcttgagtgaaaattacttcttggtttctaaatccattttctctgcctagacwcaggtcttggtagaattctctttcttccttccattgctcctctcattgcttttaactggaaaattactcagatttgcagagctgaaaatccagttgcaga

SEQ ID NO: 429578 - DNA, 201 bp, Homo sapiens
agtaagggtatctaatgagatcctccaaaaggctcatgcatttagcatcattttactactactgttggtaattcactgtggtctcaagaaaaggtaacaayttgattattgaatagtcactctgccttaaaacctagattctctaaataatgcaatgaattattttaggcgtaagagtacacatattcaaacatataattt

SEQ ID NO: 429579 - DNA, 201 bp, Homo sapiens
cagatttattttctcattctacaaacacttcctgaacacctatatcatgtatgaagcattattttgagtgtttaggacacaatgatgggtatgaaaaattytgccgcactacttacaaaagaactacatcagaactgcatgatgaatcttaatttaaataaggtatcttggctgggcgcggtggctcatgcctgtaatccc

SEQ ID NO: 429580 - DNA, 201 bp, Homo sapiens
aattgttcaagtcaaagagaaaatgaaagtaaaaataaaaaatatagactatttatgaagtgatgaaaatgagaagaatgcacgttgaaacgagatgtggscaaaggcataataagagacaggttcataattttaactgctctcatatttaaacaatcaagtatgacaataaattcagcattggtttcaagaagttagaat

SEQ ID NO: 429581 - DNA, 201 bp, Homo sapiens
gtcacaattgaaaactaccttccagtttgatatgaatcataaataaatgtccctgtctcctctttttccccttgatattctcacaaaaaatattcctcaatttttttagccaattaacattaccttgatcatctgaggcctgcctctcttggtgttcaaagtctcaaagtagaagtcattgttcactaatattctctttcc

SEQ ID NO: 429582 - DNA, 201 bp, Homo sapiens
actgtgtgacttggagagagacgattagcctatctgcatcatttacctcatctgttcacctaccttacaaagaagttgagggagaaaacaaaataatatgyataaaaattcttcctaaatgccctatcttttatcaatataagataaatcagtcaaaaactacaaattatatttccaataggtaggaaattttcacctgga

SEQ ID NO: 429583 - DNA, 201 bp, Homo sapiens
aattctgtatattttcttttaactctgggttccaagctcacaaatgcaacatcacgtctaagttgctctcctcacctccctaaaaggaatccctaatttgrctttcctctgactttaggcaccaagcacctttctcaggtcccctgaacttattcccatcttcacgtgtcctacctggagacacccacctcagctacctct

SEQ ID NO: 429584 - DNA, 201 bp, Homo sapiens
catgctttattatttcttgataagatggtcaaatgatacatacttaaacataaaaaaatttaaagctattcattaaatgtacataaaacaacataataatyctttgaatttagcagtcgtatatttgggtctacttttattatattgccaactgctatggtttgaatgttatatgttgaaaacgatccttaacgcaacagt

SEQ ID NO: 429585 - DNA, 201 bp, Homo sapiens
aattccttttttaaaaaaagtaaacttaaagttgtccaaagtaattttaaatcaccatacttactaagatgtatatatctagaataattctgaactagctatctagaaaaaggtgaaaaattaagagtgaattaaaaatgaaagcaacttggggcgaggtgcagtggctcacgcctgtaatcctagtactttgggaggccc

SEQ ID NO: 429586 - DNA, 201 bp, Homo sapiens
aatccaattaaccatgcctaggccctaacccagaccaacaataaatcagaatctctggggttaagatcacactggtaattttaagaagctcccaggtgatygtaaagagtagccagggttgagaaccagcattataggtcaaacaaattactaagtatttgatctatgtttgggattgaaagttacctctccctattttaa

SEQ ID NO: 429587 - DNA, 201 bp, Homo sapiens
acatgctttattatttcttgataagatggtcaaatgatacatacttaaacataaaaaaatttaaagctattcattaaatgtacataaaacaacataataaytctttgaatttagcagtcgtatatttgggtctacttttattatattgccaactgctatggtttgaatgttatatgttgaaaacgatccttaacgcaacag

SEQ ID NO: 429588 - DNA, 201 bp, Homo sapiens
ccatatgaagataaaagaaagttcaactgtgtgtttctaaggcagtggttttcaattctgactacacattagaattacctaaggaatccaattaaccatgyctaggccctaacccagaccaacaataaatcagaatctctggggttaagatcacactggtaattttaagaagctcccaggtgattgtaaagagtagccagg

SEQ ID NO: 429589 - DNA, 201 bp, Homo sapiens
caccccatgttcttactcataggtgggaactgaacaatgagaacacttggacacaggaaggggaatatcacataccagagtctcttgtggggttgggggargggggagggatagcattaggagatatacctaatgtaaatgatgagttaatgggtgcagcacaccaacatggcacacgtatacatatgtaacaaacctgca

SEQ ID NO: 429590 - DNA, 201 bp, Homo sapiens
aataaatcactttatcaaaattaaaatcatttacctttcatcaggaatacaacattgagcaaaacaaaatccctgcccacgtggtgcatagtctagcagcytggcacccaaccaacaaaatgccaattctaacagcttacaaacgaaagtatatagtttttccatgaaaaattacttccattatctctgttctaggataat

SEQ ID NO: 429591 - DNA, 201 bp, Homo sapiens
aggaagtagaatcacttgaacccaggaggcagaggttacagtgagccgagattgcaccactgcactccagcctaggcaacagagtgagattctgtctcaaaaaaaaaaaaaaaacaaaacacaacacagacacacacacacacacaaacaaaaacaaacaaacaaacaaagtattcaggcaataactagtgtgatgaataa

SEQ ID NO: 429592 - DNA, 201 bp, Homo sapiens
gccgggtgtgatggcgggcacctttagtcccagctacttgggaagctgaggcaggagaatggtgtgaacctgggaggcggggttcgcagtgagccgagatygcgccactgcactccagcctgggtgacaaagcaagactccgtctcaaaaaaaaaaaaaaaagaaaaaaagaaagtcaactgactatatgttttcatctat

SEQ ID NO: 429593 - DNA, 201 bp, Homo sapiens
gccgggtctggtgatgcatgcctgtaatcccagctactcggggagctgaagcaggagaatcacttgaacctgggaggcggaggttatagtgagcggagatygtgcggcttcactccagcctgggcaaaagagtgaaactccatctcaaataaataaataaataaataaataaataaataaataaataagttcttaagatct

SEQ ID NO: 429594 - DNA, 201 bp, Homo sapiens
ggaagtagaatcacttgaacccaggaggcagaggttacagtgagccgagattgcaccactgcactccagcctaggcaacagagtgagattctgtctcaaaaaaaaaaaaaaaacaaaacacaacacagacacacacacacacacaaacaaaaacaaacaaacaaacaaagtattcaggcaataactagtgtgatgaataaa

SEQ ID NO: 429595 - DNA, 201 bp, Homo sapiens
gagaaggaaaaagaagactttatctaccaaggtggttataaacattagagaataattttggaatgcagggtcaagaagaccagaatgtgtgcttttcattyaaggattcacgagcttttattactggtctaatttaatcaaagataacgcattgtttagaaacaagcaattgaaagctggtatgaaaaagaaggaagtgag

SEQ ID NO: 429596 - DNA, 201 bp, Homo sapiens
gaagtagaatcacttgaacccaggaggcagaggttacagtgagccgagattgcaccactgcactccagcctaggcaacagagtgagattctgtctcaaaaaaaaaaaaaaaacaaaacacaacacagacacacacacacacacaaacaaaaacaaacaaacaaacaaagtattcaggcaataactagtgtgatgaataaaa

SEQ ID NO: 429597 - DNA, 201 bp, Homo sapiens
ttagctgaccatatttatcatgtaatttgtttcttaccataaaaccataaaatagacattatttcaattttacaggagaaaaaactgaagcttggtttgtytgtgtgtttgtttatttatttgagatggagtctcactctgtcccccaggctgaagcgcaatggcataatctcagctcactgcaacctccacctcccaggt

SEQ ID NO: 429598 - DNA, 201 bp, Homo sapiens
caatattcagcattcttaaagaaaagaattttaaacccagaatttcatatccagccaaactaagcttcataagtgaaggagaaataaaatcctttacagamaagcaaatgctgagagattctgtcaccaccagacctgccctacaagagctcctgaaggaagcattaaacatggaaaggaacaaccagtaccacccactgc

SEQ ID NO: 429599 - DNA, 201 bp, Homo sapiens
cttgaacccaggaggcagaggttacagtgagccgagattgcaccactgcactccagcctaggcaacagagtgagattctgtctcaaaaaaaaaaaaaaaacaaaacacaacacagacacacacacacacacaaacaaaaacaaacaaacaaacaaagtattcaggcaataactagtgtgatgaataaaatagtacctcaca

SEQ ID NO: 429600 - DNA, 201 bp, Homo sapiens
aatacgagcaattttgtaaacacaagaagcagaataacaaaaatgacctaaatggttcacaaggagagtaagaatattgaataactgtagactttgttaasatacacatatataaatacaaacatatgtggacatatacatatacacacacacacacacacacacacacacgcatatttacaaacatatattctaaaataa

SEQ ID NO: 429601 - DNA, 201 bp, Homo sapiens
ggtagaatcaatattgtgaaaatgaccacactgccaaaagcaatctacaaattcaatgcaattcctatcaaaacactatcatcattcttcacagaactagaaaaaaaaaatcctaaaaatttctatggaacaaaaaaagagcctgcatagccaaagcaagaataagcaaaaagaacaaatctggaggcatcacattacctg

SEQ ID NO: 429602 - DNA, 201 bp, Homo sapiens
caagaagcagaataacaaaaatgacctaaatggttcacaaggagagtaagaatattgaataactgtagactttgttaagatacacatatataaatacaaayatatgtggacatatacatatacacacacacacacacacacacacacacgcatatttacaaacatatattctaaaataacagaataaacaattttaaaaat

SEQ ID NO: 429603 - DNA, 201 bp, Homo sapiens
gacttcaaattatactacatggctataccaaaacagcatggtactggtataaaaataggcatgtagaaaaaaggaacagaatagagaacccagaaataaasccaaatatttacagccaactgatgtttgacaaagcaaacaaaaacatgaagtggggaaaggataccctattcaacaaaaggtgttggggtaattggaaag

SEQ ID NO: 429604 - DNA, 201 bp, Homo sapiens
gcaaatcaataaacataatccatcacataagtagaacgaatgacaaaaaccacatgattatctcaatagatgtggaaaaggccttcgataaaattcaacamctcttcatgataaaaacactcaataaactaggtactgatggcacatctctcaaaataataagaactatttatgacaaacccatagccaatatcatatcga

SEQ ID NO: 429605 - DNA, 201 bp, Homo sapiens
tgacctaaatggttcacaaggagagtaagaatattgaataactgtagactttgttaagatacacatatataaatacaaacatatgtggacatatacatatmcacacacacacacacacacacacacacgcatatttacaaacatatattctaaaataacagaataaacaattttaaaaataactaagctccctgctagtgg

SEQ ID NO: 429606 - DNA, 201 bp, Homo sapiens
tttaacttgatttcgatgagcatgtagtggtaaatttaactccagccactttcactagtttgctgacagtagttaagagttaaaagtcctagacaaccaarctcttgctccttatttgtaactgcatattcttacatatttttcctttctatattgagagctagattaatataccttactacatacttaacattaaaaaat

SEQ ID NO: 429607 - DNA, 201 bp, Homo sapiens
gggaggggctgccctgaagacctctgatatgccctggagacattttcccccattgtcttggggattaacactcagctacttattacttgtgcaaatttctrcagctgatttgaatttcacttcaggaaatgggattttcttttctatctcattgtcaggctgcaagttttccaaacttttattctgtttcccttttgaaac

SEQ ID NO: 429608 - DNA, 201 bp, Homo sapiens
gacctaaatggttcacaaggagagtaagaatattgaataactgtagactttgttaagatacacatatataaatacaaacatatgtggacatatacatatayacacacacacacacacacacacacacgcatatttacaaacatatattctaaaataacagaataaacaattttaaaaataactaagctccctgctagtgga

SEQ ID NO: 429609 - DNA, 201 bp, Homo sapiens
aggattgtgatattttcctgttggacaaagccttttaccattatataatgtccctctttgtcttttttttaattgctgttgctttaaagttttgtcttttrtaagaatagctactcctcgcttttggtgtccatttgcatgaaatgcctttttctgcttctttaagtttatgtgagtctttatgtgttaggtgagtctctt

SEQ ID NO: 429610 - DNA, 201 bp, Homo sapiens
gccatagcagcacaaaacaaactaagacaccaccttctgcttctagcctcaacctgatatatcagagccaagtatgagggttaatcaaaatcttcgcctaagatagatagatagatagatagatagatagatagatagatagatagatagatagacagacagacaaatagcttgagattatgaaagctaagacaaaacagt

SEQ ID NO: 429611 - DNA, 201 bp, Homo sapiens
ccaaaactggaagcattccctttgaaaaccagcacaagacaaggatgccctctctcaccactcctattcaacatagtattggaagttctggccaggacaawcaggcaagagaaagaaataaagggtcttcaaataggaagagaggaagtcaaattgtctctgtttgcagatgacatgattatatatttagaaaaccccatc

SEQ ID NO: 429612 - DNA, 201 bp, Homo sapiens
ctaagcccagcactggttctttcaggacctcatctctgattccaaatctgccatgaccttgtgcacagctctaagttactattacatattttaaatggctmattttaaatggctaaataggtaatgttaacctactttaccagaaataaatgcaagtctctatctttgtatctctgtaactcctttccccttcctgatgtg

SEQ ID NO: 429613 - DNA, 201 bp, Homo sapiens
gttggacaaagccttttaccattatataatgtccctctttgtcttttttttaattgctgttgctttaaagttttgtcttttgtaagaatagctactcctcrcttttggtgtccatttgcatgaaatgcctttttctgcttctttaagtttatgtgagtctttatgtgttaggtgagtctcttgaaggcagcagatagttgg

SEQ ID NO: 429614 - DNA, 201 bp, Homo sapiens
ccatagcagcacaaaacaaactaagacaccaccttctgcttctagcctcaacctgatatatcagagccaagtatgagggttaatcaaaatcttcgcctaagatagatagatagatagatagatagatagatagatagatagatagatagatagacagacagacaaatagcttgagattatgaaagctaagacaaaacagtg

SEQ ID NO: 429615 - DNA, 201 bp, Homo sapiens
gaaaatataaccttaccaaaattgactccaaaaaatggttttaaagtagagtgctatagtcttcaaagaggttgaatgaaaaatttaaaactcataatgcaaaaaaaaaaaagtcctaaatggtcttagaggaaactgaatgaagcactcaaagaacaaaccaatctagtattacaaaaactgcttcagaaaacctaagag

SEQ ID NO: 429616 - DNA, 201 bp, Homo sapiens
tcactttggtatttgagccgtacttggtttcttacacattttaggatcttttttctatttctgtgaaaaatgacattgatatttagacagggattgtactsaatcagtagactgctctggggagtgtggtcattttaacaacgttaattctcctaatccatgagcatgggctctttgttttgtttgtgtcctcttcaattt

SEQ ID NO: 429617 - DNA, 201 bp, Homo sapiens
catagcagcacaaaacaaactaagacaccaccttctgcttctagcctcaacctgatatatcagagccaagtatgagggttaatcaaaatcttcgcctaagatagatagatagatagatagatagatagatagatagatagatagatagatagacagacagacaaatagcttgagattatgaaagctaagacaaaacagtga

SEQ ID NO: 429618 - DNA, 201 bp, Homo sapiens
aaatttgcagatatttaaacatgattttaaaccagtttgtcaggaatattcacctaaagaaatgatcacaattttctaaatcagcagttggcaaacttttatttatttatttatttatttatttatttatttatttatttatttattgagagacagtcttgctctgtcacccaggctggagtgcagtggtgcgatcttggc

SEQ ID NO: 429619 - DNA, 201 bp, Homo sapiens
atagcagcacaaaacaaactaagacaccaccttctgcttctagcctcaacctgatatatcagagccaagtatgagggttaatcaaaatcttcgcctaagatagatagatagatagatagatagatagatagatagatagatagatagatagacagacagacaaatagcttgagattatgaaagctaagacaaaacagtgat

SEQ ID NO: 429620 - DNA, 201 bp, Homo sapiens
aatgttttaccatttggtaacatttcccaccagtatgtttagaattcttaattatttaagttgttagatcacttttggagggaaaaaatatatacacaaamacacacacacacacacacacacacaccccctacacagtctccccatacttagtgaaaggttttattagtacactgtttaaacaactttaacattacttga

SEQ ID NO: 429621 - DNA, 201 bp, Homo sapiens
aaaaacttaaaccacacaaagagcctaggatgtgactttttaatgacccaaatgccttgagttaaggataataatccactttgggatccagaaacagagtrttcatgcactttacaagattataccttatttcatcttcagagaatattattccacccaaccagatatagcagcccatctggaaaggaaatttattacatg

SEQ ID NO: 429622 - DNA, 201 bp, Homo sapiens
ctgaagaactcccttgagtagtaaacttatagagagctgaagagataaaaatactgaaccagataggaaaagataaaactaaattaaagtaaaatacatgsaggggttgtttctcttattctataatataaaaagaaattaatattaattattagctatgagaaaacaaatgacttatgattatgagaaaaagtcattttt

SEQ ID NO: 429623 - DNA, 201 bp, Homo sapiens
acctgatatatcagagccaagtatgagggttaatcaaaatcttcgcctaagatagatagatagatagatagatagatagatagatagatagatagatagayagacagacagacaaatagcttgagattatgaaagctaagacaaaacagtgataatctggatgctctgctgtgtactagaattatccaaggtgcagactgc

SEQ ID NO: 429624 - DNA, 201 bp, Homo sapiens
cccaccagtatgtttagaattcttaattatttaagttgttagatcacttttggagggaaaaaatatatacacaaacacacacacacacacacacacacacaccccctacacagtctccccatacttagtgaaaggttttattagtacactgtttaaacaactttaacattacttgaaggcaaagtaccttaaaaggttctt

SEQ ID NO: 429625 - DNA, 201 bp, Homo sapiens
cttgatgctaacaagatctcccaagtgattcatatgcatattaaagtttaagaagcactgacaaaactgttataaaggaagcctccgcaaagacaaaaagytggatctcaacagaactattccctgaaaaccatcctgaacaaaaaaacttcatatatccatgaatgccctaactatgactcggagcccccaaaaagggag

SEQ ID NO: 429626 - DNA, 201 bp, Homo sapiens
ggagggccgatcacttgaggtcaggggcttgaaaccagtctggccaacatggcgaaaccccatctctactaaaaatacaacaattaactgggcgtggtggygtgcacctcgggaggctgtggcagaattgcttgaacctgggaggcagaggttgcagtgagctaaaatcatgccattgcactcaagcctgggtgacataat

SEQ ID NO: 429627 - DNA, 201 bp, Homo sapiens
taagccttcaataaatactttaattggatctaataaggtattaccaccctctgcagcaaaaaaaatcttaattggagaataacctaaacactatggccacyaccatgaccagtagaaagcagctctcaaattttccaagtgaatccacttgcatatttaacaatggaagcagcaagaaagagtaattgtgttattcattac

SEQ ID NO: 429628 - DNA, 201 bp, Homo sapiens
aaacaggatcaaatggagtactagttaggttattactccaaaagctgttaatctgcaagcctcgcctgacccaaagtctagttacataaaatatttctaargctaacccctgtatcttcaacatcattcatttcaccaattatttgtagcatacttaacgttaatacattgtcttgtgtagatttaaagtaccaatatctg

SEQ ID NO: 429629 - DNA, 201 bp, Homo sapiens
cacaattgctacaaagagaataaactacctacgaatacaacttaaaggaatgtgaaggacctcttcaaggagaactacaaaccactgctcaaggaaataaragaggacacaaacaaatggaaaaacattccatactcatggataggaagaatcaacattgtgaaaatggccatactgcccaaagtaatttatagattcaat

SEQ ID NO: 429630 - DNA, 201 bp, Homo sapiens
cagggtgatctggctaagtagacttctaaacacagtggtgaaggtgcagcctgatttcttcttgctgcttgtagtaaaatgtaaaaagaatagagttcagytgagagtactattaaacagaaaggaattctttctgtttaaacagaaacttgatggttttcaaagtcttaaaattaagtctacagttaagaaatggcttcc

SEQ ID NO: 429631 - DNA, 201 bp, Homo sapiens
atgccatgcagagtccctaaaagcatttgtctttcagagaatgggagtttacaaagaagattagagagaaccagcactaaaaagaaagagaggagccagamgctctaggaaacctctatcttcagtccttttggaggactcagtgggagtctaggccctctcagaatactaagagatttttctccaagtgatcctggtgag

SEQ ID NO: 429632 - DNA, 201 bp, Homo sapiens
agttctttcctctgttgctttgctgcctcccttccaaccaaattagcttcagcatcttctaacagttggctttgtggtgaagggatttcggactttggcaytgccttactttcagcacaaggttcttcaggaccatctttgtcaatgctgtcgggagtctgttgattagatgtggagtcctcgggttccttgctctgctgg

SEQ ID NO: 429633 - DNA, 201 bp, Homo sapiens
tttttgacaagatcctctaactctctaagatccagtctccccatcagtaacatggtagttaccaggtcccatgacttggcaacacttaatagtcagatcayctaaatcctaaaatgttccaggtgctctcaacctgtcttcagattaatcttcctctaggctgccagtgtacacctactgcaaatctacttaatcggccat

SEQ ID NO: 429634 - DNA, 201 bp, Homo sapiens
ctctctcctactagactctgagctcatctgaagacagactatccccaagttcttacacaaattctgccacagagtagacacttgacaaatgtttgctgaaygagaaagcatagagagagggtgaggacgctaaagaccacagagatcttccagttgttgaacttccacttactatgtaagaaattagaggtacagaagatt

SEQ ID NO: 429635 - DNA, 201 bp, Homo sapiens
acagagggttccaaaggtacataatttcacctgctagcaacaaaaagaatagaaaactgtgaattctcaagatgatctcaaagagttttgaagatgactaygatagtctaaataagagttaagagttattttacacttaatcagtttgtttcacattcttttgcaatgagaaaataactaggaaatctggccatgggtaat

SEQ ID NO: 429636 - DNA, 201 bp, Homo sapiens
caggcaaaatcattctacagaaggcaacattaatcttcataactattttgtacggatacgctaacagtctagcttaacctgcaaaactgacagctaagccyagcactggttctttcaggacctcatctctgattccaaatctgccatgaccttgtgcacagctctaagttactattacatattttaaatggctaattttaa

SEQ ID NO: 429637 - DNA, 201 bp, Homo sapiens
ctttatcaggatattctttaaaaacctaagaacagctaaggcaccagagttgacaaaagattatttataaaaataattaattactgacatctcagcagcarcacatttttgtggtttataaaatttggagacaacaaactacccagaaacataccatgagttaatgtgaggatggattagacataaacaaatattttttaa

SEQ ID NO: 429638 - DNA, 201 bp, Homo sapiens
caaaaagtagattcaatacatttctcatagaatacttttaggcacatagtaggcattgaaatatttataaaatagtcaacaatattgattaaaaaaataargcaaaatgaccaccctctgacatatcaatacttgggctccactcaaatacattggctgtaccaatacaaatctgttctacgatttgtgcttaattcacga

SEQ ID NO: 429639 - DNA, 201 bp, Homo sapiens
ctacttttcctctagctctaagtagtaatgcctttggtagcaatgtggtagtagtattagagatttgctttaaaggaaaacaaaaaacaaaaagtcttctwgctaattccagactcatctagcttaaatactctgccagattaagcttactcatgatgaggttgggagtcaaagcttcagggttttttttttctttttttt

SEQ ID NO: 429640 - DNA, 201 bp, Homo sapiens
atccatcaactaatatcaaaatgaataaactaaatgtggtattatcaagtcaatggaatattattttgcaataaaaatgaattaagtactgataaatgctrcaacatgaatgaaccttgaaaacgtttctctagttaaaaaaaaaaaagccagtcacaaaagaccacatactgtattccatttacatgaaatggccaggag

SEQ ID NO: 429641 - DNA, 201 bp, Homo sapiens
atatcccttcctcacaccttatacaaaattaactaaaatggatcatagacctaaatataagaaagactaaaaactacaaaactcttagaggaagatgaacragtaaatctttatgatctcagaatatgtaaagtcttctaggatatgagatcaaagtataagtgacaaaaaaaactagatgaattgaacttcatcaaaatt

SEQ ID NO: 429642 - DNA, 201 bp, Homo sapiens
aactgaagaaagtgaaaaatattaagaaatcagaagagcagaaaaggaatcacttacagagaaaataaggataaaaggataagaccacatatatagtgatkacttttgaaacattatcttaggttttaacttgattgttcagtttgaagaaaatcacaaaagtaaatagcatcattatttccccctacaatcagtagctca

SEQ ID NO: 429643 - DNA, 201 bp, Homo sapiens
cactgtttcctcgaaattaagtgaatattttatatatcattaatgcagacatatatatttattcacattaaataacatattatttgccatgacatagcacrtcagtccactgtgataatgttaaattcctatttctctactcaatatattagctattcctttcaacttttcatgccctaaaaatttattttgtgtaccttc

SEQ ID NO: 429644 - DNA, 201 bp, Homo sapiens
aaaaaagttatccatcatgatcaagttggcttcatccctgggatgcaaggctggttcaacatatgcaaatcaataaacataatccatcacataagtagaaygaatgacaaaaaccacatgattatctcaatagatgtggaaaaggccttcgataaaattcaacacctcttcatgataaaaacactcaataaactaggtact

SEQ ID NO: 429645 - DNA, 201 bp, Homo sapiens
caatccatattgagtgattccaacttttcacatcattacatattaatgtaatctacttccctaaaatttctatatactcagtgatcctagtcctgcctttyataagaaggtggaataattttatgctcattgtcagaaatcttttctccagatcaggttccctagaattgagaagtccttctctagacttctcatgcattc

SEQ ID NO: 429646 - DNA, 201 bp, Homo sapiens
tggtttagttcttaaacatttggataaccctctgtttgctagtactagactaatgcaatcagcagggacagagaaactatataataaaaaatgatagtccrtggaacaaaaactatttaaggaatatgaatgaaggaaggaaaccactgaactgtgtaaatggatgggaagaatatacagtaattaaaaattgactaaact

SEQ ID NO: 429647 - DNA, 201 bp, Homo sapiens
gataatccccatgcatgcattaataattgggaatgtaattttataatctgaactttaaagacctctgttaagattaaagggatttcttgtccttcatatgagacatgacaaggaatgagagttgcattttttaaattctttgtttctctatttgtgtatccaaataatttcataaaacattttataactactagaagggaa

SEQ ID NO: 429648 - DNA, 201 bp, Homo sapiens
ttcttatcagaagtgagtgagtctgacagaaggacagaaatgtggagttttcagactagcaatgtgaacctgtggagaccacagcacctcataaacctcarccctctcttgggtttgcaacctgtattcccttgggtttttaccaagttcatggggacacatgggaaggatgataaagggaagatggaagaaccaaggaca

SEQ ID NO: 429649 - DNA, 201 bp, Homo sapiens
ctctttgttttgtttgtgtcctcttcaatttttttcatcagtgtttgtagttttccttgtgaaggtctttcatctccttggttaaacttattcctaggtattttttttttaactattgtaaatttggttgtcttcttgtgttctttctcagctagttcattatttttgtatagaaacagcacttattttctgtatgctgat

SEQ ID NO: 429650 - DNA, 201 bp, Homo sapiens
tcctgccttggcatcccaaagtgctaggatcacagctgtgagccactgccttgggcctatgttttcttcaaaatgcattaacattctgattttctgtattyaggcagttatccacctggaaattttctaaaattataatatgtgttggcaatctaattttattttttttcaaatgtataaacaactggccaaacaacattt

SEQ ID NO: 429651 - DNA, 201 bp, Homo sapiens
agttgtaaattaaagtgtctactgtgtgaaatgacactgggtgcaaactaattaaacacagtttatggtctatactccctaacatcagattaggttaccartttaattgctcagggaccaagagaagaaaacactttttattgccctctttgcagctcttcctttatgatttgagcgtcaaggaactgtttccttgctaag

SEQ ID NO: 429652 - DNA, 201 bp, Homo sapiens
ccatagtattttagaaagatatgaagacaagtgcttgtttttgtatctttctaaaatactatgatttgtaattttaaattctattttcatgaactaattawaataaaggtgaaaatatttaaaactaaaagcaaagttttactattcaggtaaaattgtcattgtaattacatttatttgcaggttaaactatagaaaatt

SEQ ID NO: 429653 - DNA, 201 bp, Homo sapiens
tcattttaacttgattacattgcaaagaccctatttccagataagaatacattgaaaggtaccagaggttaggacttcaacataacttcttgaggtacacrattcaatccataacacataccttattacaatggctgggacctccattacaatgctgaatgaagtggacgaaagtaggcatccttgtcttgttcttattct

SEQ ID NO: 429654 - DNA, 201 bp, Homo sapiens
aaggctttcagcttttccccactcaatacaatgttagctgtgagtttgtcatatgtggcctttattatgttgaggtattgatatggtttggctgtgtcccyacccaaatctcatcttcaattgttacgcccacaattcccacatgtcatgggaggaacctggtgggaagtgattgaattatggggacaggtctttcctgtg

SEQ ID NO: 429655 - DNA, 201 bp, Homo sapiens
cttccctcttctagcttctggttgtcctagaagttccttggcttgagggaatataattccagtatctgtctccatcttcatatggctgtcttcccactgcrtctcttctcttctaataaggacaccagtcatattggattaggacccaccctaaatcagcatggcctcattttaacttgattacattgcaaagaccctatt

SEQ ID NO: 429656 - DNA, 201 bp, Homo sapiens
ccacttaatcatggtgtattatctttttaatgtactgttggacttggtttgctagtatttcgctgagaaattttgcctctgtgttcattgggaatattggyctgcagttttccttttggttctgtccttatctccttttggtatcagggtaatgcttgcctcatagaaagaatcagggagaagttcctctgcttcaatttt

SEQ ID NO: 429657 - DNA, 201 bp, Homo sapiens
cagaagatgataacgagagccttcttggacatttaatgattgttggcaagaaatgtgctgctcatctgggcctgagtaagggttactgaatgaatgggtgktgaatgaacattcagatggtggacagtctgtctatcatgttcatcttcatgttcttggagtcagcagatgaatcagcctcctggttaagcatgttttggg

SEQ ID NO: 429658 - DNA, 201 bp, Homo sapiens
ccaccagtatgtttagaattcttaattatttaagttgttagatcacttttggagggaaaaaatatatacacaaacacacacacacacacacacacacacaccccctacacagtctccccatacttagtgaaaggttttattagtacactgtttaaacaactttaacattacttgaaggcaaagtaccttaaaaggttcttt

SEQ ID NO: 429659 - DNA, 201 bp, Homo sapiens
agaatcggtttgaacccaggaggtgaaggttgcagtgagctgagatagtgccactgcactccagcctggaggacagagtgagactgtctctgcctcaaagaaaaaaaaaaaaaaaaaaaagggtgtggctgtagagaatgatatttcctagtcacctaaattgcttgtgcatgataggcattattatcaagttcctatcca

SEQ ID NO: 429660 - DNA, 201 bp, Homo sapiens
taaaaactctcaatgaattaggtattgttgggacatatctcaaaataataagagctatttatgacaaacccacagccaatatcatactgaatggcccaaawctggaagccttccctttgaaaactggcacaagacagggatgccctctctcaccactcctattcaacatagtgttggaagttctggccagggcaatcaggc

SEQ ID NO: 429661 - DNA, 201 bp, Homo sapiens
tcagaatgattttcaggccaggcgcagtggctcacttctgtaatcccagcactgtggaaagccaaggcgggtggatcacgaggtcaagagatggagaccaycctggccaacatggtgaaaccccgtctctactaaaaatacaaaaattagccccacgtggtggcacgcacctgtagtcccagctactcaggaaggtgaggc

SEQ ID NO: 429662 - DNA, 201 bp, Homo sapiens
ataattacagcactgaaatcttcctacatgatgataggacgctaaatatgctgtgtatatatatgtcatatatatacatatatatgacactaaatatgtgwatatatatatgcagagatgtgtgtatgcctaaattgtcagagaaaatctatatctgtgtgtgcttatttatagacaaagttaattcattcctgacttttt

SEQ ID NO: 429663 - DNA, 201 bp, Homo sapiens
taaaagcattcctatttctccatatcctctccagcatctgttgtttcctgactttttaatgattgtcattctaactggtatgagatggtatctcattgtcrttttgattcacatttctccaatgaccagtgatgataagctttttttcatatgtttgttggccacataaatttcttgttttgaaaagtgtctgttcatatc

SEQ ID NO: 429664 - DNA, 201 bp, Homo sapiens
gcactcccaaccatctgtctctcaggtatgtgacagcagtcacacgggagaatgcatagtggaatgaagatgggttcaaaccctgttacctctcctgaccaaaaaaaaaaaaaaaaaatgcttcaggtagattggaatgcccagcaccatctttgtaaatgaagagaggcatatgaaaaagatgtatcatacttattattg

SEQ ID NO: 429665 - DNA, 201 bp, Homo sapiens
agcactgagtcaggtcaaataaaaataatctttgtgagtggggttatccagacaatcaccacacaggtcaaacaatgacaattcaatgaaaatgggatttytaaggcaatccaatactataagccccctgaagtggctgccaaggtggtggttttcaccgtgatttcaggctgttggtttcaaggctatcatggcactggg

SEQ ID NO: 429666 - DNA, 201 bp, Homo sapiens
ctcctgtaatcccagcactttgggaggccgaggtgggtagatcacctgaggtcaggagtttgagaccagcctggccaacatggtgaaaccccgtctctackaaaaaaagaaaaattaagccaggcatggtggtgcgtgcctgtaattccagctactcaggaggctgaggtgggagaatcgcttgaactcgggagacggaag

SEQ ID NO: 429667 - DNA, 201 bp, Homo sapiens
gaattgaacagtgagaacacatggacacaggaaggggaacatcacactctggggactgatgtggggtggggggaggggggagggatagctttaggagatayacctaatgctaaatgatgagttaatgggtacagcacaccagcatggcacatgtatacatatgtaactaacctgcacgttgtgcacatgtaccctaaaact

SEQ ID NO: 429668 - DNA, 201 bp, Homo sapiens
tgaattatatataaagggctttaaaataattttatttttaattaatttaaatataatttaataaaattataaataatattataaattaataaaattatatwtttttaggaatctatcctaaataataggtaattctagacgctaagcaagaaactgtatataatacagatatgaaaatcatagatttcgggcccagccctt

SEQ ID NO: 429669 - DNA, 201 bp, Homo sapiens
agttaatgggtacagcacaccagcatggcacatgtatacatatgtaactaacctgcacgttgtgcacatgtaccctaaaacttaaaagtataattaaaaaraaaaaaaacagagtagaagatactgttttgtaagggaaacttagatctatgaagaaaagctccatttgtaagagtatctccctctgtggcaggaaatgaa

SEQ ID NO: 429670 - DNA, 201 bp, Homo sapiens
tttgggagggtgaggcaagagggtcacttgagcccaggagttcaagaccagcctagacaatatagcaagaccctgaatctacaaaaaaaaaaaaaaaaaawgtaattatccaggcactgtggcacacacctgtagtcccagctacttgggaggctggggcaggaagatcccttgtgcgcaggagttcaaggctgcagtgag

SEQ ID NO: 429671 - DNA, 201 bp, Homo sapiens
acttgaacctgggaggcagaggttggggtgagccaagatcgcgccattgcactccagcctgggcaacaagagagaaactccgtctcaaaaaaaacaacaamaaaaaaaaaaacaaaaaaaagcaatgtagtctttgacacaggaattatacttctaggacttcatcctatatatttacttcacaagtacaaaatcctaata

SEQ ID NO: 429672 - DNA, 201 bp, Homo sapiens
acagataatttcccaaataaactttatatcataagcccttatcagtctcttttaaagacagaaagtgattaactctgttaatcaatgctggctaaaaaaawtacaggagcactaaccattttgtaaccaaacctgaacacacaatccctgatatagagacataaacttaataatgacccaacatttagagagaaaagagaa

SEQ ID NO: 429673 - DNA, 201 bp, Homo sapiens
tgcctttaatctcagcacttcgggaggccaaggcaggagggtcgcttgaacccaggagttcaagacaagcctagacaacatagtgagacttcatctctacaaaaaaaaaaaaaataataacaggcatggtggcgcttgcctgtagtcctagctgcatgggaggctgaggcaggagaattacttgagccccagaggtcaggg

SEQ ID NO: 429674 - DNA, 201 bp, Homo sapiens
attatattatataacttatattattatatataataattattatatatataataattattatatataataattataaatataatatataaatatatatattwaatatatatatttaatataatattatatattatattatatgtaataaatatacatataatatattatatattatattacataatatataatatgtaatat

SEQ ID NO: 429675 - DNA, 201 bp, Homo sapiens
aaaaaaaaaaaaaaaaaagttccaaacacaatttggagatacctatcaaaatctcacacacacacaaacacatacacacactcacaaatacaagctacacmtaagtatatttgaaagcaatactttagcccaagttttggtcgcttttgtgaatgccctttaaaaagaaaccagcagttcatcgatctttaagaaatcatc

SEQ ID NO: 429676 - DNA, 201 bp, Homo sapiens
gcttatgaccagggctgagaactcaccctaaatcacgagcttccctgttgagaaagcaagcagactcacacttttttggcattttagggagcctgcagcgstgatccagttccttcaaaaggtctgtggattctcttggctttcctggtattttcctgtggtagttcttggggcaaaagttcacaatgtgagtctccacat

SEQ ID NO: 429677 - DNA, 201 bp, Homo sapiens
tcacttaaaccgtctccaaactcggctcctggcccagcacgcatgcatggcccatgcagacaaacaagaaaggctttggagtgtggtgcctgtttttttckttttttgtaaagcatcgacaatctccttttaccctgaccattctttttaaagccacaaacaccctcccctctcccctacacacaccccccattccctccc

SEQ ID NO: 429678 - DNA, 201 bp, Homo sapiens
gcagctgaaacccctctacccaggtaaaagataatatccataagctacttttgcaaggagaggtttctgagggataccccatttgagagcattaacaggcyggatgctctccttaacaaccaaaaatccacataatgactcaaactctgaattcagcagttaatgtacaaaaaggaggaaaaggaaatgtaaagattaata

SEQ ID NO: 429679 - DNA, 201 bp, Homo sapiens
tgaggcaggagaattgcttgaacccaggagtcagaggttgcagggaaccgagattgtgccattgcactccagcctgggcggcagagcgagactctgtctcaaaaaaaaaaaaaaaagaaaagaaatactacctaatcttaatgatactcaacactgataattatacaaaagaaaagaaatactacctaatcttaatgatac

SEQ ID NO: 429680 - DNA, 201 bp, Homo sapiens
gaaacagcactggaagacgggatggagtagagtgacagaggagagagaatgaatttacgaatgattttacatttcttttgtatacttttttgtactttccraattctgtataatgagcaagtattactttctaatggagatggagaagggcataaaaagtcctcctaagtttctccatattacctggagaatatagttcaa

SEQ ID NO: 429681 - DNA, 201 bp, Homo sapiens
gaagccgtgagggactgtgctgtgaggaatggtgcattctggcccagatactacacttttcccacggtctttgcaacctttagaccaggagattccctccrgtgcctatgccaccagggccctgggtttcaagcacaaaactgggtggctgtttaggcagacaccaagctagctgcaggagtattttttcataccccggtg

SEQ ID NO: 429682 - DNA, 201 bp, Homo sapiens
gctgacacctgtgtctcctgactgggaaacacctcacagcagggaccaatagacacctcacacaggagagctccggctggcatctggagggtgcccctctrggacaaagcttccagagcaaggaacaggcagcaatctttgctgatctgcagcctccactggtgatacccaggtaaactgggtctggagtagacctccagc

SEQ ID NO: 429683 - DNA, 201 bp, Homo sapiens
ttcatgtcctttgtagggacatggatgaagctggaaaccatcattctgagcaaactatagcaaggatggaaaaccaaacactgcatgttcttgctcatagrtgggaattgaacgatgagaactcttgggcacagggcggggaacatcacacactgaggcctgtagtggggtggggggttgggggagggatagcattaggag

SEQ ID NO: 429684 - DNA, 201 bp, Homo sapiens
ctaatattattattcatgatatgattttgaaaagcacaaaacattcaatacaaccaaaagacacccaagttatctgaaaaaataaaccacccctcattaargttcaagtttcccttttaaggcaaatgtgtcatttatttataagttttgttttttttattaaccagtcttgttttcttataaagcagaggaaggagaaga

SEQ ID NO: 429685 - DNA, 201 bp, Homo sapiens
atgattttgaaaagcacaaaacattcaatacaaccaaaagacacccaagttatctgaaaaaataaaccacccctcattaaggttcaagtttcccttttaargcaaatgtgtcatttatttataagttttgttttttttattaaccagtcttgttttcttataaagcagaggaaggagaagagaacatttaaaagagtcagg

SEQ ID NO: 429686 - DNA, 201 bp, Homo sapiens
attaatttttacatgcctgttatcaataaataaagtttgatatatcttaaatgaactaacaaaaatctgatgaacatcttgctcaaattcttcacgcagcytcaaataattgagaaaattgcttgggataatatacttctgaggagatttaaaatatgaaatatttaggagaatcaaattcatactgttaacattttataa

SEQ ID NO: 429687 - DNA, 201 bp, Homo sapiens
cacatgtcatgggaggaacctggtgggaagtgattgaattatggggacaggtctttcctgtgctgttcttgtgatagtgaatgggtctcacgagataagayggttttaaaaatgggagtttccctacataagcactctctctttgcctgctgtcatccatgtaagatgtaagatgtgacttgctcctccttgccttccacc

SEQ ID NO: 429688 - DNA, 201 bp, Homo sapiens
gtataaaatgccttatataaccctccttgttcacacttttgggaagataacatgcagtattacctaactggtggtccactcactgagtaggtaggtgtgaraatgaaatgaagcagcacttggtagcaatattcaaatttcacagaaatccttgaatcacatttacaaacctacaagtgactaagttcctgttatgcttca

SEQ ID NO: 429689 - DNA, 201 bp, Homo sapiens
ttgtgccctaaaaaaatttttaaattgttatattgcattaaaaattttttttcattcatttagagggtatatatgcagatttgttacatggatatattgcrtagtagtggggtttgagcttctagcatactcatcaccttaacaatgaacattgtgcccaacagataatttttcaacattcatcctcctccagttctcctc

SEQ ID NO: 429690 - DNA, 201 bp, Homo sapiens
ttaatgttaattgttttccagatggatatccagttaatatggtgccatttctgaaaagattttccttttcccttttaattaccttggtaatgtcaagaacyatgaagggtctgagattttaccctacttgcaagctacaagttagcccgcaatggcttccctcatgccagcagaagacccaagacacctgaatcagagaca

SEQ ID NO: 429691 - DNA, 201 bp, Homo sapiens
tgggattacaggcgcctgccaccacacccaactaatttttgtactttcagtagagatggagtttcaccatgttagccaggctggtctcgaactcctaaccycaagtgatctgcctgccttggcctcccaaagtgctaggattacaggcgtgagccaccacgcccagcctattttttctaagtagtatggttttaagtttta

SEQ ID NO: 429692 - DNA, 201 bp, Homo sapiens
aggatgggggctggtggctaggggagggatagcagtaggagaaatacctaatgtagatgacgggttgatgggtgcagcaaaccaccatggcacatgtatacctatgtaacaaacctgcacgtgctgcacatgtaccctagaacttaaagtataatacaaataaataaataaataacaacaaaaatgtagctcttttctatg

SEQ ID NO: 429693 - DNA, 201 bp, Homo sapiens
atagcactaaatgcccacaagagaaagcaggaaagatctaaaatcgacaccctaacatcacaattaaaagaactagagaaggccgggcatggtggctcackcctgtaatcccaacactttgggaggccaaggcgggcagatcacagggtcaggagattaacaccctcctggctaacacggtgaaactccaactctaataaa

SEQ ID NO: 429694 - DNA, 201 bp, Homo sapiens
agttactcctcaagaagagcaactgcaagacacataatcgtcagattcaccaaggttgaaataaaggaaaaaatgttaagggcagccagagagaaatgtcrggttacccacaaaggcaagcccatcaggctaacagtgaatctctctgcagaaaccctacaagccagaagagagtgggggccaatattcaacattcttaaa

SEQ ID NO: 429695 - DNA, 201 bp, Homo sapiens
aattatgttgattatagcagaaatgggatagtgacaaagtaagctttctttaaagatttttaaacatgtctcacagacttaaaagaggccaaatgtaaccyaggtgtgtcctctcttcctctccttccaatagcttttttttggccgtcatactgttttaaaataaatttctttacaaaataaccagtgattgtgctgtca

SEQ ID NO: 429696 - DNA, 201 bp, Homo sapiens
ttaaaagctgaataataacaaacttccaggaacggtactttctatcttatctacatcattaagtctcttttataaaagtaatttctgaaaataaaaaaatrcggaaaaacttcctaatttatattgaagcaaatataatctttgtggcagttaaaatttttttgttgttgttataataggtttttggggaacaggtggtgt

SEQ ID NO: 429697 - DNA, 201 bp, Homo sapiens
ctgaaaagcaaagcccaagaacttcgtgaattatacacaagtatcaatagccaaattgatcaaactgaagaaagggtatcaagagattgaagatcaacttratgaaataaagcatgaagacaatattagagaaaaaggaatgaaaaggaatgaataaagcctccaagaaatatgggactatgtgaaaagaccaaatctatg

SEQ ID NO: 429698 - DNA, 201 bp, Homo sapiens
ttttgagattttttaaatagacaatctcatcatatgtgaataacagtttcatttctttacaatttatttctttaatttcttttacttgccttccagtacartgtcaaatataaaaagtgacagattttccaatgttaaaccatacttgcattcctggctaaacccaacctagctatgatatattatctcttttatatgttg

SEQ ID NO: 429699 - DNA, 201 bp, Homo sapiens
tggccatcagctgctgtttaatagagggcccaactacccctttcccacacgaggttcccagtctcctctcccagaatccctgaataagccacctgccctawattccccacaactccacaactaaagagcgaaaccccaggaggaaagggcaggcccagtatgctgttccagtcctgaatccttggtgcctatgccacatag

SEQ ID NO: 429700 - DNA, 201 bp, Homo sapiens
aaaaggctatatatcataatggttgccaaagtgatttgaagcagacagattataaaatagaccatcacttctgaatacagatagggtacagtagaaataayaggaaacagaaatccgaggttttgcctcaggcatttactagctgagtgactgactgactgactacagatgacttggaccagtctagttgaaataatttaa

SEQ ID NO: 429701 - DNA, 201 bp, Homo sapiens
atgaagaatatttgttttacctgaatatgtactagtttatggagtataaaatactacaattaaattgttgatggatcttttgacacaccaatatgaaacayatgaatgtttaaacgtgtttataataaagcatgttgtcccattatatcaatgtacatttcaaagacattagaaatagaccagcatctgtattatattaca

SEQ ID NO: 429702 - DNA, 201 bp, Homo sapiens
acataaatgatctgatggagctgaaaagcaaagcccaagaacttcgtgaattatacacaagtatcaatagccaaattgatcaaactgaagaaagggtatcaagagattgaagatcaacttaatgaaataaagcatgaagacaatattagagaaaaaggaatgaaaaggaatgaataaagcctccaagaaatatgggactat

SEQ ID NO: 429703 - DNA, 201 bp, Homo sapiens
acccagccaaactaagcttcatacgcaaaggagaaataaaatccttcacagacaagcaaaggctgagagattttctcacaaccaggcctgccttacaagakctcctgaaggaagcactaaacttggaaaggaataatcgatacgagccactgcaaaaacataccaaattacaaagcctattgacactaggaagaaactgca

SEQ ID NO: 429704 - DNA, 201 bp, Homo sapiens
attgaagtcaggagttcgagaccagctggaccaacgtggtgaaaccctgtgtctactaaaaatgtgaaaattagctggctgtaattccagctattcgggargctgaggcatgagaatcacctgaacctgggaggcagaggttgtagtctcaaaaaagaaacaaaggacaaaacacgatgtgtgagaaatttacaccttaat

SEQ ID NO: 429705 - DNA, 201 bp, Homo sapiens
aatgccccaattaaaagacacagactggcaaattggataaaggctcaaaacctatcggtgtgctgtattcaggagacctatctcatgtgctaagatacacrtaggctcaaaataaagggatgaagaaatatttaccaagcaaatggaaaacaaaaaaaaagcagaggttgcgatcccactctaagagaaaacagactttaa

SEQ ID NO: 429706 - DNA, 201 bp, Homo sapiens
ttagagacctacaaagagatttagactcccacacaataatagtgggagattttaacaccccactgtgtatatcagacacctcaaggaggcagaaaattaasaaggatattcaggacttgaactgagctctggtccaagtgacctaacagacatctacagaaatctccaccccaaatcaacagaatatacattctgagcacc

SEQ ID NO: 429707 - DNA, 201 bp, Homo sapiens
cagtgagccaagatcgcgccactgcactccagcctgggcaacagagcaagactccatctcaaacaaacaaaaaaaagaactagaaaagcaacgggcaaataaataattcaaaagctagcagaagacgagaaatacctaatatgagagcagaactgaaggagatagagacatgaaaaaccattcaaaaaaatcaatgaatcc

SEQ ID NO: 429708 - DNA, 201 bp, Homo sapiens
agtgagccaagatcgcgccactgcactccagcctgggcaacagagcaagactccatctcaaacaaacaaaaaaaagaactagaaaagcaacgggcaaataaataattcaaaagctagcagaagacgagaaatacctaatatgagagcagaactgaaggagatagagacatgaaaaaccattcaaaaaaatcaatgaatcca

SEQ ID NO: 429709 - DNA, 201 bp, Homo sapiens
tgagccaagatcgcgccactgcactccagcctgggcaacagagcaagactccatctcaaacaaacaaaaaaaagaactagaaaagcaacgggcaaataaataattcaaaagctagcagaagacgagaaatacctaatatgagagcagaactgaaggagatagagacatgaaaaaccattcaaaaaaatcaatgaatccagg

SEQ ID NO: 429710 - DNA, 201 bp, Homo sapiens
gaacaggcaacctacagaatgggagaaaatttttgcaatctatccatctgacaaagggctaatatccagaatctagaaagaacttaaataaatttacaagaaaaaaaaaaaaaccaaccccatcaaaaagtgagcaaagaatatgaacacttttcaaaagaagacatttatgcggccaacaaacatgaaaaaatgctcatc

SEQ ID NO: 429711 - DNA, 201 bp, Homo sapiens
gaacttaaataaatttacaagaaaaaaaaaaaaaccaaccccatcaaaaagtgagcaaagaatatgaacacttttcaaaagaagacatttatgcggccaamaaacatgaaaaaatgctcatcatcactggtcattagagaaatgcaaatcaaaaccacaatgagacaccatctcacaccagttagaatggcgatcattaaa

SEQ ID NO: 429712 - DNA, 201 bp, Homo sapiens
aaaggattataaatcattctactgtaaagacacatgcacacgtatgtttactgcagcactgttcacaatagcaaagacttggaaccaacccaaatgcccakcaatgacagactggataaagaaaatgtgacacatatacaccacggaatactatgcagctatggctgagttcatgttatttgaaaaggatgagttcatgtt

SEQ ID NO: 429713 - DNA, 201 bp, Homo sapiens
ttatactaaaaaccactttgatgtttaacactttatttgtgaaaaggaaaactgatcaaactgatcacgtacatttatatctggatataaattacttcagkatgcagttatcttataattacctatatttctgcaattgataaatgaaaattctgaatccaaactttaatgctagctcatctggttgatttctattcaaaa

SEQ ID NO: 429714 - DNA, 201 bp, Homo sapiens
agtagctgagaccacgggtgtgcaccaccacatctgactagtttctgtattttttgtagagatggagtctccctacgttgcccagcctggtctcaaactcytgggctcaagcaatttgcctgccttggcctcctgaagtgctggggtaataggcatgagccaccgcgtccagcgccatagctctttgcacatcattcaaag

SEQ ID NO: 429715 - DNA, 201 bp, Homo sapiens
tcgtccatgaacctgcaccatctactaactctcaccataattttatgcaaccaagagaagcacggatggatacctttggctagctacacaggaatggtgawaaactgcatctttgacatccaccagcatgacaagtgaaataagacctaaaaccaggaaattctgggactcagtttccccaaatttcaaacagaaacaata

SEQ ID NO: 429716 - DNA, 201 bp, Homo sapiens
tactaaaaatgtgaaaattagctggctgtaattccagctattcgggaggctgaggcatgagaatcacctgaacctgggaggcagaggttgtagtctcaaamaagaaacaaaggacaaaacacgatgtgtgagaaatttacaccttaattttaaatatatttagaataaatgctattgtattgcttagaatatttttttaat

SEQ ID NO: 429717 - DNA, 201 bp, Homo sapiens
ccctgcatttaggtctcatctgctatagaacagaaatcataatgctctactcttaaggttgttaaaaagattaaacaaaaatataggcaagaaagtaaagyattttttcttgctattaacactataaaatcaagtatctcttacttctcaaactagaatattccataattctgaataattgatacaaatgtacaaataatt

SEQ ID NO: 429718 - DNA, 201 bp, Homo sapiens
ggtggcagtcactgacagaaggagaaaagatatataaatataagctaaaatttcacattttttcctatgctaaaaaattgggctctatgtacaatgtggartatttaaatataaaacatttttctattttaacaaatatatagcattaatgagtactacattcatgcattatatgttctctttactataggaaaaatattt

SEQ ID NO: 429719 - DNA, 201 bp, Homo sapiens
caattttctgggtgtcaagaggcaattgtgactacagcattagcagtgtaactctggcttcctgattactggattgcagcaagaggagtatattcataacwcacagttgcagcaaccatattagctataactggctcttgggtggatcatttctgtactccctaaagtcattccagcaagaacagcctagaactcatatct

SEQ ID NO: 429720 - DNA, 201 bp, Homo sapiens
ttcaaattctggatgagaattcgcttctgcaaattagaagcaattcatctaagataatgaacacagaagcgaagcagaagccattttcctacatcctttcractgttttaactgcaaacaaagataaagaaatgcaaggtgttagcagtgctttttgtggcactttccaattttctgggtgtcaagaggcaattgtgacta

SEQ ID NO: 429721 - DNA, 201 bp, Homo sapiens
caagatgcagcattattcatagaagcaaaaacatcggaaataatctaatatccatcaataaagaaaggatgaataataagttagggcacatttatactacrgagctattaaaaatgctaatacatggacatggaatggtcttacatgcctgtcaactgtcatactaccaattgaaaaaagccagagggataaaacaaaaaa

SEQ ID NO: 429722 - DNA, 201 bp, Homo sapiens
ctcctgggctcaaacaatcctcctgccttggcctcccaaagtgttgggattacaggtgtgagccaccacacctagccaagattaacaacttccttgatctyaaaatgtcagaactgaaactgggagactcaatatctaatttttatattaatccagtgttaaagtgcacgtgtgtgcacgcacacacacacgcgcgcacgc

SEQ ID NO: 429723 - DNA, 201 bp, Homo sapiens
catgcacaagtagactaggaactccctgagggcagtaaaagcacacctggctacctgccttccctgacatcaccttcccaagtaaaacctattgcccaagsgcctcgagatggatggtaggaccctctccccaccagtgagtgaagcaaataatgtcctgttcccaaggatgtactacattactggccatgtattttgacc

SEQ ID NO: 429724 - DNA, 201 bp, Homo sapiens
tctattcttatatataacttgaagttgtctaacaaagtttagtgaaggtgtgtctgataatttttaaaaactggtctggcagaatgacataattaatgtcyaaacataaatattcatttagattttggcctttttaagattgaatcattttttcttaggagcttctcctaaagcaaatacctgcaaaaatatactagttaa

SEQ ID NO: 429725 - DNA, 201 bp, Homo sapiens
atccaaagtgacaaacctatgccatatacaagtgcgtttctaaaaatctactagtatcagtggcatctttaatacagaaacaagagttgttttttctgagyatttgattattttaccaaataaaattatgttgctgagggaaataagtcatttctttaaattctctttgtgaatacgccacccaatactgagagcaatgaa

SEQ ID NO: 429726 - DNA, 201 bp, Homo sapiens
catctctgaatctaagggctttgcctaaattcctaattgtaaaataaataatcaatgccttcttatacgacctaggagacacagttacattgaggaactckcggttaagcaggggaggtcctctataggacagaggctcaacattcatcacaaagagttttagcttcaactgcatgggaatgaacaagggagaataaatac

SEQ ID NO: 429727 - DNA, 201 bp, Homo sapiens
cctatctagtgagatttcattcagaattctatatccagtgaaaataatccttacaaatgaaagcaaaataaagacatatttgataaagcttcctatcattstgtgtagacattaagttgtggcaatgataaatagcattacacactgtagatttttaaatatagatagatcaacacagaaacagatatatatgtatatgta

SEQ ID NO: 429728 - DNA, 201 bp, Homo sapiens
aatagcattacacactgtagatttttaaatatagatagatcaacacagaaacagatatatatgtatatgtatgtgtgtgtgtatgtgtgtgtgtgtgtgtrtgtatatatatattcgtgtgtgtacatatatattttatgtttgcccactaagagcaactagaagcaatgataatccattataaattttcacatgaagtgc

SEQ ID NO: 429729 - DNA, 201 bp, Homo sapiens
tagcattacacactgtagatttttaaatatagatagatcaacacagaaacagatatatatgtatatgtatgtgtgtgtgtatgtgtgtgtgtgtgtgtgtrtatatatatattcgtgtgtgtacatatatattttatgtttgcccactaagagcaactagaagcaatgataatccattataaattttcacatgaagtgccc

SEQ ID NO: 429730 - DNA, 201 bp, Homo sapiens
gcccatgtaagtcgagcctgcttcctctttaccttccgccatgacctcagtaagtttcctgaggtctccccagaagcagaggccgctatgcttcctgtacrgcctgtagaaccatgagccaattaaacctcttttctttataaattactcagtctcaggtatttctttacagcagtgcaagaactgactaataccaggggc

SEQ ID NO: 429731 - DNA, 201 bp, Homo sapiens
taataggtcatgcactttatatttaggatcttcctttcaaaaaatcaaaggcctagccaaatatcttcttatataaacaagcattaaaaatgttcttggcygggcaaggtggttcacgcctgtaattccagcactttgggaggctgaggcaggtgaatcacctgagttcgagaccagcctggccaacacggtaaaaccctg

SEQ ID NO: 429732 - DNA, 201 bp, Homo sapiens; identical to SEQ ID NO: 257632

SEQ ID NO: 429733 - DNA, 201 bp, Homo sapiens
tgaagcaggagaatcacttgaacctgggaggcggaggttatagtgagcggagattgtgcggcttcactccagcctgggcaaaagagtgaaactccatctcwaataaataaataaataaataaataaataaataaataaataagttcttaagatctcaatttattttaatccttatgaaaggtgcaaattgaagcaagtaat

SEQ ID NO: 429734 - DNA, 201 bp, Homo sapiens; identical to SEQ ID NO: 257633

SEQ ID NO: 429735 - DNA, 201 bp, Homo sapiens
acactttgggaggcaaaggtgggtggatcacctgaggtccggagttcgagagcagcctggccaagaaggcaaaatcccgtctctactaaaaatacaaaaawtagccgggcgtggtggcgcgcacctgtagtcccagctactctggaggctgaggcaggagaatcgtttgaatccgagaggcggaggttgcagtgagccaag

SEQ ID NO: 429736 - DNA, 201 bp, Homo sapiens
gcagatcagttgaggtcaggattttaagaccagcccagtcaacatggtgaaaccctatctctactaaaaatacaaaaaattagcctggcgtggtggcaggmacctgtaatcccatctactcagaaggctgaggcacaagaatcgcttgaacccggcagtccgaggttgccaagagctaagatcatgccactgcactccagc

SEQ ID NO: 429737 - DNA, 201 bp, Homo sapiens
gctgaggcacaagaatcgcttgaacccggcagtccgaggttgccaagagctaagatcatgccactgcactccagcctgggcaacagagtgagactctatctaaataaataaataaataaataaataaataaataaataaataaaataagatatctcagctggttttggtagtgatgctattcttcttgtgctaaaaagtaa

SEQ ID NO: 429738 - DNA, 201 bp, Homo sapiens
cttgttggtggtttggtgatggcaaggagattcttccacatcatgatcagactttgaagtagaaaacagtgaagtgtctccccacatagaggagagaggcmccatttctgggtccagtggttcttcttgaaattcagctatgtggtcagacgagaagggcacattgctatccaccggggtgaggggtggaacaccagaatc

SEQ ID NO: 429739 - DNA, 201 bp, Homo sapiens
ctgaggcacaagaatcgcttgaacccggcagtccgaggttgccaagagctaagatcatgccactgcactccagcctgggcaacagagtgagactctatctaaataaataaataaataaataaataaataaataaataaataaaataagatatctcagctggttttggtagtgatgctattcttcttgtgctaaaaagtaat

SEQ ID NO: 429740 - DNA, 201 bp, Homo sapiens
tgtctggatctaccacactttttacattcacccagtgtaggacatcctggtggcttccaaactggagtagttataaataaaactgctataaacatctatgygtaagtttttgtgtggacaaaagttttcagctgggtcagatcatgagagtgtgtttattttcattaaagaactgtcagtctgtcccccagagtggctgta

SEQ ID NO: 429741 - DNA, 201 bp, Homo sapiens
aagaaaagcatcaaaatacactaactgaaccctttttgttttatatagtatggacctgtgtctagtgagcttaccttggaaggctattaggtgccaaagcmaggttttagaaatcccagcccatggttctttccactaatactaaatttcttacatttgtaggcccctttatttttaatcatctccctttatcattgcaaa

SEQ ID NO: 429742 - DNA, 201 bp, Homo sapiens
cccggtggcacctgtaacaccagcaagacagaaccattcactcccttggaaagggggctgaagtcagggagccaagtggtctagctcagcagatcccaccyctatggagtccagcaagctaagatccactggcttgaaattctcactaccagcacagcagtctgaagtcgaactgggacactcaagcttggtgggggtagg

SEQ ID NO: 429743 - DNA, 201 bp, Homo sapiens
ctatcaaaatctcacacacacacaaacacatacacacactcacaaatacaagctacacataagtatatttgaaagcaatactttagcccaagttttggtcrcttttgtgaatgccctttaaaaagaaaccagcagttcatcgatctttaagaaatcatcaaactgtccagaaaatcaacttcatttaggattctccacaat

SEQ ID NO: 429744 - DNA, 201 bp, Homo sapiens
tgtcagttggacatttatctaaacattcaatatacaaagttataaagaaaaatacttctaagatatttaagaaaatgcaatataatagatcataaattagrtgcaaaaacaagacacttacagacatttccagtatatacatccattttcaaatattaccaaagtgtaaacataacttaagataatcatccttctatttct

SEQ ID NO: 429745 - DNA, 201 bp, Homo sapiens
ttgagggaattctgggtgctttctccatgtgatgaaaggatagatgttttagagagacaattcttcaattgctcttcaagggtacagaattcattatcctytgcaactgctcagaggaataatattaataagcctatcttctttgaccctaatcgtgatgagtaacagtgtaagtaaaaatacaagatggtgtggagaggc

SEQ ID NO: 429746 - DNA, 201 bp, Homo sapiens
tctctctcagcctgtatcttctcccgcaccttaacccctcccaacatctgaggcaaaacacctcaaccacacatttttcagagtccttgatgttcccgtcycccctccaagtcttgcaaaacgaaagcaaaaggggtgaaacaaggtctagatcagaatccaaggtttccacagtcccaaaatgacacagtacacattagg

SEQ ID NO: 429747 - DNA, 201 bp, Homo sapiens
tttgtttttgattatctggacttaggagtccccttataacacaaatgattttcttaaattccatgttactatgggattctgttgtaatcaatttatacacrcacatacagggtcagaggtaatgttctatttatgtactccaccaacagtccatatcacagtcacaatacactggctcgcaactttcctgggtcatctacc

SEQ ID NO: 429748 - DNA, 201 bp, Homo sapiens
aaaattttataagacattatacaaatgtggttaatttcattatttaaatcaaagatgttacagtaaagtcattttaatatgttataccacatcaaaagttytcattaattctccagattctgcaagcatttaagtgactacacaggttattccataatttacaatttttggcaaaactacttgtagtcaattctcattatt

SEQ ID NO: 429749 - DNA, 201 bp, Homo sapiens
tttaaagctaaaaactgattctttggacaaatcagactgatttaaaaattttgtctgaaatacatagctgtgttttctccataattttgtagggatgttgmgtttctgttttcagaaaatactagttaacctgaacttcttaaaattctgataatagtgtattgatcagataagctaatgatatccatacctaaagcttaa

SEQ ID NO: 429750 - DNA, 201 bp, Homo sapiens
gtgtagattatctgtctttatccttattgttctgtgggagtgatatcactatgggagtgacattctttctggcttttcacatcccaagacaaagtacaacygagctgtgcactcaaattaaatcactactttggtctgtgcagaagatggatgtttcttgaagaataacagtagtttattgtcagcttaatccagtgatga

SEQ ID NO: 429751 - DNA, 201 bp, Homo sapiens
tatacttaaaatttcctataatgagatattgcctgctaattctgacagacaccgtgatagcatgaaaccatttctaagtatgatgacttagttttataagycctgaatacatgtgaatcaagtgacaatctttagtgtatagtcacaattgaaaactaccttccagtttgatatgaatcataaataaatgtccctgtctcc

SEQ ID NO: 429752 - DNA, 201 bp, Homo sapiens
taatatacttaaaatttcctataatgagatattgcctgctaattctgacagacaccgtgatagcatgaaaccatttctaagtatgatgacttagttttatragccctgaatacatgtgaatcaagtgacaatctttagtgtatagtcacaattgaaaactaccttccagtttgatatgaatcataaataaatgtccctgtc

SEQ ID NO: 429753 - DNA, 201 bp, Homo sapiens
tttttaaaaaatcactaatatacttaaaatttcctataatgagatattgcctgctaattctgacagacaccgtgatagcatgaaaccatttctaagtatgrtgacttagttttataagccctgaatacatgtgaatcaagtgacaatctttagtgtatagtcacaattgaaaactaccttccagtttgatatgaatcataa

SEQ ID NO: 429754 - DNA, 201 bp, Homo sapiens
tatattacaaatacttctgtcccattgctaattcacaacaaagaggatgggctcaggtagttattctccaaatcctaaaatctcaaaattttacatttttwaaaaaatcactaatatacttaaaatttcctataatgagatattgcctgctaattctgacagacaccgtgatagcatgaaaccatttctaagtatgatgac

SEQ ID NO: 429755 - DNA, 201 bp, Homo sapiens
aggcaatgagaggccacttccgagaagacacctacgtctctacagtggcaaatcaccagattcagggatattttgaagaatatttttcagtttcccatgargcttggctgtgcccctgctgaagttgtatcctgtatctctcattcctctgtgagtatctgtgattttaaaaccccatgaactgatgtaacccctgggtac

SEQ ID NO: 429756 - DNA, 201 bp, Homo sapiens
ttgaatccaggcgctctgtctctgggactgcttcattcaagtctaagaatattgaaagataatcagtgagagaaacctttggagagaactgatgaagagaycacagacactgataaaatctcaaggtaaccagtaacatcaggtaaggatcaggtgaccaccatgacagcctgtaaccaagaaataaccaagaaatcagtg

SEQ ID NO: 429757 - DNA, 201 bp, Homo sapiens
tctctgaatctaagggctttgcctaaattcctaattgtaaaataaataatcaatgccttcttatacgacctaggagacacagttacattgaggaactctcrgttaagcaggggaggtcctctataggacagaggctcaacattcatcacaaagagttttagcttcaactgcatgggaatgaacaagggagaataaatactc

SEQ ID NO: 429758 - DNA, 201 bp, Homo sapiens
acctcctgccttggcctcccaaagtgctgcgattacaggtgtgaatcacaacactcagcctcataatttattttctgaggcttgttttttagcttaggttscacattctagtaaaaatgcctagaaagctctagctgtgtagaaacatataaatattttctctgcagtcccatactcttataattgggtatctctgaggaa

SEQ ID NO: 429759 - DNA, 201 bp, Homo sapiens
aacctagtgctgtatctatcctgcctgtccacctctcatccatctagagtggctgtcccatttctataccataggccatactgatgaagcagtgactgaayacaggacagctttcaggaagaattaaactgtagctcttagattcagactgcagactgcccataaagaagatttctgccaagtaacacagtgaaagctgtt

SEQ ID NO: 429760 - DNA, 201 bp, Homo sapiens
actacttataaatataaaatacttcaatacttaaaaattattttataaaaatataagttaataagtataatagcctaaaggaaatatctaaatttcttgaraaatgcaaaataccaaaatcgtccccctgaaattgaaaacttgaacagagtaataattattatgaaaggtacttaaaatattcctccactaatgcacaga

SEQ ID NO: 429761 - DNA, 201 bp, Homo sapiens
tcaataattacatagactcaaaccttggcatacaaggaggaagtctaggggttagagcaattctactgtccagaaaaaccctggccaaaaggttgaggctracatgactgccttccaggactgaggtggtaccaataaccacattacctaaaatcaggaaccattttcataagatcttatctgattaaatgactttaatca

SEQ ID NO: 429762 - DNA, 201 bp, Homo sapiens
taaataggtttttaattctgttgacattggagccatatttcctccccctgctctgctgggagccctcaccttcttttgttttttgttccccatctgacttrggtttgtcaaaggtacttttcagtgcctgaaactcagttcgatatgcattcctgtgaggagaggcacttctgagagtggttcgttcacctgaagactcag

SEQ ID NO: 429763 - DNA, 201 bp, Homo sapiens
aatgaatttctgaattcatttacttatttgaatttatgtctagtcaaataacatacatttttttttccaaatggcttagccacgtggcaaacagaagagaytactcattgaaatgggaagttaaaagtcaaaaagttatcattctgattggtctttggtaaaaaaaaaaaaaaaaaagttccaaacacaatttggagatac

SEQ ID NO: 429764 - DNA, 201 bp, Homo sapiens
atttatgtctagtcaaataacatacatttttttttccaaatggcttagccacgtggcaaacagaagagattactcattgaaatgggaagttaaaagtcaaraagttatcattctgattggtctttggtaaaaaaaaaaaaaaaaaagttccaaacacaatttggagatacctatcaaaatctcacacacacacaaacacat

SEQ ID NO: 429765 - DNA, 201 bp, Homo sapiens
acaattcaagaggagatttgggtgaggacacagccaaaccatatcattctgccccagcccctgccaaatcacatgtcctgacatttcaaaaccaattacaycttccaaacagtcccccatagtcttaacttatttcagcattaactcaaaagtccacagttcaacatctcatccgagacaaggcaagtcccttctgcctat

SEQ ID NO: 429766 - DNA, 201 bp, Homo sapiens
ttaaaatcatcagatctcatgaggttcattcactatcacaagaataatgtaggaatgcctccacccccaaaattcaatcacctcccaccaggttcctcccwcaacatgtgggaactgtgggacttacaattcaagatgagatttgggtggggacacagccaaactctatcacctacagacatctaatctttgacaaaattg

SEQ ID NO: 429767 - DNA, 201 bp, Homo sapiens
taaggtgttactgggccatgctccctccaaagcctctaggaaaaaattcttccttccctcttctagcttctggttgtcctagaagttccttggcttgaggsaatataattccagtatctgtctccatcttcatatggctgtcttcccactgcgtctcttctcttctaataaggacaccagtcatattggattaggacccac

SEQ ID NO: 429768 - DNA, 201 bp, Homo sapiens
gaatggtggaaatctgtgagtgtagaaaccaaaaggcatatgagagttttgagaaaactgacatttcaactcccaaaagcaagtgctagcccttgagtcasctccatgtaagcccagccaagctcacacacaggcaaaatcccacaaacctgctctgcttagactaatcaaaactggatagaaatgggcaaagctctgtaa

SEQ ID NO: 429769 - DNA, 201 bp, Homo sapiens
ctacataccagaatctctgggacacatttgcagtgtgtagaaggaaatttatagcactaaatgcccacaagagaaagcaggaaagatagaaaattgacacyctaacatcacaattaaaagaactagagaagcaagagcaaacacattcaaaagctagcagaagacaagaaatcactaagatcagagtggaactgaaggaga

SEQ ID NO: 429770 - DNA, 201 bp, Homo sapiens
aatagtcagtcattctacatgactttccgctgggcttcttgtttctaaatcatagaggtgtttcaaaaagaataaagaaattcagatgttttaacagttayaaacaacgattaattatcaaaaatagcaaagaggccctggcagccaaaaactataaaatatacaaaacataatctcatgaaaaagtgatagaagtgactt

SEQ ID NO: 429771 - DNA, 201 bp, Homo sapiens
catgagggagaatgacagcaacaaaagcccttcctttgccaaatacatgttacatttttagggtgaaattatgtaaaatatatgcattgtaaaggcctatytaaaatcctgtatttccacagtgttctggtctcatataaagagaattcatacttgaggtttagcactatctgtaagagtcaaataataaaacaaaggttg

SEQ ID NO: 429772 - DNA, 201 bp, Homo sapiens
gatctcggctcactgcaacctctgactcccaggttcacaccactctcctgcctcagcctcctgagtagctgggactacaggcacccgccaccacaccaggmtaattttttttgtatttttagtagagacggggtttcaccgtgttagccaggatggtcttgatcccctgacattgtgatccgcctgcctcagcctcccaaa

SEQ ID NO: 429773 - DNA, 201 bp, Homo sapiens
agaatataactaaaaaataaactggaaaagattagcagtgtaactaagaagtcaggttataaaactagtaaacataacctaaagccattttcatatatatmcaataatgagagaaaataaaatgaaagaaaatatctcatttctgattacctcaggaattaagttctatttaaggtattaagtcctactgaactcagaaac

SEQ ID NO: 429774 - DNA, 201 bp, Homo sapiens
aaatcacagattatataaattaactgtttgaagatcactacttaagtgaaagtaacaaagacacagaccacaaagcgaaaaccagaaaacaaagtgattaytagaaacaaaaaaataaaaagaagttgatataattaagagcaaacatttatctcataacaatcattgcttactgaagtcagatatttgagggaaagaaaa

SEQ ID NO: 429775 - DNA, 201 bp, Homo sapiens
gcctgtaatctcagcactttgggaggccaaggcaggtggatcacttgaggtcaggagttggagaccagcctggccaatatggcgaaaccccgtcactactraaaatacaaaaattagccaggcattgtggtgagcatctgtaatcccagctactcaggaagctgaggcaggagaatcgcttgaacccagcaggcggaggtt

SEQ ID NO: 429776 - DNA, 201 bp, Homo sapiens
tacaggtgtgaatcacaacactcagcctcataatttattttctgaggcttgttttttagcttaggttccacattctagtaaaaatgcctagaaagctctarctgtgtagaaacatataaatattttctctgcagtcccatactcttataattgggtatctctgaggaaaaactggaccggatgatcattatctcctctggt

SEQ ID NO: 429777 - DNA, 201 bp, Homo sapiens
tatccatcagctgtcatcataagaattgaaaagattttaacagtgactattgggtggtcagtgagattgtatccactctgtttacaggcaaatagcagacytgaatggcgttttccttcaattctgttcaaaaatgcctaaagagagaaataacaggtaggtgataatgaggaggtgaggaaaaggagaagtgcagctacc

SEQ ID NO: 429778 - DNA, 201 bp, Homo sapiens
aactccctttaatatgtacttcattcattcattcaaacagctgttcaagatttcagataagctgacaacatgagcaaaggaatctttttcactgtctggtmcaccctgctggcttccactgtaagcactggtatttagggcatccaagattctggcagcagctaaagttggcataaaaatgcaacacagagaactagtctt

SEQ ID NO: 429779 - DNA, 201 bp, Homo sapiens
aaaatttataacttcaaaacaaagaagtcttatgcatagttcaggctgtattctagaagacatgacttaataacatagatgtaatgtttatgtcaggaatsaagtattaccaaaaaaggaacatttgttaatattaccaaaattaatttttgtatcatatggtagacaatataaaaaaagacttctctccttttgatgggt

SEQ ID NO: 429780 - DNA, 201 bp, Homo sapiens
ataattacatagactcaaaccttggcatacaaggaggaagtctaggggttagagcaattctactgtccagaaaaaccctggccaaaaggttgaggctgacmtgactgccttccaggactgaggtggtaccaataaccacattacctaaaatcaggaaccattttcataagatcttatctgattaaatgactttaatcataa

SEQ ID NO: 429781 - DNA, 201 bp, Homo sapiens
agagataaagaaaatgtggtgtatttatacacaatggagtactattcagccataaaaaagaaggaaatcctgtaatttgcaataacaaggatggaactggyggacattatgttaagtaaaataagccaaaaacagaaagttaaacaccacatgtctcattcatatgaggaagctaaaaaaatgttgatctcatagaagtaa

SEQ ID NO: 429782 - DNA, 201 bp, Homo sapiens
tctttaatttcttttacttgccttccagtacaatgtcaaatataaaaagtgacagattttccaatgttaaaccatacttgcattcctggctaaacccaacstagctatgatatattatctcttttatatgttgcttcatatggtttgctaatattttgtttaggacctttttgcattgtttttatgaatgggatggaccta

SEQ ID NO: 429783 - DNA, 201 bp, Homo sapiens
cccccgagtgtcatgaaatagtgctgattgtctgagagatttattgaaatcctccatggcaacctttcagattattaaaaaaaagaaaagagaaagaaagaaaaaaaaaaacaagtgatcaatacttcgattaaacagaaattaaatcatgaatcacagatatattcagatatacatttaaaatttttcaattgttcaaat

SEQ ID NO: 429784 - DNA, 201 bp, Homo sapiens
tagtcactgtgcatgtacacatgggaaccatcaaaattatttgaatcttcaggtacttcttttccacaactggatgcagaagcatcaggagaggtgaaatyaccacctgcaagttctttcctctgttgctttgctgcctcccttccaaccaaattagcttcagcatcttctaacagttggctttgtggtgaagggatttcg

SEQ ID NO: 429785 - DNA, 201 bp, Homo sapiens
ctgtaacatgaaactttgtaaagactctaatacaatatgatccttcacactcaccccaagttttgtggatgatcctgtgaaaagtgcccagtgctatatartatttggacatgtatattaatcacataaagaaatttaagactatgatagtgacagtgtacaagatacaaatgtcacaaaagagtgccacacaggtgatac

SEQ ID NO: 429786 - DNA, 201 bp, Homo sapiens
gcaggagaatagattgaacccaggaggcgaaggctgcagtgagccaagatcgcgccactgcactccagcctgggcaacagaatgagactctgtctcaaaamaacaacaacaacaacaacaacaacaacaacaaaacgctgtcatggttaaaaaaaaataccagtatatacgttaatttctccagaaaatttacccttaact

SEQ ID NO: 429787 - DNA, 201 bp, Homo sapiens
cagcctcagttcgggagctaaggctgtccaaggaatcagtactgcctctgttggacttggaacctccccattcatcctgaggttcactccctccagctttytctttctttggggaatagcggttgttctgtcctgattcatgcacacttctctcaaacatctttcgagtctcagtgaacttggaatatgaagggccatcgt

SEQ ID NO: 429788 - DNA, 201 bp, Homo sapiens
atctcactgccttcaatatttgttaaagttgggttgtgagttaaaatattcttagagaacaagtcatctacctacttttcttgataacttatattctttgrccaaataagggctgcagagaaacaggtaactagattacacctctttctcccactcagccactttctgcagaccttttctttttctgcattgctctttggt

SEQ ID NO: 429789 - DNA, 201 bp, Homo sapiens
agggtatgtgttactgctcaccagcaccctcggctgtagttgacgtcatcttttctgtctttttggacttcctctgcatttgctcttgctcctttctcctyagcttttctctttgtttttccattttctcttgggccttccgagccttctctagagacatcttcatttccttgagtttctttttgaccactgctcggtcct

SEQ ID NO: 429790 - DNA, 201 bp, Homo sapiens
gcatgcctcatgcagccaatgttataaacaaatgttagtttaaagatccaaagtgacaaacctatgccatatacaagtgcgtttctaaaaatctactagtrtcagtggcatctttaatacagaaacaagagttgttttttctgagcatttgattattttaccaaataaaattatgttgctgagggaaataagtcatttctt

SEQ ID NO: 429791 - DNA, 201 bp, Homo sapiens
accaacaacaacaacaacaacaaacattttgacgcatagcataactcaggtggctaaatatataactttgaaataagagaaaaggaaaacttaagtgtttyttgtttttaaaatgaaaaactgtaataacaagaggtagtgaattaattcacttcctttggggggaaagatagtatgagaaggggtgtggttcaataaata

SEQ ID NO: 429792 - DNA, 201 bp, Homo sapiens
tttaatcttttcatctataaagtaaggacaaaacagttccttagcataagaaagctgtcataagattaagttagatggtgcctatgtatttaacacaaggkctggcacatggtaggtgctcaaaacgagtgaccgctattgttgctgctgctggtgtcaaaatactgcaatagcaaaatgctaacgattttctcatctgta

SEQ ID NO: 429793 - DNA, 201 bp, Homo sapiens
tgaggaagtagaatcacttgaacccaggaggcagaggttacagtgagccgagattgcaccactgcactccagcctaggcaacagagtgagattctgtctcaaaaaaaaaaaaaaaacaaaacacaacacagacacacacacacacacaaacaaaaacaaacaaacaaacaaagtattcaggcaataactagtgtgatgaat

SEQ ID NO: 429794 - DNA, 201 bp, Homo sapiens
agacctcaacacatgaatcttttataagcaaattggtcatttctgaagtaaaacttttcctttcctctatatatacctgttcctctacttatattcccagkttggggtaggcaccagcttctacccaagcccaagaaaacttccatgcctctgtcctcctcatttactggccccaacctgccccaaggattcaagatgaat

SEQ ID NO: 429795 - DNA, 201 bp, Homo sapiens
gaggaagtagaatcacttgaacccaggaggcagaggttacagtgagccgagattgcaccactgcactccagcctaggcaacagagtgagattctgtctcaaaaaaaaaaaaaaaacaaaacacaacacagacacacacacacacacaaacaaaaacaaacaaacaaacaaagtattcaggcaataactagtgtgatgaata

SEQ ID NO: 429796 - DNA, 201 bp, Homo sapiens
atttaaagaggttgctatgagaattcattgtagtgatatgaaagagttaaccacagtgcctagaatatgctaactgactgcatgacgttatgattatgatkgttttcaccatcccttatttctccaggacaacaccataaactaatgcaacaaaaaaagcatttggggttggagagatgagggccagaagagagaaaaatc

SEQ ID NO: 429797 - DNA, 201 bp, Homo sapiens
tgttctgaggcgtgaagcccatgatagttttgcctcactttcttacctgttacctagtcaaggtatgtctcaagggtccttgaatcattctttcctgtcaytgtctactgctcctctttagagggcaccacctcatagggtctcctaactcagcttctccatacctggtggtgtcttttcctttttattcctctggtcaaa

SEQ ID NO: 429798 - DNA, 201 bp, Homo sapiens
gtagctgggagatgttacaatgagcgctgagaagaccagctgaggcaatgtacacgaaaacactctgtaacccatgagtgttgcagttatttggacatcaygcgactaaaagcctgattctgcctatcacagagcttggtgctaggcaaccttacatctttatctcacacatttgccaaagtgcgttcccaggaacactga

SEQ ID NO: 429799 - DNA, 201 bp, Homo sapiens
cactgcttacagcatgatcttattaagagagccgaagtatactgcagaatatcacaactgcattacttatttttcttttattccatcctggtcttcatgayagacaatcgaagcttttccagctatcatcttattggcctctacctaaataggagacagcattcaggcaagtctccacatagctaaaaaatgttttcaaca

SEQ ID NO: 429800 - DNA, 201 bp, Homo sapiens
ttgatatatcttaaatgaactaacaaaaatctgatgaacatcttgctcaaattcttcacgcagcctcaaataattgagaaaattgcttgggataatatacytctgaggagatttaaaatatgaaatatttaggagaatcaaattcatactgttaacattttataataacaaaaccaatcatattttaagtatgtgtaactt

SEQ ID NO: 429801 - DNA, 201 bp, Homo sapiens
agatttaaattgaaactgaaaagaattaaattcaagtaacattaatcacgtttctgtttgagaaagaaaagcgaacacagataaaaggagaccaaacaacrtgtgaaagttagccaccatatgtgtttcaataaaatgttagataaggtttgcagtgtcatgctggaaataaccatcatgcatttaaaaacaagtaacacc

SEQ ID NO: 429802 - DNA, 201 bp, Homo sapiens
aaagttgtcattcacatgcaagactttatgtagacatatgttttcatttctattggaaaatatcttggagtggaattgctggatcaaaaagttaagtgtayatttaactttaaaaaaaacttccaaactgttttcctaagtggcagtgaaattctgcattcccactagccataagggagcgtttcacttctctgtatccat

SEQ ID NO: 429803 - DNA, 201 bp, Homo sapiens
gtaatatgggtaactgagtctattttagcagggacagttttaagaaaaagtgtaactatgtaggtgatgtaataggataaatgtttatttttcaagaaaarggacagaattttagttctcagataaagtgaaaggttgctccagaattaaaaagaaacaaaatgaggacaaaaacttgagcgtacatagtgaggagaggaa

SEQ ID NO: 429804 - DNA, 201 bp, Homo sapiens
tcacatattacagaaaaaaaaaaaaacctttaaagacacatcattattgttcaaagcccacagctgacataagcattcactcttggtattgcacattctaygggttttgacaaatgtatgatggatgacatgtatccaccattatagtatcatacagaatggtttcattgccctaaaaaaatcctctgtgctccacttagt

SEQ ID NO: 429805 - DNA, 201 bp, Homo sapiens
ctggaaatactactatcattatatataatttattaaaggggcaaagaggttatttccttaactactctgaaaaggaggaagactgttaataagttaatttrggacacaagatagtcatattccacattctttgttttaaatgtagacagctgaatgttcactcaaaagatttatttcaaaccttctctatgcaaagcatta

SEQ ID NO: 429806 - DNA, 201 bp, Homo sapiens
tttgaaaaagaataagggtagaatcaggccctagtggatatcaaaacacataataaaacttcgcttattaaggcaatatagtttgagctctgggatagatycatttttatattctattctgttccactccttttctattcaaattagagtggtctatttaataaattatgaaaagaattagatacctatctgaaaaacatt

SEQ ID NO: 429807 - DNA, 201 bp, Homo sapiens
gaagagtaccatcaaactacaacccaccaaaggcatctgattctcagctgagcttagctgaccatatttatcatgtaatttgtttcttaccataaaaccayaaaatagacattatttcaattttacaggagaaaaaactgaagcttggtttgtttgtgtgtttgtttatttatttgagatggagtctcactctgtccccca

SEQ ID NO: 429808 - DNA, 201 bp, Homo sapiens
gtaatacatttgtcagttttaaaaagtattttcttaccattctcccttggtatttaagaatttctttttgaaaattctggcttatcccaggtgtgcttaayggaaacaaaggtaaaaacattaggccatgcttggaccagaatgttaaggccaaagttttctaaggaacataaaggttgcaagttagccccagggttttgg

SEQ ID NO: 429809 - DNA, 201 bp, Homo sapiens
cccacgtggtgcatagtctagcagcctggcacccaaccaacaaaatgccaattctaacagcttacaaacgaaagtatatagtttttccatgaaaaattacytccattatctctgttctaggataatcagaaatctttactcaagtcagcaagagaaaaatatattaaaatcctcttttccacagggaaacattcgacagat

SEQ ID NO: 429810 - DNA, 201 bp, Homo sapiens
ttacacagaaacttaaatagtgagactgaacttttgccctctctctacttatcctgtgagagcatggaaacatttttctttaaaaagtgaaaaatatcttygcaggaaatgttttaagagagctctagttctagaaatattacaatcagataagggcaacattttctgctgttgctttacaaaagcaaatcaataactaat

SEQ ID NO: 429811 - DNA, 201 bp, Homo sapiens
gatgtagttgatggcctgtaattacagctcttttttaaataagtaactgtttgctattaagtaggcagcaatttatagcttccctacatggtagtggaaamttccataaagataacttaatgttattatcccatgcattttataacttttctagattctttttcatagaattaaataaataaaataaaccaacttttagac

SEQ ID NO: 429812 - DNA, 201 bp, Homo sapiens
agagtaggcagcaacctctttctttaaagcaagagtctttttttaatatatattttcttcattatactttaagttctagtgtacatgtgcacaacgtgcargtttgttacatatgtatccatgtgccatgatggtgtgctgcacccattaactccttatttacattaggtatatcttctaatgctatccctccccccttcc

SEQ ID NO: 429813 - DNA, 201 bp, Homo sapiens
aggtatagaaatacacgtgttcttaatcacacaaccgtacctgctacctgcagaaaacctactggcttctttttctttttctttccacttctttcccttgytggaattccttcgcaaaggcgccctgtaatgatagtaagcagtcagaaaggggaagctgaaattttctctttcaatcctccttttacagagggctttctt

SEQ ID NO: 429814 - DNA, 201 bp, Homo sapiens
gaggatatatatacacatcgaagtaaatttgtcgggccataggattttcacatcttctattttaatggataatgccaaattattttaatgaaacagttttrtgaattttcctgtttttccatgtgctggctatcacattttactgtgacactttatctttgccaattgtttgatttttgccagtgaagttgaatgtctatg

SEQ ID NO: 429815 - DNA, 201 bp, Homo sapiens
gcatctctgaatctaagggctttgcctaaattcctaattgtaaaataaataatcaatgccttcttatacgacctaggagacacagttacattgaggaactytcggttaagcaggggaggtcctctataggacagaggctcaacattcatcacaaagagttttagcttcaactgcatgggaatgaacaagggagaataaata

SEQ ID NO: 429816 - DNA, 201 bp, Homo sapiens
cccttagtgatttgggatctttggcatcatctaggatatacacatttgtgaaaaagatcaattattattatttttaaagtcacaattcaaaagtcaatgcrtctctgaatctaagggctttgcctaaattcctaattgtaaaataaataatcaatgccttcttatacgacctaggagacacagttacattgaggaactctc

SEQ ID NO: 429817 - DNA, 201 bp, Homo sapiens
aatcagaatctctggggttaagatcacactggtaattttaagaagctcccaggtgattgtaaagagtagccagggttgagaaccagcattataggtcaaayaaattactaagtatttgatctatgtttgggattgaaagttacctctccctattttaaattatttctgcaaaaagttacataaatattaaaaccagggtta

SEQ ID NO: 429818 - DNA, 201 bp, Homo sapiens
atattttcttgttggtggtttggtgatggcaaggagattcttccacatcatgatcagactttgaagtagaaaacagtgaagtgtctccccacatagaggasagaggccccatttctgggtccagtggttcttcttgaaattcagctatgtggtcagacgagaagggcacattgctatccaccggggtgaggggtggaacac

SEQ ID NO: 429819 - DNA, 201 bp, Homo sapiens
ataattgtacgcttatcaccatcatggttatgcgacatgagagaggaaaacaccattgaaaagcttcaacttttctgtcaacaacaacacaaagcgttttytgctattgttgtttgtttgtttgtatgttttactttcaatagctcaactgaatagctatataaagaaatgttacttatcatgcaagccaagtccttattt

SEQ ID NO: 429820 - DNA, 201 bp, Homo sapiens
ttactacataaaataagatttgtttaaaaaaaaatcaaactactaagtaccaatgttagaaaggaaatggctactaatatacatcatagagatgtaaacayatgtgtatgtgaagtgtacatgcaaaaatctacatgaaatcaacagccatgaaagaacagttttcttgagatctgttaggcctgtcatgtgcacacactg

SEQ ID NO: 429821 - DNA, 201 bp, Homo sapiens
tatatctgtagtccctgctacttgggaggctgagatggaaggaccacttgagccccaaggtcaaggatgcagtgagccatggttacactactgtaccccarcctgggtgacagagtaagattctgtctcaaaaacaaacaaaaaaacaccaagaagtatgtagccatcttcatacagtttttgtaaaacggataagcagaa

SEQ ID NO: 429822 - DNA, 201 bp, Homo sapiens
cttcattatactttaagttctagtgtacatgtgcacaacgtgcaggtttgttacatatgtatccatgtgccatgatggtgtgctgcacccattaactcctyatttacattaggtatatcttctaatgctatccctccccccttccccgaccccatgacaggccccggtgtgtgatgttccccttcctgtgtccaagtgttt

SEQ ID NO: 429823 - DNA, 201 bp, Homo sapiens
tctccccaaattgattcacagattccaaacaatacaaatcaaaataccagcaggctcttttgtataaattgacaagctaattctaaaattcatagacaaawgaaaatacttagaggagccaaacaactggaaaagaacacagttcaaaggctaactgttcctgcttttaaggattattattaagctaccataacagaatgt

SEQ ID NO: 429824 - DNA, 201 bp, Homo sapiens
gaggttgcgatgagccaagatcgcagcattgcactccagcctgggcaacaagcgcgaaactccgtctctcaaaaaaaaaaaaaattattatggccattcartgaaaaaagatcaggcagggaaaggagacaatggtaagacaactgaattgctcaacaggctattagcaaataaaccctgtctcacctccaggagaccata

SEQ ID NO: 429825 - DNA, 201 bp, Homo sapiens
caaagtgctgggaaggcagacaactacttgctctgcctttacagtaggaaagcagccatagacaatacttacaggcatgagtatggctgtattcaataaamctttatttacaaaagcaaacagaggtctagatttggcctaggggccatagtttgccaacctctgtcctaaattactcagttaaaatcatgatcttttcat

SEQ ID NO: 429826 - DNA, 201 bp, Homo sapiens
aaatttgtatacatctgttcatagcagctctatttgtaatacccaaaactgaaaacaattcccacatctgtcatcaggcgaacaaacaaatgaattgtggyacagccataaaaaaaagaatcctagctagcaacaagaagttagaaagtattgatacttgcacaacatggacaattatgctgaacaaaaaggctggattta

SEQ ID NO: 429827 - DNA, 201 bp, Homo sapiens
ttattacgtgtcagttttaaaagttaaaaaaaagaaaaatgagagagaaatggtgaacaactccgatttagcacacacttgtttaatgttttccactgtgyaatattcaaagtatcacataatgttagtgcttaagacaaccttgggtctcatttggctctataatccttattttgcacatgagaaaactgaaatccagaa

SEQ ID NO: 429828 - DNA, 201 bp, Homo sapiens
aaaagggataactacttataaatataaaatacttcaatacttaaaaattattttataaaaatataagttaataagtataatagcctaaaggaaatatctamatttcttgaaaaatgcaaaataccaaaatcgtccccctgaaattgaaaacttgaacagagtaataattattatgaaaggtacttaaaatattcctccact

SEQ ID NO: 429829 - DNA, 201 bp, Homo sapiens
agaaaatacagcatgttataatccaggctgattcaggagattaaaagaaaatttaaaatccgcaatctctggtttccagaatgaaatggcaaaaatggtcyacttagtgcaatcaacaagttttactcaaaggtgaaactactttatcacagcaatacttttgttaattgaaaccactttatcataagcctacattcatta

SEQ ID NO: 429830 - DNA, 201 bp, Homo sapiens
gatggtttatataaggttagtgcaaaagtaattgtggtttctgtcattacctttaatatgctgaattaaaagctgaataataacaaacttccaggaacggwactttctatcttatctacatcattaagtctcttttataaaagtaatttctgaaaataaaaaaatacggaaaaacttcctaatttatattgaagcaaatat

SEQ ID NO: 429831 - DNA, 201 bp, Homo sapiens
tctcattactgggtatatactcaaaggatattataaatcattctactataaagacacatgcacatgtatgtttattgcagcactgtccacaatagcaaagrcttggaaccaacccaaatgcccatcaatgatagactggataaagaaaatgtgccacatatacaccatggaatactatgcagccataaaaatggatgagtt

SEQ ID NO: 429832 - DNA, 201 bp, Homo sapiens
aatcaacaagttttactcaaaggtgaaactactttatcacagcaatacttttgttaattgaaaccactttatcataagcctacattcattattataaaatkttcagatttctgggataatcattgaggtgggaaaggcaataagaactgaacttatgaaacgcaattcaaaagaataattctgtttttaaaactgtacaac

SEQ ID NO: 429833 - DNA, 201 bp, Homo sapiens
catgagtgaaggaaaaaaactgagtaaatcccttttccataagaccctttccataacagtgcaggctaggaatcccaagtagatcacagcagtctcactcrgttgaggagttaaaaataagactctagggagactgaagaggccagagtttgtagggctgagtactagtgagctcagagcttggcagagaaaaactccaga

SEQ ID NO: 429834 - DNA, 201 bp, Homo sapiens
cccagtggacgctccaactgtaggctcttctgaactcattttagacacgggaagactaaagattggagaagacagccaacctggtcttttcctcacagtgratcaccattaaaaccagaactaaaacctggatcttctcgttctgatccattgccactttccttagaaaataaggatgaattcaataggcattcgttgaag

SEQ ID NO: 429835 - DNA, 201 bp, Homo sapiens
  misc_feature (1)...(201): n = A,T,C or G
agaaaacaaatgacttatgattatgagaaaaagtcatttttatactgtacaagctgaggtgttatgaagtcagaaaaagaaattaacaatacctttttctngtaatattttcttgttggtggtttggtgatggcaaggagattcttccacatcatgatcagactttgaagtagaaaacagtgaagtgtctccccacataga

SEQ ID NO: 429836 - DNA, 201 bp, Homo sapiens
tattaggttgtttatataacaggaacgaggaaaatattttcatgccttctactggcatataacctgttttacaaatctctagaaaaaaatcttttacttcytctaatttgatattccgttagatgcttatcatttagccagttataatgggacttctccatcctaatttccactgatgtccctcagatatgaaaaaaaatg

SEQ ID NO: 429837 - DNA, 201 bp, Homo sapiens
gtgtttcttccttagtctatgatattgagattatttccaaattttataaagaaatttaagcatcattagatgcataagtaactgaaggtggcatagtatgwtggaaaaacatctacacaggaggagcaagccccaggttgacattaactgcctgctgcataaccctgggcaaatcaattaaattctatgaaggtaaagttc

SEQ ID NO: 429838 - DNA, 201 bp, Homo sapiens
atgattctaattagaaactagtttgtagtgtgggtatgtgtacaataatttctgactgctgaatcagggggactccagagttttaaaaatacagtggtggygaggcagccaatctagaagtctagctgtgggttcaaagcaggcatcgactgtggtgaagcagtgtgctgatggccacctgcccttgacaagctgtggttt

SEQ ID NO: 429839 - DNA, 201 bp, Homo sapiens
tcctacacatatcccaatatagactagccttatctgactagaggcaaccatactggacagtgtacgcagaggtgaatgggaagtcagagccatgcagtgtyagcccaatccacttattttttggtaggaaaccaaggtcccaggaattcagagacttgcctaatggaaaagtaaggactactaccttggattccagctcag

SEQ ID NO: 429840 - DNA, 201 bp, Homo sapiens
tatattgggacgtttagagtcactacagttaaacagtaacttattagattttcaagagcttttttaagtatggaaaagtgtttgcctgttaagaatgtaartttgtcaggcttcaggcatttgaaatactgtacttaaaaagaaaactgaatattaaattgataaatgcagctaaaaatgggctagacagttatggggaat

SEQ ID NO: 429841 - DNA, 201 bp, Homo sapiens
gagatggtgaaactattcccttaatgagtcttccccatactggaggggtttaaaatgaaatagaagaggatcacgtaaataaaatccatactatcaaaatmtaaatgctaagtttaagaataacagatatattgcttaggtgtttaagaaaatttgtatgaatagaaatctgaaagagaaatgtgtccactgattctacct

SEQ ID NO: 429842 - DNA, 201 bp, Homo sapiens
ggagtaaaagaagttaattgaagaaaattagttgcaaccagaggaagattgcagacttgtatttacctaaatcgaatgaagtaattctataaggttctaayatccaccaaggagtttgaggttgtaaagctagcctcatctaaatgggatctagagaccctaatggataacagctgtgagaaacatgtccatctaaagctc

SEQ ID NO: 429843 - DNA, 201 bp, Homo sapiens
aaattgccagctaaacattccaaggtgatctttgttgttgtcattctaactttgaatacaggtgtgtgaagtattcagcatctaactggatgtcatcaaartatcattaagagttcagaaactgccagaacagatgaagtataaaagaaatacagaatttaagcccaggagtaaaagaagttaattgaagaaaattagttg

SEQ ID NO: 429844 - DNA, 201 bp, Homo sapiens
ttatgtataaaatgactgactaaagataagccctattaaaagctcttcaactaaaatttttcatattttaactaatcaaacgcttcatgaagcacattttrtactcgatcaacaaagagtcttttttctaattatgttcaaaaacttcacaactactttattatataaatgcatatttaattcctttataggcaatcaaga

SEQ ID NO: 429845 - DNA, 201 bp, Homo sapiens
attaactgcctgctgcataaccctgggcaaatcaattaaattctatgaaggtaaagttcttcatcaataaagtatggtattattatctactctcccaatctttttttttttttttttttgagacggagtctcgctctatcgcccaggagtgcagtggtgcgatcttggctcactcaaacctccgcctcccgggttcaagca

SEQ ID NO: 429846 - DNA, 201 bp, Homo sapiens
tttaattcctttataggcaatcaagaggttaaaatatcagctaacaggggcaatctgaccttgatttttcaaataatgaactggctacgtatgaaataatytgtataagaaataagttgtataagaaaacatgatttagtaaataagtattacaaatatactaaatattttgtctgttacattaagccgatggttctcaaa

SEQ ID NO: 429847 - DNA, 201 bp, Homo sapiens
agggaaagaattctcagagtaactgggaataagaagaaaaatagtattaaggaggatgttacacatctggatgaaataggctaagttccaatgagctgtasttaaaaaaaaattaaaagaaaaagaaaaaggacaccctacattatacttgatcctgctaaatggaaaaaaaatatgagagatggttatatgacactggca

SEQ ID NO: 429848 - DNA, 201 bp, Homo sapiens
cttcaataaattgtgctaaagatttttaaagtacaaggtgaaaacaatacaagcatccaaatgcaagctttatgttagacttttcctttaaaacactcttaaaacaataaaacttgccctaccactttttcagggaaaaagttcataaatgaattagaatgtcattctcagtatgggaagctcatggaaactatatcctcc

SEQ ID NO: 429849 - DNA, 201 bp, Homo sapiens
gggcaggggaattgcttgaacctgggaggtggaggttgcagtgagctgcaattgtgccattgcactccagcctgggcaacaagagcaaaaactccatctcaaaaaaaaaaaaaaaaaaacacagagtatctgaactgaaaaatgaaaattacagtaaattttaacacactgcaatacaaactaacaaaaatggaagagtga

SEQ ID NO: 429850 - DNA, 201 bp, Homo sapiens
aaagaagtaaaatactgtccaagaattcatgtggcctcaagtcttattctgaaacttgtcctttggaaagtggataacctcatttttagagtcaacgcagmaaagagaaccagatacatgagcataaaaaacaaaaaaccctcatcacatgaaatttctcaaaacgagtttattttctccttcttctgccccagtctcctg

SEQ ID NO: 429851 - DNA, 201 bp, Homo sapiens
tttgttaagatacacatatataaatacaaacatatgtggacatatacatatacacacacacacacacacacacacacacgcatatttacaaacatatattytaaaataacagaataaacaattttaaaaataactaagctccctgctagtggaggggacaaaacaaatgagaaggaaaaactcaaaaaaatcaccaaaaaa

SEQ ID NO: 429852 - DNA, 201 bp, Homo sapiens
aaatttgtgcttctttgaactgtttataatatctgactagttccatcattaatgacttaaataaaatcttcaaaatgtgttcaatacttagataactcatyatttgtatctagataagagtgttaattttacatctctttgaaaccctaagtcagtggggttttttttcacatatggttctaaaaccagcctcattaacat

SEQ ID NO: 429853 - DNA, 201 bp, Homo sapiens
tattgctttttgtgttttagtcatgaagtctttgcctatgcttgtgtcctgaatggtattgcctaggttttcttctagggtttttatggttttagatgttrtgtttaagtctttaatccatcttgaaataatttttgtataaggtgtaaggaaggggtccagtttcagttttctgcatatggctagccagttttcctaaca

SEQ ID NO: 429854 - DNA, 201 bp, Homo sapiens
ggcaggttatcaatccaggatgttaggatatgaaacagtataagtatatgtatatgtatttgtattacatctattctaaagctgaaactctgcctactttrcacctacagaatggtttactctcaacatatattttgactcataacttcttattttcatttttttagaaagtagacgtttctcatttcacttttccactgt

SEQ ID NO: 429855 - DNA, 201 bp, Homo sapiens
ttcggggagctgaccatctctacataccacttttttttccttaggagacaaggtctcaccctgttgcccaggctggagtgcagtagcgcaatcatagctcmctgcagccttcaactcctaagccagcctccaactcctgagctcaagctatcttcctacctcagctttccaagtatctatgactacagtacaatgatatta

SEQ ID NO: 429856 - DNA, 201 bp, Homo sapiens
actgttcactagtttaaataacgctacagagaactttcatccttttgaattatttacatagaatacactatgagaagtaggcttactagctcaaaggataygaatacatcttgatttttactggaagaaatacctcctctcctactatcacacttgatgcaaaaggagtattactttatctatatagttaagatactgttt

SEQ ID NO: 429857 - DNA, 201 bp, Homo sapiens
agtagttgttcattaactattctccaaactttgaaatcagcaaaatatgtaaccatatccatctttggtattttaagcttaattatcataaaagctcttarggaaatttaagcattaatacagaaaatgtatcttttctttgaaaataaccaaatccattttaaaaaggaattgtttatacagtctgggattttacccaag

SEQ ID NO: 429858 - DNA, 201 bp, Homo sapiens
accactgcactaattattctcacacttcattacataatattctcttagaattgctgttaatcaaaaaattataagctgggtgcagtggagcgcaactgtastccaagctactaggaaggcttggtgcagtaggatcacttgagcccaggagtttgaagcttcagtgaattatgaccacacctgtgaataaccactgtactc

SEQ ID NO: 429859 - DNA, 201 bp, Homo sapiens
gatcacttgagcccaggagtttgaagcttcagtgaattatgaccacacctgtgaataaccactgtactccagcctgggcaacacatctcttaaaatatatrtgtgtgtgtgtgtgtgtatgtatacgtacatatacatgtatgtgtgtatatacatacacacacacaatttgataaaagcttttaacatcaaatatataca

SEQ ID NO: 429860 - DNA, 201 bp, Homo sapiens
acacaatttgataaaagcttttaacatcaaatatatacacatatatatgtatatagacgtatatatgtgtacatatacgtatacacacacagacatatatrtagttccagaaacatgtatatatttttaaaacataacatcgataacaaaagcaccaaaaatggtaaataaaggctcagctaatagcctaaacagaacaca

SEQ ID NO: 429861 - DNA, 201 bp, Homo sapiens
ttcaagaccagcctggccaacatgttgaaatcccctctctactaaaaatacaaaaattagccagtgtggtggtggcgcatgcctgtaatcccagttattcragaggctgaggcaggagaatcgcttgaatccaggaggtggaggttgcagtgaaccaagattgtgccactgcactccagcctgggcaacagagtgagactg

SEQ ID NO: 429862 - DNA, 201 bp, Homo sapiens
agtggcacagtcatggctccctgcagcctggacctcctgggctcaagcaatcttcacacctcagcttccagagtagctaggacttataggcgtgtgccacygtgcctggctaacttttttattttttgtagagataggggtttattatgctattgacctcctgccttggcctcccaaagtgctgcgattacaggtgtgaat

SEQ ID NO: 429863 - DNA, 201 bp, Homo sapiens
aatgtacattattcatgaacataaaattcgtatgtcttaaagttcaaaccactgcactaattattctcacacttcattacataatattctcttagaattgytgttaatcaaaaaattataagctgggtgcagtggagcgcaactgtagtccaagctactaggaaggcttggtgcagtaggatcacttgagcccaggagttt

SEQ ID NO: 429864 - DNA, 201 bp, Homo sapiens
atacaactctctcactgcacccgcagagcatcagagaggctgccacacagcacagacacaggtttccaaataatcacctgggggtgggggaggtgggagcrtgtaaataaaacttccccagaacttcattaaaatattcagtggatatgaaaatcaaacaacaatgactacgtagctgcacttgtaaaaacatttttaacc

SEQ ID NO: 429865 - DNA, 201 bp, Homo sapiens
tggttctcatgctattttccctctttatcaaaactattgattctcaatcagagacctcaccctaatcagaggcagtatcagaatcttggagtgagtgtggytgtcaggggaggcaaggaaaaaaagaaaggagtaattaggaaacttctatgtgatttctgagctgttcccccatgtttaactctgcactgcccagcctcc

SEQ ID NO: 429866 - DNA, 201 bp, Homo sapiens
aagaaatagtgaaaaagtcaaagcaggaaatacaggtttctcaaactactgagcctgtgaatgctgactgcagatacagaaattacacttcatactttctctctcttttgagccattgattcttacttcaaatccttattaagcaccagctcactggttggcactatgctcagtattgaaaataccttatgaggctagaca

SEQ ID NO: 429867 - DNA, 201 bp, Homo sapiens
aggcaggctgaagaccagccagaatgttccccaggagaggaaacctgaaaatggtggtttccttaaaaatcaatttcctgttcaatttcttgggttaggtrgggggaagaggaactgtgttgtgtttgccagtgttgctgaaatgctgaacacacagcagtagcaaggtcaacagatcccaatatcccatggctgcattaa

SEQ ID NO: 429868 - DNA, 201 bp, Homo sapiens
attgctttttgtgttttagtcatgaagtctttgcctatgcttgtgtcctgaatggtattgcctaggttttcttctagggtttttatggttttagatgttgygtttaagtctttaatccatcttgaaataatttttgtataaggtgtaaggaaggggtccagtttcagttttctgcatatggctagccagttttcctaacac

SEQ ID NO: 429869 - DNA, 201 bp, Homo sapiens
attggtctgttcagagatttttatatcttcctggtttaatctagggtgattgtatatttccaggaatttaaacatctcctctagattttctagtttatgcrtgtaaaggttttcatagtagccttgaatgatcttttctatttctgtggtatcagctgtagtatctcccgtttcatttgtaactgagcttatctggatctt

SEQ ID NO: 429870 - DNA, 201 bp, Homo sapiens
taaaagacaggccaagactttaaaattaaaacattggatattgattttcaagtttcaagttcagttcaaatttatttttaactaccgtgtgctcagtgctraggatataacaatgaataaatgacaatctgtgtcccctaggaacttccagtgaagggaacagcctcatactttcaataaaatatggttcattacatgcta

SEQ ID NO: 429871 - DNA, 201 bp, Homo sapiens
gtaaacagaaaaccccaagagtgggagaaaatctttgccatctatacatccgacacaggactaatacccagaatctatagagaatgccaatcagtaagacaaaaaaaaaatcccataaaaaagtgggctagggacatgaatagacagttctcaaagaagatatatataagtggctaacaaatgtatgaaaaaatgctcaac

SEQ ID NO: 429872 - DNA, 201 bp, Homo sapiens
gttttactgtttgttcacatggtttaatgaaatttacagattagtttaaaaattggcttgcccaagaaagatgagagccaggaccatttctgatcttttcwacagcataatcattcaatttgaaacaggaccagtcaaagaaattttttaaataaaccacattaaggaagatgacagaaaaaaaagataagagctagcaat

SEQ ID NO: 429873 - DNA, 201 bp, Homo sapiens
atttatctctccctttaaaaacacaggaatagcgtatccacatcacgatacgtgtctaagattatatgagaaaatactgcaagaactctttcaatcctcasaactacgtacagcatggcatatttcagtttctaccccccaaaaaggaacttagaggagaaccaactgattctatctctgatagcttatgcttttgaaagc

SEQ ID NO: 429874 - DNA, 201 bp, Homo sapiens
tataatatttgattttttgatcttgcattctggtctttcaagagaagcagttttaagcagataaagacaataaaggagatgaagacatttagagggattcygaagagacttataattatttttaagaactctagaggctaacagagccaacttattttactttaaggctaaatgttttccttttcttttattatacaaaca

SEQ ID NO: 429875 - DNA, 201 bp, Homo sapiens
tttcagtccccagtgccccaggtaattagggcaaattcaggctttggaatctgtgctgcacaggcagtgttctccccagctctgaactgcaaggtcattgmaaaatcaggctttgccttacttaatatgtctaggctgctagaatgaaaataccataaagtgggtatcatcaagaatatttatttattgcagttttagagg

SEQ ID NO: 429876 - DNA, 201 bp, Homo sapiens
ccccagcgccagccccgggccccgcggccgcctgaccgccccgtccactcccaggtctggttccagaaccgccggaccaagtggcgcaagcggcacgcggyggagatggcgtcggccaagaagaagcaggactcggacgccgagaagctgaaggtgggcggctcggacgcggaggacgacgacgaatacaaccggcccctg

SEQ ID NO: 429877 - DNA, 201 bp, Homo sapiens
ttgtaaacatatgtgatatagctacagatgctgccctggcgatggtaggtaaaagagagggacttgtacaattaatagatgatgcagttgccacacaaaastcacatttgatgaagtattattgcataatacatcaagaaaatccatgtgcacaagctttaaaagtagataacgtcatgcaaattgtcatcaaggctgtaa

SEQ ID NO: 429878 - DNA, 201 bp, Homo sapiens
ttacttaaaaaatttatggtatcttttggaaacagagagacatttaatgcttcaaaaactggggtaaggaatggaaagagtactgtgggaaaaacaaaacraacaaaaggaaatcattgaaaatgcaaactttacctggagcaattataattttctctaccagtaataagaataagaacatcatgattctcaactggaacc

SEQ ID NO: 429879 - DNA, 201 bp, Homo sapiens
tggctatagttttcttttatctagtctgtggtttgtaaagtgtgacaatgatcaatttcatgatttgaaaaaaccttttaaacataaaaagacaagcaaaygattgtacaagcccagactgtcctgtagagaggcagaatatgcttgaaccaggctggttcagggagggctcccttcccaggggcctcctacctttcaggg

SEQ ID NO: 429880 - DNA, 201 bp, Homo sapiens
agtgactcgtgaagtcagaagtaaatcaaaagtgcagtcctcaacctcccttcttgacttccctccctcaacctccctatggcttcttgaagacgtgttasctgagtcaccagtgaacaaaaacattcatctaaatccttggaaagcaggatgttttcctgaaacaaatctagctatcatgtccaattgctttttcgcctt

SEQ ID NO: 429881 - DNA, 201 bp, Homo sapiens
tgcaactcatctttgatgggtcatgtatggactcccccaactgagggttctggatatctgaagaccttcccagtctgatgttactgaggggtggaagactrgaggaagaagaaaggctgatggcagacatcaccagccatcaactcaaccgtgaatctgctagtcccacaaggttggtcccagagaggcaaattaggaaaa

SEQ ID NO: 429882 - DNA, 201 bp, Homo sapiens
catctaaatgtgtgttgttctgctatgtggcaaaaattctcatcttcctggaatacttcctgcacattttcagaacaaggccctccctcttagtgtccccrccagtagccctcagaagcactccttggttacctttgtgggactcagtttctttcgaattctgggagtcaatcatcagctgaaggaaatctagtcggtgct

SEQ ID NO: 429883 - DNA, 201 bp, Homo sapiens
gcaggcctgcttgcaactcatctttgatgggtcatgtatggactcccccaactgagggttctggatatctgaagaccttcccagtctgatgttactgaggrgtggaagactggaggaagaagaaaggctgatggcagacatcaccagccatcaactcaaccgtgaatctgctagtcccacaaggttggtcccagagaggca

SEQ ID NO: 429884 - DNA, 201 bp, Homo sapiens
tgttacctgagtcaccagtgaacaaaaacattcatctaaatccttggaaagcaggatgttttcctgaaacaaatctagctatcatgtccaattgctttttygcctttgccctccctgtttctcatcttctctgtcttttggatacagctttctggccaaagagttgccggttccatctctggtcataactgcttacccagg

SEQ ID NO: 429885 - DNA, 201 bp, Homo sapiens
atggcttccacaatgtcttaaaaagaaaaccctaaaaaacaaaaattatggatgaaggaagattgttcaatgaaaagtggacaaatgactttttcttgttraggcaaatagcgaagcactctgcttaatttccacggaatttgtgccagttttcaaagactacaatttgaagaggcattatatgcaaaaacgtgctgacaa

SEQ ID NO: 429886 - DNA, 201 bp, Homo sapiens
gtaaacctggccatgctttgggtggagcctacacaccttttcctctcctctcctctctcctctccttttctctcctctcctctcctctcctccccactccyctcccctcccctcccctctccttcctctctctttctttctctctctctctttctttcttcctttctgtcttgttctgttgaccaagctggagtgcagtgg

SEQ ID NO: 429887 - DNA, 201 bp, Homo sapiens
caggggtaaacctggccatgctttgggtggagcctacacaccttttcctctcctctcctctctcctctccttttctctcctctcctctcctctcctccccmctcctctcccctcccctcccctctccttcctctctctttctttctctctctctctttctttcttcctttctgtcttgttctgttgaccaagctggagtgc

SEQ ID NO: 429888 - DNA, 201 bp, Homo sapiens
gtctcgatctcctgacctcgtgatctgtccacctcagcctcccaaagtgctgggattacaggcatgagccaccgcgcccagcccacgtagctttattttgktattgaatctcataggaggttattcccagagtgtgactgggtagcatgggtagccctggacggacagggccgggacaatcttgccagctgagaacaggag

SEQ ID NO: 429889 - DNA, 201 bp, Homo sapiens
cactaacctataaattctttgaagattagacgcatgttttttattcaaatttgattcctgaagatttgattatattcaggaaaaaatattcatttgtgggrcataataatagcattgtgatcatgtgtttttaaaagagtccttacattttggacacttatgacccataaggacataattgaggaccttcatcttaagttg

SEQ ID NO: 429890 - DNA, 201 bp, Homo sapiens
tgtcatcactgctttctttgtctatctgttgcactaacctataaattctttgaagattagacgcatgttttttattcaaatttgattcctgaagatttgaktatattcaggaaaaaatattcatttgtgggacataataatagcattgtgatcatgtgtttttaaaagagtccttacattttggacacttatgacccataa

SEQ ID NO: 429891 - DNA, 201 bp, Homo sapiens
caggactgcagggtctctccaggtaagactgtctccacccacaggtgaggaactggggagttctgaaagctcaggtcaggggtcctgccgtagctctggcrctcctggcaaaggaaggggacttcatggcaggcgggtaaatgggtccagcacggaccatggggcacgaggagctgctttcctgtgtcaatagaggagcca

SEQ ID NO: 429892 - DNA, 201 bp, Homo sapiens
ggacacccaggcccctgtgcatgggaaagtgtggtaccagagtgaaaagggattctgtctggagtcttctggttcctgaggttgtgagcatctggtagggsacacatttgaacgagctaacagcataacatcactgatccttctgatctttctcatgctttttgtccctgctcagcactacctgttctgcaggcgggtcct

SEQ ID NO: 429893 - DNA, 201 bp, Homo sapiens
ggaaacactgtggctggagcggcctgtccttgttctttgattttcttcttttttgtttcataacttctttgtgagttgtacactgaccacccatctgtacygaccccacctagcctttccttatcctgaaatgccttgaaggaagagcaagattatccctgtgcttccttcaggacgtaagagaatccatcctgcccctcc

SEQ ID NO: 429894 - DNA, 201 bp, Homo sapiens
ctaatttacaccaacagtgtacaagggttcccttttctccacattctcgctggcatttgttgttgcctgtcttttggataaaaaccattttagctggggtragatgatatctcattgtggttttgatttgcatttctctaatgaccagtgatgttgagcaccttatcatatgcctatgtggcatttgtatgtcttcttttg

SEQ ID NO: 429895 - DNA, 201 bp, Homo sapiens
ggcctcccaaagtgctgggattacaggcatgagccactgtgcttggtcaaaaaaggcataattaaactatgaatgttctttctaagcaatgggcaaagtcwcagtggattaattctcacctatgttaataatcacattggagttctgacaaatgccccacaccaacaatggttacaatgatcacatatatttacttgttgg

SEQ ID NO: 429896 - DNA, 201 bp, Homo sapiens
tatctccttcccacatcaatacactttcaattaaaagccaaaactcggggggtggagccaagatggccgaataggaacagctccggtctacagctcccagygtgagtgacacagaagacgggtgatttctgcattttcatctgaggtaccgggttcatctcactagggagtgccagacagtgggtgcaggacagtgggtgc

SEQ ID NO: 429897 - DNA, 201 bp, Homo sapiens
gctgatctcttggcagaaactctacaaggcagaagagagtggggaccaatattcaacattcttaagggaaagaattttcaacccagaatctcatatccagmcaaactaagcttcataagtgaaggagaaataaaatcctttacagacaagcaaatgctgagagattttgtcaccaccaggcctgccctaaaagagctcctg

SEQ ID NO: 429898 - DNA, 201 bp, Homo sapiens
caaatggacaacaaaaaaaggcaggggttggaatcctagtctctgataaaacagactttaaaccaacaaagatcaaaagagacaaagaaggccattacatraaggtaaagggatcaattcaacaagaagagctaactatcctaaatatgtatgcacccaatacaggagcacccagattcataaagcaagtccttagtgacc

SEQ ID NO: 429899 - DNA, 201 bp, Homo sapiens
atggctgatacccctcctctatcaagctgcagcatatcaggtggatctcagactgctgcactagcagtgagcaagtctccgtgggtgtggcacctgccgakcgaggcacgggagggtatctcctggtctgcctgttgctaagactcagttggaaatgcagaagtcacctatcttctgcctcaatcttgctgggagctgcag

SEQ ID NO: 429900 - DNA, 201 bp, Homo sapiens
gtctagcagatttagataagtctgaggcatgttgttgagtgagaaaaggagtgagtgacagaatgacaaagtggactcactttccagttttccagcttaayatggaagttctgagaaaatgtcccctctacacattggacacagcaaattacaacacttgctcagcgttttcactgaaactgaaaaacaaactttcctgtt

SEQ ID NO: 429901 - DNA, 201 bp, Homo sapiens
tcgaccaaagttcacagtccatgtggcacatatgacattttattcagcaaaattaaatatttaataatttcatcaaattatcacctttctagtgattttgyatatgattctgcctttgtttaaaaaaaaaaccacaaattcattttatgcttaaatatctgagtttgatagataaccactatctcatctcagttatatcca

SEQ ID NO: 429902 - DNA, 201 bp, Homo sapiens
tagataaccactatctcatctcagttatatccactccctgctcagactcacccataaggtgcagcctttgaaataaaagaagtaaagcagaacacctttgytctgactcccaaagctgcaaaagatgtcatggggagtaagagctggggtagagccatggaaataccttcaggggatttagcattttttggagaggattca

SEQ ID NO: 429903 - DNA, 201 bp, Homo sapiens
aaatctacttccccagcactgatttggtcatctcctctatattaccaagtataacactctatacagaccatgagagagcacaatgcacgtacagaatcccygattatttatgcagcacattggatgaagcccgtcttcatttcagggttctatttgtaaagtaatttgaggtctctggtgttctggggcacagctttctta

SEQ ID NO: 429904 - DNA, 201 bp, Homo sapiens
tgattatttatgcagcacattggatgaagcccgtcttcatttcagggttctatttgtaaagtaatttgaggtctctggtgttctggggcacagctttcttraagagcaaaccagaagtccttagggaaatcaggctccacttacggtctcatcccttgactcagcctttagaacaatgggtttttctgttagaagaagtcc

SEQ ID NO: 429905 - DNA, 201 bp, Homo sapiens
agagtgatattctgatctccatggagtgatgggcaagaaaattgccatggagatccagaagtgccagcttgggacttccaagggagtaccttccccatccyaggtgtgccagaggaccgccttctctcagggctgagtctcctgtctgagcacacatacaggatagctacatagctggcctaaagccacaaataatgtgga

SEQ ID NO: 429906 - DNA, 201 bp, Homo sapiens
catatcactccttaaacatttaccaaatgaccaaatgcttgagttagatgaggtcacttgcaaggcaccactgggatattttaaatggaataaaatgagargatattgttaatggaggggggaagacattcttagataaagagaaaatatagagaacaaaactcaatgatttaatggcaaattatgaaattataagataat

SEQ ID NO: 429907 - DNA, 201 bp, Homo sapiens
caccgccaaatttgggatgaggtccatcgccactttccttcttcaactgtgttctgtgagtcttccttttagctgagtgctgctgtttgctgggctgtttrcctggagcttccctgccctgcacagcagtcttcagccaagctgctgaaagatttatgtgctggagaaggaggcagggctatagctgcagccaatagcaaa

SEQ ID NO: 429908 - DNA, 201 bp, Homo sapiens
gagcttccctgccctgcacagcagtcttcagccaagctgctgaaagatttatgtgctggagaaggaggcagggctatagctgcagccaatagcaaagaatygcacacacccctttgctgacctcttttgagttcatgttctatgaggaatcatgaaaagcttaatcagtgttatcggggagtccaagggttctgggttctt

SEQ ID NO: 429909 - DNA, 201 bp, Homo sapiens
cctgtgcttccttcaggacgtaagagaatccatcctgcccctccacttgctgaccctgaccttgagcatctcccttgagctttccaggtctcagtttcctytgttgtggaatggggctgttcatggaacctgtcctcatggtgccatgaggatgaagggaggtgacatatctaaatgtgtggtgaccatggtagtgttaga

SEQ ID NO: 429910 - DNA, 201 bp, Homo sapiens
tcatcaccaatgtccacaaagattattctcctgacatttccagaacttgtcagcagctttggtgggagcactttcaaatactgcaacattccccaaatctrtacaatcttcagtgacacctgggttaccccttcttgcccccctgacctgcagatatcttttggctggactccagggctcatgaaggcaaagctgagttag

SEQ ID NO: 429911 - DNA, 201 bp, Homo sapiens
gagaatagggcaagggacacccaggcccctgtgcatgggaaagtgtggtaccagagtgaaaagggattctgtctggagtcttctggttcctgaggttgtgmgcatctggtaggggacacatttgaacgagctaacagcataacatcactgatccttctgatctttctcatgctttttgtccctgctcagcactacctgttc

SEQ ID NO: 429912 - DNA, 201 bp, Homo sapiens
tcgcaggtgagctctgactccctttgcagaaatcatgaccgttgctttgattgaggttcaccttccccaaggtttctctgcacaacagtgttcccttcccrccccaagttgagtcattctcccttcctagtcccggtggacctgatggtgtggtttcctccactgaaccatcagccgcagttgttaatttacatcgaacct

SEQ ID NO: 429913 - DNA, 201 bp, Homo sapiens
agaaccatgagccaattaaatctcttttatttataaattacccagcctcaggtatttctttacagcgatgtaggaaaggactaatacacccagatatgctyacttttttcaaggtgatcaatcacaaagcagtcagtttattgcctctgcacatcaagtatctctgtaggaaaacccattaaggctgctgctccctatggc

SEQ ID NO: 429914 - DNA, 201 bp, Homo sapiens
gtaggacaaagtagttcccaaaaaaagcagaggtgtgggccctggaatgccaagcttcttaaaaagtccatgtgaatgggctccatatctacaaactgaawcagaaatcaggtctcagggattgtgactttatagatatgggggctggtaagtcactgactgaggaactggaatgctcaagagaaggaggtaacattaagg

SEQ ID NO: 429915 - DNA, 201 bp, Homo sapiens
ggaagttctgagaaaatgtcccctctacacattggacacagcaaattacaacacttgctcagcgttttcactgaaactgaaaaacaaactttcctgttttytacatttcagggttgatgttttacctgtgcaaacaaagatcccaggaatgtttatcttggggggtacatctactaaagaactgacctagaaaaggtggcg

SEQ ID NO: 429916 - DNA, 201 bp, Homo sapiens
cccttgtcaaatggcgtggacagataaaagttgctcagggcctgatgcatgagtttagcttccttttcacttcctcactaatgtcctggggaagagctcarctgatttttccttcctctcccctgaagctggaatggttcttttcttggttctctttttagattttagttcaactcccttcataacagccttgcccaggcc

SEQ ID NO: 429917 - DNA, 201 bp, Homo sapiens
atgtggaaatgtaatccccaatgctggtggtggggcctgatggaaggcgattgtatcttaggggcagtttctcctggtttcacaccaaccccctttgggtrtttcctcgtgacaatgagtttttatgagatgtggtggcttataagtgtgtggcacctcctccccaccctctcttgcttctgctccagccatgtaatatct

SEQ ID NO: 429918 - DNA, 201 bp, Homo sapiens
tggcttataagtgtgtggcacctcctccccaccctctcttgcttctgctccagccatgtaatatctgcctacttctccttcaccctctgccatgattgaamatttcctgagggctccctagaggcagaagtcgctatgcttcctgtagggcctgtagaaccatgagccaattaaatctcttttatttataaattacccagc

SEQ ID NO: 429919 - DNA, 201 bp, Homo sapiens
atgttactgaggggtggaagactggaggaagaagaaaggctgatggcagacatcaccagccatcaactcaaccgtgaatctgctagtcccacaaggttggycccagagaggcaaattaggaaaatgtggctgaaaagtatggtgtatataaatggatccatatgcgtcatgtgtgctttcagctgaaagacaggcaccttc

SEQ ID NO: 429920 - DNA, 201 bp, Homo sapiens
taaaaaacaacagagaaaaatcaatgatattatttctatgaagtgtccagaataggcaaatctatagaggcagaaagttgattattggatgcttagggcartggggtttgtggtggggtgttgacagctaaagtgtgtgagggctctagattgacaaaaacattttagtttacaatagtaatggtcatacatatttttgat

SEQ ID NO: 429921 - DNA, 201 bp, Homo sapiens
gcagcactgtcccccaaggaaagatctaggtgagtgtctagactcacatggttccatgtcaaggcagaggctgtgctgggcaaactgtttagtttctttcyagctcccctctgtttggtagagtaataccacttttggttccaatgaagaggctaacagaaaagccagtcatctattgcacgtaattgtgttggcctaagg

SEQ ID NO: 429922 - DNA, 201 bp, Homo sapiens
attgtgttggcctaaggagggcatggtctacactacagtttctgactcctgggctgcaccagcattgtctaaggctaaggcattgtctgcctggctgcccragtctgtagtgaccgccccacaacatggcagaccacgcacacagtgacacatttgatgtccctgtgtccaggcttgaagcagatgagatgccaacctgtt

SEQ ID NO: 429923 - DNA, 201 bp, Homo sapiens
acctgttcttgttaggcagcatggtgtctaattttggcttagcaaatgacgctccttggtcttcctggctcattagctgtgcccacgaggctgcactgacygggtcgtaaatgtatctgagatgtccacacggggctgctgctgctcctctgtaatactgaggtccacatgcaaaatcagctttttttcccccgtaattat

SEQ ID NO: 429924 - DNA, 201 bp, Homo sapiens
catcactagctcacagtattgcttactcccctgcctgacagtttaagataacctgctaagcaggtatattcaaaaaggaggtattaaaataaactgtcagrcatgtatatttaaaaagacatatctttttaaatataaaaagatatacataaatatgtatatcgcagtcttgtcttagcgatatacattcatgctttagac

SEQ ID NO: 429925 - DNA, 201 bp, Homo sapiens
catgctttagactcatattcctgacattattctggagaggtgatgttattttacacacatttattgtcacaaatactgaactaacagccctctttcatcayccagaaggaacatgctggaaatattccatctccaaaaaattctgatttaaaaatgaatgaatttaaaccatatcaattcattttaaaatgttagacaatg

SEQ ID NO: 429926 - DNA, 201 bp, Homo sapiens
atgagaggatattgttaatggaggggggaagacattcttagataaagagaaaatatagagaacaaaactcaatgatttaatggcaaattatgaaattatawgataatagcctccagtaactaataacagagcagaggagtaaatgagccctggactaggtcaagaagacaccttggaggggcttgggaattgaattaggac

SEQ ID NO: 429927 - DNA, 201 bp, Homo sapiens
ttaaaagtcaaattgaggtagaagttaatgggacaggtggagcctccactaaccacagtggaaagtaactcttctctccacctgctctaggatgccaggartcccaccagtgagagggttcatcctcctttactgtaacacaaaggggaaaaaatgtgtaaaatccaaattggctttcacagctcctgccttttcaggctg

SEQ ID NO: 429928 - DNA, 201 bp, Homo sapiens
attataagataatagcctccagtaactaataacagagcagaggagtaaatgagccctggactaggtcaagaagacaccttggaggggcttgggaattgaaytaggacttgaaagataagaacagaatgaggagaagaaaggaaagaagattagcagagttataattgagttgaaaaggagcccagttggttggagctaggc

SEQ ID NO: 429929 - DNA, 201 bp, Homo sapiens
tcattgcaaggtaaatagttctgtgtatgacagggtggaggagtgagtcataggagggaggggatgttttgggacatggcacaggaaagaggaaagagccrggggacagcttcccgtgaagtcttggtgttccccggtgtgttatgtaaatgatatcctggggtggaagttaggggagcaggaaccaccaggtccacagag

SEQ ID NO: 429930 - DNA, 201 bp, Homo sapiens
atctttaaaacagatgagggaacaggggcctgagtagcaccccaagtccaagttaacagaggagaggaatctggacagttactgacagatagaggagcacmaggctgacagccaggagaagccaggtttccaccgccaaatttgggatgaggtccatcgccacttgccttcttcaactgtctcctctgagtcttactttca

SEQ ID NO: 429931 - DNA, 201 bp, Homo sapiens
gtaccacggcatcataggtaggtggtgcctggaaggaaagaaacagaattggataatctgagattttgaattaactctcaactgagtccatgcagtactaytgaagtattagaagctccagagaataactcatactggtaaatgatcatagtattcgtgaagtattttaataactggcatgtccattgatgtgctcagtga

SEQ ID NO: 429932 - DNA, 201 bp, Homo sapiens
agataataataacttctatgcgtttgtagcgtccaacacttcagctacttctccttgaacatctcttttgatcttcaaaacagataagggaaaaggggccygattagcaccccaagtccaaggaaacaaagagaggagtttggacagttactcacagatagaggagcaccaggctgacagccaggagaagccaggtttcca

SEQ ID NO: 429933 - DNA, 201 bp, Homo sapiens
tgtcctgtagagaggcagaatatgcttgaaccaggctggttcagggagggctcccttcccaggggcctcctacctttcagggaggaacttctcaggctctstccagtactttgggtcatgatgaagaacatagcttggaatcatcaccaccacccctttgggaataaacatcccattgatttcaacatcttttttgcagac

SEQ ID NO: 429934 - DNA, 201 bp, Homo sapiens
tctacccatctatccatctagaagggtatgaatatacacgaatacatccattccaatctaatttcataggattcatgctagttttctccctttctgaatcmatgactccgttcttcaaagatgagaagcctggcttctatcatccttaatatatttacttctttgataaatcccctttatgtaaccaaacctcacccatca

SEQ ID NO: 429935 - DNA, 201 bp, Homo sapiens
catctttctcactgcagggccttgcggggtgcaaggtgatggctgcaggaaagcactggtcccatcgccttcccacccattcgccaacgcgggaaaggcaaggcctggcttacttagagcttccagagagcatagctgcttccatctcttacccaagtggtgctaaacaatttttcttccaatgtttgagggaagcagtct

SEQ ID NO: 429936 - DNA, 201 bp, Homo sapiens
agtgaaggaatcagtgattatgctttttataaaaattctcctggggagtggtgaggaggcatttttgctaaggcttcacctcttcccttcatctccagggstcatcccctcaccttattgggcaaaactgcatcaatctccttttgcagtttctgctggacatcagggtgagtggccagttcatataaagtgaaggaaaga

SEQ ID NO: 429937 - DNA, 201 bp, Homo sapiens
gcccttatttggatagcatggctcctgattaggtgttagatgcattaagttgctgcaaaagtaattgcggtttttgccattgaaagcaatcacaaaaattrcaattatttttgcagaaacctaataaatttccaggaagaaactttaattctgtggatctggaggaggctgagaactggcatttgatcttatgtaggtgat

SEQ ID NO: 429938 - DNA, 201 bp, Homo sapiens
aaaagttgctcagggcctgatgcatgagtttagcttccttttcacttcctcactaatgtcctggggaagagctcagctgatttttccttcctctcccctgmagctggaatggttcttttcttggttctctttttagattttagttcaactcccttcataacagccttgcccaggcctcattctaatcggtgttgggaactg

SEQ ID NO: 429939 - DNA, 201 bp, Homo sapiens
ttaagcttcagaaggagctgggccttgctgactttcctatctggcctcttccctatctcctgtggggccaagagcttaggacagtgtctcagaaaagcctmtaagtagggggtttttcccatgggattgtggtagtctgatttttcatatctattcaaatgttaagaaatattttgttttctgtatttttctattctttag

SEQ ID NO: 429940 - DNA, 201 bp, Homo sapiens
tccaggagctctgtcgtcggtggctgaggcccgagttgcacaccaaggagcagatcctggagctgctggtgctggagcagttcctcactatcctgccccgygagttctacgcctggatccgggagcatggcccagagagtggcaaggccctggccgccatggtggaggacctgacagaaagagcactggaggccaaggcgg

SEQ ID NO: 429941 - DNA, 201 bp, Homo sapiens
gaagggaggaccctagtccagagacttttcggctgaggtttcggcagttccgctaccaggaggcagctggaccccaggaagctcttagggagctccaggarctctgtcgtcggtggctgaggcccgagttgcacaccaaggagcagatcctggagctgctggtgctggagcagttcctcactatcctgccccgcgagttct

SEQ ID NO: 429942 - DNA, 201 bp, Homo sapiens
tgtgtgctgttgtttgctgggctgtctgcctggagcatccctgccctgcacagcagtcttaggtcaagctgctgaaatgtttatgtgctggagaaggaggyggggctgcagctgcagccagtagcaaagaatcgcacacacccctttgcttacctcctttgagttcatattctatggggaatcataaacaacttaatcagt

SEQ ID NO: 429943 - DNA, 201 bp, Homo sapiens
aatccatccccacaagccacaactgcagatctttacccatgcaattccctctgcctggagtgtacttgtgccccctagatgactcctacacatccttgcamgcccagccagacagaccccttctattaaagtctttccttaccaacctcctcacacagatgtaaccatttcctcctctgggtgcctcctatccccctcaca

SEQ ID NO: 429944 - DNA, 201 bp, Homo sapiens
caagtctgtagaaatcaatgcattcatagctttttgcttttattggtttttttgagacagagtcttgctctgtcacccaggctggaatgcagtggtgcaaytgtagttcactgcagcctcaaactgccaggctaaggtgctaccccttccttggccttgcaaagtattgagattacaggtgtgggccactgcacctggcct

SEQ ID NO: 429945 - DNA, 201 bp, Homo sapiens
gcagatctttacccatgcaattccctctgcctggagtgtacttgtgccccctagatgactcctacacatccttgcaagcccagccagacagaccccttctrttaaagtctttccttaccaacctcctcacacagatgtaaccatttcctcctctgggtgcctcctatccccctcacacagtcctattgtcctatttcctct

SEQ ID NO: 429946 - DNA, 201 bp, Homo sapiens
caccttattgggtaaaactgtatcaatttccttctgcactttctgctggacatcagggtgagtggccagttcatatataatgaaggagagaacactgctcktggtttcatagccagcaaaaataaagataattgattgggccatgagctccagatcagacagagctgaaaggagagaaaagacattttaggtaaatcaggt

SEQ ID NO: 429947 - DNA, 201 bp, Homo sapiens
tttccccagtgtatgttcttgaaaacattgtcaaaaatgagttcactccaggtgtgtggacttgtttctgggtgctctattctatttcattggtcaatgtrtctgtttttatacaaacaccatactgttttggttattatacccctgtagtataatttgaagtcaggtaataagatttctccagttttgttctttttgctg

SEQ ID NO: 429948 - DNA, 201 bp, Homo sapiens
gccaaattgttcactattggcatatagaaatgctactaatttttgtatgttgattttgtatcctgcaactgcaactttactgaatattttatcagttctartagttccttggtggagtctttaggtttttgcaaatatcatttgaaaataatttggagttatcatttggagggtctttttcaaatatcatttccaaacatt

SEQ ID NO: 429949 - DNA, 201 bp, Homo sapiens
gttacctagacctatcagtgaagagaagtaggaaatatatggttttttttgtacacacacacaaacacatgtatacatttcatctatctatatatctatcrtatatctgttatctatcacctatctacccatctatccatctagaagggtatgaatatacacgaatacatccattccaatctaatttcataggattcatgc

SEQ ID NO: 429950 - DNA, 201 bp, Homo sapiens
ggatggaatgcaagaggtgtaagaaaacatatttcctgtctcccagaaatatcaggggagatgggctgaaaacattaaatgaaaactaataatataatackggcttcagttgtatgttacaaaatatatgtgctacaaaaaggcataattttattttttagatgcagtctcactctgtcactcaggctggagttcagtggc

SEQ ID NO: 429951 - DNA, 201 bp, Homo sapiens
tgttcttaagacagggcttggccgaatgtgaactttgttcttgatgagaaggtaaatagcggctgccaggctctgtcaagcatgaggtgtgagtgggaggmtgctgcagagtggaaatgaggtgacttagttgttaggggcaagctgagccccagccacagaggctcacaactgcagtggctcaaacaagtggattactcc

SEQ ID NO: 429952 - DNA, 201 bp, Homo sapiens
aagcaattcccctgcctcagcctcctgggtagctgagattacaggcgtgtgccaccatacctagctaatttttgtatttttagtagaaagggggcttcacyatgttggtcaggctggtcttgaactcctggcctcagatgatctgcctgccttggcctcccaaagtgctgggattacaggtgtgagccactgtgtctcatc

SEQ ID NO: 429953 - DNA, 201 bp, Homo sapiens
aatgcacagggcagggttgagctaggtggctgcccagatcacttccagttgttcgtctgttctcattagcagacggtgaggtgcagaccttgttgtctggrttgtaattgcagtaatgtccacaaggactggagcaagaactcacaacaggatttggaatcacagaggcaaaaagtagcaggtgcagaaacctgaatgcag

SEQ ID NO: 429954 - DNA, 201 bp, Homo sapiens
tggacagttactcacagatagaggagcaccaggctgacagccaggagaagccaggtttccaccgccaaatttgggatgaggtccatcgccactttccttcktcaactgtgttctgtgagtcttccttttagctgagtgctgctgtttgctgggctgtttgcctggagcttccctgccctgcacagcagtcttcagccaagc

SEQ ID NO: 429955 - DNA, 201 bp, Homo sapiens
caggatggtgagggtcctggagtgaaagatgagtgctcagaggagtaaggaggaggcaggagtgagtagagtgaggccgctgaggagtccgtgaggactcygggtccttgtttaaaaattttttctgcgcagagtaatgtgatggaggttttacttgaggaaaattggattgacggcagggtacggccagtctggagggtt

SEQ ID NO: 429956 - DNA, 201 bp, Homo sapiens
atgaatcaatgacatctgttctttaacttcttcagagaaaaggttccaaatctttctataaatataacacattatttaaaaattttcaaaaggcatgaatatattttccctgcagacagacatgcatgtgcacatgtgcaagcacacacacatgcaaatacatgaatgtcatttgctaaatgttcacattaaaaaacttaa

SEQ ID NO: 429957 - DNA, 201 bp, Homo sapiens
aaggggatgaggatcacactgtccatcatgatcagcagtttgtaatctgccgctgccatgttttcattgattagtcttcgtcagatctaagctaatcaaaycattcccactaccaaatgctgtccctaaaccctcctagtcaccaaaattagaaggtggatgggagaaatgcttatttattcattcatagatctgcataag

SEQ ID NO: 429958 - DNA, 201 bp, Homo sapiens
atgaggatcacactgtccatcatgatcagcagtttgtaatctgccgctgccatgttttcattgattagtcttcgtcagatctaagctaatcaaatcattcycactaccaaatgctgtccctaaaccctcctagtcaccaaaattagaaggtggatgggagaaatgcttatttattcattcatagatctgcataagataata

SEQ ID NO: 429959 - DNA, 201 bp, Homo sapiens
tacctgaatcacagatgctcttttgtcatacacagccagcattcctctgggtttcagcaagttggcatatcttaagcttcagaaggagctgggccttgctsactttcctatctggcctcttccctatctcctgtggggccaagagcttaggacagtgtctcagaaaagcctctaagtagggggtttttcccatgggattgt

SEQ ID NO: 429960 - DNA, 201 bp, Homo sapiens
aaggattcagtcggagctccaatctcgtcaggcaccagcgaacccacgaagagaagtcttatggctgtgtggagtgtgggaagggctttaccctgagagartacctgatgaagcaccagagaacccacctgggaaagaggccctacgtgtgcagcgagtgctggaaaaccttcagccagagacaccacctggaggtgcacc

SEQ ID NO: 429961 - DNA, 201 bp, Homo sapiens
gcagggtactgtacacatggtgggtaaccaggaatgttggtggagttgtcttgggtgagattgctgggcgtctcatcccctctgactctgtggtgatagcwatagactaatggttgcttgggactcaaatgcagccacactgtgtcccaactaataaagttggtcttgttctgcaaaggaaaataatagaaatcatgttct

SEQ ID NO: 429962 - DNA, 201 bp, Homo sapiens
ttttctatggagcatctttgtcttgtttacctccctgaatttgcacatagtttataacggcaagcagattcccattgcaatattctactcccaagtaattwtcctcttctttcagagaacctctctctgtttgtatttaggttgacaagagcttcatcccatgaagacctgggcagagactatcctgcagtggggtaacct

SEQ ID NO: 429963 - DNA, 201 bp, Homo sapiens
gtattctcttccattcttcatcctcagctaaagagatggcacttttcataaatcccactgggcctaaagactagagttcaacagaaacattttttctcacrttagttgtggtgatcttcatggttgcacaaaatatattgaagaggcatccttatttaacaaatatttattgactgtatatgatattatggcaagccatat

SEQ ID NO: 429964 - DNA, 201 bp, Homo sapiens
gctgacttgccgcctcatgggagccactccctcttaggtggctctttggagttgcagcgctgccctgcttttgtctggtcactggagtaacccaacagtgygactgtcgactccatggcaggcagctggaagggctcatgacagctcagaaccccatggctgtgctcctacttactctttcaaggtgacaggcttgccttt

SEQ ID NO: 429965 - DNA, 201 bp, Homo sapiens
ggagggtcgtgtttggagatcccagcagaggcagcatatagtgcatttggatccttgccccagaatagttagtggaaatgtgtgcaccatctactgaaacyagggtggccttgggttttctactcctgttccttcttttattgtcacagctatggcaaatcaatgacactaatctctgcttctacactttctagaagttac

SEQ ID NO: 429966 - DNA, 201 bp, Homo sapiens
atctttctcactgcagggccttgcggggtgcaaggtgatggctgcaggaaagcactggtcccatcgccttcccacccattcgccaacgcgggaaaggcaaggcctggcttacttagagcttccagagagcatagctgcttccatctcttacccaagtggtgctaaacaatttttcttccaatgtttgagggaagcagtctc

SEQ ID NO: 429967 - DNA, 201 bp, Homo sapiens
attgactaagttgaaatctctggtgttctggggcacagctttcttgaagaccaaagtagaaatccttagaataactcattctccacttagggttccatctsttgaatccacctttagaacaatgggtttttctggttgaagaagtccttgcgtgtctaatttcaaggggatctacaatagttaaacaagcatatggagaat

SEQ ID NO: 429968 - DNA, 201 bp, Homo sapiens
tctttctcactgcagggccttgcggggtgcaaggtgatggctgcaggaaagcactggtcccatcgccttcccacccattcgccaacgcgggaaaggcaaggcctggcttacttagagcttccagagagcatagctgcttccatctcttacccaagtggtgctaaacaatttttcttccaatgtttgagggaagcagtctcc

SEQ ID NO: 429969 - DNA, 201 bp, Homo sapiens
ggcactaggggtcctggacacccactggggatgatgagctggtagcgacctgttttgcatgagtgccaagtcaggaaaaataaagatatttgtaggcattaaaaaaaaatacatttctttaaaaatgagaagatgcaatatttgtaaactgttgaagcttccttattgtgccatcacttaagggtttcatttctgtttaaa

SEQ ID NO: 429970 - DNA, 201 bp, Homo sapiens
ttgtagtgttattctccagtgagatcctaagttatttgtgggtataaaagcaaaatcttagacattttctgtttagtctctgtacctaatagttgcttagyaaatgattactatgttgaattgacctgacttttgggatctgtgttcagtcttttgaaaatgccttgtaaaaggtaattactgtgttctccagtggaatat

SEQ ID NO: 429971 - DNA, 201 bp, Homo sapiens
aggcccagtttctcctggatcttgtggggtttcatggcatcgggcaggtcctgcttgttggtgaagatgaggattatggcatccctcatctcccggtcatygataatgtggtgcagctcctggcaagcctcatcggtgcggtggcagtcggcacagtccactacgaagatcagaccttgggtcccagtgtagttatgccgc

SEQ ID NO: 429972 - DNA, 201 bp, Homo sapiens
gatattcataagccaagatctaggcactaagtatactcattgctattgaaatgtcattgttatctagccctatcagtgaagtagggaatatatgttttatmcacacacacacacacacacacacacacacacacacacacatgcatgctcacacatacaaacacatatatttacatctaattatctatcaactatctatta

SEQ ID NO: 429973 - DNA, 201 bp, Homo sapiens
tgggatgaggtccatcgccactttccttcttcaactgtgttctgtgagtcttccttttagctgagtgctgctgtttgctgggctgtttgcctggagcttcyctgccctgcacagcagtcttcagccaagctgctgaaagatttatgtgctggagaaggaggcagggctatagctgcagccaatagcaaagaatcgcacaca

SEQ ID NO: 429974 - DNA, 201 bp, Homo sapiens
cagtacattagattaagcccatctttatttcaaggttttattgactaagttgaaatctctggtgttctggggcacagctttcttgaagaccaaagtagaartccttagaataactcattctccacttagggttccatctcttgaatccacctttagaacaatgggtttttctggttgaagaagtccttgcgtgtctaattt

SEQ ID NO: 429975 - DNA, 201 bp, Homo sapiens
gttcataattctttctgtggcgcaggctctgggtgatctggtttctgtctgcctctgccacctcttctggtgcagctctgctcgtcactgctgaagccacmctgggatatggcttgttcttggacacccagagtaatttcttagcctcagggcttttgcctggaatgctcttagaatgactgactcattctcatccttgag

SEQ ID NO: 429976 - DNA, 201 bp, Homo sapiens
agaggcgggaggatggcttgagcctgggaggcagagtttgcagtgagctgagattgcaccactgccctccagcttgggtcgtagagtcagaccctgtctcwaaataaataaataaataaataaataaataaataaataaatttgtggataaacttgttcctttctatcacaaatacgacaaaataaatttatgattggatg

SEQ ID NO: 429977 - DNA, 201 bp, Homo sapiens
atgcatttcaaagggaaaaataaaactttgcagtagattaaccttgcgaacacactttcaagtactgccagttaaaatcacccttactgggatagtgtgcytcctgatcggtatgtttgatataaatttccaagtagaggttctcacttggtggatctggaggaggctgagaactggcatttgatctcatgtaggtgatcc

SEQ ID NO: 429978 - DNA, 201 bp, Homo sapiens
agaccctctgaatggggcagtgcataattaggattattatgcaaggacatttttgcttatctgtggtggtagatatataatgaaaactatacacagaccatttgtgtgtgtgtgtgtgtgtgtgtgtgtgtgtgtgtgtgtgtgtgtgtattttatgtgtggcccacgacacttcttcttccactgtggcccagggaagcc

SEQ ID NO: 429979 - DNA, 201 bp, Homo sapiens
tctagttcattagggtgtgacacacagcaagagtctcacacaggagccacccaaggcttcatatgatgaagggtaatgtggtccaaacagggaagagataytgaaagacaaaagagctctttaaagagattatggttagaaatgacagtagagcattcgttaagctgggtggtacatacgtgggtatctcctatgccactc

SEQ ID NO: 429980 - DNA, 201 bp, Homo sapiens
gaagcaaacatgactaataggctatgaccactagcatcaaataaaatatgacaaagtgattgtcaccattcaaaaaagaggttacacgtctgtaaccaagraagtgaaaacagatagaaaaagcaaattctctgtgcgacaaggattattggccaaacttctggttcataactctttttgttatatatacaaacaaaaaca

SEQ ID NO: 429981 - DNA, 201 bp, Homo sapiens
acaacttaaaatttttcatcagtggcactagccacatgtgcagtgctcaatagctatatgtgtctagtgatttctagatgaaacactaaaacagtaggctmtttcctttatcacagcaagttgtattgggatagatagagagatgatagctagataatcagtaagtagataaatagatgattgatggacagatgatagata

SEQ ID NO: 429982 - DNA, 201 bp, Homo sapiens
tagataatcagtaagtagataaatagatgattgatggacagatgatagatagatagacagacagacagaagtagatgtagacatggacatatttaaatctstatgccaaagtcagcctactcctgctctctagaaccaatgattaaatattcaggaattttgtgacatgattgccaaatcttggtggcttgaaactgaaca

SEQ ID NO: 429983 - DNA, 201 bp, Homo sapiens
ggccaaggtgggtggattacgaggtcaggagattgagaccatcctggccaacatggtgaaaccctgtctctactaaaaacacaaaaatcaaccaggcgtcrtggtgggcacctgtagttgcagctactcaggaggctgaggcgggagaatcgcctgaacctgagaaacggaggttaaagtgatccaagatcacaccattgc

SEQ ID NO: 429984 - DNA, 201 bp, Homo sapiens
ataatgattggtttttcatattattaagacatgttattatactcagtcacttgagcaacattgcagaataaataacctaagaatattttattctatgaacrattctatttgtgaaagtatatacatttgctttgatacaactgtaattagcatgtacacacatatttttgttcttttttcttaacatttcagatatacgtc

SEQ ID NO: 429985 - DNA, 201 bp, Homo sapiens
actatgagccatactctttgtaaagaaaaaaattttcaaattttaaatgtatttgacaatgaattgaaatcagttccaattataaatgggttttcaagggaaaaaaaatccagaaatgtagtctttacgctgagatgcttaatattaaaattaaatttgacattcatctttgaggtccagaggtaataagactggtccaaa

SEQ ID NO: 429986 - DNA, 201 bp, Homo sapiens
tttaactctgtatgtattcaggagaacaataggtagtttgagaaaatagacccactcaggcaataaaatgctatattagccttgcaaatgttgctcttccrcaaaaaaaaaaggaaaggataaacctaaacttaatcctttatgtactatgttacatatacatcacattttagataataatgaatgccagaatgtgactta

SEQ ID NO: 429987 - DNA, 201 bp, Homo sapiens
aaattataagcaccctttactgatggctatagttgaatgtcagactctaaagcaagattcttaatcatttatgttccatggactcttttggctatgtgatratacaaatggactcccttgtttttaaatgcataaaccaaaatatgctagccctttgggaagccaaggcaggagggtagctggaatccaggagctcaagac

SEQ ID NO: 429988 - DNA, 201 bp, Homo sapiens
accttccctttcctaatattaacccttctcgcataaattataagcaccctttactgatggctatagttgaatgtcagactctaaagcaagattcttaatcwtttatgttccatggactcttttggctatgtgataatacaaatggactcccttgtttttaaatgcataaaccaaaatatgctagccctttgggaagccaag

SEQ ID NO: 429989 - DNA, 201 bp, Homo sapiens
agagggtttgggaagaaaaagtaggttaaagggttgaccagagtgcctttaaacttttctccctatacaaaagtgatcactgtttcttttctgtccagatwctctcggcatttagtgacaaagaactagctgcttatgcaaaagcaggcgccgtggcagaagaggctctgggggccatcaggactgtgatagctttcgggg

SEQ ID NO: 429990 - DNA, 201 bp, Homo sapiens
gttggaagtagtggctgtgggaagagcacaacggtccagctgatacagaggctctatgaccctgatgagggcacagtaagtgggaagaaccaagctttccrgagtgggaagctggatacaaattggccctttgaaattggtttttcagtaacaaatttgcgtgtgaatccagttttggtaaaaagcctacaaaatggcaat

SEQ ID NO: 429991 - DNA, 201 bp, Homo sapiens
gggtttaaaaacaaaactgagcgcccatggggtgtgacagtcatctgcaggggcttgggtggcccatcaggcgaggctttctcggcacccgaggctccagsctgatctcggtcttatcctgcgaccgggctggttctggcgggtcgccagggtgggcggcggccccagccgggcgccccggcggcaagagcggcaggctgc

SEQ ID NO: 429992 - DNA, 201 bp, Homo sapiens
aaaacagtagatgtggaacttgacagtgttcccaagagtgctatttagagaattatgtgtggattttcttttttcctgagtactcttggggagcctatcascagggtgggtcagatatagcctttgagggatgtggacgcagccattggatccagaacactggcatttgctacatgactttaatatttgttaaaggagagg

SEQ ID NO: 429993 - DNA, 201 bp, Homo sapiens
ttcttcaaaggtttagctaataatgtttgagatgcaagattgtccaactttgctagataagtcccctgaatgactcagttaggggttaaaggattatagcmtggtagatgattaatataaaattttatacagcatgtgtcagttttttataattcagaattcatttatcttatcatactttatgatacattaaaatagtta

SEQ ID NO: 429994 - DNA, 201 bp, Homo sapiens
gttagaccaagatagggatggcttaatcaccataaaaatcatcatgttggccatgctggcctcaatggtataagtcttggagggttgttgttttgaagctsctgacaccctcatgcaacgatcctccaaatggacaatctagtaactttttagtttttttttcttttttatacccttcttatagtttgtggactttggttt

SEQ ID NO: 429995 - DNA, 201 bp, Homo sapiens
cctgcgaccgggctggttctggcgggtcgccagggtgggcggcggccccagccgggcgccccggcggcaagagcggcaggctgcgcccctggcccgcgccyagcctggggagagagctgggcgggcggcgggagctgctctcgcgggccgcggccctcgccctggctgcaacggtaggcgtttcccgggccggacgcgcgt

SEQ ID NO: 429996 - DNA, 201 bp, Homo sapiens
tttgtatcaggatcccagcaggaaacaaatggcacagcaaatgggttaattgatgagtttgctaaagggtctatttacaaaggcctggaaagtgttaaggkaagcagtacccaagaaggaagttaacaccccagcaatacccagctggaaactgctaccaccctaagcctaaaggcaagagaagggaaagatagccagaac

SEQ ID NO: 429997 - DNA, 201 bp, Homo sapiens
tcatgtcagctgaaatccaacttagtaattaaatggataaaaagacaccaaaacatccacactctcaaacactgctgcatacttctcatgtaaccaaaagmccctattcattgtcttctctcctctttttttatttgtttaaaaagcctcagtaagggcaatttaaaaaaaaattagcactttggagaataaattgtttat

SEQ ID NO: 429998 - DNA, 201 bp, Homo sapiens
cccatttttggtaaatatgacgtgtttcaaactgtgacagccattatttggtagcaaagaagttagaattaagtgtcatgtcagctgaaatccaacttagyaattaaatggataaaaagacaccaaaacatccacactctcaaacactgctgcatacttctcatgtaaccaaaagcccctattcattgtcttctctcctct

SEQ ID NO: 429999 - DNA, 201 bp, Homo sapiens
actttaaataaaaatccaaagaatatataattatggaagaggagaaattccattccacagctaagtattattttatttcctttttttagtttcgatactcygattggcaggataaattgtttatgtcgctgggtaccatcatggccatagctcacggatcaggtctccccctcatgatgatagtatttggagagatgactg

SEQ ID NO: 430000 - DNA, 201 bp, Homo sapiens
aggctgaggcgggagaatcgcctgaacctgagaaacggaggttaaagtgatccaagatcacaccattgcactccagcctgggcgacagagtgagactccawctcaaaaaaaaaaaaaaaaagatacagaacattctcatctccataaagatccctcatattgcccttttagagccatgcatatatcccttcctcccaccct

SEQ ID NO: 430001 - DNA, 201 bp, Homo sapiens
ctccagcctgggtggcagagcaagaccctgtctcaaaaacaacgacaacaaaaaactgtctgcagacagcaataaattgtccttgctgcacctgtgctgtmtaagtttggcttattatagtcaatgacccacattcttaagatggatgattttttaaaaagtagagacaggctggcgatgacaccggacagagctaactgg

SEQ ID NO: 430002 - DNA, 201 bp, Homo sapiens
tgatttgcttttcaggaattctgtgcagaaggcacacatctatggaattacttttagtatctcacaagcatttatgtatttttcctatgccggttgttttygatttggtgcatatctcattgtgaatggacatatgcgcttcagagatgttattctgtaagtagctttagaaatattaagattattctataataaggtttt

SEQ ID NO: 430003 - DNA, 201 bp, Homo sapiens
tctccacaatccttcagaagaatagacattcctaattttaaatcatgattttttttaattttagaaaacaaataacttaattgacttagcgacactgttarcatacttatctttcctgtgtatgtgagctctgtaaggcaggcgaccatttcttatgtatccatgtatctttgtagtaccttcgacagttacttttgtgct

SEQ ID NO: 430004 - DNA, 201 bp, Homo sapiens
caattccaactgcttccgtctcagagtatcttgaaataatgatctgaccgcctgttagaccagtgaagggaaggaatttgggttgatttaagaagagaatmctcatggtcatggtagactgatatggagagaaaacattttgaggaaaaatactcaactaaattcatttctactccagcatgcagtttcaagtcaagttcc

SEQ ID NO: 430005 - DNA, 201 bp, Homo sapiens
cccagggtattcacgcaaggatggggcagagtcctgcaaattgtcctggtccttcaagagctaaagacttctcatgttttttttgttttttttttgttttkttttttttcatagaaataggctttatttgggtagctttggcttattctgtaaatatctctctccatgtagacactatcatttcgaagacctgtatctctt

SEQ ID NO: 430006 - DNA, 201 bp, Homo sapiens
acaagccttctttcaaactacacaattccaactgcttccgtctcagagtatcttgaaataatgatctgaccgcctgttagaccagtgaagggaaggaattygggttgatttaagaagagaatcctcatggtcatggtagactgatatggagagaaaacattttgaggaaaaatactcaactaaattcatttctactccagc

SEQ ID NO: 430007 - DNA, 201 bp, Homo sapiens
atggctatttttaaaaaattgagatacaaacacatgccataaaattcaccctttaaaaatatacaattccggggtttttagaatattcacaaggttgtacmaccatcactgctatcgaattccagaacattttcaccacctcattaagaaaccagtcactctgcattccaccctcactctagcccttggcaaccatgaatc

SEQ ID NO: 430008 - DNA, 201 bp, Homo sapiens
agcctctcctttttccttggtttccaaggcaaactactggtctttctgtttgatgccttctttcataatgtgctcagcacattccattaggttgcaatctrggcttgaaagagggaagcaactctttttaagatcatttggtatgtttctgctctggtgggatgattttaaagcagtggtgaacagccatttttgaaacag

SEQ ID NO: 430009 - DNA, 201 bp, Homo sapiens
tgcattttcaaagcatcccactggctgctgtgttgagaatagacttggttgggaatagggacaagagtagaagcaaagatctcttccctattacttccctwtaagaagaaatgcagtaatacttccctactactgttgcttattattgttgcaatgttcttcttaattcttgcttttaaacagatacatttttatgctcaa

SEQ ID NO: 430010 - DNA, 201 bp, Homo sapiens
gaatcaatgaatagatgattgaattaatttacaaagagacttgctttagtaattgtcaactcttcacttattcaacaaatatttgagggtgtttcatgtgygaagtaccattctgtgtgttcgtaatatatcagtgaacaaagcacagatctctgtccttttggtgcttacattccagtagagggagatagatgataaact

SEQ ID NO: 430011 - DNA, 201 bp, Homo sapiens
aatcgatcatctggcagccatgtctagcagcatctatagcctatgccattgcatgttggctttcccccaaggtgcatagtaggtttatttgaggactgaaytcacatcttatacctgtttatttctcatggaactttctactgcaggacgtgacaggtgctagactgtcagtaaagatggttgaatcaatgaatagatgat

SEQ ID NO: 430012 - DNA, 201 bp, Homo sapiens
ctagtaaaagcttattttccctaataaaaattatttacagtgatgatgattatcatttgtgtggtagtacagaagaaaccacaaactggaagtcagggccrgagctttatcagaaaaagcttacttggaactgatcaaggcccttacacactttgtgcttcaattccctcaactctaaaaagagtataaccagcaactaaa

SEQ ID NO: 430013 - DNA, 201 bp, Homo sapiens
tcagaccagcttcttacacatacccaatgtgacatcagcctctgaagccccagggcctcacggttcaaacttgtgtccagggccaggaaaccaaatctgaytgacccagattagtcagatgtctgactctgatttaatcacggatttaaagcatgctcatgttgttgacaattgggatctccttcccattgtgggtggaca

SEQ ID NO: 430014 - DNA, 201 bp, Homo sapiens
ttgatataaggacactccaaagtgcaagaaatacaggcagtttgtgtgtaactggctcttacagccacaggctctaatatctgagtcttcctatacatctwttccattcctcggatgctgtatattcagaccagcttcttacacatacccaatgtgacatcagcctctgaagccccagggcctcacggttcaaacttgtgt

SEQ ID NO: 430015 - DNA, 201 bp, Homo sapiens
tacataatttggaatcatcttatgagtaaaactttatcatttacctggataaatgcatcatatttatgtaaaaatcatcatatatatataaatcatcatamacacacacacacacacactccctcatagagtttatattatagtacggaggacagacataaataatgtacatactaaataagtaaaccacagccaatgtta

SEQ ID NO: 430016 - DNA, 201 bp, Homo sapiens
ctgggcagggagtggggagggaagactgcctcataaccatcttgacccagggcttgtctggtcactgagattaagggccctctgtgccacagctaacccgyaagggagttgatccatgactagaatgtcaagaggagtgtcaagtcattactggtttctccttgtgtaaattacacagcaggggtagcagaatagcattat

SEQ ID NO: 430017 - DNA, 201 bp, Homo sapiens
tttctccacatcctctccagcacctgttgtttcctgactttttaatgattgccattctaactggtgtgagatggtatctcattgtggttttgatttgcatktctctgatggccagtgatcatgagcattttttcatgtgtctattggctgcataaatgtcttcttttgaggagtgtctgttcatatccttcacccacttgt

SEQ ID NO: 430018 - DNA, 201 bp, Homo sapiens
acacacacacacacactttaatgtcttgatattctttcagacatcaggaagccagatccagtcagaagaatttgaactaaatgatgaaaaggctgccactrgaatggccccaaatggctggaaatctcgcctatttaggcattctactcagaaaaaccttaaaaattcacaaatgtgtcagaagagccttgatgtggaaac

SEQ ID NO: 430019 - DNA, 201 bp, Homo sapiens
gctgatccatgttttctgtgttagaaatttgacaccctggttggagagagaggggcccagctgagtggtgggcagaagcagaggatcgccattgcacgtgmcctggttcgcaaccccaagatccttctgctggatgaggccacgtcagcattggacacagaaagtgaagctgaggtacaggcagctctggataaggtcagt

SEQ ID NO: 430020 - DNA, 201 bp, Homo sapiens
agcttgctaggacaatatgtggttcccaggacttgggaacccctgggtgtctagagttcttgaagattctcttggctgctggctgtgggtactttagggcwtcatttccttgacttctgagtgtctcaactaactgctgaagaaacactgtgtagctctgtttcctcccctgcccctcaatcctgcttctttccacatttc

SEQ ID NO: 430021 - DNA, 201 bp, Homo sapiens
gcacctgttgtttcctgactttttaatgattgccattctaactggtgtgagatggtatctcattgtggttttgatttgcatttctctgatggccagtgatsatgagcattttttcatgtgtctattggctgcataaatgtcttcttttgaggagtgtctgttcatatccttcacccacttgttggtggggttgtttttttc

SEQ ID NO: 430022 - DNA, 201 bp, Homo sapiens
aaagagattggaattaaaaaagctatttcagcaaacatttccatgggtattgccttcctgttaatatatgcatcatatgcactggccttctggtatggatycactctagtcatatcaaaagaatatactattggaaatgcaatgacagtaagtagttctcctaacatttatgaagaatatgaaaatcttatttctccatct

SEQ ID NO: 430023 - DNA, 201 bp, Homo sapiens
ttgaacattgcatctatgaaaaaatacatgcacccccagtgcccatccacaaagcagagaagttgattacttggttctagaatgttggttcaggtgggcargagaggaatgagagtgtaaaggcacaatgaagaaatgtctgcagagcctcatgagttaagcacaggtgttgtgggtttattgtaatgaaagtaagccaat

SEQ ID NO: 430024 - DNA, 201 bp, Homo sapiens
gactttttaatgattgccattctaactggtgtgagatggtatctcattgtggttttgatttgcatttctctgatggccagtgatcatgagcattttttcaygtgtctattggctgcataaatgtcttcttttgaggagtgtctgttcatatccttcacccacttgttggtggggttgtttttttcttgtaaatttgtttga

SEQ ID NO: 430025 - DNA, 201 bp, Homo sapiens
accaggtgcttttctggaaataaagttcaactctgtacttgtctaagcatataaataaacaattcattttaagggtgctgagttcatctgtccagctcagrtatttctaagtctctcattagcatttttactaagctgaagtgtcacaggaaagaccttatcttggtacacttttgggggtaatgctgatgtcatctgtat

SEQ ID NO: 430026 - DNA, 201 bp, Homo sapiens
taaaaacagtactggtgcactttctacaagacttgccacagatgctgcccaagtccaaggagtaggtagactgcactctacttgtagttttttacataacrtggttttagataagcatgtagcatacccacacttgttaagatgcttccagctagaaatagcagaaagctcaaatcaaaactgctgtaaacaataagcaga

SEQ ID NO: 430027 - DNA, 201 bp, Homo sapiens
ccaggccggactgtagtggcgctatctgggctcactgcaagctgcgcctcccgggttcacgccattctcctgcctcagcctctcgagtagctgagactacaggtccccaccaccacgcctggctagtttttgtatttttagtagagacagggtttcaccatgttagccaggatggtcttgatctcttgaccttgtgatccg

SEQ ID NO: 430028 - DNA, 201 bp, Homo sapiens
ttattgcatgaacataaaaattttaaatagagtttgtatttgttctatttgttttaatcattacctgtgatggttaagtggcactctgccagttttgcctsgcaataaaatacacaaaatgtattctactttagccaacacttcagagttgagaaattttactggcaatttttgctcatcctgacgttgatgatttacaca

SEQ ID NO: 430029 - DNA, 201 bp, Homo sapiens
tattgggtaggattacatttgattatctatattaggaaacccagaatagcatccgtttaagcaaattaagagtttttatttctgtttcacatgccaaaatmttagaggtgaaaaacccagggctagaacagtagctccacagtccccatagacacaagctcccttcatctttatctgcactaccctggcatcaggtttcca

SEQ ID NO: 430030 - DNA, 201 bp, Homo sapiens
ttaatcctgagttctagtttgattgcactgtggtctgagacacagtttgttataatttctgttcttttacatttgctgaggagtgctttacttccaactaygtggtcaattttggagtaagtgcagtgtggtgctgagaagaatgtatattctgttgatttggggtggagagttctgtagatgtctattaggtccacttgg

SEQ ID NO: 430031 - DNA, 201 bp, Homo sapiens
ggactctggagctcctcaggttactaacccagcactagatttccattcttgagactctgagaaaggagcgggtccaatctggaacgctcatagattctttyctaggagggagagtcaatttgagttggtatctgtgttagtccattttgtgttgctaggaaggaatacctgagactgggtaatttatgaagaaaatatgtt

SEQ ID NO: 430032 - DNA, 201 bp, Homo sapiens
gagatgtttacttagtctattctttagaattgttggatgcttggacaaccagacttaataggagccaaatgagaaaggcatgttagaagaaaaaaaggttyatattacaagagggtctgacaatgacttattgtgagcaaagctcgtccttgtcaacagaataaagccactccatgacagggttgttccctcacaatgagt

SEQ ID NO: 430033 - DNA, 201 bp, Homo sapiens
ttcacaaatgtgtcagaagagccttgatgtggaaaccgatggacttgtaagttgtttttcacttaaattaagtcttttactttgtagttttgctacaattrttgaaattcttagccttgcaaatatttttcaggcacagatgactgctactatgagccatactctttgtaaagaaaaaaattttcaaattttaaatgtatt

SEQ ID NO: 430034 - DNA, 201 bp, Homo sapiens
gactgcttattgatgtgttgagagttgtagagtttaacaaaaatcatgggggttgggaacagatagagtgaggtacttagctgaggttccagcttatctcwtagagatgtttacttagtctattctttagaattgttggatgcttggacaaccagacttaataggagccaaatgagaaaggcatgttagaagaaaaaaagg

SEQ ID NO: 430035 - DNA, 201 bp, Homo sapiens
atgggtaacatgaagtgttgctgtgttttgagaaaagccaaattatatgtagaagttttaccatgccctgagagaaaaaaataatttatcttcacttatgtttttctcagttaagttatgctaataatctggattcctgaagctgtattctgagcttctttatatcaattcattttcctagtgaaaaaatactgtgaaggg

SEQ ID NO: 430036 - DNA, 201 bp, Homo sapiens
ccatagcatttctttaactgggtaaaaatttgggagttgattttgctattcattaccatcttatttaatgatttggatatctggttgactccagatatcayagaaggagttgtaaaattctcagaaaattgttcaaatactcgtttaaatttaaagaaatatgtgtattgttgtttgacttttaatacaggtgaaggaaat

SEQ ID NO: 430037 - DNA, 201 bp, Homo sapiens
agctggtcgacagatcaggaaaattaggcagaagttttttcatgctattctacgacaggaaataggatggtttgacatcaatgacaccactgaactcaatrcgcggctaacagagtaggtacattgttaatgtcacactttcatatagaaattaattactgtgtgaaaatatgtcaaggaaagattttaaatgaaaaatgt

SEQ ID NO: 430038 - DNA, 201 bp, Homo sapiens
aattatggaagaggagaaattccattccacagctaagtattattttatttcctttttttagtttcgatactccgattggcaggataaattgtttatgtcgytgggtaccatcatggccatagctcacggatcaggtctccccctcatgatgatagtatttggagagatgactgacaaatttgttgatactgcaggaaactt

SEQ ID NO: 430039 - DNA, 201 bp, Homo sapiens
cataatcacgcagagatctggagtataaactactctctaatcatctacaaacagcattcatccaagtgcttaactgtgcatgttaattgacagtgtgccartactgtaaccctgatgcaccacatttttgttcttttaggccagagaaggccggaccaccattgtgatagcacaccgactgtctacggtccgaaatgcaga

SEQ ID NO: 430040 - DNA, 201 bp, Homo sapiens
cgagaatattgcctatggagacaacagccgggttgtatcacaggatgaaattgtgagtgcagccaaagctgccaacatacatcctttcatcgagacgttaycccacgtaagttaaagagtagctgaaatcagaagagactactttttatcccccaaacaattaccaaagttatgccaacaaaatcttgtaacaaaatatgt

SEQ ID NO: 430041 - DNA, 201 bp, Homo sapiens
tcgctgggtttgaggatggagtaattgtggagcaaggaagccacagcgaactgatgaagaaggaaggggtgtacttcaaacttgtcaacatgcaggtactygcttttcaggaattttttctgctatttgctcctcaatatagtgttctttaaatattaaaatatgatccagtgaatgctatactgagcaagaagaaacttc

SEQ ID NO: 430042 - DNA, 201 bp, Homo sapiens
aggatgtggtgtgtgtgtgtgtgtgtgtgtgtgtgtgtttaaacttaatgtctttccctagccgttctttattaccacaggagctctgggatatcaaatawtatttcttaaacctttatcccttttgattgtatagtaattatttattcaaatcagataccaattaaacataattagattgatttcttcacagaatacaaa

SEQ ID NO: 430043 - DNA, 201 bp, Homo sapiens
ctcctgcccaaattcaaagctgacttccaaaacagggtgctacctgcttattgcctccccaccgctttcagttttgctgccttctcttaccttgaattctmggctctcgaactttgactttgatcctcaacctccagccctttcatatttggcttttgtcattgattttctagcatgtagccccgtggctctcttccttga

SEQ ID NO: 430044 - DNA, 201 bp, Homo sapiens
aagatcagtggactgaaggatgcattaaagaatgactgtgtttaactctctgatacatctgacgtatgttctccatctccacttccctgctagtcatagcrgataaggatactccctggattcgaattctagttccatcagttataagatattgattctgttttactttgtctgtctcattccaaaacacatgtctctaat

SEQ ID NO: 430045 - DNA, 201 bp, Homo sapiens
aggaatgagagtgtaaaggcacaatgaagaaatgtctgcagagcctcatgagttaagcacaggtgttgtgggtttattgtaatgaaagtaagccaatgtakctcaggcatagaacccactcatcattctgaccaagaggctaaggctggagcgcatgcatttggagcttaaaactacagttgctttgtgctttttctctcc

SEQ ID NO: 430046 - DNA, 201 bp, Homo sapiens
tcaagacaaaaaagcgaaagtgtgttaagagctgggttttttttttcatccaaaattaaaattaccatgaaaaaatgtatctatataatctttgtatcagsatcccagcaggaaacaaatggcacagcaaatgggttaattgatgagtttgctaaagggtctatttacaaaggcctggaaagtgttaaggtaagcagtacc

SEQ ID NO: 430047 - DNA, 201 bp, Homo sapiens
tgtagccagactgagaatcttatgatttctatatgggatggggggtagataaattatcggtgggaccaaaattgacagtatattttgctgtgggttccccmtctccaaaaaattatcactgcatgtttggtatgattttaaataaactacattaaataaactgactacagtgaaaaagaaaaagttttgacgtaaaaaagt

SEQ ID NO: 430048 - DNA, 201 bp, Homo sapiens
cagtatagggccatgtaagttcatggcgaggcaagcccgatgactttgtatttttcttcagacatgttctgctgcatggtgtaggttcacagtagctcagyaacttgaattatccaggattgtggttttactaagcaagcctgataaagagagagggctagagggttgtgggtgttttcaggctgagttaagagagaagac

SEQ ID NO: 430049 - DNA, 201 bp, Homo sapiens
tttcattttggactttggcagctggtcgacagatcaggaaaattaggcagaagttttttcatgctattctacgacaggaaataggatggtttgacatcaaygacaccactgaactcaatacgcggctaacagagtaggtacattgttaatgtcacactttcatatagaaattaattactgtgtgaaaatatgtcaaggaaa

SEQ ID NO: 430050 - DNA, 201 bp, Homo sapiens
gaaaaactggaaaatactcaaaagggaactagttaaacagaagattagaaaatttaaatacttatgaatttttttacagcatgggaacccatttgtgttayatttaaaaagcagaacataactatgtagattaaatgttgattatacaaaatacacatgcataaagttcaaagattctaagatactagaaattaaaagttg

SEQ ID NO: 430051 - DNA, 201 bp, Homo sapiens
ccgcctgcctcggcctcccaaagtgctgggattacaggcgtgagccaccttgcccggctgatagtggttattttgaagtaatggaatattttattctaaawtttctaaaatgattatatattttataaagtaaagcattcaaaagaaaaaagctgcacaaattacatttttagcacattaggaatgaaaaactggaaaata

SEQ ID NO: 430052 - DNA, 201 bp, Homo sapiens
agaggagagaaaaaaaagataggaagctatagaaatggaaatgtaagatgaggaaaatgtagtctagaaggcagaggaggaaagaagaacaaagagaaagrgagccataaatgggtcaatcaaaaacagaaagaaaaggtgagaaatggaagaggactaataagacagtaacaaagtcctttgaagtgttagaacactgaa

SEQ ID NO: 430053 - DNA, 201 bp, Homo sapiens
cacccttactaggcagtgaactagaagtccttagatcagcacccccacccccattcccattaaaaagagaactgatctcacagccagcaatgaggctgagsctgcatgttgggtctcgttgtgtgcatgagagcaggactgtgaggaaggaagatgaccatactcagccagtcgaggaagacagttttacctcccgtgggt

SEQ ID NO: 430054 - DNA, 201 bp, Homo sapiens
atttttaaaaagctgtttttctttttttttttttaaaaaaaaaaagacctgacacaaattagatgatgataaatggtggttactaaaatttgcaaattccyccaaatgaaaataccaaatgaaatgacgaaaagttttataactcaggcttgcatgtgccagagggtgttctacagtggagggaatcaatgatagtgtctc

SEQ ID NO: 430055 - DNA, 201 bp, Homo sapiens
tctcagaaaattgttcaaatactcgtttaaatttaaagaaatatgtgtattgttgtttgacttttaatacaggtgaaggaaatacacaggaagcttctaartaaagtaaggaagtcactctacttgagaacagtggaaatgtaatgagagtatctctatgcagtatccatcccattagtaattgctgatgagtttcaaagc

SEQ ID NO: 430056 - DNA, 201 bp, Homo sapiens
ctgcacccactgtccgacaagccgcagtgagatgaacctggggcctcagtaggaaatgcagaaatcacctgttatctgtgtcacttgcactgggagctgtwgactggagctgttcctaatcagctatcttggaaccgcctctgaaagctggttttaatgcataggttttaaatctgcctcctacagaaaatacaatcctac

SEQ ID NO: 430057 - DNA, 201 bp, Homo sapiens
cagtatttctctattctaaatattgccactgtgagcacaagtagatcaaaaaaggttgtcaaaattttgccttgctttctgacaagtaactcttctgagcsttcgtttctacatttggaataccaaacctaccatgagaggttgctataagtttagaaaaataaacatctgaatacttgtgtactaaaaacaacctactga

SEQ ID NO: 430058 - DNA, 201 bp, Homo sapiens
tatcacacatcatttctcttttggaccaattttattagttctgtttttgtttttactaataccagaataattcccaactttcttatttggagcagtttgcttttttttttttttttaacttgtgcctaattatgaaactgaatggctttaagctggacatggcagagaggtgccaaattcaaggtctctctggggaatggc

SEQ ID NO: 430059 - DNA, 201 bp, Homo sapiens
agctactctcgaggctgaggcaggagaacagtgtgaacccgggaggtggagcttgcagtgagtggagatgggccactgcactccagcctgggcgacagagygagactccatttcaaaaaaaaagcagaacaccataagctatcaaaattatatgtagaccaggaaggtaagtgtgcatttttatttaaatttaatattgga

SEQ ID NO: 430060 - DNA, 201 bp, Homo sapiens
tagtcccagctactctcgaggctgaggcaggagaacagtgtgaacccgggaggtggagcttgcagtgagtggagatgggccactgcactccagcctgggcracagagcgagactccatttcaaaaaaaaagcagaacaccataagctatcaaaattatatgtagaccaggaaggtaagtgtgcatttttatttaaatttaa

SEQ ID NO: 430061 - DNA, 201 bp, Homo sapiens
ttactttgtagttttgctacaattgttgaaattcttagccttgcaaatatttttcaggcacagatgactgctactatgagccatactctttgtaaagaaaraaattttcaaattttaaatgtatttgacaatgaattgaaatcagttccaattataaatgggttttcaagggaaaaaaaatccagaaatgtagtctttacg

SEQ ID NO: 430062 - DNA, 201 bp, Homo sapiens
agttttgctacaattgttgaaattcttagccttgcaaatatttttcaggcacagatgactgctactatgagccatactctttgtaaagaaaaaaattttcraattttaaatgtatttgacaatgaattgaaatcagttccaattataaatgggttttcaagggaaaaaaaatccagaaatgtagtctttacgctgagatgc

SEQ ID NO: 430063 - DNA, 201 bp, Homo sapiens
tcaagtaaatagatttgccatcatggagctcatcactttataatttaaaaaaagaaaaatgtaatgtctgtttgttataatgtcctatacagtttttgttwtaagtttagtaaattgattaatttccagttctgaaaatttctcctgaaagagatgaataaaggatggtagggtgggggtggtggctcatgctataatccc

SEQ ID NO: 430064 - DNA, 201 bp, Homo sapiens
tttcttccttcaggtaggtacccatgatttgcctttctcatcaagtttataatttaattagagaaattaaattaaacctaatggagcttccaaattcttayagtgaaataaattgcaaacatgattggcataaggctctgctggagggtagactccttatcagggggaagtgtgacttccctgtgtcctaacttatattac

SEQ ID NO: 430065 - DNA, 201 bp, Homo sapiens
actcaggattgggtgctggagttcttgttgctgcctatatacaagtttcattttggactttggcagctggtcgacagatcaggaaaattaggcagaagttytttcatgctattctacgacaggaaataggatggtttgacatcaatgacaccactgaactcaatacgcggctaacagagtaggtacattgttaatgtcaca

SEQ ID NO: 430066 - DNA, 201 bp, Homo sapiens
cctactactgttgcttattattgttgcaatgttcttcttaattcttgcttttaaacagatacatttttatgctcaaaatgttaatgcttctctcataggaytgactcatttaatagtatcaacttaatgatactaacttattagaagcattgatcaatcctgaatttcttcctttgtgcggtgtttaggtggggaagatgt

SEQ ID NO: 430067 - DNA, 201 bp, Homo sapiens
ataatggtatgccaaaaacataaaacccaaaattgtttatggcaaataatccttccacgaaaaaactgtatatatgaaaataaatatcaggagagagcatragctttttatttttgttcttgcatattgctgtttatttctaattattatttctaaacactgaaccaagttaaatattaggtaggatgtttttcatgaatg

SEQ ID NO: 430068 - DNA, 201 bp, Homo sapiens
gatccagccccagtccctggcatgctagggagtgcagctagaaaatgtgtttcaggggccgcaggaacagtgggctgatgcatagaacctgtagcaatccrccagcaaatggagggggagggcagtctggtcctggacaaggaacacctggggccgattcactgggtgcactgatcatctatccccctggcttagtaaaca

SEQ ID NO: 430069 - DNA, 201 bp, Homo sapiens
taagaaattaggggctactatgcaaagggaagtcagaaagcaagtcgagaaaaggtaaaccctcaggaagtggatcttgcccctctcctagatttctcttkttactagaattttatgaaaatgtatgtcggggagaaaggggatgattaaggagtaaagggaaaaaatactggtaagcactatacctttagactttcaaac

SEQ ID NO: 430070 - DNA, 201 bp, Homo sapiens
gatatttaactgatatttgagttatgggtaacatgaagtgttgctgtgttttgagaaaagccaaattatatgtagaagttttaccatgccctgagagaaaraaataatttatcttcacttatgtttttctcagttaagttatgctaataatctggattcctgaagctgtattctgagcttctttatatcaattcattttcc

SEQ ID NO: 430071 - DNA, 201 bp, Homo sapiens
aatcattttaaagaataaagtctctattattttgatacttatgtgccttttcctttgggggttatattcccttatttgatacttttttttcaaatttcaarctgaatcgaattattcccattttagggctttgttgtgaagtgtgttcttttttctcattttccttacagatcttgaagggcctcaacctgaaggtgcaga

SEQ ID NO: 430072 - DNA, 201 bp, Homo sapiens
ttgtgctttttctctcccaggccacaggaaccaggttggctttaattgcacagaatatagctaaccttggaactggtattatcatatcatttatctacggktggcagttaaccctattgctattagcagttgttccaattattgctgtgtcaggaattgttgaaatgaaattgttggctggaaatgccaaaagagataaaa

SEQ ID NO: 430073 - DNA, 201 bp, Homo sapiens
gctgatcctgaattagttcaattcccaaagatctgggtctcaccatgggttcattaccttgactgactttgttacttaaacctccaactatataggagcckagtgtgactcggactatggattgttattcttaattataatgttttccctctcatttttctggtaggtatcagaaacatttagaaaatgccaaagagattg

SEQ ID NO: 430074 - DNA, 201 bp, Homo sapiens
aattttgtcagagtagagcaggtagaattgagcagtattgaaacaaaacaaaatcttgggttattagctttggtcttgctattcacagtgtgtgaggctgragaagatccccaacttctctagtcctcatgtcctaccttagtaaaatgagaaattgtaccagatactgccccaagttccttccagctaaaaccctgttat

SEQ ID NO: 430075 - DNA, 201 bp, Homo sapiens
ggatgaagggaaatggaaccgggccagtaaagagaaggcttggatctgttctaggcctggctgatcctgaattagttcaattcccaaagatctgggtctcmccatgggttcattaccttgactgactttgttacttaaacctccaactatataggagccgagtgtgactcggactatggattgttattcttaattataatg

SEQ ID NO: 430076 - DNA, 201 bp, Homo sapiens
gtggaacagacagtatctctatagggaagaaggcgtcagagactgggtgagtgactagcttcagaggcaccatattaagagggaagattaacattcggacyaaccatgtttccactaaaccaattatgtctggtgaaatcctttcttgtcctcttgtaatcagcatcagctgccgctgcatgcagcgttaggtataatagt

SEQ ID NO: 430077 - DNA, 201 bp, Homo sapiens
catcagaattagttaagatcaggctcttaaaaagagatcctacagcagtgctctggaaaaggctgtcacttggcaacaacttccctaaaatatttctggtratgtctctagcattccatataacttagagctagggcttctcagacaagtgtgaaaacactgaagaaggatcaaacccttatttttcttaagtaaacactg

SEQ ID NO: 430078 - DNA, 201 bp, Homo sapiens
tctctttatatgtgtttaagtgtctaaatctacacataaacattttatttacaagtacatgcactgaaatgttcacatgtagattataaccatgaacattyttagtcttatttatgtaattattatcctttattgaaacatgaggaagtgaagcagataataaatataaattgtgatataggttttatagcattgcacttt

SEQ ID NO: 430079 - DNA, 201 bp, Homo sapiens
ttttctggatcctgtgcaggccctggtgagtccattgagactccaggatgtctttaaaccaagaaaaacctagttgatagcatttaatctcatgtaccacmatctaccatactaactgtaggtatcctcaaatgttaataattgagttttgtttatttcttatttgaggtctattttcacattaattcacttgtttgttta

SEQ ID NO: 430080 - DNA, 201 bp, Homo sapiens
agaaaagatcctcctccaaatcttttaaagtttcaaaacaaagcaagctctggctctcttgcaattcaaggcaatgtggactatatattttggggcatctrtctgcctagtgctgctccaggcactggagatacagtggtacacaaataaaccaagttgtgccctcaaacagcggtttctgtcggggaagacatgcaatgg

SEQ ID NO: 430081 - DNA, 201 bp, Homo sapiens
tttcagtcatattctcagagatcatagcggtaagtttgcaaacatcacataacagcctgaattagatcaattcatcagctgctgcttctcccaacctcacygactggctccattctgggattaagcagccttaaattaaactaagccaaagtccttaaatcccttttgagaaaagctgtgagggaaaagataagtagcctt

SEQ ID NO: 430082 - DNA, 201 bp, Homo sapiens
ctactttgtcgtgggaacagtatgtgccattgccaatggggggcttcagccggcattttcagtcatattctcagagatcatagcggtaagtttgcaaacaycacataacagcctgaattagatcaattcatcagctgctgcttctcccaacctcaccgactggctccattctgggattaagcagccttaaattaaactaag

SEQ ID NO: 430083 - DNA, 201 bp, Homo sapiens
catattgctgtttatttctaattattatttctaaacactgaaccaagttaaatattaggtaggatgtttttcatgaatggtcctgatacttcagctattaratggttaaatacttaataggaaatatttctttctttcagattaacattgatgggcaggatattaggaactttaatgtaaactatctgagggaaatcattg

SEQ ID NO: 430084 - DNA, 201 bp, Homo sapiens
caaaatatgctagccctttgggaagccaaggcaggagggtagctggaatccaggagctcaagaccagcctgggcaatgtagtaagaccctggctctacaattttttttttttttaataagctgagtgtggtggtgtgcacctgtggtcccagctactcaggaggctgaggcaggagaatcccttgagcccagaatgtcaag

SEQ ID NO: 430085 - DNA, 201 bp, Homo sapiens
caggagttcaaggctgcagtgagctattgttgcaccaatggttgcaccactatgctcctccaaagcctgagtgacagaatgaaactctgtctctaaatttaaaaaaaaaaaaggacaaaaataatgaattggaacaaaagatttattatatatggaaaaagtattatatttattattagagaagttaatatgaatatatga

SEQ ID NO: 430086 - DNA, 201 bp, Homo sapiens
ttgaattatttatcatgatatgcaggctttaataattaaatgtttgtgcccactacaactaataattgtcaattgtgtatgaaatattttactgtattaaygtctagaacttaaatataaggtgattaacataaaacgttgagcctatagaaagcacttaacatagttatgataaagaacttctgaatattcaaagtgcat

SEQ ID NO: 430087 - DNA, 201 bp, Homo sapiens
ttctagcctctctctctttccagtgatgtttctcttttatatttacttaaaaacaattgattcatctggatttattttaatgtaaggactaaagtagaaayaccacattactttattaaatggctgcacaattgtcccaataccatttattgtataattcaccttttctttaccaataggtagtaccatatttattgtaat

SEQ ID NO: 430088 - DNA, 201 bp, Homo sapiens
agacttagaagccgtgctctttccactacacagcgctaaaggaggctgaagagatggttacaagtatactgatttgcttttcaggaattctgtgcagaagrcacacatctatggaattacttttagtatctcacaagcatttatgtatttttcctatgccggttgttttcgatttggtgcatatctcattgtgaatggaca

SEQ ID NO: 430089 - DNA, 201 bp, Homo sapiens
tgtgaatggacatatgcgcttcagagatgttattctgtaagtagctttagaaatattaagattattctataataaggttttagtaggtttatgcaaaagtwtagagtaggaaaaaaatgactcctgtgtccaaagatgaggtcagggatttaaatttaccacagtttccatcctggcaggcacagagatctgatcttgtta

SEQ ID NO: 430090 - DNA, 201 bp, Homo sapiens
tcctactccttcaagtatctgcatttactttatcaaattctcttttattagagactgaagaaactgtcatctccttatgtgctaatgagtttaataatgtsctccagtcaccacaagccttctttcaaactacacaattccaactgcttccgtctcagagtatcttgaaataatgatctgaccgcctgttagaccagtgaa

SEQ ID NO: 430091 - DNA, 201 bp, Homo sapiens
taatcacgcagagatctggagtataaactactctctaatcatctacaaacagcattcatccaagtgcttaactgtgcatgttaattgacagtgtgccaatrctgtaaccctgatgcaccacatttttgttcttttaggccagagaaggccggaccaccattgtgatagcacaccgactgtctacggtccgaaatgcagatg

SEQ ID NO: 430092 - DNA, 201 bp, Homo sapiens
tacttgtgtactaaaaacaacctactgaaatgtttaaaagggtggattttgtgatatgttaattatatttttaaaaagctgtttttctttttttttttttwaaaaaaaaaagacctgacacaaattagatgatgataaatggtggttactaaaatttgcaaattcctccaaatgaaaataccaaatgaaatgacgaaaagt

SEQ ID NO: 430093 - DNA, 201 bp, Homo sapiens
acttgtgtactaaaaacaacctactgaaatgtttaaaagggtggattttgtgatatgttaattatatttttaaaaagctgtttttctttttttttttttawaaaaaaaaagacctgacacaaattagatgatgataaatggtggttactaaaatttgcaaattcctccaaatgaaaataccaaatgaaatgacgaaaagtt

SEQ ID NO: 430094 - DNA, 201 bp, Homo sapiens
cttgtgtactaaaaacaacctactgaaatgtttaaaagggtggattttgtgatatgttaattatatttttaaaaagctgtttttctttttttttttttaaaaaaaaaaagacctgacacaaattagatgatgataaatggtggttactaaaatttgcaaattcctccaaatgaaaataccaaatgaaatgacgaaaagttt

SEQ ID NO: 430095 - DNA, 201 bp, Homo sapiens
ctccaaatggacaatctagtaactttttagtttttttttcttttttatacccttcttatagtttgtggactttggttttcagcttctcgatggtcaagaarcaaagaaactcaatgtccagtggctcagagctcaactcggaatcgtgtctcaggagcctatcctatttgactgcagcattgccgagaatattgcctatgg

SEQ ID NO: 430096 - DNA, 201 bp, Homo sapiens
acagaaaaaatgggtaatttgaaagaaggctcagtagaacctacttctatattctctgttttatagagatataaatataacctttctcagtgacctcaagyttttgggattccatagtcacctctgtctcaagtttaatgttaaactgcttctatcatcaaaacattctttatgagacctaaatcctgcatgcttggccag

SEQ ID NO: 430097 - DNA, 201 bp, Homo sapiens
taagaatctaactgtttatgagttccagtgacatttacaatcaattctggtttggcttggtttctctcattccctcttaaccctgacttgtgatattgccstgaaggtgatggagaagctcttccatatcccagggtgagccctcaattctggaataaccacaggaatgttggttggcttggaatggatgaagggaaatgg

SEQ ID NO: 430098 - DNA, 201 bp, Homo sapiens
ttgattgtatagtaattatttattcaaatcagataccaattaaacataattagattgatttcttcacagaatacaaaataaacagaatcatgaaattaagytgttaatgatttgaaggcctccttttctaagacattcatttacaactcttaaaaaagtactgactttaaataaaaatccaaagaatatataattatggaa

SEQ ID NO: 430099 - DNA, 201 bp, Homo sapiens
gcctggcaataaaatacacaaaatgtattctactttagccaacacttcagagttgagaaattttactggcaatttttgctcatcctgacgttgatgatttrcacagtgaactacctgtatctcttttgttttgattcttcctttgcttttctcctgaaacatcttgtttggctatcttattattcagcagaatgcccatga

SEQ ID NO: 430100 - DNA, 201 bp, Homo sapiens
agttcttacttcgattacccttagttaaggaagtgcaactttaaaatataacatttccctcaaattattgcatgaacataaaaattttaaatagagtttgkatttgttctatttgttttaatcattacctgtgatggttaagtggcactctgccagttttgcctggcaataaaatacacaaaatgtattctactttagcca

SEQ ID NO: 430101 - DNA, 201 bp, Homo sapiens
agttgaaacaacgttatagaaactgttattgactctaaatgtttttcttgtaaatagaactgtcaactgttaagcaacagttcattcaacatatttataayttggttaacttgcagaaatatgaaacaagagtgggagataaggggactcagctctcaggaggtcaaaaacagaggattgctattgcccgagccctcatca

SEQ ID NO: 430102 - DNA, 201 bp, Homo sapiens
tattttagcctgttaatgtggttgtgcagtaaccttgctgtatttcttctaagcaccattgtattttttcatagaaaatttagttttgccatgtagaattsaaaaagtgatagatggtgttacttccaatggaagtacttacacacgcaatagaaaaatatggttttcatcagctggctgtttaggcagggattgactgtg

SEQ ID NO: 430103 - DNA, 201 bp, Homo sapiens
agccctggaaggatggcttgaggtccctaaaagtgatggtagggacaattcattttatggcattcttccagcattcggggttccactgggttacactgacrtagagcttaattatttttgcttttattttctgctatagttagaaatcactcacacccacaaataaaattttaaaaccctttcattttggttagccttacc

SEQ ID NO: 430104 - DNA, 201 bp, Homo sapiens
aataattgtgtgtttgtacattgtactatgtatccataagcaatctttgttcagatgtatgacagtgagaatgagcgttgggaaagctataacaacaggcrgaagcctagtacctggcaccaggaaccagataaacaccatggtagtgctttggaacaccgaaatttggtagctcctgaggaaaaaaggagtaatagtata

SEQ ID NO: 430105 - DNA, 201 bp, Homo sapiens
tattattgtttttgttttggactataaactataagttcctcccagagttggttcagcctatgcccaggaatgaacaaggacagctgggaggctagacgcamgatggagttggttaggtcagatttcttttactgtctcagttacaattttgcaatggtggtttcaaaagctgcttaccacccctttgaaagtaccttgtac

SEQ ID NO: 430106 - DNA, 201 bp, Homo sapiens
ccctggattaactctggcccccaacagcccatcagggtatcggcatcaggacttccagacttttctatcgcatttccttcctttcttttcatggctatcayatctgctatcccttcttcgcatgctgtgttaagggactttttaaagcctggggagataatcttgttgggtaaagttagcaagtgccttagtaaccaggaa

SEQ ID NO: 430107 - DNA, 201 bp, Homo sapiens
aacactgggcccctgtcagccagttaaaagcttttagagtggctgccagccttacaagactcaggggacaggcttgctttagaggactttgtcaatccccrattgccctcatgtggtgggaatgttggctctgttccaatccagtttcctttcacagaggacctagccatctatgggactggaagtgagagacaggactag

SEQ ID NO: 430108 - DNA, 201 bp, Homo sapiens
atgaaataatctctacaacaaacccacatgacacaagtttacccatgtaacatacctgaacatgtacccctgaacttaaaataaaagcataaaaaagttaytataatgcatatttccttattttatggttgaaatggcaaataatgatgtgatttccctccaggtcacacactggcagagctgagtttggaaacagtttta

SEQ ID NO: 430109 - DNA, 201 bp, Homo sapiens
cttagggaggaccagagccaagcctcttaattactccaaactttccatgatagatcaataactagatgaaaatcccttagcctttttggaaaggctgagagagtctttagtgaaacacacctccctgtctcctgattcaattgagggaaaaggtagagagaggggtatcttagaatggaatgcaggcttgggactccataa

SEQ ID NO: 430110 - DNA, 201 bp, Homo sapiens
agttcctcccagagttggttcagcctatgcccaggaatgaacaaggacagctgggaggctagacgcaagatggagttggttaggtcagatttcttttactrtctcagttacaattttgcaatggtggtttcaaaagctgcttaccacccctttgaaagtaccttgtacactcatggttaaatcataaccttaattgaggct

SEQ ID NO: 430111 - DNA, 201 bp, Homo sapiens
caggtatgccgcagcacactacatcatctcgggtctccttgctcttctgcagctcttcattgctacccaagttatttgaataccccagggatgcttaccctgcaagcttgggggcctatctgatgtcttttactgttgtgccaagaaatggaatctttaaccagagtggagctacccaagttctagaagatcataatgtga

SEQ ID NO: 430112 - DNA, 201 bp, Homo sapiens
gtatgccgcagcacactacatcatctcgggtctccttgctcttctgcagctcttcattgctacccaagttatttgaataccccagggatgcttaccctgcaagcttgggggcctatctgatgtcttttactgttgtgccaagaaatggaatctttaaccagagtggagctacccaagttctagaagatcataatgtgattg

SEQ ID NO: 430113 - DNA, 201 bp, Homo sapiens
tggaacaccgaaatttggtagctcctgaggaaaaaaggagtaatagtatacagaaccataagtgttttcagaaaatatgaaatcaatgagttgtatcatakttgtggtaagtgaaacctagactttggaaatgacattcaggcattaggaatattagtagttctagataaatgtcacaagcccataagcaagtgaaagttt

SEQ ID NO: 430114 - DNA, 201 bp, Homo sapiens
aggtatgccgcagcacactacatcatctcgggtctccttgctcttctgcagctcttcattgctacccaagttatttgaataccccagggatgcttaccctgcaagcttgggggcctatctgatgtcttttactgttgtgccaagaaatggaatctttaaccagagtggagctacccaagttctagaagatcataatgtgat

SEQ ID NO: 430115 - DNA, 201 bp, Homo sapiens
tctcaaagttatcttgacctaagcccagtaataattaagggcagctaaaagtaagttgggggttggttaaatcagatctctttcactgccataattttctmactgctataatttttgcaaaagtggttcattttgactttcatctaattattgagccttatatcataaatatattaaacattagtgatttctgacagcatg

SEQ ID NO: 430116 - DNA, 201 bp, Homo sapiens
gccgcagcacactacatcatctcgggtctccttgctcttctgcagctcttcattgctacccaagttatttgaataccccagggatgcttaccctgcaagcttgggggcctatctgatgtcttttactgttgtgccaagaaatggaatctttaaccagagtggagctacccaagttctagaagatcataatgtgattgactt

SEQ ID NO: 430117 - DNA, 201 bp, Homo sapiens
catccaacaggttctttctgcccaccgcacaaacaaaatcaactcacagagaccatggcattacagtaaagaaggactttgatgctggcgatgccacgtcrgagacagagttattactcaaatcaatctcattcaaggcttttaggtgagggcttttcaaaggtagtttggtgagcagggggctagggtatagggagtgct

SEQ ID NO: 430118 - DNA, 201 bp, Homo sapiens
tgtaccttgtttgtgggaatgtcaattagtacagccacaatggagaatagtatggaggttcctcaaattaaaaacagaaataccatatgatccagcaatcycactgctaggtatatactcaaaagaaaggaaatcagtatatcaaagagatgtctgcatccaatgtttattgcagcactattcacaatagctaagatttgg

SEQ ID NO: 430119 - DNA, 201 bp, Homo sapiens
agggtcccgcccctcactttccggggaacgggactggacggacagctgcaagggtcccgccccgtgcctgacgtcgggggcgagccgggcctgcgcggtaktgggacccgaccctgtctccagtgggcgtcttgggccccggctctattctgggctgcgggcctgggaagggctcgccgggtgccaaatgagctgtcctaa

SEQ ID NO: 430120 - DNA, 201 bp, Homo sapiens
caggtttccctatgttgcccaggcttgtctcaaactcctgggcccaagtgatcctcctgcctcagcttcccagtgctgggattacaggtgtgagccacagkgcctggccttaacagaaatttctaaaacatcaaaagatgcttctaaaaccagtcattcatgagcagttttgctgaacctttagaatccatgttggaacaa

SEQ ID NO: 430121 - DNA, 201 bp, Homo sapiens
agtgactattggccaaatttgtgaatatatttttaaaactactgaatgtataaccaagagggtaaatgctatgatgtgtaaattatatcttaatttcatartgaaaaaatattaaatataggcatctgcaaaatttttgtttctgtttctcacaacattcttattttttagttttaaaaatacaagataaaataatttcaa

SEQ ID NO: 430122 - DNA, 201 bp, Homo sapiens
tgactgctaatgagtatgccgtttctttctggattaattaaaatattccagaattagatattagtgactattggccaaatttgtgaatatatttttaaaaytactgaatgtataaccaagagggtaaatgctatgatgtgtaaattatatcttaatttcataatgaaaaaatattaaatataggcatctgcaaaatttttg

SEQ ID NO: 430123 - DNA, 201 bp, Homo sapiens
atttcacctaacaaacatttttaaatgacttttacccaaaagaaaggcaataaccaatgctggcaaggatgtggagaaaatggaactcttgtaccttgttkgtgggaatgtcaattagtacagccacaatggagaatagtatggaggttcctcaaattaaaaacagaaataccatatgatccagcaatctcactgctaggt

SEQ ID NO: 430124 - DNA, 201 bp, Homo sapiens
caagcccataagcaagtgaaagtttttgtcctggttaaataccctaatatagtacattttaattttcctgtttgttcacccattcaacaataattactgtkgccatcatggtactaagtgcaggaaataaattaagagaataagactgatatgctttctagtctcatggaactcacaggctagacagggagatagccatta

SEQ ID NO: 430125 - DNA, 201 bp, Homo sapiens
gagtaaccctggtaacaattctcttcaccttatcaaaacctgagctaaaaccaatgcatcagctgatgatgacagcagagagtggcagggctgaggacccraagtcatttcccaggctggcggagagtgagtaaatgagattctaaaactaaacaagggaggtcagagactctttccaaccttacctgatggcttctggcc

SEQ ID NO: 430126 - DNA, 201 bp, Homo sapiens
gaggtgtttcctgtacctcttctgggctctcagtcttatcttggtatataaaaccattcaggctttaggggcatcgtttttttccagatagaattttccaratgagcctataatattccggaataaataacaaaccattgtttataaaatttaaaacaaccttgataagcctcaagattccctagcaggatcattgcaatt

SEQ ID NO: 430127 - DNA, 201 bp, Homo sapiens
catttgtgtacaagctttgtgtgaacaggctttcaattagtattttaggagtggagttgtggggtcgtatgttaactctatgtttaacattttcaaaaacygtcaaactgatttccaaaggaactgtaccgtttttacatatctgccagcaatatgagtttcaatttctctgtgcctttagttacaataacaatataacag

SEQ ID NO: 430128 - DNA, 201 bp, Homo sapiens
cacacaaaagaacagcctgcaggctcagataagggaacttacacagggggggcttgcctaagacgtgcccacagctgcacagataagaaaggctaaacagrtgacttgcccagacaagcccacaatggaaaattccatcccctaacacaggcacagtaaggggaacaaagcaatatggagtaactcaagctaagggcccgc

SEQ ID NO: 430129 - DNA, 201 bp, Homo sapiens
cttatatattgctggtgggaagtaaaatggtgcagcttctatggaaaaaatgggcaattcctcaaaatgttaatgtagaatgtatggcccagcaattccaytcctaggtctgtacactcaaggaattcaacaggcactcatacaaatacttgtacagaaatatccactgcagtactagtcacaataggcaacaggtagaaa

SEQ ID NO: 430130 - DNA, 201 bp, Homo sapiens
aagaagaaattaagggctcttccttactgaaagtttttccctgagaaataggaacttggcaactttatgcaaaacttcaaatgacttattattaggtcaawaaaaataaaataatgttgaagcgctaagattgttaaagaagcttaaagatattgttatattagtgtttacacaataatgtgtcaacttttattcagcatt

SEQ ID NO: 430131 - DNA, 201 bp, Homo sapiens
aagcaatcctcccacctcagcctcccaaggagctgagattactggcatgagccactatgtctggctagattacttcttaaattacacaatgcccaacccaraacagcaataattgtgtgtttgtacattgtactatgtatccataagcaatctttgttcagatgtatgacagtgagaatgagcgttgggaaagctataaca

SEQ ID NO: 430132 - DNA, 201 bp, Homo sapiens
tcaagtgatcctctcacctcagcctcttgagtagctaggactataggcatgtgccaccatacctagttaatttaaaaaaaaattgtagagacgtggtctaygtcatccacactgttcttgaatccctagacttaagcaatcctcccacctcagcctcccaaggagctgagattactggcatgagccactatgtctggctag

SEQ ID NO: 430133 - DNA, 201 bp, Homo sapiens
tatgccgcagcacactacatcatctcgggtctccttgctcttctgcagctcttcattgctacccaagttatttgaataccccagggatgcttaccctgcaagcttgggggcctatctgatgtcttttactgttgtgccaagaaatggaatctttaaccagagtggagctacccaagttctagaagatcataatgtgattga

SEQ ID NO: 430134 - DNA, 201 bp, Homo sapiens
atgccgcagcacactacatcatctcgggtctccttgctcttctgcagctcttcattgctacccaagttatttgaataccccagggatgcttaccctgcaagcttgggggcctatctgatgtcttttactgttgtgccaagaaatggaatctttaaccagagtggagctacccaagttctagaagatcataatgtgattgac

SEQ ID NO: 430135 - DNA, 201 bp, Homo sapiens
ccgcagcacactacatcatctcgggtctccttgctcttctgcagctcttcattgctacccaagttatttgaataccccagggatgcttaccctgcaagcttgggggcctatctgatgtcttttactgttgtgccaagaaatggaatctttaaccagagtggagctacccaagttctagaagatcataatgtgattgactta

SEQ ID NO: 430136 - DNA, 201 bp, Homo sapiens
cgcagcacactacatcatctcgggtctccttgctcttctgcagctcttcattgctacccaagttatttgaataccccagggatgcttaccctgcaagcttgggggcctatctgatgtcttttactgttgtgccaagaaatggaatctttaaccagagtggagctacccaagttctagaagatcataatgtgattgacttag

SEQ ID NO: 430137 - DNA, 201 bp, Homo sapiens
gcagcacactacatcatctcgggtctccttgctcttctgcagctcttcattgctacccaagttatttgaataccccagggatgcttaccctgcaagcttgggggcctatctgatgtcttttactgttgtgccaagaaatggaatctttaaccagagtggagctacccaagttctagaagatcataatgtgattgacttagt

SEQ ID NO: 430138 - DNA, 201 bp, Homo sapiens
ccaaaaagaacaagatcatgtccaagatcatgtcctttgcagggacatggatagagctggaggccattatccttagcaaactaacacaggaacagaaaacmaaatactgcatgttctcacttataagtgggagctaaatgatgagaacatatggacacatagaggggaacaacacatactgggaccttttggagaatggcg

SEQ ID NO: 430139 - DNA, 201 bp, Homo sapiens
gagtagtggggatggttaatgggtacaaacacagataggatgaataatatctagtatttgataacacaacaaggttactacagtcaacaaataatatatcrtacattaaaaaataagagtataattggaatgtttgtaacacaaaaaaatgataaatgcttgaggtgatggataccccagttaccccgatgtaatttttag

SEQ ID NO: 430140 - DNA, 201 bp, Homo sapiens
gaacaggattggatagaaagccgcgagggtcccgcccctcactttccggggaacgggactggacggacagctgcaagggtcccgccccgtgcctgacgtcsggggcgagccgggcctgcgcggtagtgggacccgaccctgtctccagtgggcgtcttgggccccggctctattctgggctgcgggcctgggaagggctcg

SEQ ID NO: 430141 - DNA, 201 bp, Homo sapiens
ctgtaaaaacagcaaccctcttccaggccccctcttggtggtggagagctttcttcttttgcttattaaacttttgctccaacctcaccctttgtgtccaygctcgttaattctcttgatcctgagacaaagagttctgggtgatacctcacagtgagagacttctacattgtggtgcattggcaagactaacattttggt

SEQ ID NO: 430142 - DNA, 201 bp, Homo sapiens
ggcactctgggcaggccgcgctccgcccacgaaggtacccaaccctctgggatagatgcaggaagcgatggttaagacccattttcacccaacttctcgcsgcaggtctggcttaccacacgctcctccccattcccagtgagccgctttttgcagcaccaggcgaacacttacaccagtgctttgtaaaggaatcttatt

SEQ ID NO: 430143 - DNA, 201 bp, Homo sapiens
tgggaatgttggctctgttccaatccagtttcctttcacagaggacctagccatctatgggactggaagtgagagacaggactagctggatttcctaggcygactaagaattcctaagtgtagctggggaaggtgaccacacccacctttaaacgtgggtcttgtaactcagctcacacccaaccaatcaggtagtaaaga

SEQ ID NO: 430144 - DNA, 201 bp, Homo sapiens
ctgcatgatgctggggagcttggcgcctgacccaggatctagaaggcactctgggcaggccgcgctccgcccacgaaggtacccaaccctctgggatagawgcaggaagcgatggttaagacccattttcacccaacttctcgccgcaggtctggcttaccacacgctcctccccattcccagtgagccgctttttgcagc

SEQ ID NO: 430145 - DNA, 201 bp, Homo sapiens
tagcagggcagagagctagggtatcacacaggtaaacatggctactcctgctgactagctcctccagatccatgggtgaaggtcatgcttgcatccatgcrtggcacctatgatggttgccaggacccagaggagacaggagggaagaggagaatggggatgtcctttttgtctttctcgccactctgggtcactccgaaa

SEQ ID NO: 430146 - DNA, 201 bp, Homo sapiens
ggaagggctcgccgggtgccaaatgagctgtcctaactctgcggggctgcagcttcctgcatgatgctggggagcttggcgcctgacccaggatctagaargcactctgggcaggccgcgctccgcccacgaaggtacccaaccctctgggatagatgcaggaagcgatggttaagacccattttcacccaacttctcgcc

SEQ ID NO: 430147 - DNA, 201 bp, Homo sapiens
ccttaataagatagtccttccctaccctctaagcaaatggaatgcaaagcaagtgagaaaatctcaggacctacatgtctagagagctcgtattaagaatcctaagtaagaataacacaaactaaaataatagagaatgtccagtgccagtccttgaaattaggattctgagcaggagtttgttaggtagagaatgggaaa

SEQ ID NO: 430148 - DNA, 201 bp, Homo sapiens
tgaatttcttttttttttttttttttggaccaagtctcgctctgtcgcccaggctggagtgcagtggcacgatctcgactcactgcaacctctgcctcccrggttcaagcgattttcctgcctcagcctcctgagtagctgggaatacaggcgtgcgccaccatgcccggctaatttcgtgtttttagtagagacggagtt

SEQ ID NO: 430149 - DNA, 201 bp, Homo sapiens
cagccactattttatttttgatcagtggcctttgggccactgttcagggtactgaccatcagtgtcagcattagggttttggtttttgtttcttttgggthtttcttttttggcacatgtgaatcttgttttgtgtaaaatgaaattactttctcttgttctctgatgatgggtttaaaattaaaagagcatccggttttg

SEQ ID NO: 430150 - DNA, 201 bp, Homo sapiens
gacatgttcatgttttctgagtatttatacctattacgtctgttactttttaattctataaacttgaggatagtgaatggtaccaagttttagtttctgcrtaggttttccagtgtggcttctctgatggatcagtgctaaaatcttaagtatttttctatttgggaaaaaagggttgaattattttcacttgcccacgta

SEQ ID NO: 430151 - DNA, 201 bp, Homo sapiens
atggtttctgtggccaggaattatggagaggcttagctgggtggttctggcttggagtatctcatgaggttgcaatcaagatgtcaaccagggatgcagamattctttattttaaagagatttcttttttcttgagttttgctatcagtcacagttccatgtttgttggtgatattaggccagttagagaccacatttaag

SEQ ID NO: 430152 - DNA, 201 bp, Homo sapiens
aaggcttgtctacaattactccagcctcttgcctcacaattttgtctccttgcctccactcttaatctcaccagctgggatcttcactttttctctcttaycttgttgggactcatatgttgtttaccttgttcccagatggggaaacagcccattctggagttggaagggcactgaactaactcagagggcaagttcctc

SEQ ID NO: 430153 - DNA, 201 bp, Homo sapiens
acacttgcaacagtttattaatgaggtgactttcaccttaggacaactgttgcatgccaagttttttgtgtgtgtgaaacacttcaaaactgatttaaaaratgtaaatttaaaattggttgtatctaatatgccccaggttcggtaaataaacaattctttttaaaaacagtattctgtgttttatatattgacagctaa

SEQ ID NO: 430154 - DNA, 201 bp, Homo sapiens
ccagctacctcgtttagtctcttctgccaaggagagatggggagttgggtcatgcgttttaggagtaagcagtgcagtgaagtatcaggagaagacaggartttaagaaaccagcagtccctaaatctccactcatgttttgtaaaccaaaagaatgatgtgttgctagtttttattttaattcacctgctagcatgatta

SEQ ID NO: 430155 - DNA, 201 bp, Homo sapiens
aaacttgaggatagtgaatggtaccaagttttagtttctgcataggttttccagtgtggcttctctgatggatcagtgctaaaatcttaagtatttttctmtttgggaaaaaagggttgaattattttcacttgcccacgtagtttatgaatgtgggaaatagcttcaaagacagattaaatgatttgcccaaggccacag

SEQ ID NO: 430156 - DNA, 201 bp, Homo sapiens
tttcatagaagcaaccttaaggttctactctttacgcctccagctacctcgtttagtctcttctgccaaggagagatggggagttgggtcatgcgttttargagtaagcagtgcagtgaagtatcaggagaagacaggagtttaagaaaccagcagtccctaaatctccactcatgttttgtaaaccaaaagaatgatgtg

SEQ ID NO: 430157 - DNA, 201 bp, Homo sapiens
gacacaagcagctaataaccatttctgggtttctgcctaaccccctaattgtctgttaaagccaattctctgggtgtcccagtgagtggtggctttttttytttccacattggcacattcacttctcccactcttggcatgtaagaaataagcatttacataattggaaaaatctggatttctgatgccaaagggttaaag

SEQ ID NO: 430158 - DNA, 201 bp, Homo sapiens
ccgggatcccttgggggctccttcggcatgcttggttgctttgggttttctccttgaacgacgggttcctgttggaacctctcgctgagctttgtgaatcrggcgccgcgtgtcagtccgggccccaaaggcgcttctcagtcacagttagctggtggcgggtctctatccagttagcacctgccttctttcgtgttacgg

SEQ ID NO: 430159 - DNA, 201 bp, Homo sapiens
ccccggccacggcgacctcctaacggccccttttcccgcgacttgcctgggttccgggatcccttgggggctccttcggcatgcttggttgctttgggttwtctccttgaacgacgggttcctgttggaacctctcgctgagctttgtgaatcaggcgccgcgtgtcagtccgggccccaaaggcgcttctcagtcacagt

SEQ ID NO: 430160 - DNA, 201 bp, Homo sapiens
tgcctgtctgttcattctcataacgtggcactacctagaagcacatgcttactcttcagaacagtgccttgtgtgtatttttggttcaagagggatgcctsgttgaaaacttgtgccgctaagggcttgtctctctacttacattgcctgctgttccccactatagtgaaactattactttgtcaaagaagaatgtttgag

SEQ ID NO: 430161 - DNA, 201 bp, Homo sapiens
tacctgggatggtatgtggattgctttttgacagcatcctttttgcatctttttgtttgctaatgtctaatttctgctttcttttttctaacctcagtttkttggcatgagagtgtttttttctcttaaaaaacccctacaactaattggattgatattttttttggtggttttttatttcgttgacaggaggtataggtt

SEQ ID NO: 430162 - DNA, 201 bp, Homo sapiens
gtgactttcaccttaggacaactgttgcatgccaagttttttgtgtgtgtgaaacacttcaaaactgatttaaaagatgtaaatttaaaattggttgtatytaatatgccccaggttcggtaaataaacaattctttttaaaaacagtattctgtgttttatatattgacagctaatccacattttttacacaccaacttt

SEQ ID NO: 430163 - DNA, 201 bp, Homo sapiens
tgcaagtctcctaattaataaaaaagtttcttgaggctagtgtttgtttttttgttgttcttttttcttttatttatttattttaagattgtgtctcgctytttcgcccaggctggagttcagtagcgtgatcttggattactgcaatctccgcctcctgggttcaagcgattctcccaagtagcgtcaggcgtatgccac

SEQ ID NO: 430164 - DNA, 201 bp, Homo sapiens
tagtgtttgtttttttgttgttcttttttcttttatttatttattttaagattgtgtctcgctttttcgcccaggctggagttcagtagcgtgatcttggmttactgcaatctccgcctcctgggttcaagcgattctcccaagtagcgtcaggcgtatgccaccatgcccggctaatttttgtatttttggtagagacgg

SEQ ID NO: 430165 - DNA, 201 bp, Homo sapiens
ttccagatgtgctttctgtttttcctacccttaaatctgttcttgctacttatggaaacaaatcttcaggatctagagcacagacatcagcttgtgttggmaggaaggtgtgtaaatgtaatagcctggagaactcccctcatccccacttgttttaggagtggagtggggcatattatggaccaaggcttgtctacaatt

SEQ ID NO: 430166 - DNA, 201 bp, Homo sapiens
taacaaatagagtatagtaaatatagagtaggtgtggattttactttaaggatcaaatccttagtttgagagcaggacagatgagcatagtttgtcttgtrtttgatggtctggtagtaactgtcagtatggatccatataactgagtaacctcttccattgagaacaattgacaagtacacaggtgctcaacaaatattt

SEQ ID NO: 430167 - DNA, 201 bp, Homo sapiens
gagtatgttgagttgcttggagacaaaagtatttagagtataggtgacccataggttacaatgacttcacttagaaattttcagctttatgatggtgcaaragtgatgtgcattcagaagaaactgagcatcaagtacccatgcaaccattctgttttttactttcagtgcagtgttcactaacttgataaataaaataga

SEQ ID NO: 430168 - DNA, 201 bp, Homo sapiens
gtcccagctactcgggaggctgaggcatgagaatcacttgaaccgggaggcagaggttgcagtgagctgagattgggccactgcactccagcctgggcaayggagctagactctgtctcagggaaaaaaaaaaaaaaaagtttgggtttttaaaaatgtatggtgagctaaggaataagctaattgttttcttaaatcaga

SEQ ID NO: 430169 - DNA, 201 bp, Homo sapiens
actatgattgtgtcatggcattccagcctgggcaacagagcaaacaaaaaagtctttgctttggagtatgttgagttgcttggagacaaaagtatttagartataggtgacccataggttacaatgacttcacttagaaattttcagctttatgatggtgcaaaagtgatgtgcattcagaagaaactgagcatcaagtac

SEQ ID NO: 430170 - DNA, 201 bp, Homo sapiens
ggtttaaaattaaaagagcatccggttttggtatggggatgatccaggattatgttgtgactgatacatattagttacttgtgctttttttttttttttttggatctttgcaagggcaaaactacaagtaacgagttttatataattaatttaaatttgttacaggttttcatgttcaggataaaccatacttccaccttg

SEQ ID NO: 430171 - DNA, 201 bp, Homo sapiens
ggggcggcggcggcggcggcggcggctgtggaggccgcagtccgggtcctggcttcggcctcagccccaccatggtgacgcttgctgaactgctggtgctyctggccgctctcctggccacggtctcgggctatttcgttagcatcgacgcccatgctgaagagtgcttctttgagcgggtcacctcgggcaccaagatgg

SEQ ID NO: 430172 - DNA, 201 bp, Homo sapiens
attgggtctaaggagtttccatttgacagtgtactcagtagggctgggcacaagttacacaatacaagtgaaatccaaaaataaggggataacggaagggrgagactcttacacttagctaagaatttagcgatcaactattacagtctcgaagttatgcaagtgacatgcactttgaaagagcgactgacttgatcacag

SEQ ID NO: 430173 - DNA, 201 bp, Homo sapiens
attgggatgtaaccccatcgtaagttgaggaacatctattctatgagtggtgtacacaatattactttcacacagagtgaagactaaaatatttatgatgyctatgtctttttgggggagaattgttaaattttgtttgtttgttttgtcctcaacagtcaacgacaacacaaacagcagagtggtcctttggtccttctt

SEQ ID NO: 430174 - DNA, 201 bp, Homo sapiens
aggcggggcctttcggctttgggcgcgagtggttaaaagacagttggtgtcggttcggcttctcgggtcggattccgcggtcccaacccttccccatggcmgaccctgaggagttgcaggtttcttcgccgcccccgccgcctccctcttctccctcctcttcagacgcctctgcagcatcttccccgggcggcccagtga

SEQ ID NO: 430175 - DNA, 201 bp, Homo sapiens
gctcaggctggagtgtggtggcaggatcatagctcactgtaaccttagacttggactcaaacaatcctcccatctcgcctcctcctataaagcactgggaktacaggcatttttgctcatttttctatgttgttttttttacttgtcagtttttagatattacatattttgaatactaatgatctgttatgtatgttccaa

SEQ ID NO: 430176 - DNA, 201 bp, Homo sapiens
ttttaatacaaatatattttttaaaagcgctacaaaatattgttttatatatgtggtagccagcttccagatggccccagtgatccctggcctcctggtgktcatgccccagtatagccttctcctgcattttacagtgctgacttttgtaactaccaggatattgagcaaatgcagtgtgtgatttctgaggccatatct

SEQ ID NO: 430177 - DNA, 201 bp, Homo sapiens; identical to SEQ ID NO: 344201

SEQ ID NO: 430178 - DNA, 201 bp, Homo sapiens
aattggtgaaaggagggtgttctgaaattggacagaaagttgtaacaccagatgcggactagtgtggcttataatacgtgtgctgagccgagggagtggartaaggtgggaatcccctgggaatttaagtgaacactgatcaaaatgtttgtttcaaaccaattctcttgtattcattacgttggcatttaggaatgaagt

SEQ ID NO: 430179 - DNA, 201 bp, Homo sapiens
tcccgaattctcttcctctccttgctcagacactgcccctttgtgacctcgtccatcttcaaggccttgatgctgatgacagatttctgtcttccagtccygatctgttccttcacgaaaatgagcccagtagcccgtccaagccagaaatggacttttagcccccaccccctgccaactctgccctttccctcatcccca

SEQ ID NO: 430180 - DNA, 201 bp, Homo sapiens
aatggtgcttggtagaaatgactgtatgcatgtgatagggataacacagaaaacccatggtagagagcatggcgactaacttggagggacttctttttgtbtttttttttttttttttttttttcgtttttgcagagatgcaggtattgtcatgttgcctgggctggtctcaaactcctgggttcaagcaatcctcccacc

SEQ ID NO: 430181 - DNA, 201 bp, Homo sapiens
taaatctgagacatgaccacagcgtttgtcaggaggacactgctgccaaccaatttgagttgccattggctacgaatggagcatcagaaggaataatggcycttcctgccggctgctctgctggtcttccttcctgcctctcttcctcggtcctgtccttctccccctcttcttccaaaagcccctgggattgggggccca

SEQ ID NO: 430182 - DNA, 201 bp, Homo sapiens
ggggtctcatggacaagccccactctgccccttgcttaatgtctctgagcctcagtttcctcatctgtaacaagggcagaaatgccatccgtgtgcagcaragtaccgacgaaaggatggatgcaatgctcttatggcagtgccccacccaaggcacaaggaaaaaccacgaaagcaattccagtttacaccacgtcccaa

SEQ ID NO: 430183 - DNA, 201 bp, Homo sapiens
tcgttggtaccgaagagctgttgaacatcctattattgcacaggaggcatttatcgtggtacaggccagggttttctgccccaatcagggtctgatgttaygaggtacgtggagagatgggtaaccttaacagtgtcacctttttcttacttttccccaacaactcatctcatttattcatgtttgtgttttgcagacaat

SEQ ID NO: 430184 - DNA, 201 bp, Homo sapiens
tcttccagtcccgatctgttccttcacgaaaatgagcccagtagcccgtccaagccagaaatggacttttagcccccaccccctgccaactctgccctttscctcatccccagttgcttaaaccaaaacggattcctcttcctctcatgatccaaactcctgagtcccttcaccttttgcctacactatcacagtgacctc

SEQ ID NO: 430185 - DNA, 201 bp, Homo sapiens
cctcctgccgaccaatgcacaagaacagtgcgggcgaccagtaagcacagtgagaaagcatttcaccctcatcagtaactaaaacaacagcaagtctgacrgcaagcaaaaagtgatctgaaaatggcaaccgatgaagccctaggtgagcgctctgctggcaaggtgcaggacagcggcccttgcaatgctgccctttcc

SEQ ID NO: 430186 - DNA, 201 bp, Homo sapiens
tgtccttctccccctcttcttccaaaagcccctgggattgggggcccactcaaggaaagcgtggagggcagctggggaccagtgtgaagcacgatcctccsctgagcgcagcagtgtcctgcacaaggaagttttgtggagtaaggaagggagtcggcgagggtgactgtgtcctggggaggggtcaggggtccaagagag

SEQ ID NO: 430187 - DNA, 201 bp, Homo sapiens
acattcgttgattccagcaaagcactgcaccatgaccgagatgagcttcctgagcagcgaggtgttggtgggggcttgatgtccccccttgaccagtcagrtttggggactgaagaaagcctaggtctcttagatgactacctggaggtggccaagcacttcaaacctcatgggttctccagcgacaaggctaaggcagac

SEQ ID NO: 430188 - DNA, 201 bp, Homo sapiens
catggcgttttaggggcagcagtgcctgtggcagccttggcctttgcagcggtggcagcagcaccaggctctgcagtggcatccaccggcggcttaagccrtagcacttctcacagcattcagcagcagcattgctgtaaccgacaaagacaccttcgaattaagcacattcgttgattccagcaaagcactgcaccatga

SEQ ID NO: 430189 - DNA, 201 bp, Homo sapiens
gagtctatgtctttacagtgcagtaaatttgtacttctgagtttaaagattaggtcaacaattgggtatttagcaaggcactctgggaaacagaaaaactrtaagacagtctctgcctccgggcgaccaactactttttaaaaattcaactggagtctatataaaagaggaaatgaaggcggcctggtgcagtgtggctca

SEQ ID NO: 430190 - DNA, 201 bp, Homo sapiens
agcagcagctccacctcccacctggcctccccgccggtgagttgccgccccaggggcttggcagcttctccctccactcagcagtcaggggctccagccckgggcccccgcggggacgtgctgtgacttctgttgtctgtgtgagtcacgaaagacatggatgagttcattctgtcagatgttgaagccccacaaacgggt

SEQ ID NO: 430191 - DNA, 201 bp, Homo sapiens
agcagctgcagaagaccctggcctccccggctgacaccgctggcttcctgcacagctcccgggactctggtggcagcaaggactcttcctgtgacacagaygacttcgtcatggtccccgcgcagtttccaggtcagggggcacgctgggcttggaggtgacgcctcaggtgcggcggggacagtgcattgcatgtgttgg

SEQ ID NO: 430192 - DNA, 201 bp, Homo sapiens
atagggtggcccaggagggagcctccctccttcctgctggtcggggtgtagccggaagtggaggggatatggttgagcttgtccagtctgtgggttggctsgagggtgaggaggagacaggaggatggcccagactgacctatgcatgtttatctcagccccacccgtgcctgtgccctcgtacccaagctcggggtccgg

SEQ ID NO: 430193 - DNA, 201 bp, Homo sapiens
gcctccccggctgacaccgctggcttcctgcacagctcccgggactctggtggcagcaaggactcttcctgtgacacagatgacttcgtcatggtccccgygcagtttccaggtcagggggcacgctgggcttggaggtgacgcctcaggtgcggcggggacagtgcattgcatgtgttggatgcacagtgtgtaacacat

SEQ ID NO: 430194 - DNA, 201 bp, Homo sapiens
cctcctttgacttcccgaagacccccagctcccagaacctgctggccctcctagcccggcagggcgtggtgatgacgccccctcgaaaccggacgctgccygacctctcggaggtgggacccttccatggtcagccgttgggccctggcctgcggccaggcgaggaccccaagggcccctttggccggtgagttgagggga

SEQ ID NO: 430195 - DNA, 201 bp, Homo sapiens
caaggactcttcctgtgacacagatgacttcgtcatggtccccgcgcagtttccaggtcagggggcacgctgggcttggaggtgacgcctcaggtgcggcrgggacagtgcattgcatgtgttggatgcacagtgtgtaacacatttccacttatgggcagttaggatgggcccctgggagccaccggcatcggcccagct

SEQ ID NO: 430196 - DNA, 201 bp, Homo sapiens
ggtgggacccttccatggtcagccgttgggccctggcctgcggccaggcgaggaccccaagggcccctttggccggtgagttgaggggacaggccttggaygggcttctgaggggcagcctctttcccctgcattgttctgctgggtacttctggggggtagaacaggaaaagcccagccttgcccttctgtgggtgccca

SEQ ID NO: 430197 - DNA, 201 bp, Homo sapiens
ggactgctcaaacgccggctcagacccgcgtcgccctcatagcgctggggcgggagtgcggggctggtagatggacaggacccgctggccccctcgcctcrccccacgcgaggaggaccccacggaccaagcctgggagacagacgctgaggccgcgcgtagctgagactggggctgcgggtcgggtcgggctgtgcgcgg

SEQ ID NO: 430198 - DNA, 201 bp, Homo sapiens
caacccacccaggctgcatggtgagagtggctcgtcggggggcctgtccctgcgaggtcaaagctggcctttgagtggagtgctctggaagtacagagaaragcggagcataggaagaaagacgtgcccagcccttctcagccccagcgccccgatctttactggggctctgggccatcccaggagggggaatttgctccc

SEQ ID NO: 430199 - DNA, 201 bp, Homo sapiens
gcaccctgagctgaccaccctcgtcctttgcagtggtgcgcaggctgaatgagctgtacaaggccagcgtggtgtcctgccagggcctgagcctgcggctrcagcgcttcttcctggacaagcagcggctcctggaccgcattcacagcatcactgccgagaggctcatcttcagccacgctgtgcagatggtacgggaca

SEQ ID NO: 430200 - DNA, 201 bp, Homo sapiens
gcccccaggacctgcgcctgttctacgagaagaacaagacgttggtccccacgtaagcaccctcccgccttcccttcccttcccccgcgggctccggcccsgcaggccctgctcacaccagcctcctcttgccccagcatcccccgggagacctcggccccgctgcggcagctgctcctggccctactgcaacgcaaccac

SEQ ID NO: 430201 - DNA, 201 bp, Homo sapiens
gaggaaagggtacctttcttttaactcacagaaggctgtgtgggccagtgggtgtctggcaggggatggagactttagggtgagggtgccttgggttggcrccccgggcaggaaagctaaggggccaactcctcccacacacccactgtgtggccggttacctggacagagtgcattagaggatgagccatctgtcagcac

SEQ ID NO: 430202 - DNA, 201 bp, Homo sapiens
gaggctgaggcaggagaaccgcttgaacctgggaggcagaggttgcagtgagccgagatcataccaccgcactccagcctgaatgacagggcgagaccccrtctcaacaaaagaaaaagagtggggccttggagtgcgtctaccccaaggggctccgtgtggtagcagtggggcctagggctgggccgccggaccggaagg

SEQ ID NO: 430203 - DNA, 201 bp, Homo sapiens
aggccacggagggcgtctgcagagaggcctgccttccggattccaggcgggcatgccctgcaaaccccgcctgggcctcccttggtctgcccagccctcgrttagccctgcctgaatcagtagatacttgaacgagtccccagtctgcgggaggcagtggtggggccatggacccatgcggggggttccagggtcacacgc

SEQ ID NO: 430204 - DNA, 201 bp, Homo sapiens
gcccacgctgagcatggaggcgtcctggccaggaagatgtctctgggtggaggccggccctacacgccatctcctcaaggtgcgcctgcaggctggggccygggaaggggcgtctgtaggcagtgggtgaggaggctgtctctgtcccagctggaccctgacagatctctcttttccccaagttggaaccatccctgagcg

SEQ ID NO: 430205 - DNA, 201 bp, Homo sapiens
ctctgtccctggctgtcccaaagctcctggaggtctgggttggcactggtccccgtgtctgccagggacacaatgactcatgccgagccctccgcctctcscatcagcatggcttctgcgggggtggtgaggcccgagccaagccccagacagacccggggagggccttggtcctttgccagctgtcagggcaacaggaag

SEQ ID NO: 430206 - DNA, 201 bp, Homo sapiens
ctttgttcaagcgttcctctggggaccggcagcagaggcaccgtgttctctcagccctggatacgtcttgtaatctttcacactttattcctaaaacgtgwcttatttttatgcagctcattttttctttaaaggagaaaacttgtaggtgtttaagaattggttttgggagggcgaggactgggccaggttagaggcaga

SEQ ID NO: 430207 - DNA, 201 bp, Homo sapiens
cagctttgacagtcagttttgatgtcagctcctcggcagggtaggcctgatgacagccctgtccctccctgcctctgccttgcccaaggccacggagggcrtctgcagagaggcctgccttccggattccaggcgggcatgccctgcaaaccccgcctgggcctcccttggtctgcccagccctcggttagccctgcctga

SEQ ID NO: 430208 - DNA, 201 bp, Homo sapiens
ccccgtccagctttgacagtcagttttgatgtcagctcctcggcagggtaggcctgatgacagccctgtccctccctgcctctgccttgcccaaggccackgagggcgtctgcagagaggcctgccttccggattccaggcgggcatgccctgcaaaccccgcctgggcctcccttggtctgcccagccctcggttagccc

SEQ ID NO: 430209 - DNA, 201 bp, Homo sapiens
atccacccaccttggcctcccacagtgctgggattacaggtgtgagccactgcgaccagccctgttggcgtctttgatcctgggctgaggagctgagaagyttctatggcctgagggtcacacacacctgcccacacacctggccttcacccttcctgctagggggtatgtcctctgccaggagctgttgctcgtatgggg

SEQ ID NO: 430210 - DNA, 201 bp, Homo sapiens
ggctgagagcgctggccagggtcatctggttccaggcagtgtctccccttggccctgtgaccatcccctctgcacagcaggctgcaccagcacttatgtcyccacgtcactgccctgagcgcctatctgccacccctgggccgctgccgtgggtgcagggcagcccttgctgggagggagtggggtgagctggccctgtcc

SEQ ID NO: 430211 - DNA, 201 bp, Homo sapiens
ccctccctacctgggcctggaagcagatgaggggaatacttcatgcaaagaaaaaagtaacatgtgcaaaagctccccgtccagctttgacagtcagtttygatgtcagctcctcggcagggtaggcctgatgacagccctgtccctccctgcctctgccttgcccaaggccacggagggcgtctgcagagaggcctgcct

SEQ ID NO: 430212 - DNA, 201 bp, Homo sapiens
aggctgcatggtgagagtggctcgtcggggggcctgtccctgcgaggtcaaagctggcctttgagtggagtgctctggaagtacagagaagagcggagcayaggaagaaagacgtgcccagcccttctcagccccagcgccccgatctttactggggctctgggccatcccaggagggggaatttgctcccctgagtgtgt

SEQ ID NO: 430213 - DNA, 201 bp, Homo sapiens
agaactaccagcgcattgagcgaaacctgcagtcacccacccagttccaaacacctcggtgagtgtggagcccccaggtagccaggcgtggctggggcctkgtgtggcaggagcccttccacggctcccatagagggacagggtcgtcatccatgtgcagttgtgcaggctgcgcactgcgtaactcagcaccaccattta

SEQ ID NO: 430214 - DNA, 201 bp, Homo sapiens
gctgctgaggcctcccctcctaatatctgccttgtcttcaggtcctctgccatccgcaggtcaggcagcaccagccccctgggctttgcaagggccagccyctcgccccctgcccacgctgagcatggaggcgtcctggccaggaagatgtctctgggtggaggccggccctacacgccatctcctcaaggtgcgcctgca

SEQ ID NO: 430215 - DNA, 201 bp, Homo sapiens
cagcccctccgttgactctcagtccctgggcgagatgcagcagctgcagaagaccctggcctccccggctgacaccgctggcttcctgcacagctcccggractctggtggcagcaaggactcttcctgtgacacagatgacttcgtcatggtccccgcgcagtttccaggtcagggggcacgctgggcttggaggtgacg

SEQ ID NO: 430216 - DNA, 201 bp, Homo sapiens
cccacgcagcccagtccggggccggggcaggccttgcagaatgtgcgtgcaggtgcccctggccctgggctgggcctctgcagcagcagccctacaggggrcttcgtggatgccagcgtgctggtgaggcagatcagcttgagcccctccagtggtggacactttgtgtttcaggatgggtcagggctcacccagatcgcc

SEQ ID NO: 430217 - DNA, 201 bp, Homo sapiens
tactaaaaatacaaaaaaaatcagccaggtgtggtggtgcttgcctgtaatcccagctacttgggaggttgaagcaggagaatcgcttgaacccaggaggyggaggttgtggtaagctgagatcacaccactgcactccagcctgggcaacaagatcgaaactccgtctcaaaaaatatatatattacttataaaagtctg

SEQ ID NO: 430218 - DNA, 201 bp, Homo sapiens
tgagagacacattcctatgcatgggtcctgacactttctttcatttctacaggctagattcccatgaaggggagctaaatggtgttagtgggtcaaagggyatgcatatttaacatttaaatttcaatagttattgagagatctattcccaaagttatagcaaagttacattcctgaagccatgaaggggaggacgctttg

SEQ ID NO: 430219 - DNA, 201 bp, Homo sapiens
gctcctgacaagggccttccggcactgggagttttgtgttagtggaaaggaagaatctaataataccaccacctttacagtaaagacgctgcgaattgacrccttttataataaagacacttatcttgcccaagagctgggtgagtatttcctccttaccaaaaagttggtttacttacagttaactggctgaaagtttga

SEQ ID NO: 430220 - DNA, 201 bp, Homo sapiens
cgggcgaggagcagccagcgtgctcccagccgtccctgcccctcacactgccatcccccagccaccaactacagcagctgatggtgagagggggccctgcrggtgggcagaacatgaatgttgacctgcagggcgtgggccctgggctccagggaagcccacaggtcacgctggccccactgccgctccccagccccacct

SEQ ID NO: 430221 - DNA, 201 bp, Homo sapiens
agcctgggcgacagagcgagactccgtctccaaaaaaaaaaaaaaaaaagaaaacatttaattgtggtaacatatacaaaacataagatttactgtctatstgattcattatttttaaagttaatttattccagggtactgacaaatattaaggtttggttttgattatttatgatgatatgtgcttgtttatatttagcc

SEQ ID NO: 430222 - DNA, 201 bp, Homo sapiens
agccttctggacatatttagccagaagaaccagtttctttttcttttcctttttcttttttagacctgtcagccagaagtaagaaccggtttctattttcytgtatttctctctatgatttcaagctgtaaagtgccatttgactttgagttcatttaatttccagggtattcccatttgaataccctggacttgaagcag

SEQ ID NO: 430223 - DNA, 201 bp, Homo sapiens
accagtttctttttcttttcctttttcttttttagacctgtcagccagaagtaagaaccggtttctattttcttgtatttctctctatgatttcaagctgyaaagtgccatttgactttgagttcatttaatttccagggtattcccatttgaataccctggacttgaagcagttaatgtatctggaaagcttctttggtt

SEQ ID NO: 430224 - DNA, 201 bp, Homo sapiens
acccgggtacgcccatcacagtccgagagcggagaccctcccagccccacacacagtcagggggcaccatccaccacctgggaccccagagccctgcagcygcgggtgggggccggcctgcagcccctggccagcccaagccacatcaccacggctaacttgccaccgcagatcagcagcatcatccagggccagctggtt

SEQ ID NO: 430225 - DNA, 201 bp, Homo sapiens
ctttggtttgcttactctaagaagctgtcattatggagatgcagattaatttgtctttctgttttatcagagtgtgtttttaagaaatgacacattttcartgggagtgttttttgtcattcttccccatgccccaccatggcctcctcaggcatctgcagcccctgccgtgaggggttggccaccctctgacactgcccc

SEQ ID NO: 430226 - DNA, 201 bp, Homo sapiens
cgccattctcctgcctcagcctcccgagtagctgggactacaggcacccaccaccatgcctggctaattttttgtatttttagtagagacggggtttcackgtgttagccaggatggtctcgatctcctgaccttgtgatctgcctgcctcagcctcccaaagtgctgggattacaggcaaaaatttattctttttatgtt

SEQ ID NO: 430227 - DNA, 201 bp, Homo sapiens
ggggaacacgggaatgaagaaggttcccaagaagttagaggagattcccccagcctctccggagatggcacagatgaggaagcagtgcctggactatcatyaccaggagatgcaggctctgaaggaggtcttcaaggagtatttgattgaactgtttttcttgcaacactttcaagggaacatgatggatttcttagcttt

SEQ ID NO: 430228 - DNA, 201 bp, Homo sapiens
ctccattttaaagtttaacttcctggttctcttcacccccttgcctctagtttcagtaaacaactttcccgccagtcctaatcactagttcacatctgttmccctggtcacctgctccatcctgactcatctcggtcacctgctttgaccggagtcacctttagttacctcttcctaaccgtccttcccaccaaactgctc

SEQ ID NO: 430229 - DNA, 201 bp, Homo sapiens
acacatctcaatgtcaagagtttctgaacaagttacagctctaacttagaatatacagagcaaaaatttatagaatttcattttctttctttctttctttcttttttttttgtgacaaagtcttgctctgtcgcctaggctggagtgcagtggtgcgatctcagctcactcactgcaacctacgcctcccggattcaagca

SEQ ID NO: 430230 - DNA, 201 bp, Homo sapiens; identical to SEQ ID NO: 237295

SEQ ID NO: 430231 - DNA, 201 bp, Homo sapiens; identical to SEQ ID NO: 237396

SEQ ID NO: 430232 - DNA, 201 bp, Homo sapiens; identical to SEQ ID NO: 420858

SEQ ID NO: 430233 - DNA, 201 bp, Homo sapiens
gctgtaagtatgagtgggctgggctgcaagacttctataccatcctagatcactagaccgcacccagcatagagatggaggaaggaggcccacagggctcygacactcactgattttgccactgacagtcaccttcaacctcaagcagcggtcttcatgctggtggatgggtttggctgcaagataagcccacaggggtta

SEQ ID NO: 430234 - DNA, 201 bp, Homo sapiens; identical to SEQ ID NO: 420864

SEQ ID NO: 430235 - DNA, 201 bp, Homo sapiens
ccaaactccttatcaccttttagttcccccatggtctgttctgtccacctctccaggctcacatctcctcacttcctgtgtccctccaactccagccaggmtgagccacaggaagttccctgaagatgtcatgctccctttgtacgtgtgccttcatgcctggccagctcctctgcttgtcctgagctctgggaccatctt

SEQ ID NO: 430236 - DNA, 201 bp, Homo sapiens; identical to SEQ ID NO: 420865

SEQ ID NO: 430237 - DNA, 201 bp, Homo sapiens
gttcatgtctactgtagcacactgttctaagggtctcttaacctatgtgtgtttcttcccagcttccttgaggacaggggctctgtagtgttttatttatytttgtgctcatagcgctaaacagagtgcccagcacatagtagaagctcactcacattgggatgtagatgaatgaaaatagaattcaagatcggaaggggc

SEQ ID NO: 430238 - DNA, 201 bp, Homo sapiens
ttggctgcaagataagcccacaggggttaaataagaaacctttgctggaagaaaatgtaagtccaaatgcccctcgccctgctttctcagctccctactcmatttcattcttctcttccctctaaccttgattcctaccctccttagtttttgctaacttcctgcccaatgttcagcccagcctctcattctttggaaata

SEQ ID NO: 430239 - DNA, 201 bp, Homo sapiens
acctcctgtacccaacctcttcaagcagaccccttcctgtgccccaggcccagtttgctccagctacccacctgctgcaagtctcttctcctgtggattgwcatgggcctgaggactgtgagctgaaagacaagagtggtagtagatcaggtactgtatcaaagaggcagagggctgtaagtatgagtgggctgggctgca

SEQ ID NO: 430240 - DNA, 201 bp, Homo sapiens
caagtgcgagtctgcgaacgcgggggtgcgggacacggctttgctgctccgcgcgcggaccttgcagggtgcgaggttgttgacatgccccgcacctttcygagcctcgcatgcccaggctcgggcgcccgcgttcccacactctcctcctcccccatccccttcccggactctgcgcttgactgcccctccccacacaca

SEQ ID NO: 430241 - DNA, 201 bp, Homo sapiens
tgtagcctcatatttgcccccacgcttgggcccagcttggctgcctacggactctactctggactggcgtctctttagtcctgggtatgatagggtgtgcktgtgtgtgtgtgtgtgtgtgtgtgtgtgtgtggccagagggtcacccatcagccccctctcctgggggtacagtctgctgtacttagccttcatttgact

SEQ ID NO: 430242 - DNA, 201 bp, Homo sapiens; identical to SEQ ID NO: 420860

SEQ ID NO: 430243 - DNA, 201 bp, Homo sapiens
gcagcgtgccagcgcccaaactgggcttaccaggcccctcccccaccctggggaaaagagaggagcagagagaggcttttaaaattcctctctggagagayaaacatagaagccatttcagaacaggtatttcagctctgggcctggcgtctttccctcattcccgtgacgggcactgactcattcctcatccacctctgc

SEQ ID NO: 430244 - DNA, 201 bp, Homo sapiens
cctgaggcctggagatcccagggctgctgcccactggcctgagtcacccatgccagcctcacctaccccgttcattgtagcctcatatttgcccccacgcttgggcccagcttggctgcctacggactctactctggactggcgtctctttagtcctgggtatgatagggtgtgcgtgtgtgtgtgtgtgtgtgtgtgtgt

SEQ ID NO: 430245 - DNA, 201 bp, Homo sapiens
agcagcaagaagtggtttcaaggaaccgaaatgagcaggtaagatgggggtgctctacttgtttggacctgtcctggccacacgcagaagtccctgatctyggattgagggcccagcccagacctgggcagaggctgccctgcagtcagctggggcaggttggaatctgggcacctcaagaggtggcagtagagaggaaag

SEQ ID NO: 430246 - DNA, 201 bp, Homo sapiens
atgtacgccttctgcagagtgaaggaccccaactctggactgcccaaatttgtcctcatcaactgggtatgtggagcctgtttcatctaggtgtgacccargaaaccccattgtcttctttcctgttttgacttgacttcaggaacaaagtgttttactggcatgacttagtagatcaatagaacagctctgagctggtga

SEQ ID NO: 430247 - DNA, 201 bp, Homo sapiens
gaacccaagatcgttcaaataagcgcatcgacataacaagatttagaaaagaataagcacggtgctgtgagagcagctagcgggggctggactgggtcccygcggccaggcttccaagtcgagctgccgtttgggtgggaccagaagacgggctagtctgcgccccaggatccctccctgaggacaaacagaaggccgggt

SEQ ID NO: 430248 - DNA, 201 bp, Homo sapiens
acgatcttggctcactgcaacctctgcctcccaggttcaagtgattttcctgcctcagcgtcccaagtagctgggattacaggcacccaccaccacacccrgctaattttgtatttttagtagagacggggtttcccatgttggccaggctggtctcaaactcctaacctcaggtgatccacccgccttggcctcccaaag

SEQ ID NO: 430249 - DNA, 201 bp, Homo sapiens
aagagctttagaacaccagttgcttggttctatggggtctctgtagactctcctgtcaggtctgagtgccctggatggcacttatgccaaacagcacatcytctgttttggaggcatctaaagaaggatatctcgtcatttccttggtggggttttctgcctgctttataatccctcagatttacccacgtcagtcagtgt

SEQ ID NO: 430250 - DNA, 201 bp, Homo sapiens
caggcttccaagtcgagctgccgtttgggtgggaccagaagacgggctagtctgcgccccaggatccctccctgaggacaaacagaaggccgggtcctccsttctcccgcttgtccttcggcattcgcgggacctgcatgctagaccagctggccggacagctcgctaggacccgcgggtgcggctggcccctaccatttc

SEQ ID NO: 430251 - DNA, 201 bp, Homo sapiens
gtcctcccttctcccgcttgtccttcggcattcgcgggacctgcatgctagaccagctggccggacagctcgctaggacccgcgggtgcggctggcccctrccatttccgcttcctgccgtggggcggggtttccggttgtcggaggcgaggcttgtcggctgtcaaaggggcggcccggcccggcccggaagctacagca

SEQ ID NO: 430252 - DNA, 201 bp, Homo sapiens
gcagaagaggaggctgtgtatgaggaacctccagagcaggagaccttctacgagcagcccccactggtgggttcctacactggggctggggccaggaaggrgctgcatactcaggaacacttatcacgggccgcctgagttttctgggggcatgcaacaggttttaaagcacatgcatttttggagcagccctgtgttata

SEQ ID NO: 430253 - DNA, 201 bp, Homo sapiens
atttgctggccgctgatgtgaatcccagttgccacccttgtcacagaacatggactctgagcagggaggtgggccaggcctggatgctggttcaccaggcktccctgggtggaggccttggagaatggggtggaggccccctacggagcaggctggtgtctactctagccttttttgggaatgctctgtaggagggtatgc

SEQ ID NO: 430254 - DNA, 201 bp, Homo sapiens
ctggagccttcctctggagcccagcctgtgtggtcagagtggaggctctgcagcatgcatggctatgatagtctggctgccctcaaggtcatggcactggmacatcttgggctgcccctggaggtagccaccgtggaggaactaaaggaggcatcaaggcggagcctgaaaccagagcaggccccttggagtcacgggaga

SEQ ID NO: 430255 - DNA, 201 bp, Homo sapiens
aaaagatattgggctgcgctgtctaccacgtcaccacatagcacatggccctggggcctctgttcctgcactagcaagagcaagccccatgagactgcctygagcacaccagggtggagggtgctgtggggtgcgtgggtgtgtggtggtgtttctgaagtgatgtatatatttacccgggtttgcaggcaagctgaggag

SEQ ID NO: 430256 - DNA, 201 bp, Homo sapiens
ggccgaggaggatgtggagcctgagtgcatcatggagaaggtggccaaggcttcaggtgccaactacagctttcacaaggagagtggccgcttccaggacrtgggaccccaggccccagtggtgagtgctgcttgcccatcgccagcccttttgttgctcagggcctgaggcagggggccaggaatatgcacttcccagca

SEQ ID NO: 430257 - DNA, 201 bp, Homo sapiens
cctgggattacagacacgagccacccacctggcccagagttctgttcttttttttgagatggagtctcactctgttgcccaggctggagtgcagtggcgcratcttggctcactgcaagccccgcctcccgggttcatgccattctcctgcctcaacctcctgagtagctgggactacaggtgcctgctgccacgcccagc

SEQ ID NO: 430258 - DNA, 201 bp, Homo sapiens
gttaagccacaaggctaatgatcgactggctctggtgcccgtctttggccatgtgcctaaaactcagtcctgggcaggggattaggctgaagtggcagcayagggctgagcgggcagtggctctccctgcagaaggaggaggagaaccgtcggctggaggaaaagcggcgggccgaggaggcacagcggcagctggagcag

SEQ ID NO: 430259 - DNA, 201 bp, Homo sapiens
ccaagtagctgggattacaggcacccaccaccacacccagctaattttgtatttttagtagagacggggtttcccatgttggccaggctggtctcaaactyctaacctcaggtgatccacccgccttggcctcccaaagtgctgggattaccggcatgagccatcgcagctggttgagtcccttcttgcaagagctgggtt

SEQ ID NO: 430260 - DNA, 201 bp, Homo sapiens
tctttcctcacaagtgagctcatgcagcatccactctccttggtgcccattacagatggtcacactgaggctcgggtaagttaagccacaaggctaatgawcgactggctctggtgcccgtctttggccatgtgcctaaaactcagtcctgggcaggggattaggctgaagtggcagcatagggctgagcgggcagtggct

SEQ ID NO: 430261 - DNA, 201 bp, Homo sapiens
gcttcgccaggttcttctttccagtcctgggacttccctggagaaggggttcctgcacagccctctctgagaaggcggaagccacgcccggtttttttgcraacgctgtgttcggggatgggcatttgagagcggcctggcagccgggctgtgaatgtgagccctgccctgggggcttcagacgaggagctcagggatctg

SEQ ID NO: 430262 - DNA, 201 bp, Homo sapiens
gaatcagaactggagttgggagtgtgctcatagctaatgctctctgcctgcctttgagggcatgaccagaggctgcttcactctcggtcagtgagtgcatkggaggtcaggatgttgccagggccacctacaggcctgcctcagtggggcaggataaaggactatgctggagctggtgccgtgagaagggtgggccctggt

SEQ ID NO: 430263 - DNA, 201 bp, Homo sapiens
gtagagacagggtcccaccatgttgcccaggctggtctcaaactcctgggctcaagcgaccctcctgcctcagcctcccaaagtcctgggattacagacaygagccacccacctggcccagagttctgttcttttttttgagatggagtctcactctgttgcccaggctggagtgcagtggcgcgatcttggctcactgca

SEQ ID NO: 430264 - DNA, 201 bp, Homo sapiens
tccactcatacggagccctgtagatgaaatacctgatcagctcttcctccttataacctggaaaagtttgtgagggctaagcctcagtgtcagggagaatygtttagagctgcccactcctgtgctccccctgtccccatcaccctctcttctggagtctgaggactgagccagttacgccactgcaggatgttcaatctg

SEQ ID NO: 430265 - DNA, 201 bp, Homo sapiens
cgggtgcggctggcccctaccatttccgcttcctgccgtggggcggggtttccggttgtcggaggcgaggcttgtcggctgtcaaaggggcggcccggccsggcccggaagctacagcagcggcgcggagactgcggggcgggccatggcggcgaacctgagccggaacgggccagcgctgcaagaggcctacgtgcgggt

SEQ ID NO: 430266 - DNA, 201 bp, Homo sapiens
tgtaccagaagaccaatgccgtgtctgagattaaaagggttggtaaagacagcttctgggccaaagcagaggtgagtgctgccccggggcatgctgggcaygtgggagtgttctgcttgctgtggctcatctttcctcacaagtgagctcatgcagcatccactctccttggtgcccattacagatggtcacactgaggct

SEQ ID NO: 430267 - DNA, 201 bp, Homo sapiens
ccacagctcatgttttcctcatagtagatgtgtgctcccatctccatggctttgtccctcacaacccccaccccatggtaagtcaggccagtgtcctcccwgctgcagagctgagaaggctgcacagttgcctactgagaacctgcctagtgggtcagagcaaagtgagaacgggcctgtgcccacccacagtgttactgt

SEQ ID NO: 430268 - DNA, 201 bp, Homo sapiens
tcacttgtgtttcgtttcagggctctctttacctatgaaggcaacagcaatgacatccgcgtggctggcacagggggtgagtatgactccaaatggactcrgggacaccaggaggtaggagggtgacgacgaggggtcagcgcactcagctgtcttggtccactgagccacatggggcttccagtgctcactggccacttc

SEQ ID NO: 430269 - DNA, 201 bp, Homo sapiens
gcttgacctgagccatgtggggcagagcagcgattgtgtgtaagggctgagtctggggtaacacctttgtcatccctgggcaggtgcagcagcaaggtgcyggctctgagcacattgaccaccacattcagggccaggggctcagtgggcaagggctctgtgcccgtgccctgtacgactaccaggcaggtaaggtgccct

SEQ ID NO: 430270 - DNA, 201 bp, Homo sapiens
cagcgaggtgtgctgcagcagtgtggggctgccgtgggctgcccgagcaggtgggatgtgggagggagcccctgatatgcatctgggctcatcctctttgyagccgacgacacagagatctcctttgaccccgagaacctcatcacgggcatcgaggtgatcgacgaaggctggtggcgtggctatgggccggatggccat

SEQ ID NO: 430271 - DNA, 201 bp, Homo sapiens
taaggggtggtggccaccactgtttagaatgacccttgggaacagtgaacgtagagaattgtttttagcagagtttgtgaccaaagtcagagtggatcatkgtggtttggcagcagggaatttgtcttgttggagcctgctctgtgctccccactccatttctctgtccctctgcctgggctatgggaagtggggatgcag

SEQ ID NO: 430272 - DNA, 201 bp, Homo sapiens
gcagcctatggctgagggatttatgcactgtcctgtggcttctgtactctggtagggcggggacagcagcagcccagcccccgagcctgtagactgcttgycctctgcgtactcccagcttgacctgagccatgtggggcagagcagcgattgtgtgtaagggctgagtctggggtaacacctttgtcatccctgggcagg

SEQ ID NO: 430273 - DNA, 201 bp, Homo sapiens
acatggccctggggcctctgttcctgcactagcaagagcaagccccatgagactgcctcgagcacaccagggtggagggtgctgtggggtgcgtgggtgtstggtggtgtttctgaagtgatgtatatatttacccgggtttgcaggcaagctgaggagccccttcctgcagaagcagctcacccaaccagagacccactt

SEQ ID NO: 430274 - DNA, 201 bp, Homo sapiens
ttctttcaggtcatcttggtgtgtgtctccttgagggtcactgggcagtgctctgctgcctctgctgggtccagtcctagcagcactcacctgtgctgtcrcaagtttagcgtattctctcctttggtgcctgtgggcctggccttccacctgggtccaggtctctaatgagtgctgtcccctacagggctctgtgtacca

SEQ ID NO: 430275 - DNA, 201 bp, Homo sapiens
cacctttcgccgggcacagcgtcgaagcttcactccagctagctttctggaggaggacacaactgatttccccgatgagctggacacatccttctttgccygggtaagaagtgcccggggtgtccccccaccccacgttcccttcctgcctgtgtccaccctgacctcatgtgtttgctcaggaaggtatcctccatgaag

SEQ ID NO: 430276 - DNA, 201 bp, Homo sapiens
ccatgtcagcccctgtcagacccaactgagtcaggggtttagctctggtgacccctgtgccacatttgctagctgagccttggggcagtgcccccccccctcctgccaagtgctggcccctttgtgcactaccctcacaggtcaggtcctcagggattcctgtgtctacaggccctagggcggcttccctcacagatggcc

SEQ ID NO: 430277 - DNA, 201 bp, Homo sapiens
tgtcagcccctgtcagacccaactgagtcaggggtttagctctggtgacccctgtgccacatttgctagctgagccttggggcagtgcccccccccctcctgccaagtgctggcccctttgtgcactaccctcacaggtcaggtcctcagggattcctgtgtctacaggccctagggcggcttccctcacagatggcctgt

SEQ ID NO: 430278 - DNA, 201 bp, Homo sapiens
acagcgctgggaaccacaccaaccatccccacatggactgtgtcatcacaggacggccctgctgcattggcaccaagggcaggtacgtgtgcgtgccagcragtgcagctggtctctgggctcagagcatcgccctagggcgtgccttctccctaaccaaatcctgaaataagccagtataccaaggatgtggggttagag

SEQ ID NO: 430279 - DNA, 201 bp, Homo sapiens
gtacacagaggatggaaatgagaacaagggccctcttgtttcagcttcctcctccatctcggtccccaccatccccttgccctcctcctgttctggatacygaccgctctcaccccactaccctgctccactcccttctcttcagcactcactctctccttctctgtctccaccgcccggatgctcttgcctcttagcagc

SEQ ID NO: 430280 - DNA, 201 bp, Homo sapiens
gggcacctgggtgcatgtgtgtagggtcagtcagggacacctctggagggctctgactggtgactgggctgcccatctgtcctctggccagacgtgtgcakgggatgtgggcctctcccacctgcagcctggggagggtgttttcgcctaactcctgagacccagctagactccagactggggactagcagtgaccagcat

SEQ ID NO: 430281 - DNA, 201 bp, Homo sapiens
ccctagggcggcttccctcacagatggcctgtagcagggaacctcttgttctgtctccttgtctagggtgatgaggggaggcagggtgccagtctgtcctsctggggacctggagagaaccctgcaaaggtctcaggcctgccctgctccaccctgaacctcatttcttccacagaaaagaagaggcttcactgggagggt

SEQ ID NO: 430282 - DNA, 201 bp, Homo sapiens
ggagaaggcaccggagcaggcggacctcaccggcggggccctggaccgcagcgagcttgagcgcagccacctgatgctgtgagtgcggcaggcagggaagrggggcagagagagaccccggggcccgtcaggaacagctgggcgagtatcggcattcacctctgtgggcgatggaaggggtagcctcagggactgggaact

SEQ ID NO: 430283 - DNA, 201 bp, Homo sapiens
cctggagagaaccctgcaaaggtctcaggcctgccctgctccaccctgaacctcatttcttccacagaaaagaagaggcttcactgggagggttgaagagmactttggggtttgcaaagggcctagcaaatatcattctcagcatgatgccattaatagacaaggcagagaggccaggtgactttcccttcattaatccag

SEQ ID NO: 430284 - DNA, 201 bp, Homo sapiens
agcgcagggctccgggggcgggcgggttccggggctgcgtccgcggagcgcggggcgagtcctcagcacccggggccggagctgctcagagcggccggggycgtgtcggggccggggccggggccggggaggggtcgcggcgaggccccgccggggcggccgggcttttcttcctggagtttcccgagtcgcccgcggagg

SEQ ID NO: 430285 - DNA, 201 bp, Homo sapiens
ctgggcgagtatcggcattcacctctgtgggcgatggaaggggtagcctcagggactgggaactcactactcactgggccaccaggggtgggagacgcagrgctgggcatggccccagtctcatggcttgcctgtggaatgggacagcaatcttagaacccaggggctgggcagaatccaacggggaggcggaggtgacag

SEQ ID NO: 430286 - DNA, 201 bp, Homo sapiens
gcggggcgagtcctcagcacccggggccggagctgctcagagcggccggggtcgtgtcggggccggggccggggccggggaggggtcgcggcgaggccccsccggggcggccgggcttttcttcctggagtttcccgagtcgcccgcggaggcggcccagccccggattcctagcccggcgcgccgcaaaaatagcccgtg

SEQ ID NO: 430287 - DNA, 201 bp, Homo sapiens
attgagcttcagattaggagtcaaacagaagactgagggtcagagagcagcgtgtgggtggggatgctggaggagccacatccccctgggatgaggctcaygtgagctgaggacacgtctgggaaggtgtcccggggtgaggccccttgctccagctgacctcggcagcaggcagttccttgggcggagcagagcccaggc

SEQ ID NO: 430288 - DNA, 201 bp, Homo sapiens
agtcagtgtgtccccgttccagctccctgccatccccggaggcccgcagtgttgcttttttactggcaaggagaaggcagatgccgggcgacttgcgcagyatattcgccaggatagagacagggtgccctggtgccccccggggagggactgcagcagtttgcggggctggggcgggaggtgaatgccggctccctccag

SEQ ID NO: 430289 - DNA, 201 bp, Homo sapiens
gagcccaggcttgatggttctggccccggggttggcagtcaactccgccgccagttgtccctgccagcatggtcctgtgagtgtgcagggcaggcctgagyacagaggtggttgctgctcacacctgaggatgcagctctccactggctgtggccactgtctatgcctggactggccagagcttctctctagtctcttccc

SEQ ID NO: 430290 - DNA, 201 bp, Homo sapiens
gccctcctccgaagaccctcatgagtggccagaagacatcaccaagtggccggtgagctgcagtgggggggttgttagggagccctccgtgtcatgtgggrgagaatgccacaccccacccactggtgataccagagattcccatcatgggaccacctcacgttttcagaggctgtgcacctgccctttgtacagcctgtc

SEQ ID NO: 430291 - DNA, 201 bp, Homo sapiens
gcatatgctctagggtcctttcaccccccagctcctgcccctcagagagtgccaagtacccacaggctacaccaccctgtgatggagtcagccgctgctaytgtgccaggcactgctgtgacccctgatttccagatgggaaagctgaggcttgcttagggttgtaggtggtggagacacatggggcccaagcatcagcct

SEQ ID NO: 430292 - DNA, 201 bp, Homo sapiens
tgtcatcacaggacggccctgctgcattggcaccaagggcaggtacgtgtgcgtgccagcgagtgcagctggtctctgggctcagagcatcgccctagggygtgccttctccctaaccaaatcctgaaataagccagtataccaaggatgtggggttagagggggtctggacttccttggggccaacaaaggtgggtaggt

SEQ ID NO: 430293 - DNA, 201 bp, Homo sapiens
gcttgatgggtgcccagacatccccagagcagaaacctcagttaacaggactctccaccatcccccactcagcccttccacaccaggctctgcaggcagcsagaggggacgtcagcatgcatggcgccagtggctcccttgaccctcctcgtccctcagcctcatcgagagtcctgcccgcagccccccccagctggtcct

SEQ ID NO: 430294 - DNA, 201 bp, Homo sapiens
tggcgcggccctggcgtgccttcttcaagctgctggctgtggtgctcttcctcttcacctttgggctgctgccgtggattgacaactttgcccacatctcrgggttcatcagtggcctcttcctctccttcgccttcttgccctacatcagctttggcaagttcgacctgtaccggaaacgctgccagatcatcatctttc

SEQ ID NO: 430295 - DNA, 201 bp, Homo sapiens
tcctgcccgcagccccccccagctggtcctgggatgcactgtggctttgggtgtctcctgatggggctgggcctgggctggcagctgtgaggctgctgcartgactcagatgctgtgtgaccccaggcagtgaggccttccgtgggccacggtttccccatacactgaggggtcagcggggtgggggagacactgtttgga

SEQ ID NO: 430296 - DNA, 201 bp, Homo sapiens
tcactaagagcattcgtccattttctgggtgagaacatgctgggagtgtactcagaatgctgtcccagcactgtgggttccggaagccccttgccgagcaycacctgccttcccaacgtgtctgatgctgtctgaaattccacccttagtgtctgagactcagaggtggcccctcctggctattccttaccagcagggtga

SEQ ID NO: 430297 - DNA, 201 bp, Homo sapiens
caggctctgcaggcagccagaggggacgtcagcatgcatggcgccagtggctcccttgaccctcctcgtccctcagcctcatcgagagtcctgcccgcagccccccccagctggtcctgggatgcactgtggctttgggtgtctcctgatggggctgggcctgggctggcagctgtgaggctgctgcagtgactcagatgc

SEQ ID NO: 430298 - DNA, 201 bp, Homo sapiens
aactgcccctcagggatggtggggtgagggcctctatgaagcactcaaccgggcaaggccagctgcggtctagtggaaacttggagttggctaacagttcrgggggtggctggaacccactcatcctcttattagaccttgcccactcagaccctggtccctggagtgactacaggcctggggcagggcatgctgccccgg

SEQ ID NO: 430299 - DNA, 201 bp, Homo sapiens
atgcagaaggtatgcctgcctgttgctgcctcctgcaggcccctccttccgctctcaggggctggggctgcggacacagccagcctgagcagaagggactstctgggagctcacagtctggaagggcagtcagacagcctgctcgtgaaggcacctgaaacagtctctgggaaggggtaccttgggatggggacatggtct

SEQ ID NO: 430300 - DNA, 201 bp, Homo sapiens
aaccgggcaaggccagctgcggtctagtggaaacttggagttggctaacagttcagggggtggctggaacccactcatcctcttattagaccttgcccacycagaccctggtccctggagtgactacaggcctggggcagggcatgctgccccggaggagggcctttgaagtcccctgcctgggaggggcgatctggccgc

SEQ ID NO: 430301 - DNA, 201 bp, Homo sapiens
agggactgggaactcactactcactgggccaccaggggtgggagacgcagggctgggcatggccccagtctcatggcttgcctgtggaatgggacagcaawcttagaacccaggggctgggcagaatccaacggggaggcggaggtgacagaggtgatacttgctgagttgcagaagtcagtgtgtccccgttccagctcc

SEQ ID NO: 430302 - DNA, 201 bp, Homo sapiens
ccagtggcctccctgcatcggctcctgctttctggctctccctgcacctgtgcacgcggccagcttgatgggtgcccagacatccccagagcagaaacctsagttaacaggactctccaccatcccccactcagcccttccacaccaggctctgcaggcagccagaggggacgtcagcatgcatggcgccagtggctccct

SEQ ID NO: 430303 - DNA, 201 bp, Homo sapiens
aggcccgcagtgttgcttttttactggcaaggagaaggcagatgccgggcgacttgcgcagcatattcgccaggatagagacagggtgccctggtgccccycggggagggactgcagcagtttgcggggctggggcgggaggtgaatgccggctccctccaggcccttggagcgaggctggcggaagcagaaggagggcgc

SEQ ID NO: 430304 - DNA, 201 bp, Homo sapiens
tgtgctcagatagttgtcccatggacttatgttgtctgaggacctaggctgtgcccagcactgtctgctgggatgaacaaggcaggcacagagaaagtcgrtgctgagcacacagtagtgctctgacagtgggggacatgagcaccacggttgggctcatcactgcttctccctcctcccgggtctgggtgcaatgaatct

SEQ ID NO: 430305 - DNA, 201 bp, Homo sapiens
caagcttgcaatgccccgcagccccggcaccgagccgcctcactgctgtttctgggcgcgtggcgtcacctggtggtcactacggtgtctgcgcccgggtrgtttctggaaagtcatttgtgcccaggagcctggggccactagctgctgctgtgtcaccctctttcctgaatgtggtgactctatgcactggaccgatca

SEQ ID NO: 430306 - DNA, 201 bp, Homo sapiens
ccgagtcgcccgcggaggcggcccagccccggattcctagcccggcgcgccgcaaaaatagcccgtggccggattagcagccccagcggcctggccgggcsggacagctcggctccagcccccgcccaacagctgagggtcccaggagcgggagtctagagtccgggggtgccccaggttcctctgaactccccccgctgc

SEQ ID NO: 430307 - DNA, 201 bp, Homo sapiens
gttcctggcacatcccgccgtccttacgcgcaaggccttgtcatattcattcctcctcatccccaccctcccccatctccagctcctcgccccgtagaccrtcatctgatttggtcttttgatttgggtgtactcttccagcatgtgtcttaaagcttacataagtggtatttgcctcttttccactaagcaatttttaaa

SEQ ID NO: 430308 - DNA, 201 bp, Homo sapiens
ctctttcctgaatgtggtgactctatgcactggaccgatcacacacctcttgcaggctgtcatgtgcatagtgggccctttgtccctggagtggaagtctkggtgggtaagagggtgaggcctggtaagacaggtgtgagatttgccctgggcacagactagggtgagcctcctgtcactgagacctcagatcggctgtcc

SEQ ID NO: 430309 - DNA, 201 bp, Homo sapiens
ccatcatctgatttggtcttttgatttgggtgtactcttccagcatgtgtcttaaagcttacataagtggtatttgcctcttttccactaagcaatttttwaaaaaattcatcccaactttcatcacatcatcttatgtggaagtgccgtagtccataccagttccctgatttaggacacagaggttgtttctgattttca

SEQ ID NO: 430310 - DNA, 201 bp, Homo sapiens
ccacggttgggctcatcactgcttctccctcctcccgggtctgggtgcaatgaatcttcagatgtcagctttgtcattattgaataacacaccatgccccrcaggcctgccttgctctgccaggaaccatgagtgaggcccgcagggacagcacgagcagcctgcagcgcaagaagccaccctggctaaagctggacattc

SEQ ID NO: 430311 - DNA, 201 bp, Homo sapiens
cacaggacggccctgctgcattggcaccaagggcaggtacgtgtgcgtgccagcgagtgcagctggtctctgggctcagagcatcgccctagggcgtgccytctccctaaccaaatcctgaaataagccagtataccaaggatgtggggttagagggggtctggacttccttggggccaacaaaggtgggtaggtgcggct

SEQ ID NO: 430312 - DNA, 201 bp, Homo sapiens
aaaagaaaaaaatgattttggctgggcatggtggctcacgcctgtactcccagcacttagggagaccgaggcaggtggatgacttgaggtcaggagttccwgaacagcctagccaacatggtgaaaccctgtatctactaaaaatacaaaaaaaaaaattagcctggcatggtagcgggcgcctgtaatcccagctgctcg

SEQ ID NO: 430313 - DNA, 201 bp, Homo sapiens
agccgcatgacgcggggcggtcgtcgaccggcagccgggaccattgcccaggccgagaggcaatcggcgcacggctacgcgagtcgtgctgccagccggargaaggctgggggaggagagcctgggagcgcgggcgcggccccgcgccgccatcttaacacctggcagctgtggcgggcgccatcttggagtcgggcggac

SEQ ID NO: 430314 - DNA, 201 bp, Homo sapiens
attagctgtcatatctgaatttaaggaatcttttagaaacagcttttcaaaaagtttgtttaggccaggcgcagtggctcacacctgtaatcccaacactytgggaggctgaggcgggtggatcacctgaagtcagcagtttgagaccagcctggccaacatggcaaaaccccatctctactaaaaatagaaaaattagct

SEQ ID NO: 430315 - DNA, 201 bp, Homo sapiens
ttcattagaagagaagttttacaactcaaagtcagtcttgaatccttcacttaaggattatagcagatcagaacccacagaaggcacagacccccagcaayagaatatcttcttcctcagcacattacttccacatacctgtctgattaaaaatgaagattttcagtgtttccagtgttcgatctgtatgattaaatctgg

SEQ ID NO: 430316 - DNA, 201 bp, Homo sapiens
ctccagcgccatccagagagaaaaggctctctcggacgttgcaccttgagtcctccgctcctccagcaccacaggtgacgccgctaggctctgaactcacyttgtcctcagcttccccaggaatcacagacagcatcaccatgtgatcgccttgggtgtccagccccagcaccgcattggcctcttctgctgccctgtcct

SEQ ID NO: 430317 - DNA, 201 bp, Homo sapiens
ttttgccttctgtatagtaagcatgtcattctactcactattctgccggaatacatcttcacatttcaaactggattactttccaaatactggattacgtkcatgcagtaaaaacaagaatagtgcatctattgaatatttttgcatttgcttattgcaatactagttaaaacaccagtttataatttttttatacattca

SEQ ID NO: 430318 - DNA, 201 bp, Homo sapiens
cattcagttgttcaacaaatgattcttttaatctgcctgaagtttcaagtcaacacgtcactggagaaaatgtatgaaactgtagcactaatttctgaaaygaaggattgaagttcctctttccaacttctttcagaccatcactactccacatgttcctgctcttgtcctggaattagccaccgaatactctcagttcga

SEQ ID NO: 430319 - DNA, 201 bp, Homo sapiens
tttggctgggcatggtggctcacgcctgtactcccagcacttagggagaccgaggcaggtggatgacttgaggtcaggagttccagaacagcctagccaamatggtgaaaccctgtatctactaaaaatacaaaaaaaaaaattagcctggcatggtagcgggcgcctgtaatcccagctgctcgggaggccgaggcaaga

SEQ ID NO: 430320 - DNA, 201 bp, Homo sapiens
ttgaggtcaggagttccagaacagcctagccaacatggtgaaaccctgtatctactaaaaatacaaaaaaaaaaattagcctggcatggtagcgggcgccygtaatcccagctgctcgggaggccgaggcaagagaatcgcttgaacccaggaggtggaggttgcagtgacctgagatagtgccactgcactccagcctgg

SEQ ID NO: 430321 - DNA, 201 bp, Homo sapiens
ccactttggagctagaaggtgggtcttgagcataatgctcagataagggaagagtcccaggtagtctcgtacatctatttacccaactccactcacctccrtagcaatgcctcctgccctccaactcatcaactcaacaccagctgccagactttgtgccaggcaccaaccagcagaaaccagtgaggccagcagccctca

SEQ ID NO: 430322 - DNA, 201 bp, Homo sapiens
cacacatgttttctgtgtcagccacaagacaaagcaggaaatgaagccagagaggctaagagtctggaaaagaaaggatgccaggtttggggtccaacccwactcccaaacaccacagttcttcagagatttgctcttgctacctaatcaacattctagattccacaagtaaatgaagaatgccaaaacgaagaacctcag

SEQ ID NO: 430323 - DNA, 201 bp, Homo sapiens
ttcctagacacctggatagcattgctacctccaggttgcttagtctctcagggcctcagcacctgaggccagcataatctgccagtggcatcctctgcagaaaaaaaaaaaaaaaaaacacctcagattttcagctactctgagaagaaatcagctggtgaagtttcttctgtcttcaccccattcatggcctggccatga

SEQ ID NO: 430324 - DNA, 201 bp, Homo sapiens
gtgcgactccatctcaaaaaaaaagaaaaaaatgattttggctgggcatggtggctcacgcctgtactcccagcacttagggagaccgaggcaggtggatsacttgaggtcaggagttccagaacagcctagccaacatggtgaaaccctgtatctactaaaaatacaaaaaaaaaaattagcctggcatggtagcgggcg

SEQ ID NO: 430325 - DNA, 201 bp, Homo sapiens
aaaaagaaaaaaatgattttggctgggcatggtggctcacgcctgtactcccagcacttagggagaccgaggcaggtggatgacttgaggtcaggagttcsagaacagcctagccaacatggtgaaaccctgtatctactaaaaatacaaaaaaaaaaattagcctggcatggtagcgggcgcctgtaatcccagctgctc

SEQ ID NO: 430326 - DNA, 201 bp, Homo sapiens
tggtgcgatctcagctcactgcaacctccacctcccgggttcaagcgattcttctgcatcagcctcccggctagctgggactacaggcgtgagccaccacrcttggctaattttttgtatttttagtagagacagggtttcaccatgttgtccaggctggccttgaactcctgacctcaggtgatccgcccgcctcggtct

SEQ ID NO: 430327 - DNA, 201 bp, Homo sapiens
ggctactgtgaataatgctgcaatgaacgcgagagtgcagatatcttcacaaggtggtgatttcctctcccttgggtgtataccagggacaggtgttgctktgcacccagaatcttcaaaataatatgtaaatcctacttttgctggtatactgtgaactcgtatttacctaaaaaaatgacattaacagcactctttcaa

SEQ ID NO: 430328 - DNA, 201 bp, Homo sapiens
tagctccttaaaaaaatattctacatatgagtgagattatgcaatattttccttggtgtctggcttatctcatttaacataacgtccttcaggtccatctrtgttgtggtaaacagtaggatctccttttttaaggctgaataatgttccattgtacattgtctatacacacacataaacgtatacacacacacataattt

SEQ ID NO: 430329 - DNA, 201 bp, Homo sapiens
taataacacactgtgatgacttccctaatttcttataggcaaaccgcttttgaaatgtggctttaggttagtagcacttatgtaagaacacaaagctcttktatgtctgggaacttctggtataggctgaaggtgaaggctgaaaagaacgaaaattgcttcaagttcaataaatttaaataaaatatgctccgtagaaat

SEQ ID NO: 430330 - DNA, 201 bp, Homo sapiens
tttcatcatggtcttgaaagataggaataagctcattttagtgtacctgtttgcccttgggatatgtttattagtgtaagagtatcactgatgggaaaagygtggtctgaaatagggacatggatcgccatcagcaagccaaaagaaaaacatcaagtcaccagttaataatggtctgaagcagcccttctttactcatgt

SEQ ID NO: 430331 - DNA, 201 bp, Homo sapiens
cttaggcattttatcttggctcaaattgttgaagaatggtggcttgtttcatggtttttgtatttgtgtctaatgcacgttttaacatgatagatgcaatrcactgtgtagctagttttctggaaaagtcaatcttttaggaattgtttttcagatcttcaataaattttttctttaaatttcaaagaaaaaaaaaagaaa

SEQ ID NO: 430332 - DNA, 201 bp, Homo sapiens
cctgagtaccatcggaaagctgtgtgagaggcactctcactcacttatgtttggatctccgtaaacacatttttgttcttagtctatctcttgtacaaacratgtgctttgaagatgttagtgtataacaattgatgtttgttttctgtttgattttaaacagagaaaataaaaggggtaatagctccttttttcttttct

SEQ ID NO: 430333 - DNA, 201 bp, Homo sapiens
gagttgaagttaaagtaaagattcctgaatagctaaaaccgtggcttgttgatgactgggacttaattaccaggcaaaaacagctcttttatcttcctgcmaagaagaatgtggattccattcttgaggattatgcaaattacaagaaatctcgtggaaacacagataataaggagtatgcggttaatgaagttgtggcag

SEQ ID NO: 430334 - DNA, 201 bp, Homo sapiens
aggcattttatcttggctcaaattgttgaagaatggtggcttgtttcatggtttttgtatttgtgtctaatgcacgttttaacatgatagatgcaatgcaytgtgtagctagttttctggaaaagtcaatcttttaggaattgtttttcagatcttcaataaattttttctttaaatttcaaagaaaaaaaaaagaaaacc

SEQ ID NO: 430335 - DNA, 201 bp, Homo sapiens
aggagcagtatgcagaggggaagatgagaggggctgccccaggaaagaagacatctggtctgcaacagaaaaatgttgaagtgaaaacgaaaaagaacaarcagaaaacacctggaaatggagatggtggcagtaccagtgagacccctcagcctccttggaagaaaagggcccgggtagatcctactgttgaaaatgagg

SEQ ID NO: 430336 - DNA, 201 bp, Homo sapiens
agaaaaatgttgaagtgaaaacgaaaaagaacaaacagaaaacacctggaaatggagatggtggcagtaccagtgagacccctcagcctccttggaagaaragggcccgggtagatcctactgttgaaaatgaggaaacattcatgaacagagttgaagttaaagtaaagattcctgaatagctaaaaccgtggcttgttg

SEQ ID NO: 430337 - DNA, 201 bp, Homo sapiens
aaaatgttgaagtgaaaacgaaaaagaacaaacagaaaacacctggaaatggagatggtggcagtaccagtgagacccctcagcctccttggaagaaaagrgcccgggtagatcctactgttgaaaatgaggaaacattcatgaacagagttgaagttaaagtaaagattcctgaatagctaaaaccgtggcttgttgatg

SEQ ID NO: 430338 - DNA, 201 bp, Homo sapiens
ggagtgctaaacccggtgaaggggtcaaggatagctttctgaaagaggtaattactgggccacgcctgtaatcccagcattttgggaggccgaggctgggsgatcatgaggtcaagagattgagaccatcctggccgacatggtgaaaccccatctctactaaaaatacacaaattagctgggcatggtggtgtgcacctt

SEQ ID NO: 430339 - DNA, 201 bp, Homo sapiens
aactgaccttttctgtttcctcactcattgaatggagcatatttgatcagctcccaatttaagagtcctcctagattcttcctttttcattttgcacatayagcatatttgttaaaattagaacagccgggtgtggtggctcacgtctgtaatcccagcactttgggaggccagggctggtggatcacctgaggggggggc

SEQ ID NO: 430340 - DNA, 201 bp, Homo sapiens
gttaaaaatttggcctgacaattcagagatacggagtctaatccaagatccacccctgattatgtgcccctgaggaatctcttaactcttctgagttctasttttgtaatttgtgaaggcaccggaagatagctgaggaggcaaaataataattgatctacatttagcgtttttccactgtatttcataacattagtattc

SEQ ID NO: 430341 - DNA, 201 bp, Homo sapiens
aaaaattcttatcattcaaggatattggaaccacaggactatttggataaaaaacattatttgcaaattaatgcgcataggccatcttacttttattgcamaatggcatgtgctgccatctattattcatttttaaatggtcatttcttattcagtgagtgctttagtgttttaaactatatggataagaatgcaggtaga

SEQ ID NO: 430342 - DNA, 201 bp, Homo sapiens
acattagaactagaacatataactagttactaaatatcgagtcctactgtcacagatttacttcgggttttcatcaccagtccattagattattataacakactttttaatctcttggcctcaatgggtttcccccaccctggcaatgatagaagttttcaaacttaaagaaaagttaaaaaatacatatatagagagtta

SEQ ID NO: 430343 - DNA, 201 bp, Homo sapiens
tatttcattgtatgtatataccacagtttgcttatccattcatctgtcaacggaaacttcggttgcttcataatttcattactgtgaatgtgagtgctgcyatgaacatggatgtgcagttctctttgaggccctgcgttcaattcttttggatgtctaccagaaatagtggatcatatgatagttctattttaagttttt

SEQ ID NO: 430344 - DNA, 201 bp, Homo sapiens
gcgttcaattcttttggatgtctaccagaaatagtggatcatatgatagttctattttaagttttttgaggaaccacctatactattttccataatggtcrcaccatatttcaatcccaccgacagtgcacatggtttcagtttctcaacatccttgttaacacttgttactttctgtttttttgatagtagctgtctgct

SEQ ID NO: 430345 - DNA, 201 bp, Homo sapiens
tggaatatcatgcagccattaaaagttatgaattagacctatataggtctaggtttccctgggggttttattgagtgaaagtaagatgaatataatatgtrtgatatgaccccattcttgtaaaaccaatgatgataaaaataacccttttaagtgtatgtaaatgtatgttacatatgtgtacataggatatatgactac

SEQ ID NO: 430346 - DNA, 201 bp, Homo sapiens
aaggcggctaactttgtgttaggtataatagtcacagatattttactatctgtgtcgaatctgaattgattttactcttggcctaaaaaaaggactgacaytcattataataatcagaattatggaattgctgtaggaatagatcagtggatcagtgaaacagattaagaattaaaataaagttgcctctggagcagcgtg

SEQ ID NO: 430347 - DNA, 201 bp, Homo sapiens
atctattccccagtgtgatgatattaggaggtgagacctttgggaggtgattaggtgctgagtgtagggccttcataaatgaaattaatgcccttataaaygtctgaagagaccagtgtcctccccttccatcttgtgaggacacaactagaaggtactgtctgtgaagaggtgagccctcagtagacattgaatcttgga

SEQ ID NO: 430348 - DNA, 201 bp, Homo sapiens
agttctgacataatctacttggaggtaacatcagatcccacaggttgagcgctcagtcccacatgcctgaccccggtttcagataccagttgccagtaatrgattgtcgcctgtattctgactggctataaatcaggggtttccatgatcccctcctcctcaggtttaattaatttgccagagcagctcacagaactgaga

SEQ ID NO: 430349 - DNA, 201 bp, Homo sapiens
tgaggtgggaggattgcttgagcctgggaggttgaggctgcagtgagccatgatcgcgtcactgccttccagcctgggcagcagagtgaaaccctgtctcaaaaaaaaaaaaaaaaaggatacagttgaacagccaaatggaaaagatgtgtagggcaagtcatggtggaagggacatggagtttccatgccatctctgga

SEQ ID NO: 430350 - DNA, 201 bp, Homo sapiens
tttattttctaatttagagacagagtttgtctctgtcacccaggctgaaatgcagtggtgtgatcatagcttactataaccttgaactcctggactcaagygatcttcctgcccctgcctcctgagcagctcgggctacaggactgggccacctcacccagctaatttttaaaatttttttatagagataggggtcttact

SEQ ID NO: 430351 - DNA, 201 bp, Homo sapiens
tctgtcacccaggctgaaatgcagtggtgtgatcatagcttactataaccttgaactcctggactcaagcgatcttcctgcccctgcctcctgagcagctygggctacaggactgggccacctcacccagctaatttttaaaatttttttatagagataggggtcttactttgttgccaggctgttctggaactcctgaac

SEQ ID NO: 430352 - DNA, 201 bp, Homo sapiens
tctgtgattgaccaaaatgtcattatgtagtgtgtaagtcttatctgtgtgatgatggctgtcaaattcatattgctagctcaaaactttgctttcaactkcagacatgtatatctaattgcttaatcagcagctccaataattgacacctcaaatgtagcatatcctaaactgagtttttaatcagcacttctcccatgt

SEQ ID NO: 430353 - DNA, 201 bp, Homo sapiens
ttgctagctcaaaactttgctttcaactgcagacatgtatatctaattgcttaatcagcagctccaataattgacacctcaaatgtagcatatcctaaacwgagtttttaatcagcacttctcccatgtttgccaaatctgtttcttttaccatctttctcacctcagtaactggcaacgtaataattcacttctctctga

SEQ ID NO: 430354 - DNA, 201 bp, Homo sapiens
atccagaatgggacattctgtgctgcttctatcaatattatcctggtctacatcttgcttgggtcattgcagtagctttctaattggttttcctgcttctrtccttactgcctgtagttaaccagagttgtattgttaaaatgtaattcaaatgattcattcctctgtttaaaactaattgcttatcatctcaaagtcctt

SEQ ID NO: 430355 - DNA, 201 bp, Homo sapiens
agcctgggtgacagagtgagaccctgtctccaaaaaaaagaaaaagaaaaataattgaagaaacaaatggtgattagtattttgaaaaagagaagatttgrgccttataatagcagtcttcaaatatttgaggaactcttgggtagaattggaatgagatttattctcgtcgttccaaggaagtaacaactaatgagttga

SEQ ID NO: 430356 - DNA, 201 bp, Homo sapiens
gaggccgaggctgggcgatcatgaggtcaagagattgagaccatcctggccgacatggtgaaaccccatctctactaaaaatacacaaattagctgggcayggtggtgtgcacctttagtctcagctactcgggtggctaagacaggctgagacaggagaattgcttgaacccaggaggcggatgttgcagtgagccgaga

SEQ ID NO: 430357 - DNA, 201 bp, Homo sapiens
tcttacttaatctgctgtaatcacaccagctccttcactactgtggaaacatggcagtcatattcctgcatcaaggcctttgcacttgcagttccctctgyctgaaccctctgcccctcttcatccttgacctcatttctttatcttcttcatgtcttcttactcagttgtcaatttctcagtaaccttatatgaccacct

SEQ ID NO: 430358 - DNA, 201 bp, Homo sapiens
gaaaaagagaagatttgggccttataatagcagtcttcaaatatttgaggaactcttgggtagaattggaatgagatttattctcgtcgttccaaggaagwaacaactaatgagttgagctaacatgacaaactgtcaagagctatagaaagatgattaagtctctcataagagcaagtttcctatactgaaactgcataa

SEQ ID NO: 430359 - DNA, 201 bp, Homo sapiens
ttcatagacacctcagattcatgaactgaccttttctgtttcctcactcattgaatggagcatatttgatcagctcccaatttaagagtcctcctagattcttcctttttcattttgcacatatagcatatttgttaaaattagaacagccgggtgtggtggctcacgtctgtaatcccagcactttgggaggccagggct

SEQ ID NO: 430360 - DNA, 201 bp, Homo sapiens
ttctgaaagaggtaattactgggccacgcctgtaatcccagcattttgggaggccgaggctgggcgatcatgaggtcaagagattgagaccatcctggccracatggtgaaaccccatctctactaaaaatacacaaattagctgggcatggtggtgtgcacctttagtctcagctactcgggtggctaagacaggctgag

SEQ ID NO: 430361 - DNA, 201 bp, Homo sapiens
tcatagacacctcagattcatgaactgaccttttctgtttcctcactcattgaatggagcatatttgatcagctcccaatttaagagtcctcctagattcttcctttttcattttgcacatatagcatatttgttaaaattagaacagccgggtgtggtggctcacgtctgtaatcccagcactttgggaggccagggctg

SEQ ID NO: 430362 - DNA, 201 bp, Homo sapiens
gagcgagtttcgggattggctggggtggcaatgagcacatccaatgggcatgcagcgcgcgcagaagtccggggctggcaagcgcttcctgcgcagcgcckaggcgacctggagtttgtgacgctgtgatggtaagacctgggccggggaggttgatataacggttgaatcttgtggagctccagtcctgaaggtgaaacc

SEQ ID NO: 430363 - DNA, 201 bp, Homo sapiens
catagacacctcagattcatgaactgaccttttctgtttcctcactcattgaatggagcatatttgatcagctcccaatttaagagtcctcctagattcttcctttttcattttgcacatatagcatatttgttaaaattagaacagccgggtgtggtggctcacgtctgtaatcccagcactttgggaggccagggctgg

SEQ ID NO: 430364 - DNA, 201 bp, Homo sapiens
atagacacctcagattcatgaactgaccttttctgtttcctcactcattgaatggagcatatttgatcagctcccaatttaagagtcctcctagattcttcctttttcattttgcacatatagcatatttgttaaaattagaacagccgggtgtggtggctcacgtctgtaatcccagcactttgggaggccagggctggt

SEQ ID NO: 430365 - DNA, 201 bp, Homo sapiens
agcatatttgttaaaattagaacagccgggtgtggtggctcacgtctgtaatcccagcactttgggaggccagggctggtggatcacctgaggggggggcmggggagaatagaacaaaaacattagaactagaacatataactagttactaaatatcgagtcctactgtcacagatttacttcgggttttcatcaccagtc

SEQ ID NO: 430366 - DNA, 201 bp, Homo sapiens
ctaggattgtgggtggttttttgcttttcacaattttttcaattttctgtgatgagtatgtacaactttttaaatcaaaagaatgatgtttaaaatttgtyacagattaatgtaagttattgactattttaatagtagctataatgaaataaaccttttctgaaaaagcaaataaatattttattgagtggcagaagattg

SEQ ID NO: 430367 - DNA, 201 bp, Homo sapiens
ggccgatgtgggcagatcacctgagggtcaggagctcgagaccagcctggccaacagggtgaaacctcatatctactaaaaatacaaaaattagccaggcrtggtggtgggagcctgtaatcacagctactggggaggctgaggcaagagaaccacttgaatccgggaggcggaggttgcagtgaaccgagattgcgccat

SEQ ID NO: 430368 - DNA, 201 bp, Homo sapiens
gagctcgagaccagcctggccaacagggtgaaacctcatatctactaaaaatacaaaaattagccaggcgtggtggtgggagcctgtaatcacagctactsgggaggctgaggcaagagaaccacttgaatccgggaggcggaggttgcagtgaaccgagattgcgccattgcactccagcctgggcgccaagaatgaaac

SEQ ID NO: 430369 - DNA, 201 bp, Homo sapiens
cgcgcgccaacgcaagctccataacctcaccaatatttagagaaagatggaagggtggggacagaaggaagtggttaactcgcgggtttcctttcagatgsactaaacatgttttctctcctgacctttattctctcacacactctctgaagaaggtggtgagtgcttgttactgtttctgggggtggggtggagaagcag

SEQ ID NO: 430370 - DNA, 201 bp, Homo sapiens
gtcaggttttggtctttttttatgaccagcccccatcctgatgttactgaggggctcccagccatcagtcaactcatgcatatgaaaagataccacaatarggataaagaccaaatatatattttacaatatcacaatgttattgcacagtggagtaaatatcattcttattataaagaggcagagagctgaattgcattc

SEQ ID NO: 430371 - DNA, 201 bp, Homo sapiens
cattacttttgcatattgataatgtattttggtggtcagtaaagaaatatttatgtttgactttttcgcttaaaaatattctaaaattcatgatgactgaytttggctttgtgaacttaaactgtatcttatgggtatagcaggtgagattttcagccttctactagttgacattcaaattgttaatagctaacactgata

SEQ ID NO: 430372 - DNA, 201 bp, Homo sapiens
ggctgccttaatcgtcttacatagtgaggaatttcaataaactcttctccatcagatgtttgtgctttagaagagtgttatattggcctggtagaaaaggrgaggggaagggaattttctgtgaattatcgtgtgtgacttgcctttttttactttttaaatcaagtgtcagaataaattatcacttattggaactgaaac

SEQ ID NO: 430373 - DNA, 201 bp, Homo sapiens
tttaaaggaaggagcctcctggcagagccttgagcttatgacctcagtccaggagagccatggtgcccaggcacagcgatactgtgagtgaagcacagacrgagagctgctagagggccattttgccaagctgtgggaacaaggatgctcagagctgtgggtccccaaacacctgctcagcaaagctgcaggggcagagcc

SEQ ID NO: 430374 - DNA, 201 bp, Homo sapiens
atttcaataaactcttctccatcagatgtttgtgctttagaagagtgttatattggcctggtagaaaaggggaggggaagggaattttctgtgaattatcrtgtgtgacttgcctttttttactttttaaatcaagtgtcagaataaattatcacttattggaactgaaacactcaccgattcaaatgctcaggtatgaat

SEQ ID NO: 430375 - DNA, 201 bp, Homo sapiens
tgtatttttttgtagagatgggatttgcaatgttgcccaggcttgtatgcactcctgggctcaagtgatctgcctgcttcagcctcccaaagtgctggaastacaggcatgagccatggtgcccaacttcttttcattttctctgtggtgttttggagaacttaagttcataatttgattaactccatttaatcaagtttt

SEQ ID NO: 430376 - DNA, 201 bp, Homo sapiens
catgtatatgtgtatctatttctgaactctgtttttctctattctgtgctttggatatttctgtttttttgttctgtgtttctgtctttaagccaataccrcattatgttttttaccaaagctttaaaataagtcttgaaatcaagtattatgaattctctaactttgttgttcttttcaaaattgtttcatatttccatg

SEQ ID NO: 430377 - DNA, 201 bp, Homo sapiens
taaatttcaatttttttctttttccttttttttttttttttttttttgttgagacggtgtctcgctctgtcacccaggctagagtgcagtggtgccatctsagctcactgcaagctccacctcccgggttcacgccattctcctgcctcagcctcccaggtagctgggactacaggcatccgccactagtgcgcctggcta

SEQ ID NO: 430378 - DNA, 201 bp, Homo sapiens
ccagcctaacgacagagcgagattccgtctcaaaaaaaaaaaaaaatagatttttagtgctctgaattctcatctgattactgcttttgcttcatcccagmaatcttgatgttgcatgtcaattgtttgggggatgaaaaaaaaaaaaagacaaattttgatgttaatgtttttatttctattcagttataataatttcct

SEQ ID NO: 430379 - DNA, 201 bp, Homo sapiens
aaaaaaaaaatagatttttagtgctctgaattctcatctgattactgcttttgcttcatcccagcaatcttgatgttgcatgtcaattgtttgggggatgaaaaaaaaaaaaagacaaattttgatgttaatgtttttatttctattcagttataataatttcctattttcatattggttgcttctttgacccattgatta

SEQ ID NO: 430380 - DNA, 201 bp, Homo sapiens
tgttaactattagctattatatgatcttttatgggtgacttgacttgactgtacctttggtttctctacttgttatatagacaatatgattttcaaaaagrtagttatttggtttgagcaaatgaagttttaacaaagtttttgatcaacttcatgaataactagttacatgtgtgtatgtgttttatcagttaaatgttt

SEQ ID NO: 430381 - DNA, 201 bp, Homo sapiens
ctacttgggctgtgataacaaaataccacagactgggtggtttaaacaaaagtttcacagtgtagaggctagaagttcaagacgaaaggaaggtactgtcgggttggtttctggtctctcttcctggcttgtaggtgaccacttgctcactgtgttctcacattgggctctttgtgtacacaaggaaagaaagaattctca

SEQ ID NO: 430382 - DNA, 201 bp, Homo sapiens
gttctcacattgggctctttgtgtacacaaggaaagaaagaattctcaagtgtcttttcctctttttatgaggaaaccattcatattggattagggcccgrttcttatgacctcgtttatcctttattacgttatttaagactttatttttaaaaacatagtcacattagggcttccacatataaattttggggagacatc

SEQ ID NO: 430383 - DNA, 201 bp, Homo sapiens
  misc_feature (1)...(201): n = A,T,C or G
gaaatatatgtactttttctaagttggtgagatagaactgcctttggtacactagagtatgttggtgaaaatttgttctacttaaggcaagcttgtccaanctgcggcccaggatggctttgaatgcagcccgacacaaactttcttaaagcattatggatttcgatttcttttttttttttggctgatcagctattgtta

SEQ ID NO: 430384 - DNA, 201 bp, Homo sapiens
ctttctcaaaacttaaatgtcaataatgtcatgtttttaaagtgtcagttcataaggttaaaatatagaagagaagatggaagcaaacagaaacttttacmagttgtagagcatggaaagaggtaagtatgtgcctagagacagaaatcatgatgaaaagagtttgcccccacaaaattgaagaaagtcttgggatttgaa

SEQ ID NO: 430385 - DNA, 201 bp, Homo sapiens
tgtactctatataaaatacgtaatgaacttaaagattctttccacaaagttgtagaaattgtacaatttttaaaaaataacatcagtctcttttcttacartgtaagtactgagttttccaactttctctgatttgacatataccttgttttataaatacctttgaccttttcaaaaatgtttttgaacctcaaccatatt

SEQ ID NO: 430386 - DNA, 201 bp, Homo sapiens
gtttttgaacctcaaccatattatcagttacattaaatactttggaagatcttgatatgacaattcatggtaaattgggcagaaaggaaaatgaaataatktatgaagaacagggtatttaccaattagtgtacccccttttaaaatcattggtatattttgaagaaagagtgatttcagaaaacgcgtttcatttaactt

SEQ ID NO: 430387 - DNA, 201 bp, Homo sapiens
gtgaggaatgacataaagattcaggtatgaatttagacttatttttttctccgcaaatactataaatgttaaaaaaaaatgaggaagatttatatggaccmaaatatacatttaaaaaacagtattatatttaaaatatatatctatttggattatttttttctccttgatttgccttgtcatctctgtcatgtgtcatgt

SEQ ID NO: 430388 - DNA, 201 bp, Homo sapiens
gcgcgcgcagaagtccggggctggcaagcgcttcctgcgcagcgcctaggcgacctggagtttgtgacgctgtgatggtaagacctgggccggggaggttratataacggttgaatcttgtggagctccagtcctgaaggtgaaacccttatcgccggccaactagatacctgacttcccagccgggctttgagtcccgtt

SEQ ID NO: 430389 - DNA, 201 bp, Homo sapiens
tatttttttctccgcaaatactataaatgttaaaaaaaaatgaggaagatttatatggaccaaaatatacatttaaaaaacagtattatatttaaaatatrtatctatttggattatttttttctccttgatttgccttgtcatctctgtcatgtgtcatgtgtccatatgtatgtgaatatagaaagtcaagaaaggctt

SEQ ID NO: 430390 - DNA, 201 bp, Homo sapiens
gtttaaccgctgaactcagtcaatggcagaaaaaaacacctgaaagtaagattcttattttaaatttgaattttttgtaaacctattaatagcaaattaayttaataattgtaggaaaaattacaagatccatttggcctttttgaaattgcccaaatttcattgataccgagaagccactttttttctgtgaattatttt

SEQ ID NO: 430391 - DNA, 201 bp, Homo sapiens
attgctttgaaaagcaaaatacaaatatttattagattcgtaattagaatattttaacatatttctagctactctagtttatgctgaaactaagatgactrtagtttctcatggatgacttaacctttttttttaataaaaattgtcagtcatggaaatactgaaaggtattacatgtataattttttaatagtgtaacat

SEQ ID NO: 430392 - DNA, 201 bp, Homo sapiens
agaagtaatcagggaccagaacataaaggattttgttgagtgtgtactatggggagccattaaaagattttaagtatggaagtgacatgatcagatatgcrgtttgggaaaattactctggtgtttttgaagaaaatagaatgcagaagagtaagactacagatagaaagcatttaggaagctctagtaatagtcctggta

SEQ ID NO: 430393 - DNA, 201 bp, Homo sapiens
agaactcactatcatgaggacagcaccaaggggatttgctaaagcattcatgagaaattcaccctgatgatccaatcacctcccaccaggctccacctccracattggggattacatttcaatatgagatttggtaggggacacacctaaactatatcagcatataaaacttagcattagaatcctaagtttgtctccaag

SEQ ID NO: 430394 - DNA, 201 bp, Homo sapiens
atggaatcttgttctgttacccaggctggagtacagtagctgagatttcagctcactacaacctccacctcctgggttcaagtgattctcctgcctcagcytcctgagtagctgggattacatgtgcgcactgctatgctggctaagttttctatctttgttttttagtagagatggaattttaccatattggccaggctg

SEQ ID NO: 430395 - DNA, 201 bp, Homo sapiens
gtagagatggaattttaccatattggccaggctggtctcgatctcctgacctcaggtgatccacccacctcagcctcccaaagtgctgggattacaggtgkgcaccactatgcctggcctaattttacttaattttgagagaagaaaaagaatgagtgaagttgaacagttgaactcggataaatatttctttgcatcaaa

SEQ ID NO: 430396 - DNA, 201 bp, Homo sapiens
tcctgggttcaagcgattctcctgcctcagcctcctgagtagcttgggactacaggtgtgttccaccatgcccagttaatttgtttttttgtgtggggggktttttttttttttggtatttttagtagagacggggtttcactgtgttagccaggatggtctcgacctcctgaccttatgatccgcccgactcagcctccc

SEQ ID NO: 430397 - DNA, 201 bp, Homo sapiens
ggaagtaacaactaatgagttgagctaacatgacaaactgtcaagagctatagaaagatgattaagtctctcataagagcaagtttcctatactgaaactrcataaatgtactctggaatgtcatttggggagtttttattgggggatttaaatactaatttttttatgtgattatatataatgtgtatatctattatatg

SEQ ID NO: 430398 - DNA, 201 bp, Homo sapiens
caatttttaggaaatgtttttctaaattaaagatgcaaaaattcactttaaagcttttttcattagctaatacccatagtcctttcaaaaaggaaattcamatttgtagattaaaagtattaaacagttgttgaaaaagaaaagaggtcaatattctttgacaaaaaactttcttatagctatattgactttttcccaagt

SEQ ID NO: 430399 - DNA, 201 bp, Homo sapiens
ggccggggaggttgatataacggttgaatcttgtggagctccagtcctgaaggtgaaacccttatcgccggccaactagatacctgacttcccagccgggytttgagtcccgttcttctcggcttcccgcgcgccaacgcaagctccataacctcaccaatatttagagaaagatggaagggtggggacagaaggaagtgg

SEQ ID NO: 430400 - DNA, 201 bp, Homo sapiens
attaccacaaatttagcgcctactgtatatttaccttttcaaatgctttctgctaggctttttcactactgatgtctgaatggaagtatcctggaccactrtgtaaatttgactatcgttcagaaataaaactgggattaaagaccaagcaattaatttgaattattttattctagttccaaaagctgagacaagatcttg

SEQ ID NO: 430401 - DNA, 201 bp, Homo sapiens
aatagatcagtggatcagtgaaacagattaagaattaaaataaagttgcctctggagcagcgtgagagttagggatgccacccccctgcaaagttttaaartattaagaatgtttatattttcatctatgaataggtatgaatagtccacagaaaatgactttgttttcttcttttgtagctatcattgttaattatgcaa

SEQ ID NO: 430402 - DNA, 201 bp, Homo sapiens
attccttttggccaccttatgttgagctgctgctgcgtaatggaattgccttgagacatccagaagatccaacccgaataagattagaagctttccatcartaaaaggatgttttcttttttcacacagtaaaaattcttatcattcaaggatattggaaccacaggactatttggataaaaaacattatttgcaaattaa

SEQ ID NO: 430403 - DNA, 201 bp, Homo sapiens
tttcattagctaatacccatagtcctttcaaaaaggaaattcacatttgtagattaaaagtattaaacagttgttgaaaaagaaaagaggtcaatattctytgacaaaaaactttcttatagctatattgactttttcccaagtaaagtatattttgaatgatattttctcctagattcttataaatagattatttgatgt

SEQ ID NO: 430404 - DNA, 201 bp, Homo sapiens
atgttcaagttctccagaggaccctataagctataccagcattatatcttcttctcctgtttttatgtgttatatctgtaataataacttccatatgttcrtattctccagaggacactatatactataccagcattatatcttcttctgtttttatgtgttatatctataataataacttccatattagtatactagagc

SEQ ID NO: 430405 - DNA, 201 bp, Homo sapiens
ctggctcactgtaagctccacctcccgggttcacacgattctgctgcctcagcctcccgagtagctgggagtacaggcgcctgcaaccatgcctggctaatttttttttttttgtatgcttttagtagagacggggtttcaccgtgtaagccaggatggtctcgatctcctgagctggtgatctgcccgccttggcctcgc

SEQ ID NO: 430406 - DNA, 201 bp, Homo sapiens
gactgacattcattataataatcagaattatggaattgctgtaggaatagatcagtggatcagtgaaacagattaagaattaaaataaagttgcctctggwgcagcgtgagagttagggatgccacccccctgcaaagttttaaagtattaagaatgtttatattttcatctatgaataggtatgaatagtccacagaaaa

SEQ ID NO: 430407 - DNA, 201 bp, Homo sapiens
accaacagtgcaagcctcttatttcacatgcttgccagtattatctcttaccaattttacattattgccattctgaatgaaaattaatgcttgtttaattyggattttcataaattatatatgagcttatgaatgtactttttctgtatttaaaaggtatttgttttttctttgaattcctcatttgtgttctttgccagt

SEQ ID NO: 430408 - DNA, 201 bp, Homo sapiens
gaacacccttaccatcatgctagtcaaaaaataaaactttgataattacctcagaaatctctccatttggcccatcccagccacaacccttttcccccttycactcttcctccaaagtaattggtaacctgacttttttggtaatcttttttaaattttttttaatggtgagttgtttggtttcttcttatgaatttgtag

SEQ ID NO: 430409 - DNA, 201 bp, Homo sapiens
ttggctggggtggcaatgagcacatccaatgggcatgcagcgcgcgcagaagtccggggctggcaagcgcttcctgcgcagcgcctaggcgacctggagtytgtgacgctgtgatggtaagacctgggccggggaggttgatataacggttgaatcttgtggagctccagtcctgaaggtgaaacccttatcgccggccaa

SEQ ID NO: 430410 - DNA, 201 bp, Homo sapiens
atttagacttatttttttctccgcaaatactataaatgttaaaaaaaaatgaggaagatttatatggaccaaaatatacatttaaaaaacagtattatatwtaaaatatatatctatttggattatttttttctccttgatttgccttgtcatctctgtcatgtgtcatgtgtccatatgtatgtgaatatagaaagtcaa

SEQ ID NO: 430411 - DNA, 201 bp, Homo sapiens
tctttcagtccatgaatatgaagtatctttccatttatttaggtctgccttagaacttctctgttaataagttattgattaagcagtataaaatgcagaakttccatatgaataaagatattgaggaggggtattctgatttgcgtttgatgtggggtagacatcctcatcattctttattgcactgtctacctccttaaa

SEQ ID NO: 430412 - DNA, 201 bp, Homo sapiens
tcctcttccattctttgcaggaatcatctagcaagattgttttactcaccctcattccttgaagatttttagctcctggctcattgccctttgcagtactrctatcataattcttagtgattttaatatccttatagatgatccaataacttggcctctctttttcttgaccttctttcccctagtgattacgttctctct

SEQ ID NO: 430413 - DNA, 201 bp, Homo sapiens
actataattgtgctgtcttcaccactaatcgtatgctcatttataccactctttttcctttactaaggtattagattttcagagcctgctcggctctcttkatttaggaatcatacatatttttgttagtgttattttactatttctttaatatatttgtatttctgcaaggctttataagaattccatggtaatctctga

SEQ ID NO: 430414 - DNA, 201 bp, Homo sapiens
cctcttccattctttgcaggaatcatctagcaagattgttttactcaccctcattccttgaagatttttagctcctggctcattgccctttgcagtactamtatcataattcttagtgattttaatatccttatagatgatccaataacttggcctctctttttcttgaccttctttcccctagtgattacgttctctctt

SEQ ID NO: 430415 - DNA, 201 bp, Homo sapiens
ccactctttttcctttactaaggtattagattttcagagcctgctcggctctctttatttaggaatcatacatatttttgttagtgttattttactatttstttaatatatttgtatttctgcaaggctttataagaattccatggtaatctctgactggtatcaggaaagtaatagttgtcaccgtagtaggcaacttta

SEQ ID NO: 430416 - DNA, 201 bp, Homo sapiens
tgcagtactactatcataattcttagtgattttaatatccttatagatgatccaataacttggcctctctttttcttgaccttctttcccctagtgattaygttctctcttgtcttagctacttattcctatggccattctttcactttgtccctgtctgtacctgtggtgctacaccatagaagaaaacatacaaccatg

SEQ ID NO: 430417 - DNA, 201 bp, Homo sapiens
atgaaggaaaacaaaagacaaattagagcacattcggagaataatcatggtattgagaagcctcaaatttatgccatatgaaaagtaattgaggtggggtrtggtggctcacacctgtaatcccgcactttaggagactgaggtgggaggatcacttgaagccaaaaatttgagaccagcttggacaacgtagcaagaccc

SEQ ID NO: 430418 - DNA, 201 bp, Homo sapiens
tctatattactaaataaattgtcaattctctgtaatttacttgacctgtctccagtgtttgacagttatcattccttccttgaatacattcttggatttcrgggtatcatgctcttgattttcctcttaacttactgagtgctccttctcagactattcagttggttcttacctcaatagctcctggcctgaagatcttct

SEQ ID NO: 430419 - DNA, 201 bp, Homo sapiens
gtccggggctggcaagcgcttcctgcgcagcgcctaggcgacctggagtttgtgacgctgtgatggtaagacctgggccggggaggttgatataacggttkaatcttgtggagctccagtcctgaaggtgaaacccttatcgccggccaactagatacctgacttcccagccgggctttgagtcccgttcttctcggcttc

SEQ ID NO: 430420 - DNA, 201 bp, Homo sapiens
gtcttgggttgccatatatattacaagtatttctcctaggtttgggggttttaaattttaactttgttgatgagatgtttgtccatgcagaattaaaaaamaaattttggtgtaaagattttacttagttttgcttagaaaggtgtttcctaatctaagattttaaaagtttctgtgttttcatcctatttttttgtgatt

SEQ ID NO: 430421 - DNA, 201 bp, Homo sapiens
gccattctcctgcctcagcctcccaagtagctgggactacaggcgcccgccactacgcccggctaattttttgtatttttagtagagacggggtttcaccsttttagccgggatggtctcgatctcctgacctcgtgatccgcccgcctcggcctcccaaagtgctgggattacaggcgtgagccaccgcgcccggccctt

SEQ ID NO: 430422 - DNA, 201 bp, Homo sapiens
ccccggagactgaagacatggtgagtgagaatcctccaacccctgcccagatcccttagacctcagggcagcctcaccctttgaaagaaagtagctggttyccagtccaacaaaaagttaaaaggatgctcatctctttctcggcatcactgatggaaaacagactgtgtgatggcctaaaggatccaatcaatgataatc

SEQ ID NO: 430423 - DNA, 201 bp, Homo sapiens
tggtaaaaagggagccaatgaaaaggggagcaggtggaggtcaaattgacaggcagtgatgtctatttaggcggtgacagacagcatccgcagtcaatagraagagctgaagaattctttaggtctcccaaaatggtcagtaaggaatgacagctgggaggaggcggggcaagctagagattaattcgccccgtcagccaa

SEQ ID NO: 430424 - DNA, 201 bp, Homo sapiens
caggaagatcccttgagcccaagagttccaggttgcagtgagccgtgatcaaaccactgcattccagcctgggcgacagggtgagaccctgtctcaaaacraacaaaaacccaaaaattcctacgaagggttaggcactgccagaggtaagggagtagttaagattgtggtaatgggcggtaagattgcattttcacagca

SEQ ID NO: 430425 - DNA, 201 bp, Homo sapiens
ggccccaggagcctgctccagcccatgcttcccccaaccccctccaggccgcctcaatgtgaagaatgaggagttggatgccatgatgaaggaagccagcrgtcccatcaacttcaccgtcttcctgaccatgttcggggagaagctcaagggtgagtggagtgtcctgggtccaaggccccggctgccttttcccagacc

SEQ ID NO: 430426 - DNA, 201 bp, Homo sapiens
aaggggagcaggtggaggtcaaattgacaggcagtgatgtctatttaggcggtgacagacagcatccgcagtcaataggaagagctgaagaattctttagktctcccaaaatggtcagtaaggaatgacagctgggaggaggcggggcaagctagagattaattcgccccgtcagccaatgatcgtgttctcccactttgg

SEQ ID NO: 430427 - DNA, 201 bp, Homo sapiens
ggattacaggtgtgaaccactgcacccagacgtttactgggtttaaatctgagcccaccccactcaggggtacaggatctggttcatttatctcccagaaygatgccttgggttgcgtcccctctaaactctggcacattccagcccctctttgggagaaagaacatctcttcttgcccaggccctagtgagacatgcatc

SEQ ID NO: 430428 - DNA, 201 bp, Homo sapiens
agggagaattgcttgatcctgggaggtggaagttacagtgagccgagatcatgccagtgtactccagcctgggtgccacagtgagactccatcttgggggaaaaaaaaaaagaaaagaaaaccattgggtaaaatacagtccaaggtctttaacaatgctaacagcagtggttctcaaagcgtggtctcagaccagaagca

SEQ ID NO: 430429 - DNA, 201 bp, Homo sapiens
tgcactcgggcgagcggccctatgcctgcgacctttgctccaagcgttttgctcagtggagccacctggcccagcaccagctgctgcacacgggggagaarcctttcccctgcctcgagtgtggccggtgcttccgccagaggtggtctctggctgtccacaagtgtagccccaaggccccaaactgtagccctagatctg

SEQ ID NO: 430430 - DNA, 201 bp, Homo sapiens
accagcgtacacacacgggagagaagccctacacttgcctcgagtgcaaccgccgcttccgccagcgcacggccctcgtcatccaccagcgcatccacacrggcgagaagccctacccgtgcccggactgcgagcggcgcttctcctcctcctctcgcctggtcagtcaccggcgtgtgcactctggggagcgtccctatg

SEQ ID NO: 430431 - DNA, 201 bp, Homo sapiens
acaagtgcgcccagaatctaaaaaagccttacccttgcccagactgtgggcgccgcttttcctatccatccctgctggtcagtcaccggcgggcacactcyggcgagtgcccctatgtttgtgaccagtgtggcaaacgtttctcccagcgcaagaacctctcccagcaccaggtcatccatacaggggagaagccctatc

SEQ ID NO: 430432 - DNA, 201 bp, Homo sapiens
aggtcatccatacaggggagaagccctatcactgccctgactgtggtcgctgcttccggaggagccggtccttggccaatcaccggaccacacacacaggygaaaaaccccaccagtgccctagctgtggacgtcgcttcgcctacccctccctgctagccatccaccagcgtacacacacgggagagaagccctacactt

SEQ ID NO: 430433 - DNA, 201 bp, Homo sapiens
gggctggacttgtttcagcagctttggttgcactgaatttgggggagctgcatggtaccaggggtttattgggttgcagatatataaatgccctaaacttaaaaaaaaaaaaaaagctataaaactaagtcttcatcttgtatttggaaaattggttcaagctgggtatgagacataagtgtagtcagctctgggagaagg

SEQ ID NO: 430434 - DNA, 201 bp, Homo sapiens
ctctccatggagaaagcatttctaggtgtttgggctggtgcccgcagcctgtgcctgtcctgggaggcagggcccatccacaggtgcccatcaacacagcktccccaacgcctgggcagcacaccggatccctgatgtctagggaagagtcttctaggtccccagaccccacccctcctgcccttgatcaagagaccagtt

SEQ ID NO: 430435 - DNA, 201 bp, Homo sapiens
cctgccttggccccctgagtagctgggactgcactgtggcaggcttatacctgtgttggtgcctaaacgttctagctctgcagactcaatttagccagtcrtcctgttccctccgccgcaggctctgctgccatgaaggtgaagattaagtgctggaacggcgtggccacttggctctgggtggccaacgatgagaactgt

SEQ ID NO: 430436 - DNA, 201 bp, Homo sapiens
ttggcagcagctgttcctcaggggtttccaggctcttggagatcagggacactcatttctcttgatcatggctgatacaagcatccctctctgtgtcaggkcctctccatggagaaagcatttctaggtgtttgggctggtgcccgcagcctgtgcctgtcctgggaggcagggcccatccacaggtgcccatcaacacag

SEQ ID NO: 430437 - DNA, 201 bp, Homo sapiens
ttaataactaaattcacaaggcacagttttatttgatctcttttaaattgctcttaaggatgtaacaaagagtgcgtgggatgccctgagggcaggcattygacttctggagcagcagcttaacttctgaaattcctccgaaccatgtgtccacacctcgtctggctgcatccgtgggccagatgtgggtggtgaatcctg

SEQ ID NO: 430438 - DNA, 201 bp, Homo sapiens
gcagagcccgccctgcagcatgccagctgggcctgtgatggggcatccagagggtgttgccctgaacactcagcatgtctccgctgacacagtgtgctcargctttgttaacatggggcctgttggctgcagagactcaggagttgagagtctaatttttggacctgctgatggttaagtcatagtgagtcagtgttaacg

SEQ ID NO: 430439 - DNA, 201 bp, Homo sapiens
tcggactcctgggccggtatgatcttcctgccttggccccctgagtagctgggactgcactgtggcaggcttatacctgtgttggtgcctaaacgttctakctctgcagactcaatttagccagtcgtcctgttccctccgccgcaggctctgctgccatgaaggtgaagattaagtgctggaacggcgtggccacttggc

SEQ ID NO: 430440 - DNA, 201 bp, Homo sapiens
cgtttgttttgccatcactatgttgacacttttatccaataagtgaaaactcattaaactactcaaatcttgctggaggcctctgggtgcctgtgttctcrgcatatagatgtggtctcggtgtgttttgatatgaaaactctcatgaataaacatctccgtgaaacgccaaggccctcgtcaaaccctgagtcatgactg

SEQ ID NO: 430441 - DNA, 201 bp, Homo sapiens
caaagagtgcgtgggatgccctgagggcaggcattcgacttctggagcagcagcttaacttctgaaattcctccgaaccatgtgtccacacctcgtctggytgcatccgtgggccagatgtgggtggtgaatcctgtggattagaggtggtgctaggtagcccccaagtgactgcagtggtgggtccacaggcagcctgca

SEQ ID NO: 430442 - DNA, 201 bp, Homo sapiens
ctgctgggactccatggattccctccagagaccacataggagtgctccacagggggatcgtggacaggccacttggctctgcctggggtggcagacacctscccacgggcaccagtcctgtctgggtattctcaggcccagggcagccctgactcattggcacagagagtcagaccccaggacatgtccccaaggcacagg

SEQ ID NO: 430443 - DNA, 201 bp, Homo sapiens
tgagccaagatagtgccactgcactccagcctgggcaacagagcaagactctgtctcaaaaaaaaaaaaaattggctaagtgtagtggcacatgcctgtartctgagttactggggaggctgaggtaggagaatcgcttgaacccaggagaccgaggttgccgtgagctgagattgcaccactgcactccagcctgggcaa

SEQ ID NO: 430444 - DNA, 201 bp, Homo sapiens
tgctgggactccatggattccctccagagaccacataggagtgctccacagggggatcgtggacaggccacttggctctgcctggggtggcagacacctgsccacgggcaccagtcctgtctgggtattctcaggcccagggcagccctgactcattggcacagagagtcagaccccaggacatgtccccaaggcacaggg

SEQ ID NO: 430445 - DNA, 201 bp, Homo sapiens
ccaagatagtgccactgcactccagcctgggcaacagagcaagactctgtctcaaaaaaaaaaaaaattggctaagtgtagtggcacatgcctgtagtctsagttactggggaggctgaggtaggagaatcgcttgaacccaggagaccgaggttgccgtgagctgagattgcaccactgcactccagcctgggcaacgga

SEQ ID NO: 430446 - DNA, 201 bp, Homo sapiens
aggacccccaggccacagatggggatgacagcaggtcccttgtctctggctgggctgtgggagaggggcagggaaagccggggcaggagggcagtgggcakacccagacaggggggacggctggggccctgtcccgaagagacgggagggcctgctggtggggggtgaggtggcactggggcagcgggtgtctgggcccct

SEQ ID NO: 430447 - DNA, 201 bp, Homo sapiens
ggattacaggtgcatgccaccacacccagctaatgttttatatttttggtagagacagagtttcaccatgttggccaggctgatctcaaacccctgacctygtgatctgcctgccttggcctcccagagtgctgggattacaggtgtgagccaccacgcctggcaagagttttgaaaccagaaacgggggtcacacggcac

SEQ ID NO: 430448 - DNA, 201 bp, Homo sapiens
atgcgaatttcttcccaaaaaaaataataaaatgaaaaggggccacgtgcagtggctcatgcctgtgatctcaacacactgggaagctgagcagggaggaytgctggagcccaggagttcaagaccagtctgggcaacaaagggatattccatctctacaaaaaattaaaacagtagccgggtgtggtggcgcgtgcctgt

SEQ ID NO: 430449 - DNA, 201 bp, Homo sapiens
ttccatctctacaaaaaattaaaacagtagccgggtgtggtggcgcgtgcctgtaatcccaactattcaggaggccaaagtggggaaattgcttgagcccmggagttcaaggctgcagtgagctgtgattgtgccactgcactccagtctgggcaacacgatgagatcctgtctctaaataaatgaataagtaaaaagaaa

SEQ ID NO: 430450 - DNA, 201 bp, Homo sapiens
atgacagcaggtcccttgtctctggctgggctgtgggagaggggcagggaaagccggggcaggagggcagtgggcagacccagacaggggggacggctggkgccctgtcccgaagagacgggagggcctgctggtggggggtgaggtggcactggggcagcgggtgtctgggcccctcagtgccggctcctcctccagaca

SEQ ID NO: 430451 - DNA, 201 bp, Homo sapiens
taaatagacagccgtgatcagagccccggaatagcagcttgcgtgcctgtccccatcttagagagacatctgacccctggtcccctgtggagcccctgccrggaccattaacccattggctgctggcaccacccccacctccgcctcccgcgcacctgcatctgtcaatccggtcagttggtttcacgcttgtgggggagg

SEQ ID NO: 430452 - DNA, 201 bp, Homo sapiens
gttggccaggctggtcttgaacttctgacatcaagtgatccaccagtctcagcctcccaaagtgctgggattacaggtgtgagacaccgcacctggtctgttttttttttttttttttgagacagggtcttgctgtcactcaggctggagtgcactggcgcgatcactgctccctgcagctgtgacttcccaggcttaagt

SEQ ID NO: 430453 - DNA, 201 bp, Homo sapiens
tgttagccaggatggtctcgatatcctgacctcgtgatccacctgcctcggcctcccaaagtgctgggattacaggcatgagccactgtgcccggccggaraaaatgatttcttactaatttttttttctttttttctttttttttttttgagacagagtctcgctctgttgcccaggttggagtgcaatggcgcaatctc

SEQ ID NO: 430454 - DNA, 201 bp, Homo sapiens
agggcagctcccagctcctcgggaggctgaggtgggagaatggcgtgaacctgggaggcggagcttgcagtgagctgagatcgcaacagagcgagactccycaaaaaaaaaaaagaaagaaaaagaaaaagaaatgcctactgaatctctgccctgggtttctgagacagaacttctaagaccctttcagacagaggcagg

SEQ ID NO: 430455 - DNA, 201 bp, Homo sapiens
cctgaatagcaaaggctatgccttggccatcgctgctggaagagacacggctcagtgttggatgaatgtcctgactgttttcgccccagagaatgaaaggygccaaccgtcctgggaaaggtgagaagtcagcgtggacaagctggggtgaccatcactgcagagctacaggccagcgtcctcttcgtgtcctagggctcg

SEQ ID NO: 430456 - DNA, 201 bp, Homo sapiens
atctctgaccttgtcgtctccattggctgctgggactccatggattccctccagagaccacataggagtgctccacagggggatcgtggacaggccacttkgctctgcctggggtggcagacacctgcccacgggcaccagtcctgtctgggtattctcaggcccagggcagccctgactcattggcacagagagtcagac

SEQ ID NO: 430457 - DNA, 201 bp, Homo sapiens
gagaggggcagggaaagccggggcaggagggcagtgggcagacccagacaggggggacggctggggccctgtcccgaagagacgggagggcctgctggtgkggggtgaggtggcactggggcagcgggtgtctgggcccctcagtgccggctcctcctccagacagtctgcctagcttccgttgctcagcatccccagcag

SEQ ID NO: 430458 - DNA, 201 bp, Homo sapiens
aggaaggacccccaggccacagatggggatgacagcaggtcccttgtctctggctgggctgtgggagaggggcagggaaagccggggcaggagggcagtgrgcagacccagacaggggggacggctggggccctgtcccgaagagacgggagggcctgctggtggggggtgaggtggcactggggcagcgggtgtctgggc

SEQ ID NO: 430459 - DNA, 201 bp, Homo sapiens
ggggcaggagggcagtgggcagacccagacaggggggacggctggggccctgtcccgaagagacgggagggcctgctggtggggggtgaggtggcactggkgcagcgggtgtctgggcccctcagtgccggctcctcctccagacagtctgcctagcttccgttgctcagcatccccagcagctcactgggctccagtccc

SEQ ID NO: 430460 - DNA, 201 bp, Homo sapiens
ggcgggtgacacctgctacatttggtcatctgtcctcaggttccacacccaagtattcaacaaacctcagactgaaaatacaaaaaatactggcccggcgyggtgggtcacgcctgtaatcccagcacgttgagaggctgaggcaggcagatcacctgaggtcaggagtttgagaccagccaggccaacatggtgaaaccc

SEQ ID NO: 430461 - DNA, 201 bp, Homo sapiens
acaagctggggtgaccatcactgcagagctacaggccagcgtcctcttcgtgtcctagggctcgttttgttcctggtcctgcaggacagcctggggtcacygtcactgcggagctacaggccagcgtcctcttcgtgtcctagggctcgttttgtccctggtcctgcaggacagcctggggtcaccgtcactgcggagcta

SEQ ID NO: 430462 - DNA, 201 bp, Homo sapiens
tgctcactgcagcctcaacctcctgagttcaagtgatcctcccacctcagcctcctgagtagctgggattacaggtgtgagccactgctcagcctgagtcttttttttttttcttttttttttgagatggagtttcactcttgttgcccccaggatggagtgcaatgttgcaatctcgactcaccataacctctgtctccc

SEQ ID NO: 430463 - DNA, 201 bp, Homo sapiens
agctcactgtaaccttgaactcctgggctcaagggatcctcctgcctcagcctcctgagtagctgggattacaggtgatgccaccatgcctggataatttytgtatgtgcagtagagacacggtttcaccatgttgccctggctggtcttagactcctggcctccagcaatcctgctgcctcggcctcccaaaggggtggg

SEQ ID NO: 430464 - DNA, 201 bp, Homo sapiens
gccaccgagactggctaattttttgtattttcagtagagatggggtttcactatgttggccaagctggtctcgaactgacgtcaggtgatctgcccccatyggcctcccaaagtgctgagataacaggcgtgagccaccgtatctagcctgggtttttttgttttgttttgttttttgagacaaggtctccctctgcctgt

SEQ ID NO: 430465 - DNA, 201 bp, Homo sapiens
ccctataaggaaatcccacccctagaagcgccaagaagaggcccatgggaggccaagtgcggttggggagcatgtggacttttgaagttgatgtcatggaygcaagctgcccggagcagggacactgacctccggatgatgatctcatgggagaggcaggcgggggcaaagctggccctgttggagaggagacagtggctt

SEQ ID NO: 430466 - DNA, 201 bp, Homo sapiens
tagctgggattacaggcgtgtgccaccgagactggctaattttttgtattttcagtagagatggggtttcactatgttggccaagctggtctcgaactgaygtcaggtgatctgcccccattggcctcccaaagtgctgagataacaggcgtgagccaccgtatctagcctgggtttttttgttttgttttgttttttgag

SEQ ID NO: 430467 - DNA, 201 bp, Homo sapiens
caggaatcccacatctggggtttagtccacagacatacttgccctcatgcaacgtgatgaccacacgacaaggctatgcacgtgcaccctttgcacctgcrtgtgccgcagagccctccgcaggccctggactgtcacacctgcggcagctcactgcgcgccccgaaatacagtgtcaagaggaggagacaccagtgtgta

SEQ ID NO: 430468 - DNA, 201 bp, Homo sapiens
catctctgaccttgtcgtctccattggctgctgggactccatggattccctccagagaccacataggagtgctccacagggggatcgtggacaggccactkggctctgcctggggtggcagacacctgcccacgggcaccagtcctgtctgggtattctcaggcccagggcagccctgactcattggcacagagagtcaga

SEQ ID NO: 430469 - DNA, 201 bp, Homo sapiens
gcttgaacccggaaggcagaggttgcagtcagccgagatcgtgccactgcactgtagcctggcgacagagcaagactcagtctcgaaaagaagaaaaggcmgggcgcggtggctcatgcctgtaatcccagcactttgggaggctgaggcgggcggatcacaaggtcaggagatcgagaccatcctggccaacgtggtgaa

SEQ ID NO: 430470 - DNA, 201 bp, Homo sapiens
cagctggctttctttttttaagtacagagtttaaatttgtaatgttgtcacacagtggaagttccctgctttcagtccctgaatagcaaaggctatgcctyggccatcgctgctggaagagacacggctcagtgttggatgaatgtcctgactgttttcgccccagagaatgaaaggcgccaaccgtcctgggaaaggtga

SEQ ID NO: 430471 - DNA, 201 bp, Homo sapiens
tccccacggggtaaccccagctccagcagcctccagggccagctgtgggggggaggggtgtaggaggcaggaggcggcagcctgggctcctggggctcgcrggggtcggggatggtttccccaacatttatctcaccccttctggatggccgcgtggttcagagcctgcatgggcttcaggatcctgctgtcattgcctgg

SEQ ID NO: 430472 - DNA, 201 bp, Homo sapiens
cgtcctgggaaaggtgagaagtcagcgtggacaagctggggtgaccatcactgcagagctacaggccagcgtcctcttcgtgtcctagggctcgttttgtycctggtcctgcaggacagcctggggtcaccgtcactgcggagctacaggccagcgtcctcttcgtgtcctagggctcgttttgtccctggtcctgcagga

SEQ ID NO: 430473 - DNA, 201 bp, Homo sapiens
cactgcactgtagcctggcgacagagcaagactcagtctcgaaaagaagaaaaggccgggcgcggtggctcatgcctgtaatcccagcactttgggaggcygaggcgggcggatcacaaggtcaggagatcgagaccatcctggccaacgtggtgaaaccccgtctctactaaaaatacaaaaaattagccaggtgtggca

SEQ ID NO: 430474 - DNA, 201 bp, Homo sapiens
actgcactgtagcctggcgacagagcaagactcagtctcgaaaagaagaaaaggccgggcgcggtggctcatgcctgtaatcccagcactttgggaggctraggcgggcggatcacaaggtcaggagatcgagaccatcctggccaacgtggtgaaaccccgtctctactaaaaatacaaaaaattagccaggtgtggcag

SEQ ID NO: 430475 - DNA, 201 bp, Homo sapiens
ccatccgccctcaggtccctttcagccacctcagaggagcaaacatcacgcctgccagactgcagtgctcaagccagagttggccaagagccagcacctcrcatgtggctcccccagctcccacagcacggcaggggtcccagcaaagtctccccagacagggtgacagccaggcctctttcgggctccccagccccctct

SEQ ID NO: 430476 - DNA, 201 bp, Homo sapiens
agagccagcacctcgcatgtggctcccccagctcccacagcacggcaggggtcccagcaaagtctccccagacagggtgacagccaggcctctttcgggcyccccagccccctctccctcccgagctctgtccttgtggggagtcctgtccaaggccctgcctggaggtctggctctggaggccccgagaaggaggccacc

SEQ ID NO: 430477 - DNA, 201 bp, Homo sapiens
aacaaagtaagctgaagaattacttggcatagattcaatttttgttaaaaaactaaggttttgattttaaatatatatcacacacacacatacaaacataygtttacatatactttcataagtacacacacacacactctcacacaaacttacaaaagcttctgtaagaatacataacgaagagttaccaatcattacctc

SEQ ID NO: 430478 - DNA, 201 bp, Homo sapiens
ttggcatagattcaatttttgttaaaaaactaaggttttgattttaaatatatatcacacacacacatacaaacatatgtttacatatactttcataagtacacacacacacactctcacacaaacttacaaaagcttctgtaagaatacataacgaagagttaccaatcattacctctgggccaggagtgtttaatgcaa

SEQ ID NO: 430479 - DNA, 201 bp, Homo sapiens
tggcatagattcaatttttgttaaaaaactaaggttttgattttaaatatatatcacacacacacatacaaacatatgtttacatatactttcataagtacacacacacacactctcacacaaacttacaaaagcttctgtaagaatacataacgaagagttaccaatcattacctctgggccaggagtgtttaatgcaat

SEQ ID NO: 430480 - DNA, 201 bp, Homo sapiens
aatttgtattctacatagtatactaacctaatgcctactggtaatcattttctgaatgcctactggtaaaaatatgtaatcattttctgaaagttaaaaartgttgcccaacacatgatattttaaaatcttaacttatatgcctgtcttccctactgttatctccatatgttttcagcaatttgtgtgcatgaggttaat

SEQ ID NO: 430481 - DNA, 201 bp, Homo sapiens
ttatcacaggagtcaaattctgaagatctttaaagtcatagtcatggcaaccatgggaagagcagtcgaatcagaagaagaaaaaaaaaaggttttgagamatgactctatcaactgactgtaatgtgacctggggaaatttgctctgcatccctgaatctcagtttattcacctgaaatcctgggaccagaacaccctaa

SEQ ID NO: 430482 - DNA, 201 bp, Homo sapiens
aatgccattctgacaaatggctaattttcttagatttcagttagtcgtttcatctttaaagaactgcaatgtaagacaaagaatgaattctaattggtcartctcaaaaaggctcagcacatggatttcaattgaagtattttggcaccacagatacagttgtcatatttggctcattatgtaagtaaaatactacaaatt

SEQ ID NO: 430483 - DNA, 201 bp, Homo sapiens
cacatactaagtattttttattagccaggaactcttctcaatgtgccctatgcattacttccttaaatcttcataattactctatgaagtaggtatcattrtttctttttctttttcatagatgaggaaacagagtcataaagagtataaattgattttcccaggccacttacctagtatatggtatagtacatacacaat

SEQ ID NO: 430484 - DNA, 201 bp, Homo sapiens
tataaatgaagttttctagaaaaatgccacacctcttaatactcaggtcacttttggatatatattttaaaacactataagtattctatcatgccaggtgtttttttttttatgtgtctgtactgagtcgtttattctttacacacacatttattcaataagtactttgaataagacattgccttagatactatggataca

SEQ ID NO: 430485 - DNA, 201 bp, Homo sapiens
ccacagatacagttgtcatatttggctcattatgtaagtaaaatactacaaattgtcatcgtaaatttggggaaatgatcctagacaagacagctcacaayagcagaactccaaaattgggtctatcaacaaatggctgtgaacgggcttctgtttgcaattaagagagcattagatctaaatcaatgtgaagagtcagag

SEQ ID NO: 430486 - DNA, 201 bp, Homo sapiens
gtgatttttattctgttttacaggtaagtaaattgagactcaggaagataaagtgattaattttaaactacaaagctagtaagtgtcaaatattgaatccaaaacttcatcactccatcactgcacagagaagagagctccctttaacccctatattgtcttctacacatatgctccacctctttgttccttccctagtgt

SEQ ID NO: 430487 - DNA, 201 bp, Homo sapiens
cccaggcaggcaaactgagaaccagatacaaattatgcttcataccttaattatcgcaataccaggaggaaaagtgatattgacttacttcatgagactgstaaaatgaaatactttttacataccaagtagggtagaaatatgactgggaaaattagagttagattagttttgaggtaactgaaaacattcaaattttat

SEQ ID NO: 430488 - DNA, 201 bp, Homo sapiens
cagatacaaattatgcttcataccttaattatcgcaataccaggaggaaaagtgatattgacttacttcatgagactggtaaaatgaaatactttttacayaccaagtagggtagaaatatgactgggaaaattagagttagattagttttgaggtaactgaaaacattcaaattttatattcaaagtattgtgaaaatgt

SEQ ID NO: 430489 - DNA, 201 bp, Homo sapiens
atcttctataaaggaattgttttgttagaaagaagccatttgctcttactgaacagatactcagtacagacttcctcatttactcaaatcttatagtctcmtaaatagattctatagttatagttacataaaatttaaacatctctccttaactgttacatgccttaaatatgtagttgattgtgtgaatgagatttgttt

SEQ ID NO: 430490 - DNA, 201 bp, Homo sapiens
caaaatgggaataacattaactgcttaactctgttttaattacataaactaatatatgtgaaattattagcacagttcctaaaacagtaaataaataatgyatgatggctatcattattttttagttttctttgtctagaaataagcttaattgtatatgaactcatcttctcactccacataaaacgtgccctcaataaa

SEQ ID NO: 430491 - DNA, 201 bp, Homo sapiens
cttcaacatatcttctgggtccaataacacattcagtcattcagtaaacatgttcattctctcatatgtgtttcagacactgtaccagattctagaattaratcaatgatgtaagcatactattggccttcaaggagccattttaatagaaacaataggttaattgttgatgtacagggaagtttaatttatgtaatcctt

SEQ ID NO: 430492 - DNA, 201 bp, Homo sapiens
cttctgggtccaataacacattcagtcattcagtaaacatgttcattctctcatatgtgtttcagacactgtaccagattctagaattaaatcaatgatgwaagcatactattggccttcaaggagccattttaatagaaacaataggttaattgttgatgtacagggaagtttaatttatgtaatccttatctagcagta

SEQ ID NO: 430493 - DNA, 201 bp, Homo sapiens
ccccctcatttcccgctccccgaaggctttggcaacctgagaggattttactgtatctgaattgtttgaaatatttttagcaaggatgcatatgtagagaytattctacttcctgcctctgcaaattaaactactctagggacctcctataagtgacagcataatatatttgtgctttcgtgtctggcatatttcatttag

SEQ ID NO: 430494 - DNA, 201 bp, Homo sapiens
ggtccaataacacattcagtcattcagtaaacatgttcattctctcatatgtgtttcagacactgtaccagattctagaattaaatcaatgatgtaagcayactattggccttcaaggagccattttaatagaaacaataggttaattgttgatgtacagggaagtttaatttatgtaatccttatctagcagtattttat

SEQ ID NO: 430495 - DNA, 201 bp, Homo sapiens
ttaaatcaatgatgtaagcatactattggccttcaaggagccattttaatagaaacaataggttaattgttgatgtacagggaagtttaatttatgtaatmcttatctagcagtattttatttttttactaagcattatctgattatggatttcctaaatatatagttatatcatctattaattgcatcaggtacttttag

SEQ ID NO: 430496 - DNA, 201 bp, Homo sapiens
ttaccagttactgagaacttattgaaaatcagaaattttgctagaactcaggggtgaaaagatgattaagactctaaaaccatgtactactttgaagaaaygcacacttactggaggtgacaggcaagctgataaatacctatgaaattataatgaaaatgtaatcacttctgaaaaatattttaaaaacacactttcata

SEQ ID NO: 430497 - DNA, 201 bp, Homo sapiens
ttcaaggagccattttaatagaaacaataggttaattgttgatgtacagggaagtttaatttatgtaatccttatctagcagtattttatttttttactawgcattatctgattatggatttcctaaatatatagttatatcatctattaattgcatcaggtacttttagtagcatgctttctaattgtatcagtaaaaag

SEQ ID NO: 430498 - DNA, 201 bp, Homo sapiens
aatgcacacttactggaggtgacaggcaagctgataaatacctatgaaattataatgaaaatgtaatcacttctgaaaaatattttaaaaacacactttcrtaaataagttcataatatagaaaaaataacaaactatccatagctcactacattatttcttcaggttggcccaatttctttcataattattataatagat

SEQ ID NO: 430499 - DNA, 201 bp, Homo sapiens
ccaacacagatgacatctaccacaatccactttggaaaaagatgggaggagatgggttgagtagaaaaatgagcagagaaaaaagcaaggaatattagcgytttggtgatattataatgttttaactctgacctgccaatcacctctgttttgtgttagggaactgacagaggaatatacaataaacaatatgcaaagggg

SEQ ID NO: 430500 - DNA, 201 bp, Homo sapiens
gcccagtatcacctaggtttactaattctctaaggatactcaagatctcagtatagttttactcacagctatgatttactacaatgaaagaatacaaagcraaatcagcaaagggataaagtgtgtggggtgaagtccaggggaaatcaggcacaagcttccaagagtccttttcagtggagccacacaggatacacttaa

SEQ ID NO: 430501 - DNA, 201 bp, Homo sapiens
ctctaaggatactcaagatctcagtatagttttactcacagctatgatttactacaatgaaagaatacaaagcaaaatcagcaaagggataaagtgtgtgrggtgaagtccaggggaaatcaggcacaagcttccaagagtccttttcagtggagccacacaggatacacttaattcctccagcaacaagttgtgacttgc

SEQ ID NO: 430502 - DNA, 201 bp, Homo sapiens
agatctcagtatagttttactcacagctatgatttactacaatgaaagaatacaaagcaaaatcagcaaagggataaagtgtgtggggtgaagtccagggraaatcaggcacaagcttccaagagtccttttcagtggagccacacaggatacacttaattcctccagcaacaagttgtgacttgcatgaagtgttgtcta

SEQ ID NO: 430503 - DNA, 201 bp, Homo sapiens
tgaaagaatacaaagcaaaatcagcaaagggataaagtgtgtggggtgaagtccaggggaaatcaggcacaagcttccaagagtccttttcagtggagccrcacaggatacacttaattcctccagcaacaagttgtgacttgcatgaagtgttgtctataaaggaagttcttttagacactcagtgcccaaggtttttat

SEQ ID NO: 430504 - DNA, 201 bp, Homo sapiens
tgcatgaagtgttgtctataaaggaagttcttttagacactcagtgcccaaggtttttattggaggttcatcacataggcatcttgcctagcacatatcamaattccagagtcccagaaaaaaagcaggtgttcagtataaaccttattgtttgcacgaaagttttgtaacattcagtcattgttatcatttagggtaatg

SEQ ID NO: 430505 - DNA, 201 bp, Homo sapiens
catgaagtgttgtctataaaggaagttcttttagacactcagtgcccaaggtttttattggaggttcatcacataggcatcttgcctagcacatatcacarttccagagtcccagaaaaaaagcaggtgttcagtataaaccttattgtttgcacgaaagttttgtaacattcagtcattgttatcatttagggtaatgag

SEQ ID NO: 430506 - DNA, 201 bp, Homo sapiens
tgtgttgtctacttatgagttaattgtgtacctgttagaagaccgtactcagtaacaggccggaaaattgtgctctagaagaataaaactgaaaaactctaaaaaaaaaaaaaaaaaaaaaaagttgttgcttagggcttagggatatagtactgggaatatttcagtgaggaggttggaaaccagaaagtattgtctgct

SEQ ID NO: 430507 - DNA, 201 bp, Homo sapiens
gtgttgtctacttatgagttaattgtgtacctgttagaagaccgtactcagtaacaggccggaaaattgtgctctagaagaataaaactgaaaaactctaaaaaaaaaaaaaaaaaaaaaaagttgttgcttagggcttagggatatagtactgggaatatttcagtgaggaggttggaaaccagaaagtattgtctgcta

SEQ ID NO: 430508 - DNA, 201 bp, Homo sapiens
aacatcaatacttactctatgctacacgttactctaattgattttacgtacattaattcagctaatgctaaaagcgatccctggtagtaagtaccattacstattggtttattagggcttccataatacagtgcaagcataactctaagatatggaaggtttgacttcagaccaccacaataaaacaaacattctaataaa

SEQ ID NO: 430509 - DNA, 201 bp, Homo sapiens
tcattcacttcagtcaagtctgctcaaatggcattatagcattttgtttgatggttgttcctgaacgtgcaatataaagtaacacactctctactgtttaygctgctttactcctactttcccttccttctttgtcctaacccgaatctcagaacctgatgctcaatgtatttattggttgttgtctatcttgccccctta

SEQ ID NO: 430510 - DNA, 201 bp, Homo sapiens
accaccagaaagtaccaaatttacatctagtatttaaaactgaaataaaatatcattcaaccacatcacttaaatttattattgcttttttggttctgcaraaaaaaaagtaaatggaatagatatgagaataactttctactttttattttgctttgtgttttcataagaatatcaatcaattaacttttgcttacaatc

SEQ ID NO: 430511 - DNA, 201 bp, Homo sapiens
gggctcttttcttaaatctcttgaacaactgccagattcaaacttttcttcttcaacttcctcactgctctcaggactcataaaattgaagagagctgcgrccttgctctggattaggctttagcttaagggaagtttgtagctggtttgatcttctatccaaaccactaaaactttctccatatcggcaataaggctgtt

SEQ ID NO: 430512 - DNA, 201 bp, Homo sapiens
gttttcattcattgctgtcttcccaatacctgtaagacctattggcacatgggtgctcaaaaatatttgttgactgaatgaatgagtagaaccacttgccrctgatgaggacacagaaaatgaaggatggaggcgaatggcttttaacaaaggaaaaggacagaggagtgcataactgtgatatgacatctttctacaaga

SEQ ID NO: 430513 - DNA, 201 bp, Homo sapiens
actacatttctcagactccctacatctgttttggttgtgtgactatattttggccactgccccctccttcctactggtctgctttctgagctacacacccmacacacacacacacacacacacaccccactccccacaaagctactctttggtgttttgaaataactttggacaggacgactagaactcagcgttctagtc

SEQ ID NO: 430514 - DNA, 201 bp, Homo sapiens
ttctaattgtatcagtaaaaagacttttttttttattttggaaaattaatagaataaaccaaaaataaaaatcacctgtaatcttattgttagattgatcrcttgtgctgttttagtctccattgtactttttcttatacttttttccacatacacataagtttttaagcatatctcttaattaattttgctttatcaaat

SEQ ID NO: 430515 - DNA, 201 bp, Homo sapiens
agtattgatgcaagaaatgggctaagtccagtatgagctgggaaatgtaggtgggaatttggtttcaaggcccttagagaatcagttttcatttgaaatgkttttgtttttttttttgtaccaggagagagaaaattttgcttttcttggaaaaaataagaagataaaattattagtatttgattacttcatgacatctag

SEQ ID NO: 430516 - DNA, 201 bp, Homo sapiens
tattgtttttactactacaatattatttacagttcaaccaaatagcatgctatgattacatttgttttcctacattacttttctattggaattaagactcttttttttttttttcattttaaagcacccatcactgtttataccaaattttaaaaggaactgtaactactacctcataacatagtgaaatatgagtaattt

SEQ ID NO: 430517 - DNA, 201 bp, Homo sapiens
cacattttacagatgggtaaactgagacttccagagattatcttctctctcctcacaaaaatcaataacaggaatttgaaacaagttttcttaggaggagrttttgtatttctgacttctcttcttgctcccacatcccaaggccaaagttaggatgccttgtataagcctttgtgcttgtggaaattggactttcccgtc

SEQ ID NO: 430518 - DNA, 201 bp, Homo sapiens
aatattagatatttaagaataatataataaatattatactattattaaaagtaaaggtttgtaatttacaacatttaatgttcatataagtgtaaattttygaaaaatatttgccttttaaaatcttctctgatcatgtgtcactttaaacagttcttttaattaataaaaaatttcaagggtctggtgcagtggctcaca

SEQ ID NO: 430519 - DNA, 201 bp, Homo sapiens
tggaattaagactcttttttttttttttcattttaaagcacccatcactgtttataccaaattttaaaaggaactgtaactactacctcataacatagtgmaatatgagtaatttataaattttttccctgggtgacatccttttgtgtacgtctccccttctcattccacagctgccattcagggacattccttcaccat

SEQ ID NO: 430520 - DNA, 201 bp, Homo sapiens
cataaataaaaacaaataacctattttcatctcaatagatgcagaaaaagtttttgataaaatccaacatccctttatggtaaaaaccctcaataaactgsgcatataaggaatatacctcaaaataataagagccatctatgacaaacccacaaccaacacgatcctgaattggcaaaaggtggatgtgtttcccttgag

SEQ ID NO: 430521 - DNA, 201 bp, Homo sapiens
taaaattaacatataaaaactgattttcattagaatgtagttattttcccacactagttaattaaaagccaagacccagattttatatatatatatacagatatatatatatatatatacagatatagatgatagatagatagatagatagatagatagatagatagatagatatcacaatgcaaacaattaagcttcatc

SEQ ID NO: 430522 - DNA, 201 bp, Homo sapiens
ataaataaaaacaaataacctattttcatctcaatagatgcagaaaaagtttttgataaaatccaacatccctttatggtaaaaaccctcaataaactggrcatataaggaatatacctcaaaataataagagccatctatgacaaacccacaaccaacacgatcctgaattggcaaaaggtggatgtgtttcccttgaga

SEQ ID NO: 430523 - DNA, 201 bp, Homo sapiens
aaaattaacatataaaaactgattttcattagaatgtagttattttcccacactagttaattaaaagccaagacccagattttatatatatatatacagatatatatatatatatatacagatatagatgatagatagatagatagatagatagatagatagatagatagatatcacaatgcaaacaattaagcttcatca

SEQ ID NO: 430524 - DNA, 201 bp, Homo sapiens
gaaaaacctactctgccaagagaactgataaatgacttcagtagtttcagtatacaaagtcagtgcacaaaaatcagcagcatttccatataccagtaatrttcaagctgagagccaaatcaagaactcaagcccacttacaataatttgtaattattatctaatgcaatctcatgttaaaaggaacactggaaaaataac

SEQ ID NO: 430525 - DNA, 201 bp, Homo sapiens
cattagaatgtagttattttcccacactagttaattaaaagccaagacccagattttatatatatatatacagatatatatatatatatatacagatatakatgatagatagatagatagatagatagatagatagatagatagatatcacaatgcaaacaattaagcttcatcatctggacaagaatgccaacttagtct

SEQ ID NO: 430526 - DNA, 201 bp, Homo sapiens
aaaagatgtatggcagctgaatgcaggatggggtaacaaagaaagaaaatgtctctcaaaggcactagacggagaattacctgtgcttaatctatctccaraaagtggctacatccccaacttgttctgaaattttagccacctaacctccagctatagactcagcttggccctgtccttcaaccaattcttatctgagtc

SEQ ID NO: 430527 - DNA, 201 bp, Homo sapiens
ccaggttcccagagaatatctgctgatatttttctgtaaagaccatttgcaaaattgtaacctaatacaaagtatagccttcttccaactcaggtagaacrcacctgtctttgtcttgctgttttcactcagcccttttaacattttcccctaagcccatatgtctaaggaaaggacgctatttggtaatgaggaactgtt

SEQ ID NO: 430528 - DNA, 201 bp, Homo sapiens
tttgatcataggttcacgggagcctatctgagagtaatggtttgctattcactaattcagtctgtgtggcaaatttatagaacaaaactaccataaataaygagaattgactccacttcaaacatcacttcatacacaaagaacctctatctaccataaagtcaccgggttctgcagcacattgtgcacgttagggagcta

SEQ ID NO: 430529 - DNA, 201 bp, Homo sapiens
gccttcttccaactcaggtagaacgcacctgtctttgtcttgctgttttcactcagcccttttaacattttcccctaagcccatatgtctaaggaaaggaygctatttggtaatgaggaactgttacttgtatgtgaattaaagtgctcttcttattttaaaaaattgaaataattttgatttttgccttctgattattta

SEQ ID NO: 430530 - DNA, 201 bp, Homo sapiens
tccaaaatacattatggacttcaaatagaaaacaacctttagctctttcctgtcatagctctgacgatattttttaaggtcactgagaacaagggcccagygtctaagtgcctgtctcaagatgtgtccattaaatattttaatgatgataactatattaacatcttttcaccttctaaaaagtatcttattagagaaagt

SEQ ID NO: 430531 - DNA, 201 bp, Homo sapiens
cgagtagctaggattacaagtgtgaaccaccatgcccggctaattttgtacttttagtagagatggggtttcaccatgttagccaggctggtcttgaatgyctgacttcaggtgatccacccacttcggcctcccaaagtgctgagattacaggtgtgagccaccatgcccaaccagcaaatatatgttcatgctgctgat

SEQ ID NO: 430532 - DNA, 201 bp, Homo sapiens
aagactgatatgcattttactgacaggaaaagtagttttcagatggtatcagaacactggtctctaggacagggcttatggcaaatggctcatatcccacyttggtaaatgttaggcacacttgacagtaactctactattattctttattttatgtcatttgaagattccaaaaaagggagattatgatgtgctggataa

SEQ ID NO: 430533 - DNA, 201 bp, Homo sapiens
tccattaaatcttaaataagtgggataacttatgctaccctctgcaattcctaacttaattttcataagtcaatacaattatctctagccatattgggccygaccaaaactagctaagaggaattcagaaagcatatactagatttaacaaaagactttctttgtggggagcagaacaaagacagacagtggtgctggttt

SEQ ID NO: 430534 - DNA, 201 bp, Homo sapiens
atttttataaaagatccacatggcctttttttctcttatcttataataaacccctctttcctaagtattagatgttttctgctttttctctttagaaaacytagtttagctagtctttgcaattctgtcctttgagaataaagaatataatagtatagaatagaataaagagtcttacagaatagaacaataaagttagcg

SEQ ID NO: 430535 - DNA, 201 bp, Homo sapiens
aggtaagtcacactgctgatttcagcaatgtgttatatttgatagcaattgatagctgactactaaacaaaatcacttaactgtatgaatgttttaattctttttttttttttttttttttttttgagatggaatcttgctctgtcacccaggctggagcgcagtggtgcaatcttggctcactgcaacctctgcccaccg

SEQ ID NO: 430536 - DNA, 201 bp, Homo sapiens
tttttttttttttttttttttgagatggaatcttgctctgtcacccaggctggagcgcagtggtgcaatcttggctcactgcaacctctgcccaccgggtwcaagcgattctctgcctcagtctcccgagtagctgggattataggcgcccacgaccacacccgcctaatttttgtatttttagtagtgatggggtttcac

SEQ ID NO: 430537 - DNA, 201 bp, Homo sapiens
agattaaacatgtaatgtgaccggtcatcttgccagattctcacatttccattttaaataatcataaattagaaaaccttactattctttggcataacacmgctgtctgattccgctgagttccaaagtcttagaaattgcactcattccttctttagagtcctgcttcatggcaaaagttttcagctgaaagactcttta

SEQ ID NO: 430538 - DNA, 201 bp, Homo sapiens
aagttttcttaggaggaggttttgtatttctgacttctcttcttgctcccacatcccaaggccaaagttaggatgccttgtataagcctttgtgcttgtgraaattggactttcccgtcttgtatgttcatctggcaggttcttcctatgttcataacaagatatattgtactgctttccccaattcccctcactttcact

SEQ ID NO: 430539 - DNA, 201 bp, Homo sapiens
aaaatggaacccgagatcttctactgctttctagttgagttactattggcaaactctttgactcaattttttttttctgtaaaatggaatcaataaaataktaagcaagatattgttcaaaggaaaacttcagccaacttaaatttaaaagagtttaattgagcaaagaacaatttatgaaccaggtagcttcctgagcta

SEQ ID NO: 430540 - DNA, 201 bp, Homo sapiens
acaatatattaagagtttatattatagaaattgctttattgctaactttgtcatctgggttagattataaactcaagattattgggtagatagttggcacmtaatctgtgtgcaaggcactgagaaaacaaaagataaaaagctgttgttcttcagctagttggcagcattgatattcctccaatgtacttgtgcctgctt

SEQ ID NO: 430541 - DNA, 201 bp, Homo sapiens
tatattgtctcattttatccttaactattgttacttgacatttcacttccttattttatttttgttctcataaatacattaaaataaatagtaccatcccmtttctataaatgagcacactgaggcttagagagttttactggattaattttaaatggaaatgtttattatcatttaaaaattacaagtttgttttaacaa

SEQ ID NO: 430542 - DNA, 201 bp, Homo sapiens
ttcaccttcctagactcatctggagctatttgctccttgatccctatagacatattggtcaatttttaggtccttgaatttgtcgcatacttccgatcaawgattctttccaaattccattctatccttcagaaatattcttctaccatttctctaaacagtcattcttcaactcttgaaggatgcaccatcaaagacttt

SEQ ID NO: 430543 - DNA, 201 bp, Homo sapiens
ataagacctatgtctctggccaggtgtggtggcttatgcctgtaatcccagcacttcgggaggtcaaggcaggcggatcaccagaatcaggagttcaagaygagcctggccaatatggtgaaaccttgtctctactaaaaatacaaaaagtagctgggcaaggtagcacacgcctgtaatcccagctacttgggaggctga

SEQ ID NO: 430544 - DNA, 201 bp, Homo sapiens
tgaatttgtcgcatacttccgatcaaagattctttccaaattccattctatccttcagaaatattcttctaccatttctctaaacagtcattcttcaactmttgaaggatgcaccatcaaagacttttcctcaggccacagacaggatgaggcttccccattaaatcctgttaccatattacatgcttccatatttgccag

SEQ ID NO: 430545 - DNA, 201 bp, Homo sapiens
aaactgggatatgtgttttgggatggacaaccatagaggtaaagcaccaatctcttcacattatatcaaatgtgtatagggactcaaaaatgtatcccaargtatggtgccttgggatgctgagtattttgaagtaaaggagattggaattcctcagaagcaaagtctctggcccctctttctcctgtgaaataaaccata

SEQ ID NO: 430546 - DNA, 201 bp, Homo sapiens
agggactcaaaaatgtatcccaaagtatggtgccttgggatgctgagtattttgaagtaaaggagattggaattcctcagaagcaaagtctctggcccctytttctcctgtgaaataaaccatagaaactaaactccctcttccccaagattataaaaactagacccttcttttccaaaacaagccataaaccctaaaact

SEQ ID NO: 430547 - DNA, 201 bp, Homo sapiens
accccaaaagggccatgctattaacataacttaccattgtgaatgttaaccttgatcaccgggcagaggtagtgttggtcaagtttctcaaactgttaaaygatttcaccatgttttgatactgtactcttcgaaaagaagtcactgtgtgcatcccatacttagtcagtggggagttatatatagtaccttcaagacaga

SEQ ID NO: 430548 - DNA, 201 bp, Homo sapiens
tgttttgtaaaaaaaaaaaaaaaaaaaaaaaaaaaaaaaaaaaaaggatttttagtatccaacctttccaacaagtcaaatatataattctccatctgtaraaattacatttgcagttggcacaagtcatttcagccagtgtctccagcaggctaacaactggcattagtggcggatgtttttagctttttccttgtttgt

SEQ ID NO: 430549 - DNA, 201 bp, Homo sapiens
actgaaaggaattctcttcctgaaactgggataagtctctaacaatttcccctggatcatagggcttggatatggagaatgtcctgggcatatttcacaawggtcactctcctcctccctgtaacagagtaaggagagtatctttctgagttcttcaccataaaaacctggtggagttcctggaggtaaagccccaaacat

SEQ ID NO: 430550 - DNA, 201 bp, Homo sapiens
aaaaaaaaaaaaaaaaaaaaaaaaaaaaaaaaaaaggatttttagtatccaacctttccaacaagtcaaatatataattctccatctgtagaaattacatytgcagttggcacaagtcatttcagccagtgtctccagcaggctaacaactggcattagtggcggatgtttttagctttttccttgtttgtgtaggctttg

SEQ ID NO: 430551 - DNA, 201 bp, Homo sapiens
tagaaattacatttgcagttggcacaagtcatttcagccagtgtctccagcaggctaacaactggcattagtggcggatgtttttagctttttccttgttwgtgtaggctttgattttgtgggatttctttgtcatcataaaaagggcctaactggggccacctattgtgagtttgttttggaggacatgtcagtaaagca

SEQ ID NO: 430552 - DNA, 201 bp, Homo sapiens
tttctttgtcatcataaaaagggcctaactggggccacctattgtgagtttgttttggaggacatgtcagtaaagcaaagttccactccccctctgattaratgccttctgaaagctgctgaaatgcaaatgtgaaaagagttttggttttctaataaactttttattgcttattttcaaaatcatttgccattttgtaca

SEQ ID NO: 430553 - DNA, 201 bp, Homo sapiens
attaaaattggctatggaaaccacttagacctcaagagctttcaaactattcagctatttaaaacaatatgggaagaatttaagtatttttttaaagaaargcttgccaaaattctatattgttcatgtttatcttattgttttatgagttcttttcttaatagcaatgtaagaaattattcttatgacttcatgttcatc

SEQ ID NO: 430554 - DNA, 201 bp, Homo sapiens
agtagttgtgatattcaaataactgtgctaggcactttcatgtatgttaactcatttaataatcgacatgttaccaatatgagaataagtactattcatartgtcaaaggaggaaattggttgaaatggggtaaacaccttcccaagtttacatgtctgctcagtagtttaggtaatttatcttggatttgagtttagtta

SEQ ID NO: 430555 - DNA, 201 bp, Homo sapiens
acagtactctgagaaacaagcctatgagcacatcattgcaaaattataaataccatcataaaggaatattccatgttttatagaagtaatataattaataytgcaggggtacaatatcatcaggggagctgtagaaggtttcaaagaaaagctaataattgaatggtattcccagaagttcaccaggtagatgaggtgatc

SEQ ID NO: 430556 - DNA, 201 bp, Homo sapiens
agcagtaactcacctgtaggtgttttcttcctgtctgctttttccttcttggcatttccaaaaggttcaactcttctatctctagatgttgaaggtttttyagtttgggttctctaaggcagatgtttgcatgcaggtggtttttagaaagtgtttgtaaaatttgttctcactcataagtaggagctaaataatgtgtac

SEQ ID NO: 430557 - DNA, 201 bp, Homo sapiens
tcctgcttcatggcaaaagttttcagctgaaagactctttattgtattcaaatctcgtcccatatgagttgttctggtttctcagtttatgaagagtcttrgatagtgaattgggtccacaacagaaaacaccaactgttttcctagaacaagagcggagaaaatggaaaatcaggtgcaaaattaggcagaacatgacaa

SEQ ID NO: 430558 - DNA, 201 bp, Homo sapiens
cctagaacaagagcggagaaaatggaaaatcaggtgcaaaattaggcagaacatgacaagaagtatgctttatgagcatggtttaaagtattaacaaagtygatttcttgctattttacatattgaaaacaattttctaattatttccaaatataaatgtcaaccaggaaaatattttatttacctcatacttttcattct

SEQ ID NO: 430559 - DNA, 201 bp, Homo sapiens
catagttatctaaaattcctacatggatttgcaaaagcagtgatgaataaggaaggaaagaaaaaagatattaccaatttgaaataataattttaagtggytaatttatattcacagtaaaacgaaaaacatattcatctagttcttttttatttatgcactgcaataatggtaacaaattccaagcagtttttattattc

SEQ ID NO: 430560 - DNA, 201 bp, Homo sapiens
gcatctggagataaggcttttaaggaggcaatttaagttaaaatgaaggtactagggtaggccctaatccagtctgaatggtgtacttacaagaagtaatktgaacacaaaaagagacaccagggaagtgcatgcacagagaaaaagccacctgaagaggcatcaagaacatagccatctgcaagtcaaggagagagatct

SEQ ID NO: 430561 - DNA, 201 bp, Homo sapiens
tcttcctgaaactgggataagtctctaacaatttcccctggatcatagggcttggatatggagaatgtcctgggcatatttcacaatggtcactctcctcytccctgtaacagagtaaggagagtatctttctgagttcttcaccataaaaacctggtggagttcctggaggtaaagccccaaacatgtggaagttcccct

SEQ ID NO: 430562 - DNA, 201 bp, Homo sapiens
tgagatgataaatggaatatttttaaggcccaaacataaattctagagatggaatgcaatatttgaaatgataaatatactagatgaggtaataaaagaayaggcattgctgaagaaaaagtaaacttgaagaaaaagcattagaatctatccaaattgaagcccacagagaacaaaaactgaaaaaaaaaaaaaaaaaga

SEQ ID NO: 430563 - DNA, 201 bp, Homo sapiens
cctccctgtaacagagtaaggagagtatctttctgagttcttcaccataaaaacctggtggagttcctggaggtaaagccccaaacatgtggaagttcccytaagacagcagcacccgggaatttcccactatcatcactagtctagactcagtctccagccattcatcgaagtgtttcagtgttcctaccactttaggaa

SEQ ID NO: 430564 - DNA, 201 bp, Homo sapiens
aatatactagatgaggtaataaaagaataggcattgctgaagaaaaagtaaacttgaagaaaaagcattagaatctatccaaattgaagcccacagagaasaaaaactgaaaaaaaaaaaaaaaaagaagaagaacagagcataagtggcctgtgggacaataccaactagtcaaaaatacatgtaaccgcagtccaacat

SEQ ID NO: 430565 - DNA, 201 bp, Homo sapiens
tcaggctgttcccaaatcagtcaaaatttgacaggggtggtggagggattatcagacagcctccttctcattttaaaaaattaatttaccaattgaaaacrcatggtttagtacaaataaaatgtctactaaaaattatctaaaatgtgatttccttttttggtaaaatacatgtagagtgttgtggatgcatattttaaa

SEQ ID NO: 430566 - DNA, 201 bp, Homo sapiens
tcttggatagggctcaagaatttgcttttctaacaagattccaattgatgctggtctaaggaatccagttcaggaaccaacaacctaaagcaattactaaraagaaaaaaaaaatacagaggcatgtctaactttagagaaaaaagtggaattataaaaaatactcaacccaaatcaaggtaaaaaaagaaaataaaacaa

SEQ ID NO: 430567 - DNA, 201 bp, Homo sapiens
aactaatcttcttaaatcttctaatttctcacttttgcctatcagaataataaccatcactaaaggcactgctcacatatacaagctttggcatttctaawacagcatatgttatgtctcatcaattttaaagtttttccagtatagtcataatacttaggagggggaagaagagaagagaggagctgtgagaaagataat

SEQ ID NO: 430568 - DNA, 201 bp, Homo sapiens
aaaaatacagaggcatgtctaactttagagaaaaaagtggaattataaaaaatactcaacccaaatcaaggtaaaaaaagaaaataaaacaaagaaagaasaaatagataagtacaaagcaatggtgaactgctagatttaaagccaactgtattttcattaaattaaatgtaaatgatttaaacaccgaaactaaaaagc

SEQ ID NO: 430569 - DNA, 201 bp, Homo sapiens
aagataatagcttttatgtactatttggcaagcacttaactgtgtattttgtgttattttaattaatccttacattaccttcatggtataaatataattcmcattttgtagaataaagaagatcaaacagatacaattttacaaatcttccctgtcgcaacctatagaactcgtatttttacacagttctttgtgtaagtt

SEQ ID NO: 430570 - DNA, 201 bp, Homo sapiens
aatacattttaagggattagaatcacaaggagttcatttttagatcaaatcccaattgaactagaaattaagaacaaaaagatatctggaaaatttctgcrtttttggaaattaaacaacatttttaaataacccatgggtcaaagaaaaaacataaaaaataaaacatatttgaacgagatgaaaatgaaaacaaatcaa

SEQ ID NO: 430571 - DNA, 201 bp, Homo sapiens
taaagaagatcaaacagatacaattttacaaatcttccctgtcgcaacctatagaactcgtatttttacacagttctttgtgtaagttgacctacagtagwtactcagtaaatattcatttaataattgaactaatttagaaagcatttggtatgcatggaccagatttttagtgtttatcagtggactgccaattcttca

SEQ ID NO: 430572 - DNA, 201 bp, Homo sapiens
agaaaaaacataaaaaataaaacatatttgaacgagatgaaaatgaaaacaaatcaaaatgtataagatttagcaaaagtggtgtttagaggaaaatgtayagcattaaacacttttattaagaaaaacagtctgaaatcaatgacctatgtttccattttaagaaactagtaaaaattaagaaaagctaattaaacccaa

SEQ ID NO: 430573 - DNA, 201 bp, Homo sapiens
aaggagagtatctttctgagttcttcaccataaaaacctggtggagttcctggaggtaaagccccaaacatgtggaagttcccctaagacagcagcacccrggaatttcccactatcatcactagtctagactcagtctccagccattcatcgaagtgtttcagtgttcctaccactttaggaatccagctgctcctgccc

SEQ ID NO: 430574 - DNA, 201 bp, Homo sapiens
ccttctttattttaataaaacagtgagaaatctacattaactgactcctttaggcttcagaaacacatttttattttcttcagaaaggatgatattccccyatattttacatttctgctccaaaatacattatggacttcaaatagaaaacaacctttagctctttcctgtcatagctctgacgatattttttaaggtcac

SEQ ID NO: 430575 - DNA, 201 bp, Homo sapiens
tacaaatcttccctgtcgcaacctatagaactcgtatttttacacagttctttgtgtaagttgacctacagtagatactcagtaaatattcatttaataaytgaactaatttagaaagcatttggtatgcatggaccagatttttagtgtttatcagtggactgccaattcttcactaaattcacaactgaaaaccaactt

SEQ ID NO: 430576 - DNA, 201 bp, Homo sapiens
gtactaagtagaaaatgtggtttggggtagacattagaaactagttctataaatgttcatacttgctttttcatgtagacttgtaaacgcagaatcttacrtaatgagaacttaatcactccggagagcttattcactcgttgtattacagatccaggagaactgagtcacttgactcagggtcacaggagtaaatgtgag

SEQ ID NO: 430577 - DNA, 201 bp, Homo sapiens
cttctttattttaataaaacagtgagaaatctacattaactgactcctttaggcttcagaaacacatttttattttcttcagaaaggatgatattcccccwtattttacatttctgctccaaaatacattatggacttcaaatagaaaacaacctttagctctttcctgtcatagctctgacgatattttttaaggtcact

SEQ ID NO: 430578 - DNA, 201 bp, Homo sapiens
gcctgatttaagtaggaaaagaatttgctgagaggctattgagtagctcacaaaatcatggagcagcaggctcagaaacaggtgagaataagcaagaaggrcatcagctaagacagctgccaaaaccatgctatagaacacagggcacttgctgggcaatggattcctttgctggtacatctggctttgctgaccctgaaa

SEQ ID NO: 430579 - DNA, 201 bp, Homo sapiens
taggcttcagaaacacatttttattttcttcagaaaggatgatattcccccatattttacatttctgctccaaaatacattatggacttcaaatagaaaasaacctttagctctttcctgtcatagctctgacgatattttttaaggtcactgagaacaagggcccagcgtctaagtgcctgtctcaagatgtgtccatta

SEQ ID NO: 430580 - DNA, 201 bp, Homo sapiens
catttaatttacaactatgactcaattgtcactcaaccaatagttacctttattttgcagcattctgaaggttcaaaacgcaatgtgtaagttttattcayctgctaagaattattttttcaaagcttgcctcaatatttattttaaatgagtgaacttcaaggcctgaaagaataaactgatactttatgaaatattttt

SEQ ID NO: 430581 - DNA, 201 bp, Homo sapiens
gcctcagcctcccaaagtgctgggattacaggcgtgagccacagtgcccggccttaaaacaaattttaatgaaaagagaaaaaaaaaagataatcttctgytaacgccttttggtaagcagataattgtcatatttaaataaaggtgtaattgcacctggtgggcacccagttctgccattaaaaatgccacactgactga

SEQ ID NO: 430582 - DNA, 201 bp, Homo sapiens
cttattttatttaaaaaattttcaaatgtttcttttatacacaatatgtttcttagtctgaataaccctttcctctgcagtatttttgagcagtggctccraaggcaccgtcttcttcaagaagtttatccggaagccaatgcacccattggacataaccgggaatcctacatggttccttttataccactgtacagaaac

SEQ ID NO: 430583 - DNA, 201 bp, Homo sapiens
tcttgtagcaacatggatggaggttattattctaagtgaaataactcaggaatgaaccaaataccatatgctctcactaataaatgacagctaagccataygctatgcaaaggcatatagagtggtgtaatggacatttgagactcagaaggtgggaggatgggaacagggtgagggataaaaaagttacctgttgggtat

SEQ ID NO: 430584 - DNA, 201 bp, Homo sapiens
gcataatcatgatgagatgataaatggaatatttttaaggcccaaacataaattctagagatggaatgcaatatttgaaatgataaatatactagatgagktaataaaagaataggcattgctgaagaaaaagtaaacttgaagaaaaagcattagaatctatccaaattgaagcccacagagaacaaaaactgaaaaaaa

SEQ ID NO: 430585 - DNA, 201 bp, Homo sapiens
ttggtaatgaggaactgttacttgtatgtgaattaaagtgctcttcttattttaaaaaattgaaataattttgatttttgccttctgattatttaaagatmtatatatgttttattggccccttctttattttaataaaacagtgagaaatctacattaactgactcctttaggcttcagaaacacatttttattttcttc

SEQ ID NO: 430586 - DNA, 201 bp, Homo sapiens
aacaataagatctagccctcacttcagtatgtcaaggacttccaaaaagtgaagattgctgatagctctgaaagaagtccaggttgcattaaactaggtartacttcaactaagaggaaatagagaacccaaactggtaaacatggtgacactgagaagtgggaactacttatagaaaaatcctcagtacaagttgaaggc

SEQ ID NO: 430587 - DNA, 201 bp, Homo sapiens
aagtgggaactacttatagaaaaatcctcagtacaagttgaaggcatcttgatgtgataaatctttcagtgactctaaaagacaatgttctaagatggagatggtgaacatttccatcagagcttccatagcatgatagatcataaagaaaagttattaataataggcaatactggaataattcataaaaatagtttggtt

SEQ ID NO: 430588 - DNA, 201 bp, Homo sapiens
aggtttgaaggccaacaccaaaagtgtgttgagaattttaagtttgtgtcctttgataataatgtagcttttctagaaaagaaaccctgctctcctgcccrtcaaacaactacaggtcaccggggtgtgcaccttgtaaaacttcattaaggtacatacttacttgatgcctaaaaatattttgagtgtagacacagacat

SEQ ID NO: 430589 - DNA, 201 bp, Homo sapiens
tgataataatgtagcttttctagaaaagaaaccctgctctcctgcccgtcaaacaactacaggtcaccggggtgtgcaccttgtaaaacttcattaaggtwcatacttacttgatgcctaaaaatattttgagtgtagacacagacattaagtaaaaaagaagaccaggagctatagatattaaaatttttattaaaaaca

SEQ ID NO: 430590 - DNA, 201 bp, Homo sapiens
ccactatcatcactagtctagactcagtctccagccattcatcgaagtgtttcagtgttcctaccactttaggaatccagctgctcctgcccctggtaagmagatctcagctatgttcctctggatgaacccatctctccacttttgaggatggcagtttgccccgcaacttcaattttctcatgggtccaagaaaatttg

SEQ ID NO: 430591 - DNA, 201 bp, Homo sapiens
aaaaaacattttttattgctagtagtctaatgttagtagtcttgaatttaatgctgctctatattagaaaatgaattaactagctggtgttaaattatctmtaaaactaggatggtggccatggaaggagaaaaggacagatgtgagaaacctcaaaatgagaaaattaagaggacttagtgacataaataatagagagga

SEQ ID NO: 430592 - DNA, 201 bp, Homo sapiens
tatattcacagtaaaacgaaaaacatattcatctagttcttttttatttatgcactgcaataatggtaacaaattccaagcagtttttattattctctaayataaaattttagtagttaaataatacgtatctctaacaaatagactaaataaatcccaggaaataaataatatttcaaattgaccttcttcccaagtttg

SEQ ID NO: 430593 - DNA, 201 bp, Homo sapiens
gaaaaggacagatgtgagaaacctcaaaatgagaaaattaagaggacttagtgacataaataatagagaggaaaaatcaaaattcacattcaacttgaaaytgttttttccctaagttttcctttttgtctaactagactaataactagtcttttctctaactagactattacctaatttttaagtactaaaaagtaatgc

SEQ ID NO: 430594 - DNA, 201 bp, Homo sapiens
cccagaggcaggcggaggttgaagaaaggaacctgggatgaggggtgctgggtataagcagagagggatgggttcctgctccaagggaccctttgcctttyttctgccctttcctaggcccaggcctgggtttgtacttccacctccaccacatctgccagaccttaataaaggcccccacttctcccattagttctcctg

SEQ ID NO: 430595 - DNA, 201 bp, Homo sapiens
gttagaagccatggatgagctgctgctgtatttcagttttcctgcctattccccaacccagctccacccatcctggcatcctgggagagctcttcggatcrccaaccttgggaatccctcccctccttagctgcacattaaggggatgaggcacctatgtactcagccagtgtcctttgccttctgcagtggtcccagtca

SEQ ID NO: 430596 - DNA, 201 bp, Homo sapiens
acctgggaaatggtggcacgtgcctccatcatgattcttgctttacctaacctgaattcttgccaagcctaagtctgtgggctgatgctttgttgcagagytagcttggcactttgcaccaagaatctcaagtgctctttctgaccttacccccattttttcctctgccaaggtagcatctctaccccaaaactgttttgt

SEQ ID NO: 430597 - DNA, 201 bp, Homo sapiens
catgcagagccttggaggccaagggcaagcgtttggatttcatgctttaaataacagagagaaatgattttatttctgttgtaaaaagatcactgtgacasctaggtggagagcaagggaccataggaggtaagaatgaaaatagggtatcctggtaagaggccgtgggtgaaatccaagtaagaaatgatggagccttag

SEQ ID NO: 430598 - DNA, 201 bp, Homo sapiens
ctgggattacaggtgtgagctaccgtgcccagcctaaatgttgaactttagatggtttatttagtcaataatcagacactagtctgatgtataaactagayataatgtaaatagccaaaatgttcttgtctcactgcgggtctcagaaaattgatacccagagagggaaggaggctgtaccagtcacccagctggtcctca

SEQ ID NO: 430599 - DNA, 201 bp, Homo sapiens
atatctgaagtgaggggcctgggccagttcagcagagtccagttctagtgttgtttgtttgtttgtttgtttgttttccccccaagacagagtcttgctcygtcacccaggctggagtgcagtggcacaatctcggctcactgcaacttccgcctcccgggtttaagccattctcctgcctcagcttccagagtagctggg

SEQ ID NO: 430600 - DNA, 201 bp, Homo sapiens
aataaagacaaagcatctagaagaagaaagactggaatctgctcagacaggttctgagaacagtcttccctcctgggtcttagtggagcccagaggtggargacactaggacctagggtggagcagcctttagtctcaagcaagcttgtccaacccgtgggcctgtgggccactttcagcccagggtagctttgaatgcgg

SEQ ID NO: 430601 - DNA, 201 bp, Homo sapiens
ggagtcctgggctgccccgcccctgagtcacccgaggaccccaacctcgtcccccagactaagcgcctcagggtgactcgcgggcattctccccgcttctmgcagaaatcgcccggaaatgggagcttgcgcgaagcgctgatcggcccgctggggaagctcatggacccgggctccctgccgcccctcgactctgaaggt

SEQ ID NO: 430602 - DNA, 201 bp, Homo sapiens
ggggcggggggtggagagctgaggccgagcgaaggaaatgcaccaatcagctgctcccccgggctcacaactgtctgctgcgcccgaaaaacaagtcggtrcgctggggacccggggccggggccgccttactccggcctagccccgcggccctcggtgcgggctccagggcatgctcgggaccccccgcggctccagccc

SEQ ID NO: 430603 - DNA, 201 bp, Homo sapiens
taccgggatggagctggggacagaccctggcacactggcttggcagccaagactcagccaagttaacaaataaataaagagagtggtgtacacttaagacsaaacatggtaattaaaaattctcctgctctccaggaacgcgaggctcagtgttcctgtttctatcctgttgacagtctctggatgactgagggccctggc

SEQ ID NO: 430604 - DNA, 201 bp, Homo sapiens
cagaccattgtgtggggtatttgcttatttgaatggaacttggccccaggcccattttcctggttgaaattttcatttgtaaagtttgttttgcagaagcygccaggccaaggtgcatgttggggtgttgttggtggggggtggggggagaaattaatttgtcactcatcctccagagttgcccaagcattgattcttatc

SEQ ID NO: 430605 - DNA, 201 bp, Homo sapiens
ccgccacacacacacacacacacacacacacacacacacacacacggccgattctggaacccccgcctgtttccccaaaaaactcgccctccaagggattytggtcattcttctcggtccctactcccaaggcaggggagtcaccgggtcttgctagggccccttctctcttaccgtcccctccacctcacctccaattcc

SEQ ID NO: 430606 - DNA, 201 bp, Homo sapiens
agaggcaggcggaggttgaagaaaggaacctgggatgaggggtgctgggtataagcagagagggatgggttcctgctccaagggaccctttgcctttcttytgccctttcctaggcccaggcctgggtttgtacttccacctccaccacatctgccagaccttaataaaggcccccacttctcccattagttctcctgtgt

SEQ ID NO: 430607 - DNA, 201 bp, Homo sapiens
cagaccttctctctccccataggtggctggtgagcgttacgtgtacaagtttgtgtgtgagcccgaggccctcttctctttggccttcccggacaatcagygtccagctctcaaggctgagtttgaccggcctgtcagtgaggaggacacagtccctttgtcccacttggatgagagccccgcctacctcccagagctggc

SEQ ID NO: 430608 - DNA, 201 bp, Homo sapiens
ccggaatgcgtcagccacccctgagttctgcaccaccctttcccttgggacccttcttgcctagtaggagggagggaaatgttggtcactctgctcccatyaccccagcttcctgccaccttgggggatgttgcctctgaatggaccagagggcacagtggggagcctggctttgcatccctgggcaggtggacagatttg

SEQ ID NO: 430609 - DNA, 201 bp, Homo sapiens
cttctcggtccctactcccaaggcaggggagtcaccgggtcttgctagggccccttctctcttaccgtcccctccacctcacctccaattccactatttayccctcagatctcttccaggatctaagtcacttccaggagacgtggctcgctgaaggtgagtagttttgtgaccttttctattttgggaggctggacaggg

SEQ ID NO: 430610 - DNA, 201 bp, Homo sapiens
tgcccctggtgcccttggacagtcgcccctacagccctttccccgggcagagcaacggaatttcctgagatcctctggcacctcccagccccaccctggcmatgggtacctcggggaacataggtaaggagacagggaaacccactgctcatgggcccaggtgttttttcaattcctgagtgttctccataaagacttgag

SEQ ID NO: 430611 - DNA, 201 bp, Homo sapiens
tgtggttggcaggcaacctgggcaaagaacagtcaccaggaagcaggctggaaggaagaaattcttgaatgtggataggacttcctcctcccctgccctcragctccaccccaagccacttctcacatcaccccttcttcccccacagatgtcaccgggtgcgcatcaatgtacctccacacagagggcttctctgggccc

SEQ ID NO: 430612 - DNA, 201 bp, Homo sapiens
gtgttctccataaagacttgagctgtggggtggtagaggcagggggcagtggaatagaaagggagaaatactgacaccccaaccccctaccccccattccrgagcccactctaaaagcctaggagtaacaggctcgaggaaggattaatttaaagttctcttctcttccttctccatccaaccacatccagctccgtcttc

SEQ ID NO: 430613 - DNA, 201 bp, Homo sapiens
gagtagaggtccctggggagagggtatagggagtggaggatggcaggaagtgagtcataggatagagaatcacaagagagcagcttgttctctcctaaaamacagtggggtttgatcttaaagaccaaggcaataactggaatgaaaaccttggttgaaatctggggcttgacatgttcttgctgtgtgaccttagagcag

SEQ ID NO: 430614 - DNA, 201 bp, Homo sapiens
ctctgggccagtttacttttgtctgccagtttttattaattttagaaattgctagtcactaagagccagaacagattcactaacaatttataacagactaycatttgtaaagtatgttatgtctagtgaaaactatataccaaatatttcagaaaggtattgtatatgattgcattatgaatgaattagaaaaatatgggc

SEQ ID NO: 430615 - DNA, 201 bp, Homo sapiens
ccgtccctgccatttaccaagaatgtgatcttgggcaagctgtctttgcttttctcatttgtgaaatgggaataatagtagtatctacttgtaaatggttrtgagaactaaataagctagtataaatagagtgcttgtgacagtgcctggcacacagtatgcattcttttacatgtttctattgttgttaatttaaataat

SEQ ID NO: 430616 - DNA, 201 bp, Homo sapiens
agtcagtcacacaggaccacatattttatgattccatttatacagaatgttaataggtaaacccacagagacagaaaacattatgtggttgcttggggctgggacagatgaggggaaagctggggaaatagagatggcccacggatgcaggatttccttttagggtaataaaaatgttctaaagttgattgtgatagttgc

SEQ ID NO: 430617 - DNA, 201 bp, Homo sapiens
acatgcagaaatatgttagattgtagtttactttcattattattatgatactttatttgaaactctaaaagttgggtatgttagttgaaattcccccttgrttatttttttttaaagtaaacctagaagtcattgcttctagatagccagttttcctcccaaaaggcttaattgtctttaaagctgaaaagagaccatttg

SEQ ID NO: 430618 - DNA, 201 bp, Homo sapiens
tttatatctacaaaccaaggtcctgaggggcataagggaaaataagattgtgcttgacaatgtgggtttctagatggtggtaaacatcccttgttttcatraagttttttgtgcagtgaatcagtctaaattttaaaatgaaatattgacataattattccagaagttgcttgatagatttgactatgatgatgagccaga

SEQ ID NO: 430619 - DNA, 201 bp, Homo sapiens
ttgttataataagatgctttgaaactgtttcccccgtttttctggtgttattttataatttggcttggccacttgaacctatagataggcaccagaatgtkctatgctgacctccgttaacagtaaacattggtcattttagtcctggaaaacaaatctttactgataaaaggtaatgggaaagtaaagttcagtttgttt

SEQ ID NO: 430620 - DNA, 201 bp, Homo sapiens
cccttcaggaatcactttccttttgaagactcatctcaactaaattctcttgttataataagatgctttgaaactgtttcccccgtttttctggtgttatwttataatttggcttggccacttgaacctatagataggcaccagaatgtgctatgctgacctccgttaacagtaaacattggtcattttagtcctggaaaa

SEQ ID NO: 430621 - DNA, 201 bp, Homo sapiens
gactggcaaatcccttgagaccaggagttcgaaaccatcctggctaacatggcaaaatcccatctgtaccaaaaagaaaaagctttgtaaattttctctaycttaggagtatttcatattgacaatgccagatttatcttgttttcataccttcctctaagcaagtggaaaagtggttaaatgtttaggtttcaaaaggtt

SEQ ID NO: 430622 - DNA, 201 bp, Homo sapiens
gatcgcgccattgcactccagcctgggcaatgagagtgaaactccatctcaaaaaaatatatatgtgtgtgtgtgtgtgtgtgtgtgtgtgtgtgtgtgtrtgtatatatgtgtatatatgtgtatatatgtgtatatgtgtgtgtgtgtgtgtgtgtgtgtgtgtatatatatatatatatggcagcagtttcccaaaaa

SEQ ID NO: 430623 - DNA, 201 bp, Homo sapiens
gtgtgtgtgtgtgtgtgtatatatgtgtatatatgtgtatatatgtgtatatgtgtgtgtgtgtgtgtgtgtgtgtgtgtatatatatatatatatggcascagtttcccaaaaatttttttttttttgcacagtgtatgttgttcattttatccacagggcttcagttattgtaaggatttgtggggggaggggtgtttt

SEQ ID NO: 430624 - DNA, 201 bp, Homo sapiens
agaaatattgcttgagagatttaagttttaaaaagatggcttagattagtatatagtcttctaattcttattgcctcggcaactttatttcaaaaagtagraaaaagcatactttagaaattgtagactctgggccagtttacttttgtctgccagtttttattaattttagaaattgctagtcactaagagccagaacag

SEQ ID NO: 430625 - DNA, 201 bp, Homo sapiens
atcaaatagcagaaaatcacttctagacttgctaaataggttgaaaggtctgttagaaaccaacacaaagtcaatgtgaagatctagttttgatgggaatyctggtgaaagcagcctgaagatttcagatgattacaaattggagttaatgaattaagccctattttttttaggtaataaataatgcccccttctccaaag

SEQ ID NO: 430626 - DNA, 201 bp, Homo sapiens
ctttgaatctgttgtctactctgtgtataatacttatgtgtatctaaacttgattgaaaaacatgaagtttttttctgacatggcagtgcttcttccctgccccccccaccccacccccgctccggtttgcccatgagaaatttattaatggtttgaaggaacctacacattattgaaaggtgactagcagttattttggg

SEQ ID NO: 430627 - DNA, 201 bp, Homo sapiens
attttaaaaatgggagaatcaggccaggcacagtggctcacgcctgtaatcccagcactttgggaggccgaggtgggtggatcaactgaggtcaggagttygagaccagcctgaccaacatggtgaaacccccgtctctactaaaaatacaaacattagccaggcatggtggcaggcgcctgtaatcccagctactcggga

SEQ ID NO: 430628 - DNA, 201 bp, Homo sapiens
gttattccagaaagaaagagccaataatagatgttcttccccaacatatagagatactaaagtttaagtggtattcattagcaatcagactacagtatttrattccttatatatacagttggctttacaacatactatataaaagtagaaaaacattacagatatagtagctgactataagtagataggaggaattatact

SEQ ID NO: 430629 - DNA, 201 bp, Homo sapiens
tcaggccaggcacagtggctcacgcctgtaatcccagcactttgggaggccgaggtgggtggatcaactgaggtcaggagtttgagaccagcctgaccaamatggtgaaacccccgtctctactaaaaatacaaacattagccaggcatggtggcaggcgcctgtaatcccagctactcgggaggctgaggcaggagagtc

SEQ ID NO: 430630 - DNA, 201 bp, Homo sapiens
ccaggctggagtgtagtggcaccatctcggctcactgcaaccttcgcctcctgagttcaagagattctcatgcctcagcctcccaagtagctgggactacwggcacatgccaccacacccagttaatttttgtatttttagtagagacagggtttcaccatgttggccaggccggtctcgaactcctgacctcaggtgatc

SEQ ID NO: 430631 - DNA, 201 bp, Homo sapiens
tgtagagatctgctgaacaaccttgtacctatagttaacaattctgtattgtacacttaaaaattggctaagtgagtagatctcatgttaagtgttcttaycacagtaaagtaaaatttttaaaaaataatatgaaaggcgcatcatctttaaagaagatatcgttggaaagatgtgcttgtgtagttgagtaaggaagaa

SEQ ID NO: 430632 - DNA, 201 bp, Homo sapiens
gtttcttttctaattgcctttcagttagtgagcgttttattctcaaagataatttttttattacattggtaaatgaagtaatacaatgaagaattgcagcygtatttagagaatccttttattaaaatgaaatcctgtgttaatatcttagtgttttctctgttttctgtatcttatggaaaaattatattttctgcttaa

SEQ ID NO: 430633 - DNA, 201 bp, Homo sapiens
aggtaatgataaaataaagcaatttgagaaatctttttgaaattttgaaaatatttattacttttaaacatgagaagtcaacttgtgaattagttcaggcytaaatcaaagagccctaaccagcctttgctgaaggtacatgataagcgtgcatttgcattgtaacatattgtttcaaagcagtgtggttttttggtgggg

SEQ ID NO: 430634 - DNA, 201 bp, Homo sapiens
gctgttagagaaacagactctagaagttggtaagagtggaaaggagaccggttctgatgctgttgcagcagatgagatgggagctagcccacgttgggctsgtgcaatggaggtgataagtggttagagtctgaagatattttgaagatagagccttcagaattgccatattacttaaatacggaatgcgaaaaagagtca

SEQ ID NO: 430635 - DNA, 201 bp, Homo sapiens
gctgacagccatgccgattgcctcttgggctcttccttcatttcactaccccttcgccacccctttggcagagctaaccttcttcttgggtatcacggcaktggggagggtgtgtgctgggtgcctggccaccaaagctcttcctgctgccctagctgctaagacccccctcaccaccccggccccgtttgtattttccaa

SEQ ID NO: 430636 - DNA, 201 bp, Homo sapiens
atcatctttgatacattccaataaaatggctttgttttctaagtaacagttgcgcagcctgaggtaccactttcccactcactctcagtttacttggctgragtttatctgttgtactttttacccacaacttcaatactgtgatcaagggcgatgtgacttagatcttttacatctttaagcaggcttactcttgcctgc

SEQ ID NO: 430637 - DNA, 201 bp, Homo sapiens
tttgttttagagtgagaaaaatataccatgcataaatggaaaataaaacagatatagcaatgagcagtataattgatttttaattaagagaaacaaaagtyggggattggtgtatgtgagagggggtaggagttagagaccaagacatttattaagcactgattattttagatgctttcatttcatgctattaacagtttt

SEQ ID NO: 430638 - DNA, 201 bp, Homo sapiens
cacagctaactaaagcgggtgggagaagcagacagtttggctccaggacctgtgatcttagccattgtgtaaattgccaagtagcctgtcttaaagctgtrttgctgaaaggaccatggaacattttaaaatgtattacatgatgtcagaacaccaataaacactggtgaaatatagtgtgaaattgctgtcataaagtga

SEQ ID NO: 430639 - DNA, 201 bp, Homo sapiens
cagatgattcctcccaggggttgtgcctatattgttatggttcataggcaagatgcctatcgtgccctgcagaaactgagccgaggaaactataaagtgamccagaaatccataaaggtacagtcttacatgttataattaattttttttttaaataggcagaaggggaaaaatatgtggcatataaaaactaatttgggt

SEQ ID NO: 430640 - DNA, 201 bp, Homo sapiens
ccatctctactaaaaatgcaaaaatttgctgggtgtggtggtgcacgtctgtaatcccagctactcaggaggctgaggcatgagaatcgcttgaaaccggkaggcagaggttgcagtgagccaagatcccaccactgcactccagcatgggagacaaagtgagactgtctcaaaaaaaaaaaaaaagcaacaaacaaatgg

SEQ ID NO: 430641 - DNA, 201 bp, Homo sapiens
aactgtctactcaaaagtgaaattgtttgcaggactaggtactgttgtcacttcttgttttctattcttcattaataagcacattgaaaggagaaaatacrtctgcttttcaactagaaaagccttcacaagagaagtaatgtaggaggaacagggaaaatgtagaagtgataaacaagggaacaacacacttagaaatga

SEQ ID NO: 430642 - DNA, 201 bp, Homo sapiens
ccatgagccaaaagaatgtaggcaccctgtagaagcaagattagacaagaaatagattcttccctagagcctttacaaggaatgtcgccttgctgatgctrgtgagattctgacctcaaaagtgtaatttgtgttgctttaagccagtaaatttgtggtaatttcttactacagaaataggaaactaatacaaaagccaat

SEQ ID NO: 430643 - DNA, 201 bp, Homo sapiens
actactgttatccccattttacagatggaggaattctcataggtagcaagtggtagagccaagatttctcgggcagttattattgagcctgtgcacttacygttattctaacaaattattgtggaaaatcaatcaaaatcttagatcaccacaacattatatacttctcttgagagattcctcaaacaatattggtgacca

SEQ ID NO: 430644 - DNA, 201 bp, Homo sapiens
attaatacatttggatttattttttatgtacatgtacatttataaaagtaaaaatggacataatactggttgttaggctgcttttcccactgagtttatcrtaaacagttgcaaaatactcctctgcggttgttacagtgatgcacacagccattttctgagttgttagacctaattttttttttttttgcataaattcct

SEQ ID NO: 430645 - DNA, 201 bp, Homo sapiens
aaaacagtgtattgacctttagtcttgagaaattgaaatttgatcagtattttgatcatctaaataaatcatgctgacactttcttcctaagtcaccacaytcagtattgtagggtcatttaaagcatcaaaaaattgaccctattttagtaatttatatcgcctctaacttgttgcttgggtaggcacatcactttatac

SEQ ID NO: 430646 - DNA, 201 bp, Homo sapiens
attgaatacttgtcctctgcggggtgacatagtacgagtcattccatatacaaaaactcatttagttctaactgaaactgatacctatcaagcagatatcrgtatatcctttttacaaatgaggacattatggcttagagaaattaatttgcccagagtcatctgcatggccagacccagattcaaaaccaaatctttctc

SEQ ID NO: 430647 - DNA, 201 bp, Homo sapiens
ctgggtgtggtggctcatgcctgtaatcccagctactcaggaggcaggagaatcacttgaacctgggaggtggaggttgcgaggagccgagattgtgccgktgcactccagcccgggcaacagagcgagattccatctcaaaaaaaaaaaaaaaaaaagaattgctcttgcttgatgttaataaaagaacaaaatcaaagt

SEQ ID NO: 430648 - DNA, 201 bp, Homo sapiens
ggtgggtgggttgcttggccccaggaattcaaagctgcagtaagccatgattgtgccactagcctgggcaacagaatgagatcctgtctctaaaaaacaarcaacaacaaaaaagaggatttgagttaggtcagtgtctcagctgctctatcgggcctataggtttcttaggcatgtttaagaagctgccactaaggatat

SEQ ID NO: 430649 - DNA, 201 bp, Homo sapiens
tttgtctaaggatttatacttctgctgccttttttcagcctcatttccacttttgcaggagcaggtttagctgacagccatgccgattgcctcttgggctyttccttcatttcactaccccttcgccacccctttggcagagctaaccttcttcttgggtatcacggcagtggggagggtgtgtgctgggtgcctggccac

SEQ ID NO: 430650 - DNA, 201 bp, Homo sapiens
ccacttttgcaggagcaggtttagctgacagccatgccgattgcctcttgggctcttccttcatttcactaccccttcgccacccctttggcagagctaaccttcttcttgggtatcacggcagtggggagggtgtgtgctgggtgcctggccaccaaagctcttcctgctgccctagctgctaagacccccctcaccacc

SEQ ID NO: 430651 - DNA, 201 bp, Homo sapiens
tgaaattttgaaaatatttattacttttaaacatgagaagtcaacttgtgaattagttcaggcctaaatcaaagagccctaaccagcctttgctgaaggtrcatgataagcgtgcatttgcattgtaacatattgtttcaaagcagtgtggttttttggtgggggtagggggatagagtctcactgcgccacccaggctgg

SEQ ID NO: 430652 - DNA, 201 bp, Homo sapiens
ggcgcatcatctttaaagaagatatcgttggaaagatgtgcttgtgtagttgagtaaggaagaaattgtgcagtaggaaaagacagcgatcatctgattgtggttattccagaaagaaagagccaataatagatgttcttccccaacatatagagatactaaagtttaagtggtattcattagcaatcagactacagtatt

SEQ ID NO: 430653 - DNA, 201 bp, Homo sapiens
gcaaatatttattgtatatttgtgtttctcatgcgtaacagagtaaaatagttcgtgtgctgaacctttggcaaaaaaatggagtgttcaaaattgaaatyattcaacctcttttggacatggcagcgggaaccagtaatgcagccccagtagcagaaaatgttaccaataatgaaggtatggtcagatgtatctgtgagc

SEQ ID NO: 430654 - DNA, 201 bp, Homo sapiens
tgtagccctagctacccaggatgctgaggtgggtgggttgcttggccccaggaattcaaagctgcagtaagccatgattgtgccactagcctgggcaacaraatgagatcctgtctctaaaaaacaagcaacaacaaaaaagaggatttgagttaggtcagtgtctcagctgctctatcgggcctataggtttcttaggca

SEQ ID NO: 430655 - DNA, 201 bp, Homo sapiens
gaggcaggagagtcacttaaaccggggaggcggaggttgcagtgagccgagatcgcgccattgcactccagcctgggggacaatagcaaggctttgtctcaaaaaaaaaaaaaaaaaagggagaatcaggccagacatggtggctctcgcctgtaatgccagcgctttgggaggctgaggtgggcagatcacacaaggcca

SEQ ID NO: 430656 - DNA, 201 bp, Homo sapiens
cacagtgtaaaagtaacagttctgagatttgacacagtcctttgaagagcccatctgagtctagtccacagccccacatggctgctgtgaagtttttgagyagtgagtccttatctaatggaccatttatgtggggagaagactcagtgaacagcttttatacgtctgaagcatggtagcaagtgataactatcaaaataa

SEQ ID NO: 430657 - DNA, 201 bp, Homo sapiens
ttgagttaggtcagtgtctcagctgctctatcgggcctataggtttcttaggcatgtttaagaagctgccactaaggatatggatatgctgaacagcttaragcttctcattgaaatttaaccctaacagctccactcttgtctgttttatttggtttatggctttataaaacatcatttgacttttcagttttcactgca

SEQ ID NO: 430658 - DNA, 201 bp, Homo sapiens
ggcccggagcagccgccgccgcagcgcgaacatggacgccgtcaacgccttcaaccaggaggtaaggggtgtttggggcaggggggtgccgggcctgctgygggagccggggctcgtttctcccgccgccggaggtttaaagctttggtccgggtggggacgcttcctgccccggttccggggcggcggggcctgcgcgga

SEQ ID NO: 430659 - DNA, 201 bp, Homo sapiens
agtatattcttgaggaagcagtatatggacacttttctatatgcattatggtgattgaataagacagtctttttgtacattttatgctgactgaaaatgtrtacccattttcatgtgcacaaagttccagacatttttaggctagggaaatgagtattttagaaaaacatgtatgctgctaaattacttgtgaaatacacc

SEQ ID NO: 430660 - DNA, 201 bp, Homo sapiens
attttggtaacattggtatattaattagtattatgtttctgtcaaaccacagaaaatatagaggtgggtaatagttaaatttgcgttagaagaggccttamcaggatctgttgagagcttaggagagacatgtctacatttctgtgttaatattaagtgtaattaatactgtgctgctgtgattttgagaactacaagaga

SEQ ID NO: 430661 - DNA, 201 bp, Homo sapiens
gctagaaagctggcgttgtcctccagttccctaccctcgcaccccctcccgaggtagttaatcctcggctcccttctacgaggacatttacatgtgaaaayctctccaaactgggaacaaagctgcctgcggccttaaagttctctagttgtttctctgatcattccaggtgttgcttttggagtgtagagtccatacatc

SEQ ID NO: 430662 - DNA, 201 bp, Homo sapiens
agccactgcacctggcctggtattgggttttaatccagtgcttcatgataattaccttggaaagttttagatgtccagagaagcaatctaaagtaaacgtrtaagacaatgaattgcagttatttgtgggcataaatatttaaaatgccagattgacagtgagattgcaggggggaaaatcacagaatgcatgggcatgac

SEQ ID NO: 430663 - DNA, 201 bp, Homo sapiens
actatattttcaaagttccattacagctttatcagccagcaaaagtggaaagatcacagtaatgctgtaatcagagaatgtttttaattgctgcagaaaakactttactaagaagataggtaacagtagtagcagtgtatctcaactgtgaaaattagctacttaaattacaaggatgtaattttatatagtaccagacgg

SEQ ID NO: 430664 - DNA, 201 bp, Homo sapiens
ttttttttttaaataggcagaaggggaaaaatatgtggcatataaaaactaatttgggtcttcgaaatgactttcaacactgaggcatttcatgtgcatctttttttttttttttttttaaagaatatttcctaaaagaactccagtgtttcagcataaaattgtaaatgttacgtgcatggtagaatttgttttgttttg

SEQ ID NO: 430665 - DNA, 201 bp, Homo sapiens
caaagtgagaattaaagggtaaccagttctgtagtgagaataaggctttgaatgagatccaagcctagctggtccagattgctcccttggtgcccgagtcrgaatggatagaatgatagagaataataccctcaagacttacgaccttgctttgttttctttttatattttcactaatggtgaaatagattgcctgggcct

SEQ ID NO: 430666 - DNA, 201 bp, Homo sapiens
agcaatctaaagtaaacgtgtaagacaatgaattgcagttatttgtgggcataaatatttaaaatgccagattgacagtgagattgcaggggggaaaatcrcagaatgcatgggcatgacctggagattgctagacagaggaacaggaggagcataggatggcatggcagtatagaatgttttttgttgtttttgtttcgt

SEQ ID NO: 430667 - DNA, 201 bp, Homo sapiens
cactgcgccacccaggctggaatgcagtggtgcgatctcagctcactgcaacctcaccctcccgggttcaagtgattctcatgcctgagccacctgagtasctgagattacaggtgtgcgccaccacgcccagcctcaaagcagttttttaaattttcatttattccttatcataaaccaactatttagtttcatttttat

SEQ ID NO: 430668 - DNA, 201 bp, Homo sapiens
ttgccaccacacctggctaatttttgtatttttagtagagacggggcttcaccatgctggccaggctcgtatcaaactcctggcctcaagtgatctgcctsccttggcctcccaaagtgctgggattacaggtgtgagccaccgtgcctggcccataaatgtttatacaaccaaaataaatgtatattgtcttacatctat

SEQ ID NO: 430669 - DNA, 201 bp, Homo sapiens
cagaacaccaataaacactggtgaaatatagtgtgaaattgctgtcataaagtgaagagcgcaactttgatttctttctttctttcctttttttttttttkctttttttttttttgaagaccaagtcttgctctgtcgcccaggctggagtgcagtggtgcaatctcggctcactgcaacctccacctcccgagttcaagc

SEQ ID NO: 430670 - DNA, 201 bp, Homo sapiens
gtgaaagctcctcaaaacaatagggatgtttttaataaactctattttcgtaacaaactttaatgtgtgctattcttcctacactgcattaaggtggaaarggattgttcaccgtcaaagtttgagctgttaatactgtattggagtctaaattagacttatttgatgaaaatagacattttatgtagttattctcacttt

SEQ ID NO: 430671 - DNA, 201 bp, Homo sapiens
ctgtctggaccaattattatctatctgaaacccctggacttgggtagcgttctttgtgggctagcaaagaaatcatctttgatacattccaataaaatggytttgttttctaagtaacagttgcgcagcctgaggtaccactttcccactcactctcagtttacttggctggagtttatctgttgtactttttacccacaa

SEQ ID NO: 430672 - DNA, 201 bp, Homo sapiens
tagttgagttgtactactgaatttggagggaataaaaccaacttttagagattttgattcttttagtaatactgataatctgaaaatataaaattacttgrtgcgcaataattattacttgattttaaagaaatctcacacacccaaatagctacagtggtggtagtttcataaaagctaaaggtaacattctacagttgt

SEQ ID NO: 430673 - DNA, 201 bp, Homo sapiens
tttttgtttcacctatattccgggggagttaacaccatcactcttctgatcttgcgttgacagctgcatccgctcagttaaggcagagagctgtgttcctwcatcgcttacaccctgtccttcctgtccactaaatgtcttcagtgtgtcctccatctctagcacctctcacttcagtctcttgtcactatcactgtcact

SEQ ID NO: 430674 - DNA, 201 bp, Homo sapiens
cttcctacttgtaatttttgttaccaaaggttttaaagcaagagtaacaagttggtggcctgtggctaaattactaggcagtggtgtgctgcgctgcagtcctggcatggcttcagtagacatttgagttgatgattccagatttggacacctcaggaaattgtggggacagaattggtttgtgaattatatttaaacaag

SEQ ID NO: 430675 - DNA, 201 bp, Homo sapiens
aaaatataatcttaatgtataatacaatctgaaagatgctttttctcattctttgaaaattggctccttattcttccattttccgcagctctcagaacatrgtgccttctataagaataacccaggagtgttttcagaataaataggcctaaatgttattggtgaatctatgcaaaggaaataacatgttggttgtactgt

SEQ ID NO: 430676 - DNA, 201 bp, Homo sapiens
acccattttcatgtgcacaaagttccagacatttttaggctagggaaatgagtattttagaaaaacatgtatgctgctaaattacttgtgaaatacaccartagaaaatagaaagcactgtacttacaattgaggaaggaaaacagaatgaaaacactgtgtgttttccaaactggcatctgtgtaaaaattgtttatatc

SEQ ID NO: 430677 - DNA, 201 bp, Homo sapiens
gtggtggctcacacctgtaatcccagcactttgggaggccgaggcgggcagatgacaaagtcaagagatcgagaccattctggctaacacggtgaaacccygtctctactaaaaatacaaaaaattagctgggtgtggtggcgggcgcctgtaatcccagctacttgggaggctgaggcaggagaatggtgtgaacccggg

SEQ ID NO: 430678 - DNA, 201 bp, Homo sapiens
cagtcacacaggaccacatattttatgattccatttatacagaatgttaataggtaaacccacagagacagaaaacattatgtggttgcttggggctgggacagatgaggggaaagctggggaaatagagatggcccacggatgcaggatttccttttagggtaataaaaatgttctaaagttgattgtgatagttgccca

SEQ ID NO: 430679 - DNA, 201 bp, Homo sapiens
aagaaatctcacacacccaaatagctacagtggtggtagtttcataaaagctaaaggtaacattctacagttgttggtcacttaggagagaaggaatattrcaaatgatagcaattcagttcattctctttactgtataagtgtttgtgttttacttttcaaaaacttttgtataacatgtatctctaatatgtacaacct

SEQ ID NO: 430680 - DNA, 201 bp, Homo sapiens
gaatgagatcctgtctctaaaaaacaagcaacaacaaaaaagaggatttgagttaggtcagtgtctcagctgctctatcgggcctataggtttcttaggcrtgtttaagaagctgccactaaggatatggatatgctgaacagcttagagcttctcattgaaatttaaccctaacagctccactcttgtctgttttatttg

SEQ ID NO: 430681 - DNA, 201 bp, Homo sapiens
cctttttgtatagcaaaattattttcagaaataatcatgaaatgagtaatggaaatggccagaaagaaaacttgaactgtatgtgcgcgcgcgcgcgcgcrcacacacacacacacacacatcatataaatcataccagacttttaaattgcattaatatatgttttttgaaatagtggaaaaacttatctgcatactgat

SEQ ID NO: 430682 - DNA, 201 bp, Homo sapiens
agtcacacaggaccacatattttatgattccatttatacagaatgttaataggtaaacccacagagacagaaaacattatgtggttgcttggggctgggacagatgaggggaaagctggggaaatagagatggcccacggatgcaggatttccttttagggtaataaaaatgttctaaagttgattgtgatagttgcccaa

SEQ ID NO: 430683 - DNA, 201 bp, Homo sapiens
ataattattacttgattttaaagaaatctcacacacccaaatagctacagtggtggtagtttcataaaagctaaaggtaacattctacagttgttggtcayttaggagagaaggaatattacaaatgatagcaattcagttcattctctttactgtataagtgtttgtgttttacttttcaaaaacttttgtataacatgt

SEQ ID NO: 430684 - DNA, 201 bp, Homo sapiens
gctgggtgtggtggctcatgcctgtaatcccagctactcaggaggcaggagaatcacttgaacctgggaggtggaggttgcgaggagccgagattgtgcckttgcactccagcccgggcaacagagcgagattccatctcaaaaaaaaaaaaaaaaaaagaattgctcttgcttgatgttaataaaagaacaaaatcaaag

SEQ ID NO: 430685 - DNA, 201 bp, Homo sapiens
gtcacacaggaccacatattttatgattccatttatacagaatgttaataggtaaacccacagagacagaaaacattatgtggttgcttggggctgggacagatgaggggaaagctggggaaatagagatggcccacggatgcaggatttccttttagggtaataaaaatgttctaaagttgattgtgatagttgcccaat

SEQ ID NO: 430686 - DNA, 201 bp, Homo sapiens
ggcacttagtgagtggtgggtgcttatattacaggtaagaaatgtcatagatgttatttataagacctagagaagaatatcttttgcaattctaaaattayattacttcatctgtgattcgttttaaactgttatattggcagacagaggaagcaaacttttttttttttttgagatgtgtctcactctgtcgccaggttg

SEQ ID NO: 430687 - DNA, 201 bp, Homo sapiens
ctttgggaggccaaggcaggcagatcacctgaggtcaggagttcgagaccagcctgaccaacatggagaaaccctgtctctactaaaaatacaaaattagycgggcatggtggcacatgcctgtaatcccagctactcgggaggctgaggcaggagactcgcttagacccaggaggcggaggttgtggtgcgctgagatca

SEQ ID NO: 430688 - DNA, 201 bp, Homo sapiens
aatacatcacatgcttgttacagtagaccatcttttaaattaacaaattgttgtatttgaagtggtattgccaaatataattaacacttgaatcccctaaytggaagttaatatcttgagagtattacagtgttctagtcctgtgagcccatagtatttttcaaaggtatatgcatatgcctgtttgctttcataatctga

SEQ ID NO: 430689 - DNA, 201 bp, Homo sapiens
gctttaccttgctatatgccttttcaaaagctgctagtaatgtcttgatagtaacgtccttccttaactcactggccttgtgcattttcctttgagatccrattcagacacccccgatgactgccactcagattcacacaccagctttatgagtcccacctctataccaccatgctagcttgtgccatctcctacagcaat

SEQ ID NO: 430690 - DNA, 201 bp, Homo sapiens
gaggaccttgaacatgtgtcctcatccaggacatgagaatgtggattgactaggaaaatgttagattactggccagaatgaagggtccacttgggttgtarttacagaaatttgaaatgagagcagtcagcatactccatgtccaggtggagattaggcagaagagttgcatttaaaaccaatgttggggattttccaggc

SEQ ID NO: 430691 - DNA, 201 bp, Homo sapiens
atcatcaggcattagttagattctcataagaactgcacaagctagatccctgacatgtgcatttcacgacagggttcatgctcctatgacaatctaatgcygccgctgatctgacagaaggcagagctcaggaggtggtgcttgcttgcccactgctgtgtggcccgtttcctaacaggccatagactggtaatggtccgt

SEQ ID NO: 430692 - DNA, 201 bp, Homo sapiens
tggtattaccattactattttatttcccagtttattctggcctctacctgtattagatactttaaaaatgtctttgcaattgcttgccttaggttgttacyaggcctcacactgggtttgtgacagagtggcaaactatgaaatttgaagattgtgggttgaattttattttgctttaagcgccacagaacacagctgaaa

SEQ ID NO: 430693 - DNA, 201 bp, Homo sapiens
ggtattgatgaaagagatgagtggttgatacatctttttcttcatgtgggaaaagttcatgtttagttcatgcaaagtgccacagtgacactcattctgtrgagatcaaatcaaaacggtggaactgcaacaaagaacagaaaaggaggttgaaagaaaacatcctttctcaaagttcaagtcctcctaggtttatgctgg

SEQ ID NO: 430694 - DNA, 201 bp, Homo sapiens
ctttcctggctttggcattcctcatgtgttagagttgttttgagggttaaatgagataatatatgttaagtactcagtatgttttttgtcacgtcataagrgccgaaaaatgaaaaaccctttgaaaattataagaacttgacccatagttctatgtgtgatctactggatttttcttgtcttccttcctcagtttctcac

SEQ ID NO: 430695 - DNA, 201 bp, Homo sapiens
gatcccagtgttacacgttgtactataaattatcggactgcctgggtattacgttagaaggttgcgtgtgtgtgtgtgtgtgtctgtggtttttttttttyccaaccatcccattgaatttttcaaaagggtaaaagaatcaaggttaacatttgcaacctaagagctttttgttgtgtttgaggacttcagtgcagccta

SEQ ID NO: 430696 - DNA, 201 bp, Homo sapiens
aatattagctctggcttaggtttccttaaaatttactctaagcttttaatgaccagagaagtagttcttactgttgctcatttctttctttctttctttcttttttttttttttgacagtttcagtaccagtaagtatttattcgttgtattttcccaggggaaggagaagggaagggaaaagagtcagtttgtatgttac

SEQ ID NO: 430697 - DNA, 201 bp, Homo sapiens
ttttttagtagagacagggtttcaccatgttggcaggatggtcttgatctgacctcgtgatccgcccgcattggcctcccaaagtcctgggattacaggcrtgagccactgcacccggccgagaataaggtaaactttaacttggcactgtaaaggtcaattttcaggcagtcttagagtttagcaatttctctagtgtat

SEQ ID NO: 430698 - DNA, 201 bp, Homo sapiens
aagtcttatatattatagtaattaagtggatataatttccttaacaaaggcaccttgaaaagttattggcacatgagattttgtctggtcttttttttttyttttgataatttcaaagtctcttcacatgtgttctcttccactttaagttttccttaacaattcatcatatgaatagccagcccttttagagaataaggt

SEQ ID NO: 430699 - DNA, 201 bp, Homo sapiens
gcaagtcatgagagaatcatatatagccaattatcacaaagatgttgaacccacccagacctaaactagcaaagatgctagtaagatgaaaatgcaaattmagatgaattatatttttagtagcaaaaccaaaaaagattatcatcaggttgtaaggagttaatacaattacttgtgacacagtaattttacttttaggaa

SEQ ID NO: 430700 - DNA, 201 bp, Homo sapiens
tagtaaaaaaatctgcaatgtgcattacatatgtataacagacaaaagagctcttatatactaatagttacaaaatgccaacacaattgaaaaatggccaraggctctacgtaagcaagtcatgagagaatcatatatagccaattatcacaaagatgttgaacccacccagacctaaactagcaaagatgctagtaagat

SEQ ID NO: 430701 - DNA, 201 bp, Homo sapiens
gaaagacatcaatcttggctcttgtttgaaaccaatagctacaatggcaaaccatcacgtttcttgattcagggcctaggaaagctgactttatatgcacttttttttttttttttttttggtatataaactatttattaacagacaaggcctacagacttacttcttcttagacacacccacgatgcggccacggcagcc

SEQ ID NO: 430702 - DNA, 201 bp, Homo sapiens
aaagacatcaatcttggctcttgtttgaaaccaatagctacaatggcaaaccatcacgtttcttgattcagggcctaggaaagctgactttatatgcacttttttttttttttttttttggtatataaactatttattaacagacaaggcctacagacttacttcttcttagacacacccacgatgcggccacggcagcct

SEQ ID NO: 430703 - DNA, 201 bp, Homo sapiens
catcctttacatccttctgtctgttcaagaaccaggctggcatcttgtactagtgtggattctgcataatggtgatcacatgttccacctcatcctcagtragttctcccgccctcttggtgaggtcagtgtctgctttcctcaacaccacatgagcatatcttcggcccacacccttaacggcagtgatggcaaaggcca

SEQ ID NO: 430704 - DNA, 201 bp, Homo sapiens
aggagaatggcatgaactcgggagacggagcttgcagtgagccgagattgcgccactgcactccagcctaggcgacagagccagactccatctcaaaaaartatcacatagagatgagttatatgtactcgttcacattgtaaaatattaatatgtcaatatgagtgatggttaaaaaaggtaataaaacacttttagggt

SEQ ID NO: 430705 - DNA, 201 bp, Homo sapiens
catcttctctcctactgtttgctgctgttactccttctaggaagaaaaaaatattggctctagctccagttaaccttacccattgcctctgggtgccagcrgataactgaaaatccctgaacatttttacacagtagctaattaaagcatgagccaagcccagtatgtcttccttcccacctggtgttatggtagcttccc

SEQ ID NO: 430706 - DNA, 201 bp, Homo sapiens
agcttctcagtaaggcaccgcagtctggagcttggagaggctcccatgggtgcacagggggagggggtaaaggaggtttgaggtaccttgaacagtatggrggctgattcctctgggatgaaggcccaaaagaagagaaggtggccaacaaattattattattattattattactgtcccgcatgaaggaagtgctgggat

SEQ ID NO: 430707 - DNA, 201 bp, Homo sapiens
cttaacaacttccatcttcggtatcaattggtaatcactttccaagacctatgtttcttgtttgctaataccagcacttttccttaaccgttttctatttrcttttagcaaatcatgctgtaaaggcaaaatccaataattaaaacaaaaacacattagatcccaattagaaaaacaaaaacgatgccaacaaagcagtct

SEQ ID NO: 430708 - DNA, 201 bp, Homo sapiens
atggctctgtgcagctgtcctacatcagcttccaggtcagactgtccacctggcaccggtcccaggggctgggatgcagggcccagcgtagctgtgtctargccctgctgggtgggcccaagccaatctcctacccaggtcactctggggacaacctctgcttccctgtcccagtacctgcccgccccttctcctctgtca

SEQ ID NO: 430709 - DNA, 201 bp, Homo sapiens
gtcagtccagccattcccctggcttcaggaaggctactgatgatggggaggaaatgggactcagaattcggtggataaaggttcaggtgggctgcccaccscaggttccacatcaacctgtgctctgggaaccacatcgccttccacctgaacccccgttttgatgagaatgctgtggtccgcaacacccagatcgacaac

SEQ ID NO: 430710 - DNA, 201 bp, Homo sapiens
ggaccatgaccctgatcttccgccccttcctctctccctctccctccacctcccccaccccccagcaccaggagggcttcccactcccatcctgtcatatrgagacagatcctacctcagagggccctctcctcttgggagctttctgtctctcccttccttggggcaggaatttcgaaaggactacagggatgaagctga

SEQ ID NO: 430711 - DNA, 201 bp, Homo sapiens
gatgccaagggcagggaggccccgatctccctgaaccctccaaccaggggaatcaggaccatgaccctgatcttccgccccttcctctctccctctccctscacctcccccaccccccagcaccaggagggcttcccactcccatcctgtcatatagagacagatcctacctcagagggccctctcctcttgggagctttc

SEQ ID NO: 430712 - DNA, 201 bp, Homo sapiens
tgggagctacagaaagcaatgaggtctctatcaaacccagtctcctctctctcgagaggaaccagtggggataccctaccccccaaccccaaagccctgtrcacctgggggtaaaaatctgggtgccacgggctcaggaaggcttgcttgggagcaagagggaggtgggtgtgtccggggaggcatttctgagcacaagag

SEQ ID NO: 430713 - DNA, 201 bp, Homo sapiens
ccgttctcagctccagtggaaccaggtgtgtgtgtatatggatggaaacgtttcactccagcctcgtcccttagtaaaccactgtgcctgtgagcctgggytagttcaaacagcaacatccaagctcacgtgcctggctcaggggaggcccaatgcgtccctaacccatgccacagggcagcactccacaggcacaacctg

SEQ ID NO: 430714 - DNA, 201 bp, Homo sapiens
tcccacaccttctccctgcaggctgtccccttttctgggactattcaaggaggtctccaggacggacttcagatcactgtcaatgggaccgttctcagctscagtggaaccaggtgtgtgtgtatatggatggaaacgtttcactccagcctcgtcccttagtaaaccactgtgcctgtgagcctgggttagttcaaacag

SEQ ID NO: 430715 - DNA, 201 bp, Homo sapiens
aacttgaagaatgtgaaaatcagccaggagatagaactgtgctttaatgcgggttatagaacgacattggatatgaagcattttgggaataaactttgaarattggaagtaccagtttgtgaattttgctgagagagatgaaggtggggggtgggtgacagtggtgaagcatctcctatgtgccagtctcttttaccacag

SEQ ID NO: 430716 - DNA, 201 bp, Homo sapiens
atgccacagaagactatttgctttccctgggcctaggtttgctgtgaactttcagactggcttcagtggaaatgacattgccttccacttcaaccctcggyttgaagatggagggtacgtggtgtgcaacacgaggcagaacggaagctgggggcccgaggagaggaagacacacatgcctttccagaaggggatgccctt

SEQ ID NO: 430717 - DNA, 201 bp, Homo sapiens
tgggacagcagagattctggaagaagcagggtttatccagtggtggaagagacaagtcccctagagaccgggagggaaactggtccatctgtcaccaagtrgggagtacagtggccccagcacccggatgtgaggttcctggccctgcatcctgggtccccaggatgtcactattgatcacaggcttaagctcttctcctg

SEQ ID NO: 430718 - DNA, 201 bp, Homo sapiens
agcagtggcaagtaggctgaatttggctggtgggtgttttctgtttggcctgcacagtgtttcttttaacgttttattataggaaattcaaacatgcagarggaattgtaccatcaacaacacacacccatcactctgctccaacaatgatcaactcaggcctatcttgcttcatcctataccctccctcgcttgcttcct

SEQ ID NO: 430719 - DNA, 201 bp, Homo sapiens
ttttaacagaacccccgcacagtccctgttcagcctgccttctccacggtgccgttctcccagcctgtctgtttcccacccaggcccagggggcgcagacwaaaagtgagttcaacacagaggccctgggtggccgagcagacagtaggaaggaccgagggtctgagaggctggccccagccagcaggccactcagggcct

SEQ ID NO: 430720 - DNA, 201 bp, Homo sapiens
gggggctcccctgggttgggacaattaagcctcacttggtgacccatctggcagtcggagccacgcttcctccacatgccgacagtgggggaaggtcacgyggttcgctgtcctgctgaggagggctgagtgccatgagggcctggcttggaaacctcactcccacttcttgtctggcctcatctagcccagcctctttgg

SEQ ID NO: 430721 - DNA, 201 bp, Homo sapiens
ggaaatgacattgccttccacttcaaccctcggtttgaagatggagggtacgtggtgtgcaacacgaggcagaacggaagctgggggcccgaggagaggargacacacatgcctttccagaaggggatgccctttgacctctgcttcctggtgcagagctcagatttcaaggtgagcaagaatcccctccccacctctcac

SEQ ID NO: 430722 - DNA, 201 bp, Homo sapiens
gccgcatcttgcccacccaagagttccctgtctctgtccgctgggcacccagagctggggacctgggggtcaccctggattcttcactccctcttctttaygtctctccaaggcacgaacgtgtctccctcctgaagccaccgatgtggtccaggcctctgggattcctcaccatgacgacaggggtccagttccccaccc

SEQ ID NO: 430723 - DNA, 201 bp, Homo sapiens
agcagacagtaggaaggaccgagggtctgagaggctggccccagccagcaggccactcagggcctacaggccgcatcttgcccacccaagagttccctgtytctgtccgctgggcacccagagctggggacctgggggtcaccctggattcttcactccctcttctttacgtctctccaaggcacgaacgtgtctccctcc

SEQ ID NO: 430724 - DNA, 201 bp, Homo sapiens
aggcccagggggcgcagacaaaaagtgagttcaacacagaggccctgggtggccgagcagacagtaggaaggaccgagggtctgagaggctggccccagcmagcaggccactcagggcctacaggccgcatcttgcccacccaagagttccctgtctctgtccgctgggcacccagagctggggacctgggggtcaccctg

SEQ ID NO: 430725 - DNA, 201 bp, Homo sapiens
tgccttttgttttaacagaacccccgcacagtccctgttcagcctgccttctccacggtgccgttctcccagcctgtctgtttcccacccaggcccagggrgcgcagacaaaaagtgagttcaacacagaggccctgggtggccgagcagacagtaggaaggaccgagggtctgagaggctggccccagccagcaggccac

SEQ ID NO: 430726 - DNA, 201 bp, Homo sapiens
aacctgtgctctgggaaccacatcgccttccacctgaacccccgttttgatgagaatgctgtggtccgcaacacccagatcgacaactcctgggggtctgrggagcgaagtctgccccgaaaaatgcccttcgtccgtggccagagcttctcagtaaggcaccgcagtctggagcttggagaggctcccatgggtgcacag

SEQ ID NO: 430727 - DNA, 201 bp, Homo sapiens
ttggaaagcactgaagcccaggaatcgacccacaataggccttcaacaaataccacttctcaccttatgggtgaaatatggcactggaagtaatgctcttsgctgtgggagctacagaaagcaatgaggtctctatcaaacccagtctcctctctctcgagaggaaccagtggggataccctaccccccaaccccaaagcc

SEQ ID NO: 430728 - DNA, 201 bp, Homo sapiens
ccaagagttccctgtctctgtccgctgggcacccagagctggggacctgggggtcaccctggattcttcactccctcttctttacgtctctccaaggcacsaacgtgtctccctcctgaagccaccgatgtggtccaggcctctgggattcctcaccatgacgacaggggtccagttccccaccccctacacccaaccact

SEQ ID NO: 430729 - DNA, 201 bp, Homo sapiens
tctctccctcttgcccctgcctctgcctttcggcttctccttggctctattaatgcttctcctcactgcccggtgccttttgttttaacagaacccccgcrcagtccctgttcagcctgccttctccacggtgccgttctcccagcctgtctgtttcccacccaggcccagggggcgcagacaaaaagtgagttcaacaca

SEQ ID NO: 430730 - DNA, 201 bp, Homo sapiens
ctctcaccttgcaccgtgcaccaacccttcacccctcctggaaagcaggcctgatggcttcccactggcctccaccacctgaccagagtgttctcttcagrggactggctcctttcccagtgtccttaaaataaagaaatgaaaatgcttgttggcacattcatgtgggttgaccatggcttctttaattcatttggagac

SEQ ID NO: 430731 - DNA, 201 bp, Homo sapiens
acccctgcactgctcaccagagcctggctctttcccatcccatcttggcagggccctaacccccttgcctcatcgccctgcctgcctggtctctccctctygcccctgcctctgcctttcggcttctccttggctctattaatgcttctcctcactgcccggtgccttttgttttaacagaacccccgcacagtccctgtt

SEQ ID NO: 430732 - DNA, 201 bp, Homo sapiens
tgggtccttcctgggtggggaggcagggtggggagggtgggcagaggcagggtactgagggagggaagctgccatggcccacctcagcagaggccagggtygggcttgagtgccccctggtgacactgagtccagaatgaggctgcctacgttctggtctgcagagctcggctctgctttctaaactccagagagaaagaa

SEQ ID NO: 430733 - DNA, 201 bp, Homo sapiens
tcctggtgggaggtggcctcctcagcccctcctctctgacctttaacctcactctcaccttgcaccgtgcaccaacccttcacccctcctggaaagcaggyctgatggcttcccactggcctccaccacctgaccagagtgttctcttcagaggactggctcctttcccagtgtccttaaaataaagaaatgaaaatgctt

SEQ ID NO: 430734 - DNA, 201 bp, Homo sapiens
ctccttccctgactctctcccctgcgggtggtaggggagggaagagctggagggagaccgcacccctgcactgctcaccagagcctggctctttcccatcycatcttggcagggccctaacccccttgcctcatcgccctgcctgcctggtctctccctcttgcccctgcctctgcctttcggcttctccttggctctatt

SEQ ID NO: 430735 - DNA, 201 bp, Homo sapiens
ccgcatcttgcccacccaagagttccctgtctctgtccgctgggcacccagagctggggacctgggggtcaccctggattcttcactccctcttctttacrtctctccaaggcacgaacgtgtctccctcctgaagccaccgatgtggtccaggcctctgggattcctcaccatgacgacaggggtccagttccccacccc

SEQ ID NO: 430736 - DNA, 201 bp, Homo sapiens
gagagggtgggctgatgggtccttcctgggtggggaggcagggtggggagggtgggcagaggcagggtactgagggagggaagctgccatggcccacctcrgcagaggccagggtcgggcttgagtgccccctggtgacactgagtccagaatgaggctgcctacgttctggtctgcagagctcggctctgctttctaaac

SEQ ID NO: 430737 - DNA, 201 bp, Homo sapiens
gaggtcatcctggcacacctgtgccgtgctgagctcactcatgcctggagggatgctccttcccacgagtcatggctttgacagtgttgactgagctgtcstgtcctgtcctgtcctgtgtgctcaggggaagacatgtagagcggggtggttcatgtaaagaggaagcaagcacgcttctgggacagtaaggacgctacc

SEQ ID NO: 430738 - DNA, 201 bp, Homo sapiens
ccatgctcagtcccctcccatcccccacgcagctccaccccagtcccaagccaccagctgtctgctcctggtgggaggtggcctcctcagcccctcctctytgacctttaacctcactctcaccttgcaccgtgcaccaacccttcacccctcctggaaagcaggcctgatggcttcccactggcctccaccacctgacca

SEQ ID NO: 430739 - DNA, 201 bp, Homo sapiens
caataccatgtgaaaaatgggaagattagggtatgctgggcccacattcccacagggcaccagcagctgggtgggagctgctgttacccttttggcattcraggctgctccctgagatcagcgaagcacacagtaggccctcagcaaatctgggcttctcgccctttggtcctcatctctcattccctccttccctgactc

SEQ ID NO: 430740 - DNA, 201 bp, Homo sapiens
tccagtgacctctgggaagagagagcccttcaaggtcagtccagccattcccctggcttcaggaaggctactgatgatggggaggaaatgggactcagaaytcggtggataaaggttcaggtgggctgcccaccccaggttccacatcaacctgtgctctgggaaccacatcgccttccacctgaacccccgttttgatga

SEQ ID NO: 430741 - DNA, 201 bp, Homo sapiens
gggggtgggggcatcccaaagagaacacaagcagggcagaaatatcagaggaggtcatcctggcacacctgtgccgtgctgagctcactcatgcctggagrgatgctccttcccacgagtcatggctttgacagtgttgactgagctgtcctgtcctgtcctgtcctgtgtgctcaggggaagacatgtagagcggggtgg

SEQ ID NO: 430742 - DNA, 201 bp, Homo sapiens
aggtgggagaattgcttgagcccaggaattagagttctgtctgggcaaaacagcaagaccctgtctccaaaaaactttgtttaaataataaaataaaatawataaaactaaataaggtcaggagataccaataccatgtgaaaaatgggaagattagggtatgctgggcccacattcccacagggcaccagcagctgggtg

SEQ ID NO: 430743 - DNA, 201 bp, Homo sapiens
atgggcttcttctcagctgacagcccaaattcatgggaactggtacaatcttccccttccgcgtggtggctgacctgtcccccttcttccgacagccgatkcctttcatcaccaccattctgggagggctgtacccatccaagtccatcctcctgtcaggcactgtcctgcccagtgctcagaggtaagccaagggctcca

SEQ ID NO: 430744 - DNA, 201 bp, Homo sapiens
ccattgaataacagccaagttgctttggtttctatttctttgttaagtcgttccctctacaaaggacttcctagtgggtgtgaaaggcagcggtggccacrgaggcggcggagagatggccttcagcggttcccaggctccctacctgagtccagtgagttccagggctatgggcacagggctgcctcagccagagggaca

SEQ ID NO: 430745 - DNA, 201 bp, Homo sapiens
gctgaggtgggagaattgcttgagcccaggaattagagttctgtctgggcaaaacagcaagaccctgtctccaaaaaactttgtttaaataataaaataawataaataaaactaaataaggtcaggagataccaataccatgtgaaaaatgggaagattagggtatgctgggcccacattcccacagggcaccagcagctg

SEQ ID NO: 430746 - DNA, 201 bp, Homo sapiens
accgggagggaaactggtccatctgtcaccaagtggggagtacagtggccccagcacccggatgtgaggttcctggccctgcatcctgggtccccaggatrtcactattgatcacaggcttaagctcttctcctgatggtgcaaatgaggcaggggggcttagaattagtggggctgcctgcggaggggttgaggggcagg

SEQ ID NO: 430747 - DNA, 201 bp, Homo sapiens
ggctcaagaaccaaactgaatccagttcaaattcccagctctgccattcatcatctgtgggatcttagacaagcaacttcacctctctcagccttggtttyttcatctgtagaatggtcattgcctgccccccatgggtggttgtgtggttcagtgaggagacagatatcagaggtcacacagtggcccccctgggcccac

SEQ ID NO: 430748 - DNA, 201 bp, Homo sapiens
tgtgcagctgtcctacatcagcttccaggtcagactgtccacctggcaccggtcccaggggctgggatgcagggcccagcgtagctgtgtctaggccctgytgggtgggcccaagccaatctcctacccaggtcactctggggacaacctctgcttccctgtcccagtacctgcccgccccttctcctctgtcactctgcc

SEQ ID NO: 430749 - DNA, 201 bp, Homo sapiens
tcctacccaggtcactctggggacaacctctgcttccctgtcccagtacctgcccgccccttctcctctgtcactctgcccctccttctgtgttactgtcyctgtccggaacacctgccttggtctcccagactcctcagctgcccctttctcttcatccctcagtttccatcctggtaaggagggcatattgttctagaa

SEQ ID NO: 430750 - DNA, 201 bp, Homo sapiens
tctccaggtcactggtaacatttatttttcagcgacatcgttccagcctttatccagggtctattaagggtatagttttgtaagcacattgcaaattaccyttgcaagcagagtaggtctctgggcttgagaagcctgtgggtaagtcagtccaagtatgcttatctgagataaggatgtccccattcgttcagtatgcaa

SEQ ID NO: 430751 - DNA, 201 bp, Homo sapiens
tagggactcagtgaatgaatgtggaatgtggttcacacagccagggagaatgggataccagccagggcaagaacagtctactgggtggggcaggatccagracaaggaggtgagcagcccttcctccggccactcaagtagtggggactgggaggaggggcgctttgtctacgcagtcttcttatggctcatcaccgtaca

SEQ ID NO: 430752 - DNA, 201 bp, Homo sapiens
tctccgtcaatggctctgtgcagctgtcctacatcagcttccaggtcagactgtccacctggcaccggtcccaggggctgggatgcagggcccagcgtagstgtgtctaggccctgctgggtgggcccaagccaatctcctacccaggtcactctggggacaacctctgcttccctgtcccagtacctgcccgccccttct

SEQ ID NO: 430753 - DNA, 201 bp, Homo sapiens
gcagggcccagcgtagctgtgtctaggccctgctgggtgggcccaagccaatctcctacccaggtcactctggggacaacctctgcttccctgtcccagtrcctgcccgccccttctcctctgtcactctgcccctccttctgtgttactgtctctgtccggaacacctgccttggtctcccagactcctcagctgcccct

SEQ ID NO: 430754 - DNA, 201 bp, Homo sapiens
atctccgtcaatggctctgtgcagctgtcctacatcagcttccaggtcagactgtccacctggcaccggtcccaggggctgggatgcagggcccagcgtasctgtgtctaggccctgctgggtgggcccaagccaatctcctacccaggtcactctggggacaacctctgcttccctgtcccagtacctgcccgccccttc

SEQ ID NO: 430755 - DNA, 201 bp, Homo sapiens
agggcacctgcctcctgccacgctgacttcaggactggtcgagccccagggaacatttgcagggcagcccaactttggccctggccctggcgctggccctrgctctggggaggatagaaagtgtgctggatacagtcagacagaactggctgccactttggatttgatcccttccaccttggcaagcttgggcaagttgct

SEQ ID NO: 430756 - DNA, 201 bp, Homo sapiens
tcctgctgtgggacttctctgagagactgcggtgccctcaggagatgccaagggcagggaggccccgatctccctgaaccctccaaccaggggaatcaggmccatgaccctgatcttccgccccttcctctctccctctccctccacctcccccaccccccagcaccaggagggcttcccactcccatcctgtcatataga

SEQ ID NO: 430757 - DNA, 201 bp, Homo sapiens
ccagagagcttacaaaggaaatatcagtgctgggaccccagcccaggccaatgaggcagtcagctgggcattcgtattttaaaaatatgccttaagtgatyatactctgcagtcagagttgaaaatgactgatgtagggctttgcagccatggaaaggagcttggattttaacacagtgaaaagcctcaggagtgtttcaa

SEQ ID NO: 430758 - DNA, 201 bp, Homo sapiens
tgaggaacctgcccaccatcaacagactggaagtggggggcgacatccagctgacccatgtgcagacataggcggcttcctggccctggggccgggggctrgggtgtggggcagtctgggtcctctcatcatccccacttcccaggcccagcctttccaaccctgcctgggatctgggctttaatgcagaggccatgtcct

SEQ ID NO: 430759 - DNA, 201 bp, Homo sapiens
aggtcatgagcagcagagctaggattcagacctggagttggcctgactctaaaacgatgcatgcctcaccatggcccatcactcctttaaagagcaccagmagagagaatttgacaaagtggttgcccgtggggcctgggatgggtggggaaaccacgctaggcctcggggctgctgagggcctgagggaaggaatgggga

SEQ ID NO: 430760 - DNA, 201 bp, Homo sapiens
gtgctgggcctgagggatacagacggcacaggccagtgctcctgtccctgatggggtgggaacagtattctagaccagggaacagtacaggggaaagagcrcgcacagcctgtttagtgaagagccgtcgttcagtggggatagagtgcaggtgaggggcttattaacaactgaggagggagggagggtgggagggaggga

SEQ ID NO: 430761 - DNA, 201 bp, Homo sapiens
caggagcccaggcccagagcactcctgtgtgctgggcctgagggatacagacggcacaggccagtgctcctgtccctgatggggtgggaacagtattctasaccagggaacagtacaggggaaagagcacgcacagcctgtttagtgaagagccgtcgttcagtggggatagagtgcaggtgaggggcttattaacaactg

SEQ ID NO: 430762 - DNA, 201 bp, Homo sapiens
gccctggcgctggccctggctctggggaggatagaaagtgtgctggatacagtcagacagaactggctgccactttggatttgatcccttccaccttggcragcttgggcaagttgcttaatctttctgagcctcgttgcctcactagggacacaggagctgaggctgcttcccttgttggaaagcactgaagcccaggaa

SEQ ID NO: 430763 - DNA, 201 bp, Homo sapiens
gtttctatttctttgttaagtcgttccctctacaaaggacttcctagtgggtgtgaaaggcagcggtggccacagaggcggcggagagatggccttcagcrgttcccaggctccctacctgagtccagtgagttccagggctatgggcacagggctgcctcagccagagggacacagctctggggctctgaggaagcaact

SEQ ID NO: 430764 - DNA, 201 bp, Homo sapiens
tgagacagtatctgtagtatgcttaggacagtgcctggcaggtggcatgtgtgataggagtgttagctattgcaaagggaaggaggttttaacatttgtaycctgactgcttcgtggagaaggcattggggtggaaaagacaagttaggagactgatgctgcaggagcccaggcccagagcactcctgtgtgctgggcctg

SEQ ID NO: 430765 - DNA, 201 bp, Homo sapiens
caccatctccgtcaatggctctgtgcagctgtcctacatcagcttccaggtcagactgtccacctggcaccggtcccaggggctgggatgcagggcccagygtagctgtgtctaggccctgctgggtgggcccaagccaatctcctacccaggtcactctggggacaacctctgcttccctgtcccagtacctgcccgccc

SEQ ID NO: 430766 - DNA, 201 bp, Homo sapiens
cagattgtcacagataacgacagtgccacgcacaaagcaaaacagagcgatgagatagagcgagcctgggaggggcagctagggccaacgtgcagaggcaygggtgtggcctgtccaggaacagcaggcaggcgtgctccaccctgactacatattcaaatcacccagagagcttacaaaggaaatatcagtgctgggacc

SEQ ID NO: 430767 - DNA, 201 bp, Homo sapiens
agtaagtgtcaaatcagacccaagaaggaggtgttattcatttcttcatttactcaacaaccattttcttgtcgcctgctttgcgcaggaagcaccccacrtgctgggggcacagtcatgaagcacacagacagggtcctgcctccagggagtttataatttaggtggggaaagaacaaggaaagtaaagcatggacagat

SEQ ID NO: 430768 - DNA, 201 bp, Homo sapiens
gactggcttcagtggaaatgacattgccttccacttcaaccctcggtttgaagatggagggtacgtggtgtgcaacacgaggcagaacggaagctgggggsccgaggagaggaagacacacatgcctttccagaaggggatgccctttgacctctgcttcctggtgcagagctcagatttcaaggtgagcaagaatcccct

SEQ ID NO: 430769 - DNA, 201 bp, Homo sapiens
ctcaagttacttgaagcctggacacacttccatgattagccgggctaggtaaaagttggtggctttattcttcctgctctataagcagatccaggccctaraaagatgggaccagggtatataattgtttttgaaaagtgtgctacaaaaatggatggcctgttataagccaggatacaaagttaaggatgggggtaaggg

SEQ ID NO: 430770 - DNA, 201 bp, Homo sapiens
aataaaatacattagtgctcatcattcatgtatatttaatgtgttaacaaaggcattcatattactgtcatattgaaatattttgatgacttccaaaggcrccccttgcatagaaaagaatccgttttaagaatatattttgaacaatgcctcacagagtaggcagtaaaaatttagccagtcttcacattgatttacctc

SEQ ID NO: 430771 - DNA, 201 bp, Homo sapiens
ccaggccctagaaagatgggaccagggtatataattgtttttgaaaagtgtgctacaaaaatggatggcctgttataagccaggatacaaagttaaggatrggggtaagggagggacattttcttccagaagaaaagacagaatttctgaagagtcccagtccataattttcccaaaatggttggaggagagggtaaaatc

SEQ ID NO: 430772 - DNA, 201 bp, Homo sapiens
tggctggtacctcaataccctgcagcttcagcttggggaaaggttggggtctctcagccccagggggcagagatctccctctgatggtagacactaaaagmaaatacaaacatgaaggattgacaatttattcctcttacagtttcatttctatactctaatactgaataagaagctaatcaactcatatcctgtccccaa

SEQ ID NO: 430773 - DNA, 201 bp, Homo sapiens
tggtacctcaataccctgcagcttcagcttggggaaaggttggggtctctcagccccagggggcagagatctccctctgatggtagacactaaaagaaaayacaaacatgaaggattgacaatttattcctcttacagtttcatttctatactctaatactgaataagaagctaatcaactcatatcctgtccccaattct

SEQ ID NO: 430774 - DNA, 201 bp, Homo sapiens
ttttggacggtgagctcttaaaaaagagaaaatgacagagttctaaggagagaaactgaacaaggggatgactcctgggaagatgacttactttgggtggrttggcgattacccgtttgcccttctcttctagcaggggtcccagttcagccagttccaccgtgtcagcttccctgttactggcaggagccccattcccct

SEQ ID NO: 430775 - DNA, 201 bp, Homo sapiens
ctattggtgctttctggagaacacttactaacacatcaggtaagggcaatcctcaagcttctaaacagtcatgagtcatgctatgctcaacccacaagcayagttgaaagcaaccggcaatctagtccaagagagacaaaaacaataacttgctatacagcagacctttatatggtgtcaacacatagacagttcctcttc

SEQ ID NO: 430776 - DNA, 201 bp, Homo sapiens
ccgactaatttttatattttaaataaaaacagggttttaccatgtcggccaggctggtctcaaactcctgacttcaagtgatccgcctgcctcggccccccaaagtgctgggattacaggcgtgagccactgctcccggacaatatttaattattttaactgaaggttaaaacatagcagatattaattgtaaagggacta

SEQ ID NO: 430777 - DNA, 201 bp, Homo sapiens
agtgggggaaatgaatttgtatggctcatttaactagctctttctgttctccacctgctcccagatttaaccattccctcaatctatcctgtattgtagaytcccatacaatctatcctgtattctggattaaaattccacaaggtcacttctattttacgatggaaaaatctctaagaatccccattcaaagaactctat

SEQ ID NO: 430778 - DNA, 201 bp, Homo sapiens
ccaattcccaagttttccaggctacggcacacctttcctggaggcaaagacacaaagtttctaagagtttagttcctgggcctttagagagtctatgggtrgcctctatccatacctagcttgattcttgtcctaaagcaagaccagtctagcagtatagataaagaatacagccatttttcccctatctactgtctctta

SEQ ID NO: 430779 - DNA, 201 bp, Homo sapiens
tacctttgtttaagcacagtgcatggcacgtggctggtgcttgataaatatttaattattattatttttttcttttctttctttctttcttttttttttttgagatagagtcttgctttgttgcccaggctggagtgcagtggcgtgatcttggctcactacaacctctgcccccgaccaggttcaagtgattctcccgcc

SEQ ID NO: 430780 - DNA, 201 bp, Homo sapiens
cagctctcctactcgatgccaagcgtcccagactctgaagtggaaaaacagtctgacttcctttgtagctcttccccaacagaagtctttttttttttttwaaagggtcttgctctgtcattcaggctggagtgcagtggtgtgatctcagctcactgtagcctcaatgtgccagactcaagcgatcctcccaccttagct

SEQ ID NO: 430781 - DNA, 201 bp, Homo sapiens
gccgggctaggtaaaagttggtggctttattcttcctgctctataagcagatccaggccctagaaagatgggaccagggtatataattgtttttgaaaagkgtgctacaaaaatggatggcctgttataagccaggatacaaagttaaggatgggggtaagggagggacattttcttccagaagaaaagacagaatttctg

SEQ ID NO: 430782 - DNA, 201 bp, Homo sapiens
tcttctgtactttcttttattaacatcatagtctttgcatcaagatacatagcaatgatagcaggtttctttttaaagcttagtattaaatattaaatatmtttccccatttaaattttacattactctgccaagaaaaaaaaaaaattaaaactcaagttacttgaagcctggacacacttccatgattagccgggctag

SEQ ID NO: 430783 - DNA, 201 bp, Homo sapiens
caatgtgccagactcaagcgatcctcccaccttagcttcccaagtcttagtaaccgggactacaggcatgtgccaccatgcccagctaattttatttttttgtagagacaaggtctcactatgttgcccagccttggcatcccaaagtgctgggattacaggtatgagccactgtgcctggctgaagaggtgtttttgagc

SEQ ID NO: 430784 - DNA, 201 bp, Homo sapiens
gagactggaactgtaggaataaaaagaaaagagcctttaggataatgcaaggaggaataagaaacaagtaggagaaagcatttgcttcttctagtttatcyttaattaaacaaatttgttaataacattaaagtggtatatttagaaagttttaaaaacacagtccttgtcagagatacaccaaaatgttaatattgatga

SEQ ID NO: 430785 - DNA, 201 bp, Homo sapiens
gtaagtcaacacattcattgaatatttagcaagtgtatttaggactagcaccctaaggcattctaagacactgtgcaaaatacaagacactgtgcaaaatacaagttgaacaagttatagtattgttttcaaagagccagataacataggtagtttgtgatatgcacaaaaataagtgatacaatttgattgctccaggag

SEQ ID NO: 430786 - DNA, 201 bp, Homo sapiens
tgagcatggtcaagattcccaaaaagagaaacagcacgaaacctgcaggagggtaaaataaaaaaaacctgtaagaaaaaagggaatgtgtacactttgayggttgatgtttttgaatcagagagctacaggcaacatcactaatcatcagggaaatacaaattaaaagcacaatgaaataccaccttacttctgcaagaa

SEQ ID NO: 430787 - DNA, 201 bp, Homo sapiens
aaccaagtataagagtagctacatctgtgcttgcagttaattgaccagctgggtaatgatctgtcctattggcattctactgaaatagtatgacactgggrgttgagaactgagctttgaaattgatgctgttttgaaagttctgaaacacaaatcagggtttgggtggggttctcaagctgcaaaccttaaggctcaaat

SEQ ID NO: 430788 - DNA, 201 bp, Homo sapiens
gccaagtcccaggaacacgcctgaacagaacagacataagactgtcaaacaaggaaacagccaccgcatggaaggcactgctgtcttactctggaatttcratgtttatgataattagctatttttggatgaatagtacatgtttaggaaacttagctacaagatggataacactcaacagatatttcttctatgtcctga

SEQ ID NO: 430789 - DNA, 201 bp, Homo sapiens
ataaatatttaattattattatttttttcttttctttctttctttcttttttttttttgagatagagtcttgctttgttgcccaggctggagtgcagtggygtgatcttggctcactacaacctctgcccccgaccaggttcaagtgattctcccgcctcagcctctcaagtagctggaattacaggcacctgccacaacg

SEQ ID NO: 430790 - DNA, 201 bp, Homo sapiens
taatgccagcccattttttctttttggagtcagggtcttgctcccaagttcagccagttccaggcccaggctagagtgtgtggcacgatcatagcttactrcagcctatactcctggactcaagcaattctcctgcatcagcctcccaaagtgctgggattacaggtgtgagccaccgtgcccagccaatgccagccccca

SEQ ID NO: 430791 - DNA, 201 bp, Homo sapiens
caaaagatagtgcttttcaggtagaaaatatattccacaattggtctctccatctgttgaagaggatgcagtaagtctgttcatgaagtgtttaagagaawagcttcatcaccccactatcgccacagaacagagagcctttcctctggcatatcaagaaacctttaggagtgatatgagctcctatcacccagtaagcac

SEQ ID NO: 430792 - DNA, 201 bp, Homo sapiens
agtaagtcaacacattcattgaatatttagcaagtgtatttaggactagcaccctaaggcattctaagacactgtgcaaaatacaagacactgtgcaaaatacaagttgaacaagttatagtattgttttcaaagagccagataacataggtagtttgtgatatgcacaaaaataagtgatacaatttgattgctccagga

SEQ ID NO: 430793 - DNA, 201 bp, Homo sapiens
gagtaagtcaacacattcattgaatatttagcaagtgtatttaggactagcaccctaaggcattctaagacactgtgcaaaatacaagacactgtgcaaaatacaagttgaacaagttatagtattgttttcaaagagccagataacataggtagtttgtgatatgcacaaaaataagtgatacaatttgattgctccagg

SEQ ID NO: 430794 - DNA, 201 bp, Homo sapiens
agagtaagtcaacacattcattgaatatttagcaagtgtatttaggactagcaccctaaggcattctaagacactgtgcaaaatacaagacactgtgcaaaatacaagttgaacaagttatagtattgttttcaaagagccagataacataggtagtttgtgatatgcacaaaaataagtgatacaatttgattgctccag

SEQ ID NO: 430795 - DNA, 201 bp, Homo sapiens
cccagagtaagtcaacacattcattgaatatttagcaagtgtatttaggactagcaccctaaggcattctaagacactgtgcaaaatacaagacactgtgcaaaatacaagttgaacaagttatagtattgttttcaaagagccagataacataggtagtttgtgatatgcacaaaaataagtgatacaatttgattgctc

SEQ ID NO: 430796 - DNA, 201 bp, Homo sapiens
ttccccagagtaagtcaacacattcattgaatatttagcaagtgtatttaggactagcaccctaaggcattctaagacactgtgcaaaatacaagacactgtgcaaaatacaagttgaacaagttatagtattgttttcaaagagccagataacataggtagtttgtgatatgcacaaaaataagtgatacaatttgattg

SEQ ID NO: 430797 - DNA, 201 bp, Homo sapiens
agccaccgcatggaaggcactgctgtcttactctggaatttcaatgtttatgataattagctatttttggatgaatagtacatgtttaggaaacttagctwcaagatggataacactcaacagatatttcttctatgtcctgaatgggaagaagctgtgtaagtgcttactaccttttaagcaccaagaacaaagatctca

SEQ ID NO: 430798 - DNA, 201 bp, Homo sapiens
ctttccccagagtaagtcaacacattcattgaatatttagcaagtgtatttaggactagcaccctaaggcattctaagacactgtgcaaaatacaagacactgtgcaaaatacaagttgaacaagttatagtattgttttcaaagagccagataacataggtagtttgtgatatgcacaaaaataagtgatacaatttgat

SEQ ID NO: 430799 - DNA, 201 bp, Homo sapiens
cctttccccagagtaagtcaacacattcattgaatatttagcaagtgtatttaggactagcaccctaaggcattctaagacactgtgcaaaatacaagacactgtgcaaaatacaagttgaacaagttatagtattgttttcaaagagccagataacataggtagtttgtgatatgcacaaaaataagtgatacaatttga

SEQ ID NO: 430800 - DNA, 201 bp, Homo sapiens
ttaaaggtagaatcccagctgccaatcgatctgaacaactttgttgggctctataatcccttcgcagttagggagacaacaaattccacctttccccatcyaaatcactcaccaagcagatgggtccagatgttgccagtttctgtatgaatgcggaagatgctcttgaagcaagcccgaaaggagggcatgggaggtcta

SEQ ID NO: 430801 - DNA, 201 bp, Homo sapiens
ccctttccccagagtaagtcaacacattcattgaatatttagcaagtgtatttaggactagcaccctaaggcattctaagacactgtgcaaaatacaagacactgtgcaaaatacaagttgaacaagttatagtattgttttcaaagagccagataacataggtagtttgtgatatgcacaaaaataagtgatacaatttg

SEQ ID NO: 430802 - DNA, 201 bp, Homo sapiens
tccctttccccagagtaagtcaacacattcattgaatatttagcaagtgtatttaggactagcaccctaaggcattctaagacactgtgcaaaatacaagacactgtgcaaaatacaagttgaacaagttatagtattgttttcaaagagccagataacataggtagtttgtgatatgcacaaaaataagtgatacaattt

SEQ ID NO: 430803 - DNA, 201 bp, Homo sapiens
ctcaataggctgacctcaaaacatatttcctcaaagtgaagtactactgaatcagcagctttactaaaaaatactttatatcgcaagcaaaaaaaaaaaaaccaaaaaacaactttatatcacaagcaaaaaacataaatatttttgggcatcttagataaatctgaaaagaggggcacacttagcttgttacttactaag

SEQ ID NO: 430804 - DNA, 201 bp, Homo sapiens
aacagggcattccaggagggtatatggtgtgaacatgccatgaaagaacacagtccccagggcagtaaacaattcatttttccatagagtcctggaaaggkaaaatgaggccagacttaaaaaactgaaaatagcctaaaagcctacttaaggtggtgtactttataaatcagcaatggggatcagtggattaatgttgct

SEQ ID NO: 430805 - DNA, 201 bp, Homo sapiens
ttgtgggaagacatctggctggtacctcaataccctgcagcttcagcttggggaaaggttggggtctctcagccccagggggcagagatctccctctgatkgtagacactaaaagaaaatacaaacatgaaggattgacaatttattcctcttacagtttcatttctatactctaatactgaataagaagctaatcaactc

SEQ ID NO: 430806 - DNA, 201 bp, Homo sapiens
ggctctctggtcccgatctggggaacccatgcatctccaccccgtggggctaaaggcgcagcactcacaggactgccgggagtcgggggacagccggggaygagcgcccaccgcacctaggccgcctcggaggcggcgcgcagtgggaggggccggaaatgtttacaacctgaccggctggatgcctggaggccaggcggc

SEQ ID NO: 430807 - DNA, 201 bp, Homo sapiens
agaaaggccattattaaaaagtcaaaaaacaacagatgttggcatggatatggtaaaaggggaatgcttatacactccttgtgggaatgtaaattataaaytagtataacctctatggaaaagggtatagagattccttaaagaactaaaagtagagctactatttgatccaccaatcccactaccaggtgtctacccaaa

SEQ ID NO: 430808 - DNA, 201 bp, Homo sapiens
acctcaaaacatatttcctcaaagtgaagtactactgaatcagcagctttactaaaaaatactttatatcgcaagcaaaaaaaaaaaaaccaaaaaacaaytttatatcacaagcaaaaaacataaatatttttgggcatcttagataaatctgaaaagaggggcacacttagcttgttacttactaagttactgttggaa

SEQ ID NO: 430809 - DNA, 201 bp, Homo sapiens
aaattttacattactctgccaagaaaaaaaaaaaattaaaactcaagttacttgaagcctggacacacttccatgattagccgggctaggtaaaagttggkggctttattcttcctgctctataagcagatccaggccctagaaagatgggaccagggtatataattgtttttgaaaagtgtgctacaaaaatggatggcc

SEQ ID NO: 430810 - DNA, 201 bp, Homo sapiens
aggttaaggctgcagtgagctgtgatcatgccactgcactctagcatgggcaacagagtgagacccggtctcagaaaaaaaaaataataataatcaaatadatttgtgtaatacagatctactaatgggaagaactgaatttctctttttgaggttaacattttgcctaattgatgtacaaagttagtgttccagatggtc

SEQ ID NO: 430811 - DNA, 201 bp, Homo sapiens
agtgcatgccactgcatgcgctaatttttgtatttttagtagagatggggttttgccatgttggcttggctggtctcaaactcctgacctcaggtgatccrcccacctcggcctcccaaagtgctgggattacaggcatgagccaccacgcctagctcaggtgatgccattagtttctacacagttatcctctgtcatccc

SEQ ID NO: 430812 - DNA, 201 bp, Homo sapiens
agcttttctgtctgatttgtattttcctctgattccttttgtcatcaggtattcactgggcacctgctgtgggcagggctctgcgctgaggttctggagayaaaaggatgaatcgttgagcctgccctggtgtggtgctcccgttatcctttaggtataaaaacttgtggctattttttttttttttttgagacagagtct

SEQ ID NO: 430813 - DNA, 201 bp, Homo sapiens
cagcctcctgagtagctgggattacaggcgcccacgaaccacgcccagttaattttttaatgtttagtagagatggggtttcaccatcttggccaggctgrtcttgaactcctgacatcgtgatccacctgcttcggcctcccaaagtgcaagtgttgggattacaggcgtgagccactgcacccggccatggctatggtt

SEQ ID NO: 430814 - DNA, 201 bp, Homo sapiens
agttggatggaggctgggacaggtagctctcctgtgaccccacttatcctgtggttcttctgccactcctccccaccaacaatgttacagctaccacattmtaaagccaaaactcgaagccgacttgaggtggctgaagctgaggaagaggaaacaagtatcaaagctgctcgttctgagctgctgcttgctgaagaacct

SEQ ID NO: 430815 - DNA, 201 bp, Homo sapiens
ggcctggagagtaatccatacagaagccggaagcagcgccaggagtgggaggtgaaggccctgctagagaaggtgaggctcccctgctggagagggtgagrtcccccccattgctggagagggtcaggttcccccgtcctggagagggtgaggttcctccttcctggagaaggtcaggttcccccctgctggagaaggtca

SEQ ID NO: 430816 - DNA, 201 bp, Homo sapiens
gccaggagtgggaggtgaaggccctgctagagaaggtgaggctcccctgctggagagggtgagatcccccccattgctggagagggtcaggttcccccgtsctggagagggtgaggttcctccttcctggagaaggtcaggttcccccctgctggagaaggtcaggttccccactgctggagaaggtcaggttcccccctg

SEQ ID NO: 430817 - DNA, 201 bp, Homo sapiens
gctaattgcgtcctcctttcccctaggcccaagatccattcccaggccccgcccccgtccctgtggaagtggtccagaagttctgtcgcattgacaaatcycgaaaggtgaggtccagccggagagttgggaagtgctggaggcagggagtgtctgggtgagttggatggaggctgggacaggtagctctcctgtgacccc

SEQ ID NO: 430818 - DNA, 201 bp, Homo sapiens
gctggagagggtgagatcccccccattgctggagagggtcaggttcccccgtcctggagagggtgaggttcctccttcctggagaaggtcaggttcccccstgctggagaaggtcaggttccccactgctggagaaggtcaggttcccccctgctggagaaggtaaggtttcctcttcctggagagggtgagattcccctc

SEQ ID NO: 430819 - DNA, 201 bp, Homo sapiens
tgttatctcttggtcttgagttcccatctttcccatgtttagtaacctcaggcttaggtgtgtattagcaactttggttcttcttctcttccaggtactgygtctttatggagtccagctatgaaggagccactggcaaagattctctgtcatcgtggtggggtccgggctgtggcagtagattctacaggcacgtaagtc

SEQ ID NO: 430820 - DNA, 201 bp, Homo sapiens
gtgagatcccccccattgctggagagggtcaggttcccccgtcctggagagggtgaggttcctccttcctggagaaggtcaggttcccccctgctggagarggtcaggttccccactgctggagaaggtcaggttcccccctgctggagaaggtaaggtttcctcttcctggagagggtgagattcccctctcctggacgg

SEQ ID NO: 430821 - DNA, 201 bp, Homo sapiens
agctgtagcttgccctccgtgggctacctgggtcagccactcctgtgcttagggcttaatcactagttcgctgaggcctgaagtttaatcaacaccttgakgctaaacagctctggtccttgtgatcttcagcccatccctgcttttctctggtcctcctcaggagcttgtcaggccacgggggctccagtgatgaggctg

SEQ ID NO: 430822 - DNA, 201 bp, Homo sapiens
gatcccccccattgctggagagggtcaggttcccccgtcctggagagggtgaggttcctccttcctggagaaggtcaggttcccccctgctggagaaggtvaggttccccactgctggagaaggtcaggttcccccctgctggagaaggtaaggtttcctcttcctggagagggtgagattcccctctcctggacggggtc

SEQ ID NO: 430823 - DNA, 201 bp, Homo sapiens
cctggagagtaatccatacagaagccggaagcagcgccaggagtgggaggtgaaggccctgctagagaaggtgaggctcccctgctggagagggtgagatyccccccattgctggagagggtcaggttcccccgtcctggagagggtgaggttcctccttcctggagaaggtcaggttcccccctgctggagaaggtcagg

SEQ ID NO: 430824 - DNA, 201 bp, Homo sapiens
agtttaccaagccttggtttaaagccctcatataagctgttgtagacattaagatgagttaaggcatatagtttagcacagcgcttagcaaaatagggagygctgtgttcatcattgtcattcaagatgatcgttctctccaggtctggctgatgtgaggggtggaggtggtgtctgctttggatttctgctgttcctgag

SEQ ID NO: 430825 - DNA, 201 bp, Homo sapiens
gaggaagaggaaacaagtatcaaagctgctcgttctgagctgctgcttgctgaagaacctgggtgagtgagccctaatctggacccccattccctgccttwtgggactgtcttttctcgtttttatgttggtatacttgcttcatattgggaagctttactgccatcctaacccttgctttcaggtttctggaaggggagg

SEQ ID NO: 430826 - DNA, 201 bp, Homo sapiens
ggtttccctctgctggagagggtgagattccccctgctggagagggtcaggtttccctctgctggagagggtgaaattccctctcctggagagggtcaggwtcccccctgctggagagggtgagattgcccctgttggaggtgaggttcccctgctgcagagagtgaggcccctgctgctggggaaggtgtggtttggggt

SEQ ID NO: 430827 - DNA, 201 bp, Homo sapiens
atattcttttgattttttttcaaccacttaaaaatgtaaaaaccattcttggcttgtgggctatacagaactagatgatgggccaggtttggcccatgggyagtagtttaccaagccttggtttaaagccctcatataagctgttgtagacattaagatgagttaaggcatatagtttagcacagcgcttagcaaaatagg

SEQ ID NO: 430828 - DNA, 201 bp, Homo sapiens
gtcatgtggctgcccttgattgggtaacaaagaagcttatgtgcgagatcaacgtcatggaggcggtgcgggacatccggtcagtggcctcactgtcagcrgtcagttggggtgagatagtccattcctgattgaatgatagcctgtgacctcatttcccaattgaaccactcttcctctcccccaggtttctccattctg

SEQ ID NO: 430829 - DNA, 201 bp, Homo sapiens
caagatggcacctagagagcttcatacctggtacgctgctgattggatgaaggacagagggcttccgggagttttcaagccgactgtgtggcagctgagargagttttgcacgtggatcgccgttcgggtgggcgagatggagacagcccccaagccgggcaaggatgtcccgcccaagaaagacaaacttcagaccaaga

SEQ ID NO: 430830 - DNA, 201 bp, Homo sapiens
tgtcagcctgccacttctcactctgtgcctgtgtcctccccgtctccggtccccaggacaaggtccggcagagccttcagcagcagcatcataaggaggcraaggccaagcccacgggggcccggccatctgccctggacagatttgtgcgctgagccagactccagggttgcctgggaacagtctctccccaagatcacc

SEQ ID NO: 430831 - DNA, 201 bp, Homo sapiens
cactgtatccgccgctgtgaccgagtaacacggcttgagttcctgcccttccacttcctcctggctacagctgtgagtggccatggagctcaggaactggktggaagcccttgggatgaccacctctcctttaggaccccagcagagggaatacagagggcaatcaggactgggtcattctctctgtctttctctctcagt

SEQ ID NO: 430832 - DNA, 201 bp, Homo sapiens
gagagcgtgccctcactcaagatggcacctagagagcttcatacctggtacgctgctgattggatgaaggacagagggcttccgggagttttcaagccgamtgtgtggcagctgagaggagttttgcacgtggatcgccgttcgggtgggcgagatggagacagcccccaagccgggcaaggatgtcccgcccaagaaaga

SEQ ID NO: 430833 - DNA, 201 bp, Homo sapiens
ggacctgatgggtggcgaggcaggccgcctcgttccttgagagtgagagggttggggtcaatccaaggctgtctgctaattgcgtcctcctttcccctagrcccaagatccattcccaggccccgcccccgtccctgtggaagtggtccagaagttctgtcgcattgacaaatcccgaaaggtgaggtccagccggagagt

SEQ ID NO: 430834 - DNA, 201 bp, Homo sapiens
ccacagccggagcctctccagggcctcctcgtaacaagaagaatcgggagctccgtcctcagagaccaaaaaatgcttacatcttaaagaagtctcggatytctaagaagcctcaggtcccgaagaaaccccgagaatggaagaacccggagtcccagcgcggcttgtccggggtgagcgtgggacctgatgggtggcgag

SEQ ID NO: 430835 - DNA, 201 bp, Homo sapiens
attttttaatgtttagtagagatggggtttcaccatcttggccaggctggtcttgaactcctgacatcgtgatccacctgcttcggcctcccaaagtgcargtgttgggattacaggcgtgagccactgcacccggccatggctatggtttttgagaatgattggccaggtgatgcatttatttattttattactattttt

SEQ ID NO: 430836 - DNA, 201 bp, Homo sapiens
gggtgagcgtgggacctgatgggtggcgaggcaggccgcctcgttccttgagagtgagagggttggggtcaatccaaggctgtctgctaattgcgtcctcstttcccctaggcccaagatccattcccaggccccgcccccgtccctgtggaagtggtccagaagttctgtcgcattgacaaatcccgaaaggtgaggtcc

SEQ ID NO: 430837 - DNA, 201 bp, Homo sapiens
tgcccctttgaagatgtgctgggggtggggcacactgggggcatcaccagcatgctggtccctggtgagtgggccaggggatggggcttgaagtgaatgamctctgggtggaagtttgggccagagacatccaggaactgggggcttagttgggctggagctgttggactgaggttcttccttatggctccatgcttctcc

SEQ ID NO: 430838 - DNA, 201 bp, Homo sapiens
tcttgtgggagtgatgggaaatcaatgaaatcatttctgtatttatttaacactagaagaatttttttgaagtggtggaactgaggaactatggtttgtaracttttcaatttgattacttccataaattttccttccagcttaaaatagctgcaattcaggcagatgtgactgaaggttaatccaagttgatttttaata

SEQ ID NO: 430839 - DNA, 201 bp, Homo sapiens
aaattttttttttctgcttctttcttttttttgagacagagtcttgctctgtcacccaggctggagtgcagtggtgcgatctcagctcactacaacctccmtctcctgggttcttggcatggtggtgtgtgtctgtagtcctagctgtctgtagtcctagctactcatctgcttcagcctcccaagtacccagaactacag

SEQ ID NO: 430840 - DNA, 201 bp, Homo sapiens
ctcctacatcacttccctgtataaagccctctgtgcagggtccagttatttccactcctcctgagagaattctgtagccacatccatgaatgtcaagtgaygctgagtaagagtctttcctgattccttttctttccgcttctttctcttctgggcttcttcatcacacagcctgactcataagaaatcaatctgtggccg

SEQ ID NO: 430841 - DNA, 201 bp, Homo sapiens
gacctaggcgagaacaggcactgctggttcgtgcccaaatgttgcatttcccaagaccaccctggcctgccactcccccatcctgtgcctataaaaacccyggagaccctcgcaggaacacagataagaggttggatgttgagaggaacacattagcagaagaagacacaagcagctggacattgagaggacatcgagggg

SEQ ID NO: 430842 - DNA, 201 bp, Homo sapiens
ttcttaaaattttttttttctgcttctttcttttttttgagacagagtcttgctctgtcacccaggctggagtgcagtggtgcgatctcagctcactacarcctccatctcctgggttcttggcatggtggtgtgtgtctgtagtcctagctgtctgtagtcctagctactcatctgcttcagcctcccaagtacccagaa

SEQ ID NO: 430843 - DNA, 201 bp, Homo sapiens
gcattatttcttaaaattttttttttctgcttctttcttttttttgagacagagtcttgctctgtcacccaggctggagtgcagtggtgcgatctcagctyactacaacctccatctcctgggttcttggcatggtggtgtgtgtctgtagtcctagctgtctgtagtcctagctactcatctgcttcagcctcccaagta

SEQ ID NO: 430844 - DNA, 201 bp, Homo sapiens
aggcgtgagccgcagcgcccggcctgtacattatatgtttaaaaacaggatctaaaaattggtttttaaaatgcattagtctcttaaattatatggaaaasaaaacgtgaaattgcaaaccaaagttacagtaatattagcttttagtctaattgttttgtaatgtattagcctcttaaatcttgtagaaaacaaaaaaaa

SEQ ID NO: 430845 - DNA, 201 bp, Homo sapiens
tccggatggcccgtgactgccatcagtagtgcaggagtttagtccaaaacaatggcctcctataatttttatttaaaaattcgaatgtcattttctcttascaccgtttccagagactttgtttttttgagttgctctgtagcccgggctggagtgcagtggcatgatcacggctcactgcagtctctgcctcaccagctc

SEQ ID NO: 430846 - DNA, 201 bp, Homo sapiens
tatggagctgtgggtggagacaatggcactcttccgagtgatacccccactttagaaacttagcacccggttttggagggagatggggcagtagcctctcrtcttcttggcatacttggcatacttcttggcatttcactaacatggaatcttcactttatggtctggggaagaggtgatttggggccccataattttttt

SEQ ID NO: 430847 - DNA, 201 bp, Homo sapiens
ttcaaagaattcatatatactggaagtcttaggaaaagcagcttctaaatggaaggcctaggaggtttgctcatcttactcgttacatgtatttctcctcrtggagtaactgaagagctttctggcttgtttgtggaattttagttggtaggaaagcatatacacagggccaaatcctcttggtttctgttctggagaatg

SEQ ID NO: 430848 - DNA, 201 bp, Homo sapiens
gcagcctttgcgtcctggacttaagcaattctcctgtcccagcctccttagtagcttggacaataggcgtgccccaccacacttagctaattaaaaaaaawttttttttttggtagagacagagtctccctatgttgcccaggcgggtcttgaactcctgggctcaagcaattctcctgccttggcctcccaaagttctgg

SEQ ID NO: 430849 - DNA, 201 bp, Homo sapiens
ttttttgtagagacagggtctcattatgttgcccaggctggtctcaaacacctggtctcaactaatcctcctgccttgacttcccaaagtacttagatttyaggtgtgagccaccatgcctggccacataattacataactttctttttctgagacagagtctcgctctgtcgctcaggctagagggcaatggaatagtca

SEQ ID NO: 430850 - DNA, 201 bp, Homo sapiens
tttttttgtagagacagggtctcattatgttgcccaggctggtctcaaacacctggtctcaactaatcctcctgccttgacttcccaaagtacttagattycaggtgtgagccaccatgcctggccacataattacataactttctttttctgagacagagtctcgctctgtcgctcaggctagagggcaatggaatagtc

SEQ ID NO: 430851 - DNA, 201 bp, Homo sapiens
ttcaccgtgttagccaggatggtctcgatctcctgacctcgtgatccacccgcctcagcctcccaaagtgctgggattacaggcgtgagccgcagcgcccsgcctgtacattatatgtttaaaaacaggatctaaaaattggtttttaaaatgcattagtctcttaaattatatggaaaacaaaacgtgaaattgcaaacc

SEQ ID NO: 430852 - DNA, 201 bp, Homo sapiens
ccaaggttcctgtctcactttctagtgacagtggttgttctgaactctgtcctttctgtaggcccacaagattgtgagttctcttgtactttgatctgccyatggcctgctcttaggcttaaaggtgttgactcttctccaagatctgcctgcagattttgtttattctgcattccctttacgttgttgagttttgtattt

SEQ ID NO: 430853 - DNA, 201 bp, Homo sapiens
ggggtttcaccgtgttagccaggatggtctcgatctcctgacctcgtgatccacccgcctcagcctcccaaagtgctgggattacaggcgtgagccgcagygcccggcctgtacattatatgtttaaaaacaggatctaaaaattggtttttaaaatgcattagtctcttaaattatatggaaaacaaaacgtgaaattgc

SEQ ID NO: 430854 - DNA, 201 bp, Homo sapiens
cacagtctcagctcactgcaagctccgcctcccgggttcactccattctcctgcctcagcctcccgagtagctgggactacaggtgcccgccaccatgccyggctaattttttttttgtatttttagtagagacggggtttcaccgtgttagccaggatggtctcgatctcctgacctcgtgatccacccgcctcagcctc

SEQ ID NO: 430855 - DNA, 201 bp, Homo sapiens
ataacatacaaaaactctacccttttaacagctctgccccaaatccttctagttattgatgtcacaaaagtatatctttgtacattatatgttttttttttgttttgttttgttttttgagacagagtcttgctctgttgcccaggctggagtgcagtggcacagtctcagctcactgcaagctccgcctcccgggttcac

SEQ ID NO: 430856 - DNA, 201 bp, Homo sapiens
tcctgaccttgtgatccacccgcctcagcctcccaaagttctgggattacaggtgtgagccactgtgcccagccaagtcctgaatttttttttttttttttgagacggagtcttgctctgttgcccaggctggagtgcagtggtgtgatctcagctcactgcaagctctgcctcccggattcacagcattctcctgcctca

SEQ ID NO: 430857 - DNA, 201 bp, Homo sapiens
tcaggtgatcagcttattattattttttgttttttagacggagtctcactctgtcacccaggctggagtgcagtagtgtgatcttggctcactgcaacctytgcctcccgggttcaagcgattctcctgcttcagcctcccaagtagctgggactacaggcatgcaccaccatgcccgggtaatttttgtatttttggtag

SEQ ID NO: 430858 - DNA, 201 bp, Homo sapiens
tattggcaaggctggtctcgaactcctgacctcaggtgatccgcccacctcggcctcccagactgctggtattacaggcatgagccactgcacctggcctrtttttactttttttctgtttcacatttcatagattctattgctatgtctttgagttcattaatcttttcttctgcagtgtctaatctgttaatcctatcc

SEQ ID NO: 430859 - DNA, 201 bp, Homo sapiens
tttttttctgcttctttcttttttttgagacagagtcttgctctgtcacccaggctggagtgcagtggtgcgatctcagctcactacaacctccatctccygggttcttggcatggtggtgtgtgtctgtagtcctagctgtctgtagtcctagctactcatctgcttcagcctcccaagtacccagaactacaggcatat

SEQ ID NO: 430860 - DNA, 201 bp, Homo sapiens
aaaaaaaaagaaatcaatctgtgaggctgggcgctgggtggctcatgcctgtaatcccagcatgtgttagtctgttctcacactgctaataaagacatacytgagattgggtagtttataaagaaaagaggattaattgactcatggttccatatggctggggaggccttaacaatcatagcagatggtgaaggggaagca

SEQ ID NO: 430861 - DNA, 201 bp, Homo sapiens
ggcagcaggcaagagagtgtgtgcagggggactgcccttcataaaaccgtcagatctcgtgagacttactcactatcatgagaaccgcatgggaaaacccrtccccatgattcacttacctcccgccgggtccctcccacgacacgtggggattatgggagatacaattcaagatgagatttgggtggagacacagctaaa

SEQ ID NO: 430862 - DNA, 201 bp, Homo sapiens
agggggactgcccttcataaaaccgtcagatctcgtgagacttactcactatcatgagaaccgcatgggaaaacccgtccccatgattcacttacctcccrccgggtccctcccacgacacgtggggattatgggagatacaattcaagatgagatttgggtggagacacagctaaaccatactttcggaggacgaggtgg

SEQ ID NO: 430863 - DNA, 201 bp, Homo sapiens
atctggattgtttgctatcttcaccctgcagagtccagagctctcgctttgtctccaacatggagataatgctcaggtcaggaagacagattcccagaaakaccaggttcctgtagttctcctacatcacttccctgtataaagccctctgtgcagggtccagttatttccactcctcctgagagaattctgtagccacat

SEQ ID NO: 430864 - DNA, 201 bp, Homo sapiens
tgggcaacatggcaagactcctgtgtgtgctgcggcatgaccttcactccacgtgatccacttccaggtctcattggacacattttgagttaattcttgcrtatggcatgatgaagtaaagctccaacttcattatgtatgtggctctcctgttgtcccgtcaccatgtgttgcaaagactattttctcaccttgttaaaa

SEQ ID NO: 430865 - DNA, 201 bp, Homo sapiens
tattttattcacctttttgggagagcttagatattaaggaatttctttttttattttttattttttttgagacagagtcttgctctgcctcccaggctggrgtgcagtggtgcgatgttggctcactgctgcaactactgcctcccaggttcaagcaattctcctgtgtcagcctcccgagttgctgggactatgggtaca

SEQ ID NO: 430866 - DNA, 201 bp, Homo sapiens
tcctgcataaagtcttccagaatactttaagaggggatacttcccaccttatccacaaaaccagcacaactctgacatcaagactcaacaaggacactacrtgaaaaaatatcagatcaatatctctcatgaacagaggtgaaaaaatactttaatcatctggattttgttaaagattttcgaatgaatgttcataaggga

SEQ ID NO: 430867 - DNA, 201 bp, Homo sapiens
tactagcttttatagttgcccatctgtttatctttaccaaaggtatttcttttacaaatatattttttattgttaatcaacaaatcataattgtacatatktatagagtacaatgtgatgttctgatatatgtatacaatgtgttttgattaaatcaagctaatcaacatatctgtcacctcaagtatttatcattttctt

SEQ ID NO: 430868 - DNA, 201 bp, Homo sapiens
caaggctccgtctcagaaaaagagagagaacagctcagaggagatccgcagggggcacctcctttccatagacagggtgtctcgtggagtatttagccccrctcatcttgatgagtattgagctctcagcagagggtagctcctctctgcagctggccgtcccattgtctgttctgctctggctgagcccagggcttttag

SEQ ID NO: 430869 - DNA, 201 bp, Homo sapiens
gctggagtgcaatggcgcgatctcagctcattgcaaccaccgcctcccaggttcaagcaattctcctgcctcagcctcccgagtagctgggattacaggcrcgcaccaccatgctcggctaatttttgtatttttagtagagacggggtttcaccatgttggccagtctggcctcgaactcctgacctggtgatctgccca

SEQ ID NO: 430870 - DNA, 201 bp, Homo sapiens
ttacaagtgtgagccaccgcatccagctcagacctttttcttaatgctgaatgatacatcatggattgtaggtgttataaaaatagcaagtaggaatggargtgactctgtgactttcttttaaaggatcgaccattatcagccagagagaggaggcgactaaagcagtcacaggaagaaatgtcctcttcaggtaaagtt

SEQ ID NO: 430871 - DNA, 201 bp, Homo sapiens
atcagccagagagaggaggcgactaaagcagtcacaggaagaaatgtcctcttcaggtaaagttgacttcttttcttcatctaattggcagttaggggtayggttcgtggacagaaacactggttctaactatgagaggttgaaactttccagcagcagtaaaacatgtaggaaatcgagttggaaaagattttgaaattt

SEQ ID NO: 430872 - DNA, 201 bp, Homo sapiens
taaaacatgtaggaaatcgagttggaaaagattttgaaatttcttagtcaagtcttttaagaaatcatcatagggtgttgaatgtggttcaaatatcagargagggggatattaaagaaataacaagagggctttgagtggcagtaagtcctgggaggtttcagaccagaaatcaagtgaatgtttaacttttttccatgt

SEQ ID NO: 430873 - DNA, 201 bp, Homo sapiens
gggattacggggaagggtaagttcttgtttttctgtctccctttataaactatttctgttttaatgaatattaaatgtgcattttcagtagtatttagatstctagtattcccactgataaaattataaatggtttgtggcatatgctggagctaaaagtgtctcttcttttttttttttttttttttttgagacggagtt

SEQ ID NO: 430874 - DNA, 201 bp, Homo sapiens
gaagtgggaaaaaggaggaaaagaagagagagaaaacaaagaatttaaaaataattaaataattgaggccaggtgcagtagctcacgcctgtgatcccagmaccttgggagactgaggtgggcagatcacttgaggtcaagagtttgagaccagcctggccaacatgatgaaaccccgtctctactaaaaatacaaaaatt

SEQ ID NO: 430875 - DNA, 201 bp, Homo sapiens
cacctcagcctcccaagtacctaggactacaggtgcacaccaccacacctggctaattttttgtagtctttgtagagacaaagtttcaccatgttgcctargctggtcttgaactcctgagctcaagggatcagcccgctttggccttgcaaagtgctggaattacagatgtgagccatggtacctggccactgagggtgg

SEQ ID NO: 430876 - DNA, 201 bp, Homo sapiens
tggtaaacaccattctcctgtctgttcctattaatttgattaatctgactgtttttagagatttttctttcttcataaagcttcaagttatttattgtcataatttcaacccacagaattcccttgaatatttctgatagggaagatctagtgttaatcagatttatctggaaatgtcttgatttctccctcacttttgaa

SEQ ID NO: 430877 - DNA, 201 bp, Homo sapiens
ggtaaacaccattctcctgtctgttcctattaatttgattaatctgactgtttttagagatttttctttcttcataaagcttcaagttatttattgtcatmatttcaacccacagaattcccttgaatatttctgatagggaagatctagtgttaatcagatttatctggaaatgtcttgatttctccctcacttttgaag

SEQ ID NO: 430878 - DNA, 201 bp, Homo sapiens
gtaaacaccattctcctgtctgttcctattaatttgattaatctgactgtttttagagatttttctttcttcataaagcttcaagttatttattgtcatamtttcaacccacagaattcccttgaatatttctgatagggaagatctagtgttaatcagatttatctggaaatgtcttgatttctccctcacttttgaagg

SEQ ID NO: 430879 - DNA, 201 bp, Homo sapiens
ggctcatccctgtatgcccagcactttgggaagccaaggcgggcagatcacctgaggttgggagttcgagaccagcttgaccaacatggagaaaccctgtstctactaaaaatacaaaattagccaggcgtggtggggcatgcctattatcccagctacttgggaggctgaggcaggagaatcacttgagcccaggaggcg

SEQ ID NO: 430880 - DNA, 201 bp, Homo sapiens
gtagccttgacctcctggactcatacaatcctcttacctcagcctcctgggtagctgtgactacctggcatatcactacatctgactttttttttttttttaaatggagatggaggtctcactctgttgctcagactggtcttgaactcgtggcctccagtggtcttcctgacttggcttcccagagtgttgggattacag

SEQ ID NO: 430881 - DNA, 201 bp, Homo sapiens
agcttgcagtgagccgagatcgcgccattgcactccagcctgggcgacagagcgagactctgtctcaaaaaaaattaaataaaataataatttttttttttgagacactcttgctgtgtcacccaggctagaggacagtggcatgatcacagctcatggtagccttgacctcctggactcatacaatcctcttacctcagc

SEQ ID NO: 430882 - DNA, 201 bp, Homo sapiens
tgggaggccgaggcgggcggatcatgaggtcaggagatcgagaccatcctggctaacacagtgaaacgccgtctctactaaaaatacaaaaaaaaaaaaaattagctgggcgtggtggcggccacctgtagtcccagctactcgggaggctgaggcaggagaatggcgtgaacccaggaggaggagcttgcagtgagccga

SEQ ID NO: 430883 - DNA, 201 bp, Homo sapiens
ggcattttgtctttgcctgtcaacactgcaaataaacattcattttgagaaagacaacttctcattttctttttaatttattaaaaaattttggccaggcmcagtggctcacacctgtaattccagcactttgggaggccgaggcgggcggatcatgaggtcaggagatcgagaccatcctggctaacacagtgaaacgcc

SEQ ID NO: 430884 - DNA, 201 bp, Homo sapiens
tttttcttttgagacggagttttgtttttgttatctaggctggagtgcaatggcacgatctcggctcactgcaacctccacctcccaggttcaagcgattytcctgcctcagcctcccaagtagctgggattacaggcgcctgccaccatacctggctaatttttttttttgtatttttagtagagatggggttttaccat

SEQ ID NO: 430885 - DNA, 201 bp, Homo sapiens
gggttcattcgtgttttagcatgtatcagaacttcattcctttttatagattagaaatattccattgtgtgtgtgtgtgtgtgtgtatatatatatatatwttttttttttttttttttgaggcagggtttcactcctgttgcccaggctggagtgcagtggcgggctctcggctcactacaacctccgcctcctaggctc

SEQ ID NO: 430886 - DNA, 201 bp, Homo sapiens
ttagtagagacggggtttcaccatgttagccaggatgttctggatctcctgacctcgtgatccgcccatcttggcctcccaaagttctaggattacaggcrtgagccacggtgcccggcccacagttttgtttttcaagctgtccattgccattggtcagcttgaactagtccagagtccagcaggaaagtgcatggtgta

SEQ ID NO: 430887 - DNA, 201 bp, Homo sapiens
ggagtccagtggtgcgaccttggctcactgcaagctctgcctcccgggttcacgccattctcctgcctcagcctcccgagtagctgggactacaggcgccygccaccgcgcccggctaatttttttgcatttttagtagagacggggtttcaccatgttagccaggatgttctggatctcctgacctcgtgatccgcccat

SEQ ID NO: 430888 - DNA, 201 bp, Homo sapiens
agattgttttggctatttgggatcccttgagattccactgaattttaggatggatttttctatttttccaaagaatgtcattgggattttgatagggattrgattgaatctgtagattgctctgggtaatattaatatattgacaatattaagcttttctcaaggagatgcccaaatgtaaaaagagaaaaaaagaaagaa

SEQ ID NO: 430889 - DNA, 201 bp, Homo sapiens
acggggtttcaccttgttagccaggatggtctcgatctcctgacctcatgatccacccgcctcggcctcccaaagtgctgggattacaggcgtgagccacygcgcccggcttgtaaacatatttttaaactggattcatgtaatgccaaaatggtataattgtcaagctaccagggaacagttttgatgggtactgggtaa

SEQ ID NO: 430890 - DNA, 201 bp, Homo sapiens
tatgactataaataaatattgggaaacctctaccagcttttactttgtttcacaagaccattagtcataattacaatattatttttatttgtagctgccascaatgccaagagattacagcccagagctggcagaactgataagaacaatgctgagcaaaaggcctgaagaaaggccgtctgtgaggagcatcctgaggca

SEQ ID NO: 430891 - DNA, 201 bp, Homo sapiens
ggctccgtaggcttagttatgggcaaagcatttttgggaatagaaggcagctgtttctttggcatagttcatcaaagactggtttttgcatcccctgccartgttttcagcttcagatcgtttccatgtagagcttgtagacatgctccagaaagagtacataatgtgtactccaaacaaagaaattcagtagtatgtcat

SEQ ID NO: 430892 - DNA, 201 bp, Homo sapiens
ggcaatatagttggaccctgtctctaagaaaaaaaaattacctggcaaggtggcgcacacctgtagtcccagccactcgggaggctgaggtggaaggatcrcttgagcccaagaggttgaggctacagtgagttgtgttcacaccactgtgctttagcctaggtgacagagcaagactctgtctcaaaaatataaataaat

SEQ ID NO: 430893 - DNA, 201 bp, Homo sapiens
caatggtgcaatcttggctcaccgcaacctccgcctcgcgggttcaagcgattcttccgcctcagcctcctgagtagctgggattacaggcatgcgccacyatgcccggctaattttgtatttttagtagagacagggtttctccatgttggtcaggctggtctcgaactcccgacctcaggtgatccgcctgcctcggcc

SEQ ID NO: 430894 - DNA, 201 bp, Homo sapiens
cctggcttacttcttttcttttctgagacaggatctcaactgtgtcaaccaggctggagtgcagtggtgtgatcacggctcactgcagccttgacctcccrgctcaagcaatcctcccactcaggcttccaagtagctgggactacaggcacttgccaccatgcccagctaattttttggtattttttatagaaatggggt

SEQ ID NO: 430895 - DNA, 201 bp, Homo sapiens
ctcaataaaaccttgcattcattctccaagcccacgtgtgatctgattcttccggtacaccaaggcaagaaccctgggatacaaaagccctctgtccttgmgatagggcaagggtctaattgagctaacacaagctgcctacagatggctaaactaaaagagcaccctgtaacacacacccactggggcttcagctgtaaa

SEQ ID NO: 430896 - DNA, 201 bp, Homo sapiens
ggcaaatgtttgtcccaggagaaacccagggcctctggtctcttgaagtcacctgccagtctgaaagcccatacctgcaaacaggacttgagcaataccayagaactagccacaatcagtagcgtaaatattgacatcttacctgcaaaagggagggattcagtgagtgatggctttgttcaggagaatcagccaagatat

SEQ ID NO: 430897 - DNA, 201 bp, Homo sapiens
atacaaattaaaactgagacacattggctttgtaaatcagtatgtttttacataatggttttgttagatttatttttccatcagtgaaaacatttcttaarcacaaatttcatttccatttaagcaatttgtaagcaaagtccaggtccatttagtttttggatatatttaatgtttgtctcctgaagtttgtcttcatgt

SEQ ID NO: 430898 - DNA, 201 bp, Homo sapiens
atctcagctcactataacctctgcctcctgggttcaatgattctcgtgcctccgtctcccaagtacctgggattgcaagtgcataccaccatgcccagctrattttagtatttttagtagagatggggtttcaccatgttggccagactggtctcaaactcctgacctcaagtgaatcgcctgccttggcctcccaaagtg

SEQ ID NO: 430899 - DNA, 201 bp, Homo sapiens
tcaaactcctgggctcaggaggtcctcccaccttggcttcccaaacaaagtgctggaattacaggcatgagccactgtgcccaggctttttttttttttttcttttttctttttttaagagaggatcttgctctgttacgtaggctggagtatagtggcatcatcatagctcactacagcctctgaactccttgactcaag

SEQ ID NO: 430900 - DNA, 201 bp, Homo sapiens
cctaacgattaatgacatacagcatcttttcacatgcttgttggccatttgtatgtcttctttggagaaatatctgctaaagcttttgcttttttttttttgatacagggtcttgctctgttgcctaggctggagtgcagtgctgcgatcacggctcaatctagcctccacctctctggatcaagtgatcctcccacctca

SEQ ID NO: 430901 - DNA, 201 bp, Homo sapiens
gatccgctcacctcggcctcccaaactgctgaacactgcgcctggcctgtaaacatattttttttttttttgagacggagtctcgctctgtcgcccaggcyggactacggactgcagtggcgcaatcttggctcactgcaagctccgcttcccgggttcacgccattctcctgcctcagcgtcccgagtagctgggactac

SEQ ID NO: 430902 - DNA, 201 bp, Homo sapiens
gcaacctccacctcccaggttcaagcgattctcctgcctcagcctcccaagtagctgggattacaggcgcctgccaccatacctggctaatttttttttttgtatttttagtagagatggggttttaccatgttggccaggctggtctcgaactcttgacctcaggtgatccacctgcctcggcctcccaaagtgctggga

SEQ ID NO: 430903 - DNA, 201 bp, Homo sapiens
catgggaaggaggagatggtctgctctacattgtcatgggcttctgtgaaggaggtgatttgtaccgaaagctcaaggagcagaaagggcagcttctgcckgagaatcaggtggtagagtggtttgtacagatcgccatggctttgcaggtactgtgtagactaatagcatcctagcttgttcccagatggcaagaagatg

SEQ ID NO: 430904 - DNA, 201 bp, Homo sapiens
tttgaaatctttttttttttttttctttttttttgagacagagtctcactctgtcacccaggctggagtgcagtggcgtgatcttcgctcactacaacctmcgcctcccaggttcaagcgattctcctgcctcagccttccgagtaactgggactacaggtgcgtgtcaccatacctggctaattttgtatttttagtaga

SEQ ID NO: 430905 - DNA, 201 bp, Homo sapiens
agcgtttggccatttggatgttcaaaagacttcattattttgtgtttttgtgtgtgtttgcttcattttataatcattattttttaactgttgcattatgmtttaatttcattgcacaaaaatttgaaattgcaactgcttttcttttcttttctttttttttttttttgagatggagtctcactctgttgcccaggctgg

SEQ ID NO: 430906 - DNA, 201 bp, Homo sapiens
ctttaaatattcttgagctttgtacttgagtatagttaagttactttgaaataggcagaatttgtacacagaatctggggctgtttcttttagactgtctscaaggttcctgtctcactttctagtgacagtggttgttctgaactctgtcctttctgtaggcccacaagattgtgagttctcttgtactttgatctgccc

SEQ ID NO: 430907 - DNA, 201 bp, Homo sapiens
  misc_feature (1)...(201): n = A,T,C or G
gcagagtccagagctctcgctttgtctccaacatggagataatgctcaggtcaggaagacagattcccagaaagaccaggttcctgtagttctcctacatnacttccctgtataaagccctctgtgcagggtccagttatttccactcctcctgagagaattctgtagccacatccatgaatgtcaagtgacgctgagtaa

SEQ ID NO: 430908 - DNA, 201 bp, Homo sapiens
cctcccggtttcaagggattctcctgcctcaggctcccgagtagctgggattacaggcacacgccaccacacccagctaatttttgcatttttagtagagrtggggtttcaccgtgttggccaggaggtcttgatctcctgacctcgtgatccacctacctcggcttcccaaagtgttgggattacaggcatgagccacca

SEQ ID NO: 430909 - DNA, 201 bp, Homo sapiens
ctgggggtgacatcacatatcagtaggaccgtgatgcccacctgagccttaaaaccagcaagtttttattaaggatttcaaaaggggagggggtgtacaarcagggagtaggtcacaaagatcacatgcttcaaagggcaaaaggcagaacaaatatcacatgcttctgaggaaacaggacaaaggcaaaatcagaactac

SEQ ID NO: 430910 - DNA, 201 bp, Homo sapiens
atgaaaaacacatccttcatcgagatctgaaaactcaaaatgtcttcctaacaagaacaaacatcatcaaagtaggggacctaggaattgcccgagtgttrgagaaccactgtgacatggctagcaccctcattggcacaccctactacatgagccctgaattgttctcaaacaaaccctacaactataaggtaggattgg

SEQ ID NO: 430911 - DNA, 201 bp, Homo sapiens
cttctgaggaaacaggacaaaggcaaaatcagaactactgataagggtctatgttcagctgtgcacatattgtcttgataaacatcttaaacaacagaaawcacagttcgagagcagagaaccggtctgaccacaaatttaccagggtggagttttttccccaccctaacaagcctgagggtactgcaggagaccagggca

SEQ ID NO: 430912 - DNA, 201 bp, Homo sapiens
gaaacaggacaaaggcaaaatcagaactactgataagggtctatgttcagctgtgcacatattgtcttgataaacatcttaaacaacagaaatcacagttygagagcagagaaccggtctgaccacaaatttaccagggtggagttttttccccaccctaacaagcctgagggtactgcaggagaccagggcatatttcag

SEQ ID NO: 430913 - DNA, 201 bp, Homo sapiens
taatattccttgctaggaaaagaatttagtgatatcttccctacttgcatgtctgtttataggctctctgcaagaagaaaaatatggctctattttgcccracccctcaggcagtcagaccttatggttgtcttcccttgttccctgaaaatcgctgttattctgttctttttcaaggtgcactgacttcatattgttcaa

SEQ ID NO: 430914 - DNA, 201 bp, Homo sapiens
ggggtttcaccatgttggccagtctggtcttgaactcctgacctcaggtgatccacccaccttggccttccaaagtgctaggattacaggtgtgagccacygtgcccgccctttttttttaatttaaaatatttgaaacaggctttcgctccatcccccaggctggagtgcagtattgggggaacccacccccaatatttc

SEQ ID NO: 430915 - DNA, 201 bp, Homo sapiens
aaactctgtctcaattttttaaaaaaagaaagaaaaatattactattgactaaattccagactttctttggctttcaccagtttttttctctaatgtctcwtttctgttccaggatccaatccaggatatagtacatctaatcaggggtctgtgattgtttctcactttgtttattttttatgaccttgattgtttcaaag

SEQ ID NO: 430916 - DNA, 201 bp, Homo sapiens
gactttttgaggaactgttgcactgttttctacagtggctgcaccatttgacattcccatcagcagtgcacaagagttccagtttctccacatctttgccrgcactaattattttctgattttttgattctagccatcctagtgggtgtaaagtggtatcctattgtatttttgatttgtatttccctaacgattaatgac

SEQ ID NO: 430917 - DNA, 201 bp, Homo sapiens
gtagttttcaaatatcagtgagttcgaagcagagtaaggattttatcttctccagcaaagatggacagatcattttgaaagttaaaggaataggctaatgwggttaaacctttggccccatctgtattgtactgatgaacagttctttcttcagcttctccacagaatcatgttgacatctcatttctagaaataacttca

SEQ ID NO: 430918 - DNA, 201 bp, Homo sapiens
aattagttggacatggtagtgcattcctgtagttctggttacttggaaggctgaggcagggtgattgcttgagcccaggaattagaggctatagtgagctrtggtcacactgcactacatccctatgacagtgcaagaccctgtcacttaaaaaaaaaaaataggccgggtgcagtggctcatgcctgtaatcccagcact

SEQ ID NO: 430919 - DNA, 201 bp, Homo sapiens
tgtgtctactaaaaatacaaaaaattagctgggtgtggtggtgggcccctgtagtcccaaatagtcgggaggctgaggcaggagaatggcatgaacctagsgggtggagcttgcagtgagctgagatcgtgccactgcactccagcctgggcgacagagcaagactccgtctcaaaaataaaataaataaataaaataaaa

SEQ ID NO: 430920 - DNA, 201 bp, Homo sapiens
ttcaagcgattcttccgcctcagcctcctgagtagctgggattacaggcatgcgccaccatgcccggctaattttgtatttttagtagagacagggtttcwccatgttggtcaggctggtctcgaactcccgacctcaggtgatccgcctgcctcggcctcccaaagtgctgggattacaggcgtgagctactatgcctgg

SEQ ID NO: 430921 - DNA, 201 bp, Homo sapiens
tgttatagaattttttaaacaaccttttgaaatataaatcacacataacaattcactcatctaaagtgtataattcagtggtttttaatgtgtttacaacrttgtacagtcattaccacaatcgatattagaacattttcattacgccccaagaagccctgcacctgttagcagtcactccccatggtccgcactgccaaa

SEQ ID NO: 430922 - DNA, 201 bp, Homo sapiens
ctcgcgggttcaagcgattcttccgcctcagcctcctgagtagctgggattacaggcatgcgccaccatgcccggctaattttgtatttttagtagagacrgggtttctccatgttggtcaggctggtctcgaactcccgacctcaggtgatccgcctgcctcggcctcccaaagtgctgggattacaggcgtgagctact

SEQ ID NO: 430923 - DNA, 201 bp, Homo sapiens
gtatgacttctctgttgagtgagggaaaatttgtgcctgaagttcttgtacactcattacatttgtaaggtttttctccagaatggattacaagatgggcrctaagtcctgaacactctttaaatgctttaccacattcgttacatttgcgaggcctctctccaggatgaattctttgatgttgtgcaaggtttgaattgc

SEQ ID NO: 430924 - DNA, 201 bp, Homo sapiens
gtaccggcccgtcggagacttccgcttccggggccgccgccatcgctctcccgggcttagaaggcccggctactgacgcgcagtgccagaccttacccctyacggtccttaagtctcggtcgccctcgcctcgcagcctgccacccgcgctcagctgcccgcctcctcagccagccatgctggagcatctgagctcgctgc

SEQ ID NO: 430925 - DNA, 201 bp, Homo sapiens
gggctgtaccggcccgtcggagacttccgcttccggggccgccgccatcgctctcccgggcttagaaggcccggctactgacgcgcagtgccagaccttasccctcacggtccttaagtctcggtcgccctcgcctcgcagcctgccacccgcgctcagctgcccgcctcctcagccagccatgctggagcatctgagctc

SEQ ID NO: 430926 - DNA, 201 bp, Homo sapiens
tggtgcgaactatataaaaggacacagcttatttcctttggcggctactctggctaataatcttaaggtcaaagccagcaggagttttcatggtgctcacrttgtcccttcaccttttatttatttatttatttaaattttttgagacggagtttcactcttgttgcccaggctgcagtgcactggggcgatttcggctca

SEQ ID NO: 430927 - DNA, 201 bp, Homo sapiens
aggcccttaggagagcgggagaccctgatgttggggttaccctgtgccagagttgtgaggtcagggcaggaattgtatgttctcggcggtggaaccaattmtttttttcctctgcttcaccccaggattacaagggccagaagctagctgaacagatgtttcagggaattattcttttttctgcagtaagtattggtttta

SEQ ID NO: 430928 - DNA, 201 bp, Homo sapiens
ttttaggtcttaaagccatttgtataggcagtgagcctgttcccatcatcatacagtattttgcatggatggtggcacagagcctttataggaatatggatttttttttttgtttttttgttccctcagcataggagtcatttgggaacctggcattatacgtaatgattttttaaacttttaatagctataatttatgca

SEQ ID NO: 430929 - DNA, 201 bp, Homo sapiens
tatctacgggtacgtggctgaacagttcgggtggactgtctatatagttatggccggatttgctttttcatgtttggtaagaaatttgtgggtattagtgrcagcttgggttttgtgagtcgggttggtttggttagacctactcagtagtgagacccaaagccaacgtttccctcatccttccaaacagcgtttcccttt

SEQ ID NO: 430930 - DNA, 201 bp, Homo sapiens
ctgtcgcctctgacagctgcagttgctccctcatcatgtcactctatttgaataaaaaagaaactgaacagttttgggatgtcaataaaccacgacctatstctgggaaggtactagatctggatcatgttagaaacctcatctgagtagtcatttatttttacagagggaaaaaaattatcctttgtatatccttccagc

SEQ ID NO: 430931 - DNA, 201 bp, Homo sapiens
tgaaaaagacacagcaataagatgggtgggtatcaaaatatcagctttgccacaaattaaaaacctagcttgaaggacaaggcttaaatctgcaagcaagmgggcaagctactaaatcacccgtaagtcagacaaacatatcccccagcctctaggccatgaaactgcctcaccaagcactatgcaattgagtgcccacca

SEQ ID NO: 430932 - DNA, 201 bp, Homo sapiens
tcaccaagcactatgcaattgagtgcccaccagaagacacccctccagtcaacccacagaccccagaaagagtacccagaggagcctgagcacactccacyctatctgttctctgaaattcaatcaaatgagtcactctacttctctggaagcagaaagaggctggaagtttttctccaggtaagttcctccatgtagaaa

SEQ ID NO: 430933 - DNA, 201 bp, Homo sapiens
tattaatcaagcaataaccagtctcccctcacagcataaagcagactaaacacacatgaattagaaggaagtgggcttcacctcttgttctcttctttctmcagcagcagactgctcgacaaacactgcgccaagagctcctcagcagaagctcctcgcatcagatcctctgtgctgggaatcctcccctcttgagcacac

SEQ ID NO: 430934 - DNA, 201 bp, Homo sapiens
cactgcgccaagagctcctcagcagaagctcctcgcatcagatcctctgtgctgggaatcctcccctcttgagcacactctgtgctcctcttccagttacrgtgcatgtgaagcaatggtatgggaaaattgtttgcagaaggatgaaaaggctttattgccaaactgtaagtacatgatttgaaatgtttatggtcaaga

SEQ ID NO: 430935 - DNA, 201 bp, Homo sapiens
gaaaattcccctcgcatgacatataacatccaacaaggggctgaaccaagaaaaaatactgcagctgctgctaatggcaacactgagcaagcacctggccwgtgccaggcactgtcctgtgcagtctgtgtttgcactcattttatcctcaagagccagatgagcatctccaccagacagcacctgcagaggcttgggcag

SEQ ID NO: 430936 - DNA, 201 bp, Homo sapiens
cgagtgaccgaacttggaagggacagccgggcgcaacagggcagggggcgtctgactgttggaaacatggctgacgtctggaggctgcagccagtggtccstaagtcaggtcaaggacccacagaagaccccagcatgtcttcacctggcccacagaagccctgacatccagttacaactgccccagcctagtgagcattt

SEQ ID NO: 430937 - DNA, 201 bp, Homo sapiens
gggtgggtatcaaaatatcagctttgccacaaattaaaaacctagcttgaaggacaaggcttaaatctgcaagcaagagggcaagctactaaatcacccgtaagtcagacaaacatatcccccagcctctaggccatgaaactgcctcaccaagcactatgcaattgagtgcccaccagaagacacccctccagtcaaccc

SEQ ID NO: 430938 - DNA, 201 bp, Homo sapiens
tttgagaagggggtcttgctatgttggccaggctggtctcaaactcctgagctcaagcagtcctcctgcttcagcctccgagtagcagagactacaggtgygaggagccaccacgcccagcttcagacttcctttttaaaggaaacatcaaataacattatttcttcatatattcagaggacaattaccctagaaaaataa

SEQ ID NO: 430939 - DNA, 201 bp, Homo sapiens
gatccctctggagcagctggcccacaagagtcctgcaaacactggcaactatgacctagtagaaaaacaaacctattagctggcagactgtacccattgayagtttccaacaagcaccatcatcagcatgagccagacatttggggaaaacagtgcaacattacctccagccatgcaagtgatccatcttggaccactgac

SEQ ID NO: 430940 - DNA, 201 bp, Homo sapiens
tccaccttcctggaagcccccacacatttggctatccacaagctctctgaaccctgtccttttgggtttttaggagccctcattacataggcatgattgattaaatcattggccactggcgatcaacgtcactttcagtccctctcccccaacctctgggagtttggggggtgggctgaaagtttcaacccctctaatcat

SEQ ID NO: 430941 - DNA, 201 bp, Homo sapiens
tagaaaaataatttctatatctgcccttcagatataaggcatgttcatattttattttatttttatttatttattttttgagatggagtctcactctgtcrcccaggctggattgcagtggcacgatctcagctccctgcaatttctgcctcctggattcaagcaattctcctgcctcaccctccctagtagctgggatta

SEQ ID NO: 430942 - DNA, 201 bp, Homo sapiens
ggcaactatgacctagtagaaaaacaaacctattagctggcagactgtacccattgacagtttccaacaagcaccatcatcagcatgagccagacatttgrggaaaacagtgcaacattacctccagccatgcaagtgatccatcttggaccactgacccagtcaagccttcagatgactataacctcagccaatacctga

SEQ ID NO: 430943 - DNA, 201 bp, Homo sapiens
ttaaaaaaattttttaaacgacatgtacggacagacataatacttgcttctgagcctcccagtctttcaaaaccacattagggaataagcagtatttgcayggttccagtgatatctgggagtaagtgaaagtaatgaaaacacagaagtaaacacaaagtaattatagttcacctttatacacacgttaacagaaatcat

SEQ ID NO: 430944 - DNA, 201 bp, Homo sapiens
agagaaaaggcttccacagagaaaaccaggccacacagaaaggaacaggaatggtacagcaacaatggatgctaggtgacagtggagcaaaactggaaggmaaataattttctttcttttgagacggggtcttcctctgtcaacaccggagtgcagtggtgcgatcacggctcactgcagcctcgaactcccaggttcaag

SEQ ID NO: 430945 - DNA, 201 bp, Homo sapiens
acctggccacacaaccaagctggtacctccacgctttcatcatgtcctctcaagtacactgtctccagctacacccctgcactcctctccgggaattctgyttctcctctacccaaccagaccctgttccatcctctgttttttccttgctaccaattcaggcccacgcctcatgcacattctctgagaattatgtacata

SEQ ID NO: 430946 - DNA, 201 bp, Homo sapiens
gtccaccttcctggaagcccccacacatttggctatccacaagctctctgaaccctgtccttttgggtttttaggagccctcattacataggcatgattgattaaatcattggccactggcgatcaacgtcactttcagtccctctcccccaacctctgggagtttggggggtgggctgaaagtttcaacccctctaatca

SEQ ID NO: 430947 - DNA, 201 bp, Homo sapiens
aagtgcccagcacaataaattgggcaggggttggggagggaatggggaggcaacatatgaagtaatgtcattgagaaatttgagaacaccaggaatagagrtgatctcaaaaatttccagcaacaaaaaaagcaaaaacacaaaggaacgatttccaatctaaaattctattctcattcaaatgatgaatcaaacgtaagg

SEQ ID NO: 430948 - DNA, 201 bp, Homo sapiens
tgagtagtcatttatttttacagagggaaaaaaattatcctttgtatatccttccagcctcatttagctcgtacattcagctggtatctgtatatagactstttgcctttgtattctatcatgaacaatttccagtgtcagtcatttttcacccaggctggaacgcagtggtatgatcggagcttactgcagcctcaaact

SEQ ID NO: 430949 - DNA, 201 bp, Homo sapiens
tgtccaccttcctggaagcccccacacatttggctatccacaagctctctgaaccctgtccttttgggtttttaggagccctcattacataggcatgattgattaaatcattggccactggcgatcaacgtcactttcagtccctctcccccaacctctgggagtttggggggtgggctgaaagtttcaacccctctaatc

SEQ ID NO: 430950 - DNA, 201 bp, Homo sapiens
agctttactgtatgtcttggtatcaggccaagcaaaccatgttagtcttatttaaaactttctcagcaattgatgcatatttgtttatcctgatgaatttyagaacttaccagtactgacatcttcacagcattgtatcctgtcaacaacctagtctgaacctcaatggttcaggtttcctttgcacatacaggccctgag

SEQ ID NO: 430951 - DNA, 201 bp, Homo sapiens
cctggtctttcagatgtccagtccctatcctgaagctacataggagctgtccgccatcagtcatcttactagcatacaaaaagacatcactttagagatcycaaggattttaggagttgtatatcagaaggcagagacaaagaccagatatatatttgataatattacagtagaaataaagacattttagatattcaagct

SEQ ID NO: 430952 - DNA, 201 bp, Homo sapiens
aattaaaggtgaaaagccttagcagcagagggaagaggaagatggaggcagagcgagtgaccgaacttggaagggacagccgggcgcaacagggcagggggcgtctgactgttggaaacatggctgacgtctggaggctgcagccagtggtccgtaagtcaggtcaaggacccacagaagaccccagcatgtcttcacctg

SEQ ID NO: 430953 - DNA, 201 bp, Homo sapiens
tagaattctacagatttaaaaaaaacaaaaaacaaaaaaaacacttgaagaatctaattctatatttgaattataaagactttcaggaaaagaagaaagaraaatatcacacagacctaggtccacaaataccacatcttactatgaagctgatctgcacaaaacaggctgttgttttaaaatggagcaacgatctgtact

SEQ ID NO: 430954 - DNA, 201 bp, Homo sapiens
agagagatggagctcagaggcaacttcctcttcccttgaactccggatcagcctttccaggtgctttagtcgttcgcctagacacgttcctgtcgcctctracagctgcagttgctccctcatcatgtcactctatttgaataaaaaagaaactgaacagttttgggatgtcaataaaccacgacctatctctgggaaggt

SEQ ID NO: 430955 - DNA, 201 bp, Homo sapiens
gaaaagcgaaagcgtctgaatcccaccagcatcgctggatgtgtcatccactgagccttcatctcccatgaacttgacttttaaccaatttgctagaattytacagatttaaaaaaaacaaaaaacaaaaaaaacacttgaagaatctaattctatatttgaattataaagactttcaggaaaagaagaaagaaaaatatc

SEQ ID NO: 430956 - DNA, 201 bp, Homo sapiens
caaggaagtgaatcctgacacaagctcactagagtgagctgggaagtagatacccttcagtcaagctttcagatgaggccacaatcctagccaacattttsatttccacccatgagaaaccttgagccagaagacccaagctaagctacacctggattcctgacccacagataccatgataacagacattattttaagctg

SEQ ID NO: 430957 - DNA, 201 bp, Homo sapiens
ggagctcagaggcaacttcctcttcccttgaactccggatcagcctttccaggtgctttagtcgttcgcctagacacgttcctgtcgcctctgacagctgmagttgctccctcatcatgtcactctatttgaataaaaaagaaactgaacagttttgggatgtcaataaaccacgacctatctctgggaaggtactagatc

SEQ ID NO: 430958 - DNA, 201 bp, Homo sapiens
ataccaggaaggtgcagaaattggaataactggtggaaaatttttgtgaggaacagtatgaccatagatcccctctcctacttgggtggaggaagtctccmgtagttgaatcagagtaggtgttacctcaggcatgaggcatagctgaggaccactgaaagcagacagattgagttaaagtctacacatgtgggtccaggc

SEQ ID NO: 430959 - DNA, 201 bp, Homo sapiens
tttgtcggtcatcaaaacatcataggataaatcgtgatattacttttttccccagccattctctcaatctttaattcttatgtaaatgccaaatgtatackttcttctcacctgtgggctagtagttacagatgttttcatcacaggttcaatagtgtgagaaagagacactagagtctgaggaagatagaggggaaggga

SEQ ID NO: 430960 - DNA, 201 bp, Homo sapiens
atcaactaaacatcttcctttgcagaaactggaccaggaaagtctcgtgaggagctgatcccattgcatcaagctctaattacctgatgtaacaggaagcygggggggcgtccagtctctcagcttgtggttgatacacaaggcgataagatcatcccatgggatctccatgaccgaggggcctgccccatggactgggga

SEQ ID NO: 430961 - DNA, 201 bp, Homo sapiens
ccaagttatggcaagaagacagggggttctcaggaacatctcgaagagaaagtggagcatattacctgatgcacatgactttgttgggaagagctttacayttagggcagcgacttttgggtaaagtagtgacaagagcatagaaaaccaagcaaatgagaaaaacaatgtaattaactccaggaaaaatcaaaagttgta

SEQ ID NO: 430962 - DNA, 201 bp, Homo sapiens
gctctaaactgcctcagagcatatgctggtgggtgacaatctgaggaggtcatgaatataggagaatattgaagaggtcacacaggggaaacaacttttcmttatgaaaaactgggagactgacatttaaatggtttatctgcatgattaaattaatcacatttccaacagtgcatcaagcatctgagaataacattattt

SEQ ID NO: 430963 - DNA, 201 bp, Homo sapiens
atattacatttaggaaatccaatatatagtattaaaacagaaaaagtaaagaagcaggctgggcttggtgcccactactcaatttgactggcttaaaaaawttttttaaacgacatgtacggacagacataatacttgcttctgagcctcccagtctttcaaaaccacattagggaataagcagtatttgcatggttccag

SEQ ID NO: 430964 - DNA, 201 bp, Homo sapiens
ggtctaatttgagctaataatttgtcggtcatcaaaacatcataggataaatcgtgatattacttttttccccagccattctctcaatctttaattcttaygtaaatgccaaatgtatacgttcttctcacctgtgggctagtagttacagatgttttcatcacaggttcaatagtgtgagaaagagacactagagtctga

SEQ ID NO: 430965 - DNA, 201 bp, Homo sapiens
gacctcaggtgatccacccacctcggcctcccaaagtgctgggattacaggagtgagccactgtgcttggccaattttattattatttttttttgacaagktctcgctctgttggccaggccggagtgcagtgttacaatcttggctcactgcaaccttgacctcccaagctcaaatgatctcacctcagcctcccaaata

SEQ ID NO: 430966 - DNA, 201 bp, Homo sapiens
caagcaatcttcccacctcagcttcccaagctactagaactacaggcacacaccaccatgcccagctaatttttgtattttttatagagacagggtttcamcgcgttgcccaggctggtctcgaactcctgcactcaaaacaatccgctcacttcggcctcccaaagtgctgggattacaggcataagccactatgcgcgg

SEQ ID NO: 430967 - DNA, 201 bp, Homo sapiens
ctaaagagggaagtgggaccaagacagggaggcatgtttcatgtctgtgtgctgctgatgggcaccacctaatatggggaggggtggtagcacgagagagwtactcattgaatgaatgtccttgggtaggtgggagatgagatcccagcccagggaagggctgactgactacgagctgcatggttcgtttccagcaacaag

SEQ ID NO: 430968 - DNA, 201 bp, Homo sapiens
tagccttttagggcctcactcagatatagacagatagccttgggtaaggcatctgaggagggcctccaacataaaagagataaactggagtaacagagagraaaaaaaaaaaaaagaggaaccagataatacgtgaaccaaagaaaacttagaccccaaaaaccctaatttccttggaaagataagatgatgcatccaaaa

SEQ ID NO: 430969 - DNA, 201 bp, Homo sapiens
atccaccccaccccaaacacagaacttcttggctagccttttagggcctcactcagatatagacagatagccttgggtaaggcatctgaggagggcctccwacataaaagagataaactggagtaacagagaggaaaaaaaaaaaaaagaggaaccagataatacgtgaaccaaagaaaacttagaccccaaaaaccctaa

SEQ ID NO: 430970 - DNA, 201 bp, Homo sapiens
ggcagcccctgcactgtagggacccttatgcacagaggcattgagactgcctgttcctcttggaagcttctgctctcaagaggcagctaggtttttggagyttctctgcttcatgtcttgcttcccaccctagggttccagattctgttcttccctagtattggcaaggttttttatagatagctcttggatacatttgga

SEQ ID NO: 430971 - DNA, 201 bp, Homo sapiens
cttgtagatcattaatggtatcagggatctcggtaacagtgtaatctgaaatcagcttagctgaaaccaagtcctgtagcatcagacctttaagacagacrtagatgaaggtcacttgcattctgctgtcagcacacctgctaacatatctcactgtgctgaccccacccagtcctgcagtggacagtcaccacaggggtt

SEQ ID NO: 430972 - DNA, 201 bp, Homo sapiens
cattcattagttttcctcaggaaaaattaatcccagaagagaggtctgggtaatgccaaagctcagacaatatgtgctccaacagaagctgctgtcatcaycttaatgcccttaattacacatcagcacacagttacaggtcttattcagttcttaagaatatttcaattctattcttcatttatttcgtaggcagaaact

SEQ ID NO: 430973 - DNA, 201 bp, Homo sapiens
ggcatccccacatggttttaagtactggagctttactgtatgtcttggtatcaggccaagcaaaccatgttagtcttatttaaaactttctcagcaattgrtgcatatttgtttatcctgatgaattttagaacttaccagtactgacatcttcacagcattgtatcctgtcaacaacctagtctgaacctcaatggttca

SEQ ID NO: 430974 - DNA, 201 bp, Homo sapiens
gtattaaaacagaaaaagtaaagaagcaggctgggcttggtgcccactactcaatttgactggcttaaaaaaattttttaaacgacatgtacggacagacrtaatacttgcttctgagcctcccagtctttcaaaaccacattagggaataagcagtatttgcatggttccagtgatatctgggagtaagtgaaagtaatg

SEQ ID NO: 430975 - DNA, 201 bp, Homo sapiens
ctgaacatgaacctcaccgtccctctctcagctgtagctccttctgcgtctgcaacctggcttgttcccacgacaaaggaacatcatattttttcaaatcrtttttaaaaaaatacacacatatctgaccatcttcactcagcgcctctgagaaaacaatacaaaaacagataaagaggccagcctggccaaccctgtctc

SEQ ID NO: 430976 - DNA, 201 bp, Homo sapiens
atttttctattatggcaacaaattacattaatagattttcactgttattgtttatcctgggagaaagcatacttgtgaacttttttaggtactgtgctttsgaaccaaatttggaagtgagatgaaatgtcagctgtactctcctggttaggtatgatttcagggtcaggtatgcctgataaatgaagtgagatgctttaa

SEQ ID NO: 430977 - DNA, 201 bp, Homo sapiens
gctgcagcaaggccgacagccagtacacgtcctcctctgccatgtcctcactcttcattttggggggaagcagcagcatgagcccactggctcccaggagktccttctgtgtctccacagcatcaatggcaccatcactgagggcgccatgggccacctgcaacagcatcaagatcatcaggagagatgcaccatgggacg

SEQ ID NO: 430978 - DNA, 201 bp, Homo sapiens
aaatcagttgggtctctttaacaatgatatggataaagtttaagaaaaggtctaatttgagctaataatttgtcggtcatcaaaacatcataggataaatygtgatattacttttttccccagccattctctcaatctttaattcttatgtaaatgccaaatgtatacgttcttctcacctgtgggctagtagttacagat

SEQ ID NO: 430979 - DNA, 201 bp, Homo sapiens
tgccatactgggcttgagccagccagatggcctgtcggatctgtgtcaaaacagcccaaagacctcagccaggaacaggggcacagccagagccatagaasaaggcctctttgacaaagaaagaatgttaaatcagcactgagtgccatggctgcggcttggggacagggctacatggtccccatgctctttgccccttgt

SEQ ID NO: 430980 - DNA, 201 bp, Homo sapiens
acaaaaacagataaagaggccagcctggccaaccctgtctcaaaaaaaaaaaaaacacacacaaaaaaacaaaaacaggtacaaataatatttaaacagcracaggtggcatgtgcttaaattcactgatttaagtgcaagacctttgattaaagtcacacaattatgtgacttccacacttgggttaaataggctcccag

SEQ ID NO: 430981 - DNA, 201 bp, Homo sapiens
ccaccttcctggaagcccccacacatttggctatccacaagctctctgaaccctgtccttttgggtttttaggagccctcattacataggcatgattgattaaatcattggccactggcgatcaacgtcactttcagtccctctcccccaacctctgggagtttggggggtgggctgaaagtttcaacccctctaatcatg

SEQ ID NO: 430982 - DNA, 201 bp, Homo sapiens
aacaaaaacactaaaaaattttacatgaacaatttaatttgcagatagcaggactgtgggcaaattttatcttttattttgatttctgcttatgtttttaraaagttatctgtataaaacatacaactgctgccaggcgcagtggcacaccacagtagtcccatatacttgggagactgaagtgggaagattgcatgagcc

SEQ ID NO: 430983 - DNA, 201 bp, Homo sapiens
gacccacagaagaccccagcatgtcttcacctggcccacagaagccctgacatccagttacaactgccccagcctagtgagcatttcggcacccactcctyaattcctacccccagcctaacttcgaaggggcggtgagccacagcaagccggaggagaaagttggaagagagagtggacaaaagaatacccacaggcacc

SEQ ID NO: 430984 - DNA, 201 bp, Homo sapiens
attggtggtcatacgcaacatcaccaagtctattaatacctctttctgtatatggctcaaattttatcccctctcttcacaccaattgctaacaaactcasgcttattccctttgaatttcacctggatggctgcagcacccacctctcaagattcctgccctacatgccattcttaaaagaaaatgtgaccagatcactt

SEQ ID NO: 430985 - DNA, 201 bp, Homo sapiens
aaaatcttgttagcaaaataaattcagaattaacctagttcagaagtagccttaatttgttgctagctttgccagggacagaaggccccctcaccaatcaytgtggctgtgtttctgtagcaaaaggtagaaggtggcagtgctggtgcaggactggcaggtgctgattccctttcagggatgccttttacagattgaggg

SEQ ID NO: 430986 - DNA, 201 bp, Homo sapiens
ccagcctctctctctcttttttttttttttttttgagatggagtttcgcaccaggctggagtgcagtggtgcgatctcgattgtggctcaccacaacctcygtttcccaggttcaagcgattctcctgccccagcttcccgagtagctgggattacaggcatgggccaccacgcccagctaattttgtatttttagtagag

SEQ ID NO: 430987 - DNA, 201 bp, Homo sapiens
cctgtaatcccagctacttgggagactgaggcaggagaatcacttgaacccgggaggtggaggttgcagtgagccgagatcgtaccgttgcactccagccytggtgacaagagtgaaactccatctcaaaaaaaaaaaaaaaaaaaaagccgagcatggtggtggggcgcctgtaatcccagctacttgggaggctgaggc

SEQ ID NO: 430988 - DNA, 201 bp, Homo sapiens
agcgattctcctgcctcagcctcctgagtagctggaattacaggcacccgccaccacacccagctaatttttgtatttttagtagagacggggtttcaccrtattggccaggctggtcttgaactcctgacctcgtgatctgcccgtctcggcctcccgaagtgcagggattacaggcatgagccaccatgcctgaccaga

SEQ ID NO: 430989 - DNA, 201 bp, Homo sapiens
tgggctcaagtgatcctcctaccttggcctcccgaagtgctaggatcacaagtgtgagccaccacacccagcctctctctctcttttttttttttttttttgagatggagtttcgcaccaggctggagtgcagtggtgcgatctcgattgtggctcaccacaacctccgtttcccaggttcaagcgattctcctgccccag

SEQ ID NO: 430990 - DNA, 201 bp, Homo sapiens
tacctaacgctacatacatattaaaaaataacgtatgtaatgttaggtaaggagatatatgtgtgtgtgtgtgtgtatatatatatatatatatatatatwtttttttttttttggtagagacagggtttccctgtgttgcccaggctggtctcaaactcctgggctcaagtgatcctcctaccttggcctcccgaagtgc

SEQ ID NO: 430991 - DNA, 201 bp, Homo sapiens
actttataaggggtttgctgcccttatgttgtatcatgtcttgaggcagtgtctggttaaagtagaatccagataaagtccacatactgcaactgattgawacctcttttttttttttttttttttttttgagacggaatctcgctctgttgcctaggctggagtcagtggcacgatctcggctcactgcaacctccgcct

SEQ ID NO: 430992 - DNA, 201 bp, Homo sapiens
cattagtcatgtgtgcctcttacctaaaagtgtgtccgtctttcatttccttcgtaaatttaggcaactatatgagtattcctgggttgttttggattgaktgagccttaagatatgacagctctagcacacagtaggtactcagaaaatgttagcctctgtgctggactgatttcatattttaccccaagtggttcatgt

SEQ ID NO: 430993 - DNA, 201 bp, Homo sapiens
acatagctactcatttgctttattccttcttattcacagctttctcaaccttacagtagtctcccatcaaaaatataattactgaaaacagttaaaaaaawtttttagtacttttttgtctgcaggttatatttcactatagacatgctaattgctagattttacaaattacttggaatcgtcccttgtggttatgctacc

SEQ ID NO: 430994 - DNA, 201 bp, Homo sapiens
ggagatcaagaccatcctggccaacatggtgaaatcccatctctactaaaaatacaaaaattagctgggcgtggtgtctggtgtctgtaatcccagctacytgggaggctgaggcacgagaatcatttgaacccggaggtggaggttgcagtgagccaagatcgcaccactgcactccagcctgggtgacagaataagact

SEQ ID NO: 430995 - DNA, 201 bp, Homo sapiens
tagaattctgcaggaaggaacagattttgtcagtgccatgatttattcatttatttttgattgacaaaaattatatgtcatcccattaataatttatattwataccattaataatttaaaattaatatctttaaaatttcatagctattttaatggtgggcttagttagaagactcttccttgtgctgaagaaaagcagta

SEQ ID NO: 430996 - DNA, 201 bp, Homo sapiens
acaaatggcagacaggtatatgaaaaggtgctcaacatcactgatcatcagaacaaacaatgagatatcatatcactccagttaaaatggcttttatccaraagccagggcctgatactagtaccccagagttggggcacacagtccaggagtcctgagctgagccttggccccctaaaatcctctagaaactaagcccat

SEQ ID NO: 430997 - DNA, 201 bp, Homo sapiens
ggaactgaaaccattagaggtttttgtcttggcttggggtttttgttttcttggttttgggtttttttatatatatatataaaagaacaaaatgaaaaaamacacacacacacaagagtttacagattagtttaaattgataatgaaatgtgaagtttgtcctagtttacatcttagagaggggagtatacttgtgtttgt

SEQ ID NO: 430998 - DNA, 201 bp, Homo sapiens
tgggggcctatattcaacattcttaaggaaaagaaattccaaccagtaatttctgtccggccaaaccaagcttcataagcaaaggagaaatagagtccttyttcctcaagcagatgctgagggaatttgttaccaccagacctgccttacagtagctcccaaaagaagcactaaatatgaaaaggaaagactgttaccaga

SEQ ID NO: 430999 - DNA, 201 bp, Homo sapiens
ttcctaatttatttgcaggttttgttcccttcacagtagatttttataacgtttcattaatttaaaaactgtcctcagtaaggcaaggaagataaaagatytaaagatttgaaaggaaaaacaaaagggccttttttttttttttcaaaaatattaggtatgtagaaaatccaagagatattcagataaactattaaaatt

SEQ ID NO: 431000 - DNA, 201 bp, Homo sapiens
tcttcattgataaaataagcactttaactaaatcttttttatttatttattaattgttgagacggagtctcgttctgtcacccaggctgaagtgcaatggygtgatcttggctcactgcaacctccgcctcccgagttcaagcgattgtcctgcctcagcctcccaagtagctgggattacaggcatgcaccaccacacct

SEQ ID NO: 431001 - DNA, 201 bp, Homo sapiens
aaaccccgtctctactaaaaaaataaaatttagctgggcctggtggcgcatgcctataatcccagctactcgggaggctgaggcaggagaattacttaaasccaggaggtggaggttgcagtgagctgaaattgtgccactgtactccagcctctccatctcaaaaaaaaaaaaaaaagttgctgttttgaattagctcta

SEQ ID NO: 431002 - DNA, 201 bp, Homo sapiens
aattttttatttttgtgggtgcatagcaggtgtatgtatttatggggtacatgaaattttgatactggcatacagtgcataataatcacatcagggtagayggggtaacctgttgtttatttttatctgcttccaaatagctttaggatacgttagaataaaagctacccacaacggatgttagagtggaaggtcagtgga

SEQ ID NO: 431003 - DNA, 201 bp, Homo sapiens
ttctaaagtggtaagtgatgcagttaaaaacaggtacatgtcagtgttttgtttttagtacttcaagaattgtattaattactgataaataaagtaagttyaaaaggaagatgttgggccgggtgtggtggctcatgcctgtaatcccagcactttgggaggccgaggcaggtggatcatctgaggttgggagttcgagac

SEQ ID NO: 431004 - DNA, 201 bp, Homo sapiens
cagcctctccatctcaaaaaaaaaaaaaaaagttgctgttttgaattagctctacaattttagaagctatgtaatattcagcattttattatttctcttavaaagtacttttttctccacattaccagtcttctccagcttacttgaaggagatcctggagcagcttcttgaagccatagttgtagctacaaatccatcag

SEQ ID NO: 431005 - DNA, 201 bp, Homo sapiens
aaaaagaagtatttctgagtaatctggaagaaacctgccccatgacatgtattctcggtaggtatttgtgcttttttatttaatcgtgtttattccatcaraattgatggaatactacttctgtggggcactgttctaggtgttaggtatagagcagtgcccaaatccaaatctctgttctcttatgttggggcagagatt

SEQ ID NO: 431006 - DNA, 201 bp, Homo sapiens
agatgcagagtagctcagggccggggagtggggaggtagcaggatgtattctacggcccagaactgccacagcaaatgctctttttgcattttgaatgaartaagagggattctggaattttcattgatttagggtggtttatggtcagtattgaactgctcagcttcaggaaacctggttctttcagtacattgtccatt

SEQ ID NO: 431007 - DNA, 201 bp, Homo sapiens
gaattctgcaggaaggaacagattttgtcagtgccatgatttattcatttatttttgattgacaaaaattatatgtcatcccattaataatttatattaawaccattaataatttaaaattaatatctttaaaatttcatagctattttaatggtgggcttagttagaagactcttccttgtgctgaagaaaagcagtaag

SEQ ID NO: 431008 - DNA, 201 bp, Homo sapiens
tgagcctcccacatgtattcactctccattccagctctgtgattgaactctgctcttattgactagggggcagttgggcaggcatgcctcattcctggaaytgacagtcattcctaatgtgagtaaaggggaacctcaatgagacatctttaaacatatgaaagcatttggttttaaaatggaagaactgtcaggtactgt

SEQ ID NO: 431009 - DNA, 201 bp, Homo sapiens
cgtggtgaaaccccgtctctactaaaaatacaaaaattagccaggcttggtggtgggcgcctgtaatcccagctacttgggagactgaggcaggagaatcrcttgaacccgggaggtggaggttgcagtgagccgagatcgtaccgttgcactccagccttggtgacaagagtgaaactccatctcaaaaaaaaaaaaaaa

SEQ ID NO: 431010 - DNA, 201 bp, Homo sapiens
ggtaagaacttcatcctcattcactcattaatctcatcttcatattctctttttccgctttcaaccagttgttccaggaggcacccgtggcccattgtggycaggccttccctccctgagaatccaaaggttgtcagcagcagggcatgtcttgtgcattcagcaggtggcccagcacttgtgcccttgtgcacctggctg

SEQ ID NO: 431011 - DNA, 201 bp, Homo sapiens
agtagctgggattacaggcatgggccaccacgcccagctaattttgtatttttagtagagacagggtttctctatgttggtcaggctggtctcaaactccygaccttaggtgatccgcctaccttggccttccaaagtgctggcattacaggcgtgagccaccgtgctcagctctttctttcttagttaatctagctaagt

SEQ ID NO: 431012 - DNA, 201 bp, Homo sapiens
taaaaatatcaaaagttggccaggcgaggtggctcacatctgtaatcccagcactttgggaggctgacgtgggagtatcacttgaacatgggagatggagrttgcagtgagccaagatcatgctgctgcactccagcctgggtaacagagtaagaccctgtctcaacaaaaagaaagaagtaatattataaaatatgatgc

SEQ ID NO: 431013 - DNA, 201 bp, Homo sapiens
ggaggccaagacaggaggattgcttgagcctaggccttcaagagcagcctgggtaacacagcaggacctcacctcatctcttaaaactcccacacaatackgggagactttaatacccaactgacggtactagacagaccatcagagcagaaaattaacaatgatattccggacctgaacacaacactgggccaaatgtac

SEQ ID NO: 431014 - DNA, 201 bp, Homo sapiens
tatatagtaaacacataaaatatatatattgtatatataacgtattttttatttatatatgtaaaaatatgctggattcttacctaacgctacatacataytaaaaaataacgtatgtaatgttaggtaaggagatatatgtgtgtgtgtgtgtgtatatatatatatatatatatatatttttttttttttttggtagag

SEQ ID NO: 431015 - DNA, 201 bp, Homo sapiens
aaaactctggcaattggccaggcgtggtggctcatgcctgtaatcccaacactttgggaggccgagacaggtggatcacctgagtgcaggagttcgagacmagcctgaccaacatggagaaagcccatctctactaaaaatacaaaattagccgggcgtggtggtgtgcacctataatctcagctactcgggaggctgagg

SEQ ID NO: 431016 - DNA, 201 bp, Homo sapiens
agatgccgcttacagtagcaacaaaatatatacctaggtgtaaatccaactgcaggctctttaggggagagatcagaggtattagagtcagaaaagactaktttcaaattcttatctgcttctagctccatgactctggttcctaatccccttcaactgctttatgtggtggctgaacttgtgcaagtaattaacctcata

SEQ ID NO: 431017 - DNA, 201 bp, Homo sapiens
agaataatgcagctctggttttgttacctatctcaaaaacttacttataaatgggtacagtaataatttataaaaaagaaaatgactttacatgttgttcwtatgtgtactttccaataaagtcttggaatatggtgacaatttagaaatatgtggggttctttttttaaaggttgtactgatgaactctcattaaaagga

SEQ ID NO: 431018 - DNA, 201 bp, Homo sapiens
gcctcccaaagtgctgggattacaggcgtgagccaccgcgcccagcgtctgtgttgctttttagataatctttttttttttttttttttcagttctttcarttttcttggtgaaatctcttaaattagttaaatataaatttagtatttgcattttaatttttctacatataggaagtagcgtcttttttagagtctgtag

SEQ ID NO: 431019 - DNA, 201 bp, Homo sapiens
ggctggagtacaatggcgtgatctcggctcactgcaacctccatctcctgcgctcaagtgattgccctgccttagcctcctgagtagctgggattacaggygcacaccaccatgcctggctaatttttgtatttttaatggagacagggtttcgctatgttggccaggttggtcttgaacttctgacctcaagtgatccag

SEQ ID NO: 431020 - DNA, 201 bp, Homo sapiens
taaacatgtattgtattgctaaatattactagaaatacaggagagggctaaagttcataaacggtcgaaatacactgtttgtctatagtaagtcgatattytcccagttgcacattattaagtattcttaactgtccactataaattattgattgttagacttttgaacttgtaactgtaatcaaggccattttaaaactt

SEQ ID NO: 431021 - DNA, 201 bp, Homo sapiens
gtctcaaactcctgagctcaagagatctgcccacttcagcctctcaaagtgctgagattacaggcttgagccaccatgcctagcccctttcatatctttaraattgttaattatatgaatgtattcatccaaaaataataaaatgttaaaacagttagtaactatgaccacagtttactcctttaatttctttctaatttt

SEQ ID NO: 431022 - DNA, 201 bp, Homo sapiens
atcctgcctcagcctctccaagtgctgggactacagatatgagcccctgtgcctggctgaggacttttaaactatacaaataaacttttttttttgaaggkctcaagtgcactttttttttgttttttttggagacagtcttactctgtcccccagcctggagtgcagtggcgcaatcccagctcactgcaatctctgcct

SEQ ID NO: 431023 - DNA, 201 bp, Homo sapiens
agggtagacggggtaacctgttgtttatttttatctgcttccaaatagctttaggatacgttagaataaaagctacccacaacggatgttagagtggaagstcagtggaattagatactacttttttctctttggccctctctaccctaccccttcactgtatccctggcagtaaatagtggcaactaaacactcacatag

SEQ ID NO: 431024 - DNA, 201 bp, Homo sapiens
ggctggagtgcagtggtgtgatctcagctcactgcagcctctgcctcccaggttccagcgattctcctgcctcagcctcctgagtagctgggattacaggygtgcgccaccacacccagctgatttttgtatttttagtagagacggggcttcaccatgttggccaggctggtctcttaactcctgacatcaggtcatctg

SEQ ID NO: 431025 - DNA, 201 bp, Homo sapiens
agcctgctcttgatagagcactatagcagaaaatatgaaagtagaccctgaattctgttctagagggactcccaagagaaaacacaaaactagtctttagktggtgttgattttcccatctcattccagtattcagtttgccttgttctgctgcagccatccttaaaagactgaccgtttaaaaggattttttgacaatga

SEQ ID NO: 431026 - DNA, 201 bp, Homo sapiens
tagaataaaagctacccacaacggatgttagagtggaaggtcagtggaattagatactacttttttctctttggccctctctaccctaccccttcactgtrtccctggcagtaaatagtggcaactaaacactcacatagacttgctatgtacctagcactgttttaagtgctttatgtgtattagctaattaattcttaa

SEQ ID NO: 431027 - DNA, 201 bp, Homo sapiens
aagaccaggctggagtttacaccttctaggtgcacttagtgggatccatgtctaatgccagtaccctctaggttgcagatgtcttttggtgggtgttgggwcatagctgtcttcctttccaccttcctgaaatcctaaattcaactggagggaagcccaacacacctgcttagaattgaggagacagggccggacacagtg

SEQ ID NO: 431028 - DNA, 201 bp, Homo sapiens
atcatctctatctcagccccagtcttctctttttgacttctcgccttattttgtcctttcttctttccaaaagtctcagagtcaccttttgccatcaccckattcaaggtccttgtcctcttatgtccaaattactggaataatctattttacctctctgatgaaaaactttctagtcctttctgtgtcttggctcctgac

SEQ ID NO: 431029 - DNA, 201 bp, Homo sapiens
gtggacttctgggtacttggaatataaaactccctgctttttaaacagaagcttttttacttgttattttctaacaaataagaggctctcttatgcttccyggaagtggcatttaacaattctgaaccttagtgctcgcttcagcagcacatacactaaaattggaacaatatggagttgagcatggcacaaggatgacat

SEQ ID NO: 431030 - DNA, 201 bp, Homo sapiens
tttctagacatgcccctgagccagaagggaacacgctgccttgaagagagggacccagtcttggtagaattcatcacctgctgactaaagagcccttgggycctgaataatcagcaacagtagccaggtagtaggcctgtaggatacattttttttttttttttttttttttttttttgagacggagtctcactctgtcgc

SEQ ID NO: 431031 - DNA, 201 bp, Homo sapiens
gaatgaggagctgcttctgcctggacaaaatattacgatttttaatccgaagggactatacactatgaagttatacctcctctcgattcttctacacagcsagcaggatttgtttaagttttcaagaacagttcaccacagttttaggtttatttgattttaatgaactgggtcccttgcctatttctgtattttatcaga

SEQ ID NO: 431032 - DNA, 201 bp, Homo sapiens
gtcaagagatcgagaccatcctggccaacatggtgaaaccccatctctactaaaaatacaaaaattagccgggcgtggtggcatatgcctgtagtcacagstacttgggaggctgaggcaggagaattgcttgaacccgggaggcagaggttacagtgagctgagaccgcaccactgcactccagcctggtaacagagcga

SEQ ID NO: 431033 - DNA, 201 bp, Homo sapiens
tggacatggaaaaaattcgaagtcacatgatggccaacaagtaccaagatattgactctatggttgaggactttgtcatgatgtttaataatgcctgtacrtacaatgagccggagtctttgatctacaaagatgctcttgttctacacaaagtcctgcttgaaacacgcagagacctggagggagatgaggactctcatg

SEQ ID NO: 431034 - DNA, 201 bp, Homo sapiens
agtgtaatgccagctggggaatctatgaaatcagaatttgctctgaacctttaaagaaaagcaagtagtaatgtttgctttcagtgtctttgcaaataaargaaaaaaaacatagtaacatttgctgcttgtgttaagcaccagctcttcgtaaagcaccatgctaagcactttatgaaggcaatctctaacccttatgat

SEQ ID NO: 431035 - DNA, 201 bp, Homo sapiens
aggagttcaagaccagcctgggcaacatagcgagacctcatctctgcaaaaagaaaaagaaaaattagccgggcgtggtgtggtgcatgtctgtagtcctrcctacttggtaggctaaggcaggaggattgcctgagcccaggagttcaagtttgccgtaagctatgattattccactacactctagccttggcaacagaa

SEQ ID NO: 431036 - DNA, 201 bp, Homo sapiens
cctcaggtgatccacctgcctcggcctcccaaagtgctgggattgcaggcgtgagctaccgcacccggccccagcctagaattttttaaaacattaaattktatgctagttgcataataacactcaaaataccaagttttaactcctaagtcatgctgttggatagatcatgaagcttcttaagattaaattctttatggt

SEQ ID NO: 431037 - DNA, 201 bp, Homo sapiens
ttcttggaagtaggtttataggtgttttttttcctttgagtcctgttttccaagattttgttttaaacatgtattgtattgctaaatattactagaaatayaggagagggctaaagttcataaacggtcgaaatacactgtttgtctatagtaagtcgatattctcccagttgcacattattaagtattcttaactgtcca

SEQ ID NO: 431038 - DNA, 201 bp, Homo sapiens
ttgatcttttaaaaaaaccaactgtttaatttttaaaattgtttttctattctctaatttcgtttatctgcattctatatatatatctatatatatatttwttttttgagacagtgtcttgctctgttgcccaggctggagtgcagtggcgtgatcatggcttattgcagcctctgccttccaggttcaagtgattcttat

SEQ ID NO: 431039 - DNA, 201 bp, Homo sapiens
tactagaaatacaggagagggctaaagttcataaacggtcgaaatacactgtttgtctatagtaagtcgatattctcccagttgcacattattaagtattyttaactgtccactataaattattgattgttagacttttgaacttgtaactgtaatcaaggccattttaaaacttggcattgaactctggaatctgtcttt

SEQ ID NO: 431040 - DNA, 201 bp, Homo sapiens
tttgttaactgccagaaagtctgtaatcagttcagcttttgtttggttggttggttatttgctttttttttttttttttttgattgattttcagaaaattyacctaactagttttattcttatgccctccccaccccccaggaatactttaagttatgcccagaaaacttccgagatgaggatgtttttgtctgtgaatca

SEQ ID NO: 431041 - DNA, 201 bp, Homo sapiens
tgttgatcttttaaaaaaaccaactgtttaatttttaaaattgtttttctattctctaatttcgtttatctgcattctatatatatatctatatatatatwttttttttgagacagtgtcttgctctgttgcccaggctggagtgcagtggcgtgatcatggcttattgcagcctctgccttccaggttcaagtgattctt

SEQ ID NO: 431042 - DNA, 201 bp, Homo sapiens
aaaaacaataataataataatattgatttgtggagtcagtaccattcattattactactttctttattcttcattccattttgctattgagaagtcatccrccagtatgattgtagttcctttaaaggttatctgtcttttcttttctggctgtctttagtatccttttctcttttgtattttgtagtttcattgtgatat

SEQ ID NO: 431043 - DNA, 201 bp, Homo sapiens
tatatatgtgaggtacatgtaaggtaggagtccaaattcattctttgatatgagatattatcccagcactatatatagaaaagattattctttccccattsaattgtcttgaattgtcttggcaactttgttagaaatcaattgaccatagatgtatgggtttatttctagattcttggttctattccactcacctaaatt

SEQ ID NO: 431044 - DNA, 201 bp, Homo sapiens
acccagctaatttttgtatttttagtagagacggggtttcaccatattggccaggctggtcttgaactcctgacctcgtgatctgcccgtctcggcctccygaagtgcagggattacaggcatgagccaccatgcctgaccagaattttgcttcatttctttctttctttttttttttttgagacagaattctgctcttct

SEQ ID NO: 431045 - DNA, 201 bp, Homo sapiens
gcatgagccaccatgcctgaccagaattttgcttcatttctttctttctttttttttttttgagacagaattctgctcttcttgcccaggctggagtgcartggagcaatctcagctcactgcaacctccacctcccaggttcaagcgattctcctgcctcagcctcccaagtagctgggattacatgcatgcaccaacat

SEQ ID NO: 431046 - DNA, 201 bp, Homo sapiens
aggtaggtttaagaaaatgtctaggctgggcgtggtggctcatgcctgtaatctcagcactttgggaggctgaggtgggcggatcacgaggtcaagagatygagaccatcctggccaacatggtgaaaccccatctctactaaaaatacaaaaattagccgggcgtggtggcatatgcctgtagtcacagctacttgggag

SEQ ID NO: 431047 - DNA, 201 bp, Homo sapiens
atttttaaattttttatttttgtgggtgcatagcaggtgtatgtatttatggggtacatgaaattttgatactggcatacagtgcataataatcacatcasggtagacggggtaacctgttgtttatttttatctgcttccaaatagctttaggatacgttagaataaaagctacccacaacggatgttagagtggaaggt

SEQ ID NO: 431048 - DNA, 201 bp, Homo sapiens
ctcgcctcttcaattttttggaaaagtttcataaggcttggtgtgttagttcttgaaatgtctggttagaattcatcagtgaagctatcagtctagggatkttctttgtgggagattttttattactgattcagtctccttactagttataggtttactcaggctttgtatgtctttagtaggttgtgtgtttctaggaaa

SEQ ID NO: 431049 - DNA, 201 bp, Homo sapiens
gaagatcacttgaaccgaggaagtggagactgcagtaaaccgagatcacaccactgtactccagcctgggcaacagagcaagactctgtcttggggggaaraaaaagaggttatatggctggttacaagagacacatcaaatataaaaacataagaaagttgaatctaaaaggatggataagaccaggtgtggtgactcac

SEQ ID NO: 431050 - DNA, 201 bp, Homo sapiens
ttggaaacagaaaatttagcaaatagaaatttcaaaatccatatgtaaatgaatagtcttcatatataaactagtaagacttttgaaagtaaagtgaaagkgttgaatacactttagcaactgttagaaaaatcttatgggagaaaatatccatttcacactaacaacaaattaagaaataaccttaacaaggaatatata

SEQ ID NO: 431051 - DNA, 201 bp, Homo sapiens
caagagacacatcaaatataaaaacataagaaagttgaatctaaaaggatggataagaccaggtgtggtgactcacacccataatcccagcactttgggargcctaggtgggaggattgcttgagcccagaagttcaagaccagcctgggcaacatggcaaaacgctgtctctacaaaaaatacaaaatttattcaggcgt

SEQ ID NO: 431052 - DNA, 201 bp, Homo sapiens
gaatacttttctgcagataattgggggaaattaactgaaaaggttggaaacagaaaatttagcaaatagaaatttcaaaatccatatgtaaatgaatagtsttcatatataaactagtaagacttttgaaagtaaagtgaaagtgttgaatacactttagcaactgttagaaaaatcttatgggagaaaatatccatttca

SEQ ID NO: 431053 - DNA, 201 bp, Homo sapiens
tgctggctaattttttaatatttttagtagagatggggtttcaccatgttggccaggctggccttgaactcttcttgacctcaagtgatccgcccgcctcrgcctcccaaagtgctgggattacaggcgtgagctgccgctaccggcctgtactggaactattaataagttttacttaacaaaaataaaagtcatctgggc

SEQ ID NO: 431054 - DNA, 201 bp, Homo sapiens
gattcaaatgtctgttctggttgtttactttatggccttaggtattcatttgctgtctctaagcctcagtttttacatctgcatagttggggtaataattrtatttgattctgaatttgaagattaaatgagagtgcatagtgtttaacatttggtagaagtattagtagctatagtttacaactgtatataagaattgtg

SEQ ID NO: 431055 - DNA, 201 bp, Homo sapiens
gcaaaagtgatggtacaattagtgccaacactggatgaaaagaaagatcttaaattagttgagtattaagaaaacagttccaacgaagcattagcccaggycagatactcgaaaattacatacctgtgtggctagtagtctgtgggacactcaaataagctaaagtttttggccaggcacagtggcacatgcctgtaatcc

SEQ ID NO: 431056 - DNA, 201 bp, Homo sapiens
aaggtcagtaatttttataaaacaactttattgagatataattcacataccatggactttacccattaaaagtgtttaatttaggctgggcgcagtggctyacgcctgtaatcccggcactttgtgaagcctaggtgggtggatcacgaggtcaggcgttccagaccagcctggccaacatagtgaaaccccatctttact

SEQ ID NO: 431057 - DNA, 201 bp, Homo sapiens
actcaaaaccatacaattatatggaaattaaccaacctactcctggatgacttttgggtaaataatgaaattaaggtagatatcaagaagttctttgaaaygaacaaaaacaaagacacaacataccagaatctctgggacacagctaaggcagtgttaagagggaaatttatcacactaaacacccacatcaaaaagata

SEQ ID NO: 431058 - DNA, 201 bp, Homo sapiens
acactaaacacccacatcaaaaagataggtcaatggccaggcacggtggctcatgcctataatccaagcattttgggaggccaaggagagtggattgcttsaggctagcagtttgagaccaccctagccaacatggcaaaacctcttctctactaaaaatgcaaaatttagctgggtatggcagtgtgtgcctgtagtccc

SEQ ID NO: 431059 - DNA, 201 bp, Homo sapiens
tagtgtattagtaataattagtttttttgggttttttggtgtttttttttttttttttaagacagagtcttgctctgtcaccaggctggagtgcagtggckcaatctcggctcactgcaacctctgcctctctggttcaagtgattctcctgcctcagcctcccaagtagctgggaccacaggtgcgtaccaccacgccca

SEQ ID NO: 431060 - DNA, 201 bp, Homo sapiens
atctggtttcctacttttattcctttaattttgtgaacatccttacttcctattggcatcccatgtatgcatttttaaagttttattttattttttgaacrttgcatccaacgttgtttttactagaagatttcagtcaagagtttattatgcccactatacttcatgagcagacattttgaaacaaggtattaaagaatt

SEQ ID NO: 431061 - DNA, 201 bp, Homo sapiens
aaaaataatttaaatatattatacgtaataaaagaatggctataacctgtcagctaaggttccaagagagatttaagccttaatcgccatgatgttatttrtaataacttatctcttacacatctagaatggggctgaatacctacccctgtgggagaattgagaaaatagtcacatcgtttttcagtaggtttacttgtc

SEQ ID NO: 431062 - DNA, 201 bp, Homo sapiens
ttttcataatcctggaaattgaatcagatctttaatcatctctatctcagccccagtcttctctttttgacttctcgccttattttgtcctttcttctttmcaaaagtctcagagtcaccttttgccatcacccgattcaaggtccttgtcctcttatgtccaaattactggaataatctattttacctctctgatgaaaa

SEQ ID NO: 431063 - DNA, 201 bp, Homo sapiens
taggttcatataggttgttctagggatacaatgcctatgtccagcatcagaacattatggggtattcttgaaatttggagttaaaataagtactgcttagragttgctttctttggccaggcacagtggctcatgcctgtaatcccagcactttgagaggccgaagtgggcagacatgaggtgaggagttcgagaccagcc

SEQ ID NO: 431064 - DNA, 201 bp, Homo sapiens
ggaggaaaaaaaagtgttgcaccttaaaattgagactatactaaataaaaagagcttctgttggattaggacacaataccagtacttttatgatttaaacsagaaaaaaaattactctttattttatatgtacaaaaaatgatttggactagaagcataatttaatccttgactgagacattccattgcttattctagaaa

SEQ ID NO: 431065 - DNA, 201 bp, Homo sapiens
caacctctgcctcctgggttcaagcaattctcatgcttcagcctcccaagtaactgggtttacaggcatgcactgcctcagccagctaatttttttttttwttatttttttgagacagagtcttgctctgacgtccagggtggagtgcagtggtgccatctcggctcactgcaacctccgcctcccgggttcaagcgattc

SEQ ID NO: 431066 - DNA, 201 bp, Homo sapiens
atatatgtgaggtacatgtaaggtaggagtccaaattcattctttgatatgagatattatcccagcactatatatagaaaagattattctttccccattgmattgtcttgaattgtcttggcaactttgttagaaatcaattgaccatagatgtatgggtttatttctagattcttggttctattccactcacctaaattt

SEQ ID NO: 431067 - DNA, 201 bp, Homo sapiens
gtgaggtacatgtaaggtaggagtccaaattcattctttgatatgagatattatcccagcactatatatagaaaagattattctttccccattgaattgtmttgaattgtcttggcaactttgttagaaatcaattgaccatagatgtatgggtttatttctagattcttggttctattccactcacctaaatttctgtcc

SEQ ID NO: 431068 - DNA, 201 bp, Homo sapiens
tatgatttgctcagcagatgcatttgataattgtttcagttcccattcaagataaaaattatttgctaactagtaagagagggggatattgatataaagtrtctcctttttttcttttttcttttctcttgagacggagtttcgctgttgttgcccaggctggagtgcaatggcgcaatccccgctcatggcaacctctgc

SEQ ID NO: 431069 - DNA, 201 bp, Homo sapiens
accccatctctactaaaaatacaaaaattagccgggcgtggtggcatatgcctgtagtcacagctacttgggaggctgaggcaggagaattgcttgaaccygggaggcagaggttacagtgagctgagaccgcaccactgcactccagcctggtaacagagcgagactcggtctcaaaaaaaaaagaaaatgtctaaaacc

SEQ ID NO: 431070 - DNA, 201 bp, Homo sapiens
ttcatctcattcgtccctttataaatactttttttgtctttccagctgcacgctatgaagagggagagtcagaagcagaaagcatcacttcctttatggaygtttcaaatcctttttatcagctttatgacacagttaggagttgtcggaataaccaagggcagctaatagctgaacctttttaccatttgccttcaaaga

SEQ ID NO: 431071 - DNA, 201 bp, Homo sapiens
ggagttgtcggaataaccaagggcagctaatagctgaacctttttaccatttgccttcaaagaaaaaataccctgattattaccagcaaattaaaatgccyatatcactacaacagatccggtaagatgtcttctacattattcagtataattttattttgttgtggctgagcctgcacataatgtatttcttcctaaaat

SEQ ID NO: 431072 - DNA, 201 bp, Homo sapiens
cattattccattagatcaaaggaaagattatttggtagagaacccatcttgattttttttaagactttcaataggtatttcttctagtgtaattttttttwaaattcatatttgtgtctcaagcctgaagcctataaaacaaattcctttttaaatttacacactggacaaaggggcttactgttctagtgttacttaata

SEQ ID NO: 431073 - DNA, 201 bp, Homo sapiens
agagctaattatttgacaagtccaattagataaactgccaactatctaataatgggaaaagaaaggggttaaacttcgacacaaaatgtggaagaaggccrggcgcggtggctcacacctgtaatcccagcactttgggaggccaagatgggtggattacctgaggtcaggagttcgagaccagcctggccaacgtggtga

SEQ ID NO: 431074 - DNA, 201 bp, Homo sapiens
aagaggttgagggtgtatatatatatatatgaggggggaaaagtagcatgcattttttaggcctcattacactttattatttttgagtattatttctcctrtggataattatattaagaaactgtagctgtaaaaataagcacagtgctaggttcatgtcatggcagagtggattgatggtgtatttcctaattttgcaaa

SEQ ID NO: 431075 - DNA, 201 bp, Homo sapiens
tatttagcaggtatcaggagatccagtctcatcctggcttttccttgtactaggactgtgattttttttttttgagacagagtctcactctgttgcccaarctggattgcagtggcacaatctcggcccactgcaacctccacctcccaggttcaagcaattcttttgccttagcctcccaagtagctgggacttcaggca

SEQ ID NO: 431076 - DNA, 201 bp, Homo sapiens
gtgtggtggctcacatctgtaatttaagcactttggaaggctgaagagggaggatcactcgaggccaggagttcgagaccagcctgggcaacacagggagsaccctgttgctacaaaaaattttaaaattagccagcctgagcccaagaagttgaggctatggtgagctgtgatcacgccactgcactccagtctgggtga

SEQ ID NO: 431077 - DNA, 201 bp, Homo sapiens
tttttctttcatcttaacactttgttaatagttcctgttccctgtaaagtaacctaattattataacatccttccctgtctaattgctttttttttttttrtagtaataaaagagcagtacaaggaggtcgtttatcagcaattacaatggcacttcaatatggctcagaaagtgaagaagatgctgctttagctggtagg

SEQ ID NO: 431078 - DNA, 201 bp, Homo sapiens
caggcacaggcaaccaaagcaaaagtagataaatgggattacatcaagttaaaaagcctctgcacagcagaggaaacaaagtgaggggacaacccacagartgggaaaaaactatctgcaaactaaccatctcacaatggattagttaccagaatgtatgaggaactcaactccttaagagaaaatctaataatccaatta

SEQ ID NO: 431079 - DNA, 201 bp, Homo sapiens
ggagaatggcgtgaacctgggaggcggaggctgcagtgagctgagaccacgccactctactccagcctgggcaacagagtgagtctctgtctcaaaaaaamaaaaaatttttttaaagtaaatctaagagctaattatttgacaagtccaattagataaactgccaactatctaataatgggaaaagaaaggggttaaact

SEQ ID NO: 431080 - DNA, 201 bp, Homo sapiens
tcaggaggctgaggttggaggaccactttggcccaggaattcaagtccagcctgggcaacgtagtgagacccagtctctttaaaaaaaaaaaaaaaaaaaagtgatttctgttaacaatgattctctttctcttccccttcccccaccccccatttttgaggtgaaaaatggttgtatggctgttggttttaccgaccaaa

SEQ ID NO: 431081 - DNA, 201 bp, Homo sapiens
atatatatatgaggggggaaaagtagcatgcattttttaggcctcattacactttattatttttgagtattatttctcctgtggataattatattaagaaactgtagctgtaaaaataagcacagtgctaggttcatgtcatggcagagtggattgatggtgtatttcctaattttgcaaagaatgtgtgatttctgagct

SEQ ID NO: 431082 - DNA, 201 bp, Homo sapiens
tatatatatatgaggggggaaaagtagcatgcattttttaggcctcattacactttattatttttgagtattatttctcctgtggataattatattaagaaactgtagctgtaaaaataagcacagtgctaggttcatgtcatggcagagtggattgatggtgtatttcctaattttgcaaagaatgtgtgatttctgagc

SEQ ID NO: 431083 - DNA, 201 bp, Homo sapiens
tatatatatatatgaggggggaaaagtagcatgcattttttaggcctcattacactttattatttttgagtattatttctcctgtggataattatattaagaaactgtagctgtaaaaataagcacagtgctaggttcatgtcatggcagagtggattgatggtgtatttcctaattttgcaaagaatgtgtgatttctga

SEQ ID NO: 431084 - DNA, 201 bp, Homo sapiens
atgacattcttcacagaactagaaaaactattttaaaatttagatagccaggcacggtggctcacgcttgtaatcccagcactttaggaggctaaggcggrcagatcacttgaggtcaggagttcaagactctgggtgacagagtgagactgtctaaaaaaagaaaaagaaaatttaatgtttcaggaggaataaaataaa

SEQ ID NO: 431085 - DNA, 201 bp, Homo sapiens
tttcttacagatgaagtgctttctttgaaaggtggttatttaggttttagatgtttaatagacacagcacatttgctctattaactcagaggctcactacrgaaatatgtaatcagtgctgtgcatctgtctgcagctaatgtacctcctggacaccaggaggggaaaaagcactttttcaattgtgctgagttagacatc

SEQ ID NO: 431086 - DNA, 201 bp, Homo sapiens
accatggtcaagtaggctttatccctgggatgcaaggttggttcagcatacgcaaatcaataaatgtgattcatcacataaaaaagaactaaagacagccrggtgtggtggctcatgcctgtaatcccagcactttggtaggccaaggtgggtggatcacctgaggtcaggagttcgagaccagcctgaccaacatggtga

SEQ ID NO: 431087 - DNA, 201 bp, Homo sapiens
catttctactgaaactgttccaaataactgaggagaaaggactcctccccaactcattctttgaggccagcatcatcctgataccaaaacctggcagagayaacagaaaaaactaggccagtatccttgatgtttattaatgcagaaatccttaagaaaataactagcaaaccaaatccagcagtatatcaaatagctaat

SEQ ID NO: 431088 - DNA, 201 bp, Homo sapiens
ttgcttaagcctgggaagtggaggttgcagtgagccgagattgcaccactgcactccagcttgggcaaccaagtgagaccctgtctcaaacaaacaaacamtatatataatatatatataaaatatgtattttatatattatacttatgtattataatatatatttattatgtatttcatcctcaagtactgctgaatttt

SEQ ID NO: 431089 - DNA, 201 bp, Homo sapiens
tagcttgagacactgctggggtcctgcctcagcaaggagcactggactgtgggtcctgtaggcccagatggagaggaccatcttggatattaagttatcaragccctaatgtgtgctgtgagaaggttccttgataccactgacaacatcagtattctttctgctttttctctgatttctcaatattctgatttttttggt

SEQ ID NO: 431090 - DNA, 201 bp, Homo sapiens
aaaataatcgctaccgtcggcttgatttatttcaagagcatatgtttgaagtattggaacgagcaagaaggatgaatcggtatgttttcaaagccattttyattttgaggatatgtgctatttaatacaaaacagatgaaagaatattgctttgatgtactatttccacttacatacatgatttgtagttggtagcatgct

SEQ ID NO: 431091 - DNA, 201 bp, Homo sapiens
gttctttcaattttcttggtgaaatctcttaaattagttaaatataaatttagtatttgcattttaatttttctacatataggaagtagcgtcttttttaragtctgtaggactttgctcattgttttcaaactcattgtttctttaaactttttatttatttatttatttttttaaagagagaaagtcttgctctgtcac

SEQ ID NO: 431092 - DNA, 201 bp, Homo sapiens
agagctttgttgaaaaacaaaagggatccctggtaatttagtagttaggaaaaattttttaaagaaaaacatacggggagccattcttaactttgtgaacraagatagtattgtgattgcttatagtacttattaagaataagtacttaataagaattgatggagatgcatcaatttagtgaatgataaactatgccttta

SEQ ID NO: 431093 - DNA, 201 bp, Homo sapiens
cagtagcatatctgtccccttactaaagtgcacaactctaggtatgtactaaccagagcagagtggagcaggtctcatcacctgtcctcctcattatgtaytttatatggcttttaatatgaagaagagcctgggcaacatggcaagaccccttctctagaaaaaataagaaaatcagcagggtgtgattgcacttgctgt

SEQ ID NO: 431094 - DNA, 201 bp, Homo sapiens
ccgtctcttgccatgtacaaaaatcaaaatggattaaagacttaaatctaatacctgaaactatgaaactactggaataaaactggactaggcaaaaattkcttgagtaattccccacaggcacaggcaaccaaagcaaaagtagataaatgggattacatcaagttaaaaagcctctgcacagcagaggaaacaaagtga

SEQ ID NO: 431095 - DNA, 201 bp, Homo sapiens
tagcattctggtaagtgaaagactaaaacaaggaagtccagggcttaaaaaaaaaaaaaaacttatagctagttaaactacaacacgttaaaatatcctcytaagtgagccaggagtttggtagcaggtgtccagctgaagacttggtgacagagtctatttaaatgtaagaacatggctgattatttcttatagaagaag

SEQ ID NO: 431096 - DNA, 201 bp, Homo sapiens
atatgtctagctctttaacattcatatattcagaggagtgtttggcacatgagctcaactcctgagatctgctctgttttaggcaaagaagaaagagcttkccaggagagacgatatcgaggacggagacagcatgatctcttcagccacctctgatactggtagtgccaaaagaaaaaggtatatactcttcttatagct

SEQ ID NO: 431097 - DNA, 201 bp, Homo sapiens
gattttacaaattacttggaatcgtcccttgtggttatgctaccatctgtatacaaatttaggttcatttattttattcatttaacattaaatatctctcyttaggtaggaagagtggcatttctcctaaaaaatcaaaatacatgactccaatgcagcagaaactaaatgaggtctatgaagctgtaaagaactatactg

SEQ ID NO: 431098 - DNA, 201 bp, Homo sapiens
atgaagatgcagtagaacttcagcagttttttattaaaattcgtgatgaactctgcaaaaatggagagattcttctttcaccggcactcagctataccacraaacatttgcataatgatgtggagaaagagagaaaggaaaaattgccaaaagaaatagaggaagataaactaaaacgagaagaagaaaaaagaggttggt

SEQ ID NO: 431099 - DNA, 201 bp, Homo sapiens
tgagctggacacagtgacttatacttgtagtcccagctactcaggaggctgaggttggaggaccactttggcccaggaattcaagtccagcctgggcaacrtagtgagacccagtctctttaaaaaaaaaaaaaaaaaaaagtgatttctgttaacaatgattctctttctcttccccttcccccaccccccatttttgag

SEQ ID NO: 431100 - DNA, 201 bp, Homo sapiens
agttgtatcttgtttttaactaaatctcctatagaaatttcataatcactataggctattatgtataaatttacttttttgaaacattgatctacagaatkaagtatttttttatttaaattgggcctggtcttatcagaaattgaaaaaatattatcttcttgttagcattgttttttactgattataaaagtgacacac

SEQ ID NO: 431101 - DNA, 201 bp, Homo sapiens
gcctttgcagcagtttgtttgataggtacaagagaactgatatgcctgttttctccagttctctttatctttctttagcagttctatttgaatgttttctmtctattcgtactcatttttactccttctgacccttcttttctatttcccccttctctgccttgttcttctttttcagttttgaatatactaacactgaat

SEQ ID NO: 431102 - DNA, 201 bp, Homo sapiens
ataggctattatgtataaatttacttttttgaaacattgatctacagaattaagtatttttttatttaaattgggcctggtcttatcagaaattgaaaaartattatcttcttgttagcattgttttttactgattataaaagtgacacacggccgggcatagtggctcacacctgtgatctcagcactttgggaggctga

SEQ ID NO: 431103 - DNA, 201 bp, Homo sapiens
tgtaattaatatcactgaaatgcacactttacattggtttaaaaggcagattttgttatagattttttatcacaattttaaaatgtatttaaaaataatayatccatgaaatgttaatgtttttataaaaaatattttcatatgcaagtgagattgacagtaaaaaaaaattttttttttttttgagatggagtctcactc

SEQ ID NO: 431104 - DNA, 201 bp, Homo sapiens
gcaagctccacctcccgggttcacaccattctcttgcctcagcctcccaagtagttgggattacaggcgcgcccatcaccacgcttggttaatttttttctttttttttttttttgtatttttagtagagacggggtgtcactgtgttagccaggatggtctcgatctcctgacctcatgatccgcccgcctcggctgtcc

SEQ ID NO: 431105 - DNA, 201 bp, Homo sapiens
tgctgtgtataggcaactagatcccaactttggacacaatacttttgtggatattcagcataattatttaaaaacaagcatctctaagtacaagtaatttyataaatacacatttaaactctttccatgctgcctttagagcatatattgcagattgcaggaagtcacttctagttgttaaggtggaacactgctttccgg

SEQ ID NO: 431106 - DNA, 201 bp, Homo sapiens
caagctccacctcccgggttcacaccattctcttgcctcagcctcccaagtagttgggattacaggcgcgcccatcaccacgcttggttaatttttttctttttttttttttttgtatttttagtagagacggggtgtcactgtgttagccaggatggtctcgatctcctgacctcatgatccgcccgcctcggctgtcca

SEQ ID NO: 431107 - DNA, 201 bp, Homo sapiens
tgagccagttaccaggacaagtcatggagcacggccatagatgataagccttgagctctgtgctctaaaagcttgaagtctgatggatgggccaggacttacgcttaagggaaaaataattccacacatgagacaacatgccacaaccttatatttagtaaagatggtgatgtaaggaactctgtgggccacagttctcct

SEQ ID NO: 431108 - DNA, 201 bp, Homo sapiens
gaaaaagaaataatacccatcttgtgtgttggttttaggattacctgaggctggtacttatcaagctcttaacacataattaaattcttttttttttttttaaggcggagtctcactctgtcgcccaggcaggattacaagtgtgagtcactgcgcctggcctaattaaattctttttttttttttttttttttttttttt

SEQ ID NO: 431109 - DNA, 201 bp, Homo sapiens
aacttagaattctgcaggaaggaacagattttgtcagtgccatgatttattcatttatttttgattgacaaaaattatatgtcatcccattaataatttawattaataccattaataatttaaaattaatatctttaaaatttcatagctattttaatggtgggcttagttagaagactcttccttgtgctgaagaaaagc

SEQ ID NO: 431110 - DNA, 201 bp, Homo sapiens
gaggattgcctgagcccaggagttcaagtttgccgtaagctatgattattccactacactctagccttggcaacagaacgagactctgtctcttaaaaaaagagagaatacgaggtcaggaatttgagaccagcctgaccaacatggtgaatccccgtctctactaaaaatagaaaaattagccaggcatggtggtgcacg

SEQ ID NO: 431111 - DNA, 201 bp, Homo sapiens
atgggaggatcctgagcccagggaggttgagcctgaagtgatcacaccactccactccagcctgggcaacagagtgagaccctgtctcaaaaaataaatamaaaataaaaataataaaattgggcttttgtcttgaaaaaaagaaaaggatggctaaaagatacaccaggcgaataataaccagagtagctacactgactt

SEQ ID NO: 431112 - DNA, 201 bp, Homo sapiens
gtgattctcctgcctcagcctcctgagtaactgggactacagacacgcgccaccacacctggctaatttttgtgtttttactagagacggggttttaccayattggccaggctggtcttgaacttctgtcctcatgatccacctgcctcggcctccgaatgtgctgggattacaccacgcctggcctcaattttattattg

SEQ ID NO: 431113 - DNA, 201 bp, Homo sapiens
aatattttcccctttactatagatttttttatgtgtaaagataaaatttgtttcattaaattattctggtatattcttttctttctttcttttttttttctttttttttttttttttgagatggagtctcgctctgttgcccaggctggagtgcagtggtgtgaccttagctcactgcaacgtccgcctgccgggttcaag

SEQ ID NO: 431114 - DNA, 201 bp, Homo sapiens
ccggtctacatggtaagactctgtctccaccaaaaaaaaaaaagaaagaaagaaaaaaagatgaatctgctattcatgaaattgtaaagaaggaaaaaaaagaagtttctgctagttttattgttgcacctcagactgcaaaaagttacagccacagtgcatgaaaagtgcttcattaatatggaaaaggaattacatttg

SEQ ID NO: 431115 - DNA, 201 bp, Homo sapiens
gctgttgtgaatgttcacatatacgtttttatgtggacatataaatactacatatatatatatatatatatatatatatattttttttttttttttttttttttttttctctttgatacatacctaggaatggaattgcggggccatgtgtggtaactgtatatttaactttctgaagaaccgccaaactgttttccaaac

SEQ ID NO: 431116 - DNA, 201 bp, Homo sapiens
ttattggctattataaataatgctgttgtgaatgttcacatatacgtttttatgtggacatataaatactacatatatatatatatatatatatatatatattttttttttttttttttttttttttttctctttgatacatacctaggaatggaattgcggggccatgtgtggtaactgtatatttaactttctgaagaa

SEQ ID NO: 431117 - DNA, 201 bp, Homo sapiens
acttattggctattataaataatgctgttgtgaatgttcacatatacgtttttatgtggacatataaatactacatatatatatatatatatatatatatatattttttttttttttttttttttttttttctctttgatacatacctaggaatggaattgcggggccatgtgtggtaactgtatatttaactttctgaag

SEQ ID NO: 431118 - DNA, 201 bp, Homo sapiens
caccgggaggggtaagggaggtgagggcggcgggtgccgaagcgacggcagcggccgcggccggaggagcaatagcagcagccgtggcggccacggggcgrggcgcggcggtcggtgaccgcggccggggctgcaggcggcggagcggctgggtaaggccgggcccagggcgggtggggccgctccccctggtcagctgcc

SEQ ID NO: 431119 - DNA, 201 bp, Homo sapiens
ctacttattggctattataaataatgctgttgtgaatgttcacatatacgtttttatgtggacatataaatactacatatatatatatatatatatatatatatattttttttttttttttttttttttttttctctttgatacatacctaggaatggaattgcggggccatgtgtggtaactgtatatttaactttctga

SEQ ID NO: 431120 - DNA, 201 bp, Homo sapiens
gcttcaaagctgtcaacgtttccctcagtccccaataccagtgacaggtcgggaaagtccttcatttcctccgttgctcagggcctcttttttttgttgtkgtttcttgacggttcgacacaaactcttagtgattttctttccgtattttttccgggtattttaatcaatgggacttgtatttatagtagaggccagata

SEQ ID NO: 431121 - DNA, 201 bp, Homo sapiens
agaaagagttgcaaaaatatagaaaaagccctgaaaaataagtacacggtatagtggatatagaaattcttacaataattatagaagcgtatgttggggtraattgttttaattaacttactttccaacacaggattcttgacaaataattttaggtattatttttttctccatttggctatgtgcttttccccaaaaagt

SEQ ID NO: 431122 - DNA, 201 bp, Homo sapiens
ccagttgcacattattaagtattcttaactgtccactataaattattgattgttagacttttgaacttgtaactgtaatcaaggccattttaaaacttggmattgaactctggaatctgtctttcctcttcatggaaagacaaaattgctgaagggatgcttacaggcattttttttttttttttttttttttttttgaga

SEQ ID NO: 431123 - DNA, 201 bp, Homo sapiens
agtttctaatttctattgggctaagtctgctaccttgagcgtccagtggagaagaaaggtttttgaagaaaacaacacatgtaaatgtgtttcaggacttytgttaaaacctgcagtgattctactacagtggttctcaaacattaacatgcatgtctgtgcattagaatcacctgggaagcttaaaaacaaaccagttaa

SEQ ID NO: 431124 - DNA, 201 bp, Homo sapiens
caccgtgttagccaggatggtcttgatctcctgacctcaggtgatccatccgccttagcctcccaaagcgctgggattacagacatgagccaccgcacccrgctaaatttttgtatttttctttagtagagacagggtttcaccacgttggccagtctggtctcgaactccaagtgatgcactggcctcggccttccaaag

SEQ ID NO: 431125 - DNA, 201 bp, Homo sapiens
gaggttggtttcttttcattttattgaatatgaaaaaatgcactgtcttctagctgttctcataattagctgtggaaaagagtcctgtttgtatgaatgaraactcagggtattgactatattagagtagacgcaatgagatggaaatatttttatagttatcaatttggtcatcagacctgggaaagattaaaagttacc

SEQ ID NO: 431126 - DNA, 201 bp, Homo sapiens
cctcgggatgtgcctctgcctgtggttcgcgtggcctctgtatttgcaaatgcagataaaggtgatgatgagaagaatacagacaactcagaggacagtckagctgaagacaattttaacttggaaaaggtatgcagataatagccacacagaaaaaattttacatctcaaaacacctattccagaaaataaatgaataaa

SEQ ID NO: 431127 - DNA, 201 bp, Homo sapiens
gtgactgagtccttattttccactccctcttttctaagaggaaaaaaatagtttcctcggctaagattgattatgagaaccattaagtacagagataaackaaggaggcaattgaatagaaattatttttctttcatcttaacactttgttaatagttcctgttccctgtaaagtaacctaattattataacatccttccc

SEQ ID NO: 431128 - DNA, 201 bp, Homo sapiens
accttcaaaaagattataaaccactgtcttaaaggaatgtctgccactcatgtgatctgaccccaaatattgatgttttatgtctttgtttggttcacaartccaatgacaaatgcttagttctgttttcatcatgaacgtctcaggaagaaaacctggtcattagataaaactattaagttttgtgccttgatattaagt

SEQ ID NO: 431129 - DNA, 201 bp, Homo sapiens
cagtgatcttgtgttacagctcttggtaagccatatatttaaacttcaggctgagtctttgctaaagtgcttggtttcctaggtcagtcctggcctatackgtgtctgtattcatagctacttctaaggtatttgggtcttttttataaagctcaactgcctttattttccttttattctaattaaatcactttgggcagt

SEQ ID NO: 431130 - DNA, 201 bp, Homo sapiens
tctcttaaaaaaagagagaatacgaggtcaggaatttgagaccagcctgaccaacatggtgaatccccgtctctactaaaaatagaaaaattagccaggcrtggtggtgcacgcctgtaatcccagctgctcaggaggctgaggcaggagaattgcttgaacccaggaggcggaggttgcagtgagctgagatcacgccat

SEQ ID NO: 431131 - DNA, 201 bp, Homo sapiens
tgtttgtcagccaactgatttaaaaggcctttaactgttttggttgttgttttttttttaagccactctccccttcctatgaggaagaattgagaggggcmcctatttctgtaaaatccccaaattggtgttgatgattttgagcttgaatgttttcatacctgattaaaacttggtttattctaatttctgtatcatatc

SEQ ID NO: 431132 - DNA, 201 bp, Homo sapiens
gagagtcggttgaatccgggaggcagaggttgcagtgagctgagattgcactccagcccgggcgacagtgcaagactctgtctcaaaaagaaaaaaaaaaagtatttaatgtaatggtttttattatattcatggagttgggcagccatcactccagtcaattaacagtcgccctttatgtccccccaacttctctagccc

SEQ ID NO: 431133 - DNA, 201 bp, Homo sapiens
ttaagtggaaaaggaatttttgaaaagcatattggatagctcatagaaatgttgagaagaaaggttgaggaactagcctttggatactaggcagaactcakgaacatcatggcacagctgagatcatgcacagcctctttgtggtgccattgctgttaccactgtaatttgccactgtggtccctggatacttgctgctct

SEQ ID NO: 431134 - DNA, 201 bp, Homo sapiens
gtcttgaacttctgacctcaagtgatccagctgcctcagcatcccgaagtgctgggattacaggtgtgagccaccgcgccttgccgaatttagattatttwttttttttttgagatggagtcttgctgtgccgcccaggctggagtgcagtggcatgatctcggctcgctgcaacctctgcctcttgggttcaagcgattc

SEQ ID NO: 431135 - DNA, 201 bp, Homo sapiens
agttttctcagcaattaagagatagaccatctgctctcttggagcccttttgaactctggatctaatctatagtcccttatgctttgttccatactgcttwaatcagcttctcagcatcacatctcactgggggaatttggagaacaagacggattcatgctcaaggatggaaattttactctagaaaactcagattaacc

SEQ ID NO: 431136 - DNA, 201 bp, Homo sapiens
gagccaccatgcctgaccagaattttgcttcatttctttctttctttttttttttttgagacagaattctgctcttcttgcccaggctggagtgcaatggmgcaatctcagctcactgcaacctccacctcccaggttcaagcgattctcctgcctcagcctcccaagtagctgggattacatgcatgcaccaacatacca

SEQ ID NO: 431137 - DNA, 201 bp, Homo sapiens
cgtgatctgcccgtctcggcctcccgaagtgcagggattacaggcatgagccaccatgcctgaccagaattttgcttcatttctttctttctttttttttttttgagacagaattctgctcttcttgcccaggctggagtgcaatggagcaatctcagctcactgcaacctccacctcccaggttcaagcgattctcctgc

SEQ ID NO: 431138 - DNA, 201 bp, Homo sapiens
agcatatgttcaggattcatctatattgtagcctgaatcagaatttcattcctttttagaaccgaatagcattttgttatttctatataataccttttgtttataagttttttggggtgttttgttttgtttagagatagagtcttgctgtgttgcctaggctgacctcaaacttctgggctcaagcgattctcccacctc

SEQ ID NO: 431139 - DNA, 201 bp, Homo sapiens
cagagatcacaccgttgcactccagcctgggcaacaagagtgaaactccatctcaaaaaaaaaagcagggcgtcgtggcaggcgcctgtaatcccagctayttggaaggctgaggcaggagaatcgcttgaacccaggaggcagaggttgcggtgagctgagatcgtgccattgcacacaagcctgggcaacaagagcgga

SEQ ID NO: 431140 - DNA, 201 bp, Homo sapiens
gccaaaagaaatagaggaagataaactaaaacgagaagaagaaaaaagaggttggtttcttttcattttattgaatatgaaaaaatgcactgtcttctagstgttctcataattagctgtggaaaagagtcctgtttgtatgaatgaaaactcagggtattgactatattagagtagacgcaatgagatggaaatattttt

SEQ ID NO: 431141 - DNA, 201 bp, Homo sapiens
taatcccagctactctggaggctgaggcaggataatcgcttgaacccaggaggtggagggtgcagtgagccgagatggcgccactgtactccagactgggygacagaatgagactccatctcaaaaaaaaatgaaagacagaaaataaaaagacatgtttgaaaagagaaaaaagaatagtagaggggatcacaactcttt

SEQ ID NO: 431142 - DNA, 201 bp, Homo sapiens
ttctatcctttaaatcaaatcttatcctttaagttgtctttcttagtgtattagtaataattagtttttttgggttttttggtgtttttttttttttttttaagacagagtcttgctctgtcaccaggctggagtgcagtggcgcaatctcggctcactgcaacctctgcctctctggttcaagtgattctcctgcctcag

SEQ ID NO: 431143 - DNA, 201 bp, Homo sapiens
gcatatgttcaggattcatctatattgtagcctgaatcagaatttcattcctttttagaaccgaatagcattttgttatttctatataataccttttgtttataagttttttggggtgttttgttttgtttagagatagagtcttgctgtgttgcctaggctgacctcaaacttctgggctcaagcgattctcccacctca

SEQ ID NO: 431144 - DNA, 201 bp, Homo sapiens
ctgagccctccaaactgttgcatcctctgcctgttatccagttccaaagtcgcttccacattttcgggtatcttttcagcagcgcccaactctactggtaycaatttactgtatcagttggttttcacactgctgataaagacatacccgagactgggaagaaaaagaggtttaactgaacttacagttccatatggctgg

SEQ ID NO: 431145 - DNA, 201 bp, Homo sapiens
ttgtttttagtcagatgttacttgtctgggaagactcattggaaaagatgaatgaaaaggttttatttcttgaagacttgaaggtgaaatatagcaagccytgtaaaagaaagaacgtttgggtttacttagcttactagtaagcacaactgaagctcttaaggtgggggagctaaatgctgggacaccttaaagcctgta

SEQ ID NO: 431146 - DNA, 201 bp, Homo sapiens
agcctagcctaccctcctagctgtagatactggtttgtctgtcaacagaagcttagaagttcttttatatagaaatatataaatggattccagaaatagckacattcattttcactttaaaatgtgaattagcaagttgaaagattattttaaagaaaacctaaatgaaaggaaaatcacatgttcccatattaattgcca

SEQ ID NO: 431147 - DNA, 201 bp, Homo sapiens
ctaaagaatgtgagaaaaattgattgtgggtatattctcttcattctgggggtgcattctttctgccaacatctgtcttccttgttgaaatgtttcaaatrttgtctttggtactttggactgaataatctttttcttcaaccatacatggtttgtacatgaccctccaatgttgcttgttttgtttctctttacatgtaa

SEQ ID NO: 431148 - DNA, 201 bp, Homo sapiens
cttctaagtgctgtgtatgattctgccttcgccttttttttaatactaaagaatgtgagaaaaattgattgtgggtatattctcttcattctgggggtgcrttctttctgccaacatctgtcttccttgttgaaatgtttcaaatattgtctttggtactttggactgaataatctttttcttcaaccatacatggtttgt

SEQ ID NO: 431149 - DNA, 201 bp, Homo sapiens
aggagtaccaaaggccctctttgagttggttttacttaaataggacaaccagagcaggatgcttctacagcttgcctcagtgcttttaaccagttagcacscattatagtcataaatgctctgctggtattgactcctcaaccctgtagaaccattttttaacctactctttttgtcatgcaggcttttgttaaaattggt

SEQ ID NO: 431150 - DNA, 201 bp, Homo sapiens
cttaaggtctggatgagacttctttggggagcctctaaaaaaatttttcactgggggccacgtgggtcattagaagccagagctctcctccaggctccttyccagtgcctagaggtgctataggaaacatagatccagccaggggcttccctaaagcagtgcagcaccggcccagggcatcactagacaggccctaattaa

SEQ ID NO: 431151 - DNA, 201 bp, Homo sapiens
actattttaatgtaatttatatattttcctccccaagaattgaaaaagtatgggttcgagatggagctgcatatttttatggccccatcttcattcacccwgaagaaacagagcatgagcccacaaaaatgttctacaaaaaagaagtatttctgagtaatctggaagaaacctgccccatgacatgtattctcggtaggt

SEQ ID NO: 431152 - DNA, 201 bp, Homo sapiens
tgtctctacaaaaaaatataaaaaattagccaggcgtggtggcacatgcatgtacctgtggtcctagctatttgggaggctgaggtggaaggattgcttgrgcccacgaggtcaaggctgcagtgaaccctgatcatgcccactgcactccagcatgggcaacagagctagaccctgcctccaaaaaaaaaaaaaacagaa

SEQ ID NO: 431153 - DNA, 201 bp, Homo sapiens
ggggtttcactgtgtcagccaggatggtctcaatctcctgaccttgtgatccacctgtctcggccccccaaagtgctgggattacaggtgtgagccaccgygcccggctggcttctgaaattttgagcagttaaccaaatgtaatgttttgatgcaccataagacctttctgtcttacagtctaccccaaagtctgccaaa

SEQ ID NO: 431154 - DNA, 201 bp, Homo sapiens
cgcccgccaccacgcctggctaattttttgtatttttttttttagtagaaacggggtttcactgtgtcagccaggatggtctcaatctcctgaccttgtgmtccacctgtctcggccccccaaagtgctgggattacaggtgtgagccaccgcgcccggctggcttctgaaattttgagcagttaaccaaatgtaatgttt

SEQ ID NO: 431155 - DNA, 201 bp, Homo sapiens
ttcctagaacctcccaggtgtgtttctgcctctggaattttgcagttgttcttctgcatagaaagtgcttcctttgacttttcccgtgactggctcttttktattgttctaacaccatctaaaatggtgtctactgagacaggactttcctgaccaccctatctccattgtttgctccgccttcctccttttcagccccta

SEQ ID NO: 431156 - DNA, 201 bp, Homo sapiens
agcgctttgggaggttgaggcaggaggattgcttgaagccaagagtgtgaaaccagcctaggcagtgtactaagaccccacctctacaaaaaaaaaaaaaattgttttaattggctgagcatggtgacgtgcaccagtagtcccagctacttgaggggctgaggtggaaggatcatttgagcccaagagttcaaggccgta

SEQ ID NO: 431157 - DNA, 201 bp, Homo sapiens
gtataacaaaccgaagcctagagtaaggaacatcatcgtggtagattttgttttaaacaccatgtggactttagtttggaaaaagagatctgagacttctytttttccttaattgctcaccaggattttcaaatgtgattcttttgctccttctttctgtttcctggagatccccaacctttctttccatactgctggcaa

SEQ ID NO: 431158 - DNA, 201 bp, Homo sapiens
ggtataaccaacactattctctctgcgtttgttcgcaatcgttgctgtcatcatttccatgtattcatggatctgtttctgtccttttattctgttccacrggccagtttatctgttactaggccgttctatttctatcttaattactttggctttataatttttttttttttttttgagacacgatctcctttgttgccc

SEQ ID NO: 431159 - DNA, 201 bp, Homo sapiens
gtgcagggattatgggcgtgagccactgtgcccaacccacattcatgtgattatgaactattcttatttctctgtctgctcaaatcttttgcccatttttytcttggtttgttagtcattttcatatttctggaatttttttttctttttttttttagagacagagtctccctatgttactcaggctggtctcaaactcct

SEQ ID NO: 431160 - DNA, 201 bp, Homo sapiens
aggtttttatatcattaacgtatgttttgaaaagggaatgagtgtgcatcttgcttttctttttctttttttgcagatttttttcttttttttttttttttaagtaagcttcaaagtccatgaaagattctaatatgctctgtcacttggaatgttgaacattaccataaatagttttgaaataaaactttttgtaagctt

SEQ ID NO: 431161 - DNA, 201 bp, Homo sapiens
gcacatgttctcattgaattctcaattgtctacagatagtccccttagcttgagacactgctggggtcctgcctcagcaaggagcactggactgtgggtcctgtaggcccagatggagaggaccatcttggatattaagttatcaaagccctaatgtgtgctgtgagaaggttccttgataccactgacaacatcagtatt

SEQ ID NO: 431162 - DNA, 201 bp, Homo sapiens
gcctcccaaagtgctgggattacaggtgtgagcctctgtacccagccttaactgttcattatcttataactgagcaaagtacgaaaatctttcagcctacmtcttttattaatattttaattatgacagttaatctgtatttaagttatgtatctatagttgaaaccccaggataagcatagtcagttcctggagaattca

SEQ ID NO: 431163 - DNA, 201 bp, Homo sapiens
aggggcagaggatacacaccttgggtgctggaccactgtcatgttacaacctcgaagataatggtgccttttttctgacgctcctctgtggaatgtatgtktttttctcaagtatttatgagaattagtattgctcagagctacacaatttgtgaatatctttttgatactttgtttcagttactgtattagtctgctttg

SEQ ID NO: 431164 - DNA, 201 bp, Homo sapiens
ggcatcccaccaccgggtaagaacttcatcctcattcactcattaatctcatcttcatattctctttttccgctttcaaccagttgttccaggaggcaccygtggcccattgtggccaggccttccctccctgagaatccaaaggttgtcagcagcagggcatgtcttgtgcattcagcaggtggcccagcacttgtgccc

SEQ ID NO: 431165 - DNA, 201 bp, Homo sapiens
aacccaggaggcagaggttgcagtgtgcggagataacgctgttgcactccagcctgggcaacaagagtgaaactctgactcaaaaaaaaaaaaaaaaaaaagccaaaaaaaaacctctggaaattgaagttatttgttctgaaaacgtatatgagtgtgttagtcagaaaactggtgcccaaatatttccacattctaatc

SEQ ID NO: 431166 - DNA, 201 bp, Homo sapiens
tcccccccaccctcagcagtaatattacatcatttggctgggtgcggtggctcacacctgtaatcccagcactttgggaggtcaaggtgagagaatcactwgagctcaggagttcaagaccagcttgggcaacatagcgagacccccatctctacaaaaactgcaaaaattagccagtcctgatggcacacgcctgtagtc

SEQ ID NO: 431167 - DNA, 201 bp, Homo sapiens
ctaatattcatctgttggagcacaacacagaatctgaatatgattttggtaaattttaaataaaactttacatgcagatgccattctaagagaaaattcayttattctgtgaagctgtttatacatattattgttaactgtctttgtgattttgatggttaacgtgcaaatgctacaatcaaaagatttaaagtctgtcct

SEQ ID NO: 431168 - DNA, 201 bp, Homo sapiens
gtgatttggtgggcaaatcacttgaggtcaggagtttgagattagcccggccaacattgtgaaaccccgtctccattaaaagtacaaaaattagccaggcrtagtggcaggagccagtaatcctagctactcgggcggctgaggtaggagaattgcttgaaccgggaaggtggaggttgcattgcagtgagtctaggtcgc

SEQ ID NO: 431169 - DNA, 201 bp, Homo sapiens
tgtgtaccccaatgccaggctacttttttgttgagacagcgtcttgctgtgttgcttaggctggtctcaaactcctggccttaagcagtcctcccgcctcrgcctcccaaagcattgggattataggcatgagccaccatgcctggccgctttatttcataaatgaggaaggagactcagaaaagttctgggtatgacata

SEQ ID NO: 431170 - DNA, 201 bp, Homo sapiens
tcgcgccattgcactccagcctgggacagagcaagactccgtctcaaaaacaaagtaatttatcagattccaggaaaataattcaaagtttgatacaagakaattcttagaaacattacaaagaaatcagaaaaacaattcaggatatgaatgagaactttatcaaatagacatcatgaaaaagaactaaaaaattctgga

SEQ ID NO: 431171 - DNA, 201 bp, Homo sapiens
atgtgacagtcaccagaaaacaagggggaaaaaggggtatgaaagagagctttgccctttgatagtgaactgagggatttttttaaatttaaaaattagarctttgccctgccagatgtattacattttataaaactacagttaaaaaacaaaattaaaacccagtacagtgtcacacgcctgtaatcccagcattttggg

SEQ ID NO: 431172 - DNA, 201 bp, Homo sapiens
tccagcctgggacagagcaagactccgtctcaaaaacaaagtaatttatcagattccaggaaaataattcaaagtttgatacaagataattcttagaaacrttacaaagaaatcagaaaaacaattcaggatatgaatgagaactttatcaaatagacatcatgaaaaagaactaaaaaattctggaactgaagaatttat

SEQ ID NO: 431173 - DNA, 201 bp, Homo sapiens
aaatagataaaaagagagaacttaaaatgttcccaacacatagaaaggatggttaccccaaataccctgacttgatcattacacattctataaatgcaacraagtgtcacatgtgccccataaatatttatattatatatcaatgaaaaacaaaaattgtgattgtaattaatatcactgaaatgcacactttacattggt

SEQ ID NO: 431174 - DNA, 201 bp, Homo sapiens
acatataaatactacatatatatatatatatatatatatatatattttttttttttttttttttttttttttctctttgatacatacctaggaatggaatkgcggggccatgtgtggtaactgtatatttaactttctgaagaaccgccaaactgttttccaaactctaccattttacattcccaccagcaatatccaggt

SEQ ID NO: 431175 - DNA, 201 bp, Homo sapiens
tatctatttttttctttggttgctaatgcttaagtgtcatatcaaataaatcattccctaatccaaaatcacaaagatttacacctatgttttcttgtaaraagtttatagtttagctcttaacgtacttagatctttgatccagtttgaagtaatttttatatatgtgaggtacatgtaaggtaggagtccaaattcatt

SEQ ID NO: 431176 - DNA, 201 bp, Homo sapiens
gatcagttgaagccaggagttccagaccaccctgggcaacatagcaagaccttgtctctacagaagatttttagaattttatttaatttagaaaaacagtmatttacctataattttttttcaataataaacttggaatagacgaggattttctgttcattatataaaaccattgatcattttattgatttatgattgaaa

SEQ ID NO: 431177 - DNA, 201 bp, Homo sapiens
cttagaattctgcaggaaggaacagattttgtcagtgccatgatttattcatttatttttgattgacaaaaattatatgtcatcccattaataatttatawtaataccattaataatttaaaattaatatctttaaaatttcatagctattttaatggtgggcttagttagaagactcttccttgtgctgaagaaaagcag

SEQ ID NO: 431178 - DNA, 201 bp, Homo sapiens
tcattaggttcatataggttgttctagggatacaatgcctatgtccagcatcagaacattatggggtattcttgaaatttggagttaaaataagtactgcktagaagttgctttctttggccaggcacagtggctcatgcctgtaatcccagcactttgagaggccgaagtgggcagacatgaggtgaggagttcgagacc

SEQ ID NO: 431179 - DNA, 201 bp, Homo sapiens
ttcagtcatttcaacccagagcctctaactgtgccattgcattctgaattataggtgtgatgaaccaaggagtggcccctatggtagggactccagcaccrggtggaagtccatatggacaacaggtgagcctcccagtttgattttctaggacttgacagaattcgagttatccttctcagaacatgtgcagagtctctt

SEQ ID NO: 431180 - DNA, 201 bp, Homo sapiens
tggcccctatggtagggactccagcaccgggtggaagtccatatggacaacaggtgagcctcccagtttgattttctaggacttgacagaattcgagttayccttctcagaacatgtgcagagtctctttttgcctcaccatgtggtcctgtgctctttcaggtgggagttttggggcctccagggcagcaggcaccacct

SEQ ID NO: 431181 - DNA, 201 bp, Homo sapiens
tgttgaaatgtttcaaatattgtctttggtactttggactgaataatctttttcttcaaccatacatggtttgtacatgaccctccaatgttgcttgtttkgtttctctttacatgtaatgtttgtttctgctttcccaggaacactcatgacagtgagatgttgggtctcaggaggctatccaggtgtgcagtccttttt

SEQ ID NO: 431182 - DNA, 201 bp, Homo sapiens
acccgggaggtggaggttgcagtgagccgagatcgtaccgttgcactccagccttggtgacaagagtgaaactccatctcaaaaaaaaaaaaaaaaaaaaagccgagcatggtggtggggcgcctgtaatcccagctacttgggaggctgaggcaggagaattgcttgaacctgggaggcagaggttgcagtgagctgaga

SEQ ID NO: 431183 - DNA, 201 bp, Homo sapiens
caaagtagagtcactttaagtttgtttacatgtgacctccacaaacacacacgattacaaaatagtttagttaatcaagggatgtataataaacaagaggycggaggccccgggccgctcccgcccacctccgcggacgagcgcccccctccgaccccattccctgcggtctgggcgttcaggcccttcggtctgggcgat

SEQ ID NO: 431184 - DNA, 201 bp, Homo sapiens
tgggggctaacgttagtaagaatttactgatttactgagtacctacacgaagtttcacattttcacaaagtagagtcactttaagtttgtttacatgtgamctccacaaacacacacgattacaaaatagtttagttaatcaagggatgtataataaacaagaggtcggaggccccgggccgctcccgcccacctccgcgg

SEQ ID NO: 431185 - DNA, 201 bp, Homo sapiens
acattatctgacaaattcttaatgtaatctggtgacagagaaaaataatttgaggagaaagtatttagggagtgatgaaacagacagaaaattacttgtgstaaggaccagtattgtatttgactttttaaaaaaccatttttaccctggagctaaaatacgaggttatactgttctgcttaatacaatactggcagccta

SEQ ID NO: 431186 - DNA, 201 bp, Homo sapiens
acacattatctgacaaattcttaatgtaatctggtgacagagaaaaataatttgaggagaaagtatttagggagtgatgaaacagacagaaaattacttgkggtaaggaccagtattgtatttgactttttaaaaaaccatttttaccctggagctaaaatacgaggttatactgttctgcttaatacaatactggcagcc

SEQ ID NO: 431187 - DNA, 201 bp, Homo sapiens
ttaagtaacaactggatacaagaaacacttggtatttcccctttatggagtgagagagatctttaaaatataaacccttgataatataatattactacttyctattacctgttatgcagttctacacattatctgacaaattcttaatgtaatctggtgacagagaaaaataatttgaggagaaagtatttagggagtgat

SEQ ID NO: 431188 - DNA, 201 bp, Homo sapiens
acagggcagcacgtgaggccccagggattggggtatcttgaccgcatcctggcagatgtcttggctgtgacactgcactatcgttttgcagatgcttccaytggggaaagctgggtagagggtacacgggctctctgcattactgatgacaactgcatgtgatttacatgaccccaaaataaaatatttaattaaaagaaa

SEQ ID NO: 431189 - DNA, 201 bp, Homo sapiens
tattcataacagctgaaaactggaaaggacccagatgtctttcagtggttaaacacactgtggtacgtccatgtcataaaacacgactcagcaatgaaacyatctatgaactactgatacagcaacaatctgcatggacctcagggggttatgctgaatgaaaaaagtcaacccgaaaggttatatactgtttgattccat

SEQ ID NO: 431190 - DNA, 201 bp, Homo sapiens
tgcagccatgacgagacagcaccacacacccatcatgatggggcagactggacagcagtgtgagcacactgatgctcgacatcgcacactgcagccacgaygagacagcaccacacacccatcaggatggggcagacgggacagcagtgtgagcacgctgatgctcgacatcgcacactgcagccacaatgagacagcacc

SEQ ID NO: 431191 - DNA, 201 bp, Homo sapiens
aagaatttactgatttactgagtacctacacgaagtttcacattttcacaaagtagagtcactttaagtttgtttacatgtgacctccacaaacacacacrattacaaaatagtttagttaatcaagggatgtataataaacaagaggtcggaggccccgggccgctcccgcccacctccgcggacgagcgcccccctccg

SEQ ID NO: 431192 - DNA, 201 bp, Homo sapiens
cacacccatcaggatggggcagacgggacagcagtgtgagcacgctgatgctcgacatcgcacactgcagccacgacgagacagcaccacacacccatcasgatggggcagacgggacagcagtgtgagcacgctgatgctcgacattgcacgctgcagccacgatgagacagcaccacacacccatcaggatggggcaga

SEQ ID NO: 431193 - DNA, 201 bp, Homo sapiens
acctgaattccgagtctgacctgacagactttgggcacacgcaacttttcaaagcctcagtttccggtgagactcctgcttctgggaagacggagtagacrtcctccctattcttcttctaagtaaactaaaaatcctggacatcatctgtaaaacaagatgactctgaaagatggagagaaggcagactggcttgggtcc

SEQ ID NO: 431194 - DNA, 201 bp, Homo sapiens
atgctcgacatcgcacactgcagccatgacgagacagcaccacacacccatcatgatggggcagactggacagcagtgtgagcacactgatgctcgacatygcacactgcagccacgacgagacagcaccacacacccatcaggatggggcagacgggacagcagtgtgagcacgctgatgctcgacatcgcacactgcag

SEQ ID NO: 431195 - DNA, 201 bp, Homo sapiens
attacagagttctctgcttcgggctcagcatgcaccctccatagctaggctgggggctaacgttagtaagaatttactgatttactgagtacctacacgargtttcacattttcacaaagtagagtcactttaagtttgtttacatgtgacctccacaaacacacacgattacaaaatagtttagttaatcaagggatgta

SEQ ID NO: 431196 - DNA, 201 bp, Homo sapiens
cacacccatcaggatggggcagacgggacagcagtgtgagcacactgatgctcgacatcgcacactgcagccacgacgagacagcaccacacacccatcasgatggggcagacgggacagcagtgtgagcacgctgatgctcgacatcgcacactgcagccatgacgagacagcaccacacacccatcatgatggggcaga

SEQ ID NO: 431197 - DNA, 201 bp, Homo sapiens
acgggacagcagtgtgagcacgctgatgctcgacatcgcacactgcagccacgatgagacagcaccacacacccatcaggatggggcagacgggacagcartgtgagcacgctgagatgctcgacattgcacactgcagccacgacgagacagcaccacacacccatcaggatggggcagacgggacagcagtgtgagcac

SEQ ID NO: 431198 - DNA, 201 bp, Homo sapiens; identical to SEQ ID NO: 111532

SEQ ID NO: 431199 - DNA, 201 bp, Homo sapiens
tgcagccacgaagagacagcaccacacacccatcacgatggggcagacgggacagcagtgtgagcacactgatgctcgacatcgaatactgcagccacgaygagacagcaccacacacccatcaggatggggcagacgggacagcagtgtgagcacactgatgctcgacatcgcacactgcagccacgacgagacagcacc

SEQ ID NO: 431200 - DNA, 201 bp, Homo sapiens
cacacccatcaggatggggcagacgggacagcagtgtgagcacgctgatgctcgacatcgcacactgcagccacgatgagacagcaccacacacccatcasgatggggcagacgggacagcaatgtgagcacgctgagatgctcgacattgcacactgcagccacgacgagacagcaccacacacccatcaggatggggca

SEQ ID NO: 431201 - DNA, 201 bp, Homo sapiens
attaaaagaaactgagttgggcccagtgaactcaaccagtccctttcagctctaaaactatgttttctgggtcaggggaggaaacaggaggtacaggaacrctagaggggagaaagcacggagagatgggaaaagcacggagagagagatggggaaagggcaatcaagaagactgagagaaaaggggggaagcagaatgac

SEQ ID NO: 431202 - DNA, 201 bp, Homo sapiens
cacacccatcaggatggggcagacgggacagcagtgtgagcacactgatgctcgacattgcacactgcagccacgaagagacagcaccacacacccatcasgatggggcagacgggacagcagtgtgagcacactgatgctcgacatcgaatactgcagccacgacgagacagcaccacacacccatcaggatggggcaga

SEQ ID NO: 431203 - DNA, 201 bp, Homo sapiens
gctgagatgctcgacattgcacactgcagccacgacgagacagcaccacacacccatcaggatggggcagacgggacagcagtgtgagcacgctgatgctygacatcgcacactgcagccacgatgagacagcaccacacacccatcaggatggggcagacgggacagcagtgtgagcacgctgatgctcgacatcgcaca

SEQ ID NO: 431204 - DNA, 201 bp, Homo sapiens
ccgcatcctggcagatgtcttggctgtgacactgcactatcgttttgcagatgcttccactggggaaagctgggtagagggtacacgggctctctgcattrctgatgacaactgcatgtgatttacatgaccccaaaataaaatatttaattaaaagaaactgagttgggcccagtgaactcaaccagtccctttcagctc

SEQ ID NO: 431205 - DNA, 201 bp, Homo sapiens
gatgagaaaagatgctcaacactgcacagtagagccacgatgagacagcaccacacacccatcaggatggggcagacgggacagcagtgtgagcacgctgrtgctcgacatcgcacactgcagccacgatgagacagcaccacacacccatcaggatggggcagacgggacagcaatgtgagcacgctgagatgctcgaca

SEQ ID NO: 431206 - DNA, 201 bp, Homo sapiens
gggacagcaatgtgagcacgctgagatgctcgacattgcacactgcagccacgacgagacagcaccacacacccatcaggatggggcagacgggacagcastgtgagcacgctgatgcttgacatcgcacactgcagccacgatgagacagcaccacacacccatcaggatggggcagacgggacagcagtgtgagcacgc

SEQ ID NO: 431207 - DNA, 201 bp, Homo sapiens
ttgaccgcatcctggcagatgtcttggctgtgacactgcactatcgttttgcagatgcttccactggggaaagctgggtagagggtacacgggctctctgyattactgatgacaactgcatgtgatttacatgaccccaaaataaaatatttaattaaaagaaactgagttgggcccagtgaactcaaccagtccctttca

SEQ ID NO: 431208 - DNA, 201 bp, Homo sapiens
atgctcaacactgcacagtagagccacgatgagacagcaccacacacccatcaggatggggcagacgggacagcagtgtgagcacgctgatgctcgacatygcacactgcagccacgatgagacagcaccacacacccatcaggatggggcagacgggacagcaatgtgagcacgctgagatgctcgacattgcacactgc

SEQ ID NO: 431209 - DNA, 201 bp, Homo sapiens
gacaggctacagactgggagaggatacttgcaagccacatatgcaactaaggactagaatctaagacatattaacaactctcaaaactcaacattaaaaaacaaacagtcctattaggaaacggctgaaaggcaagaatactcatttcatcaggaggatacgctgatggcaatgagcacgtgaagaggtgctcgacatcac

SEQ ID NO: 431210 - DNA, 201 bp, Homo sapiens
acgggacagcagtgtgagcacgctgatgctcgacatcgaatactgcagccacgatgagacagcaccacacacccatcacgatggggcagacgggacagcartgtgagcacgctgatgctcgacatcgcacactgcagccatgacgagacagcaccacacacccatcatgatggggcagactggacagcaatgtgagcacgc

SEQ ID NO: 431211 - DNA, 201 bp, Homo sapiens
agtgtgagcacactgatgctcgacatcgcacactgcagccacgacgagacagcaccacacacccatcaggatggggcagacgggacagcagtgtgagcacrctgatgctcgacatcgcacactgcagccacgacgagacagcaccacacacccatcaggatggggcagacgggacagcaatgtgagcacgctgatgctcga

SEQ ID NO: 431212 - DNA, 201 bp, Homo sapiens
tgcctgaaaagtacttattcggtctgtaacagaaatgccatgatcaatcagagataattctatttctctttgattttcactgatatcaaaatccagtgctktcaccgaactttctggctgacatgcaaaaatgagatcatcttcacattcaacatcttcctcttcagtttctttctttgcctctgggcctggttctgtcat

SEQ ID NO: 431213 - DNA, 201 bp, Homo sapiens
aaatctccatgagatgaagaagatgcccaccagctgctctttccccatcatcctcacaatcctgtaagaaggtctgtttattctcacaatatactctgtargcatagatgctgtgggtggtactagctattttcttattctcatacaagttggaaagaaccattttcacctgtttgggacaaactactggatcaaagtctg

SEQ ID NO: 431214 - DNA, 201 bp, Homo sapiens
acaatatactctgtaggcatagatgctgtgggtggtactagctattttcttattctcatacaagttggaaagaaccattttcacctgtttgggacaaactrctggatcaaagtctgcctgaaaagtacttattcggtctgtaacagaaatgccatgatcaatcagagataattctatttctctttgattttcactgatatc

SEQ ID NO: 431215 - DNA, 201 bp, Homo sapiens
actgatatcaaaatccagtgctgtcaccgaactttctggctgacatgcaaaaatgagatcatcttcacattcaacatcttcctcttcagtttctttctttrcctctgggcctggttctgtcatctgaggtttttgtattggaacatctcttattttctccactcacaggtaaagaatactttcaccaatattctgtcattt

SEQ ID NO: 431216 - DNA, 201 bp, Homo sapiens
tacaaaatattttggcacagtcatcaatgacacaccattcctcgccatcaatggctaccattgcttcaatttcctcatcctgcctttggttactccctgcrtccccctcagccatgtagccctggaagcagctctgcggctgcacctaatcattgcttttgtttgcttgttttttgagatggagtcttgctctgttgcccc

SEQ ID NO: 431217 - DNA, 201 bp, Homo sapiens
ggtggccacatatatatttcctcaggctattcaataaatggacaagttcttgccctttaagccaatgagcattcaactgatagacaggtggagctgtacckgggtcctcatttggcagcatcacttgcaagcaaagtgtccatttggggtcatctatatcgtagctaattctaatacaaaatattttggcacagtcatcaa

SEQ ID NO: 431218 - DNA, 201 bp, Homo sapiens
gggagacacagccccgtcctcagggaaccccagtctgatggggagacacagccccgtcttcagggagccccagtctgagggggagacacagccctgactcmgggagccccagtgtgaggggagacagcctggtggagaccattagggtgacttgtctgggggctcagggaggcgaggtggggagacggggaatgtccgcaa

SEQ ID NO: 431219 - DNA, 201 bp, Homo sapiens
ggagacacagccccgtcttcagggagccccagtctgagggggagacacagccctgactccgggagccccagtgtgaggggagacagcctggtggagaccaktagggtgacttgtctgggggctcagggaggcgaggtggggagacggggaatgtccgcaagcccagcctgcagactgagggtggctcagagcctctgctgg

SEQ ID NO: 431220 - DNA, 201 bp, Homo sapiens
tactaaaaatacaaaattagccgggcatggtgatgcatgcctgtaatcccagctactcaggaggctgaggcgggagaacgcttgaaccagggaggcagagrttgtggtgagctgagatctcgccattgcactccagcctgggcaacaagagcaaaactctgtctcaaaaaaaaaaaaaaaaaaaagacaatttagtgttcc

SEQ ID NO: 431221 - DNA, 201 bp, Homo sapiens
gacagcctggtggagaccattagggtgacttgtctgggggctcagggaggcgaggtggggagacggggaatgtccgcaagcccagcctgcagactgagggyggctcagagcctctgctggcctcagcccacacagttttaggcctgaccctcacatcacagacaccttagtgtgcatgaggcgggtgtgcaaggtttgctc

SEQ ID NO: 431222 - DNA, 201 bp, Homo sapiens
gtgtaatgatagtataaagacaatttagggccgggtgcggtagctcacacctgtaatcccagcactttgggaggccgaggcgggcggatcacctgagttcrggagttcgagaccagcctgaccaacacggagaaaccccgtctctactaaaaatacaaaattagccgggcatggtgatgcatgcctgtaatcccagctact

SEQ ID NO: 431223 - DNA, 201 bp, Homo sapiens
cctgggcctcccaaagtgctgagattacaggtgtgagccactgcacttggcctacatgcaactttttcttttttttttttttgagacggggtctcactgtrtcgtacgggctggagtgcagtggtgtgatcttggctcactgcaacctcttcctcccgggttcaagtgattctcgtgcctcagcctcccgagtagctggga

SEQ ID NO: 431224 - DNA, 201 bp, Homo sapiens
cacccctggcaggtgtttcatgaagaagaccatcgacatgctgcagatcgagttcaaatgctgcggcaacaacggttttcgggactggtttgagattcagyggatcagcaatcgctacctggacttttcctccaaagaagtcaaagagtgagtggcttccagtcctggggtcagagctatgaatatattggggacactgag

SEQ ID NO: 431225 - DNA, 201 bp, Homo sapiens
cttcaacatcatcctcttccttgtggctctctgctgctttctgcttcggggctcgctggagaacaccctgggccaagggctcaagaacggcatgaagtacyaccgggacacagacacccctggcaggtgtttcatgaagaagaccatcgacatgctgcagatcgagttcaaatgctgcggcaacaacggttttcgggactg

SEQ ID NO: 431226 - DNA, 201 bp, Homo sapiens
tcttcagcgcctagaacagtgactggcacgtagcgggcgcacagcaaatatataccaagtgtgcgagtgaatgactattctaggtttccagaggcaggggwtgggaggaagtggcccctgttgagaagcccgggaagcccatctccagctgtctgtttccctttaagtcgaatcaagagcaacgtggatgggcggtacctg

SEQ ID NO: 431227 - DNA, 201 bp, Homo sapiens
gacacccctggcaggtgtttcatgaagaagaccatcgacatgctgcagatcgagttcaaatgctgcggcaacaacggttttcgggactggtttgagattcrgtggatcagcaatcgctacctggacttttcctccaaagaagtcaaagagtgagtggcttccagtcctggggtcagagctatgaatatattggggacactg

SEQ ID NO: 431228 - DNA, 201 bp, Homo sapiens
gcaatggcatgatctcagctcactgcaatctccacctccctggttcaagtgattcttctgcctcagcctccccagtagctaggattacaggcgcccgccascacgcccggctaattttttgtatttttagtagagacggggtttcaccacgttggccaggatggtctcgaactcctgacctcatgatctgcccacctcagc

SEQ ID NO: 431229 - DNA, 201 bp, Homo sapiens
cccggctaattttttgtatttttagtagagacggggtttcaccacgttggccaggatggtctcgaactcctgacctcatgatctgcccacctcagcctccyaaagtgctaggattacaggcgtgagccaccgcgcccggctggaccccgacttcttgtgtggctttgggcgaggccttgccctcctctgggccccacttgc

SEQ ID NO: 431230 - DNA, 201 bp, Homo sapiens
ggctggctgctggagaagagcgtgccggagacctggaaggcctttctggagagtgtgaagaagctgggcaagggcaaccaggtggaagccgagggcgcagrcgcaggccaggccccagaggctggctgagggccctggggcccctcccctcccgaacactgagaaatagtgcactccaagaaacgtggatctccccctcat

SEQ ID NO: 431231 - DNA, 201 bp, Homo sapiens
ctttctggagagtgtgaagaagctgggcaagggcaaccaggtggaagccgagggcgcaggcgcaggccaggccccagaggctggctgagggccctggggcycctcccctcccgaacactgagaaatagtgcactccaagaaacgtggatctccccctcatccaactccgaaagtctgaatctcccaaggagggcaccatct

SEQ ID NO: 431232 - DNA, 201 bp, Homo sapiens
gcctgcttttgtgtcccattcacatgccctcggtcactgagtctggagtgaaccacgggttgaggaagtcaggctgttggcgtgtcccagcaccacaccayccctaaagtgccaggtgatctcctgtggctcatcggtggaagcagtggggtaggctgctgccctgctgtggaagaggagcaacaatcagacatgagtcca

SEQ ID NO: 431233 - DNA, 201 bp, Homo sapiens
ttttttttgttttttgagacagagtctcactggcgtgatctcggctcactgcaacctctgcgtctcgggctcaagtgattctcgtgcctcagcctcccgartagctgggactacaggcatgcaccacaacgcctggctaatttttttgtatttttatttttatttttttattttttatttttattttttttgagacagagt

SEQ ID NO: 431234 - DNA, 201 bp, Homo sapiens
taagaataatggactcttaaggcattgagggctctaaacaggattctttaatcatggagcaagagaatttcaaggcaggggattttatcccccaccaaaarcacagtgaaaggcctgcttttgtgtcccattcacatgccctcggtcactgagtctggagtgaaccacgggttgaggaagtcaggctgttggcgtgtccca

SEQ ID NO: 431235 - DNA, 201 bp, Homo sapiens
ctgagaggcagctgctatcactcccagctcacgcaggtccacagagtttaagctccatggctcccaaatgcatatttaggactcagtggtgtgctttcaaycacccccaccctgtccacaggacactggcaatggctcagctgggacactgtactgaggggaaggctccagggacagcctgtaggtcaggaggtgggacag

SEQ ID NO: 431236 - DNA, 201 bp, Homo sapiens
gaaatctgaaaaatggccatgttgtcttttttttttttttttaatgccaagattgacaggttggccgtttgcttaatgccagaagttgggggaaagttacrcttttctaagaataatggactcttaaggcattgagggctctaaacaggattctttaatcatggagcaagagaatttcaaggcaggggattttatccccca

SEQ ID NO: 431237 - DNA, 201 bp, Homo sapiens
acagcctgtaggtcaggaggtgggacagacagcatttgggttgggaggcccctagccttgaggaggacactttggggaaggtcttgggggaagaagggagrgaccactgcagagatgccatctgctcagtgtgtccagggctactggcccctccagagggccagtagaggggagcgggaggcccgagctgaaggcccccct

SEQ ID NO: 431238 - DNA, 201 bp, Homo sapiens
gccagaaggcaaaaaccagaaagggaacagtccataacttacctctgcttctgaccgatggtgtttgggaataggttactttggactgagtttgggttctytgctgtcctaagaactttagtgtagagaaaataagacttctggtgctgctggggtatgttctgggcttaattcccccaagcagaagaccagatccaagat

SEQ ID NO: 431239 - DNA, 201 bp, Homo sapiens
tattaacgagagactgggaaaaacccaaacttccatcagtctggaactggctaggacccatgtgccatccacgcaatgggaataccatgcagctcattaamaaacaaaaatccaggacactccacagacagatacgaaaatatctcagccgagcgcagtggctcatacctgtaatcccagcactttgggaggctgaggcag

SEQ ID NO: 431240 - DNA, 201 bp, Homo sapiens
gaaagggaacagtccataacttacctctgcttctgaccgatggtgtttgggaataggttactttggactgagtttgggttctttgctgtcctaagaacttyagtgtagagaaaataagacttctggtgctgctggggtatgttctgggcttaattcccccaagcagaagaccagatccaagatgtttggacaccctgtcag

SEQ ID NO: 431241 - DNA, 201 bp, Homo sapiens
agagtggcctagaacatagttcttatcttaatcaagaccctttcaaaccctagtgactcctcctccaccgcccccggccccttccgcgcagagtgaaattygtagcctgggaaacacgctgtgatataaatagccggctcaccactaaggcgctctcctctgcctggctttgtcttaagagggtgagaggagccttaatct

SEQ ID NO: 431242 - DNA, 201 bp, Homo sapiens
ttgtttaaaataatctctattggaaacagttatgctttctattatgttctaaaagtctattatgtaacgcattcttcgcgtgcaatttttttttcttttttcctttctttcttttttttttgttttttgagacagagtctcactggcgtgatctcggctcactgcaacctctgcgtctcgggctcaagtgattctcgtgcc

SEQ ID NO: 431243 - DNA, 201 bp, Homo sapiens
gcccctgttgagaagcccgggaagcccatctccagctgtctgtttccctttaagtcgaatcaagagcaacgtggatgggcggtacctggtggacggcgtcyctttcagctgctgcaatcctagctcgccacggccctgcatccagtatcagatcaccaacaactcagcacactacagttacgaccaccagacggaggagct

SEQ ID NO: 431244 - DNA, 201 bp, Homo sapiens
cggcatgaagtactaccgggacacagacacccctggcaggtgtttcatgaagaagaccatcgacatgctgcagatcgagttcaaatgctgcggcaacaacrgttttcgggactggtttgagattcagtggatcagcaatcgctacctggacttttcctccaaagaagtcaaagagtgagtggcttccagtcctggggtcag

SEQ ID NO: 431245 - DNA, 201 bp, Homo sapiens
tgttgagaagcccgggaagcccatctccagctgtctgtttccctttaagtcgaatcaagagcaacgtggatgggcggtacctggtggacggcgtccctttmagctgctgcaatcctagctcgccacggccctgcatccagtatcagatcaccaacaactcagcacactacagttacgaccaccagacggaggagctcaacc

SEQ ID NO: 431246 - DNA, 201 bp, Homo sapiens
gagaagcccgggaagcccatctccagctgtctgtttccctttaagtcgaatcaagagcaacgtggatgggcggtacctggtggacggcgtccctttcagcygctgcaatcctagctcgccacggccctgcatccagtatcagatcaccaacaactcagcacactacagttacgaccaccagacggaggagctcaacctgtg

SEQ ID NO: 431247 - DNA, 201 bp, Homo sapiens
gttgagaagcccgggaagcccatctccagctgtctgtttccctttaagtcgaatcaagagcaacgtggatgggcggtacctggtggacggcgtccctttcrgctgctgcaatcctagctcgccacggccctgcatccagtatcagatcaccaacaactcagcacactacagttacgaccaccagacggaggagctcaacct

SEQ ID NO: 431248 - DNA, 201 bp, Homo sapiens
tctccagctgtctgtttccctttaagtcgaatcaagagcaacgtggatgggcggtacctggtggacggcgtccctttcagctgctgcaatcctagctcgcsacggccctgcatccagtatcagatcaccaacaactcagcacactacagttacgaccaccagacggaggagctcaacctgtgggtgcgtggctgcagggct

SEQ ID NO: 431249 - DNA, 201 bp, Homo sapiens
tgtttctgctgaacataagcacaagaccagtcatagtcaacagatttaatggcaatatcaatcaatacccagtctatgttcagttttccctgatagtctcrgaatgctttttacagttggtcaattcaggatccaaaccaagtccatgctttgcatttggttgtttggtttcctgtctgttttactagaaaactgtcccct

SEQ ID NO: 431250 - DNA, 201 bp, Homo sapiens
tccagctgtctgtttccctttaagtcgaatcaagagcaacgtggatgggcggtacctggtggacggcgtccctttcagctgctgcaatcctagctcgccayggccctgcatccagtatcagatcaccaacaactcagcacactacagttacgaccaccagacggaggagctcaacctgtgggtgcgtggctgcagggctgc

SEQ ID NO: 431251 - DNA, 201 bp, Homo sapiens
ttgagaagcccgggaagcccatctccagctgtctgtttccctttaagtcgaatcaagagcaacgtggatgggcggtacctggtggacggcgtccctttcasctgctgcaatcctagctcgccacggccctgcatccagtatcagatcaccaacaactcagcacactacagttacgaccaccagacggaggagctcaacctg

SEQ ID NO: 431252 - DNA, 201 bp, Homo sapiens
agcccgggaagcccatctccagctgtctgtttccctttaagtcgaatcaagagcaacgtggatgggcggtacctggtggacggcgtccctttcagctgctvcaatcctagctcgccacggccctgcatccagtatcagatcaccaacaactcagcacactacagttacgaccaccagacggaggagctcaacctgtgggtg

SEQ ID NO: 431253 - DNA, 201 bp, Homo sapiens
ccccaggctaggtagaacatacccagcctgcctgaggggaaggggagacttttcactgtaaagatcccttttgaattctgaacctgtgtgaatgtatggtragcgctaaacaaatacacacaaaaatatagaagtgcagaagatatgctgggagccccgcccatcagcctggagaacctgcttgcagctgtgtcccttagg

SEQ ID NO: 431254 - DNA, 201 bp, Homo sapiens
aattcgctctttggttaaagagatattcattttttatttttattattttaaattgtttattattattttttttagagacaagaagaaaaattcacctgtcrcccaggctggagtgcaggggcatgatcgtagctcactgcagccttgaactcctgggctcagggctcttcccacctcagccttctgagtagctaggactat

SEQ ID NO: 431255 - DNA, 201 bp, Homo sapiens
gggtcaagttggcccaagggctctggctcatgaactggttctccgtgttggctggcatcatcatcttcagcctaggactgttcctgaagattgaactccgraagaggagcgatgtgatgaataattctgagagccattttgtgcccaactcattgatagggatgggggtgctatcctgtgtcttcaactcgctggctggga

SEQ ID NO: 431256 - DNA, 201 bp, Homo sapiens
gaaatagtgcactccaagaaacgtggatctccccctcatccaactccgaaagtctgaatctcccaaggagggcaccatcttacagagactctccctgacgrtggaatttaaatttagggtccctaaaagcatttgacacacagttgttgaatgactgacccaaaatgtgaatgaagctaatgtgaatgtgagtgaagctcc

SEQ ID NO: 431257 - DNA, 201 bp, Homo sapiens
ctccaagaaacgtggatctccccctcatccaactccgaaagtctgaatctcccaaggagggcaccatcttacagagactctccctgacggtggaatttaartttagggtccctaaaagcatttgacacacagttgttgaatgactgacccaaaatgtgaatgaagctaatgtgaatgtgagtgaagctcccttcaggcccg

SEQ ID NO: 431258 - DNA, 201 bp, Homo sapiens
ctgctcctcctacccacctatgcaccaggcatggccccaagaaagcgcctggcagcacagagtggttgggtgaatttctatactccctattgacttgggtyttggattaccgtctacctcaaggtcgaggaaggcaggggcatttattcatttttttgtcttcagcgcctagaacagtgactggcacgtagcgggcgcaca

SEQ ID NO: 431259 - DNA, 201 bp, Homo sapiens
catttattcatttttttgtcttcagcgcctagaacagtgactggcacgtagcgggcgcacagcaaatatataccaagtgtgcgagtgaatgactattctargtttccagaggcaggggttgggaggaagtggcccctgttgagaagcccgggaagcccatctccagctgtctgtttccctttaagtcgaatcaagagcaac

SEQ ID NO: 431260 - DNA, 201 bp, Homo sapiens
ccgggcaacatagcaagatctcatctctacaaaaaacacaaaaatgacggccaggcgcggtggcttatgcctgtaatctcagcactttgggaggccgaggygggggatcacctgaggttgggagtttgcaaccagcctgaccaacatggagaaaccctgtctctacctaaaaatacaagattagccgggcctaatggtgca

SEQ ID NO: 431261 - DNA, 201 bp, Homo sapiens
acctcaggtcgtctgcccacctgggcctcccaaagtgctgagattacaggtgtgagccactgcacttggcctacatgcaactttttcttttttttttttttgagacggggtctcactgtgtcgtacgggctggagtgcagtggtgtgatcttggctcactgcaacctcttcctcccgggttcaagtgattctcgtgcctca

SEQ ID NO: 431262 - DNA, 201 bp, Homo sapiens
tcttcaactcgctggctgggaagatctgctacgacgccctggacccagccaagtatgccagatggaagccctggctgaagccgtacctggctatctgtgtyctcttcaacatcatcctcttccttgtggctctctgctgctttctgcttcggggctcgctggagaacaccctgggccaagggctcaagaacggcatgaagt

SEQ ID NO: 431263 - DNA, 201 bp, Homo sapiens
cctagaacagtgactggcacgtagcgggcgcacagcaaatatataccaagtgtgcgagtgaatgactattctaggtttccagaggcaggggttgggaggargtggcccctgttgagaagcccgggaagcccatctccagctgtctgtttccctttaagtcgaatcaagagcaacgtggatgggcggtacctggtggacggc

SEQ ID NO: 431264 - DNA, 201 bp, Homo sapiens
tggatggagattactgctgcaaatccccagtcaggagaggattgtaaagggctgtgcccttcccaggtgacaggtctgcaggggcagcacaagatgccacratttacataaatctcccgaggagggcatgaagccagggggacaagcagaattctggggagtgggagaggccgatggtagaaccagcctctgtgagcagag

SEQ ID NO: 431265 - DNA, 201 bp, Homo sapiens
cccggactacacttggcaagcatggcgctactgaaagtcaagtttgaccagaagaagcgggtcaagttggcccaagggctctggctcatgaactggttctycgtgttggctggcatcatcatcttcagcctaggactgttcctgaagattgaactccgaaagaggagcgatgtgatgaataattctgagagccattttgtg

SEQ ID NO: 431266 - DNA, 201 bp, Homo sapiens
gcttggagagcatgcctccctctttggaaacagccttcagtggagctgtgggtcagatcagtctgggcttgaaccccacccagggcctccaccttttgatttatttatttatttatttattcatttatttcttttttggtttctttcccaccacttaaatttttttttttatttttttttattttgaggctgagtctctct

SEQ ID NO: 431267 - DNA, 201 bp, Homo sapiens
ggcttggagagcatgcctccctctttggaaacagccttcagtggagctgtgggtcagatcagtctgggcttgaaccccacccagggcctccaccttttgatttatttatttatttatttattcatttatttcttttttggtttctttcccaccacttaaatttttttttttatttttttttattttgaggctgagtctctc

SEQ ID NO: 431268 - DNA, 201 bp, Homo sapiens
aggtgagatttataaaaggtaaacaatttggtgtcatctagttgatttacaatgttgtgcaagcacctctacctagttccaaaagacttccatcagccccyaagaaaatctcacacccatgaagcagtcaccacctcccaacctgccctccagcccctggcaactgttctctggatttatgtattttggacatttcatata

SEQ ID NO: 431269 - DNA, 201 bp, Homo sapiens
gggaagcccatctccagctgtctgtttccctttaagtcgaatcaagagcaacgtggatgggcggtacctggtggacggcgtccctttcagctgctgcaatyctagctcgccacggccctgcatccagtatcagatcaccaacaactcagcacactacagttacgaccaccagacggaggagctcaacctgtgggtgcgtgg

SEQ ID NO: 431270 - DNA, 201 bp, Homo sapiens
atggggtgacagcacttagctttggggactattgggaggcaacatgaacagcatgtgcaggtgttcaggaaatgggtactgtttggatttgtgcttcttgsgatgctggtcctcatttacctgttagtctagttatgtgtgggttcatcttatctgcaacgctcagtttctctgtagctatagggcttgcaatgtaagcaa

SEQ ID NO: 431271 - DNA, 201 bp, Homo sapiens
ggaagcccatctccagctgtctgtttccctttaagtcgaatcaagagcaacgtggatgggcggtacctggtggacggcgtccctttcagctgctgcaatcytagctcgccacggccctgcatccagtatcagatcaccaacaactcagcacactacagttacgaccaccagacggaggagctcaacctgtgggtgcgtggc

SEQ ID NO: 431272 - DNA, 201 bp, Homo sapiens
ttgggaggcaacatgaacagcatgtgcaggtgttcaggaaatgggtactgtttggatttgtgcttcttgggatgctggtcctcatttacctgttagtctarttatgtgtgggttcatcttatctgcaacgctcagtttctctgtagctatagggcttgcaatgtaagcaaatcctcggtgagtgtgctgaattcgctcttt

SEQ ID NO: 431273 - DNA, 201 bp, Homo sapiens
ccagctgtctgtttccctttaagtcgaatcaagagcaacgtggatgggcggtacctggtggacggcgtccctttcagctgctgcaatcctagctcgccacrgccctgcatccagtatcagatcaccaacaactcagcacactacagttacgaccaccagacggaggagctcaacctgtgggtgcgtggctgcagggctgcc

SEQ ID NO: 431274 - DNA, 201 bp, Homo sapiens
ggtggacggcgtccctttcagctgctgcaatcctagctcgccacggccctgcatccagtatcagatcaccaacaactcagcacactacagttacgaccacyagacggaggagctcaacctgtgggtgcgtggctgcagggctgccctgctgagctactacagcagcctcatgaactccatgggtgtcgtcacgctcctcat

SEQ ID NO: 431275 - DNA, 201 bp, Homo sapiens
tttcagctgctgcaatcctagctcgccacggccctgcatccagtatcagatcaccaacaactcagcacactacagttacgaccaccagacggaggagctcmacctgtgggtgcgtggctgcagggctgccctgctgagctactacagcagcctcatgaactccatgggtgtcgtcacgctcctcatttggctcttcgaggt

SEQ ID NO: 431276 - DNA, 201 bp, Homo sapiens
accagcctgggcaacatagtgagccctcatctctactaaaaaaaaaaaaaaaaaaaaaaaaaaaaaaaattgctggacgtggtggcgcatgcctatagtcycagctactcaggtactcggatggccaagatgggaggatctcatgagccccagagatggaggcataaaagaagtcagcggagccaggagcggtggctcaca

SEQ ID NO: 431277 - DNA, 201 bp, Homo sapiens
tcagctgctgcaatcctagctcgccacggccctgcatccagtatcagatcaccaacaactcagcacactacagttacgaccaccagacggaggagctcaavctgtgggtgcgtggctgcagggctgccctgctgagctactacagcagcctcatgaactccatgggtgtcgtcacgctcctcatttggctcttcgaggtag

SEQ ID NO: 431278 - DNA, 201 bp, Homo sapiens
caggagcggtggctcacacctgtaatcctagcaggcattagctaggatttgggaggctaaggcaggaggatcaattgagcccaggagtttagaccagcccrggcaacatagcaagatctcatctctacaaaaaacacaaaaatgacggccaggcgcggtggcttatgcctgtaatctcagcactttgggaggccgaggcgg

SEQ ID NO: 431279 - DNA, 201 bp, Homo sapiens
aaaaaagaaagaaaagtcagtgggaaaatgaatggggttccattggcagcctcttagtggccccacctttacaggaatctagtggactgcattagacaagratcagcttattgggaagagggcattcaaatgccccttttacttggggcctttaatggacagaggtctgatgggccaagggtggctgagcataatgttaag

SEQ ID NO: 431280 - DNA, 201 bp, Homo sapiens
ctgctgcaatcctagctcgccacggccctgcatccagtatcagatcaccaacaactcagcacactacagttacgaccaccagacggaggagctcaacctgygggtgcgtggctgcagggctgccctgctgagctactacagcagcctcatgaactccatgggtgtcgtcacgctcctcatttggctcttcgaggtaggccc

SEQ ID NO: 431281 - DNA, 201 bp, Homo sapiens
ggatcagcttattgggaagagggcattcaaatgccccttttacttggggcctttaatggacagaggtctgatgggccaagggtggctgagcataatgttargagtctgatcttggctgtgcctgcctaggcttcacaatccagtcaggagatgatgtctaatttatgagccaaagggaggatcactaccaagtgcaaaact

SEQ ID NO: 431282 - DNA, 201 bp, Homo sapiens
atcagatcaccaacaactcagcacactacagttacgaccaccagacggaggagctcaacctgtgggtgcgtggctgcagggctgccctgctgagctactamagcagcctcatgaactccatgggtgtcgtcacgctcctcatttggctcttcgaggtaggccctgggccagctgggggtagagggtaaggagagcctccgg

SEQ ID NO: 431283 - DNA, 201 bp, Homo sapiens
ggcttcacaatccagtcaggagatgatgtctaatttatgagccaaagggaggatcactaccaagtgcaaaactcacagtgcagagagcctccttcaggaamgcaggaggggatcagagtggacgcgttcacatcaagaggacttcatggaggaggtgactttttctgctgtaaaaatatttattcaacttccagttgacaa

SEQ ID NO: 431284 - DNA, 201 bp, Homo sapiens
ttccttgaacacaggagatagagtttgtagtgagctgagaccacgccactgcactccagcatgggtgacagagtgagacttgtctcaaaaaaaaaaaaaaagtaccacacatcagatgcagaaaaggaggtgacctcttaattccacccaaggcagttactgaactacccaatatgtgccaagcaatggggtgtagaggtg

SEQ ID NO: 431285 - DNA, 201 bp, Homo sapiens
ctcttctgctcttctgttggtccttactgtgcactaggtacagtggtggtgtttgctggagtgcagtggtggagtcatggctcactgcagcctccatctcyggggctcatgagatcctcccatcttggctacccaagtacccgggtagctgggactacaggcacgcgccaccacacccggcaattatttttatttttattt

SEQ ID NO: 431286 - DNA, 201 bp, Homo sapiens
tgcacttttcccaaggccctaagtctccgcctctgggctcgttaaggtttggggtgggagctgtgctgtgggaagcaacccggactacacttggcaagcayggcgctactgaaagtcaagtttgaccagaagaagcgggtcaagttggcccaagggctctggctcatgaactggttctccgtgttggctggcatcatcatc

SEQ ID NO: 431287 - DNA, 201 bp, Homo sapiens
gtggaagcagtggggtaggctgctgccctgctgtggaagaggagcaacaatcagacatgagtccaccctttggagaccaggcctcagctcttggtgggccmagggacacccacacaggtggccatcacagccccatggacaacactaattgtccacagcaaagggcaaggaatcctctgggagcttcttccgtttcttccc

SEQ ID NO: 431288 - DNA, 201 bp, Homo sapiens
aagtggcccctgttgagaagcccgggaagcccatctccagctgtctgtttccctttaagtcgaatcaagagcaacgtggatgggcggtacctggtggacgrcgtccctttcagctgctgcaatcctagctcgccacggccctgcatccagtatcagatcaccaacaactcagcacactacagttacgaccaccagacggag

SEQ ID NO: 431289 - DNA, 201 bp, Homo sapiens
aggcttggagagcatgcctccctctttggaaacagccttcagtggagctgtgggtcagatcagtctgggcttgaaccccacccagggcctccaccttttgatttatttatttatttatttattcatttatttcttttttggtttctttcccaccacttaaatttttttttttatttttttttattttgaggctgagtctct

SEQ ID NO: 431290 - DNA, 201 bp, Homo sapiens
cccctgttgagaagcccgggaagcccatctccagctgtctgtttccctttaagtcgaatcaagagcaacgtggatgggcggtacctggtggacggcgtccbtttcagctgctgcaatcctagctcgccacggccctgcatccagtatcagatcaccaacaactcagcacactacagttacgaccaccagacggaggagctc

SEQ ID NO: 431291 - DNA, 201 bp, Homo sapiens
aagattagccgggcctaatggtgcatgcctgtaatcccagctacttgggggctgaggcaggagaattgcttgaacctgggaggtggaggttgtggtgagcygagatcacgccattgcactccagcttgagcaacaaaaacaaaaacataaaaattagctttgtgtggtggtgcacacatgtagtcctggatcctcctggct

SEQ ID NO: 431292 - DNA, 201 bp, Homo sapiens
ccgggcctaatggtgcatgcctgtaatcccagctacttgggggctgaggcaggagaattgcttgaacctgggaggtggaggttgtggtgagctgagatcaygccattgcactccagcttgagcaacaaaaacaaaaacataaaaattagctttgtgtggtggtgcacacatgtagtcctggatcctcctggctcaggcagg

SEQ ID NO: 431293 - DNA, 201 bp, Homo sapiens
cacacggctggctaagtgcccgggtttgaacccaggcattttggcaccaagtctgccacacagtgaatgctagtgaacaaatccaaattattttttaccascatccattcatcactgtgctcatcaaaataatggaagggctgggcacggtggctcgcacctgtaatcccagcactttgggaggtcgaggagggtggatct

SEQ ID NO: 431294 - DNA, 201 bp, Homo sapiens
ttttttaccagcatccattcatcactgtgctcatcaaaataatggaagggctgggcacggtggctcgcacctgtaatcccagcactttgggaggtcgaggmgggtggatctcgaggccaggagttcgaggccagctggcaacatggggaaaccacatatctacaacaataacaaaaaaaaaatacaaaaattagtcaggta

SEQ ID NO: 431295 - DNA, 201 bp, Homo sapiens
ggctcgttaaggtttggggtgggagctgtgctgtgggaagcaacccggactacacttggcaagcatggcgctactgaaagtcaagtttgaccagaagaagygggtcaagttggcccaagggctctggctcatgaactggttctccgtgttggctggcatcatcatcttcagcctaggactgttcctgaagattgaactccg

SEQ ID NO: 431296 - DNA, 201 bp, Homo sapiens
ggcaagcatggcgctactgaaagtcaagtttgaccagaagaagcgggtcaagttggcccaagggctctggctcatgaactggttctccgtgttggctggcrtcatcatcttcagcctaggactgttcctgaagattgaactccgaaagaggagcgatgtgatgaataattctgagagccattttgtgcccaactcattgat

SEQ ID NO: 431297 - DNA, 201 bp, Homo sapiens
gaagcgggtcaagttggcccaagggctctggctcatgaactggttctccgtgttggctggcatcatcatcttcagcctaggactgttcctgaagattgaaytccgaaagaggagcgatgtgatgaataattctgagagccattttgtgcccaactcattgatagggatgggggtgctatcctgtgtcttcaactcgctggc

SEQ ID NO: 431298 - DNA, 201 bp, Homo sapiens
gcgggtcaagttggcccaagggctctggctcatgaactggttctccgtgttggctggcatcatcatcttcagcctaggactgttcctgaagattgaactcygaaagaggagcgatgtgatgaataattctgagagccattttgtgcccaactcattgatagggatgggggtgctatcctgtgtcttcaactcgctggctgg

SEQ ID NO: 431299 - DNA, 201 bp, Homo sapiens
cttcagcctaggactgttcctgaagattgaactccgaaagaggagcgatgtgatgaataattctgagagccattttgtgcccaactcattgatagggatgsgggtgctatcctgtgtcttcaactcgctggctgggaagatctgctacgacgccctggacccagccaagtatgccagatggaagccctggctgaagccgta

SEQ ID NO: 431300 - DNA, 201 bp, Homo sapiens
ctctcccaccaccaggtgaccattacaattgggctgcgctacctacagacgtcgctggatggtgtgtccaaccccgaggaatctgagagcgagagcgaggrctggctgctggagaagagcgtgccggagacctggaaggcctttctggagagtgtgaagaagctgggcaagggcaaccaggtggaagccgagggcgcaggc

SEQ ID NO: 431301 - DNA, 201 bp, Homo sapiens
ctgcgctacctacagacgtcgctggatggtgtgtccaaccccgaggaatctgagagcgagagcgagggctggctgctggagaagagcgtgccggagacctrgaaggcctttctggagagtgtgaagaagctgggcaagggcaaccaggtggaagccgagggcgcaggcgcaggccaggccccagaggctggctgagggccc

SEQ ID NO: 431302 - DNA, 201 bp, Homo sapiens
aatcccagcactttgggaggtcgaggagggtggatctcgaggccaggagttcgaggccagctggcaacatggggaaaccacatatctacaacaataacaamaaaaaaatacaaaaattagtcaggtatggtggcaggcacctgcaacgttagctattcaagaggctgatgcatgagaattccttgaacacaggagatagag

SEQ ID NO: 431303 - DNA, 201 bp, Homo sapiens
gctgggattacaggtgtgagccactgcacctgagttttggctgctctgtcttaggggagtagcccagtgactgcaccccatccccaacctgcctatgaccrtgttgccaagtcatttgggagggggaaatgacccacatttatcctgcacaaaactcctcctgggaagtttttgtcttaatcttttttagtttttgtttgt

SEQ ID NO: 431304 - DNA, 201 bp, Homo sapiens
caatatgtgccaagcaatggggtgtagaggtgaaggcacccaggaataatgcacctgggatgggggcgacccgaggggatggggagggaggatgagctgcmggggagctcaccaagggctgaagatgaattaacagatgaacgtggagaggaacaaggttctaggcagagagcatagcagatggtaaagacctagagggga

SEQ ID NO: 431305 - DNA, 201 bp, Homo sapiens
acctgggatgggggcgacccgaggggatggggagggaggatgagctgcaggggagctcaccaagggctgaagatgaattaacagatgaacgtggagaggarcaaggttctaggcagagagcatagcagatggtaaagacctagaggggagaaagtatggggcatgggcgaatccgaagcagcccagggtggctggaaaggg

SEQ ID NO: 431306 - DNA, 201 bp, Homo sapiens
tcaccaagggctgaagatgaattaacagatgaacgtggagaggaacaaggttctaggcagagagcatagcagatggtaaagacctagaggggagaaagtakggggcatgggcgaatccgaagcagcccagggtggctggaaagggaggaggagaggggtctgacatgaggctggagaagagtcaggtgtgttgagcactga

SEQ ID NO: 431307 - DNA, 201 bp, Homo sapiens
aacgtggagaggaacaaggttctaggcagagagcatagcagatggtaaagacctagaggggagaaagtatggggcatgggcgaatccgaagcagcccaggrtggctggaaagggaggaggagaggggtctgacatgaggctggagaagagtcaggtgtgttgagcactgaggacagggcagcgtggggcaggctgtcacca

SEQ ID NO: 431308 - DNA, 201 bp, Homo sapiens
agggaggaggagaggggtctgacatgaggctggagaagagtcaggtgtgttgagcactgaggacagggcagcgtggggcaggctgtcaccaacccacactscacagtgctcaggttgagtcctctctgggaccctcaatttgaggctcctgtggtttcctaatggtccagctcccagcgattctcccagattgcctctaaa

SEQ ID NO: 431309 - DNA, 201 bp, Homo sapiens
aagttcactagcattgagctcaggagttcaagaccagcctgggcaacatagtgagccctcatctctactaaaaaaaaaaaaaaaaaaaaaaaaaaaaaaawttgctggacgtggtggcgcatgcctatagtcccagctactcaggtactcggatggccaagatgggaggatctcatgagccccagagatggaggcataaaa

SEQ ID NO: 431310 - DNA, 201 bp, Homo sapiens
cgaattgtctcatttatatcccccataacccctgagaggcagctgctatcactcccagctcacgcaggtccacagagtttaagctccatggctcccaaatrcatatttaggactcagtggtgtgctttcaaccacccccaccctgtccacaggacactggcaatggctcagctgggacactgtactgaggggaaggctcca

SEQ ID NO: 431311 - DNA, 201 bp, Homo sapiens
tctcctctcccaccaccaggtgaccattacaattgggctgcgctacctacagacgtcgctggatggtgtgtccaaccccgaggaatctgagagcgagagcsagggctggctgctggagaagagcgtgccggagacctggaaggcctttctggagagtgtgaagaagctgggcaagggcaaccaggtggaagccgagggcgc

SEQ ID NO: 431312 - DNA, 201 bp, Homo sapiens
gtgaccattacaattgggctgcgctacctacagacgtcgctggatggtgtgtccaaccccgaggaatctgagagcgagagcgagggctggctgctggagargagcgtgccggagacctggaaggcctttctggagagtgtgaagaagctgggcaagggcaaccaggtggaagccgagggcgcaggcgcaggccaggcccca

SEQ ID NO: 431313 - DNA, 201 bp, Homo sapiens
gcttgggccatctgcacttttcccaaggccctaagtctccgcctctgggctcgttaaggtttggggtgggagctgtgctgtgggaagcaacccggactacmcttggcaagcatggcgctactgaaagtcaagtttgaccagaagaagcgggtcaagttggcccaagggctctggctcatgaactggttctccgtgttggct

SEQ ID NO: 431314 - DNA, 201 bp, Homo sapiens
aaccagaaagggaacagtccataacttacctctgcttctgaccgatggtgtttgggaataggttactttggactgagtttgggttctttgctgtcctaagwactttagtgtagagaaaataagacttctggtgctgctggggtatgttctgggcttaattcccccaagcagaagaccagatccaagatgtttggacaccct

SEQ ID NO: 431315 - DNA, 201 bp, Homo sapiens
ttcaacatcatcctcttccttgtggctctctgctgctttctgcttcggggctcgctggagaacaccctgggccaagggctcaagaacggcatgaagtactrccgggacacagacacccctggcaggtgtttcatgaagaagaccatcgacatgctgcagatcgagttcaaatgctgcggcaacaacggttttcgggactgg

SEQ ID NO: 431316 - DNA, 201 bp, Homo sapiens
atggcacgatctcagctcactgcaagctccacctcccaggttcaagcaattctcctgtctcagcctcccaagtagctgtgattacaggcgtgcaccaccaygcctagccagtttttgtatttttagtagagatggggttttaccatgttggccaagctggtcttgaactcctgacctcaaataatccaccagcctcggcct

SEQ ID NO: 431317 - DNA, 201 bp, Homo sapiens
gtgatctcctgtggctcatcggtggaagcagtggggtaggctgctgccctgctgtggaagaggagcaacaatcagacatgagtccaccctttggagaccargcctcagctcttggtgggcccagggacacccacacaggtggccatcacagccccatggacaacactaattgtccacagcaaagggcaaggaatcctctgg

SEQ ID NO: 431318 - DNA, 201 bp, Homo sapiens
agatggaagccctggctgaagccgtacctggctatctgtgttctcttcaacatcatcctcttccttgtggctctctgctgctttctgcttcggggctcgckggagaacaccctgggccaagggctcaagaacggcatgaagtactaccgggacacagacacccctggcaggtgtttcatgaagaagaccatcgacatgctg

SEQ ID NO: 431319 - DNA, 201 bp, Homo sapiens
caacatcatcctcttccttgtggctctctgctgctttctgcttcggggctcgctggagaacaccctgggccaagggctcaagaacggcatgaagtactacygggacacagacacccctggcaggtgtttcatgaagaagaccatcgacatgctgcagatcgagttcaaatgctgcggcaacaacggttttcgggactggtt

SEQ ID NO: 431320 - DNA, 201 bp, Homo sapiens
tcctccaaagaagtcaaagagtgagtggcttccagtcctggggtcagagctatgaatatattggggacactgaggctcaggcctctgaccagcccctctcyccgcacccagtgccttttcctctccatcgggtgcacaacttattgctgcgtatgtgagggtgtatcaggtggaaccatatgaaattgctaatattctacc

SEQ ID NO: 431321 - DNA, 201 bp, Homo sapiens
ggaatctgagagcgagagcgagggctggctgctggagaagagcgtgccggagacctggaaggcctttctggagagtgtgaagaagctgggcaagggcaacyaggtggaagccgagggcgcaggcgcaggccaggccccagaggctggctgagggccctggggcccctcccctcccgaacactgagaaatagtgcactccaa

SEQ ID NO: 431322 - DNA, 201 bp, Homo sapiens
tttctgcttcggggctcgctggagaacaccctgggccaagggctcaagaacggcatgaagtactaccgggacacagacacccctggcaggtgtttcatgargaagaccatcgacatgctgcagatcgagttcaaatgctgcggcaacaacggttttcgggactggtttgagattcagtggatcagcaatcgctacctggac

SEQ ID NO: 431323 - DNA, 201 bp, Homo sapiens
gggctcgctggagaacaccctgggccaagggctcaagaacggcatgaagtactaccgggacacagacacccctggcaggtgtttcatgaagaagaccatcracatgctgcagatcgagttcaaatgctgcggcaacaacggttttcgggactggtttgagattcagtggatcagcaatcgctacctggacttttcctccaa

SEQ ID NO: 431324 - DNA, 201 bp, Homo sapiens
caagggctcaagaacggcatgaagtactaccgggacacagacacccctggcaggtgtttcatgaagaagaccatcgacatgctgcagatcgagttcaaatrctgcggcaacaacggttttcgggactggtttgagattcagtggatcagcaatcgctacctggacttttcctccaaagaagtcaaagagtgagtggcttcc

SEQ ID NO: 431325 - DNA, 201 bp, Homo sapiens
ccagggaggcagagattgtggtgagctgagatctcgccattgcactccagcctgggcaacaagagcaaaactctgtctcaaaaaaaaaaaaaaaaaaaagmcaatttagtgttccattttgtaatctgatagtataacatttgcataatatccacaatgatcatgtttaatggttgcataagaagtccactgaagccaggt

SEQ ID NO: 431326 - DNA, 201 bp, Homo sapiens
ctcaagaacggcatgaagtactaccgggacacagacacccctggcaggtgtttcatgaagaagaccatcgacatgctgcagatcgagttcaaatgctgcgrcaacaacggttttcgggactggtttgagattcagtggatcagcaatcgctacctggacttttcctccaaagaagtcaaagagtgagtggcttccagtcct

SEQ ID NO: 431327 - DNA, 201 bp, Homo sapiens
ggaggccaaggtaggtggatcacgaggtcaggagttcgaaaccagcctgaccaaaatagtgaaacctcatctctactaaaaatacagaaaattagctgggygtggtggcatgcctgtaatctcagctactcgggaggctgaggcaggagaattgcttgaaccagagaagcagggaggcgggggttgcagtgagccgagatc

SEQ ID NO: 431328 - DNA, 201 bp, Homo sapiens
gaagtactaccgggacacagacacccctggcaggtgtttcatgaagaagaccatcgacatgctgcagatcgagttcaaatgctgcggcaacaacggttttbgggactggtttgagattcagtggatcagcaatcgctacctggacttttcctccaaagaagtcaaagagtgagtggcttccagtcctggggtcagagctat

SEQ ID NO: 431329 - DNA, 201 bp, Homo sapiens
accttcgcctcccgggttcaagcgattctcctgcctcagcctcctgagtagctgggattacagacacccaccatcacgcccagctaatttttgtaattttstagagacggggtttctccatgttggccaggctggtctcaaattcctgacctcaggtgatcttcctgcctcggcctcccagagtgctgagattacaggtgt

SEQ ID NO: 431330 - DNA, 201 bp, Homo sapiens
aagtactaccgggacacagacacccctggcaggtgtttcatgaagaagaccatcgacatgctgcagatcgagttcaaatgctgcggcaacaacggttttcrggactggtttgagattcagtggatcagcaatcgctacctggacttttcctccaaagaagtcaaagagtgagtggcttccagtcctggggtcagagctatg

SEQ ID NO: 431331 - DNA, 201 bp, Homo sapiens
actctttgaagagagctgtgtctccccttcaaattggggcttcctgagggctgggctatgtctcccctcagaccagggctccctgaggatggggctgtgtycccctcagaccggggctccctgaggatggggctgtgtttccctcaaactagggtcccctgaagacagggctgcatctcccctcagactggggctccctga

SEQ ID NO: 431332 - DNA, 201 bp, Homo sapiens
tactaccgggacacagacacccctggcaggtgtttcatgaagaagaccatcgacatgctgcagatcgagttcaaatgctgcggcaacaacggttttcgggwctggtttgagattcagtggatcagcaatcgctacctggacttttcctccaaagaagtcaaagagtgagtggcttccagtcctggggtcagagctatgaat

SEQ ID NO: 431333 - DNA, 201 bp, Homo sapiens
ggctggtgacccaggcaggtcccaacgttcaccaagcttggccttttcccccaggctgacctggatgttgcccctgggaatacactgggaagttcccagtrtgagggagacgcagccctgtctttaggaagccccagtttgaggggagacagccccatcttcagggggccccagtctgaggggagacacagccccgtcctc

SEQ ID NO: 431334 - DNA, 201 bp, Homo sapiens
aatgggaggaggtaggggagggtgcagtgtgataaaacctgcttagcccaccctgtctgcagactgaagattcaaatcccttcatttttcttccgccctgmcccccacccacctgccaacacctcctccccaccccacccttcacccaagatcgaagggagaggcttcccatttccccaggcccattgctgagatgggtcc

SEQ ID NO: 431335 - DNA, 201 bp, Homo sapiens
ttattgatttaaataaaaatggaaacaattctatcagtaagtggggaatttgttaagcaagttatagtacatagctataatggaaagacctatcaccactaaaaaatgttataaaaagtttttagtgacatagaagaatgtgtatggcaaaatgctgagtgtaaaaggaagatataacctcttataaaaagaaatatctca

SEQ ID NO: 431336 - DNA, 201 bp, Homo sapiens
gggagggtgcagtgtgataaaacctgcttagcccaccctgtctgcagactgaagattcaaatcccttcatttttcttccgccctgccccccacccacctgmcaacacctcctccccaccccacccttcacccaagatcgaagggagaggcttcccatttccccaggcccattgctgagatgggtccctcttctttctggca

SEQ ID NO: 431337 - DNA, 201 bp, Homo sapiens
ctttgggaagcatttgttgtttctccctagctgggagatgctttccttaggccagagggagcatatctcttcaggagttcctattaaaatctttgaggagrgcaacatatgagatttttttttttaatcaaaggaacactaggcttgtatttcatgtatgtagttgatttttaagttctatttttcatttaaaagtacttg

SEQ ID NO: 431338 - DNA, 201 bp, Homo sapiens
tgttgtttctccctagctgggagatgctttccttaggccagagggagcatatctcttcaggagttcctattaaaatctttgaggagagcaacatatgagatttttttttttaatcaaaggaacactaggcttgtatttcatgtatgtagttgatttttaagttctatttttcatttaaaagtacttggaatctaaaaaaca

SEQ ID NO: 431339 - DNA, 201 bp, Homo sapiens
caaaagaaagtgtcgtctaattgttagtggtttctatcacttgttttctttgatgcaggaagggttgtatttgaatggttctattaagttgatggattttrcgctatcagtaagattctccagtgctggatgaaacgtgaaaaagtatatatagcaccgcttctattttaatttatgcttctgccaactgtttgggttgtg

SEQ ID NO: 431340 - DNA, 201 bp, Homo sapiens
gaccggactttttcttgaaaggtaaatgcatttaccacatgcttttaatctagattaaataatcactcaccaaaagaaagtgtcgtctaattgttagtggwttctatcacttgttttctttgatgcaggaagggttgtatttgaatggttctattaagttgatggattttacgctatcagtaagattctccagtgctggat

SEQ ID NO: 431341 - DNA, 201 bp, Homo sapiens
cagtgtgataaaacctgcttagcccaccctgtctgcagactgaagattcaaatcccttcatttttcttccgccctgccccccacccacctgccaacacctsctccccaccccacccttcacccaagatcgaagggagaggcttcccatttccccaggcccattgctgagatgggtccctcttctttctggcaccatggcag

SEQ ID NO: 431342 - DNA, 201 bp, Homo sapiens
tatgacaatcacagtctcagagctggcccttaagccggctctcccttccaagctttctaagagataccttgttttattctcaggggatgacagcatgggargcaatggctccacatgtaaacccgacactggtgagtttacgacaggaataattacctgcctcacgtctgagttaaaataactagaaattgtgctgaaggg

SEQ ID NO: 431343 - DNA, 201 bp, Homo sapiens
cacaatgtgatgctggcagtggcaggggcagtaatctttatttcgtcatttttgaaacatagaagccgtaacggaagcaagtgaaatgctcagtcttagaygactgcgtcgtgctatgaccggactttttcttgaaaggtaaatgcatttaccacatgcttttaatctagattaaataatcactcaccaaaagaaagtgtc

SEQ ID NO: 431344 - DNA, 201 bp, Homo sapiens
agggtgtctctgctcaatatcaaactaggtgggtcctgctcccctatttgtggtgtaggcattgggaaaaccactgtggctgtttttggctaggcactgcwaatagctgctctgcaaaaagggcaaacataaaagggcagcagtttcaaggtcaaattccccaaggactttgggaagcatttgttgtttctccctagctgg

SEQ ID NO: 431345 - DNA, 201 bp, Homo sapiens
tccaagccccaggccccagatcctcactcagatcctccagccaaggtaagatgaccacactgttttggggacactgaagggctaccgtcattggaattccsctccatactcttcattatctgctagaatggtggtattgatttccagacactgggcaagtgattctttgaccaaagtgctcaggttgcttctaaagagcaa

SEQ ID NO: 431346 - DNA, 201 bp, Homo sapiens
tttgagccttgttctctttacctagaaatagcatgcataggactagaatcatgttctccttaaggctggatgggagcattgtgatatcttctttcttttcttttttttttttttttttgcgacagagtctcgctctgttgtccaggctagagtgcagtggcacagtctcagctcactgcaacctccgcctcctgggttcaa

SEQ ID NO: 431347 - DNA, 201 bp, Homo sapiens
agatactcctcgagaagagcaactccaagacacataattgccagattcaccaaagttgaaatgaaggaaaaaatgttaaggacagccagagagaaaggtcrggttaccctcaaagggaagcccatcaaactaacagcagatctctctgcagaaactctacaaggcagaagagagtgagggccaatattcagcattcttaaa

SEQ ID NO: 431348 - DNA, 201 bp, Homo sapiens
gaaggaagcactaaacatggaaaggaacaactggtaccagccactgcaaaaacatgccaaattgtagagaccattgatgctaggaagaaactgcatcaacyaatgagcaaaataaccagcgaacatcataatgacaggatcaaattcacacataacaatattaactaaatgtaaatgggctaaatgctccaattaaaagac

SEQ ID NO: 431349 - DNA, 201 bp, Homo sapiens
gaaaggaacaactggtaccagccactgcaaaaacatgccaaattgtagagaccattgatgctaggaagaaactgcatcaactaatgagcaaaataaccagsgaacatcataatgacaggatcaaattcacacataacaatattaactaaatgtaaatgggctaaatgctccaattaaaagacacagactggcaaattggat

SEQ ID NO: 431350 - DNA, 201 bp, Homo sapiens
gatcctagtctctgataaaacactttaaaccaacaaagatcaaaagagacaaagccattacataatggtaaagggatcaattcaacaagaagagctaactrtcctaaatatatatgcacccaatacaggagcacccagattcataaagcaagtccttagagacctacaaagagacttagactcccacacaataataatggg

SEQ ID NO: 431351 - DNA, 201 bp, Homo sapiens
acatttcagttcactgattctcttcagatgtgttttatctgtttcaaatctctatgcttttacaccagtcatgctcttttcttatttttattttatttttmaaatttattaattttcaacatagtttctgtgttattattggaacttcttggggtactactactctatttctgctcattcttaaagtggttttttcaaaga

SEQ ID NO: 431352 - DNA, 201 bp, Homo sapiens
ttgtagtaatttaatttagtaagcatcacagaatattagaatttgaaaaggatattagaataatccagtccagcactctcattatacaaatgagaaaacamaaactggcagtgacttacccaaggtcacataacaaaggtagtggtagaaccaggtgttcttaattccatgctctttcccttatatgttcattaatgtact

SEQ ID NO: 431353 - DNA, 201 bp, Homo sapiens
ttcagatccactgttgcttggaaattttgttagaatttcttgtaaaatatgtgtttaacagaaatcctgccagcatttacagttttaaatctttaaggaarggacacaaaagcaaagttggaaaaaattttagctttaccattatttgcttgttcaagattcttaaccattaatatctttaatttttacaaggctaaagga

SEQ ID NO: 431354 - DNA, 201 bp, Homo sapiens
tgaccatttcagttctgccatttcagactcataaggtatttggcttttgaccaaaacaattgctcccttttttgtatatgaactaagtaactaaatttctraaaatgcctatattcattactcaagcgggtcatttagattgaatgttaaatgtcatattaatactgaagttgaaaatgtgtaattgcataactccttatc

SEQ ID NO: 431355 - DNA, 201 bp, Homo sapiens
ggaaaattctttggcagcatttgcctaaaactgtatctgtatatgctctgtgatccaccagtttcatgtctggggatagacctgatagaaatcagtatatrtgtgcatcagaggacatgtacattagaagaaaacataggggtaaatctttatgaccttggaataggtaaaggattcttacgtatgacacaaagtgacacc

SEQ ID NO: 431356 - DNA, 201 bp, Homo sapiens
gatttagttaacagattctttgttttcttcagtttctcttagcatgcctaatagaactacttcaggtagccaaaattttatgaagtctatctatactaatsgttttttgcgggggaggggtgagtatgtaaattgtagctgtggccagctttattgtagatatggctttttttcacattgacctaatgtctgtgtctgagt

SEQ ID NO: 431357 - DNA, 201 bp, Homo sapiens
ctctcatcttgaatttaattgatagttttctgttatttcacttacatgaccttttttttcagaacagattttctttagtttgatttccttttgttgttctkgcagaagtgttttctgaaaaccttattaaatagcatcccccatcatactctgtgcctttgccttgctttatttatttatttttacatcattggtttatct

SEQ ID NO: 431358 - DNA, 201 bp, Homo sapiens
ttttttttttttccttttaagataggttctccttatttggctcaggctggtctcagactcctgagctcaagcgatcctcccgtgtcaggctcccaagaagytgggactacaggcatgcgccactgtgcgttatttcacttttcattgaattaaggaatttgacttttagtaatactttggggcaggactctggaaatactg

SEQ ID NO: 431359 - DNA, 201 bp, Homo sapiens
gtgctttacatttttaggttgttgctgtcattgtttgttttgttttgttttgtttgttttttgagacagcctcgctctgtttcctaggctggagctcagargtgcgatcgctgcttgctgcagcctctgccttccaagttcaagtgattctcctgcttcagcctcccaagtagctgggattacaggcaagcaccaccacgc

SEQ ID NO: 431360 - DNA, 201 bp, Homo sapiens
gatgcccttggaggtttgattatggtataaggtgggttcagtcgactggctttgagtctagtctgctcttgggttgtgaaggagccccctctgtttactgkctctatgcctgcatttcttttattggatgttctgatccatggggctccctcatgcaaaggccgtatccttgccaggtaagccctattctgctgttcatgt

SEQ ID NO: 431361 - DNA, 201 bp, Homo sapiens
atatgaataatgctttgttaggtgtttgaatgaaaagaagacccaaataagttgttcttttaaataggtatgtaaatcaaacataaggaaaatacatgatmcatacctagcatacattaaaatgaattgatttgatcctatgtagagagtaatcaaatgatgaagatttggtgctttctggtcctccccaccccccagatt

SEQ ID NO: 431362 - DNA, 201 bp, Homo sapiens
catctacaatgcgattgtcattttatgagcatagttaattaatttatttttacattgtgaaatgcaaactagagaggtaattctgatgtttaaaaaatagrataacttttcattttaggtagcagcgatggttctgaactaagtgaagagacctcatggcctgcttttgaaaggtaagataaattgtccatttgaactact

SEQ ID NO: 431363 - DNA, 201 bp, Homo sapiens
acctaacagcagtaatattagaataaagaattaatatgtggatatgttcatctacaatgcgattgtcattttatgagcatagttaattaatttatttttamattgtgaaatgcaaactagagaggtaattctgatgtttaaaaaataggataacttttcattttaggtagcagcgatggttctgaactaagtgaagagacc

SEQ ID NO: 431364 - DNA, 201 bp, Homo sapiens
atttggtgtttatttcttaacattatgcaagaatgatgtttatctttgaggtggcaagggacagttcattaaaatacttggacatttgagctaaatatgawtgcataattttctaaaattaggaaggtgattaataaaaattgattaatttaaaatagtaaacacgaaaatgttataatttattacttagttaattttatg

SEQ ID NO: 431365 - DNA, 201 bp, Homo sapiens
aaagttctgtgtcatttaaattggcgagtgtctctcttcagtcaataggcttgatcatcatctgaactgctcttaaggagtatgacccgcctctgtattcrgcccagaaaattccatcttggtgcttgcttctgtaatggcctcctctgtaccatactccatttaggttagaatgtgcacaggcattgtaccaccagcctc

SEQ ID NO: 431366 - DNA, 201 bp, Homo sapiens
cttgtgtttttatttttgagttcaaccattcataaatgtttgtaagtgaataaatattcgtgatgctttattcactgtttattgatactggaaaaataagrctcattgatataagtcaatttttaaaattggatgcctactttctctgccttttcctttattcttcctgttttcctaccttttcttttatattcttcctcc

SEQ ID NO: 431367 - DNA, 201 bp, Homo sapiens
aggggtgagtatgtaaattgtagctgtggccagctttattgtagatatggctttttttcacattgacctaatgtctgtgtctgagttcagcaagtgtaacrgtgttacttgactaaacatttggtgaagaaacaattacttcagaaagtgaaaaagttattttgagtgttagaatctcaaggaaaagctgaataatgctta

SEQ ID NO: 431368 - DNA, 201 bp, Homo sapiens
ttgttaacaaagaacaagagctagactttgtcaggaggcagccacctaaataatgtaataaatactctttatagcctagaagaatttgtaaacattttacwaagttgctaatgaaggttttaaacttacaagaaacttgatgttgttgtagtatgttatgtcttactgtgtaatgtgtcttaagataaaacagcctttata

SEQ ID NO: 431369 - DNA, 201 bp, Homo sapiens
agatgaggatccagtttcattctcctacatgcggctagccaattatcccagcaccgttagttaaaaagggtgtcctttccccactttatgtttttgtttgytttgttaaagatcagttggctgtatttgggtttacttcagagttctctattctattccattggtctatgtgcctattttcatagcagtaccatgctgttt

SEQ ID NO: 431370 - DNA, 201 bp, Homo sapiens
gccaaatatgagtttcttataatcagacctgaaaatttatactttaagcacttgagcatttgtgttgtatttgatttgtaattcagttatgagtacattgkccaacataatttttttattcagaagctgacacttgtaaggtatttatgtttttgcatataataggtttcagagagaggttgctaaactgtgagagctgtc

SEQ ID NO: 431371 - DNA, 201 bp, Homo sapiens
gatatacctaatgctagatgacgagttagtgggtgcagtgcaccaacatggcgcatgtatacatatgtaacaaacctgcacattgtgtacatgtaccctaraacttaaagtataattaaaaaaaaaaaaagaaagaaagaaaccaaaaagggaaaaaaaaacagaaggaaattaagaacatacactatagcatctgcataa

SEQ ID NO: 431372 - DNA, 201 bp, Homo sapiens
ttctttatctaagaggaagttgaaactaggagtaaagaagtaatgtataaaattaaaagagcactgaacctaggactcagaagacctgtgtgtttagtccrgattttgtctgtgatgtgaaagctagtctcttctaattctacttcttcctatgtaaatggagaaaatatttacactgcctctacttagtataagtaagat

SEQ ID NO: 431373 - DNA, 201 bp, Homo sapiens
aactatagtacaatatcaaaaccaagaaattgatatttttataatacgtgtctgtataaatctgtgatttttgtcatatatgtagatttatctaaccactrcctcagtcaagattcagaactattgcatcaccacaaagatctctccctgtgctacctctttatagtcacacccatcgcattactcctctcctactcctca

SEQ ID NO: 431374 - DNA, 201 bp, Homo sapiens
tcatgatccgtctgcctcggcttcccaaagtgctgggattacaggccactgcacccagtctgaacaagtttttaatacagatgaaagtgtcctactctggraaaaaaaaatgccacaaaggacatatattagcaaggaagagaggcaagcaccacaatttaaggcagatggggataggctaactctactgttttgtgcaat

SEQ ID NO: 431375 - DNA, 201 bp, Homo sapiens
cctctgcttcaaaggtttttgaaataattggatccctttttgaaaaggaagatgagtttaactgtgtccaggtggagtaatagtactgctgttgcatgaayagatgatacaaagcaagtgatgaggttggtatgacttctttagtgaccttttagggtttgcttttattttcctctcttttttgtattatttctttcaaac

SEQ ID NO: 431376 - DNA, 201 bp, Homo sapiens
tttttaaggttaaatcgtaaactgtatacctttactactgaaaacaaaactatagggcatcatactaattgaaaatcaatagtaatgggttccatccattrgctttttaaatgaatagatctggtattgatttccttcctgtttttttgaggcacattcctttacaaccagtgtttaaaccaccacgtaatcatcttctgc

SEQ ID NO: 431377 - DNA, 201 bp, Homo sapiens
aaacttcaatagaaaatattgcttatacaataattagcttaaaatccatccaaaggaaaagagaagagctttttttgagtgttaagttttttaatttagtwttctgtttggaaaagatgttaagagttcaaatatgcttcttatgtaacagaaataccattatttctggggtttagtgacacaggctggagaggacaaaag

SEQ ID NO: 431378 - DNA, 201 bp, Homo sapiens
aaacaaactgccatgaaccatgcttcttatctcagaactgacctgtggaaaccactgccttaaaagaatgaaaggaaaaccaacatgaaacaccaaatagygtgtgtgaatcttctggcggtgctgtgcttggaatagatcgtagctaatttgcatttcttttaactttgtaataattttagaggggggaattgccttttt

SEQ ID NO: 431379 - DNA, 201 bp, Homo sapiens
tatttattagtaatactagaaagaatacaacaaattttcctgagagaaaacataactgaaaaactggctttgtgagtcagatacatatgtgagtaatatayttttgtgtgtgtttttaaatacctggtacgagtctttttattacgtcattagagttcagtgtagtgaatgatggatatataggtgaaattgtcctgttgc

SEQ ID NO: 431380 - DNA, 201 bp, Homo sapiens
ttatataactttgttttctggtagccacattataaggtaaaaagaaagatgaaattgattttaatgattttatgtaacctgctacatacaaaatattatcrtttcaacttgtaatcagtgtaaaaaattattgagatatcttacattcttttttctccgctaagccttcaaatccaacatatacaacaattgcagtacatc

SEQ ID NO: 431381 - DNA, 201 bp, Homo sapiens
ttgtatcctgagactttgctgaagttgtttatcagatctaggagctttgggtcagagactatggggttttctagacataacatcatatagtctgaagagaratggtttgacttcctctttctatttgaatgccttttatttctttctcgtgtctgattgctctggctgggacctccagtaagtattatgttgaataggagt

SEQ ID NO: 431382 - DNA, 201 bp, Homo sapiens
tgtatttttagtagacaaagggtttcactgtgttagccaggatggtctcgatctcctgacctcgtgatccacccacctccgcctcccaaagtgctgggatkacaggcgtgagccactgtgcccggcttgtaattctcatagtagagatcttttacctccttgattagctgtatccctagatatttttttctttttgtggct

SEQ ID NO: 431383 - DNA, 201 bp, Homo sapiens
gctatatttcaagtgcttagtagccattggtggctaggagcttggatattgaagatccagataatactacttgaagacatagacttcacatctatgggaawtttttattcccttggggcatctgatagtactttgtgaaacttagaaataaaccttaaaattcccttgacctttactccatttatctaatccctttgattt

SEQ ID NO: 431384 - DNA, 201 bp, Homo sapiens
ggtagtgtgatgcctccagatttgttcttttcacttagtcttgcttcggctgtggtgggctcttttttgattgtatgtgaattttagaattgttttttctrattttgtgaagaatgatactggtattttgatggcgattgcattgaatttgtagattttgcttttggcagtatagtcattttcccaatattgattctaccc

SEQ ID NO: 431385 - DNA, 201 bp, Homo sapiens
cccaggttcaagcgattctcctacctcagcctcccaagaagctgggattacaggcacgtgccaccacacccaggtaattttttgtgtttttaatggagacrgggtttcaccatgttggccggctggtctcgaactcctgacctcaggtaatccacctgtctcagctttccaaagtgctaggattacaggcgtgagcccctg

SEQ ID NO: 431386 - DNA, 201 bp, Homo sapiens
ggcatggtggtgcacacctcagctactcagaaagctgaggtggtgggaggattgcttgaccccaggaattggaggctgcagtgagctaagattgtgccacrtgctccagcctgcatgacagagcaagaccctgtctcttaaaaaaaaggctactgtgatgttgagtcatgttgaaagatcttgtcatttataacacaaaga

SEQ ID NO: 431387 - DNA, 201 bp, Homo sapiens
tcttatgcttttgcatcctcatagcttagctcccacgtatcagtgagaacatatgatgtttggttttccattcctcagttacttcacttagaataatagtytctaatcttatccaggtcactgcaaatgctgttaattcattcctttttatggctgtgtagtattctatcacatatatataccacagtttctttatccact

SEQ ID NO: 431388 - DNA, 201 bp, Homo sapiens
tgaggcaggagaatggtgtgaacccgggagatggagcttgcagtgagccaagatcccgccactgcactccagcctgggcgacagagcaagactccgtctcaaaaaaaaaaaaaatactattgacatgtacatttgtaaatagttacgaaaagtttatattctttaaggtatgctttgctatattttaaaatatgtaatgga

SEQ ID NO: 431389 - DNA, 201 bp, Homo sapiens
agaaatactcctttgaaaaacaacttttaaactcagtttttaatgcttatattttttaggttcctacaaacttgatgacttttgagtagaagcctgagaaraaaagagaggtgaactgttgcttctacgtgagcatgaggacctgataaaagagcgccagctataaaccatcctgtgccaggaagagcccagaggctctgt

SEQ ID NO: 431390 - DNA, 201 bp, Homo sapiens
gggaatatcacactctggggactgtggtggggtggggggaggggggagggatagcattgggagatatacctaatgctagatgacgagttagtgggtgcagygcaccaacatggcgcatgtatacatatgtaacaaacctgcacattgtgtacatgtaccctaaaacttaaagtataattaaaaaaaaaaaaagaaagaaag

SEQ ID NO: 431391 - DNA, 201 bp, Homo sapiens
ctcagaatagtccataatttgggaacatatgtaaaagagttccaagagaagtaaacagactagttctgaattaactaggagaatggtggtgtttttattcytgttgattacagttaataagatatgaaggtctacatcttagtgaggagctagacagtaatcatgcaaacaagtaacaaaatttcgaacagtcagaactat

SEQ ID NO: 431392 - DNA, 201 bp, Homo sapiens
atttaaaagtatctcattcttgttgtcacctttttctccatcttcactctctagaaattttcctaataaggtcaccagtgacttcctggttgaaacatttwatagatgtttctcaagccccatcttaattgtgtgagggttggtgtcaattatttctcctccttgaaattctccacaagtagcaccagtctttcttggttt

SEQ ID NO: 431393 - DNA, 201 bp, Homo sapiens
tattcaacctgagttcctattacccaatataccatttctagctttcaacaaaaaattacaagccatgctaaaaggcaaggaaaaaacacaatttgaagagrtacatcaagcaacagaaccacactcatgaggcagagatttcacaattatcagactgggagttaaaattaactgtcattaatatgccaaagtctctaatga

SEQ ID NO: 431394 - DNA, 201 bp, Homo sapiens
tattgatgttcctctgaatttagccagctgatacagaatatattattatgtcatggcacagacgaagtggaaaatttttaacagtaataagattttcaggrccaaaatccacctttcattctatgtatagccacaacatattcaaacttgaaacagtaatttttaagcagggaaaacttaaatttgtaatataataggaag

SEQ ID NO: 431395 - DNA, 201 bp, Homo sapiens
ttagacaaaaatttaaaagattgatgacatagcattggtcatgatatggggaaacagactgtcatccatggctggtaaaaatttaaattggtattgttttkgtggtggccagtccgagtcagtatttagcttggtaataaccagaaattcctcatctgagaatctgtcctactgaaatttttgaacaagtgcacaaagatt

SEQ ID NO: 431396 - DNA, 201 bp, Homo sapiens
ggagtatgccatgaatcgtcaaggattttataattatattggtcctaaattatgacaaacctaataagaaattttgtgttattttatgttctctaatggtrggaaaaattgtttattgacataatgaatttcagctacaaataggcaagcaaaaatgttttatgctattttgttattttaggttgtcgtgtcaactgtatt

SEQ ID NO: 431397 - DNA, 201 bp, Homo sapiens
aatattttgcaaactgagtgctatgttcaaagagaatctggattatcagctggttttgttgcatagcagtataaatataagttgattcttaatactataaggataatgaagcttatagaataagatagtttagatgggaggaaattgttttgtagtttattcattttcacgttgattttctaagtaggtgcgttaaatggt

SEQ ID NO: 431398 - DNA, 201 bp, Homo sapiens
aaggaactgttatcccagaagcctagcagttacagtacttcaaaaagcaaagagtggccagctgggtcagatgctgttaagaggctggctatgataaggayagaggctttgctaaaattacaatcatcagtgaccttgatggcccaaaagccaaatgaaatgagttaagtagaaaatgggcaaaacagaagaagtagaggc

SEQ ID NO: 431399 - DNA, 201 bp, Homo sapiens
ggaattaagcagatagtaacatctgcatcatcattacatcatagtaatagcatatttaccatgtgccaacactgttttaggtgctttgtgtatattatctyatttcgcttcaccacaactctatgaagtaggtacttattatccctattttatagatgagaaaactgagtacagaaaagttaaaatttcctgggtttacac

SEQ ID NO: 431400 - DNA, 201 bp, Homo sapiens
ttgtatatttaaattcatattcattcagttgtttgtctggttaaaccaggtctcttttggactgttattagctgtggaggcagataagggtggtgtattgwttgggaacgtggggtttagtggtgatgggtaatcagttcataatacaacaaaataccaaacttcagaagcaaactttacgtcagtttgatggtgtctaat

SEQ ID NO: 431401 - DNA, 201 bp, Homo sapiens
gtaatctacagtctatattccaattttgtgaattaccattaatatctcttaaagcatttactaccatccagtacaggacctttagttgccatatctcttgmgtttcctttaaattgtaatagttcttcagcctttctcataacattggcattttttgaagaatatatttatcgaatgtttctcagattagacttgtccatg

SEQ ID NO: 431402 - DNA, 201 bp, Homo sapiens
tattttaaaatgcttccaagttggtagcctttaaactgcaccagtctttctaatgctgatagtttttgaatgaacaatataaaaatctgcttctttattcrtaagttgtaatcaaagcattttctttgctaataaatttatatttgatttgtctttttaaaaagtttttcagataaactacaggtcctgaatgtagacgag

SEQ ID NO: 431403 - DNA, 201 bp, Homo sapiens
ggcaaaaaaaaaaaaaaaaggatggttgcatctgtactgaacatgtacagacttttccttgctataattccctaaaaaatacaatataacaacaatttacrtagcattggcactgtattaagtattatgagtaatccggagatgatttaaagtatacaagaggatgtgtataggtgatatgcaaatactgcaccattatat

SEQ ID NO: 431404 - DNA, 201 bp, Homo sapiens
gttgtggatacacataattttctgcagtaattgacgacagatgaaactacatttataggttcccttttatagttacggtaaaattcattttaaaaactttmtgtgtagaaataaattgtgccaagtaatatacatgtaacatttacatttttaagagctgaaaagtacaaagttctgtgtcatttaaattggcgagtgtct

SEQ ID NO: 431405 - DNA, 201 bp, Homo sapiens
ccttacattgttagtggtgtccttatcatagttaatgacatttttaaagcatacctaaaatgataagaatcttaccgatttggttttcagtcgtttttgcrtatattgaattgttaaatattcagtagaatatagttatttagttttagaaatttctaactcatgtaaaaatgttttcaagaataatagttttgtattcat

SEQ ID NO: 431406 - DNA, 201 bp, Homo sapiens
gttctgaatgttgacagaatatttgtcaagtatcatttgttccatagagctatactcattttttgctatttaatagacactcagatgtttaaagcaaaatrgagagttctggttttctgaatccagctttgatttcataagacttcaattatgcaaatttaagattatcttcagctttaattttcaacccatgttttgcag

SEQ ID NO: 431407 - DNA, 201 bp, Homo sapiens
gataataaatagagtttagtgaagttgaaatttttgtttcttggcatggtggtaggcatagagttgttttcttgaacttcgaggaagacatttgcttaactttttttttttttacaggaataatgtatttgtggccttggacatgaggcagtcagtcctctgttgctgttaacataaggtcagggactgatgaggaaagca

SEQ ID NO: 431408 - DNA, 201 bp, Homo sapiens
tagaagcagaatgtaacagaaaagtttttgtaaaatctctagccctctgtagaatgtgagtatactcttttggtggatctagatatgactcctttttcctrttggagagagacttcttccccttccccatttaatttttaatttaatatgtcaggttttcatgatagtacttttttgttagaagagaaatacttttcttat

SEQ ID NO: 431409 - DNA, 201 bp, Homo sapiens
gagtgtgatggcgcaatcttgactcagtgcaagctccacctcctgggttcacgccattctcctgcctcagcctcccgagtagttgggactacaggcgcccrccaccacgcccggctaatttttaatagagacggggtttcactgtgttagccagtatggtcttgatatcctgacctcgtgatccgcccgcctcggcctccc

SEQ ID NO: 431410 - DNA, 201 bp, Homo sapiens
ggtagcttcatttaactattcctcttcaagtatacagagtttgcataatgctatgctttattcattatgtctgcagaggttattatggaaagaatatatcmatgaaatatctatagtgcatagaaaaaaggtaaccgctaatgatttcttaacatgaggtatatggtccaaactaatagttttttctcccctaaaaatgag

SEQ ID NO: 431411 - DNA, 201 bp, Homo sapiens
taggacttagatatatttctcatcttcaagccaattaaatagaactaacatcagtactatctcaaaatttgaaccacatttaatattttctttcaagggaytgaaaaataaagtaatcatttgaaaatctctttaaatttaacccttaggtcctgaagtaggagcgtctccacagagtggacgaaaaagtgtggcagctga

SEQ ID NO: 431412 - DNA, 201 bp, Homo sapiens
aggacttcatgtctaaaacaccaaaaacaatggcaacaaaagacaaaattgacaaatgggatctaattaaactaaagagcttctgcacagcaaaagaaacyaccatcagagtgaacaggcaacctacaaaatgggagaaaattttcacaacctactcatctgacaaagtgctaatatccagaatctacaatgaactcaaac

SEQ ID NO: 431413 - DNA, 201 bp, Homo sapiens
tatatggtccaaactaatagttttttctcccctaaaaatgagaaccaaaacctaccaatttttgtgaagcttgtaaaagggagtagagtcctatatgctgrtaaaactcttattttgataccaccaaatttatctgtagttcaatgtggattaaattataagaagtagaaatgttttctcggctctcaactcatcatccct

SEQ ID NO: 431414 - DNA, 201 bp, Homo sapiens
tctgcctcccaggtcctgcttcaagcagttctcctgcctcagcctcccaagtagctgggattacaggcacgtgccaccatgcccagctaatttttgtattctttttttttttttttttttttagtgatgggatttcaccatatttgattggtggttacatgggtgtctacattgtaaaattcatcacacagaataccttag

SEQ ID NO: 431415 - DNA, 201 bp, Homo sapiens
aaaaggtcgtgtttcaaaaatttatcgaagtgaaagactagattatttttcagtgttaatgcattacatagaaatattttttatcttcctttggtaatgaktattaacttcctttttccagattttgacagtttttaaaaaattttgtagaacagaattagtcccagtaaatggctatagaaattctggaaaacatctagg

SEQ ID NO: 431416 - DNA, 201 bp, Homo sapiens
aactaccatcagagtgaacaggcaacctacaaaatgggagaaaattttcacaacctactcatctgacaaagtgctaatatccagaatctacaatgaactcmaacaaatttacaagaaaaaaacaaacaaccccatcaaaaagtgggcgaaggacatgaacagacacttctcaaaagaagacatttatgcagccaaaaaaca

SEQ ID NO: 431417 - DNA, 201 bp, Homo sapiens
tggcaatcattaaaaagtcaggaaacaacaggtgctggagaggatgtggagaaataggaacacttttacactgttggtgggactgtaaactagttcaaccmttgtggaagtcagtgtggcgattcctcagggatctagaactagaaataccatttgacccagccatcccattactgggtatatacccaaaggactataaat

SEQ ID NO: 431418 - DNA, 201 bp, Homo sapiens
aggttcaagcaattctctgcctcagcctcgcgagtagctgggattacaggcgcctgccaccacgcctggctaatttttttgtatttttagtagagacgggrtttcaccatcttggccaggctggtcttgaactcctgacctcgtgatccacctgcctcggcttcccaaagtgctgggattacaggcatgagccaccgcacc

SEQ ID NO: 431419 - DNA, 201 bp, Homo sapiens
atatgccaacatccccgtgccatttccttgaggaatcttttagctctccttagggatgttgtagtcataagttgactggtctttcacaaatgtttattatrttgtttgataacaacaagtgtcacatgtgttgataattttttcttagggcaggagtctcaccatgttgcccagactggtctcaaactcctaagcagtctg

SEQ ID NO: 431420 - DNA, 201 bp, Homo sapiens
ggaaacaacaggtgctggagaggatgtggagaaataggaacacttttacactgttggtgggactgtaaactagttcaaccattgtggaagtcagtgtggcrattcctcagggatctagaactagaaataccatttgacccagccatcccattactgggtatatacccaaaggactataaatcatgctgctataaagacaca

SEQ ID NO: 431421 - DNA, 201 bp, Homo sapiens
agatgtaactcctttgtcctcttctatgtcaactaagctggcattaatataatcattctcagcattttgcagtttaacacaactgtgatcatcaagtacarcagctgccagcgatgctgagcatccaactccttgaactcccacttgatggtggtgggcatggcagcaggagcgagctggtgcgagcagagcctgtgccag

SEQ ID NO: 431422 - DNA, 201 bp, Homo sapiens
ataaatagtatcatatatgtaatgatatttgaggtaatttgatttttttgcaactaagagtctaactatagttaatctccttactgattcacttggagcasagtaaccttgtgtgggagctgtgtaaacaagataaggtatagggagttagaaaatattgtcttatacagtgtgaataataatacactgagcatttaatag

SEQ ID NO: 431423 - DNA, 201 bp, Homo sapiens
aacttcagttcagactttgaattatttttgacagcacttgccttcatcccaagctctaaactcataattgtttttttctcattgtcccttaaacccttctrttctgactctctgccttctatactgtttgttataaaactggcaggtctcttacttgagtattgttatcagtcagcattctccagagagatagaaccgtag

SEQ ID NO: 431424 - DNA, 201 bp, Homo sapiens
ataaaaattagtttaaaaaattgtaagtaagtgtatagccttctcccctgacttccctttaccttatttgagaatcattgaactagttaaaatcatttatktctataggaaatgataggttgtcaggatgaggaaactgacacacaagaaaatgactcattcaagaacctaaaaatttaaagtcacagttttagatttcaa

SEQ ID NO: 431425 - DNA, 201 bp, Homo sapiens
aagggtaaaaattagatggcatattaaattaataaaaattattcgaattcatctttatttgatctattgacaatttgatgtgggtttctgtggtggtagtraaaccaaaaaccatttaaattttgtttgcttttattttactgaaacaaaaatggtctaattgaaaggctttcagctgcagaagagcaggaatccattgtg

SEQ ID NO: 431426 - DNA, 201 bp, Homo sapiens
ttaaaaaattttgtagaacagaattagtcccagtaaatggctatagaaattctggaaaacatctaggaataatttttctaaatgcatctaaaattttactratgtttgaaaatgcctttattgccatcttctctctcacaccataatagcaacactgtatttctgtaccaattttcagtctacaaaaagtttctacatggt

SEQ ID NO: 431427 - DNA, 201 bp, Homo sapiens
gaagaactacaaaaatttgtggaagacgataattacaagtaggttggatcttcaaaagtggtttgtataactttgtcctgtcctccacctttctatccctwtgtatttaaacatctaaatcctacatggtatcatacaaaggactaatccagtggtttacagcagtaaaggtactaacatgtattacttcttaatcacttg

SEQ ID NO: 431428 - DNA, 201 bp, Homo sapiens
attgaatccttatagaatttgtcttttaatagacagaaaaattaatgaaactttttaaaatagaaaaattactcttctttaatgctaagtattgacacatmgttgtttgtttttcattgtttttgcggattgagagacttggtccatcttgtctcaggagaagaaacctttctccaatgtagcagaattatcctcttccct

SEQ ID NO: 431429 - DNA, 201 bp, Homo sapiens
atgaggatactttcggagaaatgtgttgtttggtgattttgttgttcagacatcatagagtgtaatcacacaaacctagatggcatagcctacaatacacmtaggctatatggtacagcctattgcttctagactacaaacctatacaccatgttactgtactgagtaggcagttataacacggtggtatttgtatattta

SEQ ID NO: 431430 - DNA, 201 bp, Homo sapiens
taggaagtgccatagtttgggttataagtcagcatttttaattttatctttcaaatttttaagtcttttgtaattggatttattgtcgatttattagttcrgtagaaaatggtatccttgaatagttttcttttttcttaatagctgttttctgattcagtaaaatgccttgtttgcctaaaagcttttatttcttacttt

SEQ ID NO: 431431 - DNA, 201 bp, Homo sapiens
aaagagcttttacaaagagaattacagattacaaagagaatcctttttatgacaggagaaacagtaaaccaattcagagctttcaaattattggttaccamgtaggatcttttgagaggtaaacttttcagttgggttgtgcattaactttcagttaaatatattcaacatttctggagtgggaagtttgagacaaatact

SEQ ID NO: 431432 - DNA, 201 bp, Homo sapiens
ttgtggttagcataaaatagacatgtagaccaatggaccaaaataaagggcccagaaataaatacacacatttacagtcaattgatcctcaacaaagatamcaagaacacacaatggggaaatggtagtttcttcaataaattgtgtcagaaaaactggatgtccgcatgcaaaagaatgaaactggacccttatctcata

SEQ ID NO: 431433 - DNA, 201 bp, Homo sapiens
cactgtgtcgcccagcctggagtgcagtggtgatctcggctcactgcagcctccgcctcctgggttcaagattctcctgcctcagcttctcaagtagctgrgattacaggtgcctaccaccatgcctggctaattcttgtattttcagtagagtcagagcttcaccatgttggccaggctggtcttgaactcctgacctca

SEQ ID NO: 431434 - DNA, 201 bp, Homo sapiens
ttgcctcagactcccaaagtgctgggattacagcatgagccaccacgcttgaccacaataatgatttttgaacaagtagtgatatgctcaaatgtgctggctaggaacacaatatggctatagattttggttaggtctagtcaaaaattatcagttttattttctaatagatggatatctttttttttttttttttttttt

SEQ ID NO: 431435 - DNA, 201 bp, Homo sapiens
agatgtgtataagaatgtctatagcaacatggttgggggtgggatgggagtaactcaaaagtctatcaaataaaatggatgagttacaattgtcacacatkagcttgttctcattataaggaattacagcagcatttaacagcgtggacaagtcttagaaacaaaatagacgaagcaaccacagaagaccatatttttaaa

SEQ ID NO: 431436 - DNA, 201 bp, Homo sapiens
atgatgaacagtgaaaaggtaggctggtcagtggtttggaagccacagtggagtcaaataatcactggattcagaatgagaaagggagtgcaagctgaggrtggtagaagataagatcattggagcagaagtccagaaactaagaaaccagagtattgggagtattctctccatgaaatggcaatcaccaagatttatgat

SEQ ID NO: 431437 - DNA, 201 bp, Homo sapiens
acatgatgaatccttgtctttactaaaaatacaaaaatcagctggcgtggtagtgggtgcctataatcccagctactcaggaggctgaggcaggagaatcrcttgaacccaggaggcggaggttgcagtgagcctggtttttcagcagtttactaataacacttggatctttagcattttcttctttttcgttttaaaaga

SEQ ID NO: 431438 - DNA, 201 bp, Homo sapiens
gctgtaagctgcttctagataaaacttttgggctttctctacatacctgtgctttcccttccttattgctgtagcttgtgctgtgtttctctttctgttargccacactgttgatccacatcctttatttaaagtctgagcttattttctacctctttcacagaatcatttatttgaattcctatgccatatataggtata

SEQ ID NO: 431439 - DNA, 201 bp, Homo sapiens
tgtttggtgaatgatcaaaagcaggaggtagtcttccttagaaagttctttccatcgtttctgtatactagaatctccctttacacattttgctccttctrttatagccatgtatgagaatctcagttgatctggggtctgagataagacccatttggaattttcttatgttcagtaacacttgtttaatgttaatatcat

SEQ ID NO: 431440 - DNA, 201 bp, Homo sapiens
cttggttttcttaatatattactcaactagaggtagatttattcccagagtttggggacaatgccagggtagaacatgtaagttctgttgtgcaccaaaayaacttagtgtaaacacagggtactctaaagacagttctcagtaatgaaggtaatatatgctggaacactaccagttgccaagattgtacttgttagtcta

SEQ ID NO: 431441 - DNA, 201 bp, Homo sapiens
tgcccaggctggtcttgaactcctgtgctcaagtgatcctcccatgttggcctcccaaagtgctgggattacaagtgtgagctactgtacctgtcccctcrtctctttagctttgttatagataacctccaaactgatttatatttatatatgctcactagcaatgtatgaagatgcctgttgctccacatccatgtcacc

SEQ ID NO: 431442 - DNA, 201 bp, Homo sapiens
gttagattttcccacctagtgaacctgagaccacactaccaaataaacaaaactttgacttttcaggtttgagatctcagaattgcagataaagggttgtraaccgatgcctggcattcagttatatcattctcaaatttaaaaattctccaaatcctccactggagttcttactgcttatgagagcaaatctagccttta

SEQ ID NO: 431443 - DNA, 201 bp, Homo sapiens
ttttttttagctttttatgttttcataccttgctttctgacatatatagaaaatttagaaacagtcatctattttatttttaaaaatagacttttactatrtaggagttacctataccaaaaaccaataaaacatttattatatctccagattcgtggaatttagatatgggttattttaaaaactagggacaagaaataa

SEQ ID NO: 431444 - DNA, 201 bp, Homo sapiens
cactagtaaagttgttgattgcaaagatgagttaaagacactgtgagactaagcgttacatacactgtaaaatgaaattagcagtttggactaagctatgyccctgtggcttctgctctggagctgttgaattctcagtatcgggaaaacagccaacagttccttgagtttgttttagtcccacctgttctgagcatgcac

SEQ ID NO: 431445 - DNA, 201 bp, Homo sapiens
cctccccagtagctgggactacaggcacatgccaccacgcacctggttaatttctgtgttttttttatagagacaaggttttgccatgttgcccaggctgktcatgaactcctgggctcaagcagttcacctgcctcagccgccggaagtgctgggattacaagtgtgagtcaccatggctggcctctgtttattcttact

SEQ ID NO: 431446 - DNA, 201 bp, Homo sapiens
gactcttctgcggcaatttctttccttctgtatgtattctgtcagctgatagttatatatctaacctatgattatggacccctcccgaaaacaaaggtcaygtcaatgaaatataactcttatgctgtcgtcatgaagactactgctactttcactttctaaaaccatgttccttttttggtatttttcaattgaatagtg

SEQ ID NO: 431447 - DNA, 201 bp, Homo sapiens
atcagcctgtgttctccttcccaggctctgggtgtcgtttatgattccactgggtttctgttttccttcctgaattaaagcttacagagtcgattgcttcttttttttttttttttgagacaaggtctcactctcttgcctaggctggagtgctgtggcatgatcacggctcactgcagcctcagcctcccaggctcaggt

SEQ ID NO: 431448 - DNA, 201 bp, Homo sapiens
acatttcctccatattgccctgccaacacaccccactgctacaatatagatgaaggctgttctgggaatttatgtaagtgggatcctacagaaagctattrcttgtggttgactactcttgctcaccatgttgttgagattcatccacattgcatgttattgataattcttttattgctaagtagatttccagtgtatgga

SEQ ID NO: 431449 - DNA, 201 bp, Homo sapiens
agtggcattatttgttgcacaataattttgaactatattctgtatttagatttgtataagtgaaccaacttacagtgctttgactttttttcatagtacawgaattaaagtgtattacatggacatattgtatcatataataagcaaactattcagagtagagcattatcatattatatatctaatctgccttctaataaa

SEQ ID NO: 431450 - DNA, 201 bp, Homo sapiens
tgtgaggattaaagtttacatagggctaatgaaaccatattaatacctctgatttatagaaagaaaaatgttgaccagtcatgccacattatttcccaagrtgtatttattaagaacccatattttgaatagaacagtgagttaaaaaagaaaaaaggatttcacactttgaatagcagctttactgggagccatctgtaa

SEQ ID NO: 431451 - DNA, 201 bp, Homo sapiens
actttatatttacatatatatttgtaaaatatatgtaaaatacatacataatgacatttctttacagatgaaaattgcaagtaaaatctgaaatatttctsattaaaaatgtgaagaaatatgaggcagtggcattatttgttgcacaataattttgaactatattctgtatttagatttgtataagtgaaccaacttaca

SEQ ID NO: 431452 - DNA, 201 bp, Homo sapiens
ttatttgtatttatttttataaacataccattaacctgtcttagtccagtgtatattgttgatcctagcagaaatattttctcattattacttgaaaatcktatttactttctgccctaaaattagattctctattgtccctatcttaaatgttttcactgctttttctgtaccataaagaacattgcttgaaagaaatta

SEQ ID NO: 431453 - DNA, 201 bp, Homo sapiens
gtagtcaagtaggaaggaagggtaaagagcctatatttcagaaaagatgaaatttacagaattttaatttcttatgtgggagtgagatggaaggaaaagtraattatgactcccaggttcatacttagattattgcgtgtaatgcaggtagtatatttgtatacttacagtattcataggcaaggactttatctttcagta

SEQ ID NO: 431454 - DNA, 201 bp, Homo sapiens
catacatatctttatctctgtccagtgtggtgaattgtttaccattatgccacatcatagaatcccctgcatttccctggtaagttcccaggcgcagtctrtagaattcactttcaggttccagacgaaagctgctgtattctgcatagacttttttatcactccagtcttctaattcaatcaataacttgtaattatctt

SEQ ID NO: 431455 - DNA, 201 bp, Homo sapiens
atagtcactttactaagtagctagttagggatatgggaaggatctgtatatacatacagttatatggatatagcagtgttcatatgacttagcttgaggargcttggccgtttatttcattacagagaaacttttggtactggcttttgaataatacattgctttggagtgtgaaagacttgaatctctcatcttgaattt

SEQ ID NO: 431456 - DNA, 201 bp, Homo sapiens
tttttccacagtggagacatcagtacaggattgaagctgtgtacgtctgtatatgtgctcaggtacattcatgcactctcatgcacacacagagagaaagktggggaagaaagcactagccaagttggagtttagtagaatcaggaaaggttttctagtggagaatatacctcttctgtctcagcccccgacctgaaacaa

SEQ ID NO: 431457 - DNA, 201 bp, Homo sapiens
aagtgaagtggacttgatcattggcacttagaatgtaaagaaactaagaagccaggagcattgtaatagtatattcctgtgtttgtcctatccaggtagcwtcttggacaaaatattgggcagctttgtgtgggacacagcttttttactatgctgccaaatctctaaaggctaccgaaagaaaacatgtaagtatttgtt

SEQ ID NO: 431458 - DNA, 201 bp, Homo sapiens
aatgtgttacatttacctattctatggaaagaaaaaagtttgaatataaatttacatagtcactttactaagtagctagttagggatatgggaaggatctrtatatacatacagttatatggatatagcagtgttcatatgacttagcttgaggaggcttggccgtttatttcattacagagaaacttttggtactggctt

SEQ ID NO: 431459 - DNA, 201 bp, Homo sapiens
atagcataacttgattttttttttttttttaggagtaaaccttgttagaactggggaggattattacttttagtagcccaagtatagtaacaagtattaakgtgactttgtaaaatatgtatactttatatttacatatatatttgtaaaatatatgtaaaatacatacataatgacatttctttacagatgaaaattgca

SEQ ID NO: 431460 - DNA, 201 bp, Homo sapiens
ttaagactcatctcagataccagattctctgtgaagatattcctgacatctcttccttggcagacagaagtaaatacgaaggaattctagcaaatgaaacwaatagggacaccttttttcagagtggggaggaatatggaaggaagttttcttggaaagctttatttgctcttcttgagagagaacactattccataacct

SEQ ID NO: 431461 - DNA, 201 bp, Homo sapiens
gcaagttttttcaaattgttgcaaatcttcaagacaaaatttccaaaatattttttgaaaaaaatctgtgtatgagtggacccacacagttcaaacccatgttgttcaagggtcaactatgtacctcattttgataagagtgttgtgaaacttacattcatttctcgtgggagtgtaaatgattcagtatttcaggagggc

SEQ ID NO: 431462 - DNA, 201 bp, Homo sapiens
tagcatatatattagtagattctatttaatgcatagaaggtgatgattctacaaagaatgaaagtttttcatacttacctgcatacatatctttatctctrtccagtgtggtgaattgtttaccattatgccacatcatagaatcccctgcatttccctggtaagttcccaggcgcagtctatagaattcactttcaggtt

SEQ ID NO: 431463 - DNA, 201 bp, Homo sapiens
tggtgggagaagttgccagatcaggtggtggcattaaatctctgggataacctggatccctctgaatctcgttacctcccagcagaccaggagtatactgytggctgttaggaatatgttgtggcaccacctggacaagtgggggagacacatgggtgtcttgtcgggaaaatatcctcaagcactgttcttccaacaaag

SEQ ID NO: 431464 - DNA, 201 bp, Homo sapiens
attgcatatagagttgagtaacacgagagttcatgttacggctttcctttctcagcagctttacctcattcacaatgtttccatctacatccaccaccagytgcagaacatctatctcccgcttctgcctggagagcacatccttcaggttttcaaggtccatcctggtgatcatgtctttaatggtacttgcatcttgcc

SEQ ID NO: 431465 - DNA, 201 bp, Homo sapiens
ttgacacctggttgataatatggcagggataggtatagaattccaaggtaaaaatcatcttcaaatttagcagatgattatacttttctagttgttttggtttttttttttttttttttttttttttttgagacagagtctcctctgtcccccaggctggagagcagtgatatgatcttggctcagtgcaccctccacctc

SEQ ID NO: 431466 - DNA, 201 bp, Homo sapiens
tgacacctggttgataatatggcagggataggtatagaattccaaggtaaaaatcatcttcaaatttagcagatgattatacttttctagttgttttggtttttttttttttttttttttttttttttgagacagagtctcctctgtcccccaggctggagagcagtgatatgatcttggctcagtgcaccctccacctcc

SEQ ID NO: 431467 - DNA, 201 bp, Homo sapiens
atatccccacaaacagggtctggagtggacctccagcaaactccaacagacctgcagctgcgggtcctgactgttagaagcaaaactaacagaaaggacakccacaccaaaaccccatctatatgtcaccatcatcaaagaccaaaggtagataaaaccacaaagatggggaaaaaacagaacagaaaagctgaaaattct

SEQ ID NO: 431468 - DNA, 201 bp, Homo sapiens
caaggtttttcttagactattatgttttcttagagtaggaccatatagtaaaacaatatttttagctgttttagtaatgcttttaaagaatataatagttygtaatgatgtttaatacattaaggaaattgatcaaagtccttatatagtgaggagatattttagtgtgaattctgaagtagtctcagtgcatattggtat

SEQ ID NO: 431469 - DNA, 201 bp, Homo sapiens
gacacctggttgataatatggcagggataggtatagaattccaaggtaaaaatcatcttcaaatttagcagatgattatacttttctagttgttttggtttttttttttttttttttttttttttttgagacagagtctcctctgtcccccaggctggagagcagtgatatgatcttggctcagtgcaccctccacctcct

SEQ ID NO: 431470 - DNA, 201 bp, Homo sapiens
taatactcatacttttttgttaatctcataggaaaattaggtgagacttacataggtggaaatgttttgcatgctgtaaaacaacaccaatattttaataygaaataaagtgaaatctaatgtagtaatgaaatagaaacttcatgtctaaataaaaaaaaaaattttccagtctttggaatgatttgaaaaactatttcc

SEQ ID NO: 431471 - DNA, 201 bp, Homo sapiens
acacctggttgataatatggcagggataggtatagaattccaaggtaaaaatcatcttcaaatttagcagatgattatacttttctagttgttttggtttttttttttttttttttttttttttttgagacagagtctcctctgtcccccaggctggagagcagtgatatgatcttggctcagtgcaccctccacctcctg

SEQ ID NO: 431472 - DNA, 201 bp, Homo sapiens
gcaagcaaacatttgcacctaatcttgagattactaatcaagtatcttgaaagtggagtaagagaaaattgtaaaaccgctgttttagaccatggaatatycatctaaaacattaaagcaaaggaccccttgacgttgtattttaaagagggagcgatactgttgagacatttttctaatagagattttctgaagatagtc

SEQ ID NO: 431473 - DNA, 201 bp, Homo sapiens
gtcttatgtatgttacagagagtagaggtattcatggagaggaacgatcacttcaaacctgtaggcgtcaacaagggcctcaaggaggagttgcattttttttatttatttatttatttatttatttatttatttatttggttggttggttggttggtttggcttgagccttattctttgagtaggcagaaagcatgaaaa

SEQ ID NO: 431474 - DNA, 201 bp, Homo sapiens
tcttatgtatgttacagagagtagaggtattcatggagaggaacgatcacttcaaacctgtaggcgtcaacaagggcctcaaggaggagttgcattttttttatttatttatttatttatttatttatttatttatttggttggttggttggttggtttggcttgagccttattctttgagtaggcagaaagcatgaaaat

SEQ ID NO: 431475 - DNA, 201 bp, Homo sapiens
aattctatttatctgattattgatttattatgaaaattacaaaatcatgttatagtttgttataacagttctgtgtttcagctgtggcaagattagttacragttctaagtaatttgtttctcctggtattgtaccaaagtttttgaatgattgacttaggggaaaataaagagcaggtttatcattatccctatgtcaca

SEQ ID NO: 431476 - DNA, 201 bp, Homo sapiens
aacagaaggacacccctgtcttaaaaaacaaaaagcatatgaagactaatacagttaatccctaacttaagaaattaaccaatgcagttgaagcaccctastagttcacattaatgtgtaagaagtctttatgtattaaaaatattaactctttgtctcttgttttacttttccttgttttatcttttgttacccaactta

SEQ ID NO: 431477 - DNA, 201 bp, Homo sapiens
cttatgtatgttacagagagtagaggtattcatggagaggaacgatcacttcaaacctgtaggcgtcaacaagggcctcaaggaggagttgcattttttttatttatttatttatttatttatttatttatttatttggttggttggttggttggtttggcttgagccttattctttgagtaggcagaaagcatgaaaata

SEQ ID NO: 431478 - DNA, 201 bp, Homo sapiens
caggctctaatgataattgagtgtcacaaacaaaagattataattaatctgcaccccgggtctaagataaagtattcatttatgcagttgcacacattcayacatattgtgtgaagatacaaaccaaggtgatgaggaataatctgggagtttgtgtttcctggggtgactgacatgagcgggcattcatctaggttttcc

SEQ ID NO: 431479 - DNA, 201 bp, Homo sapiens
ttatgtatgttacagagagtagaggtattcatggagaggaacgatcacttcaaacctgtaggcgtcaacaagggcctcaaggaggagttgcattttttttatttatttatttatttatttatttatttatttatttggttggttggttggttggtttggcttgagccttattctttgagtaggcagaaagcatgaaaatat

SEQ ID NO: 431480 - DNA, 201 bp, Homo sapiens
agaagatatttgcaaataatacatctgataaggggttaatatccaaaatacagtcatgcatggcttaacaatgaggatactttcggagaaatgtgttgttyggtgattttgttgttcagacatcatagagtgtaatcacacaaacctagatggcatagcctacaatacacctaggctatatggtacagcctattgcttcta

SEQ ID NO: 431481 - DNA, 201 bp, Homo sapiens
aaaagatatgaacttttttttctgtttctagtttcattcataaaatgaacacagcagaatttaagagtgcaacgtttccaaatgcaggaccaagacatctrttagatgatagcgtcatggagccccatgcgccatctcgaggccaagctgaaagttctactctttctagtggaatatcaataggtgagaaatacttctctg

SEQ ID NO: 431482 - DNA, 201 bp, Homo sapiens
tcacctgtttactattagagattgataaatgaccatttcaaaacttcatactgtatagcctgtatgcatatgatctcccattgtttatcattttggagtcrtttttgcagaagtgttatccacccaatgtgacttttgtaaaatagcatcctttctacagaaacaggagttttttccttcccataatttaggctatatttt

SEQ ID NO: 431483 - DNA, 201 bp, Homo sapiens
ttgtactatcacaaacagatcacataactaagaatggattatatgtaactctttaattaacagcattctgaatattttctgataacttgttataaagctartttgtctttttcttaataaaaattagtttaaaaaattgtaagtaagtgtatagccttctcccctgacttccctttaccttatttgagaatcattgaacta

SEQ ID NO: 431484 - DNA, 201 bp, Homo sapiens
gaatatattattatgtcatggcacagacgaagtggaaaatttttaacagtaataagattttcagggccaaaatccacctttcattctatgtatagccacarcatattcaaacttgaaacagtaatttttaagcagggaaaacttaaatttgtaatataataggaagaatagtattaattgtactatcacaaacagatcaca

SEQ ID NO: 431485 - DNA, 201 bp, Homo sapiens
ttagctgctactaaaagggaggaaaagcaaaaatgaggcataatgacaagtgcttaaaactaatacataatagctggtgggttgatctgtgtgtactgtgytaattgaaactttgattaatttttttgctgttatctgtagcctcatatcctaccaccatttaatagagcctgatctaaatattctcatattgatgttcct

SEQ ID NO: 431486 - DNA, 201 bp, Homo sapiens
agaattcatcactcctgtcctcacaataggaaaaaagctaaacaaactgaaaatcaataactcctcttagctttatcagagaattgctataacagagcacrtttaacagtgatgccctgaaacctggagagagaggcaaatagagaatcacagcttacgggagcagaagtcagtggagccacgtaaaccctaattgatgaa

SEQ ID NO: 431487 - DNA, 201 bp, Homo sapiens
tacaagtaggttggatcttcaaaagtggtttgtataactttgtcctgtcctccacctttctatccctatgtatttaaacatctaaatcctacatggtatcrtacaaaggactaatccagtggtttacagcagtaaaggtactaacatgtattacttcttaatcacttgttatgattgagccaatatacaaatacctcatct

SEQ ID NO: 431488 - DNA, 201 bp, Homo sapiens
ctcttctaattctacttcttcctatgtaaatggagaaaatatttacactgcctctacttagtataagtaagataaaaattaatggattttgtatggtttgkgattttgtgttttaggacttagatatatttctcatcttcaagccaattaaatagaactaacatcagtactatctcaaaatttgaaccacatttaatattt

SEQ ID NO: 431489 - DNA, 201 bp, Homo sapiens
ctttgagtctagtctgctcttgggttgtgaaggagccccctctgtttactgtctctatgcctgcatttcttttattggatgttctgatccatggggctccytcatgcaaaggccgtatccttgccaggtaagccctattctgctgttcatgtgctccccaggaatcacagggttgtgcctgcctacggaattcaggcagaa

SEQ ID NO: 431490 - DNA, 201 bp, Homo sapiens
ataataaaaatgaattacttatataaatccgggcatcatatttaaactagaatccaagaagtggtatagaaacgtaagaatttttgaagtatttttgaggttttttttttattatttggctataaatagctctttaattcttttagcagatttgtgaaagtgaatgtatatgtaaatatatggtgtgtactaaatacctct

SEQ ID NO: 431491 - DNA, 201 bp, Homo sapiens
attttgaaatgaggttgtaaaatgatgtcttttgaaaaacaaatcagtgaaggagaaaaagcaaaaagaattcatattaatctatgttaaagtcagtaatyttaaaaactatctgagggaaaaactgaatatttattggtgttaatagattaggctagaattaactttattaatttcttaaatttaatattaagttgtaat

SEQ ID NO: 431492 - DNA, 201 bp, Homo sapiens
aatttcagtttttattttagattcatggggtacatgtgtagtagatttgttacctgggtatattgtgttatgctgaggtttggggtatgattgatcccatyaccttggtagtgagcatgttacctagtagttagtttttcaacccttccccctttccctcactactcctgctggtggtgcccagtatcattgccatctttg

SEQ ID NO: 431493 - DNA, 201 bp, Homo sapiens
gttaatttgcttaggataatggcctctagctgcatccatgttgctgcgaaggacatgatttcattctttttttatggctgcgtaatattccatggtgtacrtggaccacattttctttatccagtccaccattgttgggtacctaggttgattttatatgtctttgctattgtgaatagtgctgtgatgaacatatgagtg

SEQ ID NO: 431494 - DNA, 201 bp, Homo sapiens
ttaatctatgttaaagtcagtaatcttaaaaactatctgagggaaaaactgaatatttattggtgttaatagattaggctagaattaactttattaatttyttaaatttaatattaagttgtaatactttggcatttgtttaaagattaggtttcagagaataactcttccagctaccaccttattgtaatcctttttgtt

SEQ ID NO: 431495 - DNA, 201 bp, Homo sapiens
taagaaaacgttcatttatctaattgtatttcaggtatctatttgtcagatttaacatacatcgattcagcatacccatcaactggcagcattctagaaartgagcaaagatcaaatttaatgaataatatccttcgaataatttctgatttacagcagtcttgtgaatatggtaagtttctaggggataatgccaagcca

SEQ ID NO: 431496 - DNA, 201 bp, Homo sapiens
tagtttttttttataataatgaacatttatatttcttaggatacacagtactaattgtttagccttggaaaataggagggataccttttcttgaggctgasggcaagaaggcatggcttttgtacagatgctttcaagataagaaagaacaaaacccaggacctgattagacttactcagtatagtagtagttgagtcatc

SEQ ID NO: 431497 - DNA, 201 bp, Homo sapiens
ttcagtctctgaagttgctgtcctttggctttttttttttttttttttttttggcttttatcttcttggatgcccttggaggtttgattatggtataaggkgggttcagtcgactggctttgagtctagtctgctcttgggttgtgaaggagccccctctgtttactgtctctatgcctgcatttcttttattggatgttc

SEQ ID NO: 431498 - DNA, 201 bp, Homo sapiens
gtaaaactcaactactcatagcctaccattgactggaagccttattgataacataaacagtcgattaacacatagtttgtatgttatatatattatataatatattcttaaagtaagctagaaaaaagaaaatgttattaggaaaaatacatttacagtactgtattgtacatcataagtttacatagtctgtttataaga

SEQ ID NO: 431499 - DNA, 201 bp, Homo sapiens
taaaactcaactactcatagcctaccattgactggaagccttattgataacataaacagtcgattaacacatagtttgtatgttatatatattatataatatattcttaaagtaagctagaaaaaagaaaatgttattaggaaaaatacatttacagtactgtattgtacatcataagtttacatagtctgtttataagat

SEQ ID NO: 431500 - DNA, 201 bp, Homo sapiens
aaaactcaactactcatagcctaccattgactggaagccttattgataacataaacagtcgattaacacatagtttgtatgttatatatattatataatatattcttaaagtaagctagaaaaaagaaaatgttattaggaaaaatacatttacagtactgtattgtacatcataagtttacatagtctgtttataagata

SEQ ID NO: 431501 - DNA, 201 bp, Homo sapiens
aaactcaactactcatagcctaccattgactggaagccttattgataacataaacagtcgattaacacatagtttgtatgttatatatattatataatatattcttaaagtaagctagaaaaaagaaaatgttattaggaaaaatacatttacagtactgtattgtacatcataagtttacatagtctgtttataagatat

SEQ ID NO: 431502 - DNA, 201 bp, Homo sapiens
aactcaactactcatagcctaccattgactggaagccttattgataacataaacagtcgattaacacatagtttgtatgttatatatattatataatatattcttaaagtaagctagaaaaaagaaaatgttattaggaaaaatacatttacagtactgtattgtacatcataagtttacatagtctgtttataagatata

SEQ ID NO: 431503 - DNA, 201 bp, Homo sapiens
tcttttgtagctggaggaaagactgagtatgtgggtctacaaacaggtagttacatggcagtgacaggagtatttgagattaagatttcagaagtgatacrgctcaactctgaggttaggactttggttgaagtgaagtggacttgatcattggcacttagaatgtaaagaaactaagaagccaggagcattgtaatagta

SEQ ID NO: 431504 - DNA, 201 bp, Homo sapiens
ttttcttgccattatggctttaacaatggtttctcatgttgttctacatcttaggcagaagctactagttcagcatgagtttttgttgtttttctttttcttttttttttttttttgagacagggtcttgctgggttgcccaggctagagtgcagtggctcaagcatggctcatcacaacctgtgcctcctgggctcaagc

SEQ ID NO: 431505 - DNA, 201 bp, Homo sapiens
cttattggaacccccaccatagattaggccctgggcaatgtgtcccatgaagcttggaaagctaaccagattttcaaatgtcctccaagggattgccagcwttggtgttcagcttacatctctggattctccttagttttagggccctaagtattccttactttattgctagctttacagtgaattttcataagatgtgtt

SEQ ID NO: 431506 - DNA, 201 bp, Homo sapiens
attctatttttattttttgcatccaggctggagtgtagcacgatcatagcttactgcagcccccaactcctgggctcagaggatcctccagcctcagcctyccaagtaactggactacaggcacatgccaccatgcccaactaattttttaaaaagtttttatagtgatggggtctcactgtgttgtccaggctgttttcg

SEQ ID NO: 431507 - DNA, 201 bp, Homo sapiens
ctgctaccacacccggctaattttttttttttttgcatttttagtagagatggggttttgctgtgttggccaggctggtcttgaactccttacatcaagtsatctgcccacctcagcctctcaaagtgctgggattacaggtgtgagccaccgcacctagtcagtgtgtctttatagcagtgtgagaactaaccaatacat

SEQ ID NO: 431508 - DNA, 201 bp, Homo sapiens
ctggggtctgagataagacccatttggaattttcttatgttcagtaacacttgtttaatgttaatatcatctcctttttccatcaaaacaagacaagtgtstaccagagagaaggtgctggagcgtccagtgcctgcactacggtggatcaccacaggtccatggtcagggttcaaggagccagattctctcactttaaac

SEQ ID NO: 431509 - DNA, 201 bp, Homo sapiens
tttattcagtctaccgttaatgggtatttaggttgattccatgtctttgcaattgtgagtagtgctgcagtgaacatacatgtgcatatgtctttgtgttrgaacaatttatattcttttgggtatatactaaatagtgggattgtgggttgaatggcagttctgctttgggatctctgagaaattgccaagctgctttcc

SEQ ID NO: 431510 - DNA, 201 bp, Homo sapiens
ccaggtggttttcttcttctcggtctctttcaggagtgccaataatttgtagattcggtcagtttacataatcccatatttctccaagactttattctttwtttttttttttttgagagtcttgctgtgtcacccaggctggagtgcaatggcacaatcttggctcaccacaacctttgcctcccaggttcaaggggttct

SEQ ID NO: 431511 - DNA, 201 bp, Homo sapiens
actgttcgccagccttggtgacagagtgagactctgtctcaagaaaacaaacaaaaaaacagtactttctgaagtagaatctatccatttttgttctaggygagaggttggcaaaccttctctaaaggcccaaaaagtaaattaaaatctacactttgcaggccatgcaagtctctgttgcagctattcagttctgctttt

SEQ ID NO: 431512 - DNA, 201 bp, Homo sapiens
aggtcaggagctcgagaccagcctggccaacatggtgaaaccccgtctctactaataatacaaaaaaaattagcgcggcatggtggcagctgcctgtaatyccagctactcaggaggctgaggcaggaggatcacttgaaactgggagggcagagggtgcagtgagccgagatcgcaccactgtactccagcctgggcgac

SEQ ID NO: 431513 - DNA, 201 bp, Homo sapiens
tctgagataagacccatttggaattttcttatgttcagtaacacttgtttaatgttaatatcatctcctttttccatcaaaacaagacaagtgtctaccasagagaaggtgctggagcgtccagtgcctgcactacggtggatcaccacaggtccatggtcagggttcaaggagccagattctctcactttaaacaagaaa

SEQ ID NO: 431514 - DNA, 201 bp, Homo sapiens
taattcactacattaagtaaaaaaaactatatgatcatctcagaaaattgggggcaggggaggcaagcatttgatgatctaaccttcattctgggtagtcmctttgagaaaactaggattagaaaggaaattcttcagcccagtgaaggatgtctctgaaaaaactgtaggtagtatcatatttaatggtgaaagactgaa

SEQ ID NO: 431515 - DNA, 201 bp, Homo sapiens
aaagtaggagattatctgaagaaggcatgcctaggatgaaattcagcagtaaaaggccccaggctggctgagaccagcatgaagtcacaaatctcatcttycattaggagaaactgaaaatacactccctaacactgaagttttgctagaataaaccataaattttctgtttccgctaattatctttttttctctcagttc

SEQ ID NO: 431516 - DNA, 201 bp, Homo sapiens
cagcatgaagtcacaaatctcatctttcattaggagaaactgaaaatacactccctaacactgaagttttgctagaataaaccataaattttctgtttccrctaattatctttttttctctcagttcaaatcaacatccaataagaacgtatctgtgataggatggatggtgatgatggctgatgaccctgaacatcctga

SEQ ID NO: 431517 - DNA, 201 bp, Homo sapiens
atacttacttattcagaagaaagcataaaaagagaaaaaaaagggacaaatgtaaagcaaatagcaaaatataatagacttaaacctaaccatatcaatartcacataaaatctagaagacctaaacacatttaagaagcagaaatgggctgggcatggtggctcacgcctgtaatcccagcactttgggaggccgaggcg

SEQ ID NO: 431518 - DNA, 201 bp, Homo sapiens
ttcttcctttagtacttctgtggctcctgcccttcttgagactgcattcattcctccccacccccaggaaagattgtaggctttggtgtcagacatttgayattagaattctggcttttttaccagcccctgcaaccttgggcaaatcgcttaaactctctgtctcatttctcatctgtaaaatgagcatcataacaatac

SEQ ID NO: 431519 - DNA, 201 bp, Homo sapiens
tttatttttatttttcagagacagggtctcactctgtcatccaggctggtgtgcagtggcatgatcagctcactgcagcttcaaacttctggactcaagcratcctcccaccttagcctctgcagtagctgagactacaggtgtgcaccaccaagcacagctaattttaaaattttttttgtagagacaggatctcgccat

SEQ ID NO: 431520 - DNA, 201 bp, Homo sapiens
aaagaatgataatgtggatacccatgcacccactgaccactgggaattttcatatgcctcttcatatgccacctccttcccttctactgcaatgggaactrctgccttgaattttttcttttacagtgtgtatgtttctgaatcatatgttgctgcaaatatatgcttttggattttgtttaaattgaattattccatatt

SEQ ID NO: 431521 - DNA, 201 bp, Homo sapiens
aacttagatatatatttttttcttttgatattttatttacaccaagaaaaccctacttgggaatcttcacttatgattctactcaatctaaataaacagtyatgtagaattacacagccacagaaaaacctgctataagtagcacctttaacaatgtttaattttagagcttacctaattctgccaaaattttttaaaata

SEQ ID NO: 431522 - DNA, 201 bp, Homo sapiens
tgttcttttcatggcttgattgctgatttctgtttagcactgaataatattccattgtccggatgtaccagtttatttattcactcacctatcaaaggacrtcttaccttggttatcttatatttattaataactgccagactcttggcagttattaataaagctgctgtaaatgtctgtttacaagtttttgtgtggaca

SEQ ID NO: 431523 - DNA, 201 bp, Homo sapiens
ctgacccaaagatacaaagtgagcacatgctgttggaatgttggaaaaatggcactgacagacttgctcagtgcagagttgccacaaaccttgaatttgtaaaaaaaaaaaaaaaaaaatgtggtatctgcaaagtgcagtaaagtgaagtgcaataaaatgtggtgtgtctgtactggttttgctaatgaatagagatac

SEQ ID NO: 431524 - DNA, 201 bp, Homo sapiens
tggggatagttttctaccacccacccccatctgttcccctgtagttagatggggtctgcagctccctgctgtctggacttgagctgattaagtaacaccaygtgcagtcgccaggatgaggacagaagggacatctgatcctgcgctcccctctgcttctgtctgcaggcacaccgtccctgcagtctggtggaagaacgc

SEQ ID NO: 431525 - DNA, 201 bp, Homo sapiens
ggacacagcaggagtcagcgggagggcacagacctgccccctgccaggcagaaaatgggcctcctcaagcacaaaagtgaccaagtacaattttcagttgmtaaaacaagaaaaggcttcagctagtttcatttccatgtgtagttattttctcttttgaataagcaaaaccaagctaagctgtgtcagccaacttcatcc

SEQ ID NO: 431526 - DNA, 201 bp, Homo sapiens
gatttaatctagcatttactgaccaatgtgtgactgtgggactcctcaggtttctgtctgaagcatgacttgttttgcacagagctgctgagtgggacttrgtcagccctcttcttggttaacatgagtctgtcctattgcaggagggtgtttatggtggtgagacttaggctggaagtactaacaactcctgcatacatt

SEQ ID NO: 431527 - DNA, 201 bp, Homo sapiens
catcctggctaacatagtgaaacttgtctctactaaaaacacaaaaaattagctgggcttggtggcaggcgcctgtagtcccagctgctcgggaggctgagggcaggagaatggtgtgaacccaggaggcagagcttacagtgagccgagatcacgccactgcactctagcctgggcgacagagcaaggctccgtctcaaa

SEQ ID NO: 431528 - DNA, 201 bp, Homo sapiens
gggtgtggtggctcgtgcctgtagtcccagctaatcaggaggctgaggcaggagaatcgcttgaacccgggaggcagaggttgtagtgggccgagatcgcrccactgcactccagcctgggcgacagagcgagactccgtctcaaaaaaaaaaaaagagggaaagtaaaacaccctataaatatttaatttaatttgaaac

SEQ ID NO: 431529 - DNA, 201 bp, Homo sapiens
caagttttaagagttctttgtatattttgtataactgtctttcatcagatatacttttgttaatatgtttttccgagtctgtggcttatcttctcattctkttgacattgtcttttacagagcagaagatttcaattttaatgaaacctagcttgttaatatttctttcatggatcataccttggtggttttgtatctaag

SEQ ID NO: 431530 - DNA, 201 bp, Homo sapiens
attccattctaagggcataccatggtttgtttatccattcactcattgatggccatttgggttgtttctgtttttggctactgtgagtaaagctgtgaacttttttttttttttttttttttttgagacagagtttcactgttgttgcccaggctgaagctgtgaacatttttgaacaagtctttctgtggacataggctt

SEQ ID NO: 431531 - DNA, 201 bp, Homo sapiens
ctttgggaagttgaggtgggcagatcacatggtcaggagatcgagaccatcctggctaacacagtgaaaccctgtctctactaaaaatacaaaaattagcygggtgtggtggctcgtgcctgtagtcccagctaatcaggaggctgaggcaggagaatcgcttgaacccgggaggcagaggttgtagtgggccgagatcgc

SEQ ID NO: 431532 - DNA, 201 bp, Homo sapiens
gcagatcctcctggtgggcactggaggccagggagaaaaagagcctccccgcagcccagatccagcatgcaaggtgctagatttctcggcaattccacagrgaaggacagtagcctgttccctgccctctctcttgggcaatgggaggcaggttgccagccttggggaggggcaaggctgtgaggggctcacccccacctc

SEQ ID NO: 431533 - DNA, 201 bp, Homo sapiens
ttccattctaagggcataccatggtttgtttatccattcactcattgatggccatttgggttgtttctgtttttggctactgtgagtaaagctgtgaacttttttttttttttttttttttttgagacagagtttcactgttgttgcccaggctgaagctgtgaacatttttgaacaagtctttctgtggacataggcttt

SEQ ID NO: 431534 - DNA, 201 bp, Homo sapiens
tcaataaaaggctgtagtgctctggtgggctgtgcaccgtgcgcagatcctcctggtgggcactggaggccagggagaaaaagagcctccccgcagcccaratccagcatgcaaggtgctagatttctcggcaattccacagggaaggacagtagcctgttccctgccctctctcttgggcaatgggaggcaggttgccag

SEQ ID NO: 431535 - DNA, 201 bp, Homo sapiens
cacagacctcagcagggcccaggttccagcccagatcccagcatgtggtcagagctggtgtgactgaagccaacaggtgacacggtcatcgaagagcagcrgacaaaactaaaactaacccaaaggcagctgaaagtggagggcaggtgaattcccagccctcgccggattcaacttttgccaacggtgaagaactgccct

SEQ ID NO: 431536 - DNA, 201 bp, Homo sapiens
tcaagaaggtatctcttagtgaaagtcatgtcttggttcagaggctagggagggcttttttggaaataggtcagatctatcatcatgcatttgttttttgktttttttttatttattattattatactttaaattctagggtacatgtgcacaatgtgcaggttagttacatatgtatacatgtgccatgctggtgtgctg

SEQ ID NO: 431537 - DNA, 201 bp, Homo sapiens
atgttcttccatttgtttgtatcctcttttatttccttgagtagtggtttgtagttctccttgaagaggtccttcacatcccttgtaagttggattcctamgtattttattctctttgaagcaattgtgaatgggagttcactcatgatttggctctctgtctgttgttggtgtataagaatgcttgtgatttttgtacat

SEQ ID NO: 431538 - DNA, 201 bp, Homo sapiens
gcatgattttgcagtggctggtaccggtttttcctttccatgtttagcgcatccttcaggaggtcttttagggcaggcctggtggtgacacaatctctcascatttgcttgtctgtaaagtattttatttttccttcacttatgaagcttagtttggctggatgtgaaattctgggttgaaaattcttttctttaagaatg

SEQ ID NO: 431539 - DNA, 201 bp, Homo sapiens
gtttggctggatgtgaaattctgggttgaaaattcttttctttaagaatgttgaatattggcccccactctcttctggcttgtagagtttctgccgagagrtctgcttttagtctgatgggcttccctttgagggtaacctgacctttctctcttgctgcccttaacattttttccttcatttcaactttcgtgaatctga

SEQ ID NO: 431540 - DNA, 201 bp, Homo sapiens
gggtaacctgacctttctctcttgctgcccttaacattttttccttcatttcaactttcgtgaatctgacaattatgtgtcttggtgttgctcttctcgaggagtatctttgtggcgttctctgtatttcctgaatctgaatgttggcctgccttgctagattggggaagttctcctgggtaatatcctgcagagtgtttt

SEQ ID NO: 431541 - DNA, 201 bp, Homo sapiens
caacattacaggaaaagtagcaatctcttgggccccagaatgtggttaaaatattcttcacagcaaatctatctgaaaccaaatttataaattagataaayaagcttttaaagaaacatagcacctacaatgtaaggcattattctactttaaatacattttcataagcaaaacatcatgattattctaaaaacaaagaat

SEQ ID NO: 431542 - DNA, 201 bp, Homo sapiens
gcctcggcctcccaaagtgctaggtttacaggcatgagtcaccacgcctggctggctgcatttatttcttagggccgctcaaacaaacctgcaaactgagwggcttaaaataaatgtatcctctcatggttgtggaggctgggagtctgaggtcgaggtgtgggtgggcccagctcctcctgagatgctgaggtggaccct

SEQ ID NO: 431543 - DNA, 201 bp, Homo sapiens
gagaaaaagagcctccccgcagcccagatccagcatgcaaggtgctagatttctcggcaattccacagggaaggacagtagcctgttccctgccctctctyttgggcaatgggaggcaggttgccagccttggggaggggcaaggctgtgaggggctcacccccacctcccagtgccaggcctgctgtccaagcagagcac

SEQ ID NO: 431544 - DNA, 201 bp, Homo sapiens
aaagattcttgtcactggtatccagaatgaatttgaataagctttacagaaaagtgattaatttggaccctccccagtgattaacagtattcgatgtggcytgagttaaaattaacctcagtatctctctgaaggagggtttggctagatagaccagcagcttcagagtgcccagccaggtgtggaccatgagcagactgg

SEQ ID NO: 431545 - DNA, 201 bp, Homo sapiens
tttaaagaaacatagcacctacaatgtaaggcattattctactttaaatacattttcataagcaaaacatcatgattattctaaaaacaaagaattagctaaaaaaaaaaagaaccctgaatagtataaataagaaaatgaacattactctgagaaaatgcttgttaacaccgtagtttatttcctactgaccttttttat

SEQ ID NO: 431546 - DNA, 201 bp, Homo sapiens
tggtttctgtggaattttgtgctggccttgtaggtattgtagtctccttgagtgaacttggaccttgtgtgttttttcacgctgtgtatttacttttggaratgtgggaggagaaaggtgcagaagtatcaagcccatgaggtcaaaggcagaggctctgggcacatggccctgggaacagtcctacaagcgaggctccaa

SEQ ID NO: 431547 - DNA, 201 bp, Homo sapiens
actctgtggctagattggtttgcacatagtgagtctggccttatgcgtttgggagtttgaggcttggaaagctgggcctgatattgctgaggcagcaggtragctggtggagtgggaggaggaggaaaggaggaggccgcagaggaacacaggaggtactgagaggtgccggactccctctgcaggcatctgggcttatga

SEQ ID NO: 431548 - DNA, 201 bp, Homo sapiens
tcaagatggactaagtgctgcttctctgccaggccccagtggtaactggcacattgcaagcctttgtggcccagaggaggctggcctgccagtcagggaaygctcctgctgaagctgtcagtgccatccacacagcctgcagttccgtggttattgattctagtgatggggatagttttctaccacccacccccatctgtt

SEQ ID NO: 431549 - DNA, 201 bp, Homo sapiens
gcaagtggctacaaacagctcttgcagcatctttttataaatgacagaactgtggttggctgtgaataaggttcagttctgcagtgcccatcacatggttaaaaaaaaaaaaaaaagatcctgcctataactttaggttagaaagggatgccgtgactttcagtgtttgctgccccctcccaatcctgcagagactgcctg

SEQ ID NO: 431550 - DNA, 201 bp, Homo sapiens
atgtgtccatttttcctttaattttagtaagggttcattttcatggtgatgtctgattttaggggtagtctttttactttaatggagatttagtttacatmcagtgaagggtacatatcttaagtgtacagtttatatacctatatctttagagatagataggtagagctaccacccagattgagaactagaatgctttta

SEQ ID NO: 431551 - DNA, 201 bp, Homo sapiens
aactcgtgacctcgtgatccacccacctcggcctcccaaattgctgggattacaggcgtgagccacagcgcccggcctggaatatttttaaacaatttttyttttaagaaagttccgtcacccaggctggagcacagtggcatgatcatggcccactgcagcccagacctcctgggctcaggcgatcctcccatatcgatg

SEQ ID NO: 431552 - DNA, 201 bp, Homo sapiens
gttccatcgtcccctcctgccctgtgtacctgcttgcctttctcagctgccccacctcccctgggctggcccactcacccacagtggaagtgcccgggatytgcacttcctcccctttcacctacctgtacacctaacctggccttagactgagctttatttaagaataaaatcgtggtggtggtccttttgtctctctgc

SEQ ID NO: 431553 - DNA, 201 bp, Homo sapiens
tttgatcgtctgaagccttcttctctcagctagtcaaagtcattctccgtccagctttgttccgttgctggtgaggaactgcgttcctttggaggaggagwggcgctctgctttatagagtttccagtttttctgctcttttttttccccatctttgtggttttatctacttttggtctttgatgatggtgatgtacagat

SEQ ID NO: 431554 - DNA, 201 bp, Homo sapiens
gagctgcacatgggagaggcctcctgggcagacagtggagagcccatggcgccgcctcagggcagggggcactcgctggggaacggcatctccatttgccrtcttaagtctaactgggatttgcctacacaggaaatactgacttgcagttcctgatgtgctgaacaaaaatgccagatttatgaatctacaaatgcattt

SEQ ID NO: 431555 - DNA, 201 bp, Homo sapiens
tacctccctgacttcctgtccagccagccaggaggcagggctgtgcagccgggctgccgggttcaaagccagttctttttttttttttttttttttttttttgaaacagggtctctctgtcactcaggctggagtacagtggtacaaccttggcttactgcagccttgacctcctgggctcaagtgattctccctcctcag

SEQ ID NO: 431556 - DNA, 201 bp, Homo sapiens
aaggggaggctgccaagctggtgttcctcaggctgggacccccatgccaggccactgcctcaggctctgacccctctctccccagctctatagcatcgccrcaccagctcgaagcttccgagatttcaaagttcagtttgtgccctttcattcagaccttggctacaggcacaaatacatttacaagagccctgagctgcc

SEQ ID NO: 431557 - DNA, 201 bp, Homo sapiens
acctccctgacttcctgtccagccagccaggaggcagggctgtgcagccgggctgccgggttcaaagccagttctttttttttttttttttttttttttttgaaacagggtctctctgtcactcaggctggagtacagtggtacaaccttggcttactgcagccttgacctcctgggctcaagtgattctccctcctcagc

SEQ ID NO: 431558 - DNA, 201 bp, Homo sapiens
caggcctcgtccacggattcagcccagggctgggagcacttcctgctctgacagcccccatgcagtcaggctccataaggcacacagatgacggagccacrcagggcaggggcagaatgcagagccgcccagcagcgcacagctcaggcccacctacccttgccgaaatgagagggggagggggctgagatgggtacatca

SEQ ID NO: 431559 - DNA, 201 bp, Homo sapiens
agccactgtgaactcttacaatgataactgaaaatattttgcagtgtttcctccttgtcttgaaactcattcctttattttttattttaatttttgagacagagtctcactctgttgcccaggctggagtgcagtggcacaatcctgactcactgcaacctcagcctcctgagttcaagtgactctcctgcctcggtctcc

SEQ ID NO: 431560 - DNA, 201 bp, Homo sapiens
tgaggcaggagaatcgcttgaacccgggaggcagaggttgtagtgggccgagatcgcgccactgcactccagcctgggcgacagagcgagactccgtctcaaaaaaaaaaaaagagggaaagtaaaacaccctataaatatttaatttaatttgaaacagaatatgaaaaaaaatggagtattttttcccatcaagtatgt

SEQ ID NO: 431561 - DNA, 201 bp, Homo sapiens
cacctcatcctccctgcgtcacctccaggctgcttcggaaggacatgggaggtctggtgtaaaggttggggcaggggcccactgatgctgtctccaagaactatgaaaaataagcagatagttcccagtcctcacacaggggttatcagagtgggctgcctatgttatcagagcccaggccaacctgggaactcagctgga

SEQ ID NO: 431562 - DNA, 201 bp, Homo sapiens
gaaggacatgggaggtctggtgtaaaggttggggcaggggcccactgatgctgtctccaagaactatgaaaaataagcagatagttcccagtcctcacacaggggttatcagagtgggctgcctatgttatcagagcccaggccaacctgggaactcagctggaagggctcatcagttatgggctgaaggcaaagaacccc

SEQ ID NO: 431563 - DNA, 201 bp, Homo sapiens
aaggacatgggaggtctggtgtaaaggttggggcaggggcccactgatgctgtctccaagaactatgaaaaataagcagatagttcccagtcctcacacaggggttatcagagtgggctgcctatgttatcagagcccaggccaacctgggaactcagctggaagggctcatcagttatgggctgaaggcaaagaacccct

SEQ ID NO: 431564 - DNA, 201 bp, Homo sapiens
cttatcttactttttggtgctgcttttcttaaattgtgtgaggaaactgtccatagaccccactttctcaggggtggcggccctggtgtctgcgggaagaytggtttctggggtggattctggcctggctgggaggtgcgggagccccatttgcagggcagcccctgccatgccagtctgtggggcctggcgggtgattct

SEQ ID NO: 431565 - DNA, 201 bp, Homo sapiens
tttagttgccaaaggtctagcaccaagaaacagtgtccctgggagcagcgattggacattcctttcgcctcacccccctgggcatctgcctggcccccacrccccactcctcctgcctctccatgatgagcgaccctcatctccaggccccgctgtcctccccgggaagccacagtgttttatcagcacatgaggcccttc

SEQ ID NO: 431566 - DNA, 201 bp, Homo sapiens
ttttctggattagctgctaatccttgtaaaatacttttcagtggccagggaatgctctcagaactcttggacagtttgtgttccaagagcttggcattctwctgcagacacagaactgagtgaggcctgaagcggagccagtggaagcccagtgtcctcggccctcagtggtgcccactccccatctgtcagagtcagggc

SEQ ID NO: 431567 - DNA, 201 bp, Homo sapiens
tcagaggcaggatttggctgagtgggtctagatgtgggatgggcactgggccccaggtgtggatattcagagttgtattgaggaggctacccccgctcccrgctgtcagattatagacttgcaccctgggctgcagctctcaggctcccaaagtgtgtggtgaattcccaggatgaggtggcaggagtgggccctagagtc

SEQ ID NO: 431568 - DNA, 201 bp, Homo sapiens
ctgcagtgtgtgcatgtgggtgtgcatgtgtgtgtgtgcacgtgtggatgcatatctgtgcacgtgtgtgagtatgcatgtttgtgtgtacatgtgtgtaytcatccaccagtaatcctaatttccatctctttatttcctacagtaagagttccctatttcattgatttgaaaaaaccacaggatcaaggtttgaatcac

SEQ ID NO: 431569 - DNA, 201 bp, Homo sapiens
gggccctagagtctgaagtggactcactttcccactccagatcctgaagtggacccactttccaggcattcctctggtcgggagccttctccgggtcccawtgccaggataaaatctaaattcttgtatggctgtgttcttttttttttttttccaggagactggcgttttgttattactcaaatcactctcccgtagcat

SEQ ID NO: 431570 - DNA, 201 bp, Homo sapiens
caacattctgggcatactcacacaggcatggctggggatccacggcttgcatggcaaaggcattactattgtcatctatagttttagcactgcatttaagrgaacagtgtactataaggttaataatggggactaaggtaaggagtgcaattcccaattttaaaagtaaaaattggaatgcattagtttggtgacttgtag

SEQ ID NO: 431571 - DNA, 201 bp, Homo sapiens
ctgaggcaggagaagcgcttgaacctgggaggcagagcttgcagtgagccgagactgcaccactgtactccagccttggcgacaagcaagactccatgtcaaaaaaaaaaaaagaactgttaagagagaagatagattcttctgcacctcagcatttctgcttttttgaatgaaccagggcttgccactgaacaaatcaag

SEQ ID NO: 431572 - DNA, 201 bp, Homo sapiens
caccacgcctggctggctgcatttatttcttagggccgctcaaacaaacctgcaaactgagtggcttaaaataaatgtatcctctcatggttgtggaggcygggagtctgaggtcgaggtgtgggtgggcccagctcctcctgagatgctgaggtggacccttcttgcctgtctgtctggcagcattcccggcttggagaa

SEQ ID NO: 431573 - DNA, 201 bp, Homo sapiens
agggagagctattttattttttttaagagagggtttcgccatgttgcccaggctggtcttgaactactgggttcaagcagtctgcccaccttggcctcccraagtgttgggattacaggtgtgagtgagccattgcaactgactgcgagactgttttaaagtgtattctggctgggcacggtggctcacgcctgtaatccc

SEQ ID NO: 431574 - DNA, 201 bp, Homo sapiens
tttgaggaagtgaggctagatgtgcaatgtgccacatggacatgggagtcacgcaacccctgtcttcaccagagacagctgtcagcagcagagcttccccrggggcaggacccaccagagggaagccaggcccacactgctctctgtcattgcctcttttgggagttgccattttataaagcaggcaaatcccacctcagg

SEQ ID NO: 431575 - DNA, 201 bp, Homo sapiens
agcagtcctggaaactttggaatcccctttaccttgtttgccacccaacgttccgttggtcatcaggtcctgcagcgccatcccctttcctgctgtccttyccactccaccaggcacctgagttattcgcaggctcagcctccccagcctccctcctggctggcccatccttcagacctgttggggatctttccttccctc

SEQ ID NO: 431576 - DNA, 201 bp, Homo sapiens
tacagtgtcttctacgtctgtttagaatttgctatgtcctggtttcagttttggtggtttatgtattcttataaaattaccaatttaattcaccttttctsctctgtagctatggccatttccctagttttcttccctgttttttgtaattagggtttttcctccgttttcctctttttttttttttttttttttttgagt

SEQ ID NO: 431577 - DNA, 201 bp, Homo sapiens
ttctctgctggctaggagttccctggctctttgtcaggagcccaggtttggggcggctggctactggaagcacatctgctcccagcaccttcaaaatgtgmcgtcctatccctcaaatttataactgtatgggagtgatgatcatagtgactagaaccatcccaaaagtgatccttttgaacggatcagagagagacgtta

SEQ ID NO: 431578 - DNA, 201 bp, Homo sapiens
aacacttgtccttccagagtgaaatctgcagggaaaatgtttattgaaatataacctcaaaagctgacagatgaagtcaatgctcttcacccagagatgaygccacaggactttggtctcagtgtgcttgtgctttggcaggggccctttcagcatgagagtgggtaagccatctatctcgtgccacaccgagagccagcg

SEQ ID NO: 431579 - DNA, 201 bp, Homo sapiens
gctccaggtggcagacaggtgaagccggagccagggcagccctggaggaggtggcacacttcctggaaaaaagtggcaggtgctgagaaggggcaggaggragaggctgaaagcaccaggtgctggggtctttgcaggccaccctacagtgtgagctctctgctcaccctaacgggctgttgctgaagttcatgcactctt

SEQ ID NO: 431580 - DNA, 201 bp, Homo sapiens
gagaaatggcatggtgtgtgtcatcatgtcactctgactgtgtgacaagcacagactgcggtgggcaagcagggagaccggctaggggctgccagggtcayccaggcaagagatgacaggggctcaggccgggacagcagctgtggagataagaagaggcatgtgattctggattcacaaactactttctgagcaacagga

SEQ ID NO: 431581 - DNA, 201 bp, Homo sapiens
gccacctaaagaaggcctgttgcagaagaaagcctgatctgcaattggatttggtgacacgagatcagtattgacaggagtggcttactgcagtggtgggrgcaaaagcctaatggtgagggctcaaggaagaagtggagagaggaaatgcaggtagcttttccagggagctgtgcagtaaagggggaaagacagggaggg

SEQ ID NO: 431582 - DNA, 201 bp, Homo sapiens
aaactccatctcaaaaaaacaacaaaagaaaccactcaatggtaattgtattccatgtgttccagaagttaagtggagttatggaaaacctgaaaattacygaaatggaatttctaaagatgaaaaccacaatgtgtgagataaaggttacactgaagggaattacactgaagggcagattaaacactgctaaagaaaggg

SEQ ID NO: 431583 - DNA, 201 bp, Homo sapiens
cctagaatgaccttagaccttagcgttccagtctctacacagaccttgccctcactgcagtctctgtccctgcccatgctggctggcctcagcccataccytgcctgaggctgggcctgcaggtctggcaccattgtaagattgcacaggaaaaggacttggtgctttctgagagcttctgcagtgtgtgcatgtgggtgt

SEQ ID NO: 431584 - DNA, 201 bp, Homo sapiens
ctgctgtgtatctgtggagttgacatgttctgcatagttgagtgctcccctgctctgggaagcctgcacggggtccctgcacacatcccagcatggagggkctcagggctgggtttgagacgaaggtgggcgaaaggttcacatgaactgaggtcatgacagagtgatcaggtgggaccaggcagaactctcggcccccag

SEQ ID NO: 431585 - DNA, 201 bp, Homo sapiens
aaattatcttcagttcttatcaggctggtggagtcttcaaacaaagcttggggtatattgactgaactgttcgtaatgggaaggtaagaatgttcagggtmaatgccggtcattttgatgtggtagttcagatcactagaatagatatggcttttaactttcaactatttttttctcctaataatgtgtacatcatatatg

SEQ ID NO: 431586 - DNA, 201 bp, Homo sapiens
gaaggtaagaatgttcagggtcaatgccggtcattttgatgtggtagttcagatcactagaatagatatggcttttaactttcaactatttttttctcctmataatgtgtacatcatatatgccctaccccttcatccttgacctttgccactcctggtcctggataaccacattgctcctacctgaaagtggccctgtca

SEQ ID NO: 431587 - DNA, 201 bp, Homo sapiens
agaacgtggggtccaggttctttctgcaccttcccagcacatgcagaatgactccagtggttccatcgtcccctcctgccctgtgtacctgcttgcctttytcagctgccccacctcccctgggctggcccactcacccacagtggaagtgcccgggatctgcacttcctcccctttcacctacctgtacacctaacctgg

SEQ ID NO: 431588 - DNA, 201 bp, Homo sapiens
tgagctggacagggggagtccgggcaggggactcttggggctcgggaccatgctgagctttttggcaccacccacagagaacgtggggtccaggttctttytgcaccttcccagcacatgcagaatgactccagtggttccatcgtcccctcctgccctgtgtacctgcttgcctttctcagctgccccacctcccctggg

SEQ ID NO: 431589 - DNA, 201 bp, Homo sapiens
ttcctccagtcagcagcccggtatcctgaagccccggggggccggcacctgcaatgctcaggagcccagctcgcacctggagagcacctcagatcccaggyggggaggcccctgcaggcctgcagtgcccggaggcctgagcatggctgtgtggaaagcgtgggtggcaggcatgtggctctccttgccgcccctcaacct

SEQ ID NO: 431590 - DNA, 201 bp, Homo sapiens
acctgggcctgagtgcagagcccaagcctgagggtgaggccttggcagtagtgacaagggcagtgtgtggaatggaccaacccccggcctcctctgtactkccctgggccctatgcaggttgctgcccagactcgcctacctgcctgtcagaggacacaggcccccaccccactgcctggctgtgtggccttgggcaagat

SEQ ID NO: 431591 - DNA, 201 bp, Homo sapiens; identical to SEQ ID NO: 116741

SEQ ID NO: 431592 - DNA, 201 bp, Homo sapiens
gctctgagggcaggaggggctttcctgagctcaggtgggccgtggtctgggaaatcccaagtactgccgcttcctccagagcctctggtgagagggactcrcacatcagacaagccttactgggaagcaagagtgtgtgcctcctgccagcagcacagacagggcgggggctccccaccgggtcctgctccaggtgccagg

SEQ ID NO: 431593 - DNA, 201 bp, Homo sapiens
gagccttggggccatccgctggaagaggaggacattacaatcacttgttcgttgaaaaggggaccccacggaccaggaaagctaccgcattctagatctarggagcaaggagctggagagaaggtcccagcctcgaaaattcctgctagggcatggcccccaggacgacgatagggatagcaccaggtaagaactgcccag

SEQ ID NO: 431594 - DNA, 201 bp, Homo sapiens
catctcctttttccttttgctccaccctcagtacagtctgggccaggactgtgacaaggcatggggctggctttgtttatggcgccatagctggccccccycctcaactggtactggttttcctcttcctaactcagtgtaccttatcaatgctgcactccagccagggactggccacactgggacttggtgctttgccac

SEQ ID NO: 431595 - DNA, 201 bp, Homo sapiens
agaacccagggtgggtgcggaggggatacattttctgaacaaagcattgtttgaaaaccaccaaggtcttcgtgtgtgagagaggcagccaggagccagcrcagaggcagacccagcacggagacagggctgctgcggggccagggccgaggtcccgtgtggcaccagggtatgtcagggctgggggcaaacattttatag

SEQ ID NO: 431596 - DNA, 201 bp, Homo sapiens
actgttccttttttgcttaatgtaggaaattttagaaacttagagccactgtgaactcttacaatgataactgaaaatattttgcagtgtttcctccttgycttgaaactcattcctttattttttattttaatttttgagacagagtctcactctgttgcccaggctggagtgcagtggcacaatcctgactcactgcaa

SEQ ID NO: 431597 - DNA, 201 bp, Homo sapiens
cagtcaagatgaccatgagaggccagggtggtgtggctaagcagagttctgaaggtcggctgagacgtgcggagcaagaagtgagggcagaagtcgcccayacgggtcctgttggagcacagcctctgtctacacagggtgtccttggcacagggaagctgggagggtctggggtgtggtggatgaggccttgctgtgttt

SEQ ID NO: 431598 - DNA, 201 bp, Homo sapiens
cggccagggcagaaggtgccagggcacagctctggtggccccttggcaatgtcacccctgctcccttaggtagggtagttatgggcaacgccttatagatwtctgaacttaaactgtctgcacccttgacctgtgcctggatatcttaaccaacgcttctgaaaatggtttccatcttgtctccagatatatcgatacttc

SEQ ID NO: 431599 - DNA, 201 bp, Homo sapiens
gtggatgaggccttgctgtgtttcctttagtgtctttctagtttggggctgtaggtgtgcattacctactgaaaaataaaagcagtcattaagaaatctcycccaaagtgctaagaccatctcccccttggcacagcactgccagaggcgagtgtggggctacttagggggacccaaggaagaggttctgccctctttcat

SEQ ID NO: 431600 - DNA, 201 bp, Homo sapiens
atctggttgtctgggtcttggagcccaagagatactgttgaaacagcctcactctcctcccctcagagggccatctgcactggcccacagggcagaagggracacagacagaggcaggggcacagacagaggcgggggcacacccagctctgagctattggaggattttacccgtggagtacattgcattaagtcaggaaa

SEQ ID NO: 431601 - DNA, 201 bp, Homo sapiens
ctttttttaccaacagattcctagtaacattcatttacactaagtttcttggcccacctgaattattccgcttaaaaatatatatatctggtggaaaaatmatcattttcaattttcagaagacattccgagggccagttatatagctgtgattgacacctgtcatctagctgtaatagatgttcatagagataatgaaga

SEQ ID NO: 431602 - DNA, 201 bp, Homo sapiens
attatggagattgttgttaagatttccgcctaaaagctaagaagaatttaatctgttagtcttggggaatgagatttggcgttactctcttgttccttctmagagaataccatggaattaaatgataaaacacttttcctcaacaattttgatggttacattaatgaaggagttgatgaaaactaattgtagacattatta

SEQ ID NO: 431603 - DNA, 201 bp, Homo sapiens
attttacccgtggagtacattgcattaagtcaggaaaggtggggagagtttgagaagtgattggtccttttttcagttttctgttaaaagaaatgattcaycctgctgaggtcaacagggctggagcaggttggctctggttatagcctctgcggtggctaggagctggcaaggaagtgcaggctgccctggggaagcacc

SEQ ID NO: 431604 - DNA, 201 bp, Homo sapiens
tttagtagagacggggtttcaccgtgttagccaggatggtctcgatctcctgacctcgtgatccacctgccttggcctcccaaagtgctgggattacaggygtgagccactgcacccagctaattatagacatattttaaaagaaacatagaacttccactactgaccaaggtggctgaatttacccggaaataacccaaa

SEQ ID NO: 431605 - DNA, 201 bp, Homo sapiens
gtcttgttatattgcccaggctggccttgagctcctgtcccaggtagttctcctactttggcctcccaacgtgctgggattacaggtgcgtgcactgtgcrgcctcattgtgctgctcactgcccagtcctcattcgagatgcctgcctcgctaagcatttcccttcctgcctcattcatatgcacagcagcccattaggg

SEQ ID NO: 431606 - DNA, 201 bp, Homo sapiens
tgcggccggacactgctcctggccccctagcgtctaagcaggaggaagggagagccttcctgcgctcccaggcagggatgtcagcaagtcctgcagtggcrgttggcatcttggtttcataaaacccagccaggagtcaggcagcatgtcacagtctttatgaagctgccactacgtacaaggcagaggagagaaagttgg

SEQ ID NO: 431607 - DNA, 201 bp, Homo sapiens
aggatcacttgagcccaggaatctgagaccagcctgggcaacaaagggagacctcatcaaaaaagaaaaaaattgaacaattagccaggcgtggtgtgcaygcctttgattacaactaattgggaggctaaggtgggaggattgcttgagcctgggaggtcaagactgcatgagccatgatcaagccactacactctggtc

SEQ ID NO: 431608 - DNA, 201 bp, Homo sapiens
tttttctaattataacaattctatcttaggattttattgcacttaatagtttggcttgtcagatttcttttggtgtcactgtctttcaccatccatttggsatcctgtggttgtgtaaatggggaaccaaaagggtcctcatcatggccatcaggaaagatgggctgtgtccagttccaatggacagtgcatcttgtacac

SEQ ID NO: 431609 - DNA, 201 bp, Homo sapiens
ataacatagtttttgtccatagagttgttttatttcaaaatggtttgtgaaaaccaaaacacatattaaaacagtgatattaactggttgatttttcttcttttttttttttttgtttttgtttttttgagacggagtcttgctctgtcacccaggttgtagtgcagtggcgtgatctcagctcactgcaacctctgcctc

SEQ ID NO: 431610 - DNA, 201 bp, Homo sapiens
aatgctctggtatccaaggtcaatcatcagcctgactggagatcttcccagagcaggaggtttgtggcagctgactgtcataaagttctgctctagtcagrtaagggaagttcagataagatgtctttctgcatttgctgtaattctgttaacaggtttctctgggatccccaaagggggtccattgagtctgttgagggg

SEQ ID NO: 431611 - DNA, 201 bp, Homo sapiens
agcccaggaatctgagaccagcctgggcaacaaagggagacctcatcaaaaaagaaaaaaattgaacaattagccaggcgtggtgtgcatgcctttgattmcaactaattgggaggctaaggtgggaggattgcttgagcctgggaggtcaagactgcatgagccatgatcaagccactacactctggtctgggcaacaga

SEQ ID NO: 431612 - DNA, 201 bp, Homo sapiens; identical to SEQ ID NO: 116743

SEQ ID NO: 431613 - DNA, 201 bp, Homo sapiens
acaggatcaaggtttgaatcacacgtgtaactactacctgcagccagaggaagacgtgaccattggagtctggtgagtgccagtgagctctgcagcccctycagcagcaggaaaggaccctacatgactgagctggtgctgtctttgacattggcctctgaaatgttgttcatttttatcttcacctcttcctttcctaaa

SEQ ID NO: 431614 - DNA, 201 bp, Homo sapiens; identical to SEQ ID NO: 116744

SEQ ID NO: 431615 - DNA, 201 bp, Homo sapiens
gcacacttcacgaaatgcagagttcacaattttaaaagcacttcctttatcacagacctcagcagggcccaggttccagcccagatcccagcatgtggtcrgagctggtgtgactgaagccaacaggtgacacggtcatcgaagagcagcagacaaaactaaaactaacccaaaggcagctgaaagtggagggcaggtgaa

SEQ ID NO: 431616 - DNA, 201 bp, Homo sapiens
caggcctctcaggggccaggctcattacctccctgacttcctgtccagccagccaggaggcagggctgtgcagccgggctgccgggttcaaagccagttcyttttttttttttttttttttttttttgaaacagggtctctctgtcactcaggctggagtacagtggtacaaccttggcttactgcagccttgacctcctg

SEQ ID NO: 431617 - DNA, 201 bp, Homo sapiens
ccctgactcctctccctttttctctgatgaggacccttgtggttattttgggcccacccagcttgtccaggatcacccccatctcaaggcaagcagttagyagctttcattccttccatacctttcattccccagccatgtgacccaacgcgttcacaagttccagggattaggtcatggacacttttgggggccaccatg

SEQ ID NO: 431618 - DNA, 201 bp, Homo sapiens
tctgatgaggacccttgtggttattttgggcccacccagcttgtccaggatcacccccatctcaaggcaagcagttagtagctttcattccttccataccyttcattccccagccatgtgacccaacgcgttcacaagttccagggattaggtcatggacacttttgggggccaccatgctgccaaccacagggaagaaag

SEQ ID NO: 431619 - DNA, 201 bp, Homo sapiens
gagaagtgagctcactcccctgcccaagagggtggggcaagtcccagccctggcctgaggatgccggtgccagctctgaagctctgtgatctgttctgttractcagcttgctgttagttgccattcaaatgtgcagctcaccaacttagagtgaccctgtgaggggatgtctggtttgtgcagtcagcaggggcagggca

SEQ ID NO: 431620 - DNA, 201 bp, Homo sapiens
gtatgtcgctggcttcctgcctacctctcagttccctgtttgtttatctagagacgcctccagatgcccttatattggaatctccattcactaatatccgygaagaagctaagagccatccattttcagtggcaagtacagattttattaaaaattaacttttcattattaagataaattatagaaataactaattacagg

SEQ ID NO: 431621 - DNA, 201 bp, Homo sapiens
ctgcccagactcgcctacctgcctgtcagaggacacaggcccccaccccactgcctggctgtgtggccttgggcaagatgctaaccctccctgtgcatggracaaggcttctgagccgaggagggcatgtggtacttcgaccctaagcactggacccacggaggggctgctgctaatggtgatagagttttttgttgtgtt

SEQ ID NO: 431622 - DNA, 201 bp, Homo sapiens
agtggcaagtacagattttattaaaaattaacttttcattattaagataaattatagaaataactaattacaggatacattataataattattaaaaattrttatttaaatattctaatgaatacagatttcattaaaaattaatactagttttggccacagagctgcccaagaagtataacctgcagccaggtgaaatga

SEQ ID NO: 431623 - DNA, 201 bp, Homo sapiens
accctccctgtgcatgggacaaggcttctgagccgaggagggcatgtggtacttcgaccctaagcactggacccacggaggggctgctgctaatggtgatagagttttttgttgtgttgtgccagtcagctccaaaaagtaggtcaaggtgccagtttctccctgcaggggactgaaattggtggcctgaattgcctccca

SEQ ID NO: 431624 - DNA, 201 bp, Homo sapiens
accaaggaatttgagaatcaccgggttagagatagttttgaaagggggtttgggaacaagataagaactctggagctggagaggaattagaagagggtcawgagaccctgggctggcgacctggcttgacgggcctggaaaagggtcctctgttgggtgggtacagaggggctcgcccacgcgtaaatgcaaggacacacc

SEQ ID NO: 431625 - DNA, 201 bp, Homo sapiens
cctgagcaccagcactgagcctggccgtgggaaggaagcatgaagacctctgccctcctcccgttttcctccagtcagcagcccggtatcctgaagccccrgggggccggcacctgcaatgctcaggagcccagctcgcacctggagagcacctcagatcccaggcggggaggcccctgcaggcctgcagtgcccggaggc

SEQ ID NO: 431626 - DNA, 201 bp, Homo sapiens
tccagcctaggtgacagagaaagatcccctctctaaaaaaacaacaagtgaaattacaaagtagctcacatggaatgaaaaggaagacacacgtatgcccygaaagcatgcttgaggaaagtgaaaatatagcactgaatgcctatagtaaaaaagaaagatcttcaattgatgactttagctttcacattaaaaatctag

SEQ ID NO: 431627 - DNA, 201 bp, Homo sapiens
gtggtagactgctctgagggaggagaactttgggttctcctggtccagccccatggcatgggagaggagggctgggcttgggcaaggggaggctgagcctsccaaggtgttgcccatccttaacgatttccttccacctgtttgccacactggagttaggtgagcctacagtggcattttgttttgttgttttgttttgtt

SEQ ID NO: 431628 - DNA, 201 bp, Homo sapiens
agtctcataccaccacctgcagttagttagttagtgaaacacagaccccatgtcagccaaccacagccacaaaggtttaatcagtttttatctcacaaggyagtaacaatgaggggcacagtggtggtcagggtggtggccccagtggccaactaggggagtatggcctcctccacagagccgctgcctggggaagatgct

SEQ ID NO: 431629 - DNA, 201 bp, Homo sapiens
tgggttgaaaatattgagccagtgtcacttgagagaaatagtttattcatcagcatattgctttccttctctgacagcattggtgactctgcggctgtgcytgaggggtgggcttctgagggcacagaagtcttttcttggagttggtggcctctgagtcttccacagagccttctcttggagttggtgaccttctctgtg

SEQ ID NO: 431630 - DNA, 201 bp, Homo sapiens
tgcccagacaagaagcctgacctgggcatccattcaacattacaggaaaagtagcaatctcttgggccccagaatgtggttaaaatattcttcacagcaawtctatctgaaaccaaatttataaattagataaataagcttttaaagaaacatagcacctacaatgtaaggcattattctactttaaatacattttcataa

SEQ ID NO: 431631 - DNA, 201 bp, Homo sapiens
cagggtgctgagctcagttgtccaagcaactaatccctgggagggcaccccacagacctggggaggcagagactcccagggcaccaccttggtgccgcccrcccagatgcatggtgggtgtggggatgaggacaacctggcagcaccaacccctgcacgaccaggtctgaggccaaggaggcccatggcactccagcatcc

SEQ ID NO: 431632 - DNA, 201 bp, Homo sapiens
aagtcttttcttggagttggtggcctctgagtcttccacagagccttctcttggagttggtgaccttctctgtggcccccttattgtcttggcaccttcarcctccagtgctttggttgtgactgggaagctctgggtgccagctgagggagtagggaagcaagacctccagggagacctgtgtaccccagtaatcactgg

SEQ ID NO: 431633 - DNA, 201 bp, Homo sapiens
cacagagccctaggctcatttctcctgatttcttaatctgcaactgtacaattgatgggcgatgctttggtccccagggccaggagtgggagacaaaagtygcaggtgcaaagggaccagcacaagtcacaccagaaaggtgtgtgtgtttcttatccccagatagcatgtttagtaatggctggatttgattgattgata

SEQ ID NO: 431634 - DNA, 201 bp, Homo sapiens
gggacctgtggcccacttgcaggtctcatccctgcactggcaccaccctgggcctcaggcctgtgttctctgcttcccacagtctcataccaccacctgcdgttagttagttagtgaaacacagaccccatgtcagccaaccacagccacaaaggtttaatcagtttttatctcacaaggtagtaacaatgaggggcacag

SEQ ID NO: 431635 - DNA, 201 bp, Homo sapiens
attgaaagctttgaaggatgagtgtgtttgggtccactgtaatcaatttaagtaggaattcccgcagtggttttgtgcatttctttaagaaaataacctgraagcccagtctttccagataggaaaaaacaaagggcaaggacccacttatatctaaaagtgtcctttgttaacaaaaaatctacaaagggcttttttttt

SEQ ID NO: 431636 - DNA, 201 bp, Homo sapiens
ggccctgtatcttttgttgctaagctcaccttggcctgtgtccagcttccagctctctgagagctgcggaagatggctgggggttctccacactgttttcyaaactttaacatacttctgcttttagtgtatctggccttcgtagtccaaaccttctatggtttaccctctgcagagaataaatcttcagtctcttgatga

SEQ ID NO: 431637 - DNA, 201 bp, Homo sapiens
tcccgcagtggttttgtgcatttctttaagaaaataacctggaagcccagtctttccagataggaaaaaacaaagggcaaggacccacttatatctaaaartgtcctttgttaacaaaaaatctacaaagggctttttttttttttttttttttataacagagacagagaaacagggtcttgctgtgctgcccacactggt

SEQ ID NO: 431638 - DNA, 201 bp, Homo sapiens
tggtgctgttggttcatgtgccttgtcttcccctgtgctggttttggacttttctggatctgtcaccttaattcctgtccttctgttttccagcttctaaygtggtattggtgtctctcctctcattctgaccactatggttttatatccttttaaaattttactgtcattttagtggcattttaagaggaaatagttaaa

SEQ ID NO: 431639 - DNA, 201 bp, Homo sapiens; identical to SEQ ID NO: 19812

SEQ ID NO: 431640 - DNA, 201 bp, Homo sapiens; identical to SEQ ID NO: 116746

SEQ ID NO: 431641 - DNA, 201 bp, Homo sapiens
aaaaaaaaaaaaaaaaaaaaaaagtaacgtgttcaaggtggcaatttaaacacagtgaagaattgcttgggtaactatttagagatacagaaatttagaaycctacgtcccactatataccaaaataaattccagagagactgaatgtaaagtgtaaagccctaaaataaaaagaatatttacccactctcaaggacagag

SEQ ID NO: 431642 - DNA, 201 bp, Homo sapiens
catgcctggccagagctcctttaaagagcaagtttttccagtgtgaagttataaaatagcttacttaatgtgttgtgcatgcatgtgtagctatttaaacytgtggacacaacatcagtgctcactggcactcctggtttgggatcttaccctcttgaactgagacgcggtctcacaatctgaatggaagtgacgtgtcac

SEQ ID NO: 431643 - DNA, 201 bp, Homo sapiens
gcaggcgaaagggcgtgtggttgcgcctgaggaagatacttttctgtgttttggggttgtacattgccattccatttctcatcaaactatgtcctggaatmcaggccaaactgattttcttgaatttcggtaagtggtatgtgtccatttttcctttaattttagtaagggttcattttcatggtgatgtctgattttagg

SEQ ID NO: 431644 - DNA, 201 bp, Homo sapiens
gcgccgcctcagggcagggggcactcgctggggaacggcatctccatttgccgtcttaagtctaactgggatttgcctacacaggaaatactgacttgcasttcctgatgtgctgaacaaaaatgccagatttatgaatctacaaatgcatttctgttcactatcgagtcagaagcacacttcacgaaatgcagagttcac

SEQ ID NO: 431645 - DNA, 201 bp, Homo sapiens
gaaggagtgtgtatgtccccatgtcctcgtgagtccagcctggtgacatttgaggaagtgaggctagatgtgcaatgtgccacatggacatgggagtcacrcaacccctgtcttcaccagagacagctgtcagcagcagagcttccccaggggcaggacccaccagagggaagccaggcccacactgctctctgtcattgc

SEQ ID NO: 431646 - DNA, 201 bp, Homo sapiens
ccaattcaaaaatgggcctagaactcgaagagacatttctctaaagacggatagatgacttataagcacatgaatagatgcccaacattactaatccattrgggaaatggaaatcaaaaccacaatgagataccacctcacaccaattaggatggctaattttttttttttacttttgaaatgtggtccttctctgtcacc

SEQ ID NO: 431647 - DNA, 201 bp, Homo sapiens
tgattctgaagttcagatgaaaaaatatacagagatctcgtaccaagggtatattcaaaaaagaaaaaaaatgacctacagaagtgccatgagcctctggmaaaagaagagaggtgtgtggggtctggtccatgctacagtgctcagctcaggaataacaggccagtgtgacaggacagagattcccaaatagacccaaat

SEQ ID NO: 431648 - DNA, 201 bp, Homo sapiens
aaacaagaaaccaagaagtactagaagaaaacaggagtgaaattctaaagtcttgaaatggaggagggctttctaactataactcaagagtccaaattctrttaagatggctgaaaagaaaaatgggtgcagtggttcatgcctgtaatcccagcactttgggaagctgaggcaggcggatcaactgaggtcgggagttcg

SEQ ID NO: 431649 - DNA, 201 bp, Homo sapiens
ttctaggaattgaaaagaaaaaagttcaaggcccaatgaaaaatatgcgaaagatagcataattcattgaaaaggaaatataacccttcaatatgtgaaakaattaacaatatttatttgatttttaagggtcttactatgtcagccaggctggagtgcagtggtgcgatctcagctcactacagccttgacctcccgggc

SEQ ID NO: 431650 - DNA, 201 bp, Homo sapiens; identical to SEQ ID NO: 116745

SEQ ID NO: 431651 - DNA, 201 bp, Homo sapiens
gtggggcaagtcccagccctggcctgaggatgccggtgccagctctgaagctctgtgatctgttctgttaactcagcttgctgttagttgccattcaaatktgcagctcaccaacttagagtgaccctgtgaggggatgtctggtttgtgcagtcagcaggggcagggcagggttgctgctgggctgccttccccagggct

SEQ ID NO: 431652 - DNA, 201 bp, Homo sapiens
cttggtgctttctgagagcttctgcagtgtgtgcatgtgggtgtgcatgtgtgtgtgtgcacgtgtggatgcatatctgtgcacgtgtgtgagtatgcatrtttgtgtgtacatgtgtgtattcatccaccagtaatcctaatttccatctctttatttcctacagtaagagttccctatttcattgatttgaaaaaacca

SEQ ID NO: 431653 - DNA, 201 bp, Homo sapiens
taaataaactggcatttaaaacgtgtcttccacacgcagggcagttagagctgcacatgggagaggcctcctgggcagacagtggagagcccatggcgcckcctcagggcagggggcactcgctggggaacggcatctccatttgccgtcttaagtctaactgggatttgcctacacaggaaatactgacttgcagttcct

SEQ ID NO: 431654 - DNA, 201 bp, Homo sapiens
catgcttagctaatgtttaaattttttgtagaaacctatgttgtccaggctggtcttgaactcctggcctcaagcaatcctcccacctcagcctctcaaaktgctgggattataggtgtgaggccctgcacctggtgaacactttattaattaatgaaagtcaaaactacaccaagatgccatttctcacctatcagattg

SEQ ID NO: 431655 - DNA, 201 bp, Homo sapiens
ttgagtgaaggcaggtgggaggctacttttattattggcagtatccttgtggaaaaaaaaatatgtgtggctcttgtttagggattttgataacactattmacaaactacagcaaaatggcacctactgccttctgacctattcattgcttttctcttgcaggcgaaagggcgtgtggttgcgcctgaggaagatactttt

SEQ ID NO: 431656 - DNA, 201 bp, Homo sapiens
cagcagggagccctgcccacactgtcccgaggggagagtcccagggcaggaggccaggcaccatccacctggtcctgtctggagcgaaggggcccacccaygcagctggtcagagccaggctgcaccaggcccatttggccacagggcttctctgtgagcaacacttatgtcctgggacaatattttagaaaaaccttatt

SEQ ID NO: 431657 - DNA, 201 bp, Homo sapiens
acagagtgattcattgtagcactgattgctggaaaccacctgattgtccagcagtgggaaactggcttaataacctatgttatgccaacccagttaggagytgtaaaataggtaagcattgatgtggagaaatttcttggatatcttgttgatagaaaaaaaaatcaaggtgtaaaacagtttacaatactacctttttat

SEQ ID NO: 431658 - DNA, 201 bp, Homo sapiens
ctactcagcttgggaaataaacaatctgacccaacacgtctacatggacccacctagctgctcccctagcctctggacccaggagcctcacccggtacagytggtccacctgtgcctggcactgcatgtaggcttcatagtctgcaaacaccttgaacctggaatgggagaaaggaggctgggccagggcagcagggagcc

SEQ ID NO: 431659 - DNA, 201 bp, Homo sapiens
tccatgttgagctgggaaatgtagcccccagctaggcagccattcccatgcccaactctacactccgtagggaagggacagtacaaggttttggtggtctyctagccatctccacctcaggacttgggcccctgatctgtatggtcacctcttcagagggccagagagcagctcccattggcggtgtgagagtgtttgccc

SEQ ID NO: 431660 - DNA, 201 bp, Homo sapiens
tgatgacagatcagaatcacaaacccctctggcccaggccaagaatctactcagcttgggaaataaacaatctgacccaacacgtctacatggacccaccyagctgctcccctagcctctggacccaggagcctcacccggtacagctggtccacctgtgcctggcactgcatgtaggcttcatagtctgcaaacaccttg

SEQ ID NO: 431661 - DNA, 201 bp, Homo sapiens
gtggcatgatcatggcccactgcagcccagacctcctgggctcaggcgatcctcccatatcgatgctgggtgtatgccaccactcctggttaatttttttttttttttttttttttttaatagagatgaagtctcactatgttgcccccaggctggtcttgaatttctggcttcaagcgatccttcttcctggcctcccaa

SEQ ID NO: 431662 - DNA, 201 bp, Homo sapiens
cccagcctcgaaaattcctgctagggcatggcccccaggacgacgatagggatagcaccaggtaagaactgcccaggcagatccagtgccaggggacatgsccaggcagtctccttccaccagggagcctcacagctgccacaagctgcaggtcacaccaggccagcctttcctcgaggccagccctgactgagggaagag

SEQ ID NO: 431663 - DNA, 201 bp, Homo sapiens
acagtgctgtctgaccctgaaaggtgttctggggggtggccgatatggacaaggggtccaagttcacgtgtgcccggagtgccaccctatgcactctgcayaggtctgcataggtctcctgccacctcctagcctgaggcctgcagatgtggagtttgtacctttgttgcctcttctgggtacttgctgtgttttgacaca

SEQ ID NO: 431664 - DNA, 201 bp, Homo sapiens
atttcaacttcattgcttaaaaaaatcatgaaattaaactatagacacttctaagtcgatggtttgacagaagggcggagactgatagttttgtgtctttrtgtgtaaaattatgtagcatctgatcaatatcttttgtgaaactaatctgttctctttgctatggaaagatttatctgcattaaaaactcatgatttaac

SEQ ID NO: 431665 - DNA, 201 bp, Homo sapiens
gctggctgtctcagacatccttgagctttcttctcttcctcgctcaggctctgcgccaccatcacctcctcctcactgaggccttcttagaccagcccacycctgtcgaccttgttatcactcgagattgtaatttttgctcgtgtgcctcccccgcaaccagaatggaagcgccatgagaacaggagctttgttttctcc

SEQ ID NO: 431666 - DNA, 201 bp, Homo sapiens
actgcagcccagacctcctgggctcaggcgatcctcccatatcgatgctgggtgtatgccaccactcctggttaatttttttttttttttttttttttttwatagagatgaagtctcactatgttgcccccaggctggtcttgaatttctggcttcaagcgatccttcttcctggcctcccaaagtgttaggtatgaaata

SEQ ID NO: 431667 - DNA, 201 bp, Homo sapiens
aaagaaagaaaaagaaattttacatcatttgtgagaatagtctgtaattttctcttatgcaacctttatcaagttgttttagtgttttctatagctttgtaaaaagtttcttacataacattttattctaaacttttatttttattattattattattatttttttgagacggagtctcgctgcatcacccaggctggagt

SEQ ID NO: 431668 - DNA, 201 bp, Homo sapiens
ggggtttcaccatgttggtcaggctggtctcaaactcctgacctcaggtaatccacctgccttggcctcccaaaacgctgagattacaggaatgagccacygtgcctgcccccttaaaattaaatattgattaaaggcatccatctcatcaaccaacattataatgaaaagtaaatgtcagccaggtgcggtgactcacgc

SEQ ID NO: 431669 - DNA, 201 bp, Homo sapiens
acttctagcacattccttccttaccctgctctctcaaaaccaccctgacccccatggcccctcctggaaacatggtactcagaaaagcagggaccaccagyggctggcaaagtgtttggggaaaaaaggaggtgcaaagtcagcaagaaaacaaatgcccgctggtcccgccaaggcagggtgtgcctagtcccgggggat

SEQ ID NO: 431670 - DNA, 201 bp, Homo sapiens
aagaaagaaaaagaaattttacatcatttgtgagaatagtctgtaattttctcttatgcaacctttatcaagttgttttagtgttttctatagctttgtaaaaagtttcttacataacattttattctaaacttttatttttattattattattattatttttttgagacggagtctcgctgcatcacccaggctggagtg

SEQ ID NO: 431671 - DNA, 201 bp, Homo sapiens
ccagcatgcaaggtgctagatttctcggcaattccacagggaaggacagtagcctgttccctgccctctctcttgggcaatgggaggcaggttgccagccytggggaggggcaaggctgtgaggggctcacccccacctcccagtgccaggcctgctgtccaagcagagcacaaatgggttcctccgggacccctggtcct

SEQ ID NO: 431672 - DNA, 201 bp, Homo sapiens
tcagatgttccacccgccttggcctcccaaagtgttgggattacaggcgtgagccaccgcgcctggcctgctttttcctcctgatttaggctagtcagtamtatatctaatatccatacatacactgaagtggggaaatatatatacacacacacatacacacacacacatgttttgtgctccatcaaagaaaatatctct

SEQ ID NO: 431673 - DNA, 201 bp, Homo sapiens
gggcagatcacctgaggttgggacttcgagagtagcctgaccaacatggagaaacctgtctctagtaaaaatacaaaattagccgggggtggtggtgcacrcctgcaatcccatctactcgggaggctgaggcaggagaattgcttgaacccgggagttggaagttgtggtgagccaagatcgcgccattgcactctagcc

SEQ ID NO: 431674 - DNA, 201 bp, Homo sapiens
ctccccgcagcccagatccagcatgcaaggtgctagatttctcggcaattccacagggaaggacagtagcctgttccctgccctctctcttgggcaatggraggcaggttgccagccttggggaggggcaaggctgtgaggggctcacccccacctcccagtgccaggcctgctgtccaagcagagcacaaatgggttcct

SEQ ID NO: 431675 - DNA, 201 bp, Homo sapiens
cacaggaacaaagatatgggcaaagaagttttcttaaaagaaaagtaagtaagaattcagtgaagcaacgtctttatttttttaatttttttttttgagayggtgtctcagtctgtatcccaggctggagcacagtggcacaatctctgctcactgcaaccttcatcttccggattcaagcaattctcctgcctcagcccc

SEQ ID NO: 431676 - DNA, 201 bp, Homo sapiens
cacctgtaatcccagtactttgggaggctgaggaaggaggattgcttgagctcaggagtttgagaccagcctaggaaacatggtgaaacctgtctctaccaaaaaaaaaaaaaaaagtcaataaaggcacaagaagaattaataaaaataacattgattgagaactgtgtaccagataccgtttccttaagcgctttacgt

SEQ ID NO: 431677 - DNA, 201 bp, Homo sapiens
cgggtgtggtggtgggcgcctgtaatgccagctactcgggaggctgaggcaggagaattgcttgaacccaggaggcggaggttgcagcgagccaagaccgygccactgcactccagcctgggcaacaaaagcaaaactccatctcaaaaacaaaaaaaaaaactagccgttcaggcacacatgaccccgggttccacacct

SEQ ID NO: 431678 - DNA, 201 bp, Homo sapiens
caggtgcaaagggaccagcacaagtcacaccagaaaggtgtgtgtgtttcttatccccagatagcatgtttagtaatggctggatttgattgattgatagratttttagaaaatagctagcttggccaggaacagtggttcacaactgtaatctcagcactttcggaggctgaggcgggcggatcacctgaggtcaggagt

SEQ ID NO: 431679 - DNA, 201 bp, Homo sapiens
ataacctggaagcccagtctttccagataggaaaaaacaaagggcaaggacccacttatatctaaaagtgtcctttgttaacaaaaaatctacaaagggctttttttttttttttttttttataacagagacagagaaacagggtcttgctgtgctgcccacactggtctcattctcctggccttacgcaatcctctcgcc

SEQ ID NO: 431680 - DNA, 201 bp, Homo sapiens; identical to SEQ ID NO: 19808

SEQ ID NO: 431681 - DNA, 201 bp, Homo sapiens; identical to SEQ ID NO: 19809

SEQ ID NO: 431682 - DNA, 201 bp, Homo sapiens
tacaggatgtacagacccacacgggggggcacacacgctcacaggtggccatgtttgggaacactcagacacagacaccccagccacttgcaggcctcggrtctcttccacacacctctcaagacgtacacagctcctcaaaagcctctttgtccccagctgcttcttgaagggacgtggtgctcctgactgccccgcact

SEQ ID NO: 431683 - DNA, 201 bp, Homo sapiens
catgagaacactggtccccctcctggccagggtgtgccccagctcctggtccctaattagggtgtcatttctgttccacccacccacggccccagagacaycacctgccccagggttgggatctccttgcatggccatctgagccggggacccacgtggcatcctagaatgtctttgtgaggctataggaacccctagggg

SEQ ID NO: 431684 - DNA, 201 bp, Homo sapiens; identical to SEQ ID NO: 116742

SEQ ID NO: 431685 - DNA, 201 bp, Homo sapiens
ccagttgcctttggaagttccagaggcaaaactgtgtccctttagcacaggtacctgggttgctaagggggcagtgggctcagagtatgggtttgctttgsggttataattttccccattataaaaggaagatatgtgtagaaaatttagaccagagaatagctctgaagttgagggtcaagaatcagagaccttgtctcc

SEQ ID NO: 431686 - DNA, 201 bp, Homo sapiens
ctttatttaagaataaaatcgtggtggtggtccttttgtctctctgcagcgcgagaagggtcaatgttgcctcctccatgccccagagccgcccacagccyagcctctagccgctttggagccactccatgactcagcctcagactatgaaattttctagtcccagcagctcagaaatttgccaggagtaggaagttttgt

SEQ ID NO: 431687 - DNA, 201 bp, Homo sapiens
ggttataattttccccattataaaaggaagatatgtgtagaaaatttagaccagagaatagctctgaagttgagggtcaagaatcagagaccttgtctccrtgcctgtgtgttgggctttgacttggcaccacactgcttgttccctgcctaactcactgagtgctgctctgggctacagcgcatcctcatggggctcttg

SEQ ID NO: 431688 - DNA, 201 bp, Homo sapiens
actttgggaattaactttaaaggtatattaaacatggcatgtttgccaggaaaaaaaaaaacagaaacaaacaaaaaaaacacctatggcttgccctcagytctagaatttggaaaaagcattatatgagatttctgatttattttgtctgttattttggtattacttagagattcaatttttaaactagctaattttcat

SEQ ID NO: 431689 - DNA, 201 bp, Homo sapiens
gtgtgtgtgtgtgtgtgtgtgtgtgtgtgtgtgtgaaggattcgtaggatggaagcctctgatgaggcttttctacagcttttttttaaatgctctggtayccaaggtcaatcatcagcctgactggagatcttcccagagcaggaggtttgtggcagctgactgtcataaagttctgctctagtcaggtaagggaagttc

SEQ ID NO: 431690 - DNA, 201 bp, Homo sapiens
gcagaattgagtggaaagtacagaatttcccatacactcctgccccgcccctaccacacatggtatgccacactatccacatcctgcactgcaatggcatrtttgctagaatcagtgaacctgcattgacacatcatcaccccaaatccatagtttgcattaagtagggttcactcttgatgttgtgcattttatgagatt

SEQ ID NO: 431691 - DNA, 201 bp, Homo sapiens
ccaaaccttctatggtttaccctctgcagagaataaatcttcagtctcttgatgaattggggcagtggccccactctgttcagtgaggtagaagcccagasgggtttttccagttgtccgcctgatcctggcctccacctgatcctcccgccacgggtacctggtgctgttggttcatgtgccttgtcttcccctgtgctg

SEQ ID NO: 431692 - DNA, 201 bp, Homo sapiens
ggtgctgttggttcatgtgccttgtcttcccctgtgctggttttggacttttctggatctgtcaccttaattcctgtccttctgttttccagcttctaacstggtattggtgtctctcctctcattctgaccactatggttttatatccttttaaaattttactgtcattttagtggcattttaagaggaaatagttaaat

SEQ ID NO: 431693 - DNA, 201 bp, Homo sapiens
ttgaactcctgacctcaggtgatccacccgccccggcttcccaaaatgctgggattacaggtttgagtcactgcgcctggccttgaagcaacatctttgaygctgtcatgccatgtagtaatgtcactcaatatagtaatgtcactcaataacaggtacaccttctgagcaatgtggtgttaggcaagtgcattgtcacgc

SEQ ID NO: 431694 - DNA, 201 bp, Homo sapiens
atggtgaaaccctgtctctactaaaaaatacaaaaattagccaggtgtggtggcacgtgcctgtagtcccagctacttgggaggctgaggcaggagaatcrcttgaatccatgaggtgggggttgcagtgagctgggatcctgccactgtactccagcctgggcaacagagcgagactccgtctcaaaaataatataaaag

SEQ ID NO: 431695 - DNA, 201 bp, Homo sapiens
tatatgcaatttttttttttttttttttacaaaggaggcatcattaatgcatgctagggtaattgtatacttgtttgggagaaaatagttttgtcatctcrtatatgctaaaataattccagattaatttaacagtaactattgttaacattttggttataacttttcacactgttcatacacctatatttttgcattttc

SEQ ID NO: 431696 - DNA, 201 bp, Homo sapiens
ggcccctgcaggcctgcagtgcccggaggcctgagcatggctgtgtggaaagcgtgggtggcaggcatgtggctctccttgccgcccctcaacctgagatyttgttgggagacttaatggcagcaggcagccatcactgcctggttgatgctgcactgagctggacagggggagtccgggcaggggactcttggggctcgg

SEQ ID NO: 431697 - DNA, 201 bp, Homo sapiens
cttcctgagtaactggaactacaagcacgtgtcatgacacccagctaatttttgtgttgtttgtagaggcagggttttgccatgttgtccaggctggtctygaactcttgggctccagtgatcctcctgccttgtccttccaaagtgctgggattacaggtgtgagccactgcacctggccattaggtgatattattatga

SEQ ID NO: 431698 - DNA, 201 bp, Homo sapiens
gggtggtggccccagtggccaactaggggagtatggcctcctccacagagccgctgcctggggaagatgctgtcagggcacgaccacagcccagcacttgmcccactcaataaaaggctgtagtgctctggtgggctgtgcaccgtgcgcagatcctcctggtgggcactggaggccagggagaaaaagagcctccccgca

SEQ ID NO: 431699 - DNA, 201 bp, Homo sapiens
ctgctcagggggcctcagtggggccaagagtcacagtgatttgggagccttccatttccttggcagaggggtttgagggagtgcctctctcctgctccagractgttcacatgatcatgcagggtgagccgcctccatgttgtacaggatgtacagacccacacgggggggcacacacgctcacaggtggccatgtttggg

SEQ ID NO: 431700 - DNA, 201 bp, Homo sapiens
gaaatatgctacaacatgaatgaaccttgaagacattatgctaaatgaagtaagccagtcacaaaaagacaagtactgtatgattccacttacgtgaggcmctagagtcgtcaaggtactagtagcagaaagtggaagggtggttgccatgggctgggggatggagaatgggagttactgtttaatgggtacagagtttca

SEQ ID NO: 431701 - DNA, 201 bp, Homo sapiens
tgtggaaagcgtgggtggcaggcatgtggctctccttgccgcccctcaacctgagatcttgttgggagacttaatggcagcaggcagccatcactgcctgsttgatgctgcactgagctggacagggggagtccgggcaggggactcttggggctcgggaccatgctgagctttttggcaccacccacagagaacgtgggg

SEQ ID NO: 431702 - DNA, 201 bp, Homo sapiens
gtgcagtggcgggatcttggctcactgcaagctccgcctcctgggttcacgctcttctcctgcctcaacctcccgagtagctgggactacaggcgcccgcyaccacgcccagctatttttttgtatttttagtagagacgaggtttcaccgtgttagccagaatggtctcgatctcctgacctcgtgatccacccgtctcg

SEQ ID NO: 431703 - DNA, 201 bp, Homo sapiens
ctcggatctcttccacacacctctcaagacgtacacagctcctcaaaagcctctttgtccccagctgcttcttgaagggacgtggtgctcctgactgcccygcactggcaggacatgggcgccagcccagagagccatgagtacccacctgggcctgagtgcagagcccaagcctgagggtgaggccttggcagtagtgac

SEQ ID NO: 431704 - DNA, 201 bp, Homo sapiens
tcgcaccactgcactccagtctgggcgacagagcaaaattctttccctgcttacccccacctagacaaagttattatacatcagtaatgagaagataataygagatattttgtcattaaccacagtgattagagcagcatgttattctgatttttaaaaatgtatagaagaaacagtgaaatagaaatgtttttttttttt

SEQ ID NO: 431705 - DNA, 201 bp, Homo sapiens
gcagaggggtttgagggagtgcctctctcctgctccaggactgttcacatgatcatgcagggtgagccgcctccatgttgtacaggatgtacagacccacrcgggggggcacacacgctcacaggtggccatgtttgggaacactcagacacagacaccccagccacttgcaggcctcggatctcttccacacacctctca

SEQ ID NO: 431706 - DNA, 201 bp, Homo sapiens
cgccatcacgcccggctaatttttttttgtatttttagtagagacggggtttcaccgtgttagccaggatggtctcgatctcctgacctcgtgatccaccygcctcggcctcccaaagtgctgggattacaagcgtgagccaccacgcccggccaatagaaatgttatatgcaatttttttttttttttttttacaaagga

SEQ ID NO: 431707 - DNA, 201 bp, Homo sapiens
gagccttccatttccttggcagaggggtttgagggagtgcctctctcctgctccaggactgttcacatgatcatgcagggtgagccgcctccatgttgtamaggatgtacagacccacacgggggggcacacacgctcacaggtggccatgtttgggaacactcagacacagacaccccagccacttgcaggcctcggatc

SEQ ID NO: 431708 - DNA, 201 bp, Homo sapiens
ttcctcaggctgggacccccatgccaggccactgcctcaggctctgacccctctctccccagctctatagcatcgccgcaccagctcgaagcttccgagayttcaaagttcagtttgtgccctttcattcagaccttggctacaggcacaaatacatttacaagagccctgagctgccacggatactgaggtgagacattc

SEQ ID NO: 431709 - DNA, 201 bp, Homo sapiens
ctggtgtaaaggttggggcaggggcccactgatgctgtctccaagaactatgaaaaataagcagatagttcccagtcctcacacaggggttatcagagtgsgctgcctatgttatcagagcccaggccaacctgggaactcagctggaagggctcatcagttatgggctgaaggcaaagaaccccttgatgaggatctccc

SEQ ID NO: 431710 - DNA, 201 bp, Homo sapiens
tttatttggtggcatgcagtgaaacttttttttcttaaaaaataccctttatgggctgggcgcagtggctcacgcctgtaatcccagcactttgggaggcygaggccggtggatcacgagatcaggagattgagaccatcctggccaacatggtgaaaccccgtctctactaaaaatacaaaaattacctgggcatggtgg

SEQ ID NO: 431711 - DNA, 201 bp, Homo sapiens
aatagatgttcatagagataatgaagagttaactttcagttgtctagtaaaaagaaatccagcagaaatcaggctgtttcccaaaacacaccctgaacccrgatccctgccatggacagagggtctgggcaactctgccctttccctggtcttggtctagccccttctccctcctacagcgtgaagcacatctcctgtccc

SEQ ID NO: 431712 - DNA, 201 bp, Homo sapiens
ggaggcggaggttgcagtgagctgggatcgtgccactgcactccagcctggtgacagagcaagactgtctcaaaaacaaacaaacaacaaaaaaaaaaccstttatactttgtcaaatgcagtatgggaaatcaaagtacaaaacaacaaaaaaaccctttaaatttcccaaagaaaatgttttactcttttagcaggaaa

SEQ ID NO: 431713 - DNA, 201 bp, Homo sapiens
ttctgttatgtggtttgctgaaggatttggatctatcaaacctactgaaaatcctaaatcacttctaagtgtttagagttggagtgaccataaatgtcacytacacagataaattagagaacattgactttttttaccaacagattcctagtaacattcatttacactaagtttcttggcccacctgaattattccgctta

SEQ ID NO: 431714 - DNA, 201 bp, Homo sapiens
tataggaacccctaggggagccaggcagccccttctttaggacataggtttactccagcacagagcccaaggctggtctcctggcctcgtcgcacacttcrgctcctgaccacgaagcagaggtgacccactctacctgggctggccttcatcttttcctcattttttttttttttggtctatgtaagctacttgggatac

SEQ ID NO: 431715 - DNA, 201 bp, Homo sapiens
cagatagtcacttaattagcagtcccttcatttagcctatcactttaataaacaaatgtggttgtgccaggcatggtgactcatgcctgtaatcccagcastttgggaggccgaggtgggtagatcacctgaggtcaggagttcgagaccagcctggccaacatggtgaaaccctgtctctactaaaaaatacaaaaatta

SEQ ID NO: 431716 - DNA, 201 bp, Homo sapiens
tgcagtgagccaagatcatgccattgcactccagcctgggcaacaaagaaaagaaaaaaagaattatctgaatgaactggattccttcttaaaaagcaagkttgtgactgggtgtggtggctcaccactgtaatcccaacattttgggaggctgaggcaggcagatcacgaggtcaggagtttgagaccatcctggccaat

SEQ ID NO: 431717 - DNA, 201 bp, Homo sapiens
acgtgtcttccacacgcagggcagttagagctgcacatgggagaggcctcctgggcagacagtggagagcccatggcgccgcctcagggcagggggcactygctggggaacggcatctccatttgccgtcttaagtctaactgggatttgcctacacaggaaatactgacttgcagttcctgatgtgctgaacaaaaatgc

SEQ ID NO: 431718 - DNA, 201 bp, Homo sapiens
ttttttcccatcaagtatgttttggttctaaaaataaaaatagaacaaattaaaagttgaacaaatattttaagcaacaaaccctgcttgtttgtaaataytactgttttggaacttgaaaaagaattatctgggctgggtgcagtggctcacgcctgtaatcccagcactttgagaggctgaggcaggtggattacctga

SEQ ID NO: 431719 - DNA, 201 bp, Homo sapiens
acttcacgaaatgcagagttcacaattttaaaagcacttcctttatcacagacctcagcagggcccaggttccagcccagatcccagcatgtggtcagagytggtgtgactgaagccaacaggtgacacggtcatcgaagagcagcagacaaaactaaaactaacccaaaggcagctgaaagtggagggcaggtgaattcc

SEQ ID NO: 431720 - DNA, 201 bp, Homo sapiens
gtcctggaccagttttagaggcccttggcaggattaagggggcattgaccccagacatagtctctggagtctgggaaggaaatatcgggccttctagttayatttccccaacctctgaggagacctatttagttcagtttactgtgtctttctttgttcatttgtagagagcagagtcttgttatattgcccaggctggcc

SEQ ID NO: 431721 - DNA, 201 bp, Homo sapiens
attttagacgtggaattatatagtatacagtcttttgtggatgtcttatttaacataacagtccttttgagattcatctgtattgttgcttgtatcagcakttcaatatgtggttttaagactgtttggaaattgtccagagatagcttgtcccactaggtttagagtcatatggcaagttagagcagtggtcctgcaggt

SEQ ID NO: 431722 - DNA, 201 bp, Homo sapiens
ggcttttaaagtcctcagactgagggcccagccctctcttcctcccccgtcaaaggaaccagggcaggttgttcaaacagttaccctggacagtaggaggmaaaggaaatcactgtcaaactggcagagggaacgctggcacctctgccacactccctgcccagctgctgttcagcaaggccctgaaggcccacacctccc

SEQ ID NO: 431723 - DNA, 201 bp, Homo sapiens
ttataaaaatgttaatgtcactcctcactaaaattttttttcttctcactaaaattttttgtattggaaaattatttttcataacaaatattgtttatagyaacatgtaatggattgttattattagatgaattaatagacatttttaaatatctttgatttctcatatgacagatcatcataaatataaactgtttatga

SEQ ID NO: 431724 - DNA, 201 bp, Homo sapiens
tgagggaggagaactttgggttctcctggtccagccccatggcatgggagaggagggctgggcttgggcaaggggaggctgagcctcccaaggtgttgccyatccttaacgatttccttccacctgtttgccacactggagttaggtgagcctacagtggcattttgttttgttgttttgttttgttctgagacagggcgt

SEQ ID NO: 431725 - DNA, 201 bp, Homo sapiens
aatccagtggtgcccagaacaccccactgtagcttagcaggaatgtgctgcattatttgagagtgggggccctctggagtgattgtacctttacttttccygtttcctgatccaaatacaaaatcattgacagctcagacctcttaggaaataatgtctttgttcttcaaagtagtctaattatgcttgagtatctgttca

SEQ ID NO: 431726 - DNA, 201 bp, Homo sapiens
ggacagtgtgcaccctgtgtccgtcttctgccgctacacctgtgaactggcaccacaggtgggaacagcccttcaggccagattctggtttttggtttttrctttactgccaaatatgatctagtgctacattcaacttagttgatttattgaggctataaattcctacccatttgtttattcacttaggaatttgcttta

SEQ ID NO: 431727 - DNA, 201 bp, Homo sapiens
gcacgttagtgatcacgcagcagtcattctttgatgagcagaaaccacggcctgacgttgagtttggttctgcagaggacagaaggaaaggccaggaaggygaagtgagcagtgtgtcccaaggtgtgcagacagccgttggcccaggcaggctatggtctctaggcccaagacaaattttaatttctctatgcctcgggt

SEQ ID NO: 431728 - DNA, 201 bp, Homo sapiens
gaggacgacccggtggtgcccttccagcttggcagaaaggtgggtcctggcctctgcctctggtgtagctggcatcttgcacactcagccagtgtgggtgkaccaggctgggagtgggcaggcgggaaggcagcccctgcatgctgcatcacgggctgcgcaccagccacgtcaggctcaggaggccacctcatcctccct

SEQ ID NO: 431729 - DNA, 201 bp, Homo sapiens
gtacagaatacagctgggtcaggcttaggttcagctgtgtttttccctttggggcctttatctgtgtgccctcctgagtgctgcataaataaccatattcscaaacacatgttttgagagcattgtcttttggaagagttagaaggtaatgctgcatattctgcttaaatatttacatattctgcttataaatttgcttat

SEQ ID NO: 431730 - DNA, 201 bp, Homo sapiens
ttccaggtgggagctgaatgccatgaccaccaacagcaatatcagtcgccccatcgtctcctcccatgggtaggaggaagtttctgccacctcccctcctragcctgctgtcatcttcactgcccctgcccatctgtcacccacctgctcctttgacccctggacttggtatacctccatgtggagttgttgggcgagagg

SEQ ID NO: 431731 - DNA, 201 bp, Homo sapiens
aggttccaattaaccaccagatgttactttatgtataatttttcaggttcaaattaaccaccagatgttactttgtatataatttttcctgtctgggtcaytctgagatacttcgtctctttgtatcagttcagtttaactcttgctggctgggcatggtggctcatacctgtaatcccatcacttcgggaggttgaggtg

SEQ ID NO: 431732 - DNA, 201 bp, Homo sapiens
cggtgagggatgggggtggggaagatacctggactaggcaggtattgaacttccatataaatttctcttcagtgtcctttacctggaaaaagattgaacckaaggggaaggggccatgtccccgccggcgccagtgctgctgtattgttggtgacaagattgtcctctttgggggtaccaggttagaaggagagagggaag

SEQ ID NO: 431733 - DNA, 201 bp, Homo sapiens
ctggatcctttcctcacctttgaccatctcctttccacaacttctcccttaaaggccctagtctgaagactctgtgcaaactggccgtgattcagtataayctagaccagtcctgtttgcctcatgatatcaggtacagcgagtggttggaagggagggattgagtgagggtgagtgagcagcacaggtgtgacctgatta

SEQ ID NO: 431734 - DNA, 201 bp, Homo sapiens
gctgcctgaggggcgccggagccactcggcctgtgagtgtttgttacttccctgtggagttcccttcctgccctcttcacactcctgacacttcctctctycttccagttggctacaatggggagctgtacatctttggtggttataatgcaaggctgaaccggcacttccatgacctctggaagtttaatcctggtaaag

SEQ ID NO: 431735 - DNA, 201 bp, Homo sapiens
cagggccagccaggttctgctgggaagggaagggaatggggagaagggagaagcaagcagtgtctgagcctcaggagcttccccctccccctttgcctatyccctcccctctgcttgagccttgagccttgactgggagctgaaaggagttgcagctgttggcatgagacctccttctccccgtcttggggaggtggggac

SEQ ID NO: 431736 - DNA, 201 bp, Homo sapiens
tagtgcccctgtggaggggtagtgtgggagggcccccagggtgacacttggaggcaaaggctggttctgggcagagtcacagtgagctgggcagaagcctygcctgaggatcccgtggccccaatttgtgtgcagatagcagaggcagcaggccgtgccgggggggcatgttgctgtaaccagtggcccaggggatgttac

SEQ ID NO: 431737 - DNA, 201 bp, Homo sapiens
aaggagttgcagctgttggcatgagacctccttctccccgtcttggggaggtggggaccagcagataaatcccacccttccttgagctgtcgctgtactcygaagttcagccagctcagattttataaaaattaattaaaatctccaaacgtgttgtgtgtttttgtggaatacggtggagaaggctggagtttgcagtgg

SEQ ID NO: 431738 - DNA, 201 bp, Homo sapiens
aggggctgcctggttggctctaagcaaagcaggaaaggcaggttgggatgttgactgacatgtatacacagatctcaggtgcctggacactgcaatatacwtacatacataaacataaaccggaaatccatatgagcttggaggtagaggagtgggtggtgttggatttggtggtgggtgggttctgattgttcaacctag

SEQ ID NO: 431739 - DNA, 201 bp, Homo sapiens
ggtgacagaacaagactcaaaaaaaaaattaatatggttgggtgggtggggaaggcctcaggaaggataggagtgctgagtcagagccttaaaaggatggragttaagagcaaaaatgggtattcctggtggggtgaggcattcctggtgagggtaaggtggaggggctgcctggttggctctaagcaaagcaggaaaggc

SEQ ID NO: 431740 - DNA, 201 bp, Homo sapiens
atatgcagattctgagctggcaatcaggtgggggtggccccacccttcactgttggagaacactgggcccaggctgctccctgacctcggcagctcccttrgggcagggccagccacctgagctgagactagtgcccctgtggaggggtagtgtgggagggcccccagggtgacacttggaggcaaaggctggttctgggc

SEQ ID NO: 431741 - DNA, 201 bp, Homo sapiens
tgtggagttgttgggcgagaggtgttctctgtgctgtgaattcagtggggagctgtagcggggtgggggctaggttcctccccccttgggccgagggcccyttccccttggtgctctgtccccatccacctcctttcagctgctcctgggcctcagctctgcccagggccagccaggttctgctgggaagggaagggaatg

SEQ ID NO: 431742 - DNA, 201 bp, Homo sapiens
tcctactcaggcggactgtttttccaatgacattcacaagctagataccagcaccatgacatggactcttatctgtacaaaggtctgctctttcttttttytcccaaatccccaccctctgttgaagcaatgataggaagctcagtcagaggagatcctcttccagtctttgtgctgacccctccaccatctctctgcctc

SEQ ID NO: 431743 - DNA, 201 bp, Homo sapiens
tcaaactcctggactcaagtgatcctcccacctcagctctctagtagctggtactataggcatatgccaccacacgggctaattttattttattttatttwatttatttatttactgtttatttattgagacagagtctcgctctgccacccaggctggagtgcagtggtgcaatctcggttcaccgcaagctctgccttc

SEQ ID NO: 431744 - DNA, 201 bp, Homo sapiens
attcctggcttcaaaggatccttccacttcagccttccaaagtgttgggattacaggcataagctatgatacctggctgatcctgtctctaaaataaaaaraaattttaaaaagtgagttgcaaaagcatcaccctttttaaccagatccttaactgtaagcaacagaaaatccttctgactttaagcaggaaaaggattc

SEQ ID NO: 431745 - DNA, 201 bp, Homo sapiens
acaatgccgaaaagagaggcaaacgcccagtgcttattaggccgtgctccaaactcatcgtccggtttctcactgtgatgatgaagcatggttacattggygaatttgaaatcattgatgatcgcagagctgggaaaattgttgcgaacctcacaggcaggctaaacaagtgtggagtgatcagccccagattcggtgtgc

SEQ ID NO: 431746 - DNA, 201 bp, Homo sapiens
aatggaatgaatatagttgataagttgtctcttaaaaaaaaaaagcttttccgccatcttcccacgacgccaccatggtgtgcgtgaacgtcctggccgaygctctcaagagcatcaacaatgccgaaaagagaggcaaacgcccagtgcttattaggccgtgctccaaactcatcgtccggtttctcactgtgatgatga

SEQ ID NO: 431747 - DNA, 201 bp, Homo sapiens
aaaagcttttccgccatcttcccacgacgccaccatggtgtgcgtgaacgtcctggccgatgctctcaagagcatcaacaatgccgaaaagagaggcaaaygcccagtgcttattaggccgtgctccaaactcatcgtccggtttctcactgtgatgatgaagcatggttacattggcgaatttgaaatcattgatgatcg

SEQ ID NO: 431748 - DNA, 201 bp, Homo sapiens
caatgccgaaaagagaggcaaacgcccagtgcttattaggccgtgctccaaactcatcgtccggtttctcactgtgatgatgaagcatggttacattggcraatttgaaatcattgatgatcgcagagctgggaaaattgttgcgaacctcacaggcaggctaaacaagtgtggagtgatcagccccagattcggtgtgca

SEQ ID NO: 431749 - DNA, 201 bp, Homo sapiens
acgcctgtaatcccagcactttgggaggccaagatgggaggattgcttgaggccaggagttcaagactagcccgggcaacatagtgagacccccatctctmcaaaaaaacctaaaaagtagccagggatggtggtacatacctgtagtcccagctactagggaagctgaggcgggaggatcacttgagccaggaggtgaag

SEQ ID NO: 431750 - DNA, 201 bp, Homo sapiens
cagcttacgccattatttctgcatatcagagacttttagtactttcgctaatttactactgctatctagaaggcagagccaggtgtacaggatggaacatraaggcggactaggagcgtgaccactgaagcacagcatcacagggagatggttaggcctccggataactgcgggcaagcctgactgatgtcaggccctcca

SEQ ID NO: 431751 - DNA, 201 bp, Homo sapiens
cggcgatttttgttctgctgcagggatattttgactgggaaggtgtttgcgctctcagactatcatagcagccctgcggatcatggttctttcctctcccraaaagagaatacttaagatggacattagctcagcccaagtgtatacttgtggtcctaaaaatcggttaatttgatccacaaccctaaaaagatcatctaa

SEQ ID NO: 431752 - DNA, 201 bp, Homo sapiens
gataactgcgggcaagcctgactgatgtcaggccctccacaagaggtggaggagcagagtcttctctaaactcccccggggaaagggagactccctttccmggtctgctaagtagcaggtgttttcccctgacacttacgctaccgctagacttcggtctgcctggcaacgggtatcttcccagaagctggcgttaccgct

SEQ ID NO: 431753 - DNA, 201 bp, Homo sapiens
ggctgaaactgtgaggctgatgaatacgtgacctagtgctggttactggaaaggagtgatttatttcattactgaaattctaagtccctaggctgggcgcrgtggctcacacctgtaattccagcactttcggaggctgaggcaggtggatcgatcacttgaggtcaggagttcgagaccagcctggtcaacatgctgaaa

SEQ ID NO: 431754 - DNA, 201 bp, Homo sapiens
gatattttgactgggaaggtgtttgcgctctcagactatcatagcagccctgcggatcatggttctttcctctcccgaaaagagaatacttaagatggacrttagctcagcccaagtgtatacttgtggtcctaaaaatcggttaatttgatccacaaccctaaaaagatcatctaatagtggtttaagtttcttccttag

SEQ ID NO: 431755 - DNA, 201 bp, Homo sapiens
tcccggtctgctaagtagcaggtgttttcccctgacacttacgctaccgctagacttcggtctgcctggcaacgggtatcttcccagaagctggcgttacygctagaccaaggagcccttctgctggctctgtctgggcataacagaaggctcgcactcttgtcttctggtcacacctcactatgtcccctcagctcctat

SEQ ID NO: 431756 - DNA, 201 bp, Homo sapiens
gtgagccaagattgtgccactgcactccagcctgggcaacagaacgagagactctgtctcaaaaaagaaaaaaaaaacctgaaaaattgttaagatgatamatttcatggtatgtgttttctactataattaaaacagttgtataaatattagccattgttatttcacaggtgaggaaacaagagatcccaacacagagct

SEQ ID NO: 431757 - DNA, 201 bp, Homo sapiens
tggcctggtttttcctaggttatgattgtagagcgaggattattataatattggaataaagagtaattgctacaaactaatgattaatgatattcatatayaatcatatctaagatctacatctagtataactattcttgttttatattttattatactggaacagctcgtgtcctcggtctcttgcctcggcgcctgggt

SEQ ID NO: 431758 - DNA, 201 bp, Homo sapiens
aggaagtctggtctcggcaatcatccagccaactggggttatctcaggttataacttggttctgaggccccgacttgcagcctgaaggtggcttggtttayttacctactgtcacatttggtaacggctgaagggtagaagggtgcaaacctcactgtattgtcttattacaatctgctccttgtcaaccagacagctggg

SEQ ID NO: 431759 - DNA, 201 bp, Homo sapiens
ttgtgactgtcagggttgccacatctcagcttggccctgagtatactttctggaacataatgtgagcgtaatatatgttagctattattactcaatgaccaaaaaaaaaggaaaaacaacaacaacaacaaacaaataaaaaatgggcaaatgcccagtgtggtggctcatgcctgtattcccagcactttgggaggccaa

SEQ ID NO: 431760 - DNA, 201 bp, Homo sapiens
caggtgttttcccctgacacttacgctaccgctagacttcggtctgcctggcaacgggtatcttcccagaagctggcgttaccgctagaccaaggagcccwtctgctggctctgtctgggcataacagaaggctcgcactcttgtcttctggtcacacctcactatgtcccctcagctcctatctctgtatggcctggttt

SEQ ID NO: 431761 - DNA, 201 bp, Homo sapiens
caccaccacgcccggctaattttttgtatttttagtagagacggggtttcaccgtgttagccaggatggtctcaatctcctgacctcatgatccgcccccmtcggcctcccaaagtgttgggattacaggtgagagccaccgagcccagcctatttatttatttattttgagacagggtctcactctgtcacccaggctgg

SEQ ID NO: 431762 - DNA, 201 bp, Homo sapiens
ccacacctggctaatgtttttttttcttttttgtatttttagtagagacggggtttcactgtattaaccaggatggtctcgatctcctgacctcgtgatcygcccacctcggactcccaaagtgctgggattacaggcgtgagccaccgtggctggccttatttatttatgtttttaaagagacgagggtctcactgtgct

SEQ ID NO: 431763 - DNA, 201 bp, Homo sapiens
gcctgtaatcccagctattcgggaagctgatgcaagagaattgcttgaacctaggaggtggaagttgcagtgagccgagatcataccactgcactccagcmtgggcaacagagtgactctgtcttaaaaaaaaaaaaaaaaaaaaaaaaatctaagccccttaacaagccttctgagaagttatcgagtttggaaaatcag

SEQ ID NO: 431764 - DNA, 201 bp, Homo sapiens
ctaaaaaacagaaggaaaaaaggggggaaagacttgaatagacatttctctggaggtgatacacaaatgctcaataagcatatgaagagatgctccacgtygctaacttccaggcaaatgcaaatcagaaccacaaagggataacacctcacactcaccagaatggctgctctaaaaacaaaacagaaaataacaagtgtt

SEQ ID NO: 431765 - DNA, 201 bp, Homo sapiens
tcttaaaaataaaacctctgggctgggcgtggtggctcacgcctgtaatcccagcactttgggaggccaagatgggaggattgcttgaggccaggagttcragactagcccgggcaacatagtgagacccccatctctacaaaaaaacctaaaaagtagccagggatggtggtacatacctgtagtcccagctactaggga

SEQ ID NO: 431766 - DNA, 201 bp, Homo sapiens
ttcacctaaggggggtagtgctaattaaaatgtagcaaaaacatatttccttgaaactcagtacatcctagtgaccatgcagtaagcaaagttaggcatgstgtatctgtacagttgtctcgtaaataaaggacacagttttcttgcagctgtattccagtaggcaggtaactgaaaaacagacctaaggacatagctctc

SEQ ID NO: 431767 - DNA, 201 bp, Homo sapiens
gggatcaatgaagcacatttcaaaagatcctattgggtctgtcccagaatgaaaattagcttctaggccacagaaatggcttagagtggggttagcatcastggaggtggggacagtgatgaagatttgtatagggttacactgctgaggctgacaattagggggagttatgcctttggtaaggtggatatcgggctttag

SEQ ID NO: 431768 - DNA, 201 bp, Homo sapiens
cttgcccagtagcactgggctggatgtcagcagtggggtgggccctggcttgactcggtctccagtgtggctctgaatgagtggggagagctggagaggcaggcttgagtttcctgctgttccctattttgtagatgtcagtagcagatggcagatgctctgtgatgatgcagccatctgcatgcctcatttttcacttgt

SEQ ID NO: 431769 - DNA, 201 bp, Homo sapiens
aaggcctttcatgttttcttggtgggctgcattgttattatcccattgggggttttgggccggcgatttttgttctgctgcagggatattttgactgggarggtgtttgcgctctcagactatcatagcagccctgcggatcatggttctttcctctcccgaaaagagaatacttaagatggacattagctcagcccaagt

SEQ ID NO: 431770 - DNA, 201 bp, Homo sapiens
cctggcttcaaaggatccttccacttcagccttccaaagtgttgggattacaggcataagctatgatacctggctgatcctgtctctaaaataaaaagaawttttaaaaagtgagttgcaaaagcatcaccctttttaaccagatccttaactgtaagcaacagaaaatccttctgactttaagcaggaaaaggattcatt

SEQ ID NO: 431771 - DNA, 201 bp, Homo sapiens
gatttgctgggggcaaggtgtctctgcgggattgtttcaaccttttcactaaggaagaagagctagagtcggagaatgccccagtatgtggaggttcacargggatacagtaagggtgggagacctggggggactccatgtggataaaagggattgcatgatgtcttcatatggggaataatatttatgtatctgggtttg

SEQ ID NO: 431772 - DNA, 201 bp, Homo sapiens
ctctggcacctgtgaagccctttaaacacccttaagccccaggctccccgtttacctcagagacgtctatttttgtgtctttttaatcggggaggggggarggggtggttgtagctccattattttttttattaaaaaatacccttccacctggaggctcccttgtctcccagccccatgtacaaagctcaccaagcccct

SEQ ID NO: 431773 - DNA, 201 bp, Homo sapiens
ctagtgtctcccctgtcagtgaaaaccaggtggcatccagcgagggctacgtgctgttctaccaactgatgcaggagccaccccggtgcctgtgacacctytaagctctggcacctgtgaagccctttaaacacccttaagccccaggctccccgtttacctcagagacgtctatttttgtgtctttttaatcggggaggg

SEQ ID NO: 431774 - DNA, 201 bp, Homo sapiens; identical to SEQ ID NO: 143380

SEQ ID NO: 431775 - DNA, 201 bp, Homo sapiens
gaatgaccacaaccctttcccgatctccttttttcctagtgtctcccctgtcagtgaaaaccaggtggcatccagcgagggctacgtgctgttctaccaaytgatgcaggagccaccccggtgcctgtgacacctctaagctctggcacctgtgaagccctttaaacacccttaagccccaggctccccgtttacctcaga

SEQ ID NO: 431776 - DNA, 201 bp, Homo sapiens; identical to SEQ ID NO: 143381

SEQ ID NO: 431777 - DNA, 201 bp, Homo sapiens; identical to SEQ ID NO: 143372

SEQ ID NO: 431778 - DNA, 201 bp, Homo sapiens
cggtctcggcctttctgccctcgaggggggcggacccggctaaagccctgctgtggtgggagaagtgcagagattaagggtcaaggagttgttcgtcctcyatccccgactactgctttctgaacctcgacaccatgtcggaggtcggaggtgggggagggaatggatcgtaagtcacccatatagtctgcttcatttgca

SEQ ID NO: 431779 - DNA, 201 bp, Homo sapiens; identical to SEQ ID NO: 143347

SEQ ID NO: 431780 - DNA, 201 bp, Homo sapiens
tgtgtctttttaatcggggaggggggagggggtggttgtagctccattattttttttattaaaaaatacccttccacctggaggctcccttgtctcccagycccatgtacaaagctcaccaagcccctgcccatgtacagcccccagaccctctgcaatatcactttttgtgaataaatttattaagaaaaaatgatgtgc

SEQ ID NO: 431781 - DNA, 201 bp, Homo sapiens; identical to SEQ ID NO: 143368

SEQ ID NO: 431782 - DNA, 201 bp, Homo sapiens; identical to SEQ ID NO: 143354

SEQ ID NO: 431783 - DNA, 201 bp, Homo sapiens; identical to SEQ ID NO: 377163

SEQ ID NO: 431784 - DNA, 201 bp, Homo sapiens; identical to SEQ ID NO: 377225

SEQ ID NO: 431785 - DNA, 201 bp, Homo sapiens; identical to SEQ ID NO: 377228

SEQ ID NO: 431786 - DNA, 201 bp, Homo sapiens
gtcacgcctgtccatccagcccctgtccaggctgatccctgtgctggttgtgttgttgctagagtgaatgggcagtagagaggctgtcgatttcattgacyactcctcacccccaccatccaagtttatcttgcctcctctcctcttgtcaggactaggagggtgtggggagggcacctttcagtaggcactcactaccag

SEQ ID NO: 431787 - DNA, 201 bp, Homo sapiens
agagtctcgctctgtcgccgggctggactgcggtggcgcgatctcggctcactgcaacctctgcctcccgggttcaagtgattctcctacctcagcctccygagtagctgggactacaggcacgtgccatgacgcctggctaatttttgtatttttagtagagacggggtttcatcatgttggccaggctggtctcgaact

SEQ ID NO: 431788 - DNA, 201 bp, Homo sapiens
gctattattgatggaattccaatcctgtaaaaagctttaggaatgaagctgttcatcttagaattatttataatggtgaaaaattggaaacaaatgagcaycaatggggaatggttatgtagatagtggaaagcttattaggcaacctttaaaaaggatatttattaatagtaaaatgacaaagtaacatgaaatatgaat

SEQ ID NO: 431789 - DNA, 201 bp, Homo sapiens
agggtcttgccatgttgcccaggctggtctctaactcctgggctcaagcagtcctgctagcttggcctcgccaagtgttgggattacaggcctgagccacygcacctggcccatttttcaagctattattgatggaattccaatcctgtaaaaagctttaggaatgaagctgttcatcttagaattatttataatggtgaa

SEQ ID NO: 431790 - DNA, 201 bp, Homo sapiens
gccaccatgcctgactaatttttgtatttttagtagagatggggttttaccatattggctagactggtctcgagctcctgacctagtgatctgcctgcctyggccttccaaagtgctgggattggcatgagccactgctcccagtatgtctttttatatgtttgtaagtaatctgtttttctgtctctgcgaattgcctat

SEQ ID NO: 431791 - DNA, 201 bp, Homo sapiens
tgcccttccccgacagatctgcacagctgaagcccgctctgaccacctgtgaaaaacaggagacatctctttgtcacttcatactttcatttccttggctrgcactgagactgtcttttcttttcttttctttttttttttttttgagacagatgcttgctctgtcaccaggtgggattgcagtggctcgatctcagctca

SEQ ID NO: 431792 - DNA, 201 bp, Homo sapiens
caacccaacagtctctagaacgttccaattacctggccagtcctcacttagataacatcggactctttcagaaaagattaaacaaatcctctatttgttgrcagaggttttgctgaactggccctggggatccgaattgatcatggccatcaacacaggcagcaaagacccttcagaagtgttttattcactagccacctc

SEQ ID NO: 431793 - DNA, 201 bp, Homo sapiens
cctagaacttcccctcattcatgctacctacccctgcttgcagttcagagacactgggcacaggtccaccacacagcctttccacctctgctcctctgccyggagtgcccttccccgacagatctgcacagctgaagcccgctctgaccacctgtgaaaaacaggagacatctctttgtcacttcatactttcatttcctt

SEQ ID NO: 431794 - DNA, 201 bp, Homo sapiens
ttgatgagaccttcacattctttaataaacatttatctgtatccaggaattataggagatacaaaatgccgaggaatgcactactcatgatcttttttgakccttttaacaatccagagacatgggctgtgtaaagccacagtgcaaaatacaattaggaaaacacagcaataagaccactgtagctttgaatggtgctgt

SEQ ID NO: 431795 - DNA, 201 bp, Homo sapiens
ttgtggctatttctttggaatgcactcctggcagtagggttgctaggtctcccctcactgtcagtgtccccgctctccggggcctgcttttttcatcaccygcctccccgtaaagattcctaagttccagggctatctccttctgatggagatctcctgggtgatgtggtacacgtcacccacacccctgccaccagcctg

SEQ ID NO: 431796 - DNA, 201 bp, Homo sapiens
atttctgatttttgttattttagctaatcctacaagaaaatctttacatatgtagcttttgttactttcttgggcaaatccaggaatgacatttgaaagartaggttaaagtaaaacagcattttgcaggatgctctagacttctgttgaaaacaatcccatcaaggaaagaaaatgtttctctaactctctgttaccatc

SEQ ID NO: 431797 - DNA, 201 bp, Homo sapiens
ttgagatggatctgagtggtttcccacctccttctaggggtgaactgtcagttcaagaaggaggtttagggggatgggatgtcccctacctggggctaatsggggcttgggaggtggcttacgaatcgaagccgaagacagcagcctacgtgaccagaaaggaaaattcccctccctgctagttaagaagcttcacagaag

SEQ ID NO: 431798 - DNA, 201 bp, Homo sapiens
tttttcctccaggttttttgtttgtttgtttgtttgcctggtaaaatacacataacataaaatttaccctcttagccatgtttaagcgcacagttgagtgrtgtcaagtacattcatattgttgcgcaaccatcaccaccatccgtctctagaattcttttcattttgcgaaactgaaactctgtacccatgaaaccataa

SEQ ID NO: 431799 - DNA, 201 bp, Homo sapiens
cctttctgtcggtgaaacaggctaacagcaccccctgagcctgctgacctcttccggctctcctggtccttcacacatgtcaactgtgagcacgctccaayactgacaagactgtcttacacctgaggcaattttcatagcacaggctgctaatttttcctccaggttttttgtttgtttgtttgtttgcctggtaaaata

SEQ ID NO: 431800 - DNA, 201 bp, Homo sapiens
tgtatagctgaggtccttccaaaccccggcaagtcatcaccagaaatgtactgagccagggctgggcgcaaagcgcttcgctaaatgggccagcccctgtkcctccactttctgccctgccagaatcttgccgcacacaccttctttgatgtaagggttcatgttatttgtttttgttttggttgtttagtattataaata

SEQ ID NO: 431801 - DNA, 201 bp, Homo sapiens
aagctgcgggggccacagggactctgaggaggcgccctcaacagcctgggaccggcaggacggatcccagagcgagggcgaccagcgagcgaggcaggtgmggccctcctggctccccctccgcccctgtcctcccttgcgttgcccaggcagcctgagctcccaaggcccagagggtctccagcttacagttgcagtggg

SEQ ID NO: 431802 - DNA, 201 bp, Homo sapiens
acagagtctcgctctgtcgccgggctggactgcggtggcgcgatctcggctcactgcaacctctgcctcccgggttcaagtgattctcctacctcagcctyctgagtagctgggactacaggcacgtgccatgacgcctggctaatttttgtatttttagtagagacggggtttcatcatgttggccaggctggtctcgaa

SEQ ID NO: 431803 - DNA, 201 bp, Homo sapiens
ccttctcttttttgttttgttttgtttttgagacagagtctcgctctgtcgccgggctggactgcggtggcgcgatctcggctcactgcaacctctgcctmccgggttcaagtgattctcctacctcagcctcctgagtagctgggactacaggcacgtgccatgacgcctggctaatttttgtatttttagtagagacgg

SEQ ID NO: 431804 - DNA, 201 bp, Homo sapiens
aaaagcccttctcttttttgttttgttttgtttttgagacagagtctcgctctgtcgccgggctggactgcggtggcgcgatctcggctcactgcaacctstgcctcccgggttcaagtgattctcctacctcagcctcctgagtagctgggactacaggcacgtgccatgacgcctggctaatttttgtatttttagtag

SEQ ID NO: 431805 - DNA, 201 bp, Homo sapiens
caagtagctgggattacaggcaccctccaccacgcctggctaatttttgtgtttttagtagagacggggttgcaccatcttggccagactggtcttgaacycctgacctcaggtgatccacccacctcggtcttccaaagtgctgggattacataggcacgagccaccatgcccacccagagctgccatttctaactcaca

SEQ ID NO: 431806 - DNA, 201 bp, Homo sapiens
tggagtcttgctctgtcacccaggctggagtgcagtggcatgatctcgactcactgcaacctccatctctggggttcaagtgattctcctgcctcagcctsccaagtagctgggattacaggcaccctccaccacgcctggctaatttttgtgtttttagtagagacggggttgcaccatcttggccagactggtcttgaa

SEQ ID NO: 431807 - DNA, 201 bp, Homo sapiens
tttttttgaaatggagtcttgctctgtcacccaggctggagtgcagtggcatgatctcgactcactgcaacctccatctctggggttcaagtgattctccygcctcagcctcccaagtagctgggattacaggcaccctccaccacgcctggctaatttttgtgtttttagtagagacggggttgcaccatcttggccaga

SEQ ID NO: 431808 - DNA, 201 bp, Homo sapiens
cacacctcggcctcccaaagtgctggaattatagatgtgaaccatcacacccggccgttttcttcctttttttttttttgaaatggagtcttgctctgtcrcccaggctggagtgcagtggcatgatctcgactcactgcaacctccatctctggggttcaagtgattctcctgcctcagcctcccaagtagctgggatta

SEQ ID NO: 431809 - DNA, 201 bp, Homo sapiens
aggctggagtgcagtggcacgatctcggctcactgcaacctccacctcccgaattcaagcgattctctgcctgaacctcccaagtagctgggattacaggygcccaccaccatgcctggctaatttttgtatttttagtagagatggggttgcaccatcttggccaggctggtcttgaactcctgaccccgtgatccacac

SEQ ID NO: 431810 - DNA, 201 bp, Homo sapiens
ctaaaattgctgggaggtgaatgtgaggcaagcttttaagtgataccagtacaaatttttcatcaatggcattttcaccatcagattgtttcgccctccartcgcctagctctgctcatccaaatgagctatttcatttttcaattttagcgtttctcaggcttactagcctagagatcacatctgcttctgctaagcatc

SEQ ID NO: 431811 - DNA, 201 bp, Homo sapiens
ccatctgttgcaatccaactcatccctcttctgatttctgggcacacccataccagcacagaaacataacaatgattgcagaggtaggcccgatagtgaamaagcagcaaagctctggctggtcataggatgactgttacatccaccattttcattttttaaagatacttactctgtaggggaatattctcccgaagtaaa

SEQ ID NO: 431812 - DNA, 201 bp, Homo sapiens
ataaaatgggcacaatagcacctatctcatatggctgttgtgaggacccaaagatacaatgaatgtcagccctcagcacagggcctggcacagagacagtrctcagctaagtaactgtttctaagttgtttatgatttgaagctaaggatagagatgcttattctgagaagcagaaaggaacagatggagaaggaaaaagg

SEQ ID NO: 431813 - DNA, 201 bp, Homo sapiens
ttgctgattctgtgcctgaccagggcacatgcttcctggaattaataattctagataaagaagcctagcagatgcccacctatggaaaatgcttcttaaayaagaagaatctcagaattaggaggccagcttcttgttctcagcactgcccctaactagctgtggggcctcggacacgtcacttgatgcctctggtcctgt

SEQ ID NO: 431814 - DNA, 201 bp, Homo sapiens
ccatcgtctaaagtgtctcctgactcagttctgtccccctgcttgtcctcttctcctattagctctgggtacccagtccagatcatagccccaagctctgycatcattttgcagcctccagcctcccccacccaactcagcagagccctgagaagaaagtcctgggtcccggaggctgcacctgcagacacaacagattct

SEQ ID NO: 431815 - DNA, 201 bp, Homo sapiens
agtgtcaggatgcccagcttgcctgagttgagtgatatcaaaagggccccagaaacttacctgtgtgtggctgctgttgatccttctccttcctggccccyggaccagggggacaggcattccagcaggtttggggccagccttgtgggcctgttcgtgaccaagaaaacactagaatcaccgggcctgggaagggaagga

SEQ ID NO: 431816 - DNA, 201 bp, Homo sapiens
ttattttctctgtatactgtgagagtttatcctcagaaaaaattaaattctcagagaaatggcaaaatactgcctggaattttgacataaggggtttgctygaaagtagatttttttgaaatggtgctaattttcaagagcaaaacttgagggcagtgtgctgcgtgagaaagaacaaaggcccggcaagacctggcttct

SEQ ID NO: 431817 - DNA, 201 bp, Homo sapiens
caagagcaaaacttgagggcagtgtgctgcgtgagaaagaacaaaggcccggcaagacctggcttctcgtccaggctctgacacatgagctgtttgactgygggagagtcacttcacctccctgaccttcagtctctttatctgcaaagtggagcaaataagatctacccggcttacctcactcaattgttgttaggatca

SEQ ID NO: 431818 - DNA, 201 bp, Homo sapiens
ggcccggcaagacctggcttctcgtccaggctctgacacatgagctgtttgactgcgggagagtcacttcacctccctgaccttcagtctctttatctgcraagtggagcaaataagatctacccggcttacctcactcaattgttgttaggatcaaatgaaataaaaaatataaaagggttttgtaaactgaaagtgtag

SEQ ID NO: 431819 - DNA, 201 bp, Homo sapiens
gcgtgcgccaccaagcccagctaatttttgtatttttagtagagatggggtttcaccatgttggccaggatggtctcaaactcctgacctcgtgatccacmcaactcggcctcccaaagtgctgggcttacaggcgtgagccaccgcgcccggcctcaaatataatttctaaaggaagaaagagatagagaggggaagata

SEQ ID NO: 431820 - DNA, 201 bp, Homo sapiens
ggcgtgcgccaccaagcccagctaatttttgtatttttagtagagatggggtttcaccatgttggccaggatggtctcaaactcctgacctcgtgatccayccaactcggcctcccaaagtgctgggcttacaggcgtgagccaccgcgcccggcctcaaatataatttctaaaggaagaaagagatagagaggggaagat

SEQ ID NO: 431821 - DNA, 201 bp, Homo sapiens
ctcagcctccggagtagctgggactacaggcgtgcgccaccaagcccagctaatttttgtatttttagtagagatggggtttcaccatgttggccaggatsgtctcaaactcctgacctcgtgatccacccaactcggcctcccaaagtgctgggcttacaggcgtgagccaccgcgcccggcctcaaatataatttctaa

SEQ ID NO: 431822 - DNA, 201 bp, Homo sapiens
gcctcagcctccggagtagctgggactacaggcgtgcgccaccaagcccagctaatttttgtatttttagtagagatggggtttcaccatgttggccaggmtggtctcaaactcctgacctcgtgatccacccaactcggcctcccaaagtgctgggcttacaggcgtgagccaccgcgcccggcctcaaatataatttct

SEQ ID NO: 431823 - DNA, 201 bp, Homo sapiens
ctgcctcagcctccggagtagctgggactacaggcgtgcgccaccaagcccagctaatttttgtatttttagtagagatggggtttcaccatgttggccakgatggtctcaaactcctgacctcgtgatccacccaactcggcctcccaaagtgctgggcttacaggcgtgagccaccgcgcccggcctcaaatataattt

SEQ ID NO: 431824 - DNA, 201 bp, Homo sapiens
tggcgcgatctcggctcgctgcaacctccgcctcgcaggttcaagggattctcctgcctcagcctccggagtagctgggactacaggcgtgcgccaccaarcccagctaatttttgtatttttagtagagatggggtttcaccatgttggccaggatggtctcaaactcctgacctcgtgatccacccaactcggcctccc

SEQ ID NO: 431825 - DNA, 201 bp, Homo sapiens
aaaaaccagaccctcggcccccagcgccggagcccggcgcagatccacgccctggtctctcagcgcgggggcctgggggcgggtgcggttcggggacaagrgaccgcaagtgggggcgggcggcagcgtgtgagcagctcagatgggagatcacgcgcgataacccgggccctggatggcagcgctcgacaggaaacctcg

SEQ ID NO: 431826 - DNA, 201 bp, Homo sapiens
gggggctggggctacaggtgtgtgccaccacacccagctaattttgttattgtcattatttgcagagacgggtcttgctatgtctcaaactcctgagctcragaaatcctccagcttcagcctcccaaagtgctaggattacaggcatgagccactgcacctggccaccttttttaaaacctaattatcttgaagatcttt

SEQ ID NO: 431827 - DNA, 201 bp, Homo sapiens
tcgctcttgttgcccaggctggagtgcagtggcgcgatctcggctcgctgcaacctccgcctcgcaggttcaagggattctcctgcctcagcctccggagkagctgggactacaggcgtgcgccaccaagcccagctaatttttgtatttttagtagagatggggtttcaccatgttggccaggatggtctcaaactcctg

SEQ ID NO: 431828 - DNA, 201 bp, Homo sapiens
gctgggattacaggcgtgagtcactgtacccgaccttcaaaaataatttttttttcttttttgagacggagactcgctcttgttgcccaggctggagtgcrgtggcgcgatctcggctcgctgcaacctccgcctcgcaggttcaagggattctcctgcctcagcctccggagtagctgggactacaggcgtgcgccacca

SEQ ID NO: 431829 - DNA, 201 bp, Homo sapiens
cgaattcctgacctcaagtgatctgcccgtctcagcctcccaaagggctgggattacaggcgtgagtcactgtacccgaccttcaaaaataatttttttttcttttttgagacggagactcgctcttgttgcccaggctggagtgcagtggcgcgatctcggctcgctgcaacctccgcctcgcaggttcaagggattctc

SEQ ID NO: 431830 - DNA, 201 bp, Homo sapiens
acccactgagggggatggtctgggtgcctggatgctgtggtcaatgggtcggcatcacacccagcaccctgcccaacacagacaccgcccccacccccccmcccatagctgctgccactgccttcctaagaacagtgacttcctgttttctaagtttttaccctgcaatgtcatcaccagttgtgcctgagcctgggggtg

SEQ ID NO: 431831 - DNA, 201 bp, Homo sapiens
tacctggccagtcctcacttagataacatcggactctttcagaaaagattaaacaaatcctctatttgttgacagaggttttgctgaactggccctggggrtccgaattgatcatggccatcaacacaggcagcaaagacccttcagaagtgttttattcactagccacctccatcccccaaccctccatcgtctaaagtg

SEQ ID NO: 431832 - DNA, 201 bp, Homo sapiens
tgacgggagcagcaacagaagccactgcctttggccaggactgggggagacacaacagaacaggactggcagaagatgccacatcccagggtccccaagaycaagctatggcaccatcacccatctacagcaagatctgtagcaggaaccagggagaaaagtctagaccctcagtaaactatgcggccaggacagtccgag

SEQ ID NO: 431833 - DNA, 201 bp, Homo sapiens
cttccgttgcctcctggttcaggtctgggactgaaaaggataaaggggccgggcgcggtggctcacgcctgtaatcccagcactttgggaggccaaggcgrgcggatcacgaggtcaggagatcgagaccatcctggctaacacgtgaaaccccgtctctactaaaaatacaaaaaattagcagggcgcggtggcgggcgc

SEQ ID NO: 431834 - DNA, 201 bp, Homo sapiens
ctcacagagggctgaggccaaggagcccctcttctccctgtgacaagtccaggcttcctttgggcccaggtgtcagggacagcagattctctggagcaggyctgggccctcccccctgattcctgcccaatatgggaggtgggagactcctttctcttaggtccagcaggaagttggcggggcccaagcactgtaaggcac

SEQ ID NO: 431835 - DNA, 201 bp, Homo sapiens
cagtgtgaataaagtgctgcggagcaagaggaggccgttgattcacttcacgctttcagcgaatgacaaaatcatctttgtgaaggcctcgcaggaagacscaacacatgggacctataactgcccagcggacagtggcaggacaggaaaaacccgtcaatgtactaggatactgctgcgtcattacagggcacaggccat

SEQ ID NO: 431836 - DNA, 201 bp, Homo sapiens
aataaagtgctgcggagcaagaggaggccgttgattcacttcacgctttcagcgaatgacaaaatcatctttgtgaaggcctcgcaggaagacccaacacwtgggacctataactgcccagcggacagtggcaggacaggaaaaacccgtcaatgtactaggatactgctgcgtcattacagggcacaggccatggatgga

SEQ ID NO: 431837 - DNA, 201 bp, Homo sapiens
cccccacctcccacttccatatagccctgagcaaaccacttagtgtcagtctctaaatggcccagagcagcttgtggctccattccaggagcaaaagcacygctgagaatgtgcggatgcagcctgagacccccaccatgccagctcctagcgctaaagcaggctggtacctcacactgctttcagaatcttctaagacac

SEQ ID NO: 431838 - DNA, 201 bp, Homo sapiens
ccttccaggctttgcaggtgatatggttccttctccatccaggataactccagtgaaggatggacagaggcaagattctagctccattttggctgcaatgygtccttgttcttttctcctttgctggtcattctggtctgtttgggaattggactcgttgtctctggtcaactaacctctaaccctgccagggggactaag

SEQ ID NO: 431839 - DNA, 201 bp, Homo sapiens
aaaatgttctttcaggtctcttcgaactcataggttcttgaaaatgtgaggggcgaaattccttcattttatggcattaatgaccactaatcaatcaatcwttctctcaattatctgagcaattatgtaattactgagtcctagtgatgcctacaactgggcttcctacagtcctgcagtggtagaaacaaaggaactaga

SEQ ID NO: 431840 - DNA, 201 bp, Homo sapiens
ccctcagtgcctctaactccctactctgcagtagccaagaatgcacccagcggtcagtgtggtgtttgtcttttatcagtgaggagatggagctctgacaygcagccttggggaatgcaaagcttccaggcttgtgagtggctctgcttttaggaaggtggctggacgtggtagaaagagccaggctaatttcaggtggtg

SEQ ID NO: 431841 - DNA, 201 bp, Homo sapiens
cttttcttgctcagttaagtgacccattgcatacatcccttttaaaatgtctactttttactaagctgttgcatttgcatttctttggaaatgcccagatkattaggatcaaagcaaatgatgacctggtctgtccacatgaggaggcctccctgagagagaatctaccaagacagtcaccagggcttgaggccagaagat

SEQ ID NO: 431842 - DNA, 201 bp, Homo sapiens
ccttgcagggtcattgggataattaaagaaaatgtgtgtaatgggcccagatggagctaggcccatagcagcactgtaataaatgttttcgattactgtamattttacaaaaatgaatgactgaatggaaaggtagaaaggccaaatagagtgtctgaggcatctccatggaggagggtgccagtggccatgtctgtctgt

SEQ ID NO: 431843 - DNA, 201 bp, Homo sapiens
aggcaaagcgcgactcagagaggccttgacaccgagggctgcgatggtgcttttgctgcctgaggggacacctccacagtctccccggaggaaaggccgcwcatagaatttcagtcaggtcttctctcttttcttgctcagttaagtgacccattgcatacatcccttttaaaatgtctactttttactaagctgttgcat

SEQ ID NO: 431844 - DNA, 201 bp, Homo sapiens
tttactctcagaaaatgcatctattctggaacttccttagagggatgcgcctcaatttgcagttcaacccactcctgtgtgtgcaggtatgcacaccgctyaccaccccactgtatgcagaggttataagtaaaatgtaaattaaatcatatttgagaggttttgccctgaataaattgcctgtaattaatctgcttggta

SEQ ID NO: 431845 - DNA, 201 bp, Homo sapiens
aattttcatcattgtgtggggcctgtgctaatttccatgctgagtttagtagcaaaggaagcatatatggaggataccacccaggacttttgagtcagccragagagcttcagaaattcctcctttgatttccacagagtcgagagaaatctttgtcttttctcccacttaactatcaacacttcaaagcccagacctaca

SEQ ID NO: 431846 - DNA, 201 bp, Homo sapiens
cgaatgcttggagcagggtttctcgacctctgcactaaaacacctggggccagataattctctgtggctgtgggcaccagggaggctgttctgtgcattgyagaatgttgagcagcatccctgacctctacccactagatgacagtagcactccccaagttgtgacaactcaaaatatctttagacgttgccaaatgtttc

SEQ ID NO: 431847 - DNA, 201 bp, Homo sapiens
gtcaggggcaggttggggacaggagacgttcttaagagcagaagtagtaccagtagcgtgcatgctgcctcagtttttcttggtgtattaaagacttgtgkggcctcatctccactccttctccaactaaattaaccctattctttttatttttattccactttctaaacggtttcccattttcatcgccctgccaagacc

SEQ ID NO: 431848 - DNA, 201 bp, Homo sapiens
actgcccagcggacagtggcaggacaggaaaaacccgtcaatgtactaggatactgctgcgtcattacagggcacaggccatggatggaaaacgctctctrctctgctttttttctactgttttaatttatactggcatgctaaagccttcctattttgcataataaatgcttcagtgaaaatgcagctttactctaagct

SEQ ID NO: 431849 - DNA, 201 bp, Homo sapiens
ggcattcctgccccagcaggggctaggcctgagtcacatgcagggcaggggcctggtcacagcctggggcctcacctgagaaagacctgtgagaaaacatyccaatcccactcattcctgcccacaccagggctaggcacgtggggacagcagggacggtgaagagcatgtttgggaatgtgatgttctgtggtggcttgt

SEQ ID NO: 431850 - DNA, 201 bp, Homo sapiens
ccattatctgtttttatcttcaaacacccctgaagagtgggtatccccatcctgggctgggaaacctggccaggttctgtccccaaccgtggcatgatggkgtgggaggtcagagggccatcccctgctgtcactccttgtacctgcagagcctcttagcatgcgccactgtgcagggcaccccacaaactttacctcatt

SEQ ID NO: 431851 - DNA, 201 bp, Homo sapiens
gtcacagctgttttctcagaaaagccttgtggggtctaagtcacacacacagtgtggcagagtgagggtgcctgagcttgctcagagcagcccatccttgygtgctggggacaaggggacccagaacgctggaatttagtgacttcaggggagacagccaggggcaatagctccagcctctgagcttcaggcttgagacac

SEQ ID NO: 431852 - DNA, 201 bp, Homo sapiens
tggcatcttcctgagaagtggggcaggctgaatttcaatctaaagaaacagggaaggtgaagcaagcaaatgtcctcggcccacctgatcgctcctggtarctcacctgggtgtgggaatttgtttaggggccctgttgggagggcaggagaggccatgggcacttctgctcccaccagggagccaggcacagcccgggcc

SEQ ID NO: 431853 - DNA, 201 bp, Homo sapiens
ttgtctagaactccacctcctatctttttgagcctaacttgagcccctcagctcagtgcaaagagctggcagctcggaggagactccaaagggctgaggaygaggggggtgggctggagctggttgtgggcagagaagtttgtgtgcataaggtttggagccttgattgtgggagccctccctgtctgccactgctgccaa

SEQ ID NO: 431854 - DNA, 201 bp, Homo sapiens
tgtctagaactccacctcctatctttttgagcctaacttgagcccctcagctcagtgcaaagagctggcagctcggaggagactccaaagggctgaggacraggggggtgggctggagctggttgtgggcagagaagtttgtgtgcataaggtttggagccttgattgtgggagccctccctgtctgccactgctgccaac

SEQ ID NO: 431855 - DNA, 201 bp, Homo sapiens
gctgtgcatgcatatctgtggcctggaggagtggggtgagtaaccttacaggaaggaataccctgcactaaaatttgcacctaagcttccattattacgcmtacttttcattttctgtttgttttcctcttagaggttaaattttccattcctgattttaacccaaagaaaggctaagtaaattccaggggccactcttga

SEQ ID NO: 431856 - DNA, 201 bp, Homo sapiens
aactgcagaaagataagatggcggaggcctacagtgagattgggatgaaaggcgaggtgagtgttgctgtttcttaatttccgagggagttcctcttggtyctccagacacgcctgctgcaggcctcctttcccatccacttctcatcccagctgcaaatgcccatgtggtggccatcagaggtgaaggcgaacctggctg

SEQ ID NO: 431857 - DNA, 201 bp, Homo sapiens
agttggggtttgaattccattcttctggattcaaatctaagctctccctctgcacagttacatgtgggcaggctgtgcatgcatatctgtggcctggaggmgtggggtgagtaaccttacaggaaggaataccctgcactaaaatttgcacctaagcttccattattacgcctacttttcattttctgtttgttttcctct

SEQ ID NO: 431858 - DNA, 201 bp, Homo sapiens
cgtggcatcttcctgagaagtggggcaggctgaatttcaatctaaagaaacagggaaggtgaagcaagcaaatgtcctcggcccacctgatcgctcctggyaactcacctgggtgtgggaatttgtttaggggccctgttgggagggcaggagaggccatgggcacttctgctcccaccagggagccaggcacagcccggg

SEQ ID NO: 431859 - DNA, 201 bp, Homo sapiens
atatacacatatgtatgcaagtgtgtgtgtgtatcttacactctatgtgcctggcatatagcaagtgttgtctgctaacctgagagacttgtccactggcsttggggggctcttggtggaatgagcggagggaactgaaacatgcaacctgctcaccaaaggagatcacttgcctgtcattgtttactcccagagcgtgac

SEQ ID NO: 431860 - DNA, 201 bp, Homo sapiens
gaaggaagcaagagagcaaccgaggcaggcccagggtagagaaacggagagggagtgtttcacagaagctggacaggatcggaaaatgtcagccaggccaygtttcgtgctgcgacgttctagtcccttcagcttctttcaccctctggctggctccgtcactcagcccctttctttcttcctttgccaacaaagaagatt

SEQ ID NO: 431861 - DNA, 201 bp, Homo sapiens
acataatgtgtccttgtcaaaagagaaaaccctgcagctgttccccatctcattcagagtaaaagccactggccaaggaagttctacctaacaaccccacmcgcttgtcgccctctttcctagtctcctagaacttcccctcattcatgctacctacccctgcttgcagttcagagacactgggcacaggtccaccacaca

SEQ ID NO: 431862 - DNA, 201 bp, Homo sapiens
gacagggtaggagggagagcctggtgctaggcacctccatgacaagccgtacaaatgtgtgcacatcagagtgtcccagggaaggcgatgctactggtgayaaaggggcttacactcaggcagaggtccttctttccaagtgtgaatgaaggccatgttagcctttctcttgaaaaggccctttcctcatctgtaactggg

SEQ ID NO: 431863 - DNA, 201 bp, Homo sapiens
gaggagagctctgggggtgtcaggggcaggttggggacaggagacgttcttaagagcagaagtagtaccagtagcgtgcatgctgcctcagtttttcttgrtgtattaaagacttgtgtggcctcatctccactccttctccaactaaattaaccctattctttttatttttattccactttctaaacggtttcccatttt

SEQ ID NO: 431864 - DNA, 201 bp, Homo sapiens
ctggtattacaggcgcccgccaccacacctagctaattttttgtatttttagtagagatgtggtttcaccctgttggccaggctggtagcaaattaaagaragtagtaaaacattatatgttgccagtaaattagctggagtcgttctgcagttcagggtgattgaggtatctccagtgggtcattgctataagcactggg

SEQ ID NO: 431865 - DNA, 201 bp, Homo sapiens
gatggcgttgtctccagtcgggtggtgttgggggctgaacctactgtgggttcatggtcatcctcaggccagagaacttttcacaggacctagaagacctmtcattcatgctgagacagttcagaggttgagcctccttctaagagttgtccagagggtaaaaagaaaggtccccagaagtcttggttgagaggcagaaga

SEQ ID NO: 431866 - DNA, 201 bp, Homo sapiens
agaaagtctacacactactgagctcccactgtgtgccaggcactttgtacacacccattatctctttttattttttttgagacggagtcccactctgttgyccaggctggagtgtagtggcgtaatctccgcttactgcaagctccacctcctgggttcacaccattctcctgcctcagcctcctgagcagctgggaccac

SEQ ID NO: 431867 - DNA, 201 bp, Homo sapiens
aaaaaagaaagaaagaaagaaagaatattggttagttcctttgcagcccagtttgtgtggttactggatcagattaggcacctcagagagggccaaaaccrtgagccaaacaagggcttacccagaccttccccctccccacattttagtttttcacccatccttgaatagacctgggctctgtcctaacaggctgtggta

SEQ ID NO: 431868 - DNA, 201 bp, Homo sapiens
caccaccatctaatgagacaggtagtgttgttatccccattttacagatgagaaaacgaaggcttagagaagttccataatacacagttcagaagtacagygtataagaaggaccaaagctttaattttattgcatctgtttgacagaaatttacatttgttgtagggtatggctgcatctctacagaaggcagggcttcc

SEQ ID NO: 431869 - DNA, 201 bp, Homo sapiens
gcctctccactttgtccttctccttctgcaatgtcaagcggtcaggccatcccattcattcattcactcaacaaatatttactgagctccccagacgcagygccaggccacagcggcacagggacagagctgtgagcagggcgtgcaggggtctgtctgctcttggatgggctgagttggctgctctccctgcaagctccc

SEQ ID NO: 431870 - DNA, 201 bp, Homo sapiens
tgaggccacctgcccctcggagcatggtggtgtgtccttgcaggggtcagagtggtgtgtggatggcagtgggggccgtggaaggaggcttctggaaggcrgcccacaatgactcttaaccctcccctccccagcctccagtcgttttctttcagttaattacctggttgttcaacctccttggcagctccatagtttctt

SEQ ID NO: 431871 - DNA, 201 bp, Homo sapiens
gaattgatgtcagtgctttgagatcatcagataaaagctaataaacaacacatatgtgtacaggccacctctctaattcataccagaagcgctggttgtartcaaagcatggcatattttattttaaactattttataaataacctttgaaactgtgttgattgtgaaagccaagatctgatgtcctgttaaggaaagatg

SEQ ID NO: 431872 - DNA, 201 bp, Homo sapiens
ctctcctccacccaaccacacacagcacacttgtcatcagtcataaaactatgcagaaagaaaggaagaaggaaggagggaaggaagaaaggaaggaaacwtgttcatattatttatctcagggacatgcccaatccccctgcccctttgtgttgtgctgagtctgcacaacacaaagaaatatttcttatttgtgctaaa

SEQ ID NO: 431873 - DNA, 201 bp, Homo sapiens
acaagagcagagggacagggtggcacaaagctgtggtcttttcaggcctggactggttatggcagagccctaacatggctggacaaagagcttggactctygtccgagtggctgggtcatcaatggtctctgggcagggtctgtgggaggtttgtagagatcagctgcctgggggcaagaggggtcctgaattagggttgg

SEQ ID NO: 431874 - DNA, 201 bp, Homo sapiens
agatgcacacacggtgacgccatctgccccaagaggacagacctggtgaagaggtccatacaggaagggcccaagacccctggataacccacatatggtcrgggtatggtccctggggggtttgacctcttggctttgtagacactatacctgtgggtatacctgtgggtaggggagcagctggatgacaccacagtaggg

SEQ ID NO: 431875 - DNA, 201 bp, Homo sapiens
gggtgcaacggcacagtctcggctcaccacaacctctgcctctagggttcaagcaattctcctgcctcagcctcccgagtagctgggattacaggcatgcrccaccacgcttggctaattttgtagtttttttagtagagacggggtttctccatgttgatcaggctggtctcgaactttcgacctcaagtgatctgcccg

SEQ ID NO: 431876 - DNA, 201 bp, Homo sapiens
tccaggttttccaacaccgtttattgaagagaccattcatttcccattgtatattcttggcaccttttgctaattgctcggctgggacctatgttactatrttgaatagaagtagtgagtgtgggcatctttgtcttgtttcagatcttagaagaaagggaggaaaggcttcagcttttccctgctgagtgtggtgttagc

SEQ ID NO: 431877 - DNA, 201 bp, Homo sapiens
aggagcctaggccaggtgcaaccagggagctgcaggggcatgggaaggtgggcgggcaggggagggtcagccagggcctgcgagggcagcgggagcctccstgcctcaggcctctgtgccgcaccattgaactgtaccatgtgctacaggggccagaagatgaacagactgaccttgatgagctgtgcacaaagtggcata

SEQ ID NO: 431878 - DNA, 201 bp, Homo sapiens
ataaggtttggagccttgattgtgggagccctccctgtctgccactgctgccaacttggggatcaagaagcttcctgttgtaggggaacctgctgctttcygcattagttggtaaaaatcagtgttccacgccctcttctgcaggaactgcagaaagataagatggcggaggcctacagtgagattgggatgaaaggcgag

SEQ ID NO: 431879 - DNA, 201 bp, Homo sapiens
gcagaaaagaccccaggtgagtgtgggttgtaaccaagtgaaggagtccatgccatctgcatccatgagggtgtgatgtgcctggttgtccctcacaaggrggtgctgaaggatggggactaaaggattcaggacagggccagtgtttggcctgattgttatttcctgggttccctagataccaaatacctgggttctgcc

SEQ ID NO: 431880 - DNA, 201 bp, Homo sapiens
caatctaggacgaagagaggagtacgatgttttggacaagagacgtggccgggaccctgagatggggggaaagccggtaggggttcctctaccttcctgtrtgttcctgcatgtgtggtggggctcagcccaggctgtgggggagggctcctcagctcactctgcaaccagactcgaccctcacatgtgtgggcccgggac

SEQ ID NO: 431881 - DNA, 201 bp, Homo sapiens
gccccccttagatcttccaataggtccacagaaggcagaaaagaccccaggtgagtgtgggttgtaaccaagtgaaggagtccatgccatctgcatccatragggtgtgatgtgcctggttgtccctcacaagggggtgctgaaggatggggactaaaggattcaggacagggccagtgtttggcctgattgttatttcct

SEQ ID NO: 431882 - DNA, 201 bp, Homo sapiens
tcattttcaaatgccccccttagatcttccaataggtccacagaaggcagaaaagaccccaggtgagtgtgggttgtaaccaagtgaaggagtccatgccrtctgcatccatgagggtgtgatgtgcctggttgtccctcacaagggggtgctgaaggatggggactaaaggattcaggacagggccagtgtttggcctga

SEQ ID NO: 431883 - DNA, 201 bp, Homo sapiens
ccccagtccagctggctccatccttctgaggttcctccgtcctgtgtctgacactttcttatctgttataggagctcaatctaggacgaagagaggagtaygatgttttggacaagagacgtggccgggaccctgagatggggggaaagccggtaggggttcctctaccttcctgtgtgttcctgcatgtgtggtggggct

SEQ ID NO: 431884 - DNA, 201 bp, Homo sapiens
gtgttagcctccctctccctttctccttttaaaaaaagaaatgatgactttttcaggtctctgcttccagatatgaggggctttaggtatttgaagtcagragggaggcaggaatgagcactgctaattgggtgcatcctggtgtgctaatataaaggacagccaatgtaatcgtgggtttctgagtttgctgtctgtacc

SEQ ID NO: 431885 - DNA, 201 bp, Homo sapiens
tcgctgatttaaattcaggcaataggttgacattatccttaattgaatagttttagaaaatgaatctatgtagatccagatcaaattctaaccaatcattrcaatggggtcttttttcttgaatgttcaaagttgattttcctccacaaaataatgactctttggtgtccaagtaataaattagcacagttcagttcaagt

SEQ ID NO: 431886 - DNA, 201 bp, Homo sapiens
aaaaacaaacaaacctccttttctttgtcaccatttctctgaccatcccctgtaaattcgtaggacatggtactcacagaaaaaggaaaattcattagccraatgaatcgctgatttaaattcaggcaataggttgacattatccttaattgaatagttttagaaaatgaatctatgtagatccagatcaaattctaacca

SEQ ID NO: 431887 - DNA, 201 bp, Homo sapiens
ctggactccactgcaatcccaaggtgattttagttcaaggagagtggcatctgcttgggggaaattagaaacttcttatttccatttataaattaggcttyactaaggaagagaacttaaaaacagttttattgttgtccactgaaaagacaattacttccagccacaactggcacattccatggtaaaactagcgcaatc

SEQ ID NO: 431888 - DNA, 201 bp, Homo sapiens
ggaggctacatctgtgtctgtcacctccaccctcactgcccagcacagtgcgtgacattttctcctagtaaggatggccaccacatgaccactcgtgaggygccactccttggcttgtaggtggccatctctccctgtgtctttacatcatcttcacggcatcttccctctgtacatgtctgtgtcctaatctcatctttt

SEQ ID NO: 431889 - DNA, 201 bp, Homo sapiens
aataggactacaatctggaatcacaggtgtaagcccccgcgcccagccgtggttattgttaatagtgctacaatcaacatgggagtatagacatttcttcracaagcagacttcaaatcttttgggtaaatacccagaagcgggattgttgggtcatatggtagttctatttttagttttttgtggagcctcaatactgtt

SEQ ID NO: 431890 - DNA, 201 bp, Homo sapiens
ggaaatgcccagattattaggatcaaagcaaatgatgacctggtctgtccacatgaggaggcctccctgagagagaatctaccaagacagtcaccagggcytgaggccagaagatcctaagatggcgtgcctagtggcatgggcacacttgtgcctgcagagccctcagtgcctctaactccctactctgcagtagccaag

SEQ ID NO: 431891 - DNA, 201 bp, Homo sapiens
ccataaccagtgccacctgtttccctccagtctgcattttcacgtgctactttctttacatggttgggattaaacagtatgaataacccaactgtccattmgctatgtgagtttgaatacttttagtaacaggatggtttatcttttttggtaactaggatctcactacatttttaggtatgccatgcctttttaaataga

SEQ ID NO: 431892 - DNA, 201 bp, Homo sapiens
ccctgtctcaaaaaaaaaaaaaaaaaaaaaaaaaagaaagaaagaaagaaagaaaaaaacagatgcccatcaaaaggaaatgcattttgctgaaagtagcrcagttttcccagggaaataacatttgagccgagccttgaaagatgagtaaaagttcgtcaagctgaaaaatttcatcgtaagatgagtcgaacacagggt

SEQ ID NO: 431893 - DNA, 201 bp, Homo sapiens
ccttctccttcctggcccccggaccagggggacaggcattccagcaggtttggggccagccttgtgggcctgttcgtgaccaagaaaacactagaatcacygggcctgggaagggaaggaggctcacagagggctgaggccaaggagcccctcttctccctgtgacaagtccaggcttcctttgggcccaggtgtcaggga

SEQ ID NO: 431894 - DNA, 201 bp, Homo sapiens
agctctgacatctcggctccacatacagtggtctgaagtggcatacggaccctgagaagaggagaggcaaaggtggcagctgtggctggcccctcctgccytctggtctccttggctggtgagggaagaacaaacacagttgtgtttccaggtcacagctgccagggctccacctgtggggtgggtggctccagttctgtt

SEQ ID NO: 431895 - DNA, 201 bp, Homo sapiens
acacttccagcatactgcagaggcattctcttccagcctggttgcctgtcaagcacctgctgagatgactggcccagacggagattgtggggttgctgagscagccctgtcccctccttatctccggaagatggaataaatgcgtgtcagaagggagggtgcctcccatctcgggagcaccggggttgcccttcagaaaaa

SEQ ID NO: 431896 - DNA, 201 bp, Homo sapiens
caggtgtgtgagtgggtcgttttcctgggtctccctcaatccacaccctagactaggtttttgcttctgcttccacccccactacaatccaagatgggagsttccccacccaaaaacaaacctcagcctctccactttgtccttctccttctgcaatgtcaagcggtcaggccatcccattcattcattcactcaacaaat

SEQ ID NO: 431897 - DNA, 201 bp, Homo sapiens
ccaccattcttggtgggttggatttggggctggtgacaggactgaaaggagggattcctgagcttgtgccccttaatttacctcccaactgccctggcgtyaaccacctagtaagccatgccgggataccctccccacgggagcctagcacgccagccagcatgctgacaaaaggaggagtaaggcagctccctaatctca

SEQ ID NO: 431898 - DNA, 201 bp, Homo sapiens
tggaaggaggcttctggaaggcggcccacaatgactcttaaccctcccctccccagcctccagtcgttttctttcagttaattacctggttgttcaacctycttggcagctccatagtttctttccccacccccaacatccacagccctcttggtctcagagctcagccagaaggaggcagagagtaaaagtcatattgtt

SEQ ID NO: 431899 - DNA, 201 bp, Homo sapiens
actccccagtccagctggctccatccttctgaggttcctccgtcctgtgtctgacactttcttatctgttataggagctcaatctaggacgaagagaggartacgatgttttggacaagagacgtggccgggaccctgagatggggggaaagccggtaggggttcctctaccttcctgtgtgttcctgcatgtgtggtggg

SEQ ID NO: 431900 - DNA, 201 bp, Homo sapiens
gcaaaattcagacagacagatacatacacacaccccaaaccctcaaacctccagggcttcctgcctgtgaaccgaaagggggagtgcgaatttcttggccstgtcggcaggtgctttctcaaaggccccacagtcctccacttcctggggaggtagctgcagaataaaaccagcagagactccttttctcctaaccgtccc

SEQ ID NO: 431901 - DNA, 201 bp, Homo sapiens
caatggtcaaatgagagaaaaagcaaaattcagacagacagatacatacacacaccccaaaccctcaaacctccagggcttcctgcctgtgaaccgaaagrgggagtgcgaatttcttggccctgtcggcaggtgctttctcaaaggccccacagtcctccacttcctggggaggtagctgcagaataaaaccagcagaga

SEQ ID NO: 431902 - DNA, 201 bp, Homo sapiens
gaaaagaatacagaaacaaacaatttctcatccacatccccagagtaaccataaccagtgccacctgtttccctccagtctgcattttcacgtgctacttyctttacatggttgggattaaacagtatgaataacccaactgtccattagctatgtgagtttgaatacttttagtaacaggatggtttatcttttttggta

SEQ ID NO: 431903 - DNA, 201 bp, Homo sapiens
ccagactcaggagtaactcagagataactccccgagagttgaacaatgagaacacatggacacagggcggggaacatcacacaccagggcctgtcgggggrtcagggggctggaggagggatagcattaggagaatatctaatgtaaatgacgacttgataggtgcagcaaaccaacatggcacatgtatacctatgtaac

SEQ ID NO: 431904 - DNA, 201 bp, Homo sapiens
tagggctggatatattcgtagaatcttccagacccatccaacccagaaggtggtggtccccgaagagtggtggtgtacatgagaagctgggggaacgtgtyacaaggcagacccctgggccggccttcagagagtctcattcacctgctctggaaacactgctaaggacttggcctctgctgtgagccaagaggaggaaag

SEQ ID NO: 431905 - DNA, 201 bp, Homo sapiens
ttaggtggcattaggggaaggacacttccagcatactgcagaggcattctcttccagcctggttgcctgtcaagcacctgctgagatgactggcccagacrgagattgtggggttgctgagccagccctgtcccctccttatctccggaagatggaataaatgcgtgtcagaagggagggtgcctcccatctcgggagcac

SEQ ID NO: 431906 - DNA, 201 bp, Homo sapiens
ttataaggacaccagtcatattggattagagcccaccctaatgacctcatcttaacttgataatctgaaagcaccctatttccaaataaggtgacattcaragggtgttaggacttcaatatcttttgaggggacacagttcaacccataacacctaccaacggtttctggaatcatctctcaaaataaactatctaaact

SEQ ID NO: 431907 - DNA, 201 bp, Homo sapiens
gagaatttgctatttagggatttttttttttttaagatagggtctcccttcttcactcaggctggagtgcaggggtgtgatcacagctcactgcagcctcraaatcctgggctcaagcaatcctaccacttcagcctcctgagccattggaaccataggggtgcaccatcatgcctgactaattttttctttttttgtaga

SEQ ID NO: 431908 - DNA, 201 bp, Homo sapiens
tttctgggtggtttatggggcaagagtaggaagagcttggttttgaggaccaggggaagaagagatgacaatgactatgtttggctgaatgcagacaggtwatggaggctggcagtatagcctggattttagggctgatttgaagcctgtcctggggcttgccggggcatctccagttagcccaggggcccaaggcaactg

SEQ ID NO: 431909 - DNA, 201 bp, Homo sapiens
atatgacaggaaccccagaggcactgggataaggtagattgagaagggactttgcatcagatgcactcagaaaatctctagccatgtgacctattggagcygcaacgtcattatctgcaaaatagaattggtaataattctgcccgtattgtgcaaggttgttctgaggattaagccagatcatgcaagtgcaaagagctc

SEQ ID NO: 431910 - DNA, 201 bp, Homo sapiens
taagcctgtgatgtgcgggtgaggagggaaaggtgcaaatgaaactataaggcaccatctgtgcttgccagagccagtggtggggggcggacttgaagtgraacgtttacaagccgttgtgactaagtgtcaaaagtgggcaaaatggcaagggctgtgaaatcagaggtaggtggaaactccggatcctgagcccatagg

SEQ ID NO: 431911 - DNA, 201 bp, Homo sapiens
tttacaagccgttgtgactaagtgtcaaaagtgggcaaaatggcaagggctgtgaaatcagaggtaggtggaaactccggatcctgagcccataggtcagstgcatcgaagccataaggctaagagaagtacctggagtcaggagacccaggaattcccttccagctttgccactaacctgcaggtgtccttggtgaagtt

SEQ ID NO: 431912 - DNA, 201 bp, Homo sapiens
actgggaattttagccactgtggatttgttggttacaatttagcagaaggcagggctaagaacaaaggtgggtaaagaaaagtgagggttctcagccttgrtttccctttactgggagcaaagtatcaagggtagaaataccagcccttcccaggtgtctggtgagtgcctgagatgagccaggtgacctgagctctctat

SEQ ID NO: 431913 - DNA, 201 bp, Homo sapiens
actttaaaagtagaaattagagttcaaatgagaagaatccttattagttggatgtgagtaagtcccgcagatgcccagctccgaaacaggatttgctggaraaggaggttgactgcaggggaaagggcaccagcgtgtattttcagcctcagggtatggcaggaccaggttgattaaggcctgatccctgttagcagaagt

SEQ ID NO: 431914 - DNA, 201 bp, Homo sapiens
aaggagattaaaatctgactttaaagtctcaggcagtaactttgcctgaggctggctcccccttcccagccccacccccagactcagagccagggagaagmaaaagagggcagtgagactattcagtatctctatccatctataattaggcagatttctcttgcgaatgaaatcagagagaaatatttaggaagaaggaag

SEQ ID NO: 431915 - DNA, 201 bp, Homo sapiens
gagcctcaggggagagggcggtggattgagagtctgtgtgagaatgctctattagtctctggggctcctttcagatgctgaggttctcctgggtgctgtamtcttgggtagggatcaggaacattaaataaaacagcttctccacttttacagaaaagtagctaccatgtaataccctgaaacctcctaggaagcagctgc

SEQ ID NO: 431916 - DNA, 201 bp, Homo sapiens
acagggaagggaagccgagcaccagatcccactgtcctaggcgggagagtgcttggcactgaggaggcagggagttgggggagagttaacccagattctcyctgtcctagttaactgtcagatattgaaatgatctcatttgaccatcatttgacctattgtctccctgtgggtaggcctcagagccacacacctcaggcc

SEQ ID NO: 431917 - DNA, 201 bp, Homo sapiens
gacagtttctctgtctcttgcatatctagaattccttcccccacagcccgacccctctctttatttctttgaactgtacgaagctaggttatttgtgccayagaatctcccacagtgtgaatttttgctgattgcatccctgtggtgtcatttaacgtgttcctctgcctcctgtgttttttctaaactggctgttgaatc

SEQ ID NO: 431918 - DNA, 201 bp, Homo sapiens
ggggcatatgaggcaaaagagaagtagaaaatgtggctctgcagtcacgaagctcatgccaaaggggagaggcacgaagcagtaaagaatgcagttgtgcyaaattatttggtgcaggcaaagaactggcgtttgcagaagcccagtgcccctggagcaacctcaaccaatgggtagaatgtggactggcaggaggaaggg

SEQ ID NO: 431919 - DNA, 201 bp, Homo sapiens
ttctcccgcctgaagcggcatgaagtgaagcaggagtgaggctgtgtcagcttcccacagatgctcaggacactaagcgaacgcgaggcttcctgggcacyggggcagccgggcgatggctgagggctgggcgagtgatgcacgtacagtacactgctccgggggtcaagataggaggcgggatcttgaccagccgccatc

SEQ ID NO: 431920 - DNA, 201 bp, Homo sapiens
gctactcaggaggctgaggcaggaaaatcgcttgaacccgggaggtggaggttgcagtgggctgagatcatgccactgcactccagcctgggtgacagagyaagacttcatctcaaaaaaaaaaaaaaaaaaaaaagagttgtaaggaaaaagccagagaaagtagtgtatttcttgaacctttaaaaaaaattaacaatt

SEQ ID NO: 431921 - DNA, 201 bp, Homo sapiens
atttcaacccataatgttatagcgcttcacttctcaccaactgcttttcttctgaagggggaccccaggactattttccaggacaactcttcctgtttcaacatgtagaaaagtaaagaaaataatataataaactacatatacatacgttagtgtgtatttccaaaagataagcaccctttaaagaaaaaaaatatatac

SEQ ID NO: 431922 - DNA, 201 bp, Homo sapiens
gacaatgttataattgtgctatatgtcagccttgttgtttcacatgtaaatcttagagttttatcacgtcacaaatgttcccaagaatacacaataaaagycaagaaattgtagcttgtcatgaattaaatgaattacttgtaaccaaataatttcaaaagcaaaattataaaaatgctttcaactgttttcatagaaaaa

SEQ ID NO: 431923 - DNA, 201 bp, Homo sapiens
tacaaaaattagccgggtgtggtgacgtgtgcctgtaatcccagctactcaggaggctgaggcaggaaaatcgcttgaacccgggaggtggaggttgcagygggctgagatcatgccactgcactccagcctgggtgacagagcaagacttcatctcaaaaaaaaaaaaaaaaaaaaaagagttgtaaggaaaaagccaga

SEQ ID NO: 431924 - DNA, 201 bp, Homo sapiens
acatggcaaaatcctgtctctactaaaaatacaaaaattagccgggtgtggtgacgtgtgcctgtaatcccagctactcaggaggctgaggcaggaaaatygcttgaacccgggaggtggaggttgcagtgggctgagatcatgccactgcactccagcctgggtgacagagcaagacttcatctcaaaaaaaaaaaaaaa

SEQ ID NO: 431925 - DNA, 201 bp, Homo sapiens
gccaacatggcaaaatcctgtctctactaaaaatacaaaaattagccgggtgtggtgacgtgtgcctgtaatcccagctactcaggaggctgaggcaggaraatcgcttgaacccgggaggtggaggttgcagtgggctgagatcatgccactgcactccagcctgggtgacagagcaagacttcatctcaaaaaaaaaaa

SEQ ID NO: 431926 - DNA, 201 bp, Homo sapiens
aggcggatgacctgaagtcaggagtttgagacaagcctggccaacatggcaaaatcctgtctctactaaaaatacaaaaattagccgggtgtggtgacgtrtgcctgtaatcccagctactcaggaggctgaggcaggaaaatcgcttgaacccgggaggtggaggttgcagtgggctgagatcatgccactgcactccag

SEQ ID NO: 431927 - DNA, 201 bp, Homo sapiens
caggcggatgacctgaagtcaggagtttgagacaagcctggccaacatggcaaaatcctgtctctactaaaaatacaaaaattagccgggtgtggtgacgygtgcctgtaatcccagctactcaggaggctgaggcaggaaaatcgcttgaacccgggaggtggaggttgcagtgggctgagatcatgccactgcactcca

SEQ ID NO: 431928 - DNA, 201 bp, Homo sapiens
cactcaggctggagtgtagtgatgtgatcttggttcactgcagcctggacctcctcgggctcaggtgatcctcccacctcagcttcccgagtagctgggamtacaggtgcgcaccaccacacccagataatttttctattttttgtagagacgggatttcgccatgttgcccaggctagtctcaaacccctgggctcaagc

SEQ ID NO: 431929 - DNA, 201 bp, Homo sapiens
tctgcacattttggcacacagggcagatttttctgaagcacaggtatattgcccttcaacatctgagacatacggctcttggtcataatcttatttctttwtttttatttttattttttgagacagggtctcactctgtcactcaggctggagtgtagtgatgtgatcttggttcactgcagcctggacctcctcgggctc

SEQ ID NO: 431930 - DNA, 201 bp, Homo sapiens
gggcctgtcggggggtcagggggctggaggagggatagcattaggagaatatctaatgtaaatgacgacttgataggtgcagcaaaccaacatggcacatrtatacctatgtaacaaacctgcacgttgttcacatctagaacttaaagtataatttttaaaaaaagaagaaataactcgccgaggccgtgggagtagtta

SEQ ID NO: 431931 - DNA, 201 bp, Homo sapiens
agtttttagcatgaaaggatgttaaattttgtcaaatgcttttcctgcatctagtgagatgatcatgatttttgttcttcattctgttaatgtggtgtatmatgtttattgatttcgtttgttgaaccatccttgcatcccagggattaatcccacttgatcacactgaatgatccttttaatgtgttgttaaatttgact

SEQ ID NO: 431932 - DNA, 201 bp, Homo sapiens
gtccccctggtgtctcccagcccagactcaggagtaactcagagataactccccgagagttgaacaatgagaacacatggacacagggcggggaacatcayacaccagggcctgtcggggggtcagggggctggaggagggatagcattaggagaatatctaatgtaaatgacgacttgataggtgcagcaaaccaacatg

SEQ ID NO: 431933 - DNA, 201 bp, Homo sapiens
ttgttgcccaggctggggtgcaacggcacagtctcggctcaccacaacctctgcctctagggttcaagcaattctcctgcctcagcctcccgagtagctgrgattacaggcatgcgccaccacgcttggctaattttgtagtttttttagtagagacggggtttctccatgttgatcaggctggtctcgaactttcgacct

SEQ ID NO: 431934 - DNA, 201 bp, Homo sapiens
tgttccacagtctctttatctgttcattctttgatggacacttaggttgattccataacttggttattggtttcttttgttttgttttcttttttttttttgagacagcgtttagcttttgttgcccaggctggggtgcaacggcacagtctcggctcaccacaacctctgcctctagggttcaagcaattctcctgcctc

SEQ ID NO: 431935 - DNA, 201 bp, Homo sapiens
gtaggggagcagctggatgacaccacagtagggtagggtcctctttgttttttccccttcattctgatttccttccttccttccttccttccttccttcctctgtctttatttattttatattgacaaattatagttctacatatttatggggtacaaagtattgttatgatttttgaatataatatgaaatgattaaatt

SEQ ID NO: 431936 - DNA, 201 bp, Homo sapiens
tacccacaaagcaggcaggaaatctttaattaaccctgtttctagacacaaaagccctcaataacatttcatcctatttaaataaatattttcaaagaagrtgatgtgggaacacttttatttttgctattggagtgctaatttaatatcatatatagtttaaattatcatataagaacctataagcagagtttggggtgg

SEQ ID NO: 431937 - DNA, 201 bp, Homo sapiens
catctgggctgggcatgatgggagagaagtatgataggggaaagagtagaaaagacaggctgggggagggggtagaggttgcaacctgttcccctgggttkactggcctgagctgcctgctgcagggagaaggcagctgagccaggtgacccatcacgtgaaaagcctgagcccaagccccaggggttgcaggtcagtgtg

SEQ ID NO: 431938 - DNA, 201 bp, Homo sapiens
atggcaaatagcagaaaaagcagcaggatctatctcttctcgtaaatgaagaaagtgaggctcgtaggtctggtgacttgcctacgagtagaaccaggcckcaaacatggtttctcggggccctcgtacagggtctgcaccttgaacagtgtgcagccgctcgcccaggtccgtacaccatcatatacccaaagactggat

SEQ ID NO: 431939 - DNA, 201 bp, Homo sapiens
aggaggcagggcagcattgttagttgccaaggagcggagtagggctgtccctcgggtcgccgcgcgccctggcaccccggctcccctgcgcgccctcgcgragcagtaacgcgctttgctttctgtgttgcagttcagcaggagcgcagacgcccccgcgtaccagcagggccagaaccagctctataacgtaagtcagcc

SEQ ID NO: 431940 - DNA, 201 bp, Homo sapiens
atcagagcagtcattctgagtttctctttccgcccccacccacattatagacggcaccaaaatgtatgtttctcatgggcttgtatgaacccatcctcccyctgctcccaactttctcccctgcgtcatgaaatcttttggaaagcaaatgagtaaaaatgattttaatataggtataagtttgactctacctgttttaat

SEQ ID NO: 431941 - DNA, 201 bp, Homo sapiens
tcttgtcaggactaggagggtgtggggagggcacctttcagtaggcactcactaccagtggctggccctgctccaaatgatggtatgtgactccttttgtyttcagccaaaagtcccacttgtcagcttgtgatgtgtgtgggcgtcccgatggcctgccctgggcaatgctgggcttgggtgggcccctctggaagagcg

SEQ ID NO: 431942 - DNA, 201 bp, Homo sapiens
cacacagtaaaagatacaggcaggtcctgctgcagaaggccccagatcaacttggtcagaggcctagagtcctactcagcacccaaccttgggttccatcrctgcctgccctgggcctcagtgtgtcccctttgaaatggggcagacaggagtccctggccaccctcacagaactgaatgcagtgacaggtatggtcctgt

SEQ ID NO: 431943 - DNA, 201 bp, Homo sapiens
ctttcttgatcatcagagtcttgtgagcaccaggggggaatttatgggcctggtagctttaggttcagaaaggtcactgagaaaggagatgccagcttgaycccttcattccagagcacccagggatggcgttgtctccagtcgggtggtgttgggggctgaacctactgtgggttcatggtcatcctcaggccagagaac

SEQ ID NO: 431944 - DNA, 201 bp, Homo sapiens
gctgggacttggccattcaagcgaattacttggctccaaccatgccttgcttggccatggcagacagagcagcagctgtccagagggtacgcagcctcccygccgatgcagatggaggcaaaggaccacacaagtgattatcctgcctctttgggttcttgtagaaccctcactctgcatcatttccttaggcctagtaag

SEQ ID NO: 431945 - DNA, 201 bp, Homo sapiens
actcctggcagtagggttgctaggtctcccctcactgtcagtgtccccgctctccggggcctgcttttttcatcacccgcctccccgtaaagattcctaarttccagggctatctccttctgatggagatctcctgggtgatgtggtacacgtcacccacacccctgccaccagcctgctgtccaacagatggagctgata

SEQ ID NO: 431946 - DNA, 201 bp, Homo sapiens
cgtaatttattttaccactgtcttttgtcagacatttagatggcttcatgtttggacgcattatgaatagtgtcactgtggacattcctgtgcatacatcygtgctcacatttgtggctatttctttggaatgcactcctggcagtagggttgctaggtctcccctcactgtcagtgtccccgctctccggggcctgcttt

SEQ ID NO: 431947 - DNA, 201 bp, Homo sapiens
gctggaggcccgaggtcccagcctccctagaagttgttgctttcatagcagctaggtttcccctgctgtggagtcacggttctccactcttagaagtcagyccctggccccagccagcatgggctttgcttctggagaggctgaggggagaaaggaagggagtggcaactcttagtgcagaagtgtgtttggaagacaccc

SEQ ID NO: 431948 - DNA, 201 bp, Homo sapiens
ttgtagaaccctcactctgcatcatttccttaggcctagtaagatgagaggttggctgggaagactgaaggaaaaaaagctaagaaaaatggcagcttcaraaagaaaatgttatgtagttaggtgcctggtttttgcaaatcagtgcaggcaattatgcaaactaagcacggtcaaactacttctctaaaacatgatccc

SEQ ID NO: 431949 - DNA, 201 bp, Homo sapiens
tcactccatggtcctccatggtgctggaggcccgaggtcccagcctccctagaagttgttgctttcatagcagctaggtttcccctgctgtggagtcacgrttctccactcttagaagtcagtccctggccccagccagcatgggctttgcttctggagaggctgaggggagaaaggaagggagtggcaactcttagtgca

SEQ ID NO: 431950 - DNA, 201 bp, Homo sapiens
gtccagaaggattccttaaggtcactccatggtcctccatggtgctggaggcccgaggtcccagcctccctagaagttgttgctttcatagcagctaggtytcccctgctgtggagtcacggttctccactcttagaagtcagtccctggccccagccagcatgggctttgcttctggagaggctgaggggagaaaggaag

SEQ ID NO: 431951 - DNA, 201 bp, Homo sapiens
ttttcaccgcggccatcctgcaggcacagttgccgattacaggtagggccgacgtgtcgacggcagggaacttctagaaactctttgtgtatgtgtagggsagtgggtgtgggtagtggagggtggtgaggggctggggtctccttcaaatcctgccctcctcaaatcaatgggcaagtgagcagtgaggggtccggcccg

SEQ ID NO: 431952 - DNA, 201 bp, Homo sapiens
aaatgtgtgtgccctgtccccctggtgtctcccagcccagactcaggagtaactcagagataactccccgagagttgaacaatgagaacacatggacacarggcggggaacatcacacaccagggcctgtcggggggtcagggggctggaggagggatagcattaggagaatatctaatgtaaatgacgacttgataggtg

SEQ ID NO: 431953 - DNA, 201 bp, Homo sapiens
tctcctttttttttgagcctgtcgcccaggctggagtgcagtggcgtgatctcggctcactgcaacctctgcctcccaggttcaagcgattctcctgcctsagcctcctgagtagctgggactacaggcgcccaccaccacagccggctaatttttgtatttctggtaaagatggggtttcaccatattggccagggtggt

SEQ ID NO: 431954 - DNA, 201 bp, Homo sapiens
tactttgactattttctcctttttttttgagcctgtcgcccaggctggagtgcagtggcgtgatctcggctcactgcaacctctgcctcccaggttcaagygattctcctgcctcagcctcctgagtagctgggactacaggcgcccaccaccacagccggctaatttttgtatttctggtaaagatggggtttcaccata

SEQ ID NO: 431955 - DNA, 201 bp, Homo sapiens
ggtaggggagcagctggatgacaccacagtagggtagggtcctctttgttttttccccttcattctgatttccttccttccttccttccttccttccttcctctgtctttatttattttatattgacaaattatagttctacatatttatggggtacaaagtattgttatgatttttgaatataatatgaaatgattaaat

SEQ ID NO: 431956 - DNA, 201 bp, Homo sapiens
tcaaaaatgtactttgactattttctcctttttttttgagcctgtcgcccaggctggagtgcagtggcgtgatctcggctcactgcaacctctgcctcccrggttcaagcgattctcctgcctcagcctcctgagtagctgggactacaggcgcccaccaccacagccggctaatttttgtatttctggtaaagatggggt

SEQ ID NO: 431957 - DNA, 201 bp, Homo sapiens
gggtaggggagcagctggatgacaccacagtagggtagggtcctctttgttttttccccttcattctgatttccttccttccttccttccttccttccttcctctgtctttatttattttatattgacaaattatagttctacatatttatggggtacaaagtattgttatgatttttgaatataatatgaaatgattaaa

SEQ ID NO: 431958 - DNA, 201 bp, Homo sapiens
atcaaaaatgtactttgactattttctcctttttttttgagcctgtcgcccaggctggagtgcagtggcgtgatctcggctcactgcaacctctgcctccyaggttcaagcgattctcctgcctcagcctcctgagtagctgggactacaggcgcccaccaccacagccggctaatttttgtatttctggtaaagatgggg

SEQ ID NO: 431959 - DNA, 201 bp, Homo sapiens
tgggtaggggagcagctggatgacaccacagtagggtagggtcctctttgttttttccccttcattctgatttccttccttccttccttccttccttccttcctctgtctttatttattttatattgacaaattatagttctacatatttatggggtacaaagtattgttatgatttttgaatataatatgaaatgattaa

SEQ ID NO: 431960 - DNA, 201 bp, Homo sapiens
catcaaaaatgtactttgactattttctcctttttttttgagcctgtcgcccaggctggagtgcagtggcgtgatctcggctcactgcaacctctgcctcscaggttcaagcgattctcctgcctcagcctcctgagtagctgggactacaggcgcccaccaccacagccggctaatttttgtatttctggtaaagatggg

SEQ ID NO: 431961 - DNA, 201 bp, Homo sapiens
cctgtgggtaggggagcagctggatgacaccacagtagggtagggtcctctttgttttttccccttcattctgatttccttccttccttccttccttccttccttcctctgtctttatttattttatattgacaaattatagttctacatatttatggggtacaaagtattgttatgatttttgaatataatatgaaatga

SEQ ID NO: 431962 - DNA, 201 bp, Homo sapiens
caaaagggaggttaatacaaggcatcaaaaatgtactttgactattttctcctttttttttgagcctgtcgcccaggctggagtgcagtggcgtgatctcrgctcactgcaacctctgcctcccaggttcaagcgattctcctgcctcagcctcctgagtagctgggactacaggcgcccaccaccacagccggctaattt

SEQ ID NO: 431963 - DNA, 201 bp, Homo sapiens
tcactgcaacctctgcctcccaggttccagcgattctcctgcctcagcctccagagtggctgtgatcaaagctgccagccaccacgcccagctaattttcrtatttttagtagagatggggtttcaccacgttggccaggctggacttgaactcctgacctcaagtgatacacccatgtcagcctcccaaagtgctgggat

SEQ ID NO: 431964 - DNA, 201 bp, Homo sapiens
acaaaagggaggttaatacaaggcatcaaaaatgtactttgactattttctcctttttttttgagcctgtcgcccaggctggagtgcagtggcgtgatctsggctcactgcaacctctgcctcccaggttcaagcgattctcctgcctcagcctcctgagtagctgggactacaggcgcccaccaccacagccggctaatt

SEQ ID NO: 431965 - DNA, 201 bp, Homo sapiens
gcatcgtggtgtgcacctgtaatcccagccacttgggaggctgaggcaggagaatcacttgaacctgggaggcagaggttgcagtgagctgaggtcatgcmattgcactccagcctgggcaacagagtgagactccacttaaaaaaaaaaaaaagtatcgtatttaaccctcaccaccatctaatgagacaggtagtgttg

SEQ ID NO: 431966 - DNA, 201 bp, Homo sapiens
ggggacacaaaagggaggttaatacaaggcatcaaaaatgtactttgactattttctcctttttttttgagcctgtcgcccaggctggagtgcagtggcgygatctcggctcactgcaacctctgcctcccaggttcaagcgattctcctgcctcagcctcctgagtagctgggactacaggcgcccaccaccacagccgg

SEQ ID NO: 431967 - DNA, 201 bp, Homo sapiens
acaaaaattagcagggcatcgtggtgtgcacctgtaatcccagccacttgggaggctgaggcaggagaatcacttgaacctgggaggcagaggttgcagtragctgaggtcatgccattgcactccagcctgggcaacagagtgagactccacttaaaaaaaaaaaaaagtatcgtatttaaccctcaccaccatctaatg

SEQ ID NO: 431968 - DNA, 201 bp, Homo sapiens
tgggggacacaaaagggaggttaatacaaggcatcaaaaatgtactttgactattttctcctttttttttgagcctgtcgcccaggctggagtgcagtggygtgatctcggctcactgcaacctctgcctcccaggttcaagcgattctcctgcctcagcctcctgagtagctgggactacaggcgcccaccaccacagcc

SEQ ID NO: 431969 - DNA, 201 bp, Homo sapiens
cctgaccaacatggcaaaaccccatctctactaaaattacaaaaattagcagggcatcgtggtgtgcacctgtaatcccagccacttgggaggctgaggcrggagaatcacttgaacctgggaggcagaggttgcagtgagctgaggtcatgccattgcactccagcctgggcaacagagtgagactccacttaaaaaaaa

SEQ ID NO: 431970 - DNA, 201 bp, Homo sapiens
gagtttgagaccagcctgaccaacatggcaaaaccccatctctactaaaattacaaaaattagcagggcatcgtggtgtgcacctgtaatcccagccactygggaggctgaggcaggagaatcacttgaacctgggaggcagaggttgcagtgagctgaggtcatgccattgcactccagcctgggcaacagagtgagact

SEQ ID NO: 431971 - DNA, 201 bp, Homo sapiens
tcatatttggccaggcacggtggctcatgcctgtaatccgagcactttgggaggccgaggcgggcagatcacttgaggtcaggagtttgagaccagcctgrccaacatggcaaaaccccatctctactaaaattacaaaaattagcagggcatcgtggtgtgcacctgtaatcccagccacttgggaggctgaggcaggag

SEQ ID NO: 431972 - DNA, 201 bp, Homo sapiens
tgttaccatctccaagcctttgtgtctcctctggagcaggcactatggtggaaggagaggaggctctggagccagaagtcctgagccgccttcccctcccsacctcagagccctgttcttcctctgtgagatggcggcaatggtgcctcttcacgcaggggactgtggagtggagatctgattcggaagtgcctaaacaca

SEQ ID NO: 431973 - DNA, 201 bp, Homo sapiens
taacctctctgggcctcagttttctcacctctaaagaaagacttgtaataccttctttgcagagatgtgacaatgagaagtaatgtaatgtgtccaatacmtagtagacagccaataagtaaacattgtatttactattactattattacatctcggactgtcttcttgttctcaaaacaggagatggaaacccatggctg

SEQ ID NO: 431974 - DNA, 201 bp, Homo sapiens
ctaactccctactctgcagtagccaagaatgcacccagcggtcagtgtggtgtttgtcttttatcagtgaggagatggagctctgacatgcagccttgggraatgcaaagcttccaggcttgtgagtggctctgcttttaggaaggtggctggacgtggtagaaagagccaggctaatttcaggtggtgtcccagtgctgc

SEQ ID NO: 431975 - DNA, 201 bp, Homo sapiens
aatgttaccaaatagtagggtttcagggagagaaatggagggaacatgaagagggaacagagagtgcaaggcacagggcaaatagtctggaagagcaaggygtgtcctgggaatggggtgtgtgtagtgggaggaggggagacagagaaggctgaggccatggagctgggactaggggacagggagatgctgggcctaggt

SEQ ID NO: 431976 - DNA, 201 bp, Homo sapiens
aatcacaggtgtaagcccccgcgcccagccgtggttattgttaatagtgctacaatcaacatgggagtatagacatttcttcaacaagcagacttcaaatyttttgggtaaatacccagaagcgggattgttgggtcatatggtagttctatttttagttttttgtggagcctcaatactgttttccataatggttgtatt

SEQ ID NO: 431977 - DNA, 201 bp, Homo sapiens
ttaatccagcatcctatcaggcacacctccctcctgctgctgtgtgcctgaagaatgtggagtgatttagatattcattgacctaaagtgcaactaaggtytgagggtgggggacacaaaagggaggttaatacaaggcatcaaaaatgtactttgactattttctcctttttttttgagcctgtcgcccaggctggagtg

SEQ ID NO: 431978 - DNA, 201 bp, Homo sapiens
ctgtgggcatcctatactctgtgaattggtcagaaccaatctttaatccagcatcctatcaggcacacctccctcctgctgctgtgtgcctgaagaatgtrgagtgatttagatattcattgacctaaagtgcaactaaggtctgagggtgggggacacaaaagggaggttaatacaaggcatcaaaaatgtactttgact

SEQ ID NO: 431979 - DNA, 201 bp, Homo sapiens
cctgtgggcatcctatactctgtgaattggtcagaaccaatctttaatccagcatcctatcaggcacacctccctcctgctgctgtgtgcctgaagaatgyggagtgatttagatattcattgacctaaagtgcaactaaggtctgagggtgggggacacaaaagggaggttaatacaaggcatcaaaaatgtactttgac

SEQ ID NO: 431980 - DNA, 201 bp, Homo sapiens
ctcaccccataagaagtatcatatttggccaggcacggtggctcatgcctgtaatccgagcactttgggaggccgaggcgggcagatcacttgaggtcagragtttgagaccagcctgaccaacatggcaaaaccccatctctactaaaattacaaaaattagcagggcatcgtggtgtgcacctgtaatcccagccactt

SEQ ID NO: 431981 - DNA, 201 bp, Homo sapiens
cacactggtctggcttcatcgctggactcactgtgtggcccacagaggcctcttctatggtcacagggccccagtgacattttgggaggggcttcagggaygctggctggtaacccaagagcaaccctaaatcccaacttggtccatgtcctagaatatcaaaggagaatcttaaaccctgagtgggatgaggagcctcct

SEQ ID NO: 431982 - DNA, 201 bp, Homo sapiens
attttattttatcctcaccccataagaagtatcatatttggccaggcacggtggctcatgcctgtaatccgagcactttgggaggccgaggcgggcagatmacttgaggtcaggagtttgagaccagcctgaccaacatggcaaaaccccatctctactaaaattacaaaaattagcagggcatcgtggtgtgcacctgta

SEQ ID NO: 431983 - DNA, 201 bp, Homo sapiens
gtctctgaaggagaagaaaggaggtggggaaggaaggaaagaaataaatatatggacaggaagattgagtattggagggagaagagaaaaagcaagagatrgtgaaaccaataaaaaggaaataaacgtaaaatggagacagaggggaagaaagagctggaataatactatgtggctctctaaaagttgctgcagtttttt

SEQ ID NO: 431984 - DNA, 201 bp, Homo sapiens
ttttagtagagacggggtttcaccatgttagccaggatggtctcgatctcctgacctcatgatccgcccgcctcggcctcccaaagtgctgggattatagrcgtgagccaccgcgcctggcccccattatctgtttttatcttcaaacacccctgaagagtgggtatccccatcctgggctgggaaacctggccaggttct

SEQ ID NO: 431985 - DNA, 201 bp, Homo sapiens
tctactaaaaatacaaaaaaaattagccaggcgtgatgccgggagcctgtaatccagctactcgggaggctgaggcaggagaatcgcttgaacctgggagrtggaggttgcagtgagctgagatcaccactgcactccagcagcctgggcaactgaacgggactccatctcaaaaaaaaaaaaaaaaaaaagaaaaagaaa

SEQ ID NO: 431986 - DNA, 201 bp, Homo sapiens
ctgagcagctgggaccacaggtgcctgccaccacgcccggctaatttttttgtattttttagtagagacggggtttcaccatgttagccaggatggtctcratctcctgacctcatgatccgcccgcctcggcctcccaaagtgctgggattataggcgtgagccaccgcgcctggcccccattatctgtttttatcttca

SEQ ID NO: 431987 - DNA, 201 bp, Homo sapiens
tggtgaaaccccgtctctactaaaaatacaaaaaaaattagccaggcgtgatgccgggagcctgtaatccagctactcgggaggctgaggcaggagaatcrcttgaacctgggaggtggaggttgcagtgagctgagatcaccactgcactccagcagcctgggcaactgaacgggactccatctcaaaaaaaaaaaaaaa

SEQ ID NO: 431988 - DNA, 201 bp, Homo sapiens
ccacctcctgggttcacaccattctcctgcctcagcctcctgagcagctgggaccacaggtgcctgccaccacgcccggctaatttttttgtattttttaktagagacggggtttcaccatgttagccaggatggtctcgatctcctgacctcatgatccgcccgcctcggcctcccaaagtgctgggattataggcgtga

SEQ ID NO: 431989 - DNA, 201 bp, Homo sapiens
cacgcctgtaataccagaacttttggaggcctaggcagatggatcacctgaggtcaggagttcaagaccagcctggccaacatggtgaaaccccgtctctrctaaaaatacaaaaaaaattagccaggcgtgatgccgggagcctgtaatccagctactcgggaggctgaggcaggagaatcgcttgaacctgggaggtgg

SEQ ID NO: 431990 - DNA, 201 bp, Homo sapiens
ctgcaagctccacctcctgggttcacaccattctcctgcctcagcctcctgagcagctgggaccacaggtgcctgccaccacgcccggctaatttttttgkattttttagtagagacggggtttcaccatgttagccaggatggtctcgatctcctgacctcatgatccgcccgcctcggcctcccaaagtgctgggatta

SEQ ID NO: 431991 - DNA, 201 bp, Homo sapiens
aggtgaagaagaaagaaaggggctgggtgcggtggctcacgcctgtaataccagaacttttggaggcctaggcagatggatcacctgaggtcaggagttcragaccagcctggccaacatggtgaaaccccgtctctactaaaaatacaaaaaaaattagccaggcgtgatgccgggagcctgtaatccagctactcggga

SEQ ID NO: 431992 - DNA, 201 bp, Homo sapiens
tactgcaagctccacctcctgggttcacaccattctcctgcctcagcctcctgagcagctgggaccacaggtgcctgccaccacgcccggctaattttttygtattttttagtagagacggggtttcaccatgttagccaggatggtctcgatctcctgacctcatgatccgcccgcctcggcctcccaaagtgctgggat

SEQ ID NO: 431993 - DNA, 201 bp, Homo sapiens
caggtgaagaagaaagaaaggggctgggtgcggtggctcacgcctgtaataccagaacttttggaggcctaggcagatggatcacctgaggtcaggagttsaagaccagcctggccaacatggtgaaaccccgtctctactaaaaatacaaaaaaaattagccaggcgtgatgccgggagcctgtaatccagctactcggg

SEQ ID NO: 431994 - DNA, 201 bp, Homo sapiens
tgttgtccaggctggagtgtagtggcgtaatctccgcttactgcaagctccacctcctgggttcacaccattctcctgcctcagcctcctgagcagctggkaccacaggtgcctgccaccacgcccggctaatttttttgtattttttagtagagacggggtttcaccatgttagccaggatggtctcgatctcctgacct

SEQ ID NO: 431995 - DNA, 201 bp, Homo sapiens
aaaatttttgtttatttatttttttagacagagtctcactctatggcccaggctggagtgcagtggtgctatctcaactcactgcaacctccacctcctgsgttcaagcgattcttttgcctcagcgtcttgagtagctggtattacaggcgcccgccaccacacctagctaattttttgtatttttagtagagatgtggt

SEQ ID NO: 431996 - DNA, 201 bp, Homo sapiens
ctggggtgtagggggacacagcaaggtcaagctaggcaaggacgaggtggctggccccttcgaggggctcctgtcctgggtgctgaagtcttctgagtgtmccccgctataggaaggtcaacctcaccctcctgggtgtgaccctgaaccctgattgtcgatctgggttgccatgcaggagacccttgcaggtggcagcct

SEQ ID NO: 431997 - DNA, 201 bp, Homo sapiens
aacctgggaggcggaggttgcagtcagccaagatcatgccactgcactccagcctgggcaacaaagcgagactctgtctcaaaaaaaaaaaaaaaaaaaaagaaaagaaaaatgatcacaaagtatcgctcaaaacataacaactttaatggaaataaaaatacaagaagagaaacatttgctcataaagcactaccccta

SEQ ID NO: 431998 - DNA, 201 bp, Homo sapiens
gtgtagggggacacagcaaggtcaagctaggcaaggacgaggtggctggccccttcgaggggctcctgtcctgggtgctgaagtcttctgagtgtcccccsctataggaaggtcaacctcaccctcctgggtgtgaccctgaaccctgattgtcgatctgggttgccatgcaggagacccttgcaggtggcagccttctgt

SEQ ID NO: 431999 - DNA, 201 bp, Homo sapiens
cccctcctgtggggagggagggttgatctacagcccgtttggctgtgtaaagagacaacttgctcagataaatgattctggggctccaggtgagcccttgytttgcccagtctccgtgtctttgtctagaactccacctcctatctttttgagcctaacttgagcccctcagctcagtgcaaagagctggcagctcggagg

SEQ ID NO: 432000 - DNA, 201 bp, Homo sapiens
cattcatgctacctacccctgcttgcagttcagagacactgggcacaggtccaccacacagcctttccacctctgctcctctgcccggagtgcccttcccygacagatctgcacagctgaagcccgctctgaccacctgtgaaaaacaggagacatctctttgtcacttcatactttcatttccttggctagcactgagac

SEQ ID NO: 432001 - DNA, 201 bp, Homo sapiens
gacctagtgatctgcctgcctcggccttccaaagtgctgggattggcatgagccactgctcccagtatgtctttttatatgtttgtaagtaatctgttttyctgtctctgcgaattgcctatttatatcttttgctgatttatctcttggactattagtcttagctttcatttttcaaagtattattatttattcacttat

SEQ ID NO: 432002 - DNA, 201 bp, Homo sapiens
tatttattaatagtaaaatgacaaagtaacatgaaatatgaatatatgaaataacatgaagtcttagattataacataatactaaatgaaaaaaacaattyttcaggaaatttttttttttttgagacagagtctcactttgtcacccaggctgacatgcaatgacgcaatcttggctcactgcagcctccacgtcccaag

SEQ ID NO: 432003 - DNA, 201 bp, Homo sapiens
tgggccaccatgtccggctaattttgtatttttagtagagacagggtttctccatgttggtcaggctggtctcgaactcccgacctcaggtgatccactcrccttggcctcccaaagtgctgggattacaggcatgagccactgcgcccggccagtagttctatttttaactttctgaggaaccaccaaaccgttttccac

SEQ ID NO: 432004 - DNA, 201 bp, Homo sapiens
gtagctgggattacaggcatgggccaccatgtccggctaattttgtatttttagtagagacagggtttctccatgttggtcaggctggtctcgaactcccracctcaggtgatccactcgccttggcctcccaaagtgctgggattacaggcatgagccactgcgcccggccagtagttctatttttaactttctgaggaa

SEQ ID NO: 432005 - DNA, 201 bp, Homo sapiens
tttgagatggagtttcgctcttgttgcccaggctggagtgcaatggcatgatcttggctcactgcaacctcccttcctggcttcaagcaattctcttgccycagcctcccgagtagctgggattacaggcatgggccaccatgtccggctaattttgtatttttagtagagacagggtttctccatgttggtcaggctggt

SEQ ID NO: 432006 - DNA, 201 bp, Homo sapiens
tgggtatagaaccagaagtagaattgctagaccatatgatagttctatttttttttttttttgagatggagtttcgctcttgttgcccaggctggagtgcratggcatgatcttggctcactgcaacctcccttcctggcttcaagcaattctcttgcctcagcctcccgagtagctgggattacaggcatgggccaccat

SEQ ID NO: 432007 - DNA, 201 bp, Homo sapiens
catttgtttgattttaggtacttctaagtgctgtgattggtagtaatactgagatctgtgctgagcctcgaactccaaagttgcaactcaaatccctgatraagttaattaagtctgagtcttgggctctgcagctagttgatgccagaataaatctaacgtgttgtcagcagactgaaccagaagagcaaagctccaaag

SEQ ID NO: 432008 - DNA, 201 bp, Homo sapiens
tttgggtatagaaccagaagtagaattgctagaccatatgatagttctatttttttttttttttgagatggagtttcgctcttgttgcccaggctggagtrcaatggcatgatcttggctcactgcaacctcccttcctggcttcaagcaattctcttgcctcagcctcccgagtagctgggattacaggcatgggccacc

SEQ ID NO: 432009 - DNA, 201 bp, Homo sapiens
cggtggcgggcgcctgtagtcccagctactcgggaggctgaggcatgagaatggcgtgaacctgggaggcagagcttgcagtgagctgagattgcgccacwgcactccagcctgggcgacagagcgagacttcgtctcaaaaaaaaaaaaaagaagaggataaagtacttctagaacaggagctaggcctcccgaagcctt

SEQ ID NO: 432010 - DNA, 201 bp, Homo sapiens
tgcacaaatatctcttaaagaccctgctttcaattcttttgggtatagaaccagaagtagaattgctagaccatatgatagttctatttttttttttttttgagatggagtttcgctcttgttgcccaggctggagtgcaatggcatgatcttggctcactgcaacctcccttcctggcttcaagcaattctcttgcctca

SEQ ID NO: 432011 - DNA, 201 bp, Homo sapiens
gtaccacaccctgttttacaggttgagttgctgcacgtttacctagtaggaagtatggtcagactaaaatctgagtctcctcattcacagtgcaatgatgytccaaataaaaacactaactttttaaatttttttttgagacggagcctcactctgtgtgccaggctgaagtgcagtggcgtgatctcggctcactgcaac

SEQ ID NO: 432012 - DNA, 201 bp, Homo sapiens
cgcggtggcgggcgcctgtagtcccagctactcgggaggctgaggcatgagaatggcgtgaacctgggaggcagagcttgcagtgagctgagattgcgccmctgcactccagcctgggcgacagagcgagacttcgtctcaaaaaaaaaaaaaagaagaggataaagtacttctagaacaggagctaggcctcccgaagcc

SEQ ID NO: 432013 - DNA, 201 bp, Homo sapiens
agaatcgcttgaacctgggaggcggaggttgcagtcagccaagatcatgccactgcactccagcctgggcaacaaagcgagactctgtctcaaaaaaaaaraaaaaaaaaaagaaaagaaaaatgatcacaaagtatcgctcaaaacataacaactttaatggaaataaaaatacaagaagagaaacatttgctcataaag

SEQ ID NO: 432014 - DNA, 201 bp, Homo sapiens
agggcgcggtggcgggcgcctgtagtcccagctactcgggaggctgaggcatgagaatggcgtgaacctgggaggcagagcttgcagtgagctgagattgygccactgcactccagcctgggcgacagagcgagacttcgtctcaaaaaaaaaaaaaagaagaggataaagtacttctagaacaggagctaggcctcccga

SEQ ID NO: 432015 - DNA, 201 bp, Homo sapiens
aggaggctgaggcaggagaatagcttgaacccaggaggtggcagttgcagtgagccgagatcgcaccactgcactccagcctgggcgacagagtgacactscatctcaaaaaaaaaaaaaaaaaaaaaaaaggagaaaaattagggaaaatagggcaaaattgggggtggagaaaggcaggaaaaatttgagggcagcaac

SEQ ID NO: 432016 - DNA, 201 bp, Homo sapiens
ctgcctgggaggctgaggcaggagaatcgcttgaacctgggaggcggaggttgcagtcagccaagatcatgccactgcactccagcctgggcaacaaagcragactctgtctcaaaaaaaaaaaaaaaaaaaaagaaaagaaaaatgatcacaaagtatcgctcaaaacataacaactttaatggaaataaaaatacaaga

SEQ ID NO: 432017 - DNA, 201 bp, Homo sapiens
atacaaaaaattagcagggcgcggtggcgggcgcctgtagtcccagctactcgggaggctgaggcatgagaatggcgtgaacctgggaggcagagcttgcrgtgagctgagattgcgccactgcactccagcctgggcgacagagcgagacttcgtctcaaaaaaaaaaaaaagaagaggataaagtacttctagaacagg

SEQ ID NO: 432018 - DNA, 201 bp, Homo sapiens
tggtggacacctgtaatcccaactactcaggaggctgaggcaggagaatagcttgaacccaggaggtggcagttgcagtgagccgagatcgcaccactgcrctccagcctgggcgacagagtgacactgcatctcaaaaaaaaaaaaaaaaaaaaaaaaggagaaaaattagggaaaatagggcaaaattgggggtggaga

SEQ ID NO: 432019 - DNA, 201 bp, Homo sapiens
atggctgcctgggaggctgaggcaggagaatcgcttgaacctgggaggcggaggttgcagtcagccaagatcatgccactgcactccagcctgggcaacaragcgagactctgtctcaaaaaaaaaaaaaaaaaaaaagaaaagaaaaatgatcacaaagtatcgctcaaaacataacaactttaatggaaataaaaatac

SEQ ID NO: 432020 - DNA, 201 bp, Homo sapiens
taaaaatacaaaaaattagcagggcgcggtggcgggcgcctgtagtcccagctactcgggaggctgaggcatgagaatggcgtgaacctgggaggcagagsttgcagtgagctgagattgcgccactgcactccagcctgggcgacagagcgagacttcgtctcaaaaaaaaaaaaaagaagaggataaagtacttctaga

SEQ ID NO: 432021 - DNA, 201 bp, Homo sapiens
agagatgcttattctgagaagcagaaaggaacagatggagaaggaaaaaggaagatgggacaaaaggagaaaaactggccaggtgcggtggctcacacctstaatcctagcactttgggaggccgaggctggcggattgcctgaagtcaggagttcgagaccagcctgggtaatatggtgaagccctgtctctactaaaaa

SEQ ID NO: 432022 - DNA, 201 bp, Homo sapiens
taatcatggctgcctgggaggctgaggcaggagaatcgcttgaacctgggaggcggaggttgcagtcagccaagatcatgccactgcactccagcctgggmaacaaagcgagactctgtctcaaaaaaaaaaaaaaaaaaaaagaaaagaaaaatgatcacaaagtatcgctcaaaacataacaactttaatggaaataaa

SEQ ID NO: 432023 - DNA, 201 bp, Homo sapiens
ccccgtctctactaaaaatacaaaaaattagcagggcgcggtggcgggcgcctgtagtcccagctactcgggaggctgaggcatgagaatggcgtgaaccygggaggcagagcttgcagtgagctgagattgcgccactgcactccagcctgggcgacagagcgagacttcgtctcaaaaaaaaaaaaaagaagaggataa

SEQ ID NO: 432024 - DNA, 201 bp, Homo sapiens
tgtggtggcaggtgcctgtaatcatggctgcctgggaggctgaggcaggagaatcgcttgaacctgggaggcggaggttgcagtcagccaagatcatgccmctgcactccagcctgggcaacaaagcgagactctgtctcaaaaaaaaaaaaaaaaaaaaagaaaagaaaaatgatcacaaagtatcgctcaaaacataac

SEQ ID NO: 432025 - DNA, 201 bp, Homo sapiens
ggcgcggtggctcacgcctgtaatcccagcactttgggaggccaaggcgggcggatcacgaggtcaggagatcgagaccatcctggctaacacgtgaaacmccgtctctactaaaaatacaaaaaattagcagggcgcggtggcgggcgcctgtagtcccagctactcgggaggctgaggcatgagaatggcgtgaacctg

SEQ ID NO: 432026 - DNA, 201 bp, Homo sapiens
ctgctaaaaatacaaaaaattagccaggtgtggtggcaggtgcctgtaatcatggctgcctgggaggctgaggcaggagaatcgcttgaacctgggaggcrgaggttgcagtcagccaagatcatgccactgcactccagcctgggcaacaaagcgagactctgtctcaaaaaaaaaaaaaaaaaaaaagaaaagaaaaat

SEQ ID NO: 432027 - DNA, 201 bp, Homo sapiens
gtggctcatgcctgtaatcccaccactttgggaagctgagatgggtggatcacctgaggtcaggagttcaagaccaacctggccaacatggtgaaaccccrtctctactaaaaatacaaaaattagctgggcatgatggcatgagcctgtaatcccagctacttaggaggctgaggcaagagaatcacttgagcctgggag

SEQ ID NO: 432028 - DNA, 201 bp, Homo sapiens
cacttttatattaagttgatttacttgaaaatgaaaagaaaaatgatcacaaaggctgggctcggtggctcacacctgtaatcccagcactttgggaggcygaggcgggtggattacctgaggtcaggagtttgagaacagcctggccaacatggtgaaaccccgtctctgctaaaaatacaaaaaattagccaggtgtgg

SEQ ID NO: 432029 - DNA, 201 bp, Homo sapiens
catggtggctcatgcctgtaatcccaccactttgggaagctgagatgggtggatcacctgaggtcaggagttcaagaccaacctggccaacatggtgaaaycccatctctactaaaaatacaaaaattagctgggcatgatggcatgagcctgtaatcccagctacttaggaggctgaggcaagagaatcacttgagcctg

SEQ ID NO: 432030 - DNA, 201 bp, Homo sapiens
cttttctgcacttttatattaagttgatttacttgaaaatgaaaagaaaaatgatcacaaaggctgggctcggtggctcacacctgtaatcccagcacttygggaggctgaggcgggtggattacctgaggtcaggagtttgagaacagcctggccaacatggtgaaaccccgtctctgctaaaaatacaaaaaattagcc

SEQ ID NO: 432031 - DNA, 201 bp, Homo sapiens
atagtggaaagcttattaggcaacctttaaaaaggatatttattaatagtaaaatgacaaagtaacatgaaatatgaatatatgaaataacatgaagtctyagattataacataatactaaatgaaaaaaacaattcttcaggaaatttttttttttttgagacagagtctcactttgtcacccaggctgacatgcaatga

SEQ ID NO: 432032 - DNA, 201 bp, Homo sapiens
tttgctgatttatctcttggactattagtcttagctttcatttttcaaagtattattatttattcacttatttttttttgagacagggtctcactctgtcraccaggctggagtgcagtgacacggtcagggctcactgcagttttgacctcctgggctcaagtgatcctcgcacctcagcctcctgagtagctgtgacta

SEQ ID NO: 432033 - DNA, 201 bp, Homo sapiens
gaaaatgaatctatgtagatccagatcaaattctaaccaatcattgcaatggggtcttttttcttgaatgttcaaagttgattttcctccacaaaataatractctttggtgtccaagtaataaattagcacagttcagttcaagttcccactaaattggaggctgaaatgtaggatcaagagaaaggagatgcaagttac

SEQ ID NO: 432034 - DNA, 201 bp, Homo sapiens
ctgtgtgctttttaagtcagcaaacaaaacattaaaaacaaacaaacctccttttctttgtcaccatttctctgaccatcccctgtaaattcgtaggacayggtactcacagaaaaaggaaaattcattagccgaatgaatcgctgatttaaattcaggcaataggttgacattatccttaattgaatagttttagaaaat

SEQ ID NO: 432035 - DNA, 201 bp, Homo sapiens
gcacctgcccgtggaaagttgttatgtaaaatgattacagtttataaataacaaagactttggtcagccatctgccatcatattaataatggctgtgtttraaagtggtattatgggcaattctgattttttcctacttttctgcacttttatattaagttgatttacttgaaaatgaaaagaaaaatgatcacaaaggct

SEQ ID NO: 432036 - DNA, 201 bp, Homo sapiens
ggatagagatgcttattctgagaagcagaaaggaacagatggagaaggaaaaaggaagatgggacaaaaggagaaaaactggccaggtgcggtggctcacrcctgtaatcctagcactttgggaggccgaggctggcggattgcctgaagtcaggagttcgagaccagcctgggtaatatggtgaagccctgtctctacta

SEQ ID NO: 432037 - DNA, 201 bp, Homo sapiens
gctgaggcaggagaatggcttgaacccgggaggcggaggttgtggtgagccgagatcgcgccattgcactccagcctgggcaacaagtgcaaaactcggtmaaaaaaaaaaaaaaaaaaaagaacaataggatcagaagtcggatggctgggtccatatatacctccacctcttctgactcccagttttccatctctgttt

SEQ ID NO: 432038 - DNA, 201 bp, Homo sapiens
actgaaaaaaaaaaatacaaaattagccaggtgtggtggcatgcctgtaatcccagctactcgggaggctgaggcaggagaatggcttgaacccgggaggmggaggttgtggtgagccgagatcgcgccattgcactccagcctgggcaacaagtgcaaaactcggtcaaaaaaaaaaaaaaaaaaaagaacaataggatc

SEQ ID NO: 432039 - DNA, 201 bp, Homo sapiens
aaaggccaggcatggtggctcatgcctgtaatcccaccactttgggaagctgagatgggtggatcacctgaggtcaggagttcaagaccaacctggccaayatggtgaaaccccatctctactaaaaatacaaaaattagctgggcatgatggcatgagcctgtaatcccagctacttaggaggctgaggcaagagaatca

SEQ ID NO: 432040 - DNA, 201 bp, Homo sapiens
ctctactgaaaaaaaaaaatacaaaattagccaggtgtggtggcatgcctgtaatcccagctactcgggaggctgaggcaggagaatggcttgaacccggraggcggaggttgtggtgagccgagatcgcgccattgcactccagcctgggcaacaagtgcaaaactcggtcaaaaaaaaaaaaaaaaaaaagaacaatag

SEQ ID NO: 432041 - DNA, 201 bp, Homo sapiens
ttcaggagagaactggggctgtagatctaaatggtggggtcaacagtatacggatgatattttaaagtactgagaaaaggccaggcatggtggctcatgcytgtaatcccaccactttgggaagctgagatgggtggatcacctgaggtcaggagttcaagaccaacctggccaacatggtgaaaccccatctctactaaa

SEQ ID NO: 432042 - DNA, 201 bp, Homo sapiens
acatggagaaaccccgtctctactgaaaaaaaaaaatacaaaattagccaggtgtggtggcatgcctgtaatcccagctactcgggaggctgaggcaggaraatggcttgaacccgggaggcggaggttgtggtgagccgagatcgcgccattgcactccagcctgggcaacaagtgcaaaactcggtcaaaaaaaaaaaa

SEQ ID NO: 432043 - DNA, 201 bp, Homo sapiens
ataggaaataaaaaaaatatttcccccagttttggattgagaaatcaaattcttcctcatgttacccaatgaccctggaaaaggcaggtttgctgggggaraaataaggagttctgcttaggacaagtagagctgagttgtccgttagatattgaatggatgttcaagtctggatttcaggagagaactggggctgtagat

SEQ ID NO: 432044 - DNA, 201 bp, Homo sapiens
tggccaacatggagaaaccccgtctctactgaaaaaaaaaaatacaaaattagccaggtgtggtggcatgcctgtaatcccagctactcgggaggctgagrcaggagaatggcttgaacccgggaggcggaggttgtggtgagccgagatcgcgccattgcactccagcctgggcaacaagtgcaaaactcggtcaaaaaa

SEQ ID NO: 432045 - DNA, 201 bp, Homo sapiens
ggctcgatctcagctcactgcaacctgtgcctcctgggttcaagcgattctcctccctcagcctcccgagtagctgggactacaggcacatgccaccatgyctgactaatttttgtatttttagtagagatggggttttaccatattggctagactggtctcgagctcctgacctagtgatctgcctgcctcggccttcca

SEQ ID NO: 432046 - DNA, 201 bp, Homo sapiens
aaaatatagcaaaatgttaaagattatgtttgagtggttggtttttggctaatttttattttcttttccacgcttttctgtattttccttgtttctttttytttttttttttttttttacaattaacatttttacttctgtaagcccaaaagtcatataggaaataaaaaaaatatttcccccagttttggattgagaaat

SEQ ID NO: 432047 - DNA, 201 bp, Homo sapiens
ttaagaacaataggaggccgggcgcagtggcttacgcctgtaatcccaacactttgggaggccgaggcgggtggatcacccgaggtcgggagtttgagatyagcctggccaacatggagaaaccccgtctctactgaaaaaaaaaaatacaaaattagccaggtgtggtggcatgcctgtaatcccagctactcgggaggc

SEQ ID NO: 432048 - DNA, 201 bp, Homo sapiens
agtagctgggtttacaagtgcctaccaccacacctggctaatttttctgtattttcggtagagacggggtttagccatgttggccaggctagtctcaaacycctggcctcaggtgatccacccgcctccacctcccaaagtgctgggaatacaggcatgagccaccgcacccggccgagttggggttttaccatgttggtc

SEQ ID NO: 432049 - DNA, 201 bp, Homo sapiens
agctgaggcaggagagttgcttgaacccaggaggtggaggttgcagtgagccgagattgtgccattgcactccagcctgggtgacagagtgagactccatytcaaaaaaaaaaaaaaaaagaaagaaagaaataatcagtggaataaaatatttgtgttcaaggatgttgactgcagcactataatactaaaaatcaacga

SEQ ID NO: 432050 - DNA, 201 bp, Homo sapiens
ctcgggaagctgaggcaggagagttgcttgaacccaggaggtggaggttgcagtgagccgagattgtgccattgcactccagcctgggtgacagagtgagrctccatctcaaaaaaaaaaaaaaaaagaaagaaagaaataatcagtggaataaaatatttgtgttcaaggatgttgactgcagcactataatactaaaaa

SEQ ID NO: 432051 - DNA, 201 bp, Homo sapiens
gagtgcaatggcgtgatctcggctcactgcaacctctgcctcccaagttcaagcaattctcctgccttagccttctgagtagctgggtttacaagtgcctrccaccacacctggctaatttttctgtattttcggtagagacggggtttagccatgttggccaggctagtctcaaactcctggcctcaggtgatccacccg

SEQ ID NO: 432052 - DNA, 201 bp, Homo sapiens
ccgtatctcaacaacaacaacaacaaaaaaagctactcaggaggctgaggcaggaggattgcttgagcccaggagttccaggctgcagtgagctatgatcrtaccactgcagtctaggctgggagacagagcaagaccctgtctctaaaaaaagaaaaagaaaagaaaatgtcagctatgtacaagggaatcttcactcac

SEQ ID NO: 432053 - DNA, 201 bp, Homo sapiens
gaggcccgaggtcccagcctccctagaagttgttgctttcatagcagctaggtttcccctgctgtggagtcacggttctccactcttagaagtcagtccctggccccagccagcatgggctttgcttctggagaggctgaggggagaaaggaagggagtggcaactcttagtgcagaagtgtgtttggaagacacccagag

SEQ ID NO: 432054 - DNA, 201 bp, Homo sapiens
tactaaaaatacaaaaaattagttgggtgtggtggtggtcacctgtagtcccagctactcaggaggctgaggcaggagaattgcttgaatccaggaggcasaagttgcagtgagccgagatcgcactactgcacttcagactgggtgacagagcaagactcagtctcaaaaaaaaaaaaaaaaaaagaaagaaacagaaag

SEQ ID NO: 432055 - DNA, 201 bp, Homo sapiens
atggtttttgttttgttttgttttgtttgagatggagtttcgctcttgttgcccaggctggagtgcaatggcgtgatctcggctcactgcaacctctgccrcccaagttcaagcaattctcctgccttagccttctgagtagctgggtttacaagtgcctaccaccacacctggctaatttttctgtattttcggtagaga

SEQ ID NO: 432056 - DNA, 201 bp, Homo sapiens
gggagaggagaaagaaaaaagaaaagaaaagaaaggaaaggaaaagaaaagaaaagaaaagaaaagaaaagaaagaaaagaaaagaaaagaaaaaagaaagatggcgtctctctgggaagattttctgtgaccagagtgggactgggctggtatgtcagaatctcggaatatttgacctggaaagtattatagataccttc

SEQ ID NO: 432057 - DNA, 201 bp, Homo sapiens
agaccagcctggccaacttgatgaaaccccatctctactaaaaatacaaaaaattagttgggtgtggtggtggtcacctgtagtcccagctactcaggagrctgaggcaggagaattgcttgaatccaggaggcagaagttgcagtgagccgagatcgcactactgcacttcagactgggtgacagagcaagactcagtct

SEQ ID NO: 432058 - DNA, 201 bp, Homo sapiens
agagatggtttttgttttgttttgttttgtttgagatggagtttcgctcttgttgcccaggctggagtgcaatggcgtgatctcggctcactgcaacctcygcctcccaagttcaagcaattctcctgccttagccttctgagtagctgggtttacaagtgcctaccaccacacctggctaatttttctgtattttcggta

SEQ ID NO: 432059 - DNA, 201 bp, Homo sapiens
gttgtgagagacaagtgaacctctaaaagcccttctcttttttgttttgttttgtttttgagacagagtctcgctctgtcgccgggctggactgcggtggygcgatctcggctcactgcaacctctgcctcccgggttcaagtgattctcctacctcagcctcctgagtagctgggactacaggcacgtgccatgacgcct

SEQ ID NO: 432060 - DNA, 201 bp, Homo sapiens
gaggtcaggagtttgagaccagcctggccaacttgatgaaaccccatctctactaaaaatacaaaaaattagttgggtgtggtggtggtcacctgtagtcscagctactcaggaggctgaggcaggagaattgcttgaatccaggaggcagaagttgcagtgagccgagatcgcactactgcacttcagactgggtgacag

SEQ ID NO: 432061 - DNA, 201 bp, Homo sapiens
tagagatggtttttgttttgttttgttttgtttgagatggagtttcgctcttgttgcccaggctggagtgcaatggcgtgatctcggctcactgcaacctytgcctcccaagttcaagcaattctcctgccttagccttctgagtagctgggtttacaagtgcctaccaccacacctggctaatttttctgtattttcggt

SEQ ID NO: 432062 - DNA, 201 bp, Homo sapiens
gacacagtggctcatgcctgtaatcctagcactttcggaggctgaggcgagtggatcacctgaggtcaggagtttgagaccagcctggccaacttgatgamaccccatctctactaaaaatacaaaaaattagttgggtgtggtggtggtcacctgtagtcccagctactcaggaggctgaggcaggagaattgcttgaat

SEQ ID NO: 432063 - DNA, 201 bp, Homo sapiens
ttagagatggtttttgttttgttttgttttgtttgagatggagtttcgctcttgttgcccaggctggagtgcaatggcgtgatctcggctcactgcaaccyctgcctcccaagttcaagcaattctcctgccttagccttctgagtagctgggtttacaagtgcctaccaccacacctggctaatttttctgtattttcgg

SEQ ID NO: 432064 - DNA, 201 bp, Homo sapiens
cagctaattttttgtattttattagagatggtttttgttttgttttgttttgtttgagatggagtttcgctcttgttgcccaggctggagtgcaatggcgygatctcggctcactgcaacctctgcctcccaagttcaagcaattctcctgccttagccttctgagtagctgggtttacaagtgcctaccaccacacctgg

SEQ ID NO: 432065 - DNA, 201 bp, Homo sapiens
ccagctaattttttgtattttattagagatggtttttgttttgttttgttttgtttgagatggagtttcgctcttgttgcccaggctggagtgcaatggcrtgatctcggctcactgcaacctctgcctcccaagttcaagcaattctcctgccttagccttctgagtagctgggtttacaagtgcctaccaccacacctg

SEQ ID NO: 432066 - DNA, 201 bp, Homo sapiens
gtgtaccaccatgcccagctaattttttgtattttattagagatggtttttgttttgttttgttttgtttgagatggagtttcgctcttgttgcccaggcyggagtgcaatggcgtgatctcggctcactgcaacctctgcctcccaagttcaagcaattctcctgccttagccttctgagtagctgggtttacaagtgcc

SEQ ID NO: 432067 - DNA, 201 bp, Homo sapiens
caaagtctttaggaatgcatctctcatgtaaagtgtagctactttgtagtcagaagtggcctgtggcaatatcgtgattaggctggggtaggggttagggktgctgccacttagttctaccttcagtgataagaagagtagacagcaagccttggcaacatagcaaaaacctgtctcttctaaaatacaaaaaaaataaaa

SEQ ID NO: 432068 - DNA, 201 bp, Homo sapiens
agggagaggagaaagaaaaaagaaaagaaaagaaaggaaaggaaaagaaaagaaaagaaaagaaaagaaaagaaagaaaagaaaagaaaagaaaaaagaaagatggcgtctctctgggaagattttctgtgaccagagtgggactgggctggtatgtcagaatctcggaatatttgacctggaaagtattatagatacctt

SEQ ID NO: 432069 - DNA, 201 bp, Homo sapiens
gagggagaggagaaagaaaaaagaaaagaaaagaaaggaaaggaaaagaaaagaaaagaaaagaaaagaaaagaaagaaaagaaaagaaaagaaaaaagaaagatggcgtctctctgggaagattttctgtgaccagagtgggactgggctggtatgtcagaatctcggaatatttgacctggaaagtattatagatacct

SEQ ID NO: 432070 - DNA, 201 bp, Homo sapiens
ggggagggagaggagaaagaaaaaagaaaagaaaagaaaggaaaggaaaagaaaagaaaagaaaagaaaagaaaagaaagaaaagaaaagaaaagaaaaaagaaagatggcgtctctctgggaagattttctgtgaccagagtgggactgggctggtatgtcagaatctcggaatatttgacctggaaagtattatagata

SEQ ID NO: 432071 - DNA, 201 bp, Homo sapiens
gtctctactataaatacaaaaattacccgggcatggtggtgggcgcctgtaatcccagctactcgggaggctgaggcaggagaatcgcttgaactcgggargcagaggttgcagtgagtggagatcgtaccactgcactccagcctggggacagagcaagactccgtcaaaaaaaaaaaaaaaaaaaaagacagttttaac

SEQ ID NO: 432072 - DNA, 201 bp, Homo sapiens
aggggagggagaggagaaagaaaaaagaaaagaaaagaaaggaaaggaaaagaaaagaaaagaaaagaaaagaaaagaaagaaaagaaaagaaaagaaaaaagaaagatggcgtctctctgggaagattttctgtgaccagagtgggactgggctggtatgtcagaatctcggaatatttgacctggaaagtattatagat

SEQ ID NO: 432073 - DNA, 201 bp, Homo sapiens
gagaccagcctggccaacttggtgaaacctgtctctactataaatacaaaaattacccgggcatggtggtgggcgcctgtaatcccagctactcgggaggytgaggcaggagaatcgcttgaactcgggaggcagaggttgcagtgagtggagatcgtaccactgcactccagcctggggacagagcaagactccgtcaaa

SEQ ID NO: 432074 - DNA, 201 bp, Homo sapiens
gaggggagggagaggagaaagaaaaaagaaaagaaaagaaaggaaaggaaaagaaaagaaaagaaaagaaaagaaaagaaagaaaagaaaagaaaagaaaaaagaaagatggcgtctctctgggaagattttctgtgaccagagtgggactgggctggtatgtcagaatctcggaatatttgacctggaaagtattataga

SEQ ID NO: 432075 - DNA, 201 bp, Homo sapiens
tgaagcaagcaaatgtcctcggcccacctgatcgctcctggtaactcacctgggtgtgggaatttgtttaggggccctgttgggagggcaggagaggccaygggcacttctgctcccaccagggagccaggcacagcccgggccagcgcctcgggggattctgaggcccgtgcagctgcaggggtttctgtcaggtcacag

SEQ ID NO: 432076 - DNA, 201 bp, Homo sapiens
gttggagaccagcctggccaacttggtgaaacctgtctctactataaatacaaaaattacccgggcatggtggtgggcgcctgtaatcccagctactcggsaggctgaggcaggagaatcgcttgaactcgggaggcagaggttgcagtgagtggagatcgtaccactgcactccagcctggggacagagcaagactccgt

SEQ ID NO: 432077 - DNA, 201 bp, Homo sapiens
gggaggggaggggagggagaggagaaagaaaaaagaaaagaaaagaaaggaaaggaaaagaaaagaaaagaaaagaaaagaaaagaaagaaaagaaaagaaaagaaaaaagaaagatggcgtctctctgggaagattttctgtgaccagagtgggactgggctggtatgtcagaatctcggaatatttgacctggaaagta

SEQ ID NO: 432078 - DNA, 201 bp, Homo sapiens
ggagttggagaccagcctggccaacttggtgaaacctgtctctactataaatacaaaaattacccgggcatggtggtgggcgcctgtaatcccagctactygggaggctgaggcaggagaatcgcttgaactcgggaggcagaggttgcagtgagtggagatcgtaccactgcactccagcctggggacagagcaagactc

SEQ ID NO: 432079 - DNA, 201 bp, Homo sapiens
cctcctgaagcctcatggtgtaccaccatgcccagctaattttttgtattttattagagatggtttttgttttgttttgttttgtttgagatggagtttcrctcttgttgcccaggctggagtgcaatggcgtgatctcggctcactgcaacctctgcctcccaagttcaagcaattctcctgccttagccttctgagtag

SEQ ID NO: 432080 - DNA, 201 bp, Homo sapiens
ggggaggggaggggagggagaggagaaagaaaaaagaaaagaaaagaaaggaaaggaaaagaaaagaaaagaaaagaaaagaaaagaaagaaaagaaaagaaaagaaaaaagaaagatggcgtctctctgggaagattttctgtgaccagagtgggactgggctggtatgtcagaatctcggaatatttgacctggaaagt

SEQ ID NO: 432081 - DNA, 201 bp, Homo sapiens
caggagttggagaccagcctggccaacttggtgaaacctgtctctactataaatacaaaaattacccgggcatggtggtgggcgcctgtaatcccagctaytcgggaggctgaggcaggagaatcgcttgaactcgggaggcagaggttgcagtgagtggagatcgtaccactgcactccagcctggggacagagcaagac

SEQ ID NO: 432082 - DNA, 201 bp, Homo sapiens
tgtgtcctaatctcatcttttttttttttttttttgatagagtcttgctccctcgcccaggctggagtgcagtggcacaatctcggctcactgcagcctcygcctcccgggttcaagggattctcctgcctcagcctcctgaagcctcatggtgtaccaccatgcccagctaattttttgtattttattagagatggtttt

SEQ ID NO: 432083 - DNA, 201 bp, Homo sapiens
gaccccctactctgctccttggcataaatgcccacttgctgtacttggagttgagcccaatctttctgtcccactgcaagaccccattgcaatcatccttmtacctatcatgacagttttgaatgaagtctgccttactgtgctttaacaggtatcattgaattatttttctttaacacatcttagcagtaaaattatctt

SEQ ID NO: 432084 - DNA, 201 bp, Homo sapiens
aggggaggggaggggagggagaggagaaagaaaaaagaaaagaaaagaaaggaaaggaaaagaaaagaaaagaaaagaaaagaaaagaaagaaaagaaaagaaaagaaaaaagaaagatggcgtctctctgggaagattttctgtgaccagagtgggactgggctggtatgtcagaatctcggaatatttgacctggaaag

SEQ ID NO: 432085 - DNA, 201 bp, Homo sapiens
aggcgggtggatcacctgaggtcaggagttggagaccagcctggccaacttggtgaaacctgtctctactataaatacaaaaattacccgggcatggtggygggcgcctgtaatcccagctactcgggaggctgaggcaggagaatcgcttgaactcgggaggcagaggttgcagtgagtggagatcgtaccactgcactc

SEQ ID NO: 432086 - DNA, 201 bp, Homo sapiens
acatgtctgtgtcctaatctcatcttttttttttttttttttgatagagtcttgctccctcgcccaggctggagtgcagtggcacaatctcggctcactgmagcctccgcctcccgggttcaagggattctcctgcctcagcctcctgaagcctcatggtgtaccaccatgcccagctaattttttgtattttattagaga

SEQ ID NO: 432087 - DNA, 201 bp, Homo sapiens
atctctactaaaaatacaaaaacaaaaacaaacaaacaacaaaattagctgggcatgatggtgtgttcctgtagtcccagctactcaggaggctgaggcargagaatcacttgaacctgggatgcaggggttgccgtgagccaagatcacaccattgcactccagcctgggcgacagagcaagactccatctcaaaaaaaa

SEQ ID NO: 432088 - DNA, 201 bp, Homo sapiens
tgtagagatggggtttcactatgttgcacaggctggtctcaaacttctcagctcaagagatctgcccgcctaggcctcccaaagtgctgggattacaggcrtgagccaccatacctggctgctagctattattatcactatgaattgttattttaatcacagagaagaatcctatatattatactattttatcctcacaaa

SEQ ID NO: 432089 - DNA, 201 bp, Homo sapiens
gcatcttccctctgtacatgtctgtgtcctaatctcatcttttttttttttttttttgatagagtcttgctccctcgcccaggctggagtgcagtggcacratctcggctcactgcagcctccgcctcccgggttcaagggattctcctgcctcagcctcctgaagcctcatggtgtaccaccatgcccagctaatttttt

SEQ ID NO: 432090 - DNA, 201 bp, Homo sapiens
aactttctcctaggcccatctgtgtactttcttgcaaaatccaggtttagcaaagaactctgcccagttagttgagcacaaccatcaaccttcaatatccrgttcccctcagtgtctgatcagggtcctcatcccactccatcccccaggtgaggtctgatccccctggcctgtgttcagctagagtcctgttaggttggt

SEQ ID NO: 432091 - DNA, 201 bp, Homo sapiens
ccacatctctactaaaaatacaaaaacaaaaacaaacaaacaacaaaattagctgggcatgatggtgtgttcctgtagtcccagctactcaggaggctgasgcaggagaatcacttgaacctgggatgcaggggttgccgtgagccaagatcacaccattgcactccagcctgggcgacagagcaagactccatctcaaaa

SEQ ID NO: 432092 - DNA, 201 bp, Homo sapiens
ttgtagagatggggtttcactatgttgcacaggctggtctcaaacttctcagctcaagagatctgcccgcctaggcctcccaaagtgctgggattacaggygtgagccaccatacctggctgctagctattattatcactatgaattgttattttaatcacagagaagaatcctatatattatactattttatcctcacaa

SEQ ID NO: 432093 - DNA, 201 bp, Homo sapiens
taatatatatatataatatatatctataatatatatatatgcacacacacacacatacacacacatattgctctctatgtatatatgtacatgcatacatrtatgtttgtattgttctatttatgtgtgtgtatatacacatatgtatgcaagtgtgtgtgtgtatcttacactctatgtgcctggcatatagcaagtgtt

SEQ ID NO: 432094 - DNA, 201 bp, Homo sapiens
ttattttgagacacagtctcactcttgcccaggctggagtgcagtggcacaatcataactcactgcagctttgccacctcagcctcccaagtagctgggaytacaggcatgtgccaccacgcctggctaatttttctatttttttgtagagatggggtttcactatgttgcacaggctggtctcaaacttctcagctcaag

SEQ ID NO: 432095 - DNA, 201 bp, Homo sapiens
ttaactgtcagatattgaaatgatctcatttgaccatcatttgacctattgtctccctgtgggtaggcctcagagccacacacctcaggccaggagtaccrttcatccagacgtgaacatcttcccgaggcttccagagttcttggttcacaccggggctaacatggctgggcttctgctgcagtggcaggagctctgtgc

SEQ ID NO: 432096 - DNA, 201 bp, Homo sapiens
gtgtctttctctctgtatatctataatatatatatataatatatatctataatatatatatatgcacacacacacacatacacacacatattgctctctaygtatatatgtacatgcatacatatatgtttgtattgttctatttatgtgtgtgtatatacacatatgtatgcaagtgtgtgtgtgtatcttacactctat

SEQ ID NO: 432097 - DNA, 201 bp, Homo sapiens
taaaactccatatacacaaaaaataaaacattagccaaaagtggtggtgcacacctgtagttctagctactcgggaggctgaggtgggaggatcacttgarcccaggaggtcaaggctgcagtgagctacgatctgctgtgctggagcgccactgcactccagcctcctgggtgacagagtaagaccctgtctcaaggaaa

SEQ ID NO: 432098 - DNA, 201 bp, Homo sapiens
gctacatgtccaagttggcaacaagaggtaagaataagtgtctttctctctgtatatctataatatatatatataatatatatctataatatatatatatkcacacacacacacatacacacacatattgctctctatgtatatatgtacatgcatacatatatgtttgtattgttctatttatgtgtgtgtatatacaca

SEQ ID NO: 432099 - DNA, 201 bp, Homo sapiens
aggagaatcttaaaccctgagtgggatgaggagcctcctaagcttgaagggagccaggtggggagagggcctgggctccatgcaggttgggcatcagttarcctgtgacagtggccaagtcccatgagacttacaccatgctaaatattcagctttcctcctgtgggcatcctatactctgtgaattggtcagaaccaatc

SEQ ID NO: 432100 - DNA, 201 bp, Homo sapiens
gcccaatccccctgcccctttgtgttgtgctgagtctgcacaacacaaagaaatatttcttatttgtgctaaatttactgtccagtaatttttctgttctmattttctgtgacaagcagctgagtgattttctcctggattttcttctgagtctcaaccagtcccataaatcgccacggttatctcctctgcagtcctcac

SEQ ID NO: 432101 - DNA, 201 bp, Homo sapiens
agctaattttgttattgtcattatttgcagagacgggtcttgctatgtctcaaactcctgagctcgagaaatcctccagcttcagcctcccaaagtgctasgattacaggcatgagccactgcacctggccaccttttttaaaacctaattatcttgaagatctttcatggtagcacatgtagaattatctgttgtgtttt

SEQ ID NO: 432102 - DNA, 201 bp, Homo sapiens
ctgttgcccaggatggagggtagtggcatgatcacagctcacagcagcctccacctcttgggctcaggtgatcctccgacctaagcctccggaggagggggctggggctacaggtgtgtgccaccacacccagctaattttgttattgtcattatttgcagagacgggtcttgctatgtctcaaactcctgagctcgagaa

SEQ ID NO: 432103 - DNA, 201 bp, Homo sapiens
aacccaagagcaaccctaaatcccaacttggtccatgtcctagaatatcaaaggagaatcttaaaccctgagtgggatgaggagcctcctaagcttgaagrgagccaggtggggagagggcctgggctccatgcaggttgggcatcagttaacctgtgacagtggccaagtcccatgagacttacaccatgctaaatattc

SEQ ID NO: 432104 - DNA, 201 bp, Homo sapiens
tctgttgcccaggatggagggtagtggcatgatcacagctcacagcagcctccacctcttgggctcaggtgatcctccgacctaagcctccggaggagggggctggggctacaggtgtgtgccaccacacccagctaattttgttattgtcattatttgcagagacgggtcttgctatgtctcaaactcctgagctcgaga

SEQ ID NO: 432105 - DNA, 201 bp, Homo sapiens
gcaagattccatctcaaaaaaataaataaaataaaataaaataagaattgttgaatgaattaaaaggtgagtgaatgaaggaaatctagatgttttcataygattaaattaactttaatggtttatttggtgggtatattgaattggcattgtttggacctttcctctagagaacgtagtattaaacaatgttattttaaa

SEQ ID NO: 432106 - DNA, 201 bp, Homo sapiens
ggtctttctctaccaactttgaccctgggtcatcatctctctctccaatcaccattccttctctttgaaggttaaaaaaaaaaaaaattcaggccaggcgyggtggcttacacctgtaatctcagaactttgggaggccaaggcaggtggatcacccagggtccggagtttgagatcaacctggccaacatggcaaaacca

SEQ ID NO: 432107 - DNA, 201 bp, Homo sapiens
ggcatgtgccaacacacccggctaattttgtatttttagtagagacagggtttctccatgttggtcaggctggtctcaaactcccgacctcaagtgatccrcctgcctcggcctcccaaagtgctgggattataggcatgagccaccgcgcccagccatgatttttaatatctgattatttaaaccatctgacaggccact

SEQ ID NO: 432108 - DNA, 201 bp, Homo sapiens
agcctctgactcctctatgagatggggagagtgtggcctattttctgagccagttctgaggattaaatgaaataaacatttataaccagtgttaggaacayaggagatgataataaattccagctcccttgtgggaaaaactagcatgaatttttaacaaaatatcagaatcttcaaggttggtgggaaagcagggtaggg

SEQ ID NO: 432109 - DNA, 201 bp, Homo sapiens
tcctgcctcagcctcctgtgtagctgggattacaggcatgtgccaacacacccggctaattttgtatttttagtagagacagggtttctccatgttggtcmggctggtctcaaactcccgacctcaagtgatccacctgcctcggcctcccaaagtgctgggattataggcatgagccaccgcgcccagccatgattttta

SEQ ID NO: 432110 - DNA, 201 bp, Homo sapiens
acatagtaaaactccatatacacaaaaaataaaacattagccaaaagtggtggtgcacacctgtagttctagctactcgggaggctgaggtgggaggatcdcttgagcccaggaggtcaaggctgcagtgagctacgatctgctgtgctggagcgccactgcactccagcctcctgggtgacagagtaagaccctgtctca

SEQ ID NO: 432111 - DNA, 201 bp, Homo sapiens
ggtggttcccaatgacctactttgcccatcaagataaccagatggataatgatttcttttcttttctttttttttttttttttttttgagacagagtttcrcttcgctcttgttgactaggctggagtgcaatggcgcgatctcggctcaccacaacccccatcctgggttcaagtgattctcctgcctcagcctcctgtg

SEQ ID NO: 432112 - DNA, 201 bp, Homo sapiens
gtagagatggggtttcaccatgttgcccaggctgacctcaaattcctaggctccagcaatctacccacctcagcctcccaaagtgctgggattacaggcawgagccaccacacccagctcaacacctcttagtggataatggttgagaatcaatatatgtactagaaagcgaatctaagacaatgttataattgtgctata

SEQ ID NO: 432113 - DNA, 201 bp, Homo sapiens
ctgtattttttgtagagatggggtttcaccatgttgcccaggctgacctcaaattcctaggctccagcaatctacccacctcagcctcccaaagtgctggsattacaggcatgagccaccacacccagctcaacacctcttagtggataatggttgagaatcaatatatgtactagaaagcgaatctaagacaatgttata

SEQ ID NO: 432114 - DNA, 201 bp, Homo sapiens
actacttgggaggctgaggcaggagaatcccttgaacccgggaggcggaggttgcagtgagctgagatcgtaccactgcactccagcctgggcgacagagsaagattccatctcaaaaaaataaataaaataaaataaaataagaattgttgaatgaattaaaaggtgagtgaatgaaggaaatctagatgttttcatacg

SEQ ID NO: 432115 - DNA, 201 bp, Homo sapiens
ggaggcccgaggtcccagcctccctagaagttgttgctttcatagcagctaggtttcccctgctgtggagtcacggttctccactcttagaagtcagtccytggccccagccagcatgggctttgcttctggagaggctgaggggagaaaggaagggagtggcaactcttagtgcagaagtgtgtttggaagacacccaga

SEQ ID NO: 432116 - DNA, 201 bp, Homo sapiens
ctctgttgcccaggatggagggtagtggcatgatcacagctcacagcagcctccacctcttgggctcaggtgatcctccgacctaagcctccggaggagggggctggggctacaggtgtgtgccaccacacccagctaattttgttattgtcattatttgcagagacgggtcttgctatgtctcaaactcctgagctcgag

SEQ ID NO: 432117 - DNA, 201 bp, Homo sapiens
gaaaccccatctccactaaaaaatgcaaaaaattaactgggcatggtggcacgtgcctgtagtcccaactacttgggaggctgaggcaggagaatcccttraacccgggaggcggaggttgcagtgagctgagatcgtaccactgcactccagcctgggcgacagagcaagattccatctcaaaaaaataaataaaataaa

SEQ ID NO: 432118 - DNA, 201 bp, Homo sapiens
gaaaccccatctctactaaaaatacaaaattagccgggcatggtggcgcatgcctataactccagctactcgggaggctgaggcaggagaattgcttgaayccaggaggcggaggttgctgtgagccgagatcatgccattgcactccagcctgagcaacaacagcgaaactcagtctcaaaaaaaaaaaaagaaagaaag

SEQ ID NO: 432119 - DNA, 201 bp, Homo sapiens
actctgttgcccaggatggagggtagtggcatgatcacagctcacagcagcctccacctcttgggctcaggtgatcctccgacctaagcctccggaggagggggctggggctacaggtgtgtgccaccacacccagctaattttgttattgtcattatttgcagagacgggtcttgctatgtctcaaactcctgagctcga

SEQ ID NO: 432120 - DNA, 201 bp, Homo sapiens
ctaaaaaacaactttaagttccctgaaaacaaagacgcccctgtcacgctcacagctctacccagcacttagcatggtacctggagcagagtcaatgtgcrataattatcaataagaattgttgaatgcactctgggaggccgagacgggtggatcacctgaggtcaggaatttgagaccagcctggccaatgtggtgaaa

SEQ ID NO: 432121 - DNA, 201 bp, Homo sapiens
ttgggaggctgaggcaggtggatcacccgaggtcgggagtttgagaccagcctgaacaacatggagaaaccccatctctactaaaaatacaaaattagccrggcatggtggcgcatgcctataactccagctactcgggaggctgaggcaggagaattgcttgaacccaggaggcggaggttgctgtgagccgagatcatg

SEQ ID NO: 432122 - DNA, 201 bp, Homo sapiens
atcatcagcactatccatttccagaacattttcaccatcccaaacagaaactccatctagatatatttttatgtatatatacatatatatgcagcttacayagtgtttttttcatacacaagtatctagagctttttttgtttttgtttttgtttttgaggcagggtctaactctgttgcccaggatggagggtagtggca

SEQ ID NO: 432123 - DNA, 201 bp, Homo sapiens
attttgggaggctgaggcaggtggatcacccgaggtcgggagtttgagaccagcctgaacaacatggagaaaccccatctctactaaaaatacaaaattakccgggcatggtggcgcatgcctataactccagctactcgggaggctgaggcaggagaattgcttgaacccaggaggcggaggttgctgtgagccgagatc

SEQ ID NO: 432124 - DNA, 201 bp, Homo sapiens
ccattgtgaaggttcagtgagccaagattgcaccactgcactccagcctggacaagagagcaagaccctgtctcaaaaaaaaaaaaaaaaaaaaaaaaaaraaagaaagaaagaaagaaaaaaacagatgcccatcaaaaggaaatgcattttgctgaaagtagcgcagttttcccagggaaataacatttgagccgagcc

SEQ ID NO: 432125 - DNA, 201 bp, Homo sapiens
cagggctggaaagagacaaagaaattccaggactgtcctcactagcatattctaaacgaagcagatcttcaggcagccgtgttaggtatgatgtccccgaragagtacacattaacatgacaaagtttgaggaatgaacataagatggccatgcaatgtcaaagtcatggctcacttgggtgcttctctgacagaagagat

SEQ ID NO: 432126 - DNA, 201 bp, Homo sapiens
atcctaacattttgggaggctgaggcaggtggatcacccgaggtcgggagtttgagaccagcctgaacaacatggagaaaccccatctctactaaaaatayaaaattagccgggcatggtggcgcatgcctataactccagctactcgggaggctgaggcaggagaattgcttgaacccaggaggcggaggttgctgtgag

SEQ ID NO: 432127 - DNA, 201 bp, Homo sapiens
gcccattgtgaaggttcagtgagccaagattgcaccactgcactccagcctggacaagagagcaagaccctgtctcaaaaaaaaaaaaaaaaaaaaaaaaragaaagaaagaaagaaagaaaaaaacagatgcccatcaaaaggaaatgcattttgctgaaagtagcgcagttttcccagggaaataacatttgagccgag

SEQ ID NO: 432128 - DNA, 201 bp, Homo sapiens
ctggggtgcaacggcacagtctcggctcaccacaacctctgcctctagggttcaagcaattctcctgcctcagcctcccgagtagctgggattacaggcawgcgccaccacgcttggctaattttgtagtttttttagtagagacggggtttctccatgttgatcaggctggtctcgaactttcgacctcaagtgatctgc

SEQ ID NO: 432129 - DNA, 201 bp, Homo sapiens
atgcccattgtgaaggttcagtgagccaagattgcaccactgcactccagcctggacaagagagcaagaccctgtctcaaaaaaaaaaaaaaaaaaaaaaraaagaaagaaagaaagaaagaaaaaaacagatgcccatcaaaaggaaatgcattttgctgaaagtagcgcagttttcccagggaaataacatttgagccg

SEQ ID NO: 432130 - DNA, 201 bp, Homo sapiens
aaataaatatttcaggtagccaacatttttctgttctcttagtttgagatattttagtaaagatataaaaatcactgacggaagttaaaatttaattaaawttttttcaaaattcctaccaagccagcccaataatattgcattctcacttctttatattccaatccaacattttttacaagtgtaaaaaattttactatc

SEQ ID NO: 432131 - DNA, 201 bp, Homo sapiens
tatttttagtagagacggggtttcatcatgttggccaggctggtctcgaactcctgacctcaggtgatccgcccgccttggcctcccaaagtgctgggatyacaggcgtgagccaccgcgcctggctgaacagggctcttaaaatgctcctgccagagcaatccagacagtgcctcctcctcctccagaaacttgaccttg

SEQ ID NO: 432132 - DNA, 201 bp, Homo sapiens
acagatgcccattgtgaaggttcagtgagccaagattgcaccactgcactccagcctggacaagagagcaagaccctgtctcaaaaaaaaaaaaaaaaaaraaaaaaagaaagaaagaaagaaagaaaaaaacagatgcccatcaaaaggaaatgcattttgctgaaagtagcgcagttttcccagggaaataacatttga

SEQ ID NO: 432133 - DNA, 201 bp, Homo sapiens
tcaaacacccctgaagagtgggtatccccatcctgggctgggaaacctggccaggttctgtccccaaccgtggcatgatggggtgggaggtcagagggccrtcccctgctgtcactccttgtacctgcagagcctcttagcatgcgccactgtgcagggcaccccacaaactttacctcatttctctgcacccgtgaaatc

SEQ ID NO: 432134 - DNA, 201 bp, Homo sapiens
tagcatccatgcatcgtattttcttcactatttccttattgttgtacatttggactatttctgatttttgttattttagctaatcctacaagaaaatcttyacatatgtagcttttgttactttcttgggcaaatccaggaatgacatttgaaagaataggttaaagtaaaacagcattttgcaggatgctctagacttct

SEQ ID NO: 432135 - DNA, 201 bp, Homo sapiens
cacaatgctcagctaacagatttttttttttttgtatttttagtagagacggggtttcaccatgttggccaggctggtctcgaactcctggcctcaagtgrtccgcctgcctcagcctcccaaagtgctgggatttacaggcgtgagccattgctcccaatttctccatgattcttgacttttaggtcactccatagaaca

SEQ ID NO: 432136 - DNA, 201 bp, Homo sapiens
aatatttaattaattgcgtaactgaatcaggtcctgcatccctgcatggagctttctgggccatgactgtcttcctcaggcccatctctcccagcacaggyatagtgggaccgaggagaggagggtcctacacagggaattatgttggggttaatatcctctcctccacccaaccacacacagcacacttgtcatcagtca

SEQ ID NO: 432137 - DNA, 201 bp, Homo sapiens
atctcaaggggcctcacccccggacgtggcaccccactgctcatgtctaagctctacccacttcccctcaaactgctccttggccatcctgagatgcacayacggtgacgccatctgccccaagaggacagacctggtgaagaggtccatacaggaagggcccaagacccctggataacccacatatggtcggggtatggt

SEQ ID NO: 432138 - DNA, 201 bp, Homo sapiens
ctgggaaacctggccaggttctgtccccaaccgtggcatgatggggtgggaggtcagagggccatcccctgctgtcactccttgtacctgcagagcctctyagcatgcgccactgtgcagggcaccccacaaactttacctcatttctctgcacccgtgaaatcggtcttgtcaaagcccttctgcagataggagaattga

SEQ ID NO: 432139 - DNA, 201 bp, Homo sapiens
tattgggggccgtgcaaggacttcggttggtgagaacagacttgaagagaaagcaaattactgcccgaagcagccaaattgcagtggtgaaaatgttaggygtttgcactgtccactttgcttgcctgttttgatttgtgctactcagcaactaattttcaggctcaaggagaaaaaaataaatagaaagcattagaacaa

SEQ ID NO: 432140 - DNA, 201 bp, Homo sapiens
cccgagtagctgggataacaggcgcacgccacaatgctcagctaacagatttttttttttttgtatttttagtagagacggggtttcaccatgttggccargctggtctcgaactcctggcctcaagtgatccgcctgcctcagcctcccaaagtgctgggatttacaggcgtgagccattgctcccaatttctccatgat

SEQ ID NO: 432141 - DNA, 201 bp, Homo sapiens
tgttagcagaagttcatagtctggctcagagacagacagacaaacaacgcaattcaagtaaatctcacccagagaaaccagattctgtaaggataggtgcrtctcccccagggtgcactctggggctccagaatcttcctgttagtggtcagtaccatgagacttcctgaattcagggcttttttttaatgaagatgacaa

SEQ ID NO: 432142 - DNA, 201 bp, Homo sapiens
ctgtgtgttcctgcatgtgtggtggggctcagcccaggctgtgggggagggctcctcagctcactctgcaaccagactcgaccctcacatgtgtgggcccrggacaagagaagagatggagacccacttgctgccgcaccctcttccttcctccttggctccattctgcatctcaaggggcctcacccccggacgtggcac

SEQ ID NO: 432143 - DNA, 201 bp, Homo sapiens
taatcagaattttgcaaagtctttaggaatgcatctctcatgtaaagtgtagctactttgtagtcagaagtggcctgtggcaatatcgtgattaggctggkgtaggggttaggggtgctgccacttagttctaccttcagtgataagaagagtagacagcaagccttggcaacatagcaaaaacctgtctcttctaaaata

SEQ ID NO: 432144 - DNA, 201 bp, Homo sapiens
ctactcaggaggctgaggcaggaaaatcgcttgaacccgggaggtggaggttgcagtgggctgagatcatgccactgcactccagcctgggtgacagagcragacttcatctcaaaaaaaaaaaaaaaaaaaaaagagttgtaaggaaaaagccagagaaagtagtgtatttcttgaacctttaaaaaaaattaacaattg

SEQ ID NO: 432145 - DNA, 201 bp, Homo sapiens
cttctctatttgctcatgagaatgttgatccttatcccgttggactgatcagcctatagtacttggtgacctttggggatcccatccactgtcatgttaakgcgtgttctctgagatgtcctctgggatgatggtctccagatggaccagttaccatcccctccccagcccctgcccctctttttatgagccaccccagag

SEQ ID NO: 432146 - DNA, 201 bp, Homo sapiens
ggtggtaactgtgaacacttgtgatgccggggcttgttttatgtgctgtttgcatgcattaggtcaactaatcctgtggcacttttattgatgtccccacwtgataggtggggaattcagccctgggggtccatggctagcaggagcacagccagcctttggccccaggcagcctgccctcgctccccccgccatgaaccg

SEQ ID NO: 432147 - DNA, 201 bp, Homo sapiens
accctccggaaaggaagggcagcctcctcctcggacctagggaacgcgcccgccagagtcttgggtttaggtttggtccctagctatcacctctgcgaccyggctgcaacttgtttaacctcagttttctaacccacaaaacaggtgtagtaattgtacctgtctcaaagggcgccataaagattacatgctttaatgtct

SEQ ID NO: 432148 - DNA, 201 bp, Homo sapiens
tttcgattactgtacattttacaaaaatgaatgactgaatggaaaggtagaaaggccaaatagagtgtctgaggcatctccatggaggagggtgccagtgrccatgtctgtctgtggctgatcgcaagactcttttgacagtccctgaagcctgtgctcatcttcagctcccttgaggccctcttcacctggcctcaccca

SEQ ID NO: 432149 - DNA, 201 bp, Homo sapiens
tgtgagcacgctccaatactgacaagactgtcttacacctgaggcaattttcatagcacaggctgctaatttttcctccaggttttttgtttgtttgtttktttgcctggtaaaatacacataacataaaatttaccctcttagccatgtttaagcgcacagttgagtggtgtcaagtacattcatattgttgcgcaacca

SEQ ID NO: 432150 - DNA, 201 bp, Homo sapiens
aaaaccctcctggcaggccctccctgggctcagcacaccctcgcttccctgggtttttattcggagctgtctgagctacaagaacatactcacgtacgtgrcataaaaacacgcacgcacatgcagaaagggaaatacttgttgggctccatcagagagaatatttttcaaaaatctctcaatattgtcattatgtcaact

SEQ ID NO: 432151 - DNA, 201 bp, Homo sapiens
ctgtgatctcacctgcgattttgtattctccactctgcctctgaaccccacggcccccggcctggcccaccattcaggctccccagccttgactcccacayggcaccagcggtggcagagcagtgggacacttgctgtgggcagtctgggcagcctctgttcaggaagcctcctgctaccactgcagccagccaagtgggc

SEQ ID NO: 432152 - DNA, 201 bp, Homo sapiens
tttaatgtcttgatgcatggaacgagcttagtctagtgcctgccactagtgagcccccaagccatcagcaatttgcaaaggctagaggggggtggagaagraatgtattagaatcttcccagaggaggggaaagcgatttcacactccctgtgcaatgggactgtggtgaaattgactaccacctctgagcccccacttct

SEQ ID NO: 432153 - DNA, 201 bp, Homo sapiens
tgtacctgtctcaaagggcgccataaagattacatgctttaatgtcttgatgcatggaacgagcttagtctagtgcctgccactagtgagcccccaagccrtcagcaatttgcaaaggctagaggggggtggagaaggaatgtattagaatcttcccagaggaggggaaagcgatttcacactccctgtgcaatgggactg

SEQ ID NO: 432154 - DNA, 201 bp, Homo sapiens
gggctcttggtggaatgagcggagggaactgaaacatgcaacctgctcaccaaaggagatcacttgcctgtcattgtttactcccagagcgtgactgcagrcatcgtccctccctcatgtttccttagcaccctgtgcccctctctcgtgggatgatttgtttccttgcccacctctctgctcggctgggaggctacatct

SEQ ID NO: 432155 - DNA, 201 bp, Homo sapiens
tccacctcttgggctcaggtgatcctccgacctaagcctccggaggagggggctggggctacaggtgtgtgccaccacacccagctaattttgttattgtyattatttgcagagacgggtcttgctatgtctcaaactcctgagctcgagaaatcctccagcttcagcctcccaaagtgctaggattacaggcatgagcca

SEQ ID NO: 432156 - DNA, 201 bp, Homo sapiens
tttttgtttttgaggcagggtctaactctgttgcccaggatggagggtagtggcatgatcacagctcacagcagcctccacctcttgggctcaggtgatcytccgacctaagcctccggaggagggggctggggctacaggtgtgtgccaccacacccagctaattttgttattgtcattatttgcagagacgggtcttgc

SEQ ID NO: 432157 - DNA, 201 bp, Homo sapiens
gtgccatgacgcctggctaatttttgtatttttagtagagacggggtttcatcatgttggccaggctggtctcgaactcctgacctcaggtgatccgcccrccttggcctcccaaagtgctgggatcacaggcgtgagccaccgcgcctggctgaacagggctcttaaaatgctcctgccagagcaatccagacagtgcct

SEQ ID NO: 432158 - DNA, 201 bp, Homo sapiens
cgtgccatgacgcctggctaatttttgtatttttagtagagacggggtttcatcatgttggccaggctggtctcgaactcctgacctcaggtgatccgccygccttggcctcccaaagtgctgggatcacaggcgtgagccaccgcgcctggctgaacagggctcttaaaatgctcctgccagagcaatccagacagtgcc

SEQ ID NO: 432159 - DNA, 201 bp, Homo sapiens
gcacgtgccatgacgcctggctaatttttgtatttttagtagagacggggtttcatcatgttggccaggctggtctcgaactcctgacctcaggtgatccrcccgccttggcctcccaaagtgctgggatcacaggcgtgagccaccgcgcctggctgaacagggctcttaaaatgctcctgccagagcaatccagacagt

SEQ ID NO: 432160 - DNA, 201 bp, Homo sapiens
ctcagcctcctgagtagctgggactacaggcacgtgccatgacgcctggctaatttttgtatttttagtagagacggggtttcatcatgttggccaggctrgtctcgaactcctgacctcaggtgatccgcccgccttggcctcccaaagtgctgggatcacaggcgtgagccaccgcgcctggctgaacagggctcttaa

SEQ ID NO: 432161 - DNA, 201 bp, Homo sapiens
ccaatgaccctggaaaaggcaggtttgctgggggagaaataaggagttctgcttaggacaagtagagctgagttgtccgttagatattgaatggatgttcragtctggatttcaggagagaactggggctgtagatctaaatggtggggtcaacagtatacggatgatattttaaagtactgagaaaaggccaggcatggt

SEQ ID NO: 432162 - DNA, 201 bp, Homo sapiens
gtaacgcgctttgctttctgtgttgcagttcagcaggagcgcagacgcccccgcgtaccagcagggccagaaccagctctataacgtaagtcagcctcgcmgtagaccctccggaaaggaagggcagcctcctcctcggacctagggaacgcgcccgccagagtcttgggtttaggtttggtccctagctatcacctctgc

SEQ ID NO: 432163 - DNA, 201 bp, Homo sapiens
tctcctacctcagcctcctgagtagctgggactacaggcacgtgccatgacgcctggctaatttttgtatttttagtagagacggggtttcatcatgttgsccaggctggtctcgaactcctgacctcaggtgatccgcccgccttggcctcccaaagtgctgggatcacaggcgtgagccaccgcgcctggctgaacagg

SEQ ID NO: 432164 - DNA, 201 bp, Homo sapiens
cgagggcgctagcccgggaagaataaactccagcgggtcctgggccagcgtgatgaatgcacgtgtcacaggcgggaggaaaaaggacaactgggctcagmaaaaggggctgccacgccccggcccctgcaagggctcagccccaggaggcagggcagcattgttagttgccaaggagcggagtagggctgtccctcgggt

SEQ ID NO: 432165 - DNA, 201 bp, Homo sapiens
ccgggttcaagtgattctcctacctcagcctcctgagtagctgggactacaggcacgtgccatgacgcctggctaatttttgtatttttagtagagacggsgtttcatcatgttggccaggctggtctcgaactcctgacctcaggtgatccgcccgccttggcctcccaaagtgctgggatcacaggcgtgagccaccgc

SEQ ID NO: 432166 - DNA, 201 bp, Homo sapiens
ctagagaatactcatgtccccgggggcgcagaccaagaaccttatacctctgcgcacgcgcgagggcgctagcccgggaagaataaactccagcgggtccygggccagcgtgatgaatgcacgtgtcacaggcgggaggaaaaaggacaactgggctcagaaaaaggggctgccacgccccggcccctgcaagggctcagc

SEQ ID NO: 432167 - DNA, 201 bp, Homo sapiens
cccgggttcaagtgattctcctacctcagcctcctgagtagctgggactacaggcacgtgccatgacgcctggctaatttttgtatttttagtagagacgkggtttcatcatgttggccaggctggtctcgaactcctgacctcaggtgatccgcccgccttggcctcccaaagtgctgggatcacaggcgtgagccaccg

SEQ ID NO: 432168 - DNA, 201 bp, Homo sapiens
tctaaggttgtttccaatgctctagatctgtaagacattgcagtttctcccgcctgaagcggcatgaagtgaagcaggagtgaggctgtgtcagcttcccwcagatgctcaggacactaagcgaacgcgaggcttcctgggcaccggggcagccgggcgatggctgagggctgggcgagtgatgcacgtacagtacactgc

SEQ ID NO: 432169 - DNA, 201 bp, Homo sapiens
tcccgggttcaagtgattctcctacctcagcctcctgagtagctgggactacaggcacgtgccatgacgcctggctaatttttgtatttttagtagagacrgggtttcatcatgttggccaggctggtctcgaactcctgacctcaggtgatccgcccgccttggcctcccaaagtgctgggatcacaggcgtgagccacc

SEQ ID NO: 432170 - DNA, 201 bp, Homo sapiens
cacctgcgattttgtattctccactctgcctctgaaccccacggcccccggcctggcccaccattcaggctccccagccttgactcccacacggcaccagyggtggcagagcagtgggacacttgctgtgggcagtctgggcagcctctgttcaggaagcctcctgctaccactgcagccagccaagtgggcaagccattt

SEQ ID NO: 432171 - DNA, 201 bp, Homo sapiens
tctgcctcccgggttcaagtgattctcctacctcagcctcctgagtagctgggactacaggcacgtgccatgacgcctggctaatttttgtatttttagtrgagacggggtttcatcatgttggccaggctggtctcgaactcctgacctcaggtgatccgcccgccttggcctcccaaagtgctgggatcacaggcgtga

SEQ ID NO: 432172 - DNA, 201 bp, Homo sapiens
gtgtaggcgggacacataggttggtgatagcccatcctgcctgaaagcacaggatgtgcaagagtaccccacagtgggaagtctaggaagctctggcctgrcctctgcatggttctcgcagcctcttggtctgcggtgggggcatatcgatttttgcactgtttcccattctgagtcttctttccagtcaggacagttcaa

SEQ ID NO: 432173 - DNA, 201 bp, Homo sapiens
gagaaagtgtctcgctctgtcacccaggctggagttcagtggcgtgaccatagctcactgcagcctccaactccactcctgggttcaagcaatcctctcayctgagcttcccatgtagctgagactccaggtgtgcgccacccctcctggcatctctggacttctgatacccttaggtttggtttcttgggcctctctgct

SEQ ID NO: 432174 - DNA, 201 bp, Homo sapiens
ggaaagaaattatatacactgcttctaagaacctgaaacatcagccgggcatggtggctcacgcctgtaatcccagcaattgggaggccaaagtgggggtwtcacctgaggctaggagttcgagaccagcctggccaacatggtgaaaccccatctctactaaaaatacaaaaattagccaggcatggtggtggccacctg

SEQ ID NO: 432175 - DNA, 201 bp, Homo sapiens
tggaaagaaattatatacactgcttctaagaacctgaaacatcagccgggcatggtggctcacgcctgtaatcccagcaattgggaggccaaagtgggggkttcacctgaggctaggagttcgagaccagcctggccaacatggtgaaaccccatctctactaaaaatacaaaaattagccaggcatggtggtggccacct

SEQ ID NO: 432176 - DNA, 201 bp, Homo sapiens
gtaacccaaggcaaattattcctaccagctggtgggagaaaaaggcatggtaaaggaacagggcttggccgggcaccgtggctcacccctataatcccagmgctttgggaggcccaggtaggcagatcacttgaggtcaggagttcaagaccatcctggccaatgtggtgaaaccctgtctctactaaaaatacaaaaatt

SEQ ID NO: 432177 - DNA, 201 bp, Homo sapiens; identical to SEQ ID NO: 350035

SEQ ID NO: 432178 - DNA, 201 bp, Homo sapiens
taatttaagcaaagactaaaatcaaccatttgatgctgcaggggcctttcaggatctgggagggggcagtctggagagaaggagggagacgcaggtggacytggggcaagttcagatcagaagaggtgcaggctggcacctgcggcaggtaccagcctgggcactggtggccgcctccctgtcccgtgtgtttccaccgcc

SEQ ID NO: 432179 - DNA, 201 bp, Homo sapiens
agggaatgtgactatcaaggtgagggcccagaagcttggggggtgcagaggactgtttttgtgtgtgtgtgtgtgtgtgtgtgtgtgtgtgttggggaggscaacggaggcccctgggaggagcgagctgaagtggggcagaggccagggtccccctgctgaggagctgggaaaagacagtagaagacttctaaggtagac

SEQ ID NO: 432180 - DNA, 201 bp, Homo sapiens; identical to SEQ ID NO: 350041

SEQ ID NO: 432181 - DNA, 201 bp, Homo sapiens
ataaaatgggtataatgatggcccctacctgacagggtccctgggagggtgaaatgcctggcaccgggtaagtactgttaccatcaccatggccatcaccatcatcatcatcatcaccaccactgttccccagggagcgagacgcccgtgtgaagaggaaactgcggggcccagagccagcagccacagaggcctatggga

SEQ ID NO: 432182 - DNA, 201 bp, Homo sapiens
ttccgagggttccccagcgcgggaccttcgggaaaccctggcgcgaggcgtcagaagctgtcggactgtgagcgccttcgaactttggaggcttggctcgkgatggaggtttttttagcatggggaccagggaggactacggtgctcgggactgggctgcggcctcctcgcggccccgagtgccctgtgaaatcagctcag

SEQ ID NO: 432183 - DNA, 201 bp, Homo sapiens
ctttggaggcttggctcgggatggaggtttttttagcatggggaccagggaggactacggtgctcgggactgggctgcggcctcctcgcggccccgagtgycctgtgaaatcagctcaggccgcgtccctctagcctgcactttccctctgttcacgctgcttccctccagggcccggcctccaagtgaaggggggcggag

SEQ ID NO: 432184 - DNA, 201 bp, Homo sapiens
cgccccccagcttatccctagccggggctccccaccgtgggaacggggaccagctggccggaagcgccaaactgcgtccctgtccgagccctggggatcartcaagccgaggagttaattatgtaatgagggggcagggggtcgaggctaatgaagcctcccggggtggggagggaggggaggaggggaccgtacccaggt

SEQ ID NO: 432185 - DNA, 201 bp, Homo sapiens
gatcagtatgcaactcgaataggagtcagtatatgactaggtccagggtcaccctagaggcagggacacggtcagtgtttgaccttagatgaggtctttakctggggcaggaactcaagccctagcatggaaagtcctcggccctactgcaggcagggtatattttttctaaagcaaattcatctaagagctgcagattct

SEQ ID NO: 432186 - DNA, 201 bp, Homo sapiens
tgacttcccaggctcaagtgaccctcccgcctcagcctctgtagtaactgggactatcagtgtgcaccaccatgcctggctaattttttaatttttttgtrgagatggggtctttctatgttgcccaggctggtcttgaattcctgactcaagagatcctcccaccttggcctcccaaagtatagggattagaggtgtgag

SEQ ID NO: 432187 - DNA, 201 bp, Homo sapiens
ccctcacctccaccggccccatcccccacaccaaatggccgccttgggcctgcccacccaccccctcaacttcacaccttgatttcactcccacccccctstggcttcaaagcctaaccaaggctgctgggagtccagctggggccggcttccccttcccggctctcacctccgtgtgaatggaaggggctctgcctggcc

SEQ ID NO: 432188 - DNA, 201 bp, Homo sapiens
taaaatgggtataatgatggcccctacctgacagggtccctgggagggtgaaatgcctggcaccgggtaagtactgttaccatcaccatggccatcaccatcatcatcatcatcaccaccactgttccccagggagcgagacgcccgtgtgaagaggaaactgcggggcccagagccagcagccacagaggcctatgggag

SEQ ID NO: 432189 - DNA, 201 bp, Homo sapiens
ccgggcgctcagccccctactcggctgcatttctggagctgccgcacgggtcagggggctccgggtacccagcggctccaccggcggtaccctttgccccrcactttctccaagggggccccttccctctaccatacaccgcgcctgggggctatctggatgtgggctccaaacccatgtactgaaccactgctgggcccc

SEQ ID NO: 432190 - DNA, 201 bp, Homo sapiens
ctcccgggggtcagcctgagcctggagaaccgggagctatggaaggagttcagctctgtgggaacagaaatgatcatcaccaaagctgggaggtgaggggmtggccagggtccgtgtttctggtgggggtctcttgggaaaggcagagtccctggggagggggctaggactgggtggttcccgaggggctagagctctgcc

SEQ ID NO: 432191 - DNA, 201 bp, Homo sapiens
cactcccatttcctccctcccagctgatcctgcactccatgcacaagtaccaaccccgcatacacctagttcgggcagcccagctctgcagccagcactgsgggggcatggcctccttccgcttccccgagaccacattcatctccgtgacagcctaccagaacccacaggtgagtgaccctgcttgagggggtggtggcc

SEQ ID NO: 432192 - DNA, 201 bp, Homo sapiens
aatgatggcccctacctgacagggtccctgggagggtgaaatgcctggcaccgggtaagtactgttaccatcaccatggccatcaccatcatcatcatcaycaccaccactgttccccagggagcgagacgcccgtgtgaagaggaaactgcggggcccagagccagcagccacagaggcctatgggagcggaggtgagtg

SEQ ID NO: 432193 - DNA, 201 bp, Homo sapiens
gcaccgggtaagtactgttaccatcaccatggccatcaccatcatcatcatcatcaccaccactgttccccagggagcgagacgcccgtgtgaagaggaarctgcggggcccagagccagcagccacagaggcctatgggagcggaggtgagtgtagtcccgatggcgatggggccaggcctgagacagggatcctcccta

SEQ ID NO: 432194 - DNA, 201 bp, Homo sapiens
tgtgaaatcagctcaggccgcgtccctctagcctgcactttccctctgttcacgctgcttccctccagggcccggcctccaagtgaaggggggcggagggyggtcacctgccagaaggtctggggcgccaaggtgtgtcccgggactcttggctccgtccaggttccaggccccgccccccagcttatccctagccggggc

SEQ ID NO: 432195 - DNA, 201 bp, Homo sapiens
tataaaatgggtataatgatggcccctacctgacagggtccctgggagggtgaaatgcctggcaccgggtaagtactgttaccatcaccatggccatcaccatcatcatcatcatcaccaccactgttccccagggagcgagacgcccgtgtgaagaggaaactgcggggcccagagccagcagccacagaggcctatggg

SEQ ID NO: 432196 - DNA, 201 bp, Homo sapiens
gtggcacgatcatggctcactgcagccttgaactcctgggctcaagcaatcctcctgccatacctgggactacaggcaatgcaccaccaagcctggctaatttttttttttttttttttttggtagagacagggtctcactatgttgcccaagctagtcttgaactcctgggctcacaggattgttccttctcagcctccg

SEQ ID NO: 432197 - DNA, 201 bp, Homo sapiens
ctgaatttgaagtccatgtacacccacagtagaaatggccttctttaccttttatcctacaccgccttttaaatcaataattacttaggactacttttttgggggggcagggtcttactctgttgcccaggatggagtgcagtggtatgatcatagctcactacagccttgaactcctgggatcaagcaattctttccatt

SEQ ID NO: 432198 - DNA, 201 bp, Homo sapiens
cctacttcatctacgacatctacgccatgttcctctgtcactggcacaagcaccaggtcaaagggcatggaggggacgacggagcggccagagccccgggyagcacgtgggccatagcgcgtggctacctgcacaaggagttcctcatggtgctccaccatgccgccatggtgctggtgtgcttcccactctcagtggtga

SEQ ID NO: 432199 - DNA, 201 bp, Homo sapiens
gccaattctaggcaaggcttgctggaaccgccccccagcccccacaggaagcaaatgatagggcacatgtatcaactggcgggccattaggaggatggcaycttctagccactccaccaatggaagagcatactcctgccctccccaactgcctctacagagcagcctcgtgcctttgcagtttgacaccttccttttatc

SEQ ID NO: 432200 - DNA, 201 bp, Homo sapiens
gaagcaggagaattgcttgaacccgggaggtggaggttgcagtgagccaagatcacgccaccacactccagcctgggcaacaagagtaagactgcatctcaaaaaaaaaaaagaaaaaagaaaagaaaagaaaagaaaagaaattgtctaaattgagtgtttaaaacaaaaaattgggataattaggatgtcgaattgccc

SEQ ID NO: 432201 - DNA, 201 bp, Homo sapiens
aacaccccactttcctttcttcgtggagatgttgtgtgaggatcatatgaatcagcgtctgtagagcaggggttgaaaactgctgcagataatatgagggytgtgggctctgcagggatgatataggctggaggactcaccttctctgctgagggccagtgctgctcagctccagccactgataatgttatatggttagaa

SEQ ID NO: 432202 - DNA, 201 bp, Homo sapiens
gagacagggtcttgctctgttgcctaggctggagtgcagtggcacgatcatggctcactgcagccttgaactcctgggctcaagcaatcctcctgccatasctgggactacaggcaatgcaccaccaagcctggctaatttttttttttttttttttttggtagagacagggtctcactatgttgcccaagctagtcttga

SEQ ID NO: 432203 - DNA, 201 bp, Homo sapiens
gccaggttacctagcccctctgtgactcacttcttcacctgtacagtggggatgatggccacacctaccttttacagggttttgggaggggtaaataaggstatgcatgggaagtttggaagatcgcctgtcccaggaggcaggaatgggcgtccacccctgtgacctctctctccagcactctcgccccttcagctgttg

SEQ ID NO: 432204 - DNA, 201 bp, Homo sapiens
agcacgggcagtgccccaggcttgtgtgttgccaggcaagccaagacaagggatgatgtatgcaccccactttgccaaggccccatttcttttctttctctttttttttttttttgagatggagtcttgctctgttgcccacgctagagtgcagtggtgcgatctcagcgcactgcaacctctgcctcccaagttgagtga

SEQ ID NO: 432205 - DNA, 201 bp, Homo sapiens
tctcaaatgaaagaaaataaagtacatggttagtttagcactgtggctcatgcctgtaatcccagcactctgggaggtgtgaggcaggcagatcacttgargtcgggagtttgagaccagcctgggcaacatggtgaaaccccatctctactaaaaatacaaaaattagccaagtgtgatggcacacacttgtaatcccag

SEQ ID NO: 432206 - DNA, 201 bp, Homo sapiens
cctaaacgatggctgaatcctggcattttcccctaaaaacaatgccaccatatacctatttttgtccatgttctccaccccaacatacctcaccacagctsctgctcctggggtttcctacaccatgaggcagccacggaaactgccaggggctgtgtccctggatccaaatcttccctcccactgtcaaccatactgagg

SEQ ID NO: 432207 - DNA, 201 bp, Homo sapiens
gaccagcctgggcaacaggttgaaaccctgtctctactaaaaaaaatacaaacaattagccgagtgtggtggcaggcacctgtaatcccagctactcgggrggctgaggcaggagaatagcttaaacccaggaggcggaggttgcagtgagccgagatcgcaccattgccctccagcctgggcaacaagagcgaaacttca

SEQ ID NO: 432208 - DNA, 201 bp, Homo sapiens
cagctactcaggaggctgaggtgggaagattgcttgaccgctgggggcagaggttgcaatgagccgagattgcgctagatagatagatagatagatagatvgacagacagacagacagacagacagacagacagatgacacaacaggcagggcatggtggctcatgcctgtaattctagctacttaggaggctgaagaggg

SEQ ID NO: 432209 - DNA, 201 bp, Homo sapiens
tgtgttgcccagcctggccccatgctttctggctgcacacccaggccaggacaggctggtgtgtctcccttcctctgctgggatgtcctgaacacccattraccacccgacaagggttcagagtatgtggtgcatcccatcttgggtttattttaggtggtatgtcagcaagaagacacacacacacacaaacacacacca

SEQ ID NO: 432210 - DNA, 201 bp, Homo sapiens
gtgacagaggggaaagaggaagggcgggggctgcccaagaacccagggagagccccagctcctcaccttcctgcctctgtgcccaggtgtggcgacagggkaagggagacttctttctgggttgcatgttgatggcagaggtcagcacgcccttcgtctgccttggcaagatcctcatccaggtgagtgagcatgggaggg

SEQ ID NO: 432211 - DNA, 201 bp, Homo sapiens
gaggtataaggatcatttcagcccggggaggttgaggttgcagtgagccatgatcgcgccactgtactccagcctgggggacagaatgagaccctatctcaaaaaaaaaaaaaaaaaaaaaaccccacaaaatttctaaacctgtttcttctgtaaaacagggataccaagtaagaaccagtagaaatcacctggtactgt

SEQ ID NO: 432212 - DNA, 201 bp, Homo sapiens
tggccaggttacctagcccctctgtgactcacttcttcacctgtacagtggggatgatggccacacctaccttttacagggttttgggaggggtaaataaggctatgcatgggaagtttggaagatcgcctgtcccaggaggcaggaatgggcgtccacccctgtgacctctctctccagcactctcgccccttcagctgt

SEQ ID NO: 432213 - DNA, 201 bp, Homo sapiens
ctccaacgcctgcaatgagagggctgtgccacttctgaactgggtgacctcagggagcctcaggatcgttgatggccctgtgggaaggacagacgcagtgmcctcggagctcctgcagcagacaggacatgggcagccctgcagcacagtcaggtgccccctctggccaatgtcagcttccttccccgccatcgggtgagg

SEQ ID NO: 432214 - DNA, 201 bp, Homo sapiens
actaacccccgctggccctcgggcctcccgagtggccggctgcaaccacggctcctctccagggtaggccagcttgaggaatcttatttattttatttatytacccaaatttgaactagtctgttgggttgggggaaggaggtggctgctacccccaagccttcccagtgctgacaaccccgggggcaggcgagggcgccc

SEQ ID NO: 432215 - DNA, 201 bp, Homo sapiens
ccaggttacctagcccctctgtgactcacttcttcacctgtacagtggggatgatggccacacctaccttttacagggttttgggaggggtaaataaggcyatgcatgggaagtttggaagatcgcctgtcccaggaggcaggaatgggcgtccacccctgtgacctctctctccagcactctcgccccttcagctgttgc

SEQ ID NO: 432216 - DNA, 201 bp, Homo sapiens
cctcccccgtctctgcccagccagccccctcccgactccccagtttcatcggactccctggccccatcccgtccccgccctggcccctttgtgccccttcycatcgttttctccctccttcccgggcttggcgtcccttctccacccctaactccttccactcggcctccctgccccttcacggcccgcctgcctccctgc

SEQ ID NO: 432217 - DNA, 201 bp, Homo sapiens
gcgggaggggatgagggtgaagaggccaaaatgtggccaggcagctgctgcagtgtctggtggttgccaaaaaggcccagaggtgtgcaggcaggaggcgsggggacggggaggagaggggccctgtccgtggtgctgacggccgccctaggtgacccacgggtggcccgttgcaagttgccttagaggtgcccacaacgc

SEQ ID NO: 432218 - DNA, 201 bp, Homo sapiens
aagctggtagtgatgagcctgagagcctgtagtcccagccacttgggaggctgaggcaggaggatcccctgagcacaggaatttgaggttacagtgagctmatcgtaccagtgtacttcatcaagggagacaaaatgagagaccccgtctcaaaaatcaaaacaaaacaaaaaccccagtatgtctgtcttaagattattg

SEQ ID NO: 432219 - DNA, 201 bp, Homo sapiens
atgctgccatcccccagggctccccatcacccgagaggagaggacgccccaactaacccccgctggccctcgggcctcccgagtggccggctgcaaccacrgctcctctccagggtaggccagcttgaggaatcttatttattttatttatttacccaaatttgaactagtctgttgggttgggggaaggaggtggctgct

SEQ ID NO: 432220 - DNA, 201 bp, Homo sapiens
atgcagagttcccagaagatgaaagaagcttcagcaggcttggacgtgggaagggacctggcagttctgattctgatctaatactttcagctgcctccaayggacatccaacgatatcatctcccagagattaagaagaggttcaccagcctccttagtataaaatgaaaggcttgtgtttaggtaattaccctgggggaa

SEQ ID NO: 432221 - DNA, 201 bp, Homo sapiens
cgcctcagcctcccaaagtgctgggattacaggcgtgagtcaccacgcccggccctgcacctgctcttatttcccctctccttttctttctttgagccctstccctgaaacatagctgtccatcaagtcaccaatggattctaattggccaattctaggcaaggcttgctggaaccgccccccagcccccacaggaagcaa

SEQ ID NO: 432222 - DNA, 201 bp, Homo sapiens
ctgaccccgtgatctgcccgcctcggcctcccaaagtgctgggattacaggcgggagccaccgtgcccggcctattattctaattttttgtagagacaggrgttccactatgttgcccaaactggtcttgaactcctggcctcaagtgatcctcccacctcggtctctgaggtgcggggattccagcctgaaccactgcac

SEQ ID NO: 432223 - DNA, 201 bp, Homo sapiens
ctgggagacctcatccagcccggccatctggtctactagtgttcagcccgcctctctcttcttccccgtacaccctcccaccctccaaaacagggccagcwtgcggcgaagacattcctataagacattagggactgaggccagggccagacagctaggtgtcattcagggtgagtgtttgggggccagggatggaggagt

SEQ ID NO: 432224 - DNA, 201 bp, Homo sapiens
agggcgcccagtccctcaccatcggctgcacatcgcgccctcgggccctgccatgtccctggtgctactgacctctcaaggcttcctccaatctggggtcrggggaccctgggaggtgctttacagaccgctaataaaagacgatctgcgtgaacgccaccaaggcccttgccaccaagttctttggggctgggaagggag

SEQ ID NO: 432225 - DNA, 201 bp, Homo sapiens
gtctccacctcctgcaagcacatcattgatgaccagtaagtgctgcgagacacccccctgcccaggtgccagtggttggcgtgtacgggtaatcccggaakaccccacatcttggagggaactctgtctgtggtccccaagcccttaacttgggcctgagcaagttaactgcaataaccgcaactcaacacccagggataa

SEQ ID NO: 432226 - DNA, 201 bp, Homo sapiens
ctggatccctcatctgtacccaagactccgctcctgtccagggctgctgtgctgacccctgagatctgaccccaatcactggtgtcccctttcctccttgytcccccaccccgtctctctgcccaacagacactggctgtcctctgcctacacgcaatttgctgtgccctacttcatctacgacatctacgccatgttcct

SEQ ID NO: 432227 - DNA, 201 bp, Homo sapiens
gggctcagggccccctcccagctggccaaggagccctgggcccccttcctccccaagagaagagctggcccctgtcccctgtccccagcagccccctgtgmcaccgcagctgctgttcctttaagggcctccccctccctctttctctgctccccccatctctgtcgcagccgcggctgtggctcagagctgcatggggag

SEQ ID NO: 432228 - DNA, 201 bp, Homo sapiens
atgtgaatgaggaaggttaagagagaatcccaaacataagtttagcctcaagttcctatatgcttcctaagcaaacttttatcagagatgcaaatgagaamctcctgaacccaggtgtaaatgctccaaagtcctctctttaatgcttttgcagaaatgaagtcagaataaaaaccagtggttacagtgagcagacacggt

SEQ ID NO: 432229 - DNA, 201 bp, Homo sapiens
tttgtgcgttttgttttgtttggtttggtttggttttttctttttgagatggagtctctctctgttgcccaggctgcagtgcagtggcgcaatcttggctyactgcaacctccacctcccaggttcaagcaattctcttgcctcaacttcccaaatagctgcgattacagatgtccaccaccatgcctggctaattttttt

SEQ ID NO: 432230 - DNA, 201 bp, Homo sapiens
tctctttcccctcaggccaggaggaaccagtgtgactccatgctgctcagaaaccaacagctgtgctccacatgtcaagaaatgaaaatggtaggcaaggrggaagacagaaatgggcacaggcatctcagggtgcagcactgcccttcccagccaagccctgtggggagagatagtgacggggcccgttgcaaggagggc

SEQ ID NO: 432231 - DNA, 201 bp, Homo sapiens
tgaagaagtctttgttggcctgtggttattttgagcttctttaagaatagaatctaagtagtccttatccttctttccttcttgtactgtcatccagaaarcattcactacagactgcccattctgggccccaggacagctgtcttccacggattactgacagaggcctacaaaactctaaaagagagacaacgttcttcc

SEQ ID NO: 432232 - DNA, 201 bp, Homo sapiens
gaatggaattatatgattcaagatgtaaatcacacagatgttggtagagaaaaaggcatactggtattgaaactgtaaactggcctgtttacttcgtctcytaacaaaaaacactttggattcaggttctccacagcagtcttccactggccacagtgaggggagctaggtttccccagtctccagctagaaaaactcaga

SEQ ID NO: 432233 - DNA, 201 bp, Homo sapiens
ccaagttgtgaatgcaaataaaaagttattgaaggaaattaaaagtggtactcccatgataagaaactaaaagagccttactgttaatacagataaagttmtagtggtctgtataaaaggctaaaccagtcacaacattccctttaggccaaagcataaaccacaacaaggcgctaactcttctcaatttaacaaaggctg

SEQ ID NO: 432234 - DNA, 201 bp, Homo sapiens
acccttcttgaggttcactctccttacccaacttaaattgaatggtcaatcattgtcatcatgcccatgcatatatacctgtctcccttgcccttctctcratttgttaaaaccaccattctgggtaaatctaactctctacctactctggtttgcacccatgtaactgtacatggtctggaaagcacacacacaagcaaa

SEQ ID NO: 432235 - DNA, 201 bp, Homo sapiens
tggagggtctgcgacgcccaaaagggcagcgcccgcccgcagagtggggctgggaggggacggggtagggtagggtgaccccagggtgcgccttcactctyctggcaccccatttggctttttgggtgggcctcccacttccgccgccgcccctcactcagccttgggtctgcgggaggcagcagaggaaaaggagccccg

SEQ ID NO: 432236 - DNA, 201 bp, Homo sapiens
cagcatgagtaaggacagtctagcatattttaattgagggtgggacacaaactcacaggcccatgacagtcagatgaggggcataatgagtaaagctggcyaaacaggactgcaatgaatgggaaatcacctccccgcttcagcccacccccacgccagcagtgttacctgcaggcatgtgagtccagaggccagatccac

SEQ ID NO: 432237 - DNA, 201 bp, Homo sapiens
catagtgtggagagagaatctgtgcacttggagggagggcacagcgattgtgggactctagaattcagtgctgccaatacggggcagaacttagctgttgycaatggagggaccatttagaccacccttagccagaggagaattgcccatcccaggtttcagaaactgagttttgactacctccaccaccatgggctaaag

SEQ ID NO: 432238 - DNA, 201 bp, Homo sapiens
aatttttgttgaaatgaaaccaacagcagttctagaatgacatagaatatgaatacatgtcccatctccttagcacagccctgtgcttggtacaccatcartgttcaataaatatttgttaaatgaaatgaatggccccacccccctcactatgtctcaagtgccttagggtcccagtccactagaactaagaatacaggc

SEQ ID NO: 432239 - DNA, 201 bp, Homo sapiens
tcagggttttcaagaatgaataggagtctcccacagtacactttttctcaaaaacaaaaatcctgtctttggcaggcagctttgttctgatgcagcccctktagcacagttcattcatacaatagcgctagctggatttaggggatttagaacagcaatcatgctattcaggaggagttacagtttcctgcatcttccctt

SEQ ID NO: 432240 - DNA, 201 bp, Homo sapiens
atcgcaccactgcactccagcctgggcaacaagcacaaaaactccatctcaataataataataaataataataaataaataaaaataaaaatgtataaagrcacatttctttctaccaagccctagccaattgactaatgtgttttcttgtttcttccaatcagaatgagtcttcatcaacccaaattccagactacacct

SEQ ID NO: 432241 - DNA, 201 bp, Homo sapiens
gctaacaccctacttaatggtaaaagactggatactttcccctaagattagaaacagggcaacaatgtctgctcctgacacttctactcaacattttactrtacattctagccagaaagataagaaaaagaaataaaatccatccacattagaaagaaagaagtacaactagtctatttgcagatgatatgctcttatata

SEQ ID NO: 432242 - DNA, 201 bp, Homo sapiens
atatgttacagcatgtaattcaagaggtccccagaaagttttttcatctacaaaataacagaaaggataagcaccctcaccacccaagcctttggttcatwttttttggttttgatctctattctcttaccacaatgacatgctgcttccagaatggaactctgtctttaagttctatactagttaggaggctaatctatc

SEQ ID NO: 432243 - DNA, 201 bp, Homo sapiens
atcatactggatgttacttgattctcaatgacagttggttccatttggtggcagaaaaggccatttgtctttctaagccctttccttgggtacttttaccycagcattacctgatgggcataaggaggcagcaccaaatagtgttgccagacttgtggtgctgagcacatgccagccaattgggaaatggctgcttcctga

SEQ ID NO: 432244 - DNA, 201 bp, Homo sapiens
agttatcagaggttcaataaactcaaaggcctatttaagaaacaaaagtactaagtgatagagtgcttattaagagttgttaacactgcatggatcagcaygagtaaggacagtctagcatattttaattgagggtgggacacaaactcacaggcccatgacagtcagatgaggggcataatgagtaaagctggccaaaca

SEQ ID NO: 432245 - DNA, 201 bp, Homo sapiens
gtatgaattattaaatccacaatgtaacccagctgcccaaagtatttctcaaaagtttactgacaccaatacaatctccacacagaacaccaggcatgttrctacagccagatgcacaagccttctagttacatgccaatcataaatcagctgcatcacgccacaaaataaagtgcacctgtcatcctattgctctacttc

SEQ ID NO: 432246 - DNA, 201 bp, Homo sapiens
gatggcagcagttaagggctctggattgcttgacattttcttaatagaacgtttaatgaatttttaatttgcaatttttcttaaacctttttttatttatktttgagacagggtcttgctttttgcccatgctggagtgcagtgatgtgaacacaactcactgcattctcgacctcctgggctcaagatctgcctgcctta

SEQ ID NO: 432247 - DNA, 201 bp, Homo sapiens
gtaaggcaagagaggacaaggaaagaggctgggccagtaggtgagagataatggccgcttttgttgcgctcctttattaagtcaggccctcagctgggacktcccgtgcatccatgcgttcattccacagatactgattgaatgcctgcatgtaacaagccatgcttggggtgctcatgatacagccgtgaatgaaacaca

SEQ ID NO: 432248 - DNA, 201 bp, Homo sapiens
acagaggcctacaaaactctaaaagagagacaacgttcttccttgcccagaaaggaaccaataggcaagacaacgaggcagtgagcggtaggagctcatcwcctcccagactcccagagagaaaataacctcgccaagccaatctttgacactggcaccttctcctcacaattttctctcttctcccaaaagatgatttaa

SEQ ID NO: 432249 - DNA, 201 bp, Homo sapiens
gagggcacagcgattgtgggactctagaattcagtgctgccaatacggggcagaacttagctgttgccaatggagggaccatttagaccacccttagccaraggagaattgcccatcccaggtttcagaaactgagttttgactacctccaccaccatgggctaaagtgctctgaggtcctaaataaacttgaaagcctgt

SEQ ID NO: 432250 - DNA, 201 bp, Homo sapiens
gtgtaagagagagaaagaaagggagcgaaagagagaaagaaaggagagtagagggagagggagatggagagaaatatatttctctgtttctttaccaaggrttcaagaaggccatggccttgggccatgagtcagcccttagacaccgcagcagatattgtcctagggtatgaggatgtttccaattgtcaaatgtgtttt

SEQ ID NO: 432251 - DNA, 201 bp, Homo sapiens
gaaaatcccagatgatccaaaagcatcctttgagaattgtatgagttataggtaagtcaacaatttaaatcaggacatgacttaattcttgttatgtctgrggacacaggagagtggattgagaagcctagtaagaggaatgtttaaggaatgcttagggaacaggcttcttgactggttttatttttaggttaaaccaaa

SEQ ID NO: 432252 - DNA, 201 bp, Homo sapiens
cccgtcacacagacgtcctcaaatttgaatctggctcccagagtctactgcgtgtatgaaggcctgcacgtatgtgccatgaggtaaacgtggattcagcyggcagctgctcccttctggaaagaaactgttgtgtttcaagggagtagaatgtactgtggacaggatctcttccttcattctctaaatcagggacctgac

SEQ ID NO: 432253 - DNA, 201 bp, Homo sapiens
ccggagcagccccgtgcctgaggcaggtgcacgtgtgcctggagcagtatttcctagtgactagacaaaggggagacaggctcagagacacaataacaggragagggagacagaaagcaagatagaaacacacacacagagatgagggacaaaaaacacaagacaaaaggagaggcaggtctgtcaaagaagaaagatttt

SEQ ID NO: 432254 - DNA, 201 bp, Homo sapiens
aagaaaaagaccaaagacctgggtttcagggctgggaaagaaagcaagacagaatggaggaaatgaggcctgcaggacatggcgtctcaaatgtttgcgtygcctttaaagtagcctgtcacagctgccttccacgactcttcaatgccctcatcccttctccagatagaaatggagcagctcttcttggaggccaggctt

SEQ ID NO: 432255 - DNA, 201 bp, Homo sapiens
caatataaaggttatgagtattttgatccaggaggccctaagaacatagagcggaggactaccgaacagtagtcccggagtcagcagtctctgtgataaartgacagttaacctgagacttgaagaacatgtgtgtgttgggggtgggggcatctaaaccaaccaattttaaagatttactaaatctgtgtatctaatttc

SEQ ID NO: 432256 - DNA, 201 bp, Homo sapiens
tcctaccttaattgcagtttcagaaatgtacctcactctcatacctcaaagatgtgagggatggagggaggagctggagcttcaggggatatcacccccasgggtatcaggaagacatggtagaaagttgaatcagcccaaagcagaggagtcaatatccacagacatttcctctctagtctctcttctcactccattcaa

SEQ ID NO: 432257 - DNA, 201 bp, Homo sapiens
caaaagggaggaccagaactcaggttacagctgaggtttggggatatccactcgagtggagtgaaagtcttccagtcctaatgaatcgcttcttatgtatmccaaaatattggcctagttcatggctctcatttagccaaagtggaaccaagagcctggagctaagagtacctacccaacgaaagctacccaatctgctgt

SEQ ID NO: 432258 - DNA, 201 bp, Homo sapiens
atttaactgaggaacctggacaagtcttccttgatttcagcttcatcccaaggcccatgaatgttttctttaaaaagctgcaagcgaatgaggtagaatgracacagacatgagatagacatcagcagaagggcaaagagtacggctcccacagcactaatggacagtaggcctcccacggctgaaaatgcaaaaagcagt

SEQ ID NO: 432259 - DNA, 201 bp, Homo sapiens
cgccggtccacatagttatcaggaaagggctgtcgctcatacaagaccttctgccacttgacctccttggtgttagtcacaggttgagcatacattatccyttcattcaaactcaggccagtttaatcatcgccctcacagaagtccaggtggttcttgttctttatgaagttttgaaatgagacctccctggaaattcca

SEQ ID NO: 432260 - DNA, 201 bp, Homo sapiens
ggtggggctaaatgtgtaggctaaacgtgctttaaaagaatggaagaaaaatagaagatataagaaaagctccttcactgagttcatggcaagtcttaggyccagtcggatgtgaaagagagtggcacttttgtgaaatttttatgtgggatttacaaatttaactgaagctaccggcaaagctgcaccttgatgttgcca

SEQ ID NO: 432261 - DNA, 201 bp, Homo sapiens
ccagagtgcccatctctgttttacggaaggaaaaactgttacctctctcacccctccactgctttcctacatctttgctgccctacatgccccaccatttyctcacgtctctctgtctctctttcccctcaggccaggaggaaccagtgtgactccatgctgctcagaaaccaacagctgtgctccacatgtcaagaaatg

SEQ ID NO: 432262 - DNA, 201 bp, Homo sapiens
gcactgcccttcccagccaagccctgtggggagagatagtgacggggcccgttgcaaggagggcctagataaaggctgccaaggaggaactgttggtcctrggagcagcatcgactgacagaacatgataaaccttctccgtttcaacaagctaaagggtaaccaggatagatgggccagagtagagatgcaatgagacac

SEQ ID NO: 432263 - DNA, 201 bp, Homo sapiens
aggtggagaaagagagaaaatatatggtgagataagcaattttttcacctgaaaaattgcacattcctcacagggctgtcataggcagtgcctgaagcagygtcctaaggcactcgacacggtgccccacccagagcaagagctcagtgaatgtgagccacaattattaggagccctggtgtcagtcaatatatgtttacg

SEQ ID NO: 432264 - DNA, 201 bp, Homo sapiens
cagtgctgccaatacggggcagaacttagctgttgccaatggagggaccatttagaccacccttagccagaggagaattgcccatcccaggtttcagaaastgagttttgactacctccaccaccatgggctaaagtgctctgaggtcctaaataaacttgaaagcctgtctgggccacaacaactgcaatacccaggcaa

SEQ ID NO: 432265 - DNA, 201 bp, Homo sapiens
ggtcctaaataaacttgaaagcctgtctgggccacaacaactgcaatacccaggcaagtcctagtgctgtgctgggctctgagccagtggactggggagcrcacgatctagtaagacaccagccaggatggctaagtaagtgcttacagcacccctcccccaaccccaggcaacacagcttatggctccaaaagggactcc

SEQ ID NO: 432266 - DNA, 201 bp, Homo sapiens
ggctaagtaagtgcttacagcacccctcccccaaccccaggcaacacagcttatggctccaaaagggactccttcctttgcttgaggagagaagagggaakagtgaaaaggactttgtcttgcaacttggataccagttcagccagagtaggatagggtactgggcaaaatcctgaggcactcattgcaggccctagctct

SEQ ID NO: 432267 - DNA, 201 bp, Homo sapiens
tgcccatctctgttttacggaaggaaaaactgttacctctctcacccctccactgctttcctacatctttgctgccctacatgccccaccatttcctcacstctctctgtctctctttcccctcaggccaggaggaaccagtgtgactccatgctgctcagaaaccaacagctgtgctccacatgtcaagaaatgaaaatg

SEQ ID NO: 432268 - DNA, 201 bp, Homo sapiens
atcagcagaagggcaaagagtacggctcccacagcactaatggacagtaggcctcccacggctgaaaatgcaaaaagcagtgtgacccccacatagctccrgggagtacatgcctttagtttcttctgcaacatgggccacagggcaaaaatctgaatggcaaatgtcaccatgatgaaggcatgcagggaccggggaaga

SEQ ID NO: 432269 - DNA, 201 bp, Homo sapiens
gcctttggttcattttttttggttttgatctctattctcttaccacaatgacatgctgcttccagaatggaactctgtctttaagttctatactagttagraggctaatctatcagcttgctttaataatgtaatggatgtcctaatttaactgaggaacctggacaagtcttccttgatttcagcttcatcccaaggccc

SEQ ID NO: 432270 - DNA, 201 bp, Homo sapiens
tctgtgtatctaatttcaactgatatccagggaaaaacaatgactctgacttgagggaagggtgaaaccctctggtcattcacatcacaaaaggatgtatraaggactttgacatcaaatacaacacaaattcactaaagtggtacattatttatttaaatcaaaatgcagttacaggcaacgttctaaatgagactttct

SEQ ID NO: 432271 - DNA, 201 bp, Homo sapiens
tcacttgcccttatacatgtcatgttccttcccaggatctgtccacaacatatggctgaagactttccatggagatggggtacaaacaaaataaaagttcycctattggcagtcctgatggtatcaatcaaaatgggaagggaactgcatctctataccctcagagcggcctcaccaaggccctgaacctttcactccacc

SEQ ID NO: 432272 - DNA, 201 bp, Homo sapiens
cactcttcaggtcagcccaccgggtctgcccactcttcttccgcccttcacctccatcaatgagatcaaacaaaacatacccaatcagtgaagaagccagrccagtccctaaaagccaatggggggccagaagaccctcatccatataccaccagataaccacaaaaacacaaacactgcacagctgctggatcaccacac

SEQ ID NO: 432273 - DNA, 201 bp, Homo sapiens
cagtgcattacatagaatgaatttgttgtactacaacactaatgttctgtaacgtttccctgaagaccgtgttacaatagtgatcttcatttatatatgtrtttttcgttttatatatttaggttgattgtgtctatatttagacctcataatttaaattgcttacaatgactcattcatttgcccaatgtttgttgaata

SEQ ID NO: 432274 - DNA, 201 bp, Homo sapiens
ctccaccaccatgggctaaagtgctctgaggtcctaaataaacttgaaagcctgtctgggccacaacaactgcaatacccaggcaagtcctagtgctgtgytgggctctgagccagtggactggggagcgcacgatctagtaagacaccagccaggatggctaagtaagtgcttacagcacccctcccccaaccccaggca

SEQ ID NO: 432275 - DNA, 201 bp, Homo sapiens
gtgcctgctgcatttggcaccttgtctctgctctcttcaggttttcttacatgtcagcttaaacaacatctaatacattagtactagctattacatagtgmtgatgctaatacatagtgcttcgtatcagggattcttcaaagcactttgcatgtatcccatttaccacaattctagaggtagatacttttattcccactt

SEQ ID NO: 432276 - DNA, 201 bp, Homo sapiens
cctaagaacatagagcggaggactaccgaacagtagtcccggagtcagcagtctctgtgataaagtgacagttaacctgagacttgaagaacatgtgtgtrttgggggtgggggcatctaaaccaaccaattttaaagatttactaaatctgtgtatctaatttcaactgatatccagggaaaaacaatgactctgacttg

SEQ ID NO: 432277 - DNA, 201 bp, Homo sapiens
cacccctgcagattgaaacacaagtagggaacccgggatccttgctctgttggggcaccaggccagtacctccagtcatattctttcccgtcacacagacrtcctcaaatttgaatctggctcccagagtctactgcgtgtatgaaggcctgcacgtatgtgccatgaggtaaacgtggattcagccggcagctgctccct

SEQ ID NO: 432278 - DNA, 201 bp, Homo sapiens
acacaaaaaagcaccttcataagaaccaaaaatcagtgatcacaaagtgatcacagtacctggttttaacttcgtattgttgaaagaagcactgaggaagrtaagaaagacaatcttgaattgctgacaccacccctcccccatcccctggcagcagccacatagtgtggagagagaatctgtgcacttggagggagggca

SEQ ID NO: 432279 - DNA, 201 bp, Homo sapiens
cccagagtctactgcgtgtatgaaggcctgcacgtatgtgccatgaggtaaacgtggattcagccggcagctgctcccttctggaaagaaactgttgtgtktcaagggagtagaatgtactgtggacaggatctcttccttcattctctaaatcagggacctgacaagaagctgctggcaatccggaggccaactggagac

SEQ ID NO: 432280 - DNA, 201 bp, Homo sapiens
atttaaagcagtgtgtagagggaaatttatagcactaaatgcccacaagaaaagcaggaaagatctaaaatcaacactctaacatcacaattaaaagaacyagagaagcaaaagcaaattcaaaagctagcagaaggcaagaaataactaagatcagagcagaactgaaggagatagagacataaaaaacccttcaaaaaa

SEQ ID NO: 432281 - DNA, 201 bp, Homo sapiens
ttggttagtgcaaaacaaaagggacagaaaagccaaagtgacataggagggcaaatccatcttttgggagctccccaatggcctgagtgctccagaactgsagtggaagatagctccctgtggtgtcccttgtattctctcagaaacaaccaagggcctggctcttcaaacatgggactgcggttctaacgttctcttgtt

SEQ ID NO: 432282 - DNA, 201 bp, Homo sapiens
aaaaccagcacaagacaagcatgccctctctcatcactcctattcaacatagtgttggaagttctcgccagggcaatcagccaagagaaagaaataaaggrtattcaattaggaaaagaggaagtcaaattgtccctgtttccagatgacatgattgtatatttagaaaaccccatcatctcagcccaaaatctccttaag

SEQ ID NO: 432283 - DNA, 201 bp, Homo sapiens
tttgtgtgcacaggaacagcatgttatgttcttggatggccctgattcttgtccatagagttcatcctagaacagtaatcttagaggtgggactacagggrgaatagttgtaaaactggctaggagctgaagcttggtagatctactgtttattatagccatggcccttctgagctgactctgctcttgtatgtgctctta

SEQ ID NO: 432284 - DNA, 201 bp, Homo sapiens
caatttttaaagagaatattaaatgctattgacctaaaatagtgatggtaataaaaatcaaatttaataagtctgaatgtagggatatggatattattttktatacattttgggtttttttaagtatattcagctttatttttttaaatggctgatattttcagatagaaggaacatgtgtaatatcataaggtttttttt

SEQ ID NO: 432285 - DNA, 201 bp, Homo sapiens
ctttatcagtttgtttggttgttatttaaagctttttttaaatcaagatcgagtataacagatataaaatccaattggaattatgattagtttttttgtgygttttgttttgtttggtttggtttggttttttctttttgagatggagtctctctctgttgcccaggctgcagtgcagtggcgcaatcttggcttactgca

SEQ ID NO: 432286 - DNA, 201 bp, Homo sapiens
gatgtgagggatggagggaggagctggagcttcaggggatatcacccccaggggtatcaggaagacatggtagaaagttgaatcagcccaaagcagaggartcaatatccacagacatttcctctctagtctctcttctcactccattcaacctcccaccagacaacctgtccatcccaacctacattcacttacccgaag

SEQ ID NO: 432287 - DNA, 201 bp, Homo sapiens
tccagaactggagtggaagatagctccctgtggtgtcccttgtattctctcagaaacaaccaagggcctggctcttcaaacatgggactgcggttctaacrttctcttgttttaattacttagatatcctcatacctctgcgacttttctgacttcatccaagaagaatatgaatttgccaattttgtttcaagttccaga

SEQ ID NO: 432288 - DNA, 201 bp, Homo sapiens
atttaaatgtctccagtacctaatgaatgggtaaatgaatgaatttgtattcttcttttgtcttccttagaaacttccttccagaaactttgctttattcrtcggtatgacccccgtcacagcaccctttacttggtagcctcacaatagatgtttactgttgaatgaatgaatctagttattcacacacatactttgaca

SEQ ID NO: 432289 - DNA, 201 bp, Homo sapiens
cttaacaaaatttctgatttgaaattaattcctagtgataaaaggacagtatagaaacttgccacaaatgaattaccacaggaataaccagctatcttggraggtgcctgctgcatttggcaccttgtctctgctctcttcaggttttcttacatgtcagcttaaacaacatctaatacattagtactagctattacatag

SEQ ID NO: 432290 - DNA, 201 bp, Homo sapiens
tggcctaaacctcctcagtggaccacgggaaatcatgttggaccaagggtttccatgttcaaacagtcaacaaggccctcccctaggttgagatatttttkatactgaaggcccaggccccccagtatggcttgctgccagcaagcagcaaggattctctcgtgggtaacgctgtagccaggcaggaccagcctcttctgg

SEQ ID NO: 432291 - DNA, 201 bp, Homo sapiens
ctgggattacaggcatgagccaacatgcctggcctaatttttgtattattagtagagatgggcttttgccatattggccaggcaggctggtctcaaactcstggcctcaagtgatctgcctcccagagtgctgggattccagctaatttttttttttttccatttttttgtagagacagagtctcactatgttgcccaggc

SEQ ID NO: 432292 - DNA, 201 bp, Homo sapiens
ctgtgggtgggggtagggaatactggctctgtggccctcctcagagctgggaggccaagggttcactgggcttgaatcctctctaagcacctaccccattrtggcctaaacctcctcagtggaccacgggaaatcatgttggaccaagggtttccatgttcaaacagtcaacaaggccctcccctaggttgagatattttt

SEQ ID NO: 432293 - DNA, 201 bp, Homo sapiens
agcatgccctggctggaagggaggaccatgggggtatctgggaaacagcccacatcattttgcactttgccctttccccacggggcggccaagaggcatgkgggtttgggcagcagtgctcagggtctgtagaaaccaacctttgtgcctgacgcggatagtcctgggggcaggtgtgggaagggacagcccgcgggcttc

SEQ ID NO: 432294 - DNA, 201 bp, Homo sapiens
ctcagaattccccaggacacggagccaaccagaatccaggtttgacaaacaggaggatcaacctgtggggggaaaatgagtccctgtcccagtggggtgaragtagatgagtccgcagggtatctctgctacccagaagcttcccggatgccacccacaagtacagcagacacataggtgggcacttggctctgctggtat

SEQ ID NO: 432295 - DNA, 201 bp, Homo sapiens
aaagagcaagactccatctcaaaaaaagaaaaaaaaaaaaaaaaaaagtccaggcgcggtggcttatgcctgtaatcccagcactttgggaggccaaggcrggtggatcacctgaggtcaggagttcaagaccagcctggccaacatggtgaaatcccgtctctactaaaaatacaaaaattagctgggcatggtgttgca

SEQ ID NO: 432296 - DNA, 201 bp, Homo sapiens
cctgtcagcgctctgttctcagatgttttcatctggtactatctagctctccagttttcccaaggggcaagacttgtgttttcctctggttacccaagagrtccctggcaccgttcctgcagagcacagagatgctcagtggatggtcagtgaaggaatgagctacagaggggcttgttggacaggaacagctgttatttg

SEQ ID NO: 432297 - DNA, 201 bp, Homo sapiens
gaggcccggagaggatctagtcttggcttctgctccaagttagggaggcgcaccacactgttggcctccccctgcaacagtaactatcattttggggcacstagcgagggactggtgaaggagtagtactgcatggttcacatattttcaaggctcatttcatctttaccatcatcctgtgaagtaggtattctttttact

SEQ ID NO: 432298 - DNA, 201 bp, Homo sapiens
tgcctgggtgggcagatcacctgaggtcaggagtttgagccagcctggccaacatggtgaaacctcgtctctactaaaaatacaaaaaaatcagccaggcmtggtggtgcatacctgtaatcctagctactcgggaggctgaggcaggacaatctcttgaacccaggaggcagagattgcagtgggcccagattgcaccgc

SEQ ID NO: 432299 - DNA, 201 bp, Homo sapiens
aaaccccatgtctactaaaaatacaaaaattagctgggcatggtgacggctgcatgtaatcccaactacttgggagtctgaggcaggagaatcgcttgaacctgagaggcggaggttgcagtgagctgagatgcgccattgcactccagcctgggcaacgacaagagtgaaattccatctaaaaaaaaaaaaattctttct

SEQ ID NO: 432300 - DNA, 201 bp, Homo sapiens
cccatgtctactaaaaatacaaaaattagctgggcatggtgacggctgcatgtaatcccaactacttgggagtctgaggcaggagaatcgcttgaacctgagaggcggaggttgcagtgagctgagatgcgccattgcactccagcctgggcaacgacaagagtgaaattccatctaaaaaaaaaaaaattctttctagat

SEQ ID NO: 432301 - DNA, 201 bp, Homo sapiens
caaacaaagtttgttcctaactttggagcaaaggtgcagcaggaaatggctcagaggctgctgcagggcttccgcagcgacatggtggcgctcatgcaccrggggctccttgtgggctgtgcaggtgggaggtagcgctggccgggcactgcgggttggatggagggtgtgagagaggccaggaggattccgaggcttttg

SEQ ID NO: 432302 - DNA, 201 bp, Homo sapiens
accgacccttgggaaccgggcggccgcctggcatgatgggagttgtagttcgatgctggtttagggtttcaggcgtggaggttccaaaatccgaggtttgmtttcagcctgcccttgccagtgcctgggccgctgggagccgttattggctgccgttaaggaccgttacgtttcccgggtaagtgaaagggcctgaggccc

SEQ ID NO: 432303 - DNA, 201 bp, Homo sapiens
cggggtttcaccatgttggtcaggctggtctcgaactcctgacctcgtgatctgcccatttcggcctcccaaagtgctgggattagaggtgtgagccaccrtacctggccatattgacctttttgacagatgaaaaaatgtggccctgagaggttggtaaattgcacagtcacatagctggttaagtggcaaatcggtata

SEQ ID NO: 432304 - DNA, 201 bp, Homo sapiens
cagatcacctgaggtcaggagtttgagccagcctggccaacatggtgaaacctcgtctctactaaaaatacaaaaaaatcagccaggcatggtggtgcatrcctgtaatcctagctactcgggaggctgaggcaggacaatctcttgaacccaggaggcagagattgcagtgggcccagattgcaccgctgcacgccaccc

SEQ ID NO: 432305 - DNA, 201 bp, Homo sapiens
aggtcaggagtttgagccagcctggccaacatggtgaaacctcgtctctactaaaaatacaaaaaaatcagccaggcatggtggtgcatacctgtaatccyagctactcgggaggctgaggcaggacaatctcttgaacccaggaggcagagattgcagtgggcccagattgcaccgctgcacgccaccctgggggacaga

SEQ ID NO: 432306 - DNA, 201 bp, Homo sapiens
aaccggccagtgtgcagggtatgtgtgtccttggaaggcctgcccctctgctgggcgctctggacggtggggcccagcatatcatcagtcctcagtgtgcrcttgcagaattgaacttgggggatttccaacctctccccaggataccgctacgtgattctggatatccccctgctgtttgagaccaagaagttgctcaag

SEQ ID NO: 432307 - DNA, 201 bp, Homo sapiens
ccagccatggccaacctggcaaaaccccatgtctactaaaaatacaaaaattagctgggcatggtgacggctgcatgtaatcccaactacttgggagtctkaggcaggagaatcgcttgaacctgagaggcggaggttgcagtgagctgagatgcgccattgcactccagcctgggcaacgacaagagtgaaattccatct

SEQ ID NO: 432308 - DNA, 201 bp, Homo sapiens
cagggatccaggatgtagctggttccaggtgatgaaatcttcccaccttatgactggggaatgtcaggtctagtagcaaagcaaagagaccccagatggcaaaaaaaaaaaaaaaaaaaaagagctgtggccaaagttccccccttgtttgtattaaggggcttccgtagcccatagagctctgggttcctcacagtgagt

SEQ ID NO: 432309 - DNA, 201 bp, Homo sapiens
accccatgtctactaaaaatacaaaaattagctgggcatggtgacggctgcatgtaatcccaactacttgggagtctgaggcaggagaatcgcttgaaccwgagaggcggaggttgcagtgagctgagatgcgccattgcactccagcctgggcaacgacaagagtgaaattccatctaaaaaaaaaaaaattctttctag

SEQ ID NO: 432310 - DNA, 201 bp, Homo sapiens
aaggggatcctgcctcgtccaggaagcatgctgcctaacagcacctgaccttgccctgcctgttcagcttttgattgctgaatttatagtgttcgtttgctttttttttttttttttttttttagaaggaatctggttctgtcacccacggctgcagtgcagtggtgggatctcagcttaccgcaacctccacctcccagg

SEQ ID NO: 432311 - DNA, 201 bp, Homo sapiens
aatggagccatagatctgagttcaaatcccaaccctgactttctagctgtgtgacttcattgagtgatctcgccctcagctcattttttcatctgtgcagyggggataataatccaacatgaggctgggcacagtggctcatgcctgtaatcccagcactttgggaggccgaggcaggcagatcacttgaggtcaggagtt

SEQ ID NO: 432312 - DNA, 201 bp, Homo sapiens
taatgtgttgggtggtgacacgttggtcagcgctgtgaagaaaaggaggctacaggataaagcaggggtgctgttttatatatttggggacagtttctctstaaggtccccagttcccctgctttctgtccgtgtcctgaccaggctgtgatccagctagctgcagggttgaatccaaactgggtccttgaacattcccag

SEQ ID NO: 432313 - DNA, 201 bp, Homo sapiens
agggcagtgatgtaggggggagtggttggagatgctgggaggacatagatggcctctttcatgaggcttctgtaggactctccatggacttggcttgtacycactgagatggtaactgttagacggctgtgagcagaggcctgacatgatctgacttgcatttcaaaggatcacactagctgctttgttaggagcaaacaa

SEQ ID NO: 432314 - DNA, 201 bp, Homo sapiens
tcccggagctcagggggaggtgagggccccagaaggtgcacttgccatcaggcttctccctgggtcccaggaggactgcagccaggcccgaggcacctttstgggaggtgggtagagggctgaggcagcgtcacaccttcttgccccgcctccccatctgccttccccaacccaattagaccagcgcagacataagccttc

SEQ ID NO: 432315 - DNA, 201 bp, Homo sapiens
taggggggagtggttggagatgctgggaggacatagatggcctctttcatgaggcttctgtaggactctccatggacttggcttgtactcactgagatggkaactgttagacggctgtgagcagaggcctgacatgatctgacttgcatttcaaaggatcacactagctgctttgttaggagcaaacaaagtttgttccta

SEQ ID NO: 432316 - DNA, 201 bp, Homo sapiens
aaaaaaaaagagctgtggccaaagttccccccttgtttgtattaaggggcttccgtagcccatagagctctgggttcctcacagtgagtggagtggggtgkgaggcagccagtgagcttccaagcctccctccctggctgtgggaccctaagtagcccagagcagggtagggttggagggaagatccagtccccatgctct

SEQ ID NO: 432317 - DNA, 201 bp, Homo sapiens
ggtactgtttagggaaatggagttatgagaaaaacccagaattgtatagaaaaacattcccccaaatccggagggagccgagagaccaaagaatgattcgracaagtccagcttcgtgagtaggtgagcgtattaggacttaaatggagggcactcctcagtggcagcaggacagctctgggcgtccgtgccgcctcccgt

SEQ ID NO: 432318 - DNA, 201 bp, Homo sapiens
ctatgggatcttcctggggcagaggtgcagctgcttttggcaaatcggaccacaaggatacctccttggaagacaaggctctcacttgtacatgaatagtyataatactgtaaggcagtatctgagaaaagtagggtcatctggacggtttcctaacactgtgtcccaggaagatccagataatttggggggacaggccag

SEQ ID NO: 432319 - DNA, 201 bp, Homo sapiens
ccttgccctgcctgttcagcttttgattgctgaatttatagtgttcgtttgctttttttttttttttttttttttagaaggaatctggttctgtcacccacggctgcagtgcagtggtgggatctcagcttaccgcaacctccacctcccaggttcaagcgatcctcctgccacagccttctgagtaactggaattctagg

SEQ ID NO: 432320 - DNA, 201 bp, Homo sapiens
gtagttcgatgctggtttagggtttcaggcgtggaggttccaaaatccgaggtttgatttcagcctgcccttgccagtgcctgggccgctgggagccgttwttggctgccgttaaggaccgttacgtttcccgggtaagtgaaagggcctgaggcccgcgggtgctacctgcctggagccggaatgccccaggccttctta

SEQ ID NO: 432321 - DNA, 201 bp, Homo sapiens
ccaggctgggttaggtggtctaggataccaactccccctcaacattttaccttaatccaacagtacagtaattagccgaaacttgcctggtttttcctackagactgtaagccctctagggacagggacagtgtcttattcatctctgtgttcttagtgcagagcctggcccgctgttggtgtttaataaagtgtgttgat

SEQ ID NO: 432322 - DNA, 201 bp, Homo sapiens
aagcacaagagataccatcttagcacaatccttttactctaaatgttcaggggaggggtatagcagcaaggagagggggtctctgtgatggcccaaggagrtatttttgatactgaagacccaggcccccaggggaactgcaggaagcgtctagctcataggcataggcctttcagtaaaggtcacccatccagggatcca

SEQ ID NO: 432323 - DNA, 201 bp, Homo sapiens
tcaaggccagcacaagtgccagcccttctacaaggtcttccctgatcagctatccagaaataattttctgcagccttctgttctgcacggcattggaaccrgccagtgtgcagggtatgtgtgtccttggaaggcctgcccctctgctgggcgctctggacggtggggcccagcatatcatcagtcctcagtgtgcgcttg

SEQ ID NO: 432324 - DNA, 201 bp, Homo sapiens
agccttctgttctgcacggcattggaaccggccagtgtgcagggtatgtgtgtccttggaaggcctgcccctctgctgggcgctctggacggtggggcccrgcatatcatcagtcctcagtgtgcgcttgcagaattgaacttgggggatttccaacctctccccaggataccgctacgtgattctggatatccccctgct

SEQ ID NO: 432325 - DNA, 201 bp, Homo sapiens
gctccttctctgttactgtggacttggtgttgtccttccgcctccagccaagccagttctgtgaacagcttttggtgttgaggaggaagattcccaggccrccaacagtaatgtcatcccttggtttgccaggggagctttttttttttttttttttgagatggagtcttgctcttgttgcccaggctggagtgcaatggc

SEQ ID NO: 432326 - DNA, 201 bp, Homo sapiens
ttgcctcctctctcccaattattttggcccaaactgatcagtcccgctggcctctcccaagcaggtccttctggcactcctctggtggaccgcccccatcrgccacacttgccctgctctccagtgattctgtagctcctggctccgtagtctcgcggacagctctctttcctggaagatgtttctggtgggcctgacagg

SEQ ID NO: 432327 - DNA, 201 bp, Homo sapiens
gtgagccaagatcgtgccactgcactaacctgggtaacagagtgagaccctgtctcaaaaataaataaataaataaataaataaataaacgtacagaaaakaaatttaaaaccaggagccaaaggagtcatctctaatggactcagggttgttcatcaaacaaaatgagaagcagaactgtattccaggcatcatgctaaa

SEQ ID NO: 432328 - DNA, 201 bp, Homo sapiens
agggaaaagggtgagaaccacaggattaggttagctatacattgtttgatcaaggaagggaattgagccattaaatctggctctataaaatagaattagatttgttctgtatggccccacggtttaaaactaggagagatactgcctaagaaagaactttctaactgccaagactggacttgaaaaaataacaactgtcag

SEQ ID NO: 432329 - DNA, 201 bp, Homo sapiens
gaattgcttgaacccgggaagtggaggttgcagtgagccgagatcgcaccattgcactccaacctgggcgacagagcaagactctgtcttgggaaaaaaawaatatatataaaaaagagtgcaggcagagtgtgactccctgggttctaaatcctggctctgcctctgacttaatgaatgaccttaggcaagtcacttaac

SEQ ID NO: 432330 - DNA, 201 bp, Homo sapiens
atgtatttattcttcttggggctactgggcccaagaagtaaaaactgagaggcaatttggagacacccgatgcaaaagagcccaccacttgtggagcacartagaatctgatcgtcatttcacaggccttagagcttcactgcagagttggagcgcaggcaccagctctaacccaaactccttgcccttttctttgcaccc

SEQ ID NO: 432331 - DNA, 201 bp, Homo sapiens
tccgagcccctcttggtgcctgtaccttaaggagagaagaagagggctgatagctgaaggcaggcaagccacgaacttagctttgttttgaaaattaccckctgggctgggcacggtggctcacgcctgtaatcccagcgctttggtaggttgaggagggtggatcacccgaggttaggagttcgagaccagcctggtcaa

SEQ ID NO: 432332 - DNA, 201 bp, Homo sapiens
cgcctccagccaagccagttctgtgaacagcttttggtgttgaggaggaagattcccaggccaccaacagtaatgtcatcccttggtttgccaggggagctttttttttttttttttttgagatggagtcttgctcttgttgcccaggctggagtgcaatggcacaatctaggctcaccgcaacctccgcctcccgggttc

SEQ ID NO: 432333 - DNA, 201 bp, Homo sapiens
ccctcttggtgcctgtaccttaaggagagaagaagagggctgatagctgaaggcaggcaagccacgaacttagctttgttttgaaaattaccctctgggcygggcacggtggctcacgcctgtaatcccagcgctttggtaggttgaggagggtggatcacccgaggttaggagttcgagaccagcctggtcaacatggtg

SEQ ID NO: 432334 - DNA, 201 bp, Homo sapiens
tccatgttggtcaggctggtctcgaactcctgacctcaggtgatcctcccgccttggcctcccaaagtgctgggattacaggcatgagccaccacacccgrcctttttttttttgagatggagtctcactttgttgcccaagctggagtccagagtggcatgatctctgctcactgcaacctccgcttcccagattcaagc

SEQ ID NO: 432335 - DNA, 201 bp, Homo sapiens
tatttcctctgttttacggctgaggacgcgcaggaaggtttacagctagaaagggctggagattgtggattcaaactcaggatcagaccaaagccactgcsctttagaactttgcgggccgattgattcttgaatctagcttctgccacttcagttgtgtgaccttggggtatctttccgatcccaagtttgctcatctga

SEQ ID NO: 432336 - DNA, 201 bp, Homo sapiens
atacattgttggtggaagtaaaatggtgtaggcacttaacagattggtagaatctactaaagctgaacatctaaattaacatctaagttagtttatctaayttatctcatctgcaagaggtagatgatacacctaacctaggatccagcaactccactcttaggtatatatccaatggaaatgcacacatatgttcaccaa

SEQ ID NO: 432337 - DNA, 201 bp, Homo sapiens
cacatctctatatctctctatatttctctagaatcacaaggtcctctgaggaggatccagtcaattccaccactcctgggtgaaatccgcaagacacatcrtcaaatgacacgatccctgtaacggaatgcttctattcaattggttggataaaaattaaaatgataatactttttaaaataaagaaaatattcttcagag

SEQ ID NO: 432338 - DNA, 201 bp, Homo sapiens
gaggccgaggtgggcggatcacgaggtcaggacatcgagaccatcctggctaacatgttgaaaccccgtctctactaaaaatacaaaaaactagccgggcrtggtggcgggcacctgtagtcccagctactcgggaggctgaggcaggagaacggcgtgaacccgggaggcggagcttacagtgagctgagatcccgccac

SEQ ID NO: 432339 - DNA, 201 bp, Homo sapiens
agagatggaaagttattctactggatataccatgaattactcagagaagccatcctcacccacagagaccagaaggctgtagttctgtagtatcacatctytatatctctctatatttctctagaatcacaaggtcctctgaggaggatccagtcaattccaccactcctgggtgaaatccgcaagacacatcatcaaatg

SEQ ID NO: 432340 - DNA, 201 bp, Homo sapiens
atgaattactcagagaagccatcctcacccacagagaccagaaggctgtagttctgtagtatcacatctctatatctctctatatttctctagaatcacamggtcctctgaggaggatccagtcaattccaccactcctgggtgaaatccgcaagacacatcatcaaatgacacgatccctgtaacggaatgcttctattc

SEQ ID NO: 432341 - DNA, 201 bp, Homo sapiens
cctgaggtcaaaatattgaagcacttcagagatggaaagttattctactggatataccatgaattactcagagaagccatcctcacccacagagaccagawggctgtagttctgtagtatcacatctctatatctctctatatttctctagaatcacaaggtcctctgaggaggatccagtcaattccaccactcctgggt

SEQ ID NO: 432342 - DNA, 201 bp, Homo sapiens
tggatactcaagcacctgagaccttgaagtgttcacttcaaccaggataatcacagatgagcatgaaaacagctagctgccactgcatgccaaggaatgcyggagcccccttccttaatgccaactggatttcccccgccttgcaccccaaccagcctaggtaatcaaatctcacatctccctgtgggtccataaagagtg

SEQ ID NO: 432343 - DNA, 201 bp, Homo sapiens
actcaagcacctgagaccttgaagtgttcacttcaaccaggataatcacagatgagcatgaaaacagctagctgccactgcatgccaaggaatgccggagmccccttccttaatgccaactggatttcccccgccttgcaccccaaccagcctaggtaatcaaatctcacatctccctgtgggtccataaagagtgccaac

SEQ ID NO: 432344 - DNA, 201 bp, Homo sapiens
ccactgaagccctgctgggccctactctcccacacatggagggcaaggttgtttaagccataatctcctgcaacaagagaaaaatgatgggaaaaggagaraagttgcctgagctattaaagacaccatcctctacccctacccagactatcctgagaggttgtttaggacagaagagctcagagctcccaatcctcaccc

SEQ ID NO: 432345 - DNA, 201 bp, Homo sapiens
cgacactgcttctcttgcactgatggctacgtcctggtctatagcacagatagcagagagtcttttcagcgtgtggagctgctcaagaaggagattgacamatccaaggacaagaaggaggtgtgtggcataggcttctggtgggagcctcagtggtcagagagtttgggcggagggctggtttgggaagcctggcatggc

SEQ ID NO: 432346 - DNA, 201 bp, Homo sapiens
tcagtggctcacccctgtaatcccagcactttgggaggccaaggcgggtcgattacttgaggtcaggagttcacgaccagcctggccaacattgtgaaacsccatctctgccaaaaatacaaaagttagccgggcgtagtggcacatgcctgtaatcccagctacccggggaggctgaggcaggagaattgcttgaactca

SEQ ID NO: 432347 - DNA, 201 bp, Homo sapiens
acccaaacgactatttgtggagctgaattaaattggagctttctggggttaaattggaggagtatgaggagtagctttacaatgtaaagctaagagtaaamtaagaagagggcaaaggaattttaaaaggatttacctgtttgttccaggaaaacagcatgtgccaatgctcatactctgcctatcccagtgtggagggag

SEQ ID NO: 432348 - DNA, 201 bp, Homo sapiens
tccgaccttggagtgtgtccacagcttcttcccgggaaagtcaagagacactttgagctcagttcccccagctttcatcgttctctggaagccctgcccartcaagccaggggaacgcagggcgtcttcaccctgcgcctttcatccactccggatctccaaacaccaactggttcatcaccctaatgacgctgacccttt

SEQ ID NO: 432349 - DNA, 201 bp, Homo sapiens
aggagctgacaggtcctctttcggggctcaggagggtgggcacacacccagcggcctgcagagtaagcttattacccacaactgtgcccgctttgtgcttytaaggtgcacacctagcctaggtgagacactgcagccaggcaaccaccgacacacgccccttctcaaagccagaggtgagtggggcaggtgcccggggct

SEQ ID NO: 432350 - DNA, 201 bp, Homo sapiens
ggaaagctgacacatggcgccccagaccctgccctggagtttataaggaagctcgcggggtgaggtccttgctcttgtgtccccagtactcccacctcttmtataaactctctactcatcacgcttgccttgccgaatgcggtctggattgagaattcataggggacaagggcacagtttaactgtctttgttgttattcc

SEQ ID NO: 432351 - DNA, 201 bp, Homo sapiens
ccctcctggagccctttgtctacttggccagcaagatgacgcaaccccagagcaagtctgccttccccctcagccggaagaacaagggcagcggctccttrgatggctgaagagctgccgttcctctttcacgatcccagccccatttcagtgtctggggctctggtagatgtgttgagggcaaagtagaggacaagctgt

SEQ ID NO: 432352 - DNA, 201 bp, Homo sapiens
ccgcggcagccgccatcttaccgccgggaccagagagctgggtgggaggccggcggtgaagagcacttccggttggagcatagagcagctccgcggcgcckcgcccagaagggctccctcgggctcgtctaccagagagaggctccgcttggggccagagcggcctcccgcccccggatgtccacggtggtctccgcgccg

SEQ ID NO: 432353 - DNA, 201 bp, Homo sapiens
ttatggtgtcctttattgtggggctcgctatatggagagggggtctgtgtcaggagcttcccctggagaggtttctgttagggaccgtctttgggagtgayctatctctgctctctgggggggatctttgtctggagcttttggggggcttgtgtttggaagtttgccttcggggagatatctgtctgggacctcttaggg

SEQ ID NO: 432354 - DNA, 201 bp, Homo sapiens
tgttgccagaatctagagcgttctcgaaaaccactcactcagcagctcccttggctagtccgactggcaatctcgaaccactgcggctgcttcggagtgcyaacagcgcccaagcagttgccctcttccttggtgcttaacttaagaaagaacagtgctgggaaggataaagatcacccaggaaggacaggggaagaggag

SEQ ID NO: 432355 - DNA, 201 bp, Homo sapiens
ctcctttgtggtccttgttgttttgcctggcatgggtgacacttagccattttaacttagcaaactgtcataccaaaggaaatgcctaattctgtgatatyaggcatctgactgcaggctacagtttgttggtgttgaagtaagctgtatgttaagaaaagtatctccattttatttgttatagcaaataacgcatgtcca

SEQ ID NO: 432356 - DNA, 201 bp, Homo sapiens
ctcattatagtgttttcactgctaagcagctgaaactctggtagagtaatctcagtgttacgtgacttttaacttttaatgattttttcttataaaggacrgcctccaggaccctgtcttcattgatacatgaggatgagagggagcgagggcagagcctttttttcttgacaggcatatcatgatttaaagactctggtg

SEQ ID NO: 432357 - DNA, 201 bp, Homo sapiens
tgtgcatgtaattgttttcagagttgcacgctaggcttatgggaataccattcttccaaggaagaaggggtttttgtttttgtttttgggaagaatctccygtcacccaggctagagtgcagtgatgcggtctcggctcactgcaacctccacctcctgggttcaagcaattctcttgcctcagcttccccagtagctggg

SEQ ID NO: 432358 - DNA, 201 bp, Homo sapiens
ttttttttgagacagaggctgcactgcactgtggtgcagtggtgtgaccacagctcaagcaatcctcccacctcagcctcccaagtagctgggaccacagktgtacaccaccacactcagctaatttttatattttttataaagacagggtctcactatgttgccagggctggtctcaaattgtgctcacacgatcctccc

SEQ ID NO: 432359 - DNA, 201 bp, Homo sapiens
caaaaacaaggggccgggcgctgtggcacatgcctgtaatcccaacactttgggaggccgaggcaggctgatcacaaggtcaggatattgagaccatcctrgctaacatggtgaaaccctgtctcaactaaaaattcaaacaaacaaaaaaaaattagccgggcatggtggcaggcatctgtaatcccagctactctgaag

SEQ ID NO: 432360 - DNA, 201 bp, Homo sapiens
ttctgagacggagtcttgctctgtcaccgaggctggagtgcagtagcgcaatctcagctcactgcaacgcctcccgggctcaagcaattctcctttctcakccttctgagtagctgggattacaggcgcacgccaccaggcctggctaattttcttgtatttttagtagagacagggtttcaccgtgttggtcaggctggt

SEQ ID NO: 432361 - DNA, 201 bp, Homo sapiens
ctatgtggctgagggcttctagtttttaaacacagggaatggggttaactgggataggaggtgccttttgaggctcaccacaaggttgtgtctgctttgtycctagctgaaccagaagaatatgacactgagcaatcggtgccaggtgtttgatcgtttccaggacaccgtttcgcagcatgtcgtcaaagtggacttcct

SEQ ID NO: 432362 - DNA, 201 bp, Homo sapiens
ttctgctgattctcagctttagagggaaactctacagtgaactttttcaattagcagtcatcaattactggtcagaatacattataattgtgaaaattatrctccattaatctcattaaatgtgcctaaacctgtaacttgtcatagttcgatacataggttggctatatttaactttccctgatcttatttgccattttt

SEQ ID NO: 432363 - DNA, 201 bp, Homo sapiens
ttcaccgtgttggtcaggctggtctcgaactcctgacctcatgatccacccgcctcggcctcccaaagagctgggattacaggtgtgagccaccacacccrgccatggagggagatatgtttttaagtgtcccttggtgaatctgacttcatcataattatcatgccatgagttgagctttctgaaaggtctctggactga

SEQ ID NO: 432364 - DNA, 201 bp, Homo sapiens
gggctctgctgggtggtttttctgtttcacatgatgttggctgggactgcagtcatttggaggcttcactgaactggtaagtccaagatgactcactcacrtagcagtagttgctgctgcgtgttggcttggagttcagctgaagctggttttttgttttctcaagatggagtttcactctgttgcccaggctagagtgca

SEQ ID NO: 432365 - DNA, 201 bp, Homo sapiens
tgatttggaataattttatgctctttctggcaaataagattctaaaagcacttatatccctgtgaatacttcagaggactttggcctttgtattgtttgtsttactctcatttccgtaatagaagaggaagcacatgttaacttgtcccgtttataaatgggactgcttaggctctgaaagcttcagtgatttccttaaaa

SEQ ID NO: 432366 - DNA, 201 bp, Homo sapiens
ggactgcttaggctctgaaagcttcagtgatttccttaaaatgacctactgagtcagtggcaggattggaaccacagcccaggtctcctgactccatcccrtaccttccaggcctaggcctctgcctgttttgttctgtcaccttaaaagaaggcagggtgctctctggaattactatgatcagcctgaggttctgcgtga

SEQ ID NO: 432367 - DNA, 201 bp, Homo sapiens
tctctaaggtgtgggaagggatggtcactccttaggttattatgagtgatgctgacttaggcattttggaggagacaaccctagcagtcctgcaggactgrccacaataggagtttaggaacatgcaaacctagctaggcttttcctactgcctcaaagggctagttatttagtcttgcccttgtctgttccccacagtaa

SEQ ID NO: 432368 - DNA, 201 bp, Homo sapiens
aagatggaacggtgggaccatgtgacagggctttgaacagcagttagaaaagcttggctctacactaacaggctttaagaaaacagtgtggaggacctctsagttattttattatacctttccctacaaacccagtgttaatagctctggatttggcttctctctctaaggtgtgggaagggatggtcactccttaggtta

SEQ ID NO: 432369 - DNA, 201 bp, Homo sapiens
gggctacaatgaaaatttccctcccacccgtctgccatttgcctactttccaccttcctgctcttcacaggtaaccactggttgattcttgtttattcttctcaaatttctttgtgcatgtaaaagcaaatacagatatatgctgattaattttcccttaagtaacatgctagttaaaccattctacacgttgcttttttt

SEQ ID NO: 432370 - DNA, 201 bp, Homo sapiens
tttcttgacaggcatatcatgatttaaagactctggtgtgcatgtaattgttttcagagttgcacgctaggcttatgggaataccattcttccaaggaagraggggtttttgtttttgtttttgggaagaatctcctgtcacccaggctagagtgcagtgatgcggtctcggctcactgcaacctccacctcctgggttca

SEQ ID NO: 432371 - DNA, 201 bp, Homo sapiens
tttcccagccaactctactgccatggtggacctcaccaactcacttcgagcatttatggatgtcaatggaggtgagtgaatgagctgctgctgttccaccrtttgctatgttgaaggtgctattcctatacagcattcagctcatttcagaaagggagggaagggacacctgatcccagaggcctagggggagatgggaat

SEQ ID NO: 432372 - DNA, 201 bp, Homo sapiens
agggctacaatgaaaatttccctcccacccgtctgccatttgcctactttccaccttcctgctcttcacaggtaaccactggttgattcttgtttattcttctcaaatttctttgtgcatgtaaaagcaaatacagatatatgctgattaattttcccttaagtaacatgctagttaaaccattctacacgttgctttttt

SEQ ID NO: 432373 - DNA, 201 bp, Homo sapiens
agaagtgtcacttattttgagcaaagtttttatttttaaaaccattcaggaggtcagaaggctctatagtgatctcactgattttttttttttttttttttgagatggaatcttgctctgtcgcccaagctggagtgcaatggcgcaatctcagttcactgcaatctttgcctcccaggttcaagcgattctcctgcctca

SEQ ID NO: 432374 - DNA, 201 bp, Homo sapiens
aatttgtttgctttgcgttcatttttcagtgtggtacctagtacattgatgagaaagtcatgggtactcaataaatattgactgatgtagaaggaaatgckcagccttgaggttaaggagggtaccctgatggatatttcactgtgtaccccagaaataagaagactactaaaggttcttaaaaaacaacttgggctctga

SEQ ID NO: 432375 - DNA, 201 bp, Homo sapiens
aagaagtgtcacttattttgagcaaagtttttatttttaaaaccattcaggaggtcagaaggctctatagtgatctcactgattttttttttttttttttttgagatggaatcttgctctgtcgcccaagctggagtgcaatggcgcaatctcagttcactgcaatctttgcctcccaggttcaagcgattctcctgcctc

SEQ ID NO: 432376 - DNA, 201 bp, Homo sapiens
cttgaaccctggaggcagaggttgcagtgagccaagatcgcgccactgcactccagcctgggcaactgagcaagactccgtctcaaaaaaaaaaaaaaaaaggaatgatggcctcagtcttttaaatgttttgtcttcatctgggagacaatgcttgggtttccctggactactccctaaattcatagcccctatccatac

SEQ ID NO: 432377 - DNA, 201 bp, Homo sapiens; identical to SEQ ID NO: 230064

SEQ ID NO: 432378 - DNA, 201 bp, Homo sapiens
aatgagaatgtgactcctttttctgcctgccatttccagatatcaaaatccttatcctttaagcctaaggttattcctaaacctaagtctcagcaaataaraacaaagatgaggttttagcacattttgtgtgaggcaaaagctgaggcatacaatagacactaataaaaggaggaatccatgagttgacccatcagcagg

SEQ ID NO: 432379 - DNA, 201 bp, Homo sapiens
atctctcggtttgtggagtagtgtctactgtatatttgtactaattgcaggtttgggaacacttattagacagatgactgatactgagcaaattaagtttrtggtcagaagttatgtaggaaactcccattaccattcccaagatacttttgcccaggagggcaccccatcccagcttgtaaaattgctgggacaaaaatg

SEQ ID NO: 432380 - DNA, 201 bp, Homo sapiens
taacagaaaccagcacttctcaagtatggccacttggtggcagccacattttaaaatcaatcacactggccaggcgcggtggctcacgcctgtaatcctarcactttgggagaccaaggcaggtggattacctgaggtcaggagtttgagaccagcctgaccaacgtggtgaaaccccgtctctgctaaaaatataaaaca

SEQ ID NO: 432381 - DNA, 201 bp, Homo sapiens
gtggacctcaccaactcacttcgagcatttatggatgtcaatggaggtgagtgaatgagctgctgctgttccaccgtttgctatgttgaaggtgctattcytatacagcattcagctcatttcagaaagggagggaagggacacctgatcccagaggcctagggggagatgggaatgaggagtatccttttggatgggggg

SEQ ID NO: 432382 - DNA, 201 bp, Homo sapiens
tagcccttatatattaatgcagcacaagctcctggaaatgcattcaagttttaaggtccagcgttttaagtcaccagaacaggaaaaaaaaaaaaaaaaaagtctgttttcccccctccactgggctcctcctttgacttagaggccccagggagtacaacatggccagctgcattgccattcaatgagtgacacttagaa

SEQ ID NO: 432383 - DNA, 201 bp, Homo sapiens
agtaacttagaaaacataagtaatttcatgtgtgatttaacccacaaaacagttgcctgccccattgcattacctcccctcatagctttgaaggattacastcacttcctagaagcccattccttagtgttccccagttctttaaagctttattgagtacttactacatgccaggcattgtacagggtgtggaggtacaaa

SEQ ID NO: 432384 - DNA, 201 bp, Homo sapiens
gtgagggccggagatgcggtgggagggagctttcccaacctgaggcctctcccaggcagtaggtttttgttcagtgccctgaggggagggaagagggattrggggtcctctctttttcttccctccctgtcattcctggaggaggagagtcttgatgtgaaatagcatcctacctgggaagctacctgcttcccaggagca

SEQ ID NO: 432385 - DNA, 201 bp, Homo sapiens
ggctacaatgaaaatttccctcccacccgtctgccatttgcctactttccaccttcctgctcttcacaggtaaccactggttgattcttgtttattcttctcaaatttctttgtgcatgtaaaagcaaatacagatatatgctgattaattttcccttaagtaacatgctagttaaaccattctacacgttgctttttttt

SEQ ID NO: 432386 - DNA, 201 bp, Homo sapiens; identical to SEQ ID NO: 230066

SEQ ID NO: 432387 - DNA, 201 bp, Homo sapiens
gtcttagtttgcacacaaacaccaatggatgaacagtccctagcttcctgcggctgcgccttgacccctacaagctttctcaagcgcctgcgcgagacctmaggtcccgcccttttgtctcagtgcgctggcgcagggcagaaaggtggggcttcggtcctccagacgaatgccagcgcggctgcgcgctggggggtactc

SEQ ID NO: 432388 - DNA, 201 bp, Homo sapiens
acttgttggacagatcggccagcaaaactgaactaaaggccattgcccatgcccggatcctggaaaggagagccagcaggcctggcacacccacatccagygccagcacagagactcccacctctgagcagaatgatgtcgacgaagacatcattgacgtggatgaggaaccagtagcagcggagccagactatgtgcagc

SEQ ID NO: 432389 - DNA, 201 bp, Homo sapiens
taaccacagctgtagttaaatttctccataaaccaggctgtcttccagcctctccaccttccaagatcctttcctgtgcatccctaattaggttagagcarggcctgttagaggcacctgccagccaggagccctctcaaacttgccactcaaaaaagctggacctgaaaaggtttaggggagctgaaggaaaaggggtaa

SEQ ID NO: 432390 - DNA, 201 bp, Homo sapiens
gcctcagagagcaattcatgcttaggccatgacacatgcttaagatctgtttttgtcacttaatgttgtttccatattgcaggctaggaactctgaagccwgggatagctcagcaccatcattttcttttctaggttctagcaagaggagaagaaaggaggaaaccacagggaaaaatgttaagaagacacagcatgaatt

SEQ ID NO: 432391 - DNA, 201 bp, Homo sapiens
aagaagaagcttgaaggtgagtcacaatcaggtgcaggcaagatggtagtctgcctgccatcatgggttagacagaggatcactgtcccaattttacaggsagggaaactgaagccccagaaataggtttgtggtgtctcgtgagtaatgagtgtgaccttcattttaatacttggggatgatggtcaggattatgagggc

SEQ ID NO: 432392 - DNA, 201 bp, Homo sapiens
ggagctgagagctggaaagccgtacgctttttcccccttactggacatgagaggaggggagagaccgaaccgagagggagggacctgagttgatcgcccgmtgcgtgatcctcctcagcggctcagcccaggacaatccggcaaagaagagtttaaactccatcttctgccggccgaaatcacctctgccctccacaaaaa

SEQ ID NO: 432393 - DNA, 201 bp, Homo sapiens
agaaaggcatttttaaggagctgagagctggaaagccgtacgctttttcccccttactggacatgagaggaggggagagaccgaaccgagagggagggacmtgagttgatcgcccgctgcgtgatcctcctcagcggctcagcccaggacaatccggcaaagaagagtttaaactccatcttctgccggccgaaatcacct

SEQ ID NO: 432394 - DNA, 201 bp, Homo sapiens
tcaggagtcaagcacaccctttgtgagcattcatgatgggacctcggaaactgcttgtcagctctgctgcagccctggccactgtggcaggaaggaccggygcctctcaggcttctcacccccctctcctctccttccattgcagtggctctgtagtgttgttgcgctccagtgcagcatattgaaacatttatctgctaa

SEQ ID NO: 432395 - DNA, 201 bp, Homo sapiens
gtctcctttcttggaaggcacccaacccagctctgagtcagaccggctttcaatcctggcttccccatgcactggctgtgtgtcattggccaagtcccccsacttctctaagccttagactcctcacctctaaaatgaagctggtcatgtccgtctcctggggctgtggagaggatgcagggagatgaggaagcgaaagcc

SEQ ID NO: 432396 - DNA, 201 bp, Homo sapiens
cactatgttggccgggcaggtcttgaactcctgggctcaagcgatcctcctgccttggcctctcaaagtgctgggattacaggtgtgagccaccgttcccrtcctggaggtggttttgagggaaccaaaccaagggtctcctttcttggaaggcacccaacccagctctgagtcagaccggctttcaatcctggcttcccc

SEQ ID NO: 432397 - DNA, 201 bp, Homo sapiens
tcttagggctcccagagtggggggttttagccctcaccttatgggcagagaagcagggacttgcccagggcacactgccagtgaaggtgcagctgggattsagatccacgtctgactcccaaagtggggcaatcgaggtggtttttttggtttggtttttgtcttttgaaacagggtctgggtctgtcgtcacccaggctg

SEQ ID NO: 432398 - DNA, 201 bp, Homo sapiens
ctggggctgtcctggaaactagacattcacatcacaggagcccagttctgctgttggtttgttgaatatatgtccacgacgccacaggcactgcagacatragaatctgcccctagggaatgcccagattggtgtggtggaaacagacacagttgtggactccggaacaattgtgagactgggcagcatcggggagcatgg

SEQ ID NO: 432399 - DNA, 201 bp, Homo sapiens
gcctacacatgtgcacatacagcctgtacatgcacacacacacacataccacaccacataagaggacacacacagcctacacaggcatacacacacaccayatacacactacacaccgggacacacacacaaaaggcctatgcatgtgcacacacatacacacggacacatacatgcacacacacgggcctgcagctctga

SEQ ID NO: 432400 - DNA, 201 bp, Homo sapiens
ttcttggaaggcacccaacccagctctgagtcagaccggctttcaatcctggcttccccatgcactggctgtgtgtcattggccaagtccccccacttctstaagccttagactcctcacctctaaaatgaagctggtcatgtccgtctcctggggctgtggagaggatgcagggagatgaggaagcgaaagcccctccag

SEQ ID NO: 432401 - DNA, 201 bp, Homo sapiens
aattgtgagactgggcagcatcggggagcatggtggaggttggggggtgctgggctcggaggcaatgcccaactcagccagcagaagcccgcctgtctacrgaggggctgctgttccaatcaagcatccacaggcaaagggaagtttgccagacagtaaggatggggaagggcataccaggtagagtgacctggatcagcc

SEQ ID NO: 432402 - DNA, 201 bp, Homo sapiens
gggatggatggaaggcttgcaaggagagaagctgccatgagacctgaattaggtaatgggtagtggacagaaggggcacaactgcccatgcctgggagggracaaaggggtgttgactcctgtgaacccacttcccaagctctatatcagagctcctgggctgcataggagtggccaggctaacaacctgaccccttccct

SEQ ID NO: 432403 - DNA, 201 bp, Homo sapiens
acccgagtcttccctactcacccctcctctttctctttctttctaggagcggaaggggcagaaggtgagactttcctcggagagggaggaggggagggggwggtgacttggatcggattcccctggggtttaaccagtgcctggccttcagctgggctgccttccaactagattctcttagggctcccagagtggggggtt

SEQ ID NO: 432404 - DNA, 201 bp, Homo sapiens
cagttgtggactccggaacaattgtgagactgggcagcatcggggagcatggtggaggttggggggtgctgggctcggaggcaatgcccaactcagccagsagaagcccgcctgtctacggaggggctgctgttccaatcaagcatccacaggcaaagggaagtttgccagacagtaaggatggggaagggcataccaggt

SEQ ID NO: 432405 - DNA, 201 bp, Homo sapiens
atccggcccatctgcctccctgcagccaacgcctccttccccaacggcctccactgcactgtcactggctggggtcatgtggccccctcaggtgaggtggracgctgggtgcctagaggtgtggaggggcacctgacttggggaggggcccagggtaagcctcttttacccccacagtgagcctcctgacgcccaagccac

SEQ ID NO: 432406 - DNA, 201 bp, Homo sapiens
tgttgactcctgtgaacccacttcccaagctctatatcagagctcctgggctgcataggagtggccaggctaacaacctgaccccttcccttcctccctgrgcagctccctgcggtgtggccccccaagcacgcatcacaggtggcagcagtgcagtcgccggtcagtggccctggcaggtcagcatcacctatgaaggcg

SEQ ID NO: 432407 - DNA, 201 bp, Homo sapiens
gttcccggctccccgcaccatcatggctttgcctctgaggcccctgacccggggcttggccagcgctgccaaaggaggccacggaggagcaggaggtgagyggggaacgggcggatccgggggctcccctaccctgcccacctgttcacaggcccgccgccccaggaccgccgcgctcaccccgctccgtccgcagctcgt

SEQ ID NO: 432408 - DNA, 201 bp, Homo sapiens
tcatggctttgcctctgaggcccctgacccggggcttggccagcgctgccaaaggaggccacggaggagcaggaggtgagtggggaacgggcggatccggrggctcccctaccctgcccacctgttcacaggcccgccgccccaggaccgccgcgctcaccccgctccgtccgcagctcgtacctggcgtctgctgacctt

SEQ ID NO: 432409 - DNA, 201 bp, Homo sapiens
caccgagggaatccgttctcagactgaggcgcctcccacacccagcaacccctatttctccctgtctaggtctctgcatccacgcagctgcctctgccatytctggccagatgactttccctttctgactcaaccacagcacagaacagatcattcatgttgacgcttaattagaacaagccacctggggtcccaccctac

SEQ ID NO: 432410 - DNA, 201 bp, Homo sapiens
gaacagatcattcatgttgacgcttaattagaacaagccacctggggtcccaccctacaacagtggaagcagcaccacactggcctggcctgggagtcagragacctgaattctaggcccatcttgccatgaatgcccggggtgaccttgagcaagtcactgcccctctctgagccttagttttctcaataataacaatga

SEQ ID NO: 432411 - DNA, 201 bp, Homo sapiens
ccatcatgtcagcatttcccaaagtatgttccaaagaacactattccgagcagacttgcctgcctgaaaaaacgttctcaccagcaaacacaactgggaavcagcacagcctggattcccctgcatgggaatgtgtaacggactcaaataagtcctgcagtcatctctttccatttgtttttctcaaacttttcagtctca

SEQ ID NO: 432412 - DNA, 201 bp, Homo sapiens
aattctaggcccatcttgccatgaatgcccggggtgaccttgagcaagtcactgcccctctctgagccttagttttctcaataataacaatgacaatgacrgtgacaaaatagagcatcaatagtaagtgtcaatagttcttaccctgtggcaagcacctgctgtaggccaagtgctggcacctgctttaaaagctaatcc

SEQ ID NO: 432413 - DNA, 201 bp, Homo sapiens
ataagtcctgcagtcatctctttccatttgtttttctcaaacttttcagtctcagaatcctttttcaagtcataccccacaggtaccatcctgtgtccccrccaccaaactgaccaggcccttccggaccgcatcaatcccccaagaccactcacctgccagtgctgaggtccaggctgctgccatatggagaagtgcgga

SEQ ID NO: 432414 - DNA, 201 bp, Homo sapiens
agccccaggaccgccccccaccgagggaatccgttctcagactgaggcgcctcccacacccagcaacccctatttctccctgtctaggtctctgcatccaygcagctgcctctgccatctctggccagatgactttccctttctgactcaaccacagcacagaacagatcattcatgttgacgcttaattagaacaagcca

SEQ ID NO: 432415 - DNA, 201 bp, Homo sapiens; identical to SEQ ID NO: 291900

SEQ ID NO: 432416 - DNA, 201 bp, Homo sapiens; identical to SEQ ID NO: 291916

SEQ ID NO: 432417 - DNA, 201 bp, Homo sapiens; identical to SEQ ID NO: 291917

SEQ ID NO: 432418 - DNA, 201 bp, Homo sapiens; identical to SEQ ID NO: 291918

SEQ ID NO: 432419 - DNA, 201 bp, Homo sapiens; identical to SEQ ID NO: 291919

SEQ ID NO: 432420 - DNA, 201 bp, Homo sapiens
tgatctcagctcactgcaacctctgcctcctgggttcaagggattctcgtgcctcagcctcccgagtagctgggactacaggcatatgacacaacatccgyctaattttttgtgtttttgtgtttttagtagagatggggttcccccatgttggtcaggctggtcttgaactcctggcctcaagcaatcctcctgcctcag

SEQ ID NO: 432421 - DNA, 201 bp, Homo sapiens
aggagctggatcttctgtttttccattccccaagttccttggcagccccaaatgggcagtggtggggctgtgggcctcattccagacaaggcagtgactcrggcacccacagaccaagcaagtgccctgttcctccttctctgctctcccccacctccttccagaaacccattctggaacactaagttctgtacaaggctg

SEQ ID NO: 432422 - DNA, 201 bp, Homo sapiens
tttaggtttgtatttatgtgccgccacttttgtaaggcctgggagatcccagggtcctccaccctccccctgaccacatacaaaggcactctagttcaagrgtgaaaagtctcacccaggaggaacagccctccttgaagcaatggcagggccagcagggaggtgggcatggcagggaatggagagagtgagccagacaga

SEQ ID NO: 432423 - DNA, 201 bp, Homo sapiens
aaaaatggagtgaacacttccagtttttaaaaggaggtgataccctctagctttctggtgtacactggctgcgccttccttcctgggagctttcacagccggcagctaggcatcctgagaacaagaccaccgacctcaccagtcatcagtgttcctctacctgttctgtcattgatcttccttcatctagcagactgtcat

SEQ ID NO: 432424 - DNA, 201 bp, Homo sapiens
tcaacagagagcccgtcaggtgctctaagagagtagggcagacctttggtgattgaccccaaagtttcagtggtttggtttgggattaagattcaaactcrggctctaccccttagtagctgggtgaccttgggaacatttgcttgtactctgagcctcagtttcctcttctgtaaaagggggctgaaataatacctatct

SEQ ID NO: 432425 - DNA, 201 bp, Homo sapiens
acttagccgggaggggctgggtttcaggttcaccttgactccaggagctgcagcagagcaggtaacagctcttgcacctgtttctcttgcacctgacgtgyagctgctcctacccacctctcctggctgagccttgcctgatacagcagcccggaggcaccacttgcttcccgagtctcaccctcccaggcagctcctaca

SEQ ID NO: 432426 - DNA, 201 bp, Homo sapiens
acttgagcccagctaaagggacagagctggcaatgtgggagctgcttcccagacagagaggtgggaaggaatccaccggctgtgtgctctgagggaggggktggggagcaggagaccagagcacgaggggtatggatgcaggcattcagctcatcgtaaagtctaggcctgcgtcgtgctctcctctttcctaaatttgat

SEQ ID NO: 432427 - DNA, 201 bp, Homo sapiens
tcagccctctgtggtgaggcacaggcaggcggttgtagatatcttgttctttgcaactttgagaaactgggaagtttggatatcacatcaccttttttgtytgcttgtttttaaagcaaatcagattttacactatcttttatgatgactatttacagatcctacagctgggttattttgtaaaacaaagaatagtcggct

SEQ ID NO: 432428 - DNA, 201 bp, Homo sapiens
ctcttgcacctgtttctcttgcacctgacgtgcagctgctcctacccacctctcctggctgagccttgcctgatacagcagcccggaggcaccacttgctkcccgagtctcaccctcccaggcagctcctacactcaactgcttctctaggaaaggtctcacctccagcctggagcagtcgggattacaggtacaggcaga

SEQ ID NO: 432429 - DNA, 201 bp, Homo sapiens
gctcccccacccctaaaataatctatactcatcatggaaattccagaaatcagaaaactagagaagagaaagcatcctctactcctacataaagaaaggcmctattgggctgggcacagtggctcatgcctgtaatcccagcactttgggaggccgaggtgggtggatcacctgaggtcaggagttcgagaccagcctgac

SEQ ID NO: 432430 - DNA, 201 bp, Homo sapiens
aaaggcactctagttcaagagtgaaaagtctcacccaggaggaacagccctccttgaagcaatggcagggccagcagggaggtgggcatggcagggaatggagagagtgagccagacagacttcacctccttactggacacagggtcaagggcgagtttcaattgctgctccctttactttctctacctgtgactactccc

SEQ ID NO: 432431 - DNA, 201 bp, Homo sapiens
atttaagacatatcagctccagagatgagtcctggagccttgaattttgtttaacaaaataattgtaggtttctctctgtaataacaacgctggaaaggcmgagaacctcttttatgctcatgtcttgcatttattgagatgactgtttctcatgcctttatgttccttcatgtaagtaaagtggacctttgtgctcaaac

SEQ ID NO: 432432 - DNA, 201 bp, Homo sapiens
gtggcatgatctcagctcactgcaacctctgcctcccgggttcaagtggttttcctgcctcagccacccgagtagctgggattacaggtgcgtgccactaygcccagctaatttttgtatttttagtagagccgggatttcaccatgttggccaggcctgtcttgaactcctggccttaggtgatccacctgccttggcct

SEQ ID NO: 432433 - DNA, 201 bp, Homo sapiens
atacctgttaaaacaggtgaattttaatggcacaggcagaagcccttttctctctggagctagaaaatctggtggttatgatagtctcaggagctggatcytctgtttttccattccccaagttccttggcagccccaaatgggcagtggtggggctgtgggcctcattccagacaaggcagtgactcgggcacccacaga

SEQ ID NO: 432434 - DNA, 201 bp, Homo sapiens
gctcactgcaacctctgcctcctgggttcaagggattctcgtgcctcagcctcccgagtagctgggactacaggcatatgacacaacatccgcctaatttkttgtgtttttgtgtttttagtagagatggggttcccccatgttggtcaggctggtcttgaactcctggcctcaagcaatcctcctgcctcagcctcccaa

SEQ ID NO: 432435 - DNA, 201 bp, Homo sapiens
caggcttgctaatggggcaaacacctgcttactggtccccacatgtcctcctgggcagaagagacaggaaggcctggcaaaaagggtattctctttttttkttgttgttgttttttgagaaaagagtctcactgtgtcgcccaggctggaatgcagtggcatgatctcagctcactgcaacctctgcctcctgggttcaag

SEQ ID NO: 432436 - DNA, 201 bp, Homo sapiens
tttaaagcaaatcagattttacactatcttttatgatgactatttacagatcctacagctgggttattttgtaaaacaaagaatagtcggctaatttttcyattttgcaaactcagatttccataagtcaggcttgctaatggggcaaacacctgcttactggtccccacatgtcctcctgggcagaagagacaggaaggc

SEQ ID NO: 432437 - DNA, 201 bp, Homo sapiens
gctaggatgcaagggcaccagagttgatgccttggtggaggccccagggcagggcacaagggctgttcccatctctacagtttgctgagaagttcctcgtsatctgtggctccctttatgccaaggagagttaagccccaggtttgccaacttgaaatacctgttaaaacaggtgaattttaatggcacaggcagaagccc

SEQ ID NO: 432438 - DNA, 201 bp, Homo sapiens
tcccccaacccctttcagccctctgtggtgaggcacaggcaggcggttgtagatatcttgttctttgcaactttgagaaactgggaagtttggatatcacrtcaccttttttgtttgcttgtttttaaagcaaatcagattttacactatcttttatgatgactatttacagatcctacagctgggttattttgtaaaaca

SEQ ID NO: 432439 - DNA, 201 bp, Homo sapiens
caaaggcactctagttcaagagtgaaaagtctcacccaggaggaacagccctccttgaagcaatggcagggccagcagggaggtgggcatggcagggaatggagagagtgagccagacagacttcacctccttactggacacagggtcaagggcgagtttcaattgctgctccctttactttctctacctgtgactactcc

SEQ ID NO: 432440 - DNA, 201 bp, Homo sapiens
atcatccctggattgcaaggccccagggcaagggcccagcccttagctcggccagctcaggaacctgcacgagctaactgcagggcccaccatgtgtcacyaaatgctgggtctgtttgaagtcccaagcacctgcccccactcccccaacccctttcagccctctgtggtgaggcacaggcaggcggttgtagatatctt

SEQ ID NO: 432441 - DNA, 201 bp, Homo sapiens
tgtatttatgtgccgccacttttgtaaggcctgggagatcccagggtcctccaccctccccctgaccacatacaaaggcactctagttcaagagtgaaaartctcacccaggaggaacagccctccttgaagcaatggcagggccagcagggaggtgggcatggcagggaatggagagagtgagccagacagacttcacct

SEQ ID NO: 432442 - DNA, 201 bp, Homo sapiens
aaggcactctagttcaagagtgaaaagtctcacccaggaggaacagccctccttgaagcaatggcagggccagcagggaggtgggcatggcagggaatggagagagtgagccagacagacttcacctccttactggacacagggtcaagggcgagtttcaattgctgctccctttactttctctacctgtgactactccct

SEQ ID NO: 432443 - DNA, 201 bp, Homo sapiens
ggcactctagttcaagagtgaaaagtctcacccaggaggaacagccctccttgaagcaatggcagggccagcagggaggtgggcatggcagggaatggagagagtgagccagacagacttcacctccttactggacacagggtcaagggcgagtttcaattgctgctccctttactttctctacctgtgactactccctgg

SEQ ID NO: 432444 - DNA, 201 bp, Homo sapiens
gtcatctgcaaacagggacaatttgacttcctcttttcctaattgaatgccctttattcccttctcctgcctgattgccctggccagaacttccaacactmtgttgaataggagtggtgagagagggcatccctgtcttatgccagttttcaaagggaatgcttccagtttttgttcattcagtatgatattggctgtggg

SEQ ID NO: 432445 - DNA, 201 bp, Homo sapiens
gttttgtcagtgcctataattaacttttgttcttgtcagttgaaattctaaccagattatttaaaagaagacttgtataaaatttctacatggattatgcyatgctggattactggttttatgtatttgttatggaactgaagaattaatttgagttataaatgtctcattggatgttaagtgctatgatacagtttaaca

SEQ ID NO: 432446 - DNA, 201 bp, Homo sapiens
gttatggaactgaagaattaatttgagttataaatgtctcattggatgttaagtgctatgatacagtttaacaaggtttgtaagtcaaacacttggcacaracattaacccctaaatcattcgaacaaagttgagcatctctcatagtagcatgcatttatgtttaaatgttttctaaaggctactatttatatgtggttt

SEQ ID NO: 432447 - DNA, 201 bp, Homo sapiens
tgagcatctctcatagtagcatgcatttatgtttaaatgttttctaaaggctactatttatatgtggtttttcattcagtattaaagaacaaaagcaatakatctctgatatgtagttttagacccatttatgttattaattaatataaatttaaagccaatacatgctaggattaaagattatcatattttttacttata

SEQ ID NO: 432448 - DNA, 201 bp, Homo sapiens
tgttacaaagagcatgattcatgacttgtataatttttaaaggagaaaaaagattactgctaataattcacatttattaagtgcttaccatgcatcaagtrgccttctaaaggtttcagatctattctatgatccttaaataaccctagaagtaggttcttacataatttgtaagactgtaaaggggtcacgagaccaaaa

SEQ ID NO: 432449 - DNA, 201 bp, Homo sapiens
ggattaaagattatcatattttttacttatactaaaatataccccaaaagcatttggtttgctcgtaaagtcattatttgtacttaagaatataagtactwttttttttaagcacttctagtctttttagattaagaagacataccataacctcttgttccactcactgcttttctgtactcataatagatatgaaggtag

SEQ ID NO: 432450 - DNA, 201 bp, Homo sapiens
tgctaaggagtgtgttacaaagttatctcttgcctttctttttctttctttgtttctagtcattgtagtcacatacactgctgtggtgatggttccatttrcaaataaagtctgtttttttggtttttttttcttaaagagatgtggcctgtctatgtggaattgaccaatgaaaagatatatggctgcgatttcattgtc

SEQ ID NO: 432451 - DNA, 201 bp, Homo sapiens
gaacaaaaatactagaggaagataaagacagtgaccagaggtgtgcagaggggtagagacctaggtagatgtttgaaataaaggaaccaggcaacatttayctttgttaaagaccagctccacagttagggacattattcattcagattatgcagtgtgaagtaggagaagagctaaaagtatttcaagaggcagcaccat

SEQ ID NO: 432452 - DNA, 201 bp, Homo sapiens
acaagaaatttaaaataaattgaataactcagcccatctgcatctttgcaaacagatactacattttggcaatacctgaagaagttttgtaaaaaatgcartgagttgaaaaactaatacaaacttcatatttttttaagtttgatagctttgaaaaacttttagattataaaattaaacaagagttttgtacattttgga

SEQ ID NO: 432453 - DNA, 201 bp, Homo sapiens
acaaattcttagagttggagtttatgggtttttttttttttaacatttttaattctctagggtaaattatatcttaatgtgttataatctgaaagaggggraaaaatccgaaaataaacagatggccttgttttgagtgcaccttataggccccatttcttggcttacacaagcaataaggatactaatttatgcagttca

SEQ ID NO: 432454 - DNA, 201 bp, Homo sapiens
agatctgttgatattaaaatccactgtgactcccaaggtcagtgtttttttttttattattattatatttaagttttaggatacatgtacacaacgtgcargtttgttacatatgtatacatgtgtcatgttggtgtgctgcacccccaccccacaagagtccccggtgtgtgatgttccccttcctgtgtccatgtgttc

SEQ ID NO: 432455 - DNA, 201 bp, Homo sapiens
ggccttctaaaggtttcagatctattctatgatccttaaataaccctagaagtaggttcttacataatttgtaagactgtaaaggggtcacgagaccaaaatttgagaactgtcagggccatgcagtaagatttccatgcagtttttaaggagcagctgaggttgaatatcaatgtgtaaggctgtgtggtctttctgcag

SEQ ID NO: 432456 - DNA, 201 bp, Homo sapiens
gtacaactgtaacttaacatggttggaaacagtttggttaaaacattgtcttgatttacggtattttttactgcttaaaatccttacatagttatatcctkgcataagcgtcatcagtaatggtttataatgtacaatttatttatctaaatgttggtaagagactgacacctcccgtgacttctcaaaaatgattctttt

SEQ ID NO: 432457 - DNA, 201 bp, Homo sapiens
caagcaaatatttaagtctctaaatgctgagtctagtcctctttccactctatatagtgcagttggctaacttgtttgttttataaacacaaaatagtgtrtaaaagcaaagtatttttattatttaagattcttgaaagaaaatactttaaaaatatacatttttaatctcttggatctatacagatttctaaaatattg

SEQ ID NO: 432458 - DNA, 201 bp, Homo sapiens
acttgtttgttttataaacacaaaatagtgtataaaagcaaagtatttttattatttaagattcttgaaagaaaatactttaaaaatatacatttttaatytcttggatctatacagatttctaaaatattggaagaattcgatgttgaagaacaatcaagtaccatgttaggaaaacgctttcccaacattaaggttata

SEQ ID NO: 432459 - DNA, 201 bp, Homo sapiens
acagcatcctcaccagaagtaaactccatctcagataactacgttctttgctcatccatgagaaacaacaactcatcttttcaaattttatcatgagattrcagcaatgtagtctcatcttcaggattcatttctaattacagttcttttgttatttccaccatatctgcctttctccattgaaatcttgaatccctcaaa

SEQ ID NO: 432460 - DNA, 201 bp, Homo sapiens
atccctcaaagtcatccatgaaggttggagtaaacttctttcaagcttttgttaatgttgatattttgacttactcccttgaatcatgaatgttcttaataatctagaatggtgaattctttccggaaggttttcaatgtacttttcccagatccatcagatgcatcactatctgtggcagctatagccttatgaaatgca

SEQ ID NO: 432461 - DNA, 201 bp, Homo sapiens
tatacatttatttcagttattatctgttttctcctttctaagtgtaagttaatcctttccttttcaaacagatactgtttttcataacttcacaaaaccgyaatatctcattgtctgcttctgtagagtcattttcaaaatgaaagcagtatttcccctctgtgtgatgataatcgtcaaactgtgcatcttgctgagaac

SEQ ID NO: 432462 - DNA, 201 bp, Homo sapiens
agacttgcttgatgtgggtttgtcacaaaccttcaatttgtaaaaaacacactatctgcaaaacagtagtgaagcacaataaaatgttgtgtctgcagttytctggcacacaactcctaaaatttttggcatctccaaagtgatgtgtccttttgtatgctaacgagttgactggttagcccctaggtggcttcagaatgg

SEQ ID NO: 432463 - DNA, 201 bp, Homo sapiens
ctgtctgaaaataaagcggttgttaccaacaaatccaacttctggttttccaacttttctgcttaagtaggaagctagcacagagttgttatatatatttwaaaaaaaaactagaatatttccctgtttggtaagttatcattataatggtagactgagacatcttttactttaaaagaaattatgggctattactttgtt

SEQ ID NO: 432464 - DNA, 201 bp, Homo sapiens
ttaaagatgagcatgcaaagtgtaacaatttaatttgttcttttactttaaaatggaaaaagtcgtttcatttttcttaacacttaacgcttatgaggaaygttgtttagtttgatctaggagaagatggtggcctgaaagtggatgatcatatgcacacatcccttcctgatatctatgctgccggtgacatctgtacta

SEQ ID NO: 432465 - DNA, 201 bp, Homo sapiens
gtcataccttggagtattgcaggttcagtcccagaccatcacaggaaatgatataccacaataaagtgagccacacgaatttttcagtttcccagtgcctrcaaaagttatgtttataacatactgcagtctattaaatgtgcattagcattgtgtctaaaaatacaatgcacataacgttaatttaaagatactttattg

SEQ ID NO: 432466 - DNA, 201 bp, Homo sapiens
atagggaacggtggtattgcacttgagttagtgtaagtatatatttttaaatatgataacatttaaattgtttaaaaataatttgtttttaaattaaacamttgctttgtgattcttgtgatttgttggcagactggaaaatgttttttattctgaaaatcaaagataaatataattttcatatgttttcaaggggaaaaa

SEQ ID NO: 432467 - DNA, 201 bp, Homo sapiens
ttacactataaccagattttttaaaaagcactgcttacccctgggggccattcatataataagtgtattgtagaaattgaacattttctaatgatgtacaytgtaatgaaattttacttgatattcagtacatgtatttgtcacttaaaggttctttctgtaaactgcttcagattcttttactattcaatttttaattct

SEQ ID NO: 432468 - DNA, 201 bp, Homo sapiens
atagaagttggtttaactggtaattaggaagatagtttattctcatcctctgcattataactctaaattggtataaaaaatagttgaagtaaataaaggayatttctttatatcacttttcttgttcaggagttctttgttagtgtttactgtaaatattattttctcagtatcagagtttaatattattcaccattgccc

SEQ ID NO: 432469 - DNA, 201 bp, Homo sapiens
tcttactgccttatgttgatgtttgcacatttgatgacacacttgctgttttcagaagtatgggctagttttgctgtggaaagaccttcccctatggggakggctgcttgctagatgggatgtagcagttctggcaccagtgagggtgcccactttgtagtctgtgcagctccgtcagctgagttaattgttgttgaagat

SEQ ID NO: 432470 - DNA, 201 bp, Homo sapiens
tgtttgcacatttgatgacacacttgctgttttcagaagtatgggctagttttgctgtggaaagaccttcccctatggggagggctgcttgctagatgggwtgtagcagttctggcaccagtgagggtgcccactttgtagtctgtgcagctccgtcagctgagttaattgttgttgaagattgcagggatcctcagcatc

SEQ ID NO: 432471 - DNA, 201 bp, Homo sapiens
aatgaaattttacttgatattcagtacatgtatttgtcacttaaaggttctttctgtaaactgcttcagattcttttactattcaatttttaattcttaayatctgtaaagaacgttaatattcctctttataatcaatctttcccagttagccttaaaaatgtattccctacttttgcttcaggagatcattatttgcaa

SEQ ID NO: 432472 - DNA, 201 bp, Homo sapiens
tgcatcaagtggccttctaaaggtttcagatctattctatgatccttaaataaccctagaagtaggttcttacataatttgtaagactgtaaaggggtcaygagaccaaaatttgagaactgtcagggccatgcagtaagatttccatgcagtttttaaggagcagctgaggttgaatatcaatgtgtaaggctgtgtggt

SEQ ID NO: 432473 - DNA, 201 bp, Homo sapiens
tggcaatacctgaagaagttttgtaaaaaatgcagtgagttgaaaaactaatacaaacttcatatttttttaagtttgatagctttgaaaaacttttagaytataaaattaaacaagagttttgtacattttggaggtgctaaaaatagataaaattataaaaatttgaaggctaattttcttacccttccagttaaccgt

SEQ ID NO: 432474 - DNA, 201 bp, Homo sapiens
agataaaattataaaaatttgaaggctaattttcttacccttccagttaaccgtgtaacatccaaaacgtaagttgagtgtgtttatactcaacacacaaytgaaagattatctgttttgtaactctacatcagaaaaatattaatgactaaaatgattaatatagataacataggttagtcatgctgtaatgtatgtata

SEQ ID NO: 432475 - DNA, 201 bp, Homo sapiens
cacataacgttaatttaaagatactttattgcttaatatgctaacaatcatctgagccttcagcaaatcataatctttttttggtggaaagttttgcctcrgtattggtggctgatgactcatcagggtggtgcttgctgaaggtttgggtggctgtggcaatttcttaaaataacaagtttgccccatcaattgactctt

SEQ ID NO: 432476 - DNA, 201 bp, Homo sapiens
aagtatttttattatttaagattcttgaaagaaaatactttaaaaatatacatttttaatctcttggatctatacagatttctaaaatattggaagaattygatgttgaagaacaatcaagtaccatgttaggaaaacgctttcccaacattaaggttatagaatctggcgtaaagcaactgaagagtgaagaacacgtaa

SEQ ID NO: 432477 - DNA, 201 bp, Homo sapiens
attatttttaaagttttgtcagtgcctataattaacttttgttcttgtcagttgaaattctaaccagattatttaaaagaagacttgtataaaatttctayatggattatgctatgctggattactggttttatgtatttgttatggaactgaagaattaatttgagttataaatgtctcattggatgttaagtgctatga

SEQ ID NO: 432478 - DNA, 201 bp, Homo sapiens
acagggttgtgaacttaaatgtgccaataacaaatatacaaatatcagctattctgtgtacagcagtaggaaatggcattatctttatgatttattgagtrcctatattatatattaaccaatgtgctaggcacataagataaggagattaaaagtatagaacataacaccaaaaagtcactagtgcttatcctgagggat

SEQ ID NO: 432479 - DNA, 201 bp, Homo sapiens
agtagtgtgagctcccgagcacccgtaggtcggattatctggtaaggcaccggaagtgaccgcctcgcggctgcttcctctcctggagtccagagtcccgytgctccgccgcgatattcagtaaaccactgggagtccggcagcatggaggcagcgcgccctcccccgacggcagggaagttcgtggtggtcggcggcggc

SEQ ID NO: 432480 - DNA, 201 bp, Homo sapiens
tttccatcgttggatgcgtattttccgtttattcactaagtaaacatatatgatgcaggcaccgtattaagggctgagtgttcaactatgaacagcatggtatataccatgctggggactcacagcctgctgaaagagacaatattacaatattgtatgtctatgcaagagatatcaacggttatcttagaggtgcctgtg

SEQ ID NO: 432481 - DNA, 201 bp, Homo sapiens
ttccatcgttggatgcgtattttccgtttattcactaagtaaacatatatgatgcaggcaccgtattaagggctgagtgttcaactatgaacagcatggtatataccatgctggggactcacagcctgctgaaagagacaatattacaatattgtatgtctatgcaagagatatcaacggttatcttagaggtgcctgtgg

SEQ ID NO: 432482 - DNA, 201 bp, Homo sapiens
ccatcctggctaacatggtgaaaccctgtctctactaaaaatacaaaaaattagccgggtgtggtggcgtgcacctgttagtcccagctactcgggagactgaggcaggagaatggcgtgaacccgggaggcggagcttgcagggagcccagatcgcaccactgcactccagcctgggcgacagagcgagactccttctca

SEQ ID NO: 432483 - DNA, 201 bp, Homo sapiens
cccactttgtagtctgtgcagctccgtcagctgagttaattgttgttgaagattgcagggatcctcagcatccaactctggatgtctgcagtggtagtgarggttgttggggttttcaatgtcaatggctgctaatagcctcccaatcttttcttctcccacaaaggaagttgtggcttaggggatccctgttggcactga

SEQ ID NO: 432484 - DNA, 201 bp, Homo sapiens
tgccccatcaattgactcttcctctcgtgaaagacttctctgtagcgtgcgaagctgttttatagcattttgcccagagtagaagttctttcaaaagtcarttctctcaaactctgctactgctttaccaagtatatgtaatattttaaatccttcatcatttcagcaatactcacagcatcctcaccagaagtaaactcc

SEQ ID NO: 432485 - DNA, 201 bp, Homo sapiens
atgtctgcagtggtagtgagggttgttggggttttcaatgtcaatggctgctaatagcctcccaatcttttcttctcccacaaaggaagttgtggcttagrggatccctgttggcactgagtctgccttctgggttcagtggcagcagcgctggtgtctgataagtggtgcctatggagcagatagagctgaggcccaaaa

SEQ ID NO: 432486 - DNA, 201 bp, Homo sapiens
gccagggaaaccaagaatgggaacacatgtgtgctcagagttacagcagcttcagtgtcagggcagggcctagctttcaatggcagctgagccagtgcctrgattgcagacatgtgcagtgaggattggttgcaggccccaaagtgcaaactagcttactatggtgatggctctggtgtctgagatgtaggtgggcccagt

SEQ ID NO: 432487 - DNA, 201 bp, Homo sapiens
acatgtgtgctcagagttacagcagcttcagtgtcagggcagggcctagctttcaatggcagctgagccagtgcctagattgcagacatgtgcagtgaggmttggttgcaggccccaaagtgcaaactagcttactatggtgatggctctggtgtctgagatgtaggtgggcccagtatgggccgtagaacctgggtctga

SEQ ID NO: 432488 - DNA, 201 bp, Homo sapiens
attgcagacatgtgcagtgaggattggttgcaggccccaaagtgcaaactagcttactatggtgatggctctggtgtctgagatgtaggtgggcccagtaygggccgtagaacctgggtctgaggtgtaggcattctcagagtgaccatggccctggggttggaacactcacagggttgaggacaaagtgactcctttgcc

SEQ ID NO: 432489 - DNA, 201 bp, Homo sapiens
gtgaccatggccctggggttggaacactcacagggttgaggacaaagtgactcctttgccaaagcatcttgacattggccacttctttgtggagacaagayatgccgccatgtctcccactctagggttccctggcaggaatggttgttggtcccctcacagtagcaagggatgccagtttcctctgcagtgcaggccacc

SEQ ID NO: 432490 - DNA, 201 bp, Homo sapiens
gagacaagatatgccgccatgtctcccactctagggttccctggcaggaatggttgttggtcccctcacagtagcaagggatgccagtttcctctgcagtrcaggccaccatttaccacagtggtccccaccatgtggctgatactgatagcctctgcctttctttgctcctagctatctcctagtttctcaggtatgcca

SEQ ID NO: 432491 - DNA, 201 bp, Homo sapiens
ggctattttggcttgtgaagatttgtctatatttgttttttttaatgggggaatgaaggctggtatctcctacttagccatcttgatgacaatacctccakgtattctggagtgttttaattgtttaaaattacaaatattcttttgagagttattttaaaaaagctcgagttgagaattattcagatagaataccagaag

SEQ ID NO: 432492 - DNA, 201 bp, Homo sapiens
ccatgtattctggagtgttttaattgtttaaaattacaaatattcttttgagagttattttaaaaaagctcgagttgagaattattcagatagaataccaraagctcccagaatgatactaaatttttaatcttctattctttttctccattttccttccacttagaattacttttgagaaagtttccaataaaaaatttt

SEQ ID NO: 432493 - DNA, 201 bp, Homo sapiens
aatcttagaactttgggaggccaaggtgggaggattgcatgagtccaggagtttgaagccagactgggcaacatggcaagatcccatctccattaaaaaawaaataaataatcccttggattttaaggattcatagatccctcaaacatgctgttttagtgatggagtaggaatagaagccagattattgagggtggtggt

SEQ ID NO: 432494 - DNA, 201 bp, Homo sapiens
aaacagcagagatataaattacagaatatacagaggaaagaaagatggagagagtaatgatattgtcaaatatagaaagttcaaataaaatgagactgagwagaatcgcatgggtgttgggcacgatagctcacacttgtaatcttagaactttgggaggccaaggtgggaggattgcatgagtccaggagtttgaagcca

SEQ ID NO: 432495 - DNA, 201 bp, Homo sapiens
tgtgttcattggaataccactttagatttacttcaagaatgtttcctttgcattcacaatttggccatctgttcagggcaagaggcctggctttccatgtrccttcctcaataaccctaataatcattgctaccttttgatttaaagtgagagatgtgtgatccttactttcacttgaacacttagaggccactacagagt

SEQ ID NO: 432496 - DNA, 201 bp, Homo sapiens
gactgtaaaggggtcacgagaccaaaatttgagaactgtcagggccatgcagtaagatttccatgcagtttttaaggagcagctgaggttgaatatcaatstgtaaggctgtgtggtctttctgcagcaaactgggcttaggactagagcaagcagatagtttatagggttgagggttttcaggttaacagtttaggataa

SEQ ID NO: 432497 - DNA, 201 bp, Homo sapiens
tgatccttactttcacttgaacacttagaggccactacagagtaactgattgccctggtttcaatattcttgtgtctccgggaataaggaggcccaaggaragggagagacataggacaacagctggttgatggagcagtcagaacacagaacatttatcgattaagttcactgtgttagatgggtgtggttcatgacacc

SEQ ID NO: 432498 - DNA, 201 bp, Homo sapiens
tatatttgtcaatttatttgtaaattgaggtgggctctcaaaatatgctaaatggattgtcagggaatttatgtgttagggcatttgaatgaatcagagtscttcccgttaccatttgaaaaatatcccacatgcagcgcatgtctgccttctcttatccattgtcctttacatttttgtttttttaacagtttattataa

SEQ ID NO: 432499 - DNA, 201 bp, Homo sapiens
tcaaaatatgctaaatggattgtcagggaatttatgtgttagggcatttgaatgaatcagagtccttcccgttaccatttgaaaaatatcccacatgcagygcatgtctgccttctcttatccattgtcctttacatttttgtttttttaacagtttattataatttcttttatttaacaatctaggaagttggcagccat

SEQ ID NO: 432500 - DNA, 201 bp, Homo sapiens
tctagctaggactttagtactgtgttgaatagaagttgtgagagtgggcatccttgtgttgttcttgatcttggaaaagctttcagcttttctccattcartatattattagctataggcttgtatatgaccatttttttgttgtggtacattccttccatacctaattgttgggtttttattatgaaaagacatttaatt

SEQ ID NO: 432501 - DNA, 201 bp, Homo sapiens
tagtcttcacatttcaaattacattaatgtttataaagtgtccactgtgttctggatactgcattaggtgctgggatgcagtagggttaatacgaggtgtyggctcctaggaactgtcagtgtcaaagggaatatgaacatgcatactataattatattgacatataaaaaacacagtcactgaaatactatcaaagctct

SEQ ID NO: 432502 - DNA, 201 bp, Homo sapiens
ttaatataaatttagtaggagggccagatgtcattctgaagcagtgggactattctatacttctgaaagtgcccaaagaattaccactggcttctctctcttttttttttttaatatatatatatttattatactttaagttctagggtacatgtgcaccaagtgcaggtttgttacatatgtatacatgtgccatgttgg

SEQ ID NO: 432503 - DNA, 201 bp, Homo sapiens
aaacttggcatacccataccctttctacactgtgtttcagtgaaactaatactaatgttcttcattatacatttatttcagttattatctgttttctcctttctaagtgtaagttaatcctttccttttcaaacagatactgtttttcataacttcacaaaaccgcaatatctcattgtctgcttctgtagagtcattttc

SEQ ID NO: 432504 - DNA, 201 bp, Homo sapiens
aacttggcatacccataccctttctacactgtgtttcagtgaaactaatactaatgttcttcattatacatttatttcagttattatctgttttctcctttctaagtgtaagttaatcctttccttttcaaacagatactgtttttcataacttcacaaaaccgcaatatctcattgtctgcttctgtagagtcattttca

SEQ ID NO: 432505 - DNA, 201 bp, Homo sapiens
acttggcatacccataccctttctacactgtgtttcagtgaaactaatactaatgttcttcattatacatttatttcagttattatctgttttctcctttctaagtgtaagttaatcctttccttttcaaacagatactgtttttcataacttcacaaaaccgcaatatctcattgtctgcttctgtagagtcattttcaa

SEQ ID NO: 432506 - DNA, 201 bp, Homo sapiens
cttggcatacccataccctttctacactgtgtttcagtgaaactaatactaatgttcttcattatacatttatttcagttattatctgttttctcctttctaagtgtaagttaatcctttccttttcaaacagatactgtttttcataacttcacaaaaccgcaatatctcattgtctgcttctgtagagtcattttcaaa

SEQ ID NO: 432507 - DNA, 201 bp, Homo sapiens
agtaatgctatatgaccagagtaacataaaatagaatgttcacccaataatcttctatgtttactgacatagaagagctggaaaaacgaagacttattagrtaaagcaaggagttccttatcaccatatgttgaaaagtatgaatatcaagtgacctggattcagatgtactaaaccttttttcgtaatctgtttattgat

SEQ ID NO: 432508 - DNA, 201 bp, Homo sapiens
tacaagaaaatttaataaaataaattttggaaatagtaatatggatatttatatatctttacatgaagttttcagattttctattttatatatatgtatgyattttatatatatatatataattaaaacaagaaatttaaaataaattgaataactcagcccatctgcatctttgcaaacagatactacattttggcaata

SEQ ID NO: 432509 - DNA, 201 bp, Homo sapiens
gaaaatttaataaaataaattttggaaatagtaatatggatatttatatatctttacatgaagttttcagattttctattttatatatatgtatgtattttatatatatatatataattaaaacaagaaatttaaaataaattgaataactcagcccatctgcatctttgcaaacagatactacattttggcaatacctga

SEQ ID NO: 432510 - DNA, 201 bp, Homo sapiens
aaaatttaataaaataaattttggaaatagtaatatggatatttatatatctttacatgaagttttcagattttctattttatatatatgtatgtattttatatatatatatataattaaaacaagaaatttaaaataaattgaataactcagcccatctgcatctttgcaaacagatactacattttggcaatacctgaa

SEQ ID NO: 432511 - DNA, 201 bp, Homo sapiens
ttcccagatccatcagatgcatcactatctgtggcagctatagccttatgaaatgcatttctttaataagacttgaaagtaagaattactcctggatccaygggctgcagaatggatattgtattagcaggcatgaaaacaacattcatctccttgtgcatctctgtctgagttcttgggtgaccaaatgccttgtcaatg

SEQ ID NO: 432512 - DNA, 201 bp, Homo sapiens
tagataattagtgtctcagaatactttgtattccattaatttatattcacattatagtaggagtctaagaacagttgggtaatagtatcatagaaaagtcwtctccaaactttttttttcctgtagctcaactgttaaaaagttttgccctgacatcccaatatatgtatactaataagttatgtgtatgagctacagaac

SEQ ID NO: 432513 - DNA, 201 bp, Homo sapiens
aggggagattgaatgttcaaagacccaaagaaaggaaaagaaatatgaagaatagagatgtcaaagggattagggtgtggttaagtaaaggagattggcartcaaggctagaagataagtaagtgagaacctgaagggtttttaatgtcacactataagaagttgagtttgggccggtgcgttggctcacgcctgtaatcc

SEQ ID NO: 432514 - DNA, 201 bp, Homo sapiens
caaaaaattagccgggtgtggtggcgtgcacctgttagtcccagctactcgggagactgaggcaggagaatggcgtgaacccgggaggcggagcttgcagkgagcccagatcgcaccactgcactccagcctgggcgacagagcgagactccttctcaaaaaaaagagagaagttgagtttgttttatatttgggagaaat

SEQ ID NO: 432515 - DNA, 201 bp, Homo sapiens
aagatctctaattctcaaacatgaataattattattttagtgtacaactgtaacttaacatggttggaaacagtttggttaaaacattgtcttgatttacrgtattttttactgcttaaaatccttacatagttatatccttgcataagcgtcatcagtaatggtttataatgtacaatttatttatctaaatgttggtaa

SEQ ID NO: 432516 - DNA, 201 bp, Homo sapiens
ggtgatttcagtagtataaagaagttttgaggacctcatctagcaatggaaacagcagagatataaattacagaatatacagaggaaagaaagatggagaragtaatgatattgtcaaatatagaaagttcaaataaaatgagactgagaagaatcgcatgggtgttgggcacgatagctcacacttgtaatcttagaact

SEQ ID NO: 432517 - DNA, 201 bp, Homo sapiens
ggcgtgaacccgggaggcggagcttgcagggagcccagatcgcaccactgcactccagcctgggcgacagagcgagactccttctcaaaaaaaagagagargttgagtttgttttatatttgggagaaattgtaaggtgattttaagagctggggcatcaatgataaaatagatttttttttttttttaaggaagatacat

SEQ ID NO: 432518 - DNA, 201 bp, Homo sapiens
taacttaacatggttggaaacagtttggttaaaacattgtcttgatttacggtattttttactgcttaaaatccttacatagttatatccttgcataagcrtcatcagtaatggtttataatgtacaatttatttatctaaatgttggtaagagactgacacctcccgtgacttctcaaaaatgattcttttagagaaacc

SEQ ID NO: 432519 - DNA, 201 bp, Homo sapiens
atgagtgaaagtttaccaagtattcaagaaaagaatgtcatctccagtggaaaagcatggatcatcagggagcagtaaagcttaaagcatagatcataagkagtcttagcatgctgagaacttaacaagaatttacaagtagtcaaatgtttttgagcagtggagtaacttgatcatatgaaaaggcttgaaagatgatta

SEQ ID NO: 432520 - DNA, 201 bp, Homo sapiens
tgaagtttaatacaaaactttgtgtgaatgtacctttttatgccaggggagaaagactagttttcaggagatctcaaaatggttcatgagcttaaaatgatttaagaataactggattagtacatgtattctcatgcttagttttgtaattgctataacaaagaactgagtgccaccaagaggcaaccttaatatattatg

SEQ ID NO: 432521 - DNA, 201 bp, Homo sapiens
ccatgctggggactcacagcctgctgaaagagacaatattacaatattgtatgtctatgcaagagatatcaacggttatcttagaggtgcctgtggagtakgtagggagtgaattagggaagaggaaatttttttaatcaaagaaggtatttttaaaatctcattatgaaagaatgagtgaaagtttaccaagtattcaag

SEQ ID NO: 432522 - DNA, 201 bp, Homo sapiens
tcactaagtaaacatatatgatgcaggcaccgtattaagggctgagtgttcaactatgaacagcatggtatataccatgctggggactcacagcctgctgraagagacaatattacaatattgtatgtctatgcaagagatatcaacggttatcttagaggtgcctgtggagtatgtagggagtgaattagggaagaggaa

SEQ ID NO: 432523 - DNA, 201 bp, Homo sapiens
gggaatatgtgatttgcaacctaaataatataacaattttttccaaaaaggtgaagcgtattcaaaatgtactgatcttattctccagcaaaaaaaattcraaagatctttgtggtacaaaatcatgatagaatcatagaacagaaaaggtcacttggcttattgttctgccctagataaactatcccaataaggtgaaac

SEQ ID NO: 432524 - DNA, 201 bp, Homo sapiens
atgcgtattttccgtttattcactaagtaaacatatatgatgcaggcaccgtattaagggctgagtgttcaactatgaacagcatggtatataccatgctrgggactcacagcctgctgaaagagacaatattacaatattgtatgtctatgcaagagatatcaacggttatcttagaggtgcctgtggagtatgtaggga

SEQ ID NO: 432525 - DNA, 201 bp, Homo sapiens
aaaggtcacttggcttattgttctgccctagataaactatcccaataaggtgaaacatctgtttttggagcattatacaaattccttttggtaatttaatktaattcagggcttattaacccttattgccaagaagctcttcctggtttcacaatactatgtctaacctcaagttcgttgttctgtctcatgacatgatga

SEQ ID NO: 432526 - DNA, 201 bp, Homo sapiens
ccattcaatatattattagctataggcttgtatatgaccatttttttgttgtggtacattccttccatacctaattgttgggtttttattatgaaaagacrtttaattttgttgaatattttttctatatctgtagagatggtcatgatttttgtcctttgttctgttaatgtggtatatcacatttaccgatttgcatat

SEQ ID NO: 432527 - DNA, 201 bp, Homo sapiens
tcataagaaatagtggaagaaactcaagtgtttccatcgttggatgcgtattttccgtttattcactaagtaaacatatatgatgcaggcaccgtattaasggctgagtgttcaactatgaacagcatggtatataccatgctggggactcacagcctgctgaaagagacaatattacaatattgtatgtctatgcaagag

SEQ ID NO: 432528 - DNA, 201 bp, Homo sapiens
tggagaattttaaagatgtcagcttcagtgaatattataagtttggagataaatttaatataaatttagtaggagggccagatgtcattctgaagcagtgrgactattctatacttctgaaagtgcccaaagaattaccactggcttctctctcttttttttttttaatatatatatatttattatactttaagttctagg

SEQ ID NO: 432529 - DNA, 201 bp, Homo sapiens
ccctgaataaatcccacttgattatggtgaattgattgcttttttttgagatggagtctcaccctgttgcccagactggagtgcagtggcacgatcttggytcactgcaagctccgcctcctgggttcacgccattctcctgcctcagcctcccaagtagctaggactacaggcgcccgcaaccatgcccagctaattttt

SEQ ID NO: 432530 - DNA, 201 bp, Homo sapiens
agtgcagtggcacgatcttggctcactgcaagctccgcctcctgggttcacgccattctcctgcctcagcctcccaagtagctaggactacaggcgcccgyaaccatgcccagctaattttttgtattttttagtagagacggggtttcaccatattggccaggctggtctggaactcctgacctcgtgatccatccacct

SEQ ID NO: 432531 - DNA, 201 bp, Homo sapiens
attagcaggcatgaaaacaacattcatctccttgtgcatctctgtctgagttcttgggtgaccaaatgccttgtcaatgagtgtagtattttgaaaggaatcttttttttttttttctgagcagtaggtctcaatggtgggcttcaattattcagtaaactatgtaaacagatgtgctgtgtattactccattctcacagt

SEQ ID NO: 432532 - DNA, 201 bp, Homo sapiens
ttagcaggcatgaaaacaacattcatctccttgtgcatctctgtctgagttcttgggtgaccaaatgccttgtcaatgagtgtagtattttgaaaggaatcttttttttttttttctgagcagtaggtctcaatggtgggcttcaattattcagtaaactatgtaaacagatgtgctgtgtattactccattctcacagta

SEQ ID NO: 432533 - DNA, 201 bp, Homo sapiens
tagcaggcatgaaaacaacattcatctccttgtgcatctctgtctgagttcttgggtgaccaaatgccttgtcaatgagtgtagtattttgaaaggaatcttttttttttttttctgagcagtaggtctcaatggtgggcttcaattattcagtaaactatgtaaacagatgtgctgtgtattactccattctcacagtat

SEQ ID NO: 432534 - DNA, 201 bp, Homo sapiens
cttaaacatcatgaaccaacctctactagcttcagccttttcttctgcagcttcctcacttctctcagcctttacagaattgaaaacagttaggggcttaytctgggttaggctttggcctaagggaatgttgtggctgatttgatcttctctccacaccactaaaactttctccatgtcagcaagaagactgtttcgctt

SEQ ID NO: 432535 - DNA, 201 bp, Homo sapiens
tcctgtcctattttaaattaatcttttctcaaaggtcacttcagatgcatgcagtaaacttacaaaagttattagatggattggaaatacacacttaataycctaattggataaggagatgatttgcttttcctcattttgttagatattttgattttttaatagttgttaaagggctgtgaaatctaaatgctgtaagaa

SEQ ID NO: 432536 - DNA, 201 bp, Homo sapiens
tccttcacttttccaagagaccataagtcagttacagctgatacaggcaagtaatgaaataagaaaaaatatatataaccacttaattaaaaggaaaactttaatcctgctgtgttctattaaaaataacttcgtatttccatataaaatttaaacatgaaaagtaaaaataaaaccataatttaataacattaactcact

SEQ ID NO: 432537 - DNA, 201 bp, Homo sapiens
ccttcacttttccaagagaccataagtcagttacagctgatacaggcaagtaatgaaataagaaaaaatatatataaccacttaattaaaaggaaaactttaatcctgctgtgttctattaaaaataacttcgtatttccatataaaatttaaacatgaaaagtaaaaataaaaccataatttaataacattaactcactt

SEQ ID NO: 432538 - DNA, 201 bp, Homo sapiens
gtgttctattaaaaataacttcgtatttccatataaaatttaaacatgaaaagtaaaaataaaaccataatttaataacattaactcacttcatttcactrtctgttgttttctagtaaattaaatcgtatagggcattacatcttacatagagctgagtgttttgaccaacaatcagaatatattataaatcaaaataag

SEQ ID NO: 432539 - DNA, 201 bp, Homo sapiens
tatgttttcatcagagattctgtctgaaaataaagcggttgttaccaacaaatccaacttctggttttccaacttttctgcttaagtaggaagctagcacagagttgttatatatattttaaaaaaaaactagaatatttccctgtttggtaagttatcattataatggtagactgagacatcttttactttaaaagaaat

SEQ ID NO: 432540 - DNA, 201 bp, Homo sapiens
agggccagatgtcattctgaagcagtgggactattctatacttctgaaagtgcccaaagaattaccactggcttctctctcttttttttttttaatatatmtatatttattatactttaagttctagggtacatgtgcaccaagtgcaggtttgttacatatgtatacatgtgccatgttggtgtgctgcaccctttaact

SEQ ID NO: 432541 - DNA, 201 bp, Homo sapiens
gaagcagtgggactattctatacttctgaaagtgcccaaagaattaccactggcttctctctcttttttttttttaatatatatatatttattatactttmagttctagggtacatgtgcaccaagtgcaggtttgttacatatgtatacatgtgccatgttggtgtgctgcaccctttaactgtcatttacatttaccac

SEQ ID NO: 432542 - DNA, 201 bp, Homo sapiens
aagtttcttgtggttacttgtaataactttgtctgctagtcagtcatcagtatgctgaagtgcactgataggtgttatagtgtaatattactttaaatttwaaaatggtaatatagagaaattcccagtttttcaaaaagaaagcattacatgataactgtatgcctgtatgtaaattgaaatacaaactttattaccaaa

SEQ ID NO: 432543 - DNA, 201 bp, Homo sapiens
attacttgattacactataaccagattttttaaaaagcactgcttacccctgggggccattcatataataagtgtattgtagaaattgaacattttctaaygatgtacattgtaatgaaattttacttgatattcagtacatgtatttgtcacttaaaggttctttctgtaaactgcttcagattcttttactattcaatt

SEQ ID NO: 432544 - DNA, 201 bp, Homo sapiens
aatatagataacataggttagtcatgctgtaatgtatgtatatatatgaatcattacattgcctaaataaaaaacttcagaacactaacatatttctctayctggtaatttttatattatttaatttcatctctttaggaaggaaaaaggaagctagaagcaaatctaaagcagataatgtaggaagtgcattgggaccag

SEQ ID NO: 432545 - DNA, 201 bp, Homo sapiens
aactgctaggtcactttacttaaaatccatagtgttaggaaaagacctccaatgcagttggtccatttggccaccaaagaaaactgaatgtcaaagcatckaagactggatctcagcctacgttttaactcttgaggtgtgatactgtaatatatatacagtcataccttggagtattgcaggttcagtcccagaccatca

SEQ ID NO: 432546 - DNA, 201 bp, Homo sapiens
tggtccatttggccaccaaagaaaactgaatgtcaaagcatcgaagactggatctcagcctacgttttaactcttgaggtgtgatactgtaatatatatamagtcataccttggagtattgcaggttcagtcccagaccatcacaggaaatgatataccacaataaagtgagccacacgaatttttcagtttcccagtgcc

SEQ ID NO: 432547 - DNA, 201 bp, Homo sapiens
ttggccaccaaagaaaactgaatgtcaaagcatcgaagactggatctcagcctacgttttaactcttgaggtgtgatactgtaatatatatacagtcataycttggagtattgcaggttcagtcccagaccatcacaggaaatgatataccacaataaagtgagccacacgaatttttcagtttcccagtgcctacaaaag

SEQ ID NO: 432548 - DNA, 201 bp, Homo sapiens
aagactggatctcagcctacgttttaactcttgaggtgtgatactgtaatatatatacagtcataccttggagtattgcaggttcagtcccagaccatcamaggaaatgatataccacaataaagtgagccacacgaatttttcagtttcccagtgcctacaaaagttatgtttataacatactgcagtctattaaatgtg

SEQ ID NO: 432549 - DNA, 201 bp, Homo sapiens
aaagacttctctgtagcgtgcgaagctgttttatagcattttgcccagagtagaagttctttcaaaagtcaattctctcaaactctgctactgctttacchagtatatgtaatattttaaatccttcatcatttcagcaatactcacagcatcctcaccagaagtaaactccatctcagataactacgttctttgctcatc

SEQ ID NO: 432550 - DNA, 201 bp, Homo sapiens
atgttttcatcagagattctgtctgaaaataaagcggttgttaccaacaaatccaacttctggttttccaacttttctgcttaagtaggaagctagcacagagttgttatatatattttaaaaaaaaactagaatatttccctgtttggtaagttatcattataatggtagactgagacatcttttactttaaaagaaatt

SEQ ID NO: 432551 - DNA, 201 bp, Homo sapiens
aagttatcattataatggtagactgagacatcttttactttaaaagaaattatgggctattactttgtttttcattcttacctgcttatcagcactgtccaggagaactttctgtgatgatggaaatgtttaattcctcaccatctagtcaggtagccagcagtatgtcacatgagcacttgaaatgtggttaatgtgact

SEQ ID NO: 432552 - DNA, 201 bp, Homo sapiens
agttatcattataatggtagactgagacatcttttactttaaaagaaattatgggctattactttgtttttcattcttacctgcttatcagcactgtccaggagaactttctgtgatgatggaaatgtttaattcctcaccatctagtcaggtagccagcagtatgtcacatgagcacttgaaatgtggttaatgtgactg

SEQ ID NO: 432553 - DNA, 201 bp, Homo sapiens
gttatcattataatggtagactgagacatcttttactttaaaagaaattatgggctattactttgtttttcattcttacctgcttatcagcactgtccaggagaactttctgtgatgatggaaatgtttaattcctcaccatctagtcaggtagccagcagtatgtcacatgagcacttgaaatgtggttaatgtgactga

SEQ ID NO: 432554 - DNA, 201 bp, Homo sapiens
tcagtaagaatggttccagcctttttgtttctaacctgcctcattctatgtcatttctgtggcaagactatcacaaattcttagagttggagtttatgggtttttttttttttaacatttttaattctctagggtaaattatatcttaatgtgttataatctgaaagaggggaaaaaatccgaaaataaacagatggcctt

SEQ ID NO: 432555 - DNA, 201 bp, Homo sapiens
cagtaagaatggttccagcctttttgtttctaacctgcctcattctatgtcatttctgtggcaagactatcacaaattcttagagttggagtttatgggtttttttttttttaacatttttaattctctagggtaaattatatcttaatgtgttataatctgaaagaggggaaaaaatccgaaaataaacagatggccttg

SEQ ID NO: 432556 - DNA, 201 bp, Homo sapiens
tttcaggtaaatgaaccgaggcccagaaaagttaaatatatatgtagatctgttgatattaaaatccactgtgactcccaaggtcagtgtttttttttttattattattatatttaagttttaggatacatgtacacaacgtgcaggtttgttacatatgtatacatgtgtcatgttggtgtgctgcacccccaccccaca

SEQ ID NO: 432557 - DNA, 201 bp, Homo sapiens
gaggtatcttttcatatactaattggtcatgtctaaatgtaattttaaattcttgaaccatttattaaagactggtaataaatatatagtcaacgaactgytaggtcactttacttaaaatccatagtgttaggaaaagacctccaatgcagttggtccatttggccaccaaagaaaactgaatgtcaaagcatcgaagac

SEQ ID NO: 432558 - DNA, 201 bp, Homo sapiens
cagtgatgatgagcattttttcatttgtcttttggctgcataaatatcttcttttgagaagtgtctgttcatatccttcgccgactttttgatggggttgktttttttttgtaaatttgtttgagttcattgtagattctggatattagccatttgtcagacgagtaggttgcaaaaattttctcccattctgtaggttgc

SEQ ID NO: 432559 - DNA, 201 bp, Homo sapiens
tgtctgttcatatccttcgccgactttttgatggggttgttttttttttgtaaatttgtttgagttcattgtagattctggatattagccatttgtcagaygagtaggttgcaaaaattttctcccattctgtaggttgcctgttcactctgatggtggtttcttttactgtgcagaagctctttagtgtaattagatccc

SEQ ID NO: 432560 - DNA, 201 bp, Homo sapiens
tcaggattcatttctaattacagttcttttgttatttccaccatatctgcctttctccattgaaatcttgaatccctcaaagtcatccatgaaggttggartaaacttctttcaagcttttgttaatgttgatattttgacttactcccttgaatcatgaatgttcttaataatctagaatggtgaattctttccggaagg

SEQ ID NO: 432561 - DNA, 201 bp, Homo sapiens
ttggagtaaacttctttcaagcttttgttaatgttgatattttgacttactcccttgaatcatgaatgttcttaataatctagaatggtgaattctttccrgaaggttttcaatgtacttttcccagatccatcagatgcatcactatctgtggcagctatagccttatgaaatgcatttctttaataagacttgaaagta

SEQ ID NO: 432562 - DNA, 201 bp, Homo sapiens
ttgtattagcaggcatgaaaacaacattcatctccttgtgcatctctgtctgagttcttgggtgaccaaatgccttgtcaatgagtgtagtattttgaaakgaatcttttttttttttttctgagcagtaggtctcaatggtgggcttcaattattcagtaaactatgtaaacagatgtgctgtgtattactccattctca

SEQ ID NO: 432563 - DNA, 201 bp, Homo sapiens
gagttcttgggtgaccaaatgccttgtcaatgagtgtagtattttgaaaggaatcttttttttttttttctgagcagtaggtctcaatggtgggcttcaawtattcagtaaactatgtaaacagatgtgctgtgtattactccattctcacagtatataaagaaatacctgagagtaggtaatatttataaagaaaagagg

SEQ ID NO: 432564 - DNA, 201 bp, Homo sapiens
tttcccagttagccttaaaaatgtattccctacttttgcttcaggagatcattatttgcaaatgcaaagattttttacttagacttttgaaatcactcttrgtaactttaacattgtttttaggtatgaaattgaaggctgtgaagtgatttgggccattaaagataaagctatagggaatactttcttcgatgcaggagc

SEQ ID NO: 432565 - DNA, 201 bp, Homo sapiens
gactggtcacaggaaagaccaagacatgattagagtttagactttccaacctacaggaagggaaagaggttgaaggttaagccaatcactagcagccagtratttaatcagtcacctacataacacagtttccatgaaaacccaaaaggactgggtttggagagcttctggatagctgaacatgtggaagttgctagaggg

SEQ ID NO: 432566 - DNA, 201 bp, Homo sapiens
aagaacgttaatattcctctttataatcaatctttcccagttagccttaaaaatgtattccctacttttgcttcaggagatcattatttgcaaatgcaaakattttttacttagacttttgaaatcactcttagtaactttaacattgtttttaggtatgaaattgaaggctgtgaagtgatttgggccattaaagataaa

SEQ ID NO: 432567 - DNA, 201 bp, Homo sapiens
gtttggagagcttctggatagctgaacatgtggaagttgctagagggtggtctatctggagagggcatagaagcttcatgccccttcttatatgctttgcyttatgtatttcttcatctgtttcttcgtgacatccttgataataaaccagtaaatgtaagtaaagtgtttccccaaattctgtgagatattctaataaat

SEQ ID NO: 432568 - DNA, 201 bp, Homo sapiens
ctctgattctttccattttctatccctttccgtaatgtgctttgaagatataaaaagttgttaccaaataagtgactgattctcaatattatagctatgtrccatccatccattacttgattacactataaccagattttttaaaaagcactgcttacccctgggggccattcatataataagtgtattgtagaaattgaa

SEQ ID NO: 432569 - DNA, 201 bp, Homo sapiens
catgtggaagttgctagagggtggtctatctggagagggcatagaagcttcatgccccttcttatatgctttgccttatgtatttcttcatctgtttcttygtgacatccttgataataaaccagtaaatgtaagtaaagtgtttccccaaattctgtgagatattctaataaattaattgaacctaagaaaggggctcgt

SEQ ID NO: 432570 - DNA, 201 bp, Homo sapiens
aaaccacttcttagcatctaaacctagaataaaatatcacatgcccattaccttacattagtggtaaatagtaatagaaggtggcttatatataccatttycattctttccttcctctaagatccttgatccttgatcttgatccttaagatttttagcttataactctgattctttccattttctatccctttccgtaat

SEQ ID NO: 432571 - DNA, 201 bp, Homo sapiens
ttcgtgacatccttgataataaaccagtaaatgtaagtaaagtgtttccccaaattctgtgagatattctaataaattaattgaacctaagaaaggggctygtgggagccccttgatttatggttggttagtcagaccaactggtaaaacacccggggcatgcaattggtattggaagtggaagacagtcttgtgagattg

SEQ ID NO: 432572 - DNA, 201 bp, Homo sapiens
gaaaaccacttcttagcatctaaacctagaataaaatatcacatgcccattaccttacattagtggtaaatagtaatagaaggtggcttatatataccatkttcattctttccttcctctaagatccttgatccttgatcttgatccttaagatttttagcttataactctgattctttccattttctatccctttccgta

SEQ ID NO: 432573 - DNA, 201 bp, Homo sapiens
aacatcagaactgaattgaattagaggacagccagatggtgtcctgtgcagaattaattgcttgcttagtgtgtagaaaacaccccacacacatttggtcrcagaagtattctgtgttgtgagactatagtaggagaaactgagtttgttttttcctatatcctcagatcagggatagagctttctatacccagactacag

SEQ ID NO: 432574 - DNA, 201 bp, Homo sapiens
actcctgacctcaggtgatccacctgcgcctcggcctcccagagtgctgggattacaggcgtgagccactgtgcccaacaactactgtaatttttaaaaawtgcatttgtaattatcaatgaggcctaggctaaaaagcattccctcgatgctatctgctaatgcagctaccagatctcttaagttactgaatgaattttt

SEQ ID NO: 432575 - DNA, 201 bp, Homo sapiens
aaatactatcaaagctctgatatcagggcttaaggaagactttacagagagagtaaaatgaggggggtattaacagatgagtgaaattaagagttccccargtggaaagaggcattccaggaaggggagattgaatgttcaaagacccaaagaaaggaaaagaaatatgaagaatagagatgtcaaagggattagggtgtg

SEQ ID NO: 432576 - DNA, 201 bp, Homo sapiens
gacggcagggaagttcgtggtggtcggcggcggcatcgcgggcgtcacttgtgcggagcaggtagggcggtgctcaggcggttccgcctctttccccgacmccaaaggggatagcactggaggccttcctcccaccccctccctttttcttcttccgggttccttttttgctgcgcccttttccgcacttattgctcccag

SEQ ID NO: 432577 - DNA, 201 bp, Homo sapiens
tttactcagccactgttgcttggtaccctggcttcactttcctgctgtctgctggtctgttactacttccagccatcagtctatggtatgtcattatttttaatcattttatcagagggtatatggattaagtgaattccctaacctcaccagtaaattacataggtctgttgaaattttgcctcagaacgtgcttttctc

SEQ ID NO: 432578 - DNA, 201 bp, Homo sapiens
aggccgaggtccgcagggccgcggggaagccgagggctgccggagaaccctgcaggtgtcactcgggacgcggaagtgcgcttgccgaggtttgccttacmatacgcttgagactccccgacaagcgtaatttggtcgagttcgacgggaaagtactctccccaccccagcgccggccgcgtagtccgaggttactgtccc

SEQ ID NO: 432579 - DNA, 201 bp, Homo sapiens
ttcattcacccagcagtgccctcatgtttactgttttcaatgagtaacagttgtctccattagtttgtgtttgttgttttgtaattctgccttttttttttcctctctctctatccctactccaaacaggtaccctgtttgcttgtattgctttcttagaaacacttggaggagtcactgcagtttctacttttaatggaa

SEQ ID NO: 432580 - DNA, 201 bp, Homo sapiens
gtgtccaagtgttctcattgttcaattcccacctgtgagtgagaacatgtggtgtttggttttttgctcttgcgatggtttgctgagaatgatggtttccwgcttcatccatgtccctacgaaggacatgaactcatccttttgtatggctgcatagtattccatggtgtatatgtgccacattttctcaatccagtctat

SEQ ID NO: 432581 - DNA, 201 bp, Homo sapiens
gtttgttacatatgtatacatgtgccatgttggtgtgccgcacccattaactcgtcatttagcattaggtatatctcctaatgctatccctcccccctccyccctccccccactccacgacaggccccggtgtgtgatgttccccttcctgtgtccaagtgttctcattgttcaattcccacctgtgagtgagaacatgtg

SEQ ID NO: 432582 - DNA, 201 bp, Homo sapiens
tgtttcaaaggacaacatcaagaaagtgaggccaggcgcagtggctcacatgtgcaatcccagcactttgggaggccaaagcgggtggatgacccgaggtyaggagtttgagaccagcctgaccaacatggtgaaaccccgtctctactaaaaatacaaaaaaaaaaaaaaaaaagaaaagaaaaagaaagaaagtgaaat

SEQ ID NO: 432583 - DNA, 201 bp, Homo sapiens
ttagcatttcccagtatacaaatggcacacactttttatattgactttggaaaatacagagcaatggcaagcaaaaaatgttttaagatcatgcaaaattycttccatcaagtaactagtgtaatgattgacacatcttccaatctgtgtgtgtatgtcatctgtcattgtcattttggtccttggaagttgagtttatct

SEQ ID NO: 432584 - DNA, 201 bp, Homo sapiens
tgcaaatatcccaaagtctgaaaaaatccaaaatcggaaatacttctggtctcaagcatttcagataagggatactcagtctgcattgctttataaactgratgaaaatgtaagctctattagtcccgcccatccaccagagattccccacccataacctactggccacagggaaaaaagcatatgcaccatgatattttt

SEQ ID NO: 432585 - DNA, 201 bp, Homo sapiens
ccaaatagaattgggcctaacttccatctatagtactagatgatcttgggcaagttactgaactactctcagccctcattttctcatctgtaaaatgggcrtggtactacctaatttagaggattacagtgaacattaggtagctgtcaagcactcgcttggcacaatccctactattcaataatagccagtttttctccc

SEQ ID NO: 432586 - DNA, 201 bp, Homo sapiens
actacctaatttagaggattacagtgaacattaggtagctgtcaagcactcgcttggcacaatccctactattcaataatagccagtttttctccctgtcyccctaagagctgccaaggtcaggtaagttaatctatgtgaaaacactttgagaattgtaaagtggtctgctaatgtcatattttactattttatgatgta

SEQ ID NO: 432587 - DNA, 201 bp, Homo sapiens
caaagatgaacaggcaagatgataaagaaccagtttaccaataaataaatcaatataataaaggcatgctaacactaagagtgccaagtctgaaaaaagcmcaaacaaaaatgaattagcagtctcaatttgctaaataagaggttaatatataattaggaaaataagcagatcagtttttttttttgttttttttttttc

SEQ ID NO: 432588 - DNA, 201 bp, Homo sapiens
ccagagagatgccccagataggaagcagagaagaaacaccataacctttctcccccatcatccttttaaccaagtgcagcaggaactcgggccagcaagawagtccaagtcatataatttgtggggtcagcctccaaagcacagagcagggtacacaaagtcaaacagttgaaggggcaggcagagaataaccaggatgca

SEQ ID NO: 432589 - DNA, 201 bp, Homo sapiens; identical to SEQ ID NO: 347758

SEQ ID NO: 432590 - DNA, 201 bp, Homo sapiens
gaagcccagagtctctctaggttgagaaaaacacacataaacagaatagagtttaacaaatcctcttagtttcaaagttggggtcctacagcagggatgcycttcagatttcggctctggagacgtttgttaatatacatacttgaatcccatcctggaacctctaacacagtgttttttaaccttgactggacatgggaa

SEQ ID NO: 432591 - DNA, 201 bp, Homo sapiens
tagctcttctcctttctctcggaaaatttcaccacagtgtcatctcttctgtggctgtctccttgctttgtcctaaaaaaaaaaaaaaaaaaaaaaaaaaktctgaaaattggggcagggcaggctggaatgagctacttggtggacaggggtggctgaaacatggtgtttctgtctctcacttgctctattcttccccaa

SEQ ID NO: 432592 - DNA, 201 bp, Homo sapiens
gagacagggtcttcctctgtttcccaggctggccttgaactcgtggcctcaagtgagcctcctgtctggtcctctcaaagtgttgggattacaggcgtgasccaccgtgcccggtcttattttatttttttaattgacagataatcattgtacatattcatggagtatacagtggtgttttgatacatacaatgtatagtg

SEQ ID NO: 432593 - DNA, 201 bp, Homo sapiens
gtattcgcatccttcattattatttaaattggccattttgtgaaaatattaggcactttaaataatcagaggagtggggaaatactgccgaagttttcagktggctctcattatttctattatcttaaataagaaaggtaagaaagtggaattctggtaattattttgcaatctctgcgctctgcaccactgtgaactcat

SEQ ID NO: 432594 - DNA, 201 bp, Homo sapiens
attgtcgaggcagccagagagatgccccagataggaagcagagaagaaacaccataacctttctcccccatcatccttttaaccaagtgcagcaggaactsgggccagcaagaaagtccaagtcatataatttgtggggtcagcctccaaagcacagagcagggtacacaaagtcaaacagttgaaggggcaggcagagaa

SEQ ID NO: 432595 - DNA, 201 bp, Homo sapiens
ggtttctggcctctctcagggataattttgaaggcataatgaaaattatgatgaatcactcattggtaggaaaataatgatataagtttcaaatatgtatrattttacctatacttggtaatgctttgttttatagagcctgttaagctgctattgatagtcggagcttatatactgtgacttctgaagactatacatgaa

SEQ ID NO: 432596 - DNA, 201 bp, Homo sapiens
ttgaaggcataatgaaaattatgatgaatcactcattggtaggaaaataatgatataagtttcaaatatgtatgattttacctatacttggtaatgctttrttttatagagcctgttaagctgctattgatagtcggagcttatatactgtgacttctgaagactatacatgaattccacaatcagtgctttgttgataca

SEQ ID NO: 432597 - DNA, 201 bp, Homo sapiens
aaacatactctaaacaaataatgagtaattttgtcaaaaattgatatataaaaacgttaattacagcaaaaaaattttaagtgaccaaactgtccaacagygggagaatgtttaagtaaatgatggtacagccatttcatgaaaaatgacttaactaacaagaattgtagcaggcaccgtggctcacacctataatcccag

SEQ ID NO: 432598 - DNA, 201 bp, Homo sapiens
aaaattgctctaaagaagttaaaaaactgaatgaacagctaatactggtataaagtaactaatgtttggagccaacatttgttccttgtgtcagcaaaagratattcacattccatgatccctggctgagaattctgcctctagtctttcttacccagctgttgtctatccttgttcaattataaatactgctaagggcat

SEQ ID NO: 432599 - DNA, 201 bp, Homo sapiens
gtctcaaactcctgacctcaggtaatcagcccgcctcagcctcccaaagtgctgggattataggcgtgacccaccgcacccggcctcttatttttcactcrtaagatgtagctatatattcacacatctgtttatagatgatgtgatgatgattgctttgaaaaccaataacaaatggaaaaatttatataaactatgtaa

SEQ ID NO: 432600 - DNA, 201 bp, Homo sapiens
gaaaaaagtgtcacgttttaatctgcagatggacataagtggattaattcctggtctagtgtctacattcatacttttgtctattagtgatcactacggaygaaaattccctatgattttgtcttccgttggtgctcttgcaaccagcgtttggctctgtttgctttgctattttgcctttccattccagcttttgattgc

SEQ ID NO: 432601 - DNA, 201 bp, Homo sapiens
acttgtttaaacgttaatgtttaaatgtttttaaatttaaatattcaaattaaagaagcacaaaattccatttatgaatagtacatataatggatagatcrgaagcataaatataaaagcaatatttatgccttctttttgctttctatttaacaaaaaatgtgagccaactagatgaatgattgctgaaacgtccaagca

SEQ ID NO: 432602 - DNA, 201 bp, Homo sapiens
ctggctgagaattctgcctctagtctttcttacccagctgttgtctatccttgttcaattataaatactgctaagggcatttttaaaatacgatcttgtastccttaaatttgaatccgtcagcacggtcactcataggaaaatgatcaaacaagcaagccagtcatgatttgactccttcccatctcatttcttactgcc

SEQ ID NO: 432603 - DNA, 201 bp, Homo sapiens
agtctttcttacccagctgttgtctatccttgttcaattataaatactgctaagggcatttttaaaatacgatcttgtagtccttaaatttgaatccgtcrgcacggtcactcataggaaaatgatcaaacaagcaagccagtcatgatttgactccttcccatctcatttcttactgccttacgctcatcctgaggtcca

SEQ ID NO: 432604 - DNA, 201 bp, Homo sapiens
tgaaaaaaacaaaagcagcccaatttttgcattccaggaggtaagaaattacaatatccatagtatttaataaaatgggaatgtataccgggctttgagtyaaagaggaccgtgaactcatcatccattggtctctctagggcggccatcaaagtcctaaatcccaaacctaatggcctttactgggaactcacctcattt

SEQ ID NO: 432605 - DNA, 201 bp, Homo sapiens
attcttccccaatccttttactgtttctgcatgtcccagctttcagggactctagaaagtggcccatcactgaagattgtgagccagtgtctgtcacaggrtggggtggaggagcatttattatttggtggtggtatcaaatcagccttggctctcacgtgttgaggagcagctgtgtggggacatctggagtggggagta

SEQ ID NO: 432606 - DNA, 201 bp, Homo sapiens
cacatctgtttatagatgatgtgatgatgattgctttgaaaaccaataacaaatggaaaaatttatataaactatgtaaaaatctatctgcttctttggaytatgcaatagtttcttagatatgacaccaaaagcacaagaacaaaggaaaaattgatagattagacttcatccaaaaacttcattcaaagtttgtccttt

SEQ ID NO: 432607 - DNA, 201 bp, Homo sapiens
ttagtaaataaaggaagatgtttctcactaatctatctgtgaagacataggtaaaaaaaaaaaataagggcaacagccaagctctccctaaataaaggttwatttttttttttttttgtattttttggtagagacagagttttaccatgttggccaagctggtctcaaactcctgacctcaagtgatcctcctgcctcggc

SEQ ID NO: 432608 - DNA, 201 bp, Homo sapiens
ttaatttttttttttttttgtattttttggtagagacagagttttaccatgttggccaagctggtctcaaactcctgacctcaagtgatcctcctgcctcrgcctcccaaaatatgaggattacaggcatgagccaccacgcccgaccaaaatctgaaactttttgatcaccacactttaccacaagtgtaaaattccaca

SEQ ID NO: 432609 - DNA, 201 bp, Homo sapiens
acaatgctgagtggcctacccttgaccaactttggtgtatagcaagtgtgaccatagcagaatccccactcttcatcttgtaaggcaccttagggcagagrcagttgcaagcaataaggtggaaacatatgttttaaagaatcacttaacattaaactgtggcataaaccttcactagagcacaagatggttaatttgatg

SEQ ID NO: 432610 - DNA, 201 bp, Homo sapiens
gacatgcagttatcaaaagagtcagctgcactgtctttttagctttgccctgtggacactggaactcagctatttggagtttccaacatctctcacatcargtccaaggagaacctttcccttagtttcctcagctgcagaatgggctgctgacttctcagggactttgagggaataactttcatttcattcacccagcag

SEQ ID NO: 432611 - DNA, 201 bp, Homo sapiens
gctgagaattctgcctctagtctttcttacccagctgttgtctatccttgttcaattataaatactgctaagggcatttttaaaatacgatcttgtagtcsttaaatttgaatccgtcagcacggtcactcataggaaaatgatcaaacaagcaagccagtcatgatttgactccttcccatctcatttcttactgcctta

SEQ ID NO: 432612 - DNA, 201 bp, Homo sapiens
gcaattccttttagaaacatactctaaacaaataatgagtaattttgtcaaaaattgatatataaaaacgttaattacagcaaaaaaattttaagtgaccmaactgtccaacagtgggagaatgtttaagtaaatgatggtacagccatttcatgaaaaatgacttaactaacaagaattgtagcaggcaccgtggctcac

SEQ ID NO: 432613 - DNA, 201 bp, Homo sapiens
tatgtggactacacagagttaaccatgggacagatgggataccttaggggtctagaagagaaaaaaaatcatgcagttttaaaattattttaagaacaccrtgcatgagtcagctggattcaaaatgccaggatactcctcctaataatctgcataatttattaaaagctatgtaactgggaaaaaaagttggaaaacaga

SEQ ID NO: 432614 - DNA, 201 bp, Homo sapiens
gtctttcttacccagctgttgtctatccttgttcaattataaatactgctaagggcatttttaaaatacgatcttgtagtccttaaatttgaatccgtcarcacggtcactcataggaaaatgatcaaacaagcaagccagtcatgatttgactccttcccatctcatttcttactgccttacgctcatcctgaggtccac

SEQ ID NO: 432615 - DNA, 201 bp, Homo sapiens
gatttttgctctgtttgttactttttacagtaatcacttatttttttgtggtaattggcattgccccaatttttatcctttatgaattggattcaccactytgctggaatgaagtttttataggttatggatcagctttgggtagtgcctcttttttgactagtttcctaggaatatggcttttttcttattgtatggaag

SEQ ID NO: 432616 - DNA, 201 bp, Homo sapiens
agagacagctcctggctttagcttcttgtggtaccacgcactttgagcactttgtgcgtatcatgcaatatacttgcaatacacagaacaaatttcaaatmcgcctcacttttagacttagaagagaaacattaaaacttaagggtgtaaggagggatcaagaaacttgataaggtcaaaagcaataatctctctgacata

SEQ ID NO: 432617 - DNA, 201 bp, Homo sapiens
cgctgaggccgaggtccgcagggccgcggggaagccgagggctgccggagaaccctgcaggtgtcactcgggacgcggaagtgcgcttgccgaggtttgcyttacaatacgcttgagactccccgacaagcgtaatttggtcgagttcgacgggaaagtactctccccaccccagcgccggccgcgtagtccgaggttact

SEQ ID NO: 432618 - DNA, 201 bp, Homo sapiens
tagtgattgatccagcaattccttttagaaacatactctaaacaaataatgagtaattttgtcaaaaattgatatataaaaacgttaattacagcaaaaawattttaagtgaccaaactgtccaacagtgggagaatgtttaagtaaatgatggtacagccatttcatgaaaaatgacttaactaacaagaattgtagcag

SEQ ID NO: 432619 - DNA, 201 bp, Homo sapiens
caggccgcagaagaacagaagacctcaggaatcatgtagaactggggggctttttctcctgagcagagaggcccaaggcatgctgtggagagacttcaccygccaccatttccaggtcaacaggactagagcgttgatggttttcaaaccctgttggaagaaagtgcccatggtttctctggttctgccagtttgacagtt

SEQ ID NO: 432620 - DNA, 201 bp, Homo sapiens
gttggctttgatgacattcagagacacctggttccaggcttgtttctgtatcttgtaggcacattttatttgcccttttgaatcatagagttcctaaatgrtatcttccagtatccctatgagactttacctagacataggggccattcagtatagagtgcagacagaccaagcaggatgcagaagttatggaatggcgtt

SEQ ID NO: 432621 - DNA, 201 bp, Homo sapiens
aggcttgtttctgtatcttgtaggcacattttatttgcccttttgaatcatagagttcctaaatgatatcttccagtatccctatgagactttacctagayataggggccattcagtatagagtgcagacagaccaagcaggatgcagaagttatggaatggcgttaaacagggagatgggctgggcagatgaggccttat

SEQ ID NO: 432622 - DNA, 201 bp, Homo sapiens
tcatgtagaactggggggctttttctcctgagcagagaggcccaaggcatgctgtggagagacttcacctgccaccatttccaggtcaacaggactagagygttgatggttttcaaaccctgttggaagaaagtgcccatggtttctctggttctgccagtttgacagtttatggaggcttttgaatcgtaatagcaatgt

SEQ ID NO: 432623 - DNA, 201 bp, Homo sapiens
agccgaatcctagaggctaacccggcaggtgggagggagaaagttgctttctgcaccaatagctgaggcgttcagggttgtccagggacgctaccctcacrtgtctggttccgagtgctgcgttcggctgtgctgggaagttgcgtagacagtggcctcgagaccctgcctgcctgaggaggcctcggttggatgcgaagg

SEQ ID NO: 432624 - DNA, 201 bp, Homo sapiens
aatgagtcatactcacaccactgcactccagcctgggcaacagagtgagaacctgtctcaaaacaaaacaaaccccagcagtccaggctggtccatgccaktcacttctgtccacaggcatggaaggccaaatgttggctttgatgacattcagagacacctggttccaggcttgtttctgtatcttgtaggcacatttta

SEQ ID NO: 432625 - DNA, 201 bp, Homo sapiens
tatgactccaattctggtggtgagagagaaattcagcgaacaacgttggaactgctgaaccagttggatggatttgattctagggtagatgtgaaagctaycatggccacaaaccaaatagaaactttggatccagcgcttatcagaccaggccgcattggcaggaagattgagttccccctgcctgatgaaaagacgaag

SEQ ID NO: 432626 - DNA, 201 bp, Homo sapiens
acataaagaaaaaatgttaaaagctctcccaggccaaggcaagatgggtcaaagtcagagtggtggtcatggtcctggaggtggcaagaaggatgacaagytctaacaactcaaggacaagaaaaagaaatatgaacctcctgtaccaactacagtggggaaaaagaagaagaaaacaaagggaccagatgctgccagcaa

SEQ ID NO: 432627 - DNA, 201 bp, Homo sapiens
aggaacaaatgaaaccattagaagaaaagcaagaagggaaaagatcaaaagtggatgatctgagggggaccccaatgtcagtaggaatcttggaagagatyattgatgacaatcatgccatcgtgtctacatctgtgggctcagaacactacgtcagcattctttcatttgtagacaaggatcttctggaacctggctgct

SEQ ID NO: 432628 - DNA, 201 bp, Homo sapiens
ggatgatctgagggggaccccaatgtcagtaggaatcttggaagagatcattgatgacaatcatgccatcgtgtctacatctgtgggctcagaacactacrtcagcattctttcatttgtagacaaggatcttctggaacctggctgctcggtcaggctcaaccacaaggtgcataccatgataggggtgctgatggatga

SEQ ID NO: 432629 - DNA, 201 bp, Homo sapiens
ccaatgtcagtaggaatcttggaagagatcattgatgacaatcatgccatcgtgtctacatctgtgggctcagaacactacgtcagcattctttcatttgyagacaaggatcttctggaacctggctgctcggtcaggctcaaccacaaggtgcataccatgataggggtgctgatggatgacatggatcccctggtcaca

SEQ ID NO: 432630 - DNA, 201 bp, Homo sapiens
agatattgccaaatattctctggtgtgaggtggggggcaatgggggatttgattatactttttattttgtatttatttatttacttgagatggagtcttgytctgtcgccccgactggagtgcaatgacgtgatcttggctcactgtaacctctgccccctgggttcaagcattctcgtgcctcagcctcccaagtagctg

SEQ ID NO: 432631 - DNA, 201 bp, Homo sapiens
tgccaaatattctctggtgtgaggtggggggcaatgggggatttgattatactttttattttgtatttatttatttacttgagatggagtcttgttctgtygccccgactggagtgcaatgacgtgatcttggctcactgtaacctctgccccctgggttcaagcattctcgtgcctcagcctcccaagtagctgcaacta

SEQ ID NO: 432632 - DNA, 201 bp, Homo sapiens
gaaagacaaaagagtagaaaacttacataaagaagaacagaaaacaatccaaatttgggcaaatatataaatatccaggtacaggaaggccaaatgcctcyaatcagatgaattcaaacaagactacaccaagacatattataatcaaactgttaaatatcaagaacaagagggagattctgaaaatagcaaaagtaaata

SEQ ID NO: 432633 - DNA, 201 bp, Homo sapiens
tgacatcattttattttagtgacacgagaaaggtagatatcactttcttctgacagcctcttctacccatgtctgtctgctgtttcattattcctttaaccaaggttttaattcttttgaaataaaaataactctcagaaattcaaatgaggcacaaagtagcagcagtgcattggtaaaggaatcagaatcaggatgata

SEQ ID NO: 432634 - DNA, 201 bp, Homo sapiens
cagtctccccagcactaccctactattaataggcacagatagggatagtgatgaagagctttactgaaatgatctggaaatacgaaaggctccaaaccaayccatttggtcagaacttaaaggaatttttttttactattttccatttttatatctgaattttctttagaatgacccattctgtcccattcctaatttcta

SEQ ID NO: 432635 - DNA, 201 bp, Homo sapiens
acctcgctacaactggatcagtctccccagcactaccctactattaataggcacagatagggatagtgatgaagagctttactgaaatgatctggaaataygaaaggctccaaaccaatccatttggtcagaacttaaaggaatttttttttactattttccatttttatatctgaattttctttagaatgacccattctg

SEQ ID NO: 432636 - DNA, 201 bp, Homo sapiens
ttactacttaatgtctcgtctaaaatgggataatactatctgcctcacaaggttgatgtggagagtaaatataacaatgtataaaaagtacttaagatagyattagacatataatgcctcaataaatgtcatatttatagaataaaattagttttattattattattaaagtcaacagaaactagctgcaaatagtaatca

SEQ ID NO: 432637 - DNA, 201 bp, Homo sapiens
aaaggcctttatttcctttccaaagtcatccacaccaatggctacccttaatccttatcattacctagaattgtctattccacctctaaaatcttaaattkcaaggtcagacactgaccatattcccttaaaattacatgtgtagatactgaaagaaggcatagaacttcatactatgcctattctcttggctcctccaag

SEQ ID NO: 432638 - DNA, 201 bp, Homo sapiens
gtattgcatcagtgttaatctcctggtttagatcatgtcctaatggaaatgtttgtactatttttgtgactcttaagaatgtgaaattatttaaaaatgaraagttagaattttttaatgtaaatcatacaggcagtcatattccataaaagtccaattaccattaatttgttttgggaagttatgccagataaactattt

SEQ ID NO: 432639 - DNA, 201 bp, Homo sapiens
aatagtctagacagagtaaaccagctttatcagttagtaatgaaggatacattctgaaagccaagttcctatatgccagccaatgtttaatcaaaaccaastttcatctgcgtataaacatatcaatgccaacatgttaaccagaaattaggtgaacacacagcattaaaaacaaaaacaaaagcaagtcctttcaataaa

SEQ ID NO: 432640 - DNA, 201 bp, Homo sapiens
taaaccaccaaaacaggattaatcacagctgatgccaggttgcaaagttagagcctgaaacaaagattcagatctggcttcaatggatattgcataaaaartcatgaagataagttcagagtcttgctgccaagccgaaaagaaaacaaagttattaagctaatttcaaacacatcagatatcagagtcaggagaaacaga

SEQ ID NO: 432641 - DNA, 201 bp, Homo sapiens
tctgatgtttcagaatcttatcttacattttaataacacattttaaagtatttcaaatgttataatatttgatcctcaaaacaactctatgagactgtcaygcagcagcaatataatctcaactatgaataaattttgcctagaggaaataaaaaagtttcttatcttagactctatgagaattaacaattgaaaataatt

SEQ ID NO: 432642 - DNA, 201 bp, Homo sapiens
tgagtctagagagaagattcatttagtgggaaggaaagagaacatgtgagttatcttgacatttctggaaggctattaatgggaggaagagtccaaatgtyaaatatggttccaggaaatttccaccaaatatgtggaataatgttctagttctatagctgtcgaaaattatagaatgagctacttcaaaaagtcataagg

SEQ ID NO: 432643 - DNA, 201 bp, Homo sapiens
aaagaaaatttggggccaatatttcttatgaacattgatgtgaaaatctcaataaaatactggcaaattgaatccagccacacatcaaaaagcttatcatyacataaacagaaccaatgacaaaaaccacatgattatctcaatagatgcagaaaaagccttcaataaaattaagcaccccttcatgctaaaaactctcaa

SEQ ID NO: 432644 - DNA, 201 bp, Homo sapiens
aatgaaaattgactgccttaaacatgtttattacccagtaagaaaaaaaataaagtaaataaataatttaaacaagaaattagaaaaactattaaatgagyataagggaacaatataaaggacttactaaaggtaaaatcagaaattaatttttaaactataaatagaaacgctaaagataaacccaagagctagtacttt

SEQ ID NO: 432645 - DNA, 201 bp, Homo sapiens
ggaaccatgacctcctcagatggacagagtaaagaactagtaactgaccttaataagacagcaatgtgtgagctctcagataaagaatccaaaatagtggytttaaggaaatctcatcaaagactgtagagacaaagaaggtcaccaagtaataataaaggggctgatccagtaagaggatataacaattataaatatgta

SEQ ID NO: 432646 - DNA, 201 bp, Homo sapiens
tcagtaaagtccccttcattcctcataactcctcctaaatgccaatttttctctttccttccctgcatcccttgttcctgtcagctaacttcacccattttagagaatcatcacagcctcttatgtttagcacagtcacaaacatttggactaagaagaccatggctgacctcccttgatttaaaaaaatgttaaaagttc

SEQ ID NO: 432647 - DNA, 201 bp, Homo sapiens
attttatattaccttatagattttataagactgcttttctctccatatctgtttatattacattatatttaatctttctcttacagctcaaacacagaacygtcctaacattctataaacatttataatctacttgtttgggggaacagcctgttccagtggcccagccaatgctgcttgcttctgattaaaataaaatta

SEQ ID NO: 432648 - DNA, 201 bp, Homo sapiens
taaccaacactgtctctagatattgccaaatattctctggtgtgaggtggggggcaatgggggatttgattatactttttattttgtatttatttatttayttgagatggagtcttgttctgtcgccccgactggagtgcaatgacgtgatcttggctcactgtaacctctgccccctgggttcaagcattctcgtgcctc

SEQ ID NO: 432649 - DNA, 201 bp, Homo sapiens
gagacttcatttacaaaatttatctgatgtttcagaatcttatcttacattttaataacacattttaaagtatttcaaatgttataatatttgatcctcamaacaactctatgagactgtcacgcagcagcaatataatctcaactatgaataaattttgcctagaggaaataaaaaagtttcttatcttagactctatga

SEQ ID NO: 432650 - DNA, 201 bp, Homo sapiens
ttcttggtatttgtggaggaaaaaataacttcatatataaaacaacatctttagaaaattattaacacaatgccccaaactgagacttcatttacaaaatktatctgatgtttcagaatcttatcttacattttaataacacattttaaagtatttcaaatgttataatatttgatcctcaaaacaactctatgagactgt

SEQ ID NO: 432651 - DNA, 201 bp, Homo sapiens
gtgtagtcccagctactcaagaggctgaggcagaaggatcacttgaacccgggaggcagaggtcgcagtgcactgagatcgcaccactgcattccagcctragtgtgtgtgtgtgtgtttgtatgtgtatgtgtgtgtgtaaaattaatgagtccaagaaataaaaataccgaagtgttttgtttaaattgaagaattcca

SEQ ID NO: 432652 - DNA, 201 bp, Homo sapiens
gagttaaggagtctatttcataccatcttgaaaacccactcaatatactatccattaagacaccttaacaatactaaccagccctgataaaaccaaggatycccatctctatctccctagtatccatgtggtccaatgttttacctatttttagatataaaccctcagagtgatcatgtcaatcctgataagcagcaaaaa

SEQ ID NO: 432653 - DNA, 201 bp, Homo sapiens
tacactctaagactatttttcataagtagaaaaaaaatgaaaagaatctcaggccaaaaaaatgctcaccactgacgttacaacagttaagggcttcattraagtcctcctcagttaaattaacattcaaacatttcaaggcatgctccaaatcaggtataccaatcttgccattatcgacatgtgacaagatgttagcag

SEQ ID NO: 432654 - DNA, 201 bp, Homo sapiens
aacaatcactaaaactaaataacttatttttaaatgtagtgagccctcccacattttatttggttaaaaatcaaaatggagcaagtactgtaaaaaaaaaatgaaagcagatctcctctgaaaaagattgcatatcaaaataagctgctgttgtcatgtttttattatacaatttatggtatttttccacccatgcttata

SEQ ID NO: 432655 - DNA, 201 bp, Homo sapiens
attgatgcagtctaaggccagaggagacaatgttattagaatacacacatacatgcacatgtacatgtacacacacacacacgcacgtgcacacacacacmtacacagtcacaagtgaagtaaggtgcaataatgtgacacagcagacaatctagggctataattatattaaggagactttgagtttaaacaaaatggcag

SEQ ID NO: 432656 - DNA, 201 bp, Homo sapiens
cacacacaatatatacacatacacacatatacacacacaaactctagaacaaattaaataggttttctctaattgattaggataggtaaagtaggaagctrggcagcagagggcattaaagccattaccaggtataaactttaagtagtcactggaaatcattatggctttctaaacaaacaagtgatgatcaaactgatg

SEQ ID NO: 432657 - DNA, 201 bp, Homo sapiens
cagactctccacggttgaaatggaggaataaaagttggctgagcgtggtggctcacgcctgtaattccagcactttgggagcccgaggcgggcggatcacraggtcaggagatcgagaccatcctggctaacacggtgaaaccccatctctactaaaaaaatacaaaaaattggccaggcgtggtggtgggcgcctgtagt

SEQ ID NO: 432658 - DNA, 201 bp, Homo sapiens
ggagaaataaaatccttacatacaagcaaacgctgagggattttgtcaacaccaggcctgccttgcaagagctcctgaaggaagcactaaatattaagaarggaaaaactttcttaatataagaaaaactttcttaataccagccactgcaaaaaaaaaaaacagtcgtatataaagaccaatcacactatgaagaaactg

SEQ ID NO: 432659 - DNA, 201 bp, Homo sapiens
gctctaaattcccccgtattttgtaatctccaattattaatctttggatccttgggctatttgtgcagatatatccataccccttagatattgtggtcttrccatctgaacctcgctacaactggatcagtctccccagcactaccctactattaataggcacagatagggatagtgatgaagagctttactgaaatgatc

SEQ ID NO: 432660 - DNA, 201 bp, Homo sapiens
tggatttcccagcctctagaattgtaagaaatgaatctcttttttttttttatacaaattatccagtctgtggtattctgttacagcaacacaaaacagaytacaacagtaggcaaagaggatcagggaagaatattccagggaatagaatatgcaaaagtcttgtagtgggaggaaaggggagtatctaaggaactaaag

SEQ ID NO: 432661 - DNA, 201 bp, Homo sapiens
ccgtattttgtaatctccaattattaatctttggatccttgggctatttgtgcagatatatccataccccttagatattgtggtcttgccatctgaacctygctacaactggatcagtctccccagcactaccctactattaataggcacagatagggatagtgatgaagagctttactgaaatgatctggaaatacgaaa

SEQ ID NO: 432662 - DNA, 201 bp, Homo sapiens
tcctagaaacttaaactctgcctttaacttaggctagtgactgggatatgccactcaacatctaaatgttaactgctaagcatacctggctctaaattccsccgtattttgtaatctccaattattaatctttggatccttgggctatttgtgcagatatatccataccccttagatattgtggtcttgccatctgaacct

SEQ ID NO: 432663 - DNA, 201 bp, Homo sapiens
atgccactcaacatctaaatgttaactgctaagcatacctggctctaaattcccccgtattttgtaatctccaattattaatctttggatccttgggctakttgtgcagatatatccataccccttagatattgtggtcttgccatctgaacctcgctacaactggatcagtctccccagcactaccctactattaatagg

SEQ ID NO: 432664 - DNA, 201 bp, Homo sapiens
atattccttactacttttgcaaattcttcaaattgtactttgtcaccttctgtgagaaaaaacacttttaatagaccaacctcattacgcaaaagtcagakccaataaagcaacctataaaaatgtaaaccatttgatgcactcctaagaatcatatttccttttcatatttttgaataaccaaaggattaattttatggg

SEQ ID NO: 432665 - DNA, 201 bp, Homo sapiens
ggagtctatttcataccatcttgaaaacccactcaatatactatccattaagacaccttaacaatactaaccagccctgataaaaccaaggattcccatcyctatctccctagtatccatgtggtccaatgttttacctatttttagatataaaccctcagagtgatcatgtcaatcctgataagcagcaaaaagggctca

SEQ ID NO: 432666 - DNA, 201 bp, Homo sapiens
tgtattcaggagacccatctcacatgcaaagacacacataggctcaaaataaagggatggggaactattcaccaagcaaatggaaagcaaaaaaaaaaaaacaaaaaaaaaaaactgggggttgcaatcctagtctgtgataaaacagcccttaaaccaacaaagatcaaaaaagacaaagaagggattaatgcaacaaga

SEQ ID NO: 432667 - DNA, 201 bp, Homo sapiens
tggagcccagcaagctaagaaccactgggttaaaattctcgctaccagcacagcagtctgaagtcaaactaggaggatcaagcttggtgtggggaagggcrtctgccattactgaggcttgttttcccctgacagcgctaaaaaggcctggaagttcggactgggtggagctcaacacagtgtggcaaagtggctgcagcc

SEQ ID NO: 432668 - DNA, 201 bp, Homo sapiens
aagtactatgaatattatatatttaaattacagcactctaagcaaaaatttcacacagatttcctacttgtttaaatgtttaataaattacaaaataaacrtttccaaaagaaaccaggccttctactttctaggaaatattaatgattgcaattaatcactgaataagtttctcaggaaaagttaagctcctccctaaag

SEQ ID NO: 432669 - DNA, 201 bp, Homo sapiens
tgtttatattacattatatttaatctttctcttacagctcaaacacagaaccgtcctaacattctataaacatttataatctacttgtttgggggaacagyctgttccagtggcccagccaatgctgcttgcttctgattaaaataaaattaatggggccaggtatggtggctcctgcctataatcacggcacttcgggaa

SEQ ID NO: 432670 - DNA, 201 bp, Homo sapiens
cctcacttcctagatgggatggcggccgggcagagatgctcctcactttccagactgagcagccaggcagaggggctcctcacgtcccagacgatgggcggccaggcagagacgctcctcacttcccagacggggtggcggccgggcagaggctgcaatctcggcactttgggaggccaaggcaggcggctgggaggtgga

SEQ ID NO: 432671 - DNA, 201 bp, Homo sapiens
ttatataaaatacgttatatattcagaaatatataattatatccatcaggtaatactaaccaataaaaatatatgggtataaaggggaaaagcaaatcaayttacagtagagaagtaaacgctgaaaaacaccaagaaaacgggtcaaaattcttccagtccctctcaagcatacataatatttttaacttttatttattt

SEQ ID NO: 432672 - DNA, 201 bp, Homo sapiens
gagacgctcctcacctcccagatggggtcgcggccgggtagaggcgctcctcacatcccaggcggggcggcggggtagaggctctccccacatctcagackatgggcggccgggcagagacgctcctcacttcctagataggatggcggccgggaagaggcgctcctcacttcctagatgggatggcggccgggcagagat

SEQ ID NO: 432673 - DNA, 201 bp, Homo sapiens
cctttctccctaaggggagaagttaatccccagccggtctattcaataaaatccttaattattagtctaaattgtccttcttgatctcttacctacctatmtactatctagtcccagaatttttcctaagaacattatacccattacttaattaaatgtaattaatgaatgggtattacattatacccattcactccacat

SEQ ID NO: 432674 - DNA, 201 bp, Homo sapiens
aggcaatactaaagggtagataaaacacaagttttacgaatgcttatgcaagaagttaatacagtaaactgtcatctggaatagacaaaaattaaggtttytatggtttaaaagaataataaatatagcataaatgaattgccaactttcaaaaatgaaaacataataaaatatttagcctaaaatataatgtatttttga

SEQ ID NO: 432675 - DNA, 201 bp, Homo sapiens
accattccattctctgtttttaaaaagagtttagattatacattctggtgtatttttgcataaaggcaaatttacattttaacacaactatttttaaaatktacttgatccttcatttcatcatcctatttctccttcatatcatgtctcataattctttctagattaagtcagttcatttgaacaattattgagagcata

SEQ ID NO: 432676 - DNA, 201 bp, Homo sapiens
tatccagtgccaagattaacaccagtaatatcccagaactcacatctgaagctgaaatgactcctgggggcacagagaagtgaaaatctccaagcagatgktaagaaaaaaggacttctatatccacaacacccctcccccaaactgccaggtaccatgaggaaaagtccccctgaaatcttcatttctacagtggaaaaa

SEQ ID NO: 432677 - DNA, 201 bp, Homo sapiens
atttacttgatccttcatttcatcatcctatttctccttcatatcatgtctcataattctttctagattaagtcagttcatttgaacaattattgagagcrtattagtgccaagaaccatgctaggcaccgagaatacaaaaataagaaagacacagtccttgctttctcaatatctattacatgcaaaggactgagttag

SEQ ID NO: 432678 - DNA, 201 bp, Homo sapiens
aataatcaaatgtccatgagccaatggaccaccaacaaagtaaagaatatccatacaatataatatagatttatttagccttaaaaggggatgaactaccratacatactacataaattaaccttagaaaccagaagtgtgatgtcaccaaaatggcagaacagaagcaatctggcttcattctcccctactgaaaaccaa

SEQ ID NO: 432679 - DNA, 201 bp, Homo sapiens
ttctttcttttttcttttcttttttcttttcttttcttttttttttcttttcttttctttctttttctttctttctttctttcttccttccttccttcctttcccttccttccttccttccttcccctctctctctctttctttctttctttttctttttctttttttttgaggtggagtctcactctgtcacccaggctg

SEQ ID NO: 432680 - DNA, 201 bp, Homo sapiens
cctcctggggtgcacttcccccaagcgtagcttctcctctcgtcccctaggcttgttgtaccattctgaagagcatctcggggaagggattgtcacatggwtggggagacccctggcatttggggtggtcacaggtgccaggattcctccccagttccacacaacaagggattgtttgaattcttcctgaccttcgagtgt

SEQ ID NO: 432681 - DNA, 201 bp, Homo sapiens
tttctttcttttttcttttcttttttcttttcttttcttttttttttcttttcttttctttctttttctttctttctttctttcttccttccttccttcctttcccttccttccttccttccttcccctctctctctctttctttctttctttttctttttctttttttttgaggtggagtctcactctgtcacccaggct

SEQ ID NO: 432682 - DNA, 201 bp, Homo sapiens
ctttctttcttttttcttttcttttttcttttcttttcttttttttttcttttcttttctttctttttctttctttctttctttcttccttccttccttcctttcccttccttccttccttccttcccctctctctctctttctttctttctttttctttttctttttttttgaggtggagtctcactctgtcacccaggc

SEQ ID NO: 432683 - DNA, 201 bp, Homo sapiens
tctttctttcttttttcttttcttttttcttttcttttcttttttttttcttttcttttctttctttttctttctttctttctttcttccttccttccttcctttcccttccttccttccttccttcccctctctctctctttctttctttctttttctttttctttttttttgaggtggagtctcactctgtcacccagg

SEQ ID NO: 432684 - DNA, 201 bp, Homo sapiens
aggaacccaggaatcagcatagacctcccactgggaccaaaccagcaacttctccacccatctctttctttcttttttcttttcttttttcttttcttttcttttttttttcttttcttttctttctttttctttctttctttctttcttccttccttccttcctttcccttccttccttccttccttcccctctctctct

SEQ ID NO: 432685 - DNA, 201 bp, Homo sapiens
ggtggaggaacccaggaatcagcatagacctcccactgggaccaaaccagcaacttctccacccatctctttctttcttttttcttttcttttttcttttcttttcttttttttttcttttcttttctttctttttctttctttctttctttcttccttccttccttcctttcccttccttccttccttccttcccctctc

SEQ ID NO: 432686 - DNA, 201 bp, Homo sapiens
caggaggcacttggggttgaagcagctgaactgggctttggtgccctggaacaaggtggaggaacccaggaatcagcatagacctcccactgggaccaaaycagcaacttctccacccatctctttctttcttttttcttttcttttttcttttcttttcttttttttttcttttcttttctttctttttctttctttctt

SEQ ID NO: 432687 - DNA, 201 bp, Homo sapiens
gacagagataagtagcccccaagaccagatgtgacagagaatccaacactgtcaaggccccaggtctccaagctggaaatggcatctacagatcaagaagrcaaaggcatgcttctgggtgaggcctggaccttctgtctcccagagaagccagccaccctttacctgggagagctgccaacatcctttacctgggagaga

SEQ ID NO: 432688 - DNA, 201 bp, Homo sapiens
gcagttagggagtgcttgtcaggataagctctggctgctggtggtgagccatttaagagttgaaagtggtgtcaactgatgggagggaacaaaagagttgraagtgggagagtgaccatgtaaacattttattttaaatgggtcactttgaagttgagtggaaagtaaatggatttaaaggggcaaagattggaggcagtg

SEQ ID NO: 432689 - DNA, 201 bp, Homo sapiens
gatgggccattccacaggcacatggagcatgttctcaaagacaccaaaggaaggtgctctaaaacaatttgttacttaacattttattaaaacaaaagcarcatgagggaaatcacaattatgtttaccttccctgtagttacttgtcagttcggtatcattttggactatttttctgtttagtgacatacttgaggaccc

SEQ ID NO: 432690 - DNA, 201 bp, Homo sapiens
tagttgaattggaattgttgcctcatttgttgtaaaatagcttaactgtctctgccatgtttaatatgattgtgaaattggttttttttgtttgttttttyctttgctgtcctgtttagagtccagaaaaccttctagacaatgatccctcatttttctgtaggtttactgttgtagttgcaactcagcttcctgaaaggt

SEQ ID NO: 432691 - DNA, 201 bp, Homo sapiens
aacagagcaaaagcctgtctctaaaaagaaaaaagaagggaaacagagttgtcatacttatgcatgaaatttggatagttttacagtatgtttgcctgttscataaattgggggattatattgtgaccaagttttttctaattcaagttaaatgctttgtttttaaaaagaaccgagctgaagctgccatggaattcttac

SEQ ID NO: 432692 - DNA, 201 bp, Homo sapiens
agcagaagaagcaagagctgagggcatcagtgaaacaggagataaacaacagcaaaaatattttatatagtttgacaagtagcaacctgccaggcaaactsttttccagcacagccaggctcaggccccgggtggtggatccccggctaggatgcactgaagacacagccgcagctttaaacgtggccaccagggggcgag

SEQ ID NO: 432693 - DNA, 201 bp, Homo sapiens
acctcaatattttcatgcaaaaacatcaaacaaacccaatttgaggatatcttactacctaactagttgtcttccttccccctccctcccttcccctcccytcccctccccttccctaccctctcctccccttctttttttttgagacagggtatccctctgttgcccaggctggagtgcaatggtacagtattggctcag

SEQ ID NO: 432694 - DNA, 201 bp, Homo sapiens
attacagtctgtaatcacaatatagtttgttttatactgtgaatgaaatatgcatgctattacaaacaacttttcctttatagtcagtaagctttactttyttttcctttattctgttcactttagtttcttccttcaaagaagcagtatcggcaaggtaaacaattagagaatatagttggatgtgagcatctaatgatg

SEQ ID NO: 432695 - DNA, 201 bp, Homo sapiens
attgtgtttgtcagtaacaacaacagtgagtaaatataagggaaaccagcaattagttcatatttagttttgatgccttttctttggatcgtagtgccagyttctgccaggcacagcacagcttttttattgatatataccaagaagtcttgttatctttgcttacttggtgggttagagtagaaagtgataaaaataagg

SEQ ID NO: 432696 - DNA, 201 bp, Homo sapiens
gaacaaggtggaggaacccaggaatcagcatagacctcccactgggaccaaaccagcaacttctccacccatctctttctttcttttttcttttcttttttcttttcttttcttttttttttcttttcttttctttctttttctttctttctttctttcttccttccttccttcctttcccttccttccttccttccttcc

SEQ ID NO: 432697 - DNA, 201 bp, Homo sapiens
ccttgaaggtgggatcacgggctgtggggtgctagttggagagtcacactgcctggggtgagccctgagtgccatgtccctccatctggtcctctgagagractcacctgcctttcagagatgcagatgggctcccggagcacaatccaggtgacactctcactgagtgggggagtcgtcagagagcccgggtaggtccag

SEQ ID NO: 432698 - DNA, 201 bp, Homo sapiens
cgaggcaggaggctcacctgaggtcaggagttcgagaccggcctagccaaccatggccaaggtggtgaaactcgtctctactaaaaatacaaaaattagcygtgcgtagtggcaggtgcatttaatcccagctactcgggaggctgaggcaggagaatcacgaacctgggagatggaggttgctgtgagccgagatcctgc

SEQ ID NO: 432699 - DNA, 201 bp, Homo sapiens
ggaacaaggtggaggaacccaggaatcagcatagacctcccactgggaccaaaccagcaacttctccacccatctctttctttcttttttcttttcttttttcttttcttttcttttttttttcttttcttttctttctttttctttctttctttctttcttccttccttccttcctttcccttccttccttccttccttc

SEQ ID NO: 432700 - DNA, 201 bp, Homo sapiens
gggaagcagttagaagcaaaatgcagcagtcaataagcccctccttacttcacgttagttgggccagcaagatagtagagaggactgattcatttggcctrttcttgaaacatgttacttagagacacaccaggattcttttttttttttttttcagggacaaggtctcactttgtgacccaggctagagtgcagtggcta

SEQ ID NO: 432701 - DNA, 201 bp, Homo sapiens
cccttctatctgatttggaatactggttggaatttcatttcttcctttctttctgtttgagagggcctcgctctgtcgcccagcctggggtacagtggtgygacctcagctcactgcaacctctgcctcctgggttcaagcgattctcctgcctcaggctcctgagcagctgggattacaggtgcacaccactatcaccca

SEQ ID NO: 432702 - DNA, 201 bp, Homo sapiens
ctttgttagatcccaagcagtattgaagatatatttaatgatgatcgctgcataaatatcaccaaacaggtaacaacaacaaaagtaaaaacattgctgcwaaaactttgggtcaaagtaaaacgccacttaatgttaattttttcttattcttttagactccatcattttggattttagctcgtgccttaaaggaatttg

SEQ ID NO: 432703 - DNA, 201 bp, Homo sapiens
actcatttttttttttttttaaatagagacagagtctcgctctgttacccggggttggtgtcaaactcctggactcaaacaatcctcccgcctcagcctcygaaagtgctgtgatcacaggcgtgagccaccgcctctggcctacttttcttatttttaaacatggaacatatatttaataatcaggaacaattcattaaa

SEQ ID NO: 432704 - DNA, 201 bp, Homo sapiens
caagggtggtgtgcaagggtgtcagcaccccaggttggggctgcagggatctcacctcggcctgagcaggcgcgcggttggaattggccaggacagaacaycaagtggaaaaacacgtttacgacaaagagaaggcgttttgataacaacaacgatttatttctgtatttcttctctatccccttttcctccccgtgtgca

SEQ ID NO: 432705 - DNA, 201 bp, Homo sapiens
ccttgaaccggaccatgtagagcgcatctgtcagacgattcatgctggggtgctcgtctcctgtctgtcagggagagggcagtgtgagcccagagcccacygtgttctagaactaggggcagtgccaggcctcccatgcccctccaggccccagcaaaccaccactcacctccaaaaaaacaccaaccacagccaggccat

SEQ ID NO: 432706 - DNA, 201 bp, Homo sapiens
ggaagaaatgggtgaaaaataatgatcatcaaaatgaaagttattattcatgcaagatttggggggagtctggcctcctgtattcaaaatctcatttaagktcaaaagacacttgggacccatttatccccactgcacaggtgagcacactgaggatttgagaggtaaagagtagatctcacagccagttaagtggtcgaa

SEQ ID NO: 432707 - DNA, 201 bp, Homo sapiens
cagctgttgctcagtccacagatcactctccccacagatgagcacgccagtgggtatgtgtccagcgctagccatgaggggacactcccaagcctttgcarcagcagcagctatagggtgaccatgggattggaagacagccctctgcagaaggagcttcagggggatcagatcttcacaaccatcccacctcctgaggcc

SEQ ID NO: 432708 - DNA, 201 bp, Homo sapiens
tgcagctggaggaatgtaggttacactcatagactgccaaactggaaactgccagggtccaggcatgattccatcctgcagggccgaggagaggcagcagmagaagttgatgaattgcacttgccagaatttgcactcaagccctgggttagaaggtggattcaaactaagtgatgcctggtgctctctaagcctcaggaa

SEQ ID NO: 432709 - DNA, 201 bp, Homo sapiens
gatcctcccaccctggcctcccaaagcactgggattaccagtgtgagccactgagcctggccaagtggcaggggtctttctgttacataatgctgtgtggrtagagtgaaaagtcataaatcctagctctcctgccaactcactttgacagactgtttcctctttgggcctcagttattgtatctatataataggattagc

SEQ ID NO: 432710 - DNA, 201 bp, Homo sapiens
ctgcaaagtggggaggggttcccctccagggtctttccactacccccagaaaccacaggtttctggatttagtgctcgggccagaccttcgaaggcttggyggcctccaaaatatcttttcagctcacctggccctgcctggaattgtaccattagagccacgctctccaggaaagaaatcatttccaagcattgacttct

SEQ ID NO: 432711 - DNA, 201 bp, Homo sapiens
tgacctcatgatccacccgcctctgcctcccaaagtgctgggattacaggcgtaagccaccgcgcctggccgaatttgcctttctaacaagtttccaaagkgatgttgatgccgctggtccaggaccacactttgaaaaccaatagcttaaatgaattacaccatggcttcctggtctgatatatctggtttccaccctcc

SEQ ID NO: 432712 - DNA, 201 bp, Homo sapiens
aagctctcgcctgctaacagacacctgatatttttctccaggccccctctcatttatttttgctcactggtacttctccaaacccctgcatcatgacctaygacctctgacctcacggggtgccaggctcaaggcaggcgcctcaaagactgtaaaactggatgctgatgccctgacctgagcccctaggagttgccatag

SEQ ID NO: 432713 - DNA, 201 bp, Homo sapiens
tgagctaccatgcctggcctgggtcaactttaatttggctttttctcacaccttcagttccatgtaactgcctccaggcccttgcccttgctgttccctgyttggaatgccctcttctttttcttctttttttttttttggagatgaagtctcgctctgtcacccaggctggagtgcagtggctcgatctcagctcactgc

SEQ ID NO: 432714 - DNA, 201 bp, Homo sapiens
atctcctgtagactgagctattagcttgtggcattttccttctagatgttgaatgttttaaaggcagatttaggtctaattaatatttgaagtgttcaaartgtaaatgcatcatacagacctaagaaaactattttctaagcaaatccaaattaaagcctgattcagaataatttattttaaactaaaaccaagtagtct

SEQ ID NO: 432715 - DNA, 201 bp, Homo sapiens
ctcctgacctccccataaccttcagtacaccccctgggagctcagaccctccaccctgcactcaaccccagtgcctgccttggcccagtattttcccaccyacgagccctggtcgttgttgtgccctccacctggtgcgtcctctgtcttccacccactggctccagccggcccaatctgattcatcttagcacgtggcct

SEQ ID NO: 432716 - DNA, 201 bp, Homo sapiens
aatcttttatgcctgtgtgtatcctttaaagtttggtcaaccacactactgtttagatttcctttaataacaaaaagaattataggcttttatgttgataygactcagtaagctaactgcatctgttttgggtcactttaaaacacctttgcttttgaaaaggaaaagtttctttacagaattgagtatgtaactcttgaa

SEQ ID NO: 432717 - DNA, 201 bp, Homo sapiens
taaatatagcggtctggcgatatttaatatagatccttcctaaattacaaatgcattcagaacaaatatacctttctccttttttattataaaacagatasaaggtaaaattcaaatgcagcagtagggtgtcctttgagaatcttttatgcctgtgtgtatcctttaaagtttggtcaaccacactactgtttagatttc

SEQ ID NO: 432718 - DNA, 201 bp, Homo sapiens
ttctactttggggcgtttttgaaaatttcaataatacaaagcttaaagtcattacatatatcaagagtacaattcataaacctctctcctttaggactacytatccataataatgatgaaaactattatttttagagccatatcaggcattgtgctagagatgcactttatacagatgtcacatttaatctgtagaacaat

SEQ ID NO: 432719 - DNA, 201 bp, Homo sapiens
tgtctctgtggtctcctttagttgccgatatggagctgctgagccacataccattgctgcattcttggggggtgagttccatatatgagaagactcacctkttgttacatagtacagttactattttaatacaaagttttgtcgtctagctattttaattagggaggtcagtgaagcaggatgttatatttctttcttttt

SEQ ID NO: 432720 - DNA, 201 bp, Homo sapiens
tgcgccactgtactccagcctgggtggcagagcgagatcctgtctcaaaaaacaaagaagttttacattggagatgaacagttttaatgtatttaactttycttggacttgacttccaggagataagtcatgttcttcagtaatgtattttttcaggtcctctgtcacagaagccgaaatcatagatccctctaggggagc

SEQ ID NO: 432721 - DNA, 201 bp, Homo sapiens
actaggttttagttggtctctgattataggtttgtgatatgtgcaaatattggtctcatactttgttatttttgttcttcagtttcatacatattttgacwagaacatctgaaactagattaaataaaggagttggccattaattttgaatcacatttattttaatgaaaactaacttttatttttaggagtatctaacta

SEQ ID NO: 432722 - DNA, 201 bp, Homo sapiens
ttaagctcaaagcaaaattgaatgggaaatacagaattaccacatacgcctaggaggcagagttttttttcatacttcatgataaacttaatatttgatcmcttaactctgtgctatgaactatatgtattaagtaatttaacacacacacaaggttcacaacgaccttatgagagagagagagactgttaccggccccat

SEQ ID NO: 432723 - DNA, 201 bp, Homo sapiens
tgtccttttttaaaaaaaatttcatatgcaactgtattttcagtttcttacaaaggatttccttgatggggaatgggagattaattttttttccttatggrgttgtatggtagggcaaatggatgcttttaaatttaaatctagcagttcctcttttgatcctgataattttaattaaaatgaaattcaataaatgtcatt

SEQ ID NO: 432724 - DNA, 201 bp, Homo sapiens
gttccccagtgaagaaccaccttttgttttttaagtttaactatttgcaaaatagtgttcgattctaaactattacagggggatgttggttgaatatgtayagaagaaaacttttttctgtcattttccatagtttgttactaagactcacactgagtttaatttagtggaataggaaagccacaagaaatatgctggcca

SEQ ID NO: 432725 - DNA, 201 bp, Homo sapiens
tattctaattttattctaagcttatctaggtaattataatttatatattatatgaaacttaatgtatgcataaagtcatatttaggtcactgagtccattktgtgatatgtatgagttaaagtcagtatgttactacttcagtagagattgtgtgactccagttaatagtcctgaaactcaagtatatagtaaattcagcc

SEQ ID NO: 432726 - DNA, 201 bp, Homo sapiens
taactactgttcccaaggaaactgttgtaagagaccaaagtcgtttataggcagacctccatcagctgagggtttatataagccctttacttataaaattytaatcttagatgatcataaaattttcatccagtattcaaaacagtgctctttattgactcaagaaaacatttttactatgagccaagcactctgctaatg

SEQ ID NO: 432727 - DNA, 201 bp, Homo sapiens
catattctaattttattctaagcttatctaggtaattataatttatatattatatgaaacttaatgtatgcataaagtcatatttaggtcactgagtccaytgtgtgatatgtatgagttaaagtcagtatgttactacttcagtagagattgtgtgactccagttaatagtcctgaaactcaagtatatagtaaattcag

SEQ ID NO: 432728 - DNA, 201 bp, Homo sapiens
tccatcaaccatatatgtcaggtgtcttctacgtgccatactttgatggagaaaacaggcgtttacggtccatctggttcttctaggcgattcctccatayatttgacagctgtctgggcccttatggagcatacagtggagtggaaagatggatgctcagcaaacaaaaacaaatgaagccaggtacagtggcttgtgcc

SEQ ID NO: 432729 - DNA, 201 bp, Homo sapiens
ataatagccttctgattctgggttaattttaattaatttaaaagatataaatattttgtgtataatagtgttgagtatatggtgatgatataaaagataaygtaaacatattctaattttattctaagcttatctaggtaattataatttatatattatatgaaacttaatgtatgcataaagtcatatttaggtcactga

SEQ ID NO: 432730 - DNA, 201 bp, Homo sapiens
ttagtaagtataatagccttctgattctgggttaattttaattaatttaaaagatataaatattttgtgtataatagtgttgagtatatggtgatgatatwaaagataacgtaaacatattctaattttattctaagcttatctaggtaattataatttatatattatatgaaacttaatgtatgcataaagtcatattta

SEQ ID NO: 432731 - DNA, 201 bp, Homo sapiens
tttgttgtattagattatataatactagatcacaagtttgatgctgggtatttgaacatttattattctgttctactttggggcgtttttgaaaatttcartaatacaaagcttaaagtcattacatatatcaagagtacaattcataaacctctctcctttaggactacttatccataataatgatgaaaactattattt

SEQ ID NO: 432732 - DNA, 201 bp, Homo sapiens
atatgggatatgattaaatactgtataaagcttgaaaagcaaattgctagaggcaggtacttattggatttctgttaacacctttgtcagatgatagcatsatgagcttttattttccttctggagaagttaagaagccacgccttgtatagttttaaggactaatgataagccgtatttcttcttaagatttaatattct

SEQ ID NO: 432733 - DNA, 201 bp, Homo sapiens
aaaggcttgacggtcagttaattgaaaattgccattaatacaggattttcagtttttaaattttaagtaatttaggaagtttttttgtctgaagactttgkgtgtgaagtcttgagtcacatgtacattgacaatattggtttaaatactcattttgatctgtgttaaatgactgtaatggagttaagaattttgccatct

SEQ ID NO: 432734 - DNA, 201 bp, Homo sapiens
catgcctgtatcaaagcatgtaccccataaatatatacacctaagtacccacaaaaattgaaagtaaaaaattttaaaacaaaaaacagaaataaaaaaaktccaagaagttctctttatggactttttctaaacaaatagaaataatgacataacactataaggcgtatatgtattttttcccacttccatattaattaa

SEQ ID NO: 432735 - DNA, 201 bp, Homo sapiens
tgttgcccaggttggagtgcagtggcgagatcatagctcactgcaaccacaaactcctgggctcaagtgatcctcccaccttagccttccaggtagctagkactacaggcatacaccaccatgcctggctaatttttaatttttttttttctttttgtagagacagggtcttgctatgttgctcaggctagtctcaaactc

SEQ ID NO: 432736 - DNA, 201 bp, Homo sapiens
tgttagttgctatctgtacctagggtttgtcaatgttgagcttttccagttagaacaaattgtgttctaaaggaatcttggttttacttttactaaaactytatagttgacttaagatttctgcattttactatatgtaaatcgtaccttaataaaacagtgaaaaaacctgtgggccctgtgtccatttaaaaattaaag

SEQ ID NO: 432737 - DNA, 201 bp, Homo sapiens
gtgcagtggcgcaatctcggctcactgcaacctctgccttccggtttcaagcgtttctcctgcctcagcctcctgagtagctgggattataggcgcccacsaccacgccaggcaaatttttatatttttaatagagacaaggtttcaccatattggccaggctggtcttgaactcctgacctcatgatctgctcacctcgg

SEQ ID NO: 432738 - DNA, 201 bp, Homo sapiens
catttattagtaaaaaatggggaggaaccttgaaggtgggatcacgggctgtggggtgctagttggagagtcacactgcctggggtgagccctgagtgccmtgtccctccatctggtcctctgagaggactcacctgcctttcagagatgcagatgggctcccggagcacaatccaggtgacactctcactgagtggggga

SEQ ID NO: 432739 - DNA, 201 bp, Homo sapiens
tctattgaagaccacaagaggaggaaggataggttgttagttgctatctgtacctagggtttgtcaatgttgagcttttccagttagaacaaattgtgttstaaaggaatcttggttttacttttactaaaactttatagttgacttaagatttctgcattttactatatgtaaatcgtaccttaataaaacagtgaaaaa

SEQ ID NO: 432740 - DNA, 201 bp, Homo sapiens
gtagctgggactacaggtatgccactatgcctggctaattttgtttgtttgtttgtttgagatggagtttcgctctttcacccatgctggagtgcagtggygcaatctcggctcactgcaacctctgccttccggtttcaagcgtttctcctgcctcagcctcctgagtagctgggattataggcgcccacgaccacgcca

SEQ ID NO: 432741 - DNA, 201 bp, Homo sapiens
ttagtaagaaagttgctgtaagacattttcatgttttgcatgttttcatgtttggcatatttccatttgcttatgttcatattttgctttttttttttaarcagcacttcactacgcttagcagatgtcctctggaattcccagattcctcttttgatctgtaggacatatggactagttggttatatgaggatcattata

SEQ ID NO: 432742 - DNA, 201 bp, Homo sapiens
acttgagcctgggaggtcgaggctgcagtgagccatgatcatgccactgcactccagcctgggcaacagagaattggttattggaattgttaggggtgtayttgtgggttttatattttttctctatcatggaaatgtttagaattatctttctttaacgtttctccttaatatgacagactaaagtttcacatccctctt

SEQ ID NO: 432743 - DNA, 201 bp, Homo sapiens
ttttttttttttttttttgagcttgagctcaaattcctgagctcaagcaatgcaccctcctcggcctcccaaagtgttgggattacaggtgtgagccaacrtgcctggtcaagagtttcagatttatggctgggcacggtggctcatgcctgtaatcccagcactttgggaggccgaggcaggtggatcacgaggtcagga

SEQ ID NO: 432744 - DNA, 201 bp, Homo sapiens
ggttgagtatcacttacctaaaattcttgggaccagaaatgttttggatttcgattttttttcggactttggaatatttgcatatacataatatcttgggratgggacccaagtctaaacacaaaattcatttacgtttcatacttaccttagagacatagcttgaaggtaatttgacacactacgttaaataattttgtg

SEQ ID NO: 432745 - DNA, 201 bp, Homo sapiens
cgggttttcgccatgttggccaggatggtctcgatctcctgacctcgtgatccgcccgcctcagcctcccaaagtgctgggattacaggcgtgagacaccrtgctgggccatgagtgagttctttactggtgatttgtgagattttggtgcgcccatcaccagagcagtatacactgcaccatatttgcagtcttttatcc

SEQ ID NO: 432746 - DNA, 201 bp, Homo sapiens
acaggtgtgcaccaccacagcccagctggaactcttacattctttatttttccatttatttcattatttactattcttatatctttttaattaaaaaaaawttttttttactaatttatttaatagagacatggtcttgctatgttgccagggctggttttgaactcctgggctcaagcaatcctctccagtcacccaaag

SEQ ID NO: 432747 - DNA, 201 bp, Homo sapiens
actgttccttttgctgtacaaaagctctctagtttaattaagtcccaactatttatcttcgtttctattgcattcacttttgggttcttggtcatgaaatmcttgcctaagccaacatctagaagggtttttccaatgttatcttctagaatttttatagtttcaggtcttagatttaagtccttaatccatctcgagttg

SEQ ID NO: 432748 - DNA, 201 bp, Homo sapiens
caccacgcccagctaattttttgtattttttagtagagacagggtttcaccatgttagtcacgatggtctcgatctcctgacctcgtgatccgcctgcctyggcctcccaaagtgttgggattacaggtgtgagccactgcacctggcacatctaacataatttaagaataaatgaaatagggctgggcacggtggctcac

SEQ ID NO: 432749 - DNA, 201 bp, Homo sapiens
atggaaatgtttagaattatctttctttaacgtttctccttaatatgacagactaaagtttcacatccctcttgtccaaagatgtactttctttgagactrcagcctgtggaaatgcttgcttttcagtgtgttcttgacctgcttatgtaaatgcagttatgtacctttgcatctattatttagtaagaaagttgctgta

SEQ ID NO: 432750 - DNA, 201 bp, Homo sapiens
tggtaaagcttttgcagaagtcacagtaataagccctatgtcgagatcttaaatgcatctaacttaacttaaatgcatctaatataattttttttttttttgagacggagtctcgctctgtcgcccaggctggagtgcagtggcgcaatctcggctcacttcaagctccgcctcctgggttcacgccattcttctgcctca

SEQ ID NO: 432751 - DNA, 201 bp, Homo sapiens
ggtttcgagctcctgggctcaagcaatcctcctgccttagcctcctaagtgttgggattaccggagtgaaccaccttacctggctttctttttttttttttaatacttaattttttttaagagaggaatgtctcactctgttgcccaggttggagtgcagtggcgagatcatagctcactgcaaccacaaactcctgggct

SEQ ID NO: 432752 - DNA, 201 bp, Homo sapiens
gcatgaaccgggaggtggaggtcgcagtgagccaagatcgtgcaactgcactccaacctgggcaacagagcgaaactccgtctcaaaaaaaaaaaaaaaaacacacagtggggtctcactgtgttgctcaggctggtctgtctcaaattcctggcctcgagcaatacttccacctcagtctcccaaaggactgggattaca

SEQ ID NO: 432753 - DNA, 201 bp, Homo sapiens
gaatcataaagggatgctggattttgtcatgctttttctgcatctattgagatgatcatatgatttttttttaattctttttttcttttttttttttttttgagatggagttttgctctgtcaccagggctggagtgcaatggtgtgatctcaaatcactgcaacctccacctcctgggttcaagcgatcctcccacctca

SEQ ID NO: 432754 - DNA, 201 bp, Homo sapiens
gaatgtgagctcctggatcagataacaccccaggctcagagttccactggtcccttccatgatgggtgaccagggtagggctttggccctgtggcctcctyaagcaggaggacaggacagtccagaagtccctctttcttgcccggtcttatcaaagaggcaagacctgggcactggctaggagtctgggagtagtagctg

SEQ ID NO: 432755 - DNA, 201 bp, Homo sapiens
ggcttgaatgtgagctcctggatcagataacaccccaggctcagagttccactggtcccttccatgatgggtgaccagggtagggctttggccctgtggcytccttaagcaggaggacaggacagtccagaagtccctctttcttgcccggtcttatcaaagaggcaagacctgggcactggctaggagtctgggagtagt

SEQ ID NO: 432756 - DNA, 201 bp, Homo sapiens
tccagtagtgccggctggcaggcaggaggcacttggggttgaagcagctgaactgggctttggtgccctggaacaaggtggaggaacccaggaatcagcayagacctcccactgggaccaaaccagcaacttctccacccatctctttctttcttttttcttttcttttttcttttcttttcttttttttttcttttcttt

SEQ ID NO: 432757 - DNA, 201 bp, Homo sapiens
tttacagacaacaccaacacaaaccttttcaaaatcatttacttcttcacgggcaatatgactagccttctaccaaatttgtgggtgtttcctttcatgamgtccataggtatgagaaactaagcagtgaactctcatctgctgccttttgaccttcctactttcccggagtgtattttattatcccttatattttacctg

SEQ ID NO: 432758 - DNA, 201 bp, Homo sapiens
atctattatttagtaagaaagttgctgtaagacattttcatgttttgcatgttttcatgtttggcatatttccatttgcttatgttcatattttgcttttwttttttaaacagcacttcactacgcttagcagatgtcctctggaattcccagattcctcttttgatctgtaggacatatggactagttggttatatgagg

SEQ ID NO: 432759 - DNA, 201 bp, Homo sapiens
cctgccaccacgcccagctaattttttgtattttttagtagagacagggtttcaccatgttagtcacgatggtctcgatctcctgacctcgtgatccgccygccttggcctcccaaagtgttgggattacaggtgtgagccactgcacctggcacatctaacataatttaagaataaatgaaatagggctgggcacggtgg

SEQ ID NO: 432760 - DNA, 201 bp, Homo sapiens
gaacacattaatctttctatgatcttccattgtgcacacagagcagccaggcccagaacattcatgtgtacaaacacacacacagccctgcagactacatmtgacacacgcatatgctctctcacacacaaacccctctgttggagacccaagtttgcataaaggaccacagcaaaacacatgcccatgcacacacacaca

SEQ ID NO: 432761 - DNA, 201 bp, Homo sapiens
gaggggagaaggaggaggaaggaaccagttattaatacttccttacacaagaaactctagtaggtttcttcctcgccccattccaccactctacccagtcrtaaggcccagtcataaggacgaaaatcccttcaatgaacagcactcctgtctaggaatttatcatgaaagaatctggactctaatcccagggcaaagagg

SEQ ID NO: 432762 - DNA, 201 bp, Homo sapiens
cagttcacacacagaatgtgctgccattcacggggcactcaatgtgtgtttggcactctgctggcatcaacccgtctgacctctggagtgacccacagtgrgtgagtggcagagccccaccatctcattcctcttttcactggcttcctgcgccctccggcctgggcattctgggtgggggagggagccccagccaggcct

SEQ ID NO: 432763 - DNA, 201 bp, Homo sapiens
cctggaagcaggagcggctgagcctgcaggctaagcaattggataggtctgcagatgccaccctccaaagcatgcctcacctgggaccctatagtgtgggytcctagagagggagctccctccgtaacaccccttgaccttggaccccttagcctcctcccccagttcacacacagaatgtgctgccattcacggggcact

SEQ ID NO: 432764 - DNA, 201 bp, Homo sapiens
ccttcctggacaggcccaggtgcctccagtgccgcctcccccagaaatggcctcttctgagggccccacttgtgctggctttgtaactttcttgccttgayacccagtgagctggggccatgcacgaggcctcctgggactgatagaatttccagctgaaagggatctggaggtggagggagccccagctaggcttgaatg

SEQ ID NO: 432765 - DNA, 201 bp, Homo sapiens
gtctgggactgacagaggacagctctctatctagctgtcctccccgctcctgcccgatttcccatggagggtgggaccctgcctcccaggacccccattaycactgacagttaggcctaccatgtctgaaaccctgatccagggctaggttgaagagactattttgtttagtctgcatagtagcccatgagggacagaact

SEQ ID NO: 432766 - DNA, 201 bp, Homo sapiens
gagtcttggagaagttaggtaatttgcccagagttccccatatctttgagccaggatgtaaactaaggctcttctggctttttcggaggtactcagttacrtcctgcttccaagcttttcggagaagaaacagggtaacagtccttataaccaacttaggttttcttgtaaattcttggagttcttgtgtttctaatgcag

SEQ ID NO: 432767 - DNA, 201 bp, Homo sapiens
aaccgagctgaagctgccatggaattcttacaagaattaaatagcgatgtctctggaagttttgtggaagaggtatatatgtacacacattattatgtctktgctgaaatacaattttttaaataattcaaagccccagaaatttagaattttgaatctttgtgtcatttatgattagttgaattggaattgttgcctcat

SEQ ID NO: 432768 - DNA, 201 bp, Homo sapiens
gtgaccaagttttttctaattcaagttaaatgctttgtttttaaaaagaaccgagctgaagctgccatggaattcttacaagaattaaatagcgatgtctytggaagttttgtggaagaggtatatatgtacacacattattatgtctgtgctgaaatacaattttttaaataattcaaagccccagaaatttagaatttt

SEQ ID NO: 432769 - DNA, 201 bp, Homo sapiens
aactaatttttgtaatcttgtaaatcttcatatgtttggtagtttaagaacttagaggtgtactgtctgtgtttatacattgcatcctgtattaaagctaratcttgagtaatgttaatattcattctggttaacaaattttttttttttgagacggagtctcgctctgtcccccaggctggagtgcagtggcgcgatctc

SEQ ID NO: 432770 - DNA, 201 bp, Homo sapiens
ctagtacagcatctggcaaatagggcattaataaatgttacccatcattactgtctttattgttattaatacaaaggagtagtcgttattcctttattcayggaatatgggcacttcctaagctcttgtattgatccgtaggtgttagcatataattaacaataatgcctgttgtttgtgatgtcttttaggcttagtcta

SEQ ID NO: 432771 - DNA, 201 bp, Homo sapiens
ggaagtgagataatataggtaaagtgctagtacagcatctggcaaatagggcattaataaatgttacccatcattactgtctttattgttattaatacaawggagtagtcgttattcctttattcatggaatatgggcacttcctaagctcttgtattgatccgtaggtgttagcatataattaacaataatgcctgttgt

SEQ ID NO: 432772 - DNA, 201 bp, Homo sapiens
tatttctcaaccttatcaatgtggtcaaagacaaagcgattgggaagttgttctagataaagggagactaaagagactcagcagctaattgcagtgcatgstctgggtttttttttgttgttgttgttataaaggccttattaggacaattagcaaaatctgaacaaagtatgtggattagataatagtattgcagcaatg

SEQ ID NO: 432773 - DNA, 201 bp, Homo sapiens
attaatcactctattagaatgttcattgggtaatatactttaaagcactcctgtagaagttgatgtgaggcttttcagatgataattcagttttcttggtraagcttttgcagaagtcacagtaataagccctatgtcgagatcttaaatgcatctaacttaacttaaatgcatctaatataattttttttttttttgaga

SEQ ID NO: 432774 - DNA, 201 bp, Homo sapiens
ttaaatcaggtaacagggaaggcacattaatcactctattagaatgttcattgggtaatatactttaaagcactcctgtagaagttgatgtgaggcttttyagatgataattcagttttcttggtaaagcttttgcagaagtcacagtaataagccctatgtcgagatcttaaatgcatctaacttaacttaaatgcatct

SEQ ID NO: 432775 - DNA, 201 bp, Homo sapiens
atgcagcagtcaataagcccctccttacttcacgttagttgggccagcaagatagtagagaggactgattcatttggcctattcttgaaacatgttacttrgagacacaccaggattcttttttttttttttttcagggacaaggtctcactttgtgacccaggctagagtgcagtggctagagtgcagtggcaagaacac

SEQ ID NO: 432776 - DNA, 201 bp, Homo sapiens
gctgagatcatgccactcacttcagcctgggctacagagcaagactccgtctcaaaaataaataaataaataaataaataaataaataaataaataaatawgtaaaattaaataaaaataaaaataaaaccccctcttggggttgtgcgtgtgcagggcctgggcctgaaggcacatgcccccttagattttccttccagg

SEQ ID NO: 432777 - DNA, 201 bp, Homo sapiens
gtgcagtggcgcgatcttggctcactgcaacctctgcctcctgggttcaagcgattctcctgtctcagcctcccaagtacctgggattacaggtgcacacyaccacgcccagctaatttttgtatttttagtagagatggggtttcaccatgttggccagagtggtctcgaacttctgacctcaggtgatccgcccgcctc

SEQ ID NO: 432778 - DNA, 201 bp, Homo sapiens
caggtggctcacctgaggtcaggagttcaagaccagcctggccaatatggtgaaaccacgtgtctactaaaaatataaaaaattaaccgggtgtggtggcrggcatctgtaatcccagctactcgggaggctgaggcaggagaattgcttaaacccgggaggctgaggttgcagtgagccaagatagcaccattgcactcc

SEQ ID NO: 432779 - DNA, 201 bp, Homo sapiens
gggactagaggcacatgccaccatactgggccacatatgacttttttctttttttcttttttttttttaagatgtgcagtctgggtgcaatggctcgtgcstgcagtcccagcactttgggaggctgaggcaggtggctcacctgaggtcaggagttcaagaccagcctggccaatatggtgaaaccacgtgtctactaaa

SEQ ID NO: 432780 - DNA, 201 bp, Homo sapiens
gagttcttctttctttctctttctttctttctttctttctttctttctttctttctttctttctttcctttctttctttctttccttccttccttccttcyttctttctttttttctttctccttccttctgtccgtccttccttccgtccgtccttccttccttccttccttccttgcttccttccttccttctctttct

SEQ ID NO: 432781 - DNA, 201 bp, Homo sapiens
tcctgccactttgcctggctgcacgcccagccagagggctttctcagacacctgtccagcagagtgacatccatttaggactgtactgtctaatatggtakccaatggccacatatggctttttttcctttttcttattttttaaaattagcaatggggtctcactgtgttgcccaggctggagtgcagtgattatgcaca

SEQ ID NO: 432782 - DNA, 201 bp, Homo sapiens
agttatttggagcggggagttcttctttctttctctttctttctttctttctttctttctttctttctttctttctttctttcctttctttctttctttcyttccttccttccttccttctttctttttttctttctccttccttctgtccgtccttccttccgtccgtccttccttccttccttccttccttgcttcctt

SEQ ID NO: 432783 - DNA, 201 bp, Homo sapiens
tttttttcctttttcttattttttaaaattagcaatggggtctcactgtgttgcccaggctggagtgcagtgattatgcacagatgtgatcatcatgcaayacacccttgaagtcctggcctcaagcaatcctcttgcctcagcctcctgaatagctgggactagaggcacatgccaccatactgggccacatatgacttt

SEQ ID NO: 432784 - DNA, 201 bp, Homo sapiens
ccctacctagatcaggccaggggcgcctgcagggtaactctctatttggcctgctcctcctgtataccccattcctccccactccggagacaggtttgccctaagcatgggagtgggaggggggtccatagagcaagcctctcccttccccagatcactgaggtcaaagttaatctaagacccaaaagtgccctgtggcct

SEQ ID NO: 432785 - DNA, 201 bp, Homo sapiens
gacctcgggtgatcctcctgcctcggcctcccaaagtgctaggattacaggcgtgaaccaccatgcccagtcttgttttgttttgttttgttttgttttgtttaaccaggtctctacaggtatctgatgaacaatctgtttatcatcatttgaacctacaaccttgctctgttttatttggaaacacaaagggatttttgc

SEQ ID NO: 432786 - DNA, 201 bp, Homo sapiens
tgacctcgggtgatcctcctgcctcggcctcccaaagtgctaggattacaggcgtgaaccaccatgcccagtcttgttttgttttgttttgttttgttttgtttaaccaggtctctacaggtatctgatgaacaatctgtttatcatcatttgaacctacaaccttgctctgttttatttggaaacacaaagggatttttg

SEQ ID NO: 432787 - DNA, 201 bp, Homo sapiens
tcaatgtggtcaaagacaaagcgattgggaagttgttctagataaagggagactaaagagactcagcagctaattgcagtgcatggtctgggtttttttttgttgttgttgttataaaggccttattaggacaattagcaaaatctgaacaaagtatgtggattagataatagtattgcagcaatgctagtttcctgattt

SEQ ID NO: 432788 - DNA, 201 bp, Homo sapiens
cacaatctcagctcactgcaacctctacctcccaggttcaagcatttctcctgcctcagcctcccaagtagctgggattacaggcacctgccaccacatcyggctaattttttgtatttttagtagaaagggagtttcaccatgttggccaggctggcctcgaactcccaaccttaggtgatctgcccacctcagccttcc

SEQ ID NO: 432789 - DNA, 201 bp, Homo sapiens
cgagccagaggcggtgggggaggtctgtgcctaccgtcgtcctggccgtagccccagccgtggtggccggtcatgccgctgccgtccccgcagccgtgcasctgcccggtcggctcggtccgctcgttcgggctgcggctccggccccgctcgctaccgcggagcagcctcttaaagcagcggctggcgggaggagcagtt

SEQ ID NO: 432790 - DNA, 201 bp, Homo sapiens
aggtgcgtgcatggcagagcctgcagaagaggtaatgccgagagggcagctctgcccacctctaattattgcttgagtctctctggtagtgtcagctgccygccccagggagctcagtctcctccatcacagtgtgcgctcggggtggggctgctgccactgccagtggggaagaccagaggaggttcccagggtctttgg

SEQ ID NO: 432791 - DNA, 201 bp, Homo sapiens
gttcttctgtgcacccctgagcaccctgcttccctctatctagaggaaggccacattgtctggtaagtgcttgtttgctgtccctcttccttcatgagacsaaactctccaagaacagagccctggacttgtctgcatctgcagcagggagcccctagctttgtgattcaaaataggcttgtgggcttttcatgagaggaa

SEQ ID NO: 432792 - DNA, 201 bp, Homo sapiens
tggccctgcagtggggcctccttcccaagggtgttcggacattccatctccccgcagccccctccactgtccctttctcccccttcacaactaaacttatrcatgtgaggtcccagtttctcacctcccctcactcctcagcacccccagtgtctgtctccggctcctgccgctgtctcatctgggtcacaatcatcactt

SEQ ID NO: 432793 - DNA, 201 bp, Homo sapiens
gagggtttatataagccctttacttataaaattttaatcttagatgatcataaaattttcatccagtattcaaaacagtgctctttattgactcaagaaarcatttttactatgagccaagcactctgctaatgtggtgatagccattggcattggtagcatcactgaggagtaatatctgtgtgggcagttagggagtgc

SEQ ID NO: 432794 - DNA, 201 bp, Homo sapiens
actgcaaccacaaactcctgggctcaagtgatcctcccaccttagccttccaggtagctagtactacaggcatacaccaccatgcctggctaatttttaawttttttttttctttttgtagagacagggtcttgctatgttgctcaggctagtctcaaactcctggcctcaaggaatcctcctgccttggcctcccaaagt

SEQ ID NO: 432795 - DNA, 201 bp, Homo sapiens
ctcaggaggctgaggcaggagaatggcatgaaccgggaggtggaggtcgcagtgagccaagatcgtgcaactgcactccaacctgggcaacagagcgaaaytccgtctcaaaaaaaaaaaaaaaaacacacagtggggtctcactgtgttgctcaggctggtctgtctcaaattcctggcctcgagcaatacttccacctc

SEQ ID NO: 432796 - DNA, 201 bp, Homo sapiens
gtctcattctgtcacccaggctggagtgcggtagcacgatctctgctcactgcaacctctgcctcccgggttcaagctattctcccacctcagcctctccrgtatctgggactacaggtgtgtgccgccatgcccagctaatttttgtattttttggtagagacggggtttcaccacgttggccaggctggtctcgaactt

SEQ ID NO: 432797 - DNA, 201 bp, Homo sapiens
gcccaaggtcatctagccagggggtaaagggttcattagctggggttcttactccagacactgggggttttgtgggatttgtttgtttgtttgtttgtttgcttgtttgtttttagacagagtcttgctctgtcacccaggctggtgctatatcagctcactgcaacctccacctccttgattcaagtgattcttctgctt

SEQ ID NO: 432798 - DNA, 201 bp, Homo sapiens
tgcccaaggtcatctagccagggggtaaagggttcattagctggggttcttactccagacactgggggttttgtgggatttgtttgtttgtttgtttgtttgcttgtttgtttttagacagagtcttgctctgtcacccaggctggtgctatatcagctcactgcaacctccacctccttgattcaagtgattcttctgct

SEQ ID NO: 432799 - DNA, 201 bp, Homo sapiens
tgtgtatatacatacaattttattttttattttattttactttttttttgagacagagtctcacgctgtcgcacaggctggagtgtagtggcacgatctcrgctcaccgcaagctccgcctcctgagttcacgccattctcctgcctcagcctcccaagtagctgggactacaggcgcccaccaccacgcccagctaattt

SEQ ID NO: 432800 - DNA, 201 bp, Homo sapiens
ttgcccaaggtcatctagccagggggtaaagggttcattagctggggttcttactccagacactgggggttttgtgggatttgtttgtttgtttgtttgtttgcttgtttgtttttagacagagtcttgctctgtcacccaggctggtgctatatcagctcactgcaacctccacctccttgattcaagtgattcttctgc

SEQ ID NO: 432801 - DNA, 201 bp, Homo sapiens
cttgcccaaggtcatctagccagggggtaaagggttcattagctggggttcttactccagacactgggggttttgtgggatttgtttgtttgtttgtttgtttgcttgtttgtttttagacagagtcttgctctgtcacccaggctggtgctatatcagctcactgcaacctccacctccttgattcaagtgattcttctg

SEQ ID NO: 432802 - DNA, 201 bp, Homo sapiens
aattggcaggctagcgggtctgcctttctggccgatggggaccaagagccccagacccgctcgggtaccagggccgcttaggccccggcgtaccggcgacscgtgcgcagtgcagtgcggcgccccctgcaggcagcgcgcaggagacggtagcggcgaaggggcgctcagtgcgcctgcgcgcttgtggagctggtggcg

SEQ ID NO: 432803 - DNA, 201 bp, Homo sapiens
ggttcttctgtgcacccctgagcaccctgcttccctctatctagaggaaggccacattgtctggtaagtgcttgtttgctgtccctcttccttcatgagastaaactctccaagaacagagccctggacttgtctgcatctgcagcagggagcccctagctttgtgattcaaaataggcttgtgggcttttcatgagagga

SEQ ID NO: 432804 - DNA, 201 bp, Homo sapiens
agggcaaagtgcaattcatcatcactgcatcattaccatcaaactgtgccatctctctggtccccatcctaggggattgggggtggggatctgtgttcatkttcaccttatttcaggcagttattaacctgaaggtgcctgtagggtctgcgagatagcagggaaggagtcttcgtctccctcacagatggtcaccttgtc

SEQ ID NO: 432805 - DNA, 201 bp, Homo sapiens
agtaaaaacattgctgctaaaactttgggtcaaagtaaaacgccacttaatgttaattttttcttattcttttagactccatcattttggattttagctcrtgccttaaaggaatttgtggccaaagagggtcaaggaaatttacctgttcgaggcacaattcctgatatgattgcagattcaggcaaatatataaaactg

SEQ ID NO: 432806 - DNA, 201 bp, Homo sapiens
tgaagcagctgaactgggctttggtgccctggaacaaggtggaggaacccaggaatcagcatagacctcccactgggaccaaaccagcaacttctccaccmatctctttctttcttttttcttttcttttttcttttcttttcttttttttttcttttcttttctttctttttctttctttctttctttcttccttccttc

SEQ ID NO: 432807 - DNA, 201 bp, Homo sapiens
ctgacctcgggtgatcctcctgcctcggcctcccaaagtgctaggattacaggcgtgaaccaccatgcccagtcttgttttgttttgttttgttttgttttgtttaaccaggtctctacaggtatctgatgaacaatctgtttatcatcatttgaacctacaaccttgctctgttttatttggaaacacaaagggattttt

SEQ ID NO: 432808 - DNA, 201 bp, Homo sapiens
caagcttctcatgcctcagcctcccaagtagctgagactacaggcagacgccaccacaccgagctaatttttgtatttttagtagagatggggtttagtaragatgttggtcgggctggtcttggtctcctgacctcaagtgatccacccaagtagatcaagtgatgggtctcccaaagtgctgggattacaggcgtgagc

SEQ ID NO: 432809 - DNA, 201 bp, Homo sapiens
cagccgttcccatgtatattgtgggggcagaccctcccccagctgtgtgttcactgcagaatggggggcagggagaagtatgcagagtgctggagcacagytgccctcctttccttggctcaagagctatttctgtctgaagaactaggacctgtcactgtaatcagggcacccccatctccaggctatgctgaagactgg

SEQ ID NO: 432810 - DNA, 201 bp, Homo sapiens
aagtgctgggattacaggcatgagccaccatgcccggcctatgcttctttttcttttctttttttttgagacagagtctcactctgtcgcccaggctggastgcaatggtgcaatctcagctcactgcaacctctgcctcccaggttcaagcgattttcctcctcagcctcccaagtagctgggattacaagcacccacca

SEQ ID NO: 432811 - DNA, 201 bp, Homo sapiens
ctctgtcccaaaaaaaaaaaaaaaaagatgtccaactatatactgacaaataaggctttgagcatatgaaatggggctgccctacgctgagatgtactgtragcgtaaagcacacactagatttcaaagacttagcacaaaaaatgtaaaatatttcattagtttttttctattaatattagtgacagattaaaatgcata

SEQ ID NO: 432812 - DNA, 201 bp, Homo sapiens
ttagcagagatggggtttcactgtgttgcccagggtggtctcgaactcctaaccttgagacctgccctcctcggccttccaaagtgctgagattacaggcrtgagcccctgcgtgctgggattacaggcgtaagccaccgcgcccggccctctgccctcttctatccttcatagtttcggggagaagtgcacgtcctttcc

SEQ ID NO: 432813 - DNA, 201 bp, Homo sapiens
cagtgcaacccccgcctcttaggttcaagcttctcatgcctcagcctcccaagtagctgagactacaggcagacgccaccacaccgagctaatttttgtayttttagtagagatggggtttagtagagatgttggtcgggctggtcttggtctcctgacctcaagtgatccacccaagtagatcaagtgatgggtctccca

SEQ ID NO: 432814 - DNA, 201 bp, Homo sapiens
aagtaaccctctccccccaactcccacccctgccctggctgggcgactatccctctttttcccccagcaacccgtgcggactctgggacactagatgcccrtgccgcacatggcgtcccttccctaggcttgccccagacctgcaaatgccaccaccagagacctgagctctgggtcctgaatcttttggggttggaaagt

SEQ ID NO: 432815 - DNA, 201 bp, Homo sapiens
gccccattccaccactctacccagtcgtaaggcccagtcataaggacgaaaatcccttcaatgaacagcactcctgtctaggaatttatcatgaaagaatytggactctaatcccagggcaaagaggccttggaaggagctgccacgaattcccactggcctcttactggcccaagatggttggaccttgaagtcataggt

SEQ ID NO: 432816 - DNA, 201 bp, Homo sapiens
tctctcacacacaaacccctctgttggagacccaagtttgcataaaggaccacagcaaaacacatgcccatgcacacacacacacacacacacacacacacctgcatacacacccacaggcgcccaccacctgcctcccagaggatccatctgcagccgagaggctcagcatctccctggggaacatcctgagatgcagcc

SEQ ID NO: 432817 - DNA, 201 bp, Homo sapiens
accctcctccttggtctcagcaagggtttactcccagaatgaaggactggaagggcccaacttgtgagccagcctcttcctctctccccatcgggctgctygggtcaggggcagggactttaccttgaaccggaccatgtagagcgcatctgtcagacgattcatgctggggtgctcgtctcctgtctgtcagggagaggg

SEQ ID NO: 432818 - DNA, 201 bp, Homo sapiens
ctctctcacacacaaacccctctgttggagacccaagtttgcataaaggaccacagcaaaacacatgcccatgcacacacacacacacacacacacacacacctgcatacacacccacaggcgcccaccacctgcctcccagaggatccatctgcagccgagaggctcagcatctccctggggaacatcctgagatgcagc

SEQ ID NO: 432819 - DNA, 201 bp, Homo sapiens
gctctctcacacacaaacccctctgttggagacccaagtttgcataaaggaccacagcaaaacacatgcccatgcacacacacacacacacacacacacamacctgcatacacacccacaggcgcccaccacctgcctcccagaggatccatctgcagccgagaggctcagcatctccctggggaacatcctgagatgcag

SEQ ID NO: 432820 - DNA, 201 bp, Homo sapiens
ctctccgagcgcttaatccgaacaattgctgccatccgttccttcccacatgataatgtagaggacctcatcagaggggtgagtgtgctggtattgacagragagtccttgcgatatgaagtgggcaaaatcctcatggatcacagatttgcagctttgactcaacccaagatcacagggagtttttacattttgctaact

SEQ ID NO: 432821 - DNA, 201 bp, Homo sapiens
ctctcctttgattttgaatagaagcaccagcaaaggctagatggtaaagaatactgatactaagaggctactttgaagatgtttataaaaaaggaaaaacmgtgttaagatgatgccactattaatgatggtcatttgttgaatggacaaaagagcatgccatttctggcctcagtctgacagactcactttcctactttt

SEQ ID NO: 432822 - DNA, 201 bp, Homo sapiens
cacctttaactcattttaaaatctgcaaattttcctaaaactgaaagtacattttattattctgaattttaattttttcctagttttatataaatgactcyagggtagttatacttttgctttccttacctattttagaatactacctcaaatatttcctttttttttttttttttttttgagatagagtctcactctgtt

SEQ ID NO: 432823 - DNA, 201 bp, Homo sapiens
tatgtacataactatattgcaaggcccagtgttataaataacttaatggtggtgctgatcataaaaaccacaaaaattcaaagaaggaaaataatgttttktgacctcttcagccttttaaaaatcctattccttgcctagtcgtttgtaaaccacacagagctccacgggggtcttagtacctcttggggaaatctcgtg

SEQ ID NO: 432824 - DNA, 201 bp, Homo sapiens
ccaatgctttggatggcaacagagataccccacttcactgggcagcctttaagaacaatgctgagtgtgtgcgggctctcctagagagcggggcctctgtsaatgccctggattacaacaatgatacaccgctcagctgggctgccatgaagggaaatcttgagagtgtcagcatccttctggattatggcgcagaggtca

SEQ ID NO: 432825 - DNA, 201 bp, Homo sapiens
ttctgaattttaattttttcctagttttatataaatgactccagggtagttatacttttgctttccttacctattttagaatactacctcaaatatttcctttttttttttttttttttttgagatagagtctcactctgttgcccaggctggagtgcggtggcccgatctcggctcactgcaagctctgcctcccaggtt

SEQ ID NO: 432826 - DNA, 201 bp, Homo sapiens
aagcatgtaagagctccttttgtgatggtccatctacccaaaagagatctgctttagtgaacgatactctttcatttttctaaattagatcaagttgttaytgattttagatgacttgtatgcaaatttgaaaaacttttttttttaaagctgattgggaactacaaacaatgaatggaatctactgacacagctaattgg

SEQ ID NO: 432827 - DNA, 201 bp, Homo sapiens
taatggaataaatacttgtagataaactgatcataatttataatataaagttatattaaattaaataatagctatttcattatttgggtattttccaatamatatatattgtgggaaaacattcttgctaaataaaaaagtgtgtcctttaaaaaaaaaaaaagtgaacaagttttgtctaattcaaagcttatttaaagg

SEQ ID NO: 432828 - DNA, 201 bp, Homo sapiens
gaggttgcagtgagccaagatcatgccactgcactccagcatgggcaaaaaaagtgagactctgtctcaaacaaaaacaaaaacaaaaccttgaaacttakaggagtggtcccaggggactgggaccagacctctgagaaggacgcgctggccagctggtggcgggctgggagtggtgaaactggctctgctggtgttgca

SEQ ID NO: 432829 - DNA, 201 bp, Homo sapiens
ttccctagtagctgggatcacaggcaagagccaccacacccagcagacttgtgcctcctttctccagttctccttggtctctaacaagaatgccccttacrcaatggcacatgggcacggccatggtcaggacatcttgcttcttgggggagacttgcttgttgttcccctcactgtcttggaccacataacccttctgtt

SEQ ID NO: 432830 - DNA, 201 bp, Homo sapiens
tcttgtagattgcttacaaaattcgaaaaacaaatgtaatttgcttcatgctgtttttattagagcttctcctttagaaaattaaatctcctcaccgggcktggtggctcacgcctgtaatcccagcactttgggaggccgaggcgggtggatcacaaggtcaggagatcgagaccatcctggctaacatggtgaaacccc

SEQ ID NO: 432831 - DNA, 201 bp, Homo sapiens
ttggaaaaactggcctcatattttgtgtacacagtccctgtacaggttttctgacctgtgtaagtacagaattcactttctgacaggcacagaagccccakgtttatgttgggacctcaagagaaggggaaattcacccaactcatagatatttgatggcacaaatctatggctgggcttcgcttttaaaatgtcttatct

SEQ ID NO: 432832 - DNA, 201 bp, Homo sapiens
gtttaagaccaacctgaccaacatggtgaaaccccgtctctatgaaaaatacaaaaattagccaggcatggtggtgggcacctgtagtcccagctactcgrgaggctgagacaagagaattgcttgaacccaagaggcggaggttgcagtgagctgagatcacgccacttcagtccagcctgggcgatggaacaagactcc

SEQ ID NO: 432833 - DNA, 201 bp, Homo sapiens
tggagctaataaagcccttggaaaaactggcctcatattttgtgtacacagtccctgtacaggttttctgacctgtgtaagtacagaattcactttctgayaggcacagaagccccaggtttatgttgggacctcaagagaaggggaaattcacccaactcatagatatttgatggcacaaatctatggctgggcttcgct

SEQ ID NO: 432834 - DNA, 201 bp, Homo sapiens
ccacgcccagctaatttttgtatttttagtagagatgacgtttcaccatattggccaggctgttctcaaactcctgactttgtgatccacccgcctcggcytcccaaagtgctgggattataggcgtgagccaccgtgcccggccctaatttttatgtttaacttgggtcaaagaaaaataaaagtgcctctctctagcat

SEQ ID NO: 432835 - DNA, 201 bp, Homo sapiens
caggcgcgcaccaccacgcccagctaatttttgtatttttagtagagatgacgtttcaccatattggccaggctgttctcaaactcctgactttgtgatcmacccgcctcggcttcccaaagtgctgggattataggcgtgagccaccgtgcccggccctaatttttatgtttaacttgggtcaaagaaaaataaaagtgc

SEQ ID NO: 432836 - DNA, 201 bp, Homo sapiens
tttgcccacgctggtctcaaactcctgagcttagtgatcctcctgctgaggccccccagagtgctgggattaaaggctgggactacaggcgtgagtcaccrtgcccagctttgccctcctttaaaatgggagctgtgttatttattatagtatttccagctgcatatttgggtgaaaaggatttcagtgcagtggaacaat

SEQ ID NO: 432837 - DNA, 201 bp, Homo sapiens
cctaaagcagcaattaggagtaaagaaccagaacagtgtgatcatccaaaaagtcagcttctggcttagctccatcaggatcccaattctctacggagtcraggtactctccatggcgttcccagggggtgataaaacagaggggaagaagtcattctcccaccttcttccttccgcatacacctatggcctgatcatcac

SEQ ID NO: 432838 - DNA, 201 bp, Homo sapiens
tgtcccgcctttacagatggaaccaatgtacttcttacatatatcagttgatgcctcatgtctccctaagtgtataaaactaagctgtgccttgaccaccytgggcacatgtcgttaggactccctgaggctgtgtcacaggggcttcctcaacgttggcaaaataaactttctaagttaactgagacctgtctcagattt

SEQ ID NO: 432839 - DNA, 201 bp, Homo sapiens
cttctcaaagtgctgggattacaggcgtgagccacggcacccagctgagattcttaaaatggtgttcaaactttagggtgtgcaagaaccttcggagacayttgtttaaagtgcagtcctggggctcattacctgagattctgaagcggaggcccaggagtctactttaaaaaaatttttctttttttttttttttttttt

SEQ ID NO: 432840 - DNA, 201 bp, Homo sapiens
tgtcacatgccttcatcctcccaccttgggtgagcagcattttccaggctttgcttagtgagttctgatgtgcaactgtcttcgtcggccctgctgcacayccactacaggtgtatatgaacagggacggtctgcccctctggtggtcccgggaataaagaattgattccagcagatgataatataacagctaatatggag

SEQ ID NO: 432841 - DNA, 201 bp, Homo sapiens
aggtttgttcaacactttaacaatacagacatggtcatgacagtccctaagtgttaggagcaacggggaagaatgcaggctgtgctaaactgacgggcacrtaactgcccctggaggtgagccacaccagagccttatgctggaacacagggaatggaaggctgtagaaaggcagcccagagtgtggactgtgctgaagaa

SEQ ID NO: 432842 - DNA, 201 bp, Homo sapiens
gtttcaaaactacagtagacctgttgttagattctagtctgcctaatgtttttttcaatttgtattattttctacagtttagactgaattctaatttttcwtggctacaagtccataaaataatgttttcaatttcttttccttctttttttccatttttcctaatttagagtcactgaaaactaagctgtgttttcttaa

SEQ ID NO: 432843 - DNA, 201 bp, Homo sapiens
aatttaaggttatttagctaacaactgcctagggctgtgaaagaggttatcaagaatttgaaagtctaaggtaggaaagaaagcggtggggggggggggggactttataaatctataaaatgtacttccatcggcatgcctaatatgtttttatatgtatttatgtgttgtgtacagaatgtttcactactaaaaatatat

SEQ ID NO: 432844 - DNA, 201 bp, Homo sapiens
gacggtgacacagatacagagaacaggtttgttcaacactttaacaatacagacatggtcatgacagtccctaagtgttaggagcaacggggaagaatgcrggctgtgctaaactgacgggcacataactgcccctggaggtgagccacaccagagccttatgctggaacacagggaatggaaggctgtagaaaggcagcc

SEQ ID NO: 432845 - DNA, 201 bp, Homo sapiens
actcttgacctcatgatctgcccacctcggcctcccaaagtgctgggattacaggcgcgagccactgcacctggccaccagcctcctattctattcaaagycactcctctgctcactgagatagatgcatatctgagttgcctcctttggaaaggctcatcagaaactctaaagaacgtaccgtttgtgtatcacccatct

SEQ ID NO: 432846 - DNA, 201 bp, Homo sapiens
caggctggtctcgaactcttgacctcatgatctgcccacctcggcctcccaaagtgctgggattacaggcgcgagccactgcacctggccaccagcctccyattctattcaaagtcactcctctgctcactgagatagatgcatatctgagttgcctcctttggaaaggctcatcagaaactctaaagaacgtaccgtttg

SEQ ID NO: 432847 - DNA, 201 bp, Homo sapiens
gtggactgtgctgaagaacctcccaattcttcagtgctggctcctgtggatacatacatagggcaatcaaaacaatgccatgggaaggcctgcagcagacsgataggcacacatccactctgtaagcaacaattcttttctttttcttttcctttttttttttttttttgtgacagaggctcactctgttgccaggctgga

SEQ ID NO: 432848 - DNA, 201 bp, Homo sapiens
tttactaaggctttgactgggatggtgtgctttcctttaaggaatcgacttgtggagctaataaagcccttggaaaaactggcctcatattttgtgtacasagtccctgtacaggttttctgacctgtgtaagtacagaattcactttctgacaggcacagaagccccaggtttatgttgggacctcaagagaaggggaaa

SEQ ID NO: 432849 - DNA, 201 bp, Homo sapiens
tggttcatctcactgggactggttggacagtgggtacagcccacggagggcgagctgaagcagggcggtgtgtcgcctcacccaggaagcgcaagcggtcrgggaatttccctttcctagccaagggaagctgtgacagactgtacctggaaaaacgagacactcccacccaaatactgtgcatttcccaaggtcttagca

SEQ ID NO: 432850 - DNA, 201 bp, Homo sapiens
agggaatcctagagaaagtcttgtgtttaaggagcaagacaggaaggagaaaccagtcagtgagatgggtcaaatgtaagtggagaaaggaacgtccaagsagaagcgggctgtcgctatggtgaatcatgcagagatgaaggcgggacgatggagcagtggccccttgggcttggcaggtgatcaaattcgaggtcatga

SEQ ID NO: 432851 - DNA, 201 bp, Homo sapiens
taaaatcgagcaatacagtcttaaatgttgtggccttttttgatcataagagttggtactgtttaaggccaaaagtaatagtttttataaatcttttagtytcaactgagcttttacaataaaaaggatttgtattgcattgagtttataaacttttggtttgtgaaatccatatttgatctgttttcttccaatcaaatg

SEQ ID NO: 432852 - DNA, 201 bp, Homo sapiens
cagctttcctagtaggagtcatgatgagctacagaggctcacagggtgtcatggagcacgaggaaaggtgcagggaatcctagagaaagtcttgtgtttawggagcaagacaggaaggagaaaccagtcagtgagatgggtcaaatgtaagtggagaaaggaacgtccaaggagaagcgggctgtcgctatggtgaatcat

SEQ ID NO: 432853 - DNA, 201 bp, Homo sapiens
gttttctaaatgttgttctccaagcaattgtatgtttggattgcagaagaatttgtaagatgaacttttttttaatgtgcattattaaaaatgttgagtgragcaattgtcacctttattaaggaggattgctttgtgcccaccacctagtgtaaaataaaatcgagcaatacagtcttaaatgttgtggccttttttgat

SEQ ID NO: 432854 - DNA, 201 bp, Homo sapiens
ctgtgtatcaccccctgaggcgtgctgagctcgagcctgtgaccacctgtgctgtggagatggagacaatgtaattgggaagcaggcctggcctccccctrccacagggacaggctggtcttagaggcaccgatggggcagctttcctagtaggagtcatgatgagctacagaggctcacagggtgtcatggagcacgagg

SEQ ID NO: 432855 - DNA, 201 bp, Homo sapiens; identical to SEQ ID NO: 145555

SEQ ID NO: 432856 - DNA, 201 bp, Homo sapiens
gagcaatacagtcttaaatgttgtggccttttttgatcataagagttggtactgtttaaggccaaaagtaatagtttttataaatcttttagtttcaactsagcttttacaataaaaaggatttgtattgcattgagtttataaacttttggtttgtgaaatccatatttgatctgttttcttccaatcaaatgtttattt

SEQ ID NO: 432857 - DNA, 201 bp, Homo sapiens
tggagccagctgaaggaacagatttctgtcattgatgatgcagtaagaaaactgtaaaatccgagtcatacaaacaaaacctgtacttttctagttgtttkaatctgtctttttacattggcttttgttttctaaatgttgttctccaagcaattgtatgtttggattgcagaagaatttgtaagatgaacttttttttaa

SEQ ID NO: 432858 - DNA, 201 bp, Homo sapiens
tgttctccaagcaattgtatgtttggattgcagaagaatttgtaagatgaacttttttttaatgtgcattattaaaaatgttgagtggagcaattgtcacstttattaaggaggattgctttgtgcccaccacctagtgtaaaataaaatcgagcaatacagtcttaaatgttgtggccttttttgatcataagagttggt

SEQ ID NO: 432859 - DNA, 201 bp, Homo sapiens
cggctcagccggcactgagctgagcagtggcagaggccaccgcctggcagatggggaaaggcagagtgggtgagcgggcactgtgtatcaccccctgaggygtgctgagctcgagcctgtgaccacctgtgctgtggagatggagacaatgtaattgggaagcaggcctggcctccccctgccacagggacaggctggtct

SEQ ID NO: 432860 - DNA, 201 bp, Homo sapiens
gtcgcgagcgaacaagcaggagggtgttcgactgctagagctgagctaagcgatgcctaaatcaaaggaacttgtttcttcaagctcttctggcagtgatyctgacagtgaggttgacaaaaagttaaagaggaaaaagcaagttgctccagaaaaacctgtaaagaagcaaaagacaggtgaaacttcgagagctctgtc

SEQ ID NO: 432861 - DNA, 201 bp, Homo sapiens
atccccctgaagctcacatgttactttatttcctgcccattatggccccagtgaggtccctactgctcaatttaaaaaaaaattaaaaaaattatttttcsataacagtatttgacttgatcatcttttttttttttcttttttgacggagtctcactctgtcacccaggctggcgtgcagtggcactatctcggctccct

SEQ ID NO: 432862 - DNA, 201 bp, Homo sapiens
atcgagggcgtggccactcagggacccacagtgttcctgctcagggcaagttcacctgctaagggcaagtgaaatgtcatctgagcaggtgctcagaaagrttctcatcttttttttttttttttttttttaattgagatggggtcttgctatgttgctggggctggtctgaattttttttttttttttttttttttttga

SEQ ID NO: 432863 - DNA, 201 bp, Homo sapiens
aggagactgaccccacagaagcttgctggctgagccatttgggagaaaggacaaatgtttagctgtctaagacagctaatgcctcttctgcggtgacctcycctgcccaccactgcagatagagcctgagtcattctgcctatgccttcctcatccagaagcccccttccatgctaactacccatggccaaggagcctcag

SEQ ID NO: 432864 - DNA, 201 bp, Homo sapiens; identical to SEQ ID NO: 303297

SEQ ID NO: 432865 - DNA, 201 bp, Homo sapiens; identical to SEQ ID NO: 303316

SEQ ID NO: 432866 - DNA, 201 bp, Homo sapiens; identical to SEQ ID NO: 303310

SEQ ID NO: 432867 - DNA, 201 bp, Homo sapiens
cgttgtctaccctgtaccgaagacagaggctgtggggacagcctaggggcctggatctattgcctacttagagagaggccaactcagacacagccgtgtaygctcccagcagcaacggaggttcaggcaagatgcccgaaggagggaagggtgacaagggcagtggggagacttggagagtttgtgcagaggggaggaaca

SEQ ID NO: 432868 - DNA, 201 bp, Homo sapiens
cgtgcaagagcaactggcacagaggatgggactggacctcaggtgagggtgattgagttggggttaggaaaaaggagattgaggtagggtttggaaaatcytcaaggatttggggtggggtgaagatttctgggggtggccagaaatgagctttgggcccaggggctgaaagtctgtgtccaccatgcctctccctgcagg

SEQ ID NO: 432869 - DNA, 201 bp, Homo sapiens
tctggctccttggctgagttcagtcctcccagactacctgccctcagcttggataaccaggctgggctcagctcagctcccacaaatgacagccccttaakcatgcttctattagtcacctaaccctctgtcacccagtctgttgctgctccatggtggggccaagagtcacttctaataaacagactgttttctaataat

SEQ ID NO: 432870 - DNA, 201 bp, Homo sapiens
cttttgcttacttttttttttttttttgagaaggagtctcactctgttgcccaggctggagtgcaatggtgtgatctcagctcacggcaacctccgcctcyggggttctggtgattctcctgcctcagcctcccaagtagctggggcacccgccaccatgcctggctaatttttttgtatttttaccagagacgaggtttc

SEQ ID NO: 432871 - DNA, 201 bp, Homo sapiens; identical to SEQ ID NO: 303314

SEQ ID NO: 432872 - DNA, 201 bp, Homo sapiens
gagggagccctcctggtcaaccctctctaccctagcctcagggagcttcagggccccagcattgaaggaacagggtctgacctcatttgccaccgtagggwtggggagactgaggcaggaggtgaatgggctcccagcttggagccctttcccctcaggacttggtttccctaccctagctccgcctgcagggacagaaag

SEQ ID NO: 432873 - DNA, 201 bp, Homo sapiens; identical to SEQ ID NO: 303299

SEQ ID NO: 432874 - DNA, 201 bp, Homo sapiens
tgaggctcacagaagcacatgggcccacacaggagctggacatgaatggcccctgtggaggggtaggaataggagtgggttaggctcctcctttggtgggygacagactagggagtcgctggcttttcccaccctcactaagtgccatttccatggagtgccaagggagaagaggaggaggcccttctggctgtaatttga

SEQ ID NO: 432875 - DNA, 201 bp, Homo sapiens; identical to SEQ ID NO: 173287

SEQ ID NO: 432876 - DNA, 201 bp, Homo sapiens
ttgctgcccgtattaggccacacagtggaaccccatttatatcatagcagaagaaataggattatcaatgtgaactgcttagcatggtgcctggtatataygagagctccacaaatgtgagctataatcctactagtaaaggatgctaagcagttccactgtggcaggtgtcatttgctagtagaatttgtaatcaaacaa

SEQ ID NO: 432877 - DNA, 201 bp, Homo sapiens
tccagcctgggtgacacagccaaaaaaaaaaccactaagttagatctctacctcacagtgtccatacaaattagttccagagggaagatataccacaaaaytactcaaaaatttttatacctctggtgtgggacggtcttttctaaactttaacatgagacttaaaagatataataagggaaaagataagcagatttcgca

SEQ ID NO: 432878 - DNA, 201 bp, Homo sapiens
aattactcaaaaatttttatacctctggtgtgggacggtcttttctaaactttaacatgagacttaaaagatataataagggaaaagataagcagatttcrcaaccaaaaaatatcgaaagtctctgtgtgatggaaaacatcaaggttaaaacacaaatgacagatatggaagaaaatatttgcagcacataaaaaaatc

SEQ ID NO: 432879 - DNA, 201 bp, Homo sapiens
gtgggtggatcacttgaggtcaggagttcgagaccagcctggccaagatggcgaaaccctgtgtctactaaaaatacaaaaactagccaggaatggtggcrcgcgcctgtaatcccagttacttaggaggctgaggcaggagaatcacatcaacctgggaggcggaggttgcagtgagcttagatcatgccaccatgccac

SEQ ID NO: 432880 - DNA, 201 bp, Homo sapiens; identical to SEQ ID NO: 352423

SEQ ID NO: 432881 - DNA, 201 bp, Homo sapiens
gcgatggctcacgcctgtaatcccggcactttgggaggccaaggtgggtggatcacttgaggtcaggagttcgagaccagcctggccaagatggcgaaacsctgtgtctactaaaaatacaaaaactagccaggaatggtggcgcgcgcctgtaatcccagttacttaggaggctgaggcaggagaatcacatcaacctgg

SEQ ID NO: 432882 - DNA, 201 bp, Homo sapiens
agacgggagagtccagaaacagacccagggctacaggaatttagtatatggtaagagggatgttttaagtggggaaaaaggtggattatttaataaacagyacttttagacaactagctatcaaagctagatctcagctgggtgcgatggctcacgcctgtaatcccggcactttgggaggccaaggtgggtggatcactt

SEQ ID NO: 432883 - DNA, 201 bp, Homo sapiens; identical to SEQ ID NO: 214419

SEQ ID NO: 432884 - DNA, 201 bp, Homo sapiens; identical to SEQ ID NO: 214593

SEQ ID NO: 432885 - DNA, 201 bp, Homo sapiens; identical to SEQ ID NO: 214535

SEQ ID NO: 432886 - DNA, 201 bp, Homo sapiens; identical to SEQ ID NO: 214457

SEQ ID NO: 432887 - DNA, 201 bp, Homo sapiens; identical to SEQ ID NO: 214599

SEQ ID NO: 432888 - DNA, 201 bp, Homo sapiens
tgatggtgccgatgccgtcagcacgcaggcctcctgccctcgccacgactggctcctgcagcccacctggctgagaggtgtgctggctctcgcaggttgcraaatggggacatcaccgtccgcctgggctacagcgtgctcgccgattgcatttggggagggactgagggctgattgtgttgtggggatgttggcagagaa

SEQ ID NO: 432889 - DNA, 201 bp, Homo sapiens; identical to SEQ ID NO: 214774

SEQ ID NO: 432890 - DNA, 201 bp, Homo sapiens; identical to SEQ ID NO: 214776

SEQ ID NO: 432891 - DNA, 201 bp, Homo sapiens
gtgaggcgcctggggttggagtatcagctctgcgaggaggaaacagggaagcttcgggaccaagtggcagctgtctggcctgcgggatgcctgcctgttgmaaggctccgtgtgccaggagatgccacataaaggaatgcttcccatccctccggctctgccagccttctctgccctgagtgtttcccctgtgctgaccgc

SEQ ID NO: 432892 - DNA, 201 bp, Homo sapiens
aaaccagttgtcccttgggggaagccaagggacttccctcatcctctgatatgctgcttgggtgatgggcggtgctggggactgggcccagcagtaccccrggatcccaaacgcggggatgacgggagccaggcttgggcagtgaaagagaagacacaacatggaggaggttggccctggcggctggcatggggaccgtcc

SEQ ID NO: 432893 - DNA, 201 bp, Homo sapiens
gggctacactccctcttaaggccagagggagccaccacttgctctggcagccactcaggaacccctgaggaccctgagaagcctccaaccaaggcactackgagcgtggggttgggagggactctggttgccctggttcgcaggtgggcactaccaagcgtggggttgggagggactggttgccctggttcgcaggtggga

SEQ ID NO: 432894 - DNA, 201 bp, Homo sapiens
aacatagctccccacctccagcttgcctaccttccttcagggcacacaccgcagacaccctaggacagacacccaaaaggtgttgggggtgctagtgacgrtgcacgggggtgacagcccccaaagccagtgagacccgtcccgggggggcattctcgtgtgccgggcacccccctatggctgtctacaatgtgctgctag

SEQ ID NO: 432895 - DNA, 201 bp, Homo sapiens
ccctagggaagccctgggcgcaaagctatgacactgtccacagccgcagcctgctgctgctgggaactgacacttttccccgctggaggccggggtccacmcggcatgagtctgcagctctcccactttgcagcccctggaggaggctggccagagcttctcagcaacaaaccccacttttcctgcaccagtaaattcagc

SEQ ID NO: 432896 - DNA, 201 bp, Homo sapiens; identical to SEQ ID NO: 284162

SEQ ID NO: 432897 - DNA, 201 bp, Homo sapiens; identical to SEQ ID NO: 284106

SEQ ID NO: 432898 - DNA, 201 bp, Homo sapiens; identical to SEQ ID NO: 350009

SEQ ID NO: 432899 - DNA, 201 bp, Homo sapiens; identical to SEQ ID NO: 349883

SEQ ID NO: 432900 - DNA, 201 bp, Homo sapiens; identical to SEQ ID NO: 350002

SEQ ID NO: 432901 - DNA, 201 bp, Homo sapiens; identical to SEQ ID NO: 116555

SEQ ID NO: 432902 - DNA, 201 bp, Homo sapiens; identical to SEQ ID NO: 116556

SEQ ID NO: 432903 - DNA, 201 bp, Homo sapiens
gtgcagtggtgcaatctcagctcactgcaacctccgcttcctgggctcaagcagttctcctgccttagcctcctgagtagctaggattacaggtgcctgcyaccacgcccggctaatttttgtatttttagtagagacggggtttcaccctgttggccaggctggtctcgaactcctgacctcgtgatccacccactacgg

SEQ ID NO: 432904 - DNA, 201 bp, Homo sapiens
ttggaccgtccacctgccccagcccaacagtcagtcatctgtcatcagctcagctgagcagccctggatccctgcccgactgtggctggctctttgcccgrtttttccctctgtctgtgcccctggatggcaggctgaagtcagaggggctgtttcattctcagccccctcagcagcactgggggaagaaagcattgtcac

SEQ ID NO: 432905 - DNA, 201 bp, Homo sapiens
gcaatctcagctcactgcaacctccgcttcctgggctcaagcagttctcctgccttagcctcctgagtagctaggattacaggtgcctgccaccacgcccrgctaatttttgtatttttagtagagacggggtttcaccctgttggccaggctggtctcgaactcctgacctcgtgatccacccactacggccccccaaag

SEQ ID NO: 432906 - DNA, 201 bp, Homo sapiens
cttggaccgtccacctgccccagcccaacagtcagtcatctgtcatcagctcagctgagcagccctggatccctgcccgactgtggctggctctttgccckgtttttccctctgtctgtgcccctggatggcaggctgaagtcagaggggctgtttcattctcagccccctcagcagcactgggggaagaaagcattgtca

SEQ ID NO: 432907 - DNA, 201 bp, Homo sapiens
ccacccactacggccccccaaagtgctgggattacaggcgtgagacaccgcgcctggccggattttttttttttttttttgcgagggagtctcgctttgtygcccaggctggagtgcagtggtgcgatctcggctcactgcaagctccgcctcccgggttcacgccattctcctgcctcagcctcccgagtagctgggact

SEQ ID NO: 432908 - DNA, 201 bp, Homo sapiens
ctaattaaaatgttcaacatggaaggttgtattagctatttttgaagcaaggctttggagggaggaagaatagggagggctgaagttgagcacacttctcygagttactcaccagtagccttgctttgccacggctctgcccaaagaccttggagcttttgttagctctttggcaaaagtttcctggtccaaccccaagta

SEQ ID NO: 432909 - DNA, 201 bp, Homo sapiens
tggtctttctgctttggaagagaagcatggtgctgtgtgggggcttggggatgagctggcggtgggtggtggacagggggcctcagctcggaggccaggcygctcttgactgagccaggggccacagtagctgcccaggcaggagggatttgtgtgggcaccagagctctggcaggtgcacatttgttagggaggagcagt

SEQ ID NO: 432910 - DNA, 201 bp, Homo sapiens
gatgagctggcggtgggtggtggacagggggcctcagctcggaggccaggctgctcttgactgagccaggggccacagtagctgcccaggcaggagggatytgtgtgggcaccagagctctggcaggtgcacatttgttagggaggagcagtatccagatacaggcactgctccctctggagttgctgccagccagggagg

SEQ ID NO: 432911 - DNA, 201 bp, Homo sapiens
catttattggtagtttctgaaactgaaccacacagcatagttgcaggaggaagaaaggtaagaaatacacaggattttatcaactgagctgaagccatagrtaagtcatatttgagataattattgaatttgttttgtgggagagaaatctctaattcttccaaatgattagtccagtttctgccaaagcaggtgaggtgt

SEQ ID NO: 432912 - DNA, 201 bp, Homo sapiens
atcgcttgaacccgggaggcggaggttgcagtgagccgagatggcgccactgcactacagcgtgggcaacaagagcgaaactctgtctcaaaaaaaaagaaaaaaaaaacagacattggctggccttgtggctcacacctgtaatgccagcactttgggaggccaaggtgggaggattgcttgaggccaggagttcaaggg

SEQ ID NO: 432913 - DNA, 201 bp, Homo sapiens
gaaactctgtctcaaaaaaaaagaaaaaaaaaacagacattggctggccttgtggctcacacctgtaatgccagcactttgggaggccaaggtgggaggaytgcttgaggccaggagttcaagggtgcagtgagctatgattgaacactgcattccagcctgggcaacggagagggaccatgtctctaaaacacacacaca

SEQ ID NO: 432914 - DNA, 201 bp, Homo sapiens
caaggtgggaggattgcttgaggccaggagttcaagggtgcagtgagctatgattgaacactgcattccagcctgggcaacggagagggaccatgtctctaaaacacacacacacacacacacacacacacacacacacacacaattgtttcctcagttctggaggctggaagtctgagataagggtgccagcatggttgg

SEQ ID NO: 432915 - DNA, 201 bp, Homo sapiens
gggaggattgcttgaggccaggagttcaagggtgcagtgagctatgattgaacactgcattccagcctgggcaacggagagggaccatgtctctaaaacacacacacacacacacacacacacacacacacacacacaattgtttcctcagttctggaggctggaagtctgagataagggtgccagcatggttgggttctg

SEQ ID NO: 432916 - DNA, 201 bp, Homo sapiens
ctgtgtctggtgaatatcaaattatttacggatcatttattggtagtttctgaaactgaaccacacagcatagttgcaggaggaagaaaggtaagaaatayacaggattttatcaactgagctgaagccatagataagtcatatttgagataattattgaatttgttttgtgggagagaaatctctaattcttccaaatga

SEQ ID NO: 432917 - DNA, 201 bp, Homo sapiens
gaggattgcttgaggccaggagttcaagggtgcagtgagctatgattgaacactgcattccagcctgggcaacggagagggaccatgtctctaaaacacacacacacacacacacacacacacacacacacacacaattgtttcctcagttctggaggctggaagtctgagataagggtgccagcatggttgggttctgac

SEQ ID NO: 432918 - DNA, 201 bp, Homo sapiens
ggattgcttgaggccaggagttcaagggtgcagtgagctatgattgaacactgcattccagcctgggcaacggagagggaccatgtctctaaaacacacacacacacacacacacacacacacacacacacacaattgtttcctcagttctggaggctggaagtctgagataagggtgccagcatggttgggttctgactg

SEQ ID NO: 432919 - DNA, 201 bp, Homo sapiens
tgctccctctggagttgctgccagccagggagggtgcgtctctgggcagcgaaaggcaggaatagctcctggcctaatggcagctggaaaagaagctgcargaggatatgggtttgttgtggaagaggtgggggctgaaaccctgaggaccaagaatcctgccctcaatttctgattgacactattgactaaaggtagctt

SEQ ID NO: 432920 - DNA, 201 bp, Homo sapiens
cgttttgcaaaaagacttctccaacccactgtcttctttttgaatttttaaataaatctggccgggtgtcgtggctcacacctgtaatcccagcactttgrgaggccaaggcgggcggatcacgaggtcaggagttcgagaccagcctggccaacatggtgaaaccccatctctactaaatatacaaaaaaattagctggg

SEQ ID NO: 432921 - DNA, 201 bp, Homo sapiens
aacccactgtcttctttttgaatttttaaataaatctggccgggtgtcgtggctcacacctgtaatcccagcactttgagaggccaaggcgggcggatcaygaggtcaggagttcgagaccagcctggccaacatggtgaaaccccatctctactaaatatacaaaaaaattagctgggcgaagtggcaggtgcctgtaat

SEQ ID NO: 432922 - DNA, 201 bp, Homo sapiens
tgatacactatttaaattttccatacaaatccaggcatgtttatgcaaaagaaaaaaaaacaccagtacaaaacaaacaagatatgatctgactgggcatkgtggctcacccctgtaatcttagcactttgggaggccaaggcaggaggatcccttaaccacaggagttcaagaccagcctaggcaacatagggagaacct

SEQ ID NO: 432923 - DNA, 201 bp, Homo sapiens
cactttgtgcctctttccccagtattaatgcacttacacctgtctatttttctctttcttttagtgggggagataatgcctctttcttttgtgtacagcargacagtgggtcattgtgtatgtacagaagtgatgtggattcctcccagactcattagtgaccagggctgctgggcctgtttgggtttcctagactagaga

SEQ ID NO: 432924 - DNA, 201 bp, Homo sapiens
aggcaatcagggagggccgctgaaggacacttggaccgtccacctgccccagcccaacagtcagtcatctgtcatcagctcagctgagcagccctggatcyctgcccgactgtggctggctctttgcccggtttttccctctgtctgtgcccctggatggcaggctgaagtcagaggggctgtttcattctcagccccctc

SEQ ID NO: 432925 - DNA, 201 bp, Homo sapiens
gatagtgacctggagtttgtgttgaggaattagtagcctttgaatgcctgcctttgtagctgttgcacatacgttaggcttactttcaactaaatggaatwagctaattgatttcttcagaggtccaagtgataacagagccaaaccttgctagcccataggggtgagagtctagcttagtgacaggttgtttttgggaga

SEQ ID NO: 432926 - DNA, 201 bp, Homo sapiens
ttgagactgaaatgaaaaattgcttgtggtttaaatccccagaatttaatgaaacatgggaagatggctaaagatacgtataaactttggtttgcattttrttaaattatttgaatgcaaaacttgtataaagaatccattatgttctgtagctttctaattaaaatgttcaacatggaaggttgtattagctatttttga

SEQ ID NO: 432927 - DNA, 201 bp, Homo sapiens
ttagagtggcaacatgttattctttcagttagccattcagcaattgtagatgatcacatgaccatttccaagtttttgacgtattttaatataaatatcgkattagtcctttctcacacagctgtaaagacatacctgagactgggtaatttataaagaaaagaggtttaactgacttagagttctgcatggctgggtagg

SEQ ID NO: 432928 - DNA, 201 bp, Homo sapiens
ctgaggcaggacaattgcttgaacccgggaggcagaggttgcagtgagccaagatcactccattgcactccagcctgggcaacaagagcgaaactccatcycaaaaacaataataatatttttatagccctaatatattttgccaataggctgccccatcatggattaatggttaatgattgtattgcagttgccaccatc

SEQ ID NO: 432929 - DNA, 201 bp, Homo sapiens
gggcatggtggcacctgcctgtaatcccagctacttaggaagctgaggcaggacaattgcttgaacccgggaggcagaggttgcagtgagccaagatcackccattgcactccagcctgggcaacaagagcgaaactccatcccaaaaacaataataatatttttatagccctaatatattttgccaataggctgccccat

SEQ ID NO: 432930 - DNA, 201 bp, Homo sapiens
tatgatctgactgggcatggtggctcacccctgtaatcttagcactttgggaggccaaggcaggaggatcccttaaccacaggagttcaagaccagcctargcaacatagggagaacctctttaaaaaaaaaatttttttttaatttaaaaaaaaaaagatcaaatgagacaaatgctattcacatgtttcttgtcttgtt

SEQ ID NO: 432931 - DNA, 201 bp, Homo sapiens
tgagaggccaaggcgggcggatcacgaggtcaggagttcgagaccagcctggccaacatggtgaaaccccatctctactaaatatacaaaaaaattagctrggcgaagtggcaggtgcctgtaatcccagctactcaggagactgaggcaggagaattgcttgaacccaggaggcggaggttgcagtgagctgagaccgtg

SEQ ID NO: 432932 - DNA, 201 bp, Homo sapiens
ctagctaatttttattattattattaatagtagagatggggcttcaccatattggccaggctggtctcaaactcctgacctgaggtgatccacctgcctcrgcctcccaaagtgctgggattacaggtgtgagccaccatactggtcttaatctgagttcttggaggcaggtttgcatctcatttgttcacttggaccagt

SEQ ID NO: 432933 - DNA, 201 bp, Homo sapiens
gtaatcttagcactttgggaggccaaggcaggaggatcccttaaccacaggagttcaagaccagcctaggcaacatagggagaacctctttaaaaaaaaawtttttttttaatttaaaaaaaaaaagatcaaatgagacaaatgctattcacatgtttcttgtcttgttatcgccacttcaagttcccatttattttgtcc

SEQ ID NO: 432934 - DNA, 201 bp, Homo sapiens
ggctagggcagggaatgcgcaggaggaggggaaaagctgcggacccagctcctaaggccacctggtctctccgctcttcccagttgggacactgcaccggrtccatgtgtcatccaggtgccgtggccttgggaagggtttggattccaagtcacctcgccgcaaggatgcccccgagagtgaggagggtcaagattaaga

SEQ ID NO: 432935 - DNA, 201 bp, Homo sapiens
cctcctttcctgtcccgggatcccagttatacgtgaacggagacctgaggctgcagcagaagcagccgctgagctgtggtggcctagatgcccgatacaaygtaagggcgcttctcattgtccagctcctttgtttctgtgtgttactgttcgtcgagttctttgaagagggggataaaaagtagaaatatttctctgtgg

SEQ ID NO: 432936 - DNA, 201 bp, Homo sapiens
ttcctgtcccgggatcccagttatacgtgaacggagacctgaggctgcagcagaagcagccgctgagctgtggtggcctagatgcccgatacaatgtaagrgcgcttctcattgtccagctcctttgtttctgtgtgttactgttcgtcgagttctttgaagagggggataaaaagtagaaatatttctctgtgggtggct

SEQ ID NO: 432937 - DNA, 201 bp, Homo sapiens
ttgtccccagcagaaacacatgtgggagcctttgattggaaattgctacagcactgtatctccacataaatgactatgtctgctctttatacaggggggargatcatttcctgttcgtatttctttctgagccattcttctaagtcagaatcatccatatttattttttaataatcttttattattcctttcatcttaaga

SEQ ID NO: 432938 - DNA, 201 bp, Homo sapiens
catctttgaagaaaagattattgatactgcagtaggccaccaagaacaagagggtgctctgtgggaccagcctgggtgggcagaagggtagaaggaaaagrggaggagtctcccaggtgctcacaccacatcctcctcccgtgtcccaagtatctgtgaccaacgggaccagcccctttgcctatgactacgacctcaccc

SEQ ID NO: 432939 - DNA, 201 bp, Homo sapiens
attatgatagtgttgaaacactttggcatccaaattatttgtatttccatgtaataaaagtatttccccacactgctacaaagttctaatttttttttttyttgaagagacacagggtcttgctctgatgatcaggctggagtgcagtgctgtaatcatagctgattgtaaccttgaactcctgtgggctccgtgatcctc

SEQ ID NO: 432940 - DNA, 201 bp, Homo sapiens
tgtgggaccagcctgggtgggcagaagggtagaaggaaaagaggaggagtctcccaggtgctcacaccacatcctcctcccgtgtcccaagtatctgtgaycaacgggaccagcccctttgcctatgactacgacctcacccatattgttgctgcctaccaggagaggaacggtgggtcacaggtagagcccattcagccg

SEQ ID NO: 432941 - DNA, 201 bp, Homo sapiens
cctcccgtgtcccaagtatctgtgaccaacgggaccagcccctttgcctatgactacgacctcacccatattgttgctgcctaccaggagaggaacggtgrgtcacaggtagagcccattcagccgctgctcaggactttcaaggttagtgggggcaacagagacaagcagaactggaacccttgtgatgaaaatgtcaaa

SEQ ID NO: 432942 - DNA, 201 bp, Homo sapiens
cagagacaagcagaactggaacccttgtgatgaaaatgtcaaaacccgtgaatgctcaacgatgggagcaaatgtgctgcccaggatttgtctttttcgtsctgatcttcagacccgggaccacccgcacccctccagcatcccgtggtccagcaggctagtgatggttaaatgccatcattatcccaccactggcttggt

SEQ ID NO: 432943 - DNA, 201 bp, Homo sapiens
cccctgtttcctgccagaaggcacagtgtgctcattccttacagagctctaggccatggcatgtgttcactcggcatgtttggctggtccgtggctgaggwtgtctgtgaaggcatctagagtgttacttggcaaccagacatcatggagactatacacaaacatttcacaagggggaacgactgcaaatccagtattgct

SEQ ID NO: 432944 - DNA, 201 bp, Homo sapiens
ttttcttgagatttatttatttttatagatggggttttcactatgttgcccaggctggtcttgaactcccaacctcaggaaatcctcctgtctcagccccmcaaagtgccaggaatataggcatgggccagtgtgccccgtctcttgagactgaaatgaaaaattgcttgtggtttaaatccccagaatttaatgaaacat

SEQ ID NO: 432945 - DNA, 201 bp, Homo sapiens
tataagcctaattgagttgttccccatagcacacctataacagatgccaaagacaaattgctgttcatgcttttcagagaaaaacagagaacgtgggtgastctccccacattagcagtccagcaggagaacaggagtgcccctgtttcctgccagaaggcacagtgtgctcattccttacagagctctaggccatggcat

SEQ ID NO: 432946 - DNA, 201 bp, Homo sapiens
gtcctgtcttccgtggatggcagcaggcgaagagagaatgaggaaaatgcaaaatcagaaacccctgataaaaccatcagacctcttgagatgtactaccrcgagagcagtatgggggaggaaccgccgccatgattcaattatctcccaccaggtcccttgcacaacacatgggaattatgggaatagaattcaatatga

SEQ ID NO: 432947 - DNA, 201 bp, Homo sapiens
gcacaccatgcccagctattttttttttttttttttagtagagacagggtttcaccatgttggctaggctggtctggaactcctgatctcaagtgacccasccacctcggcctttcaaagtgttgggattacaggcttgagccaccatgcctggcctatgccaattgtttcatagaatgtttacaatctagcttcctctga

SEQ ID NO: 432948 - DNA, 201 bp, Homo sapiens
gggttttgagcagagatgagatgattctgacttttatttttatttatttatttatttttttgagatggagtcttactctgtcgcccaggctagagtgcagwggcgcgatctcggctcactgcaagttctgcctcccgggttcacaccattctcctgcctcagcctcctgagtagctgggactacaggcgcccaccaccacg

SEQ ID NO: 432949 - DNA, 201 bp, Homo sapiens
gtctcaatctcctgacctcatgatccgccagtctcggcctcccaaagtcctgggattacaggtgtgagccactgcgcctggcctttttttttttttttttkgagatggagtctcactctgtcacccaggccggagtgcagtggcaggatctcagctcactgcagcctccgcctcctgggttccagcaattctctgcctcag

SEQ ID NO: 432950 - DNA, 201 bp, Homo sapiens
tccctctcacccattctgccagctctgctggccccatgggcacctagagcacatgcacttggtgaatctagatctttcttccctgagacattgctgcaccmcatcacctcatcacctcgcttccttcaggtctccaacaagtcaggtcatcctgaatattttctgtaaaactttctgttaaattctaccttcattattctt

SEQ ID NO: 432951 - DNA, 201 bp, Homo sapiens
acatcggtgggggcagacagcagccagtggtgactaatctgagttctttgttttctgagacggagtctggctctgttgcccaggctggagggcagtggtgktgtgatcttggcttactgcaacctccgcctcccggattcaaccaattctccttcctcagcctcccaagtggctgggattacaggagtgtgccactgtgcc

SEQ ID NO: 432952 - DNA, 201 bp, Homo sapiens
ttttaatgaatctgaatgtcaaggaaggcagatctttttctggtatcaggattgattttattgtgtgataatacagatttcactaaactaaagtcctagarggtcttgtgataattaaagtacaacccaataatatttttcttgtgtcattgctggaatcaagactgggtcagatttggaccactcatttattcactcaac

SEQ ID NO: 432953 - DNA, 201 bp, Homo sapiens
cctcggcctcccaaagtgctaggattataggcatgagccaccactcccagccgctttttgtttttgttttcgttttttattttttaaagacatggggtctygctctgttgtatagtgatttcgtgtcgtgtcatgcaatgatgtgatcatagctcactgtaaccttgagcttctgggctcacacaatcctcctgcctcagc

SEQ ID NO: 432954 - DNA, 201 bp, Homo sapiens
gactggaggcaccacaatgcctagtttattgggattttttttttttttttttttttggtagagatgggatctttatgttgcccaggctggtcttgaacttstgtcctctcaagcagtcctcctgcctcagcctcccagattgctgggattacaggcatgagccatgacatccagctgagagagattttataaatagcttta

SEQ ID NO: 432955 - DNA, 201 bp, Homo sapiens
aacctctttaaaaaaaaaatttttttttaatttaaaaaaaaaaagatcaaatgagacaaatgctattcacatgtttcttgtcttgttatcgccacttcaarttcccatttattttgtccagtgaacatttgaaagactcagatatgaagttcaggggccatgcactttgtgcctctttccccagtattaatgcacttacac

SEQ ID NO: 432956 - DNA, 201 bp, Homo sapiens
ttgctgatttgacatagctttcttttccatttcattgattgctacttaaagatgcacaaggctttcagggcctcacatgaatgatgagatgagatccaacrtcaagaatctgaagcaaagacacttgtggtttcagaacgtgtaaatagagcttggtgattttctgttgagtttgttgggggaatgcataatgattaggat

SEQ ID NO: 432957 - DNA, 201 bp, Homo sapiens
cttgccatatcctgtctggcctaaaccttagtttactttgacttataccatgtggtccccaactctttaactgtctgtccttatcagccaggattctgggmgatggtaaagttcgcctgggtgcagtatgtcagcatcctgcttatcttcctctgggtgtttgaaagaatcaagatcttcgtgtttcagaatcaggtggtg

SEQ ID NO: 432958 - DNA, 201 bp, Homo sapiens
gatgccccagggagaagtgtgtaaggagcacttatcctagaaaggccgtttctgaagactcagcaggaccatggctgcctcattgtcatcttctgggaacrtcttaggaccttttgaaagagcccagcggacacctgcgggcttgtgtgcttttccctcagagacaacggttctttccagttttgctctacacagttccgt

SEQ ID NO: 432959 - DNA, 201 bp, Homo sapiens; identical to SEQ ID NO: 116678

SEQ ID NO: 432960 - DNA, 201 bp, Homo sapiens
ctcattgtcatcttctgggaacgtcttaggaccttttgaaagagcccagcggacacctgcgggcttgtgtgcttttccctcagagacaacggttctttccrgttttgctctacacagttccgtatcttcagagctcctgcagaattgtcagggactagtttgtggaaaggtctgagagttcctggaggctataattagctt

SEQ ID NO: 432961 - DNA, 201 bp, Homo sapiens
ggaaggacacaagaagcagtgagggtgtaaagaggatgctggcctgggcaggccagtccagcctggccactagcagaataccaagcagtccagtggattaycctcgtggctaagcaagtgtctgcaggagcagagatggctggaaggggcctctgcacacggaagatggcttgttcagccgattcacctcctgaggatgcg

SEQ ID NO: 432962 - DNA, 201 bp, Homo sapiens
tttttaatattctggctattttagatgcctaaatttttttcttgagatttatttatttttatagatggggttttcactatgttgcccaggctggtcttgarctcccaacctcaggaaatcctcctgtctcagccccacaaagtgccaggaatataggcatgggccagtgtgccccgtctcttgagactgaaatgaaaaatt

SEQ ID NO: 432963 - DNA, 201 bp, Homo sapiens
tagatggggttttcactatgttgcccaggctggtcttgaactcccaacctcaggaaatcctcctgtctcagccccacaaagtgccaggaatataggcatgrgccagtgtgccccgtctcttgagactgaaatgaaaaattgcttgtggtttaaatccccagaatttaatgaaacatgggaagatggctaaagatacgtata

SEQ ID NO: 432964 - DNA, 201 bp, Homo sapiens
gaacaggccgggcacggtggctcatgcctgtaatccgagcactttgggagacagaggcgggcagatcacatctgagctcaggagttcgagaccagcctggrcaacatggtgaaaccctgtctctactaaaagtacaaaaattagcctggcgtggtggtgggcacctgtaatcccagctattcaggaggctgaggcaagaga

SEQ ID NO: 432965 - DNA, 201 bp, Homo sapiens
tgtctctaaaacacacacacacacacacacacacacacacacacacacacaattgtttcctcagttctggaggctggaagtctgagataagggtgccagcrtggttgggttctgactgggagttgggtgtcttctgtgtcctcacatagcagagagagagagatcaggagattgaaatctcttcctcttgtaaggccacag

SEQ ID NO: 432966 - DNA, 201 bp, Homo sapiens
cctggcgtggtggtgggcacctgtaatcccagctattcaggaggctgaggcaagagaatcacttgaactcgagaggcggaggttgcagtgagcctagatcytgccattgcactccagcctgggctacaaaagtgagactccatctgaaaaaaaaatcagtatcaaaatcatgaacaacacttatatgaaccctgtacataa

SEQ ID NO: 432967 - DNA, 201 bp, Homo sapiens
gctctgccctgttatttgtaaaggggattttttttttttttttttttgaaacagtttcgctctgtcgcccaggctggagtgcagtggtgcaatctcagctyactgcaacctccgcttcctgggctcaagcagttctcctgccttagcctcctgagtagctaggattacaggtgcctgccaccacgcccggctaatttttgt

SEQ ID NO: 432968 - DNA, 201 bp, Homo sapiens
atttgcagtttatgccaacttgttattgcaaaatcattgctctgaaatattcatttctaccaggaagctttggattgattttttttacccgcaatatctgmccaaccctccttattccagttgtttagatttcttttgtcatttttaatgaatctgaatgtcaaggaaggcagatctttttctggtatcaggattgatttt

SEQ ID NO: 432969 - DNA, 201 bp, Homo sapiens
cttgtgtttatgttctctatatctgttctctttcactgcaatatctctctgaaaatacatccttaaagaaataagctctttgagagcaggcatcttagacttttttcaccaatgttgccagcatatagaacgaactctgtaaatattcacagatggactgggcacagtggctcacgcctgtaatgccagcactttgggagg

SEQ ID NO: 432970 - DNA, 201 bp, Homo sapiens
ccagcactccagccagtggtcccattgctgtcccccttgctactttgcagcccccctggcctttttgctgttccttgaacccaagaagcagctgccacctsagggcttttgctcttgccatttcctctgccaggcatccatgtggcttatctaaccatgccattcaggtccctgttcagatatcgccaagcaccatccttc

SEQ ID NO: 432971 - DNA, 201 bp, Homo sapiens
ggctcacgcctgtaatgccagcactttgggagggttaggtgggcagatcacctgaggtcaggagttcgagaccagcctggccaacatggcaaaaccccatygctactaaaaatgcaaaaaaaattagcttggcgtagtggcttgtgcctgtaatcccagctactcaggaggctgagacacgagaatctcttgcacccagga

SEQ ID NO: 432972 - DNA, 201 bp, Homo sapiens
ttggcgtagtggcttgtgcctgtaatcccagctactcaggaggctgagacacgagaatctcttgcacccaggaggcggaggttgcagtgagctgagatcgygccactgcactccagcctgggtgacagagtgagactcataaataaataaataaatattcatggatgaatgaataaattcttaatgtttgtataagtttgc

SEQ ID NO: 432973 - DNA, 201 bp, Homo sapiens
tgggatagaagatggtctttctgctttggaagagaagcatggtgctgtgtgggggcttggggatgagctggcggtgggtggtggacagggggcctcagctsggaggccaggctgctcttgactgagccaggggccacagtagctgcccaggcaggagggatttgtgtgggcaccagagctctggcaggtgcacatttgtta

SEQ ID NO: 432974 - DNA, 201 bp, Homo sapiens
tgtagagacaggttctccctatgtggcccagtctggtcttgaactcctgagctcacatgatcctcccacctcggcctcccaaagtgctaggattataggcrtgagccaccactcccagccgctttttgtttttgttttcgttttttattttttaaagacatggggtcttgctctgttgtatagtgatttcgtgtcgtgtca

SEQ ID NO: 432975 - DNA, 201 bp, Homo sapiens
gtggctcacgcctgtaatcccagcactttaggaggctgaggcgggcagatcacctgaggtcaggagtttgagaccagcctggccaacatggtgaaactccrtctctactaaaaatacaaaaaattagccggccgtggtggcacatgcctgtaatcccagctactcaggaggctgagacaggagaatcgcttgaacccggga

SEQ ID NO: 432976 - DNA, 201 bp, Homo sapiens
aacatggtgaaactccgtctctactaaaaatacaaaaaattagccggccgtggtggcacatgcctgtaatcccagctactcaggaggctgagacaggagartcgcttgaacccgggaggcggaggttgcagtgagccgagatggcgccactgcactacagcgtgggcaacaagagcgaaactctgtctcaaaaaaaaagaa

SEQ ID NO: 432977 - DNA, 201 bp, Homo sapiens
taaaaatacaaaaaattagccggccgtggtggcacatgcctgtaatcccagctactcaggaggctgagacaggagaatcgcttgaacccgggaggcggagsttgcagtgagccgagatggcgccactgcactacagcgtgggcaacaagagcgaaactctgtctcaaaaaaaaagaaaaaaaaaacagacattggctggcc

SEQ ID NO: 432978 - DNA, 201 bp, Homo sapiens
tgaaaattttaaactgcattgtgtacttaagtttaagattatttttatggatatataacttcaaggtgttggataccacggatcattcattcaatgtgtakacatttggccaagtgcaggctctgacctggaggtataagcagataggaggcgtggcccttgaccccaaatagatgagaatttggtggtaaatacataacc

SEQ ID NO: 432979 - DNA, 201 bp, Homo sapiens
aatcgcttgaacccgggaggcggaggttgcagtgagccgagatggcgccactgcactacagcgtgggcaacaagagcgaaactctgtctcaaaaaaaaagaaaaaaaaaacagacattggctggccttgtggctcacacctgtaatgccagcactttgggaggccaaggtgggaggattgcttgaggccaggagttcaagg

SEQ ID NO: 432980 - DNA, 201 bp, Homo sapiens
cccaaatagatgagaatttggtggtaaatacataacctgtgtattagtccattttcatgctgctggtaaagacatccctaagactgggcaacttacaaaaraaagaggtttaattggacttacagttccatgcggctggggaagcctcacaatcttcatcgcggaaggcaaggaggagcaagtcctgtcttccgtggatgg

SEQ ID NO: 432981 - DNA, 201 bp, Homo sapiens; identical to SEQ ID NO: 146682

SEQ ID NO: 432982 - DNA, 201 bp, Homo sapiens; identical to SEQ ID NO: 146683

SEQ ID NO: 432983 - DNA, 201 bp, Homo sapiens; identical to SEQ ID NO: 146684

SEQ ID NO: 432984 - DNA, 201 bp, Homo sapiens; identical to SEQ ID NO: 146689

SEQ ID NO: 432985 - DNA, 201 bp, Homo sapiens
catggagtactaccaactagggaagctcactggagcatctatgtccacagtttttattggagtttcattacataggcatgattgaattaccaatcaggtgkttgagttcagtctccagtcttcctcctcttgttgagcagagaccaaatcccttattacatattgtgctactttgtttcatgataagaagttaacaccgcc

SEQ ID NO: 432986 - DNA, 201 bp, Homo sapiens
gtgccatactgcaaagtctgattaaatagtccttataagattatccttacttcagatactagctgttaagtttgggatgatcactttagaccagctgtctrtaaattaagaggttaccaaggctgcttgtaatgtttggtagtttactagaaagactcacaacctcactgaaagtgctgtgctcatggttacagttttatt

SEQ ID NO: 432987 - DNA, 201 bp, Homo sapiens
gcatttttagagatttcagaggtagaatctgaggatggagaagaatggcaggataagactaactttaaggtatttgcttttgagtgactagtcactgacasaattagcccatatcggggaaaacaggatgatcagcactctcctgttaacgttctagacagttgggggccatttatcttgaaacattatcttgtagtaatt

SEQ ID NO: 432988 - DNA, 201 bp, Homo sapiens; identical to SEQ ID NO: 146690

SEQ ID NO: 432989 - DNA, 201 bp, Homo sapiens; identical to SEQ ID NO: 146691

SEQ ID NO: 432990 - DNA, 201 bp, Homo sapiens; identical to SEQ ID NO: 146692

SEQ ID NO: 432991 - DNA, 201 bp, Homo sapiens
actatgcccaattattacttcctctaattgtatggtagcatgaaattgctatttgaccacagttgtatgttttgaactgtttatgtaattgccaactttaytagactttatcatttaaaactaagatttttgatttagaatcaatcgaggtgtttacactggcaactaacttgctaaatatactaatatagggcaaagtat

SEQ ID NO: 432992 - DNA, 201 bp, Homo sapiens; identical to SEQ ID NO: 146695

SEQ ID NO: 432993 - DNA, 201 bp, Homo sapiens; identical to SEQ ID NO: 146697

SEQ ID NO: 432994 - DNA, 201 bp, Homo sapiens; identical to SEQ ID NO: 146698

SEQ ID NO: 432995 - DNA, 201 bp, Homo sapiens; identical to SEQ ID NO: 146700

SEQ ID NO: 432996 - DNA, 201 bp, Homo sapiens; identical to SEQ ID NO: 146702

SEQ ID NO: 432997 - DNA, 201 bp, Homo sapiens
aaagcataaggatattctaagtccatattttaattttaaaaatatacaattcaggccgggcgcaggggctcatgcctgtaatcccagcactttggcaggcygaggcgggcggatcacgaggtcaggagatcgagaccatcctggctaacacggtgaaaccccgtctctactaaaaatacaaaaatttacaatttagtgcta

SEQ ID NO: 432998 - DNA, 201 bp, Homo sapiens; identical to SEQ ID NO: 146709

SEQ ID NO: 432999 - DNA, 201 bp, Homo sapiens; identical to SEQ ID NO: 146710

SEQ ID NO: 433000 - DNA, 201 bp, Homo sapiens; identical to SEQ ID NO: 146712

SEQ ID NO: 433001 - DNA, 201 bp, Homo sapiens; identical to SEQ ID NO: 146713

SEQ ID NO: 433002 - DNA, 201 bp, Homo sapiens; identical to SEQ ID NO: 146714

SEQ ID NO: 433003 - DNA, 201 bp, Homo sapiens; identical to SEQ ID NO: 146715

SEQ ID NO: 433004 - DNA, 201 bp, Homo sapiens; identical to SEQ ID NO: 146716

SEQ ID NO: 433005 - DNA, 201 bp, Homo sapiens; identical to SEQ ID NO: 146718

SEQ ID NO: 433006 - DNA, 201 bp, Homo sapiens; identical to SEQ ID NO: 146717

SEQ ID NO: 433007 - DNA, 201 bp, Homo sapiens; identical to SEQ ID NO: 146720

SEQ ID NO: 433008 - DNA, 201 bp, Homo sapiens; identical to SEQ ID NO: 146719

SEQ ID NO: 433009 - DNA, 201 bp, Homo sapiens; identical to SEQ ID NO: 146722

SEQ ID NO: 433010 - DNA, 201 bp, Homo sapiens
taaaacagagttagcagagtgctgctggttccttcggttagttatataactgttcctgcagtattggatagctatctcatacttcttttagaaagaagccyttttcattaaggatacaacctatttgtagctcgcactttaaaagatgcttgagatacattttaaagaaaactaaaaatccctgtaaataggattttgtgc

SEQ ID NO: 433011 - DNA, 201 bp, Homo sapiens; identical to SEQ ID NO: 146723

SEQ ID NO: 433012 - DNA, 201 bp, Homo sapiens; identical to SEQ ID NO: 146730

SEQ ID NO: 433013 - DNA, 201 bp, Homo sapiens; identical to SEQ ID NO: 146731

SEQ ID NO: 433014 - DNA, 201 bp, Homo sapiens; identical to SEQ ID NO: 146732

SEQ ID NO: 433015 - DNA, 201 bp, Homo sapiens; identical to SEQ ID NO: 146733

SEQ ID NO: 433016 - DNA, 201 bp, Homo sapiens; identical to SEQ ID NO: 146741

SEQ ID NO: 433017 - DNA, 201 bp, Homo sapiens; identical to SEQ ID NO: 146745

SEQ ID NO: 433018 - DNA, 201 bp, Homo sapiens; identical to SEQ ID NO: 146746

SEQ ID NO: 433019 - DNA, 201 bp, Homo sapiens; identical to SEQ ID NO: 146748

SEQ ID NO: 433020 - DNA, 201 bp, Homo sapiens; identical to SEQ ID NO: 146750

SEQ ID NO: 433021 - DNA, 201 bp, Homo sapiens; identical to SEQ ID NO: 146754

SEQ ID NO: 433022 - DNA, 201 bp, Homo sapiens; identical to SEQ ID NO: 146756

SEQ ID NO: 433023 - DNA, 201 bp, Homo sapiens; identical to SEQ ID NO: 146758

SEQ ID NO: 433024 - DNA, 201 bp, Homo sapiens; identical to SEQ ID NO: 146759

SEQ ID NO: 433025 - DNA, 201 bp, Homo sapiens
gatttttctgttggttttctacctcgcttagagctttagcttttacagtggctttataaggtttttcttcatgatccggcatattgctgcctctctgctckcatctccttgttctcatctcacatccccctcactgtgcaaacagtggccttcttgcgttcatctaagaccaatcatgtctttcctcatggcctttgtttt

SEQ ID NO: 433026 - DNA, 201 bp, Homo sapiens; identical to SEQ ID NO: 146763

SEQ ID NO: 433027 - DNA, 201 bp, Homo sapiens
tgctttgtcatttatccatctatcaattcattctttttgttggtacatttcataataagttgtagacatcaatacatattaccctgacacttgagcatgcrtgtcattaactagagtttgatatttgtttgtagtttttttaatcatttgtctgtttatttcttcccaaattattttctctcaagcatatttactagatgg

SEQ ID NO: 433028 - DNA, 201 bp, Homo sapiens; identical to SEQ ID NO: 146765

SEQ ID NO: 433029 - DNA, 201 bp, Homo sapiens
cctgcccagttggatcctttttatactcaaggagattctttgacttcagaagatcacctcgatgactcttgggtgactgtatttgggtaaggtttgcagaycatttgccttttaaaaaccccaccctaacattttataatgaatataatcaaacatacagtaaaatggaaagaagtgcatagcaaacacccatattactac

SEQ ID NO: 433030 - DNA, 201 bp, Homo sapiens; identical to SEQ ID NO: 146766

SEQ ID NO: 433031 - DNA, 201 bp, Homo sapiens; identical to SEQ ID NO: 146767

SEQ ID NO: 433032 - DNA, 201 bp, Homo sapiens
acacggtgaaaccccgtctctactaaaaatacaaaaatttacaatttagtgctataaatgcattttggtgtttctcttttaaatgagcaattctagaattrcctatgacactgaagtaacaataacctaaccgttttttttgtgtgtgttttttaataggttatttctgacagacaaacgccaaaaaaagatgaaagtctt

SEQ ID NO: 433033 - DNA, 201 bp, Homo sapiens; identical to SEQ ID NO: 146772

SEQ ID NO: 433034 - DNA, 201 bp, Homo sapiens
ttaataggttatttctgacagacaaacgccaaaaaaagatgaaagtcttgtatccaaagcaatggagtacatgtttggctggtagtagaacaccaagaagkaggttgctacactaaaacagagttagcagagtgctgctggttccttcggttagttatataactgttcctgcagtattggatagctatctcatacttcttt

SEQ ID NO: 433035 - DNA, 201 bp, Homo sapiens; identical to SEQ ID NO: 146775

SEQ ID NO: 433036 - DNA, 201 bp, Homo sapiens; identical to SEQ ID NO: 146778

SEQ ID NO: 433037 - DNA, 201 bp, Homo sapiens; identical to SEQ ID NO: 146781

SEQ ID NO: 433038 - DNA, 201 bp, Homo sapiens; identical to SEQ ID NO: 146783

SEQ ID NO: 433039 - DNA, 201 bp, Homo sapiens; identical to SEQ ID NO: 146795

SEQ ID NO: 433040 - DNA, 201 bp, Homo sapiens; identical to SEQ ID NO: 146797

SEQ ID NO: 433041 - DNA, 201 bp, Homo sapiens; identical to SEQ ID NO: 146799

SEQ ID NO: 433042 - DNA, 201 bp, Homo sapiens
ctatcccagctcactgcaacctctgcctcctgggttcaggtgattctcctgcctcagcctcctgagtagattacaggcacgtgccaccacgcccagctaaytttttgtatttttagtagagatgggaccatgttggccagggtggtctcaaacttttgacctcaagtaatctgcccaccttggcctcccaaagtgctggga

SEQ ID NO: 433043 - DNA, 201 bp, Homo sapiens
attttgtgctttctgtaacagtgcatgcttcagcacagaaaactcagcattgattattgtaaattaaataactgaaattgtggtgagacgtcatagtcttyatgagaacgtgggggtgaatttcatgaaggggaactatagttatttctaccgacacaaatattataattagcaatttgaattatggtcttttaatttaga

SEQ ID NO: 433044 - DNA, 201 bp, Homo sapiens
catgggaattccgggagatataatttgagttgagatgtgggtggagacacagccaaaccatttcatttcgtccttggcccctctaaatctcatgtcctcaygtttcaaaaccaatcatggtttcccaacacacccctgaaagtcttatttcagcattaacccaaaagtccacagtcccaagtctcatctgagttaaggcaa

SEQ ID NO: 433045 - DNA, 201 bp, Homo sapiens
aaaaaaatgcttttttatttccataggtttttggggaacaggtggtatttggttacatgagtaagttctttacatgattcgtgagactttggggcacccayctcctgagcagtatgcactgaacccaatttgtagtctttatccgtcacccctttcccaccctttcccccgagtccccaaagtccattgcatcattcttat

SEQ ID NO: 433046 - DNA, 201 bp, Homo sapiens
caccagttttgaattaacagaatgaacatttacaaacacacacacacacacacacacacaatgtcacagggttgatactttctggtccacaaaatattgamtattaatagaaacagagtatgacagtccttgttacatttttgaatagatttttaggtccaaaaaaaactttaaaatggctttttttaaaaaaaatgcttt

SEQ ID NO: 433047 - DNA, 201 bp, Homo sapiens; identical to SEQ ID NO: 146817

SEQ ID NO: 433048 - DNA, 201 bp, Homo sapiens; identical to SEQ ID NO: 146818

SEQ ID NO: 433049 - DNA, 201 bp, Homo sapiens; identical to SEQ ID NO: 146819

SEQ ID NO: 433050 - DNA, 201 bp, Homo sapiens; identical to SEQ ID NO: 146821

SEQ ID NO: 433051 - DNA, 201 bp, Homo sapiens
actttaatggctgagtgcatagcatgcttaactttttcattgtattgatttgtatgccattaaatgtttcctgtggaggctattaccttgatgaaaccttyacgctttaaaagttttctgctttaaagttaacatcttggccaattggaaagttatcatgaattaaaaaaaaaaatttatttgccattcctttaaattttt

SEQ ID NO: 433052 - DNA, 201 bp, Homo sapiens
caagtttaattagagcaaataaagtatttcatctttatcttttaattaaattttctaagtaggatgtaatactggatgatatgtattatgtttataaacaraggagttatttctttgtttctccagagtgttatggaaagcagtgacagatgtgctttatcatctccatctttagcctttacaccaccaatcaaaactcta

SEQ ID NO: 433053 - DNA, 201 bp, Homo sapiens
aaaatgccaccagtctctttgctaaaacataagaagagtcacctttgctccagtcgccaacaagttcctcatctccatctgagaccacctcagcttggaayttattgttcatatcactatcagcatttttgtcaaagccattcaacaagtctctgggaggttccaaacttcccacattttcttctgagctttccaaactgt

SEQ ID NO: 433054 - DNA, 201 bp, Homo sapiens
ccgagactggaaagaaaaagaggtttaattggacttagggttccatggctggacaggcctcagaatcatggtgggaggtgaaaggcacttcttacatgacrgtgtcaagagaaaatgaggaagaagcaaaagcggaagcccctgataaacccatcagatctcgtgagacttattcattatcatgagaatagcacaggaaag

SEQ ID NO: 433055 - DNA, 201 bp, Homo sapiens
aaatgctacctaagaagcaaatattttctcaagcctaaaattatttgcaagtttaattagagcaaataaagtatttcatctttatcttttaattaaatttyctaagtaggatgtaatactggatgatatgtattatgtttataaacaaaggagttatttctttgtttctccagagtgttatggaaagcagtgacagatgtg

SEQ ID NO: 433056 - DNA, 201 bp, Homo sapiens; identical to SEQ ID NO: 146826

SEQ ID NO: 433057 - DNA, 201 bp, Homo sapiens
gtaggcagattaagtgatttattcagccgttcacatctagttattattagcaaagctccagcaaaaacttgggtcttttgatattcaagctgatatttacrctctacaaaaatataaagtttgtttctgaaagtatgatttgccatactgtattagtccctattcatactgataaagacatatccgagactggaaagaaaa

SEQ ID NO: 433058 - DNA, 201 bp, Homo sapiens
gctgcttttattggggataaaagaagtaggaggcagttcctgagcttttagagtttttagagctttatagctctaaaatttaaaaaattatcttaccttgygctacaagttataagtaacaaatccttttttgttgctagagattgacttaactcctatacaaaatcaaattgagtagttttaaataactttatggcaagt

SEQ ID NO: 433059 - DNA, 201 bp, Homo sapiens
tttctggtccacaaaatattgaatattaatagaaacagagtatgacagtccttgttacatttttgaatagatttttaggtccaaaaaaaactttaaaatgsctttttttaaaaaaaatgcttttttatttccataggtttttggggaacaggtggtatttggttacatgagtaagttctttacatgattcgtgagactttg

SEQ ID NO: 433060 - DNA, 201 bp, Homo sapiens
aatgctaccttttttttaatttttttatttttttgagacagagtctctctgtcacccagggtgtaatgcagtggtgctatctcagctcactgcaacctccrcctcccgggttcaagcgattctcctgcctcagccttgagaggagctgggattacaggcatgcaccaccacacctggctaatttttgtgtttttagtagag

SEQ ID NO: 433061 - DNA, 201 bp, Homo sapiens
ataccataaatattttgatgctgaattttctctttgttatgatactaaatttcagaatttttaagtgatgctcaatgtataatgattcgtttataatttaraattctttatcttttcataaccgtagtatacctaaatatattacatattaacatacacatattgaaataaattatatatagaactgcaactttatagttt

SEQ ID NO: 433062 - DNA, 201 bp, Homo sapiens
ggctggagtgcagtggcacgatcttggcgcattgcaacctttccttcccaggttcaagcgatacttctgcctcagccgcctgagtagctgggattacaggygcccgccaccatgcccagctgattttttgtatttttagtagaggcggggtttcaccaggttggccaggctggtctcgaactcctgacctcaagtgatcca

SEQ ID NO: 433063 - DNA, 201 bp, Homo sapiens
tccattgtttgtaggtgtgtgactttgtttctgggttctccattctgtttcattggtctgtgtacctatttttgtaccagtaccatactgttttggttacygtagtcccatagtttgaagtcaggtaatatgatgctgctggctttgttctttttgcttaggattgctttggctatttgggctcttcttgcttccctgtga

SEQ ID NO: 433064 - DNA, 201 bp, Homo sapiens
ttgcaggaagagtgacattgtttttgtttttaaaaatctttttagtgtctggcttaataaaatacctgtgaattctcatgaatctgcttctcttttcaacstgagtctgttgaatcacatgaagttgcctctggaaaactccactgtacactaataagagactgagaaaaaggcaaatgaaacttcatgtttttgtgaaaa

SEQ ID NO: 433065 - DNA, 201 bp, Homo sapiens
ttgtcgatttattcttttgatagtttcttttgtgtgcaggaagtcattagtttaattaggtccaacttgtcaatctttgtttttgttgtatttgcttttgygatatgagttgtaaagtctttgcctaggccaatgtccagaagaggtttttcaaggttttcttttagaatttttgtagtttgaggtcttacatttaagtct

SEQ ID NO: 433066 - DNA, 201 bp, Homo sapiens
ggcctgaacccgggaggcggagcttgcagtgagctgagatcgagccactgcactccagcctgggtgacagagcgagactccatctcaaaaaaaaaaaaaaagaaaagaaatacagcattctgttctttcataggtaaaatgtcctagcagtgaggttaatagcagtcttttttattcttgctcttattgtctcgtctcttc

SEQ ID NO: 433067 - DNA, 201 bp, Homo sapiens
aaggtttttcttcatgatccggcatattgctgcctctctgctctcatctccttgttctcatctcacatccccctcactgtgcaaacagtggccttcttgcrttcatctaagaccaatcatgtctttcctcatggcctttgttttattattttctccacaaaatgttcacttcttcaaatattgttttgcttcccttgtcct

SEQ ID NO: 433068 - DNA, 201 bp, Homo sapiens
taacacaagacttaggtgttactccaacaataaaatgggacaatagacaagaactttaaaaagttaactgttgttagtaatacataacttcaattacagcmcaaatattaatttataaagtcaagtctaacagacttctaggaatgatgtccatgtcttgcctccaaatgatatcaaaacaaaactacagcctggacagga

SEQ ID NO: 433069 - DNA, 201 bp, Homo sapiens
agttcagtctccagtcttcctcctcttgttgagcagagaccaaatcccttattacatattgtgctactttgtttcatgataagaagttaacaccgccaggracctcttttttccaagtttcatttggctcgtatctatttaaaatttactagtcttttaatctcttttgttttcatttaggttagtggtctattttgaaat

SEQ ID NO: 433070 - DNA, 201 bp, Homo sapiens
gctcatgctttggattccgattgcctggattggaattccaactaaccttctggatgttatttaatattatcctgtttcctaatttgttaaatggactaattggaccttttgtaggattgttagaattaaataaaattacactcgtaaagtgtaataatcacttaataaaatgctaccttttttttaatttttttatttttt

SEQ ID NO: 433071 - DNA, 201 bp, Homo sapiens
acttcttttagaaagaagcctttttcattaaggatacaacctatttgtagctcgcactttaaaagatgcttgagatacattttaaagaaaactaaaaatcyctgtaaataggattttgtgctttctgtaacagtgcatgcttcagcacagaaaactcagcattgattattgtaaattaaataactgaaattgtggtgagac

SEQ ID NO: 433072 - DNA, 201 bp, Homo sapiens
aataccatgtggaagctgccaaggcttggggcttccactctctgaagccacagcccaggctctacattgtcccctttcagccacggctgcaggggctgggrtacagggcaccaagtccctaggctgcacacagcacagggaccctgggcctggaccacaaaaccgctttttcctcctgggcctccaggcctatgatgggat

SEQ ID NO: 433073 - DNA, 201 bp, Homo sapiens; identical to SEQ ID NO: 146831

SEQ ID NO: 433074 - DNA, 201 bp, Homo sapiens
ataaagctatttcatataaacataatcttttttgaagtgaacagtaactattttctaaagaaaaaaagatttgcaggaagagtgacattgtttttgtttttaaaaatctttttagtgtctggcttaataaaatacctgtgaattctcatgaatctgcttctcttttcaacctgagtctgttgaatcacatgaagttgcctc

SEQ ID NO: 433075 - DNA, 201 bp, Homo sapiens
aagtcaggagatacatacaatagttagaatatgttaagtagcctctagaaaatcaataaaaatggagcatgactcatgcgcattgacctgtagaacagtgrttctcaaatgtcttagttttgtagtttttaccttgtttatactcttaaaaattaaagagcttttgtttatatagattatagctatcaatatttactgcat

SEQ ID NO: 433076 - DNA, 201 bp, Homo sapiens
tttctctgatgatttgtgatgttgagcattttttcatatacctcttagccatttgtatgtcttttgaaaaatgtctattcatgttctttgcccacttcttkaacaggttatttttatcaaatatatctatagatatatttcgagatggagtcttaaactctgtcatttaggttggagtgcagtggcatgatcttggctcac

SEQ ID NO: 433077 - DNA, 201 bp, Homo sapiens
atctgtttgtttttttgtttaacaatagccattctgactagggtaaggtgatgatgtagttttgaattgcatttctctgatgatttgtgatgttgagcatwttttcatatacctcttagccatttgtatgtcttttgaaaaatgtctattcatgttctttgcccacttctttaacaggttatttttatcaaatatatctat

SEQ ID NO: 433078 - DNA, 201 bp, Homo sapiens
tttcgtttggttagatacccagtaagagaaattgttggattgaatggtagttctatttttagttctttgagaaatctccatatggctttctatagaggttktactaatttacgttctcaccaacagtgtatgagttctcttttctctgcatcctcgccagcatctgtttgtttttttgtttaacaatagccattctgacta

SEQ ID NO: 433079 - DNA, 201 bp, Homo sapiens
ttccagttccatccatgttgctgcaaaattgattcctttcctttaaatggctgaataatattccgttgtatatatacaccacattttctttattcattcasccattgttgaacccttagttgattccatatctttgctattgtgaatagtgctgtgataaacttatgagtccagctatctttttgttatattatttctttt

SEQ ID NO: 433080 - DNA, 201 bp, Homo sapiens; identical to SEQ ID NO: 146834

SEQ ID NO: 433081 - DNA, 201 bp, Homo sapiens; identical to SEQ ID NO: 146835

SEQ ID NO: 433082 - DNA, 201 bp, Homo sapiens; identical to SEQ ID NO: 146836

SEQ ID NO: 433083 - DNA, 201 bp, Homo sapiens
tagtcccagctactcgggaggctgaggcaggagaatggcctgaacccgggaggcggagcttgcagtgagctgagatcgagccactgcactccagcctgggygacagagcgagactccatctcaaaaaaaaaaaaaaagaaaagaaatacagcattctgttctttcataggtaaaatgtcctagcagtgaggttaatagcag

SEQ ID NO: 433084 - DNA, 201 bp, Homo sapiens
atggctggggaggcctcagaatcatggcgggaggcaaaaggtacttacatagtgacatcaagagaaaatgaggaagcaaaagcggaagcccctgataaacscgtcagatcttgtgagacttactcactatcatgagaatagcataggaaagaccagccaccatgattcaattacctctctcaggtccctctcacaacacat

SEQ ID NO: 433085 - DNA, 201 bp, Homo sapiens
atactgttttggttactgtagtcccatagtttgaagtcaggtaatatgatgctgctggctttgttctttttgcttaggattgctttggctatttgggctcytcttgcttccctgtgaattttagaatagttttttataattctgtgaaaaatgatgttggttatttgataggaattgtgttgaattcctttgggcaatatg

SEQ ID NO: 433086 - DNA, 201 bp, Homo sapiens; identical to SEQ ID NO: 146837

SEQ ID NO: 433087 - DNA, 201 bp, Homo sapiens; identical to SEQ ID NO: 146838

SEQ ID NO: 433088 - DNA, 201 bp, Homo sapiens; identical to SEQ ID NO: 146840

SEQ ID NO: 433089 - DNA, 201 bp, Homo sapiens; identical to SEQ ID NO: 146842

SEQ ID NO: 433090 - DNA, 201 bp, Homo sapiens; identical to SEQ ID NO: 146843

SEQ ID NO: 433091 - DNA, 201 bp, Homo sapiens; identical to SEQ ID NO: 146844

SEQ ID NO: 433092 - DNA, 201 bp, Homo sapiens; identical to SEQ ID NO: 146845

SEQ ID NO: 433093 - DNA, 201 bp, Homo sapiens
ctgaactcctaacttggcctcccaaagcgctgggattacagtcacgagccacagtgcaaagccaagctttttatcacagtagcttttccccccaccttctrtagataatcttttttgtttcttaagaacatacttggagaaatccatgtgactataaacactttggaatgagttaggatggttttcaactcatttgggaat

SEQ ID NO: 433094 - DNA, 201 bp, Homo sapiens; identical to SEQ ID NO: 146846

SEQ ID NO: 433095 - DNA, 201 bp, Homo sapiens
ctgggaccacaggcacacaccactacgcccagctaattttttgtatttttagtagagataaggttttgccatgttgcccaggctggtcctgaactcctaayttggcctcccaaagcgctgggattacagtcacgagccacagtgcaaagccaagctttttatcacagtagcttttccccccaccttctatagataatcttt

SEQ ID NO: 433096 - DNA, 201 bp, Homo sapiens; identical to SEQ ID NO: 146847

SEQ ID NO: 433097 - DNA, 201 bp, Homo sapiens
ctaattttttgtatttttagtagagataaggttttgccatgttgcccaggctggtcctgaactcctaacttggcctcccaaagcgctgggattacagtcaygagccacagtgcaaagccaagctttttatcacagtagcttttccccccaccttctatagataatcttttttgtttcttaagaacatacttggagaaatcc

SEQ ID NO: 433098 - DNA, 201 bp, Homo sapiens; identical to SEQ ID NO: 146848

SEQ ID NO: 433099 - DNA, 201 bp, Homo sapiens
tagtgtaggtgggtaggttggaattttggaggcatcattccattgtcttctgccttccagtgttctgtggaagccatttgtgatgatgattcctgagtatytttacgtgacctgttttccagaatttatgatatttctatggttggtattctcaattttgcaaatgtgtcttggtgtggaactttttcatttgttttgctg

SEQ ID NO: 433100 - DNA, 201 bp, Homo sapiens; identical to SEQ ID NO: 146850

SEQ ID NO: 433101 - DNA, 201 bp, Homo sapiens; identical to SEQ ID NO: 146851

SEQ ID NO: 433102 - DNA, 201 bp, Homo sapiens; identical to SEQ ID NO: 146852

SEQ ID NO: 433103 - DNA, 201 bp, Homo sapiens
catctgcgatttctttcatcagtgctttgtagttctccttgtagagatttttcacctcctgggttagatgtattcctaggtattttaatttttttttttttgatatgtggctattgtaaatgggattacatttttgatttggttctcagcttgaatgttattggtgtatagaaatgctactgatttttgtgaatacttttt

SEQ ID NO: 433104 - DNA, 201 bp, Homo sapiens; identical to SEQ ID NO: 146856

SEQ ID NO: 433105 - DNA, 201 bp, Homo sapiens; identical to SEQ ID NO: 146858

SEQ ID NO: 433106 - DNA, 201 bp, Homo sapiens
cttcttgcttccctgtgaattttagaatagttttttataattctgtgaaaaatgatgttggttatttgataggaattgtgttgaattcctttgggcaatayggtcattttaatgatgctgattcttctaatctatgagcgtggaatgtttttccatttgtgtcatctgcgatttctttcatcagtgctttgtagttctcct

SEQ ID NO: 433107 - DNA, 201 bp, Homo sapiens
tctttcataggtaaaatgtcctagcagtgaggttaatagcagtcttttttattcttgctcttattgtctcgtctcttctagttcttggtattttttttttyacccctctatcattgctggtgagcaaatatttatcaaatgaggcactaaaagctatttggaataagtgtgtgcataggattcggtattggcagcagggta

SEQ ID NO: 433108 - DNA, 201 bp, Homo sapiens
tcaatctttgtttttgttgtatttgcttttgcgatatgagttgtaaagtctttgcctaggccaatgtccagaagaggtttttcaaggttttcttttagaayttttgtagtttgaggtcttacatttaagtcttcaattcatcttggttaattttttttatatggtgagaggcaggctgcatatggttagctagttttcctt

SEQ ID NO: 433109 - DNA, 201 bp, Homo sapiens; identical to SEQ ID NO: 146862

SEQ ID NO: 433110 - DNA, 201 bp, Homo sapiens
attcttttgatagtttcttttgtgtgcaggaagtcattagtttaattaggtccaacttgtcaatctttgtttttgttgtatttgcttttgcgatatgagtygtaaagtctttgcctaggccaatgtccagaagaggtttttcaaggttttcttttagaatttttgtagtttgaggtcttacatttaagtcttcaattcatc

SEQ ID NO: 433111 - DNA, 201 bp, Homo sapiens
ctaaactgcaggctcggaaagccttaagcaaagatgggaggatttttggagaatccatcatgattggtgtaaaaccatgtattgacaaagtaagttattgrtgatgtaggcaaagtagcttaatctatatgaagagcacaagaccaaggattgaaattggtcgttgtgtcacttggtttcactgtgtctgtttttcttagt

SEQ ID NO: 433112 - DNA, 201 bp, Homo sapiens
acattcttacattcttattttttgacctttttttttttaagttggagtctcactgtcacccaggctggagtgaagtggcacgatgttggctcactgcaacytctactccccgggtttgagcgattctcttgtctcagcttcccgagtagctgggactacaggcacccgccaccatgcccggctagtttttgtatttttagt

SEQ ID NO: 433113 - DNA, 201 bp, Homo sapiens
tccctctgcagccttatcaacattcttacattcttattttttgacctttttttttttaagttggagtctcactgtcacccaggctggagtgaagtggcacratgttggctcactgcaacctctactccccgggtttgagcgattctcttgtctcagcttcccgagtagctgggactacaggcacccgccaccatgcccggc

SEQ ID NO: 433114 - DNA, 201 bp, Homo sapiens
taagggttccctctgcagccttatcaacattcttacattcttattttttgacctttttttttttaagttggagtctcactgtcacccaggctggagtgaaktggcacgatgttggctcactgcaacctctactccccgggtttgagcgattctcttgtctcagcttcccgagtagctgggactacaggcacccgccaccat

SEQ ID NO: 433115 - DNA, 201 bp, Homo sapiens
aatataacagcacttgtcaaagtgggatgtttcattctaaatcagacttattttagaaatgtattgaacaggttgaatatcccttagcagaactgcttagsaccagaagagtttcagattttggaatatttgcattatacttatcagttgagcattgaaaatctgaaatttcctttgagtgttatgctggtgctccaaaag

SEQ ID NO: 433116 - DNA, 201 bp, Homo sapiens
taaatatatgcttccacttactaaagcaatagttggtaacttagttgataagtagattcttaaaaatataacagcacttgtcaaagtgggatgtttcattytaaatcagacttattttagaaatgtattgaacaggttgaatatcccttagcagaactgcttaggaccagaagagtttcagattttggaatatttgcatta

SEQ ID NO: 433117 - DNA, 201 bp, Homo sapiens; identical to SEQ ID NO: 146867

SEQ ID NO: 433118 - DNA, 201 bp, Homo sapiens; identical to SEQ ID NO: 146870

SEQ ID NO: 433119 - DNA, 201 bp, Homo sapiens; identical to SEQ ID NO: 146871

SEQ ID NO: 433120 - DNA, 201 bp, Homo sapiens; identical to SEQ ID NO: 146873

SEQ ID NO: 433121 - DNA, 201 bp, Homo sapiens; identical to SEQ ID NO: 146874

SEQ ID NO: 433122 - DNA, 201 bp, Homo sapiens; identical to SEQ ID NO: 146876

SEQ ID NO: 433123 - DNA, 201 bp, Homo sapiens; identical to SEQ ID NO: 146875

SEQ ID NO: 433124 - DNA, 201 bp, Homo sapiens; identical to SEQ ID NO: 146877

SEQ ID NO: 433125 - DNA, 201 bp, Homo sapiens; identical to SEQ ID NO: 146878

SEQ ID NO: 433126 - DNA, 201 bp, Homo sapiens
tccacagtcccaagtctcatctgagttaaggcaagtcccttccacctatgagcctgtaaaatcaaaagcaagatagttatttcctggatacagtggggttrtaggaattgggtaaatacagccattccaaatgggagaaattggccaaaacagaggggttataggccccatgcaagttcaaaatccagaggggcagtcaaa

SEQ ID NO: 433127 - DNA, 201 bp, Homo sapiens; identical to SEQ ID NO: 146879

SEQ ID NO: 433128 - DNA, 201 bp, Homo sapiens; identical to SEQ ID NO: 146880

SEQ ID NO: 433129 - DNA, 201 bp, Homo sapiens; identical to SEQ ID NO: 146881

SEQ ID NO: 433130 - DNA, 201 bp, Homo sapiens; identical to SEQ ID NO: 146882

SEQ ID NO: 433131 - DNA, 201 bp, Homo sapiens; identical to SEQ ID NO: 146883

SEQ ID NO: 433132 - DNA, 201 bp, Homo sapiens
tcccgtgaacccaggaagtgaaggtttcagttagccaagatcgtaccatcgcactccagcccaggcgacagtgcgagactccatctcaaaaaaaaaaaaaatacaaaaattagtcagacatggtggcgggcacctataatcccagctactcaggaggctgaggcagagaattgcttgaacctgggaggcagaggttgcagt

SEQ ID NO: 433133 - DNA, 201 bp, Homo sapiens
taaatatggacataatggtaatatttacttgattttacttccggaaaagcagtgattatagaattgctactgcttgccaagtaattagaaaaataaaaatktaaaaaaaaataaaaggattgctactgccaaccttacacaaattatagtatagtgttactaagccataccccttaatttgaattagcaatttaaatgagg

SEQ ID NO: 433134 - DNA, 201 bp, Homo sapiens
actcaaaacactacagaattccacctaaaatagaaccagaaattttctttgtgactgagattgcattattcttggaaaaggagaaaagacaaagaacaaaacaccaaacatcaataaaaatttttatctaaagcactgacaaatgtctcagtactgagaacatctgggaacaaacaactttaatgatgcacctctttccca

SEQ ID NO: 433135 - DNA, 201 bp, Homo sapiens
aagaaaagaaccagatagtaaatggttatctctgagtgatgagattgccaattatttttcttttttatattttgtgtatgtgtatttcctaactgtgaacrtggttgtagaataagacacttttataaaatcctttaactggaattttcaagtatttatattggcttttttttttaatattaaatgctttaccttaaaaca

SEQ ID NO: 433136 - DNA, 201 bp, Homo sapiens
ttaaaagtttttggtttgttttgagacagggtctcactctgtcacccagactggagtgcagtggtgcgctcacagcaacctccatctcccaggcttaagcratcctcccactccagcctccctagtagctgagactacaggcatgggccaccatgcccagctaatttttatattgttagtagagacagggttttgccatgt

SEQ ID NO: 433137 - DNA, 201 bp, Homo sapiens
ttgttttagaggtaatggagttaatacacataaagcattttagcatatgtttactatttataaagagttgttttagaggtattggagttaatacacataargcattttagcaaatgtttactattattataatgaagaaaagaaccagatagtaaatggttatctctgagtgatgagattgccaattatttttctttttta

SEQ ID NO: 433138 - DNA, 201 bp, Homo sapiens
ctgtttttgtaaggtccatgagctaagaatggtttttacaaatgaacatttgtaatgactttgatgctaaggatcactaactttgagctccagttaagtaraatgttacccccaaaaggggagttccatttttttcgtcagtagacctgtattacaaaaaaatttgtagtcagttacttactacattttgaattttatcaa

SEQ ID NO: 433139 - DNA, 201 bp, Homo sapiens
aaaatgtctttatgacctctggccaaagatttcttaaaacacaaaagcaaagccataaaagaatatgctgctaaattaactaatgaaactttaaaaaaaawttttttcatgaagaaacaacgtaaagtacaaagacaagccacagactggaagaaggtatctgcaatgcatataatcaataaaggattagtgtctgtaata

SEQ ID NO: 433140 - DNA, 201 bp, Homo sapiens
actgcattattcagtcaacaaattttcatggtcacctactatatgccaacctctattgtaaattatacagatacaataggaataaaatagacttagttcctttttttttttttttgagatggagtcttgctccgtcacccaggctggagtagagtggcgcgatcttggctgactgcaacctccgcctcttgggttcaagcg

SEQ ID NO: 433141 - DNA, 201 bp, Homo sapiens
ttatgagaagaagcaccatatgacttattcatgtttgaccccaatgtctggttcgtttaatatttgtttacaaaactaggcaatgggctgggcacagtggyttacgcactttgggagaccaaggcgggcaaatcatttgagatcaggagctcaagaccagcctggcaaacatagtgaaaccctgtctctactaaaaaaacg

SEQ ID NO: 433142 - DNA, 201 bp, Homo sapiens
aattaataataatgacaataatgtttatttcaaaatagccacaaagaagtgataaatatttgaggtgatggatatgctaattggcctgatttgatcattcygcaatgtatacatgtatcaaaacatcacactgtgccccataaatatatacaattattatttgtcaattaaaaataaaattttaaaaacactttagaggtt

SEQ ID NO: 433143 - DNA, 201 bp, Homo sapiens
tactgacttttacttcatcaaataccaggctgtcttgtatcgttctttggcttatttatggttctttggatttgacatccctaaggttttcttggttcatrttacagcaatatacagaaatcacagactgtaattcaactacccatctgatgactgactatcttctacaacactcccaccaagtggtcatctggactgtac

SEQ ID NO: 433144 - DNA, 201 bp, Homo sapiens
tccctaagtttcttgagacagagtcttgctctgtagcccaggctggagtgcagtggcacgatctcagcccactgctactcactgctacctctgcctcccgsgtcctggctcaagcaattctcccgcctcagcctcccaagtagctgggattacaggcacatgccaacatgcccagctaatttttgtatttttagtagtgac

SEQ ID NO: 433145 - DNA, 201 bp, Homo sapiens
aaatactaatgtgtctaagaattaggtgagaattggatgtggtaggacaatcagagaaattttctcacaagtagaaattgagataggctctgaaggcttgytgcatagtttcagataaacagaaacaataatatcagggcacagtgggcccattccctcctactagacagtacaggtgcatgggacatacgagagatatct

SEQ ID NO: 433146 - DNA, 201 bp, Homo sapiens
tgggaggctgaggcagggaaattgcttgaacccagaggcagaggatgcagtgagccaagacagcactactgcactccagcctgggtgacagagcaagattcatataaaaaaaagtacccatgccataggattgttgaaggaattcaatgatactatatctggtatacagtaaaaatttcctaaatgaaagctattcttatt

SEQ ID NO: 433147 - DNA, 201 bp, Homo sapiens
atctgacaaataccaaaaaccctatccccttacctcacagtattattggatgatcaaatgtgacaagatgacgcaaaagccttttgtgtgttgtaaagtgytaaatgagggcataaacagcccctctgggtcataggagaagactggtgggatctccatgtcatggcccttattagaattgttcaccattgatcatcataa

SEQ ID NO: 433148 - DNA, 201 bp, Homo sapiens
ataaacagaaacaataatatcagggcacagtgggcccattccctcctactagacagtacaggtgcatgggacatacgagagatatctggccgggtgtggtsgctcacacctgtaatcccagcactttgggaggccgaggcaggtggatcatgaggtcaggagatcaagaccatcctggctaacacggtgaaaccctgtctc

SEQ ID NO: 433149 - DNA, 201 bp, Homo sapiens
ttagccgggcatggtggtgcatgcttgtaatcccagctacttgggaggctgaggcagggaaattgcttgaacccagaggcagaggatgcagtgagccaagmcagcactactgcactccagcctgggtgacagagcaagattcatataaaaaaaagtacccatgccataggattgttgaaggaattcaatgatactatatct

SEQ ID NO: 433150 - DNA, 201 bp, Homo sapiens
gatctcttcactccagagttctacactctctccactgcatcagaatacttcaggttcgtagacaagcatgtggtgcacacttgtagtccccgctatgatcrcaccactgcactcccgcctgggtgacagagtgaaatcctacctctaaaaaaaataataaaatagaaaaagaatgctttgggtgctctccatcatcttgag

SEQ ID NO: 433151 - DNA, 201 bp, Homo sapiens
cagacaagaggccagaatcatcctgaacatccttgtcttctacacctcatattctatgttggagccatcacaatccctttgattttcatttccacagtgcytcttgaatccatccccactctatttctagggctttagttcagtcctttatcatgtctcacctcagatattgctgcagactgggagcccttattgccaggc

SEQ ID NO: 433152 - DNA, 201 bp, Homo sapiens
atactcttttaacatcatttggttccctgccactttctgtactgattaactcaggaaaatactgagagaaatatgagcaaccagccatgagagtctgtcayagattttgagttaagtctatctgatagaaacagaatgtaagaaacagaaatgtctttggagcatcaggcttgactctctctaattatactagaataatat

SEQ ID NO: 433153 - DNA, 201 bp, Homo sapiens
attataatccaggtcaacaagcaaatagtatttcctttcccttatacaccttcaaatggaggctactgtatatttaccaccagggctttattcatgcactyttagttgaacacagataatacgttttacttattcctcctttgaattctactcatttatcactggaacactatccacatttatatatagcagactcaaact

SEQ ID NO: 433154 - DNA, 201 bp, Homo sapiens
ctctcattttgtaagctctattctctctcttcaggtgactaagcagtctgcaatcttccttcctttaattgaataattttcaggcttgtgtcttatccttycggtttttacaaattcatgcaatcattttctcctgtgactacagtaaagggttttatggctacggtcctttcgttagcacacatgtctctagaactctct

SEQ ID NO: 433155 - DNA, 201 bp, Homo sapiens
tttaattgaataattttcaggcttgtgtcttatccttccggtttttacaaattcatgcaatcattttctcctgtgactacagtaaagggttttatggctayggtcctttcgttagcacacatgtctctagaactctctagatctgctacacatacactgtctcaacgcagactttcatctactcttatgttccagatagac

SEQ ID NO: 433156 - DNA, 201 bp, Homo sapiens
cgtttacctcagacccgcgccgcagcctcccggagcccgcgcccaggactccctcacgacctctccagggtcccggcccgacaccaaggggcaggtgaggrgtggaacctggaggcacccgcgccagggcccctgagggaggcgggagggggacagcctcagtcctgactcgcagccgaggcgcgacgactccgcgcagtc

SEQ ID NO: 433157 - DNA, 201 bp, Homo sapiens
ggaggtgactgatcttggttaaggctgcgaccaacatggaggtaattgatcttggttaaggctacgacacgtttccctttagagaaaaatcatgttttccycctcaaaaaatcatgcgttaatttcctccaaccaaactaagtcccaggactactccgaaaactactcaatgaccatctgggcatttgtacatgggtttcc

SEQ ID NO: 433158 - DNA, 201 bp, Homo sapiens
accctccatgctgcctctcctcaagggcttctggagtccccaagtcaaatggcaaatggggaagagaagacagggtatggagtacaagaggcctagatccyctataggtctgatctggctggtgctgcccctagccagtaaagccaccctccagaccccttcaagcctgttgtagccttaaccaagatcaaccaacatgga

SEQ ID NO: 433159 - DNA, 201 bp, Homo sapiens
agtgacacagctacatgcaagaccctgtactaagcactactgacacagattaataaaatagttcatgctttcaaatatctcaaaatcgaatcaaaaattcygaaactaaatgattctctcataaacaattacctatacatcaatgttgggtattgtaataaatatacacataagatgggagtgttattttaggaatattaa

SEQ ID NO: 433160 - DNA, 201 bp, Homo sapiens
gtacaaaaagtagttagaaagaatgagtaagatctagtgtttgatagcagaacagggtgactatagtcaataatttaattgtacatttaaaaataactataagagtataattggattgtttgtaacacaaagaataaatgcttgaagggatggataccccacttactatgatgtgattattacacactgcatgtctgtatc

SEQ ID NO: 433161 - DNA, 201 bp, Homo sapiens
tacaaaaagtagttagaaagaatgagtaagatctagtgtttgatagcagaacagggtgactatagtcaataatttaattgtacatttaaaaataactataagagtataattggattgtttgtaacacaaagaataaatgcttgaagggatggataccccacttactatgatgtgattattacacactgcatgtctgtatca

SEQ ID NO: 433162 - DNA, 201 bp, Homo sapiens
ctattctatccaatatagtactaaagttcctagagatcacaataatacatgaaaaagaaaagaaacaaaataacattatctgcagctgaattaactgtctrtatagaaaaattcaaaacatttctttggaatattattggaactaatgagagtttatcaaggctgtcggatataaaatcaacataaaaaaccaacagcatt

SEQ ID NO: 433163 - DNA, 201 bp, Homo sapiens
atgaatcattagtataccttatagcttctcagagtacacaatctacttagcttcagtataaagtattttaagatgccaattatctgcagatggtgaagtayagaacataagtctgtttggcctaacttaacaaatacataattctttctacacacttgtttcgccccgggctgtgtacctatttgacctcttaacccccat

SEQ ID NO: 433164 - DNA, 201 bp, Homo sapiens
gtggacaattacattaacagatggagcttctgctggggcaatctgagaaaacttaaaaaaaaaatctcagtgactatcactaatgttatctttcaagctgrcatccatgatcttattttttattttattttttgagatggaatttcactcttgttgcccaggctggagtgcaatggcgcaatctcggctcactgtaacatc

SEQ ID NO: 433165 - DNA, 201 bp, Homo sapiens
aagatatttcaacttagcttattccattccttcaagaaagtggggaaggtatcattatcctcatttctagttcagttcagtccttattgtacccatggtawtccaacacaagtgagacccaccccatgtgattaaggcactcatatccagggtgttctcatttctagtccagttcagtccttatgggacccatggtattcc

SEQ ID NO: 433166 - DNA, 201 bp, Homo sapiens
agcagaacagggtgactatagtcaataatttaattgtacatttaaaaataactataagagtataattggattgtttgtaacacaaagaataaatgcttgargggatggataccccacttactatgatgtgattattacacactgcatgtctgtatcaaagcatctcatgcaccccacaaatatatatacctactatgtcct

SEQ ID NO: 433167 - DNA, 201 bp, Homo sapiens
tcaaagcaccagtttcaatccctggtcttgccattgacttctttgacaggacaagtcactgagctgccacacctacttttacataaaatgagttaataaaygtgggccgggcgcggtggctcacgcctgtaatcccagcactttgggaggccaaggtgggtggatcacctgaggtcaggagttcaagaccagcctggccaa

SEQ ID NO: 433168 - DNA, 201 bp, Homo sapiens
agattaataaaatagttcatgctttcaaatatctcaaaatcgaatcaaaaattccgaaactaaatgattctctcataaacaattacctatacatcaatgtygggtattgtaataaatatacacataagatgggagtgttattttaggaatattaagcttaaactattacgctgaaaaggctctactagaagacaaacacac

SEQ ID NO: 433169 - DNA, 201 bp, Homo sapiens
gaattgagacatgagattctgaactctgaaataatctaagatagtcactacatcattgttcctgcctggaaaaacaatccagaccccaaacttttcttctytgatgccctgcagtggggttgacaataaactctcacaggcttgagccttgtggcatcatcagtacagcagaaacagttgcagacattttgggtgaaaaat

SEQ ID NO: 433170 - DNA, 201 bp, Homo sapiens
ttttaagagtctcgctttgtcatccaggctggtgtgcagtagtgcaatctcggctcactgcaagctctgcctcccaggttcacgccattctcctgcctcarcctcctgagtagctgggactacaggcgcctgccaccaggcccagctaattttgtttgtttgttttgagacagagtcttgctctatcacccaggctggagt

SEQ ID NO: 433171 - DNA, 201 bp, Homo sapiens; identical to SEQ ID NO: 404092

SEQ ID NO: 433172 - DNA, 201 bp, Homo sapiens
caaaatagccacaaagaagtgataaatatttgaggtgatggatatgctaattggcctgatttgatcattccgcaatgtatacatgtatcaaaacatcacaytgtgccccataaatatatacaattattatttgtcaattaaaaataaaattttaaaaacactttagaggtttaatatgaataaagaaggtttactatgagt

SEQ ID NO: 433173 - DNA, 201 bp, Homo sapiens
actccaccctgggcaatagagcaagactcctccgtctcaaaaaaaaattttttttttcaagggtaaagcctacaataggagctcttggaaagaaaaaataygacatcagaaacaaaatgcttagtggaaggattagaaaacattgaggaaattttccaggaagtagaataaaaagacaaaatagaaactaggaaggaacag

SEQ ID NO: 433174 - DNA, 201 bp, Homo sapiens
gcagtgacggagagcaggtcagcctccgtctcaacggccacccgccaggagtgtgggccaacggcagtgctccccaccctgagcggaggcccaatggctaygccctggggctggtgagtggagggagtgcccaagagtcccaggggaacacgggcctcccagacgtggagctccttagccatgagctcaagggagtgtgcc

SEQ ID NO: 433175 - DNA, 201 bp, Homo sapiens
ttaatgctagggacaaagaaatcccgcaaggtcgcacacacagagtgaggaatcagaatggctttggccttctcaacagcagcactggaagctagaagacracagggctgaggaatctaagttctgaggcaaaacgatttcttacctagaattccacactcaattaaccaagtgttagacattttcagacacacaagattt

SEQ ID NO: 433176 - DNA, 201 bp, Homo sapiens
ttctttccattgcacttcttcttcttctttttttttttttctttgagacggttttcttttctcgctctgttgcccaggctggagtgcagagcagtggcacsatcttggctcactgcaacctccgcctcccaggttcaagtgaatctcctgcctcatcctcccgagtagctgggactacaggcacttgccaccatgcctggc

SEQ ID NO: 433177 - DNA, 201 bp, Homo sapiens
cttcttcttcttctttttttttttttctttgagacggttttcttttctcgctctgttgcccaggctggagtgcagagcagtggcacgatcttggctcactrcaacctccgcctcccaggttcaagtgaatctcctgcctcatcctcccgagtagctgggactacaggcacttgccaccatgcctggctaattttttctgtg

SEQ ID NO: 433178 - DNA, 201 bp, Homo sapiens
ggagtgcccaagagtcccaggggaacacgggcctcccagacgtggagctccttagccatgagctcaagggagtgtgcccagagccccctggcctagatgamcccctggcccaggatggagcaggagtgtcctgatgattcatggagtttgccccttcctaagggaaggagatctttatctttctggttggcttgaccagtc

SEQ ID NO: 433179 - DNA, 201 bp, Homo sapiens
agaacagggccaggggctcagcaaaggcttctaggtacaaatgggccctagtcctcccagggccagctcctgcctagtggtagagcacaggcctcctcatrtcctcaggagcttagggtcccatgtccacacccaccccatgttggttcccaccgtcagcaggcctgagtgtaagcacatgggcagagacctgaacatatg

SEQ ID NO: 433180 - DNA, 201 bp, Homo sapiens
agggctacgggtggataacatgcttcattcaggcctgtcccacgcataagggtcccatcacagatccatgttcttgatagccccagcccccctctacagcrggtgttgccaggccacagggaggtctgagagcaggggtctggctcaggctcagccttggctcatcactggccctcacaagagacaagccctccggagggc

SEQ ID NO: 433181 - DNA, 201 bp, Homo sapiens
gtaaatctgcgcctgattttcatctgcctacactgaattatgccatccatttggaggcaattttcaagttaaaatgttgtcagaaggctgtcacagttttkatctttcttttctgttctttctcaacccacccacattttctagttaggttggaaaggggagtgagggggatagagcctggtttatattcagagatttctg

SEQ ID NO: 433182 - DNA, 201 bp, Homo sapiens
ctgatgacatctcttctgctgctaagttatgacttaacgcctgaataatgtgctggttttcaccagtgtatgttctattttcctaccaagactataaattygaatcccagagagaggagtggggatggtatctcctccatcctagggcgaagcatagcaacacttggtaaggcacactgactgggtcgagagacctgggtt

SEQ ID NO: 433183 - DNA, 201 bp, Homo sapiens
tggggcgaggtggcaggaaatgactggtccaagaccttacagtcaggaaatgtggaaacgggtgctgctctggggttctgaactcttggccctgcttaacyctggcttctcagatctctgatgctggtctcttctccccaggtacaatggcttggtgaccggcacgagggctaagggcatcattgccatctgctgggtgct

SEQ ID NO: 433184 - DNA, 201 bp, Homo sapiens
tacttccacttaacggaagaggatgctggggcgaggtggcaggaaatgactggtccaagaccttacagtcaggaaatgtggaaacgggtgctgctctgggrttctgaactcttggccctgcttaaccctggcttctcagatctctgatgctggtctcttctccccaggtacaatggcttggtgaccggcacgagggctaag

SEQ ID NO: 433185 - DNA, 201 bp, Homo sapiens
acgcccggccatcatccataatcttaatttcatccacagagaaaggtagagagcagcaaggggaattgagacatgagattctgaactctgaaataatctawgatagtcactacatcattgttcctgcctggaaaaacaatccagaccccaaacttttcttctctgatgccctgcagtggggttgacaataaactctcacag

SEQ ID NO: 433186 - DNA, 201 bp, Homo sapiens
gcagatgtttcatgctgtgaggccttgcaccaggtgggggccacagcaccagcagcatctttgctgggcagggcccagccctccactgcagaagcatctgkaagcaccaccttgtctccacagagcagcttgggcacagcagactggcctggccctgagactggggagtggctccaacagcctcctgccacccacacacca

SEQ ID NO: 433187 - DNA, 201 bp, Homo sapiens
tgtcaataaatctctttcaaacttatctactcatgcttggaaattcgtcattagagctttacttctttggcacaagccaaatgtgggtttttgtcttttawaaaagacatatcagtcatatcagtcatctcagtgtgaatggagtatactggtcctttcctgggagcaggctcatacgaagagaagactagaacactgaag

SEQ ID NO: 433188 - DNA, 201 bp, Homo sapiens
catgaggcccagcaagaagggcttgggttctgaggaagcagatgtttcatgctgtgaggccttgcaccaggtgggggccacagcaccagcagcatctttgytgggcagggcccagccctccactgcagaagcatctggaagcaccaccttgtctccacagagcagcttgggcacagcagactggcctggccctgagactgg

SEQ ID NO: 433189 - DNA, 201 bp, Homo sapiens
tcacgttgggagaagagagagagtgccaggagaccctgagggcagccggttcctactttggactgagagaagggagccccaggctggagcagcatgaggcmcagcaagaagggcttgggttctgaggaagcagatgtttcatgctgtgaggccttgcaccaggtgggggccacagcaccagcagcatctttgctgggcagg

SEQ ID NO: 433190 - DNA, 201 bp, Homo sapiens
gaaaggagtgctggccatgggtaagggctagtaatttaaacgggatggttagggtataaaaattctaagcctcagcttccttatctgtgaagcaggacaayaatagtacctatgctggccaggggctgtggctcatgcctgtaatcaccgcactttgggaggctgaggcaagcggatcgttcgaggccaggagttcaagac

SEQ ID NO: 433191 - DNA, 201 bp, Homo sapiens
ccaaggacctttaaggaccataaagccctcatctttgcccattgagggttatctgtaaatggggcatccatttgacatgcctgtgaaaatattgctggackcttacaaaatattaattttagatacatgactcagtgggtcccttcatttcaggcagataagtggttctgtcagtggggttgggcacagaacaaaagaaat

SEQ ID NO: 433192 - DNA, 201 bp, Homo sapiens
ttttttttttttttttggagactgagtcttgctctgtctcccaggctggagtgcagtggcgcgatcttggctcactgcaagctctgcctcctgggttcacrccattctcctgcctgtctcccaagtagctgggattacaggcccccgccaccacggccggctagttttttttatttttagtagagacaaggtttctccatc

SEQ ID NO: 433193 - DNA, 201 bp, Homo sapiens; identical to SEQ ID NO: 404109

SEQ ID NO: 433194 - DNA, 201 bp, Homo sapiens
aaggtttctccatctcctgacctcgtgatccgcctgcctcggcctcccaaagtgctgggattacaggtgtgagccactgcgcccggcctccttgcaccttytgagtgtccctgtctcggagctggcaatgcagagatggatgtaggaaagccctgcccccgaggggcccagatgtggtggggatctgctgcacttcggtag

SEQ ID NO: 433195 - DNA, 201 bp, Homo sapiens; identical to SEQ ID NO: 404112

SEQ ID NO: 433196 - DNA, 201 bp, Homo sapiens
tttcctttctctgagttccagtgtcttccactataagatgatgagatcagactagatgctctttaaattcccttctaattctaatgactctaattcttatwaaaaatagtatatttacatttgtataccctataaggacagtatgagaaaagaaaattagaggccaattttattaatgaacatagatataaaatactaaag

SEQ ID NO: 433197 - DNA, 201 bp, Homo sapiens
gactggggagtggctccaacagcctcctgccacccacacaccactctccctagactctcctagggttcaggagctgctgggcccagaggtgacatttgactttttttccaggaaaaatgtaagtgtgaggaaaccctttttattttattacctttcactctctggctgctgggtctgccgtcggtcctgctgctaacctgg

SEQ ID NO: 433198 - DNA, 201 bp, Homo sapiens
ggactggagttcagcttaggctagtcagctttgctttgtttcatggtctcatgcagccttctcaaaattaccgatctttcaaatgtatgctatttatcccragaagaactggtggaaagactataaatgattcaatgcaaagccattatcaccactgaaaaaaacaacgcaaagataagtatccagtacattaaagatggt

SEQ ID NO: 433199 - DNA, 201 bp, Homo sapiens
gttctggctgctgctcgcccatctgctctgatgagactctcccaaaccctggactcccattggtttcattccaaggaatctcctggaggaaagataagcascagttaagtcacagctgtagaaataataagatctggaggggcacttatatctgtttggccgagttagattttcaagcaggccaagtatgtggtgatggtg

SEQ ID NO: 433200 - DNA, 201 bp, Homo sapiens
cctccctctccaccaaccactattcagtttcccaccattcaagatctacaaggggccaggcgcggtggctcacgcctgtaatcccagcactttgggaggcygagctgggcgaatcacttgaggccagaagtttgagaccagcctggccaacatggagaaaccccatctctactaaaaatacaaaaattagccaggtatgtg

SEQ ID NO: 433201 - DNA, 201 bp, Homo sapiens
atttggagataagtaaattccaaaagaattaaacaagttgaaattggtccctctaaggaaaaggaaatggggttggggtgggtacagggaggttgaggacygctctttgtcttaacaaatcttaaagaactagttccctttttaatcaatgttcctgtataactttgataaaatttaaaattaaaaaattaccatggtgaa

SEQ ID NO: 433202 - DNA, 201 bp, Homo sapiens
tgaaaagtatatgcagttatctgggttcaagttccacctctgctacttacctgtgtgatcctggcctagctacctaatctctgaatctgtttttttggaaraagagataataataatatctactttacataatttctgtcagaatataagtaagttggatatggtatgtgaaaaaaatatttttcaagatgtcaaatctca

SEQ ID NO: 433203 - DNA, 201 bp, Homo sapiens
ggagggccaggtttggtggctcatgcctgtaatcccagtactttgggaggatcgctcaagcccaggagtttgagccagcctgggcaacgtggcaagacctygtcggtactaaaagttaaaaaaaaaaaaaaatgttagctaggtgtggtagtgtgcactacttgggatgccaaggtgggagaattgcttaagccccggagg

SEQ ID NO: 433204 - DNA, 201 bp, Homo sapiens
agtaacctgaggtcagtagctgcttaaatttcttgtatgtctctggagaaagtgtttgtgcaagtagagaaagcggtaggctttgagaggctagaactgcrtctgaagggtcttttcattcatgtttggtgactgactgaaaaatgacttgttggtgggaaattgaagtgtatgttagaagagggaccacagcttaggaag

SEQ ID NO: 433205 - DNA, 201 bp, Homo sapiens
aaatgacttgttggtgggaaattgaagtgtatgttagaagagggaccacagcttaggaagagctgatttttgatcttcatcaaaatgaggcttcagtggcraatactaacagccaatcctccttgtaaattctgttgatttccttcttattgtgtaaggagtttagccttctgttggcagttgtgttgtgacaagcagcag

SEQ ID NO: 433206 - DNA, 201 bp, Homo sapiens
taatgagagtttatcaaggctgtcggatataaaatcaacataaaaaaccaacagcattcctatagggcagcaaaaactattataagtcatttaaaatataycatttataatagtagcaaaaaccagaaggtacctagaataaatccaacaaatgcacaaaaagaagactcagatgaggagatgtgccatgttcatggatgg

SEQ ID NO: 433207 - DNA, 201 bp, Homo sapiens
aggcagctggcaccagtgcccgggtcttggcagctcatggcagtgacggagagcaggtcagcctccgtctcaacggccacccgccaggagtgtgggccaayggcagtgctccccaccctgagcggaggcccaatggctatgccctggggctggtgagtggagggagtgcccaagagtcccaggggaacacgggcctcccag

SEQ ID NO: 433208 - DNA, 201 bp, Homo sapiens
ctctggctcatgtacctggccatcgtcctctcccacaccaattcggttgtgaatcccttcatctacgcctaccgtatccgcgagttccgccagaccttccrcaagatcattcgcagccacgtcctgaggcagcaagaacctttcaaggcagctggcaccagtgcccgggtcttggcagctcatggcagtgacggagagcag

SEQ ID NO: 433209 - DNA, 201 bp, Homo sapiens
caattggtgggaagaggccagaaagagaactacaaaggtagggaagaatgaaatcccgtctctccagccttttctgagaccttgggaaccagactttgagkactgagctagatgggtgtaggctttggggctgggagaacagggccaggggctcagcaaaggcttctaggtacaaatgggccctagtcctcccagggccag

SEQ ID NO: 433210 - DNA, 201 bp, Homo sapiens
gccaggcacctggaagtccctgatctctgggtgccgggaggtgggtgtggaactggcagacgacctaggcaagggtcactgattatggatcatttactttsttcaaccctatactgtcccatctgtttatgaaagtctagacattagggaaatttagacttatctaagaggttaatggagaagggatacagtaaatgtctg

SEQ ID NO: 433211 - DNA, 201 bp, Homo sapiens
tagacattagggaaatttagacttatctaagaggttaatggagaagggatacagtaaatgtctgggccaacagagtcaggattcaaaatgacctcaaaggsctggacagataaaactgagcaaggaccagtgtaaagtcctgctcagaccggatgtggtggctcactcctgtaatctgagcactttgggaggccaaggcag

SEQ ID NO: 433212 - DNA, 201 bp, Homo sapiens
ggtggctcactcctgtaatctgagcactttgggaggccaaggcaggtggatcacttgcagtcaggagtttgagaccagcctggccaatatggtgaaacccsgtctctactaaaaatacaaaaactagccaggcacggtggctcatgcctgtaatcccagcatttttggaaggccgaggtgggcagattgcctgaggtcagg

SEQ ID NO: 433213 - DNA, 201 bp, Homo sapiens
gggctggtattcgccgccggcctctgcgccatcctgggggctttgctggcgctcaggtacctggaccggtcgcggcgggcggcggcgcctgccccgagtgsaaggccttcgcgcgcgccgctcgcttcctggcggccaacctggatgccagcatcgacccgtgccaggagttttactggttctcagaggaagaggaggtgc

SEQ ID NO: 433214 - DNA, 201 bp, Homo sapiens
accccccggggagagctgatcctggacaaggtttcccaggaggacaaggaagctccctggtgaaggtgcgctccgcgcaggcgctgtgcgggcagcccgggcactccatcagggcccccttatcctttaggaggagtcctccctgggcggtgctccagggctgtgggctggggcatgacggcccccagctgcgtagctcca

SEQ ID NO: 433215 - DNA, 201 bp, Homo sapiens
agcccctgtccaccggcctctaggacctgtctgctgggtgggctttgaattcccacctccacctgtgtccggtagccacactgagggaggcagctgttgarcactagaatagaaatccagagccctaggttgacatcctggctctccccgctgctctgcattttctgggatgacctcctgccccttctttgtggggttgtc

SEQ ID NO: 433216 - DNA, 201 bp, Homo sapiens
tccacctgtgtccggtagccacactgagggaggcagctgttgagcactagaatagaaatccagagccctaggttgacatcctggctctccccgctgctctrcattttctgggatgacctcctgccccttctttgtggggttgtctgggtcctgggtccagccacaggctggggggcacaggtgggggtggtgcccttggtg

SEQ ID NO: 433217 - DNA, 201 bp, Homo sapiens
catggccttaagggatgtccagggtggttactggggcagtttcctcttctagcctctgagcttattgtcgggggtgcagggcctggatccccatctccagsgtttcctcttggtgctcagaaccaagctctgggctttgtaagtggtgcctaaagatggggacactcctcatgccaggagcgatggaccagagtgaaaggc

SEQ ID NO: 433218 - DNA, 201 bp, Homo sapiens
gtgctcagaaccaagctctgggctttgtaagtggtgcctaaagatggggacactcctcatgccaggagcgatggaccagagtgaaaggctgctgggctgayccttgctccccgacccgactctgcaggtgtggcagctggtggaagacatcaagtatgtcctgggccagcgcctggaggagctggactgcacagacgctga

SEQ ID NO: 433219 - DNA, 201 bp, Homo sapiens
gaaggtgacccactccacgaagcccctgcccagccttctcagccttgctcgggaggcatggccttaagggatgtccagggtggttactggggcagtttccycttctagcctctgagcttattgtcgggggtgcagggcctggatccccatctccagggtttcctcttggtgctcagaaccaagctctgggctttgtaagtg

SEQ ID NO: 433220 - DNA, 201 bp, Homo sapiens
cttctgcgaggacaaagtttggttctttggccactttgtggagcgtctgtctgggtccagcgcggagagctgaaagtgctgcatagacgggcccctgaccscacctcctcacttcagcctcggctccttccctctcaccccacccggccttggctggggtaggtcgtggacaagaaaggcgaagggaagagggatggcctt

SEQ ID NO: 433221 - DNA, 201 bp, Homo sapiens
ggcacgtagtgggccttcattgaaaggctgtccctcttcccttcgcctttctggtccaggacctgccccagccaaggccgggcagaatgggggtggggggyggagaagcggaggctggagtgaggaggtggggtcaggagcgcgtctatgctgcactttccgctttccgcgctggacacagacagaggctccacaaagcgg

SEQ ID NO: 433222 - DNA, 201 bp, Homo sapiens
tcatgccccagcccacagccctggagcaccggccggggaggactcctcctaaaggataagggggccctgatggagtgcctgggctgcccgcacagcgcctscgcaccttcaccagggagcttccttgtactcctgggaacgcctgtccaggatgaggtctccccagggcgtctgggcttctggttggcctcgctcacttcc

SEQ ID NO: 433223 - DNA, 201 bp, Homo sapiens
cacagccctggagcaccggccggggaggactcctcctaaaggataagggggccctgatggagtgcctgggctgcccgcacagcgcctgcgcaccttcaccrgggagcttccttgtactcctgggaacgcctgtccaggatgaggtctccccagggcgtctgggcttctggttggcctcgctcacttcccccagttcctgat

SEQ ID NO: 433224 - DNA, 201 bp, Homo sapiens
gctgccactgtgcgctccctcccctcccctgctttcccttcctctcctctcgcgcaccctcctcccgccctcagggacccctgggcaaggccactgcgccycgggtctacggcagctggcggggcgctcaacgcgcgcactcacacggacgacgtagcgcaaagagttcctgtcgtccaggctgaccataagcgagaagag

SEQ ID NO: 433225 - DNA, 201 bp, Homo sapiens
tcaataaatgggaggcatcataattgtatattattcacagcccaaggaaagtgtagcccagagagggcaaggaacttccctgaggtcacacagaaaatcawgtgctggttgtatgccctggaagttgtggagagggagtgttgggtgtctcctggggacctgtcctctgatgggctcttgttccggctaggaccccccaaa

SEQ ID NO: 433226 - DNA, 201 bp, Homo sapiens
ctacagacatcagctaacagaacaaaacgttttacagtgctttctcatacaatgtctggaatttacagataacaccagtagttttggtcagggattaatawtattattattattttaaccaccaggaccagatggtggcgccaaggtcatctagctatttatcgtacttctgtttttttccagcgttttgctttctccctt

SEQ ID NO: 433227 - DNA, 201 bp, Homo sapiens
gaaagggtaaagggcttccaggggaaggaactgagttgaggcgttgtcccgctcctgacggcgtctgactccctgagggcggggtctagaggggcggggtmttagccagctccctccctccccaccatgcaggcgcccgctccggccggcaccatggacagcgaggcattccagagcgcgcgggactttctggacatgaac

SEQ ID NO: 433228 - DNA, 201 bp, Homo sapiens
aggcgtggtggcgggcgcccgtagtcccagctacttggcaggctgaggcaggagaatggcctgaacccgggaggcggagcttgcagtgagctgagatcgcrccactgcactccagcctgggcgacagagcgagactctgtctcaaaaaaaccaacaaaaaaaagaaattctaacagaaaaatattaaagttctccatcata

SEQ ID NO: 433229 - DNA, 201 bp, Homo sapiens
ctgggggctacagacatcagctaacagaacaaaacgttttacagtgctttctcatacaatgtctggaatttacagataacaccagtagttttggtcagggrttaatattattattattattttaaccaccaggaccagatggtggcgccaaggtcatctagctatttatcgtacttctgtttttttccagcgttttgcttt

SEQ ID NO: 433230 - DNA, 201 bp, Homo sapiens
aggcggaggttgcagtgagccaagatcgcgtcattgcactcccgcctgggcgacagagcgagactctgtctcacacacatacacaaaaaaaaaaaaaaaaagaaaagaaaaaaagaaagagaaagtgaattccggaggttttagactgggtttggacttctccgtggcgcatggacttggctttggaggagttggcatttc

SEQ ID NO: 433231 - DNA, 201 bp, Homo sapiens
gatttgcttgaacccgggaggcggaggttgcagtgagccaagatcgcgtcattgcactcccgcctgggcgacagagcgagactctgtctcacacacatacmcaaaaaaaaaaaaaaaaagaaaagaaaaaaagaaagagaaagtgaattccggaggttttagactgggtttggacttctccgtggcgcatggacttggctt

SEQ ID NO: 433232 - DNA, 201 bp, Homo sapiens
tgttttaaacatacttatttatttatttgtttgttttaagacggagtctcgcactgtcgcccaggctggagtgcagtggcgcgatctccgctcagttcaarctccacctcccgggttcacgccgttctcctgcctcagcctcccgagtagctgggactacaggcgtccatcaccacgcctggctaatttttggtattttta

SEQ ID NO: 433233 - DNA, 201 bp, Homo sapiens
ttcaagcgatccatccacctcggcctcccaaagtgctcgggttacaggagtgaaccaccgcgcctggctggttattgttgttgttgttttaaacatacttatttatttatttgtttgttttaagacggagtctcgcactgtcgcccaggctggagtgcagtggcgcgatctccgctcagttcaaactccacctcccgggtt

SEQ ID NO: 433234 - DNA, 201 bp, Homo sapiens
cttcaagcgatccatccacctcggcctcccaaagtgctcgggttacaggagtgaaccaccgcgcctggctggttattgttgttgttgttttaaacatacttatttatttatttgtttgttttaagacggagtctcgcactgtcgcccaggctggagtgcagtggcgcgatctccgctcagttcaaactccacctcccgggt

SEQ ID NO: 433235 - DNA, 201 bp, Homo sapiens
gcttcaagcgatccatccacctcggcctcccaaagtgctcgggttacaggagtgaaccaccgcgcctggctggttattgttgttgttgttttaaacatacttatttatttatttgtttgttttaagacggagtctcgcactgtcgcccaggctggagtgcagtggcgcgatctccgctcagttcaaactccacctcccggg

SEQ ID NO: 433236 - DNA, 201 bp, Homo sapiens
ggcttcaagcgatccatccacctcggcctcccaaagtgctcgggttacaggagtgaaccaccgcgcctggctggttattgttgttgttgttttaaacatacttatttatttatttgtttgttttaagacggagtctcgcactgtcgcccaggctggagtgcagtggcgcgatctccgctcagttcaaactccacctcccgg

SEQ ID NO: 433237 - DNA, 201 bp, Homo sapiens
cttgctaacaatgggtcagtgagagccagacctccactgaatggggaccctagggaaaggaagctgagcagtcgcttccctctaggacccctctaatctgrtagagatgacccagaataagttagatgcgggtgtgaaaccgattactaccgacttcttgcagggtgaccttgaacatatgtttctgagccatgctttctt

SEQ ID NO: 433238 - DNA, 201 bp, Homo sapiens
gcactttgggaggctcgaggcgggcggattgcatgagctcaggatttccaaaccagcctgggcaacacggtgaaaccccgtctctattaaaaatataaaamaatttagccgggtgtagcggcgtgggcctgtagtcccagctactttggaggctgaggcaggagaattgctggaacccaggaggcggaggttgcagtgagc

SEQ ID NO: 433239 - DNA, 201 bp, Homo sapiens
gcattttgggaggccgaggcgggcggatcacgaagtcaggagataagaccatcctggctaacacggtgaaaccccgtctctactaaaaatacaaaaattakctgggggtggtggcgggcgcctgtagtcccagctactctggaggctgagaggagaatggcgtgagcccgggaggcggagcttgtggtgagctgagatcgc

SEQ ID NO: 433240 - DNA, 201 bp, Homo sapiens
tgctgggcacggtgtagcgtttgtggatcaaatgggacttgtagatgccctcgggggtttagtctcatgcgtgggaaacctcgatgactttcaggaagggrcctgatcggcgactcctccctgccccagggagcgtgtaaacagcggcacgtggacacagatttgggggacgcacccacttcccttcccactggggccgcc

SEQ ID NO: 433241 - DNA, 201 bp, Homo sapiens
gtgtgaacccgggaggcggaggttgcagtgagccgagatcgtgccactgcactccagcctgggcgacagagcgagactctgtctcaaaaaaaaaaaaaaaagaaagaaaagaaatgggagcctctgaccctgcctcgggagtgggtggcccactggcatgcctcccccagtttcctcgaacgctcaaagacggccagtccc

SEQ ID NO: 433242 - DNA, 201 bp, Homo sapiens
agaagctaccatgcccggccctcagatttgaatttttgaagtctgacttcttactcatgcttttaccagctgcactataccatccatctagacttccagarcagtgcaaccctgggttaggtagaatgtggtacagaaagactcagaattctgggttagacaaattggagaattctagaatgttccaaagatagaatcttg

SEQ ID NO: 433243 - DNA, 201 bp, Homo sapiens
aaaggccctagcccattccatagacgtccacaaaggaggaaaccgagtcccagagacagtggagcctctccagattcagtgtgacccgacagggctgtagragtccagcctgggtgttcccagctcagtctggctctctgacccggttcctactgaagatgactcctccaggaagtccacaggatccttagccctaaagaa

SEQ ID NO: 433244 - DNA, 201 bp, Homo sapiens
gtgggctgggtcccccgtgggcggacgcgcagcctctcacgcatcgttccccgcaaccccccacccccacgcctaggacacccttgcactgcgcggcgtcrtgcaacgacacagtcatctgcatggcgctggtgcagcacggcgctgcaatcttcgccaccacgctcagcgacggcgccaccgccttcgagaagtgcgacc

SEQ ID NO: 433245 - DNA, 201 bp, Homo sapiens
gacctgcctaaccagagaagggacatccgccctagggcaccccctggcggaggtgggctcccctattgccttatggggtgggaaacagctgggtttgcagrggtagttctagaacccagggcagaattccggaaagcggctattggattctgggaggtttgcatagccgggcatttaaccattacacggagaggaaggggt

SEQ ID NO: 433246 - DNA, 201 bp, Homo sapiens
gaatggagggattctaccccttcatcccggggagacgttggagctggaattcctgagtccctcgaactggggggctctaggaagccgagtctttgggtagyataggggttcgaatccccgagtcttggtcagaaatgagaggctcagactggtggggctcaaggtggaatgggtgaccaccctgccagcctcaagctgctg

SEQ ID NO: 433247 - DNA, 201 bp, Homo sapiens
cggctcttctgtatctccctggcctggtcgctctcggcttctgggcctcgcccttcctgtctgtgaaatggactctgggtgaatccaaatgggatcgtctygggctacgtcctgtccctccgggactacaagtcccaaggtgctcgaggcgaccttggctccccctccccaccgggacccgcctccctccagcccaagtca

SEQ ID NO: 433248 - DNA, 201 bp, Homo sapiens; identical to SEQ ID NO: 279235

SEQ ID NO: 433249 - DNA, 201 bp, Homo sapiens; identical to SEQ ID NO: 279236

SEQ ID NO: 433250 - DNA, 201 bp, Homo sapiens; identical to SEQ ID NO: 279237

SEQ ID NO: 433251 - DNA, 201 bp, Homo sapiens
ctctctcctctatttttttttttttccaggcagagtcttgctccatcactcaggctggagtgcagtggcttgacctcggctcactgcaacctccgcctccyaggttcaagccatcctcccgctttagcttcccaagtagctgggattataagtgtatgccaccactcctggctaatttttgtatttttagtagagatgagg

SEQ ID NO: 433252 - DNA, 201 bp, Homo sapiens
ccaggctggagtgcagtggcgcgatcttggctcactgcagcctccacctcccggattcaagtgattctcctgcctcagcctcccaagtagctgggattacrggcatgcaccaccacgcccagctaattttttgtgtttttagtagagacagggtctcgtcatgttgaccaggcttgtcttgaactcctgagctcaggtcat

SEQ ID NO: 433253 - DNA, 201 bp, Homo sapiens
agaagtcttgcctgaatcaaagcagtcaccctctcttctctccctctctgtctctgtgtctcttgtgtctgctctgctctctcctctatttttttttttttccaggcagagtcttgctccatcactcaggctggagtgcagtggcttgacctcggctcactgcaacctccgcctcctaggttcaagccatcctcccgcttt

SEQ ID NO: 433254 - DNA, 201 bp, Homo sapiens
gtgtaactgaggaaaattctctattagggttaggggagaaggcaaggaagattccgttacattcctgagaagggagatttttttattttggttttttttttctgtgtgtgtgtgtgtgtgtgttttgtttttggagacacagcttcagctgcgtcgcccaggctggagtgcagtggcgcgatcttggctcactgcagcctc

SEQ ID NO: 433255 - DNA, 201 bp, Homo sapiens
gtgtggtggctagcatggggatagggatggtgctggcctgaccggttcctagtggcctagctccctcccactgggccagtgaccacagctgcccctccacmcctggccacctccctgttcctcttgctaacaatgggtcagtgagagccagacctccactgaatggggaccctagggaaaggaagctgagcagtcgcttcc

SEQ ID NO: 433256 - DNA, 201 bp, Homo sapiens
caggcgcccaccaccaccacgcccggctactttttgtatttttagtagagacggggtttcaccatgttggccaggctggttttgatctactgacctcaaawgatccacctgccttggtctcccaaagtgctgggattacaggcatgagccaccgcacccggccaatttgtatttatttatttgagatggagtcttgctttg

SEQ ID NO: 433257 - DNA, 201 bp, Homo sapiens
agaccttgtctgaaaaaaaaaaagaaaagaaaagaaaaagaaagccaggcgcggtggctcatgcctgtaatcctagcactttgggaggctcgaggcgggcrgattgcatgagctcaggatttccaaaccagcctgggcaacacggtgaaaccccgtctctattaaaaatataaaacaatttagccgggtgtagcggcgtgg

SEQ ID NO: 433258 - DNA, 201 bp, Homo sapiens
agacctgcctaaccagagaagggacatccgccctagggcaccccctggcggaggtgggctcccctattgccttatggggtgggaaacagctgggtttgcakaggtagttctagaacccagggcagaattccggaaagcggctattggattctgggaggtttgcatagccgggcatttaaccattacacggagaggaagggg

SEQ ID NO: 433259 - DNA, 201 bp, Homo sapiens
tgagcgaacccaacatgtcattaacctgggcgtcagacctgcctaaccagagaagggacatccgccctagggcaccccctggcggaggtgggctcccctaytgccttatggggtgggaaacagctgggtttgcagaggtagttctagaacccagggcagaattccggaaagcggctattggattctgggaggtttgcatag

SEQ ID NO: 433260 - DNA, 201 bp, Homo sapiens
aagggagggacagaggctaattctggaggtgtctgtctgtccttgaggcggggggagggcaggaccaggcacctccctctgtctatctccccgttctctcmacccccatgcgtcctaagaagggggattaaaaacagaatgggggaggcgagcatctgatgagagaggagtgtttcccaatgtctgggcttgaagggcatt

SEQ ID NO: 433261 - DNA, 201 bp, Homo sapiens
gaggctgaggcgggaggattgcttgagcccaggagttcaaaaccagcctgagcaacaaagtgagacccctgtctctacaaattttttttttttttttttttgggacggagtctcgctctgtctccgaggctggagtgcagtggcgcgatctcggctcactgaaagctccgcctccctggttcacaccattctcctgcctca

SEQ ID NO: 433262 - DNA, 201 bp, Homo sapiens
tcttgaactcctggcctcaagtgatcctcccccctcggcctcccaaagtgcaaggattacaggcagaagctaccatgcccggccctcagatttgaatttttgaagtctgacttcttactcatgcttttaccagctgcactataccatccatctagacttccagagcagtgcaaccctgggttaggtagaatgtggtacaga

SEQ ID NO: 433263 - DNA, 201 bp, Homo sapiens
ttgggagatcgagccggggaggatcccatgaggctaggagttcgagaccagcctaaccacaggcgcgagagagactaaatctctaccaaaagaaaaaaaaagagtcacttacagctggcattagggctgcacagacttgctcatttatctattttaacagttaacaaagtattgtttgtgtatctctgaaattctaaatgc

SEQ ID NO: 433264 - DNA, 201 bp, Homo sapiens
gtggtccttgccaccggttctctgttctcctggaagtccagggaagaaggagggccccagccttaaatttagtaatctgccttagccttgggaggtctggraagggctggaaatcactggggacaggaaaccacttccttttgccaaatcagatcccgtccaaagtgcctcccatgcctaccaccatcatcacatccccca

SEQ ID NO: 433265 - DNA, 201 bp, Homo sapiens
tataggggttcgaatccccgagtcttggtcagaaatgagaggctcagactggtggggctcaaggtggaatgggtgaccaccctgccagcctcaagctgctrtctcgaccgatcttctaggtctctgagcagaattaagggtggggcagggatagtggagcctgggttcctgaagtggagcaggacaggtacccggggtccc

SEQ ID NO: 433266 - DNA, 201 bp, Homo sapiens
ggggttgtagtccaaactaagattttgaactcttgctgggacatcctttgaagatccaacccgcgctttttatcgacggggagattcgggctcagagaccctgggggatactgatcaggaaaggggatagtgcgcctgaaggggtggggcaagggctcaggagtcagtctccagccacagcgaggcaggcgtctcggctct

SEQ ID NO: 433267 - DNA, 201 bp, Homo sapiens
attgcataactggcttccacaatcattgttttgaactgatagaattactttgccaccaatcccatggccccccagctttctcccaagtttcagggcccaakattctcaaatcacaggattccctgtctatggcagggaactggaggctctaggaggagatcgaaggcaccccctcaccccatcccgagggaatcccagttc

SEQ ID NO: 433268 - DNA, 201 bp, Homo sapiens
aggggtttaggctctgtagaactttagttacagtcctaaggtccttacagtttgaaagtctggggctcatagagattaaaggggcctttcagaatagctgrtttggccaggtgtggtggctcatgcctgtaatctcagcactttgggaggctgaggcgggaggattgcttgagcccaggagttcaaaaccagcctgagcaa

SEQ ID NO: 433269 - DNA, 201 bp, Homo sapiens
gacaccatctctcccagcagtcttggggtctgggtgggaaacattggtctctaccaggatccctgccccacctctccccaattaagtgccttcacacagcwctggtttaatgtttataaacaaaatagagaaactttccttataaataaaagtagtttgcacagaaattgactttcttctcttttgattctgttttgactc

SEQ ID NO: 433270 - DNA, 201 bp, Homo sapiens
aaccctgggttaggtagaatgtggtacagaaagactcagaattctgggttagacaaattggagaattctagaatgttccaaagatagaatcttggactcaraactttccaacaataggctctttagctgaggggtttaggctctgtagaactttagttacagtcctaaggtccttacagtttgaaagtctggggctcatag

SEQ ID NO: 433271 - DNA, 201 bp, Homo sapiens
tccctttttttcctgtcttataaactagggaaaaggggaggtgggggagaagctgggaaggacaacaggagaagtggtggtctcattccaatcccagctamtcaggaggctgaggcaagagaatcgcttaaacccggaaggcggaggttgcagtgagccaagactgcaccactgcactccagcctgggcgacagagcaaga

SEQ ID NO: 433272 - DNA, 201 bp, Homo sapiens; identical to SEQ ID NO: 348313

SEQ ID NO: 433273 - DNA, 201 bp, Homo sapiens; identical to SEQ ID NO: 348316

SEQ ID NO: 433274 - DNA, 201 bp, Homo sapiens
aggacgagactgagagaggagaatgcgaagatccggggaggcgagctacagaaactgatctaggggcattgggagggggagcggagagggatcgaatgggkccggccctaggcaatctggggtcttgtggccggggtggaagccgggctctcccagcggcgggatccgacgccggggcggccgcactgagtctcggtctgg

SEQ ID NO: 433275 - DNA, 201 bp, Homo sapiens; identical to SEQ ID NO: 348329

SEQ ID NO: 433276 - DNA, 201 bp, Homo sapiens
gcttccccctcccccacagccagcctctgatgagccagcctctgttatgtcgggtggttaatttcattccctgggttgcggtttcaaatctcctcctcackcgttgggcattggttccaacccctaggattggacagtttcgtctcagggtgggccaggactttccttggtcatctccactccgcatttggtcgcgcgttc

SEQ ID NO: 433277 - DNA, 201 bp, Homo sapiens
agggtccggaggagcaatggtcacccgggatcgagctgagaatagggacggccccaaggtgagaggcgggaggggagggagcagaggtccctggtttggcyaggggactgggcccctgacgccgtcggtctggagagaggctggggacgcaggggtggaaggggagcggtgctccagaactccaggagccagaagctggag

SEQ ID NO: 433278 - DNA, 201 bp, Homo sapiens
accaccaagagaatcattgagaatggccaagaaagggtggaagtggaggaagatggagagttgagttaaagtccttcataataaacggcatagagcagttrctccccattgacaccaagtaattccagtccacatttgcctttaagcacatctggaggaatagcggactttttttaggattgaaagtgaactttactttca

SEQ ID NO: 433279 - DNA, 201 bp, Homo sapiens
taaaaaaatcaccaccaagagaatcattgagaatggccaagaaagggtggaagtggaggaagatggagagttgagttaaagtccttcataataaacggcawagagcagttgctccccattgacaccaagtaattccagtccacatttgcctttaagcacatctggaggaatagcggactttttttaggattgaaagtgaac

SEQ ID NO: 433280 - DNA, 201 bp, Homo sapiens
atggtaaaaaaatcaccaccaagagaatcattgagaatggccaagaaagggtggaagtggaggaagatggagagttgagttaaagtccttcataataaacrgcatagagcagttgctccccattgacaccaagtaattccagtccacatttgcctttaagcacatctggaggaatagcggactttttttaggattgaaagt

SEQ ID NO: 433281 - DNA, 201 bp, Homo sapiens
gatggtaaaaaaatcaccaccaagagaatcattgagaatggccaagaaagggtggaagtggaggaagatggagagttgagttaaagtccttcataataaayggcatagagcagttgctccccattgacaccaagtaattccagtccacatttgcctttaagcacatctggaggaatagcggactttttttaggattgaaag

SEQ ID NO: 433282 - DNA, 201 bp, Homo sapiens
gagggcggctgcgcaggcggcaggcccttcaaggaccccttcgagtacgtcttcagcttccgtgaccccgccgaggtcttcagggagttctttggcggccrggacccattctcctttgacctcttgggaaacccgctggagaatattttggggggtcagaggaactccctgggaagcagaagcagagggtctgcacccctt

SEQ ID NO: 433283 - DNA, 201 bp, Homo sapiens
ggaagtggaggaagatggagagttgagttaaagtccttcataataaacggcatagagcagttgctccccattgacaccaagtaattccagtccacatttgmctttaagcacatctggaggaatagcggactttttttaggattgaaagtgaactttactttcagaacagctgtacccaagaatttataaacactttatgcc

SEQ ID NO: 433284 - DNA, 201 bp, Homo sapiens
ggactttttttaggattgaaagtgaactttactttcagaacagctgtacccaagaatttataaacactttatgccaatgcctgtctttattgttgggactrcacggataggacctctgtttgtctttcgatcattgtaaatatctgtatgcaatttgctatttattaaacttaagcctgaggcagacaatgattatttcct

SEQ ID NO: 433285 - DNA, 201 bp, Homo sapiens
caagagaatcattgagaatggccaagaaagggtggaagtggaggaagatggagagttgagttaaagtccttcataataaacggcatagagcagttgctccscattgacaccaagtaattccagtccacatttgcctttaagcacatctggaggaatagcggactttttttaggattgaaagtgaactttactttcagaaca

SEQ ID NO: 433286 - DNA, 201 bp, Homo sapiens
tgtcggacgcgtagaaacgcgatatctatgaccgctatggcgaggcgagggcggagggcggctgcgcaggcggcaggcccttcaaggaccccttcgagtasgtcttcagcttccgtgaccccgccgaggtcttcagggagttctttggcggccgggacccattctcctttgacctcttgggaaacccgctggagaatattt

SEQ ID NO: 433287 - DNA, 201 bp, Homo sapiens; identical to SEQ ID NO: 348687

SEQ ID NO: 433288 - DNA, 201 bp, Homo sapiens; identical to SEQ ID NO: 348708

SEQ ID NO: 433289 - DNA, 201 bp, Homo sapiens; identical to SEQ ID NO: 348716

SEQ ID NO: 433290 - DNA, 201 bp, Homo sapiens; identical to SEQ ID NO: 348627

SEQ ID NO: 433291 - DNA, 201 bp, Homo sapiens; identical to SEQ ID NO: 348707

SEQ ID NO: 433292 - DNA, 201 bp, Homo sapiens; identical to SEQ ID NO: 348728

SEQ ID NO: 433293 - DNA, 201 bp, Homo sapiens
aaaaaaaaaaaaaaaaggccaggtgcgatggctcacgcctgtaatcccagcactttgggaggccaaggcgggcggatcatgaggtcaggacatggagaccrtcctggctaacatggtgaaaccccgtctctactaaaaacacaaaaaattagccgggcgtgttggtgggcacctatagtctcagctactcgggaggctgag

SEQ ID NO: 433294 - DNA, 201 bp, Homo sapiens
gcaaggagggccagggtctcaccaggagtgacggcaggccctgcttactctccctgccccatgttcccaaagcagcctcggggaggctggagggtggaatkaggcggactgctgtgatgccagcttctcagtcactgctctgggcctcagtgctctcccccactcccttccccacccacccactggcttccctcctcctct

SEQ ID NO: 433295 - DNA, 201 bp, Homo sapiens
gttacagtttgaacaacagggaatactggaatgcagaggtgtttgagggcctgggagggctggagaaggtttggggaggattgtttgatcacccaagtttrcatgaaaaggtcagcaagggctgtcaccctcatgatttcggaaaaccaggttgtcagaactgagtggatctgtctctcggggtctcacaaagatgaatgt

SEQ ID NO: 433296 - DNA, 201 bp, Homo sapiens
ctgccccatgttcccaaagcagcctcggggaggctggagggtggaatgaggcggactgctgtgatgccagcttctcagtcactgctctgggcctcagtgcyctcccccactcccttccccacccacccactggcttccctcctcctcttgaaattatccattcaggacgatttacagtgtttctgttttctcctcttgctt

SEQ ID NO: 433297 - DNA, 201 bp, Homo sapiens
aaactgaggtattttgcttcctgggaagatcttcgcaattttgagtgctcctgtggggagcggggatgagctaaagatacaatgtttccctgccccgcacygcttccacaaaatagcaatgtggttttgcagctctgacttctgctcccagtaacccatcgttagggcactctagcactatggaggtacccaaggctcagc

SEQ ID NO: 433298 - DNA, 201 bp, Homo sapiens
tacaaaatcgccccagtcaactctccacttggagggaattgtccagtgtggcccctagaattgagtcaccccctagataccaactgtctgaccccgaggarctctgtaagtccctgctcctcctcttccctttggggctggtgctgccactcagcaataatcctcttttctctgtgctttcttaggtccctgtcctctgtc

SEQ ID NO: 433299 - DNA, 201 bp, Homo sapiens
ccagaaaatacaaaaatgagccaggcatagtggtgtgcacctgtagtcccagctacttgggaggctgaggtgggaggatcacctgagcccaggaagtcaakgctgccagtgagccatgatcacaccactgcactccagcctgggccacagagtgagaccctgtctcaaaaaaaaaacaaaaaaatcttttaggatccagct

SEQ ID NO: 433300 - DNA, 201 bp, Homo sapiens
agccacgataggtgactgctggaaagaccaagacacagaaccctccttttacgaagggcagggaataacacataggcttggcttgtcctctgtccttttayggttcctgggtctgacatccttgtatgtggggatctggcagcaggatttgctgtaagaaggttcataggccatgctgactcagagtcagtctcttggaca

SEQ ID NO: 433301 - DNA, 201 bp, Homo sapiens
tttggacagctcctggaggtcaggacataagttgaatgccctcttggtggctttgtggtagcagcttggattgtaatatccagccccgagcagagatgccyggtgtgtgttcttaggcttcaaggggcttggtcccttcctggcccttcccctggagggctgttgttgggaggttgggtccacagaaatttaagtccccag

SEQ ID NO: 433302 - DNA, 201 bp, Homo sapiens
ggcaggagaatcgcttgaacctgggaggcggaggttacagtgagccgagatcgtgccattccactccagcttggacaacaagagcaaaactccgtttattaaaaaaaaaaaaaaaaaaaaaaaaggcagtatgcagtgtggctgggtgtgtctggtctagggccaaaggtggattttcttgatgtctaagagagtcgcagt

SEQ ID NO: 433303 - DNA, 201 bp, Homo sapiens
gttgctttgggtgggtttgggcaaggcctgatgtgaaactccagaaccagctcctgcatgaggagaccccagggagatccagttagacacttactggcagytggattacgtgtaaccgttgagaagggtccgtgttgagaataacatctgtctctgtcctttagtatcaagtggggcagctgtattctgtggctgaggcca

SEQ ID NO: 433304 - DNA, 201 bp, Homo sapiens
ccatacccaacttggcacaaaaggaaattctgatgtgtcttgcttgttttatttttaaaagtgagtattaggagatttcttgtcttgagttggggatgccrccagaaaattagtggcccaaatttgtgtgccctgtttggcctctgaaaattattactggactaagtaggtattgtagctagagtattttgccctgctaaa

SEQ ID NO: 433305 - DNA, 201 bp, Homo sapiens
tgtttactagcctggagcaaggagcctgagtggtgagccggctgcataaggaaggcacagcagctcatgcttccctaatgcttcactaaacatgcaagacwcaaaaggacccagagggctccagcaagggtctggggaccgaacgtctaagcttggaaactggctggacttgtatgggtaaaaccaagagtttttgtctta

SEQ ID NO: 433306 - DNA, 201 bp, Homo sapiens
attcgaaggatggaagaagagacgaagagacagctggatgaagtaagtgggggctctgggggctctcaattagataaacaaacgaagattaaggagactgktttgctggggcgcttcaccgagagcaccatcctgtagttctgggaacacgtcagtgtctgctacagggacggtatcctgggcagtacgtgggcactatac

SEQ ID NO: 433307 - DNA, 201 bp, Homo sapiens
ctctgtggggttttcgtcactgaatttagtgtcttacacaatagaatgctgctgactgttttaggatgatgctttaaagagccttgagcagattgcacagmctaaagttgatactctcttttccctttcttatagtcgagtaatcctgcctgtgtctgtagatgaggtaagtccttttactttctggtccatagttgtgtg

SEQ ID NO: 433308 - DNA, 201 bp, Homo sapiens
ggggcggagttgagtaatcagagcctgaagtctaagcagaagcttgggaagtgagtgctgatcaggattcacctgtctgcctggcagtggtcagcccgttstcagcaagaaaccattgacaagaaagtaccacgtggcctgggtagggtcgaagcggaacttagtttcagagaattagaaaaatcttggaggggaaggccg

SEQ ID NO: 433309 - DNA, 201 bp, Homo sapiens
agacactgatggcttatggtggggccaagactggaaggaaaggggaacttccaccttgagagcatccacagttggcgggtgttcacttgtgatggtttttytgcagcattgaggaagtggtggggcggagttgagtaatcagagcctgaagtctaagcagaagcttgggaagtgagtgctgatcaggattcacctgtctgc

SEQ ID NO: 433310 - DNA, 201 bp, Homo sapiens
ggggatctggcagcaggatttgctgtaagaaggttcataggccatgctgactcagagtcagtctcttggacaacggaaaactgtcacggaacctcccttgkctcactctttctctgaacttcttccactctcctctcctggcgcagccttgttctttgcttccttctgaaatcacagccccaccccgccccagcttccagt

SEQ ID NO: 433311 - DNA, 201 bp, Homo sapiens
gacgggttttcatgtgtgcctagctgggtggtggacttggagaggcacagggacagcttggggctccaggggggcattgaggcagcactgatgcagcttargattagcaaggtcaaggtgactggctttcacccatatgttcctctgtatggatttcactgagcctcgattgctgccccttttcatggcattttgttctgg

SEQ ID NO: 433312 - DNA, 201 bp, Homo sapiens
tcttttgggttatttctgtgcgtgatagctcttactctttatatttcaactttgcctcattttgtgctccggggtcaccttaacttcagttctggagtttrttaccccacacactctacaaacatggcagtggggcagccagcagaagtggacataggtcctaaattcagagggtacagaatgaaccgggcggtctcagga

SEQ ID NO: 433313 - DNA, 201 bp, Homo sapiens
gggatcaagtgtgtgcatttctgggacgtccgtgactcggctggcaagtgtgcgtggctctttctggttgtgcaacaaaccagcagggcaggaaatctctkgaggctctccctagccacgataggtgactgctggaaagaccaagacacagaaccctccttttacgaagggcagggaataacacataggcttggcttgtcc

SEQ ID NO: 433314 - DNA, 201 bp, Homo sapiens
atcgggtgaggggtggtggtaagtggacacaggaggaggactaggaagtcagggcctggctggggagacaggtgaagggtctgaggacatgcagagggggmtgagatgcgggccggagtaaccgtggtgcccaagcagctggtgcggaagaggaggcttttggaacaagcttgggatgactgcttgggacgtggggagact

SEQ ID NO: 433315 - DNA, 201 bp, Homo sapiens
ctctagaagggtttacagtctgtacagccgggaacacatggaaatggtgtgggcaccgtaaacatccggaaggcgttttgacctgcagaagtgacgtttascctcaatagtcagagcattcgttctcagtcatgtcacttaaaatccagcgggggctgggcgggaggccaaggcgggtggaacacttgaagtcagtagttt

SEQ ID NO: 433316 - DNA, 201 bp, Homo sapiens
gcggtggctcacgcctgtaatcccagcactgtgggaggccaaggtgggcggatcacgaggtcaggagatcgagaccatcctggctaacacggtgaaacccygtctctactaaaaatacaaaaaaaattagccgggcatggtggcgggcacctgtcgtcccagttgctggggaggctgaggcaggagaatggcgtgaacttg

SEQ ID NO: 433317 - DNA, 201 bp, Homo sapiens
agagaattcacttaaaaaatgttaagaaaacttgttttctttttttttttttcttttgaaacagagtctcgctctgtcacccaggctggagtacagtggtrcaatcttggctcattgcaacctccaactccccaattcaagcaattctcatgtcacagcctcctgagtagctgggactacaggtgcccgccaccacgcctg

SEQ ID NO: 433318 - DNA, 201 bp, Homo sapiens
tgggggctctcaattagataaacaaacgaagattaaggagactgttttgctggggcgcttcaccgagagcaccatcctgtagttctgggaacacgtcagtrtctgctacagggacggtatcctgggcagtacgtgggcactatacggaagaaaacagcctgtgctcttgaattgacagttgagttgaagtcttggcatacc

SEQ ID NO: 433319 - DNA, 201 bp, Homo sapiens
gctacagggacggtatcctgggcagtacgtgggcactatacggaagaaaacagcctgtgctcttgaattgacagttgagttgaagtcttggcatacccacrgagacaaaaatggcagtatgtgccgaatgccaagtgggtaatacagctgctacagcgatgcttcagagcctggtgggaaagagcgtgcggggctgcagag

SEQ ID NO: 433320 - DNA, 201 bp, Homo sapiens; identical to SEQ ID NO: 146258

SEQ ID NO: 433321 - DNA, 201 bp, Homo sapiens
gagacaaaaggacccagtgaaaggaatgacagcagatgactaaagccgcctttcccctctgcactgtacgtaccaaatttctcactgtgcgtgtcacagaygctaaaatcagtttgggtttcaaggcctcagcagctcactatggagtcagaaaacctattcctccttccctctagtaatgatggttgccacgctcgatag

SEQ ID NO: 433322 - DNA, 201 bp, Homo sapiens
tacatatgaaagatggaacctggccgggtgcttcgggggctcacgcctgtaatcccagcactttgggaggccgagacggatggatcacttgaggtcaggartttgagaccagcctgggcaacatagcgagactccatctctacaaaaaataaacaaaattaggctggtgtggtggcgagtgtctgtagtcctgtctactca

SEQ ID NO: 433323 - DNA, 201 bp, Homo sapiens
gcatcgggtgaggggtggtggtaagtggacacaggaggaggactaggaagtcagggcctggctggggagacaggtgaagggtctgaggacatgcagagggrgctgagatgcgggccggagtaaccgtggtgcccaagcagctggtgcggaagaggaggcttttggaacaagcttgggatgactgcttgggacgtggggaga

SEQ ID NO: 433324 - DNA, 201 bp, Homo sapiens; identical to SEQ ID NO: 146264

SEQ ID NO: 433325 - DNA, 201 bp, Homo sapiens
ttggagctagaagaactctccagaggatctactggatctgctttgttcagatccaaactttgagagccctcagtgttagagagttattttttaatctctcmgacccttttgaaaatctttctcggccaggcacggtggctcacacctgtaatcccagcactttgggaggctaaggtgggcagatcacgaggtcaggagtct

SEQ ID NO: 433326 - DNA, 201 bp, Homo sapiens
catggcaaaactctctctctacaaaaaatacaaaaattagccttgcatggtgatcgcaccactgcactccagcctgagtgacacagtgagaccctgtctcaaaaaaaaaaaaaaaaaaggccaggtgcgatggctcacgcctgtaatcccagcactttgggaggccaaggcgggcggatcatgaggtcaggacatggagac

SEQ ID NO: 433327 - DNA, 201 bp, Homo sapiens; identical to SEQ ID NO: 146266

SEQ ID NO: 433328 - DNA, 201 bp, Homo sapiens
gcaagagaggcgtctgtttacaaacttccacaggcagctgttctgttggctcgataagtgggttgacctgaccatggacgacattcgaaggatggaagaaragacgaagagacagctggatgaagtaagtgggggctctgggggctctcaattagataaacaaacgaagattaaggagactgttttgctggggcgcttcac

SEQ ID NO: 433329 - DNA, 201 bp, Homo sapiens; identical to SEQ ID NO: 146274

SEQ ID NO: 433330 - DNA, 201 bp, Homo sapiens
acagcgagaggaagggtgcaggaggcagatacagtgcatggccaaagcaccctgctctgtgccccgggaggtagaggctggggtaggggtgggaggcgccsgagaaagctctgatgccagagtgatgagttgcggcacctctgctgatcagagctggtccctgtcagtgccctgctgaaaagaatcccaagaagcccatag

SEQ ID NO: 433331 - DNA, 201 bp, Homo sapiens
agaggaagggtgcaggaggcagatacagtgcatggccaaagcaccctgctctgtgccccgggaggtagaggctggggtaggggtgggaggcgcccgagaamgctctgatgccagagtgatgagttgcggcacctctgctgatcagagctggtccctgtcagtgccctgctgaaaagaatcccaagaagcccatagcggcgt

SEQ ID NO: 433332 - DNA, 201 bp, Homo sapiens
gtgcatggccaaagcaccctgctctgtgccccgggaggtagaggctggggtaggggtgggaggcgcccgagaaagctctgatgccagagtgatgagttgcrgcacctctgctgatcagagctggtccctgtcagtgccctgctgaaaagaatcccaagaagcccatagcggcgtcgctttaattaaattccctgtttggtt

SEQ ID NO: 433333 - DNA, 201 bp, Homo sapiens; identical to SEQ ID NO: 146276

SEQ ID NO: 433334 - DNA, 201 bp, Homo sapiens
gctggtgaggaagtccaggctccaggggaacagacgctgcccagtgttcatagcttcctgcaacttgacagagcctgagtttgcctcttagtgggagaatsagagagagctgtagtgtcacctgacattccccaaaccttgtgaagcacgttggcctaagtgtgccgtgatcccagcccacactagcctgggtgcatctgc

SEQ ID NO: 433335 - DNA, 201 bp, Homo sapiens
aggctagttggagggaaaggggccatggtgagtatcttcgatgggttaggaagtcttctgtgctctttccacactgcttactacccagagtggctaaatgyatggattctgaagtcagacgaaactgttttgagacccaactctgtcgtgatctctgtgacttttttttttttttcgaaacggagtcttgctgttgtttcc

SEQ ID NO: 433336 - DNA, 201 bp, Homo sapiens
ctggaaaacccaaagcaagtagtgatcatagtacagaacccgaccaaagtaggctggtgaggaagtccaggctccaggggaacagacgctgcccagtgttyatagcttcctgcaacttgacagagcctgagtttgcctcttagtgggagaatgagagagagctgtagtgtcacctgacattccccaaaccttgtgaagcac

SEQ ID NO: 433337 - DNA, 201 bp, Homo sapiens
actctgtcgtgatctctgtgacttttttttttttttcgaaacggagtcttgctgttgtttcctagactggagtgcagtggtgcaatctcggctccctgcarcttctgcctcctgggttcaggcgattctcctgcctcagcctcccgagtagctgggattacaggcacccgccaccatgcctggataatttttgtattttta

SEQ ID NO: 433338 - DNA, 201 bp, Homo sapiens
agtttgagatcagcctggccaacatggtgaaaccctgtttctactaaaaatacaaaaattagctgggcgtggtagcccacgcctgtaatcccagatactcrggaagctgaggtaggataatcgcttgaacccgggaggcagagtttgcagtgagccgagatcgcgccattgcactccagcctgggcgtcgcagcaagactc

SEQ ID NO: 433339 - DNA, 201 bp, Homo sapiens; identical to SEQ ID NO: 146278

SEQ ID NO: 433340 - DNA, 201 bp, Homo sapiens
ataatcgcttgaacccgggaggcagagtttgcagtgagccgagatcgcgccattgcactccagcctgggcgtcgcagcaagactccatctcagacaaacaracaatccagctgggttcagtgttgtgcacctatagtcccagctcctcaggaggctgagacaggaggatcactcaggcccagctcctcaggaggctgagac

SEQ ID NO: 433341 - DNA, 201 bp, Homo sapiens
caaatagctgccttttgtgatgtggtgatttaaatgatttaagttcatttgttctcaaccttggggtaaactgaggtattttgcttcctgggaagatcttygcaattttgagtgctcctgtggggagcggggatgagctaaagatacaatgtttccctgccccgcaccgcttccacaaaatagcaatgtggttttgcagct

SEQ ID NO: 433342 - DNA, 201 bp, Homo sapiens
gctgggagtgctgtggggtcgctctgcgcgggccgagggcgcgggctcagccgggactgcaggcggcgctgagaggccccgcggcggccgaggaagaggckcaccggggcaggcagggcctcccggcggtggggaaaggtggagggccgaacagttcacacggagagccgggtggatgggtcagaggctccgcgatggagt

SEQ ID NO: 433343 - DNA, 201 bp, Homo sapiens; identical to SEQ ID NO: 146296

SEQ ID NO: 433344 - DNA, 201 bp, Homo sapiens; identical to SEQ ID NO: 146295

SEQ ID NO: 433345 - DNA, 201 bp, Homo sapiens
cctttgtaatcattccgatggcctgcatcaatattttgggggcagaattagcttctgggtggccagagcctttggtctaaccctgagtgtctgggcgttgkgcagcagagcgagaaagccctggctgtttgacggggtgtgtccaccagtgcttcctggcacaggtcggccgggctgcttcacttcttgtttccagagatt

SEQ ID NO: 433346 - DNA, 201 bp, Homo sapiens
ttcatgtcagtatttcaggcccacccactgggctccccctcccagattgccaaagttgtggagtctgtttttcttagttgaatgtcttagttctctgggayaggtgaacagatctcaagagcaaggaacatcatcgcaggtctgaggaggctagattcccagtcctgttggagttttttaaatctgatttaatgatctgac

SEQ ID NO: 433347 - DNA, 201 bp, Homo sapiens
ctgactccgccccgcaacactctcacttgcccttcgtgtcccatcaggtcctgctgactccatctcctcagcgtctccaacatgtcccttccttgccacctcttgcctggattactacagcagcttctaacgagtctccctgcctttcagttctccgcaccgcttcaagtgttcagtctggatggtctgtcactcccagcg

SEQ ID NO: 433348 - DNA, 201 bp, Homo sapiens
cctgtctcaaaaaaaaaaaaaaaaaaggccaggtgcgatggctcacgcctgtaatcccagcactttgggaggccaaggcgggcggatcatgaggtcaggasatggagaccatcctggctaacatggtgaaaccccgtctctactaaaaacacaaaaaattagccgggcgtgttggtgggcacctatagtctcagctactcg

SEQ ID NO: 433349 - DNA, 201 bp, Homo sapiens
gtctcaaaaaaaaaaaaaaaaaaggccaggtgcgatggctcacgcctgtaatcccagcactttgggaggccaaggcgggcggatcatgaggtcaggacatsgagaccatcctggctaacatggtgaaaccccgtctctactaaaaacacaaaaaattagccgggcgtgttggtgggcacctatagtctcagctactcggga

SEQ ID NO: 433350 - DNA, 201 bp, Homo sapiens
tctcaaaaaaaaaaaaaaaaaaggccaggtgcgatggctcacgcctgtaatcccagcactttgggaggccaaggcgggcggatcatgaggtcaggacatgragaccatcctggctaacatggtgaaaccccgtctctactaaaaacacaaaaaattagccgggcgtgttggtgggcacctatagtctcagctactcgggag

SEQ ID NO: 433351 - DNA, 201 bp, Homo sapiens
tggctgaggccagtaaaaatgaaacgggtggtggcgaaggcgtggaggtcctggtgaatgagccctacgagaaggacggtgagaaaggccagtacacacayaagatctaccacctgcagaggtatgcggcatgagcagcggggccggatgctggcttttgtgtgtgtgtgaatgagtgttatttcctttattgttttatat

SEQ ID NO: 433352 - DNA, 201 bp, Homo sapiens
ggaagcggagcttgcagtgagccgagattgcgccactgcagtccgcagtccggcctgggcggcagagcgagactccgtctcaaaaaaaaaaagatgtttcrtaagtatttgttgaatgaataaatgaatgaaacgggccaagtgtggtggctcacacctatgctgtaatcccagcactttgggaggttgaggcaaaggatc

SEQ ID NO: 433353 - DNA, 201 bp, Homo sapiens; identical to SEQ ID NO: 146303

SEQ ID NO: 433354 - DNA, 201 bp, Homo sapiens
ttgttttatatagatgggattatactaattgttatatcctaacaattaatagttatatactgactgtataaatgttatactcacatttatatagatgggamtatactattccttttttgttgttacttatcatggcctcctctcccagcctgttctgtctgcctcggtctctgaagtccgtgtaggattcacagtatcatg

SEQ ID NO: 433355 - DNA, 201 bp, Homo sapiens; identical to SEQ ID NO: 146305

SEQ ID NO: 433356 - DNA, 201 bp, Homo sapiens
agtacccacgtttgttcgaatgctggccccagagggagccctgaatatacacgagaaagcctggaatgcttacccctactgcagaaccggtgagtgcagcyggggccacgtcggccaggcaggggcgggcagcagagctgtgggtcccacctgcgtgttccggattaggccagggaaaggctcgggctgggtcccttccgg

SEQ ID NO: 433357 - DNA, 201 bp, Homo sapiens
aaggatattttataactgacaaaaactgcatagtggttccccacttgttcccacaggtgcataagctggagcctgaggcgtggaaacacgtggaagccgtrtatatagacattgcagatcgaagccaagtgctcagcaaggtaggatccgtttaaagacgtgggtggccttcgagacgcagaaatgacttctcaatgctaa

SEQ ID NO: 433358 - DNA, 201 bp, Homo sapiens
ctctccagggctaccatggggtcctctctgtggtcctcttttgcctggccgggaaggcagtggcctctgcctagacctatcttaccagcatgggattgctrtgtctctgatttgcaaaatgtgatctccggaactttttatggggccttctcgtactgcttggattggtgcagttcctggtacatgggagctatatcttta

SEQ ID NO: 433359 - DNA, 201 bp, Homo sapiens
aaccggaaactatatttttataacatatttattaaataaatgaatgggctgggtgcagtggctcacgccagtaatcccagcactttgggaggccgagttgrgtgaatcacctgaggtcaggagttcgagaccagcctgaccaacatggtgaaaccccgtctctactaaatacaaaaaattagccaggtgttgtggtgggtg

SEQ ID NO: 433360 - DNA, 201 bp, Homo sapiens
cttcctatcactgaaagttatcactgataacttcctatcactgaaagttatcactgataacttcctatcaatgaaagttatcactgataacttcctatcamtgaaagttatcactgataacttcctatcactgaaagttatcactgataactttctatcactgaaagttatctctaaggaggcagctcttccaggaataat

SEQ ID NO: 433361 - DNA, 201 bp, Homo sapiens
aaataggattccaaacagacccagagaaagttactgcataattatttaaatattaacatgtactgagttcagaaatataaatataataacacataaacacwgtttacaaattcatgtcaccattttcctgtgctccatgatttcttcaatttggctacatacattgggccccaggctttgcccttatctggaatcactaag

SEQ ID NO: 433362 - DNA, 201 bp, Homo sapiens
ttttgtaacccaaagttatcactgataacttcctatcactgaaagttatcactgataacttcctatcactgaaagttatcactgataacttcctatcactgaaagttatcactgataacttcctatcaatgaaagttatcactgataacttcctatcactgaaagttatcactgataacttcctatcactgaaagttatca

SEQ ID NO: 433363 - DNA, 201 bp, Homo sapiens
attttgtaacccaaagttatcactgataacttcctatcactgaaagttatcactgataacttcctatcactgaaagttatcactgataacttcctatcactgaaagttatcactgataacttcctatcaatgaaagttatcactgataacttcctatcactgaaagttatcactgataacttcctatcactgaaagttatc

SEQ ID NO: 433364 - DNA, 201 bp, Homo sapiens
ctgggacacacctcccagtaggggctgacagacacctcatacaggagagctctggctgacatctggcaagtgcccctctgggacaaaacaggacagaacaygcaacaatctttgctgttctgcagcctccgctggtgatacccaggcaaacaaggtctggagtggacctccagcaaactccagcagacctgcagcagaggg

SEQ ID NO: 433365 - DNA, 201 bp, Homo sapiens
cagaaggggggtaagggtggaaaaactatttggtgctatgcttactacccggatgatgggatcaatcgtatcccaaacctcggcatcacgcaacacatccktgtaacaaacctgcacatgtacccccgaatctaaaatacaataaattatttaaaaaaataagtaaacaaaatagaaagaatcttcctgaataaaagagaa

SEQ ID NO: 433366 - DNA, 201 bp, Homo sapiens
tcaccaagacccagcttcccttcaggcctttgctggcaccctcaggctttgttagatacttggatcacagtatttacaaattagtttatatagttgtaacmacacccatctcctcacttctcccattaacactaactagacggcatgtaaactggacatgcagactgtcttgctctgtattccagagagggttatatagtg

SEQ ID NO: 433367 - DNA, 201 bp, Homo sapiens
tgtactgaggatttttggcaagatggcccaataggaacagctccggtctgcagctcccagcaagatcaacgcagaaggtgggtgatttctgcatttccaamtgagggacccggttcatctcattgggactggttggacagtgggtgcagcccacagagggcgagctgaagcagggtggggcatcgcctcatcagggaagtg

SEQ ID NO: 433368 - DNA, 201 bp, Homo sapiens
tgggtggatcacaaggtcaagagatcaagaccatcctggcccaaatggtgaaacccccatctctactaaaagtacaaaaacagctgggcatggtggcgtgygcctgtagtcccagctactcgggaggctgaggcaggagaatcacttgaacctgaaaggcggaggttgcagtgagccaagatcgtgccactgcactccagc

SEQ ID NO: 433369 - DNA, 201 bp, Homo sapiens
gttttcccatgttgcccagactggtctagaactcctgagctcaagcgatccgcctgccttggcttcccaaagtgctgggattacaggcacgagccaccgcrcccagccaacatttccatcttcttatctgtgtgaacagcactggcatctataaaaacagaaccatcacacaaaaaacagacagaattgatgctgaactct

SEQ ID NO: 433370 - DNA, 201 bp, Homo sapiens
ggcatgagaatcgcttgaacccaggaggtagatgttggagtgagcggggatcacaccactgcactacagtctgggtgacagagtaagactctatctcaaaaaacaaacaaacaaacacacaaaaaaacaaagaagccaaatcaaaacagcttaggtgagaaaaatgatttagagaagggtctaggtcatctcaaagctaat

SEQ ID NO: 433371 - DNA, 201 bp, Homo sapiens
atgtatatctccactctttttctctggagaactctaatatagtcagtgattcttactgtgccatgccaaaacatttaataaaatcattgtttatgatatcktggaagagagactatatactaacaacatttacataactctaggataactagaagaaaattgtaacatgttagtgtatgttaatgagagaaagctcaggaa

SEQ ID NO: 433372 - DNA, 201 bp, Homo sapiens
gattctggagtctggccatctactgattacctagacaactctgggaagcctactcagattcttatttaagtccctattattttgagtctctttctctctcygttatattagaagaaaaactgtcttaactaatactgaatttggtaccacgtggagttgttgtagcagaatctaagtgaagaactgccttaataaacaagt

SEQ ID NO: 433373 - DNA, 201 bp, Homo sapiens
gcatgagaatcgcttgaacccaggaggtagatgttggagtgagcggggatcacaccactgcactacagtctgggtgacagagtaagactctatctcaaaaaacaaacaaacaaacacacaaaaaaacaaagaagccaaatcaaaacagcttaggtgagaaaaatgatttagagaagggtctaggtcatctcaaagctaata

SEQ ID NO: 433374 - DNA, 201 bp, Homo sapiens
catgagaatcgcttgaacccaggaggtagatgttggagtgagcggggatcacaccactgcactacagtctgggtgacagagtaagactctatctcaaaaaacaaacaaacaaacacacaaaaaaacaaagaagccaaatcaaaacagcttaggtgagaaaaatgatttagagaagggtctaggtcatctcaaagctaataa

SEQ ID NO: 433375 - DNA, 201 bp, Homo sapiens
atcaaaattttccagggtactgagaaactgtatcaggctatgtctgagaacagatggaaaataacaaccacaaagcaacataatagtggtattactgggcstccatcagtttgtcacaatgtaataaaagtaccttgtcaaacatttcaggctgggcatctcccatttttctgccatccaattcagacactttaattacat

SEQ ID NO: 433376 - DNA, 201 bp, Homo sapiens
atgagaatcgcttgaacccaggaggtagatgttggagtgagcggggatcacaccactgcactacagtctgggtgacagagtaagactctatctcaaaaaacaaacaaacaaacacacaaaaaaacaaagaagccaaatcaaaacagcttaggtgagaaaaatgatttagagaagggtctaggtcatctcaaagctaataac

SEQ ID NO: 433377 - DNA, 201 bp, Homo sapiens
tcaagtcagcattttaaaatagcttccagcagaattattgcttacacgtagactttatttgaaatggtcttaggttggttaaactttttaaaaatatgaartataaagtgtcacaatgcaagtttcatatatatactaacacttactacattgagacaattttgtgcttaaattgtcaaaaacaaccaaatcttaattttt

SEQ ID NO: 433378 - DNA, 201 bp, Homo sapiens
cttcctatcactgaaagttatcactgataacttcctatcactgaaagttatcactgataacttcctatcactgaaagttatcactgataacttcctatcamtgaaagttatcactgataacttcctatcactgaaagttatcactgataacttcctatcactgaaagttatcactgataactttctatcactgaaagttat

SEQ ID NO: 433379 - DNA, 201 bp, Homo sapiens
caagaacatacaacaactctataatcagacaagttcaatgatttaaaaaccagtatttctggtctttgttttccaatcaaaattaaaagatgtattttacratatactaagcaaaaattagcacactactaaaatctaagtacctaaatatacagggccctgtccattacaataatgtctgggataaatcatctgcttcca

SEQ ID NO: 433380 - DNA, 201 bp, Homo sapiens
tctttctgtttctggcttatttcacttaacataatgccctactgtcccacctatgttgtagtaaataacagaatgtccttgcttttaaaggctgtgtaagwtctcacgtgtataaagtatctttgagcaccatatctgtcaacagacaatgtacatacaagtctagcctttggaaaatagtacaatcagaaagtttccctt

SEQ ID NO: 433381 - DNA, 201 bp, Homo sapiens
ctgctagaatatatcagtttgcctttgggttcctaatcaaatcaactttgctactataaatgtgtaaaatatttatagcctactaatgaggataatttagrattaaaatgccctctcttcaaaatggtaaccaaatttgacatttccctttcatcctttataatactaaaattccatatcctgaattaattagtataagcc

SEQ ID NO: 433382 - DNA, 201 bp, Homo sapiens
gattttgtaacccaaagttatcactgataacttcctatcactgaaagttatcactgataacttcctatcactgaaagttatcactgataacttcctatcactgaaagttatcactgataacttcctatcaatgaaagttatcactgataacttcctatcactgaaagttatcactgataacttcctatcactgaaagttat

SEQ ID NO: 433383 - DNA, 201 bp, Homo sapiens
aatatagaaatctagatactggttcatttctctctttcttaaccacctcagtctacatccttcacagattatggtaatattatcaggttgtgtgtgtgtakgtgtgtgtgtgtgtgtgtgtatttttttttcctctctgtatgtgaactctcggtcagtgaggagagtgtccaaaaaaaaaaagatgttgcagacagttca

SEQ ID NO: 433384 - DNA, 201 bp, Homo sapiens
gtagttgagtctcaaagacaactctcacttctgacaccaattacaagttcagggattccaaggatgactctcaggtttgattattcactgggacacaaccraactcactgaaagctgttataatcacagttatagtcacagtttattataatgaaagcatacagattaaaaacaatcacaggaagagactcatagtgcaga

SEQ ID NO: 433385 - DNA, 201 bp, Homo sapiens
ctccagctggctcatgctttgcagggacgaggcgagaggatcatttcccagttcaagaccagactggaaaacatatcaaggacgtgtctctacaaaaagtaaaaaaaaaaaaaaaattagccaggcgtagtggcctgctcctgtagtcctagctactagggaggctgaggctggaggatcgcttgaacccaggagttcaag

SEQ ID NO: 433386 - DNA, 201 bp, Homo sapiens
cgcaccaccacacccagctaattgcttattttttctagagatgaggtcttgctatattgcccatgctggtcttgaactcttgtcctcaagcaatcttcccrccctcaagcaaatctcctgccttggcctcccaaagtgctggaattacaggtgtgagccatcgtatattatcttcttgtcaacattcattcattctctaaa

SEQ ID NO: 433387 - DNA, 201 bp, Homo sapiens
ttgtctcaaaaaaccaaaaaagttatcactgacatcaaagagattttcatgcctagagggacatagccttcagccagaaagttgactaagacaatctaccragctgggtcatccttagttaatatgctaatgttttcccatttagaatccatattgtttgctctttttctgccaagaccaggacattaaaaaggctatgtt

SEQ ID NO: 433388 - DNA, 201 bp, Homo sapiens
atccaattaataggagtactagaaagataagacactcattattatttattgagcctctattatatgctgagcattgttctaggtggtaagtatatctcaayagacagaacaacaacaaaaaaatctttcacctcatgaagcttacattctagctgggggacatagaatataacaaattaaatatgttttgaattaaactgt

SEQ ID NO: 433389 - DNA, 201 bp, Homo sapiens
atggtcttgctgttttgctactgctgcatgttgtttaaatatcattttaatccttttgctttcagtagttatgtattttaaaactatcagaaatttgtatkcaaagataaaggaaggcaggcaatttgtaaaaactcactcctagggtttatagctaagatttttctactctgagaattatcttatgctatagatcagagg

SEQ ID NO: 433390 - DNA, 201 bp, Homo sapiens
ccgtgggagtttaaaatttcactgatcacatcttgattttctgccttggaaagcgtgcatgtagagtatacaagtatccctccaggacgtaaggccttaaytgcagacctgtgtgcaatcagaaaaatgcaaaagattagttaagtatattaaaaagaaaccagggggtctgacagcaaagattacgtacttaaaactaac

SEQ ID NO: 433391 - DNA, 201 bp, Homo sapiens
aacattgtgtactcacggacataaagatggcagtaatagacactgggaactactagaagggagagggcagaaggggggtaagggtggaaaaactatttggygctatgcttactacccggatgatgggatcaatcgtatcccaaacctcggcatcacgcaacacatccgtgtaacaaacctgcacatgtacccccgaatcta

SEQ ID NO: 433392 - DNA, 201 bp, Homo sapiens
tcagtaagggacttatagataaaaccccctctccctgggacagagcacctggggaaaggggcggctgtgggcacagcttcagccgacttaaacgtccctgyctgatggctctgaagagagcagcggacctcccagcacagtgtctgagctctgctaagggtcagactgcctcctcaagtgggtatctgaccgctgtgtatc

SEQ ID NO: 433393 - DNA, 201 bp, Homo sapiens
gaaaatagtacaatcagaaagtttcccttatttacctcttcactatcttttccactccttttctcacttctgagtgccatcttctgctcaaaatatggggycagacaatatttgtttatctgcattccaattgctctttgtaaatgaaaataaggatctgcaatcaatccttcatatgaatgaaactcatacacattaatg

SEQ ID NO: 433394 - DNA, 201 bp, Homo sapiens
gtacgcgaatcagtatcaaaaagcctccagggaactgaaaaaaacagtctgacttccgggattcgcgggcatccactttcattctcacgtttcctcttcartttctcgcgagatactgatttgctcgcgctatagaattcttgtcgaagaggcttagctcccgcgggagatttcgtgcgcagttacttccggtagctggta

SEQ ID NO: 433395 - DNA, 201 bp, Homo sapiens
caagacttgtagatgtcaggactccgatcattttctctgcctatagcttggatatcttaatctctcccctttgtcatcataatcatatagccaagggactmggaattttggctgcttcaagtcattccaaaacctctcaggcaggccaggaagcagaggcagggaatgtagagcagctgctgaaggaaaagaatgggagat

SEQ ID NO: 433396 - DNA, 201 bp, Homo sapiens
ctcatcataattatgcagaaatagggctcagaggtaaacattattattttcttatgctttaaaaacagaaataaggtatatgtgtatgtatatatagatgmacatacctactacataaaacatttacaacagtcatgcctacacagtctctcagaagctctcagcatttgctccaccaagtttaattttattagaggtaaa

SEQ ID NO: 433397 - DNA, 201 bp, Homo sapiens
aaaaactatttggtgctatgcttactacccggatgatgggatcaatcgtatcccaaacctcggcatcacgcaacacatccgtgtaacaaacctgcacatgyacccccgaatctaaaatacaataaattatttaaaaaaataagtaaacaaaatagaaagaatcttcctgaataaaagagaacagaatgtggatttggtcca

SEQ ID NO: 433398 - DNA, 201 bp, Homo sapiens
ctctgatcacaaatgtcaagggaagagaatattttaagagggagcaagcagtaaacaaagtccagtgcagcagggagtataaactggtatagcctttttgsagaacaattcaacacagctattaaagtatttgatcctcagttctacttctcaatatttatttaatcaagaaaaatgctagcagacctgtcggatgagaca

SEQ ID NO: 433399 - DNA, 201 bp, Homo sapiens
taaaaatcaagttattatgtgctccagcaattccacttctggtcatattccccaaacaattgaaagcagggtcttaaagagatatttgtacccatgttcayagtagcattattcacaatggccaaaagatagaagcaacccaagtgtccatcagtggatgaactgccaagcaaaatgtgtagacagatacatagatatgat

SEQ ID NO: 433400 - DNA, 201 bp, Homo sapiens
caattgcctctgaggactaagactggaggaagagaggaagagttgcaggggagcaatccttttcactaggagctcatttgtagtttaattttttacccatmtgatttatttctgtaatacaaattaaaggggagatttgacaaaagaataaatatcagagcttttgccatggaggtcacttaaattgtttttttttttttt

SEQ ID NO: 433401 - DNA, 201 bp, Homo sapiens
gatcagtattcctgactcttccttttgcctcatgagcctctgacaggactgaatccagcattgttatgatcctgtctttattttaaaaactggtatttcgttcactgtggcttttcaaaaactaattgtgatcactgaaatattacattattgaggcaagagaatagagtctgaagacaaggaacctaaggccatttcata

SEQ ID NO: 433402 - DNA, 201 bp, Homo sapiens
ggaaagattggaagacaggcaagaggaaattctaggtagtgagatagtgataaaatagagctattcctgatgataaaagtgctatagtcttttttttttttcattttttgaagtcaagggcaggagataagagagagattgtgtctggtatcatcattttttttccccttatctttttaaccccaagacttgtagatgtca

SEQ ID NO: 433403 - DNA, 201 bp, Homo sapiens; identical to SEQ ID NO: 112315

SEQ ID NO: 433404 - DNA, 201 bp, Homo sapiens
ggcctggctcaccctgccctggccatctgtccgcagaggccgcggggcccgtggggccggcgctggagccaccgacgctgccgctgcaccgcgcgctcacrctgcgcttcctgctccagcacctgggccgcgtggccagccgcgccccggccctgggtcccgcggtccgggccctgggcgccacctttgggccgctgctgc

SEQ ID NO: 433405 - DNA, 201 bp, Homo sapiens
tgaggcaggagaatcacttgaacggggaggtggagtttgcagtgagcagagattatgccaatgcagttcagcctgggcaacagagcaacactctgcctcaraaaagaaaagaaaaaaaaaatcgcccgctgtgcaacctaccatgctgggtggctgcggcagccctgtcctgggttcaaatcagttcaaatcctgccccca

SEQ ID NO: 433406 - DNA, 201 bp, Homo sapiens
acggccctagatacctccctgctctgagcctcagtttccccatctgtaacaggggtgatgaaaagcctgtttactggccgggcgcggtggctcacacctgtaatcccaacactttggaaggcagaggcgggaggactgcttcagcccaggagtttgggaccaacctgggcaacatagcaagaccccacctctattggaaaa

SEQ ID NO: 433407 - DNA, 201 bp, Homo sapiens
ctgtaatcccaacactttggaaggcagaggcgggaggactgcttcagcccaggagtttgggaccaacctgggcaacatagcaagaccccacctctattggaaaaaaaaaaaaaaaggctgggcaaggtggctcatgcctgtaatcccagcactttgggaggccaaggcgagcagatcacttgaggtcaggagttcaagacc

SEQ ID NO: 433408 - DNA, 201 bp, Homo sapiens
tgcaaaggtgagtctggcgcctctgccctgccccaccccaccctgatctggtgcagtacaagccagggagggaaggaagcagaaggaggccagccacttgraggcaaagagtagtctgttgaaatggactttgggcctggtgcgatggctcaggcctgtaatcccagcactttaggaggccgaggcgggtggatctcctga

SEQ ID NO: 433409 - DNA, 201 bp, Homo sapiens
cctataggaggatgtaaagaagaagagggtttggggggtggggttttgaaggctgaataggagttcatttggtgcagcaggcgttagaagaatgacactcygatagagggaccagcttgagcagtctccgtatcagagttgagatgtgcctttacccctcacgagggccttttggggagtcccaggaggtgctgagctgcg

SEQ ID NO: 433410 - DNA, 201 bp, Homo sapiens
tgcagtgggaggcagccacagtatacagtcggtgctcaggatgcatttgttttcctgtcccccagcgctgccgcctaaaccccccaaggcaaagccggccyccacagtcctggccaatggagggagcccaccctccctgcaggatgctgagtggtactggggggacatttcaaggtaggttgctggcagggggccagggac

SEQ ID NO: 433411 - DNA, 201 bp, Homo sapiens
ggagtttgggaccaacctgggcaacatagcaagaccccacctctattggaaaaaaaaaaaaaaaggctgggcaaggtggctcatgcctgtaatcccagcaytttgggaggccaaggcgagcagatcacttgaggtcaggagttcaagaccagcctggccaacatggtgaaacctcgtctctactaaaaatacaaaaattag

SEQ ID NO: 433412 - DNA, 201 bp, Homo sapiens
tcagaggctcagcctagcttcatcctgccttttgcagacagggtcccttgaagaacccctttggagaccctgatttccaaaatgaagccacaaggagggtrggatgtgggctgctcagctgaggccacacagcacagtgggatatgaggaccccacatccctcttcaaagacccttggccatcaccacttgccaggggtgt

SEQ ID NO: 433413 - DNA, 201 bp, Homo sapiens; identical to SEQ ID NO: 148456

SEQ ID NO: 433414 - DNA, 201 bp, Homo sapiens
tgctgtcatttcttcccgttgggggccgtaaatactgatccctgagtgctgccggcatcagcaggctggttgcagtgggaggcagccacagtatacagtcrgtgctcaggatgcatttgttttcctgtcccccagcgctgccgcctaaaccccccaaggcaaagccggcccccacagtcctggccaatggagggagcccac

SEQ ID NO: 433415 - DNA, 201 bp, Homo sapiens
gaggtggagtttgcagtgagcagagattatgccaatgcagttcagcctgggcaacagagcaacactctgcctcaaaaaagaaaagaaaaaaaaaatcgccygctgtgcaacctaccatgctgggtggctgcggcagccctgtcctgggttcaaatcagttcaaatcctgcccccacccaccaacctcctgaagacctcagc

SEQ ID NO: 433416 - DNA, 201 bp, Homo sapiens
actccataggcgttaacagaaacaaaaaaatgaggggtgtgggtcagggttccccagcagagctgggcgagccaccctgggttcaggctgccctgagccasgtcagctctgccctcttgtggcaaccggagatattgtacccagaaccctctctcctcagccagaccctgcctcccaccggacaggcccactgtgggctca

SEQ ID NO: 433417 - DNA, 201 bp, Homo sapiens
agaatgagtaggagttcaccagggaggaaaagttgtccaggcagctggggagcctcggaggctggcaggtgagtgaccagggccctccccgccaccgcccsccaccccagccagtacgcactcatggaggacgaggacgatctcccgcaccacgaggaacgcacttggtacgtgggcaagatcaaccgcacgcaggcagag

SEQ ID NO: 433418 - DNA, 201 bp, Homo sapiens
gacccaggccgggatatttttcttttctttcctttcaaccacttttttgtttgcatcaagaagggagaagcgggccgggcacagtggttcatgcctgtaaycccagcactttgggaggccaaggcgggtggatcacttgaggtcaggagttcaagaccagcctggccaacagggtaaaaccccatctctactaaaataata

SEQ ID NO: 433419 - DNA, 201 bp, Homo sapiens
cccaggagatggaggttgcagtgatccaagatcatgccactgcacaccagcctgggtgacagagcaagactccatctcaaaaaaaaaacaacaacaacaamaaaaaaaaaaaacgaggaggccaaggcaagtggatcgttaggggccaggagtttgaggctgcagtgagctaggattgcgccactgcactccaacctgggt

SEQ ID NO: 433420 - DNA, 201 bp, Homo sapiens
gttttgttttgttttgagatggagtttcgctcttgtcgcccaggctggagtgcaatggcgcaatcttggctcctgcaacctctgcctctcgggttcaagcsattctcctgcctcagcctcccgagtagctgggattacaggcacgtgccaccacgcctggctaatttttgtatttctagtagagacagggttttaccatgt

SEQ ID NO: 433421 - DNA, 201 bp, Homo sapiens; identical to SEQ ID NO: 148468

SEQ ID NO: 433422 - DNA, 201 bp, Homo sapiens
ccctcaggtgggggcctgtccctgcaaggataaccgggggtcacaggtcacagagaccgggagttcagaggggatagaacatgtgcggtttcaagaatggrgggccaggcacggtggcttacacctgtaatcccagcactttgggaggctgaggctggcagaacacctgaggtcaggagtttaaaaccagcctggccaaca

SEQ ID NO: 433423 - DNA, 201 bp, Homo sapiens
atcccagcactttgggaggctgaggctggcagaacacctgaggtcaggagtttaaaaccagcctggccaacatggtgaaaccccgtctctactaaaaaatwaaaaaaaaaaattagccaggcatggtgatggatgcctgtaatcccaactactcgggaggctgaggcaggagaattgcttgaacccgggaggtggaggttg

SEQ ID NO: 433424 - DNA, 201 bp, Homo sapiens
gccccagcctcacctgctgatggaggactcaatggcccagtgacctgacaccacaccaccaactccctcccaccagctgacgaatggtggacccagtgacragtggcccttgtaagggtcatggaataatttgaagcgaggcatgagcggcccctgtggtcgcctgtgactgctggagatagaggtcccagcaccccaagc

SEQ ID NO: 433425 - DNA, 201 bp, Homo sapiens
caggctgagcctggatgccctgggcctctatgttgaatagggcacagagtgactcctaagggaagatgggaaggtgaacatgaccaggccactgcatgtgytgtgccctctcccagttctccctccccacccctcccatgcccttatctctgggcagcaaagggagactgcaggggggttgagcggccagtccaggcctca

SEQ ID NO: 433426 - DNA, 201 bp, Homo sapiens
gatccctgagtgctgccggcatcagcaggctggttgcagtgggaggcagccacagtatacagtcggtgctcaggatgcatttgttttcctgtcccccagcrctgccgcctaaaccccccaaggcaaagccggcccccacagtcctggccaatggagggagcccaccctccctgcaggatgctgagtggtactggggggaca

SEQ ID NO: 433427 - DNA, 201 bp, Homo sapiens
gcttccagtaccgcgctctgtacccgttccgccgggagcggccggaggacctggagctgctgcccggcgacgtgctggtagtgagccgggcggccttgcakgcgctgggcgtggccgagggtggcgagcgctgcccacagagcgtgggctggatgcccggcctcaacgagcgcacacggcagcgaggtgacttccctggca

SEQ ID NO: 433428 - DNA, 201 bp, Homo sapiens
attccattttgtggaaagttggaagccttccacaaaaattcctgctgggctgggcgcaatggctcacacctgtaatcccagcactttgggaggctgaggcrggcagatggatcacttgaggccaggagttcaagaccagcctggccaacatggtgaaaccccgtctctactaaaaataaaaaatacaaaacccggccaggc

SEQ ID NO: 433429 - DNA, 201 bp, Homo sapiens
ggccgcggggcccgtggggccggcgctggagccaccgacgctgccgctgcaccgcgcgctcacgctgcgcttcctgctccagcacctgggccgcgtggccmgccgcgccccggccctgggtcccgcggtccgggccctgggcgccacctttgggccgctgctgctgcgcgcgccgccgccgccgtcctcgccgccgccagg

SEQ ID NO: 433430 - DNA, 201 bp, Homo sapiens
tctgcctcaaaaaagaaaagaaaaaaaaaatcgcccgctgtgcaacctaccatgctgggtggctgcggcagccctgtcctgggttcaaatcagttcaaatsctgcccccacccaccaacctcctgaagacctcagccagagcctccacctccctcttgggcctcagggagggcactgtcgcgtgccaggtgctgtgctaag

SEQ ID NO: 433431 - DNA, 201 bp, Homo sapiens
ggcgtcctcagctggccgagcatggtggcagcctgcacccttggctcccttgtctggtgcagccagcagagccgccagccttgggcgcccatggccctccrtgtgagggcgtgagcggcctgccccagcctcacctgctgatggaggactcaatggcccagtgacctgacaccacaccaccaactccctcccaccagctga

SEQ ID NO: 433432 - DNA, 201 bp, Homo sapiens; identical to SEQ ID NO: 148473

SEQ ID NO: 433433 - DNA, 201 bp, Homo sapiens
agggggtgctgaggtggtgcgacgctggccccagcctccaggcatctggtatctccagggcccaggcctgcgtcctgcctcggcctgaaggagcaggaggyggccccgtctgggctcccagccagaatctgcctctccccctggtaacagccacctccctcctctgcctggcctctgtccagccaccatacacggccccac

SEQ ID NO: 433434 - DNA, 201 bp, Homo sapiens
agctgacgaatggtggacccagtgacgagtggcccttgtaagggtcatggaataatttgaagcgaggcatgagcggcccctgtggtcgcctgtgactgctrgagatagaggtcccagcaccccaagccaacccagcggaccctcccagccctgcttcaaccaatggggccagtggggctccaagcagccacctaaccatcc

SEQ ID NO: 433435 - DNA, 201 bp, Homo sapiens
ccaaatgaagggaggccctgcctggaatggggcttcgaatagtaccgaggggcgcccaggcattgtgcggggcagaatggggtgcgggagggccgggggtygaacccacttccggtcccctagccgggtggccgggtccacgcagacccaagtgcgcgtctgtgtgagcgctcaggccctgccttcacccgcggagccccc

SEQ ID NO: 433436 - DNA, 201 bp, Homo sapiens
ggcctcttggtggatagcacctatccttatagccaccctgaatccttgacaagcaacttaacccactgccaaggctttgcatgtgccgttccgtctgcctrtcgcgccttcctatccgctgtgatgatccattctctagaacagcacgtccatcccccgaccctagccctgtccatcacagggcgtctgaacccgcagggc

SEQ ID NO: 433437 - DNA, 201 bp, Homo sapiens
cctcagtttccccatctgtaacaggggtgatgaaaagcctgtttactggccgggcgcggtggctcacacctgtaatcccaacactttggaaggcagaggcrggaggactgcttcagcccaggagtttgggaccaacctgggcaacatagcaagaccccacctctattggaaaaaaaaaaaaaaaggctgggcaaggtggct

SEQ ID NO: 433438 - DNA, 201 bp, Homo sapiens
gatgaaaagcctgtttactggccgggcgcggtggctcacacctgtaatcccaacactttggaaggcagaggcgggaggactgcttcagcccaggagtttgsgaccaacctgggcaacatagcaagaccccacctctattggaaaaaaaaaaaaaaaggctgggcaaggtggctcatgcctgtaatcccagcactttgggag

SEQ ID NO: 433439 - DNA, 201 bp, Homo sapiens
ccttccccgagggcacctgcccgcttgagcagctgctccgctctgcattcccaatattcagactccctgagcacctcatcctgaggcccagtactcctggmcaccacaagcccgctgaagggactggtgcagggagggaatggaggccagcactctgcccaggctgacgccctgagtcccctgtgactatgggaagccaga

SEQ ID NO: 433440 - DNA, 201 bp, Homo sapiens
ttgagcagctgctccgctctgcattcccaatattcagactccctgagcacctcatcctgaggcccagtactcctggccaccacaagcccgctgaagggacyggtgcagggagggaatggaggccagcactctgcccaggctgacgccctgagtcccctgtgactatgggaagccagatacgttattttcctacccaaaacc

SEQ ID NO: 433441 - DNA, 201 bp, Homo sapiens
tcagactccctgagcacctcatcctgaggcccagtactcctggccaccacaagcccgctgaagggactggtgcagggagggaatggaggccagcactctgyccaggctgacgccctgagtcccctgtgactatgggaagccagatacgttattttcctacccaaaaccctaagtgaccatctctggcactgtgggaatttt

SEQ ID NO: 433442 - DNA, 201 bp, Homo sapiens
ataccctgcgggtaggatagctggagcagacttgaatgaatggatcaagtccaaaacttcttagtctgcctttgaacccccagagtgtgttggcctgaacyaacttagcatcacctgccaccacatccccacttccggctgcatcagccagtgtcctgtttcccatcagagccagggctttgctgcctcttgctgggccct

SEQ ID NO: 433443 - DNA, 201 bp, Homo sapiens
aatggcgtgaacccgggaggcggagcttgcagtgagcagagatagcgccactgcactccagcctgggcaacagagcgagactccgtctcaaaaaaacaaamaacaacaacaaaaaaaaacctttccaggccactccctgcccagaccttcacctcctccccaggtcctaggaggccgggctcctcctagcctcccaactcc

SEQ ID NO: 433444 - DNA, 201 bp, Homo sapiens
atttagaggtcccttctgggtgccacacagcatgcttggtgaactcagatggtctctgccccacctggatcttaagatgcagatcctgaggcaggtctggrtggatcccagattctgcatttctgggagttcccagggaatgtgacactgctggtgcatgaccacgctgctggtgcatgaccacgtttggagcagccaggc

SEQ ID NO: 433445 - DNA, 201 bp, Homo sapiens
cttcctctcaggggcaaatggagcacagatctagacaatgtgtggacagtgtcagagtagcagtggccacatggaggaggaggcccacccggaactctgcycacactggccactgcagttcagcccacagagccactgcaggcaggcctacggacgtgacacgcacgctggtggtcccggagccagggttgattcaggaca

SEQ ID NO: 433446 - DNA, 201 bp, Homo sapiens
ggcgtgaacccgggaggcggagcttgcagtgagcagagatagcgccactgcactccagcctgggcaacagagcgagactccgtctcaaaaaaacaaacaamaacaacaaaaaaaaacctttccaggccactccctgcccagaccttcacctcctccccaggtcctaggaggccgggctcctcctagcctcccaactccttc

SEQ ID NO: 433447 - DNA, 201 bp, Homo sapiens
ccgggaggcggagcttgcagtgagcagagatagcgccactgcactccagcctgggcaacagagcgagactccgtctcaaaaaaacaaacaacaacaacaamaaaaaacctttccaggccactccctgcccagaccttcacctcctccccaggtcctaggaggccgggctcctcctagcctcccaactccttcccacctcag

SEQ ID NO: 433448 - DNA, 201 bp, Homo sapiens
cccacagagccactgcaggcaggcctacggacgtgacacgcacgctggtggtcccggagccagggttgattcaggacaccatcttgggctcttatccaggraagaaagagtcggcgtgcctgggggcacctgctagtctccagctgcaggccgactctttcctggcctgctcagcacctgcccagatggcctctgcgtctt

SEQ ID NO: 433449 - DNA, 201 bp, Homo sapiens
ggctgggtgcagaagggtgctgttagatgctcaggatcactgggtcgggtgcagcaccctcagactccaggcctgggagagggtccaggacatgccaagtkctcactttggtctgggcgcagccaggcttcaagtcctgatctccttcctccaaacacagcccttccccgagggcacctgcccgcttgagcagctgctccg

SEQ ID NO: 433450 - DNA, 201 bp, Homo sapiens
tttcttttagacacttttatactcactctggtaccctggattctctggcctggaaggcactggcgaaagctcatcttgcacaagccccttatttgtcaaaratgatgaaagaagctcagagaggtgaagcaactaaaacccggaccctctcacccctaggccaggacttttatttagaggctttttccatttaagtagtga

SEQ ID NO: 433451 - DNA, 201 bp, Homo sapiens
aaatcataatgtagagtgaaaaaaagtagaagggagtgttaagtatgataattttacaaaaaaatttaaaaccttcaatactacttattattttagatatycacgtttagtaagtatttttaaatatgcaagggaacttaaataccaaactcagagtggtggttactttggggagggaggaaaggaaattggggttgggaa

SEQ ID NO: 433452 - DNA, 201 bp, Homo sapiens
gtctctgccacctggcccgccccctccgaggcgccggagagcgattcccaaggggcctgccggagcgtggcgtcacaggagcgtcgcgtcacgtgaggctsccatccaatcgcggcgcgcgctctgccctgcgggcagcgggtgccaggcacggtgtcagcaggcaacatggccgagaggccggggcctccgggcggcgcc

SEQ ID NO: 433453 - DNA, 201 bp, Homo sapiens
gggctcagatttcccccaaatccactcaacttgtcatagattgagctgagatgggaccccagatagcctggctgagagcctgtcttgtctgtactgcttcygtgttcccttgctggtcttcaatagggtccccaaagttcttcttgcctggaggcctgcagcagtgagtcctgactgtcaccagcatggtccctcacaggg

SEQ ID NO: 433454 - DNA, 201 bp, Homo sapiens
tggcccagccttgggatgtcatgtgggactgtatcctagggcgatccagttgtgcagccttctgaccatcagccaagggaagcaggcctctgatggagcargctctggctctgtaaggagaggtgcagctgcagcagtgttctaccggaagtgttttgatcatctgtacagtgctttggattcttcctcccaggcctaccc

SEQ ID NO: 433455 - DNA, 201 bp, Homo sapiens
aagccccttccacacaagcagcagtagcaccacttggctagacggaccagctggaaagatcatgatggtggcccagccttgggatgtcatgtgggactgtrtcctagggcgatccagttgtgcagccttctgaccatcagccaagggaagcaggcctctgatggagcaggctctggctctgtaaggagaggtgcagctgca

SEQ ID NO: 433456 - DNA, 201 bp, Homo sapiens
ggctaagccgcgagaagtttaccttctaccacagcgtccacagtacccggcttggcctcaggcctcgggtcccgacgtcctccccagagcacaaacctacyacaggttaggccggaggccgccacagcccagggtctctgccacctggcccgccccctccgaggcgccggagagcgattcccaaggggcctgccggagcgt

SEQ ID NO: 433457 - DNA, 201 bp, Homo sapiens
cgctgcggggcccgcggggctcttggggtggggcgggggtgggcgcagggcgccgccgcaccctcgccggtctgtcccgccggggccccgggccgcgggcsgcgctgcggtcagctggggtggcagagagtgtttcgcctctaatcacgccaaaccctcgtccagtgtaggtggtaagagacgtcggggactgaggcctct

SEQ ID NO: 433458 - DNA, 201 bp, Homo sapiens
gcggaggaggggcgctgcggggcccgcggggctcttggggtggggcgggggtgggcgcagggcgccgccgcaccctcgccggtctgtcccgccggggcccmgggccgcgggcggcgctgcggtcagctggggtggcagagagtgtttcgcctctaatcacgccaaaccctcgtccagtgtaggtggtaagagacgtcgggg

SEQ ID NO: 433459 - DNA, 201 bp, Homo sapiens; identical to SEQ ID NO: 105463

SEQ ID NO: 433460 - DNA, 201 bp, Homo sapiens
gcgtcacgtgaggctgccatccaatcgcggcgcgcgctctgccctgcgggcagcgggtgccaggcacggtgtcagcaggcaacatggccgagaggccgggscctccgggcggcgccgtgtccgcgaccgcgtaccctgacacccccgcggaattccctccgcacctccaggcgggtgcgatgcggcgccgcttttggggcg

SEQ ID NO: 433461 - DNA, 201 bp, Homo sapiens
cctgccaggcatggcctgaagtgccaggtttgctccatgcagtgtaaacacatttgtgtacaatggcaagcgctaggagtggcttaaaaagaggtgacttyggggtttattggattcttttatttttctcctataaagttgtttacatatataataggagtcagatgagagatgaatttatagtttcagatataagaagaa

SEQ ID NO: 433462 - DNA, 201 bp, Homo sapiens
gagagcgattcccaaggggcctgccggagcgtggcgtcacaggagcgtcgcgtcacgtgaggctgccatccaatcgcggcgcgcgctctgccctgcgggcrgcgggtgccaggcacggtgtcagcaggcaacatggccgagaggccggggcctccgggcggcgccgtgtccgcgaccgcgtaccctgacacccccgcggaa

SEQ ID NO: 433463 - DNA, 201 bp, Homo sapiens
aaggtccgcggtgtaactcatttcttgcagagaattttgaatgcctttgcctcttcacagcatcctgcttcagacacttgacctgtggcgtgggtgttatyatttcccacctcccagatgaagaaacagaggcacagagaagtaacttcccaaggtcacacagtggatctgtagaggacccaggatgtaggcccagttctg

SEQ ID NO: 433464 - DNA, 201 bp, Homo sapiens
tcaccatgttatccaggatagtctcgatctcctgacctcgtgatctgcccgcctcagcctcccaaagtgctgggattacaggcgtgagccactgcacctgrcccccttgttctttttgtatcttagaccatgtgaatgtaattcctagttcaaagtgggctgtgtgctgcctgcacactttcccagcacagagcctgaagc

SEQ ID NO: 433465 - DNA, 201 bp, Homo sapiens
gatctcctgacctcgtgatctgcccgcctcagcctcccaaagtgctgggattacaggcgtgagccactgcacctgacccccttgttctttttgtatcttakaccatgtgaatgtaattcctagttcaaagtgggctgtgtgctgcctgcacactttcccagcacagagcctgaagcccggcacttacctgcctcacttctc

SEQ ID NO: 433466 - DNA, 201 bp, Homo sapiens
ccgtgttcttcaacatcaccgttgacggcaagcctttagacctgcgtctccttcaagctgtttgcagacaaggttccaaagccagcagaaaacttttgtgytctgagcactggagagaaaggatttggttataagagttcctgctttcacagaattattccagggtttatgtgtcagggtggtgacttcatacgccataat

SEQ ID NO: 433467 - DNA, 201 bp, Homo sapiens
tccacacaaaaaaagggggcggggatgcatcaggatgcctatctttatgatttagctccgagcttagcaccatgaacagcagctgtggtgcctagagtccracagggcctcagttgttctttcatcctcagaattggggggtggatgcagaggtgggtcagggattaggcttgaatccccaaaaccaatgtgtattgggct

SEQ ID NO: 433468 - DNA, 201 bp, Homo sapiens
tgtggaggaggcaggagagtgaggcaggtacagaagccttgtggcttcggttgctctgacacctgctagagcttgatcttgtggttacttcctgaggtcayacaggctaaggctctttgaactgcacagggtctgttcattctcctggtgctctcaaggagaaaagtttgacctccctttggagaccttgttttacttggg

SEQ ID NO: 433469 - DNA, 201 bp, Homo sapiens
accgtgttcttcaacatcaccgttgacggcaagcctttagacctgcgtctccttcaagctgtttgcagacaaggttccaaagccagcagaaaacttttgtrctctgagcactggagagaaaggatttggttataagagttcctgctttcacagaattattccagggtttatgtgtcagggtggtgacttcatacgccataa

SEQ ID NO: 433470 - DNA, 201 bp, Homo sapiens; identical to SEQ ID NO: 108282

SEQ ID NO: 433471 - DNA, 201 bp, Homo sapiens; identical to SEQ ID NO: 108283

SEQ ID NO: 433472 - DNA, 201 bp, Homo sapiens; identical to SEQ ID NO: 108284

SEQ ID NO: 433473 - DNA, 201 bp, Homo sapiens
ctggccttgaaaacctgggcccaagcctcccacttcagcctcccaagtagctggaactacaggcacaccccaccacatctagctcagaaacaatttttttwaaaggaaagatgagatattcagaacaaagaaacagttcttggaaatttaaaacatgatagcagacattaagaactcgctagaagggttgaaagatagcat

SEQ ID NO: 433474 - DNA, 201 bp, Homo sapiens; identical to SEQ ID NO: 108285

SEQ ID NO: 433475 - DNA, 201 bp, Homo sapiens
agaaagatccacttccagcttcacttgggcaactgtcagcaggattcagtttttttcaggatattgtatcctgggcctcagctcttgtctgttcagggggyttctcattttcttgccatgtggggctctccaccggagagctcacaacagggcagcttgcttcatcacagcaagcaaacagaaaagagagggaggcagaga

SEQ ID NO: 433476 - DNA, 201 bp, Homo sapiens; identical to SEQ ID NO: 108287

SEQ ID NO: 433477 - DNA, 201 bp, Homo sapiens
ctcaaaaaacaaacaaacaaacaaaaaacctaagactataattgggttgtttgtaacacaaaggataaatgcttaaggagatggatacccgattttccatracatgattattacgcattacatgcctgtaccgaaatatctcatgtaccccacaaatatatacacctgctatgtagccatgaaaattaaaaatacaaaaaa

SEQ ID NO: 433478 - DNA, 201 bp, Homo sapiens
gtaattacaaatcagttgaccttaaaatggagagcttatccaggtaggtctaacctcaccacatgagctctttaaaggcagagcattttctccagaagacraagtcagagattcaaagcatgagaagaattccacatgcagttgccggcttggggatggagggcgccgtgtgcaaaggccctaagtgcagcctctagaaac

SEQ ID NO: 433479 - DNA, 201 bp, Homo sapiens; identical to SEQ ID NO: 17712

SEQ ID NO: 433480 - DNA, 201 bp, Homo sapiens
ggtttcaccatgttggccaggctggtctcaaactcctgacctcgtgatccccctgcctcggcctcccaaagtgctgggattacaggcgtgagccattgcayctggcctaatacaaaatttaaaaacaggcaaaactaaacacagaaggttaaacgctaaagaaaagcaaggaaattattactttgaaatttgggaggagat

SEQ ID NO: 433481 - DNA, 201 bp, Homo sapiens; identical to SEQ ID NO: 108289

SEQ ID NO: 433482 - DNA, 201 bp, Homo sapiens; identical to SEQ ID NO: 108290

SEQ ID NO: 433483 - DNA, 201 bp, Homo sapiens
aagaaagaaagagaaagaaagaaaaggaaagaaaggaaaagaaagaaagaaagaaagaacaaacaaagaaacaaagaaagaaacagaaagagagaaaaagktttagacccaatttatactttccatgtatacctcctcataggctaatttgttcctcagtttggcggttttttgattgtttctaaaatgctgtttctaaaa

SEQ ID NO: 433484 - DNA, 201 bp, Homo sapiens
aaaatcgcaagaaaagaaaggaagaaagaaagaaagaaaggaaaggaaaggaaaggaaggaaggaaggaaggaaggaaggaaggaaagaaagaaagaaagagaaagaaagaaaaggaaagaaaggaaaagaaagaaagaaagaaagaacaaacaaagaaacaaagaaagaaacagaaagagagaaaaaggtttagacccaa

SEQ ID NO: 433485 - DNA, 201 bp, Homo sapiens
gaaaatcgcaagaaaagaaaggaagaaagaaagaaagaaaggaaaggaaaggaaaggaaggaaggaaggaaggaaggaaggaaggaaagaaagaaagaaagagaaagaaagaaaaggaaagaaaggaaaagaaagaaagaaagaaagaacaaacaaagaaacaaagaaagaaacagaaagagagaaaaaggtttagaccca

SEQ ID NO: 433486 - DNA, 201 bp, Homo sapiens
ggaaaatcgcaagaaaagaaaggaagaaagaaagaaagaaaggaaaggaaaggaaaggaaggaaggaaggaaggaaggaaggaaggaaagaaagaaagaaagagaaagaaagaaaaggaaagaaaggaaaagaaagaaagaaagaaagaacaaacaaagaaacaaagaaagaaacagaaagagagaaaaaggtttagaccc

SEQ ID NO: 433487 - DNA, 201 bp, Homo sapiens
aggaaaatcgcaagaaaagaaaggaagaaagaaagaaagaaaggaaaggaaaggaaaggaaggaaggaaggaaggaaggaaggaaggaaagaaagaaagaaagagaaagaaagaaaaggaaagaaaggaaaagaaagaaagaaagaaagaacaaacaaagaaacaaagaaagaaacagaaagagagaaaaaggtttagacc

SEQ ID NO: 433488 - DNA, 201 bp, Homo sapiens
gaggctgaggcaggaaaatcgcaagaaaagaaaggaagaaagaaagaaagaaaggaaaggaaaggaaaggaaggaaggaaggaaggaaggaaggaaggaaagaaagaaagaaagagaaagaaagaaaaggaaagaaaggaaaagaaagaaagaaagaaagaacaaacaaagaaacaaagaaagaaacagaaagagagaaaa

SEQ ID NO: 433489 - DNA, 201 bp, Homo sapiens
ggaggctgaggcaggaaaatcgcaagaaaagaaaggaagaaagaaagaaagaaaggaaaggaaaggaaaggaaggaaggaaggaaggaaggaaggaaggaaagaaagaaagaaagagaaagaaagaaaaggaaagaaaggaaaagaaagaaagaaagaaagaacaaacaaagaaacaaagaaagaaacagaaagagagaaa

SEQ ID NO: 433490 - DNA, 201 bp, Homo sapiens
cgggaggctgaggcaggaaaatcgcaagaaaagaaaggaagaaagaaagaaagaaaggaaaggaaaggaaaggaaggaaggaaggaaggaaggaaggaaggaaagaaagaaagaaagagaaagaaagaaaaggaaagaaaggaaaagaaagaaagaaagaaagaacaaacaaagaaacaaagaaagaaacagaaagagaga

SEQ ID NO: 433491 - DNA, 201 bp, Homo sapiens; identical to SEQ ID NO: 108292

SEQ ID NO: 433492 - DNA, 201 bp, Homo sapiens
tcgggaggctgaggcaggaaaatcgcaagaaaagaaaggaagaaagaaagaaagaaaggaaaggaaaggaaaggaaggaaggaaggaaggaaggaaggaaggaaagaaagaaagaaagagaaagaaagaaaaggaaagaaaggaaaagaaagaaagaaagaaagaacaaacaaagaaacaaagaaagaaacagaaagagag

SEQ ID NO: 433493 - DNA, 201 bp, Homo sapiens
accatttaacccagccatcccattactgggtatatacccaaaggattataaatcatgctgctataaaaacacatgcacacgtatgtttattgtggcactaytcacaatagccaaagacttggaaccaacccaaatgtccatcaatgatggactggattaagaaaatgtggcacatatacactatggaatactatgcagcca

SEQ ID NO: 433494 - DNA, 201 bp, Homo sapiens; identical to SEQ ID NO: 108295

SEQ ID NO: 433495 - DNA, 201 bp, Homo sapiens; identical to SEQ ID NO: 108296

SEQ ID NO: 433496 - DNA, 201 bp, Homo sapiens; identical to SEQ ID NO: 108297

SEQ ID NO: 433497 - DNA, 201 bp, Homo sapiens; identical to SEQ ID NO: 108298

SEQ ID NO: 433498 - DNA, 201 bp, Homo sapiens; identical to SEQ ID NO: 108299

SEQ ID NO: 433499 - DNA, 201 bp, Homo sapiens
caggcattagattctcataaggagcaaacctagatccctcacacacgcagttcacaatagggttcgcattgttgctgatctgacaggaggcggagctcagrtggtaatgctggtttgcccgctgctcaacacctgctgcgcagcccggttcctaaacaggccacggaccagtactggtctactgcctggctgagggttggg

SEQ ID NO: 433500 - DNA, 201 bp, Homo sapiens; identical to SEQ ID NO: 108300

SEQ ID NO: 433501 - DNA, 201 bp, Homo sapiens
ataaagataattaaagctgtttaagaatagtgattctggccaggtgcagtggctcatgcctgtaatcccagcactttgggaggctgaggcgggtggatcaygaggtcaggagttcaagaccagcctggccaacatggtgaaactctgtctctactaaaaatacaaaaattagccaggtgtggtagagcacctgtcatccca

SEQ ID NO: 433502 - DNA, 201 bp, Homo sapiens
ttattttagagatggggtctatgttgctgaggctggacttgaacccctgggctcatgcaatccttccttctcagcctcccaagtagctgggactacatgtrcacaccactatgtctggcaggttcctgcttgtgtccctttgctcttatctgcttaaaagtcacctctgaatcatcactagaacttgacttctcacagatg

SEQ ID NO: 433503 - DNA, 201 bp, Homo sapiens; identical to SEQ ID NO: 108302

SEQ ID NO: 433504 - DNA, 201 bp, Homo sapiens; identical to SEQ ID NO: 108301

SEQ ID NO: 433505 - DNA, 201 bp, Homo sapiens; identical to SEQ ID NO: 108303

SEQ ID NO: 433506 - DNA, 201 bp, Homo sapiens; identical to SEQ ID NO: 108305

SEQ ID NO: 433507 - DNA, 201 bp, Homo sapiens; identical to SEQ ID NO: 108306

SEQ ID NO: 433508 - DNA, 201 bp, Homo sapiens; identical to SEQ ID NO: 108307

SEQ ID NO: 433509 - DNA, 201 bp, Homo sapiens
cactcgagcctgggcaacagagggagactccatctcaaaaaaaaaagaaaagaaaagaaaaagaaaaagaaagaaaagaaaagaaaagaaaagaaagaaaraaaacaaggcaagtatttaaggacagcccccactgttgttctagtcaggcatcaggaagatatgcacttagatatcagtttgtgttttatcagccatttt

SEQ ID NO: 433510 - DNA, 201 bp, Homo sapiens
cactgcactcgagcctgggcaacagagggagactccatctcaaaaaaaaaagaaaagaaaagaaaaagaaaaagaaagaaaagaaaagaaaagaaaagaaagaaagaaaacaaggcaagtatttaaggacagcccccactgttgttctagtcaggcatcaggaagatatgcacttagatatcagtttgtgttttatcagcc

SEQ ID NO: 433511 - DNA, 201 bp, Homo sapiens
ggcggaggttgtggtgagctgagatcatgccattgcactccagcctgggcaacaagaatgaaactgtctcaaaaaaaaaaaaaaaaaaaaaaaaaaaaaaatatatatatatatatatatatattaaacacgcagaatctcactgctgtatatttgatatttttctttctgaatctttttctctacatatttgtacatagt

SEQ ID NO: 433512 - DNA, 201 bp, Homo sapiens
aggcggaggttgtggtgagctgagatcatgccattgcactccagcctgggcaacaagaatgaaactgtctcaaaaaaaaaaaaaaaaaaaaaaaaaaaaaaatatatatatatatatatatatattaaacacgcagaatctcactgctgtatatttgatatttttctttctgaatctttttctctacatatttgtacatag

SEQ ID NO: 433513 - DNA, 201 bp, Homo sapiens
aaggcggaggttgtggtgagctgagatcatgccattgcactccagcctgggcaacaagaatgaaactgtctcaaaaaaaaaaaaaaaaaaaaaaaaaaaaaaatatatatatatatatatatatattaaacacgcagaatctcactgctgtatatttgatatttttctttctgaatctttttctctacatatttgtacata

SEQ ID NO: 433514 - DNA, 201 bp, Homo sapiens
cctgggaggtggaggttgcagtgagccgagatcatgccgctgcactccagcctgggtaacagagcaaaactatctctctctctctctctctctctctctcwcacacacacacacacacacacacacacacaagaatttttatagatagaccattgtgaaatctgcagttcaagtggcatatctagcactgttactgtggtg

SEQ ID NO: 433515 - DNA, 201 bp, Homo sapiens; identical to SEQ ID NO: 108309

SEQ ID NO: 433516 - DNA, 201 bp, Homo sapiens; identical to SEQ ID NO: 108310

SEQ ID NO: 433517 - DNA, 201 bp, Homo sapiens; identical to SEQ ID NO: 108311

SEQ ID NO: 433518 - DNA, 201 bp, Homo sapiens
cacctgtccttgtagtcattccttttggggagagttgtttccatggtgacacaggagcttttcacctacttagcaggcctctcagaaagctctttgcaccmtggttctatttctagtgttgttaagactccaacacacacagaactttccattcctatcctggaaagcattctcgatcagtatagctagctggtgcttttc

SEQ ID NO: 433519 - DNA, 201 bp, Homo sapiens
ggagggcattcttaacccaacagcctgtaccatctttaaaaacatgtcagatcatgtcactgctccatttaaagcatccactggctcctatcttgagagtraaagcaagtccttccagtggcttccaaggttccacatgccctggctccttcatcttatactatctctccctcaatcaccccacttcagcctcattggtct

SEQ ID NO: 433520 - DNA, 201 bp, Homo sapiens; identical to SEQ ID NO: 108312

SEQ ID NO: 433521 - DNA, 201 bp, Homo sapiens; identical to SEQ ID NO: 108313

SEQ ID NO: 433522 - DNA, 201 bp, Homo sapiens; identical to SEQ ID NO: 108314

SEQ ID NO: 433523 - DNA, 201 bp, Homo sapiens; identical to SEQ ID NO: 108315

SEQ ID NO: 433524 - DNA, 201 bp, Homo sapiens; identical to SEQ ID NO: 108316

SEQ ID NO: 433525 - DNA, 201 bp, Homo sapiens; identical to SEQ ID NO: 108317

SEQ ID NO: 433526 - DNA, 201 bp, Homo sapiens; identical to SEQ ID NO: 108318

SEQ ID NO: 433527 - DNA, 201 bp, Homo sapiens; identical to SEQ ID NO: 108319

SEQ ID NO: 433528 - DNA, 201 bp, Homo sapiens
agccaagcaggggctgaggacagttgaaacatgatgaatgtgttagatgtttttaaacattagagatactttaataaaaaatactcagagattggctacawttaacaacaaaatgtattattatgggtttgatttactaaatgatggctctatgttttccttgtgttgcagactctctcacccaactttagtagcatagcc

SEQ ID NO: 433529 - DNA, 201 bp, Homo sapiens; identical to SEQ ID NO: 108320

SEQ ID NO: 433530 - DNA, 201 bp, Homo sapiens; identical to SEQ ID NO: 108321

SEQ ID NO: 433531 - DNA, 201 bp, Homo sapiens
gtcacttgataaaaatttaaatactggtcttcccaaaactgatgttgtctcttggaaggcttttgatcaactacaggctctcagaaaatatggacaaaggygcaagaacccctccaaaactggaataaatacttgaagatattagggaatttttgttaattttcaggtgtgataatactattggggttatatttattttaa

SEQ ID NO: 433532 - DNA, 201 bp, Homo sapiens; identical to SEQ ID NO: 108323

SEQ ID NO: 433533 - DNA, 201 bp, Homo sapiens; identical to SEQ ID NO: 108324

SEQ ID NO: 433534 - DNA, 201 bp, Homo sapiens; identical to SEQ ID NO: 108325

SEQ ID NO: 433535 - DNA, 201 bp, Homo sapiens; identical to SEQ ID NO: 17714

SEQ ID NO: 433536 - DNA, 201 bp, Homo sapiens; identical to SEQ ID NO: 108327

SEQ ID NO: 433537 - DNA, 201 bp, Homo sapiens; identical to SEQ ID NO: 108328

SEQ ID NO: 433538 - DNA, 201 bp, Homo sapiens; identical to SEQ ID NO: 108329

SEQ ID NO: 433539 - DNA, 201 bp, Homo sapiens; identical to SEQ ID NO: 108330

SEQ ID NO: 433540 - DNA, 201 bp, Homo sapiens
gagatagtggtggcttgcacaaggtttattataacagaggaggagagtagtcaggttcttaataaaattttaaaggtagagccaacaagattttttgtctsactggatatggggtgtgaaagtgaaacatcagctgggcaaggtgtctcacacctgtaatcctatcactttgggaggccaaggtggaggatcacttgaggt

SEQ ID NO: 433541 - DNA, 201 bp, Homo sapiens; identical to SEQ ID NO: 108332

SEQ ID NO: 433542 - DNA, 201 bp, Homo sapiens; identical to SEQ ID NO: 108331

SEQ ID NO: 433543 - DNA, 201 bp, Homo sapiens; identical to SEQ ID NO: 108333

SEQ ID NO: 433544 - DNA, 201 bp, Homo sapiens; identical to SEQ ID NO: 108335

SEQ ID NO: 433545 - DNA, 201 bp, Homo sapiens; identical to SEQ ID NO: 17711

SEQ ID NO: 433546 - DNA, 201 bp, Homo sapiens; identical to SEQ ID NO: 108337

SEQ ID NO: 433547 - DNA, 201 bp, Homo sapiens; identical to SEQ ID NO: 17713

SEQ ID NO: 433548 - DNA, 201 bp, Homo sapiens; identical to SEQ ID NO: 108340

SEQ ID NO: 433549 - DNA, 201 bp, Homo sapiens; identical to SEQ ID NO: 108341

SEQ ID NO: 433550 - DNA, 201 bp, Homo sapiens; identical to SEQ ID NO: 108342

SEQ ID NO: 433551 - DNA, 201 bp, Homo sapiens
aataagtaaatacaagctcagttgagaagaaaaatctgcatggttattcatcaggcaggaaaaacaaatacaaataaagacagctgcaaagttaacaagaractattgctgccaaggacatgcttaatctttagtgtcataataaccctctttgagtgactactgctttctcactttctcactgagaaactttgttcctaa

SEQ ID NO: 433552 - DNA, 201 bp, Homo sapiens; identical to SEQ ID NO: 108344

SEQ ID NO: 433553 - DNA, 201 bp, Homo sapiens; identical to SEQ ID NO: 108345

SEQ ID NO: 433554 - DNA, 201 bp, Homo sapiens
ttttgtctgctaaactgacgcccccatcgccagtgtctgaacaaacaaaactgagacatatctagtcagctgaagctgacaaatacaggggccaatctggytacaggcaggcagtcctggcctcgtgacaccgcagagactgtgggacaagtggacgtgctcctactgtccctcgcatcccccatctgggccgcgggacta

SEQ ID NO: 433555 - DNA, 201 bp, Homo sapiens
ctactaaaaatacaaaaaattagctgggcatggttgcaagcgcctgtagtcccagctactcgggaggctgaggcaggagaatgacttgaacccgggaagcrgagcttgcagtgagctgagattgtgccactgcactccagcctgggcaacagagcgagactccgtctcaaaaaacaaacaaacaaacaaaaaacctaagac

SEQ ID NO: 433556 - DNA, 201 bp, Homo sapiens
aaagtgaccctgtacctacagcctgagcactgcccagccctttaggtctcaggctgcctgggagtggattcctcctattaccacgccaatcccagcccttrccttccagttcccttttcctctccttggtgaggggctgcagaaactttttctcgaacaaaataatgatgtagcttgggataactaaggagaaagtgtcac

SEQ ID NO: 433557 - DNA, 201 bp, Homo sapiens
tcatgcctatgattagaaggtaggtgtctgccctcccagcctgtggccatgtttgttttcctctgctctctggggatggggagggctgagcagctctatcrctgaggatgagtgtggattagtggtcctcagactagtggagggtgggtgtcagaggctgcctctttcctctgctccatccagctttgcaaactcctgtac

SEQ ID NO: 433558 - DNA, 201 bp, Homo sapiens
ctgcatggaagggtttctagcttgtccccttgagcccccagtgttccccgctatgctgatttacccgctgtcttccaaggccctgctccttttgcaacctrtagtgcccccagtcattgtgtggaacctgtaaaaagatcaggaagtcttttcgggctgcagggtggttgctcccatgctctagcttaatttcactggggg

SEQ ID NO: 433559 - DNA, 201 bp, Homo sapiens
cagctgatgggaatcattcctcgaattgcccgagacatcttcaaccacatctactccatggatgagaaccttgagttccacatcaaggtgaccagggcacracagctgggcattcagatggggactgggaggggaagatctaaaatcttcccactgaagagcctgggctccccaacttgactccctttccggttaccagag

SEQ ID NO: 433560 - DNA, 201 bp, Homo sapiens
acttcacactccttctttcttcttaaccaggtttcttactttgaaatttacctggacaaaattcgtgaccttctggatggtgagtgttttgtcccagtggrtgagggtgtgtgaggagggtggagaaaagaaagctcacattgcatttggaattaggtaccaattgacaagagatgcagagggcacacagcacccaagtct

SEQ ID NO: 433561 - DNA, 201 bp, Homo sapiens
aaaaggcagacatggtggtgaccatctcctaacttaggatgttcttcttattgactcttgccttggtgttcacctgcatacatctgagttgtctcattctycctgagccccagcttcactctcaaataccttcactcgccagggaaagctgcacgaccctcagctgatgggaatcattcctcgaattgcccgagacatctt

SEQ ID NO: 433562 - DNA, 201 bp, Homo sapiens
ctaatttttgtatttttggtagaaacggggtttcaccatgttggctaggctgacctctggcgatccgcccgcctcggccccctgaagtgcttggattacasgcgtgagccaccgtgcccggcctgtatatgtaattatacatctgatttttttcattcagcattatattatgcacaatttcctacttcattaataattctt

SEQ ID NO: 433563 - DNA, 201 bp, Homo sapiens
catgcttcgggggagacctgcttaccagtccccaagggccccagtctgtcaccaccttgcacccttacccacactgttaactcaaatggatgcttttggtctctctctctctctctctctctctctctctctctgtgtatgtatttgccacatggagagggcctctgtttctttttgcttcagggacctcgctggccctgc

SEQ ID NO: 433564 - DNA, 201 bp, Homo sapiens
tagagcagtcatgggggaagggaggggcctgactacctacctcccatactcccaaaaggtagagggtccacctggcaagagagttcaaggggcatggtgartgagaaggaagaactcgtggatgcagcttcttcttcttccatctctcacctcgtcttgcccctttgcaggagagaatgtgcctgagacagagcgcctggc

SEQ ID NO: 433565 - DNA, 201 bp, Homo sapiens
atgatttttaggagacccttgagggtcccaacaagggaaggaaattcctactcctttttctcttttcccctctagctctttttggagcccaccaggtcggsagctggcttaggaattaatgggggaggctgcttcaggatgtctaggaaggtgcgggaagagtgaaggtgggagagataatctttcccaatgcagccccta

SEQ ID NO: 433566 - DNA, 201 bp, Homo sapiens
ttcatcatttagggaatgagggctacaggagacatgatttttaggagacccttgagggtcccaacaagggaaggaaattcctactcctttttctcttttcycctctagctctttttggagcccaccaggtcgggagctggcttaggaattaatgggggaggctgcttcaggatgtctaggaaggtgcgggaagagtgaagg

SEQ ID NO: 433567 - DNA, 201 bp, Homo sapiens
accaagagacagcagccagctaatctcccacacccacggctgcatacctgcactttcaggtagcgtcaggctgcttcctcggaccagcctcaggttgcttmccttcttgctgacagcctctttggttttcctgctgctgcttcttttttttttttatcacctcaaaactttaattatgtagttacccctcaactcctgctt

SEQ ID NO: 433568 - DNA, 201 bp, Homo sapiens
ctccatgtgcagctgctcatacacactcatctcttactgccctggtaggtcagcaagactggagcagagggagccgtgctggacgaggcaaagaatatcarcaagtcactgtcagctctgggcaatgtgatctccgcactggctgagggcactgtgagtgatccttaggtcccctcacccctcaagccacaccccatctcc

SEQ ID NO: 433569 - DNA, 201 bp, Homo sapiens
ctggacaaaattcgtgaccttctggatggtgagtgttttgtcccagtggatgagggtgtgtgaggagggtggagaaaagaaagctcacattgcatttggarttaggtaccaattgacaagagatgcagagggcacacagcacccaagtcttttggccccgtttaccagaatttccaaaaactgagaaggtcaggagatgag

SEQ ID NO: 433570 - DNA, 201 bp, Homo sapiens
tatgaggctgaggaccaggccaagcttttccctctccaccaagagacagcagccagctaatctcccacacccacggctgcatacctgcactttcaggtagygtcaggctgcttcctcggaccagcctcaggttgcttcccttcttgctgacagcctctttggttttcctgctgctgcttcttttttttttttatcacctca

SEQ ID NO: 433571 - DNA, 201 bp, Homo sapiens
ctgtgttgtccaggagatccagtcattcccctgcctcagtgcagaatatctcccctcctccaatcccatctgtggcttctccctattccagtgataaggtstggacgaaaacaacgtgggcatctgacgactgggtttctctcctacctttggaagccttgtgacattggacaagtcatttacatccctctggccttgagt

SEQ ID NO: 433572 - DNA, 201 bp, Homo sapiens
gttagccaaggttttgcatgtagctcattttacattaaccatacacccttgttctctgttcctgctatatcaaattggacagtcctaacacagaagaacayccctgtgggtccattcccagccctgcctggagttctggtcacaacgtgaagttctttccgaaagaggtaggtttgatgtcagctgtcttcccctctttcc

SEQ ID NO: 433573 - DNA, 201 bp, Homo sapiens
gggcactgtgagtgatccttaggtcccctcacccctcaagccacaccccatctcctcccccacctgctaatgccaccatatgatcatgccccaattcatgsgttgtctgatcccggggtggcaccactatcctttctgattccctgttgaattttatttgtttatttctgattcctggtctccttcctcccccagaaaagc

SEQ ID NO: 433574 - DNA, 201 bp, Homo sapiens
ctcactgcaacctcaaactcctgggctcgagggatcccccccaacctcagcctctgaaagagctgggactacaggtgcacaccaccacgcccagctaatttttttttttttttttttggtagagttggagtctcactttgttgcccaggctggtctcaaactcctggcctcaagcgatcctcccgccttggcctttcaatg

SEQ ID NO: 433575 - DNA, 201 bp, Homo sapiens
ctgagtgggaatgccagctggtaagcgcaggctgcactggcccatgactccttcaaggaaaagaggccctgctccctttacctgctgagctccttttagcrgttagggagaactgcagggggaaaaataccagtggagtgtggaataaatccaaagcagtgatttttaaatgtttttcaaaaacaaatcttacatagaacc

SEQ ID NO: 433576 - DNA, 201 bp, Homo sapiens
tgaaaccctgtctctactaaaaaaatacaaaaaattagccaggcatggtggcgggcgcctgtagtcccagctactcaggaggctgaggcaggagaatggcktgaacctgggaggcggagcttgcagtgagcagagatgcggcactgcactccagcctgggtgacagagggagactctgtctcaaaaaaaaaaaaaaaaagc

SEQ ID NO: 433577 - DNA, 201 bp, Homo sapiens
atacctgcactttcaggtagcgtcaggctgcttcctcggaccagcctcaggttgcttcccttcttgctgacagcctctttggttttcctgctgctgcttcttttttttttttatcacctcaaaactttaattatgtagttacccctcaactcctgctttcccctgttgggggctacacctgtgctgccccatgtaatctgg

SEQ ID NO: 433578 - DNA, 201 bp, Homo sapiens
aataaatccaaagcagtgatttttaaatgtttttcaaaaacaaatcttacatagaaccccaatataaaaaataaagtaatgcagacctgggcagtttgcatttttttttttttttttttttggtggaagaagtctcagcgtctcttaggactgactgttcaaaggctcctcagcaaatgagcccttgaacagtcctaagag

SEQ ID NO: 433579 - DNA, 201 bp, Homo sapiens
tcagtgtaaaaacaggttacaaaaccatatgcatggtatgatcccataaaaatgtatacatggatatgtaggcatagaaaaaagtctagaaaggtggacaycagaaggttaatgttggtttgatctgtaaatagtagaatcataggctttttataaaaactcaccttatgtctctctttaaaattcttttctaatttttgc

SEQ ID NO: 433580 - DNA, 201 bp, Homo sapiens
atgcaaaggatatgaaaaggtttatattgtttccttctccttctcacccctcttttccagccacacagttcccttttcagaaggcaacttcttgtggatckttccaaaaacctactatacatttataagcaaatacatatatacatgcatacctttttttacacaaatggtagcgtattatacatccattctgcaccttta

SEQ ID NO: 433581 - DNA, 201 bp, Homo sapiens
caatatttccattttacagatgcagaaattgaggcccaaagaacttgaataactttctcaaggtcatgctattcatccatggatctgaacctaaatctgtractgcaaacctcccatctcttctatcacattgcctacccaggtttctgttctgcacctttatctgtaatggcccaaagggaaattctaggccttgcccac

SEQ ID NO: 433582 - DNA, 201 bp, Homo sapiens
cttgacctcccaaagtgctgagattacaaggcatgagctactgcgcccagccagaattggatttttaaatgcaggcggaggaatttaatgtgaaatgccgstgatagagagctgctaaaggtcgtttggaaaatacccatcccatttgagtccctgcgtatgtgggtgtgtatgggtaggtagaaggtgggagggaacaga

SEQ ID NO: 433583 - DNA, 201 bp, Homo sapiens
agtgaccaagacaaatctgtccgtgcacgaggacaagaaccgggtgccatttgtcaaggtgagagtgggtgtggggcacctatgtggggccagtgtattgmgaatgttggtgggggaggagcataggtcagtgaccctgaagttggagggtggatatcctggaggaatgagatgtgcctaggggccagggagagtctaggg

SEQ ID NO: 433584 - DNA, 201 bp, Homo sapiens
atgagctatctcattcaactgtataatttgttgtagggataggccattatttaaccaggcctctgttggtggacattaagggttgttctaatcatctgctrttacaaacagttgaatgaccttgtataaatattttttgcatatgtgcagtatgtctacaggataaatttttcgaagtggaggtcataaagcatatgcatt

SEQ ID NO: 433585 - DNA, 201 bp, Homo sapiens
ctttttctcgaacaaaataatgatgtagcttgggataactaaggagaaagtgtcacagcttatctttttctctaagggattaagatgggagagggtttgcrcaaactgtttctaacacccaatctccttttttcttcttctaatcctgtgttctcaatgatgatctcttcaggaaatgccacagatatcaatgacaatagg

SEQ ID NO: 433586 - DNA, 201 bp, Homo sapiens
ggggctgctttcctaccttcgggagatccaactcccctttgctgctgtctgcagcgtctccacccgttagaaccagtcccatgtttttctgatgttttccycttctccaccacccgctccccaagagaaagcgcatcttccctttgttattggctcagatctctacccccacctcccggaaggtaaggcggaagacttttg

SEQ ID NO: 433587 - DNA, 201 bp, Homo sapiens
gctggagtgcagtggcgcgatctcggctcactggaaactccgccttccgggttcacgccattcttctgcctcagcctcccaagcagctgggactacaggcrcctgccaccacgcccggctaattttttgtatttttagtggagacggggtttcaccgtgttagccaggatggtctcgatctcctgacctcgtgatccaccc

SEQ ID NO: 433588 - DNA, 201 bp, Homo sapiens
cagttcaaccccagctaaatgacctcagggaccagggcaaatgcagggtcatagcctcctcatggttgttttctttctttattgcagccaaacccgtccgrcctggccactacccagcatcctcacccaccaacccctatggcacccggagccctgagtgcatcagttacaccaacagcctcttccagaactaccagaatc

SEQ ID NO: 433589 - DNA, 201 bp, Homo sapiens
catagtaaagccccatctctaaaataataataataacacatatgaagaaaaaagtgaccctgtacctacagcctgagcactgcccagccctttaggtctcrggctgcctgggagtggattcctcctattaccacgccaatcccagcccttaccttccagttcccttttcctctccttggtgaggggctgcagaaacttttt

SEQ ID NO: 433590 - DNA, 201 bp, Homo sapiens
tagtgtacaaaaaacactgactgaacctttctggtgtgccaaggcttcaaataaaaaaaaaaatacatatagccaggtgtggtggcatgcacctgtagtcstagctacttgggaggttgagataggaggattgcttgagctcaggagcttaaggctgaagtgcactgtgaatacacctgtgaatagccactgcactcagcc

SEQ ID NO: 433591 - DNA, 201 bp, Homo sapiens
gcttcaaataaaaaaaaaaatacatatagccaggtgtggtggcatgcacctgtagtcgtagctacttgggaggttgagataggaggattgcttgagctcasgagcttaaggctgaagtgcactgtgaatacacctgtgaatagccactgcactcagcctgggcagcatagtaaagccccatctctaaaataataataataa

SEQ ID NO: 433592 - DNA, 201 bp, Homo sapiens
atctttccatttcccttatttctcttgctacagatttctgtacgagcgacatgagcagtccaagcaggacctcaagggtctggaggagacagttgtgagtrgttcccttctgtgccaaattcacaggactggggagtggggaggcttcatttcttcctaaccctattcctcctgcccttttgcagccattctgtagcgtaa

SEQ ID NO: 433593 - DNA, 201 bp, Homo sapiens
tagcctcatcccacttccccccaaaaagtaaaaaagtgattatgttacaagcaactcagttcaaccccagctaaatgacctcagggaccagggcaaatgcmgggtcatagcctcctcatggttgttttctttctttattgcagccaaacccgtccggcctggccactacccagcatcctcacccaccaacccctatggcac

SEQ ID NO: 433594 - DNA, 201 bp, Homo sapiens
ttacataaaggcaatgaggccttttgaggaaatgacatggtctccatcttctctgactcctgatttttctttattctctctcctcacccctgtcccctacrctcctctgggtgaccgtcttgggtcacttgccttcctttccacttcttccctttggcttgccccatagctggtacgtgacaatgcagatctgcgttgtga

SEQ ID NO: 433595 - DNA, 201 bp, Homo sapiens
tcacagggagagtcttcctttagcacagagaagaaaaccaccatctgagctgactgcaaggtgcagatgggggcggtggaagtactagtcttgcttacccygcattcttttgattcagtgaccaagacaaatctgtccgtgcacgaggacaagaaccgggtgccatttgtcaaggtgagagtgggtgtggggcacctatgt

SEQ ID NO: 433596 - DNA, 201 bp, Homo sapiens
tctgttcagtctggctgggctaaaaacaaaacaaaacaaaacaaaacaaccacaaaacaactcctggatcaactctggaggacccctctcagagtgtcctrgatagccagcattagttgtgagagttggagcttcagatccccctgagacataaaggctgagaaacaggaggagggtgatgatgggggcaaaacttttagg

SEQ ID NO: 433597 - DNA, 201 bp, Homo sapiens
cacaatttcctacttcattaataattcttcataaaagtatttttattttcatttattattattattttgctttgagagaaagagtcttgctttgttactcrggctgaagtgcagtggtgcagtaatagctcactgcaacctcaaactcctgggctcgagggatcccccccaacctcagcctctgaaagagctgggactaca

SEQ ID NO: 433598 - DNA, 201 bp, Homo sapiens
cagtccactgactcatatgttaatatcctttggcaacaccctcacagacacacccaggatcaatactttgcatcattcagtccagtcaagttgacactcaktattaaccatcacaattccacccctcatcaacttgaacccatacacatctcctgagatcgtacaaatcttcaaataaggacaataataaggtcataatta

SEQ ID NO: 433599 - DNA, 201 bp, Homo sapiens
ggtgagtgaaaaagatgggtaatcccacctttggggtcctcagggcaagttgagaggcataaaagtaagtgaccttagtgtacaaaaaacactgactgaamctttctggtgtgccaaggcttcaaataaaaaaaaaaatacatatagccaggtgtggtggcatgcacctgtagtcgtagctacttgggaggttgagatagg

SEQ ID NO: 433600 - DNA, 201 bp, Homo sapiens
accagtgtaatgcgttgtctattttattttggccactttcataggtaaaaatggtgtttcatagttttaatatgcattttgcttattaacagtgaggtcgmgcattaattaatattaattaatatattttaacatttaggagccactataacatcattttatgatgttataatttatgatagtgatataatttacatacag

SEQ ID NO: 433601 - DNA, 201 bp, Homo sapiens
gtaggatttttttctataagccaaatttaattgttttaatattaaaaaacatttattagttttcttttatacaaagaaatataaagaagaaaagaataaaygattatttcttttttgccattaaaactttttaaaatataatgctcgtacatagtttaaaaatgtaaaccatgcaggatacaaaatgaaaaataaaagcct

SEQ ID NO: 433602 - DNA, 201 bp, Homo sapiens
caatctcactgtgcgacactcctctaccccacagacacaactcctggcatcagtacctttagtttctcttattctcccacatttcttttcttttcttcttytttttttttttgagatggagtctcgctctatcgccaggctggagtgcagtggcgcaatctcggctcactgcaacctctgcctctcgggttcaagcgattc

SEQ ID NO: 433603 - DNA, 201 bp, Homo sapiens
caaagtttctaacccacctctgctcaaagtggaattccccaggcctaccttggagggagaggttgaaactaacagaggcatgggctgtaactatacaggarggagactggtcagacgttacccagagatggaaggcagggagatgagaagaagcaagggagttgggcttctttcgtggagagaactccatctgtctaggtc

SEQ ID NO: 433604 - DNA, 201 bp, Homo sapiens
tataaaaaataaagtaatgcagacctgggcagtttgcatttttttttttttttttttttggtggaagaagtctcagcgtctcttaggactgactgttcaarggctcctcagcaaatgagcccttgaacagtcctaagagaccctgaggattctgtggagtagtttgaaaaccattgttctgaggaagggggtccaatctgg

SEQ ID NO: 433605 - DNA, 201 bp, Homo sapiens
gtgagaaggtagggggtcctgtggatatggggtgggtggaagccttggctctttttttttttttttttgagacagagtctcactctgtcgcccgggctggyttgcagtggcacgatctctgttcactgcaacctccgcctcctgggtttaagtgattctcctgcctaaaccttccaagtagctgggattacaggtgcccac

SEQ ID NO: 433606 - DNA, 201 bp, Homo sapiens
caaagagttccttctctaatgtccccatctggtattaagtgcactttaaagaaaggggcagggtggattttcaagaggtgggaagctctaaggcttgaccstgaggggtcttctcccagccattctcagcccatatgcagcaccctccatactgaagaggactgttgttttagtttcagacggtcctttccttccacatgg

SEQ ID NO: 433607 - DNA, 201 bp, Homo sapiens
gagacagagtctcactctgtcgcccgggctggtttgcagtggcacgatctctgttcactgcaacctccgcctcctgggtttaagtgattctcctgcctaarccttccaagtagctgggattacaggtgcccaccaccacgcctggctaattttttgtatttttagtagagaggggatttcactgtgttggccaggctggtc

SEQ ID NO: 433608 - DNA, 201 bp, Homo sapiens
cccctggactgagaaatgggttgctcaagggaccatttccctttttcttcaagctccttttgatattccctgccccagagctcatgaccagaacccagagytgatttaaaatattttgaaaaatggaggaggcagactgctcccagcagcctgtcaatggctgctcatctgtccatggagatggttacaggcaggtgtagt

SEQ ID NO: 433609 - DNA, 201 bp, Homo sapiens
aggggtcactgtcacatgtccaaagaagtgagcttggccgctgtagattagaaccacaggggtggtagactgcagatctatcaggagaccctagggggccmtctcaaccccacctcttcctccaccctgaaataattttggatggataggtgtttttggaactaagacatctccagttaaggcgatgtttgcttcacgcct

SEQ ID NO: 433610 - DNA, 201 bp, Homo sapiens
cacatttctgttcattaagggcattgaagaaaagggtgcctttctcagctgctggaaggaggttgtggtatttcttttccctcacatcctgcctgttgacrtctgatatcttttattttcattccaggggaagccatatgtttttgaccgtgtattccccccaaacacgactcaagagcaagtttatcatgcatgtgccat

SEQ ID NO: 433611 - DNA, 201 bp, Homo sapiens
gcatacctgcactttcaggtagcgtcaggctgcttcctcggaccagcctcaggttgcttcccttcttgctgacagcctctttggttttcctgctgctgctkcttttttttttttatcacctcaaaactttaattatgtagttacccctcaactcctgctttcccctgttgggggctacacctgtgctgccccatgtaatct

SEQ ID NO: 433612 - DNA, 201 bp, Homo sapiens
tgccttcccagtcatgcctaatgcccccattgcaagaattccaaacaccacaaggacgtacaacctactggctctactacctttatcattgtccttccacmccactcatgtccttaattcctccctacccagcttagattatttttattcactcccttgcccccattatcccaccatattcacccggcaaaacccctccct

SEQ ID NO: 433613 - DNA, 201 bp, Homo sapiens
ctactgaagtggtctgggtgaggcaccatgttctctcacctggtctctcaaagatatcgtaatcccccaaacctgtgaatatgtttactttacatactcawacaagaattttgcgggggtgattaaattaagaacttccatatgaagatattatcctgaattatctaggtgggcccagtgtaatcacaagtgtctttataa

SEQ ID NO: 433614 - DNA, 201 bp, Homo sapiens
tatttcatatcaggcaataataaccttagcccaaatacttttaacatctaaagtgcattaattgacttccttaggaattttcctaaggaccaaaggtagayacaaatggcctattttaaatagtaatattactccatgttcacagacacttaaaggcaatcactattcaacatacaattgtggaaattactgatttttagt

SEQ ID NO: 433615 - DNA, 201 bp, Homo sapiens; identical to SEQ ID NO: 100129

SEQ ID NO: 433616 - DNA, 201 bp, Homo sapiens
atctgaacgcataatctggaaggaaattaaagccacatgacttaaattaaagccaagtgaaaatattctggagaaacaaagtaagccagtaacctatttcycaatttaaaaaaaaacccgcaacgcaaaatgccagcattttctcggcatttcttctctaaaacattcacacctgccaaacaggtcttggcaaataaacat

SEQ ID NO: 433617 - DNA, 201 bp, Homo sapiens
gtctctcaaagatatcgtaatcccccaaacctgtgaatatgtttactttacatactcatacaagaattttgcgggggtgattaaattaagaacttccataygaagatattatcctgaattatctaggtgggcccagtgtaatcacaagtgtctttataagagacacacaggagtgctggagaggacagaaggtgtaattgg

SEQ ID NO: 433618 - DNA, 201 bp, Homo sapiens
cttgagtcttgccaaaatctttagagaaacaacacaaactcagacatctaagtcagatcaaattagagcccaatatttttgatacttttattgtatatgamtagttttctagaaaactattccagaagatacagtcttccttccagaaaatacagctttactgtccttaagtgcctaatcattttcaagaggaggagcaaa

SEQ ID NO: 433619 - DNA, 201 bp, Homo sapiens
agcattttctcggcatttcttctctaaaacattcacacctgccaaacaggtcttggcaaataaacattctgctcttctgaaaaactgtggttctcatgttrgcaaatttgggacgaaatccgtatgcagaaaaagcgccgggccgcccgcaatccacccactccatgacccttttttaggacaaaatccctgggcgctggg

SEQ ID NO: 433620 - DNA, 201 bp, Homo sapiens; identical to SEQ ID NO: 100059

SEQ ID NO: 433621 - DNA, 201 bp, Homo sapiens
tagcgtgggcaatagcaagactccatctcaaaaaaaacaaggatgatacatctatagccacaggatgaatattatacattagttaccaagaaaaaaaaacrggggtgggtggatgggtgtggtggctcacacctgtaatcccaacagtgtgggaggctgaggaaggaggactgtttgagaccaggagttcaagactagcct

SEQ ID NO: 433622 - DNA, 201 bp, Homo sapiens; identical to SEQ ID NO: 100117

SEQ ID NO: 433623 - DNA, 201 bp, Homo sapiens
ggagaatcgcttgtacccgggaggcggaggttgcagtgagccaagatcgcatcattgcactttcaactcttgcctgggagacagagcgagactccgtctcaaaaaaaaaaaaaaaagaaaaagaaaaagaaaagaaaaaaattgtaaaggttttacagatactaagaatatactgtaatgatctgaaaataaactacccaa

SEQ ID NO: 433624 - DNA, 201 bp, Homo sapiens
tcaagaatcataatggttcccagattctcaaaagtagcactagaagcaagaagacaatagaagctgataaagttaaagagacacaccttctatgaatcagyaatttctagatatgtataccagaatttatcacataatagccaggatacatgtacaataatgttccagagtagcattatttccaatagctccaaactggaa

SEQ ID NO: 433625 - DNA, 201 bp, Homo sapiens
ccatgttgtccaggatggtcttgatctcttgacctcatgatctgcctgcctcggcctcccaaagcgtttggattactggtgtgagccactgcgctcggcctttttttttttttttttttgagacagagtctcgctctgtagcccaggctggagtgtagtaacaccatcttggctcactgcaacctcagcctcccaggttca

SEQ ID NO: 433626 - DNA, 201 bp, Homo sapiens
ataatcccagcactttgggaggcctaggtgggcagatcacctgaggtcaggagttcaagaacagcctggccaacatggccaaaccccatctcaactaaaawtacaaaaattcgctgggtgtggtggcgggcacctgttatcccagctactcaggaggttgaggcagggagaattgcttgaacctgggaggcagaggttgca

SEQ ID NO: 433627 - DNA, 201 bp, Homo sapiens
gtctctactaaaaatacaaaaaattaggtggggcttgcagtgagccgagatcatgccactgcactccagcctgggtgacagagtgagactccgtctcaaawaaaaaaaaaaaaaaaaaaaagtaatacactacaaatgtactttgatcactcattgataatatgattatcaggataatataattatcaggataataggatt

SEQ ID NO: 433628 - DNA, 201 bp, Homo sapiens
aagattcagggcagtcttaaatacttattgctttactttccaggctaatcaataacattgctagagaataaatacaacctcctctctccaacttgaggctaaaaaaaaaaaaaacagagagtaaatatatgacctggtccattcctgtgaaatgctttgtcaacattttctttgaagagccatcagaaacagctccccaaa

SEQ ID NO: 433629 - DNA, 201 bp, Homo sapiens
cggcaggagaatcgctggaacccgggaggcagagagggtgcagtaagccgagatggcgccactgcactccagcctgggtgactgtgcaagactccatctcaaaaaaaaaaaaaaaaaaaaaaatgcagatgctctgtagtttgctaactgtaaaaaaaaaaaaattagctcaggtatgaatggaagatggacttgggaaat

SEQ ID NO: 433630 - DNA, 201 bp, Homo sapiens
aagaacttccatatgaagatattatcctgaattatctaggtgggcccagtgtaatcacaagtgtctttataagagacacacaggagtgctggagaggacasaaggtgtaattggaagatgctcctttgctggctgtgaagatgaaggaagcagtcaggagccaaggaattcaggcaggcttcataaggtggaaaagccaag

SEQ ID NO: 433631 - DNA, 201 bp, Homo sapiens
ggcaggagaatcgctggaacccgggaggcagagagggtgcagtaagccgagatggcgccactgcactccagcctgggtgactgtgcaagactccatctcaaaaaaaaaaaaaaaaaaaaaaatgcagatgctctgtagtttgctaactgtaaaaaaaaaaaaattagctcaggtatgaatggaagatggacttgggaaatt

SEQ ID NO: 433632 - DNA, 201 bp, Homo sapiens
ttccaagcccatttgctctgccttaaaacccatcctccttcacccggacaagggtgtcactccagcacttagtcccctcatcatcaattttctcccattarcatacaaacacaatcttatctaaataaaacaaacggccgggcatggtggctaatgcctgtaatcccagcactttgggaggcccaggtgggtggatcacct

SEQ ID NO: 433633 - DNA, 201 bp, Homo sapiens
gaaccacttccagttaataaatagtaaatatattttttcttccttatgattttttttttttttttgagatggagaatcacttgaacccaggaggtggaggmtgcagtgaggtgagatggcatcactatactccagtctgggagacacagattttattttataggcattatcatcaaagagagtgtcttatatcctttgcag

SEQ ID NO: 433634 - DNA, 201 bp, Homo sapiens
gatggcgccactgcactccagcctgggtgactgtgcaagactccatctcaaaaaaaaaaaaaaaaaaaaaaatgcagatgctctgtagtttgctaactgtaaaaaaaaaaaaattagctcaggtatgaatggaagatggacttgggaaattggcatctaggatacagactggtttcaatgagtctgcatttcagtttggct

SEQ ID NO: 433635 - DNA, 201 bp, Homo sapiens
gcagctctggggcccagatttctgcgcccgtcgtgcggtggccagagagggacagcgtagcgcggagacgcggagacgcggagacgcagagactccgcagsgggagagcccgcggtgcgtgaaacaaacctgttctctcctcagacctcaaagacagcggctccaccgcggtacgcggccaccggctttggagcctggacc

SEQ ID NO: 433636 - DNA, 201 bp, Homo sapiens
aggccgaggctcgtggatctcttgaggtcaggagttcaagaccaccctggccaacacggtgaaaccccatctctactgaaaataaaaaaattagccaggcstagtggtgtgcgcctgtacttgggaggctgcggcaggagaatcgctggaacccgggaggcagagagggtgcagtaagccgagatggcgccactgcactcc

SEQ ID NO: 433637 - DNA, 201 bp, Homo sapiens
aggctgaggcaggcagattgcttgaggccaggagttcaagaccagctggagcaacatggtgaaaccctgtctctactaaaaacacaaaaattagccaggcmtgatggcgcatgaccgtaatcccagctacttgggaggctgaggcaggagaatcacttgaacctaggaggtggaggttgcagtgagccgagatcgtgccac

SEQ ID NO: 433638 - DNA, 201 bp, Homo sapiens
tcactgaatccccatattttatggttaagcagccaaacatgccaattcactctctaggctctgctagataaacaatgcccttactcagttaccaaagaggrattaaagcctgtttctcaagtcaccatgagaaagcagaaaagagaggaagtcacttccgtattaggtgctcgcagcattcatccatgaagcgtttcatga

SEQ ID NO: 433639 - DNA, 201 bp, Homo sapiens
ccaaagcggcacctcccgcgttggtcaatgggctggagctgtcagagccgcggagctggctgtacctagaagagatggtcaactccttgctcaacacagcrcagcagctgaagacgctgtttgagcaagccaagcatgccagcacctaccgagaagctgccacaaaccaggccaagatccacgctgacgcagagcggaagg

SEQ ID NO: 433640 - DNA, 201 bp, Homo sapiens
tccctgcctgcgctggcggtcccacccccgactcccaccaaagcggcacctcccgcgttggtcaatgggctggagctgtcagagccgcggagctggctgtrcctagaagagatggtcaactccttgctcaacacagcgcagcagctgaagacgctgtttgagcaagccaagcatgccagcacctaccgagaagctgccaca

SEQ ID NO: 433641 - DNA, 201 bp, Homo sapiens
tggcagacctggctgtgcccctctgactcatgccttcccagcttccttctcctggacgtgaatgggtggctggccctgccccagggcttcaagtagtcgtycttgggtgtaggggagagggctgctcctcagcgtgttctggggtcagtcgaggccatgggggtgtctgggtagccccctgaggcggggcacgctagtcct

SEQ ID NO: 433642 - DNA, 201 bp, Homo sapiens
taggatgaggctggggtgtgggagtggcatggacagttgaggtgggctgcatcctctcccagcttctggctgaggctggaggtgacagtgccaggctgggraaagagcccgccatgggggatgcaggcccggggatggcctaccgttctggcagacctggctgtgcccctctgactcatgccttcccagcttccttctcct

SEQ ID NO: 433643 - DNA, 201 bp, Homo sapiens
tttgggaggctgaggcgggcggatcacctgaggtcaggagttcaagaccagcctgaccaatatggcaaaaccctgcctccatgaaaagtacacaattagcygggcatggtggtgctgtaatcccagcaactccagaggctgaggcaggagaattgcttgaacccagaaggcggaagttgcagtgggccaagatcgtgccat

SEQ ID NO: 433644 - DNA, 201 bp, Homo sapiens
agccaacatattccaagctgggcaacaaagtgagaccctgtctcaaaataaaataaataatgaaaatgagtaaaggacttgaatagacatttcttcaaagragatacccaaatggccgggttcagtggctcacgcctgtaatcccagcactttgggaggccgaggcaggcggatcccttgaggtcaggagttcgagaacag

SEQ ID NO: 433645 - DNA, 201 bp, Homo sapiens
atttccttccctccatctttttttttctcttaaaacatttttttattgtggccaaataatacatataacataaaatttcccatcttatccttttttttttyccccaagacagggtctccagctaaggctggaagcacagtagtgtgattatggctcattacagccttgacctcccgggctcaagtgatcctcctgcctcag

SEQ ID NO: 433646 - DNA, 201 bp, Homo sapiens
ggtggcgtgagcctatagtcacagctttttgggaatctgaggtgggaggatcctttgagtccaggaggttgaggccgcagtgagctgtgattgagccaacrtattccaagctgggcaacaaagtgagaccctgtctcaaaataaaataaataatgaaaatgagtaaaggacttgaatagacatttcttcaaaggagatacc

SEQ ID NO: 433647 - DNA, 201 bp, Homo sapiens
ctttaattatatatcatgcagttgaaatgaaaaccgcttcaaatctggaaaagtattttaaaccacttgaacaatgcacttgccaccacctggtggcagcrtacccatatgtttttagagactgtaggttctgaagggtttcactttcatgctccctcactttgaggggggcttacctgtgagtatgtggggagctgactg

SEQ ID NO: 433648 - DNA, 201 bp, Homo sapiens
tctgccttggagagagacactgtcctcacttctcctgggttgctctgttccctcctccctgatacgtcacagtgaatcctgatgtctcgatggggaacacrtggttggcccccaagatgttgctcaaagaacatttgtggaaaccttaaataatgaaaagcggttataatgtcaccgccttaactctaaaactaaacatac

SEQ ID NO: 433649 - DNA, 201 bp, Homo sapiens
ggttgagggcgctgttgacgtagcccagccaggtgacggcgctgaccagccgcgggggcacggagcaggcaggacacagcgcctgcgtgatgtgcaccacraagaagggcgtccagcacagcaggaaggcccctgggggcgccgagagccgcgttagcgccccccgcccagccggcctcgtaccccccccctcctctcctc

SEQ ID NO: 433650 - DNA, 201 bp, Homo sapiens
gggtgcctgggaccttggagggtcaagggttccagataggtttggggtcttagtgagctccctagctcagcccctgaagccctgtgaccatttggggcagyctccagccccacatcctgggccccagagtttctgagcccctctggggaggagagttggtgagtgtgtggagacaggaaagtcaggggggcccttgggagc

SEQ ID NO: 433651 - DNA, 201 bp, Homo sapiens
tgcgcaccctccacgcccgctccccctgcccccgactccgcgcccgactcaaccgccgacgcctagctcatcccgccgcccccccccagcagcctctggcsctcagcccccgcgaccaccacggtcagccgcggccccacccgttgcacagttgatcctcgcgtggccgcctccgaaactgggcggacagctgagcggtcg

SEQ ID NO: 433652 - DNA, 201 bp, Homo sapiens
gtgcgcaccctccacgcccgctccccctgcccccgactccgcgcccgactcaaccgccgacgcctagctcatcccgccgcccccccccagcagcctctggycctcagcccccgcgaccaccacggtcagccgcggccccacccgttgcacagttgatcctcgcgtggccgcctccgaaactgggcggacagctgagcggtc

SEQ ID NO: 433653 - DNA, 201 bp, Homo sapiens
cccccactcttatgggtagttccagggctgaatacggagaagggggcccggctgtgagccagaggccagaggaccgggcagggaaacaccccttccccackcagatctccctttgttttgagttagggtctcgctgtgtcaccgcggctggagtgctgtggctccatcatggctcactgtagcctggaattcctgagctca

SEQ ID NO: 433654 - DNA, 201 bp, Homo sapiens
tggctgggcaccaggggtgactgagcacggagctccctccagggaagccacttggtggggccccacccatcaccacaggccccttgctgtggggcttgggkcatcctctggccagggactggcaggaagctaggctctggcctcaaggcagcttctaaaatgacaggttgggctcccctgccggggtctgctggggcagca

SEQ ID NO: 433655 - DNA, 201 bp, Homo sapiens
tgaggcttttgcaggtcgaaggcccccctgaggactctggggggacgttgagaagaggggtgtgggaaggtaaagaaacttgctggacaagtcattaacasactttaagcgaatggtgccctgggaagcgcactccccctgcccgggccccctgcccgctcgcggacagattttttatccctgggatcatgagcgtccggt

SEQ ID NO: 433656 - DNA, 201 bp, Homo sapiens
tcacaaactacagatcacaaacccaacagactattttacaactatataacatttatgaacatatactatcaatgaatgtatttttttgttaatattcattwaaaaaaaatgtcacaacttgggtttagaagatttttttttttttttttttttgagacggagttttgctctgtcgcccaggctggagtgcagtggtgtgat

SEQ ID NO: 433657 - DNA, 201 bp, Homo sapiens
tgctggacaagtcattaacacactttaagcgaatggtgccctgggaagcgcactccccctgcccgggccccctgcccgctcgcggacagattttttatccytgggatcatgagcgtccggtcttgcccacagggcctgtgctgcgacgcacatacatacgtgttgtgtctgtcaataaagtgtaaataaggtctccctgcc

SEQ ID NO: 433658 - DNA, 201 bp, Homo sapiens
cctgttgtgcatctatactcatttcaacatgacatctggcacagtgctaacacaggtctgccagaatgcactgaatgaggcactgaaaacagcccatttcrtcctgtaaaatcacccctggataaagtcagcttttagcaaatggcttttacaaaattaaaacaaaaccaaggcccattggggcaaaaatgggtttcaggg

SEQ ID NO: 433659 - DNA, 201 bp, Homo sapiens
tcttagcgccagcaggctgggggcagcacttcaggaggccggaagggcgggcagctgggggaacagagcctgcggcagtctactgggcactttgtttttcytcgataagtggacattttacagtgaatatgtattaacttatataagaatgaagaggctgggcgcagtggctcacgcctgtaatcccagcactttgggagg

SEQ ID NO: 433660 - DNA, 201 bp, Homo sapiens
gtggggttgtggcgtcacgatgtgctgagctccaggggtcctgagtgatgcccccagactgcgggtgggaggagcctcgagtggggttcagtcctgggggrgtggattggggcttgtttccagagcaggtaggcgtgaggaggtccggcatgttgaggacgtggggtcttagcgccagcaggctgggggcagcacttcagg

SEQ ID NO: 433661 - DNA, 201 bp, Homo sapiens
gttcaaagccccgccctccctcctcgcccagtgtggactctcccacactcacggccagaccctcggcaaccctggccccaccagggccagcaccagcagaycctccttctttctgtggacctgcctgatggggaagtgggtagggaggccggggagggagtgagtggttaaggacacgttggaactaagagagattgcatg

SEQ ID NO: 433662 - DNA, 201 bp, Homo sapiens
gcacctcagtgatgcaccctgtcctaagcattgagaggcacgtttacttgtgaatatgagaccatgagattctcaatgataggaaagtgctgtcccccacrgccttgcacagtggcctcgggtagagcggctatcaagagcagacagtggtccagcctgctgggcacctggcctgggctgtggccctccagcgggctgccc

SEQ ID NO: 433663 - DNA, 201 bp, Homo sapiens
tgggagacttaactggtttaattgcttagccctggtgcctcagccacctctcatctgtagggtgagactcaagtccaggcaccaagacacaccagcacccmcaacaccatgcggggatcattggcctgaaacttggccagagaaagctccagtcctgggcctgtaagagtgggcgctgggagtgtctgaagccggcacggt

SEQ ID NO: 433664 - DNA, 201 bp, Homo sapiens
cccgcggtgcccccacttaaggaggagttgcaagcgcagcatagcttttgcacacatgaaggtggtggcctctctcctttctcccccagagtggcccagtsaggctttttgtgccttacaaaaggcgcaagaaggagaatgaactgcccacaactcccgtgaagaaggactcccccaagaacatcacattgcttccagcca

SEQ ID NO: 433665 - DNA, 201 bp, Homo sapiens
gtgtcgctctcagggacaccccatgggaagatggctagactttgtcatctctccgccctccagccttagcagctgtccctgttatgagcagtgacaccccyggtcccacttggttgggtgaggctccctgccctgacttgaccttcctgacccctggggtgggccgcagggcctgggcctgtctcaggagcccccaccccg

SEQ ID NO: 433666 - DNA, 201 bp, Homo sapiens
agatgtcagtctaggaaatcatgtacagggtttgtacgtggaagatactaaagaaaatgctgaagagagagaccagggaagattgaaatacgtcaaaagaygtcctgcgcccgtggattagaagactcagtaaagatgcgactttttcccaagttgattcgtaggtttaacacaatgactatcaaaatcccagcaggattc

SEQ ID NO: 433667 - DNA, 201 bp, Homo sapiens
tccagagtagctgggattacagccgcgcgccaccacccccggctgatttgtttttctttttgttttttgagacggagtttcgctcttgttgcccaggctgragtgcagtggtgagatctcaactcactgcaacctccgcctcccaggtttaagcgattctgccgcctcagctcccccgaatagctgggacaacagccgcag

SEQ ID NO: 433668 - DNA, 201 bp, Homo sapiens
gtgacagtaatcaagatagtgtggcactggcagagggagagaccccacgatctgggtcaggctagagtgtcatagtagactccagcaaatggccttggagygacaggacgttcatcagcagagacaaaggatgacctaaacttcacacttggtacaaaaatgaattcaaaatgggtcatcgatctaaagtgaaaggtgaaa

SEQ ID NO: 433669 - DNA, 201 bp, Homo sapiens
ataaccccttaaggtctccagaaattgtcctaggggagtacagcaaataaacatccaagaaaatgtagtaagtcttggaaagggcagtgaggattgtgacrtttgagctacgaccagctccttccctccctttctgcccccagctccctatggtggaggctccattgtgggtggttgtgaccaagaaaacggttcccactc

SEQ ID NO: 433670 - DNA, 201 bp, Homo sapiens
acgggctggttccagtttgctttttcatctttgccattaaaaacagaactggggcggggcgcagtggctcacacctgtcatcccagcactttgggaggccraggcgggcagatcccctgaggtcaggagttcgagaccagcctgaccaacatggtgaaaccctgtctctactaaaaatgcaaaacattagccaggtgtggt

SEQ ID NO: 433671 - DNA, 201 bp, Homo sapiens
aacatccaagaaaatgtagtaagtcttggaaagggcagtgaggattgtgacgtttgagctacgaccagctccttccctccctttctgcccccagctccctrtggtggaggctccattgtgggtggttgtgaccaagaaaacggttcccactccttgcagttcccggtcaagggatatggtatctcactgggaggggcaggc

SEQ ID NO: 433672 - DNA, 201 bp, Homo sapiens
gtatctcactgggaggggcaggccaccagcatttctcaaccccttcagctctaagttgcagtaaattcctgggaagtgtgactgaaaatctcttcagtcakccccactcagagggcagaggctttacccaggcatgggaggccaagcatacggagccccaatttccatcaacccacattgcccatagggtggggtgtccat

SEQ ID NO: 433673 - DNA, 201 bp, Homo sapiens
gcggtctcggctcactgcaacctccgcctcctggattcaagcacttctcctgcctcagcttcccgcgtagctgggattacaggcatgtgccacaatgcccrgctaatttttgtatttttagtagagatggggttttgccatgttggtcaggctggtctcaaactcctgaccacatgtgatccgcccgcctcagcctcccaa

SEQ ID NO: 433674 - DNA, 201 bp, Homo sapiens
tccttgtatgcatgccattttatattcctcattttgtaacatgtcagaaaaatgctactgtaaacttattcatgtgtagagcttttaacgcctttttgacrtatttccttattctaaattcttaactgcttcacaaagacccaaaataatttttctttctttttttttttctgagacgaagtctcattctgtcgcccacac

SEQ ID NO: 433675 - DNA, 201 bp, Homo sapiens
accaccaaaggtgattgcaccccacccagggccgagccctcagaggagcagcagccgaggccgccccaggagaacaggctcagtaagatagtccagctccrtacctgagtaataaacaagctgacagcagcaaggatcccagagaaaggagaactgctttccactgttgctacaatgtatcacctgcggtgtctgattctt

SEQ ID NO: 433676 - DNA, 201 bp, Homo sapiens
ccactttgctgcttctagggaggagaaatgggggcatcctcagccgggggtcccacgtgtctgggtgccggcctcccccttgctctgcgaccccaggaacsggcgggggagaggagggcgcaggggcaggaggggcgtggcgccggagcgcaggcgggctcacctccaggaaggccttctgcatggtgagctggctgtaca

SEQ ID NO: 433677 - DNA, 201 bp, Homo sapiens
aggtggccacccctggggtaagtccagcctctccttccccactggacacttggggtctgtctccacctctccgggggcaaggtcaggagactgccgccgckgcctgggaggagtggggagcccctgcagttggtggaggggtgaagagtctgtaaccaaaccctggtggcgtccccctgtcccagtccccatttcctgggc

SEQ ID NO: 433678 - DNA, 201 bp, Homo sapiens
gtggcagctcacacctgcattcccagtgctttggagcccaaggtgtcagagatgtttgaaccagagcaaatccatcttgaatagaggtggggtaaaatgartctgagacatgctgggctgcattcccaggaggtcaggcattcttagtcattggatgagataggaagtcagcacaagatacaggtcacaaagaccttgctg

SEQ ID NO: 433679 - DNA, 201 bp, Homo sapiens
cagccttcgcctcccgggttcaagtgggtctcctctctcagtctcccaagtagctgggattacaggtgcccactaccacactgggctaattttttttttttggaggggggacagtttcattctgttgcccaggctggagtacagtggcacgatcttggctcactgcaacctctacctcccaggttcaagctgttctccttt

SEQ ID NO: 433680 - DNA, 201 bp, Homo sapiens
tccctgccccacacggccggttgcagtgccagccctcgggggggggtttcctccccttcctcctactgcgcaggtgggaaaaccaagcccaccgcacctcyagtgcacgggacagcgcggccaggccggagcctccggtgcacggggcagcgcggccgggctgaagccctggcgtctggtggctcgtgtagtccaggaggt

SEQ ID NO: 433681 - DNA, 201 bp, Homo sapiens
ccacgagaccctcgtggctgctgggaggtgcagcaggcctacggcccttcccgccaggtttcggggcacatggtgcctcctgtgccctggctgcttgagcragcccgacggtccagcacggcctgttcagtccacgtggacagcttggtggcctcggtccagggatccacacgcagagcctcatggcctcctggtctcccc

SEQ ID NO: 433682 - DNA, 201 bp, Homo sapiens
gcagcatcactcttgttctggaagcttctgccctcatggcctgtgttctctgcacacagaaggctccatggctgtggctgccttggggcgagaaagtacasactcagcaacagctcagcaggcacctggggtagggtggcagcgccaggaggaacctgcaccagtgattctgatgtttgcctctgaagcgctttctgcacc

SEQ ID NO: 433683 - DNA, 201 bp, Homo sapiens
gctgtgtgccagagattgccctggacacaggacattctagaactctgggtgacagaagagccacttgcttggcctaggagcatcacaggaagactttgcasaggcagagaggagggtgtgggggtgttggcggcagaaagtgtttctctagaaacactccagcatgtagaggctggagctgcaggacctatctgggatgac

SEQ ID NO: 433684 - DNA, 201 bp, Homo sapiens
tggtagttgtgttttgatgtggtaaaagcactttaatactttttaaaaattacgaacagctgacgtcaagtggtttccaggtttaagtaactcagcaggasacgctgccgcctgaggaggctttgggcggctgctcccagggctgccatgggcctggcgttgagcactcactgtggccgcgcgccgcatgccggggcttgt

SEQ ID NO: 433685 - DNA, 201 bp, Homo sapiens
tcctccctcttcctcttgcctttttccctaaggacctgctcctcctgccccgcttcctgtcgggcttcctttggggaggctgctgtggctttccagtccayatttttatataagctgcttatagtttcttgccacacaggtcagtctccttctcaggctccaaaacactgggagcccgtggcagagctcacagatgcccta

SEQ ID NO: 433686 - DNA, 201 bp, Homo sapiens
tggtggggggagtctctattctgccttggcaggcatctgtaggggccatgcttgtgtcctgaaactatcctcaaaggaattccaactgctgcccggccccrcgccaccatcctcacccgcccacctcctggtgcaggctcagtacccgcccactgcaccagctttgccagcctccccagctctcttccttctcagacgtcc

SEQ ID NO: 433687 - DNA, 201 bp, Homo sapiens
tgagggccagttcaggcatgacctgagcgctggggagccaggggtgggcagcctgctggaggccatgatgccagaggtcagcgtggctgtgtggtggcccaggggggctgcggagccacctgtgcaggctcccctcccagtcctccctcttcctcttgcctttttccctaaggacctgctcctcctgccccgcttcctgtc

SEQ ID NO: 433688 - DNA, 201 bp, Homo sapiens
aaaaccatctatggccagtcactaggaaaagtgcccttcctgtccaggaatggggaggtgacagctgggggactggtcaggcccaggaggagggccccagygtggggtatcccgggtgtccgtagctacctggtgaaggccgcgatggcaaccacctgcaggacggcctccaggccgtgaagggccaggagcgtggcgctg

SEQ ID NO: 433689 - DNA, 201 bp, Homo sapiens
acctgccccgcacacctgccccacatacctgccccaggtgaccagcctgccccacctaccccaaacacctgccccgcacacctgcccctggtgacctgccyagcctcacctgacctggccctgccctgcacacacctgccccctgccccccttttctttgtggcagccccgcctcctactggtcccccctgtgcagctctg

SEQ ID NO: 433690 - DNA, 201 bp, Homo sapiens
tgaagcaccagctcccccgagcagattcctgacgccagctgtgcgggctgagccaggacacccgggtgctgagtccagtttccagggaaacctgggaggasgggccaggcaggcggcacaagcctgggggagccacaagcaggggcatctgggaggggcttcagggtgcgggtggcggggtccagggcctcaacgccatgt

SEQ ID NO: 433691 - DNA, 201 bp, Homo sapiens
tcaggggggcccttgggagctgtagcccatggaggaaaagggacagatgacatcaccaggctggctggtccctgtggagggtctgtcctggccacgcactygggcctggtcctgcaggtagtctcactttgacatgtggctgctacctggtttgtggtctccccccaggtgcccggtaccatgccctcctgatccccagct

SEQ ID NO: 433692 - DNA, 201 bp, Homo sapiens
cagcaggttcggctcgcgaggaggccaggagaaagacacgacaggccggggtaggttccaaacgtgcagaagagaaagtgcttgcaaagcgcagcagagarttctatggactcttcaccaaagaggggtgacctgtgacctgagaggtattttctgtagtctgtcactaaggggcctagaagacactaaaagggggcacca

SEQ ID NO: 433693 - DNA, 201 bp, Homo sapiens
cagtgcagaacctcagggtttgtgctagttcctttgtaactttcttctccaattgtaagaaaccccgctgggcgtggtggctcacgccggtaatcccagcrctttgggaggccgaggcgggtggatcacctgaggtcaggagtccgagaccagcctgaccaacgtggagaaaccccatctctactaaaaatacaaaattac

SEQ ID NO: 433694 - DNA, 201 bp, Homo sapiens
actttgggaggccgaggcgggtggatcacctgaggtcaggagtccgagaccagcctgaccaacgtggagaaaccccatctctactaaaaatacaaaattasccaggcctggtggcagatgcctgtaatcccagctactcgggaggctgaggcaggcgaatcacttgaacccgggagggcagtgagccaagatgatgccacc

SEQ ID NO: 433695 - DNA, 201 bp, Homo sapiens
cagggaagcccccttggagaaggacgcagctcggagaaggcgatgggcttgctctgagtggagtggggaccagcagcctgtgcccggggggtttctgtccyggagggtgaggggacaggaagggggtcccagcccggcttcttcccactctgagagctgccagcttcactctccctgccctcccaggtcttctcgctttcc

SEQ ID NO: 433696 - DNA, 201 bp, Homo sapiens
ctcccgggctcaagtgaccccctcgcctcagcctccccagtagcagggcctacaggccggcaccaccatgcccgtctaattattttattttttgtggagaygagaacctgaggacagccatgtcctgagggtgctccctgggggcggagcctacctgggggcggggccttacctggacgtggtactgcgaggtctcgtgca

SEQ ID NO: 433697 - DNA, 201 bp, Homo sapiens
agtctcactctgtcacccaggctggagtgcagtggcagaatctcggctcactgcaacctccgcctcccgggtgcaagcgattgtcctgcttcagtctcccragtggctggaattacaggcacgcgccaccacgtctggctaatttttgtatttttagttgagatggagtttcgccgttattagccaggctggttttgaact

SEQ ID NO: 433698 - DNA, 201 bp, Homo sapiens
tgggactacaggcgcctgctgccatgcctggctaatttttgtatttttagtacagacagggtttcaccatgttggccaggctggtcttaaactcctgaccycaagtgatctacccgcctgagcgtcttaaagtgctgggattatacgtatttatttatttatctatttaaaaaaaatttttttttttgagacggagtcttg

SEQ ID NO: 433699 - DNA, 201 bp, Homo sapiens
agtttcgccgttattagccaggctggttttgaactcctgcgttcaggtgatccaccctccttggcctcccaaagtgctgggattacagacgtaagccaccrtgctcaactaggttttgtgttttttatagagacagcatcttgttttgttgccgaggctggtcctgaacacgtggtctcaagatattcgcccagtcagcct

SEQ ID NO: 433700 - DNA, 201 bp, Homo sapiens
agcctccgcctcccgggctcaagtgaccccctcgcctcagcctccccagtagcagggcctacaggccggcaccaccatgcccgtctaattattttattttktgtggagatgagaacctgaggacagccatgtcctgagggtgctccctgggggcggagcctacctgggggcggggccttacctggacgtggtactgcgagg

SEQ ID NO: 433701 - DNA, 201 bp, Homo sapiens
tgtggaacaggtgaccactgcctttgtgtgctcgctgagactggaggtatcaggatccattaaccatgaaggcaacaggtctccagcttcagggagggggtccttccctggtctgcatggtttgtgggctgggtcctccagatggcaggtgtgcccagctggtcttctgcgagtgcaggcgctggtgagggaggtggcccg

SEQ ID NO: 433702 - DNA, 201 bp, Homo sapiens
aggtaatgacagtgacactgcagctccacatggctggggaggtctcaccatcatggcagatggcaaagcgggaggaaaggcatgtcttaatggtgacaggygagcagaagagctttttagattcttaattttttaaatgactgatcaatatgtgattagtgttttttgtgttttttttttttttttttttttttttaagag

SEQ ID NO: 433703 - DNA, 201 bp, Homo sapiens
agaagctgggctgaccactctccctggagctttcctcccttcctcccttcctccctttctctctttctctctttctctctttcgttttgagacagggtctmgctctgtcacccaggtgcccaggctggagtgcagtggtgcgatcttggctcactacagcctccgcctcccgggctcaagtgaccccctcgcctcagcctc

SEQ ID NO: 433704 - DNA, 201 bp, Homo sapiens
gcagttctggctctggcctcccccggccccgtgggtgtcagaagctgggctgaccactctccctggagctttcctcccttcctcccttcctccctttctcyctttctctctttctctctttcgttttgagacagggtctcgctctgtcacccaggtgcccaggctggagtgcagtggtgcgatcttggctcactacagcct

SEQ ID NO: 433705 - DNA, 201 bp, Homo sapiens
gtgggcagttctggctctggcctcccccggccccgtgggtgtcagaagctgggctgaccactctccctggagctttcctcccttcctcccttcctcccttyctctctttctctctttctctctttcgttttgagacagggtctcgctctgtcacccaggtgcccaggctggagtgcagtggtgcgatcttggctcactaca

SEQ ID NO: 433706 - DNA, 201 bp, Homo sapiens
caggtgatccacccgcctcggcctcccaaagtgctgggattacaggtatgaacaaccgcgcctggtcccttttttttttctcttttttgagatggagtctygctctgttgcccatgctggagtgcagtggtgtgatctcggctcactgcaacctccgcctcctgggttccagtgattctcctgcctcagcctcccgagtag

SEQ ID NO: 433707 - DNA, 201 bp, Homo sapiens
cagcacctaccgagaagctgccacaaaccaggccaagatccacgctgacgcagagcggaaggaggtaaccttggaacaaatgggaagacacgacctgtgcygagtaaccccaggccaccctggtgcctgtgcccagctgcgtaagacccaccttggctcacaaggcccctgccccacctttctggaaaagggagctgtgga

SEQ ID NO: 433708 - DNA, 201 bp, Homo sapiens
gatgtgtgcagcacacatctctgacacacagatccagaaacaatggaaacaatgagaaaagacagacaaccccaatttgttttttttttttttttttttttgagatggagtttcactcttatcacccaggctggagtgcagcagcacaatcttggctcactgcaacctccgtctcccgggttcaagcgattctcctgcctc

SEQ ID NO: 433709 - DNA, 201 bp, Homo sapiens
ggatgtgtgcagcacacatctctgacacacagatccagaaacaatggaaacaatgagaaaagacagacaaccccaatttgttttttttttttttttttttttgagatggagtttcactcttatcacccaggctggagtgcagcagcacaatcttggctcactgcaacctccgtctcccgggttcaagcgattctcctgcct

SEQ ID NO: 433710 - DNA, 201 bp, Homo sapiens
aggtgccccaggcatggggcagagtcacttcccttaccgggcccaccgcaggcccaggggcagaggcttcggtgagtgggtgggtgtcaggcaggacccarccatgcccaccccaggcctggagccctgagttcacagtgcagctgctcctccaggcccccctttctgcccagcctgggcactgagggatggggtgtcagg

SEQ ID NO: 433711 - DNA, 201 bp, Homo sapiens
aaccaagctaggcggagaaaggatgtgtgcagcacacatctctgacacacagatccagaaacaatggaaacaatgagaaaagacagacaaccccaatttgktttttttttttttttttttttgagatggagtttcactcttatcacccaggctggagtgcagcagcacaatcttggctcactgcaacctccgtctcccggg

SEQ ID NO: 433712 - DNA, 201 bp, Homo sapiens
cgcctcgacctcgtgcgcaccctccacgcccgctccccctgcccccgactccgcgcccgactcaaccgccgacgcctagctcatcccgccgcccccccccmgcagcctctggccctcagcccccgcgaccaccacggtcagccgcggccccacccgttgcacagttgatcctcgcgtggccgcctccgaaactgggcggac

SEQ ID NO: 433713 - DNA, 201 bp, Homo sapiens
tcgcctcgacctcgtgcgcaccctccacgcccgctccccctgcccccgactccgcgcccgactcaaccgccgacgcctagctcatcccgccgccccccccmagcagcctctggccctcagcccccgcgaccaccacggtcagccgcggccccacccgttgcacagttgatcctcgcgtggccgcctccgaaactgggcgga

SEQ ID NO: 433714 - DNA, 201 bp, Homo sapiens
tcggggggagcacagttggagccgcaggggtccggggggaggccgggcgcggggggcgcacagtcggggccgcaggggtcctgggggaggctgggcgcggsgggcgcacagtcggggccgcagggaccccggggaaggccgggcgcggggggcgcacagtcggggccgcaggggtcctgggggaggcggggcgcgggtggc

SEQ ID NO: 433715 - DNA, 201 bp, Homo sapiens
ggggcagcacttcaggaggccggaagggcgggcagctgggggaacagagcctgcggcagtctactgggcactttgtttttcctcgataagtggacattttmcagtgaatatgtattaacttatataagaatgaagaggctgggcgcagtggctcacgcctgtaatcccagcactttgggaggctgaggcgggcggatcacg

SEQ ID NO: 433716 - DNA, 201 bp, Homo sapiens
gcccacagtctgtcagtgttcagatgggagcctggcaccctgactggccaccctggctgcaaacgccgaatccccagcacaggaaagttccagccagcacrattgggaggcggagggtcccccatttctcccacaacctgggcctgggagagagctggatccagtccagggtaggctgttcctgcatggagggccctggga

SEQ ID NO: 433717 - DNA, 201 bp, Homo sapiens
atctcctggctcaagtgatcctcctgcctctgtctcccaagtagcttggaccacaggcatgagccaccacacccagctaattttaaaacatttttttttttatagagctagggttttgctatgttgctcaggctggtctccaacccctgacctcaagtgacctcgacctcccgaagtcattgtttttacagtctgtgatgt

SEQ ID NO: 433718 - DNA, 201 bp, Homo sapiens
gctgtagactgcacagcccacagtctgtcagtgttcagatgggagcctggcaccctgactggccaccctggctgcaaacgccgaatccccagcacaggaargttccagccagcacgattgggaggcggagggtcccccatttctcccacaacctgggcctgggagagagctggatccagtccagggtaggctgttcctgca

SEQ ID NO: 433719 - DNA, 201 bp, Homo sapiens
ggcctcaagtgttctacttgccttggcctcccaaagtgttgggattacaggtgtgagccaccgcacctggccaaaaaaatactttaaaaaaaaaaaaaaaagtatacttccaaacaaacagctacttaatgctgaaatttatagaggaaaagaaagtttaaaggcaaaaaaatctataaccctgcacccaaagataatgac

SEQ ID NO: 433720 - DNA, 201 bp, Homo sapiens
aagtagtaattgggcttggtcctctctccacccaatactcgttttcttttcttttttgagacagggtctccgtcacccaggccggagtgcagtggcacgakctcggctcactgcagctttgactccctagctttaagggatcctcctgcctcagcctcccgagtagctgggattacaggcgtgaccaccacacccagcctg

SEQ ID NO: 433721 - DNA, 201 bp, Homo sapiens
acaggtatgtgcaaccacgcccagctattttttggtattttaggagagaagaggtttcgccatgttggcgaggctggtcttaaactccaggcctcaagtgwtctacttgccttggcctcccaaagtgttgggattacaggtgtgagccaccgcacctggccaaaaaaatactttaaaaaaaaaaaaaaaagtatacttcca

SEQ ID NO: 433722 - DNA, 201 bp, Homo sapiens
gctggcgggagcccctccttcactctcacgggtgtctgagaggaatccactgtgactcagtctgttccgggggtgactgggacaggctggtcctgggaagyaggtagtcggagaaggtgtcctggaggaggcagccgctgaggccatcacagaagtgcgtggtcaccagacgggacggggcagccgcactaaagtagtaat

SEQ ID NO: 433723 - DNA, 201 bp, Homo sapiens
ggtgatccaccctccttggcctcccaaagtgctgggattacagacgtaagccaccgtgctcaactaggttttgtgttttttatagagacagcatcttgttktgttgccgaggctggtcctgaacacgtggtctcaagatattcgcccagtcagcctcccagagtgctgggactctaggcgtgagcccctgcttctggcccc

SEQ ID NO: 433724 - DNA, 201 bp, Homo sapiens
gtgtttttaagcctctaacttgtgaaggttcaaactccagactttcaggtggtgagcagcagccgcagtctctgctcagtgttctcggtcttcagccgtccatttctgctgagtcttccccacatgctgtgtcatcagctcagggtcaaacaaggacgtggggagcgtttatgtgctggatgggagtgtcctctctctgtg

SEQ ID NO: 433725 - DNA, 201 bp, Homo sapiens
tgaactcctggactcaagcaacccaccttccttggcctcctaaagtactgggattaccagcatgaaccactgctcctggctataactatttctttttttcytttttttttttttttttttttttggagacagagtcttgctctccaggctagagtgcagtgacacgatctcagctcactgcaagctctacctcccaggttc

SEQ ID NO: 433726 - DNA, 201 bp, Homo sapiens
gccgcgcgccgcatgccggggcttgtggtgctgagaggcgaggatgagggaaccgtgcgcctggtgtggtctggtcgtggagacagacagcaaacatgcctttttttttttttgagacggagtttcgctcttgttgcccaggctggagtgcaatggtgtgatctcagctcaccgcaacctcccgcctcccgggttcaagtg

SEQ ID NO: 433727 - DNA, 201 bp, Homo sapiens
agatggggtttctctatgttggtcaggctggtctcgaactcctgacctcaggtgatccgcccgccttggcatcccacagtgctgggattacaggcgtgagmcaccgcgcccggctgcaaacaggcatttttagggcagtttggtgagtgctgggttaatggtatggtcaggactcattcaaccagtatcttttaagcatct

SEQ ID NO: 433728 - DNA, 201 bp, Homo sapiens
  misc_feature (1)...(201): n = A,T,C or G
gtcaccatgttgtccaggctggcctcaaactcctgacctcaggtgcccgccttgacctcccaaagtgctgggattataaggattataggtgtgagccaccrcacccggcctgaaagcacagttattgttagaatggcagcaaacagaaaacttgtgaaggacttcagtaaaaacataagaaacttggaaaccccctccnnn

SEQ ID NO: 433729 - DNA, 201 bp, Homo sapiens
  misc_feature (1)...(201): n = A,T,C or G
tgtccaggctggcctcaaactcctgacctcaggtgcccgccttgacctcccaaagtgctgggattataaggattataggtgtgagccaccacacccggcckgaaagcacagttattgttagaatggcagcaaacagaaaacttgtgaaggacttcagtaaaaacataagaaacttggaaaccccctccnnnnnnnnnnnnn

SEQ ID NO: 433730 - DNA, 201 bp, Homo sapiens
tcccacgtgtctgggtgccggcctcccccttgctctgcgaccccaggaacgggcgggggagaggagggcgcaggggcaggaggggcgtggcgccggagcgyaggcgggctcacctccaggaaggccttctgcatggtgagctggctgtacacgcggacgccctcctcgccgcacactttcttcagctcctccttgttgagg

SEQ ID NO: 433731 - DNA, 201 bp, Homo sapiens
ctcgcacccaggcttggacgacaaccgggagcccagctcgcacccaggcttggacgacaaccgggagcccagctcgcacccaggcttggaccacaaccggbagcccagctcgcacccaggcttggaccacaaccgggagcccagctcgtacccaggcgcaggggcctttttttttttccttttgagatggagtctcgccct

SEQ ID NO: 433732 - DNA, 201 bp, Homo sapiens
acagcaccctttgtgtgttggagtggggccgccgtccccagcatggcctggacaggcagcaattgtttgtggccacctcagccgtgggaacacactcagcytttcggatggagccaggatgtccccactgcaaggcacaggcattgcctcaggctacctcccacctgcccaggggcgtcctgtctagccggggaggggcct

SEQ ID NO: 433733 - DNA, 201 bp, Homo sapiens
agcccagctcgcacccaggcttggacgacaaccgggagcccagctcgcacccaggcttggacgacaaccgggagcccagctcgcacccaggcttggaccasaaccgggagcccagctcgcacccaggcttggaccacaaccgggagcccagctcgtacccaggcgcaggggcctttttttttttccttttgagatggagtc

SEQ ID NO: 433734 - DNA, 201 bp, Homo sapiens
cctgaggttggtgccctcggtcctccccagcaagcgagcctgacgctgtccacgtcgtgctggaccgccacctggtcacaggccagaatgccagctccacygtcccggccgtgcagaacctgctcttcctctgtggcagccggtgagggcaccagggtgggcacattcctgccacatcagagctgcacccggtgcttttgc

SEQ ID NO: 433735 - DNA, 201 bp, Homo sapiens
aagcccagctcgcacccaggcttggacgacaaccgggagcccagctcgcacccaggcttggacgacaaccgggagcccagctcgcacccaggcttggaccacaaccgggagcccagctcgcacccaggcttggaccacaaccgggagcccagctcgtacccaggcgcaggggcctttttttttttccttttgagatggagt

SEQ ID NO: 433736 - DNA, 201 bp, Homo sapiens
agtccgtcatcccagcactttgggaggcaggtggatcacctgaggtcaggcactggggaccagcctggccaacatagtgaaaacaggtggatcacttgagrtcaggcgttggggaccagcctggccaacatggtgaaaccccatctgtactaaaaatacaaaaattaggccaggcacggtggctcacgcctgtaatcccac

SEQ ID NO: 433737 - DNA, 201 bp, Homo sapiens
tctcaaaaaaataataaaataaaataaaataaatataaaataaaatttaaaaattaaataaaaaaataaataaaataaaataaaataaaataaaataaaatggatcctggccctaaacgcaaaagcctacactgggaagcatccaaaagaaaacacaggaactggcccagcgcggcggctcacgcctgtaatcccagcact

SEQ ID NO: 433738 - DNA, 201 bp, Homo sapiens
gtctcaaaaaaataataaaataaaataaaataaatataaaataaaatttaaaaattaaataaaaaaataaataaaataaaataaaataaaataaaataaaatggatcctggccctaaacgcaaaagcctacactgggaagcatccaaaagaaaacacaggaactggcccagcgcggcggctcacgcctgtaatcccagcac

SEQ ID NO: 433739 - DNA, 201 bp, Homo sapiens
tgtctcaaaaaaataataaaataaaataaaataaatataaaataaaatttaaaaattaaataaaaaaataaataaaataaaataaaataaaataaaataaaatggatcctggccctaaacgcaaaagcctacactgggaagcatccaaaagaaaacacaggaactggcccagcgcggcggctcacgcctgtaatcccagca

SEQ ID NO: 433740 - DNA, 201 bp, Homo sapiens
ctgtctcaaaaaaataataaaataaaataaaataaatataaaataaaatttaaaaattaaataaaaaaataaataaaataaaataaaataaaataaaataaaatggatcctggccctaaacgcaaaagcctacactgggaagcatccaaaagaaaacacaggaactggcccagcgcggcggctcacgcctgtaatcccagc

SEQ ID NO: 433741 - DNA, 201 bp, Homo sapiens
actgtctcaaaaaaataataaaataaaataaaataaatataaaataaaatttaaaaattaaataaaaaaataaataaaataaaataaaataaaataaaataaaatggatcctggccctaaacgcaaaagcctacactgggaagcatccaaaagaaaacacaggaactggcccagcgcggcggctcacgcctgtaatcccag

SEQ ID NO: 433742 - DNA, 201 bp, Homo sapiens
aaaaaggatcacacacttggaataaatgaggattaggctggttcaacattcaaaacagtcaatcagtgtggtccagtacattgagactgtctcaaaaaaataataaaataaaataaaataaatataaaataaaatttaaaaattaaataaaaaaataaataaaataaaataaaataaaataaaataaaatggatcctggcc

SEQ ID NO: 433743 - DNA, 201 bp, Homo sapiens
actggccactactcccggccaatttttagctggggtttcaccatgatgcccaggctggccgcaaactccttggctcaagcgatcctcttacctcagccttmtgagtagctgggactacacatgtgtaccaccatgcccagctatttttttgtttgttttgtatagatggggtttcactatgtttctcaggctggtcttgaa

SEQ ID NO: 433744 - DNA, 201 bp, Homo sapiens
gtaatgacagtgacactgcagctccacatggctggggaggtctcaccatcatggcagatggcaaagcgggaggaaaggcatgtcttaatggtgacaggcgrgcagaagagctttttagattcttaattttttaaatgactgatcaatatgtgattagtgttttttgtgttttttttttttttttttttttttttaagaggt

SEQ ID NO: 433745 - DNA, 201 bp, Homo sapiens
actctgtgggaccccaggcggcgcacatcctgatgctctagtctgtttctgggaggcctggagtggaggggctgtgccaggaattgaggcccctgacctcraaggtctggaggacacgggctagacggaggcgctgacagggcgtgcgttaaagggagaaatgaggactctgagaaggagcaggcaccgtgagcctcacag

SEQ ID NO: 433746 - DNA, 201 bp, Homo sapiens
ccatggcctccagcgctgtcaggcacgtgtggggctgtgggtcctgggacaaagctggcgggagcccctccttcactctcacgggtgtctgagaggaatcsactgtgactcagtctgttccgggggtgactgggacaggctggtcctgggaagcaggtagtcggagaaggtgtcctggaggaggcagccgctgaggccatc

SEQ ID NO: 433747 - DNA, 201 bp, Homo sapiens
agcggtcgaccccgctccctcctccattccctccggcccaagaccgtgagctaggtaggcgcccctctgaccctgggcagggggtcccgggaccggacagyaggttcggctcgcgaggaggccaggagaaagacacgacaggccggggtaggttccaaacgtgcagaagagaaagtgcttgcaaagcgcagcagagaattc

SEQ ID NO: 433748 - DNA, 201 bp, Homo sapiens
cctggcccttcctctgaccctcaccccgcctggcccttcctgtgaccctcaccccgcctggcccttcctgtgaccctcaccccgcctgtcccttcctgtgwccctcaccccgcctggcccttcctctgaccctcagcccgcctggcccttcctctgagactctacaatggcttttcatccaacccagcagggtctgccatt

SEQ ID NO: 433749 - DNA, 201 bp, Homo sapiens
gaagcccccggaaatgcaggcttggagtcccccgagggagccgggggtgttgtggtgggaggggcggccaggtgcccgggacggggtgaggcggcgccggmggggcagcctgggaaaagcacagaggtggctttgcagtcccacttcagggggaccctgcctgacctgggatgaggtgtgtgggctttctggggcaggggc

SEQ ID NO: 433750 - DNA, 201 bp, Homo sapiens
acgctgacgcagagcggaaggaggtaaccttggaacaaatgggaagacacgacctgtgctgagtaaccccaggccaccctggtgcctgtgcccagctgcgyaagacccaccttggctcacaaggcccctgccccacctttctggaaaagggagctgtggagagtcatttacaaatgaagcttttcctaaagaaaagtgaca

SEQ ID NO: 433751 - DNA, 201 bp, Homo sapiens
ggcagatcacaaggtcaggaggtcgagaccatcctggctaacacagtaaaaccccgtctctactaaaaatacaaaacattagccaggcatggtggcaggcrcctatagtcccagctgctcaggaggctgaggcaggagaatggcatgaatccaggaggcagagcttgcagtgagccgagattgcaccactgcagtccagcc

SEQ ID NO: 433752 - DNA, 201 bp, Homo sapiens
tgacgcagagcggaaggaggtaaccttggaacaaatgggaagacacgacctgtgctgagtaaccccaggccaccctggtgcctgtgcccagctgcgtaagmcccaccttggctcacaaggcccctgccccacctttctggaaaagggagctgtggagagtcatttacaaatgaagcttttcctaaagaaaagtgacagcta

SEQ ID NO: 433753 - DNA, 201 bp, Homo sapiens
gcaggggccgtggggccgcgctggagtcgtttcctgtgctgctctgtgctgctcacagacgctgccactcacccactggccacggcccctcccgcagcgcctgcggatgatctgggcgcatagcgggcgtgcaggtcgcggcgccaaggcctctcctaggcccagtggtcttctccgtctcagagagcattgacggcggag

SEQ ID NO: 433754 - DNA, 201 bp, Homo sapiens
cctgtaatcccagcactttgggaggccaaggtcttgaggccaggagtttgagacaagcctggacattgtgagaccctgtctgtacaaaaaaaaaaaaaaaagggtcgggtgcagtggcttacgcctgtaatcccagcactttgggaggccgaggcgggcagatcacaaggtcaggaggtcgagaccatcctggctaacaca

SEQ ID NO: 433755 - DNA, 201 bp, Homo sapiens
tgcaggggccgtggggccgcgctggagtcgtttcctgtgctgctctgtgctgctcacagacgctgccactcacccactggccacggcccctcccgcagcgcctgcggatgatctgggcgcatagcgggcgtgcaggtcgcggcgccaaggcctctcctaggcccagtggtcttctccgtctcagagagcattgacggcgga

SEQ ID NO: 433756 - DNA, 201 bp, Homo sapiens
ctgctgccatgcctggctaatttttgtatttttagtacagacagggtttcaccatgttggccaggctggtcttaaactcctgaccccaagtgatctacccrcctgagcgtcttaaagtgctgggattatacgtatttatttatttatctatttaaaaaaaatttttttttttgagacggagtcttgctgtgtcgctcaggc

SEQ ID NO: 433757 - DNA, 201 bp, Homo sapiens
cagctattgttgttaaggtggttttggtttttgtaaataaggttgctttgtttcagaaagggaaacaattttgtgcgcatcggccgttgtgaatactcacsttttctaggcattattcatcctttgtcttcctgtagtgaaatgtgcttatattttatgaagtttggagaacatcatctattgagtctctgagtatcagcg

SEQ ID NO: 433758 - DNA, 201 bp, Homo sapiens
gtgcaggggccgtggggccgcgctggagtcgtttcctgtgctgctctgtgctgctcacagacgctgccactcacccactggccacggcccctcccgcagcgcctgcggatgatctgggcgcatagcgggcgtgcaggtcgcggcgccaaggcctctcctaggcccagtggtcttctccgtctcagagagcattgacggcgg

SEQ ID NO: 433759 - DNA, 201 bp, Homo sapiens
ccagcctgggcaacccaacaagactctgtctcaaaaaaaaaaaaaaaaaaaaaagaatttttatatttatgaatggtaggtaagtggtaaaagtggttgaaatcttctattattgaatgattgacatttaggggctgacttgctaatgcatggtggttcttttcacatctcaggatgggatcttaaaccctcacgctgcct

SEQ ID NO: 433760 - DNA, 201 bp, Homo sapiens
ggagaacatcatctattgagtctctgagtatcagcgactggcagggcgaatgctgagccccttcctgggagccgagctccgtccatctgctgtcacaaagmcctcccagcttctggcacgttcttcagaaggcggctcctgtgcatggtgggaggctcacagggcgtagtgcccatgttttctgtagcttcctattactgc

SEQ ID NO: 433761 - DNA, 201 bp, Homo sapiens
ttctgagagggcctggccaggcagtttgtccaggtgccccgatccaggcttgtcttgtgctttctcgtgggggtggacgacaggtttcagggaggggtgcygccgcctgtctcaccccactgtggcgtccctgacatccaagtgacattacagacagctctgaccttcctcaccagagtcaggtgtctgtaggtgtctcct

SEQ ID NO: 433762 - DNA, 201 bp, Homo sapiens; identical to SEQ ID NO: 433759

SEQ ID NO: 433763 - DNA, 201 bp, Homo sapiens
gatcacgtttgcgaaggagggaggcaagcatcagaacagaacctcggagcaggtctgcacgcgtgcaggggccgtggggccgcgctggagtcgtttcctgygctgctctgtgctgctcacagacgctgccactcacccactggccacggcccctcccgcagcgcctgcggatgatctgggcgcatagcgggcgtgcaggtc

SEQ ID NO: 433764 - DNA, 201 bp, Homo sapiens
gtcgcccaggctggagtgcaatggtacaatctcggggtttcaccgtgttagccaggatggtctcgatctcctaacttcgtgatccgcccacctcagcctcctaaagtgctgggattacaggcatgagccactgcatccggccctgatttccctttttttttgagatgggagtctcgctctgtcacccaggctggagtgcag

SEQ ID NO: 433765 - DNA, 201 bp, Homo sapiens
acaggcgagcagaagagctttttagattcttaattttttaaatgactgatcaatatgtgattagtgttttttgtgttttttttttttttttttttttttttaagaggtaaggtctcactctgttgcctaggctcatggctcattgtaggctcaaactcctggaaatacgggtgcatgccaccacgcttgcctaatttattt

SEQ ID NO: 433766 - DNA, 201 bp, Homo sapiens
caggaggtggaggttgcagtgagccgagattgcgccactacactccagcctgggcgacagagtgagactccatctcaaaaaaataataataaataaataawgtagaggcagggggcaacctaaattagcaccaaaattcctcctaatgctcctgttttctgaagtgagtgactgaatgtcggagctctgaatgtcttacaa

SEQ ID NO: 433767 - DNA, 201 bp, Homo sapiens
aggagggcgcctgtctgctcagcacagatggggagctctgaaggccacaggaaaggacagggatggattttgttgtagctgctttttcgggtacggtaacrtggactttggtttgtaaacaaaagtcaaattcatatttttcccaccaaatctatgtaagaaacgttttcccccatttcttttctactttctatttttatt

SEQ ID NO: 433768 - DNA, 201 bp, Homo sapiens
acttaaacccaggaggtggaggttgcagtgagccgagattgcgccactacactccagcctgggcgacagagtgagactccatctcaaaaaaataataatawataaataaagtagaggcagggggcaacctaaattagcaccaaaattcctcctaatgctcctgttttctgaagtgagtgactgaatgtcggagctctgaat

SEQ ID NO: 433769 - DNA, 201 bp, Homo sapiens
atggcaaagcgggaggaaaggcatgtcttaatggtgacaggcgagcagaagagctttttagattcttaattttttaaatgactgatcaatatgtgattagkgttttttgtgttttttttttttttttttttttttttaagaggtaaggtctcactctgttgcctaggctcatggctcattgtaggctcaaactcctggaaa

SEQ ID NO: 433770 - DNA, 201 bp, Homo sapiens
tgggtagccccctgaggcggggcacgctagtcctgtcgagcccacactcactgggaccttctgcaggtgtgtcggcccagtccttcctccactgtttcacratggccagcaccgccttcaacctgcaggtggccacccctggggtaagtccagcctctccttccccactggacacttggggtctgtctccacctctccggg

SEQ ID NO: 433771 - DNA, 201 bp, Homo sapiens
tacaggcatgagccactgcaccgggtgatgagaatttttatttattttttatttttaaattttatttgtttatttttttgagatggagtctcactctgttgcccaggctggagtgcagtggtgccatctctgttcactgcaagctctgcctcccggcttcacacctttctcctgcctcagcctcccgaggtagctgggact

SEQ ID NO: 433772 - DNA, 201 bp, Homo sapiens
gggcaggcctgggcacttctgccctttgtgccatccgcagtcctgtgatttcctgacagtttcctgaaagcgcagaatgggacttgtcgatgtccttggcygcggaaacgcggtgtcttgtcctaaccttctgcaacgcacacacacctcttccgcagtaatgaatggttttttgtttttgtttttgagacagagtctagc

SEQ ID NO: 433773 - DNA, 201 bp, Homo sapiens
caggcctgggcacttctgccctttgtgccatccgcagtcctgtgatttcctgacagtttcctgaaagcgcagaatgggacttgtcgatgtccttggctgcrgaaacgcggtgtcttgtcctaaccttctgcaacgcacacacacctcttccgcagtaatgaatggttttttgtttttgtttttgagacagagtctagctct

SEQ ID NO: 433774 - DNA, 201 bp, Homo sapiens
agagaactcgcctccatcctcctagtgtgtctgaggcctgataacaagaggaagggtgggggccacccttccccgcagccttggttcctcactggacatcrggcatcaggggtgtatctgtatgtgaacaagaggggcccaagattccagcctggcaggggcacagcgccctggaagtgcccattgcgttccccacggcag

SEQ ID NO: 433775 - DNA, 201 bp, Homo sapiens
cagaagatcagccaagaaccgggcctctgtgccgcagcggtgctcgcaccctcccagcagtgcccgccctggggggcaagctctagaggttctgggacgtragtgcagacaagacactgacggccgggcacccctcagtgggatgggcagctgagagaactcgcctccatcctcctagtgtgtctgaggcctgataacaag

SEQ ID NO: 433776 - DNA, 201 bp, Homo sapiens
gacatggctcccagctcttccccgggcagccccaacacctaggcagcaggcgcccgggacgccggatgcttacgcttccaggtgagactgcatcaaatcartgacgtttgctgatttgactgtgtgtgtcggggaagaatgggggctgctcatattcgagcaaaggtgagtgcggttgagaaggcaggcttctgtgtttca

SEQ ID NO: 433777 - DNA, 201 bp, Homo sapiens
agtggccaggagctttcggaaggttgattagggtccagaggcctccctgggcacccggagatcccctgggccagaccaggcacagctgtggggcaggagcrgctgtcccccacctggatgcagtgcccatttctcccctgtgacgtccagcccgttctcaaacctcactcaccaaacaggtccttggggctcatcttggcc

SEQ ID NO: 433778 - DNA, 201 bp, Homo sapiens
ggcagagtggggggaggtgggggctggccaggcccccctcctggagcagacacctggcggcttatcctgcctgaacctcgctgtgatcaggttacagcaaygagtgcagcggaatcaatattgatgctccctgaattattagtaaaggcctctccccttacgggtgtgggggaggggatccagtggccaggagctttcgga

SEQ ID NO: 433779 - DNA, 201 bp, Homo sapiens
ttagtcttggatctgcgaagctgtggttttctggatgttcctgggaagtccgtggtgtttttaagcctctaacttgtgaaggttcaaactccagactttcaggtggtgagcagcagccgcagtctctgctcagtgttctcggtcttcagccgtccatttctgctgagtcttccccacatgctgtgtcatcagctcagggtc

SEQ ID NO: 433780 - DNA, 201 bp, Homo sapiens
actagcacgagggcctagctgggaccctcccgagtccaggcactcacccgcccagcttccggccataggcaatcgcctcctccaccagctcctggtaagcrggcatctgtgctgcggccaggatcagggacgggttggtggtagcatcctggggcttgtactcgtcgatggctagggaaatagttttcaaaagccaaagta

SEQ ID NO: 433781 - DNA, 201 bp, Homo sapiens
cacacattggcaaaactctctgaactgctcatttaccacaggtgcaggttacttcatgcagattacacttcaataaacaaaaataggcaaaaagatagggkttttttccccccttgagttcatggtgtttgagaactaaaattcagttagggagggaagcaaggccaactagactagcacgagggcctagctgggaccctc

SEQ ID NO: 433782 - DNA, 201 bp, Homo sapiens
catcagattccagagccggactggaccaacgtcctgccgtggcccagtgagcgagggttgctggcgtctttgggatactcgggagcagcccgccatccccrtgtccccagggaactcttcagagcaccccccagcagcgtggaagcccccggaaatgcaggcttggagtcccccgagggagccgggggtgttgtggtggga

SEQ ID NO: 433783 - DNA, 201 bp, Homo sapiens
caccatcgcatctttatcaaaggagagcctgtaggagcaagaagaacccatcccctcagatcacgcaggttgcccaccacgcagagcaagctggaggccgrgtgtctgcctgtcagttttgagcagcaccaccgtgagcaccaaccactgccctcaaccttcccctcactggaggtttgcagaatggctctgacagcaact

SEQ ID NO: 433784 - DNA, 201 bp, Homo sapiens
atccgggctgcagccggtggctgccaccgcctctacccactgtgctccctgtcccccgtggcgctgggccccacctgtgactcgatgtccagcagccgcarcgactggtcgttcacctgcagcagcatctcctgggtccagatcttctccttggagctcagctgcaccagcttccggatggcgtcgtccacagacgtgatg

SEQ ID NO: 433785 - DNA, 201 bp, Homo sapiens
ttacaggcatgagccactgcaccgggtgatgagaatttttatttattttttatttttaaattttatttgtttatttttttgagatggagtctcactctgttgcccaggctggagtgcagtggtgccatctctgttcactgcaagctctgcctcccggcttcacacctttctcctgcctcagcctcccgaggtagctgggac

SEQ ID NO: 433786 - DNA, 201 bp, Homo sapiens
tggaagtgttaagatcttcctggttacaagggcacacacctgagggggagtcactttgtttgaagcacctgagcgaggctgttcgctttgtccattctggyttttgttgcttgttaaatgaggctccttctgttgcagaggtgaccacagtgacagtggccaacgtgggggctgctgcagacaatgtcttcaccacgtctg

SEQ ID NO: 433787 - DNA, 201 bp, Homo sapiens
attacaggcatgagccactgcaccgggtgatgagaatttttatttattttttatttttaaattttatttgtttatttttttgagatggagtctcactctgttgcccaggctggagtgcagtggtgccatctctgttcactgcaagctctgcctcccggcttcacacctttctcctgcctcagcctcccgaggtagctggga

SEQ ID NO: 433788 - DNA, 201 bp, Homo sapiens
ttctactagacaagcacataatgaacggtgattctcaacccaggccgtattcaatgttaggggtttgttacggattctactagacaagcacataatgaacrgtgattctcaacccaggtcgtattcgatgttaggggtttgttacggattctactagacaagcacataatgaacagtgattctcaacccaggtcgtattcg

SEQ ID NO: 433789 - DNA, 201 bp, Homo sapiens
gaactctccagggctctctcctcagacagctaagggcaaggggaaggaaaggggtgctggtgaatattccggagctccagatgtggtggtgggctgggcttctgatctcagtgccattacccagtggcttctacaagacatgcttccaaacacagagtctctcccaacgatgcccccagtgttatttgtctctgggacaaa

SEQ ID NO: 433790 - DNA, 201 bp, Homo sapiens
tgggccacagaacaagtctcagtaaatctcaagtgactgcaacagtacagaatatgttttttgatcataacagaattaaggtagaaacccataataaaaakaaaaccagaaaatccccaaatgtttagaaacaaagcaacatatttctaaataacccatgcatcaaagatgaagtcacaagaaaactagaaagcattctga

SEQ ID NO: 433791 - DNA, 201 bp, Homo sapiens
agttcacgccactgcactccagcctgggcgacagagcgagactctgtctcaaaaaaaaaaaaaaaaaaaaagaaaccttgtctcgtctctaccaaaaaaamcaaaacaaaacaaaacaaaattagctgggcgtggtggcaggtgcctgtaatcccagctacttgggaggaggggagggctgaggcaggaggattgctcaag

SEQ ID NO: 433792 - DNA, 201 bp, Homo sapiens
aagttcacgccactgcactccagcctgggcgacagagcgagactctgtctcaaaaaaaaaaaaaaaaaaaaagaaaccttgtctcgtctctaccaaaaaaaccaaaacaaaacaaaacaaaattagctgggcgtggtggcaggtgcctgtaatcccagctacttgggaggaggggagggctgaggcaggaggattgctcaa

SEQ ID NO: 433793 - DNA, 201 bp, Homo sapiens
ggctggagtgcactggtgtgacctcagctcactgcaacctccacctcccaggctcaagcaatcctcccacctcagcctctctggtagctaagaggtgcatrccaccatgcccagctaattttttttttttttttttttgtagagacagggttttgccatgtcacctaggctggccttaaactcttgggctcaagcgatgct

SEQ ID NO: 433794 - DNA, 201 bp, Homo sapiens
caggttgcccctggtgcctggagaacagagcaaaggggagggaaggtggtgcgaggcgctccctggagcccaccgcccacaggtgcctggagggctgctgrgaccagagcagctccttgccctacgttcctccggggcctggggaattccagggaaacagcctccatggccacccagaactcaggagagccagagagcatg

SEQ ID NO: 433795 - DNA, 201 bp, Homo sapiens
agagaggagggcggtgccagccgtgagggccaggctggcggccagcggcctctcagcctctgtcaggttgcccctggtgcctggagaacagagcaaaggggagggaaggtggtgcgaggcgctccctggagcccaccgcccacaggtgcctggagggctgctgggaccagagcagctccttgccctacgttcctccggggc

SEQ ID NO: 433796 - DNA, 201 bp, Homo sapiens
cagctccgacccactttgctgcttctagggaggagaaatgggggcatcctcagccgggggtcccacgtgtctgggtgccggcctcccccttgctctgcgaycccaggaacgggcgggggagaggagggcgcaggggcaggaggggcgtggcgccggagcgcaggcgggctcacctccaggaaggccttctgcatggtgagc

SEQ ID NO: 433797 - DNA, 201 bp, Homo sapiens
ccgaatcttctcctggtgtcccctggagggcgagggggtcctgctcagccccgccgggaacgcacctgaccctccctccctgccgggctcctcccctcccctgccgggctcctcccctcccctgccgggctcctcccctccccgccccctgcgaccccgctccgcccgctgccctacttcagggtctgcggccgcatcttc

SEQ ID NO: 433798 - DNA, 201 bp, Homo sapiens
aaattagccgggcggggtggcgggcgcctgtagtcccagctactcaggaggctgaagcaggagaatggcatgaacctgggaggcggagcttgctgtgagcygagatggtgccactgcactccagcctgggtgacagagcgagactctgtctcaaaaaaaaaaaaaaccccacacaaaaattagccaggcatggtggtgcat

SEQ ID NO: 433799 - DNA, 201 bp, Homo sapiens
gggtccagccacacttctcacaccttcttctgggtcactgaaggttcatcaagaggcggctgtttgcataatgatggaacaacaaacactaagtgcccagygatcaaatatgcccctgcaagaggtgacctgtaacagcatgggagtgagcggtgcgacagctgggagaacgctggtcaaaggaaaatgtgcatcccactg

SEQ ID NO: 433800 - DNA, 201 bp, Homo sapiens
ctggcaaaacctccctcccaggcccgttccgccagacgcagaaagacctgagctcaggctctgcccgcctcccccgcggactcgcctcgacctcgtgcgcrccctccacgcccgctccccctgcccccgactccgcgcccgactcaaccgccgacgcctagctcatcccgccgcccccccccagcagcctctggccctcag

SEQ ID NO: 433801 - DNA, 201 bp, Homo sapiens
tgccagctttaaccatgggaaatctgcattcgtgtgtatgtaatgagctctgcagagattcaacaaggcagaaaagcagatgcccttggctgtcaagggcrcagtgtccagtggaagccagccgagtggctgcagggtcttggactcactgccctggccccggcttgttgttggccatgctgccctgagcgcaaaccccat

SEQ ID NO: 433802 - DNA, 201 bp, Homo sapiens
cggggtccgcgacccgagaaaccgacaaggatggaggggcggccagaccaggccctgaagcgcgcgggcatcgacgccagcgccatcctacccggcccgtrcgtgcgtcccggccctcgggcgctcaccctagtccacctggtatctggcaaaacctccctcccaggcccgttccgccagacgcagaaagacctgagctca

SEQ ID NO: 433803 - DNA, 201 bp, Homo sapiens
agcagcccgccatccccatgtccccagggaactcttcagagcaccccccagcagcgtggaagcccccggaaatgcaggcttggagtcccccgagggagccrggggtgttgtggtgggaggggcggccaggtgcccgggacggggtgaggcggcgccggcggggcagcctgggaaaagcacagaggtggctttgcagtccca

SEQ ID NO: 433804 - DNA, 201 bp, Homo sapiens
cccggcgccgcgcggggtccgcgacccgagaaaccgacaaggatggaggggcggccagaccaggccctgaagcgcgcgggcatcgacgccagcgccatccyacccggcccgtgcgtgcgtcccggccctcgggcgctcaccctagtccacctggtatctggcaaaacctccctcccaggcccgttccgccagacgcagaaa

SEQ ID NO: 433805 - DNA, 201 bp, Homo sapiens
caggctgacctactgctgaccctgggagcccgcctggagttcgaggctctcagtgggtgaggtggacattgcctgaggttggtgccctcggtcctccccarcaagcgagcctgacgctgtccacgtcgtgctggaccgccacctggtcacaggccagaatgccagctccaccgtcccggccgtgcagaacctgctcttcct

SEQ ID NO: 433806 - DNA, 201 bp, Homo sapiens
gcacgtggacgaatgcggcggcccaaagagacgggaatgaagcgaggtggtggccacgggcaggccagcatcgcccggcgccgcgcggggtccgcgacccragaaaccgacaaggatggaggggcggccagaccaggccctgaagcgcgcgggcatcgacgccagcgccatcctacccggcccgtgcgtgcgtcccggccc

SEQ ID NO: 433807 - DNA, 201 bp, Homo sapiens
gcgacgtgccacctcccagcgctgcaggccgcggaacgtggcccagtagagcagcagcatgagcgggcagggtaggaagaaggagcacacggacgagtagmccacgtagtcgcggtcctccaggcggcacacggcggggtcgcggccgcgcacgtcgttgaggccgcacagtacgggcgccgccaccgccgcggacagcag

SEQ ID NO: 433808 - DNA, 201 bp, Homo sapiens
ctggagcacaggcccctctggcgccgctggggaatgggctcccaaagatgaggactaggcccgggacacaccccgcagctgtaccgcaaggctgaccccgkcttccaaacttccctggactctcagctctatgcggccctctgcccacccttgtcccatcctcttccagggaccagaatgatagggcatggccggccctgc

SEQ ID NO: 433809 - DNA, 201 bp, Homo sapiens
tcgggggcctttgtgcctcagggggatgctgttgggtcccttgtcagctttttcaggctccctctgagccgacagggatatccctggtgctgaccctcggyccctgggctctgcttctccaggggaaagccatggaatttgtggatgtgactgagagcaatgcacgctgggtgcaagacttccgcctcaaggcttacgcca

SEQ ID NO: 433810 - DNA, 201 bp, Homo sapiens
acctgttacttgtagtcttttcagccttggtcacatacctgggacatcatctccatatacctgaaagcagagtggttatttgtttgttttgtttttgagayggggtcttgctctgtcacctagactggagtgcagtggtgcaatctcggctcattgcaacctccgcctcctgggttcaagccattcttgtgcctcagcctc

SEQ ID NO: 433811 - DNA, 201 bp, Homo sapiens
cccagggagagtggccacacagcgtgaaccgggctgcccaaggcgggcacctgctgccccaaccccgaccccggggagatgctgcagaggcctctgggccsccaccctgcgcgcccctgccgcccggccccaggcaccaggtccagaggcccgaagaggaagtgcacgagctccgcggcgctggggttctggatgtgcttc

SEQ ID NO: 433812 - DNA, 201 bp, Homo sapiens
acctgtgagtttgagaaaacacagctctagtttactgaggggacctgagtgcattgccttctctcgtcaccactcccacggccactgcgggattctcactyctaaagcacattgcgtggccagagggattccaacgccatcacactcctttgcagtgcgtcccccgggtgggaaggggtgtcccagtgcccagctcggtct

SEQ ID NO: 433813 - DNA, 201 bp, Homo sapiens
aaattatcccagcactttgggaggctgaggcaggcagatcacaaagtcaggagatcaagaccatcctggctaacacggtgaaaccctatctctactaaaamcacaaaaaattagccgggcggggtggcgggcgcctgtagtcccagctactcaggaggctgaagcaggagaatggcatgaacctgggaggcggagcttgct

SEQ ID NO: 433814 - DNA, 201 bp, Homo sapiens
tgtgctggaggtgggagaaattacagctgaggtagaagctgcctcggaaggccaggtgaagagccacacctgtcagatgggcttgtggcctgcgttgggcrgggactcccagcaggctgctgtccggccacagttcagcctctgcccgaggcccggccctgcctgtgctccttatcctatagctgcagggccagctgaaag

SEQ ID NO: 433815 - DNA, 201 bp, Homo sapiens
tggtcatcctggttttctcctgtgaggtcttctccaaggtctgggatttcccccgtgtccttcacatgggagggtacagttaccactgcccgcccttcagyccaggcccccacaaggattggcgcccgtgggtggcacgggacctgtgtgccgtgggcgccactgcctggccgcgtgaaatgtgcttctgcctttccagtc

SEQ ID NO: 433816 - DNA, 201 bp, Homo sapiens
cagtagtgatgatggctgtacaacattatgagtatacttaatcctgtgatattctgataaattagataatggatatagacagagtgacagatatagattasaatgacatagatacataggcaggtagattgatacacagagataagtagatatagatagatacagattagatagatcgatcaatccacgtatcgatagagg

SEQ ID NO: 433817 - DNA, 201 bp, Homo sapiens
cctgcccagaccctgctccacccactgaccctgctgacatgggtgtgtcctcccttccaggactggaaggatcaccagcacatatgcggccagtcagcagstgtcaccgtccaggcagacgaagtccacgtggctgaaagcgtgatggagaaggtgaccgtgtgaggctccatcggccgccctgggagctggggcccctcg

SEQ ID NO: 433818 - DNA, 201 bp, Homo sapiens
cggaatcttctttagtatttctgctccaaacaacacaaaaagtttatcaatagcatttttaatctggtcctcttgtgacctgaaattcaaagggaaaaaaagcaggttagaagcttctgaggttcgccaggtgcggtggctcacgcctgtaatcccagcactttgggaggccgaggtgggcggatcatgaggtcaggagat

SEQ ID NO: 433819 - DNA, 201 bp, Homo sapiens
caagagagtgtggggaaggctgtattggagcagagcccaccagagtttgggcgcacgggggctggggagggcattctcagcacctccaggtgaggttacasagggctgcaccctctggggtctgccttggggaccctgcccagaccctgctccacccactgaccctgctgacatgggtgtgtcctcccttccaggactgga

SEQ ID NO: 433820 - DNA, 201 bp, Homo sapiens
ttatgaacatatactatcaatgaatgtatttttttgttaatattcatttaaaaaaaatgtcacaacttgggtttagaagatttttttttttttttttttttgagacggagttttgctctgtcgcccaggctggagtgcagtggtgtgatcttggctcactgcaacctccgccttctgggttcagcaattctcctgcctcag

SEQ ID NO: 433821 - DNA, 201 bp, Homo sapiens
tgaggactctggggggacgttgagaagaggggtgtgggaaggtaaagaaacttgctggacaagtcattaacacactttaagcgaatggtgccctgggaagygcactccccctgcccgggccccctgcccgctcgcggacagattttttatccctgggatcatgagcgtccggtcttgcccacagggcctgtgctgcgacgc

SEQ ID NO: 433822 - DNA, 201 bp, Homo sapiens
tattgtcctcagaattgcttccaatgaaagaattcctaagtgaaatgggattcattttggtttggtttgttgtttttgttgatgcattagatcagtggctrgtaaagtgtggcccactgcctatgtttgtaaataaagttttactgacacacagccacgtccattcatgtgtgtgctgtggaagttgcttttggtacagca

SEQ ID NO: 433823 - DNA, 201 bp, Homo sapiens
tttatgaacatatactatcaatgaatgtatttttttgttaatattcatttaaaaaaaatgtcacaacttgggtttagaagatttttttttttttttttttttgagacggagttttgctctgtcgcccaggctggagtgcagtggtgtgatcttggctcactgcaacctccgccttctgggttcagcaattctcctgcctca

SEQ ID NO: 433824 - DNA, 201 bp, Homo sapiens
gcgcccgccaccacgcccagataatttttttgtatttttagtagagatggggtttcaccgtgttagccaggatggtctggatctcctgacctcatgatcgrcctgcctcggcctcccaaagtgctcggattacaggcttgagccaccacacccggccgaagttcacaagttcagtaactttatttggcaaataaatatctt

SEQ ID NO: 433825 - DNA, 201 bp, Homo sapiens
tgatggtttattattattattattgttattttgagatggagtctcgctctgtcgcccaggctagagtgcagtggcgtgatcccggctcactgcaacctccrtcttccaggttcaagcaattatctcgcctcagcctctcgagtagctgggattacaggcacctgccaccatacccggctaattttttgtatttttagtaga

SEQ ID NO: 433826 - DNA, 201 bp, Homo sapiens
aggtggagcttgcagtgagctgagatcacgccactgactccagcctgggcgacagagcgagactccgcctccaaaaaaaaagaaaagaaaagcaagtagakaatttatttatggacagctccaaaacaggcaggaaagattcctcccttgaagagagaaaggaacaggtgaaaggagaggagaaggtcagtgatggaaatt

SEQ ID NO: 433827 - DNA, 201 bp, Homo sapiens
acactgttggccttgtcctgggctgtttcctagtatgagtgagcatggctgagtgcccagcacacgctcaggggacgtttcctgacaagggcgtccttggkgagggattctcagtgcgctggacgagggctgcggagagctctgtgggtctttctctgtggccgggctggagggcggcgtcaggatcccggctcgctgcag

SEQ ID NO: 433828 - DNA, 201 bp, Homo sapiens
cacgccattctcctgcctcagcctcccgagtagctgggactacaggcgcccgccactgcggccggctagttttttgtatttttagtagagatggggtttcrccgtgttagccaggatggtctcgatctcctgacctcatgatccgcccgcctcagcctcccaaagtgctggggttacaggtgtgagccaccacacccggcc

SEQ ID NO: 433829 - DNA, 201 bp, Homo sapiens
cctcccaagtagctgggaccacaggcacgtgccaccatgcccagctaatgtttttatttttttgtacagacaggatttaaatggggagaggtagcaatagragaaaatgtctttgtaataggcttttgttaactaagtctgggtttttgcatttatagagtaaggtctttctaaaacaccctgtcagctccttcctgaggc

SEQ ID NO: 433830 - DNA, 201 bp, Homo sapiens
gctgggtgcctcgagaggggccttgaaccaggcgtttgttggtggggacagcgtgtgagccacgtcaggtgggcggtgcagtgtggatggggttggcgtgyggcagtgggttacttgtgacagatgccagaactggcaaagctgaaaatactctctgtctgccggctcctgcttttgactgcagttgtgcaacagaaatgc

SEQ ID NO: 433831 - DNA, 201 bp, Homo sapiens
ccctgccccacacggccggttgcagtgccagccctcgggggggggtttcctccccttcctcctactgcgcaggtgggaaaaccaagcccaccgcacctccrgtgcacgggacagcgcggccaggccggagcctccggtgcacggggcagcgcggccgggctgaagccctggcgtctggtggctcgtgtagtccaggaggtc

SEQ ID NO: 433832 - DNA, 201 bp, Homo sapiens
gggtgcctcgagaggggccttgaaccaggcgtttgttggtggggacagcgtgtgagccacgtcaggtgggcggtgcagtgtggatggggttggcgtgcggyagtgggttacttgtgacagatgccagaactggcaaagctgaaaatactctctgtctgccggctcctgcttttgactgcagttgtgcaacagaaatgcagc

SEQ ID NO: 433833 - DNA, 201 bp, Homo sapiens
gtcgcacaggcgggggctcagcagccacgcgccaccctggacctgcgcggcgacaccacaggccctgaggtttcccagccaccgcgggcccttgtgacccscccccactcttatgggtagttccagggctgaatacggagaagggggcccggctgtgagccagaggccagaggaccgggcagggaaacaccccttccccac

SEQ ID NO: 433834 - DNA, 201 bp, Homo sapiens
ggtggggacagcgtgtgagccacgtcaggtgggcggtgcagtgtggatggggttggcgtgcggcagtgggttacttgtgacagatgccagaactggcaaarctgaaaatactctctgtctgccggctcctgcttttgactgcagttgtgcaacagaaatgcagcctagctggttgtgtgctggagaatattctagaagcca

SEQ ID NO: 433835 - DNA, 201 bp, Homo sapiens
tagctgggactacagcgcctgccaccatgcccggctaatttttttttggtatttttagtagagacagcgtttcaccatgttagccaggatggtctctatcycctgacctcgtgatgcgcccatcttggcctcccaaagtgctgggattacaggcgtgagccaccgcgcccggcctgatttttataatctattttatttcac

SEQ ID NO: 433836 - DNA, 201 bp, Homo sapiens
tgcgtgatgtgcaccacgaagaagggcgtccagcacagcaggaaggcccctgggggcgccgagagccgcgttagcgccccccgcccagccggcctcgtacyccccccctcctctcctccccgcccctcaggacaggaacccaccgaccaccaccggcaggaccctcatggccttgcgctcccggccggtgatcttggcacg

SEQ ID NO: 433837 - DNA, 201 bp, Homo sapiens
agcaggcaggacacagcgcctgcgtgatgtgcaccacgaagaagggcgtccagcacagcaggaaggcccctgggggcgccgagagccgcgttagcgccccscgcccagccggcctcgtaccccccccctcctctcctccccgcccctcaggacaggaacccaccgaccaccaccggcaggaccctcatggccttgcgctcc

SEQ ID NO: 433838 - DNA, 201 bp, Homo sapiens
catcagacccggctaatttttgtacttttagtagacacagggtttcaccatgttggtcaggctggtcttgagctcctgacctcaagtgatccgcccgcctyggcctcccaaactgctgggattataggtgtgagccaccacacccagctgttttgtttttttttttaagtggggtctctctctgtcacccaggccagagtg

SEQ ID NO: 433839 - DNA, 201 bp, Homo sapiens
ttttgttgaacatttttaaacagtatctttaaagttgttattttcttactgctataggtattacaatatacattttaatttatctcagtttcagtaggagkatagaatttcctcaagcagggaaagtgtactgcagaggctgagtgtatacattcctggcaaacactatttgggccccaatataagcacttactgagctcc

SEQ ID NO: 433840 - DNA, 201 bp, Homo sapiens
cctgttttgttttttgaattgagacagagtatcactttgttgcccaggctggagtgcactggcgtaatctcggctcactgcagcctccacctcctgggttyaagggattctcgtgcctcattctcccgagtaactgggactgcaggagtgtgccatcagacccggctaatttttgtacttttagtagacacagggtttcac

SEQ ID NO: 433841 - DNA, 201 bp, Homo sapiens
atgatgaatgtggccaggtgctgggggtgggcaggtggtcactgctgggcagagccctccttgtgtcgaaagcccagcccccaggggccacagcctgaggsgctgaggggccacagccaaccctgggtagggggctagaacggggaccggccccgcctttggtggggggagtctctattctgccttggcaggcatctgtag

SEQ ID NO: 433842 - DNA, 201 bp, Homo sapiens
aacccagtctcaggttacaagtgggcgtgaccccttgagtgagtggttagattcactcctgcccagagggtgccccgccccagcactctgcccaaggggckcaccccaccaagcccttctcattctagtcacctgtgtgctccggtgctgggggagctggcccgtcctcctgtagtggccgtgtcgctctcagggacaccc

SEQ ID NO: 433843 - DNA, 201 bp, Homo sapiens
cagcgcccctgccgccgccccagctggaagctccgcaccagaaaggggccgggtcgcgccgggtcctccgtagggacagggacggggaaccgaggagcagrtgaggatgctcgtgcggccggacgcggctcacctcggagtagacgaagagcggcagcaccaggagagcgaggaggaggtcggcggccgccaggctcacga

SEQ ID NO: 433844 - DNA, 201 bp, Homo sapiens
tgctcaacacagcgcagcagctgaagacgctgtttgagcaagccaagcatgccagcacctaccgagaagctgccacaaaccaggccaagatccacgctgaygcagagcggaaggaggtaaccttggaacaaatgggaagacacgacctgtgctgagtaaccccaggccaccctggtgcctgtgcccagctgcgtaagaccc

SEQ ID NO: 433845 - DNA, 201 bp, Homo sapiens
ggggtgggagcgcggcggctctgacggcgtcggggggagcacagttggagccgcaggggtccggggggaggccgggcgcggggggcgcacagtcggggccrcaggggtcctgggggaggctgggcgcggcgggcgcacagtcggggccgcagggaccccggggaaggccgggcgcggggggcgcacagtcggggccgcagg

SEQ ID NO: 433846 - DNA, 201 bp, Homo sapiens
gctgacaaggcctttgtgggacccccctccatgccacaacaatgcggtctgtgcactgcagcccctgccctcctgactgtggacaggactggtcaggggayagcctccacacactggcatccccagtgatgtcaccctgcctttggccccagttatgagttaagagagaaaaaataactttgtcattttcttttttttttt

SEQ ID NO: 433847 - DNA, 201 bp, Homo sapiens
gaggctgaggcaagagaattgcttgaacccaggaggcagaggtggtgagccgagattgcgcgttacactccagcctgggaaacaagagcgaaactctgtcygaaaaacaacaaaaaaacccccacagaacttgatcgtaatttacatatgtaatatttacatatttaaatgtttttctgcatgtgtgatattttttgttta

SEQ ID NO: 433848 - DNA, 201 bp, Homo sapiens
tcaaaccatcctcccgcctcagcttcctgagtagctgggatcacaggtgaatgtcaccatgcccagctagttctttgtttttgatttctgttttgtagagrcaaggtcctgctatgttgcccaggctggtcttgaactcctgagctcaagtgatcctcccacctcagtctcccaaagtgcagggattacaggcatgagcca

SEQ ID NO: 433849 - DNA, 201 bp, Homo sapiens
cccatgttggcctggctggtctcaaactcctgacctcaagtgatccgcccacctcagcctcccaaaatgttgggattacaggcgtgagccactgtgcccgkccctgacttacttttatacgtgatcatcaggagcgtggcgaggaaatacagggcgtagtacgttccgctgagataaaacagcatttgaaggggaactgaa

SEQ ID NO: 433850 - DNA, 201 bp, Homo sapiens
ctgcacccgatgctgcagtttgctgatgtatgtgctttcatgctatgtagatttatagtctattaccaggtaattttaattttttttttttttttttttttgagacgtagtctcactctgtcgcccgggctggagtgccgtggcacaatcttggcttactgcaacctctgcctcccaggttcaagtgattcttgtgcctca

SEQ ID NO: 433851 - DNA, 201 bp, Homo sapiens
aaaaatgcaaaacattagccaggtgtggtggcgtgcacctgtaatcccagctgctagggaggctgaggcaagagaattgcttgaacccaggaggcagaggbggtgagccgagattgcgcgttacactccagcctgggaaacaagagcgaaactctgtctgaaaaacaacaaaaaaacccccacagaacttgatcgtaattt

SEQ ID NO: 433852 - DNA, 201 bp, Homo sapiens
cctcagcttgccttttccttttttttttttttgagacagggtcttgctctgtcacccaggatggagttcagtggcgcaatcttggctcactggaacctccrcctcccgggttcaagcaatcctcccacctcagtctcccgagtagctgggactacaggcgcccaccaccacgcccggctactttttgtgtttttagtagag

SEQ ID NO: 433853 - DNA, 201 bp, Homo sapiens
ctgaacacctgacctgaagagcagaggcgcggacggaacataagtaacctggcacagcagcagcagccacctcagcttgccttttccttttttttttttttgagacagggtcttgctctgtcacccaggatggagttcagtggcgcaatcttggctcactggaacctccgcctcccgggttcaagcaatcctcccacctca

SEQ ID NO: 433854 - DNA, 201 bp, Homo sapiens
taaaaaaaggggagtgaggccaggcactttgggaggccaaggtgggcagattgcttgagcccaagagttcaagaccaaccagggtaacatagtgaaacccygtctccggccaggcgtggtggctcacgcctgtaatcccagcactttgggaggccgaggtgggcggatcaggaggtcaggagatggaaaccatcctggcca

SEQ ID NO: 433855 - DNA, 201 bp, Homo sapiens
tcccaaagtatttttctctggtccaaggccagttctggaaaatttcacgagtatgtattaaaaacaaaactgcgtatttagcaaacaaatgggtcagtcastagctgagcccaggtgcctggagaccctgcagtgtgcggcgcgcttggggagggtcccgttggcctagcagcccccagcagggccaggccacaccctgtc

SEQ ID NO: 433856 - DNA, 201 bp, Homo sapiens
acccaaccatgcccaccccaggcctggagccctgagttcacagtgcagctgctcctccaggcccccctttctgcccagcctgggcactgagggatggggtrtcaggggaggtggggacacctcaggccctctcaggatgcctctctccttgcactgccccgtggtcaggcccaggccccacctctgcccaccacagtggga

SEQ ID NO: 433857 - DNA, 201 bp, Homo sapiens
gctgatgtatgtgctttcatgctatgtagatttatagtctattaccaggtaattttaattttttttttttttttttttttgagacgtagtctcactctgtygcccgggctggagtgccgtggcacaatcttggcttactgcaacctctgcctcccaggttcaagtgattcttgtgcctcagcctcccaagtagctgagatt

SEQ ID NO: 433858 - DNA, 201 bp, Homo sapiens
ttgccctgacccagagctcagggtcacacacgccaacccctcggtgcacccgtgccctcacccttcctggaggcagagctgggagtggccaagtgggaaayaggcgctggagaggacagctggggggtggggtccctctccactcctaaacgggtgcctgtcaacacgattttgagtgcggagcctgccctcaggagacag

SEQ ID NO: 433859 - DNA, 201 bp, Homo sapiens
caccacacccagctaattttaaaacatttttttttttatagagctagggttttgctatgttgctcaggctggtctccaacccctgacctcaagtgacctcracctcccgaagtcattgtttttacagtctgtgatgttggcttttctcatttatttgtatcaggcactttcattgttagcttcttgtgaatttaaccattt

SEQ ID NO: 433860 - DNA, 201 bp, Homo sapiens
tttgtgtgctcgctgagactggaggtatcaggatccattaaccatgaaggcaacaggtctccagcttcagggagggggtccttccctggtctgcatggttygtgggctgggtcctccagatggcaggtgtgcccagctggtcttctgcgagtgcaggcgctggtgagggaggtggcccgaggcgctcaggcgctggtgtgt

SEQ ID NO: 433861 - DNA, 201 bp, Homo sapiens
atctgggaggcagaggttgcggtgagccgagattgtgccagtgcactccagcctggacaacaaaagcaaaactctgtctcaaaaaaaaaaaaaaaaaaaaatacaaaaatgagccaggagtggtggcacacacctgtaagcccagctaattgggaagctgaggcaggagaattgcttgcaccagggaggcggaagttgtag

SEQ ID NO: 433862 - DNA, 201 bp, Homo sapiens
ggctcaagtgatcctcctgcctctgtctcccaagtagcttggaccacaggcatgagccaccacacccagctaattttaaaacatttttttttttatagagmtagggttttgctatgttgctcaggctggtctccaacccctgacctcaagtgacctcgacctcccgaagtcattgtttttacagtctgtgatgttggcttt

SEQ ID NO: 433863 - DNA, 201 bp, Homo sapiens
tcagttccagctcaggctcccaaaggtaccgaggcccctacaaagccttcagagtagatatctctgccaacgtgaggacagaaggactggtgcgaccccccacccccgtccctgggctaccatctgcatggggctggggtcctcctgtgctatttgtacaaataaacctgaggcaggaaaaaaaaaaatagatctccctct

SEQ ID NO: 433864 - DNA, 201 bp, Homo sapiens
attaccagacccgctcttttccggttagcgcggcgtgagaagccatgagcagcagtctctcgcaacaccctgtacgaggcggtgcgggaagtcctgcaccrgaaccagcgcaagcgccgcaagttcctggagacggtggagttgcagatcagcttgaagaactatgacccccagaaggacaagtgcttctcgggcaccgtc

SEQ ID NO: 433865 - DNA, 201 bp, Homo sapiens
acctcatttccagcccgaagcaaaaaaagataaaaatattaccagacccgctcttttccggttagcgcggcgtgagaagccatgagcagcagtctctcgcracaccctgtacgaggcggtgcgggaagtcctgcaccggaaccagcgcaagcgccgcaagttcctggagacggtggagttgcagatcagcttgaagaacta

SEQ ID NO: 433866 - DNA, 201 bp, Homo sapiens
gggccttatatatcgagagcaccatgggcaagccccagcgcctatattaaggcacatttgaataaattctattaccagttcaaaaaaaaaaaaaaaaaaaattccagacccaaaggcccaatttcttcctataaaaatgtcctaagagtcacctactactgaagatatcaacgcaactgtttcctacgtgcctcatttaat

SEQ ID NO: 433867 - DNA, 201 bp, Homo sapiens
aacatggtggccaaagtgggtgaggtgaagtccacaatcaagttccaaatgaagaaggtgttatgtctggctgtagctgttggtcacgtgaagatgacagmcgatgagcttgtgtataacattcacctggctgtcaacttcttggtgtcattgctcaagaaaaactggcagaatgtccgggccttatatatcgagagcacc

SEQ ID NO: 433868 - DNA, 201 bp, Homo sapiens
tccacgaatcctcggcccaggtctaaataaggcaggaaagttcccttccctgctcacacacaacgaaaacatggtggccaaagtgggtgaggtgaagtccmcaatcaagttccaaatgaagaaggtgttatgtctggctgtagctgttggtcacgtgaagatgacagccgatgagcttgtgtataacattcacctggctgt

SEQ ID NO: 433869 - DNA, 201 bp, Homo sapiens
gcccgaagcaaaaaaagataaaaatattaccagacccgctcttttccggttagcgcggcgtgagaagccatgagcagcagtctctcgcaacaccctgtacraggcggtgcgggaagtcctgcaccggaaccagcgcaagcgccgcaagttcctggagacggtggagttgcagatcagcttgaagaactatgacccccagaa

SEQ ID NO: 433870 - DNA, 201 bp, Homo sapiens
tgtgacgaggctaaggccgtggatatcccccacatggacatcgaggcgctgaaaaaactcaaaaagaataaaaaactggtcaagaagctggccaagaagtrtgatgcgtttttggcctcagagtctctgatcaagcagattccacgaatcctcggcccaggtctaaataaggcaggaaagttcccttccctgctcacacac

SEQ ID NO: 433871 - DNA, 201 bp, Homo sapiens
gggcaccgtcagacttaagtccactccccgccctaagttgtgtgtgtgtgtcctgggggaccagcagcactgtgacgaggctaaggccgtggatatccccyacatggacatcgaggcgctgaaaaaactcaaaaagaataaaaaactggtcaagaagctggccaagaagtatgatgcgtttttggcctcagagtctctgat

SEQ ID NO: 433872 - DNA, 201 bp, Homo sapiens
actatgacccccagaaggacaagtgcttctcgggcaccgtcagacttaagtccactccccgccctaagttgtgtgtgtgtgtcctgggggaccagcagcaytgtgacgaggctaaggccgtggatatcccccacatggacatcgaggcgctgaaaaaactcaaaaagaataaaaaactggtcaagaagctggccaagaagt

SEQ ID NO: 433873 - DNA, 201 bp, Homo sapiens
gtcctgcaccggaaccagcgcaagcgccgcaagttcctggagacggtggagttgcagatcagcttgaagaactatgacccccagaaggacaagtgcttctygggcaccgtcagacttaagtccactccccgccctaagttgtgtgtgtgtgtcctgggggaccagcagcactgtgacgaggctaaggccgtggatatcccc

SEQ ID NO: 433874 - DNA, 201 bp, Homo sapiens
agccgatgagcttgtgtataacattcacctggctgtcaacttcttggtgtcattgctcaagaaaaactggcagaatgtccgggccttatatatcgagagcmccatgggcaagccccagcgcctatattaaggcacatttgaataaattctattaccagttcaaaaaaaaaaaaaaaaaaaattccagacccaaaggcccaa

SEQ ID NO: 433875 - DNA, 201 bp, Homo sapiens
tttccggttagcgcggcgtgagaagccatgagcagcagtctctcgcaacaccctgtacgaggcggtgcgggaagtcctgcaccggaaccagcgcaagcgcmgcaagttcctggagacggtggagttgcagatcagcttgaagaactatgacccccagaaggacaagtgcttctcgggcaccgtcagacttaagtccactcc

SEQ ID NO: 433876 - DNA, 201 bp, Homo sapiens
ggagtaaccaaggtaaatattaaacattacaatgatgggattggaagtgatgttgatattaaacaaatgttacaggtcttcaaagagctacccaaaaaatygtaacccatctaaattgaggaagaaaaaaggagtcttctctttctgagcttagtagattgttcattaattggttattgggtgattttcttaggacttctg

SEQ ID NO: 433877 - DNA, 201 bp, Homo sapiens
gggctttcaccatgttggtcacggtggtcttgagctgctgaccttgtgatctgcccatatcagcctcccaaagtgctgggattacaggcgtttaccaccgygcctggccttgggagctcagtttcttactactagaaagagaagttaaacctaagtgggattgccagaacaaagcatagggtaccggattatactcaaaga

SEQ ID NO: 433878 - DNA, 201 bp, Homo sapiens
ttggcagacactaccacaggtgatcaagttttaacatcatgaagagtaggtcatattgataagatgtgcccttaatatgatgcgatgagaatggcacttayggagtctttggatatagagggtgtttcaattataaagacattctggggccatctgagaatcttgggcataattgatcaacagatcttccagtccttgcat

SEQ ID NO: 433879 - DNA, 201 bp, Homo sapiens
catagttaaacctttctttggattcagcagtttggaaactctatttttgttcactctgggaatggacattagggagctccttgaggccaaagacaaaagartgaatatcccaggataaaacatagaaggaagctatctgagtaactgctttatgctctgtgaattcatctcactgagttaaacctttcttttcattcagca

SEQ ID NO: 433880 - DNA, 201 bp, Homo sapiens
ccccaactggctctgtgggaacatgtgtaaaagatacttcaccttccttcaaggtctaagagagggaaacactgagtttggttaggaaaataaggttattrctactggaattttttggcatttgtgaggaatcagactagagaggtattaaagtagttttgaactatgaattagcaaatgaatttgagtctgctccattgt

SEQ ID NO: 433881 - DNA, 201 bp, Homo sapiens
atctactgaatcagaatttatgttttaacaagatacccaggtgatctgtatgtacaataaagtttataaacagcagctatagcttcagctacaggagactrgagatgacattatcaggtggacggagtattaaatcagggagcaaagagggatttcctaggagaaacaggaaagaaaagacctatattgtagtgcttgaga

SEQ ID NO: 433882 - DNA, 201 bp, Homo sapiens
cagacactaccacaggtgatcaagttttaacatcatgaagagtaggtcatattgataagatgtgcccttaatatgatgcgatgagaatggcacttatggartctttggatatagagggtgtttcaattataaagacattctggggccatctgagaatcttgggcataattgatcaacagatcttccagtccttgcattgag

SEQ ID NO: 433883 - DNA, 201 bp, Homo sapiens
ctaaaagaagcccatagcaatggggataaatggctacaggagccaatctgaaagagttcccaatggccaaggctggaacagtttaatgaaataaaaacatkgcattagattaccaaaatgtaaaatatttatgtgtctatactgatatgtaaataagtggtttaataaaaataatagtgacaagtctctcttacaaaataa

SEQ ID NO: 433884 - DNA, 201 bp, Homo sapiens
gggtacaggttaattctaaaactgctgtacatgtgtactggaattgacatacaagtaaatggatggcaagtggtgggagctcagtttctttctttcttttyttttttagatgaagtctagctctgttgcccaggctggagtgcagtggtgcagtctcagctcactgcaatctcgtcctcccaggttcatgtgattttcctg

SEQ ID NO: 433885 - DNA, 201 bp, Homo sapiens
aatcttggctcactgcaacctctggctcccaggcccaatcagtcctcccatctcagcttcctcagtacctgggactacaggtgcacaccaccgtgcctggytaatttttgtattttttgtagagacaaggtctcatcatgttgcccaagctagtctcaaactcatggacccaagcagtcagcttgcctcagcctcccaaag

SEQ ID NO: 433886 - DNA, 201 bp, Homo sapiens
gaaataaaaacatggcattagattaccaaaatgtaaaatatttatgtgtctatactgatatgtaaataagtggtttaataaaaataatagtgacaagtctstcttacaaaataatttcaaataatttatgtaaatggtctccccatttttcaaacaagtgggtctgaactacctaacccctgagtgagctgtgtttaataa

SEQ ID NO: 433887 - DNA, 201 bp, Homo sapiens
tggcagacactaccacaggtgatcaagttttaacatcatgaagagtaggtcatattgataagatgtgcccttaatatgatgcgatgagaatggcacttatrgagtctttggatatagagggtgtttcaattataaagacattctggggccatctgagaatcttgggcataattgatcaacagatcttccagtccttgcatt

SEQ ID NO: 433888 - DNA, 201 bp, Homo sapiens
gcaacttattagcattacagaagatttttaaaaaactgactataatgtctgcctttggattaattgatgtattttactgcaaaaaattacaggttcagtgrcaagctgttttctatcacgagttaaattatttctggcataaaagtcaaaagaaaaaaaagaaagaatacaatgtttaaaggccaggcatggttacagaca

SEQ ID NO: 433889 - DNA, 201 bp, Homo sapiens
tctcactctgttgcccagactggagtgtagtggtgcaatcttggctcactgcaacctctggctcccaggcccaatcagtcctcccatctcagcttcctcaktacctgggactacaggtgcacaccaccgtgcctggctaatttttgtattttttgtagagacaaggtctcatcatgttgcccaagctagtctcaaactcat

SEQ ID NO: 433890 - DNA, 201 bp, Homo sapiens
ttttttacaggaaaattgcaacttgatctgtggtgatgaatatggtccagaaacaaggttgagcaggtctcaattgaacgaaaaggaaactcccttttaaytcatcaaagctctacttaagtacattgaaactcttaacgtttccggagctgttgttttgttttgttttgttttgttttgtttttttgcctgtctggaatt

SEQ ID NO: 433891 - DNA, 201 bp, Homo sapiens
atctggtagctttggggaaaaaaaatgaattatggcacattcaattgagggcatgaaaataagagagaaacagtgtagatagatatgacgttatggctatrccagcatgctaagccagtgtaattcacaggggtacaggttaattctaaaactgctgtacatgtgtactggaattgacatacaagtaaatggatggcaagt

SEQ ID NO: 433892 - DNA, 201 bp, Homo sapiens
tggctcccaggcccaatcagtcctcccatctcagcttcctcagtacctgggactacaggtgcacaccaccgtgcctggctaatttttgtattttttgtagmgacaaggtctcatcatgttgcccaagctagtctcaaactcatggacccaagcagtcagcttgcctcagcctcccaaagtgctgggataacagtctagagc

SEQ ID NO: 433893 - DNA, 201 bp, Homo sapiens
taattttttgtattttgagtagagacgggtttcaccatgctggccagcctggtctcgaactcttgaccttgtgatctgctcgcctcggcctcccaaggtgstgggattataggtgtgatccacgggcccggccctacatttaaaaaatacattcccagtatatttcttaatgcatatcctggtgaaatttgtgaagaaaca

SEQ ID NO: 433894 - DNA, 201 bp, Homo sapiens
cacttgaatccaagtggtgaaggttgcattgagctgagattgcgctgctacactccagcctgggcgacagagccagactgtctcaaaaagaaaaaaaaaaatagcaatgtaaacatattatttagaaatgtggaagtaaataagagtgaaaacagggccgggcgcagtggctcacgcctgtaatcccagcactttgggagg

SEQ ID NO: 433895 - DNA, 201 bp, Homo sapiens
ggttgcagtgagccaagatcgtgccactgcactccagcctgggcaacaagagtgagatggtgtctcaaaaaaaggaaaaaaaaaaatcataatgggtacartgtacactaattgggtgacaagtgtactaaaatcccagaattcactatatgtaggatggatatggattcactatatatagtggattctgggattttatat

SEQ ID NO: 433896 - DNA, 201 bp, Homo sapiens
ctgggtgaaaggggaggcaggaaggaggagggagcggtgttggctcagtacactctgcttctttatctctttatttccgtgaaggctgtttaaacctatastaaggcacttagaattgaaagtggactgccacatataggttattttctacatgccccaagaactattgaatttttttttaatgggaagaaaattttaagc

SEQ ID NO: 433897 - DNA, 201 bp, Homo sapiens
tgctaattgtttctttctgcactaaccactcagatgtctaatttaattgttttgcagtcaaatactggatttgtaaccttcagggctgacatgctgcccartttgcttcatcgggagaatagcaacaggtagacacatctcaaggctaaatctgctcatgtcgccactgctctcataatgacacacatgcagtaagaagac

SEQ ID NO: 433898 - DNA, 201 bp, Homo sapiens
aaacctatagtaaggcacttagaattgaaagtggactgccacatataggttattttctacatgccccaagaactattgaatttttttttaatgggaagaarattttaagcttctatacagtgatattcactatttggtttatagtttgttgagtttagagaaacgtgtatagtcatgtagccactattagcatcaacatca

SEQ ID NO: 433899 - DNA, 201 bp, Homo sapiens
cccaagaactattgaatttttttttaatgggaagaaaattttaagcttctatacagtgatattcactatttggtttatagtttgttgagtttagagaaacrtgtatagtcatgtagccactattagcatcaacatcaaaacaatccctacccctaccttttttccttcttttttttttttttttttttcagatggggtctc

SEQ ID NO: 433900 - DNA, 201 bp, Homo sapiens
tccttttttttttttttttttttttttgagacagagttaagactctgtcgcccaggctggagtccactggtgcaatcttatctcactgcaacctccgcctyctgggttcaagtaattctcgtgcctcagcctcccttgtagctggggttgcaagcgtgcaataccatgcccagctaattttttttttctcttgtacttttt

SEQ ID NO: 433901 - DNA, 201 bp, Homo sapiens
tgatgttaaagcatgtgttatttatagaaccactagcgtgtacaacatttttgtgttatgaaaacttgattcactgagatttttattatattattgttgamtttatgtcaattgctgtttaatcatggagagcagtatctcatgatgtccagaaaaaccagtcccattccaggaaattatcactcccatcttccctgttaa

SEQ ID NO: 433902 - DNA, 201 bp, Homo sapiens
cagtcgtgtcccagcggatgtttggcaatggctgtgactgcatttttggtagtcacacctgggatggaggagtactggcagcatctagttgggggagctcyggggtactgttagttatgtaatgcacagaacaccccacagcacaaagaattatctagcccaaaatgtcagtagtccactgttaagagacagtggacaact

SEQ ID NO: 433903 - DNA, 201 bp, Homo sapiens
taaaaaatacattcccagtatatttcttaatgcatatcctggtgaaatttgtgaagaaacaacttttcaatctatattctttgagtgaataaatagcacamcttacattctatggttttcaactgggggcagtcgtgtcccagcggatgtttggcaatggctgtgactgcatttttggtagtcacacctgggatggaggag

SEQ ID NO: 433904 - DNA, 201 bp, Homo sapiens
ttaaaaaatacattcccagtatatttcttaatgcatatcctggtgaaatttgtgaagaaacaacttttcaatctatattctttgagtgaataaatagcacmacttacattctatggttttcaactgggggcagtcgtgtcccagcggatgtttggcaatggctgtgactgcatttttggtagtcacacctgggatggagga

SEQ ID NO: 433905 - DNA, 201 bp, Homo sapiens
gcaagcatttcattttgtgttgtgttttctctggaaatgcagagtcttaggccccaccacagacccactgaaggaacagctacattttaaccagaccccaragtgattgtgctttaaaaatttcagaagcactgatctagagtttccccttctaattttcctgtgtatctgttacaaggtgtgtccattgctgcaggtaat

SEQ ID NO: 433906 - DNA, 201 bp, Homo sapiens
agaccagaagcgtcagtgttgcctgcaagcatttcattttgtgttgtgttttctctggaaatgcagagtcttaggccccaccacagacccactgaaggaamagctacattttaaccagaccccagagtgattgtgctttaaaaatttcagaagcactgatctagagtttccccttctaattttcctgtgtatctgttacaa

SEQ ID NO: 433907 - DNA, 201 bp, Homo sapiens
gatccttgttcactgtggcctcgaactgctggactcaagcagtcaacctaccccagctgcccgagtagctggggctacaggtgtgtgccaccacacctagstaatttttttatgttttctagagatggggtctcaccatgttgcccaggctggtctggaattcctgtcctcaagcaatcctgaacctcccaaagttctgca

SEQ ID NO: 433908 - DNA, 201 bp, Homo sapiens
tttgcacccatgctgttgattgccaaatgtaatagtctgatcatgacgctaaagaaatgtgtctttaaaacattctgagggaaaattgtctttttttttttagtttttatgtttttgtgacagggtctcactctgtcacccaggccggaatggagcgatgtgatccttgttcactgtggcctcgaactgctggactcaagc

SEQ ID NO: 433909 - DNA, 201 bp, Homo sapiens
ccattgttttaatatgaacattattttaacattaattcactaacagtatccttttctattagcacataataaagacaataatcattaatatgtatttgcawtctcatgattcttattatgacactacacacatactgtttagttcaactgacattttttgtaccgagatcacacaccaagcagtgtgtgattttctttctg

SEQ ID NO: 433910 - DNA, 201 bp, Homo sapiens
gaactactccagaatgttttcttgtcattgcagctgtgctatcagaacattcttgtatacaaaattccagaccagttttgttgccaacataattctcatcrttttacccagttcagaactagttgtgtttgttggatgtaaaactgagaaaaagagttagttcttccttcacatcaccatcatctttggatagcacattag

SEQ ID NO: 433911 - DNA, 201 bp, Homo sapiens
gttggtgccagtcaagcaaagagtattatgatggaaaagaccagtccaagccccatcgctccggagtgggagccagtgttcttgctaattgtttctttctrcactaaccactcagatgtctaatttaattgttttgcagtcaaatactggatttgtaaccttcagggctgacatgctgcccagtttgcttcatcgggagaa

SEQ ID NO: 433912 - DNA, 201 bp, Homo sapiens
atactggatttgtaaccttcagggctgacatgctgcccagtttgcttcatcgggagaatagcaacaggtagacacatctcaaggctaaatctgctcatgtygccactgctctcataatgacacacatgcagtaagaagacttttgtaaggggatttgagtacacccaaatgaaattgtgacaggatgtttgtatggttaac

SEQ ID NO: 433913 - DNA, 201 bp, Homo sapiens
taattgtttctcccacctttttagactttccaaggtccattcttcctttttaatggtcaggagttcgagaccagcctggccaatgtggtgaaaccccaacygtactaaaaatgcaaaaaaattaggtggggtagtggcaggcacctttaatcccagctactcaggaggctaaggcaggagaatcccttgaacctgggaggt

SEQ ID NO: 433914 - DNA, 201 bp, Homo sapiens
caaaaatttaaacaacaaagaaaaagcaaatgatttccaaaatatcaataacaaatcagtaaataaaggtaatcagaagtttaacttccttgtggctgggyacaatggcttgtgcctgtaatcccagcactttgggaggcttcagtgggcggatcacttgaggtctaaaaactacaaaaaattagccaggtgtggtggaac

SEQ ID NO: 433915 - DNA, 201 bp, Homo sapiens
catgtggccagaccttcaagtccaaggccttcagacactaaggatgggaaaatgggtatttttctttggagaaaagctggaaatataaacatggcattttyaggtaaagtttcttccactagttgaattttcatgcagatatttttccttaacgttggtgccagtcaagcaaagagtattatgatggaaaagaccagtcca

SEQ ID NO: 433916 - DNA, 201 bp, Homo sapiens
gtggaaacagttaacagacatcaaagtggatgcctctgggatgagaactgacttggggagggctggaggagggaacatctctgtattagaaggctttgatkttattttattttgaaaccttatgcatgtataactttgataatatattcatttgtggattgccacattgttttcgaggaaaatacccatgtgatcttacat

SEQ ID NO: 433917 - DNA, 201 bp, Homo sapiens
acacccagttaactaacagatagacggtgtagtgagctgtccggaagacttagcaggttagcctagggaggaaggagaaaggggttctgggcacatggagkgagggggagggaaaagagtttgtttgaatctgtcctagattggggtagctttttcggagggaggccttgtcgtgtggacctgctgcatataaagacagga

SEQ ID NO: 433918 - DNA, 201 bp, Homo sapiens
aaccacaggacaaaaagaatgagaaaataggcagagtccaagaacactggcagccaagcgtcttcattccaatctgtaccctagaagtaggaggctggtgraaatgatttttctgagagaaatatttttttctagaaaaaaatatgtacagatattgacctttggggaccactaatgatataattaactctgcttaattat

SEQ ID NO: 433919 - DNA, 201 bp, Homo sapiens
gctggagtgcagtggtgcagtctcggcccactgcaacctctgcttccagggttcaagtgattctcctgccttagtctcccaactagctgggattacaggtrcacaccaccatgtccggctaattttttgtattttgagtagagacgggtttcaccatgctggccagcctggtctcgaactcttgaccttgtgatctgctcg

SEQ ID NO: 433920 - DNA, 201 bp, Homo sapiens
agacaggctctcactctgtcacccaggctgcagtacagtggcacaatcatagctcattgcttgcagcctcaaactcctgggctcaagtgatcagccttccragtagctgggactacaggcatgtgccatcacgcccagcaattttttttctttcttctttttttaggtagcgacagagtctcataatgttgcccaggctga

SEQ ID NO: 433921 - DNA, 201 bp, Homo sapiens
tttcatgttcctctgcctttgctcagctacttactcattgggtctcatatgccctttcctctcccatgataaatttttcccaacattttattatgaaaatwtgaaacatacagaaaactttaaagaattttctagagaatgcctgtatatccaccactcagattctaccattaacatttcacttgtacttgcatttttatt

SEQ ID NO: 433922 - DNA, 201 bp, Homo sapiens
aatcagttccctaccccgcaacctcctagagataaccattgtgattcttttgttctactacagttttccttgttctagaagatcatataaatggaatcaarcattgtatacttcatggcagtattgcctaaaaagggaaacattgcctgtaactcttcagggaatgcaaagtttttccatggattataaaagaaatccctt

SEQ ID NO: 433923 - DNA, 201 bp, Homo sapiens
aattaagtagcttctgtggtgtcgtgtcctttctctttcctacactgtttttctctcttttaaaaattaaagatgggccaggcacggtggtatgcgcctgyagtcccagcttcttgggaggctgaggtgagaggattgcttgagcccaggggttcaaggccagcctgggcaacatagtccctgtttttagaaaaaaaaaaa

SEQ ID NO: 433924 - DNA, 201 bp, Homo sapiens
cttgtttttgccttttaatcttacctgttgttaaaaagcctgttgctttccttcctcgtaaggaagtattaagataattaaaagtaacaagttggctaacragttcacatcttttaaaagttggaaacaaacttgtttcttaccttgcagaagcactgagtctgttctgtaattcaaatttctcctcagtaccattgtttt

SEQ ID NO: 433925 - DNA, 201 bp, Homo sapiens
tgatttaccatattttgttgaggggttttaagagtctattttcatgaatgatattggtctgtggtggttttttttttcctttttttcttttaatgcttttrtatggttttgatgtcagggtaaagctagccttacaaaatgagttaagaagtgttccctcctcttctgttttctggaagagattgtgtacaattggtatta

SEQ ID NO: 433926 - DNA, 201 bp, Homo sapiens
gtctttatttttatcagttttataattttcagcttataaatactacacgtattttgttagatatgtgcctatgtatttgtctgtgtgtgctattataaatkatattacaaatatttttatttctaatagttcattactagaataaagaaacataattttgatttttgtatattggtcttgtgccgggtaaccttataaact

SEQ ID NO: 433927 - DNA, 201 bp, Homo sapiens
aacctggaagacaaaggttgcagtgagccaagatcgtgccactgcactccagcctgggcaacaagagtgagatggtgtctcaaaaaaaggaaaaaaaaaaatcataatgggtacaatgtacactaattgggtgacaagtgtactaaaatcccagaattcactatatgtaggatggatatggattcactatatatagtggat

SEQ ID NO: 433928 - DNA, 201 bp, Homo sapiens
agagcttaagtcaagatttcatcaagacttgtgttttcccatgaatgtgaatctttcaatggctgttggagtatgtatgtactgttcttgcattctgaagwagttaaagaactctagaaagtactgattggccatctggtgtctatggagaaagaagtcctcacgtttgagggctgtacagtgaggccatcttgtagcagc

SEQ ID NO: 433929 - DNA, 201 bp, Homo sapiens
tatgaaaaagacacctgcacatgcatgtttatagcagcacaattcacaattgcaaagacatggcacaagcctaagtgcccactggaccaatgagtgaatamagaaaatgtggtatatatacatcagggaatactactcagccataaaaaggaataaagtaatggcttttgcagcaacttggatggagctggaggccattat

SEQ ID NO: 433930 - DNA, 201 bp, Homo sapiens
agcaagaccctgtctctcaacaaatcacaaaaattagccgggtgttgtggtgcatgcctgtaattccagctacttgggaggctgaggcaggaggatcacacttgagcctggggaggtcgaggctgcagtgagttgtgattgcaccactgcactccagcctaggcgatagagaccctgtctcaaaaagaaaaaaaaaaagat

SEQ ID NO: 433931 - DNA, 201 bp, Homo sapiens
tagcaagaccctgtctctcaacaaatcacaaaaattagccgggtgttgtggtgcatgcctgtaattccagctacttgggaggctgaggcaggaggatcacacttgagcctggggaggtcgaggctgcagtgagttgtgattgcaccactgcactccagcctaggcgatagagaccctgtctcaaaaagaaaaaaaaaaaga

SEQ ID NO: 433932 - DNA, 201 bp, Homo sapiens
cttttcatgttcctctgcctttgctcagctacttactcattgggtctcatatgccctttcctctcccatgataaatttttcccaacattttattatgaaaatatgaaacatacagaaaactttaaagaattttctagagaatgcctgtatatccaccactcagattctaccattaacatttcacttgtacttgcattttta

SEQ ID NO: 433933 - DNA, 201 bp, Homo sapiens
tgcttgaacccaggaggcggaggttacagtgagcagagatcaagccgctgtgcgaccgagcgagactccgtctcaaaaaaaaccatctcagaaaaaaaaartgatatccttaaaacaagatgctatttatgtaaaaggaataatcagagactaagagagaacacataaaattaaacatatgttagcaataagtttaataaa

SEQ ID NO: 433934 - DNA, 201 bp, Homo sapiens
cccaggaggcggaggttgcagtgagccaagatcacgctactctactccagcctgggcagcagaccgtgactctgtctaaaattaaaaaaaaaaaaaaaaaagaggaaacatcctttttgtctactgcttgattacccagtgatacagtttgtatagagaaggcaggttatgtgcctggtttttttctctttatttgccagt

SEQ ID NO: 433935 - DNA, 201 bp, Homo sapiens
ccttgctttggggcagtttgtcttcagaaccaaagtttagattttgtttagactgattctctactgacttaacaccataactggtttttttttttttttttagtatttaagaagcactctcgttcaatccagagttaacattatctttaaaggttttttattcaaaatgaatgtttgatatttgtatcaagttttatcaaa

SEQ ID NO: 433936 - DNA, 201 bp, Homo sapiens
cgttggtgccagtcaagcaaagagtattatgatggaaaagaccagtccaagccccatcgctccggagtgggagccagtgttcttgctaattgtttctttcygcactaaccactcagatgtctaatttaattgttttgcagtcaaatactggatttgtaaccttcagggctgacatgctgcccagtttgcttcatcgggaga

SEQ ID NO: 433937 - DNA, 201 bp, Homo sapiens
aaagaaaaaaaaaaagatgatagtaattggggaggagagaaagactgataagcaaggagtgaaacagcttccttgaatgagagcgtgtgagggagtgactmcaagtgtgattatgaggttggcaggtggcaacagagagcagtggctggagcatatgtagttatatggaaacacacctccaagaagcaggaagatttgcaa

SEQ ID NO: 433938 - DNA, 201 bp, Homo sapiens
acacttgagcctggggaggtcgaggctgcagtgagttgtgattgcaccactgcactccagcctaggcgatagagaccctgtctcaaaaagaaaaaaaaaaagatgatagtaattggggaggagagaaagactgataagcaaggagtgaaacagcttccttgaatgagagcgtgtgagggagtgactccaagtgtgattatg

SEQ ID NO: 433939 - DNA, 201 bp, Homo sapiens
tttgtgaagaaacaacttttcaatctatattctttgagtgaataaatagcacaacttacattctatggttttcaactgggggcagtcgtgtcccagcggaygtttggcaatggctgtgactgcatttttggtagtcacacctgggatggaggagtactggcagcatctagttgggggagctctggggtactgttagttatg

SEQ ID NO: 433940 - DNA, 201 bp, Homo sapiens
ctcaagcagtcaacctaccccagctgcccgagtagctggggctacaggtgtgtgccaccacacctagctaatttttttatgttttctagagatggggtctyaccatgttgcccaggctggtctggaattcctgtcctcaagcaatcctgaacctcccaaagttctgcaataacaggcataagccatcacacctagccagaa

SEQ ID NO: 433941 - DNA, 201 bp, Homo sapiens
acgcacgccaccacgctcatctaatttttgtatttttagtagagacgggttttcaccatgttggccaggatgatcttcgatctcctgacctcgtgatccayccgcctcagcctcccaaagtgctgggattacaggcatgagccactgcacctggcccccttcatggtttctgatgcaaaattggtaggcatttgaattctt

SEQ ID NO: 433942 - DNA, 201 bp, Homo sapiens
cccttggcttattgtccaacattggcctactcttccaaatccacctctttatcccaggaacaagctgcttctatgccaagggcatggcttcctctttgcasattgtctcatatctctgacctggaaaaaagggggtttttcattctgctagctttttagtgctgctttgagatcattattctagagccctctgcagtaatg

SEQ ID NO: 433943 - DNA, 201 bp, Homo sapiens
agaagcgtcagtgttgcctgcaagcatttcattttgtgttgtgttttctctggaaatgcagagtcttaggccccaccacagacccactgaaggaacagctrcattttaaccagaccccagagtgattgtgctttaaaaatttcagaagcactgatctagagtttccccttctaattttcctgtgtatctgttacaaggtgt

SEQ ID NO: 433944 - DNA, 201 bp, Homo sapiens
tacctcaaggcctttgacttgccattgctcatgagaccgattgcttaccatcactcaggatctcattcaaaacttcattcctggaaaaggtccttcccgaycatcaagctagaggagcttgctgcaccccttctctgcccacagctatggatctccaagtgtgggcttcagaccagaagcgtcagtgttgcctgcaagcat

SEQ ID NO: 433945 - DNA, 201 bp, Homo sapiens
gaggctaaattcgccctaatttaaaggctactctggatctactctaacaatgaaaaagcaagtcttggaagatacagccgatttaaagaatcttacctgtktgtgagaacaaagtccagccctatttaaagaaaaacacaaaatccaacacccaaaacacaaaactcatagtgtttggcattcagtaaaatgaccaggcat

SEQ ID NO: 433946 - DNA, 201 bp, Homo sapiens
cagtgtgtgattttctttctggtgcaagctgcttaatctggggaactactccagaatgttttcttgtcattgcagctgtgctatcagaacattcttgtatrcaaaattccagaccagttttgttgccaacataattctcatcgttttacccagttcagaactagttgtgtttgttggatgtaaaactgagaaaaagagtta

SEQ ID NO: 433947 - DNA, 201 bp, Homo sapiens
gaagattctcaaagactgggtgcccatgtgactgtggaaaagatatttgttggtggcattaaacaggacaccgaagaacatcacgtaagagattattttgwacaggataggaaaattgaagtgattgaaatcacaactgactgaggcagtggcaagaaaagggtctttgcttttataacctttgatgaccacgactccgtg

SEQ ID NO: 433948 - DNA, 201 bp, Homo sapiens
gcctgaacctgggaggcggaacttgcagtgagccgagatcgcgccactgcactccagcctgggcgacacgaatgagactccgtctcaaaaaaaaaaggtgraaacagttaacagacatcaaagtggatgcctctgggatgagaactgacttggggagggctggaggagggaacatctctgtattagaaggctttgatttta

SEQ ID NO: 433949 - DNA, 201 bp, Homo sapiens
aatacttaactctccctcttcggtttgtaatttgtgattgtgagcttattttttttcttttttttttctttttttttttttttgagacaagagtctcactstgttgcccaggctggagtgcagtggctcgatctcggctcactgcaagctccgcctcctgggttcacatcattctcctgcctcagcctcccgagtagctgg

SEQ ID NO: 433950 - DNA, 201 bp, Homo sapiens
agaattcagcctcttcatttgagtccataggtacttggtgtatttagtacattatattatgtttcagagtatgatgtttttccctgttctttaagcttctkgagggtaggggctgtcattcagtcacaagaaataggtgttggaagcagtaagggctttgaggttctctatatgttaggttggtgcaaaacttcaaagcct

SEQ ID NO: 433951 - DNA, 201 bp, Homo sapiens
caggactgacgcccgacagactccaccctaacagtctcaagcccctttccattcagtttattttgcagcaggtttttattattattattattattattatwcacaacagacactttccctaagaatctcaaactgatttttaaaaatccggtaaattagaaggggccctcgctattttctgtgtcagtcttcattttaaat

SEQ ID NO: 433952 - DNA, 201 bp, Homo sapiens
tcaggaggtagaggttgcatgagttgagattgtgccactgcactccagcctgggcggtagagtgagactccatctcaaaaaccccaaaacctggcattatyaactgcagagtcaacctgtataattttaacaaaacagagcagtatttctgttctcaattttcagagttggcaggaagatcagtattcaaacactgcagca

SEQ ID NO: 433953 - DNA, 201 bp, Homo sapiens
tctcctgcctctgcctccagggtagctgggactacaggcacccgccaccacgcccagctaatttttgtagttttagtagagacggggtttcaccatattgrccaggctggtcttgaactcctgaccttgtgatctgcccgcctcagcctcccaaagtgctgggattatatgcatgagccaccacacttagcctaattaatt

SEQ ID NO: 433954 - DNA, 201 bp, Homo sapiens
tctggggtactgttagttatgtaatgcacagaacaccccacagcacaaagaattatctagcccaaaatgtcagtagtccactgttaagagacagtggacarctgtctccttctgcatagagaagtctccttctgcaaatactaatgccattggaaaacgaatactttgccctaccttctggagaagagaatatatagaaat

SEQ ID NO: 433955 - DNA, 201 bp, Homo sapiens
tctcacagcccatataccatggagtccaagagagtggtaacagcattctttctgcttccccttgctgttttcaagctaattcttttccacccctatattgktttattattttcattcttagaattctcttgtttgcatctacttactctccctctggctgggtgttgtgtctcaaccctgtaagtccaggactttgagagg

SEQ ID NO: 433956 - DNA, 201 bp, Homo sapiens
atgtatttatcttgcagaagtagaaagatgtgtgcacaaggatattcatagcagtacagtgtaaaatagcaaaaaaaaaatggaggtaggttacaaatagrtaatggttgaataaattagaaaatactatgaaatactatgtagccattaaaggaaaaaggagatctatgtttatatcctagaaagataaagacactattt

SEQ ID NO: 433957 - DNA, 201 bp, Homo sapiens
gggaggagaattgcttgagcccgggagacagaggttgcagtgagtcaagatcatgccactgcactccagcctggccaacagagcgagactgtccccccccmaaaaaaaaaagagagagactgcattcaaagaggaccaagactacagtgaaattaaaactgtttgctggctgggcatggtggctcacacctgtaatcccag

SEQ ID NO: 433958 - DNA, 201 bp, Homo sapiens
gagcccaggagttcgagacgagcctggccaacatggcgaaaccctctctacaaaaaaaaatgttttaaatttaaaaacaaaaataataaggaatttttgtraaaagaaatttgtgggtaaatattgagagaaaccagtaaaatgagttgcttctaaggaggatacctcaggggtcagaagaatgctgctttttgttccaag

SEQ ID NO: 433959 - DNA, 201 bp, Homo sapiens
agggaggagaattgcttgagcccgggagacagaggttgcagtgagtcaagatcatgccactgcactccagcctggccaacagagcgagactgtcccccccmcaaaaaaaaaagagagagactgcattcaaagaggaccaagactacagtgaaattaaaactgtttgctggctgggcatggtggctcacacctgtaatccca

SEQ ID NO: 433960 - DNA, 201 bp, Homo sapiens
agagttaagactctgtcgcccaggctggagtccactggtgcaatcttatctcactgcaacctccgcctcctgggttcaagtaattctcgtgcctcagcctyccttgtagctggggttgcaagcgtgcaataccatgcccagctaattttttttttctcttgtactttttagtagagaggggctttcaccatgttggccagg

SEQ ID NO: 433961 - DNA, 201 bp, Homo sapiens
ggaggtgtgggtatctcagagagctggtaatgctgtcagcagcaaaactgcaaatgaaagagcatcctgtggggctgctccctccacagatctgaaatgtrtatgtcagagcccatcttggctgctataactatgaaaaattgaatttttatgaaatatatatcatattcttaattctgatagtgaattttctgtagagga

SEQ ID NO: 433962 - DNA, 201 bp, Homo sapiens
agacagagttaagactctgtcgcccaggctggagtccactggtgcaatcttatctcactgcaacctccgcctcctgggttcaagtaattctcgtgcctcarcctcccttgtagctggggttgcaagcgtgcaataccatgcccagctaattttttttttctcttgtactttttagtagagaggggctttcaccatgttggc

SEQ ID NO: 433963 - DNA, 201 bp, Homo sapiens
tcagatttttgtatacatttaggtagttggtaaaataggcatagcatttcccacataacttgattctgccatacctgcctagtacatgtcatgccatatayacctccccatgtgagcttgacagcacctagataggttattactctctgttcagcaagacaaatcactggtcgtgcacttgcatgtcatggcattgttgaa

SEQ ID NO: 433964 - DNA, 201 bp, Homo sapiens
ttgcagtttgtgtattccttatgacagctttctggaaggaatagtcaagtgtcctgctcggcaaagtcagtgcattgcaaaacttcccagtagatagaaagaagctagaagaaaggcaggaggagggtctttctctgtcttgcatgaaggtgcctgcaggcttagggggccctgcctgtggggcacttacatccaaacttg

SEQ ID NO: 433965 - DNA, 201 bp, Homo sapiens
cttgcagtttgtgtattccttatgacagctttctggaaggaatagtcaagtgtcctgctcggcaaagtcagtgcattgcaaaacttcccagtagatagaaagaagctagaagaaaggcaggaggagggtctttctctgtcttgcatgaaggtgcctgcaggcttagggggccctgcctgtggggcacttacatccaaactt

SEQ ID NO: 433966 - DNA, 201 bp, Homo sapiens; identical to SEQ ID NO: 42415

SEQ ID NO: 433967 - DNA, 201 bp, Homo sapiens
agcaatccagaggcagggcagatgtcccggcccagtctccaccaaaacccgcctggtggtggggaggcaggcgttgtccccttcctaggccctccttcccrtgtgggctgagagccccgagctcctcttgggccttgcctcatcagggcctggccctcactgggatgtgactggagtttcaaggccatattccttgcaccc

SEQ ID NO: 433968 - DNA, 201 bp, Homo sapiens
ctacagagcgagactccacctcagaaaaaaaaaaaaaaaagagtgaattggccctgaattcagatgaggggctcacacgggacttgttgccagacaagccragagtatttgccagagcggccatgtggaggtcatggccaggtactgtctgctgcttccctgggcagggctggtcagacagcatcaggaccagcccctccc

SEQ ID NO: 433969 - DNA, 201 bp, Homo sapiens
cccagcagggctccaggagtggaactctgggagggctcctgggcagctggagggcagctggcccactgccctgaaggctcagccggcacctgctgcaggarctgatctgcctccgggccatccgtgatgtgaacgtgcccaagttcctgcaggaggacctcaagctcttctctggcatcgtgtccgacctgtttcccacca

SEQ ID NO: 433970 - DNA, 201 bp, Homo sapiens
accaccatgcccggctaatttttatattttcagtagagatggggtttcaccatgttggctaggctggtctcgaactcctgacctcaggtgatccacccgcygcgccctcccaaactgctaggattataggcgtgagccaccgcgcccagcctgacacacgtattttactgtggacctagggtttcctgtttgtggctggtg

SEQ ID NO: 433971 - DNA, 201 bp, Homo sapiens
aggaggtgcgggaggtagtgctcacccacctgcgggagaaggagatcctggacagctcgctgcccagcagcatcatcattgggcctttctacatcaacacygacaatgtcaagcagagcctgtccaagaaacgcaaggccctggccacttccgtgctggacatccttgccaagaacctgcataaggaggtggatagcgtaa

SEQ ID NO: 433972 - DNA, 201 bp, Homo sapiens
ccctaagccagggcatggaaagacccaagccagaagaggccatgagtcccaggaacgggtctgggctgggtccatcagaaatccacaggggcagggcacaraccacaggccatgggctaaagtggtaggtacgtgatgatgggcaggcaggcagcattaggcagctctctcagaagggagttttgtgcctcctaacccaga

SEQ ID NO: 433973 - DNA, 201 bp, Homo sapiens
ttgttgcaaaggccaccatgtgtctgggagggctggggggacactgccctcaaatagactccctctcatcccgaaccctcgcccctcatagtaggatgagrgtctcagttcattcccagccagccaccccctccagcaggtcctttggtgggcctgcaggaggagctcctctgggaagccatggccagtcaccctggccac

SEQ ID NO: 433974 - DNA, 201 bp, Homo sapiens
gggaggcccatcctgaatgcaggggtcaccactgaaggtatgaggtcctgccgctgccccaggcagaaccccagcttgggcctggccggcctgtgactgargccaactccgcccagggcactgccagatcaggtctgaattctacttttctgtttgcccaatgccctgaccggtgaggaccagaggactcatcactcagag

SEQ ID NO: 433975 - DNA, 201 bp, Homo sapiens
tgcgagatgagatggggaggcccatcctgaatgcaggggtcaccactgaaggtatgaggtcctgccgctgccccaggcagaaccccagcttgggcctggcyggcctgtgactgaggccaactccgcccagggcactgccagatcaggtctgaattctacttttctgtttgcccaatgccctgaccggtgaggaccagagga

SEQ ID NO: 433976 - DNA, 201 bp, Homo sapiens
tggtaggattttatttatttatttatttatttatttatttatatttattttttgagatgaagtcttgctctgtcactcagtctggagagcagtggtgtgakctcagcttactgcaacctctgccctctgtgttgaaatgattctcctgcctcagcctcccgagtagctgggactacaggtggttaccaccacgcctagcta

SEQ ID NO: 433977 - DNA, 201 bp, Homo sapiens
catggcggggggcactggtggagtttctcctcctgtttcagaggaccccaagagtcagaagctgaagtacaaatggtgcgaggtcggcgtcctggactacracgaggagaagaagctatacctggtacacaagacagacgagaaaggcctggtgcgagatgagatggggaggcccatcctgaatgcaggggtcaccactga

SEQ ID NO: 433978 - DNA, 201 bp, Homo sapiens
gagacgccagactggtgatctctgagacccattcccagcgatgctgccagcactcagaggccccttcctgcccccatggcggggggcactggtggagtttytcctcctgtttcagaggaccccaagagtcagaagctgaagtacaaatggtgcgaggtcggcgtcctggactacgacgaggagaagaagctatacctggta

SEQ ID NO: 433979 - DNA, 201 bp, Homo sapiens
tttcccttttctgcagtttttcttagactgcccttgttctctgtgaaaacttgcagcaagagtgtgagagacagctcactggagatagatttttttttttwaatttacagataatttgaagtctaggcattctgctgattctagttgtgctaaaggtgtgggttttggtagtgttagttttttcttccttccttccttcct

SEQ ID NO: 433980 - DNA, 201 bp, Homo sapiens
ggagcaatcttagctcactgcaaagggcttgacttttatatatctgcatcagtggttgatcataactgggacgtgttcccacacctaaaccaactgcagtyggggcaagctccaccacgactggcttggactagctgagatgtacccctgtagctggggctgtagtcatcttcccctgagtcaagtgaggaaggatggaat

SEQ ID NO: 433981 - DNA, 201 bp, Homo sapiens
caccccacggggctgcccctccagctcatcaacgggctgtcggatgagaaggtgcgctggcaggagacggtggagaacctgcagtacatgctcaacaacawctccggcgatgtcctggtggccgctggctttgtggcctacctgggccccttcacggtaagaagtccccacctctgtctctgaccagcctcgccttcccaa

SEQ ID NO: 433982 - DNA, 201 bp, Homo sapiens
cagagcccttcccctgtcacccttgagaagcagcctcttgagacccaggcttcccacctcaggacaacattggggatgtggtgatcaaagccatccagccrtacatcgataatgaagagttccagccagccaccattgccaaggtgtccaaggcttgcacctccatctgccagtgggtgcgcgccatgcacaagtaccact

SEQ ID NO: 433983 - DNA, 201 bp, Homo sapiens
tagctctgaggacatcaaccagcagctgcctgtggagagcaagcgctaccagaccatggagcggatctggaagaagatcatgaagaatgcctacgagaacygggaggcaagctcaatgagggtgggaggggcagctgggatccccaagggccctggtcacattgctggtagcctcctagtctcttccctccctacacagaa

SEQ ID NO: 433984 - DNA, 201 bp, Homo sapiens
cgcaagaacacggaagcactgctgctctacaacttgtatgtggactgcatgccctctgacggccagcatgtcatcagtgaacagagcctgagcaagatcargcagtgggccctgagcacgcctcggatgcgcaaaggcccctcgtgagtccccgctcggccttccctattctgggcatcaccttcttcagggaaccttccc

SEQ ID NO: 433985 - DNA, 201 bp, Homo sapiens
ggtcccaggcagtaaggagagccgagctccctgcaggctgctgggcaatgtcctgccagccctggcttgcattgcttctggtgaccttcattcactcaatyattgagttactcagtggagaaatattctttgaacacttgccatgaaccaggcatggttctaggggaacaagagaggcccagtccctggtctcatgggaaa

SEQ ID NO: 433986 - DNA, 201 bp, Homo sapiens
cgtcagcaccatgcggccctatatccaggagcagggcctacagcccaccaaggccaacctcatggctgcttacacagggcgtgtgcgcagcaacatccacrtggtgctgtgcatgaggtacaggcagctgtcgccaggctgcgctggggcagcggagctgggtgtgtacatgggctggccccggggacactggatgccatg

SEQ ID NO: 433987 - DNA, 201 bp, Homo sapiens
gtaggcacctcactgaagagcttcagtgccactccggcaaactatggaaaggcggggctctgggaacgccagtcactcttcagggagaaggcaggagtcayggccctccttcaagcaccctgtggatctgtcctgtcccctggtttggccaggcagggtctgatactggcccttggcccctatccctgcagggctggtgag

SEQ ID NO: 433988 - DNA, 201 bp, Homo sapiens
agtctcagagcaggaccccggggcccaagaaccctccttgctttcagctcacctgccagccttcctagactcagcttcctgcatgtcatgtactccggatrcaggctggggtgtggacagtgggcattccaagaggttctggtacctaccctttccttccttggtgccccagggcaggctgtggacagaccttaagcttgt

SEQ ID NO: 433989 - DNA, 201 bp, Homo sapiens
gggccccggctggggttcacagggtgtggagcccctgattcccccatctcccatctctatgggcagggttctagagcacctcagcagtcttgccagagaastgagcctggactatgagcgcagcatgaacaagatcaactttgaccacgttgtctcttccaagcccgagaccttctcctacgtcaccctccccaagaagga

SEQ ID NO: 433990 - DNA, 201 bp, Homo sapiens
gttctgggattataggcattagccactgcgcccagcctgggttactttctctttctggtaggattttatttatttatttatttatttatttatttatatttattttttgagatgaagtcttgctctgtcactcagtctggagagcagtggtgtgatctcagcttactgcaacctctgccctctgtgttgaaatgattctcc

SEQ ID NO: 433991 - DNA, 201 bp, Homo sapiens
caaagttctgggattataggcattagccactgcgcccagcctgggttactttctctttctggtaggattttatttatttatttatttatttatttatttatatttattttttgagatgaagtcttgctctgtcactcagtctggagagcagtggtgtgatctcagcttactgcaacctctgccctctgtgttgaaatgatt

SEQ ID NO: 433992 - DNA, 201 bp, Homo sapiens
gttcacctattcatttcaggatttggagtgatttgcaagctttctagttcaagggcgccctcttctgtcagtattgcacattagttttttttgtttgtttktttttagaatgtgctctgtgtgtgtgtctgtgtgtgtgtgtgtgtgtgtgtgtgtacacacgtgctggggagagggatgtgggtcctccaaggtttttgt

SEQ ID NO: 433993 - DNA, 201 bp, Homo sapiens
ggcagaggctctggaggccggcaacctcagaagccaactgttcccccagctctgccagcaggttggagtcaagaggacccctgtctgtccccctccacccsctacatggcacaggagggcccagtccctccggaagctttctcctatagtgagcctggaagaggcctggggttgggtctaaaggggaggtcagacaccctt

SEQ ID NO: 433994 - DNA, 201 bp, Homo sapiens
cctggagtatcacagatgacagcaccatctagaaatctccctgtagacactggctttggtgtccagtgctctgcccaacatgctggtggggtgaaatgtcycagtcattgggacaaaccccagcttggaccctgacagtccatatcacacccctccctgcccctcccctccccaggaggttctggaggagtggctgaactg

SEQ ID NO: 433995 - DNA, 201 bp, Homo sapiens
gccttgaccttctgggctcaagctatcctcatacttcagcctcctgagtagctgggaccacaggtgtgagctaccacgcttggttaatttttgtatttttktagagacagggtgtccctatgttgcccagcctggtctcaaacatttgggctcaagcaatctgctcacctcagcctcccaaagtgctggcattataggagt

SEQ ID NO: 433996 - DNA, 201 bp, Homo sapiens
tgaggccaacctcggtggatctctggatatgcccgtgtcctgtggtagtagagacttggttggtagggccaacctttctggcagggtccctgccgaggggkgcccactgggtctgagtcttccccacttggtggctgggcctgcaggtacgtgccatgcagcggccacccccgggtgtgaaactggtcatagaagctgtgt

SEQ ID NO: 433997 - DNA, 201 bp, Homo sapiens
gacactgtccaaccagatcaacatcaatgtcaggcccaaggccaacctgacctttgctcgctgcctggagatgaacctgcaggaccatatcgagagcatcwgcaaggtggctgaggtggctggcaaggagtacgccatcgagcaggtgggtagccaccagcgggcccagccactccagccaggccctgccggacagcctga

SEQ ID NO: 433998 - DNA, 201 bp, Homo sapiens; identical to SEQ ID NO: 229892

SEQ ID NO: 433999 - DNA, 201 bp, Homo sapiens; identical to SEQ ID NO: 229894

SEQ ID NO: 434000 - DNA, 201 bp, Homo sapiens
atacagtatacaagataaaacatggtacatctatgtaaggcacttaccatgaatggagcctgcagggctggaagttgcggtggttgagtcagtgagtgagyggtgactgaacgtgaagacctaggatattactatacactactgcggacttgataaatactgtatacacttaggctacactaaatttattttaaatttttc

SEQ ID NO: 434001 - DNA, 201 bp, Homo sapiens
taatttaactcaattgttcccagatcgccaattcctggtgataaaaccagaaggtttggggctgcattagccttaaatgcaccaagtagcagcctccatcraggtgctctgcttacaccccttcacatggccctggtctggggtggtggcccaggtgggaggaggggtgagcagggagaggctctgctggggacctcttgt

SEQ ID NO: 434002 - DNA, 201 bp, Homo sapiens
ttttgtgtgcacaacacacaccatcacacacttgctcacaaacacaaatccccatcatcacacacattgacaagcacattcactgtcatacacacccccarcaacctctcttgtgtacacattttcaccacacagaaacacactctcctattgtcacccatccacaaccactgtcacacctcaccatgcccacttgatgcc

SEQ ID NO: 434003 - DNA, 201 bp, Homo sapiens
tgggctcactgaaatgggaagagcagggatggaagagggaatcagtgccacccccgtggggtataaatcaggaaacgaatccagggaggagaaagagggakcatggcctggctctggctttcacccacctcccctcctctcctctctgcggccctgagtgtctctcgcctggtggtccctgtaaggaggtaaagctgagtc

SEQ ID NO: 434004 - DNA, 201 bp, Homo sapiens
gcaccctacgccaggcgctgggcaatgcactcctgctgggcgtgggtggcagcggccgcagctccctcacaaggctcgcctcgcacatgtgagcgcctccrgggcgtgctgggcagtgggcggccagggctggctggtcggtttgactgacccatgcttttgcacagtggtagaggcctcgggcaaccctgaagtaggccc

SEQ ID NO: 434005 - DNA, 201 bp, Homo sapiens
agaagtgcaggaccccagtggacgctcaggagtcagatctgaaaggggattcccccaccagtcaccagcacactcttgtcaaacagggcaggtcaacaatrggaacccatcccaggtactttgagcatcctagatggggcaggtggggcccccagcccccctagaatgctgagtctttgcttcttccctgggcagcctgta

SEQ ID NO: 434006 - DNA, 201 bp, Homo sapiens
aaatgaagggagagaactgcagataggtgtgagggttctggctgaatagaacaggtggtgttcagagtccgaggctggaggagctcacctggtgggaggtrtagctggggaagacgaggggtctcaggacccctggcacaggccaacgtttagaagtcagggaggtgaggaagatccaggggaagggtgtcccagaagctc

SEQ ID NO: 434007 - DNA, 201 bp, Homo sapiens
tgtctctggacctcatttggattcctgactttccagccccatcggagaggtcttccgagctcgtctgaggcagtttccctccctggtcaactgctgtaccrtcgactggtttaacgagtggccggcagaagccctgaagtctgtggccaccgtgttcctcaatgagatcccagaactggaatcctcccaggaagaaatcca

SEQ ID NO: 434008 - DNA, 201 bp, Homo sapiens
acgtgatgatgggcaggcaggcagcattaggcagctctctcagaagggagttttgtgcctcctaacccagattctgggtattgttatgtgtgtggggtgtrtctgtgtctacccacaggtgatgtttgaggcaccatcagagttaacacaaagaccccaagtagggtgctatatccatggattattcctggaaggtgcccg

SEQ ID NO: 434009 - DNA, 201 bp, Homo sapiens
gcaggagtgacaagtggggaatgtgacaagtggggatgtgctccattggagggtaactctgagggctggggcagagcaagccaggggcttccatgttggcytcctctctcctagggctacctctcctacatcaagagcctcccactcaatgatatgcctgagatctttggcctgcatgacaatgccaacatcacctttgcc

SEQ ID NO: 434010 - DNA, 201 bp, Homo sapiens
caatgtgtgttccgacctgagaatgctggacagcctgcgggactgcaacaagattctggacctggtgcagaagggcctcagcgagtatctggagaccaagmggagcgccttccccaggtgggcgccacctggccatgcccactccgccactgtctgcccacaaggctgaggtgtccagggccctgctcaggctagggtgcg

SEQ ID NO: 434011 - DNA, 201 bp, Homo sapiens
gccttccacccctgcacccctctgctccctctcagtgcccctcctgctctagccggcctcgtcctcaggctgcagccctgaggtccctgggggctcaggcrggattctggagtctttcctttccacacacactccagaaagtgggactcactcctaatcatcgggatggctgttctggttcccagcactcactgggtgcca

SEQ ID NO: 434012 - DNA, 201 bp, Homo sapiens
aagccaactgttcccccagctctgccagcaggttggagtcaagaggacccctgtctgtccccctccaccccctacatggcacaggagggcccagtccctcyggaagctttctcctatagtgagcctggaagaggcctggggttgggtctaaaggggaggtcagacacccttgaagtgtctcacaaccagccacccacagga

SEQ ID NO: 434013 - DNA, 201 bp, Homo sapiens
cttgcccatcaccaatgtaggcctcctgcaggcaccctgcccccatgcccccaggcttgaggaagcagctcatgtagatgcagctgccaggaggcagggcyctggcatttgggggcaggacccagcaggctgcagagtggagatagcccaaccctggccctcaggttgaggaggcccctagtacaaggcaggtggcctgag

SEQ ID NO: 434014 - DNA, 201 bp, Homo sapiens
gcctggtgggatgcccctgcctggtcttgccactccaccacttcagccgcgatatttctcccaatccccacccccatcccggccagatggattgccagcarctggccttctaagatccttgggcagatagagctggtgcagcagcagcatgtggaggatgaggagaagttccgcaaaatccagatcatggatcagaacaac

SEQ ID NO: 434015 - DNA, 201 bp, Homo sapiens
tgaagttctcattaccacctgtctgtgcaggagcggattgtgaaggtcatggatgactaccaggtcatggatgaattcctctacaacctcagctcagatgrcttcaatgacaagtgagtgggagcttggcccccatgccaggtgcggggtggagcatgaggggagctgctgagctgcagaggctcccaaatgccccagctg

SEQ ID NO: 434016 - DNA, 201 bp, Homo sapiens
gaccagaatggggtggggccaggaagtcctgggtagccacagcttgttgcccactgtggcctttgaacggggaattgtgcatactcactggttctgcccaytcctgtgctcctggagtgctccctggtgggtctcaagggaggcgcctgggctcggggtccctcccgggtcctgcctgtccctgggaggttgacacatact

SEQ ID NO: 434017 - DNA, 201 bp, Homo sapiens
gtgggttctactccgacatcctcagccctggaaccttagatcaacttggggtgagtatggcagccatcccctaccaagcctcaacccttcctctgggctcygttcacccatcctttcatccttctccccatcagtcagtccatctgttcatttagctgtctatcgatctatccatctgtctttctatccatctacccccta

SEQ ID NO: 434018 - DNA, 201 bp, Homo sapiens
aacaagttcccagtgtccatcctgcagaacggctccaagatgaccattgagccgccacgcggtgtcagggccaacctgctgaagtcctatagtagccttgrtgaagacttcctcaactcctgccacaaggtgaggcacacttggtgcaggcctaccctacctgcccccgtccccgctcctcacctcccctgcctcccacct

SEQ ID NO: 434019 - DNA, 201 bp, Homo sapiens
tccactctaatggcagagctaccagtctcaggggagtgaaagcctcagctgtggcaggcttggtgcagcagggagtcccagcgtgttagggaggagggccrgatgaagctgggggtgctctgggggtgagctctgtttgctgttcacatgtgcactgtgtgtcccaggcgctcttccgacccgtggccatgatggttccag

SEQ ID NO: 434020 - DNA, 201 bp, Homo sapiens
cctccatttgtgccccttggcatagaatacccctccccctccccttggcccccagcccactctagccctgctctctgggagcctcactctcaggcggtccstctcccagtgttacagagtcctggcagctgccatgacgtcactgaaagggcagccatccatcagtggtggcatgtacgaggctgtcaactactacgtgct

SEQ ID NO: 434021 - DNA, 201 bp, Homo sapiens
tgtgccaccatgcccggctaattttgtatttttagtagagacaagatttcaccatgttggtcaggctggcctcgaactccctacctcaggtgatctgcccrccttggcctcccaaagtgctgggattacaggcgtgagccactgcacccagccctcaatgatactttttaaagcatgctgaggaagaacatattcaggagc

SEQ ID NO: 434022 - DNA, 201 bp, Homo sapiens
tcctcgccttggtgcacagatgatgcaggtgatagaggagtacatagaggactacaaccagatcaacacggccaagctgaagctggtcctcttcatggacrccatgagccacatctgtcgcatcagccgcaccctacgccaggcgctgggcaatgcactcctgctgggcgtgggtggcagcggccgcagctccctcacaag

SEQ ID NO: 434023 - DNA, 201 bp, Homo sapiens
agagcatctcaggggtctacactgagtccagctcttgaatccttctaaaagcaaatacctggcagtcaatgtggacctgtgtctatgtgcacaggggtggrgggctctggagcaaaatacacagttcccatcagatgtgcccaggcctccagggaccccaaaatgctctgaccccagtctggtcagcgaacctcaggaatc

SEQ ID NO: 434024 - DNA, 201 bp, Homo sapiens; identical to SEQ ID NO: 229890

SEQ ID NO: 434025 - DNA, 201 bp, Homo sapiens; identical to SEQ ID NO: 42414

SEQ ID NO: 434026 - DNA, 201 bp, Homo sapiens; identical to SEQ ID NO: 229893

SEQ ID NO: 434027 - DNA, 201 bp, Homo sapiens
tctggccctccccggacccctctcctgctgcagggctgcccgtagcccttgccacctatttgctgtctttgttacttgctaatccactcattgtcgtcctwaccaacaagagtgtcagcttgagggcaaggagtgtgtctgtttgggtcactctgtgcccagtgcctgtgtcaacagacaggcccctctcctgccctttct

SEQ ID NO: 434028 - DNA, 201 bp, Homo sapiens
gctaatccactcattgtcgtccttaccaacaagagtgtcagcttgagggcaaggagtgtgtctgtttgggtcactctgtgcccagtgcctgtgtcaacagwcaggcccctctcctgccctttctttccattttctccacttctccgccaagtttccactgacagaatttgggttcccagcacagaattggatagttttcaa

SEQ ID NO: 434029 - DNA, 201 bp, Homo sapiens; identical to SEQ ID NO: 229896

SEQ ID NO: 434030 - DNA, 201 bp, Homo sapiens
gagcaggaccagatcgtcagcaccatgcggccctatatccaggagcagggcctacagcccaccaaggccaacctcatggctgcttacacagggcgtgtgcrcagcaacatccacatggtgctgtgcatgaggtacaggcagctgtcgccaggctgcgctggggcagcggagctgggtgtgtacatgggctggccccgggga

SEQ ID NO: 434031 - DNA, 201 bp, Homo sapiens
cctgcccctggtggggtcctcttcaatctgcctccctggggcccaggccccctgcagtcaccactaacagactaccacactataaccagggggccaggacrcggggtaagacagccagctccaggagactcccggcatgcccttgctctctctgggtaccggtttcttcacttatctctgaaaaccagcctgtggtccagc

SEQ ID NO: 434032 - DNA, 201 bp, Homo sapiens
cttccgagctcgtctgaggcagtttccctccctggtcaactgctgtaccatcgactggtttaacgagtggccggcagaagccctgaagtctgtggccaccrtgttcctcaatgagatcccagaactggaatcctcccaggaagaaatccaaggactggtgggtgtcttgctgaagctcaggcccttggggagacctgttta

SEQ ID NO: 434033 - DNA, 201 bp, Homo sapiens
ggccctctttgtcagcttcctggaggtgagtgaggccacgggtatgtctgaccctggcagggcagcagggcactgtggctgccagccatgagaactgggtrcctactccctgcaggaatccatctccttcgttcggtcctcagtgaaggaggtgatcgcctcaaccaactgcaacctgaccatgagcctcctcaagctgct

SEQ ID NO: 434034 - DNA, 201 bp, Homo sapiens
cacactctcatgaagccctatgcatttcgtggtgcagcggaaagccctgccgagacagtgagagtgacagccaccactgtcagagccctaactgcgtgccyggcacaggactctggcctgggaagcagtcagccttctgattctttctactcccaaatgaggaggcagaggcccagagaagtcacatctcttgccctaagg

SEQ ID NO: 434035 - DNA, 201 bp, Homo sapiens
ccggcaagagtactgtaagcagagccaagcttggcagccagtgtccggatagtgggcctgtaggggggtgcagcttcaacaggggttggcctccatttgtrccccttggcatagaatacccctccccctccccttggcccccagcccactctagccctgctctctgggagcctcactctcaggcggtccgtctcccagtgt

SEQ ID NO: 434036 - DNA, 201 bp, Homo sapiens
ccctgagcctgatgctgcccttgcaccctgggcctcctcccctggcccagacctccccattctgaaagagagcagcccctctctagtacccgtctctgggragccaggttccgattacccaccacctccctggcacacgtgaagttctcattaccacctgtctgtgcaggagcggattgtgaaggtcatggatgactacca

SEQ ID NO: 434037 - DNA, 201 bp, Homo sapiens
agcccagcccaagccagtcacttatccaggttagctgaacaaggaaggacaacagagatttgggccaggccagcaagcagcaggcaggttaatgcccaagrcctgccgtctggctgtggggagcacccctgaactcctatcctgcatgcctccctcagcaggcccaccttgggccccaagagcctacaagccccagcctgt

SEQ ID NO: 434038 - DNA, 201 bp, Homo sapiens
ggcctcagaagccctgcgtgtgttggtagggctggaggaggctggaagggtgaggtgtgccgggtcatacccttgccccactgacagtcctcagcaacccrgggagcccaccaggagcacccctcttggaaagcgccgcaggatgttgtggtggaggggacagttacctgtcgggagatgctggagaccaaggaggaagag

SEQ ID NO: 434039 - DNA, 201 bp, Homo sapiens
ccctggcagattctacttcctgtcagatgatgaactactagagatcttgtcgcagacaaaggaccccacggccgtgcagccacacctgcgcaagtgcttckagaacatcgctcgggtgggcagctgggcccggggctcagggctgggagcatggggcatcttcccagggagaacgtccctccctttgtgatgagccctttt

SEQ ID NO: 434040 - DNA, 201 bp, Homo sapiens
ctgcgagagtggatgaagggcatcccggagaggctggtgggcctggaggtgaggcaggcacacgggcactggggccagggaggcacagggctggtgttaaragtccgagggctggggcaggcaggggctgggaggtcggactcaggaggctgagggtaaggtagttggacagaggacagatggggtttagggggttgtgag

SEQ ID NO: 434041 - DNA, 201 bp, Homo sapiens
tcttcaccatgggggcggggggtggggctcgatttcactaacgttgtatatgaaaatgtctgcaataaaaagtacttttgaactttgtaaaaaaaaaaaaagttaaaggagaggagcatgaatttttagggcaaagaaaaattttcctgtgtaatattgatgtatttgtctttattccagtactgttctaaagtataattt

SEQ ID NO: 434042 - DNA, 201 bp, Homo sapiens
caagcatccctcccaggtttggggttaggggagcgacagggggctaaaaggtggaagtgaggtgcttgtgacaagctagcagagccagacacccagagggyacttggccagctggactcggagctgaggcatgaggaggcccaggcagcactgtgcaatccaccccatcctcagccagccagcagttgcacttgccagcag

SEQ ID NO: 434043 - DNA, 201 bp, Homo sapiens
ccaccaaggccaacctcatggctgcttacacagggcgtgtgcgcagcaacatccacatggtgctgtgcatgaggtacaggcagctgtcgccaggctgcgcyggggcagcggagctgggtgtgtacatgggctggccccggggacactggatgccatgcgctggggcctgagatgaggagacgcggccctgggcctggccat

SEQ ID NO: 434044 - DNA, 201 bp, Homo sapiens
tgggagcctggcaaggggctgctgcaggacccgggccacttccttgagagcctcttcaagtttgacaaggtaagcatgccaggcaccctggccagccagcragtgaggacaaggcccgcccggcaggacagtgaagctggagaggagcttgccccaccacatcatctgcatgtgcagtggcctctgtcctgtctctctctg

SEQ ID NO: 434045 - DNA, 201 bp, Homo sapiens
tttgggggactgatgcccttcctctggggtcggctgggcaatgtgggggccaccgaagctgccggccacagcttctctctcatgaatgagggcggcccagsaggccctgtgctctctctgtccctgccacacctgttttcctgtctctgccctgacccctagctgctgcgcacttctgaggatgtagccaagatgcaggag

SEQ ID NO: 434046 - DNA, 201 bp, Homo sapiens
gcggctctggccagcctgcgcaacctcaacaagaacgatgtgaccgaggtgggcagcagggcatctcctggcattccctctcatatgcctctgtcctcaarccttccctctgcacatcccctgggacccagcagcctgccccaccctcctcattccagcccccagggcccaagtaggagcatgggcacctgggttggggaa

SEQ ID NO: 434047 - DNA, 201 bp, Homo sapiens
ccctcgggcagaagccatgatgcgcagctccatagagaggggcaaatgggtcttcttccagaactgccacctggcaccaagctggatgccagccctagaaygcctcatcgagcacatcaaccccgacaaggtgtgttgccctgcccatcacagacccagtggggccgcctctgcatccatcagggactaatgaggcagaaa

SEQ ID NO: 434048 - DNA, 201 bp, Homo sapiens
ctgccccccaaaccccctaccttctgctctttgacccctccccccacccactacacccacaggccaaagtcaggattgcagagcagacggagaaggacatygacctgacgcgcatggagtacatacccgtggccatccgcacccagatcctcttcttctgtgtgtccgacctggccaacgtggaccccatgtaccagtact

SEQ ID NO: 434049 - DNA, 201 bp, Homo sapiens
gctgggcttcaccatcctgcccactcccctgtgggaaggacccctatgcatgtggaatcccacaggggataagggggcccagccttgaccccacagtattyctttgcccctgcagatagtggaggacgtcacccaaaacattctgctcaaggtgcctgagcctatcaacttgcaatgggtgatggccaagtacccagtgct

SEQ ID NO: 434050 - DNA, 201 bp, Homo sapiens
ccttgacggacttgtttcatggagctaggggattcgagtgcaggcctcagaagccctgcgtgtgttggtagggctggaggaggctggaagggtgaggtgtkccgggtcatacccttgccccactgacagtcctcagcaacccagggagcccaccaggagcacccctcttggaaagcgccgcaggatgttgtggtggagggg

SEQ ID NO: 434051 - DNA, 201 bp, Homo sapiens
atggccaagtacccagtgctgtatgaggaatcaatgaacacagtactagtacaagaggtcattaggtaatcaccccgccatacccctgccccgagtcagcrgccactggactgtagagaaatgacaacaggggttactatgggccaggtgccatgccaagtgctacacatcctctaactcagctattttttgttgttgttg

SEQ ID NO: 434052 - DNA, 201 bp, Homo sapiens
gcccaggtgtttgggggcacggtcagggacatcagccaggagcaagggagagggagaggacctggcccaagaaggggcaacatggagagagactgggaagygtcccaagacagccccagccctgccctcctgtccctgcagtatgacaagctctccaggatggtgaaggagttccaaccctacctggacctttggaccaca

SEQ ID NO: 434053 - DNA, 201 bp, Homo sapiens
ctctcctgcagtctttctctcagctccatgaccataaccggcagctgggctctaggtgactccccagcctgcagagtcagttcagagatatctctgccacmctgagaagcccagagcataagggcttccctgctctgaagggactggtggcatcaacaactggagccaagtctgaaaggccagagcacagacagcattcag

SEQ ID NO: 434054 - DNA, 201 bp, Homo sapiens
ccgctcctcacctcccctgcctcccacctcccccaggtgatggagttcaagtctctgctgctgtctctgtgcttgttccatgggaacgccctggagcgccrtaagtttgggcccctgggcttcaacatcccctatgagttcacggatggagatctgcgcatctgcatcagccagctcaagatgttcctggacgaatatgat

SEQ ID NO: 434055 - DNA, 201 bp, Homo sapiens
tggagtcccaagagcagggacatgcataagggttatgagcaggagtgacaagtggggaatgtgacaagtggggatgtgctccattggagggtaactctgarggctggggcagagcaagccaggggcttccatgttggcctcctctctcctagggctacctctcctacatcaagagcctcccactcaatgatatgcctgaga

SEQ ID NO: 434056 - DNA, 201 bp, Homo sapiens
gagagagactgggaagtgtcccaagacagccccagccctgccctcctgtccctgcagtatgacaagctctccaggatggtgaaggagttccaaccctacckggacctttggaccacagcgtctgactggctgcgctggtcggagagctggatgaatgaccccctctctgccatcgatgctgagcagctggagaagaacgtg

SEQ ID NO: 434057 - DNA, 201 bp, Homo sapiens
gctgcttcatattttctccatcctcatcgggcagaagaaactggagctgaaaactgccaagaaccgcatgaagagcggcctcgacaaggtgggcccaggcragtccccgtggacaaggtcagctgcctgcaggctgcctgctcactcagccctgactccagggtgacaccatgctccgcctttcaaactgcagcccacgac

SEQ ID NO: 434058 - DNA, 201 bp, Homo sapiens
agttctccaaaaagctctctgccatctccctgggccaggggcaggtcagggctaggcagggaggaagggagtgggctggggggtgggcaagctggcccccygctcagtgctcttgcccctgcagggccctcgggcagaagccatgatgcgcagctccatagagaggggcaaatgggtcttcttccagaactgccacctggc

SEQ ID NO: 434059 - DNA, 201 bp, Homo sapiens
accacccggctgctcgcccagactgacttcccactgcaggcctacgagcccaagatgcaggtgcctttccaggtgctgccaggccagcatcctcgcaagaytgagatcgagaggtacggctgggtgggctgtggggagactgtcggggaggtggcatccacccgcctcaggggatgaggaactgcagatcaccaggtgata

SEQ ID NO: 434060 - DNA, 201 bp, Homo sapiens
cgagcccaagatgcaggtgcctttccaggtgctgccaggccagcatcctcgcaagattgagatcgagaggtacggctgggtgggctgtggggagactgtcrgggaggtggcatccacccgcctcaggggatgaggaactgcagatcaccaggtgataatcctcatggcagagcctgtgcacaagtgtttagatcgaatctt

SEQ ID NO: 434061 - DNA, 201 bp, Homo sapiens; identical to SEQ ID NO: 229895

SEQ ID NO: 434062 - DNA, 201 bp, Homo sapiens
caccgcgcccagccaaaagcccaattcttaaccagttgtctgtgcagcctcgcctgacccacctcagggtccctgggcaggagggagcctggtgtcagggyggccaccagatatgggtctcaatgctcacgtggagccatggccaccaggtacacagggacttccgcctctggctcaccagcctgcccagcaacaagttcc

SEQ ID NO: 434063 - DNA, 201 bp, Homo sapiens
ctgcccatcacagacccagtggggccgcctctgcatccatcagggactaatgaggcagaaataagagaatcatgccaagcactctgcccagcctctagcaygtggcaagtgctcagcaactgacatgtgccacacatcgacatcattaatcctctcaatccacccccacccccagttacctgtacaagcggtgatgtgact

SEQ ID NO: 434064 - DNA, 201 bp, Homo sapiens
catgaatccagaagggaagccctaaatgcgtgtccccaggtccatgccagagcagagcttgggccccggctggggttcacagggtgtggagcccctgattmccccatctcccatctctatgggcagggttctagagcacctcagcagtcttgccagagaagtgagcctggactatgagcgcagcatgaacaagatcaactt

SEQ ID NO: 434065 - DNA, 201 bp, Homo sapiens
agaactgccacctggcaccaagctggatgccagccctagaacgcctcatcgagcacatcaaccccgacaaggtgtgttgccctgcccatcacagacccagyggggccgcctctgcatccatcagggactaatgaggcagaaataagagaatcatgccaagcactctgcccagcctctagcacgtggcaagtgctcagcaac

SEQ ID NO: 434066 - DNA, 201 bp, Homo sapiens
ctctgacggccagcatgtcatcagtgaacagagcctgagcaagatcaagcagtgggccctgagcacgcctcggatgcgcaaaggcccctcgtgagtccccrctcggccttccctattctgggcatcaccttcttcagggaaccttcccataggaagttggtgctactccagggtggagctccctcagggctcatctgtttg

SEQ ID NO: 434067 - DNA, 201 bp, Homo sapiens
tgagggcagtgcctgagaggggcctcgaaggatggtggaggggacagaagggggtaataggcatcacggcttggtcctgggggcattggggtggggagtgrcagtgggttgaagactgagctgatggagattgcccctgagggcttcctcccaagtggagttggagggggccctcagagggaggtgcccagattgggctct

SEQ ID NO: 434068 - DNA, 201 bp, Homo sapiens
ggcagaagccttggagagggacagtgctcacccatgcctccttctgtatggcgacaggatcactatgacttcgggatgagagccgtgaaaactgtgatctyggctgctgggaacctcaagcgagaaaaccccagcatgaatgaggtgagctccacccagcagggctccaggagtggaactctgggagggctcctgggcagc

SEQ ID NO: 434069 - DNA, 201 bp, Homo sapiens; identical to SEQ ID NO: 229889

SEQ ID NO: 434070 - DNA, 201 bp, Homo sapiens
cgccctcttctgtcagtattgcacattagttttttttgtttgtttgtttttagaatgtgctctgtgtgtgtgtctgtgtgtgtgtgtgtgtgtgtgtgtgkacacacgtgctggggagagggatgtgggtcctccaaggtttttgtcctcttatcttgcagaactcaacatttcacttttgcttcttttcccttatcctcc

SEQ ID NO: 434071 - DNA, 201 bp, Homo sapiens
gagctggctgagctgcgagagtggatgaagggcatcccggagaggctggtgggcctggaggtgaggcaggcacacgggcactggggccagggaggcacagkgctggtgttaagagtccgagggctggggcaggcaggggctgggaggtcggactcaggaggctgagggtaaggtagttggacagaggacagatggggttta

SEQ ID NO: 434072 - DNA, 201 bp, Homo sapiens
ggtgatcaaagccatccagccgtacatcgataatgaagagttccagccagccaccattgccaaggtgtccaaggcttgcacctccatctgccagtgggtgygcgccatgcacaagtaccactttgtggccaaggccgtggagcccaagcgggtgagggctgagtggagctggtgggggagggctcccctcccgggggtact

SEQ ID NO: 434073 - DNA, 201 bp, Homo sapiens
ccctgccccatccctgcctgtctgcagagagctgtcctgtatgggaggtcccaggaaacgggggtttccacctccttccctagactcttagaggcctggaragcctcacgaaggacacccttgacggacttgtttcatggagctaggggattcgagtgcaggcctcagaagccctgcgtgtgttggtagggctggaggagg

SEQ ID NO: 434074 - DNA, 201 bp, Homo sapiens
gatcccactgcaggcctacgccaaggagtaccgaaagtacctggagctgaacaacaatgacattgcctcctttctcaagtgcgtacgtgtgcccatgcacrtcggagggtgtctgtgtgtttgtgcatgtgtatcccctgcccaccctgctcaccatcctctgccccctcccgtgtgcttgctgtcctcagaacctaccag

SEQ ID NO: 434075 - DNA, 201 bp, Homo sapiens
tatgtggactgcatgccctctgacggccagcatgtcatcagtgaacagagcctgagcaagatcaagcagtgggccctgagcacgcctcggatgcgcaaagkcccctcgtgagtccccgctcggccttccctattctgggcatcaccttcttcagggaaccttcccataggaagttggtgctactccagggtggagctccct

SEQ ID NO: 434076 - DNA, 201 bp, Homo sapiens; identical to SEQ ID NO: 229886

SEQ ID NO: 434077 - DNA, 201 bp, Homo sapiens; identical to SEQ ID NO: 229888

SEQ ID NO: 434078 - DNA, 201 bp, Homo sapiens
tgtgctgggagtccccctccccatgcagaaagcagggcacaggactttccatttccgccggaagcagccctgcacctggacccgcttgccaaagcccagcmgtgcagctcctggcccttctgcacttggccatggggccgcagccaggagtggggcagggaggggttccaggcccactgctgagccacctatgattccagg

SEQ ID NO: 434079 - DNA, 201 bp, Homo sapiens
aggcgcctaccaccatgcctggctattttttgtatttttagtaaagaagggatttcatcatgttggccaggctgttttcgaactcctgacctcaaatgatycacccacctcggccacccgaagtgctgggattacaggcatgagccactgtgcccagcctctacttaatattttaactgttaaaatattattactattcct

SEQ ID NO: 434080 - DNA, 201 bp, Homo sapiens
tgaaggaggaaagggggactctcctctcaggctcatggagagtctcagagcacagctagggtggcgaggactgggacaggcctgcagggtgtggggccttscccagtggcagaggggagaacaggggctccaggagaagctctgagtggtggtgaggaactgcgcaggtggcctcccacctggccagggtttgtgcctctc

SEQ ID NO: 434081 - DNA, 201 bp, Homo sapiens
gcagagcctcaggctggctctcagtccctgcaaccccttcttttccccttcccttacaggagaaggacaatgggctggatgtgttcaagttgagtgaccgygacttcctgcgcagcatggagaacgccatccgctttggcaagccatgtctcctggagaacgtgggcgaggagctagacccagccctggagccagtgctgc

SEQ ID NO: 434082 - DNA, 201 bp, Homo sapiens
ttgccgaagaaatgaagttctccaaaaagctctctgccatctccctgggccaggggcaggtcagggctaggcagggaggaagggagtgggctggggggtgkgcaagctggccccctgctcagtgctcttgcccctgcagggccctcgggcagaagccatgatgcgcagctccatagagaggggcaaatgggtcttcttcca

SEQ ID NO: 434083 - DNA, 201 bp, Homo sapiens
ctgttgcagggagcctttgcctggcatctgggaccagtacctagaccagttccagaagctgctagtcctccgctgcctgcgtggggacaaggttaccaacrccatgcaggactttgtggccaccaacctggagccacgcttcattgaaccccaggcaagtgctggaaccctggcaggactggcaccttgagcttgtcccca

SEQ ID NO: 434084 - DNA, 201 bp, Homo sapiens
agcttctctctcatgaatgagggcggcccagcaggccctgtgctctctctgtccctgccacacctgttttcctgtctctgccctgacccctagctgctgcrcacttctgaggatgtagccaagatgcaggaggacctggagagtatgcaccccctgctggaggaggctgccaaggacaccatgctcaccatggagcagatc

SEQ ID NO: 434085 - DNA, 201 bp, Homo sapiens
tccaacaggctggctctcagggaggtgtgggccactgttgcagggagcctttgcctggcatctgggaccagtacctagaccagttccagaagctgctagtmctccgctgcctgcgtggggacaaggttaccaacgccatgcaggactttgtggccaccaacctggagccacgcttcattgaaccccaggcaagtgctggaa

SEQ ID NO: 434086 - DNA, 201 bp, Homo sapiens
aattccttttggcatttaggaaggtctgtaccgttattttagtggtttcttttatagtctccattatcccctgctttcctacttaaccctttagtatctgkcctgtttcattgttgttgtttgttttgttttgttttgagacagggtcttgctctgtcacccacgccacagtgcagtagcacaacaatcatagctcacttc

SEQ ID NO: 434087 - DNA, 201 bp, Homo sapiens
atatatacagatggtccccaatttatgatagtttgacttaccatttttctttttcttttcttttccttttcttttctttctttctttctttttttttttttgagatggagtttgactcttgtcacccaggctggagtacagtggcttgatcttggctcactgcaacctccgcctcccaggttcaagagattctcctgcctc

SEQ ID NO: 434088 - DNA, 201 bp, Homo sapiens
tctacccctccagcaacgtggaggactggctgcgggaggtggagcgcagcatgaaggccagtgtgcacgacatcattgagaaggccatcagggcctacccyacggtgagccgcccgcagcccgtgcagccttccacccctgcacccctctgctccctctcagtgcccctcctgctctagccggcctcgtcctcaggctgca

SEQ ID NO: 434089 - DNA, 201 bp, Homo sapiens
agcaaacccccttctcccgctgcatccctccttttgtatttggtcaccctgccaccctctaggcttcaggccacatcctgcccctgcttgccctgctcctygggaggactccccatctcccctctgctcattcaccccctggctcatccaggtctgccctgccacatgccttccctctgcagctggtgatggaggacatct

SEQ ID NO: 434090 - DNA, 201 bp, Homo sapiens
agggtgggaacactaacccagacctgtttgactaccatccccaagggagactcagtttctccaggtgagggtggttagagaggcactactgggtgggggtrcccagagcaggaggagctggccagggcctgggcatcagcctcctcctgtcccctgccagagtgagtggcgatacctcctgtctgggggctccatctcgat

SEQ ID NO: 434091 - DNA, 201 bp, Homo sapiens
tcaaacatttgggctcaagcaatctgctcacctcagcctcccaaagtgctggcattataggagtgagtcaccatgctcagctctacttaattaattaattwatttatttattttcgagatggagtcttgttttgtcacccaggctggagtgcaatggtgcgatctctgctcactgcaacctctgcctcccgggctcaagct

SEQ ID NO: 434092 - DNA, 201 bp, Homo sapiens
tactttaacttttctttctttctgttttttttttttgagacagagtctcgctctgtcgcccacgctggagtgcagtggcgtgatctctgctcactgcaagmtccgccccccggcgcccgccaccatgcccggctaatttttttgtatttttagtagagacagggtttcaccatgttcgccaggatggtctcgatctcctga

SEQ ID NO: 434093 - DNA, 201 bp, Homo sapiens
atgggtgacagagtgagactgtctcagaaaaatgtatgtaattaattaattaactaactttagcttactttaacttttctttctttctgttttttttttttgagacagagtctcgctctgtcgcccacgctggagtgcagtggcgtgatctctgctcactgcaagatccgccccccggcgcccgccaccatgcccggctaa

SEQ ID NO: 434094 - DNA, 201 bp, Homo sapiens
aataaattaacccaacacaccttagggccaggcatgatggcttacatctataatcccagcactttggggggccaaggtgggtggattgattgaggccaggwgtagaagactagcctggccaacatggcaaaaccccatctctactaaaaaaaaatacaaaaattagctgagcgtggtggcacacgactataataccagtta

SEQ ID NO: 434095 - DNA, 201 bp, Homo sapiens
gggaagaagtgagcacaccagtttttcataaagaaacacaaagagataaagtcaaaggagggaaggaagtcaaggggcggcttctaatgtgggacataccrgagtgtgtggggacccctgggagggcgtgggagggaaggcaaagagactgaggtggctgagcttgctgggcttttcctgagagcagggcatgccttctac

SEQ ID NO: 434096 - DNA, 201 bp, Homo sapiens
caagataaaacatggtacatctatgtaaggcacttaccatgaatggagcctgcagggctggaagttgcggtggttgagtcagtgagtgagtggtgactgawcgtgaagacctaggatattactatacactactgcggacttgataaatactgtatacacttaggctacactaaatttattttaaatttttctttcttcaat

SEQ ID NO: 434097 - DNA, 201 bp, Homo sapiens
acctgctgcaacgcctggactttctgcaggcctggatccaagatggcatcccagctgtcttctggatcagtggattcttcttcccccaggctttcttaacwggcactctgcagaattttgcccgcaaatttgtcatctccattgacaccatctcctttgatttcaaggtctgggcacagccagggccaggtcaggtgacag

SEQ ID NO: 434098 - DNA, 201 bp, Homo sapiens
acctgctgagggccaggctctatgcccggtgctttacaggcattaccttgtcggcttctcccagcaacccttggagataggagttacatgcccatttgtcrgctgaggacaccgaggtcctaggtagctaaaggtctggccaggctcatgcagtacacagcagcgctggagcaggagccaggaacagatgcctgtgtggct

SEQ ID NO: 434099 - DNA, 201 bp, Homo sapiens
tgctcccagcctccagggcacctgctgagggccaggctctatgcccggtgctttacaggcattaccttgtcggcttctcccagcaacccttggagataggrgttacatgcccatttgtcagctgaggacaccgaggtcctaggtagctaaaggtctggccaggctcatgcagtacacagcagcgctggagcaggagccagg

SEQ ID NO: 434100 - DNA, 201 bp, Homo sapiens; identical to SEQ ID NO: 229885

SEQ ID NO: 434101 - DNA, 201 bp, Homo sapiens
acccttgtcctccaggtggtggatgtgcatgcaccctggcggcatctgctgctccctttgcataagacgggagggtatacgtttcctgagctgatctgacyctgagagccagggtgggtgaatgctattttgttgctggtagagggatctgtgggccaatggagggtcaggattggggtcctgctggggagaccatttagt

SEQ ID NO: 434102 - DNA, 201 bp, Homo sapiens
ggggagtggcagtgggttgaagactgagctgatggagattgcccctgagggcttcctcccaagtggagttggagggggccctcagagggaggtgcccagaytgggctctgaacacatgtgccccatccaatgttccggcctcactcagtgctggggcctgggcctgcttcgacgagttcaatcgcatcgacatcgaggtgc

SEQ ID NO: 434103 - DNA, 201 bp, Homo sapiens
gcagtttgtgtattccttatgacagctttctggaaggaatagtcaagtgtcctgctcggcaaagtcagtgcattgcaaaacttcccagtagatagaaagaagctagaagaaaggcaggaggagggtctttctctgtcttgcatgaaggtgcctgcaggcttagggggccctgcctgtggggcacttacatccaaacttgta

SEQ ID NO: 434104 - DNA, 201 bp, Homo sapiens
aaacactttattataaaataggctttgtgttacataattttgcccaattgtaggctaatgtgagtgttctgagcatatttaaggtagattaggctaaactrtggtgttcagtagcttaggtgtatcaagtgcattttaaacttatgataagtttagttggaatgtagccccactgtaagtagaggagcatctgtagtttta

SEQ ID NO: 434105 - DNA, 201 bp, Homo sapiens
tgcagtttgtgtattccttatgacagctttctggaaggaatagtcaagtgtcctgctcggcaaagtcagtgcattgcaaaacttcccagtagatagaaagaagctagaagaaaggcaggaggagggtctttctctgtcttgcatgaaggtgcctgcaggcttagggggccctgcctgtggggcacttacatccaaacttgt

SEQ ID NO: 434106 - DNA, 201 bp, Homo sapiens
gtctaagtgctttcacatccgtccatgacaccttgtgagatgggccgggcaggaagtgtcgtcatgcccatttcacagatgcaacagggggtcagaagagrgaaacaatttgttcagggccactgggcatccacggcacagccggccggaacctagtgtttcagcccagaaagcctgattgtgtgtccccttctccctctc

SEQ ID NO: 434107 - DNA, 201 bp, Homo sapiens
agcacattcactgtcatacacacccccaacaacctctcttgtgtacacattttcaccacacagaaacacactctcctattgtcacccatccacaaccactrtcacacctcaccatgcccacttgatgccacacaggtttgccttgtcttggccttgtcaataatctgcccagggagtgcccttggctgctcctttggcctc

SEQ ID NO: 434108 - DNA, 201 bp, Homo sapiens
gcgggacagaagggcagttggagcccaggacaccagccccagccaccacaccacttcctgatgagtctcagaggggtggagggctccagaggggtctctcrgccacacccctgtccccacaaccccgtaggcccttgtggacacccatggagccacctcacacgagccaagccatcctgaggtcccctccctgcccttgac

SEQ ID NO: 434109 - DNA, 201 bp, Homo sapiens
agtacacggcaggggagatcaattacgggggccgtgtcactgatgactgggaccggcgctgcatcatgaacatcttggaggacttctacaaccctgacgtrctctcccctgagcacagctacagcgcctcgggcatctaccaccagatcccgcctacctacgacctccacgtgagtccagcccaaagggctgcacaggagg

SEQ ID NO: 434110 - DNA, 201 bp, Homo sapiens
ggtgctgggtggtgtggaaaggagtggtcaagcatgctggctctggacagggagagcagggctaggacagaccttctggaagccaccatccctccaggctyatagccccaggacacctggtgccatgcctgtgttctcccagccactgcccagccacaggcaagctttgagcttcccacactccaaagcatactacctggt

SEQ ID NO: 434111 - DNA, 201 bp, Homo sapiens
ccaccaactccccttcccccaggtatggaatggaagcctctgtataccctgctcatctaagtagcggcagtcattttttgacttgagggtcctgcagggcyggagtagtggagccacccacagtatccaggatgcctcaagctggcaatggcctcagggaatgaatatcagactccaatatgctgagggggcctctgcagt

SEQ ID NO: 434112 - DNA, 201 bp, Homo sapiens
gagggctggggtagcctgccccggcccgcggacgcagcagggtctggaggccaggcatgggtctcttcgccctggctccttcttggccactgagtgggtcytgggggtggagtggtgtcacgcagcctcaagagctggtgattagggctctgaaaacagccttcttggcagccctgagatctgggcatttttgatgcaaag

SEQ ID NO: 434113 - DNA, 201 bp, Homo sapiens
tgcatctgtccattcattcgacaactcattactgagctcctgctgtgtgccaggccctggatggagccctggagatgcagcagggatgagacgcccacgtmcctattgtcattgttgtggggcagtggctttggtagggaagaccccttcccctggctctggttgggaaggttccacagatgaggtgatgtactgctgaga

SEQ ID NO: 434114 - DNA, 201 bp, Homo sapiens
aggaagggcagagggctgctcctgcacacaggcctcctaggcctctgcccacagtcagctcgccattgcctgcaggccccggaagaatcccctgttcatcrtggacctggtgctggacagctctggggtgcactatagcaccccactggagcagtttgaggcatctctgctgaacctcttcgacaagggcatcctggccac

SEQ ID NO: 434115 - DNA, 201 bp, Homo sapiens
ctcgctaaaggtggccatgcgcagcagcctgcgcgacatgagcaagggctggtacaacctctacgagaccaactgggaggtgtacctcatgtccaagctgygcaagctgatggagctggtgaagtacatgctgcaggacacactgcgcttcctggtgcaggactcacttgccagcttctcacagttcatcagcgacacctg

SEQ ID NO: 434116 - DNA, 201 bp, Homo sapiens
tgagcccacccaccaggcaccaccaccccaccccagccaggcatagcaagggcagtggtgagccgcagagcctcaggctggctctcagtccctgcaacccyttcttttccccttcccttacaggagaaggacaatgggctggatgtgttcaagttgagtgaccgcgacttcctgcgcagcatggagaacgccatccgcttt

SEQ ID NO: 434117 - DNA, 201 bp, Homo sapiens
agtccatagccgaaacacgaggccgggagatgctgatgccctcagtgaccctgcttgcaggaaagctctgacccagtccagtgcctggctctccacagatygctggcctccccaacgacacactgtcagtggagaacggggtcatcaaccagttttcccagcgctggacccacttcattgaccctcagagccaggccaaca

SEQ ID NO: 434118 - DNA, 201 bp, Homo sapiens
atccgatcgtggcaggtgcccaccccaggggcaggagtgcccaggcagggcctgtggtgtggtccaggctgggccaggagccttctgcctccttcctaccytgctttccagggcctggctcggagctgcctctgctgaaccctcctgtgcccagcaagagggtggtaggaggacaggaggagaaagctgggctgagtgtgg

SEQ ID NO: 434119 - DNA, 201 bp, Homo sapiens
tgtcattgctgtggagatccccacccatcagccccagcgacactggataaagcgtggtgtggccctcatctgtgccctggactactagactcagacagaasggctggggccattaaagctgaattttctaagcagtccagctgtgccttagctgcttgcatgaggacccctctgcaggactcactgccagggggctggtga

SEQ ID NO: 434120 - DNA, 201 bp, Homo sapiens
gcgggggaagctgtcccgcatgcagcgggcagtgctgtcagcgctaatcgtcattgaggtccatgccaaggacgtggtgagcaagctaatccaggagaacrtggtcagcgtgaatgacttccagtggatctcacagctgaggtgaggacatggggggcgcccccagggccagagcagctgccaggaaggggcaggggaaaa

SEQ ID NO: 434121 - DNA, 201 bp, Homo sapiens
gcagctcagtgatctggtggcccttgtgcgggggaagctgtcccgcatgcagcgggcagtgctgtcagcgctaatcgtcattgaggtccatgccaaggacrtggtgagcaagctaatccaggagaacgtggtcagcgtgaatgacttccagtggatctcacagctgaggtgaggacatggggggcgcccccagggccagag

SEQ ID NO: 434122 - DNA, 201 bp, Homo sapiens
gaggagcgccttccccaggtgggcgccacctggccatgcccactccgccactgtctgcccacaaggctgaggtgtccagggccctgctcaggctagggtgyggggatgtcagcaggactggggcagctggggcccagggagcctgcacgacccgcttcctcacccctgttcccctggcagattctacttcctgtcagatga

SEQ ID NO: 434123 - DNA, 201 bp, Homo sapiens
tagtcccagctacttgggaggctgaggcaggtgaatggcatgaacccgggaggtggagcttgcagtaagccaagatcacgccactgcactccagcctgggygccagagtgagactccgtctcaaaaaaaaaaaaaaaaaaaaaaaaaaaaaagaatgcagactgaagtcagaattcattgcacaaactcagtgatctagag

SEQ ID NO: 434124 - DNA, 201 bp, Homo sapiens
aactttaagacacattctttttctaatcctctgtacttctacttgaattttcaaaggctattttgaatttctgtattttattgtagactgagtatgttttmtatactcaatgtctttgacaaataaaaattcatatagtagaatttttaaatatttgccaagaattcattattagcagaatgtttatttcccaaacttagc

SEQ ID NO: 434125 - DNA, 201 bp, Homo sapiens
ctatgaaaagatctcacataatttctacttctgtcagattcttgctgagctgggcttactcattaaaaatcctgctaaatccctccttttacatctggacygtacctcagtctatgactcttgtcaaataaatctctggtcttatatccattttaaacttttaacttcaaaggggtggttttaaatttaaggatatctata

SEQ ID NO: 434126 - DNA, 201 bp, Homo sapiens
ttggggtaactatgaaaagatctcacataatttctacttctgtcagattcttgctgagctgggcttactcattaaaaatcctgctaaatccctccttttayatctggactgtacctcagtctatgactcttgtcaaataaatctctggtcttatatccattttaaacttttaacttcaaaggggtggttttaaatttaagg

SEQ ID NO: 434127 - DNA, 201 bp, Homo sapiens
ctcttctgatggggtttgatgcttcctgtgtgccaactagggttcccctcatcttacctttttcgctgagggcagaagacagagaagcaacttttctgtaygtgcttttgtcttccagacttcccccttcctatggcctctgaaagaggtcagctagacaaaacaatagtgagtactgcttccttggttcctaataacagg

SEQ ID NO: 434128 - DNA, 201 bp, Homo sapiens
ttcagccttctggttatatacctaggggtggaatttgctgagttatatggtaattctgtgtttaactttttgaggaaccatcaaacttttctataggggcygaaccattttacattcttccagaaatatgagagttccaatttcttcacatccttgctagtactttttaaaaatattattatatccatccttgtgggtgtg

SEQ ID NO: 434129 - DNA, 201 bp, Homo sapiens
gtcatacgttttatgaaaaagaaaaagaaatacagatcaataaaatataagagtccaggggaaaaacaccttacatttggagtgaattgattttaacaagstctgaagacaattcagtggacaataatctttttaaacaaatgctgctaggacaactggatatctatatacaaaagaataaatgtggaccttttcctcaca

SEQ ID NO: 434130 - DNA, 201 bp, Homo sapiens
caccatgttggtcaggctggtcttgaactcctgacctcaggtgacctgccagccttggcctcacaaagtgctgggattacaggcgtgagccaccgcgcccrgccagaccacacattttgataaatgtttcaaaaggtaggaacagcaagaatgtgtagaacttaagccactgcctatctttccccttcccttcccagcgca

SEQ ID NO: 434131 - DNA, 201 bp, Homo sapiens
tttcaccatgctggccaggctggtctcgaacttctgaccttgtgatccccctacctcggcctcccaaagtgctgggattacaggcgtgagccaccacgccyggccccattgatccatttttgaattaaattttatatatggtgtgagatagaggtctaacttttttcttttttctttttgagacagggtctcactttgtca

SEQ ID NO: 434132 - DNA, 201 bp, Homo sapiens
ttaaaatgtcttgtaagtccaacatctgggcttcctcagtgacagattccattgactgacttttatcctatatgcgagccatactttcttttcctttgtaygtgccatgactattttgttgaaaattgaatattttgaataatataatgtggcaactctggaaatcagattctcacctctatccaaggtttgttgctgtta

SEQ ID NO: 434133 - DNA, 201 bp, Homo sapiens
cactctgctttttccttctccagtgaaattagaatgtctctaacctgccttaattcagagaataattgtttagcatttcccctgctgaactatggttgtgkttaccagtgtggtggcttttctcttaacttcctcaaatttgatttctctaagcagatacttctcttgcaggaaaactcttgaacgtacgacaaagaatta

SEQ ID NO: 434134 - DNA, 201 bp, Homo sapiens
ttcctcagtgacagattccattgactgacttttatcctatatgcgagccatactttcttttcctttgtacgtgccatgactattttgttgaaaattgaatmttttgaataatataatgtggcaactctggaaatcagattctcacctctatccaaggtttgttgctgttatttgttgttgttgccatgtgttagtttagtg

SEQ ID NO: 434135 - DNA, 201 bp, Homo sapiens
tatgagtttatttttggatccttgattcttttcttttgttctgtatttatatcctaataccagtaccagtaccactgattattatactttttttttttttytggagacagggtcttactgcatctcccaggttggagagcagtggtgtggtcatagctcactgcagtcttgaactcccaggcccacacaatcctcctgcct

SEQ ID NO: 434136 - DNA, 201 bp, Homo sapiens
atactttttttttttttttggagacagggtcttactgcatctcccaggttggagagcagtggtgtggtcatagctcactgcagtcttgaactcccaggccyacacaatcctcctgcctcagcctcccaagtagctgacactgcaagattattgtagtgttatagtaagtttttgaaattggacatttggagttttccaatt

SEQ ID NO: 434137 - DNA, 201 bp, Homo sapiens
ttgtctgtctttgataacatggtaatgctgtcctcatagaatgaagtagcaagtgttccctcctcttgtattgtttggaagagtttaagaaagattggtaytaaatcttttaaaaatatttggtaggccaggtgcagtggctcatgcctgtaatccctgcactttgggaggccgaagcgggtggatcacctgaggtcagga

SEQ ID NO: 434138 - DNA, 201 bp, Homo sapiens
ttgaacccaggaggcagaggttgcagtgagctgagatcgtgccactgcactccagcctgggcaacaagagcaaaactctgtctcaaaaaaaaaaaaaaaaatttttttttggtagaattcagtactaaagccatctggtgtttgtcgggacattttttattactgattcagtatctttacttgtcataggtctgttgagac

SEQ ID NO: 434139 - DNA, 201 bp, Homo sapiens
tgaacccaggaggcagaggttgcagtgagctgagatcgtgccactgcactccagcctgggcaacaagagcaaaactctgtctcaaaaaaaaaaaaaaaaawttttttttggtagaattcagtactaaagccatctggtgtttgtcgggacattttttattactgattcagtatctttacttgtcataggtctgttgagact

SEQ ID NO: 434140 - DNA, 201 bp, Homo sapiens
aattagctgggcctggtggcgcatgcctgtaatcccagctacttggaaggctgaggcaggagaattgcttgaacccaggaggcagaggttgcagtgagctgagatcgtgccactgcactccagcctgggcaacaagagcaaaactctgtctcaaaaaaaaaaaaaaaaatttttttttggtagaattcagtactaaagcca

SEQ ID NO: 434141 - DNA, 201 bp, Homo sapiens
agtagagacagggtttcaccatgttggtcaggctggtcttgaactcctgacctcaggtgacctgccagccttggcctcacaaagtgctgggattacaggcrtgagccaccgcgcccggccagaccacacattttgataaatgtttcaaaaggtaggaacagcaagaatgtgtagaacttaagccactgcctatctttcccc

SEQ ID NO: 434142 - DNA, 201 bp, Homo sapiens
tcttttaatcctttgtttctgtaaggtcagtagcgatgtttcagctttcattaaatgcatattttaactttaagacacattctttttctaatcctctgtayttctacttgaattttcaaaggctattttgaatttctgtattttattgtagactgagtatgttttctatactcaatgtctttgacaaataaaaattcatat

SEQ ID NO: 434143 - DNA, 201 bp, Homo sapiens
cagtttaaagctacactttagtggtcactggatgtttgcacagacccacaagattagttagagatgagatgttgggactttctctggtcttttctgagcakgcagaaagccttacactggctgcaaggccttctgtatttccagtaacatgttagagcttttcaaaacctcctatggacatctcattgcctaacttacttt

SEQ ID NO: 434144 - DNA, 201 bp, Homo sapiens; identical to SEQ ID NO: 149846

SEQ ID NO: 434145 - DNA, 201 bp, Homo sapiens
aaaaacccaggcgtaactgtgtccacctgtggccctagctagttaggaggctgaggcaggaggatcacttgaggccaggagctcaaggctgcagtgagctrtggtaatcccactgcttcccatcctgagcaatagaatgaaagcatgtctcgagatagctagctagctagctagataattgataggtagttttgtatcaaa

SEQ ID NO: 434146 - DNA, 201 bp, Homo sapiens
gcctgtagtcccagctacttgggaggctggtaaaggagaattacttgaactggggaggcggaggttgcattgggccgagatcgcaccactgcaccccagcytgggcgacacagcgagactccaaagtttgacaccagcctgggcaatgtagtgaaaccctgtctctacaaaacaaacaaacaaaaacccaggcgtaactgt

SEQ ID NO: 434147 - DNA, 201 bp, Homo sapiens
aagacaggaggattgcttgaggccaagagttggaggaggcaatatggcagtatggtgagaccctgtctgtattatttttaaaaattgacaagctttaccckggaaggcttatacacaatttaaacatccctcatagtataagaaagtgcccatttcactgcacctttgccagcacagggtattataatttagtaagtcatt

SEQ ID NO: 434148 - DNA, 201 bp, Homo sapiens
cgccaggtagccggggacgctaccgggagtccccgggccctggctggtggaggtgttgtggggcgcacgtacccaggctcaggtgaggcgagtgggcagcyggggctgcagctggcgctggccattgaggagcttctgcgcgacagtgcgatcggttgcaccttctgcgacaggggccggccggttggcgcgcagcgcctg

SEQ ID NO: 434149 - DNA, 201 bp, Homo sapiens
ttgtgtttttagtagagaccgggtttcagtgaaaccatgctggccaggctggtcttgaactcctgacctcgtgatccacccgcctcgacctcccaaagtgytgggattacaggcgtgggccacctcgcccagccgatcgcttatatttttaaaaagatgttttcttcgtttcctagccccttctaccccgctacaaagttt

SEQ ID NO: 434150 - DNA, 201 bp, Homo sapiens
agctttaccctggaaggcttatacacaatttaaacatccctcatagtataagaaagtgcccatttcactgcacctttgccagcacagggtattataatttmgtaagtcattttttgtttgattattttaaatagataaaagacctcatattactttacttgtcacatttcaacatcttcccttagcttattagctctattt

SEQ ID NO: 434151 - DNA, 201 bp, Homo sapiens
ggcctttgcaggcccggcttcctgcctctcgaaggcctgcacgggcccagcctcagcctcacagcggactctccacgcccagctagctctcgcctcactgyggcctccccagtcgaaagctcctgcctttcggccgctttggcaggcccagctcctgcctgccagtggcctctttaggcccagctcattcctcacaacggc

SEQ ID NO: 434152 - DNA, 201 bp, Homo sapiens
ccgggttcaaacaattctctgcctcagcctcccgagtagctgggattacaggcacccgccaccaggcccaactaatttttgtgtttttagtagagaccggrtttcagtgaaaccatgctggccaggctggtcttgaactcctgacctcgtgatccacccgcctcgacctcccaaagtgctgggattacaggcgtgggccac

SEQ ID NO: 434153 - DNA, 201 bp, Homo sapiens
tttggtggcctcttcaggcccagaacttgacctccagtcggcctttgcaggcccggcttcctgcctctcgaaggcctgcacgggcccagcctcagcctcahagcggactctccacgcccagctagctctcgcctcactgcggcctccccagtcgaaagctcctgcctttcggccgctttggcaggcccagctcctgcctgc

SEQ ID NO: 434154 - DNA, 201 bp, Homo sapiens
ttatataatctcagctcactgtaatctcaacctcccgggctcgatcgcatgtatatacacacatatatttgtttgtttagacggagtcttggtctgttgcmcaggctggagtgcagtggcgcgatctcagctcactgcaacctccgcatcccgggttcaaacaattctctgcctcagcctcccgagtagctgggattacag

SEQ ID NO: 434155 - DNA, 201 bp, Homo sapiens
tttgacttttggtggcctcttcaggcccagaacttgacctccagtcggcctttgcaggcccggcttcctgcctctcgaaggcctgcacgggcccagcctcrgcctcacagcggactctccacgcccagctagctctcgcctcactgcggcctccccagtcgaaagctcctgcctttcggccgctttggcaggcccagctcc

SEQ ID NO: 434156 - DNA, 201 bp, Homo sapiens
gtagagacagggtttcaccatgttgcccaaactagtctggaactcctgagctcaagcgatccacccgcttccgcctccgcctcccaaaatgctgggattasgggcgtgagccaccgggcctggcccaattactttcttcagtctgagcatgagggctggaagaaaagctctcacttgcatataattttttagagacagagt

SEQ ID NO: 434157 - DNA, 201 bp, Homo sapiens
ggtgcaaaacttcctcgagtcagcctctccaggcccagctcctcctgcctcccagtggcctcttttggcccagcccagctcatggctctcagcagccttcscaggccccgcttttgacttttggtggcctcttcaggcccagaacttgacctccagtcggcctttgcaggcccggcttcctgcctctcgaaggcctgcacg

SEQ ID NO: 434158 - DNA, 201 bp, Homo sapiens
cccaactaattttttgtatttttgtagagacagggtttcaccatgttgcccaaactagtctggaactcctgagctcaagcgatccacccgcttccgcctcygcctcccaaaatgctgggattaggggcgtgagccaccgggcctggcccaattactttcttcagtctgagcatgagggctggaagaaaagctctcacttgc

SEQ ID NO: 434159 - DNA, 201 bp, Homo sapiens
catgccaccatgcccaactaattttttgtatttttgtagagacagggtttcaccatgttgcccaaactagtctggaactcctgagctcaagcgatccaccygcttccgcctccgcctcccaaaatgctgggattaggggcgtgagccaccgggcctggcccaattactttcttcagtctgagcatgagggctggaagaaaa

SEQ ID NO: 434160 - DNA, 201 bp, Homo sapiens
tctccaggtgcaaaacttcctcgagtcagcctctccaggcccagctcctcctgcctcccagtggcctcttttggcccagcccagctcatggctctcagcasccttcccaggccccgcttttgacttttggtggcctcttcaggcccagaacttgacctccagtcggcctttgcaggcccggcttcctgcctctcgaaggcc

SEQ ID NO: 434161 - DNA, 201 bp, Homo sapiens
tcccggcggcctctgcaggcccaaatcgtcctgaagtcggcctctccaggtccagctccagcctcccggcagcctctgcaggcctaagttgtcctcaagtyggcctggaagtgggcctggaagagctgcaagttggcctccctgggcccagctccgtcctcttggcctctccaggtgcaaaacttcctcgagtcagcctct

SEQ ID NO: 434162 - DNA, 201 bp, Homo sapiens
ggtcccaaacggcctccggtcggtgggctcctctaggcccagcttgggcctcccggcggcctctgcaggcccaaatcgtcctgaagtcggcctctccaggyccagctccagcctcccggcagcctctgcaggcctaagttgtcctcaagtcggcctggaagtgggcctggaagagctgcaagttggcctccctgggcccag

SEQ ID NO: 434163 - DNA, 201 bp, Homo sapiens
ccctcccaggctgagagaggtcagcgtgagcccctgcctcaacaggccaccgtgagggaggagcagggccgcacgcaggctgccgggagcaggcagggacwtggccccgggcggccgcggtggggcgagagctgggcctggggacgcccctgggaggcaacagtggggcctgcagacgctcttctcctgccagagctggga

SEQ ID NO: 434164 - DNA, 201 bp, Homo sapiens
agatagtcctctctctttcctcaggtggccaggtgcatatcttggtgtgaggaccttcactgtatctgggaatgcctactggtcacctcggtgacagagamcaaggcatttacctgatatgagtgtcttggttcattgtctacatggctagggagggagtcaataataggcttttcacttgctgcaagggccggttctcct

SEQ ID NO: 434165 - DNA, 201 bp, Homo sapiens
gaattaaagatcaaagtgtaaaagttaaagaccagtacagattcaataattattcttttctacatattgtgtttaaatgatatccctttttctttttgttyttatagctcgagctgtaaaagccaaaggtccggtgatgatcccatacccttttttccagtctcatgttgaagatttttatgtagaaggccttcccaaagg

SEQ ID NO: 434166 - DNA, 201 bp, Homo sapiens
tcactctgttttttggtagaggcagggtcttaatatattgcccaggctgatctcaaactcctggcctcaagtaatacacctctctcagcctcccaaagtgmtgagattacaggcataagccaccaccttcaaccaagactttcttaaaccaaataaaaattaagtgagattacttgagcccaggttgtcaaggctgcagtg

SEQ ID NO: 434167 - DNA, 201 bp, Homo sapiens
tccctgcatatagcccgttaggagctcttgctgggcaccaacagatctcctaaaactgctatatagttctgcctcactcttacaaaagattcatctcttgrgagttttgtgctctacccccagatgtggtctttctggttctgaagcttttgcttcagtcaccctgaattttgccagccctatgcatgctataccttggat

SEQ ID NO: 434168 - DNA, 201 bp, Homo sapiens
agcatctcctgtgttcagcaaccccggaagctccgcaaaccctgttcagggtgtttatggaggctttattatgcaagcatgattgataaaatctttggccrttggtgattaaggcagtctccagcccctcttcctcctggagttcagtgcatgaggctgaaagttccaagcgtctaatcatgtggttgcttccattggcaa

SEQ ID NO: 434169 - DNA, 201 bp, Homo sapiens
tcccactgagtctacattatagtgcgttgtagaatcatttcattatatattactatgtagtaataatagaaataaagtacacaatatatgtaatgcacttkaatcatcctgaaattattccctcactcccaatctgtggaaaaattgtcttccacacattcactctgttttttggtagaggcagggtcttaatatattgcc

SEQ ID NO: 434170 - DNA, 201 bp, Homo sapiens
aggctgcagctgagcgatcctcccgcctcagcctcgcaagtagcggagactacaagtgcatgccaccatgcccaactaattttttgtatttttgtagagamagggtttcaccatgttgcccaaactagtctggaactcctgagctcaagcgatccacccgcttccgcctccgcctcccaaaatgctgggattaggggcgtg

SEQ ID NO: 434171 - DNA, 201 bp, Homo sapiens
tagtaataatagaaataaagtacacaatatatgtaatgcacttgaatcatcctgaaattattccctcactcccaatctgtggaaaaattgtcttccacacrttcactctgttttttggtagaggcagggtcttaatatattgcccaggctgatctcaaactcctggcctcaagtaatacacctctctcagcctcccaaagt

SEQ ID NO: 434172 - DNA, 201 bp, Homo sapiens
cgtggtagcatgcacctgtagtcctagctaccggggaggctgacagggaaggattccttgagcccgaaggtcaaggctgcagtgagccttgtttgcaccamctcactccaacctgggcaaagaccccatctcaaaaaagaaaaaaaaacacaaaaacaaaaaacaaaacagaacagaacagcatcacttccttatcattag

SEQ ID NO: 434173 - DNA, 201 bp, Homo sapiens
ccggcccctccacactgacagaggtcagcgtgagccccttgcctcacaccggcccctcccacgctgaccccttgcctcacagcggcccctcccacactgamcccttgcctcacactggcccctcccatgctgagagaggtcggcatgagcccttgcttcacaccggcccctcccaggctgagagaggtcagcgtgagcccc

SEQ ID NO: 434174 - DNA, 201 bp, Homo sapiens
accggcccctcccacactgacagaggtcagcgtgagccccttgcctcacaccggcccctcccacactgacagaggtcagcgtgagccccttgcctcacacyggcccctcccacactgacagaggtcagcgtgagccccttgcctcacaccggcccctccacactgacagaggtcagcgtgagccccttgcctcacaccggc

SEQ ID NO: 434175 - DNA, 201 bp, Homo sapiens
gctgaccccttgcctcacaccagcccctcccacgctgacagaggtcggcgtgagccccttgcctgacactagcccctcccacgctgaccccttgcctcacrccggtccctcccacgctgatcccttgcctcacaccggcccctcccatgctgacagaggtcagtgtgagccccttgcctcacactggcccctcccacgctg

SEQ ID NO: 434176 - DNA, 201 bp, Homo sapiens
acgctgagagaggtcggcctgagccccttgcctcgcaccggcccctcccacgctgagagaggttggcgtgagccccttgcctcacactggcccctcccacrctgaccccttgcctcacaccagcccctcccacgctgacagaggtcggcgtgagccccttgcctgacactagcccctcccacgctgaccccttgcctcaca

SEQ ID NO: 434177 - DNA, 201 bp, Homo sapiens
gcgtgagccccttgtctcgcaccggcccctcccacgctgagagaggtcggcctgagccccttgcctcgcaccggcccctcccacgctgagagaggttggcrtgagccccttgcctcacactggcccctcccacgctgaccccttgcctcacaccagcccctcccacgctgacagaggtcggcgtgagccccttgcctgaca

SEQ ID NO: 434178 - DNA, 201 bp, Homo sapiens
ggcatgagtccctgcctcacactggctcctcccacgctgagagaggtccgcatgagccccttgcctcacaccggcccctcccatgctgagagaggtctgcmtgagccccttgcctcgcaccggcccctgccatgctgagagaggtcggcgtgagccccttgtctcgcaccggcccctcccacgctgagagaggtcggcctg

SEQ ID NO: 434179 - DNA, 201 bp, Homo sapiens
ctccgctcttgcctcccagaggcctctccaggcccagctctcgcccccacggcggcctcccggggccaagtccctgcctgcctcccggcagcccgcgtgcrgcccagttcctccctcacggtggcctgttgatgcccaacgcatgcctctgacaccctgtccagaggcatgagtccctgcctcacactggctcctcccacg

SEQ ID NO: 434180 - DNA, 201 bp, Homo sapiens
tctcggtggcctgtacaggcccagctctggctgtagaacagcctctgcaggccccgctcttgcctcctagggacctctccaggcccagctctcgcccccayggcggcctcccggggccaagtccctgcctgcctcccggcagcccgcgtgcggcccagttcctccctcacggtggcctgttgatgcccaactcatgcctct

SEQ ID NO: 434181 - DNA, 201 bp, Homo sapiens
ccgctccaggtgcaaaagttcctcgagtcagcctctccaggcccagctcctcctgcctcccagcggcctctttcggcccagcccagctcatgcctcccggmggccttcccggcctcctgcctcccgaaggcctgcacaggcccagcctcagcctcacagcggactctccacgcccagctagctctcgcctcactgcggcct

SEQ ID NO: 434182 - DNA, 201 bp, Homo sapiens
gccgctccaggtgcaaaagttcctcgagtcagcctctccaggcccagctcctcctgcctcccagcggcctctttcggcccagcccagctcatgcctcccgrcggccttcccggcctcctgcctcccgaaggcctgcacaggcccagcctcagcctcacagcggactctccacgcccagctagctctcgcctcactgcggcc

SEQ ID NO: 434183 - DNA, 201 bp, Homo sapiens
gatctaggatttgatcaagtgctgggcaacatgatacctctgcaatttagcacctccctatatacctccagttggctcagcccatcaggactaaaactacmcctcatatcctagtgtctcttgtaggcagaagccttgcctaaaccctaagctgcttggctcacattctgtcttgtgctttttttgtaggggttcaaatat

SEQ ID NO: 434184 - DNA, 201 bp, Homo sapiens
gctgctgagttgagaaagactgtgggaagatgtgggtagaagcatgggggccaagctttggcaacatccaggcgggagatgatggtggtcctgaccagggycgtggtggtgttgagagatggtcagaggggagaagtaggggaggaggccagggagttactgggtggggatctttagtacatgttgaagacagtcaacagg

SEQ ID NO: 434185 - DNA, 201 bp, Homo sapiens
tgcaaggagataagaaatgtgaaagagatgcagacattagggaaaaaagtcaggagccttgtttccccaccctctacttgggttctggaactggactcatmggtgagtagtgaggagctgggcccaagcacattaatcctagatctagctctgctttgcgctcgctccagttcttgtatcaaattcacttcaagccaccca

SEQ ID NO: 434186 - DNA, 201 bp, Homo sapiens
gcaagtagcggagactacaagtgcatgccaccatgcccaactaattttttgtatttttgtagagacagggtttcaccatgttgcccaaactagtctggaaytcctgagctcaagcgatccacccgcttccgcctccgcctcccaaaatgctgggattaggggcgtgagccaccgggcctggcccaattactttcttcagtc

SEQ ID NO: 434187 - DNA, 201 bp, Homo sapiens
tgctgagttgagaaagactgtgggaagatgtgggtagaagcatgggggccaagctttggcaacatccaggcgggagatgatggtggtcctgaccagggtcrtggtggtgttgagagatggtcagaggggagaagtaggggaggaggccagggagttactgggtggggatctttagtacatgttgaagacagtcaacaggat

SEQ ID NO: 434188 - DNA, 201 bp, Homo sapiens
ctgcaaagtgttaaacacatctggaaagggatactgacatcatcctcagaatctgtggggagttcacatagccagttaagacccattcctctttgaccctrtaaagattctttaaagaataatacccttagtggttttctagccagcttgcctgctcatttatctttgaggacaacatgccttgtggagctccacaggccc

SEQ ID NO: 434189 - DNA, 201 bp, Homo sapiens
ctcctgccttgcaatggcctctttaggccaagctcatgccccacggcgacttttccaggcacagcttttgccttttgcagcctgtccaggcccagaatgtscttaactcggcgtctccaggacgagctcatcctcccagtgcgtctacaggcccgtctcctgcctcacaacaacctcctttggtccaactcctgctgagct

SEQ ID NO: 434190 - DNA, 201 bp, Homo sapiens
tggtctggggcattgggcaaggctgttgcacttctctgagcccatttccccatctggaaagtgcactgattgtatctccctgtgggcactgagggctcagkgttagtttgagagccagcatctggggtttgggctgtaattccccgtcagccccatagctgcggggaaccagggactttgttgggattaccctaggcatca

SEQ ID NO: 434191 - DNA, 201 bp, Homo sapiens
ttttgtgcatcctctccaagccctgaacttactccagttggcctctccagaccaagctctccctcccagtggcctctacaggccaaaattgtcctcaagtsagcctctccagggccaactcctagctaccggtggcttctgcaggccaaaatcgacctcaagtcagcctcttcacacccagctcttgtctgtaagtggcct

SEQ ID NO: 434192 - DNA, 201 bp, Homo sapiens
caagtcagagccttttggctctgcagcacttgcaacccctcagccgtgcagtggggtttgtgtcgctgggaatgaggagacccctgcccggtgttgttgcmtgtctaatcagtgttttaaaacatatattaatcggggtgggtgcggtggctcacacctgtaatcccagcacttagggagacccaggcggatggatcacct

SEQ ID NO: 434193 - DNA, 201 bp, Homo sapiens
tccaggcccaccttcggcctcccggcagcctcagcaatcaaactattccctcactgcggccaccgaaagccaagtttctccctgcctcacagcatcctccraaaactgagcatttgcctcacggtggcctccccaggccacgaatctgcctgcctcccaggcagctgctgcctcacaatggtctctttaggcccagctctt

SEQ ID NO: 434194 - DNA, 201 bp, Homo sapiens
ttattcctggggctttggcttttactctgactcagatgggaactgcgggaaggttctgagcagagaggtgacatgatctgtctcccaatttaaaagcattstctggctgctgagttgagaaagactgtgggaagatgtgggtagaagcatgggggccaagctttggcaacatccaggcgggagatgatggtggtcctgacc

SEQ ID NO: 434195 - DNA, 201 bp, Homo sapiens
cgcatacagatgggatttgggaataggtttggttatccaaggagcagtgctgagctccttgctaatggggtatgggatgctggtgatttccaggaagtgasctcacaatgactcaagctaccacatagtgttgattgtgaaatgccagttgaagcatatgtcctgcgagcttaggggtgctacaagttgaccactgcagca

SEQ ID NO: 434196 - DNA, 201 bp, Homo sapiens
taaacaaggttctacctgggcttaggttaacttttgctcctttgggccctgtgttctaccagcattccatttatctgaaactctccctcaccttaagaacytatctgttctttaatgatttactgctgcttcctgggttcaaaagaacccagttcaggagtttctgttttagtttgagatcttataggcctgtctcatcag

SEQ ID NO: 434197 - DNA, 201 bp, Homo sapiens
cgccatgcctggcccctaccctgcctattgagaaccaaaagaaggatccaaattctccttagctcaactcgagccatttcctgattgcttcatcagcaagragctggttattgggctgtccaggcctcccaagcagcacagaaatgaggtgaaggagttttcctgctgctccactctgtaaggagttggagggtgatgttt

SEQ ID NO: 434198 - DNA, 201 bp, Homo sapiens
ggcctcaagtgttcctcctgccttgacctcccaaagtgttgggattctgggtgggagcccccatgcccagcaattacaagggtctttataaaagaaagagrgtaggagattcagaattggagcaggagatgtggtgatgaaagcagaggtaagagagggagatttgaagatgcttcacttctggctttgaagatggagtca

SEQ ID NO: 434199 - DNA, 201 bp, Homo sapiens
cacgggctggagtgcaatggcgcaatctcagctcactgtaacctcaacctcccgtgcttgatcgcttatataatctcagctcactgtaatctcaacctccygggctcgatcgcatgtatatacacacatatatttgtttgtttagacggagtcttggtctgttgcccaggctggagtgcagtggcgcgatctcagctcact

SEQ ID NO: 434200 - DNA, 201 bp, Homo sapiens
gttgttcatgctagtttcaaacttcgggcctcaagtgttcctcctgccttgacctcccaaagtgttgggattctgggtgggagcccccatgcccagcaatyacaagggtctttataaaagaaagagagtaggagattcagaattggagcaggagatgtggtgatgaaagcagaggtaagagagggagatttgaagatgctt

SEQ ID NO: 434201 - DNA, 201 bp, Homo sapiens
tgggatgctggtgatttccaggaagtgagctcacaatgactcaagctaccacatagtgttgattgtgaaatgccagttgaagcatatgtcctgcgagcttrggggtgctacaagttgaccactgcagcagtaaagatgactctgaagaatggcatgggatggatcctttcgaatgcacttgagcagcggtctccaaccaca

SEQ ID NO: 434202 - DNA, 201 bp, Homo sapiens
cgggggtctcactatgttgttcatgctagtttcaaacttcgggcctcaagtgttcctcctgccttgacctcccaaagtgttgggattctgggtgggagccmccatgcccagcaattacaagggtctttataaaagaaagagagtaggagattcagaattggagcaggagatgtggtgatgaaagcagaggtaagagaggga

SEQ ID NO: 434203 - DNA, 201 bp, Homo sapiens
ggggaatgggctgggatgggatagcgcaaactgccctggaagggaaaccagcactgtacagacctgaacaacgaagatggcatattttgttcagggaatgrtgaattaggtgtggcaggaatgctttgtagagacagtaatttgcttgtatggaattttgcctgagagacctcattgcagtttctgattttttgatgtcat

SEQ ID NO: 434204 - DNA, 201 bp, Homo sapiens
tgaagcatatgtcctgcgagcttaggggtgctacaagttgaccactgcagcagtaaagatgactctgaagaatggcatgggatggatcctttcgaatgcayttgagcagcggtctccaaccacagggccacagagctggaggtgagcagcaggcgagtgaagggaaacttcatctgtatttctagcccctcccatcgcttg

SEQ ID NO: 434205 - DNA, 201 bp, Homo sapiens
tttaaagaataatacccttagtggttttctagccagcttgcctgctcatttatctttgaggacaacatgccttgtggagctccacaggccccagaggggtrtggattctgcattcgaaagtgctgaagctgagagactgggtcttggtggaccccaagagatctggttctcctctactcattgttccttcttttcccagca

SEQ ID NO: 434206 - DNA, 201 bp, Homo sapiens
tgccagttgaagcatatgtcctgcgagcttaggggtgctacaagttgaccactgcagcagtaaagatgactctgaagaatggcatgggatggatcctttcraatgcacttgagcagcggtctccaaccacagggccacagagctggaggtgagcagcaggcgagtgaagggaaacttcatctgtatttctagcccctccca

SEQ ID NO: 434207 - DNA, 201 bp, Homo sapiens
agtaaagctttccaggcccaccttcggcctcccggcagcctcagcaatcaaactattccctcactgcggccaccgaaagccaagtttctccctgcctcacrgcatcctccgaaaactgagcatttgcctcacggtggcctccccaggccacgaatctgcctgcctcccaggcagctgctgcctcacaatggtctctttagg

SEQ ID NO: 434208 - DNA, 201 bp, Homo sapiens
caccttgctcattctagtttaaactgttgagtggtttgtgtctcctgattggactcctacaaatacagaattgatgctaggaagggtaccaggagatagaygcatacagatgggatttgggaataggtttggttatccaaggagcagtgctgagctccttgctaatggggtatgggatgctggtgatttccaggaagtgag

SEQ ID NO: 434209 - DNA, 201 bp, Homo sapiens
ttggttcattgtctacatggctagggagggagtcaataataggcttttcacttgctgcaagggccggttctcctggccccatggctctagggatggaggayactgcaggagatgcaccgctcacttcccagctgaggactgtgggtcatctcagggcgatttcacagtccccacatgccccaccccctcagctctgcaaat

SEQ ID NO: 434210 - DNA, 201 bp, Homo sapiens
ctgaatattgcctagtgaatattaagtatttattctcacctttcagacatgaacttatgaattcaacaggtgaagatttacaacttgataaatcagcttcstgaggtacgtcttcagtcttaagtcagattagaagattatgtgaagtaattaacacttaacattgatttaatggtagcttccacatgaaatagtatgcct

SEQ ID NO: 434211 - DNA, 201 bp, Homo sapiens
tttatagcctgttatttctggagtctggagatggctctgcataagatttgctgaagcaaattttattacattagaagagaacctagctggctgcatcctayactggaagcttttagatgctaataaggaggtcatgtaaaggtcacagaatgactctggaatccattccccaccaagaaagaataatgacattctatgttg

SEQ ID NO: 434212 - DNA, 201 bp, Homo sapiens
tcaagcaattctcctgcctcagcctcctgagtagctgggattataggtaagtgccaccacacccagctgatttttgtgttttttgtagagacgaggttttrccatgtttcccagactgttctcaaactcctgagctcaaagcagtccacccatcttgtcctcccagagtgctgggattacaggtgtgagccaccttgctca

SEQ ID NO: 434213 - DNA, 201 bp, Homo sapiens
cctcccgagtagttgggattacaggcatgtgccaccatgcccagctaattttgtatttttagtagagatggggtttctccatgctggtcaggctggtctcmaactcccgacctcaggtgatctgtctgccttggcctcccaaagtgctgggattacaggcatgagccattgtgcctggccgaaattaatactttttatatt

SEQ ID NO: 434214 - DNA, 201 bp, Homo sapiens
ctctgctagttccatattctctagagttgtctttactttctgctagtgtgtccctcattgtgctgatcctctgtaaaaattaatacctttttttttttttygagatggagtttcactcttgttgcccaggctggagtgcaatggcgctatgtcggctcagcgcaacctccacctgccgggttcaagcctcccgagtagttg

SEQ ID NO: 434215 - DNA, 201 bp, Homo sapiens
gatcctcctgcctaggcttcccaaattgctgggattacaggcatgagccacaatgcctggcctctgctagttccatattctctagagttgtctttactttstgctagtgtgtccctcattgtgctgatcctctgtaaaaattaatacctttttttttttttcgagatggagtttcactcttgttgcccaggctggagtgca

SEQ ID NO: 434216 - DNA, 201 bp, Homo sapiens
agatgccttgtaggcacctcaggatggagaggaccctgattccaatgtcctttttttctttagaaacaggaccttgccctgtcatttaggatggagttcartggtccaatcatggctcattgtagcctcaaactcccaggctcaagcaatcctaccatgtcagccttcccagtagctgggactacaggtaagcatcgtgac

SEQ ID NO: 434217 - DNA, 201 bp, Homo sapiens
tttttatttttggtagagtcagagtttcaccatgttggccaggctggtctcgaactccagacttcaggtgatttgcctgccttagcctcccaaagtgctgsgatacaagcatgagccaccatgcccagcctgatgccaggagttttagactagcctgggcaacctagcaagaccttgtctctacagaatatttaaacatta

SEQ ID NO: 434218 - DNA, 201 bp, Homo sapiens
tcatccctctttttttaagaatgtctttttgtcacttctagctggacctaccatgaaagacttctgaatccaggaagagagactgactgggcaacatgttrttcaggtacaaaaagacttggaccgtaactcaaaaatgatcaaataatagtgcatgcatcaagtgcaatgggaagctcttctggagagggagagaagctt

SEQ ID NO: 434219 - DNA, 201 bp, Homo sapiens
tattgctcaagccctggaggttgaggctgcagttaactgtgattgcaccactgcagtccagcctaggcgatagagcaagaccctttctctaaaaataaaawaaaaattaaccttctatcatatttctgagtaacaccttccctcctacgtttctcctagaagcccttaaattttgtttttcacataccatttaaaactttt

SEQ ID NO: 434220 - DNA, 201 bp, Homo sapiens
ttgagtctagaaggttgaggctgcagtaagctatgatcacaccattgcactttagctttgctaagagcaagactgcatttcttaaacaaaataaaaattasatgggaatattgctcaagccctggaggttgaggctgcagttaactgtgattgcaccactgcagtccagcctaggcgatagagcaagaccctttctctaaa

SEQ ID NO: 434221 - DNA, 201 bp, Homo sapiens
gcctcagtagcacacatacttaagttggaacaatagagagattggcatggcctctgtgaaagaatgacatgcaaatttgtgaagcattccatattttttawaaaaaaagaggaaaaaattactcccagattttcaccgtgtttgtgcatgtgaccttttgtttaggttgaattatatccaaagatgaaatttccaaaagtg

SEQ ID NO: 434222 - DNA, 201 bp, Homo sapiens
gtgcgatcggttgcaccttctgcgacaggggccggccggttggcgcgcagcgcctgctagcgcagagtctggcccttgctgcgcccggccccgaagaccgrgaagtcgtaaagctcctcctcgcagtttatgtgcggcggcggccgggccgaagcctggggacacagaactgccagctcagcagccggttacatcccgccc

SEQ ID NO: 434223 - DNA, 201 bp, Homo sapiens
gctttaccctggaaggcttatacacaatttaaacatccctcatagtataagaaagtgcccatttcactgcacctttgccagcacagggtattataatttartaagtcattttttgtttgattattttaaatagataaaagacctcatattactttacttgtcacatttcaacatcttcccttagcttattagctctatttc

SEQ ID NO: 434224 - DNA, 201 bp, Homo sapiens
gagctaatcaccccatataccaagggacaaattgtatctgtttttacaattatactgtaggagacattatgttccatgacaatggtagtttttaatgacartttttaattgagtgaaattaccataaaaataataatagtagcagctaatatttactgagctgttactagatgcctataaatagcatagatttttaaattc

SEQ ID NO: 434225 - DNA, 201 bp, Homo sapiens
ttgaggtcaggtgtctagatactcccagcttgtctgttgaggagaatgctgttctcattgtgctgcctttggtggtactgtgtgtggctctttagatgtgrgtggaggtgagctgggggagttaatgagatcttttttaggtgcttttgataaagtagcctgcactacaggattcattgtgacttttttccttaacctgtg

SEQ ID NO: 434226 - DNA, 201 bp, Homo sapiens
agctggagctaatcaccccatataccaagggacaaattgtatctgtttttacaattatactgtaggagacattatgttccatgacaatggtagtttttaaygacaatttttaattgagtgaaattaccataaaaataataatagtagcagctaatatttactgagctgttactagatgcctataaatagcatagattttta

SEQ ID NO: 434227 - DNA, 201 bp, Homo sapiens
aatgggagagctggagctaatcaccccatataccaagggacaaattgtatctgtttttacaattatactgtaggagacattatgttccatgacaatggtartttttaatgacaatttttaattgagtgaaattaccataaaaataataatagtagcagctaatatttactgagctgttactagatgcctataaatagcata

SEQ ID NO: 434228 - DNA, 201 bp, Homo sapiens
aaaagtctgtaaacaagcttgctggtctctccctatcctacaaaagagcatacctcttctgtaaccagaaggcccttttgattagtcaaggctggacagastgagattaggggggtgtgtgtgtgtgtgtgtgtgtgtgtgtgtgtgtgtgtcttgagacagggtctcactctgtcacccaggctggagtgcagtggtgag

SEQ ID NO: 434229 - DNA, 201 bp, Homo sapiens
tagaagagaacctagctggctgcatcctacactggaagcttttagatgctaataaggaggtcatgtaaaggtcacagaatgactctggaatccattccccmccaagaaagaataatgacattctatgttggcctcttttcatttccctttgattttaagtaataaattctctcctcacttcccagctgaacggtttgggag

SEQ ID NO: 434230 - DNA, 201 bp, Homo sapiens
tggctctgtaccattggccaagggacttaaggatagatgaagggctgcagttttgttaaatggaacaatatgaagagatggcattgtaaaaaaaaaaaaacaaaaaaaaaaaacaaacaaacaaacaaaaaaaacgcttggcagcagggcccatttgaatggttggtccttggctcctgtgttgatataggcagatccttg

SEQ ID NO: 434231 - DNA, 201 bp, Homo sapiens
tttgggccctgtgttctaccagcattccatttatctgaaactctccctcaccttaagaacctatctgttctttaatgatttactgctgcttcctgggttcraaagaacccagttcaggagtttctgttttagtttgagatcttataggcctgtctcatcaggttggtgtcagcccagctaggattaggcagaattgggtgg

SEQ ID NO: 434232 - DNA, 201 bp, Homo sapiens
tcaggccattgcagtctttattgttttggatgcttacattgtctcatccaggttaataattatctcttcaagttgactttcatgtctttttgacgtgatgycttttggactttgatggcttccttgctttctggcaaacaagatgttccaggatcaatatactgcaccatacatggagtcagccatttctctagggaacct

SEQ ID NO: 434233 - DNA, 201 bp, Homo sapiens
aaaacggaatggattcacactgtttagatttactaaaatggaaggattgcagcaagatcatatccctagtctccctgtagcaaatgtcacctgctagctgkttttttttttttttttttttttttgtaagttgaagttttgttctgtcgcccacgccagagcgcagtggtatgatctcagctcatggcaagctcacctcct

SEQ ID NO: 434234 - DNA, 201 bp, Homo sapiens
tccctcattgtgctgatcctctgtaaaaattaatacctttttttttttttcgagatggagtttcactcttgttgcccaggctggagtgcaatggcgctatstcggctcagcgcaacctccacctgccgggttcaagcctcccgagtagttgggattacaggcatgtgccaccatgcccagctaattttgtatttttagtag

SEQ ID NO: 434235 - DNA, 201 bp, Homo sapiens
tgcatattatcttgtaattagatgatttagttagatatgtttttaaagaaatagaaatataattgattttcttgttttggctctggagtggggacaaaacrgaatggattcacactgtttagatttactaaaatggaaggattgcagcaagatcatatccctagtctccctgtagcaaatgtcacctgctagctgtttttt

SEQ ID NO: 434236 - DNA, 201 bp, Homo sapiens
ggcctctttaggccaagctcatgccccacggcgacttttccaggcacagcttttgccttttgcagcctgtccaggcccagaatgtccttaactcggcgtckccaggacgagctcatcctcccagtgcgtctacaggcccgtctcctgcctcacaacaacctcctttggtccaactcctgctgagctgcttggcagcctctg

SEQ ID NO: 434237 - DNA, 201 bp, Homo sapiens
gctttggcaggcccagctcctgcctgccagtggcctctttaggcccagctcattcctcacaacggcctttccaggccccgtttttcccttccggcagcctyttggcctctaatttgtttatcttttgtgtataaatcccaaaatatggaattttggaatattgctaccattatataaatattttcgtatgtaatttatttg

SEQ ID NO: 434238 - DNA, 201 bp, Homo sapiens
aatggcgcaatctcagctcactgtaacctcaacctcccgtgcttgatcgcttatataatctcagctcactgtaatctcaacctcccgggctcgatcgcatrtatatacacacatatatttgtttgtttagacggagtcttggtctgttgcccaggctggagtgcagtggcgcgatctcagctcactgcaacctccgcatcc

SEQ ID NO: 434239 - DNA, 201 bp, Homo sapiens
gatgcaccgctcacttcccagctgaggactgtgggtcatctcagggcgatttcacagtccccacatgccccaccccctcagctctgcaaataccaagcagygcagcctgcctaggggatgatgggctcgagagtgcccaggtagtgcccagagtgcccttggcaggcccctcacctagctgcttccacagctctgtagcaa

SEQ ID NO: 434240 - DNA, 201 bp, Homo sapiens
atggctagggagggagtcaataataggcttttcacttgctgcaagggccggttctcctggccccatggctctagggatggaggacactgcaggagatgcascgctcacttcccagctgaggactgtgggtcatctcagggcgatttcacagtccccacatgccccaccccctcagctctgcaaataccaagcagcgcagcc

SEQ ID NO: 434241 - DNA, 201 bp, Homo sapiens
catatcttggtgtgaggaccttcactgtatctgggaatgcctactggtcacctcggtgacagagaccaaggcatttacctgatatgagtgtcttggttcaytgtctacatggctagggagggagtcaataataggcttttcacttgctgcaagggccggttctcctggccccatggctctagggatggaggacactgcagg

SEQ ID NO: 434242 - DNA, 201 bp, Homo sapiens
ggagtcattcaggaccatgcttatacttcattatatcaaatgggagatccagtaatttatagcctgttatttctggagtctggagatggctctgcataagmtttgctgaagcaaattttattacattagaagagaacctagctggctgcatcctacactggaagcttttagatgctaataaggaggtcatgtaaaggtcac

SEQ ID NO: 434243 - DNA, 201 bp, Homo sapiens
tcctttgggccctgtgttctaccagcattccatttatctgaaactctccctcaccttaagaacctatctgttctttaatgatttactgctgcttcctgggytcaaaagaacccagttcaggagtttctgttttagtttgagatcttataggcctgtctcatcaggttggtgtcagcccagctaggattaggcagaattggg

SEQ ID NO: 434244 - DNA, 201 bp, Homo sapiens
cactcccagctaatttttttctttttttggatagagacagggtctcactgtattgtccagaccggtctctagctcctggccttaagcaatcctcctgcatkagcttctcaaattgctggaatttcaggcatgagccaccatgcctggcctgggctagtcctatattctctagagttctctttactttgtgctagccaatct

SEQ ID NO: 434245 - DNA, 201 bp, Homo sapiens
ttttagagtagggaaccatgcatattatcttgtaattagatgatttagttagatatgtttttaaagaaatagaaatataattgattttcttgttttggctytggagtggggacaaaacggaatggattcacactgtttagatttactaaaatggaaggattgcagcaagatcatatccctagtctccctgtagcaaatgtc

SEQ ID NO: 434246 - DNA, 201 bp, Homo sapiens
ctagcattaaatttgctaatgaattcaataacattttcataatatttttagttacatgcttaaggttctcttagtgtttctcccactttttaatagcttawgcctttttcgcctttgggtttttttggttcattttaaagcaaaaatcttacaacatgtgatacctggaaacactgtaacctagtggtaagaccataggcc

SEQ ID NO: 434247 - DNA, 201 bp, Homo sapiens
attacaggcgccagccaccactcctggctgatttttgtatttttagtagagacggggtttcatgatcttggctaggctggtcttgaactgctgacctcctsatccactcacctcagcctctcaaagtgctgggattacaggtgtgagccgccatgcctggccaaatattatttttttaaatgaattgtttctcttagtctg

SEQ ID NO: 434248 - DNA, 201 bp, Homo sapiens
agtggcacgatctcggctcactgcaacctccgcctcccgggttcaagcagttctctgcctcagcctcccgagcagctgggattacaggcgccagccaccaytcctggctgatttttgtatttttagtagagacggggtttcatgatcttggctaggctggtcttgaactgctgacctcctgatccactcacctcagcctct

SEQ ID NO: 434249 - DNA, 201 bp, Homo sapiens
tggagtgcagtagtggaatctcagttcactgcaacctccgcccccctgagttcaaacaattctcctgtctcagcctcctgagtagctgagattacaggcaygtgccaccatgcccggctattttttgtatagatggcatttcgccatgttggccaggctggtctcgaactcctgacctcaagtgatccaccaacttcggcc

SEQ ID NO: 434250 - DNA, 201 bp, Homo sapiens
actggggaggcggaggtcgaagtgagccgagattgtgtccctgcactccagtctgggagacagagtgaaactaggcctcaaaaaaaaaaaaaaaaaaaaaagaatatggccttggcagagaggggccagcccggcagtgccttcccttgggtttctcctgggtaggcctctgccatgaggaggcgcttccttctgcctgtc

SEQ ID NO: 434251 - DNA, 201 bp, Homo sapiens
actgtatctgggaatgcctactggtcacctcggtgacagagaccaaggcatttacctgatatgagtgtcttggttcattgtctacatggctagggagggartcaataataggcttttcacttgctgcaagggccggttctcctggccccatggctctagggatggaggacactgcaggagatgcaccgctcacttcccagc

SEQ ID NO: 434252 - DNA, 201 bp, Homo sapiens
tctctttcctcaggtggccaggtgcatatcttggtgtgaggaccttcactgtatctgggaatgcctactggtcacctcggtgacagagaccaaggcatttrcctgatatgagtgtcttggttcattgtctacatggctagggagggagtcaataataggcttttcacttgctgcaagggccggttctcctggccccatggc

SEQ ID NO: 434253 - DNA, 201 bp, Homo sapiens
taggccaagctcatgccccacggcgacttttccaggcacagcttttgccttttgcagcctgtccaggcccagaatgtccttaactcggcgtctccaggacragctcatcctcccagtgcgtctacaggcccgtctcctgcctcacaacaacctcctttggtccaactcctgctgagctgcttggcagcctctgtaggccac

SEQ ID NO: 434254 - DNA, 201 bp, Homo sapiens
cccacaaggaccactccacacccagctcagccccatcccctcagatagtcctctctctttcctcaggtggccaggtgcatatcttggtgtgaggaccttcrctgtatctgggaatgcctactggtcacctcggtgacagagaccaaggcatttacctgatatgagtgtcttggttcattgtctacatggctagggagggag

SEQ ID NO: 434255 - DNA, 201 bp, Homo sapiens
ggcccagaatgtccttaactcggcgtctccaggacgagctcatcctcccagtgcgtctacaggcccgtctcctgcctcacaacaacctcctttggtccaamtcctgctgagctgcttggcagcctctgtaggccacagagttcttaaagtaaagctttccaggcccaccttcggcctcccggcagcctcagcaatcaaact

SEQ ID NO: 434256 - DNA, 201 bp, Homo sapiens
atttacctgatatgagtgtcttggttcattgtctacatggctagggagggagtcaataataggcttttcacttgctgcaagggccggttctcctggccccwtggctctagggatggaggacactgcaggagatgcaccgctcacttcccagctgaggactgtgggtcatctcagggcgatttcacagtccccacatgcccc

SEQ ID NO: 434257 - DNA, 201 bp, Homo sapiens
tatgagaatctaatgcctgatattctgttactgtctcccatcaccccagatggacagtctagttgcaggaaaacaagctcagagatcccactgagtctacrttatagtgcgttgtagaatcatttcattatatattactatgtagtaataatagaaataaagtacacaatatatgtaatgcacttgaatcatcctgaaatt

SEQ ID NO: 434258 - DNA, 201 bp, Homo sapiens
gtcctgaagtcggcctctccaggtccagctccagcctcccggcagcctctgcaggcctaagttgtcctcaagtcggcctggaagtgggcctggaagagctrcaagttggcctccctgggcccagctccgtcctcttggcctctccaggtgcaaaacttcctcgagtcagcctctccaggcccagctcctcctgcctcccag

SEQ ID NO: 434259 - DNA, 201 bp, Homo sapiens
ggtgggtacatcacagcagctgctgccctctggacacagtgacaaaagaacactctgggcctggagccgtggtctggggcattgggcaaggctgttgcacytctctgagcccatttccccatctggaaagtgcactgattgtatctccctgtgggcactgagggctcagtgttagtttgagagccagcatctggggtttgg

SEQ ID NO: 434260 - DNA, 201 bp, Homo sapiens
atgttgatgatttgtattttgaataaatagtttgaatacatagaacattaagcttgtatacattttgaaaatagtattttaatattctactgtgtcatagkcacaacgattggatatatattgaatttatatgtactttaagttgttatatgtttatggtctttagcattctaacatgcaattgtgtatctgttaagtctt

SEQ ID NO: 434261 - DNA, 201 bp, Homo sapiens
gtggcaaattatgttgatgatttgtattttgaataaatagtttgaatacatagaacattaagcttgtatacattttgaaaatagtattttaatattctacygtgtcatagtcacaacgattggatatatattgaatttatatgtactttaagttgttatatgtttatggtctttagcattctaacatgcaattgtgtatct

SEQ ID NO: 434262 - DNA, 201 bp, Homo sapiens
agcaatttgaaagttatttgaggagaaggggagacttaaaatgatgattcaaatgaagcaaactaaaaagtaataaagcaagacagaggaaaaagcagtaytcacttgagcacatcccaaaagaataacatttcaaatgtaactagaaaaaagtatgctgaagttcgcaatacagaaataattattaataagatagcttta

SEQ ID NO: 434263 - DNA, 201 bp, Homo sapiens
tccaatctaagctttattttatcccgtttcttctatatttgtataactttaggtggctatcttcattgaaagttttttctcaaaagccttaaaatagaacrtagttcttggcagcaatttgaaagttatttgaggagaaggggagacttaaaatgatgattcaaatgaagcaaactaaaaagtaataaagcaagacagagg

SEQ ID NO: 434264 - DNA, 201 bp, Homo sapiens
ctcgaattcctgacctcaagttatctgcctgcctcggcctcccaaagtgttggagttacaggcgtgaaccaccatgcctggccagctctatttctttaagmctacatgttttgcacttgttaaaagtatttgaacatacaattactcagcttcccttgtttatgcttgaattttgtataatcttaaatattttttccaatc

SEQ ID NO: 434265 - DNA, 201 bp, Homo sapiens
gaacccagggggcagaggttgcagtgagctgagatcgcaccattgcactccagcctgggcaacaagagcaaaactctgtctccaagtaaaaaaaagatttsttaaaatgatattttcagtattttatagatgatgtgtaagcagcaatcttaataggatgttaacccgacactttgcgagactggcagctgatttgatcca

SEQ ID NO: 434266 - DNA, 201 bp, Homo sapiens
accctggtaggctagtggagttacacacacagtctgatttcagctgcactgtccagagatgcaacacggtccaatcaaataacattctctgagcctgtttmtttagctgtaaaagaagaataacatacccatctaaaaaggcagcttattgtatttgattggtcttttattttctatgaaactgtgtttaacacagtaatt

SEQ ID NO: 434267 - DNA, 201 bp, Homo sapiens
gaggcaccctggtaggctagtggagttacacacacagtctgatttcagctgcactgtccagagatgcaacacggtccaatcaaataacattctctgagccygtttctttagctgtaaaagaagaataacatacccatctaaaaaggcagcttattgtatttgattggtcttttattttctatgaaactgtgtttaacacag

SEQ ID NO: 434268 - DNA, 201 bp, Homo sapiens
ccctggcaactttgtatattaggccaaatttacatttcttactaactttatgagaggcaccctggtaggctagtggagttacacacacagtctgatttcarctgcactgtccagagatgcaacacggtccaatcaaataacattctctgagcctgtttctttagctgtaaaagaagaataacatacccatctaaaaaggca

SEQ ID NO: 434269 - DNA, 201 bp, Homo sapiens
atgctgacagaggtcagcgtgagccccttgcctcacaccggcccctcccacactgacagaggtcagcgtgagccccttgcctcacaccggcccctcccacrctgacagaggtcagcgtgagccccttgcctcacaccggcccctcccacactgacagaggtcagcgtgagccccttgcctcacaccggcccctccacactg

SEQ ID NO: 434270 - DNA, 201 bp, Homo sapiens
tgtaatcttatgttcatgggcgtttacacaatggagttactgttcatcatgggggtaccgtggacaagcccagggctgccggcgagtcatgccatccttayacgtttctccttgtaaggtgctttgtagtgtctacacactttgtttctagattgctgcaaagctgaggaaaagttgtatttctttaattattagttagca

SEQ ID NO: 434271 - DNA, 201 bp, Homo sapiens
tggttcattgtctacatggctagggagggagtcaataataggcttttcacttgctgcaagggccggttctcctggccccatggctctagggatggaggacrctgcaggagatgcaccgctcacttcccagctgaggactgtgggtcatctcagggcgatttcacagtccccacatgccccaccccctcagctctgcaaata

SEQ ID NO: 434272 - DNA, 201 bp, Homo sapiens
gacagagaccaaggcatttacctgatatgagtgtcttggttcattgtctacatggctagggagggagtcaataataggcttttcacttgctgcaagggccrgttctcctggccccatggctctagggatggaggacactgcaggagatgcaccgctcacttcccagctgaggactgtgggtcatctcagggcgatttcaca

SEQ ID NO: 434273 - DNA, 201 bp, Homo sapiens
gtgttgttgcatgtctaatcagtgttttaaaacatatattaatcggggtgggtgcggtggctcacacctgtaatcccagcacttagggagacccaggcggrtggatcacctgaggtcaagagttcaagaccagccttctctactaagaaaactccttctctactaagaaaatacaataattagccggacatggtagtgggc

SEQ ID NO: 434274 - DNA, 201 bp, Homo sapiens
acataagttttcttttagagtagggaaccatgcatattatcttgtaattagatgatttagttagatatgtttttaaagaaatagaaatataattgattttyttgttttggctctggagtggggacaaaacggaatggattcacactgtttagatttactaaaatggaaggattgcagcaagatcatatccctagtctccct

SEQ ID NO: 434275 - DNA, 201 bp, Homo sapiens
taatacacctctctcagcctcccaaagtgctgagattacaggcataagccaccaccttcaaccaagactttcttaaaccaaataaaaattaagtgagattwcttgagcccaggttgtcaaggctgcagtgagcctgattgcaccactgcactccagcctaggtgacagaatgaaactgtctcaaaaaataaaataaaataa

SEQ ID NO: 434276 - DNA, 201 bp, Homo sapiens
atattaggccaaatttacatttcttactaactttatgagaggcaccctggtaggctagtggagttacacacacagtctgatttcagctgcactgtccagaratgcaacacggtccaatcaaataacattctctgagcctgtttctttagctgtaaaagaagaataacatacccatctaaaaaggcagcttattgtatttga

SEQ ID NO: 434277 - DNA, 201 bp, Homo sapiens
cctgattggaaaagtcagtcaataatttcaggtcactgttggccttagaagaagagcccaaaggcaacaagcaaaggcgctggtgtccagtcgccttctaraagcattttcactttcccttaaggtttcccttgatgaacatagaagtattgtatgtagaattgacccagtgctgccctggcaactttgtatattaggcca

SEQ ID NO: 434278 - DNA, 201 bp, Homo sapiens
tatatgtaatgcacttgaatcatcctgaaattattccctcactcccaatctgtggaaaaattgtcttccacacattcactctgttttttggtagaggcagrgtcttaatatattgcccaggctgatctcaaactcctggcctcaagtaatacacctctctcagcctcccaaagtgctgagattacaggcataagccaccac

SEQ ID NO: 434279 - DNA, 201 bp, Homo sapiens
gatgtggtcccaccggcctggggtccgccttcctccctccaccgggctggcatttagcggtggctgtccccaccgctcgctctttcgctccctccttagcycgccggctcccagcctttgatgccacaagtaaacaaacctcgcatgtcgccttctgctgggtcctggtgtgttccactttctatagattcggcgtttagt

SEQ ID NO: 434280 - DNA, 201 bp, Homo sapiens
atttagcggtggctgtccccaccgctcgctctttcgctccctccttagcccgccggctcccagcctttgatgccacaagtaaacaaacctcgcatgtcgcmttctgctgggtcctggtgtgttccactttctatagattcggcgtttagtgtgcacctgcggtatgcatcggtgtatcatgggaggagtgaaaagtcaggc

SEQ ID NO: 434281 - DNA, 201 bp, Homo sapiens
aagagaggcaccaagaaatctcttccctgtctgaggtttcccagacagatagagtagtatcaggcccagagcccaggagtcctggctgccagccgcaggcyccctctcttggtcagggaaagaggttgcctaggcaaagctggggattacacagctaatccgggctcagacctgagtcctcggatccctccctttggggca

SEQ ID NO: 434282 - DNA, 201 bp, Homo sapiens
aacaactcagtgaagtcaggccttgtacccctagtcactagacaagaaaacagagggtcagagaggtgaggagacttgcccaagctcacctgatccctgayctgactgattgaaggcccagggcacccatccatgctaactaaggtgcaagttcgtactgtcacttctttgtgaaggggctgctctttaacaaaggataaa

SEQ ID NO: 434283 - DNA, 201 bp, Homo sapiens
gagtccagggtttttatgggctcagaagggaggaagtgtgtgctgattggtccatggatggccatggatgggcttggataaagcaccataagttcttcctytaggccatggactccccctggaactggcagcctggcccccaggcttcaggctgtccctgggttgaaggtggtgtttcacctgggacctgcccctttctgc

SEQ ID NO: 434284 - DNA, 201 bp, Homo sapiens
ggcaagccacagatctgtgactcagtttaccctgtgtaaaatgaggataatgataatattcacaacctaggttgtcatgacaattaaatgacatcatgtgygtgcaaccaaaatagcatttggctcatcctaggcacgggagaactatatgccaggactcagcccatggctcacgcagagctggagaagatctgggggaag

SEQ ID NO: 434285 - DNA, 201 bp, Homo sapiens
atggccatggatgggcttggataaagcaccataagttcttcctctaggccatggactccccctggaactggcagcctggcccccaggcttcaggctgtccytgggttgaaggtggtgtttcacctgggacctgcccctttctgcccaggagcctgtctgcctcctgctaccatcaacatggcatccacagcacccaggctg

SEQ ID NO: 434286 - DNA, 201 bp, Homo sapiens
aggggggcttcctgggtccccaagagcagagggatgcctgggtccagagctgtggctaggtagctgcagctgtgcctgggagctcagggctcctgccctgmcaacttgatagaaggcagggttcccacctgttcctggtccctgccagctctgtggagcatgcagccccagctatgcctcccctgctgcagctggcatccc

SEQ ID NO: 434287 - DNA, 201 bp, Homo sapiens
atgaggaagcaggacaggaaaccacatttgctgaaggccaagggctgtgacaggcagacactgagacatatcgctgcactcagttctcagaacaactcagygaagtcaggccttgtacccctagtcactagacaagaaaacagagggtcagagaggtgaggagacttgcccaagctcacctgatccctgacctgactgatt

SEQ ID NO: 434288 - DNA, 201 bp, Homo sapiens
aagtcaggccttgtacccctagtcactagacaagaaaacagagggtcagagaggtgaggagacttgcccaagctcacctgatccctgacctgactgattgmaggcccagggcacccatccatgctaactaaggtgcaagttcgtactgtcacttctttgtgaaggggctgctctttaacaaaggataaaatgagaggttgt

SEQ ID NO: 434289 - DNA, 201 bp, Homo sapiens
acagcacccaggctgtgcatgctgagggacgcctgcaggcctgcactgagctgccctcagtctcctcttggcttccctcctgtgcctgtcggtgaccaaastctggagggggccaagatgacaggggtctggcatgtcaacaccacccagagtacatacacacccagctgggttgcgacagcacccaggctcagtttcaac

SEQ ID NO: 434290 - DNA, 201 bp, Homo sapiens
gggagagacttgcctctgtttgcctacaggtgccaagccaaaagaggggcttgagcttgtggagaaagcattgagttggaaatcgaatcacccagcttcarattctgcctctactaatgccatgtggtctggggccaattactttagttctctgtgcaacagtgtcggcatcgggagtaaaggggttgaggtggtggggtg

SEQ ID NO: 434291 - DNA, 201 bp, Homo sapiens
ttctgcctctactaatgccatgtggtctggggccaattactttagttctctgtgcaacagtgtcggcatcgggagtaaaggggttgaggtggtggggtgaraagtgtccactcttggtccctgcaagtctgaatcctttacactgcatgtcagcttagaataatgacggttatgagcaaggagcctggaatcagattgcca

SEQ ID NO: 434292 - DNA, 201 bp, Homo sapiens
ctctcctgcttccaacgtttgtccagttgcacccctagcctcaccactaacaactttgttctccccttactttctcctttcgatcagtaacacggaggaaytgctgtttgtttgaattctagtgggacagatccgtcttctctttgaccttccctttcattggtaatttgttctgctgctcacatctgatgacgtcccttt

SEQ ID NO: 434293 - DNA, 201 bp, Homo sapiens
aaatgaaagaaatatatgtcagctagaaaaaagcatattactgaataatttgtatgacataattcccaatgttgggaaaaaagaagtttgtatctgcacayacacacacacacacacacacacacacacacacacacacacacacaagattggaaggatagacactgaaaagtgacctctggcctcatccgtgattttatt

SEQ ID NO: 434294 - DNA, 201 bp, Homo sapiens
atctgatgacgtccctttgggccatcaatgtccctgtttaaagtatgacctatagctggaacaatcttatttcctatgtgaattttagttaaataattcctttttttttttttggagacggagcttcgctcttgttgccttgcccaggctggagtgcagtggagcgatcctagctcactgcaacctccgcctccagggttc

SEQ ID NO: 434295 - DNA, 201 bp, Homo sapiens
ctggaacaatcttatttcctatgtgaattttagttaaataattcctttttttttttttggagacggagcttcgctcttgttgccttgcccaggctggagtrcagtggagcgatcctagctcactgcaacctccgcctccagggttcaagcaattctcctgcctcagcctcctgagtagcttggattacaggtggcacctgc

SEQ ID NO: 434296 - DNA, 201 bp, Homo sapiens
atgaaagaaatatatgtcagctagaaaaaagcatattactgaataatttgtatgacataattcccaatgttgggaaaaaagaagtttgtatctgcacatayacacacacacacacacacacacacacacacacacacacacacaagattggaaggatagacactgaaaagtgacctctggcctcatccgtgattttattta

SEQ ID NO: 434297 - DNA, 201 bp, Homo sapiens
tctgcagttgtggcgcgcgcctgaggttccagctactcgggaggctgaggcgggaggattgcttgagcctggggagttgagaccagcctgggcaacatagsgaaaccccgcctcagaaaaagagagggagagaggaaagcagtggagttattggtcaaagagtatgtcagttttctttccagaaaggttttgtgtctgcat

SEQ ID NO: 434298 - DNA, 201 bp, Homo sapiens
gagtgcagtggagcgatcctagctcactgcaacctccgcctccagggttcaagcaattctcctgcctcagcctcctgagtagcttggattacaggtggcayctgccaccacgcccagctaattttttgtatttttagtagagacggggtttcaccatgttggccaggctggtctcgaattcctggccataggtgatccacc

SEQ ID NO: 434299 - DNA, 201 bp, Homo sapiens
atcctagctcactgcaacctccgcctccagggttcaagcaattctcctgcctcagcctcctgagtagcttggattacaggtggcacctgccaccacgcccrgctaattttttgtatttttagtagagacggggtttcaccatgttggccaggctggtctcgaattcctggccataggtgatccaccctccttggcctccca

SEQ ID NO: 434300 - DNA, 201 bp, Homo sapiens
cctcagtattttattatttgtttatggtattgtagttttcacacacactcttaattgatctgtttgccgtgtaatgaggtgcacctagtaaggtgcacacsaagaatctttaagccaggacttgtaataatataaagtatacaataaaggactgtttaaaaagtgtaacacatgcaagaaataatatgctgccatgacaga

SEQ ID NO: 434301 - DNA, 201 bp, Homo sapiens
cccatctctactaaaaatacaaaaattagccaggcatggccaggcgcagtggctcacgcgtgtaatcccagcactttgggaagccgaggcaggcagattaygaggtcagcagatcgagaccatcctggctaacacagtgaaaccctgtctctactaaaaatacaaaaaattagctgggcgtggtggcgggcgcatgtagtc

SEQ ID NO: 434302 - DNA, 201 bp, Homo sapiens
gagacctaacccagaactaagacctcttaccgccatttctactgctaccataccgtgtaagagctgagcgtacaaatcctcatttccgtggttacaatgarggtgtgatgtgttagcttggggaaaaaaggaccagaggattctaccctcagtcataggcaggaggaaataccacagaggtcagtgatgtagacactgaag

SEQ ID NO: 434303 - DNA, 201 bp, Homo sapiens
accccatctctactaaaaatacaaaaattagccaggcatggccaggcgcagtggctcacgcgtgtaatcccagcactttgggaagccgaggcaggcagatyatgaggtcagcagatcgagaccatcctggctaacacagtgaaaccctgtctctactaaaaatacaaaaaattagctgggcgtggtggcgggcgcatgtag

SEQ ID NO: 434304 - DNA, 201 bp, Homo sapiens
acagatttattagaaggagagggtaggtgcagagctggagagccatgggtgaggcagcttgtgacctgcctagcagccgctgaccacctctccaacagaarcctagtcctgttcagagcagcactgtcactgcaagtccagccccctttgccaggggctccattccacccctttcctgcagggaggggtgccatgagtctt

SEQ ID NO: 434305 - DNA, 201 bp, Homo sapiens
aatttcagtatccacataacatatttctaagttgtgttgttttaaatgagcatgggctacttttataaaagcattcaaagaaagaaattaaaggaagaaayagattcacacagttttccccaaggatttgtatgctcagctcttaacacgggatggcagcagtagaaatggcgggtagaggtcttagttctgggttaggtc

SEQ ID NO: 434306 - DNA, 201 bp, Homo sapiens
aggtggaggttgcagtgagcagagaacgcaccactacactccagtctggtgacagagcaaggctccatcgcaaaacaacaacaacaacaacaaaaaaaaarcacaaaagtattttaaagctgtttattctactggaacacatttgatgtaagtattaatttggtacaaccttttatgggggccagttcaacattatgtatc

SEQ ID NO: 434307 - DNA, 201 bp, Homo sapiens
aaaaagtactgctgagaaggtgttggttctcaggtttgggagagatgaagatcctgtctgtctgcagctagatgatattgtaagtgaatgtctaaaataaktggtttttattaataatctgtatattctcacttcagcatctgagtagtacatgagagggagtagtcagggttgggtatatagctgttcatttgttagttc

SEQ ID NO: 434308 - DNA, 201 bp, Homo sapiens
tactgtccatttgtacgtcttcttttgggaattctctgtgggtatcatttactatggacattttcttagatgtggtctcagttttcctctcctgcttccarcgtttgtccagttgcacccctagcctcaccactaacaactttgttctccccttactttctcctttcgatcagtaacacggaggaattgctgtttgtttga

SEQ ID NO: 434309 - DNA, 201 bp, Homo sapiens
aagtcctattgatcccaagaatattcccaaatatgaccttctctatcaagacatttagtacattaattgctgtcaaagatgaagaagaaggcacatcttgrcacagtacctgaatccagctgtgctgtgtttctggagtcctttggaaacatgtgtcccagaggagaagaggtttgacttgcgtgtagaaaacccggcccc

SEQ ID NO: 434310 - DNA, 201 bp, Homo sapiens
ggacccctggactagaaatttggtggcctgtattctagtccttgtcattgtagtagaaagtgcaactgtaagcaagctagtttgtaaaatgacggggttgkattaggtcccttgtacctcagtattttattatttgtttatggtattgtagttttcacacacactcttaattgatctgtttgccgtgtaatgaggtgcacc

SEQ ID NO: 434311 - DNA, 201 bp, Homo sapiens
acatagtaatgttatataagtgtctgctactaattatcgtggttttcatttctgggaggattgggaggaaggagacgttagggaatttcagtatccacatwacatatttctaagttgtgttgttttaaatgagcatgggctacttttataaaagcattcaaagaaagaaattaaaggaagaaatagattcacacagttttc

SEQ ID NO: 434312 - DNA, 201 bp, Homo sapiens
tagcctaagagactacatcccgcctctagtctgggggcaggaaaaggaggggaaaaaggtcgaccatctttaatacgggcggaggtgacgcctagcttccsgtcagagccgagcaaggtgggcggtgactagaagctcttccgtttattgggctgttgagcgggggccgaccgacggccaggagtttcttttctgcgcttg

SEQ ID NO: 434313 - DNA, 201 bp, Homo sapiens
cagaaaggttttgtgtctgcattccagcaggaactccctgtgcctgcccctaccactatcttgtttaatttttgccaattcagtgactttgtaaacatatsttttaatttgcttttctttgcttactggtaaagcttaactttttagtttatttactgtccatttgtacgtcttcttttgggaattctctgtgggtatcat

SEQ ID NO: 434314 - DNA, 201 bp, Homo sapiens
tattagctaaataaagaactcttaaaattttcccaggaatttcatttgaaacaaaacatgtagtttttcttaagcttttggactggtaagtggcatttatraaagaaacattccttctagcaaactaagatgtgcttctctcttgcaaagtttcctgcttttcgccattgaattttaaatcattcttcaacaaagcctgtc

SEQ ID NO: 434315 - DNA, 201 bp, Homo sapiens
taagagctgagcgtacaaatcctcatttccgtggttacaatgagggtgtgatgtgttagcttggggaaaaaaggaccagaggattctaccctcagtcatargcaggaggaaataccacagaggtcagtgatgtagacactgaagccacactgccaaagttcaaaccccagccctactgctcaggagctgtgtgacctgggg

SEQ ID NO: 434316 - DNA, 201 bp, Homo sapiens
ttcattttgtttatcctgaaagtcttcaacaagtgattactcaaagttcttagagcagttgtttctcttctatgctgtctagatctccagatcacactaartttgtgggaagcttcaaaaccaaacaagacttcatagatttgattgaagtaatctatcgaggagcaatgagggggaagcttattgtccaaagtcctattg

SEQ ID NO: 434317 - DNA, 201 bp, Homo sapiens
actcaaaaggccatgaatattgaatgggctttgcacaatgcccaggcaaaagcaacaacagcaaacgaagaaacaatgtgcactccaacacttggtgaaakctgcttgatgatttgagaagtgataaaaatagattttgtgattacaatagcttttgaagctaaagctttgcacatgacagagctttcatgctagtggccc

SEQ ID NO: 434318 - DNA, 201 bp, Homo sapiens
gtgcccagcatcacgtaaaacatcgatatgctaagaagaacaaaaagagcccaatctctgatgttattgagctcctgcatgaactctggacctgcctgccwcagacttctgtgaaagaataaaatttctttttgcctaagtcactgttagttgggttttctgttcttcagcccagatcacacagtatttgcggtatggtaa

SEQ ID NO: 434319 - DNA, 201 bp, Homo sapiens
gtgtccacttatctagatctgtgtaccctttttgtctttatttgaaagtatgtgaaatattatctgttttaaagtgttttaggctgggcatagtggctcaygcctgtaatcccagcactttgggaggccaaggcaggcggatcatttgaggtcaggagttcaaaaccagcatggccaacatagtgaaaccccatctctact

SEQ ID NO: 434320 - DNA, 201 bp, Homo sapiens
ttaaatgagttaacaaatgttaagcacttaggacagttaccacatagtaatgttatataagtgtctgctactaattatcgtggttttcatttctgggaggrttgggaggaaggagacgttagggaatttcagtatccacataacatatttctaagttgtgttgttttaaatgagcatgggctacttttataaaagcattca

SEQ ID NO: 434321 - DNA, 201 bp, Homo sapiens
tatgtgcctgatgcagagagagacctaacccagaactaagacctcttaccgccatttctactgctaccataccgtgtaagagctgagcgtacaaatcctcrtttccgtggttacaatgagggtgtgatgtgttagcttggggaaaaaaggaccagaggattctaccctcagtcataggcaggaggaaataccacagaggtc

SEQ ID NO: 434322 - DNA, 201 bp, Homo sapiens
aatcttcataggttaggtttgaaataatgaaaagtgctgaagagtagataaagtgtgtgtgctgaacatctgccattggtccctccacagccattcttcawcctcctctagactgctctgggacagggaggtttgcctgcctcaacaggcccctgccctctggttccagttggagtcagccggtggttgcatgagcaaagg

SEQ ID NO: 434323 - DNA, 201 bp, Homo sapiens
atgcccatgttggtcctctgccctggacctgtgacattctggactatttctgtgtttatttgtggccgagtgtaacaaccatataataaatcacctcttcygcggttttagctgaagaattaaaaaaaataaaataaaataaaatcttatgggaccactgttgtatatgcagtccatcattgatcaagatgtcattatgca

SEQ ID NO: 434324 - DNA, 201 bp, Homo sapiens
agttgtgggactgcatgctactgtctagagcttgtctcaatggatctagaacttcatcgccctctgatcgccgatcacctctgagacccaccttgctcatraacaaaatgcccatgttggtcctctgccctggacctgtgacattctggactatttctgtgtttatttgtggccgagtgtaacaaccatataataaatcac

SEQ ID NO: 434325 - DNA, 201 bp, Homo sapiens
ccacagtccaactcatcctcaaatgacacaaaacgatgtggttccaccagtctcttcccaaccagcacttctttatccttttgatatgtcatcaggggaarctatcagtggcagcaagctatgtcttcactgaagatcaaggggttataatagattaaaattttactatatccagagcatctccatacagacagatcaaaa

SEQ ID NO: 434326 - DNA, 201 bp, Homo sapiens; identical to SEQ ID NO: 150016

SEQ ID NO: 434327 - DNA, 201 bp, Homo sapiens
catcggcctcccaaagtgttgggattacaggcgtgagtcaccgcgccaggcgagaacctgtctttaaaaacaaaacggccctttttttttttttttttttwaatgtatacagtctcactgtcgcccaggggctagggtacagtggcatgatgttggctcactgcaacctctgcctcctgggtccaagtgattcttgtgcct

SEQ ID NO: 434328 - DNA, 201 bp, Homo sapiens
ttaacaaagtgcttcaggggggcgctttacaaattgtctgctagttatggagattaaaagatcaatgtgtgggcagaattttttcttttgaaatttggatyctgggttgcagatggatgttttttccctgtgagcttgcatggtcaccccctgcatgtgtctgcttcttggcaggatgtcagaagtgtttgaaccagaata

SEQ ID NO: 434329 - DNA, 201 bp, Homo sapiens
ttgttttgttttgtttttgcaagcaatcagtctaattaggctccagactcgagttctcctgtggactgtggttctaatatcagttcagttttcaaagcctktgcagtgctatgggaatctgttgtgtgtatgttgcccagtggccatttggtggcctggatcatagtctcatgcacagttcagttctcacaccatgtgcag

SEQ ID NO: 434330 - DNA, 201 bp, Homo sapiens
agacattatcttcccaacaatctttcattggaaatttttttttaatttttataaatttttgtgggtacatagtaggtgtatacatttatggggtacatgamatgttttgatacaggcatgaaatgtgaaataagcacatcatggagaatagtgtatccatcccctcaagcatttatcctttgagttgcaaataatcgaatt

SEQ ID NO: 434331 - DNA, 201 bp, Homo sapiens
gtgccattgttactcctctaccctgctgggacataaggtagcaggaggaggcattagatgcagatgggtgcagcatccacagagcaggctgagtgagcctsttggttttagggctctggatgcagctgtgggaaccactccaacaactgtgtcctccacataggctccctggaaaaaggtgcagggtataggctgcaccac

SEQ ID NO: 434332 - DNA, 201 bp, Homo sapiens
gtctctgggaagctttttgcccaggacccctcttcttgtttagctagagtacttggcttggccatccagcaaatcaaaggtcgtattttcaagttgccatrgaatctacggctgaaaggagacaaacatggtaatctatttactgactttcttgccactgttccctgtttagatttttctttgagccaatgacatcctaaa

SEQ ID NO: 434333 - DNA, 201 bp, Homo sapiens
atctatcagaagcaactcgtcatcagtttgaagattcatcatgagattgcagcaagtcagtcaattcttcaggctccacttctagttctcttggtgtttcyaccacatctgcagttgcttcctcccctgaggtcttgaacccctcaaagtcacccatgaaagttgtaatcaacttcttccaaactcctgttagtgctgaga

SEQ ID NO: 434334 - DNA, 201 bp, Homo sapiens
tgaggtcttgaacccctcaaagtcacccatgaaagttgtaatcaacttcttccaaactcctgttagtgctgagattttgacctcctcctgtgaatcacgawtgttctaatggcatctagaatggtgaatcctttccagaaggtttcaattgaccttgcccagattcctcagaggaatctctatctatggtagcgatagcct

SEQ ID NO: 434335 - DNA, 201 bp, Homo sapiens
gcagtgggcttaaaatattcagtaaaccatgctgaaacagacgtgctgtcatctaggctttgttgttctatttctagaacacaggcagagtagatttagcrtaattctcaagggctctagaatagtaaatgagcattggcttcagcttaaagtagccagctgcgactcctaattacctcctaataagcgagtcagcctgtg

SEQ ID NO: 434336 - DNA, 201 bp, Homo sapiens
ttcattaatttttaattttttccttttgttcagattggataatttctattcaatcttcaattcactgactttctctattttgctattgatcttatccaggsaatattttatttcggtcattgtaattttcagttccaaaaagtttctcttttgtccttctttgtatcttctatagtctttattgagacttttttgtttcaa

SEQ ID NO: 434337 - DNA, 201 bp, Homo sapiens
gagaggccctcctatggggagaaactaaagctttgcgttgagtcattctctgactacaaagacctgggcaggcagaactgatggtgtccatgggtcgtacrtgggaagggatccaggactagttgcaggacaatgaagtgttggccacctatcttctcccaggctacaagagatccaagctggaggcttggatcatacccc

SEQ ID NO: 434338 - DNA, 201 bp, Homo sapiens
agagaggccctcctatggggagaaactaaagctttgcgttgagtcattctctgactacaaagacctgggcaggcagaactgatggtgtccatgggtcgtayatgggaagggatccaggactagttgcaggacaatgaagtgttggccacctatcttctcccaggctacaagagatccaagctggaggcttggatcataccc

SEQ ID NO: 434339 - DNA, 201 bp, Homo sapiens
catttgctgatggtttcctgttttgccttcatttttgatgatctagactttgccaaagaattagttcttatgtcaaaagtccttgcagactgtcatttatygttgtcttttaaattccaagttttgaagtgctactagtcagtggtgggactgaggccacatgggaagtagtttgtcatttctgagttcccagtactcttg

SEQ ID NO: 434340 - DNA, 201 bp, Homo sapiens
tttctacctgtccatggagtgcgaaaacctgttcaagtgaatcctcatgctcaatccagcaagagaggccctcctatggggagaaactaaagctttgcgtygagtcattctctgactacaaagacctgggcaggcagaactgatggtgtccatgggtcgtacatgggaagggatccaggactagttgcaggacaatgaagt

SEQ ID NO: 434341 - DNA, 201 bp, Homo sapiens
ggatgataatctggtgactggctccaggtggtcaagcctatttaaatgtctctctgcagctcagactcttgaggagggcctcatgtggcttttggaagtgytaatgggatggcagatgtggctgcaggtaattataatgcaggctccagcaaggccttctgcccctccagtcgcagtaagtccttcctcttagtttcactc

SEQ ID NO: 434342 - DNA, 201 bp, Homo sapiens
gagagtcagaactttcacggtctcctggcagtaatgaggccaccccgacctcggagacgagggagtcagaactcccaccctgccccgtaacaaggaacctycccccttgggtgtcagcagaggcttggtggggagcctgagctgtgacctccacctggcggtaatcaggtggtgccttccgcctcccctgcaggagcagtg

SEQ ID NO: 434343 - DNA, 201 bp, Homo sapiens
ggagagtcagaactttcacggtctcctggcagtaatgaggccaccccgacctcggagacgagggagtcagaactcccaccctgccccgtaacaaggaacckccccccttgggtgtcagcagaggcttggtggggagcctgagctgtgacctccacctggcggtaatcaggtggtgccttccgcctcccctgcaggagcagt

SEQ ID NO: 434344 - DNA, 201 bp, Homo sapiens
acatgtctgttggtgatgaattcttccagatttcattcattgagaatgtctttatttcatcttcgttcctgaaggatgttttcactggatattgaattccrgattgacagttttttctctttcagcactttaaaaatgttattccatttcctctggcctacttttttttcctgaggaatccacagttatttaagtcaatgt

SEQ ID NO: 434345 - DNA, 201 bp, Homo sapiens
ttaactataacataaaaacttgtgtagttttaagccactaaaaaaatacacaatcattttaactttatttttaaattttattttggggcataacagtttgrtaaggtttaacatatgtttagattcatgtaaccaccaccacaataggatacagacagttcatcatacacaaattctctcattcttccctttgtggtcaca

SEQ ID NO: 434346 - DNA, 201 bp, Homo sapiens
ccatcaaaacctccaaaagaagccagtcacaaaaggtcacatatgattccatttacacaaaatacccagaataggcaaatccataaagacagacagcagaytgatggttgccagggactggggtaggggacatggggagtgactgcttaatgagtatgaagttttctttcaggttgatgaaaatgttttgaaactaggtag

SEQ ID NO: 434347 - DNA, 201 bp, Homo sapiens
tagttccagctactcgagaggatgaggtaggaagatcacctgagcccaggaggtcgaggctgcagtgagccatgatcgcaccactgccctccagcctgggygacaaagtgagatcccccccaccccatcttaaaaaaaaataagttgtaaaaagagggagtcagcagcagggagggaaataatcaaatcaataagatatca

SEQ ID NO: 434348 - DNA, 201 bp, Homo sapiens
cccacatctccaggtattcaggcccttgtgtaggcccctccttgagtctgggctggatgtgtttcttgctttaacggtagaatgtggtgggagtgaacacygtgtctgttctgggatgaggatgtagagtcatggcatcctctgctcctatgctttgggagtcctgggccactgtgtaggaagtccagctactctactgga

SEQ ID NO: 434349 - DNA, 201 bp, Homo sapiens
tccccacatctccaggtattcaggcccttgtgtaggcccctccttgagtctgggctggatgtgtttcttgctttaacggtagaatgtggtgggagtgaacrccgtgtctgttctgggatgaggatgtagagtcatggcatcctctgctcctatgctttgggagtcctgggccactgtgtaggaagtccagctactctactg

SEQ ID NO: 434350 - DNA, 201 bp, Homo sapiens
catgatccccctccccacatctccaggtattcaggcccttgtgtaggcccctccttgagtctgggctggatgtgtttcttgctttaacggtagaatgtggygggagtgaacaccgtgtctgttctgggatgaggatgtagagtcatggcatcctctgctcctatgctttgggagtcctgggccactgtgtaggaagtccag

SEQ ID NO: 434351 - DNA, 201 bp, Homo sapiens
taaatcttgttgctggtcactctttgggtctgcactgcttttaggagctgtaacactctccaggaaggtcgcagcttcactcctgaagccagtgagaccaygaacccaccagaaggaacgaacaactctggacttttatgagctgtaacactcaccgggaaagtctgcagcttcactcttgaagccagtgagaccatgaac

SEQ ID NO: 434352 - DNA, 201 bp, Homo sapiens
ggccccagtgagtcatgatccccctccccacatctccaggtattcaggcccttgtgtaggcccctccttgagtctgggctggatgtgtttcttgctttaayggtagaatgtggtgggagtgaacaccgtgtctgttctgggatgaggatgtagagtcatggcatcctctgctcctatgctttgggagtcctgggccactgt

SEQ ID NO: 434353 - DNA, 201 bp, Homo sapiens
caagtatgcaatacagcattgttaactatagttacattactacacattggacatctgtttgcttttatatgtgtgaattatttggttttactgaaaatatrttaacattgcacaagaggttgcatacggttgtccattacattggcggccccagtgagtcatgatccccctccccacatctccaggtattcaggcccttgt

SEQ ID NO: 434354 - DNA, 201 bp, Homo sapiens
gagttggagaccagcctgggcaacatagtgagatcttgtctctacaaaaaataaagaaatagccaggtgtggtggctagtgcctgtagttccagctactckagaggatgaggtaggaagatcacctgagcccaggaggtcgaggctgcagtgagccatgatcgcaccactgccctccagcctgggtgacaaagtgagatcc

SEQ ID NO: 434355 - DNA, 201 bp, Homo sapiens
atcctcttgcagaattgactacgtaagaacacttgagatctacacttttggcagatttcaagtatgcaatacagcattgttaactatagttacattactayacattggacatctgtttgcttttatatgtgtgaattatttggttttactgaaaatatattaacattgcacaagaggttgcatacggttgtccattacatt

SEQ ID NO: 434356 - DNA, 201 bp, Homo sapiens
ttgttgttgtttattttaattctccaattatttagcctagggcagagttatatacactttttctgtaaaggtccacatagtatcttttagatttcctcagycagctgtctctgttgtaacaacttaactgtgctgttgtggtgtgaaaacaacgcatgccaatgatgagcatatttatgttccaatacaactttactcaca

SEQ ID NO: 434357 - DNA, 201 bp, Homo sapiens
gtgtagcttctactgactttctactctacaaaataaggatttaattctcttatactttcttcactcacttttactcttcctcaatctcctgataaagttayagcacaattttaaagcttagatcaagattcaacatgtgtgttctatatgattgcaaatattcttcacaactgggtctagtagaacaatagagtcatttct

SEQ ID NO: 434358 - DNA, 201 bp, Homo sapiens
cattccgtccctgacctgtccctgctattgcctctccccacacaagacgaaaacaagttcaactcttttcattctggggtttagctcctgttcagaaaacrtgctccatgttttcactttagtgtagcttctactgactttctactctacaaaataaggatttaattctcttatactttcttcactcacttttactcttcc

SEQ ID NO: 434359 - DNA, 201 bp, Homo sapiens
aatgaaaaagtttgaaatattatgagaattaacaaaaggtgacacagagacacgaagtgagcacatgctgttggaaaaatgccgccaatagacgtgcttgktgcagctgtgccacaaaccttcagtttgtcagaaatacagtatctgagaagtgtaataaagcaaagcacaataaaatgagatagattgtataaaatggca

SEQ ID NO: 434360 - DNA, 201 bp, Homo sapiens
caggtgtgttcagggaatgccagcgcttccttctgttttaatctgtttggccatctgattgttttatgtatttattttctttctatcctgctggatgtttktttcataagggttgtagttatctgtctggttcacccctacaatcctagctacttgacaaactatgcatacagactccagaactagtttttgaataagtga

SEQ ID NO: 434361 - DNA, 201 bp, Homo sapiens
aaagagagagagagagagggatgtaaaagaagatggaggaggaggaagaagagaagaggagaaggaggaggaagaggacgaggaggaagaggaggaagagsgaagaagaatgtaggaggaagaggaggaggtgggagggagagaacacagacattatgtgcttcccagtgaaagaacataccaccacctgtaatcttgcca

SEQ ID NO: 434362 - DNA, 201 bp, Homo sapiens
ggaaatggagttttactttggtaaaataaacttgctcgctgccttagggcttgccactaggtctgccccattaaaaaacctctagcctttaactatgtgamcgccgtaccgagtgaccccatcagcgacccctctaggggtctaagaacaatttgccatcacatgtgggtggctgctgtgccactcttccaaccctaggag

SEQ ID NO: 434363 - DNA, 201 bp, Homo sapiens
catcttcagtcaggagaagcagctggccatcgggggcagtacagggacaccagagggataggagtatgggggtttgtcatctactctggcggggcgggagrggggtggatttaggctcacacagtatagttgatgggttggctctagggtctgggtgtttctttcttgttatagctccttgttgctgcaagcagggaaaat

SEQ ID NO: 434364 - DNA, 201 bp, Homo sapiens
ggaaacaaggcctgagggccacacctgtgtgatgaataccgctctgagacagccaccccactatgtataatcctaaaacaatctcagtgtatcctctctcrtgtcctgtgggtggctgggctcagctaggtggttgctctgctccttgtggtctctgctgggctcactccaggagggtacatcaggctggggactgggctg

SEQ ID NO: 434365 - DNA, 201 bp, Homo sapiens
ctcccaacctggggacaattcttattccttccacactccacactccccacccccaccccactgagggcaggagatttagggtcaagtttgctttaaatgtstaccctcccccaacaccacccccagcaatgctctattcccagctgcccatatgggtgaataatcttttccctaaaaatagagagcaggcacaagctccat

SEQ ID NO: 434366 - DNA, 201 bp, Homo sapiens
actgtaattaaatccagacatctggtttctgagagagctatttttagaaagaaaaatatttttatcattctgcaaaatttacaatggtttttgggaaatcmtacattgcacccctcccaacctggggacaattcttattccttccacactccacactccccacccccaccccactgagggcaggagatttagggtcaagtt

SEQ ID NO: 434367 - DNA, 201 bp, Homo sapiens
gctgttctcagcttttctttaagcctctggggtcacaacttgcagctgctgtcataaaatggagcagtcaattttttttgtttttttcagctgcagaactyctctctctcaggagggaaaccaattccaaacccagcctcatcaggagagaaaaatttttttttttaaatatctgagagcacatataaatggtaacggtac

SEQ ID NO: 434368 - DNA, 201 bp, Homo sapiens
gaagtcagccagaccaagaacccacgggaaggaaccaattctggacacaagcttagctcagcagctgccccaaaggcatggacctgagaagttcctccccyccatcagggccagtcatacccacctcagaccagtccacttccacctcagggaatctgggggccttagtctgtttcagctgcgttaacaaagtgcttcagg

SEQ ID NO: 434369 - DNA, 201 bp, Homo sapiens
gattctcccagccttttcctcatggtcacaatattgctgccacagctccaaatgtcatgtattcactcaaaccatgttcaagacaggaagaaagacgcaarttctctttgtttagccctctatttttatcaagagacaaaaaaatgttccctcaagctcctagtaaactatctcagggtctcattggccaaaaccggacta

SEQ ID NO: 434370 - DNA, 201 bp, Homo sapiens
atccagggattgttgcaattttcccaaaggactcagaagagattaggttgattttgttagcgtgacacaagtactcggtgcctccttcatggtgcttactyggtcactgctactgcccaggggcaagttagtacccttggagtgaagcatagaatatggagattcttatgtataagggcctgagggagaagcaagaaggca

SEQ ID NO: 434371 - DNA, 201 bp, Homo sapiens
ctttgcctcattcttcaagactgatttccagagacacttcctccaggaagcctcccctatggtctagctaactcaatcggcttcccttataccctcattakgtgcccactgcatgttacacacaacagcatcaactagtaccataggtactggccaacttccttgcccttccaatactgtgggctccctagaggcaagaac

SEQ ID NO: 434372 - DNA, 201 bp, Homo sapiens
gggcagaaagagagagagagagagggatgtaaaagaagatggaggaggaggaagaagagaagaggagaaggaggaggaagaggacgaggaggaagaggaggaagagagaagaagaatgtaggaggaagaggaggaggtgggagggagagaacacagacattatgtgcttcccagtgaaagaacataccaccacctgtaatc

SEQ ID NO: 434373 - DNA, 201 bp, Homo sapiens
tggagctcagggagccaaggtgatcatgctgacactctggcttctgctcttgctgtgagtaaggccatcattagtccctgactcaggagtctctcatctcrcagccccatgcaccaaggcaggccaactcattagcttacaaggagggaccatctcagctcttcacagcccttggcatccagcattagtcactaccacttc

SEQ ID NO: 434374 - DNA, 201 bp, Homo sapiens
aaggggcagaaagagagagagagagagggatgtaaaagaagatggaggaggaggaagaagagaagaggagaaggaggaggaagaggacgaggaggaagaggaggaagagagaagaagaatgtaggaggaagaggaggaggtgggagggagagaacacagacattatgtgcttcccagtgaaagaacataccaccacctgta

SEQ ID NO: 434375 - DNA, 201 bp, Homo sapiens
ttggagctcagggagccaaggtgatcatgctgacactctggcttctgctcttgctgtgagtaaggccatcattagtccctgactcaggagtctctcatctygcagccccatgcaccaaggcaggccaactcattagcttacaaggagggaccatctcagctcttcacagcccttggcatccagcattagtcactaccactt

SEQ ID NO: 434376 - DNA, 201 bp, Homo sapiens
gaaggggcagaaagagagagagagagagggatgtaaaagaagatggaggaggaggaagaagagaagaggagaaggaggaggaagaggacgaggaggaagaggaggaagagagaagaagaatgtaggaggaagaggaggaggtgggagggagagaacacagacattatgtgcttcccagtgaaagaacataccaccacctgt

SEQ ID NO: 434377 - DNA, 201 bp, Homo sapiens
tggaaggggcagaaagagagagagagagagggatgtaaaagaagatggaggaggaggaagaagagaagaggagaaggaggaggaagaggacgaggaggaagaggaggaagagagaagaagaatgtaggaggaagaggaggaggtgggagggagagaacacagacattatgtgcttcccagtgaaagaacataccaccacct

SEQ ID NO: 434378 - DNA, 201 bp, Homo sapiens
agttggaaggggcagaaagagagagagagagagggatgtaaaagaagatggaggaggaggaagaagagaagaggagaaggaggaggaagaggacgaggagraagaggaggaagagagaagaagaatgtaggaggaagaggaggaggtgggagggagagaacacagacattatgtgcttcccagtgaaagaacataccacca

SEQ ID NO: 434379 - DNA, 201 bp, Homo sapiens
gagtgagaagcatgcctgccctcgcacagcagcaaaaggctcagaggtgggtggagaagcagccaacctgtgtaggtccagctccacgggcagagcacagstgggtaaggtttctctccccacctttggaggtcatgggcccaagggcaagccttagcacagccaagcttatctcctatgatagatcagtcagagaacaca

SEQ ID NO: 434380 - DNA, 201 bp, Homo sapiens
agaccccttggcacactgcagtaagaagggcacccctgtgacgttctcccccaaaatccctaacacaagtgccattatgaggaaaacatgagacaaaccccaactgaggaatatcctactgaaaacctgatcagtgctccgtaaaaatgcagtgatcacaaagaataagaaaagactgataaactcacagagtggagggga

SEQ ID NO: 434381 - DNA, 201 bp, Homo sapiens
gtgagaaaattgctgacatctcccaatggacaaagggcatacataggctttaaaagcactgaatgtataaatagccaataagccaaaaaaagaaggttcarcttctgcactaattgaagaagtacaaatccaaacaaataaaaaataattaactgttgaaagacaaaatttcctatttgccgttgttcactgtaatagttt

SEQ ID NO: 434382 - DNA, 201 bp, Homo sapiens
attggcaactaatacgtaactggtggtcaatagagggtttaaaagatctgccctttcttcttgttcttttccaaggttctaaatgatgaaaggaaaataawcaagatgagtgaccattttataaacatgatagacaacatgataacaacaatagctaacccaattacaacaatgttgggattttcagatactactttttca

SEQ ID NO: 434383 - DNA, 201 bp, Homo sapiens
ttctgtcctcatgacctaataacattccaaagcctccacctcctaataccatcacactgagggttaagatttcaacagatgaatttgccagggggaggagrggggagggacacgaacattgcctatatcactccccatttcaagatctttaacttaatcacgtctgcaggatcccttttgccatgtaaagtagcatattca

SEQ ID NO: 434384 - DNA, 201 bp, Homo sapiens
cttttataagagcaccaatcccatttacaagagttctgtcctcatgacctaataacattccaaagcctccacctcctaataccatcacactgagggttaaratttcaacagatgaatttgccagggggaggaggggggagggacacgaacattgcctatatcactccccatttcaagatctttaacttaatcacgtctgca

SEQ ID NO: 434385 - DNA, 201 bp, Homo sapiens
actctgtattgaggacaaccagagtgaaaggtcaccctctctgcctgtagtaagtgtgttttttttaacatacacacacacacacacacacacacacacacgttttttgttttaattaagaactcacacactttctgttcagaaatggaaagttttttggagttctacaggaaatgctctgtccccaaagctacactcata

SEQ ID NO: 434386 - DNA, 201 bp, Homo sapiens
cactctgtattgaggacaaccagagtgaaaggtcaccctctctgcctgtagtaagtgtgttttttttaacatacacacacacacacacacacacacacacacgttttttgttttaattaagaactcacacactttctgttcagaaatggaaagttttttggagttctacaggaaatgctctgtccccaaagctacactcat

SEQ ID NO: 434387 - DNA, 201 bp, Homo sapiens
tacagccacaatgagagaccaacatgcacatatcagaatggctaaaataaaacatagtgacaacaccaaatgctttccagggtgcagagagattggatccytcatgtgttgctggtgggaatgtgaaacagtacaaccactctggaaaacagtttgacagtttctttaaaaactaaacatgcaactaccatatgaccagca

SEQ ID NO: 434388 - DNA, 201 bp, Homo sapiens
agaaaatcaattacagcgtatctgtagtacaaacagaaagatgaccttggcatctgccaaaaaggaaaaataaataaataaataaaaggaaaggcaatttrcttcccacaaaaacctttgtacagtgtgcctccgtggcttccaaaaagtaaagccccaaacaaacaaacaaacaaagtttctgcacagggactaaagaat

SEQ ID NO: 434389 - DNA, 201 bp, Homo sapiens
gctgtcaaactcagctctatttctaaatacaaatactcctcagtttatgacggggttacatcccaataaatgcaccatgagttataaaaatgatgagtcaraaatacatttaatccatctaacctaccgaacatcatggcttagcctagtttaccttaaacgttctcagaaaacatttgcctacagttcggcaaaattatc

SEQ ID NO: 434390 - DNA, 201 bp, Homo sapiens
caaaattatctaacacaaagccctttttataataaagcaattttttcctttttttctttttttagatggagtctcactctgttgcccaggctggagtgcartggcgcaatctcagctcacttcaacctcctcctcctgagttcaagcaattctcctccttcagcctcctgagtagctgggattacagtcatgtgccaccac

SEQ ID NO: 434391 - DNA, 201 bp, Homo sapiens
aaactacagagatcataaaaagatcatctctttgaagtctgggtatttggtaaaaacaaatcagtggttaacaggggcttggatgggggagggagggatgrataggtggtgcacagaggatttttagggtagtgaaatgattctgtttgagagtggaatggtggatacatggcattatgcatttgtcaagatccatgggac

SEQ ID NO: 434392 - DNA, 201 bp, Homo sapiens
tgccatcttacactctctccaactatgtaggagagtttcagttgctctgagtcctcaccagcattcaatatggccggtcattttaaagtcagccacctacmttgttttatgtttttgtgtttagagtttttaaaaaaatgtactcaagtttagccaactcttggcttcattataccaaagtttacaggaataaaaccagat

SEQ ID NO: 434393 - DNA, 201 bp, Homo sapiens
cactcactatcctgaggatagcaccaaaccatgagggatcagccccaatgacccaaacaccttccaccaggccccacctccaacactggggataacaattmaacatgagattttggtgggggcaaatgtccaaattatatcataccaccgctggcctccgccaaatctcatgtccttctcacattgcaaaatataatcatg

SEQ ID NO: 434394 - DNA, 201 bp, Homo sapiens
atgtcacccagggctgtgattagctggaaacaggtgagtagataaaatcaatgttaaaaattattcaccattcaatgttcagaaaattccggaatgtggcwgtccgcttgattgaggaggagttcagaattcatccagggtcaccagcaatcagttctaatataactaacattttcaaaatgttaatatctcacttactgt

SEQ ID NO: 434395 - DNA, 201 bp, Homo sapiens
tatagagaaaactaagtgcacactgggcaccttggacaggtgcaggatcagtagaatttgcccaaggtatgacccagcctttccctatggaaacagccagygctggcaggggaccacggggaggttcttcaacttcctctgcaggcacctgtgtttcaggttagccagaaagaaccagcctgaggctgaaagcagagtgca

SEQ ID NO: 434396 - DNA, 201 bp, Homo sapiens
ttcttcaacttcctctgcaggcacctgtgtttcaggttagccagaaagaaccagcctgaggctgaaagcagagtgcagatagcgaaacctcaggtggtggrcagcagggcaaggttgagcacaggaaagaatgtgggaggtcaagctagctcctggcacttgccatgaggcaaggaagtcctgagctccagggagcccaag

SEQ ID NO: 434397 - DNA, 201 bp, Homo sapiens
tctcgctctgtcacccaggctggagtagctgggattataggcgtgtaccaccacgcccggctaacttttgtatttttaatagagacggcatattactgtgytggccaggctggtctcgaactcctggcctcaagttatcctcccaccgcagcctcccaaagtgctaggattacaggcataagccactgtgcccggccctga

SEQ ID NO: 434398 - DNA, 201 bp, Homo sapiens
aaagctgaggacccaaggaccaccaggatccaacaggagccaaagagaggctgggatagattctgcctcagagcctgcagaaggagccaacctggctgatkccttgatttcagacttctagcctccagaactgtgagagtaccaatttctgtcattttaagccaccaaggttgtggtaatttctttcggcaaccacaggac

SEQ ID NO: 434399 - DNA, 201 bp, Homo sapiens
gggtgcctcagtttttcttcctgtggcctctcagttcacaaaaggagagtcaatacttccctatagcatggcagctgagttccgggaggtaatattccagragaaatgaacgactgcttatcaaccctttgcttgcctcactctcacaaatcacatgactaagcctggagtgaatgtagggagggatcacacagggaggag

SEQ ID NO: 434400 - DNA, 201 bp, Homo sapiens
tctcagttcacaaaaggagagtcaatacttccctatagcatggcagctgagttccgggaggtaatattccaggagaaatgaacgactgcttatcaaccctytgcttgcctcactctcacaaatcacatgactaagcctggagtgaatgtagggagggatcacacagggaggagagtgcagggaggctggacccactgggca

SEQ ID NO: 434401 - DNA, 201 bp, Homo sapiens
tacaaatgctttcacattaaaaattatttgaaaaccatttgtgaaagtaccttgagttctttggaagaaaggtgctgtttagtgcaagttgttcgtgatascactgacctccttcagaggaaaaccatgcagtttgtcgctaaaagccaccagcctcttctttcccaggaaacatcctggagttgattccttaggaggcac

SEQ ID NO: 434402 - DNA, 201 bp, Homo sapiens
caaccctttgcttgcctcactctcacaaatcacatgactaagcctggagtgaatgtagggagggatcacacagggaggagagtgcagggaggctggacccmctgggcaactgtgtatagtctatcacacactgttatgcagcaaggcactggactcctttagagaagtggatgaaaatgctcctggtggtgggattcctgg

SEQ ID NO: 434403 - DNA, 201 bp, Homo sapiens
aaaacccaatttgatgtaaacagtaaatgaaactaaagcttaaccaatcagaagccaccaactaacctctaactaaggactttccaccttaaccaatcaartattttcattgtcttgcttccacaaacaccttataaaagtttcttcttgcacgccttcactgaactgctgtggtctggtactgatgaattcatgaatcac

SEQ ID NO: 434404 - DNA, 201 bp, Homo sapiens
atgaaaatgctcctggtggtgggattcctggctgagtgtctgtacacaggcacagaagagaaagcagaattcatgttatgtatagaagatgaaggtttgtycattgcccctctccatggtgtctgtccatggtgtctgtctggccatcctctgccacaactcccagtgaggcaggatctgatgtagaatgtgcaagtgggc

SEQ ID NO: 434405 - DNA, 201 bp, Homo sapiens
gaagaaaactgagaaggtggagctggtggagagatcaggggtttgggtggcaccaaccaccaatccatccgtacgctttctgttctcacagataaagaggkagccagccccagcatgatggctcatgtctgtaatcccagcattttagaaggctgaggcaggaggattgcttgagctcaggagttggagaccagcctgggc

SEQ ID NO: 434406 - DNA, 201 bp, Homo sapiens
caggctgtgtattagtttgttcttgcattgctataaacaaacagccgagactggataatttctaatgaaaagaggtttaattggctcatggttctgcaggytgtacaggaagcattgcaccagcatctgcttctggggaggcctcaggaaacttacaatcatggcaggaggtaaaggaggagcaggcatctcacatggtga

SEQ ID NO: 434407 - DNA, 201 bp, Homo sapiens
taatttaaaaagtaaatagggtaaaacatttcaagataataaactgggctacattaattacacttaaattatgtattatgttaaaatctacatcatttgaycttgagaaattacaccactctctttccagttaaaaaattcagtttccagggacttgagagtatacctaatctgaatgagttagaaacttctcagaggcca

SEQ ID NO: 434408 - DNA, 201 bp, Homo sapiens
cttatttcaacaggcactagtcttactgatttcatgtctgcagtcctgctgcaccatcagctccgggaatagaagagtcaggagtgtgctcctcactgtamctccagtgcctagcactatgggcggtaaaattgaaaacacaaatgctctcccttcttgtcatctgccacctctccctttccctaaatcgccatttacttt

SEQ ID NO: 434409 - DNA, 201 bp, Homo sapiens
tgtatagtctatcacacactgttatgcagcaaggcactggactcctttagagaagtggatgaaaatgctcctggtggtgggattcctggctgagtgtctgtacacaggcacagaagagaaagcagaattcatgttatgtatagaagatgaaggtttgttcattgcccctctccatggtgtctgtccatggtgtctgtctgg

SEQ ID NO: 434410 - DNA, 201 bp, Homo sapiens
gtgtatagtctatcacacactgttatgcagcaaggcactggactcctttagagaagtggatgaaaatgctcctggtggtgggattcctggctgagtgtctgtacacaggcacagaagagaaagcagaattcatgttatgtatagaagatgaaggtttgttcattgcccctctccatggtgtctgtccatggtgtctgtctg

SEQ ID NO: 434411 - DNA, 201 bp, Homo sapiens
tgtgtatagtctatcacacactgttatgcagcaaggcactggactcctttagagaagtggatgaaaatgctcctggtggtgggattcctggctgagtgtctgtacacaggcacagaagagaaagcagaattcatgttatgtatagaagatgaaggtttgttcattgcccctctccatggtgtctgtccatggtgtctgtct

SEQ ID NO: 434412 - DNA, 201 bp, Homo sapiens
ctgtgtatagtctatcacacactgttatgcagcaaggcactggactcctttagagaagtggatgaaaatgctcctggtggtgggattcctggctgagtgtctgtacacaggcacagaagagaaagcagaattcatgttatgtatagaagatgaaggtttgttcattgcccctctccatggtgtctgtccatggtgtctgtc

SEQ ID NO: 434413 - DNA, 201 bp, Homo sapiens
tccacaaggtacagtgtatcatccctgccaacccaaaacagcagagatgcagtgagcctgccattcctacctttacttcatactctgagaatagtcgaaggaacaacacagaaatcagaggcctgaggaggacctggagtcagggcagaagccagcagcacagctaacgtgcctgctagtcccctacctggcctggagaga

SEQ ID NO: 434414 - DNA, 201 bp, Homo sapiens
gaaggtttgttcattgcccctctccatggtgtctgtccatggtgtctgtctggccatcctctgccacaactcccagtgaggcaggatctgatgtagaatgygcaagtgggctgccaatgcctggagtttcctgagtttgggaacacagggagcctactctgataaagagggacaaatccactgttaaggtcacactaaagg

SEQ ID NO: 434415 - DNA, 201 bp, Homo sapiens
aacctggcttctgtgtgggttgggaggaggaaatgagacgatgtctgtaaatgctcagccaagactgttctgagtgctccaggcatggaagccattgcagygagagcaccaggacgtctgaacccatcctgctggcaccttcttctccatgtcccccctaaatgggcctgccaactggggcgaacttctgcaggacacagt

SEQ ID NO: 434416 - DNA, 201 bp, Homo sapiens
ctgaattagaatatctgggtgttaaggggtggcggtcacggggacaaagggcaggcggatcggcggggagggagcggggcgcggccaggccctgcccgggrgctccgcatgctgcagctgcccccgggtgcccccgccgctgccctcgccgccgagcagcatggagaggagccggggacctaaccagagccagccggccgg

SEQ ID NO: 434417 - DNA, 201 bp, Homo sapiens
cccaggctcaagaaatcctcctgcctcagcctcctgagtagctgggactacactactgtgtctggctaatttttaaattttttttttgtagacacagggtmtcaccatgttgcccaggcttgtcttgaactcttgagctcaatcaagcaatcctccccacttggcctcccgaagtactgtgattactggtgtgagccactg

SEQ ID NO: 434418 - DNA, 201 bp, Homo sapiens
gagaacaaaacttggcaaagaaactaatttagagaagagttgatactaaaaaacctccaggaattcagataaatcttgccacagctctgtacttctacaaycaatgggaaaatgtttgaatcaatcttatctaactctgaaaaggtcctgagaccctggttgatatctaggttataccgtattagttaaaaacaccacatc

SEQ ID NO: 434419 - DNA, 201 bp, Homo sapiens
tagcaaaggtgtacaagcacttgctggaaaagtttcttctgtcagtccatgcctcttttcctgtgacttggaaaacagtggtcagcattaaatcacagaamgactcctccgggcctgcttcaccaatgttctttgaaaacgtagtcttagagccagtagatttgactaaatatttaaaaaccacttccttcaattttaaag

SEQ ID NO: 434420 - DNA, 201 bp, Homo sapiens
caaggtgatcatgctgacactctggcttctgctcttgctgtgagtaaggccatcattagtccctgactcaggagtctctcatctcgcagccccatgcaccraggcaggccaactcattagcttacaaggagggaccatctcagctcttcacagcccttggcatccagcattagtcactaccacttccagctgccacagcct

SEQ ID NO: 434421 - DNA, 201 bp, Homo sapiens
gggagggcaaccctgagcgccctgagcccacactcctagctcccggagggtgggtgccccggcccagcacactgtccgggtggaggtttaccccaaggatrgtaggcagaggcagaacttggcgggaacagccacatggaaactagacatagaaggcttgttttgttcttgttgttgttatttgagacagagtctcgccct

SEQ ID NO: 434422 - DNA, 201 bp, Homo sapiens
ggtggtgggtgtgcctgggtgagccaattcctgctgggctgatgacaattctgtaggggagggcaaccctgagcgccctgagcccacactcctagctcccrgagggtgggtgccccggcccagcacactgtccgggtggaggtttaccccaaggatggtaggcagaggcagaacttggcgggaacagccacatggaaacta

SEQ ID NO: 434423 - DNA, 201 bp, Homo sapiens
ttgtccaggttcagcttattcatctgtaaaatggggttactaatatgaactgcctaactgaattgtgaagatttaatgagacaatgcttttaattcactcrgcacaataaatgctggaaagaatgttagcagttaatagtattgttgttttattcctcaaaagaggatggattatctctcaaatcactgaggtaaagatgg

SEQ ID NO: 434424 - DNA, 201 bp, Homo sapiens
gacagacaggactcactgagggtaaggattgctgagaagttaggaggtatcagaacattctaggcatggagttcttgagggagaggaacccaaaagaccartatggctggagtgtggagagacaaagagagagaggcaggatggggctggaaagcagagatcagacttgggcgaggtgaggactcgagtatgtatcagtta

SEQ ID NO: 434425 - DNA, 201 bp, Homo sapiens
tgaacccaggaggcagagcttgcagtgagccgagatcacgccactgcactccagcctgggtgacagagcaagactccatctcaaaaaaaaaaaaaaaaaaattacaaagatgtttttcaatgactgatacctgatgtcaatgagggtgtgggcatcatgtctgcccatgtaaaactaacacacaacttagcactatcctga

SEQ ID NO: 434426 - DNA, 201 bp, Homo sapiens
tgctgcagttttgcccctcgggcactcaaggccaaatgagagagaggagcagtaagtcaatcccagagcagtcacttcacaggataggacaggtgacagcragctacaaacatctgcctgggggagtcaggtgagggcttagggggcttcacgatttgagcattgcctaaactgtctcattccaacaggaacctgggtcct

SEQ ID NO: 434427 - DNA, 201 bp, Homo sapiens
attttatttttttcctcttatttcagtctatttgtattagctcatatgtgttccttttcaaaaaaggctccccaaattgtatacaattctggacccataamacctggcttctgtgtgggttgggaggaggaaatgagacgatgtctgtaaatgctcagccaagactgttctgagtgctccaggcatggaagccattgcagc

SEQ ID NO: 434428 - DNA, 201 bp, Homo sapiens
ctctgggtccagcagtcttgctgccagaggcagaaggtctgagagaatcaagcctcaggcctggcatctctatttgctggacaacccacggcagcatcccygcctctgtcacatggctctgctgggtagcactgccatgcctgcttctgttatctctcacgctcttcattccacacctccatcagctgcctgggagtctat

SEQ ID NO: 434429 - DNA, 201 bp, Homo sapiens
attattttatttttttcctcttatttcagtctatttgtattagctcatatgtgttccttttcaaaaaaggctccccaaattgtatacaattctggacccawaaaacctggcttctgtgtgggttgggaggaggaaatgagacgatgtctgtaaatgctcagccaagactgttctgagtgctccaggcatggaagccattgc

SEQ ID NO: 434430 - DNA, 201 bp, Homo sapiens
tgatgcaaattagatacacattctttctagaacagaggcacccatcaccaccgccatcagaggtcattgggtgttactactaacttgggtgacactaaacrgatctgggatacaatcctagctaattcgttgcgcactgtctgacattgggtgaatcgcttcaccaatctgtgcctcaatttcttgacctttaaaatgggg

SEQ ID NO: 434431 - DNA, 201 bp, Homo sapiens
taaatgcagatttctcagagaaatcttccttgtccatccatctaaagggaccacctggccactctccttcatagcactcaatttcattttcattatagcaycttcacgcatgatgctttatcacttgtttttgtctagttcaccctcctaggatagagaagctgagaggcaggccctgctttgagaggttcacagcccact

SEQ ID NO: 434432 - DNA, 201 bp, Homo sapiens
cccatcctgctggcaccttcttctccatgtcccccctaaatgggcctgccaactggggcgaacttctgcaggacacagtcactcaggccttggagcctccrtccagcttcttgcaggcacagatgcatgcctcctcttgacgcatgcagcttggaagctctccctagacacagccagcttgacagaggccacatcgttcaa

SEQ ID NO: 434433 - DNA, 201 bp, Homo sapiens
ttcagtctatttgtattagctcatatgtgttccttttcaaaaaaggctccccaaattgtatacaattctggacccataaaacctggcttctgtgtgggttrggaggaggaaatgagacgatgtctgtaaatgctcagccaagactgttctgagtgctccaggcatggaagccattgcagcgagagcaccaggacgtctgaa

SEQ ID NO: 434434 - DNA, 201 bp, Homo sapiens
tctctacccctcagcaaagactttgttatggccacttgggacctggactactgcagtgtgttcccatgctccattttctgcacctcaggtccacaaaactrgcatatggattcatcaccatcctttcttcagagcacactgaaatcattggtccccgtctggcctgctgttacctgattaggctttttgcttcattcttta

SEQ ID NO: 434435 - DNA, 201 bp, Homo sapiens
aaaccattcatgaaggatccacccccatgatacaatcccctcccaccaggccccatctacaacactgggattacaattacacatgagatttgggtggtgayacagatccaaaccatatcaaagcccctctctctacccctcagcaaagactttgttatggccacttgggacctggactactgcagtgtgttcccatgctcc

SEQ ID NO: 434436 - DNA, 201 bp, Homo sapiens
tgttttccatctccactgctagcaccctaatccaggccctcccatcactgccctggactatggcaaaggctcttcactggcctccctgactccagctccarcacatccattctctagagaccctccacagtggtattcacagaatacaaaactgatgccactcctgttttaactacccaaaggtttcccattgcacgagaa

SEQ ID NO: 434437 - DNA, 201 bp, Homo sapiens
ctactcacttttccaccttgatatccattaggcatatccaatttaacttgtccaaactgaagtattgattttcccaccctccctacacacacttctccagsccatcccatgtggcaccatggcaccattctctacccactaaccttccctcactccttacacctaagcatttcaggattcctattgactcaatctcaaaac

SEQ ID NO: 434438 - DNA, 201 bp, Homo sapiens
tttttttgagatgagatcttcctctgtggcccaggctggagtgcagtgatatgatcagggcccactgcagcctcaacctccctggctcaactgatcctccygcctcagcacccctcaagtagctgggaccacggtcaagcaccaccatgcccagctaattttttattttttgtagagatggggtctcactgtacttcccag

SEQ ID NO: 434439 - DNA, 201 bp, Homo sapiens
gggatggcttcttatgcagaaattgatgaccaaaacattatataaaagcagagattctcaactctggtgatctaaaagtaccatcacccagggttctaacscttcagagattctgatttgattggtcttgggtgagacatcatatataaagttttttaaagttttattttaaagatgaatacacaggatgaatggaggaac

SEQ ID NO: 434440 - DNA, 201 bp, Homo sapiens
gttgaatccagacttaagtcaacccattggctcaatatactcacatgagtgaccaccagcaagctagcagagtctggattggatctgttacttgctcaacmacagagctgagcctggtacagattgtagaatcatgataaaataaaatcattgttactttaatctactgcattttgggatggcttcttatgcagaaattga

SEQ ID NO: 434441 - DNA, 201 bp, Homo sapiens
atcaagcctcaggcctggcatctctatttgctggacaacccacggcagcatccccgcctctgtcacatggctctgctgggtagcactgccatgcctgcttytgttatctctcacgctcttcattccacacctccatcagctgcctgggagtctatctgcaacaccactagcagcccagaccttcccagcctgtccagtggg

SEQ ID NO: 434442 - DNA, 201 bp, Homo sapiens
tggtgcaatctcaactcactgcaacttccacctcctgggttcaagtgattcttgtgcctcagcctcccaaagtgctgggattacaggtgtgagccaccacrcccagcctgttttgtttttagagctgccaatgtttcttaagaaatcctgtaagatgtgaggaggtagagaaaagcaagcacatgagacagtcattgtcat

SEQ ID NO: 434443 - DNA, 201 bp, Homo sapiens
ctgatggcatcaatcactttatgatgcaaattagatacacattctttctagaacagaggcacccatcaccaccgccatcagaggtcattgggtgttactastaacttgggtgacactaaacggatctgggatacaatcctagctaattcgttgcgcactgtctgacattgggtgaatcgcttcaccaatctgtgcctcaat

SEQ ID NO: 434444 - DNA, 201 bp, Homo sapiens
aagtactcggtgcctccttcatggtgcttactcggtcactgctactgcccaggggcaagttagtacccttggagtgaagcatagaatatggagattcttaygtataagggcctgagggagaagcaagaaggcactaagagaaggaagaaagttgattctcaggctcagtcctgtctttcagggttggttttctcaaccttg

SEQ ID NO: 434445 - DNA, 201 bp, Homo sapiens
atgtatacattgcaaaatgattactgcaatcaagctaattaatatatgctttacctcacatagtcagcattttcctccttccttctttccttccttccccscttccttctttcctttttttggtaagagtctctcttgacgtctccagctactattgtactggggcctatctttctcttaagctctaatatttgccttata

SEQ ID NO: 434446 - DNA, 201 bp, Homo sapiens
aaaaaaaaaatttgatcttaaagtcagacagagaagggctctagtcctactgataccacttatgacttggggtatcatagtgggggaagctgtagatcacytttgagctcatttacctcatctgtaagtcagaaacaataaccctacctgtcattgtgctttacgctggtctcaacactcctaccctgtttgatgcacccc

SEQ ID NO: 434447 - DNA, 201 bp, Homo sapiens
tttgttttgttttgttttgttttttgttttttgagacagagtcttgttctgtctcccaggctgaagtgcagtggtgcaatctcaactcactgcaacttccrcctcctgggttcaagtgattcttgtgcctcagcctcccaaagtgctgggattacaggtgtgagccaccacgcccagcctgttttgtttttagagctgcca

SEQ ID NO: 434448 - DNA, 201 bp, Homo sapiens
agaatcacttgaactggggaggtggatgcagtgagccaagattgtgccactgcactccagcctggccaagagcgaaactccatctcaaaaaaaaaaaaaawtttgatcttaaagtcagacagagaagggctctagtcctactgataccacttatgacttggggtatcatagtgggggaagctgtagatcacctttgagctc

SEQ ID NO: 434449 - DNA, 201 bp, Homo sapiens
gagactgaggcatgagaatcacttgaactggggaggtggatgcagtgagccaagattgtgccactgcactccagcctggccaagagcgaaactccatctcmaaaaaaaaaaaaaatttgatcttaaagtcagacagagaagggctctagtcctactgataccacttatgacttggggtatcatagtgggggaagctgtaga

SEQ ID NO: 434450 - DNA, 201 bp, Homo sapiens
taaaagaccctggggatgggcagggtggtacttcacagagaccactctcctggcacagagagggcctaggggctgatgctggtaggggcaaaagcaatgtrgaacacactctcttttattaagccaggctcctctcattttatttgaaattgtagggtcttttccttgattcatatgattgtcattaaaccagcgaccttg

SEQ ID NO: 434451 - DNA, 201 bp, Homo sapiens
taaaaagcatgtggagtctttaattgtgcacgccctggtgggaggtccagggcatgcgcaccacacacccccctgggctcctgccacctgcccttgacagkatgactgcgcttcctgtgggatttgtgaatctgaccttgacgacagatagggaggggctggccagttggtctgggagaagggagattatatttatatata

SEQ ID NO: 434452 - DNA, 201 bp, Homo sapiens
tgcttgagcccagagggttgaggctgcagtgagtcgcgtttgtgccactgcactccagcctgggcaacgaagcaagaccctgtctggaaaaaaaaaaaaaattgttctcagaaaaataagcatacaaatgagagatagaaatgaatagagagatatggtatctcttaaattagaaaatcagcacaagcatataagagatgt

SEQ ID NO: 434453 - DNA, 201 bp, Homo sapiens
acctgcatgtgcaactgtgctgataagtcatatctgaagccagaaccagaaggaaaacaaggtcacctatgtaaaggggtgggtggagcaggagacaaagycatgagaaccagggctgcccgcccggagctgggagcaaagcagaggatgagggtgcagtccaggggagctgaactggggggagcttcatccgagtgcctt

SEQ ID NO: 434454 - DNA, 201 bp, Homo sapiens
ccaattctttgtgctgtgcttccaaattctttttcatttgctcatggcgccgctggagctaaatcatagcacaatatataaaacaaaactatttaagaaaycagaagcagaggtatgtttcatccagacaccctaatgataaggagtatgagcactatttgaatagccctgttgtaaattcagagtactacctggaaagca

SEQ ID NO: 434455 - DNA, 201 bp, Homo sapiens
tgtgaagaggtttgtgcacatggcactctctgtcggagtgcatttcactcaagtttcattgcagtttgggataaaggcctgatttcttaacaggaaatccwgggatgccagaattttctcttgtttaaacacagaggtcatttgctgatggtttcctgttttgccttcatttttgatgatctagactttgccaaagaatta

SEQ ID NO: 434456 - DNA, 201 bp, Homo sapiens
tgagaaatggaacctggtgaaagtcacacagctctgggtccagcagtcttgctgccagaggcagaaggtctgagagaatcaagcctcaggcctggcatctmtatttgctggacaacccacggcagcatccccgcctctgtcacatggctctgctgggtagcactgccatgcctgcttctgttatctctcacgctcttcatt

SEQ ID NO: 434457 - DNA, 201 bp, Homo sapiens
tcagattgctttcccaagtgcccgcaagtgggaggagaaaggaaacgtgctatacagatgctgcttcctccctggtctacctcctcactctatggtttgawatcaaatgttctgtgtcttgagatgaaattcaatgggtaggtcagagctggctggttcatagcagcagcttgacttggcagcaaattgaacctgtttgga

SEQ ID NO: 434458 - DNA, 201 bp, Homo sapiens
cctacattgcacccctcccaacctggggacaattcttattccttccacactccacactccccacccccaccccactgagggcaggagatttagggtcaagkttgctttaaatgtctaccctcccccaacaccacccccagcaatgctctattcccagctgcccatatgggtgaataatcttttccctaaaaatagagagca

SEQ ID NO: 434459 - DNA, 201 bp, Homo sapiens
gaatagttgcttttggatgctgacgtgaacatcgagactgcaggcttgggcttctttggcaacaagctgggtaccttctgtggtagtgcccctcatgccayccagaactcttccagggccaaagtaaggtggccccagggtagaggtgtacagcctggaggcttcctgtatatctagtgatcacatcccagccctttgatg

SEQ ID NO: 434460 - DNA, 201 bp, Homo sapiens
gtttgtattcacacccggttgtctttggattcccaagaccactgttaggaaatatggccagagccctgtctgccttccaacatcagatcagagtaaattcycaaaggaaataatattttaatataaggaataaaaccatggaagtttcagagaaaacatggctgaatatttttataaccttcaagagggagaggcctttcc

SEQ ID NO: 434461 - DNA, 201 bp, Homo sapiens
aagcaaacctgttttatgggcttgcagcagggttgtaccagatatctgcaaagaaccaaaatggggcttggtaccttggtacatgctcaatacatagtgastgtaattaaatccagacatctggtttctgagagagctatttttagaaagaaaaatatttttatcattctgcaaaatttacaatggtttttgggaaatcct

SEQ ID NO: 434462 - DNA, 201 bp, Homo sapiens
ccgtcctaccctaaagctaccctctctaattctctggtttttaaatctgaaaattaaggataaccaaaggtctcactcttcttggtacatttaaagaaaamttaggaagagatgccagaaggtggatgggtctggctgtagctacaggagctgaagggaatgagagcaggagagcaagttggttccggaggtgagaaggct

SEQ ID NO: 434463 - DNA, 201 bp, Homo sapiens
ctccatcttatatgggtgcggttcatggcaccccaaaacagttacaatagtaacatcaaaggccactcatcacagatcaacataaaatgtataataataakgaaaaagtttgaaatattatgagaattaacaaaaggtgacacagagacacgaagtgagcacatgctgttggaaaaatgccgccaatagacgtgcttggtg

SEQ ID NO: 434464 - DNA, 201 bp, Homo sapiens
atcctgaagaaggtgcaatccccagagaagggcctagatgagattttgatgagatccgaagaccatcctgtgacatagtccaatcttcctagccagccagstttaggaaggcagatggtagggccagcctgtcctggatctggaatcagaagttctgactgtcaggccttgtcacttggaagctggttcccgtgtgttagg

SEQ ID NO: 434465 - DNA, 201 bp, Homo sapiens
caggagggtttccgaagaacggacttcccagagggcagagccaggccactggattctaacagccaggggctcgggggtgggggcaccctcctttgccagaygcacagttctgttggctccttctgtctctagacatatgctgcagaggaatgtgtttggagacagaagccgcctgatcaccatggtgaagaagacatgctg

SEQ ID NO: 434466 - DNA, 201 bp, Homo sapiens
gccacatggaaactagacatagaaggcttgttttgttcttgttgttgttatttgagacagagtctcgccctggcacccaggctggagtgcagtggtaccayttcggctcactgcaacctttgcctctcgggttcaagcgattcttgtgcctcagcctcccgagtagctgggattacaggcattcgccacaagcctggctaa

SEQ ID NO: 434467 - DNA, 201 bp, Homo sapiens
gggtgcttctaggatttgctgtatcactttctgaatgatcccagtgaatcctgcctctgtgatttaccccagcttcgcagctgttacctgtgtagtctccygctcttgggtgcttctttcctgaatccattttaggtgatggaaatttgtgaatttggtgttgacaggagggtttccgaagaacggacttcccagagggca

SEQ ID NO: 434468 - DNA, 201 bp, Homo sapiens
actaaagccagctccacgcagcagcatgtgaggtaaggaatcttcaccgtgaactgagagcttcactgcatggtgcaggggaagggccggcaggagcggckttagtattcaataactaagctccgtgaggcaccagcatggtgccactgaactccatgggaggcagcccaaaggcacttaaatgaaaatcggggccaggca

SEQ ID NO: 434469 - DNA, 201 bp, Homo sapiens
aaggaggtgctgccaccttctgtggcaacggcctcggccgctgctgaccctcggagggtggccccatgggttccagcccccggcgaccctaagagaccagrggccccacggagaagggacccacaggcgcggggctagggggcggctacggaatcctagggtccacccggaggtggccagcgcgggcgggggacacgtaga

SEQ ID NO: 434470 - DNA, 201 bp, Homo sapiens
aattggggactttgaacttaatacaaaatgcaaagtatataaatatgaatacatactgaattatctaagagctctatacatgtttttaagtcttattaaaagctcactaaatttcttcacattttgatcattgtactgttattacgggagagtttctaggaaatacacacaaatatttagtataaggcgcatcaaggctgc

SEQ ID NO: 434471 - DNA, 201 bp, Homo sapiens
accaagactgggtaatttataaagaaaagaggtttaattgactcaaaattctgcatggctggggaggccttaggaaagttactttttttttttttttttttgagatggcagtttcgctctgttgcctaggctggagtgcagtggtgcaattcgactcactgcagcctccacctcctgggttcaaacgattctcctgcctca

SEQ ID NO: 434472 - DNA, 201 bp, Homo sapiens
cctctgcacaacccttgggagacaagccattgcctcttaagtgggacaaaatcttttgataataatatttcagttcaaaatagtaagtaattaagacattytaaaaaatctaaaatactgccattaatcaaataattcattttacaacaatgaaactacatttttgaaacagtgagattgtttttctttgctgaattattt

SEQ ID NO: 434473 - DNA, 201 bp, Homo sapiens
aaaacaaaaaaactacagcaaagtacagtagggacatctgccacttatctgacagccatatgccccctatttcattttccaatcattgtacctttctttcmctctttgcctcactgcactggctagaacttccagttgcaatgttgaatagaagtagggaatagaaagcactcttgtcttctttctgatattaaagggaat

SEQ ID NO: 434474 - DNA, 201 bp, Homo sapiens
acgcccctacgccaaggagaggtgtgctggactttgatctgtgtttgtgtcaggctcctttactaaatagggagcacattgtgggccagtacttggcctcrttcatctctgtatgagggacacgtgatttgtccacaagtgagtgttctctccctcctcttacccccaaccagctcaacataattttccctttgtctactc

SEQ ID NO: 434475 - DNA, 201 bp, Homo sapiens
gtggatgggctcagtgttttgctcatggatcattaactccagcagtggagccgtgaggttgccacaaacacacatgcttctgtggttccagcgtcctccaygtgaactccgatcttgcttcccagggatctcctccttccctgggctgttccagccacttactgctctcagctccccctgctgacgcagccactccagcag

SEQ ID NO: 434476 - DNA, 201 bp, Homo sapiens
ctactctacaaaataaggatttaattctcttatactttcttcactcacttttactcttcctcaatctcctgataaagttacagcacaattttaaagcttaratcaagattcaacatgtgtgttctatatgattgcaaatattcttcacaactgggtctagtagaacaatagagtcatttcttgtacttagatttttttttc

SEQ ID NO: 434477 - DNA, 201 bp, Homo sapiens
ggcggggtgactttccaaggcgcgctactggcaagcaggaatccacgtgactccagagcacacactgttaactcctcagccggccagcagccttggccttmcctgggagcccctcagaaatgcagaatttcaggccccaccccagatccagggattcaaaatctgccttttaacttgatctaccagagattcctacacacc

SEQ ID NO: 434478 - DNA, 201 bp, Homo sapiens
gtgcacgggagggcagggcacggtggtggctgatggtagattttattgtgcaggcgaagggtgcactgcagggttgcagcacagacgagcagttataactrctgacttcgcatgcaccgcgtgcccggcactggtccggcccattgtgcctattcagctgtgtcaccctcaccgcagacaacactgtatgtacagagaagg

SEQ ID NO: 434479 - DNA, 201 bp, Homo sapiens
tctgtggttgtgggacctgaggcggcagcttggggaaaaaggcttcaatccatgaattgggcttcctaatcagcaacatggaaactaaagccagctccacrcagcagcatgtgaggtaaggaatcttcaccgtgaactgagagcttcactgcatggtgcaggggaagggccggcaggagcggctttagtattcaataacta

SEQ ID NO: 434480 - DNA, 201 bp, Homo sapiens
agcaaatccatccacaaaaaggttgagaaacatgcgcttgggctgctatttatttagaactgctgatcaggaggttatggctgtgaagaggtttgtgcacrtggcactctctgtcggagtgcatttcactcaagtttcattgcagtttgggataaaggcctgatttcttaacaggaaatcctgggatgccagaattttctc

SEQ ID NO: 434481 - DNA, 201 bp, Homo sapiens
ctgcactccagcctgggctacagagccagactctcaaaaaaatttttttaaataaataaataattaattaaaaagatcacgtgcccaaagcactgactttscccatctttttagcctctgaactctttttccaatgaaatcttatatggatttttaaaaatctgtaaaacagataaaattgagacccctacttaagttgcg

SEQ ID NO: 434482 - DNA, 201 bp, Homo sapiens
gtctctctgcagctcagactcttgaggagggcctcatgtggcttttggaagtgctaatgggatggcagatgtggctgcaggtaattataatgcaggctccwgcaaggccttctgcccctccagtcgcagtaagtccttcctcttagtttcactcacatcacaccagtgcaaagttcagtcccttcaccagtttcaacccta

SEQ ID NO: 434483 - DNA, 201 bp, Homo sapiens
acactttttgcatattaccatatttaattaatcaatccaaagtggtaatacatattatactcattttccagttgagaaaattaatataggtatacagtggycaagtaactcatcaaaggctactcaactagaaagtggccaaaccaggattccaagtgctcaccaatcacagtaactgggactaggttgtggtcaccaggg

SEQ ID NO: 434484 - DNA, 201 bp, Homo sapiens
tgtgggccagtacttggcctcgttcatctctgtatgagggacacgtgatttgtccacaagtgagtgttctctccctcctcttacccccaaccagctcaacmtaattttccctttgtctactcagattttccctctttcctaccctctaaaaaagagtttagtctatactgggcaagatagaaaatgtctgtggaaacctag

SEQ ID NO: 434485 - DNA, 201 bp, Homo sapiens
tcgagaggatgaggtaggaagatcacctgagcccaggaggtcgaggctgcagtgagccatgatcgcaccactgccctccagcctgggtgacaaagtgagaycccccccaccccatcttaaaaaaaaataagttgtaaaaagagggagtcagcagcagggagggaaataatcaaatcaataagatatcattgccaagctctc

SEQ ID NO: 434486 - DNA, 201 bp, Homo sapiens
gatccagggattcaaaatctgccttttaacttgatctaccagagattcctacacaccagaagtgccagtcgagtaggtcactctgaccgccaggaggatgrcctgaggcggggcagtggctgggaattagcaagacaaggtggaggactgctgcgctgccggagaaggggtcgggcccaggggccacgcgctgccgtgtgc

SEQ ID NO: 434487 - DNA, 201 bp, Homo sapiens
cgccctgggacagctgtttggactttgtgagtgtgttgttgttttgctctttgcaataaatcttgttgctggtcactctttgggtctgcactgcttttagragctgtaacactctccaggaaggtcgcagcttcactcctgaagccagtgagaccatgaacccaccagaaggaacgaacaactctggacttttatgagctg

SEQ ID NO: 434488 - DNA, 201 bp, Homo sapiens
gtttttctgtcatttgcaattgaagacattactaaccaatggaaatgttttcaactgcaattaatagtaatatctaactaaaagaaacttctaaagggagyggatatttttctcacctaatgagaagtcctgaagtaggtgattccagtgttggttggtggttgtgcagtatcagggctctgggttgacttacgtgtgatt

SEQ ID NO: 434489 - DNA, 201 bp, Homo sapiens
acgcaagttctctttgtttagccctctatttttatcaagagacaaaaaaatgttccctcaagctcctagtaaactatctcagggtctcattggccaaaacyggactacatatgaagacagcctgggagagcaagttcttggcattttaagtctctgtcatgagaggtgggctctagcagagaaaggctgctgggtccacag

SEQ ID NO: 434490 - DNA, 201 bp, Homo sapiens
agcagggtagcatctcccaataattatctctcgctccttccatcatcaaatctcctacttcctctgcctccctcttacaaggactcttgtgattacatcaracacatttagataattcaggataatcgtcacttcatctcaagatccttagttttgctgggtgcagtggctcacacttgtaatcccagcactttgggagtc

SEQ ID NO: 434491 - DNA, 201 bp, Homo sapiens
ttccaggtgagctctctcttcttcctgcacagctgcacctgcgaagggaggccatatgccgtgacttccaggaacccccaaaacaccctttccagaggccrctactcatagcatttgctctactgtgacatagcctgtaacctattttgctgaagaaaagaaactaatgaaacaagtttagtccccagcaaggccttccct

SEQ ID NO: 434492 - DNA, 201 bp, Homo sapiens
tcccagctacttgggagactaaggcagaaggatcacttgagcccaggagttcaaggtcagcctgggcaacatagtgaaaccctctataaaaaaaaaaaaaacaaagaatgtagacctcatgaacaataaatgcctacccagggcttcaactgggcatttctccagagccaatatgctgtcgggcatgccagacatgtcact

SEQ ID NO: 434493 - DNA, 201 bp, Homo sapiens
caaacagaaagatgaccttggcatctgccaaaaaggaaaaataaataaataaataaaaggaaaggcaatttgcttcccacaaaaacctttgtacagtgtgyctccgtggcttccaaaaagtaaagccccaaacaaacaaacaaacaaagtttctgcacagggactaaagaatggtttgctatagtgagtgaggggagggag

SEQ ID NO: 434494 - DNA, 201 bp, Homo sapiens
agttgatgatttgatgagcggtatatagtttattctgtagtgtgggattggccacaggagtataatttaattagggctgctctgcatactgatttgcttartttgaagcccattcctcccctgggcagggaagtctctaagcctctgatgggtaaatgggaaattagggcatctgtggatgacatagaatgtagattagcc

SEQ ID NO: 434495 - DNA, 201 bp, Homo sapiens
gagaaggtgccacactttacaacaaccagatctcgagagaactcactcactattgtgaggaaagcactgagctgtgagggatcggccccatgacccaaacrcctcccaccaggccccacctttgacatggaggaatacacttcaacatgagatttggatggggacaaatatccaaaccatatcaggctgcatggttctgga

SEQ ID NO: 434496 - DNA, 201 bp, Homo sapiens
agaagccttgtctgctattggatttggagccccagcagagggggtgagccatctaggacagactggaggacgacaaggaagtgtggccacagacaatcaayagaatgaaagaagacactgtcaacgggaagggatgaaacattcctcacagccccacctggctaaggtttcaccagccattagcgtggggggcctggaagt

SEQ ID NO: 434497 - DNA, 201 bp, Homo sapiens
tcccaaatcaaaattgttcagaaggcttaattttaattttaaattttttgagacagagtctcactgtgttgcccaggctggattgcagtggtgcgatctcrgttcactgcaacctccatctcccgggttgaagctattctcctgcctcagtctcccaagtagctgggattacaggcatgcaccaccacacctggctaattt

SEQ ID NO: 434498 - DNA, 201 bp, Homo sapiens
tcgagacagccaactccagcaccaacaagcaaggaatcccgcttcagtgtgcgcttgatttctctgtcttcctttacttggtctccgtgtctatttttgartggaaatgggataacaataggagaatgtaggaaaggaaaataagaagtgacagctctaaagagaaggtaatattaacttctcacttaagcctggtggagt

SEQ ID NO: 434499 - DNA, 201 bp, Homo sapiens
gaactgttgagcttaagcgaccctcctgctttggcccctgtatttgtccattttcacctttctgataaagacatacccaagactgggcgattcacaaaagraagaagttgaatggactcacagttccacatggctggggaggcctcacaatcatggaggaaggtgaaagtcacacctcacatggtggcagacaagagaaga

SEQ ID NO: 434500 - DNA, 201 bp, Homo sapiens
ctgaaccacactctgtgccttgccccctccgactggctgtgctgtgtccaccctggagcccatcacccctcaccatctcaggacttccctcctgcaattgyccctttccactggaccattccaggcacaccaggcaagctagtatctctaatgtttggataaacttgttcttgctgctcacaaacccccttagtttcttcc

SEQ ID NO: 434501 - DNA, 201 bp, Homo sapiens
tgccttcccaagatcccctcgaccccttctcaatccctcctacaggttctgtgtgctctaccccagctttgctcctgagggctggtccttataaacctccrcagaggactgcccctgggctcctggacctgatagggcagcaggtgccacaggctgacagggcctgggagtttagtcccctccagagtgactgccaacacc

SEQ ID NO: 434502 - DNA, 201 bp, Homo sapiens
gtgccttcccaagatcccctcgaccccttctcaatccctcctacaggttctgtgtgctctaccccagctttgctcctgagggctggtccttataaacctcyacagaggactgcccctgggctcctggacctgatagggcagcaggtgccacaggctgacagggcctgggagtttagtcccctccagagtgactgccaacac

SEQ ID NO: 434503 - DNA, 201 bp, Homo sapiens
agtgactgagtgaaggactttctcatagtggacagcttcttaagtgtgataaaattggtatgtgtgtggatcggggaggcgggactgctgagtggcctcgytccagggatggtcttaaccatgaggtgctgttgagcccatggtgtggtggacactgtggtgccttcccaagatcccctcgaccccttctcaatccctcct

SEQ ID NO: 434504 - DNA, 201 bp, Homo sapiens
gtctctcaagacgtacaaagcagctgccaactattccatggtttcccagctggagaagccctaccttcacagcatccttgaagcagacaccccaagggagyacctacctggggcaccccaggctggcaccaacatacaaagtggtcaaaaatgtgctgttacccttcaaggggctgcttaataaatcacagttttacttcc

SEQ ID NO: 434505 - DNA, 201 bp, Homo sapiens
ttctgaatctaaggtctattcattttcctgtctttgttgacttttagctgtaaactccgtaagggaatggaccactgtgtttcttattggtcttcatatgyctggtcactaaccagagcctggcatattaaaggtactcaataaaagtttgttgagtgactgagtgaaggactttctcatagtggacagcttcttaagtgt

SEQ ID NO: 434506 - DNA, 201 bp, Homo sapiens
ccctcagcattgctggttgtccttctgccagtcttgtcctcttagccctgggcaggacaggaagctgtgggaggaaacacctcatgctcctaggggcttcrtaggcaggtgttcccttccaggctgctctagtgtccgctgtctcaactgggtcttcctagcctggcaaagaggagaagaggttaaagccctcactgtttc

SEQ ID NO: 434507 - DNA, 201 bp, Homo sapiens
agcaatggacccattcattcactaattccttcactctgtcattcatttggcaacttctcctaggcccacagtatatccccagctcttctgtgcttcacagytttgaacatgctgcctggaagggtgcttgttcaacctctaaaacccagaatcaattgtctcctcctctgtcaaatgttttctgcttccctgtgtctctca

SEQ ID NO: 434508 - DNA, 201 bp, Homo sapiens
ctcaactgcaggaggaaagagagtaagatacagccagagaggctaagttaagctacaggcggaaagatgacagatcctgggaaaagcagagaaggaagacrgtagggaagccaagcaggccaggcatcaggaagtgtttggagggaattgggcaagtaggatgttctggggcatctgctatctgctgaaaagagacaaaag

SEQ ID NO: 434509 - DNA, 201 bp, Homo sapiens
ggaggaagaagagaagaggagaaggaggaggaagaggacgaggaggaagaggaggaagagagaagaagaatgtaggaggaagaggaggaggtgggagggaragaacacagacattatgtgcttcccagtgaaagaacataccaccacctgtaatcttgccaaaggggttggaaatgagacagataaaacctctgatttcag

SEQ ID NO: 434510 - DNA, 201 bp, Homo sapiens
tgttaattaaaattacatgaatatacacattaacaaggacagaaagaccccttggcacactgcagtaagaagggcacccctgtgacgttctcccccaaaawccctaacacaagtgccattatgaggaaaacatgagacaaaccccaactgaggaatatcctactgaaaacctgatcagtgctccgtaaaaatgcagtgatc

SEQ ID NO: 434511 - DNA, 201 bp, Homo sapiens
gacttggggtatcatagtgggggaagctgtagatcacctttgagctcatttacctcatctgtaagtcagaaacaataaccctacctgtcattgtgctttabgctggtctcaacactcctaccctgtttgatgcacccctcaaacaggtgtgtggctttctctgatgcacgcccctacgccaaggagaggtgtgctggactt

SEQ ID NO: 434512 - DNA, 201 bp, Homo sapiens
aagcatcacagagcatggggctggttcagggctctgggctgccaactttacagagttctcatctcagcatctacatctgcacagactcatgcagtagcctrtaacaaccaggagagctaaggctcctgaatacgggacctggaagttatgacctttgagcaattgtagccagaaagaagccttgtctgctattggatttgg

SEQ ID NO: 434513 - DNA, 201 bp, Homo sapiens
aaacaagtattgggatggcaatctctttgtaacagcagccaaacctatatcttaacatcttcagactccaagcagaaggtaactgcaggagagaaggtagraggatcatctctcgagacagccaactccagcaccaacaagcaaggaatcccgcttcagtgtgcgcttgatttctctgtcttcctttacttggtctccgtg

SEQ ID NO: 434514 - DNA, 201 bp, Homo sapiens
tctcaccctgtgacttagaatgccttaactgtctgggaaggcagcccagtaggtcttagccttattttacctagtccttattcaagatggagttgctctarttcaaacgcctctgacaccccagccacttcagcagccctggatgtctcctatcagattctcctgtggcaccaagcagccttcggtgccaggggcagagca

SEQ ID NO: 434515 - DNA, 201 bp, Homo sapiens
gggaagggctgcctcagcgatctctggaatgcctttgaggcctttttcatgttgtcttatcagcacctggctcttttttagatatccaaatcttgctagcragtggttgctcaacagcctgcttgaattcctattctgatcatgctttttctttctctgccacatgtccaggttgcaaatttttcaaacttttacactctg

SEQ ID NO: 434516 - DNA, 201 bp, Homo sapiens
accacgcctggctaattttttgtattttttagtagagacagggtttcactgtgttagccaggatggtctcgatcttctgacctcgtgatcctcccacctcrgcctccccagagtgctgggattacaggcatgagccaccgcacccagtcaagagagggatcttggatctcgcacaacaaagaacttgaggcaagtccataa

SEQ ID NO: 434517 - DNA, 201 bp, Homo sapiens
acaattttttcacggactggtgggtgggcggggaatgatttccggatgaaacaattccacttcagatcatcaggcattagattctcaacctagatccctcrcatgcacagttcacaataggcttcaagctcctgtgagaatctaacaccaccactgatctaacagaaggtggaactcaggcagtaatgctctctcatttgc

SEQ ID NO: 434518 - DNA, 201 bp, Homo sapiens
aggaagcaggggagagcggacatgtcaggaaaggaacatccctgtcaccggaaaggagtcccgatccagacccaagagagggcttttttttttttttttttgagacagagtctctctctgtcgcccaggctggagtgctagaacgcagtggctcgatctcagctcactgcaagctccgcctcccgggttcacgccattctc

SEQ ID NO: 434519 - DNA, 201 bp, Homo sapiens
caggaagcaggggagagcggacatgtcaggaaaggaacatccctgtcaccggaaaggagtcccgatccagacccaagagagggcttttttttttttttttttgagacagagtctctctctgtcgcccaggctggagtgctagaacgcagtggctcgatctcagctcactgcaagctccgcctcccgggttcacgccattct

SEQ ID NO: 434520 - DNA, 201 bp, Homo sapiens
tgctgcctgatagctttttcactggcaacagggagcaatttggcatcatatataatcctggattactgacttgattaatatttcatggtgtctattagtcrtttacatttatagaaacgtgagtcatgaaaaattaaagttttaattgccttgagtgtctttccttttgctttctttactccccctcctccttcttcttct

SEQ ID NO: 434521 - DNA, 201 bp, Homo sapiens
catctgctatctgctgaaaagagacaaaagagaagctggaaaggtttggggggttatgaatttgttccccattaatagtctttaaaagatgcaagacggcygggcatggtggctcttgcctgtagtcccagcactttgggaggctgaggcaggaggatcacttgaggctagtaattggagaccagcctgggcaacataata

SEQ ID NO: 434522 - DNA, 201 bp, Homo sapiens
ccacatggggccccaaaatgtatctgggttacaccaatctcttcagagcctcggagggtatctgacacataccagatatttcaactggtgagctgaaccarctgtctaatgctggtggcttgggaaatacttaaaaccttttcttgttgtctgagccactcccatcatcacagccacactgctgtcacaacagagggagct

SEQ ID NO: 434523 - DNA, 201 bp, Homo sapiens
ctcccttgacaccaatgaaaagaaaaacaagaaaaacatctcttccaaaacagcaagtcagcagaaccagcggaggagcaagtcatcaatttttttctagraaactggcaaacacttttcaagggtgttaaagataatcagacacaaaaataagacttaattaggcactagttttgccctcaagaaaactgaacccaaaga

SEQ ID NO: 434524 - DNA, 201 bp, Homo sapiens
tctccccctgagaatgatcaagcaatggacccattcattcactaattccttcactctgtcattcatttggcaacttctcctaggcccacagtatatccccrgctcttctgtgcttcacagctttgaacatgctgcctggaagggtgcttgttcaacctctaaaacccagaatcaattgtctcctcctctgtcaaatgtttt

SEQ ID NO: 434525 - DNA, 201 bp, Homo sapiens
gatcttctctccccctgagaatgatcaagcaatggacccattcattcactaattccttcactctgtcattcatttggcaacttctcctaggcccacagtayatccccagctcttctgtgcttcacagctttgaacatgctgcctggaagggtgcttgttcaacctctaaaacccagaatcaattgtctcctcctctgtcaa

SEQ ID NO: 434526 - DNA, 201 bp, Homo sapiens
gccaccgcacccggccaataataagaatttctaaatgatcttctctccccctgagaatgatcaagcaatggacccattcattcactaattccttcactctstcattcatttggcaacttctcctaggcccacagtatatccccagctcttctgtgcttcacagctttgaacatgctgcctggaagggtgcttgttcaacct

SEQ ID NO: 434527 - DNA, 201 bp, Homo sapiens
gatgagacagtgtcccttccccagacaatgagcaggctgctgtgggcagttggttcccctggccctgtgtcctctcttaggtgtagcccactgtgggggggggggtgggctcccgtctagacctgcctgcatcaccgctgatggccttggagctcagggagccaaggtgatcatgctgacactctggcttctgctcttgct

SEQ ID NO: 434528 - DNA, 201 bp, Homo sapiens
cacatttcttagtaatctgctattagttaccttgaagagttctgttgttctaaaatacgttgttgagcttcccagtttgctttctcatcctcaaactgackacgtttttcctccaattctttgtgctgtgcttccaaattctttttcatttgctcatggcgccgctggagctaaatcatagcacaatatataaaacaaaac

SEQ ID NO: 434529 - DNA, 201 bp, Homo sapiens
ttactatgttggccaggctagtctcgaattcctgacctcaggggatccacccgctttggcctcccagagtgctaggattacaagtgtgagccaccgcaccyggccaataataagaatttctaaatgatcttctctccccctgagaatgatcaagcaatggacccattcattcactaattccttcactctgtcattcatttg

SEQ ID NO: 434530 - DNA, 201 bp, Homo sapiens
ctggtcagatttggctgatgatggaagaaaaaagaacattcttactgagcaacagggctgagtttccaccttttgttctgtcctccactcctgagggtaayaggcattctcatttggaagcatctgctgccctggagggtgtgttagaatctcctggggagaaaaagaatgagagggagagggttgtgtacactgggagaa

SEQ ID NO: 434531 - DNA, 201 bp, Homo sapiens
ttaggatgctcaagcagtatcaggcaaaaattccaaaatttaaaaagtaaagaaatccaaaacacttctggtcccaagtatttcagataggggatacttgrtctgcattttatcctgagggatctgtgctgcctatctcaatgtaatttttgaaccagggcaaactattcttatccccttggtttcaaatgggagaagcaa

SEQ ID NO: 434532 - DNA, 201 bp, Homo sapiens
ccttgacaactaagtagaagctgcatgttgagcaaagtggagcaaaaggatctgggggactgcataccactgagccaccctcccagccctagaactcctaycccattgggcatgtaagagaaacttcaagtttattcaaaacaagtattgggatggcaatctctttgtaacagcagccaaacctatatcttaacatcttca

SEQ ID NO: 434533 - DNA, 201 bp, Homo sapiens
agtagagatgaagtttcaccatattggccaggctggtctcaaactcctgacctcaagtgatctacctgcctctgccttccgaagtgctgggattacaggcrtgagccactgtgcttggcctttaataaaatattgaatagcttatgtaacttcaacgctgtaccgaaagtgaaaaacagaatggttgtatggatactcgaa

SEQ ID NO: 434534 - DNA, 201 bp, Homo sapiens
cttggggaggagggggtttctgtgccttatctttctcatttgtaaaatagagatttgaagagtatctgtcttcatcatgaggattaaatagagtacccccctgtaaatgccaacacagagtatgactcttgggcagcactttagtaacagaacattagtaatagaactttccaattttagttagcacactgggcccccaca

SEQ ID NO: 434535 - DNA, 201 bp, Homo sapiens
aaaacatttgcacaagaatccttgactgaaggtctacttggggaggagggggtttctgtgccttatctttctcatttgtaaaatagagatttgaagagtayctgtcttcatcatgaggattaaatagagtacccccctgtaaatgccaacacagagtatgactcttgggcagcactttagtaacagaacattagtaataga

SEQ ID NO: 434536 - DNA, 201 bp, Homo sapiens
gcaggaagcaggggagagcggacatgtcaggaaaggaacatccctgtcaccggaaaggagtcccgatccagacccaagagagggcttttttttttttttttttgagacagagtctctctctgtcgcccaggctggagtgctagaacgcagtggctcgatctcagctcactgcaagctccgcctcccgggttcacgccattc

SEQ ID NO: 434537 - DNA, 201 bp, Homo sapiens
gtgcaccaaggctgggcagggcagcggggctctgggcctgacccagaaaccattattccctcctaagcctcagagcctgtgaagggaagggctgcctcagmgatctctggaatgcctttgaggcctttttcatgttgtcttatcagcacctggctcttttttagatatccaaatcttgctagcaagtggttgctcaacagc

SEQ ID NO: 434538 - DNA, 201 bp, Homo sapiens
gaaatggtagcctgagctgtacctgggccgcattgagccatggctggaaggggagcagctgggatgtgggaaacagtgcaccaaggctgggcagggcagcrgggctctgggcctgacccagaaaccattattccctcctaagcctcagagcctgtgaagggaagggctgcctcagcgatctctggaatgcctttgaggcct

SEQ ID NO: 434539 - DNA, 201 bp, Homo sapiens
tgaaatggtagcctgagctgtacctgggccgcattgagccatggctggaaggggagcagctgggatgtgggaaacagtgcaccaaggctgggcagggcagyggggctctgggcctgacccagaaaccattattccctcctaagcctcagagcctgtgaagggaagggctgcctcagcgatctctggaatgcctttgaggcc

SEQ ID NO: 434540 - DNA, 201 bp, Homo sapiens
tggtgacccccttctcacagctctactagtcagtggcccaatagggactctgtatgtggggccttagtagaagttctctatgagggctccacccctgtaayaggcttctgcctgggcacccagattttctcatacactcccatctaggtggaggatgccaagtctctttcactcttgcactctgcacacccacaggcttaa

SEQ ID NO: 434541 - DNA, 201 bp, Homo sapiens
ggtgcccaccacaatgcccagctaattttttttttgtaattttagtagagacggggttttgccatgttggccaggctggtctcgaactcctgaccttgggkggtctgccaactttggcctcccaaaggctggcattacaggcgtgaaccattgtgcccagccaatctatacctttaaataccatcagtttgacagtgactt

SEQ ID NO: 434542 - DNA, 201 bp, Homo sapiens
ccatttgctcaatcgtcttctatttgagttcctaaaggtttatttcctcttcagggctcagttcctgagctgtcatttatctacatgctttcttggataawctcattcaatctacgccttttcttttttttttttctgagacagagtcttgctctgtcacccaggctggagtgcagtggtgtgatctcgactcactgcaac

SEQ ID NO: 434543 - DNA, 201 bp, Homo sapiens
ttagaactgccctgttctcactgcacatggacagagagaggacttagagctcatttacatgcttgttgttggttttttaaaaagtgaaataaaaatgctcytctgccaggactgtgatgtcacccagggctgtgattagctggaaacaggtgagtagataaaatcaatgttaaaaattattcaccattcaatgttcagaaa

SEQ ID NO: 434544 - DNA, 201 bp, Homo sapiens
gccctccccagacttcgcccctgcactggcctctcagcactggctctctttaaagttgcctgggcagctttatgagaatgtccgtgtctgcctccaccccmacggcttcaggtttgcttggtcccggttgaagcccaggcactgtgtgtttgtgtacgtcctccaggtgattccaggacaggcttcgtgtcgaaacacaag

SEQ ID NO: 434545 - DNA, 201 bp, Homo sapiens
gacaaactatgcatacagactccagaactagtttttgaataagtgaatgagaagcatggtatcacttccatttaaggttctgggcccatcttgtgtaatagaaaatgaagagcctcatagggatacaggggatactgggataggattttcacaggaggttgaggtgttttcagaactttagtggctagtttgaaatgagtt

SEQ ID NO: 434546 - DNA, 201 bp, Homo sapiens
tttattttctttctatcctgctggatgtttgtttcataagggttgtagttatctgtctggttcacccctacaatcctagctacttgacaaactatgcatasagactccagaactagtttttgaataagtgaatgagaagcatggtatcacttccatttaaggttctgggcccatcttgtgtaatagaaaatgaagagcctc

SEQ ID NO: 434547 - DNA, 201 bp, Homo sapiens
ggctgaccgcattccttggcttatggccccgcatcactttgacctctgcttccatcatcacacctccttctctgactcagactcacctgcctcccttttcwcttataagaactctcctgaatatgttggggctgcctggataatccaggataatctcccaattttagtctgtttgggctactatagcaaagtcctacaggc

SEQ ID NO: 434548 - DNA, 201 bp, Homo sapiens
actttttgaggatcaacatgatgttcaaagaaaatgctcattgaaacactttggattttggatttttggatttaggatgctcaagcagtatcaggcaaaamttccaaaatttaaaaagtaaagaaatccaaaacacttctggtcccaagtatttcagataggggatacttgatctgcattttatcctgagggatctgtgct

SEQ ID NO: 434549 - DNA, 201 bp, Homo sapiens
cgagaatcccatcgccagggctgcagtgggctcttcttcctcatccctcccctttctttctcctcccttcaactctaaattacttaaattatggtgggggkttggggaggacatggggggcactgggacctagatttgttcttctaaataaagttggggggggaaaaaagcttcaaaggtccaaagctcggcatagctaat

SEQ ID NO: 434550 - DNA, 201 bp, Homo sapiens
ggctgggaagtccaaagttgggggacccacatctagtgggggccttcttgctacatcatcccattgaggaagggcaaagaaagggtgagagagagcaagaragacccaaactcacctttataacagctcactcatgatgacaaacccactccttgataaccacattgatctactcatccctcatgacctgagcacctgttg

SEQ ID NO: 434551 - DNA, 201 bp, Homo sapiens
tgtcaggaaaggaacatccctgtcaccggaaaggagtcccgatccagacccaagagagggcttttttttttttttttttgagacagagtctctctctgtckcccaggctggagtgctagaacgcagtggctcgatctcagctcactgcaagctccgcctcccgggttcacgccattctcctgcctcagcctcccgagtagc

SEQ ID NO: 434552 - DNA, 201 bp, Homo sapiens
ctcaaatcactgaggtaaagatggaatttttaagaaataatgctgggatgagtggacctccatttggcgaaagcagcacagaggacagtgtgcagcatccrgtgagtcagggggcggtacagcaggaagcaggggagagcggacatgtcaggaaaggaacatccctgtcaccggaaaggagtcccgatccagacccaagag

SEQ ID NO: 434553 - DNA, 201 bp, Homo sapiens
aaggaaaataatcaagatgagtgaccattttataaacatgatagacaacatgataacaacaatagctaacccaattacaacaatgttgggattttcagatrctactttttcatttaaagaaattacaagatttagaagtaaacaactaagacaatgttaacctatagtagtattttcttagacaatcaaatatttgacaaa

SEQ ID NO: 434554 - DNA, 201 bp, Homo sapiens
gacaatgcttttaattcactcagcacaataaatgctggaaagaatgttagcagttaatagtattgttgttttattcctcaaaagaggatggattatctctsaaatcactgaggtaaagatggaatttttaagaaataatgctgggatgagtggacctccatttggcgaaagcagcacagaggacagtgtgcagcatccggt

SEQ ID NO: 434555 - DNA, 201 bp, Homo sapiens
tcatgccacccagaactcttccagggccaaagtaaggtggccccagggtagaggtgtacagcctggaggcttcctgtatatctagtgatcacatcccagcsctttgatggacagaaccctaaggagctgcgggagtagtgagagctgagaggaacatttggtatttgtttctacctgtccatggagtgcgaaaacctgttc

SEQ ID NO: 434556 - DNA, 201 bp, Homo sapiens
cccgggtgcccccgccgctgccctcgccgccgagcagcatggagaggagccggggacctaaccagagccagccggccggcctcccgaaggcggcggcgcarggaacggcccgacgcgtgctcgtggtcccggcggccgccaaggcggacagcggcaccgcgcgggggcgctgcgttggcggccctggcccccgggccgggc

SEQ ID NO: 434557 - DNA, 201 bp, Homo sapiens
atcaaggcattctgctcaacgaagacttttccttcctctgaaagagactttcctgctaaacaacttttttccttactacaatctgattgcagtaagcaagkatggcataacataaccatccaaataagttgaaaacttttgcccacacaaaaacctgcacactgattcatatttgccaacacttggaagcaaccaagatgt

SEQ ID NO: 434558 - DNA, 201 bp, Homo sapiens
tcagttgctctgagtcctcaccagcattcaatatggccggtcattttaaagtcagccacctacattgttttatgtttttgtgtttagagtttttaaaaaaatgtactcaagtttagccaactcttggcttcattataccaaagtttacaggaataaaaccagattatttctgttgctccagtgatattaatagtgtctact

SEQ ID NO: 434559 - DNA, 201 bp, Homo sapiens
acattactataaagaaatacctcgcctgtaatcccagcactttgggaggctgaggcaggcggatcatgaggtcaggagatcgagaccatcctggttaacayggtgaaaccccatctctactaaaaatgcaaaaaattaaccaggtgtggtggcgggtgcctgtagtcccagctactagggaggctgaggcaggagaatggt

SEQ ID NO: 434560 - DNA, 201 bp, Homo sapiens
cgttcaaacctcgtgccagttcccctccagctgacatggtggtgccaaatgggaggaaccccatattagtctgttctcacattactataaagaaatacctygcctgtaatcccagcactttgggaggctgaggcaggcggatcatgaggtcaggagatcgagaccatcctggttaacatggtgaaaccccatctctactaa

SEQ ID NO: 434561 - DNA, 201 bp, Homo sapiens
gagcaacatagtgagacctcatctctacaaaaaaaaaaaaaaaaacaaaattagctgggcatgggggtgcatgtctgtggtcccagctactcaggaggccragtgggatgatctcttgatcctgggagattgaggctgcaatgagctgagactgcaccactgcacccctgcctgggcaacagaacaagactctgtctcaga

SEQ ID NO: 434562 - DNA, 201 bp, Homo sapiens
aatcatgtttttctgtttaaggctaaagagcatgcatttttatttattttttcttaaagtgttccatctttattgaggtatatttgaaggatacaaaatcrcatatatttaaagtgtgcaattctatcagtgttgacatacacgcagccataaaactgtcacttctaaacaatatttccaccatcacctaaagttatcttg

SEQ ID NO: 434563 - DNA, 201 bp, Homo sapiens
agcagtatacactatttgtcttagtccattttgcattgttgtaaaggaatacctgaggctgggcaatatggttctgccaggctttacaggaagcatagcascagcatctgcttctggtgagggcctccggaagcttccactcatggcagaaagggaataagagatggcatcatgtgacaagagaggaggaaagacagggag

SEQ ID NO: 434564 - DNA, 201 bp, Homo sapiens
ggaggaatgttctggagcaagccaggggccacagaaacatggagagggggcaagaatgtgcccaaagatggtcacggaggggctggggacaggtttcggcragagagtccccaatttgccttctgccccagaactcctcagacagagtagggacagccctggacttaacacatttatgtgggaaaagagtgagagttattt

SEQ ID NO: 434565 - DNA, 201 bp, Homo sapiens
aaagtattatcaaccaaatttacagcaataggaaatacttgcaactgtgtgttatgtaagatttgctatgtgttgtcacagatttatgacaccagcaactyaatactgtgaaagtttcctagaggatagtatagatatgtagaataagtgaaccacatattttgtctcaaggattaatttcttttcaagccacatcagatt

SEQ ID NO: 434566 - DNA, 201 bp, Homo sapiens
ggaatcaaattattagctgaggaattaaaatgctgtgccctgtgcacaggctattctacaacaaaaatagaaaccctgccctgtgttgtaagaatggaccrggaaaagaaagtctccccgtgtcccaggaaacaaagcaggcatcaggagcattcttagtgaccaaagagaactgtgacctggtgggacagggctggggct

SEQ ID NO: 434567 - DNA, 201 bp, Homo sapiens
agaaggtctctggcttctcccctgaagccagcaagaccactaacccaccaggaagaacaactgtggatgctccatctgtgagagctgtagtactcacggcraagatctgcagcttcacttctgaagtcagtgagaccacacatccaccagaaggaagaatctccaaacacatctgaacatgtaaggaaacaaactcagaca

SEQ ID NO: 434568 - DNA, 201 bp, Homo sapiens
cattaaaaagccatgcctggaagctgggctgctgcagttattatctcaccactccacccacttggggcaggccaaggggaaggacaggaaaggtgggcagygaccttcctggcttcatgaagagttggattcaggaactggaagaaggaggagccaggaggatgggtgaagggaaagggcttctggtgcttcccaggtgga

SEQ ID NO: 434569 - DNA, 201 bp, Homo sapiens
tcctagctatgtgggaggctgagtgggggtggattgcttgaacctagaggtcaaggctacagtgagctgtgattggatcactgcactccagcctgggcaayagagagagaaagagagagagagagagagagagaccctgtctcaaaaaaaaaaaaaaaaaaatcggaatctgtcattttcttgtactttatactggtcacg

SEQ ID NO: 434570 - DNA, 201 bp, Homo sapiens
tgaagccagtgagaccatgaacccaccaggagaaaggaataactctggaagtgccgccttcatgagctgtaacactcaccaagaaggtctctggcttctcycctgaagccagcaagaccactaacccaccaggaagaacaactgtggatgctccatctgtgagagctgtagtactcacggcgaagatctgcagcttcactt

SEQ ID NO: 434571 - DNA, 201 bp, Homo sapiens
tcctcatagtctgaagtctttccctgcttcctcctgcttcttctccttttattgttcccaggcattatccccaataaatctcttgcatttttaaccccaayttcatgattgtaccccagaagacttaaactgaccacccctgtatgcagacatgctggagaaacagaagagctgcgtgtagaaagtaaaggatgcatgtac

SEQ ID NO: 434572 - DNA, 201 bp, Homo sapiens
tgtgtctagctaaaggtttgtaaacgcaccaatcagcactctgtaaaaacggaccaatcagcactctgtaaaatgggccaatcagctctctgtaaaatggrccaatcagctctctgtaaaatggaccaatcagcaggatgtgggtggggccaaataagggaataaaagcaggccacctgaacgccctgggacagctgtttg

SEQ ID NO: 434573 - DNA, 201 bp, Homo sapiens
cttcctggagccctgcttcctgctccatccacaggggtcgctttcccacctgctgcgtgggaaatcctggaggaagagcgagggggagagatgtggcaaaygttgacacacgaggttccgtgcatgtgtgggttggagttatccctcttatcttgctattttttgagttattgattagctaatgagccatggctcatgact

SEQ ID NO: 434574 - DNA, 201 bp, Homo sapiens
cctcatcaaagtctaaaaagcaaagcaccaatctccagtgccccctgccctttcatcgaccccgctggagtttcaatgccttggagcccagggaacccatmtatgacctctctgggctgcattttcctcttctgtaaaatgggctaagtgttgactgggataatgcattgagggcactttgctcagtgcctcggaaacatt

SEQ ID NO: 434575 - DNA, 201 bp, Homo sapiens
tgaagaagtacaaatccaaacaaataaaaaataattaactgttgaaagacaaaatttcctatttgccgttgttcactgtaatagttttggcaaaatcttaraaaaacagcattctcattgctaatagggatataaatccatgaaaacttcctggggccaatttgaaaatatacctcaaaagacttaaaaatatctatttat

SEQ ID NO: 434576 - DNA, 201 bp, Homo sapiens
tttgactcaggagttgagcagaatgctgaactattttaacaaagtcgggtgcaataggttcattgctgaaagaacctttccatctctggatggaataattrtaacattagctcattttgttaagtgattacaatgcttacatggataatttcattcaatcctctgtgatgggattattcttatccccattttacagctaag

SEQ ID NO: 434577 - DNA, 201 bp, Homo sapiens
tttcctgttttgccttcatttttgatgatctagactttgccaaagaattagttcttatgtcaaaagtccttgcagactgtcatttatcgttgtcttttaamttccaagttttgaagtgctactagtcagtggtgggactgaggccacatgggaagtagtttgtcatttctgagttcccagtactcttggtcactggggatc

SEQ ID NO: 434578 - DNA, 201 bp, Homo sapiens
tcatcaaagtctaaaaagcaaagcaccaatctccagtgccccctgccctttcatcgaccccgctggagtttcaatgccttggagcccagggaacccatctmtgacctctctgggctgcattttcctcttctgtaaaatgggctaagtgttgactgggataatgcattgagggcactttgctcagtgcctcggaaacattaa

SEQ ID NO: 434579 - DNA, 201 bp, Homo sapiens
taaatgagtcatcgtgggatattctaatcccatcatttcctgggtcattgagatcaagaattattgatgtagaagaaaggagataaaaatgtaacattaargcaatgaagtaaaaaaaccctgttgccctaaatttgaattggaagtatcagtgtgatggtattttaacttttcaaaaatataattttctagctctgtcta

SEQ ID NO: 434580 - DNA, 201 bp, Homo sapiens
gcctgtgctgctggtggcctcccacagtgagggagggacagcagcaggtcacctttcaatgtcagaggggcagccacagggtgagatcataacgctcttaraagtcattgtgaaaacgtggcttttgctctgagtgaaaggtggaggctttagaggtctctgagcagagggttagaatcatttcactttctcattatatcc

SEQ ID NO: 434581 - DNA, 201 bp, Homo sapiens
gtgataagcattagaataagttaatcattaaattaaggttgcagccgggcacggtggctcacgcctgtaatcccagcactttgggaggccagggcaggcaratcacgagggcaggagttcgagaccatcctggctaacacggtgaaatcccatctcttctaaaaatacaaaaaattagccaggtgtggtggcacgcccctg

SEQ ID NO: 434582 - DNA, 201 bp, Homo sapiens
tgatggtcaattttttgttaatctcaaggtgaagaaattgtaatatgaaagactagtgataagcattagaataagttaatcattaaattaaggttgcagcygggcacggtggctcacgcctgtaatcccagcactttgggaggccagggcaggcagatcacgagggcaggagttcgagaccatcctggctaacacggtgaa

SEQ ID NO: 434583 - DNA, 201 bp, Homo sapiens
cttgtcacactgatataattcaggacagcatccagcttggccactgcacacaagttggtgccaagtcaatagcctgactgaagctcattgattggggaatyggggcttgctttgccaggactgaggtcttgtgtgttggggcaacatttccctattcagctttcaaatctcatcttgaccctcacttcccgggaagtcccc

SEQ ID NO: 434584 - DNA, 201 bp, Homo sapiens
ttttgtttttagagctgccaatgtttcttaagaaatcctgtaagatgtgaggaggtagagaaaagcaagcacatgagacagtcattgtcatactcagacaygtcagaaccaggtttggactttaggaagcctatctattttttttttttttttttttttttgagatgagatcttcctctgtggcccaggctggagtgcagt

SEQ ID NO: 434585 - DNA, 201 bp, Homo sapiens
actccactatgctttcctcaattaggtttttgatctagcccagatgttgacctcagcttcagacacacacacagactcaacactcacactcttacacgctyacacacacacatgctcacacacacccactaataaacatatacacaccactcacacacactcatacatgcacaatctcacacacatacacacaacacacac

SEQ ID NO: 434586 - DNA, 201 bp, Homo sapiens
tgccttgtcacactgatataattcaggacagcatccagcttggccactgcacacaagttggtgccaagtcaatagcctgactgaagctcattgattggggmatcggggcttgctttgccaggactgaggtcttgtgtgttggggcaacatttccctattcagctttcaaatctcatcttgaccctcacttcccgggaagtc

SEQ ID NO: 434587 - DNA, 201 bp, Homo sapiens
tgaatgagtgaccataacctcctgattagcagttctaaatacatttgcataagtattaattgttggccagactgaaagctctaggagtatggtatagtgcrttttcaagaggaaacctctccatgtatttcagctcagttaggacacacgcagggcttcagagatcaatgcaggtctttgccacacgcgtaagaaatagcc

SEQ ID NO: 434588 - DNA, 201 bp, Homo sapiens
agttaatatggaactgctctcttgagcagtctcctttctgagattattctggcatttttggcccactgaagccccattttttttgtcctctggttagaaasctaggtctttagttttcctaccttgctgcatacatctcatggctatacttgagtctgtcccaccaggcagtgtatgaacagagagagagaaaagggaatg

SEQ ID NO: 434589 - DNA, 201 bp, Homo sapiens
ttcagagtcaaaaggaaaattcagataatcattgtgccttcaggagctgtctctgattgctatggaatcagcctacgggcaaaaaccaaatgatagaagaytttaggacgatagtgactatttaagacttttcaaagaggatttcaaacgagtgtgggtggcagggcacccagaagtcatgagacctggagcaagttttct

SEQ ID NO: 434590 - DNA, 201 bp, Homo sapiens
agctgaactgaattgacgtgaaattctttataatctttatcccacttggtgtgaacattttgttacagtgggtagctagtcagacacaaagagggcaggaragggccctgcaccccaccaggaaagtcaggcacccatcaggtgatactcaggcaattttctgcctctctaaaataataataggttgcagccagcaccaga

SEQ ID NO: 434591 - DNA, 201 bp, Homo sapiens
gatactcgaagtatgatttctactgagcatgtactgcttttgcaccatcataaagctgaaaaatcatctgtggaaacattgtaagtcaagggctgtccctrctgcacaatccgctcagagacctgggagggtgaggccggccagatacagcttttaagccactggttttcagcatgcaggaaactgttccttggcacaaat

SEQ ID NO: 434592 - DNA, 201 bp, Homo sapiens
atattcttcacaactgggtctagtagaacaatagagtcatttcttgtacttagatttttttttcctggaattaatcagtgttgtttcgctttttaaatagrtgttaattgcaggtgtccttcctggagccctgcttcctgctccatccacaggggtcgctttcccacctgctgcgtgggaaatcctggaggaagagcgagg

SEQ ID NO: 434593 - DNA, 201 bp, Homo sapiens
aaacaagttcaactcttttcattctggggtttagctcctgttcagaaaacatgctccatgttttcactttagtgtagcttctactgactttctactctacmaaataaggatttaattctcttatactttcttcactcacttttactcttcctcaatctcctgataaagttacagcacaattttaaagcttagatcaagatt

SEQ ID NO: 434594 - DNA, 201 bp, Homo sapiens
gaagaggcctagaaacaatgattaattctgagtagcagtgacatctctgatacccagattgtgggcttgaaatactatttctcactaaaataaacagagcrtcttgggagaaatggccagttgcatgtctgggtcagaaatgtacaaggtgagcctagagcctctgtcatatcaggcagtgagaaagctaccaaagaccag

SEQ ID NO: 434595 - DNA, 201 bp, Homo sapiens
aggaggaggactttgctggggggatcagggagagaacggcattcaaaatcaagggcaactctgcatttgagaaaactctgctcctttccagaactcccgtwcaatgctcagggtgactggtgcacgggagggcagggcacggtggtggctgatggtagattttattgtgcaggcgaagggtgcactgcagggttgcagcac

SEQ ID NO: 434596 - DNA, 201 bp, Homo sapiens
tgataaaacaggtcatggtaaagaagctggccaaaacccactgaaaccaagatggcaatgaaagtgaccccttgccatcctcgctgctcattgtacgctarttatgatgcattagtatgctaaaaagacactccatcagtgccagcacagtttacagatgacatggcaacgtcaggaagttaccctaaatggtctaaaaag

SEQ ID NO: 434597 - DNA, 201 bp, Homo sapiens
tttatcctttgagttgcaaataatcgaattacattattaaagttattaaaaaatatgcaattaagaccgggcgtggtggctcatgcctgtaatcccagcaytttgggaagccaaggtgggcagataacttgagctcaggagtttgagaccagcctgggcaacatggcaaaaccctgtctctacagaaaatacaaaaatttg

SEQ ID NO: 434598 - DNA, 201 bp, Homo sapiens
agatgagataatgtgtgtggcacagccatggggactggggcccagggcatgctcaatagtgctactttcccctttccaacccggatgtcagaggggaccayctgccctccaagatctagagaagaggatctcaaatccccaccccatcagtgcccaattttagattttggtgaagccccaggaataatatttcttgcttcc

SEQ ID NO: 434599 - DNA, 201 bp, Homo sapiens
gtgtatccatcccctcaagcatttatcctttgagttgcaaataatcgaattacattattaaagttattaaaaaatatgcaattaagaccgggcgtggtggstcatgcctgtaatcccagcactttgggaagccaaggtgggcagataacttgagctcaggagtttgagaccagcctgggcaacatggcaaaaccctgtctc

SEQ ID NO: 434600 - DNA, 201 bp, Homo sapiens
tccatttaagatgcaggagccaatgactaggtcagtaattttccactggcttcaatgagagccctgacagggaaaggggtaagaggaaaggaagaggagaytgtgggaggaaaccgagctgggcaactgcattgcggagacacaaggactgccagccaattgtcttcgacttgcctatgccaaatgttctggaaatggact

SEQ ID NO: 434601 - DNA, 201 bp, Homo sapiens
ttttataaatttttgtgggtacatagtaggtgtatacatttatggggtacatgaaatgttttgatacaggcatgaaatgtgaaataagcacatcatggagratagtgtatccatcccctcaagcatttatcctttgagttgcaaataatcgaattacattattaaagttattaaaaaatatgcaattaagaccgggcgtgg

SEQ ID NO: 434602 - DNA, 201 bp, Homo sapiens
cagcctctgcttctggagaggcctcaggaaacttacaaccgtggcagaaggtgaaggagccagatgtctcacatggctagagcaggaggaagagagagagrggggaagtgctacatatttttaaacaaccagatcttgtgagaactctatcacaagaacagcatcaaatggatggtactaaaccagcagtccccgacgttt

SEQ ID NO: 434603 - DNA, 201 bp, Homo sapiens
tctgtagataggataagattatgaatgtagcatgcttagcacagtgactggcacaaaggaggcactcataaatcaccatttttatttgtttcccttcttcrgtgtagctgaaccagcacatagagttctacttgaatctccaaggactggcaggtgtcctggaccagactccatttttagtgataattggatgcttattat

SEQ ID NO: 434604 - DNA, 201 bp, Homo sapiens
tggatgttttttccctgtgagcttgcatggtcaccccctgcatgtgtctgcttcttggcaggatgtcagaagtgtttgaaccagaataatttcatcttgcrtgggggctgggtaaaataaggctgagatctactgggctacgttcccaggagattaggcattctaagtctcagggtgagacagcaggtcagcacaagatat

SEQ ID NO: 434605 - DNA, 201 bp, Homo sapiens
gtcccaccctcttgggaccacagcttctctagtggagggaagactcgcttccctcagagctttaagtatttcggtgctctccaggctgctgttgccattgytgttactgctgccactatgggattacctgggggttgggtgggcaagagtgaaaaaagatttaaaaaccagggactttctccacttcttataactcttagg

SEQ ID NO: 434606 - DNA, 201 bp, Homo sapiens
tttacaaattgtctgctagttatggagattaaaagatcaatgtgtgggcagaattttttcttttgaaatttggatcctgggttgcagatggatgttttttscctgtgagcttgcatggtcaccccctgcatgtgtctgcttcttggcaggatgtcagaagtgtttgaaccagaataatttcatcttgcgtgggggctgggt

SEQ ID NO: 434607 - DNA, 201 bp, Homo sapiens
catggctatacttgagtctgtcccaccaggcagtgtatgaacagagagagagaaaagggaatggtattttgtcccaccctcttgggaccacagcttctctagtggagggaagactcgcttccctcagagctttaagtatttcggtgctctccaggctgctgttgccattgttgttactgctgccactatgggattacctgg

SEQ ID NO: 434608 - DNA, 201 bp, Homo sapiens
ctctagggtggtctccaaagaggacactcaagcattctctgagcagcacggggctgtgtcctggtagcagcctgaaggggtgacagtggagcacagtgttyattttcatttctcaattttgacatatttactggaaaaattaatccctagccacctcacatgacagtacataattttttttttttttttttttgagatgga

SEQ ID NO: 434609 - DNA, 201 bp, Homo sapiens
acaaacagaaccatgggaacaacaataattagaggacaagaagaggaagaaaagccttcagagaaaacggagtgcaacaaacagaaacagaaggatgtggygtcacagaagtccaagaaggagaagattccaactggctaaatgctgatgagaagtccaataagcaaaagaataaaactaggccaggcgcagtggctcatg

SEQ ID NO: 434610 - DNA, 201 bp, Homo sapiens
ggcaacttacaaaataaagaggtttaattagactcacagttccacgtggctggggaggcctcacaaatcatggcagaaggcaaggaggagcaagtcatgtyttatgtggatggcagcagccaaaaagagagcttgttataaggaaactcctgtttttaaactatcagatctcgtgagactcattaactatcacaaggacag

SEQ ID NO: 434611 - DNA, 201 bp, Homo sapiens
ctgttcaggtaagcaactttcaggaacttaactgagtcaactgctacagggttaagagaaaggacatggggttctctgagctgctcccttctattatcctrtaagctggaaggaaccttcagggtgttttcagaagattttaaagattagaagactgtggtccaaagaggttaaaggacctgcctatcatcacacagcaag

SEQ ID NO: 434612 - DNA, 201 bp, Homo sapiens
taagaagctaatctctttatgtgtaagaataagtgacgaagccgctaggtatctttctcctatgttctctgcatttattttcctgtactttgtacttcagwatcttatggggatcaaatatataaatgaaacagtgcctcaagggtcttggaggaatgctaggaaggccttcctgtccctttaaggcatatcaaaatagta

SEQ ID NO: 434613 - DNA, 201 bp, Homo sapiens
taagggaaagagagggacaggataggtgacatcataccagcagatttacctaagttactgtcagtgtttttggtctcaagttggatggtgggttttcaggygttcgctatagtttagtaaataaatagataacatagaagaaagccacttgtgtacttcaagcatcaggaagaaaagaagagaagagaagaaagggaaagg

SEQ ID NO: 434614 - DNA, 201 bp, Homo sapiens
cctacctctctagggtttctgtgaggacaaaatgaggtaaggtccagacctaacaaacaagagttcagtaaacgttgtctattattcttctcttcatctcytacaattgcaagtactctggcaacatttattcacacgaacctacttctcctttctgtaataagtgccctcctatctccatcaaaagtggcaaagaattga

SEQ ID NO: 434615 - DNA, 201 bp, Homo sapiens
atgctgctgataaagacatacccgagactgggcaacttacaaaataaagaggtttaattagactcacagttccacgtggctggggaggcctcacaaatcayggcagaaggcaaggaggagcaagtcatgtcttatgtggatggcagcagccaaaaagagagcttgttataaggaaactcctgtttttaaactatcagatct

SEQ ID NO: 434616 - DNA, 201 bp, Homo sapiens
atgctaagtgaaataagccaatcataaacaggctgttactgtatgattctatttctatgagatatttaaagtagccaaattcatacaaacaaacagaatgrcaattgccagaggctgaggggagagggggaaaggggagttgtttaatgggcatagagtttcagatttgcaaaatgaaaatttctagagatctgtttcaca

SEQ ID NO: 434617 - DNA, 201 bp, Homo sapiens
gtctgtttattttttccctgactttatatatttttggagactggggtttgctaactaatttgaaaacgtttctgatgctaaatgatattctaatttttttytaagggctagtcgatttggtaggtgagttgttacacactccttagtgaattccaacttccatggccaccatcctgctgatattctaattttgatttggag

SEQ ID NO: 434618 - DNA, 201 bp, Homo sapiens
gcaagccaaatgtccatctacagatgaatgggcaaacaaaatgtgggggggggtgtgtgtgtaatattattcattatccttatgatcatatcattaccatkccaaaggaaggaaatcctatcatatgctacaacgtgaatgaaccttgagtgcatcatgctaagtgaaataagccaatcataaacaggctgttactgtatg

SEQ ID NO: 434619 - DNA, 201 bp, Homo sapiens
ttcttcagctatcaaggttactgtgtacaagctgggaatacccttgatcttgagattaaaatgtaaattaagagattaaaattaagatcttatatttaaaatatatatatatacatatataattaaattatatatacatatatacatatataatttaaaaattatatatgtataatttaatatataaataaatttaagatg

SEQ ID NO: 434620 - DNA, 201 bp, Homo sapiens
atttgcacacccatgttcatagcagcacagtagccaggaggtgggaagcaagccaaatgtccatctacagatgaatgggcaaacaaaatgtgggggggggkgtgtgtgtaatattattcattatccttatgatcatatcattaccattccaaaggaaggaaatcctatcatatgctacaacgtgaatgaaccttgagtgca

SEQ ID NO: 434621 - DNA, 201 bp, Homo sapiens
tcttcagctatcaaggttactgtgtacaagctgggaatacccttgatcttgagattaaaatgtaaattaagagattaaaattaagatcttatatttaaaatatatatatatacatatataattaaattatatatacatatatacatatataatttaaaaattatatatgtataatttaatatataaataaatttaagatgt

SEQ ID NO: 434622 - DNA, 201 bp, Homo sapiens
tgaagagatatttgcacacccatgttcatagcagcacagtagccaggaggtgggaagcaagccaaatgtccatctacagatgaatgggcaaacaaaatgtrggggggggtgtgtgtgtaatattattcattatccttatgatcatatcattaccattccaaaggaaggaaatcctatcatatgctacaacgtgaatgaacc

SEQ ID NO: 434623 - DNA, 201 bp, Homo sapiens
agcatcaggaagaaaagaagagaagagaagaaagggaaaggaaagaaagaaaggcaaggtcaagaaaagataggctctggtgtcagacagatttgaattcygccattactggttagttataatttctctaaacctcagtttgattacttataaaatggaaattatattaggttaaatcatatgaaattactgatctttgac

SEQ ID NO: 434624 - DNA, 201 bp, Homo sapiens
tgcttcagcctcctgagtacctgggattggtactcgccaccgataattttttgtacttttagtagagacagggtttcactatgttggccaggctggtctcraactcctgacctcaggtgatctgcccaccttggcctcccaaagtgccagaattacaggtgtgagccactgtgcccagcctcagatggcatttcaaatctc

SEQ ID NO: 434625 - DNA, 201 bp, Homo sapiens
gctttacagaggcagatggatgatggagagagaattctggtcagggcaacagcctggacaaaggcacaaaggtaaggatgaggctggcacaggtgttcatycttttgtttaatcatttattaattcaacaaacatgagcatctcctaaaaccaagagacttttcttggtcctggggacatggctcttgcatttgtgaaatt

SEQ ID NO: 434626 - DNA, 201 bp, Homo sapiens
actacacccagccacaaaatttcatttttaaaaacaggtgcaggacaggtttggcccatgtgctatagtttgctaacttaaggtttttgtctttgtggctrgagagctttagggtataaatgtctcaaatctcattaattggactgtgtggggattctttagaataagattcaaaagcaaataatgcatttataggaggtc

SEQ ID NO: 434627 - DNA, 201 bp, Homo sapiens
tggaactcctggcctcaagtaatccgcccacctcagcctcccaaagtgctgggattacaggcgtgagccaccacgcctggccctggagtacataattttgrtaagtaacgtctgcagtgtctttttttccctccctttttatggatagacttttctggttattgagatctcatacccctttatgatatattatttgagtag

SEQ ID NO: 434628 - DNA, 201 bp, Homo sapiens
tggctaacagatatggagggtccttagagctctcctgtttctaaccaaatcttcaccccacctattaagtagaaagccttttcatggaagggctgtggttkgttcttggaactggtcccctcacagaatttccattcgcttttcctcagggtcacgccctgctttagaggttgcttaggttaagctctccaattaatttta

SEQ ID NO: 434629 - DNA, 201 bp, Homo sapiens
actttatatatttttggagactggggtttgctaactaatttgaaaacgtttctgatgctaaatgatattctaatttttttctaagggctagtcgatttggyaggtgagttgttacacactccttagtgaattccaacttccatggccaccatcctgctgatattctaattttgatttggagttagagaaaaggcaaattga

SEQ ID NO: 434630 - DNA, 201 bp, Homo sapiens
acaccctccaatctctgtgtgttttgtaaacatcactggagggtcttctacgtgagcaattggattgtcatcagccctgcctgttttgcacctgggaagtkccctggtcttacttgggtccaaattgttggctttcacttttgaccctaagcatctgaagccatgggccacacacggaggcagggaacatcaccatccaag

SEQ ID NO: 434631 - DNA, 201 bp, Homo sapiens
aagatctgggaaagtgggtaacagactgggctgcaggaaggagggcaggctttacagaggcagatggatgatggagagagaattctggtcagggcaacagyctggacaaaggcacaaaggtaaggatgaggctggcacaggtgttcattcttttgtttaatcatttattaattcaacaaacatgagcatctcctaaaacca

SEQ ID NO: 434632 - DNA, 201 bp, Homo sapiens
gtaaactcagagaattctctttccccaagaggtgaaatcatttgaaaatatacaatgaaaacgatgggtttatatgaatatatacatcttaggcctataayggcttaagatggcttacaaggtgaactgagatgctcaaaatattaatacttgtttaaattgtacggctgatcatacagaggaccacaggtctctctccct

SEQ ID NO: 434633 - DNA, 201 bp, Homo sapiens
atctaagaaaagagagggcttggaaatgaagtccctagacatgggtctccctaaggggatctgtgtggctccaggggatacagggcccagaaggcacagtrcgacagcactgggcagggggcgctggggccttagagggatgctgcttttaggtcctacaagagcctaggaagaatgaccatgccttctaaaccaaaaatc

SEQ ID NO: 434634 - DNA, 201 bp, Homo sapiens
tgctggcaggatggttctgatttttttttttaagtcagaaaacaaaagatctgttttctagtgagcagcatacttcccagtttcccaaaaacaaagaagtytgggctccagcatgatttgccagtctgcaaagacccgactattaagggtccttgtcttaaaaacttctcacataaagtactgcctagaatatcagaggtg

SEQ ID NO: 434635 - DNA, 201 bp, Homo sapiens
taggtagggaagtaggcagtcctgagagctttaaatcctaagtcactcaagtgaaaaggggaggaatcaggatgtgtattaaggtgacagatgaaggtttyattcctgtgccacgccactgaagtcacatgaaatggattgtctttagctcacttaatctggataaaatttattcttagatttttcccacggttaaatgca

SEQ ID NO: 434636 - DNA, 201 bp, Homo sapiens
cagagctattttacattgtttcagaaccaagagaaacatggcctacatttcacaatttacacctcaggttttttatatatttgacagttacattacatttycaacagttacaatttccttctggggagctggggaagcattcccaaactagtcttctggggagtacagaggagtttaaaatatatagaaggaaatttgtac

SEQ ID NO: 434637 - DNA, 201 bp, Homo sapiens
ccaaagacgaaatcaaaagccttagaggttggtaaattccccacccccttggagaaaggagaatgggattcatatttggtgtgggtctaggcattgaattrcagtatgtgcttgccataaattatctcatttaatcttcataataaccaatgtgaagactggggttcagagaagtaaagtaagttgcttaaggtcacacaa

SEQ ID NO: 434638 - DNA, 201 bp, Homo sapiens
tgctgtgactgagtcaatgaagcacctactgtgtgccaggtgggccataaaagttgaggctaggattcctgcactcaaagaggtctgcatatgttagttgsggaaatgcaaagctaacccatgtagaacaagcaaagagcaatgaaatgctttgccctgattgtaggagcccaagatctgggaaagtgggtaacagactgg

SEQ ID NO: 434639 - DNA, 201 bp, Homo sapiens
tgcttataagcctatgagtcatttgagggtcttgttaaaaatgcagatttaagttcagtaggtctggggtttggatctgagattctgcacctctaacaagytctcaggtgatgcctgtgctgctgtggaggaccacaatttgagaagcaaggaattaagctctcatttggctagagtgaccaggtatcctctttgctcaga

SEQ ID NO: 434640 - DNA, 201 bp, Homo sapiens
aaaaacaataaagtgtggtgaatgaggttataggctcaatgttgtagtttggatataggtttttctgagtaaaagactactttttttttttttaatttcamccaggtatttaattggtctggcaactgcacaatatacaaatttctgaaaggcatctcctgtttgaaagctagcatagcttcatcccagtaattaattcgg

SEQ ID NO: 434641 - DNA, 201 bp, Homo sapiens
aaaaaaagcattggggaccccaaaaatcaaactggattgatacttagtcactagacacaacaccctaagttctgttactgccgactttggattcctgaccrtgcaggaatctgtatttaataaatatacaatcttgttctgtttgcctctccataggtgttatccacgtgaccaaggaagtgaaagaagtggcaacgctgt

SEQ ID NO: 434642 - DNA, 201 bp, Homo sapiens
gggcagtttcttttcctcagctcagtttcctcatttgtaagataaggccacgagaatgaatgatcatggaagtcccttccagatctcacattccttactaygactttcatatcccctggggctgagcacatcgtttaacccatggttggcacttatattcaggtcttctcaggggaccagtggactttctcactcactagg

SEQ ID NO: 434643 - DNA, 201 bp, Homo sapiens
tactatatggcatgtcttaattcttcatgtctttacttgtagttgcgaagtggataatttattttagatggtctagtaattcatgctagtgtatgatttaytctagatctttcagtgttacagcagatttttttttttttttttgagacggagtctcgctctgtcacccaggctggagtgcagtggcgtgatcttggctca

SEQ ID NO: 434644 - DNA, 201 bp, Homo sapiens
gggcccaagggatttggctatggccaaggagcaggggctcttgttcatgcccagtaaggtgtaaacccagaactaagcatcacacattgagaatctcttcrtaatctaggcacagataatctttaacactaaactactgtgaaattctaccagcattgagtactgtatattaccctgtacttggataggctggctaactca

SEQ ID NO: 434645 - DNA, 201 bp, Homo sapiens
catttgtaagataaggccacgagaatgaatgatcatggaagtcccttccagatctcacattccttactatgactttcatatcccctggggctgagcacatygtttaacccatggttggcacttatattcaggtcttctcaggggaccagtggactttctcactcactagggatccctgtctctgtccccaactcctggccc

SEQ ID NO: 434646 - DNA, 201 bp, Homo sapiens
tgttattttttgtgtcattctaatctgtagaggtcaactctggtaatcacttgatgtctccattcaatctggtgttttagagaaaaaagaaaaaccaactmtcctgtctttaagtggtaggtacactatgattaaataggtgtttcagaatgattactgtgacagcaatgtgcaggagttattagagcctaggaaacctga

SEQ ID NO: 434647 - DNA, 201 bp, Homo sapiens
gacccctgcgagggcagcctctctaacggctgctgaggttgaactccctgggaggggcactgcagactggccactgcatcctccaggcctccaggctgcayggagagggtggggaagactcaggtcttcctagtatggattcttcttttcccttcatgttttatttgcaatgacataaaattcaacgttttaaagtataca

SEQ ID NO: 434648 - DNA, 201 bp, Homo sapiens
gaggtcattttggagcaaatattttaccctactggtagtaaactcagagaattctctttccccaagaggtgaaatcatttgaaaatatacaatgaaaacgrtgggtttatatgaatatatacatcttaggcctataatggcttaagatggcttacaaggtgaactgagatgctcaaaatattaatacttgtttaaattgta

SEQ ID NO: 434649 - DNA, 201 bp, Homo sapiens
  misc_feature (1)...(201): n = A,T,C or G
ttgggggcccacagattacttgactgcgatggtggtcatttaaaattttctgtccagagctattttacattgtttcagaaccaagagaaacatggcctacntttcacaatttacacctcaggttttttatatatttgacagttacattacatttccaacagttacaatttccttctggggagctggggaagcattcccaaa

SEQ ID NO: 434650 - DNA, 201 bp, Homo sapiens
ccaaaattagatagtctctctttcagctatgctttcacttttgctaacatcaccacataccaaaatcagtgagaaatattggattctttttggctgggaaygaatagttcggtggggaaagaccctattattgggaggcccagacaagtgagttgctgtctgtctggcccatagcaagaccagagtgctatatatctgaca

SEQ ID NO: 434651 - DNA, 201 bp, Homo sapiens
attcctgaccatgcaggaatctgtatttaataaatatacaatcttgttctgtttgcctctccataggtgttatccacgtgaccaaggaagtgaaagaagtrgcaacgctgtcctgtggtcacaatgtttctgttgaagagctggcacaaactcgcatctactggcaaaaggagaagaaaatggtgctgactatgatgtctg

SEQ ID NO: 434652 - DNA, 201 bp, Homo sapiens
gatataaatactgtttagaaagagaaaaagtaaggatcagatggtacagagtatatgagcagggtctaaacagggggaaaagtcaggaacagtgtgaacaygaggagacacaggtctcaagcctgtggctgccagaggcagctctgcctgtctcctttgtgtggctagcacctagcccagggctgacaccagccctgtcgg

SEQ ID NO: 434653 - DNA, 201 bp, Homo sapiens
gaaggggtgacagtggagcacagtgtttattttcatttctcaattttgacatatttactggaaaaattaatccctagccacctcacatgacagtacataattttttttttttttttttttgagatggagtctcactctgtcgcctaggctggagtgcagtgttgcaatcatcttggctcactgcagcctccacctcctgga

SEQ ID NO: 434654 - DNA, 201 bp, Homo sapiens
cagctctaaaaaataaagtctatatagttttttaaatgctgtttctgcttaggtgggtctgggatggggcctgagattctgcatttctaagaagcacctasgtgatgctgatgctgctccaccatacactttgagtttcagtagtaaaggtgtaaataactttaaaaggaaaaaagtgttactgaagaacagagtggcttg

SEQ ID NO: 434655 - DNA, 201 bp, Homo sapiens
aggtaagcaactttcaggaacttaactgagtcaactgctacagggttaagagaaaggacatggggttctctgagctgctcccttctattatcctataagcyggaaggaaccttcagggtgttttcagaagattttaaagattagaagactgtggtccaaagaggttaaaggacctgcctatcatcacacagcaagttagca

SEQ ID NO: 434656 - DNA, 201 bp, Homo sapiens
ttcatgttttatttgcaatgacataaaattcaacgttttaaagtatacaattcagccaggcacggtggctcactcctgcaatcccagcattttgggaggcygagatgggtggatcacctgaggtcaggagtttgagaccagcctggccaacatggtaaaaccctgtctctactaaaaatgcaaaaattaaccacacaaggt

SEQ ID NO: 434657 - DNA, 201 bp, Homo sapiens
tgttttatttgcaatgacataaaattcaacgttttaaagtatacaattcagccaggcacggtggctcactcctgcaatcccagcattttgggaggccgagrtgggtggatcacctgaggtcaggagtttgagaccagcctggccaacatggtaaaaccctgtctctactaaaaatgcaaaaattaaccacacaaggtggcc

SEQ ID NO: 434658 - DNA, 201 bp, Homo sapiens
gctgttcaaggagagtcagggaaggcctctttgacaaggggccacgagagtagatgtgagcaaagtgggacctgaactgtgtggatctctggggaagacamtggctccctctaatgtcctaggtactgtggaggacttttatgagcagtatctcattttgaatccttgcacccactgggttgggtaggtgttacaatgccc

SEQ ID NO: 434659 - DNA, 201 bp, Homo sapiens
attgagatttccaggtgctgactttccccgccagtcactgaagcagacaaaatcgttagagacatttccgtttcaactgctttttgtccgtgtgtgatggrgtccctaaaacagacaaaactgatataaatttgggcaaatttataatgactgttttctgtctctgtgtggtggaatcccgaaaactgggttcccgtgtga

SEQ ID NO: 434660 - DNA, 201 bp, Homo sapiens
gtttgagaccagcctggccaacatggtaaaaccctgtctctactaaaaatgcaaaaattaaccacacaaggtggcccgtgcctttaatcctagctactcargaggctgaggcaggagaatcttttgaaccctggaggcgggggttgctgtgagccaagatcatgccactgcactccagcatgggcaacagagcgagactct

SEQ ID NO: 434661 - DNA, 201 bp, Homo sapiens
tgctatgtccttgggactttttatttatatcatttaattgaactgaattttccagtgatcccaaggggtaggtgtcatacctatttagagatgaagaaacmgatgaaacagcaagtggctgagctgggactagaatccaagtcaatggagatggatagcccatgttccttctacgtctcattttgctttccttgcaacact

SEQ ID NO: 434662 - DNA, 201 bp, Homo sapiens
tttattaattcaacaaacatgagcatctcctaaaaccaagagacttttcttggtcctggggacatggctcttgcatttgtgaaatttactatcattggaamgaggaaaagtaatccaatagccactcaaatgaatgtgttaaagtgtggccaacaaacaaagccacgtgctttgaaggcagggcacaggcactgcctgagg

SEQ ID NO: 434663 - DNA, 201 bp, Homo sapiens
accttcttaaaaacctctttcagattaagctgaacagttacaagatggctggcatccctctcctttctccccatatgcaatttgcttaatgtaacctcttcttttgccatgtttccattctgccatcttgaattgtcttgtcagccaattcattatctattaaacactaatttgagttcatcttgaatattcctgtggtaa

SEQ ID NO: 434664 - DNA, 201 bp, Homo sapiens
aagttactgtcagtgtttttggtctcaagttggatggtgggttttcaggcgttcgctatagtttagtaaataaatagataacatagaagaaagccacttgygtacttcaagcatcaggaagaaaagaagagaagagaagaaagggaaaggaaagaaagaaaggcaaggtcaagaaaagataggctctggtgtcagacagat

SEQ ID NO: 434665 - DNA, 201 bp, Homo sapiens
gccgtttttccagatgttgctaatgattcctcaaagcagctgaagaataaatactgcagctgctgctcctgatctggagggatggacccgcagcaccatayccaccaacacctttctcctccccaccctcatttccttgtgtacttcttgtgctctctgtgggactgaaactacagctgataaccttcagtgctctcttct

SEQ ID NO: 434666 - DNA, 201 bp, Homo sapiens
gggtgcctggcctagattgagcccttgagaggtccttttttttttttttttttttttttttgagacagagtcttgctctgtcgcccaagctggagtgcagkggcacaatctctggctcacagcaagctccgcctcccggcttcacgccattctcctgcctcagcctcccgagtagctgggactacagctcgtaaaagtcct

SEQ ID NO: 434667 - DNA, 201 bp, Homo sapiens
atgctcacgatgtctcatcatgctaggcgtggtggctcacacttgtaatcccagcattttgggaggctgaggtgggaggatcacctgagatcaggagtttsagaccagcctggcaaacatggtggaaaccctgtctctactaaaaatacaaaaattagctgggcatgatggcgggcgcctgtaatcccagctactcaggag

SEQ ID NO: 434668 - DNA, 201 bp, Homo sapiens
tcgcgccacttcactccagcctgggcaaaagaacaagactccgtctcaaaaaaaaaaagaaaaagaaaaaagaaagaaagatgtgtcgtcttatggagatkcagggaaggggaagattctggataactcttgaaagataacgtcactggaagagctttacccatttggtggggtgttgaactggatgtaggagcagcacac

SEQ ID NO: 434669 - DNA, 201 bp, Homo sapiens
ttgaatgaaaaaagcccatgttctttctataccaacaaccaggagcctctaggcaaggatgttagcagggtgcacttagtcatggttgcctttaaggtagrtagggaagtaggcagtcctgagagctttaaatcctaagtcactcaagtgaaaaggggaggaatcaggatgtgtattaaggtgacagatgaaggttttatt

SEQ ID NO: 434670 - DNA, 201 bp, Homo sapiens
gcctacctcttccacgattttcacctgcattgactcctgaaattctcatcatcatagccattcctgctagtttctccattttcctcctaaaagatccctgytaaaatgaaaatgtgtttcctggggtggggggtggggggtggcaccacaaatatattagcctgtattagttaattacattaggtacgtagtcctctaatg

SEQ ID NO: 434671 - DNA, 201 bp, Homo sapiens
gtgtattaaggtgacagatgaaggttttattcctgtgccacgccactgaagtcacatgaaatggattgtctttagctcacttaatctggataaaatttatkcttagatttttcccacggttaaatgcagttctgtagtttaaatgaatgcgtgtacatgtgcatatctgtgtgtgtgtgtgtgtgtgtgtgttgttgcatc

SEQ ID NO: 434672 - DNA, 201 bp, Homo sapiens
ggtgagactcagtagaagcaaaagctcatgactatagttcaatgcctgccccccactcacacgcacacaatgccccctcaaaaggcaggtcacaggtttgyaaattaggcagcattttcctttctccaagatctcctctccttgaccagatttatgttttctctctccccatctagaccctttccaacgaaagttctatgt

SEQ ID NO: 434673 - DNA, 201 bp, Homo sapiens
cactgtgtcgtatccttttgctttattcactagcattttgggggaacatttcttttatgttttaaataaaacttcagcatgaagaaaaaaagtaaaaacartaagttagtaaatattcatttatttgtaagccatttcagagaaaccagaaaatgagctgctataatttgtgtccctgccgtttttccagatgttgctaat

SEQ ID NO: 434674 - DNA, 201 bp, Homo sapiens
cactgaagtcacatgaaatggattgtctttagctcacttaatctggataaaatttattcttagatttttcccacggttaaatgcagttctgtagtttaaaygaatgcgtgtacatgtgcatatctgtgtgtgtgtgtgtgtgtgtgtgttgttgcatcacgtgattgtggggagaggggctgtaggagaaacacaagggaa

SEQ ID NO: 434675 - DNA, 201 bp, Homo sapiens
aaattatatatgtataatttaatatataaataaatttaagatgttttcctcctttgccaatatagggtttgatgtaatcatttctttgttttctcaggtcycacctccatttgcaattgacctcttctgggaacttcctcagatggacaagattaccccaccttgccctttacgtatctgctcttaggtgcttcttcactt

SEQ ID NO: 434676 - DNA, 201 bp, Homo sapiens
ggcttgtaaaagatttccttagaatcttccttatgtcaacttaactcagtaaatgcagacattcaaagtatctttttcacttttaatatgtgacatctgamtattagttgcccacaagtatgtgcctgattgaagaattatgcaagaaaaatgctagcagctgcatactggagagctgaccaggcaaagaatactccacag

SEQ ID NO: 434677 - DNA, 201 bp, Homo sapiens
agtttaaatgaatgcgtgtacatgtgcatatctgtgtgtgtgtgtgtgtgtgtgtgttgttgcatcacgtgattgtggggagaggggctgtaggagaaacrcaagggaaaaggcagtgagcatcagagactaggtctttacagtgaaattcttccttatttctcaaggcagtagtagctgaaaattacctaatcaagtgac

SEQ ID NO: 434678 - DNA, 201 bp, Homo sapiens
tggtcatcttgtctagctcaagcagttccacctctatagcacatctcataccaccagcataggttgattttcatgtaccacatcttccttctatcctttamtggactgtatgtaggtttattgagaaaagcaaccatgcctgagagccccacacatagaagagtggcttgatcaagcatttggtcgtttggtaatagctgg

SEQ ID NO: 434679 - DNA, 201 bp, Homo sapiens
ttatattccctacctatttaaagtatggccctcttttttcttcttagttgacctcatctccctcccttattcttcgtcatgactgcagaatcataggcccktggaatctcaggctgacctgccctgtcctagacttcctgaacctctcaatctctcagttgtctcagctgcaaaatggggaaaataatacatatcttgtgg

SEQ ID NO: 434680 - DNA, 201 bp, Homo sapiens
acttgaacccggaggttgcagtaagccaagatggtgccactgcactccagcctgggcaacagagtgagactatttagtttcctgtgtgtcaggctctgtgytaagtgatttctatgaacgatgtcatttaattcttacaaccctgggtattagtgtccctatcttatagatgagcaaactaagactaaaggtgggtaagtt

SEQ ID NO: 434681 - DNA, 201 bp, Homo sapiens
gcaaaatggggaaaataatacatatcttgtggggttgttgggggattaaatgacatagcacctgtcccctccatagagccaccacagaggaagcaaaaaarggaaatagtatgaagagtaattcaatataggctatctagacagaggtgggcaacagcaccttgccctcctccaccaccactgtacccagaaccttagtca

SEQ ID NO: 434682 - DNA, 201 bp, Homo sapiens
tccctttcgtgtgccactgaagattctggtgtcaccatgggccgctgccccacccagtgttaccattattgtaagaacaacacaaagcctctcttctggcsaggtgttgctgatgccgagattcccatctttgacctggggtggaagaaggtaaaagtggatgagtttccactctgtggccacatggtgtcagatgaatat

SEQ ID NO: 434683 - DNA, 201 bp, Homo sapiens
gaaaagccccagggcactgtggccagggttcacattggtcacgtcatcgtgtccatcggcaccaagctgcagaacaaggagcatgtgattgaggccctgcrcagggccaaggccaagttccctggccaccagaagatccacatctcaaagaagtggggcattaccaagttcaatgtgaagacatggtggctgagaaacggc

SEQ ID NO: 434684 - DNA, 201 bp, Homo sapiens
cctcatgggtctcccagctcccagtctccatgccacctccacgctgagaccagaccagttttccccacacacaaatccaagcctgtcactcccctgcttgraatccttccctgtctccctgtggccttggggtagggcctctctgctctgccacctctccagactttttgtatgccaccgcccactcacacccacctctca

SEQ ID NO: 434685 - DNA, 201 bp, Homo sapiens
tggcatctcttatcatgggacattggtggggacccagccgtgcccttggtgccaagaagcctaaagggctcctgtcgcctggaaacttgagagtgcagggycgggtgctgtgccccacaaggtgctgagcaagcccaagaagaagagtgtggggtgtggtgtgtgagttcagacctcttggagctgtgggggcatggttcc

SEQ ID NO: 434686 - DNA, 201 bp, Homo sapiens; identical to SEQ ID NO: 358197

SEQ ID NO: 434687 - DNA, 201 bp, Homo sapiens
tacttgggaggctgaggcaggagaattgcttaaacccaggaggcggaggttgcagtgagcccagatggcaccactgcactccagcctgggtgacagagcgmgactcagtgccccccaaaaaaagatttttattgctgcattctctgaaatagcaaggaattaaaaactgcctgtagatacagcaattaaagtgaactccat

SEQ ID NO: 434688 - DNA, 201 bp, Homo sapiens
tgtgagccacacagagctctctttgtgcatatgcatcccaagcttcaggaaggcaacagctactagagggcctgaggacagattcttggtcgcagaagcgrcattggctttagttcagccctcaccatgtttaccgacgtcacttctgtgttcccctcatgggtctcccagctcccagtctccatgccacctccacgctga

SEQ ID NO: 434689 - DNA, 201 bp, Homo sapiens
gcgcggtggctcacacctgtaatcccagcactttgggaggccgaggcaggtggatcacgaggtcaggagattgagaccatcctggctaacacggtgaaacyccgtctgtactaaaaatacaaaaaattagccaggcgtggcatgcgcctatagtcccagctactcgggaggctgaggcaggagaatggtgtgaacccggga

SEQ ID NO: 434690 - DNA, 201 bp, Homo sapiens
agcaagcccaagaagaagagtgtggggtgtggtgtgtgagttcagacctcttggagctgtgggggcatggttcccatcagctgctgttcctctgatgatgyccactgcgtgttgtgggaggcgtggccaccgtgtgatgttgtagtaggagaagggagacttaggagctagacatgatacgcaggcatcaagaggtcaacc

SEQ ID NO: 434691 - DNA, 201 bp, Homo sapiens
gtccggggcagttctcgtatctctgtccttgtctcattttagatgtttagatatttagatattatacaaggccacccagtggtaaccaacctagaatgtgytggcctcctcttcccctcactccgtgtaggttctgtgcagcctggctgctggtggcatctcttatcatgggacattggtggggacccagccgtgcccttg

SEQ ID NO: 434692 - DNA, 201 bp, Homo sapiens
gctgagcactagtcgcctgctgggccagcttctagtctgtcggtcagaccaagggcactcagactggaaaggttgttgctgggcttgggtgtccgtccttycctgtctccttttcttcctcttttcacttaaatccactgagtctctcgccaagtcagtgatttaggtaatcccgccgcccctggcggaacctttgtgacg

SEQ ID NO: 434693 - DNA, 201 bp, Homo sapiens
tatttttcatcgtatcaggtattgttgatattagagaaaaaagtaggataacttgcaacatttagctctggaagtacctaccacattttagagatttaccrtttccatatatttaacattcctggttacataatggacatttgtcttttaatgttttttcaatgttttaaaataaaacattttgtcttctagctattgtgg

SEQ ID NO: 434694 - DNA, 201 bp, Homo sapiens
actttaagttgtgttgatataaatttacccaaagatgatgactttgattggataattagtaaggtctttttgttatttttcatcgtatcaggtattgttgmtattagagaaaaaagtaggataacttgcaacatttagctctggaagtacctaccacattttagagatttaccgtttccatatatttaacattcctggtta

SEQ ID NO: 434695 - DNA, 201 bp, Homo sapiens
acggtactaatattccctttacgtggattattttgtctaatcctctctgaggtactattgttagcccaattttgcagatgagcgaactgaggcttagagargttgagtgacttccggaagattatccgaaagagtggcagagccgtacgttctgttttcgagccctcgtgcttttaaccaatacactgccacccgtacaca

SEQ ID NO: 434696 - DNA, 201 bp, Homo sapiens
acagctgagttttgactgcttggaaatgtcatcctttcagcaagacttctctttacctcaaataaatgtgctttttgtggaaaaaaaaaaactcactgaaraaaaattacgaagatctataaatatgtagcaaagtagaatagcctttgtactaatttcaaatcatgtctctatcacttaccaactgggcaactttgagta

SEQ ID NO: 434697 - DNA, 201 bp, Homo sapiens
attcagccttctaagtcagtgatcagccactcatccatctgctttccagtttccgttaccattgtaaaccaaaaagtatctgacacaagcctccaccaatrtagaggtttattttgccaaggttgaagacatgcctgggaaaaggagacataagccaccgtaggatctgtagcctgtgctttttctgaagaggatttcaag

SEQ ID NO: 434698 - DNA, 201 bp, Homo sapiens; identical to SEQ ID NO: 385605

SEQ ID NO: 434699 - DNA, 201 bp, Homo sapiens; identical to SEQ ID NO: 385614

SEQ ID NO: 434700 - DNA, 201 bp, Homo sapiens; identical to SEQ ID NO: 385616

SEQ ID NO: 434701 - DNA, 201 bp, Homo sapiens; identical to SEQ ID NO: 385606

SEQ ID NO: 434702 - DNA, 201 bp, Homo sapiens; identical to SEQ ID NO: 385617

SEQ ID NO: 434703 - DNA, 201 bp, Homo sapiens; identical to SEQ ID NO: 385618

SEQ ID NO: 434704 - DNA, 201 bp, Homo sapiens; identical to SEQ ID NO: 385607

SEQ ID NO: 434705 - DNA, 201 bp, Homo sapiens; identical to SEQ ID NO: 84777

SEQ ID NO: 434706 - DNA, 201 bp, Homo sapiens; identical to SEQ ID NO: 385610

SEQ ID NO: 434707 - DNA, 201 bp, Homo sapiens; identical to SEQ ID NO: 385609

SEQ ID NO: 434708 - DNA, 201 bp, Homo sapiens; identical to SEQ ID NO: 385612

SEQ ID NO: 434709 - DNA, 201 bp, Homo sapiens; identical to SEQ ID NO: 385602

SEQ ID NO: 434710 - DNA, 201 bp, Homo sapiens; identical to SEQ ID NO: 385603

SEQ ID NO: 434711 - DNA, 201 bp, Homo sapiens
ggcatgagggataggattaaacttcatggagttcctcccagtgattcaaacaaaacaacaacaacaacaacaacaacaaaacatgtaggaatcaagacaaygcagaaagtttaggaatttccttccctgaaaagaaacttgaagaaaagactcaaaagaaaatggcaaaaggggccatttctgcatgcacatttcattttc

SEQ ID NO: 434712 - DNA, 201 bp, Homo sapiens
cccatctgtggcttctgcaaaacacctacaatacgctggatcctgtccattgccacactctgctgaaaactgcttaatcctggggacagggacagagagakattaaggattgagattcaagcatgtagtcaggtaaaggaagaacagaagggggttaaaattgattgatctaaaaaaattaagtcgggccaggcaaggtgg

SEQ ID NO: 434713 - DNA, 201 bp, Homo sapiens; identical to SEQ ID NO: 385620

SEQ ID NO: 434714 - DNA, 201 bp, Homo sapiens; identical to SEQ ID NO: 385621

SEQ ID NO: 434715 - DNA, 201 bp, Homo sapiens
cacatactatattagacactggatatccagagatgaagaaaaaacaaacagttccataggttctcactatttataaaataatcccttttagaatttctttraagtctatttttaattggaatcatcatttcccaaattctgtatttaaattcgaatattctatcttgagttctttaagaagtgtaaattaatattcaggca

SEQ ID NO: 434716 - DNA, 201 bp, Homo sapiens
attcccgcatgaatcatttggccaggtaaaaagccttttgtatctacgcagaaagcagataagctgtggcatgagggataggattaaacttcatggagttyctcccagtgattcaaacaaaacaacaacaacaacaacaacaacaaaacatgtaggaatcaagacaatgcagaaagtttaggaatttccttccctgaaaag

SEQ ID NO: 434717 - DNA, 201 bp, Homo sapiens
gtataaaaaaatttctttaatcagaaaggatttatcttccctcaacacaaatgcacacattaatagtaaaaatacatatatacataaatatttacacaaaktagaagtcacagtggacagctgtatgccctgggctagaggttgagaagatgagcatcagcagcaactggaggatggcttctctgctgctcccggtgtcct

SEQ ID NO: 434718 - DNA, 201 bp, Homo sapiens
gaggtggaagttgcagtgagccgagatcgcgccattgcactccagcctgggcaacaagagcaaaactccgtctcaaaataataataataataataataataataaagtcatagtagcaaaaaaggagtaatataggccccaaacaagaacttcagagaaatacacgtcaaaagagggaaagagaaagagaaatgaacctag

SEQ ID NO: 434719 - DNA, 201 bp, Homo sapiens
atgaaaactgtcccacattaccaaggattcacttccagatccttcagactcttgagcttgtgttccctctgttagaatacgtcatgccaaacaactgtccrttccaagtgtacatttgtatatgaataagttacttaaacacccccaaataacattttacctgttcctacaggattaggagtatatggaggtggaggtgga

SEQ ID NO: 434720 - DNA, 201 bp, Homo sapiens
ttagtcctagtaggtcctttaacttgaatctggagggcataaactcaaatcataaatctagtcccttaaaaatgttaagagtcaacatgaattactccagmagcccctaaatgatacatcatttgagagctcagagtgtgcagctcagattagctcccaccaccacctaagaacttcaaacaaatgagggaagcattatga

SEQ ID NO: 434721 - DNA, 201 bp, Homo sapiens
agaaaagtgagggaacagcagtggacaggttgagggggaaaggtgctgctgagactggtgctgaagcagaaagccctgagagaacagctgccgttgagctrggatgagggagagatgtggaggtggcagcggtagatgaggtggctattaatgaccctgggagagatactgacggattaagagatgggttgccagttaaag

SEQ ID NO: 434722 - DNA, 201 bp, Homo sapiens
gctgtcttataaataaaactatcaaatacaaatccaaacattgtatcaacaggcattaatattttatacatttatcttaacatggttcataaaacatttcwgagtgctaaagttttcacccagaaaaacatcatttagattttgacattcattttgatgacttgaaatgaaatgtgaactacaagttaggtgaagaataat

SEQ ID NO: 434723 - DNA, 201 bp, Homo sapiens
cagccgcattatgctgtaattcttgcaaggatgattgtgaaggattctgaggaaacccagggatacccgggagggacaaaaggcctggaaaaacagaactscctgcagcttgaagtccagatgataaactaaaacaattgacagaaaaacaagttaactgcagacaagacataaaagctactgtttccatatttgtcaaat

SEQ ID NO: 434724 - DNA, 201 bp, Homo sapiens
cccacgacaccgtgctgagtctcaaatttggcgttaacgtaacttaatttctatttgtactggaaacgtatcaagatataaactcctccattacacgtgaraattcaaaccaatttggcaatcctaggacccttattctgcacaatctccatacagtacctcaaagagagtctaaaacacgagaattcatctcataaaata

SEQ ID NO: 434725 - DNA, 201 bp, Homo sapiens
aattatattctttaaccagaaacttttcctaaaacataaccattccaaatatactcaaattattctcagtgaataacagagcaaaccatgacagatatccrttatctctggatcaaatttgctacttactttgattctgtataggttttgacggattcgaaaggtcttcattctctatataaaaataaataaaagttcatt

SEQ ID NO: 434726 - DNA, 201 bp, Homo sapiens
ttaactaataaactggctttaatattgacctcttatgaatccgatttaaaataaactggataacaaagcaaatttgaaaagttaagttcctaagtacatamagtttaaagcaaaaacttgaagccatggcaaaggtaccaagggaccaagacacaaacatttccatgaggctcaagctgagtggccaactgacttctcact

SEQ ID NO: 434727 - DNA, 201 bp, Homo sapiens
tttgattctgtataggttttgacggattcgaaaggtcttcattctctatataaaaataaataaaagttcattttaaactttaatcaaatatttgccaccayaataaacagatatttggataaaaagaaaaacacaggatataaatatttatggactatgttaggaaaaaaatgtacacatatgggaaaataaataaaaata

SEQ ID NO: 434728 - DNA, 201 bp, Homo sapiens
cgagcttgactgaggtgacaaaaaataaccaccagaacaatggagatttaattaaagaaaaaggacttttaaaacccgacacacacacacacacacacacacacacacacacacacacacactactgggaaataagcagagaagacttttacatataaaaatctgattccaaattaataaatggaaagaataataaagatt

SEQ ID NO: 434729 - DNA, 201 bp, Homo sapiens
accaccagtaggtcattaaaaaaaataaaaataccaggcaccccctatcacaatacactgaatagaatctctacaagtggggaactaaaggtatttttttwaaagtgctccaggtagtttcaggctacagagaaaccacctcactgttgctttgtcattcctcatatttgattatcagtctgttttcacctgtttcttcct

SEQ ID NO: 434730 - DNA, 201 bp, Homo sapiens
aaatgatactgcaatgttatcactacagaagttagttatacatgttaccatgtaatttatgccagccattgctgcttacctgctgtaacaatgctgactgygcagccgcattatgctgtaattcttgcaaggatgattgtgaaggattctgaggaaacccagggatacccgggagggacaaaaggcctggaaaaacagaac

SEQ ID NO: 434731 - DNA, 201 bp, Homo sapiens
tctaaacatactggtttggatggcccaagaattcgtgcagctattcctttgccttcgttagtacattcttcaccatcttttttcaaaggagttccctattaaaaaaaaaaaaaaaggtaattgaaacttaaaaaaaaaaccctcaaaccagtaacaataaccaacctcactgtattacactgaagaaaaggacttggtaag

SEQ ID NO: 434732 - DNA, 201 bp, Homo sapiens
gtcccccactgatcctcatctcctacctgcccttgcaccattccctcccagaatgaatggggctgacctgtgtaacacatgggacattgcagaaaggatgrcatctgacttccaggcagcttccacttgtcttctcttgcttggattacttgctctggtagaagccagctgccatgtcatgaggacattcaagcagcatta

SEQ ID NO: 434733 - DNA, 201 bp, Homo sapiens
ttggtgctcaatacatattaataaatgaaaaaacactgtattaggcaacatatattccaatgtatctatattatgttatagaaatatccagctatacatakgtgtgtgtatatatatattcacaagtatgtacaatgtattttattatatattggttttataaatcccttcacaacacatatatgtatattagctatataa

SEQ ID NO: 434734 - DNA, 201 bp, Homo sapiens
ctttgcaacacaaaaataaaatttatgctttgagtaaaaaggaaactttatgtaggaaggagtttgggcttgtttcatcattttctaaacatactggtttrgatggcccaagaattcgtgcagctattcctttgccttcgttagtacattcttcaccatcttttttcaaaggagttccctattaaaaaaaaaaaaaaaggt

SEQ ID NO: 434735 - DNA, 201 bp, Homo sapiens
atttaaatgtacagtttagaaaattttaattttttaacatagctattttgaatcaaagtacaataacacatagagttcgcttttctaatgcaaataaattrcaactgaaataaattacacacaactgggagaattaaaaatacttaaattctacgttctgaaggaaaaaataagttacttacatgctgtaatgctttcatt

SEQ ID NO: 434736 - DNA, 201 bp, Homo sapiens
agactttctgatatttaaagttcattaccctattaagtgggtatgagccttatttttacaattgaggcaaataaggctcagaaaaaataagcaccttgccaaaaaaaaaaaaaattattgtgtcagtaagtgaaagaatctctaattcttaaattcctgtcttttcagagtaggaaggcaaagcaaataactgaaatacaa

SEQ ID NO: 434737 - DNA, 201 bp, Homo sapiens
gactttctgatatttaaagttcattaccctattaagtgggtatgagccttatttttacaattgaggcaaataaggctcagaaaaaataagcaccttgccaaaaaaaaaaaaaattattgtgtcagtaagtgaaagaatctctaattcttaaattcctgtcttttcagagtaggaaggcaaagcaaataactgaaatacaaa

SEQ ID NO: 434738 - DNA, 201 bp, Homo sapiens
aatcagaatgtaccactatgcttttgactgtattttgttagacacattaacacacactaattagacacttaaaacgcttctacattttttcccaagtaaaraaaaaaaaaaaaaaaaaagaaatacttacgaggctaacagttcaagagcaactagtttgtctttactgaaagtgaaacagttgagtatattgaccacttc

SEQ ID NO: 434739 - DNA, 201 bp, Homo sapiens
atcagaatgtaccactatgcttttgactgtattttgttagacacattaacacacactaattagacacttaaaacgcttctacattttttcccaagtaaaawaaaaaaaaaaaaaaaaagaaatacttacgaggctaacagttcaagagcaactagtttgtctttactgaaagtgaaacagttgagtatattgaccacttct

SEQ ID NO: 434740 - DNA, 201 bp, Homo sapiens
attgttcaaaggttagaaaaacattactatactcctcagttagagggctaagtatgccacagatcagtgcttccatgatgttaaacatattacaaaaaaaggttacactagccatataaggtagggaaaagctgggttaaacaggtttctctactgcagaactttaagtcttattttaatttaatgtgcattgtgatgcac

SEQ ID NO: 434741 - DNA, 201 bp, Homo sapiens
aaaaaaaaagaaatacttacgaggctaacagttcaagagcaactagtttgtctttactgaaagtgaaacagttgagtatattgaccacttctgttggctgracagccaccattttctgttgatataaaaaataattttatttttaacgtgaaattttcatgccagaaattacctttttctggaagtacagttaaatgctct

SEQ ID NO: 434742 - DNA, 201 bp, Homo sapiens
caactagtttgtctttactgaaagtgaaacagttgagtatattgaccacttctgttggctggacagccaccattttctgttgatataaaaaataattttayttttaacgtgaaattttcatgccagaaattacctttttctggaagtacagttaaatgctcttaatataaacattttagataaaatatatcacattttagg

SEQ ID NO: 434743 - DNA, 201 bp, Homo sapiens
tacaacgtcgcagcactgctgccatctggaggcactatgtaggacacacttcattttcatttttcaattccattttctgctttggtgccccttgttctttyctacattaagatatgcttaataatacttattgaaataatgaactctaaaaatagaatctgactagcatttgtcaaaaaggatttttatcatcccatgtgt

SEQ ID NO: 434744 - DNA, 201 bp, Homo sapiens
gaattacagaagacaagttaacatttaactgtcatgaatagattcttaaattttatcaagtgaaatctataagcaggaaggaaaaacaattcatacagatractatatcctaccacctctgttactctcctgaaagaagacaagcaaaatttgcaaatttggagagaagtaatcatcatcaaatctctatgcattctgcta

SEQ ID NO: 434745 - DNA, 201 bp, Homo sapiens; identical to SEQ ID NO: 117834

SEQ ID NO: 434746 - DNA, 201 bp, Homo sapiens
tgcaagcatagtttgaatactgcccccagcccccaacttaccacctagggagtcttgagctgatagttaacctcacagagaataggccaccagctataagyaagaagtacagtgcctacacctcatgcgttgtaaggagaatcaaaacaaataatgactggagaaagtgcttaaaaacaggctcacaaagtaagtgctcac

SEQ ID NO: 434747 - DNA, 201 bp, Homo sapiens
cgactcctggatacctcggccccggcagcaggcggcccggcaggctctttgttaccagctgctgcagcttccgggagcgggccggcggctggggagcaccrggagccgggcgaagaggggcacggcctcgcatagggggactccggaaaaacgcagccccaacagcgccagacgccctgcctggttacccctacagccccc

SEQ ID NO: 434748 - DNA, 201 bp, Homo sapiens
cacagctaactggcactgacgtggaagctgatgcagcagtggctaaaggagactgtacaggcaatgtcaggggagtggaagttgagttagccacgggagayggcaggcctgggaacagggccaaccctggagtggaagtcctctgtggggtagggatggctgatggggcatagcacttgttaggggctgaagcagaagagt

SEQ ID NO: 434749 - DNA, 201 bp, Homo sapiens
tttgatgacttgaaatgaaatgtgaactacaagttaggtgaagaataattttatcctatttccaaactatccacatacccggcttgtgcaacaagagcggwgttgaaattggaactgaatgctgaggcgaatcctgggaggactggagctggggatggggctgtggcagccacaggtagtggtgtgacagctgcgactgta

SEQ ID NO: 434750 - DNA, 201 bp, Homo sapiens
ctgttctgtgactggtattgttctgtgactaggagttcaaactatattaatgcagctattcaatttattataaaaactcctatttaatacagttgattttwtatggaggtttatgtctagagttaagtgaaaactgacaccaaatgaaacaaccagagattcctatttcccactgcatgctcattgcagggataagttcag

SEQ ID NO: 434751 - DNA, 201 bp, Homo sapiens
aggtgctgctgagactggtgctgaagcagaaagccctgagagaacagctgccgttgagctaggatgagggagagatgtggaggtggcagcggtagatgagrtggctattaatgaccctgggagagatactgacggattaagagatgggttgccagttaaaggaaaattgttggtcaaagaagtaaaagaaggaagagcagt

SEQ ID NO: 434752 - DNA, 201 bp, Homo sapiens
attcagctaaactacaaacttagttaaaacaagctctccacactccgtatctccaactgagcagctgaatgcatctcgagaaaaaaactgaaagcaatttsactgattctactttaaaataaaaagctcaatctcaaaggggctcttactactgttaaatatttatgtttccctcatccattcactctctcactctcctac

SEQ ID NO: 434753 - DNA, 201 bp, Homo sapiens
ctaaacaagaactgatgtagttttgtctcatacaagaaagcctctccttcctgaccacacagatcatcacctaggggaaaaatacaacgtcgcagcactgytgccatctggaggcactatgtaggacacacttcattttcatttttcaattccattttctgctttggtgccccttgttctttcctacattaagatatgctt

SEQ ID NO: 434754 - DNA, 201 bp, Homo sapiens
gtgatttggtttcaataagactagctatcattttaaacttacagtacctataaaaatggatttgtacgttttttgtacttaatttcttttataagaactaraaggataaggaatatatacctaatcttatgtttgtaaataatgtaccaaaaaggtatttaagtccataggtgttgggtatcatttgagaaatcactatct

SEQ ID NO: 434755 - DNA, 201 bp, Homo sapiens
ctgaatgtattcaatggctatccccacctgtgataatcttggtgtcaagggatatcatgacttaggtagctaatgtcataaacacaactatcatctgatastgtactcacatcaaattctgtttcagttgtagagaatgttcctgttgcagtgataaccaactgagaaatattttcatggactaacacattttacaattta

SEQ ID NO: 434756 - DNA, 201 bp, Homo sapiens
cacctgaaaacaaagaactaacagctctaatgacagcatgtttgcaaacatttctataagatttcagtacttgaaattataattcgacacgtgcagcccasgcccaggtgatacaggtggcattaaagtttaaaaactgtgctaacagaatagctattatatagttatatacatttaaataacttaaagtcaaataaaatg

SEQ ID NO: 434757 - DNA, 201 bp, Homo sapiens
gaagtttaaatactcacaaaaggtcgattttcttaaatacatttatatatctgaaagaactttgaaactactaatttagctcatttatggaaatatttatyacgtaactcaactggcgaaatcagtcttcagtgagaaaacaatcaaatcagactgacatttttagaaaaggtcagacttaatttaattcaaataagtgta

SEQ ID NO: 434758 - DNA, 201 bp, Homo sapiens
caacctcactgtattacactgaagaaaaggacttggtaagagtgtaaagacttgcattcccatttcagttctgcactggctggcggcatgaccctgataargtcctcaatcctcctatgctatggaactctcatatcacatgcaaaggtactcagaagtgaacatgaaaaacacagagaggatgacaggaaaatataaggt

SEQ ID NO: 434759 - DNA, 201 bp, Homo sapiens
acgatggatattaaaaaacagaagtgcaaaaaaccattaagaattcaaatcctatattttgcttgctggtgaagttttcttctaacttgccaatcgggacmctgtagcatacaatttaaatgtacagtttagaaaattttaattttttaacatagctattttgaatcaaagtacaataacacatagagttcgcttttctaa

SEQ ID NO: 434760 - DNA, 201 bp, Homo sapiens
ggtgagaggcccttccttccatctttccaggttccatactgtgagggacacactgagcaagcaggaagatctgctgggcttccctaccaacttctacaaaraaagggaataaaattgtaatagatatgattcaacatcagtatacacaacatttagaattcctaaatatgtaattaaagagtttcaaaacattccaaatcc

SEQ ID NO: 434761 - DNA, 201 bp, Homo sapiens
acaagctctccacactccgtatctccaactgagcagctgaatgcatctcgagaaaaaaactgaaagcaatttgactgattctactttaaaataaaaagctyaatctcaaaggggctcttactactgttaaatatttatgtttccctcatccattcactctctcactctcctacaatttctagaatacttcaaactttgcaa

SEQ ID NO: 434762 - DNA, 201 bp, Homo sapiens
ttttcagatgaatgtaacctcatgaaaagacctgaaccagaactatccagctaagcgttccaatattcctgacccataaaaaccatgtgaggtaataaacrtttattgctttaatccagtaagctgtggggttgttatgcagctacagaaatataacattctttgagaaagctgttttacaaagaggtttgaggaacatta

SEQ ID NO: 434763 - DNA, 201 bp, Homo sapiens
tgctcattgcagggataagttcagtgaatggcatggcaggcagaacctgctatacttacattatttgtcttttctgccaaacgcatatacttgactttttraagttaaatgcatgaatgatgcctctgaactaccaactaccaaaaaaaggaattcaagatgatttaccaaagtgaaaacccataaataatgaatgactaa

SEQ ID NO: 434764 - DNA, 201 bp, Homo sapiens
gcaggcctgggaacagggccaaccctggagtggaagtcctctgtggggtagggatggctgatggggcatagcacttgttaggggctgaagcagaagagtcmgagttctgaagagtaagagaagatagtgaagccagcccacttgtgacagcagaggataaagcagaggagttgattaaattggtgtcattggatgtcagaa

SEQ ID NO: 434765 - DNA, 201 bp, Homo sapiens
ctggagtggaagtcctctgtggggtagggatggctgatggggcatagcacttgttaggggctgaagcagaagagtcagagttctgaagagtaagagaagayagtgaagccagcccacttgtgacagcagaggataaagcagaggagttgattaaattggtgtcattggatgtcagaaaaccttttaacgcagacaaaagag

SEQ ID NO: 434766 - DNA, 201 bp, Homo sapiens
tacctgttcaagtattctcttgcaccgtttcttctcagacatatttaccctgaataaatcttcaataggacgagaattctgtgcatcaataatgttcctaycaagaaaacacaatttagctttttgtttaaaaatctgaacatacatcgaggtaagcaacctttgtttaccacacaaacatctgagtaagcgttctccatg

SEQ ID NO: 434767 - DNA, 201 bp, Homo sapiens
aggaagagttgttgcagcaggggtagatgaaatatgcagatctgaggtacctgggtgggggccacgcaaaagggaggctgaggagccacagctaactggcrctgacgtggaagctgatgcagcagtggctaaaggagactgtacaggcaatgtcaggggagtggaagttgagttagccacgggagacggcaggcctgggaa

SEQ ID NO: 434768 - DNA, 201 bp, Homo sapiens
acaaacatctgagtaagcgttctccatgacatagggagaaaagtgtgactatttacttttaacagctcaatttaaataacatgtttatatataaatataayaacttaggtttatctgattactgaaaagtaaaacagtaatactgcaaataaaaatcattattttgagatttttcaaaatatactttcttcagtgatagtt

SEQ ID NO: 434769 - DNA, 201 bp, Homo sapiens
acccttacctggcaactcctttaggggcaaaagctgtgtctaattcatctttatagtcttagtacctagcacagaacacagcacctgcatagttaatgagygtctgctgggctggatatatcataattacctcaaactacagttcccaaacccactcaaggactattcccaacactatttctagagtttgctatttttatt

SEQ ID NO: 434770 - DNA, 201 bp, Homo sapiens
aatcctgggaggactggagctggggatggggctgtggcagccacaggtagtggtgtgacagctgcgactgtagagggcgcctgcagccccgggaatgaggkaagagcaggggtaacgcttggggtattagagacagaaaagcctggataggagggatttgaagatgacagaggtccttgagtaacagagaaaagtgaggga

SEQ ID NO: 434771 - DNA, 201 bp, Homo sapiens
gtgagttgaatttaatattccagattgttcatctgtacagttgccccgccccacccccatacatttgctcatactgaccgctctacactacattaaccccyaacccttacctggcaactcctttaggggcaaaagctgtgtctaattcatctttatagtcttagtacctagcacagaacacagcacctgcatagttaatga

SEQ ID NO: 434772 - DNA, 201 bp, Homo sapiens
ccttacttggtgcaatagttgcatgtggtcggcatggaggtatcggataaggaacaggtttatgtggattatatgttgaaggaggctaaaacatgggggaraatacagcagttagaagaaaatcaagtaagctgtctcctggcaacttgtctttcaaaatatttagtcctaatatgctaaaaatgtccccgcatatcatac

SEQ ID NO: 434773 - DNA, 201 bp, Homo sapiens
cgaatcctgggaggactggagctggggatggggctgtggcagccacaggtagtggtgtgacagctgcgactgtagagggcgcctgcagccccgggaatgarggaagagcaggggtaacgcttggggtattagagacagaaaagcctggataggagggatttgaagatgacagaggtccttgagtaacagagaaaagtgagg

SEQ ID NO: 434774 - DNA, 201 bp, Homo sapiens
ggccatacaaggctttccaggattcatgcccagctctccagtattgtttgttgccactctgtgagttgaatttaatattccagattgttcatctgtacagytgccccgccccacccccatacatttgctcatactgaccgctctacactacattaacccctaacccttacctggcaactcctttaggggcaaaagctgtgt

SEQ ID NO: 434775 - DNA, 201 bp, Homo sapiens
ggaaatcagaatgtaccactatgcttttgactgtattttgttagacacattaacacacactaattagacacttaaaacgcttctacattttttcccaagtraaaaaaaaaaaaaaaaaaaaagaaatacttacgaggctaacagttcaagagcaactagtttgtctttactgaaagtgaaacagttgagtatattgaccac

SEQ ID NO: 434776 - DNA, 201 bp, Homo sapiens
ttggaaatcagaatgtaccactatgcttttgactgtattttgttagacacattaacacacactaattagacacttaaaacgcttctacattttttcccaagtaaaaaaaaaaaaaaaaaaaaaagaaatacttacgaggctaacagttcaagagcaactagtttgtctttactgaaagtgaaacagttgagtatattgacc

SEQ ID NO: 434777 - DNA, 201 bp, Homo sapiens
ttcttgggctccaatcaaattttcagatgaatgtaacctcatgaaaagacctgaaccagaactatccagctaagcgttccaatattcctgacccataaaarccatgtgaggtaataaacatttattgctttaatccagtaagctgtggggttgttatgcagctacagaaatataacattctttgagaaagctgttttacaa

SEQ ID NO: 434778 - DNA, 201 bp, Homo sapiens
aaatcaagtaagctgtctcctggcaacttgtctttcaaaatatttagtcctaatatgctaaaaatgtccccgcatatcatactactggactacatgggacracaaatgagggaaatttctttgctttaataaatgtggttgctattaaattccaaatgcagatcttgccaaagatggccatagaggtggccagagattttt

SEQ ID NO: 434779 - DNA, 201 bp, Homo sapiens
agggtagtaactcccccagggccacatgcaacccccaagtctgaggcacaactattacttctgccagtggatgctatacaagcatatttaaggctgtattyggctataaagagttcaacctactctttaatattctttctatgtagatcacatacacaattcaaaattttataggacaggtgaaaagtctccaaacacttt

SEQ ID NO: 434780 - DNA, 201 bp, Homo sapiens
taaaacacagaatatttgtcatatccatagtttattttaaaaaactgttaaaaactaaccatacaggtttattaatatacttaaaaagtttgttccctatsttgaagtaaaatacattagcaacatcttccggacaccatctttataaaagtaaaacttctagatcctgaaatgtactacagtagagtctatagtttacac

SEQ ID NO: 434781 - DNA, 201 bp, Homo sapiens
gttacaactaaatttggataaaaatgttcaataattaactctagcacgtatacaaaattagaaagcctatccaagcacttagtaaaacacagaatatttgkcatatccatagtttattttaaaaaactgttaaaaactaaccatacaggtttattaatatacttaaaaagtttgttccctatgttgaagtaaaatacatta

SEQ ID NO: 434782 - DNA, 201 bp, Homo sapiens
gagtaagagaagatagtgaagccagcccacttgtgacagcagaggataaagcagaggagttgattaaattggtgtcattggatgtcagaaaaccttttaaygcagacaaaagaggactgttcacaccaagtggaccggcaacgctgggagtagagccaccagcaattacaggagtcgggttggataggccttgggatgttg

SEQ ID NO: 434783 - DNA, 201 bp, Homo sapiens
cctgtccttctcccaagactaccctcggccagcatgaccctgccctgcccatcctgtgtggggctgagcggagaagaccggccacttccacagcccctcaygccatggccctcccgtgcctcacacagaggcaccccccatggtgggtgactggtggctggggccctcagcatggtggcagtgaccatcacgtcacactgc

SEQ ID NO: 434784 - DNA, 201 bp, Homo sapiens
ctcagaaccagccacggttcttccccagggccctgctcttttccacacaggacgtacacatgtgccacctgcctctgcctgtctgtggctggcttctcacsagcctctcctacaaatctgttttattcatctctgcagtcagaactaaaacggcaactggccacggtaggcgttcaaggagaatgaaacaaagaatatgcc

SEQ ID NO: 434785 - DNA, 201 bp, Homo sapiens
acacaagtagttcaggtcaggagctgatattattattataattattaaccaccagggctgggtggtggcgccaaggtcgtctggctatttatcttacttckgtttctttccaactgtttgctttctccctttcctcctgccttataaactaggcaaggtggggagaggaggccagcaggaaaagtggtggtctgcttcctt

SEQ ID NO: 434786 - DNA, 201 bp, Homo sapiens
acagcaacgcgtcaggggccgcttgctttcttaggagcaacaggtccagaggcttccgctccaagagggactggggcctgggccaggaccttgccgaaaakcaaacgaagcccagacaacctgctggggctccaacccttcctcccaccaccaccgccccgcagaatttgggccgctgagaccgctgcaggcgtgccgacc

SEQ ID NO: 434787 - DNA, 201 bp, Homo sapiens
gaaggccctccaggctacctgcttggaggtcggcggtgtctgtgctgccagccccgggcctgactgttgagggcccccccgctctccacggggcagggtgrggcctgctgccctctgttgccctccatgctggggaccccaggggccccttgggcagcacccaccaagctgggcctggctacagccagtgctgagagggtc

SEQ ID NO: 434788 - DNA, 201 bp, Homo sapiens
ggatctgtaggtcccagtgaggaaggccctccaggctacctgcttggaggtcggcggtgtctgtgctgccagccccgggcctgactgttgagggccccccsgctctccacggggcagggtggggcctgctgccctctgttgccctccatgctggggaccccaggggccccttgggcagcacccaccaagctgggcctggct

SEQ ID NO: 434789 - DNA, 201 bp, Homo sapiens
ggggcccagcggccacacacagacacaccgcgggctccggccaccaacctgtcccccctcggaatggtcctgcaggggatctggggctctgggatctgtakgtcccagtgaggaaggccctccaggctacctgcttggaggtcggcggtgtctgtgctgccagccccgggcctgactgttgagggcccccccgctctccac

SEQ ID NO: 434790 - DNA, 201 bp, Homo sapiens
cagcttatgatcgctgcatgtgacagggtgagctgtgcgttccctgcttagaatcaagaagaggtcttagttcatctcactttgtcgtggtgtctgcgtgkcgcttcatgcctcacagaacatgggctggctacgagggtcaaaccaggccacagcaacgcgtcaggggccgcttgctttcttaggagcaacaggtccaga

SEQ ID NO: 434791 - DNA, 201 bp, Homo sapiens
accgctggcggagctcgtcagtgaagggcaggtcggggaacatatcggtcacattgttgctggcgaaggtcaggttgatctcggtgcaggcctgcaggtgycccagcctgagtcaggccagcccacgcccacccttgcccccgagtggttccaggccacccacacccccacacctggtagtcccaggccctggcgtcgggg

SEQ ID NO: 434792 - DNA, 201 bp, Homo sapiens
aggacgggacatacatggccaggcctccaggcgtttattcagccccttccctctgccgccagctgcttgagtgaagcccccactccatgaggagccttgaracccctccagtcctgtgctcagaggctgagtctgggccccccacgcagagctggctgctgctcacgcctggctgcctttacccactcgccgatgatggtg

SEQ ID NO: 434793 - DNA, 201 bp, Homo sapiens
gccggcagttcttgctgttgccgtagctctcgccaaagctctgcgtcaccgaaatgaagtcctgatgaagcagcggcggcggatgcgtggaagggggcctmgaggaaccaccggcggcatcaggagacccggtcctgtaaaagactgagagctccgcctctccgatactcgcgggcagccattgcggcgcacagaaccgta

SEQ ID NO: 434794 - DNA, 201 bp, Homo sapiens
gcctccaggcgtttattcagccccttccctctgccgccagctgcttgagtgaagcccccactccatgaggagccttgagacccctccagtcctgtgctcaraggctgagtctgggccccccacgcagagctggctgctgctcacgcctggctgcctttacccactcgccgatgatggtggcctccagcttccgcgcctcaa

SEQ ID NO: 434795 - DNA, 201 bp, Homo sapiens
agacccctccagtcctgtgctcagaggctgagtctgggccccccacgcagagctggctgctgctcacgcctggctgcctttacccactcgccgatgatggkggcctccagcttccgcgcctcaaccacggaagcaggatcttctgggtgggaggctctggggagcgggcacagagggggcccgtcagccccagccctcggt

SEQ ID NO: 434796 - DNA, 201 bp, Homo sapiens
ggggcctgggccaggaccttgccgaaaatcaaacgaagcccagacaacctgctggggctccaacccttcctcccaccaccaccgccccgcagaatttgggycgctgagaccgctgcaggcgtgccgaccacggctgccccggcccggaaagcagatttgcccctttttgcggggtaagggtggagagggcggcgtcggggg

SEQ ID NO: 434797 - DNA, 201 bp, Homo sapiens
tccctcgggtgccttaggtggccagaactccaccagcaaccctcacccaggaccgcagctctggagatgccagctaggccgagagctggccagctccccargcacaccagagcctggagacgctccaggcttggctgggcccacagaggggccagagcctcagggagggctccaggagcagggtttccaaggaagccactt

SEQ ID NO: 434798 - DNA, 201 bp, Homo sapiens
gctcggagcccgaggcgttgtagaccagccctggggaggagaggcgctggggcccagcggccacacacagacacaccgcgggctccggccaccaacctgtmccccctcggaatggtcctgcaggggatctggggctctgggatctgtaggtcccagtgaggaaggccctccaggctacctgcttggaggtcggcggtgtct

SEQ ID NO: 434799 - DNA, 201 bp, Homo sapiens
tatgcttggtaaaagtcatcgccatcctccattctccattaaccagggacacagtgcactgcggaaagccgcagggacctctgcccaagaaagcctgggtrttgtccaggtttccccccagtgagacggcctgagatatggcctcgtgggaagggaaagacctgatcgtcccccagcccgacacccataaagggtctgtgc

SEQ ID NO: 434800 - DNA, 201 bp, Homo sapiens
cagcccgacacccataaagggtctgtgctgaggaggattagtgaaagagggaggcctctttgcagttgagataagaggaaggcttctgtctccgacatgcycctgggaacggaatgtctccgtgtaaaacccgatcgtacattagttctattctgagacaggagaaaaccgccctgtggctggaggcgagatatgctggcg

SEQ ID NO: 434801 - DNA, 201 bp, Homo sapiens
cgcggccccatccggagctgcgctagggcgagtccctgctgcgcccgccaagcctccccagcacttgctcctggcaggtgccccactccaaggcagggccrggagagtgggggccgttctgctgccctaagggcgggagggagagggtcccaaacagagtgctggccccccgaagaaagcaacccagggtttgtccaagcg

SEQ ID NO: 434802 - DNA, 201 bp, Homo sapiens
cctcctaccaccacagctacgaggacactggcctcctttgcatccatgccagcgccgacccaagacaggtgagggccccgcctgccaccgtcctcagtgcrgttgcctgtccagacctgggcgtccctgcctagacgggtcagtaggccggcaggcgcaggccacactgttatcgtcttgcccttcttcgcaggttcgaga

SEQ ID NO: 434803 - DNA, 201 bp, Homo sapiens
tccaccgtttctgccccacagaaaacgtagcaaagatcaaccgagaggtgctgcattcctacctgaggaactactacactcccgaccgcatggtgctggcyggcgtgggcgtggagcacgagcatctggtggactgtgcccggaagtacctcctgggggtccagccggcctgggggagcgcagaggccgtggatattgaca

SEQ ID NO: 434804 - DNA, 201 bp, Homo sapiens
tcctgacgtggcttgggcgactcagccagctctgccctccgtccctggcgtctgacggtgctcctgacgtggcgtgggtggttcagccagctctgccctcygtccctgcaggaggaggacttcatcccctttgcagtgttgaacatgatgatgggcggaggtggctccttctcggctggtgggcccggcaagggcatgttc

SEQ ID NO: 434805 - DNA, 201 bp, Homo sapiens
ggcattttcggtcagtacccagttttgtaattttttagactatacttttgaaggatgtttgagatttttcttgtctataatggttattttaataaattatsaagttgctaagttaatgttaataaaagacttttaagttaaaagataatttttgtatgtgtgttaaaagcaaaagtagattttaaaaaaaaattgtgtttc

SEQ ID NO: 434806 - DNA, 201 bp, Homo sapiens
aagtagcgggaacgtctcatggcctcgggtggggaacacgtcccctggcccgtggtgtgacctgtttttgtattgattctgagggtgataggtgttgactrcatgtgtagctttgccttaacacatgctgtagtcccacagcagggcatggactgtgtcccctgctgagaatgagtgctgctaggcctgagagcaacacaa

SEQ ID NO: 434807 - DNA, 201 bp, Homo sapiens
tcttcgcaggttcgagaaatggtagaaatcatcacaaaggagtttattttaatgggcggaaccgtggacacggtaagtgcagtgtggcgccatttccaggygtacctgtggtgtctgacaggagacagccacgttgtaggagtggccacctgtgggcctggtccctgagcctcagggccaaggtcccggcagggcagggca

SEQ ID NO: 434808 - DNA, 201 bp, Homo sapiens
tgggtggtcccgcagttttaacatgcacatgctttagttgactgttagttgtaattagcatgccaattatgaattgtaccctgagtggaaacaaagtgtaygatttcataaatgttgagctacacatatacctgtgaaaccatcagcacaatcaccctcatgtaattaaatctgattatcatgtcatattgacatcttaaa

SEQ ID NO: 434809 - DNA, 201 bp, Homo sapiens
agcaggtgaagtgcccagcgctggagtgcagcgtgccacgaggagggcggtcggtgcttccctcctcgggctgtgggcacatggggccccgcaggttcctwggaggagccctgagctgggaggcagcaaaggctgacctatcaaagcctcccggaggccaccgtgctgggtaccaggactcacctctgacaagcaggagaa

SEQ ID NO: 434810 - DNA, 201 bp, Homo sapiens
ggaatccaggcctgtgatcttcgaggatgtggggaggcaggtgctggccactcgctccagaaagctgccgcacgagctgtgcacgctcatccgtgagtacygcaggggtagtgaggggctgccgcaggcctcggccaggctcagaggaggccgtctcgccctcccgcaggccgtggtgggcctgtggtatgtccatcacac

SEQ ID NO: 434811 - DNA, 201 bp, Homo sapiens
ttttctttttactactagttcttatcaattcaggatcgagatatgaagcgaaataccttagtggaattgctcactttttggaaaaattggcattttcggtyagtacccagttttgtaattttttagactatacttttgaaggatgtttgagatttttcttgtctataatggttattttaataaattatcaagttgctaagt

SEQ ID NO: 434812 - DNA, 201 bp, Homo sapiens
gccctgccctctgtccctggcatccgacagcgctcctgatggggcgtgggcggctcagccagctctgccctctgtccctggcatccagcaatgctcctgaygcagtgtgggcgactcagccagctctgccctctgtccctggcgtctgacggcgctcgtgacacagcgtgggtggctcagctagctctgccctttgtccct

SEQ ID NO: 434813 - DNA, 201 bp, Homo sapiens
gagccatgattgtgccactgccctccagcctgggcaacagagtgaggctttgtctcaaaaaaagaaagaaaggaaaaagaaatagtgctagtagccaggcrtgctggctcacgcctgtaatcccggcatttagggatgtagagatgggaggatcacttcagcccaggagttcgagaccagtctgagcaacatagcaagact

SEQ ID NO: 434814 - DNA, 201 bp, Homo sapiens
tccgtccctggcgtccagcggcgctcctgacgtggcttgggcgactcagccagctctgccctccgtccctggcgtctgacggtgctcctgacgtggcgtgkgtggttcagccagctctgccctctgtccctgcaggaggaggacttcatcccctttgcagtgttgaacatgatgatgggcggaggtggctccttctcggct

SEQ ID NO: 434815 - DNA, 201 bp, Homo sapiens
cctctgtttctttttggagatagagtctgtctctgtcacccaggctggaatgcagtggcgcgatctcggctcactgcaacctccacctcccaggttcaagygattctcctgcctcagcctcctgagtagctgggattacaggcgcccgccaccgcgcccagttaatttttgtatttttagtagagatggggtttcacagtg

SEQ ID NO: 434816 - DNA, 201 bp, Homo sapiens
agtcacctgtgtctgtggctcttccccattaggcggcttacagggagaacacagttggcctccaccgtttctgccccacagaaaacgtagcaaagatcaaycgagaggtgctgcattcctacctgaggaactactacactcccgaccgcatggtgctggccggcgtgggcgtggagcacgagcatctggtggactgtgccc

SEQ ID NO: 434817 - DNA, 201 bp, Homo sapiens
tgccctgagacagtctgaaggcagcctaggacccgcactgcctccctcagaacctcccagggactttgctaaaaccagctgcctgggccctgcgccggagrcgtctggggaagccccagaacctgtgtttcatttgttttccccgattttgccgtgtggccactttggggccctggcatttgggagttaactattttacct

SEQ ID NO: 434818 - DNA, 201 bp, Homo sapiens
ggagaacacagttggcctccaccgtttctgccccacagaaaacgtagcaaagatcaaccgagaggtgctgcattcctacctgaggaactactacactcccraccgcatggtgctggccggcgtgggcgtggagcacgagcatctggtggactgtgcccggaagtacctcctgggggtccagccggcctgggggagcgcaga

SEQ ID NO: 434819 - DNA, 201 bp, Homo sapiens
cagcgccgacccaagacaggtgagggccccgcctgccaccgtcctcagtgcggttgcctgtccagacctgggcgtccctgcctagacgggtcagtaggccrgcaggcgcaggccacactgttatcgtcttgcccttcttcgcaggttcgagaaatggtagaaatcatcacaaaggagtttattttaatgggcggaaccgtg

SEQ ID NO: 434820 - DNA, 201 bp, Homo sapiens
tccccggcctgacagacccagggagctgcagctggagcccgttcccgtgcgtgttagtttggacacgaatttagtctaaaaagctgtctggttgtataaayggtgcaaacaatgtcgccacagcacccacgcggtttgcattctttcggaactcaatgtgccgatcagtggagtcagtatcgagcctgaccaccgcaagcc

SEQ ID NO: 434821 - DNA, 201 bp, Homo sapiens
gtcgagtaaggacgggcgcctgcccaggacgtaccggctcttccggtagaaccgctccccggcctgacagacccagggagctgcagctggagcccgttccygtgcgtgttagtttggacacgaatttagtctaaaaagctgtctggttgtataaacggtgcaaacaatgtcgccacagcacccacgcggtttgcattcttt

SEQ ID NO: 434822 - DNA, 201 bp, Homo sapiens
ctgcgtcctgcctcccaagctccctcttcttcgtggctgttgcgtctgctctgcatggtctcccttgatcacacttgatctcagagcaccccatgatttcrtgcctgtcccatgggccagctctgtgcacttctgactgtgcagtgcctcatgccgggaacagatgttacagtgagacaagctccatacgagccagccatt

SEQ ID NO: 434823 - DNA, 201 bp, Homo sapiens
gatttaagtttgaatgctaaaaaaattacacataaaagacacattaaatgctaagaattaaagttagcttggaggtaacatattcatgttctaaaacaagrcctcttaataccccctgactcccagctgcccctgccaggttcctgcctggtgtgtttgattctccgactcttgcctcgaatctcactcatcccagatgaa

SEQ ID NO: 434824 - DNA, 201 bp, Homo sapiens
catctggtggactgtgcccggaagtacctcctgggggtccagccggcctgggggagcgcagaggccgtggatattgacagatctgtggcccagtacactgsggggattgccaaggtgaagtagcgggaacgtctcatggcctcgggtggggaacacgtcccctggcccgtggtgtgacctgtttttgtattgattctgagg

SEQ ID NO: 434825 - DNA, 201 bp, Homo sapiens
aacataactaaccgcacctaacaggtcatcacaggtttgttgtctcaagcctgttgtaactgggccgctttctctgttttaggtttggacctcctgcgtayagacggtttagtagtggtggtgcctatcccaacatccccctctcttctcccttacctggagtacccaagcctgtttttgctacagttgatggacaggaaa

SEQ ID NO: 434826 - DNA, 201 bp, Homo sapiens
ttttaatgggcggaaccgtggacacggtaagtgcagtgtggcgccatttccaggcgtacctgtggtgtctgacaggagacagccacgttgtaggagtggcyacctgtgggcctggtccctgagcctcagggccaaggtcccggcagggcagggcagggcagggcggccaaggaggcacagcctggggctgagctgctccac

SEQ ID NO: 434827 - DNA, 201 bp, Homo sapiens
gaggatgtggggaggcaggtgctggccactcgctccagaaagctgccgcacgagctgtgcacgctcatccgtgagtaccgcaggggtagtgaggggctgcygcaggcctcggccaggctcagaggaggccgtctcgccctcccgcaggccgtggtgggcctgtggtatgtccatcacacccagaatctggggccttcacca

SEQ ID NO: 434828 - DNA, 201 bp, Homo sapiens
cctgcgccggaggcgtctggggaagccccagaacctgtgtttcatttgttttccccgattttgccgtgtggccactttggggccctggcatttgggagttractattttaccttctcccgctgcatgtcacacagacaatgaagaactcaagggaggcacattgctcctgtatttcaagtgtggtagaagccgggtaacac

SEQ ID NO: 434829 - DNA, 201 bp, Homo sapiens
cagcaaagatgaaattctgcttacgttggaaaagcatgggggtatctgtgactgccagacatcaaggtacaccagcttttgtgtacaaactgactttgggkccttgggaactgacgttcttgtcgttgctcagattccctctgagcccctcccagcgggaggtgtggagattcacggggagaaggagccctgtcctggatg

SEQ ID NO: 434830 - DNA, 201 bp, Homo sapiens
cgcaggccgtggtgggcctgtggtatgtccatcacacccagaatctggggccttcaccagttgtcctcagcaggggcggccaagggcagggtcgtggggtygcagacctggtctcacttcccggccccaccatgcacctgctgcctccttggcaggtgaccccaccctctgcacccctgggaggggctgtcactactgccc

SEQ ID NO: 434831 - DNA, 201 bp, Homo sapiens
gggccccgcctgccaccgtcctcagtgcggttgcctgtccagacctgggcgtccctgcctagacgggtcagtaggccggcaggcgcaggccacactgttaycgtcttgcccttcttcgcaggttcgagaaatggtagaaatcatcacaaaggagtttattttaatgggcggaaccgtggacacggtaagtgcagtgtggcg

SEQ ID NO: 434832 - DNA, 201 bp, Homo sapiens
cctccttggcaggtgaccccaccctctgcacccctgggaggggctgtcactactgcccagagttgttaaagagcactcaagttagtaggcgagaagggctyagtagaggactgctacattgtacgtggagtagcagtggctcggaatgccgctgtaccgttgctggctctcgggcaggagtctcagccccaggtttccggg

SEQ ID NO: 434833 - DNA, 201 bp, Homo sapiens
gggcttatggtgtcacctgtgggcatctcctttccaggcctggagtcccgggcacttgccctgtcccgtgtgggccctcgtccttccctcaggagcccccrcttaaatcctcaagcgagtgtccagcctctctcgggcctcgttttctgtagaaaacagacccacctggaccctatcactcctgtcctggggttcctgggt

SEQ ID NO: 434834 - DNA, 201 bp, Homo sapiens
gtgcgtgttagtttggacacgaatttagtctaaaaagctgtctggttgtataaacggtgcaaacaatgtcgccacagcacccacgcggtttgcattctttyggaactcaatgtgccgatcagtggagtcagtatcgagcctgaccaccgcaagccaggaagcaggtgaagtgcccagcgctggagtgcagcgtgccacgag

SEQ ID NO: 434835 - DNA, 201 bp, Homo sapiens
tgtgccgatcagtggagtcagtatcgagcctgaccaccgcaagccaggaagcaggtgaagtgcccagcgctggagtgcagcgtgccacgaggagggcggtyggtgcttccctcctcgggctgtgggcacatggggccccgcaggttccttggaggagccctgagctgggaggcagcaaaggctgacctatcaaagcctccc

SEQ ID NO: 434836 - DNA, 201 bp, Homo sapiens
agggcggtcggtgcttccctcctcgggctgtgggcacatggggccccgcaggttccttggaggagccctgagctgggaggcagcaaaggctgacctatcaragcctcccggaggccaccgtgctgggtaccaggactcacctctgacaagcaggagaaggtaagggcccggtcagctccaaggagcgcgctccacgcgcgt

SEQ ID NO: 434837 - DNA, 201 bp, Homo sapiens
gggttcaggtgattctcctaccttagcctcctgagtagctgggattacaggcatgtgtcaccaccctagctaatttttttgttttttgttttctgtttttkttttttttttttgagacggagtcctgctctgttgcccaggctggagtgcggtggcatgatctcaactcattgcaacctccgcctcccgggttcaggtgat

SEQ ID NO: 434838 - DNA, 201 bp, Homo sapiens
agaactgaagccctgtttgttttttgttttttgttgttgttggctgtcagttgtgttctgctttcagcttctagaggctgcacgtattcttggtcacgtgrcctagacccctccatcttcatgtcagcgatgtgcattgaatccttctggtgctctgaatctttctgacttcccattcggctatcagctgcagaaaatgct

SEQ ID NO: 434839 - DNA, 201 bp, Homo sapiens
cataattatgcatgataataggtaaatactgagaagttcacctcattttcttgttaaaggatttggctattaccgtatgtgtcagttagtactcttttgtrtggtagtgaaagaaaactcaacccaaactgattcatgaagaagaaagtaaatctggttagatgtggtttgaattaggtaattcatgtcatgaggactcag

SEQ ID NO: 434840 - DNA, 201 bp, Homo sapiens
atgtggaacgtgatgatgtgttctctgttctaactactgggaagacttccttggcatagcacatgccatggggtcagttggctttgacttcatatagataygccatttacttggtcagtgtcacttctatgacaagtagtatgttgtgccagtttgattataagtacaaatatgggcaatgaagtaacttggttttaaggt

SEQ ID NO: 434841 - DNA, 201 bp, Homo sapiens
cacttttcattattttatttattccagtatagtgattacgaagttttaagtgctttttgctagtgcgtgctttacctttaaatgatattataaatttgctrtcctacttttttgcttggaaaggtgtatctgagcagctttagcatttgccagatttactcctggaaaacattttataattttatagacaatttcaaaaga

SEQ ID NO: 434842 - DNA, 201 bp, Homo sapiens
ggcctggaaaaaaatttttaacttagatattacgtgagaatgctacaaaaactttaccattacctcagtttctattattaggtgattttaagtttttacarctgcttttttgggcttatttattggcaaagtatttcccttatatttctgttttagtatcttctgttataagcactacttaatatatatgtgaagttcagt

SEQ ID NO: 434843 - DNA, 201 bp, Homo sapiens
tggcatctcttaatatgtaattgtaacatagagtaaataagtattttgtcccttgtagggtcaaacagtacagtgcatgggcagaattagagatgtaggcttttttttttttttttttttttactggcttagagaaccgtttgatcagctaatatggaattaagtccctagggctgcccaggcacaacattaactgctatt

SEQ ID NO: 434844 - DNA, 201 bp, Homo sapiens
atatttaggaagcttttcagtaaaggtttaaacaaagattgttaagcttgaaagaatagttcttatactgacaatgtaattaagccacgtattcctccttraatattttaatgaagttctaccacacacaggcatttaaagctactttccatcttccttattttccatctccagtcaccaggtcctgttatgtttgcctta

SEQ ID NO: 434845 - DNA, 201 bp, Homo sapiens
tcagagtcactgtctcacatgccctcattcctcagtcccattccctaggggtaactgcaggtgttttgtttcttttgtttcatgtgttatatttcaggggkgtgtgtgtgtgtgtgtgtgtgtgtgtgtgtgtgtacattttttaaaatgaaacttctagtgcgtaagtaaaattacataaaactgcaacttgagtattat

SEQ ID NO: 434846 - DNA, 201 bp, Homo sapiens
cgaactcctgacctcgggtgatccacccacctcagcctcccaaagtgctgggattataggcacaagccagtatgcccagcctccaccacagcttttaacayaggaccttgaatatagtggatatgtagttattactaaatgttaagaaatttttgcttactctggggtgttctacttcgtaatgaataattgataatctga

SEQ ID NO: 434847 - DNA, 201 bp, Homo sapiens
ttaatttgcattttctttttgtttgtttaaacgttttgttttttgtttttgagatggagtctcactctgttgcccaggctggagtccagtggcactgtctygactcactgcaccctccacttcctgggttgaggtgattctcctgcctcagcctcctgagtagctgggattaaagatgtgcgccaccacgccccacaaatt

SEQ ID NO: 434848 - DNA, 201 bp, Homo sapiens
tgtgactccagaaaggttctaaagaggagctttacaatctcttctctggggtttatggagacttcctttacccttctgtgttagccccttaaagcactgcrtcaaccttaaaagggcacaggaaagggtgtctatgccatttttatgccatttatcctgcttggtgttttctgagctttcttcatctgcggtttaatgtct

SEQ ID NO: 434849 - DNA, 201 bp, Homo sapiens
gtggcacacgcctgtcgtcctagctactcgggaggctaagatgggagaatctcttgaacacaggaggtgtaggttgcagtgagccgagattgggctgctgyactccagcctgggtgacaagagtgagactctgtcttaaaaaaaaaaaaaaaagaagtagaattactgatttactttcattttacttgtgtttgttgtaga

SEQ ID NO: 434850 - DNA, 201 bp, Homo sapiens
cccaacacacttactaggaatgttctaggtaggagaacatttgcaggagtttgtccccggaattgcttcagtaatcattagattgtacagctgctggcgtygttgttgttgttgttgttgttgttgttgttgttaggaaggacgttgttttccaggagtggctcattaggcttcctgttgaatctcattggccagtatcag

SEQ ID NO: 434851 - DNA, 201 bp, Homo sapiens
ctctgcgctctagtactgctgttaagatacacaacttgtttcttagttcatataatctcgggatacacacacacacacacatatatatacacacacatacrtatacacacacatacatatatataaatatacctgatgccagatttttttcataaatattctgcctactgtaaatatgggttcctctgagttgttttagaa

SEQ ID NO: 434852 - DNA, 201 bp, Homo sapiens
ttgggatgtcaattggggtgcacaacatagggcagggtaagtgtgttggcattgggtggactacaatgttataggagaattttatgaaaatggctagactrgatgtcattgttagcaactaagcattggtattgggggtgagagcaaagggtggggaactagataggttatccctaaattgaatggagtatcctggagtaa

SEQ ID NO: 434853 - DNA, 201 bp, Homo sapiens
ctgttaaatagacctattatttgtgtcaaaatagaactgtattttaaaaattgaaatgtcttcatgtatgaagggaaaagtattttttgtactattaaacwttgcttgggttctggtagatttattgcaaattctctttctctagggtttggattcaggatttgttcctagtgtccaagattttgataagaaacttacaga

SEQ ID NO: 434854 - DNA, 201 bp, Homo sapiens
aataagaatgttttatattattcttacaaaccttaaattgaatcacgtgaattttattaaagagaacatataattcataaaagtctggaatttttatacamataattgatttagataaaaaacaaaatacaacaaaaagtactcccttcccaacttgcttgtactcacttagaatgagtacattttggtaaaattctttaa

SEQ ID NO: 434855 - DNA, 201 bp, Homo sapiens
agaatgttcagaataaataaaaagccatatatgaagaaacaaatcaaatactgctttaattatggttctgctattgtcccccacttgcatttctgacagcyactttgtagtttgcatattgtcttttttctaattaacatttttcctctccttggcttttttttttttttttttttttttgctcttctgttgactgtatag

SEQ ID NO: 434856 - DNA, 201 bp, Homo sapiens
ttgactattccttaggattaaaagagatgaaaatcttaaccccagaacttccctgttcttctaagtcctgttcttcccttagcagaaatggataaaccacrgggacagtagggattgtaaatgtttccaaattttcagtaatccaaggaaatcacagattagtgtgcctcacataaaatcatggtataagtaatatttctg

SEQ ID NO: 434857 - DNA, 201 bp, Homo sapiens
aaaatagaactgtattttaaaaattgaaatgtcttcatgtatgaagggaaaagtattttttgtactattaaactttgcttgggttctggtagatttattgsaaattctctttctctagggtttggattcaggatttgttcctagtgtccaagattttgataagaaacttacagaagctgatgcttacctacaaatcttgat

SEQ ID NO: 434858 - DNA, 201 bp, Homo sapiens
atgtaagtgaaaaaagtaatttggctagatcacacaggtaattcattagaaagttgcagattcaggatttaaaactagatgagtccttaaagctgtgctcrtttccactatgtcaagggccttcaggcagtttttagattacattttagtgcccttctgtcattaattccttttaaacatcattgtgatttaatagaaaag

SEQ ID NO: 434859 - DNA, 201 bp, Homo sapiens
tttaaatgatattataaatttgctatcctacttttttgcttggaaaggtgtatctgagcagctttagcatttgccagatttactcctggaaaacattttakaattttatagacaatttcaaaagaataatgcttatgaccttgcatgctaaaatggttataaaattttctaaaaatgttcataacctgtagcttctgaaca

SEQ ID NO: 434860 - DNA, 201 bp, Homo sapiens
taagaagtaaaaaaaacaaaaccatagcccacagcacctgacacataataatctgtcagtaaacatgattctccatatatttccctctccaagtgatgcaytacgtatagtccatactgaagacagacaagtatgtgtctgttcttattcatttggcagacattgataagtgcctactcttgtcagccctgaatgaggcac

SEQ ID NO: 434861 - DNA, 201 bp, Homo sapiens
tcaacccccacgcgacacaactttccggaagtaagcaaaatccgttatcaaggtgaaactccggggaccaggctccacagctgccataaactggatggcaygttagaagccggtgggtgtaggtgaggcacgctggcgcccgcgggcccttctccagccgctacccagtgggaatccgcggggctgaagccccgaaaccag

SEQ ID NO: 434862 - DNA, 201 bp, Homo sapiens
aggtatgataattacatgtctgcccaactttcgttatagattaacataacttaattgtatttaaggtacaatttaggagagttgctgaaaaatgaatcttyagtattgggatgccttgattctaccctcaatagctataatggattatgtgtctgagtagattaataaaaatcttttgagcatttttcttgaactacttca

SEQ ID NO: 434863 - DNA, 201 bp, Homo sapiens
cttgcctttaagaatgtcttagtctagtcagggagactgacacaaagcaattaaaatattgtagttaagttctacaatagaaatatatatatagggtgctyggtgtgtgtagagcgagcagagaccccaattaccagattctctgaaatgtcatttgtgttttctcatcaaaagaaaattatgttatatttgcttgcagga

SEQ ID NO: 434864 - DNA, 201 bp, Homo sapiens
taggtcttgactatcaacatggctttgttgagcacatcctgtgcataaaggataagacaagagaccttgtcatcaagagaattctaaagcatatatatgcrtgcatgtaaccagctaactgtacgagtctagcttactatgattctaaattgctttctttagcttaaataaggtaattaatgtttttatagttcttctgga

SEQ ID NO: 434865 - DNA, 201 bp, Homo sapiens
agaaatttaattttggaaaaaaagtttttataataatggggttaaaagaaaataagcatttggaagaaaattcgaaaatgaaaggttattattaatttttsaagggttcagtcattattttatttaaaagagaattaaagaccgtctttttttttttttttttttttttttttgagacacagtctttgtcgcccaggctgg

SEQ ID NO: 434866 - DNA, 201 bp, Homo sapiens
gtgctgcataaggacatttaggtcaacgatggaccacatatatgatggtggttctataagattataataccatatttttactgtactttttctatgtttagatacacaaatacttaccattgtgttgtagttgccctcagtattgagtccagtaacatactctatagcagggcatcaaatcttttgccttccctgggccac

SEQ ID NO: 434867 - DNA, 201 bp, Homo sapiens
cagatagcccttttggttttaagcttcctgggttggccacagcatcatttcagggatgatcctgcccacgtggctctgaatgaatgcttgcattggggaaragggtataaaaggcaggtaggtacctcctggcgtaattggaggctgtttgaagggtaaaggatttccccatgaagccaattatttccccaggttatgtga

SEQ ID NO: 434868 - DNA, 201 bp, Homo sapiens
tgtttccatacacacacagttgaagattttgtataataaaatttactgactgcctggcaccagagataccaaaatgagttaagatagacctttccttcaargaacttgcactctgtactactgcccactcagtgttcttaaacagaggaaagatgttatgaaattaacaggaggagccagttaactgcattttggacctag

SEQ ID NO: 434869 - DNA, 201 bp, Homo sapiens
tgtttacttgtttactcctttgaccatttttttgttgttgttcatctttttttatatcctccttttttgaaagtaaaaggaaacagacttattcattaacrctatttattatttcagaaattgctgatatatttaataatgttttttcagtttggaatacattgcttggtaggtattagtgtgaggagtagattaagatat

SEQ ID NO: 434870 - DNA, 201 bp, Homo sapiens
tggctgtaggtatatataatctactaattgaaaatttctattcagtttcagccttttatgctgagtgttttaacaagaagatacaattcaatgctcatatytggaccaaatcaaaattccttgggatgtcaattggggtgcacaacatagggcagggtaagtgtgttggcattgggtggactacaatgttataggagaatt

SEQ ID NO: 434871 - DNA, 201 bp, Homo sapiens
aaccaacttttaatgcttccagagtcatcttatatatagtaatttgtgctgtagagacctcagcaactgtgagacagtttatataagtgatacgtagtttstacacagtatattcctggcatactgcagataccaaaaccgaggatgctgaagtctcttacataaaatggtgtcttttatattcatataacctatgcacac

SEQ ID NO: 434872 - DNA, 201 bp, Homo sapiens
atacccagtaacaaaatcataaaaggaactctagttttaaacttaaatgcagaggcaaagatctcactaatttttgatgacttctaggtcttgactatcarcatggctttgttgagcacatcctgtgcataaaggataagacaagagaccttgtcatcaagagaattctaaagcatatatatgcatgcatgtaaccagcta

SEQ ID NO: 434873 - DNA, 201 bp, Homo sapiens
tattctttgggctaagaaattgggcattaattgtcctcatatgtatggtttttgtggctacttcatgtagattttatttttggtggttatcaaattggaatttttttttttttttttttttttgagacggagtctcattctgtttcccaggttggagtacagtggtgcaatctcagctcactgcagcctcgacctcccagg

SEQ ID NO: 434874 - DNA, 201 bp, Homo sapiens
acagggtttcaccatgttggccaggctggtcttgaactcccgacctcatgtgatctgtccgcctcagcctcccaaagtgctgggattatagaggtgagccmccgcgcccagcccatgttgagttttaaatgcctttgagaaagccaggtggagatgtgctgagggagagagtggagaaaatgtgaaatagcccttgccgag

SEQ ID NO: 434875 - DNA, 201 bp, Homo sapiens
ctttttattttgcagaccgggaaactgaggcccatagaggataagagacttaaagattctaagctattaaaaactccaagtctctgtttctttgcttttcwcagtgcttcaaaacattccccacttcagtttcttagttgtttttttttttaattattactgattgttttgggggtgttttctctaagtgtccttcatttt

SEQ ID NO: 434876 - DNA, 201 bp, Homo sapiens
agtcccagcactttgggaggctgaggcaggtggattgcttgagctcaggagtagcccgagaaccccttctgagtagaacatatcagttcgatattcccacytcatgggggtaatcctgttttgtcatccagctgaaaagacagtagcattcatttcagagtggtccttttttaaggtaccgggccttgtagctggaggcag

SEQ ID NO: 434877 - DNA, 201 bp, Homo sapiens
aactcctgggctcaagccatctgcccactttggcctctgagagtgctgagattataggcatgagccaccattcccagccatgttttcctttttcattgaastttatctactttagccattaaactccactccattggtcttgtcattactaagagctgaaccacctgcaaaatattaagttaaaaagcgttttctttgaca

SEQ ID NO: 434878 - DNA, 201 bp, Homo sapiens
gtccaggtctcaactcctgggctcaagcgatcctcctgcctcagccttcaaaagtggtgggattggccgggcgcggtggctcacacctgtaatcccagcastttgggaggccgaggtgggcggatcacctgaggttgggagttccagaccagactgaccaacatggataaaccccatctctactaaaaatacaaaattatc

SEQ ID NO: 434879 - DNA, 201 bp, Homo sapiens
aataattcttaccatgcaaaggcttgtaaggtttactgtatataaagtgcctgttacataaggggcagcaatgagtgaggatctgctgcttctgctattgktattattaatgttgctattatccctttctccaagtcctcttatttaacggtgttatttttctaaaacacacctttaagaatgctattgccctctttgtaa

SEQ ID NO: 434880 - DNA, 201 bp, Homo sapiens
gctgccagttcgccacgcgatcacaagggtagccagctgaaactctgcactgtgtactgtgttgcgagatggtttttgcccaactgtaggctaatgtaagygttctacaacacgtttaaggtaggttaggataagctatgctgtttggtaggttagatgaattaaatgcatctttgacttaacaatattttcaacttaaga

SEQ ID NO: 434881 - DNA, 201 bp, Homo sapiens
catgcctgtaatctcagcgctttgggaagtagcagcaggaggatcattgagcccaggagtttgagaccatcctgggcaacatagtgagaccccatctctamaaaaaactaaaaaaattagccaagcatggtggagtgtacctgtggccccagctacttggaggctgaggcaggaagatcgcttgagcccaacaggtcgagg

SEQ ID NO: 434882 - DNA, 201 bp, Homo sapiens
tccttaaggaccagagtaatgcggagaagcacgcagatggaatgatagtaagtttaatgtaatctttttgtttccctttacttctgcagagcattataacsagtcatatcaggagaagcctgaattactactcatttttcaatgccaactactcactgctttttgttgttgactcttgcagtttcctttaagctcccttct

SEQ ID NO: 434883 - DNA, 201 bp, Homo sapiens
tagaatcaattaaacactgcattgtgttgctgcagattgccaaagtaagtaaattttactttcaattacctttgtgtatggagttcaaaaattataatggygtttttctttaatagcaaaaaaactcagatctgaaacatagtacctttctacattaaactgtattgtgagcttattctatggaacaactgttgtgtttgg

SEQ ID NO: 434884 - DNA, 201 bp, Homo sapiens
tactatagatatattaatatgcttggttgtggaattaatatccttggctaccctagacctcactgcaggtgacacaatttatgtactgtatgtatgtatakgtgtgtgtgtgtgtgtgtgtgtgtatcctttctaaaatcaatccttccttccttcctctctctctcttgttttttttttttttttttttttttttgagac

SEQ ID NO: 434885 - DNA, 201 bp, Homo sapiens
ttcattgagcagacatttatctattaataataccttccaggtcccaggcattaattaggttctgaaagatagggtgggaataatagtaatgtaaagataatttttttttttttttgaaacaggctctcactctgatgcccagactggagtgcagtgcattgtaacctctaactcctgggctaacaggatccttccaccgca

SEQ ID NO: 434886 - DNA, 201 bp, Homo sapiens
tttcatagatgccccttattaactcaaagaagttcccttctgtttctagtttgttgagtggtttttatcatgaaatggtgttagatttttttaaaagtacsttttctgtgtcttttgagatgatcatgtgatttttgttctttattttattaatatggtatattatattgattgtttcttatacgttgactcaaccttgta

SEQ ID NO: 434887 - DNA, 201 bp, Homo sapiens
gtattcttgggataaatcccacttggtcatagtatataatcctttttatatcttgctggattttgttcgctagtattttgttgagaatttgtccatctatrttagaaacagatactgttttttacgtacgattttttttctggttttggtattagaataatactagctttatagaaaaaattggaaagtgttcgctcttct

SEQ ID NO: 434888 - DNA, 201 bp, Homo sapiens
ttgctgtgtgaaacaaaaccaaaaaacaagccaaacagtcctgatttttctgtggcacagtaacatggaaataagttgctcatttctttcatagtacagtrctctaatatctatgaaatatgatgtacttatccatttctatgtcttttgtcaccaaactgtatattttaaatgtctctaacaggaacttctttgggttat

SEQ ID NO: 434889 - DNA, 201 bp, Homo sapiens
atcacagtgtgtacttacacaaacctagatgggatagcctaatgtacacctaagctacatgagatagcctattgttcctaggctacaagcctgtagagtattactgaagtaaatactgtagatagttgtaacacaatgataagtatctgtgtatttaaacatagaaaagatacagtaaaaatatagcataaaagataaaaa

SEQ ID NO: 434890 - DNA, 201 bp, Homo sapiens
ctcacattccccaatggctatggaaggcaagtgtgtccatttcctctgatcagcagtagactctgctgttccttgagacatgccccttccccctcttcctsttaactgtcaaccttacctaaaaacttttgattttgcaggtctatcctcacagtgccctgggtggaattaggaggagaatgcaatattaattgttccaaa

SEQ ID NO: 434891 - DNA, 201 bp, Homo sapiens
agccagtagataagattaaacggaatcatacaaatactccattaattctaagaaaggagaaaaggagaaataatggcatgaacaaggaacaaagggggcaygtagaaaacctattaaaatggtagagttaatcccaactatatcaacagttaccactccatttaatgtcagactggattaaaaaagcaggatttatctata

SEQ ID NO: 434892 - DNA, 201 bp, Homo sapiens
aaaggcaagggggcattggctagatcaggtctccccaactgccataattttctcactgatagaatttttgcaaaggtggcttcaaaaagtaagatacaaaracattagcagaggtctacataggctcagtatcatcagtatcactgtcttccacctgtacatcttgtcccactggaaggtctttagggcaataactcacat

SEQ ID NO: 434893 - DNA, 201 bp, Homo sapiens
ctgcattccttagtctcagactgtggtttactgaagctagatacatatcactgaagtttcttgctgggtggatacattggctgacattgataaatatatattttttttttcttgatgaagatttaaaagaataaccaattccccaaaggcagaaatttaaataaatatggcagtgtttaaattaacagataatttaagaag

SEQ ID NO: 434894 - DNA, 201 bp, Homo sapiens
acttgacactcttgggtcacgtgcagatgactgtgccagtcagtggaaagtctatagtgatggcaccatgactctctctgcctctggaacccttaactggsggggaaggggacagtgggaaagaaagtttcaggcgttgatagcagctctcctccctctgccctggtcatgtctcccttttctggcctctttcaatcctgt

SEQ ID NO: 434895 - DNA, 201 bp, Homo sapiens
tttttttaaagaaaagaaaggcggggcacggtggctcatacctgtaatcctatcactttgagaggctgaggcaggcagatcccttgagttcaggagttagwgaccagcctgggcaacatggtgaaaccctgtcactacaaaaaatacaaaaatattagctgggtgtggtggtgtgcccctgtagtgagctatgattgcacc

SEQ ID NO: 434896 - DNA, 201 bp, Homo sapiens
aatatttttctctaaaacccttttaacttcctaggcagtggccattcaccaccgagtagcagtctcacttctccaagccacgtgaacttgtctccaaatayagtcccagagttctcttactccagcagtgaagatgaattttatgatgctgatgaattccatcaaagtggctcatccccaaagcgcttaatagagtgagta

SEQ ID NO: 434897 - DNA, 201 bp, Homo sapiens
ataagagacttaaagattctaagctattaaaaactccaagtctctgtttctttgcttttctcagtgcttcaaaacattccccacttcagtttcttagttgtttttttttttaattattactgattgttttgggggtgttttctctaagtgtccttcatttttcagttaaagtatttgtggcagataaactattttagtgac

SEQ ID NO: 434898 - DNA, 201 bp, Homo sapiens
ggtcaatgccgagataaatatctgtttagatctacagaataaattgattttcacactgacagtatatcgaagagaatctagatatcctaaggtgtttgctrcctagatctaggcacacagtattgattagaatgtttggaatcagcattccttagatgtttctttacagaaaaagtactgacttttaaaaaaggtaagtgt

SEQ ID NO: 434899 - DNA, 201 bp, Homo sapiens
ttgcacatccggacctgtttgtgaggtatttgactgaacatggtagtttccaacgtttacagatgttactcagcagctttctgccttttattttgcaggayagatggattccttgtcacctttcaaacatttctgggtattctgtggtattgaataatgtgtttacactggttgcctgtttgcttaaagttatatggtggc

SEQ ID NO: 434900 - DNA, 201 bp, Homo sapiens
ccaagaaaacagtttttaaaaaagaatgtttgaataggatacaaaatatattcaaatagttgcctgaacactgctcttcttcttttttttttttttttgcragagaatctagctctgtcacccaggctggaatgcagtggcaggatcatagctcactgtggccttgaactcctggctcaagttatcctcctacttcagccc

SEQ ID NO: 434901 - DNA, 201 bp, Homo sapiens
gcaggatggaaatgagacaggcttgtttcaatcagatggtatatatgtgatagcacaaagatttttaaaaattcaacttctagtttttgtttttttttttctaaaattttcctttggtttctcttttgtctgtttggtgtaattacttttctaagcacttgctgttgacctcagtcaccagtcagtctggtattaactgct

SEQ ID NO: 434902 - DNA, 201 bp, Homo sapiens
ttcagtaaaggtttaaacaaagattgttaagcttgaaagaatagttcttatactgacaatgtaattaagccacgtattcctccttaaatattttaatgaarttctaccacacacaggcatttaaagctactttccatcttccttattttccatctccagtcaccaggtcctgttatgtttgccttagtaatatttttcaga

SEQ ID NO: 434903 - DNA, 201 bp, Homo sapiens
gttttgtctgtctttatttttttgtttttgcttttaaatgtagcttaattaattattaacccttctaactaccaccttaagaaatagaattttgtcagctrtacctgaagcctctccacgtgccccaattaaataaattacatcccttatatgtctcctaaagtaatcacttcttacatttggttataacttttttaccca

SEQ ID NO: 434904 - DNA, 201 bp, Homo sapiens
ggattcaaacctatgctcttttcatcacatggtgctgcttgttcatgcctttccttccttgttactcttggctatactcatgtctgtctcttttaccatgscttaacctctttgcagctctagcttcactgctgttctctctcctaaacagcatagcatccttcctacactgactgtattagcaatgttttcatgctgtca

SEQ ID NO: 434905 - DNA, 201 bp, Homo sapiens
ccccacgcgacacaactttccggaagtaagcaaaatccgttatcaaggtgaaactccggggaccaggctccacagctgccataaactggatggcacgttaraagccggtgggtgtaggtgaggcacgctggcgcccgcgggcccttctccagccgctacccagtgggaatccgcggggctgaagccccgaaaccaggctga

SEQ ID NO: 434906 - DNA, 201 bp, Homo sapiens
tgtatcctgtaagaacttttatcaattgtcttgttatttcacagtgaaaagtcactctattcattgtggcttttctcgttaattcagtagcctttttgtawgctctttctcttctctatgaatttaatattgaaaatatcctcccttgggcaagatgtaaacatctatttaatctctgtgattggtacatagatgtcatta

SEQ ID NO: 434907 - DNA, 201 bp, Homo sapiens
atgaaatgggaaataaacagtagagagcataaaccaactgaactgtgattctgtgaaaaaagtaataaaataaaccctggttagattgggaggaaaaaaaygaaggcacaaataaataatattaagaatgaaaaaaagaaaagtacgtaatagtagagatgaaaaattgtcaggaagctactacaaatacattttgccaat

SEQ ID NO: 434908 - DNA, 201 bp, Homo sapiens
cctggggctgaattttactcagctcttcccttactgactctgacattgggcacatttcttaacttttatgaggataccgtgatataactggtacggttgtwatgaggcttagcaattatgtatgtataggaaacagtaactgctatggatgacaacgatgatgatgatgatgaatatggtagtgatactgcatctagattc

SEQ ID NO: 434909 - DNA, 201 bp, Homo sapiens
gattacaggcatgcgccaccatgcctggctaatttttgtatttttagtagagacagggtttcaacatgttgaccaggctggtctcaaacccctgacctcaggtgatccgcccgcctcggcctcccaaagggctaggattacaggtgtgagccgccgcacccggcctccggagaagttctgtacaacaaaactaaagtagta

SEQ ID NO: 434910 - DNA, 201 bp, Homo sapiens
ccacttagttccagacagttgtaggcttggaatgtttgcccattgttgtcagatcatccttttttttccaagagaagccagaaattaattaattaattaatttatttatttatttattttttgtgaatggggttgagtgtgtgtgtgtgtgtgtgaactctccagttttaggaacaattttttatgtagaccgaataaaat

SEQ ID NO: 434911 - DNA, 201 bp, Homo sapiens
acttagttccagacagttgtaggcttggaatgtttgcccattgttgtcagatcatccttttttttccaagagaagccagaaattaattaattaattaattwatttatttatttattttttgtgaatggggttgagtgtgtgtgtgtgtgtgtgaactctccagttttaggaacaattttttatgtagaccgaataaaatgc

SEQ ID NO: 434912 - DNA, 201 bp, Homo sapiens
ctcttaaaacacagatcctagattcagcttctgtgtttgtcccttccgcctcccagcacatctatgcccttaaggaaggcatagaatgtacctgtacatgrtactagagtgtcctgccagctcctctcctttagttctttctccttaagcaaaactagagtctcagtttcctcttttctgtgtctagcctgcttccagtgt

SEQ ID NO: 434913 - DNA, 201 bp, Homo sapiens
ttgttcctaggctacaagcctgtagagtattactgaagtaaatactgtagatagttgtaacacaatgataagtatctgtgtatttaaacatagaaaagatmcagtaaaaatatagcataaaagataaaaaatggtatgcctgtatagggcacttaccatgaacggagcttgcaggattggaagttgctctgggtgagtcag

SEQ ID NO: 434914 - DNA, 201 bp, Homo sapiens
ctggtggtgcatgagaaggggcggctgtctgtcaaatgagaggagcagagagcatcaaaaaccctagtattttctaatttatcctttttttttctttttcttttttttttttttttactggtttctagcttaaatttccactatggttagagaatatatgatttcagtcctttgatatttgttgagacttgttttagggtc

SEQ ID NO: 434915 - DNA, 201 bp, Homo sapiens
gtaggcaagttgagttttttccccctctagcttctctcaggatttttttctttatctttgattttcagtagtttgaaaattatatgcctagctgtcagggttttttgcttgtttgtttttgttttctcaggtgtgactccagaaaggttctaaagaggagctttacaatctcttctctggggtttatggagacttccttta

SEQ ID NO: 434916 - DNA, 201 bp, Homo sapiens
tgattcaggagaattgcttgaacctggaagatggaggtttacagtgagccaagatcgtgccattgcactccagcctgggcgaaagaatgagactccatctyaaacaaacaaacaaacaaaattgtaattctagtatcaggacagattggcccaatttagcaccattctaataagatctgctttattttagacctgtttgat

SEQ ID NO: 434917 - DNA, 201 bp, Homo sapiens
gtgatgcactacgtatagtccatactgaagacagacaagtatgtgtctgttcttattcatttggcagacattgataagtgcctactcttgtcagccctgartgaggcacacaatccttgcctttaagaatgtcttagtctagtcagggagactgacacaaagcaattaaaatattgtagttaagttctacaatagaaatat

SEQ ID NO: 434918 - DNA, 201 bp, Homo sapiens
ttcaagaccagcctgaccaacatggtgaaaccccatctctactaaaaaaatacaaaaaattagctgggcatggtggtgcgtgcctgtaatcccagctgccmaggaggctgattcaggagaattgcttgaacctggaagatggaggtttacagtgagccaagatcgtgccattgcactccagcctgggcgaaagaatgagac

SEQ ID NO: 434919 - DNA, 201 bp, Homo sapiens
tgtggccagatgtggtggctcatgccgtaatcccagcactttgggagaccgaggtgggcagatcacttgaggtccggagttcaagaccagcctgaccaacrtggtgaaaccccatctctactaaaaaaatacaaaaaattagctgggcatggtggtgcgtgcctgtaatcccagctgccaaggaggctgattcaggagaat

SEQ ID NO: 434920 - DNA, 201 bp, Homo sapiens
gccaggagttcgagtccatcctgggcaacataaggagaccttgtctcttaagaaaaatataaatatacgtgcgtgtgcgcgcacacacacacacttccatsggtaaattatgatcacaggtatgataatctattaataatagaataatctttctttagacctgttaactggctcataaaagccagttagcatgaatttact

SEQ ID NO: 434921 - DNA, 201 bp, Homo sapiens
gcccaaaccagtaaggactgcagatgttttatttgggcagcacagtgttctgttgacttgttttttgttttgttttaacaaggctttagattctttcaggwtgggtatgctgactccccagttccatatatatcttatgtcttggtcctatccacatattctctgcctggcatctgtagctatttgagcttgtgacacctg

SEQ ID NO: 434922 - DNA, 201 bp, Homo sapiens
tttcttagattcattgatgagaaaaaaataatttgtgtggctgtcatagcagtcttagctattactgtttatttttgattttccttgtttttaataaaagsactcaaaaaataatacagccaaaagtgaactgaaaaaagatgataatgttttgatattggggctttactgaagtgtgatgaaagtggttttgttattcaa

SEQ ID NO: 434923 - DNA, 201 bp, Homo sapiens
ttacctccaggtaatttgggaaaatgtttcttagattcattgatgagaaaaaaataatttgtgtggctgtcatagcagtcttagctattactgtttatttytgattttccttgtttttaataaaagcactcaaaaaataatacagccaaaagtgaactgaaaaaagatgataatgttttgatattggggctttactgaagt

SEQ ID NO: 434924 - DNA, 201 bp, Homo sapiens
gatcatgaggtcaggagttcgagaccagcctgaccaacatggtgaaaccatctctactaaaaataccaaaaaaaaaaaaaaattagccaggcatggtggtrcatgcctataaattccagctactcaggaggctgaggcaggagaatcacttgaacctgggaggcggaggttgcagtgagctgagatcacaccactgcactc

SEQ ID NO: 434925 - DNA, 201 bp, Homo sapiens
tgaagtcataaatgtgggcatttgggagggtagcatgagaagagcatttaattaaaaatagctatattgtgtttctttattttagagtactattaatcccrtagatgcaatatatcaacctagtcctttggaacctgtgatcagcacaatgccttcccagactgtgttacctccaggtaatttgggaaaatgtttcttaga

SEQ ID NO: 434926 - DNA, 201 bp, Homo sapiens
taagtacctcttgtctattaggagtgactgttagttttagtattaatggttttgttattttgcctttccagagtaatctctcttttatgtttcgagcagtycaagaaacttagaaatgaaaagatttggagaggttagcactttctctcaactacaagtaacagtgcactgttagagatgctaggtatgccaagataaata

SEQ ID NO: 434927 - DNA, 201 bp, Homo sapiens
aggggtaagatcctctattttgccacttgttttaggctacattagattgtactctatccctttttctggcttccttcattagtacttccttcataatgcayttccttctacagtatattagagctggaactttaggacagctccagtgtatgtcatctcttcagggcaagctttttctttccttcccccaccttctcccag

SEQ ID NO: 434928 - DNA, 201 bp, Homo sapiens
atttcactatgttggccaggctggtctcgagcttctgacctcaggtgatctgtccacctccacctcccaaagtgctgggattacaggtgtgagccaccgcrcccagcctgcattttcttaattcgtttaggcttagggtctttattttttctctgttttacagggatactatcagtgttagatactagatttatcttgttt

SEQ ID NO: 434929 - DNA, 201 bp, Homo sapiens
gatttttcagtgtcattggacattaccaaatgatactgaagagaacacagtgagttctgcattgacatttttaaattatcttaattgtatactgattcaakattttatttaggggcaaataataatgatgaaagcaatgatcaaaagatggtcaccacccatagaagaaattgttgttagagcagcatagtttgaatgtag

SEQ ID NO: 434930 - DNA, 201 bp, Homo sapiens
atcttacaatatgtggtcttttgtgactagcttctttcacttaacatcatgttttcaaaggttcatccatgtagagatcacttttgcctggaattttgaaygtgactacagttctacaggatatttccacgatgaacttagttaaatccctatatagaaaaataattgccatgctgttggtgttgattgttgtgtagccag

SEQ ID NO: 434931 - DNA, 201 bp, Homo sapiens
ttaaaatcaggcactttaaatggtcattcttacaggcaaagatagagactattaacatttttcaaggtagacacagatcaatttgatttatgtagtttttatagtcttgcataaaatagatgcaaataaatactgttgattacttagaatttgaggctttaattttgtcagttcctgttgattatcctaagtctagaccag

SEQ ID NO: 434932 - DNA, 201 bp, Homo sapiens
gcaaccacggcaagaccctgactctacaaaaaaattcaaaaattaaccagacatagtggcatttgcctaaagttccaactttactcgggcgttgaggctgyggtgagtcatgatcaagccactgcactccaacctaggtgacagaacaagaccctgtctcgagaaaaaaaagaaaagaaaaaagaaaacacagttgaaaaa

SEQ ID NO: 434933 - DNA, 201 bp, Homo sapiens
ggcgctgccggcgctggaaatcccaggggcacggcgaggagcccagctcctaggatcccgacatcgccagcgcggcagaggacgcggatcaggcctccccscaacccggcgtccctctacagtccggccgagtccacgcagcaagctgtactggaggacggccctgcacggctcgcagaagcccgcggagcccgtcgagag

SEQ ID NO: 434934 - DNA, 201 bp, Homo sapiens
tgctaaaaataaactcaagatggatcaaggatttaaatctaagacctgaaactataaaaattctggaagataacatcagaaaaacccttctaggccgggtrcagtggctcacgcctgtaatcccagcactttgggaggccaagatgggcggatcacgaggtcaggagatcgagaccgtcctggctaacatggtgaaacccc

SEQ ID NO: 434935 - DNA, 201 bp, Homo sapiens; identical to SEQ ID NO: 374168

SEQ ID NO: 434936 - DNA, 201 bp, Homo sapiens; identical to SEQ ID NO: 374261

SEQ ID NO: 434937 - DNA, 201 bp, Homo sapiens; identical to SEQ ID NO: 374263

SEQ ID NO: 434938 - DNA, 201 bp, Homo sapiens; identical to SEQ ID NO: 374292

SEQ ID NO: 434939 - DNA, 201 bp, Homo sapiens; identical to SEQ ID NO: 374156

SEQ ID NO: 434940 - DNA, 201 bp, Homo sapiens
agtaccagacctgggaggagttcagccgcgctgccgagaagctttacctcgctgaccctatgaaggcacgtgtggttctcaaatataggcattctgatggkaacttgtgtgttaaagtaacagatgatttagtttgtttggtgtataaaacagaccaagctcaagatgtaaagaagattgagaaattccacagtcaactaa

SEQ ID NO: 434941 - DNA, 201 bp, Homo sapiens
accctatgaaggcacgtgtggttctcaaatataggcattctgatgggaacttgtgtgttaaagtaacagatgatttagtttgtttggtgtataaaacagamcaagctcaagatgtaaagaagattgagaaattccacagtcaactaatgcgacttatggtagccaaggaagcccgcaatgttaccatggaaactgagtgaa

SEQ ID NO: 434942 - DNA, 201 bp, Homo sapiens
agtatatgaaaaggagtctgagaagtaaagctaagaaagaatggcattgcaggactcgcgtcggttggcgactcccggacgtaggtagtttgttgggccgrgttctgaggccttgcttctctttacttttccactctaggccacgatgccgcagtaccagacctgggaggagttcagccgcgctgccgagaagctttacct

SEQ ID NO: 434943 - DNA, 201 bp, Homo sapiens
ttgtcatgttgaacaacattttagcatggtaagttcccttagctatatgaattttggcatgtttcagagagatcagtaaataaaatattagataaaatataaaaaaaaaaaaaaaaagagaaagaatggcattgcagaagccaagtaggaaaatgtcagaggggaaggtcagctcttgctgtcattagccctgacttcagc

SEQ ID NO: 434944 - DNA, 201 bp, Homo sapiens
tttagtttgtttggtgtataaaacagaccaagctcaagatgtaaagaagattgagaaattccacagtcaactaatgcgacttatggtagccaaggaagccygcaatgttaccatggaaactgagtgaatggtttgaaatgaagactttgtcgtgtacttaggaagtaaatatcttttgaattagagaaagtgttgggacag

SEQ ID NO: 434945 - DNA, 201 bp, Homo sapiens
ggtgaacagtcattctacctggctgtagtgtagtatagtgtagtgtagtgtaggaaacatcagaggagtggagtgggatatgagcctggagagagctggcrgccatggatcattgaaagccttgaatgtctgatggggaggttgactttattttgtaggcaatggaaagccaccagtggttttagttgagcagcaatgaaa

SEQ ID NO: 434946 - DNA, 201 bp, Homo sapiens
gggcacagacaactgacaaaagaaacacttggattgttgtataagaggagtgagctttgtaaataccacgttagctggcctgctgtggaacagaatgcctrtgaatgacagtagtcaggtagtggatgaacactgatctgagagcctgtaaaagaaactctttggaatgataatgtcatctagacctttgatacgcaaagt

SEQ ID NO: 434947 - DNA, 201 bp, Homo sapiens
taccattgactaatacatgttctctgatgaactttgctattcaacatacatgcaaaggggttataaaaacaagtcaactctagtgctgatgagggtgatcwtcatcactgatcatggtgtcagttgattatagtgtcaatttataacttaatttatgtaaaatagagcaatgcaaaagacatagcaatcttcacttcaaat

SEQ ID NO: 434948 - DNA, 201 bp, Homo sapiens
gccacagcatcctgattaaggctatggaaagaagttgcagactgatgatgtcttagaagtaatgacattttttaaagataatatttctttggtgagataarcagattatattttacagtaaacacattttatatttcagttaataagacattgtatattaaataatcgcatttaatgctttacttttttcctgtgttaaaa

SEQ ID NO: 434949 - DNA, 201 bp, Homo sapiens
cccacctgattttgaggcctccccagccatgtggaactgtaagtccaattaaaccctttttgtttccagtctcagatatgtctttatcagcagcatggaarcgaactaatacaatcatagtttttaaaaaccaatctaaatgtaactattgaacatgattagctgtttcatccctagtagagtgacagaaggaaacatcca

SEQ ID NO: 434950 - DNA, 201 bp, Homo sapiens
ccatgctattcttgtgatagtgaataagtctcacgagatctgatggttttatcaggggtttctgcttttgctgcttcttcatttttctcttgctgctgccrtgtaagaaatgcctttcacctcctgccatgattctgaggcctccccagccaggtggaactataagtccaattaaacctctttttgttcccagtctcaggt

SEQ ID NO: 434951 - DNA, 201 bp, Homo sapiens
caaataaaaagttgggtaattagctatacattgtcctaaacgtataaaataagaaaaatacatagatgtatggtttcctaggacatctaccagtttagaakgcgaggctaatgtgggagctgccacagcatcctgattaaggctatggaaagaagttgcagactgatgatgtcttagaagtaatgacattttttaaagata

SEQ ID NO: 434952 - DNA, 201 bp, Homo sapiens
gcattagctggtacaattagcaggagtttatgagggcagaaaagtccatctggagagaaagagagaagcaaacatcagagaacagtacaggcagaaggccrtgctgctctggagcgaaggagaaaggagggtgccttcggttcacacaagttccccgttccaaggtccactccctggagaaaccagcttcccacctgtcct

SEQ ID NO: 434953 - DNA, 201 bp, Homo sapiens
aaaaacccattaaataatacctaaataatgggggttgcatactatgctcctggatagaaagtgttaataacataacgatgtcaaacaatgttgatctatataacagatgtaatttcaatataaatcccaatcaatttttttcatggaacttaatgaggttcttctaaaatctatatgaaataaagtagaaaaagagttaaa

SEQ ID NO: 434954 - DNA, 201 bp, Homo sapiens
gcaacgtgcctgccattcagccagcttgggacaggctttcactttcactcccatgaggaggcttccaggcagcctggttcccccatgtatagccattgccstctagcaggccaggcctcccagtgggaaggcctgggtccagggcatcttaagttcatccagcagctccatgagccacacagatatcctagaaaatattcc

SEQ ID NO: 434955 - DNA, 201 bp, Homo sapiens
ggaactcatgacaggctccttgcctccccttccttcttttggggccaagactgtgcaggacgatgggggctggctgagtctataggatcaatgacctctcrgaatccaccagggtcagtgagtttgaggaagtgaggaaggagcttgctgaccatccctgggagctttaatgtttacttctatcttgcagagtttttcact

SEQ ID NO: 434956 - DNA, 201 bp, Homo sapiens
cccagactgagcctggaatgatgcagctcagtcaaggagcagcagacctggcactggaacagggttgaaaacccagggttttgtacttggagaggaaagakgccaagctgcttcttaatcaatccaaatttcatttacagctctggaacactttggggctgatttgtctctttaggggacatccccaacatggttaattcc

SEQ ID NO: 434957 - DNA, 201 bp, Homo sapiens
aggaactcatgacaggctccttgcctccccttccttcttttggggccaagactgtgcaggacgatgggggctggctgagtctataggatcaatgacctctyggaatccaccagggtcagtgagtttgaggaagtgaggaaggagcttgctgaccatccctgggagctttaatgtttacttctatcttgcagagtttttcac

SEQ ID NO: 434958 - DNA, 201 bp, Homo sapiens
cttcactaacaccacttctattcaatattatactttagatcctagtcaatgaagtaggatttttaaaaattagaaagtataggtccggtgcagtggctcaygcctgtaatcccagcattttgggaggctgaggcgggtgaatcatctgaggtcaggagtttgagaccagcctggccaacatggtgaaaccctgtgtctact

SEQ ID NO: 434959 - DNA, 201 bp, Homo sapiens
tgtgcccagactgagcctggaatgatgcagctcagtcaaggagcagcagacctggcactggaacagggttgaaaacccagggttttgtacttggagaggaragatgccaagctgcttcttaatcaatccaaatttcatttacagctctggaacactttggggctgatttgtctctttaggggacatccccaacatggttaa

SEQ ID NO: 434960 - DNA, 201 bp, Homo sapiens
tttcctaattcttttctccttgtagccaaattttattccaattcttacctgggaagcaatcaagttaggttctgtttggtagttgttaacagaaagtttarcaaagggataaactttaggctttatagcctaaactttggcagattgtcttgtataatgtatattctatagactttttgttcttttacaatatatgttctt

SEQ ID NO: 434961 - DNA, 201 bp, Homo sapiens
gccacatttttctgataagttgtctggttattcaaagagaataaactgaatcttactcgtaagaggactcctaagccagtgctcattttactgaaacatgrgggcatagttctagagagtagcataaagttagaacattgtgacttattgctggacctgtggtgcccaccactgtctgcccagacctctgtgaactgaata

SEQ ID NO: 434962 - DNA, 201 bp, Homo sapiens
gcagcctggaaaggctagagtaacaggggctagggacagggaggagaaaggagccacctgaggccctgggcaggctacttggtgctccactgagcccacgmtctttaaatttggactccatatttgcgggagaggtgagaccatctactaagtgaggggaggaaagagaagggtttgctgttcccctgtcctcctggccac

SEQ ID NO: 434963 - DNA, 201 bp, Homo sapiens
caactgaatattagctttagaataggaggagaccctgccatttgccatgtttgtcctatttggacctggagaacattatgctaagtgaaataagccagacmcaaaaagaagaatattgtgtaatctcactttcttgtggaatttttttttttttttttttttttttttttttttttacaaaaagcattattaaaaggagta

SEQ ID NO: 434964 - DNA, 201 bp, Homo sapiens
taaggctggattgaaatatgcatgtgactaagccatgtagctataaagtgagggatgacttgtgttttggatcacttattttaattctacttataatccayggcttagaatatttaaacattgtttctattaaactagaaaggttcagcatttctgtcatttacttctgctatgatacacaagaacttatgttggaatgaa

SEQ ID NO: 434965 - DNA, 201 bp, Homo sapiens
gatagacaccatgatagaatcacaagggaatctatatcctccccatccaatccacccctccaatgccagactgttctggggactatgcttagaaatcaaargccacctagactcatatccaacaaggttccatggttgtgacacaactgtgtcatgtggactctgggttctaattctattctctatttattgacattcaag

SEQ ID NO: 434966 - DNA, 201 bp, Homo sapiens
ataaagggaagtgtctgctacttagttgccagtcaaaatgttagttctctctctctaccaccttcttcctacctcttcccatattgcttgcctgataaaayagctaatcaccagcatttgttccccatagtcacagggccacacaagggaacatttaggacaaactttctccatggcctatgatccaaattgttatctaaa

SEQ ID NO: 434967 - DNA, 201 bp, Homo sapiens
atcctttgcccatttttctacttgatcattactctttccaacagatttaaactgtgtaaattaagtcctatgaaagtaagtcatttgtcatgtgtgttacaaacatttttgcacagtatttcattacccttttgattttgtatatgacgtttatgatccatgcagattttttgttttatttttattctattgaatttttcc

SEQ ID NO: 434968 - DNA, 201 bp, Homo sapiens
ttggttatactctctatataccattcacacagtaaacaagctaagtgtttgaaagcctttcaccaaaagaagcacagtatgagcacatgtagaaaagagakgaccaagaggaagctcaagcacaaaggaggttctcagtgcatttttattggctgaacagaaattcaagctccctttaatattagacaatcaatttaatat

SEQ ID NO: 434969 - DNA, 201 bp, Homo sapiens
gtgcatgaccgttaccgtcctactatagaaatggaaagaaggaggggattgtggtggcttgtgcccagactgagcctggaatgatgcagctcagtcaaggagcagcagacctggcactggaacagggttgaaaacccagggttttgtacttggagaggaaagatgccaagctgcttcttaatcaatccaaatttcatttac

SEQ ID NO: 434970 - DNA, 201 bp, Homo sapiens
tgggggctggctgagtctataggatcaatgacctctcggaatccaccagggtcagtgagtttgaggaagtgaggaaggagcttgctgaccatccctgggarctttaatgtttacttctatcttgcagagtttttcactgaacttcaccctgccggcgaacacagtaagtacagcagcccccattcaccaggcaacgcagag

SEQ ID NO: 434971 - DNA, 201 bp, Homo sapiens
tgcatgaccgttaccgtcctactatagaaatggaaagaaggaggggattgtggtggcttgtgcccagactgagcctggaatgatgcagctcagtcaaggagcagcagacctggcactggaacagggttgaaaacccagggttttgtacttggagaggaaagatgccaagctgcttcttaatcaatccaaatttcatttaca

SEQ ID NO: 434972 - DNA, 201 bp, Homo sapiens
tgcctcatgtcataattgaaaagattaaataagaaataaagggaagtgtctgctacttagttgccagtcaaaatgttagttctctctctctaccaccttcytcctacctcttcccatattgcttgcctgataaaacagctaatcaccagcatttgttccccatagtcacagggccacacaagggaacatttaggacaaact

SEQ ID NO: 434973 - DNA, 201 bp, Homo sapiens
gatctttcaggtaattcaggtgtgaaacatgattcttttggattctttaatgtttcacaactttcctattgttggataacatttaattttaaaacttaatraatgcattgtttctacaatgacagaatctggtcttgggatgctggaaagacgggaagctgtggtgtagaccaagcccagggaaatatctgggggtcaggg

SEQ ID NO: 434974 - DNA, 201 bp, Homo sapiens
gcatgaccgttaccgtcctactatagaaatggaaagaaggaggggattgtggtggcttgtgcccagactgagcctggaatgatgcagctcagtcaaggagcagcagacctggcactggaacagggttgaaaacccagggttttgtacttggagaggaaagatgccaagctgcttcttaatcaatccaaatttcatttacag

SEQ ID NO: 434975 - DNA, 201 bp, Homo sapiens
gctgtggcactgatcttgaaaaaacaaaaacaattttttaattataatttcaaacatatactaaagtagagaggatagtataatgaacccaattattaacycatggccaatattgtttcatctctactctcaccctggattatttttgataactcacaatgatatttcttggcttaggtatgggtttggtttggtttgagg

SEQ ID NO: 434976 - DNA, 201 bp, Homo sapiens
aattattttcctatatgcaaaataccaataattttttaaacttctcacctaatatttgctgatcttgtctttcattttggtattaaggtttgtttttaaamccccacatacaagagtacagagtagatgtttcacctatgttccctttctagttgaagcaatggatctaatcaacgattttatctgtcttacttgtttaat

SEQ ID NO: 434977 - DNA, 201 bp, Homo sapiens
ttattgaagactctgggcttcctctgaccctgtgtttttcattctgtgccaggactgtgggccctctcttggattagcggcgggcataccattgctggtgkccacagccctgctggtggctttactatttactttgattcaccgaagaagaagcagcattgaggccatggaggtgattactagcttctttgggtccagatg

SEQ ID NO: 434978 - DNA, 201 bp, Homo sapiens
tgttttaatgtacactcagatttaaaaagcactgattttaatcatagttacggtcaaatgctataacccttcacttcttcttctttctttcttttattatyatattttttccaatttaggaaagtgacagaccatgtgaaatttcagaaattgatgacaatcccaagatatctgaggtaagaactcttggttatactctct

SEQ ID NO: 434979 - DNA, 201 bp, Homo sapiens
aatgccagtgccctgggaagtgggacagaggtgggcacctggatccctctctgcgggaagtttggaacagggctccctgctggccagtccctgctgaggastgaaatgccaggttcagtctatttgtcagttcagtccatactgaactgtcaagtatgaaaaatgggactaagacactgcattaggccatggaggccatgt

SEQ ID NO: 434980 - DNA, 201 bp, Homo sapiens
aaaggaggggaaatatttgcctcatgtcataattgaaaagattaaataagaaataaagggaagtgtctgctacttagttgccagtcaaaatgttagttctytctctctaccaccttcttcctacctcttcccatattgcttgcctgataaaacagctaatcaccagcatttgttccccatagtcacagggccacacaaggg

SEQ ID NO: 434981 - DNA, 201 bp, Homo sapiens; identical to SEQ ID NO: 137671

SEQ ID NO: 434982 - DNA, 201 bp, Homo sapiens; identical to SEQ ID NO: 137689

SEQ ID NO: 434983 - DNA, 201 bp, Homo sapiens; identical to SEQ ID NO: 137690

SEQ ID NO: 434984 - DNA, 201 bp, Homo sapiens; identical to SEQ ID NO: 137691

SEQ ID NO: 434985 - DNA, 201 bp, Homo sapiens
ttaataagttttcctagcttttgattttttttttttttagctttggccttatcctttttttaggtagtggctggcattatggattaattacttaatacacytttgttgccttagaattcactgagctgaaatggagtgagagctaagatgctctcagaatattcttaaaatgactgtgctgcaaagaagcccgggtgaata

SEQ ID NO: 434986 - DNA, 201 bp, Homo sapiens
ggcacatgccactgcgcctggctaatttaaaaatgtttttgtagggaatagggttctcactttgttgcccaggctggtcttgaactcctgagctcaagcartcctcccacctcggcctcccacagggctgggattacaggtgtgaaccactgcacccagcctctttttgtatttagaaatgtttgtgctattttgttctga

SEQ ID NO: 434987 - DNA, 201 bp, Homo sapiens
gtggcgccatcatagctcgttgcaacctcaaacttctggactcaagggattgtcctgcctcagcctcctaaacagctgagactacaggcacatgccactgygcctggctaatttaaaaatgtttttgtagggaatagggttctcactttgttgcccaggctggtcttgaactcctgagctcaagcagtcctcccacctcgg

SEQ ID NO: 434988 - DNA, 201 bp, Homo sapiens
tgttctctctctctcattatctttttgttttgtgttttctttctgagacagggtctcgctctgtcatctaggctaaagtgcagtggcgccatcatagctcsttgcaacctcaaacttctggactcaagggattgtcctgcctcagcctcctaaacagctgagactacaggcacatgccactgcgcctggctaatttaaaaa

SEQ ID NO: 434989 - DNA, 201 bp, Homo sapiens
tgtacatatctcagctacttcggcacacttatacatggacgtgtgccttcttcagatcacctttgactcaatacacacacttgtgctccatgacacggaaktgacaagatacaatgtgaatgattaactttgcaattaatattttctatattattttctataatatagaaaatgcatttgcttttggagcaggacagacag

SEQ ID NO: 434990 - DNA, 201 bp, Homo sapiens
cccgggtgaatagaagaaaatagaaggaatggtggatacaagtgaaggttaaaatgaggtaggaactaaatattatactggcacttggggttagtatttaygaattgttactctctggcaatgctctactcttttgtatcttcttcgggacagaaaattccgtaagaaagacctttccaggaagagcttgtccctaagctt

SEQ ID NO: 434991 - DNA, 201 bp, Homo sapiens
taaaattccttcttcatttattagatggagtacttttatcaagagaaacatctcatcaactgcttggttacttggaataatatgtatagggaagttagaamaaatgtttgatctcttccttttatttgccagtttttaaaataatgattttggtttccttgcattttccaaggatgatcaataatattttattttaacagt

SEQ ID NO: 434992 - DNA, 201 bp, Homo sapiens
tttaaaattccttcttcatttattagatggagtacttttatcaagagaaacatctcatcaactgcttggttacttggaataatatgtatagggaagttagracaaatgtttgatctcttccttttatttgccagtttttaaaataatgattttggtttccttgcattttccaaggatgatcaataatattttattttaaca

SEQ ID NO: 434993 - DNA, 201 bp, Homo sapiens
tcacactgtctccacgtcatgtacatatctcagctacttcggcacacttatacatggacgtgtgccttcttcagatcacctttgactcaatacacacacttgtgctccatgacacggaagtgacaagatacaatgtgaatgattaactttgcaattaatattttctatattattttctataatatagaaaatgcatttgct

SEQ ID NO: 434994 - DNA, 201 bp, Homo sapiens
tatgataacattccgctaaaacaggcaaattattgtgttttacggtcacttgggaatagtccctttggtgctgttctgccacctactggacagacaggctmaataggcttattttacttttgatattcaggaatcactttattttaaattgaattttgctttgtaataatgcaaagttttacatgactctagagtcaaatt

SEQ ID NO: 434995 - DNA, 201 bp, Homo sapiens
ggtgtgtattttacgtgtacagaacatctcaatttggcctatccacatttcaaatgctcagtagccacatgggattagtactgaatacagtagacccaggkacatcatcagactgaggttcaatttttggccaaaataccccacaggtggtggtgtgtacctccatacagaagcatatgtctggtggcttttttgtgatgt

SEQ ID NO: 434996 - DNA, 201 bp, Homo sapiens
aaagtcacactgtctccacgtcatgtacatatctcagctacttcggcacacttatacatggacgtgtgccttcttcagatcacctttgactcaatacacayacttgtgctccatgacacggaagtgacaagatacaatgtgaatgattaactttgcaattaatattttctatattattttctataatatagaaaatgcatt

SEQ ID NO: 434997 - DNA, 201 bp, Homo sapiens
ttgcagttgtttttgtcattatgataacattccgctaaaacaggcaaattattgtgttttacggtcacttgggaatagtccctttggtgctgttctgccayctactggacagacaggctcaataggcttattttacttttgatattcaggaatcactttattttaaattgaattttgctttgtaataatgcaaagttttac

SEQ ID NO: 434998 - DNA, 201 bp, Homo sapiens
tagaagactaccaccagcaaaatgattacaaaaatcagcttaagatactttgcagttgtttttgtcattatgataacattccgctaaaacaggcaaattaytgtgttttacggtcacttgggaatagtccctttggtgctgttctgccacctactggacagacaggctcaataggcttattttacttttgatattcaggaa

SEQ ID NO: 434999 - DNA, 201 bp, Homo sapiens
tgaaatgattagaattaaatagaattcttatatatttgtatttactcatctctctgtatttccggtggggggatagagttcaaggaaaagtttaagagacrtggttggtttatttcaggagtccaaaccttatgctaatgaggaagctttgtcaggggaatttcagatattggccagtggcagtggtgggaaccttggggt

SEQ ID NO: 435000 - DNA, 201 bp, Homo sapiens
gggagaaagggagggggtgagggtggggcaaggagagcaatattttataaaagtgacaacgcgttttgcatttgaattattatttattttccctggtggartttcaagcaggttattgcaaggaaaggaaaaactggaaattaaccaaacgtggtccagactggggatgacgagtttagcaggggctttaatgggacctcc

SEQ ID NO: 435001 - DNA, 201 bp, Homo sapiens
gcctgtccacagctctagtgcccataggcttggggaccccgttccttcccttcatctgactcttcaggcctagagtggcgagggcttcccactgtgcttgkctctgggtacctcggcctctctggctgtattttcttaaccctgctccctgctctataaacagacccttctctaaattcacctcaactctcttaatgggat

SEQ ID NO: 435002 - DNA, 201 bp, Homo sapiens
tgtatctgaggaattataataacatatcaggaacaaaggttcccaaaaaacttgcttatagaaaatattagatgcatacttattagagggttcttttgggyggttcttcagagtcaaaggaatatagaaaatatttattttttagatttatttttccttatttgaaatttcaaagcaaaattatatgcacattttttctta

SEQ ID NO: 435003 - DNA, 201 bp, Homo sapiens
acagggcactggggacaatcaagagaaagagtagactaggtgagaaaaactctcactaaatctccaatgcccttcagattctgcatggcttgggacaaaaygcttgagattgaaataaaggactgattgactattttcagggtgtcccaggatggcctgaactggataatagagaatttatggtatactgtaccatctata

SEQ ID NO: 435004 - DNA, 201 bp, Homo sapiens
ttcatctttacccatagtaattttgttcaatgtgatttaaatgtgtttgcaaaaggaagggcatctcctaattcctagctgaataccagagctttgcttaratgtacaggtgtttctgccacatagctttcctactcctttccggaaaggaaaaaaaccaaaacgctcagcaattttcactgcactgttctctctctaggg

SEQ ID NO: 435005 - DNA, 201 bp, Homo sapiens
ctagagatttagagctgccttttctgttatttttggatgtgtttacaagtatgtatctgctatctgttggctctttgctcttccctccacttgcatctgcrtcttctttcttttgcctcctttgctcctatcatctatttcctgctcaatttggattctattccagtagtttctcctcaatgtggggttttgctgtggagg

SEQ ID NO: 435006 - DNA, 201 bp, Homo sapiens
tgcttctccctcccaggacccggtccctatgctcctggagggaagggagttgctggccatggttacccagttccctggagcagcctagcttgcgtccttgytggtggacagcactgtcttttcttagtgagtccagcagagttgggaaatggaaactatatcatgtgagaaagtaaagctgcatgggatgagaaggagaag

SEQ ID NO: 435007 - DNA, 201 bp, Homo sapiens
tgccttacatttctactcttttcctatgtggtcaatatcaaggctgctccatgaactgtttgctaccaagctatgatgacttgtgaatagaaagtaacaamaacaacaacaacaacaaaacacatttagaaacatttaaagtaatttgatattgccactaaattcaagcatatgattttgtatatttcaagtgtcgcttac

SEQ ID NO: 435008 - DNA, 201 bp, Homo sapiens
tgtagcataaagtcactactcatgcccttaaaataggcaacaacaatgtaattttagaaaatgttaataagttttcctagcttttgattttttttttttttagctttggccttatcctttttttaggtagtggctggcattatggattaattacttaatacacttttgttgccttagaattcactgagctgaaatggagtg

SEQ ID NO: 435009 - DNA, 201 bp, Homo sapiens
tttgcaaaatgtagcataaagtcactactcatgcccttaaaataggcaacaacaatgtaattttagaaaatgttaataagttttcctagcttttgattttwtttttttttagctttggccttatcctttttttaggtagtggctggcattatggattaattacttaatacacttttgttgccttagaattcactgagctga

SEQ ID NO: 435010 - DNA, 201 bp, Homo sapiens
gcttgggattgggttgtgcacaggaaggctgcaaaaagattacaaaatagcctccccctggcagaaatgtaaaaaagccattccatgatttttttttttttcagttctgccaacgatttatcttcagaagacaagcagatgaggagacaaaacctactgatgtgggtacccaagcaggaacccccctcttgcaccggcgac

SEQ ID NO: 435011 - DNA, 201 bp, Homo sapiens
ctatatgtatatgaaatatagtgatggattctctttcacaggaatttcctcaatcatcctaatctagtgattcttccctcctctgatctcctacaacacakacttttcattgctaatgtcttatgacaactcttctgtagttatcttgactactttttatattatattattggttactatttaactttcttttcctgatgg

SEQ ID NO: 435012 - DNA, 201 bp, Homo sapiens
ctcctattcctattttctatgcctttttcatatgtatgttttaaatctttttattttaaaaatattcattcttttctatttttcttaaggaactttctgcrgtgttcattcactattttatttcttctagtgtagtctaaaattttggaataagttttttcttcaactcttaatatttttctatttctataaactcctttt

SEQ ID NO: 435013 - DNA, 201 bp, Homo sapiens
aattataattgataatatttgttctttcattacattgattttcttttttaggaacttctattatatgttcatttgttctcctattcctattttctatgccwttttcatatgtatgttttaaatctttttattttaaaaatattcattcttttctatttttcttaaggaactttctgcggtgttcattcactattttatttc

SEQ ID NO: 435014 - DNA, 201 bp, Homo sapiens
ttgtagggaatagggttctcactttgttgcccaggctggtcttgaactcctgagctcaagcagtcctcccacctcggcctcccacagggctgggattacargtgtgaaccactgcacccagcctctttttgtatttagaaatgtttgtgctattttgttctgagccctttttattaacatcttcatattatctataatttt

SEQ ID NO: 435015 - DNA, 201 bp, Homo sapiens
agaaaattcattgcatatttaaaaagcgagagaacttagctgtctgcctgttctgagtctgaggtgtaaatgtttacctcatcatacattaagtatctatrgattatgctcaatactttttgcaaaatgtagcataaagtcactactcatgcccttaaaataggcaacaacaatgtaattttagaaaatgttaataagttt

SEQ ID NO: 435016 - DNA, 201 bp, Homo sapiens
tgttttggaagagtccagaggagaactttgatttctagaaagaccaaatgagaaggaacagatacagtctccagagttccaattatagtgtagctattctmagcaggattccaatccaacgtggatttttttctagcctgcggaggacatcttcaaacgcccagggctgacatttagctgttacccatctggtatgattgt

SEQ ID NO: 435017 - DNA, 201 bp, Homo sapiens
agcttgggattgggttgtgcacaggaaggctgcaaaaagattacaaaatagcctccccctggcagaaatgtaaaaaagccattccatgatttttttttttttcagttctgccaacgatttatcttcagaagacaagcagatgaggagacaaaacctactgatgtgggtacccaagcaggaacccccctcttgcaccggcga

SEQ ID NO: 435018 - DNA, 201 bp, Homo sapiens
acagtattattaggaattcgtgaatgttaatatttgatgtgcctcagttcattgcagagttaacttaattgcagagttctgatatcaccaaagccgtttaygatattccaggtccgtcttgtacacttccttccacagacctctaatcagctatttcttcagggagcctttgattccttttagtggaaaatggtatgtaga

SEQ ID NO: 435019 - DNA, 201 bp, Homo sapiens
tatgaaatttgttttgaatttttttcttaagtgtcattttctataattactaaaaccttcatatgatgattaaagagtaaagtggtttcactattgcttgyatctgaggaattataataacatatcaggaacaaaggttcccaaaaaacttgcttatagaaaatattagatgcatacttattagagggttcttttgggcgg

SEQ ID NO: 435020 - DNA, 201 bp, Homo sapiens
ttccttttatttgccagtttttaaaataatgattttggtttccttgcattttccaaggatgatcaataatattttattttaacagtattattaggaattcrtgaatgttaatatttgatgtgcctcagttcattgcagagttaacttaattgcagagttctgatatcaccaaagccgtttacgatattccaggtccgtctt

SEQ ID NO: 435021 - DNA, 201 bp, Homo sapiens
gctatgatgacttgtgaatagaaagtaacaaaaacaacaacaacaacaaaacacatttagaaacatttaaagtaatttgatattgccactaaattcaagcmtatgattttgtatatttcaagtgtcgcttacaaattattggggggaaaaagtggcccttcactacagagtctgagaagcacttgcctacattatttgctt

SEQ ID NO: 435022 - DNA, 201 bp, Homo sapiens
cagacagacttgtgatttggtgctggtaattaacttctctgaacatcaatgggggtacctctcagagacgtggtgaggtttccatgggatagcctgtgatmagttcttattatctacatgcctgacacatggtaagcccttaagacattcattccatttatagcccttcttctcctcatcattaagtcttttctctccagc

SEQ ID NO: 435023 - DNA, 201 bp, Homo sapiens
acaaaattgatatatatttgtattttttatcccgtctcctttattagataattggtagcatactatacagacttttctccacctgaaagaaacatatataktattattaaaagtttatatgtatataacctggagtgttgggttttgctttgttaggtaatctggaaatctttttataaatgtaaatttaatcagtaaatt

SEQ ID NO: 435024 - DNA, 201 bp, Homo sapiens
atgtccattagtatatatttgtatataatttgtatacaaattatacaaaattgatatatatttgtattttttatcccgtctcctttattagataattggtmgcatactatacagacttttctccacctgaaagaaacatatatattattattaaaagtttatatgtatataacctggagtgttgggttttgctttgttagg

SEQ ID NO: 435025 - DNA, 201 bp, Homo sapiens
cccagtgattgcatcactgcctcagctccaccttggatcatcaggcattagattctcataaggagcgggcaacctagatcccttgcatgcacagttcacartagggttggcgctcccatgacaatttaatgctgctgctgatctgacaggaagtggagctcaggcagtgatgcaaatgatggggagcggctgcaaatagag

SEQ ID NO: 435026 - DNA, 201 bp, Homo sapiens
ttatagagcagaaaagatatatgagatgaggaataaaaggttctgtctaaaagcctgacatgtgtaagactttccctccactgttgttttccttttggttyggtaagaatgtggtgagtgaagtaaaaagataaggagagaagaaccacagagacccccttgaagcgtaaaactctgtttattaagagtgagaatgttcag

SEQ ID NO: 435027 - DNA, 201 bp, Homo sapiens
gtgttctctcgctttggtgcaacgtgagtaaaaaaaaaaaaaccaccaagatttactttcaatatatacactgtattcatcagtgttttgctatagagaaygtaagatatctttctgtaaattatttagatatttaatcttatttatttatttatcccaataagatattaaagcatgctaagctggaatgattttttttca

SEQ ID NO: 435028 - DNA, 201 bp, Homo sapiens
gaaaatgataaaaatcaaccagaaaagaaattcatgggcaagaaaagtattttctaaaatctgtctccgtagagaaagatgccagcttgggtcgctccccstcacccctaggctcggttaaacagtttggtcaaaggaggacagaaaagtccttatgagggcctcaagttgcagagttttctaaagcctgagttttactgt

SEQ ID NO: 435029 - DNA, 201 bp, Homo sapiens
ttatgaattgttactctctggcaatgctctactcttttgtatcttcttcgggacagaaaattccgtaagaaagacctttccaggaagagcttgtccctaarcttatgggctcagggtttgaacaaagcgtctcttccaagaccttgtgaataatatgcatgtgggccacgtaacttcacaaagtaaagttaaacgaatgca

SEQ ID NO: 435030 - DNA, 201 bp, Homo sapiens
gtatgcttgtaacaacttaggtatctgaatctatttttttcaaatgtaaattttaagatatctatttagattaaatattcctaataaaaatatagcatttkaattgcataggctataagtgaaaaatgtacagcacatttcaaatgtttagtacaaagccaaaagaatgtaatatttctcattaataattgttatatttag

SEQ ID NO: 435031 - DNA, 201 bp, Homo sapiens
ctgactgcccaagcagcctgaagaatcacagagatactttctggttggtattgcccttctcccttctccccagagctatgcctgatttgggctgagacagyggaaaatacacaatgcatgtttcagacattcctgctttaatatgttaatatctcacccactctccagaccaggaatctcatatcttgtcctactcttttc

SEQ ID NO: 435032 - DNA, 201 bp, Homo sapiens
tatatatttgtatttactcatctctctgtatttccggtggggggatagagttcaaggaaaagtttaagagacgtggttggtttatttcaggagtccaaacmttatgctaatgaggaagctttgtcaggggaatttcagatattggccagtggcagtggtgggaaccttggggttagcatccttgaaataacaccgcagagg

SEQ ID NO: 435033 - DNA, 201 bp, Homo sapiens
gtgaagggttgagcacgttccatcttttcagagaacaaagctagaaaacatgtattttaataaaataatattcatcatgaattcatgatgtttcctattcraattcaagtagaggacttttttcacagtgtccttttccctgtcaaatttcaaattttattgacatgaatataattattcatttgctgtattcataataca

SEQ ID NO: 435034 - DNA, 201 bp, Homo sapiens
agaattaaatagaattcttatatatttgtatttactcatctctctgtatttccggtggggggatagagttcaaggaaaagtttaagagacgtggttggttyatttcaggagtccaaaccttatgctaatgaggaagctttgtcaggggaatttcagatattggccagtggcagtggtgggaaccttggggttagcatcctt

SEQ ID NO: 435035 - DNA, 201 bp, Homo sapiens
tatagttttttactgatgtcttgctcagactttttcagtaaatattgaaatgattagaattaaatagaattcttatatatttgtatttactcatctctctstatttccggtggggggatagagttcaaggaaaagtttaagagacgtggttggtttatttcaggagtccaaaccttatgctaatgaggaagctttgtcagg

SEQ ID NO: 435036 - DNA, 201 bp, Homo sapiens
aaatgcgagagaatttaaaaagtaggattgtttgtctccaaagacctgtattttcatacgggcagaatgccggatatttgcccccatcagacgaaagggtmttttattgatgagaacactcagttttcctctgcacttgctccactgtcaccttttgtgatttgattcaaagctagcaaggaaaaggacacacttcagcac

SEQ ID NO: 435037 - DNA, 201 bp, Homo sapiens
atgtttcctattcaaattcaagtagaggacttttttcacagtgtccttttccctgtcaaatttcaaattttattgacatgaatataattattcatttgctktattcataatacacatgtgcaacagtctcgaataaatagaagactaccaccagcaaaatgattacaaaaatcagcttaagatactttgcagttgtttttg

SEQ ID NO: 435038 - DNA, 201 bp, Homo sapiens
cagggtgcagcatcttttaagtgggcttaagacccacttaaaagcttatcatagcgagatgttgagaagataaagttttagttttttatagagcagaaaakatatatgagatgaggaataaaaggttctgtctaaaagcctgacatgtgtaagactttccctccactgttgttttccttttggtttggtaagaatgtggtg

SEQ ID NO: 435039 - DNA, 201 bp, Homo sapiens
ctcccaggacccggtccctatgctcctggagggaagggagttgctggccatggttacccagttccctggagcagcctagcttgcgtccttgttggtggacrgcactgtcttttcttagtgagtccagcagagttgggaaatggaaactatatcatgtgagaaagtaaagctgcatgggatgagaaggagaaggttctgagg

SEQ ID NO: 435040 - DNA, 201 bp, Homo sapiens
cctgtcaaatttcaaattttattgacatgaatataattattcatttgctgtattcataatacacatgtgcaacagtctcgaataaatagaagactaccacyagcaaaatgattacaaaaatcagcttaagatactttgcagttgtttttgtcattatgataacattccgctaaaacaggcaaattattgtgttttacggtc

SEQ ID NO: 435041 - DNA, 201 bp, Homo sapiens
acagatacagtctccagagttccaattatagtgtagctattctcagcaggattccaatccaacgtggatttttttctagcctgcggaggacatcttcaaaygcccagggctgacatttagctgttacccatctggtatgattgtaccttgttaaaatcacttttataccagttggtaattacctattgtcctgagctcccc

SEQ ID NO: 435042 - DNA, 201 bp, Homo sapiens
tgcagagttctgatatcaccaaagccgtttacgatattccaggtccgtcttgtacacttccttccacagacctctaatcagctatttcttcagggagcctktgattccttttagtggaaaatggtatgtagagaacattatctgtgtgtgaagggttgagcacgttccatcttttcagagaacaaagctagaaaacatgta

SEQ ID NO: 435043 - DNA, 201 bp, Homo sapiens
tccttttgaagtctttgttttttcaaattagcttctttttgagttcttaaaattctgggttatgctgttctttaaaagctgctatcttttttttcagcttgagttaaaatattaggctaaattttcttctgttttgtttgcaaatctttctggcatgcttttattgtctgcagagacattacattcctcaaatcatttttc

SEQ ID NO: 435044 - DNA, 201 bp, Homo sapiens
aataagttttcctagcttttgattttttttttttttagctttggccttatcctttttttaggtagtggctggcattatggattaattacttaatacacttytgttgccttagaattcactgagctgaaatggagtgagagctaagatgctctcagaatattcttaaaatgactgtgctgcaaagaagcccgggtgaataga

SEQ ID NO: 435045 - DNA, 201 bp, Homo sapiens; identical to SEQ ID NO: 151190

SEQ ID NO: 435046 - DNA, 201 bp, Homo sapiens; identical to SEQ ID NO: 151014

SEQ ID NO: 435047 - DNA, 201 bp, Homo sapiens; identical to SEQ ID NO: 151269

SEQ ID NO: 435048 - DNA, 201 bp, Homo sapiens
ttgaatgagtctgagttgtagactaaaaaaaggaaaggtaaaaagttagaaaagacttcctcaaaactgttgtctcttaccttgataagtagccttcccaraaacccttaacacttctacttagatcttattgtacagaacttagtcacgtggccacacctagctacaagggaggctgggaaaggcaatattttggctgaa

SEQ ID NO: 435049 - DNA, 201 bp, Homo sapiens
tgattgtttgcactctgaaaagagcacttcatgcaagaaatgggcctttctcccattgtcctttgtgggtagtcctatatccagatctgctgtgctatagsatgggagaaaagggttgccacttctttttttttttttttcctctggtatttgctgtcagagaaccctaactgggaatcaatggacaagaaacaggttccg

SEQ ID NO: 435050 - DNA, 201 bp, Homo sapiens
gtaaaaagttagaaaagacttcctcaaaactgttgtctcttaccttgataagtagccttcccagaaacccttaacacttctacttagatcttattgtacaraacttagtcacgtggccacacctagctacaagggaggctgggaaaggcaatattttggctgaattcattgctgcctcaatatatttgagattgtgttacc

SEQ ID NO: 435051 - DNA, 201 bp, Homo sapiens
tgttggccattttcaaaaccagcaataatgaaaagactaattggatgaatactatctttctaatgaatttgtgattaaatatataatagttgttgaaaatkagtaactttgcgttctccccctaggttgttcttagatgcctggcttatgtgttgacaaagtaaagttttctgttctgagcaaagttatgattataaaaag

SEQ ID NO: 435052 - DNA, 201 bp, Homo sapiens
ttatatagttcagtggcattaagtacatttactgtgttgtgcaaccattatcaccatccatctttagaacttttaaaaaatcttcccaaactgaaattctrtacctattaaaaaatgactcattctccctgctcccagtccctgacagccaccattctactttctgtttctgtgaatttcactactctagttacctcgtat

SEQ ID NO: 435053 - DNA, 201 bp, Homo sapiens
tcttattaccaaataatattccattgtatggatgtaccaattttgtttatccatttatcagttgataggtgtttgtgttgtttctactttttggctattaytaataatgctgctatgaacattcatatgcaaagttttgtgtagacaaatttttttttctttttctttttttttttttgagacagagtctcactctgttac

SEQ ID NO: 435054 - DNA, 201 bp, Homo sapiens
gcaacgcgggagactgaagcacgagaattgcttgaactcaggaggtggaggttgcaatgagccaagattgcatcattgcactccagcctgggcgacaaagygagactgtgtttcaaaaaagtgaggctgggcacgtggctcacgcctgtaatcccagcactttgggaggctgaggcaggcggatgacctgaggtcaggatt

SEQ ID NO: 435055 - DNA, 201 bp, Homo sapiens
gttttgtgtagacaaatttttttttctttttctttttttttttttgagacagagtctcactctgttacccaggctggagtatagtggtgcaatctcaactyaccgcaacctccatctcctgggtcaaacggtgctcatgcctcagcctcctgagtagctgggattacaggtgcacaccaccacacccagctaatttttgta

SEQ ID NO: 435056 - DNA, 201 bp, Homo sapiens
cagaaaattagaagaagataggaatgtttctagaagcaggcccacctacagcagtgagaagtgagagctgataaccataatagcaagggaggaaacaaaagcactataaaaagcaaacataaataatggaaaaactgcatcaatctggggcttaactgcccttcatttctcagtagtctccaaggtcattaccatatacag

SEQ ID NO: 435057 - DNA, 201 bp, Homo sapiens
ctgtcagagaaccctaactgggaatcaatggacaagaaacaggttccgataggtgggggtactttatgacacagattttttctcccagtttctccaaataycattttctgtaagagataagttatataaaaccaattttaaggtcattattaaaagagcaccttactgaaaagggtggcatcattcacatgtatacttctt

SEQ ID NO: 435058 - DNA, 201 bp, Homo sapiens
ctagaaattttctagtcttaggttttatgttaggtctatgatccattttcagttaattcttatatgtggtagaagtatgaattgaggtttttacatatggrtatccatttgttccagcatcatttaatgaaaagactgtgttttctccactgaattgcctttgcacatttgtagaaaatcagatatctatatatgtatagg

SEQ ID NO: 435059 - DNA, 201 bp, Homo sapiens
tagaatcccatgggcctttgccatgacggaagtatgtggcatgattctgtgctatatttggctcctggttcttcttcttcacaagcacaggtacctcattmctccattaaatgactgaaaatgttttgactcctgtatcaagatcataaaatcttaacctttctctttgcagtttccttgttaatttccttctctggtcat

SEQ ID NO: 435060 - DNA, 201 bp, Homo sapiens
ctgctttaccatgtttgtgacctccctctccgtgccaggacaacacctgcagtgtactggaaaggtagcctgctaccttctttatcattcttgtttttggkgggttgatggcacactatatgcaatagggctaagattttgcttatagtattaaaatgtgctttttagtatctgcaatgtctataaaaaaaactatagaaa

SEQ ID NO: 435061 - DNA, 201 bp, Homo sapiens
taagtgagtctccaaaatatggtaagaatattttttaaaaatctataataaatctttaaatctctgttagaacttgatagcattattaactcatcctttakctccaaggaaaagcagcatgaaatggtggaaagaacactgaatttgttgtcgaaattcttggagtttaatttcaacaccaatattaactctctagatgac

SEQ ID NO: 435062 - DNA, 201 bp, Homo sapiens
cagaaaattacaagtattagcaggaatatagagaaattagaacactttgtgcatatttctagtaggaatgtaaaatggttcagctgctgtggaaaatgatwtggtgactcctcaaaaaatttagcagaattactgtacaagccagcaattccacttctaggtatatacctgaagtaaaagcagggacttgaacagatattt

SEQ ID NO: 435063 - DNA, 201 bp, Homo sapiens
tttttagacacttgagtgtctagaattggttctctagtttatccattagtaccttgtgagtttgcttttagtctctcttggtttgaccaactctggggaaytgacagggtcaagttttgatctctaagggtgaataccagatcctgattcctggtaaatttaccaaattagtgaccctgtgttatctcttgacatttggac

SEQ ID NO: 435064 - DNA, 201 bp, Homo sapiens
ctgagtttgagaatgcgccatctcaataccaaaaaaacccagtaaaaacataggcaaaagacttgagtaggtgtttctccaagcaaaatatacaaaggtcyagtaagcatatgaaaagatgttccacatggctaatcattactgaaatcaaatcaaaatcacaatgaaatactactttatgtcataaaatggctactatta

SEQ ID NO: 435065 - DNA, 201 bp, Homo sapiens
ataaaattaacatgtcattgtagaaaagtttttagtagaaatgtacaaagaataaaagaaacgtcaataattctggcacccagagatgacctattggactrttttgttcgtttcagtctccttccccttcctttcttcctcccttcctccctaccttccttctttcttccctctttctttttttcttttttgagacagggt

SEQ ID NO: 435066 - DNA, 201 bp, Homo sapiens
tgattcttctcctcattataagtgatactttcctgcttctttgcatgcctgacaatctttgaatagattccagacattatgaattagttgttggacattaygaattcattgttgggctctagatactttggtatttctattaatattcttgagctttttgtgggatgctgttcaactacttgaacagagtttgatcctttt

SEQ ID NO: 435067 - DNA, 201 bp, Homo sapiens
cgcgcagcaccgcatctggctaatttttgtattttttgtagagacctgggagttggggttgttcaccatgttgcccaggctggtctcctgaactcctgagwttaagtagttggcccacctcagcctcccaaagcactgggattacaggcgtgatccaccatgcccagcctctttctttctttttctctccctctctctcct

SEQ ID NO: 435068 - DNA, 201 bp, Homo sapiens
gtcacgtggccacacctagctacaagggaggctgggaaaggcaatattttggctgaattcattgctgcctcaatatatttgagattgtgttaccagtgaaraaggggagagtggatgttgaaaggtagacattgatctccgtctgtcatagcctatgtcttattggcaagaatagccaagcaactactactgtgatattgg

SEQ ID NO: 435069 - DNA, 201 bp, Homo sapiens
gccacacctagctacaagggaggctgggaaaggcaatattttggctgaattcattgctgcctcaatatatttgagattgtgttaccagtgaagaaggggaragtggatgttgaaaggtagacattgatctccgtctgtcatagcctatgtcttattggcaagaatagccaagcaactactactgtgatattggattaaaaa

SEQ ID NO: 435070 - DNA, 201 bp, Homo sapiens
ccgcaggagctcctccagctccaggatgctggggcaaggcgtggctttgtcctctccccccagctctgggagagaggtctcagccatgggccagcccgccyacccctctgcctctgtggtcactcctctctgcctctccagtgtcatttctccttcccagagattgacagggacaggtgacagaagcaagtgactcagcaa

SEQ ID NO: 435071 - DNA, 201 bp, Homo sapiens
cacgcccggctaatttttgtatttttagtacagacgaggtttccccatgctggccaggctggtctcgaactcctgacctcaggtgatcccgcctcagcctyccaaagtgctgggattacagacgtgagcctccgctcccggccttagcacaaggattaaatgagatgtttatatggcgtttggcatagacactgtcaaaga

SEQ ID NO: 435072 - DNA, 201 bp, Homo sapiens
ttcattagactgaaggcctagatgctttggcttagatcttatttctaagttattcagcatttgaatttcaataggaatggatgttgggaagttcccacctycctaagcatttgaagcactaattcataacttttcttcatagatatatggcagtgtatgggagaaattacatcgagcctttgccatttggagtggctttgg

SEQ ID NO: 435073 - DNA, 201 bp, Homo sapiens
gaattcattagactgaaggcctagatgctttggcttagatcttatttctaagttattcagcatttgaatttcaataggaatggatgttgggaagttcccamctccctaagcatttgaagcactaattcataacttttcttcatagatatatggcagtgtatgggagaaattacatcgagcctttgccatttggagtggctt

SEQ ID NO: 435074 - DNA, 201 bp, Homo sapiens
tgagtagctgggattacaggggtgcaccaccatgcctagctaatttttttgtatttttagtagagacggggtttctccatgttggtcaggctggtctcgarctcctgacctcaggtgacctgcccgccttggcttcccaaagtgctgggattacaggcgtgaatcaataataatttatacaaatagcacatattgtattta

SEQ ID NO: 435075 - DNA, 201 bp, Homo sapiens
aggggtgcaccaccatgcctagctaatttttttgtatttttagtagagacggggtttctccatgttggtcaggctggtctcgaactcctgacctcaggtgrcctgcccgccttggcttcccaaagtgctgggattacaggcgtgaatcaataataatttatacaaatagcacatattgtatttatgagtcaagttttatca

SEQ ID NO: 435076 - DNA, 201 bp, Homo sapiens
cccgggaggcagaggttgcggtgagctgagatcgtgtcactgcactccagcctgggcaacaagagcgaaattccatctcaaaaaaaaaaaaaaaattacaytgtaccccataaatgtgtacaattatgtgtcaattataaataaagttgaaattttaaaaatgatctgtggctggccgcggtggctcatgcctgtaatccc

SEQ ID NO: 435077 - DNA, 201 bp, Homo sapiens
tttatttgatcatcatacagtgtatacatgtattaacatattacactgggccagacgcgatggcttatgcctgtaatcccagcactttgggaggccgaggygggctgatcacctgaggtcgggagttcaagaccagcctgaccaacatggagaaactccgtctctactaaaaatacaaatttagctgggcagtggtggtgc

SEQ ID NO: 435078 - DNA, 201 bp, Homo sapiens
cttctctgattcaccttcagtcaggcttctccaccgtctgtatccagaggagggaggctgggcccagaaacagggggctctctgtctaccttatctcatgycccaaatactatttcctgggcctctgcctctacacttgacagttgtcctggaaatgtttcctggaactcctgggagactccctgctttcaggcaggcgaa

SEQ ID NO: 435079 - DNA, 201 bp, Homo sapiens
caagatgtgatgaccaagtgtaatacatgaacctaaattgaatcctgatttttggaggaaacagaaataaaataaatttgaggggcaattaggggagataktatggttaattttcttaggtgtggtaatgtgtattgtacttatttaggaagttgtcattattattagaagatgaataacaactggatgccgaaatattta

SEQ ID NO: 435080 - DNA, 201 bp, Homo sapiens
aaactaattgggcttggtggtacacacctgtggtcccagctactcaggaagctgaggtgggaagatcccttgggcctgggaggtcaaggctacagtgaacygtgatcacactactgcactccagcctgagcaacagagcaagagtctgtctcagtcaatcaataaagaaagaaaaaggcaggtttttgttttgtttataat

SEQ ID NO: 435081 - DNA, 201 bp, Homo sapiens
tgcatgatgtatgcccagggacaagccttttaagaagttcatcatttgaggctgggtgtggtggttcacacctgtaatcccagcattttgggaggctgagrcgggaggatcacttgagcccaggagtttgagaccagcctgggcaacatggcaaaaccctatcgctacaaaaaaaagtacaaaaattagcccagcgttgtg

SEQ ID NO: 435082 - DNA, 201 bp, Homo sapiens
cctcccaaagtatagggattacaggtgtgagccaccatgcccggtgagctgtagtaaagagttttttgtttttgttttttaagtaagcccacaggatggaktggataaaataggagaaaacagccatacatttttggaagttggaagatggatggatgagtggcaattgacaaacccaaaattaacctaattataaaattt

SEQ ID NO: 435083 - DNA, 201 bp, Homo sapiens
gggaggcggagattgcagtgagttgagatggtaccattgcactccagcctgggtgacagaacgagactccatctcaaaaaaaaaaaaaaaaaggtacctgycagaaaaatctagagagcaaaacggtacacatactgaagagtagctctctcttctgttcctctactttttagaagctgtttccttcattctgtcttcatg

SEQ ID NO: 435084 - DNA, 201 bp, Homo sapiens
actatatgcaatagggctaagattttgcttatagtattaaaatgtgctttttagtatctgcaatgtctataaaaaaaactatagaaataatttggtaaaastcttaagccagattctacctctctcttatttctgttgaaactcgttctatgctatggagctatagaaaacaagtttctttcggccgggcgcagtggctca

SEQ ID NO: 435085 - DNA, 201 bp, Homo sapiens
aagtgttaatgtttacttagtcaaagaaagtgtttctcaaagtgtttgtaccactttcattagaatcacctgggtgcttgttaaaatgcagattcctaggytccatctcaggagtgcacactaatgcttgaaacatacctagccttgtgttcagtgctttctctgagggtgggaggatcatttcaaaaatatgtgatgtat

SEQ ID NO: 435086 - DNA, 201 bp, Homo sapiens
aaaaaaaggaagcctggggggctcctttcctagtttaatgggcaggaagaattagtggatttaagtaaaaaacaaggcattgtaaacaaaaaatttaaagrtaaaattagtagatattgcataagagctcctgaggggctttttaaaaaactgtagatatgtgagcttttgagattgcttaaaaaaaaaaaaaattgtagc

SEQ ID NO: 435087 - DNA, 201 bp, Homo sapiens
accaattttaaggtcattattaaaagagcaccttactgaaaagggtggcatcattcacatgtatacttcttcaattcaaaatcatttttttctgttccagygttcctagaatcccatgggcctttgccatgacggaagtatgtggcatgattctgtgctatatttggctcctggttcttcttcttcacaagcacaggtacc

SEQ ID NO: 435088 - DNA, 201 bp, Homo sapiens
cctttgtgggtagtcctatatccagatctgctgtgctatagcatgggagaaaagggttgccacttctttttttttttttttcctctggtatttgctgtcaragaaccctaactgggaatcaatggacaagaaacaggttccgataggtgggggtactttatgacacagattttttctcccagtttctccaaatatcatttt

SEQ ID NO: 435089 - DNA, 201 bp, Homo sapiens
gtctgcgccttcatctctgacccagtcggttctctacccaacccaaaccccacccctccccacacaggcacaagtgtcctggccctcattacccagcatgmtcagggaccacatcctaccccccccaaattaggagcactcacccacctgtgggagtatctggcccaggctgtgcacttctctgacgggcagttcgtgctg

SEQ ID NO: 435090 - DNA, 201 bp, Homo sapiens
ttgccaacagcaggacccaggtccggggccctcagttaggggccaaggccgatgggacaggtccaggataaagacctagaagactcaggctgagggaagcrgcacaggcccacacacagacacaggtgtagagcaggtcttcagacagccctgggctgcaggcagaagcagtgtgtccagggccactcccaccctctgcca

SEQ ID NO: 435091 - DNA, 201 bp, Homo sapiens
tgtttaatcttcatgagatgataatttgatttgcaacagcttttaaattagtttatgtgtatgggctatgtgacataccctcagatgcacagtggaatagyaattgtttcttcaaaggatatgtgaattcttagctaaaaatgctgagattgttaaagtattaattcccttttctttaacttaatacaaattatcttcagt

SEQ ID NO: 435092 - DNA, 201 bp, Homo sapiens
acaagcacaggtacctcattactccattaaatgactgaaaatgttttgactcctgtatcaagatcataaaatcttaacctttctctttgcagtttccttgktaatttccttctctggtcattgtgacatagttattaacaaaggattttgagtttgatcagtaagagtcagcctaagataatatctacatatttagtaata

SEQ ID NO: 435093 - DNA, 201 bp, Homo sapiens
aagtgtggccacaggccatgtggggctggagatctcagggcaggaccagtgaggagtgtggggagaaggcctgcagaagggtggcgtgtggctgccagtgrggaacagctgtgggtctctgtgctcagcctgagggtcttggggagggcagacctgggtagaaatctcaggtctggtacttgcagctatgtggtcttgtct

SEQ ID NO: 435094 - DNA, 201 bp, Homo sapiens
aggaggccgaagcaggcagatcacttgaggtcaggagttcaagaccagcttggccaacatggcaaaaccccatctctactaatactataaaaagaattaaycaggtgtggtggctcacacctgtaatcccagctactcaggaggctgaggcaggagaatctcttgaacccgggaagcagaggttgtgagctgagatcacac

SEQ ID NO: 435095 - DNA, 201 bp, Homo sapiens
ggaattgatgtcagttccatcaatataatattagcatgaaagccagagatttccaaaaccatacattaaaatttggctgcaaatccaatccattttcacartatttaatggagtttgaagtcttgagccagtttctcattttccattatattgattagattttggatgtagcatatttatttatttatttagagacagagt

SEQ ID NO: 435096 - DNA, 201 bp, Homo sapiens
tgtgacatagttattaacaaaggattttgagtttgatcagtaagagtcagcctaagataatatctacatatttagtaataatcctgaatgcattttgcacrgaaagatcagagatgccctatggctgatcgtgctcatctctgatctaaaaaaaagaggctgggcgcggtggctcatgcctgtaatcccagcactttggga

SEQ ID NO: 435097 - DNA, 201 bp, Homo sapiens
cagggaccacatcctaccccccccaaattaggagcactcacccacctgtgggagtatctggcccaggctgtgcacttctctgacgggcagttcgtgctgcyggctttcagccgcctgtctccgcacacttgatgctgtttctattttttgatttgagtttaattataaagcatgctgtctactcccctcttccagcctccc

SEQ ID NO: 435098 - DNA, 201 bp, Homo sapiens
tggccacatttcaagtccgtaagatccacatagtatataaatagcttcttggacagtatatggaacatttccgtcattgcagagaattctgttggacaacsatgcttttgatggtctttaagatttctgtcctcttcaaagagtctagtgatttttctgtttgctcttccttgaagtaaatatttgatgcctggggttttt

SEQ ID NO: 435099 - DNA, 201 bp, Homo sapiens
ggtctttaaggtctctccccatgctaactgtggtcagctaggaccttcaattgggcctactagaaatcttctctgtcatccacagacctttgtcatacacrcataccttgatactactccccgcttgcactcccagatggtgggaacagggcacacccatgcctgcagccatacctgcactgggtctctgaggtctgagct

SEQ ID NO: 435100 - DNA, 201 bp, Homo sapiens
tgatttgagtttaattataaagcatgctgtctactcccctcttccagcctcccctgccactcccaacttgtccactggttccatggcatggccagtgccamgcacagtcaggcacctttccctccaggcccaggcctctgtcccagcactgctaagaatcaaggcagctcagcccaggtctgactgtggcatattgtgtac

SEQ ID NO: 435101 - DNA, 201 bp, Homo sapiens
cagtgccaagcacagtcaggcacctttccctccaggcccaggcctctgtcccagcactgctaagaatcaaggcagctcagcccaggtctgactgtggcatwttgtgtacatgtatgttgatagtgggagaaggggccgggcgcggtggctgaagcctataatcccagcactttgggaaaccgaggagggtgggtcatgagg

SEQ ID NO: 435102 - DNA, 201 bp, Homo sapiens
ggatggacacaaagccaggacaccagcctccctgggctcctatgctgtatcctgagtatttgaagatatatttcttttctagttaaaagtactttgggggccgggtgcggtggctcatgcctataatcccagcactttgggaggccgaggcagacagatcacttgaggttaggagttcgagaccagcctcgccaacatggt

SEQ ID NO: 435103 - DNA, 201 bp, Homo sapiens
acttccctgcccgcaggagctcctccagctccaggatgctggggcaaggcgtggctttgtcctctccccccagctctgggagagaggtctcagccatgggccagcccgcccacccctctgcctctgtggtcactcctctctgcctctccagtgtcatttctccttcccagagattgacagggacaggtgacagaagcaagt

SEQ ID NO: 435104 - DNA, 201 bp, Homo sapiens
ggaggctgaggcaggagaatctcttgaacccgggaagcagaggttgtgagctgagatcacaccactgcactccagcctgggcaacagagtgatatgtctcaaaaaaaaaaaaaaaatcggtttctctaaggcagaagaagccatcatgactgcgatggcagaatatgcagacatatttaggtaaatcagttttgatttcag

SEQ ID NO: 435105 - DNA, 201 bp, Homo sapiens
ctccaaatatcattttctgtaagagataagttatataaaaccaattttaaggtcattattaaaagagcaccttactgaaaagggtggcatcattcacatgkatacttcttcaattcaaaatcatttttttctgttccagcgttcctagaatcccatgggcctttgccatgacggaagtatgtggcatgattctgtgctata

SEQ ID NO: 435106 - DNA, 201 bp, Homo sapiens
gaagctgtttccttcattctgtcttcatgtctgtcattatattccatcctgtctcacaatctgttttacactcttaagacaatttttctttctttttttcttttttttttttcctaagatggggtctcactctgtcactcaggctggaatgcaatggcacagtcatggctcagcttcctaagtagctgggagtataagcac

SEQ ID NO: 435107 - DNA, 201 bp, Homo sapiens
gaggcaggagaatcgcttgaacccgggaggcagaggttgcggtgagctgagatcgtgtcactgcactccagcctgggcaacaagagcgaaattccatctcaaaaaaaaaaaaaaaattacactgtaccccataaatgtgtacaattatgtgtcaattataaataaagttgaaattttaaaaatgatctgtggctggccgcg

SEQ ID NO: 435108 - DNA, 201 bp, Homo sapiens
ctcacgcatctcctatgaaaaggttgggccaaacttcgtccacacggctgcaagaagacttccctgcccgcaggagctcctccagctccaggatgctgggrcaaggcgtggctttgtcctctccccccagctctgggagagaggtctcagccatgggccagcccgcccacccctctgcctctgtggtcactcctctctgcc

SEQ ID NO: 435109 - DNA, 201 bp, Homo sapiens
tcctaggttccatctcaggagtgcacactaatgcttgaaacatacctagccttgtgttcagtgctttctctgagggtgggaggatcatttcaaaaatatgwgatgtatggtccctgtcctcaggaatattagtccaacagtactggtgttgtcacagtgcagttcatgattacccaagtgacagttactcagaatttttat

SEQ ID NO: 435110 - DNA, 201 bp, Homo sapiens
acaatactatagaatgtaacatactgcgggcacggtggctcacgcctgtaatctcagcactttgggaggccgaggcgggcggatcacgaggccaggagatsgagaccatcctggcgaacacggtgaaaccccgtctctactaaaaatacaaaaaaattagccgggcctcgtggcaggcgcctgtagtcccagctactcagg

SEQ ID NO: 435111 - DNA, 201 bp, Homo sapiens
tcctaaccccaagtgatccacccgcctctgcctcccaaagtactgggattacaggcttgagccaccccgccctgtcaagatacagaattctaaaatgactyctaatgacctatgcttttgtataatgggagggacctgtaatcccacctaatcatgggatatcactcccatggtgactaagaaagggagattatcctcagt

SEQ ID NO: 435112 - DNA, 201 bp, Homo sapiens
acatatatatatatatagttttttgtttttttttctttgagacgatctccctctgttgcccaggctggagtgcagtggcacaaccatggcgcactgcagckttgacctcccagactcaggtgatcctcccacctcagcctgccaggtagctgagactataggtgtcccaccatgcccaggctaaaattttttttttttttt

SEQ ID NO: 435113 - DNA, 201 bp, Homo sapiens
tttctgtgtactctacccaaagctgttcatgagaccttttttcaatctggctctttggaataggtacttttcttggcctcatgtgagtgctgggaattcawttgggtggtctttccttggtcttggttagtttccttacatacatgtgctgataggcattcagctaaatattcaagagagacccgcagatctctggagttc

SEQ ID NO: 435114 - DNA, 201 bp, Homo sapiens
ttggatttgatgaattaagagagagaaatcaaatattattccaagatgttttttgttttttgttttttttgagacagggtctcactctgttctccaggctrgagtttagtggtgcattcatagatcactgtaacctcaaattcctaggctcaagtgatctccttccttagcctcccgagtcactacgactgcaggtgtgtg

SEQ ID NO: 435115 - DNA, 201 bp, Homo sapiens
gacgtgagcctccgctcccggccttagcacaaggattaaatgagatgtttatatggcgtttggcatagacactgtcaaagagtaaatgggcaataaattayaacaatgatcattgggggctggctattggagaagagctggctctctccagaggaattcggattacctccttctaggccctaaccccatttactgatccca

SEQ ID NO: 435116 - DNA, 201 bp, Homo sapiens
aaatttaaaactcagttcctcagtcatactggccacatttcaagtccgtaagatccacatagtatataaatagcttcttggacagtatatggaacatttcygtcattgcagagaattctgttggacaacgatgcttttgatggtctttaagatttctgtcctcttcaaagagtctagtgatttttctgtttgctcttcctt

SEQ ID NO: 435117 - DNA, 201 bp, Homo sapiens
ttaggtctgtattgttcattatggcaaaatttaaattaactaaaatgaaataaaatttaaaactcagttcctcagtcatactggccacatttcaagtccgkaagatccacatagtatataaatagcttcttggacagtatatggaacatttccgtcattgcagagaattctgttggacaacgatgcttttgatggtcttta

SEQ ID NO: 435118 - DNA, 201 bp, Homo sapiens
gaggattcattaaaagtctatataccaatcacagagacttctagctcccttccttaagtagccagacttatttctcatctcccctcctacccaaccccagycttccaagaagggtaagattcctttccttggaaaacctgaagaaaaacaatgtaaatagctggttgggatatccttttctaatcaaccagatctctgcgc

SEQ ID NO: 435119 - DNA, 201 bp, Homo sapiens
ctggggggctcctttcctagtttaatgggcaggaagaattagtggatttaagtaaaaaacaaggcattgtaaacaaaaaatttaaagataaaattagtagmtattgcataagagctcctgaggggctttttaaaaaactgtagatatgtgagcttttgagattgcttaaaaaaaaaaaaaattgtagcttctgctctccat

SEQ ID NO: 435120 - DNA, 201 bp, Homo sapiens
gctgtgctatagcatgggagaaaagggttgccacttctttttttttttttttcctctggtatttgctgtcagagaaccctaactgggaatcaatggacaaraaacaggttccgataggtgggggtactttatgacacagattttttctcccagtttctccaaatatcattttctgtaagagataagttatataaaaccaat

SEQ ID NO: 435121 - DNA, 201 bp, Homo sapiens
tttgtgggtagtcctatatccagatctgctgtgctatagcatgggagaaaagggttgccacttctttttttttttttttcctctggtatttgctgtcagaraaccctaactgggaatcaatggacaagaaacaggttccgataggtgggggtactttatgacacagattttttctcccagtttctccaaatatcattttct

SEQ ID NO: 435122 - DNA, 201 bp, Homo sapiens
tactgtttctggggtgcgtgtgtgtatatacatatgtgtgcgtgtgtgtgtgtgtacatctctctctctctctctacatatatatatatatagttttttgtttttttttctttgagacgatctccctctgttgcccaggctggagtgcagtggcacaaccatggcgcactgcagctttgacctcccagactcaggtgatcc

SEQ ID NO: 435123 - DNA, 201 bp, Homo sapiens
gtactttactgtcaaatatgaatggtcagtcaagaaaccagacgtctgagaaaaacataagcgcaaacagaaaaaaaaaagtaaattggaaaacaaaatarggagcagacgaacacttaaaaaaaaactttcgtgttttcaagagaaataagagatgttgcattctatgtgacagtaatgagaggcccaaagaaaattcag

SEQ ID NO: 435124 - DNA, 201 bp, Homo sapiens
actgggattgtaggtgtgagctaccaccccccagcctattccaagatttttaacctgaccatctgtaaagatggagttgccatttacagagatgggaaaaytgtggaaggagctgacttggagggaaaattaagggtttggttttcgacatgtcaggtttgaaatatgttttgtagcaaattcagatgtcaaggaagagat

SEQ ID NO: 435125 - DNA, 201 bp, Homo sapiens
tggcgcgatctcggctcactgcaagctccgcctcctgggttcacgccattctcctgcctcagcctcccaagtagctgggagtacaggcgcccgccaccacrccaggctaatttttttttttttttgtattttttagtagggacggggtttcactgtgttaaccaggatgatctcgatctcctgtccttgtgatccgcccac

SEQ ID NO: 435126 - DNA, 201 bp, Homo sapiens
gtggtgcattcatagatcactgtaacctcaaattcctaggctcaagtgatctccttccttagcctcccgagtcactacgactgcaggtgtgtgtcaccacrcctgcctgatttttaaatcttttgtagagatggggttttgctatgttgcctaggctggtctcaaacttttggcctcaagtgatcctcccatccctgcctc

SEQ ID NO: 435127 - DNA, 201 bp, Homo sapiens
gttagccaggcatagtttcacgggccttgtagtcccggccacttaggtggctgaggtgggaggatcacttgagccctgggctgtctaggctgcagtcagcygtgatggcaccactgtactgcaacctgggtgacagagcaagaccctgtttcaaaaacaacaacaacaataacaacaaagcatcaagttcaaaccctgatt

SEQ ID NO: 435128 - DNA, 201 bp, Homo sapiens
cagacagggtttcacaacattggccaggctggtctcaaactcctgacctcaagtgatctgcccacctcggccttccaacgtactgggattataggcgtggrtcaccacccattaacattttggacaagtaccaagctttgcatgaaatgctttttaaggtggaccacgctttaatggtgtaataagagttagtatttaaat

SEQ ID NO: 435129 - DNA, 201 bp, Homo sapiens
cccagctataacccaaagtttcttatcacagtcacccccaaactctaaacttagcccctgatccttccctaatcctgctcctcaagatgcttatcctccakccagcacaggggaaggggtcgatgctgctgaagggcctcccttctgcttgggctggctatgccttcagagacaggaactgctcttaggggtgggaggcag

SEQ ID NO: 435130 - DNA, 201 bp, Homo sapiens
ttttttaccacaccctataaataatacagttaacagttgtgtgtatagccacacagaccatttttaagcatacttacacactcatataagtttttttgggtttttttttttttttttttttgaggtggagtctttcccagtcgcccaggctggagtagtgtggcacagtcttggctcactgcaacctcctcttcccaagtt

SEQ ID NO: 435131 - DNA, 201 bp, Homo sapiens
aaataatacagttaacagttgtgtgtatagccacacagaccatttttaagcatacttacacactcatataagtttttttgggttttttttttttttttttkttgaggtggagtctttcccagtcgcccaggctggagtagtgtggcacagtcttggctcactgcaacctcctcttcccaagttcaagccattctcctgcct

SEQ ID NO: 435132 - DNA, 201 bp, Homo sapiens
ctcatataagttttcatagatacttttgaaacaaggtaggattatattgcaaacattgttctttaacctagttttccttttctttctttctttctttttcytttttttttttttttttttttttgagatggagtctcgctgtgtcactcaggcgggagtgcagtggcacaatctcggctcactgcaaactctgcctcccag

SEQ ID NO: 435133 - DNA, 201 bp, Homo sapiens
actattactgccggaaaaatgaaaagttgtacaggaaggtaaataatgatagcatacttcttgttagggcagatagcaatatttatagtcataatttaactactgactaatgatttatctaaaattgtaatttatattaggagaattgaaaagaatacaggaaaagtacatgtgtacatacaagagatcaaatgatgtcta

SEQ ID NO: 435134 - DNA, 201 bp, Homo sapiens
tcagcagtgtgaaaacagaataatacgcacactcaatgaagatgagaaacagatccagaataaactaaaaaatgttattatacaaacaataatgcatttcraatcaaatagatagactatttgttaaaatatatgggaccattagctatacttttgaaaaaaattatctttatatcttatacggaaattaattctagataa

SEQ ID NO: 435135 - DNA, 201 bp, Homo sapiens
ttcttggagatctgtagttttgggaagtttgctgaaagagattttacaaaagtgaaagtttcctttcattctgcaattatttattattattattattattwttttttttgagacggagtttcgcccttgttgcccaggctggagtacaacggcaccatcttggctcactgcaacctctgcctcccaggttcaagtgattct

SEQ ID NO: 435136 - DNA, 201 bp, Homo sapiens
tccccagccatatggaactgtaagtccattaaacctcttccttttgtaaattgcccagtctcgggtatgtctttatcagcagtgtgaaaacagaataatasgcacactcaatgaagatgagaaacagatccagaataaactaaaaaatgttattatacaaacaataatgcatttcaaatcaaatagatagactatttgtta

SEQ ID NO: 435137 - DNA, 201 bp, Homo sapiens
ttggagatctgtagttttgggaagtttgctgaaagagattttacaaaagtgaaagtttcctttcattctgcaattatttattattattattattattattwtttttgagacggagtttcgcccttgttgcccaggctggagtacaacggcaccatcttggctcactgcaacctctgcctcccaggttcaagtgattctcct

SEQ ID NO: 435138 - DNA, 201 bp, Homo sapiens
aggttatgggggcagcttcctaataaagggtctctcaatacttcccaggccattttagcccacttcagttccccaaacttgcgcaggaaggcagagccccytcctgaggcttctcacactgcgctaattagccagcatggttgagttttcactacatcagccagggaaaaacacaaaacaaaaccaatcaccctctactgg

SEQ ID NO: 435139 - DNA, 201 bp, Homo sapiens
gccctgcaaattgtaaactcttcccagcgtacagaactatgcagctggagagcagctccaaatgaagcgcaatggcagcgcttacagagagagctgtgagyggcattacctgtgggaacttgacaatgatgtggtggggaatgctcatcacattgtgcacaaaatcaaacgtctcggtaagtttcattttatttgcagtta

SEQ ID NO: 435140 - DNA, 201 bp, Homo sapiens
cctccccagccatatggaactgtaagtccattaaacctcttccttttgtaaattgcccagtctcgggtatgtctttatcagcagtgtgaaaacagaataayacgcacactcaatgaagatgagaaacagatccagaataaactaaaaaatgttattatacaaacaataatgcatttcaaatcaaatagatagactatttgt

SEQ ID NO: 435141 - DNA, 201 bp, Homo sapiens; identical to SEQ ID NO: 106484

SEQ ID NO: 435142 - DNA, 201 bp, Homo sapiens
tctactaaaaacacaaaaattagctgggcatggtggcaggcgcttgtagtcccagctactcaggaggctgagtcagaagaatcacttgaacccgggaggcrgcggttgcactgagccgagatcacgccactgcactccagcctggcgacagagccagactccatcgcaaaaaaaaacaaaaaaaacaaaaaacaaaaaaaa

SEQ ID NO: 435143 - DNA, 201 bp, Homo sapiens
ttcctaaataggtaagaaacaagtgtctttctttgaccttaaacagccttgtattaaatacctagaaaagaaaaaaaagtttttaaaaaacactgcacacrggaggatgaaatattaaaaagtttacttggcaaaaattttaataggttaaccaataccaagtactgaccatgtgttcagtaagtaggataaatgccagag

SEQ ID NO: 435144 - DNA, 201 bp, Homo sapiens
agtcagatctgccaaccaggaatattatctacatgagaaaattagttccatgccactgagatttaaacaccagccaaaaatgtaaagtctatatcagcccrttcacagccttactgtccgttaatgtattttttcattaataagctttttatttttctgtttttattccccaataattccacctagactctaggaatctga

SEQ ID NO: 435145 - DNA, 201 bp, Homo sapiens
atctttgggattctggtgatcatatgttgaatttcgttatgtttaaaaccaagttcaagacgataaacctaaaagaaagtaaatttgctatgaatcgttawgtagaaatagttattttggtaccatggcaaggctgcactgattttttttttttttgagatggagctcgctatgttgcccaggatggagtgcagtggcatg

SEQ ID NO: 435146 - DNA, 201 bp, Homo sapiens
tgcttttctgaccatctgtgcaacatctgctttactgaaattttttgaatgcagataagccaccctagagaaacataaatacatacgcatgtgataaacayttacattctttttttttgagatggagtctcatgctacttcccaaagtaacagctgtttttaaaaaggctcccacaccctaaattactaactaaataaaag

SEQ ID NO: 435147 - DNA, 201 bp, Homo sapiens
tctttagcacggagacacgtcccttgaagaaactcaagaaatgtctgagtgagaacaagtgaacacatagcccttcaagtatacaacaaagcagaaagtayacaaccttaaacctccacatttaaaacttcttaatggcatcacacagtcaaaaaaaaatcgtcatattcattataactccaaatattattagaaccaaat

SEQ ID NO: 435148 - DNA, 201 bp, Homo sapiens
tgtgagccaagtgaattttccatgaggaaacatggattcagggaagttaaataacttgtctgagatcatcacctaattactgacaaaactaagatgtgaaytcaggcatgcctacatctaaagcctatggtatttttatactatataccaaaacttatattactttataatcacatgactattactcctttaaaaatagtt

SEQ ID NO: 435149 - DNA, 201 bp, Homo sapiens
ttgaagattttatttttccttagttataagcattatttaaaaaatatgtttatgattcccatcatagggggaataaaaatgaccctgtgccttactcatcrttgtaatctctaggtctttagcacggagacacgtcccttgaagaaactcaagaaatgtctgagtgagaacaagtgaacacatagcccttcaagtatacaa

SEQ ID NO: 435150 - DNA, 201 bp, Homo sapiens
atgtttgtcagtcccagatgaaccccacagtaactggtaattctgcagggtaacaaacaatatgaataaaatgttaccttctttgaagattttatttttcsttagttataagcattatttaaaaaatatgtttatgattcccatcatagggggaataaaaatgaccctgtgccttactcatcgttgtaatctctaggtctt

SEQ ID NO: 435151 - DNA, 201 bp, Homo sapiens
gacaaacaaaaaatgagatccttctttgaggaaacgagattatatccccacatatctgaaaacatctgaaaacagatgaaagcatggcaacagccttatcrgagaggagaaagacgacactgaaatgcctgcaaatgagaatctggcaagtggtaagtgatcagtaccacaaaaaactcaaaagtctccaaaattggagtc

SEQ ID NO: 435152 - DNA, 201 bp, Homo sapiens
ttacttggcaaaaattttaataggttaaccaataccaagtactgaccatgtgttcagtaagtaggataaatgccagaggatttaaatcctatattttctgkgaagaaactagaaaaagggattcaaaatcaacatacaaaacaataataaaataattcagggctatactgtgtgcaaagaagattgagtgctccagagaca

SEQ ID NO: 435153 - DNA, 201 bp, Homo sapiens
tgcaacctccgtttcttggattcaagtgattctcctgcctcagccttctaagtagctgggattacaggtgcccaccaccatgcctggctaatttttgtatytttagtagagatgaggtttcaccatgttggccaggctggtctcaaactcctgacctcaagtgatctgcccacctcggcctcccatgccagggttacaggc

SEQ ID NO: 435154 - DNA, 201 bp, Homo sapiens
ctgtggcgaggcctgcttcccgtagcgggtgaccccgggaccgaccaactcgctgggccgcacgtcccgtcccgccgcgccgcacgccggctcctcagccsgccctacacagcgcagccgcgctcccgggcccacgtgggccgcgcccggagtgggcgagaccatgtgccgggttacgcggggagacagcgggctacgtgc

SEQ ID NO: 435155 - DNA, 201 bp, Homo sapiens
ttactgccggaaaaatgaaaagttgtacaggaaggtaaataatgatagcatacttcttgttagggcagatagcaatatttatagtcataatttaactactgactaatgatttatctaaaattgtaatttatattaggagaattgaaaagaatacaggaaaagtacatgtgtacatacaagagatcaaatgatgtctaaaac

SEQ ID NO: 435156 - DNA, 201 bp, Homo sapiens
aaaatgaggaggttgaacacaaacagaaagaatgatacaagttaagtagatgcatctggggaataggatgcaagatcaccaaggatgaggcagggaatacrgtttctcactagaagcctttatgctattagacttttgcttatgtttgtatactacttagtatagattaaattgttaatttaaaaaagtaaaaaaagtaat

SEQ ID NO: 435157 - DNA, 201 bp, Homo sapiens
caactattactgccggaaaaatgaaaagttgtacaggaaggtaaataatgatagcatacttcttgttagggcagatagcaatatttatagtcataatttaactactgactaatgatttatctaaaattgtaatttatattaggagaattgaaaagaatacaggaaaagtacatgtgtacatacaagagatcaaatgatgtc

SEQ ID NO: 435158 - DNA, 201 bp, Homo sapiens
taactatcctttctcatcatttatagccagcatctcctccctgccctctccccagctctctttccttcatattctacttaaccttatatcatttcattacyagcgaaatattcctagaataggacccataggaaggagaggattgactaaaaagcgaccatgagggaactctgtggagttaatataattgttttatttgtt

SEQ ID NO: 435159 - DNA, 201 bp, Homo sapiens
agctttatatactaactagtcagctgctcttggctttatcttattctcttggaggaaggacagtaaagagtgtctggtacattctgtgacagaatgagagytggcaattgggacaggtgcaaaggagaacaatgtgctggctgctactcttttcacagaagtcttttggatccagcctccaaaactccctgagacatacac

SEQ ID NO: 435160 - DNA, 201 bp, Homo sapiens
aactattactgccggaaaaatgaaaagttgtacaggaaggtaaataatgatagcatacttcttgttagggcagatagcaatatttatagtcataatttaactactgactaatgatttatctaaaattgtaatttatattaggagaattgaaaagaatacaggaaaagtacatgtgtacatacaagagatcaaatgatgtct

SEQ ID NO: 435161 - DNA, 201 bp, Homo sapiens
tagttcttacacactaaatgcatatgtcaaaattcatagaactatatatcccacaagatgaattttacttgatataattataccctaataaaactaattaycactagaagaattttgttttaagaatctaaacaataaaatatttaaaaagcaaatgttttatatgtgtagctataaaataatcttacacgttagcccaca

SEQ ID NO: 435162 - DNA, 201 bp, Homo sapiens
ggttaatacctgctcaacgtgaaaatattaactgaaacaaactgcttgctagacatttgttaaagataatttcctatttctctttttagaaataacttatyttaaagtctagttttcttttacatgacaatagcaaaatctgttctcttcagaggattttaacacttaaagaaactgatttctcaaaaagcctaaagttgt

SEQ ID NO: 435163 - DNA, 201 bp, Homo sapiens; identical to SEQ ID NO: 106480

SEQ ID NO: 435164 - DNA, 201 bp, Homo sapiens
gatggacatttgcgccctgcaaattgtaaactcttcccagcgtacagaactatgcagctggagagcagctccaaatgaagcgcaatggcagcgcttacagmgagagctgtgagtggcattacctgtgggaacttgacaatgatgtggtggggaatgctcatcacattgtgcacaaaatcaaacgtctcggtaagtttcatt

SEQ ID NO: 435165 - DNA, 201 bp, Homo sapiens; identical to SEQ ID NO: 116003

SEQ ID NO: 435166 - DNA, 201 bp, Homo sapiens
ctgcttgggtgatgggtgaaccgaaatctcacaaatcaccactaaagaacttattcgtgtaaccaaataccacctgtaccccaataacttatggaaaaataaaaaaaaaaaaaaacaacaacagaaaacagtggctaagatagaagcttatttctccctgagagatgtaggtggattagcacttggatagtggctctttcc

SEQ ID NO: 435167 - DNA, 201 bp, Homo sapiens
taccacctgtaccccaataacttatggaaaaataaaaaaaaaaaaaaacaacaacagaaaacagtggctaagatagaagcttatttctccctgagagatgwaggtggattagcacttggatagtggctctttcccatgaggtcttccaggcttctcctttcttgtgttgtcaccatctctagattgctgccctcatgcaca

SEQ ID NO: 435168 - DNA, 201 bp, Homo sapiens; identical to SEQ ID NO: 115850

SEQ ID NO: 435169 - DNA, 201 bp, Homo sapiens; identical to SEQ ID NO: 116015

SEQ ID NO: 435170 - DNA, 201 bp, Homo sapiens
ttccttattgtaaaacaatgtttctcaacgttttttttcattatggactcagcactgcatgcgtgtgtgcgcgcatgtgcacccacacacacacacacacmcccccacatttcaccttgctctgagaaaaaataaaatgaactgaaaactaaatttaatttcttcctgaagagagaaatcaaatgctaagaaataagattt

SEQ ID NO: 435171 - DNA, 201 bp, Homo sapiens
tctgctcccatcactttgtcttctctcagttttcttttcttttctccttctccttcccctcccctcttcttttcttttcttttctttctttttgagaccgttttttttttttgcccaggctagagtgcaatggtgcaatctcagctcacggcaactttcgtctcccaggctcaagcgattctcctgcctcagcctcccaag

SEQ ID NO: 435172 - DNA, 201 bp, Homo sapiens
tcccaggctcaagcgattctcctgcctcagcctcccaagtagctgggattacaggcatccaccaccatgccaggctaatttctgtatttttagtagagacygggtttcaccacgttgcccaggccggtctcgaactcctgacctcaagtgatctgcccgccctcccaaagtgctgcaattgcaggcgtgagccactgcacc

SEQ ID NO: 435173 - DNA, 201 bp, Homo sapiens
tgctttttcttttggctgacctgtgagaagaaggggaaaaagggcaatgtttctgaatcttaccatttttacttccttttatttggactctcctgatcatygtctcatacccacatagtctcaaaaccacattaaagtcacttcactctcagaggggctcccttagattctctctactttgctcactttgaggaggaggca

SEQ ID NO: 435174 - DNA, 201 bp, Homo sapiens
ttttgtatttttagtagagacagggttttaccacattggccaggatggtctcaatctcttgacctcatgatctgcccacctcagcctcccaaagtgctggsattacaggtgtgagccactgcacccggccctggttaaattttaaaaattacttacagtagactgtctggaaataatttaaatgttcctttaatttttctg

SEQ ID NO: 435175 - DNA, 201 bp, Homo sapiens
cattctattttaacaaagaaaatatttcaaattacaaggtatacaagtcaatactgttttgaagtgaaaaattatttgctttgagagtgtatgcatgtatrtatatatatgataaatgattataacgtgtgtgtcagtgacaatatgtagtctttggttgttagttatatactgtctacctgtgagatgcaaggtaagtgg

SEQ ID NO: 435176 - DNA, 201 bp, Homo sapiens
acttaaagcaccttaatttcctctgggaccaggtcattttctactagtggtaagctcattctgtatcattcctgctacagtattattttttaaactaatarattggttagaataaggggtcagttgcatgtaagagacccaaattaacagtggctaagaaatgcaataaaaatgaagataaatagctgggacctaattaaa

SEQ ID NO: 435177 - DNA, 201 bp, Homo sapiens
attcatacacctagactacaaagacttgtgtttgacttggcagatcgaagttatgaactttggataactggtcatgtcactgagaagcttttatgactgaycaaatattactcttcaatgcaggcagaacattcacctttatctggctaatcaagattcttttacagtgaatcacttctcttactttacaacctaactcag

SEQ ID NO: 435178 - DNA, 201 bp, Homo sapiens
ggcaacagccttcaaactggctgtcttttgtctattcttctggcttattacattctcctggcaaccttgcttaccactcacctgccccagctacaaccctytgaaggtggcactattatcatccacgttttacataggaggaggctgagttctggagagggtgactttcccaaatctagacagctagtatgtggcagaacc

SEQ ID NO: 435179 - DNA, 201 bp, Homo sapiens; identical to SEQ ID NO: 115833

SEQ ID NO: 435180 - DNA, 201 bp, Homo sapiens
tctgcctggagcgactgtgcatgctcctcattcctgccctcctgcatagtagttactcaccatagttacccaggccagcatcatttccctgggaagacttycctgaaccccagaggggctctcaccgcacacttgcagaggccttgctgagcccgtgtccgcagcaacgctacgtttccctgcaaccctatggttaacatt

SEQ ID NO: 435181 - DNA, 201 bp, Homo sapiens
taacaaagaaaatatttcaaattacaaggtatacaagtcaatactgttttgaagtgaaaaattatttgctttgagagtgtatgcatgtatgtatatatatrataaatgattataacgtgtgtgtcagtgacaatatgtagtctttggttgttagttatatactgtctacctgtgagatgcaaggtaagtgggtcacagact

SEQ ID NO: 435182 - DNA, 201 bp, Homo sapiens
aggtttatttaagaggcaggacttgaactaagctggactgagtgaggatgaattgggagaagaaagcacttctgtggggtgttggggacaagatgagaaargagttgactcagataaatcagagcatatgacaggtgcactggagagaagaaaggcactgcattgtggtaggatggagaagagctgacttgaatgaagcaa

SEQ ID NO: 435183 - DNA, 201 bp, Homo sapiens
cagggaagttacatgaaggaactagggagtttcatgattagataagacgttcgggtgggatctccaccggacagcactctaaatcatcagcagtgtgagcrgtgattcaatttgggaaagtgagtataggtttaaattctggccacagacaacctctcctacacaattcactgaacctcccctggaaggaggtttccacat

SEQ ID NO: 435184 - DNA, 201 bp, Homo sapiens
actagttgacttcaatagtcatggaatgcctttaatattcaagaaaataaaaaataggctgggcatggtggcttatgcctggaatcccagcattttgggargccaaggcaggaggactgtttgagctcagaaatttgagaccagcctgggcaacatggcaaaatcctatctttactaaaaatacgaaaattagccaggaat

SEQ ID NO: 435185 - DNA, 201 bp, Homo sapiens
tttctgtgggattggtggtgatatcccctttatcatttttattgcatctatttgattcttctctcttttcttctttattagtcttactagcggtctatcarttttgttgatcttttctaaaaaccagcttctggattcattgattttttgaagggtttttgtgtctctgtctccttcagttctgctctgatcttagttatt

SEQ ID NO: 435186 - DNA, 201 bp, Homo sapiens
gtatagaagtgcataaaatttatgagcccagcagcctatctatatctttcagagtggtctttgtggctcaggctctgatttggacctgaagattctgctayctattctgaatagtaagtgagcttaacttggctctagaatattattgcatctgccttgattaattctttcctgcaagatacttggcagtgtgccaatggt

SEQ ID NO: 435187 - DNA, 201 bp, Homo sapiens
tgtatttctgtgggattggtggtgatatcccctttatcatttttattgcatctatttgattcttctctcttttcttctttattagtcttactagcggtctrtcaattttgttgatcttttctaaaaaccagcttctggattcattgattttttgaagggtttttgtgtctctgtctccttcagttctgctctgatcttagt

SEQ ID NO: 435188 - DNA, 201 bp, Homo sapiens
tctgttgagaaaatcgtgtggtttttgttgtttgttttgtttatgtgatggattacatttattgatttgcatatgttgaaccagccttgcatcccagggaygaagccaacttgatcgtggtggataagctttatgatgtgctgctggatttggtttgccagtattttattgaggattttcgcatcgatgttcatcagggat

SEQ ID NO: 435189 - DNA, 201 bp, Homo sapiens
aggaatggtaccacctcctctttgtacctctggtagaattcagctgtgaatccatctggtcctggactttttttggttgataggctattaattattgcctyactttcagagcctgttatttgtctattcagagactgaacttcttcctagtttagtcttgggagggtgtatgtgtccaggaatttatccatttcttctaga

SEQ ID NO: 435190 - DNA, 201 bp, Homo sapiens
tttgcccgttcagtatgatattggctgtgggtttgtcataaatagctcttattattttgagatatgtcccatcaatacctagtttattgagagtttttagyatgaagggatgttgaattttgtggaaggcttttctgcatctgttgagaaaatcgtgtggtttttgttgtttgttttgtttatgtgatggattacatttat

SEQ ID NO: 435191 - DNA, 201 bp, Homo sapiens
atttgaataccctttatttctttctcttgcctgattgccctggacagaacttccaacactatgttgaataggagtggtgagagagggcatccttgtcttgtgccagttttcaaagggaatgctcccagtttttgcccgttcagtatgatattggctgtgggtttgtcataaatagctcttattattttgagatatgtccca

SEQ ID NO: 435192 - DNA, 201 bp, Homo sapiens
cctttcttctaagatcagaacaacgcagagatgtccattcttgccacctctattcaacatagtattggaaatcctagctacagcaattaggcaagagaaasaaataaaagacattccccaaataggaaagggagaagttaaattacacctgtttgccaataacgtgtccttatatatagaaaaccccagagactccaccaa

SEQ ID NO: 435193 - DNA, 201 bp, Homo sapiens
tgagctgtggcttgtagttctccttgaagaggtccttcacatcccttgtaagttggattcctgggaattttattctctttgtagcaattgtgaatgggaaytcactcatgattttgccatttgtctgttattggtgtataggaatgcttgtgatatttgcacattgattttatatcctgagactttgctgaagttgcttat

SEQ ID NO: 435194 - DNA, 201 bp, Homo sapiens
cttgcccatgactatgtcctgaatggtattgcctaggttttcttctagggtttttatggttttaggtctaacatttaagtttttaatccatcttgaataartttttgtataaagtgtgaggaagggatccagtttcagctttctacatatggctagtcagttttcccagcaccatttattaaatagggaaccctttcccca

SEQ ID NO: 435195 - DNA, 201 bp, Homo sapiens
cttaatgcacaggaggtggggaactctcttttagactttctttcaaaagctgcccactgagcacttttttcttttaaaaaattattgctcttttttttttwaaattatactttaagttctagggtacatgtgtacaatgtgcaggtttgttacataggtacacatgtgccatgttggtttgctgcacccattaactcatca

SEQ ID NO: 435196 - DNA, 201 bp, Homo sapiens
tttttggaatgatttgagaagaattagtgttagttctttataagcttgatagaattcagcaataaagtgatccagttctgggcctttctttgtggggagastttttattatgatgtaatctcattattggtctgttgaggttttctgtttcttcctggtttaatcttagaaggtagtatgtttcctggtatttaatcaatt

SEQ ID NO: 435197 - DNA, 201 bp, Homo sapiens
agactccaccaaaaaactgttaagataaacaaatacagtaaagttgtaggatccaaaatcaacacacaaaaatcagtacactgaaaactatttaaaaaatmattagaaaaatagaagacacaaataaatggaaagatagctcatgctcatggactggaaggattaaagttgttaaaacgtccatattacccaaagtgatct

SEQ ID NO: 435198 - DNA, 201 bp, Homo sapiens
tgataacagccggtacccacagagtgctacttactacatgccaggtgctgtcctaagcactttacatctgcgaactcattattcagttgagggaactgaaagaatcttcgctttcaaccgtcagttatattgccttttcacaggcaaggcaattgcagttatgttgcaattttcaattgcatctgcaatcagatgcaaagg

SEQ ID NO: 435199 - DNA, 201 bp, Homo sapiens
ctaaaagacagacaacagataaaaggcaagagaaaagtaatttttttttatcctggcatcacaggcttaatcatgtcaagtttcaaaacaaccccagcagycatctgaccctgttcctgcagttacctagtggaagggtagtgtcaagagtgataaaagtgtaagaatatttacctgtggtttccttcttaaaataaagtg

SEQ ID NO: 435200 - DNA, 201 bp, Homo sapiens
ttcaaacatcctcccttagctcggagaagtttgttattactgaccttctgaagcctacttctgtcaactcgtcaaagtgattcactgtcccgctttgttcygttgttggcgaggagctgcaatcctttggaggagaagagatgctctggtttttagaattttcagcttttctgctctggtttctccccatctttgtggttt

SEQ ID NO: 435201 - DNA, 201 bp, Homo sapiens
ctttaaaccactgtattattattacagcagcttttccttatctcatccgatacagtgcctaagggactgagctgagcttgtaagaagagcacgcctgcttrctaatgattacagcggtagcagaattccatctagggctggataccaaggtaacatgcaaacatttagtgagtctggggggaacagcaacacaaagcccta

SEQ ID NO: 435202 - DNA, 201 bp, Homo sapiens
tttgtggcaccagggaccggctctgttgaagacaattttttcatggactgggtggggtgaggatggtttcaggatgaaactgttccacctcagatcatgargcattagattcttacaagaagcacacaacctagatccctcgcacgtgtagttcacaataggtttcgtgctcctatgagaatcccatgccactgctgatct

SEQ ID NO: 435203 - DNA, 201 bp, Homo sapiens
ctagacatcttagaaatgacatttccaaaaaatttttttcctttcaaaacccactcctctccatcctactaaatggcatcgccattcattcagttgctaakgcctttaaaaaatcttggaatctggccaggtgcagtggctgacgcctgtaatcccagcactttgggaggccgaggcaggtggatcacgaggtcaggagat

SEQ ID NO: 435204 - DNA, 201 bp, Homo sapiens
cactcacagctcacaaaggcgtctcgcctgattggccagggcaggacctgccgcctcttctcggtgcacagacagtcatgccaaccctgggcagggtggcrtctgcccctgctttccccactgagtggggagacagggcagtgtgctcaggccctcaatcctcacgcaggtaggcctcctgctccgactcagcccgctcct

SEQ ID NO: 435205 - DNA, 201 bp, Homo sapiens
ttttatcatttttcattttgaagacataacctagcttctactggtctggtctgcaagggtatgctcattgtttctattgtgcaaataaaatgtaggttaayatgtaggaaatggggaaaatttctcaaagtgagagccacttagaccatttactataaagccctcattttagaaaaccagatgaaaactcaaatggtacct

SEQ ID NO: 435206 - DNA, 201 bp, Homo sapiens
gcctgtagtcccagctactcgggaggctgaggcaggagaatggtgtgaacccaggaggcagagcttcctgggcaacagagcgagactccgtctccaaaaaaaaaaaaaaaaaaaaatttttggaatctagagcagtggtccccaacgtttgtggcaccagggaccggctctgttgaagacaattttttcatggactgggtg

SEQ ID NO: 435207 - DNA, 201 bp, Homo sapiens
actcgggaggctgaggcaggagaatggtgtgaacccaggaggcagagcttcctgggcaacagagcgagactccgtctccaaaaaaaaaaaaaaaaaaaaatttttggaatctagagcagtggtccccaacgtttgtggcaccagggaccggctctgttgaagacaattttttcatggactgggtggggtgaggatggtttc

SEQ ID NO: 435208 - DNA, 201 bp, Homo sapiens
aaaatttctcaaagtgagagccacttagaccatttactataaagccctcattttagaaaaccagatgaaaactcaaatggtaccttcctagttaaaaaatwaaaaaaaaaacccaacacaaaacttgaacctaccagtttgatatgcagcttctgctgccatctctgaaagaccaactgcagtcatccaagtggtttccag

SEQ ID NO: 435209 - DNA, 201 bp, Homo sapiens
ctcgggaggctgaggcaggagaatggtgtgaacccaggaggcagagcttcctgggcaacagagcgagactccgtctccaaaaaaaaaaaaaaaaaaaaatttttggaatctagagcagtggtccccaacgtttgtggcaccagggaccggctctgttgaagacaattttttcatggactgggtggggtgaggatggtttca

SEQ ID NO: 435210 - DNA, 201 bp, Homo sapiens
tgaccccgtgtctattaaaaaaaaataagtaaataaaggccgaggcgggtggatcacttgaggtcaggaattcgaaatctgcctgaccaacatggtgaaaycccatctctacttaaaacacaaaaattagcccggagtggtggcacgctcctgtaatcccagctactcgggaggctgaggcaggagaatcgcttgaacctg

SEQ ID NO: 435211 - DNA, 201 bp, Homo sapiens
gcttgaacctgggaggcagaggttgcagtgagccgagagcgccccactgcacttcagcctgggcaacagagcgagactgagtctcaaacaaaacaaaaagaaaaaaaaaaattagccgggcgtggtggcgggcgcctgcaatcccagctactcgggaggctgaggctgagaatcgcttgaagccgggaggcacaggttgca

SEQ ID NO: 435212 - DNA, 201 bp, Homo sapiens
ttcaagtactcttggtgttttgaagtcatctatataaatcaagcaaagtgcttcagacagcataagaggtctagcccatttaaatggacttaaagtagtakatttagagaacactgattatattgattagacttaattcaataatttagataccacatgaggtaggtgcactaacacagaaatgcctagaactttctgctt

SEQ ID NO: 435213 - DNA, 201 bp, Homo sapiens
tcgcccaggagcctgcagcgctaggtagagagccctgcgccagctcccccggccccttctgccctcgggaggacgtcttcagacgctcgtctcccttcccrgactccccccatgccgtgtccctcctcctctccacgtctcctcagggacttcgagtggctgacgagggctggtcaggaggcggagcagccccaagaaggc

SEQ ID NO: 435214 - DNA, 201 bp, Homo sapiens
gctggtcaggaggcggagcagccccaagaaggcagcccggggtctcggggactcgtttctagaagatggacgaactgaaaaggaagccgggcttgacccagggggcggaggcggggctgtcctcagtcctcccgaccggagcgagacgccgcgacccagctgggcggacgagagatgagcgcgtaaggaaggcgggcgccg

SEQ ID NO: 435215 - DNA, 201 bp, Homo sapiens
cctgtcccctctacgcggccgcagcggtacctgaagaatgaagttacgctgcgcgacagccaactcttcagagccgccattgtgcagcgcgcggacgccaracgcacacgccggaagtgacgcagcttcgtgagcgcggagcggggcacggcctccacctgagagcgcctcgccccatagccacgcccccacccaaggaag

SEQ ID NO: 435216 - DNA, 201 bp, Homo sapiens; identical to SEQ ID NO: 252820

SEQ ID NO: 435217 - DNA, 201 bp, Homo sapiens
cttcactactaagggaatgaggctctgatttctgaaagacacaaacattgtcactcaacctctaaagctcaaactgagaactttttcaccaataggcaagyaaaaaacgtaattgtcatgctgcttagtgttttaggctgaaactgcactatatttctttgggttatattttttaaggccttattttggcaatttaagaca

SEQ ID NO: 435218 - DNA, 201 bp, Homo sapiens
gcagtgcccaagggctaagaaccaggtccagcgcaagcctgagaccacaggaggcactcacagctcacaaaggcgtctcgcctgattggccagggcaggayctgccgcctcttctcggtgcacagacagtcatgccaaccctgggcagggtggcatctgcccctgctttccccactgagtggggagacagggcagtgtgct

SEQ ID NO: 435219 - DNA, 201 bp, Homo sapiens
gagtggctgacgagggctggtcaggaggcggagcagccccaagaaggcagcccggggtctcggggactcgtttctagaagatggacgaactgaaaaggaarccgggcttgacccagggggcggaggcggggctgtcctcagtcctcccgaccggagcgagacgccgcgacccagctgggcggacgagagatgagcgcgtaa

SEQ ID NO: 435220 - DNA, 201 bp, Homo sapiens; identical to SEQ ID NO: 152679

SEQ ID NO: 435221 - DNA, 201 bp, Homo sapiens; identical to SEQ ID NO: 152700

SEQ ID NO: 435222 - DNA, 201 bp, Homo sapiens; identical to SEQ ID NO: 152757

SEQ ID NO: 435223 - DNA, 201 bp, Homo sapiens; identical to SEQ ID NO: 152762

SEQ ID NO: 435224 - DNA, 201 bp, Homo sapiens; identical to SEQ ID NO: 152717

SEQ ID NO: 435225 - DNA, 201 bp, Homo sapiens; identical to SEQ ID NO: 152747

SEQ ID NO: 435226 - DNA, 201 bp, Homo sapiens; identical to SEQ ID NO: 152780

SEQ ID NO: 435227 - DNA, 201 bp, Homo sapiens; identical to SEQ ID NO: 152782

SEQ ID NO: 435228 - DNA, 201 bp, Homo sapiens
ggctggagtgtaatacctagatctcggctcactgcaaactccgcctcccaggttcaagcgattttcctgcctcagcctcctgagtagctaggattacaggygcccaccacaacgcccagctaatttttttgtatttttagtagagatgggatatcaccatgttggccatgctggtcttgaactcctgacctcgggtgatcc

SEQ ID NO: 435229 - DNA, 201 bp, Homo sapiens; identical to SEQ ID NO: 152828

SEQ ID NO: 435230 - DNA, 201 bp, Homo sapiens
ttttgtcttttcaggaaagatgaggatcctgaaaataaaattgaatttaaaacacgtctgggtgagtacagtttctatactagtgactatgcattctggawgaattgtacggaatttaatgctctgggaaggatatgcttctcctttcccccaacctcctttcttctttctttctttttgagacagtgtctcacttaatcg

SEQ ID NO: 435231 - DNA, 201 bp, Homo sapiens
tgacccatttctccttccattgcagggttgaagtcaaaagaccaaaatactaatcactagttacaaccagagatgctccacaaggatatgctccccactgwtttctttctacaatttccaaaggttgcaagatgtttttttgtggatgaatataaaattttattgtgtaattacttggttccattaaaattggttaacttg

SEQ ID NO: 435232 - DNA, 201 bp, Homo sapiens
ttcagagtctttgcacaagatcaaatgacatagggtcaaaaatctattttttacttcctatagcaaagtgccaggctttgattcccatggtaggcagtaarcaagcatcaatgcataagtagaaagggcagaaaaaattgcagtctttggaaaataactaaattttattctagccaggattgaagttttcctctaagtctt

SEQ ID NO: 435233 - DNA, 201 bp, Homo sapiens
attagcaagctgacccagatcctttcatacctgaggcagggaacccgtaacaagaagcttaagaagaaggataaaggtacctggagggttagagagagaarccttacccacagaggacgtttggggataaaaccaaggtctcctggagctttctgtctccagaatattgagaggctcctgggaagcagagaaaaatgggag

SEQ ID NO: 435234 - DNA, 201 bp, Homo sapiens
ggaataggcctatctatattttaatctcatcttcgctagtttcttggtggataacctagacatttgcttagcctctctaatccacagatagaatggagatmcagtagcaataataacttttatcaggatgtcatgaggatcagctgtgaaagtacatgtaggcatttagcaccaatgcctggcatatggtaaccacccaat

SEQ ID NO: 435235 - DNA, 201 bp, Homo sapiens
aggttaggagttcaataccaggtgggccaacattgtaaaacctgatctctactaaaaattagccaggcgtggcggcatgtgcccgtaatcccagttactcrgaaggctgaggcatgagaattgcttgaacccagaaggtggaggttgcagtgagccaagatcgtgccactgcattctagcctgggcgacagaatgagactc

SEQ ID NO: 435236 - DNA, 201 bp, Homo sapiens; identical to SEQ ID NO: 152831

SEQ ID NO: 435237 - DNA, 201 bp, Homo sapiens
tcatatgtcatttatgtctcctcaggtagattgaaagatttttcagtttggggcttatgagttaaaagaagtaacatggttagtgattaaaagttcaaaayttggagtcagagagacctgagtttaaaccttgatgatgaaacagcactaagtgtatgattttaggcaactgactttgctgtttgttcatctgtaaaaatt

SEQ ID NO: 435238 - DNA, 201 bp, Homo sapiens
ttattttaatacgttcctgggttccagagaactggtctctttactccaaccccccctgcctccctgctccctcctaccctgcccctctccttcccttttaygctgaattttgacagaatgaaaccatcccttgttccttcccagagcacccataacagctcacagcccactcagaattttcatgttggggcttctagccct

SEQ ID NO: 435239 - DNA, 201 bp, Homo sapiens
attgcccttcaaattggttatactggtttacattctcatcagcattatatgagagagtccccttcccaaattctcactcacacttgatttatcaaactttytggtagttaacactctgatgcattaaaagtggcatggcatatctggtcgggcgtggtggcttacacctataatcccagcactttgggaggctgaggtggg

SEQ ID NO: 435240 - DNA, 201 bp, Homo sapiens
tccttcctatttctttctactaagtagaatgacttttaatagtccctcaggtatttatgatactctctaaagtttgagaactgcccacctacaaatattgrtgtggatttctgcttgattgaaagtgttactttgatcagtattctaggtctttctaaaaatcctcaaggagacttcttggggtttctggggctgtggcaa

SEQ ID NO: 435241 - DNA, 201 bp, Homo sapiens; identical to SEQ ID NO: 152834

SEQ ID NO: 435242 - DNA, 201 bp, Homo sapiens
gggagaagaggaacttgattagatatcaagttggattggatatcaagagtgggaaaactttctgtgaactgacttaggattcctttttaaaactgaggtcrgcaggccaaggaagagccctagtcagaagagagctttaaaggagtctgactttaatttgatcaagagaggagtctttgttagtgtaccaattaaaataat

SEQ ID NO: 435243 - DNA, 201 bp, Homo sapiens
cacagttttaacaaagaaatcaaccaccgctccacccccatacctaaccaagttgcttttagtaattttctataaattctcacttgtccctgttgtattcrgaattaagttcagtctctctactctattacaatggtcttgactcttgttacagtagtcttcaataaagtcttccttggggagaagaggaacttgattaga

SEQ ID NO: 435244 - DNA, 201 bp, Homo sapiens
tgcctcccaaagtggtgggagtacaggcgtgagccaccgtgcctggcccccgataaaatcatctttgataacatccccaattccagtccatttcttttttyttttcttttcttttcttttctttctttttttttttttttgagacggagtctcactgttacccaggctggagtgcagtgatgcaatcttggctcactgcaa

SEQ ID NO: 435245 - DNA, 201 bp, Homo sapiens; identical to SEQ ID NO: 152836

SEQ ID NO: 435246 - DNA, 201 bp, Homo sapiens
aagctttgcccaagtgagtcggtactgaatatgggcagggtgtgaggaggggtgtggggatttggtggaatagtgcatataaggttagagggtgtggtctrgctgagatgttccccactaagttctttgcccacaggactctgggaaaacctcgccactgctatgcaatctctgatgcattctttcccaactgcttttttc

SEQ ID NO: 435247 - DNA, 201 bp, Homo sapiens
catgactttaggtaaattacttaaatctcagccatagtattcttatcagtaaaaaggataataatatccacttcatagggctgttgcaaagattaaatgaygcaaagcttgcatagcacttggcatggtggctagcacagagtaagcacataagtgacagctgttcttgtagatcctggctacttgctgctcttctcctta

SEQ ID NO: 435248 - DNA, 201 bp, Homo sapiens
aagtttgctgggtctgctggctgggaaggcacagaatcatatcctttattttaatacgttcctgggttccagagaactggtctctttactccaaccccccmtgcctccctgctccctcctaccctgcccctctccttcccttttacgctgaattttgacagaatgaaaccatcccttgttccttcccagagcacccataac

SEQ ID NO: 435249 - DNA, 201 bp, Homo sapiens
tgatccacccgcctcggcctgctgaagtgctgggattacaggcgtgagccaccgcacctggccccccaaccccctttcccccaccccctttttttttttttggagacagagtcttgctcttgttgcccaggctggagtgcagtagcgcgatctcagctcactgcagcctccgcctcccatgttcaggcgattctcttgcct

SEQ ID NO: 435250 - DNA, 201 bp, Homo sapiens
atttgccacccacaaagggctgttcttttttttttttttttttgagatggagtctcgctctgtcacccaggctggactgcagtggcacgatcttggctcayggcaagctccgcctcccaggttcatgccattctcctgcctcagcctcccgagtagctgggactacaggcgcccgccaccacgcccggctaattttttgta

SEQ ID NO: 435251 - DNA, 201 bp, Homo sapiens
gtttcagactgattcttttcttttttttatttttttgagacagagtcttgctctttttgcccaggctggagtgtaatacctagatctcggctcactgcaawctccgcctcccaggttcaagcgattttcctgcctcagcctcctgagtagctaggattacaggcgcccaccacaacgcccagctaatttttttgtattttt

SEQ ID NO: 435252 - DNA, 201 bp, Homo sapiens; identical to SEQ ID NO: 152847

SEQ ID NO: 435253 - DNA, 201 bp, Homo sapiens
gcactttgggaggccgaggtgggtggatcacaaggtcaggagttcaagaccagcctggccaatatgggtgacagtgagactccgtctcaaaaaaaaaaaaacagtgtcatatctttgttttaatttgtatttccctgatttctgttaatttaatcatgatttttacttgttcctttttcatttcttattgagtcctaatat

SEQ ID NO: 435254 - DNA, 201 bp, Homo sapiens
caatttccaaaggttgcaagatgtttttttgtggatgaatataaaattttattgtgtaattacttggttccattaaaattggttaacttgctattttcttkgttgagcatgtcccctccagtgcccttgaagcaccaagaacactaattccactggttgtgtaaaatcacatgcagaaagtcatcagtcctttcctgagct

SEQ ID NO: 435255 - DNA, 201 bp, Homo sapiens
ctataagctggaagaagttgtagttctgattttgagtaactacgaagaggtggccagcagttctatcaggacagacatgagcttttccccatagagagtasgttggagatgtagggaagcaagcaggaacagttctgttgaccttgaggtagcagctgatgagccttatacatttgcctttctctggtcacagttattatg

SEQ ID NO: 435256 - DNA, 201 bp, Homo sapiens
tccccatggcacttggggcacttggcgcattattgtagcttctgagcttaagccgggtgtgtgtgtgtgtgtgtgtgtgtgtgtgtgtgtgtgtgtatgtrtgtatgtgtgacgcttgagcccggagaagccacagggtcctaagtgaggccgacagctccaaactccgtccccagtcctcactcctactccaagtgatga

SEQ ID NO: 435257 - DNA, 201 bp, Homo sapiens
aggtatgtagttagaaggatggtgggcgcctttgggcagttattatttgttttacatgtatctccttccccactcctaaaaaatctatctcatttactggrccccaccctcctttagctgcagcagtagaaacagcagcattgagggtcatgagcagcttaactatttcagagtctttgcacaagatcaaatgacataggg

SEQ ID NO: 435258 - DNA, 201 bp, Homo sapiens
tcttccggaagtcttctctgatcctccagcgcaggattagggtcctctgctttgtgctcccacagcttcttgtagtttcctatttcagcacttattacatygtgttgacactgtcgctgttctaacttttgttctgtattgttcactactatatctcaaatttttgcataggatctgacacgtaagagactgattaaatta

SEQ ID NO: 435259 - DNA, 201 bp, Homo sapiens
ttctagaatgttctagactcctgactttcttgaatggtcttgattcattttgatgcagggcttttgtgcaggctgttttatctctggaatatcctttcacrgcacttcgtttccctcccttcacctactgtattgtaattcagtctttagtttgttaagtgaatgaatgaataaatgaagagatttctgctgagtggttta

SEQ ID NO: 435260 - DNA, 201 bp, Homo sapiens
actgacccatttctccttccattgcagggttgaagtcaaaagaccaaaatactaatcactagttacaaccagagatgctccacaaggatatgctccccackgttttctttctacaatttccaaaggttgcaagatgtttttttgtggatgaatataaaattttattgtgtaattacttggttccattaaaattggttaact

SEQ ID NO: 435261 - DNA, 201 bp, Homo sapiens
gttcttcccctgagttcactgtattgaaatagcatggtttaatcttggagccttgtttaatcctgcctctactgtttattagttttgtgaacttgccaagytctttcactgtttatgcctcagtttcctcatcaggaaaatggagagaaatatagttccctcttcatagattttatgagaattaagtgagatatgcattta

SEQ ID NO: 435262 - DNA, 201 bp, Homo sapiens
tgttctagactcctgactttcttgaatggtcttgattcattttgatgcagggcttttgtgcaggctgttttatctctggaatatcctttcacagcacttcstttccctcccttcacctactgtattgtaattcagtctttagtttgttaagtgaatgaatgaataaatgaagagatttctgctgagtggtttaacattctt

SEQ ID NO: 435263 - DNA, 201 bp, Homo sapiens
aatatccacttcatagggctgttgcaaagattaaatgacgcaaagcttgcatagcacttggcatggtggctagcacagagtaagcacataagtgacagctrttcttgtagatcctggctacttgctgctcttctccttattgtaggccgcaatgtttaccgaatgctttttaagagcaaagcatatgagcggaatgagttg

SEQ ID NO: 435264 - DNA, 201 bp, Homo sapiens
tggatgaactattttattaggctctaagtgggaggtctagggggtggtcattcctatgcagataacctcttagtcgggtaggtttccagatgaagcatagsgtcagggtatgcaacatctgtttaactcttgcttctccttaggatggatgacatggctgtggatagtgatgaggaggtggattatagcaaaatggaccag

SEQ ID NO: 435265 - DNA, 201 bp, Homo sapiens
ggtcggagggaaaaacaggaagcggaaaggctgcgaacgcaaagcagtgtgggttgattctgaggtgcactgtgggaaagagcttgtcgctgcggtgttgytgttggagactcgattgttggtgacagcgaaagaacgataacaaaatgccggagcgagatagtaaggctcaggccatccgttatttcttccccatggcac

SEQ ID NO: 435266 - DNA, 201 bp, Homo sapiens
aaagtttgctgggtctgctggctgggaaggcacagaatcatatcctttattttaatacgttcctgggttccagagaactggtctctttactccaacccccmctgcctccctgctccctcctaccctgcccctctccttcccttttacgctgaattttgacagaatgaaaccatcccttgttccttcccagagcacccataa

SEQ ID NO: 435267 - DNA, 201 bp, Homo sapiens
gcattaagagctggagaggatggtgaagttcagtggaaattaactgaggagtatgttcctgactcctctctttaaatttcagggaagctggaagagaagaracctcctgaggctgacatgaagtatgtatcctagcccctggcatctgatcagagggagggggtctgtacatttcttgtgtctggcattttggggaggtgc

SEQ ID NO: 435268 - DNA, 201 bp, Homo sapiens
catttcttgtgtctggcattttggggaggtgctgacatgagaatctggagaaatggtcagggggagtgaaggtgtatgtgtgaatttggccagctagtgakctccattttcccagtatttttgaagacattggggattacgtaccctccacaaccaagacacctcgggacaaggagcgggagagatatcgggaacgggagc

SEQ ID NO: 435269 - DNA, 201 bp, Homo sapiens
gtattcttatcagtaaaaaggataataatatccacttcatagggctgttgcaaagattaaatgacgcaaagcttgcatagcacttggcatggtggctagcrcagagtaagcacataagtgacagctgttcttgtagatcctggctacttgctgctcttctccttattgtaggccgcaatgtttaccgaatgctttttaaga

SEQ ID NO: 435270 - DNA, 201 bp, Homo sapiens
cacccagtccgcccaggttggagctgctgagatgacactcacggagctgggacgtacggtccagtccttggagatcgacctggactccatgaaaaatctgmaggccagcttggagaacagcctgagggaggtggaggtccgctacaccctgcagatggagcagctcaacgagatcctgctgcacctggcgtcagggctggc

SEQ ID NO: 435271 - DNA, 201 bp, Homo sapiens
ctggtccctgggctctgtccagccgcccagctggtcaacagcgtggccagagcctatgcacgtgccaggggctctggtttccagatctccgtgtcctgctmcaccagcttctgggatggcttggggtcccggggcctggccgcagggatggctgggggcctggcaggaataggaggcatccagaacgagaaggagaccatg

SEQ ID NO: 435272 - DNA, 201 bp, Homo sapiens
ttgtttttactttttcactgtcttattttaatgtcagaataaatatgtattgaagtagtagtatactgaggtcgttggcaaagcctgggtcctgtcctctygttctcctccccagacagcatgagtttcaccacttgctccaacttctccaccaattactggtccctgggctctgtccagccgcccagctggtcaacagcg

SEQ ID NO: 435273 - DNA, 201 bp, Homo sapiens
cacatgaaaagatgctcagtattgctaatcattagggaaatccaaagcgaaaccacctcatgagataccacctcatacatattagaatggctgctctcaaaaacaaacaaacaaacaaacaaaaatcacaaacacaaaaagcaaaaaataacaagtgttggcaagaaatggtgaatgtggaaccctcctacactgctggta

SEQ ID NO: 435274 - DNA, 201 bp, Homo sapiens
acatgaaaagatgctcagtattgctaatcattagggaaatccaaagcgaaaccacctcatgagataccacctcatacatattagaatggctgctctcaaaaacaaacaaacaaacaaacaaaaatcacaaacacaaaaagcaaaaaataacaagtgttggcaagaaatggtgaatgtggaaccctcctacactgctggtaa

SEQ ID NO: 435275 - DNA, 201 bp, Homo sapiens
catgaaaagatgctcagtattgctaatcattagggaaatccaaagcgaaaccacctcatgagataccacctcatacatattagaatggctgctctcaaaaacaaacaaacaaacaaacaaaaatcacaaacacaaaaagcaaaaaataacaagtgttggcaagaaatggtgaatgtggaaccctcctacactgctggtaaa

SEQ ID NO: 435276 - DNA, 201 bp, Homo sapiens
ctcaagggaccccaaatagccaaaacagtcttttcctttttttgagatgaagtctcactctgtcacccaggctggagtgcagtggcaccatctgggctcawtgcaacctccgcctcccagtttcaagcaattgccctgcctcggcctcctgagtagctgagattacaggtgtacaccaccatgcccggctaatttttgtat

SEQ ID NO: 435277 - DNA, 201 bp, Homo sapiens
atgaaaagatgctcagtattgctaatcattagggaaatccaaagcgaaaccacctcatgagataccacctcatacatattagaatggctgctctcaaaaacaaacaaacaaacaaacaaaaatcacaaacacaaaaagcaaaaaataacaagtgttggcaagaaatggtgaatgtggaaccctcctacactgctggtaaaa

SEQ ID NO: 435278 - DNA, 201 bp, Homo sapiens
aaactggagtagggacttaatttttgtcaagttagggttgtaggagaaaccaggaaaagtattactgttctctctacagctaagacagagatttagggggrtatgctgaggcacaccacttccctaaatttagtaacttgctagagagctccaagactcaataggaaattatactcatggctcagatttattacagccaat

SEQ ID NO: 435279 - DNA, 201 bp, Homo sapiens
attatattttaccataattaaaaaaaaatactgtattgggaaaaataatagaatagcaagttttctattaaaattgcctttaattaccaaaaaattagtargatttaatgtagggttttttgcagatacccattaccaaattaaagtttgtttttaaatttaattttattattatttcactctgttgatagtgtcctttga

SEQ ID NO: 435280 - DNA, 201 bp, Homo sapiens
aggtgtggtgggagaagcaatttatttcgtgtcttgtccccagtcctgtggggctgtcgggcagttgctgtgtctgcggagatgaagtttcccgctggcayctccccacccacccggggcagcagctggggtcttcctcctgcagaagcccgacaggcagctgcgagtcaccccacactctgatggtctcactcgtgatca

SEQ ID NO: 435281 - DNA, 201 bp, Homo sapiens
ctctctcctgccctcagcccggctggccagccccctcccccgggaggaggagatcgtgtttccagagaagctcaacggcagcgtcctgcctggctcgggcrcccctgccaggctgttgtgccgcttgcaggcctttggggagacgctgctactagagctggagcaggactccggtgtgcaggtcgaggggctgacagtgca

SEQ ID NO: 435282 - DNA, 201 bp, Homo sapiens
ggagatcgtgtttccagagaagctcaacggcagcgtcctgcctggctcgggcgcccctgccaggctgttgtgccgcttgcaggcctttggggagacgctgytactagagctggagcaggactccggtgtgcaggtcgaggggctgacagtgcagtacctgggccaggcgcctgagctgctgggtggagcagagcctggcac

SEQ ID NO: 435283 - DNA, 201 bp, Homo sapiens
cctgcctttcctttctccatgagcctcctttcttggtaaggctcaggcctctccccttcacccttctcctagccagacccaccgagggttctcagaggtgrgtcacagactctgggctgggaataactgctccctctccccaccccaccccttcctggccatggcatctcctactgacacagtccccagcagtaaaggtct

SEQ ID NO: 435284 - DNA, 201 bp, Homo sapiens
tgcgcagcttctgtgcctggcagcggggcctcaacacccctgaggactcggaccctgaccactttgacacagccattctgtttacccgtcaggtgaggccscagtcagcaccgcaggccatgcactgcacaattctaagaagcgccactacatagactatgatgcaaatgatgttcctggagttgtgtgacatggtgcctt

SEQ ID NO: 435285 - DNA, 201 bp, Homo sapiens
ctgctccaggtgtagacatacatttacatttttctattaaataaattagttggtcgaaactactgtgaactcctctgtgtgtgtgtgtgtgtgtgtgtgtstgtctgtgtgtgtgtatttggagggggagtcagagacaatgggtggggtcacagttgggaatgttggctataaggaaaagtgggtagggagggaccctga

SEQ ID NO: 435286 - DNA, 201 bp, Homo sapiens
cccaactggctcaggtgaggagtaggggggatgggagcccttgggaggggacagtagagcaggaaggactgtcccttgagtgcaagaccaagggggtgttkattcccctgctgctgtggggagtgcctttaacctctgggaattgtccttggccgtctgcagggaagagcagagctgtgctgtctagagttctcaggggtt

SEQ ID NO: 435287 - DNA, 201 bp, Homo sapiens
tggatctgatcatccacagctgcagccagatttattatggagtccctcagggcatggggaagggaccctcagatcctatcagggcctttgctcccacaggycatgtcttcaacatgctccatgacaactccaagccatgcatcagtttgaatgggcctttgagcacctctcgccatgtcatggcccctgtgatggctcatg

SEQ ID NO: 435288 - DNA, 201 bp, Homo sapiens
ttgaggctgtagtgagccatgatcatgccactgtactgcagcctgagcgacagagcaagactctgtctcaggaaaaaaaaaaaaaagtaagtaattaaaayaaaaattataaataacaaaaatttaaatcctcttatagtcctaggattgtttttctaggctccatcaggccccagggagcctaagctttctgctggcaat

SEQ ID NO: 435289 - DNA, 201 bp, Homo sapiens
caagacccgccaggagtcaggaatcccgtggggtgtgtggggcccagctgactatgctgagttccagacccaggaagtgagggattggagaatcgaccgamccatgggtctgagaggctatttcaggatcttcctctccctttttctctacagcgctttgcttcactgagtagatttgtggagacactggtggtggcagat

SEQ ID NO: 435290 - DNA, 201 bp, Homo sapiens
ctaggtatagggctattactcctctctgctccaggtgtagacatacatttacatttttctattaaataaattagttggtcgaaactactgtgaactcctckgtgtgtgtgtgtgtgtgtgtgtgtgtgtctgtgtgtgtgtatttggagggggagtcagagacaatgggtggggtcacagttgggaatgttggctataagg

SEQ ID NO: 435291 - DNA, 201 bp, Homo sapiens
  misc_feature (1)...(201): n = A,T,C or G
gacttcaatgtgagatcctagggcaggggtggggtaaagggcccgggggtgtggggactggccttaagcccaggagagagttcacttatgccccacttccnttctgtgcctttgcagattccacaggctggtggctggggtccttggggaccatggggtgactgctctcggacctgtgggggtggtgtccagttctcctcc

SEQ ID NO: 435292 - DNA, 201 bp, Homo sapiens
ttctttaagcaggtgtagatgtgtgactgtaagttacttcacctctctgtgtttgtagttgatatgtcagataagtataatagcggtacctatctcatagktatttgccatgattaaatagtgctggtcaagcatttagccaatgctcatctcataataagcatccaataaactatagctgcccattaaagcctcttacag

SEQ ID NO: 435293 - DNA, 201 bp, Homo sapiens
ccccggccgaccccttcaacgccacgccccactccccaggactggctgcaccgaagagcacagattctggagatccttcggcggcgcccctgggcgggcargaaataacctcactatcccggctgccctttctgggcaccggggcctcggacttagctgggagaaagagagagcttctgttgctgcctcatgctaagactc

SEQ ID NO: 435294 - DNA, 201 bp, Homo sapiens
aggggctgacagtgcagtacctgggccaggcgcctgagctgctgggtggagcagagcctggcacctacctgactggcaccatcaatggagatccggagtcrgtggcatctctgcactgggatgggggagccctgttaggcgtgttacaatatcggggggctgaactccacctccagcccctggagggaggcacccctaact

SEQ ID NO: 435295 - DNA, 201 bp, Homo sapiens
cccgaagagccaaggtaggcatctctggagtctgtgtcctgcggtgtcctcccgccatgtctgtcctactgacccctattcaccctctctccacccacttmcacttctggccgttctgcttccctcccttctgcctgcctttcctttctccatgagcctcctttcttggtaaggctcaggcctctccccttcacccttctc

SEQ ID NO: 435296 - DNA, 201 bp, Homo sapiens
ctgagctccccatctactccttccacacaggtacggatacaacaatgtggtcactatccccgcgggggccacccacattcttgtccggcagcagggaaacsctggccaccggagcatctacttggccctgaagctgccagatggctcctatgccctcaatggtgaatacacgctgatgccctcccccacagatgtggtact

SEQ ID NO: 435297 - DNA, 201 bp, Homo sapiens
attctggagatccttcggcggcgcccctgggcgggcaggaaataacctcactatcccggctgccctttctgggcaccggggcctcggacttagctgggagraagagagagcttctgttgctgcctcatgctaagactcagtggggaggggctgtgggcgtgagacctgcccctcctctctgccctaatgcgcaggctggcc

SEQ ID NO: 435298 - DNA, 201 bp, Homo sapiens
tagcatgctgcctgattcatactcagtgctctgaaaatgctggctagatgttatatgtgataataattattattgttatgattatcacccacatggtggcyggcactcacccatctacatcccctacttcatccaacttttccgacaacattgcttccctgatgggacatgggtctcgtttgatttaccaaccccttttga

SEQ ID NO: 435299 - DNA, 201 bp, Homo sapiens
tcctctgactccccatcttctaatgctgcatttggtgagaatcgaatgtgtggcctttgggacaagtccttcacccctcttccatgggctcctctgtcaamttatagtggtggtttcattcagctcctggacagccagtccctcaatggacaggcctcctggagatgactgaagtccctacactccctctctgtgataggg

SEQ ID NO: 435300 - DNA, 201 bp, Homo sapiens
tggccttggctcttttctctgctccaaatttgattttcatcccccactcccagctataggagtcaggtttgaggccctagggcttggtgtctggcttctgmtgctgcctttaaaatcactgtggcaaactgcaaactagggcaggagtggcaagagagggagggtatcccatacctccttctggtcaatccccttcacaca

SEQ ID NO: 435301 - DNA, 201 bp, Homo sapiens
  misc_feature (1)...(201): n = A,T,C or G
cgcaccgacctcttcaagagcttcccagggcccatggactgggttcctcgctacacaggcgtggccccccaggaccagtgcaaactcacctgccaggcccnggcactgggctactactatgtgctggagccacgggtgagggtcaggacacccccaggccctgtctatggtcacacacacccgcagtgctccctctgcttt

SEQ ID NO: 435302 - DNA, 201 bp, Homo sapiens
ctcctcggtctgtgtccagggccgatgcatccatgctggctgtgatcgcatcattggctccaagaagaagtttgacaagtgcatggtgtgcggaggggacsgttctggttgcagcaagcagtcaggctccttcaggaaattcaggttctttcaccatcattcctccctctaccttcctggacattctgggtcctagtgatg

SEQ ID NO: 435303 - DNA, 201 bp, Homo sapiens
cctctgcagtgtgggaaggggtgagaaatgctgctgtctttgtgtagttctcacttcctcccagaataaatagcatagctagaggaggcgaattttggctyagtagaattagaactgactttctgagggccagaactgtccaccactggaatgggctggctatgaaggaggtgattaccttgtcacgcagtgaggtatgca

SEQ ID NO: 435304 - DNA, 201 bp, Homo sapiens
atggggtgactgctctcggacctgtgggggtggtgtccagttctcctcccgagactgcacgaggcctgtcccccggaatggtggcaagtactgtgagggcygccgtacccgcttccgctcctgcaacactgaggactgcccaactggctcaggtgaggagtaggggggatgggagcccttgggaggggacagtagagcagg

SEQ ID NO: 435305 - DNA, 201 bp, Homo sapiens; identical to SEQ ID NO: 191137

SEQ ID NO: 435306 - DNA, 201 bp, Homo sapiens; identical to SEQ ID NO: 191289

SEQ ID NO: 435307 - DNA, 201 bp, Homo sapiens
taccgcggcgtggacctggaccagctgctggacatgtcctacgagcagctggagcagccgatgcagctgtacagtgcgcgccagcggcggcggctgaaccsgggcctgcggcggaagcagcactccctgctgaagcgcctgcgcaaggccaagaaggaggcgccgcccatggagaagcaggaagtggtgaagacgcacctg

SEQ ID NO: 435308 - DNA, 201 bp, Homo sapiens
cgccagcggcggcggctgaaccggggcctgcggcggaagcagcactccctgctgaagcgcctgcgcaaggccaagaaggaggcgccgcccatggagaagcmggaagtggtgaagacgcacctgcgggacatgatcatcctacccgagatggtgggcagcatggtgggcgtctacaacggcaagaccttcaaccaggtggag

SEQ ID NO: 435309 - DNA, 201 bp, Homo sapiens
gaagtagagcagaagaagaagcggaccttccgcaagttcacctaccgcggcgtggacctggaccagctgctggacatgtcctacgagcagctggagcagcygatgcagctgtacagtgcgcgccagcggcggcggctgaaccggggcctgcggcggaagcagcactccctgctgaagcgcctgcgcaaggccaagaaggag

SEQ ID NO: 435310 - DNA, 201 bp, Homo sapiens; identical to SEQ ID NO: 377999

SEQ ID NO: 435311 - DNA, 201 bp, Homo sapiens
aatccccagtccagccttactgtctcaggatcctttgatgaaagtgtgaggatatgggttgtgaaaacagggaagtgccacaagactgctagctcactcckatccagtctcggccattcattttaatcgtgatggattcttgatagtttcaagtagctatgatggtctctgtcacatctgggacaccgcctcaggccagtg

SEQ ID NO: 435312 - DNA, 201 bp, Homo sapiens; identical to SEQ ID NO: 377991

SEQ ID NO: 435313 - DNA, 201 bp, Homo sapiens
tgctagctcactccgatccagtctcggccattcattttaatcgtgatggattcttgatagtttcaagtagctatgatggtctctgtcacatctgggacacmgcctcaggccagtgcctgaaaacgctcactgatgatgacaacccctggtgtctttcgtgaagctctccccgaagggtggatacatcgtggctgccacgct

SEQ ID NO: 435314 - DNA, 201 bp, Homo sapiens
agctgagatcatgccactgcactccagcctgggcatcagagtgagactccatctcaagaaaaaaaaaaaaagagagagagaatataagggtaagccatctrcagtggtgtgtacctgtaatcccagtgctttggaatttgggatttgggaagctgaggtgggaggattgcttcaggccaggagtttgagaacatcctgggc

SEQ ID NO: 435315 - DNA, 201 bp, Homo sapiens
gagatggggtttcaccatgttggccaggctggttttgaactcctgacctcaagtgatccgcctgcctcagcctcccaaagtgctaggattacaggtgtgarccaccacgcctggcctaaaatttccatttttaaatactgtttttggctgagacttggttcatttgttttaagggtgcttgtcattgctccttgaagcatt

SEQ ID NO: 435316 - DNA, 201 bp, Homo sapiens
tcctgacctcgtgatctgccctcctcggcctcccaaagtgttgggattacaggtgcgagccaccgcacccggccaaaatatatatatatataaaatatatrtataatgtaatttatatattacgtatatattatatatatcacgtaatatatattatatattatgtaacatatataatatataatacgtgatatatataat

SEQ ID NO: 435317 - DNA, 201 bp, Homo sapiens
cactcagcagtcaccacctcaggaggactttccatgagacagcacccacccctggcacccttcatcccctgtctctgacttttgtctcttcatccctcttrctgccagccaaagacattattcctctttgtatacttatttagtgtctgctgcccccaccagaacgtgagctttgtggtggcgttttatatttgtgggtga

SEQ ID NO: 435318 - DNA, 201 bp, Homo sapiens
gtctcccttcattccgggctccactcagcagtcaccacctcaggaggactttccatgagacagcacccacccctggcacccttcatcccctgtctctgacktttgtctcttcatccctcttactgccagccaaagacattattcctctttgtatacttatttagtgtctgctgcccccaccagaacgtgagctttgtggtg

SEQ ID NO: 435319 - DNA, 201 bp, Homo sapiens
tatccttatttcctcactcaaggattggggagaaacagagcaaactcgctcttcctccctcctacctccactttcacatccactttgttgaggactgctgygcatggcactaggcggaatgattgtcctctgtctttctcttttcctctgccaggtgttgggtgctggacagggtggacacctgggctgtggtcatgttca

SEQ ID NO: 435320 - DNA, 201 bp, Homo sapiens
ctgggttcaaacgattctcctgcctcagtctctcgagcagctgggattacagccacacgccaccacgcccagctaatttttgtatttttgtagagacaggstttcaccatgtcggccaggctgatctcaaactcctgaccttgtgatctgcccttcttggtctcccaaagtgctgggattacaggcgtgagccactgcgcc

SEQ ID NO: 435321 - DNA, 201 bp, Homo sapiens
agacctgagctggctggcactcatccatagcgtccgtggggaggcggggctgctggtgacgagtatcgtcccgaagaccccgtttttctgggccatgcacrtcactgaggtatggactggttgttggccccctcaggctcctgtgccttcctgcgtggcctccctagggtgggcatggtgacggggccggtcagtggtgga

SEQ ID NO: 435322 - DNA, 201 bp, Homo sapiens
tgagtgctccctggcagcagccctgctccctgccttccctgcttctgatcgtcttttctttgggttggctcaggatgcagtgaggatggagagagtggacsgatgtctcaaaagtcagctctaaagtcggagtcagaacaggggctgccgatgctctgtctcccagtctacctggagtgattcaacatagaaatcaataaa

SEQ ID NO: 435323 - DNA, 201 bp, Homo sapiens
gctccagatgagtgctccctggcagcagccctgctccctgccttccctgcttctgatcgtcttttctttgggttggctcaggatgcagtgaggatggagasagtggacggatgtctcaaaagtcagctctaaagtcggagtcagaacaggggctgccgatgctctgtctcccagtctacctggagtgattcaacatagaaa

SEQ ID NO: 435324 - DNA, 201 bp, Homo sapiens
gactgtagctccagatgagtgctccctggcagcagccctgctccctgccttccctgcttctgatcgtcttttctttgggttggctcaggatgcagtgaggwtggagagagtggacggatgtctcaaaagtcagctctaaagtcggagtcagaacaggggctgccgatgctctgtctcccagtctacctggagtgattcaac

SEQ ID NO: 435325 - DNA, 201 bp, Homo sapiens
actccatctctattaaaaatacaaaaattagccaagcgtggtggtgcacacctgtaattccagctactcgggaggctgaggcaggagaatccctggaaccygggaggcagaggttgcagtgagctgagatcatgccactgcactccagcctgggcatcagagtgagactccatctcaagaaaaaaaaaaaaagagagagag

SEQ ID NO: 435326 - DNA, 201 bp, Homo sapiens
ggaagctgaggcaggagaatcacttgaacccgggaggcagaggttgcagtgagctgagattgcacccactgcaggtcagcttgggctacagagtaagactytgtctcaaaaaaaagtaataataaagataaatagaattccatttttatttacagtgttaagtgcatctctttgtataactttttaaatagttgtgctaga

SEQ ID NO: 435327 - DNA, 201 bp, Homo sapiens
agttttatttaaaaaatttctttttttttcagaggcagggtctcactctgttgcccatgctggagtgcagtggcataatcataactcatagcagcctcaaactccttggctcaagcaatccttccaccttggcctctcaaagtgctgggatgacaggcatgagctgccgcgcttagctgagatggaaacgttttatagaca

SEQ ID NO: 435328 - DNA, 201 bp, Homo sapiens
tgttgaagtattcgatatacttactgaagtataatttacttaaagtgaacccatttaagtgtacagcttgacgaattttgaccagtgcgtgcagcatgtarccactgtcacaatcaagatagagaacatttcagtcgcccaaaagattcccccttcagggcccccagcagccctcagctgttgtccatcctttcgatgaga

SEQ ID NO: 435329 - DNA, 201 bp, Homo sapiens
aaataacacataacttgattcaataggatttgcagtcacataataatgagaacactggaggctttgagcagggggtgacatagccagatagaacccattcwtatattttagaaaatcaactttgttgaagtattcgatatacttactgaagtataatttacttaaagtgaacccatttaagtgtacagcttgacgaatttt

SEQ ID NO: 435330 - DNA, 201 bp, Homo sapiens
gggcgttccattttcaccctttagagcgtggctgactttgctttcagtgctttcatcctcctccagtccagtctgactgtggagaagaaggcagggtctcsggtgaagtcagggaacttttatgacctttaacagtcagaggtaaggtcagatgtggaaaacttggaatttgtaaattaaggagactatatttttggcaag

SEQ ID NO: 435331 - DNA, 201 bp, Homo sapiens
gaggtatggggggcagttaatggtggaggctgcctctgcaagcagagaagataaggtccataactaacccctgggagcttccctcaaaaggaggagggccsattctccgtatgcagaggtgaaccaggagaaaaagatcccattccagagcctgaagtgttagtgctagaagccgacttggctgcacatacgaggaaatct

SEQ ID NO: 435332 - DNA, 201 bp, Homo sapiens
tgatttggcctcaagcaatcctcctgctttagcctcccaaagtgctgggattgcagggcagccactgtgcccagccatatatatatatatatatatttttwtttaaattttctattgtttgtagagatggggtcccactatgttgcccaagctggtcttgaactcctggcaagcaatcctcgtgtctccacttcccaaact

SEQ ID NO: 435333 - DNA, 201 bp, Homo sapiens
gctgatttggcctcaagcaatcctcctgctttagcctcccaaagtgctgggattgcagggcagccactgtgcccagccatatatatatatatatatatttwtttttaaattttctattgtttgtagagatggggtcccactatgttgcccaagctggtcttgaactcctggcaagcaatcctcgtgtctccacttcccaaa

SEQ ID NO: 435334 - DNA, 201 bp, Homo sapiens
cagctgatttggcctcaagcaatcctcctgctttagcctcccaaagtgctgggattgcagggcagccactgtgcccagccatatatatatatatatatatwtttttttaaattttctattgtttgtagagatggggtcccactatgttgcccaagctggtcttgaactcctggcaagcaatcctcgtgtctccacttccca

SEQ ID NO: 435335 - DNA, 201 bp, Homo sapiens
cccagctgatttggcctcaagcaatcctcctgctttagcctcccaaagtgctgggattgcagggcagccactgtgcccagccatatatatatatatatatatttttttttaaattttctattgtttgtagagatggggtcccactatgttgcccaagctggtcttgaactcctggcaagcaatcctcgtgtctccacttcc

SEQ ID NO: 435336 - DNA, 201 bp, Homo sapiens
tgtttgaaaaagatcacagtcctcaggtgattggattgtgggggcaggtgccacagcagggctccctgtttgctgtcactgttattctggtaagagatggygagtactggggtggtgggtatggacacagagaaaaatgttcatgggctcgggtgtgtcttggaggaggaggtagcttggcttgctgatgaatttgacgta

SEQ ID NO: 435337 - DNA, 201 bp, Homo sapiens
tttattattaattattttttagacagagtctcgctcttgtcacccaggctggagtgcagtggcacagtcttggctaactgcaacctccgccttctgggttyaagcaattctccctgcctcagcctcccaagtagctgggattacaggcacctgccaccacgcccgcctagtttttgtatttttagcatggacaggatttcg

SEQ ID NO: 435338 - DNA, 201 bp, Homo sapiens
ctccacctcttgggctcaagccatcctcccaccttagcctccctagtagctgggactacaggcatgcaccactatgcctgactaatttttgtattttttgyagaaatggggtttcgccatgttgcccaggctggtctcgaactcctgggcttaagtgatctgcccaccttggcctctcaaagtgctgggattatagccatg

SEQ ID NO: 435339 - DNA, 201 bp, Homo sapiens
gggcacagcctttctgcttaggggactcatcccccaggcagttcagcctcctgcaggacaggcgttggtccagtcgttcctttccttgcgttggtccagtygttcctttccttgctccccttgctcttcccgcagagggtccttcctggtgctgctcctgagggaatgcttccaagacctgagctggctggcactcatcca

SEQ ID NO: 435340 - DNA, 201 bp, Homo sapiens
atctcgaactcctgacctcaaatgatccgtccacctcagcctcccaaagtgctgggattacaggcatgagccactgcatcccacctggattgttgtgtctycctaatgattttttcttccacttggtcacagtttctcatccccctagctgtatttcagaccttgtgattgctgtaaccatttcaagcatcccactctgcg

SEQ ID NO: 435341 - DNA, 201 bp, Homo sapiens
tccccagggttgggggtttttcaggtgagaacagtggagagagggagaccagcatgggttgggggctgcagggctatggggagtggcagggcacccaggcytttctgtccccacccagccctgcaccaggtgaccgctactacttcttttcctccctgcaggtagtgccagcagggcaccaggataagcgttctggtggtg

SEQ ID NO: 435342 - DNA, 201 bp, Homo sapiens
tttcaccacgttgaccaggctgatctcgaactcctgacctcaaatgatccgtccacctcagcctcccaaagtgctgggattacaggcatgagccactgcaycccacctggattgttgtgtctccctaatgattttttcttccacttggtcacagtttctcatccccctagctgtatttcagaccttgtgattgctgtaacc

SEQ ID NO: 435343 - DNA, 201 bp, Homo sapiens
gggaagggggatagatacttgggtttccccagggttgggggtttttcaggtgagaacagtggagagagggagaccagcatgggttgggggctgcagggctrtggggagtggcagggcacccaggcttttctgtccccacccagccctgcaccaggtgaccgctactacttcttttcctccctgcaggtagtgccagcaggg

SEQ ID NO: 435344 - DNA, 201 bp, Homo sapiens
cacccagccctgcaccaggtgaccgctactacttcttttcctccctgcaggtagtgccagcagggcaccaggataagcgttctggtggtgctttctgcccstgtctggggaaggctgctgggcagctcattctgtgactgtagctccagatgagtgctccctggcagcagccctgctccctgccttccctgcttctgatcg

SEQ ID NO: 435345 - DNA, 201 bp, Homo sapiens
gcaccaggataagcgttctggtggtgctttctgcccctgtctggggaaggctgctgggcagctcattctgtgactgtagctccagatgagtgctccctggyagcagccctgctccctgccttccctgcttctgatcgtcttttctttgggttggctcaggatgcagtgaggatggagagagtggacggatgtctcaaaagt

SEQ ID NO: 435346 - DNA, 201 bp, Homo sapiens
gatgctctgtctcccagtctacctggagtgattcaacatagaaatcaataaaacaaatgccaccatggctgagtgagacctttcatttttcttcccaggtrttggagaaggcttctggtgaaggatttggcaaaaccgccggtgagattctgcgctgccatcctttcccaggatgtggctttgcagctcctaatggacctc

SEQ ID NO: 435347 - DNA, 201 bp, Homo sapiens
cagccattcatgctggagaaaggtgagacatcttctatcttcctcccaagggtttcagggacaggagaagccatggttgcttctgggacctgaacaggaarcagcatagtgggcggccaaggtgcttcagtctctctttccacccaaccccagttttcagcatatgacccctgcaaagctgcctctcaagtgttggttttc

SEQ ID NO: 435348 - DNA, 201 bp, Homo sapiens
attctgtgactgtagctccagatgagtgctccctggcagcagccctgctccctgccttccctgcttctgatcgtcttttctttgggttggctcaggatgcmgtgaggatggagagagtggacggatgtctcaaaagtcagctctaaagtcggagtcagaacaggggctgccgatgctctgtctcccagtctacctggagtg

SEQ ID NO: 435349 - DNA, 201 bp, Homo sapiens
tcgttcctttccttgcgttggtccagtcgttcctttccttgctccccttgctcttcccgcagagggtccttcctggtgctgctcctgagggaatgcttccragacctgagctggctggcactcatccatagcgtccgtggggaggcggggctgctggtgacgagtatcgtcccgaagaccccgtttttctgggccatgcac

SEQ ID NO: 435350 - DNA, 201 bp, Homo sapiens
gcttccaagacctgagctggctggcactcatccatagcgtccgtggggaggcggggctgctggtgacgagtatcgtcccgaagaccccgtttttctgggcyatgcacgtcactgaggtatggactggttgttggccccctcaggctcctgtgccttcctgcgtggcctccctagggtgggcatggtgacggggccggtcag

SEQ ID NO: 435351 - DNA, 201 bp, Homo sapiens
ccccccaagaggacccctgatatgatccagcagcctcgggccccgctggtatgtcttctggcctttctgctctggggcgttccattttcaccctttagagygtggctgactttgctttcagtgctttcatcctcctccagtccagtctgactgtggagaagaaggcagggtctccggtgaagtcagggaacttttatgacc

SEQ ID NO: 435352 - DNA, 201 bp, Homo sapiens
ctgtggctacctctggccctgcgtattccccaggcccagcctcgccaggccaggcctattcagctgctcccccctcctcctgcgccccctcctcctcctcytcttctgaatggcaggaaccagtcctggagcccttcgatccctttgagctggggcagggcagttctccagagcctgagctgctgcgttctcaggagccca

SEQ ID NO: 435353 - DNA, 201 bp, Homo sapiens
gtggcagtggctccccatcgccggacacctactccctctattgctacccatgcacctggggagactgcaaggtgggcgagtcctctagccgcccagccccyggtcccctaccctcaaccacacagcccagccaggcctcccgggccctcacagagcctctgagcggtcgagccgcctcccttctgggggctgacacccctg

SEQ ID NO: 435354 - DNA, 201 bp, Homo sapiens
aaaaaaaattgaaagaaaatatttttattaatttcagtttcgtttcatttttcccctgtgttttctgacctgggctgggggatgctggaaggaagaacacrgccattccggagggtcttgggctggggctggggtgcaggcccgtgttgctgaggtcatagtggtgcttggttgcaatgcatgtgtgaccctatcggattc

SEQ ID NO: 435355 - DNA, 201 bp, Homo sapiens
ctgttggcttttggcctaaagctgccccagagtgagggtgtagatgtctgtgtctgtgagatgcctttcccttccccctctgctccaccgtggttgagggrggtggggcctggccccgcacacaggtgagtcgtgtacaagcctaacccatggcacctcagaggctccacctgtgggtcctggttcatgggtgacaacttt

SEQ ID NO: 435356 - DNA, 201 bp, Homo sapiens
cgccctacaacgtcatggtcctggtgaacaccttctgccagagctgcatccctgacacggtgtggtccattggctactggctctgctacgtcaacagcacyatcaaccctgcctgctatgctctgtgcaacgccacctttaaaaagaccttccggcacctgctgctgtgccagtatcggaacatcggcactgccaggtagg

SEQ ID NO: 435357 - DNA, 201 bp, Homo sapiens
cctccccagacacggcctacccacccctggcaaccaacatggccaacttcacacctgtcaatggcagctcgggcaatcagtccgtgcgcctggtcacgtcrtcatcccacaatcgctatgagacggtggaaatggtcttcattgccacagtgacaggctccctgagcctggtgactgtcgtgggcaacatcctggtgatgc

SEQ ID NO: 435358 - DNA, 201 bp, Homo sapiens
aggtgcgcaagaagcggcagatggcggcccgggagcgcaaagtgacacgaacgatctttgccattctgctagccttcatcctcacctggacgccctacaaygtcatggtcctggtgaacaccttctgccagagctgcatccctgacacggtgtggtccattggctactggctctgctacgtcaacagcaccatcaaccctg

SEQ ID NO: 435359 - DNA, 201 bp, Homo sapiens; identical to SEQ ID NO: 250160

SEQ ID NO: 435360 - DNA, 201 bp, Homo sapiens; identical to SEQ ID NO: 250180

SEQ ID NO: 435361 - DNA, 201 bp, Homo sapiens
tgagtccccctcttcctaagctattctctgcctgggccctcaccccatctgagtatctcctcctctctttaccccatctcaatatctcctcctactcccargaacccaccatctatctgcttttttcctgaatggggtctgctctcatccccgctcactcttcatccatcctttgtcaaacgtctagggggtcaggagatg

SEQ ID NO: 435362 - DNA, 201 bp, Homo sapiens; identical to SEQ ID NO: 250136

SEQ ID NO: 435363 - DNA, 201 bp, Homo sapiens; identical to SEQ ID NO: 250211

SEQ ID NO: 435364 - DNA, 201 bp, Homo sapiens
cagcagtgttgaagagcaaatcatgggtgtggggtggcttagcccggggaagggttggaaggctggatggtcagggcattttggcaaggcagtggtgaggytgtggcctccttttcaggtgccctcaacgatgacacccatgctcgtgacagacacagaggctttctggcagccacagccctggtttgtggtggtgttgac

SEQ ID NO: 435365 - DNA, 201 bp, Homo sapiens
tggggtggcttagcccggggaagggttggaaggctggatggtcagggcattttggcaaggcagtggtgaggctgtggcctccttttcaggtgccctcaacratgacacccatgctcgtgacagacacagaggctttctggcagccacagccctggtttgtggtggtgttgacagcaactggtgctcttctcctcttggccc

SEQ ID NO: 435366 - DNA, 201 bp, Homo sapiens
ctgtcattctgctttcagggaatagccagaaccgattcatcctgcaaggggccatcctggtgcacagtgaccttgtgttggggccgttctggccagagcarccccgtacctatgagctactgatctgtgtggccgatgcaggcccctccaccccccacctcagcaccacagccaccattattgtgcatctagttccccgga

SEQ ID NO: 435367 - DNA, 201 bp, Homo sapiens
tcagttcctgcttggcctctctgagcagcttcggcgccggctggccagggctcggcggacagctatggcaggaaagcggctgtcatgcccacctcgcccakaacctgaactgcctgcggatgtctcacgctttgcagctctcatgagctgtcgtagccgccagcccatcatctgcaatgatgtcagctacctctgaccctg

SEQ ID NO: 435368 - DNA, 201 bp, Homo sapiens
aggcagcacatggcgagaggaagaactgcctgtatcccagcgcccagcaccctcagcacagccccttcgtaggcagtgcctctcagtcagtggcctccccrtgcccagcagggcccctgtagccagtgtaccacctgtccaccatccacggcccaagtccaccccagacgcctgcctggagcactggcagggactggaagc

SEQ ID NO: 435369 - DNA, 201 bp, Homo sapiens
ggcgacagcgtccatccccaacactgagccactcctgtcctggatgacttcctgcttaggtccgtcacatttcagaagagagctggctttctggaagcctvcgtttcccattcatcacagaacacgacagagtgcacacatcctggtatccttggtcttcaaaggccatttccagcagaccctctaacccaggcttgttct

SEQ ID NO: 435370 - DNA, 201 bp, Homo sapiens
tggccctcgatgccaaattagcatttagtattttgcacaaagtctaagggaccatggctgcctgccttggggaggaaccatatctccctctgggccgcttytggcctcttggagccatgggccaaaggccaaggggatgggcagaggtctgtgtttggtctggcccagttccccatcattaaactcagcctgactgctgcc

SEQ ID NO: 435371 - DNA, 201 bp, Homo sapiens
ggttgactatattgaggactatggggagagacttaaaaacagctggttctgtggaagggcctgatttaatttctagatctaggaaggctcttgtttgatcwgttatgcagttagcaaagtaaatagtgtacgaggatgtgtaactctgtgtactagcaaaacaatttgggcactaacatctatgagaaatactagtataac

SEQ ID NO: 435372 - DNA, 201 bp, Homo sapiens
agcaactccgagaaggctccttccgggtcacccgcatgcgatgctggcgggtcacctcctctgtgagtcgggttaggagggggaagggcctgggttggggrcccggcaagccttgagcttaggtatgggctgcagcgggtcagggagccagacaggttggtcagagtgaactcaaccgaattccccttcctctcccaggta

SEQ ID NO: 435373 - DNA, 201 bp, Homo sapiens
gagacttaaaaacagctggttctgtggaagggcctgatttaatttctagatctaggaaggctcttgtttgatctgttatgcagttagcaaagtaaatagtstacgaggatgtgtaactctgtgtactagcaaaacaatttgggcactaacatctatgagaaatactagtataacactagtcttaatatcagtggagagaac

SEQ ID NO: 435374 - DNA, 201 bp, Homo sapiens
cccttctcttttcagagctggccctcgatgccaaattagcatttagtattttgcacaaagtctaagggaccatggctgcctgccttggggaggaaccatakctccctctgggccgcttctggcctcttggagccatgggccaaaggccaaggggatgggcagaggtctgtgtttggtctggcccagttccccatcattaaa

SEQ ID NO: 435375 - DNA, 201 bp, Homo sapiens
ctctaccccagaggaatttacagaaacttgccctgtgcctgtgtcccccatgctaggggcggaggggtcttttccttcttctttcctacctaccccttttytcttggccaggggcctcgtatcctacctttccttgtcccctgggctggctgcacagaggattgccccttctcttttcagagctggccctcgatgccaaat

SEQ ID NO: 435376 - DNA, 201 bp, Homo sapiens
ggaccatggctgcctgccttggggaggaaccatatctccctctgggccgcttctggcctcttggagccatgggccaaaggccaaggggatgggcagaggtmtgtgtttggtctggcccagttccccatcattaaactcagcctgactgctgcctacctctggttccctctcactgcccctgcttcccccatcacagcatgg

SEQ ID NO: 435377 - DNA, 201 bp, Homo sapiens
agttaaataaacaggtgggaggctgggcagtcccccagccggtttgtccacagcccctgggggcagtggaggtgaatacagggcccttctcactgagctcrtgaagtgcctcagtcaaggcaaggtcccctggtccatatgggcccccccgcccatggggttgggctggtccttatagtgcctacgttagtctgtgtggag

SEQ ID NO: 435378 - DNA, 201 bp, Homo sapiens
gcagaccgcaaccctaaaatgcttgactacttttgtgtcctcaggcctataacattcacgtgaatggagtcctgcactgtcgggtgcgctacagccagctyctggggctgcacgagcaggtgggactagcacccctgccttgagacagcttcaagcccttccctacacgtggacatcagtgtctccctttacccgctcttc

SEQ ID NO: 435379 - DNA, 201 bp, Homo sapiens
aagcgaagcgcgcagccccaatcggactacaatttccgacgggccccgaggccccgccccgcactacgggttgcaatgagggccaactccactttgggctycctatccggacaggtggctcttgccctttagactacagttcccagcatgcccaggcgattgcgtcccagaaccgacgtcccaccgccttcccacatcgga

SEQ ID NO: 435380 - DNA, 201 bp, Homo sapiens
gaatttacagaaacttgccctgtgcctgtgtcccccatgctaggggcggaggggtcttttccttcttctttcctacctaccccttttctcttggccagggrcctcgtatcctacctttccttgtcccctgggctggctgcacagaggattgccccttctcttttcagagctggccctcgatgccaaattagcatttagtat

SEQ ID NO: 435381 - DNA, 201 bp, Homo sapiens
ttacagaaacttgccctgtgcctgtgtcccccatgctaggggcggaggggtcttttccttcttctttcctacctaccccttttctcttggccaggggcctsgtatcctacctttccttgtcccctgggctggctgcacagaggattgccccttctcttttcagagctggccctcgatgccaaattagcatttagtattttg

SEQ ID NO: 435382 - DNA, 201 bp, Homo sapiens
tcccccatgctaggggcggaggggtcttttccttcttctttcctacctaccccttttctcttggccaggggcctcgtatcctacctttccttgtcccctgkgctggctgcacagaggattgccccttctcttttcagagctggccctcgatgccaaattagcatttagtattttgcacaaagtctaagggaccatggctgc

SEQ ID NO: 435383 - DNA, 201 bp, Homo sapiens
agcaaaacaatttgggcactaacatctatgagaaatactagtataacactagtcttaatatcagtggagagaacttaatttgtatctgatgtgctttagaktaacatcattgttatttccctagttctatagactggactcacctagatggcagccaagggtggggcaggtgaagaatttatgcaaacagtgagtgaggtg

SEQ ID NO: 435384 - DNA, 201 bp, Homo sapiens
caagagaaagtctccaagaaggaggtgagccctgcctcctctctgtcttcctctaagggcttgcagtggcgcgatcttggctcactgcaagctctgcctcycagattcatgccattctcccgcctcagcctcccgagtagctgggactacaggcacccgccacgacgcccggctaattttttgtatttttgggagagacag

SEQ ID NO: 435385 - DNA, 201 bp, Homo sapiens
ctatgatgacgatgtcatggagaaccgggttggcctgaacctgctttatgctcaggtgagcttggagctgcctcagaacccttcccctgaagaaaataacrggtgactcactctcccaagaaaactgctgtcgtgtctttgttcccaatttgtggggaagttcctagaatactatcagtgctgctggcacaatatctactc

SEQ ID NO: 435386 - DNA, 201 bp, Homo sapiens
gcttgcagtggcgcgatcttggctcactgcaagctctgcctctcagattcatgccattctcccgcctcagcctcccgagtagctgggactacaggcacccrccacgacgcccggctaattttttgtatttttgggagagacagggtttcaccatgttagccaggatggtcttgagctcctgaccttgtgatctgtctgcct

SEQ ID NO: 435387 - DNA, 201 bp, Homo sapiens
acagaggaagtgtccttggaagtgctgctcagcaacgggcagaaagttctggtcaacgtgctaacttcagatcagactgaggatgtcctggaggtgaggcrcttgttcagcactgccccttcttcccctacatcctggggtcctgggcttggagaatgattggaaccagccagtatgatgagctgtacttctatccctatc

SEQ ID NO: 435388 - DNA, 201 bp, Homo sapiens
gacgcccggctaattttttgtatttttgggagagacagggtttcaccatgttagccaggatggtcttgagctcctgaccttgtgatctgtctgcctctgcytcctaaagtgctgggattataggcatgagccaccgcgcccgaccggggttgctttttctgagctgccccattctccctcctaatctacccccatgtgatg

SEQ ID NO: 435389 - DNA, 201 bp, Homo sapiens
ctttgttcccaatttgtggggaagttcctagaatactatcagtgctgctggcacaatatctactctccctacttttattaagctgacaagatcaaggacttactgcagagaggtcgctcaagtgtggggctaggggtcaggctggacagaggtaatggtagacgctttccttggattgctgactgggacctcctactgcct

SEQ ID NO: 435390 - DNA, 201 bp, Homo sapiens
tctttgttcccaatttgtggggaagttcctagaatactatcagtgctgctggcacaatatctactctccctacttttattaagctgacaagatcaaggacttactgcagagaggtcgctcaagtgtggggctaggggtcaggctggacagaggtaatggtagacgctttccttggattgctgactgggacctcctactgcc

SEQ ID NO: 435391 - DNA, 201 bp, Homo sapiens
actatattgaggactatggggagagacttaaaaacagctggttctgtggaagggcctgatttaatttctagatctaggaaggctcttgtttgatctgttakgcagttagcaaagtaaatagtgtacgaggatgtgtaactctgtgtactagcaaaacaatttgggcactaacatctatgagaaatactagtataacactag

SEQ ID NO: 435392 - DNA, 201 bp, Homo sapiens
tggcggcagtatcaggaaggtaggcagcaagtgtggactgagcagtgagcaggtgtgctccccttgccttttgtcctagatgtgaggcttgtcttgagagrgaggggaagtgatcctgccctcaccggcaccttgtgtctgtccccagatgctgcgccggcgggtggggggtactctgagacgctcagacagccagcaagc

SEQ ID NO: 435393 - DNA, 201 bp, Homo sapiens; identical to SEQ ID NO: 283824

SEQ ID NO: 435394 - DNA, 201 bp, Homo sapiens
tgctgcggcacacaggcgagaagcccttccgctgtgccacctgcgcctataccacgggccactgggacaactacaagcgccaccagaaggtgcatggccayggtggggcaggagggcctggtctctctgcctctgagggctgggccccacctcatagcccaccctctgttttgagctctcggggcccaccagccctgggga

SEQ ID NO: 435395 - DNA, 201 bp, Homo sapiens; identical to SEQ ID NO: 283870

SEQ ID NO: 435396 - DNA, 201 bp, Homo sapiens; identical to SEQ ID NO: 283818

SEQ ID NO: 435397 - DNA, 201 bp, Homo sapiens; identical to SEQ ID NO: 283843

SEQ ID NO: 435398 - DNA, 201 bp, Homo sapiens; identical to SEQ ID NO: 283887

SEQ ID NO: 435399 - DNA, 201 bp, Homo sapiens; identical to SEQ ID NO: 283820

SEQ ID NO: 435400 - DNA, 201 bp, Homo sapiens; identical to SEQ ID NO: 283856

SEQ ID NO: 435401 - DNA, 201 bp, Homo sapiens
tgtcagagaaccaccagatttatttacttaaataactttctgtctggttacaaaagtaatatgttctcattgtagaacatttgaaaaatgtagacagcggygggacctataatcccagtactttgggaggctgaggcaggtggatcacctgaggtcaggagttcgagaccagcctgaccaacatggtgaaaccccgtctct

SEQ ID NO: 435402 - DNA, 201 bp, Homo sapiens
tagtgacttttctcagcagtgggggatgagttgcctgcagccatctgccttttctgactttgccacgggtctggggctgtatgtgctggctcatatggtayttagagggaagaggcctgagactatctttacccagcaaactcgtcatctcagggtctgtggaatactgcccatcacagttgtgtggaaagctggaagttg

SEQ ID NO: 435403 - DNA, 201 bp, Homo sapiens
tttcgaaatcaattttccttcccttccccactgaccatacataggtccatgaatggcttttaaaattatttttcttttcttttttttgagatagaatctcrctctgtcacccatgctggagtgcagtggagcgatcttggctcactgcaacctcctccccgcctcccggattccaatgattctcctgcctcagcctccaga

SEQ ID NO: 435404 - DNA, 201 bp, Homo sapiens
ctgtttgcctcttgtcatctccatttaggagtgtgtagacacctcaaaattaacatattcaagtgggaactcatgattcttacccctcaaaccaattcctsttccatccaacacatctcagaaaattttacaattgtccacctgactgcttagacagaaaccttgtttctttcttctcccttgtccctgacacctacatga

SEQ ID NO: 435405 - DNA, 201 bp, Homo sapiens
gtcaggagacagaagacaggcagcaaggggaagactgaggccagagcccttattgaggtttccatgggaaagacagtgcagggtgaacagtttaggatggrctagtttgagtaatttcagagggctttaggctgtagggatggcccctagttgtcccgtacctggccctgatgggatgcttaaggccaagtcatattgcct

SEQ ID NO: 435406 - DNA, 201 bp, Homo sapiens
ccaagtgacttctggctaactacttatcttccttcctgccttgttcctaatatcataatttttgtaacagtaggctagatccagagaaaatgagatcaaaytaggcccaatgtaattttaaataacttggataatcaaatatggaaattaccttaagaaatttcagacaggaattccatgagaaatccaccctgaattttg

SEQ ID NO: 435407 - DNA, 201 bp, Homo sapiens
tctctacaaaagtaaaattaaaaagttagccaggcatggtggtgcgcacctgtagtctcagctacttacgacgctgaggtgggaggatcacttgagcctgrgaggttgaggctgcagtgagctgtggtcctgccactgcactccagcctgggtgacagagtaaggcactgtctcaaaaaaaaagttgggggagggattata

SEQ ID NO: 435408 - DNA, 201 bp, Homo sapiens
tcacacggcagccagccatggtgttcggccaaagtcggaggggtgggtgggtggattcctggggatctggaatgttatttctgcagcttccgtagacttawctgtatagaaccatggcttgtatcttgccctcagttctcctcaaagttctcttaagcagtgtcatttggggaacattcctgtcttgctgataaaaagtat

SEQ ID NO: 435409 - DNA, 201 bp, Homo sapiens
tgaacccaggagttcaagaccagccctggcaaaatcgcaagaccctgtctctacaaaagtaaaattaaaaagttagccaggcatggtggtgcgcacctgtagtctcagctacttacgacgctgaggtgggaggatcacttgagcctgagaggttgaggctgcagtgagctgtggtcctgccactgcactccagcctgggtg

SEQ ID NO: 435410 - DNA, 201 bp, Homo sapiens
tactaagcttcctgtaaaacccagagcagttgagaacacatgctctcttggactggctggctcctaagagccagaggagaggaaggatagggtagtgcatrtctagttctagttgctcttccaaaattggcagtgagataagtcattccagctccccacggactgagtgactgaatggtggagagtagccggggtattaca

SEQ ID NO: 435411 - DNA, 201 bp, Homo sapiens
aatattttcatagcggagtgtttcagtggcccccaagttcaagatggtagcctggattaacattcgaatatctcttttgattcttttttttttttttttttgagacagagtctctctcttgtcacctaggctggaacacagtggcatgatctcgactcactgcaacatctgccttccaggttcaagcaattctcctgcctc

SEQ ID NO: 435412 - DNA, 201 bp, Homo sapiens
tctggggtttccagactgtactccctggagatgtctcagccacgtgggaggatgaggaaggggctttgagcatcatttccctgctttagccaaaggactcygtgtgctctgtttcaggtcgtggggattctgagaatgattttgtttgctttttgaaaaagttttagctgtttcgacattggaaaatctactgcccaccgg

SEQ ID NO: 435413 - DNA, 201 bp, Homo sapiens
ctggtggccttcattcattttacaagaacagtttagcttttgggaagggctattatttaaactataaactaaattccttcccaaggctaattaagcctacrcccaggaatggatgacaggttagaggttaggagcaagatggaattggttaggtctgatgtctttcactgtcataatttatttagttataattttgcaaag

SEQ ID NO: 435414 - DNA, 201 bp, Homo sapiens
tgggaaccatgtacagctacttccattgtctcctacatccatggcagatagggatacctcccctctgagccccagtgtggccttagcacccttgccaatgsaggcagcctcctctattaaccaaattggcatgatctgccactgcaggtctatgcaatttaaggtagaacagactcctcagctctagttagatcatcctaa

SEQ ID NO: 435415 - DNA, 201 bp, Homo sapiens
gcatcattctttttcctatgctctacggcccaggaccaactacagagagatttatagcaagttctaggtgctgagtgacctaagcacagtggctttccacrctggaacacagctgaccactcttccatgggttcctcagatcacttctactttttctctcatggaggatttggccctagaagatttgctggtcagagcttg

SEQ ID NO: 435416 - DNA, 201 bp, Homo sapiens
cgatctcggctcactgcaagctccgcctcctgggttcaagtgattctcctgcctcagcctcccgagttgctgggactacaggtgcctgccaccacacctgrctaattttctgtatttttagtagagatgggatttcaccgtgttagccaggatgatctcgatctcctgacctcatggtccacccgcctcggcctcccaaag

SEQ ID NO: 435417 - DNA, 201 bp, Homo sapiens
tgatgctaatttttggaataaaaaaaaatcataaacatctctgtatttggagcggggatttggaggtatgtctgattcgggctatccctgatgtaagcgcyaatgtttccaaccgtgagagttttcacctttctctgcctaacgttccttacaatttgcatttgatcctcagcaggtggggttggcaaggcttgggacaca

SEQ ID NO: 435418 - DNA, 201 bp, Homo sapiens
tggtgtttgatgtagcaaactctgtctgcctatattcaccagagccatgcagagaaagggataattaatatttctatgtgcacatttaatcaagtgcttasgaattcattccagggcatgaaaattcaacataggaagtgctcagaaaatgtttggggcagctacattgagtagcaaatgagaaggcatataggccagagg

SEQ ID NO: 435419 - DNA, 201 bp, Homo sapiens
ttcactcagtgctgtgtgtgtgagattttccttgacgtgagtagctgtagctcgctcattctcattgctctaggtagaatcccattgtgggactaggtgayaatttacctgttctgatgatacgccttgggagagcatctagtttggggtgtgctatgaattttttttttttttttttttttttgagatggtgtcttgctc

SEQ ID NO: 435420 - DNA, 201 bp, Homo sapiens
ctaggactctgctgatttaagagtctttgctcttagcctaatttttacctggaatgctggagctgaacactctcctttataatcaaggatctggaggactwaagactagagtcttgtccaaggtcagtaatacccagttaattactgcacccttccccattcccttacctgttttccttctctttgttcactgtcactacc

SEQ ID NO: 435421 - DNA, 201 bp, Homo sapiens
tttccccatgttgcccaggctggtctcgaactcctgggctcaagcaatctgcccatcttggcctcccaaagtgctgggattacaagcatgagctactgtgmctggcccaaacccatgtttcttactggtgggtaggacagtgaaccaccagtcttcagaattacacagttgaaaattcagagagacaaacacacaagggaa

SEQ ID NO: 435422 - DNA, 201 bp, Homo sapiens
caaaggactccgtgtgctctgtttcaggtcgtggggattctgagaatgattttgtttgctttttgaaaaagttttagctgtttcgacattggaaaatctaytgcccaccgggcatggtggctcacacctgtaatcccagcactttgggaggctgaggcgggcggatcacgaggtcaagagatcgagaccatcctggccaac

SEQ ID NO: 435423 - DNA, 201 bp, Homo sapiens
gtaggacctcacagggctgcagccaagctgcagcctggagtttttcctgaaggatttaagttgttaatgcaggagcagggggcaagtcttggggctcagggtgaagttatggatggaggcagagccctctcagaattgtgtagcatctttcatttatcttactttggttctctgggaaaaacccttgcagtgatttccaga

SEQ ID NO: 435424 - DNA, 201 bp, Homo sapiens
cagcccctctcattctaacttggtggctggtggccttcattcattttacaagaacagtttagcttttgggaagggctattatttaaactataaactaaatyccttcccaaggctaattaagcctacacccaggaatggatgacaggttagaggttaggagcaagatggaattggttaggtctgatgtctttcactgtcata

SEQ ID NO: 435425 - DNA, 201 bp, Homo sapiens
catcatgatctgctccagagggcagaacaagaaagattttggtaaatagaagagctctagcagttggaagagtccaacagaagaacaagtaccctttgggkttcctgcctggagtcggaatgtctgcttggataaccttcaagctctgagtttgaacacttgatcagataactttggtgtttggaattgtagccagagttg

SEQ ID NO: 435426 - DNA, 201 bp, Homo sapiens
ggtttccatgggaaagacagtgcagggtgaacagtttaggatggactagtttgagtaatttcagagggctttaggctgtagggatggcccctagttgtccsgtacctggccctgatgggatgcttaaggccaagtcatattgcctcctggggtgtgcagggcaggtgaagatctacagctcaggattggttcatttgtata

SEQ ID NO: 435427 - DNA, 201 bp, Homo sapiens
atgcaccaccacgcccagctaattttgtatttttagtagagacggggtttctccatgttggtcaggctggtctcgaactcctgacctcaggtgatccaccmgcctcagcctcccaaagtgctgggattacaagtgtgagccaccgtgcctggccactttttattctttttttttttttttttttttttgagacagagtctc

SEQ ID NO: 435428 - DNA, 201 bp, Homo sapiens
tcaccatgttggctaggctggtcttgaactcctgatctcaaatgatccacccgccttggcctcctaaaatgctgggattgcaggcatgagccaccgcgccyggcttattttttaagtggaaatagggttacctttagatctggacaaacctgggttttaaccccaacttcatcagcagaggaatgaaaaggcatataagaa

SEQ ID NO: 435429 - DNA, 201 bp, Homo sapiens
gagacagagtctcattctgtctcccaagctggaatggtgggatcttgaatcactgcaatctctgccccctaggttcattcaagcgattctctctctctttytttttttttttttttttttttttgagatggagccttgctctgtcactcaggctggagtgcagtggcatgatcttggctcactgcaacctttgcctcccgg

SEQ ID NO: 435430 - DNA, 201 bp, Homo sapiens
ttagagtttgagactccagacaagatgtggtgaaccaggagagcaccctgaaagtgtttcccctgtctgccatctggacaaacctggagcaatttcagcawtgggggtgaaatgtaggaagcaggccagttccagctgtggtggaatctgggaagcagaccagatgtcatgcctgcggctggggtgggagggcagagtcag

SEQ ID NO: 435431 - DNA, 201 bp, Homo sapiens
ttgagacagagtctcattctgtctcccaagctggaatggtgggatcttgaatcactgcaatctctgccccctaggttcattcaagcgattctctctctctytttttttttttttttttttttttttgagatggagccttgctctgtcactcaggctggagtgcagtggcatgatcttggctcactgcaacctttgcctccc

SEQ ID NO: 435432 - DNA, 201 bp, Homo sapiens
gagacttgggactgagacacaggcaatgagatggtgcccttcatcacagcagcgtgccacccgcacaaaacaacctcacagagagcagggagccagccccstgtgcagccccctcacccaacagatgggaaaccctggcccagagggttgtggggccttccctaggctcactgggtccagactggagcccaggagtcctga

SEQ ID NO: 435433 - DNA, 201 bp, Homo sapiens
ggagtgtgtagacacctcaaaattaacatattcaagtgggaactcatgattcttacccctcaaaccaattcctcttccatccaacacatctcagaaaattytacaattgtccacctgactgcttagacagaaaccttgtttctttcttctcccttgtccctgacacctacatgaccagccaaatcctatcaattctcttgc

SEQ ID NO: 435434 - DNA, 201 bp, Homo sapiens
gaagtgcagagcgtgtataacaggggcctgatcctggccagggaggtggccaggggaaatgacctttccactgagcccttcaggagttatagggggaaccrggtagagagtttcaggcagagggaagaagcaaggagaatcaatcgtcctgctcttcctccagctgttctggaatctagacagccctggtggctggagggg

SEQ ID NO: 435435 - DNA, 201 bp, Homo sapiens
aggagtgtgtagacacctcaaaattaacatattcaagtgggaactcatgattcttacccctcaaaccaattcctcttccatccaacacatctcagaaaatkttacaattgtccacctgactgcttagacagaaaccttgtttctttcttctcccttgtccctgacacctacatgaccagccaaatcctatcaattctcttg

SEQ ID NO: 435436 - DNA, 201 bp, Homo sapiens
aaatcaatcaacatggttgtatttgagaagttcatggtctcacaggggtcgttactgtgaaactattatttgcctagattggtaggaggcaggatcaactrgaaggatgtggttctgggagtgaggagatgggagctgtccagggtgactttgagacctgagagactggtgggtgatggtgccattggccagaaaggggac

SEQ ID NO: 435437 - DNA, 201 bp, Homo sapiens
ggtcttactatgttgtccaggttgctcttgaactcctgggcttaagtgatcctcccaccttggcctcccaaagtgctgggattacaggtgtgagccaccaygcccagcctgaaaatagcatctatcccattgtgaaggagcttgggctctggaaagactgaatatgttctggcaacttctcttattgtttggggataaggg

SEQ ID NO: 435438 - DNA, 201 bp, Homo sapiens
gcgacttctgaagcctaaaagatgtagaggaaggacttaactttgaggaacatttaggtagaatttccaccagtcttgaggactctcaagatagccctttrtccactcctctgtggtgtgtgtgtgtttgtgtgtgtgttttaacgtctccattggctggtggctggtcctaggagcagtcacttgaagttgtttgggtcc

SEQ ID NO: 435439 - DNA, 201 bp, Homo sapiens
agctaaaactaagatgcaatgaatgaggtgtaacgaacaagagagttttaagttcagaaatggttacagaagtataagacagctgtgtgggtgttttttgrtttttggtttctggtttacaatctcgtcattcaacaaagatgggagttttatagaactaaaagcaccatgtaagctactaaaaacaacaacaaaaaaggc

SEQ ID NO: 435440 - DNA, 201 bp, Homo sapiens
gctacccaagggaggagagattgagggagtctcaggtctgttctctctcattcagctagagtgtctcatttctgtctgttttataaattggcattttaagkttttttatttttttaaagtaatctcggctatagaaagaatttggaaaccctaagtttggggacaccacattttctaaaaatatttgtaaactttttcatt

SEQ ID NO: 435441 - DNA, 201 bp, Homo sapiens
cctactagaatggccaaaattcaaaacactgacaacaccaaatgctgacaaggatgtggagcaacaggaacacttattcattgctggtaggaatgcaaaayggtacagccactttggaagacaatttggcagtttcttacaaaactaaatatattcttaccacacgatccagcaatcgtactccttggtattcacccaaat

SEQ ID NO: 435442 - DNA, 201 bp, Homo sapiens
tcactcaaagtaagtgctttgaattctagatttctaggggatgtttcccacagccactctggcaccccctacagtccattcttcacacggcagccagccayggtgttcggccaaagtcggaggggtgggtgggtggattcctggggatctggaatgttatttctgcagcttccgtagacttatctgtatagaaccatggct

SEQ ID NO: 435443 - DNA, 201 bp, Homo sapiens
ttctagttgctcttccaaaattggcagtgagataagtcattccagctccccacggactgagtgactgaatggtggagagtagccggggtattacactaacwtgaaaacacacctggggtaggagaaatcattctcctactaaccataaaatatagacaagatgattttacatcacgtggtttctttcaggaatcccagcat

SEQ ID NO: 435444 - DNA, 201 bp, Homo sapiens
gggtcactgacctgttggaattgtcagtggaatcaaataattaacagctgggaaatagaatattttaatttttaattcaacataaatttttaatgttgctrttttttcttccagcttgaaggaatccgaataactaaactggactctggttttctgactcagtccttctagaagacctggactgagagatcatgcggttaa

SEQ ID NO: 435445 - DNA, 201 bp, Homo sapiens
atggcttcatctccaaatgagtagggagcagatatttatttttaatttatcttatcttatcctttatttatttatttatttatttatttatttatttatttgagacagggtctcattctgccaccaggctggagggcagtggcacaatcatggctcactgtagcctccacctcccaggctcaagtgatcctcccgcctcag

SEQ ID NO: 435446 - DNA, 201 bp, Homo sapiens
catggcttcatctccaaatgagtagggagcagatatttatttttaatttatcttatcttatcctttatttatttatttatttatttatttatttatttatttgagacagggtctcattctgccaccaggctggagggcagtggcacaatcatggctcactgtagcctccacctcccaggctcaagtgatcctcccgcctca

SEQ ID NO: 435447 - DNA, 201 bp, Homo sapiens
gcatggcttcatctccaaatgagtagggagcagatatttatttttaatttatcttatcttatcctttatttatttatttatttatttatttatttatttatttgagacagggtctcattctgccaccaggctggagggcagtggcacaatcatggctcactgtagcctccacctcccaggctcaagtgatcctcccgcctc

SEQ ID NO: 435448 - DNA, 201 bp, Homo sapiens
tcctcctacctcagcttccccaatagctgggactacaggtatgcaccatcacacccagctactttttgtagagagggggtttccccatgttgcccaggctrgtctcgaactcctgggctcaagcaatctgcccatcttggcctcccaaagtgctgggattacaagcatgagctactgtgcctggcccaaacccatgtttct

SEQ ID NO: 435449 - DNA, 201 bp, Homo sapiens
atagccaagaaaaaaacatgtatgcaatacagccaccccttcgttttggccatcagagtagtctgccacctcattctccacgctgctgtcagctctgatcyaccctccacaccccagcacacaggcaggcatctctgcatgaagttaaatctggttattctctggcttccaaggtgcttgtggctccctttcctccctccc

SEQ ID NO: 435450 - DNA, 201 bp, Homo sapiens
tgcatggcttcatctccaaatgagtagggagcagatatttatttttaatttatcttatcttatcctttatttatttatttatttatttatttatttatttatttgagacagggtctcattctgccaccaggctggagggcagtggcacaatcatggctcactgtagcctccacctcccaggctcaagtgatcctcccgcct

SEQ ID NO: 435451 - DNA, 201 bp, Homo sapiens
gccataaaaaaggatgagttcatgtcctttgctgggacatggatgaagctggaaaccatcattctcagcaaactaacacaggaacagaaaaccaaacacckcatgttctcactcgtaagtgggaggtgaactatgagaacacctggacacagggaggggaacatcgcacaccggggcctgtcaggggatggggggctaggg

SEQ ID NO: 435452 - DNA, 201 bp, Homo sapiens
agcctgagaggttgaggctgcagtgagctgtggtcctgccactgcactccagcctgggtgacagagtaaggcactgtctcaaaaaaaaagttgggggaggkattataatagtacctgcctcatagggttgttgggagaattaaataagttattgtgtataaagcactgggaagcaatgcctagggcttaataaacaataaa

SEQ ID NO: 435453 - DNA, 201 bp, Homo sapiens
ctaacacaggaacagaaaaccaaacaccgcatgttctcactcgtaagtgggaggtgaactatgagaacacctggacacagggaggggaacatcgcacaccrgggcctgtcaggggatggggggctaggggagggatatcattaggagaaatacctaatgtagatgatgggttgctgggtgcaccaccatggcacgtgtata

SEQ ID NO: 435454 - DNA, 201 bp, Homo sapiens
tggtgacctcgaatgagtcactgagactctcagagcctctgtatgttgacctttgaaaatagtgaagggccctgtcctaccacttcacaggtgattgtgaygatccattgagataaaagagagaggctgctctgtaaactgtaaagtgggaggcacatgagaccggggatcactgcttgctcatggagaggaccactttat

SEQ ID NO: 435455 - DNA, 201 bp, Homo sapiens
taggccaggtgcggtggctcacatctgtaatcccagcactttgggaggccgaggtgggtggatcacgaggtcaggagatcgagaccatcctagctaacacrgtgaaaccccgtctctatgaaaaatacaaaaaattagctgggcgtggtggcacatgcctgtagtctcagctacttgggaggctgaggcaggagaatctct

SEQ ID NO: 435456 - DNA, 201 bp, Homo sapiens
gtcactccctgtgcagcaaatccatggccctgcagggggtggtgtggcagtggaggcaacagtgccattgagaacattcctgatttaggagaaagagcctyagcatattagacctttaacagtagacatatgtatatgtgcatctatttgattgtgatgtaaagtatatttctcactgtgagttatggtcaaaaacactgt

SEQ ID NO: 435457 - DNA, 201 bp, Homo sapiens
gctttgccaaggtggggcttaaaagagagctctgtaaagatctgatagttctccaaagataaccttccccaacccagagcccagcagctattactgttccrtcattaacaataccaatcaagttctaatgtcactgaatgtgctgatcctagggacctatgtggtctctctaacagagaaaggtgactgtggagttttgac

SEQ ID NO: 435458 - DNA, 201 bp, Homo sapiens
atgctggggtcacgggtggatcgccctaaactctcggtggccccctcagtagttttggaagaggaccaagtccttgtctctccagcagtggacctggaagmaggatgccggctcagggacttcactgtaagttcagctttattttgctcccctggtaggacctcacagggctgcagccaagctgcagcctggagtttttcc

SEQ ID NO: 435459 - DNA, 201 bp, Homo sapiens
tggaagaggaccaagtccttgtctctccagcagtggacctggaagaaggatgccggctcagggacttcactgtaagttcagctttattttgctcccctggyaggacctcacagggctgcagccaagctgcagcctggagtttttcctgaaggatttaagttgttaatgcaggagcagggggcaagtcttggggctcagggt

SEQ ID NO: 435460 - DNA, 201 bp, Homo sapiens
agatttggtccatgcgctgaaggcaaaggggtcatcacgtagtatgctcaacccaggtttctttcttttctttctttcttcctttatttgtaaaagatgargtcttgctttgttgcccaggctggggtacagtggctattcacagatgtgatctcattaccaatcagcacgggagttttatcctgctccatttccaaccta

SEQ ID NO: 435461 - DNA, 201 bp, Homo sapiens
ttcccaaaggcctgcaaggaacaaagcccctggctgctgagggctctgtctactccccatctcctgaaacagctgtttattctttcgacaggagttgaaascagcaccttccctttctctgagtcctgcctccttctgcagaagggagctcaaaagaactttgttgttttgccttttactctggggtgaaagcggcaggag

SEQ ID NO: 435462 - DNA, 201 bp, Homo sapiens
tttactctgacccttataatgaaaaacaaaactggagacaaccttccatgcacttcccctgcttccccgtgaattgtatcgtggaagcatttccttgtaaracccaccagctcactgaggttttaggataataaggcactcttcctccttacacccagcaccatccctatgccaagggctgggcctgggaggcaggcattt

SEQ ID NO: 435463 - DNA, 201 bp, Homo sapiens
tcatcagagaagaactggggattactggggaatcttagctccaaaggacttgtttctgggccaaggagtctgaggccagagaaactcgtgacgccagtttrgaaagctggcactgtgttggtgctggggctgacctgcaggactatgacaaggctggggacagggtgaggcaggggtggagcaaggaggtggggtggggtg

SEQ ID NO: 435464 - DNA, 201 bp, Homo sapiens
ttagtagagacagggtttcaccctgttggccaggctggtctcgaactcctgacctcaggtgatccacccacctccgcctcccaaagtggtaggattacagrtgtgagccaccatgcccagttgtaaaacctacaaatcttacgtgtttgatttgacaactcttttttttgtttgtttgagacagagtctcattctgtctcc

SEQ ID NO: 435465 - DNA, 201 bp, Homo sapiens
ctcagtggcttcaaccaccttcctgtggacacctggcaaagctattttctctcttcaaaacattgacaggaagaccttcctgtgttccgagcctgactgayggcgaattcgtatttcctgaacatatataaagcattaaatcatggcctccccatgctgtcctgggtgtttctcagcttttcatgagggtttgcacctctc

SEQ ID NO: 435466 - DNA, 201 bp, Homo sapiens; identical to SEQ ID NO: 329912

SEQ ID NO: 435467 - DNA, 201 bp, Homo sapiens
ggaagcactggacgtctcagagggcgtttgtggcgttgtatgtggcctcacacagaggccactttgatgctgtgcagtaccttctagaacacggtaattckggtagaaagcttgctatattcatgagttgggattttttgcaggtagaaaggacagagtgtcttgtgttcccagtccttccagcagtggtttcctggacct

SEQ ID NO: 435468 - DNA, 201 bp, Homo sapiens
agtttatctttaatacccaattttttaaaagaaaaaaaatttttccctgcaggagttttgatggatgacactaccctgaagttccatgatgttgttcctgragggattatttcattatgtatctggcatcatgacggatggacagaacttgttttggcggctgtggaaggggatcccagcaaggtgttttcaagcttcttt

SEQ ID NO: 435469 - DNA, 201 bp, Homo sapiens
acccctgcatgtggctgcagctatgggccggtcagactgtataatcctcctgctccagcatggggcctccatccacgacagagatgccaagggggagaccyccatctccattgcacactgcctgaaccacacactgagcgagaggcagatggtcctcctccaccggatagcaaagtcggggataagggatctgaatgactt

SEQ ID NO: 435470 - DNA, 201 bp, Homo sapiens
cttcactgcctgtctgctctttgcttgttgtaaaatgaaatatgggctttgcgcagcccagcagtcctttaagctcataaaaagtcatttttgctctgatrgaactgtgatgtatttgaaggcaccagttaaaaaattacagccagctttgcaaagttttctgtcctctgcagacagctgctggggggaggtgtcatggtc

SEQ ID NO: 435471 - DNA, 201 bp, Homo sapiens
caggagccagctgcctcagcagatcccccctgggcaggacacccctgcatgtggctgcagctatgggccggtcagactgtataatcctcctgctccagcayggggcctccatccacgacagagatgccaagggggagacccccatctccattgcacactgcctgaaccacacactgagcgagaggcagatggtcctcctcc

SEQ ID NO: 435472 - DNA, 201 bp, Homo sapiens
gtggactgggggcagggcagtactggagctgggccaggcagcaggacctccctgaggagcactcccttcacagccctggacccctcctgtgttccccctcygcatgtcttccttctggccaatgttcttattttacaggagccagctgcctcagcagatcccccctgggcaggacacccctgcatgtggctgcagctatgg

SEQ ID NO: 435473 - DNA, 201 bp, Homo sapiens
actccttccctggccacatgcaagggcaccctgtccacttctgaagtggattcccaaagggaagcctgcttacgtgagaaaccccagatgtcaaagcaaamccctgaaacccaaccaccctgaaacccagatggaagggccacttagggtcctggccacagagggacttcccaatctcaaacacacggcgttcaaattgga

SEQ ID NO: 435474 - DNA, 201 bp, Homo sapiens
cttccctggccacatgcaagggcaccctgtccacttctgaagtggattcccaaagggaagcctgcttacgtgagaaaccccagatgtcaaagcaaaccccygaaacccaaccaccctgaaacccagatggaagggccacttagggtcctggccacagagggacttcccaatctcaaacacacggcgttcaaattggactcc

SEQ ID NO: 435475 - DNA, 201 bp, Homo sapiens
tattttctgaaaagcattaccaacaacagacagacccacgcgacaccatcaaatgagatttgtattcgatatttctaaaattatctttgtggcactcaagrtcagataatctcttaacttaaccaatgtagtagtttatctttaatacccaattttttaaaagaaaaaaaatttttccctgcaggagttttgatggatgac

SEQ ID NO: 435476 - DNA, 201 bp, Homo sapiens
cccatcagccgtccagcaaaatgtagccacgcttttgagaataactcaaactcctcttgtcttgcccagctatcttgtctcgggcttactgaagattcctwctaccgaaccgcaaattcagaacattttgagggtgagaagtggaagcactggacgtctcagagggcgtttgtggcgttgtatgtggcctcacacagaggc

SEQ ID NO: 435477 - DNA, 201 bp, Homo sapiens
ggaaggggatcccagcaaggtgttttcaagcttctttaaatggatattatacgttacgaagcaaccgtaaattgtggggggaaaattagtctttaatacgratatgtgaataacagtttcagagcagggaagagagaacgatgagccgtgtcataattatgaaataccgcactgagggtttgccttcactccttgggttta

SEQ ID NO: 435478 - DNA, 201 bp, Homo sapiens
gtataatcctcctgctccagcatggggcctccatccacgacagagatgccaagggggagacccccatctccattgcacactgcctgaaccacacactgagygagaggcagatggtcctcctccaccggatagcaaagtcggggataagggatctgaatgacttggtcatgaagaatgctttgcagagggtcaagtctgggt

SEQ ID NO: 435479 - DNA, 201 bp, Homo sapiens
atctgccaaccctgagcaaatcctgtccaagccaggaccccccagaagccagaccctcaggctccccatgtcttcataaggaacccaggtcccaaagccamctctgttcatgtaagacttgtctgaaacaaggcctgtcctcagcagaacccccaaacccaaggcaagcctgcccatgtcagtaccccaaactcaaagcaa

SEQ ID NO: 435480 - DNA, 201 bp, Homo sapiens
aatcctccacaaccatgtccacacaaggatgccaagatccgaaacaaacgctgcctgcctcaagaccccatatatctctatgcaacttctgcccatgtttsagcctcaaaccctgaagctatgcctggccataacagaaccctaaatcccagagcagactctacccacgtcatgaccctcaattgcccaattctggacccc

SEQ ID NO: 435481 - DNA, 201 bp, Homo sapiens
agctatgggccggtcagactgtataatcctcctgctccagcatggggcctccatccacgacagagatgccaagggggagacccccatctccattgcacacygcctgaaccacacactgagcgagaggcagatggtcctcctccaccggatagcaaagtcggggataagggatctgaatgacttggtcatgaagaatgcttt

SEQ ID NO: 435482 - DNA, 201 bp, Homo sapiens
ccaagactcaacccctaatctccaggctaaccatgactacctcagaaccccagatccttcaacaactgtgtccaggcaaagaggtcaaagctgaaacaaaytctgtccagtttaggaccccaaaaccaagaacaaacctggctaaatctgaaatcccaaattgccagactaattatgtgactattagaaccccgaatcctc

SEQ ID NO: 435483 - DNA, 201 bp, Homo sapiens
aatctgaaatcccaaattgccagactaattatgtgactattagaaccccgaatcctccacaaccatgtccacacaaggatgccaagatccgaaacaaacgytgcctgcctcaagaccccatatatctctatgcaacttctgcccatgtttcagcctcaaaccctgaagctatgcctggccataacagaaccctaaatccca

SEQ ID NO: 435484 - DNA, 201 bp, Homo sapiens
cctccacgggcttggtgctgccagacactgcccttctgggctcagtttcctaatccgtaacacagagaaaccagctctggaattctcggagccgtttcccyctctggacagaaatgacgcaggaaactcaaaatgcacagtgaaggccaaaataccttccttttctctctttaaaataggttaagcacttttcctgacgta

SEQ ID NO: 435485 - DNA, 201 bp, Homo sapiens
tcccagcaaggtgttttcaagcttctttaaatggatattatacgttacgaagcaaccgtaaattgtggggggaaaattagtctttaatacggatatgtgartaacagtttcagagcagggaagagagaacgatgagccgtgtcataattatgaaataccgcactgagggtttgccttcactccttgggtttaccattttgc

SEQ ID NO: 435486 - DNA, 201 bp, Homo sapiens
tgagaagtcagtggccctggagggaagcaggtctggtgccagcactggggtggctgttcacaggctatgtgagcctcagtctgctcatcagcagatggagwtaacaaacctaccttggagggctgtcctaaggatgaaagaatataggtactcggtctgggaaccaagtaatcactaagtacctagtacataagcacaaag

SEQ ID NO: 435487 - DNA, 201 bp, Homo sapiens
gacccaagacacaggcggcagctataaaggatccctggttcatttctcaccagacacattgctgggaatattcgcatgctgtctgtgtgatttccagcctygcatgaaattaggatgctgcaatggtccgaaatggtctagcctctggccaggcacggtggctcatgcctgtaatctcagcactttggaaggctgaggcgg

SEQ ID NO: 435488 - DNA, 201 bp, Homo sapiens
ttcatgagttgggattttttgcaggtagaaaggacagagtgtcttgtgttcccagtccttccagcagtggtttcctggacctgtgtcttgtcagccaccartcagggtccccatggtgccactcactccctgtctaggcaagtgtcttagggcacgccagtcagaggctgccctccttctcttcaccaggtctcgagaaga

SEQ ID NO: 435489 - DNA, 201 bp, Homo sapiens
agctttacatagtattccataggtgtacactctatcctccctggatgtgggatatttttgggaaaagatgcccattgatggagatgcagaccactcaatgyggagtggagaacaatggagaacagctgttaacagcctagaccctcaagaacaatggagaacagctgtaacagcccagaccaccagcttccttggaaaaag

SEQ ID NO: 435490 - DNA, 201 bp, Homo sapiens
ttggacacctgtcattagcccatccatctgcaggaggcggtggggaatttaatcgaagtgaaatctgtccatgagtcaggctgcccattgcgtcatttccygagtgcctgtcttctgcaggcactgagctacgtgctcgggatgagaacagcaacaagccagatgtgtgtattttctgccctcctggagtttatgagggga

SEQ ID NO: 435491 - DNA, 201 bp, Homo sapiens
aggaggcggtggggaatttaatcgaagtgaaatctgtccatgagtcaggctgcccattgcgtcatttcccgagtgcctgtcttctgcaggcactgagctaygtgctcgggatgagaacagcaacaagccagatgtgtgtattttctgccctcctggagtttatgaggggaagtcagtagattattacaaataattccatag

SEQ ID NO: 435492 - DNA, 201 bp, Homo sapiens
tcctggtaacactctttccacctatccatataccctcctcacctaccaggctatttgatgtggcagaaatgagcagccttctagatctactatcctctaattttttttttcccccaatacggagtcttgctctgtccacccaggctggaatgcagtggcacaatcatggctcactgcaacctctgcctcccaggtacaagc

SEQ ID NO: 435493 - DNA, 201 bp, Homo sapiens
ggtgtgtcttgaaaagaccattagtccgttccatctttcctgaagattgaggacggtaaggggtatgaagtttctactgaataccaagagcctgagaaackgcttgggtgatttgactaataaaggccaatccgttatcagactgtatagaggtgggaaggccaaactgaggaattatgtctgacagaagggaagaaatga

SEQ ID NO: 435494 - DNA, 201 bp, Homo sapiens
gattgaggacggtaaggggtatgaagtttctactgaataccaagagcctgagaaacggcttgggtgatttgactaataaaggccaatccgttatcagactrtatagaggtgggaaggccaaactgaggaattatgtctgacagaagggaagaaatgaccatgatggccttctcagaccctgtgggaaaggcctctacccat

SEQ ID NO: 435495 - DNA, 201 bp, Homo sapiens
atatgtatgtcatgtgccaagtgctgttgtctcatttacccctccaatgtgaggtgccatcattatgcccattttaaagatgagaaaactggagctcaaascgtgtagtaacacagccagtaagagacagaatcaggattgacatccaagttcaagttgacatccaaggcccaaactcaagttgtcccattgtgcctcagt

SEQ ID NO: 435496 - DNA, 201 bp, Homo sapiens
tgaagtggatgctcttattgtccccattttacagctggagaaactgagacacagagaagttaagcaactttctcagagtcacacagcaaaaaggggatggyggggctgttgcagatgccgtgcacctgacccataacacgtgactacctcttgtgggtggcagcagcatttatgaaatcaatcctcctcttttcagttgcc

SEQ ID NO: 435497 - DNA, 201 bp, Homo sapiens
gagtgtgttggtcacgatggtccctcagtgaaccatggttttctcgtctctttggataaacagcattttacaggcagggggtgcccagcctgtgtggagtrgtgctttggcccagtggcaaggatgctaaagattccaggattcttgtgccaggaacaagatggcaggttcaccatggtctagctttttctctgctccaag

SEQ ID NO: 435498 - DNA, 201 bp, Homo sapiens
tgctctggtctaacgcctctgacaaaggggccatagataaagaccaggccagtgtgatggggccacttgcaaccaagtttgtcagccaacctggaggtgaygaagaggacttggcccctacttctgcccttgggttctccctgatgtcataattcatgtcagtggaagtgaaaaaagatgaattcttgagaatcagatggc

SEQ ID NO: 435499 - DNA, 201 bp, Homo sapiens
gtggcagtgaggactaccagaggtcactctcgtcgccatcttggttttggtgggttttggccagcttctgcagcctgttttatcaacaaggtctttatgayctgtatcttgtgccgacctcccatctcatcctgtgacttagaatgcctcatcgtctggcaatgcagcccagtaggactcagccttattttacccagcccc

SEQ ID NO: 435500 - DNA, 201 bp, Homo sapiens
gaacttgttagaaatgtcaattctccagccctatcctgggcctagcgaatcaggaactttaggtgtggggcccagccatctgtgtctttacaggccctccragtgattctgcaagtttgagaatcactgcactgccccaggatactattcctgtctgcacagtggaagctggggcacagagggttgcagccaatgggaagg

SEQ ID NO: 435501 - DNA, 201 bp, Homo sapiens
ccgtgtgcatgtttgatataggctgtgtgtgtaggcagggagtgggctagaggaccctggacaccttggccagcctcctaggcagtgagttagaggaaagrggactaggtcttgcacctctgccatacctcgggatccagacagaccaggcagcgtgttaatattggtgttctgcatggtggacccaagctaaagtgttgc

SEQ ID NO: 435502 - DNA, 201 bp, Homo sapiens
atcgggctacgtcagtcttcagctgctaagccgaggagatctgggaaggagtcggccaaggaacatagggtttgggctccaggggctttaggagtggcagygatgtgagtcggacagtccgacctccagcgggggcccgcacagacagggcacggcttaggaggaatcccgggctgcgggcattctgaggcccagtggcca

SEQ ID NO: 435503 - DNA, 201 bp, Homo sapiens
cgatcgggctacgtcagtcttcagctgctaagccgaggagatctgggaaggagtcggccaaggaacatagggtttgggctccaggggctttaggagtggcrgtgatgtgagtcggacagtccgacctccagcgggggcccgcacagacagggcacggcttaggaggaatcccgggctgcgggcattctgaggcccagtggc

SEQ ID NO: 435504 - DNA, 201 bp, Homo sapiens
ttcaccatgttggccaggctggtctcaaactcctgacctcaggtgatccgcccgcctcggcctcccaaagtcctgggatgacaggtgtgagccactgcgcytggcctggaatagatcttgaactagatttttcaggagggctacattggaggtagagagacattctcaaacatacacaatctctgttgtcttctcacagga

SEQ ID NO: 435505 - DNA, 201 bp, Homo sapiens
ggctggcgtcgcagacgtggagttggtcgcagggctcccccagccgccgtgcacatacccggcagcagccacagccatccagcaccaggggtactcccagygggcatcggggaggtggccaggggcaggtacatggtgtcgggcacagctgggtacgcacctgaagagacagagacctcactcagccacgggctttcgagg

SEQ ID NO: 435506 - DNA, 201 bp, Homo sapiens
cgccttctactcactcagcaactatttgctgaaggcctaccaacttccaggcagtgagtaatatggcagtgaatacaacagacaaaactccttaccttcattttttttttttttttttgagatggagtctcgctctgtcgcccaggctggaatgcagtggcaccatctcggctcaccgcaggctctacctcccgggttcat

SEQ ID NO: 435507 - DNA, 201 bp, Homo sapiens
attattaatatgaattgggtttcttggatcacttgaaggcctgtcttctggctttctttaagaccatgtgatttcaccttgtgaggttcacagagaactcygcccctgaattctgccccggataatgggagggctttctcagaaaacacaggcctgacacacaagatcacgcataggcttgtattcaggaacaattttaca

SEQ ID NO: 435508 - DNA, 201 bp, Homo sapiens
agcccaggacacagaggcacttaacctgccaagagatacttaacctgccaagtcctcccagccaggctgtggctgagccaggattgaactcagggctgtcyggttccccaggtcatgatccttgtcaggccagatgctgctggctttatccccctcccatcgcctctctggctctcacttgccttgtctccgggatggggc

SEQ ID NO: 435509 - DNA, 201 bp, Homo sapiens
agaagacaaggcccctgctcttgagaagcaggtatgggctatggaggcaggacagaactatgccccaggttcagagagtggggaagagagtcctgtgtgcygagggctcccatggactcctggagcaggataaggaaggaatggggggaggatggggataccatacaatcctcctgagggctgaggattcccccagtcaag

SEQ ID NO: 435510 - DNA, 201 bp, Homo sapiens
gactctgtctcaagaaaaaaaaaaagagagacaagcactagctgctgcatcctttcctcagccctgctctctggactgcagatgtgaaggctggtgccccrgcagccatactgcacaatgaggataggggctggatgctagggatggcagagcagagagatagaaggaggcatcttcacagagttgtcacatcagtggcat

SEQ ID NO: 435511 - DNA, 201 bp, Homo sapiens
tgcaacagtgttggcaggtggggcctcatgggaggtgtttaggtcatgggggctccacactcatgggtggattaatgctgagtataaaaaggcttgaggcygtgagatcaatctcttgctccctctcttaccctctcggactctctcatcttctaccatggaatgatgcagcaagaaggcccttgaatgatgccagcacct

SEQ ID NO: 435512 - DNA, 201 bp, Homo sapiens
aactatgccccaggttcagagagtggggaagagagtcctgtgtgccgagggctcccatggactcctggagcaggataaggaaggaatggggggaggatggrgataccatacaatcctcctgagggctgaggattcccccagtcaagaactgaggctggagactgctgtttaaacatggcaggttgaacacacttatttctc

SEQ ID NO: 435513 - DNA, 201 bp, Homo sapiens
atgtttgctatggtttgaatgtggttccccaacaagcgtgtgttagaaacttaatccccaatgcaacagtgttggcaggtggggcctcatgggaggtgttyaggtcatgggggctccacactcatgggtggattaatgctgagtataaaaaggcttgaggccgtgagatcaatctcttgctccctctcttaccctctcgga

SEQ ID NO: 435514 - DNA, 201 bp, Homo sapiens
caatctgggagacaattggatgtccaggcctcctaccccagctggcacaggcaagatgtgaccccaccccacaataacacgaggcccacccaccggatagkctggatgaaaagaataatctgagatgatgtttgctatggtttgaatgtggttccccaacaagcgtgtgttagaaacttaatccccaatgcaacagtgttg

SEQ ID NO: 435515 - DNA, 201 bp, Homo sapiens
ggttatcaatctgggagacaattggatgtccaggcctcctaccccagctggcacaggcaagatgtgaccccaccccacaataacacgaggcccacccaccrgatagtctggatgaaaagaataatctgagatgatgtttgctatggtttgaatgtggttccccaacaagcgtgtgttagaaacttaatccccaatgcaaca

SEQ ID NO: 435516 - DNA, 201 bp, Homo sapiens
ccacaattgggaatttccctgggactgttttggttttagcactgaaaactctgtatttcaataaactactcagacctggtaaaccaggatggttggtcacyctagttcttggcctcttttcctatgagcaacatgaggctcatgacccactgaggaagattctaggatctgaagatgcactttgtctacataacacagctt

SEQ ID NO: 435517 - DNA, 201 bp, Homo sapiens
gagaaccacctgagatcaggagttcaaggccagcctggccaacatggtgaaacccgtccctactaaaaaaaaaaatacaaaaattagccggacgtggtggrtgcacacctatagtcccaagtactcaggaggctgaggcaggagaattgcttgaacccgggaggtggaggtggcagtgaaccgacatcttgccgctgcact

SEQ ID NO: 435518 - DNA, 201 bp, Homo sapiens
gactccattatcttgcctgtgcaggccagacgattgcctgaacccacaatagcttcaccagaagaggggcttactcatcacttccacacaacctgtgcccytcccccactgggaccagctggggttgagggggtgagggtcaggctggggaaggctcctggagattgcatttgcaacctacccctcccctgccaacctcta

SEQ ID NO: 435519 - DNA, 201 bp, Homo sapiens
ttcatagttgatttcactctactgtttaaacacagaaatacagctgggccggtggctcacgtctgtaatttgggaggccaaagtgggagaaccacctgagrtcaggagttcaaggccagcctggccaacatggtgaaacccgtccctactaaaaaaaaaaatacaaaaattagccggacgtggtgggtgcacacctatagt

SEQ ID NO: 435520 - DNA, 201 bp, Homo sapiens
ggggttttgcatgttgaccaggctggtctcgaacttttaacctcaagtgatccacccgccttggcctcccaaagtgctggaattacaggcatgagccacckcacctggcaccaatgcttttctgcaagtgctagtgtgtgccatacagacatctgtgcatgcccaggggcggctgaggggccataagcctcctttgactcc

SEQ ID NO: 435521 - DNA, 201 bp, Homo sapiens
tctggggcccccattacctccaccagtagttgtccaaacctcaaagtgatctagctggatagcagaggttccagaatgggcgattggtgaggaagaagtgwgacttgatatagtggcaagacggggattgtgagcatggaggagattccccacgggtgctgtcccatcggaagaggcaatggaaacggaaggtgaagatga

SEQ ID NO: 435522 - DNA, 201 bp, Homo sapiens
cctggcaggcaggaggacctcctggggcctgttgatgcccttcactagggaaacttcttccttacggctctcggctggaggaggatggtgtgccaagggcsccaggaacaggccctgtgccaggtccttcagccacagctggtagcggagtcctctccagaaagcattctgccccgggacactcagcttgccccgcagacc

SEQ ID NO: 435523 - DNA, 201 bp, Homo sapiens
actcaataatgtgaatgtacttaaagccatgcattgtacatttaaaattgcttagatggtaaattttatgttcggtgtgttttgccaaaatgtaaaagttaaaaaaaaaaaaaaagctctcctaagaggtagatgctaagttctaatatttttcaggacatataaattagtttaccatgatttgtatcagtcaggataggc

SEQ ID NO: 435524 - DNA, 201 bp, Homo sapiens
gagccagctttgagcctgggaggcggacctgtgagtctttatgttccggcagctgtgaggtcactcccaggcacacacaggcacacgcacgcgtacacacrcgcgcgcgcgcgcgcacacacacacacacacacacacacacacacacacaaacacactagctttttcattccttgcttcgcttcccatcctcatggctca

SEQ ID NO: 435525 - DNA, 201 bp, Homo sapiens
ctgggaggcggacctgtgagtctttatgttccggcagctgtgaggtcactcccaggcacacacaggcacacgcacgcgtacacacgcgcgcgcgcgcgcgmacacacacacacacacacacacacacacacacacaaacacactagctttttcattccttgcttcgcttcccatcctcatggctcaaaggatgagcccatt

SEQ ID NO: 435526 - DNA, 201 bp, Homo sapiens
ggaggcggacctgtgagtctttatgttccggcagctgtgaggtcactcccaggcacacacaggcacacgcacgcgtacacacgcgcgcgcgcgcgcgcacdcacacacacacacacacacacacacacacacaaacacactagctttttcattccttgcttcgcttcccatcctcatggctcaaaggatgagcccatttac

SEQ ID NO: 435527 - DNA, 201 bp, Homo sapiens
cccatcctcatggctcaaaggatgagcccatttacctgaaggtgaaactgtgaaggccaccaagggggtgcctgtccgtgtgtgtgtgtgtgtgtgtgtgygcgcgtgtgtgtgtgtgaaagcctgagccagtgccagcaccaagagcctgtgacagcttgcagaggcctctccagctccttccagcccaagagggtccta

SEQ ID NO: 435528 - DNA, 201 bp, Homo sapiens
tacttggattgcttccacctttgactattgtgaatagtgctgctatgatcacgggtgtacacatatctgttcaagaccctgcttttcagttattttgggcrcacacccacaagcagaatgactggatcataaggtaattttattttacatttttcgaggaactgctgtacagttttccgtggctgttataccattttacat

SEQ ID NO: 435529 - DNA, 201 bp, Homo sapiens
gcgatctcggctcactgcaacctccacctcccagattcaagtgattctcctgcttcagcctcccgagtagttgggattacaggtgcccgtcaccacatccrgctaatttttgtatttttagtagagacggggttttgcatgttgaccaggctggtctcgaacttttaacctcaagtgatccacccgccttggcctcccaaa

SEQ ID NO: 435530 - DNA, 201 bp, Homo sapiens
tcagagctcgggatcagccagaatgaatgagtgaaagaacgaatgaatgccagcttcccagactcagtcagggaaacctcatttctttctttctttctttyttttttttttgagacagagtctccctctgtcacccaggctagactgcagtgtgcgatctcagttgactgcaacctccgccttctgggttcaagcgattct

SEQ ID NO: 435531 - DNA, 201 bp, Homo sapiens
cagattggtcttgaactcctggcctcaagccaccctcccaccttggcctcccaaaatacggggattacaggcatgagccactgtgcctggccccaaatttyttatggtcgataaagtttctttcagctttgcaacttattactggtacagtagccccctcttctgcaaggttttgcttcctgaggtttcagttgcccatgg

SEQ ID NO: 435532 - DNA, 201 bp, Homo sapiens
agtctccctctgtcacccaggctagactgcagtgtgcgatctcagttgactgcaacctccgccttctgggttcaagcgattctgctgcctcagcctcccaratagctgggactacaggtgcacttcaccactcctggctaatttttgtattttgagtagagatgggatttcaccatgttggccaggctggtctggaactcc

SEQ ID NO: 435533 - DNA, 201 bp, Homo sapiens
tataccattttacattcctaccaacagggcacaatggttccaatttcttcacatcctcaccaacacttattttcattttttaaaaatagtagtcatcctartaggtgtgagatggcatgtttccaatcttttgctgataaaaacggcagtggataatcttgtacacacctcatttcacacatatgaaaatatatctgtcgt

SEQ ID NO: 435534 - DNA, 201 bp, Homo sapiens
tgggaggcggacctgtgagtctttatgttccggcagctgtgaggtcactcccaggcacacacaggcacacgcacgcgtacacacgcgcgcgcgcgcgcgcrcacacacacacacacacacacacacacacacacaaacacactagctttttcattccttgcttcgcttcccatcctcatggctcaaaggatgagcccattt

SEQ ID NO: 435535 - DNA, 201 bp, Homo sapiens
cctcccgctcacacccgcccccactcagtcctgcaaacctgcttacagaggcacagggccccccggccaccgggtcctgccccgggctggcagaccaggcyctggctggcgtcgcagacgtggagttggtcgcagggctcccccagccgccgtgcacatacccggcagcagccacagccatccagcaccaggggtactccc

SEQ ID NO: 435536 - DNA, 201 bp, Homo sapiens
cccccctcagcaaccgccaccccattctccaaactttctatgttattgcatcgcctttacaatggtagaaaagagagaccaggaggaacgtaactgagcayttactatgtgtgagatgtttccatttatcctttccctaattctgcaggctctacacggcaagcccatgtctgtgttgcttgctgctgttttcccagtgcc

SEQ ID NO: 435537 - DNA, 201 bp, Homo sapiens
gaagagtggaagaggcagtgttctgggttccatcccttgggttttagggattaagccatcttgattctaccctcagctccatccttttctaacaatgcatmcttgggcaagttactcaatttttaagtgcctccatttcctcatttgaaaaatgggtataatcatagtccctacctcataggatcattgtaaagatgagat

SEQ ID NO: 435538 - DNA, 201 bp, Homo sapiens
tctcggctggaggaggatggtgtgccaagggcgccaggaacaggccctgtgccaggtccttcagccacagctggtagcggagtcctctccagaaagcattytgccccgggacactcagcttgccccgcagacccaggccagcactgaggaagtgagtgcagaagcttcccatggaggaatggccaggcctgggcacctgtg

SEQ ID NO: 435539 - DNA, 201 bp, Homo sapiens
tcttccctcctccctcagtcaccaaacactgatttttttgtttggggtggcgacgcactcagctttgcaggaggcggggccacgggataggttccagcacrgagatacaagcaggagtgttgtgtgccgattctggaaaggctccttaaaaggaagggcttccctttggtgactccaccaccactgattgctgcctcctgc

SEQ ID NO: 435540 - DNA, 201 bp, Homo sapiens
tatagcctacagcagaagccgccgtctggtctgggaaggacttggaaacgccctgctgtggcctagagatgcacagagagcatctgtccctctgcccaggrcctgacttagctcagggaggccagtttcccccagtgagcaatggggcccctgcttggagccatctgcgtgtaccctgcagggcagaagctggtgaagagt

SEQ ID NO: 435541 - DNA, 201 bp, Homo sapiens
caggacagaactatgccccaggttcagagagtggggaagagagtcctgtgtgccgagggctcccatggactcctggagcaggataaggaaggaatgggggraggatggggataccatacaatcctcctgagggctgaggattcccccagtcaagaactgaggctggagactgctgtttaaacatggcaggttgaacacact

SEQ ID NO: 435542 - DNA, 201 bp, Homo sapiens
aaccgggaggcggaggatgcggtgagcccagatcgcgccactgtactccagcctgggccacagagtgagactccatctcaaaaaaaaaaaaaaaaaaaaartgcatctgaaaagtgaaacttacgaaacatcaccatcaaggtacagcatatggaagccacaagtaaatatctgcggttgaaagccctttgcagtttgtca

SEQ ID NO: 435543 - DNA, 201 bp, Homo sapiens
cgaaggagaaataaaggaactcagatccctgatgacacccagagctgccaaatgcaccctacatgtagatttcattcatgtgattagaaacgtaataatgkgtgtgtgtgtgtgtgtgtgtgtgtgtgtgtgtggtgtgtagagagagatataatgttttatatatatacgctatttttatacttatgtatatatatacct

SEQ ID NO: 435544 - DNA, 201 bp, Homo sapiens
taccttcattttttttttttttttttgagatggagtctcgctctgtcgcccaggctggaatgcagtggcaccatctcggctcaccgcaggctctacctccygggttcatgccattctcctgcctcagcctcccaagtagctgggactacaggcacccgccaccacgcccggctaattttttgtatttttagtagagacagg

SEQ ID NO: 435545 - DNA, 201 bp, Homo sapiens
gacagggaaagtgacatcagacaggagagcctagttctcccagcttccaggcctaggtgctcccagtgtccatgtacaaccttctgcccaggaaaagagtmgttgtcaaagcccaggacccaagcctcttgagactgtgggatcttgaattatgtgcagcagatattctcagtctgaaattcagatgggctggaaatgtaa

SEQ ID NO: 435546 - DNA, 201 bp, Homo sapiens
atggtctgtgtgtggaggggcccactaggctacatgaggaacgctctctcaaatcctgcccttccttcaagattgaactaaatgccacttccttccttccytcatttctctacccattcattcaacatgatttattaaacacaaaatggatttattagcacatatttattacctactatgtgaagacattattctaggcag

SEQ ID NO: 435547 - DNA, 201 bp, Homo sapiens
catgcaagtgtagtcaactcccagcccagcctacatcaaagtctttgcgaatttctgctttgaatcatggggtaggggaccctgccttatatcacatgtgyccagcctccacacttttgcaagtgtgctgtttccacaccctgccatgccccatgccctctgtctttccagattctgttcaccatctgtcaaggcttggcc

SEQ ID NO: 435548 - DNA, 201 bp, Homo sapiens
tggtcaatactaaggtaagatgaaaaaactgcgggtttgggataagcaggaaaaaagaagcaaactctcttagtggcggaacttactgaagttaagcttcragtctgtattggtcaggactcttggttgcaagtgacagaatcccaactctgttagtgtggttaaaggttaagctgctgtaacaaagatgcccagcagtgc

SEQ ID NO: 435549 - DNA, 201 bp, Homo sapiens
tgggcaagtaacttcacctctctgagcttcagtttccttgtctgtgacctggggctaggaatatctgcctgacagtgttcccgtgaggattaaatggagtgtatgaagaactgctcagcacagagtatgcccagcaaatgttagtactgtcctccacccaattaatttcttctttgcccttttccacactgcctattcccc

SEQ ID NO: 435550 - DNA, 201 bp, Homo sapiens
gaactcctgaccttgtgatcgaacacctcgacctcctaaagtgttgggattacaggcatgagccactgcagtgggcctactatcctcttctttagtaacasaatctccttttttttagctgggtaccttgccttacaggtataagacatttcctagtttcctttgcgattagatgtggccatgtgactatataagcagaat

SEQ ID NO: 435551 - DNA, 201 bp, Homo sapiens
cagtggataatcttgtacacacctcatttcacacatatgaaaatatatctgtcgtttaattcctaagagtggaattgctggatcaaagcatcttttggaayttcttatggaagtctaacttatacacaaagttgcacacaaatcccaagtgcttagcttgatgaattttcacggagtgaccacgctcctgaagatggtgtc

SEQ ID NO: 435552 - DNA, 201 bp, Homo sapiens
aacacatagccacacccagtgggggaaaccactgctcccaggccgatgaggatattatttgggggacaaatgacaattgtctgaacaagactctgtctctracgggttttaggcagggctgctcagagaggtcctaacatgtgtttgtgaccatttccttggagccactgagagtttgttcttcagcctcatgaggatcca

SEQ ID NO: 435553 - DNA, 201 bp, Homo sapiens
gggcaagtaacttcacctctctgagcttcagtttccttgtctgtgacctggggctaggaatatctgcctgacagtgttcccgtgaggattaaatggagtgtatgaagaactgctcagcacagagtatgcccagcaaatgttagtactgtcctccacccaattaatttcttctttgcccttttccacactgcctattcccca

SEQ ID NO: 435554 - DNA, 201 bp, Homo sapiens
caatgcaagccatgtatatttctagcagccacattcaaaaaagaaaaagaaataggtaaaagtaattttaaaaattacttaacccaggccaggtacagtgsctcatgcttgtaatcccagcattttgggaggctgaggtgggcagatcacttgaggtcaggagtttgagaccagcctggccaacatggtgaaaccccatct

SEQ ID NO: 435555 - DNA, 201 bp, Homo sapiens
ccagagaagcccccagatggcccccaaagagcagccatcatcctgactttaacatcataaattagttttgcctcttgtgaactttttgtgagtggaatcayacaatatgtattattttgtgtgtggcttcttttgctcgacacatatgtgtgcaagttccatctacactgctgtgtgtagttgttcattcattttcattct

SEQ ID NO: 435556 - DNA, 201 bp, Homo sapiens
agtaacttcacctctctgagcttcagtttccttgtctgtgacctggggctaggaatatctgcctgacagtgttcccgtgaggattaaatggagtgtatgaagaactgctcagcacagagtatgcccagcaaatgttagtactgtcctccacccaattaatttcttctttgcccttttccacactgcctattccccagggct

SEQ ID NO: 435557 - DNA, 201 bp, Homo sapiens
cagacaaagatgttcaacatagcattgtttctaagagggaaaaactagaaagaacctaaatgtctgacactggagaaccagttattccacgacgtaatgckcagcccttaaaaatcctatagcagaaggatcctttctgacatagaaaaatgttcacagtatatcaagtgagaaaagcagagccctcctagccgctgccgc

SEQ ID NO: 435558 - DNA, 201 bp, Homo sapiens
gtaacttcacctctctgagcttcagtttccttgtctgtgacctggggctaggaatatctgcctgacagtgttcccgtgaggattaaatggagtgtatgaagaactgctcagcacagagtatgcccagcaaatgttagtactgtcctccacccaattaatttcttctttgcccttttccacactgcctattccccagggcta

SEQ ID NO: 435559 - DNA, 201 bp, Homo sapiens
gaaaagcagagccctcctagccgctgccgcctgccccccaggccaacccctgcttgcatctacaatccagccacattaacccccttctggtcccccaaatrctccaggctttctcttctcaggcgtttgcagttgcttcttcctctgcctggaatccacttcccatcccatcccttgtcgttctctttcaagctggctaac

SEQ ID NO: 435560 - DNA, 201 bp, Homo sapiens
gcccccaaagagcagccatcatcctgactttaacatcataaattagttttgcctcttgtgaactttttgtgagtggaatcatacaatatgtattattttgygtgtggcttcttttgctcgacacatatgtgtgcaagttccatctacactgctgtgtgtagttgttcattcattttcattctcactggagtattgcattgt

SEQ ID NO: 435561 - DNA, 201 bp, Homo sapiens
taacttcacctctctgagcttcagtttccttgtctgtgacctggggctaggaatatctgcctgacagtgttcccgtgaggattaaatggagtgtatgaagaactgctcagcacagagtatgcccagcaaatgttagtactgtcctccacccaattaatttcttctttgcccttttccacactgcctattccccagggctac

SEQ ID NO: 435562 - DNA, 201 bp, Homo sapiens
tgtggcttcttttgctcgacacatatgtgtgcaagttccatctacactgctgtgtgtagttgttcattcattttcattctcactggagtattgcattgtaygaagataccacaatttatccgttctgctgtcgatgagcatttgggtagttcctggtttagggatatttcaaattatgtggctatggagatcactggcata

SEQ ID NO: 435563 - DNA, 201 bp, Homo sapiens
gaaaaaaaaaaagagagacaagcactagctgctgcatcctttcctcagccctgctctctggactgcagatgtgaaggctggtgccccggcagccatactgyacaatgaggataggggctggatgctagggatggcagagcagagagatagaaggaggcatcttcacagagttgtcacatcagtggcattgcctgcctctgg

SEQ ID NO: 435564 - DNA, 201 bp, Homo sapiens
agtggaaacaaccgaaatgcccatcagtgaatgaatggataaacaaaatgtggtatatccttacaatggaacattattcagtcttaaaaaaggaaggaagktctgacatatgctacaacatgcgtgaaccttgaagacactatactgagtgaaataagccagcaaccaaggacaaattgtatatgatttctcccgtatgag

SEQ ID NO: 435565 - DNA, 201 bp, Homo sapiens
caccccacaataacacgaggcccacccaccggatagtctggatgaaaagaataatctgagatgatgtttgctatggtttgaatgtggttccccaacaagcrtgtgttagaaacttaatccccaatgcaacagtgttggcaggtggggcctcatgggaggtgtttaggtcatgggggctccacactcatgggtggattaatg

SEQ ID NO: 435566 - DNA, 201 bp, Homo sapiens
gtttagcagtcaaagaaatgatttgtgcaaagtttacaaatgaggaaattgaggttcaaagaggttatgtgacttgttcaatatcacctagctagtgggaygcaggaccaggatcattggacttcaggtcctgaggaaggtctttctactcatgcctgtccctctgcctcctcacattccgacaccctctttgtaaagctg

SEQ ID NO: 435567 - DNA, 201 bp, Homo sapiens
gcctgggaggcggacctgtgagtctttatgttccggcagctgtgaggtcactcccaggcacacacaggcacacgcacgcgtacacacgcgcgcgcgcgcgygcacacacacacacacacacacacacacacacacacaaacacactagctttttcattccttgcttcgcttcccatcctcatggctcaaaggatgagccca

SEQ ID NO: 435568 - DNA, 201 bp, Homo sapiens
gtcttaaaaaaggaaggaaggtctgacatatgctacaacatgcgtgaaccttgaagacactatactgagtgaaataagccagcaaccaaggacaaattgtrtatgatttctcccgtatgaggcaacctagaatagtccagttcacagagacagaaagtagaatagtggctgccaggggctgggaggagaggagcaagcgga

SEQ ID NO: 435569 - DNA, 201 bp, Homo sapiens
atggacctatactttcctttgtggtattgtcttatctggcttttataatcaagacaacacttttaaaataagataggttggtttttttttcttttgttttytttttaagcaacttgcatatgatacgaattaattgtttctaaaaagtttctgcaggctgggcgcggtggctcacacctgtaatcccagcactttgggagg

SEQ ID NO: 435570 - DNA, 201 bp, Homo sapiens
tcttaaaaaaggaaggaaggtctgacatatgctacaacatgcgtgaaccttgaagacactatactgagtgaaataagccagcaaccaaggacaaattgtayatgatttctcccgtatgaggcaacctagaatagtccagttcacagagacagaaagtagaatagtggctgccaggggctgggaggagaggagcaagcggag

SEQ ID NO: 435571 - DNA, 201 bp, Homo sapiens
catctctgggtctgtgtcttcaccttttcaatgggaagagtgagaggctgggataactagcatggcacagggcttattatgtgtcacgtgtatatgcaatyctcacagaaaccccctaaaggaggcatcattattatcctcattatacaggtggggagactgaggaaccaagaagttgagtgacttgcccaaggtcacata

SEQ ID NO: 435572 - DNA, 201 bp, Homo sapiens
gagctgatgaaattggcaaaaatgaagctagtcattgtgttggggtggtgggattctggatgacagagttcccccctcagcaaccgccaccccattctccmaactttctatgttattgcatcgcctttacaatggtagaaaagagagaccaggaggaacgtaactgagcacttactatgtgtgagatgtttccatttatcc

SEQ ID NO: 435573 - DNA, 201 bp, Homo sapiens
aaaagtgaggctggccagtgaattttctgtgtctctaggactggatgctagtggctggggtaggttccctaaacagctccaatcaatgcaaaggcagccargtcatccagcccacagccccagtgtccgtccctggatgcatcccacagtcctggacaggatgggcaggagttctggcctctggagctgctcttcgcattt

SEQ ID NO: 435574 - DNA, 201 bp, Homo sapiens
ggtgtaaaaacgtctgcacgtggtaagtgctcattgagcggcagccattattattactattagccgcagctgacttgggcaacacctgctacctgcttccrgatggatccagaggtttgctttctttgcccactggagggcagcagaaagcagaaacctgccttccagagctttgcaccccggctaacacctaacactggc

SEQ ID NO: 435575 - DNA, 201 bp, Homo sapiens
caccactcctggctaatttttgtattttgagtagagatgggatttcaccatgttggccaggctggtctggaactcctgacctcaagtgatcctcctgcctmggcctcccaaagtacttggattacaggcgtcagccaccgtacctgactagaaacctcatttcttaccagaactcttgatggcctgcttcccatcctccat

SEQ ID NO: 435576 - DNA, 201 bp, Homo sapiens
ccgggatggggccgaggatccgtggctggctttgcttgcccactgttgtgagggccccatgatgcgcagctgagaggcgcttggtcaggtgtgcccactgsgggtggatgttactggggccatgggggagctgtctggctccgtcaggcagatgactctgccctgtgcttggcatttttggttcagtggctctattttaag

SEQ ID NO: 435577 - DNA, 201 bp, Homo sapiens
agttttgcaaatgtgaaacatatgcccatgcgaatgcgttggaaagttcctccatggccctgggagaggacatgcaagtcaggagccctgatgcgtcaccrgcctcacagtaaattcacctctgtgcccaagaatgcagggctgtctcctggtccaggatcatggtctcttcctcctctgatctccaaggacttgcactct

SEQ ID NO: 435578 - DNA, 201 bp, Homo sapiens
taggcggtggagttaggagcaatgttttgcaggcaggggttggatctcacaaagtacattctcaagggtggggagaattacaaagaaccttcttaagggtcggggggggggttacaaagaaccttcttaagggtgggggagattataaaatacattgatcagttagggtggggcagaaacaaatcacaatggtggaaagtc

SEQ ID NO: 435579 - DNA, 201 bp, Homo sapiens
catttggatatcttcttccagggagcttatagacaccccagcagaggcttctgtgatcacactggctgagcaccagctctctgtgtggtgctggatgaggkgagttttatctgagccactctggccccccgctgtagggccctgtcctcttatttgacattcaactcttgcctaattgacaattacactcatatccttcct

SEQ ID NO: 435580 - DNA, 201 bp, Homo sapiens
ggcggtggagttaggagcaatgttttgcaggcaggggttggatctcacaaagtacattctcaagggtggggagaattacaaagaaccttcttaagggtcggggggggggttacaaagaaccttcttaagggtgggggagattataaaatacattgatcagttagggtggggcagaaacaaatcacaatggtggaaagtcat

SEQ ID NO: 435581 - DNA, 201 bp, Homo sapiens
agccaggcttggatcagccatatttcaaggactcagcagccacatgtggtgggtggctccacatcagatcatgcaggtctagttcaagtcttttgatgaaygtatcatgcatacctgttagatatgtgcatttttaattttgatagatgttaccagattagcttctataggtgttaaaccaagttttcttttctggttttt

SEQ ID NO: 435582 - DNA, 201 bp, Homo sapiens
gcggtggagttaggagcaatgttttgcaggcaggggttggatctcacaaagtacattctcaagggtggggagaattacaaagaaccttcttaagggtcggggggggggttacaaagaaccttcttaagggtgggggagattataaaatacattgatcagttagggtggggcagaaacaaatcacaatggtggaaagtcatc

SEQ ID NO: 435583 - DNA, 201 bp, Homo sapiens
ccagtgaaagtgtctacctagaccaagaggtattttagtttcctgactcgggacatgtgagtaaagtcaatttgccagtcctgggcaggggcaaatccccragctggatgtgtagggaagggagggggcctgaacaatccctgaggagtagtagaatagcagatggaacactgagaagtgatttccttgaggatagatttc

SEQ ID NO: 435584 - DNA, 201 bp, Homo sapiens
agaatagcagatggaacactgagaagtgatttccttgaggatagatttccatgatggaaaggaaatgagaggttctaagagtcgggctagcggcttgtaamctacatggaagaggttatgaaatgatgacagaatagaatgggcctgtgaggctggaaggagatatttttcttggtccaagaaccatttgccttgtgtggg

SEQ ID NO: 435585 - DNA, 201 bp, Homo sapiens
gtggggaaaggattgagaatctatggagtcagctaggtttccttttgtgagtttatacaatggttttgttaggatggcaaaaccaggtatccaaagacaawagtatccaaccacgcccaggaagtaaaggagttgttgttttgtagaagggcctggggtttgagagatcagtcggacacgatccgcagggagagcgcatgt

SEQ ID NO: 435586 - DNA, 201 bp, Homo sapiens
ctgttgtgagggccccatgatgcgcagctgagaggcgcttggtcaggtgtgcccactgggggtggatgttactggggccatgggggagctgtctggctccrtcaggcagatgactctgccctgtgcttggcatttttggttcagtggctctattttaagccagaggaggttagactttgtgtatgtgtgtttctcaggttg

SEQ ID NO: 435587 - DNA, 201 bp, Homo sapiens
tgagaatctatggagtcagctaggtttccttttgtgagtttatacaatggttttgttaggatggcaaaaccaggtatccaaagacaaaagtatccaaccaygcccaggaagtaaaggagttgttgttttgtagaagggcctggggtttgagagatcagtcggacacgatccgcagggagagcgcatgtgttgttatgaaga

SEQ ID NO: 435588 - DNA, 201 bp, Homo sapiens
tttatacaatggttttgttaggatggcaaaaccaggtatccaaagacaaaagtatccaaccacgcccaggaagtaaaggagttgttgttttgtagaagggsctggggtttgagagatcagtcggacacgatccgcagggagagcgcatgtgttgttatgaagaattatgctgaggtaggtaatggatggagaagaaatttg

SEQ ID NO: 435589 - DNA, 201 bp, Homo sapiens
gtgtcttgttgagaagattcaaaggaggggctacaaagtagaaggtcatcaatatattgaataaggcaagaagcagaggggtggaaagaaagtaaatcatragaaagagcttggctgaagtaatgagggctggccctgaagccttgcggcagtacagcccaggtaagctgctgggactgatgggtgtcaggatcggtccag

SEQ ID NO: 435590 - DNA, 201 bp, Homo sapiens
cttagcacacgtcagtgtgttcgattcagggctgggagcgtccccggtcctgcttcccaagtgaggactcagggacacgggatgggggtagactgtgtccrtaagccagggacccactccccagagacaggatcagggtatcagcccatgtggcctgcctgaccctcgccacccacatcagagaaacaaccaaagcataca

SEQ ID NO: 435591 - DNA, 201 bp, Homo sapiens
aggtaagctgctgggactgatgggtgtcaggatcggtccaggtaaaagcaaagagaggctgggacaaggggtgtaggagaatagtgaaaaaaagcattttwaagatcaagaatggaatagtgagttgtggaggaagatattgaggacaaaagagcgtacgggttgggcaccacagggtggataggcaaaacaatttggttg

SEQ ID NO: 435592 - DNA, 201 bp, Homo sapiens
aggcgcccaccaccatgcctggcaatttttgtatttttaatagagatggggtttcaccatgttacccaggctggtcttgaaatcctgagctcaggcaatcygcccgcctcggcctcccaaagtgctgggattataggcatgagccactgcacctggctagacttccagttctaattctgccccttattagctgagtgacct

SEQ ID NO: 435593 - DNA, 201 bp, Homo sapiens
gaggcacagggccccccggccaccgggtcctgccccgggctggcagaccaggccctggctggcgtcgcagacgtggagttggtcgcagggctcccccagcygccgtgcacatacccggcagcagccacagccatccagcaccaggggtactcccagcgggcatcggggaggtggccaggggcaggtacatggtgtcgggca

SEQ ID NO: 435594 - DNA, 201 bp, Homo sapiens
acacaccagagaggactgcagatagtgcgggatgagaggaagatctctggccctggagacagcatcatcaagcggtagcttcatctttgggagctggggcytctgcaggagctttaccctcctctctccatgctgagcctgtctcaaccccctaacctgcaccccagtcttttggggtcacctcaaggctttggctgatgc

SEQ ID NO: 435595 - DNA, 201 bp, Homo sapiens
aacttcacctctctgagcttcagtttccttgtctgtgacctggggctaggaatatctgcctgacagtgttcccgtgaggattaaatggagtgtatgaagaactgctcagcacagagtatgcccagcaaatgttagtactgtcctccacccaattaatttcttctttgcccttttccacactgcctattccccagggctact

SEQ ID NO: 435596 - DNA, 201 bp, Homo sapiens
agtggagagagatagtggtctcagccaattgcaactgaaatgtgttagttttgcaaatgtgaaacatatgcccatgcgaatgcgttggaaagttcctccayggccctgggagaggacatgcaagtcaggagccctgatgcgtcaccagcctcacagtaaattcacctctgtgcccaagaatgcagggctgtctcctggtcc

SEQ ID NO: 435597 - DNA, 201 bp, Homo sapiens
cttcacctctctgagcttcagtttccttgtctgtgacctggggctaggaatatctgcctgacagtgttcccgtgaggattaaatggagtgtatgaagaactgctcagcacagagtatgcccagcaaatgttagtactgtcctccacccaattaatttcttctttgcccttttccacactgcctattccccagggctactgg

SEQ ID NO: 435598 - DNA, 201 bp, Homo sapiens
cctgtcctcttatttgacattcaactcttgcctaattgacaattacactcatatccttcctctgctctgcaaccttccatggctccccagtgcctaccacstaaggccagattcctcaccctggcattcaaggccactcatggccttggatggtctgtgtgtggaggggcccactaggctacatgaggaacgctctctcaa

SEQ ID NO: 435599 - DNA, 201 bp, Homo sapiens
ttcacctctctgagcttcagtttccttgtctgtgacctggggctaggaatatctgcctgacagtgttcccgtgaggattaaatggagtgtatgaagaactgctcagcacagagtatgcccagcaaatgttagtactgtcctccacccaattaatttcttctttgcccttttccacactgcctattccccagggctactggg

SEQ ID NO: 435600 - DNA, 201 bp, Homo sapiens
tgaggggagttttatctgagccactctggccccccgctgtagggccctgtcctcttatttgacattcaactcttgcctaattgacaattacactcatatcyttcctctgctctgcaaccttccatggctccccagtgcctaccacctaaggccagattcctcaccctggcattcaaggccactcatggccttggatggtct

SEQ ID NO: 435601 - DNA, 201 bp, Homo sapiens
aaagaatttaaggcaagtccacaaagagaaagcaagtttattaagaaagtaaaggaataaagaatggctactccatagacagaagagccctcagggctgcyggttgcccatttttaaggttatttcttgatgacatgctaaacaagaggtggattattcatgtgtcccctttttagaccatagagtgtaacttcctgacat

SEQ ID NO: 435602 - DNA, 201 bp, Homo sapiens
tcacctctctgagcttcagtttccttgtctgtgacctggggctaggaatatctgcctgacagtgttcccgtgaggattaaatggagtgtatgaagaactgctcagcacagagtatgcccagcaaatgttagtactgtcctccacccaattaatttcttctttgcccttttccacactgcctattccccagggctactggga

SEQ ID NO: 435603 - DNA, 201 bp, Homo sapiens
gggctgcactttgatccaggacaccacggccttgacctcccgctcacacccgcccccactcagtcctgcaaacctgcttacagaggcacagggccccccgkccaccgggtcctgccccgggctggcagaccaggccctggctggcgtcgcagacgtggagttggtcgcagggctcccccagccgccgtgcacatacccggc

SEQ ID NO: 435604 - DNA, 201 bp, Homo sapiens
cacctctctgagcttcagtttccttgtctgtgacctggggctaggaatatctgcctgacagtgttcccgtgaggattaaatggagtgtatgaagaactgctcagcacagagtatgcccagcaaatgttagtactgtcctccacccaattaatttcttctttgcccttttccacactgcctattccccagggctactgggat

SEQ ID NO: 435605 - DNA, 201 bp, Homo sapiens
gttccttagagcccgttggatctggtcccgtgccgtgtgacatgaagcatgtcccttaatgctggtgaacctgtttcctcattcataaaataggtctgaargtacttcccatcatagggttattgtgaggatgatgtgacttgtgtagtaagtgcttagcacagttctggacacatattatgccctaaaaggttgcacttt

SEQ ID NO: 435606 - DNA, 201 bp, Homo sapiens
aaggctggggagagagatcctcggccaccttctttgtaaatccgtcggacctgatgatccagtctagaatttcacatctttcctatcctggggtcttctgytgaatattttgatatatttcaacataaggaaacaggacttatatactgttcttgctctggattttattatctttgtatcttacatattttctcacctttc

SEQ ID NO: 435607 - DNA, 201 bp, Homo sapiens
catgttggccaggctggtctcgaactcctgacctcaagtgatccacctgtctcggactcccaaagtgtgcctggccccaattcttacataagacagttctrccatcactttaagtcacaaacatggtctcaactcaaatttaaaatgtccagtcaagctattaatccaaactcccaattggatctaggtttaaaccttctc

SEQ ID NO: 435608 - DNA, 201 bp, Homo sapiens
gactttcatgaatcgataaagtgttttttgtcaccaccataccaatggcaggagagatgatgaggatgtttatccccattttacagatgagaacatggagrtcatgagaccggaagtgatagtcacccggttggggaatcaggccctctatcccgacgccctcgctctctctaatctaccctgctgggctgagcacacagt

SEQ ID NO: 435609 - DNA, 201 bp, Homo sapiens
ataatctgttttcaatctttcattattatatttttttcttttttgaaacccatcctgccaagcaacaggcatgcaagtgtagtcaactcccagcccagccyacatcaaagtctttgcgaatttctgctttgaatcatggggtaggggaccctgccttatatcacatgtgtccagcctccacacttttgcaagtgtgctgtt

SEQ ID NO: 435610 - DNA, 201 bp, Homo sapiens
gggtgataaaatgcatattaagaataaggcggccttctggcccctctgggtctagggcggtaaagtgtgtaagggttgctgccgagcgggccatgaactgrgctgggttttcgtctttaccttgggtagtttctctaagtttgtcataattaacagctttgtaagctgcctttttaagcccttcaactaggcaggaaacca

SEQ ID NO: 435611 - DNA, 201 bp, Homo sapiens
agtgatccacccgccttggcctcccaaagtgctggaattacaggcatgagccaccgcacctggcaccaatgcttttctgcaagtgctagtgtgtgccatasagacatctgtgcatgcccaggggcggctgaggggccataagcctcctttgactccattatcttgcctgtgcaggccagacgattgcctgaacccacaata

SEQ ID NO: 435612 - DNA, 201 bp, Homo sapiens
agatctttaaaagacagaagtggccaggcgtggtggcaggcgcctgtagtcccagctacttgggaggctgaggcaggagaatggcgtgagccccggaggcrgagcttgcagtgagccaagatagtgccactgcagtccagcctgggcaaaagagtgagactctgtctcaagaaaaaaaaaaagagagacaagcactagctg

SEQ ID NO: 435613 - DNA, 201 bp, Homo sapiens
gatagtaatgggcatgtgattggttgccagggagggagtggaggtgtcccatatttgtgggttaaggtcgggggatatgagaggaagacccaaaggaggcyttgggttgggaagaagggggcaatgagatgtggctgtagtacaggaataatcagggaagcagataatttggttaaaatgtctcagcctaataaggaagct

SEQ ID NO: 435614 - DNA, 201 bp, Homo sapiens
gaggacagttcctgcctcgagggactcatgggcttgggaaagggggacgggtgtgagggcatcatctccaagacagaatgaagtaagagcgctggtgaagygtgtgagctgctcaggaagtgcagacgggaaacagcgtgtgtgtgagacctgggtggccactgagctacgtctggggaaaggactcattagcaaacaagt

SEQ ID NO: 435615 - DNA, 201 bp, Homo sapiens
aagctgggcaggtggggataactgaaaaagagtgcataaaagaacgttgtccaagttggcaccagagtgggggagttttaaggggttttgaagcttggccrtcaatacccacaacagttatgggggcgagggaaacaggcccttgaaaagaagataatgtggagtgggtagcccccatatcgattaaacgggatggactta

SEQ ID NO: 435616 - DNA, 201 bp, Homo sapiens
atagacaccccagcagaggcttctgtgatcacactggctgagcaccagctctctgtgtggtgctggatgaggggagttttatctgagccactctggccccmcgctgtagggccctgtcctcttatttgacattcaactcttgcctaattgacaattacactcatatccttcctctgctctgcaaccttccatggctcccca

SEQ ID NO: 435617 - DNA, 201 bp, Homo sapiens
ataaaatagccctactccttatcattccagagatatttactgtttcccgcctgtgtgccaaccactgtgctcccagacagaaagaggacagttcctgcctygagggactcatgggcttgggaaagggggacgggtgtgagggcatcatctccaagacagaatgaagtaagagcgctggtgaagcgtgtgagctgctcagga

SEQ ID NO: 435618 - DNA, 201 bp, Homo sapiens
gcacctcccctcccccccccacacacacacatacacaaagccacacatgcaaagcatttggatatcttcttccagggagcttatagacaccccagcagagrcttctgtgatcacactggctgagcaccagctctctgtgtggtgctggatgaggggagttttatctgagccactctggccccccgctgtagggccctgtcc

SEQ ID NO: 435619 - DNA, 201 bp, Homo sapiens
cctttcccccacgttgggctgggcacactagagtgctgagcaaatccacactcagcacctcccctcccccccccacacacacacatacacaaagccacacmtgcaaagcatttggatatcttcttccagggagcttatagacaccccagcagaggcttctgtgatcacactggctgagcaccagctctctgtgtggtgctg

SEQ ID NO: 435620 - DNA, 201 bp, Homo sapiens
agtatagttactatatattaataaagtttaagtattctatacacgctgagatttcatgcaacaaagtcgttgtccacttgtgctgtcatcactgtcaggtsagggcttaacttgctggctgtgtgtctttgagtaagttacttaacttctctgagtggcctgaactacagcaatgatgagctcagtaatcgtaacttcagg

SEQ ID NO: 435621 - DNA, 201 bp, Homo sapiens
ctcccgggttcaagcgattctcctgcctcagcctcccaagtagctgggactacagatgcccgccaccatgctaggctaatttttgaatttttagtagagayggggttttcctatgtcagccaggctggtttcgaattcctaacctcaggtgatccgcccgtcttggcctcccaacgtactgggattacaagggtgaaccac

SEQ ID NO: 435622 - DNA, 201 bp, Homo sapiens
gatattgataggtggaagtttcagcaggagagtaggtgggagtgacccatgaggaggagaaaaactgtctgtgagggacagaagttggaatgctagctctktctttagctaccttatcagcataagcgttgccccgaacgatgggatctgatgccttttggtggcccttgcagtgtatgactccagtttcctttggaagta

SEQ ID NO: 435623 - DNA, 201 bp, Homo sapiens
ggtgagaaacaggaaagaaggaaatgtggggaaatagagtgaatgtcaggtgtatcatagagatacagtcatgggggtcacgtgtggtatcaggaataatrtgggaggctggattgaagtccgggccaggaacaatggtaactgtgggagactcaacaaagagtgagtacagctgaaggagccggggagcagacagtatat

SEQ ID NO: 435624 - DNA, 201 bp, Homo sapiens
gaataatatgggaggctggattgaagtccgggccaggaacaatggtaactgtgggagactcaacaaagagtgagtacagctgaaggagccggggagcagamagtatatgtgtcaggtgtgaggaagaaaatagattttggaagttataagaactgtagagagtgagttgagcatagtttgtgattttgagggcctccaaaa

SEQ ID NO: 435625 - DNA, 201 bp, Homo sapiens
tgaggaagaaaatagattttggaagttataagaactgtagagagtgagttgagcatagtttgtgattttgagggcctccaaaagtattagggcagcagcgrccaccgcatggagacatgatagccagcctaaaacagtaaggtcaagttgtttggacaaaaaggctatagggtgcggtcccagtccttgtgtacgaattcc

SEQ ID NO: 435626 - DNA, 201 bp, Homo sapiens
gaagttataagaactgtagagagtgagttgagcatagtttgtgattttgagggcctccaaaagtattagggcagcagcggccaccgcatggagacatgatrgccagcctaaaacagtaaggtcaagttgtttggacaaaaaggctatagggtgcggtcccagtccttgtgtacgaattccaactgcacagccctacacttc

SEQ ID NO: 435627 - DNA, 201 bp, Homo sapiens
gagcagggaggagaagggcttctgtagatgtccaaatctgacccaggccagcttccaccactgtctagctgtgtgactctgggcaagtgcatgaccctttstgagcctccttaaatagttacgtgaggcagtgggactggaggctctcaccctaagtgcccatatgattatgacattcactgactccttcctcacagcagc

SEQ ID NO: 435628 - DNA, 201 bp, Homo sapiens
tcattttaattgtaactagttaggatggggaggaccacgggtgtcctggcaggcaggaggacctcctggggcctgttgatgcccttcactagggaaacttyttccttacggctctcggctggaggaggatggtgtgccaagggcgccaggaacaggccctgtgccaggtccttcagccacagctggtagcggagtcctctc

SEQ ID NO: 435629 - DNA, 201 bp, Homo sapiens
atgttacttggctctacctaacttcaagcagaggaggggtttcaagggaaccaagtatttgtagtgcaaagccactgaggttttggagttattcgttgtarcagctggcatggcttaaccttgtcctcttagctgttttcagcatttgcacctgagtgtcaatcagctaggatgttttaggctgcaagtaatagaataccc

SEQ ID NO: 435630 - DNA, 201 bp, Homo sapiens
gcaacagcatcagtaagtttaatattccgatttctgctcagacttcagaggagcagaaacctgggctgaagtctcagagtcggagtgagtggggctccaaggacccacagcccaacaagagcccgaaaagagtttgtggagacagtgggatgtggggaatggcctgatcttaggggaagggcagggcccactcaggggaga

SEQ ID NO: 435631 - DNA, 201 bp, Homo sapiens
taaggccacacagggtagggcagtggcaaagaagaacatgggtgttagagttagccagaccttggttgtgtcttgggcaagtaacttcacctctctgagcytcagtttccttgtctgtgacctggggctaggaatatctgcctgacagtgttcccgtgaggattaaatggagtgtatgaagaactgctcagcacagagtat

SEQ ID NO: 435632 - DNA, 201 bp, Homo sapiens
caagctaaagtgttgcctgcagccaagggcctgggcacggaccatcttccatcagcccagggcccaggcacagggccaccagctggggatggtggacaccrtgtccccattcccagcccggctctagaaggcactgttttgtggactgcgacccctggagggtgggcagggcctggacaggcacaggcggcgctgggtctc

SEQ ID NO: 435633 - DNA, 201 bp, Homo sapiens
tcccctgcagagccagctttgagcctgggaggcggacctgtgagtctttatgttccggcagctgtgaggtcactcccaggcacacacaggcacacgcacgmgtacacacgcgcgcgcgcgcgcgcacacacacacacacacacacacacacacacacacaaacacactagctttttcattccttgcttcgcttcccatcct

SEQ ID NO: 435634 - DNA, 201 bp, Homo sapiens
cagaccttggttgtgtcttgggcaagtaacttcacctctctgagcttcagtttccttgtctgtgacctggggctaggaatatctgcctgacagtgttcccrtgaggattaaatggagtgtatgaagaactgctcagcacagagtatgcccagcaaatgttagtactgtcctccacccaattaatttcttctttgccctttt

SEQ ID NO: 435635 - DNA, 201 bp, Homo sapiens
ccctggacaccttggccagcctcctaggcagtgagttagaggaaaggggactaggtcttgcacctctgccatacctcgggatccagacagaccaggcagcrtgttaatattggtgttctgcatggtggacccaagctaaagtgttgcctgcagccaagggcctgggcacggaccatcttccatcagcccagggcccaggca

SEQ ID NO: 435636 - DNA, 201 bp, Homo sapiens
tgggccgtgcgctgctcccagcgacctgtgtgtggaatagcaacaactgtggtgtgcaggtctggggtgtgtgaattttgggagcaacgggtggtggggtwgaggaacatctgcaaacagccttgaataccggggcagggttttagactatcctgtggggtaggagtccccagagagttccaagcagggcctgcatgtggc

SEQ ID NO: 435637 - DNA, 201 bp, Homo sapiens
acccaattaatttcttctttgcccttttccacactgcctattccccagggctactgggatcttaagggattgatttctaatagttagactatagcccagtmattttccagaaagccagaagatctggcacgttccctaataacatctctctcttgtctctctcctgaaagaatggattattttaacctcagggaacagtag

SEQ ID NO: 435638 - DNA, 201 bp, Homo sapiens
gcccgtggtttccttcaccctcagcaccttaatggagtagggcgtatcattctatgttcagagaagcaaactgaggctcagagacgccagcccaatgtccyacagctggcgggagatacagctgaggctgaacccacatccaagttcaaagcctgcatttttagctactcagccatacatgatcttcctgcaatgtcaatg

SEQ ID NO: 435639 - DNA, 201 bp, Homo sapiens
ttgtgggagcaggggctacatggtccctccactgctccgtcctggagaccagctcagagactggcaccaagttgctaatgaccgcctggcactagaaggastacatgaacacccgatgcgcttggagccctggccaagctgcccacactgagcccgtggtttccttcaccctcagcaccttaatggagtagggcgtatcat

SEQ ID NO: 435640 - DNA, 201 bp, Homo sapiens
gctcttctctggtcaaaaacgctgggaagcactggtctgtataaagtgctagtgcctagcacatagcaggcgctcaagcaatgttaattattggctgggcrcagtagctcacgcctgtaatcccagcactttgggaggccgaggcggcgggcggatcacttgaggtcaggagttcgagaccagcctgaccatcatggctaa

SEQ ID NO: 435641 - DNA, 201 bp, Homo sapiens
ttagttgatttcaggctatgctccccagtccctgggaggcagccttcattctccctgctcttctctggtcaaaaacgctgggaagcactggtctgtataamgtgctagtgcctagcacatagcaggcgctcaagcaatgttaattattggctgggcgcagtagctcacgcctgtaatcccagcactttgggaggccgaggc

SEQ ID NO: 435642 - DNA, 201 bp, Homo sapiens
ttctcagaaccctcctgcccttccttgtcctgcatctcccaggctcccctctcttccaccttcccagcaggttcgactcatgggaggcataactggaaacygggggatagcagcaggcagaagccagggcaggtctccccacctccatctactttttgttaggtctgcgaggctgtgtctccttagcggctgcagctccca

SEQ ID NO: 435643 - DNA, 201 bp, Homo sapiens
tatggagaagggggtggggagcagccctgggctgcaatgtgggtgagcagccaaagcaggcgtccccgcaattgacttgccaccaagggaatgtgggtgawtgaccaaagcaggcgtccctgcggtgatcggacaccaatggaatgtgggtgaataatcaggcaggcgtccccgcagtgattaaatggcaagggaagactg

SEQ ID NO: 435644 - DNA, 201 bp, Homo sapiens
aagttcagctggaatggatgggatacctgaagtgagcacccaaggaggtagagagaggagggctgcactttgatccaggacaccacggccttgacctcccrctcacacccgcccccactcagtcctgcaaacctgcttacagaggcacagggccccccggccaccgggtcctgccccgggctggcagaccaggccctggct

SEQ ID NO: 435645 - DNA, 201 bp, Homo sapiens
gtgcatatctccttccggaatcctggtcaatactaaggtaagatgaaaaaactgcgggtttgggataagcaggaaaaaagaagcaaactctcttagtggcrgaacttactgaagttaagcttcgagtctgtattggtcaggactcttggttgcaagtgacagaatcccaactctgttagtgtggttaaaggttaagctgct

SEQ ID NO: 435646 - DNA, 201 bp, Homo sapiens
tcccaaacctggaataaggcaatagaatcagacatactcaaacttgtctggctgtgtgactgtgggcaaaccagttaacctctctgggcctcagtttactsatctgaaaaatggggacaataaatgaaccttgagaagagaattcaaggagtatggaaacatttagcatgatctagggcatagtgtcaggctgtgggtata

SEQ ID NO: 435647 - DNA, 201 bp, Homo sapiens
atcttctcaaccccctggggacccctggaggatctggagcacaccctccagctgggggatttgcccagcaggtgaggccccttagtcgctgtagcccattkggaagtttggcaggtggatttctagtgcaaggccacctctgccctctgagctcagagccacctatttctgccccacccagtcctgcacacagctggtagc

SEQ ID NO: 435648 - DNA, 201 bp, Homo sapiens
gacaaaaaggctatagggtgcggtcccagtccttgtgtacgaattccaactgcacagccctacacttcggctgcgtgtaatgaaaagggttgagatgagcyagggagagctagtgtgggagcagtctctaaaactgtcttcaaggaacagaaagaggagtggggaaaggattgagaatctatggagtcagctaggtttcct

SEQ ID NO: 435649 - DNA, 201 bp, Homo sapiens
ccttttccacactgcctattccccagggctactgggatcttaagggattgatttctaatagttagactatagcccagtaattttccagaaagccagaagayctggcacgttccctaataacatctctctcttgtctctctcctgaaagaatggattattttaacctcagggaacagtaggtgccagctccttagaggtggc

SEQ ID NO: 435650 - DNA, 201 bp, Homo sapiens
cttgagcctgggaggtcgaggcttcagtgagccgtgatcacatcacctgagcctggggaggtcggtccatcagccactgcacttcagcctgggtgacagcrtgagaccctgcctcaacaaacagaaacaaaacaaaaaaacctttactgtggtttgttttagatttgaaaatctaagtgataggagtatagaggtttgcta

SEQ ID NO: 435651 - DNA, 201 bp, Homo sapiens
cagaaagacccagtggagagagagaaaggatgacgggagcttagcaaaagaagcagctggtgcagctggaatttcataggtccacttctgcctagccaacktctaaacctgttttctcttggctcccttactttccagccagaggctcagtcatactgcaatgctgagaactccctgcctaagccagacagggccttgacc

SEQ ID NO: 435652 - DNA, 201 bp, Homo sapiens
aattctgccccggataatgggagggctttctcagaaaacacaggcctgacacacaagatcacgcataggcttgtattcaggaacaattttacaaactccaraaaaggcagcaggagatccagaatctctgtgtgccttctcttcatcctacccccagaaaaatggccagtccagcccagcacctgctgcagcctcaatatt

SEQ ID NO: 435653 - DNA, 201 bp, Homo sapiens
gaatatctaattcagttacattgttacaatattaagtgtgctgtgtgcaaactgatttgggaacagacccagcagactgttggcaagcatgctcttctacrgccaagagccaaaggcgaccaggggcctagggaatggcttactagccataagcattcagtatgcctggggcagtagcgttgcattcagagagcatggaga

SEQ ID NO: 435654 - DNA, 201 bp, Homo sapiens
acagggaaagtgacatcagacaggagagcctagttctcccagcttccaggcctaggtgctcccagtgtccatgtacaaccttctgcccaggaaaagagtcrttgtcaaagcccaggacccaagcctcttgagactgtgggatcttgaattatgtgcagcagatattctcagtctgaaattcagatgggctggaaatgtaat

SEQ ID NO: 435655 - DNA, 201 bp, Homo sapiens
agccagaggctgcagagacagccgtctagcgcctgggatacttttctccccaataatctgttttcaatctttcattattatatttttttcttttttgaaasccatcctgccaagcaacaggcatgcaagtgtagtcaactcccagcccagcctacatcaaagtctttgcgaatttctgctttgaatcatggggtaggggac

SEQ ID NO: 435656 - DNA, 201 bp, Homo sapiens
gagagcctagttctcccagcttccaggcctaggtgctcccagtgtccatgtacaaccttctgcccaggaaaagagtcgttgtcaaagcccaggacccaagyctcttgagactgtgggatcttgaattatgtgcagcagatattctcagtctgaaattcagatgggctggaaatgtaatctattttaaattcattctcattt

SEQ ID NO: 435657 - DNA, 201 bp, Homo sapiens
actttgggaggccgaggcggcgggcggatcacttgaggtcaggagttcgagaccagcctgaccatcatggctaaaccccatctctactaaaaatatatttaaaaaaaaaaaaaaagccgagcatggtggcatgcgcctataatcccagctactcaggagtcttgaggcaggagaatcacttgaacccgggaggctgcagtg

SEQ ID NO: 435658 - DNA, 201 bp, Homo sapiens
ctgggctgctgcccctagacttgaggctccatctctccaaggctggctagcccacgctgcccctgcctttgccatggtgggaggggtgaagaggaaagtgmtgagtactgcctgctcagctggcttgcaaatgtccagcccccaggcacctccctatgacctcctctcaccacatattccctggtttgggcaggaattcag

SEQ ID NO: 435659 - DNA, 201 bp, Homo sapiens
gggcacgtgggacaggaagaccccagtgccccaccccaccagccccatcagctcccctagccccagagaaaacacttcattactggaagcccagccaggcrgagggggtggaagtagccttgttgaaagaaaccgcacgaggtcagccaaacctcagcccctcttggccagcaacccacagatcaaccacgtggggctggc

SEQ ID NO: 435660 - DNA, 201 bp, Homo sapiens
ctgatcaatgcccattccaatatccttcttccctcctccctcagtcaccaaacactgatttttttgtttggggtggcgacgcactcagctttgcaggaggyggggccacgggataggttccagcacggagatacaagcaggagtgttgtgtgccgattctggaaaggctccttaaaaggaagggcttccctttggtgactc

SEQ ID NO: 435661 - DNA, 201 bp, Homo sapiens
tttgttctccaattcattgatttgttcccagaagcttttctgttaaacgcagctgagcctttctttggctcttaatgactctgagtagttccatgtcttcrgcgaggttacatacttcatggaagcctcatagaaggcccagcaaatagccctggctcgcccgaggctgggctgctgcccctagacttgaggctccatctc

SEQ ID NO: 435662 - DNA, 201 bp, Homo sapiens
ttttttgtattgttcataacagctcttaaattaacttcaaattccttggtcaacgttgttccccctttttactcggcatttgattttactcccttgcctcrtacttctttcatcctgatcaatgtcatcaggattctctacctcatgttgatttcatcctagacatggcttctggttctgttcgtcttctgcagtcttcct

SEQ ID NO: 435663 - DNA, 201 bp, Homo sapiens
agaagagggcgaaggagaaataaaggaactcagatccctgatgacacccagagctgccaaatgcaccctacatgtagatttcattcatgtgattagaaacrtaataatgtgtgtgtgtgtgtgtgtgtgtgtgtgtgtgtgtggtgtgtagagagagatataatgttttatatatatacgctatttttatacttatgtata

SEQ ID NO: 435664 - DNA, 201 bp, Homo sapiens
caggcggatcacttgaggtcaggagttcgtgaccagcctggacaacatggcaaaaccttgtctctactaaaaatacaaaaattagctgggcgtggtggccygtatctgtaatctcagctactcaggaggctgaggcaggagaattgcttgaaaccgggaggcggaggatgcggtgagcccagatcgcgccactgtactcca

SEQ ID NO: 435665 - DNA, 201 bp, Homo sapiens
atgactggttagctggttgattgatcacagattcatattgttactaacaggtttcaattaggcctaatcacaagaaacactatgcttggagcgtgactgcsctcagcattccttctggatggcagaaacagtttgtcagtttgccaacattctgcatttatgagaaatagtctgctgcttactcatatagcttccagtggt

SEQ ID NO: 435666 - DNA, 201 bp, Homo sapiens
gctgggcctgtgttcaagggactcaggcaagtagttgagataataataatgttaatgtttgaaaagattgtagcatagtggaatattctccaccttccagktccttcctagggcttggtgcatgtgcatatctccttccggaatcctggtcaatactaaggtaagatgaaaaaactgcgggtttgggataagcaggaaaaa

SEQ ID NO: 435667 - DNA, 201 bp, Homo sapiens
gggaagaagaagagaactccctgcttctagtgagcaaaggcagtccctgagcttccacagcccttcctatttattgggtagaatgagcagggaggaggagrtaatgactggttagctggttgattgatcacagattcatattgttactaacaggtttcaattaggcctaatcacaagaaacactatgcttggagcgtgact

SEQ ID NO: 435668 - DNA, 201 bp, Homo sapiens
cctactaaaaaaaaaaatacaaaaattagccggacgtggtgggtgcacacctatagtcccaagtactcaggaggctgaggcaggagaattgcttgaacccrggaggtggaggtggcagtgaaccgacatcttgccgctgcactccagcctgggcgacagagagagactctgtcacacacacaaaataataataaaaataaa

SEQ ID NO: 435669 - DNA, 201 bp, Homo sapiens
cttgaggctccatctctccaaggctggctagcccacgctgcccctgcctttgccatggtgggaggggtgaagaggaaagtgctgagtactgcctgctcagstggcttgcaaatgtccagcccccaggcacctccctatgacctcctctcaccacatattccctggtttgggcaggaattcagaggtctgctcctggccctg

SEQ ID NO: 435670 - DNA, 201 bp, Homo sapiens
gcagagagccacagataaaaggccaggtatctccacgagtagccactctgtgttcaccttatcttatgtaaagttacagagcgtgagacgaatacataatygaatacataatttccctacctgctctttttctcttgcaatatgtggatttccagaccctccttctttcccctccagcctgctttcccctttaaatactga

SEQ ID NO: 435671 - DNA, 201 bp, Homo sapiens
aggatggaatgtgcagctcacagcacacacatgtgactgcctcctctgcacacggcagcacacaccagtcccagccaggcttcctgacaatgaagtggtcstcatttgctgggagagggtgttgtcatagggatcgtgccaggcatgcagctagtgaggcatagaccagcctgctggggagctggaggaggtcatatggag

SEQ ID NO: 435672 - DNA, 201 bp, Homo sapiens
cagcccctcttggccagcaacccacagatcaaccacgtggggctggctctccgggtgtttacggaaacactggccctgaggtcagcccagctgctgggctsggatcccctgggacacccccaggcctcaaagtgccagcttggcaggagtcttcagaggctgcagctggggccttatttgcctccacagtccacctgggaa

SEQ ID NO: 435673 - DNA, 201 bp, Homo sapiens
aaataagatgcttagattttaggtcaggtgagagttgaagaggttttaagttcttgagaacataggctaagggagaagaaggaggaatggagggtggaagkttgcccatagtgaaggaggcaagtttaaagagaagggtagagatatggagaagggggtggggagcagccctgggctgcaatgtgggtgagcagccaaagc

SEQ ID NO: 435674 - DNA, 201 bp, Homo sapiens
ccaccaagtagcctccgagacttcccaactttaccgcacagaaataataatacgtgtgcacaaagatgcacagacaaagatgttcaacatagcattgtttstaagagggaaaaactagaaagaacctaaatgtctgacactggagaaccagttattccacgacgtaatgctcagcccttaaaaatcctatagcagaaggat

SEQ ID NO: 435675 - DNA, 201 bp, Homo sapiens
gctagccgcagaacgaaactgaaaaccagactgggtgtggggagggcgggtaatagaagggttataggatgtgggagcagaggctgaagaagagttggagsctgattcagcctggcggggagcgagctgaggaggagcagtctgggaagaaggtgagaggtcagatggttcagtagaaaaggaagattcacaagactcagc

SEQ ID NO: 435676 - DNA, 201 bp, Homo sapiens
gaaaggcggggctgggccgtgcgctgctcccagcgacctgtgtgtggaatagcaacaactgtggtgtgcaggtctggggtgtgtgaattttgggagcaacrggtggtggggttgaggaacatctgcaaacagccttgaataccggggcagggttttagactatcctgtggggtaggagtccccagagagttccaagcaggg

SEQ ID NO: 435677 - DNA, 201 bp, Homo sapiens
ggttttaatgggatagtaatgggcatgtgattggttgccagggagggagtggaggtgtcccatatttgtgggttaaggtcgggggatatgagaggaagacscaaaggaggctttgggttgggaagaagggggcaatgagatgtggctgtagtacaggaataatcagggaagcagataatttggttaaaatgtctcagccta

SEQ ID NO: 435678 - DNA, 201 bp, Homo sapiens
  misc_feature (1)...(201): n = A,T,C or G
agaaggatcctttctgacatagaaaaatgttcacagtatatcaagtgagaaaagcagagccctcctagccgctgccgcctgccccccaggccaacccctgnttgcatctacaatccagccacattaacccccttctggtcccccaaatgctccaggctttctcttctcaggcgtttgcagttgcttcttcctctgcctgga

SEQ ID NO: 435679 - DNA, 201 bp, Homo sapiens
agtctcactcctggcacccacaaggaactgtggcttttctgttttggtgtccatgtttccaacaagacctggagtctctgagaacaatgattgagtgcaawtcatcagttaaatccccctcagtgcatgattgagtgcaattcatcagttaaatccccctcagtgctgaacgagagaaatgtagcaatacatctcctgatg

SEQ ID NO: 435680 - DNA, 201 bp, Homo sapiens
gcccccaagcataaagctgaagtgtggtctagtgttcctgagtgcaagaaagctgtcatatgccttctggggaaaatacaagttagataagcttcgttcargcatgaggtttagagctgttggttgcgagttcagtgttaataaatcaacatcatattaaataaagttcctcaaacagaaacacacagaaaacaaggttat

SEQ ID NO: 435681 - DNA, 201 bp, Homo sapiens
gatgtgggacatgggacaggcataggaacgtggaagtgggcctagggtacaggcacacaatgggatgtgggcttacaggacttgggcatgggaaatgagcrcaagatgggcaccagtgggttgcctagttcttgcccagtccctatagtctcagtgtcgtataattgtgtgcccacctgcaggatggtcaccggacccaaa

SEQ ID NO: 435682 - DNA, 201 bp, Homo sapiens
gcctagttcttgcccagtccctatagtctcagtgtcgtataattgtgtgcccacctgcaggatggtcaccggacccaaagtaccagatctgtctgtgcttyggtgaggaggacccgggccccacacagcaccccaaggagcagctcatcatggcggacgtgagtcactccttccactccagccaagaagcacgccctccag

SEQ ID NO: 435683 - DNA, 201 bp, Homo sapiens
gggcgcacagcccagcgctgtcgtctgagtccgcgggcggccgccgagcgcctgctggggccgccacctcacgttgcagcaggttcgcttccccgacccaytgcccagcgcccacgtgttgcagggcctgccgcctcacctggagcgcggtgtgcagctctgggtggctccggagggcgtgttcaccaagcgcctgtgcca

SEQ ID NO: 435684 - DNA, 201 bp, Homo sapiens
atgagccgcttgagggtggtgtcatcaagcactgtgcctggcacatagtaggtgctcaataagtgttgaatgggtggttgcatggcctgtcccttaagacstatgcatatacgtgaacaacagcattgttgttcagaggcaagagattctgggggctggcctccccatccttttggctgctctgacccatccctcaatcca

SEQ ID NO: 435685 - DNA, 201 bp, Homo sapiens
tcatcactgatagggagagagcacccaaaatttccgaggtagaggctgggacgacctctgggtccggcagagtttgaaggggagggtaagaaggcgagggragctagcgccgcccacgtccagcccgtgcaccctctctcgccccacagcctgctggctgcacgtgtggctcttctctccgcagcgctggtgcgcgaagcc

SEQ ID NO: 435686 - DNA, 201 bp, Homo sapiens
aagacctggcccctgcatccctgatggccagaaggaaggaaaggtccccgatggcaggtgacccatggcagagccagaggttccctgtgcctctgggactkggggggcacagattgagagtgggtgctacgtggggttatgctgggaggatgcgggcaagaccctctttcgcatcccctggaagcatgtagccaagcaggg

SEQ ID NO: 435687 - DNA, 201 bp, Homo sapiens
gtcaaacaaggcaattctctgccttcttatttcagctctcatatgtaaacacgtgtcctttttacagtctgtttagtgccacattttttatgtttttgtgyttttttgttggtgattgaaaatggcccccaagcataaagctgaagtgtggtctagtgttcctgagtgcaagaaagctgtcatatgccttctggggaaaat

SEQ ID NO: 435688 - DNA, 201 bp, Homo sapiens
aggtggcccgtagtccccaggcccacgtgggttgagccactgcaagcccaagacctggcccctgcatccctgatggccagaaggaaggaaaggtccccgayggcaggtgacccatggcagagccagaggttccctgtgcctctgggacttggggggcacagattgagagtgggtgctacgtggggttatgctgggaggatg

SEQ ID NO: 435689 - DNA, 201 bp, Homo sapiens
cccaatcctccaggcctggatggtgcacaagggcaagcatttggagggcaccaacaaagaggcccctccacctggaagaaacgattccactctgccttcarcaagagcgccaccttctgggctgcaagagtgagtgcagccagctggacgcctccaagttcttttttttcttttgagacggagtttcgctcttgtcaccca

SEQ ID NO: 435690 - DNA, 201 bp, Homo sapiens
gtctcagtgtcgtataattgtgtgcccacctgcaggatggtcaccggacccaaagtaccagatctgtctgtgcttcggtgaggaggacccgggccccacasagcaccccaaggagcagctcatcatggcggacgtgagtcactccttccactccagccaagaagcacgccctccagtcccctccagacagcccttcccaca

SEQ ID NO: 435691 - DNA, 201 bp, Homo sapiens
cagggtctcactccttttacattttaagaaatgttctctgaccctaaaagattttctcctacattattgtccattaattttttatcattttttctcttacytgtggtttttaaaatcatctggagtccactttgtgtatgacaataggtagggatttcattctatggctcggcagatagcaaaccactgccatgattttat

SEQ ID NO: 435692 - DNA, 201 bp, Homo sapiens
cccacaaggaactgtggcttttctgttttggtgtccatgtttccaacaagacctggagtctctgagaacaatgattgagtgcaattcatcagttaaatccscctcagtgcatgattgagtgcaattcatcagttaaatccccctcagtgctgaacgagagaaatgtagcaatacatctcctgatggcctcctctttgacca

SEQ ID NO: 435693 - DNA, 201 bp, Homo sapiens
gagggagtagggtgctaagcatgaggcccagctgctgcttccgttctttaagagagatatactgtggaatggagagaaaggccgaaggacgatggcaactycctgacttaggatcaaatccttcagctcctgctgggtatctacagcggcttgaggccattcatgccaagggttaggcccacagggacctgaagcccacca

SEQ ID NO: 435694 - DNA, 201 bp, Homo sapiens
gggatctgttgctgtttcttgggcccacagaatacactccacacctcgggactccataatattggacaaggctggaaggcccatttggctcctgcagcctsttatgcaggtgaggacagacccaaggtccaggcaatgctggcctttggaacacagaacctggctcactgactcccactccagttgtcttttccctctgcc

SEQ ID NO: 435695 - DNA, 201 bp, Homo sapiens
agaaaatgcataagccacctaaggctgggagagcctttctgtgctggctgagatctggtggcatgtgcatgcatatgtgtgcaagtgtgtgtgtgtgtgtkcaagtgtgtgtgcgcatgtgcatgtgtgtggaaagtatggtctgggtggctgtaagactggcccctcttgtcccctctgcaggcccagcccaataggaag

SEQ ID NO: 435696 - DNA, 201 bp, Homo sapiens; identical to SEQ ID NO: 398268

SEQ ID NO: 435697 - DNA, 201 bp, Homo sapiens
gagcctttctgtgctggctgagatctggtggcatgtgcatgcatatgtgtgcaagtgtgtgtgtgtgtgtgcaagtgtgtgtgcgcatgtgcatgtgtgtrgaaagtatggtctgggtggctgtaagactggcccctcttgtcccctctgcaggcccagcccaataggaagcacctgatccacactctttctagccccagg

SEQ ID NO: 435698 - DNA, 201 bp, Homo sapiens
ctgccagggtgtcagccctgcttcaccactggccgtttgtctctgtcccctccactggcctcttgaagcacagagaccctccgggtactttccttcctctrggcttccactcatgctattccctgctccctttttctacctggagacccccattcctcctcctcctctgctgccctcacctccacctgggccctcccagct

SEQ ID NO: 435699 - DNA, 201 bp, Homo sapiens
agctggataataggctgagagaagaatattcctttaagagagggacactgactactcaaagactttcttttattagtacatgggctgggattgatgggaarggacagatgtagttggcaaccatggttagcatcggatgcccatcccaatggccatgaatgtgccaaaggtgccgccactctgcatcatggttttcccaat

SEQ ID NO: 435700 - DNA, 201 bp, Homo sapiens; identical to SEQ ID NO: 375916

SEQ ID NO: 435701 - DNA, 201 bp, Homo sapiens
cactagtctagcaacccctacatctgattttccacttactggatattatatcttactacctggggtgggtaatgagaaggaaaaagatccatctgggtctycagggtatttttctggtggatgtcgtattaactgccttcagtttgtgggaggcagcagatgcagtgtaaaatacatagagaaaccagcttttttgactgg

SEQ ID NO: 435702 - DNA, 201 bp, Homo sapiens; identical to SEQ ID NO: 375909

SEQ ID NO: 435703 - DNA, 201 bp, Homo sapiens
agtgtcaagtgtaaaatgggcatctcaacattatttacaggattttgaaaactacagtatttagcacagtgcttaacatagagtaagtgctctgtaaatgrtaatttacaatctagggatatggcaataacagcctctaaatgtgaaaatgacctttagagtgtaaagtttaactgctttatctctgtatcctgtatccag

SEQ ID NO: 435704 - DNA, 201 bp, Homo sapiens
gagtcagctctacaatttacacatagtgtcaagtgtaaaatgggcatctcaacattatttacaggattttgaaaactacagtatttagcacagtgcttaasatagagtaagtgctctgtaaatgataatttacaatctagggatatggcaataacagcctctaaatgtgaaaatgacctttagagtgtaaagtttaactgc

SEQ ID NO: 435705 - DNA, 201 bp, Homo sapiens
acaccaggcttttatttttttttctacttagcagtttaaatgttttaaaaagtccttccacaccctgagatgtgtgtgtatctcacacacacacacacacacacacccaaattttcttctaaaaattttaaggttttgcttttcacatttatctttaattcacctagaagagatttctgtgcctaacgtaaggtaggatct

SEQ ID NO: 435706 - DNA, 201 bp, Homo sapiens
agggtcttcccacaataaagtccaaggcatgctggttgaatatcgacagctttttaaaaacaaatgccagtatagtaacatcttttgtgattataaaaaawaattgcaataatagctgaagcatttggcaaaaataacagtttcaaatttttgaataatatgtattagacaaaagtcttgaagcatttttaaatttacatt

SEQ ID NO: 435707 - DNA, 201 bp, Homo sapiens
tacaccaggcttttatttttttttctacttagcagtttaaatgttttaaaaagtccttccacaccctgagatgtgtgtgtatctcacacacacacacacamacacacccaaattttcttctaaaaattttaaggttttgcttttcacatttatctttaattcacctagaagagatttctgtgcctaacgtaaggtaggatc

SEQ ID NO: 435708 - DNA, 201 bp, Homo sapiens; identical to SEQ ID NO: 290808

SEQ ID NO: 435709 - DNA, 201 bp, Homo sapiens
catttctaaaagtttccttttcttccccatcacatgtatttattcctaataatcttattgttatggacagcttgtgactacatccttactttctttatagrtagcagttacatatcctgtaggtgaaagtccattatctgtgtcctctcagagcataaatatattgtttgttgcatgtaccaataagtcctagtgctattt

SEQ ID NO: 435710 - DNA, 201 bp, Homo sapiens
ctggaccactcccacacctacccaacatggatctcaccttcttgcacctgattttccatctccttctttctcagtgcaatattccattatttctatgcatytttttctagttcactaattctatcttcaactgtttaatctgctgactacctttttttttattttggcaagtataaactttcatttctaaaagtttccttt

SEQ ID NO: 435711 - DNA, 201 bp, Homo sapiens
tcttaaaataccagctctccttggctgggcgtggtggctcacgcctgtaatcccagcactttgggaggccggggcgggtggatcacgaggtcaggaaatcragaccatcctggctaacacagtgaaaccccgtctctactaaagatacaaaaaaattggccgggcgtggtggcaggcgcctgtagtcccagctactcggga

SEQ ID NO: 435712 - DNA, 201 bp, Homo sapiens
agcctggaccactcccacacctacccaacatggatctcaccttcttgcacctgattttccatctccttctttctcagtgcaatattccattatttctatgyatttttttctagttcactaattctatcttcaactgtttaatctgctgactacctttttttttattttggcaagtataaactttcatttctaaaagtttcc

SEQ ID NO: 435713 - DNA, 201 bp, Homo sapiens
tcaggacattaagcacccacatgtagacacacaattatcattatcacctatgttcataacagaacacattttcacatgggaaaagcagagagaacataatytcataacagaggtatgcaaattacctttataaaaagtttcctacattgtcctagcttttatcatttttgtggaggataagtgaaaatttcatcaaggctg

SEQ ID NO: 435714 - DNA, 201 bp, Homo sapiens
actatattgctaggcaacactgcttatgatacaaatgatccttgcctggtaaattatatctcgactggggagaaccataaatgaactataaatgcctgatrgggataccatggtttggctttcttgagttcagtgactcttataattggcatgtcacttgcaggaccccagaagttcatggaattgttataagagagactg

SEQ ID NO: 435715 - DNA, 201 bp, Homo sapiens
gcttgggatgtgttttccttctgggatctgtgaatcggtttctcattatttttgtaaaacctgaagccagttatctcttaaaataccagctctccttggcygggcgtggtggctcacgcctgtaatcccagcactttgggaggccggggcgggtggatcacgaggtcaggaaatcaagaccatcctggctaacacagtgaa

SEQ ID NO: 435716 - DNA, 201 bp, Homo sapiens
aagataaagaaaaacatgtttaccacttttaaaacagaagaagcataattacttaataaggtcttctgagtgataattattccaacattagtccagccagrtatgttcatagaaatgtgctaacctctttttccccgagtaccattcaatgaagaaccaatgtaaaaccagaggaagcattgccataaatccaagatagag

SEQ ID NO: 435717 - DNA, 201 bp, Homo sapiens; identical to SEQ ID NO: 290841

SEQ ID NO: 435718 - DNA, 201 bp, Homo sapiens
aggcatgctggttgaatatcgacagctttttaaaaacaaatgccagtatagtaacatcttttgtgattataaaaaaaaattgcaataatagctgaagcatytggcaaaaataacagtttcaaatttttgaataatatgtattagacaaaagtcttgaagcatttttaaatttacatttctccttttacactgtgacactgc

SEQ ID NO: 435719 - DNA, 201 bp, Homo sapiens
agggaaagcgtggaacatcttagagccttaagtggctgtgaccaaaatgctgacagaaatgtagacagtgaaggccaggctgatgaggtctcacatggaawtaaggaagttatcaggaactgtagtaaaggtcatccatactatgccctagcaaagaactctgctgcattgtgtccatgtcctaggcatctgtggaagttg

SEQ ID NO: 435720 - DNA, 201 bp, Homo sapiens
tttggagctgggtaccagacagaggctgaaagtgtttggaggtctcagaagaagacaggaaggtgagggaaagcgtggaacatcttagagccttaagtggytgtgaccaaaatgctgacagaaatgtagacagtgaaggccaggctgatgaggtctcacatggaattaaggaagttatcaggaactgtagtaaaggtcatc

SEQ ID NO: 435721 - DNA, 201 bp, Homo sapiens
cagttaagaataatctgaagataaagaaaaacatgtttaccacttttaaaacagaagaagcataattacttaataaggtcttctgagtgataattattccmacattagtccagccagatatgttcatagaaatgtgctaacctctttttccccgagtaccattcaatgaagaaccaatgtaaaaccagaggaagcattgcc

SEQ ID NO: 435722 - DNA, 201 bp, Homo sapiens
acaggcatgagccactgcgcctggtcctccatattcttttataaattaatgagtataataacaaaaaatgttgtatgtgaaaatatttcaaaagcaaatagattttacaaaatgaaataagatacaaacataagacttaccccacattctccatatatttcagttgagccatttttaaataatagggtcttcccacaataa

SEQ ID NO: 435723 - DNA, 201 bp, Homo sapiens
taaatccaagatagagccaatcataaagttcaggagattctgtgcaaggctgacaatatttctgtgcattcgttctctgtcctcttgggcatacctataayatataaaaccaatattttgtgtacagatattattttacaacattaacacccccccaaatcattctataagacatcccatttcagtttaaatatttaagtt

SEQ ID NO: 435724 - DNA, 201 bp, Homo sapiens; identical to SEQ ID NO: 290842

SEQ ID NO: 435725 - DNA, 201 bp, Homo sapiens
gatgtgttttccttctgggatctgtgaatcggtttctcattatttttgtaaaacctgaagccagttatctcttaaaataccagctctccttggctgggcgyggtggctcacgcctgtaatcccagcactttgggaggccggggcgggtggatcacgaggtcaggaaatcaagaccatcctggctaacacagtgaaaccccg

SEQ ID NO: 435726 - DNA, 201 bp, Homo sapiens
ttatatctccttccctgatcttccaaacataaaatgcagtgcttagtaaatgtgtgctgatttaatatgttaatatgagtttttgtattaggttacagctrtatcatttttaactacatcatactagattattagtattaaattaaattacaaagaatgtgttccataacaataaatagcttgtaatcataaccaattttg

SEQ ID NO: 435727 - DNA, 201 bp, Homo sapiens
gtgaggtggctcacgcctgtaatcccagcactttgggaggtcgaggtgggcagatcatgaggtcaggagttccagaccagcctggccaaaatggtgaaacyccgtctctactaaaaatacaaaaattagcctgacgtggtggcgcgcgcctgtagtcccagctactggggaggctgaggcaggagaatcgcttgaacccag

SEQ ID NO: 435728 - DNA, 201 bp, Homo sapiens
tgttttctccacaagattatgactataagccatgtcagttatttttatatctccttccctgatcttccaaacataaaatgcagtgcttagtaaatgtgtgytgatttaatatgttaatatgagtttttgtattaggttacagctatatcatttttaactacatcatactagattattagtattaaattaaattacaaagaa

SEQ ID NO: 435729 - DNA, 201 bp, Homo sapiens
aattggccgggcgtggtggcaggcgcctgtagtcccagctactcgggaggctgaggcaggagaatgacgtgaacctgggaggcgaagcttgcagtgagccraggtcgcaccaccgcactccagcctgggcaacagagcaagactcgtctcaaaaaaaaaaaaaaaaaaatagcagctctccttcatagtctctatttttcc

SEQ ID NO: 435730 - DNA, 201 bp, Homo sapiens
tttgtaaaacctgaagccagttatctcttaaaataccagctctccttggctgggcgtggtggctcacgcctgtaatcccagcactttgggaggccggggcrggtggatcacgaggtcaggaaatcaagaccatcctggctaacacagtgaaaccccgtctctactaaagatacaaaaaaattggccgggcgtggtggcagg

SEQ ID NO: 435731 - DNA, 201 bp, Homo sapiens
tccatataaattttaaaattggcttgtcaagtgctcagataaatcctatgtaacttaatggtctgagctatgtcacagtacttgtactgtacatggaatayaggaaatagtttcatatatttatcttatagtcaacctttttattaaactgtcttgttatttctaatatctagtctataggtgattttgagttttctactt

SEQ ID NO: 435732 - DNA, 201 bp, Homo sapiens
aggcttttatttttttttctacttagcagtttaaatgttttaaaaagtccttccacaccctgagatgtgtgtgtatctcacacacacacacacacacacacccaaattttcttctaaaaattttaaggttttgcttttcacatttatctttaattcacctagaagagatttctgtgcctaacgtaaggtaggatctaactt

SEQ ID NO: 435733 - DNA, 201 bp, Homo sapiens
ggactaactcacatggctgcagtaagtgctggctgttagctggaagcacaaccaaggctgttaacaggtgtgccttggttctcttccatatggcttctctyttgttttcagtactctgcagtttaattatgatgcatgcaggtgtgaatttctgtttattctgcttgggatgtgttttccttctgggatctgtgaatcggt

SEQ ID NO: 435734 - DNA, 201 bp, Homo sapiens
tttccattatgtatcattgcatagcaaactacctcaatacttagtggcttgaaacaagaaccactgatcatttctcactattttgtgatgtgactgggctsaactgggcagttctttctgctccacatggtgtcaatttgggaagcactggtctagaggcttgaccatgctgcagcatttaaaaggactaactcacatggc

SEQ ID NO: 435735 - DNA, 201 bp, Homo sapiens
accaggcttttatttttttttctacttagcagtttaaatgttttaaaaagtccttccacaccctgagatgtgtgtgtatctcacacacacacacacacacacacccaaattttcttctaaaaattttaaggttttgcttttcacatttatctttaattcacctagaagagatttctgtgcctaacgtaaggtaggatctaa

SEQ ID NO: 435736 - DNA, 201 bp, Homo sapiens
agtgttgtaaatcctttcctagatggggaaactaaacctgagaagttatgtaaactacttgaaatcatactgttaattatttgtaggtgcccctgccataytaggcaccctctgtgtgaaaataatgatggtagacaaactctaaccataacataataatgatatcattaaatatttggttcatttactgaactttagcaa

SEQ ID NO: 435737 - DNA, 201 bp, Homo sapiens
aacttgaattgtatctctcagaattcccatgtgttagggagggacccagggtgaggtaattgaatcatgggagctggtctttcctgtgctattcttgtgayagtgattaagtctcacgagatctgatgggtttatcaggggtttccgcttttgcttcttcctcatttttctcttgctgctgccatgtaagaagtgcttttt

SEQ ID NO: 435738 - DNA, 201 bp, Homo sapiens
attatgctgattgatgatgaataattcttgccttccagttataaagcccatttggtcatggcgtacaatccctttaatatgtgtttttttttttttgaggyggagtttcgctcttgttgcccaggctggagtgcaatggcgcgatctcggctcactgcagtctccaccttccgggttcaagcgattcttctgcctcagcct

SEQ ID NO: 435739 - DNA, 201 bp, Homo sapiens
ggcgtacaatccctttaatatgtgtttttttttttttgaggcggagtttcgctcttgttgcccaggctggagtgcaatggcgcgatctcggctcactgcaktctccaccttccgggttcaagcgattcttctgcctcagcctccttgtagctgagattacaggcgtgcgccaccatgcctgggtaattttgtatttttagt

SEQ ID NO: 435740 - DNA, 201 bp, Homo sapiens
tttgtatgcacaccacttggatttaaaaggtggaataccttacacactttttttttcctgctctttttacttagctgtacatcctaaacatcactctgtarcagtagaaagtgacattttttgttcctttttccagctgcaaggtacttcattgtgaggatatgccacatttatttatcgtagtaaaaaacacataataaa

SEQ ID NO: 435741 - DNA, 201 bp, Homo sapiens
ggctggagtgcaatggcgcgatctcggctcactgcagtctccaccttccgggttcaagcgattcttctgcctcagcctccttgtagctgagattacaggcrtgcgccaccatgcctgggtaattttgtatttttagtagagacggggtttctctatgttggtcaggctggtctcgaactcctaacctcaggtgatccaccc

SEQ ID NO: 435742 - DNA, 201 bp, Homo sapiens
gctttgttgcccaggcaggagtacagtggcatgattgcatttcatggtcacctctgtctcctgggctcaagcaatcttcccaccttaacttcccaagtagytaggactaggtatatgccaccacattcagctaattttttttttttttttttttgagatcgagtcttgctctgtcgcccaggatggagtgcagtggtgcga

SEQ ID NO: 435743 - DNA, 201 bp, Homo sapiens
agcgattcttctgcctcagcctcccaagtagctgggattacaggtgcttgctaccacacccggctaacttttgtatttttagtagattcagggtttcatcrtgttggtcaggctggtctcaaactcctgacctcaagtgatctgcccgcctcatcctcccaaagtgctgggattacaggtgtgagtcactgcgcctggtca

SEQ ID NO: 435744 - DNA, 201 bp, Homo sapiens
tatagatagcattaacttaccagtagccaagaaataatagggattgggaaagtctctgtacttttatttggtcttttattatgtgaaatatgcatatatcrtactatttctttatataaaactatacttaggccaggtgaggtggctcatacctgtaatccagaactttgcaaggctaagatgggtggatcacctgaagtc

SEQ ID NO: 435745 - DNA, 201 bp, Homo sapiens
tttgagtagaagagtgacttaatcttatatgttaaaaggatttttctggcctatgtgtctaaaatagattgaaagaaggcaaaaatggaaggaaggaattyaacagttaagcagcagttgtagaattccaggtgagaggtaatagtggcttggataatggggattagaagtgcccagattctggatgttcaaaaggatttg

SEQ ID NO: 435746 - DNA, 201 bp, Homo sapiens
atggtgaaacctcatctctactaaaaatacaaaaaaattagccgggcatggtagcacatgcctgtaatcccagctacttgggaggccaaagcaggagaatygcttgaaccaggaggcagaagttgcagtgagccaagatcatgtcactgcactccagtctgggtgacagagtgagactctgtcttaaaagataaaaaaatt

SEQ ID NO: 435747 - DNA, 201 bp, Homo sapiens
aaactggaaagttcttgactttgaggagtggacctgtattctttattttttttaacgaatacatgtatatctgaaattaatttttaaactttttatagacmtagaacatagatatagaaatgtatgcataagtattcagttggctgaattttcagactgatcattaatgtgtaactagcactcagatcaagtaccagaaca

SEQ ID NO: 435748 - DNA, 201 bp, Homo sapiens
gccaaagcaggagaatcgcttgaaccaggaggcagaagttgcagtgagccaagatcatgtcactgcactccagtctgggtgacagagtgagactctgtctyaaaagataaaaaaattacttaggcagtatgtttccttttaggttgcaaggactttattgatttcattgttaagctagccttacaaagtatatacatacac

SEQ ID NO: 435749 - DNA, 201 bp, Homo sapiens
ccagggtattttgaagcaaatcctaatatcatattatttcatcccaatatcttatttcatctatgaaatattttagggtgtatctccaaaagataaggacwctttttaaaaacataattggggccgggtgcggtggctcacacctgtaataacagcactttgggaggccgaggcgggtggatcacctgagttcaggagttt

SEQ ID NO: 435750 - DNA, 201 bp, Homo sapiens
atgtggatggggataaaaagaagaaacagagtattggtgggacagttggaaggaatagaggattggtgatcctggctgagggtgtggggtggggggtagtwgtggaacagagctggaaggtacatggatcccaaggtcctaaggaccttggtggaggtttagagggctaggagctgttacaggtatacattcaccacgtag

SEQ ID NO: 435751 - DNA, 201 bp, Homo sapiens
ttgtgtggactcttcagggttttctacatacaagatcatgtcatctgtgaagagatataattttacatcttcctttacaatttggatgtcttttattattyttcttgcctaattgctctgtgggcatcttcttgttctttatcttagagaaaaagctttcagttttttgagtatgatgttagctgtgggcatttcttatat

SEQ ID NO: 435752 - DNA, 201 bp, Homo sapiens
agtggcaaatgcttattacttacttcaaactgtttcccaaaataagtgcatttattttgacaataaaacttaaggctgttcatgagaaggccttgaaaagytactctagaggaaaaatgtctaaagaaaaaaaaaattcaaaaagtttacattaattattcagtgttgtgagtaaataaaaatgtgtgctctttactgttt

SEQ ID NO: 435753 - DNA, 201 bp, Homo sapiens
ttctctatgttggtcaggctggtctcgaactcctaacctcaggtgatccacccccaacctcggcctcccgaagtgctgggattacaggcatgagccaccaygcccggcctaatgtgttgttgaattcagtttgctagtattttgtagtttcctcctggttgcacctcatcctcactatgttggatatggggaagggcaggg

SEQ ID NO: 435754 - DNA, 201 bp, Homo sapiens
ctggtctcgaactcctaacctcaggtgatccacccccaacctcggcctcccgaagtgctgggattacaggcatgagccaccacgcccggcctaatgtgttrttgaattcagtttgctagtattttgtagtttcctcctggttgcacctcatcctcactatgttggatatggggaagggcagggatgagtgcacagaatgcc

SEQ ID NO: 435755 - DNA, 201 bp, Homo sapiens
gttctaaatgtggcatgttgtaagattgtaaaatgtagaatttgagttgaaattatgcatgaggctgagtcagtatgtgaaaggaagaacattatagacaragaagataatagcatgaatgtttttagtttagggaacatcaagcagatctatatgtcaggtctcagtagaggatgaagagaatttagaataacagacaag

SEQ ID NO: 435756 - DNA, 201 bp, Homo sapiens
cctcctggttgcacctcatcctcactatgttggatatggggaagggcagggatgagtgcacagaatgccccaaattttattacccctttcactggaatgcyttcttggttttatggcctgggtgctgtagtttcttaactgttctctagagttctcacagaagtagttctgttccatatattgttttatttctgaggtgta

SEQ ID NO: 435757 - DNA, 201 bp, Homo sapiens
caatactataattctaggggtagaatgaatcagggcaaaggactggagacagggagatgcagtaaattgcttaaataattcaagtgagcattaacaagagyctgaattagaggaatagaaaggcggaggcagatggaaaagactttgaggcagaactggtgactgaatggggaggatgaaggactgggagtagctgaagat

SEQ ID NO: 435758 - DNA, 201 bp, Homo sapiens
agtatagcataaaaacatgtttaagatttagaggattcatttgagttagaaaatctgagaaaattaagtgggtatgtatattctgttatacaaagacaaaktcagttttactaaggcaagatttagccatggggaaggatttcatcttcttgagatcagactcagtattttgaggaatacaattcagattgcaatggttga

SEQ ID NO: 435759 - DNA, 201 bp, Homo sapiens
gtcaaacatatttaaaaatatttaaattgtaggataatcgagttcacattggaccaaaaatggaaattcgggtcgttacgttaggattggatggtgctggmaaaactactatcttgtttaagttaaaacaggatgaattcatgcagcccattccaacaattggtaagtatgaatattggtttttaccttaatagacaaacc

SEQ ID NO: 435760 - DNA, 201 bp, Homo sapiens
caaggctgcagtgaaccatgctcaggccactactctccagcctggctgacagagtgagaccctttctcaaaaaaaaaataataataataataaataacaayataaaataaaatatctgattgattacagtttgatttacaagtaataagtttgaagcttttttggcattttttgaagtgtaaaattaagagctttttccta

SEQ ID NO: 435761 - DNA, 201 bp, Homo sapiens
tagttgtggaacagagctggaaggtacatggatcccaaggtcctaaggaccttggtggaggtttagagggctaggagctgttacaggtatacattcaccaygtaggagtaggaatggggttgattaggcttcagtagatattgctgcatgtagataatttgataagtcacagttataaactgggggttgtctgtgtttgat

SEQ ID NO: 435762 - DNA, 201 bp, Homo sapiens
ttctcactctgtcacccaggtgggagtgcaatggcacgatcatggctcatagcaacctcgacctcctgggctcaaatgatcctcccacctcagtttttgatttttttttgtagagacagggtctcgctgtgttgcccaggctggtcttgaactcctggcctcaagcagtcctcttgccttggtgtcccaaagtgctgtgat

SEQ ID NO: 435763 - DNA, 201 bp, Homo sapiens
ctttcaaatattttctcccatttcataggtcaatttttcactctgttgattttgtcattttatgcacaaaaattgtaaatttgatgtagtctatttttgcttttttttttttttttttactgtgcttttcgtgtatccctgaagtcactctcaaatgcaatgtcatgaggcttttcctctgttttttcttctaggagtttt

SEQ ID NO: 435764 - DNA, 201 bp, Homo sapiens
tacatattaggatcactgaggagttttagtacactactgatgcactcctcctccagttctgatgaggttgacatcagtatattttaggaattaccagaagytattttaatgtgcaaccagggttatgaattactgatcaaggtaatatatgaagtttttttcacatcttgaaaagtagacacctatgattattcaggtaat

SEQ ID NO: 435765 - DNA, 201 bp, Homo sapiens
tggcattttttgaagtgtaaaattaagagctttttcctatctagggttttttgctgttaaccacaattcctatttatagatactgaggaaatattttcttkctgtattatttaccgagttgatgcaaaatagtctagtaactttatttttggacctgtgtttggtttgctaatcaatggaattttattagtgctttttgaa

SEQ ID NO: 435766 - DNA, 201 bp, Homo sapiens
tgatgggatcagagatacaggattgaaatgaactaaacaattttaatatggttctttggagtttattgtcataaatttaatttattagagtatcataatayagcatttataaaatgttgcatttattttatatcaaattctattgtgaatttttgagacagagcctcactttgtcgcccaggctggagggcagtggcacaa

SEQ ID NO: 435767 - DNA, 201 bp, Homo sapiens
taaggagtaacatacagattttgtcacacgtgtctagtatgcttgtaggataaattcctgcaactagaattactgagttatttaaatttggtaagtattgwcaagttgccctccatagaagctgtattgctcaataaacatttcatagcaattagtaatgtatgagagtgtctgctttcccacaccttcactaacaaaatg

SEQ ID NO: 435768 - DNA, 201 bp, Homo sapiens
gagtacctataattttaggctggaagactttgaaatgctaagaaacatggttttaaaatattttctggagaaagaaaaggatttttaaggttttggtgatytttgatgtatataaatagtctatttgcctgacaactaatagacagtaataacattatagatagcattaacttaccagtagccaagaaataatagggattg

SEQ ID NO: 435769 - DNA, 201 bp, Homo sapiens
aggatttgttaacagattgtacgtagggcatgcgggaaagagaaagcaataatgacttcagcgtttgtcctgaacaactgaaacagtggaattgctgtcarctaacatgagtatctaacagtgagcaaaaacagataatactaccgttctcatggagcttgcatattattgggagatctctttcatataaagactatgttg

SEQ ID NO: 435770 - DNA, 201 bp, Homo sapiens
tggttgtaaacaagctcggagcgggagtagacagtggccggcagggcagccgggggacagctgtagtgaaggtgagggaccttgcgtgctctattctccaycatcggcctcccttcggttcatcctggagacctggcggcatcgccgcggcccaggcttcgataggtgggatgcgcggcctctgggccccttttggcatta

SEQ ID NO: 435771 - DNA, 201 bp, Homo sapiens
agtatatacatacacacacatataaattagttaaaccaaactaattttttctattcttattaatctcagactaattactgaaagatgaatctaggtttttkgtttaggcttctgttagaacactgtcaacaaatttctctataaatggtgataattagaaaaattataatttggatggactgataaaaaatatgtgtatat

SEQ ID NO: 435772 - DNA, 201 bp, Homo sapiens
tcggttcatcctggagacctggcggcatcgccgcggcccaggcttcgataggtgggatgcgcggcctctgggccccttttggcattacaagtctcgtcctstcctctgcatcctttctctcctatggcctgaaattgcctggtcttctgctcatgacatgtcatcatcgggacatttgtgaaaaggagcttgcgggccagt

SEQ ID NO: 435773 - DNA, 201 bp, Homo sapiens
gaaaaagtgtaacactaaggtgaacttgcttcccttttcactaattttgctaaactttgtaatgcacattcttagcatataactgaacacaattgaaaaawtgtgcctgattataatgtatgtataatggtaggtgtttgtgtgtgattcatttttaaagaaatatttttctcaagctcctattactatttgtggttgtat

SEQ ID NO: 435774 - DNA, 201 bp, Homo sapiens
acattaattagcttagtattataaattgagtcatcatcatcgtaactacgtactaagttaggtgttttagctcgttaatatctacttatgaagtagatgtkaattcccattttacagggaggaaacccaggtttaggtaaacagtgtgtggcagagccccgggttgaccggctttaaagtctgtacttttcgctcttgtac

SEQ ID NO: 435775 - DNA, 201 bp, Homo sapiens
cttgttactgttttagcaaagagactggtggcatttgcctagacatttgtggaacttcaaacttgagagaggtgatttagggtatctggtggaagaaattkctaagcagcaaagcattcaagaggtgacttgggttctgttaaaggccttcagttttataagggaagcagagcgtaaaagtttgaaaaatttgcatcctga

SEQ ID NO: 435776 - DNA, 201 bp, Homo sapiens
gtggccagtttcttaacttgtaaaaaatgaaagtagaaagattaggatatatacttttagtttattcctgatataccattattacagaataaaaaccataygtagcttagatatgtagtcagttaagagtactcttgcttctcttaacagagaatgtatattaccagtattatatgggtgtgactgctggtagcgtagtgg

SEQ ID NO: 435777 - DNA, 201 bp, Homo sapiens
tgccatactaggcaccctctgtgtgaaaataatgatggtagacaaactctaaccataacataataatgatatcattaaatatttggttcatttactgaacyttagcaagtgactatttttgttttttttattttttttggggtagctgttgtgtttgttgtagatagcagtcatagagacagaattagtgaagcacacagc

SEQ ID NO: 435778 - DNA, 201 bp, Homo sapiens
cggctttaaagtctgtacttttcgctcttgtactgcgtctgtaatcagacatctgttattgggtgagctgccccctcccctgttagtagtacagtctattractctttgcacaagtctgcagcatcgtcatagctgggcattaacgatagagtttatgaattttcttatgcttgaagtttgagattctaccatgtatacat

SEQ ID NO: 435779 - DNA, 201 bp, Homo sapiens
cttttagtttattcctgatataccattattacagaataaaaaccatacgtagcttagatatgtagtcagttaagagtactcttgcttctcttaacagagartgtatattaccagtattatatgggtgtgactgctggtagcgtagtggtatagagttgaatttatgttgtatgattctgctgaattcagttaaactcaaca

SEQ ID NO: 435780 - DNA, 201 bp, Homo sapiens
tattaatctcagactaattactgaaagatgaatctaggttttttgtttaggcttctgttagaacactgtcaacaaatttctctataaatggtgataattasaaaaattataatttggatggactgataaaaaatatgtgtatatatctttcaggatgttgctggagcactgtcagtagaagaaatcactgaactactcagt

SEQ ID NO: 435781 - DNA, 201 bp, Homo sapiens
gctggtatattcagggctgtgatgctcgaagtggtatgggactgtatgaagggttggactggctctcacggcaacttgtagctgctggagtattggatgtkgcttgattttaaaggcagcagttgtttgaagttttgtggttaaaagtaactttgcacatagtatgttttaagaaattatacatctcaaaagatggtaatt

SEQ ID NO: 435782 - DNA, 201 bp, Homo sapiens
tagacaaactctaaccataacataataatgatatcattaaatatttggttcatttactgaactttagcaagtgactatttttgttttttttattttttttkgggtagctgttgtgtttgttgtagatagcagtcatagagacagaattagtgaagcacacagcgaacttgcaaagttgttaacggaaaaagaactccgaga

SEQ ID NO: 435783 - DNA, 201 bp, Homo sapiens
tatatctttcaggatgttgctggagcactgtcagtagaagaaatcactgaactactcagtctccataaattatgctgtggccgtagctggtatattcaggsctgtgatgctcgaagtggtatgggactgtatgaagggttggactggctctcacggcaacttgtagctgctggagtattggatgttgcttgattttaaagg

SEQ ID NO: 435784 - DNA, 201 bp, Homo sapiens
agatctgaatacgaagaagactgataagtaacttaagtaacacagtgttacgggaattaggaaagtagttctaaatgtggcatgttgtaagattgtaaaakgtagaatttgagttgaaattatgcatgaggctgagtcagtatgtgaaaggaagaacattatagacaaagaagataatagcatgaatgtttttagtttagg

SEQ ID NO: 435785 - DNA, 201 bp, Homo sapiens
actgttttccataatggttgcaccatattacagttccaccagtggtgcacaagggtgcagtttctccacattttcaccaacacttgttattttctgttttkggatagtagccatcctgattggtttgaaatgataccttatttgttttgatatccatatctctgatgactagtgccattaaccatcttttcatataattgt

SEQ ID NO: 435786 - DNA, 201 bp, Homo sapiens
tacaggtgcttgctaccacacccggctaacttttgtatttttagtagattcagggtttcatcatgttggtcaggctggtctcaaactcctgacctcaagtsatctgcccgcctcatcctcccaaagtgctgggattacaggtgtgagtcactgcgcctggtcaacactgttcgtgggttattaaactgagacattttcttg

SEQ ID NO: 435787 - DNA, 201 bp, Homo sapiens
attgatttcattgttaagctagccttacaaagtatatacatacacacacatataaattagttaaaccaaactaattttttctattcttattaatctcagamtaattactgaaagatgaatctaggttttttgtttaggcttctgttagaacactgtcaacaaatttctctataaatggtgataattagaaaaattataatt

SEQ ID NO: 435788 - DNA, 201 bp, Homo sapiens
aaactgtttcccaaaataagtgcatttattttgacaataaaacttaaggctgttcatgagaaggccttgaaaagttactctagaggaaaaatgtctaaagaaaaaaaaaattcaaaaagtttacattaattattcagtgttgtgagtaaataaaaatgtgtgctctttactgtttttcatttttaaagaatattattatgg

SEQ ID NO: 435789 - DNA, 201 bp, Homo sapiens
ggtatgtctttatcagcagcatgaaaatggactaatacaatgtgtataccacattttgtttgttcattcatctgttgatggaaacttgggtagcttccacytcttggtttactgggaatagtgctgctgtgtacgtgagtgtacaaatatctcttcaagaccctgctttcatggtcttttggatatatacccagaagtgaa

SEQ ID NO: 435790 - DNA, 201 bp, Homo sapiens
cagtgttgtgagtaaataaaaatgtgtgctctttactgtttttcatttttaaagaatattattatggaagcacgatttatttaaataggtacattgagacttttttttttttaatgttctgatacattaggatgaagttaaatcttaaatcttattagttgaattgttgtaaggacagtgatgtctggtaacaagatgtga

SEQ ID NO: 435791 - DNA, 201 bp, Homo sapiens
ttaattgaagaaaaagtgtaacactaaggtgaacttgcttcccttttcactaattttgctaaactttgtaatgcacattcttagcatataactgaacacarttgaaaaattgtgcctgattataatgtatgtataatggtaggtgtttgtgtgtgattcatttttaaagaaatatttttctcaagctcctattactatttg

SEQ ID NO: 435792 - DNA, 201 bp, Homo sapiens
tatatgtataacataaaatttgccgttttaaccatttctaagtttagggacattaagtacattcatattgttgtgcagcctttaccaccataatttttttwatgtgtatttagattttttttttttttttttgagatagagtcttgctctgtcatccagattggagtgcagtggtgtgatcttggctcactgcaacctcca

SEQ ID NO: 435793 - DNA, 201 bp, Homo sapiens
ttccagacagctatgtttttaaaagcttacagctaattctgatgcatactcctacattttctaaatagcatttgtgcttctgtccttcctatacatcatcmtgacaactaatatttaaagctatggggatgtatttaatatcagatttttgtagttttacagaaagacttttgacttctctatggtttagtttcttttgtg

SEQ ID NO: 435794 - DNA, 201 bp, Homo sapiens
agttaatcttggaaatagcttcttacccgtagaaatgaatgcttctcagatgagtattgaatgacctttgttcttaatgaccaatatattttcatatgtaratattgttcagttaagcaaaaaggattatggattctatatttaaaaattcgtcatgttatactgattgggttcaattttaaggcattaattttttgttta

SEQ ID NO: 435795 - DNA, 201 bp, Homo sapiens
tcataatgcaccagattgttttgacaatatttatgtctgttagctcttacttaggatatgattttagagatagtctcttggttttttgtttagcaataaayggacttccaaattttaaattacttctttgcagtacagttttcttataaaggagtgaaagtaaattagtatttttctgtgtcataaaagtcacttgtggct

SEQ ID NO: 435796 - DNA, 201 bp, Homo sapiens
gatggaattggaatggctcacacagaacatgtatggattttttttcttcttcactttctcattcttttttatttttcatattttcaccttctactaagtawttaatgggcaattacaatttgccagtattgcaccaatcattagaaagttttttaaaagtccctgtctttcaggaactcattcatcatggaaaagagagag

SEQ ID NO: 435797 - DNA, 201 bp, Homo sapiens
aaagccaaatcatgcaggatcttgtcagccatgttaaagagttcagaacttagtttaaggacagtgatgagccattgaagaattgacttaggaatgatatratcagattttcctcaagaaaggttgttttaaatgtagaaaatgaattggaggagcaacaaaattggaagcaggcagacctattaggatgttgttaaagtt

SEQ ID NO: 435798 - DNA, 201 bp, Homo sapiens
ttctcactgtgatgtagtgttccatttatctatatgctacaatttatccattctttcgttgctaagtccttaaattatttattaatgctcaattattattyttgtcaaatttacatttaactttgactactataatgttaaaactgcttttattgtgagttggtaatataagtctcttttccttatttcttataaaaagtt

SEQ ID NO: 435799 - DNA, 201 bp, Homo sapiens
ttcactagtatggaattatcagtgtcgttcacgtgcctttcccaccataagccatgggttcttgaggccttctaacttcttgccattcttcagttatgccmaatccttttactcttctttgccaagcatatatgtagttttttttttttttctgcttggagtgcatatatctctcttttctaatagtggaaatcttccttc

SEQ ID NO: 435800 - DNA, 201 bp, Homo sapiens
ttaatagagaattatatgtaaggaaggccctgtgaggcattataaggacttcaattgttttttttttttttttggccgggggcgggaggagtgggttgggracagggtcttgctcccaggctagctagagtgcagtgatacagtctcgtctcactataccttctgcctcctgggctcaagtgttcctcctgcttcagcctc

SEQ ID NO: 435801 - DNA, 201 bp, Homo sapiens
ttcttttaaatctttgtatagtgatgggatcagagatacaggattgaaatgaactaaacaattttaatatggttctttggagtttattgtcataaatttamtttattagagtatcataatacagcatttataaaatgttgcatttattttatatcaaattctattgtgaatttttgagacagagcctcactttgtcgccca

SEQ ID NO: 435802 - DNA, 201 bp, Homo sapiens
cgcgttgcatgcagggagatgcccgtaccccctcaccgccctcagttcacgccctggctggtttgcgattcgagaggaaaaatcattaaaggatctggagttttcaccccaaaactttaatcgttttgtcccttctttttttttcttgtctttcctccagcagctgcagactacataatgaaaaataacaaaagtgcccat

SEQ ID NO: 435803 - DNA, 201 bp, Homo sapiens
ctacttatgaagtagatgtgaattcccattttacagggaggaaacccaggtttaggtaaacagtgtgtggcagagccccgggttgaccggctttaaagtctgtacttttcgctcttgtactgcgtctgtaatcagacatctgttattgggtgagctgccccctcccctgttagtagtacagtctattaactctttgcacaa

SEQ ID NO: 435804 - DNA, 201 bp, Homo sapiens
ttgtagagacagggtctcgctgtgttgcccaggctggtcttgaactcctggcctcaagcagtcctcttgccttggtgtcccaaagtgctgtgattacaggygtgagccacagtgcctggcctaaagaatttgataacgtgaaactttcccctttttaaaaaatgtaggataaattgaagtatgtgtatatatgaataatag

SEQ ID NO: 435805 - DNA, 201 bp, Homo sapiens
aatttggtaagtattgacaagttgccctccatagaagctgtattgctcaataaacatttcatagcaattagtaatgtatgagagtgtctgctttcccacaycttcactaacaaaatgttaccaacatttttgatctaatctgaaaaaagtattttgatgtagctttaatttgcatttttctttctttatttttttgagacc

SEQ ID NO: 435806 - DNA, 201 bp, Homo sapiens
ataatgatatcattaaatatttggttcatttactgaactttagcaagtgactatttttgttttttttattttttttggggtagctgttgtgtttgttgtaratagcagtcatagagacagaattagtgaagcacacagcgaacttgcaaagttgttaacggaaaaagaactccgagatgctctgctcctgatttttgctaa

SEQ ID NO: 435807 - DNA, 201 bp, Homo sapiens
ttgtccaggctggtctcgaactcctgacctcagatgatccactcgcctcggcctcccaaagtgttgggattacaggcatgaaccaccatgcctagctttartttgcatttttcttattatgagttagattgaacatcttttcacgtaaagaattttcatcttcttttctctgaacaatgttatgtttcttatttttattca

SEQ ID NO: 435808 - DNA, 201 bp, Homo sapiens
gatcgacaagtaacagacctaggtaggaaaagtatttgtatggatttaagattgaaaattgttcatgtaatgcaaatgtcataggaaacaatgtccttccrcttgatttttagaatgataaaattcccagaaagtttcagaaagcctaagtttctattaaggtcaataatcttcaagctataaactatctcactcttagtt

SEQ ID NO: 435809 - DNA, 201 bp, Homo sapiens
cagctgcagactacataatgaaaaataacaaaagtgcccatgcgcgaggctgtgcaactaaccacccgacgattgcggggaggaggagtaagagtcggctragcggcgcccagtgtcctactgcgcctgtgcgccggtggcgtgcgcagaggcctctgggtaggtggctcaaccccgcctctcagttgaggactctgaagg

SEQ ID NO: 435810 - DNA, 201 bp, Homo sapiens
caggtatacattcaccacgtaggagtaggaatggggttgattaggcttcagtagatattgctgcatgtagataatttgataagtcacagttataaactggkggttgtctgtgtttgatatgtcattcattgtaaatacaaatatagtataaaagtaactttttttttaaaacaggttttaacgtggaaactgtagaatata

SEQ ID NO: 435811 - DNA, 201 bp, Homo sapiens
cttccttctccttcaaggtccagcttaaatatttgcctttctttgaagctttctatttgttggtctttttttgagtgcctctctaccatgtactgcctacstctgctataattcagtggttcttcactgttagagcaaacgtatgttttgtgatggttgagataccataagaaatttgttacccagtttgcagatgactta

SEQ ID NO: 435812 - DNA, 201 bp, Homo sapiens
ttccttctccttcaaggtccagcttaaatatttgcctttctttgaagctttctatttgttggtctttttttgagtgcctctctaccatgtactgcctaccsctgctataattcagtggttcttcactgttagagcaaacgtatgttttgtgatggttgagataccataagaaatttgttacccagtttgcagatgacttac

SEQ ID NO: 435813 - DNA, 201 bp, Homo sapiens
ctattgccctaggaatttcagaaaagctgcagtctgtgttatcttcactgatatattgctaataattgtgttgatttcaaatcattgtaggctaagccttktaccattgtagagctttttctcttaaatatgtgattacacttacatgagagtggccagtctatagcctcatcagtcttgggttatcatttagtccttacc

SEQ ID NO: 435814 - DNA, 201 bp, Homo sapiens
gatttcaaatcattgtaggctaagccttttaccattgtagagctttttctcttaaatatgtgattacacttacatgagagtggccagtctatagcctcatyagtcttgggttatcatttagtccttaccacactgaattgtaacagttgatatgtatgctatttattaagttgattttcagctccaaacctactcttctat

SEQ ID NO: 435815 - DNA, 201 bp, Homo sapiens
gggttatcatttagtccttaccacactgaattgtaacagttgatatgtatgctatttattaagttgattttcagctccaaacctactcttctatcctctawtttgtgatactagggctagaactctacagacctcataattgtgttgccagctgggcccatgttaggtactgtcaagagggggcatagttactcatgtgag

SEQ ID NO: 435816 - DNA, 201 bp, Homo sapiens
agctccatgagccactcctgcaagtttctaagttttaataattctaacttcttccttttattcctttagcactggaagtggtagctatgttatttcatacmattgctacctccttaatacctcagagttccttttaaccttttagctacctagttaataactacacctagttaacagtttttattttaagttctttctatt

SEQ ID NO: 435817 - DNA, 201 bp, Homo sapiens
aaatcagaggttaatagagaattatatgtaaggaaggccctgtgaggcattataaggacttcaattgttttttttttttttttggccgggggcgggaggaktgggttggggacagggtcttgctcccaggctagctagagtgcagtgatacagtctcgtctcactataccttctgcctcctgggctcaagtgttcctcctg

SEQ ID NO: 435818 - DNA, 201 bp, Homo sapiens
aagtgttcctcctgcttcagcctcctgagtagcctggactacaggggcaagccaccacatccagctactttttttgtatttttcgtagagacagagtttcrccatgttgcccagactggtctaaaactcctgggctcgagtgatccatctgccttggcctcccaaagtgctgggactacaggtgtgagccaccatccttgg

SEQ ID NO: 435819 - DNA, 201 bp, Homo sapiens
gttccccagttgtttgcctttttcatggggaaccagtgttccaatgttactggtgtcctatgtatccttccaggaagacaatacgcttatacaacaatacaaaaaaaaatttgctctttccccacctttatgcaaaaatgaatatattctattatttttctttttgttttaatcatatgaaatcattctgtgtatatatga

SEQ ID NO: 435820 - DNA, 201 bp, Homo sapiens
gattagcatggcccctgtgcaaggatgacacacaaatttgtgaagtgtgccatatttttaaatttaaaaaagtaaaaataagaaaatataaatggtatatrtatggtatatataatgaatcttcctgtatccatcacccacttgagcaattataaacttatttcatctccccttttacctactccttttcctacctgcaat

SEQ ID NO: 435821 - DNA, 201 bp, Homo sapiens
tacttatgaagtagatgtgaattcccattttacagggaggaaacccaggtttaggtaaacagtgtgtggcagagccccgggttgaccggctttaaagtctgtacttttcgctcttgtactgcgtctgtaatcagacatctgttattgggtgagctgccccctcccctgttagtagtacagtctattaactctttgcacaag

SEQ ID NO: 435822 - DNA, 201 bp, Homo sapiens
ataaatttaatttattagagtatcataatacagcatttataaaatgttgcatttattttatatcaaattctattgtgaatttttgagacagagcctcactytgtcgcccaggctggagggcagtggcacaatcttggctcactgcaagctccgcctcttaggttcataccattctcctgcctcagcctcccgagtagctgg

SEQ ID NO: 435823 - DNA, 201 bp, Homo sapiens
ccattctcctgcctcagcctcccgagtagctgggactacaggtgcccgccaccgcgcctggctaattttttgtatttttggtagagatgggatttcaccaygttagccaggatggtctcaatctcctgacctcgtgatctgcccgccttggcctcccaaagtgctgagattacaggcgtgagccaccgcacccagcctatg

SEQ ID NO: 435824 - DNA, 201 bp, Homo sapiens
ccttggcctcccaaagtgctgagattacaggcgtgagccaccgcacccagcctatgaatattttttctatatttaattgaattttttttttttgaggcagkttctcactctgtcacccaggtgggagtgcaatggcacgatcatggctcatagcaacctcgacctcctgggctcaaatgatcctcccacctcagtttttga

SEQ ID NO: 435825 - DNA, 201 bp, Homo sapiens
acaaaatgttaccaacatttttgatctaatctgaaaaaagtattttgatgtagctttaatttgcatttttctttctttatttttttgagaccgagtgtcaytctgtcacctaggctggagtgcggtggcgtgatcttggctcactgcaacctccgcctcccaggctcaagcaattatcctgcctcagcctcctgagtaaac

SEQ ID NO: 435826 - DNA, 201 bp, Homo sapiens
cctgtagtcccagccacttgggaggctggggcacgaggatcacttgaacccggaaggtggagattgcaatgagcagagatcacgctactgcacaccagccygggcaacatagcaagactctgtctcaaaaaaaaagtaaaagagatttaaataatttttttaaactgtggcaaaatatatgtataacataaaatttgccgt

SEQ ID NO: 435827 - DNA, 201 bp, Homo sapiens
actgcaacctccacctcccgggttcaagcaattctcgtccctcagcctcctgagtggctgggattatgggcgcctgacgccacacctggctaatttttgtrtttttagtagagacgggatttcaccatgttgactgggctggtcttgaactcctggccttaagtgatctgtccgcctcagcctcccaaactgctgggatta

SEQ ID NO: 435828 - DNA, 201 bp, Homo sapiens
gaacaatgttttctttacaaataaataagccaataatgaaaatacagataagtcatttgagtctcaccatgtttttatttactaatatcaaggacagaagkgtttgtagcttgtgataattactctttattttctgttaaaatgagtttgaagggtttgtggcttttttttgcagttttctgtatacttttaaaacttttc

SEQ ID NO: 435829 - DNA, 201 bp, Homo sapiens
catattttgtatgaaggaaaaaaaatgtcggattgctttcacttctctttcattagatgatgatttctttatactaaagtgaatcagtgaaatgaatttcmaactgcaacactctgttttctaaaagttatgcagttctttctgtgctaaatctttaatctttatttcaaaagacattactgttagctaatgttgacatta

SEQ ID NO: 435830 - DNA, 201 bp, Homo sapiens
tttaaggacagtgatgagccattgaagaattgacttaggaatgatataatcagattttcctcaagaaaggttgttttaaatgtagaaaatgaattggaggrgcaacaaaattggaagcaggcagacctattaggatgttgttaaagttttctagttaaaatactagagatgtttatggcctataatacactagggtagtga

SEQ ID NO: 435831 - DNA, 201 bp, Homo sapiens
gatctttgcaccgaatatgaatctatgagaatagttctatttttggcttcaaattcataacatatattggccagttaatcttggaaatagcttcttacccstagaaatgaatgcttctcagatgagtattgaatgacctttgttcttaatgaccaatatattttcatatgtaaatattgttcagttaagcaaaaaggatta

SEQ ID NO: 435832 - DNA, 201 bp, Homo sapiens
attggataggtaacttagaggtgatgaggcatgatcagattttgggtgtattttgaagtcagcagaatttgctgagggactagtgggctatgaaagagagstgataatgatgactccggttgtttttgcttcaacatcctgaaggatggagttgccatttaccaagacagaggcaattaggtttgggaataggggagactg

SEQ ID NO: 435833 - DNA, 201 bp, Homo sapiens
accttatagtcccagttactcaggaggctgaggtgagaggatggcttgagcccaagacttcaagaccagcctgggaaatacagtgaaattcccgtcacttaaaaaaaaaaaagccaaaatatcattattacaccaaaaaagtttaataatgaatctctaatattttcactaatattatcaacttgttagtattcaaatttc

SEQ ID NO: 435834 - DNA, 201 bp, Homo sapiens
tataaacagttgaatttccaatgtctgtgcattaggggaaagatctagcatggagatttatattttggaatttaatatagatggtatttaaacaatgtctygctcggtcacccaggctggcatgcagtgttgtgatcaccactcactgcagccttgacttctggggctcaatcaatcctcccgcctcagcctcctgagtag

SEQ ID NO: 435835 - DNA, 201 bp, Homo sapiens
ccttatagtcccagttactcaggaggctgaggtgagaggatggcttgagcccaagacttcaagaccagcctgggaaatacagtgaaattcccgtcacttaaaaaaaaaaaagccaaaatatcattattacaccaaaaaagtttaataatgaatctctaatattttcactaatattatcaacttgttagtattcaaatttct

SEQ ID NO: 435836 - DNA, 201 bp, Homo sapiens
aacagttgaatttccaatgtctgtgcattaggggaaagatctagcatggagatttatattttggaatttaatatagatggtatttaaacaatgtctcgctyggtcacccaggctggcatgcagtgttgtgatcaccactcactgcagccttgacttctggggctcaatcaatcctcccgcctcagcctcctgagtagctgg

SEQ ID NO: 435837 - DNA, 201 bp, Homo sapiens
gatagaaagagcttaataaatacatgtttaactcatggcggataatgaagctacatagcaaaatcagagtggagtcatgtcctaaatcatatttacttgawcacttaaaagtattttcatatttattttatgaaaaagtttgttcatagttactgaaatatttaagtattttagagtttctgaagtgttgtgccaaaatga

SEQ ID NO: 435838 - DNA, 201 bp, Homo sapiens
tgtacagcagattgcattaataagtagagtagtcagggtaagcattattgagggaaggtgagatttgagcaaagattcaagtaaaaagttgaaggaattcrttcaggccgtaactgggagaagaacattgtagttgaggaaatgttatagcaaaaaccctagggcagcatgcctggtatgtttgaggaacaggaaaatagg

SEQ ID NO: 435839 - DNA, 201 bp, Homo sapiens
gtagaataagcgaaggacagagtaataggagctgaaatcagaggttaatagagaattatatgtaaggaaggccctgtgaggcattataaggacttcaattkttttttttttttttttggccgggggcgggaggagtgggttggggacagggtcttgctcccaggctagctagagtgcagtgatacagtctcgtctcactat

SEQ ID NO: 435840 - DNA, 201 bp, Homo sapiens
aagttaaaatgaatctgtttttaaacacttctcctaaaccatgagcattaacttgatttcctctgtcatagggatatgggggacaatataacatccatcasagagttcctcctactgggatttcccgttggcccaaggattcagatgctcctctttgggctcttctccctgttctacgtcttcaccctgctggggaacggg

SEQ ID NO: 435841 - DNA, 201 bp, Homo sapiens
atatatgtgcatcctctgtgctatccttcagatccaatcaagggaagttcagaggaaagccttctgcacctgcttctcccacctctgtgtgattggactcktttatggcacagccattatcatgtatgttggacccagatatgggaaccccaaggagcagaagaaatatctcctgctgtttcacagcctctttaatcccat

SEQ ID NO: 435842 - DNA, 201 bp, Homo sapiens
gaacgggaccatactggggctcatctcactggactccagactgcacgcccccatgtacttcttcctctcacacctggcggtcgtcgacatcgcctacgccygcaacacggtgccccggatgctggtgaacctcctgcatccagccaagcccatctcctttgcgggccgcatgatgcagacctttctgttttccacttttgc

SEQ ID NO: 435843 - DNA, 201 bp, Homo sapiens
cagactgcacgcccccatgtacttcttcctctcacacctggcggtcgtcgacatcgcctacgcctgcaacacggtgccccggatgctggtgaacctcctgmatccagccaagcccatctcctttgcgggccgcatgatgcagacctttctgttttccacttttgctgtcacagaatgtctcctcctggtggtgatgtccta

SEQ ID NO: 435844 - DNA, 201 bp, Homo sapiens
tgggctggtgggacccttgtccacaattgtagtttcatatatgtgcatcctctgtgctatccttcagatccaatcaagggaagttcagaggaaagccttcygcacctgcttctcccacctctgtgtgattggactcttttatggcacagccattatcatgtatgttggacccagatatgggaaccccaaggagcagaagaa

SEQ ID NO: 435845 - DNA, 201 bp, Homo sapiens
ttcaccaaagagtgccgaacaagttaaaatgaatctgtttttaaacacttctcctaaaccatgagcattaacttgatttcctctgtcatagggatatgggrgacaatataacatccatcacagagttcctcctactgggatttcccgttggcccaaggattcagatgctcctctttgggctcttctccctgttctacgtct

SEQ ID NO: 435846 - DNA, 201 bp, Homo sapiens
ttcagatgctcctctttgggctcttctccctgttctacgtcttcaccctgctggggaacgggaccatactggggctcatctcactggactccagactgcaygcccccatgtacttcttcctctcacacctggcggtcgtcgacatcgcctacgcctgcaacacggtgccccggatgctggtgaacctcctgcatccagcca

SEQ ID NO: 435847 - DNA, 201 bp, Homo sapiens
ctggaccactggagtccttttatccttgattcatcttgtgttacttctacctttacccttctgtaggccccagaaaatttatcactttttttgtgaaatcktggctgttctcaaacttgcctgtgcagatacccacatcaatgagaacatggtcttggccggagcaatttctgggctggtgggacccttgtccacaattgt

SEQ ID NO: 435848 - DNA, 201 bp, Homo sapiens
aaattatgtagattttgttgttgttgttgttgcagaaatggctccgtaaaatgattagttttgtgcgtgtgtgtgtgcgaacagttacacagttaagttcrttttcctgatagttttcttttgtctttagagagcgaaatgtcatcagtgcagtcacaacaggagcagttgtcccagtcagatccatctccgtcaccaaac

SEQ ID NO: 435849 - DNA, 201 bp, Homo sapiens
attgaaagttttaatgagtatttatttgctttacaaagccatctatgctactggtaaatgttgtttatttttgtctgttttgtttgtttacctgtttcatmgatatttgatagatgtagaaaaaggaggataggccaggtgcattggctcaggcttataatctcagcactttgggaggccaaggtgggaggattgcttgag

SEQ ID NO: 435850 - DNA, 201 bp, Homo sapiens
agcaaaatctgaaatcagtggaatgtcattaaaaacctttccaaattaatcctcacggaagcaaaaaacacattggaattccaaagtatttgtaaaataaraaaggcaacatctcagtaaatataatgtacaaaaattatatgttcctaccagcacacacatcagtaaagaagcttaaatattacaggcaaccctaaatac

SEQ ID NO: 435851 - DNA, 201 bp, Homo sapiens
ttcacaggatctacaaagtttattacagataaagtacagaaataaccaatctacaaagatcattatcataaagaacacgagaaaatgaaaacggagtctgyaggtatctgtgtttgttgtgcaatatcactcaaatgggtacaaatgagtttctcatatcaattccaaatatacacatacccttgtatataaaaaatgata

SEQ ID NO: 435852 - DNA, 201 bp, Homo sapiens
agttttaatgagtatttatttgctttacaaagccatctatgctactggtaaatgttgtttatttttgtctgttttgtttgtttacctgtttcatagatatwtgatagatgtagaaaaaggaggataggccaggtgcattggctcaggcttataatctcagcactttgggaggccaaggtgggaggattgcttgagttcagg

SEQ ID NO: 435853 - DNA, 201 bp, Homo sapiens
ataagaaaactaaggactgaataaatgactttggcatctattctattttccctttttacttacatgtaaattacttttacagcctactgaaggacaggcarttctcatccccctcccgcttcatacatacgtgccacaagcacccaaacttgtcacttatgcaatggactgaccaaaacaaaacaaaaaacagaaatgttt

SEQ ID NO: 435854 - DNA, 201 bp, Homo sapiens
taatttttgtatttttaatagagacggtgtttcaccatattggccaggctggtctcaaactcctgaccttgtgatctgcccgccttggcctcccaaagtgstgggattacaggtgtgagccacccgcctggccgatctttggctctctttctagaaattaaacacattttcttttttacattctttttttttttcttttcc

SEQ ID NO: 435855 - DNA, 201 bp, Homo sapiens
gcttctagccaagtcacagaaactcaaaagagattgactttagtgaatattgatgctttgttattaaagactcaagtctcaagtgatttaggcaaagtaayggttcacaggatctacaaagtttattacagataaagtacagaaataaccaatctacaaagatcattatcataaagaacacgagaaaatgaaaacggagtc

SEQ ID NO: 435856 - DNA, 201 bp, Homo sapiens
ttgtattgcagaatatttttattgctctgatctgttctgtttaagcttatggtgcattaccagccagttgcagggtctgatgattggggttcaacacccayggagcagggtcgaccaagaactgtgaagagaggagttgagaacatctctgttgacattcattgtggtaatgttaatcgtttattttttcttacctttgga

SEQ ID NO: 435857 - DNA, 201 bp, Homo sapiens
tctgtctaggaggaaaggtatggtcatggcctcgttatgagagcagccgtgctgtttctgagatggatagaatccaaccaggcctgggcacaaaaataatyagggtcctcagtgatcactcttttgtagccgagaacttttgtactaggccaaagacatttctgaggtacaaataacccagtgcatttaggcacagggctg

SEQ ID NO: 435858 - DNA, 201 bp, Homo sapiens
gtcacttgagcccaggagtttgagaccacagtgagccatgatcacaccactgcactctagcctgggtgacagagcaagaccctgtctcaaaaaaaaaaaaagacctgtgtacctttggaattaaaatgacttctcatttagacagcacaagcacaatcatgtcatttcaagaatctggtttaaacacactgttgttttatt

SEQ ID NO: 435859 - DNA, 201 bp, Homo sapiens
tacctttctgttctgtaatatttacccaaatagtcaaggctcagacttgttaaactgtggagttactaaagaaggggggattttccaaattgtagaaacargagtagtcagattttcccatccctactagctttctaggttaaattcaatgatgtgaaaacaagcatagggtagagtccatatgatattcatacaggaaga

SEQ ID NO: 435860 - DNA, 201 bp, Homo sapiens
gccctaggaggcggaacccagcgcacagcagcggagtgggcagtgggtccctacaaaggccgtctcggggtggaaaacgcacaggtgcccgcgggaagccsggtcatggggagggaggaaagacgatctttctccacgcacaaacatcggcttggtggggaaatactccgcctccacgtaggggttccggtagagccacat

SEQ ID NO: 435861 - DNA, 201 bp, Homo sapiens
gtgaatcactgcctctggctgcttcagccttccaggaatgaagagccatccaccttgcccttctcagccagccacaggcagctcttctgattcttccctcrcagcagtggcggtccagcccctccctcccctgcacagtgcctgagaaagtttcccaggatttcatctttagctcttactgatccagtttctgaagcttta

SEQ ID NO: 435862 - DNA, 201 bp, Homo sapiens
atttcattggtgtatcacaggcacagtgcatgtatactcatgcacacataaaggacaattttctctttctgcatctataatctgcaacttaaaaatatatmaaataggtcaacattgacgctatggaggtgtgaggagaactccttggcaccagcatgactaaaaccgctttttagaccattaaagaacattcatggccaa

SEQ ID NO: 435863 - DNA, 201 bp, Homo sapiens
ttaaggtgaccaactggataactcttcaatagtgtctctagaatgatctctgtggaaaaggaacaattcttggttatttcttactggctttttttttttttgaaatggagtctcactctgtcgcccaggctgaagtgcagtgacactctgcaaccttcggctcactgcaacctttgcctcctcggttcaagcgattctcct

SEQ ID NO: 435864 - DNA, 201 bp, Homo sapiens
gcaccactgcactccagcctgggtgacagagcgagacctcatctcaaaaaaaaaaaaaaaaaagttatatagtttccagactgtgcttagcagaggtaaaygtagctcttgtttttcctatgtagtttgatcctgtggcctataggattgaaccaatggtggtcccaggagtggaatttgagccaatgctgatcccacatc

SEQ ID NO: 435865 - DNA, 201 bp, Homo sapiens
tcatttgctttttggtttctggaatttgtgtcatactcagaaagatcttccttactttccaaaaaaattcttaccacagtattttttttttttttttttttgagatggaatctcaccctgttgcccaggccagagtgcaatggtgtgatctcggctcactgcaacctctgcctgccaggttcaagtgattctcctgcctca

SEQ ID NO: 435866 - DNA, 201 bp, Homo sapiens
tgaacctgggaggcagaggttgcagtgagcgagatcacggccaccgcagtccagcctgggtgacagagcgagactccatctcaaaaaaaaaaaaaaaaaaagcaagctcaaaggtcctaagaataatttttcccttgaattctgatgaggaattatcatctgatgcaatcactatcgtttgtatataatatatacagtaga

SEQ ID NO: 435867 - DNA, 201 bp, Homo sapiens
atgagtatttatttgctttacaaagccatctatgctactggtaaatgttgtttatttttgtctgttttgtttgtttacctgtttcatagatatttgatagmtgtagaaaaaggaggataggccaggtgcattggctcaggcttataatctcagcactttgggaggccaaggtgggaggattgcttgagttcaggagtttga

SEQ ID NO: 435868 - DNA, 201 bp, Homo sapiens
agggcaaacagcaaatgacactgcagcttcaggaggtgctcaagaggacactgaccgactgctgtggccgttggtgggaaatgctgttcaggcagaaaagmgcccaggtgtcacctggaggactgaggtatggggaagggagtaagcgttgaatgacaaaagaaaaatcagagtgaagataaaggagaaaagaatgagaaa

SEQ ID NO: 435869 - DNA, 201 bp, Homo sapiens
atgatctctgtggaaaaggaacaattcttggttatttcttactggctttttttttttttgaaatggagtctcactctgtcgcccaggctgaagtgcagtgrcactctgcaaccttcggctcactgcaacctttgcctcctcggttcaagcgattctcctgcctcagcctcctgagtagctgggactacagtcgcatgctgc

SEQ ID NO: 435870 - DNA, 201 bp, Homo sapiens
aatatttaaaaaagcacacatttaccattttatttgaatatcaggtttactgaaggaaaaagatacattgaaaatataggaacatacacataaaagacaaygtcatatttaaagtataatcacaataaagagaaagggagctgtaggtcctatggcatccattctgatgacatcccataattgttccttatattccattgt

SEQ ID NO: 435871 - DNA, 201 bp, Homo sapiens
aattgctcaaacccgggaggcggaggttacagtgagccaagattgtgccactggactccagcctgggtgatagagtgagacttgtctcaaaaaaaaaaaaagaaaagaaaagaaaaaagtatgtatagagtggggtgcagaagaatgaactctctaacttgtcacttgtcttttcttcttttataaaacaagaatgattct

SEQ ID NO: 435872 - DNA, 201 bp, Homo sapiens
tttttttttccatttttgtcgtgcctttttctggtttgtgatacattcactcatttaacagatatttagaaaatgcttactataccaagtactggatagaytggtgaataagacatatgatccctgacctcatagtgtttatagtttactggggaagacacatgttaaataatcacacacatcatggcaattacaataagt

SEQ ID NO: 435873 - DNA, 201 bp, Homo sapiens
attttatttgaatatcaggtttactgaaggaaaaagatacattgaaaatataggaacatacacataaaagacaatgtcatatttaaagtataatcacaatmaagagaaagggagctgtaggtcctatggcatccattctgatgacatcccataattgttccttatattccattgtgaagaaggggcagaaaaagattcatc

SEQ ID NO: 435874 - DNA, 201 bp, Homo sapiens
agactatgttgcccacgttggacttgaactcttgggcttaaacaatcctacctacctacctacctcagggtcctgagtagctgggactacaggtgcatgcygtcatgcccagcttctccacataactattttttattctttagggtattaagagaccagccccgcagcctgcttcaggggcaaacatccccaaagaatctg

SEQ ID NO: 435875 - DNA, 201 bp, Homo sapiens
tggtattaaagggttaaagaggtatggtgcatgcaacctgatgatgtatgtagtctgctttctaatgattcagaaaaataaatgtgtgtgtgtgtgtgtgkacacacacagagaatcataaagcaaatgtaattgttaaaaagttgaatctctgtaaaaagtatgtgggagtgtctgtactatgctttctagttttctgta

SEQ ID NO: 435876 - DNA, 201 bp, Homo sapiens
tcagcctcccaaagtgctgcaccgctcctggcccttctttttttacatccttaaaagtattattagcttcagaagtcttctctcctctggaattctcctascatttatttatttatttattttttgcttttttcttttcatgagagttttaccaatatctacttcacatcacataccataaaattcacccttttaaagttt

SEQ ID NO: 435877 - DNA, 201 bp, Homo sapiens
gcaatgtcttttggaatatttcattggtgtatcacaggcacagtgcatgtatactcatgcacacataaaggacaattttctctttctgcatctataatctrcaacttaaaaatatatcaaataggtcaacattgacgctatggaggtgtgaggagaactccttggcaccagcatgactaaaaccgctttttagaccattaa

SEQ ID NO: 435878 - DNA, 201 bp, Homo sapiens
atcattatcataaagaacacgagaaaatgaaaacggagtctgtaggtatctgtgtttgttgtgcaatatcactcaaatgggtacaaatgagtttctcataycaattccaaatatacacatacccttgtatataaaaaatgatattagccagttgtaatactcatttagcatcttgattattagtggcaatataattatctt

SEQ ID NO: 435879 - DNA, 201 bp, Homo sapiens
gtaggggcctggagcccaaaaccttggcgttactaggacagggcatgacccagctgacttggagtaaattttctgcctttaactacatttagattggaaaytagggtaaaatgtttttgttgcaatctagtttcgagcatgtggtcctgtgattctgggtttgttttataacttatggactgagtaaaattacccagttta

SEQ ID NO: 435880 - DNA, 201 bp, Homo sapiens
cctctgtgctaggtgctaggaataaaatgagtgaaatatgcaagcttccatagcctgagtactttgcttaccttgccagtgatgcttgtagtcacatgtgygggacagtgcaatcacagctgcaaaaagtagaggtgacagaaaggcacagaacctccaagatttcccacggccttgtggtgtgaagcagtgtaacttccc

SEQ ID NO: 435881 - DNA, 201 bp, Homo sapiens
tgttttttcctataaatcgacaattgtttgttataaaatgtttaagcttgaaggcttaaaattggaagcagctattaagtgtatttaggtttcctgcttawattatttttccttttttcagagatctgcagcgaataaccctgcccagcattaaccgcctcaggcacttcaccaatgacacaattctggatgtcttcttct

SEQ ID NO: 435882 - DNA, 201 bp, Homo sapiens
accaggttcacatcttgcatcacatcagggaggtggtcccacatgcccagtgactcctggctcagcagctgcccctgccggagaagtgggaggcctgtaatttttttttttttttttttagtaccaggtcagcatgggtttatggaacactggctacagtaaatgtgtgaaacattgtaaatttttttttcccaattttaa

SEQ ID NO: 435883 - DNA, 201 bp, Homo sapiens
ccaggttcacatcttgcatcacatcagggaggtggtcccacatgcccagtgactcctggctcagcagctgcccctgccggagaagtgggaggcctgtaatttttttttttttttttttagtaccaggtcagcatgggtttatggaacactggctacagtaaatgtgtgaaacattgtaaatttttttttcccaattttaat

SEQ ID NO: 435884 - DNA, 201 bp, Homo sapiens
ccagcagatgatacggtctttcttctttgctgccacaagccagaaaagagaggaaatcaggggaaatgctttcattactgcacttcaaggaggcgctgtcrtggagtcagggagggaagtttcccaaagttcactgaactgacactggaagaagctcttgtgggcagccccatccctttgtgacaccgcaacgaaagcact

SEQ ID NO: 435885 - DNA, 201 bp, Homo sapiens
ttaagaagccatctgaagtgggtcagaactgatcatctttttagcactgaatattactgaggaaaaacttacaatattatttggtgctatttttaagactaaggctttcgtggaagaaaaggcaaaaggataccatggagtagaaagattatttgttagtggttaacaattatctcgctcatggtaataatatcataattt

SEQ ID NO: 435886 - DNA, 201 bp, Homo sapiens
ggcagtaaccacttttttcatatatatacagctcaccctctgtatccatgggttccacattggcatattcagctaacaatggattgaaaatatttggggaraaaaaaagcaataaaagtaacactacaacaacaaaaaataataaaaataaaaaaccaggcccagcgtggtggctcacgcctgcaatcccggcattttggg

SEQ ID NO: 435887 - DNA, 201 bp, Homo sapiens
aaagtaacactacaacaacaaaaaataataaaaataaaaaaccaggcccagcgtggtggctcacgcctgcaatcccggcattttgggaggccaaggtgggsgatcacttgaggtcaggaattcaagaccagcctggccaacatggtgaaaccctgtctctactaaaaatacaaaaattagccgggcgtggtggcagctatt

SEQ ID NO: 435888 - DNA, 201 bp, Homo sapiens
taggatcactaggtgctgctatttcaaatctaagtttcattaaaaagtatatctaattgttgaagtatgaacatacttttgttggattatctgggtagtayaggccataaataaataaatatcttttttttttttttttttgagacagtgtctctctctgtcacccagtctgaggtgcagtggcacgatcataactcactg

SEQ ID NO: 435889 - DNA, 201 bp, Homo sapiens
aatcagtatttatcatatgcttttacttttttattttcaaaattatagaaagttgtttcaaagagataaagttgcacttttcatagccaacatgcatagaytgagtgagaatactcataactaggttctctttctttggtcatttcagtctgcaaatacagacctggcaaggtaagaaaaagtagatgaaacaaccaagtt

SEQ ID NO: 435890 - DNA, 201 bp, Homo sapiens
tctattagagatagatgggctgggttttatcagattggattcctaggatatgagatcagaatgaggctgcatgagaacaagtttgtcaccatattcagagscattttaaagtgtgtgccttactgattgctggtgagtcacgtagccttttagtaagcttggcatgttatgatgctgagcgtctttacttccctggttctg

SEQ ID NO: 435891 - DNA, 201 bp, Homo sapiens
caccgcaacgaaagcacttcatcatctcttgccgatcctgctttcatgcagacagcgaggcatcttgtaatgccagttgcctttcctgtttacttcttgckccaggaaaaagtctgagcaattttttaggacattaactattactgttgcatactgatatgcaagattttgttatactttcttgaaaaggcccattatttt

SEQ ID NO: 435892 - DNA, 201 bp, Homo sapiens
cgttttgtaaacattttttgattgccttatttcatcatatgaaagtatcataatttactgaattattcctttgtcgagcatatatgtttccaatattctattttttttttttttttttttttttgagacggagtctccctctgtcgcccaggctggagtgcagtggtgcaatctcagctcactgcaagctccgcctcctgg

SEQ ID NO: 435893 - DNA, 201 bp, Homo sapiens
attttaagtagtcattattaggaatttggaagccctgagaaattggaattattgattgagtttcttcataggaaaccacctaaggaagagagggctgtttstgacccctcatatattgtgctcattgcaaatactagtctgtggttcagctcctgttacctgcccttaactgcctcccacccccaggacccctgcatccag

SEQ ID NO: 435894 - DNA, 201 bp, Homo sapiens
gaatagagatattttcaaagtaaactctcgagctgtgtctatttatatacaacatggagaattgaggaaatttcttcaataattcaaaagcttgagaaaatttttatttatttatttatttatttatttatttatttatttatttatttatttattatttgagacagaacctttctctgtcactcaggctgcagtgcagtg

SEQ ID NO: 435895 - DNA, 201 bp, Homo sapiens
aatagagatattttcaaagtaaactctcgagctgtgtctatttatatacaacatggagaattgaggaaatttcttcaataattcaaaagcttgagaaaatttttatttatttatttatttatttatttatttatttatttatttatttatttattatttgagacagaacctttctctgtcactcaggctgcagtgcagtgg

SEQ ID NO: 435896 - DNA, 201 bp, Homo sapiens
atagagatattttcaaagtaaactctcgagctgtgtctatttatatacaacatggagaattgaggaaatttcttcaataattcaaaagcttgagaaaatttttatttatttatttatttatttatttatttatttatttatttatttatttattatttgagacagaacctttctctgtcactcaggctgcagtgcagtggt

SEQ ID NO: 435897 - DNA, 201 bp, Homo sapiens
gagatattttcaaagtaaactctcgagctgtgtctatttatatacaacatggagaattgaggaaatttcttcaataattcaaaagcttgagaaaatttttatttatttatttatttatttatttatttatttatttatttatttatttattatttgagacagaacctttctctgtcactcaggctgcagtgcagtggtgca

SEQ ID NO: 435898 - DNA, 201 bp, Homo sapiens
aacatatagaatgaatttctgtgcgcctcctaggaaaacaagtattttattctttttttgttttttccatttctagagcagagtgcttttttttttttgcttttttttttctttttttgagacagagtctcactctgttgccaggctggagtgcagtggcgtgatcttagctcattgcaacctctgcctcccgggttcaag

SEQ ID NO: 435899 - DNA, 201 bp, Homo sapiens
agatcaatagaattctatataggggaaatcacctcagctttaatgagctgcaagtctcagtcttggcttgtatttttaattttttcctcttaaaactagawatcaggcaaaaaaatcctattcttttgggggtggattgtactgtgtatttactattactttcattagatcaatgctcagttttaaattgtttttacttct

SEQ ID NO: 435900 - DNA, 201 bp, Homo sapiens
accttctgcccccaccttcagcttcttagttgccagtggttttgaggtgagttgtttgtgttatgtttttcccttcaatgctttcctatgaaagtagcttrctttaactagagttgagcgtggcatttgtccaggagaaacatgtatacacacaggggatgctgacaagtctatgctggccttttcttgtcactgcattac

SEQ ID NO: 435901 - DNA, 201 bp, Homo sapiens
agaatgagatgatacgaagtttttcttttgtgcttcaccttatagctcttattttagttgttaatactattttgcttaagaagcttgatgaacaacattcttggaaaatatgaatagtattttttcattagccagataaaaatatgcagacaatatgagctattttctttacaagaacataaaatacaacacgtcaagtag

SEQ ID NO: 435902 - DNA, 201 bp, Homo sapiens
gcgggggtctccatttccagcaggtcaatgctttactgaaacacacaaagtcattgtcaaggtcagcctctttatgaattttttaaacaaaatgccttgaycacatatcaggtccttcatagaaaggaaaaacagaaaggaatagcttttgcaaaaagatttcttttaaaaggccaaaggcaatgttggtcaagcttcaat

SEQ ID NO: 435903 - DNA, 201 bp, Homo sapiens
tgtttctggagaaagcaattcagcaatttctacagaagacctaaaagaatgtctaaagaaacaattagaattctggttttcacgagaaaatttgtcaaagratctttacttgatctctcaaatggatagtgatcagttcatcccaatttggacagttgttaacatggaagaaataaaaaagttgaccacagaccctgatgt

SEQ ID NO: 435904 - DNA, 201 bp, Homo sapiens
tccatctgtctaataacatctagcctttgcttatttggtggacctgtaataaattatgctaaaccattattattctgacaataataatttccctgtgttgygtggttccatgtgctaaatgtttgctgacttgcactgtcagtgctgctttccattgctgacagagatgatgataaatgaccattgctggagtggcagaag

SEQ ID NO: 435905 - DNA, 201 bp, Homo sapiens
gtcaatcacaaaatagctaaggtgttctcatagactttggttcccatcataataaaattacaaatttagtaaattgcaaaaagaggcactaaagtgatgayaccatatttcaatagtctgtctgatgctcttctaggctctgtgttaaccaaagagtccggtaggcctcacactttggcccagtgagccctggttgttcag

SEQ ID NO: 435906 - DNA, 201 bp, Homo sapiens
aattcaagtcaacagatatttatggaaaacgtggtacgtgctaggtgatgggtgaacatagtaggtgcttcataaatgaccagaggttaattgacagatastaggaatgaatgatgggtgggaatatgaattgtagattcgaaaggagcaaatggaggacccttttcaattggccgttggaaacaaacaagggagcataga

SEQ ID NO: 435907 - DNA, 201 bp, Homo sapiens
ttgatatttacaaggtttatcacttaagactattgaaaatccccaagtttgcagttagcactatataggatgggaaaggtctactaagctttgggatgccrgtgttggctaagctcacttaccagcaaactgacttgtgcatcctcagatcagcctagtatgaatgatccagatttatactcagcacatttatgaatcagt

SEQ ID NO: 435908 - DNA, 201 bp, Homo sapiens
attctgttctctccacacaaatattttcaagtgagatttgaagcactatgcattttatttacatgctaaattctgacatgaagcatgatggccctatttcrgagaaagatggacacatgattaatatgaaaattagggagatgcaagtacctgaactaataaggtagtccttattcaggctggactaccttcagtaatttc

SEQ ID NO: 435909 - DNA, 201 bp, Homo sapiens
ataatcaacaaataaaactaatggtgttttataataggaaaataattttgtgatatatgacaatggcattgcttcataaggacaagaagaaaaattggaartgtacagtagaactagtatgttttactatagagtcttacatatgtattacttgagagtggaaatataacgataacttgctaacctgtactatgactcaca

SEQ ID NO: 435910 - DNA, 201 bp, Homo sapiens
gcttcataaggacaagaagaaaaattggaaatgtacagtagaactagtatgttttactatagagtcttacatatgtattacttgagagtggaaatataacsataacttgctaacctgtactatgactcacaaaacaggctctacctgaccaagctacaattactgactaaacctgaactcttttatcatgagctcattcag

SEQ ID NO: 435911 - DNA, 201 bp, Homo sapiens
aaattggaaatgtacagtagaactagtatgttttactatagagtcttacatatgtattacttgagagtggaaatataacgataacttgctaacctgtactrtgactcacaaaacaggctctacctgaccaagctacaattactgactaaacctgaactcttttatcatgagctcattcagcctcatgtgctcaacccatac

SEQ ID NO: 435912 - DNA, 201 bp, Homo sapiens
aagttgcctgagacaaggttccgatcagtctgaacactcatgctttggagatatcttcctcttgtccttacataatacttttatatttgatagctctagtytaagttatttcttacatgattatgtgctagttggagagaataatttaatttgtccctataggattccctaatgttaaaagatatttcttattcagattgt

SEQ ID NO: 435913 - DNA, 201 bp, Homo sapiens
tccaattatttaaatgaggggatgtgtgtagagatttcattcctccaagatgtggactaagggtgaaaatggctgctcaaagtatagacctggtattagcrttttcctgctggtataattctgcctgtgttacccccttaactgaaacttcccagtgccattggtcatgagcatgaggtcctgctgagagacttgcttcta

SEQ ID NO: 435914 - DNA, 201 bp, Homo sapiens
aggccaagcaaagaaattaacaataaaactggtctttgcaaaactaaacatgaaactacgttgtcatggttaattctacagtgcaggtcaaacaattcttsctgaaaataagctcccaataaaaatttacaagccaatggaggagaccaattaccatggagaagtggacagagacagagaaagaaagaaaaatagaatacc

SEQ ID NO: 435915 - DNA, 201 bp, Homo sapiens
aataagtgatcacagaaaccataaagcactctacaatgaattaatttctcttctccactttaaatatggtaatttgtaaaggtttcatacaagtcattttwttattatacagatctgttttatatagatattgaagagtctgcatgatgtttattttaggacatacacaaaaaatagaacaacattggattacataaggtt

SEQ ID NO: 435916 - DNA, 201 bp, Homo sapiens
gttcaagtttacagtgaactgtggtcattccactgcattccagcttgggtgacagagtgagaccctgtctctaactaaaataggtaggtaggtaggtaggtagatagatagatagataggtagatagatagatagatagatagatagatagatagatagatagatagatagatatgagcatttaaagtctcaaaaggtgtg

SEQ ID NO: 435917 - DNA, 201 bp, Homo sapiens
ttcaagtttacagtgaactgtggtcattccactgcattccagcttgggtgacagagtgagaccctgtctctaactaaaataggtaggtaggtaggtaggtagatagatagatagataggtagatagatagatagatagatagatagatagatagatagatagatagatagatatgagcatttaaagtctcaaaaggtgtga

SEQ ID NO: 435918 - DNA, 201 bp, Homo sapiens
tggaagttcatcaagaatcccagataaactcattttggagaataggatgtctgatgttgttaaaggtgtctacaaagaaaaggataatgaagtgttgagarttagttgcccagtgcctgcagatgagcagacagaatgcacttctgcccagcaactcagtatgagtaccagttctccatgtgcagctgagcctactgcatt

SEQ ID NO: 435919 - DNA, 201 bp, Homo sapiens
ttatagatgatggtaagggctaagcctgtgctcattaatgtgaagcatagagaggcctgtacagagttcagaattttcaatcttcccctcccttctccgtrtattagtaatgctttgtcccttagctgtagaagggcacataattcactggattgaaagcaaagcctcatttggtgatgaatgtagccaccacgcctacct

SEQ ID NO: 435920 - DNA, 201 bp, Homo sapiens
tcaagtttacagtgaactgtggtcattccactgcattccagcttgggtgacagagtgagaccctgtctctaactaaaataggtaggtaggtaggtaggtagatagatagatagataggtagatagatagatagatagatagatagatagatagatagatagatagatagatatgagcatttaaagtctcaaaaggtgtgac

SEQ ID NO: 435921 - DNA, 201 bp, Homo sapiens
caagtttacagtgaactgtggtcattccactgcattccagcttgggtgacagagtgagaccctgtctctaactaaaataggtaggtaggtaggtaggtagatagatagatagataggtagatagatagatagatagatagatagatagatagatagatagatagatagatatgagcatttaaagtctcaaaaggtgtgacg

SEQ ID NO: 435922 - DNA, 201 bp, Homo sapiens
ctgtggtcattccactgcattccagcttgggtgacagagtgagaccctgtctctaactaaaataggtaggtaggtaggtaggtagatagatagatagataggtagatagatagatagatagatagatagatagatagatagatagatagatagatatgagcatttaaagtctcaaaaggtgtgacgaacttgctgcctact

SEQ ID NO: 435923 - DNA, 201 bp, Homo sapiens
tgtggtcattccactgcattccagcttgggtgacagagtgagaccctgtctctaactaaaataggtaggtaggtaggtaggtagatagatagatagataggtagatagatagatagatagatagatagatagatagatagatagatagatagatatgagcatttaaagtctcaaaaggtgtgacgaacttgctgcctactc

SEQ ID NO: 435924 - DNA, 201 bp, Homo sapiens
tattataccatatatctgtagaggcataagtatctcattaaaaataaatttaaaacctagttattgtttatggaagacattggacataatattaggaatcrttgttatttagtatctagtattgaatgagtatttggactcaaccggttctcatagctagttaggcatatttatcctcctgtttccttcaacaagtgtttc

SEQ ID NO: 435925 - DNA, 201 bp, Homo sapiens
gtattgaatgagtatttggactcaaccggttctcatagctagttaggcatatttatcctcctgtttccttcaacaagtgtttcttttaaaagtgatcatcratgtgtttttgcagtggtcctttctataatggagttgggtgaggttttctctgcatttggtgtattatattttactaggctgacaggtactacacctaca

SEQ ID NO: 435926 - DNA, 201 bp, Homo sapiens
tttactatagagtcttacatatgtattacttgagagtggaaatataacgataacttgctaacctgtactatgactcacaaaacaggctctacctgaccaarctacaattactgactaaacctgaactcttttatcatgagctcattcagcctcatgtgctcaacccatactcataaactctgttccagaaactgcctagtt

SEQ ID NO: 435927 - DNA, 201 bp, Homo sapiens
tttcttatttgtctgcagtgcattgtgaacgactgctgttacggaccactagtggactgcatcaagcagtatcctttcccataaaattttaggtgcgcaaytgacgagcttagactcagtggagatgtgtctagctttaacctgacataaagttctgcttcacaaaacacatttcatactcttctattttacattcaatca

SEQ ID NO: 435928 - DNA, 201 bp, Homo sapiens
ggtttctctatcaggtagtagcttgactccagtaaatatgtaagttcaggtgtaagtcttccagggcaaggagattttataggataccctagatcatcacrtcagtgtgaacattgatttagtgttcaatataggtattaatcaaatttgaagaatgaaagtttttattttgttgttattattattgttattttttgaaat

SEQ ID NO: 435929 - DNA, 201 bp, Homo sapiens
gcctttataaatcttttcagttgtgtaatgtgaaaattattaatgtatgattatctagacgtagttgtgtagtatatcatcttctttggatagttaatgasatgttggcttttgtgccatttatcttgggaaaaaagaatagctttctttcacatccacttcttttgccacactttatcttttatttggatgggtttgtat

SEQ ID NO: 435930 - DNA, 201 bp, Homo sapiens
atagaaatggaatcatgtggtagatagccttttgagtttggcttcttttacttagtagagcacatttgtgatttctccatgctgttacttgtattgttgcrgagtagtattcctttatatggatgtatcacagtttgttcatccattattaaaggttgtttatattctttccaatatagatgaagctgctataaaaatttg

SEQ ID NO: 435931 - DNA, 201 bp, Homo sapiens
ctttttatggttttcatcttcattaaatcttgaccaacagcttaaatatctgcagctgtcccctaatatctgttctccccttctttctttaaatcagtgtytggttttacttaggtatgtagtcacctagaataaaaactccagctccccttgcagtaagatgtatccatggggctcatttctggccattggaatgcacat

SEQ ID NO: 435932 - DNA, 201 bp, Homo sapiens
taatgttgaacaaaataacgttatttgaagactttctgtaatgggccctttggcacctgaaacataggacatactacatttgaagtacttgctgaggacayatttattgattgacattttttaatctttcttgtggacattcttagaagcccctagtccaatcagctgttacttataaggttatattttacattataattt

SEQ ID NO: 435933 - DNA, 201 bp, Homo sapiens
atttgttttctaccagtagtcttcagagctttggattcagtttttaaaggtatttagtaggcaagaaaatgttaatggggttgtatggaaaaaagaatgcrtttatctgctacatagaatctttgtgtttgtttattccctgccccattcccatgcaaagcttctaccggcatccagaacaagctttttctttttatggtt

SEQ ID NO: 435934 - DNA, 201 bp, Homo sapiens
atgaaacagtgcaattttactctataaatccaaatgctaattattaacaacagctgtagtaatccattgcatttattcagcacctccatatacattatttygtttgagctaaccactcctctaggaaactgaaagcattttaatggataggaaagcaaaggctcagaaagataaagtgacttgtccaatattaattcatca

SEQ ID NO: 435935 - DNA, 201 bp, Homo sapiens
ttctctttctttggtcatttcagtctgcaaatacagacctggcaaggtaagaaaaagtagatgaaacaaccaagttatcatattttaacttcatttctacraaaaaagaatatttgtattgtatattaaattgaccatagtgccagaactttatgatgttatattacatgatcactaatctattattattgtacacgtatt

SEQ ID NO: 435936 - DNA, 201 bp, Homo sapiens
taatcccagcgctttgggaggccgagatgggaggatcacttgaggccaggagttccagatcagactgggcaacgtagcaaaaccccgtctctaataaaaakccaaaaaattagctgggtgtggtggcatgtgcctttagacccagctactcagctactcctgaggctgaggtgggtgaatcaccacatcaaggtgattgtt

SEQ ID NO: 435937 - DNA, 201 bp, Homo sapiens
agtattcctttatatggatgtatcacagtttgttcatccattattaaaggttgtttatattctttccaatatagatgaagctgctataaaaatttgtgtgwagggctttgtgtggtaaatatctagaagtgcctcaggatagatcatccccataatctaactcaaacctaatttaggtaagatttgggagtttgagatgat

SEQ ID NO: 435938 - DNA, 201 bp, Homo sapiens
cataagaaagatatgtatgactacagtagtaatttttatacatatttaagaaataaaaacaaatatattcctatcttgttaattgaatagtgttttaagtwaatagtgtttgttcttcctgtagatgaagatcagcttcgtgcaaagggttatgacaaaacaccagacttcattttacaagtaccagttggtaagttcttt

SEQ ID NO: 435939 - DNA, 201 bp, Homo sapiens
tgtgaactgaaattgaaagatctccccctgacagtttcagatttatctgattggcaccaaaaattaatacctgaaattgactaaggtgatcctagactcckggtactcccagtatcaagtcagaattctgtctggagaaaacatcatttcagcctttagattttttatgagatagtttttcaaatgcaattgacccttgaa

SEQ ID NO: 435940 - DNA, 201 bp, Homo sapiens
gaatagtaaaagagtatgtaacttttaagttgcaagaggaaaagtagtgaataaacattgaatcaattgaaaagtacgcaagaatggagagaaacattacrtatagtgggtaagacaatagcatttagtgagatgatagatttaaacctgaatatatcagtacttacattgaatgtacctggtttagctacagtcatcaaa

SEQ ID NO: 435941 - DNA, 201 bp, Homo sapiens
tttggctctttaataccaccccatttcctcaaagctcagctttctgtttagttgtggtaagttcatctgtttttatgaagtttactgtttctgagtaaaargtatgactgtgcttttatttattttctgttccatagataagctatagagaaaaaaatgttcttatggcttatggaaaagacaactgacatatgtaacctt

SEQ ID NO: 435942 - DNA, 201 bp, Homo sapiens
gtgtgatcaattttataattgtatggaaataataaaaacaaactgtgatcccctccttaacacacaaaattaattgaaggtaaatcatacacctaaacgtwaaagccgaaactattaatcttctagaaaaatatatgaaaatatctgcatgaatgtgggtaggcaaaaatttcttagacaagacacaaaaagtactaaaac

SEQ ID NO: 435943 - DNA, 201 bp, Homo sapiens
catccttagaacaatactaatactatgtagtcgggtataagaattccagaggtactttattccttccctagttactttaacttttataatttttttttttwaaaaaagctcatttattttccactgagttcagtcctaaagcttaattaacagtatatctccaagctgaattacagcagagaaggttaacctgactctgtg

SEQ ID NO: 435944 - DNA, 201 bp, Homo sapiens
gggcagtaaccacttttttcatatatatacagctcaccctctgtatccatgggttccacattggcatattcagctaacaatggattgaaaatatttggggraaaaaaaagcaataaaagtaacactacaacaacaaaaaataataaaaataaaaaaccaggcccagcgtggtggctcacgcctgcaatcccggcattttgg

SEQ ID NO: 435945 - DNA, 201 bp, Homo sapiens
tcaatctccattcatgcttccttctcttctaactgttctctttatgttggagtgtcccagagctcaacatttcatcctcttctctatttttttggcttggygatttcatctagttttataccatctgcgtgctaatacttccgaaagctatgggtctatactgaacctctccctgaacttcaggacccatatatccagttg

SEQ ID NO: 435946 - DNA, 201 bp, Homo sapiens
aaatacaaaaattagccgggcgtggtggcagctattctggaggctgagacaggacaatagcttgaaccaggaggcggaggttgcagtgagccgagactgcrccactgtactccatcctgggtgacagagcgagactctgtctcaaaaaaaactgcccccctcaaaaaaacacaatacagtattcacaactgtttacacagc

SEQ ID NO: 435947 - DNA, 201 bp, Homo sapiens
ttaaccattactggcaagtatcaaacttcaaaattaattatgcaaatattccaaatgttagcaagtttaaagtaaagcatgagatgatgtcttggatccarctgaaaataagtatgtattctcctattaccattttgattactgaaaattatacaaaaaccatgttattgaatttaaaagatccacagtgttggccatctc

SEQ ID NO: 435948 - DNA, 201 bp, Homo sapiens
tattcacaactgtttacacagcatttacactgtagtaggtattatcagtaatcaagagatgatttaaattataccagagaatgtgcatgggttatatgcartactgtgccattttatgtaagtgacttgaacatccacagattttgatttccatgagggtccggaaaccagtccccccaacagatactgacgttcaattat

SEQ ID NO: 435949 - DNA, 201 bp, Homo sapiens
ttgtaaaataaacaaaaatgttaacaaggaatttagtatgttaagtacagtagcaactggcttgggtcctcagaatggaaatagtcattcaagccagaggragtgggaagacccatgagttgagtcataagaaaagcacaaaggttttctaggtaacctattaaaaggcagaccaaattacctggcatgaaagtggagaag

SEQ ID NO: 435950 - DNA, 201 bp, Homo sapiens
tcacagacttagtcttcttagagctagccaagatctctcatagatataatctaatttcatgagtgaagaaaccaaggcccagggagatttaagtcactcartgttgaacactaatcagtgggttgagtaaaatctttaaaaacagaaatgaattaacatttatggtaggaattgtttgaatttcacaagtacttagtatta

SEQ ID NO: 435951 - DNA, 201 bp, Homo sapiens
cgcatcttactaatctcctggaattgatttttttaaaaaagtccctgtaacttgtcactattcccagcttaaacatggtctgtcaattgtgagattgatgrgcattgtggtacatttcaatcttaggaggggcctgaataagaaatttaaactattaaatagtgttttggaagagagacgtatgatatttgtgcaaaataa

SEQ ID NO: 435952 - DNA, 201 bp, Homo sapiens
tgaaagcaacttgttttgcaaagatgattacactcaagtttgggttcaaaacgtaagaaagcatgcttatagtgaataaaacagctagaagataaaacttrgcagaatatcctgccgttttgtacagacttatgcgtgggtatgcatgtgtttctctctccattccttcctcttctcccacagtggccctctaagtatatt

SEQ ID NO: 435953 - DNA, 201 bp, Homo sapiens
taataaaggatacatgccttgtagaaaagtctccttctttatatgaagaagcatagtgttcttaataacaccaagtaagaagtgatttattgaacttattygttaactctgatctgcttctgtttggggaaacaaataacagccttacatttaaaaagggaaaccctacagatttcccatgaatgaagaagctgtgaaaag

SEQ ID NO: 435954 - DNA, 201 bp, Homo sapiens
gtgcagtactcagagggtcctgttctcatcacatacttcacgtctaccaaccagagctttgtcaccttaaatttgtgctctgttttacgtcgtgggaatarcagttagggttatggaggcccaggaatggaaagatggtgtgagttgcagttgctagcctgttgaagattaaacaaaaatccagccatgtaatatggtgat

SEQ ID NO: 435955 - DNA, 201 bp, Homo sapiens
ttttaatgcaatatcattaatctacagacacattttttgaactttgctagttttttcactgatgtcccttttctaggatcacacgttggatttaattgtartgtcttaagtcatttccaatctgtgacagtttcttactatttctttgtcttttatgattttgacacttttgaagagtactggtcaattttatagaatgtc

SEQ ID NO: 435956 - DNA, 201 bp, Homo sapiens
tttgctagttttttcactgatgtcccttttctaggatcacacgttggatttaattgtagtgtcttaagtcatttccaatctgtgacagtttcttactattkctttgtcttttatgattttgacacttttgaagagtactggtcaattttatagaatgtcctttcctttgtgtttgatgtttattttctcatggttagattg

SEQ ID NO: 435957 - DNA, 201 bp, Homo sapiens
atttcctctgtaaagaccctgtccccaaatacagtcacattttgaagtgctggaatttagggcttcaacatacaaagtttttgggaggtacataacactakgaaagaactttgtggagtaaaacgagggctgtctccgtggtttgggttttggtattttggtttatttaaatacttaaaaatcagattcaaaatcttaacc

SEQ ID NO: 435958 - DNA, 201 bp, Homo sapiens
ttttatagaatgtcctttcctttgtgtttgatgtttattttctcatggttagattgagggtaaacacttttggcaagagtaccctggaagtgatggtgtgrcctacttagtgcattacatcagggtctgtgacttcatatgtcttattattggagacgttaaccttattcacttgattaaggtggtgtctgccttggtttg

SEQ ID NO: 435959 - DNA, 201 bp, Homo sapiens
tgcattaccttctacatgatttgtctttataatttcaatacaactgttttaaaagtaggcagagtaagagtgttcaatctctttttcaactgaattgaccrgtgaattaaccaaaacaacctttaatttagcatgttgggaatttacatgaaagttaagctatatattttagtttgatttagcatctctccataaaaatca

SEQ ID NO: 435960 - DNA, 201 bp, Homo sapiens
cttttgttatttgaatatactatctctcattgtatccagaactgtcttaagattatagtgaatatacataactccccaaaatctatttggttaactaataycaaataagttgttcttatagcactattgtgataatacatatacttttatatcttcttagtattaattctgaaaattagattttaatcgtactatagagat

SEQ ID NO: 435961 - DNA, 201 bp, Homo sapiens
agctaagagagcccagatgggttttatcagtgccctggggtttggtttctttatatgaccaactgggaagctttaacaacctcataattaggaatttccayagtattaagtatggtcatgcttttaatattatccagactatatagatacagaggattgtagttatggtttaatcatcttctgtttctttaaacttgatag

SEQ ID NO: 435962 - DNA, 201 bp, Homo sapiens
acaattctccaaccttcatgaagctttcaacattacagtgggggatgggtttgaggtagccaagtaataggcaaatacaatatgctacgttacatgatagmaagatgtacagggtattcctcgattgcatatgaggagcacttaacttatatggtagtggatcgaagaaggtgacatctgaattgaatcatgagttatcca

SEQ ID NO: 435963 - DNA, 201 bp, Homo sapiens
tgtccaggagaaacatgtatacacacaggggatgctgacaagtctatgctggccttttcttgtcactgcattaccacttggctttgtcttgtctaggtacstgaatggagtggtgaaaaatggagctgccccagtgctcctggacctggccaatgaggtaatgttattgttatgattttatttaaacctgcgtgtaaccta

SEQ ID NO: 435964 - DNA, 201 bp, Homo sapiens
tttcatcatgttggccaggatggtcttgatctcctgaccttgtggtccacctgctttggcctcccaaagtgcttggattacaggcgtgagccaccacgccsggccagcaggctggtttttaaatgtatctagacttgtttgttacaagtttatgctattagtaacttgaggtatctgagctttaactaggaatttagtgat

SEQ ID NO: 435965 - DNA, 201 bp, Homo sapiens
atgcagtagtccctttctagtccgaggttttgctttccaaggtttcagttacctgtggtcaaccaccatctcaaaatataaatgggaaattccagaaataraccactgataagttttaagttgagcaccgttctgaggagcgtgatgaaacctcacagcagcccgctccatcctgcccactcatgagtcatccccttgccc

SEQ ID NO: 435966 - DNA, 201 bp, Homo sapiens
gtactgaatataattttgatgtgtactgtatatcagaatcctataattccaatgctaggattaaatgtcttgcatgaatacactggagaaggacatgagcrtatttagaaacataccaaggaaagggtatttcaagaatgtggctgcttggaaaggaggcgaatgtaaatattgtatgcttgaattacactatgattatgt

SEQ ID NO: 435967 - DNA, 201 bp, Homo sapiens
acaagggagacctaagtatttacaccttctgcccccaccttcagcttcttagttgccagtggttttgaggtgagttgtttgtgttatgtttttcccttcartgctttcctatgaaagtagcttactttaactagagttgagcgtggcatttgtccaggagaaacatgtatacacacaggggatgctgacaagtctatgctg

SEQ ID NO: 435968 - DNA, 201 bp, Homo sapiens
tctgctcctgacatctagacatccacctcatcttggctcggtgacccagggtcatctgaagcagatgatcctcctcctgacctactgtcaggagagcagtrgtagcctaatgctatgccaccaggcctgagtcattcacctcacttcatctcatcatgtggacattttatcatctcaaatcatcacaggaagagagtgagt

SEQ ID NO: 435969 - DNA, 201 bp, Homo sapiens
tctcctgcctcagcctcccaagtagctgggattacaggcgcccaccaccacgcttggctaattttttgtgtttttaatagagacggggtttcaccatgttrgccaggatggtctcgatctcctgacctcgtgatccgcccgccttggcctcccaaagtgctgggattacaggcctgagccaccgcgcccagcctggttaca

SEQ ID NO: 435970 - DNA, 201 bp, Homo sapiens
gaatttaagggcatccaagtacatacgtatttgaaaaaactgttcatacaaatgaagccagcctttttgtctagttactaaatcaagataaaattttggtrtgaatacgggacttgaaaacctgtcaggaaaaattcatggtgataatatatgaggaatgtttgctgtcttccacctaagataaaaagactcgttttaggg

SEQ ID NO: 435971 - DNA, 201 bp, Homo sapiens
tatctgggatgagtctttccctgcatcagccccactttggagatattctttattttcctcacaattgctcagataaatatgttttttcttgtggaagaaartcttttaatttctaaaaaaaaaactcatttaaaataaattgtgctttttttgtaatacattaattctaaaaatctaaaagttccagataaacaaaagtaa

SEQ ID NO: 435972 - DNA, 201 bp, Homo sapiens
agaagctcttgtgggcagccccatccctttgtgacaccgcaacgaaagcacttcatcatctcttgccgatcctgctttcatgcagacagcgaggcatcttstaatgccagttgcctttcctgtttacttcttgcgccaggaaaaagtctgagcaattttttaggacattaactattactgttgcatactgatatgcaagat

SEQ ID NO: 435973 - DNA, 201 bp, Homo sapiens
acactaataaatttaatgggtctaatagcagctgtgactgtggagttccttgtatactgaaatggggttataaacggtgttaagctcacaggctggccccrgaagtctattgcaggcagaatgtggcaattctaggatatcagtaggaccaaccttggtttcctgtcatatctagagagtaaattaaaaatgttcaaactc

SEQ ID NO: 435974 - DNA, 201 bp, Homo sapiens
ctgaagtagttaaggcctacaagatttatttataaaaatggctattctgttctgatttatctacaagtttttgcttaagtgacttatagatgacttttgcygaggcacctctgccccatatgttgttttgttttgtttgtttgtttgtttgtttgttttattatactttaagttctagggtacatgtgcacaacgtgcagg

SEQ ID NO: 435975 - DNA, 201 bp, Homo sapiens
gtgcaggttagttacatacgtatacatgtgccatgttggtgtgctgcacccattaactcgtcatttacattaggtatatctcctaatgctatccctccccmctcccaccaccccacgacaggccccggtgtgtgatgttgcactttctggtccaagtgttttcattgttcaattcccacctaagagtgagaacatgcggtg

SEQ ID NO: 435976 - DNA, 201 bp, Homo sapiens
ttggctgcataaatgtcttcttttgagaagtgtctgttcatatccttcacccactttttgatggggttgtttttttcttgcaaatttgtttgagttgcccygtactttgctggccacactcagtaagagtcaagattacatccagttggcttcataaaacaggactttctaggacagctgtgctttgcttgcacctcatgg

SEQ ID NO: 435977 - DNA, 201 bp, Homo sapiens
acttgtaaagctctttatcatagaaagcaagaaaaaaaatcaatgctgaattacctcaggaatattattgatgacataaatgtcattttctgtttttattrctttttattgtatttagcttgtaattcaaaccactttctaattaatttggtttggctcagttggaaatagaaaaagctaactatctaataggtgacacat

SEQ ID NO: 435978 - DNA, 201 bp, Homo sapiens
cacttgttttcatgttctgttagattacagggcagcaggcctacctttgaagctcctttctcttttgtttctttgccgtgcactccagtaattaactttgkccttcttttatttgttccagtcaatcgcaggccactctgctgagcatcttctcccaggagtaccaggttagaagttttctcctttgtgagggttgacagg

SEQ ID NO: 435979 - DNA, 201 bp, Homo sapiens
atcttggttagatcttacccgtgtggaaaccagaagcctgggtcaggcagcagtgcctatgacaggccctgattagattaggactacatttatcaactacrcagagagcacacttaacctttcaactcaagagtcttgatgtacctttattttaaaacaaaaaggtgaatgttactctgccaaagtcttgatccaatagca

SEQ ID NO: 435980 - DNA, 201 bp, Homo sapiens
ccaagtcctaggatccgtttagctactgcctcaatcagacctcttctctgggcctcactgtcttagtttgatgaataagagagttgggctaaataatccaktgccaacacttgatgcacagacagatccttccactcagctggccttctttccaaactatttgtgggaaaatttgaactagactgtagctgctggagtgct

SEQ ID NO: 435981 - DNA, 201 bp, Homo sapiens
ctcatgactagttccggctcctagaaccttctagtacctcttccctaattcttcattttgagacactccacagtttgcttggtgtgggtttacctttgagttttttttttttttttaactattacaactgcactataaagttactattgttccttttaataaataccttgtggggatatactttgagactatgcaaatttc

SEQ ID NO: 435982 - DNA, 201 bp, Homo sapiens
ttgggagttgcatttgtcaagcagctaggaaaaccattcatgcataccccacatccaaagctccatcggcagcccaaacataaagaactgaaaggtcattyttcttcctgcaatgtgatggcttgttgacgtattttgacacaacggtacaatgctgaaagggtctgaccttcctgcaacaccgagggactcaggtttggt

SEQ ID NO: 435983 - DNA, 201 bp, Homo sapiens
tagctcactgcaaccttgaactcctggtctcaggcgatcttcccacctctgtctcccaaagtgctgagactataggcatgggccaccatggctggcctgcygtattcctaatgcaacaagttctagcaaactggcccatcagtagtggcatagatatacagttaaattcagctgatgttcaataagttacttctatgtaga

SEQ ID NO: 435984 - DNA, 201 bp, Homo sapiens
ttataatggaaaacatagaagcaaggcagaaaatgtgtgtttgcattaaagatgactcggtactgtgagcattaagtgttgcagtagcagcaagttctacrtgttatattagcaaggaaggatggcttccctcacagcttctgtctgctgctatacactgctgcagtcaacaaatgagcaattacctatcagttactagat

SEQ ID NO: 435985 - DNA, 201 bp, Homo sapiens
actatagaggaatacaattgattttgtattttgattttctatactgcaataaaacccatttattaatagtttacatcattggtggaagtgataggattttytacatagacaactatgttgtttataaagactattttacttcactttcaatttgtatgctttttttttttttttttttttttgcttttgcttcatacaaaa

SEQ ID NO: 435986 - DNA, 201 bp, Homo sapiens
agctttaatatatctttggataatgttatttctattttattttttcattagaagtcaccaaattaagatggtaagacctctgagacaaaatttttgtcccrtctctaccccctcccaactgcttacagaatggatcatgtccccccttatgttgaggtaaccatttaattgctttcctgcctccttgaaagaaagaaagaa

SEQ ID NO: 435987 - DNA, 201 bp, Homo sapiens
ttcttctcatccttcaaaaccaaatagaaatttcacctttttagttaaataagccacctccatcactaccattgaaatgtggtagcttttcaagcatttcrgtgtaatattagtagctgtgctctcatactcttaacccacactttcatttgcattagcaaggatactgtaataataagaatgatgcaaagttagaaggac

SEQ ID NO: 435988 - DNA, 201 bp, Homo sapiens
aagtcacttagtttctctgaatacttcatcctcctaaataacagactcgcattttctagaaagcataaagtaccatacaagcataaattggaagaattgtkttggtccacacataaaatacactaacactaataatagctgatgagctttaaaaacaatcacaaaaaaatctcataatgttttaagaaagtttacgaattt

SEQ ID NO: 435989 - DNA, 201 bp, Homo sapiens
acatagtgaatgtccacattcagtgacagcctgtataagtctggtgactgtcagtatccattctctatgcgtaccaaaacaaaccacaagttcaaaaaatsattccagtaaatcaccccttctattcagacttcaaacaaaagaagattgggggtggaggagggaatcagtttgacctcacactcagagtgaagtatctat

SEQ ID NO: 435990 - DNA, 201 bp, Homo sapiens
gttgaggtgaatggcaggacagtgtggtggagcttacactgactggaggtgtattggtgcctatgtggctattggctaaatgggagtccggcacttaaaattttttttttttagcatttcaagaagcttatttatagcaagttgtttggctctttaataccaccccatttcctcaaagctcagctttctgtttagttgtgg

SEQ ID NO: 435991 - DNA, 201 bp, Homo sapiens
cattttttgtattgattgaatgatgtaagtacttcatagttcttaataatattagtaatgatagttttgtttccatttgttcattgctactatagaggaayacaattgattttgtattttgattttctatactgcaataaaacccatttattaatagtttacatcattggtggaagtgataggattttctacatagacaac

SEQ ID NO: 435992 - DNA, 201 bp, Homo sapiens
ttaggtcttttaacatttttctcagaaattgttctgtagttttcagtgcacaaatttcacattttttgtattgattgaatgatgtaagtacttcatagttyttaataatattagtaatgatagttttgtttccatttgttcattgctactatagaggaatacaattgattttgtattttgattttctatactgcaataaaa

SEQ ID NO: 435993 - DNA, 201 bp, Homo sapiens
acctctgtaaccactgatctgctttctgtgactgttgattactttgcttctactattttatgtaaatagaactatgcagcatgtacttctttttgtctagscttttttactcagcataattatttcaggataatatatgttgaatgtaccaatagttcatctttttattgctgagaggcattaagtagcatggctgttcca

SEQ ID NO: 435994 - DNA, 201 bp, Homo sapiens
tcattatcttgaaagagaataggagaaagaaagtttgtgttttgggaatcgaatactttattcctaaagttggtaaatattttactaaacggaatcgatcrtgtcttgaactaaaaacatcagcaaggcatttgccttttatcaaatgaatatcaagttgtttttttggtggtatctctagccctacactctgttattcac

SEQ ID NO: 435995 - DNA, 201 bp, Homo sapiens
atacttgggagatgaatagagcttacacacaagggaagatattgctgtccttcagcagcctgagacccaggcgcctgctgagaaggccatctgacggcatrtcatcagtaactggcctgtcacagtcagcggtgcccaccgaccattgccagtatattaaatgcatttttaatatctgcttcagtacatttaatgaagaaa

SEQ ID NO: 435996 - DNA, 201 bp, Homo sapiens
cctggacctggccaatgaggtaatgttattgttatgattttatttaaacctgcgtgtaacctaaggggcctatctagagtaactttgcttacaattataaytacctttggaaaaaaaaaggatttgaggtgcattagacatttaaattgctccctgatctctttgtacttttagtaattggacaaagaacttcacatatta

SEQ ID NO: 435997 - DNA, 201 bp, Homo sapiens
gaccatgctggcagctaggagagttgattgaaaaggaaactcaaacaaaataattgctaacaaaaaatatatttagtagagtcagtatcttgttgatgtgaaaaaaaaaagctcatttttttttttaaagaagttttggattaaatttttagcccctaattcccttttctcacaagccctctccctaggaggattcgacct

SEQ ID NO: 435998 - DNA, 201 bp, Homo sapiens
aaggatacatgccttgtagaaaagtctccttctttatatgaagaagcatagtgttcttaataacaccaagtaagaagtgatttattgaacttattcgttawctctgatctgcttctgtttggggaaacaaataacagccttacatttaaaaagggaaaccctacagatttcccatgaatgaagaagctgtgaaaagttcat

SEQ ID NO: 435999 - DNA, 201 bp, Homo sapiens
taggagagttgattgaaaaggaaactcaaacaaaataattgctaacaaaaaatatatttagtagagtcagtatcttgttgatgtgaaaaaaaaaagctcatttttttttttaaagaagttttggattaaatttttagcccctaattcccttttctcacaagccctctccctaggaggattcgacctgctggcaaaggaata

SEQ ID NO: 436000 - DNA, 201 bp, Homo sapiens
ctcctgcttagcaatagtgccctgtctaatgtctgtgctggttagaataaaaaatcatgggtgcatcttgggctcagagatctgacaaaggtcatgctatrttgggcatttgaattggaaattgtctggacttagattttataaagctcccactgttgtgtgtggggagaatttcagcagggttttgtccctggagaggcc

SEQ ID NO: 436001 - DNA, 201 bp, Homo sapiens
agatagataattttttaagtcagagtcttgggctctgtcgcctaggctggagtgcagtgacatgatcatggctcactgcagcctcaacctcacacgctccrgtgatgcttctgcctcagcctcctgagtagcctgggaccacaggtgtgcaaccactatgcctggcctagtttttaaaattatttttatggatgggggtct

SEQ ID NO: 436002 - DNA, 201 bp, Homo sapiens
ttaattttttcccttttcgctttgccttttaaagttatacacaaatatatatatttaaagttttacacaaatctctgtgtgtgtgtatgtatgtgtgtatdtagatagatagatagatagatagatagatagatagatagataattttttaagtcagagtcttgggctctgtcgcctaggctggagtgcagtgacatgatc

SEQ ID NO: 436003 - DNA, 201 bp, Homo sapiens
tgttctcaagggatcctcctaccttggcctcccaaagttttgggattataggcgtgagccaccgcacctggcctattatatcttgatcatatcatctaagytgacaatttgataggggtgatgttagtaaagtgctaaaaataaaaacttgtataaaccagtaaaaatgttacttaaaaaataactataattgtaaagaat

SEQ ID NO: 436004 - DNA, 201 bp, Homo sapiens
taggaccagaagatctgagttaccaaatatatgatgtttctggagaaagcaattcagcaatttctacagaagacctaaaagaatgtctaaagaaacaattrgaattctggttttcacgagaaaatttgtcaaagaatctttacttgatctctcaaatggatagtgatcagttcatcccaatttggacagttgttaacatgg

SEQ ID NO: 436005 - DNA, 201 bp, Homo sapiens
aacaataacaaatgtggtgagcttgctgagcacttgtgtactgcatctttattgtcatgcgtttgtatgattatcatagatttatgaatttttattttacmgtaatttgtattcattcatttattcacttattcattcatttatttaccaacccgcttattccagtttaggattctgagtggcctctggcagctcaggctg

SEQ ID NO: 436006 - DNA, 201 bp, Homo sapiens
atgctgagaggtgaaaatgtagcttaattttttctccagcttaatttttcctcttactgtgacttctggggtagcctcacttcttcatggcttgttttgaytgaagttacaaaattatgttttttcaagtcactgtgttttacgtggtctcagaatccttcactttaaaatgaaggagtaggactttgtgatctgtaatat

SEQ ID NO: 436007 - DNA, 201 bp, Homo sapiens
aaaaattgtactagtccttttactagcagagcgtgagagtctctgtctctgcaacttttccagtattgagaagagtcattatttaatctttaatatgttcratcaagaatgacatcttgtagttagcattttaaaaattattataggttgtacctttttccaaatttttttgaccacttaattttcctttgaattacctgt

SEQ ID NO: 436008 - DNA, 201 bp, Homo sapiens
acccagttgtcatttgtaccctaattatgttatggggctatcatgaaatgtagagagaactggcctgagatctgttataaaaaaaaattgcaaaaggttgwggagagataagagattatattcaagtgcagagttaagaatcatccctgggccttctgataaaggcagattaatattataagccccacacaccctaaaata

SEQ ID NO: 436009 - DNA, 201 bp, Homo sapiens
ttaagaatcatccctgggccttctgataaaggcagattaatattataagccccacacaccctaaaatatgtagctaatattgaatatgcctttggttagcrcattacatttattaccccagaggtagtttatatcagtcagggttctccagagaaacaaaccaattggacatatgtgtacatatattgagagatttatttt

SEQ ID NO: 436010 - DNA, 201 bp, Homo sapiens
agccgcctagaaactcaagcaggatttctgtgttaaagtcctgaggcagaattccttcttttctgggaaacctcagattttgctcttcaaggccttcaacygttggatgaaccccacccacgttacagagggtactttgctttactgaaattgattatggatgttaatcgcatctgcaaaataccttcacagcaacatctg

SEQ ID NO: 436011 - DNA, 201 bp, Homo sapiens
tactgacaatgaaacgtgaagctgaaaaaggtttattaagtaccttcctcaaggtgacaccattctttcctattctttcatggttgggccaagcagtcagmcttagaaacccagctctcaacctaaaatgcttagctgcctgccaaaaacgcaacgagccctgggggaaggtgtttgctctaaagtctaagaacctgtgcg

SEQ ID NO: 436012 - DNA, 201 bp, Homo sapiens
gggtacccaccggcaattttaaaaagctctttttgctctattgggcccttatgaaatgaacctacagggtcaaatggacgatgtcaagacataacccattytcttttctctcccccatctcttttcccttgattatttctcccctttcagccttgtttttcttccccactcagcttgcttcattttccttttctatttctc

SEQ ID NO: 436013 - DNA, 201 bp, Homo sapiens
caaaacctttttgagttgcaggaatatctgttgcctcacaagtgaaacaagtccattttcttgagcactgaggtgttccccagcctggcttttctgcctakaaaatgccattttcgtaaagagctgtcatgcttcgtgtcctttggcttatgatttagctgttcaaagaaagtgcaggctgctctcacttgctcagtgctg

SEQ ID NO: 436014 - DNA, 201 bp, Homo sapiens
gtcctatgaaacagactgcttttctgagtggggtgtggtagccagtctcgtttatgatgtggtcatactgagtagcagtggcatttccctccctcccttcwtctaaagttcaaatgagttttctctcttcaatctagaactcccatagtcatttacgtttagaatgattccaaatggagagtgagtctcaatttcctgtgc

SEQ ID NO: 436015 - DNA, 201 bp, Homo sapiens
tactttttgagaagctatatggaggtcataaacatagacttgacagggatcttgttgttatcttatttgccactcattaactatatgccctgtgcaggttccttctaggcctcggttttctcatctataaaataaggattgtaattatgaggataaaataacatcctaaaggcacttaacacagtgcctaccacatagtaa

SEQ ID NO: 436016 - DNA, 201 bp, Homo sapiens
aaaactgacatccgccactcacacatgcaagttgaggagttccaaaattgcagaccattttcttgagctaattatgttcaatcctttagagtaaacaaatwtagaaacattttaaataaagtttaatcagattatggtaaacactttggaaaagaaggtgggcattgagtcaatatatatactctaaatcttctgcgacct

SEQ ID NO: 436017 - DNA, 201 bp, Homo sapiens
taaaatatgctccctcaaaagtaattattttcatttcttttgccagaattatgggttgcttttccatctacttcctaaatgtggtgatacttaaattgaartaagtagccagataaactttttagcgtgaaactattgacatcaaacttagagttattccctgtgtagataggtggatcccaactcatatactggggtttt

SEQ ID NO: 436018 - DNA, 201 bp, Homo sapiens
ttaaattgtatagaaaaggctgtgaaacttactcttagagaacataaaaatatagagaatgaaggtcataactccaaatattgagtgatacagtgttttgaaaaaaaaaaaaccagaataaaacaaaattagttactagagtagaaaaaatttagttttaatatgtattgatacatgtctttttgccctcccccaatttag

SEQ ID NO: 436019 - DNA, 201 bp, Homo sapiens
ggtaaacactttggaaaagaaggtgggcattgagtcaatatatatactctaaatcttctgcgaccttcctagtttttcaagatgtatattttgttaaaaamttaatgggtgaaggaagtctgaaaaaaaggttggtcaacaggtacaaagttaccatgacataggaggaataatttctggtgttctgttgcacattaggga

SEQ ID NO: 436020 - DNA, 201 bp, Homo sapiens
tagctagaagagaggcttaagacaaagtccagacatcacaccgtgagtctcaaaggcttcctcttaaaattatgccccacacatgatgtccttcctcctcrtgaaagttattatttccatcctcttctgaaatgtctgttcttgtgctggaaggtttgagagcagcaactgactatctaaaggcattaaagtaaagaatct

SEQ ID NO: 436021 - DNA, 201 bp, Homo sapiens
acatgacccagagtatttgggtttcaagaaagaggatcaccctcaggcgaaggcctcctttgtacttgataggattgggctttctaccagtgtagcatccyatcgggcccaccaagcaccttggtctgctataccgtgcccttccctccggtcctcatcagccccattcccactccacctttaagctgtgtcatgcatggc

SEQ ID NO: 436022 - DNA, 201 bp, Homo sapiens
atttgttgaaattctgaataagtgaactaaccacctatttcaagaggcttccaaatgtgtagctatttaatgtacattggtgggtttaatgaaatgaagaragactgagaaggaaacttatacaaaattatcatgggttggttgagtgaatctaggtatacctgcatctcttttgagatgaaatgtccatacctcataaaa

SEQ ID NO: 436023 - DNA, 201 bp, Homo sapiens
aaattatattgagaatcttttcttatgtttatttgctgcctgttttcttggaaaagtttctcttgaaatctttgcttcattagttaattgagttgctttcttattattgagttttggtagggcatttttattttatattttagtattctggatataagcttcttgcatgtagaaatggttctagaacccttttttgagaag

SEQ ID NO: 436024 - DNA, 201 bp, Homo sapiens
ccaggtccatgctgtcagtccctcccgtgttatcttaagcaagtcacttgacctcagagagcctcaatttcttcagctatcctatcagaataatgcatttytgggggattagataaattactgtacactttgtggaagtattttaagaactgtgaagcattcctctcctcatcacttgaagaatagaaccagagttcacta

SEQ ID NO: 436025 - DNA, 201 bp, Homo sapiens
ctccttctttatatgaagaagcatagtgttcttaataacaccaagtaagaagtgatttattgaacttattcgttaactctgatctgcttctgtttggggaracaaataacagccttacatttaaaaagggaaaccctacagatttcccatgaatgaagaagctgtgaaaagttcataatagttgcagagagcataccaaaa

SEQ ID NO: 436026 - DNA, 201 bp, Homo sapiens
cttttatttcacatttaagcatttttatcagattatagtaagtaaatttattcaagatgaactctacaaaaaatagtttatatgttcttagagattatgtrttttgtattgggtacatctctgttattgtcatcaggatatatttaaatatatattaaaattagatatgtatgttaaaattgcatgtattaaatattatgt

SEQ ID NO: 436027 - DNA, 201 bp, Homo sapiens
tacattaaaagccgcacaaccgacatacagaaactgtaagattctcattttcttaaaggagcactattgaaaatggtgcaaagatcattttgtagagtttktatgttatggaaaagtagagctgtgaagaacacagatgcctgctgaacctaggaatgacataggcattgtagagatggcagttgtggttcaatgagtgca

SEQ ID NO: 436028 - DNA, 201 bp, Homo sapiens
tccattaaatatttagctgacctcagtttcagtcttctagtaatatggaaaaatttaacctaccaacacattttctcctacatcaataaaccttttatttrccatgaatatatagcagtatttagccaagagaaaacgtagttgtttaaagacttttcctccgttttggctacagactagtacagaaagaatagcactttt

SEQ ID NO: 436029 - DNA, 201 bp, Homo sapiens
tcttatgtttatttgctgcctgttttcttggaaaagtttctcttgaaatctttgcttcattagttaattgagttgctttcttattattgagttttggtagkgcatttttattttatattttagtattctggatataagcttcttgcatgtagaaatggttctagaacccttttttgagaagactcttttttctccacctaa

SEQ ID NO: 436030 - DNA, 201 bp, Homo sapiens
tcttctagtaatatggaaaaatttaacctaccaacacattttctcctacatcaataaaccttttatttaccatgaatatatagcagtatttagccaagagraaacgtagttgtttaaagacttttcctccgttttggctacagactagtacagaaagaatagcacttttctatgaaattgataatgcattagggaaattta

SEQ ID NO: 436031 - DNA, 201 bp, Homo sapiens
ttcgtgtcctctgcctttccacagctaccagttgcctacctagcctctccacactgtcccagcttcttcacctccccttttttttctataaggcacttcarttttcactagtattatcccctaaagacataagcaaaggacaaggtcagagcagtcagttgtattccttgttagtggctttgataagaggctttgggggaa

SEQ ID NO: 436032 - DNA, 201 bp, Homo sapiens
taaggatctgtaagagaagcacagtctgtgggccttgttccagcaaacaaagccacaaagggagtcctgcaaattaaggaggatggcaaatccatttcttaaaaaaaaaaaaaatagttctcgaggggaaaaatataaaatacctaagtttcaaaagccagacgagttccacaatcattgctttccaccgtagggtatcca

SEQ ID NO: 436033 - DNA, 201 bp, Homo sapiens
gccggacaggataacatacaggacagcagaataaaaaatctccctctccctgcagaaaattaactacaggctagggttttgctcaccataaccaaaggcaytgggggtcaaacacgttactgtgattgctgaattgaatcctttggtcctgtgcatgggtgcactggctcacactcacccatgtgcacatctgtctgtgta

SEQ ID NO: 436034 - DNA, 201 bp, Homo sapiens
ctgatccagtgagaatccagtgagaatgcatctcacttagtaggtgctcacatgattgtctcgataatgaaaataaaaactcaaggctgttaggttacttycattaaacctttcaaagaaaggtacaaattatactcaacatcaatcactatcctttatgaatgaagaaaatgctgctgcctcatgagctgctttttcctg

SEQ ID NO: 436035 - DNA, 201 bp, Homo sapiens
gggttattattattaggaccaaggcgcagttttttgataaaactctacttaaacatcttagggctgtaagtagagagaaatttaacaaatttaactcttaratttgcagaactgataaaatcatagaacttttaagatgaaccggattctaaagaagttaccaatcagtttacagacggtggaattgagacctacaaatat

SEQ ID NO: 436036 - DNA, 201 bp, Homo sapiens
gaagactctgttgtgattttggtagcatttttattaaaattatagattaatatgtggagaactgacaattttatttacactatcattccacccatgatactttttttttttttttctttcctgagacagagtctcactctgtcacccaggctggattgcagtggtgggatcttagctaacagcaacctctgtctcccgggt

SEQ ID NO: 436037 - DNA, 201 bp, Homo sapiens
ctcacacgctccggtgatgcttctgcctcagcctcctgagtagcctgggaccacaggtgtgcaaccactatgcctggcctagtttttaaaattatttttayggatgggggtctccctttgttatccaggctggtcataaactcctgttctcaagggatcctcctaccttggcctcccaaagttttgggattataggcgtga

SEQ ID NO: 436038 - DNA, 201 bp, Homo sapiens
tcctaccttggcctcccaaagttttgggattataggcgtgagccaccgcacctggcctattatatcttgatcatatcatctaagttgacaatttgataggrgtgatgttagtaaagtgctaaaaataaaaacttgtataaaccagtaaaaatgttacttaaaaaataactataattgtaaagaatcagggatctatcaact

SEQ ID NO: 436039 - DNA, 201 bp, Homo sapiens
tgactaatgatgttgggaatctttttatgtgtttattggctgtttgtatattttctttgaagaaatgtctatctacattctttgttcattttctaattggkttgtcattttattattgagctgtaagagttatttacatattctagatacaagccttatatacgtgatttgcaagtatttttttctagtctgttggttctc

SEQ ID NO: 436040 - DNA, 201 bp, Homo sapiens
agtaaagtgctaaaaataaaaacttgtataaaccagtaaaaatgttacttaaaaaataactataattgtaaagaatcagggatctatcaacttaaaatgaraaaacttaaagggctgggtgtggtggctcacacctgtaatcccagcactttaaaggggggaccgagacaggaggatcgcttgaagccaggagtttgagaa

SEQ ID NO: 436041 - DNA, 201 bp, Homo sapiens
atcatctgtttagactaaataagggccacataaatccaagcttgaaatctgaaaccttgtagcctcaccaccaataataaacttgtgagatttctttcttrtcttcttaggggtgaccacatgatgagcctcaatctacttccatgtgaaaacccccagatacttaaagacaatattaagaaaatattgacacctttttaa

SEQ ID NO: 436042 - DNA, 201 bp, Homo sapiens
ggctcctagaaccttctagtacctcttccctaattcttcattttgagacactccacagtttgcttggtgtgggtttacctttgagtttttttttttttttwaactattacaactgcactataaagttactattgttccttttaataaataccttgtggggatatactttgagactatgcaaatttcttgtttctcgtcacc

SEQ ID NO: 436043 - DNA, 201 bp, Homo sapiens
cttccatgtctggggttttgttttgtttggggattttggggagttgtgtgtttttttccagtggagtgagaggataatgagagctggaggttcttccacawatctagggcagataaggtgatggcttgtattgcctgtcacaggtgtgctgacccactgatgacatgtctgttccatcgttttcttaataaggtgtcaagc

SEQ ID NO: 436044 - DNA, 201 bp, Homo sapiens
tcccctcctgttacttcagataacccagaaattgattatataaagttgcttaatgtggtcagcctcttcataaacaggtaggttgctgaaagattatctcrtcagcatctgataatctctggatcctgagctgttgaagaaggctcagaaatgcactaaagtaggtgctgggaataaggccagatcttgttctgccattaa

SEQ ID NO: 436045 - DNA, 201 bp, Homo sapiens
cctgagctgttgaagaaggctcagaaatgcactaaagtaggtgctgggaataaggccagatcttgttctgccattaaatttccaaacttgtcaccctctaragtccttactgcttttgtcacccaaagaccacataatttgaaagcgtatcaatctctatttacaaagggacattgtgtttcctcattcttaattaattag

SEQ ID NO: 436046 - DNA, 201 bp, Homo sapiens
ggaataaggccagatcttgttctgccattaaatttccaaacttgtcaccctctagagtccttactgcttttgtcacccaaagaccacataatttgaaagcstatcaatctctatttacaaagggacattgtgtttcctcattcttaattaattagagacatattgtcaatcagaggttttgagctacattgacagaggtaa

SEQ ID NO: 436047 - DNA, 201 bp, Homo sapiens
atggtgtggtacctatgtaaagataaacatacaactcagtggaacagattagaaagtcccaaaatagattctcagatatttaacctcccagaggcaccaaygtgtgtgatcaattttataattgtatggaaataataaaaacaaactgtgatcccctccttaacacacaaaattaattgaaggtaaatcatacacctaaac

SEQ ID NO: 436048 - DNA, 201 bp, Homo sapiens
acaacagaaatttgttctcttgttgaaatgttgtcattttcttaattttaatatttaattactggattattttgttaccttttatttcacatttaagcatktttatcagattatagtaagtaaatttattcaagatgaactctacaaaaaatagtttatatgttcttagagattatgtattttgtattgggtacatctctg

SEQ ID NO: 436049 - DNA, 201 bp, Homo sapiens
cattgcaattaagtctgtgctcagctctcctcttaatctgtgctacactctcccaactctttgaggctctttcatgttaccgagtatcttagctgggtggrcttgggagcacatttagttaaatatcacatgaggaactagtttgttgcctgtttttatatcaggcatttgaaaaacgttgaatgcaatataacatgagaa

SEQ ID NO: 436050 - DNA, 201 bp, Homo sapiens
taaaatttaaaaactgtatatagtcttattgcacttttaaaatttaaagttgatctttgcattattcatacacattatttctaattggtagactgtaagadaagtgaagattctatattatgcttttatcatatcaaatttatatatgtgatcttaatatatacttgctacacactttaataattgtgttgtttaataatt

SEQ ID NO: 436051 - DNA, 201 bp, Homo sapiens
ggtcccggctctgtcaggtgaggaagagcaggtgtaagcagattagttctgccagagtaaccctttggagtcatcttctctgggatggcactggggaaaartatcagcactttttatttctagtgggaagataaatttaagaggagtaaattggaaaatcaaatgagggctttagcagccggggagatttgcagagctgtc

SEQ ID NO: 436052 - DNA, 201 bp, Homo sapiens
ccgtatatatttctcttaaccttaccatgatctggcctgttaggtgagaatacgctgtctaataaaggctccttaataagcgtatgcttgtggtgttggarcctgcaatgatgcagagatgttcaagtgttattatttactgcagtgtttgcgcaggacggcgaatcctctgctgcaaatggcattacagctgtgatgaat

SEQ ID NO: 436053 - DNA, 201 bp, Homo sapiens
ttgcagtgagccgagactgcaccactgtactccatcctgggtgacagagcgagactctgtctcaaaaaaaactgcccccctcaaaaaaacacaatacagtrttcacaactgtttacacagcatttacactgtagtaggtattatcagtaatcaagagatgatttaaattataccagagaatgtgcatgggttatatgcaat

SEQ ID NO: 436054 - DNA, 201 bp, Homo sapiens
aacctatctaaaacaaaataaaaccaaaaaaaaacacgaggctgtctgtaaacccattgacttaaacattttattcttcattctaaagacattttttgtcttttttttttttttcttaaaaagtctctgaaaattttggttttctatttccctgaaatttactagaccttcatgaaatgcatcaccagatgactgactttg

SEQ ID NO: 436055 - DNA, 201 bp, Homo sapiens
ttgaatgtcaaataaaatattaaaagtaatcagagataaaaagacaaattacatatatagggattagttttagactgacattagagtgcttataagtaacrgtagatcccgagagagtagaatctccagagttgaattaaaatgacccttagcctgtaattgtatactatgttttattattattcaagagtgagaactaag

SEQ ID NO: 436056 - DNA, 201 bp, Homo sapiens
aaataaaatattaaaagtaatcagagataaaaagacaaattacatatatagggattagttttagactgacattagagtgcttataagtaacggtagatccygagagagtagaatctccagagttgaattaaaatgacccttagcctgtaattgtatactatgttttattattattcaagagtgagaactaagtacagatat

SEQ ID NO: 436057 - DNA, 201 bp, Homo sapiens
tctattattgtaaataaaactgtgataaacatcttgatgcatgagtctgcttttgaattagtttcttaatatttctatatatgtaattattggtgcaaacmatgtgaacattttaaaaaagtattacatattgccaaactactgtctagaaatgttttgctggttgcatatgttgaacagggtggatctgctgtaaatgta

SEQ ID NO: 436058 - DNA, 201 bp, Homo sapiens
ttttgtttgttttccagcagattagaataaagccaaattgtatttgttatatcaaaatatatttaagcaatttgaaaatgttaatggcaatttaatttaatttttttcttttataaagtaatactcagctattgtgaaaattaagcatatttgtgatagtatttttttttttttttttgagacggagtctcactctgtcgc

SEQ ID NO: 436059 - DNA, 201 bp, Homo sapiens
ccacaatcttgttttaaaatatatggttgctgactggcacatttggcagtaggtttttgtttttgtttttgttttcaaatcatatatctaatttcagtgtrgagattatttttcaactccctgtttctctcatatttcatatgttggtgttttaacacaaaatagtgaactttaaagcccatagttgcttagaactgacaa

SEQ ID NO: 436060 - DNA, 201 bp, Homo sapiens
cacttgtccttgcccacctccatgcactgggtgtacatcacctctatggccttgttccacttggtgaggcagttgccatagctgctgaggtcgaagcctgkgtagtgaccttgcaatagtgaccttgcatgtgatcaaggagtgcatggagacatggctgtcctgagccataagcaggaacttggagctggagaacaggtg

SEQ ID NO: 436061 - DNA, 201 bp, Homo sapiens
gtgtagtcagagtgtgaccaccatccatcacctcaatagcagacatcagatttgttcatcacttggtttccaaggtctaataatccctcaagaatttagastgttgttgactgtccccatttacatcagtgaaggctttgcaacaggtgcagctgtgtatactaattgcagggtgtgcctaatctgtccagaagggagagt

SEQ ID NO: 436062 - DNA, 201 bp, Homo sapiens
aaacactatttcatgatcagtaattatatatctggttttaaagctgtttcaacaaaatgttattggaagacagattttctgctacagatgttaaaaccttyggaatatgtggggctgaaaggaccagttcgggtgtgatcttaaaattgggcagcttgccttctgcttcaatgcttggttccaccctgaagaggggagtta

SEQ ID NO: 436063 - DNA, 201 bp, Homo sapiens
aaatcctttattgtatttatctgtgtttctagacgtggtggccaccctgtattttggtgagatgtgagatgtgactgtgaagttggttttcttgtgtaackggtaaagtggttctaaagtgattcttaaagataagttgggctgggcgcagtggctcacgcctgtaatcccagcactttgggaggccgaggcgggcagatc

SEQ ID NO: 436064 - DNA, 201 bp, Homo sapiens
cctttacctggaagttcatcaagaatcccagataaactcattttggagaataggatgtctgatgttgttaaaggtgtctacaaagaaaaggataatgaagwgttgagagttagttgcccagtgcctgcagatgagcagacagaatgcacttctgcccagcaactcagtatgagtaccagttctccatgtgcagctgagcct

SEQ ID NO: 436065 - DNA, 201 bp, Homo sapiens
ctgatatatgcccctaagcttattacatcactaaataaaataaaatgtatgtgcctatgacagagttatttttataattgtttatccctttaagtgccctrttcggtgattcactgaaaggttcataatggttggcttgtaaccagaaaataatctcagaaaggtaaaatacattgcttgtttggaaataaaatgccagag

SEQ ID NO: 436066 - DNA, 201 bp, Homo sapiens
cctggtagctaataagtgttcccccagtgttaccatcttcattatcatgatcatcatgacagtaggtatttattgagcacctactctttattagagttcarcagaaatggggaaaagttacaaataggtattctagcaaaatttagtatataacaaagcctaattgtattgtgcatagtcttaatgacagctccatctctg

SEQ ID NO: 436067 - DNA, 201 bp, Homo sapiens
aaacattctttgagagaactactaaagaaatcatcatgcctatgtcctgaatggtattgcctaggttttcttctagggtttttatggttttaggtctaacrtttaagtctttaatccatcttgaattgatttttgtataaggtgtaaggaagggatccagtttcagctttctacatatggctagccagttttcccagcacc

SEQ ID NO: 436068 - DNA, 201 bp, Homo sapiens
tgggtccacagcacaggcagtcacttcctagaggaactttctctgttgcactaaaaagtggtgggttgcaagaagagaaaagacattttgttgaggttaaratgaatgtggactcaatgtatactttttgctgttattccatttaaaacaactgacttcctctggcaagtttcctttcatttgaatagtgtttattcaaca

SEQ ID NO: 436069 - DNA, 201 bp, Homo sapiens
atcccaagctcacctttttattaaaccaaagtgaaattgtacttctatattcagtataaaattaatgatagtgttagaaactgtaggagtaccaaccttaygttgctaacactgagaaagtttagcacattcatatatcaactaacaccatctcagagtatctggggttgaattacatgttaattttaaagcacataaaat

SEQ ID NO: 436070 - DNA, 201 bp, Homo sapiens
aactacagattttataagttttattttctagactttgcatttcatatatgtttatatcaagcaaagcataattaagaaacatatctttccaaaatttcaamttggtgattgcttttgtcatgcaaaataaaacaggctgggaagtttacagagaaactgatgttgtctctgcattgaagtagtagcagtttcatataatgt

SEQ ID NO: 436071 - DNA, 201 bp, Homo sapiens
atcagaatcagcttctctggtaagccaaggagtgacgtgaccaggttgacgttatcagtgaaaaggacaatgaaggtaatgattcacataattattaccaratgcaaatgcttttgagtcagttgaaatactagactaggataacactccttttcagactttgggcaatctcatctgtttggaaaatacacagcacttcca

SEQ ID NO: 436072 - DNA, 201 bp, Homo sapiens
actaggataacactccttttcagactttgggcaatctcatctgtttggaaaatacacagcacttccatgttctgctcctgatttcattatttaccagccaygggaccttcagcaaattccccagcctccctgaactttactttccttaattgtaaaaatgtgactaaaaggctgggtgcagtggctcacacctgtaatttc

SEQ ID NO: 436073 - DNA, 201 bp, Homo sapiens
atagagaatgaaggtcataactccaaatattgagtgatacagtgttttgaaaaaaaaaaaaccagaataaaacaaaattagttactagagtagaaaaaatwtagttttaatatgtattgatacatgtctttttgccctcccccaatttagtaaagatgcactaggtgttaataatattcttcttatcatacagtgtatttt

SEQ ID NO: 436074 - DNA, 201 bp, Homo sapiens
ttcttatacccctataaagaactacctgaggctgggtaatttataaagaaaagtttaattgactcacagttccacaggttatacagaaggcatgactgggkaggcttccagaaacttacaatcatggtggaagggcaaagcagaagcaagcacatcttcacatggcagcaggagagagcaaacggggaagtgctacacatt

SEQ ID NO: 436075 - DNA, 201 bp, Homo sapiens
cccccaatttagtaaagatgcactaggtgttaataatattcttcttatcatacagtgtattttaatctagcattttagaaaactttttacaagttcatagrtaaaagccctgtcagaatgtgacttttcattttcagatgttgtgaactggatttctgcatgatttttatggaaatgactatacttttaaaatgtaaaact

SEQ ID NO: 436076 - DNA, 201 bp, Homo sapiens
tttttttctagtctgttggttctcttttttattttatttatggtgtccttgagttattcttttttaaggatcttacttccagaaggaaggtacagaagatmaatatagagatatctgtaacctttctatgaggagaattttatcactctttagtgaagttcttattgttcaatacactattttagtaaaagttgtttttct

SEQ ID NO: 436077 - DNA, 201 bp, Homo sapiens
cctcagcctcccagaatgttgtgatcacaggtgtgagccaccatgcctaaccataactctgtatttagtatgttgagaaacaaactgttttccaaagcggytacaccattttgcaatctcaccagcaatatatgagggttccaatttctctacatctttgtagcctcaaaactacagtctcttggacattctgctccctag

SEQ ID NO: 436078 - DNA, 201 bp, Homo sapiens
gaagaccatgctggcagctaggagagttgattgaaaaggaaactcaaacaaaataattgctaacaaaaaatatatttagtagagtcagtatcttgttgatrtgaaaaaaaaaagctcatttttttttttaaagaagttttggattaaatttttagcccctaattcccttttctcacaagccctctccctaggaggattcga

SEQ ID NO: 436079 - DNA, 201 bp, Homo sapiens
tgttcactttaatttattcacttttgtgtacttttatgtactgcaaatcagatttcagtctaaagcgaaacatcagtaagttaataataaacctatctttygggaagttgaatattaatctgtacccaaaacgtatttagtaaaatatttgcccccgccaccctgccatgctgacataacaacttttataatgttgaatag

SEQ ID NO: 436080 - DNA, 201 bp, Homo sapiens
tgtctttccttcattccagtttaaaattaagtgtattgtacgttatataagtattcttttttcaattataacctgttatggatatgcaattcacatactgyaacattcaccctttttaagtgtacaattcagtgacttttagtatattcacaaacttgggcatccatcaccattatctaattacagaatattttacgaccc

SEQ ID NO: 436081 - DNA, 201 bp, Homo sapiens
ccaatcagctgttacttataaggttatattttacattataatttcctgcccaaacactacatatatatttgattatttgttacttttgggagagtttttgrgataattttaagcttgcagaaaagttgcagaaatattacagagaattctcatatacccttcacccagcttctcttaatgttaacattaccatggtacgat

SEQ ID NO: 436082 - DNA, 201 bp, Homo sapiens
atcagctgttacttataaggttatattttacattataatttcctgcccaaacactacatatatatttgattatttgttacttttgggagagtttttgagayaattttaagcttgcagaaaagttgcagaaatattacagagaattctcatatacccttcacccagcttctcttaatgttaacattaccatggtacgattgt

SEQ ID NO: 436083 - DNA, 201 bp, Homo sapiens
gaaccagttgaggacaaccaggtcactgtatttatgttgtgttaaaagcagagaatgtttgtttacttttttcctaatgaaaaaccaaatccaaacctgtrccattttgttttgtggcactgagcatggttattcctaatggagagcttccccatccttgacgtattcagtccctgaacaaacacgacagaagtaatttct

SEQ ID NO: 436084 - DNA, 201 bp, Homo sapiens
cagttcatctcttttcttctacagcctccaagtctattataaatagtatgctacgggacccttctcagattccagatggagttctagcaaatcaggtctaycaggtattaatcacagctgtctattttcagtggcaatgctgttatctgcctagcagagtaaaggattttaaacctcatttaattactgtcatcataaact

SEQ ID NO: 436085 - DNA, 201 bp, Homo sapiens
cacaaagaagttgcataaactcttaaaaagaatggattgattattccttaagactttggttttactaattacgatgtattctagaatggtgccttcaaagwtttcttttaatttatcttatttttgcagttctgctaatcacataattgtaatagtaatgaattgggcaagacagtaatttttctcctttagttttcattg

SEQ ID NO: 436086 - DNA, 201 bp, Homo sapiens
taatattcctatattaattttgataatgagcacttgaactatgacattaatgaacttaatggttataaaatatattgggtttttaaatatataccttaaascagaagacccttactttgtatctactgtagttgctgaataagacacataggaaggatttgaagattggtttcatattgattcccaaccatttgtggaagt

SEQ ID NO: 436087 - DNA, 201 bp, Homo sapiens
gtgcagtgaacaggagtgcagcatctgtcttttaaagggatttttatgtgtgcatttggattgcttggtgacctttgaaattttgttttgcactgttatcmgaaacgtaatcatttttctttctgaagcagattttaacatctgaaaaggttgatgaagctaggatagttttagtgaaatattaatctatctttttcaatg

SEQ ID NO: 436088 - DNA, 201 bp, Homo sapiens
atgatagatttagggattattgacatgcctggaggatgtctgtgtgatagataatttaatacaatttcctttggattttatatcactttgttgcattctasttttacccttctggtgatgttttacttagactactattgatttacattccctgagcacattgtttgaatatatactggctaagtgagcataattcattta

SEQ ID NO: 436089 - DNA, 201 bp, Homo sapiens
aacagtgaccaacaaccactgatcaagaacatggaaattgcaactgcaagtttcagcccctccatctgccattccagtcacattctggcacgttctcattrgagacatctctttaaaaccaaagtgcactttgttgatatacctctctgcttctctcaaagaaaatctaagcttcttggctggaacaaatggggcaaaatt

SEQ ID NO: 436090 - DNA, 201 bp, Homo sapiens
  misc_feature (1)...(201): n = A,T,C or G
taaactctagtttctttaagggttgcatgaaactgggcctggagcaagagtacaaatggagccttatatactatgtgtctaaatatgtaaagttacatatnaagttaacagaccttaaataaaatatattctattctacatgaagagctgaaagtttagatttgcataagaattcctagattccttggatttccaggctcc

SEQ ID NO: 436091 - DNA, 201 bp, Homo sapiens
gccttatatactatgtgtctaaatatgtaaagttacatatcaagttaacagaccttaaataaaatatattctattctacatgaagagctgaaagtttagawttgcataagaattcctagattccttggatttccaggctccgtgtgtcagtgcagggagaggtggtcccactgcacagcctgccttccttttcttcccacc

SEQ ID NO: 436092 - DNA, 201 bp, Homo sapiens
ttagattgggattacattgaatttacagatcaatttgggaagaattaacatcttaataatattgaatcttctgatccatgaacctgacatctctccatttrtttaggtcttttaacatttttctcagaaattgttctgtagttttcagtgcacaaatttcacattttttgtattgattgaatgatgtaagtacttcatagt

SEQ ID NO: 436093 - DNA, 201 bp, Homo sapiens
gaatacttgagggagacctatttaagttcctggaatttctctctctctctctctctgtctgtctgtctgtctctgtgggcagctttctcctgctgatattstgccctttaaactctagttgccttggctttcccattcttctagctacaattcctcaactcagggagactgctggacttcacctgggctcgccatttggac

SEQ ID NO: 436094 - DNA, 201 bp, Homo sapiens
ctgagctggcagagccccattgccgagagatggatgagcagatcagactgatggaccagaacctgaagtgtctgagtgctgctgaagaaaactactctcaraaagaagacaaatatgaggaagagatcaagattctactgataaactcaaggagagacctgtgctgagtttgctgagagatcggtagccaagctggaaatg

SEQ ID NO: 436095 - DNA, 201 bp, Homo sapiens
aggcaagtatcaacaacaagtgaatgaatgaagctgacctggttggttttgcagctaggtgaaagtacagttgtgtgtaccaacaaggcagtggccacttyatgccagccatccagtgccatgcaggaatgtgggcctggtgctgccaggccttctactctttagaaagcagctctagatctgatttttttttttaagaaa

SEQ ID NO: 436096 - DNA, 201 bp, Homo sapiens
acaagtaaagcaaaacaaaaataaaaaccaaagcatagaaatgctaaagaacctggcacattcaaagaactgtatctgactctatatggctagatattatkatagtgtaggttgggtgagaggtactgggaaagtggtaggaagtgaattttctgaaaagacctttcaacttgtcaggctagggataaacccttcagggtg

SEQ ID NO: 436097 - DNA, 201 bp, Homo sapiens
ggcattctaaggctacccagagaagatcactcaactcagccttaaagtatgggatgaaataattccaggcagaagcagaacaagtaaagcaaaacaaaaayaaaaaccaaagcatagaaatgctaaagaacctggcacattcaaagaactgtatctgactctatatggctagatattatgatagtgtaggttgggtgagag

SEQ ID NO: 436098 - DNA, 201 bp, Homo sapiens
ggttggaatatatcaaccttttctgacaagggactttgaattttgacctaatacagatgacctttgtgcgcaataaaaatgagcttaatcttgaggttaargttgaggtgaatggcaggacagtgtggtggagcttacactgactggaggtgtattggtgcctatgtggctattggctaaatgggagtccggcacttaaaa

SEQ ID NO: 436099 - DNA, 201 bp, Homo sapiens
aatacatttaacctcaagtttataacatgttcagttttttatttgcatgttggtgggtgcacttggaactctctacatgcagatagatcataaaacattgyttgggagggacctgcatacctctcttattattcagattcagtgacttataaagcaagccggtgttggatcgagattgcagttagagataatttggtcaaa

SEQ ID NO: 436100 - DNA, 201 bp, Homo sapiens
aatttgaaattaacttacacttcgagccccatttagctaagatggtaaatggactgggaatatgaggcagactgttccttgtataacgttaaaaagcccayagactcttccagcctgtatgtaacagcctgtatgtaacaaatagctgtttcctaatggatgaagttaaaattatctagattctcattttctgaggacaac

SEQ ID NO: 436101 - DNA, 201 bp, Homo sapiens
ggttgagatctgggaggtgaagagtcatttgaatgtgtcttctacattacacatgaagttagactggcactttttaaaaaaaatttgtttctgtctacagytctctcaagctgatatcatcctttgcttaaggtatattacactgctatttgtttttgctgataatattggtagggaaagctaataaaatttgaaattaac

SEQ ID NO: 436102 - DNA, 201 bp, Homo sapiens
agaagaggcagataggaagtatgaagaggtggcttgtaagtgggtgatcactgaaggagacttggaacgcacagagaatgagctgagctggcagagccccrttgccgagagatggatgagcagatcagactgatggaccagaacctgaagtgtctgagtgctgctgaagaaaactactctcaaaaagaagacaaatatgag

SEQ ID NO: 436103 - DNA, 201 bp, Homo sapiens
ctttcattggtttaatgtgaagtattttttactacttcatatttcttttatttattttttattttagagacaaggcttcactttgtcagccaggctagaakgaagtgggcactcgtagctcactgcaaccttgaactcctggtctcaggcgatcttcccacctctgtctcccaaagtgctgagactataggcatgggccac

SEQ ID NO: 436104 - DNA, 201 bp, Homo sapiens
atccagtaaatttttcataaaagggccaaaaggtgaaacattgttgttattctataaatatcttttaatatattgagtgttgagccctctgacatatccarctcttaactctctctgtgagaagtaggtatatattttaaaaagagaacatacctattataagtaggacacgtaatactttggccggtaaaaagtagaccc

SEQ ID NO: 436105 - DNA, 201 bp, Homo sapiens
gtaaagcaaaacaaaaataaaaaccaaagcatagaaatgctaaagaacctggcacattcaaagaactgtatctgactctatatggctagatattatgatartgtaggttgggtgagaggtactgggaaagtggtaggaagtgaattttctgaaaagacctttcaacttgtcaggctagggataaacccttcagggtgttta

SEQ ID NO: 436106 - DNA, 201 bp, Homo sapiens
cagatgatgcagaggagtgagctgagcgcctccagcaagaagttgagggagaaaggcgggcccgggaacaggctgaggctgaggtggcctccttgaaccgwaggatcaagctggttgaagaggagctggaccgtgctcaggagcgcctggctactgccctgcaaaagctagaagaagcggaaaaagctgctgatgagagtg

SEQ ID NO: 436107 - DNA, 201 bp, Homo sapiens
atatattttaaaaagagaacatacctattataagtaggacacgtaatactttggccggtaaaaagtagaccctggtacatgtgtagatacaactcagtatygtaaaatggaatacacttgttggtctaacaccagccacacatttaatatgacacaaattttccatacaagaagcacagattatatgcatgctaagaatta

SEQ ID NO: 436108 - DNA, 201 bp, Homo sapiens
aagtgttgctctgtcaccagactggagtgcagtggcacaatctcggctcactgcaacctgcacctcccaggtacaagcaattcccctgcctcagcctcccragtagctgggactatagacgcgtgccaccacgttcagctaattttttctattttagtagagacggggtttcaccatgttagccaggatgatctcagtctc

SEQ ID NO: 436109 - DNA, 201 bp, Homo sapiens
gtgcatatgctgtttgttttaattaacatgttcatgtacactttgttcatccttagaacaatactaatactatgtagtcgggtataagaattccagaggtrctttattccttccctagttactttaacttttataatttttttttttaaaaaaagctcatttattttccactgagttcagtcctaaagcttaattaacagt

SEQ ID NO: 436110 - DNA, 201 bp, Homo sapiens
cacccccaacttttggaagaaggctggggtataaattccagatcgatggacatgatttgcacccagtgtccacatgaagtattctctcgttttagtacttdagtaagtgttttcaaagtaaacataacttcgggtactttgttacttttagggtttctatgtcttttgctatgtttgctgtctctctcttcccatttgaga

SEQ ID NO: 436111 - DNA, 201 bp, Homo sapiens
agtcgtcatatccaagactaagatttaaaatacctggtatatcatcattgctccccacccccaacatatacttatttttaattattttcagtcactgttasttaaggcctgtcatttgttccaggaacaaaaaaggatgagatataaactctgaacttgtgtttattctgttacatgaaataggaggcatagcagaccatt

SEQ ID NO: 436112 - DNA, 201 bp, Homo sapiens
tacgtctcttggctgaagggtgatcttttctattcattctggcttcgtgacagcaagtaaaagtttgtttgctttttttaacctactgtggtgttcaaacygtgacctcataaatagctgggatctcattgagataacaagggctctgcaatttttcatccaaagtaaaatgttaaattttctcaggacctatttctttta

SEQ ID NO: 436113 - DNA, 201 bp, Homo sapiens
aaggagaaattatatatttctctaggggaaaaaaaggttcaatagaagtatagtttaataatattttattatttaacttttgacaaagtcgactgaatttkccattgtttttattacacattttgtacagttttgccgtattggttgaattttccttagaaacaaaacaatcaatatatgctttactagattaaatctgaa

SEQ ID NO: 436114 - DNA, 201 bp, Homo sapiens
tctctcttcccgttaaacttgagctgtagctatattgaactgttttggaggggagagggtaaccaggaaggaaacaggagaaagtacatccttaaatcatyatggattttggagttgtgagtgataggatcccaaaattcatctctgatgtgatttataaatgctggaggatttctatctatctatctatctatctatcta

SEQ ID NO: 436115 - DNA, 201 bp, Homo sapiens
gatgccagtttagtcgtagggctatacctcagggagtgacatgacgtaatggcaaagagcaatatgtgccacccagatcaccaaagtaaaaaacaacaaarctattcaaaaacttctctctcttcccgttaaacttgagctgtagctatattgaactgttttggaggggagagggtaaccaggaaggaaacaggagaaagt

SEQ ID NO: 436116 - DNA, 201 bp, Homo sapiens
ccaggggagcagctggaaaaatcagggaacagagatgccagtttagtcgtagggctatacctcagggagtgacatgacgtaatggcaaagagcaatatgtrccacccagatcaccaaagtaaaaaacaacaaaactattcaaaaacttctctctcttcccgttaaacttgagctgtagctatattgaactgttttggaggg

SEQ ID NO: 436117 - DNA, 201 bp, Homo sapiens
gcctcaccatgtaatcgtaacataaatgtagctacaccgtgactctacaggaaccctgaaagttaagttatgctgaagtgtgccagaagccccctaaagarccatcttcagttcttgtgtagccactatgggaacttcgctccaatgtagtgtctcccacgacaaacaaagacaatgaagctccttagaagtcccttgaga

SEQ ID NO: 436118 - DNA, 201 bp, Homo sapiens
ttccactgcattccagcttgggtgacagagtgagaccctgtctctaactaaaataggtaggtaggtaggtaggtagatagatagatagataggtagatagatagatagatagatagatagatagatagatagatagatagatagatatgagcatttaaagtctcaaaaggtgtgacgaacttgctgcctactcctaggctt

SEQ ID NO: 436119 - DNA, 201 bp, Homo sapiens
tccactgcattccagcttgggtgacagagtgagaccctgtctctaactaaaataggtaggtaggtaggtaggtagatagatagatagataggtagatagatagatagatagatagatagatagatagatagatagatagatagatatgagcatttaaagtctcaaaaggtgtgacgaacttgctgcctactcctaggctta

SEQ ID NO: 436120 - DNA, 201 bp, Homo sapiens
ccactgcattccagcttgggtgacagagtgagaccctgtctctaactaaaataggtaggtaggtaggtaggtagatagatagatagataggtagatagatagatagatagatagatagatagatagatagatagatagatagatatgagcatttaaagtctcaaaaggtgtgacgaacttgctgcctactcctaggcttag

SEQ ID NO: 436121 - DNA, 201 bp, Homo sapiens
actgcattccagcttgggtgacagagtgagaccctgtctctaactaaaataggtaggtaggtaggtaggtagatagatagatagataggtagatagatagatagatagatagatagatagatagatagatagatagatagatatgagcatttaaagtctcaaaaggtgtgacgaacttgctgcctactcctaggcttagct

SEQ ID NO: 436122 - DNA, 201 bp, Homo sapiens
aattatattgagaatcttttcttatgtttatttgctgcctgttttcttggaaaagtttctcttgaaatctttgcttcattagttaattgagttgctttcttattattgagttttggtagggcatttttattttatattttagtattctggatataagcttcttgcatgtagaaatggttctagaacccttttttgagaaga

SEQ ID NO: 436123 - DNA, 201 bp, Homo sapiens
attatattgagaatcttttcttatgtttatttgctgcctgttttcttggaaaagtttctcttgaaatctttgcttcattagttaattgagttgctttcttattattgagttttggtagggcatttttattttatattttagtattctggatataagcttcttgcatgtagaaatggttctagaacccttttttgagaagac

SEQ ID NO: 436124 - DNA, 201 bp, Homo sapiens
gctcattctcttctcacatatgtggaatatggaaaatgagtcatgaatgcaattcgcatgtctcgtactcttctcataaaacagaaatcttcatggatacrtaatggcaatggtgaacattctttcattctaatttctaattgactctggaagtcaaattcttataaaaattaaatttctcctatgaattccctttattca

SEQ ID NO: 436125 - DNA, 201 bp, Homo sapiens
tttcactttgtcagcccaatgctgcactttcttcaacagtgacgttccaaattcaattgaaaaagaagtcagaacagtttcttcaacaagacaaaggcacraaaaaaatttacagggaaagggaggaactgtactaggaaaaaaacttaagagacatcctaaccaaatgcagttgatcctgtttgttgcaccttgattcca

SEQ ID NO: 436126 - DNA, 201 bp, Homo sapiens
agatcttgtctctacacaaaattttttaaaattttgtggtggtaggcacctgtagtaccagctacttgggaggccaaagtggcaggatcacttaagccttkgagttcaagtttacagtgaactgtggtcattccactgcattccagcttgggtgacagagtgagaccctgtctctaactaaaataggtaggtaggtaggta

SEQ ID NO: 436127 - DNA, 201 bp, Homo sapiens
caacagccattctggcctctttgctcttcctcaaacttgtcaagtacgttgctgccccaggccttttgtgctgactccctgttacatgaagcactgtcctsaggtacatacgtagctcactgtccaaagtcagacacatcaccaccttctcagacctaatctgacccccccaacagcctacagctttcttttttgtttcat

SEQ ID NO: 436128 - DNA, 201 bp, Homo sapiens
ctataatatccctctgttttgtttgccccactaggataaaagtttcacaaggacagggatttttgtctgttttgtttacccctgtatcactaggattaaartaataagagcctattatgtgccaggcactgaatggtttattttgaataggcataatgtatttttaaaatgtaaatatcatgtaccaatgttaatagcaca

SEQ ID NO: 436129 - DNA, 201 bp, Homo sapiens
aattcatttacttatgtcacatagcactatatgtctttgtaaaaaggagccttaacatgtaagtgcttaacctttatttcttaatcatgagcttttaaatwtttattgtgctgacataattaggtgtagcacctaaaacgctttgtgtgtacagctataaaaagaaagtaatgtgatctaggacagacagtaaagctgtat

SEQ ID NO: 436130 - DNA, 201 bp, Homo sapiens
taataaaaagaactcaatttaatggaaaagcaaatgaagaaaagaatacttcaattaaaattaatctgcacaatgaagtgtggtccaaaaaataattaaakttcaacatgagacttatttatgggctcactaaatccagaaatctgaagggtttcatgaactcctagcccaaagcaattctattgagagcccctgaaacag

SEQ ID NO: 436131 - DNA, 201 bp, Homo sapiens
tctttgggtttgtggcaccctggccaccgcatctggctgtgacagcctctgcagtccgtgggctggcagtttgttgatcttttaaagtttctttccctacmcagtgcccattttctggtaaggtttctaggaggtctgttaggtgtacatcctgcagcttattggcttaaaatgtactctcctttgatgtggtctctttgg

SEQ ID NO: 436132 - DNA, 201 bp, Homo sapiens
tacactttgttcatccttagaacaatactaatactatgtagtcgggtataagaattccagaggtactttattccttccctagttactttaacttttataatttttttttttaaaaaaagctcatttattttccactgagttcagtcctaaagcttaattaacagtatatctccaagctgaattacagcagagaaggttaac

SEQ ID NO: 436133 - DNA, 201 bp, Homo sapiens
acactttgttcatccttagaacaatactaatactatgtagtcgggtataagaattccagaggtactttattccttccctagttactttaacttttataatttttttttttaaaaaaagctcatttattttccactgagttcagtcctaaagcttaattaacagtatatctccaagctgaattacagcagagaaggttaacc

SEQ ID NO: 436134 - DNA, 201 bp, Homo sapiens
cactttgttcatccttagaacaatactaatactatgtagtcgggtataagaattccagaggtactttattccttccctagttactttaacttttataatttttttttttaaaaaaagctcatttattttccactgagttcagtcctaaagcttaattaacagtatatctccaagctgaattacagcagagaaggttaacct

SEQ ID NO: 436135 - DNA, 201 bp, Homo sapiens
tttgtgactttgttataattctgtgctgtggcatagatgccatagccagatgtctcacttttcagtgtgacactgctaagaatctgaacacttctgcaggrcagaaaccggtgcactaacaaactgtctccttgcccaacaaagtttgcctccagcagaggccttttcattttcctttttttttttcctctctcacaacag

SEQ ID NO: 436136 - DNA, 201 bp, Homo sapiens
attatcctttttcctaaattatgggatttgaaaatggatctacatttttaacagccttgttgagatataattgatataccaaaaattgtatctatttaatrtatacaatttggtgagtttggacataagcatctactcatgaaaccattgctataatcatggtgatagacatacacactactccaaaagttttctagtgct

SEQ ID NO: 436137 - DNA, 201 bp, Homo sapiens
tgatattgattttaggcatctatcaataaatatgaatatattacttttagatactcttagggtgtaagcatagaattgattcatatcagttaaactaactsatttaagaatattacttatgaggccgggtgcagtggctcatgcctgtaatctcagcactttgggaggccgaggcgagtgaatcatctgaagtcaggagtt

SEQ ID NO: 436138 - DNA, 201 bp, Homo sapiens
agagattatattcaagtgcagagttaagaatcatccctgggccttctgataaaggcagattaatattataagccccacacaccctaaaatatgtagctaayattgaatatgcctttggttagcgcattacatttattaccccagaggtagtttatatcagtcagggttctccagagaaacaaaccaattggacatatgtgt

SEQ ID NO: 436139 - DNA, 201 bp, Homo sapiens
ttaactaagtgttctttatgtttgcttttaccaagaacttcattccatttttattgataaaagcatatatatatgcttattttatatatatatatatatatatatatatatatatatatatatatatatatggcactaatagagttaaaaataggcatacatatggttgagaagagatttaattcatgtcttaatgccatg

SEQ ID NO: 436140 - DNA, 201 bp, Homo sapiens
taactaagtgttctttatgtttgcttttaccaagaacttcattccatttttattgataaaagcatatatatatgcttattttatatatatatatatatatatatatatatatatatatatatatatatatggcactaatagagttaaaaataggcatacatatggttgagaagagatttaattcatgtcttaatgccatgg

SEQ ID NO: 436141 - DNA, 201 bp, Homo sapiens
ggtaatgcctaggttgccattccagggcatgagaggaaactatatgctgaagatggcaaagcgagaaggtagtaggaatctaggttcctgctgactctgcrgtcaccatgccagcctagaactactttcctttgtgcttaattttcttttcttttatttttctttctttttttttttttttttttagatggagtctcgctc

SEQ ID NO: 436142 - DNA, 201 bp, Homo sapiens
atgaagaagctgtgaaaagttcataatagttgcagagagcataccaaaaaaataaaatatttaattcctaaactttaaaatatttatccactgtaataagrgcaatacaatatttagtctgacttggaactgcttatgcaaacctcgtagggatggaatgaaatgtacactgtttttgcgttgcattataatggaaaacat

SEQ ID NO: 436143 - DNA, 201 bp, Homo sapiens
gttaaggaaggtccaaagagattgcagggtttatccacaacctgaagagacgcacagaatcaaggattgatgacctatgttgcttcatttggacagagatggtctttcccaccaccactggagcttttgtcttaagaagactatggaagtcaaaaatggttcataatgtatagtgcttatgtatgctaaattttctggtac

SEQ ID NO: 436144 - DNA, 201 bp, Homo sapiens
ggtgagttgtttgtgttatgtttttcccttcaatgctttcctatgaaagtagcttactttaactagagttgagcgtggcatttgtccaggagaaacatgtrtacacacaggggatgctgacaagtctatgctggccttttcttgtcactgcattaccacttggctttgtcttgtctaggtacctgaatggagtggtgaaaa

SEQ ID NO: 436145 - DNA, 201 bp, Homo sapiens
attcatttacttatgtcacatagcactatatgtctttgtaaaaaggagccttaacatgtaagtgcttaacctttatttcttaatcatgagcttttaaatakttattgtgctgacataattaggtgtagcacctaaaacgctttgtgtgtacagctataaaaagaaagtaatgtgatctaggacagacagtaaagctgtatc

SEQ ID NO: 436146 - DNA, 201 bp, Homo sapiens
aaggtcacacatacctgtaatttcagcactttgggaagctgaggcaggtggattgcttgagcccaagagttcaggacctcatggagaatcctgtctctacaaaaaaaaaaaaacaaaaattagctggggttgtggtggcatgcacttgtagtcccagctaccagggagactgagatgggagggtatattgagcctggaagg

SEQ ID NO: 436147 - DNA, 201 bp, Homo sapiens
gactgtggagttccttgtatactgaaatggggttataaacggtgttaagctcacaggctggccccagaagtctattgcaggcagaatgtggcaattctagratatcagtaggaccaaccttggtttcctgtcatatctagagagtaaattaaaaatgttcaaactctaaatgaaaggatttgaagccttaggattcactgg

SEQ ID NO: 436148 - DNA, 201 bp, Homo sapiens
gttaatgcataaaatttaaccatcacaggtaggtactgttaactccattctactgacaatgaaacgtgaagctgaaaaaggtttattaagtaccttcctcraggtgacaccattctttcctattctttcatggttgggccaagcagtcagacttagaaacccagctctcaacctaaaatgcttagctgcctgccaaaaacg

SEQ ID NO: 436149 - DNA, 201 bp, Homo sapiens
gggttataaacggtgttaagctcacaggctggccccagaagtctattgcaggcagaatgtggcaattctaggatatcagtaggaccaaccttggtttcctrtcatatctagagagtaaattaaaaatgttcaaactctaaatgaaaggatttgaagccttaggattcactgggcaagctaaactcagtaggaaggctgccc

SEQ ID NO: 436150 - DNA, 201 bp, Homo sapiens
ccatctgacggcatgtcatcagtaactggcctgtcacagtcagcggtgcccaccgaccattgccagtatattaaatgcatttttaatatctgcttcagtasatttaatgaagaaaatttagtttccatactccgagcactgcttcctcaagtattctaaagaatgaactccttgcctacacaaaaaagagggaagaccatg

SEQ ID NO: 436151 - DNA, 201 bp, Homo sapiens
tatgatttgtgccttgttttatgctcaggagctggcagttttactcaccattgtttttgtaccataagtccaaatgtgaatacagcgcaaaaggaaaatamtatcttgctatttttataaaaatagtcgtgttgaccctgtagacctgtgagagggtctcagggactccaagtccacagccacacttagacaatcactagc

SEQ ID NO: 436152 - DNA, 201 bp, Homo sapiens
tagaggcgtggcaaggaaaggggagtatttagttttatactttaaaaaaaaagagtaagcaagttcttcctgaatttggggagccaaattttctgtctgamccactgagtttctcagagagttacaggaaaccttgaacagaaagatacttatatcatattctgtccaacattcgcaatctggaatcctcagggcttatct

SEQ ID NO: 436153 - DNA, 201 bp, Homo sapiens
aactaagtgttctttatgtttgcttttaccaagaacttcattccatttttattgataaaagcatatatatatgcttattttatatatatatatatatatatatatatatatatatatatatatatatatggcactaatagagttaaaaataggcatacatatggttgagaagagatttaattcatgtcttaatgccatgga

SEQ ID NO: 436154 - DNA, 201 bp, Homo sapiens
actaagtgttctttatgtttgcttttaccaagaacttcattccatttttattgataaaagcatatatatatgcttattttatatatatatatatatatatatatatatatatatatatatatatatatggcactaatagagttaaaaataggcatacatatggttgagaagagatttaattcatgtcttaatgccatggaa

SEQ ID NO: 436155 - DNA, 201 bp, Homo sapiens
ctctcttcccgtccctaccctttcatgaaacatatagtgaagagtcagtagtccttcttcgtaagccagagcttccttcatgccaaggaacagtgacatgrcttgtcactttcaagttacgtctcttggctgaagggtgatcttttctattcattctggcttcgtgacagcaagtaaaagtttgtttgctttttttaacct

SEQ ID NO: 436156 - DNA, 201 bp, Homo sapiens
ttaaagaaacatgccttaagttttctgatacaatatgtaaaatataatagcttacttcatatgatctaatatgcattccatctggagtcttgttccactaraagtgtgcccgcgatcatgactgacttctttgagatctgtgtgtgtgtctctttccctccctcccttcctccctcttaacttccttttattccttcttct

SEQ ID NO: 436157 - DNA, 201 bp, Homo sapiens
ctaagtgttctttatgtttgcttttaccaagaacttcattccatttttattgataaaagcatatatatatgcttattttatatatatatatatatatatawatatatatatatatatatatatatatggcactaatagagttaaaaataggcatacatatggttgagaagagatttaattcatgtcttaatgccatggaaa

SEQ ID NO: 436158 - DNA, 201 bp, Homo sapiens
taagtgttctttatgtttgcttttaccaagaacttcattccatttttattgataaaagcatatatatatgcttattttatatatatatatatatatatatatatatatatatatatatatatatatggcactaatagagttaaaaataggcatacatatggttgagaagagatttaattcatgtcttaatgccatggaaat

SEQ ID NO: 436159 - DNA, 201 bp, Homo sapiens
atgaaaacacatagacacatgggtgggggaacaacacacactggagcctgttgggggtgcaggggagggagagcatcaggaagaatagctaatggatgctrggcttaatacttaggtgattggtcgataggtgcagcaaaccaccatggcacacgtttacctatgtaacaaacctgcacatcctgtacatgtaccccagaa

SEQ ID NO: 436160 - DNA, 201 bp, Homo sapiens
cccggacaccccgaatcgataattcttggaactcccacagcactctgtatagacatacctctgttagcacttctcttgctgcattttacatacttacatayacagctcttttcccaccaaaaaggacagtggaaggcaggtactgtgtcttatatatgtattgttggtttttagcattgtaaatggggcataatgagtgta

SEQ ID NO: 436161 - DNA, 201 bp, Homo sapiens
ttggaactcttccactccctgaaaacttccattgaaatttttatcaatggtatttgcatagacaaaatggaatcaaactattgacatgtacttttttattaaaaaaaaaaaaaagcaaatttatgtgaatggtttgtcagtggagataatttagccaaaggcacctgtgttctctaaggactctgcctgaaaagactttta

SEQ ID NO: 436162 - DNA, 201 bp, Homo sapiens
aggtagtaggaatctaggttcctgctgactctgcggtcaccatgccagcctagaactactttcctttgtgcttaattttcttttcttttatttttctttctttttttttttttttttttagatggagtctcgctccgtcattcaggctagagtgcagtggtgcgatctcagctcactgcaacctctgcttcctgggttcaa

SEQ ID NO: 436163 - DNA, 201 bp, Homo sapiens
cgcactcttggtggttacaggcacacaatcagctggtctgacttgactgaactgattgctggttccttgggtggtatcagtgcagtggccttgtttgtgaraaattgatgtgaggttcttaacggacctgtttcccagggacctttctctaaagcacatttgccttgttttatttatttattttttcctcttgcttctgaa

SEQ ID NO: 436164 - DNA, 201 bp, Homo sapiens
gtaggaatctaggttcctgctgactctgcggtcaccatgccagcctagaactactttcctttgtgcttaattttcttttcttttatttttctttctttttytttttttttttttagatggagtctcgctccgtcattcaggctagagtgcagtggtgcgatctcagctcactgcaacctctgcttcctgggttcaagagat

SEQ ID NO: 436165 - DNA, 201 bp, Homo sapiens
taacggacctgtttcccagggacctttctctaaagcacatttgccttgttttatttatttattttttcctcttgcttctgaacgtccttattttccaattrgtttcccaaataatacattcaagggtggccccaatatgtggaaaattgctttgttagaattattttgaagttacaatgatccagaggttctccccacctt

SEQ ID NO: 436166 - DNA, 201 bp, Homo sapiens
aaaggaaggagggagggagagagagaaaaggagaggggagagggagaattcaatcttaacttcttaaaaaacacaatctctttctgatgatgatgatgatkattattattattattattattggagatagggtctcactccgtcacctaggctggagtgcaatggcacaatctccactcactgcaacctctccctcccgag

SEQ ID NO: 436167 - DNA, 201 bp, Homo sapiens
gacctgagtttagggccgccttcccacacccccaggcacctgccggcaagtaactgacaggggtgtgtgtgtgtgtgtgtgtgtgtgtgtgtgcgcgcgcrcgcgcgcgcatgcatgaggggagtcacaatcatagccccttaggttactagagacaggatttaaacttagatgaagggtcactagtcctcctccaatact

SEQ ID NO: 436168 - DNA, 201 bp, Homo sapiens
tatgttccttatcaccttctaactctattaagaatgctacttgcccttttacctaaaaaattataatatttctgaaactgtgctaaatgtatagatttttyaatcgtagttgtttgttcactgtgtgtatcgtgtacttcccctgagtggacacatctcattgtgacaatctctcatttttattctctcagtattgtggtc

SEQ ID NO: 436169 - DNA, 201 bp, Homo sapiens
tacgtattagcgattaactgttaagagctttgaaaacactgcacgtatctgtacaagccagaattactatttctttgacttattgttagcatggcagttgyttttgatttggttgttttatgacatggtatactatatttactcagtttgaaactattcatttctatacactattttttaaaaatcacctactaggtgaaa

SEQ ID NO: 436170 - DNA, 201 bp, Homo sapiens
tttgctgtaatttgatcttccagctgtacgctgtattgcctagcattgtagtgttcttttatgcattcagtgaattcttgctaactttctgatgtgggccygtgcttatttttatgatctcttttgaggagacagcgactttgaagcatacttgctttttttttttttttgggaggggagcagtactgttctaactagtac

SEQ ID NO: 436171 - DNA, 201 bp, Homo sapiens
gcaaaattgctgtggtggaagagacaaatcttactgggaaagacaaacatttctgtacggtataatccacagttatttgggattgtattttctatccctcrtaagcgaacctcaccccatctattagagatagatgggctgggttttatcagattggattcctaggatatgagatcagaatgaggctgcatgagaacaagt

SEQ ID NO: 436172 - DNA, 201 bp, Homo sapiens
attatgattttttaaaaatcccacatgtattcatgtgtttgtgtattacagattatttctttcaacatctcttaagcattagaaattaagcctcaaaggamtatacatataataagtgatcacagaaaccataaagcactctacaatgaattaatttctcttctccactttaaatatggtaatttgtaaaggtttcataca

SEQ ID NO: 436173 - DNA, 201 bp, Homo sapiens
agttatcagtttacattatcttcttcccagagactttattagttaaaaatgctcttctattttctgttgttgctttttcattattttcttactgtggtgaaaaaaaaaaaacccacataatattaaatatgccatcataactattttttttttttttttttgagatggagtcttgctctgtcacccaggctggagtgcagt

SEQ ID NO: 436174 - DNA, 201 bp, Homo sapiens
cagaaaccataaagcactctacaatgaattaatttctcttctccactttaaatatggtaatttgtaaaggtttcatacaagtcattttattattatacagrtctgttttatatagatattgaagagtctgcatgatgtttattttaggacatacacaaaaaatagaacaacattggattacataaggttttttccaaaatg

SEQ ID NO: 436175 - DNA, 201 bp, Homo sapiens
tgcacacatcctcagaagatagcacagaccccacacagcaactcataataagagaaaaagaaatatatatatgattatgattatacatatgtgtgtgtgtrtatatatgtgtgtgtgtgtgtgtgtgtgtgtgtgtgtatatatatatatatatatatatatatatatatatgattctctgctgttcttgttttagagaag

SEQ ID NO: 436176 - DNA, 201 bp, Homo sapiens
tcaaattcttataaaaattaaatttctcctatgaattccctttattcattaacacaagtcaattacattcacttgtgtgtgtgtgtgtgtgtgtgtgtgtktttctctctcccttacattcttccaatctactcttaagatctgtgtgaattctattctcttaattttcttccttttctatctgaatccctgacattgaga

SEQ ID NO: 436177 - DNA, 201 bp, Homo sapiens
ctgaggcaggagacttgcttggacctgggaggcagaggttgcagtgagccgagatcgtgctactgcactccagcttgggtgacacagcaagacttagtgtmaaaaaaatatatatatatataatgcaaataaaattgtaaaagtattataccttttaatatttcagaacaaaaacttatttaaaaaatttattctgttggg

SEQ ID NO: 436178 - DNA, 201 bp, Homo sapiens
gtattataccttttaatatttcagaacaaaaacttatttaaaaaatttattctgttggggcacgggcctgtgagccagttagagttgcagctgtgggaacrattgggccgagcagaggacgacatgttgtttttcgtggagcaggtaacatctaaaggaactggtttaaatcctaatgccaaagtatggcaagaaattgct

SEQ ID NO: 436179 - DNA, 201 bp, Homo sapiens
gataactgtctactaaatgaaattaagatacttttgtccaaggtaaatattttaatggcatacccaaaattaggactgaaattttgaagtatttgttttarctcttcacctgttttactcatatcactgcacttttcagtaacccctagacatcatacatctttgtttgaatcatttctcttcctattttctccaccattt

SEQ ID NO: 436180 - DNA, 201 bp, Homo sapiens
cctggaagttcatcaagaatcccagataaactcattttggagaataggatgtctgatgttgttaaaggtgtctacaaagaaaaggataatgaagtgttgasagttagttgcccagtgcctgcagatgagcagacagaatgcacttctgcccagcaactcagtatgagtaccagttctccatgtgcagctgagcctactgca

SEQ ID NO: 436181 - DNA, 201 bp, Homo sapiens
ctgcagatgagcagacagaatgcacttctgcccagcaactcagtatgagtaccagttctccatgtgcagctgagcctactgcattaagcacaactcagccaaaaaaaaaaaaaaaaaaaggatctaatagaggattcctctgttcagaaggatggtctcaaccagacaactataccagtttctcctccaagtactacaaag

SEQ ID NO: 436182 - DNA, 201 bp, Homo sapiens
tgcagatgagcagacagaatgcacttctgcccagcaactcagtatgagtaccagttctccatgtgcagctgagcctactgcattaagcacaactcagccaaaaaaaaaaaaaaaaaaaggatctaatagaggattcctctgttcagaaggatggtctcaaccagacaactataccagtttctcctccaagtactacaaagc

SEQ ID NO: 436183 - DNA, 201 bp, Homo sapiens
gcagatgagcagacagaatgcacttctgcccagcaactcagtatgagtaccagttctccatgtgcagctgagcctactgcattaagcacaactcagccaaaaaaaaaaaaaaaaaaaggatctaatagaggattcctctgttcagaaggatggtctcaaccagacaactataccagtttctcctccaagtactacaaagcc

SEQ ID NO: 436184 - DNA, 201 bp, Homo sapiens
acaggagaaagtacatccttaaatcattatggattttggagttgtgagtgataggatcccaaaattcatctctgatgtgatttataaatgctggaggatttctatctatctatctatctatctatctatctatctatctatctatctatccatccatccacacacacatataaagtgtattttttctatttttgtttttgg

SEQ ID NO: 436185 - DNA, 201 bp, Homo sapiens
tatctttttggggggctaagggctgtatgtggtcatcattgattttataaatgtcttcatactacttttccagtttcaagtctaaaattgaacattttagsaattcacacttcgttagtgataataagatcagtcattctgttctctccacacaaatattttcaagtgagatttgaagcactatgcattttatttacatgc

SEQ ID NO: 436186 - DNA, 201 bp, Homo sapiens
gaaccttgactgttcatttctaaatcagacatactcttattctaaccattcctcaaatatcctaggattctcctttggttgactttcaaactggagacatkcccttaaaatatgacaccagaactctccaaaatgccctaggtgtggcttaaccattgcaaaggacattgactctctttttctggttaaagtctaacattc

SEQ ID NO: 436187 - DNA, 201 bp, Homo sapiens
gcaatgctgttatctgcctagcagagtaaaggattttaaacctcatttaattactgtcatcataaactatcactgaggtcagggtgcaccataaatggcartgcagtatttgcgagaagagcatttcactttttaatagcttgcttttatagtgaataaaaagcatgcaatttttgttttctgtgattaaatccgaaccgc

SEQ ID NO: 436188 - DNA, 201 bp, Homo sapiens
ccatgtagaagaccaattagaggtgtttggtttgtggggctctttgcttttggaagtttgttttgtttgtctgtattggggagtggaaatagtagagagamagaggaaggaggccaagtgggaagttattgctgaaatacaagtgcaaaatagaaaaggaacaaaaacagatacatggaagtggagaaaatatatatggga

SEQ ID NO: 436189 - DNA, 201 bp, Homo sapiens
aatagacagggcttatcattgatttgaagatggaaagtacactatttcactaccccctgtcatttagtggatgtggttcttgagtatgtccagaattatawggctgttaatgtgtcttgagccctgacctaaactgtagatgagaaggctctttaaatattaaaatggagaacaaacaggattgcttatgcagtaggaaag

SEQ ID NO: 436190 - DNA, 201 bp, Homo sapiens
caggagaaagtacatccttaaatcattatggattttggagttgtgagtgataggatcccaaaattcatctctgatgtgatttataaatgctggaggatttctatctatctatctatctatctatctatctatctatctatctatctatccatccatccacacacacatataaagtgtattttttctatttttgtttttggt

SEQ ID NO: 436191 - DNA, 201 bp, Homo sapiens
gcccactcatgagtcatccccttgcccagcacatccatgctgtgtacactacccgcctgttagcagccacatcttctgctcctgacatctagacatccacmtcatcttggctcggtgacccagggtcatctgaagcagatgatcctcctcctgacctactgtcaggagagcagtagtagcctaatgctatgccaccaggcc

SEQ ID NO: 436192 - DNA, 201 bp, Homo sapiens
aggagaaagtacatccttaaatcattatggattttggagttgtgagtgataggatcccaaaattcatctctgatgtgatttataaatgctggaggatttctatctatctatctatctatctatctatctatctatctatctatctatccatccatccacacacacatataaagtgtattttttctatttttgtttttggtt

SEQ ID NO: 436193 - DNA, 201 bp, Homo sapiens
ggagaaagtacatccttaaatcattatggattttggagttgtgagtgataggatcccaaaattcatctctgatgtgatttataaatgctggaggatttctatctatctatctatctatctatctatctatctatctatctatctatccatccatccacacacacatataaagtgtattttttctatttttgtttttggttt

SEQ ID NO: 436194 - DNA, 201 bp, Homo sapiens
gctcaggagctggcagttttactcaccattgtttttgtaccataagtccaaatgtgaatacagcgcaaaaggaaaataatatcttgctatttttataaaamtagtcgtgttgaccctgtagacctgtgagagggtctcagggactccaagtccacagccacacttagacaatcactagctaattcaaatcaaagcataatt

SEQ ID NO: 436195 - DNA, 201 bp, Homo sapiens
tagacatccacctcatcttggctcggtgacccagggtcatctgaagcagatgatcctcctcctgacctactgtcaggagagcagtagtagcctaatgctaygccaccaggcctgagtcattcacctcacttcatctcatcatgtggacattttatcatctcaaatcatcacaggaagagagtgagtatagaacaataagat

SEQ ID NO: 436196 - DNA, 201 bp, Homo sapiens
gagaaagtacatccttaaatcattatggattttggagttgtgagtgataggatcccaaaattcatctctgatgtgatttataaatgctggaggatttctahctatctatctatctatctatctatctatctatctatctatctatccatccatccacacacacatataaagtgtattttttctatttttgtttttggtttt

SEQ ID NO: 436197 - DNA, 201 bp, Homo sapiens
acagatatttatggaaaacgtggtacgtgctaggtgatgggtgaacatagtaggtgcttcataaatgaccagaggttaattgacagatactaggaatgaawgatgggtgggaatatgaattgtagattcgaaaggagcaaatggaggacccttttcaattggccgttggaaacaaacaagggagcatagaggtaaagcggc

SEQ ID NO: 436198 - DNA, 201 bp, Homo sapiens
cgcaaaggacctttggggaagacacctaaaaccacggcggaggggtgaaattaaagactttcaaaacttaaaaataaataaataaataaaaaataaaaccmcggctggtatttaggcacattctctgatatagccacaatgctgctgaaatgctgaaagatttccaaactagtaaagtagctactacccagaggatcccat

SEQ ID NO: 436199 - DNA, 201 bp, Homo sapiens
agatcaaagggcactgagccgctgcttccagaggggcagaaaggccatcaaccagtgggggttgggaggtgcgcctcaattcccgttagcaaaaggctcayggatcaggctagagggggctacgaagtggagagccagcccgggagggggagggtcaccagttctggggccattacaaaggatagggcagaggggcagagt

SEQ ID NO: 436200 - DNA, 201 bp, Homo sapiens
ggatccaagtcctgtggatatcatctatgaagtacatctattttttaaagttcttaatattttggggcctgtgaaaccctacgagaatctaagagctatamctttccccagaaaaataggaaatatctgcacacaatttctggcggttcatgaagcccaggaacctctccatgagctaagaagagccctggttgtaatcca

SEQ ID NO: 436201 - DNA, 201 bp, Homo sapiens
ctgaccctgacagatctctctcatccaggaaatctggcggaacggcgctctctcagctaaaaagcctcaatcctggagccaacggattcggaaagcaactytgcactccaatcaaataaaaatgttcttctctgctgaggagaagggggcaggccccagaactgagctctcggggtgagtgaagaaggacagcagagccaa

SEQ ID NO: 436202 - DNA, 201 bp, Homo sapiens
gggagcaaagcaaggggcccagctctctagcccccactgccagagcatggcctgggggccagacgagggcccagcaccgtgaagctcttcctctggccagrtggcaaggccctgcctgcccgttgcagggcgcggctcctgctgctcccacacctgccctgccaggcctgcccagatggccacccctgcacccctgccaac

SEQ ID NO: 436203 - DNA, 201 bp, Homo sapiens
tctgcacacaatttctggcggttcatgaagcccaggaacctctccatgagctaagaagagccctggttgtaatccagggtgcctgactgtctcattgtccrtgttacctctccacccaaccccaaacacgtatcttggcatgagggaggcaaaggacacactgcacagatggtcacaggcagctgagagctttgtccaatc

SEQ ID NO: 436204 - DNA, 201 bp, Homo sapiens
cagggctgggagttgggagcagcagcagagatgccagttgggaaggatggcaggacaggcacccaccctgggcatagaagttcctgggcagaacccaggcytgctttcctgtggcttctaggtccccaggatagactgcttagtggaggaagctgctcctataggcttccgacccctttgacctaccctaatttgttattt

SEQ ID NO: 436205 - DNA, 201 bp, Homo sapiens
gcggaggggtgaaattaaagactttcaaaacttaaaaataaataaataaataaaaaataaaaccacggctggtatttaggcacattctctgatatagccasaatgctgctgaaatgctgaaagatttccaaactagtaaagtagctactacccagaggatcccatccctctccttcctgccacccagcagggtgcctccag

SEQ ID NO: 436206 - DNA, 201 bp, Homo sapiens
tccactccatagagccccttcggcctctccctcaccaagcctgcaggcagcacccttcttacccaagtcctgggcccatgcccagagctgcgacccctccsaggctggcgtgggcctcctcagctctagcctgcagtgcccatgggcacccaggtggcaactctgtgggcagctcaatggctcctctgttccattcctggc

SEQ ID NO: 436207 - DNA, 201 bp, Homo sapiens
ggcagccagcatcacactcttgtggcagctgcttaacagtgtctgactcaaccaacacgttatccataaaccttgcgatggctctccagtgcttcaggaaraagtctgcagttgaagagatttgaaagcttccactttcctctttagtttctctctactcaccttggatcactttgttaccagaaagctgcatgttctttc

SEQ ID NO: 436208 - DNA, 201 bp, Homo sapiens
tccttcttccactcccagggctggtcatactcctcagggggcctctcatcatcctctggcaggcgggactcccggggccagggggccccctcaccttccgsggtggccccatcctcctctggctcatagggtgtgtcatacagaggcaagggctgagttgctgtctccttggagccccggatctctgccggagcagggcag

SEQ ID NO: 436209 - DNA, 201 bp, Homo sapiens
gcccccgtgggtccccaggcacacatgcgcacgtgcacgtacggacagacaccctccttcatcccatattttaaaatacaacattcaggcacaaatgtacraacagatgctcatgcctctgcacacacacccttgggtgcccattctgggcagaactgaacatagaggaagaattaagtgcgttctttctcctcatttggg

SEQ ID NO: 436210 - DNA, 201 bp, Homo sapiens
agaaatgacttatcgatctgagaacaattatctggttccccttggtgccatcctgacaggctaatcccgcccaaagccaccagccagcctgtccctccccsacccccaacgttgctgcccactggctcccctccccaacccacagaggcccagaggcagcacctctgccctcccagaccaggggagcctgatggctgagcc

SEQ ID NO: 436211 - DNA, 201 bp, Homo sapiens
ctggctgctcctgggaagaggagaggagactttggtgagtgggggctctcctcagccccctcatccatccacccagtaaccctccccaaccctacagcaartgtggtggttccgaagccagctgagaatgacaggtgattaggggaggtggaggtcagtccagaaagcaggggtggtggtggtgtaagtaggtagcactgg

SEQ ID NO: 436212 - DNA, 201 bp, Homo sapiens
tggggacaaggacggggcttagaggttagtgtggaaagcagaaccagtgagggagctgcctccatcctgaggtccaccccccggagaagtgaggctggcartccttatcacttgcctcccctgactgggtacaaggctctgcccggacccatttcaccaggcccacaagcgagaaatcagagtggggaggctgaagggagg

SEQ ID NO: 436213 - DNA, 201 bp, Homo sapiens
gagtgcagtggcgtgatctcggctcactgcaacttccatctaccgggttcacaccattctcctgcctcagcctcccgagtagctgggactacaggcacgcrccaccaagcccagctaatttttgtgtttttagtagagatggggtttcaccatgttggctaggatggtctcaatctcttgaccttgtgatctgcccgcctt

SEQ ID NO: 436214 - DNA, 201 bp, Homo sapiens
tcagcgcctaatgacatacacttaatgaacactggctaagagatggtcttacattgactggcagcccctaccaatcctcctaacctcagggcaggaatatwttgttcaactttagatgccctgactgtatccctcactttactcttcctatctctgtctgtttactcctttccaaatctgtgcctggaggatccaagtcct

SEQ ID NO: 436215 - DNA, 201 bp, Homo sapiens
tgggtattactgtccccattttaagaagtcagaggctcaaggaagttagggaacatgtccaggaccattctacgtaagtggaggaaccaggtgattggaayccatgccctttgtgcaaaaggctgccaacctgccaccagggggcatcttggctgtcctgggagagagaatgctggagccggctttgggacagacctgaag

SEQ ID NO: 436216 - DNA, 201 bp, Homo sapiens
agatgccagttgggaaggatggcaggacaggcacccaccctgggcatagaagttcctgggcagaacccaggcctgctttcctgtggcttctaggtccccargatagactgcttagtggaggaagctgctcctataggcttccgacccctttgacctaccctaatttgttattttgtttatggtccctttgccccactctga

SEQ ID NO: 436217 - DNA, 201 bp, Homo sapiens
acctgctggctgagaaaccgtgcaagtgtgactcagcattcctgtgctctggtttccccatttataatctggggatagtagtagaatcttcctcacaggaytgttttaaggatcagttggtctaacacatgtcagctgcttcaaaatggtatcaggcacaaggtaggtgcctagtaaatgttagccactatattattaaag

SEQ ID NO: 436218 - DNA, 201 bp, Homo sapiens
caggaatattttgttcaactttagatgccctgactgtatccctcactttactcttcctatctctgtctgtttactcctttccaaatctgtgcctggaggayccaagtcctgtggatatcatctatgaagtacatctattttttaaagttcttaatattttggggcctgtgaaaccctacgagaatctaagagctatacctt

SEQ ID NO: 436219 - DNA, 201 bp, Homo sapiens
tgtgggcagctcaatggctcctctgttccattcctggctccacacccagctccaggaagccccggccccacgccctgggctgggatgcccaaaggagccgyccacagggctgggagttgggagcagcagcagagatgccagttgggaaggatggcaggacaggcacccaccctgggcatagaagttcctgggcagaaccca

SEQ ID NO: 436220 - DNA, 201 bp, Homo sapiens
gacccccagtgcctggggattgttcatgggggatggggacctccccagcttggttgggcataaggggaatactggagtccccttccaccctgcttgctgtycctgaaaccacaactgtccccactcacttgagggagagggagaagtcattcttgctggtctcactgttgcgcaccaggtagctggcctctttgcacagcc

SEQ ID NO: 436221 - DNA, 201 bp, Homo sapiens
gggaccttctctggggctcctgaagctcctgctgagccttcgccagtctcctgaacatcaaacgggtccgcatagtcttctaggatagctagctgtgggargagagtgaagagagtgggcttcagggagcagagaggcaactctgcttctcccaaggtactctgtccatgggagcaagagtcccaagtaggctgccttcga

SEQ ID NO: 436222 - DNA, 201 bp, Homo sapiens
cccatccccgaacacacacacagacacacacactcttcctcagagtaaacagaaatactttgtgtccactgccctgccctccttccaggaaccagcccccsccaacaccctacagactccctcacgcaaagctcctatctccttgcctatgcttctagaacatcttgggcttccattaataatgacagtgataatttattg

SEQ ID NO: 436223 - DNA, 201 bp, Homo sapiens
tttgaatctccttcctgctcaagcctctcctgtggtagctagcaggcctgccatctggttcctcttccactctgcaattgggccatgcaacacatccctgmcccccaccacggggctccagagggtgtggatccaggaggagcaagaggggcacacgttacaatgtgtgccttgctctggaaggtccccaaagtctcccac

SEQ ID NO: 436224 - DNA, 201 bp, Homo sapiens
tggctctggggacgtaatcctggatctatcccctggtgggggtgggcccagccttctgtgccacacagggtgttgcagtccccacattgtgggaggagagrgcagaggagcaacctgagaaaccatgcacgcttctccctccaaagcagctgactgccttcccccagtccatcctctcagggtggcttcagcactgataat

SEQ ID NO: 436225 - DNA, 201 bp, Homo sapiens
ctgcgctcgcttctccgctccctcccccgtcagcccggggacggcgccggaggcgcgggcgcggctgtgcccggcaggatcgggtttatttattgcctctrgcccggagccggggcggcctggggactgcacagttccctctgcccgagcccctccccttctctccccaccccccaaagccggctgcttcccaggggcctg

SEQ ID NO: 436226 - DNA, 201 bp, Homo sapiens
ccacagccttgcctccctttctccttttccccacagcctgggaactcgcaggcagcaagaaagagccagcctcgcctcaggttgtcaggattactcagacytgagggcagatgttttattgaaatttaatccccaccccccatcctgagaagagtgatgccactggcggctgctggactgctaacgaggtttcctaatgac

SEQ ID NO: 436227 - DNA, 201 bp, Homo sapiens
cttttccccacagcctgggaactcgcaggcagcaagaaagagccagcctcgcctcaggttgtcaggattactcagacttgagggcagatgttttattgaartttaatccccaccccccatcctgagaagagtgatgccactggcggctgctggactgctaacgaggtttcctaatgacgagcatagattttcccattaagc

SEQ ID NO: 436228 - DNA, 201 bp, Homo sapiens
tgggaggcagagccctagaattcaggttacacccatagctgtctttattgtttgaagtaagtgccttcttttgttaaatgtaagtattttaacatatgtcrcgagtttcataagtttgttttggaatttatttttaaatatacccagtccccaaaagagagaagtagtctaagcctcttagcttccaagaggtggtgatgc

SEQ ID NO: 436229 - DNA, 201 bp, Homo sapiens
taatgttctctaatcaactttatcagtaataaagctgacattttcatcctgttcctctcttgctcaagaattcatcatggctccactccccattttgaagsaagtccagatacctcattccagcctatgaagcactgctccgcccctctcggactctctcatctaggttcccatgcacacccagcactaacatcatttgct

SEQ ID NO: 436230 - DNA, 201 bp, Homo sapiens
gcacaaccctcccgttgtccacttcctccctgatgccaagctccatttgtttccttctgtcccaaatgatatcattccttttttctttttcttttcttttyttttttttttgagacggaatcttgctctctcacccaggctggagtgcaatggcacgatctcggctcactacaacctccgcctccccggttcaagcgattc

SEQ ID NO: 436231 - DNA, 201 bp, Homo sapiens
tttgtccttcctgactatctcgaatgctaatatctgaccttcagttgtgtggcctcctgtaccacttcaggtcacacaagtcacatctgcttctccaaaaygactattggaaaggcagtgaccatcctccccacggacccggcaaagactttctttctgatcacccccatttggcctctccctagatcctctcttggcctc

SEQ ID NO: 436232 - DNA, 201 bp, Homo sapiens
ttagtagagatggggtttcaccatgttggctaggatggtctcaatctcttgaccttgtgatctgcccgccttggcctcccaaagtgctgggattacaggcrtgagccaccgcgcccggccccaagtggtacatcttttccactaattttgtgcctctaggccatctcctaggctaaatggccaggaggaggctactgggcc

SEQ ID NO: 436233 - DNA, 201 bp, Homo sapiens
tggccccatcctcctctggctcatagggtgtgtcatacagaggcaagggctgagttgctgtctccttggagccccggatctctgccggagcagggcaggamgggaaaggtgagggttcagccttggctttctggctcccctcctccaatgcttctcagcaacaagccaggcctccttcagaggagatgccctggctctggg

SEQ ID NO: 436234 - DNA, 201 bp, Homo sapiens
gaaggctgaggcaggagaatcacatgaacctgggagacagaggttgtaatgagctgagatcgcaccactgtactccagcctgggtgacagagcgagactcygtctcggggaaaaaaaaaaaaaaaaagaaaatcataaggaagagaaaacatatttactgttcgttaagtggaagtggatcatcatgaaggtcttcatcct

SEQ ID NO: 436235 - DNA, 201 bp, Homo sapiens
tgtttttcaaagttgttctggctcttttgcatttttatttgaattataacatcaaattttaagtttccaagaaaaaaaaaagccagctgaggccgggtacrgtggctcacacctgtaatcccagcactttgggagacagaggtgggcggatcacgaggtcaggagattgagaccatcctggctaacatggtgaaaccccgt

SEQ ID NO: 436236 - DNA, 201 bp, Homo sapiens
aaaaagccagctgaggccgggtacggtggctcacacctgtaatcccagcactttgggagacagaggtgggcggatcacgaggtcaggagattgagaccatmctggctaacatggtgaaaccccgtctctactaaaaatacaaaaaattagccgggtgtggtggcgggcgcctgtagtcccagctacttgggaggctgaggc

SEQ ID NO: 436237 - DNA, 201 bp, Homo sapiens
tttactttagagagattcagatcaagcaaacaactgtgtctgctcattctcctcaactttgctgtccaaagttgggggctgggggagcacttctgtcgctmttcaaatggcagtgttttgagagaatccatttttttatttctcctctattcctaagcattaggaactatgagagaaggacatctgtgcaggtgcccaact

SEQ ID NO: 436238 - DNA, 201 bp, Homo sapiens
ggaattggtgcagtgattttaaaaaggttttgttggctattgttacagtaaaaacatttaaaatgttgatagcacatattaacttacagtagattgtatayttgattgaactgtaattgtttatttcagttgtagttagattgagaaggctggaaaagccttaattgcaatagcctggattctttcttgggttattattca

SEQ ID NO: 436239 - DNA, 201 bp, Homo sapiens
cagtttattatatatttttaaatagaagaatggatttagaatattccccacacaaagaaatgataaatgtttgaggtgatgcctggtatggcaacacatgyctatatttctaactactcgggaggctggggcaggagggtcacttgagtccagaaattcgggactagcctgggcaacataatgagaccccatctctaaaac

SEQ ID NO: 436240 - DNA, 201 bp, Homo sapiens
ttatacccaagttctatgacaaaaccatggttgacaagttcaaaaggcatctcatattctttctagaaagtaagtgtgctgtaaataataaaaataatgaraactcccttggttaagcagagagccttaagatgtaaatgaaactggatttaattgacttctggaaaggtaatagtattcaatatctggtaatgtgatacc

SEQ ID NO: 436241 - DNA, 201 bp, Homo sapiens
aaccatggttgacaagttcaaaaggcatctcatattctttctagaaagtaagtgtgctgtaaataataaaaataatgagaactcccttggttaagcagagrgccttaagatgtaaatgaaactggatttaattgacttctggaaaggtaatagtattcaatatctggtaatgtgatacctggccaggaaacccttgttgtc

SEQ ID NO: 436242 - DNA, 201 bp, Homo sapiens
gaggagtgtgggggaggtggtgccccgtttcactgctgtaagaagcttcagctttgaccgctacagtggtaggtaggctcttgtcacacagtttggaaatactttactttagagagattcagatcaagcaaacaactgtgtctgctcattctcctcaactttgctgtccaaagttgggggctgggggagcacttctgtcgc

SEQ ID NO: 436243 - DNA, 201 bp, Homo sapiens
ccaacacttacagtaattttcttcatgaagaatatactcctttttctctgtggttaaaccagctgtggaattgaattttgtgcgtgctttgcctagaatgraagtgctgtgtgaaatagaaggaaatgtctgaaggtttaaagtgaatttgatataactcagatccctgggcaacacacatgccaaccccatacttgactt

SEQ ID NO: 436244 - DNA, 201 bp, Homo sapiens
aactgtaggagtgttggcctccctgagtactggtgagctgaactgaaacgtgagggaagccagcagcaggacggatgtgggaagcatggtaggtgggttcytctgagggaaattcaagtaggtgttaaaaactctgcaaaagacagctcaagcgaactttccaggtacacagcacatgatcttttattttgttgaaaatgg

SEQ ID NO: 436245 - DNA, 201 bp, Homo sapiens
ttaattgaatttttaatcttaggacaacaaattactcatgtgatgctaaagccattcttagcctgagttaagaatactagaataatgagagatggtctgcwgctgttttcttgactgtggcaggtttagaatgaaagtcacctgggcatagacatgggtgtgtgccacagaagaaatacatcccggccgggcacggtggct

SEQ ID NO: 436246 - DNA, 201 bp, Homo sapiens
aggagtgtgggggaggtggtgccccgtttcactgctgtaagaagcttcagctttgaccgctacagtggtaggtaggctcttgtcacacagtttggaaatactttactttagagagattcagatcaagcaaacaactgtgtctgctcattctcctcaactttgctgtccaaagttgggggctgggggagcacttctgtcgct

SEQ ID NO: 436247 - DNA, 201 bp, Homo sapiens
ggagtgtgggggaggtggtgccccgtttcactgctgtaagaagcttcagctttgaccgctacagtggtaggtaggctcttgtcacacagtttggaaatactttactttagagagattcagatcaagcaaacaactgtgtctgctcattctcctcaactttgctgtccaaagttgggggctgggggagcacttctgtcgcta

SEQ ID NO: 436248 - DNA, 201 bp, Homo sapiens
attgaaatttcagtttcatacaattttcgcataccaaagtgtattattctctttatttattaacaatttaaaaacataaaaaccattcttagtttgcaggrcatagaaaatcaggtggcagaccctgggtttggctgtgggccggagtttgctgaccttggtttagaatgatgagttctcatcttactccactgtctgagt

SEQ ID NO: 436249 - DNA, 201 bp, Homo sapiens
tgaaactctgtctcaaaaaaaatggatacatcccttcttggcgctctccttccagcaagagcttgactcatcttactcagagtcctcttctttatgatagaataaagctggttgtttgaaacccatattgcctctaaaaacttcatctgccccccttgcacacacatacagttcttcgattatgttgattgccttaagcat

SEQ ID NO: 436250 - DNA, 201 bp, Homo sapiens
gagtgtgggggaggtggtgccccgtttcactgctgtaagaagcttcagctttgaccgctacagtggtaggtaggctcttgtcacacagtttggaaatactttactttagagagattcagatcaagcaaacaactgtgtctgctcattctcctcaactttgctgtccaaagttgggggctgggggagcacttctgtcgctat

SEQ ID NO: 436251 - DNA, 201 bp, Homo sapiens
agtgttgtgtgaccattgcctctccacttaccactccaaacagaaacactgcagccattaggcaactacgccccgctttcccttccccaagccctggcgaygacgtctcatctactttttgtgtctgtaaatgtgcctgttcatttcattcatttcattgaagtggaatcctacgatatttgtggttttatgtctggtgta

SEQ ID NO: 436252 - DNA, 201 bp, Homo sapiens
ctgtgagaatgtaggtttgtggtgtagaaaattgtacacaactgaaagtatttagaatatacctttttaaaagataggaattcagtctgctttgtcacttsttattattgtcttataataaattaaccaaattattaaactactggtatatgtcttcattttagatgccacgaagatttaccactcttcctgcggtgtttc

SEQ ID NO: 436253 - DNA, 201 bp, Homo sapiens
tttcaaaacacagtgatctaaggttccaaagaaggtgatctaaaatcataaattctggccccagaacactgaaccttcatcaggtgagttcaattagagaygacagaaagtaaccagaaaaatacatgaatacttcctaaaacctgctggaggttttatcagatgctcctaaaaatgacacgaaacacaaatttcctaact

SEQ ID NO: 436254 - DNA, 201 bp, Homo sapiens
gaggacgaggatcaaattttggagaacagttctcaaaaagaaaacgtgtttaaatgtgattctctaaaggaagagtgcattcctgaacatatggtaagagraagtaaaataatggaagccgaaagccaaaaggctacccgggaatgtgagaaatcagccctcacccctggattctcagataatgcgatcatgttattctca

SEQ ID NO: 436255 - DNA, 201 bp, Homo sapiens
gacttaacacctgtgattgaagaattgacgaatgcaggctttctacagacaggtatgactagtagaaggagatgtgaaatgaaaatatgatctgaagaackgagcttctgcagaatgatggcagtattattatggtgccctccccggggtggtgcctggtaacttactgttttttaattgaatttttaatcttaggacaac

SEQ ID NO: 436256 - DNA, 201 bp, Homo sapiens
tcctaaaacctgctggaggttttatcagatgctcctaaaaatgacacgaaacacaaatttcctaactttcctgttgtctgctgcctggggctgctaatgtgactgactatcagatagccttcaggaggtggtaggaaaaatggatggagacaaaaatgtagcagacaacatgaacagtttgatcacggttacaagagccag

SEQ ID NO: 436257 - DNA, 201 bp, Homo sapiens
actgcaccattgcactccagcctgggcaacaagagcaaaactccatctcaaaaaaaacaaaacaaaaacaaaacaaaaaaacaaccaaaaaaaacaacacyagcatgaaccatcatgacaggtcaattttgcctttttaaagaagaaaggaaaataaatgttggaaattttcaaaatacaattaagccattttagagttgg

SEQ ID NO: 436258 - DNA, 201 bp, Homo sapiens
cctaaaacctgctggaggttttatcagatgctcctaaaaatgacacgaaacacaaatttcctaactttcctgttgtctgctgcctggggctgctaatgtgactgactatcagatagccttcaggaggtggtaggaaaaatggatggagacaaaaatgtagcagacaacatgaacagtttgatcacggttacaagagccaga

SEQ ID NO: 436259 - DNA, 201 bp, Homo sapiens
tgaggttttgccatgttggccaggctggtcttgaactcctggcttcagatctgcccaccttggcctcccaaagtgctgggattacaggtgtgagccaccgyacacggccatgtatttcttactgtattttaatatctgtagaatctttatctctgtcatgctcttattcttgatattggtaatttgtgtcttttctctttt

SEQ ID NO: 436260 - DNA, 201 bp, Homo sapiens
tgtgtccttactgatttcttatttacttgttctataaattattgagagaatattgatatctctgattataattgtggtatttcttttctttttttttttgtttttgttttttgagacagactctcactatcacctaggctggagtgtagtggcagtgcgatcctggatcgctgcagccttgatctcccaggctcaagcaat

SEQ ID NO: 436261 - DNA, 201 bp, Homo sapiens
gtgtccttactgatttcttatttacttgttctataaattattgagagaatattgatatctctgattataattgtggtatttcttttctttttttttttgtttttgttttttgagacagactctcactatcacctaggctggagtgtagtggcagtgcgatcctggatcgctgcagccttgatctcccaggctcaagcaatt

SEQ ID NO: 436262 - DNA, 201 bp, Homo sapiens
agtactggaggtggtgaagctaatggcatctagtgactagaggccagggacagggcactgctgagcatcctataatttacaggacagcccctgacaacaamgaattacctagcctaaatgtcaatagtgctgaagctgaaaaaccctgctattgatggtgtctaagctgctagagtcagagggcccacatggtcctggatt

SEQ ID NO: 436263 - DNA, 201 bp, Homo sapiens
agtaaataagatgaacatattttatctctaactttggacttgtaggaaaatagaatcctcaaggctgttttagttctagtgaaaaccactgtcctttaagsttgtcctttatttcttcattctgatggtaaagcccagcagtggaatttcagagtccctgccagccccacgctagggcagcgcctggtgcttttactctgc

SEQ ID NO: 436264 - DNA, 201 bp, Homo sapiens
ctggaaccggtactcagtaacaaaacatatctgaaacaccttttcattttagaatcaacttttaaaatatggcaaacttaatgccttaaaatttacatgtrattagaacatgtatttcttttgttaacattcttcttttgtctgtgttcttccaaccccaaaagaataccagggatgccagcacagcatgagcatagagac

SEQ ID NO: 436265 - DNA, 201 bp, Homo sapiens
caaggaaggtgtttgttttggaaatggtgactttgttgatttgtagcacagggtctctaggtagaaagattggcgagaaagcgttcctttccctatcttaytgcaggtcctttatgcgtgactctgtacttctgtgaggtgttttgctctgccatttggaagcgttgtttgaccttgagcaggcaccagtgctccctgtgg

SEQ ID NO: 436266 - DNA, 201 bp, Homo sapiens
gcagaggtggagccagctgggccctccctctccgaggccaggctgccgctgcccggcaccgtcttctgccagcgaacagggtgcccttcagagtctcattytcccatcttcatttccttcagccactcaactctggatggcctgagccttcactgattttcaatttcttggtttttattttttctttcactttttatgttt

SEQ ID NO: 436267 - DNA, 201 bp, Homo sapiens
gaggtagaggttgcagtgagctgagatcgcgccactgcacaccagcctgggtgacagagtgagactccatctcaaaaaaaaaaaaaaatagcagccctttsttggtatatgcacttagcatagaacagataaagtaaataagatgaacatattttatctctaactttggacttgtaggaaaatagaatcctcaaggctgtt

SEQ ID NO: 436268 - DNA, 201 bp, Homo sapiens
gctgccgctgcccggcaccgtcttctgccagcgaacagggtgcccttcagagtctcattctcccatcttcatttccttcagccactcaactctggatggcstgagccttcactgattttcaatttcttggtttttattttttctttcactttttatgtttctattgtggtaaaataaatttaacatccctaaaatacagca

SEQ ID NO: 436269 - DNA, 201 bp, Homo sapiens
gagctaagttttcctgtaaagtcaggtacccctgaggttcacaccctttgtgaggggcagctgctgggatccactgtccacctggattacagcccggtcaygctccagcacgttgactgtgaaggctctggttgccagatgcattgaaatcctcagaataagatctaaggaaacagcctaaatctctagaagtgctgtttg

SEQ ID NO: 436270 - DNA, 201 bp, Homo sapiens
gccgctgaccccaccacggtcctgtgctctgtggaggagctggcactggcccattacagacgcagcggttttgaccagggtaactgagcaggctttctctygtggcacccagccccgggtggacgagcagcagcactggatgggctgtcagcagtgggctgctgtcctctctctgtcctctgctcacagtggaagatgctg

SEQ ID NO: 436271 - DNA, 201 bp, Homo sapiens
ctaaaacctgctggaggttttatcagatgctcctaaaaatgacacgaaacacaaatttcctaactttcctgttgtctgctgcctggggctgctaatgtgactgactatcagatagccttcaggaggtggtaggaaaaatggatggagacaaaaatgtagcagacaacatgaacagtttgatcacggttacaagagccagac

SEQ ID NO: 436272 - DNA, 201 bp, Homo sapiens
taaaacctgctggaggttttatcagatgctcctaaaaatgacacgaaacacaaatttcctaactttcctgttgtctgctgcctggggctgctaatgtgactgactatcagatagccttcaggaggtggtaggaaaaatggatggagacaaaaatgtagcagacaacatgaacagtttgatcacggttacaagagccagacc

SEQ ID NO: 436273 - DNA, 201 bp, Homo sapiens
ccatggctctgcagctctggtacaagcagcagaacagcgcatggtgggcctggggtccatgtgcactgaattacatatacactgagcttttctccgtctcrtgatccctggagcctatttccattctctgtcacgagggaagtggctaactgtcctgtgttttgtgttcaggatcttgtctcctgcctggggggccctgtg

SEQ ID NO: 436274 - DNA, 201 bp, Homo sapiens
cttttatatcaattaacttttacttatcttttgagagaaagaatgtatcggttggccggtttccaagttttgtatgtactgactagtcctctggtgaacayggctctctgcaggcacagtatgacagcttgctttccctgtgacacaggcattccccctggacttgtgcacagacagcttcttcacaagcagacgcccagc

SEQ ID NO: 436275 - DNA, 201 bp, Homo sapiens
tcccagcactttgggaggccgaggcaggtggatcacctgaggttgggggttcgagaccagcctgaccaacatggagaaaccccatctctactaaaaatacaaaattaggtgtggtggcgcatgcctgtaatcccagctatttgggaggctgaggcaggagaatcacttgaacccgggaggctgaggttgcggtgagctgag

SEQ ID NO: 436276 - DNA, 201 bp, Homo sapiens
tgtgggcctcagacaccaggaagaaagttgggatacagtcatttgagttaaaaagggaatgacccctcagaaacccgcattagcagtgttactcttggaastgcctttacttttaacgctctctgttctgaaaaagaggtgtttggttacgtgtgagccaacatcacgttttgttagctgtgatttacctttgtccgttta

SEQ ID NO: 436277 - DNA, 201 bp, Homo sapiens
agcctcagaagtgcaggacagaggtgacccaggcaggcatgacgggctgtggctgcctgccctctgctctcacagcacccctgatcccactcactgtggtmccacgcagatgggttggggcctgtaaatgtcaggtgggaccagccagaggagctttgctgccagtactggcatgtcaggatgggggtctggtggtcagca

SEQ ID NO: 436278 - DNA, 201 bp, Homo sapiens
tcatattatctgtttcttcttgattgcgctttgctagtttgtgtctttcaaggaatttgtccatttcatttaagtattgtcttaaagttgtttatatttgwttcttttctttttttttttttttttgagatggagtctcgctctgtcgcccagactggagtgtagtagcgtgagttagctcactgcaacttccgcctcctg

SEQ ID NO: 436279 - DNA, 201 bp, Homo sapiens
gcccactctcaggtactgagactttgtgggcctcagacaccaggaagaaagttgggatacagtcatttgagttaaaaagggaatgacccctcagaaacccrcattagcagtgttactcttggaagtgcctttacttttaacgctctctgttctgaaaaagaggtgtttggttacgtgtgagccaacatcacgttttgttag

SEQ ID NO: 436280 - DNA, 201 bp, Homo sapiens
tgtccttactgatttcttatttacttgttctataaattattgagagaatattgatatctctgattataattgtggtatttcttttctttttttttttgtttttgttttttgagacagactctcactatcacctaggctggagtgtagtggcagtgcgatcctggatcgctgcagccttgatctcccaggctcaagcaattc

SEQ ID NO: 436281 - DNA, 201 bp, Homo sapiens
ataaatggggctttagtaaatcaggcttgcaggctcaaagctgcaatctgcccactctcaggtactgagactttgtgggcctcagacaccaggaagaaagytgggatacagtcatttgagttaaaaagggaatgacccctcagaaacccgcattagcagtgttactcttggaagtgcctttacttttaacgctctctgttc

SEQ ID NO: 436282 - DNA, 201 bp, Homo sapiens
atcagaggccacaagtaggcatttcttgagtggctgttggcaagattgaattccttgagagcttttgggccgagggcctgggttcctgtgggcctgtcccstgcgactggcttcatcagagcaggcgggtgagaggagccccagagtgtgagcaagacagagctccatctcttatgacttgatgtggacatgatgttccat

SEQ ID NO: 436283 - DNA, 201 bp, Homo sapiens
tgcggccatgtgtgactcctcagtagataaaaaagagaaaaatcctgaacattactattgatgttcaagggaaggatttctattttaaattcgcacagtgraattatggtattccttgggttactttttaacatgtgagcgatacttctctgggcacagctgtgtgtagtatccacttccatctctacttttgctgttctc

SEQ ID NO: 436284 - DNA, 201 bp, Homo sapiens
tcagcgctccccagcatggccacgctggcagaagcctggaaactgaccacaggaggaccagtctcccaccacttgccagtgggattccagccatggctctscagctctggtacaagcagcagaacagcgcatggtgggcctggggtccatgtgcactgaattacatatacactgagcttttctccgtctcgtgatccctgg

SEQ ID NO: 436285 - DNA, 201 bp, Homo sapiens
ctggattctttcttgggttattattcaaaatttttgtcgtaataccgtactaatttccaggaccaagaaaaatcggaaggcaataggcctttggtaaattrtagtattttattttccgagaaaaatacagttttaagtgattcttatgggattttaaggtaaactatttagtcaaatttttattttagtttttgtttacta

SEQ ID NO: 436286 - DNA, 201 bp, Homo sapiens
aggtgttaaaaactctgcaaaagacagctcaagcgaactttccaggtacacagcacatgatcttttattttgttgaaaatggtaaacatcttcaatatttrttaagacattttttcctttgttgttacatagtgatgagaaaaattagtattttcagatgccactttgaaaaaatcatttaggatatacagttgacccttg

SEQ ID NO: 436287 - DNA, 201 bp, Homo sapiens
ttgcttaatggtgttcctaaaatgcttcgtctgcacagattccctacaggagaaaatggaaatgaggaggagagaaactccggtgtccccgaggtgtcggygtggtgagggccgctggcgttgaagtacatcctgctctggcccagctccccatagcaggcctccagggggccactgcgctgttgccgcagcatcctgctc

SEQ ID NO: 436288 - DNA, 201 bp, Homo sapiens
atttgaaagtatccatgttttaagcggggaatgaggagtgtgggggaggtggtgccccgtttcactgctgtaagaagcttcagctttgaccgctacagtgrtaggtaggctcttgtcacacagtttggaaatactttactttagagagattcagatcaagcaaacaactgtgtctgctcattctcctcaactttgctgtcc

SEQ ID NO: 436289 - DNA, 201 bp, Homo sapiens
tggaattttattaagccatcaaaatttccttcacattcaatactgttgaacaacaagataacacatcttcttgctcatcccacttgaactcaagtcatcarttttaggcacaaaggttttagttttctcgggaaatcaagttttaaccacttgaggttactactgcagcaagcagattttgttgacaaatgtgaacagctt

SEQ ID NO: 436290 - DNA, 201 bp, Homo sapiens
acctcttctatcaatcactgtgttccagtagatgatttcatactgacaacaacaaacagtcgctgtggaattttattaagccatcaaaatttccttcacaytcaatactgttgaacaacaagataacacatcttcttgctcatcccacttgaactcaagtcatcaattttaggcacaaaggttttagttttctcgggaaat

SEQ ID NO: 436291 - DNA, 201 bp, Homo sapiens
actgctgggtcctgtggtgattctgtgttgagctttttgaggagtggctgaactgtttttcacagtgtttacaccagtgtcacattcccaccagcaatgcrtgaggtttctggtttctctacctccttgtcaatgcttattttccatgtttctgattatagccatcctagtgtgaagtggtatctccttgtggctttctgt

SEQ ID NO: 436292 - DNA, 201 bp, Homo sapiens
tttatgattatctaagaagggctgaaacagttgaaattccaatttctttaggaatcaaaacattctcatgaagttgtgttgatttataacatgtaaatgcytgttctactgattgggcccggatcatgaaaggaatgaagtctttatcagaggcagttgtccttcattgtccatctccctgggaccatccctaataactag

SEQ ID NO: 436293 - DNA, 201 bp, Homo sapiens
ggaactgggccacacagcagaaggtgagcagtgtgccagagagcatgaccgcctgagctttgcctcctgtcagatcagcagtggcattagattctcatagragtgtgaaccctattgtgaactgcgcatgcgagggatctaggttgcgtattccttatgagaatctattgcctgatgatatgaagtggaacagtttcatcc

SEQ ID NO: 436294 - DNA, 201 bp, Homo sapiens
agctggtggaagttaaaggccccaatgatcgtctttcacataagcagatgatctggctggctgaactgcagaagctgggggctgaagtagaagtctgccaygtggttgcagttggagctaagagccaaagccttagctaaaaggtatggaattggggatatttggtcatacattaatgtaagattttcaagagtataaaac

SEQ ID NO: 436295 - DNA, 201 bp, Homo sapiens
tgagtcaggagaattgcctgaacctgggaggtagaggttgcagtgagctgagatcgcgccactgcacaccagcctgggtgacagagtgagactccatctcaaaaaaaaaaaaaaatagcagccctttcttggtatatgcacttagcatagaacagataaagtaaataagatgaacatattttatctctaactttggacttg

SEQ ID NO: 436296 - DNA, 201 bp, Homo sapiens
ttactatcagcctgaatgggggcgggatgagagtacctcctatccactaatttgcttaaggataagttctaagacgggctagaaaaaacactagacctggycgattctatcaagaacaatggcaaactgaacagaggcagtcaggaggccaaatgtctgattctttgttctgtacctttcagtagtctgcaaattttctac

SEQ ID NO: 436297 - DNA, 201 bp, Homo sapiens
ggatgaggggctagaactgacaggaagacaggacagagagcagcacagcctcagaagtgcaggacagaggtgacccaggcaggcatgacgggctgtggctkcctgccctctgctctcacagcacccctgatcccactcactgtggtcccacgcagatgggttggggcctgtaaatgtcaggtgggaccagccagaggagct

SEQ ID NO: 436298 - DNA, 201 bp, Homo sapiens
gttccagctccatgtgtcaagaagaccatgcttcctccactgaattccctctgtatctttgtcaaaaatcagtaacccatatatatgtgggtctgtttctrtatactcttcggttccattgatctgtttgtctgtatttcttgattattgtagctttagatacatcttggagtcaggtagtgtaagtcctataatgacttg

SEQ ID NO: 436299 - DNA, 201 bp, Homo sapiens
cttgtgaaaggctgtgatggagccacccaggctgatctgggcctcgggaacccagcggaagtagcacagtttccacagttttatgtgtgttccagagacaygtggcagaataacaccgtgcaggttggcgggtttggaaaaccattctctaaaatactgctccgtatcactgttctggctgtcggtttgctgagctggatc

SEQ ID NO: 436300 - DNA, 201 bp, Homo sapiens
gcaggagaatcacatgaacctgggagacagaggttgtaatgagctgagatcgcaccactgtactccagcctgggtgacagagcgagactctgtctcggggaaaaaaaaaaaaaaaaagaaaatcataaggaagagaaaacatatttactgttcgttaagtggaagtggatcatcatgaaggtcttcatccttgttgtcttt

SEQ ID NO: 436301 - DNA, 201 bp, Homo sapiens
cattgatctgtttgtctgtatttcttgattattgtagctttagatacatcttggagtcaggtagtgtaagtcctataatgacttgtttttcaaagttgttytggctcttttgcatttttatttgaattataacatcaaattttaagtttccaagaaaaaaaaaagccagctgaggccgggtacggtggctcacacctgtaa

SEQ ID NO: 436302 - DNA, 201 bp, Homo sapiens
agtcaggtagtgtaagtcctataatgacttgtttttcaaagttgttctggctcttttgcatttttatttgaattataacatcaaattttaagtttccaagaaaaaaaaaagccagctgaggccgggtacggtggctcacacctgtaatcccagcactttgggagacagaggtgggcggatcacgaggtcaggagattgaga

SEQ ID NO: 436303 - DNA, 201 bp, Homo sapiens
ggaagacaggacagagagcagcacagcctcagaagtgcaggacagaggtgacccaggcaggcatgacgggctgtggctgcctgccctctgctctcacagcrcccctgatcccactcactgtggtcccacgcagatgggttggggcctgtaaatgtcaggtgggaccagccagaggagctttgctgccagtactggcatgtc

SEQ ID NO: 436304 - DNA, 201 bp, Homo sapiens
ccctgccacagtggcggcttgaatcatcaagaaatggataaatggggctttagtaaatcaggcttgcaggctcaaagctgcaatctgcccactctcaggtmctgagactttgtgggcctcagacaccaggaagaaagttgggatacagtcatttgagttaaaaagggaatgacccctcagaaacccgcattagcagtgtta

SEQ ID NO: 436305 - DNA, 201 bp, Homo sapiens
tgttggggaggtgctataaatactaatctttaatgaaacataggtgtaataaggcagacattaagaaaaatataaataccaacacttgaaaaaagctcgtrttatagatttttaaaaagtacttcaataaattacatacttgtaattaattgacttgagaagtatagaatcctcatctgtgtggtatgttaaatgtcttct

SEQ ID NO: 436306 - DNA, 201 bp, Homo sapiens
tatcatacaaaaatatgcatttttctatttttaaccattattaatagtacctaatatttttaaacttgtaaattaacaacaataaaatactacaagagttwaaataaacgtgaaggaagaaaattacagagggaaaaatgctcaatccaaaacatttagtaataataaaaaagcagctaaatgaaaaagggagaattgtga

SEQ ID NO: 436307 - DNA, 201 bp, Homo sapiens
aaagagaaaaattttgttgaccattattggagctggatgcatctatatgattagatgtgcaaaaagctggaaaactcaaaaacaagtgatgattcatcttyaggttttttttataaaaaagtagtggctgggcacagtggctcatgcctgtaatcccagcactttgggaggctgagcgaggcaggcgcatcatgaggtcaa

SEQ ID NO: 436308 - DNA, 201 bp, Homo sapiens
ttcatagcatttatattaggtattataagtagagatgatttaaagtatatgagaagatgtgctagaatatgcagatgcgatgccattttatatcagggacttgagcatccatggattttggtaacagagggggtccttgaatcagtcccccatggatactgagggatggctgtatttaggttttgtatgtcttagccttta

SEQ ID NO: 436309 - DNA, 201 bp, Homo sapiens
cagtgaaggggattgggagaggtgttggtgctggaggcgtcagtgtgtggggtgctcttcagccgtttggttgaagctgttgtgtgtggcattggacttgyggtcaggagctcagggaatgggtctggcctggaaaaagtcaacattttgagagtcactggcatatggacaatgtttgaagccatggaactgaatgagcag

SEQ ID NO: 436310 - DNA, 201 bp, Homo sapiens
gaacttgaccctgtgcgactctgcactggttgactggtttgcagataacactctgcagcactcacagatgtctgtaccccagtgccagctggcagggaccrggtgaagagtgaggatgccttagggaactcatgcccactccagaaggcacctcaaagtccctgtcctgtcagttcggggtccttggcctcattgtagaat

SEQ ID NO: 436311 - DNA, 201 bp, Homo sapiens
tgaggagtgtgggggaggtggtgccccgtttcactgctgtaagaagcttcagctttgaccgctacagtggtaggtaggctcttgtcacacagtttggaaatactttactttagagagattcagatcaagcaaacaactgtgtctgctcattctcctcaactttgctgtccaaagttgggggctgggggagcacttctgtcg

SEQ ID NO: 436312 - DNA, 201 bp, Homo sapiens
tctttgctgattggcgagatgggcttactgtggactctgtgctggcatttaggaatcaggatctaggaattaagggaaagggagagtcagatgactcagcygtcagcaagtcagcaagtgccttcaaggaaggtgtttgttttggaaatggtgactttgttgatttgtagcacagggtctctaggtagaaagattggcgag

SEQ ID NO: 436313 - DNA, 201 bp, Homo sapiens
ataaggtgtcacaattcttccttttaaaatgttgtattgtatcatacttaaaaatatataaataattcctgaataaaagcatccaatatttatcattttaytagtattagcctttgggaaaaaatttgatagcatgattttataaagctcttgcatttgctttaaatttagctaactattttgaccacaaggtggagctgt

SEQ ID NO: 436314 - DNA, 201 bp, Homo sapiens
tgatgccactctagcattagctgaagatccccttgatttcatccagcagccaagacactaagtgacccaaaggaagaaaagggtgatcagcgtggctgtgyggtcagtaagtaaatgtgcaacagctggagtaaattagaactaatttagtgcataacttcagcaggaataaattttgttaatcttcaaaaagtcaaaaca

SEQ ID NO: 436315 - DNA, 201 bp, Homo sapiens
tattgtatcatacttaaaaatatataaataattcctgaataaaagcatccaatatttatcattttattagtattagcctttgggaaaaaatttgatagcaygattttataaagctcttgcatttgctttaaatttagctaactattttgaccacaaggtggagctgtgatgtcacaatttggcaagatttgtaagatacaa

SEQ ID NO: 436316 - DNA, 201 bp, Homo sapiens; identical to SEQ ID NO: 256466

SEQ ID NO: 436317 - DNA, 201 bp, Homo sapiens; identical to SEQ ID NO: 256498

SEQ ID NO: 436318 - DNA, 201 bp, Homo sapiens; identical to SEQ ID NO: 256579

SEQ ID NO: 436319 - DNA, 201 bp, Homo sapiens; identical to SEQ ID NO: 256582

SEQ ID NO: 436320 - DNA, 201 bp, Homo sapiens
agagatctcaaaccaactaatcttttcattaatactgaagacttggtgctgaagataggcgactttggtcttgcacggatcatggatcctcattattcccrtaagagtcatcttttgaaggattggttactaaatggtacagatctccatgtcttttactttctcctaataattatactaaagccattgacatgtgggctg

SEQ ID NO: 436321 - DNA, 201 bp, Homo sapiens
aatcttttaaattctcaacatgagtagagctttttgagctttaaacctacggggaaatcaacaggcctgtttggcagaagcaatgaacatcaagaaaccaycttgctgtggaagcataattatttttcttatccctttttgaaagatctttccttttgatgccagttttcttccttgtttacacaagttcaacaattccaa

SEQ ID NO: 436322 - DNA, 201 bp, Homo sapiens
catatgttcttttccaatggataagccaatttcaagccatccttttcatattgaagatgaagctcataatattttgcttatggatgaaactcacagtcacwtttataactgggaaaggtactatgactgtcagttttcagagcatgattggcctatacataacaactttgatattgatgaagttcagcttaatccaagagc

SEQ ID NO: 436323 - DNA, 201 bp, Homo sapiens
tgcacatgaggaagatcgtcaggagcttctcagcgtaattccagtttacattagaaatcacatgactgagccacacaaacctttaactcagctacttccakgaattagtcgcgaagcactgaatttcctggaacaaattttgacatttagccccatggattggttaatagcagaagaagcgctctcccatccttacatgag

SEQ ID NO: 436324 - DNA, 201 bp, Homo sapiens
aggctgcatctctgctgaaatgctgactgttttgtaaaaccctttttgcaggtgcacatgaacttgaacagatgcagctgactttagaatctattcctgtygcacatgaggaagatcgtcaggagcttctcagcgtaattccagtttacattagaaatcacatgactgagccacacaaacctttaactcagctacttccag

SEQ ID NO: 436325 - DNA, 201 bp, Homo sapiens
cataagagtcatcttttgaaggattggttactaaatggtacagatctccatgtcttttactttctcctaataattatactaaagccattgacatgtgggcwgcaggctgcatctctgctgaaatgctgactgttttgtaaaaccctttttgcaggtgcacatgaacttgaacagatgcagctgactttagaatctattcct

SEQ ID NO: 436326 - DNA, 201 bp, Homo sapiens
gctgtagacaatgattgtgacaaaagagtagccatcaagaaaattgtccttaccaatccccagagtgtcaaacatgctctatgtgaaatcaagattattaraagacttgaccatgataacattgtgaaagtgtttgaaattcctggtcccagtgggagccaattaacagatgatgtgggctctcttacggaactaaacagt

SEQ ID NO: 436327 - DNA, 201 bp, Homo sapiens
gtagaggatgggaagcttggggagagagaaatgaggaaggatttctgaacaacagtgaggagttcctctttaataagcagctcgagcccaataggcatccygcagtttcacagtccagttgggtcaccacttaagtcaatacaggccacattaacagcttctgctatgaaatcttcccctcaaattcctcatcaaacatac

SEQ ID NO: 436328 - DNA, 201 bp, Homo sapiens
aaccattggtgtagatgaagtctcaaaaaataggtgtgttctctggtagagattatgtggagaaaagaaaagcaagctaaggatttggactgcgggtcccygctcccaccaaatttaaagtgagtcagggaagaaaaagccagcaaagcaggaccaacgctaatctgggaagtggatggatgaaagtggagggaggagtat

SEQ ID NO: 436329 - DNA, 201 bp, Homo sapiens
tgctctgtctgctgtcactgcagccacaggattgccaggggcaggcaagaccaaggggagtgggcgcacgggaagaagcaagcaacagggatttccccccrtactcttagcttgcagttttatgtgcctgtgctactgggctgccattgccgctaccataggattgcctgggagaatgaaaaaaatctaaagaaaacaaaa

SEQ ID NO: 436330 - DNA, 201 bp, Homo sapiens
agtaaaaaaaaattgctgcagaatcatcttagtaatgctttatttgttaattccagttgttttgttagaatgctaaaccctggtatttttcttaaagattrtattggatttctttttctatattgtaatattataaagaaaaatatcactggctttaaaacatgtgttttatccatctttacttttagctgcaggaataca

SEQ ID NO: 436331 - DNA, 201 bp, Homo sapiens
tctgtctgctgtcactgcagccacaggattgccaggggcaggcaagaccaaggggagtgggcgcacgggaagaagcaagcaacagggatttccccccataytcttagcttgcagttttatgtgcctgtgctactgggctgccattgccgctaccataggattgcctgggagaatgaaaaaaatctaaagaaaacaaaaaat

SEQ ID NO: 436332 - DNA, 201 bp, Homo sapiens
ttcaggctacctctgagtctaggccaggaatatcagagaaaatataaaaacagggagtccccagacggcttttccatttattcctccaagattcttagttrcattcagtgggggagagagaatggagtgtgcttactctgaaagactttttatcaattagcttatttgacaacagattaagtggaagattatttagagaaa

SEQ ID NO: 436333 - DNA, 201 bp, Homo sapiens
aacaacctttgttttcttcaagtaaaaaaaaattgctgcagaatcatcttagtaatgctttatttgttaattccagttgttttgttagaatgctaaacccwggtatttttcttaaagattatattggatttctttttctatattgtaatattataaagaaaaatatcactggctttaaaacatgtgttttatccatcttta

SEQ ID NO: 436334 - DNA, 201 bp, Homo sapiens
tttcagaggataattttttaatgccaaaaatcctacatagaattgattttttaaacagcccaaatatctttaaaggaaaaagcagccaggtgtggcggctmacacctgtattcccagcactttgggaggctgaggcgggcgaatcacctgaggtcaggagttcaagaccagcctgaccaacatggagaaaccccatctcta

SEQ ID NO: 436335 - DNA, 201 bp, Homo sapiens
ttttccaatatattcaaaaagtggtgtgtttagcctgctttctaaaataactctaactgataacacttccattttggttcttttaaattccttttgttctaaaaaaaaaaaaatcacgagctgttttgtttctttagtcaatgtctcttgggagatttctgccagctaacttcagatcagggtgtgtgccaattagcaaca

SEQ ID NO: 436336 - DNA, 201 bp, Homo sapiens
tggaaacctatgcagtgtgagaattcagatagtaccagaacagaatggtctttgtgctgacccttttaagtgagcaatcttttacattatgttcataatawatgttgatgcaggtaaatactatcatgtaacataattctgtttgtgcctctctaacctcttcattttgttttagggttttttgttgtttgtttgtttttg

SEQ ID NO: 436337 - DNA, 201 bp, Homo sapiens
ctttacacgatttctgatcgagccctgaggagctgcaatcaaatttcttgagagtgtgggaggctggtacaaggatttgtaatcctgggcctgcttaagarggtaacgtgtaagaagtggcagtggtggagaagcagcctgggagagcagtccagcccagaatctaagatgtagcagctgggtcagatgaaagataaggcc

SEQ ID NO: 436338 - DNA, 201 bp, Homo sapiens
ggccaggaagatttgcacagactctaaactgtggaaaatgtgtctggataaaagaaagatatgagtaaataaaaatacaaaaaaaatgcctgctcttcccrgataaagcacagtcgtagattaagaaatgtgcagcaatgcctctctgtgtggtaggagtttatagcagtactgcttaaagtgtagttacggggctgctgg

SEQ ID NO: 436339 - DNA, 201 bp, Homo sapiens
gtttcctcccagttagattcaggttgaataactttggaatactatatgggagttgatgtgtttttctcaatgctcaaattgaagttgtcccagattttccyggtgggataaatagatttttaaagaatatcacaaaaaatactcgagttgctatattttaagaaatttggaccaaaaagtcaatatttttgtttgcatcct

SEQ ID NO: 436340 - DNA, 201 bp, Homo sapiens
ttgaggttgatttttttttttttttttttgagatggagccttgctctgtcgcccaggctggagtgcagtggtttgatctcggctcgctgaacctctgcctyccgggttcaagcaattctcctgcctcagcctcacgagtagctgggactacaggtaccactgccacacccagctattttttttttttttttttgtatttta

SEQ ID NO: 436341 - DNA, 201 bp, Homo sapiens
ttttatgaacgttctttgtatagaattttctgtgaatgtaatttttcatttctctgggataaaaacctcaaggtcatatggtaattgcatgttttcttttrtaaggatctgccaaactgttttcaagagtgactataccatttactttcccatcagcaatgtataagttatattttaacatctctgaaatcaggatgcatt

SEQ ID NO: 436342 - DNA, 201 bp, Homo sapiens
attttgtaatatttaccattttctgcaaactgtttttttctttctgaaccataggaaaggagtattttctcctataaccacaatgcaattataacactcargaagtataacattaacacagcactgttttctaatactctgtcttcagtatttgctcttgtcttagtgaaaacaaaaaacaaaaaaacttcttttttcaat

SEQ ID NO: 436343 - DNA, 201 bp, Homo sapiens
tcctacctcggcctcccaaagtactggattacaggccactgcatccagcatacaaaatttattttattttttaagttaaagtaaaatcgacttttggtgtrtagttatgtgaactttaggacatgtgtagaagtaatccccaagctcccttgtgttactttattgtagtcacatctccccactcacctaacctctagtaac

SEQ ID NO: 436344 - DNA, 201 bp, Homo sapiens
gaatgccacaggattgcagattagtaggaagcaaatggattgttcaaatgaaacactaaaataaaatgacatctattaaaagaaaatataaagtatttttrtgatatcgaaatggtaaaaggctaggtcttaaagacaggaaccataaagaaaaagaataataagtttaactatgtaaaatattagtgggtaaggagagat

SEQ ID NO: 436345 - DNA, 201 bp, Homo sapiens
tagtatgaatttggctttggggtgctatcctttgtactttatcaaattaaggaagttccctttctttgctaagtttgctgacactttttattatgaatggktattgaatttatcaaacatattttctgtgcttattatctaggtttagtgtgttttatgcaagctacttggggtttgtagggctttttgaatttgttgctt

SEQ ID NO: 436346 - DNA, 201 bp, Homo sapiens
tctgttcatagctgtgtacccaactcctggtacaaattggcttataaatttttgctgaaaccagtgattgaacatcagatttaagtgtataagtatgtgcwgttgtagaatggctctgaagaattatatatcaatagattttatctttatcaaacacaatctgatctttgacaaaggtgctaagaccagccagcagaacaa

SEQ ID NO: 436347 - DNA, 201 bp, Homo sapiens
tctgtatatgccacagatttttcaaatgctagtacaactggactttttgacccatataaggtaaaaatttttttttcttctttttgaatcacacatttttktgtaatatagatagatttaaatttttaaaattagtttatttttaattgacaaatatatcatgtacaacatgatgttttgatatatgtttagaggtttgat

SEQ ID NO: 436348 - DNA, 201 bp, Homo sapiens
gctataagggatggggtgaggaaggaatggggaatgatttcctaattgttatagagcttctgtttggggtgatgagagttttaaaaacagtggtgatggtygcacaacgttgtgaatgtacttactgccactgaattgtacacgtaaaataggtaaaatggtaaacctcatattatgtatattttgccacaattttttttt

SEQ ID NO: 436349 - DNA, 201 bp, Homo sapiens
atagccaaagagtacaaacaacccaagtgtgtaccaacagatgaattgataaatggtatgtagtatataaatacgttgaaatattgttcagccataaaacrgaatacatttctgatacatgctacaacatggatcaatctagaaagctaagttatattatactacgtgaagtaagccaaatataaaagaacaaatattgta

SEQ ID NO: 436350 - DNA, 201 bp, Homo sapiens
gcatctttttcagcctgtttttgttcttgtagcactcaagccctttcttaccttaaggccattgtacatgcacggggtctctctgccatcgtggctggatscttctcatctttttagggtcgagctcatgtagcacatctgggaacccttccctgccaccctacttaaaggaacccccttgccctcaatctcttatgttgc

SEQ ID NO: 436351 - DNA, 201 bp, Homo sapiens
gacccagcagttccacttctaggtatatacctaaaaaaattgaaaacaaagactcaaacagatacttcacaacaatattaaagcagcagtaatcacgatarccaaagagtacaaacaacccaagtgtgtaccaacagatgaattgataaatggtatgtagtatataaatacgttgaaatattgttcagccataaaacagaa

SEQ ID NO: 436352 - DNA, 201 bp, Homo sapiens
attgtttttatatttgatgaattctattagattttacttatggtttgtcatcttaatagctatctattaaatagatgcttgttttaaatttttctttgtasaatggtaatagataaaatttagttgtaaaatataaattatgccttcttacatgaaggcaaaaaaaacacaaggacctgcgcttcttgcttatttgagtat

SEQ ID NO: 436353 - DNA, 201 bp, Homo sapiens
tgtgccttgttagctcatttctttttatcacctaataatattccattgtctgaatgtggcacagtttatccaatcacatttttttttttttttttgagacrgagtctcactctgtcgcccaggctggagtgcagtggcatgatctcagctcactgcaacctctacctcccaggtccaagcaattctcctgcttcagcctcc

SEQ ID NO: 436354 - DNA, 201 bp, Homo sapiens
ctctatgatgcagatgacatgatcttgtatattgaaaatcctaaggaatttcctaaaaaaattagcactaatattataaatgagtttagtaaggtgggagrgtataagatcaatatacaaaaaaaaaaattttcttttttgacacagagtctgtcacccaggcttgagtacagtggcatgatcgcagctcactgtagtctc

SEQ ID NO: 436355 - DNA, 201 bp, Homo sapiens
atattatgtaatatgttcttcttgctaatttccatggtatctttcttattttttcttatatttaatgtaccaacaccactcagacttgatatctgaaaatygaaggatttttttaaaaaattcaatttcttaagcatgcaagattcaaaatttggattttcaaaggtttagtatccttattcatgaaagataattccaagt

SEQ ID NO: 436356 - DNA, 201 bp, Homo sapiens
gccatgcatagtggcacgtgcctgtagtccaagctactcaggaggctgaagcaggagaattgcttgaacctgggaggtggaggttgcagtgagccgagatcatgccactgcactccagcctgggtgacagagcgagagtccgtctcaaaaaaaaaaaaaaaaaaaaaaaatcaaaatctcctttcattaattgttgtggtg

SEQ ID NO: 436357 - DNA, 201 bp, Homo sapiens
gcactgcagcctgggcaacagagtgacactttgtctcaaaacaaaaaacacaaaaacaaaaaacaagaaacaacctttgttttcttcaagtaaaaaaaaawtgctgcagaatcatcttagtaatgctttatttgttaattccagttgttttgttagaatgctaaaccctggtatttttcttaaagattatattggatttct

SEQ ID NO: 436358 - DNA, 201 bp, Homo sapiens
cagaggataattttttaatgccaaaaatcctacatagaattgattttttaaacagcccaaatatctttaaaggaaaaagcagccaggtgtggcggctaacrcctgtattcccagcactttgggaggctgaggcgggcgaatcacctgaggtcaggagttcaagaccagcctgaccaacatggagaaaccccatctctacta

SEQ ID NO: 436359 - DNA, 201 bp, Homo sapiens
aacacggtgaaaccccgtctctactaaaaatacaaaaaattagccgggcgaggtggcgagcgcctgtagtcccagctactcgggaggctgaggcaggagartggcgtgaaccccagggggcggagcctgcagtgagccgagattgcgccactgcactccagcctgggcgacagcgagactccgtctcaaaaaaaaaaagaa

SEQ ID NO: 436360 - DNA, 201 bp, Homo sapiens
taatccctagtaaggggttaatatctagaacatgtaaagaattcctacaattcaacaacaagaaagcaacaacgcagttcataaatggacaaaggacttgrgtaatacacagatggtcaataagcacacacaaagatgctcaatgtcattagtaatcagggaattgcaaattaaaaccataatgagataccacttcacacc

SEQ ID NO: 436361 - DNA, 201 bp, Homo sapiens
gtctcgatatcctgacctggtgatccacccgcctcggcctcccaaagtgctgggattacaggcatgagccactgcgcctggccaatgaatagaaatttttwaaaaaaacaattagcaactggtcctttactgcagataatttgagttttttgggaacaaggatcttgttggtctacattgctgcttagtacctggtttatt

SEQ ID NO: 436362 - DNA, 201 bp, Homo sapiens
gggagcaaatagagccaagattctaaattgtctttttgactcagaagcgtatgttctttatactatccccatattgccttcaacatgtttctttctttttytttttcttttttcttgagacagggtcttactctgttacccaggctggagtgtagtggcatgattacagctcactgcagcctcaacttcccaggctcaggt

SEQ ID NO: 436363 - DNA, 201 bp, Homo sapiens
aggttgcggtgagccgagattgcgccactgcactccagcctgggcaacaagagtgaaactccgtctcaaaaaaaaaaaaaaaaaagaaaaaaaacgtaagkcctgctgcatacagagcctatctaagagggccttctacctcctgtctcccttctatgggcctggaaacctatgcagtgtgagaattcagatagtaccaga

SEQ ID NO: 436364 - DNA, 201 bp, Homo sapiens
taggatttccccagttttactttatatttgtctgtgtttgtgtgtgtgtatgtgtatgtatataagttctatacaattttttcctatctgtaggttcatgyatccaggagcatatgcaagatactgaacagttccgtcactacaaagatctcttgtgttgttcttctgtaactatatctaccactctcctatacacctccc

SEQ ID NO: 436365 - DNA, 201 bp, Homo sapiens
ttctttctttttctttttcttttttcttgagacagggtcttactctgttacccaggctggagtgtagtggcatgattacagctcactgcagcctcaacttyccaggctcaggtaatcctcccgccttagcctcctgagtagctgggactacaggtgcactccaatatgcctggctaatttttttgtattttttgtagagac

SEQ ID NO: 436366 - DNA, 201 bp, Homo sapiens
tgtggtgttgcagctgttcagcagcatccctggcctctacccactagatgtcagtagcaccccagcccacctcaccaccatttgtaccaaccataaatgtstcaaaacattgctgaacgtcccctggggacatccccaatttggaaccattggtgtagatgaagtctcaaaaaataggtgtgttctctggtagagattatg

SEQ ID NO: 436367 - DNA, 201 bp, Homo sapiens
gcccaaatatgggccattgccctaggacctcaattctctatggatctaaggagagttgttgattttcagtttgctcaactttttttttgtgaggatgtaartaatgacttccaagctctttacctatcagacgggaaattggagtcccctcttgtacatttttaagtttagaccttctcactgaatcccctgtatatctaa

SEQ ID NO: 436368 - DNA, 201 bp, Homo sapiens
tctatgggcctggaaacctatgcagtgtgagaattcagatagtaccagaacagaatggtctttgtgctgacccttttaagtgagcaatcttttacattatrttcataataaatgttgatgcaggtaaatactatcatgtaacataattctgtttgtgcctctctaacctcttcattttgttttagggttttttgttgtttg

SEQ ID NO: 436369 - DNA, 201 bp, Homo sapiens
gtttagtaaggtgggagggtataagatcaatatacaaaaaaaaaaattttcttttttgacacagagtctgtcacccaggcttgagtacagtggcatgatcrcagctcactgtagtctcaacctccaggctcaagagatcctcttacttcagccgccagagtagctgggactacaggcgcacaccaccatgcccagttaatt

SEQ ID NO: 436370 - DNA, 201 bp, Homo sapiens
tgggagaggtggtaggttgaccgtaggtcatgtatttccctgtgtaaaatgaaactttaactggaaattgaaagttaaaccaaacagcaataatgtgttartactaaactgtttggaaaataggagggaagatcacctataatctgcctatgtgaacaactagagaaaatgagggatggggcatgaaaggaaggaaggttt

SEQ ID NO: 436371 - DNA, 201 bp, Homo sapiens
ttaggttctgtatatgccacagatttttcaaatgctagtacaactggactttttgacccatataaggtaaaaatttttttttcttctttttgaatcacacmtttttgtgtaatatagatagatttaaatttttaaaattagtttatttttaattgacaaatatatcatgtacaacatgatgttttgatatatgtttagagg

SEQ ID NO: 436372 - DNA, 201 bp, Homo sapiens
tgtgatgatggcagtaataggatagacagagaagctgtttgtccacatactcttgaggactggtattggaaagcagtcagcaactgacagcagttcttagygtctttgggttcctgcttctctctgttctgcttttctcttttcattaccagctttgctctgtgtcctttcttcctccatagcttctgcttaattgtcatc

SEQ ID NO: 436373 - DNA, 201 bp, Homo sapiens
actatctctatgatgcagatgacatgatcttgtatattgaaaatcctaaggaatttcctaaaaaaattagcactaatattataaatgagtttagtaaggtsggagggtataagatcaatatacaaaaaaaaaaattttcttttttgacacagagtctgtcacccaggcttgagtacagtggcatgatcgcagctcactgta

SEQ ID NO: 436374 - DNA, 201 bp, Homo sapiens
aagatttaaaaaatataaagaggttaaaagtaagtgagtggaaaagatatatcatgtaaacagtcactgtaagaagctggagtggttatattaacatcagrtagtatagactttaaaacaaaaacatgttactagagataaaaagggaattttataatgataagatggtgaattcatcataaatatataacagttataaac

SEQ ID NO: 436375 - DNA, 201 bp, Homo sapiens
ttcgataccactttctctcctacctcctgtgagggacacaaggtaataataaacatcagacatagtaaccagcacaatggttcttgaattcattttgtttygtggggaaaagcattttattacatgtttgaaggacttgtatgttcattatgtaactttttggcttatgcaaaaaaacaatttgctgagttttaaaactaa

SEQ ID NO: 436376 - DNA, 201 bp, Homo sapiens
tcagacatagtaaccagcacaatggttcttgaattcattttgttttgtggggaaaagcattttattacatgtttgaaggacttgtatgttcattatgtaastttttggcttatgcaaaaaaacaatttgctgagttttaaaactaatatttctagagctgtaactaactttttaatgaattttatttgaagccacaatttt

SEQ ID NO: 436377 - DNA, 201 bp, Homo sapiens
actatttttcacaaataaaccaacatctttaaatttattttagggagtgaggtaggattaacaaaagtgggtaagttcaacaagaagtgggcaatacttcwtaagtgttttgtaaaacatcagttttacaagttgaagtgtccatctacatccctgtagtgtgtggcaggatagggtttttttttttttcctagtatgtct

SEQ ID NO: 436378 - DNA, 201 bp, Homo sapiens
ttatattactatttttcacaaataaaccaacatctttaaatttattttagggagtgaggtaggattaacaaaagtgggtaagttcaacaagaagtgggcartacttcttaagtgttttgtaaaacatcagttttacaagttgaagtgtccatctacatccctgtagtgtgtggcaggatagggtttttttttttttcctag

SEQ ID NO: 436379 - DNA, 201 bp, Homo sapiens
atttaggttctgtatatgccacagatttttcaaatgctagtacaactggactttttgacccatataaggtaaaaatttttttttcttctttttgaatcacmcatttttgtgtaatatagatagatttaaatttttaaaattagtttatttttaattgacaaatatatcatgtacaacatgatgttttgatatatgtttaga

SEQ ID NO: 436380 - DNA, 201 bp, Homo sapiens
tgggactacaggcatgagtcactgtgccaagcctgtttttgatttttaagagtcctttcacattgcctttgatttcctgtggcagcttaagcaggaggtakagaccacctgttgcaagatgtgcagtctccacagtagctgggggagcagctgagggaaagggaatttaatttccaagttacaaaatcattatcatttaga

SEQ ID NO: 436381 - DNA, 201 bp, Homo sapiens
ccttctacctcctgtctcccttctatgggcctggaaacctatgcagtgtgagaattcagatagtaccagaacagaatggtctttgtgctgacccttttaartgagcaatcttttacattatgttcataataaatgttgatgcaggtaaatactatcatgtaacataattctgtttgtgcctctctaacctcttcattttgt

SEQ ID NO: 436382 - DNA, 201 bp, Homo sapiens
caccgtgcctggccattttttgcatttttagtagagatggggtttcaccatgttggctaggctggtcttgaactcctgaccttaggtgatccacctgcttyggcctcccaaagtactgggattacaggcgtgagccaacgcacccagccgactagtgtatgtttaaactaaaaatgtatatactttgttttttttaaaaaa

SEQ ID NO: 436383 - DNA, 201 bp, Homo sapiens
gaggctgaggcgggcggatcacttgaggttgggagttcgagaccagcctgaccaacatggagaaaccccgtctctactaaaaaatatcaaattagctgggygtggtggcacatgcctctaatcccagctactcgggaggctgaggcaggagaatcacttgaacccgggaggcagaggttgcggtgagccaagatcgtgcca

SEQ ID NO: 436384 - DNA, 201 bp, Homo sapiens
tagccatgcatagtggcacgtgcctgtagtccaagctactcaggaggctgaagcaggagaattgcttgaacctgggaggtggaggttgcagtgagccgagatcatgccactgcactccagcctgggtgacagagcgagagtccgtctcaaaaaaaaaaaaaaaaaaaaaaaatcaaaatctcctttcattaattgttgtgg

SEQ ID NO: 436385 - DNA, 201 bp, Homo sapiens
agccatgcatagtggcacgtgcctgtagtccaagctactcaggaggctgaagcaggagaattgcttgaacctgggaggtggaggttgcagtgagccgagatcatgccactgcactccagcctgggtgacagagcgagagtccgtctcaaaaaaaaaaaaaaaaaaaaaaaatcaaaatctcctttcattaattgttgtggt

SEQ ID NO: 436386 - DNA, 201 bp, Homo sapiens
gacataggattttgctgtgttcccctggctgatctcgaactcctagactggggccttctgccacctttgcctcccaaagtgctgggactacaggcatgagycactgtgccaagcctgtttttgatttttaagagtcctttcacattgcctttgatttcctgtggcagcttaagcaggaggtagagaccacctgttgcaaga

SEQ ID NO: 436387 - DNA, 201 bp, Homo sapiens; identical to SEQ ID NO: 259486

SEQ ID NO: 436388 - DNA, 201 bp, Homo sapiens; identical to SEQ ID NO: 259522

SEQ ID NO: 436389 - DNA, 201 bp, Homo sapiens; identical to SEQ ID NO: 259423

SEQ ID NO: 436390 - DNA, 201 bp, Homo sapiens
tagagccatatgttgtctcaaaaaatatataaataaattttggattgaggtagtgtcaatggaacggagagaaaagggtgaaattaatgcaggatattttmaaggtgttcattgtagaaatgtaatgacatgggatatagggagtaagccagtgggaaagagggaagacttaaatgttttaaatttgggatacaggaaaaa

SEQ ID NO: 436391 - DNA, 201 bp, Homo sapiens
agctcacgagttcaagaccagcctggttaacagggcttaaaccccatctctacaaaaaaatagccaagcgtggtggtgcacgcctgtagtcccaactgctygggaggctgaggtggcaggatagcttgagtccaagaggtggaagttgtagtgagccaagatcacgccactgcactctagcctgggcagtagagccatatg

SEQ ID NO: 436392 - DNA, 201 bp, Homo sapiens
ttctttcccagagaggtgtccctgaaaccacctttcagaggcaggatctgcacagttcagaggatatttaagctcaataacatctccattcttctcttttmattgcccgtgatgttctgtgtaatgccggaccaactcagccaaagtggaaaatttctcccctccacacagatcacagtaatcaccagtgttctgaatctt

SEQ ID NO: 436393 - DNA, 201 bp, Homo sapiens
ctgaaactcttctgctgttgcatcaggcccacgttttcatacactctagcactgtctgctctcatttctgcacagcgtggagttggagtacaaggcggggsggggggctctgatctccactcgtctggtccgctagagaatacttaatatttgtatattcatgacctttcctcttgcttttctgctcttcttcaatcctgc

SEQ ID NO: 436394 - DNA, 201 bp, Homo sapiens
aatatgatattctttaggtttacttttgaagtaagtttttgacagaagaaacatttttaaaaggacaatagctgtgtttaagaaatgaaatatgtggtatktaaacagtctctataaactatccaaatactaatgtgatctcagatatcacacaaaaataaattaagaactatagttttacgttgttactaaaactatatg

SEQ ID NO: 436395 - DNA, 201 bp, Homo sapiens
ttgcagtcttaatccagtggatcaaagtacgattaatgtttggagatactctggtagatgttgctaattgtgagaatgccttcatttccaccctaagttaygatggggattttttttttcatctcctgtctacttgttgtaggttagggcagtaggaagataactgatttctttatgaatgtgatttggtgtatcaagtac

SEQ ID NO: 436396 - DNA, 201 bp, Homo sapiens
atcatcatcatcaatagagggcagtagaagggaagctgcgacaattctggacttaagtcttcagaaggcctggccacttctgcttttgagctcttgggagstctgagcttcatgtcagaggtctagctacctgccagccaggccactgaaagagactacacgaagaaggagagactcaggactgcaggcagaaagagaagc

SEQ ID NO: 436397 - DNA, 201 bp, Homo sapiens
tttttgtcgggtatgctagataagtgatattgtctgctatttattacatgacaacaggagtcataatttcaggattttccaccattagtgatatgttcatytggttaaggtgctgaccaccacagcactccattgtaagatactgtgtgtcctttgtaatcagcagtttggtatcttgacactagttgaacatcctattct

SEQ ID NO: 436398 - DNA, 201 bp, Homo sapiens
gagggtaagatgtattatttgtattctatttgttatgtagagtgggacttattttcttaacagactactcattattagtgcactacgggttttcaagaagyagttcctggaatatattaaataagtggttgctgggggtgtaggtattcttaagtttataaaggatatactgctatctgtatgtaagtcactggttcttaa

SEQ ID NO: 436399 - DNA, 201 bp, Homo sapiens
tattgaatgtcattattctgtatcgttgattctctagtatgcatctgtgacctggaaggcttgtcagagattgctgggccctaccccagagtgtgattcaytggttctagagtagagtttaagcatatgcatttcctagaagttcccaggtgtctgtataataatcatttattacagcgtctagaattggttactctaagg

SEQ ID NO: 436400 - DNA, 201 bp, Homo sapiens
gcgcgtcttcgcccctcctgcggttgccaggcaaccggccccggaagttgcggcaggtgcgtccgcagcgggcgccgctagccagcggaagatggcggagrgcggaggccctgagcccggcgagcaggagaggaggtcttccgggccgcggcctccgagcgcgcgggatttgcaggtgaggcgaggagccgggggagggag

SEQ ID NO: 436401 - DNA, 201 bp, Homo sapiens
tcttggaggtagttttcatatcatttgtgtgtctaaaaggagcattttaatctgttttgttatgattttgggtttttttgtttgtttgttttttgggtttkttttgaaaaaaacaaaaaaaaaaaccggagattatggtcatgccaattataattgaatagccacaggagcattaaagaaagttgttgagttgttgtccaa

SEQ ID NO: 436402 - DNA, 201 bp, Homo sapiens
agtgcttattttcatggtccacctccttgggcggtatttgaaatcaaaacagttattgtctcattgtcattttaagccaagacagtttcattatctgaaastctggacataagatggtctgtgtttttaatttacaagaggagttacgtaatctacagaaagaccctcaggatatagtctgatgcctgttttgacatattc

SEQ ID NO: 436403 - DNA, 201 bp, Homo sapiens
cgttcaacctggctggaggcctgttagggctgttccttctcactgtggcctgactaaaaaccagtggcattaagaaagagtcacatttcccaagtctgggrgtgccccagtggggtggtgctgctttcaaaagccctgagtccctaaacacatccatcctcacaagatcagtttccccaagtgctggttccaaaaacaggc

SEQ ID NO: 436404 - DNA, 201 bp, Homo sapiens
tctatttgttatgtagagtgggacttattttcttaacagactactcattattagtgcactacgggttttcaagaagtagttcctggaatatattaaataartggttgctgggggtgtaggtattcttaagtttataaaggatatactgctatctgtatgtaagtcactggttcttaattttgtgggccaggggcattggac

SEQ ID NO: 436405 - DNA, 201 bp, Homo sapiens
tgaagttttggcagattttctcatctgaaactcttctgctgttgcatcaggcccacgttttcatacactctagcactgtctgctctcatttctgcacagcrtggagttggagtacaaggcgggggggggggctctgatctccactcgtctggtccgctagagaatacttaatatttgtatattcatgacctttcctcttgc

SEQ ID NO: 436406 - DNA, 201 bp, Homo sapiens
atattgttcctgtccatgcagtagcatgtgggaatagatgatgtgccgtattaataaggacaatacttcagcattaaaaacagccaaattatttttattayttttacagataaattttggttttattgttattctgtcttccaatctgaatatagacaaatttggattaggaatagaccttgagataagtatgtttgagtt

SEQ ID NO: 436407 - DNA, 201 bp, Homo sapiens
caataaaattaagggcaaatacagatcctgacaaaggcatcctgacatcagggaggccatgtgcttgctatatgtaaaacttgattcccccaacaacatayagaaaataaaaactgcactggctttgtagttatgtctacagtctaagtttcccttatggatactaagctaaaataaaacacttcacaattgcaaaccttt

SEQ ID NO: 436408 - DNA, 201 bp, Homo sapiens
tatgacccactaaaaccaactgttcaatagtttttgccttgtgtgaactgcctgtagtgaaaaaagaacaaatttttaatgatgaaagatacaataaactrtattttggaacttttcaagaggaagaaggaaaagctatttcaataaaattaagggcaaatacagatcctgacaaaggcatcctgacatcagggaggccat

SEQ ID NO: 436409 - DNA, 201 bp, Homo sapiens
actaagccactgtcctgcttactgttgacagggtgactctcattgcatgtatgcctgaaattcagcaacttatgttagaaatcttttaatgtggcattacwgctggcagaagatttcaaaaggttagtttgaagttataatttgtgaaagtaaactcagatattcagtgctctcacccatccaaagaacattgtaacttac

SEQ ID NO: 436410 - DNA, 201 bp, Homo sapiens
gtcacaaataaacagacaaattattaattacatgatttgaggcttaggatgaaaacttgtcaaaattagtttgatatacagcaaagttatatgacccactraaaccaactgttcaatagtttttgccttgtgtgaactgcctgtagtgaaaaaagaacaaatttttaatgatgaaagatacaataaactatattttggaac

SEQ ID NO: 436411 - DNA, 201 bp, Homo sapiens
tcaagaccagcctggttaacagggcttaaaccccatctctacaaaaaaatagccaagcgtggtggtgcacgcctgtagtcccaactgctcgggaggctgargtggcaggatagcttgagtccaagaggtggaagttgtagtgagccaagatcacgccactgcactctagcctgggcagtagagccatatgttgtctcaaaa

SEQ ID NO: 436412 - DNA, 201 bp, Homo sapiens
attaccttaaaatacctaatattttggtagatatcatatgaaattatatcctgaatactatttttcttgggcacaatggttctttaatattttttgagtcrtaggactcattaagggtctgatgaaagctatagaattctcctctcaaaacaactttcatgtgcaagtttgtcattcgtttttaaggatatgtgtgtttct

SEQ ID NO: 436413 - DNA, 201 bp, Homo sapiens
cccccattgttttgttctatgtgtcagttcagtgtgaatttggaattggattggagagttataagtattttaacaactgaagtttgattgtcatcttaccytggaagtctccatgttgatacttcattgtttatagtttctgatattcttgatagaaaaaaatcttgaaagataaaagtaggttattaatcttacgtaaag

SEQ ID NO: 436414 - DNA, 201 bp, Homo sapiens
acataacttctagttgtatggaagaggttattcctagtgttatactttgtaacaagcctgttattatgtagttggccttggcagaattgtatgaagatgargtgaagtgcaaatcttccaagtctaatagacctaaagccacagtcttcaagagcccacggacaccacctcaacggtaagttttattttgttttgttgtaa

SEQ ID NO: 436415 - DNA, 201 bp, Homo sapiens
cacacacatgttcattaaggtatttagttgtatactctgtcccagttttcctccacatattatctgtttctacataggttggacggggagggagtgggaasagggataacttcagtattgttagggttaggattggatttgttaggatggactcaatagtgggtactataaatgagaagaattaaaatgtctgatagctgt

SEQ ID NO: 436416 - DNA, 201 bp, Homo sapiens
tttttatgtgaaaagtgagaacagcttggttaatgaccacctgattcttggcaaattgtttgcagtcttaatccagtggatcaaagtacgattaatgtttrgagatactctggtagatgttgctaattgtgagaatgccttcatttccaccctaagttatgatggggattttttttttcatctcctgtctacttgttgtag

SEQ ID NO: 436417 - DNA, 201 bp, Homo sapiens
aaacaatttgagaaacttaaaatctagttggggaaataaaacagcaaaagtacacaagtaatgacaacataatgcttaatatgaatgtcattgggggtatyacgtgctatgagtatttagaaaaaaagatattaagaagattagaaaaggttttgtgaaggagagctgaaatgggcctttgaaatacagatgacattttca

SEQ ID NO: 436418 - DNA, 201 bp, Homo sapiens
acagtcacctgaacagtaatgatacgtgatttgttcttttttgtcttggatgctatttctgacttgcttacttaaatataaaaatggttccattttatcargtaggtttttcttttaaaggggtgaaggaaagcgatgcactctatgcccatacagcctagttgtctaagctgtggtctttaaaacattgcactgaagaaa

SEQ ID NO: 436419 - DNA, 201 bp, Homo sapiens
actgcacctctacttcacacccttttttaaaatctggtctgggcatgtgacttgtttagtaagtagagggcatactccagctctcttctggtgagacgaaatcatcatcatcatcatcatcatcatcatcatcatcatcatcaatagagggcagtagaagggaagctgcgacaattctggacttaagtcttcagaaggcct

SEQ ID NO: 436420 - DNA, 201 bp, Homo sapiens
ctttaaagaatgcacacacaccaagaaagtcctacacatgttttctcatccccatttagccacatttcaaaagaccttgatttcagtgggagagatgaccrtaagtttcaggaaggccacacactagacatgaagcaccttttagttttttttttttttaaagctattaagactgtgaaatttgtcttttttaaaaaaacc

SEQ ID NO: 436421 - DNA, 201 bp, Homo sapiens
ctgcacctctacttcacacccttttttaaaatctggtctgggcatgtgacttgtttagtaagtagagggcatactccagctctcttctggtgagacgaaatcatcatcatcatcatcatcatcatcatcatcatcatcatcaatagagggcagtagaagggaagctgcgacaattctggacttaagtcttcagaaggcctg

SEQ ID NO: 436422 - DNA, 201 bp, Homo sapiens
tgcacctctacttcacacccttttttaaaatctggtctgggcatgtgacttgtttagtaagtagagggcatactccagctctcttctggtgagacgaaatcatcatcatcatcatcatcatcatcatcatcatcatcatcaatagagggcagtagaagggaagctgcgacaattctggacttaagtcttcagaaggcctgg

SEQ ID NO: 436423 - DNA, 201 bp, Homo sapiens
caccacgccctgctaattttttgtatttttagtagagatggggtttcaccgtgttaaccaggatggtctcgatctcctgacctcatgatccgccagcctcrgcctcccaaagtgctgggattacaggcgtgagccaccgcgcccagccggggatgggtttttttttttaagccactaaagttttagggtaagtttgtcagc

SEQ ID NO: 436424 - DNA, 201 bp, Homo sapiens
ccaggatggtctcgatctcctgacctcatgatccgccagcctcggcctcccaaagtgctgggattacaggcgtgagccaccgcgcccagccggggatgggtttttttttttaagccactaaagttttagggtaagtttgtcagcaacatttgacaaccaaaaacactggtcattcatagatgccttttttctgagtagaag

SEQ ID NO: 436425 - DNA, 201 bp, Homo sapiens
tctcagtcaaaagccaaactgtaattggtcatcggctggaaaaaaaaaaagctacacctcttaattcataaatatccatgattccttttctatgactcttyaatgccaatgcaaaggtagaccagtcagcttctgacagtctcaggccctagcttaattctcatttggccaaaaatagaagccatcaaaatgaattatcca

SEQ ID NO: 436426 - DNA, 201 bp, Homo sapiens
taattgcccgtgatgttctgtgtaatgccggaccaactcagccaaagtggaaaatttctcccctccacacagatcacagtaatcaccagtgttctgaatcttttttttttttttttttttttgagacagagtctcgctctgtcacccaggctggagtgcagtggcatgatctcggctcactgtaagctccgcctcctgggt

SEQ ID NO: 436427 - DNA, 201 bp, Homo sapiens
aatcaaaatgaaaaagtataaatatttgcttctagttactaaaactgttggttttaaaattaagaattgataatacaaatatatttttgttactttttaaracatgggttaaaaggaccaatgatgtgtgagttttcagtctcgatctttatgttttgtatcacaattatgccttgcacttagagatatggaactatttgt

SEQ ID NO: 436428 - DNA, 201 bp, Homo sapiens
gcgtcttcgcccctcctgcggttgccaggcaaccggccccggaagttgcggcaggtgcgtccgcagcgggcgccgctagccagcggaagatggcggagggyggaggccctgagcccggcgagcaggagaggaggtcttccgggccgcggcctccgagcgcgcgggatttgcaggtgaggcgaggagccgggggagggagcg

SEQ ID NO: 436429 - DNA, 201 bp, Homo sapiens
catctggagtcccaactactccagaggctgaggtaggaggatcacttgagcccagaagttcaaggccagcccggaaaacatagccagaccctatctctttaaaaaaaaaaaaaaaaaaaaggtgtttaaaaaaatgaacttgggccaggcacagtggctcacgcctataatcctagcactttgggagactgaggtgggcag

SEQ ID NO: 436430 - DNA, 201 bp, Homo sapiens
taaattaagtaaatacgttttaggatatcacatttggaacttaaaattatttgggggagatatattcttatgtatatgtgaatatatatatatatatatattttttttttttctatacccaaaaggttcagattttgcttaaactgtggagcaatggtttcagtttagatgatggagaattgagaccttacaatgaaccaa

SEQ ID NO: 436431 - DNA, 201 bp, Homo sapiens
aattaagtaaatacgttttaggatatcacatttggaacttaaaattatttgggggagatatattcttatgtatatgtgaatatatatatatatatatattwtttttttttctatacccaaaaggttcagattttgcttaaactgtggagcaatggtttcagtttagatgatggagaattgagaccttacaatgaaccaaca

SEQ ID NO: 436432 - DNA, 201 bp, Homo sapiens
caaggattattttggagctttaagatttaatgtctgccctgccgggtttcagacttctgtggggcctgttgcctctttcttttggcagatctctcttttgkaatgggaatgtttacccaatgcctataccaccattctatcttagaagtaaatagttaattttttatcttacaggattataggtagaaagaagatggcttg

SEQ ID NO: 436433 - DNA, 201 bp, Homo sapiens
aacctgagcctggaaaagccacaggtcctcacctccaacccatgagagaagccacagggccagagctgcccaaagccttggaagcccacctcttgcaccartatgccctgtatatgggacgtggcatcaaggattattttggagctttaagatttaatgtctgccctgccgggtttcagacttctgtggggcctgttgcct

SEQ ID NO: 436434 - DNA, 201 bp, Homo sapiens
gccagcttttgactattacaaataaagctgctgtgagcaattgggtacaggtttttttactcacttatggttttatttctctgagataaatgctcagaagygcaattggtagatcatacattaagtgtatgtttagtttaagaaacagccaaactattttccagagtggttgtgccattttatattcccacatatatgaga

SEQ ID NO: 436435 - DNA, 201 bp, Homo sapiens
tgccgtattaataaggacaatacttcagcattaaaaacagccaaattatttttattatttttacagataaattttggttttattgttattctgtcttccartctgaatatagacaaatttggattaggaatagaccttgagataagtatgtttgagtttttagttgaaggactggcttatgttgatagtttttggatttct

SEQ ID NO: 436436 - DNA, 201 bp, Homo sapiens
atgaagtaaaaaacaaaaatatgaaccatgcacattagatatatacatctgttaatattatatcataatattatatcatgtgataccattatatcataatattaattgtgatattaataatactgtaattaatacttagattgcagttaccatgtttgtggccctctaagccgtatacatgtgttatctcacttaatcttt

SEQ ID NO: 436437 - DNA, 201 bp, Homo sapiens
tgaagtaaaaaacaaaaatatgaaccatgcacattagatatatacatctgttaatattatatcataatattatatcatgtgataccattatatcataatattaattgtgatattaataatactgtaattaatacttagattgcagttaccatgtttgtggccctctaagccgtatacatgtgttatctcacttaatcttta

SEQ ID NO: 436438 - DNA, 201 bp, Homo sapiens
ggaagttgcggcaggtgcgtccgcagcgggcgccgctagccagcggaagatggcggagggcggaggccctgagcccggcgagcaggagaggaggtcttccsggccgcggcctccgagcgcgcgggatttgcaggtgaggcgaggagccgggggagggagcgcggcggtggacgcgggctggtgacggcgcgggctggtgcg

SEQ ID NO: 436439 - DNA, 201 bp, Homo sapiens
gaagtaaaaaacaaaaatatgaaccatgcacattagatatatacatctgttaatattatatcataatattatatcatgtgataccattatatcataatattaattgtgatattaataatactgtaattaatacttagattgcagttaccatgtttgtggccctctaagccgtatacatgtgttatctcacttaatctttac

SEQ ID NO: 436440 - DNA, 201 bp, Homo sapiens
aagtaaaaaacaaaaatatgaaccatgcacattagatatatacatctgttaatattatatcataatattatatcatgtgataccattatatcataatattaattgtgatattaataatactgtaattaatacttagattgcagttaccatgtttgtggccctctaagccgtatacatgtgttatctcacttaatctttaca

SEQ ID NO: 436441 - DNA, 201 bp, Homo sapiens
tcccagcactttgggaggccgaggcaggcagatgacttgagattaggaattcaagaccagcctggccaacatggcgaaaccccatctctactaaaaatacaaaaaaaaaaaaaaaaaaaattagccgcatgtggtgacaggcacctgtaatcccagctacttgggaggctgaggcaggagaatcacttgaactcaggaggc

SEQ ID NO: 436442 - DNA, 201 bp, Homo sapiens
gtggacgcgggctggtgacggcgcgggctggtgcgagttggaggccacctctggcctcggcggagcctttccccgaccccgtctggggatagaatccggcrcccggtctcccgatgtcgggtcttgacactgtggtggtcgtgaacacaagtgcccaagcctccagcgctggtgctttgtctcccttccaccccacgtatg

SEQ ID NO: 436443 - DNA, 201 bp, Homo sapiens
aagaatatgatattctttaggtttacttttgaagtaagtttttgacagaagaaacatttttaaaaggacaatagctgtgtttaagaaatgaaatatgtggtatttaaacagtctctataaactatccaaatactaatgtgatctcagatatcacacaaaaataaattaagaactatagttttacgttgttactaaaactat

SEQ ID NO: 436444 - DNA, 201 bp, Homo sapiens
agtatgagccactttggctaattagaattaatctagttttaaaatacatatcacataataactttttgctgaataatcctttgtgaattttaactcacttsctatgtattttagtcatttacaggtggaggatacagattgggtagttctttttgtaagcggtctgaatatatctatggagaaaatcagctgcaagatgta

SEQ ID NO: 436445 - DNA, 201 bp, Homo sapiens
agaatatgatattctttaggtttacttttgaagtaagtttttgacagaagaaacatttttaaaaggacaatagctgtgtttaagaaatgaaatatgtggtatttaaacagtctctataaactatccaaatactaatgtgatctcagatatcacacaaaaataaattaagaactatagttttacgttgttactaaaactata

SEQ ID NO: 436446 - DNA, 201 bp, Homo sapiens
ctgcggttgccaggcaaccggccccggaagttgcggcaggtgcgtccgcagcgggcgccgctagccagcggaagatggcggagggcggaggccctgagccmggcgagcaggagaggaggtcttccgggccgcggcctccgagcgcgcgggatttgcaggtgaggcgaggagccgggggagggagcgcggcggtggacgcgg

SEQ ID NO: 436447 - DNA, 201 bp, Homo sapiens
aagaactgagtttccttaaaatatataggttgagacgtaaactgtgtttaatctgtttataatacaatgtatagcagattgttcgcaatctttttttctamgtatgatatcttctaatgctaagtgtatacttcctttgatttcatattcaatatcgaaattttcccagtttcgttgtatttctacaggtctgtttggtac

SEQ ID NO: 436448 - DNA, 201 bp, Homo sapiens
gaatatgatattctttaggtttacttttgaagtaagtttttgacagaagaaacatttttaaaaggacaatagctgtgtttaagaaatgaaatatgtggtatttaaacagtctctataaactatccaaatactaatgtgatctcagatatcacacaaaaataaattaagaactatagttttacgttgttactaaaactatat

SEQ ID NO: 436449 - DNA, 201 bp, Homo sapiens
gcaggcagatgacttgagattaggaattcaagaccagcctggccaacatggcgaaaccccatctctactaaaaatacaaaaaaaaaaaaaaaaaaaattarccgcatgtggtgacaggcacctgtaatcccagctacttgggaggctgaggcaggagaatcacttgaactcaggaggcagaggttgcagtgagctgagatc

SEQ ID NO: 436450 - DNA, 201 bp, Homo sapiens
cccatgaaactagggactagatactagaacattccatcatcgaagaaataaatgcctccaccaccttagtaaccacaagagctacagagtttccactttgyagtgcttacttccaccaaacaagtgtatgtttgtttggtggaagggtagaatcatgaaatcctagctgcaagagagtctgggagatggagtctttagaat

SEQ ID NO: 436451 - DNA, 201 bp, Homo sapiens
taaagggttgtcgatgagataaaataatggataccttacatcacaacttaagcatgcatgtctgccatcagtaatgaccaaactcttgcagcaggagcaaygtgcttagctttgtgattttcaatagtttttaaacagccaaacccttttttcaagtcatggaagtgcaatatgtaaaacctgagctcctctgattgtcgg

SEQ ID NO: 436452 - DNA, 201 bp, Homo sapiens
tcaagtggttgtgaccaaagtattgatagaaatatggacagtgaagtccaggctgatgagttctcagatagaaatgaggaagttattgggaactggagtamaggtcagccttgttacaccctagcaaaggacttgtctgcgttgtgtccataccctaaggctttgtggaaggttgaactaaagagtgatgatctagggtac

SEQ ID NO: 436453 - DNA, 201 bp, Homo sapiens
cctggagggcacatgatgattctttggaacccaagatgagtctttatcacgtaagacaaatctcctgttgcagtgcatctgacatcccctacctcgacacygaatgacagcagtgctcacagatcacaccatgatgtttagatggtttagatgttttgtcctcctcaaatctcatgttgaaatgtgacctccactgttggg

SEQ ID NO: 436454 - DNA, 201 bp, Homo sapiens
ctagttactaaaactgttggttttaaaattaagaattgataatacaaatatatttttgttactttttaaaacatgggttaaaaggaccaatgatgtgtgarttttcagtctcgatctttatgttttgtatcacaattatgccttgcacttagagatatggaactatttgttgaaagaatgtgtgattcattttccaaatga

SEQ ID NO: 436455 - DNA, 201 bp, Homo sapiens
tccctctgaatgaagccacaagagcttcaggtgatgataaatctaaggtcagtgctcaattttaaactaaatacattgtttctatattttacctcctcttycatttttctattatttgcaaacattgtttttctaattgtatatttctgttttaaatatttgtttcatttttataaaattataatatttctattaatgatt

SEQ ID NO: 436456 - DNA, 201 bp, Homo sapiens
tatcaacagtgggttttctgcctccaccccagtgatatttgggtgaaaccatctctacaatgtcatgttcctcccacattccggctccgtgacagacccgytccttgctcaggctccactgggctcggtcacgttgggctggcccgagggaggcccgctcgggaccagatgcggggcggagccagccgactgtgcacagac

SEQ ID NO: 436457 - DNA, 201 bp, Homo sapiens
agttctaaaattagcatcaggaaatagctaaagaaagagaaagtgtcagcagttagtaccaggtaattttatcactttactgtgtactctgagagagaagytttttgaatggaagtaagagtcatgatgatttagattggactaaagcccaaatgctcatagaacttttatactagtaatatgtagatacatgcgtgtctt

SEQ ID NO: 436458 - DNA, 201 bp, Homo sapiens
gtggcagaggtggtaatggtggtagtgacgatgataatgtgtatacctggttatcagtgaggcggaggtaaagaggacctttgcattcagtgtctcatgtyttttctcttggattttcatccccctcccttgtgtaaggaacgctggactcttggcacagtaaaccagattggcagtgcaattacttaggccctcaattcc

SEQ ID NO: 436459 - DNA, 201 bp, Homo sapiens
gttattcctagtgttatactttgtaacaagcctgttattatgtagttggccttggcagaattgtatgaagatgaagtgaagtgcaaatcttccaagtctartagacctaaagccacagtcttcaagagcccacggacaccacctcaacggtaagttttattttgttttgttgtaaaaagaaattataatcctttctaaaaa

SEQ ID NO: 436460 - DNA, 201 bp, Homo sapiens
ttttggttttcatttcattattcgtcaatggtttgaaatgatcttttagtcaagtcttatggtaattttggttcttgaaggctccccagtatgagccactwtggctaattagaattaatctagttttaaaatacatatcacataataactttttgctgaataatcctttgtgaattttaactcacttgctatgtattttag

SEQ ID NO: 436461 - DNA, 201 bp, Homo sapiens
tctctactgagtgtggccttcttagggagaagggactatcttttgactgttgacactgcttttccttctacatcagaagtgctgaattagtgaatgagatktatgtgataagcagttacagaaggctgagggatcagcaagcaagccagttgccgtgctggaggctgaacttgcccttagaatcaatctttgcaaactcag

SEQ ID NO: 436462 - DNA, 201 bp, Homo sapiens
ggagcagtaggctataccatatagcctaggtgtatagcaggctatatcacccagatttatgtacaccatgatgttgccacaaggacaaaatttctgtgttrtgcctaacaacacatttctcagaatgtatccctgtcattaaatgaaacatgactgtattttcttaagcttataacctcaaatcaataagtatttgttgag

SEQ ID NO: 436463 - DNA, 201 bp, Homo sapiens
tatgactcgtccggaaactgcatccgcatctactggttctgccgtcgctagaggcgtacaggcccttcccgaccgtagcgagggtgctgctgcgctggggraaggaaaacgccgctttgactgtgccttgttctcacagctggcgggaagcaagcgccttttcgaaagccagaggctcgagttacccctcttaccaccgtc

SEQ ID NO: 436464 - DNA, 201 bp, Homo sapiens
aaatactacaataagtatgacattttacctcttaaaagacctggagtttgctgtgcaagtgagcttcagaagagttgcagtttgtgagttgtgaagtgacmgtaaaagggcaataagaaatccatgaaaagttgtaacaccagatgttgatggatgttcacaacatttgcggtgaactgaggtcactagaaatgttttgag

SEQ ID NO: 436465 - DNA, 201 bp, Homo sapiens
ccgcaattttctccgagtagaccctaaaagggacatagttttggatgtcagcagtacaagtagtgaagatagcgatgaagagaatgaagaactgaataaaytgcaggcattacaggaaaaaagtaagcaatatttttttccattctttagaaatgtttgtaaatgttctgtcatattatatcatgctttccattatactta

SEQ ID NO: 436466 - DNA, 201 bp, Homo sapiens
ataagggtcagaaaatagaaatgacccagggaacccatatccaagatcctgcacaagcccaaacctggttagggctgctactgccagtgacatcagtgccyctggaaactggatcctgacagcagaatgaattaactttccccactttattgtgtcacttgcctcagatctattaagtcagttgcctcagattcaaactct

SEQ ID NO: 436467 - DNA, 201 bp, Homo sapiens
catcttagcttccaattactgaatccacaaatttgcatatatatatatccatctttcttttctttccttcagttaaaatggaaggactgtccttcctttcraaggcatgtcctaccataattgctatgaattcttttcttcaagaattttattccttcagttatcccctctctgcgtcatcatttcaatcagcatcaattt

SEQ ID NO: 436468 - DNA, 201 bp, Homo sapiens
tgggaggccgaggtaggcggatcacctaaggtcaggagttcaagaccagcctggtcaacatggcaaaaccccatctctactaaaaatacaaaaaagtagcygggcatggtggcgcatgcctgtaacatcagctactcgggaggctcaggcaggagaatcacttgaacccgggaggcagaggttgcagtgagccgagatcat

SEQ ID NO: 436469 - DNA, 201 bp, Homo sapiens
tcagttgttccaacaccatttcttaaaaagtgtctttcctgcattaaattgctttgcttttttttttttttccccaaaaaatcagttggttctatttgtgwgtgcttgtttctggattctctgtgctgtttcattgattaatgtgtctttgcctccactaataccacatagtctttattcatatagctataaaataagtct

SEQ ID NO: 436470 - DNA, 201 bp, Homo sapiens
acatatatacatgccatattaatatatagaatcatatattaaccagatttttttcttctcacctctcccccacaggaataaatgaagaagaggaaaagaaraaagaaaaaagcaaagaaaaaatcaaattgaaaaaaaaaaggaaaaggtattttttgaacaacattttaaaaaacaaagcaggcctatgagtttaggatg

SEQ ID NO: 436471 - DNA, 201 bp, Homo sapiens
ggtggcgggcgcctgtagtcccagctactcaggaggaggctgaggcaggagaatggtgtgaacccagaaggccaagcttgcagtgagctgagatcacgccmctgcactccagcctgggcgacagaggcagactccgtctcaaaaaaaaaaaaaaaaaaaaaaaaaaaagataggaacctaatagaaacagtagcacagttt

SEQ ID NO: 436472 - DNA, 201 bp, Homo sapiens
agaagaaagaaaagaaaaaagaaaaaaagagtaaatcaaaaaaagggaaacatcacaaaaaggaaaaaaagaagagaaaaaaggaaaagcattcttctacrcctaatagttctgaattctccagaaagtaactgagactttggcttaagccgttaaatttaaaaatttgtttttaaaacgtgtttgcccttccttggaatt

SEQ ID NO: 436473 - DNA, 201 bp, Homo sapiens
atgcccccctacacttccttcaacctttcaatctttgcgattctgataagtgaaaatggaatcccagtatagtttttagtgtacattttacctgttttaartaagactgagcatatctccacatgtttgagagtcatttctatttccgtttctgtgaacatcctttgcccatttttttcctgttggttactgatctttttc

SEQ ID NO: 436474 - DNA, 201 bp, Homo sapiens
tcacattaggatatgtgtcaaatggctgaaaaagtgtgatttaagatttggtttctagtcctatttggcaatttgttttagcacatgactttcaccaagtsacttaaccatcctgaggctcagctgccttgtgggataacacaaaatgttggattgtcaaatgatgctcatgcagatcagtgatcttagccagtatcaagc

SEQ ID NO: 436475 - DNA, 201 bp, Homo sapiens
acataaattgggagaactaattcccaaatgtgagattgttgtgtcagagaggtatgtacacttgtaattctgacaggttttgtcagcctgctttccataasagatagtactaatttatgctcctgccagcaatgtatgagagtatgcccccctacacttccttcaacctttcaatctttgcgattctgataagtgaaaatg

SEQ ID NO: 436476 - DNA, 201 bp, Homo sapiens
ctcacctctcccccacaggaataaatgaagaagaggaaaagaaaaaagaaaaaagcaaagaaaaaatcaaattgaaaaaaaaaaggaaaaggtattttttkaacaacattttaaaaaacaaagcaggcctatgagtttaggatggattataaaattttattttttgtgtataatagttaatttaatattttttcttcaaca

SEQ ID NO: 436477 - DNA, 201 bp, Homo sapiens
ctctcaatttttctcagtccttttatttttgtcccttctttttggttttctcaatattttctgtttcttcgttgtctactgttaactttaaaattttttttcttttgtgctaactgctaagacataatttacatgttttaaaaacagcacagatcacaaatgtttggcttgaagaattttgacaaataaattgagtgtgtg

SEQ ID NO: 436478 - DNA, 201 bp, Homo sapiens
tggcagtcccaggtaaggagcaattacagggcctctgcgtccgagctccgaagggagcgcaagggagggtagggtagggtgcggcgtgtacggagcagcgmccatggggatttaggcggaggccttaaaattcacaggtttgttttgtttacatgaaaaagtttacactccaaacataaactctgaaggaaagaaaataac

SEQ ID NO: 436479 - DNA, 201 bp, Homo sapiens
cttaagaaaggggacaaaagtgatttttaagcccttattaaaattctcttaaactcacaccactgttatgttaaccttctttcaattcaaaataatgcttyaaagtataataatgttaaattgtgccattaagttggatggcaaggtatagataaactgtttaaacccagcaaaaattgagataataggtgtgacagtgct

SEQ ID NO: 436480 - DNA, 201 bp, Homo sapiens
aggaagagagagaactgagagctggaaggcattaaaaatagttcttggaatttcaagactgctttccttcttaatacattttatctttggtctggccattwtttttttccttaattacatttttagttctctaaactacatacttctcactgattgtctttaataactcacattttttatatgttcaagacatcatcaaca

SEQ ID NO: 436481 - DNA, 201 bp, Homo sapiens
ttaagcaatacatgaaaatactacttaagaaaggggacaaaagtgatttttaagcccttattaaaattctcttaaactcacaccactgttatgttaacctyctttcaattcaaaataatgcttcaaagtataataatgttaaattgtgccattaagttggatggcaaggtatagataaactgtttaaacccagcaaaaatt

SEQ ID NO: 436482 - DNA, 201 bp, Homo sapiens
tggctataccattttacgtccctacgagaagcgtgtgagtgactagcatttggtgttgtcaccagcatttttgtgcttagcattctaacatgtgtagttawagcccattgttgctttatttacattttcctaatggctaatgatgttatacatcttttcattactgttgaatgttgagttctgaacatacatatatgtgtg

SEQ ID NO: 436483 - DNA, 201 bp, Homo sapiens
atattcccattttacagatgaggacactgagggacaaagaaatcaagtaatttgcctattatgagacagctggaaagcaagaagtcagtctggttcctctrgactgtgtacttcattcattttgccatcgtataggataacttacaaggtagtttccagctctttaaggacctgtaggccatgacaagaggtttggcatta

SEQ ID NO: 436484 - DNA, 201 bp, Homo sapiens
ctataaactgtttaaacccagcaataattgagataataggtgtgacagtgctgtaaaagtacaatgcaagtgtcattagaaaatacagatacagaaaatcrtaagataatttcttagatgatcgatccagacagggtattaaaggaaaatagggctaatctaaacttttcaaggttatcatcaaggaggacaagtattatg

SEQ ID NO: 436485 - DNA, 201 bp, Homo sapiens
ctcattaaaattctcttaaacttagaccagtgttatagatatgttaaccttctttcaattcaaaatagtgcttcaaagtataataatgttaaattgtgccrttaagctagatggcaagctataaactgtttaaacccagcaataattgagataataggtgtgacagtgctgtaaaagtacaatgcaagtgtcattagaaaa

SEQ ID NO: 436486 - DNA, 201 bp, Homo sapiens
gaggtagcacttaggaggagatctgaattgtaggaggggtggcttgaagggagaggagactgcagtcggaggaactggatacgtaaaggaagaggaaataygtgaaaagaggaaatgaaagatgttttctatggatggaactcaaatacagatgggagataagtgagaaattaagtacagaggtagtagctgtagctaata

SEQ ID NO: 436487 - DNA, 201 bp, Homo sapiens
cgaagggagcgcaagggagggtagggtagggtgcggcgtgtacggagcagcgcccatggggatttaggcggaggccttaaaattcacaggtttgttttgtktacatgaaaaagtttacactccaaacataaactctgaaggaaagaaaataactatcttccccccaggagccaagccccagctgcttgggattacagggaa

SEQ ID NO: 436488 - DNA, 201 bp, Homo sapiens
ttacatccaatttttctttattcctaaactagactataggtaatttgttttctctctagtctatattgcacattgctgctaaaataattttcctgaatcayatatctgatcctatcattggtgggaggcatgaacttagttcttgacccctatctgtgaattttgtagttctcttcaagccacttaaccttttggaggttc

SEQ ID NO: 436489 - DNA, 201 bp, Homo sapiens
atgataacccatcctttttcatttatatatagcataaaagcatccttttgtaactaatgaaaattattttgtaatgcaagtattcatctgtatcactctcygtctagagggatcaagtatttgaaaaatcagaagaattaccaaaagtgcttttattttgctaactttcagctttcattcattcatatgaacgtacaatta

SEQ ID NO: 436490 - DNA, 201 bp, Homo sapiens
aaagcatttactaatgtctcaaaatatatagcaaaatctgtgttacaaggagaaattgacaaatctaccctagagaaaacctggtgcatgcccacagagaygtctacagctgctcatttcaacattatttataatagcaattattgacaaatcaatacttgtataattttaagtacttctatcagaagttattagacaaaa

SEQ ID NO: 436491 - DNA, 201 bp, Homo sapiens
cggacgtggtggcgggcgcctgtagtcccagctacttgggaggctgagacaggagaatggcgtgaacccgggaggtggagtttgcagtgagccgagattgygccactgcactccagcctgggcgatggagcgagactccatctaaaaaaaaaaaaaaaaaaaaaaaaaacacaaaaaaaattcacagaaaaagagttattt

SEQ ID NO: 436492 - DNA, 201 bp, Homo sapiens
gtattattatccataggtcttactcatccagttccactgaagaggacacttcaaaacaaaagaaacaaaaatatcagaagaaagaaaagaaaaaagaaaamaagagtaaatcaaaaaaagggaaacatcacaaaaaggaaaaaaagaagagaaaaaaggaaaagcattcttctacacctaatagttctgaattctccagaa

SEQ ID NO: 436493 - DNA, 201 bp, Homo sapiens
ttgaaatacttttaattcccaaaaatatgggtatttttcaattgtttacaaaagaatattctctctcttttgttgcaaaaatagttgttcagattgtacartttaaagaatttcaatacttgatagaaaaagagcttatttctcagtatatttcaatagtgaatatattgttttttaaagttttgagttaagtttgaatat

SEQ ID NO: 436494 - DNA, 201 bp, Homo sapiens
ctagttacagaaattcctctgttagcactaaatattcacttttcttccctgctttagacccagtaacaggtagctatgtatctgatgactaccaaaagtarcatgaagatacaggtggttagtagtagattaaggagtttggagaaagtatattttttaaaaactatatacatacttattcttttccccctttccacatac

SEQ ID NO: 436495 - DNA, 201 bp, Homo sapiens
actgaaacatattttacaaaatattgttgagggacattaaagaaataagtaaagatacgctatattcattgagtggaagtttcaattttaaaagaaatgtmacttctccccaagcagatctattaaaaaaaaaggaatcacaatcaaaattccagcaggccatttgagaaaccgacaagccaagcaagaccttatctctaa

SEQ ID NO: 436496 - DNA, 201 bp, Homo sapiens
cttaatgtatgtatgtgtgtgtatatatatacatatatatataaattattttacatttgagggacaggccagagtaccctggaatttcttcctcaatgctrtagaattcttggaatatttaaactcttaactgtttactagatttttttttttactttcttttatttttcaacttttattttagacagagtggatacatgt

SEQ ID NO: 436497 - DNA, 201 bp, Homo sapiens
cttctagaactaataactgagtttagcaaagttgcaagagtctacaagatcagttagcagaaatcaattgtatttctgtacactggcaatgaacaatcagaagttaaaattttacagatatcttttatggtagcataaagaatgaaatactaagaatataaatctgacaaggtatgcaagactgaaacatattttacaaaa

SEQ ID NO: 436498 - DNA, 201 bp, Homo sapiens
tacttttactagaataattagagacagagtctccctctgtcacctaggctggagtgcagtggcgcagtcatagctcactgtaaccgtgaattcctgggctygagcgatcctcctacctcagcctcccaggtagctaagactaaaagcacatgccaggaccagctaattaaaacaaagaatttgtagagatgtggtctcact

SEQ ID NO: 436499 - DNA, 201 bp, Homo sapiens
gcttctagaactaataactgagtttagcaaagttgcaagagtctacaagatcagttagcagaaatcaattgtatttctgtacactggcaatgaacaatcagaagttaaaattttacagatatcttttatggtagcataaagaatgaaatactaagaatataaatctgacaaggtatgcaagactgaaacatattttacaaa

SEQ ID NO: 436500 - DNA, 201 bp, Homo sapiens
tgtgcgggttctactcctagctcttcctgttgtatgtagctgctccgtggccatagattggtcgctttgtgcttctgggcctcagtttccttataaaaagmaggagctttgttgaattatatataagatttcttctaactctcaaattctatgtccagaagttactgacctaaaaacggtgaactctgcagaataattact

SEQ ID NO: 436501 - DNA, 201 bp, Homo sapiens
cttaacaaactagaagaaagaacaaattaaacccacagtaagcagaagaaagagaataataaagatcagaggtgaatcaatgaaatggaaaacaaaactayagaaaatcaataaaaccaaaaactggttatttgagaaggtccataaactgaaaaatcactatccaaactaatgagattttaaaaagagagagaaaaagca

SEQ ID NO: 436502 - DNA, 201 bp, Homo sapiens
catggggatttaggcggaggccttaaaattcacaggtttgttttgtttacatgaaaaagtttacactccaaacataaactctgaaggaaagaaaataactrtcttccccccaggagccaagccccagctgcttgggattacagggaaagtgtattgtggaagggagggaggagggagagactgtaactgtaggcctaaggg

SEQ ID NO: 436503 - DNA, 201 bp, Homo sapiens
cttgacccaagaccatttgctgaagacatccttttcccattgtgtgttcttaacacccctcatggtcagttcatcatatatgcatgggtttattcctggayttcctattctgttacattggtctatgtgtctgtctttatgtcagtacaatactattttaattactatagctgtgtaatatattttgaaatcaaggaatgt

SEQ ID NO: 436504 - DNA, 201 bp, Homo sapiens
ggttctgccgtcgctagaggcgtacaggcccttcccgaccgtagcgagggtgctgctgcgctgggggaaggaaaacgccgctttgactgtgccttgttctsacagctggcgggaagcaagcgccttttcgaaagccagaggctcgagttacccctcttaccaccgtcatggcagtcccaggtaaggagcaattacagggcc

SEQ ID NO: 436505 - DNA, 201 bp, Homo sapiens
aaacagtggatccacaggcctactgggtaggtgtttaagagctgtggagtgacactttcaagccctggggatggcagtatggcaagggtggagcccctcamgtaaagtcagactccttaaaaaggctgtgaagcagggattagaaaaaatttcactcactgaaagaagcaagaatgcgtatagtgtgtttgagttcccata

SEQ ID NO: 436506 - DNA, 201 bp, Homo sapiens
gattgtcgatgaacattaaacagtaaactttgtttttaatatcaagctttccatattatgtccagttaaggtaagtgaagaagtcaaatgtaaggtgctaraacaagctgaaaaggaaaaagagggagagaatcccaaagagggcaaacaagagtcatatcatatatgagtatatacagcttcagggtaaagacagttgat

SEQ ID NO: 436507 - DNA, 201 bp, Homo sapiens
attacaggcgtgagccaccatgcccagcctgtatcatcaggagttctgatcaaagaggcaagccaaaccaacctagaaagcccaccattctgctccaaacrtgtaacaatgcaggaggaaaaaagtgttatgtcaacagcaaccacaacaacaaaaaaacccaactcaaaagaatgaaagggaaatccccaggtgctagac

SEQ ID NO: 436508 - DNA, 201 bp, Homo sapiens
taattgagtttatttttttaagaatacatatcacaatatgttgtttgggaatgatagagaccaacttcagtgcagttgcttcagaggacaaaaaaaaaaaatggaatgagattgagaaagtgttccaaaagttgatacaagctctccagctgtgtgtgtgtgtgcgcacaggcatgcgagtgagctttttccttaaatgaa

SEQ ID NO: 436509 - DNA, 201 bp, Homo sapiens
agtagagacaggatttcgccatgttggccaagctggtcttgaactcttggactcaagtgatccacctgcctcagcctccctaagtgctggtattacaggcrtgagccaccatgcccagcctgtatcatcaggagttctgatcaaagaggcaagccaaaccaacctagaaagcccaccattctgctccaaacatgtaacaat

SEQ ID NO: 436510 - DNA, 201 bp, Homo sapiens
tatatatatcactcacataaatgaaaactgaagaatgtacttgcacgcaagaaatgagtgcaatgaaatcttttctatttttaaatttgtttatatttctrcttgtttgctttctttcaagcattgctaactttgtttactttcttttaatcattgctgacttacctgcctcatttctttattcaagaattaagaacctac

SEQ ID NO: 436511 - DNA, 201 bp, Homo sapiens
tattacctaggcttcactaacttattccccaatagaaaaaaaaatcagtaagaaactttatttgtagttttgcaattaatttgtcttatcaccttagggtygctttgcttgaagcaaagctaaaatggatgtggggcagagactgctaccagtatggtcattatttaagcattttatttatttttaatattcatttcaatg

SEQ ID NO: 436512 - DNA, 201 bp, Homo sapiens
atgccagtaccaactgctttgattgctatagatttataataaattttaaaatccagaagggtgaatcctccacctttttttttcttctacattgtttgctrtaagaacatttagattgctagccataagaactgtaatttgcaacacagttattacctaggcttcactaacttattccccaatagaaaaaaaaatcagtaa

SEQ ID NO: 436513 - DNA, 201 bp, Homo sapiens
agacttattttgtcacctaacatgctctgttctggagaatgttctgtgtgcttgagaagaatgtattctgctggtgttggacagcatattctgtatatttkgtttttattagaaccaatttctctataaaacctagtaagtaaactcctaatccatcattgctaagtagaagaggaaattattcccatagctactgtttta

SEQ ID NO: 436514 - DNA, 201 bp, Homo sapiens
tgggcacctcagttgattccatgtctttgctgttgtaaataatgctgcaatgaagatgtgagtgcatgtttctttttggtaaaatgattttttttttttttggatatatacccagtaatggaattgctgggtcgaatgatagtgctgttttaagttctttaagaaatctccaaactgctttccacagtggctgaactaatt

SEQ ID NO: 436515 - DNA, 201 bp, Homo sapiens
aaggaaaaggaaaaaagaagaaaatggaataatactatactggggctttcattggttgattgaagccactattggaggataaaattagttttaactatatrtgcatacaatggaatattattcagccataaaagggaataaaattctaatacatgctataatatggatgaactttgaaaacattctgctaagtaaaataat

SEQ ID NO: 436516 - DNA, 201 bp, Homo sapiens
tcgggggtcacccggccgccgggcccgcgggacgcacggggccgccaggggaggacaacaagcctcaggccctgtccctgcgccccgcccggcctcccccscggggctgcgcagcccactcggccatcctggcctgaaggggccgcccccggcctcgcgggaaagcctgagcctcccgggccttctcgggccttctcggac

SEQ ID NO: 436517 - DNA, 201 bp, Homo sapiens
ccccgcggggctgcgcagcccactcggccatcctggcctgaaggggccgcccccggcctcgcgggaaagcctgagcctcccgggccttctcgggccttctsggactttcccccaggcgtcctggaccttcttcggccttcctgggcctcctcgggcttccttgaccctccccaggccttccccgaggcctccaggcccttc

SEQ ID NO: 436518 - DNA, 201 bp, Homo sapiens
cagtgaagtggcgcgatctcggctcactgcaacctccaccccttgggttcaagcgattctcctgcctcagcctccacagcagctacgattacaggcatgcrctgccatgcctggctaatttttgtatttttcgtagagacggggtttcgccctgttggccaggttggtttcaaacttcttacctcaggtgatccacctgcc

SEQ ID NO: 436519 - DNA, 201 bp, Homo sapiens
ccaggccttccccgaggcctccaggcccttccctgggcctctccaggctgagctctccgcgacatggccagtgggcctctgggacccggggcccggcccasccgcctccaccctccactcccaccgcctgctcacatcaagccaggagcaccgcccggtacgtagtcctccagactaagctacaatatatacgcattgata

SEQ ID NO: 436520 - DNA, 201 bp, Homo sapiens
ctctaatagccaaatgctctaagacttgtagagtcagttctgcccccttcccaagttcaattcagggtatgtgatagcctaatgagagtaaaaacatacayatataagtttttaacaaaatcctaataggcaatgaaaacaagctcaattcccactgccccactttgagatcttgcagcaatatttgctaagccttttcct

SEQ ID NO: 436521 - DNA, 201 bp, Homo sapiens
tcgccctgttggccaggttggtttcaaacttcttacctcaggtgatccacctgcctcggcctcccaaagtgctaggatcacaggcgtgagccaccatgccwggcttcatgtgttatttttaaaaatcacgatttgcttataacttcacaatacttaataatatttatttaaaaattaagattatgtggttaatatgcacac

SEQ ID NO: 436522 - DNA, 201 bp, Homo sapiens
cctccaggcccttccctgggcctctccaggctgagctctccgcgacatggccagtgggcctctgggacccggggcccggcccacccgcctccaccctccaytcccaccgcctgctcacatcaagccaggagcaccgcccggtacgtagtcctccagactaagctacaatatatacgcattgatacatgtgaagttatatct

SEQ ID NO: 436523 - DNA, 201 bp, Homo sapiens
gaaatgcataattaggcaattttgtcattgtgccaatatcatggagtatacttacatatacttggatgccacagcctactgcacacctagctatgtggtawtccctactgcttccaggctaccaacttggacagcatgttactatacttaatactctaggcagttataacaaatggcatttgtgtatctaaatatatcaaa

SEQ ID NO: 436524 - DNA, 201 bp, Homo sapiens
gaggagcatccttccggactttggcctaggtgactaaatggtgtatgaaatgttgcctgcaggggcaggagagaaaagaaaaccatcttttcatgtgtgattttttttttttttttgagacaaagggtttcgctcttttgcccaggctgcagtgaagtggcgcgatctcggctcactgcaacctccaccccttgggttcaa

SEQ ID NO: 436525 - DNA, 201 bp, Homo sapiens
aatgcataattaggcaattttgtcattgtgccaatatcatggagtatacttacatatacttggatgccacagcctactgcacacctagctatgtggtaatscctactgcttccaggctaccaacttggacagcatgttactatacttaatactctaggcagttataacaaatggcatttgtgtatctaaatatatcaaaca

SEQ ID NO: 436526 - DNA, 201 bp, Homo sapiens
ccttttcttttttaacctgcctaaattctagtcattacacttctaactcacaagtcatttttcctgattgttcaggaagtgtaattactagaaaaaatacaaaaaaaaaaaaaaggagagaaaacaaaagttgctgtctcctccaagatccttgcttcgttataatgatttaattacagccccttactcagttacattgta

SEQ ID NO: 436527 - DNA, 201 bp, Homo sapiens
ttttgatttttcagcaaatcttcagagggccaaacccttggcccctacacctccagccatctcatggccatgcccaggattcagattttagtggtagcctyagcttgccttactttaaatctgcacctctttagctgatcctgagtgaaaccattgtttcataaacacagtaggatgaggcagatgctctctatttcaggc

SEQ ID NO: 436528 - DNA, 201 bp, Homo sapiens
ctaccaacttggacagcatgttactatacttaatactctaggcagttataacaaatggcatttgtgtatctaaatatatcaaacatagaaaaggtaggccrggtgtggtggctcatgcctgtaatcccaacactttgggaggcagaggtgggcaaatcacctgaggtcagcagttcgagaccagcctggccaacgtagtga

SEQ ID NO: 436529 - DNA, 201 bp, Homo sapiens
aatctgcacctctttagctgatcctgagtgaaaccattgtttcataaacacagtaggatgaggcagatgctctctatttcaggcatttagcaagctcttasgttaattacaagggaggcaggctaaggaaacaaaggcaagccttgggccagtcacttagtagtccagtaagcacagcttgctgcccacctcagtttctcc

SEQ ID NO: 436530 - DNA, 201 bp, Homo sapiens
atttgtcctcatcttcctttgtttttccctttagaattgccaaggtcatggctggtcacgtacagcagaatctttttgtttctttcttttcttttcttttsttttttttttttgagacagagtcccactctgttgcccagggtggagtgcaatggcacattctcagctcactgcaacctctgtctcccaggttcaagtact

SEQ ID NO: 436531 - DNA, 201 bp, Homo sapiens
gtaaatgtatatttagctcagaagctgctagactgttttctagagtggttgtaccatttgacattcccaccagcaatgtatgaaagttccaattgctccayatcctcactaaacctagctattaagtctttttcattttaaccatgctagtatgtatgtagtggggtctcactgtggttttaatttacatgtccctaacca

SEQ ID NO: 436532 - DNA, 201 bp, Homo sapiens
tttgtcctcatcttcctttgtttttccctttagaattgccaaggtcatggctggtcacgtacagcagaatctttttgtttctttcttttcttttcttttgttttttttttttgagacagagtcccactctgttgcccagggtggagtgcaatggcacattctcagctcactgcaacctctgtctcccaggttcaagtactt

SEQ ID NO: 436533 - DNA, 201 bp, Homo sapiens
tattttagcttgtggatctatcgctttatagacaaactttaaaaagtatcgtggagagatcagcttttgttacatgagttgaaaaattgtttcctcaatcygtcatttgtcttgattttgccccagtggtttttttggttggctttaactactggaattaattcaatattggttatttagtatatagtcatttttagtttt

SEQ ID NO: 436534 - DNA, 201 bp, Homo sapiens
ctaatttttttgtatttatagtagagacgaggtttcaccatattggtcaggctggtctcaaactcctgacctcaggtggtccacccgtgtcggcctctcaragtgctaggattacagctgtgagccactgtgccccagcctacagcagaatcttgttcaatataattatgtaacattttctgaaagttaggacactatttt

SEQ ID NO: 436535 - DNA, 201 bp, Homo sapiens
ttaatgtcatgtatcttctttttttatccaaaagaaaacttattcaaaaaaatgtacccagaagacacagcctaaggaatacaagcaggaaactgagaaamctgccaacaacagctaaagggacacaaacaggtacatgcaaagttgccagtaagcagcatttaaaatgctgattttcagaaagagagcagcaggtggagt

SEQ ID NO: 436536 - DNA, 201 bp, Homo sapiens
gaaaactgtgcccagccagaagttttgtgtcgcccctttgagatgctgtctaacctccacgagctgcttccgaatcacctgatggagacgctttattcccscaagagtgaagaggacaagaaaaaatgtatgtgggccgagggtgggcatgagttcttttcagcaagcatatgctttatcttgatacaaactgcctctact

SEQ ID NO: 436537 - DNA, 201 bp, Homo sapiens
cgtcggcctttcaataggaaaaacaaaagatgattttttttcttttttcatgtagaggatacatgtaaatcacacagcccaattttgtaccccgaaatgcrtatctcctattacagcttcatgaaataagtggaggggtgggggaagaatctctctctatctagttagatatatctgcatagctatcatcacccccacctt

SEQ ID NO: 436538 - DNA, 201 bp, Homo sapiens
tgaacacaggaagggggggtggggggcatctctctcacgcctagtttataaggcactgctcccgtgacctgatcacttcttaaagacacacccccaccacrtaatgccatcaccttgggggctaggatttaacatgaattttgagagacataaacattcagaccatagcaccaccctacccagcttttgtaaggttcactt

SEQ ID NO: 436539 - DNA, 201 bp, Homo sapiens
cagctcatgtctctagtaaattgcatttcacagtaaagtgatttcacagttctcatgtattttttgtgtttagtgcaataccataaaacttgaataacacyatgggacccacaaaaagtgccattagtgatgctagaagtactcccaagaagcagagaaaagtcatgatgttacaagaaaaagttgagttgcttgatatgt

SEQ ID NO: 436540 - DNA, 201 bp, Homo sapiens
gttgattgccaacactaccactacagtatcccaccaagggcttcatgtgtcagctcagtgcgatctcctttaactctgcagcaccgctgcagctgccgacrtagcctcggtaggtggctattagagctctaccatatacagtggtgcatcttcagatttatgcatcaaactaaagacatgtccaagtccattttaatttcc

SEQ ID NO: 436541 - DNA, 201 bp, Homo sapiens
attggataaactcattcctaaatttggttatttttgatgttattataaattgaatggtttttctcaatttcctttttggaattttcattgctagtatttayttatctttaatctttattttttccttctttctgctagttttggatttagtttgttctttttctagtttcttatggtgtaaatctaggctgtttattcaaa

SEQ ID NO: 436542 - DNA, 201 bp, Homo sapiens
ttaccttggctgggctcattatcttcggaaaagtgtaagaggagcatccttccggactttggcctaggtgactaaatggtgtatgaaatgttgcctgcagrggcaggagagaaaagaaaaccatcttttcatgtgtgattttttttttttttttgagacaaagggtttcgctcttttgcccaggctgcagtgaagtggcgc

SEQ ID NO: 436543 - DNA, 201 bp, Homo sapiens
tccctccctcccacccccaagcaactgctaatctgttttctgtccctacagttttgacttttatagaatgctgtataagtggaatcctacattctgtagcmttttgagtctgacttctgagagtcaccatgctgttgtatgtattagtagtttgttcctcgctatttctgagtagtattcctttgtatggatgcacaataa

SEQ ID NO: 436544 - DNA, 201 bp, Homo sapiens
agtagtggctaatttatcctgatttagaactctattctatgagcattcatcttaaatatactttcttgtgtttgtataattcctttttaagaaatatataygcaaatatttctaatttgaagttttaaaaattaacctttaacactctgctcccatagcaatgtcctatttgggaggccattgttttgttgcaaatagata

SEQ ID NO: 436545 - DNA, 201 bp, Homo sapiens
tgttcttctctgtgatacaaccagcatcacgagaacagccagcagcagctccagcgtgataaaattttcactccttgacaagtgtaagaagccggaaaactgtgcccagccagaagttttgtgtcgcccctttgagatgctgtctaacctccacgagctgcttccgaatcacctgatggagacgctttattcccgcaagag

SEQ ID NO: 436546 - DNA, 201 bp, Homo sapiens
ttttaattttttgtagagctgcaccccccaccgctccccacatccccatgttgcctgggctggtctcgaactcccaagctcaagcctttgcccgcctttgyctccaaagtgctggaattcgaggtgggatcccctgcacccggccagaacttgctctgtacgttgtaggtgtgatcggtcctctagacacatgtccccatc

SEQ ID NO: 436547 - DNA, 201 bp, Homo sapiens
taccacaaacaacatgtaacctgcttatgactggcaacgctgaaggaggattcaaaggctctcatctcgcgctgcttgcctgacctcttgctttctaggarctgacttaccctgtcagatgcatacacggcatcgaatagcccaaggagggtgacggagatgcccacagctggaccattgaccactgcaatcagaggctta

SEQ ID NO: 436548 - DNA, 201 bp, Homo sapiens
gttcttctctgtgatacaaccagcatcacgagaacagccagcagcagctccagcgtgataaaattttcactccttgacaagtgtaagaagccggaaaactgtgcccagccagaagttttgtgtcgcccctttgagatgctgtctaacctccacgagctgcttccgaatcacctgatggagacgctttattcccgcaagagt

SEQ ID NO: 436549 - DNA, 201 bp, Homo sapiens
ccactgcaatcagaggcttaggaaaatctataaaacagcccacaaattccctacagaaatggaaacacaaaatcattaaatgtgccaaagcagcatgactraagcatgggcaagacagtctgactctgagataaagccttctgtcaggctgggtgtttccacagccaccaccagcagtgcctccttgtcctgccacttccc

SEQ ID NO: 436550 - DNA, 201 bp, Homo sapiens
tatgccaaaagaaaactatacatttgtacatatatatgtgtatataaatgcatagaaaagagttttgaaggagacttaggaaattcaggacggtggctacmtctggagaaaggatagagcttgaagagggaaaatgaagcaaaactttccctttttgctatgtagacttcgctgagttgtttcattttaattattccaatg

SEQ ID NO: 436551 - DNA, 201 bp, Homo sapiens
ccgcggcgcttgtgggccagcgccagttccgggtgggcgtgggctcggcaggccctgcactgggagctgcaggccggccccgccgccccgggcagtgaggrgcttagcacctgggccagcagctgctgtgctcgatttctcccggggccttagctgcctccctgcagggcagggctcgggacctgcagcccgccgtgcctg

SEQ ID NO: 436552 - DNA, 201 bp, Homo sapiens
ctgggaagaacagtttacacaaaggaacagcctgtgcaaaggctctttggagaggttatccccactgtagatgaagtaagagccactgtagctgactcagrgaaagccagggggaagtcggtgcaggatgaggactggcagaatagacctgacagtgctttgtagatcccatgaggaagttttttctttattctaagagcc

SEQ ID NO: 436553 - DNA, 201 bp, Homo sapiens
cagcaccctgtgtctagctcagggtttgtgaatgcaccaatcggcactctgtgtctagttaatctggtggggacttggagaacctttatgtctagctaagrgattgtgaatgcatcaattggcactctgtatctagctcaaggtttgtaaatgcaccaatcagcactctgtgtctagctcagggtttgtaaatacaccagt

SEQ ID NO: 436554 - DNA, 201 bp, Homo sapiens
tacagaacatctccatcaccccaaaagtttcccgtaggctccttcctagctatcccaccccacctgctccaaggcaatcactttctgacttcaatttccayagagaagaacttttgtctactgtagaactttctacaaatggactcatacagtatgtacactcctgtctttattttgctgaactgtgttttaaagatgcat

SEQ ID NO: 436555 - DNA, 201 bp, Homo sapiens
atctgtcatttgtcttgattttgccccagtggtttttttggttggctttaactactggaattaattcaatattggttatttagtatatagtcatttttagktttttttttttttacatttaagacatatttttgtgtttcttaatgaataaattatgaaagaatgttaatttaaaattcataatatgtaaaagaatattta

SEQ ID NO: 436556 - DNA, 201 bp, Homo sapiens
ctcaaggtttgtaaatgcaccaatcagcactctgtgtctagctcagggtttgtaaatacaccagttgacactctgtatctagttaatctagtggggaggtrgagaacttttgtgtctcgctcagggattgtaaatgcaccaatcagcaccttgtcaaaacggaccaatcagttctctgtacaacagaccaattggctctct

SEQ ID NO: 436557 - DNA, 201 bp, Homo sapiens
gatatatttgccctttggttaggtcttctttaatgtctcctaacaatgttttgtagttttcagtgaagaagtcgtggatattttttgttatatttattacyagcacaggggtaaaaggagctttcctttttccctctgaaggttgatgaaaggcgtctgctaaacttgacaacagacagattaacaggagaaaaggcatac

SEQ ID NO: 436558 - DNA, 201 bp, Homo sapiens
gagccaccgtgcctggtctatatttgtttctttcgtattgctgcatgtatggcaatgatgcctacactttgtacatagtaagtattcaagcaattttgccrggctgtcaggataaatgtagatgttgctacaaagacaggatcatttctgatttgaaggtaacataaccgggagagagttccagctcatgaatttgcctga

SEQ ID NO: 436559 - DNA, 201 bp, Homo sapiens
aaatggaccaattagcaggatgtgggtggggccagataagagaataaaagcaggcggcccgagccagctatggcaacttgctggggtccttttgcacgctrtggaagctttgttctttcactctttgcagtaaatcttgctgctgcttgctctttgggtttgcagtccctttacgagctgtaacactggccgcgagggtct

SEQ ID NO: 436560 - DNA, 201 bp, Homo sapiens
aaaaaatgaagcccccgtgcaagcagaaagacttactttcatgtctaagtgacatgaagatacttctgggagcagtctacaccaaccttagatggcttctrtgcaaattctctcatagcaacatgtttcatttatattcatttatttctgcttccattattaggaaaatcacagtgccttctgggtatatcagaacctacc

SEQ ID NO: 436561 - DNA, 201 bp, Homo sapiens
caacttgctggggtccttttgcacgctatggaagctttgttctttcactctttgcagtaaatcttgctgctgcttgctctttgggtttgcagtccctttaygagctgtaacactggccgcgagggtctgctgctgcattcttgaagccactgaggccagaaacccaccagaggaacaaacaactctggatatgccacctta

SEQ ID NO: 436562 - DNA, 201 bp, Homo sapiens
gttgtattcatggaggtagagagtagaagaatggtttctagaggctgggaagggtagtggaggtagtgagaggaagtggggaagaatactgcatgctctcrttcatatgtggaagctgaaaacgctgatctcacagaagtagagagttgagtagtggttgccagaggttgggaagggtaacgggaaggggtggatagccag

SEQ ID NO: 436563 - DNA, 201 bp, Homo sapiens
ttcttgaagccactgaggccagaaacccaccagaggaacaaacaactctggatatgccaccttaagagcttagaacactcaccgtgaagatctacagtttyactcctgagtccgcgagaccgtgaaccccccagaaggaagaaagtacgaacacatccgaacatcagaaggcacaaactctggacgcgctgcctttaagaa

SEQ ID NO: 436564 - DNA, 201 bp, Homo sapiens
aaccccccagaaggaagaaagtacgaacacatccgaacatcagaaggcacaaactctggacgcgctgcctttaagaactgtaacactgactgtgagagtcygcagcttcattcttgaagtcagtgagaccaagaacccaccaattttgaacacaggaagggggggtggggggcatctctctcacgcctagtttataaggca

SEQ ID NO: 436565 - DNA, 201 bp, Homo sapiens
ccctgctgatttcaatggaagggacatgtgtatgttctgatcttggggagcatcattccatgcccctactagaaaagatgtctcaaacactttctgtgacrtgactggttcacatcttctgcttgctttaaattttctttgccttattaagttgtgagagttcttttcatattttcaatacaaaattctttgataaaagca

SEQ ID NO: 436566 - DNA, 201 bp, Homo sapiens
ctgaccagggagggatgccattccatttctgataacataggatctaagcccctctggtattgacttcatcttctccaagtggctctaccatgcaattgtarctgtaccgctggccatccagagctcctacagtaggccgcaacagtccaaacctcaagtctcagttattggaacacccaaaagaaggaaggcatttcccac

SEQ ID NO: 436567 - DNA, 201 bp, Homo sapiens
tgtctaacctccacgagctgcttccgaatcacctgatggagacgctttattcccgcaagagtgaagaggacaagaaaaaatgtatgtgggccgagggtggscatgagttcttttcagcaagcatatgctttatcttgatacaaactgcctctactttaagacgcaaggaagaacttttactctttattttacttagtgtat

SEQ ID NO: 436568 - DNA, 201 bp, Homo sapiens
acgcgctgcctttaagaactgtaacactgactgtgagagtccgcagcttcattcttgaagtcagtgagaccaagaacccaccaattttgaacacaggaagrgggggtggggggcatctctctcacgcctagtttataaggcactgctcccgtgacctgatcacttcttaaagacacacccccaccacgtaatgccatcacc

SEQ ID NO: 436569 - DNA, 201 bp, Homo sapiens
atgtatagactacattttgttgatccattcatctgttgatggacacttgggttgtttttacttttctatcttgtgaataatgctttgtatgcaaatatctrttcaagtctctgctagtcaattatttgcggtatatactctgctatggtttaaaggtcttctccaaaactcatgttgaaatttaattgccatgtcacttta

SEQ ID NO: 436570 - DNA, 201 bp, Homo sapiens
cagaccatagcaccaccctacccagcttttgtaaggttcacttccatccagtttcaatagaaattgcataatcttttgacggaaatgctcctgagatcctsctatattcaagcagactccaaatgactacagctgacccttgaacaacttacttgaactgtgcaggtccacttgtagtgtggcagaaaattaaagaaaaat

SEQ ID NO: 436571 - DNA, 201 bp, Homo sapiens
actttggtttcctaaaggaagaaaataagtacatagcacataatctatttaaatagatttaaagagagttgcaaaataaatcacccggtctagctcttaartgaataaaacagattttgtttgtgaataaaatctgttgattgccaacactaccactacagtatcccaccaagggcttcatgtgtcagctcagtgcgatct

SEQ ID NO: 436572 - DNA, 201 bp, Homo sapiens
tagcaacaaaaatggactaagacatacccagaagtggaattgtgggattgtatggtaattatgcctatttggggtcccttaagattccatatgcattttaraatacattttacatatctgcaaacacattgttgggaccttgatagaattacattaaatctgcaaatcaccttgggtagtattaatatctcaataatacta

SEQ ID NO: 436573 - DNA, 201 bp, Homo sapiens
ggctattagtaaaagttttgagtgaatcaaaagtcaaaaaagtagctgggtgtagtggcatggtacaggtgctagactaccatgctcaactacttggaagrctgtggcaggaggattgcttgagcccaggagttcgagaccagcctgggcaacatagcaagactttttttttttttttttttttttgcgacagagttttgc

SEQ ID NO: 436574 - DNA, 201 bp, Homo sapiens
acttatgtgtttattttcaactgagcaggggtcagtgcccctaacctccatgttattcaagggtcagttgtattttccaagggatttacatatttatttayttatttatttatttatttatttttgagacagagtctcaatctgtcgcccaggctggagtgcagtggtgcgatctcggctcactgcaacctccacctcccg

SEQ ID NO: 436575 - DNA, 201 bp, Homo sapiens
tggggtcccttaagattccatatgcattttagaatacattttacatatctgcaaacacattgttgggaccttgatagaattacattaaatctgcaaatcaycttgggtagtattaatatctcaataatactaagtcttttaatccgtgaacatgtgaagtcttcccatttatttatttgtcttctgtaatttatttcagta

SEQ ID NO: 436576 - DNA, 201 bp, Homo sapiens
aactctatttgtgtggtcccagcatgcctgcttgtttgctcattctttttttttttttttgagacagagtctcactgtcgcccaggctggagtgcagtggygcgatctcggctcactgcaagctccgcctcctgggttcacgccattctcctgcctcagcctcccgagtagctgggactacaggcccccgccaccatgccc

SEQ ID NO: 436577 - DNA, 201 bp, Homo sapiens
gaattacattaaatctgcaaatcaccttgggtagtattaatatctcaataatactaagtcttttaatccgtgaacatgtgaagtcttcccatttatttatwtgtcttctgtaatttatttcagtaatgttttgtagttttcactaagtattatgcctcattggataaactcattcctaaatttggttatttttgatgttat

SEQ ID NO: 436578 - DNA, 201 bp, Homo sapiens
gacccagcaatcccactactaggtgtgaacccaaaggaaagtaaatcagtatgtcaaagagctctctgccctcccatgtgcattgcagcactattcacaayagccaagatatgcaatcaacctaggtttccatcaacagatgaatgaattaaaaatgtggtgtatatacacaagagaatactttttagcataaaaaagaag

SEQ ID NO: 436579 - DNA, 201 bp, Homo sapiens
aggctctggcgtcagactacttagggacgttgggaaagtttcttaccctctctgtaccacagttttctcatttgtaaaatgggaaccaatccttctttgctttttttttttttttgagacggagtcttgctcggttgcccagccttgagtgcagtggcgcaatctcaactcgctgcaacctccgcctcccgggttcaagcg

SEQ ID NO: 436580 - DNA, 201 bp, Homo sapiens
tattaagatgtcctatggcttaacatatggaaaatgctccatgtgcacttaaaaaatacatattctgttgttgttaagtgcagtgtactgtatgtgtctgytgggtccagtgggtctatagtgttttttaagtcctatattcccctatgatcttctacctggttctctatccactgaagaaagtggaggtattgaagtttt

SEQ ID NO: 436581 - DNA, 201 bp, Homo sapiens
taagcttcaaatttaggttggtaggccaggcacagcggcttacgcctgtaatcccagcactttgggaggctgaggcgggcggatcacaaggtcaggagttygagaccatcctggctaacacagtgaaaccccatctctactaaaaatacaaaaatttagccgggcgtggtggtgggcgcctgtagtcccagctgctcggga

SEQ ID NO: 436582 - DNA, 201 bp, Homo sapiens
ccactgttacacagctgacatatattgtattacctttgcagctagtaaactataaagtttagatactgaatctcattacagggttatttatataatgtgaygttattcagtactgacagactacatgaagtagttttaaaatctagtgctatttttattttaaaggttagcaatgaggaggaaatgtgatctggctgtgtt

SEQ ID NO: 436583 - DNA, 201 bp, Homo sapiens
tatagtgttttttaagtcctatattcccctatgatcttctacctggttctctatccactgaagaaagtggaggtattgaagttttctactattattgtagrgccatttattcttcaattctgtcaatgtttgcttcatatattttggagctctaatatttagtgcatatgtttataattgtcatatcttcttggtaaattg

SEQ ID NO: 436584 - DNA, 201 bp, Homo sapiens
ttatataatgtgacgttattcagtactgacagactacatgaagtagttttaaaatctagtgctatttttattttaaaggttagcaatgaggaggaaatgtratctggctgtgtttgtcttctgtacaaagcctgaaatgcttatggttttttggttaacagccacagagggcaaagtttaagactttcttgtaaggactaa

SEQ ID NO: 436585 - DNA, 201 bp, Homo sapiens
tgatctatcttaattgataccaacttaacttcaattgcatataaaaactctacttccttaaagcttttctccccttatgttattgatgtcacaaattatayggtttaatattatatattcattaacatagattcataattattttatgcaattgtctcttaaatcctgtagaaaatcaaaagtggagttataaaccaaaat

SEQ ID NO: 436586 - DNA, 201 bp, Homo sapiens
ttcaattgcatataaaaactctacttccttaaagcttttctccccttatgttattgatgtcacaaattatacggtttaatattatatattcattaacatakattcataattattttatgcaattgtctcttaaatcctgtagaaaatcaaaagtggagttataaaccaaaattacattaatactgtttttatatttgttca

SEQ ID NO: 436587 - DNA, 201 bp, Homo sapiens
ctggcttacacatttcccctcttccttgctttgtgtttctgttcatgcctttttctgttatttcagaactcaaactgattcctgatcccttagagtccttstgagatttgtcatccataaatacatcctctaagattctttttttttcttaacagaacttattcttaaaaatgttcctttcatattatcacccccactcaa

SEQ ID NO: 436588 - DNA, 201 bp, Homo sapiens
gtttctttttatgtcacatcattttgtaaatattatgtcatatggatcctggatccatatgacagcttcttctcagggccttagatattctattgtatggwtggatccaatattatgtcatatggatcctggatatttactgtatttactatattgtggcattggatggaagttatgtttttgtggatcatgttacaatca

SEQ ID NO: 436589 - DNA, 201 bp, Homo sapiens
cccacctcatttgttgtgaacagaacactttctttagaatgctttccttaaaaaacttggagctaatcttctctctgtgaacattactgaacaccttgccwtctggaagccagctgatcttgtcacacccaccatggcgagggggaagaagaaggtattcaggagacacagcaaccctcttaggaacagaaaaaggaattg

SEQ ID NO: 436590 - DNA, 201 bp, Homo sapiens
gttcatgtttttctacagttctgcgagtatatttgacatttgtggttttttgttgttgttgttttgagacagactctcactctgttgcccaggctgaagcrcagtcatgtgatcttggctcactgcaacctctgcctcctgggttccagtgattctcatgcctcagccttctgagtagctgggattacaggtgtgcagcac

SEQ ID NO: 436591 - DNA, 201 bp, Homo sapiens
aaggttggtgaaaagctagcccacgctcccagatttgccatagcatactaggctcacacgccttctctgcttctcaccagcctgcagtgtggctctctagstggttcatgaagagtagagcaattatggggaacctggctcctggtagagcatgctgaaatctaaaagtagctgtaacaaactctattatttgcatttttg

SEQ ID NO: 436592 - DNA, 201 bp, Homo sapiens
gagtgcagaggcacgatcttggctcactgtaacctccacctcctgggttcaaatgattctcctgcctcagcctcttgagtagctgggattacaggtgcccrccaccatgccccggctaatttttgtatttttagtagagacagcatttcactatgttggcccggctggtcttgaactcctgatctcaagtgatccaccagc

SEQ ID NO: 436593 - DNA, 201 bp, Homo sapiens
acacttgtgtacaggtcactgggtgaatctcttttaaattatcataggtaaatacctaagtggtatggctggtctgtgtggtaaatgtatatttagctcaraagctgctagactgttttctagagtggttgtaccatttgacattcccaccagcaatgtatgaaagttccaattgctccacatcctcactaaacctagcta

SEQ ID NO: 436594 - DNA, 201 bp, Homo sapiens
tcttgattttgccccagtggtttttttggttggctttaactactggaattaattcaatattggttatttagtatatagtcatttttagttttttttttttttacatttaagacatatttttgtgtttcttaatgaataaattatgaaagaatgttaatttaaaattcataatatgtaaaagaatatttagatttcatttcc

SEQ ID NO: 436595 - DNA, 201 bp, Homo sapiens
atcttagagccttttttttttttttttttttttttttgagacagagtctcactctgttacccaagctggagtgcagtggcgcgacctcgggtcactgcaamctttgccttccaggttcaagtgattctcctgcctcagcctcctgagtagctgggattacaggtgtgtgccaccatgcccggctaatttttatatttttag

SEQ ID NO: 436596 - DNA, 201 bp, Homo sapiens
tgcttctcaccagcctgcagtgtggctctctagctggttcatgaagagtagagcaattatggggaacctggctcctggtagagcatgctgaaatctaaaartagctgtaacaaactctattatttgcatttttgttccaaatctgatactagttcttggcagcttctgtcttgctctggactgtgctatcaagtgtggtga

SEQ ID NO: 436597 - DNA, 201 bp, Homo sapiens
taccagatgggaaaataccactggatacgcgcgcccccgctttcccctcttccttttagcaaagctctcagttttccccagaaatggtccatgtccagacrcaagactggagtttctgccacaaatccccaaatgacttggcaggatattttcaatgggctggttttctctgctttgaaaatgcaggatgaacacgcaggg

SEQ ID NO: 436598 - DNA, 201 bp, Homo sapiens
catgcgatcctcccacctcgacctccccagtagctgggactacaggtgcattgccaccacaatgtctaattttttaattttttgtagagctgcaccccccmccgctccccacatccccatgttgcctgggctggtctcgaactcccaagctcaagcctttgcccgcctttgcctccaaagtgctggaattcgaggtgggat

SEQ ID NO: 436599 - DNA, 201 bp, Homo sapiens
gccagaagttttgtgtcgcccctttgagatgctgtctaacctccacgagctgcttccgaatcacctgatggagacgctttattcccgcaagagtgaagagkacaagaaaaaatgtatgtgggccgagggtgggcatgagttcttttcagcaagcatatgctttatcttgatacaaactgcctctactttaagacgcaagga

SEQ ID NO: 436600 - DNA, 201 bp, Homo sapiens
gatgtgtcttgtgctttttatgacttattctctgaaggcaaataaatttttcccttaggaaatcattttcaaggttcttagaagtaaaagatgaatactarcatttgggggaagctttgcaaatgccttcagcctggtccagacttctttctgaaaagtgctatcagggaaaacttcagtaacaagtccttgagcacatgc

SEQ ID NO: 436601 - DNA, 201 bp, Homo sapiens
gcgggcggatgatttgaggtaaggcattcgagaccagtctgaccaacatggtgaaaccctgtctttactgaaaatacaaaattaggcggtgtggtggtacrtgcctgtaatcccagctacttgggagactgaggcaggagaattgcttgaacctgggagttggaggttgcagcgagctgagattgtgccactgcactccag

SEQ ID NO: 436602 - DNA, 201 bp, Homo sapiens
caaaatcctaataggcaatgaaaacaagctcaattcccactgccccactttgagatcttgcagcaatatttgctaagccttttcctatagctcagcttctrgtcttgtcacaatccccttcgagtcatgccacagggcgtgggcaactaggaaacacagtgaaagacctgagcagccacttaaccagcctgggagagaata

SEQ ID NO: 436603 - DNA, 201 bp, Homo sapiens
aacacgggagtcagagactgcagtgaactgagatcatgccattgcactccagcttgggcaacaaaagcaaaactccacctcaaaaaaaaaaaaaaattatkcagtattaaatcataactgtagaaaattaactgtagtaatactgtagtgctgtagtaatttcatagccacctcccgttgctcttgctgtgagctcaagtg

SEQ ID NO: 436604 - DNA, 201 bp, Homo sapiens
tagtagcaacagacctacctcatttttaatttttggcattgtttttggtggataaaatatgataatgggcattaagcactagtaactgctcaattgaaackaatgcttatttctattcttatattttctataaaactgaacatcttggattacaattactggaataaaaaatttagaactaaaaagttaagagatttggtg

SEQ ID NO: 436605 - DNA, 201 bp, Homo sapiens
ttgctcatggtgtcctgcctcgcatttgtgattctgttaatgacttgtatcttaactaagttcttagtggtgttgtaatagggagatggggcaggtggggkgttatttgtaccactgaatcttcattaatttggttctttactgttttgaggggagaaagaatgtgaaatggtttgtgtattattgaattttaagcaatat

SEQ ID NO: 436606 - DNA, 201 bp, Homo sapiens
agccatcttccctgaaggacattgcattcttcagcattaacagcgtgtagtttttctctctctcttttcctgattacctcttttgaaattctcaagacctrgaaaaacaaaaccaacaataaggttaagagttgacctaggctggacgtggactcatgcctgtaatcccagcacttggggaggccgaggcgggcagatcag

SEQ ID NO: 436607 - DNA, 201 bp, Homo sapiens
tacctcttttgaaattctcaagacctggaaaaacaaaaccaacaataaggttaagagttgacctaggctggacgtggactcatgcctgtaatcccagcacktggggaggccgaggcgggcagatcagttgaggtcaggagttcaagaccagcctggccaacatggtgaaaccccatctctactaaaaatacaaaaattagc

SEQ ID NO: 436608 - DNA, 201 bp, Homo sapiens
gggtggctctggcagccgtgagcccccacaaaacctcccatctgttggtacttactgtaactctgaaagtgaagacgtcatcatgtctctccttaggagayactggtcatccataaaggaaccgagtggcctccaaactcaggggaccaagggaggctggcacagccctggtccttcaagtgactaatgccacacagctgc

SEQ ID NO: 436609 - DNA, 201 bp, Homo sapiens
cccccacaaaacctcccatctgttggtacttactgtaactctgaaagtgaagacgtcatcatgtctctccttaggagatactggtcatccataaaggaacygagtggcctccaaactcaggggaccaagggaggctggcacagccctggtccttcaagtgactaatgccacacagctgcaaggctgaggtgctgtgctgct

SEQ ID NO: 436610 - DNA, 201 bp, Homo sapiens
agcttgggtgacagagtgagactcccatctcttaaaaaaaaaaaaataaggatgatgtatattgaaagtaattttcaattcagtgggagaatcagaacaarattcaaatacaatatttgccctccaagtattaaagaatgagatccccaattttaggtcaggaaccattgacccagtccctgttaaaagcaggtcaatgac

SEQ ID NO: 436611 - DNA, 201 bp, Homo sapiens
ccagaagttttgtgtcgcccctttgagatgctgtctaacctccacgagctgcttccgaatcacctgatggagacgctttattcccgcaagagtgaagaggwcaagaaaaaatgtatgtgggccgagggtgggcatgagttcttttcagcaagcatatgctttatcttgatacaaactgcctctactttaagacgcaaggaa

SEQ ID NO: 436612 - DNA, 201 bp, Homo sapiens
attacaggcacgcgccaccacacctggctaatttttgtattgtagtagagacagggttttgccattttggccaggctgctctcaaactcctgacctcaagyggtccacccacctcggcttcccaaagtgctgggattacaggcatgaaccgccaagtccggctggggtttacatttagctcaaagaaaatctgtgcccttg

SEQ ID NO: 436613 - DNA, 201 bp, Homo sapiens
tccgttgccaagatgccatttccaaacatatagtgatttccttgcatatgcatcctgaagacatgaccctattgctctgactttcatccgtcagaccaagratttaaaaatagatactgctgtcttgctgctgctgggtctaaagccttccttctagaagaaatttcttttgaccttaaaaataggttttgttcttttcct

SEQ ID NO: 436614 - DNA, 201 bp, Homo sapiens
gtttgtgtattattgaattttaagcaatattttagaagctgtgtgactgctttaataactttttcccagtgttatttgaatcatactaccagttttactamagccgaatgacaattgtgtgaaagttactgccttcataagatcaagtcaccactgttacacagctgacatatattgtattacctttgcagctagtaaact

SEQ ID NO: 436615 - DNA, 201 bp, Homo sapiens
ttttattttacaaacatttatttgctttccttaaaagcagggactgtcagcctatcttatttatttttgtattcctagtgttacaggttggagtctcaagygctgagatagaaataagaatgcaaaaggtttcctgggagtggtgttgcatcaaagtggaagcaggaaaacagtgttgggcagggattcaagaggtggaga

SEQ ID NO: 436616 - DNA, 201 bp, Homo sapiens
gtatcattcttaattctttgtgacttaactgacacccttgagagaattcattctttagccaaagcaagcctgactattattaagaatcatcaataatagctttgtccataaaactagaactaccatatgacccagcaatcccactactaggtgtgaacccaaaggaaagtaaatcagtatgtcaaagagctctctgccctc

SEQ ID NO: 436617 - DNA, 201 bp, Homo sapiens
gcaatttatcctgacttggggccgctcctcctctataccaaaattcatcttttattgtacttaccatgttatagtgtctgtgttgatttgctactccactygtgtgctgtgtaagcatttaagaaaaacgtttaatgttttctttttctttttcttttcttttttttttttttttttttttgagatggagtctcactcttg

SEQ ID NO: 436618 - DNA, 201 bp, Homo sapiens
gcaccaccacacccagctactttttgtatttttggtagagacggggtttcaccatgttagccaggctggtctcgaactcctgacctcaggtgatcctcccrcctcagcctcacaaattgttgggattactggcgtgagccaccgtgcctggccatttttcttttctttttttttttttgagatggagtcttgctctgtcac

SEQ ID NO: 436619 - DNA, 201 bp, Homo sapiens
acattcataaaaaatgaatttccacatatatttgagtgtatttctgaatcctattttgctccatttatctacatgtctttgcccaaacaagactttcttaytgtggccaggtcctgaaataaggtagtgttaggcatctgactttgatcttctgctttaaaaattgctttgattattttaggttctttgtattgccataaa

SEQ ID NO: 436620 - DNA, 201 bp, Homo sapiens
tgtaatgataaaaattggaaacagcctagggttccagcagtcagggactggttaaacaagataagttaataacccaaacgttaggactggttatctctagrtggcaagataaggagtgatttttaccttgtagcttttcttggtactttttcatatctttcaaaattttattttccactatgacatatatattactactgt

SEQ ID NO: 436621 - DNA, 201 bp, Homo sapiens
tggtttgaatcttgtattctggacagtgagttcagggctgtaaaccagccgcagtcttagagattaggttgggtgactgagcacatgctgcaatatcacarcaagtgggaattacagatttggcaggaataaagagaaaagccttcatgacctcctcctgtgtttacaagactcctccgagtctcctaccttcagcgttca

SEQ ID NO: 436622 - DNA, 201 bp, Homo sapiens
cctgtgtttacaagactcctccgagtctcctaccttcagcgttcatggaaatctcccattcctctggctggatgagaatttgctaaattcctctgcctcartgcaagataattttgtttacaactatagctcacttttatgttttccagtcaaatctcatgagaccagcaggatgaacaggtaacagaggtcaaagagaaa

SEQ ID NO: 436623 - DNA, 201 bp, Homo sapiens
ttcaaggttcttagaagtaaaagatgaatactaacatttgggggaagctttgcaaatgccttcagcctggtccagacttctttctgaaaagtgctatcagrgaaaacttcagtaacaagtccttgagcacatgcctctcccgctgttaacttctttccaaaaataagcatctctgttgcctgaaatgaaaagcaagaagca

SEQ ID NO: 436624 - DNA, 201 bp, Homo sapiens
gctactgttgaaatagaggagtggtgcgtcatgaaatgagggtatgtaccaggagggttggtctaatcagggagttcaggaaagaactttcctaaggaagsgacaactgaattgagatctgaaggagaggccaggtgggctagaaaaagagggctgggaagaacagtttacacaaaggaacagcctgtgcaaaggctcttt

SEQ ID NO: 436625 - DNA, 201 bp, Homo sapiens
catatgtgtcttaattgatgttgggtaattgcgaaggagtgggtatctgtgtttttttaaacattttttgtatatttataaatcagagtatgacagtactrgaaaagatcttagagccttttttttttttttttttttttttttgagacagagtctcactctgttacccaagctggagtgcagtggcgcgacctcgggtca

SEQ ID NO: 436626 - DNA, 201 bp, Homo sapiens
gcctgaaactttaagcctgttgatcattaattcccatttccccctcccacaacgccctgggatgtaaccatcattacgctctttgattctatgaatttgaytgttttagatgcctcatataaatggaatcatgcattatttctgtgactggcttatttcacttagcatgtcctcaaggtgcatctacgttgtcacatatta

SEQ ID NO: 436627 - DNA, 201 bp, Homo sapiens
agtacttcattgtacgtatataccacattttctttatccacttctctgtcaatgaagatttacatttttcccatactttggctattgtgaatggtgctgcratgaatatagaggtgttaatgtctcttcaagattttgatttcaattcttttggataaatacccagaagtggcattgctggatcatataattccttgggat

SEQ ID NO: 436628 - DNA, 201 bp, Homo sapiens
tttggctattgtgaatggtgctgcgatgaatatagaggtgttaatgtctcttcaagattttgatttcaattcttttggataaatacccagaagtggcattrctggatcatataattccttgggattttttttaatgtaaatagtcatattatctgcaaatagagaaacatttttacatcttgttttccattctttgtcttt

SEQ ID NO: 436629 - DNA, 201 bp, Homo sapiens
atagaggtgttaatgtctcttcaagattttgatttcaattcttttggataaatacccagaagtggcattgctggatcatataattccttgggatttttttwaatgtaaatagtcatattatctgcaaatagagaaacatttttacatcttgttttccattctttgtcttttatttcctttctttgccttattgcaatgact

SEQ ID NO: 436630 - DNA, 201 bp, Homo sapiens
gtttcttctagaagtttgaatttgtagctacagtttccaggaagaaaaatagtagttggataacttggtaaaataataacatcattttcattttcttcccytttcttaactttggtttcctaaaggaagaaaataagtacatagcacataatctatttaaatagatttaaagagagttgcaaaataaatcacccggtctag

SEQ ID NO: 436631 - DNA, 201 bp, Homo sapiens
cttttaatccgtgaacatgtgaagtcttcccatttatttatttgtcttctgtaatttatttcagtaatgttttgtagttttcactaagtattatgcctcaytggataaactcattcctaaatttggttatttttgatgttattataaattgaatggtttttctcaatttcctttttggaattttcattgctagtatttatt

SEQ ID NO: 436632 - DNA, 201 bp, Homo sapiens
tttattttttcttctgtatgcttctcaaattcaataatttcaaatgagctgttttcaaatttgcttattctttcttctacttatttgagtttgctgttgawctcctctaataaaattttcaaattagttattgtacttttcagctcaatatttttttttataatttctttgttgatattctcattttgttcatatgttttc

SEQ ID NO: 436633 - DNA, 201 bp, Homo sapiens
ctacttatttgagtttgctgttgatctcctctaataaaattttcaaattagttattgtacttttcagctcaatatttttttttataatttctttgttgatrttctcattttgttcatatgttttcttgactttcctttgttctttgttcatgtttttctacagttctgcgagtatatttgacatttgtggttttttgttgt

SEQ ID NO: 436634 - DNA, 201 bp, Homo sapiens
tgctgttgatctcctctaataaaattttcaaattagttattgtacttttcagctcaatatttttttttataatttctttgttgatattctcattttgttcrtatgttttcttgactttcctttgttctttgttcatgtttttctacagttctgcgagtatatttgacatttgtggttttttgttgttgttgttttgagaca

SEQ ID NO: 436635 - DNA, 201 bp, Homo sapiens
tgatattctcattttgttcatatgttttcttgactttcctttgttctttgttcatgtttttctacagttctgcgagtatatttgacatttgtggttttttkttgttgttgttttgagacagactctcactctgttgcccaggctgaagcgcagtcatgtgatcttggctcactgcaacctctgcctcctgggttccagtga

SEQ ID NO: 436636 - DNA, 201 bp, Homo sapiens
gcttattctggaatttactcatgtgctgattatccattgcttcttcatgttcttttgcataaatagtcttttgtgagccaagttaggcgtgaccctcttctttttttttttttttttgagatgaagtctggctctgtcgcccaggccggagtgcagtggtgcgatctcagctcactgcaagccccgcctcccggtttcatg

SEQ ID NO: 436637 - DNA, 201 bp, Homo sapiens
tggttaacagccacagagggcaaagtttaagactttcttgtaaggactaactgttcttttcaagccactgtttgtttttctaaaagcaggatttgcttccrtagcaggcaagttccttgacgtggaatagtgcaacctgtatatgggctattataataggaaagacatctgtatttgcacagtttaaatcattcttaaatt

SEQ ID NO: 436638 - DNA, 201 bp, Homo sapiens
agtttttgacttaaagtctattttgtcaattagtatagccatttctgctctctttttattactattggcatggaatatctttttaatccttccactttcaycctactcatatccttagatctaaagtgagactcttttaaacagtatatagttgatcctggttttatacccactctgccaacttatgatttttgatatgtt

SEQ ID NO: 436639 - DNA, 201 bp, Homo sapiens
gtgattttaaaggtcttcatttcctaaacagtctcactgcagctttttcttagggccttagatattctattgtattcctctgtaatctcctgccctcagargtccacagggcagcaatccctgtgtagttttcatgtgctgcattgctcaccactgccttctgtggcttccagcctgaaatcaaaactatttgctgtctcc

SEQ ID NO: 436640 - DNA, 201 bp, Homo sapiens
actctgctccttctgtccaagtgttcacatttccatgtttctttttatgtcacatcattttgtaaatattatgtcatatggatcctggatccatatgacarcttcttctcagggccttagatattctattgtatggttggatccaatattatgtcatatggatcctggatatttactgtatttactatattgtggcattgg

SEQ ID NO: 436641 - DNA, 201 bp, Homo sapiens
aattttaggtcctgatgtcttcatatgaagttatagatctttatatcctagtttgctttctgaaaatatagctagagtatcagaacataggaaatggtacttttttttaacattttattttacaaacatttatttgctttccttaaaagcagggactgtcagcctatcttatttatttttgtattcctagtgttacaggtt

SEQ ID NO: 436642 - DNA, 201 bp, Homo sapiens
tgaggcagaagtattaggttggtgcaaaagtaactgcagttttgccttacttctaataccatgctccggagttagattccagcaattgtgtttatttctcrtaatctgggaaacttatccttgtgcagttgcttctctgtattttgacaccctttaacaatccacctgcttttgattaatttcagcatgctcaagtagttc

SEQ ID NO: 436643 - DNA, 201 bp, Homo sapiens
ttggcttgtgctgccattgtgggatgagaactctgcctagatttttatcttcattttgacatttactgggagtttgactctggagaagctagtttaatctycatgcctcgggatgcctacttgaaaatgggtagtagcaacagacctacctcatttttaatttttggcattgtttttggtggataaaatatgataatgggc

SEQ ID NO: 436644 - DNA, 201 bp, Homo sapiens
gcaaaataaatcacccggtctagctcttaagtgaataaaacagattttgtttgtgaataaaatctgttgattgccaacactaccactacagtatcccaccragggcttcatgtgtcagctcagtgcgatctcctttaactctgcagcaccgctgcagctgccgacgtagcctcggtaggtggctattagagctctaccata

SEQ ID NO: 436645 - DNA, 201 bp, Homo sapiens
ttttgctcccttgctacatggctgaaaaagaacatgcaacccactgaagacctcaagtcagtgatctgtaggctgtcagcatttggcccaattcagtcagycactgtttgtggacgtcaaagtgctatagtggcattcaaagacatgacttcagcctgtaatgctgtgagtgcttttcaaagtaggaccccaggcaccatg

SEQ ID NO: 436646 - DNA, 201 bp, Homo sapiens
tgatagccatcttccctgaaggacattgcattcttcagcattaacagcgtgtagtttttctctctctcttttcctgattacctcttttgaaattctcaagrcctggaaaaacaaaaccaacaataaggttaagagttgacctaggctggacgtggactcatgcctgtaatcccagcacttggggaggccgaggcgggcaga

SEQ ID NO: 436647 - DNA, 201 bp, Homo sapiens
acctttatttgatcatgacacattgtaaacatgcatcaaaacatcccactgtatcccataaatatgtgcagttattatgtcaatttaatcgaagaatagckttttgtctaagagctattgaacactactgattcgtgtgcccttgaccacctgtaaaatggtgttgctaatacctcatgttgtatcagaaagagttgtgac

SEQ ID NO: 436648 - DNA, 201 bp, Homo sapiens
caaaactttttattcatcagagctgtagtgaaatatcatcattgtaattgatattctagcactacaaaaggcacaatgaagcttatttagttccagtactrgaaatcagaggtaacagcacatccttccttggacatgctttactctgctgtagtggtcatcacagttttgattttctggataagaagttcaccacagcat

SEQ ID NO: 436649 - DNA, 201 bp, Homo sapiens
ggggaagctttgcaaatgccttcagcctggtccagacttctttctgaaaagtgctatcagggaaaacttcagtaacaagtccttgagcacatgcctctccygctgttaacttctttccaaaaataagcatctctgttgcctgaaatgaaaagcaagaagcaaggttaagatactaacttaataaaacaaggcttcagttaa

SEQ ID NO: 436650 - DNA, 201 bp, Homo sapiens
agcctccttggaggtttcccttctagggccctctcctccttcggctgttttccatactgctgctctaaaatacagacctgctcaactgcctcctaatgcckgaaggaggaaaccctaattctgcagccatcccttaggtatctgctcatcaccttcccagcgcccactacatgtcaagcacatcggacattttacaatttt

SEQ ID NO: 436651 - DNA, 201 bp, Homo sapiens
tagaaatgagaagctggctatggttaaagcggaaccagaagttaaaaaattagaagaccaacttcaaggcagtcaattagaagaagtgattctttttttatttttttttttttgagacggagtctcgctctgtcgcccaggctggagtgcagtggcgggatctcggctcactgcaagctccgcctcccgggttcacgccat

SEQ ID NO: 436652 - DNA, 201 bp, Homo sapiens
tgagaagctggctatggttaaagcggaaccagaagttaaaaaattagaagaccaacttcaaggcagtcaattagaagaagtgattctttttttattttttwttttttgagacggagtctcgctctgtcgcccaggctggagtgcagtggcgggatctcggctcactgcaagctccgcctcccgggttcacgccattctcct

SEQ ID NO: 436653 - DNA, 201 bp, Homo sapiens
taaatgttgaacctttttgacctggcttgtttgcaaaggcctggtcaatgtcaacatcgggagcctcatctgcagtgtagaggctggtggagctgctccarctgaggagaagaaagtggaagcaaagaaagaagaatccgaggacgctgatgatgacatgcgctttggtctttttcactgaacctctttttataaagtgtt

SEQ ID NO: 436654 - DNA, 201 bp, Homo sapiens
gagcctcatctgcagtgtagaggctggtggagctgctccagctgaggagaagaaagtggaagcaaagaaagaagaatccgaggacgctgatgatgacatgmgctttggtctttttcactgaacctctttttataaagtgttcaataaaaagctgaacttcaattaaaaaaaaaaagaaataaatgtattctttgcatctgg

SEQ ID NO: 436655 - DNA, 201 bp, Homo sapiens; identical to SEQ ID NO: 100836

SEQ ID NO: 436656 - DNA, 201 bp, Homo sapiens; identical to SEQ ID NO: 100837

SEQ ID NO: 436657 - DNA, 201 bp, Homo sapiens; identical to SEQ ID NO: 100852

SEQ ID NO: 436658 - DNA, 201 bp, Homo sapiens; identical to SEQ ID NO: 100870

SEQ ID NO: 436659 - DNA, 201 bp, Homo sapiens; identical to SEQ ID NO: 100872

SEQ ID NO: 436660 - DNA, 201 bp, Homo sapiens; identical to SEQ ID NO: 100853

SEQ ID NO: 436661 - DNA, 201 bp, Homo sapiens; identical to SEQ ID NO: 100873

SEQ ID NO: 436662 - DNA, 201 bp, Homo sapiens; identical to SEQ ID NO: 100855

SEQ ID NO: 436663 - DNA, 201 bp, Homo sapiens; identical to SEQ ID NO: 100876

SEQ ID NO: 436664 - DNA, 201 bp, Homo sapiens; identical to SEQ ID NO: 100880

SEQ ID NO: 436665 - DNA, 201 bp, Homo sapiens; identical to SEQ ID NO: 100861

SEQ ID NO: 436666 - DNA, 201 bp, Homo sapiens; identical to SEQ ID NO: 100863

SEQ ID NO: 436667 - DNA, 201 bp, Homo sapiens; identical to SEQ ID NO: 100888

SEQ ID NO: 436668 - DNA, 201 bp, Homo sapiens; identical to SEQ ID NO: 100866

SEQ ID NO: 436669 - DNA, 201 bp, Homo sapiens; identical to SEQ ID NO: 100843

SEQ ID NO: 436670 - DNA, 201 bp, Homo sapiens; identical to SEQ ID NO: 100846

SEQ ID NO: 436671 - DNA, 201 bp, Homo sapiens
gtggcttcctccagtcctgatcgacggaactctgcgaggatggctctcaggaagctctgttccagaacagaggaatttcttaaaggaaacgaggggatgtragtttttgtcagtggctgtaaccccagcccagaggaaagccaaagaaaacttttctgtgtctttagaaaagagaaaacccgggaaataatttctcctata

SEQ ID NO: 436672 - DNA, 201 bp, Homo sapiens
gggtgctggcttcttgcctgtggtttgtgcttcccctgtgagagccagcagctcagcctccaggtcctcatcatcttcagcctcatccatgcccagcagcrtgtcctcagggccaaactccataaagagccccatctgagagcagagcaggactcttaggaaccacacaacaagcagggtagggtccagctccagagccag

SEQ ID NO: 436673 - DNA, 201 bp, Homo sapiens
tgaactaatgggggaactacatgtgatccagtttgcctaagttgtctagggacccccatccccaaaccgacccagtagcctagaaggctaagttccatacytgcttggcagcggccaccccttggcctctggcctgagggcccttccgaggtcttggccctggcatcatggcagcctagatacctatggaagagttacaga

SEQ ID NO: 436674 - DNA, 201 bp, Homo sapiens
aatggaaaattccaaaatacatgagagccatttccattcaatatactttgttacaacaattccatgtacttccaaaatcagatgctttgtagactagcttrgcaacatggtgaagccctgtctctacaaaaaatcagctgggcatggtggcatgtgcctgtagtttcagccacctgggaggatgaggttggggggtcacct

SEQ ID NO: 436675 - DNA, 201 bp, Homo sapiens
aattccaaaatacatgagagccatttccattcaatatactttgttacaacaattccatgtacttccaaaatcagatgctttgtagactagcttggcaacayggtgaagccctgtctctacaaaaaatcagctgggcatggtggcatgtgcctgtagtttcagccacctgggaggatgaggttggggggtcacctaagcctg

SEQ ID NO: 436676 - DNA, 201 bp, Homo sapiens
gacgttgagccgcacccgaaggagcagatcgttcctgctgggctccacaagcaggaggcgacaggagcccaggtgagaacacacggccatggtctctgacrtggtggggtacggcagtccctccattctgcacagtgccacatgttgactatatatctagacacaaatagcaaggcaaaggttaagaggaaatacaatcct

SEQ ID NO: 436677 - DNA, 201 bp, Homo sapiens
tcagttgtgcttttttttttttttttgagacagtctcactctgtcacccaggctggggtgcagtggcgctatctcggctcactgcaaactccgcctcccgrgttcaagcgactctcctgcctcagcctcctgagtaactgggattacaggcatacgccaccacacttggctaattttctgtattttttgtggaaacagggt

SEQ ID NO: 436678 - DNA, 201 bp, Homo sapiens
agggactgggggaggtgctgaaagttaaaaccacggcagtaaattttcaacacaagggaatacctcctaaaaatcacctaggggctcttttaaacctttaytgtttttttcagcataaaaacaacttcagaggagactggggatttcaaagctctctggctctaactgcctcctgggaacagcatggaagcttccctaatc

SEQ ID NO: 436679 - DNA, 201 bp, Homo sapiens
ggtcattacaaacccagctgggaagggactgggggaggtgctgaaagttaaaaccacggcagtaaattttcaacacaagggaatacctcctaaaaatcacytaggggctcttttaaacctttattgtttttttcagcataaaaacaacttcagaggagactggggatttcaaagctctctggctctaactgcctcctggga

SEQ ID NO: 436680 - DNA, 201 bp, Homo sapiens
gggatttcaaagctctctggctctaactgcctcctgggaacagcatggaagcttccctaatcatggaggagttaatgcaggcctctgggggaagaagtctytaatgggaggaaataaatgggcccttgccttgcagatggtcccaagccctcccctcactggaattcttcttgctctgtgagctagcctcatcttcagttg

SEQ ID NO: 436681 - DNA, 201 bp, Homo sapiens
ctctgtcacccaggctggggtgcagtggcgctatctcggctcactgcaaactccgcctcccgggttcaagcgactctcctgcctcagcctcctgagtaacygggattacaggcatacgccaccacacttggctaattttctgtattttttgtggaaacagggtgttaccatgttggccaggctggtctcaaactcctgacc

SEQ ID NO: 436682 - DNA, 201 bp, Homo sapiens
aagcgagtgggtctgagtgggttctgggagactgcctttaattttcctaaatttgaatgggggttgggataaggtgagaccaaagaatccctgttctggtygattatgtttctaaaactagaactaagaattcagtgcttagcttcctcctctgacctaagtctcttctcacactcctattcaaagtgctggggtggaagg

SEQ ID NO: 436683 - DNA, 201 bp, Homo sapiens
catgtgtagtcccaggtacttaggatgctgaggcaggaggatagcttgagcccaggagttcaacgctgcagtaagttcatactactgcagtccactctggrctacagaaggagagctcgtctctaaaaaaatgggaaaaaaaagaggagaaaaataaaagaagaatccactctactacttaaaggtcaggggaattgagcc

SEQ ID NO: 436684 - DNA, 201 bp, Homo sapiens
gtttgaggttaaagtgagctctgattgtaccactgcactctagcctgaaagacagagagagaccctatctgtaaaaaaaaggctgggcatggtggctcacrcctgtaatcccagcactttgggaggctgaggtgggcggatcacaaggtcaggagatcaagaccatcctggctaacaccgtgaaaccccatctctactaaa

SEQ ID NO: 436685 - DNA, 201 bp, Homo sapiens
cagtaagcattttaaagtcttaccagttgtgacattgaaataatgagactttaaagtccaaccacgtatctggaaatataggaacaccattcatttatttkttagaagaccacacactcatgctaatgaggatgccattgcttaaaatgttttggaaattctctttaggaattgtttttggcacaagattatgcagtatgg

SEQ ID NO: 436686 - DNA, 201 bp, Homo sapiens
ataacctccaagtatgatgaagttcttctgtagacatgtaggtatcagtattatgctaacattttttcttttcctagataaaaataaagtagcccacaagyctggttttatgttatgttaacattcattaggtattctttgcaattttcccttttgcagctattaaatcacttattccttcaatattttttcctgcataat

SEQ ID NO: 436687 - DNA, 201 bp, Homo sapiens
ttcacagctgagttcattctctcaccatcccaggtgcctggttgtgacaggaagaatcgggttcctggtctgattttcgagccttgctccttggacgagcrgtgggcatttgtctggtttgttaatggccctctgcttgctctacccaggcactctggggatggctgtagaaagatgtaaactgaaaagttcttctggccc

SEQ ID NO: 436688 - DNA, 201 bp, Homo sapiens
tttcaaaaaatttttaccaacttaacattcccaaccacaatgctgtctggcaatttgaaccctcttgccaatatcaagtgttatttttataaaaacaaacmccaaactctgacttaaagtgaaaagaactcactgctccattaatttatctttatttacagtaaagttgattttttcatatatttattagccatttatttt

SEQ ID NO: 436689 - DNA, 201 bp, Homo sapiens
accgagacagactcttaaactaataattagaacacccactagaacaattactgaggtaagaacagggcactccagaaggagaaaaggggaagaaactcacygtaactgggaggtgaaagttttttgctttttgtttttttgagatggagtcttgctctatcaccaggctggagtgcagtggtgcgatcttggctcactgca

SEQ ID NO: 436690 - DNA, 201 bp, Homo sapiens
gggcttgcttccccttacctccataggtgatccaggtaagccctgaccttggctctaggttccggttcctcctcctccaagggcaaccttacaagtggaastgtggcactcacctccactggctttactgaaattgcatgtttatcttcgaagtttttgaatactttttatcaccaattctgccctttgttaatgttcaaa

SEQ ID NO: 436691 - DNA, 201 bp, Homo sapiens
gccatcttggctcactgcaacctctgcctcctgagttcaagcgagtctcctgcctcagcttctcgaatagctgggactacaaggtatgaccacaatgcccrgctaattttttgtctttttagtagagacggggttttgctatgttgcccaagctggtctcctaagctcaggcaatcagcctgccttcgcctcccaaagtgc

SEQ ID NO: 436692 - DNA, 201 bp, Homo sapiens
agtctgtgggactgagccttttcacttgtgggatctgaggctactcatctggtagatagtgtcaggattgaattaaattgtaggaccccactccctcccckaccccgcctcaccccacccccatgtcgggagacttggttggtgtggggaaccctccatgccccacatttggtgttagaaatgttgtgtgagtctagagag

SEQ ID NO: 436693 - DNA, 201 bp, Homo sapiens
ctttggaaaagagtttaccgctaaacagatagctactggtagctataattgcactcctagttgaacttctcagcatctgtatatttatatatattatttgacacacacacacacacacacacagtgaaaaccttgctgcacccaagaggaataagagtatgtccacaaaaatactggtataaagaacgttcatagcagctt

SEQ ID NO: 436694 - DNA, 201 bp, Homo sapiens
tttggaaaagagtttaccgctaaacagatagctactggtagctataattgcactcctagttgaacttctcagcatctgtatatttatatatattatttgacacacacacacacacacacacagtgaaaaccttgctgcacccaagaggaataagagtatgtccacaaaaatactggtataaagaacgttcatagcagcttt

SEQ ID NO: 436695 - DNA, 201 bp, Homo sapiens
ttggaaaagagtttaccgctaaacagatagctactggtagctataattgcactcctagttgaacttctcagcatctgtatatttatatatattatttgacacacacacacacacacacacagtgaaaaccttgctgcacccaagaggaataagagtatgtccacaaaaatactggtataaagaacgttcatagcagcttta

SEQ ID NO: 436696 - DNA, 201 bp, Homo sapiens
tggaaaagagtttaccgctaaacagatagctactggtagctataattgcactcctagttgaacttctcagcatctgtatatttatatatattatttgacacacacacacacacacacacagtgaaaaccttgctgcacccaagaggaataagagtatgtccacaaaaatactggtataaagaacgttcatagcagctttat

SEQ ID NO: 436697 - DNA, 201 bp, Homo sapiens
actctgggtggctgaggcaggcagatagattcccttgagcctcggagtatgagaccagcctgggccacatggaaaaaccccatctctgaaaaaaaaatacaaaaaaaaaatttagcaggttgtggtggcatgcacctgtagtctcagctacctgggaagctgatgtgggaggatcacttgagtcccagagactgaggctgc

SEQ ID NO: 436698 - DNA, 201 bp, Homo sapiens
tcatgaattcccattttatttaatatgttataatctgttactaatgatatttatttatttatttgagacagggcctcactctgtcacccaggctggaacgyggcagcgtgatcacaactcactgcagcctagacctcccaggcttaggtgatcctcccacctcagcctcccaagtagctgggactacaggcacacatcacc

SEQ ID NO: 436699 - DNA, 201 bp, Homo sapiens
gctgaggcaggcagatagattcccttgagcctcggagtatgagaccagcctgggccacatggaaaaaccccatctctgaaaaaaaaatacaaaaaaaaaawttagcaggttgtggtggcatgcacctgtagtctcagctacctgggaagctgatgtgggaggatcacttgagtcccagagactgaggctgcagggagctgt

SEQ ID NO: 436700 - DNA, 201 bp, Homo sapiens
gttcagctaaaagccaggtttttgtcacacggccattaaagattaggttcgcagacactttgaagggtgagaaggggagggtttattgcatcaaaaggggraaaaaacggaaacagggactctcagcaaagcgagggtcctgctaataggcttctagactcacagattgaatcccagataccacccggaaccggagaggcc

SEQ ID NO: 436701 - DNA, 201 bp, Homo sapiens
cataacatgtctaaattataattaaataccttgtaatccatgccaagttcttccctttatgggtataaatacataatgatgatctagatttattttgctgscatctgaccataatgaaatcaacttgcatcgctctcatttccttaatccacttctaaattcctgctaggtaagtcacaagttggctggcatgtctatgag

SEQ ID NO: 436702 - DNA, 201 bp, Homo sapiens
gtgtatatgtgtcacactttcttaatccagtctatcattgatggacacttgggttggttccaagtctttgctattgtgaatagtgccgcaataaatatacrtgtgcatgtgtctttatagcagcatgatttataatcctttgggtatatacccagtaatggaatggctgggtcaaatggtatttctagttctagatccttg

SEQ ID NO: 436703 - DNA, 201 bp, Homo sapiens
aattacatgaaaaagaaaaaataaattcattctgaatttttagcctggaaatgaagtcctttcttcagattaggttagcatcaaagcccctctggtggctwtcttcagaggctggcagcaggactctttttctctgactgtcgtcacttgccttttctcatacttaactctaagagcttcttttctttttccatgcagatg

SEQ ID NO: 436704 - DNA, 201 bp, Homo sapiens
aagtctttgctattgtgaatagtgccgcaataaatatacatgtgcatgtgtctttatagcagcatgatttataatcctttgggtatatacccagtaatggratggctgggtcaaatggtatttctagttctagatccttgaggaattgccacaccgtcttccacaatggttgaactagtttacagtcccaccaacagtgta

SEQ ID NO: 436705 - DNA, 201 bp, Homo sapiens
tctatgggactattaggtcatttcactagccacatgtacccactgagcatctgaaatatggctggtctcagttgatatgtgcagtaactataaaacacacwttagattttgaggcatggtatgatggaaagaatgtatctcactaataattttttatattgataacatgttgaaacagtaatattttggatgtattgggtt

SEQ ID NO: 436706 - DNA, 201 bp, Homo sapiens
acaatggttgaactagtttacagtcccaccaacagtgtaaaagtgttcctatttctccacatcctctccagcacctgttgtttcctgactttttaatgatygccattctaactggtgtgagatggtatctcattgtggttttgatttgcattcctctgatggccagtgatgatgagcactttttcatgtgtctgttggctg

SEQ ID NO: 436707 - DNA, 201 bp, Homo sapiens
gtcttgaatggtattacctaggttttcttctagggtttttatggttttaggtctaacatgtaagtctttaatccatcttgaattaatttttgtgtaaggtrtaaggaagggatccagtttcagctttctacatatggctagccacttttcccagcaccatttattaaatagggaattctttctccatttcttgtttttgtc

SEQ ID NO: 436708 - DNA, 201 bp, Homo sapiens
actagcggtcccacttatctctgcctttccaagattctaaaactctaggacgaacattttttctagactcgatgcttttcagcttccttttcggagagaamccttaaccaccgggatcacttttcagggtcagcttcctcgcaacgtcgccccactgcaggatggcctctctcgctgaccccccacctacgacctagggga

SEQ ID NO: 436709 - DNA, 201 bp, Homo sapiens
cccacactgtccctgaagaaagtatggagatgtcttgggacagctgtatgtgtctgttaaggtcatccaagaatgtaagacatatgggtaacagttccaascagaacttgaaaaaagctttgttgagataagcagttagaacaagaggtgtcacaaagttcaatgacaacagtaaagtgtttttatgtcaattttctttcc

SEQ ID NO: 436710 - DNA, 201 bp, Homo sapiens
ctcagtttcttactaaatcatttcaatcctgtcaatggagatgagcatgactagcataattgaaagaggcatttgtttaggttccatgttcatatctcacwgcaagcatatctaataatttggtaactcaaattattcaaattaggtaagtggccatggtgtaatttcctcacttagaagaaaactgaaaaattactcagc

SEQ ID NO: 436711 - DNA, 201 bp, Homo sapiens
cgtcatttacattaggtatatctcctaatgctatctcttccccctccccccaacccacgacaggtcatggtgtgtgatgttccccaccctgtgtccatgtrttctcattgttcagttcccacctatgagtgagaacatgcagggtttggttttctgtccttgcaatagtttgctgagaatgatggtttccagcttcatcca

SEQ ID NO: 436712 - DNA, 201 bp, Homo sapiens
ctgttctaacacatcagtgtcaagccattcgatgaccaattatggcacatatatgacccttttatcttgatataacactcttgcaggcttatttcatacaygtagtcactgcacctacaagaaacgtataacagaatgaatgacccaaagccaacaactgtggggaaaagtgaattagacaacatctctctcatatttctc

SEQ ID NO: 436713 - DNA, 201 bp, Homo sapiens
actcgtcatttacattaggtatatctcctaatgctatctcttccccctccccccaacccacgacaggtcatggtgtgtgatgttccccaccctgtgtccakgtgttctcattgttcagttcccacctatgagtgagaacatgcagggtttggttttctgtccttgcaatagtttgctgagaatgatggtttccagcttcat

SEQ ID NO: 436714 - DNA, 201 bp, Homo sapiens
aagtagctgggactacaggcacacatcaccgtgccctgataattattttgtattttttgtagagacaaggtttcgccatattgcccaggctgaatgatatytattttgatcctcaagttgttcctgatttggacaatgggaatcccttcagagaccttttgacaggtcctcatcattttttaggcactccttcacacaaga

SEQ ID NO: 436715 - DNA, 201 bp, Homo sapiens
cagatagattcccttgagcctcggagtatgagaccagcctgggccacatggaaaaaccccatctctgaaaaaaaaatacaaaaaaaaaatttagcaggttrtggtggcatgcacctgtagtctcagctacctgggaagctgatgtgggaggatcacttgagtcccagagactgaggctgcagggagctgtgattgcaccac

SEQ ID NO: 436716 - DNA, 201 bp, Homo sapiens
agagccttcttactgcatcacagcatggtggagggtatcacatggcaagaggacaagagcataccagctcaagtctttcttcctcttcttatgaagccackggtctaccatgggagccctaccctgatgaccttatctaatcctaattacccctaaaggccctcaccacctccaaatatactaacatatgaaatgtggggg

SEQ ID NO: 436717 - DNA, 201 bp, Homo sapiens
cttgtcacaggcttcagtgcccatagagcccaccggtcacgtaaatgagagacttgggccaggcatgagaaaattgggagtgagggggatgccgttctacrgaggatgttctttctttaaggctactcagctccagccaattgttcctgtgtgagaatgtgaactcagtgttgccagatcttcttgagttttcaagagtag

SEQ ID NO: 436718 - DNA, 201 bp, Homo sapiens
aacatcattggttccaacgtggcttggctttgcctcattatgccacctgatttccttagagaactacacttacccttctcttactcacatggattgggtgaagtctcaagtctcagatatgctcattagcatttttcatcctctctggcaactcacatcaggtcaatgagattagtagtggaagtttatgaaacaactgga

SEQ ID NO: 436719 - DNA, 201 bp, Homo sapiens
ctattgtaggaagagttctccttgagcgtgcttattattcttcagggaattgagacaagtttggggaaacaaggttggttttatcagggcatccaggtgawcaacaacccaactgaatagaccaagtgtgtggaaggctcaaggaccaagctaaagagctgtggcatttacagaattaggatgtaaggtgagtttagggac

SEQ ID NO: 436720 - DNA, 201 bp, Homo sapiens
tattattaaaatcaatttcacttgtctgtttacattatttaatatggcttccagaaaactaaaaattatatgtgtagcctgcagtgtaattctactggacrgtgttattttagaatcctgatttttgtctgtgaaataggttgacaaattgatgtatgggatctttcttcagagatcactcctggatatgaccccatcgtc

SEQ ID NO: 436721 - DNA, 201 bp, Homo sapiens
tcacaatgcctttcacagaattatacacaatagccaaaaagtgaaaacaactcagatgttcatctaccgataagcagaggactaagatgtggtatatccawatggaatattatctgccaagaagcagcaatgaagtactgatacatgccacaacatggatgaatcttaaaaacattatgagaagtgaaaaaagcccatcac

SEQ ID NO: 436722 - DNA, 201 bp, Homo sapiens
catattgctgctttgccccagctgttggctccaaatgagactgcacttcatgcatctatcacaggagtttcctctaccctctctggtgccagcactttctrcctcaacgaggacccctctctgttgctagccgggtaagcctccgcttaagaaagagaatggggcagtttctctgtgcctcagctaacctccctggtctca

SEQ ID NO: 436723 - DNA, 201 bp, Homo sapiens
catcaaaatactgatatcagaatatataaagaactacaaattaataataaaaaagacaaaactaaaaaagatcaggcaaaaggcttgaagagatacttgayataaaaaatatataaacactcaataagtgcatgaaaaggtgcttaacattaacagtaatcaagaaaatgcaattaaaaccatgatatagtaccacttcac

SEQ ID NO: 436724 - DNA, 201 bp, Homo sapiens
atacatatgtaactaacctgcacaatgtgcacatgtaccctaaaacttaaagtataataaaaaattaaaaaaaaaacaaactctcaaacaacaagatttgrtgactttccaggtgggtgaacacatggaggtgatgggagggtgggcacctggagaaggtgtggaaactccacactcctcaccttgaactccagaccttgc

SEQ ID NO: 436725 - DNA, 201 bp, Homo sapiens
taatgtgatagctataaaacagtattgtgtaatgttttttaaaatgcccttctctgataaatgtaaacaccaggtaacacatttacacatcctcaggttastgagatgactttgcaaactgggaccaaagtatgctgatgcacaggctttctggggcattctacagcctggccttgtggtcaaaggcaccattctctacct

SEQ ID NO: 436726 - DNA, 201 bp, Homo sapiens; identical to SEQ ID NO: 384235

SEQ ID NO: 436727 - DNA, 201 bp, Homo sapiens
ttttaccctctgggaaggctcattgaccagtgagagagacagactcttttttgttgttgttgtcgttgttgttgttacaggacttttagattttttttttaaaatagtattagtagtttctgtgttttcttttctttttttttaattattatactttaagttccagggtacatgtgcacaacgtgcaggtttgctacatat

SEQ ID NO: 436728 - DNA, 201 bp, Homo sapiens
ttttctagtttatttgcgtagaggtgtttatagtattccctgatggtagtttgtatttctgtgggatcagtggtgatatcccctttatcattttttattgkgtctatttgattcttctctcacttcttctttagtcttgatagcagtcttgatagtcttgctaatggtctatcaattttgttgatcttttcaaaaaaccag

SEQ ID NO: 436729 - DNA, 201 bp, Homo sapiens
ggattttatttctccttcacttatgaagctttgtttggctggatgtgaaattctgagttgaaaattcttttctttaagaatgttgaatattggcccccactctcttctggcttgtagagtttctgctgagagatccactattagtctgatgggcttcccattgtgggtaacccaacctttctttctggctgcccttaacat

SEQ ID NO: 436730 - DNA, 201 bp, Homo sapiens
ccagcaccatttattaaatagggaattctttctccatttcttgtttttgtcaggtttgtcaaagatcagatggttgtagatgtgtagtgttatttctgagrgctctgttctgttccattggtctatatctctgttttggcaacagtatcatgctgttttggttactgtagccttgtagtacagtttgaagtcaggtagcgt

SEQ ID NO: 436731 - DNA, 201 bp, Homo sapiens
gacgtatagatggggttttgatgtggatgtcctttttgtttgttagttttccttctaacagtcaggaccctcagctgcaggtctgttggagtttgctggasgtccactccagaccctgtttgcctgggtatcaccagcggaggctgcagaacagcaaatattgcagaatggcaaattttgctgcctgatccttcctctgga

SEQ ID NO: 436732 - DNA, 201 bp, Homo sapiens
ctgttctgttccattggtctatatctctgttttggcaacagtatcatgctgttttggttactgtagccttgtagtacagtttgaagtcaggtagcgtgatrcctccagctttgttcttttggcttaggattgtcttgggaatgcgggctctttttggttccatatgaactttaaagtagttttttccaactctgtgaagaa

SEQ ID NO: 436733 - DNA, 201 bp, Homo sapiens
gaggatcacctgagcttgggaagttgacactgcagtgagctgagatcaagcccctccactccagcctgggtgacagagtgagaacctgtctcaaaaaaagaaaaaaaaatcaagaaacgcaagccactggtttccacagcaagtcttgaccatagctccacaccacaagggggtgctgtgggattctgaatgagtcacatc

SEQ ID NO: 436734 - DNA, 201 bp, Homo sapiens
tgatttttgcacattgattttgtatcctgagactttgctgaagttgcttatcagcttaaggagattttgggctgagatgatggggttttctagatatacavtcatgtcatctgcaaacagggacaatttgacttcctcttttcctaagtgaataccctttatttccttctcctgcctgattgccctggccagaacttccaa

SEQ ID NO: 436735 - DNA, 201 bp, Homo sapiens
tatctaactgctctcttcactttataaaatcatgcttgggacctcagagatcatttagtcatcttagaggtgaggacatgtattatatatatgtagatatrtactttatattatttatatatttattctcctgctttttccacttaatatcataacatgacgatttctctttacttctttttttgtggctccatttggtaa

SEQ ID NO: 436736 - DNA, 201 bp, Homo sapiens
gatgtctattaggtccgcttggtgcagagctgagttcaattcctggatatccttgttaactttctgtctcattgatctgtctaatgttgacagtggggtgktaaagtctcccatctttattgtgtgggagtctaagtctctttgtaggtctctaaggacttgctttatgaatctgggtgctcctgtattgggtgcatatat

SEQ ID NO: 436737 - DNA, 201 bp, Homo sapiens
tcttagaggtgaggacatgtattatatatatgtagatatatactttatattatttatatatttattctcctgctttttccacttaatatcataacatgacratttctctttacttctttttttgtggctccatttggtaagctttgtaaaaagaacttgtatttggggccgggtgtggtggctcacacctgtaatcccagc

SEQ ID NO: 436738 - DNA, 201 bp, Homo sapiens
gaagaggctctctgatttttagaattttccgcttttgtgctctagtttctccccatttttctggttttatctacctttggtctttgatgatggtgacgtayagatggggttttgatgtggatgtcctttttgtttgttagttttccttctaacagtcaggaccctcagctgcaggtctgttggagtttgctggaggtccac

SEQ ID NO: 436739 - DNA, 201 bp, Homo sapiens
ctgcatttgatgatttgttaacgagggtgaggactggctccactcagacaaacctcagtttcttactaaatcatttcaatcctgtcaatggagatgagcaygactagcataattgaaagaggcatttgtttaggttccatgttcatatctcactgcaagcatatctaataatttggtaactcaaattattcaaattaggta

SEQ ID NO: 436740 - DNA, 201 bp, Homo sapiens
ttagttttccttctaacagtcaggaccctcagctgcaggtctgttggagtttgctggaggtccactccagaccctgtttgcctgggtatcaccagcggagrctgcagaacagcaaatattgcagaatggcaaattttgctgcctgatccttcctctggaagcttggtctcagaggggcatgtagccatatgaggtgtcagt

SEQ ID NO: 436741 - DNA, 201 bp, Homo sapiens
ctctgtcattcagagagcaaaagcagcagggtgggcagagaatgccctaaaacaaaggtcacacactgcgggatatattcttttttgaaattaacacaaaracagggttgagggtaagaaggaaacacaagtggccctcattgattaagagcacagtggaactgaagggtgagtggatatgagcaacttgtaggaaaactc

SEQ ID NO: 436742 - DNA, 201 bp, Homo sapiens
ctaagactggtggaaaaacacagtattagggtgggagtgtcccaattttccaggtaccatctgtcacggcttcccttggctaggaaagtaaattcccccamcccttgtgcttcctgggtaaggcaatgccccaccctgctttggctcatgctccgtgggctacacccactgtccaacaagccccagtgagatgaacccagt

SEQ ID NO: 436743 - DNA, 201 bp, Homo sapiens
gcactccagaaggagaaaaggggaagaaactcactgtaactgggaggtgaaagttttttgctttttgtttttttgagatggagtcttgctctatcaccagrctggagtgcagtggtgcgatcttggctcactgcaacctctgcttcccgggctcaagcaattcccctgcctcagcctccgaagcagctgggactacaggtg

SEQ ID NO: 436744 - DNA, 201 bp, Homo sapiens
taaactagaattcatagtgattttatttcaatgcaggaaactatgaaagtcaatcaaacatggattcacaagtctttacatttaatgtataacataaagcrttattacacataatttcataactataaaaataagtttaatacattaccatattttaaaaaattactttaaaaacatatactccaaagtcttctatttcat

SEQ ID NO: 436745 - DNA, 201 bp, Homo sapiens
gcagtggtgcgatcttggctcactgcaacctctgcttcccgggctcaagcaattcccctgcctcagcctccgaagcagctgggactacaggtgcccgccamcatgcccagctaattttttgtattttagcagagatggggtttcaccatgttggccatgatggtcttgatctcctgacctcgtgatccgcccacctcgggc

SEQ ID NO: 436746 - DNA, 201 bp, Homo sapiens
tcagttatatagtgtgacattcaagtacttaaactacattgttcaaacaaaacatgtctctagtgtatgggcctaaagggatttaactttctaggtgccaytgattctttcactgtgcaaggtaaagaactggaagagggttccctgagagttaattcaccttaggtagctcaagtagtggtttactgtccatactttatc

SEQ ID NO: 436747 - DNA, 201 bp, Homo sapiens
atattttgggaggccaaggaaggtggatcatttaaggtcagaagttcaagaccagcctggccaacatgatgaaaccctatatctactaaaaatacaaaaaktagctgggcgtggtggcacatgcctgtaatcccagctacctgggaggctgaggcaggagaattgcttgaacctgggaggcagagtttggagtgagccgag

SEQ ID NO: 436748 - DNA, 201 bp, Homo sapiens
gaaaggaaaaaaaaatgtataacagagggcatctccctactggaggtgagtactcactgggagtgagatcatgcagtgaagtggctgagaacacaggacayaggggttaggctgatgtgacaaagaggtcctgacaagctacttgtggctcagcaagacctcagagaagagcatccttcaccttggccctgagtggccttt

SEQ ID NO: 436749 - DNA, 201 bp, Homo sapiens
cggttcctggtgaggctgctcgggagtaaggactctggtatacgcctcattttgaagaggagagtgaatactcaattctacagtcttaaccacagttcaayacttaatgttttcatccttcttaatagtctataagcccttctatggcactcatttgcaagagggactgggcaagtgaggaaaacaggctcaggtgcatta

SEQ ID NO: 436750 - DNA, 201 bp, Homo sapiens
ggtgcctcccatttaggcccacttgaggaggcagtctgtctgttctcagatctcaaactttgtgctgggagaaccactactctcttcaaagctgtcagacrgggacgtttaagtctgcagaagtttctgctgccttttgttcagctatgccctgcccccagagttggagtctacagaggcaggcaggcctccttgagctgt

SEQ ID NO: 436751 - DNA, 201 bp, Homo sapiens
gaaacacacataaatcaggcccattccccaggtcagagccaagcataatacccatataagatcagagctagggccagaactggaaaggtggtaacacctgygcatgaaaggactggtgatccttggcagccctatatgggaagatcagctaggaagtgaaagctggccaacagcacaattctgtgctagcaggagggggcc

SEQ ID NO: 436752 - DNA, 201 bp, Homo sapiens
tgtggatgtcctttttgtttgttagttttccttctaacagtcaggaccctcagctgcaggtctgttggagtttgctggaggtccactccagaccctgtttkcctgggtatcaccagcggaggctgcagaacagcaaatattgcagaatggcaaattttgctgcctgatccttcctctggaagcttggtctcagaggggcat

SEQ ID NO: 436753 - DNA, 201 bp, Homo sapiens
attattgaccatggatccatacacacctagatcagagaccagggtgatatcaagaacatctggctctcttcccactagaatgccctcaagagagtaaatawgcttaccgagtgcaatacgtaagaggctaaaagaaccatgctgagtacacagtgcatgggaaacacacataaatcaggcccattccccaggtcagagcca

SEQ ID NO: 436754 - DNA, 201 bp, Homo sapiens
cccacccctgaatttccaggagatgagaagtgccaaggttcatgggctgtgaattgttttcccaggtccagctccaaacttaatgttcaaagaggctaaamcgtggatccatcaatgtggatcagagtccctgataggttatcttgcagaattctaggtgaatatggtagctgtattagatctgatataaggcaccaaacg

SEQ ID NO: 436755 - DNA, 201 bp, Homo sapiens
atggtgccaaattgcccttcctagaagttgtaccaatgcacacatgctgcaaagtaccaaagacttctgacttttctaaaatgcacatacaaaggaactaragcacataaacaggaagtgtgttcatctgttgtatctcgtactgtcacccaggctggagtgcagtggcgcgatcgtagctcattgcagccttaaactcct

SEQ ID NO: 436756 - DNA, 201 bp, Homo sapiens
atttaacaattggtgttgaactgttctaacacatcagtgtcaagccattcgatgaccaattatggcacatatatgacccttttatcttgatataacactcwtgcaggcttatttcatacatgtagtcactgcacctacaagaaacgtataacagaatgaatgacccaaagccaacaactgtggggaaaagtgaattagaca

SEQ ID NO: 436757 - DNA, 201 bp, Homo sapiens
agtccaggacagggtgctttcttcttggcttctgaaaaagattaaattctggttagtccttgcttccaagtgtatgtgttatcattttcacttagaaactsagaaaaatggaacagtgtcaaaggtcaacaggctttattacctcctaagcatatcatttctctgggcctgtaccattttccccatcaattatgaagaacc

SEQ ID NO: 436758 - DNA, 201 bp, Homo sapiens
aattacactcaccagtggagccaaggaagcaatctgtttatatcccaggtgagagctgggcgtgacacttataatcccagctacttgggaggctgaggttrgaggatcacttgagcccaagaatttgaatccagcctgggtaatacagtgacactcccattttaaaacaaaacaacaacaacaaataaatctcagatgaat

SEQ ID NO: 436759 - DNA, 201 bp, Homo sapiens
tcaaaccagaggtacataaagcccaggataaatatgacacatctgcctagggtaccaaagatttggggaataaaaagctaaataactgaattggtaatttaaaaaaaaaaatttacactaaaacacacagatatattattaattaggatgcaaaaaattgcatggattttttttttttaaagcatgaagcctccaagagga

SEQ ID NO: 436760 - DNA, 201 bp, Homo sapiens
gtaatcacacagcttaaaacacaaatacattgtacagttgtacaaaatattttctttatatctttattctgtgatatggttaagctttgcgttcccacccmaatctcaccttgaattgtaataatccctacgtgtcaagggcggggcgaggtagagataattgaatcatcggggcagtttcccccatactgttctcatggt

SEQ ID NO: 436761 - DNA, 201 bp, Homo sapiens
atgtatgacataatgtatatatgtagctccctatgtcttttactccttttctttctcctttcttttccatcaagtcacctttttatttttgttccaccaawtttattttattttattttattttattttattttgactaagttatttacccacctggttcaaaattcaaaaggtgtaaaaggggattcagtggaaagtctc

SEQ ID NO: 436762 - DNA, 201 bp, Homo sapiens
taatgtatatatgtagctccctatgtcttttactccttttctttctcctttcttttccatcaagtcacctttttatttttgttccaccaattttattttattttattttattttattttattttgactaagttatttacccacctggttcaaaattcaaaaggtgtaaaaggggattcagtggaaagtctcctctcacctc

SEQ ID NO: 436763 - DNA, 201 bp, Homo sapiens
aatgtatatatgtagctccctatgtcttttactccttttctttctcctttcttttccatcaagtcacctttttatttttgttccaccaattttattttattttattttattttattttattttgactaagttatttacccacctggttcaaaattcaaaaggtgtaaaaggggattcagtggaaagtctcctctcacctcg

SEQ ID NO: 436764 - DNA, 201 bp, Homo sapiens
aaatacaaaaattagctgggcgtggtggcacatgcctgtaatcccagctacctgggaggctgaggcaggagaattgcttgaacctgggaggcagagtttgsagtgagccgagatcacaccactgcactccagcctgggcgacagaagaagagcctgggtgatgcagggggactccgtctcaaaaaaaagaaaaagaaaata

SEQ ID NO: 436765 - DNA, 201 bp, Homo sapiens
cataatttcaaggttcatccatgttgtaaaatgtatcagtacttcatttctttttcttgctgaataatatgccactgtgtagatgtaacacattttattgyttcattcatcagttgctgggcactcaagttgtttccactttttgtctcttatgagtaatgctgctatgaacattcatgtataagtttttgtgtggatgtg

SEQ ID NO: 436766 - DNA, 201 bp, Homo sapiens
atgtatatatgtagctccctatgtcttttactccttttctttctcctttcttttccatcaagtcacctttttatttttgttccaccaattttattttattttattttattttattttattttgactaagttatttacccacctggttcaaaattcaaaaggtgtaaaaggggattcagtggaaagtctcctctcacctcgc

SEQ ID NO: 436767 - DNA, 201 bp, Homo sapiens
tggtggcgggcgcctctagttccagctactcgggaggctgaggcaggagaatggcatcaacccgggaggcggagcttgcagtgagctgagattgtgctacygcactccagcctgggcgacagagcaagactctgtctcaaaaaaaaaaaaaaaaaaaaaaagtaaaaataaaaggtaaaccataagcactcaaactttata

SEQ ID NO: 436768 - DNA, 201 bp, Homo sapiens
tgtatatatgtagctccctatgtcttttactccttttctttctcctttcttttccatcaagtcacctttttatttttgttccaccaattttattttattttattttattttattttattttgactaagttatttacccacctggttcaaaattcaaaaggtgtaaaaggggattcagtggaaagtctcctctcacctcgcc

SEQ ID NO: 436769 - DNA, 201 bp, Homo sapiens
tgttgaatttttaaagtatcacctttgaaagataaatacagtattttttaaaacaaaaatatttctccaggcatggtggctcacgcctgtaattccagcaytttgggaagatgaggcagatggatcgcttgagcccaggagttcgagaccaacctggccaacatggtgagaccctatctctacaaaaaatacaaaaattag

SEQ ID NO: 436770 - DNA, 201 bp, Homo sapiens
aactctcttataagtataaggggtcagacaggcaggacaccaaaattataagagctaaaattatatataatataatataatcatggcaaagcagcttgtaygttctcttgctattgtacagtttgtcattacgatgtcatgagcacctgcacaaagcagatggacctgaacattatccaacatttcctgcagggcagcccc

SEQ ID NO: 436771 - DNA, 201 bp, Homo sapiens
agtaccaaaaatacattttaaaaattacataaatattactagccataaaatgttttggtttttcttcaaacaatgagctctcctctcaccaacttgaccccaacaacaacaacaaaaaaaaccaaaaccaaaaccaaagctaccaaaaaattgttacaccaaacagactagctattcttaactaaagacatactatattca

SEQ ID NO: 436772 - DNA, 201 bp, Homo sapiens
agaaccaatgtcatgatggaggagatggggatgtacaaccatccgaaacaacttacagctctaagtttcaagctttaagactagaagggccaatttctacrtttatccaaaaacaactgtctatgggactattaggtcatttcactagccacatgtacccactgagcatctgaaatatggctggtctcagttgatatgtgc

SEQ ID NO: 436773 - DNA, 201 bp, Homo sapiens
gtaccaaaaatacattttaaaaattacataaatattactagccataaaatgttttggtttttcttcaaacaatgagctctcctctcaccaacttgaccccaacaacaacaacaaaaaaaaccaaaaccaaaaccaaagctaccaaaaaattgttacaccaaacagactagctattcttaactaaagacatactatattcaa

SEQ ID NO: 436774 - DNA, 201 bp, Homo sapiens
atatgaattttgctttttcacttaacaattttggacattattccacacccatatatggaaagcttccttgctcttcttaaatttatttttaattgcattayattttattttgggtatataccatgacttacttaaccagtactctattgagggacattcaggctagttccatttcttcttgctattacaaatcaggctgga

SEQ ID NO: 436775 - DNA, 201 bp, Homo sapiens
taccaaaaatacattttaaaaattacataaatattactagccataaaatgttttggtttttcttcaaacaatgagctctcctctcaccaacttgaccccaacaacaacaacaaaaaaaaccaaaaccaaaaccaaagctaccaaaaaattgttacaccaaacagactagctattcttaactaaagacatactatattcaaa

SEQ ID NO: 436776 - DNA, 201 bp, Homo sapiens
tcctaagccgtatggagaaggcagatgctgggtgaccttccttgtccaagctcctcccatctccaaatgcccccatgtctactcccactcaatcataaatycttttaggacagcccactgtctttcctttacactccccttctcctagtccaaaacggagtgccctgttcataagaatggttcactaagagtttaaaaagg

SEQ ID NO: 436777 - DNA, 201 bp, Homo sapiens
ggctgggatgaggtttattcaataaatgttagtgtcctttccaagtaaaaattgttttggtgccataggaaagcagacatctgaatcagggccacacaacrctttctaggatcttggaggatatagtcctattaaaaaggtgaacttcagtttcatctttatattcccttcaatcatggagatgtgggaatttaagtatgg

SEQ ID NO: 436778 - DNA, 201 bp, Homo sapiens
aacttaaaactggggagattcaagcaaggaaaaagggaggaggttgaatttgggtaaggaaacaatggtgtctactacaatcaagaggtgaatgtgtgggraggataatgaggcagatgtgggtctctagaaatctgcgtcggatgggaagaacgagggtgccaacccaagagaaatgctggagcgagagaaatgtttgtt

SEQ ID NO: 436779 - DNA, 201 bp, Homo sapiens
ttttgattctcttctgcacttatggtatatgagaagccagattataatcacatagttatttgataacacaaatatacaaagaacaaggagtgctgattttrtaatgcagtgttcagggacatgaagacttgactgtgtactcattgggccatgtttcttaaaatgaagttcaagagtccctcaaaccagaggtacataaag

SEQ ID NO: 436780 - DNA, 201 bp, Homo sapiens
acaaaggaagacttatttcctaccctccttttaagttaggttacagccaatggcatttgggtagaaacgatgttctccgtcaagactgttgatgtaaaatsttggtaaacttggaggctacctgtataagaagtcaggatcatcagggggaaggagcctggagcctaatcaccactcaaaggagagatactgtagagacct

SEQ ID NO: 436781 - DNA, 201 bp, Homo sapiens
agtgccattcccctgtgctttgtttaggacctttcctgatccacaacctttagggtaaaactccaaggcaattcatgtcctcttacctgtaaatgaaaagyatgagatcaattagaaagtgtttgctttgggtcagacagactgtgtgtgttgtgtgctttgtcctctgtcctttttagcaatgtgacttcacacaagttt

SEQ ID NO: 436782 - DNA, 201 bp, Homo sapiens
ctgaggactctgaggtatccaaaccacactttgaaaacagttggtttagaccaactttattatattttattattcttatcccctatatatctaatttttgygaattttatctgtcacaggctaaaaaaaccccatgaaaatgtcctaccttttgttgatttttgttcttttgaggtgttttgctttatgtaattgtgattg

SEQ ID NO: 436783 - DNA, 201 bp, Homo sapiens
tccccaaaccctcctaagccgtatggagaaggcagatgctgggtgaccttccttgtccaagctcctcccatctccaaatgcccccatgtctactcccactsaatcataaattcttttaggacagcccactgtctttcctttacactccccttctcctagtccaaaacggagtgccctgttcataagaatggttcactaaga

SEQ ID NO: 436784 - DNA, 201 bp, Homo sapiens
gtgtataatgtggtacatacatatccaagacaattttatcgtttatattttttttttagtggcttaaaacagtaataactggtttctttttctcacaaatstgcaatttgagcagagctcaggaggtaggaggagggcttgtctctgctccacacagcatcagctggggcagctcacctgagagttggaggatccattccc

SEQ ID NO: 436785 - DNA, 201 bp, Homo sapiens
aatatttaaagtggaatggaggcagaaatgaaaacaaccagaaaacacttacatatttatgaaaaaacacaaagtgggcagatgacattgttcaaaatgckagggttagggcaatgtaacccatgtgcctcgaagatactaacaaattcagacatccctaatgttaggtttgtcttaggatttcaacttgtggttttaaaa

SEQ ID NO: 436786 - DNA, 201 bp, Homo sapiens
tatttttcctgatcctttcccttctcctaccctctaccctctggaaggctccagtgtccactgttcctcctctatgtgtccatgtgttctcaacatttagytcccacttataagtgagaacgtgtggtatttggttttctcttcctgtgttagtttgctaaggataacgagctcaagctccattcatgttcctgcaaagga

SEQ ID NO: 436787 - DNA, 201 bp, Homo sapiens
tttgcttcatcaggcttactggtattaatctcacatggtttctagaatcatgaaagtttagtggaagagacccaggctctttctctagtaatgacatttcstgagcccagtggaacgttttcctgtgtactgggcatctctgctacatttactgccctcccttgataccaagtatgtcttctccttaccctcttgctataa

SEQ ID NO: 436788 - DNA, 201 bp, Homo sapiens
acacggcgaggaaaggcagagccagcacctaccgcggtctggcgccccagctgcctcggcggccgccggctcctcagtggcgcccgggggtgcatcgtccrttagcggcagcccgggctcctggagctccgcgaccccggtgctgtcctgaggccgcatctcgcggcacgcgctctaccagcggccggtgccgtctggcgc

SEQ ID NO: 436789 - DNA, 201 bp, Homo sapiens
ggtacataaagcccaggataaatatgacacatctgcctagggtaccaaagatttggggaataaaaagctaaataactgaattggtaatttaaaaaaaaaawtttacactaaaacacacagatatattattaattaggatgcaaaaaattgcatggattttttttttttaaagcatgaagcctccaagaggatttgagcttg

SEQ ID NO: 436790 - DNA, 201 bp, Homo sapiens
gaggctccacccccagtgtgcactcctcccagtgcggaggccagttggaggtcctcctgcgacccctttatacttggctgtctcatttggaccggaattcytggatcatatggctactctgtgattaatcttttaagaaaccaaaaggctgttttccacagctgcagcaccagtttatagtcccattatcaatgtatgagg

SEQ ID NO: 436791 - DNA, 201 bp, Homo sapiens
gattaatcttttaagaaaccaaaaggctgttttccacagctgcagcaccagtttatagtcccattatcaatgtatgagggtgccgaattctcctcatcccygtcaacacttgttattatctgaccctttcagtatagccatcttagtggaagtaaagtgatatctcatggtggatttcattttcatttcgctgatgcctga

SEQ ID NO: 436792 - DNA, 201 bp, Homo sapiens
cctttacatatgccagtccctccgctaggaaggcccatgcctccatctctgactacatattgcccattcacacctcccctggcatctaatccagtcctcarcacaaggctccggggcctgacagaccttaaagtatcccccaacctccttcatggggcattggtttctgctgccccctcccatcttcacccctgccctgcg

SEQ ID NO: 436793 - DNA, 201 bp, Homo sapiens
tcctgggatgtctggtggggatacagggcatcccctggggaccaggctccctctggggctctggggacttggggtcttttaccctgatgctcttcgatgcycctcctgggatccttgggaagatttgcctctcatccccgccaggcagtgcctggggatcagaagccttaggttctgctcttaacctctgaccccaacccg

SEQ ID NO: 436794 - DNA, 201 bp, Homo sapiens
ctgagagccaggaaccccaggccaagggggcagaggctagtgcagcctcagaagaagaggcagggccccaggctacagagccatccactccctcggggccrgagagtggccctacaccagccagcgctgagcagaatgagtagctaggtaggggcaggtgggtgatctctaagctgcaaaaactgtgctgtccttgtgagg

SEQ ID NO: 436795 - DNA, 201 bp, Homo sapiens
attctgctgggacctggatttgctgagggatcaggctcccaggcgccccctccccagcctcctgggatgtctggtggggatacagggcatcccctggggaycaggctccctctggggctctggggacttggggtcttttaccctgatgctcttcgatgcccctcctgggatccttgggaagatttgcctctcatccccgcc

SEQ ID NO: 436796 - DNA, 201 bp, Homo sapiens
tggggatacagggcatcccctggggaccaggctccctctggggctctggggacttggggtcttttaccctgatgctcttcgatgcccctcctgggatcctygggaagatttgcctctcatccccgccaggcagtgcctggggatcagaagccttaggttctgctcttaacctctgaccccaacccgtgcaagactcacaca

SEQ ID NO: 436797 - DNA, 201 bp, Homo sapiens
gcctggggatcagaagccttaggttctgctcttaacctctgaccccaacccgtgcaagactcacacaccctccgtccctctgagcccagccagctggtgcrggcagcgcctggcagcattgtgggttccctattgtggctgagacagagagcaggtcatgacatccttcccttagtggcaagctgtggagaagtcacggta

SEQ ID NO: 436798 - DNA, 201 bp, Homo sapiens
accaggatcaccaggctctctccttcacccttgaatatacagggccaaacaaagatccagacgcacgcaaccacaaatgtgcacacctgggcacacgcgcrcacacacacacagccagaaagtctcacacacacagacacagagcaatacacacagtcacacacagagagaaacagatacacgcagttgcacactggctcc

SEQ ID NO: 436799 - DNA, 201 bp, Homo sapiens
ccaggcgccccctccccagcctcctgggatgtctggtggggatacagggcatcccctggggaccaggctccctctggggctctggggacttggggtctttyaccctgatgctcttcgatgcccctcctgggatccttgggaagatttgcctctcatccccgccaggcagtgcctggggatcagaagccttaggttctgctc

SEQ ID NO: 436800 - DNA, 201 bp, Homo sapiens; identical to SEQ ID NO: 211553

SEQ ID NO: 436801 - DNA, 201 bp, Homo sapiens
cgcggacggcgcggcgccggcaggcgagggcgagggcgtgaccctgcagcggaacatcacgctactcaacggcgtggccatcatcgtgggcgccatcatcrgctcgggcatcttcgtgacgcccacgggcgtgcttaaggaggcaggctcgccggggctggcgctggtgatgtgggccgcgtgcggcgtcttctccatcgt

SEQ ID NO: 436802 - DNA, 201 bp, Homo sapiens
caggcccggccggtaagcagagcatggcgggtgcgggcccgaagcggcgggcgctagcggccccggtggccgaggagaaggaagaggcgcgggagaagatrctggcctccaagcgcgcggacggcgcggcgccggcaggcgagggcgagggcgtgaccctgcagcggaacatcacgctactcaacggcgtggccatcatcg

SEQ ID NO: 436803 - DNA, 201 bp, Homo sapiens; identical to SEQ ID NO: 211587

SEQ ID NO: 436804 - DNA, 201 bp, Homo sapiens
gttggccccgctgagcaatactcccagcctcttgcgtggcacccacgtggagtaactgagcaaccggtttattgttaaagctccgattgctgactggttgktgaaaacgaaattgcagttgaaaagaaaattattcatttctgctctccacaccagctcgtcaggaatcagtgacacgggctgactcataagaaaacagta

SEQ ID NO: 436805 - DNA, 201 bp, Homo sapiens
ccgctgagcaatactcccagcctcttgcgtggcacccacgtggagtaactgagcaaccggtttattgttaaagctccgattgctgactggttgttgaaaasgaaattgcagttgaaaagaaaattattcatttctgctctccacaccagctcgtcaggaatcagtgacacgggctgactcataagaaaacagtagtaataa

SEQ ID NO: 436806 - DNA, 201 bp, Homo sapiens
gcgagcggcgcgcacaatcctcgctcggctgcggctctcgggtgtcccaggcccggccggtaagcagagcatggcgggtgcgggcccgaagcggcgggcgytagcggccccggtggccgaggagaaggaagaggcgcgggagaagatgctggcctccaagcgcgcggacggcgcggcgccggcaggcgagggcgagggcgt

SEQ ID NO: 436807 - DNA, 201 bp, Homo sapiens; identical to SEQ ID NO: 211550

SEQ ID NO: 436808 - DNA, 201 bp, Homo sapiens; identical to SEQ ID NO: 211551

SEQ ID NO: 436809 - DNA, 201 bp, Homo sapiens
ggctcccacatctctacatttttgcgttcctggaccgtcccggcagttctaggctaaggtcattggtcccagaaaccaagtgcgtttctttcattcattcktttacacttctccccacaggctgggaatatcttcagtgacgggacagcagggtccctgccctgcccttcggtgggcatttcattcccccacttaagcggt

SEQ ID NO: 436810 - DNA, 201 bp, Homo sapiens
tttgaaatgtatctttttaggtaagcttgaagttgtttactccagaccccttcactaaattgggatgcaacctcaagtgttttttgttcttttttcatctwtatgaaaattcagtgaacaaagattcttactggtaacttacttgcaaaactgtattctccttagtaaccccagtttatgctttaactccttcagtttgta

SEQ ID NO: 436811 - DNA, 201 bp, Homo sapiens
tctaaccagcagcagttatttctgtgccatatcaaaacttgaacatcagtgtttataattaaaagctttcagttgctgtatcaaggatgttgtaaacactmtagagtagataagtttccggagaaggagaaccccctagcggcctactctgtagtgagcaccttctgtaaaatactgtataaggaaaggaaattttgtttt

SEQ ID NO: 436812 - DNA, 201 bp, Homo sapiens
actgtgactggatcaaaagggatgacacttggggaggagcaatagagatatcgattttgtccaagttttaccaatgtgaaatatgtgtagtggatacacasacagtaagaattgatcgttttggggaagatgcaggatataccaaaagggttctgcttatttatgatggcatccactatgatccacttcagcgtaacttcc

SEQ ID NO: 436813 - DNA, 201 bp, Homo sapiens
cccggctggtcttgagctcctgaccttgtgatcagcctgccttagtctcccaaagtgctgagattacaggtgtgaaccactgtgcctggccctcagcatgygtttgatttagccaaagaatcaaagcattggtgaagaattgaagattggaagttacacattttttgctaagggaagtaatagagaaagaaaaatattcct

SEQ ID NO: 436814 - DNA, 201 bp, Homo sapiens
agatggggtttcaccatgttggcccggctggtcttgagctcctgaccttgtgatcagcctgccttagtctcccaaagtgctgagattacaggtgtgaaccmctgtgcctggccctcagcatgcgtttgatttagccaaagaatcaaagcattggtgaagaattgaagattggaagttacacattttttgctaagggaagta

SEQ ID NO: 436815 - DNA, 201 bp, Homo sapiens
gctggctaatttttgtatttttagaagagatggggtttcaccatgttggcccggctggtcttgagctcctgaccttgtgatcagcctgccttagtctcccraagtgctgagattacaggtgtgaaccactgtgcctggccctcagcatgcgtttgatttagccaaagaatcaaagcattggtgaagaattgaagattggaa

SEQ ID NO: 436816 - DNA, 201 bp, Homo sapiens
ctcttgcctcagcctcccagtacctgggattacaggtgcacaccaccatgctggctaatttttgtatttttagaagagatggggtttcaccatgttggccyggctggtcttgagctcctgaccttgtgatcagcctgccttagtctcccaaagtgctgagattacaggtgtgaaccactgtgcctggccctcagcatgcgt

SEQ ID NO: 436817 - DNA, 201 bp, Homo sapiens
aatttaacaggataatagtgaataagataaattacacttcagattcttaatggattgatgtgcaaaagtatgttagggaagatgggggtgggagaagagtrcctttcaaatttctgcacacagtaatacaatagggaactgggccattgtagccattactgctagggattagtcatctagtaacaacctctggggctcagt

SEQ ID NO: 436818 - DNA, 201 bp, Homo sapiens
cttcagctctcacagtaccttggggcaattagtgaaggtcagtcagtgtgcccaatagattttgtgtggattatggcatggaaagtggttgagaaattctrtagtagggtaagaaaataatccttgtccaggagtcctgcagtggagaagacaaaactcagtgcttaactcataggttaagcatgttttttctttcttttt

SEQ ID NO: 436819 - DNA, 201 bp, Homo sapiens
tacatgatcttgccccctactacctgtctcactgtgcttcctgctattctgctcttactcctctgtataaacactgagctcatggcgtttcctttaacatkccaggcatgcttgaccctgtcctgtctctgggccttgctgttccctctgcctggaacattcttcccctagtgtctgcatggctcactgtctcactgcttt

SEQ ID NO: 436820 - DNA, 201 bp, Homo sapiens
cttggttttcatttttgctgtgtgtcactgcctgccagctgctaatttattaactcccagtggatcatgtgtcctgtgaagggactgcatgagattttagkggcaaattatgttgatgatttgtattttaaataaatagtttgaataaatagaacattaagcttgtatacattttgaaaatagtattttaatattttactg

SEQ ID NO: 436821 - DNA, 201 bp, Homo sapiens
gcaactgtatatctcttacgtcttttttttttttttttaaagaagattagactctgatttattgaggcatctgttaagtggctagctgtttgtttgtttgyttgagatggagttttgctttgttgcccctgctggagtgcagtggtgtgatctcaattcattgcaccctccacctcccaggttcaagcacttctccctgcc

SEQ ID NO: 436822 - DNA, 201 bp, Homo sapiens
tcagcctcctgggtagctgggattacaggcgcacgccaccatgcccagctaatttttgtatttttagtagagacagggtttcaccatgttggccaggctgrtctcgaactcctgacctcaggtaatctgcccacctcgtcctccccaagtgctgcgattacaggtgtgagccaccatgcctggccaagtttccttactctt

SEQ ID NO: 436823 - DNA, 201 bp, Homo sapiens
cacaagcatagtctcctgaattgctttggttttgttcagctgaagccttggggagcactgaagccaaggttctactgtaccaaaaatttgaaggccatgcraatgatctgtatgcggaaggactaccagaaaacattcctttcagaagtccctcgtggtatggaatcccaaggctggaaaacatcattcaagtgggcaatc

SEQ ID NO: 436824 - DNA, 201 bp, Homo sapiens
taatctgcagaaacaaattcagtgtcttccctaaggagagattaattcgatgaggaagggccttttgttcccctctcattatgacttccttatatttacarttaacatttagattcacttattgaacaaacatgtatttagtataagtatcagatgtgcaaaattgggtctagcaagaaccctgtccttgggaggcttaat

SEQ ID NO: 436825 - DNA, 201 bp, Homo sapiens
gattgaggttgtgcatctgtgtatattcattgggactgagttgtatatggagaggaaaggtttaagatgatacagcaagctgcttctggctctgctgtgasacagttcatctaagattcagaaacagaattgagctggtttgggggaaaagtgactcttgcatatttatcttaaaaaaagatgactttggagacatccagc

SEQ ID NO: 436826 - DNA, 201 bp, Homo sapiens
tttaagatgatacagcaagctgcttctggctctgctgtgagacagttcatctaagattcagaaacagaattgagctggtttgggggaaaagtgactcttgyatatttatcttaaaaaaagatgactttggagacatccagctggtctcacctgaatatctgaaaattgctattttcaaaattcaagtcaccaaaatgatta

SEQ ID NO: 436827 - DNA, 201 bp, Homo sapiens
tgctttggattgtactaaaatctgatttcaacacaagcatagtctcctgaattgctttggttttgttcagctgaagccttggggagcactgaagccaaggytctactgtaccaaaaatttgaaggccatgcgaatgatctgtatgcggaaggactaccagaaaacattcctttcagaagtccctcgtggtatggaatccca

SEQ ID NO: 436828 - DNA, 201 bp, Homo sapiens
atttaaaaaaattgacctgcaccttgctttggattgtactaaaatctgatttcaacacaagcatagtctcctgaattgctttggttttgttcagctgaagscttggggagcactgaagccaaggttctactgtaccaaaaatttgaaggccatgcgaatgatctgtatgcggaaggactaccagaaaacattcctttcaga

SEQ ID NO: 436829 - DNA, 201 bp, Homo sapiens
tgtatttatggtccagaacttcttactcacaatacaactgtagttactcagccaagaacaaatacaacaggtaaaatagttgtgaaatcctttttaaaagyacagattaatcttgaagcttttaaaaattaatcttttaaaatgatggaactgctccttccttcacctccccaaaaaatcttttgcagaagctcaatacag

SEQ ID NO: 436830 - DNA, 201 bp, Homo sapiens
accaccgtgcccagcctattttctttgttagagctctttattagagctttctttctttcccatctttttgtttgccattgtgcactgtcagagtaagtgaycacaatttgtagattatctaccaccttaggaatttaagttgccaagaaccaataactagccatttagtatgaaggtttttattgtcaggaaataagtgtt

SEQ ID NO: 436831 - DNA, 201 bp, Homo sapiens
tacagagtctcactctgtcacccaggctggagtgcagtggtgtgatctcggctcactgcaaccaggctcaagcaattctccttcctcagcctcctgagtasctgggattacaggcgtgcgccaccatgcctggctaagttttgtattttgtgtagagacaaggtttcaccattttggccaggctggtctcaaactcctagg

SEQ ID NO: 436832 - DNA, 201 bp, Homo sapiens
tttctttcttcctttttttgatacagagtctcactctgtcacccaggctggagtgcagtggtgtgatctcggctcactgcaaccaggctcaagcaattctycttcctcagcctcctgagtagctgggattacaggcgtgcgccaccatgcctggctaagttttgtattttgtgtagagacaaggtttcaccattttggcca

SEQ ID NO: 436833 - DNA, 201 bp, Homo sapiens
catatgcagtgtagggataactgaagctttttttctttcttcctttttttgatacagagtctcactctgtcacccaggctggagtgcagtggtgtgatctyggctcactgcaaccaggctcaagcaattctccttcctcagcctcctgagtagctgggattacaggcgtgcgccaccatgcctggctaagttttgtatttt

SEQ ID NO: 436834 - DNA, 201 bp, Homo sapiens
ggtggatcacctgaggtgaggagttcgagaccagccttgccaacattgcaaaaccccgtgtctactaaaaatacaaaaattagccaggtgtggtggcgtgyacttgtggttccagctactcgggaggctgaggcaggataattgcttgaacctgggaggcggaagttgcagtgagtcgagatcgcaccactgtactccagc

SEQ ID NO: 436835 - DNA, 201 bp, Homo sapiens
cagcaagctgcttctggctctgctgtgagacagttcatctaagattcagaaacagaattgagctggtttgggggaaaagtgactcttgcatatttatcttwaaaaaagatgactttggagacatccagctggtctcacctgaatatctgaaaattgctattttcaaaattcaagtcaccaaaatgattattttcactataa

SEQ ID NO: 436836 - DNA, 201 bp, Homo sapiens
aaggtttaagatgatacagcaagctgcttctggctctgctgtgagacagttcatctaagattcagaaacagaattgagctggtttgggggaaaagtgactyttgcatatttatcttaaaaaaagatgactttggagacatccagctggtctcacctgaatatctgaaaattgctattttcaaaattcaagtcaccaaaatg

SEQ ID NO: 436837 - DNA, 201 bp, Homo sapiens
gaggttgtgcatctgtgtatattcattgggactgagttgtatatggagaggaaaggtttaagatgatacagcaagctgcttctggctctgctgtgagacasttcatctaagattcagaaacagaattgagctggtttgggggaaaagtgactcttgcatatttatcttaaaaaaagatgactttggagacatccagctggt

SEQ ID NO: 436838 - DNA, 201 bp, Homo sapiens
tgaggttgtgcatctgtgtatattcattgggactgagttgtatatggagaggaaaggtttaagatgatacagcaagctgcttctggctctgctgtgagacmgttcatctaagattcagaaacagaattgagctggtttgggggaaaagtgactcttgcatatttatcttaaaaaaagatgactttggagacatccagctgg

SEQ ID NO: 436839 - DNA, 201 bp, Homo sapiens
cagaaggcctctctctactcatgaaaggaatgttgaagtgggttgagtcttgcttactgattgaggttgtgcatctgtgtatattcattgggactgagttrtatatggagaggaaaggtttaagatgatacagcaagctgcttctggctctgctgtgagacagttcatctaagattcagaaacagaattgagctggtttgg

SEQ ID NO: 436840 - DNA, 201 bp, Homo sapiens
agcatgttttttctttctttttttttgtttgagacagagtcttgctttgttgcccaggctggagtgcagtggcatgattttggctcactgtaaccttcacytcctgggttcaagcagttctcttgcctcagcctcccagtacctgggattacaggtgcacaccaccatgctggctaatttttgtatttttagaagagatgg

SEQ ID NO: 436841 - DNA, 201 bp, Homo sapiens
ttcggtcatctcttcttagaacacagaggtcattttgactgataacataactctccttttgattgaaagtgttaacatgggccgggcacgatggctcatgmctgtaatcccagcactttgggaggctgaggcagatggatcacttgaggtcaggagattgagaccatcctggctaacatggtgaaacctcatctctactaa

SEQ ID NO: 436842 - DNA, 201 bp, Homo sapiens
tctacattaagttccatgatgcccgatgagtagtcccacatttccacagtagacatgctgttgctgcctccttccttatcatgaaaagagcagaagatgcygataatacatgaagcaggaagacaaaggggagacactgaacttgtcacctacctttggatgcccctcatgcctcatgtttcccattgagcctcacttatc

SEQ ID NO: 436843 - DNA, 201 bp, Homo sapiens
gggagttcaactctggtaagttctcagcgaaatccacgaccttttccttcatcttctggactctcaatgtgactgatgaaagttagaacatgttctgcagrgggaaatgctttagcattactacattataatctcatctttgtaaagccaggagcattttgaaagtcacattacagacagtgtttaaacatagtttgaatt

SEQ ID NO: 436844 - DNA, 201 bp, Homo sapiens
caccatagcctagttaatgatgtttaatagctcatcaccacgaatcattgtgcacactcgctataccagaggctctaaactacccaattttttttttttttagattgagttttgctctattgcccaagctggagtacagtggcacaatctccgctcactgcaacctctgcctcctgggttcaagggattctcatgcctcaa

SEQ ID NO: 436845 - DNA, 201 bp, Homo sapiens
ccttatggacattccttggcacctggtcacattatggatgtctcaccatctgctgggtattgatttttcttttttttctttttctttttttttttttttttaagacagagtttcactcttgttgcttaggctggagtgcaatggcgcaatcttggctcaccgcaacctccacctcctggattcaagtgattctcctgcctc

SEQ ID NO: 436846 - DNA, 201 bp, Homo sapiens
aaatgagattattcttcttcattcttagaatgccagttggttttattcgttgataaattcccagttagtcatactcacaagcgcaacattgttgatgggtstgacatcccttcgtaacttaagaatcattagtatgactgccctatggaggcatactgctctatctcaggtttatttcaataataaaacctttggaagttt

SEQ ID NO: 436847 - DNA, 201 bp, Homo sapiens
cacagcacttcatatgctacttaaaatgagattattcttcttcattcttagaatgccagttggttttattcgttgataaattcccagttagtcatactcayaagcgcaacattgttgatgggtctgacatcccttcgtaacttaagaatcattagtatgactgccctatggaggcatactgctctatctcaggtttatttc

SEQ ID NO: 436848 - DNA, 201 bp, Homo sapiens
accaccatgccccgctaatttttctattttttaagtagagatggggttttaccatgttggccaggttggtctcgaacccctgacctcaggtgatctgcctrcctcagcttcccaaagtgctggaattacaggcatgagccactgtgcccagccaataacagatattttttgagcccctgccaagtgccaggcacagatcta

SEQ ID NO: 436849 - DNA, 201 bp, Homo sapiens
ttgagtgttggggataggaacagaaggcctctctctactcatgaaaggaatgttgaagtgggttgagtcttgcttactgattgaggttgtgcatctgtgtrtattcattgggactgagttgtatatggagaggaaaggtttaagatgatacagcaagctgcttctggctctgctgtgagacagttcatctaagattcagaa

SEQ ID NO: 436850 - DNA, 201 bp, Homo sapiens
gtgatcttggcttaccgcaacctctgcctcccggattcaagtgattctccttcctcagcctcccgagtagctgggaatacaggtgtgtaccaccatgcccsgctaatttttctattttttaagtagagatggggttttaccatgttggccaggttggtctcgaacccctgacctcaggtgatctgcctgcctcagcttccc

SEQ ID NO: 436851 - DNA, 201 bp, Homo sapiens
aagaatgtgcaagtgccatagaagacactgcaaggattgggtgctggagcagtgctggacctgccatcatcaccagagtgcagcagagagaatctcctccyttgccatcactaacccagcacttgactttgtcccactcctaaaagatcttggaaggaattaaaggtgcttggtggtttctcattccagcataaccttact

SEQ ID NO: 436852 - DNA, 201 bp, Homo sapiens
tgtgtctccatttaaattcagattttttgatgaatggtcagaccagctgcaggccctttgggccggaagtcttgatctcgccaactgttcatattcttttytcttttctttccttttctttcctttgcttttctttctttctttctttcctttctttttttttagatggagttttactcttgttgcccatgctggagtgta

SEQ ID NO: 436853 - DNA, 201 bp, Homo sapiens
attattgaatcagtcaatgtcctctgtaggagggacttctcacaccagtggtgcatatctgtatgttagctggtgtagggagggacatggtcagaatggcyctgtctgtgtggaatagttttgcttagcataatcccagcaggctcctattggggttaagccacagttttagccttattagtatcactctttaatcataaa

SEQ ID NO: 436854 - DNA, 201 bp, Homo sapiens
ttgatgtctgactcccccactcttcttcactaaaacgtaagctccataaggaaagggattttgtctgttttgttctgttgtatccctaaatacctagaagrtgctcagtaaatatttcttggttgaatgactaaatcagcctattattgaatcagtcaatgtcctctgtaggagggacttctcacaccagtggtgcatatc

SEQ ID NO: 436855 - DNA, 201 bp, Homo sapiens
ataggaacagaaggcctctctctactcatgaaaggaatgttgaagtgggttgagtcttgcttactgattgaggttgtgcatctgtgtatattcattgggamtgagttgtatatggagaggaaaggtttaagatgatacagcaagctgcttctggctctgctgtgagacagttcatctaagattcagaaacagaattgagct

SEQ ID NO: 436856 - DNA, 201 bp, Homo sapiens
tcatagcagttccctcttaaaataatttggatctgccctttagaaaggttattctggcttaattttgaagggtaatacatgggtagtttgagtgttggggrtaggaacagaaggcctctctctactcatgaaaggaatgttgaagtgggttgagtcttgcttactgattgaggttgtgcatctgtgtatattcattgggac

SEQ ID NO: 436857 - DNA, 201 bp, Homo sapiens
actgctttggattgaggctcaaaaatcaccttatcaaaagtgcctccagggtgctctgcgtaaaatgtatcctcaactcatttcctatttgatgtctgacwcccccactcttcttcactaaaacgtaagctccataaggaaagggattttgtctgttttgttctgttgtatccctaaatacctagaaggtgctcagtaaat

SEQ ID NO: 436858 - DNA, 201 bp, Homo sapiens
gtgcatccagaagggagggaacgtgttccaaatatgagtaaaggcagggagatgtcaaatatgcccacatattcacatacctcacccattctgtgtggagkgaggagtgccatgtgggcatggtgggattgcatagatagacttgggtggccaaatggaggaaggccttagatcctacaaaagcagtggcagtcattaaat

SEQ ID NO: 436859 - DNA, 201 bp, Homo sapiens
caaacatgtatttagtataagtatcagatgtgcaaaattgggtctagcaagaaccctgtccttgggaggcttaatattatgaaaaatgcaatgaagagttrttgagcatttttaggggagaaggcaaggatggcatacccagatcagtcatttgtgcatccagaagggagggaacgtgttccaaatatgagtaaaggcagg

SEQ ID NO: 436860 - DNA, 201 bp, Homo sapiens
ggttctactgtaccaaaaatttgaaggccatgcgaatgatctgtatgcggaaggactaccagaaaacattcctttcagaagtccctcgtggtatggaatcscaaggctggaaaacatcattcaagtgggcaatcgaattaaatttcttattaaaaggtaagatgataatctgcagaaacaaattcagtgtcttccctaagg

SEQ ID NO: 436861 - DNA, 201 bp, Homo sapiens
gtttgttattatttccattcttttgcatttgctgaggagtgttttacttctaattatgtggtcagttttagaataagtgtgatgtggtgctgagaagaacrtatattctgtggatttggggtggaaaattctgtagatgtcttaagtctgcttggtccagaactgacttcaagtccttaatatccttgttaattttctgtc

SEQ ID NO: 436862 - DNA, 201 bp, Homo sapiens
cagtgagagcctgtttgttattatttccattcttttgcatttgctgaggagtgttttacttctaattatgtggtcagttttagaataagtgtgatgtggtrctgagaagaacgtatattctgtggatttggggtggaaaattctgtagatgtcttaagtctgcttggtccagaactgacttcaagtccttaatatccttgt

SEQ ID NO: 436863 - DNA, 201 bp, Homo sapiens
ggtcaaggtgagcagatcgcttgaggtcaggagtttgagaccagcctggccaacatggtaaaaccccatctctactgaaaagtacaaaaattagccaggcrtggtggcgggcacctgtaatcttagctactcaggaggctgaggcaggagaatcacttgaacccaggaggcggagcttgcaatgaaccgagatcatgccac

SEQ ID NO: 436864 - DNA, 201 bp, Homo sapiens
ttactcacaatacaactgtagttactcagccaagaacaaatacaacaggtaaaatagttgtgaaatcctttttaaaagtacagattaatcttgaagctttwaaaaattaatcttttaaaatgatggaactgctccttccttcacctccccaaaaaatcttttgcagaagctcaatacaggcacttcttgatttatcaatat

SEQ ID NO: 436865 - DNA, 201 bp, Homo sapiens
tatggagaggaaaggtttaagatgatacagcaagctgcttctggctctgctgtgagacagttcatctaagattcagaaacagaattgagctggtttggggsaaaagtgactcttgcatatttatcttaaaaaaagatgactttggagacatccagctggtctcacctgaatatctgaaaattgctattttcaaaattcaag

SEQ ID NO: 436866 - DNA, 201 bp, Homo sapiens
gagaggaaaggtttaagatgatacagcaagctgcttctggctctgctgtgagacagttcatctaagattcagaaacagaattgagctggtttgggggaaawgtgactcttgcatatttatcttaaaaaaagatgactttggagacatccagctggtctcacctgaatatctgaaaattgctattttcaaaattcaagtcac

SEQ ID NO: 436867 - DNA, 201 bp, Homo sapiens
aggtcattttgactgataacataactctccttttgattgaaagtgttaacatgggccgggcacgatggctcatgactgtaatcccagcactttgggaggcygaggcagatggatcacttgaggtcaggagattgagaccatcctggctaacatggtgaaacctcatctctactaaaaatacaaaaaattagctgggtgtgt

SEQ ID NO: 436868 - DNA, 201 bp, Homo sapiens
ctactacctgtctcactgtgcttcctgctattctgctcttactcctctgtataaacactgagctcatggcgtttcctttaacattccaggcatgcttgacyctgtcctgtctctgggccttgctgttccctctgcctggaacattcttcccctagtgtctgcatggctcactgtctcactgctttggattgaggctcaaaa

SEQ ID NO: 436869 - DNA, 201 bp, Homo sapiens
ccatcagcaaatggcactcaggcatgggggcttgagaaaagatcccacacactcaatggcatgttagacatttcatgaaaggattaggtgtgttacccccrgctttctcccccagagtttatcgagactgataataaagtaaatgcattataagccacacatacaagttgtggagtcaaggaaacagagtgacttttctgt

SEQ ID NO: 436870 - DNA, 201 bp, Homo sapiens
tcccaaagtgctgggattgcagacatgagccacctcgcctagccagtcacgattttaaaaaaccaccatagcctagttaatgatgtttaatagctcatcaycacgaatcattgtgcacactcgctataccagaggctctaaactacccaattttttttttttttagattgagttttgctctattgcccaagctggagtaca

SEQ ID NO: 436871 - DNA, 201 bp, Homo sapiens
attttccaagatcatcctgtcctccagtgtcctgttgattcaacttcagaatatatcccagagtctgtccctcttcattcctcactgctgccaccctggayccatctgccatcatctctcacctggtttatctcagtagtctcctaactggttttcttgtttccatgcttgcctccttcagtctattctgtcttttttttt

SEQ ID NO: 436872 - DNA, 201 bp, Homo sapiens
atttacaattaacatttagattcacttattgaacaaacatgtatttagtataagtatcagatgtgcaaaattgggtctagcaagaaccctgtccttgggargcttaatattatgaaaaatgcaatgaagagttattgagcatttttaggggagaaggcaaggatggcatacccagatcagtcatttgtgcatccagaaggg

SEQ ID NO: 436873 - DNA, 201 bp, Homo sapiens
cccaagcagctgggattacaggtatccaccaccacacacagctaattattgtattttttagtacagatggggttttacattgtcagccaggctggtctcaractcctgacctcaagtgatctgcctgcctcagcctcccaaagtgctgggattataggtgtgagtcaccatgcccagcctaaactgcccaattttaaaggg

SEQ ID NO: 436874 - DNA, 201 bp, Homo sapiens
gggtgggacagtaggtgacagagatgaacaaatccctaatcccaggatttcacagtggatgttggaatttagtgccatttagcctcattcaattctgcagwagtcccaagattttccaagatcatcctgtcctccagtgtcctgttgattcaacttcagaatatatcccagagtctgtccctcttcattcctcactgctgc

SEQ ID NO: 436875 - DNA, 201 bp, Homo sapiens
attatgtgccaagtactgggtgggacagtaggtgacagagatgaacaaatccctaatcccaggatttcacagtggatgttggaatttagtgccatttagcytcattcaattctgcagtagtcccaagattttccaagatcatcctgtcctccagtgtcctgttgattcaacttcagaatatatcccagagtctgtccctct

SEQ ID NO: 436876 - DNA, 201 bp, Homo sapiens
tggatctgccctttagaaaggttattctggcttaattttgaagggtaatacatgggtagtttgagtgttggggataggaacagaaggcctctctctactcrtgaaaggaatgttgaagtgggttgagtcttgcttactgattgaggttgtgcatctgtgtatattcattgggactgagttgtatatggagaggaaaggttt

SEQ ID NO: 436877 - DNA, 201 bp, Homo sapiens
attcagttccacatttattcaagaattgaggactttttatatcttcattatgtgccaagtactgggtgggacagtaggtgacagagatgaacaaatccctratcccaggatttcacagtggatgttggaatttagtgccatttagcctcattcaattctgcagtagtcccaagattttccaagatcatcctgtcctccagt

SEQ ID NO: 436878 - DNA, 201 bp, Homo sapiens
gacttgggtggccaaatggaggaaggccttagatcctacaaaagcagtggcagtcattaaatggtctcatagcagttccctcttaaaataatttggatctrccctttagaaaggttattctggcttaattttgaagggtaatacatgggtagtttgagtgttggggataggaacagaaggcctctctctactcatgaaagg

SEQ ID NO: 436879 - DNA, 201 bp, Homo sapiens
ctgcagggttttctggctttgtaatatattcagttccacatttattcaagaattgaggactttttatatcttcattatgtgccaagtactgggtgggacastaggtgacagagatgaacaaatccctaatcccaggatttcacagtggatgttggaatttagtgccatttagcctcattcaattctgcagtagtcccaaga

SEQ ID NO: 436880 - DNA, 201 bp, Homo sapiens
aaagaatgtgcaagtgccatagaagacactgcaaggattgggtgctggagcagtgctggacctgccatcatcaccagagtgcagcagagagaatctcctcytttgccatcactaacccagcacttgactttgtcccactcctaaaagatcttggaaggaattaaaggtgcttggtggtttctcattccagcataaccttac

SEQ ID NO: 436881 - DNA, 201 bp, Homo sapiens
aactcttgacctcgtgatccacccgcctcagcctcccaaagtgctgggatcacaggcgtgagccactgtgcccggcccatgatttactatttataagaacrtgggcttactacttgtgtaatacttatccctgtattttaggtgggagttgctgaggtttggtgactacatctggcctctcagggaaatggccaagttgtt

SEQ ID NO: 436882 - DNA, 201 bp, Homo sapiens
tgcagaaactgagactgcaaagcccgtattatataaagaatgtgcaagtgccatagaagacactgcaaggattgggtgctggagcagtgctggacctgccrtcatcaccagagtgcagcagagagaatctcctcctttgccatcactaacccagcacttgactttgtcccactcctaaaagatcttggaaggaattaaagg

SEQ ID NO: 436883 - DNA, 201 bp, Homo sapiens
ggttgttatgcctcttttaatcaaaactggcctctgcttactatttttatttcccatttcatgaattctttgtggaaagttatttcttttaaaacagcatrctcatgaggttgaaggggtaaagaacattgatcttgtggttgcagtgtggatgaaaattcagcctgaaatatgcctgtttgcagcagccagtggaggagg

SEQ ID NO: 436884 - DNA, 201 bp, Homo sapiens
ggcagaagaggaggctgagcagcaagtgaatagacgtgctcgacctcagaggaggagagtcccatgtctttattggtaatattctaatgtggttgataccrgagttattttctgtggctgaatggttcaactactctgaaatccatggggaaaaacaaaacaaaacaaaaaaaaactcatactaaaaacccttgagatgct

SEQ ID NO: 436885 - DNA, 201 bp, Homo sapiens
gttgtgacagtgattgcagaaactgagactgcaaagcccgtattatataaagaatgtgcaagtgccatagaagacactgcaaggattgggtgctggagcastgctggacctgccatcatcaccagagtgcagcagagagaatctcctcctttgccatcactaacccagcacttgactttgtcccactcctaaaagatcttg

SEQ ID NO: 436886 - DNA, 201 bp, Homo sapiens
tgtgagccaccatgcctggccaagtttccttactcttacctgaacagtatctcatttcctcattatctgaaaaattttgctttaaatctgggtccaaacartcttcatgtgctaactttggttgttatgcctcttttaatcaaaactggcctctgcttactatttttatttcccatttcatgaattctttgtggaaagtta

SEQ ID NO: 436887 - DNA, 201 bp, Homo sapiens
aaaggaggtgagggtgggcagaagaggaggctgagcagcaagtgaatagacgtgctcgacctcagaggaggagagtcccatgtctttattggtaatattcwaatgtggttgataccggagttattttctgtggctgaatggttcaactactctgaaatccatggggaaaaacaaaacaaaacaaaaaaaaactcatactaa

SEQ ID NO: 436888 - DNA, 201 bp, Homo sapiens
catctgacaaaattacaatgattttttggtgtcagctcatctgtaacccttagttgagtttcctcactcttttttttttttggagacaaagtcttgctgtrtcaccctaggctggagtgcaatctcagctcacagcagcctctgccccctgggctccaacaattctcctgcctcagcctcctgggtagctgggattacagg

SEQ ID NO: 436889 - DNA, 201 bp, Homo sapiens
aaaaggaggtgagggtgggcagaagaggaggctgagcagcaagtgaatagacgtgctcgacctcagaggaggagagtcccatgtctttattggtaatattytaatgtggttgataccggagttattttctgtggctgaatggttcaactactctgaaatccatggggaaaaacaaaacaaaacaaaaaaaaactcatacta

SEQ ID NO: 436890 - DNA, 201 bp, Homo sapiens
ggatggcatacccagatcagtcatttgtgcatccagaagggagggaacgtgttccaaatatgagtaaaggcagggagatgtcaaatatgcccacatattcwcatacctcacccattctgtgtggagtgaggagtgccatgtgggcatggtgggattgcatagatagacttgggtggccaaatggaggaaggccttagatcc

SEQ ID NO: 436891 - DNA, 201 bp, Homo sapiens
ttatggtccagaacttcttactcacaatacaactgtagttactcagccaagaacaaatacaacaggtaaaatagttgtgaaatcctttttaaaagtacagrttaatcttgaagcttttaaaaattaatcttttaaaatgatggaactgctccttccttcacctccccaaaaaatcttttgcagaagctcaatacaggcact

SEQ ID NO: 436892 - DNA, 201 bp, Homo sapiens
cggaagttgcagtgagtcgagatcgcaccactgtactccagcctggacaacaggatgagactctgtctcaaataataataataataattagcagtgcacarctgtgtgagaaaggcctgtaaatttcttctaaatgctttattataatattaatatcaactatgtatttatggtccagaacttcttactcacaatacaact

SEQ ID NO: 436893 - DNA, 201 bp, Homo sapiens
gaaacaaattcagtgtcttccctaaggagagattaattcgatgaggaagggccttttgttcccctctcattatgacttccttatatttacaattaacattyagattcacttattgaacaaacatgtatttagtataagtatcagatgtgcaaaattgggtctagcaagaaccctgtccttgggaggcttaatattatgaaa

SEQ ID NO: 436894 - DNA, 201 bp, Homo sapiens
ttgagcatttttaggggagaaggcaaggatggcatacccagatcagtcatttgtgcatccagaagggagggaacgtgttccaaatatgagtaaaggcaggragatgtcaaatatgcccacatattcacatacctcacccattctgtgtggagtgaggagtgccatgtgggcatggtgggattgcatagatagacttgggtg

SEQ ID NO: 436895 - DNA, 201 bp, Homo sapiens
aatgatctgtatgcggaaggactaccagaaaacattcctttcagaagtccctcgtggtatggaatcccaaggctggaaaacatcattcaagtgggcaatcraattaaatttcttattaaaaggtaagatgataatctgcagaaacaaattcagtgtcttccctaaggagagattaattcgatgaggaagggccttttgttc

SEQ ID NO: 436896 - DNA, 201 bp, Homo sapiens
ctctctactcatgaaaggaatgttgaagtgggttgagtcttgcttactgattgaggttgtgcatctgtgtatattcattgggactgagttgtatatggagrggaaaggtttaagatgatacagcaagctgcttctggctctgctgtgagacagttcatctaagattcagaaacagaattgagctggtttgggggaaaagtg

SEQ ID NO: 436897 - DNA, 201 bp, Homo sapiens
cctgaattgctttggttttgttcagctgaagccttggggagcactgaagccaaggttctactgtaccaaaaatttgaaggccatgcgaatgatctgtatgyggaaggactaccagaaaacattcctttcagaagtccctcgtggtatggaatcccaaggctggaaaacatcattcaagtgggcaatcgaattaaatttctt

SEQ ID NO: 436898 - DNA, 201 bp, Homo sapiens
tactgattgaggttgtgcatctgtgtatattcattgggactgagttgtatatggagaggaaaggtttaagatgatacagcaagctgcttctggctctgctrtgagacagttcatctaagattcagaaacagaattgagctggtttgggggaaaagtgactcttgcatatttatcttaaaaaaagatgactttggagacatc

SEQ ID NO: 436899 - DNA, 201 bp, Homo sapiens
ttagttgagtttcctcactcttttttttttttggagacaaagtcttgctgtgtcaccctaggctggagtgcaatctcagctcacagcagcctctgcccccygggctccaacaattctcctgcctcagcctcctgggtagctgggattacaggcgcacgccaccatgcccagctaatttttgtatttttagtagagacaggg

SEQ ID NO: 436900 - DNA, 201 bp, Homo sapiens
ctgggaggagcagatgccagaaaaggaggtgagggtgggcagaagaggaggctgagcagcaagtgaatagacgtgctcgacctcagaggaggagagtcccrtgtctttattggtaatattctaatgtggttgataccggagttattttctgtggctgaatggttcaactactctgaaatccatggggaaaaacaaaacaaa

SEQ ID NO: 436901 - DNA, 201 bp, Homo sapiens
aaacacaccatgggtgcactgtgtcctcagcttggtgaaaggtagatgtcacacacgagaaggtggtggagccaggcatgtgatggagcctcgaagagtgrgaggtggcagctggctctgtgaggagggtgtgaagtcctccctgggaggagcagatgccagaaaaggaggtgagggtgggcagaagaggaggctgagcag

SEQ ID NO: 436902 - DNA, 201 bp, Homo sapiens
tggccatcagaactgtctccttaaacacaccatgggtgcactgtgtcctcagcttggtgaaaggtagatgtcacacacgagaaggtggtggagccaggcaygtgatggagcctcgaagagtgggaggtggcagctggctctgtgaggagggtgtgaagtcctccctgggaggagcagatgccagaaaaggaggtgagggtg

SEQ ID NO: 436903 - DNA, 201 bp, Homo sapiens
ttatttctgccttaatttcgttatttacccagttctcattcaggagcaggttgttcagtttccatgtagtgcggttttgagtgagtttcttaattttgagwtctaatttaattgcactatgcagtgagagcctgtttgttattatttccattcttttgcatttgctgaggagtgttttacttctaattatgtggtcagttt

SEQ ID NO: 436904 - DNA, 201 bp, Homo sapiens
agaccacataacaaaagaattttgtggccatcagaactgtctccttaaacacaccatgggtgcactgtgtcctcagcttggtgaaaggtagatgtcacacrcgagaaggtggtggagccaggcatgtgatggagcctcgaagagtgggaggtggcagctggctctgtgaggagggtgtgaagtcctccctgggaggagcag

SEQ ID NO: 436905 - DNA, 201 bp, Homo sapiens
aaccttcatttctcaagacaaagctcaaattcaaggttgtgaggaatgcagtcactgcttttgttaggggcagttgtgacagtgattgcagaaactgagaytgcaaagcccgtattatataaagaatgtgcaagtgccatagaagacactgcaaggattgggtgctggagcagtgctggacctgccatcatcaccagagtg

SEQ ID NO: 436906 - DNA, 201 bp, Homo sapiens; identical to SEQ ID NO: 131611

SEQ ID NO: 436907 - DNA, 201 bp, Homo sapiens; identical to SEQ ID NO: 131612

SEQ ID NO: 436908 - DNA, 201 bp, Homo sapiens; identical to SEQ ID NO: 131613

SEQ ID NO: 436909 - DNA, 201 bp, Homo sapiens; identical to SEQ ID NO: 131802

SEQ ID NO: 436910 - DNA, 201 bp, Homo sapiens; identical to SEQ ID NO: 131849

SEQ ID NO: 436911 - DNA, 201 bp, Homo sapiens
cacgtgcctacctcggccacgcccaggtcggagattttgagggtgccaccggtggtgagcagcaggttccccggcttgatgtccttgtgcacaatgccctrgctatgcaggtactccaggccgtcaatcagctgacagaagtacctgcgggcagcacacacccgtcctggggccgaggcctccctgcccctcacaggggtc

SEQ ID NO: 436912 - DNA, 201 bp, Homo sapiens
atctctgttccctgccagttggatgccggtaccaggagcaccaaggctggagggcccggggctgcagcagggcctggggaggcgggcccgggatccggggmaggtaccgttctgcagttcctcacccgcctgcgccgccatgccagcctggatggggccagcccctatttcaaggtcaagaagtggaagctggagcccagc

SEQ ID NO: 436913 - DNA, 201 bp, Homo sapiens
ttggggatccttcgcaacttcttcttcttgaggatcttgacggccctcctgcacagcgtctccgagtccagcacctccttcaccttgccgtaagagccttmccccagcaggtcccccatcaggtacttgccgatgagcttggcccgcttgcggcgcggctggtagatgacctcggtggagtcgatgcggtggatgaacgtg

SEQ ID NO: 436914 - DNA, 201 bp, Homo sapiens
tttattaaaaatcagaaacctggcggggtgtgggggctcacacctgtagtcccaacaatttaggagactgagacagaaggatctcttgagcccagaagttygagaccagcccggacaacatagcaagattccatctctacaaaaaaaaacaaaacaaaaattagctgggcatgatggcgcgcacctgtagtcccaactacc

SEQ ID NO: 436915 - DNA, 201 bp, Homo sapiens
ccttgtggacagggtggcaggtcctgtcgtcaggtgaggccaggataggggacaagtgcagagagaaggtgctgtcagcatgacagaggacacatcatcasacagtgggagaccctgtgttgtggctccagccagcgggggtggggtgagttctcccagcccccacccccaaggtagctaggggccagggaggggaaggcc

SEQ ID NO: 436916 - DNA, 201 bp, Homo sapiens
cccaccctctcctgcctctccacgcagaccccgacttccggggagaggaccccgagtgccaggatgcggagaccgaacgcttcctgtccaccagctccacrggccgccgggtctccttcaatgaggcggcgctgtttgagcagagccgcaagacgcaggacaagggtcgccggtaagcggggcggcgttgggaggcacccc

SEQ ID NO: 436917 - DNA, 201 bp, Homo sapiens
cgtctctactaaatatacaaaaattagccgagcatggtggtgggcgcctgtaatcccagctactcgggaggctgaggcaggagaatagctcgaacccgggsgggggggggggggggaggttgcagtgagccgagatcgcgccactgcactccagcctgggcgactgagcaagactctgtctcaaacaaaaaaataaataaa

SEQ ID NO: 436918 - DNA, 201 bp, Homo sapiens
tagccgggcgtggtgatgcacgcctgtggtcccagctactggggaggctgaggcgggagcatcgcttgggcctaaggagattgaggctgcagtgagctatsattgcgccactgcctagcctgggcaacagagtgagaatcccactctggggccgggggttatttagcagacatttgagatcattaataagcaggtcaggcc

SEQ ID NO: 436919 - DNA, 201 bp, Homo sapiens
acggagactgacctgggatgtggagccccagcctggcctggccctgcagccctccaccggactcaccaaagtatttggaggtggtgccgtcctctgcatgsaccacgaccagccccggccgcaggacctgcagcgtgggcacgtgggccgccaggatgccgaaggctccggtcagcgtgggcacgtccacctgccggacgt

SEQ ID NO: 436920 - DNA, 201 bp, Homo sapiens
caccctggcccatggttggttctagaggcccaggagccgccacatgctcatctgtgaggacacaggagggccaggctcgggccaggctcaggccaggcackcgaaatgccagcacagaaccacgcggggagcagagctcagcctgccagggcccccagctgcccccagtccctgctagccaccaaccatcaccagcaccct

SEQ ID NO: 436921 - DNA, 201 bp, Homo sapiens
gggcagcagaggcagggccgagggtccagggctgagtagcctcggcttccggggcgcgcgggtccgggggcccggaagcgggggtcgcgccctgggggtgrggaccctggactccgggggcggcggccacggagggtcccgacccgcagcgcccgaacctgcgtgggagaggcgaaggtgaaggacatctggttggggcca

SEQ ID NO: 436922 - DNA, 201 bp, Homo sapiens
atggcgggcgccactgtcccctggaacccaagcacctgaagaaggccctgctggtccgactcaggatgaaggcgtgggcctggctcctcccaccgggccarcgctgtgacggtcacttggagcctggtcatcctggccctggctcggggggtgcagaggaggaggcctgttcacttttcgagtcgtgacctgtgcacctcc

SEQ ID NO: 436923 - DNA, 201 bp, Homo sapiens
ggaggctgaggcaggcggatcacgaggtcaggagtttgagaccatcctggctaacacggtgaaaccccgtctctactaaaaatacaaaaaattagccgggygtggtggcgggcgcctgtaatcccagctactcgggaagctgaggcagaagaatggcgtgaacctcggaggcggagcttgcagtgagccgagatcgcacca

SEQ ID NO: 436924 - DNA, 201 bp, Homo sapiens
agtccccagagctttcaacacaggcagggcctggggcccaggcagaagcctgcactgccctctggtggcctccttggcaggcgcggcttccccaggtggcsgggaccccaggagctggctgggcccacctggcatccctgcccagcccctggccgggcctcgggacaccgggtacgcaccgcctactccagggccttcacc

SEQ ID NO: 436925 - DNA, 201 bp, Homo sapiens
cccaaagtcttgctggaacagcaggcccctccctgcccctgtggtcctgcagcagcaaggggccctgactctgaggccacagacctgcatccaggagatcyggtcagggcaggcggctgccagcgatgggctggaagcaggccactggcctcaggcagcaggcccagcaaagatggaggcgggaggttggcagcagccctg

SEQ ID NO: 436926 - DNA, 201 bp, Homo sapiens
ctgcaccccacccaccccctcgagcctgcttcctacggacctccaggtgccctaagggacatagtccaggggagctcaaaggccctatttgcaagggacayggaggacgtgagcaggggcccaggacgctcccggcttcaccgggccaggtggaggaacaagagccgagcacacagtcaggcttccgggtctttaatgggg

SEQ ID NO: 436927 - DNA, 201 bp, Homo sapiens
gagatcgagaccatcctggctaacacagtgaaaccccatctctactaaaaatacaaaaaaattagccgggcatggtggcaggcgcctgtagtcccagctaytcgggaggctgaggcaggagaatggtgtgaacccgggaggcagagcttgcagtgagccaagatcacgccactgcactccagcctgggtgacagagcgaga

SEQ ID NO: 436928 - DNA, 201 bp, Homo sapiens
gccccacccgggccccgccgcgccccacctgcaggcggccagcctcactgctgcttgcaggccgacagccggcggatcttgctgctggcggagcaggcctwgcgggcagggttgggggcccggccctccgccctggatttggtgctcagctgcgccgcctctgtgccgttcatacacacggccttggggaggccccggcgc

SEQ ID NO: 436929 - DNA, 201 bp, Homo sapiens
caggtggaagtgacaggaaagggcagggccgtgggacaccgccaggctgtgcgctcacggcagccctgggtgcctctgcggaggctccacaaggcgggcasactccctgccttcgagcccactctcactggggtggaaagggggagggaggcatggcggccttctgcctgcacccccccccccagaaccccactgtgggct

SEQ ID NO: 436930 - DNA, 201 bp, Homo sapiens
gttcatccagaggtggctccgaagctgaggtcaaccttggcggctggctctgcagggcagaggggatggtaagcggcccgtcaggctggggggatcttgaraggcggaaggagagccccatgggtggcagccacagctcaaagctgaggaggagcttccctggcccagtccccagagctttcaacacaggcagggcctggg

SEQ ID NO: 436931 - DNA, 201 bp, Homo sapiens
ggcccgtcaggctggggggatcttgagaggcggaaggagagccccatgggtggcagccacagctcaaagctgaggaggagcttccctggcccagtccccaragctttcaacacaggcagggcctggggcccaggcagaagcctgcactgccctctggtggcctccttggcaggcgcggcttccccaggtggccgggacccc

SEQ ID NO: 436932 - DNA, 201 bp, Homo sapiens
aggggcggtgaggggccagcagcgaccccagcccggctcctggtcccccagcgctccctcccccgcagcctggacagctccaacctgctgagcctcaggtsccctctgacactcacccccaggtccaacatgtccagcgtcacggcctcttcggccaacaactgcaccgaagagtcggcgttcactgcgatggaaccgctg

SEQ ID NO: 436933 - DNA, 201 bp, Homo sapiens
gagcaggcctcgaggcaggcggacccagggccccagcccctcccacggaggccccgcggtcccaacaccggaaaggatatattttctgcttctcttcgttktataacacatccaccagctggatgacatttttgtgccgtaacctcctcagtagttgaatttccctgggacagagaggacaggggtgtatcagccgaccca

SEQ ID NO: 436934 - DNA, 201 bp, Homo sapiens
tgggatgggcactggtgcttcagccggaggatgtttcttccggaaccagctgcaaacgcccagaagcagtggcgcctgtcaggctggcaccagggcggtcyagttttccgacccagctcctctgggcccagggtacctgccacacactcaggagctgggaccaggccgtgcaaggggtggctgtgaccacagaagctcagc

SEQ ID NO: 436935 - DNA, 201 bp, Homo sapiens
caggacaagcagtgtggcctcacggaaaggagcctgccctgcctggcccccggcccccgccccaccctggcccctgccccgcgcacgcacccgtgggcctrgcacactgggaaacgcttctccggcacgctgtccagcatttcctgcatgccacacacgcagtactccatcaccatatacgtggggcgctaaggacacaca

SEQ ID NO: 436936 - DNA, 201 bp, Homo sapiens
gggcactggtgcttcagccggaggatgtttcttccggaaccagctgcaaacgcccagaagcagtggcgcctgtcaggctggcaccagggcggtccagtttyccgacccagctcctctgggcccagggtacctgccacacactcaggagctgggaccaggccgtgcaaggggtggctgtgaccacagaagctcagccatgtc

SEQ ID NO: 436937 - DNA, 201 bp, Homo sapiens
gagggtgccaccggtggtgagcagcaggttccccggcttgatgtccttgtgcacaatgccctggctatgcaggtactccaggccgtcaatcagctgacagragtacctgcgggcagcacacacccgtcctggggccgaggcctccctgcccctcacaggggtcccctttgcagctgcctgggagcctcccaaacaccacag

SEQ ID NO: 436938 - DNA, 201 bp, Homo sapiens
ctcgatgtcgaagaggtcctcgtcctcgtccgcgccgtgcaggtcctccaagtacggcaccacagtcatgctgcgccaccggtccttggtgtctgggctcrgtgggatgggcactggtgcttcagccggaggatgtttcttccggaaccagctgcaaacgcccagaagcagtggcgcctgtcaggctggcaccagggcggt

SEQ ID NO: 436939 - DNA, 201 bp, Homo sapiens
tgcagtgcctgtggcggtgccgtgcagccctcagggagtgcccgggagggggcgccccagggccccccctagcacgtgcctacctcggccacgcccaggtyggagattttgagggtgccaccggtggtgagcagcaggttccccggcttgatgtccttgtgcacaatgccctggctatgcaggtactccaggccgtcaatc

SEQ ID NO: 436940 - DNA, 201 bp, Homo sapiens
cgccctgcgcccacaggccggcagctgcccaagacgcagaggcccctcggagtgtgcgtgtggtgagtgcccgggggggcggggcacttacagggtgaccycagccgaccagatgtccaccttgaagccggagaaggtgtccaggccgttggcaatctcgggcggctggaaagccggggagccctggctggtccggcaggt

SEQ ID NO: 436941 - DNA, 201 bp, Homo sapiens
gccctgcgcccacaggccggcagctgcccaagacgcagaggcccctcggagtgtgcgtgtggtgagtgcccgggggggcggggcacttacagggtgacccmagccgaccagatgtccaccttgaagccggagaaggtgtccaggccgttggcaatctcgggcggctggaaagccggggagccctggctggtccggcaggtg

SEQ ID NO: 436942 - DNA, 201 bp, Homo sapiens
gcctgaccacctccacccccaccctggccatgggcgcccctcccagggctgcgctcctccccaggtctccttccggctgccacccatgctcccggcagccstggcccccaccttgacaggcacacccagccccgaagggtcagggctaggccagagagggagaggctgggataacccttggaagggggtcacaggggctgc

SEQ ID NO: 436943 - DNA, 201 bp, Homo sapiens
ggaggccgaggcgggcggatcacaaggtcaagagattgagaccagcctggccaacatggtgaaaccctgtctctactaaaaatacaaaaattagctgggcrtggtggcatgtgtctgtagtcccagctactcaggaggctgaggcaggagaatcgcttgaacgcgggaggcggaggttacaataaacccagatcgtgccag

SEQ ID NO: 436944 - DNA, 201 bp, Homo sapiens
cctcctgctgcctgtgcagggaccaccccacacccacccaggctccagcacagtcctaaccctgaggaggggcagtgaggccaggagctcaacctgcatgyagcctcagagcctcgtgggggccgctcgggaggctgcacggccctaaaagcaaatgagggtggaggactccctcctggaaacctccctgcgccggccacc

SEQ ID NO: 436945 - DNA, 201 bp, Homo sapiens
cggcgctgtttgagcagagccgcaagacgcaggacaagggtcgccggtaagcggggcggcgttgggaggcaccccagggcctgtctgaggtcctggccgcygggacgggggaggagctgggtgcggaggctgcagggaccaaggcagaggctcctggactgggaccgtggggtggggcggccttggccagttgcccccctt

SEQ ID NO: 436946 - DNA, 201 bp, Homo sapiens
cgccactgacttcgcagagatcagcccctcggcatctagcgactctggggaaggcacctcggtgagggcccctgcgtgtcccccatggtgtccacagccgrggaggctccttcccctccctgtccccagtccaggaccaaggtcaacctatgacctgccagccaccgcagccctccttggcccgccgggtcattgcacacg

SEQ ID NO: 436947 - DNA, 201 bp, Homo sapiens
tggcctccccgttggggatccttcgcaacttcttcttcttgaggatcttgacggccctcctgcacagcgtctccgagtccagcacctccttcaccttgccbtaagagccttcccccagcaggtcccccatcaggtacttgccgatgagcttggcccgcttgcggcgcggctggtagatgacctcggtggagtcgatgcggt

SEQ ID NO: 436948 - DNA, 201 bp, Homo sapiens
cagaaccatcagcaccgtgactggcccggcccggccccgaccccagcaagccatacttacttcttcacgttggcctccccgttggggatccttcgcaactwcttcttcttgaggatcttgacggccctcctgcacagcgtctccgagtccagcacctccttcaccttgccgtaagagccttcccccagcaggtcccccatc

SEQ ID NO: 436949 - DNA, 201 bp, Homo sapiens
ccccagggccccccctagcacgtgcctacctcggccacgcccaggtcggagattttgagggtgccaccggtggtgagcagcaggttccccggcttgatgtycttgtgcacaatgccctggctatgcaggtactccaggccgtcaatcagctgacagaagtacctgcgggcagcacacacccgtcctggggccgaggcctcc

SEQ ID NO: 436950 - DNA, 201 bp, Homo sapiens
gagtgcccgggagggggcgccccagggccccccctagcacgtgcctacctcggccacgcccaggtcggagattttgagggtgccaccggtggtgagcagcrggttccccggcttgatgtccttgtgcacaatgccctggctatgcaggtactccaggccgtcaatcagctgacagaagtacctgcgggcagcacacacccg

SEQ ID NO: 436951 - DNA, 201 bp, Homo sapiens
cctgctgaccccgtccgctgctctgtcttccctgtcatggagctgggggccctgggctggatcccagccacaccctgctgctgggagccccaggaggaggrgaaaaagagaggctctcgccagtgtttgggaccagctgtgcccttcctggcgcatctccatgcctagggcagggacggacgcatgtcctcactcagaccc

SEQ ID NO: 436952 - DNA, 201 bp, Homo sapiens
ccagcctggcacccccaccacgccctgctctagcgcccgctcaaccagctgcccacatggccggcctccctgcagcctcggccccactgcccccaggggcsgctcacctgtgctgccggatctgccggatggagaacctcttggccggttcgtactcaagcatccctgaggagaagccggcgaggagcctgtcagctgggc

SEQ ID NO: 436953 - DNA, 201 bp, Homo sapiens
cttctgcccctctccgagcaggtacccctctctgtcccagtgatggggggcccttgggactgtctctcagacctacggccacctggggccagcacacgggyccaggaagaagtcttagcctgagcgccatctctgttccctgccagttggatgccggtaccaggagcaccaaggctggagggcccggggctgcagcagggc

SEQ ID NO: 436954 - DNA, 201 bp, Homo sapiens
tggtcgggagtggaatggacaccgtcacctcagtctggtcgggagtggaatggacaccatcacctcagtctggtcgggagtggaatgggacacgggttgtmggaacttgctgggcttcacaggggccactgtgtggccctttggggaccagatgcccagagccagtctaaatgaataaacatgctaaaacgcttccccacc

SEQ ID NO: 436955 - DNA, 201 bp, Homo sapiens
gcgctttaggaggctgaggccagaggatcacttgaggccaggagctggaaaccagcctgggcaatagtgtagatcgcccccacccccgacccgtctgtacaaaaaaaaaaaaaaagatttttggggcgctcattggatgcagggccctggatagacatcaagaaaacatcaagtttccggctctgggccaggtgtggtggc

SEQ ID NO: 436956 - DNA, 201 bp, Homo sapiens
tgccctggctatgcaggtactccaggccgtcaatcagctgacagaagtacctgcgggcagcacacacccgtcctggggccgaggcctccctgcccctcacrggggtcccctttgcagctgcctgggagcctcccaaacaccacaggcccagctgggaagtcacagaagtccaggcacacaggacagaggaaaggctaggtc

SEQ ID NO: 436957 - DNA, 201 bp, Homo sapiens
tcagagagcggggggccacagtcgcccgggatggcgtagctccccttcccgatgttctcaaacaacttgtagatgttgtccccttcgaaggggtacagacycgtggtgatgttgtagcttcatttcgaggggagggaagaaaggcgtggtcagtcaaggtggttgacgccctaggagccccagctctaccccagggacaga

SEQ ID NO: 436958 - DNA, 201 bp, Homo sapiens
ccgcgtggcctcgtcagctgtccccaccagctccgcctgggccttctccaagtttgccttggctgcctgcaaggggttgaggggcggtgaggggccagcarcgaccccagcccggctcctggtcccccagcgctccctcccccgcagcctggacagctccaacctgctgagcctcaggtcccctctgacactcacccccag

SEQ ID NO: 436959 - DNA, 201 bp, Homo sapiens
tgcaaagccagcaaaggccagaagggggtctggggggccctgagcacatcccagcccaggaggctatcggggggcagccccagtccccgccaggcgcccakatgacccgagctgtgcagagacccccaaggcacaatcagcaccagcgcctcaggggtccggacactcccactcccagagccggtctcagtgggtggcctc

SEQ ID NO: 436960 - DNA, 201 bp, Homo sapiens
cctcgtctctactaaatatacaaaaattagccgagcatggtggtgggcgcctgtaatcccagctactcgggaggctgaggcaggagaatagctcgaacccgggcgggggggggggggggaggttgcagtgagccgagatcgcgccactgcactccagcctgggcgactgagcaagactctgtctcaaacaaaaaaataaat

SEQ ID NO: 436961 - DNA, 201 bp, Homo sapiens
ccacgccctgctctagcgcccgctcaaccagctgcccacatggccggcctccctgcagcctcggccccactgcccccaggggccgctcacctgtgctgccrgatctgccggatggagaacctcttggccggttcgtactcaagcatccctgaggagaagccggcgaggagcctgtcagctgggcacaggcctgagacccca

SEQ ID NO: 436962 - DNA, 201 bp, Homo sapiens
ctcgtctctactaaatatacaaaaattagccgagcatggtggtgggcgcctgtaatcccagctactcgggaggctgaggcaggagaatagctcgaacccgggcgggggggggggggggaggttgcagtgagccgagatcgcgccactgcactccagcctgggcgactgagcaagactctgtctcaaacaaaaaaataaata

SEQ ID NO: 436963 - DNA, 201 bp, Homo sapiens
cccccaccacgccctgctctagcgcccgctcaaccagctgcccacatggccggcctccctgcagcctcggccccactgcccccaggggccgctcacctgtrctgccggatctgccggatggagaacctcttggccggttcgtactcaagcatccctgaggagaagccggcgaggagcctgtcagctgggcacaggcctgag

SEQ ID NO: 436964 - DNA, 201 bp, Homo sapiens
ggctgagctgggccagccacgtgccagagcggtgtcagcctttctttgggacgagaaagaggaggcgctgtggggtgttaggcgtgggctcagaggggttsgggtggcgctcgggccaggctggtggcaggtgtgtggcctgagtatctgcaggatgaggttcgatggtctaagagggagaagcgggggcagctttgggct

SEQ ID NO: 436965 - DNA, 201 bp, Homo sapiens
gtctctactaaatatacaaaaattagccgagcatggtggtgggcgcctgtaatcccagctactcgggaggctgaggcaggagaatagctcgaacccgggcgggggggggggggggaggttgcagtgagccgagatcgcgccactgcactccagcctgggcgactgagcaagactctgtctcaaacaaaaaaataaataaaa

SEQ ID NO: 436966 - DNA, 201 bp, Homo sapiens
ggaggcgcagggcagcactgccctctggggtgggagttcggagggtgaacagggcccagaagcagggtggagctgagggacctggcaaaccaggccctgcrgggaggtcggcctctccactcagtcctctcaatgcctgctggggtctcggggccaatagccccccacctgacacccccaaccctacatttctgcacaaaa

SEQ ID NO: 436967 - DNA, 201 bp, Homo sapiens
gttgattagcaggacaggaaataggaaggagagtcataaacgccactcaagctcacagagaggtggggctaggagcctccgtctgcctagaaacagatcayacagggaagagatgggcctggccctcgccccggcctcccacggctcagagcaggactgggaggcacatggagacccaggaacacccagctccagacccgc

SEQ ID NO: 436968 - DNA, 201 bp, Homo sapiens
ccaagtacggcaccacagtcatgctgcgccaccggtccttggtgtctgggctcggtgggatgggcactggtgcttcagccggaggatgtttcttccggaamcagctgcaaacgcccagaagcagtggcgcctgtcaggctggcaccagggcggtccagttttccgacccagctcctctgggcccagggtacctgccacaca

SEQ ID NO: 436969 - DNA, 201 bp, Homo sapiens
ctgcacaaaagccccgcctccctggggctgcgggcagagggatgaggctcccacctttcagcaggtcagagagcggggggccacagtcgcccgggatggcrtagctccccttcccgatgttctcaaacaacttgtagatgttgtccccttcgaaggggtacagacccgtggtgatgttgtagcttcatttcgaggggaggg

SEQ ID NO: 436970 - DNA, 201 bp, Homo sapiens
caagtacggcaccacagtcatgctgcgccaccggtccttggtgtctgggctcggtgggatgggcactggtgcttcagccggaggatgtttcttccggaacyagctgcaaacgcccagaagcagtggcgcctgtcaggctggcaccagggcggtccagttttccgacccagctcctctgggcccagggtacctgccacacac

SEQ ID NO: 436971 - DNA, 201 bp, Homo sapiens
tctctactaaatatacaaaaattagccgagcatggtggtgggcgcctgtaatcccagctactcgggaggctgaggcaggagaatagctcgaacccgggcgggggggggggggggaggttgcagtgagccgagatcgcgccactgcactccagcctgggcgactgagcaagactctgtctcaaacaaaaaaataaataaaat

SEQ ID NO: 436972 - DNA, 201 bp, Homo sapiens
tgtagatgttgtccccttcgaaggggtacagacccgtggtgatgttgtagcttcatttcgaggggagggaagaaaggcgtggtcagtcaaggtggttgacrccctaggagccccagctctaccccagggacagaggcgtcccgtggctgctggaccagaggccctgtggactcaaggacacctctgtcttcaccaccttcc

SEQ ID NO: 436973 - DNA, 201 bp, Homo sapiens
cgcgccgtgcaggtcctccaagtacggcaccacagtcatgctgcgccaccggtccttggtgtctgggctcggtgggatgggcactggtgcttcagccggakgatgtttcttccggaaccagctgcaaacgcccagaagcagtggcgcctgtcaggctggcaccagggcggtccagttttccgacccagctcctctgggccc

SEQ ID NO: 436974 - DNA, 201 bp, Homo sapiens
tcgttgtataacacatccaccagctggatgacatttttgtgccgtaacctcctcagtagttgaatttccctgggacagagaggacaggggtgtatcagccracccaacgtcaggatgatggcctggatccctggagtcggcctccccatctccctgtggaagtggcgtacctcctcccttccctagagagaagctgtgagt

SEQ ID NO: 436975 - DNA, 201 bp, Homo sapiens
cgttctgtggtggggggcacaggcgttctatgtgtgtgtatgggggccacaggcgttctgtgtgtggggggggcccaggcgttgtatgtgtggggggcacrcgttgtgtgtgtgtggtgggggtccacaggcgttgtgtgtggcgggggggcacaggcattgtgtgtgtgtggcgggggggcataggcattctgtgtgtgt

SEQ ID NO: 436976 - DNA, 201 bp, Homo sapiens
ccatacttacttcttcacgttggcctccccgttggggatccttcgcaacttcttcttcttgaggatcttgacggccctcctgcacagcgtctccgagtccvgcacctccttcaccttgccgtaagagccttcccccagcaggtcccccatcaggtacttgccgatgagcttggcccgcttgcggcgcggctggtagatgac

SEQ ID NO: 436977 - DNA, 201 bp, Homo sapiens
actgccccctctgcagctgccgcccagttggccacgcccacctgcctgtcacaagggtggggcacaacaggccagagagcacagccccctctgcagctgcygccctgtcgcagacacttcatttctcccagcactataggaggccgaggcgggtggatcacctgagctcaggagttcgagaccagcctgagcaacacggcg

SEQ ID NO: 436978 - DNA, 201 bp, Homo sapiens
acacgtgaggccaaagtggaggcacgcagaggccgatgcagcagccccggcagagcgcagaggatggcctgacccgagggcgccgggctgtcctgccccarcgcaagggggctctgcaggtcagggacggggctcacgctgaagcctgaagttgagcctgtccccagcatctgagcagtgggaggggcgtccacctgagta

SEQ ID NO: 436979 - DNA, 201 bp, Homo sapiens
cacgtgaggccaaagtggaggcacgcagaggccgatgcagcagccccggcagagcgcagaggatggcctgacccgagggcgccgggctgtcctgccccaaygcaagggggctctgcaggtcagggacggggctcacgctgaagcctgaagttgagcctgtccccagcatctgagcagtgggaggggcgtccacctgagtac

SEQ ID NO: 436980 - DNA, 201 bp, Homo sapiens
cagggatcctggcctgcaggggcggccgtgggggtcagcgtgtggtccacgtcccagtagggactctcgcaacctgcctgggctggccctgccctaactgrccctcctgcctgggatttgcctggctgcccgtctcagggcaccagggctctgaaaggcagaagaccctgggcctggggtcaaattgcagccaggccccaa

SEQ ID NO: 436981 - DNA, 201 bp, Homo sapiens
gcccgggagggggcgccccagggccccccctagcacgtgcctacctcggccacgcccaggtcggagattttgagggtgccaccggtggtgagcagcaggtwccccggcttgatgtccttgtgcacaatgccctggctatgcaggtactccaggccgtcaatcagctgacagaagtacctgcgggcagcacacacccgtcct

SEQ ID NO: 436982 - DNA, 201 bp, Homo sapiens
tgcccgggggggcggggcacttacagggtgaccccagccgaccagatgtccaccttgaagccggagaaggtgtccaggccgttggcaatctcgggcggctrgaaagccggggagccctggctggtccggcaggtgtcgtccgccgcgaacgggtgcagtgcctgtggcggtgccgtgcagccctcagggagtgcccgggag

SEQ ID NO: 436983 - DNA, 201 bp, Homo sapiens
cggccccactcacaggcccagggagcacgggggccagaaaaggggctctggagggaccctctgcacccaccttgcccctcctcgggaccagggcccacccygccctcagccacccctctgaaaaggcccaggggccccagcgtcccaggaggaaggagcctacggggaaggggaggacagggctgactcttggggcagcgt

SEQ ID NO: 436984 - DNA, 201 bp, Homo sapiens
ggcgccccagggccccccctagcacgtgcctacctcggccacgcccaggtcggagattttgagggtgccaccggtggtgagcagcaggttccccggcttgwtgtccttgtgcacaatgccctggctatgcaggtactccaggccgtcaatcagctgacagaagtacctgcgggcagcacacacccgtcctggggccgaggc

SEQ ID NO: 436985 - DNA, 201 bp, Homo sapiens
aaagaccttggtgaggaggcaccaattgcacccataggtctgagcttgggcccagcccgtctctggtggggcagaccctgtggacaaggtgccccagctcygcatcagcgggcacagccgccactgggcccttgccccaccccacactcctgtctgcactggtgcccaggatctagcccaagccccttccctgggatctgg

SEQ ID NO: 436986 - DNA, 201 bp, Homo sapiens
gcccacaggccggcagctgcccaagacgcagaggcccctcggagtgtgcgtgtggtgagtgcccgggggggcggggcacttacagggtgaccccagccgascagatgtccaccttgaagccggagaaggtgtccaggccgttggcaatctcgggcggctggaaagccggggagccctggctggtccggcaggtgtcgtccg

SEQ ID NO: 436987 - DNA, 201 bp, Homo sapiens
ccacactcctgtctgcactggtgcccaggatctagcccaagccccttccctgggatctgggtgttggcagcaggacccgcatcctgggtagggacacgtgrggccaaagtggaggcacgcagaggccgatgcagcagccccggcagagcgcagaggatggcctgacccgagggcgccgggctgtcctgccccaacgcaagg

SEQ ID NO: 436988 - DNA, 201 bp, Homo sapiens
acacaggcgccagacgggtccagctcagggtgttaagaggaagtaagggagggagggaggagagaaggaaggaagacagaaccatcagcaccgtgactggmccggcccggccccgaccccagcaagccatacttacttcttcacgttggcctccccgttggggatccttcgcaacttcttcttcttgaggatcttgacggc

SEQ ID NO: 436989 - DNA, 201 bp, Homo sapiens
cagaagccagcacccaccagatggatgctggctgcaaagccagcaaaggccagaagggggtctggggggccctgagcacatcccagcccaggaggctatcggggggcagccccagtccccgccaggcgcccagatgacccgagctgtgcagagacccccaaggcacaatcagcaccagcgcctcaggggtccggacactcc

SEQ ID NO: 436990 - DNA, 201 bp, Homo sapiens
ggcggatcacgaggtcaggagtttgagaccatcctggctaacacggtgaaaccccgtctctactaaaaatacaaaaaattagccgggcgtggtggcgggcrcctgtaatcccagctactcgggaagctgaggcagaagaatggcgtgaacctcggaggcggagcttgcagtgagccgagatcgcaccattgcactccagcc

SEQ ID NO: 436991 - DNA, 201 bp, Homo sapiens
agaatggcgtgaacctcggaggcggagcttgcagtgagccgagatcgcaccattgcactccagcctgggcgacagagtgagactccatctcgaaaaaaaamacaaaaaaacaaaaaaacaaaaaaacttgggccttcatgtcaatgaatatcaggacaagcagtgtggcctcacggaaaggagcctgccctgcctggcccc

SEQ ID NO: 436992 - DNA, 201 bp, Homo sapiens
ggctctcccaacgtctctcccagggccatggaggaagcggagaagaccaccaccacctacctggacaacggcacccacccagcccaaggtgaggtgctggycagcctggctgtgcgctcgcctgtccatccgcccctcggccacccgccgccccctcgggctgcctgaccgtctgtgtctgtctgtctcccccaccagact

SEQ ID NO: 436993 - DNA, 201 bp, Homo sapiens
ttcaggaaagcagggggctcactctcacagtcaggcttccaccctccagcgtctgtcttcccattgaccctgcatatacatttgtcaaaactcaagccagatttatttatttatttatttatttatttatttatttatttatttttgagacagagtctcgctgtgtcgcccaggctggagcgcaatggtgcgatctcgggt

SEQ ID NO: 436994 - DNA, 201 bp, Homo sapiens
tcaggaaagcagggggctcactctcacagtcaggcttccaccctccagcgtctgtcttcccattgaccctgcatatacatttgtcaaaactcaagccagatttatttatttatttatttatttatttatttatttatttatttttgagacagagtctcgctgtgtcgcccaggctggagcgcaatggtgcgatctcgggtc

SEQ ID NO: 436995 - DNA, 201 bp, Homo sapiens
caggaaagcagggggctcactctcacagtcaggcttccaccctccagcgtctgtcttcccattgaccctgcatatacatttgtcaaaactcaagccagatttatttatttatttatttatttatttatttatttatttatttttgagacagagtctcgctgtgtcgcccaggctggagcgcaatggtgcgatctcgggtca

SEQ ID NO: 436996 - DNA, 201 bp, Homo sapiens
aggaaagcagggggctcactctcacagtcaggcttccaccctccagcgtctgtcttcccattgaccctgcatatacatttgtcaaaactcaagccagatttatttatttatttatttatttatttatttatttatttatttttgagacagagtctcgctgtgtcgcccaggctggagcgcaatggtgcgatctcgggtcac

SEQ ID NO: 436997 - DNA, 201 bp, Homo sapiens
ccgtaacgcaggcccccaaccacgctctccctggcacggaggacacaggcgccagacgggtccagctcagggtgttaagaggaagtaagggagggagggargagagaaggaaggaagacagaaccatcagcaccgtgactggcccggcccggccccgaccccagcaagccatacttacttcttcacgttggcctccccgtt

SEQ ID NO: 436998 - DNA, 201 bp, Homo sapiens
tgtccagcgtcacggcctcttcggccaacaactgcaccgaagagtcggcgttcactgcgatggaaccgctgctcactgggggaatggggcggggggaaggygtgagaccccaaagggctgcacagcctcagggactcccctggtcaagtccagagccccctgtgaaccaggagctccacaaacatccaagtctgtgtcctg

SEQ ID NO: 436999 - DNA, 201 bp, Homo sapiens
cgcacactcctgcttgctccgggttttctctggggtcccaagagcgcagtggccttgggggagaggtgagggtcctgccctccggccgggccgccaaagcrgggtgacccgagagcgcaaaggcggccgcgacgtgagcccgaccccacagcccccctgccacccagcagctcccaaacacccctcacagccacagctcaa

SEQ ID NO: 437000 - DNA, 201 bp, Homo sapiens
aaaggtggcccagcccctgctctcctcccaggcacctcaccccagggcagcccaggtctcacacaggcctgagggtccccaggagggaagccagtgccggrtcctggctcagggatcctggcctgcaggggcggccgtgggggtcagcgtgtggtccacgtcccagtagggactctcgcaacctgcctgggctggccctgc

SEQ ID NO: 437001 - DNA, 201 bp, Homo sapiens
ccccgccccgcccatgctcccaaggctgggcagactcctctcagaagctgctgtgaccactccggccagcagcacccctcccccaacccaagggcaacttycctgaagcccagggcccacgtcggtgggatgggaatggggcgtggggctggggcagagcagggttcctggggcagccctggtatggcgggtgaccctcac

SEQ ID NO: 437002 - DNA, 201 bp, Homo sapiens
cgggcagccagtgagagcacggagcaggaggagggggatgccccccaggaggacttcatccagtacattgcccgggcgggcgacgccgtggccttcccgcrcccccgcccctttctggccagcccgccccctgctctcggcaggtatttttcagtagatggaggtgctaggggtggacctgtgggcccttgccccccttcg

SEQ ID NO: 437003 - DNA, 201 bp, Homo sapiens
cccttcaattctgcaggccttgggtcaggcaggatcctggagacagggctgccttatctgggctcgaggcaggagtttgtgtggggagcagaggtgtcccrtctgtagcactggcagcaggcaccagccctgctcagccagctcagcagggccagggcagcccagaggggctggggcccgctctgccttgtggacagggtg

SEQ ID NO: 437004 - DNA, 201 bp, Homo sapiens
tgtgtctccacaactctgctgctgttgaggcgaggaagcagtcagaggcgctgcatgacgaatgcacgtggctgtgtgccagtaaaacttaccgaagctcsggggcagggggtgcttttgccctctgggctgtagcacatagatccctggactgtttgacagtagcccttcaattctgcaggccttgggtcaggcaggatc

SEQ ID NO: 437005 - DNA, 201 bp, Homo sapiens
accccgacttccggggagaggaccccgagtgccaggatgcggagaccgaacgcttcctgtccaccagctccacgggccgccgggtctccttcaatgaggcrgcgctgtttgagcagagccgcaagacgcaggacaagggtcgccggtaagcggggcggcgttgggaggcaccccagggcctgtctgaggtcctggccgccg

SEQ ID NO: 437006 - DNA, 201 bp, Homo sapiens
ggggcatccaggatgaggtggtaaaggagggtgtcgggggccacctggtcactgtggagcgcagagggtggggcctgtggcctgcatcccctcccagccakgctcggctctcatccctgggaatgtgagtggaaggcgggttcccccggggcccctccctcgcccgctggcagaccatcagctgctgtgtgaccttggccg

SEQ ID NO: 437007 - DNA, 201 bp, Homo sapiens
ccccctagcggctgtggccagagagggtctgggccggtggccacgccctgcgcccacaggccggcagctgcccaagacgcagaggcccctcggagtgtgcstgtggtgagtgcccgggggggcggggcacttacagggtgaccccagccgaccagatgtccaccttgaagccggagaaggtgtccaggccgttggcaatct

SEQ ID NO: 437008 - DNA, 201 bp, Homo sapiens
cagccactgagcgcccctcctcccgcttctgcccctctccgagcaggtacccctctctgtcccagtgatggggggcccttgggactgtctctcagacctasggccacctggggccagcacacgggcccaggaagaagtcttagcctgagcgccatctctgttccctgccagttggatgccggtaccaggagcaccaaggct

SEQ ID NO: 437009 - DNA, 201 bp, Homo sapiens
tccacagtgccagaggggacctgcgtggggaagcaggcggggcgcctgtgtccagagaccctgggctgtgcagcttaaaggggaattgtggccgaggggcsctggctgtgccgccccagaacccccacggaccaagcaacgtgagaggggagtccgtgcccccccggaccccaccccctcctgcgcacgcggcgcacctcg

SEQ ID NO: 437010 - DNA, 201 bp, Homo sapiens
ctatcggagtggtggccccacagcacacaggaacaggcaaggcgcaaggcatagggccttggagggacgtagcagaggaggggacccaggcatgggctggragccaagagcagaagcgccgagactgtgaagctggggaaggagttgaaggaaaccggggtgaatctctggctgcatggacagaggcctgggtacagggca

SEQ ID NO: 437011 - DNA, 201 bp, Homo sapiens
ggggccagcacacgggcccaggaagaagtcttagcctgagcgccatctctgttccctgccagttggatgccggtaccaggagcaccaaggctggagggccyggggctgcagcagggcctggggaggcgggcccgggatccggggcaggtaccgttctgcagttcctcacccgcctgcgccgccatgccagcctggatgggg

SEQ ID NO: 437012 - DNA, 201 bp, Homo sapiens
cttgcagtgagcccagttcgcgccactgcactccagcctggggaacagagcgagactccgtctcaaaaaaaaaaaaaaaaaaaatgtacgtgagccccagrgcccctgagcaggagagaggtgagagcagacacggcaggagccccagggcccctgagcaggaggaaggtgagagcagacaccgcagcagcccctccccgg

SEQ ID NO: 437013 - DNA, 201 bp, Homo sapiens
gtgtccttgccagtccctcgaggcctagcccagcagataaggtcctttcttggaaacaggaggcaaagttttgaaagttaagagggctgggaaaggagcasggcctgggcagggcccgccaggcggcggcaggtgcagcgtgtctggctgcgataaggcagggacacccccggccacccccaccagctgggagaggctcag

SEQ ID NO: 437014 - DNA, 201 bp, Homo sapiens
caggcgaagaaggagacgccacagaaagagacattgtggggtcctgccacacccacccgcctgtcactgccccctctgcagctgccgcccagttggccacscccacctgcctgtcacaagggtggggcacaacaggccagagagcacagccccctctgcagctgccgccctgtcgcagacacttcatttctcccagcacta

SEQ ID NO: 437015 - DNA, 201 bp, Homo sapiens
atggtgccctgcgcagggtgtccttgccagtccctcgaggcctagcccagcagataaggtcctttcttggaaacaggaggcaaagttttgaaagttaagarggctgggaaaggagcacggcctgggcagggcccgccaggcggcggcaggtgcagcgtgtctggctgcgataaggcagggacacccccggccacccccacc

SEQ ID NO: 437016 - DNA, 201 bp, Homo sapiens
ccttcttgcctgtctccaccaagaccctcaggctctgccctaccgttcaggtgctcacctgagctcccaggacctcctccactgactgttcaggaaagcasggggctcactctcacagtcaggcttccaccctccagcgtctgtcttcccattgaccctgcatatacatttgtcaaaactcaagccagatttatttattta

SEQ ID NO: 437017 - DNA, 201 bp, Homo sapiens
cagccacaaaaaccagtgaggctctgactcgagccacagcctagctgcaccttgaggatgtcacagtgagacactaaaggacacacagtgtgtgatgcacttttttttttttttttgagacagggtttccctgtcgcccaggctggagtgcacctcccaggctcaagcgatcctcccatctcagccccgcaagtagctggg

SEQ ID NO: 437018 - DNA, 201 bp, Homo sapiens
cgtacctcctcccttccctagagagaagctgtgagttcacagtgctgtgggaaagggccctgcaggggccacgcgtccaggctcagggcggtagggggtgrgagcacagcgccctctagtctgtcatcggccggcgagggctttggaggacacagttaggacacttttttttttttctgagacagagtcttgctctgtccc

SEQ ID NO: 437019 - DNA, 201 bp, Homo sapiens
acgctcccggcttcaccgggccaggtggaggaacaagagccgagcacacagtcaggcttccgggtctttaatggggcgggggctgggggcagttcatccaraggtggctccgaagctgaggtcaaccttggcggctggctctgcagggcagaggggatggtaagcggcccgtcaggctggggggatcttgagaggcggaag

SEQ ID NO: 437020 - DNA, 201 bp, Homo sapiens
aattcttaacaggaagcccaagcatggagcataaaaaacagctggggggccaggcgcggtgactcacgcctgtaatcccgacactatgggaggccgaggtrgatcacctgaggtcaggagttcgaaaccagcctggccaacatggtgaaaccttgtctctactaaaaatacaaaaattagccgggcgtggtgatgggcgcc

SEQ ID NO: 437021 - DNA, 201 bp, Homo sapiens
ccacggccctcgtgtgccagtctccttcaaggagacgggaagaggagcaggcctcgaggcaggcggacccagggccccagcccctcccacggaggccccgmggtcccaacaccggaaaggatatattttctgcttctcttcgttgtataacacatccaccagctggatgacatttttgtgccgtaacctcctcagtagttg

SEQ ID NO: 437022 - DNA, 201 bp, Homo sapiens
gtcaggcttccgggtctttaatggggcgggggctgggggcagttcatccagaggtggctccgaagctgaggtcaaccttggcggctggctctgcagggcaraggggatggtaagcggcccgtcaggctggggggatcttgagaggcggaaggagagccccatgggtggcagccacagctcaaagctgaggaggagcttccc

SEQ ID NO: 437023 - DNA, 201 bp, Homo sapiens
gcacccaccttgcccctcctcgggaccagggcccaccctgccctcagccacccctctgaaaaggcccaggggccccagcgtcccaggaggaaggagcctayggggaaggggaggacagggctgactcttggggcagcgttcctgcggggctcacgtcccccaccctgcccatgggcgggggatggtgcctcctggacgccc

SEQ ID NO: 437024 - DNA, 201 bp, Homo sapiens
gctgtccagcatttcctgcatgccacacacgcagtactccatcaccatatacgtggggcgctaaggacacacagctcagggggcggccccactcacaggcycagggagcacgggggccagaaaaggggctctggagggaccctctgcacccaccttgcccctcctcgggaccagggcccaccctgccctcagccacccctc

SEQ ID NO: 437025 - DNA, 201 bp, Homo sapiens
ggtccaacatgtccagcgtcacggcctcttcggccaacaactgcaccgaagagtcggcgttcactgcgatggaaccgctgctcactgggggaatggggcgkggggaaggcgtgagaccccaaagggctgcacagcctcagggactcccctggtcaagtccagagccccctgtgaaccaggagctccacaaacatccaagtc

SEQ ID NO: 437026 - DNA, 201 bp, Homo sapiens
ccatgaccagcacgctggccagacaccaggccccgagacggcaccctccacggggatcgctacgtggccaagccacccaaaggccacatggcaaccacgcrcagccacgtgacggtcaccatgactgactagcgcgggctatgctcacggctggctgtggcatccaggcgttgtccccacatgccccacccgggccccgcc

SEQ ID NO: 437027 - DNA, 201 bp, Homo sapiens
ggatcacaaggtcaggagatcgagaccatactggctaacacggtgaaaccccgtctctactaaaaatacaaaaacaaaattagccaggcttggtggcaggmacctgtagttccagcttacttgggaggctgaagcggagcttgcagtgagccaagatcgtgccacagcactccagcctgggggacagagcgagactccgtc

SEQ ID NO: 437028 - DNA, 201 bp, Homo sapiens
gtgcagcaggacaaccctgacagaccctgcaagccagggagcccccgagggtggggctgggggaggcgcagggcagcactgccctctggggtgggagttcrgagggtgaacagggcccagaagcagggtggagctgagggacctggcaaaccaggccctgcggggaggtcggcctctccactcagtcctctcaatgcctgc

SEQ ID NO: 437029 - DNA, 201 bp, Homo sapiens
tgcccgggagggggcgccccagggccccccctagcacgtgcctacctcggccacgcccaggtcggagattttgagggtgccaccggtggtgagcagcaggktccccggcttgatgtccttgtgcacaatgccctggctatgcaggtactccaggccgtcaatcagctgacagaagtacctgcgggcagcacacacccgtcc

SEQ ID NO: 437030 - DNA, 201 bp, Homo sapiens
tccctcccccgcagcctggacagctccaacctgctgagcctcaggtcccctctgacactcacccccaggtccaacatgtccagcgtcacggcctcttcggycaacaactgcaccgaagagtcggcgttcactgcgatggaaccgctgctcactgggggaatggggcggggggaaggcgtgagaccccaaagggctgcacag

SEQ ID NO: 437031 - DNA, 201 bp, Homo sapiens
ccagcaagccatacttacttcttcacgttggcctccccgttggggatccttcgcaacttcttcttcttgaggatcttgacggccctcctgcacagcgtctmcgagtccagcacctccttcaccttgccgtaagagccttcccccagcaggtcccccatcaggtacttgccgatgagcttggcccgcttgcggcgcggctgg

SEQ ID NO: 437032 - DNA, 201 bp, Homo sapiens
accatttctgttctggggatgtcccaaagactgggtattaactcccctttgtcagttaaaagcttattctgtcatgactgaagcaggtcattttcgtaagyagacagactctaggggtgctggtctaaacccttggtctaagaatcatggtgcccaacaaatgatttaatatttatctagataaatgcacgactttgaagc

SEQ ID NO: 437033 - DNA, 201 bp, Homo sapiens
gcaagtggcaataatggctgtgttattgaggacagaaggctgtgttagtgtgcctgactccatctgttcaaaagggtgaatgttatgttggcagctccgcrttctaggcctaaggtttggagggcacagggaatgctgacaggccataatacctgggcaggggggctgccctgatgatgtcatcagaaccatgaccacagg

SEQ ID NO: 437034 - DNA, 201 bp, Homo sapiens
aatgagacaagacaaaaaaacatagagatgaggattaacacaaagcaggatgtagttgggtaaacacagtgaggcaagcaaagggaaatggagggaaccaragcacaaacatgcctacatgccttgttctggaacaggacccaatttactcagttgctctccctgctagccctctaagaaactgcaaacttcagatcctta

SEQ ID NO: 437035 - DNA, 201 bp, Homo sapiens
gcatcttcagaaaaccattctccttcccagagagccatgcctagctgtgtagcccaattccctactcctccaagagcatacatacaagggaaagaatgaaycaagctgtgcttttgattccatttcttaaaattcttaatatacatcaaaatcaaatctcatacctccaacctgggcaaatgaaacagtctcatggatgtt

SEQ ID NO: 437036 - DNA, 201 bp, Homo sapiens
cgactttgaagcagtaattcatatcttcacaccactccaccttgggatacccccctccccataggtatactgatttgacccttggaggcccctgaaaaggkaccaaattctggcatataatattagatttgggggagttacctgggagtctattgggctcccctgccatggtgggcatcaggacatctggggacaggaact

SEQ ID NO: 437037 - DNA, 201 bp, Homo sapiens
accttcactttctccctgcttcttcacctgcactgtatttttgcttagcaaggaggagggtgctctgaatagatggaccctgattctacttacaaaactgkgggaagaaaccggagcttcctccctctctgagacaacggtgccactgagactgcgtgagatgcgacgtaaattctctgcactgtactgctcatcctcccc

SEQ ID NO: 437038 - DNA, 201 bp, Homo sapiens
cagaaccatgaccacagggctacatgtccccccaaggatgggagacagggaagacaaagggtcaggtaatagggataggtggataaaacaaagagtagaarttgggagtatagtagggaacagaggatgagggctcaggtggaggtggggacataaagcatccaggaataaaatgtgaccttaaaatcctaaggaatggct

SEQ ID NO: 437039 - DNA, 201 bp, Homo sapiens
acatacaggcagacacataataccagacttatggttttcccacagacagtatcctcagggtatgggaaagagtaggggaagactcagtagtaatagacacytgaattagatgtattggtaagatagtggccatgtaacaatctcctctaattcaaaagaagcccaatcatagaccttattttcttctgatagccccatatc

SEQ ID NO: 437040 - DNA, 201 bp, Homo sapiens
ttcttctgatagccccatatcaccatgcctctgccttatcatcatccctgtcacatctctccataattccttccccaacacaccaccccaggcccagcacyttagcacctgaggctgctacctgagaagtacgcactgttctggcttcatggagaccatgctccatttctgctgttgaagtctttgagagaccaggatcat

SEQ ID NO: 437041 - DNA, 201 bp, Homo sapiens
attcaaaagaagcccaatcatagaccttattttcttctgatagccccatatcaccatgcctctgccttatcatcatccctgtcacatctctccataattcyttccccaacacaccaccccaggcccagcaccttagcacctgaggctgctacctgagaagtacgcactgttctggcttcatggagaccatgctccatttct

SEQ ID NO: 437042 - DNA, 201 bp, Homo sapiens
accatgcctctgccttatcatcatccctgtcacatctctccataattccttccccaacacaccaccccaggcccagcaccttagcacctgaggctgctacytgagaagtacgcactgttctggcttcatggagaccatgctccatttctgctgttgaagtctttgagagaccaggatcatgggctgagtgcaacctcctcc

SEQ ID NO: 437043 - DNA, 201 bp, Homo sapiens
cagacttggttttcaccatatatgcttttatacctttttatttttgtaccatgtatttaaaatctgtttttacatttttcctgaactgacctagtggacawccttcaatgcactggtactttgtaccctgacctctactgtgatgaacactcaacttgggcaaggaagtgaaattctccaaaggtatgattacctacaaac

SEQ ID NO: 437044 - DNA, 201 bp, Homo sapiens
ggaattaaatagaactgtcttatagatttattaatgaaaaatactttacaaaaacagtatgtttggcctaaaatagttcagctgactctgagggtttacaytgacgactgagcaagtggcaataatggctgtgttattgaggacagaaggctgtgttagtgtgcctgactccatctgttcaaaagggtgaatgttatgttg

SEQ ID NO: 437045 - DNA, 201 bp, Homo sapiens
actctcctaggaaaagaacaatttgccattaaatgaattgaaagtacatgagaacaaatgctaggcaggagagtccaccttttccaaaaaagaatggcagsctgatcagaattgcttaggaatttatgaacgataaattgaatgaaacttactataaattcggctgggtttttttgtttgttttgttttgtttttgagaca

SEQ ID NO: 437046 - DNA, 201 bp, Homo sapiens
gcccagcaccttagcacctgaggctgctacctgagaagtacgcactgttctggcttcatggagaccatgctccatttctgctgttgaagtctttgagagaycaggatcatgggctgagtgcaacctcctccccatgccatctgcagagcctgaagaggaaaacacaaatacaagttgaggccatctcttcccctagggcct

SEQ ID NO: 437047 - DNA, 201 bp, Homo sapiens
agtaatagacacctgaattagatgtattggtaagatagtggccatgtaacaatctcctctaattcaaaagaagcccaatcatagaccttattttcttctgrtagccccatatcaccatgcctctgccttatcatcatccctgtcacatctctccataattccttccccaacacaccaccccaggcccagcaccttagcacc

SEQ ID NO: 437048 - DNA, 201 bp, Homo sapiens
agcaaatgaagggcatattatggtttttcatttaaaaaaaaaaaagaactgaccaactatgcctgccgatgtataaacaaagtgagccagttacttcaagrgaaaccactaatagtatttgctgccaatgataatatttgagctttgaagagaaaattaaaattttgggggttttttgtttttgtttttgtttttctgaga

SEQ ID NO: 437049 - DNA, 201 bp, Homo sapiens
aggcgcacgccgccatgcctggctaattttttctttctttctttctttttttttttttttttgtattttagtagagacggggtttcaccatgttgcccagrctgatcttgaactcctgagctcaggcaatctgcctgcctcggcctcccaaagtgctaggattacagacgtgagccaccacgcccggcctgctcgcagtat

SEQ ID NO: 437050 - DNA, 201 bp, Homo sapiens
ttattaaagtattacaataagcggaaaacctactttgctcacgatgcccttcagcagtgcacagttggtgatactgtgcttctcagagctttacctgttcygcgaacaaagcatgtgaaacatgaactggccgagattgttttcaaagttggaaaaatcataaatccagtgacaggaaagccctgtgcaggaattacctac

SEQ ID NO: 437051 - DNA, 201 bp, Homo sapiens
ctctgcgcgttccatcgagtttctcggccatcgcgcgcctgcgccattgggctgtcagtcagaggcggcgtggagatcgctgggagcggttgcggcgtgcsgggagctgagttatagctgtgacttctgccctgccaggccgcacacaagctggctgacccgggtgagcagtgcggtggggccactcatctgagggaggcg

SEQ ID NO: 437052 - DNA, 201 bp, Homo sapiens
cttttctttaataatacattacttctaaaattggatctggattggtttagattaacttttattaactttttttggattcacaaaaataaaatagcatattktagaaaattttagccttaatttttaagttttgccagttttattttcacacatactttttgtgatggtagtgtgttagctcaaagaaggtgctctgttact

SEQ ID NO: 437053 - DNA, 201 bp, Homo sapiens
ggccagaagaacacttgttagaccaggttttatgagaccagcattacctgatgccaaagcttgacaaagatagagtggcagccctctgtattcacaggtcstacatccgtggattcaactaaccttgaattgaaaatattaaataaatacaaagtaacaatacaacaataaaaataatacaacttaaaaaacaatacagaa

SEQ ID NO: 437054 - DNA, 201 bp, Homo sapiens
ttcattatttacccagtagtcattcaggagcaggttgttcaatttccatgtagttgtgcagttctgagtgagtttcttaatcctgagattgattgccctgkggtctgagacacagtttgttgtcatttgtgttcttttacatttgttcaggagtgtttcacttccaattatgtggtcaattttagaataagtgtgatgtgg

SEQ ID NO: 437055 - DNA, 201 bp, Homo sapiens
tagtgatgtatcttcaaatgggtctgttttctatccattttgccggatattcaacaagccccttcaacttactaacatgtattttttagtttagggagacwttctcgtatttttaacttgattttctccgcttctttatttgtttctctttctggagctcttaatgtttggatgttagaccttttaaatgaatctttttct

SEQ ID NO: 437056 - DNA, 201 bp, Homo sapiens
tagccggagcctgggaggcagaggttgcagtgagccgagatcatgccactgcactccatccaacgcaacagagccatatgctgtctcaaaaaaaaaaaaaactgaaataataaagataaaaatagaaatcaatgaaataggaaacaaaaaatggagaaattaaagccaaaagttgattcttgaatacatcagtcaatttga

SEQ ID NO: 437057 - DNA, 201 bp, Homo sapiens
ccaacatggtgaaaccctgtctctactaaaaatacaaaagtcagctgggcatggtggcacatgcctgtaataccagctacttgggaggctgaggcaggagmattgcttgaacccaggaggtggagtttgcagtgagccgagattgtaccaccgcactccagcctgggcaacagagcgagagtccttctcaaacaaacaaac

SEQ ID NO: 437058 - DNA, 201 bp, Homo sapiens
catctcattgggactggttagacagtgggtgcagcccatggagggtgagcagaagcagggtggggcgtcacctcacccgggaagcccaaggggtcagggarctccctcccctagtcaaggaaagccatgagggactctgccttgaaaaatggtgcattccagctcagatactatgctttttccacggtcttcccaacctgc

SEQ ID NO: 437059 - DNA, 201 bp, Homo sapiens
gggattctcatgtgttatccccacaagtagctggaattacaggcatgagccaccacgcccaggctaatttttgtattgtaagtacagatgggtttcaccaygttggccaggcttgtctcaaattcctggcctcatgtgatccgcctgcctcagcctcccaaagtactgcagttacaggcgtgaggcactgcccccagccat

SEQ ID NO: 437060 - DNA, 201 bp, Homo sapiens
attccttggacccttgctaagtgaccttaagtgcgtaacttctctgtatcatagtttctccatctgtacctacctcatggggttgtgaagttaaatagaayaatactttaaatagcagaacataataagactcaaatggtagctattattattttagaaaaaaagaaaagagcatctctaaaattaagattttcctctgcc

SEQ ID NO: 437061 - DNA, 201 bp, Homo sapiens
agtatagaaattttcacaatattgattctttcaattaatgagcatgggatgtctttccattttttgtgtcctcttcaatttctttcttcactatttcatgkttttcattatagagatcttttacttcttaggtttaatttattcctggatattttttggtagctcttgtaaatgagattgatttcttgatttctttttcag

SEQ ID NO: 437062 - DNA, 201 bp, Homo sapiens
aattggcacttgaaaatctaatttcaaattcttaccctactaatcatattttaatggaaagtttatattgctattttattttattttattttattttatttgagacagggtctcgccatattagtcaggctagagtgcaatggctattcacagatgcaatcattgtgcagtacagccttgagcttttgggctcaagtgatc

SEQ ID NO: 437063 - DNA, 201 bp, Homo sapiens
agtggaaaagtaaaaccttcatatgctatctaatactttgttcacaggcacctgctggcatgataaatagtcacagttatagttccagagcttactttttygacaatccaagacgatatgatagtgatgatgacctgccaagactgggaagttcaagagaaggaaggtagatgtaacaaagccacttagcctgaattacta

SEQ ID NO: 437064 - DNA, 201 bp, Homo sapiens
aaattggcacttgaaaatctaatttcaaattcttaccctactaatcatattttaatggaaagtttatattgctattttattttattttattttattttatttgagacagggtctcgccatattagtcaggctagagtgcaatggctattcacagatgcaatcattgtgcagtacagccttgagcttttgggctcaagtgat

SEQ ID NO: 437065 - DNA, 201 bp, Homo sapiens
taaattggcacttgaaaatctaatttcaaattcttaccctactaatcatattttaatggaaagtttatattgctattttattttattttattttattttatttgagacagggtctcgccatattagtcaggctagagtgcaatggctattcacagatgcaatcattgtgcagtacagccttgagcttttgggctcaagtga

SEQ ID NO: 437066 - DNA, 201 bp, Homo sapiens
ttaaattggcacttgaaaatctaatttcaaattcttaccctactaatcatattttaatggaaagtttatattgctattttattttattttattttattttatttgagacagggtctcgccatattagtcaggctagagtgcaatggctattcacagatgcaatcattgtgcagtacagccttgagcttttgggctcaagtg

SEQ ID NO: 437067 - DNA, 201 bp, Homo sapiens
gcaaatcttggctgtttggacagtgctggctgcaacagacatgggagtgcagatatctctttgatatactgatttcctttcttttgggtatatacccagcrgtgggattgctggattgtatggtagctctgtttttagttttttgaggagcctccaaaccattctccatagtggttgtactaatttacattcccaccaaca

SEQ ID NO: 437068 - DNA, 201 bp, Homo sapiens
tcgtgacaaatgtgtagaatactaaagatgatgatttttatttgttttagggtatgtctctgtgccagactgtcgtcgtgggctctgtagtcattcttctstactcttccagagcttgttataatttggtggtggtcaccatatctcaggatacattagaaagtccatttaattatggctgggataatctttcagataagg

SEQ ID NO: 437069 - DNA, 201 bp, Homo sapiens
acatactgcgatatagaatccaggatattagataaaagtcattaaatttgtagaaaagcattttgttatttgacaaagaacatatttcaatgtatttgagygctaactttattacaaaattcattgaaaatgctaaaaattcaaatgtgacttcttatatcctgatcatagtcctatggtctttttgccttttttttgttg

SEQ ID NO: 437070 - DNA, 201 bp, Homo sapiens
gttggtgctgacaccatataaatgcaacaaaataagccctgccacatctgtacattcattcatttgtaagacaaaaatgtgtttgtagacaaaacattaamttaatctttacattttcagttaaatccttaaatcagtgaatttctgtataattggaaatggcaatgccatggttcttttataaactttccatccagcagg

SEQ ID NO: 437071 - DNA, 201 bp, Homo sapiens
ctaaagcattaattcattaatattaaggcttagtatctaaaagatctaattttttttaatagtagacttctcgtggtagaagggagtggttgttgagggcrccttcacagttttatagaaaaccaagttgttagattggttcaaaggaatcaaattgagtagcccacatttctctcccttcagccatacagctgactaatt

SEQ ID NO: 437072 - DNA, 201 bp, Homo sapiens
tcaaaatacaaccttttaaaactaaaatctttttgctttgcatgtacactaagcagttttgtttgcttgttacagattgcacattaccttcaatttacctygtttaaaccatttccaaaggcagctactttctgatttccactattgaaatgacccaatatatcaggaagccagataaatttcagcatcatatgtatttaa

SEQ ID NO: 437073 - DNA, 201 bp, Homo sapiens
tacgttcgtgcagatagttgttactgctacttgatacacatagcagccttaactgaagagttcttatgaggtagcctaaattttcttagggggaagagatwaaggagttcatgtgcagagttgctcttcatgcacagtaaatatgcaactttttaagaacatgaggtattaatgggtgcttgaagctctacatatactgtc

SEQ ID NO: 437074 - DNA, 201 bp, Homo sapiens
actgctacttgatacacatagcagccttaactgaagagttcttatgaggtagcctaaattttcttagggggaagagattaaggagttcatgtgcagagttkctcttcatgcacagtaaatatgcaactttttaagaacatgaggtattaatgggtgcttgaagctctacatatactgtccctatgttcttctttagtcaag

SEQ ID NO: 437075 - DNA, 201 bp, Homo sapiens
ttgctacaatcagaagttcataaggaatattgtttaaaacatactttaactcttaaaaatttttttttccttttttttttttttttattgatacagtctcrcagtctcacccaggctggagtgcagtggcgctgtcttggctcactgcaacctccatctcctagattcaagtgattcttgtgcctcagcctcctgaatagc

SEQ ID NO: 437076 - DNA, 201 bp, Homo sapiens
aaaacatactttaactcttaaaaatttttttttccttttttttttttttttattgatacagtctcgcagtctcacccaggctggagtgcagtggcgctgtyttggctcactgcaacctccatctcctagattcaagtgattcttgtgcctcagcctcctgaatagctgggactacaggcgtgtgccgccatacccagctaa

SEQ ID NO: 437077 - DNA, 201 bp, Homo sapiens
gttacagtccataatcttttggtaggagcaatggcatctttatttagtataataacatcactatagaattcatacctgttgcttgtctagggataaagcayaaatagatgttgaatttcaagtgcttcttctctagatacctagtgtatttctaagtttggttttttactcgctttgaaatagataatactctgaataaaa

SEQ ID NO: 437078 - DNA, 201 bp, Homo sapiens
ttgaacctgggaggcagaggttgcagtgagccgagatcgcatcactgcactccaccctgggcaacagagtgagacttcgtctcaaaaaaaaaaaaaaaaaagccccactcctagatttctccattggatctagttactcattagaatagagagagttctatgtatactacaagtcacttcatggttccagcctaatttcaa

SEQ ID NO: 437079 - DNA, 201 bp, Homo sapiens
acaataaatatgggagtgcacctgtctctttgacatagtaatttcctttctcttggatatctacccagcagtgagatttctggatcatatggtagttctayttttagtttttcaaggaacttccatactgctttttggggttgtttgtttgtttttgagatggagtcttgctctttcgctgaggctggagtacaagtggcg

SEQ ID NO: 437080 - DNA, 201 bp, Homo sapiens
cttaaacctagatcccctcttctttccaagtgatcacatccactttcgtgacatcatgccacttaaaaacagatgactcacacttatctccgatccttactcacccatactactctgagctggctctgtagattctgcactgatttgacatcttcatggtatctgatgcactcagattcaacatgatctttcttcctcctc

SEQ ID NO: 437081 - DNA, 201 bp, Homo sapiens
ttcttgagacagagtctagctctgtctgtcacccagactctagtgcagtgttgtgatcctggctcactacaacctccacctcccaggttcaagcgattctycagcctcagcctcccatgtagctggaattacaggtgctcaccaccacgcctggctaatttttttgtatttttagtagagatggggttttgccgtgttggc

SEQ ID NO: 437082 - DNA, 201 bp, Homo sapiens
tgccaaggtaatttagtggggaaaagttttgtcaactaataattccaaaataattgaatattcgtatgggaaaaatgaacattgattgttacctcacaccrtagaatgtacttgacatagatcatagacctaactgtaaaagctaaaatttgtagaagacagaagatgttttcttggaggaggcaaaggttttgcagtaaa

SEQ ID NO: 437083 - DNA, 201 bp, Homo sapiens
taatatagaataatattggcctatgcagctaatcctctcaaaggcttttttggaggtgatggaattaatgtagttccaagcaaaagtaaaaaaaaaaaaaatgacgtatattaagtgtttatatttcctgcataaaccaactcttttctcctttaataggaagtagaatgcataattttataatcagtcataatgtcagct

SEQ ID NO: 437084 - DNA, 201 bp, Homo sapiens
tattctgttgatttgggatggagagttctgtagatgtctattaggtctgcttggtgcagagctgaattcaagtcctggatatccttgttaaccttctgtcycgttgatctggctaatattgacagtggggtgttaaagtctccgattattgggagtctaagtctctttgtagatctctaaggacttgctttatgagtctgg

SEQ ID NO: 437085 - DNA, 201 bp, Homo sapiens
tcccctttatcattttttgttgcatctatttgattcttctctcttttcttctttattagtcttgctagcggtctctctattttgttgatctttcaaaaaaycagctcctggattcattgattttttgaagagtttttcatgtctctgtctccctcagttctgctctgatctttgttgtttcttgccttctgctagcttttg

SEQ ID NO: 437086 - DNA, 201 bp, Homo sapiens
tagtttgtaattctgtgggatcggcgatgatatcccctttatcattttttgttgcatctatttgattcttctctcttttcttctttattagtcttgctagyggtctctctattttgttgatctttcaaaaaaccagctcctggattcattgattttttgaagagtttttcatgtctctgtctccctcagttctgctctgat

SEQ ID NO: 437087 - DNA, 201 bp, Homo sapiens
tgaatggtattgcctaggttttcttctagggtttttatggctttaggtcttacatttaagtctttaatacgccttgaattaatttttgtataaggtgtaasgaaaggatccagtttcagctttctgcatatagctagccagttttcccagcaccatttattacatagggaatccttttcccattgcttgtttttgtcaggt

SEQ ID NO: 437088 - DNA, 201 bp, Homo sapiens
ttaagtgtattctactgagtttcagctgtcacctctataggtgactgtaatttccttcttgcattccaaaactcacctattatctttatttctgcctagawgtaatacattttaaatataacaatacatttcgtgacctggcttttaagttttttgtcagtggtgccctcattctatcaattgtttagattcaaaacctga

SEQ ID NO: 437089 - DNA, 201 bp, Homo sapiens
tttttttttaatgagagttgatggtataccatcttggagtgttgtgatgcatgccaaaatcaatgagttcatcttcaacatattgaagttcttactttcartttggtcttaggagtgccagttgcttaatcaggataaagtacagtgacttaattacaatgccaaaacagataggaaaattaaattcaaaatcttaactct

SEQ ID NO: 437090 - DNA, 201 bp, Homo sapiens
agtgtcttccttttcaggactaacatgcctcttctgtctagagccttcctaacaattaaactaactctctcttgctctcgctctcacttgctctctctctygctctgtctctcactgtctctccactctccatcttctacttcgccctctatttagtcaatttctgaccaacagattgctgaatcttcaaccacgaagagt

SEQ ID NO: 437091 - DNA, 201 bp, Homo sapiens
cgcacacacacacacacacacacacacacagatcaatgaaatgaaaagttgattcttggcaaagacaaacaaaattggtaggcaaacaaaagaagagagaggattcaaataagaacaatcagaaactataaagatctgattttatctttaaaatcaggtaaatttaaacttaggggtgcagtggctcaagcatgtaatccc

SEQ ID NO: 437092 - DNA, 201 bp, Homo sapiens
tattcttatattggtaatacttcaaataacatgcaagtcaacttacaggttcatttgattttgttctgttctttgatttcccacaaaagttgaaatcacayttctaccacctaaaatagaaattccttgaggataagaaggaatattttacatatttttatctccagcaactagaacaatgatgattatattattgaatga

SEQ ID NO: 437093 - DNA, 201 bp, Homo sapiens
aacctcaaggagctgtaagaagcagatgcaaagcatctgtggaagaatgtactttaaacccagacttctgacagataaaattccaaaaaacatgggttcasaataaaaaatcacactggggaattgcagatgtcagaattattaaatacatagtacacaataattaatcatttatgaattaaacactgttgaaatacaaaa

SEQ ID NO: 437094 - DNA, 201 bp, Homo sapiens
gcgcacacacacacacacacacacacacacagatcaatgaaatgaaaagttgattcttggcaaagacaaacaaaattggtaggcaaacaaaagaagagagaggattcaaataagaacaatcagaaactataaagatctgattttatctttaaaatcaggtaaatttaaacttaggggtgcagtggctcaagcatgtaatcc

SEQ ID NO: 437095 - DNA, 201 bp, Homo sapiens
gaaaaacagaagtaaaattgtctctatttgtaggtgacacaatttcttaggtcaaaaatcctaatctacagatagctacaggaagtaatatttaagcttayaggatataactttttatatactagcagaaaacaattagaaaaatgaaatataaaaattccacttggcagggcatggtagctcacgcctttaatctcagcg

SEQ ID NO: 437096 - DNA, 201 bp, Homo sapiens
cgcgcgcgcgcacacacacacacacacacacacacacagatcaatgaaatgaaaagttgattcttggcaaagacaaacaaaattggtaggcaaacaaaagaagagagaggattcaaataagaacaatcagaaactataaagatctgattttatctttaaaatcaggtaaatttaaacttaggggtgcagtggctcaagcat

SEQ ID NO: 437097 - DNA, 201 bp, Homo sapiens
tgcgcgcgcgcgcacacacacacacacacacacacacacagatcaatgaaatgaaaagttgattcttggcaaagacaaacaaaattggtaggcaaacaaaagaagagagaggattcaaataagaacaatcagaaactataaagatctgattttatctttaaaatcaggtaaatttaaacttaggggtgcagtggctcaagc

SEQ ID NO: 437098 - DNA, 201 bp, Homo sapiens
ggaaggtagatgtaacaaagccacttagcctgaattactattgaaattgattgaaaaaaacaaatctaagctttaaccaaaatatgaaaaaaggtgatttrgtggtaatatgtcaataaataagatcggcaatactggagtttaaagcagtagatgttaaacccagggtgggacctgcattatcaggaactaccatttgac

SEQ ID NO: 437099 - DNA, 201 bp, Homo sapiens
gaggttgcaatgagccaagatcacaccactgcactccagcctggcgacagagcaagactccgtctcaaaaaatatatgtatattaaaaataaaaaataaartagtgctttcctatggaattttctgtgttaatgaaaatattctttagctgtaccattcagtatgatagctagccaaatgtgacttaaaaagtggctagag

SEQ ID NO: 437100 - DNA, 201 bp, Homo sapiens
accaggcctgccttacaagagcttctgaaggaagcactaaatatggaaaggaacaaccggtagcagccactgcaaaaacataccagattgtaaagaccatygaccctatgaagaaactgcatcgactaacgggcaaaataaccagctagcatcataatgacaggatcacattcacacatagcaatattaaccttaaatgta

SEQ ID NO: 437101 - DNA, 201 bp, Homo sapiens
tccagagcttgttataatttggtggtggtcaccatatctcaggatacattagaaagtccatttaattatggctgggataatctttcagataaggtaaatamctaccacgtattgccagtctaacaatgtgataattaacttaccctcatctagaagaacactgtagtgtttgacttacaaacacatttatggaatctctgt

SEQ ID NO: 437102 - DNA, 201 bp, Homo sapiens
aacaacctgctcctgaatgacaactgggtaaataacaaaatgaaggcagaagtgaataagttctttgaaaccaatgagaataaacacacatcataccagartctctgggacatagctaaagcagtgtttagagggaaatttatagcactaaatgcccacaggagaaagcaggaaagatctaaaattgacaccctaatgtca

SEQ ID NO: 437103 - DNA, 201 bp, Homo sapiens
tcaacccagaatttcatatccagccaaactaagctttgtaagtgaaggagaaataaaatcctttacagacaaccaaatgctgagagagtttgtcaccaccrggcctgccttacaagagcttctgaaggaagcactaaatatggaaaggaacaaccggtagcagccactgcaaaaacataccagattgtaaagaccatcgac

SEQ ID NO: 437104 - DNA, 201 bp, Homo sapiens
aaaggctttcaatttttccccattcaatatagtattagttgtgtgtttgtcatatttagactttatcttgctgaggtatgttctgtaccctatttttttayggcttttatcatgaaaggatgttgaattttactgaatgctttttaagcatctattgaaatgaacatgtggtttttgttcttcattctgttgctgcgatat

SEQ ID NO: 437105 - DNA, 201 bp, Homo sapiens
acttaagattgataacaactttgatcacaaaaagaagagaaaacaaagaacactgtacacattagctccattctcttccccacattttgaacgtttgatgkcacaatttgcatttttatattgcctgtctcttggtaaattgtagtcattatttttaatacttctgtcttttagtcttcttagtaaatatataagtggttt

SEQ ID NO: 437106 - DNA, 201 bp, Homo sapiens
ggctcacacctgtaatcccagcaccttaggaggctgaggcaggtggatcacttgaggtcaggagttcaagaccagcctagccaacatggtgaaaccctgtytctactaaaaatacaaaagtcagctgggcatggtggcacatgcctgtaataccagctacttgggaggctgaggcaggagcattgcttgaacccaggaggt

SEQ ID NO: 437107 - DNA, 201 bp, Homo sapiens
aagaaagcaatagtgacttttgcatagggagattttggtagaaacttcttgggactaaacaagtttagagatgcatttaagaattattcacaaaatgtgtmattctaaattaaaacataaatatattttcaaaagcatttgatttctctgaagcatgatatagctggtcttacctagtgaatcaggattgtcctcaggtaa

SEQ ID NO: 437108 - DNA, 201 bp, Homo sapiens
tcttttgccaacttgtttattcatatattacaaggcaaccttggcagaacaaaatctttctccagctgctatttggcaagttggcaaaaaaaaaaaaaaaacttacacatattaaacacaagcagttctaggaataggaattgaaaagcaagataatcaagagtttatttcaacaggtactcagtgctttgtaggagtgca

SEQ ID NO: 437109 - DNA, 201 bp, Homo sapiens
tatttgttgaaacgagtgaaaatagataccaaaacctctgggatacagcaaaagcaggctgaaagggaagtttatagtgttaaatgtctacataaaaaagwcatttcagattaacactaatgttacacctcaaggaactggaaaaacaagaacaaacaaaacccaaagctagcagaaaagagatcagaactgaatgaaatt

SEQ ID NO: 437110 - DNA, 201 bp, Homo sapiens
gcaagcctgctctttttagtggtgaacttgacttgcgcaatgctagttcatggagatgtcccagaaaatcagttgaagtggactgtgtttgttcgagcatyaattaatgatagcctgtttattctttgtgccatctctttagtgtgttacatatgcaaaattacaaaaatgtcatcagctaatgtctacctcgaatcaaag

SEQ ID NO: 437111 - DNA, 201 bp, Homo sapiens
gggaggctgaggcagacagacagtttgaactcaggattttgagagcagcctgagcaatatgatgaaacctcatctctacaaaaaatacaaaaattagccggtgtggtggtatgcacctgtagtcccagctgctcaggaggctgaagtgggaggatagccggagcctgggaggcagaggttgcagtgagccgagatcatgcc

SEQ ID NO: 437112 - DNA, 201 bp, Homo sapiens
gtttaatttaaatgtaaatactctcatgtggctagtggctattgtgttgaacagtgcagaaagtaaccctgaaaatgaaagggattcatactacattatgytgaaacttagtataaagctacaataattaagacagcgtgctactgacatgagaaagacagattagtagaacagaatgagagcttagaaatcaatctacac

SEQ ID NO: 437113 - DNA, 201 bp, Homo sapiens
gtggaatgcagtaaaaattgtacttgaagggaaaagcacagatttaaataatatattagaacataaggatataaaatgagtgactcaagtttctcccttakaaatggtagtgggagtgtgtggagtaggaaaaagtaagcccaaagtaagtaatagaactgaaatagtccaggcatggtggctttgggaggctgaggcaga

SEQ ID NO: 437114 - DNA, 201 bp, Homo sapiens
ccagctactcaggaaactgaggcaggaggatcacttgagcccagcagctcaagaccagcctgggcagcatagcaagaccctgtctcaaaacaaaacttatrgagaaaaatctagccattatagatatttacccaagagaaatgaaagcatatgttcctataaaaacttgaacatggatgtacataatagctttattcacaa

SEQ ID NO: 437115 - DNA, 201 bp, Homo sapiens
tcagtctacaaaatagttgttgcctatggctcacagtgaccttcatgtcaataagttcattagacatttttcagtcctcattcaaattaacttctcagcascaattgaccccccatatctttccccttatcactggctagcacattgaatagcattctcctaatttttttgttaccttgatagcttctttgtaagctcatg

SEQ ID NO: 437116 - DNA, 201 bp, Homo sapiens
gtgcgcgcgcgcgcacacacacacacacacacacacacacagatcaatgaaatgaaaagttgattcttggcaaagacaaacaaaattggtaggcaaacaaaagaagagagaggattcaaataagaacaatcagaaactataaagatctgattttatctttaaaatcaggtaaatttaaacttaggggtgcagtggctcaag

SEQ ID NO: 437117 - DNA, 201 bp, Homo sapiens
aaggaactggaaaaacaagaacaaacaaaacccaaagctagcagaaaagagatcagaactgaatgaaattgagaccaaacatgcacgcgtgcgcgcgcgcrcacacacacacacacacacacacacacagatcaatgaaatgaaaagttgattcttggcaaagacaaacaaaattggtaggcaaacaaaagaagagagagg

SEQ ID NO: 437118 - DNA, 201 bp, Homo sapiens
ttacacctcaaggaactggaaaaacaagaacaaacaaaacccaaagctagcagaaaagagatcagaactgaatgaaattgagaccaaacatgcacgcgtgygcgcgcgcgcacacacacacacacacacacacacacagatcaatgaaatgaaaagttgattcttggcaaagacaaacaaaattggtaggcaaacaaaaga

SEQ ID NO: 437119 - DNA, 201 bp, Homo sapiens
gtgtctgtataccctggcccccacaggcccattctccacagtgttgccagagttttttggaacaaaaatctattataaaagccccacccaaccaggcacgrtggctcacacccgtaatcccagcactttgggaggccaaggcaggcagatcacgaggtcagcagtttgagaccagcctggccaatatggtgaaaccccatc

SEQ ID NO: 437120 - DNA, 201 bp, Homo sapiens
ggggggcggaggttgcaataagccaaattcgtgccactgcactccagcctgggcgacagagtaagactcctcaaaaaaaaaaaaaaaaaaaaaaaaaaaaaagatacctggaaattaaacatctgctcctgagtgatctatgggtaaacagtgaaatcaaggcagaatcaaaatatttgttgaaacgagtgaaaatagata

SEQ ID NO: 437121 - DNA, 201 bp, Homo sapiens
cactaaatgcccacaggagaaagcaggaaagatctaaaattgacaccctaatgtcacaactaaaaagaactagagagaggccgaggcgggtggatcatgargtcaggagtttgagaccagcctggccaacatagtgaaaccccgtctctactaaaaatataaacaattagctgggtgcagtggcaggcatctgtaatcctg

SEQ ID NO: 437122 - DNA, 201 bp, Homo sapiens
aacagagttatacataacacgttaaaactgatcaaaatttatttaggacccagggatcatcatccttctagaataatatttcaaatttgtaccttctcttytcttacaaaaactcaattacagctaccattttcattagcatattaatcacactctacaatttgtttttccagcctcagtcttctcagagtataaaaaagc

SEQ ID NO: 437123 - DNA, 201 bp, Homo sapiens
aacctagatcccctcttctttccaagtgatcacatccactttcgtgacatcatgccacttaaaaacagatgactcacacttatctccgatccttactcacccatactactctgagctggctctgtagattctgcactgatttgacatcttcatggtatctgatgcactcagattcaacatgatctttcttcctcctctccc

SEQ ID NO: 437124 - DNA, 201 bp, Homo sapiens
agcaccgcatcacacttattctaaaattgaccacgtaattggaagtaaaacattcctcagcaaatgcaaaagaacggaaatcataaacagtcactcagacygcagtgcaatcaaattagaactcaggattaagaaactcactcaaaactgcacaactacatgaaaactgaacaacctgctcctgaatgacaactgggtaaa

SEQ ID NO: 437125 - DNA, 201 bp, Homo sapiens
aaacctagatcccctcttctttccaagtgatcacatccactttcgtgacatcatgccacttaaaaacagatgactcacacttatctccgatccttactcacccatactactctgagctggctctgtagattctgcactgatttgacatcttcatggtatctgatgcactcagattcaacatgatctttcttcctcctctcc

SEQ ID NO: 437126 - DNA, 201 bp, Homo sapiens
aactacatgaaaactgaacaacctgctcctgaatgacaactgggtaaataacaaaatgaaggcagaagtgaataagttctttgaaaccaatgagaataaasacacatcataccagaatctctgggacatagctaaagcagtgtttagagggaaatttatagcactaaatgcccacaggagaaagcaggaaagatctaaaat

SEQ ID NO: 437127 - DNA, 201 bp, Homo sapiens
taaacctagatcccctcttctttccaagtgatcacatccactttcgtgacatcatgccacttaaaaacagatgactcacacttatctccgatccttactcacccatactactctgagctggctctgtagattctgcactgatttgacatcttcatggtatctgatgcactcagattcaacatgatctttcttcctcctctc

SEQ ID NO: 437128 - DNA, 201 bp, Homo sapiens
tttcctgttttttacagcttctagcctgagagaaggtcccatccatggggcagccaaaactggaagagaaatccactgttttactggcttgaaaaatcagragataaaattgtagtcactactgcagatgtaaagtgagtaggaaatctcaggaagaagataccagatagaagaagacccatactcttattataaagtctg

SEQ ID NO: 437129 - DNA, 201 bp, Homo sapiens
cttcagctcaccctccatgggctgcacccactgtccaaccagtcccaatgagatgaaccaggtacctcaattggaaatgcagaaatcacctgtcttctgcrtcaaccttgctaggtgctgcagactggagctgttcctatttggccatcttggaaggaacccatcttatatctccaaatggtgcgtttgtaacaatgcatt

SEQ ID NO: 437130 - DNA, 201 bp, Homo sapiens
ctgtgggaacatgtgccagcatggtcggtggtactgtttttccgggcacagagattaaaccagaatttggtatgatataatattccccaatgcctgttctyctatttttaaaaattatggaacatttatattgattttctatttttggcaaaggttaagactaaaaattattatagattctagcctcctttcttagtggaa

SEQ ID NO: 437131 - DNA, 201 bp, Homo sapiens
atgtgtaattatcatccccaaagggaaagaggaagaacatgaagttggaaaaaatatttgaaaaaataatgacctaaactttccaattttggtgaaagacrtaaattataaatttatgtctttcaagcttagcaaacccaatcaggataaatatgaagaaaattttgtctagggtcattacagttaaagtgctgcaaacta

SEQ ID NO: 437132 - DNA, 201 bp, Homo sapiens
aaagatggaaactggccgggcgcgggggctcacacctgtaatcccagcaccttaggaggctgaggcaggtggatcacttgaggtcaggagttcaagaccagcctagccaacatggtgaaaccctgtctctactaaaaatacaaaagtcagctgggcatggtggcacatgcctgtaataccagctacttgggaggctgaggc

SEQ ID NO: 437133 - DNA, 201 bp, Homo sapiens
taatagatgtttgtgtttagacacagaaaccatgaatggggcagctataaatgcagactattacaggtgtgttgcattggtcacttgtataccacaagcartattgctgtcaatgtcatgattttctgaaatatttgaacaactgataaaattctgaagaaaacaaagcacaaatttccttcaatttacacattctatgtg

SEQ ID NO: 437134 - DNA, 201 bp, Homo sapiens
gaaaagcaagataatcaagagtttatttcaacaggtactcagtgctttgtaggagtgcattgcaagaggtgaccatattgtatgtacatgaatagcttgtygtgacaaatgtgtagaatactaaagatgatgatttttatttgttttagggtatgtctctgtgccagactgtcgtcgtgggctctgtagtcattcttctgt

SEQ ID NO: 437135 - DNA, 201 bp, Homo sapiens
gtaatatgattgctcgagttttgttctttttgctcaggatgtctttggctattctgggtcttttgtggttccatatacattttagggttttttttttttttggtcatttctgtgaagaatctcattggcattttaatagggattgcattgaatctgtagattgctttgggtagtatggacattttaacaatattgattctt

SEQ ID NO: 437136 - DNA, 201 bp, Homo sapiens
catattgtatgtacatgaatagcttgtcgtgacaaatgtgtagaatactaaagatgatgatttttatttgttttagggtatgtctctgtgccagactgtcrtcgtgggctctgtagtcattcttctgtactcttccagagcttgttataatttggtggtggtcaccatatctcaggatacattagaaagtccatttaatta

SEQ ID NO: 437137 - DNA, 201 bp, Homo sapiens
tctttgaagaatgtaattgctattttgacagatatttcattgaatctgtagatcactttgggtagtatagaaattttcacaatattgattctttcaattartgagcatgggatgtctttccattttttgtgtcctcttcaatttctttcttcactatttcatggttttcattatagagatcttttacttcttaggtttaat

SEQ ID NO: 437138 - DNA, 201 bp, Homo sapiens
tcagcactttcttccttcttccctggtttcctgtgatatatgatctttctcaaaacccttattgataacccatctaatgtctcaattcagtggtttcttaragctctaaaacccttcatttctatttgagccacccagtagcatgaccacaccttggatcagctcttaaaaactgagctattctttctgaccaatgtcttc

SEQ ID NO: 437139 - DNA, 201 bp, Homo sapiens
tctgcctgcctcggcctcccaaagttctgagattacaggcatgagccgccatgcctggcctaactcttaaaattaatattttaatcaattaaaatttaatyaatatgaatttagatacagtatattaattttcaggcacattgtaaaagcctgataattcttggattggaaaggttaatgtaaatatgcttaatagttata

SEQ ID NO: 437140 - DNA, 201 bp, Homo sapiens
gtttgaaagcattttttgctacaatcagaagttcataaggaatattgtttaaaacatactttaactcttaaaaatttttttttccttttttttttttttttattgatacagtctcgcagtctcacccaggctggagtgcagtggcgctgtcttggctcactgcaacctccatctcctagattcaagtgattcttgtgcctc

SEQ ID NO: 437141 - DNA, 201 bp, Homo sapiens
tatcagaccatctcattagaaaagtcttttagttttaagaagctgttaatcttacagtacaagtatgtacaagtttctaaaaattacaattttcacttaaragcttacattttatcattggaaataaatgctgccagatgttttcattgaagtgatacactcattttatttatttttgaaaaaaaatatgcccagtagcca

SEQ ID NO: 437142 - DNA, 201 bp, Homo sapiens
atttaaaaattgaaattgacaggttggcaaactcaccaagtggtatacagcttttcacatgtcaatcatacctcaataaagtggtttaaaaagaagacaarttgattccaaaatttgcacgacaatgcagatgatctaaatatttaaagtgtgctgtctgggcagtgcggtggctcacgtctgtaatcccagcactttggg

SEQ ID NO: 437143 - DNA, 201 bp, Homo sapiens
tttctagggagtctaaatctatattgtatgagactcttggttcaggaataaattcaatatattccttaaacttaaaaaactaaattatcttcaatgaaatrtttatagtaaactaatgaacagttcatagtaattagttatattttacagagatttttagtaacaaaagctcacaaatttttcttctcacccataaattta

SEQ ID NO: 437144 - DNA, 201 bp, Homo sapiens
tcacacctgtaatcccagcactttgggaggctgaggtgggcggatcacctgagcacctgagatcaggagttcgagaccagcctggccagcgtggcaaaacygtgtctctactaaaaatagaaaaattagccaggcgtggtggcacgtgcctttagtcccagctactcaggaggctgaggctggagaatctcttgaacctag

SEQ ID NO: 437145 - DNA, 201 bp, Homo sapiens
cacttccaagagtcctctcccagtggagttacacaggatgtgcttaattcattcagcaatgaggtgtaacaacacatgtgagatggtgtctaccacagaaratcattagaaactcagtgcccaagattttttttattgcgagctggccgtgtaggtaccctctacctaacaaataccaaatgtcaagattccaagaaagaa

SEQ ID NO: 437146 - DNA, 201 bp, Homo sapiens
gatggtgtctaccacagaagatcattagaaactcagtgcccaagattttttttattgcgagctggccgtgtaggtaccctctacctaacaaataccaaatrtcaagattccaagaaagaaaacaggtattcagtataaactatattatttgcacaaatgctttaggtaaagtgaagcacagctcatcatttaaggaatggt

SEQ ID NO: 437147 - DNA, 201 bp, Homo sapiens
ctggattggtttagattaacttttattaactttttttggattcacaaaaataaaatagcatattgtagaaaattttagccttaatttttaagttttgccagttttattttcacacatactttttgtgatggtagtgtgttagctcaaagaaggtgctctgttactatcccagcatctttcagggtatcttttatcttttag

SEQ ID NO: 437148 - DNA, 201 bp, Homo sapiens
tgttagagaaaataaactctcaactgttaaattcagaagtttagttgccagaaagatgacctgaaggatgtgcattccatttacccacctattccattttwtgctcagcccaatccagatcattgaagttttgtaccaagactgcattgtatcctgggtagagtcgtcttttctgacctccactttgacaccatactttgg

SEQ ID NO: 437149 - DNA, 201 bp, Homo sapiens
cacttaactgtatttggaactcagtgtaaatgtaaatataattttataccctgcttttccccttatactagtaaaggattttctcatgctattaaaaattmtttttaaggctgcataacatttcatcatataccaaaattaattcttatcctactgataggcctttaagtggttttcaaaaaagaatgtcagcctccataa

SEQ ID NO: 437150 - DNA, 201 bp, Homo sapiens
cttctcaaaaaaaaaaaaaaaaaagttgttaaccatatgatagacatagaaggtgaacatctggccgggtgcagtggctcatgcttgtaatcccagcacaytgggaggccgaggcaggcagatcacctgaggtcaggagttcaacacaggccagccaacatggtgagatgccttctctactaaaaaaaaaaaaaaaaatag

SEQ ID NO: 437151 - DNA, 201 bp, Homo sapiens
acctttattttttttctcatccagctcaactccctgtcacacccattatcccaagacctgtaattttatggattatccctctcaccctgtaccgattcttktcttcacatgatccttttaaatgccttcactgaaatctagctcttctcagatgacatctcatgtcttttgtgggaaaaatgatcagcctattttatactt

SEQ ID NO: 437152 - DNA, 201 bp, Homo sapiens
ttatacaaagcctccatgatttgatgactgcttgcctccagcttcaacttctgctgtttcccacactatcccacacaccaccaccacacgaaaacactttmtttgaccttaattcactgctcatttattcaaacactgtctgaaaacctactgtgaactaggcattatggtaggtattgggctctatatctgagtaagtta

SEQ ID NO: 437153 - DNA, 201 bp, Homo sapiens
taaaatgaacctccaactccatttcataccatacacaaaaattaattcaaaatggaacatagacctaaatgtaaatgaaacaagtgaaaagcttccaaaaraaaacagggtagttgcagcagatttcttagaggggcaataaaaagtaaccatgaaaaaaataagttgataaattagaaataattaaaatttaaaatttct

SEQ ID NO: 437154 - DNA, 201 bp, Homo sapiens
taaagcaagcgacatttcttctttcttccgtgggatattctgttgctccttctgatacattctgctcctttttcccccaccattattagatctatttcctytggtgaatctggtgctgcctctgtctttacaaaaagcaattctgctgtcttcctagctcaaaaagcatgaatggttttatgaaaaatcagtaatatacaa

SEQ ID NO: 437155 - DNA, 201 bp, Homo sapiens
atcactcatggctaaagcagcaacaaaagcaatgtctttttgctgtgagtctcaaagcccccaaattcatagggcagcactgtgagaggatgttacctgcrcatgcagtggggaatgctacaggagagaaaaccctgaaataaaaacagagacagagatagacatttattctagagtgtaagcaaatcttcaccagggaga

SEQ ID NO: 437156 - DNA, 201 bp, Homo sapiens
taacatcatagccattgtaacgtcatagcacaatgcattactcacatgtttatggtgatgctagtgtaaacaaagctgtgctgccaggggtataaaagtgyagcacatacaattatgtacagtatataacactggataataaatgattatgttactggtttatgtatttactattattttagaatggctttctacttatta

SEQ ID NO: 437157 - DNA, 201 bp, Homo sapiens
cacctgccttttgtaaggctttataaaagaagaaagtttactaaatatgatatatcctcattatctttgtgttcacttttggtacctcatttcgctttacwaattcatttcattactgaagaaaatagtctttggagaatactcagccatattcatatttaagcaagaagttccattttagaataaaacatgactaatata

SEQ ID NO: 437158 - DNA, 201 bp, Homo sapiens
gatgctcaaggttattagttattaggaaaacaaaaattacactcacgttgaactaccactagacattgattagcaggactaaaatttaaaagactaaccayaccaactattggccaaaatgtggattaattggaactcctacactgatgataggaatgtgaagttttacaaccactttggaaaacagtttagcagttgtta

SEQ ID NO: 437159 - DNA, 201 bp, Homo sapiens
agataaaagtcattaaatttgtagaaaagcattttgttatttgacaaagaacatatttcaatgtatttgagtgctaactttattacaaaattcattgaaartgctaaaaattcaaatgtgacttcttatatcctgatcatagtcctatggtctttttgccttttttttgttgcagtttaccaaattcgcaaagtttgggct

SEQ ID NO: 437160 - DNA, 201 bp, Homo sapiens
gctctgttttattaatttatcttgaatcactgatatcctttcttccacttgattgaatcggctattgaagcttgtgcatgcatcacgaagttctcatgctrtggttttcagctccatcaggtcatttaaggtcttctctacactgtttattctagttagccattcgcctgaccttttttcaaggttttttgctttcttgca

SEQ ID NO: 437161 - DNA, 201 bp, Homo sapiens
ctctccactctccatcttctacttcgccctctatttagtcaatttctgaccaacagattgctgaatcttcaaccacgaagagtcttttaccctactttaawtttaacagattagcctgctgttgttttatgtacacaagaccaaggccaggtatggtggctcacgcctgtaatcccagcactttgggaggccaaggcgggt

SEQ ID NO: 437162 - DNA, 201 bp, Homo sapiens
gttctattccactggtctgtgtgtctgtttttatgccagtaccatgctgttttggatactatagctttgcagtataatttaaaatcaaatattgtgatgcytccaacttcattctttttacttaggattgctttagctattcagggtcttttgtggttccatataattttaggacttttcttctatttctttgaagaatgt

SEQ ID NO: 437163 - DNA, 201 bp, Homo sapiens
tctagatttaggtgccagctgttcacaagatcatctggaaaaatcaactacccagcacctgaagtccttggggctcaggcaaagggcttcatttttcttasaggagaaagccacccattctacaaggagctgtactaggcacagccccccatgctgggaaaaggaaaattcctctccttggccagcttattaaactcctgg

SEQ ID NO: 437164 - DNA, 201 bp, Homo sapiens
ttcaccccccttttcatcttaaaggtagcaaatcctaggtcactattacagatggtggtctaggtgaacattgggaaagtcatcttgcttcccaggcctcrgtttcctcattggtaaaatgaaataaggaaaggagcccacagttaaaagctggagtaaaggtctctagatccttctttaacttcaatttaataaaaattt

SEQ ID NO: 437165 - DNA, 201 bp, Homo sapiens
ttttgtgtcagtcactggggacagagagatgacatggtgagttactgtcctcaagacacggcagtgtaggggtgcggaacaggatatataaatgaaaaatyagtgagagtgcaactcgatatgcacaagacacagaggctgtaaaatgagacatattggatagtaaataaggagctgggaaggatgtgctggcaggagagc

SEQ ID NO: 437166 - DNA, 201 bp, Homo sapiens
gggagtctgcattccagtgtgggagcattagtctcccttgttataattttttattattttaagcacaaggacacagctttatcagtggaggagcacacagkcttttggtgtgaaacagtctagatttaggtgccagctgttcacaagatcatctggaaaaatcaactacccagcacctgaagtccttggggctcaggcaaa

SEQ ID NO: 437167 - DNA, 201 bp, Homo sapiens
cctctctccattctaacagatgagtttacttgtgtttcatccttccatccatccatccctccatcagcccatgtgtctattttgtgtcagtcactggggayagagagatgacatggtgagttactgtcctcaagacacggcagtgtaggggtgcggaacaggatatataaatgaaaaatcagtgagagtgcaactcgatat

SEQ ID NO: 437168 - DNA, 201 bp, Homo sapiens
tgcctgggtgttctgataccatctgtgtatggctggccttccccaggccccaagactgtgactcattaagagcagagactctgggaagttcacccctcagytgagtagacatgttccaggcatagtgctcaatgctggggagacagatatgagagaggtagagatgcttacacattccaacaccatttaagggtgaaggtg

SEQ ID NO: 437169 - DNA, 201 bp, Homo sapiens
tgaagaggacaatatagtaatgaactgaggtcagccaacagtcaaatgggaactgaggctctcagtccaataatcttcgaggaagtaagttttccaacacytatgtaagtgagcttgaaagtagatatttccccagttgagttttctgatgaaattggaattttgtgccaatcaagaactcttcgtactccaacgtttaag

SEQ ID NO: 437170 - DNA, 201 bp, Homo sapiens
aactctttaggaccaattagggaccccctttctttcttggggattacagtaagtataatacataaggctcaaatcctctcctcccccagaattatggaggyaaagggcagtgcaaggtgcatcaggctttgtctgctcctggcaggccacctttcacacaactactccaaatagggaagacaatatcataagtaagagcca

SEQ ID NO: 437171 - DNA, 201 bp, Homo sapiens
agaactctttaggaccaattagggaccccctttctttcttggggattacagtaagtataatacataaggctcaaatcctctcctcccccagaattatggargcaaagggcagtgcaaggtgcatcaggctttgtctgctcctggcaggccacctttcacacaactactccaaatagggaagacaatatcataagtaagagc

SEQ ID NO: 437172 - DNA, 201 bp, Homo sapiens
tgtaattttgtagaaactccctgggtgattttaatgggcaaagagggtgagaactctttaggaccaattagggaccccctttctttcttggggattacagkaagtataatacataaggctcaaatcctctcctcccccagaattatggaggcaaagggcagtgcaaggtgcatcaggctttgtctgctcctggcaggccac

SEQ ID NO: 437173 - DNA, 201 bp, Homo sapiens
ctgggaaaccactttctcaagcgccttcagcttcacgcaaacaaataagcacatggaggcttgtgttattatgaagtttagctgcagaagtgtgcaggtgycagaggatgcaaatcaacttacttttttacagcccaatgtcactggcaacagaccttagaaatgagccataaccttcatttctcaggaaggtaaacagac

SEQ ID NO: 437174 - DNA, 201 bp, Homo sapiens
agcaattagttgaagtgaagcctaagtacctgtaattttgtagaaactccctgggtgattttaatgggcaaagagggtgagaactctttaggaccaattarggaccccctttctttcttggggattacagtaagtataatacataaggctcaaatcctctcctcccccagaattatggaggcaaagggcagtgcaaggtgc

SEQ ID NO: 437175 - DNA, 201 bp, Homo sapiens
ttcaaacattgttgagtgtttgactaaataaagtgtttatgtctcatacgtctttttattaccgtaagaatttgcacatatgacataataggaacttaacrcatgtttattgaataaaggaatggaaggatgagtgaacaatcaaggactctagaatgtcttagtgcttttgaaagttagtgcttgtggactaatacaaag

SEQ ID NO: 437176 - DNA, 201 bp, Homo sapiens
cgcgatcctcaacttcccagaccaagagattctcctaccccagtctcaggagtgtctaggacaacaggtatgcaccaccatggctggctaggcttttaatwaatttttaattctgtagagatggggtctccctatgttgcccagggtggtcttgaaatcttagactcaagtgatcctcctgccttggcctcccagagtgct

SEQ ID NO: 437177 - DNA, 201 bp, Homo sapiens
tcaaccatttcctccggagtctgacaatgatggtatggtagccagcctctaagttgagtccagtgatctctgcttcctggtattcattcccttgtgtgtgkgctgaacctagtaacttgcttttaatcagtataatcggacaaaaatgatggaatgttgcttccatgattaggttagaaaagatcatgacttccatcttct

SEQ ID NO: 437178 - DNA, 201 bp, Homo sapiens
catcatctctcttgttataacagcctcttaatgggcctcctgcttctagccgcactccctacagcctattctcagtacttttaaaaacagaataaaccttwaaaaaagaaaaaaaaaggcatatctcagcactctactactcacaaccccatgactcttcatctcattcaagaaaaatctaaagtgcttaacatgacctac

SEQ ID NO: 437179 - DNA, 201 bp, Homo sapiens
gtttcaccatgttagtcaggctagtttccaactctagacctcaaatgatcatccctccttagcctcccaaagttctaggattacagccgtgagtcaccacrcccggccaaaaatttgtatcttaagagctttatcttaactccagcaagatgtcttacctaggactcaacaggtttttgttgttgttttatgatatttctc

SEQ ID NO: 437180 - DNA, 201 bp, Homo sapiens
taaacaattttttgtagagacagagtctcgctgtgtttcccaagctggtctcaaactcctggcctcaagcaatcttcccacctcagcttcccaaagtgccrgaattacaggcatgagccgctgcatctggccactgtgtgtgtgtgtgtgtgtgtgtgtgtgtgtgtgtgtaaatatatatatttttaaaacctttttatt

SEQ ID NO: 437181 - DNA, 201 bp, Homo sapiens
tatctccctgttttaagtagtttctatcttatctggaagtcacaggctctgaaacttaggttctgtgttattcatgttcagttccactcctcatacatttmtgaacctccttaagagtgcacctaggtaaagtgtccccactgtttccagggatttaagtttttgtaactcatcaaaaataatttctgaacaaataagata

SEQ ID NO: 437182 - DNA, 201 bp, Homo sapiens
gacaacatggtgaaaccttgtctctactaaaaatacaaaaattagccaggcttggtggcaggtgcctgtaatcccagctactcgggaggctgaggcaggaraattgcttgaacccaggaggcggaggttgtggtgagccaagatcacaccactgcactccagcctgggtgacagagtgagactgcaagtcaaaaaaaaatt

SEQ ID NO: 437183 - DNA, 201 bp, Homo sapiens
tttttttcctgaactttctgagagtaagttgcagacataatgcctatttaccccaaatgaacatttttagaattatgacagcccatttgggtctagatctyctggagaaataccttagagtatatttttttaagatacttcagtgtgtatttcctaaatatacaaggacattctctaatgtaactgcaatataatgaccaa

SEQ ID NO: 437184 - DNA, 201 bp, Homo sapiens
cgttctcttctggccagtaattgggctctgcggctcctcgcgattttaccagttcccatccgtttagcaaacgcctttagcaaacgcccgtttagcaaacrcctcctccgtcctttggaggagggcggggctaaaagggagatgctgcctagtgattcgttgtggcgcattagtaacgcgactacagggggctggaaacag

SEQ ID NO: 437185 - DNA, 201 bp, Homo sapiens
ttcttccaatctcagccccttctttgagggtccttgaatttaccaaaaagtttcctcacttagggtttttatgctgttgcctcttcttgggatattctctyccatgccctcaaagcttcgtttaggtagaccagtgaactttaattgatatttccctgtgaatggattttttacccatgcatgattttgtaacatcacgca

SEQ ID NO: 437186 - DNA, 201 bp, Homo sapiens
gagtaaaaatcagtggaagaaaaaatattagagtgccaaaggtttatagtaggtttacctacaaacttgtcaccctgtcaaaagctctccaagagacttcrttaataaatttcttattcttatgctttgtttttcatgagggcaatttctatagtagagaagtagccattcatagtgaataatgtgtcaattattgagata

SEQ ID NO: 437187 - DNA, 201 bp, Homo sapiens
ggtgggaatgtaaattaggatagccattatagaaaacagtatagaggttcctcaaaaactaaacatagaactattgcatgatctagtaattcctctactgrgtatgtatccaaaggaaaggaaatcactgtatccaagaaatagctgcattctcatgtttatcttggcactattcacaataaccaagatacggaatcaacc

SEQ ID NO: 437188 - DNA, 201 bp, Homo sapiens
cagtctttgattggttgctgagaggcggggctactcgactgctctggaggtagcggccgcggtgaggagagccatgggacgggcagtcaaggtgacagggyccgggaaggggtgggtacgatgccgtcggggagggtatgttcgcgtccttgagaaaactgtctggagtctctggaggctggggctcctgaccctttatgg

SEQ ID NO: 437189 - DNA, 201 bp, Homo sapiens
agaaattagctagagaagagaaaaaagcattctagaaaaggcaactagcacatggaaagtccttgaagtggggatttggttggaaaacttggatacaaatrgaattaagtaggattcattccaaaaacacttttggtagagcctacaatatatagaaggcacttatgctacatgtgggaagatacaaaggtgaccagtcca

SEQ ID NO: 437190 - DNA, 201 bp, Homo sapiens
agctctccaagagacttcattaataaatttcttattcttatgctttgtttttcatgagggcaatttctatagtagagaagtagccattcatagtgaataaygtgtcaattattgagataggaattatagattacaaaagcgaataactatatgtatttttctctttgtagcagccagaataaagataaatgaagaattcaa

SEQ ID NO: 437191 - DNA, 201 bp, Homo sapiens
gtttaaagaggaaatagtggcccttgatcaaactatttaatatggccttagtagaattagctgtatttagacaaagttagactttagtgtgaaatgtaatmggtggctacattctcatcgttttaattaatgaaacttaaatggcttctcttcttccacatgtcctgtccttgacaagatgggcagtatcacaaaaggtcc

SEQ ID NO: 437192 - DNA, 201 bp, Homo sapiens
atttgttatatacaaatgtatattttgtactttctgcaactgaaaaatattaagattttagtaattttaaaataattgctttgttattagagggttgatasagtcttggcactaaaaggaatctcaggcatcctctctagaccagcagttctcaaacgtggtcatctcaaagaacctttacactcttacaaattgaggacc

SEQ ID NO: 437193 - DNA, 201 bp, Homo sapiens
tactaagtgaccacaggtggacagtgtatacaatatggatatgctggacaaataaatgattcacatcccagacaggctggagcagatggcatgagatttcwtcatgctactcagagtgacatgtgattaaaaacttatacattatttattttgggaattttctatttaatattttcagaccacagttgaccacggataact

SEQ ID NO: 437194 - DNA, 201 bp, Homo sapiens
tacggaatcaacctaagaatccagtgacagttgattaaaaaaaatgtggtgcatacacacacacacacacacacacacacacacacacacacacacacacacaatgcaatattattcagccataaaaacaaggaaatcttgtcatttgtgacaacatacatgaacctggaagacattatgttaagtgaaataagccaggca

SEQ ID NO: 437195 - DNA, 201 bp, Homo sapiens
atacggaatcaacctaagaatccagtgacagttgattaaaaaaaatgtggtgcatacacacacacacacacacacacacacacacacacacacacacacacacaatgcaatattattcagccataaaaacaaggaaatcttgtcatttgtgacaacatacatgaacctggaagacattatgttaagtgaaataagccaggc

SEQ ID NO: 437196 - DNA, 201 bp, Homo sapiens
gatacggaatcaacctaagaatccagtgacagttgattaaaaaaaatgtggtgcatacacacacacacacacacacacacacacacacacacacacacacacacaatgcaatattattcagccataaaaacaaggaaatcttgtcatttgtgacaacatacatgaacctggaagacattatgttaagtgaaataagccagg

SEQ ID NO: 437197 - DNA, 201 bp, Homo sapiens
agatacggaatcaacctaagaatccagtgacagttgattaaaaaaaatgtggtgcatacacacacacacacacacacacacacacacacacacacacacacacacaatgcaatattattcagccataaaaacaaggaaatcttgtcatttgtgacaacatacatgaacctggaagacattatgttaagtgaaataagccag

SEQ ID NO: 437198 - DNA, 201 bp, Homo sapiens
caagatacggaatcaacctaagaatccagtgacagttgattaaaaaaaatgtggtgcatacacacacacacacacacacacacacacacacacacacacacacacacaatgcaatattattcagccataaaaacaaggaaatcttgtcatttgtgacaacatacatgaacctggaagacattatgttaagtgaaataagcc

SEQ ID NO: 437199 - DNA, 201 bp, Homo sapiens; identical to SEQ ID NO: 258711

SEQ ID NO: 437200 - DNA, 201 bp, Homo sapiens
aatgttggggagaatgtagaactgtcagtgattgctggtgggggtataaaatagtacaactactctggaaaatgtttggcagcaattccacttctatgtayttatcccagagaaatgaaaatatatacctacaaaagtcatatgtaagaatgttcatggccacttgattgagaataaccaaaaactgtaaaagcccagtgt

SEQ ID NO: 437201 - DNA, 201 bp, Homo sapiens
tgtatgcttagagattggttattgtgtccaagagtctaatggtggttcagatccagatctgaatcatggacgaaaaactgttaaagaaaaataagagatartagttaaaatggtaaaaacagattttattcaggaaaagctgcaatagaagaagggattccagtatagaactgggcttaattccatatagagagcatgcac

SEQ ID NO: 437202 - DNA, 201 bp, Homo sapiens
aaaagctaaaacattacaatttctaaaggacaacataaaaatatctttgcaatttatcttaggacacagagagcactaccattaaaaagttgataaattgkacttcatcaaaaataaaaacacctgctcatcagaagataacgtcaagtagataagcctttgttacaattatatttgacaaaaggcttgtgtccagaatat

SEQ ID NO: 437203 - DNA, 201 bp, Homo sapiens
ccaaaataatcttgaaaatgaacaaagtaggactcacttacctttgaaagttactctaaagctattgtaatcaagactgtgttattggcaaaaggacagayatatagatcaatgggatccagttggatctgatccagtcagatccagttccaaaaatagaactacacatatgtggtcaaatttgatgaggatgctgacgtg

SEQ ID NO: 437204 - DNA, 201 bp, Homo sapiens
gaaagcttagtaagatccaagtttcatttatttttatttttttcttgtttccagtaggcttggaagagtccaaattttagacatgtatacaaaggcagtamatgaattggaaagaagagggaagttaatacttctagcttttctcttttagagagattagctttctattattttaacagaatagcttaccaaaatgttctt

SEQ ID NO: 437205 - DNA, 201 bp, Homo sapiens
tgaaagcttagtaagatccaagtttcatttatttttatttttttcttgtttccagtaggcttggaagagtccaaattttagacatgtatacaaaggcagtrcatgaattggaaagaagagggaagttaatacttctagcttttctcttttagagagattagctttctattattttaacagaatagcttaccaaaatgttct

SEQ ID NO: 437206 - DNA, 201 bp, Homo sapiens
ctcccaaagtactggtgtgagccaccatgcccggccttcctacctcttttcatacccaatgcttagaggttttcctttgagttgtggatatgaagacctakaaagtatttgctaaaaaatatctccaagtaaatacagtctctgtacaatatttcttgaatttgtaaatttgaaaaccagagatgacaatttgtttggtaa

SEQ ID NO: 437207 - DNA, 201 bp, Homo sapiens
tgatccacccgcctcggcctcccaaagtactggtgtgagccaccatgcccggccttcctacctcttttcatacccaatgcttagaggttttcctttgagtygtggatatgaagacctataaagtatttgctaaaaaatatctccaagtaaatacagtctctgtacaatatttcttgaatttgtaaatttgaaaaccagaga

SEQ ID NO: 437208 - DNA, 201 bp, Homo sapiens
aagatcacaccactgcactccagcttgggtgacagagtaagactctgtctcaaaaaaaaaaaaaaaaaaaaataggagtaatatttagtctgtgttttttyccttgtagaaaagactttattctaaggaagaccatgcaatgcactgtccatgtcagcaaagagatgtttataccatagtgtttgaatagatttgggcata

SEQ ID NO: 437209 - DNA, 201 bp, Homo sapiens
agggattagcaactctgttagaaactggcgccacagaccaaatattagaacaaaagatgcacctagcatccctcttgctcaggaaattacaagagttttgrgaactctctgcgaggaaccagggtcagggatcaaatacacatttcttattgtatcacaatatcacatccaggtgcccatcagcaagagcctagacaagca

SEQ ID NO: 437210 - DNA, 201 bp, Homo sapiens
atacctaacttttgaaagtattattctcatttaaaagctttttttaaaacaaaactcaaggagtaaacatcaagaaaatagcaacaacaaaatctcattarttttatcacactaggaatctcgccagataagccatgtttggcaacaccaggtttatatgactcactctctcggagactgcattctttaatttggttgctc

SEQ ID NO: 437211 - DNA, 201 bp, Homo sapiens
ttatgtttatcacagcactattcacaatagcaaagatatgaaatcaacccaggtacccatcaaaggtgaattagataaagaaaatatggtacatatacacsaaggaatactacacagccataaaaagaacaaaatcatgtcctttgcagcagcatggatgcagctggaggtcgttaacctaagtgaattaacacaggaaca

SEQ ID NO: 437212 - DNA, 201 bp, Homo sapiens
aaggaaggagtagtttttatttctcaaatctgcttttgtaatatctctcctattgattattccctcaagtattgccactattgccaatttttaaaacttgytttagattaatgaagattttggaaagacatatatctaaatcccctcatatataaaaatagtctaacttaaaccacacttaaatcaacaaaataaaaaggc

SEQ ID NO: 437213 - DNA, 201 bp, Homo sapiens
aggagtagtttttatttctcaaatctgcttttgtaatatctctcctattgattattccctcaagtattgccactattgccaatttttaaaacttgttttasattaatgaagattttggaaagacatatatctaaatcccctcatatataaaaatagtctaacttaaaccacacttaaatcaacaaaataaaaaggctgttt

SEQ ID NO: 437214 - DNA, 201 bp, Homo sapiens
cagtcaggggcttacagataaaatccccatctccctgggatggagcacatgggagaaggggcagctgtgggtgcagcttcagcagacttaaacgttcctgmctgccagctctaaagagaccagcagatctcccagcatagcattcgagctctgttaagggactgcctcctcaagtgggtccctgaccaccatgtctcctga

SEQ ID NO: 437215 - DNA, 201 bp, Homo sapiens
gttaataaaaaaagattaattatctctgaaaaaaaaggcagcagccccagtcaggggcttacagataaaatccccatctccctgggatggagcacatgggrgaaggggcagctgtgggtgcagcttcagcagacttaaacgttcctgactgccagctctaaagagaccagcagatctcccagcatagcattcgagctctgt

SEQ ID NO: 437216 - DNA, 201 bp, Homo sapiens
gttgttatgccagatgagtgtcacctagtagtggaattagaaaatcatcaaccaagggcccgacatagtggctcacatctgcaatcccagggctttagtargccaaggtgggaggattgcttgagcccaggagtttgagaccagcctgggcaacatagcaagaccttgtctggtgacacacacctgtagtcctagtcaccc

SEQ ID NO: 437217 - DNA, 201 bp, Homo sapiens
tgtgttgtctctgatttctttcagcagcgttttgtagttcttcttgtagagacctttcacttccttgcttagatgtattcctaaatattttatttatttawtttttggtggctactgtaaacagaattgtgtttttgatttggctctcagcttgaacattgttggtatgtagaaatgctactgatttttaaggctggtcgt

SEQ ID NO: 437218 - DNA, 201 bp, Homo sapiens
tggcgtgaacccgggaggcggagcttgcagtgagccgagatcgccccactgcactccagcctgggcgacagacagagcgagactccatctcaaaaaaaaawaaaataaaataaaaaacccaagaacgtgtcttcatactcctagcctactgccattcccaatgccccatgctgtaagacatgttggaaaaagaaataacat

SEQ ID NO: 437219 - DNA, 201 bp, Homo sapiens
taatgatattgattcttccaatccatgagcatggaatgtttttctgtttgtgttgtctctgatttctttcagcagcgttttgtagttcttcttgtagagayctttcacttccttgcttagatgtattcctaaatattttatttatttattttttggtggctactgtaaacagaattgtgtttttgatttggctctcagctt

SEQ ID NO: 437220 - DNA, 201 bp, Homo sapiens
ggtagtttgatagaaatagcattgaatctgtacattacttagggtggtatggccattttaatgatattgattcttccaatccatgagcatggaatgttttyctgtttgtgttgtctctgatttctttcagcagcgttttgtagttcttcttgtagagacctttcacttccttgcttagatgtattcctaaatattttattt

SEQ ID NO: 437221 - DNA, 201 bp, Homo sapiens
gaatagttgttttcttattctgtgaaaaatgacattggtagtttgatagaaatagcattgaatctgtacattacttagggtggtatggccattttaatgayattgattcttccaatccatgagcatggaatgtttttctgtttgtgttgtctctgatttctttcagcagcgttttgtagttcttcttgtagagacctttca

SEQ ID NO: 437222 - DNA, 201 bp, Homo sapiens
tattagctaacattttaatggtccaaataaatatgtttctttgatgcagagatcagttttgattatttgtgatgctttcttcactgcttttttattttatkctaatttaaaaaatatgataaactataacctgtcagatagaaaggagtaaatggtgttaacctctttaggcttaagaatactgggaaatgcttgacaaag

SEQ ID NO: 437223 - DNA, 201 bp, Homo sapiens
ggtaaagcttgttcatatagtttcctctggtatcatctccacataataagaatctgaagttatcttcactgatcaacctttgttctcactggtaaaaggtrggcaggatgacttttgtctttgtaaatctgtgttttgcttttaggcagatagagggagggcagagagctttcctgaatctgcttcttcttaaattgcctt

SEQ ID NO: 437224 - DNA, 201 bp, Homo sapiens
tggcagataaagaccagttggtaaagcttgttcatatagtttcctctggtatcatctccacataataagaatctgaagttatcttcactgatcaacctttkttctcactggtaaaaggtgggcaggatgacttttgtctttgtaaatctgtgttttgcttttaggcagatagagggagggcagagagctttcctgaatctg

SEQ ID NO: 437225 - DNA, 201 bp, Homo sapiens
agctaacattttaatggtccaaataaatatgtttctttgatgcagagatcagttttgattatttgtgatgctttcttcactgcttttttattttatgctartttaaaaaatatgataaactataacctgtcagatagaaaggagtaaatggtgttaacctctttaggcttaagaatactgggaaatgcttgacaaagaatg

SEQ ID NO: 437226 - DNA, 201 bp, Homo sapiens
ggtacagctatcattgttttctttttgaattagttctcattttgaaatcagaaaattgtgtgggcattcatgtgtctattgtggtaaatatgaaaataaaygccagaaaatggtttagtagataggggcttcatcagttgagggctgaaatgaaagcctcattagcctggtccacatgcttcagttgtttgttagctcttt

SEQ ID NO: 437227 - DNA, 201 bp, Homo sapiens
tcataatccatacccattgtttaatcagtaaaattgattgattatggaaacaacagcctgtctacagagcatcttgagcgtatatgtggttcagcaggaakaatctgtaactgagcagatagaaagtagtatctggattttttgtttgtttgtttgtttgtttttttgagacagagtctcgctctatagcctaggctcgaa

SEQ ID NO: 437228 - DNA, 201 bp, Homo sapiens
tacacctggctttatgtgaaaaggctgtattggaacttggtatacttttatggaatgatgtaggagattacagttcattttgaaagatgtattagctaacwttttaatggtccaaataaatatgtttctttgatgcagagatcagttttgattatttgtgatgctttcttcactgcttttttattttatgctaatttaaaa

SEQ ID NO: 437229 - DNA, 201 bp, Homo sapiens
agtattagtctacccattctgctctcagagtaattctcaggtccttcttagcctgtagaaggaggacttgtagggaggggaaatctgtacctttttttttycttttttttgatacaaggtcttactctgtcacccagggtggagcatgatctcagctcactgcatcctacacctcctgggctcaagccatcctactgcttc

SEQ ID NO: 437230 - DNA, 201 bp, Homo sapiens
ttatttttttaagagatggggtcttgctcttttgcccaggctcagctacttgaactcctaggctcaagtaatctttcttccttagcttcctgagtagctgkgactacagatatgtgccaccacacccagctcaaaatattttaatatgtaatcactatgaaaaattgtgaatgaaatattttacattttatgtactaagtc

SEQ ID NO: 437231 - DNA, 201 bp, Homo sapiens
cagtattagtctacccattctgctctcagagtaattctcaggtccttcttagcctgtagaaggaggacttgtagggaggggaaatctgtaccttttttttytcttttttttgatacaaggtcttactctgtcacccagggtggagcatgatctcagctcactgcatcctacacctcctgggctcaagccatcctactgctt

SEQ ID NO: 437232 - DNA, 201 bp, Homo sapiens
accattccacccaggaatcccattactaggtatatactcaaaggaaaataaattgttctaccaaaaagacacctgcacttttatgtttatcacagcactaytcacaatagcaaagatatgaaatcaacccaggtacccatcaaaggtgaattagataaagaaaatatggtacatatacacgaaggaatactacacagccat

SEQ ID NO: 437233 - DNA, 201 bp, Homo sapiens
ttcttgaaggtaagaaacacctgccactaaaaagaaggttaaaatgtcctcctgaagaaatgttgtatctggctgttattaaaaagccaaaaattaatggrtgatggcgagattgtggagaaaagggaatccttacacactgctggcgagaatgcaaatcagttcagcccctgaggaaatccccagtttggagatttctca

SEQ ID NO: 437234 - DNA, 201 bp, Homo sapiens
ttagagttccaagttcttgaaggtaagaaacacctgccactaaaaagaaggttaaaatgtcctcctgaagaaatgttgtatctggctgttattaaaaagcmaaaaattaatggatgatggcgagattgtggagaaaagggaatccttacacactgctggcgagaatgcaaatcagttcagcccctgaggaaatccccagtt

SEQ ID NO: 437235 - DNA, 201 bp, Homo sapiens
gattgatttaattggatttaaaatgggatcatttaaatttggttgcgtaaatatgtgttttgtatgttttgaaagtcttaacctttctcttttcagcctakaaattattgaaattctgttagctttataattttctgtttactgtgattttaagctatattggaaaactagccatgctggcctcttatgtttaatgagtga

SEQ ID NO: 437236 - DNA, 201 bp, Homo sapiens
cccatccaggagcccaccaagagtcacctcattagaacaaaagacactcttatcaatgcccaggaagttccaagggattagcaactctgttagaaactggsgccacagaccaaatattagaacaaaagatgcacctagcatccctcttgctcaggaaattacaagagttttgggaactctctgcgaggaaccagggtcagg

SEQ ID NO: 437237 - DNA, 201 bp, Homo sapiens
gggcctccacatctcctttggtgtgttgtttggttagaatatgtgtgatgtttcaatgatctctaagagttaaactgtgtttgaagttaagagttaaaggsaagtatttggatctataggtgactgattacaaatttagtttaatagatagtaattgagtaatttagttacataagaatttaaaagggggcaccatatatt

SEQ ID NO: 437238 - DNA, 201 bp, Homo sapiens
gacaatgtaatcagaatcttaatcaaaatctttcctcactgtgattcgatggacatttatctggagcactggatattggagtcactcaccaccagataccraaaaagcaagcagactgaagacaaagtcttggtgtatgcttagagattggttattgtgtccaagagtctaatggtggttcagatccagatctgaatcatg

SEQ ID NO: 437239 - DNA, 201 bp, Homo sapiens
tgttttagtggttaataaaaaaagattaattatctctgaaaaaaaaggcagcagccccagtcaggggcttacagataaaatccccatctccctgggatggrgcacatgggagaaggggcagctgtgggtgcagcttcagcagacttaaacgttcctgactgccagctctaaagagaccagcagatctcccagcatagcatt

SEQ ID NO: 437240 - DNA, 201 bp, Homo sapiens
caagtggggattcctaattccaaatagcatggtcaagagagcagggatgggggtcagtggatgaaaaattactaagaggaaagaaacatcacaggtaaggygattctggttaaacagaactaacaggatccttgctgcaggttggccagggtgataagataccaagggtggcagtgaggaatttgatcagatattgagggt

SEQ ID NO: 437241 - DNA, 201 bp, Homo sapiens
ttctataaaaaggaaacttcataatttcattttgctatcaagcaacttagtagatcacaaagagcatcaaaaatgagttaaggacaattgcagatcaagaraaaggagaaacagcatcacagagccatggcacaaatcctcacttcaaggcccttggcactgttttagtggttaataaaaaaagattaattatctctgaaa

SEQ ID NO: 437242 - DNA, 201 bp, Homo sapiens
tcagggaaacacttatatttatcagtttattataaaggattgttttaagggatacaggtgaacagacaaagaagtactctgggtaagatatgtaggaagcrgcatggaccttccatgccctctctgggtgttccaccctcctatcatctccatgtcttcagcatcccagatgctttctaaaccctgtagtttagggatttt

SEQ ID NO: 437243 - DNA, 201 bp, Homo sapiens
tacctagacctctctagaagatttatcttcataacatatttgatttttatagcactttacttcttttatgacacattatcatgttattttctattaatcaygcattcacatagttgattagttcctccaggaccataaactccttgaggtaagatctgtctattggatctttgcacccacctcagtaccagcatgcatgaa

SEQ ID NO: 437244 - DNA, 201 bp, Homo sapiens
tggccttatagtatagtttggagttaggtagagtgatgcctctggctttgttccttttgcttaggattgctttggtcatttaggctcttttttagttccayatgaattttagaatagttgttttcttattctgtgaaaaatgacattggtagtttgatagaaatagcattgaatctgtacattacttagggtggtatggcc

SEQ ID NO: 437245 - DNA, 201 bp, Homo sapiens
gacaatgtaatcagaatcttaatcaaaatctttcctcactgtgattcgatggacatttatctggagcactggatattggagtcactcaccaccagataccmaaaaagcaagcagactgaagacaaagtcttggtgtatgcttagagattggttattgtgtccaagagtctaatggtggttcagatccagatctgaatcatg

SEQ ID NO: 437246 - DNA, 201 bp, Homo sapiens
agatttccattctctttagtttatgctcttccccttccccccacatacaaaaaaaccccctaagtttatttccctaaacaatacaaaaggaaacagccatrtacacttcctttaaaaatgaaagtgaaagaagcagaacacaaagaactcatcctagaagaaaatagaattctataaaaaggaaacttcataatttcattt

SEQ ID NO: 437247 - DNA, 201 bp, Homo sapiens
tctcaggttcagtaatgtgctagagcagctcatagaactcagggaaacacttatatttatcagtttattataaaggattgttttaagggatacaggtgaayagacaaagaagtactctgggtaagatatgtaggaagcggcatggaccttccatgccctctctgggtgttccaccctcctatcatctccatgtcttcagca

SEQ ID NO: 437248 - DNA, 201 bp, Homo sapiens
agaaaacaggcaaggaaagaaacaaaagagtcacagtagacaaagtcatgaaaatgctcacttaatatttccaaacagagtaaaggaaatagctgctgacytgagaagaaataagtgaaatggaggatttagatgtggatacctctatttctctattccttttcctaatttaattttaaagtgaagatttccattctcttt

SEQ ID NO: 437249 - DNA, 201 bp, Homo sapiens
caattgcaagcagtaggttcccaggtcaccacaacttctgaccagtttggtcacaagtgggaggttaccacaacccccttctcaggttcagtaatgtgctrgagcagctcatagaactcagggaaacacttatatttatcagtttattataaaggattgttttaagggatacaggtgaacagacaaagaagtactctgggt

SEQ ID NO: 437250 - DNA, 201 bp, Homo sapiens
cccaccttcctctagactcctaaatttgcttcagatcctttacaggtctttggacctgaaacactaggaccaagctagtgtggtagaatgcaaatgcttcrcagaattttcccatctcaatacataaaataatgcacaaaacataatttttgaaatcatcaaccacaaagaaaaacatcagcaatagtaaccaaaaaagaa

SEQ ID NO: 437251 - DNA, 201 bp, Homo sapiens
ctcttaagatgaaatctaaaatttataatgtatcttctaaaggcctccactccacccaccttcctctagactcctaaatttgcttcagatcctttacaggwctttggacctgaaacactaggaccaagctagtgtggtagaatgcaaatgcttcgcagaattttcccatctcaatacataaaataatgcacaaaacataat

SEQ ID NO: 437252 - DNA, 201 bp, Homo sapiens
tttaaaatagaggaatctgatcatttcaggaacctgctttttaaaaccttcagtggcttcctatttctcttaagatgaaatctaaaatttataatgtatcytctaaaggcctccactccacccaccttcctctagactcctaaatttgcttcagatcctttacaggtctttggacctgaaacactaggaccaagctagtgt

SEQ ID NO: 437253 - DNA, 201 bp, Homo sapiens
gggatagaagacaaagttgcgaaagaggctctgagaacagagttggaactagataaaggtgtgcctgctttacagtttttcttgagttcatcatttaacayaatgcctctgaaagtaacttactgctgtctttgataggaatgcatattggtgtattgccagtgccacagctgggatgtctggactaattttgaaggttgc

SEQ ID NO: 437254 - DNA, 201 bp, Homo sapiens
cattatatcagaggtccccaacccctgggccacggactggtacttgtccatggcctgttaggaacagcaggaggtgagccagggcaagcaagcattactgyctgagctccacctcctgtcagatcagtggccatgttacatggtactggtccatggcctgttaggaacagcaggaggtgagccagggcaagcaagcattac

SEQ ID NO: 437255 - DNA, 201 bp, Homo sapiens
cagcagcgttttgtagttcttcttgtagagacctttcacttccttgcttagatgtattcctaaatattttatttatttattttttggtggctactgtaaasagaattgtgtttttgatttggctctcagcttgaacattgttggtatgtagaaatgctactgatttttaaggctggtcgtggtggatcatgcctgtaatcc

SEQ ID NO: 437256 - DNA, 201 bp, Homo sapiens
agatagttgtaggtatgctgtcttatttctgattctctattctgtttcattagtctatgtgtcggtttttgtaccagtaccatactgttttggttacaatrgccttatagtatagtttggagttaggtagagtgatgcctctggctttgttccttttgcttaggattgctttggtcatttaggctcttttttagttccata

SEQ ID NO: 437257 - DNA, 201 bp, Homo sapiens
ctgagaattctctgagcaaagatccatctatccagctatctcttggatctctttttaggatatcccacaagtatctcaaatttaatttgttcaaagatcaracctgttctctcacctatttctcacctattttgtcaatacagaaaccctaaagttaaccttgactgtgattttccaccttctccatccaaatccaattga

SEQ ID NO: 437258 - DNA, 201 bp, Homo sapiens
atattggagtcactcaccaccagatacccaaaaagcaagcagactgaagacaaagtcttggtgtatgcttagagattggttattgtgtccaagagtctaayggtggttcagatccagatctgaatcatggacgaaaaactgttaaagaaaaataagagatagtagttaaaatggtaaaaacagattttattcaggaaaagc

SEQ ID NO: 437259 - DNA, 201 bp, Homo sapiens
tcctcctgaagaaatgttgtatctggctgttattaaaaagccaaaaattaatggatgatggcgagattgtggagaaaagggaatccttacacactgctggygagaatgcaaatcagttcagcccctgaggaaatccccagtttggagatttctcaaactaaaatagaattaccattccacccaggaatcccattactaggt

SEQ ID NO: 437260 - DNA, 201 bp, Homo sapiens; identical to SEQ ID NO: 437238

SEQ ID NO: 437261 - DNA, 201 bp, Homo sapiens
cacaatatataaaatcacctccctccctaatgcaaccaacactaagcttcttttgtgaacttgatgcatactttaattataaagtggttaacttttaaaawtttcacttaatgtgttataactaggtaataaagtagaaaattgattttcatgactccaattttaagtatctgcataatagtcaatcaagaatagatatat

SEQ ID NO: 437262 - DNA, 201 bp, Homo sapiens
gattgatttaattggatttaaaatgggatcatttaaatttggttgcgtaaatatgtgttttgtatgttttgaaagtcttaacctttctcttttcagcctawaaattattgaaattctgttagctttataattttctgtttactgtgattttaagctatattggaaaactagccatgctggcctcttatgtttaatgagtga

SEQ ID NO: 437263 - DNA, 201 bp, Homo sapiens
gtcaaggaaccctttatggaagagatgccctttgaattaggccttgcacgaaggttgggaattagggagagagaatgcacaaatgaaagactataggagtrttaagatttcaagcttaggataatggtggcaccaatacataaatactaataggtaacttaaaggaagtatagttggtttcggtttgagtgacttaatttt

SEQ ID NO: 437264 - DNA, 201 bp, Homo sapiens
ttggagacttcagcactcctcttaataattaacagaagaagcaggcagaaagtcaggaaggatatagaagccttgaacaatactgtcaaccaactttaccyaattaacatctgtagaacatgttacccagcaacaggagacatgaaatagtaacccaggtagatcatagtctaggtctttaaaatccattacaaatgtaaa

SEQ ID NO: 437265 - DNA, 201 bp, Homo sapiens
atagactgttttgggtcttctgatgagggaaagactataaccagctgaagaggtcaaggaaccctttatggaagagatgccctttgaattaggccttgcaygaaggttgggaattagggagagagaatgcacaaatgaaagactataggagtattaagatttcaagcttaggataatggtggcaccaatacataaatacta

SEQ ID NO: 437266 - DNA, 201 bp, Homo sapiens
agggaggctgaggcaggcagattgctgagcccaggcattcaagaccagcctgggcaacatggcaaaaacctgtctctacaaaaaattagcaggtgtggtgrcatgcaactgtagcctcagctactcaggaggcagaggtagaagaatcacctgagcccaagaagttgagcctccagggagccgtgatcatgccactgcact

SEQ ID NO: 437267 - DNA, 201 bp, Homo sapiens
tatgcaaggaagaatcagatataaatcctgctcccacaaaaccagtgtctgaaaaaaaaaaaacataaaccaagtgtcatgagaggtacacatagactgtyttgggtcttctgatgagggaaagactataaccagctgaagaggtcaaggaaccctttatggaagagatgccctttgaattaggccttgcacgaaggttgg

SEQ ID NO: 437268 - DNA, 201 bp, Homo sapiens
ttgattaatggaagatctggagctagagccccagtctgttgtgggtcctgtcctcattcttctatacctaacttttgaaagtattattctcatttaaaagstttttttaaaacaaaactcaaggagtaaacatcaagaaaatagcaacaacaaaatctcattaattttatcacactaggaatctcgccagataagccatgt

SEQ ID NO: 437269 - DNA, 201 bp, Homo sapiens
gactttgactttggtgaggtgtcagtaaaatggtggaaaccaaaagcaagattatacttgcttaaaaaattaatgaaagacagtaaataacctttccaaaraatgtgtcaggccaggtgcagtggcttgtacctgtaatgctagcacttagtagggaggctgaggcaggcagattgctgagcccaggcattcaagaccagc

SEQ ID NO: 437270 - DNA, 201 bp, Homo sapiens
gttttttagtactttgagcaaagcagtgttcaaggtgccatagagtatgcaaggaagaatcagatataaatcctgctcccacaaaaccagtgtctgaaaawaaaaaaacataaaccaagtgtcatgagaggtacacatagactgttttgggtcttctgatgagggaaagactataaccagctgaagaggtcaaggaaccct

SEQ ID NO: 437271 - DNA, 201 bp, Homo sapiens
catatgtctgctgtttaatccagtggaaggaaccattgtcttccagggctgttcattatatcagaggtccccaacccctgggccacggactggtacttgtycatggcctgttaggaacagcaggaggtgagccagggcaagcaagcattactgtctgagctccacctcctgtcagatcagtggccatgttacatggtactg

SEQ ID NO: 437272 - DNA, 201 bp, Homo sapiens
taaacagttttttagtactttgagcaaagcagtgttcaaggtgccatagagtatgcaaggaagaatcagatataaatcctgctcccacaaaaccagtgtcygaaaaaaaaaaaacataaaccaagtgtcatgagaggtacacatagactgttttgggtcttctgatgagggaaagactataaccagctgaagaggtcaagg

SEQ ID NO: 437273 - DNA, 201 bp, Homo sapiens
acctctgcctcctgggttcaagcaattctcctgccatatgtctgctgtttaatccagtggaaggaaccattgtcttccagggctgttcattatatcagagktccccaacccctgggccacggactggtacttgtccatggcctgttaggaacagcaggaggtgagccagggcaagcaagcattactgtctgagctccacct

SEQ ID NO: 437274 - DNA, 201 bp, Homo sapiens
cagataacaaatcttaaacagttttttagtactttgagcaaagcagtgttcaaggtgccatagagtatgcaaggaagaatcagatataaatcctgctcccrcaaaaccagtgtctgaaaaaaaaaaaacataaaccaagtgtcatgagaggtacacatagactgttttgggtcttctgatgagggaaagactataaccagc

SEQ ID NO: 437275 - DNA, 201 bp, Homo sapiens
ctgtcacatccacaagatccaaggattttccccagtcatgtccagtctactgatgaacctattgaagacattcttcatttctgttacagtgtttttgatcrctagcatttcttttttgttcttagaattttcatgtctctgctagctggttattccaacacatttattgaatagggagtcctttctccattgcctattttt

SEQ ID NO: 437276 - DNA, 201 bp, Homo sapiens
atcccacaccacactggtacatgtgttacaattgatgaacctacattgacaaatccttatcatccaaagcccatagtttacaagagttcattgtgtatttygcataacagtactttatcagatttgtcttttgcaaatgttttctccccatctgtgcttctgttcttttctctcttttttcaccttttgggatttcattta

SEQ ID NO: 437277 - DNA, 201 bp, Homo sapiens
aagcaagcattactgtctgagctccacctcctgtcagatcagtggccatgttacatggtactggtccatggcctgttaggaacagcaggaggtgagccagrgcaagcaagcattactgcctgagccccacctcctgtcagatcagtggccatgttagattctcataggagctcgaaccctattgtgaactgtgcatgcgag

SEQ ID NO: 437278 - DNA, 201 bp, Homo sapiens
ggcccgacatagtggctcacatctgcaatcccagggctttagtaggccaaggtgggaggattgcttgagcccaggagtttgagaccagcctgggcaacatwgcaagaccttgtctggtgacacacacctgtagtcctagtcacccaggaggctgaggtgggaagatcacttgagcccaggagttctatgagctgctctagc

SEQ ID NO: 437279 - DNA, 201 bp, Homo sapiens
taggttatttttgcatgaaataatacaactatgtttttataatccttgtagccaagtttatctctagaaataaaatttataatggagatatcattatcagyatgattttgcatacaatctcttaaaacagatttcagagcaactaatgatctagtcagaaggcctgaattttaattcagacaaaaccagttactaattcta

SEQ ID NO: 437280 - DNA, 201 bp, Homo sapiens
agaaaatcatcaaccaagggcccgacatagtggctcacatctgcaatcccagggctttagtaggccaaggtgggaggattgcttgagcccaggagtttgakaccagcctgggcaacatagcaagaccttgtctggtgacacacacctgtagtcctagtcacccaggaggctgaggtgggaagatcacttgagcccaggagt

SEQ ID NO: 437281 - DNA, 201 bp, Homo sapiens
cttgggttggacgactaccaaattattcacaataaattaaaaatacacagggattttaatgcttggaaacaagaactgtaataagactaatagagaaagamcgtgaggttggatcagaatgaataggtcatcttccatttgaaaaattacaaaaaagtacttgcagttaatatgtctagaaataacaatagggttgcctac

SEQ ID NO: 437282 - DNA, 201 bp, Homo sapiens
agctgcatctgtgttgccataaaggacatgattttgttctttttttgtggctgcatagtactccatggtgtataagtatcttgtggaaatttgaccctaarttctgtttcacgcagtgtaccttaggcatctgttcttggattttggtgtttgccaggtttttaattttgatcctatatcataagttgaattttagtgtct

SEQ ID NO: 437283 - DNA, 201 bp, Homo sapiens
ggccacttgattgagaataaccaaaaactgtaaaagcccagtgtgtatggtaggaaaaaaccaattttctcctactgtactcttaacacaaagggtatagygaccagatgtgtggatttttctcacactgaccaattctctgatgctagccggatagcctatattcaattcacttctgacactaactagagctcatgcaga

SEQ ID NO: 437284 - DNA, 201 bp, Homo sapiens
agagttggaactagataaaggtgtgcctgctttacagtttttcttgagttcatcatttaacacaatgcctctgaaagtaacttactgctgtctttgatagraatgcatattggtgtattgccagtgccacagctgggatgtctggactaattttgaaggttgcaaactgccacgtacccaccttcagacctgtcttgactt

SEQ ID NO: 437285 - DNA, 201 bp, Homo sapiens
gaatgttcatggccacttgattgagaataaccaaaaactgtaaaagcccagtgtgtatggtaggaaaaaaccaattttctcctactgtactcttaacacaragggtatagtgaccagatgtgtggatttttctcacactgaccaattctctgatgctagccggatagcctatattcaattcacttctgacactaactagag

SEQ ID NO: 437286 - DNA, 201 bp, Homo sapiens
tatgtaagaatgttcatggccacttgattgagaataaccaaaaactgtaaaagcccagtgtgtatggtaggaaaaaaccaattttctcctactgtactctyaacacaaagggtatagtgaccagatgtgtggatttttctcacactgaccaattctctgatgctagccggatagcctatattcaattcacttctgacacta

SEQ ID NO: 437287 - DNA, 201 bp, Homo sapiens
aagtctttacttctccaaaattctaactcagatattaatatatgattatagatgtttgtcagtaattatttgcaagtttatctcatcacaatttgaaaatmtttgtgaagagcatcagacaacatgaactcagtgttagcgttacttggaaaacttgcagaataaatttaaaaatgaagaaagtctcatttcaaactgatt

SEQ ID NO: 437288 - DNA, 201 bp, Homo sapiens
cacctcattagaacaaaagacactcttatcaatgcccaggaagttccaagggattagcaactctgttagaaactggcgccacagaccaaatattagaacaraagatgcacctagcatccctcttgctcaggaaattacaagagttttgggaactctctgcgaggaaccagggtcagggatcaaatacacatttcttattgt

SEQ ID NO: 437289 - DNA, 201 bp, Homo sapiens
agtagttaaaatggtaaaaacagattttattcaggaaaagctgcaatagaagaagggattccagtatagaactgggcttaattccatatagagagcatgcrcaagtggggattcctaattccaaatagcatggtcaagagagcagggatgggggtcagtggatgaaaaattactaagaggaaagaaacatcacaggtaagg

SEQ ID NO: 437290 - DNA, 201 bp, Homo sapiens
tatacctccatgccccaacatacgcacaacctccgttgctgtcagtatcccacaccacactggtacatgtgttacaattgatgaacctacattgacaaatycttatcatccaaagcccatagtttacaagagttcattgtgtattttgcataacagtactttatcagatttgtcttttgcaaatgttttctccccatctgt

SEQ ID NO: 437291 - DNA, 201 bp, Homo sapiens
agatacccaaaaagcaagcagactgaagacaaagtcttggtgtatgcttagagattggttattgtgtccaagagtctaatggtggttcagatccagatctraatcatggacgaaaaactgttaaagaaaaataagagatagtagttaaaatggtaaaaacagattttattcaggaaaagctgcaatagaagaagggattcc

SEQ ID NO: 437292 - DNA, 201 bp, Homo sapiens
agttcagagttcccgtatacctccatgccccaacatacgcacaacctccgttgctgtcagtatcccacaccacactggtacatgtgttacaattgatgaamctacattgacaaatccttatcatccaaagcccatagtttacaagagttcattgtgtattttgcataacagtactttatcagatttgtcttttgcaaatgt

SEQ ID NO: 437293 - DNA, 201 bp, Homo sapiens
tagagctgttttaggttcacagcaaaatcgtgtgggaagttcagagttcccgtatacctccatgccccaacatacgcacaacctccgttgctgtcagtatyccacaccacactggtacatgtgttacaattgatgaacctacattgacaaatccttatcatccaaagcccatagtttacaagagttcattgtgtattttgc

SEQ ID NO: 437294 - DNA, 201 bp, Homo sapiens
tgtttctttgatgcagagatcagttttgattatttgtgatgctttcttcactgcttttttattttatgctaatttaaaaaatatgataaactataacctgycagatagaaaggagtaaatggtgttaacctctttaggcttaagaatactgggaaatgcttgacaaagaatggaaatatgttttatatgttattgttttat

SEQ ID NO: 437295 - DNA, 201 bp, Homo sapiens
tactccttggtctactatagcattaggaagctatcaacccattattctgcttccattaaatgttttccaatgcatgatggttagtgactttttaaatttarttcttaatttttcttagagtcagaatattgctctgttgccctgactgcaatgccacgatcatagctcactgcctcaggctcctgagtagctgagacgaca

SEQ ID NO: 437296 - DNA, 201 bp, Homo sapiens
ggggttctggtaacctcccacttgtggccaaactggtcagaagttgtggtgacttgggaacctactgcttgcaattggtatatgaagtagggcacagtctkgtgagactgagctcttaatccatgagagatctgcatgagctctagttagtgtcagaagtgaattgaatatagcccacactctttctgtaataccacactt

SEQ ID NO: 437297 - DNA, 201 bp, Homo sapiens
ttgggcaatctggcttctcactatttaacaagtgttgcttaatgtaccatgtaggaacatttgatgtgctccacagccactcacagcttctgataattctrtttgtgccagccttgagagatcactgagtggtagtttaagattgtgctccagtataaaagtggcaaggtttgtcttttaaacaaacatgtatttttttca

SEQ ID NO: 437298 - DNA, 201 bp, Homo sapiens
catagtaagtgttaaataaatatttgttgattgaatgaataagaagtaatcaaggaatgtgccaaaagaaatagaaattgagttgggtcttgaatgatgayttggctttggctacatggcatgtgcatgagaagggtgcgccaggcagggctagcagagtgagaaaattgagaagctacagagcatgactgtgtggtcatg

SEQ ID NO: 437299 - DNA, 201 bp, Homo sapiens
ttgctcttagtatgagcccagagaaagcaagccaaggcaactctgaagtgtcttgcagtcacttaaaagaggggggatttacctgttttccaaaatatggrctgcccaccttttgtatttaagtttcagttcattgccaatatgtataattatttataaactcaaaataatctgttttatttttatttctatctacatgat

SEQ ID NO: 437300 - DNA, 201 bp, Homo sapiens
ccttctcaggatcttcatttcactagcatccaacttactttgtcttacttgaaatgccatctcctcaaaaaggcttccctggccacccaaattgaagtacytctcccctaatcacacttgatttcatttctctatttcacttccagtgttttggcatcagatgttatctttttaatgtctgtattcattgtccgtctcctc

SEQ ID NO: 437301 - DNA, 201 bp, Homo sapiens
tctttcagcagcgttttgtagttcttcttgtagagacctttcacttccttgcttagatgtattcctaaatattttatttatttattttttggtggctactstaaacagaattgtgtttttgatttggctctcagcttgaacattgttggtatgtagaaatgctactgatttttaaggctggtcgtggtggatcatgcctgt

SEQ ID NO: 437302 - DNA, 201 bp, Homo sapiens
ggaaatatgttttatatgttattgttttatgaatgtcagaaactctgtctgctggtggggagggagggcagagaaataccccctgaggatgagggaggaaytctttccactctggcttaggattttgctgtaagccacatttgcatcctgtctattatggcttcttacaaatgagagaatggacagttgcaattaggtatt

SEQ ID NO: 437303 - DNA, 201 bp, Homo sapiens
tactgttttggttacaatggccttatagtatagtttggagttaggtagagtgatgcctctggctttgttccttttgcttaggattgctttggtcatttagrctcttttttagttccatatgaattttagaatagttgttttcttattctgtgaaaaatgacattggtagtttgatagaaatagcattgaatctgtacatta

SEQ ID NO: 437304 - DNA, 201 bp, Homo sapiens
atagaaaggagtaaatggtgttaacctctttaggcttaagaatactgggaaatgcttgacaaagaatggaaatatgttttatatgttattgttttatgaaygtcagaaactctgtctgctggtggggagggagggcagagaaataccccctgaggatgagggaggaactctttccactctggcttaggattttgctgtaag

SEQ ID NO: 437305 - DNA, 201 bp, Homo sapiens
cctgtcagatagaaaggagtaaatggtgttaacctctttaggcttaagaatactgggaaatgcttgacaaagaatggaaatatgttttatatgttattgtyttatgaatgtcagaaactctgtctgctggtggggagggagggcagagaaataccccctgaggatgagggaggaactctttccactctggcttaggatttt

SEQ ID NO: 437306 - DNA, 201 bp, Homo sapiens
gctagctggttattccaacacatttattgaatagggagtcctttctccattgcctatttttattgactttgttgaaggtcagatagttgtaggtatgctgkcttatttctgattctctattctgtttcattagtctatgtgtcggtttttgtaccagtaccatactgttttggttacaatggccttatagtatagtttgga

SEQ ID NO: 437307 - DNA, 201 bp, Homo sapiens
tattttctgagcagatgataatgtagtacatactggctgaatgttctgataggcatcagttattgctgtgtttaatctacacttctgatggtagatcaaatagtttgtcaaaatactttgtcttatgaacaatggaaatgctcagattgtaaaaccaaatgtgaaacagtacattttttagtagtagtaactctaccttta

SEQ ID NO: 437308 - DNA, 201 bp, Homo sapiens
tgcatagtactccatggtgtataagtatcttgtggaaatttgaccctaagttctgtttcacgcagtgtaccttaggcatctgttcttggattttggtgttygccaggtttttaattttgatcctatatcataagttgaattttagtgtcttggtcataccttaatgcttcatttccttcacctgatttttagtttgtattt

SEQ ID NO: 437309 - DNA, 201 bp, Homo sapiens
tccatggtgtataagtatcttgtggaaatttgaccctaagttctgtttcacgcagtgtaccttaggcatctgttcttggattttggtgtttgccaggtttktaattttgatcctatatcataagttgaattttagtgtcttggtcataccttaatgcttcatttccttcacctgatttttagtttgtatttcctgccttgg

SEQ ID NO: 437310 - DNA, 201 bp, Homo sapiens
gaaatttgaccctaagttctgtttcacgcagtgtaccttaggcatctgttcttggattttggtgtttgccaggtttttaattttgatcctatatcataagytgaattttagtgtcttggtcataccttaatgcttcatttccttcacctgatttttagtttgtatttcctgccttggagtcatcaaaccccctcagcaagt

SEQ ID NO: 437311 - DNA, 201 bp, Homo sapiens
gatcctatatcataagttgaattttagtgtcttggtcataccttaatgcttcatttccttcacctgatttttagtttgtatttcctgccttggagtcatcmaaccccctcagcaagttatattagtatcaacatcaaaatagagtgacctgcagaatatcttaatacagtgcttagtggtgatgttcatattggaaaaatt

SEQ ID NO: 437312 - DNA, 201 bp, Homo sapiens
gaattttagtgtcttggtcataccttaatgcttcatttccttcacctgatttttagtttgtatttcctgccttggagtcatcaaaccccctcagcaagttrtattagtatcaacatcaaaatagagtgacctgcagaatatcttaatacagtgcttagtggtgatgttcatattggaaaaatttaacaaaacaaagtgcag

SEQ ID NO: 437313 - DNA, 201 bp, Homo sapiens
atgcttcatttccttcacctgatttttagtttgtatttcctgccttggagtcatcaaaccccctcagcaagttatattagtatcaacatcaaaatagagtkacctgcagaatatcttaatacagtgcttagtggtgatgttcatattggaaaaatttaacaaaacaaagtgcagaagaagtctcaggttgcagtccatata

SEQ ID NO: 437314 - DNA, 201 bp, Homo sapiens
aggttgcagtccatatacaaattctagaacatcagaatcacttgggaagattttgacatcagcaaagtgtgcatctaagaagtcctaactctaagagacawgaggtatcatactcctgtttctacacagaaaatatctgtttgttaatcatattgtttagtggctactacgtgatattttgggtattttacatttatttta

SEQ ID NO: 437315 - DNA, 201 bp, Homo sapiens
caataaattaaaaatacacagggattttaatgcttggaaacaagaactgtaataagactaatagagaaagaccgtgaggttggatcagaatgaataggtcrtcttccatttgaaaaattacaaaaaagtacttgcagttaatatgtctagaaataacaatagggttgcctactttacacagttgatttgttgatttgaaat

SEQ ID NO: 437316 - DNA, 201 bp, Homo sapiens
gacactatctttttaatttttattatttggactactgcccacacctcttaagtatccctcctgcttccgttcttactctcatacagtcttttcactacatmacagccagagttctctttgtttattgaatcacatcagtcttctggtcagaaccctctagtgggttttcatcatatgtagacttaaatccaaactcatgtt

SEQ ID NO: 437317 - DNA, 201 bp, Homo sapiens; identical to SEQ ID NO: 207059

SEQ ID NO: 437318 - DNA, 201 bp, Homo sapiens; identical to SEQ ID NO: 207076

SEQ ID NO: 437319 - DNA, 201 bp, Homo sapiens; identical to SEQ ID NO: 206747

SEQ ID NO: 437320 - DNA, 201 bp, Homo sapiens; identical to SEQ ID NO: 345874

SEQ ID NO: 437321 - DNA, 201 bp, Homo sapiens; identical to SEQ ID NO: 331727

SEQ ID NO: 437322 - DNA, 201 bp, Homo sapiens; identical to SEQ ID NO: 331728

SEQ ID NO: 437323 - DNA, 201 bp, Homo sapiens; identical to SEQ ID NO: 331729

SEQ ID NO: 437324 - DNA, 201 bp, Homo sapiens; identical to SEQ ID NO: 331731

SEQ ID NO: 437325 - DNA, 201 bp, Homo sapiens; identical to SEQ ID NO: 331734

SEQ ID NO: 437326 - DNA, 201 bp, Homo sapiens; identical to SEQ ID NO: 331737

SEQ ID NO: 437327 - DNA, 201 bp, Homo sapiens; identical to SEQ ID NO: 331579

SEQ ID NO: 437328 - DNA, 201 bp, Homo sapiens; identical to SEQ ID NO: 331652

SEQ ID NO: 437329 - DNA, 201 bp, Homo sapiens; identical to SEQ ID NO: 331653

SEQ ID NO: 437330 - DNA, 201 bp, Homo sapiens; identical to SEQ ID NO: 331908

SEQ ID NO: 437331 - DNA, 201 bp, Homo sapiens; identical to SEQ ID NO: 331603

SEQ ID NO: 437332 - DNA, 201 bp, Homo sapiens; identical to SEQ ID NO: 331895

SEQ ID NO: 437333 - DNA, 201 bp, Homo sapiens; identical to SEQ ID NO: 331724

SEQ ID NO: 437334 - DNA, 201 bp, Homo sapiens; identical to SEQ ID NO: 331913

SEQ ID NO: 437335 - DNA, 201 bp, Homo sapiens; identical to SEQ ID NO: 331802

SEQ ID NO: 437336 - DNA, 201 bp, Homo sapiens; identical to SEQ ID NO: 331725

SEQ ID NO: 437337 - DNA, 201 bp, Homo sapiens
ctgcaggcccgtggctttccacaaaattctgcacccagcctgggcctaggagcgaggacttattcccagggcgactgctcgtattcgcgcacggcgctgtrtgatctgctcggcgtcccctccacagccacgcaggcccaaatcaaggcggcttactaccgtcagtgctttctctaccacccggaccgcaactccgggagc

SEQ ID NO: 437338 - DNA, 201 bp, Homo sapiens
atcatcggcttttatatttaatcggagagagaagggaaggggagtgtccccagccaaccccccagaaacggccttttttcctgcctctgaacccttggccrttgatagtctacctttgctgggatccgaaggaactgtactccccctgccctccccgacccgcccagcttagccgatgacctgcacatcgctccactgtgg

SEQ ID NO: 437339 - DNA, 201 bp, Homo sapiens
gaccaaccgactcctctcattggccggtttctcttgcaccgcctgccgaatcaattcaacatggcagccatgcgctggcgatggtggcagcggctgttacyttggaggttgctgcaggcccgtggctttccacaaaattctgcacccagcctgggcctaggagcgaggacttattcccagggcgactgctcgtattcgcgc

SEQ ID NO: 437340 - DNA, 201 bp, Homo sapiens
gtaccccgccgcccacctctcggacccacgacggttctcgggcctcccccggcgccaaccgcacgatgttcaactttgacgccttctaccaggcccactayggggaacaactggagcgggaacggcgcctgagggcccggcgggaggcccttcgcaaacggcaggagtatcggtccatgaaaggcctccgctgggaggata

SEQ ID NO: 437341 - DNA, 201 bp, Homo sapiens
ttgtctttctgtgacttccccaagccgcaggtgagacctggtccagggtaagaatgggatcggtggagagcctgtcgttcctcccgctaaggtcagccccytggggcactcctccttatgttgatagcatgtaggagtgagaaaaagtcattgagcataaggaatgagtgttcctgtgcccatatttaatgtgtgaccttg

SEQ ID NO: 437342 - DNA, 201 bp, Homo sapiens
acagggcgaccaaccgactcctctcattggccggtttctcttgcaccgcctgccgaatcaattcaacatggcagccatgcgctggcgatggtggcagcggstgttaccttggaggttgctgcaggcccgtggctttccacaaaattctgcacccagcctgggcctaggagcgaggacttattcccagggcgactgctcgta

SEQ ID NO: 437343 - DNA, 201 bp, Homo sapiens
catggcagccatgcgctggcgatggtggcagcggctgttaccttggaggttgctgcaggcccgtggctttccacaaaattctgcacccagcctgggcctargagcgaggacttattcccagggcgactgctcgtattcgcgcacggcgctgtatgatctgctcggcgtcccctccacagccacgcaggcccaaatcaaggc

SEQ ID NO: 437344 - DNA, 201 bp, Homo sapiens
aggagcgaggacttattcccagggcgactgctcgtattcgcgcacggcgctgtatgatctgctcggcgtcccctccacagccacgcaggcccaaatcaagrcggcttactaccgtcagtgctttctctaccacccggaccgcaactccgggagcgcggaggccgccgagcgcttcacgcgcatctcccaggcctacgtggt

SEQ ID NO: 437345 - DNA, 201 bp, Homo sapiens
ggacttctggcatcatctgctggcctgagatccagtcggcttttcagggtgttggaaacctttattttacaatccccattgtggatctcaactccaccaamtatgtcctcaggcaggtaggactcctgggcaattgggacatcaacaattgtctgtggtggggattttgtacatagagactgcctttgcaccatagttttt

SEQ ID NO: 437346 - DNA, 201 bp, Homo sapiens
ctgcagaaccaactggagctgtgctactttgagataaactagaggtgggttcctgatcatattacatgacactctctcccattgttagcaattaggcaagsacattagtgacagaggggcatccactgaaaaagacagagcaatactcgaacagcaaagaggaagccacttagacattcttgtttcttcaaatatcagaag

SEQ ID NO: 437347 - DNA, 201 bp, Homo sapiens
tttggaccaaacaaggctccccggacttctggcatcatctgctggcctgagatccagtcggcttttcagggtgttggaaacctttattttacaatccccaktgtggatctcaactccaccaactatgtcctcaggcaggtaggactcctgggcaattgggacatcaacaattgtctgtggtggggattttgtacatagaga

SEQ ID NO: 437348 - DNA, 201 bp, Homo sapiens
gctgcagaaccaactggagctgtgctactttgagataaactagaggtgggttcctgatcatattacatgacactctctcccattgttagcaattaggcaargacattagtgacagaggggcatccactgaaaaagacagagcaatactcgaacagcaaagaggaagccacttagacattcttgtttcttcaaatatcagaa

SEQ ID NO: 437349 - DNA, 201 bp, Homo sapiens
agctgttggcatttggaccaaacaaggctccccggacttctggcatcatctgctggcctgagatccagtcggcttttcagggtgttggaaacctttatttyacaatccccattgtggatctcaactccaccaactatgtcctcaggcaggtaggactcctgggcaattgggacatcaacaattgtctgtggtggggatttt

SEQ ID NO: 437350 - DNA, 201 bp, Homo sapiens
ttcagggtgttggaaacctttattttacaatccccattgtggatctcaactccaccaactatgtcctcaggcaggtaggactcctgggcaattgggacatyaacaattgtctgtggtggggattttgtacatagagactgcctttgcaccatagtttttaccggagggaaatcttatttcctgcaatgaacagtcatttgg

SEQ ID NO: 437351 - DNA, 201 bp, Homo sapiens
ggaagcggcccaccaccgtcttggaagtggcccaccaccgtcttgggagctctgggagcaaggaccccttggtaacaagaacactgttttgagaaaatccrtagaaaaagaatgaattccaaatagtttgggtctaaaacttctagttctctctgtctttctaagaggccttattcctagggggctggggactggaaaccc

SEQ ID NO: 437352 - DNA, 201 bp, Homo sapiens
aacactagtcactgggttccacggttctcttctgtgacccatggtttctaatagagctataacactcactgcatggcccaagattccattccttggaatcygtgaggccaagaaccccaggtcagagaacatgaggcttgccaccatcttggaagtggcttctgccatcttggaagcggcccaccaccgtcttggaagtgg

SEQ ID NO: 437353 - DNA, 201 bp, Homo sapiens
cattgccgctctccattgggctaaagactcaccattgttcctgcatggctaaatgcctggattcatcctaatcgagctgaacactagtcactgggttccamggttctcttctgtgacccatggtttctaatagagctataacactcactgcatggcccaagattccattccttggaatccgtgaggccaagaaccccaggt

SEQ ID NO: 437354 - DNA, 201 bp, Homo sapiens
cgctgtgctcctgatccagtgaggcgcccattgccgctctccattgggctaaagactcaccattgttcctgcatggctaaatgcctggattcatcctaatygagctgaacactagtcactgggttccacggttctcttctgtgacccatggtttctaatagagctataacactcactgcatggcccaagattccattcctt

SEQ ID NO: 437355 - DNA, 201 bp, Homo sapiens
gctggagaaccagattgataggcagcagtttgaagaaatagttcaaactctaaataacctttatgcagaagcagagaagcttggtggccaatcatatctcraaggttgtttggcttgtttaacagcatataccatcttcctatgcttggaaactcattaccagaagcttctgaagaaagtctccaaatgcattcaagagca

SEQ ID NO: 437356 - DNA, 201 bp, Homo sapiens; identical to SEQ ID NO: 186517

SEQ ID NO: 437357 - DNA, 201 bp, Homo sapiens; identical to SEQ ID NO: 186529

SEQ ID NO: 437358 - DNA, 201 bp, Homo sapiens
tcttcagcttccgcgacccagccgacgtcttcagggagttcttcggcggccaggacccattctcctttgacctcttgggaaacccgctggagaatattttkggggggtcagaggaactgctggggaagcagaagcagagcgtctgcaccccttttctctgccttcagtgaatttccagcttttgggggtgttttttcttct

SEQ ID NO: 437359 - DNA, 201 bp, Homo sapiens
caagagaatcattgagaatggccaagaaagggtggaagtggaggaagatggagagttgagttaaagtccttcataataaatagcaaagagcagttactccscattgacaccaagtaattccagtccacatttgactttaagcacatctggaggaatagcggactttttttaggattgaaagtgaactttactttcagaaca

SEQ ID NO: 437360 - DNA, 201 bp, Homo sapiens
ttactttcagaacagctgtacccaagaatttataaacacttcatgccaacacctgttcttatcgttgggactacacggataggacctctgtttgtctttcratcgttgtaaaatatctgtatgcaatttgctatttattaaacttaagcctgaggcagacaatgattatttgctagtggtaggacagaatgttcagttcag

SEQ ID NO: 437361 - DNA, 201 bp, Homo sapiens
tttcagaacagctgtacccaagaatttataaacacttcatgccaacacctgttcttatcgttgggactacacggataggacctctgtttgtctttcaatcrttgtaaaatatctgtatgcaatttgctatttattaaacttaagcctgaggcagacaatgattatttgctagtggtaggacagaatgttcagttcagcact

SEQ ID NO: 437362 - DNA, 201 bp, Homo sapiens
accaccaagagaatcattgagaatggccaagaaagggtggaagtggaggaagatggagagttgagttaaagtccttcataataaatagcaaagagcagttrctccgcattgacaccaagtaattccagtccacatttgactttaagcacatctggaggaatagcggactttttttaggattgaaagtgaactttactttca

SEQ ID NO: 437363 - DNA, 201 bp, Homo sapiens
taaaaaaatcaccaccaagagaatcattgagaatggccaagaaagggtggaagtggaggaagatggagagttgagttaaagtccttcataataaatagcawagagcagttactccgcattgacaccaagtaattccagtccacatttgactttaagcacatctggaggaatagcggactttttttaggattgaaagtgaac

SEQ ID NO: 437364 - DNA, 201 bp, Homo sapiens
agaatattttgggggggtcagaggaactgctggggaagcagaagcagagcgtctgcaccccttttctctgccttcagtgaatttccagcttttgggggtgktttttcttcttttgatacaggatttcgttcctttggctccctgggaagtgggggcctttcttccttctgcatgtcctacggtagtgatgggacaggcagc

SEQ ID NO: 437365 - DNA, 201 bp, Homo sapiens
atgaccgctatggcgaggcgggggcggagggcggctgcacaggcggcaggcccttcgaggaccccttcgagtacgtcttcagcttccgcgacccagccgasgtcttcagggagttcttcggcggccaggacccattctcctttgacctcttgggaaacccgctggagaatattttgggggggtcagaggaactgctgggga

SEQ ID NO: 437366 - DNA, 201 bp, Homo sapiens
cctacgaggtgttgtcggacgccaagaaacgcgatatctatgaccgctatggcgaggcgggggcggagggcggctgcacaggcggcaggcccttcgaggamcccttcgagtacgtcttcagcttccgcgacccagccgacgtcttcagggagttcttcggcggccaggacccattctcctttgacctcttgggaaacccgc

SEQ ID NO: 437367 - DNA, 201 bp, Homo sapiens
tccgcgacccagccgacgtcttcagggagttcttcggcggccaggacccattctcctttgacctcttgggaaacccgctggagaatattttgggggggtcrgaggaactgctggggaagcagaagcagagcgtctgcaccccttttctctgccttcagtgaatttccagcttttgggggtgttttttcttcttttgataca

SEQ ID NO: 437368 - DNA, 201 bp, Homo sapiens
gagggcggctgcacaggcggcaggcccttcgaggaccccttcgagtacgtcttcagcttccgcgacccagccgacgtcttcagggagttcttcggcggccrggacccattctcctttgacctcttgggaaacccgctggagaatattttgggggggtcagaggaactgctggggaagcagaagcagagcgtctgcacccct

SEQ ID NO: 437369 - DNA, 201 bp, Homo sapiens
gcgaggcgggggcggagggcggctgcacaggcggcaggcccttcgaggaccccttcgagtacgtcttcagcttccgcgacccagccgacgtcttcagggarttcttcggcggccaggacccattctcctttgacctcttgggaaacccgctggagaatattttgggggggtcagaggaactgctggggaagcagaagcaga

SEQ ID NO: 437370 - DNA, 201 bp, Homo sapiens
taagcacatctggaggaatagcggactttttttaggattgaaagtgaactttactttcagaacagctgtacccaagaatttataaacacttcatgccaacrcctgttcttatcgttgggactacacggataggacctctgtttgtctttcaatcgttgtaaaatatctgtatgcaatttgctatttattaaacttaagcct

SEQ ID NO: 437371 - DNA, 201 bp, Homo sapiens
ggactttttttaggattgaaagtgaactttactttcagaacagctgtacccaagaatttataaacacttcatgccaacacctgttcttatcgttgggactrcacggataggacctctgtttgtctttcaatcgttgtaaaatatctgtatgcaatttgctatttattaaacttaagcctgaggcagacaatgattatttgc

SEQ ID NO: 437372 - DNA, 201 bp, Homo sapiens
gaggaatagcggactttttttaggattgaaagtgaactttactttcagaacagctgtacccaagaatttataaacacttcatgccaacacctgttcttatygttgggactacacggataggacctctgtttgtctttcaatcgttgtaaaatatctgtatgcaatttgctatttattaaacttaagcctgaggcagacaat

SEQ ID NO: 437373 - DNA, 201 bp, Homo sapiens
atggtaaaaaaatcaccaccaagagaatcattgagaatggccaagaaagggtggaagtggaggaagatggagagttgagttaaagtccttcataataaatrgcaaagagcagttactccgcattgacaccaagtaattccagtccacatttgactttaagcacatctggaggaatagcggactttttttaggattgaaagt

SEQ ID NO: 437374 - DNA, 201 bp, Homo sapiens
gatggtaaaaaaatcaccaccaagagaatcattgagaatggccaagaaagggtggaagtggaggaagatggagagttgagttaaagtccttcataataaayagcaaagagcagttactccgcattgacaccaagtaattccagtccacatttgactttaagcacatctggaggaatagcggactttttttaggattgaaag

SEQ ID NO: 437375 - DNA, 201 bp, Homo sapiens
aggaggaagcggagaggagattcaagcaggtggccgaggcctacgaggtgttgtcggacgccaagaaacgcgatatctatgaccgctatggcgaggcgggsgcggagggcggctgcacaggcggcaggcccttcgaggaccccttcgagtacgtcttcagcttccgcgacccagccgacgtcttcagggagttcttcggcg

SEQ ID NO: 437376 - DNA, 201 bp, Homo sapiens
ttaagcacatctggaggaatagcggactttttttaggattgaaagtgaactttactttcagaacagctgtacccaagaatttataaacacttcatgccaayacctgttcttatcgttgggactacacggataggacctctgtttgtctttcaatcgttgtaaaatatctgtatgcaatttgctatttattaaacttaagcc

SEQ ID NO: 437377 - DNA, 201 bp, Homo sapiens
atttgactttaagcacatctggaggaatagcggactttttttaggattgaaagtgaactttactttcagaacagctgtacccaagaatttataaacacttyatgccaacacctgttcttatcgttgggactacacggataggacctctgtttgtctttcaatcgttgtaaaatatctgtatgcaatttgctatttattaaa

SEQ ID NO: 437378 - DNA, 201 bp, Homo sapiens
agacctcatctctccaaatcatggtttttaaacatttgctgggcttggtggcatgagcctgtggtcccagctacttgggaggctgaggcaagaggattgtmtaagcccaggcggtcaaagctgcagtaagccgtgattgcgtcactgcactccagcctgggtgacagagtgagaccctgtctcaatcaaaaaataaaaaag

SEQ ID NO: 437379 - DNA, 201 bp, Homo sapiens
agttagacctcatctctccaaatcatggtttttaaacatttgctgggcttggtggcatgagcctgtggtcccagctacttgggaggctgaggcaagaggaytgtctaagcccaggcggtcaaagctgcagtaagccgtgattgcgtcactgcactccagcctgggtgacagagtgagaccctgtctcaatcaaaaaataaa

SEQ ID NO: 437380 - DNA, 201 bp, Homo sapiens
aaaaaccatattttcgtgttcctagtaaaattaattagcaaggtatatagtaaatattcaacaaatgtttactaaacaaataaatccatagagttttaaarctagagctatgttagataaaaacagaaatgttttcatttcttctccatgttaacagtgtcaagcactggtcataaggcaacttaattttatctagacttt

SEQ ID NO: 437381 - DNA, 201 bp, Homo sapiens
gaggcatcctacatgagattttccaaacagattatcttttctcaagaaaatctcactctctaaaaaacaattcagtttaagttcaattgcaaacttgttcyggactgaatctaccaagaatattgatccactattttatggtttcaatctgtctaccaaaacacatgctttatatcaacatagtctactacttatgacatt

SEQ ID NO: 437382 - DNA, 201 bp, Homo sapiens
tattaatacatataataatatatataatatttttgtttgaaaaaaggtaaaattggatgaaatgatttgatatctgagacttaaagtattccacacttacaaaaaaaaaagtgtgggggacatgaagacagaaaagaaacaatgttgataattgttgaagctagatgatggatacatgagggttcattatgctgttctcta

SEQ ID NO: 437383 - DNA, 201 bp, Homo sapiens
tctttatagtagtatgagaacagactaatacatccaggctgcagtgagctgagacatgccactgccctctagcctgggtgacacagcaggaccctctttcwaataaataaataaataaataaataaataaataaataaataaagccctttatcaaatgaagggcaataacttaaacaatcggtttttaaaaaaatgtttat

SEQ ID NO: 437384 - DNA, 201 bp, Homo sapiens
tgccaaaggagattaacatttgagtcagtgggctgggaaaggcagactcacccttaatctgagtgggcgcaatctattcggctgccagcacggctagaatrtaagcaggcagaaaaatgtgaaaagagagactggcctagcttcgcagcctacagctttctcctatgctggatgcttcctgccctcgaacatcagactcca

SEQ ID NO: 437385 - DNA, 201 bp, Homo sapiens
aaaaatgtctaatcagaagtcaaggagtcaaagcaagaaggaatcattaaagtgaggagtgaggtaaatggctcctctagcagcaatgctttgtgcatgagtgtgtgtgtgtgtgtgtgtgtgtgtgtgtgtgtgtcagagagaaggagagagagatagactcatactaaaagtttgagtacaaaagatggtagtaagtac

SEQ ID NO: 437386 - DNA, 201 bp, Homo sapiens
ctgtccaccctccttattcttttggtcgtgagacaaagagttctgggtaatacctcagacaacgatactgcaatatttatttggaaaaaatatttccaatrtatagcaccgttatttctctccatttattcaagtggtctgtaaatacctcagtaaggttttacagttttctttctatatgccgcacaattctcataaaat

SEQ ID NO: 437387 - DNA, 201 bp, Homo sapiens
aaaatgtctaatcagaagtcaaggagtcaaagcaagaaggaatcattaaagtgaggagtgaggtaaatggctcctctagcagcaatgctttgtgcatgagtgtgtgtgtgtgtgtgtgtgtgtgtgtgtgtgtgtcagagagaaggagagagagatagactcatactaaaagtttgagtacaaaagatggtagtaagtaca

SEQ ID NO: 437388 - DNA, 201 bp, Homo sapiens
cagtgcttcagtgaaaaaatccaacatttatccctccagaatgtcttatatttacttctaaaaatcccaggagtattaccaccccttaatgttaattttartgttaatttctcaacatagatgtttccagcccatacaagtattgtaattcaagctccaaacacaagtgaagtcaaatctatggttataaatgtcttaggg

SEQ ID NO: 437389 - DNA, 201 bp, Homo sapiens
ttaaattaaataattttaaatatacagtattatagtcttcctaagataattatattatctgaaattctttatgatctaatcagcatttgttctatttgcartctctcatagtggattctgtttttaaatgttcaattgtaagttcatcttcaccagtgcttcagtgaaaaaatccaacatttatccctccagaatgtctta

SEQ ID NO: 437390 - DNA, 201 bp, Homo sapiens
aaatgtctaatcagaagtcaaggagtcaaagcaagaaggaatcattaaagtgaggagtgaggtaaatggctcctctagcagcaatgctttgtgcatgagtgtgtgtgtgtgtgtgtgtgtgtgtgtgtgtgtgtcagagagaaggagagagagatagactcatactaaaagtttgagtacaaaagatggtagtaagtacaa

SEQ ID NO: 437391 - DNA, 201 bp, Homo sapiens
aatgtctaatcagaagtcaaggagtcaaagcaagaaggaatcattaaagtgaggagtgaggtaaatggctcctctagcagcaatgctttgtgcatgagtgtgtgtgtgtgtgtgtgtgtgtgtgtgtgtgtgtcagagagaaggagagagagatagactcatactaaaagtttgagtacaaaagatggtagtaagtacaat

SEQ ID NO: 437392 - DNA, 201 bp, Homo sapiens
cagcatttaaatgttgattcaaattcttgaaaagcagtacaagcaaacaaaacaatgcagctgacccaaggctgtctgtggcatgccctgctctgaacagmctactttccgtccaacacaccctacctgaattcctgcacaactaacttgaggccaaactccttggtgccaggggatgtctcaaaaaaaaaaaaaatccct

SEQ ID NO: 437393 - DNA, 201 bp, Homo sapiens
atgccctgctctgaacagcctactttccgtccaacacaccctacctgaattcctgcacaactaacttgaggccaaactccttggtgccaggggatgtctcaaaaaaaaaaaaaatccctgttattttattatgcagagaaattcttactattctttttgtaaatctctattgtctgagctttgccttccatttatctcctt

SEQ ID NO: 437394 - DNA, 201 bp, Homo sapiens
tggtgaaactccatctctactaaaaacacaaaactttagctgggcatggtggcagccacctgtaatcccagatactcaggaggctgaggcaggagaatcgyttgaacctgggaggtggaggttgcagtgagccgagatcgtgccattgcactctagcctgggtgacaagagcaagactctatctcaaaaaataaaaaaaaa

SEQ ID NO: 437395 - DNA, 201 bp, Homo sapiens
gactgcctcctcaagtgggtccctgacccctgacccctgagcagcctaactgggaggcaccccccagcaggggcagactgacacctcacacggccgggtaytccaacagacctgcagctgagggtcctgtctgttagaaggaaaactaacaaacagaagggacatccacaccaaaaacccatctgtacatcaccatcatca

SEQ ID NO: 437396 - DNA, 201 bp, Homo sapiens
ggcacagaaaagtaatccaaatatcactggtaaaatcaagggaaattccacatgcagaaaaagataagtagaagcaagggaaagaggcatgccgttcatgwttttctttttttcctacttaaccctggggtgctaactgcatcgtgaatagtacacaagcagccctgtttcctgataacctgggagccattggttcttcct

SEQ ID NO: 437397 - DNA, 201 bp, Homo sapiens
caaccgaggatctatagagagaacacaaaacaaagccactgaatagcctggtagtcactgaaatgtcttcatggtaacatgcaaaaagatagaaattatayacacacacacacacacatacacacatatagtgtatgtgtatttataggaatgaagttaataggtacactttatcatattattattttcattctacaacta

SEQ ID NO: 437398 - DNA, 201 bp, Homo sapiens
ccatttgtagtttgtcagatttctagtcaaagaaaggcacacaaactttgctacaacctggtggcttaatatttagttcagcttcctgctcaaaaacaatrtatgtatgatgaaatgttgagcaatttggaggaggcaggcagaactcaaacatggatttgttttgactcaaaaggtaatatttggttgattttgaaagat

SEQ ID NO: 437399 - DNA, 201 bp, Homo sapiens
caggcagatcgtgaggtcaggagtttgagaccagcctggacaacatggtgaaactccatctctactaaaaacacaaaactttagctgggcatggtggcagscacctgtaatcccagatactcaggaggctgaggcaggagaatcgcttgaacctgggaggtggaggttgcagtgagccgagatcgtgccattgcactctag

SEQ ID NO: 437400 - DNA, 201 bp, Homo sapiens
attttatagagtttgacttttttcattaagaagtgtaaacctgcctatttcacgaaattctctctagctttatgcatattacagtcacatccatatttgasaaactggaatcacactacagaatattagcaacatcattctattacaccacaatttatcttgagaattttaatctcaaagtaccatctgatgtaatgcatt

SEQ ID NO: 437401 - DNA, 201 bp, Homo sapiens
ctgggatccccattttgtggcaggccaggtcttaccaatgcaggcctccatcacaactgtttctatactaactgagtggtgaagttaaatattaaaagctwaaaaagccagtgcccagccaggcacagtggctcacacctgtaatctcaacactttgggaggctgaggcaggcagatcgtgaggtcaggagtttgagacca

SEQ ID NO: 437402 - DNA, 201 bp, Homo sapiens
ttccacaaccccttatcttaacccagacactcccttccactaattccaggtcttcagatagactctttcaatcaattgccaatcagaaaagtttttaatcyacctatgacctggaagctccctcccattcttcccagctttgagttgtcctgcttttctggaccaaacccatgtacatctaattgatgtcttgcatctccc

SEQ ID NO: 437403 - DNA, 201 bp, Homo sapiens
agagagttgaaaaaatgctagtgtgttgggtttgtttttttcccaccttctgggcatgaacttacactcattttggactttctgcatctaatccagctctkgtctaaagttgccactcaataaatatgtattgagtgattcatgaaggaaacaatcaataagtacttttaataatagccattcctgagaatctcagatatc

SEQ ID NO: 437404 - DNA, 201 bp, Homo sapiens
ccaaatttcaaattattcccttggaagaagtcccagaaacaggatatttaaaaatctcttggtacatattgccaccaaattgtcttccaaacaggtgcacmaatttattttgctagaaagtgtgtaaaccaaaaataaaattctaagccccccaaccaactcataaaccctccctttggccaaggacattccaaagttaac

SEQ ID NO: 437405 - DNA, 201 bp, Homo sapiens
ttaagtgtgcagagctcatataagacacagccaagagaccaaatatccctaaagaagataagagtttacatgccaagaaaatatccataattcttaataaragcttttatccttacagtgccttaaatttgtgtcgctttacaattttatgtaagttgatcagcttttacaaatgctttcagatatatcatcaattcttat

SEQ ID NO: 437406 - DNA, 201 bp, Homo sapiens
gtgaccagtccccagtaaaaatcctgggcactgggtatatccgatgagctttcttatagatcacatttcacaggtgacgtgggtaacaatgctggaggatytggcacatcccatgtgacctctgggaaaagactcttaaaagcttgtgcctggtttcctatgaactttgcccatgtacatttttcttttgctgaacgtatc

SEQ ID NO: 437407 - DNA, 201 bp, Homo sapiens
ctccttctgatctcttttaaaaatgatgtttattttacaaagttgaggtcatattgatatgaaattttatctcttgctttttaaaattaacataaacatcrtttaatttcctctaaaatgcttcatagaccagaaatcttctattgtatgaaaccaatagttatttatacataataatattcaactccatggtgtagcaat

SEQ ID NO: 437408 - DNA, 201 bp, Homo sapiens
caaaaaatgtctaatcagaagtcaaggagtcaaagcaagaaggaatcattaaagtgaggagtgaggtaaatggctcctctagcagcaatgctttgtgcatragtgtgtgtgtgtgtgtgtgtgtgtgtgtgtgtgtgtcagagagaaggagagagagatagactcatactaaaagtttgagtacaaaagatggtagtaagt

SEQ ID NO: 437409 - DNA, 201 bp, Homo sapiens
tgaataaccctggagggcattctgccaagtgaaataagccagacacagaaagacaaatgctgtatgagctcactaacgtggaatcaaaaacaatcgaactmatagaagcagagagtagaatggtggtttctaggggctggggttgggagaaggtggaagggaaagccaggagatgttggtcaaagagtagaaaatttcact

SEQ ID NO: 437410 - DNA, 201 bp, Homo sapiens
ctgtgagacccccatctctataaaaaataaataaaattaaaatacaaaaaaatcccatttaaaataccaacaacaacaaaattaagtggtacctatgccayaaacaaaattataaaaatacttaaaaatacaaagaaaaaagagacatagagagctatactatatttatggatgttaaaattcataatcacatcaatgcat

SEQ ID NO: 437411 - DNA, 201 bp, Homo sapiens
ccacctgcctcggcctcccaaagtgctgggattacaggtgtgagccaccgtgcccggccctagtgttcgttttttaataccacaaagaattataaggcagrggctttttttttttttagaactctggtcagaagtcaggttaattaaaagtttaatatttaggctataaacgttttttaaaggccttttctgctttttctt

SEQ ID NO: 437412 - DNA, 201 bp, Homo sapiens
ctgcctcggcctcccaaagtgctgggattacaggtgtgagccaccgtgcccggccctagtgttcgttttttaataccacaaagaattataaggcagaggctttttttttttttagaactctggtcagaagtcaggttaattaaaagtttaatatttaggctataaacgttttttaaaggccttttctgctttttcttcttt

SEQ ID NO: 437413 - DNA, 201 bp, Homo sapiens
atgtacaacttctcactggccttttagttagcttaaaaacctccccaaattggctcctatatgacttgttcttctatttccttccacttctgctcctcctyccttttgccattttcaataacacgtgaaggaatctgcaggagacttctaatgactctaaaacccctcgaagaatgcagaaaaggtgccattcatccctcc

SEQ ID NO: 437414 - DNA, 201 bp, Homo sapiens
tagtaatgaaataaaaatcttgactttctttccaccaagcactcccttgcattgctggcttatctaattatgtttgcttagaagttccagagattgaatcttgagacaatccagatgcatatgaaattctcccccaccaggaacttcaaggctgcagctaatttacaacccagacaagcccgagatggtaccagcccaatt

SEQ ID NO: 437415 - DNA, 201 bp, Homo sapiens
actagaaaatctagaagacatggataaattcctcgacacatacactctcccaagactaaaccaggaagaagttgaatctctgaatagaccaataacaggakctgaaattgtggcaataatcaatagcttaccaaccaaaaagagtccaggaccagatggattcacagctgaattctaccagaggtacaaggaggaactggt

SEQ ID NO: 437416 - DNA, 201 bp, Homo sapiens
aaaattgatggcaaataatttttaaaaaggcaaacaccccaacagaaaaatagcaaagtacaagaatagtcaactcgaaaaaaaaagagaaataaaaatgrctgatagaaaaaatattcaatctcatgcagtaatcaaaggaataaaaactaaagcaaaatttggctgggtgtggtagctcatgcctgtaatcccagctct

SEQ ID NO: 437417 - DNA, 201 bp, Homo sapiens
aagttgaatctctgaatagaccaataacaggagctgaaattgtggcaataatcaatagcttaccaaccaaaaagagtccaggaccagatggattcacagcygaattctaccagaggtacaaggaggaactggtaccattccttctgaaactattccaatcaatagaaaaagagggaatcctccctaactcattttatgagg

SEQ ID NO: 437418 - DNA, 201 bp, Homo sapiens
aggatgtttaagtgtgcagagctcatataagacacagccaagagaccaaatatccctaaagaagataagagtttacatgccaagaaaatatccataattcytaataaaagcttttatccttacagtgccttaaatttgtgtcgctttacaattttatgtaagttgatcagcttttacaaatgctttcagatatatcatcaa

SEQ ID NO: 437419 - DNA, 201 bp, Homo sapiens
ctaaaaccataaaaaccatagaagaaaacctaggctttaccattcaggacataggcatgggcaaggacttcatgtctaaaacaccaaaagcaatggcaacraaagccaaaattgacaaatgggatctaattaaactaaagagcttctgcacagcaaaagaaactaccatcagagtgaacaggcaacctacaaaatgggaga

SEQ ID NO: 437420 - DNA, 201 bp, Homo sapiens
aaattgataaaatatttctgggaaggcagttttacaatatataatatgaatctttaaaatgttcatttttgtggggggtctgtatcctgctgaagaaatctttttttttttttttttaagacaaggtcttgctctatcacccaggctggagtgcagtggcatgatcttggttcactgcagcctctgcccactgagctcaag

SEQ ID NO: 437421 - DNA, 201 bp, Homo sapiens
tgttgttaatagttagagctttttatttcatgcatatataggcaagcatatatacatagttttgtttaataaaaatgaatcatactttacatattaaatgytattgaatcgtagccaaaaaaccaaccaaacaatgtaattatctgaaaatagaaaaagagttaaataaattacaggggtgttttgctagctttttttttt

SEQ ID NO: 437422 - DNA, 201 bp, Homo sapiens
ctccattgcaaaaaaaaaaaaaaaggaataaaagctaaaacaaaatgtaatatagtattccatgtatgaaactggcaaagatgaaaagaatgtcaataacyactattggccagaaagcagcaaaatggacactcatttatttctggtaaaactacacaaattgataaaatatttctgggaaggcagttttacaatatataa

SEQ ID NO: 437423 - DNA, 201 bp, Homo sapiens
aaaaaaacaaacatgccattttcagtagaaaaaaggatgaagggcatgagtacataattcataacagaaatatgaagggttggccaggcgtggtggctcaygcctgtaatcccagcactttgggaggccaaggtgggcagatcacctgagatcaagagttcaaataccagcctggcaaacatggtgaaacctcatctctac

SEQ ID NO: 437424 - DNA, 201 bp, Homo sapiens
cttattcaggactcttgctataccaaagtccccaagctttgccaccattccgttcttgctaagaaaaatgttctataaatggagaaaatgtcatgttgttygaggtacttcaagaaaagatcagttctgtcttagtcttctctctgagctgttacctgagcttttatgtccctgtgtaatatcttcctgtcatgaatatgt

SEQ ID NO: 437425 - DNA, 201 bp, Homo sapiens
gctcaagtgatcctcctgcctcagcctcccaaagggctgggattacaggcatgagcctggccaggtagaagttttaataataattaggttttccaaaaagrcagcagtaacctctgcagacttaaaagtccctgtctgacagctttgaagagagcagtggttctcccagcacgcagctggagatctgagaacaggcagact

SEQ ID NO: 437426 - DNA, 201 bp, Homo sapiens
gcctgtatcaaaacatctcatataccccataaatatatacacttactatgtacccacaaaaattttttttttaattaaaaaattaaagaaaaagaatatamcagctgggtgcagtggcttatgcttgtaataccagcactttgggaggccgaggcaggctgatcgcaaggtcaggagttcgagaccagtctgaccaacatg

SEQ ID NO: 437427 - DNA, 201 bp, Homo sapiens
agtatacttataagagcatacagcattgtttcataaaatataaaaactagaagttgtccaacaaaataccattataatgctcagtacagaatacttcattktaagtacaaaatttgtggactccaaacaataagcttgtacctcatgaacatgtgcagataggtctgtcagaatataccatagcttaatgggttaaaaaaa

SEQ ID NO: 437428 - DNA, 201 bp, Homo sapiens
tcaattattatatcataaaaacttctcaatcctatacataatatgttagaattaagaatattaaatgcagagtgttttctgttgctatgttactcactttycctatacagaaaaatcttatttattagaaattagaagaatttcagttataaaaagaaaattaagcctaaagtatacttataagagcatacagcattgttt

SEQ ID NO: 437429 - DNA, 201 bp, Homo sapiens
gcaaacacaactgaattgcaccatacattcatttgacttatatgaatttatctgtatgcactgcggtgggagaaagagagagagagatcaatttcagcagyatggtagctctactcaatgagtgtgtggccaagtgcatgtgggatgggagacagctgtctcagtgcctgcaagcttctcctaggagagcattccagggca

SEQ ID NO: 437430 - DNA, 201 bp, Homo sapiens
ggagaaagcaaaaaaaaaaaaaaagtttagcaattcagtaaaagccttaaaattacaactccctaggtcaattttgtttgacattatagattcttaaaacyattggtctcatatcacaaaatagagcaattctataaaatactagggggaaaatcatgcaggcaaccgagatcacaaggtggctccccagccagctattta

SEQ ID NO: 437431 - DNA, 201 bp, Homo sapiens
gtatttggaggactcatttgaacaccaaacatttttctttccctttttttttttttgagacagtgtctcactctgttgcccaggctcgagtgcagtacagygatctcagctcactgcaacctctgcctcctgggttcaagtgattctcctgcctcagcctcctaagtagctgagactacaggtgggtgacaccacacccag

SEQ ID NO: 437432 - DNA, 201 bp, Homo sapiens
ttaatttcttttctacaattccaataattcaagattagtctgacaatgagcatacttacaggatgtttaagtgtgcagagctcatataagacacagccaaragaccaaatatccctaaagaagataagagtttacatgccaagaaaatatccataattcttaataaaagcttttatccttacagtgccttaaatttgtgtc

SEQ ID NO: 437433 - DNA, 201 bp, Homo sapiens
tattagttgttgacaatgtatcaggtcttctattttaatttggctatgataaaaattaatattatgagtaaaatagctcttttatttaaagaaaagtaaawtaaaatgtaataatttatctaaagaaataacaccaataaaataaaatgggagaataaaaagtatttggaggactcatttgaacaccaaacatttttcttt

SEQ ID NO: 437434 - DNA, 201 bp, Homo sapiens
attttacacacagtgagagtactgatgaaaaattaatatgcaatttctttaaatgaaaaaaaccattttttcagagtccctttgcatatttctagtaatayataacatcactttttttcagaaaaatagaaattaatattaacatttacagaaacaatatgtatggggtaataataaaagttattaaatttggtcattaga

SEQ ID NO: 437435 - DNA, 201 bp, Homo sapiens
ctctcaagcttttctcattcatgccctgttttaagtgtacaacattcttaaccagctccctaaatctgctcctagtattttgtagtcaataccaaaatgamcacttctgtttcacgcagatcaaagcaaagaataagaaagagtggcagttaaaactttttggactccattctttcatttcagcagggcaacgtcagcacc

SEQ ID NO: 437436 - DNA, 201 bp, Homo sapiens
gcactccagcctgggcgacagagggagactccctctcaaaaaaaaaacaaaaaaagaaaaaagaaaaaaaaaggagaaatatgaatggtcaacaaacatayggaaaaatccttcagcctaaataataattacaggaatacagattaaaatgagagacaattttcagtatactactgatgaaggtttttttttctttcatct

SEQ ID NO: 437437 - DNA, 201 bp, Homo sapiens
tgacactaaatcagagaaaagttactaaagtaacaaataataaaagtgttaaagtaacaaatataccaagaagcaaaacaatgtttttaaattgtagttaraagcactagggtcacctgtaatcccagcaatttgggaggccaaggcaggaggatcacttgagcccaggagttcaagaccagcctgggaaacatagttaga

SEQ ID NO: 437438 - DNA, 201 bp, Homo sapiens
aagggctaatatccagaatctacaatgaactcaaacaaatttacaagaaaaaaacaaacaaccccatcaaaaagtgggcaaaggacatgaacagacacttytcaaaagaagacatttatgcagccaaaaaacacatgaaaaaatgctcaccatcactggccatcagagaaatgcaaatcaaaaccacaatgagataccatc

SEQ ID NO: 437439 - DNA, 201 bp, Homo sapiens
acaaagtcccactcttgtcccccaggctggagtgcaatggcgccatctcggctcactgcaacctccgccacccgggttcaagcgttcctcctgcctcaacytcccaagtagctgggattacaggcgcctgccaccatgcccacctaatttttgtatttttagtagagacgaggtttggccaggctggtctcgaactcctga

SEQ ID NO: 437440 - DNA, 201 bp, Homo sapiens
actcctgacctcaggtgatccacctgcctcggcctcccaaagtgccgggattacaggcataagccaccgcgcccagcctaactttgtaaacatttatcagyctccaagaatatctagtaccttagtttttctacttgtttttcaacctcacttcaccacaaaaccaggtcccagacctcacactcatgcagatgctcctgg

SEQ ID NO: 437441 - DNA, 201 bp, Homo sapiens
caatgacaacagcagcagctaccactactatggctattactgtgctcagcagtaataacatactattaagaatgacaatctctccctctccctctccccayggtccccctctccccacggtccccctctccccacggtctccctctccctctctttccacggtctccctctgatgccgagctgaagctggactgtactgtt

SEQ ID NO: 437442 - DNA, 201 bp, Homo sapiens
gtgaggagcccctctgcctggctgcccagtctggaaagtgaggagcgtctctgcccagccgccatcccatctaggaagtgaggagcatctctgcccggccrcccatcgtctgagatgtggggagcacctctgccctgccgccccgtctgggatgtgagaagcgcctctgcccggccgcgaccccgtctgggaggtgaggag

SEQ ID NO: 437443 - DNA, 201 bp, Homo sapiens
ttgagctggccttggaaggtaaatcaagtcagctgtccttcctcacgcattttccctcactctgaggaaggtggcatcctggatttttcctcctttatatgtgcatgtctagagtggtcatttgtccaggataattagcaggcaagtctctttaggcatagggagatatcaaaacaacatatttgaaagtgtctgatacaa

SEQ ID NO: 437444 - DNA, 201 bp, Homo sapiens
gctgggcgtggtagcgggtgcctgtagtcccagctactcgggaggctgaggcaggagaatcgcttgaacccagaaggcggagtttgcagtgagccgagatmacgcctttgcactccagccttggtgacagagtgagacgctgtctcaaaaaaaaaaaaaaatgacctatgttcttttatttcattttctaatgtataactt

SEQ ID NO: 437445 - DNA, 201 bp, Homo sapiens
tggggcatactttggactgtgagccaagcctctgtgaaccatcactccaacactcagctggttgtgggccaaggctccaactggtctttacaccacgtcattttttttttttttttttttgagatggagtcttgcttgctctgtcacccagctggagtgtgactggagtgtggtggcacaatctcgtctcactgcaacctt

SEQ ID NO: 437446 - DNA, 201 bp, Homo sapiens
tcaagtggtctgtaaatacctcagtaaggttttacagttttctttctatatgccgcacaattctcataaaatttattcctaagtggatgaatacacaaatacacacacacacacacacacacacacacacacactcatatatatttgctgttattactataaatgagatctgacaaccaactgaggaaaacatttgcaata

SEQ ID NO: 437447 - DNA, 201 bp, Homo sapiens
caagtggtctgtaaatacctcagtaaggttttacagttttctttctatatgccgcacaattctcataaaatttattcctaagtggatgaatacacaaatacacacacacacacacacacacacacacacacactcatatatatttgctgttattactataaatgagatctgacaaccaactgaggaaaacatttgcaatac

SEQ ID NO: 437448 - DNA, 201 bp, Homo sapiens
ctagatacattattgaaaatgacaattctaggggttagtatgatttgctttattacagctttttgttgttaaagttgaattattactaatttattctgtgktttttttttctatgtattttgaacagatagctcttccctgttcaaaaaaaattaactcggccgggtgcagtggctcacgcctgtaatctcagcactttgg

SEQ ID NO: 437449 - DNA, 201 bp, Homo sapiens
catgtagctcctccaatatgaccctataaaacttccctctagcccctgcctcttagcagacagcctcttctctgctgtgctgcccattgcactcttgcaaygtatctctgtactttaataaatctgcctttctttacttacaattgtgttgataaattcttttactgcccacaacactggccccagccagttgcatctgtg

SEQ ID NO: 437450 - DNA, 201 bp, Homo sapiens
cagtcttatatagaatctgcaactgatgctctatagacctaaatctcaacatgttccaaatttagatcactaccttgtctctcccgaccccattaccctcyatgtgatgtatttttggttgatgaaagcttcatgcatttgaattagaaaactgggaatatccttgagccccttctcttcctcagttcccacactcagtat

SEQ ID NO: 437451 - DNA, 201 bp, Homo sapiens
tgaaccatctccccactgctagcgctgaaaaataaaggcactttccttctactgcaccttgtccttgttattcaattttgcaagcggagggcagctgaacytgtgttttgttgatatttcactaccaaaatatatgaaagagctatagttaattggcttaaagaaaaagtaagtgcttaaatgaaatattttatcagaaaa

SEQ ID NO: 437452 - DNA, 201 bp, Homo sapiens
ttggaggacatggtggctcaggctgggtgcagtggctcacacctgtaatcccagtactttgggaggctgaggcaggtggatcacttgaggtcaggagttcraaaccagcctggccaacatggtgaaacccagtctgtactaaaaatacaaaaattagctgggcatagtggcatgcgcctgtaatcccagctgctccagagg

SEQ ID NO: 437453 - DNA, 201 bp, Homo sapiens
ggcttgctaacaattgtttagggcaatggaacaggtaatcaagagattgatagtctaaagttggaggacatggtggctcaggctgggtgcagtggctcacrcctgtaatcccagtactttgggaggctgaggcaggtggatcacttgaggtcaggagttcaaaaccagcctggccaacatggtgaaacccagtctgtacta

SEQ ID NO: 437454 - DNA, 201 bp, Homo sapiens
aggttatgggaacaccaccaaggtataagactcctattggggatgggctgctcacagagtagcttgactggcattaggttacccaccagcctcaggggaaygtatttgcagcaaggagcacagactcatggtgtttccctctttgtgggggacccaggattcaatatagaagtgagatccttgattttgaaagatttagat

SEQ ID NO: 437455 - DNA, 201 bp, Homo sapiens
atatctgattgcttctgccctattgtttatgtaaaaatgcagattcactgagccagactaaattgtgtattcagtgaaaggctgatcaaggactcaaaagmatgcaaacttttgtctcttatctacctatgacctggaagccctccccccgaccccacccccgccctgcttcaagtcgcccctcttttctggaccaaacca

SEQ ID NO: 437456 - DNA, 201 bp, Homo sapiens
gacctgcaacccaaaatctctgccaaaatccaaacagtcacctcaaaacttacctcaggagtcaaatatttgggaataagattctctaaaaagggcctttkcaaaatggaatttatggatggtcggtctcgaggagatacttgaaagagctgagatatcaaggaatggagctcacgagaaaaccccggagatattggggca

SEQ ID NO: 437457 - DNA, 201 bp, Homo sapiens
ctagaccacacttgctcttcaagggtcccagctagcaagaatggagggggacctaaggaagaagaccctattagatatttaggaggtatacaggaagaggmaggaaaggaagaaaaagcaattttaaaccctccaaaacaaaatgagcccacaaactaaaattctaacacctgaataaatctaatggtaagacagatggca

SEQ ID NO: 437458 - DNA, 201 bp, Homo sapiens
aagtggtctgtaaatacctcagtaaggttttacagttttctttctatatgccgcacaattctcataaaatttattcctaagtggatgaatacacaaatacacacacacacacacacacacacacacacacactcatatatatttgctgttattactataaatgagatctgacaaccaactgaggaaaacatttgcaataca

SEQ ID NO: 437459 - DNA, 201 bp, Homo sapiens
agtggtctgtaaatacctcagtaaggttttacagttttctttctatatgccgcacaattctcataaaatttattcctaagtggatgaatacacaaatacacacacacacacacacacacacacacacacactcatatatatttgctgttattactataaatgagatctgacaaccaactgaggaaaacatttgcaatacat

SEQ ID NO: 437460 - DNA, 201 bp, Homo sapiens
ggcgcgcacctatgccagctactcagggaggctgaggcaggagaatcgcttgaacccaggaggcggaggttacagtgagccaagattgtgccactgcactccagcctgggcgacagagggagactccctctcaaaaaaaaaacaaaaaaagaaaaaagaaaaaaaaaggagaaatatgaatggtcaacaaacatacggaaa

SEQ ID NO: 437461 - DNA, 201 bp, Homo sapiens
tgaggcaggagaatcgcttgaacccaggaggcggaggttacagtgagccaagattgtgccactgcactccagcctgggcgacagagggagactccctctcaaaaaaaaaacaaaaaaagaaaaaagaaaaaaaaaggagaaatatgaatggtcaacaaacatacggaaaaatccttcagcctaaataataattacaggaat

SEQ ID NO: 437462 - DNA, 201 bp, Homo sapiens
ggccatgctgggatgagaaaagtgggtcacagcagaattaggccatgtagtgttaaatgtgataatatgtggaatggaccttattctgcaggtattatccaaaaaaaaatctgagcagagtaataatatgccaagataactttagtaactgatatcgtttggctgtgtcccacccaaatctcatcttgaattcctgtgtgt

SEQ ID NO: 437463 - DNA, 201 bp, Homo sapiens
gtgctgcccattgcactcttgcaacgtatctctgtactttaataaatctgcctttctttacttacaattgtgttgataaattcttttactgcccacaacaytggccccagccagttgcatctgtgacactaaccaaaataaagggtcactgggaagagcacagaagagcttgactttacacagctgagtttcagatactgg

SEQ ID NO: 437464 - DNA, 201 bp, Homo sapiens
caagtttatactcacattttatgtatcttttttttggcagaatttcctgtaaaacatttctgtaattattggttgctaaataaaaaccgcatttcagaccrtaagttttttggaatacgagtaacttctaaggctccaaagacagaactgtaatttcagaaataactcctttaggaaggaacatcatgataagcatcccca

SEQ ID NO: 437465 - DNA, 201 bp, Homo sapiens
gtctacctattccctctccaccccccaaatcctatacaaattcctcttcctcggccgggcatggtggctcatgcctgtaatgccagcactttgggaggccraggcgggtggatcacaaggtcaggagattgagaccctcctggctgacacagtgaaaccctgtctcttctaaaaatacaaaaaaattaaccaggtgtcgtg

SEQ ID NO: 437466 - DNA, 201 bp, Homo sapiens
tgaacaacttcagcaaagtttcaggatacaatatcgaagtacaataatcaataggattcctatacaccaataacattcaagcagagagccaaatcaagaaygtaatcccatttacaatagccaccaaaaaataaaataaaatacctaggagtacatctaaccaaggaggtgaaagatctctacaagaagagctacacaaca

SEQ ID NO: 437467 - DNA, 201 bp, Homo sapiens
tataagaacacgtaattgttataagcttgagatgtcaacagatttgatttgtgtaacatatatgacattctgatggaaataaaaacaaaatctttctaacaaaaaaaaaagaaagaaaggctgggaatagtggctcttgcctgtagtcccagcactttaggaggccaaggcaggtggatcacatgaggtcagtggctgcct

SEQ ID NO: 437468 - DNA, 201 bp, Homo sapiens
gctggcagaagaaatgcagaactagggtactgaaagatgccaggggtagagacagagatttaagagagatctacttattggtaaacactgaagtggggcartttaggtgacaatggacagaaaaagaaaatcagaaaaggacacatggttgaggacatacacagggcgaagacagagataagcctgagggagagcagtcag

SEQ ID NO: 437469 - DNA, 201 bp, Homo sapiens
ctactgttggacatttgttttctaactgtttatctgtggggtttttctttgaataaactcctaatttcttagttttctactgagtttcaaatttttgtacsatgacttcatatatggattttatctttttattgatttaataaaaggctaacaccattaagtcaatacttgcaaatatttttggcaccttctcgatttctt

SEQ ID NO: 437470 - DNA, 201 bp, Homo sapiens
tctttacaccacgtcattttttttttttttttttttgagatggagtcttgcttgctctgtcacccagctggagtgtgactggagtgtggtggcacaatctygtctcactgcaaccttcacctcccaggtccaagtgattcttgtggctcagcctcccaagtagctgagattacaggtgtgcaccaccacacctggctaatt

SEQ ID NO: 437471 - DNA, 201 bp, Homo sapiens
gcagtggctcacgcctgtaatctcagcactttgggaggccgaggcgggcggatcacaaggtcaagagatcgaaaccatcctggccaacatggtgaaacccygtctctatcaaaaatataaaaattagctgggcgtggtagcgggtgcctgtagtcccagctactcgggaggctgaggcaggagaatcgcttgaacccagaa

SEQ ID NO: 437472 - DNA, 201 bp, Homo sapiens
gggacagtttttcctaagaaaaagaagatagggagagagaaggagagaaggactcatggatatagagaagttatggagctagaaaactgattctgcagaaygcgtactatctctgtgaaggaggaggcacagtcacacgatgagtgtgtgtggatgggagtgagctgagggatgagggtttggaatcactgatacactggg

SEQ ID NO: 437473 - DNA, 201 bp, Homo sapiens
gaacccagccttggggaatctcacagccctcacctacctcaacctcaggtagggaggccgagccagggccacgtgggagcgtgtgcttctcagtctcaagyactactgagtgacccacccagtgaccccgagaggatggcagtgctgggatgccatgcctggggagccagtccgctgcctttctcccttccacagccgaaa

SEQ ID NO: 437474 - DNA, 201 bp, Homo sapiens
gtccttgtccacctgctctcctctcccccaggctgacctgtgctcgccctcggatctcctccagggcactgcccgggggctgcggaccgcgctggaggccrtgaagcgggtggggggcaaggccctaccgcccctctggcccccctctggtctgggcggcttcgtcgtcttctacgtggtcctcatgctgctgctctatgt

SEQ ID NO: 437475 - DNA, 201 bp, Homo sapiens
ctcacctacctcaacctcaggtagggaggccgagccagggccacgtgggagcgtgtgcttctcagtctcaagtactactgagtgacccacccagtgacccygagaggatggcagtgctgggatgccatgcctggggagccagtccgctgcctttctcccttccacagccgaaaccagctgtcgctgctgccaccctacatc

SEQ ID NO: 437476 - DNA, 201 bp, Homo sapiens
ctgggacccagctacagagtcagtggtgagcagtggaggcagccccatgcccccctttttctcctaggcccttcctcaccagactctgtcctgagacctcsgcggtacccccaggttccagatgagaaggacttaatgactcagctgcgccaggtgagcagaggcgggagctgcgtgggcaggggcctgggccgggcacct

SEQ ID NO: 437477 - DNA, 201 bp, Homo sapiens
aagctgggagccctgccccctgacatcggcaccctgggaagcctgcgacagcttgtgaggatggggacgggaccaggaaagggacccctgagccaggcagygggaccttctagggggaggttggggagggcctggagcaaagacagagatgggagggtgggttctgctgggcctggtctcatggccccttcccactgcctt

SEQ ID NO: 437478 - DNA, 201 bp, Homo sapiens
caaatctcactgatgagggctccaccctcatgatctcaattacttccctaaggcctcgcttcctaatcccatcactttgggggttaggatttcagcagagractttttgggtgacacatttcagtccataacagtgtatgtgctttgaagaagttacaggccaggaatcttcagaggagaattacaccttcattgtccagg

SEQ ID NO: 437479 - DNA, 201 bp, Homo sapiens
acacatttcagtccataacagtgtatgtgctttgaagaagttacaggccaggaatcttcagaggagaattacaccttcattgtccaggcttttgcagtatrtaaaacaaactgtaaacgatctgatttgatcttgacctagcaaccctctgatgctggcagggcgcagatgagcagctgtgttagaaacgtggacacaggc

SEQ ID NO: 437480 - DNA, 201 bp, Homo sapiens
aagggacaggcacaagttccctgctagccctgagccccccactctccctgcctcccagacgcctctccttccctgacccctgctctatgtggtctacactkccaggtccttgagtcccggctgcagcggcccctgcctgaggacctggccgaggctctggccagtggggtcatcctgtgccagctggccaaccagctacgg

SEQ ID NO: 437481 - DNA, 201 bp, Homo sapiens
gtgtttgtgtctgtgtgtgtctttgtgtgtgtgtttgtgtttatgtctgttgtgtgtgtttaggtctgtgttgtgtgtgttgtatgtgttgtgtgtgtttrggtgtgtgttgtgtgggttgtgtgtatgtgttgtgtatgtttatgtgtgtgttgtgcatgttgtttgtgtctgtgtgtatgtatgttgtttgcgtgtgtg

SEQ ID NO: 437482 - DNA, 201 bp, Homo sapiens
tgtgtttgggtgtgtgttgtgtgggttgtgtgtatgtgttgtgtatgtttatgtgtgtgttgtgcatgttgtttgtgtctgtgtgtatgtatgttgtttgygtgtgtgtgggttttgtgtgtgtgtgtgtgtgtgtgtgtgtgtgtgtgtgtgtgatgtgtgtatgattcctgtgttgggatcaggtagatgcgggtgatg

SEQ ID NO: 437483 - DNA, 201 bp, Homo sapiens
tagggagctgtgggttttattctgtgcttagggccgccatgaatccagactgtgccttttttttttttttttttgagacagagtctcgctctgtcacccasgctggagtgcagtggcgcaatctcggctcactgcaagctccgcctcccaggttcacgccattctcctgcctcagcctcccaagtagctgggaccacaggc

SEQ ID NO: 437484 - DNA, 201 bp, Homo sapiens
cgccggagcggacgcccccagggagctggggacacccccatgggacaggtgaggggctcggacggagccgtggggggacagagactgggggcctccatgcsttcaccacgcgctctacggaggcttctccattgtccctgctggagattgggtccctcggtctcccttgcaccaggcacccttgggctccaggggagggtg

SEQ ID NO: 437485 - DNA, 201 bp, Homo sapiens
tctgctttcccccgggggagggacttgaggccgttgctggagggaaggaaatcttatctcctagctgggagtgctggccagctagagactgtccttccacrcctccacccgcaggatctgtccaaccatgcaccctccaccctggtgtctgtggatggtagggggtgggggacttaactgtgacaggtgagtcaagcctca

SEQ ID NO: 437486 - DNA, 201 bp, Homo sapiens
tctggccagtggggtcatcctgtgccagctggccaaccagctacggccgcgctccgtgcccttcatccatgtgccctcccctgctgtggtcagttggggcyggggaagaggtgggggatgggccggggcgcctgtggcctctcccttaccacattttcttctttcacccaccccagccaaaactcagtgccctcaaggctc

SEQ ID NO: 437487 - DNA, 201 bp, Homo sapiens
caatgtccggaggaaccagctcagtacgctgcccgaaggtgagaagaatgaagaactggagaggaggtgtttgtatgtgcgtcccagttggctcaggctgyggtaacgaaaacactgcagaccgggtagcttatacatggcaggcattcatttttcacagttctggaagctgaagttcaggatctgggtgcttccatggtc

SEQ ID NO: 437488 - DNA, 201 bp, Homo sapiens
ctccactcgccgccgggggtgaggaggcggcagccacgacctccgtgcccgggtctccaggtctgccggggagacgcagtgcagagcgggccctagaggasgccgtggccaccgggaccctgaacctgtctaaccggcgcttgaagcacttcccccggggcgcggcccgtagctacgacctgtcagacatcacccaggctg

SEQ ID NO: 437489 - DNA, 201 bp, Homo sapiens
aaatgaggtaagggcgtcctgtccatgggtgattgagggtgtcagccctgggagagcacctctgaactggggacctccaaattgcagggtgccaggcagargctggagctgtcctcttccttccctctgcccagcatcccagggaagggctggctcagcagagaccctgagcttagtcccacacaggaccccccaggtcct

SEQ ID NO: 437490 - DNA, 201 bp, Homo sapiens
accagggcgagccctggagcgccggagcggacgcccccagggagctggggacacccccatgggacaggtgaggggctcggacggagccgtggggggacagmgactgggggcctccatgccttcaccacgcgctctacggaggcttctccattgtccctgctggagattgggtccctcggtctcccttgcaccaggcaccct

SEQ ID NO: 437491 - DNA, 201 bp, Homo sapiens
acgccctgctggaccggccttaggggtgaaggtgggggcacagggcccaccccgcccgggaccccgggagcagaagacgcgcctgggctccgcgctctcaragaagcacgtggtgagggtggcctgggcctgggcacccttggcctgccggcctggctgcctctggggtcgagggtctgggtggaaggaccgcgggtgtcg

SEQ ID NO: 437492 - DNA, 201 bp, Homo sapiens
gcgggagctgcgtgggcaggggcctgggccgggcacctccttgtgttgctgtccttgggaccagcctccctccacatcctctgtgcccactctggcacctyccctgaggacaggaagggacaggcacaagttccctgctagccctgagccccccactctccctgcctcccagacgcctctccttccctgacccctgctcta

SEQ ID NO: 437493 - DNA, 201 bp, Homo sapiens
caacagatgaattttcagagctgtcattccggatctcagagctggcccgggagccccggggacccagagaacgcaaggaggatggctcaggtgagtagcasggctggccgggagctgggctggaccagggcctgggtccccgctcacttgctgacatgctggcctccccagcggacggagaccctgtgcagattgacttca

SEQ ID NO: 437494 - DNA, 201 bp, Homo sapiens
gccccaccccgggccccgcccggcccgggagtcgggcccgccccttcacctggcggccagggttgctgcccctcctgattgccctaaacctgcagccatcytctcccatctttgagaaccccctagacaatgaacgtgcttctcgtttgcacagaacgccctgcgcctccgagcgttgggagagattcctcctttctcttt

SEQ ID NO: 437495 - DNA, 201 bp, Homo sapiens
ggcttatttacatgatctcttaacctcagctccaatcggtctatgaagcagtccccacgagctcctctaataactgctttctctccctcttcatctacacytcttaacccccgtcccaccgagatccgagcagccccgggcacccccttcccagtgactggcccctaagcccgaggtttctgctttctgtgccgcaacccc

SEQ ID NO: 437496 - DNA, 201 bp, Homo sapiens
taccgcccctctggcccccctctggtctgggcggcttcgtcgtcttctacgtggtcctcatgctgctgctctatgtcacctacactcggctcctgggttcmtaggccccaaaatcggccctccctcacccctttcccttcctctctatttataaggtccctgctccacccgaccccacctgcggtgccttcagccccaacc

SEQ ID NO: 437497 - DNA, 201 bp, Homo sapiens
cagttctggaagctgaagttcaggatctgggtgcttccatggtcagcttctggcagggtgcttttcctggctgcagactgccggctccttgtggtactctycgatggcggagagcagagacagccctctggggcctctttgataaaggagcacaaatctcactgatgagggctccaccctcatgatctcaattacttccct

SEQ ID NO: 437498 - DNA, 201 bp, Homo sapiens
agagaggccatctcccatctctgcctctgcctttacagtcaacagatgaattttcagagctgtcattccggatctcagagctggcccgggagccccggggrcccagagaacgcaaggaggatggctcaggtgagtagcagggctggccgggagctgggctggaccagggcctgggtccccgctcacttgctgacatgctgg

SEQ ID NO: 437499 - DNA, 201 bp, Homo sapiens
gtgggcacaggcctgccctcagctgctctgctgttctctccttaggagcagcgaccacccgaattaagccctggggcaggggacagggagagggcaccaarcagcaggtaccccaagcccccaaactgacgccactgcccgatcctcccaccccccaaccgcctccttccctgaccccggggtctgcccctcttgccctgt

SEQ ID NO: 437500 - DNA, 201 bp, Homo sapiens
gtcagcttctggcagggtgcttttcctggctgcagactgccggctccttgtggtactctccgatggcggagagcagagacagccctctggggcctctttgrtaaaggagcacaaatctcactgatgagggctccaccctcatgatctcaattacttccctaaggcctcgcttcctaatcccatcactttgggggttaggat

SEQ ID NO: 437501 - DNA, 201 bp, Homo sapiens
agccggctctggggggactgaaggtcctgtccgggctgggcctttccgcaactctccccgacacctccttttccccagacctgtcccggaaccggtttccygaggtgcccgaggcggcgtgccagctggtgtccctggagggcctgagcctctaccacaattgcctgagatgcctgaacccagccttggggaatctcacag

SEQ ID NO: 437502 - DNA, 201 bp, Homo sapiens; identical to SEQ ID NO: 128575

SEQ ID NO: 437503 - DNA, 201 bp, Homo sapiens; identical to SEQ ID NO: 128598

SEQ ID NO: 437504 - DNA, 201 bp, Homo sapiens
aacctcccaaagtgttgggattacaggcgtgagccattatgcccagctcctttacacatgttaaatcatttaaagtgtacaattttgtcatacttactatwctttttttattgtaaaatgtacataacaaaatttaccatgataatcatttttaagtgtacagttcagtggcattaagtacattcacattgttgtgcagtc

SEQ ID NO: 437505 - DNA, 201 bp, Homo sapiens
ctctgtaaaaacgcaccaatcagcactctgtaaaatggaccaatcagcaggatgtgggcggggacaagggaataaaagctggccaccccaaccatcagagscaattggttcgggtctcctcccacagctgtggaacccttgttcttttgctcttcacaataaatcttgctgctgctaactttttgggtctgtgccaccttt

SEQ ID NO: 437506 - DNA, 201 bp, Homo sapiens
agtctagattgtgagcaatctaagcaggaggacagtaccatattcatgtttatgtttctgaacagaaccacagtatagtaagacttcagttatactaattkaaatgaaatcaatctatcagtgatgttaggttaaaatgaggtgaaactgtaaactgagaccaaatttcttacatgaccgttatgccagttacagatgagg

SEQ ID NO: 437507 - DNA, 201 bp, Homo sapiens
tggccaggctggtctgtaactcctgacctgaggtgatccatccgccttggcctcctaaagtgctgggattacaggcgtgagccactgcgcccggcctaackttacatttagaaaatgaaattgcgcaagtgtaactattaaaatgtttatcgtatctacctaaataaactatgtagtctgttttcatgaaaaacgacagca

SEQ ID NO: 437508 - DNA, 201 bp, Homo sapiens
gagcctaaatctggctggatgacttttctagaagttacaggaaagatctgtgaaatgctcttctgtcctgaagcaatactgttgaccagaaaggacactcyatattgtgaaaccggcctaatttttctgactcttacgaaaacgattgccaacacatacttctacttttaaataaacaactttgatgatgtaacttgacct

SEQ ID NO: 437509 - DNA, 201 bp, Homo sapiens
tcatgcatgtgtgtagttttctagggtggatgttgggttgtagatgctgggtcatggtgtacgtacattttttcatttactaggtccttgccttccaaagwggctccaccaagttacactcccatcagcagcttgttagagtatccatgtctccctaccccagctgactaatgttagtttgtagcaatctgttatactttc

SEQ ID NO: 437510 - DNA, 201 bp, Homo sapiens
accccagctgactaatgttagtttgtagcaatctgttatactttccttaatttgttgggctaaaaaactgcagagtttatcttgttttaattcttgtttcyttgattcccagtaaggttaaatatttttccatttgagcatcttttcatatattaactgatcatttgtaaatcttatgcagggaattgcctgtttatatcc

SEQ ID NO: 437511 - DNA, 201 bp, Homo sapiens
gccaccacgcctggttaattttttgtatttttagtagagacggggttttaccgtgttagccaggatggtctcaatctcctgaccttgtgatccacccgccytggcctcccaaagtgctgggattacaggcgtgagccatcgcgcccggcctgctgattattctttaaagctgacaatgtcttcggtcattatagccgttta

SEQ ID NO: 437512 - DNA, 201 bp, Homo sapiens
atgtggaaagaaaccggctggtgacctggagtaaaagatcctcacataccacctggaccaggcaactctgcacagaccaagaaaggaaatgccaggggagmcagtaaaatacttccttggtggtcaggactaaggaaaaagaagccacagggcagtgaagcattctttggttgggacataccaaggtaaagcattccttag

SEQ ID NO: 437513 - DNA, 201 bp, Homo sapiens
ccaacgagttttcacctccagccactcctatagaggctgcagtgcgagccggctggaggacctaaccacagacagacacttcctgtgtgggggagggggcygggcaaccattagacagacagcccagcccaaggccaggggccagatggcggggtctcagggaggagcaaggtccaggggcagccgggtgaatcacaaggc

SEQ ID NO: 437514 - DNA, 201 bp, Homo sapiens
cttagacctctcttaactgtctgaaattcgggtttcttaaaggacacaggcggtctctgaggctcccgccagcggaaacaatctcccattaaaataggcawcggttaaatatttgctgaacaaagtaaactacgtctccccgaatcccattgagcgcctactcgagatccggaccggagccgggcaggacgggcccgtcgg

SEQ ID NO: 437515 - DNA, 201 bp, Homo sapiens
cacttcctgtgtgggggagggggctgggcaaccattagacagacagcccagcccaaggccaggggccagatggcggggtctcagggaggagcaaggtccaggggcagccgggtgaatcacaaggcccctcatccctaaggcctcaatgcgtgggagtggtgagggccagaaggaggccaagaccttaagaggtggtggggc

SEQ ID NO: 437516 - DNA, 201 bp, Homo sapiens
tgtgggggagggggctgggcaaccattagacagacagcccagcccaaggccaggggccagatggcggggtctcagggaggagcaaggtccaggggcagccrggtgaatcacaaggcccctcatccctaaggcctcaatgcgtgggagtggtgagggccagaaggaggccaagaccttaagaggtggtggggctgcagcgtc

SEQ ID NO: 437517 - DNA, 201 bp, Homo sapiens
tagacagacagcccagcccaaggccaggggccagatggcggggtctcagggaggagcaaggtccaggggcagccgggtgaatcacaaggcccctcatcccyaaggcctcaatgcgtgggagtggtgagggccagaaggaggccaagaccttaagaggtggtggggctgcagcgtcccctaggcagcactgagccggggtgg

SEQ ID NO: 437518 - DNA, 201 bp, Homo sapiens
taaaaacaaggaaaaagaaatttcttagcaaaaaggcactacggactataaagtcaaaaagatacctatgggttaccttacttacattccactgctgatgyccccacatctaaaacaaaagatcagtttctcagaaattatatacttccactttcccttccctcagaactaaaagtcttttagcacaggtaccacccctag

SEQ ID NO: 437519 - DNA, 201 bp, Homo sapiens
ggaaaaagaaatttcttagcaaaaaggcactacggactataaagtcaaaaagatacctatgggttaccttacttacattccactgctgatgcccccacatytaaaacaaaagatcagtttctcagaaattatatacttccactttcccttccctcagaactaaaagtcttttagcacaggtaccacccctagaatttccag

SEQ ID NO: 437520 - DNA, 201 bp, Homo sapiens
cctaccaaattaaggctaagaaaactttatctttttctttttcttccctttaactattccccatcttattattaatgtaactagatctaactcacctgaasttattacttttgatgcctgtttagttacaccttgtgaagatttaaataaccaaacacagcttactacttcagaaaaatatctctgtccctcttggacttc

SEQ ID NO: 437521 - DNA, 201 bp, Homo sapiens
gttacaccttgtgaagatttaaataaccaaacacagcttactacttcagaaaaatatctctgtccctcttggacttccttagtttagaaagacataataarttcctataaggatactaataatccagagaatagtagctatattaattggtaggaattggacttttgtccctctaaaacaaaatctctatattctgcttgg

SEQ ID NO: 437522 - DNA, 201 bp, Homo sapiens
ctgtccctcttggacttccttagtttagaaagacataataagttcctataaggatactaataatccagagaatagtagctatattaattggtaggaattgkacttttgtccctctaaaacaaaatctctatattctgcttggtctaatatcctatagaacactagaagtctaaggtggactgcttccagaggtctttgtcc

SEQ ID NO: 437523 - DNA, 201 bp, Homo sapiens
ctttccgtcgcaggtcaggccgcgttccacttccgccggcagtccagacacgcccctccgggtccaatccccgcccctcacacacctggccccgccccgtygggagctcggcggtcctctctgcgctaggtcttcttagcgcccgacggggccacgcccatccccgacgctctgaggtcacctacagggccgaccctcggt

SEQ ID NO: 437524 - DNA, 201 bp, Homo sapiens
ggctttgtgtagccagccaggtccgctctcggcgggtactcgtggtcttgctctggcagaggggaggtcagttggagttgggggttcgaggcttgcaagtrcagggcttgtagctccttctctggattgtggaccctctgggtgctgggccctattggggttggtgggttggttggatccagaagggctgttcgccgtggg

SEQ ID NO: 437525 - DNA, 201 bp, Homo sapiens
cagggccgaccctcggtgggcggagggacggagggaagatggctgcagagaccggatattggcgctgcctccccgaatcccggacctgcgctgaggaggckgttcatctgtggccagcggtgcttcgggacccgcgctgggggaaccctggcgacggggcctggccctgctatatgcgggggcctcggctggagtgagcgg

SEQ ID NO: 437526 - DNA, 201 bp, Homo sapiens
ctcccgagtgtagatacaaatacacacattgcctgcatgtgcacacactcagcctttctaaagtttccaagctctttaaaaaaacaaaaaacaaaaaacamctgaatagttcaggttgtagacatgaaataaatactcttgaagatgtcatttcaaagcaatctatgtgctccttttccagctcagatgagacattgatct

SEQ ID NO: 437527 - DNA, 201 bp, Homo sapiens
gtttcaatacaatgcagtttacagtataatagaattcatattacaaatataagtgcattgaaatcaatgttggacaattaaacaagaacaagaacaaaaakactttttatcctctagagctgtgcttgctgttcactatggtagtaaaatgtggctagtctgaattaagatacgctgtaagtactaaatactcatgagatt

SEQ ID NO: 437528 - DNA, 201 bp, Homo sapiens
actcttacgaaaacgattgccaacacatacttctacttttaaataaacaactttgatgatgtaacttgaccttccagagttacagaaattttgtccctatktaatgaataaattgtatgtatttttctctatatgccatttttgtcttcagttttggagtctggctggaaattcagccaaagggtaaaagctcaacacagg

SEQ ID NO: 437529 - DNA, 201 bp, Homo sapiens
ctgactgaggctgggcgaagcatgtgaaatgttttgtcatgttttcttctagttggctgtgggaggctatacttgaggactggtggaaatttcagctgcaytgtgtagatttcaggtgaaggcaaacgttgtctggcacagaggaccacagatgagcctgcagagaaatactctactagtttgccggctctatgtggtttt

SEQ ID NO: 437530 - DNA, 201 bp, Homo sapiens
atgtgaaatgttttgtcatgttttcttctagttggctgtgggaggctatacttgaggactggtggaaatttcagctgcactgtgtagatttcaggtgaagrcaaacgttgtctggcacagaggaccacagatgagcctgcagagaaatactctactagtttgccggctctatgtggttttggattgtatttccaatgccta

SEQ ID NO: 437531 - DNA, 201 bp, Homo sapiens
acagacagtgaataaatattacttaaaaatttaacttctccacaataaattttgtgagcttctggaactcattgttagcaaaggctgtggaatcttgtctstgagaatttctagtagtaccctcatctttcgagggtggtacactcatgtaaacatgagtgcagttgcatgaatctctcccgagtgtagatacaaatacac

SEQ ID NO: 437532 - DNA, 201 bp, Homo sapiens
atgagtactcagtacaagtttagggtttttgttgttagtaatagtagtattacctagcttccattgagagaatctgactatatttagtttccataaattayatgatcaaatacagttagatactagttaccatgtaaagcagatcccctaatgggaagaaacgagactggtctatcagtaatgggacttataatctctttc

SEQ ID NO: 437533 - DNA, 201 bp, Homo sapiens; identical to SEQ ID NO: 314360

SEQ ID NO: 437534 - DNA, 201 bp, Homo sapiens; identical to SEQ ID NO: 314361

SEQ ID NO: 437535 - DNA, 201 bp, Homo sapiens
gcctaggatagtaaactgtgccaaactctctctgctgtttcctaaagtgcagtaccccaagggccattcagcctccatcttccaagaccaattttatctcrtgtctccaatgacaaggggaaaatttggcattccttggagacttaacaggatgcagtaaggtcaggcacttccaaaagctgacccatcagtccaccctta

SEQ ID NO: 437536 - DNA, 201 bp, Homo sapiens
gggtgaatcacaaggcccctcatccctaaggcctcaatgcgtgggagtggtgagggccagaaggaggccaagaccttaagaggtggtggggctgcagcgtyccctaggcagcactgagccggggtggagcgggaggcgtcaccatggggcctcaagccccaggatatgcagagttctgacaaaataaggagccccaaaggg

SEQ ID NO: 437537 - DNA, 201 bp, Homo sapiens
gaacctgtaagatgcagccacaaatgtttgctagatgaacattcgaaaaaattattttaacaattttcgaatattttggcacttgtttggaaatgtatggrgtggaaagaagtagggtatttgcattctaatccaggtccaggcaccaagggtttggctaatcttagataactgattttttttgtgggcctcactttcctc

SEQ ID NO: 437538 - DNA, 201 bp, Homo sapiens
actttttgtctaaatgctgatttttccttgcagtactgaggagcaagcattctgtttctaaataaacactttacttataacaagcccactttaaattatgwattagaacacattgagtccacttggaaaagccgattaagtcttgggctgctgtggttcctgagcatgagctttgttaagctttgtcaagtcttcctaaat

SEQ ID NO: 437539 - DNA, 201 bp, Homo sapiens
ttgcagtactgaggagcaagcattctgtttctaaataaacactttacttataacaagcccactttaaattatgtattagaacacattgagtccacttggaraagccgattaagtcttgggctgctgtggttcctgagcatgagctttgttaagctttgtcaagtcttcctaaatactatgccaggagtttcttttgaccag

SEQ ID NO: 437540 - DNA, 201 bp, Homo sapiens
tgcttggtctaatatcctatagaacactagaagtctaaggtggactgcttccagaggtctttgtccttaaaaccatatatccatttcaccaaaagagttgytctttctagctgtcaacataaccagtgtaatcctatacagcttactattactattgcaacatctgaaaactcctccccttcattaagtcataatatggga

SEQ ID NO: 437541 - DNA, 201 bp, Homo sapiens
tctagatattatagatgtcctacactttttctgagaacatttgtgtgaattgaaagttggataaatcatatgtaaaatgcatgaggcatgtgtgtagggtmaaagttatagggggtggatgtcagtggcaggaagattcaaagttgagatgtttttcttcttagcaagctaagaatctaccttctataacttctagccatt

SEQ ID NO: 437542 - DNA, 201 bp, Homo sapiens
ttatagatgtcctacactttttctgagaacatttgtgtgaattgaaagttggataaatcatatgtaaaatgcatgaggcatgtgtgtagggtaaaagttayagggggtggatgtcagtggcaggaagattcaaagttgagatgtttttcttcttagcaagctaagaatctaccttctataacttctagccattgcatcttc

SEQ ID NO: 437543 - DNA, 201 bp, Homo sapiens
actttaaccaagatatttgtgctggacatgctcacaggcacgttccagcttgcagcctatgccccttccttatttggaaatattattacttttctaagtcyttttgcaagcaacttcttcttttcctttgttctctattgcctttccctatataggaaagttttaagttattagccagtcgggtttaatttaaattgtgag

SEQ ID NO: 437544 - DNA, 201 bp, Homo sapiens
ctccagccaatggagacaggacacagtagcagggacaagctgcataagggataaaaattgcttccctcctttgtttgggtgtgctgttgccattgtttcayctgtgaggagcaccctttctgcagaaagtaaaattgccttgctgaaaacactttttgtctaaatgctgatttttccttgcagtactgaggagcaagcatt

SEQ ID NO: 437545 - DNA, 201 bp, Homo sapiens
ttacttatataactcctcatcattacactaataggtgtaaattagaggcaggaaaattttgatttagtagaaggaaggattttctaatagagctgtttttrgatgatatggactgctggaaaaaattgttggaaataatcttcagaagactgccaaatgttcctgtggcaggggatgttacaaagaaataaaaaagttgag

SEQ ID NO: 437546 - DNA, 201 bp, Homo sapiens
cctcatcattacactaataggtgtaaattagaggcaggaaaattttgatttagtagaaggaaggattttctaatagagctgtttttggatgatatggactrctggaaaaaattgttggaaataatcttcagaagactgccaaatgttcctgtggcaggggatgttacaaagaaataaaaaagttgagttatctgaattcta

SEQ ID NO: 437547 - DNA, 201 bp, Homo sapiens
tagaaagtaaaaagtttcctcttaaaaatttcccttcttgttaaagaataaatcattaagtgttagaaataatagtttcttttaaagactaacttccttcmagcctcctctgctctgtgctaataactcttcattaagccctatcctatgtagctgttagatataagggaataagtatattctatgtccttgtactttaac

SEQ ID NO: 437548 - DNA, 201 bp, Homo sapiens
tagagctgtttttggatgatatggactgctggaaaaaattgttggaaataatcttcagaagactgccaaatgttcctgtggcaggggatgttacaaagaartaaaaaagttgagttatctgaattctaagtgttcttttaattctgttgtggtctgtgtgggagcataagatagcttcaagagaaagtgctaagcttaagt

SEQ ID NO: 437549 - DNA, 201 bp, Homo sapiens
tcctatgtagctgttagatataagggaataagtatattctatgtccttgtactttaaccaagatatttgtgctggacatgctcacaggcacgttccagctkgcagcctatgccccttccttatttggaaatattattacttttctaagtccttttgcaagcaacttcctcatttcctttgttctctgttgcctttccctat

SEQ ID NO: 437550 - DNA, 201 bp, Homo sapiens
aaaatttcccttcttgttaaagaataaatcattaagtgttagaaataatagtttcttttaaagactaacttccttccagcctcctctgctctgtgctaatractcttcattaagccctatcctatgtagctgttagatataagggaataagtatattctatgtccttgtactttaaccaagatatttgtgctggacatgct

SEQ ID NO: 437551 - DNA, 201 bp, Homo sapiens
ttctagccattgcatcttctttttcatctagaggaatgtttcctccagagtgtatatgctgcaaagtggtagttctgaagatgtcaataaataccatgtaggaaaaaaaagtgggtgggttctggagttgaataaatgtgggaaaaaactggattcaagaaagataaacaggtttctttaatgctgggctcttggagatgc

SEQ ID NO: 437552 - DNA, 201 bp, Homo sapiens
atacatcatagcccatgctgttctcactgtattttgctttttccaagtataaccccgttttcacacgaatggccccttcacatatttgaagactaccgtcrtgtccgtgctgaccctttctccctgccacacatggtgagcattcccttctcttcttcagagtcaataatcccagttagtttaaccattccttagataatg

SEQ ID NO: 437553 - DNA, 201 bp, Homo sapiens
gcgcgatctcggctcactgtaagctctgcctcccgggttcacaccattctcctgcctcagcctcccgagtagctggggctacaggcgcccgccaccacacscggctaattttttgtatttttagtagagatggggtttcaccatgttggccaggatgggctcgatctcttgacctcgtgatccacccgtctcggccgccca

SEQ ID NO: 437554 - DNA, 201 bp, Homo sapiens
agctccgcctcctgggttcatgctgttctgcctcagccttccaagtagctgggactacaggcgcctgccaccgtgctcggctaatttttattttatttttwaatttttttttatttttagtagagatggggtttcactgtgttagccaggatggtctcaatctccagacctcggacttatacaagtttcttaacttcccta

SEQ ID NO: 437555 - DNA, 201 bp, Homo sapiens
tgagaatgtgagcttagtgaggacacggatcctgtatgctttgttcaccactgtgtttccagtactttaactgatactggcatgtggccaatgctcagtgratatttcctgagtgaacaaaggaatagtctttagagaagtgagaaagcatgatacttgcctgtatcttttttttttttccccatacaaagtcttgcactg

SEQ ID NO: 437556 - DNA, 201 bp, Homo sapiens
cacctccagccactcctatagaggctgcagtgcgagccggctggaggacctaaccacagacagacacttcctgtgtgggggagggggctgggcaaccattagacagacagcccagcccaaggccaggggccagatggcggggtctcagggaggagcaaggtccaggggcagccgggtgaatcacaaggcccctcatcccta

SEQ ID NO: 437557 - DNA, 201 bp, Homo sapiens
acctccagccactcctatagaggctgcagtgcgagccggctggaggacctaaccacagacagacacttcctgtgtgggggagggggctgggcaaccattagacagacagcccagcccaaggccaggggccagatggcggggtctcagggaggagcaaggtccaggggcagccgggtgaatcacaaggcccctcatccctaa

SEQ ID NO: 437558 - DNA, 201 bp, Homo sapiens
attcgtgtaattttgacatgatatttgaaaaagacaatttgggcagtaaatagcagaattaagtagtgtcttaatgtaaatggtttgtgttaccacaatayactgttctagccaaagcacattgcatgtgactcctgttgcactagtttttagtagcaaaaatgaacctgtaaaagaatgtaggttttaaggctttggtaa

SEQ ID NO: 437559 - DNA, 201 bp, Homo sapiens
cctccagccactcctatagaggctgcagtgcgagccggctggaggacctaaccacagacagacacttcctgtgtgggggagggggctgggcaaccattagacagacagcccagcccaaggccaggggccagatggcggggtctcagggaggagcaaggtccaggggcagccgggtgaatcacaaggcccctcatccctaag

SEQ ID NO: 437560 - DNA, 201 bp, Homo sapiens
aacaggccgctgactggtactggtccatggcctgggggttggggacacttggtgtaaggcattttatttatttttttcgagacacagtcttgctctgtcgyccaggctggagtgcagtggtgtgatctcagctcactgcagcctccacctcccaagttcaagcgattctcctgcctcagcctcctgagtagctgggattac

SEQ ID NO: 437561 - DNA, 201 bp, Homo sapiens
ctccagccactcctatagaggctgcagtgcgagccggctggaggacctaaccacagacagacacttcctgtgtgggggagggggctgggcaaccattagacagacagcccagcccaaggccaggggccagatggcggggtctcagggaggagcaaggtccaggggcagccgggtgaatcacaaggcccctcatccctaagg

SEQ ID NO: 437562 - DNA, 201 bp, Homo sapiens
tcccttacccttctgctaggaacatgtctacaactatataaattcgtgtaattttgacatgatatttgaaaaagacaatttgggcagtaaatagcagaatyaagtagtgtcttaatgtaaatggtttgtgttaccacaatacactgttctagccaaagcacattgcatgtgactcctgttgcactagtttttagtagcaaa

SEQ ID NO: 437563 - DNA, 201 bp, Homo sapiens
aagtactaaatactcatgagattttgaaggtttgttatgaaaaaaactatctcattagtgatttgacattgattacatacagaaatcattatcactaaatrtatcttaaaaattaatttttcctatttttgtactttttaaaatgtggctaccaaaaattaaaattacagatgtaggccacactgtgtttctgttacacaa

SEQ ID NO: 437564 - DNA, 201 bp, Homo sapiens
caatgctcctttagagggatagaagattatttgcattatttaaatgaaaatatttttgctttttattccagcatacttaatctccaatgatttttaaaatrttaaatttattctctcataggaaaatggctttgtaaagaagcttgagcctaaatctggctggatgacttttctagaagttacaggaaagatctgtgaaat

SEQ ID NO: 437565 - DNA, 201 bp, Homo sapiens
aggtaagagtagaggaggcactcacaactttatcaagatgtgagcactggctttaacttgcctgaaaaaactctcaagaaatcactgatcataaaacatamaatctataattttttttttttttttttttgagacggagtctcgctctgtcgcccaggctggagtgcagtggcgtgatctcggctcactgcaagctccgcc

SEQ ID NO: 437566 - DNA, 201 bp, Homo sapiens
accggcctaatttttctgactcttacgaaaacgattgccaacacatacttctacttttaaataaacaactttgatgatgtaacttgaccttccagagttayagaaattttgtccctatttaatgaataaattgtatgtatttttctctatatgccatttttgtcttcagttttggagtctggctggaaattcagccaaagg

SEQ ID NO: 437567 - DNA, 201 bp, Homo sapiens
tcctatgtagctgttagatataagggaataagtatattctatgtccttgtactttaaccaagatatttgtgctggacatgctcacaggcacgttccagctygcagcctatgccccttccttatttggaaatattattacttttctaagtctttttgcaagcaacttcttcttttcctttgttctctattgcctttccctat

SEQ ID NO: 437568 - DNA, 201 bp, Homo sapiens
taggaaagttttaagttattagccagtcgggtttaatttaaattgtgaggtccagctccagccaatggagacaggacacaagctgcataagggataaaaaytgcttccctcctttgttcgggtgtgctgtcaccattgtttcatctgtgaggagcaccctttctgcagaaagtaaaattgccttgctgaaaaaactttttg

SEQ ID NO: 437569 - DNA, 201 bp, Homo sapiens
taagcttaagtgtgggagagatctttagcaatggaagcatcatggattttttatttttaagtctgtggcacatttctctgaatatcctcagtaatggccarttgttttcttcttgagggtaggtttgaattttgaaaaccattagaagtccttatcatgcctggtgaataaaaatggattagcaagatacttagaagtcct

SEQ ID NO: 437570 - DNA, 201 bp, Homo sapiens
ttagccagtcgggtttaatttaaattgtgaggtccagctccagccaatggagacaggacacaagctgcataagggataaaaactgcttccctcctttgttygggtgtgctgtcaccattgtttcatctgtgaggagcaccctttctgcagaaagtaaaattgccttgctgaaaaaactttttgtctaaatgctggtttttc

SEQ ID NO: 437571 - DNA, 201 bp, Homo sapiens
tttcacacagattctgaataatggcagtattgaatctcctttcccatgatgaattaaaaaagaaaatactgtctagatctagtgtctgattttaaaagtcrgttttagaattaaccaaagtactggcatggctctgttttgtaggattacagaagcactttgttttaaagtgctttgtactttttgtgatttccaagtttt

SEQ ID NO: 437572 - DNA, 201 bp, Homo sapiens
aagcataggtatgcttttctggtgccccctaccttccaatattttagaagactgcctcatgataaatttctaacagtggagtaactggttcataagatgtrtgtataattacgatattctagcatactggaaaacatattttcttttcgaaagtattatatcaatagaacaatatcatagcaaccttatcagtgtgggtgg

SEQ ID NO: 437573 - DNA, 201 bp, Homo sapiens
tcctttctttagacgttgatgtatatgacatgttaactgatcaatgataatagacaatgattatcgttataataaaagtcatttcagagggtctcatcatrcttgcgaaatatggtgtttaggaaggggcgtaatgaagtggatacctccctagagtgtaatctatgagtatgtactggcagaagggaaagaggaagaaga

SEQ ID NO: 437574 - DNA, 201 bp, Homo sapiens
ctgggttcatgctgttctgcctcagccttccaagtagctgggactacaggcgcctgccaccgtgctcggctaatttttattttattttttaattttttttwatttttagtagagatggggtttcactgtgttagccaggatggtctcaatctccagacctcggacttatacaagtttcttaacttccctaagccttggttc

SEQ ID NO: 437575 - DNA, 201 bp, Homo sapiens
tagccagtcaggtttaatttaaattgtgaggtccagctccagccaatggagacaggacacagtagcagggacaagctgcataagggataaaaattgcttcyctcctttgtttgggtgtgctgttgccattgtttcacctgtgaggagcaccctttctgcagaaagtaaaattgccttgctgaaaacactttttgtctaaat

SEQ ID NO: 437576 - DNA, 201 bp, Homo sapiens
tctgcagaaagtaaaattgccttgctgaaaacactttttgtctaaatgctgatttttccttgcagtactgaggagcaagcattctgtttctaaataaacaytttacttataacaagcccactttaaattatgtattagaacacattgagtccacttggaaaagccgattaagtcttgggctgctgtggttcctgagcatga

SEQ ID NO: 437577 - DNA, 201 bp, Homo sapiens
cttgggaagttttatgttttctagactcttctgtaccaaggagatgttactttaaagtaatgtggtttctttgtgtgtgtgtgttagactaatcagctggtttttttttttaagacagggtcttgctatgttgcccaggctggtctcaaacacctaggctcaagcagtctgctcaccttagcctcccaaagtgttaggatt

SEQ ID NO: 437578 - DNA, 201 bp, Homo sapiens
cctttcttgttaaagaataaatcataagtgttagaaataatagtttcttttaaagactaacttccttcaagcctcctctgctctgtgctaatgactcttcrttaagccctatcctatgtagctgttagatataagggaataagtatattctatgtccttgtactttaaccaagatatttgtgctggacatgctcacaggca

SEQ ID NO: 437579 - DNA, 201 bp, Homo sapiens
catagcccatgctgttctcactgtattttgctttttccaagtataaccccgttttcacacgaatggccccttcacatatttgaagactaccgtcgtgtccstgctgaccctttctccctgccacacatggtgagcattcccttctcttcttcagagtcaataatcccagttagtttaaccattccttagataatgtaattc

SEQ ID NO: 437580 - DNA, 201 bp, Homo sapiens
aagtgttgggattacaggcgtgagccattatgcccagctcctttacacatgttaaatcatttaaagtgtacaattttgtcatacttactattctttttttwttgtaaaatgtacataacaaaatttaccatgataatcatttttaagtgtacagttcagtggcattaagtacattcacattgttgtgcagtcatcaccacc

SEQ ID NO: 437581 - DNA, 201 bp, Homo sapiens
gaaaataaccattgcagttgattcggttgaacttgttcacggtgaatcttctagctaggattccatgtattcacttttcctttcttaacttccaaacattmtttttaatctaattttgaattttgcaaggaatcagtttggtctggactttctagacactgcttatttttctcatgagaaattctcatatttccttttatc

SEQ ID NO: 437582 - DNA, 201 bp, Homo sapiens
acttttgatcctaccaatgttcaccataatattagtgataaaatttctgttcctttccatcattgggagtgatatgcctaaacccatgtcaagctacatcytggctcactggatacgtttatgaagatgctttaaactcatactgacttctcaagaataacctttgttgataaatgtcccaattcagagacaggtagctct

SEQ ID NO: 437583 - DNA, 201 bp, Homo sapiens
ttgttcatgtatgctttttgtagagggccattggtaaaatttgcctgtaatttaatctgataagcctaagttaataaagcaatttgtgtacttatcaccayttatctgagtagtttggcagtcattcactgattaacatactaacatcttgggaagttttatgttttctagactcttctgtaccaaggagatgttacttta

SEQ ID NO: 437584 - DNA, 201 bp, Homo sapiens
aagacagggtcttgctatgttgcccaggctggtctcaaacacctaggctcaagcagtctgctcaccttagcctcccaaagtgttaggattataggcatgakccaccatgtctggccctctattcccttgtttgcagtggttttccagtcattctaaaatggctttaatattttttctttaatggaacaaattcttggagta

SEQ ID NO: 437585 - DNA, 201 bp, Homo sapiens
ataatgcatttttgatagaattggaacccaagacagctgatatgatcttatgatctattatacttgtttgttttaaatttaacaatttaattggacaaaaraatttcttgaatttgatagcacccacgaccaaaagtggtttagaatgcctcttattcttgtttttaacttttcatttatttatttatttagagatggagt

SEQ ID NO: 437586 - DNA, 201 bp, Homo sapiens
ttagtagagatggggtttcaccatgttggccaggatgggctcgatctcttgacctcgtgatccacccgtctcggccgcccaaagtgctgggattacaggcrtgagccaccacgcctggccccaggttcttactttcttaaaaaatagaatttagccaagcaaggccccatagttggtaagtctattacagtcactattatg

SEQ ID NO: 437587 - DNA, 201 bp, Homo sapiens
gcttacttgcctagctactcaccctgctatgtggcctggttcctaacaggccgctgactggtactggtccatggcctgggggttggggacacttggtgtarggcattttatttatttttttcgagacacagtcttgctctgtcgcccaggctggagtgcagtggtgtgatctcagctcactgcagcctccacctcccaagt

SEQ ID NO: 437588 - DNA, 201 bp, Homo sapiens
atctgtcagcgtgttcaaatacttttaatacacaacttttaatacacaagacacactttggaaaactttttccgaagaaaatgatccaaagagcagaatgygagtcaataaacggagaaaggcaagcagcggttttccatcttctgcgccagtgtgctgtaaacttttaagtccggaaaactatgttttaaccgatgagat

SEQ ID NO: 437589 - DNA, 201 bp, Homo sapiens
aaacaggaaaatattgcaacctatctcctgggacttgtataaggattaaatcagttaatgtaaacaaagcacttggaacaattcctgaaaatgagtactcrgtacaagtttagggtttttgttgttagtaatagtagtattacctagcttccattgagagaatctgactatatttagtttccataaattatatgatcaaat

SEQ ID NO: 437590 - DNA, 201 bp, Homo sapiens
tagagaaaagcacctctcccgaggggcccctcagtcaagctctcttaagtgctagttctctaaccttgggagtcagcctggactcctgtctctcatagccyacatccatccatcagcaaatccccttggctgcccctttgaaatgctgtaatcacttgactctgtcagtagcctcctgccagactccatggttccatcctt

SEQ ID NO: 437591 - DNA, 201 bp, Homo sapiens
ctgactcttacgaaaacgattgccaacacatacttctacttttaaataaacaactttgatgatgtaacttgaccttccagagttacagaaattttgtcccyatttaatgaataaattgtatgtatttttctctatatgccatttttgtcttcagttttggagtctggctggaaattcagccaaagggtaaaagctcaacac

SEQ ID NO: 437592 - DNA, 201 bp, Homo sapiens
ggcccactgcagccttgacttaccaggctcaaacaattctaccaacccagcctcccaaagtgctaggattacaggcatgagccactgtgcctggctgcctrtatctttaaaaattctgaggttctgattttctttagattactgatactgtatattattttatgctttaggttttgttgaaaccaaggtagctgaatttaa

SEQ ID NO: 437593 - DNA, 201 bp, Homo sapiens
agtccggaaaactatgttttaaccgatgagataatgcctttcaaagtgattagcacgaccgggcgcgcggtggctgacgccagtaatcccagcacttttgrgtggctgaggtgagcggatcaccctgaggtcagggtcgagaccagcctggccaaaatggcgaaaccccgtctctactaaaatacaaaaatcagcgaggcg

SEQ ID NO: 437594 - DNA, 201 bp, Homo sapiens
ttggaggttaaaaagaggtgaaaaatccccattagggggagattgaacctcacagaaacttccggtcataggaaaaatgttcaaaacttccctttcccctmttcttgggggaagaaagaggcaagggaaagagcagcagagaagaaagagaaactaggaaaggaagtcagagaaagcaagagcagcgaacgtggctccaca

SEQ ID NO: 437595 - DNA, 201 bp, Homo sapiens
acgccgtataagtgggtggagaataccccacacgcccagaccaataggcggggtgaacgaggaccgtgttcaccaactcagcccggctcgcggaatgcctyctgttcgcctccgggcttgcagtggctttccgtcgcaggtcaggccgcgttccacttccgccggcagtccagacacgcccctccgggtccaatccccgcc

SEQ ID NO: 437596 - DNA, 201 bp, Homo sapiens
agaaagaggcaagggaaagagcagcagagaagaaagagaaactaggaaaggaagtcagagaaagcaagagcagcgaacgtggctccacattgttgtggatygctggcacctggcagagcggcggtggctgagacactctcctcactcccggccgagccagccagagccagccagagccacccaggctgctggcccccgagc

SEQ ID NO: 437597 - DNA, 201 bp, Homo sapiens
tatctttaaaaattctgaggttctgattttctttagattactgatactgtatattattttatgctttaggttttgttgaaaccaaggtagctgaatttaasaaactatcactgttcccagaaataataaggcctgaacaattcttatttactactgcattactgataggatattgaatccttatttgtatatttattttta

SEQ ID NO: 437598 - DNA, 201 bp, Homo sapiens
ccggctcgcggaatgccttctgttcgcctccgggcttgcagtggctttccgtcgcaggtcaggccgcgttccacttccgccggcagtccagacacgcccckccgggtccaatccccgcccctcacacacctggccccgccccgtcgggagctcggcggtcctctctgcgctaggtcttcttagcgcccgacggggccacgc

SEQ ID NO: 437599 - DNA, 201 bp, Homo sapiens
tgagacactctcctcactcccggccgagccagccagagccagccagagccacccaggctgctggcccccgagccccgcaccttccgtgctgctcgggtgcrtcctgccaccctcagaggctagctggccacggacacctgcaagttggagccgagtgggagacaatgagcgcaccggagccaggagcctgtgccacgcagc

SEQ ID NO: 437600 - DNA, 201 bp, Homo sapiens
gttccacttccgccggcagtccagacacgcccctccgggtccaatccccgcccctcacacacctggccccgccccgtcgggagctcggcggtcctctctgmgctaggtcttcttagcgcccgacggggccacgcccatccccgacgctctgaggtcacctacagggccgaccctcggtgggcggagggacggagggaagat

SEQ ID NO: 437601 - DNA, 201 bp, Homo sapiens
gccggcagtccagacacgcccctccgggtccaatccccgcccctcacacacctggccccgccccgtcgggagctcggcggtcctctctgcgctaggtcttmttagcgcccgacggggccacgcccatccccgacgctctgaggtcacctacagggccgaccctcggtgggcggagggacggagggaagatggctgcagaga

SEQ ID NO: 437602 - DNA, 201 bp, Homo sapiens
tcgccggctcctccactccctcctacggcgcggggtcccctcggggcttccccttgggtctcagcgcaaagtcgggcggcggggccggatggacccgaggmggacgaataacgaggagctgcgagacgccaccttcttgctggcggcgggggagggcggcttgctagacgacctggagcgtctgtcaggctaggaggaggg

SEQ ID NO: 437603 - DNA, 201 bp, Homo sapiens
tctttgtgtgtgtgtgttagactaatcagctggtttttttttttaagacagggtcttgctatgttgcccaggctggtctcaaacacctaggctcaagcagyctgctcaccttagcctcccaaagtgttaggattataggcatgatccaccatgtctggccctctattcccttgtttgcagtggttttccagtcattctaaa

SEQ ID NO: 437604 - DNA, 201 bp, Homo sapiens
caagagcagagtcagagatatttgtaactcccagttaggagatttgaataacagaagtactcttgagtatatggtgacaaacctttattttttatttactwtttttttttttttttgagacggagtctcgctctgttgccctggctggagtgcagtggcatgatctcagctcactgcaacctccgcctcccaggttcaagc

SEQ ID NO: 437605 - DNA, 201 bp, Homo sapiens
taaccccgttttcacacgaatggccccttcacatatttgaagactaccgtcgtgtccgtgctgaccctttctccctgccacacatggtgagcattcccttctcttcttcagagtcaataatcccagttagtttaaccattccttagataatgtaattctctgatccttcaaccgtggttattttttcttaattaaccctta

SEQ ID NO: 437606 - DNA, 201 bp, Homo sapiens
agcaatgtggaaagaaaccggctggtgacctggagtaaaagatcctcacataccacctggaccaggcaactctgcacagaccaagaaaggaaatgccaggsgagacagtaaaatacttccttggtggtcaggactaaggaaaaagaagccacagggcagtgaagcattctttggttgggacataccaaggtaaagcattcc

SEQ ID NO: 437607 - DNA, 201 bp, Homo sapiens
aaccccgttttcacacgaatggccccttcacatatttgaagactaccgtcgtgtccgtgctgaccctttctccctgccacacatggtgagcattcccttctcttcttcagagtcaataatcccagttagtttaaccattccttagataatgtaattctctgatccttcaaccgtggttattttttcttaattaacccttaa

SEQ ID NO: 437608 - DNA, 201 bp, Homo sapiens
accccgttttcacacgaatggccccttcacatatttgaagactaccgtcgtgtccgtgctgaccctttctccctgccacacatggtgagcattcccttctcttcttcagagtcaataatcccagttagtttaaccattccttagataatgtaattctctgatccttcaaccgtggttattttttcttaattaacccttaat

SEQ ID NO: 437609 - DNA, 201 bp, Homo sapiens
gtagaaagtaaaaagtttccttttcgaaatttcctttcttgttaaagaataaatcataagtgttagaaataatagtttcttttaaagactaacttccttcmagcctcctctgctctgtgctaatgactcttcattaagccctatcctatgtagctgttagatataagggaataagtatattctatgtccttgtactttaac

SEQ ID NO: 437610 - DNA, 201 bp, Homo sapiens
cgaaatttcctttcttgttaaagaataaatcataagtgttagaaataatagtttcttttaaagactaacttccttcaagcctcctctgctctgtgctaatractcttcattaagccctatcctatgtagctgttagatataagggaataagtatattctatgtccttgtactttaaccaagatatttgtgctggacatgct

SEQ ID NO: 437611 - DNA, 201 bp, Homo sapiens
tgtgctggacatgctcacaggcacgttccagcttgcagcctatgccccttccttatttggaaatattattacttttctaagtctttttgcaagcaacttcytcttttcctttgttctctattgcctttccctatataggaaagttttaagttattagccagtcgggtttaatttaaattgtgaggtccagctccagccaat

SEQ ID NO: 437612 - DNA, 201 bp, Homo sapiens
gctggacatgctcacaggcacgttccagcttgcagcctatgccccttccttatttggaaatattattacttttctaagtctttttgcaagcaacttcttcwtttcctttgttctctattgcctttccctatataggaaagttttaagttattagccagtcgggtttaatttaaattgtgaggtccagctccagccaatgga

SEQ ID NO: 437613 - DNA, 201 bp, Homo sapiens
ggcacgttccagcttgcagcctatgccccttccttatttggaaatattattacttttctaagtctttttgcaagcaacttcttcttttcctttgttctctrttgcctttccctatataggaaagttttaagttattagccagtcgggtttaatttaaattgtgaggtccagctccagccaatggagacaggacacaagctg

SEQ ID NO: 437614 - DNA, 201 bp, Homo sapiens
gcagcctatgccccttccttatttggaaatattattacttttctaagtctttttgcaagcaacttcttcttttcctttgttctctattgcctttccctatwtaggaaagttttaagttattagccagtcgggtttaatttaaattgtgaggtccagctccagccaatggagacaggacacaagctgcataagggataaaaa

SEQ ID NO: 437615 - DNA, 201 bp, Homo sapiens
agcagagaagaaagagaaactaggaaaggaagtcagagaaagcaagagcagcgaacgtggctccacattgttgtggattgctggcacctggcagagcggcrgtggctgagacactctcctcactcccggccgagccagccagagccagccagagccacccaggctgctggcccccgagccccgcaccttccgtgctgctcg

SEQ ID NO: 437616 - DNA, 201 bp, Homo sapiens
ttatttggaaatattattacttttctaagtctttttgcaagcaacttcttcttttcctttgttctctattgcctttccctatataggaaagttttaagttrttagccagtcgggtttaatttaaattgtgaggtccagctccagccaatggagacaggacacaagctgcataagggataaaaactgcttccctcctttgtt

SEQ ID NO: 437617 - DNA, 201 bp, Homo sapiens
cattgtactattgcttgctaatccacatctgctggaaggctgacagtgaggccaggatggagccgctgatccacacggagtacttgtgctctggggatgcratcatcttgatcttcatggtgctaggtgcccgggtggtgatctccttctgcatcctgtcggtgatgcctgggtacatgttgccaccagatagcaccgtgt

SEQ ID NO: 437618 - DNA, 201 bp, Homo sapiens
gtgttgaaggtatcaaacatgatctgagtcatcttctctctgttggccttgaggttcagggggtcctcggtcagcagcaccaggtgctcctccaaggccaygtgcagtcccttgtagaaggtgtgatgccagatcttctctatgtcatcccagttggtcatgataccatgcttaatgggggtacttcagggtcaggatact

SEQ ID NO: 437619 - DNA, 201 bp, Homo sapiens
ttgttccacccctaggtttaaaactccagagtccagcatgtccctaaccagaaggccactggctgcccgcctaagctccaaactgatggagaacagccccraccaccaccagtacccaccatggaaattagggaacaatacgggtgcagggagaggcagaccaggctggcttccgacagaagactcagtgtagaatcagtt

SEQ ID NO: 437620 - DNA, 201 bp, Homo sapiens; identical to SEQ ID NO: 182714

SEQ ID NO: 437621 - DNA, 201 bp, Homo sapiens; identical to SEQ ID NO: 182713

SEQ ID NO: 437622 - DNA, 201 bp, Homo sapiens
gtgcatgacagatagagcaaaaacaaacaattgcatcatggattcccatgtgtgatcccaagtagatttcacaagaaaattatgcataggtattacaagcsccattgttaagagagaatgtaacagcttgaagtgtacattctatacttttatgtataaataataacttccaagagaaaagagctgataagtacatttcag

SEQ ID NO: 437623 - DNA, 201 bp, Homo sapiens
ccagcagcaccactgtacaacctttgagaggcaagttgcctgtttctcctcattcttggtggggtcctaagggtgcatgcttacctctccctctactcctscagcaatcattaagattttgccttgtttcagggatgcctggagactggaagaactattttactgtggcccaaaatgaagaatttgacaaggactaccaga

SEQ ID NO: 437624 - DNA, 201 bp, Homo sapiens
ccctgccaggtcaggcgtggggatgggggtctgggcccctcggtcctcccaggtgaaagccgggacaccaccctcacaaggattaccaggaggggcactgmccccaagggcacctggagaagagagagccgattccggggtgccgtgtgtgaggtccctgatggtggctcctttggagatggctggagaaccacgcctgtg

SEQ ID NO: 437625 - DNA, 201 bp, Homo sapiens
tctgggcccctcggtcctcccaggtgaaagccgggacaccaccctcacaaggattaccaggaggggcactgcccccaagggcacctggagaagagagagcygattccggggtgccgtgtgtgaggtccctgatggtggctcctttggagatggctggagaaccacgcctgtgagtccactgtccctaaccaggccagcgac

SEQ ID NO: 437626 - DNA, 201 bp, Homo sapiens
cccaagggcacctggagaagagagagccgattccggggtgccgtgtgtgaggtccctgatggtggctcctttggagatggctggagaaccacgcctgtgaktccactgtccctaaccaggccagcgactccgccctccctcaccacaccggcgactccaccgtcagcaggagcccagggatgaagggggcgagcaggagcg

SEQ ID NO: 437627 - DNA, 201 bp, Homo sapiens
tttccaaatgcaaaccaggcaacgagagtccacgccccaccagccaacgcgaatccacagcccactgcctctgtccttcactctgggctaccatcctcccrcccaaccactcaggaggatggcccatgccccagagctgctgagacgatggaagccaggccccccaggcctgctcacccggccttgcccattcctggccac

SEQ ID NO: 437628 - DNA, 201 bp, Homo sapiens
ctctcagggacaaaagtacttcctcgcacaccgagctgcaatttaccagccctcctgtcgggctgtaggccccacacacgagacacagtcagtttctaaayggaggccaggacgcggcgcccggcaccgcctggatgccagtgcagcccggggaggattgctgggtgtggccctggctcttggtgaggctgtttatgtgct

SEQ ID NO: 437629 - DNA, 201 bp, Homo sapiens
cacacgagacacagtcagtttctaaatggaggccaggacgcggcgcccggcaccgcctggatgccagtgcagcccggggaggattgctgggtgtggccctsgctcttggtgaggctgtttatgtgctggcctcgacggagagcacaagcagctcctccagggagggcgtgcttcctccctttcccaagagcgctgccatgc

SEQ ID NO: 437630 - DNA, 201 bp, Homo sapiens
tctaaatggaggccaggacgcggcgcccggcaccgcctggatgccagtgcagcccggggaggattgctgggtgtggccctggctcttggtgaggctgtttrtgtgctggcctcgacggagagcacaagcagctcctccagggagggcgtgcttcctccctttcccaagagcgctgccatgccggggcttggcgagtgcggg

SEQ ID NO: 437631 - DNA, 201 bp, Homo sapiens
ctcttggtgaggctgtttatgtgctggcctcgacggagagcacaagcagctcctccagggagggcgtgcttcctccctttcccaagagcgctgccatgccrgggcttggcgagtgcggggaccactccgagggccaggcaaggctagcgtggcccagggtccacttgatcctgcttgttggctccaagaccgaggttcaag

SEQ ID NO: 437632 - DNA, 201 bp, Homo sapiens
agcttagctgggaagccaccagcctctccctgagtcccaggcgagaaagaaatcatggtcaccggcatctgtgaagcaccaactcagtgccagttacgggrttcagggcaccacaggtgttcactgatttaatcctaataaaggaatcctttctccgatgaggaagccggggctgtgagaagctaggagcttgcccaaggt

SEQ ID NO: 437633 - DNA, 201 bp, Homo sapiens
gttggcaagcttagctgggaagccaccagcctctccctgagtcccaggcgagaaagaaatcatggtcaccggcatctgtgaagcaccaactcagtgccagktacggggttcagggcaccacaggtgttcactgatttaatcctaataaaggaatcctttctccgatgaggaagccggggctgtgagaagctaggagcttgc

SEQ ID NO: 437634 - DNA, 201 bp, Homo sapiens
tggagtctggctgccttcacgtggagctcctgtatctgccgtgtaccctcagctgccccaggccacctgatcacacccgtccacacctgttcatacctgtmcacacctgctcacacccatccacaccagttcacagctgctcacacctgcccaaacctgctcacagctgcctgcacctgcctacaccttctgacatctgct

SEQ ID NO: 437635 - DNA, 201 bp, Homo sapiens
acgtggctaccttgggaggtgttccagcatctggggggatgagcagttttctctttgggccgctgactgggatgcccactcacaagactggagagaagccrtggctgcttctgtggccaaagttcacctcttcacttggcaccgttctgagctcgaggctttggctcccaggcagcctgtgaggcggcatttctgggcttt

SEQ ID NO: 437636 - DNA, 201 bp, Homo sapiens
agtctgttcagccaatgaataactcgcttccctttgacgccccacccgtcctgccctggcacgagcactttatggagagactatccagatgacttatctgytcattcactaatgccccagacaccgaccacaccccgcggcaggccccagggccacactcgcaggcacagccccgcagtaagtcctgctctcatgagcacg

SEQ ID NO: 437637 - DNA, 201 bp, Homo sapiens
ctcgggacagggcaggagggtcccccgggctggagttcaaccctcgggacagggcagaagatcccctgggctggagttcaaggtcagacgggcctttcaartacaagcaaatgccagcctccctcccccaggcatcgatctcgtgaataaatcagcaatgacagccccgacaggcggctggcggggagcgggtgggggcca

SEQ ID NO: 437638 - DNA, 201 bp, Homo sapiens
tccagcagcccaatgtctccgaagtactcgcggtccactacgaaggagcagccgatcatggctggggtcctgggaggcagagacagcggcgtgaggacctsgccatgcaggcctgagccctgcctgctgggccatgagccaggaaagcctggaagaccccaccacccctccctcctgtgcctcctccctgtgcactcaggt

SEQ ID NO: 437639 - DNA, 201 bp, Homo sapiens
tctgcgtgcccacgtggctaccttgggaggtgttccagcatctggggggatgagcagttttctctttgggccgctgactgggatgcccactcacaagactrgagagaagccgtggctgcttctgtggccaaagttcacctcttcacttggcaccgttctgagctcgaggctttggctcccaggcagcctgtgaggcggcat

SEQ ID NO: 437640 - DNA, 201 bp, Homo sapiens
gcgcacgctttgtctgctttgctctctgtggaacctgaacccagagcagcctccagcacctgagctcactcaggagtctgttcagccaatgaataactcgyttccctttgacgccccacccgtcctgccctggcacgagcactttatggagagactatccagatgacttatctgttcattcactaatgccccagacaccga

SEQ ID NO: 437641 - DNA, 201 bp, Homo sapiens
ctctttgcctctggcgaggcagggcggcccgtcagcacctcctcgctccctccccagaggaagggtgatacctctttgcctctggcaagacagggcggccmgtcagcacctcctcgctccctccccagaggaagggtgacacctctttgcctctggcgagacagggcttattaacaggatcttgatgaacccacccccttg

SEQ ID NO: 437642 - DNA, 201 bp, Homo sapiens
ctcgccctcaccccgtccccggacaccgcggcctcactcgccctcatcctgttcccagacgctgtggcctcactcgccctcaccctgtccctggacaccgkggccgcactcaccctcatgcccagttctacgttctcgccgccatacacctccatgccggggtccagcagcccaatgtctccgaagtactcgcggtccact

SEQ ID NO: 437643 - DNA, 201 bp, Homo sapiens
cctgggttctgcaaggccagaagtaggcgagagggtacgtgggtgtcaccatgacctgggtcttccccataatgaggttgggggtctccagggaccaagtsccctcacaggagcagcctcccccccagtattcagatgctgaggccccatccggccccatccaggtgggaccccccccagcctcctaatatccacagaggg

SEQ ID NO: 437644 - DNA, 201 bp, Homo sapiens
ccccataatgaggttgggggtctccagggaccaagtcccctcacaggagcagcctcccccccagtattcagatgctgaggccccatccggccccatccagktgggaccccccccagcctcctaatatccacagagggtctgaggcagctgctcctgatgggaaggaccctgccagaggccagccccggcctggacagacgg

SEQ ID NO: 437645 - DNA, 201 bp, Homo sapiens
acagagagagacacacacactgagagactgagagacagagagacagagtcagagacagagtcagagacagagagagacagagagacaaagagacagagatacagacagactgagacaaagagacacagagagacaaaaagactgggagagacagagacagagacatggagagaatgaggcagagactgggaggcagagaca

SEQ ID NO: 437646 - DNA, 201 bp, Homo sapiens
cagagagagacacacacactgagagactgagagacagagagacagagtcagagacagagtcagagacagagagagacagagagacaaagagacagagatacagacagactgagacaaagagacacagagagacaaaaagactgggagagacagagacagagacatggagagaatgaggcagagactgggaggcagagacag

SEQ ID NO: 437647 - DNA, 201 bp, Homo sapiens
agagagagacacacacactgagagactgagagacagagagacagagtcagagacagagtcagagacagagagagacagagagacaaagagacagagatacagacagactgagacaaagagacacagagagacaaaaagactgggagagacagagacagagacatggagagaatgaggcagagactgggaggcagagacaga

SEQ ID NO: 437648 - DNA, 201 bp, Homo sapiens
gagagagacacacacactgagagactgagagacagagagacagagtcagagacagagtcagagacagagagagacagagagacaaagagacagagatacagacagactgagacaaagagacacagagagacaaaaagactgggagagacagagacagagacatggagagaatgaggcagagactgggaggcagagacagat

SEQ ID NO: 437649 - DNA, 201 bp, Homo sapiens
ctggcctcaggcagccgcctgcctgggagctgctaggctgtctggtgtctggggagaggagtgatcagaggtgaagagtggctccccaacccaggcccgcygctctaaacacaggaagatccacagtccttgggcagtttatagaactgctccccttggggcctatcaggatgtgtggtcttaaatcattgctgtttaata

SEQ ID NO: 437650 - DNA, 201 bp, Homo sapiens
agaaccgggaggccgtatcgccaatcacttacggctgctccgacaccacccaccgcaggacagatccagagtccggggcaggagggagccgctccctcctygccgagatgaccacacagcacgcagctaacgccaggctccctgaccccggtccggcaacccagagcctcctcgctgctcagctcagcccagccggggaca

SEQ ID NO: 437651 - DNA, 201 bp, Homo sapiens
gctaaaagacactccccccagcaccaagacagttcacagatgccatgggaacgtcaggaagttaccctgcgtggtctaaaaagggtggagccctcagttcsgggaaatcctgctgcctttcccagaaaactcaggaataatccatcccttgtttagcaaatgatcaaaaaataaccacaaaagttaattagtaaataatca

SEQ ID NO: 437652 - DNA, 201 bp, Homo sapiens
tcaggaagccgagtcccagggagagagagaaccgggaggccgtatcgccaatcacttacggctgctccgacaccacccaccgcaggacagatccagagtcyggggcaggagggagccgctccctcctcgccgagatgaccacacagcacgcagctaacgccaggctccctgaccccggtccggcaacccagagcctcctcg

SEQ ID NO: 437653 - DNA, 201 bp, Homo sapiens
gatgtgggccacgcgggagcagggcagcacctccatgctgccgccacactgccacacctgcggggagacggcgctgggtgccggcgtccttcccaacggargcgggcagcccggccagctaggggcccgtgagaggccaaggggcccggccctctgttcctggggcacccccaccaccgacgggcctggtgggtcccgggg

SEQ ID NO: 437654 - DNA, 201 bp, Homo sapiens
tgaggacgggaagccacacagcgtatgagccgttcatgaaaccgccagacagttgaggctgcccggggctggggaggggtccgcactggctgacaggtgcygtgcagggcactaagtggggccctggctgaggcggcggcaccaggttggggagaggccgcccctccctggcttctaaccacggggcaattgctctaggct

SEQ ID NO: 437655 - DNA, 201 bp, Homo sapiens
ggcaaagaccctcactcctgtggcttccttgcatgcagcacatagtaccagttaatgctagttactagccatgcatccccactgcccaagacaatccgagytgatacccctgtcttggggtaattattaatagcacctctggtaactctcaggtgtcctggtttgggtgacgatgcctgtggtcacccccgtgctacctga

SEQ ID NO: 437656 - DNA, 201 bp, Homo sapiens
gtgaatggtccagcccggggccacttcaggccgtgtcacccacacgctggggtgcactctagcagggggtggtaagccaatttaggggctgtggtgggaakttttaagaagtagtaatattgtaaatgagaagggtcactttggtgctacgtacacaaagcgctgtatgtggacagatgtaaatgtatgcgtgtgtgcgct

SEQ ID NO: 437657 - DNA, 201 bp, Homo sapiens
ctctgttatgaggttttaatcagccaaggggctcacaccagggcccttggacacggaggtgacaggcatttgccggcctcactgcccgggggcctggagcmcctcactcagttgcccacacacttggggaggtcatcaccctgcacgttttccttatcacttcatggaaaacaaggctgtaggagcaccgggtaccctctt

SEQ ID NO: 437658 - DNA, 201 bp, Homo sapiens
caggaacctcctgcctgagaagacggccctgctcacctggccttactgcacggcatcagcctgacctctggagggtggagactgaggtcagccatatccacgagaccagcctggtgaggaccctggatactgaggcttgggggctcctggctggccccgcctggcacgtgttgtcacgcatgggtgccggagaatcaagtc

SEQ ID NO: 437659 - DNA, 201 bp, Homo sapiens
ggcccctttttaagtctgataagaaacatttacaatctcctccttctgaagctccttctgaagcccgctacctggaggcttcatctgcatcataaaacctyggtctccacaaccctttatcttaaccagatgctcctttctattcataccaggtctttagataataacttaactctttcaaccaattaccaatcagaaaat

SEQ ID NO: 437660 - DNA, 201 bp, Homo sapiens
ccagtgcacacctgacatgtgtgcattgattccttctccctaaaacatacacatccagcaggctgcacgcctgcacgctaagcatggaacgcaggggcacyggccgcgatgacaacaccacgtggacccacatgcgcctttgcgatcgtcacgctgggtgtccaccatggaagccgtcctggaacttctaacatggcccca

SEQ ID NO: 437661 - DNA, 201 bp, Homo sapiens
gaatattggcaataacttctccactctgtgggccagaggagaccaacacctaaggatcaggcaaaatcctcccacaggagccagaggcacttggcccccctctcaggggctctcaagaggcaggaggcccgggcccctccccttcctggccacactagaggaagatcaggtgaaggaggccggagcccggctggcactctg

SEQ ID NO: 437662 - DNA, 201 bp, Homo sapiens
gcatggccccggctcccggcctgtgggggactcaccgacatggggatgttccaggccatgtacacgtgggacttgaagtcatccatccacacctcggcggygcgcagggcgttgcgcttggcgtagtagtcaatgtcgttgttgtagggcttcctggtgcgctcgatgtgggccacgcgggagcagggcagcacctccatg

SEQ ID NO: 437663 - DNA, 201 bp, Homo sapiens
tgggacagggagggggtccacaggcaggcggcactgagtgtcccccatgtccagctcctccctggtctccgctgggtgtcttccttcctaagatctgcgtrcccacgtggctaccttgggaggtgttccagcatctggggggatgagcagttttctctttgggccgctgactgggatgcccactcacaagactggagagaa

SEQ ID NO: 437664 - DNA, 201 bp, Homo sapiens
cggtggctcacgcctgtaatcccagcagtttgggaggctgaggtgggtggatcatgaagtcaagagatcgtgaccatcctggccaacatggtgaaatgccrtctttactaaaaaaaataaataaataaataaataaaaaataaaaaattagctgggcatggtggcgtgcacctgtagtcccagctacttgggaggctgagg

SEQ ID NO: 437665 - DNA, 201 bp, Homo sapiens
cagcaccaagcactctcatctgcaggcaggacggtgcgtggcacagccgcaggcccagcgaggagccaggacctgggtgctgagcgcagtctgcagcctcrgaggacggggtgttttctgtggcaggaatgggacagggagggggtccacaggcaggcggcactgagtgtcccccatgtccagctcctccctggtctccgc

SEQ ID NO: 437666 - DNA, 201 bp, Homo sapiens
tgtagtcccagctacttgggaggctgaggcaggagaattgcttgaacttgggaagcaaaggttgcagtgagccgagatcgcaccattgcactccagcctgrgtgacagagcaagacttcatctcaaacaaacaaacaggttccagtaaaggagccgccaagtcccaccaaaaccaagatggcaacgagtgacttgtggtca

SEQ ID NO: 437667 - DNA, 201 bp, Homo sapiens
ccagcaccaagcactctcatctgcaggcaggacggtgcgtggcacagccgcaggcccagcgaggagccaggacctgggtgctgagcgcagtctgcagcctyggaggacggggtgttttctgtggcaggaatgggacagggagggggtccacaggcaggcggcactgagtgtcccccatgtccagctcctccctggtctccg

SEQ ID NO: 437668 - DNA, 201 bp, Homo sapiens
cagggtccctcacacagggagaacaatgtggaggctttcctggaagggtcatttgctgacgacgtcctggagaccagcaccaagcactctcatctgcaggmaggacggtgcgtggcacagccgcaggcccagcgaggagccaggacctgggtgctgagcgcagtctgcagcctcggaggacggggtgttttctgtggcagg

SEQ ID NO: 437669 - DNA, 201 bp, Homo sapiens
tagactgaatttcgctctcgttgcccaggctggagtgcaatggcaccatctcagctcactataacctctgcctcctctgttcaagcaattctcctgcctcrgcctcccaagtagttgggattacaggcacctgacaccacgccctgcgaatttttgtatttttagtagagacagggttttgccaggctaggaactcctgac

SEQ ID NO: 437670 - DNA, 201 bp, Homo sapiens
ccctgcatccagccagccatccattcatccatccatgcatcccacccccccatccatccactcactcatccatctatctatccatccagccagccagccaycaatccatccattcacccatccatccacccactcatccatccattcctttatccatccatctacctactcattcacccacctagccactatctatccatt

SEQ ID NO: 437671 - DNA, 201 bp, Homo sapiens
atctatccacccatccacgcggactcatccatccatccatccctgcatccagccagccatccattcatccatccatgcatcccacccccccatccatccaytcactcatccatctatctatccatccagccagccagccaccaatccatccattcacccatccatccacccactcatccatccattcctttatccatccat

SEQ ID NO: 437672 - DNA, 201 bp, Homo sapiens
gcacctagccactatctatccacccatccacgcggactcatccatccatccatccctgcatccagccagccatccattcatccatccatgcatcccacccmcccatccatccactcactcatccatctatctatccatccagccagccagccaccaatccatccattcacccatccatccacccactcatccatccattcc

SEQ ID NO: 437673 - DNA, 201 bp, Homo sapiens
ggccggagcccggctggcactctgcactgagagcaactggggataagctggactcgccttctggcgtctgtgtgtgcagctctccccactgagagggggaygctatcaccctaggccttcgtcacgtgatttgcttggaccaacagaaagggccagaacccacccagtgccaaggccaagcttgggcctcaggagactgca

SEQ ID NO: 437674 - DNA, 201 bp, Homo sapiens
gcgaggccgtcccgtgaagtcggacctgttcttctggtcaaggcaagcaaagcaacagggctcgtagggttctcctggaagcgctggggacatgcggcctycatcgtgaaactgtcatctagaggggaggcaggcgaggctcagacgtcacactcatcacgtgtgggtgcagctggaggactgagcggggccatgaggctt

SEQ ID NO: 437675 - DNA, 201 bp, Homo sapiens
ggggacatgcggccttcatcgtgaaactgtcatctagaggggaggcaggcgaggctcagacgtcacactcatcacgtgtgggtgcagctggaggactgagyggggccatgaggcttgggcaggaggtgcgccctggctggggacagcttcctgaaccccagctctgagcggagatgggtggcgagtggggttaactggcgg

SEQ ID NO: 437676 - DNA, 201 bp, Homo sapiens
ctggcggttgccatctggaggtcgccgtctgggtggtcgctgtctggaggtcgctgtctggtggtcggctgccggcctgactcacaacagctttctgaatsctggcaaaaccatcacacttgagaggtgcgctcagcaaatccatgagatgcaccaaaaatcgcggtgcctgccgccggcctcagtccacagaaagggccc

SEQ ID NO: 437677 - DNA, 201 bp, Homo sapiens
tttagtagagacagggttttgccaggctaggaactcctgacctcaggtgatccacccgcctcggcctcccaaaagtgctggaaatacaggcgtaagccacygcacccggcccctccgctgcttttaatatgcatatttacttttatggaaattttcaagtgtatgcaaaaggagaaagatgagcagaatgtgttctcagtt

SEQ ID NO: 437678 - DNA, 201 bp, Homo sapiens
accacaacgcctggctgcacgtcacacaaccaacgcttcacaagctgaacgaattgggctgcaaagttttgcctcatccgccacattcacctgacttctcrccaaccaactaccgcttctgcaagcctctcgacaactttttgcagagaaaacgcttccacaaccagcaggatgcagaaaatgctttccaagagtttgtca

SEQ ID NO: 437679 - DNA, 201 bp, Homo sapiens
gaatttttgtatttttagtagagacagggttttgccaggctaggaactcctgacctcaggtgatccacccgcctcggcctcccaaaagtgctggaaatacmggcgtaagccaccgcacccggcccctccgctgcttttaatatgcatatttacttttatggaaattttcaagtgtatgcaaaaggagaaagatgagcagaa

SEQ ID NO: 437680 - DNA, 201 bp, Homo sapiens
tcgtgtctattcggtcaaaccacatgcagctgcctttcgcgctggccagaaacagccgtgtatccgcagtcttactgtgatccgctcactccgtccacccwctctcgtccacctggccattctgtgtccctcatcctctgtctccaccgtggttttcccgaatattctctctgtgaaaggcagcaggcccagagcttccca

SEQ ID NO: 437681 - DNA, 201 bp, Homo sapiens
cccttatgcgggcatgacagagggctcacctcttgccttctaggtcacttctcacaatgttccttcagcacctgaccctataccctcaggttattcctagrttatattagtaatgcaacaaagagtaatattaaaagctaatgattaataatgtttataataatgattgataattgtccatgatcatctctatatctgact

SEQ ID NO: 437682 - DNA, 201 bp, Homo sapiens
ggagccctcaagcggcccttatgcgggcatgacagagggctcacctcttgccttctaggtcacttctcacaatgttccttcagcacctgaccctataccckcaggttattcctagattatattagtaatgcaacaaagagtaatattaaaagctaatgattaataatgtttataataatgattgataattgtccatgatca

SEQ ID NO: 437683 - DNA, 201 bp, Homo sapiens
tccaggctcaggccttgtggggagggcagacgacttggccttcacggcctgggcttgaatcccgtcaccttctggtatgtgggcctgggacagtcccctaycttctctgtgcctcagttactcattggtaaagtggggacgatcacgccagaaactcattgttgctctgttatgaggttttaatcagccaaggggctcaca

SEQ ID NO: 437684 - DNA, 201 bp, Homo sapiens
gacactggcgttaccgcttgaccaaggagccctcaagcggcccttatgcgggcatgacagagggctcacctcttgccttctaggtcacttctcacaatgtyccttcagcacctgaccctataccctcaggttattcctagattatattagtaatgcaacaaagagtaatattaaaagctaatgattaataatgtttataat

SEQ ID NO: 437685 - DNA, 201 bp, Homo sapiens
gtgaggacctcgccatgcaggcctgagccctgcctgctgggccatgagccaggaaagcctggaagaccccaccacccctccctcctgtgcctcctccctgkgcactcaggtccctgtgctcaaggtgaggggccgctgctcctccagccaccaggacttgagtcccttggagcctggttaagccctcagcccagacagcgt

SEQ ID NO: 437686 - DNA, 201 bp, Homo sapiens
tgtgcattgattccttctccctaaaacatacacatccagcaggctgcacgcctgcacgctaagcatggaacgcaggggcactggccgcgatgacaacaccrcgtggacccacatgcgcctttgcgatcgtcacgctgggtgtccaccatggaagccgtcctggaacttctaacatggccccatctcgttgcggctgtctgc

SEQ ID NO: 437687 - DNA, 201 bp, Homo sapiens
caggactgtgggccatgattccctgacccctgctgtacatccttgaaaatgcccttcactgttttttcttttttttttttttagactgaatttcgctctcrttgcccaggctggagtgcaatggcaccatctcagctcactataacctctgcctcctctgttcaagcaattctcctgcctcggcctcccaagtagttggga

SEQ ID NO: 437688 - DNA, 201 bp, Homo sapiens
accccatgtctactaaaaatacaaaaattagctgggcatggtggcagatgcctgtagtcccagctactcaggaggctgaaacatgagaatctcttgaaccygggaggcagaggtgacagtgagctgagatcacaccactgcactgcagcctgggcgacagagcgagactccgtctcaaaaaaaaaaaaaaaaggaccaaaa

SEQ ID NO: 437689 - DNA, 201 bp, Homo sapiens
gcagccttcagacctcgacacggaaaccccacccgggtctgcagccctcagacctcgacacggaaaccccacccgggtctgcagccctcagacctcgacasggaaaccccacccgggtctgcagccctcagacctcgacacggaaaccccacccgggtctgcagccctcagacctcgacacggaaaccccacccgggtctg

SEQ ID NO: 437690 - DNA, 201 bp, Homo sapiens
cgacacggaaaccccacccgggtctgcagccctcagacctcgacacggaaaccccacccgggtctgcagccctcagacctcgacacggaaaccccacccgkgtctgcagccctcagacctcgacacggaaaccccacccgggtctgcagccctcagacctcgacacggaaaccccacccgggtctgcagccctcagacctc

SEQ ID NO: 437691 - DNA, 201 bp, Homo sapiens
gggtctgcagccctcagacctcgacacggaaaccccacccgggtctgcagccctcagacctcgacacggaaaccccacccgggtctgcagccctcagaccktgacacggaaaccccacccgggtctgcagccctcagaccgtgacacggaaaccccacccgggtctgcagccctcagaccgtgacacggaaaccccacccg

SEQ ID NO: 437692 - DNA, 201 bp, Homo sapiens
ggtctgcagccctcagacctcgacacggaaaccccacccgggtctgcagccctcagacctcgacacggaaaccccacccgggtctgcagccctcagaccgygacacggaaaccccacccgggtctgcagccctcagaccgtgacacggaaaccccacccgggtctgcagccctcagaccgtgacacggaaaccccacccgg

SEQ ID NO: 437693 - DNA, 201 bp, Homo sapiens
gggtctgcagccctcagacctcgacacggaaaccccacccgggtctgcagccctcagaccgtgacacggaaaccccacccgggtctgcagccctcagaccktgacacggaaaccccacccgggtctgcagccctcagaccgtgacacggaaaccccacccgggtctgcagccctcagacctcgacacggaaaccccacccg

SEQ ID NO: 437694 - DNA, 201 bp, Homo sapiens
ggtctgcagccctcagacctcgacacggaaaccccacccgggtctgcagccctcagaccgtgacacggaaaccccacccgggtctgcagccctcagaccgygacacggaaaccccacccgggtctgcagccctcagaccgtgacacggaaaccccacccgggtctgcagccctcagacctcgacacggaaaccccacccgg

SEQ ID NO: 437695 - DNA, 201 bp, Homo sapiens
ccacccgggtctgcagccctcagaccgtgacatggaaaccccacccgggtctacagccttgagaccgtgacacggaaaccccacccgagtctacagccttsagacctcgacacggaaaccccacccgggtctgcagccctcagacctcgacacggaaaccccacccgggtctgcagccttcagacctcgacacggaaaccc

SEQ ID NO: 437696 - DNA, 201 bp, Homo sapiens
gacacggaaaccccacccgggtctgcagccctcagacctcgacacggaaaccccacccgggtctgcagccttcagacctcgacacggaaaccccacccggktctgcagccctcagacctcgacacggaaaccccacccgggtctgcagccttcagaccatgacacagaaaacccacccactgcccaccttaaggatctcag

SEQ ID NO: 437697 - DNA, 201 bp, Homo sapiens
tgcactgttacccccacacacaggcacactcacacccacacccacagtcacacacacgcactccactcacacacaggcgcactcacacacacgcactcccwcccacatacaggcgcactcacacagtcacacacaggcactcccacctacacacagtcacacacacacactcacacacatgtgcactcagctgtcattcct

SEQ ID NO: 437698 - DNA, 201 bp, Homo sapiens
aggaggccccagcttgctgccagctctctcgagcagaatgcagacacgtcccagaagctgaaagaaagagcctcgactgcatcagttggtgcgcgtgggcrctgacagtccagaacagcccggtcacggagcagccctggagatgcaggcccaaccccaccccctatgtccgcacaccctccctgcagcatgagtccaggg

SEQ ID NO: 437699 - DNA, 201 bp, Homo sapiens
cccgtccccagatgccgtggccgcactcgccctcaccccatccccggacgctgcagccacactcgccctcaccccgtccccggacaccgcggcctcactcrccctcatcctgttcccagacgctgtggcctcactcgccctcaccctgtccctggacaccggggccgcactcaccctcatgcccagttctacgttctcgcc

SEQ ID NO: 437700 - DNA, 201 bp, Homo sapiens
aggtgcttgataaatagctgcggaacgaatgtgttccctttaggaaccccacagccacttacggccactctgtccccggggccttctgtggcgctggggcrattccacatgggaacctggtgggactgctgggcggtctgcgaggcctccccaagccagctccacaggtgccagccccgtcagtgtgtgctgagcttgcgg

SEQ ID NO: 437701 - DNA, 201 bp, Homo sapiens
gtgggggactcaccgacatggggatgttccaggccatgtacacgtgggacttgaagtcatccatccacacctcggcggcgcgcagggcgttgcgcttggcrtagtagtcaatgtcgttgttgtagggcttcctggtgcgctcgatgtgggccacgcgggagcagggcagcacctccatgctgccgccacactgccacacct

SEQ ID NO: 437702 - DNA, 201 bp, Homo sapiens
aaccccaccccctatgtccgcacaccctccctgcagcatgagtccagggacacccgcgactccgagtcctcaaccacccccgctccctgccaggtcaggcrtggggatgggggtctgggcccctcggtcctcccaggtgaaagccgggacaccaccctcacaaggattaccaggaggggcactgcccccaagggcacctgg

SEQ ID NO: 437703 - DNA, 201 bp, Homo sapiens
cctccctgcagcatgagtccagggacacccgcgactccgagtcctcaaccacccccgctccctgccaggtcaggcgtggggatgggggtctgggcccctcrgtcctcccaggtgaaagccgggacaccaccctcacaaggattaccaggaggggcactgcccccaagggcacctggagaagagagagccgattccggggtg

SEQ ID NO: 437704 - DNA, 201 bp, Homo sapiens
ctgcctctcatgaagagggtcttttgttttttgctttgtttttttgagataatttttttctggtatatctcttcctcagagttagttcttcccagataggrtggacaacagcaattggtaggggaatctacctttttatgctgctggtggcattgggattgctctgggttattgactcaccagagtagagagaatgtactc

SEQ ID NO: 437705 - DNA, 201 bp, Homo sapiens
tcctgacctcgtgatccgcccgcctcggcctcccaaagtgctgggattacaggcgtgagccaccgcgcccggccgcatatctttttaaaattaaaaaaaattttttttttttttttgagatggagcctcactccgtcacctgggctggagtgcagtggtatgatctcagctcactgcaacctctgcctcccaggttccagc

SEQ ID NO: 437706 - DNA, 201 bp, Homo sapiens
acttaaacttcagagaagccattttatggtaaaatgtgcataacataaaagttaccattttaacctgtttttttttttttttttttttttttttgagataraggtcttactatgttgcccaggctggagtgcagtggctattcacagatgcaatcataggacactgcagtctcaagtaattctcctgcttcagcctcccag

SEQ ID NO: 437707 - DNA, 201 bp, Homo sapiens
gtacattcaccatcaccactgtctatctccagaactttttcatcttccccaaccgaaactctgtacctgctaaccactaactccctattagagaatgccawcctgtccctgaggtggagaggttgtccctagcaaccaccattctattttctgtctctatgaatttgactattctaaatatctcatataagtggaataata

SEQ ID NO: 437708 - DNA, 201 bp, Homo sapiens
gaacaataaagctaatccttttattgatttatttgtaatgaaacacagctttttggtaccccgatggaatggacctgcagctcctaagtctttctctactkctgggtggctagattttccttagctgctataactctaggggaaaaagcttttttttttttttttcccttcccgagttttggcaagctctgcagatcctgc

SEQ ID NO: 437709 - DNA, 201 bp, Homo sapiens
aaaaggagggggtgtcagtggtgggttcaaggtgtatgtacctgcggaattgctagtcaagcagcgtaaaaactgttttatgctttttttttttttttttwaaagacagagtctccctctgtcacccaggctggagttcagtggcatgaacatggctcactggtgccttgacctcccaagatcaagtcatcctcccatctc

SEQ ID NO: 437710 - DNA, 201 bp, Homo sapiens
agtgataaactgataaactctccttccacaaaatacttatgtggataaattacttgttctatatggctaggttgtagttcaccagatgagtaagcacctayccctggtgactagtctgtcttttacaaaatatgacaaaaattaggtactatttcaaatgctttctagattttctaccaagtggtagtagaattccatttt

SEQ ID NO: 437711 - DNA, 201 bp, Homo sapiens
tggttccagtgattctcctgcctcagcctcccgagtagctgggactacaggcgcctgccaccaactctcggctaattgtgtgtgtgtgtatgtgtgtgatrtatatatatatatatatatatttatttattttagtagagacagggtttcaccatgttggccaagctggtctcaaactcctgacctcgtgatccacccacc

SEQ ID NO: 437712 - DNA, 201 bp, Homo sapiens
tcagtacttcatttcttattatggctgaataatgttatgttatatatgtataccacaatttgtttatccatttattaactgatgggcatttgggctttttmtatgttttgcctattgtgaatagtgctatgaacatgcatatacgagtatttgttttagtaactgtttttggttcttcggggtctatacctagaagtggaa

SEQ ID NO: 437713 - DNA, 201 bp, Homo sapiens
cctgaggccactttagtcagcccacagtggatcaggccaagactcagtttcttcccactgtggcagtggattatcttctggcccagggcagatctgaatgmcccttccatgggcactggcatggaatcaagggccacaggattctgccccttgctgtattttgctgcgatggcaccagtactaagttcaaatgcaaaatct

SEQ ID NO: 437714 - DNA, 201 bp, Homo sapiens
aggtcaccaaagggtgggtttgagatgtttgggggggttaagtgggcattttgacaacatggcttctctttttgcatgtttaattgtgatatttgacagayatcctttgcaatttgacactttttaaaataaattctctgctaatgatgacttgagccctgccactcaatgggagaatctgcagagcctgtaggatcttat

SEQ ID NO: 437715 - DNA, 201 bp, Homo sapiens
ccatttctcacctcctttatttggtgtcgccatggtccaagctactactttctcttgcctagatgactgcagtagcttcttaaggtttttctgcttctgcycttggcccctacagtctttctgccagagtgatctcttaaatcagtaattattttcccatctaaatttatttaatagttttctatatatatatatgtagaa

SEQ ID NO: 437716 - DNA, 201 bp, Homo sapiens
tagtatattcacattgtttgaaacagatctctagaacatttttatcttgcaaatctgaaactctatattcattaaatacaactttccttttcctccttccsctggctcctagtaaccaccattctactttctgtttctatgcatttaactattccaggtacctcatataagtggaatcatgcagcatttgtatttttgtga

SEQ ID NO: 437717 - DNA, 201 bp, Homo sapiens
caaaagattcagaaagaagttaccttaacccttaagcatcatctcactatattatgcatggtctgaagtcaacctctaaagagaggttgtctaattgagcrttgtagtatgaagcttattttcatgttataaacatctcttgagtttttgcttcctatcttaatttggatagattagatatgcctggctgataattctatt

SEQ ID NO: 437718 - DNA, 201 bp, Homo sapiens
aagaccttgtctcagatgaatgaatgaatgaatgaatgaatgaatggtacttctagtcatctggtcagccacaactcttggagtctcccttgactcccttytctcacatgtccagtccatcagcaaatcttatcagctcactgtagatgcagatccagaatctgaccatttctcacctcctttatttggtgtcgccatggt

SEQ ID NO: 437719 - DNA, 201 bp, Homo sapiens
ttcatttgcatgtatccagtaatggattgctggatcatatggttaatccaatttttaatttttttaggaaactctgtactgtttttcatagctgctatacyattttataatcccaccaacattgcaaaatagttttaatttctccacatccccatcaacatttattatttcctggatttttttaaggaaggcttctgtaag

SEQ ID NO: 437720 - DNA, 201 bp, Homo sapiens
gcattgtagtatgaagcttattttcatgttataaacatctcttgagtttttgcttcctatcttaatttggatagattagatatgcctggctgataattctrttacccaggagggatggtttatttgacagatattatgatgactttcctagccatttgtagcatggaggtaaggagatggttggaagtcttttctaacttt

SEQ ID NO: 437721 - DNA, 201 bp, Homo sapiens
attttggtagggaatgatagggggcaaggcaatggagacaataccatggcatacatttggcagaatctctgacatggattttttttttttcaggttgcatrtctggtgggtataaggagaaaagactagaaaatatgtttttgggagaaatgggataaccacttcaaacaaagaaacatccatgcatacacacacacataa

SEQ ID NO: 437722 - DNA, 201 bp, Homo sapiens
taaatcataatccatctccatcttcagtagtatttgtgcaggaagggccaccattcagcacacaccaggtaagggggcaaagaaaaaaatgcttataaagytcaaagtacctagtacttctgctaaagactattctagtggagagtttgttcagattttatttgggtttaataccagttcattatggtttccaggaggatc

SEQ ID NO: 437723 - DNA, 201 bp, Homo sapiens
ccaaatgtcttaaatttatatcacctcatttttttttagcctgactgtcaagatctagtatattgtgttaagataatattgtaaattcagtagacaaaatrtaggcccattatggtttgttgttgttgttgttgttgttgttgttgttgttgttgtgagatggaatctcgctctgttgctcgggctggagtgcagtagcgc

SEQ ID NO: 437724 - DNA, 201 bp, Homo sapiens
atgtcttttgtggttggaacagaacaagcagttgcctgctctctaccacagtcacctgagtacatctataccatccacacagctcagcctgttgaaaatarcacaatacaggaatctgcagccatccagcaagctcatgtcaaactgaaggagcacctaaatcataatccatctccatcttcagtagtatttgtgcaggaa

SEQ ID NO: 437725 - DNA, 201 bp, Homo sapiens
attgtggttgatggcttttctgtgtttgaatttgttccagctgtgctacagtgctgttctcctacccacatggatgctctaagtagttgtgtcactcccamtgcctcttcctatgcacactgcaactacttccaggtaagattcttgcaactgtggccatgctccgcgctttatgtgcaattttatcgatattgcaaaatt

SEQ ID NO: 437726 - DNA, 201 bp, Homo sapiens
atcgcgccactgcactccagcctgggcgacagagcgagactccgtctcaaaaaaaaaaaaagtatatgtgtgtgtgtgtgtgtgtgtgtgtgtgtgtgtgtatatatatgtatataaagctgtgttttaaactttttatttcattatataattttattttaaaataaattcataaagaaatggagtatttcagaagttgat

SEQ ID NO: 437727 - DNA, 201 bp, Homo sapiens
tagtaagcatggttgttttcttgctgaattctggtaattccagtatatggagtttccacaggtctctttcagttgtctcatttgtgttggttctcaaccayagtggctactccctcatgtaactggttattttcgctgtatgctggacatagtatttgaagaatagtatttgaaaagttacttgtaaaaataatttaaggc

SEQ ID NO: 437728 - DNA, 201 bp, Homo sapiens
taatgatataaatcatagaactggcttagtattatgctgggttacatagtaagtagtccatacatagtagcaatagaattttagctatttttataacattyactttttttttttttttttttttgagatggagtctcgctctgtcgcccaggctgcggtgcagtggcgtgatcttggctcactacaagctccacctcccag

SEQ ID NO: 437729 - DNA, 201 bp, Homo sapiens
aagagttcaatcttttcacagtgtcctgactataaagggaaagttttgaaaatgtgtttcttcagttaaaataatagcagctaacacttactgtttgcttmctgtgtaccagtactcttctaagttctttatggatattagctcatttatatcacaacaaccaccatatttggtaggttctatattctgttattatctcta

SEQ ID NO: 437730 - DNA, 201 bp, Homo sapiens
gcatttttagatttattcccagatatttaaataaatttatatttatttccagatatttgaggttttcctagttactttattgttatcgatttctaatttamttgtgttgtggtcagagaatacattttgtataattttgatcctttatatttattgagacttgtttcatggcccagtgtatggtctatcttggtgaatata

SEQ ID NO: 437731 - DNA, 201 bp, Homo sapiens
ggccagtcctttcatttgtatacagaatcctgtcccctttggtgtactcacagacttaggacctactgctatcccccttactcttcaataatcacattgtrtctttatttttgctttccccctaaggcagagtcttcctctgtcatccacgctggagtgtagtggtgtgaatacagctcactgcaacctcgacttcccggc

SEQ ID NO: 437732 - DNA, 201 bp, Homo sapiens
tttcctctgatgttatttttggtctgcaactgtaatttaattttcctcttttatgaaaaacttcattttaaaccttttaattttacttattctccactatrtatttgaacatacttaagaatattcatctttatatatagaatcctatattgagaactgtttttctttaatgctgaatagactcaaaatcaactttgcctt

SEQ ID NO: 437733 - DNA, 201 bp, Homo sapiens
cccctaccaccttctatctccctcatctagtccagccccagcagtttcttcactattgtttaagcataccaagaatgctccagcctttacacttgctattrtctctgcctgaaatgtttttcacccagattttcacatggtgtgttccttcatttcattcagtcctctgctcagatgccagatcatcacagaaatcttcct

SEQ ID NO: 437734 - DNA, 201 bp, Homo sapiens
ccagatttgcccagctacttctttgaagaaccaaaatatatgcacaatctttgaaaacaagatggccaggtatagtggcttacacctgtaatcccagcaayttgggaggctgaggtggaggattgcttgagcctaggagtttgaggctgcagtaagccatgattgtgccactgcattccagcctgaaaatgtattccaagt

SEQ ID NO: 437735 - DNA, 201 bp, Homo sapiens
ttgggtcgcaccccaagcctacagcctcccacagcagtacagtgttagggctcacccaagaaccactgttgctctggcctgcctgccacggaaatttattyaggacctgaggccactttagtcagcccacagtggatcaggccaagactcagtttcttcccactgtggcagtggattatcttctggcccagggcagatctg

SEQ ID NO: 437736 - DNA, 201 bp, Homo sapiens
agtctcaagtaattctcctgcttcagcctcccaggtagctaggactacaggtgtgcatcaccatacctggcacattgtaattttttttttttttttaaggkggagtttcactcttgtttcccaggctggagtgcaatgacgcaatctcggctcactgcaacctccgcctcccagatgcaagcgattttccgattctcctgc

SEQ ID NO: 437737 - DNA, 201 bp, Homo sapiens
ccaaacggaaactccgtacctattaaacaacagcccttggcacctaccattctattttttgtctctgaatttgactattccagctacctcatataaatggratcatatagtatttgtcttttgtctttttgtgattagtttatttcatttatcctaatgcctattgttgtagcatgtgccagaatttcctccattttgttt

SEQ ID NO: 437738 - DNA, 201 bp, Homo sapiens
ctttatgtcttccccagacgtaaccacatgttttttctacatcatcttagtaatggcacagtcactcgaataagcagataaccttttcagataatactccrgagggaaaagtttctcttatataagtttgggtatatttgttaaaaattattctcattactttatggttacacgtactagactactgaactaatataacaa

SEQ ID NO: 437739 - DNA, 201 bp, Homo sapiens
gatatcagtggtttatatatcacaattacagtattagggtattctgaatgtctctgtatgcttacttttatcaacgatttttatactttcagatgttttcttgttgcacatttaacatttctagtaaaacaggtctggtggtgatgaattctctcagcttttgtttgggaaaatctttatctctccttcatgtttgaagga

SEQ ID NO: 437740 - DNA, 201 bp, Homo sapiens
acagagactacatctcaaacaaaaacaaacaaacaaaaaagaattaaaggactaactaagtctagcccatctcttccacttatgagacaaactctacttgktttgtctcagatatgcaaggcttatttttcaaatgttaatgttattcaccatattaacaatataaacgagaaaaactatgaccatttaatagatgcaggg

SEQ ID NO: 437741 - DNA, 201 bp, Homo sapiens
gtattccagcctgtgcaacacagtgagaccctgtctcaaaaaaaaaaaaaaaatctgccaggcgtggtggctcacgcctgtaatcccagcaccattttggsaggctgaggtgggtggatcacttgaggtcaggagtttaagaccagcctggccaacatggcgaaaccctgtttctactaaaagtacaaaaattagctgggc

SEQ ID NO: 437742 - DNA, 201 bp, Homo sapiens
taaaataaattctctgctaatgatgacttgagccctgccactcaatgggagaatctgcagagcctgtaggatcttatttggaattgacattctctattgtaatttttatcctgtttatttttaaattttctttttgtttcactggaaaggaaagatgatgctcagttttaaaggttaaaagtggacaagctgctttgttac

SEQ ID NO: 437743 - DNA, 201 bp, Homo sapiens
cactttagcctgggcaacaagagcaaaactccgtctcaaaaaaaaaaaaattataacttctaacagctcttttttattctattctataattgttccttttkgggggaacttgctgttcttttatatggatataatatcttcttatagctctctgaggatactaaatggaagggctggttttgaagttgtttccccacaaca

SEQ ID NO: 437744 - DNA, 201 bp, Homo sapiens
gtacgattaagtggcatatagtacattcataatgatatacaacctccacctctatttagttccaaaagattttcagcaccccaaaagaaaaacccataacyattaaacagttgttccatattcccacctttccccagcccctggcaactaccaatctgttttctgtctctatggatttacttattctgaatgttttatata

SEQ ID NO: 437745 - DNA, 201 bp, Homo sapiens
cccatacctgtcgtcaggccgcgagggcagcgctgggaggaggtggctggacccagcaagcgcccgcgcgtgtgccgtgagggggaagctgcctgcctgtycccttagccttcccttcccccgcccccgtctcccaaccgtgccacatgggcgtccgctgccaaaatcagtaaaaaggagctcaactccaaccactacagg

SEQ ID NO: 437746 - DNA, 201 bp, Homo sapiens
aaaaaaaaattgtgttataaaaataaacttggatctggtcttcaaatagtataaccagtaaattttgaattttataatatttcataaattgttaatttctytagtaaagtcaaacattgaaactaaaaagttgccatcagactaactcataaaatgactcattggaatcattttttttctttctcacgttagaagcagact

SEQ ID NO: 437747 - DNA, 201 bp, Homo sapiens
gtgggactgctaaattatatagtggttctatttttaattttttaagaaccttcatactgtttttctataatgctatgctaacttacattcctacaaatagyatataagagttcccttttctctgcatctttgccagcatttgttattttttgtcttttttataatagccattttaactggggtgaggtgatattgtggttt

SEQ ID NO: 437748 - DNA, 201 bp, Homo sapiens
gcgcaatctcggctcactgcaacctctgcctcccaggttcaagtgattcccctgcctcagcctcccaagtagctgggactacaggcgcgtgccaccatgcstggctaattttttttcttgtgttttagaagagacgcggtttctccatgttggccaggctggtctcgaactcctgacctcaggtgatctgcccacctcggc

SEQ ID NO: 437749 - DNA, 201 bp, Homo sapiens
tcaagcgattctcctgcctcagcctcccaagtagctgggactacaggcgtgtgccaccacacctggctaatttttgcatttttagtagagacagagtttcrccatcttggtcaggctagtctccaactcctgacctcatgatccgccctcctcggcctcccaaagtgctgggattacaggcatgagccactgtgcctggtc

SEQ ID NO: 437750 - DNA, 201 bp, Homo sapiens
caggcgtgagccactgcacccggcctggtttgctagtattttgttgaggatttttgcatgtgtgttcttcagggatattgacctgtagttttctttttttkttgttgtgtttttgtctggttttggtattagggtaatgctggccttatagaatgagtttgaaaatatttcttcctctccaattttttggaatagtttaag

SEQ ID NO: 437751 - DNA, 201 bp, Homo sapiens
atccgcccaccttggcctcccaaagtgctgggattacaggcgtgagctactgtgcctggcctcctttatcattattttttattggttttaattaaagtccttttttttttttttgagatggagtttcgctcttgttgcccaggctagagtacaatggcgcgatcttggctcactgcaacctctgccttccaggttcaagtg

SEQ ID NO: 437752 - DNA, 201 bp, Homo sapiens
ggtggctcatgcctgtaatcccagcactttgggaggccaaggcgggcggatcacctgaggttgggagttccagaccagcctgaccaacatggtgaaacccygtctctactgaaaatacagaattagctgggcatggtggcgcatgcttgtaatgccagctactcaggaggctaaggcaggagaattgcttgaacccgggag

SEQ ID NO: 437753 - DNA, 201 bp, Homo sapiens
gccattctcctgcctcagcctcccaagtagctgggactacaggcgcccgccactacgcccggctaattttttgtatttttagtagagacggggtttcaccrttttagccgggatggtctcgatctcctgacctcgtgatccgcccgcctcggcctcccaaagtgctgggattacaggcgtgagccaccgcgcccggccgca

SEQ ID NO: 437754 - DNA, 201 bp, Homo sapiens
ttttttcttttcccagaatccttcaatgcagtcctcctatccagttgaatttttgccttccaattggccctgcagtactactgatgaaaatacaaagacaraagtaaacctagaggctgtctttcagatagttgatgagttgcattcctcccctaaattggagatggtaaaggtggagcctgttgagaatcagtgcccaac

SEQ ID NO: 437755 - DNA, 201 bp, Homo sapiens
tcgggttcaagcaattctcattccttagcctcctgagtagctgggaatacaggcgcgtgccaccatgcccggctaatttttatattttttagtagagacgrggtttcaccaggttggccaggctggtctcgaactcctgacctcaggtgatccgccagccttggcctcccaaagtgctgggattacaggcctgagccactg

SEQ ID NO: 437756 - DNA, 201 bp, Homo sapiens
tgtgtgtatcatttaagatttttctgaattggcccttgggcaaaaaaagttactgattattgttttaaagtacatttaaattctataggtgtgatctttaygcttctaatcctacatcaatgtacataaatatagaatatagaattataagagctttttggtgctgttactcttgttctcaggcagtctgtattgcttctc

SEQ ID NO: 437757 - DNA, 201 bp, Homo sapiens
ctcccaagtagctgggactacaggcgcccgccactacgcccggctaattttttgtatttttagtagagacggggtttcaccgttttagccgggatggtctygatctcctgacctcgtgatccgcccgcctcggcctcccaaagtgctgggattacaggcgtgagccaccgcgcccggccgcatatctttttaaaattaaaa

SEQ ID NO: 437758 - DNA, 201 bp, Homo sapiens
agagacggggtttcaccgttttagccgggatggtctcgatctcctgacctcgtgatccgcccgcctcggcctcccaaagtgctgggattacaggcgtgagscaccgcgcccggccgcatatctttttaaaattaaaaaaaattttttttttttttttgagatggagcctcactccgtcacctgggctggagtgcagtggta

SEQ ID NO: 437759 - DNA, 201 bp, Homo sapiens
atatcagtggtttatatatcacaattacagtattagggtattctgaatgtctctgtatgcttacttttatcaacgatttttatactttcagatgttttcttgttgcacatttaacatttctagtaaaacaggtctggtggtgatgaattctctcagcttttgtttgggaaaatctttatctctccttcatgtttgaaggat

SEQ ID NO: 437760 - DNA, 201 bp, Homo sapiens
aattgtattagacctgtcacattgctgtttttacatagctgtaattttaactctatatttgttcttaattattgttgtgaagtatgtaatagttattttcytaatattgcatataatgatttgggctttgaaaatatagaacatattaagaataagcaaaggaatttagattatttaacttggagaaggcaaggatgaagg

SEQ ID NO: 437761 - DNA, 201 bp, Homo sapiens
tatcagtggtttatatatcacaattacagtattagggtattctgaatgtctctgtatgcttacttttatcaacgatttttatactttcagatgttttcttgttgcacatttaacatttctagtaaaacaggtctggtggtgatgaattctctcagcttttgtttgggaaaatctttatctctccttcatgtttgaaggata

SEQ ID NO: 437762 - DNA, 201 bp, Homo sapiens
gcttggtgtggtggcatacacctgtgtcctaggtacttgggaggctgaggtgggaggatagcttgagcctgggaggtcaaggctgtagtgagccgtgatcrcaccactacactccagcctgggcaacagaatgagaccctgtctgaaagaaagaaatttgtattttataaacagggcagatatagattttataggggctaa

SEQ ID NO: 437763 - DNA, 201 bp, Homo sapiens
gtaaacccagtgctttgggaggcccaggtggaaagatcccctgagaccaggagttaccagcctgggcaacatagcgagaccctgtctctacaaaaaaacctttttttttttttttttgagatgtagtctcactctgttgcccaggctggagtgcagtggtacaatctcggctcactgcaacctccatctcctgggttcaag

SEQ ID NO: 437764 - DNA, 201 bp, Homo sapiens
tattacttaaacttcagagaagccattttatggtaaaatgtgcataacataaaagttaccattttaacctgtttttttttttttttttttttttttttgaratagaggtcttactatgttgcccaggctggagtgcagtggctattcacagatgcaatcataggacactgcagtctcaagtaattctcctgcttcagcctc

SEQ ID NO: 437765 - DNA, 201 bp, Homo sapiens
gttagagctaattaagaccttcatgttcagtcagcatttgcttatcatcatccaggctgcatttacaaactttcttattaatcataacaagacaagaatcygccatttatttaatgcattcagcactaggaggtaactaaaaagccatttgtgccgtaggaagtttgcccagttacctgcttacttggatacagtttcact

SEQ ID NO: 437766 - DNA, 201 bp, Homo sapiens
gggggaccacggctggtggatcacctgaggtcaggagttcaagaccagtctcgccaacatggtgaaaccccgtctctactaaaaatataaaagcctagcayggtggcgcgcgcctgtagtcccagttacttgggaggctgaggcagaactgcttaactcgggacgcggaggttgccattaaccgatgtcgagccactgcat

SEQ ID NO: 437767 - DNA, 201 bp, Homo sapiens
ataaaagcctagcatggtggcgcgcgcctgtagtcccagttacttgggaggctgaggcagaactgcttaactcgggacgcggaggttgccattaaccgatrtcgagccactgcattccagcctgggtgacagaacgaggctcggtctcaaaaaagaaaaaagaaacactaatggaaatattggtgacactgcggaatgcag

SEQ ID NO: 437768 - DNA, 201 bp, Homo sapiens
taatctccattttctttctcagagagattcccatctgctttaattttaaaatcatcactaacagtagctcaatcaattaacgttaacatcaataaaacatrtacctttaaaaggtatgacaggaactgtcttcatgtccttacccaagcaagtcatccatggataaaaacgttaccaggagctggaatacaaatgaggact

SEQ ID NO: 437769 - DNA, 201 bp, Homo sapiens
tgtctcacctgtgtgccaatggcttgagttaggcttgctctttaggacctgggaagaaacaacttcatgtgaacttaggtgtactctctatgttccccaamtcaccattttgggtgcctcagttaagataatggtggttaagatcctcatcattctagcactcaagagtagcaaataaactgtcatcattgtggcacatcc

SEQ ID NO: 437770 - DNA, 201 bp, Homo sapiens
ttcccatctgctttaattttaaaatcatcactaacagtagctcaatcaattaacgttaacatcaataaaacatgtacctttaaaaggtatgacaggaactrtcttcatgtccttacccaagcaagtcatccatggataaaaacgttaccaggagctggaatacaaatgaggacttccattaaaatgctaaacatcattaaa

SEQ ID NO: 437771 - DNA, 201 bp, Homo sapiens
tcaagagtagcaaataaactgtcatcattgtggcacatccaatggctttaaacctttttgagagggaattttcaacttacttcagtagctattctcatccwtccttggggacacaactagaaaacaaaaagatgcaagcaaaacagtgagaatgaacctcacagcagtcacgttaaatataaatgctgttaacattaaagc

SEQ ID NO: 437772 - DNA, 201 bp, Homo sapiens
aacgttaacatcaataaaacatgtacctttaaaaggtatgacaggaactgtcttcatgtccttacccaagcaagtcatccatggataaaaacgttaccagragctggaatacaaatgaggacttccattaaaatgctaaacatcattaaactcttttcaaagttgtctgtcacagggttcttcagtgttacctttgtctac

SEQ ID NO: 437773 - DNA, 201 bp, Homo sapiens
caaaatagaggtgtctcacctgtgtgccaatggcttgagttaggcttgctctttaggacctgggaagaaacaacttcatgtgaacttaggtgtactctctmtgttccccaactcaccattttgggtgcctcagttaagataatggtggttaagatcctcatcattctagcactcaagagtagcaaataaactgtcatcatt

SEQ ID NO: 437774 - DNA, 201 bp, Homo sapiens
gttgggcatttctatagtattttctataacttattttcccagcctcagactcaacatgactttctccaagtagctccatcaatactttaagctcaaaaccrattagcacaggggcctatgaaacctgacaatttgctcatatggagaattaggaaatattgcactttaatgcataagacaccttgtaaaatacccataaaa

SEQ ID NO: 437775 - DNA, 201 bp, Homo sapiens
gggtgatagggactcctgagtctttctagctgatgtgcggcgccttctctccagtccacggtcgcggaccctctaccccaagttgcaaagcaggattctcrcaactgggctttcgacgaggtcctcagcagatgggagacaacctctggctcggcctacgtgcccaagacccatggcgggccctgcgcccagcccagagcc

SEQ ID NO: 437776 - DNA, 201 bp, Homo sapiens
atattctgagacggggtcaggtgggagttgggagaggtaacttggagttgctgcccaagatgcagctcagctccagtggccacaccaagacggtttaagasagagcggaaccagggaggttgtttttggtggctgggggcttgggtttgagttccttgaacagcagaaggtgcttggatttagggaggtgaggctgggaag

SEQ ID NO: 437777 - DNA, 201 bp, Homo sapiens
ggatcaaggatttaggagaaaaggtaaagtttggggagtgccggagtccgcaggggacagggcgggggactgcatttgagtcccctgctccttcacgtgartctctgggtcgcctttccgcagctcagacaccgcggctggcgcctcccactgaccacaaagtaccagagcagcgagacgagggcgcagtacactggctct

SEQ ID NO: 437778 - DNA, 201 bp, Homo sapiens
cagggctcctaagctgctgcggagctagacggcgggctgtgggtggggaggagactagaatattctgagacggggtcaggtgggagttgggagaggtaacktggagttgctgcccaagatgcagctcagctccagtggccacaccaagacggtttaagacagagcggaaccagggaggttgtttttggtggctgggggctt

SEQ ID NO: 437779 - DNA, 201 bp, Homo sapiens
gggagcctggggcggggccagaaggaatcacggctttggggcgtggctaaagggtctggggcgggatcgcgaggttagaggagccgggggaggggctgggcattaggccaggccagaaggaccagggactacaaactcaccttcagggctcctaagctgctgcggagctagacggcgggctgtgggtggggaggagactag

SEQ ID NO: 437780 - DNA, 201 bp, Homo sapiens; identical to SEQ ID NO: 109708

SEQ ID NO: 437781 - DNA, 201 bp, Homo sapiens
tgatagggactcctgagtctttctagctgatgtgcggcgccttctctccagtccacggtcgcggaccctctaccccaagttgcaaagcaggattctcacawctgggctttcgacgaggtcctcagcagatgggagacaacctctggctcggcctacgtgcccaagacccatggcgggccctgcgcccagcccagagcccca

SEQ ID NO: 437782 - DNA, 201 bp, Homo sapiens
gaggggattccggatctgagggcagggcctccttcggtacttgagcccccagatactccttcccaaggaagcgaaagtccccttttacttccctaggatgsgaaagctcagtttccaggacgttaagtacctcgaggacccaggaacgcaggcaacgcgtgccgggtcgcgtccttcctaaggggtgctcgcctggaaatg

SEQ ID NO: 437783 - DNA, 201 bp, Homo sapiens
ttcctgctgcctgaggtaactggaggtgatgcatgctttctaacacagcccctccaagaggcagaagcagctacacaagcttggcaaaatgcggcagggartcacccagccctggcagccctccaatctgcaccagcaacagcatcgggcacttgttcctgctcagagaaggaaacccagccagggcagcggggcctggaa

SEQ ID NO: 437784 - DNA, 201 bp, Homo sapiens
attttttaaacaatagctccccctgcactgcccaacccttgattttaaaaacttgcagcaccatttccatcttatttttttttctaagtttgcattaccaygtcgcgggaagatacagcgacacagaatgtacatcaatcacaaaaagtggtccagctaaagccatccactcgacatagttaagggggcagaaagcttgtt

SEQ ID NO: 437785 - DNA, 201 bp, Homo sapiens
cattttccttaccagctcaaatgaatatttacagtgccacagcggggcacacgtgtggagtgacatggaagtgtcccagtccacagcgcacccggtgctayggccacaggtggagaccatcggacgacaacgccgcctgcatggtgcttcctgtccagcacaggagacagacaggtagcagccggcgctccagtgttaggc

SEQ ID NO: 437786 - DNA, 201 bp, Homo sapiens
cattcaaaatacagatacaaggacagttttatcccctggaacactgcaagaagaaaaaagaaaagaaaaaaagtgaaagaaagaaacttagcggcaaagtsagaatcatttcttttagaaatcaatgttaaactgaactactgaagagaaaaatcatttaatttcttccttgcatatttgttattaagcttctaacagtca

SEQ ID NO: 437787 - DNA, 201 bp, Homo sapiens
gagccaccatgcccggctcttcctaacagtcccttatggcttagcaccacatgcactggaccaagtctacacccggtgcacacgtagcatagtggatcctrtgtcattaaaacattagggagtggatttcgccccaggcactgagggtttggttacattttttacatgcagtttagggttcaagataaataacttacagtg

SEQ ID NO: 437788 - DNA, 201 bp, Homo sapiens
cttgcccactggagattagacatcacgccataaagtcatccccaggctggaaagtaacaccgccgctggcctggaacagatgctctaaggagaaagaacgygtccacaagaagtggcagggggagccactggtggtcccacaatgctgagtccggattggagacccagtggaaaaccaccgacacgcacaaatccaccggc

SEQ ID NO: 437789 - DNA, 201 bp, Homo sapiens
gggaaattcaggatggcagctaccacattgtctcagtacaaggactgccagcagcattgcatggtggcgacgctttactgatggggtcgctcaggaagcaygcacaggcagcgtccacacagcgtgcccaaggcccctgtggggaggcatcagacacggccggcacccacatctaccctcacggagtggcgatggcgctgg

SEQ ID NO: 437790 - DNA, 201 bp, Homo sapiens
ccttcaatcgagtcctctcacccctgtccccaactagtttccttccagcctcttgctgtgtcctcttgaatttcacatcctcaggctgcctggccccgacsccagcctaggggagcctccctgccatgaggccacccagcaccctggacttcattttccagcacatgccgcagtgtactgccattgtcactttttaaattg

SEQ ID NO: 437791 - DNA, 201 bp, Homo sapiens
atcctcaggctgcctggccccgacgccagcctaggggagcctccctgccatgaggccacccagcaccctggacttcattttccagcacatgccgcagtgtwctgccattgtcactttttaaattgtgtggcctcactgtactcaatgtacttcaatgtactcactcactcaccaagcatctaggatttgctagagagttac

SEQ ID NO: 437792 - DNA, 201 bp, Homo sapiens
tacaaaactcccttttccatccgtaagtcatcactaacaatggagccgcagaaaccactacacattcgctcgcccagccttctctacatgggaggtgcatyacctatgcttcctggtgctcttttattacctttttttcttttttttttcttaagagacaggttcttattctgcagcccaggctggaatgccttggtggga

SEQ ID NO: 437793 - DNA, 201 bp, Homo sapiens
tgatgaagttcatagggataagccatttatgccccctacgcccgcccgcccgcccaggtgcggggttgtgtgaggaacctcatgtagggagtgaagaggcrcttttcaacgcacaactctgcactgtaggaaatgcccactgagcggaggggatgtcgggtctcactgtgagcaagttctgttgctgtccaacaagggttc

SEQ ID NO: 437794 - DNA, 201 bp, Homo sapiens
atttttcctattgatatggtaaactgattaattgtgaaatactgaacagtcttacattcataagataaactcaagttggtcatgttccatcatcctttatrtatttcctggtttcaagttggtaatattcctgaggacttttgcattttatgtacattaggaatattggtctgtaattttcttctaatccctttatttggt

SEQ ID NO: 437795 - DNA, 201 bp, Homo sapiens
tgccaaattatttacagtatcttgaaaagaatacgagccactcacaagggaagacctaatgccacagacctggggaaggtaaaatggcggtgtagaccatygccgcctggcagggcgctggtgggacctgctccagctgggaaggctgcatgcagggcaaggctgacgtgtgctgtgtgctgcaggagaggtgtcaggaag

SEQ ID NO: 437796 - DNA, 201 bp, Homo sapiens
ccaacccctgcaaacacgtcgtcttgctgatctcagccacttccacagggaccctcgcagagtacgccgcagagacgcagagatgcacctcttcacagaasaacactggccagagggagagggtccactgcgcttgctctgccatgagcccttctccccgcagtcatccccatggccccagcgctgttgccatcaacctgt

SEQ ID NO: 437797 - DNA, 201 bp, Homo sapiens
tgcctccgtcccctcagaggcgggcagcacccatcactctccttgatctctgggtgcgctgggagcctgcccacgcttcttgcactatgtactctgctacygactcagatgagaagccttccctgcatctccttacaccagctccatagtcagtttataaaacaattcagttttgacttcactgggttaatattattggtt

SEQ ID NO: 437798 - DNA, 201 bp, Homo sapiens
agcttaaaatgtttactatttagtcctttacagaaaaaagtttgccaacctatggtctataaaacataggagaatatgttttcttcacgttcttatgggaragaaaagacttcttaaacctgacaaaatgcaccaatcataaatgaggggattgactaaaaactaccttgacattaaaaccttctgttcagcaagacacaa

SEQ ID NO: 437799 - DNA, 201 bp, Homo sapiens
aaggggatcctcccaaagagcacagcagagcaccctgccaaccctcagaaccttcccagctcaggcgtctccctgcaggtaggcggcagcaggcagaacaygccgcggggctcgggctggagccagctccagggcatcaggcctccctccagggagaaacattccaatcacccccgaaactcacacgtgctgccggaagct

SEQ ID NO: 437800 - DNA, 201 bp, Homo sapiens
aggaggactttggttcaatttagacttttacttctgttttcgtgtcagtctataaatgtcagaacactttttctaaagtttaatactgttccagaaaagcyctcctggcagctactcatggaatattttcgggctaaactgctcttcaaaatttcacacagtcattcatcttcagggcctttgtacatgctacttcctcac

SEQ ID NO: 437801 - DNA, 201 bp, Homo sapiens
cgcaggctgataaactccagtggctcttcccaagcgcggagcagttcctcaggatgaaaaagagcctagtccacctgtccataagtaacagtggctgcccygtcggcccagtacaaatcgccactctgcccaggaaggcagcctcaggttcccctaactggcaagcaaacatattctgcgccatcacgagctgaagggaca

SEQ ID NO: 437802 - DNA, 201 bp, Homo sapiens
aggctgataaactccagtggctcttcccaagcgcggagcagttcctcaggatgaaaaagagcctagtccacctgtccataagtaacagtggctgccctgtyggcccagtacaaatcgccactctgcccaggaaggcagcctcaggttcccctaactggcaagcaaacatattctgcgccatcacgagctgaagggacatgt

SEQ ID NO: 437803 - DNA, 201 bp, Homo sapiens
cgccatcacgagctgaagggacatgtgggaatcagaaggaaaacttgtcttttctgggaagattctaatcaagactaaaatattggtggtaagttgaaaakaactgcaaatatcaaaaagggatttagagaaagaaatgggaaagatttagctggggaaaacttgaaggtagagcacttgaaaactcctgaaaacaagcaa

SEQ ID NO: 437804 - DNA, 201 bp, Homo sapiens
tcattatctttgaatatttgtagattctgtagtgatctttccttttcatttatattatttgtcatttcatttttcttcatcaggtttggctgggaattttraaaatttttacgactctttccaaggacataatttctgcctttgttaacatctctgtaataccattttctgctttgctgatatctgatcttatttttactg

SEQ ID NO: 437805 - DNA, 201 bp, Homo sapiens
gaattttgaaaatttttacgactctttccaaggacataatttctgcctttgttaacatctctgtaataccattttctgctttgctgatatctgatcttatytttactgttccttcctacttttcttaatatctactttgtcacgtttacatagccgcttcatgtgggtgcctgccctgcacggtgcatctcttaggctatg

SEQ ID NO: 437806 - DNA, 201 bp, Homo sapiens
catctctgtaataccattttctgctttgctgatatctgatcttatttttactgttccttcctacttttcttaatatctactttgtcacgtttacatagccrcttcatgtgggtgcctgccctgcacggtgcatctcttaggctatgtttaaggtgtgccgccttagtctatggttgcacaccatgttcccacagtgagacc

SEQ ID NO: 437807 - DNA, 201 bp, Homo sapiens
ttagtctatggttgcacaccatgttcccacagtgagaccatctctgattttcatctgagtctccactgggtccactgacttccgaagtcctcgccgccgcrctgggcatgctgaccatcctacgagttatgtcctgcttgcctcacctgttattcatcctttcgtttccctcctctgccttcccttggataaatcaggtat

SEQ ID NO: 437808 - DNA, 201 bp, Homo sapiens
gttcagtaagagccaacccatggatctcttcctcgcaaaaagaacaaaaggacgcaatggtgagggttttctccgttcatgcgcattcctattccaatcaygtaccggcaccttcggaggcatctggaggtaggaccttcactccaccaggagctggctctttctggaagcccaaaggtaagaatagcaccctggccagca

SEQ ID NO: 437809 - DNA, 201 bp, Homo sapiens
tcctgcatggagccaccgaggcgttctttccttgagcctcctcttttcagttttacgcccagccttcccgagaggagcgtttctggacaatgatgaaggaygatgccaggcagccctccagagttactgtggactcggcattcacaatctgtcaaggtaactttatgacctcatggctggctggtgtaattccagtaatga

SEQ ID NO: 437810 - DNA, 201 bp, Homo sapiens
ctatgccagttttctttgggtattttcctgacatgcttctttccatccatttaccctcaaagtttgaaagtccttatactttggataacctttgagtggcrtatatttggattttatattttattccatttttcagtctttttcttactggtgagtttagttcatttacatttattataattgttaaggtgtaacttttga

SEQ ID NO: 437811 - DNA, 201 bp, Homo sapiens
ttttttttttgcctctttggtcctctcttggacttcttattcttaagtctttcatgtgttcttaattcaaggaaatttatatccattatttcttcaactayttcttcctggagggaatgtaagatgggagacatccatctgttttttgaaccattgttctttagttctcatgggactcatacaagataagtagcccacctc

SEQ ID NO: 437812 - DNA, 201 bp, Homo sapiens
ctatagagttcacaggaaatcaacagtggaatgctgaaagcttttcctctaaatttagtaacaagacaagaatgcccattatcacgacttctattcaaaaytgtattaaaggcctagccagagagccaagacaaagaaataaaaagtaaaactgaaacaatgactatcagcattaaggccttctttcaatgacagttgctt

SEQ ID NO: 437813 - DNA, 201 bp, Homo sapiens
tatttaagtaatactttaccctttacttaactcattccgtcgtacctaagtattcctctgcatgagacatggaatcaaatatcattaaatgagaatcttcygaacttgacttttaaagacacccagtcactcccagaataaagatgagactttgaacccactgtggtatgtgactgggtccacaaccctccctctctcccc

SEQ ID NO: 437814 - DNA, 201 bp, Homo sapiens
tgaacccactgtggtatgtgactgggtccacaaccctccctctctcccccaaactccagcaggtgcacaagccttccagagttaccaaagaatcgggccgrcatcccccggagcagcaggcagggtctgctctattcaccagaaccaaggacagtgcctgacacgtacgcagcatttaaatatttgtgggataaatgaagg

SEQ ID NO: 437815 - DNA, 201 bp, Homo sapiens
ttggtcttcaatcagggtgatttcaaaatcctctaccgtgtgcttttgcccgtactggcgaagtctcacgtgaaaatacccgcttcagtctcgctgggccycagttcttcccttgtgacccggatcactactcagtggcctcactgcctcatggagcacttgtgctaatgactgagatacagtttaagaaagtgctctatc

SEQ ID NO: 437816 - DNA, 201 bp, Homo sapiens
taccttctcatggcactttactcagtaattggtatttagcagcctttgccagttcaccattaaaaatggattcttttactgatcacaacaccttgagagayggcgtctcggctctgcccacaaaaatcttccttctgttttctttttctatcagttcgaagcatctcacccatccacaggccttcagtctcacacacacta

SEQ ID NO: 437817 - DNA, 201 bp, Homo sapiens
gcatattaaccaagcaccttgggtgcccggagcacgcaggtggacgcggctggccagccacagactggagacgcacgcgattaaccagacaaagaacacasctgcagaacaactgtccaggccctctcaccgcttccacctgacgttcttttacaagttcatcactccacgggcagatccgtgtgtgtgagggccttggcg

SEQ ID NO: 437818 - DNA, 201 bp, Homo sapiens
gtatgtttgctatttcgtgtcttccctgtgtaggtttcttggccctccatttctgttttgttttcatggattggggatgtagagattacaatctattcccytaatgtatccctatttcgagtatgaatacataatccctttacagcaggaaagcctccccaccctttctcatctgactttattttactgtaggccaatgtc

SEQ ID NO: 437819 - DNA, 201 bp, Homo sapiens
acgctgcttaactgttccatccttccaaagtgagctaagaccccatcccacgcttcaccagaataaagcttgagggaaaattcaaatgtctaaggtttaaragtagccacagacagcctatgatgtgaaatgtactaccacggacaatgaaatattctatgatacactcatacaatacacacagcacatccccagtgtgtc

SEQ ID NO: 437820 - DNA, 201 bp, Homo sapiens
aacttcagtgcctgctatctgcttttcttcagtgggccccactcccaaagctacaccatgagatggaaactgtccccgggggagcaggaccatccccaggkctgccaggaaatctgccgtgagtgaggtgcacaaaccctgggcacagtccacaaacccagtcaatcttaaaactgattaataattgttggcacaaaatgt

SEQ ID NO: 437821 - DNA, 201 bp, Homo sapiens
aaattcacagtgattcaacattttctaattgaaattaggcacatggggatggctttttaatgtccacactatttttgaaaagcaaattcgataggaaaggyggcaaggatgttcaacaaacaatcaaagtacatttcacttacagctctgctgataacagctggagcatcatacttccaaagagatcccaaattcaaccac

SEQ ID NO: 437822 - DNA, 201 bp, Homo sapiens
tggtgaaatagttcttctcaagctccaaacgtatctggccccttattatttcaaatatttggaattttacttttcacaaactaaccaacgcttcgatgggraagctgctgaccccctagcgcatttcctaagtgacacacacagccaagtgcatccaattcccagcacacgccacctggggatcctgcaggccgctgcctt

SEQ ID NO: 437823 - DNA, 201 bp, Homo sapiens
gcactgctcaccatggaaccatttcaacagcctcgcattcatctacccactcgtgcgtccctgttccccatcctttccaattactgtccacaaggtagcayagatctgatgaagggcattaaacccccctgcgccctttcaacatatttagaacatcaaaatgcgtacgtgaaaagagtactttctcactttcaatttcaa

SEQ ID NO: 437824 - DNA, 201 bp, Homo sapiens
ataaaacataaataatagttaattatgcaatagaaatatacattttttattttatttatttattaaattgagacagggtctcactctgtcatccaggctgsggtacagtgctgtgatctcagctcattgcagcctccaactcccaggctcaagagattttcctacctcagcctcctgagcagctgggaccacaggtgcaca

SEQ ID NO: 437825 - DNA, 201 bp, Homo sapiens
catcctttccaattactgtccacaaggtagcatagatctgatgaagggcattaaacccccctgcgccctttcaacatatttagaacatcaaaatgcgtacrtgaaaagagtactttctcactttcaatttcaattctaaatgattatttctcgacaaatgactgtttaaaggaaaaagtcacaaccatgtatttgagagtc

SEQ ID NO: 437826 - DNA, 201 bp, Homo sapiens
aacaaacacttttcaaaagaagacatacatatggccaacaagcatatgaaaaaaatgctcaacatcactaatcattagagaaatgcaaatcaaaaccacartgagacaccatctcacactagtcagaatggtttttattaaaaagtcaaaaaataacagatgccggtgaggctgtagagaaaacggaatgcttatacgctc

SEQ ID NO: 437827 - DNA, 201 bp, Homo sapiens
catcgcagctcccctgagcctgcagctttcaagattcctaagcaccgtggcatgcgtgtggcatgtatgtaggagtatgtgagccaggtgggagcctccgytctccaatccaatcgccgctccctctgctcagtgctcttgtttgcagggctgaccctgtggtgcccacaccctgcctttcagagaacacgtctgtgccct

SEQ ID NO: 437828 - DNA, 201 bp, Homo sapiens
cgtgtggcatgtatgtaggagtatgtgagccaggtgggagcctccgttctccaatccaatcgccgctccctctgctcagtgctcttgtttgcagggctgaycctgtggtgcccacaccctgcctttcagagaacacgtctgtgccctggcttgctttcctaactgccaaagaactccaccacagtctgcccttcatgttgc

SEQ ID NO: 437829 - DNA, 201 bp, Homo sapiens
acccccatctgcaaaccaaagattcctcttcaacacccaacagcagaagcctcccttgctccccagcttggggaaggagccacattactgagacccattcwtcctggtcccactgccacaccccctgccgtgggcagctcttcttatacctggacccttcctgtctctcccctcagtccctttatggttgaggcctccctc

SEQ ID NO: 437830 - DNA, 201 bp, Homo sapiens
gctggggacagctcccaacatacagacttctgcccggcgccgtcagatgactctggagatgatctgcagaagatccactttaaggctcagagatctgagtraaataaccaccctcacccctacccaagaggaaaacacagtgagaaggaaaagaacgaggccgtggtcctgggtgctgtccagcgcagcccacacctcacc

SEQ ID NO: 437831 - DNA, 201 bp, Homo sapiens
ttaagataggaaaaacaaaaaacaaaaaccaatgtgagccaggaatgtaaatacagtactgggaatatgcaaaatgctttgcaaaagctgacgagggagckctcggcacccacacattttaaagatgggagcctacagtgctgggcctgaaatgaacaacatactgaagtctggtgtcaatttaaatgcattgaacaccag

SEQ ID NO: 437832 - DNA, 201 bp, Homo sapiens
aacatttttgtcattttcagtaaaacactgcagagggaaattgaatcaaatgggctgctagaaagctgatgaaatgaaccgttctgtcaaatcaaaaaccrtaagacgtgattgtcatctgttggtaagagcagaacaaaatcacccaaagacacttgtatttctgttgccgctatttaaattgaacagacacaaatcaga

SEQ ID NO: 437833 - DNA, 201 bp, Homo sapiens
gatgatcaacgcgaaggtgccgaggtggcatcactcacacacagtgccagtcaccaggtacgctgcttaactgttccatccttccaaagtgagctaagacyccatcccacgcttcaccagaataaagcttgagggaaaattcaaatgtctaaggtttaaaagtagccacagacagcctatgatgtgaaatgtactaccacg

SEQ ID NO: 437834 - DNA, 201 bp, Homo sapiens
ggggtggtgcatcaggcagaactggagctcagcttcatttgccagctgggctcgaccgcaaggtggcaggcactgcgaggaagacaccttaaccaagacayagagactaaaataaagtttggggtgggagggtgtgtttgcacatacaaaattttgcttgttgcagagaaatgctgcatgtctcagaaaggaagatgggga

SEQ ID NO: 437835 - DNA, 201 bp, Homo sapiens
ccacagccctgctctgatcgtattaatccctaggattagaatgagctgatcccacactgccggtgccccaagcactgctagaggaagaaaacatcctcccrggcaatacgtcatttctacacactgtttctccaatgtactaatatggcacaaaataaaaaacaactagacccacgaggagataagacaatatgaacaaaa

SEQ ID NO: 437836 - DNA, 201 bp, Homo sapiens
gtctttcagcagaggtagccaggaccatgggcgtccccacaggaagcatggtctctatgggacggaaacatggcgtgctgctgagccatactaaggaaaaygtgattcacatgagaaatacactatatatcatcatggcatttaaaatgtcattttccttaccagctcaaatgaatatttacagtgccacagcggggcaca

SEQ ID NO: 437837 - DNA, 201 bp, Homo sapiens
attcaagttcaagtattttaacagccccgtgagggccagctttattccagccaacgctcccagcagtctgagctctacttgtctcttggcacccacagttmcagatgcgtttgagcccaacacgcagtgcctccttcatcgacacgaactgtggactcattgagttctttccccatgtaaaacccactggtttttgtactg

SEQ ID NO: 437838 - DNA, 201 bp, Homo sapiens
aaagcttttggaaaaataatttacatttagttcattccacagaagcaagttccatgaagttatggtttttgatgaacagaccagtgtaaaaaatgaaaagsaaggcggtatttctacaaaagcatcttcggtagaaaacaccccaaagcatctgaagctgcttttaggatgccgctcatctgcatggatgttaaaattctt

SEQ ID NO: 437839 - DNA, 201 bp, Homo sapiens
actcctggcccacaatcacactcacattacaaaattatttttgtatttttcttctagctatgggaataaaataagccacttagatgacagtcgagtgtctrtaaaatatataacagcaataattcccagtggaaacgtggcagatatttatacaagagccaaatatgaagcatggtggaaaaaggctaacatgagggtgtt

SEQ ID NO: 437840 - DNA, 201 bp, Homo sapiens
gaaatcctagtctctccctggggaatcccagcttagtttagcctgtcaccatcttcaattaccagagtcacatatgttagactgatccacgtgagaaaaasagtaactggatacttttcaacccacgccctcatcccccagcacacccatcttcagcaactgaaggcttcctttgatatctcactttcaagttgagcttct

SEQ ID NO: 437841 - DNA, 201 bp, Homo sapiens
tcctagtctctccctggggaatcccagcttagtttagcctgtcaccatcttcaattaccagagtcacatatgttagactgatccacgtgagaaaaacagtmactggatacttttcaacccacgccctcatcccccagcacacccatcttcagcaactgaaggcttcctttgatatctcactttcaagttgagcttctaatt

SEQ ID NO: 437842 - DNA, 201 bp, Homo sapiens
cttcactgggttaatattattggttctgaaaagagtaattatagtgcatcttaaaacaaaaaatctgttgctttacgtaaggcgcttcaccacggtgttawcagaggcagaaaatggcactgtccagtggaagtcaggctggtgtagctggaaccggagcctgtcgtctccaacatagatttccacggagagcacggccct

SEQ ID NO: 437843 - DNA, 201 bp, Homo sapiens
aaatgcttataaataatataagacaatttaaatcacaaaggcaaaagacataaaacactataaagctgaaaatgaaaatatgtgcattaaaattgtctttaaaaaaaaaaacacatgtgtttcatgtaaatcaactcctatcagtcttcagcacaagggcctgtcatttcccttggcccatcagagacacccacataccac

SEQ ID NO: 437844 - DNA, 201 bp, Homo sapiens
gaaaagagtaattatagtgcatcttaaaacaaaaaatctgttgctttacgtaaggcgcttcaccacggtgttatcagaggcagaaaatggcactgtccagyggaagtcaggctggtgtagctggaaccggagcctgtcgtctccaacatagatttccacggagagcacggccctgggcatgcagaacagccaaggggatcc

SEQ ID NO: 437845 - DNA, 201 bp, Homo sapiens
ctggccaaccatgacagcggccaaagtgtcccattaccaaggaaatgaaggtcggggggcggccacagggaagaggaagtgaaggaggctcagtaacatcyggcccaatgccctggggaaaggcgggggtgagtccagccttgccttccattgattcacgcacaggatggtggcttcaccccgactccccatctgggtgtg

SEQ ID NO: 437846 - DNA, 201 bp, Homo sapiens
gaataaatttgttcagcaaactcacagcatactagacaaatttacagaaagctcctgtaattctcatcattagcaaagaaatactgggaattgaaactaaraatatagcatttttaaaggacaaaacaaaaacacatgaaaaacttatggataaatttatgtggaatatatttaaaagatttgtataccaaaaaattacaa

SEQ ID NO: 437847 - DNA, 201 bp, Homo sapiens
tcttaaaacaaaaaatctgttgctttacgtaaggcgcttcaccacggtgttatcagaggcagaaaatggcactgtccagtggaagtcaggctggtgtagcyggaaccggagcctgtcgtctccaacatagatttccacggagagcacggccctgggcatgcagaacagccaaggggatcctcccaaagagcacagcagagc

SEQ ID NO: 437848 - DNA, 201 bp, Homo sapiens
gtgccacagcggggcacacgtgtggagtgacatggaagtgtcccagtccacagcgcacccggtgctacggccacaggtggagaccatcggacgacaacgcygcctgcatggtgcttcctgtccagcacaggagacagacaggtagcagccggcgctccagtgttaggccacaggacacaaagcagggccacagcacaggca

SEQ ID NO: 437849 - DNA, 201 bp, Homo sapiens
gtctcagttgctcccacttgactgctactgagctatgaaagcagccacagacaagacataaacaaatgagtgtggctgtgttgacaaatacttatttaccaaaaaaaaaaagatgtccagccccagccccaggccatagtttaccaacctctggtctagataatcaaataaacttctaattagtagcatttgctaatttct

SEQ ID NO: 437850 - DNA, 201 bp, Homo sapiens
gctccagggcatcaggcctccctccagggagaaacattccaatcacccccgaaactcacacgtgctgccggaagctcaaggaagtctcaaaaagaactccmcaggcttcaccaatgctgttcacacgggtggtgttctgccagtgcttacgagacacgaataaattaatcccccaatgacccaaaatgcgggtgggatgga

SEQ ID NO: 437851 - DNA, 201 bp, Homo sapiens
ttcaccaatgctgttcacacgggtggtgttctgccagtgcttacgagacacgaataaattaatcccccaatgacccaaaatgcgggtgggatggagaaggwgaggcatgcgggtgggtggggactgatcacctggagcacggactattctactaaatgttcctgatcccccttcccacatgcttacacgcaggctgataaa

SEQ ID NO: 437852 - DNA, 201 bp, Homo sapiens
catacagttcaatgagtactgacatgtacagtcatacaggcaccacagcaactaagttacgaattcctgagagagctttgatagtttgtgtctttcaatgwttctgtccattttgtctgttgtcacatttactggcataactgtttataatatgtccttcataatcttttaatgtctgtaggatctgtacttatttcctct

SEQ ID NO: 437853 - DNA, 201 bp, Homo sapiens
agaataaatttgttcagcaaactcacagcatactagacaaatttacagaaagctcctgtaattctcatcattagcaaagaaatactgggaattgaaactawaaatatagcatttttaaaggacaaaacaaaaacacatgaaaaacttatggataaatttatgtggaatatatttaaaagatttgtataccaaaaaattaca

SEQ ID NO: 437854 - DNA, 201 bp, Homo sapiens
taatctctttctcagtttgagttttatcatttttattgatgtcttcaaaactgaaataagctattggtttctttgattttctcaaaaattttttttatttycattacattaatttatgcttttcattattgcctttcttctactaggtctatgtttcaattttctcttctttgtggtttcttattttgaaagctagattaa

SEQ ID NO: 437855 - DNA, 201 bp, Homo sapiens
gtgcatacttaggcaacaactctataaagaaaaaccagaaattgattaccaagaaaacccagaaaagtcggaatagggttacttctgggagcagcagcagsaaaagatgggaagaaacacgtggcagagttctgaggggccgccatggtttgtctcctgatctgcatgatggttacacaaagattcactgcaggcgcttct

SEQ ID NO: 437856 - DNA, 201 bp, Homo sapiens
gggagtctcgctctgccacccaggctggagcgcagtggtgcgatcttggctcactgcaacctccgcctcccaggttcaagcaattctcctgcctcagcctyccgagtagctgagactacgggtgtgcaccaccatgcccaggtaagttttgtatttttagtagagatggggtttcactgtgttggccaggctggtctcgaa

SEQ ID NO: 437857 - DNA, 201 bp, Homo sapiens
tagagctggaagaagtgtgtacatatgtgcatgtttgagaaataatgagtccatatagatgatgctgattccaagtcaactgcaccaacttcttccttgaygcctactccatgtaagtgtccctcttcttcacagggggttctcccaaacatcaacacacttagtcattttctcaatccacatacacatgaaataattcca

SEQ ID NO: 437858 - DNA, 201 bp, Homo sapiens
aggtgtctacagtcatgaattctctaatcactgcattaactatgcctttgatacacagagttattattttacagacattctattacgttggtttatatttmcactttcattcaagaataggttttaagtctctaggtggatgggccttgtttttgttaacaatttatagttttattgcactgtgatcagagaatgttgatt

SEQ ID NO: 437859 - DNA, 201 bp, Homo sapiens
ctaatcacagactcccaggtgttcagatgcgagacgggccagaggggaaagaggacggaggggcggccatgcccacactcaccatacagcctgccacgccygtccttcacccgctgcccaaacaagaggaaagccgccgctctcacctcctgattcaccttggcccagcagacaagacgcctgacaagcatctacttctcc

SEQ ID NO: 437860 - DNA, 201 bp, Homo sapiens
ccaaacaagaggaaagccgccgctctcacctcctgattcaccttggcccagcagacaagacgcctgacaagcatctacttctccactgttctctaccattycctgaaaaaaaaaaaaatatatatatatatatatatatatatatatatatatatatatatatatatatatatatatatttctgatgggcagcaggcttct

SEQ ID NO: 437861 - DNA, 201 bp, Homo sapiens
caagaggaaagccgccgctctcacctcctgattcaccttggcccagcagacaagacgcctgacaagcatctacttctccactgttctctaccattccctgaaaaaaaaaaaaatatatatatatatatatatatatatatatatatatatatatatatatatatatatatatatttctgatgggcagcaggcttctggaag

SEQ ID NO: 437862 - DNA, 201 bp, Homo sapiens
aagaggaaagccgccgctctcacctcctgattcaccttggcccagcagacaagacgcctgacaagcatctacttctccactgttctctaccattccctgaaaaaaaaaaaaatatatatatatatatatatatatatatatatatatatatatatatatatatatatatatatttctgatgggcagcaggcttctggaagg

SEQ ID NO: 437863 - DNA, 201 bp, Homo sapiens
gccgctctcacctcctgattcaccttggcccagcagacaagacgcctgacaagcatctacttctccactgttctctaccattccctgaaaaaaaaaaaaatatatatatatatatatatatatatatatatatatatatatatatatatatatatatatatttctgatgggcagcaggcttctggaaggagacaagtcctt

SEQ ID NO: 437864 - DNA, 201 bp, Homo sapiens
cgctctcacctcctgattcaccttggcccagcagacaagacgcctgacaagcatctacttctccactgttctctaccattccctgaaaaaaaaaaaaatatatatatatatatatatatatatatatatatatatatatatatatatatatatatatatttctgatgggcagcaggcttctggaaggagacaagtccttat

SEQ ID NO: 437865 - DNA, 201 bp, Homo sapiens
ctctcacctcctgattcaccttggcccagcagacaagacgcctgacaagcatctacttctccactgttctctaccattccctgaaaaaaaaaaaaatatatatatatatatatatatatatatatatatatatatatatatatatatatatatatatttctgatgggcagcaggcttctggaaggagacaagtccttattt

SEQ ID NO: 437866 - DNA, 201 bp, Homo sapiens
caccttggcccagcagacaagacgcctgacaagcatctacttctccactgttctctaccattccctgaaaaaaaaaaaaatatatatatatatatatatatatatatatatatatatatatatatatatatatatatatatttctgatgggcagcaggcttctggaaggagacaagtccttattttgcattccccataatg

SEQ ID NO: 437867 - DNA, 201 bp, Homo sapiens
agctggggaaaacttgaaggtagagcacttgaaaactcctgaaaacaagcaaccctgatcagtactggaagaaacatggagagaaaaccacaggtgcacaygtgtacacacacatacatgcatgcacacgcacacacacgtgtgcacactcgtatacacgctgtcatgtaagagaatttcctttatattcttactttgcag

SEQ ID NO: 437868 - DNA, 201 bp, Homo sapiens
cgaagtcctcgccgccgcgctgggcatgctgaccatcctacgagttatgtcctgcttgcctcacctgttattcatcctttcgtttccctcctctgccttcycttggataaatcaggtatgtttgctatttcgtgtcttccctgtgtaggtttcttggccctccatttctgttttgttttcatggattggggatgtagagat

SEQ ID NO: 437869 - DNA, 201 bp, Homo sapiens
aaacaattgtggaaaaaacaacgaaatttggagaacttctacaagacaccaagacttactacagagccacagcaatgaagtcggggccatgttggcatgargacaagcagaaaaatggatagaacagagtccagaaacagagctgtgcatacatggtcatttgtcaaaaggtacaacatctatcgtaaggcttggcacttg

SEQ ID NO: 437870 - DNA, 201 bp, Homo sapiens
acaggcaatcgccttggctgagatggcagaatggcatgcgttcaagttgtttcttgaggaagagggtgtggggtctacattctcccctagtatacaaatgsagatacctgtttgaaaggttatatagattaggctgggcacagtggcttatgcctgtaatcctaactcctttggaggccaaggcaggaagactgcttgaga

SEQ ID NO: 437871 - DNA, 201 bp, Homo sapiens
agaaaacaacccaggcagagacagctacatctgagtatcttttttttttttttccacacagggagtctcgctctgccacccaggctggagcgcagtggtgygatcttggctcactgcaacctccgcctcccaggttcaagcaattctcctgcctcagcctcccgagtagctgagactacgggtgtgcaccaccatgcccag

SEQ ID NO: 437872 - DNA, 201 bp, Homo sapiens
gccatatccccccaactccaaactccatcagctggcatgtgcagaccagagccccagcctccttcctaccacttggcatcttccccaacttggtatccccrctgaactgctgctcagcgcggctcagggagcaccaggtctgaacagactcctggcaaacttgtctgttcacagtgatgtgactgggtgttttgtgtcttc

SEQ ID NO: 437873 - DNA, 201 bp, Homo sapiens
actttgcttatatctgcaaggcactaatcagttatgcaccctacagcaccctacactacgcagagtaatcagccactaaggagtagtgaaggatctgacamccagagagctcggtaaggacgatgccatccggctggctcctctgcaggtggccacagattgagcagcagagattaggaacagaattcagagacataagtc

SEQ ID NO: 437874 - DNA, 201 bp, Homo sapiens
tgatagttaaccatacctctgtgtacacttaaaagctaacctcacctatgtgaagtcatactgaattcaaagaggaaagatgagatacttacatgattcartaccgtgtaaactagaccgcatcaggttccagcacagatcattccactgacagcttacaataccacaatttaatttcaagacaaacactccagatttcaa

SEQ ID NO: 437875 - DNA, 201 bp, Homo sapiens
acctatgtgaagtcatactgaattcaaagaggaaagatgagatacttacatgattcaataccgtgtaaactagaccgcatcaggttccagcacagatcatkccactgacagcttacaataccacaatttaatttcaagacaaacactccagatttcaaatttgagatgaatatatgtgatctgagaattacttccagagct

SEQ ID NO: 437876 - DNA, 201 bp, Homo sapiens
tacaataccacaatttaatttcaagacaaacactccagatttcaaatttgagatgaatatatgtgatctgagaattacttccagagctttcaaagtggaaycgtatctctgcttaaacaccaaaacatggctaaaaactgatgcgaaggtaagaaaatctctcacactgtggggagatcagagtaagggcaacatactgct

SEQ ID NO: 437877 - DNA, 201 bp, Homo sapiens
tgagatgaatatatgtgatctgagaattacttccagagctttcaaagtggaatcgtatctctgcttaaacaccaaaacatggctaaaaactgatgcgaagrtaagaaaatctctcacactgtggggagatcagagtaagggcaacatactgctaatcattcgattcaggtcataccaatcagcatcttatccttgagatca

SEQ ID NO: 437878 - DNA, 201 bp, Homo sapiens
taaaagtctttcctgctgcctgaggtaactggaggtgatgcatgctttctaacacagcccctccaagaggcagaagcagctacacaagcttggcaaaatgyggcagggagtcacccagccctggcagccctccaatctgcaccagcaacagcatcgggcacttgttcctgctcagagaaggaaacccagccagggcagcgg

SEQ ID NO: 437879 - DNA, 201 bp, Homo sapiens
cccatgtaaaacccactggtttttgtactgggatgttttgccaaatgattctgttcaggggctgtgttccagaaaggtgagcacggagatgcacagaaagyaccacggggtcaatgccagggcagacacaggtaccaggactcaagaccagctcaaccaaagaaaggcagtgaccagcactgcccagcgaccgagcgatcc

SEQ ID NO: 437880 - DNA, 201 bp, Homo sapiens
ccttggcccagcagacaagacgcctgacaagcatctacttctccactgttctctaccattccctgaaaaaaaaaaaaatatatatatatatatatatatatatatatatatatatatatatatatatatatatatatatttctgatgggcagcaggcttctggaaggagacaagtccttattttgcattccccataatgct

SEQ ID NO: 437881 - DNA, 201 bp, Homo sapiens
ttggcccagcagacaagacgcctgacaagcatctacttctccactgttctctaccattccctgaaaaaaaaaaaaatatatatatatatatatatatatatatatatatatatatatatatatatatatatatatatttctgatgggcagcaggcttctggaaggagacaagtccttattttgcattccccataatgctgt

SEQ ID NO: 437882 - DNA, 201 bp, Homo sapiens
ggcccagcagacaagacgcctgacaagcatctacttctccactgttctctaccattccctgaaaaaaaaaaaaatatatatatatatatatatatatatatatatatatatatatatatatatatatatatatatttctgatgggcagcaggcttctggaaggagacaagtccttattttgcattccccataatgctgtaa

SEQ ID NO: 437883 - DNA, 201 bp, Homo sapiens
cccagcagacaagacgcctgacaagcatctacttctccactgttctctaccattccctgaaaaaaaaaaaaatatatatatatatatatatatatatatatatatatatatatatatatatatatatatatatttctgatgggcagcaggcttctggaaggagacaagtccttattttgcattccccataatgctgtaaga

SEQ ID NO: 437884 - DNA, 201 bp, Homo sapiens
cagcagacaagacgcctgacaagcatctacttctccactgttctctaccattccctgaaaaaaaaaaaaatatatatatatatatatatatatatatatatatatatatatatatatatatatatatatatttctgatgggcagcaggcttctggaaggagacaagtccttattttgcattccccataatgctgtaagacc

SEQ ID NO: 437885 - DNA, 201 bp, Homo sapiens
tgaggcagcagaatcgcttgaacccaggaggcggaggttgcagtgagccaagatcatgctactgcactccagcatgggtgacagagcaagactccatctcaaaaaaaaaaaaaaaaaaagggctttcaggcttgatttagtacatgaacactgttgatcctcaagactaaaagcaaaaaggagcgtgggagaatttctatg

SEQ ID NO: 437886 - DNA, 201 bp, Homo sapiens
gtttacagtaaggattctccttggttataaagattcctgggaacatcattttcaaaaaatgcagaatattcccaaatgcagataaacctggatttacttaraagctcccccactgtttctggggcaatgggactgtccatttttacatttcataatgatgaagttcatagggataagccatttatgccccctacgcccgcc

SEQ ID NO: 437887 - DNA, 201 bp, Homo sapiens
cacaactctgcactgtaggaaatgcccactgagcggaggggatgtcgggtctcactgtgagcaagttctgttgctgtccaacaagggttctctgtgtctgytgaaggtactattcttcaaaagtggccctactagaattatgagcagagagcctaggagaaaataagctttcatttgtcttgcaaattaaactctattaac

SEQ ID NO: 437888 - DNA, 201 bp, Homo sapiens
atcacgacttctattcaaaactgtattaaaggcctagccagagagccaagacaaagaaataaaaagtaaaactgaaacaatgactatcagcattaaggccttctttcaatgacagttgcttagaggtatgattcaccccaaactgggctataagcatcattgcaaagaccccttttcaatgatgcaaatgagaagaatctc

SEQ ID NO: 437889 - DNA, 201 bp, Homo sapiens
gcacttgaaaactcctgaaaacaagcaaccctgatcagtactggaagaaacatggagagaaaaccacaggtgcacacgtgtacacacacatacatgcatgmacacgcacacacacgtgtgcacactcgtatacacgctgtcatgtaagagaatttcctttatattcttactttgcagtgcattttcatcgtgaatggatgt

SEQ ID NO: 437890 - DNA, 201 bp, Homo sapiens
tgtgaaacagttatccactccagaggaagaaacaggaggaaattaagcaagtctatgccataaaccactgctcctaatcaaaagatgtaaaacaaacaccrttctgtgatacaatcaattgctactctttagatggataatgaataaataaaatgactcataaatagtcatctctatattaccttctgtcttcctctctta

SEQ ID NO: 437891 - DNA, 201 bp, Homo sapiens
cagcagccctggcaagctcctgcacctgcaggaactgaaagtgcagaaacaaaggcagccaccactggtggcttcattctgagcttggagacacagtactyatcactccaggcctccaaaacaggggccccaaagtcctttctctctccagcttgaaatcagaaataatgtttcctgcatggagccaccgaggcgttcttt

SEQ ID NO: 437892 - DNA, 201 bp, Homo sapiens
agatgaatatatgtgatctgagaattacttccagagctttcaaagtggaatcgtatctctgcttaaacaccaaaacatggctaaaaactgatgcgaaggtragaaaatctctcacactgtggggagatcagagtaagggcaacatactgctaatcattcgattcaggtcataccaatcagcatcttatccttgagatcagg

SEQ ID NO: 437893 - DNA, 201 bp, Homo sapiens
cacttacagctctgctgataacagctggagcatcatacttccaaagagatcccaaattcaaccacttcttaacacctccgctccttcctgttccaagcaaycatgcactgctcaccatggaaccatttcaacagcctcgcattcatctacccactcgtgcgtccctgttccccatcctttccaattactgtccacaaggta

SEQ ID NO: 437894 - DNA, 201 bp, Homo sapiens
atcagcaaaacggcagactaaacccatacctattgatgagtacattaactaaaacatttcaaataaaaagtacagacttgcatactggatcactatatccyggttccaagaaacacactataaatataaagaaatagatcaaaagcaaaaggatggaaaagagtataacacatgcataggcaaatcacaagaaagctagca

SEQ ID NO: 437895 - DNA, 201 bp, Homo sapiens
agcaaatataaccagcattatttgtatatttattatttctatgtatatagaaataatgctggaattatacacatatatatacagagagatgtatgcatgcrtttctcaaagcaagtggcacttatcaaagacaagcaaggtttgttgagcattagaaaatcaattactgcatttctccatatgatcagaataaaagacaga

SEQ ID NO: 437896 - DNA, 201 bp, Homo sapiens
tcaattactgcatttctccatatgatcagaataaaagacagaaaccacataaacattacaacagatgcaaaaaggcacctgacaaaatgacacacccttcygtaataaaactctcagcctacaagaatagaacttcaatgggaatttacaagaatgtgtatttatatttaacattaaaatactgagtgcttcacccctaag

SEQ ID NO: 437897 - DNA, 201 bp, Homo sapiens
ggcacctgacaaaatgacacacccttccgtaataaaactctcagcctacaagaatagaacttcaatgggaatttacaagaatgtgtatttatatttaacaktaaaatactgagtgcttcacccctaagattaggaacagaggatgtttacttccccaactcctgttgaatgcagtatggagaccctagccagtacaataaa

SEQ ID NO: 437898 - DNA, 201 bp, Homo sapiens
atttggagaggatttgtatttgtggaaaaagaaagttggtctcacgcacatacaaggctgacaaattttcccatagccagagaccctccctgactaccacrtgctgggatggcccccctgcatctccctctatccccaattaatgtggaactaattcgtatttcaaacttcccatcagccagtctgaacccagagtcttcg

SEQ ID NO: 437899 - DNA, 201 bp, Homo sapiens
gggccagtgtttcagatccaggggagagcatgctccaaagtcggtagaattcctgaaccttcctgaatcttcccttccacgcctggatgtcttaaggagtkgtgggtggataagacgggggccagtgtttcagatccgggggagagcatgctccaaagtcggtagaattcctgaaccttcctgagtctgcctttccatgcc

SEQ ID NO: 437900 - DNA, 201 bp, Homo sapiens
tctaaatcgaagacattttccagcctctacacttaaactatgggattaggatcagaatggtataacggagcgtggaatgatctgttcagtcacagtaattytggaaaaattccttttaattttgtgacatttttgtattcccatgaagtacataggagttctctctataactataaaaatgatgtgttgtctggtatatgc

SEQ ID NO: 437901 - DNA, 201 bp, Homo sapiens
accagaataaagcttgagggaaaattcaaatgtctaaggtttaaaagtagccacagacagcctatgatgtgaaatgtactaccacggacaatgaaatattmtatgatacactcatacaatacacacagcacatccccagtgtgtctgtttgtgtagaggtagcactgaaatttctagtacagagatatcgcaaccaatact

SEQ ID NO: 437902 - DNA, 201 bp, Homo sapiens
ttttctaaaacatttacaaaataaagcaactatttttaacgtgagccatttttctttaagtgaactgtatcggaagcagcctggccatgtttttcagtacragcacgttagtgcaatgaaataattcacaaaaagtggctttaccttctcatggcactttactcagtaattggtatttagcagcctttgccagttcaccat

SEQ ID NO: 437903 - DNA, 201 bp, Homo sapiens
ctcccttggcgacaccacctactgggtctttctctcttctccctgatgctctcacccaaggagatcacagcagcagcagtgggtgtgtggctctcaggccrtatctctgacacatgctgcttctctgagctccatgcctgcatgctcacggatccgacccactggttccctggacctcaacaagagcaggcccaaggttga

SEQ ID NO: 437904 - DNA, 201 bp, Homo sapiens
tcgggggctgctggggccagaggaaggaggccgagccccccagttctgaagcctggctgggagaggagagtgttctccgcatggccggccccccgagtggyggggaagcacagggcaagccagggacctgtctcccagggggcctttctgttgtcttcagtcctggtttcataactcccccattcacacaagcccctccac

SEQ ID NO: 437905 - DNA, 201 bp, Homo sapiens
atgggaagaaacacgtggcagagttctgaggggccgccatggtttgtctcctgatctgcatgatggttacacaaagattcactgcaggcgcttctctctgwgtgtattatctttataacaaaaatggttagaaacaatgggtgacgcttcaaacaactgattctcaagatggtatggatacaacttcagggtttgagtcca

SEQ ID NO: 437906 - DNA, 201 bp, Homo sapiens
agtactgggaatatgcaaaatgctttgcaaaagctgacgagggagcgctcggcacccacacattttaaagatgggagcctacagtgctgggcctgaaatgaacaacatactgaagtctggtgtcaatttaaatgcattgaacaccagaaaaatgcccccaaccaaggcttcaaacttgtacagcacatttccactcaagcc

SEQ ID NO: 437907 - DNA, 201 bp, Homo sapiens
gtactgggaatatgcaaaatgctttgcaaaagctgacgagggagcgctcggcacccacacattttaaagatgggagcctacagtgctgggcctgaaatgaacaacatactgaagtctggtgtcaatttaaatgcattgaacaccagaaaaatgcccccaaccaaggcttcaaacttgtacagcacatttccactcaagcca

SEQ ID NO: 437908 - DNA, 201 bp, Homo sapiens
ttaattgatgtatcatgtctctctaaaatctataaaaccaagcggtgccccgaccacctggggcacgtgtcatcaggacctcctgaggctgggtcacaggygcatgtccttaatcttggcaaaataaactttctaaattaactgagaccatctcagatatttggagttcacaccagaaaggacatgccgatgctgcttcca

SEQ ID NO: 437909 - DNA, 201 bp, Homo sapiens
tactgggaatatgcaaaatgctttgcaaaagctgacgagggagcgctcggcacccacacattttaaagatgggagcctacagtgctgggcctgaaatgaacaacatactgaagtctggtgtcaatttaaatgcattgaacaccagaaaaatgcccccaaccaaggcttcaaacttgtacagcacatttccactcaagccaa

SEQ ID NO: 437910 - DNA, 201 bp, Homo sapiens
gctcggcacccacacattttaaagatgggagcctacagtgctgggcctgaaatgaacaacatactgaagtctggtgtcaatttaaatgcattgaacaccasaaaaatgcccccaaccaaggcttcaaacttgtacagcacatttccactcaagccaactagattgcctgtcacatctgacatggctcgtcaaaagtcatcc

SEQ ID NO: 437911 - DNA, 201 bp, Homo sapiens
ccaccacattactaattaatgcataaagaatgcaatctaaaagcgccggtgctgcaggtactggagaaacgagcacctaagggaaggctgaggccaagacsggacctgagctacggggcaggagcctccgggtcggggcccactggacacaggccaagggctgcagggagcatgccgaggagatgctgggaacagaggcat

SEQ ID NO: 437912 - DNA, 201 bp, Homo sapiens
ttgaaacggctgccaaagaagcgaaagctgtccaaggccgctgatctgaaggagaaaaaccagccgccgagcacgtgtcagggccaggaacacactctgayagtctcacacaaagaagtcatagcgagcacagggacgtccgcggacctcaggttgtggcagcaaaaccagcgcaggctgggaaagcccacagacgatcac

SEQ ID NO: 437913 - DNA, 201 bp, Homo sapiens
gacggagcagcttgaaacggctgccaaagaagcgaaagctgtccaaggccgctgatctgaaggagaaaaaccagccgccgagcacgtgtcagggccaggarcacactctgacagtctcacacaaagaagtcatagcgagcacagggacgtccgcggacctcaggttgtggcagcaaaaccagcgcaggctgggaaagccca

SEQ ID NO: 437914 - DNA, 201 bp, Homo sapiens
agggccaggaacacactctgacagtctcacacaaagaagtcatagcgagcacagggacgtccgcggacctcaggttgtggcagcaaaaccagcgcaggctsggaaagcccacagacgatcactagcaaaccctagaccacgtgtcttagacggcatgtgacgatcaggtgtgggggaaacgggttttgctctaagaaaata

SEQ ID NO: 437915 - DNA, 201 bp, Homo sapiens
gacacatgctgcttctctgagctccatgcctgcatgctcacggatccgacccactggttccctggacctcaacaagagcaggcccaaggttgaagcgttgytcccgccactcctggcttcctgctctgtttccccttctgatggggactcccctcctgctagtcacacatgccagcaacacgggcccacgcctgccttatc

SEQ ID NO: 437916 - DNA, 201 bp, Homo sapiens
tagccaatctgtggttgcaactggtgaacacacagttctacatgaatgctgcaaagtgacgagacagaggtgatgaagatgttatgtcagaacttcacgtsttcggcaatgacatgagcgatttctttgttgaatgagatgatacttttaaccactggaagaggggctaaatttctggagctattcaaaatgtaacagtta

SEQ ID NO: 437917 - DNA, 201 bp, Homo sapiens
acatgagcgatttctttgttgaatgagatgatacttttaaccactggaagaggggctaaatttctggagctattcaaaatgtaacagttacacacaagacrtctgaaaatgaatgcaccttactaacatcttctccatcacattttgaaatctagattttggttggcaaacattttctcaaagggccagatagtaaatata

SEQ ID NO: 437918 - DNA, 201 bp, Homo sapiens
gttgctgctgcttgcaaggaaggaaggaaggggataagctcctggttccacccttttttctgtctcgtgaaaaaccagaatcttcagaagcaagggaagargggtgaagtcagcttaaatctgactttgaattcaagttcaagtattttaacagccccgtgagggccagctttattccagccaacgctcccagcagtctga

SEQ ID NO: 437919 - DNA, 201 bp, Homo sapiens
tccctgacagcagccctggcaagctcctgcacctgcaggaactgaaagtgcagaaacaaaggcagccaccactggtggcttcattctgagcttggagacayagtactcatcactccaggcctccaaaacaggggccccaaagtcctttctctctccagcttgaaatcagaaataatgtttcctgcatggagccaccgaggc

SEQ ID NO: 437920 - DNA, 201 bp, Homo sapiens
tagattaacagctggcaaactatggccatggcaagaatattttcaaagaaaaaatttttaaatccaaagaaaagattttcagaaaaatgagaaagtactamttcggtacaacctgaagtggaatctgctaagatgtgttataagtggtggttgtgaaattgtgtgaagcaaaaaaggattagttggctaaactgaaaaact

SEQ ID NO: 437921 - DNA, 201 bp, Homo sapiens
catgacattaacattttttacatgaagtaaaactcacccttgttggtgtttagttctgtaagttttgacaaacacctacagtcacatgaccatcactaagmtcaagccagagttccatcatcctaagcacttcctgtggtccttcataggaaacctctttccccctcaatcccatccctcgctaccactgatttgctgtcc

SEQ ID NO: 437922 - DNA, 201 bp, Homo sapiens
ggtgtttagttctgtaagttttgacaaacacctacagtcacatgaccatcactaagctcaagccagagttccatcatcctaagcacttcctgtggtccttyataggaaacctctttccccctcaatcccatccctcgctaccactgatttgctgtcccagtggttttgcctcccacagtcagtcctgtaagtggagtaatg

SEQ ID NO: 437923 - DNA, 201 bp, Homo sapiens
ttcttccactatcaaatgcataatgccttgagagtcattcatgatgttgtatgtatcaattgtctgctcctttctcagggctgatctgaactgcatggtasggatgaactacagcttatctacttactcagttctccaagtgagggaatggctgtttaaggcttggggagactctgagtaaagccacttttctgagttaga

SEQ ID NO: 437924 - DNA, 201 bp, Homo sapiens
gaaacttttcttcataacctaatttttgataagcttttgtaaatattccatgtatgttgagaaacagacgtattttctactcagcgaatgcatttcaataygtatctgtgacgggataggttgtttgggtctcctgtatcattccttacttgtggccacttgacctgtcttgtactgagaatagtgtgttaacatctctga

SEQ ID NO: 437925 - DNA, 201 bp, Homo sapiens
gtgtgtgtgttgggggtgggggatcttcctctttgtgaaaagaaaaggtctcccttgaagtctttgcatatttctgaggggttggccccccgcaacctaagcacatgcattaatttcacattatggaaacccacagcagaggcaggagagaaagatggaatcaattcagataatggtggagggctccatgtccctcagcat

SEQ ID NO: 437926 - DNA, 201 bp, Homo sapiens
gaaatattctatgatacactcatacaatacacacagcacatccccagtgtgtctgtttgtgtagaggtagcactgaaatttctagtacagagatatcgcarccaatactcatgcagatatttccgtaatctgaaatcatgcagtactaagggtttataaggcatgtttcatatagaagcatcaagtggtccatatgatgcc

SEQ ID NO: 437927 - DNA, 201 bp, Homo sapiens
gggcagtgtagcaaaatctgtaaagtattgggaggaaaaaaaccctgtcaatctagaattctacacccagtgaaaatacctttcaacaatcaagaagcaawaaagacattttgggcactaaaaaactgtaagaagtcacctgcagtagaccagtgcaatgagaaagggtgaaggaaactgtcaggaagaagaaaatgatgc

SEQ ID NO: 437928 - DNA, 201 bp, Homo sapiens
tagaataaatttgttcagcaaactcacagcatactagacaaatttacagaaagctcctgtaattctcatcattagcaaagaaatactgggaattgaaactwaaaatatagcatttttaaaggacaaaacaaaaacacatgaaaaacttatggataaatttatgtggaatatatttaaaagatttgtataccaaaaaattac

SEQ ID NO: 437929 - DNA, 201 bp, Homo sapiens
aataggatagaggtgccaattagggaagggccggttcaggctttgcactcatgggatgggggctcctcactggagggtggcaaatcctcccattcccagcrtctccatgacaacgggggcctcatgaagtcaggccacactgctaagggtcagtgtgatgactccacacacgctaagaggccgcagtccttgtgggtcctt

SEQ ID NO: 437930 - DNA, 201 bp, Homo sapiens
acacacttaaatccccaagacagggtatctgtccccaaatgaaacacaatttgcagtctatgggatcttttacagttacttagaacttgctaagtggttgyaaatccctagcctaattcatagagctcacctaactcacagtcattgtggcagctttagatgtcttagaaaatgaagtgcactattttcgctgtcttctgc

SEQ ID NO: 437931 - DNA, 201 bp, Homo sapiens
cagctatactgaggaacagctcccttcctgccttcactgttaaacagtgattttcatttatatttttctccttttcaagggattacaaagtgttttacaarctcatccctgtttgtttatgccagtccctcagccgggcgagtcacacacgaacatgcacagaagccacgagagctctcctgcaagggtcacaaggagaca

SEQ ID NO: 437932 - DNA, 201 bp, Homo sapiens
tctagaagcgtcagggtcagcgccttggaaaatcagaccttaatgggttttaaaaatggtaatgtgtgaaagaaatgtgtcttcaactgagtctaaagacrgataaacattgacttccagccatgcaaaccacttctccgcatgctcggaggcggcccctccacaccaggccagtgaggctgctcaggtcttcactcctgg

SEQ ID NO: 437933 - DNA, 201 bp, Homo sapiens
tgtcctgcctgccagggccagacaagcttcccgagaccccggccaccttcctcatacctcaagaggcttgcacacccctgcctcctcctgtctctccaggracttacccacccatacaggccctgtgctccaggcagcaggtccctcacagccctccaagcagccagtgggaatggggaatgccctatctcagcccccgct

SEQ ID NO: 437934 - DNA, 201 bp, Homo sapiens
ccgtcttctcggatcccaaaccacagatgggctacctcaccatccagcttcccacctgcatctttatcagcacagctactccagctgcaaggcgggggtcrgcgaggcagccaccgaggtgggcaaggacagacaggcgtggagggtgcagtagtagggtgtggccctcgctctgggccagctgtgcccagcacaggccgc

SEQ ID NO: 437935 - DNA, 201 bp, Homo sapiens
ggcgaggcagccaccgaggtgggcaaggacagacaggcgtggagggtgcagtagtagggtgtggccctcgctctgggccagctgtgcccagcacaggccgmagtcttgtcaagggggaggtggggtctccaagcaggggtctctgagggccaccaagttctccccgcatccccaaaggtggctccacctggccccttgact

SEQ ID NO: 437936 - DNA, 201 bp, Homo sapiens
tctctagatgctaaagaggaaaaagattaatgcaaagaagaaaaaaaatacaggcagaatgtggagaagataaacagtttaaatatgataattgcttcaayagtgtcggcaaaattcccaattaaataatttgtcctgtttaaaaatgaagacagcatgtcacttaacatctttcctgggtaacttttgctatcttgtatt

SEQ ID NO: 437937 - DNA, 201 bp, Homo sapiens
atggggactcccctcctgctagtcacacatgccagcaacacgggcccacgcctgccttatcctcctctttggccctatttaatcacaaagtcctcgttttmactcctaactcttccggcaatctgtccacttacagacgtcactgctgtcatccttctactagtctaaacccagtcattccctgcctagaccaccatgatg

SEQ ID NO: 437938 - DNA, 201 bp, Homo sapiens
aagtcacctgcagtagaccagtgcaatgagaaagggtgaaggaaactgtcaggaagaagaaaatgatgccaggtggaaatggatctaaacagaatgaagascaataaaactttattggaacacggctgcattaattcatttacattttgtctatgattgctgtcacaaaacggcagaataactgagacagagactaatata

SEQ ID NO: 437939 - DNA, 201 bp, Homo sapiens
gacagagactaatatatttactatctggttctttacagacaatatttaagaaccttgtattaaacaaaactattgtcatttgaaaatatttgtcgttttayctgtgtttatgttactgtcttttatgcatataaccacatgtttatgcaagcaaagagtgacttttacaaggaggctcaccaagtatcagcactacttatc

SEQ ID NO: 437940 - DNA, 201 bp, Homo sapiens
acagacaagaaaaaacaggaaattccttgatcttcatccctaaaacagccattatcatcatttgagagtattcacttcaagctttttctcacatggcacarttgtaactctaatgtgcctgctctttagcactctgctttttcacttaacggaagcatttatccctgactacgcagtctcataggcattagatgctgactc

SEQ ID NO: 437941 - DNA, 201 bp, Homo sapiens
tctctgtcctccaaagacacacggcccggggtccaacaggctgcaggaacttcagtgcctgctatctgcttttcttcagtgggccccactcccaaagctayaccatgagatggaaactgtccccgggggagcaggaccatccccagggctgccaggaaatctgccgtgagtgaggtgcacaaaccctgggcacagtccaca

SEQ ID NO: 437942 - DNA, 201 bp, Homo sapiens
tgtccagaaaatattttaagatacaagagatatgaagcagttattttcagatgatatatttaagtaatactttaccctttacttaactcattccgtcgtayctaagtattcctctgcatgagacatggaatcaaatatcattaaatgagaatcttccgaacttgacttttaaagacacccagtcactcccagaataaagat

SEQ ID NO: 437943 - DNA, 201 bp, Homo sapiens
tccacttccaggatggcatgacagcacaatttggtacagttaaaaatgaaagtaagctaaataaccaatcacagggtgttaaataaattatgaaacatccrtaagccaggctactgcatatccaataaaagtcatgtctaaggatgtggcacaatgcatacgctggtgcataaaaaggcatatcccactacaacacatgca

SEQ ID NO: 437944 - DNA, 201 bp, Homo sapiens
tcaaaaaattataaaaccatacatacatgtaagccatcattgttattaatgtaaacaaccctgaaacagtatgatttccagaagtttacattgtaagagtmcttcattcttctgtctcatcatttgaacaacatatggcaggacagataatacattcggtcaacaaattactatttggctctttaacacagctatgaaaac

SEQ ID NO: 437945 - DNA, 201 bp, Homo sapiens
tgcggcagggagtcacccagccctggcagccctccaatctgcaccagcaacagcatcgggcacttgttcctgctcagagaaggaaacccagccagggcagyggggcctggaaaagtgtccctgacagcagccctggcaagctcctgcacctgcaggaactgaaagtgcagaaacaaaggcagccaccactggtggcttcat

SEQ ID NO: 437946 - DNA, 201 bp, Homo sapiens
tatgaaaacagagagctaagccctccctctattttctacccttaacggggactgtgtaaatctcaggctacgttgtcacagctgagttacaaattcctaakaaatgggatcttagtcatcaaaaataacaaaaaaaaaaagcagactggtttcattaacataaataaaagttgagaaacaaaatacataacctggaaacat

SEQ ID NO: 437947 - DNA, 201 bp, Homo sapiens
cttttctaaaacatttacaaaataaagcaactatttttaacgtgagccatttttctttaagtgaactgtatcggaagcagcctggccatgtttttcagtasgagcacgttagtgcaatgaaataattcacaaaaagtggctttaccttctcatggcactttactcagtaattggtatttagcagcctttgccagttcacca

SEQ ID NO: 437948 - DNA, 201 bp, Homo sapiens
acaccatgagatggaaactgtccccgggggagcaggaccatccccagggctgccaggaaatctgccgtgagtgaggtgcacaaaccctgggcacagtccayaaacccagtcaatcttaaaactgattaataattgttggcacaaaatgtcccagtgtgtgaaatcctggataaaaggaaaaggaactgatgggcaagaaga

SEQ ID NO: 437949 - DNA, 201 bp, Homo sapiens
ctcttcctccttcccctgccaacccctggtacacaccaccttcacccataccttctaggacctgccacgtatcaccaggtatgtgaaagctatctctatgrcggcttccaggcgggctggagtggtgtggccatcagaaccacccgcaaaagggctttttactccacaaaagggctggccctgccccacagcatctgtcta

SEQ ID NO: 437950 - DNA, 201 bp, Homo sapiens
aagtcagccgggcatgtggcaggcgcctataatcccagccacttgggaggctgaggcaggagaatcacttgaacccgggaggcagaggttgcagtgagccragatcgcaccactgcactccagcctgggcaacaagagcaaaactccatctcaaaagaaataaaaaaacaaacaaaaaacaaaaaaaaaaaaagaaagaaa

SEQ ID NO: 437951 - DNA, 201 bp, Homo sapiens
ccatcacaggaagcacgtggctgcatccgatatatggggttcctactgcatgaagcacgtgcctgcgtctagtataccgggttcccatcacaggaagcacrtggctgcatctggctgcgtctggtatctggggttcccatcatgggaagcacatgcctgcatctggtatactggtttcatttattttcctgcccttattct

SEQ ID NO: 437952 - DNA, 201 bp, Homo sapiens
ctaaaactctttgacacatatctgttacagatcaatgaaattactaaactgaaataaccagcaagcccccaatgcatgacagagcttcagatctgtcagcsataatttccaatagagccaataatgtatccattctcactcatcaattccagtgttttccccaagacacgtggttcctatcatatttgtcatccaccaaaa

SEQ ID NO: 437953 - DNA, 201 bp, Homo sapiens
ggtgaagatcaacttttttctccttttccagccctacgactcctctcttcctccttcccctgccaacccctggtacacaccaccttcacccataccttctrggacctgccacgtatcaccaggtatgtgaaagctatctctatggcggcttccaggcgggctggagtggtgtggccatcagaaccacccgcaaaagggctt

SEQ ID NO: 437954 - DNA, 201 bp, Homo sapiens
ccatcacaggaagaatgtgcctgtgtctggtatacggggttcccatcacaggaagcacgtggctgcatctgatatacagggttcctactgcatgaagcacrtgcctgcatctaatataccgggttcccatcacatgaagcacgtgcctgcatctagtataccgggttcccatcacatgaagcacgtggctgagtctggtat

SEQ ID NO: 437955 - DNA, 201 bp, Homo sapiens
cacccgcaggccctcaacgtgctcccaccaccaggtgtggctctgcaccgattcagtcctctcacctgttcaacatcttccaacatttcacccattctcasgtgtcaattccagcgttttccccaaggtatgtaacttcctacaaaaccacatatttctaacaactatgttatattttagcctctatgaaagaccggaaaa

SEQ ID NO: 437956 - DNA, 201 bp, Homo sapiens
accaggctgcatctggtatacgggttcccattacaggaagcacgtgtctgtgtctggctgcggacggtatacagggttctcatcacggaaagcacgtggcrgcatctggtataccaggttcccatcacaggaagaatgtgcctgtgtctggtatacggggttcccatcacaggaagcacgtggctgcatccgatatatggg

SEQ ID NO: 437957 - DNA, 201 bp, Homo sapiens
attctccgagggatcatctctgtggcgcatcccatgaacatttcctttccttagatgcccccacctggcaactcctggcgtcctggtactggtgttctccsgaggagacagggaacaggacttgtcaggcagaggacagcaccctgcgggaagaacccaggccgctccaggaccccagatggacactgtgcatcctggcac

SEQ ID NO: 437958 - DNA, 201 bp, Homo sapiens
actactttgggtgccatcagtgttctgaccatcaagaagctcactgcttaattcctggcatattcaaagatgtttcccattacaagaagcacgtggctgcrtctggtatacggggttcccatcacatgaagcatgtggctgcgtctggtatatggggttctcatcatgggaagcaccaggctgcatctggtatacgggttc

SEQ ID NO: 437959 - DNA, 201 bp, Homo sapiens
aagaagctcactgcttaattcctggcatattcaaagatgtttcccattacaagaagcacgtggctgcgtctggtatacggggttcccatcacatgaagcaygtggctgcgtctggtatatggggttctcatcatgggaagcaccaggctgcatctggtatacgggttcccattacaggaagcacatgtctgtgtctggctg

SEQ ID NO: 437960 - DNA, 201 bp, Homo sapiens
caggctgagaactgctactgggctgtaccagaggtccctaagaattagggagccccacccaagacagaaaactaacttggtgagagaaggaaatgggagaytcctcaaaaacaaaaatgtcacagaacaaagggcgtcacctccctgcaaaggacttagtatcccacccagaatccagtggcttggtacatgttttatctg

SEQ ID NO: 437961 - DNA, 201 bp, Homo sapiens
cttaacgcaactactttgggtgccatcagtgttctgaccatcaagaagctcactgcttaattcctggcatattcaaagatgtttcccattacaagaagcaygtggctgcgtctggtatacggggttcccatcacatgaagcatgtggctgcgtctggtatatggggttctcatcatgggaagcaccaggctgcatctggta

SEQ ID NO: 437962 - DNA, 201 bp, Homo sapiens
ctgagtctggtatatggggttcccatcatgggaagcaccaggctgcatctggtatacgggttcccattacaggaagcacgtgtctgtgtctggctgcggayggtatacagggttctcatcacggaaagcacgtggctgcatctggtataccaggttcccatcacaggaagaatgtgcctgtgtctggtatacggggttccc

SEQ ID NO: 437963 - DNA, 201 bp, Homo sapiens
actgcttaattcctggcatattcaaagatgtttcccattacaagaagcacgtggctgcgtctggtatacggggttcccatcacatgaagcatgtggctgcrtctggtatatggggttctcatcatgggaagcaccaggctgcatctggtatacgggttcccattacaggaagcacatgtctgtgtctggctgcagatggta

SEQ ID NO: 437964 - DNA, 201 bp, Homo sapiens
cctggtacacaccaccttcacccataccttctaggacctgccacgtatcaccaggtatgtgaaagctatctctatggcggcttccaggcgggctggagtgstgtggccatcagaaccacccgcaaaagggctttttactccacaaaagggctggccctgccccacagcatctgtctacctacgggctaggacctacaggct

SEQ ID NO: 437965 - DNA, 201 bp, Homo sapiens
cacacaacccagaaccttggtgctggcttaacgcaactactttgggtgccatcagtgttctgaccatcaagaagctcactgcttaattcctggcatattcmaagatgtttcccattacaagaagcacgtggctgcgtctggtatacggggttcccatcacatgaagcatgtggctgcgtctggtatatggggttctcatca

SEQ ID NO: 437966 - DNA, 201 bp, Homo sapiens
ccctgccaacccctggtacacaccaccttcacccataccttctaggacctgccacgtatcaccaggtatgtgaaagctatctctatggcggcttccaggcrggctggagtggtgtggccatcagaaccacccgcaaaagggctttttactccacaaaagggctggccctgccccacagcatctgtctacctacgggctagg

SEQ ID NO: 437967 - DNA, 201 bp, Homo sapiens
ctgcccagcactaggaaacagcccccaggtgggtgccccaagtctctgctgctcttccttttcattctggtgctggagccatttggtgtcatccaatttaygggacctttctcaaaagctgtggacaggagatgctttctaaaacccagaagttaggtttgattaaaaacaaaattacatatatagatttcaatggaccaa

SEQ ID NO: 437968 - DNA, 201 bp, Homo sapiens
gactaagaaaagtttcataggaggaggagttttgaacaatggttaggagtttaaagggggtagattaagaaggtatttgtactatgtacgttgaataaacrgtgtgcaaaggcagagaaaagaaaaatgtgaagtatggagttgtacaaatggcaagtcgactctttcggatagagcggattataggaatgagagatggga

SEQ ID NO: 437969 - DNA, 201 bp, Homo sapiens
agaaaagtttcataggaggaggagttttgaacaatggttaggagtttaaagggggtagattaagaaggtatttgtactatgtacgttgaataaacagtgtrcaaaggcagagaaaagaaaaatgtgaagtatggagttgtacaaatggcaagtcgactctttcggatagagcggattataggaatgagagatgggaggaca

SEQ ID NO: 437970 - DNA, 201 bp, Homo sapiens
ggctgcggacggtatacagggttctcatcacggaaagcacgtggctgcatctggtataccaggttcccatcacaggaagaatgtgcctgtgtctggtatayggggttcccatcacaggaagcacgtggctgcatccgatatatggggttcctactgcatgaagcacgtgcctgcgtctagtataccgggttcccatcacag

SEQ ID NO: 437971 - DNA, 201 bp, Homo sapiens
cctggcaaagcatcataacatagcactggaacccccactttagacacagggaaactgaggtttggggatctcaagtaacctggtgatggacacatggcccstaagtggcagagtgaagactgggatcctattcagatgggctcagggcccacagccctgactatattgtgttgatctcaaagaaacccagagaagatgccc

SEQ ID NO: 437972 - DNA, 201 bp, Homo sapiens
acccctggtacacaccaccttcacccataccttctaggacctgccacgtatcaccaggtatgtgaaagctatctctatggcggcttccaggcgggctggastggtgtggccatcagaaccacccgcaaaagggctttttactccacaaaagggctggccctgccccacagcatctgtctacctacgggctaggacctacag

SEQ ID NO: 437973 - DNA, 201 bp, Homo sapiens
ggtgatggcaagggctcttggcttcacccggaaatgacgcaactgctcctcaaagtcgcagcccagcagaaaagagccgcttccttcaaataactgccaasttatttgattttactgaatttcattttattatttctttcaaataagtaattagcaatatccacaaaccttgttcatgacagaaaatattacctttgcctt

SEQ ID NO: 437974 - DNA, 201 bp, Homo sapiens
cccatcacatgaagcatgtggctgcgtctggtatatggggttctcatcatgggaagcaccaggctgcatctggtatacgggttcccattacaggaagcacrtgtctgtgtctggctgcagatggtatacggggttctcatcacagaaagcacgtggctgcatctggtataccaggttcccatcacaggaagaatgtgcctg

SEQ ID NO: 437975 - DNA, 201 bp, Homo sapiens
ttacaagaagcacgtggctgcgtctggtatacggggttcccatcacatgaagcatgtggctgcgtctggtatatggggttctcatcatgggaagcaccagrctgcatctggtatacgggttcccattacaggaagcacatgtctgtgtctggctgcagatggtatacggggttctcatcacagaaagcacgtggctgcatc

SEQ ID NO: 437976 - DNA, 201 bp, Homo sapiens
gtggctctgcaccgattcagtcctctcacctgttcaacatcttccaacatttcacccattctcacgtgtcaattccagcgttttccccaaggtatgtaacttcctacaaaaccacatatttctaacaactatgttatattttagcctctatgaaagaccggaaaatattctccgagggatcatctctgtggcgcatcccat

SEQ ID NO: 437977 - DNA, 201 bp, Homo sapiens
cctctatgaaagaccggaaaatattctccgagggatcatctctgtggcgcatcccatgaacatttcctttccttagatgcccccacctggcaactcctggmgtcctggtactggtgttctcccgaggagacagggaacaggacttgtcaggcagaggacagcaccctgcgggaagaacccaggccgctccaggaccccaga

SEQ ID NO: 437978 - DNA, 201 bp, Homo sapiens
tcatcacggaaagcacgtggctgcatctggtataccaggttcccatcacaggaagaatgtgcctgtgtctggtatacggggttcccatcacaggaagcacrtggctgcatccgatatatggggttcctactgcatgaagcacgtgcctgcgtctagtataccgggttcccatcacaggaagcacgtggctgcatctggctg

SEQ ID NO: 437979 - DNA, 201 bp, Homo sapiens
tgctcttccttttcattctggtgctggagccatttggtgtcatccaatttatgggacctttctcaaaagctgtggacaggagatgctttctaaaacccagragttaggtttgattaaaaacaaaattacatatatagatttcaatggaccaagcaactctgtatcccagaatcccatgaaaaagctaaattgacaatactt

SEQ ID NO: 437980 - DNA, 201 bp, Homo sapiens
ggcagaggttgcagtgagccgagatcgcaccactgcactccagcctgggcaacaagagcaaaactccatctcaaaagaaataaaaaaacaaacaaaaaacaaaaaaaaaaaaagaaagaaagaaaaattaaatctgttgtataccagagaggtcagcacccatttacctcgatatactccacctttaacttctaagtgtaa

SEQ ID NO: 437981 - DNA, 201 bp, Homo sapiens
cgaggagacagggaacaggacttgtcaggcagaggacagcaccctgcgggaagaacccaggccgctccaggaccccagatggacactgtgcatcctggcayggcaaccttgccatgctcccacctccaatctggccttaaggccctccaaccctgaccccaggattctgcccagcactaggaaacagcccccaggtgggtg

SEQ ID NO: 437982 - DNA, 201 bp, Homo sapiens
cccataccttctaggacctgccacgtatcaccaggtatgtgaaagctatctctatggcggcttccaggcgggctggagtggtgtggccatcagaaccaccygcaaaagggctttttactccacaaaagggctggccctgccccacagcatctgtctacctacgggctaggacctacaggctgagaactgctactgggctgt

SEQ ID NO: 437983 - DNA, 201 bp, Homo sapiens
gttgaataaacagtgtgcaaaggcagagaaaagaaaaatgtgaagtatggagttgtacaaatggcaagtcgactctttcggatagagcggattataggaaygagagatgggaggacagggtagggcagctggggctttgaaagcagtccgagggctcaggacttggacatctacaatagcatcgaggcagccaccagcgct

SEQ ID NO: 437984 - DNA, 201 bp, Homo sapiens
aactcaaataggagagtaaccctggagatgggaggaagtggccagatctggaatctgtttgaaaggtaggatcaacaggacctgctgatagactggatgtrtagtgtgaaagaaagaggggcatggaggatgactgttaggcttgaggatctggtttgcattggaagtttccttagcaccccaaagctagaggcaatatgg

SEQ ID NO: 437985 - DNA, 201 bp, Homo sapiens
tgcatgactgtaatttattatagtcacctcaaccattcagcaaatcaaaaatcaatataaatcaatcatatataaggaggcccagaggaaattaagtgtcrgaagagatttcctagaggggatgataacttgcacagttttaaatacaaataggacttagtttctatcacacataccatgttgaacaatgctctattcagc

SEQ ID NO: 437986 - DNA, 201 bp, Homo sapiens
taactgggcctgcttctgcatttagggtcaccaaagcatactgtaaatggaaatcagattgctttagaatccaagaacaaactctacttttgacctttagraagctcatgatgtatatgcccaccaaataaacaaaataatttcaaagtaaattcgttgagtgcacctgacctttgaaacagagcagatgatgttaatcag

SEQ ID NO: 437987 - DNA, 201 bp, Homo sapiens
gttaatgaacatgaatacaaaaatactcttgagagattttctttttatcttggtaaagtacatatggtacggggaaaaaaaaccttgaaaataattagtgraaaaatacttagtgtatataactagacccttgattttttttttttaattattatactttaagttcggggatacatgtgcagaacatgcaggtttgttaca

SEQ ID NO: 437988 - DNA, 201 bp, Homo sapiens
acagccaaaacaggcaagggagctaaatgtaacaagtacaacgtgggatactatacatgaaagggtattaaaaaattgccatcacccaaagtctaccctgmaaacaaatgcaaataattctatgcattgagtattcatgtaaggatacaatgcagtctgtatcctcaagaagctcagactcgttggaaaaacaaaattcca

SEQ ID NO: 437989 - DNA, 201 bp, Homo sapiens
gacacagaaacatagtcagagaaagaagacgatgtgagaagacagagcagaaagatggtcatctagaagccaatgagagaggcctggagctagatccttckagttctgagacttctagcctcagaactatgatacaataaatgtctgtggttacagccacctagactaaggaatttcattgggacagccctatccaactaa

SEQ ID NO: 437990 - DNA, 201 bp, Homo sapiens
gtgtaaaaaaaatcatgtggtatggaagattgtaggggttatttctggaaagtacaatctgtgcgaatttcacctgtgactgatatagcaacttcgttgtrggagttatttgttcagtcatggttggaacagatattttttgagtgttattatatgctaggcaccattctaggctctagggatacagtagtggggaaaaca

SEQ ID NO: 437991 - DNA, 201 bp, Homo sapiens
gagccacctaaagagaaccaagtgaaagcttcagcacctttttatgacatagcctcagaagtcaaacagggtccctctactgctcacaaacctgcccaaayccagaagggtcataaacctcacctctcaataggtggagtggcaaagtcacagtgtaaaaaaaatcatgtggtatggaagattgtaggggttatttctgga

SEQ ID NO: 437992 - DNA, 201 bp, Homo sapiens
ttacctattacaatattttcctcaaaacagcaagaataaaaatatcatataggtggttttctattttagccaataaaattatgcatcttcaaaatgctcayggctgacattgcctttgacatttggggaatatacgctcggatttcctactaatatgttagtgaatgaaagacttaatattgagttgtttaatggcaatgt

SEQ ID NO: 437993 - DNA, 201 bp, Homo sapiens
tatggtacctcagaatgtgaacttatttggagataacatctttacagaggtagtcaaggtaaaatgaggtcattagggtggaccctaatccattgtgactrgtatccttgtaaatacaggaaatttggacacagaaacatagtcagagaaagaagacgatgtgagaagacagagcagaaagatggtcatctagaagccaat

SEQ ID NO: 437994 - DNA, 201 bp, Homo sapiens
tgctggctaccatctttgacttcagctggggttgttagccagaacacctacctgtggcctctccatgtggctacttgggcttcctaactgaatgatgtctrggttctaagagagagccacctaaagagaaccaagtgaaagcttcagcacctttttatgacatagcctcagaagtcaaacagggtccctctactgctcaca

SEQ ID NO: 437995 - DNA, 201 bp, Homo sapiens
gcacatagctaccagacaagcaggcattagcttcatcctatttgcatctaaaatctagagacccattcccagaagagcccatgcagaaaatactgatgaargtcaataataagtaagagtagtagtgacagcccactaaattcagcagcactctggtaaccttcctggaaataaatgcaggctgtaagggggtgttttttc

SEQ ID NO: 437996 - DNA, 201 bp, Homo sapiens
cagctacttcttttttaagatcatgtgtgcatatgaataaactcttctttcttctgttattctgtcttttgtcagtttaactcacacgcccacgggtaatraatctcagaaggtagaggaaaagttttttctgccccaatcattagaaattatgatggtttgatttgaggaaggtcttatgctgcacgtcatttcatctct

SEQ ID NO: 437997 - DNA, 201 bp, Homo sapiens
cctgcatgaaacaggcccttcagtagatcattataacctggtatggaaaatacagcgatggacaaacacacagcaggaacccagaaagtgtaagctctaascccaagcggcggggagagcagtgcagagcagagatgggagatgctctaagcagttttagaggctggaggttcaggctgagaaaggtgagaagtgacacca

SEQ ID NO: 437998 - DNA, 201 bp, Homo sapiens
attgagcaaaatgtaaataataaaggcaggtggtgtgtaatgtctagagacacaaaaatgagtgagatataattctcctgcatgaaacaggcccttcagtrgatcattataacctggtatggaaaatacagcgatggacaaacacacagcaggaacccagaaagtgtaagctctaaccccaagcggcggggagagcagtgc

SEQ ID NO: 437999 - DNA, 201 bp, Homo sapiens
accccatctctactaaaaatacaaaaatcagccaggcatggtggtgggtgcctctactcccagctactcggatggctgaggcaagagaactgcttgaaccygagaggtggaggttgtagtgagccgaaatcatgccactacactccagtttgagtgacagagcaaaaccctgtctcaaaaaaacaaacaaacaaaaatgtg

SEQ ID NO: 438000 - DNA, 201 bp, Homo sapiens
gaggagataaataaaattgaggacaagtatttgagcccttatcagtttattaatgaactagcaaactcctgtgtataatggataacaccatagggctaacygagctaaagacagcaatgatactattgtatgtggagcaaaaccactcccataggcatgctcgaagataacatgaaaaagagagccctgaataatgtgaat

SEQ ID NO: 438001 - DNA, 201 bp, Homo sapiens
aagaatcaggtgccttaccttcatatgtagactatcattaactacattatatctgaaagactgtctctcagaggagataaataaaattgaggacaagtatwtgagcccttatcagtttattaatgaactagcaaactcctgtgtataatggataacaccatagggctaactgagctaaagacagcaatgatactattgtat

SEQ ID NO: 438002 - DNA, 201 bp, Homo sapiens
ttgtgcctaatcacaaaaaaagaattataaaagggttgtgttgaattgttctttataaatatttttattctttatgtttactttttaaaacatttttaacktttgtgggtacacagtagatgtatatatttatggggtacatagtatgttttgatataggcatgcaatgtgaaataagcaagtcatggagaatggggtatc

SEQ ID NO: 438003 - DNA, 201 bp, Homo sapiens
tatagtagagaaattaactaaaagaatataaacatataatcttagggcagtaagatagaggttattttttattcttatctcctttttgcttaaagtattamctctgcaattagaaaaaccactacacttttaaacatattatataccatttaaggataggaacatagaggcaataaagagaattgtcttgttttgctttgc

SEQ ID NO: 438004 - DNA, 201 bp, Homo sapiens
tgaggagtgctttacttccaattttgtggtcaattttagaataagtgtgatgtggtgctgagaagaatgtatattctgttgatttggggtggagagttatrtagatccatattaggtctgctttgtccaagctgagttcaagtcctgaatatccttgttaattttctgtctcgttgatttgtctaatattgacagtggggt

SEQ ID NO: 438005 - DNA, 201 bp, Homo sapiens
gtggtacggtagtgaatactgtaagcatgtaaacagatgagcaaatcaatgtgattccccatatgagccaatgccaatgccagaatgagtggattctgccmcctatagtgaaggagagacaggggttctgggcagaggcaacagtacatggcaagcaccagagttcaggcaggtaaacgaatcagtctacaacctaaattg

SEQ ID NO: 438006 - DNA, 201 bp, Homo sapiens
cttaaggagattttgggctgagacaatggggttttctaaatatacaatcatgtcatctgcaaacagagacaattggacttcctgtcttcctatttgaataycctttatttctatctcttgcctgattgccctggccagaacttccaatactatgtggaataggagtggtgagagagggcatccttgtcttgtgccggtttt

SEQ ID NO: 438007 - DNA, 201 bp, Homo sapiens
catggtgaccgtatctgtacagtcatgcattgattaaaaatggggatatatcctgagaaatgtgtccttatgtgattccatcattgtgcaaacatcatagrgtgcacttacataaatctagatggcaatgccttctgcacacctaggttttgtggtatagtctaatgcttctaggctgtaaacctgtacagcagatgactg

SEQ ID NO: 438008 - DNA, 201 bp, Homo sapiens
ctgaagttgcttatcaacttaaggagattttgggctgagacaatggggttttctaaatatacaatcatgtcatctgcaaacagagacaattggacttcctstcttcctatttgaatatcctttatttctatctcttgcctgattgccctggccagaacttccaatactatgtggaataggagtggtgagagagggcatcct

SEQ ID NO: 438009 - DNA, 201 bp, Homo sapiens
tgtctgtagcaattgtgaatgggagttcacacatgatttggctctctgtttgtccattattagtgtataggaaagcttgtgatttttgcacattgattttktatcctgagaatttgctgaagttgcttatcaacttaaggagattttgggctgagacaatggggttttctaaatatacaatcatgtcatctgcaaacagag

SEQ ID NO: 438010 - DNA, 201 bp, Homo sapiens
agatcaatgttctggtgatgttctgcatccagaccatctttcaagaactgaatggttactaccctgggtcttctaccgaaagaaagaacatgggtgtgggyattcaagtatagcctctaaaaaaagaacacataagtggttgctgggtgctgttatataatcacacacatacaaggcttaaatcatgaatatttccttttt

SEQ ID NO: 438011 - DNA, 201 bp, Homo sapiens
tatcttggtaaagtacatatggtacggggaaaaaaaaccttgaaaataattagtgaaaaaatacttagtgtatataactagacccttgattttttttttttaattattatactttaagttcggggatacatgtgcagaacatgcaggtttgttacataggtatacacgtgccatggtggtttgctgcacccatcagcccat

SEQ ID NO: 438012 - DNA, 201 bp, Homo sapiens
agccatgaggaaatctatgcaagaaagttccaaacaggcggtacagtaagtgcaaagtccttaagacacaagtccttaagatacaaacaagtccttaagakacaccatgctggcgtggtagaagaatagccagaaagccatgtggctggagaagagtgaacgagaagaaaagtaatggaaaggaggtcaaaggcaatcaga

SEQ ID NO: 438013 - DNA, 201 bp, Homo sapiens
tattacaaatttatttgaaaaaataatatctaatacaaaaatattatattagaaaaaaggagaaacaatgcattatttttgtaatacaaagtatagaaagyttgggaaactcagtcgtacccaaatgctctagtctgcttcacacatttcttaacctgtgatcattaagctttttggctaccattggagaattctggttgc

SEQ ID NO: 438014 - DNA, 201 bp, Homo sapiens
tatatgctaggcaccattctaggctctagggatacagtagtggggaaaacaaagtccctgccctcatcatagttgtattctagtaggggagacagataatraatagatgttacatacaccactggatagcgatgagtgctgtgaagaaattcaggcagagtaagggtgcagaaaatgacacagtgtagatgttatttagat

SEQ ID NO: 438015 - DNA, 201 bp, Homo sapiens
aggctggagtgcagtggcacaatcacaggtcactgcagcttcaaactcctgggctcacacaatcctcccacctcagcctcacaagtagctggtacacgccmccatgactggttagtttttttttctttctttcttttttttttttttttagagatggggtctcactttgtcacccatgctgctctgaagcgatcttcccac

SEQ ID NO: 438016 - DNA, 201 bp, Homo sapiens
ccttcagacaagaatctttatttatttgtaatttattacaaatttatttgaaaaaataatatctaatacaaaaatattatattagaaaaaaggagaaacartgcattatttttgtaatacaaagtatagaaagtttgggaaactcagtcgtacccaaatgctctagtctgcttcacacatttcttaacctgtgatcattaa

SEQ ID NO: 438017 - DNA, 201 bp, Homo sapiens
ttggttactgcagccatctagtctagtttgaagtcaggtagcctaatgcctccagctttgttctttttaaataggattgtcttggctattgcttctcagtyttttggctaagatcaaatgtagtattgtcttggctatacaagctcttttttggttccatatgaactttaaagtagttttttctaattctgtgaagaaagt

SEQ ID NO: 438018 - DNA, 201 bp, Homo sapiens
tcaggtaatgtgattcctccagttttgttctttttgatacctttggctactctgagccttttgtggctccaaaaaattttaaggttgttttttctatttcygtaaagaatatcattggtattttgataggaattgcactgaatctgtagattgctttgggtagtgtggacattttaacaatattgattcttccaatccatg

SEQ ID NO: 438019 - DNA, 201 bp, Homo sapiens
tctgcataattcatcttagccatatgttacaggtcataattcagaccttcagacaagaatctttatttatttgtaatttattacaaatttatttgaaaaartaatatctaatacaaaaatattatattagaaaaaaggagaaacaatgcattatttttgtaatacaaagtatagaaagtttgggaaactcagtcgtaccca

SEQ ID NO: 438020 - DNA, 201 bp, Homo sapiens
ttttacattcatttgttgtttgtttcagatcaatgttctggtgatgttctgcatccagaccatctttcaagaactgaatggttactaccctgggtcttctrccgaaagaaagaacatgggtgtgggcattcaagtatagcctctaaaaaaagaacacataagtggttgctgggtgctgttatataatcacacacatacaag

SEQ ID NO: 438021 - DNA, 201 bp, Homo sapiens
agcctcatttacactggggaataggaactctttgggcatttaaggagggtgctttgggagctttggggcatggtagtgcaaggagaaagaagattaagaamaggggaaaaggacatttaaagaaacgtgttaaaaacattgtgtttttcattttatggtcttgaaacatgagtaaagggtgtggatattttaagaaggtag

SEQ ID NO: 438022 - DNA, 201 bp, Homo sapiens
ttggggtcatttcctgtaatacaattctttgttgcttttatgagcacagacttagctcagcagtcccagctattctcaagctgatcgacatgagagatttyaacacatgtgtcagcagccagactaaacgtggaagaaaatcagaagcatttgaaactgtaaagctcaataactttcctcctcctgagaaagcatcagcct

SEQ ID NO: 438023 - DNA, 201 bp, Homo sapiens
ctgatgaggcagattcctggactcttccaggaatctttttattactaatattttgttgttattggaagtcctttgtcttgcttttacattcatttgttgtktgtttcagatcaatgttctggtgatgttctgcatccagaccatctttcaagaactgaatggttactaccctgggtcttctaccgaaagaaagaacatggg

SEQ ID NO: 438024 - DNA, 201 bp, Homo sapiens
tctcagagaatgtcacattggattatagttcatcacacagacaccatggccacataaaatattatcaaattgtgaataacaaagtgaaattgaaaaaaaawatatagttaaaacagcaggaatgtgagcaatatatgtacagactgattttgtgcatagagattaaaacacctgttcaggcttcctagcctaatcttctgt

SEQ ID NO: 438025 - DNA, 201 bp, Homo sapiens
gaagggcagaaaggttgattttattcctattagtcaaggtatttttttcttttaatcactagctggtttaaatatctacttatgttctcaaagtgtcaggrtccacattaattgttctaatgttccatagctttgctccaggaaacttgtgaagtgtctgaggtagtagaaagacaccataatggataacaatagggaata

SEQ ID NO: 438026 - DNA, 201 bp, Homo sapiens
atgcaattacaaattgcagaacacctacgtaattttcacaaggtcatgcagctcctaagcaaggactagattcctggctgcagactcttgccattacatcrggaaaaacaaagagcagttttctctcagacaaacactaagataggtccccattttccttagcaccatttcctttctctgtctctcacttttttatttggc

SEQ ID NO: 438027 - DNA, 201 bp, Homo sapiens
caaatatatcccaaaatatttgcacttattatgtgcaaaatacaaggtgttctaggttgcactgcatcccctcaaaattatatgttgaaatcctaagctayggtacctcagaatgtgaacttatttggagataacatctttacagaggtagtcaaggtaaaatgaggtcattagggtggaccctaatccattgtgactggt

SEQ ID NO: 438028 - DNA, 201 bp, Homo sapiens
tcacagatgtattaaccttttctctatttggtaactgtatcttacacttatattttttgtaagcccctgtaatcagggcagttggttattacacagaaaayatgtgcaacacttaattgactcaaaaggtagtctgtgtattttttaagtaaaaaaaagtttctgccaggtacagtggctgacacctataatcccaatact

SEQ ID NO: 438029 - DNA, 201 bp, Homo sapiens
cattaatcgtttttggattaattttgagtttttaaagtgttgtgtgaaaatattatttatctccatgactgagtcttttggtgctcacctacctcactctrgccctgactctgatgagcacctggcattactggaaagattcgatgaaacagtgcatccagatcttggccccttggtgtctcctcactccatatcctcttg

SEQ ID NO: 438030 - DNA, 201 bp, Homo sapiens
cgcagcaatagataactaatacagtgattgcttcacagatgtattaaccttttctctatttggtaactgtatcttacacttatattttttgtaagcccctrtaatcagggcagttggttattacacagaaaacatgtgcaacacttaattgactcaaaaggtagtctgtgtattttttaagtaaaaaaaagtttctgccag

SEQ ID NO: 438031 - DNA, 201 bp, Homo sapiens
gaaagggcactcctaggaaggcttgtctctgcttcacaatgtcaggggtctcgtctgggaagatttgaaagttggaggtgaatcaatggctgagggctatygccatctgtaagcttccttaactcacatgtctgatggttgatgctggctaccatctttgacttcagctggggttgttagccagaacacctacctgtggcc

SEQ ID NO: 438032 - DNA, 201 bp, Homo sapiens
cttggcatctttgtcaaaagtaagttcactgtaggcatgtggatttgtttccgggttctctattctgttccattggcgtatatgtctgtttttatgctagyaccatgctgtttcagctactataactctgcagtgtaatttgaagtcaggtaatgtgattcctccagttttgttctttttgatacctttggctactctgag

SEQ ID NO: 438033 - DNA, 201 bp, Homo sapiens
ttctcttatgaacctagttggagatagaagtaatttagggaaaatgatatttcagcactgccttaatctagcagggattttcttcatgggaaaattaaacmaaacacaaactgaagtatgacttaactgggcctgcttctgcatttagggtcaccaaagcatactgtaaatggaaatcagattgctttagaatccaagaac

SEQ ID NO: 438034 - DNA, 201 bp, Homo sapiens
atttcgttttgcctattcttgaactttgaataaatgcaatgatactgtacacactcttttctttctttctctctctctcagtgtgtgtgtgtgtgtgtgtktttgtgtatagtatacagtatgttttcttttgaaaacacattagaatttccagtgtgagctgggcacggtggctcaagcctgtaatcccagtgtattggg

SEQ ID NO: 438035 - DNA, 201 bp, Homo sapiens
ggtgtgtacagagagagatttattctaaggaatcggctcatgtaattgcagggactggaaagttcaaaatctgcaaggtaagcctacagactggagacccrgggaagaggtgatgttgcagagtccaagggcaatctggaggcagaattctcttggggatgtcaatctctttttctcttaagaccttcaattgattgggtg

SEQ ID NO: 438036 - DNA, 201 bp, Homo sapiens
atgccaacatttaggtggcagaggaagaaaaatatacacacataattatttgaatctacttagaatatctctgcaagatcacagaacattgaaatctctgragagaactggacagctaaggttctgaagaaggaagatttttcactttataacctttttactttttgaattttgaaccataagactgcattacttattcaa

SEQ ID NO: 438037 - DNA, 201 bp, Homo sapiens
tcggtttccttatagaacatggtccattctcaggacctgcggtgtactgttttgttttgttttcaaggcaaatctgtggggttttatttccatgttttgayaacagaatgtcatgcttgtgataaatacttgcctgaaagatatttataatgtacaagccctaaaatatttagacattttttaattgcaattttcaacctc

SEQ ID NO: 438038 - DNA, 201 bp, Homo sapiens
aggactagattcctggctgcagactcttgccattacatcaggaaaaacaaagagcagttttctctcagacaaacactaagataggtccccattttccttarcaccatttcctttctctgtctctcacttttttatttggcctgattcattacatgcaggcaattacatcaagtcttagatctctcattatttctaatattt

SEQ ID NO: 438039 - DNA, 201 bp, Homo sapiens
gggtgtgtacagagagagatttattctaaggaatcggctcatgtaattgcagggactggaaagttcaaaatctgcaaggtaagcctacagactggagaccmagggaagaggtgatgttgcagagtccaagggcaatctggaggcagaattctcttggggatgtcaatctctttttctcttaagaccttcaattgattgggt

SEQ ID NO: 438040 - DNA, 201 bp, Homo sapiens
ttaataagtggcaaagttagaactcaaaaccacgtcttagaagactattttctgctctttctgtgaccacaaaagattcatttttaaaaaactttccaccrgaaaatcatccaataaacatgtgtgactttgacttaaattgtgtcttatcagacaaagtatctcacaatcttcccatagtaatcaagatcctaaattatt

SEQ ID NO: 438041 - DNA, 201 bp, Homo sapiens
tgcagttgatattattatcacaattttatggagtagaaaagtaagtcacagagaagatgagtaactcattaataagtggcaaagttagaactcaaaaccaygtcttagaagactattttctgctctttctgtgaccacaaaagattcatttttaaaaaactttccaccggaaaatcatccaataaacatgtgtgactttga

SEQ ID NO: 438042 - DNA, 201 bp, Homo sapiens
gatcactttctctatatatcaggtgaaattcaagttattgcttataagcaattattcaaaattattcaaaagaagaaatttaatcaaaattataaattagytttagtaattggaggcatttaaataaagagccctgtatgatatcaactgcatgccccataccctccaaatggttgatataagatgggcattcactgtgtt

SEQ ID NO: 438043 - DNA, 201 bp, Homo sapiens
gtatctcaatggtggatactcccagaaattgccttgggcaacaggaggaaggtattcccaagtacccactgctgacccctttgacaattttaaaatatgastgcaattcctttaacacttctcccatgagaagtggggcctatgtcccctcccttgaatctggactggtcttagtgaccagtaaccaagaaaatgcagtgg

SEQ ID NO: 438044 - DNA, 201 bp, Homo sapiens
gactatattatggctacaaaaagtaaacagggtaagtactagaagagcctgacatttgtaccatttgtatcattcaactaaatcataaaggtaagaggcamtggtaactacaccataaccccccattatcacgaagcttggggccatccttgtgtgtagaaaaactggaggtcacataatgttctctggctttagtcaaac

SEQ ID NO: 438045 - DNA, 201 bp, Homo sapiens
tatgaaaaatattaaagtatctcaatggtggatactcccagaaattgccttgggcaacaggaggaaggtattcccaagtacccactgctgacccctttgayaattttaaaatatgagtgcaattcctttaacacttctcccatgagaagtggggcctatgtcccctcccttgaatctggactggtcttagtgaccagtaac

SEQ ID NO: 438046 - DNA, 201 bp, Homo sapiens
gccaagattgtgccactgcactccagcccaagtgacagagcgagactccatctcaaaaaaaaaaaaaaaacaaactttatttttgtgttattcattagtcrgcactcaataaatatgtggttaacaaatgactatattatggctacaaaaagtaaacagggtaagtactagaagagcctgacatttgtaccatttgtatca

SEQ ID NO: 438047 - DNA, 201 bp, Homo sapiens
taccttgcctacagtaaaaagactagtaaaaatactaacacataatcatgtagggttcctgggaaccccatagagaggaagaaagtatataatagacttcrgtgttttcaaaacctgagtttacatctctaatttcttctctttagctgtatattctttgagatacttgagatctttctggttcatgccctcatctggaaa

SEQ ID NO: 438048 - DNA, 201 bp, Homo sapiens
aaacattgacaaacacatttggccccaaacacattttttttccctttagccaaaaaccactttttactttcttgttaagagaggaaaacaaatccaaataygtgaagcaaagaaagggtctatacgcgtgttttaattaatttgtttctcccatcaacctcgtttttagaagaaagccaagtagagtctgtgaagagcatg

SEQ ID NO: 438049 - DNA, 201 bp, Homo sapiens
atgaaaactgaaatttgtcccttatccattctccaaaggcatctatgatagatcatattcattggttccaattcttctctctcctaggctagaatacaagmaattttatgattctctctcagtataagtgaaacacattttctctgccttgttgatataaaacttgttttctgacatgcttgctttggccaatgaaatgtt

SEQ ID NO: 438050 - DNA, 201 bp, Homo sapiens
caaaaaaaaaaattattacgcagcaatagataactaatacagtgattgcttcacagatgtattaaccttttctctatttggtaactgtatcttacacttayattttttgtaagcccctgtaatcagggcagttggttattacacagaaaacatgtgcaacacttaattgactcaaaaggtagtctgtgtattttttaagta

SEQ ID NO: 438051 - DNA, 201 bp, Homo sapiens
tattacaggaaaaggtggggatgtatgatgagcaggcaactagctgtgcctgatgcaactacctaacaaccaagtaggggcaataaggggaagaaatgtgwtctcatgagagtaagtacaaagggacttacataacaaaggacacagactggtgtacaatggagagaagtggtcacctatgccagatatttaggaggttaa

SEQ ID NO: 438052 - DNA, 201 bp, Homo sapiens
gcttttgccgtgtgaagtacctgctcctacttcgatatccaccatgagtaaaggctcctgaggcctcccaagaagctgagtagatgctggcaccatgcttrtatattctgcagaaccgtgagccaattaaacctcttttctttataaattacccaccctcagatatttcattatagcaatgcaagaatggcctaacgccac

SEQ ID NO: 438053 - DNA, 201 bp, Homo sapiens
gactcaatgaaaattagagggaattcatgagactctggaaacagtgtatacctggtgagaatgaaatcagaaaagtctggggtgctcttcagagttcttaytaaaagcaataaaggaaaatcttgcatttttgccaaatgtaagcaaagttcacatgaaacatttatgtcttcagatagaaccacaaaagctcaagaagag

SEQ ID NO: 438054 - DNA, 201 bp, Homo sapiens
actaagaggggaaggaaattaaatcacaatcccagttttgtgcatgcacatgtgtgtgtgtgtgtgtgtgtgtgtgtgtgtgtgtgtgtgtgtgtgtgtttaatcctttgagacattcaagaagcaatgtcaatgaggcagttgggtgtatagttctggagctagaggagctatctgggctgaaagtgcaaatttgtgaaa

SEQ ID NO: 438055 - DNA, 201 bp, Homo sapiens
gactaagaggggaaggaaattaaatcacaatcccagttttgtgcatgcacatgtgtgtgtgtgtgtgtgtgtgtgtgtgtgtgtgtgtgtgtgtgtgtgtttaatcctttgagacattcaagaagcaatgtcaatgaggcagttgggtgtatagttctggagctagaggagctatctgggctgaaagtgcaaatttgtgaa

SEQ ID NO: 438056 - DNA, 201 bp, Homo sapiens
actacttttgcagacaactgttaggttgaaccatttgaaattgcctgctgcagactgaattgtgttcccaccttctccccaaaatgtgtatgttgaaaccstaactcccagtgtgatggtatttaaagatgagaccttgggaaataagtaggtgtagatgaggtcatgagggtggagcattcatgatgggattagtgttct

SEQ ID NO: 438057 - DNA, 201 bp, Homo sapiens
gagactaagaggggaaggaaattaaatcacaatcccagttttgtgcatgcacatgtgtgtgtgtgtgtgtgtgtgtgtgtgtgtgtgtgtgtgtgtgtgtgtttaatcctttgagacattcaagaagcaatgtcaatgaggcagttgggtgtatagttctggagctagaggagctatctgggctgaaagtgcaaatttgtg

SEQ ID NO: 438058 - DNA, 201 bp, Homo sapiens
aagagactaagaggggaaggaaattaaatcacaatcccagttttgtgcatgcacatgtgtgtgtgtgtgtgtgtgtgtgtgtgtgtgtgtgtgtgtgtgtgtgtttaatcctttgagacattcaagaagcaatgtcaatgaggcagttgggtgtatagttctggagctagaggagctatctgggctgaaagtgcaaatttg

SEQ ID NO: 438059 - DNA, 201 bp, Homo sapiens
gaaagagactaagaggggaaggaaattaaatcacaatcccagttttgtgcatgcacatgtgtgtgtgtgtgtgtgtgtgtgtgtgtgtgtgtgtgtgtgtgtgtgtttaatcctttgagacattcaagaagcaatgtcaatgaggcagttgggtgtatagttctggagctagaggagctatctgggctgaaagtgcaaatt

SEQ ID NO: 438060 - DNA, 201 bp, Homo sapiens
tggaaagagactaagaggggaaggaaattaaatcacaatcccagttttgtgcatgcacatgtgtgtgtgtgtgtgtgtgtgtgtgtgtgtgtgtgtgtgtgtgtgtgtttaatcctttgagacattcaagaagcaatgtcaatgaggcagttgggtgtatagttctggagctagaggagctatctgggctgaaagtgcaaa

SEQ ID NO: 438061 - DNA, 201 bp, Homo sapiens
ggttgttcaggataaagatttgtttgaaaagaaatgtggtgaatgatttttgtacttgacacttcttcaaggacttgtattgcttgtaaatgtactttaawaatcttatatgctttagaagcccatatatcccaaaatactccaaattgtagagttctaaacctgcaacttattttcttttataaaacaaactttggaaaa

SEQ ID NO: 438062 - DNA, 201 bp, Homo sapiens
atcatattcacacatacaagtttttttaaggcagtatgtaccaaattacaaatatttaaaagtcctgaaactggcaaaaaaaaaaaaaaaaaaaaaaaaaagagcaagcatttataactacagttgacccttgaacaacatgggggttaggagcgcagactcctgcacagtcaaacatccacttataacttttgattcctc

SEQ ID NO: 438063 - DNA, 201 bp, Homo sapiens
ttgagatcaggaggtcaaggctgcagtaagctatgatcacaccactgcactccagcatgggcaacagagtgaaaccctgtctcaaaaaaaagaacaagttytttaaagtgtcatgtttctgatggaaaattgttataataatatcatttattgaatactcttgtatgtgggacaatgattatattacattcatatataaca

SEQ ID NO: 438064 - DNA, 201 bp, Homo sapiens
cggcggggagagcagtgcagagcagagatgggagatgctctaagcagttttagaggctggaggttcaggctgagaaaggtgagaagtgacaccaaaatttwaaaaaaaaaaaaaatcactgggtccttaaagagtcactgacaagtgttaagtcaggaagggtgagagtcaatttgaggttttataaggatcactctggca

SEQ ID NO: 438065 - DNA, 201 bp, Homo sapiens
catatatttatgatcagcttgcattatagcctttatatacacacacacacacacatatatatatatgtatgtatataatatagtttgaatatatgtccctrccacatctcatggtgaattggaggtgttggaggtggggcctggtaggaggtatttgagtcatgggggcaggtctttcaaatacctggtaggaggcatttg

SEQ ID NO: 438066 - DNA, 201 bp, Homo sapiens
ttccctctctatgaaaatgtacatcttcatctctatacttctgaaatagcaaggaaacataaaaaataagcctgggaaaacataaactgggttttttttttgttttttgttttttgttttttcacagcagaaataggctcccaagtgaggaattcctttaaggaatttggatgaacaataacacattgttggaagctagtt

SEQ ID NO: 438067 - DNA, 201 bp, Homo sapiens
cccagctacttgggaggctgaggcaaggaatcacttgagcctgggaggcagaggctgcagtgagccaagattgtgccactgcactccagcccaagtgacasagcgagactccatctcaaaaaaaaaaaaaaaacaaactttatttttgtgttattcattagtcagcactcaataaatatgtggttaacaaatgactatatt

SEQ ID NO: 438068 - DNA, 201 bp, Homo sapiens
taagctaataaaaattggcctgagacgccaataacttcaagaacaattgttggtctcatttaccatcacatacaatggatcattcatgaaagctgaacaaatgctaccatagcagaaaatcggcacagaggaagccgttgttcaggacatgctgaagggtctgagaccattgtctacatagaaacactttccttgagcaca

SEQ ID NO: 438069 - DNA, 201 bp, Homo sapiens
ttcagctgatttcccactcttgttaatagtcttcaattttactgcaaacacaattaggacacaccaaacccagtggtttaccaccacaaaattagatctcrtctaccactggatgcctttatgcactaaatttatggctaacagacccactaacaaagttccaggcagggttcccctgcctgcagatgtagacagttgtaa

SEQ ID NO: 438070 - DNA, 201 bp, Homo sapiens
ttggtaaatattactccgtccctttattgtgagcctatatgtgtctttgcacgtgagatgggtctcctgaatacagcacaccaatgggtcttgaccctatscaatttgccagtctgtgtcttttaactggagcatttagcccatttacatttaaggttaatattgttatgtattaatttgatcctgtcattacgatgctag

SEQ ID NO: 438071 - DNA, 201 bp, Homo sapiens
cctgtataatttacctgctttgtatcctaaagctttgtgtctaacaggtcatcagttaagctatcaattagtcagtaaaacccatattgagaaccttctgyaagtgcatgtggagaggaagcaaggctgtaccagcgagctttccaatctggcacctttcattaaattctaaagtcacttgtctttgtctctgtattaaaa

SEQ ID NO: 438072 - DNA, 201 bp, Homo sapiens
gcacatgttatgttaattgcagcactattcactatagtaaagatatggaataaacctaaatgcccatcaatggtagactggataaagaaaatgtggtacayatataccatggaatactatgcagccataaaaagaatgagatcgtgtcctttgcaggaacatggatggagccagaggccatcatccttagcaaactaacgc

SEQ ID NO: 438073 - DNA, 201 bp, Homo sapiens
gtaacaataactcaaataggagagtaaccctggagatgggaggaagtggccagatctggaatctgtttgaaaggtaggatcaacaggacctgctgatagaytggatgtgtagtgtgaaagaaagaggggcatggaggatgactgttaggcttgaggatctggtttgcattggaagtttccttagcaccccaaagctagagg

SEQ ID NO: 438074 - DNA, 201 bp, Homo sapiens
caatggtggatactcccagaaattgccttgggcaacaggaggaaggtattcccaagtacccactgctgacccctttgacaattttaaaatatgagtgcaaytcctttaacacttctcccatgagaagtggggcctatgtcccctcccttgaatctggactggtcttagtgaccagtaaccaagaaaatgcagtggaagtga

SEQ ID NO: 438075 - DNA, 201 bp, Homo sapiens
tttgtttcagatcaatgttctggtgatgttctgcatccagaccatctttcaagaactgaatggttactaccctgggtcttctaccgaaagaaagaacatgrgtgtgggcattcaagtatagcctctaaaaaaagaacacataagtggttgctgggtgctgttatataatcacacacatacaaggcttaaatcatgaatatt

SEQ ID NO: 438076 - DNA, 201 bp, Homo sapiens
tgagcaggtaagtttgtccaataacgtaaatgtatgcaggtaggtaccaaattttaaaaatgataacatttcagatagcttcagacatagtccatagctaytgaaatgtttaccacttctagcaactgactttgtagacacattgattgcattttcctttggtttactttttaactgaggtataatacatgcagtaaatga

SEQ ID NO: 438077 - DNA, 201 bp, Homo sapiens
accatctttcaagaactgaatggttactaccctgggtcttctaccgaaagaaagaacatgggtgtgggcattcaagtatagcctctaaaaaaagaacacayaagtggttgctgggtgctgttatataatcacacacatacaaggcttaaatcatgaatatttcctttttgaaggggaaaaaaagcaaaaatccaattgtgt

SEQ ID NO: 438078 - DNA, 201 bp, Homo sapiens
aaaaagaatatcctggtggtaagctataaattggtaaatttgtaaaaagctacttgcaataatgtaagtcaagtaagaaatttagaaataatactgaaaargtttacgccctttgatccagtaattctatgtgtaggaatctacagtaaaagtacagagatgcagacaaaagtgtatgttcagtgatgttccttctttcag

SEQ ID NO: 438079 - DNA, 201 bp, Homo sapiens
ggaatctgcccataggtaagacaccatgtctgcaattattctttcaatttcaactagggagatatgcttttaaaagcttaaaatgaaaggggttttttttwaattacatttcccattgtatgtataattgtacaatcatggacacagacagggcccttctctttctctaataattggagattttacagtgaaggccaccct

SEQ ID NO: 438080 - DNA, 201 bp, Homo sapiens
tactggaggagagaatacaggagagaggttaacaacgagactggaactgtagacaaaagccatgttatgaaagagctgatgaaaccttctctagacctagkacttaatgtgacaagcagtggggagcaaataattggctttaacagggcaagcaatgtgatcaagttcgaattttagagaaaaatctggaagcactatgga

SEQ ID NO: 438081 - DNA, 201 bp, Homo sapiens
aaaggaaaatcttgcatttttgccaaatgtaagcaaagttcacatgaaacatttatgtcttcagatagaaccacaaaagctcaagaagaggcaggaaggcyaaggagctaatccattgcacatctgagaagagattggaccttgcaactctttctcatttgctgtagagtctagtttccttgatatgccctcagccaccca

SEQ ID NO: 438082 - DNA, 201 bp, Homo sapiens
ttgaaatataaaactcatcattcattgggatgccattaaaataaagcctacatgtgtctactctgagattcagtcttcagtaatagtccaccactataatygtgaagaatcaggtgccttaccttcatatgtagactatcattaactacattatatctgaaagactgtctctcagaggagataaataaaattgaggacaag

SEQ ID NO: 438083 - DNA, 201 bp, Homo sapiens
ttgtgtttatgtggatatgtatatacatatagtagagaaattaactaaaagaatataaacatataatcttagggcagtaagatagaggttattttttattmttatctcctttttgcttaaagtattacctctgcaattagaaaaaccactacacttttaaacatattatataccatttaaggataggaacatagaggcaat

SEQ ID NO: 438084 - DNA, 201 bp, Homo sapiens
acaacctcatgagagagattggaagcagatcctgcagccccagtcaagcctttcagttgctgacaccttgacagcaacctcatgagagacgctgagccacrtgatgaggctaagctgcgcccagacttctgtctcataacagctatgagataataaatgtttgttttaagccactatttcgggaggtaatttgttacagat

SEQ ID NO: 438085 - DNA, 201 bp, Homo sapiens
aacctaaataaccattaatggggaactggttaagtaaattaaaggtataatgaatttatatatgtatgtgtttgtgtgtgtgtgtgtgtgtgtgtgtgtgkacatatatattcatttattgaataccatacatcattttaaaaagaaaatgctttttgaattaatatagaaatagctccaagatggatagttaaatgaaaa

SEQ ID NO: 438086 - DNA, 201 bp, Homo sapiens
aagacagtcaagagagagggaacagcatgtgaaaagaaaaattgtaaaacatggcagtttagaaactgtaagtggtttaacattactggaggagagaatayaggagagaggttaacaacgagactggaactgtagacaaaagccatgttatgaaagagctgatgaaaccttctctagacctaggacttaatgtgacaagca

SEQ ID NO: 438087 - DNA, 201 bp, Homo sapiens
acagccacctagactaaggaatttcattgggacagccctatccaactaatacacaattctctcatcacagaattgtgaaaagaaaagattggaaacaacctaaataaccattaatggggaactggttaagtaaattaaaggtataatgaatttatatatgtatgtgtttgtgtgtgtgtgtgtgtgtgtgtgtgtgtacat

SEQ ID NO: 438088 - DNA, 201 bp, Homo sapiens
gtagtttgttattacccaccttgttatttcccaccttctgaagcctacttctttcaatttgtcaaactcattctctttccagttgtgttcccttgctagcraggagttgtgatcctttggaggagaagagtcattccagtttttggaattttcagcctttttgcactagttttctctcatcttcatggatttttctacctt

SEQ ID NO: 438089 - DNA, 201 bp, Homo sapiens
tatatatatatatacacacacacacacacacacgcacacacacacacatatatttatgatcagcttgcattatagcctttatatacacacacacacacacmtatatatatatgtatgtatataatatagtttgaatatatgtccctgccacatctcatggtgaattggaggtgttggaggtggggcctggtaggaggtatt

SEQ ID NO: 438090 - DNA, 201 bp, Homo sapiens
atgaggtgtctgtcgacccctgctgggagttgtctcccagtcaggaggcatgggggtcagggacccacttgaggaggcagtctgtcccttagcagagctcyagcgctgtgctgggagatccgctgctctcttcagggtcagcaggcaggaatgtttaagtctgctgaagctgcactcacagccacgccttcccccaggtgc

SEQ ID NO: 438091 - DNA, 201 bp, Homo sapiens
acctgcttgcttcttcctcaccattgtattgtaaccttcatatatatatatatatatatatacacacacacacacacacacgcacacacacacacatatatttatgatcagcttgcattatagcctttatatacacacacacacacacatatatatatatgtatgtatataatatagtttgaatatatgtccctgccacat

SEQ ID NO: 438092 - DNA, 201 bp, Homo sapiens
cacctgcttgcttcttcctcaccattgtattgtaaccttcatatatatatatatatatatatacacacacacacacacacacgcacacacacacacatatatttatgatcagcttgcattatagcctttatatacacacacacacacacatatatatatatgtatgtatataatatagtttgaatatatgtccctgccaca

SEQ ID NO: 438093 - DNA, 201 bp, Homo sapiens
ctgccactcgtttgaccaattatttatgatcattcagctgatttcccactcttgttaatagtcttcaattttactgcaaacacaattaggacacaccaaasccagtggtttaccaccacaaaattagatctcatctaccactggatgcctttatgcactaaatttatggctaacagacccactaacaaagttccaggcagg

SEQ ID NO: 438094 - DNA, 201 bp, Homo sapiens
ctgaaagataatttttggcattatgaagagcagcataaataccactgcaggcagggaaaataaacaaaaattgttagaaagctgtttggaagaaatgactrtaagaagacacatcatgatgtaaggagtttggaagaagacagttgtgtggttgccatgtgaaggactggaacacttctccatggggacagtgataggaag

SEQ ID NO: 438095 - DNA, 201 bp, Homo sapiens
ggatggagttgacatcctctttctcagcaactttagtccacctgcttgcttcttcctcaccattgtattgtaaccttcatatatatatatatatatatatwcacacacacacacacacacgcacacacacacacatatatttatgatcagcttgcattatagcctttatatacacacacacacacacatatatatatatgt

SEQ ID NO: 438096 - DNA, 201 bp, Homo sapiens
gacaatcagtgggaggttactgtctgatctgcaacttgactgaattaataaccaccttagtatgggttctcccagaagcagatctggagacaggtattcamgagcaagtattttatttaggaggttatcgcaggaaacaccagtaagagactaagaaagtgaaatagggaagagaagaccaaaaagatgccttatctagca

SEQ ID NO: 438097 - DNA, 201 bp, Homo sapiens
cggtggcccttgtacaagaggacttgtgaaagtcaccttcccctccccccaccaaacctaacagcaactgcctctcttcattgtcctgacttgtttactcragcctggagtgcagttgacttcagcattcagataactttccaacaacataggaaccaaattaccctgttgaattcatagatatgccacatttaaatgaca

SEQ ID NO: 438098 - DNA, 201 bp, Homo sapiens
acaaagcataatcatttaaaaaccactttctgggcatctactatgtgttgggctctgaagacaccaggatgcatccacccagaagccagttaatcacatgytcatattaacaaaggatgtaaattacatacagttctttgagaagatgcaacctgacccagagcagcagtcagggaaggcatcctgtagggagtggccttg

SEQ ID NO: 438099 - DNA, 201 bp, Homo sapiens
ggagtccctgagatgctggcagtgtggcttctcatctagtccacttggactcaaatgctaatctcctctggaaataccctcagacaacaccccaaaataaygttttaccaggtttttagatattctttaatatagtcgactcctaaaattaaccatcacaagcccaccccttgtcaacttggcacctatatatatgcaact

SEQ ID NO: 438100 - DNA, 201 bp, Homo sapiens
ggccccagggggaccgagctgcctcagtgtctggcctccacaggcctgctcctcagaggcacatctttcctgcagcctcagccagtgtttctcagccagakacccctagtcaaggcctatagacccaggtttccacctctacataggaatccaagggcaccccaacttgggacctccagagcccccagcccagctctcctc

SEQ ID NO: 438101 - DNA, 201 bp, Homo sapiens
tggggcagctatataaaacaaccggggaaaatctgttgagtaacatattaaagcacagagggtttccagggtgcagtggaacccagtattacatagagcaygatggcaggggactgagagggcattggtttttgggcaagaaatgattacttgaggatcactgcagataggggaactgcttttttgtaggaataacttatt

SEQ ID NO: 438102 - DNA, 201 bp, Homo sapiens
atgccccaggagaaggccacatacatgctggacacgtgtggctgagaaagacccctcgcaaagccccggctctgcccagagaagcccgttccttggcatcrtctgaatgcacactaacagcagagaggaagggtgagtgggaactacttgtttctgtatttttttttttttttttgacagagtctgggtctttggcccagg

SEQ ID NO: 438103 - DNA, 201 bp, Homo sapiens
ttttgtaggaataacttattacaagagtccatcctttccactccccaaaatgaaccagaaaagatgctaaaaagagtgactcgtgatgtttgactggggcyaagcaagggaagaagccaggaatggaagttatacctccaatatctcaagaggattgatagaaatgatcaatcttccaatgcaatgctgatttattttaat

SEQ ID NO: 438104 - DNA, 201 bp, Homo sapiens
caaagccccggctctgcccagagaagcccgttccttggcatcgtctgaatgcacactaacagcagagaggaagggtgagtgggaactacttgtttctgtatttttttttttttttttgacagagtctgggtctttggcccaggctggactgcagtggtgctatctcagctcattgcaagctctgcctcccgggttcacgcc

SEQ ID NO: 438105 - DNA, 201 bp, Homo sapiens
ttgtctgcttgttttattttattttttttcttaaactgagagagggtcccactctatagtccaggctgaagttcagtggcacgatcatatctcactgtagscttgatgtcctgggctcaagccgtctttctgcctcagccaccccccgagtagctgggactacaggtgtgcgccaccatgtcccactaattttgtattttt

SEQ ID NO: 438106 - DNA, 201 bp, Homo sapiens
gagtctgggtctttggcccaggctggactgcagtggtgctatctcagctcattgcaagctctgcctcccgggttcacgccattctcctgcctcagcctccygagtagctgggactacaggtgaccaccaccacgcccggctaattttttttgtatttttagtagagacggggtttcaccatgttaggatggtcttgatctc

SEQ ID NO: 438107 - DNA, 201 bp, Homo sapiens
gcttggaaatagaggagggtaaagcccaggtaaggacagaaaggctgctcttcgcaccgtggggttggccgtgggtggggccacatgtagcactgccttgytacctaataatcacatttatgaggacaaatggtccttgaggcacgtgctagacactgtacatacaggatcctgtctgatcctcacggccaccctgaagta

SEQ ID NO: 438108 - DNA, 201 bp, Homo sapiens
cagtgacaggtaggaagggacagacaagacgctggggagagtcacacagtaaaggacagccagtcctagcggcccgctttctctcgctggggggtggagcrcttatgcacaggtgtcacccagcagtctaaggcggggcccacccttgtgaagaagtgaagaaggctgtgcctgccagcatcagttcattctcaagttcca

SEQ ID NO: 438109 - DNA, 201 bp, Homo sapiens
tcttcttctagagctgccaagattctaataaacctccttccgtttaaactaaactgcaaatcgcgcacgctggaggctttccccaggaactgccttgtgargggcaagcactcgctgcaggccgggatgggcacacatctgaccttccttactccagtgctcattctctaaaggaagtggaatgcgctagtacctgcgagg

SEQ ID NO: 438110 - DNA, 201 bp, Homo sapiens
ccagcacagttttaacaagcactttatcccctagtgtgtaggtccctcccccggttccctataggctgagtactatgggtttacaatcttcctggacatcrcctattgattgttgggtaggggctgtaggtgatttttattagggttgtcttgctgcattttgttgcagcccacaatgcactgcaatccttgtcagctccc

SEQ ID NO: 438111 - DNA, 201 bp, Homo sapiens
cagggcaccatgcatggggctctcgcacctcagggcggcaccgagtgaaaacactgggcaggcttcatctcaccgactcctccacatagtgtggagagctragaagggccctccctgccttccagaggaggaaacagaggcatcgagaacatggagacgccctccaggggggtgccaatccccaccctactccaggtctct

SEQ ID NO: 438112 - DNA, 201 bp, Homo sapiens
ctttctgacctgcgtctgccattcacttgttttcccaggtcttttattacttcccatcttacatagtaataatctgcatctgtcctagcttccccaaagarttacattctccaagaggacaggcactagctttgatatcgtcacatctcttacagcactaaagagagtatcagtaaatctccctttgaatgaattaataat

SEQ ID NO: 438113 - DNA, 201 bp, Homo sapiens
actagctttgatatcgtcacatctcttacagcactaaagagagtatcagtaaatctccctttgaatgaattaataataaaggtaagagctcccatcagtgycctgccaagcactgtgctagaagcttcataatatctcatggaccctcacaagcagcctgcaaggtgggtcatattatttgcactttacagtcagggaaag

SEQ ID NO: 438114 - DNA, 201 bp, Homo sapiens
ggagacgccctccaggggggtgccaatccccaccctactccaggtctcttacgtaagacccatgctcccaacagctccctgatacttcgtcttgggctggrctccctatgcccactggggtcctttttgggatgtgaatgtttgaagtgaaccatttgttccaatgcgccagccccagcgtgagtgtcacattagcctcgt

SEQ ID NO: 438115 - DNA, 201 bp, Homo sapiens
cctcaacactatggagaaagtgcttaaagctcgttgaaaagtgtgtggctttggacacaacatcttccccacaatggacttctgctttaaatttgcctggyaatcactttctttgcaaattcagaaaggtcaccttctgtcaaacttatttcaacaattattacaaacataaattaatgagtctgagttattggggatgta

SEQ ID NO: 438116 - DNA, 201 bp, Homo sapiens
tgtttgaagtgaaccatttgttccaatgcgccagccccagcgtgagtgtcacattagcctcgtatggacacttgacaacatgaagctctcagtcaggtcayatggagactcccgatctaactttcagttcagtgagacttacaggcagggtctctgcatgggacaaaggacacagagacctctgccgctgtgtgtagacag

SEQ ID NO: 438117 - DNA, 201 bp, Homo sapiens
aaagccacggatgctccagaaccaacagcctccttcatgaagtgccggaggcacgtgccagcatctcacacagagttcacgttcaccatgattctccagaygtataattttgtaacagaaaagagccccagtctgaccgtctcctttacgtgtgatatgacaagaacacacacaaagctcatgtctgcatcatccccccgc

SEQ ID NO: 438118 - DNA, 201 bp, Homo sapiens
gtagcttgccacaaggactccccacactgggtagtgcagtgggacttcagagcagcagtcctcgaaaacaaggcctgttttactcccctctacctgcctcrctcctccaattgggctcggactctgaaatgtattcaggacaagcttgctgggtgcctgacgctaatggtaactgaacacgctaaagatgtttttcttgag

SEQ ID NO: 438119 - DNA, 201 bp, Homo sapiens
tgcaaattcagaaaggtcaccttctgtcaaacttatttcaacaattattacaaacataaattaatgagtctgagttattggggatgtatatttacacattaaaaacaaccacaaaaaagtaattcaagaaaatgcccaggaaggcataagaaaggcatatgctatcatcttgaggcaggacttatttctggtaaatgggtt

SEQ ID NO: 438120 - DNA, 201 bp, Homo sapiens
aatacgaaattagcggggtgtggtggcgcatgcctgtaatcccagctattcgggaggccgagatgggagaatcgcttgaacccaggaggaggaggttgtastgagctgagatcgtgccattgcactccagcctgggcaacaagagtgaaactccgtctcaggaaaaaaaaaaaaaaaaaaaggcaagttgaatagaattat

SEQ ID NO: 438121 - DNA, 201 bp, Homo sapiens
aggggatcttctgtattccagaagatcttccttgcctccactatggagtagtagtccaatttcccattggtagtctggatcagtcaccgcagccaacaccrtaactccctgcttagcctgttgactcagaggcatgaggaaccccaaggggccaagtggcatccttatcttctgcttgagtggaatcattgttgtgtctcc

SEQ ID NO: 438122 - DNA, 201 bp, Homo sapiens
caaattggaggaggggcttggtgggaagtaactggatcatgggatggatttcccccttgctgttctcatgatagtgagtgagttctcacgagatctgatgrtttaaaaggtgacactttccccttctctctctctttcctgccaccatgtgaagaaggttcttgcttccccttcatcttcctccatgattgtaagttttct

SEQ ID NO: 438123 - DNA, 201 bp, Homo sapiens
cacacacacacacacacacacacacacacacacacacgcaaatgatgtaacaaaaaggtgtgatatgagcctgctcaagcaaggtaaggcataaaattcawatataacacactgaccatatggctttctttctcaagaaaacaatgctcttctaataattaaatcccacatattattttaaactagttatctgtacatcaa

SEQ ID NO: 438124 - DNA, 201 bp, Homo sapiens
acttttaatgacagtcttgcaagattgagtgtctgataagcaggcacacccagcacagttttaacaagcactttatcccctagtgtgtaggtccctccccyggttccctataggctgagtactatgggtttacaatcttcctggacatcgcctattgattgttgggtaggggctgtaggtgatttttattagggttgtctt

SEQ ID NO: 438125 - DNA, 201 bp, Homo sapiens
gcacagagcactggccctacagtcactgtcctgcagctgagccatcagaacaagtgactttgccctttgagcctcggtcacctggcctgcctcatggggcmttgagagttacaagaaaggagccccgtggcctggcatgtgccgcactcacatgccgtctgtgccagccttcccgcaggttcagggagtggtacctggggc

SEQ ID NO: 438126 - DNA, 201 bp, Homo sapiens
cttccaagtccctgaccttctggccaaatcactggctatagcccatgaatcagtatataattgcacatctggccatttctccttccaagcaaagtgcacarccaggtacattgcccagtgttttgcccattgagaagatttcccttcaccactgtcattcagggacatcccagaaaggggctatagtgctgcagctgtcca

SEQ ID NO: 438127 - DNA, 201 bp, Homo sapiens
caaaatgaaggtaagtccatcttaaccttggggtggcgggtggggtgaccaacttaccttgctttgcccaggaccatccctgttttaaaactaaaatcccycatcccagcaaacccctcagtccctggctaagtaggtggctggtcaccctatggctgcatggggtgtatgtggtaatgtctacaatgcacccttcatggt

SEQ ID NO: 438128 - DNA, 201 bp, Homo sapiens
tatctattgaagaaaataaataaataattaataatcttctaaaacagaaaggaccaggcacagatgagtcactggtgaattctaccaaatatttaagaaakaaattaaatcaattttctatgatctcttccaaaagatagaagcatagggaacactcattgtatgatgcccatattaccctcaataccaaaaccaaaggca

SEQ ID NO: 438129 - DNA, 201 bp, Homo sapiens
cgggttcacgccattctcctgcctcagcctcctgagtagctgggactacaggtgaccaccaccacgcccggctaattttttttgtatttttagtagagacrgggtttcaccatgttaggatggtcttgatctcctgacctagtgatccgcccacctcggcctcccaaagtgctgggattacaggcgtgagccaccgcgccc

SEQ ID NO: 438130 - DNA, 201 bp, Homo sapiens
ggcatagctggtattgataaactgccgtcttctactacccattctgtattctctttgccttcgataagcacctcactggtcatgattttatgtgtgtatgwatatatgtatgtatgtatgtatgtatgtatgtatgtatgtacacatgtatttattctctgcatcatatgatagtcatggttctttatctggagttaccta

SEQ ID NO: 438131 - DNA, 201 bp, Homo sapiens
gcatagctggtattgataaactgccgtcttctactacccattctgtattctctttgccttcgataagcacctcactggtcatgattttatgtgtgtatgtatatatgtatgtatgtatgtatgtatgtatgtatgtatgtacacatgtatttattctctgcatcatatgatagtcatggttctttatctggagttacctaa

SEQ ID NO: 438132 - DNA, 201 bp, Homo sapiens
atttcccccttgctgttctcatgatagtgagtgagttctcacgagatctgatgatttaaaaggtgacactttccccttctctctctctttcctgccaccaygtgaagaaggttcttgcttccccttcatcttcctccatgattgtaagttttctgaggcttcccagtcaggcttcctgttaagcctgcagaactgttagtc

SEQ ID NO: 438133 - DNA, 201 bp, Homo sapiens
tagctggtattgataaactgccgtcttctactacccattctgtattctctttgccttcgataagcacctcactggtcatgattttatgtgtgtatgtatakatgtatgtatgtatgtatgtatgtatgtatgtatgtacacatgtatttattctctgcatcatatgatagtcatggttctttatctggagttacctaaacc

SEQ ID NO: 438134 - DNA, 201 bp, Homo sapiens
gctggtattgataaactgccgtcttctactacccattctgtattctctttgccttcgataagcacctcactggtcatgattttatgtgtgtatgtatatatgtatgtatgtatgtatgtatgtatgtatgtatgtacacatgtatttattctctgcatcatatgatagtcatggttctttatctggagttacctaaacctt

SEQ ID NO: 438135 - DNA, 201 bp, Homo sapiens
ctggtattgataaactgccgtcttctactacccattctgtattctctttgccttcgataagcacctcactggtcatgattttatgtgtgtatgtatatatgtatgtatgtatgtatgtatgtatgtatgtatgtacacatgtatttattctctgcatcatatgatagtcatggttctttatctggagttacctaaaccttc

SEQ ID NO: 438136 - DNA, 201 bp, Homo sapiens
ctccagacgtataattttgtaacagaaaagagccccagtctgaccgtctcctttacgtgtgatatgacaagaacacacacaaagctcatgtctgcatcatccccccgcccccctttttttttttctttttaggcagagtatcgctctgttgccagggtggagtgcagtggcccaatctcagctcattgcaacctctgcctc

SEQ ID NO: 438137 - DNA, 201 bp, Homo sapiens
tttccccttctctctctctttcctgccaccatgtgaagaaggttcttgcttccccttcatcttcctccatgattgtaagttttctgaggcttcccagtcakgcttcctgttaagcctgcagaactgttagtcaattaaacctcttttcttcataaattacccagtctcaggtagttttttacagtagtgtgaaaactgatg

SEQ ID NO: 438138 - DNA, 201 bp, Homo sapiens
ctggcccatcccctttatcctcatgacgaccctgcaaaggcaccaggatgtcttcacggcccctgccctctccacgtcccgagcccagcaacagcactgtrtggagtgaatggaggattccctttgtcactccaggcttgccctttccatttacgttcttatcataagatgtccagtaaaaagagacggtgaaagaaatgg

SEQ ID NO: 438139 - DNA, 201 bp, Homo sapiens
acaatataagccattgtgtttcatttttgccttgtcagctaggaagcttaaaacagaacttaacgcacaatcacaatcacttcttatctccagggaaaggragctggcatttatactatggtctgctcatgcaaagtgctgccacaacatatttttaaacttaatgctcacaactacccagttattattattctgacttca

SEQ ID NO: 438140 - DNA, 201 bp, Homo sapiens
ctttgggttctgacaggtgttggtccaggcctcagctgcacctcttgccatcagagcagcctgggcagttacctcaactctctgagccatgggttttctayttacaaaatgaaggtaagtccatcttaaccttggggtggcgggtggggtgaccaacttaccttgctttgcccaggaccatccctgttttaaaactaaaat

SEQ ID NO: 438141 - DNA, 201 bp, Homo sapiens
tgtccggagggctccacacacctgctgagggggatggacactggcctcaggggtagggggtcccagaggcagaaaaccacactgaccccagatgcagcatmtgacctctttgagcttccacttcctcatggatgaaatgaggataaacatgcctgtcctctctttagggttgccctgaggcttagtgaagatctggtagat

SEQ ID NO: 438142 - DNA, 201 bp, Homo sapiens
gtccggagggctccacacacctgctgagggggatggacactggcctcaggggtagggggtcccagaggcagaaaaccacactgaccccagatgcagcatckgacctctttgagcttccacttcctcatggatgaaatgaggataaacatgcctgtcctctctttagggttgccctgaggcttagtgaagatctggtagatc

SEQ ID NO: 438143 - DNA, 201 bp, Homo sapiens
aataatgatgtacttattaaggaattggactgaattttagaagtcaagtgcaagatcttcaaagggttctgagaaattaggaaaaaagatgcttaaaaccraaatgccttcataccatgtcagtgggagaataaaaggttcacggcacggtccctgtccttcatggagacagcttcttccgtggggtccagggaactccct

SEQ ID NO: 438144 - DNA, 201 bp, Homo sapiens
ttcttaaggacggctagaaacacattatgaaaatatattcctagaagtttaaatttgataaaagcaaaggaggccgggtatggtggctcatgcctgtaatyccagcactttgggaggccaaggtgggcggatcacctgaggtcaggagtttgagaccagcctggccaacatggtgaaaccacaatctctaccaaaaattca

SEQ ID NO: 438145 - DNA, 201 bp, Homo sapiens
tatgattccagtaacgatccttctctttgatcccaccgctgacatttacccaagaagagttccccattcagaatcaacaacgtcttataatgatgcaatgragaacatagacaacaaaattaacttggtaggtggcaaacgaaggcatccctcttctctagcttaatcaatcattacttttatttaacattccttatcaag

SEQ ID NO: 438146 - DNA, 201 bp, Homo sapiens
aggccaaggtgggcggatcacctgaggtcaggagtttgagaccagcctggccaacatggtgaaaccacaatctctaccaaaaattcaaaaactagctgggygcggtggtgggctcctgtaatcccagctactctggaggctgaggcaggagaattgctggaacccgggaggcagaagttgcagtgagccaagatcatgcca

SEQ ID NO: 438147 - DNA, 201 bp, Homo sapiens
ctgggcgacaaatgaccatgagcatggagagacttaccggatggcagagagcaggacggttggcctgactttgcccttgaagtgtttgtttgtttgccacmaaacgctttatctcttacagagcaagcctttgtatcttttggcataaactttatctgaaaataattttctgattttaatcatttttttcaaaagaattaa

SEQ ID NO: 438148 - DNA, 201 bp, Homo sapiens
tcagagtttgatataataaaacaggagttttgtaggaggttcgtaggcatcatttcatcggtggctctactgtgtaatccacggctcagcagatatttatygaatgcccactgtgtaggtgcttcaggatacatgaaaaaacgcaacagatgagttaccaatggtgtgaggggaaggtctgtacctggggacaggtaatga

SEQ ID NO: 438149 - DNA, 201 bp, Homo sapiens
agtatcgaccagccaacaccccttgtataggattctgaggctatcagggattgtagatttcatatagttaatcctccatcccataatatgattccagtaaygatccttctctttgatcccaccgctgacatttacccaagaagagttccccattcagaatcaacaacgtcttataatgatgcaatggagaacatagacaac

SEQ ID NO: 438150 - DNA, 201 bp, Homo sapiens
taagggaaacattcaaattacttctgagatgaacagaactggccaatctttccaaactcggacaaaaggaaaatgccttttacacacaaccttggcttaargcgccacaagcattcgagtgggcagaatgtaggttgctgagtggcttgtgtagcatgcgtatctccaagctagtcttttaaacgagtagcaaccttgaag

SEQ ID NO: 438151 - DNA, 201 bp, Homo sapiens
cagttagtcaagggcgaaaaaaaaaaaatggaactaagaacttcattaattcttaaggacggctagaaacacattatgaaaatatattcctagaagtttamatttgataaaagcaaaggaggccgggtatggtggctcatgcctgtaatcccagcactttgggaggccaaggtgggcggatcacctgaggtcaggagtttg

SEQ ID NO: 438152 - DNA, 201 bp, Homo sapiens
tccacggcatcatggtaatgatccagtgagagaatgttgggtggacgagcttggaaatagaggagggtaaagcccaggtaaggacagaaaggctgctcttygcaccgtggggttggccgtgggtggggccacatgtagcactgccttgctacctaataatcacatttatgaggacaaatggtccttgaggcacgtgctaga

SEQ ID NO: 438153 - DNA, 201 bp, Homo sapiens
aattacttctgagatgaacagaactggccaatctttccaaactcggacaaaaggaaaatgccttttacacacaaccttggcttaaggcgccacaagcattygagtgggcagaatgtaggttgctgagtggcttgtgtagcatgcgtatctccaagctagtcttttaaacgagtagcaaccttgaagaattttttggaagtg

SEQ ID NO: 438154 - DNA, 201 bp, Homo sapiens
cgtataattttgtaacagaaaagagccccagtctgaccgtctcctttacgtgtgatatgacaagaacacacacaaagctcatgtctgcatcatccccccgcccccctttttttttttctttttaggcagagtatcgctctgttgccagggtggagtgcagtggcccaatctcagctcattgcaacctctgcctcccaagtt

SEQ ID NO: 438155 - DNA, 201 bp, Homo sapiens
gtatccctcctggtgcctagctgttccccgcccgccccttccatctttatgtgtcttcacgtctctacaacaacacagtacagtaggactctggattaacrttaaggatatttgctgccatttcagctgccctatgaggtggggaggtatgatccacattttacagatgacgaaggcaggtgcagaccctccccaaagaca

SEQ ID NO: 438156 - DNA, 201 bp, Homo sapiens
cccagcagtctaaggcggggcccacccttgtgaagaagtgaagaaggctgtgcctgccagcatcagttcattctcaagttccaggccaccccaggggcctmctgggggccctccttccctgtcctgttgcatcttgctggagagaagagcccaggccactgtgggtctttaccgtttcctctcccacccccaccctgcccc

SEQ ID NO: 438157 - DNA, 201 bp, Homo sapiens
tctgttttacaagtccattgatggcctaagttcctcctgttttctgctgtttgatctctaaggaactcctgttgctaaatatgaagagtatggaacattcrtatagtctctgtgaagcatggggggagggaagacatttctttttcttataggctttatgctcaaatgtcatagtctcctttcaaagaattgtgttgcatt

SEQ ID NO: 438158 - DNA, 201 bp, Homo sapiens
ttcggggatacattgttgggggagaggggtttctgccactctttccagattgagtctgtgctgtttaaggaggactaccatcctgcaactctttttctaaytggggcacagaggatgtcgctaaagaaaagttgaagagccctttcagcactttctcatctgtggagaagatggaatcttaaaatacatttggagttttat

SEQ ID NO: 438159 - DNA, 201 bp, Homo sapiens; identical to SEQ ID NO: 159330

SEQ ID NO: 438160 - DNA, 201 bp, Homo sapiens; identical to SEQ ID NO: 159331

SEQ ID NO: 438161 - DNA, 201 bp, Homo sapiens
gctaatagattccttgaatattctcttttaatgtaaatagtacttttttgacgtctttaaggatagttttaaagtttacttgtggctttttgtaacatacyttctctagccttatttacagttgtgccattttagattgctaagtactggtggaatttaccccactacctatcacaaattgtaaactaataaaagtccaaa

SEQ ID NO: 438162 - DNA, 201 bp, Homo sapiens
cttgaagcttatactttataagggaagaaagaattcaggtgatatgggaaaactgcttggcagaccttcatcttctgcctcaactgtaaaccacatgtaartgcttaatggagactgttttcattcttgtgatatttaacattcagaaaattacttcagctttggaaatactcaggctgtttttattctgcaggtaagtgt

SEQ ID NO: 438163 - DNA, 201 bp, Homo sapiens
atatgaagcattataaaaaatgcaaacacttattaaaaccttactgatcatttatgtttttataagtagttagaaatccatctgtttgcatttacactgcyattctgaatacatgctaacggacataaagattcagaataggcatgtaaagaccactctgtattctcctgtgcctgaaaattgagcttaaaataattattc

SEQ ID NO: 438164 - DNA, 201 bp, Homo sapiens
aaagaagagaggactttacttggaaagatcagccagtagaacaacagaggaccctttccagtttttactacctcacactgtcaaacagatgaccttaaaawcagtttttgtctgagctctaggtcatttcattggacttaattttccttttaatagcaagtcgtttcagagtgttttaggtatccactttctctaaggaag

SEQ ID NO: 438165 - DNA, 201 bp, Homo sapiens
gtctccttgtgtgggcttcattgttcacttgaagtatttttttcacattgcattcctttgaggccttttgccccttccatgtaatgagagcaaaagcaccygagaaactacataacctttacatttatttgttttggtaaaatattttggcttttactactaacatttagtttgctaaatcagtctttcaagataatactt

SEQ ID NO: 438166 - DNA, 201 bp, Homo sapiens
tgtccttcacttcagtgtctagaggttctattgggacttcatgatgtaggcttgattgattgaacactgactaattgattgaactaaatttttagccccastttcctcctaagagattgggctgggccaaaggtccgcaatcacacaattagtctttctggtgactagctgctatcctgagtcatcttgttaactaacata

SEQ ID NO: 438167 - DNA, 201 bp, Homo sapiens
tgctgataaatacatttattccactctaactatgtgttaacactgtgctgagtattttctgctcattacttaattcaggcagcagcatatctccctattayagaccagaatacaggaatatcgagcacttaagtaacttagctgactttacacaggtaataataaagagttgaggttcataaccaggctgttgactccaaa

SEQ ID NO: 438168 - DNA, 201 bp, Homo sapiens
gcttttatgccctctccctgtatacttagagcacattaccctcccagcacattagtggattcaccaaccagaaagctgtccttcacttcagtgtctagagkttctattgggacttcatgatgtaggcttgattgattgaacactgactaattgattgaactaaatttttagccccagtttcctcctaagagattgggctgg

SEQ ID NO: 438169 - DNA, 201 bp, Homo sapiens
ttattagctatattgttccatattaataagttcacattcagtgctgataaatacatttattccactctaactatgtgttaacactgtgctgagtattttcygctcattacttaattcaggcagcagcatatctccctattatagaccagaatacaggaatatcgagcacttaagtaacttagctgactttacacaggtaat

SEQ ID NO: 438170 - DNA, 201 bp, Homo sapiens
gggatatagagtacagaggttttttagggcagagagactattccgtatgataacataatggtggatactcattatacgtttgtcaaaacccatagaatatrcaccaagtgtgaaccctagtgtgaactgtgggctttgggtgatggtgatgtgtcagtgtaggttcgtcgattatagcaaatgtaccactgtggtgtgaga

SEQ ID NO: 438171 - DNA, 201 bp, Homo sapiens
gcagcaaagcttcttttgaataaacccctatttattatccaaatttattcgtttctccgccactttaatttcacaatgtaatattttgtctccttatcccytccccactccttttaaggtacaacaaagcctgtgaactggcttaaaccagtttacatgctggattctgacccagataataatggattcataaatgaggat

SEQ ID NO: 438172 - DNA, 201 bp, Homo sapiens
ataggaggttatactggaatttgacaaaaccaagttttgttaagcaaatgtatgacttttaaaaagccactaaatgttacaccttaccaaggagtactacrgtgtcttaatcagctgggtgataccttccattggttgggttaaacaaccaatgtttatttcttgtagttctggaggctgggaagtccaaggtcaaggtac

SEQ ID NO: 438173 - DNA, 201 bp, Homo sapiens
caggtctaatgaaagattacataggctttgcctctcttcgtttgggagacctgtgttttcagtttgttttagttatgtgactagctcttctttaattatgyagtgaaagaaaagtttctctaaacaatttcatcagtaaacaaataagctttgatgaaaactgtttctataggaggttatactggaatttgacaaaaccaa

SEQ ID NO: 438174 - DNA, 201 bp, Homo sapiens
gatgaagatgttatagctatctttcattttgttcatgtgtaatttaatattcagtgattactcttggttccaataaaatgttatattgttatattttataytgtagcataatttattagatttcaaattccatcagattatttttgttcagttaaaaaaagaatatgatttctcttgcagattttgcccctagaaactaat

SEQ ID NO: 438175 - DNA, 201 bp, Homo sapiens
ggatgtgacaccttgcttttgtaccattaacttcacactggaaaagtcatttgaggtctgtgtttccaagtaatgtgctagaaaagccatgctttaaaaawtactgatactgtactaaatgtcttttacaaggtattttccttttatagagaagtctgtataatttactggagtttataggcttttgaggaagatcgtttt

SEQ ID NO: 438176 - DNA, 201 bp, Homo sapiens
tatttttttttattttttattttattttatttttttgagacagagtctcactctattgcccagactggagtgcagtggcgcgacctcggctcactgcagcytccacctcctgggttcaagtgattctcctgcctcagtctcccgagtatctgggattacaggtgcgcatcaccaagcccggctaatttttgtatttttagt

SEQ ID NO: 438177 - DNA, 201 bp, Homo sapiens
tttttgtatttttagtagagacggggtttcgccacgctggccagactggtctcaaattctggacttcaggtgatctgccctcctcggccttccaaagtgckgggattacaggcttgagccaccgtgtccggccctaagtattttatgttactgttgccaatgcagcaaacattcagaggcccagagcaatttaggatttct

SEQ ID NO: 438178 - DNA, 201 bp, Homo sapiens
aaatagctttgtttttttttgttgttgttgtttgttgttttttttttgagacggagtctcaccactctgtcgcccaggctggagtgcagtggtgcgatctyggctcactgcaacttctgcctccccggttcaagcaattctgtgcctcagcctcctgagtagctgggattataggcccccaccaccatgcccggctaattt

SEQ ID NO: 438179 - DNA, 201 bp, Homo sapiens
attgaaaaggagctatagttgatcatttagagcagcactatctgatagaaatataatgtgagctataaatacaagtcctgtaggtaattttacattttctktctttttttttttttcctttttctttttttgagatggagcgtcattctgtcgcccaggctggagtgcagtggcgcgacgtcggctcactgcaacctctgc

SEQ ID NO: 438180 - DNA, 201 bp, Homo sapiens
aggagctatagttgatcatttagagcagcactatctgatagaaatataatgtgagctataaatacaagtcctgtaggtaattttacattttctgtcttttyttttttttcctttttctttttttgagatggagcgtcattctgtcgcccaggctggagtgcagtggcgcgacgtcggctcactgcaacctctgctccctgg

SEQ ID NO: 438181 - DNA, 201 bp, Homo sapiens
tataatgtgagctataaatacaagtcctgtaggtaattttacattttctgtctttttttttttttcctttttctttttttgagatggagcgtcattctgtygcccaggctggagtgcagtggcgcgacgtcggctcactgcaacctctgctccctgggttcaagcatttctcttgcctcagcttcccctgtaactgggatt

SEQ ID NO: 438182 - DNA, 201 bp, Homo sapiens
gctgtttaaggaggactaccatcctgcaactctttttctaattggggcacagaggatgtcgctaaagaaaagttgaagagccctttcagcactttctcatytgtggagaagatggaatcttaaaatacatttggagttttatctgttttacaagtccattgatggcctaagttcctcctgttttctgctgtttgatctcta

SEQ ID NO: 438183 - DNA, 201 bp, Homo sapiens
aaaaatttttatgtatgtttttactcctaaattgaattattagattataagatttttaaggagattaaatttctcatctgtatttagcaatctttgttatrcttaggctttagctaagagtcagggaagaataagttgctttgtataaattatcgttaaagattaggcacttttatgttaaaaagtttaaggttttaatat

SEQ ID NO: 438184 - DNA, 201 bp, Homo sapiens
aatgactaacattttttgagagtatactctgctaagagttttacatacatcatgttagttgatacagtgacacttaacaagggtaacattattctctccattttttttttttttttttttggatgaggacattgaatctgagattaagtcttctgcttagtcacaaaggtgggattcatactttagccatctgacctcttg

SEQ ID NO: 438185 - DNA, 201 bp, Homo sapiens
tgaaccatattgatatgtgagggaagaatgttccaggcagaagaaatagtaagagcataggtcctgaggaatgtgcttagttaggtgtttgaggaacaacaagaggccaatatggctgaagtagagggggaagaatggtagaagatgagggtattgggaagtattaggaggaatatcacatgaagcactataagaactttg

SEQ ID NO: 438186 - DNA, 201 bp, Homo sapiens
cgggagggtcccagctcagacagacccctaacctcagacttgatatgatctctagttgaatcccataactgccacacctctttaagatcctcagtagggastaagtcaaaaccaaaatctggaccacaggcaaatgttctgccttgtcagcatttttgtttttcttgtacctggatgcacagtttaaagattgatatattc

SEQ ID NO: 438187 - DNA, 201 bp, Homo sapiens
gtgaggaggagcagctgagagatagggtcagtgaatgcggttcagcctgctacctctcctgtcttcatagaaccattgccttagaattattgtatgacacrttttttgttggttaagctgtaaggttttgttctttgtgaacatgggtattttgaggggagggtggagggagtagggaagtggtccttttacaagaatttt

SEQ ID NO: 438188 - DNA, 201 bp, Homo sapiens
ataaaaatgaacaaaattaattttgctatgttcaggtgtcttgataaaataacaatgctccagtgttgttgcttacatttagcactaaattttaacacagsgtcagtgagtccaggttttaacttcttcatgcctggatgggataaaatgtaattcattgttaaattaattcatatttgtatttattaatcactgtgacaa

SEQ ID NO: 438189 - DNA, 201 bp, Homo sapiens
gtgtttccaagtaatgtgctagaaaagccatgctttaaaaaatactgatactgtactaaatgtcttttacaaggtattttccttttatagagaagtctgtrtaatttactggagtttataggcttttgaggaagatcgttttgtgtgtttggctgttggattttgctgtctggtaattaaatacatttatttgaatggttt

SEQ ID NO: 438190 - DNA, 201 bp, Homo sapiens
agattctaaagcagctcctcctatcctttttccattaaatactcacatagcctcttcataacacttactgtaatttgtaattacatatttgcttatctgtyatctttctttccagctatactgtaagctcatgaaggcagggagcatgactttctttaatcactgtttaccaagtgcctggctcgtgcttgcacatggaag

SEQ ID NO: 438191 - DNA, 201 bp, Homo sapiens
atgggacgtacagagagtcaggtttggagacaagtgggaagtaagggagttttgaaagtataaacagtctgatccagatgccacagctgctgttgaatttmtcttgctagactactactgtgactgctcatttaatcacatccactctttgtttcccaggattcactggtctatgtgggagtgtctgattgctgagtctag

SEQ ID NO: 438192 - DNA, 201 bp, Homo sapiens
tgttccaagtcactaccactttttgcttggatgaacaaattgtgtctcacatcatccaatcctgctcctttccaggccattctcatagcagctatagtgargtttttaaaaagtataaatatcacttccctacctaaaatctttcagtggtcatattagcacttgtagtaaaatctcaggatgatctgagctatgcgtaat

SEQ ID NO: 438193 - DNA, 201 bp, Homo sapiens
aggcaaaacaaatttgcctattgaagagtaatctagagagtgctgaaaatttaacaaacaggttatttggcaaatgctgcagcaaagagagacaaatatcraaactatatcatgttccaagcccccagtcagggatgtagtctctctttgtactctctccctgtagataacatctactcggcagctttcatggagaaattt

SEQ ID NO: 438194 - DNA, 201 bp, Homo sapiens
ctgctcattttgccagttagcattttatttgcttagaatgtcatttttactgtttccctggaggtcttctcatctcaaggcctgctattttttctaagtgyccttccatgcaaaaatgtgcttctttacatatttacttcatttatttttttgttccaagtcactaccactttttgcttggatgaacaaattgtgtctcac

SEQ ID NO: 438195 - DNA, 201 bp, Homo sapiens
caggccacaccaggaatagatcaactttttctgtaaagggtcagatattatgtgtaaggccctgtacaatctggcatcagccttattatcttatatactayttttaatacattaaacaaggcctggctgccctgggccttgtttgctgctccctaaccatgcattgtgacacaagtaatctgctcattttgccagttagca

SEQ ID NO: 438196 - DNA, 201 bp, Homo sapiens
cttatgctctagtcatggcaaactactatagtttctggaatgtgacatgctaatagtttacctgaaatgaccttccttttcttattctatcacattttcamatgcagttcctattaacatggaaagtcttccttgattctcctttttccacctggtatatatgcttctctcagtttccagaagtactagcttacagcctgc

SEQ ID NO: 438197 - DNA, 201 bp, Homo sapiens
gaatatatttatgaaagtagagctaaaagaattttctcatgcaattgatatatggggtgtaagagaaaagtgaagaatcaaagatgactaagatattttgrtttgtagctggaaggatggagttgtcatttttcaagatggggaagattgtaggaaaatgaggttttaagtatgctagtaagaggatgtggtgggggaagc

SEQ ID NO: 438198 - DNA, 201 bp, Homo sapiens
agcaacggctgccagcttggcagcccatccttacggctggcacggtgctacctattttcttcatcatcggtctcatcttcattcccatcggcattggcatytttgtcacctccaacaacatccgcgagatcgaggtgaggggagggagctgtggtgggagttggcgttgctcgggaggagggtcctacgcgcccactccac

SEQ ID NO: 438199 - DNA, 201 bp, Homo sapiens
ttcatatagtctctgtgaagcatggggggagggaagacatttctttttcttataggctttatgctcaaatgtcatagtctcctttcaaagaattgtgttgyattttaaatgcacccagcttaagtagaagacattgaaggatgcattaattttcaggaactattttgaattatgaaaagattcccaattgaaaaaattatt

SEQ ID NO: 438200 - DNA, 201 bp, Homo sapiens
tcagtttcttggaaaatttccgtaatctctctgagcttcagtttcctgcaaaataggtagaatcattcatatcttctaaggtgtgagaattagaagcaatrtaaataagatgtctggcactagggatctgtctcctgatccttaatcaggagaagagaaatagagaggttgagatttgacagtaaactagttgagagtatt

SEQ ID NO: 438201 - DNA, 201 bp, Homo sapiens
agtctcgatctgtcacccaggctggagtgcagtggcacgatcttggcttactgcaagctccgcctcccaggttcatgccgttctcctgcctcagcctcctsagtagctgggactacaggcgcccgccaccaggcctggctaattttttgtatttttagtagagacggggtttcaccgtggtctcgatctcctgacctcatg

SEQ ID NO: 438202 - DNA, 201 bp, Homo sapiens
tgatgtgtgttagataatcagtgccatgaagaaaagtcagcatagagacagaggacctctcagaaacgcagtctttactttctgcagaaagggcgctcctygaagatggaacaatggtgagagcacacttgaacaaaggaaaagcaacatatttatcccttatgcatttgggtcatccttactgtcgtatcctgcatccat

SEQ ID NO: 438203 - DNA, 201 bp, Homo sapiens
tctttactttctgcagaaagggcgctcctcgaagatggaacaatggtgagagcacacttgaacaaaggaaaagcaacatatttatcccttatgcatttggrtcatccttactgtcgtatcctgcatccattggctggagctggacctcacagttttaaactgatacccgatttgctaataacctaaaactttcctaaatag

SEQ ID NO: 438204 - DNA, 201 bp, Homo sapiens
ttggtagcctcttttgtttctaaagataggaactatgtgctttagtgtgaactttattttttgaataaagttgttacaacccatggtaacaactttattcmaaaaataaaggattgttaggcccataaggttttattaaggtctggacattatgtctggctacccttgaattttagctgataaagggtgttgtggttttat

SEQ ID NO: 438205 - DNA, 201 bp, Homo sapiens
tggtgcactcctgtagtcccagctacttggaaggctgaggcaggagaatcacttgaacccaggaggcggaggttgcagtgagccgagattgtgccactgcrctctgcctggtgatagagtgagactccgtctcaaaaaaaaaagaaaaagcaaacatactcttactctatgatccagcaattgcataccttgtatttagcc

SEQ ID NO: 438206 - DNA, 201 bp, Homo sapiens
atgctttgaaaaacacaatttttctttcctcagcttcataccaagttaggtaaatgttctaatgtactaaaattctaaaggaaatgtatacttttaattaygaattcagtttctgtgatgtcttataagcatttcagctataatattttaaaattgcagcaaagcttcttttgaataaacccctatttattatccaaattt

SEQ ID NO: 438207 - DNA, 201 bp, Homo sapiens
tgttgcagagggaaaactaaatgaacccatgcaaatatttgcaggggaggaggacaggaattataaaggctttctgttttgattgtttttcgccaccagakcaagaaagctttctgctcagccatggctacgagtccacgccttaatgcaccccacagccagcggcagtggcagtgacaacagcgggacctgcctttgaag

SEQ ID NO: 438208 - DNA, 201 bp, Homo sapiens
atcatgggctaaccattttgaccaggattttgtttcaaaaaggaactaggtgatatgaatgagcatgtctagcatgctttgcttgcaagggacttctaacttctaactgatatcgacagtccttcccaagcctcctaaaatatctgggcttctctgctgtcagaagctttatagcaattacttagctgtctgctcccccac

SEQ ID NO: 438209 - DNA, 201 bp, Homo sapiens
catgggctaaccattttgaccaggattttgtttcaaaaaggaactaggtgatatgaatgagcatgtctagcatgctttgcttgcaagggacttctaacttstaactgatatcgacagtccttcccaagcctcctaaaatatctgggcttctctgctgtcagaagctttatagcaattacttagctgtctgctcccccacca

SEQ ID NO: 438210 - DNA, 201 bp, Homo sapiens
tgggctaaccattttgaccaggattttgtttcaaaaaggaactaggtgatatgaatgagcatgtctagcatgctttgcttgcaagggacttctaacttctwactgatatcgacagtccttcccaagcctcctaaaatatctgggcttctctgctgtcagaagctttatagcaattacttagctgtctgctcccccaccagc

SEQ ID NO: 438211 - DNA, 201 bp, Homo sapiens
gggctaaccattttgaccaggattttgtttcaaaaaggaactaggtgatatgaatgagcatgtctagcatgctttgcttgcaagggacttctaacttctaactgatatcgacagtccttcccaagcctcctaaaatatctgggcttctctgctgtcagaagctttatagcaattacttagctgtctgctcccccaccagct

SEQ ID NO: 438212 - DNA, 201 bp, Homo sapiens
aggtgcacatgtcccctggggatcctgatgaaatgcagaatctcattcaggaggcctggggcacagacagcctgcgtttctaggtccccagggatcccccrttgattcttacaggtcccagggaccggggcgcaatgggctttggacaaacccatccccacctccaagctcgtggcaggacagataaccagaaaatgttaa

SEQ ID NO: 438213 - DNA, 201 bp, Homo sapiens
gctaaccattttgaccaggattttgtttcaaaaaggaactaggtgatatgaatgagcatgtctagcatgctttgcttgcaagggacttctaacttctaactgatatcgacagtccttcccaagcctcctaaaatatctgggcttctctgctgtcagaagctttatagcaattacttagctgtctgctcccccaccagcttc

SEQ ID NO: 438214 - DNA, 201 bp, Homo sapiens
catcaagatgggatggggggagctgtgccttcccactgaccacacctgatgggtttggctggatagatggactacaaaaaggaatgttgcagagggaaaastaaatgaacccatgcaaatatttgcaggggaggaggacaggaattataaaggctttctgttttgattgtttttcgccaccagagcaagaaagctttctgc

SEQ ID NO: 438215 - DNA, 201 bp, Homo sapiens
gcaccagcagcagtcagctcgcctgcggtgcaagaggaatggttggaaagctttgatgggcgtagagtttgccagctgacagagcagctgtcaatgagatrctgggcatgggctgcaggacgcgcattactttgacaaacatgtcattagatgttcattcttctgagtatgtctgacaccagccagagtggaaaaaccagt

SEQ ID NO: 438216 - DNA, 201 bp, Homo sapiens
ctgtcccctgtttagcattaagaaaattatgttacatgttaatgaattacaataataaccaaatcctcataaggaatctggtgagaagctactaatttatrcccatactcagagttttaaggtcccacaggtggtaccagcagaactgagcctgtgagccccagccctggagctcactaacagaagttattaattccaggg

SEQ ID NO: 438217 - DNA, 201 bp, Homo sapiens
tcactgtgtactgttcaaggagcttgaagtagggacaggacagggaagtgacaccctgggaacccctgagaatgagggaggtgtttgtgcagtgacctaayacagagaacacagagttgaagaggagaggaagatagcctgaaacaccccagaaagttctgtcccctgtttagcattaagaaaattatgttacatgttaat

SEQ ID NO: 438218 - DNA, 201 bp, Homo sapiens
aagatcggctgctgcaagggttgatggctggcatgtcgcaaagaccccccagcatgtactggtgtgtggggccggaggagtcagctgtgtgtccagaacgygccatggagacgcttaacggtaaggacagggctgtgcttatgcctgcctgggtgtgacctgccatgctcatcctgcagggtgtctaggctatgtaagaac

SEQ ID NO: 438219 - DNA, 201 bp, Homo sapiens
ctgcagggtgtctaggctatgtaagaacaaggagttctcaaccagtggaaatcaaatgtccatcatttggtgctctttcatcatataatatatcttgggastcttaaattctaaaaattgaggaacagtgtacaaaatttattgtggactcacagatcttaacaattgggacatcacttcatgctgggttaaagaactttt

SEQ ID NO: 438220 - DNA, 201 bp, Homo sapiens
cagtcctgtacattgtaggatgtttagcagcatcattgacctctacccattagaggcctgtagcactctcccccagccaagttgtggcaaccaaaaatgtytccagacattgccaaatgtcccctgggaaaggggcagaatttttgaggctcatgtctgctaacctccgtcatttagctttctgctaaagctcatgctaac

SEQ ID NO: 438221 - DNA, 201 bp, Homo sapiens
cgtgactaaccttaactatgtctgccctacccccactggagtgtgcccctgagggcaagagcctccttgagccatcttggtgccactgagcctcacacagrgcctggctaccttgcatgtgacagtaggtgtgcgttgactgaacaatgattgaagctgttaccagtatgtgttttccaattgtctggggtttgtttgaga

SEQ ID NO: 438222 - DNA, 201 bp, Homo sapiens
gcagagtcttccactggtaaagtgattttcaaaaggaaactgaaaatgaaaaggggaacaaaatgtgctgggtgagggttagcctgaaataattttaagattttttttttttagaacttaaaaacattgtatggtaagacacttctgttttcaggaagaatgtctagcgtttggatttttgaaatgctgttggttatgtgc

SEQ ID NO: 438223 - DNA, 201 bp, Homo sapiens
tccaattgtctggggtttgtttgagactcttctcaggtagacaatacctgagccccgcatcaagatgggatggggggagctgtgccttcccactgaccacmcctgatgggtttggctggatagatggactacaaaaaggaatgttgcagagggaaaactaaatgaacccatgcaaatatttgcaggggaggaggacaggaa

SEQ ID NO: 438224 - DNA, 201 bp, Homo sapiens
aaatatttgcaggggaggaggacaggaattataaaggctttctgttttgattgtttttcgccaccagagcaagaaagctttctgctcagccatggctacgmgtccacgccttaatgcaccccacagccagcggcagtggcagtgacaacagcgggacctgcctttgaagatcggctgctgcaagggttgatggctggcatg

SEQ ID NO: 438225 - DNA, 201 bp, Homo sapiens; identical to SEQ ID NO: 270772

SEQ ID NO: 438226 - DNA, 201 bp, Homo sapiens; identical to SEQ ID NO: 270808

SEQ ID NO: 438227 - DNA, 201 bp, Homo sapiens; identical to SEQ ID NO: 270812

SEQ ID NO: 438228 - DNA, 201 bp, Homo sapiens; identical to SEQ ID NO: 270813

SEQ ID NO: 438229 - DNA, 201 bp, Homo sapiens; identical to SEQ ID NO: 270774

SEQ ID NO: 438230 - DNA, 201 bp, Homo sapiens; identical to SEQ ID NO: 270814

SEQ ID NO: 438231 - DNA, 201 bp, Homo sapiens; identical to SEQ ID NO: 270815

SEQ ID NO: 438232 - DNA, 201 bp, Homo sapiens; identical to SEQ ID NO: 270817

SEQ ID NO: 438233 - DNA, 201 bp, Homo sapiens; identical to SEQ ID NO: 270818

SEQ ID NO: 438234 - DNA, 201 bp, Homo sapiens; identical to SEQ ID NO: 270775

SEQ ID NO: 438235 - DNA, 201 bp, Homo sapiens; identical to SEQ ID NO: 53647

SEQ ID NO: 438236 - DNA, 201 bp, Homo sapiens; identical to SEQ ID NO: 270778

SEQ ID NO: 438237 - DNA, 201 bp, Homo sapiens; identical to SEQ ID NO: 53648

SEQ ID NO: 438238 - DNA, 201 bp, Homo sapiens; identical to SEQ ID NO: 53650

SEQ ID NO: 438239 - DNA, 201 bp, Homo sapiens; identical to SEQ ID NO: 53651

SEQ ID NO: 438240 - DNA, 201 bp, Homo sapiens; identical to SEQ ID NO: 270780

SEQ ID NO: 438241 - DNA, 201 bp, Homo sapiens; identical to SEQ ID NO: 270782

SEQ ID NO: 438242 - DNA, 201 bp, Homo sapiens; identical to SEQ ID NO: 53655

SEQ ID NO: 438243 - DNA, 201 bp, Homo sapiens; identical to SEQ ID NO: 270783

SEQ ID NO: 438244 - DNA, 201 bp, Homo sapiens; identical to SEQ ID NO: 270825

SEQ ID NO: 438245 - DNA, 201 bp, Homo sapiens; identical to SEQ ID NO: 270827

SEQ ID NO: 438246 - DNA, 201 bp, Homo sapiens; identical to SEQ ID NO: 270826

SEQ ID NO: 438247 - DNA, 201 bp, Homo sapiens
gcataagaatcgcttgaacctgggaggcagaggttgcaattagccgagattgcaccactacactccttcctgttttggcgacacagcgagactctgtctcaaaaaaaaaaaaaaaaaaagtagtctcactttatattcatgatggtcagaaccttaagagagcacttaatactaccagccaatcatattatgtttcttcag

SEQ ID NO: 438248 - DNA, 201 bp, Homo sapiens; identical to SEQ ID NO: 270829

SEQ ID NO: 438249 - DNA, 201 bp, Homo sapiens; identical to SEQ ID NO: 270828

SEQ ID NO: 438250 - DNA, 201 bp, Homo sapiens; identical to SEQ ID NO: 270790

SEQ ID NO: 438251 - DNA, 201 bp, Homo sapiens; identical to SEQ ID NO: 270791

SEQ ID NO: 438252 - DNA, 201 bp, Homo sapiens; identical to SEQ ID NO: 270793

SEQ ID NO: 438253 - DNA, 201 bp, Homo sapiens; identical to SEQ ID NO: 270838

SEQ ID NO: 438254 - DNA, 201 bp, Homo sapiens; identical to SEQ ID NO: 270839

SEQ ID NO: 438255 - DNA, 201 bp, Homo sapiens; identical to SEQ ID NO: 270841

SEQ ID NO: 438256 - DNA, 201 bp, Homo sapiens; identical to SEQ ID NO: 270842

SEQ ID NO: 438257 - DNA, 201 bp, Homo sapiens; identical to SEQ ID NO: 270843

SEQ ID NO: 438258 - DNA, 201 bp, Homo sapiens; identical to SEQ ID NO: 270844

SEQ ID NO: 438259 - DNA, 201 bp, Homo sapiens; identical to SEQ ID NO: 270846

SEQ ID NO: 438260 - DNA, 201 bp, Homo sapiens; identical to SEQ ID NO: 53649

SEQ ID NO: 438261 - DNA, 201 bp, Homo sapiens; identical to SEQ ID NO: 270848

SEQ ID NO: 438262 - DNA, 201 bp, Homo sapiens; identical to SEQ ID NO: 270849

SEQ ID NO: 438263 - DNA, 201 bp, Homo sapiens; identical to SEQ ID NO: 270850

SEQ ID NO: 438264 - DNA, 201 bp, Homo sapiens; identical to SEQ ID NO: 270851

SEQ ID NO: 438265 - DNA, 201 bp, Homo sapiens; identical to SEQ ID NO: 270852

SEQ ID NO: 438266 - DNA, 201 bp, Homo sapiens; identical to SEQ ID NO: 53666

SEQ ID NO: 438267 - DNA, 201 bp, Homo sapiens; identical to SEQ ID NO: 53653

SEQ ID NO: 438268 - DNA, 201 bp, Homo sapiens; identical to SEQ ID NO: 53654

SEQ ID NO: 438269 - DNA, 201 bp, Homo sapiens; identical to SEQ ID NO: 270857

SEQ ID NO: 438270 - DNA, 201 bp, Homo sapiens; identical to SEQ ID NO: 270858

SEQ ID NO: 438271 - DNA, 201 bp, Homo sapiens; identical to SEQ ID NO: 270859

SEQ ID NO: 438272 - DNA, 201 bp, Homo sapiens; identical to SEQ ID NO: 270799

SEQ ID NO: 438273 - DNA, 201 bp, Homo sapiens; identical to SEQ ID NO: 270800

SEQ ID NO: 438274 - DNA, 201 bp, Homo sapiens; identical to SEQ ID NO: 53672

SEQ ID NO: 438275 - DNA, 201 bp, Homo sapiens; identical to SEQ ID NO: 259045

SEQ ID NO: 438276 - DNA, 201 bp, Homo sapiens; identical to SEQ ID NO: 258947

SEQ ID NO: 438277 - DNA, 201 bp, Homo sapiens
cagaagatgcccaaacgatgacactaagtgtggatagactggcccttttgggtagaacacattcagtcagaatcatcatcgaaaccatgggagttcctccrgatagtcctcagatgacccctggcaaaaaaagctatgctggtccaccacctaaggtgactacagcaaaaaagcggtatgtctctaacatgagaaagctaa

SEQ ID NO: 438278 - DNA, 201 bp, Homo sapiens
ttgtgttgggctgcattcaaagccatcctgggccacttgtgggttggacaagcttggtttatcccttcccctgcctcccatcccccatgtttctgcaagtrttaatgcaccatacacaagttgagtgtcctttcttcaaaatgcttagaaccagaagtatttaggatttcgaattttttcagattttggaatatttgcata

SEQ ID NO: 438279 - DNA, 201 bp, Homo sapiens
aaaaacattttttagcaccataactcatactaagtcacctaatatccatgtactaatgataggctacatactgcttatccagtttttcaggggtgttgtckttgttgtggtcgttgctgttgttatttaagacggggtcttgctctgttgcccaagctggaatgcagtggttagatcatgactcactgcagccttgacctc

SEQ ID NO: 438280 - DNA, 201 bp, Homo sapiens
gaattatacccttttttctccctatcagactataaataatacaagagtacagattgtgttagcttagccacctctatatcttccaggacctagcacataayaagtgaccaataaatgtttgttgaatacatgaatgagatcacaatcagtgtcagtagtgtgtttctgaatactggttgttagcatcccagaggaggggta

SEQ ID NO: 438281 - DNA, 201 bp, Homo sapiens
taattaaagatttgtttcctctcttgttccactatcttggagcctgtggaggcctgccaggaacaggactcttaaaggcaaatatgtctagaaggctgctrtcaaagaccatttttgctggctataagcagggtctctggaaccattgggaaccacagctgttcttaaaattgaaggtgtttatgcttcaccagctcttgc

SEQ ID NO: 438282 - DNA, 201 bp, Homo sapiens
cttccttaagccattatagatagatagataatgtgtgtgtgtatatatatatgtgtgtgtgtgtgtgtgtgtgtgtgtgtgtgtgtgtgtgtgtgtgtgtrtatcagcaaatatgtttactccaggggtgtccaatcttttggcttccatgggccacgttggaagaagaattgtcttgggccacacataaaatacactaac

SEQ ID NO: 438283 - DNA, 201 bp, Homo sapiens
aaatgactaaatgatatccagatgcaggacagatgttcatgagggaaaagagggacagggagctattctgtgaaacagaatggaataagaatcaggttttkgttttaagtaattatttatgaagcatttgctttgtgtcaggctctgctgagctcttcgttttattgtctcatttaagctatgactccctcactgtaggta

SEQ ID NO: 438284 - DNA, 201 bp, Homo sapiens
caatcctgtagggaatgggggacattccttacaatcctctagggaatgggggacattccttacaatcctgtagggaatgggggacattccttacaatcctstagggaatgggggacattccttacaatcctctagggaatgggggacattccttacaatcctgtagggaatgggggacattaattaatattaagcagggga

SEQ ID NO: 438285 - DNA, 201 bp, Homo sapiens
aaggatcttctttcaggtatgtatgtatttgtgaactgagtcagactaaactacgtttatgggattgctctgcttgttagccagcctacaaagagaaccargactcttgtttgaactaagtcaaataaaaacaggcagtcttgctagagtccagcatctcacaccatttaaagacagccgtattaaaccaccaaggtattt

SEQ ID NO: 438286 - DNA, 201 bp, Homo sapiens
gtctgatggtaataatcaacaattgcataatactgtgatttgggatgtgttttcatatgcatcatttaatctacagaaatatattgaatccctgctatatmccaagaactgtgtaagtaagtatgggactaaagaaaattaagatacagactctgttcttacatatcttacagttagcaggagagagaaacatttaaatgg

SEQ ID NO: 438287 - DNA, 201 bp, Homo sapiens
aaaaaaaaattttttttttaactaagcaaatgagaaaacaagacagcattttgggaaaatgttgtgcaggaaaggaaaagtaatcagtacttctaattgtwcagctataaatggaatacatgttcatactataattgtagtcagatcaataatcagtgtttactatattggcacattgggaggatggaggaaacaagtgga

SEQ ID NO: 438288 - DNA, 201 bp, Homo sapiens
cagcctcctgagcaactgggaatataagcacatgccacgacactcacctaatttttgtattttttgtggagatgaggtctcattgttgttccccaggctgrtgtcaaacttccatacccaagcaatcctcctgccttggcctcccaaagtgctgggattacaggtgagccaccatgcctggccactttcttcatatctatt

SEQ ID NO: 438289 - DNA, 201 bp, Homo sapiens
caatcctgtagggaatgggggacattccttacaatcctctagggaatgggggacattccttacaatcctctagggaatgggggacattccttacaatcctstagggaatgggggacattaattaatattaagcaggggagtcttaaaattagttaatcaatgctaaagaaaatttctcatatactacctgtctctcttagg

SEQ ID NO: 438290 - DNA, 201 bp, Homo sapiens
ggaaacaagtggatgtgggagagagctaaattcttatctcctgtattaggaagtcaaaaggttatgcctggaaactagaagtcaaagtatagacataatcrtgttatttggagctatagaggtaaataccacaggaatcaggtatagaaattgaaagtggccgcctgtgaggaaagagaaatggtgtctatgtaagggact

SEQ ID NO: 438291 - DNA, 201 bp, Homo sapiens
gtttcaccatgttggccaggctggtcttgaactcctgacctgaggtgatctgcctgcctcagcctcccaaagtgctgggattacaggcatgggccaccgcrcccagcctatttattatttctttagtacaaattcccagaaatggaattactgggccaaagagcataaatatttaaagcttttaatatctgttaccaaatt

SEQ ID NO: 438292 - DNA, 201 bp, Homo sapiens
actccagaagatgcccaaacgatgacactaagtgtggatagactggcccttttgggtagaacacattcagtcagaatcatcatcgaaaccatgggagttcytccagatagtcctcagatgacccctggcaaaaaaagctatgctggtccaccacctaaggtgactacagcaaaaaagcggtatgtctctaacatgagaaag

SEQ ID NO: 438293 - DNA, 201 bp, Homo sapiens
atgtacgaagtgattatgatttagattttttccatctgttagccactcagtgagaaagtatttttccacaccttaggatcagagccttttctaggaatcgrtttaaagaccacattgaagatcacctcctcccttcaactgagaatacattttggagacatgacacaaaagctgataccagagctatacagctgctattag

SEQ ID NO: 438294 - DNA, 201 bp, Homo sapiens
ttgacattatataaaatttaaaatttatttttcagttgcactagtcaataaccatttttaaaagctgccactcaaaggataacttaaaggcaaaaatcttkgtaattttgccttttaaaagttgtattgtggtggtgtggtggctcatgcctgtaatcccagcacttcaggaggccaaagtgggcagatcacttaaggtca

SEQ ID NO: 438295 - DNA, 201 bp, Homo sapiens
ttccttaagccattatagatagatagataatgtgtgtgtgtatatatatatgtgtgtgtgtgtgtgtgtgtgtgtgtgtgtgtgtgtgtgtgtgtgtgtgkatcagcaaatatgtttactccaggggtgtccaatcttttggcttccatgggccacgttggaagaagaattgtcttgggccacacataaaatacactaaca

SEQ ID NO: 438296 - DNA, 201 bp, Homo sapiens
taggattctgagatatgcctcatactcttacatctttcttcctttacgttttattctgttgcagaaaatagcagccatgaaaatgtttggagcatggaackactagagtagaaactgagaaaattatggctacactacgtgatttttacctgtctttgatcagataggattcagttagtaggaatgtgaaagacaaatcgg

SEQ ID NO: 438297 - DNA, 201 bp, Homo sapiens
gtgtggttgttcacacctgtaatcccagcactttgggaggctgaggcaggaggattgcttgagtccgggagttcaagaccagcctgggcaacatagtaatrtctcatctctacaaaaaatacaaaaattagccaagtgtgatgacccatgcttgtggtcccagctacttgggaagttgaggtgggaggatcatttgagccc

SEQ ID NO: 438298 - DNA, 201 bp, Homo sapiens
aattgaacggttgcatccttgcagacaatcaagattgttgcttttatatccttccttaagccattatagatagatagataatgtgtgtgtgtatatatatrtgtgtgtgtgtgtgtgtgtgtgtgtgtgtgtgtgtgtgtgtgtgtgtgtgtatcagcaaatatgtttactccaggggtgtccaatcttttggcttccatg

SEQ ID NO: 438299 - DNA, 201 bp, Homo sapiens
tattctgttgcagaaaatagcagccatgaaaatgtttggagcatggaactactagagtagaaactgagaaaattatggctacactacgtgatttttacctstctttgatcagataggattcagttagtaggaatgtgaaagacaaatcggagtaggaatagtgctggacagtagggattctaattccacaacaagtgaagt

SEQ ID NO: 438300 - DNA, 201 bp, Homo sapiens
tgcagagcaagaccttgtctcagataaaaagaagccagtcacaaacaaatatatatacttttatttcatttagatgaaatgtccaaataggcaaatctatrgaaacagaaaatagattaatagttccttagggctgggagtgatgatgggtagggtagtgatagctgaaggttatggagtttctttttgagatgatgaaaa

SEQ ID NO: 438301 - DNA, 201 bp, Homo sapiens
accagcatgttgttggaccaagttcatcctcctattaatgaagattctcttagagcatcaacacagtaagttacaggatagacagaaccttaacagttcayttcttaatagttgttaacctgtgttttttgtcaagttatggactaggtaatcttggaaatgcttatcaaataattcctgatgtggtgggaaagaagccta

SEQ ID NO: 438302 - DNA, 201 bp, Homo sapiens
aggataaggagaaccgcacttgtgattcagttatctcccccggtccttcccatgacacatggggattatgggaattacaattcaagatgagatttggatgkggacacagccaaaccatatcaagttgttacacagggactatgatatgtcaagtaatttgcctaaagtcatttaccaaccattcagcaactaccatgtggg

SEQ ID NO: 438303 - DNA, 201 bp, Homo sapiens
caatcctgtagggaatgggggacattccttacaatcctgtagggaatgggggacattccttacaatcctgtagggaatgggggacattccttacaatcctstagggaatgggggacattccttacaatcctgtagggaatgggggacattccttacaatcctctagggaatgggggacattccttacaatcctctagggaa

SEQ ID NO: 438304 - DNA, 201 bp, Homo sapiens
aacaaatgctgtaattcagtcattcaaaaaatatgtttagcacatactacacattgttttaggcaccatggggtttacaaaaaatccaaaaaattaataasaatgatcccgaactctaacttcacaaaaaagtttagttattaatagtaggttaaaagcagtaagtgcgattaaaagatataaataatcttggtactgtaa

SEQ ID NO: 438305 - DNA, 201 bp, Homo sapiens
gataggaatttttcaaccttattataatcttatgggaccactgtcgtatatgtggtctgtcattgatggaaatgttgttacctggtgcatgactataaagyaagtagtgagattcctggatcatatggtagttctacttttaatttttgtgaggaaccttcatactgttgaccataatgattgtactaattgacattccca

SEQ ID NO: 438306 - DNA, 201 bp, Homo sapiens
aaaatttaccaatagtacaagataatacatactaaatgctaaatgaatggtttagtgagttagtattacagatgttcagaaatggaaagcatccctctgtrgggaaccagaagccaagatgtcttcatttttgtacaagaaaagtattctgagtgtactatgttacttctttattcaggtcaagctttcacataaatacat

SEQ ID NO: 438307 - DNA, 201 bp, Homo sapiens
acagcacctagtttttttaaaaaatcaaggtataatccacataccataaaattcaccttttttttttttttttttttttttgagatagggtcttactgtgygcccaggctggagtacagtgatgcaatctcaactgacttggcttcgacctcctgggctccagcaatcctcctacctcagcctccctagtagtggggacta

SEQ ID NO: 438308 - DNA, 201 bp, Homo sapiens
gaggtgggagaatcacttaaggccagcagtttgagaccagcctgggaaacagagcaagacccctaaaatatataaaatatatattaaatatatatatatawaaatatataaaataaaattagcttgatgtggtggtgcacaccagtaatcccagctactttggaggctgagacaggaggatcacttgagcccaggagttca

SEQ ID NO: 438309 - DNA, 201 bp, Homo sapiens
aagcaattgcaacaaaagcaaaaattgacaactgggacaattaatctaaagagcttttgcacagcaaaagaaactatcaacagaggcaacctacagaatargagaaaatatttccaagctatacatctgacaaaggtctaatatccagaatctataaggaacttaaagaaatgtacaagcaaaaaataaccccattaaaaa

SEQ ID NO: 438310 - DNA, 201 bp, Homo sapiens
ttttcatgggctttttggctattcttttatcttcttcaggagttcacagactgcaacccccaagccaaatctggctcatcacctatatttgtaaatagttktattaggacgcagccacacccattcatttatatatggtctatgtggcttttatgccaaacagcagagttgagtaatgagaccatatggcatgcaaagcct

SEQ ID NO: 438311 - DNA, 201 bp, Homo sapiens
taataactgtagtctcaactctggggtttacattatactcaaggaaagaggatatagatgtaaaatttaccaatagtacaagataatacatactaaatgcyaaatgaatggtttagtgagttagtattacagatgttcagaaatggaaagcatccctctgtagggaaccagaagccaagatgtcttcatttttgtacaaga

SEQ ID NO: 438312 - DNA, 201 bp, Homo sapiens
acagatgaggaaagaggaaactgagacataaattagttaagtagcttctatgagatcacacagctggtttatggtagaactagaatttcaacctagcaccrtttcgattccaaaatgtgccttaatctgtattgcttcttaaacattattgttgttgttggccacagtgattgatcttctctacatttttctgagaaggat

SEQ ID NO: 438313 - DNA, 201 bp, Homo sapiens
taattgttgaagctggataataagtacctgtagtcgttatttatttttttctaattttatatgttttaaaaagcttagaaatttgttttgttttttttttktttttttttttttttttttttttgagacagggtcttgctctgtagcccagcccaggctggagtgcggtggtgtgatctaagctcactgcaacctctgctt

SEQ ID NO: 438314 - DNA, 201 bp, Homo sapiens
gtctagtagagtttaccagtggagttaactggtttctggatttttccttatggggaaggtttttaactaccactttaatttatatagtagattcagggctrtgtaggtaatctttctttttgagtgagctttggtagtttggttttcaaataattcatccatttcattgaagttgttgaatttattggcacagagttgttt

SEQ ID NO: 438315 - DNA, 201 bp, Homo sapiens
caatcctacaaccctagcactttctgtgaaagcacactgactcgatttctgcaggagattttaattaaatttgaaagggaggcaggtggtatcaaggcatraattgatgatgacttcagttgggtggtgtgacatgtctgtgtgtctggttctccttacagaggtgaagttccagcagcgatttgtgtttccagtacagtt

SEQ ID NO: 438316 - DNA, 201 bp, Homo sapiens
aaagcagggcttggaaaaggtataaatgaaacatgattagccagatgtgaataattgttgaagctggataataagtacctgtagtcgttatttattttttwctaattttatatgttttaaaaagcttagaaatttgttttgttttttttttttttttttttttttttttttttttgagacagggtcttgctctgtagccca

SEQ ID NO: 438317 - DNA, 201 bp, Homo sapiens
gtcagttaaaatggccctgtatttgaccagtctgtgctagtgatctgaggctgggatttgtccttggacaacataaaccaggagacttctttaaactcaasctcaaaaacattttttagcaccataactcatactaagtcacctaatatccatgtactaatgataggctacatactgcttatccagtttttcaggggtgtt

SEQ ID NO: 438318 - DNA, 201 bp, Homo sapiens
attaacaataagaacaataaaaacacaaagcaaatgttagcatgcacctacagtcccagctactcaggaagctgaggcagtagaatcacttgagcccaggrgttcacgttcagcctgggcaacatggcaagacctgatctctaaaaagaaaaaaaaattttttttttaactaagcaaatgagaaaacaagacagcattttg

SEQ ID NO: 438319 - DNA, 201 bp, Homo sapiens
atactgattttatttcctttgaatatacagtcatgcattactaatgatggggatatattttgagaaatgtgtcctcaggcaatttcatccttgtgcgaacrtcagtgtactgacacaagcctaaatggtatagcctactatacacctaggcttagggtatagcctattgctcctagggtacaaacctatatagcatgttac

SEQ ID NO: 438320 - DNA, 201 bp, Homo sapiens
taaggttctggagtcaagtgatcataagctgaagaagaggtcagcaggcaagagaaataggtgagctgctctgactgtttatttaaaggtaaacacaaagraatgttattttcacaagatctcccaaggtgaaatgacccatttgcccagcaccatcagagtgattaattacaataactcagtaaacattgtaattcttaa

SEQ ID NO: 438321 - DNA, 201 bp, Homo sapiens
tgggattctactgtaggaaagagctttgcaaagtgtaaagttttatttaaggcagttaagtctaaagtatgttaaattttctgagtcagaccagctgcatrtacgaagtgattatgatttagattttttccatctgttagccactcagtgagaaagtatttttccacaccttaggatcagagccttttctaggaatcggtt

SEQ ID NO: 438322 - DNA, 201 bp, Homo sapiens
aggactcacactttccaattttaaagcttactacagaacaacactaatcaagtcagtgtgatactggcataaggatagacatataaatcaatggaatagarttgatagtttagaaaaaaacccatctgtctgtggtcaactaatatgagttagacaaggctgtgaagaccaatcaatggggcaacaaatagtattttcaac

SEQ ID NO: 438323 - DNA, 201 bp, Homo sapiens
ctttagattatattttttttttacattttttgagatttcttgtactataggaccagaattctgataataaaagctgtttccaatccttgataacttgtgartcaagatacttggctgggtgtggttgttcacacctgtaatcccagcactttgggaggctgaggcaggaggattgcttgagtccgggagttcaagaccagc

SEQ ID NO: 438324 - DNA, 201 bp, Homo sapiens
tgccttttaaaagttgtattgtggtggtgtggtggctcatgcctgtaatcccagcacttcaggaggccaaagtgggcagatcacttaaggtcaggagttcragaccagcctggacaacatggtgaaaccctgtctctactaaatatacaaaaattagccagatatggtggcacattcctttagtcccagctacttgggaga

SEQ ID NO: 438325 - DNA, 201 bp, Homo sapiens
ttccttacaatcctctagggaatgggggacattccttacaatcctgtagggaatgggggacattaattaatattaagcaggggagtcttaaaattagttartcaatgctaaagaaaatttctcatatactacctgtctctcttaggtctcacttgccctggaacctctgtcagaaacttacgacagctaccatccacttcc

SEQ ID NO: 438326 - DNA, 201 bp, Homo sapiens
gtaagaaggaagtagccagggaaccagaaggttaaaaggaagggcaattggccctccagagaatagaaaggaattaggggctggggtaggggccacagacwggcgattaatgagatgaaggttaccggtaggatgactgtagaggagaagaacaaacaatgatgggattggttttgataacgaagtgaaatgtatgtgtgt

SEQ ID NO: 438327 - DNA, 201 bp, Homo sapiens
aaacagtgctattacctaaaacccagtgaagtatatagatatgtctccttacacatccagtactcatatgattgacattcatttctcatggcaaagcggascaacatagcactgcctgtcttctgtgtactatctccagagttttctctttgtccctgctcattcaatcctacaaccctagcactttctgtgaaagcacac

SEQ ID NO: 438328 - DNA, 201 bp, Homo sapiens
tgctattatataagcatgtaacataatatatacacatatataaatatacacacatatatcttatatacacacatataaggtatatgtgtgtatatatacakatataagatatttatgtatatatacacataaacatacgattattttaagtttgaaattgggaaacaggaatacttaactatagcttttttcttttgaaat

SEQ ID NO: 438329 - DNA, 201 bp, Homo sapiens
gaagactacactaaatttacaaaacaatcttgttctttaataataaattaaccttagcttactttaactttttttactttataaacttttaatttttttttaactttttgacttttgtaataacaattaaaacacaaacacattttacaggtatgcaaaaattttttatatccctattctataagcttttttctattttca

SEQ ID NO: 438330 - DNA, 201 bp, Homo sapiens
ttctcaagccatttttattacacttaaggtattaagacaagtgcaaaataaccttgtaattaggatactgtatcagtcaaaaaaggagaagtcactattgyatgaagagatttacaaatgagtgaaatatataggctgtgccagaattaacatttgaaatgagatggggttgctctttttttctaggctggagagaggtag

SEQ ID NO: 438331 - DNA, 201 bp, Homo sapiens
aacagtgctattacctaaaacccagtgaagtatatagatatgtctccttacacatccagtactcatatgattgacattcatttctcatggcaaagcggagsaacatagcactgcctgtcttctgtgtactatctccagagttttctctttgtccctgctcattcaatcctacaaccctagcactttctgtgaaagcacact

SEQ ID NO: 438332 - DNA, 201 bp, Homo sapiens
ctaactacacagcaggatcctgttcttccccattttcaaaataacaatgatacattagattcttctcatacttcacatctctgactatcatatcctttaaycagccagagaaaaatttgctttaaaaggttaatatgattagattctgcctaccaagataatcttcctgtcttaaggtaagcattaattacatctgcaagt

SEQ ID NO: 438333 - DNA, 201 bp, Homo sapiens
tactgaatactgttgtaacacaatgaaggcagttataacacaatggtaagaatttgtgtatctaagcatatctaaacaaagaaaaagtacataaaaataayagtataaaagttaaaagatatcagtatagaagataaaataacagtataaaagataaaagatatatacctatatagagcagttatggatagagcttacagg

SEQ ID NO: 438334 - DNA, 201 bp, Homo sapiens
ttaaggtattaagacaagtgcaaaataaccttgtaattaggatactgtatcagtcaaaaaaggagaagtcactattgcatgaagagatttacaaatgagtraaatatataggctgtgccagaattaacatttgaaatgagatggggttgctctttttttctaggctggagagaggtagtaagaacgattatatgagttcct

SEQ ID NO: 438335 - DNA, 201 bp, Homo sapiens
gagagaaaaatgagtgcccagcaaagcaggaagccccttataaaaccatcagatctcgtgagagctaactcactatcatgagaacaggataaggagaaccrcacttgtgattcagttatctcccccggtccttcccatgacacatggggattatgggaattacaattcaagatgagatttggatggggacacagccaaacc

SEQ ID NO: 438336 - DNA, 201 bp, Homo sapiens
tacatcattttatagtctacaaagcacttttatatctatttgctcatatgactttcagataacccccatgagtggtgtattagtccattctcatgctgctrtaaagacatacctgaaactgggtaatttataaagaaaagatgtttaattgactcacagttccacatggctggggaggcctcaggaaacttacaatcatgg

SEQ ID NO: 438337 - DNA, 201 bp, Homo sapiens
tatctctcccctagccccctacccccgacaggtcccggtctgtgatgttcccctccctgtgtccatgtgttctggagaggagatgtgttccttctaaggaragtaaccagactggtaaaaggagcagcaagagatagcctggagaaaacagctgccacttattgagcactgattatgtgctagctactatgccaagtgctt

SEQ ID NO: 438338 - DNA, 201 bp, Homo sapiens
tctggagaggagatgtgttccttctaaggaaagtaaccagactggtaaaaggagcagcaagagatagcctggagaaaacagctgccacttattgagcactrattatgtgctagctactatgccaagtgctttatatacataatcttacaaaagtcacgtgaggtaggcattatccccattttaaaatgaaaacacaagctc

SEQ ID NO: 438339 - DNA, 201 bp, Homo sapiens
taaagaagatttaaatacatggaaaaaatcctatgtttatctttcaacacaatatcagaatcccagctgacttctttgtggaaattgacaagctgtttctmaaattcataggaaattgcaggggacccagaacagccaaaacaatcttgaaaaaaaagaaagtaggactcacactttccaattttaaagcttactacagaa

SEQ ID NO: 438340 - DNA, 201 bp, Homo sapiens
tggtggcatatgactgtagtcctagctactcaggagactgaggcaggaggattacttgagcccaggagttcaaggatacaatgagctaggattacaccacygtattccagcttcagcgacaaagcgagacctgtttctaaaaaaaaaaaaaaaaagttggacccttatctcacaccatgtacaaaaattaactcaaaatgg

SEQ ID NO: 438341 - DNA, 201 bp, Homo sapiens
cagctggaaaaatgattttggattgatgacaaaggaaaattcaaatttgcatatgtgcatatgatcgatgactagggaaaaaacaaggaaaaatgaaatckggaggagtacaatgttctaggtaaggtgggttttctttggggtttttttgagacagagtcttgccctgtcacccaagctgtagtgcactggcactatctc

SEQ ID NO: 438342 - DNA, 201 bp, Homo sapiens
aaaaagtggaaaagtcttcataacttttaagggtgtacaaagtggggaataacaagcaactggaaaaattttcataactttaagggtatacaaaggggagygtatatgtgacaaataatacagttatataaaagaacaaaaagtaaagtttcaaaatgaagtaggtctcaaactcctgggctgcagaagctgcagagaggc

SEQ ID NO: 438343 - DNA, 201 bp, Homo sapiens
gagttaagatactaaaaatcttatcctagcactggtactggcagcatgtgtaaatgggtaaattctttactgtctccgaactggtatccttggatgtaaartggggatattctctccctacctcacagaaatgagatgggattctactgtaggaaagagctttgcaaagtgtaaagttttatttaaggcagttaagtctaa

SEQ ID NO: 438344 - DNA, 201 bp, Homo sapiens
tataagtgaaaacatgcagtatttagttttctgttcctgacttagttcgcctaggataacggcctccagttgcactggataagatctttaaaggtgtcttscaaccacaagattaagtgggccactttagtaagcatagagttgaggtcatgtgagggacacaacaaatacataaacctaatgatttttctggtctttgat

SEQ ID NO: 438345 - DNA, 201 bp, Homo sapiens
tccagcctcaaattagaacagttgccaagagtcacagtgactcatgcattctttcttcaaacaacctccctaccaaggatcttctttcaggtatgtatgtrtttgtgaactgagtcagactaaactacgtttatgggattgctctgcttgttagccagcctacaaagagaaccaagactcttgtttgaactaagtcaaata

SEQ ID NO: 438346 - DNA, 201 bp, Homo sapiens
agaaaattaagatacagactctgttcttacatatcttacagttagcaggagagagaaacatttaaatggctatctataacataaagctttagggcccaaartagatgttttgtattaaaattgctgtgggaacacaagaaagggagcctttgattctctcagacagggttggtggaaggctttgaagaagaggtagggcct

SEQ ID NO: 438347 - DNA, 201 bp, Homo sapiens
aaaattagcttgatgtggtggtgcacaccagtaatcccagctactttggaggctgagacaggaggatcacttgagcccaggagttcaaggttacagtgagytatgatcacaccactgcactccagcctgggtgacagagcgagaccctgtctctaaatttaaaaaataataagcattgttaaatagttgactttttaaaaa

SEQ ID NO: 438348 - DNA, 201 bp, Homo sapiens; identical to SEQ ID NO: 375434

SEQ ID NO: 438349 - DNA, 201 bp, Homo sapiens; identical to SEQ ID NO: 375599

SEQ ID NO: 438350 - DNA, 201 bp, Homo sapiens
tagctcagagaggtttgttattaccgattgtctgaagccttcttctctcaactcatcaaagtctccatccagctttgttccgttgctggcaaggagctgcsttcctttggaggagaagaggcactctggtttttagaattttcagtttttctgctctggtttcttcccatctttgtggttttatctacctttggtcttttt

SEQ ID NO: 438351 - DNA, 201 bp, Homo sapiens
acacatgtgcacagagctgtgtggacaataatgagaggagcaaacaactggggaacgtttgcaaaggtttattaactggcagtgactgatacaggggaatyggatgaggggagtacatgctgaacaggaaacagagtgaggggggcttgaccaggacacgtggcaatggagaaaagcagatgggagatacttatactggta

SEQ ID NO: 438352 - DNA, 201 bp, Homo sapiens
gacctgcacacaccttccacggttcctcgaagtgaaccatctgttcatgccacagtgacttcctcgcctaggctatcaattcctaggctagaggaaggtgyggcctgcatatcagggctgacctggggtttgggagcccacagcatcctgggtagggagcatccctggacctacaggccagggagtaaaaagagaatgcga

SEQ ID NO: 438353 - DNA, 201 bp, Homo sapiens
cttgactctttatccaatttgccagtctgtgtcttttaattggagcatttagcccatttacatttaaggttaatattgttatgtgtgaattcgatcctgtsattatgatgttagctggttattttgctcgttagttgatgcagtttcttcctagcatcgatggtctttacactttggcatgtttttgcagtggctggtact

SEQ ID NO: 438354 - DNA, 201 bp, Homo sapiens
aaggattttatttctccttttgcttatgaaggttagtttggctggatatgaaattctgggttgaaaattcttttctttaagaatgttgaatattggccccmactctcttctggcttgtagagtttctgccgagagatccgctgttagtctgatgggcttccctttgtgggtaacctgacctttctctctggctgcccttaa

SEQ ID NO: 438355 - DNA, 201 bp, Homo sapiens
cctcagcccaggctggacccaggcttgtctggggtccatgccacacacccagtccacacacctgaacatagccagggaagccagaggggttgttcccaaaytgtttgctcttaccagatgtcttgttaatcttctcaggggtacttggttttcctgggggcacagctgtttcccatcgttttgtgggatcccatataagct

SEQ ID NO: 438356 - DNA, 201 bp, Homo sapiens
tgtcccgaatggaagagcctggtgttccagacacgttccagcggctcccggtgttcccaacatgctccggtggctgtggacaagtgggccttgacggcacygaactccgtaaaggtctcgtgctcctggagcgacaggctccatctcaccgcaaggccacgcagcagaggaagtgcgccccgcttccaaatgattaatccg

SEQ ID NO: 438357 - DNA, 201 bp, Homo sapiens
accactgagaacaaagagaattaaatcctctttacccttagcaaagactaagtttcatgaaatttctgcagggaagaattcttgcatgagacacatgggaygatttatgactcagtgtcccgaatggaagagcctggtgttccagacacgttccagcggctcccggtgttcccaacatgctccggtggctgtggacaagtg

SEQ ID NO: 438358 - DNA, 201 bp, Homo sapiens
ccttcaccccaccccacgccactgtgatatcagcacgcccccggccccactaactcttccttgctctgctcagccatgcacgtttcactgaggcagccacwgcctctagaaagaattccctatttggtgatttcaattatgaatgtgctcctctgtggcaacacgtttctaacagcaaagctgatgtgggtcgtgatgaga

SEQ ID NO: 438359 - DNA, 201 bp, Homo sapiens
tctttacccttagcaaagactaagtttcatgaaatttctgcagggaagaattcttgcatgagacacatgggatgatttatgactcagtgtcccgaatggargagcctggtgttccagacacgttccagcggctcccggtgttcccaacatgctccggtggctgtggacaagtgggccttgacggcactgaactccgtaaag

SEQ ID NO: 438360 - DNA, 201 bp, Homo sapiens
atacgcttcctgatgtggagaccatgtgagagtggtgcccggtgcagccatcccacatcctcccaaaggacgatggagacagcgctccctccccagagatrcctgccactgggagcccacagaggtgcgaaatatctccaaataaggcaggcaggcccgagccacacaacatctgctaaagcattcgcatattctcactgc

SEQ ID NO: 438361 - DNA, 201 bp, Homo sapiens
ttcctgcagagacatgccccatgcacagagctactataatacaaacggcaaaatatgtatgtatacagctgatgctcggacagtgcaggggttgggctgtygaagccccacacagtcaaaaatccacataaccttttgactcccccaaaacttaactgctaataccctactgttgaatggaagtcttaatgataacataaa

SEQ ID NO: 438362 - DNA, 201 bp, Homo sapiens
ctttgattcttgaagtgacctgtcagtagtcagggctctgggaggagtgccccagacaatcaccaccaggcccaagagtcaggacagtccctcttcctgcrgagacatgccccatgcacagagctactataatacaaacggcaaaatatgtatgtatacagctgatgctcggacagtgcaggggttgggctgttgaagccc

SEQ ID NO: 438363 - DNA, 201 bp, Homo sapiens
aaagaaggtggcaaatttcagagatgaaaaattttttttctatcattataaacagagcatctggccaggacaccaatgctggacacggtgagatacgcttyctgatgtggagaccatgtgagagtggtgcccggtgcagccatcccacatcctcccaaaggacgatggagacagcgctccctccccagagatgcctgccac

SEQ ID NO: 438364 - DNA, 201 bp, Homo sapiens
tcttccttgctctgctcagccatgcacgtttcactgaggcagccactgcctctagaaagaattccctatttggtgatttcaattatgaatgtgctcctctrtggcaacacgtttctaacagcaaagctgatgtgggtcgtgatgagatcttgcccaccatacagacatcaaagacagaaagggcctgggctattggctgga

SEQ ID NO: 438365 - DNA, 201 bp, Homo sapiens
tgctgaaagaaggtggcaaatttcagagatgaaaaattttttttctatcattataaacagagcatctggccaggacaccaatgctggacacggtgagatasgcttcctgatgtggagaccatgtgagagtggtgcccggtgcagccatcccacatcctcccaaaggacgatggagacagcgctccctccccagagatgcct

SEQ ID NO: 438366 - DNA, 201 bp, Homo sapiens
ccactgtgatatcagcacgcccccggccccactaactcttccttgctctgctcagccatgcacgtttcactgaggcagccactgcctctagaaagaattcyctatttggtgatttcaattatgaatgtgctcctctgtggcaacacgtttctaacagcaaagctgatgtgggtcgtgatgagatcttgcccaccatacaga

SEQ ID NO: 438367 - DNA, 201 bp, Homo sapiens
ccatgcacgtttcactgaggcagccactgcctctagaaagaattccctatttggtgatttcaattatgaatgtgctcctctgtggcaacacgtttctaacrgcaaagctgatgtgggtcgtgatgagatcttgcccaccatacagacatcaaagacagaaagggcctgggctattggctggaacttcaaatggagcaataa

SEQ ID NO: 438368 - DNA, 201 bp, Homo sapiens
gccatgcacgtttcactgaggcagccactgcctctagaaagaattccctatttggtgatttcaattatgaatgtgctcctctgtggcaacacgtttctaayagcaaagctgatgtgggtcgtgatgagatcttgcccaccatacagacatcaaagacagaaagggcctgggctattggctggaacttcaaatggagcaata

SEQ ID NO: 438369 - DNA, 201 bp, Homo sapiens
cagaaaaatgacatcatagtcgaggttctttgattcttgaagtgacctgtcagtagtcagggctctgggaggagtgccccagacaatcaccaccaggcccaagagtcaggacagtccctcttcctgcagagacatgccccatgcacagagctactataatacaaacggcaaaatatgtatgtatacagctgatgctcggac

SEQ ID NO: 438370 - DNA, 201 bp, Homo sapiens
ctgaggtagaagaacatctaagtgtaagtggatccacacagttcagacctgtcttgtccaagggccaaatgtgtgtgtgtgtgtgtgtgtgtgtgtgtgtrtgtgtgtgtatgtgtgtgtgtctgtacacacatcatttagaattttctcatctttaagatttataaagttttttcacatatttcgtgaattaaggaagta

SEQ ID NO: 438371 - DNA, 201 bp, Homo sapiens
agaacatctaagtgtaagtggatccacacagttcagacctgtcttgtccaagggccaaatgtgtgtgtgtgtgtgtgtgtgtgtgtgtgtgtgtgtgtgtrtgtgtgtgtgtctgtacacacatcatttagaattttctcatctttaagatttataaagttttttcacatatttcgtgaattaaggaagtaaaccaagtga

SEQ ID NO: 438372 - DNA, 201 bp, Homo sapiens
gccccactaactcttccttgctctgctcagccatgcacgtttcactgaggcagccactgcctctagaaagaattccctatttggtgatttcaattatgaaygtgctcctctgtggcaacacgtttctaacagcaaagctgatgtgggtcgtgatgagatcttgcccaccatacagacatcaaagacagaaagggcctgggc

SEQ ID NO: 438373 - DNA, 201 bp, Homo sapiens
attctgcttctatagcagctcacctgggtccagccagtgtctcacctgttcatcacacagctctcccatctgctttctggaaacaccatgccgggtaagargagggacacacctgtatcccttcaccccaccccacgccactgtgatatcagcacgcccccggccccactaactcttccttgctctgctcagccatgcacg

SEQ ID NO: 438374 - DNA, 201 bp, Homo sapiens
tcttacagtaaattcttcaaaaaccatatactctaacaattaattatttctctggagaaagggacaggcctttcccctcgaagacagcttggtagtctccragtcttaattatgacagataaaacataatttatagtagtccagggcttacagaaaaatgacatcatagtcgaggttctttgattcttgaagtgacctgtc

SEQ ID NO: 438375 - DNA, 201 bp, Homo sapiens
gttcccaacatgctccggtggctgtggacaagtgggccttgacggcactgaactccgtaaaggtctcgtgctcctggagcgacaggctccatctcaccgcraggccacgcagcagaggaagtgcgccccgcttccaaatgattaatccgatgctctagtccacaaggcaggaaattttatgttctaaattagttacattat

SEQ ID NO: 438376 - DNA, 201 bp, Homo sapiens
catagagcttgttgaactcactcttggtgagggagtcattgacattgatggcaggcaccttcaggatcccattgaccatcatcctgtgtgggttgtggacmcgtcatggtctccttggaggtgcctcagatgcccagcaagagctgtgagtacttggtgtggaagaggttggcaaggtcacccccatcctccagaataatg

SEQ ID NO: 438377 - DNA, 201 bp, Homo sapiens
caccactgtggcccacttgatgccatctatgagggactcccagcagccatagagcttgttgaactcactcttggtgagggagtcattgacattgatggcargcaccttcaggatcccattgaccatcatcctgtgtgggttgtggacccgtcatggtctccttggaggtgcctcagatgcccagcaagagctgtgagtact

SEQ ID NO: 438378 - DNA, 201 bp, Homo sapiens
cccggcactgggaatatgtgtgccatagtaatgtgcataatcagggaggtaaagaagacaaaggcttttaaaggagaaatgaagattagggaattgttttragaccattactcttgcctaaaaagatcagttacaagggtgacactagtccaaggctggacaggcagttcttgggcacatgttcctgtagaagtatttttt

SEQ ID NO: 438379 - DNA, 201 bp, Homo sapiens
tatcaggcatataggcataaaaccctctctttgtagcctttcttagccctaactgtcatggactttattttatttttttaacacaaatgactccattttarttctgacaactttcccgtatggatggagaactagagagaagcatgatggaagagcctgcccagggccatacagttcatgttgcagggcaggaaagcagac

SEQ ID NO: 438380 - DNA, 201 bp, Homo sapiens
aatcccaggatgacttctcttcctccaagaggcttcttggccattttcctcctttctgtgggtacataggaaggggctgagcctgtcatccccacattccmactcatcagcattgtgtggatggtctcagggaatttggttttcattgggttataccttctcgggagtgtcttagggactgagcagcccctttctaaggaa

SEQ ID NO: 438381 - DNA, 201 bp, Homo sapiens
attcagctgcttcctctgtgggcctgtgggtgtactggcttcccaccctggaggttaccatctacctctccatacacaggccagcaccgacgtctcacagyggggagcccatgccacagctgtgagcacctgcgtagatggccattctgctcctggttgatggcttatccaggagtaaaaggaagcttattttttaaaata

SEQ ID NO: 438382 - DNA, 201 bp, Homo sapiens
acgtctcccctgcaccccccactagatggcagcgtgccttccctggtggctgatgccagaccggaggtgcaggtcagggagagacttccctctgtcctgcrtatgtccctatggggaagcaggggcagagcctagttctggcttctgggaagtgcctggatacgatttttatcaaccaaaataacaaacagagactgaagt

SEQ ID NO: 438383 - DNA, 201 bp, Homo sapiens
tttgactcctctgagcttcttcctcacatccatcccaccagcaagtcctgttgcctccatgtgcaaaatacatcctggatctgcccaacctggacagattsactgcacaagaaataaaaccccaacccctttccagggcccacgaggccctgccccctgttctggatcacctctttccctccttgacaaggtcagcgagtc

SEQ ID NO: 438384 - DNA, 201 bp, Homo sapiens
cacataatgaagtggctgtccctgcccctctggtcccctcacctcctctggtcatggacatcacagcacgttgcactctctgtcatctgttctgtcctggttttttttttgtttgttttttaattttgttttctgtgtcccatgcaatctctaaatgtgagtcccttgagagcagggactctgcctgcctgttcctgttac

SEQ ID NO: 438385 - DNA, 201 bp, Homo sapiens
ttcagcccctagctgttgaggggtggcagcagcagtggtagcagcagcaacagggaaaaccagtagtaaaggggatgcaagtatgcgtggctctgctgccraaaagggcaaagtcactgtcaagtggcatgtgctttggccccagtgacagcaacaacagatgcagtgagcagtagcagaccctgccctcaaggcatgtgc

SEQ ID NO: 438386 - DNA, 201 bp, Homo sapiens
ctggctctattttgtgccgcccctgctgcttgcgccactgctgctgtgttgtgtttggtggctgtgccgcaagaaggcaagtgatttttgcccacccagcyctggggcccaggcacaggcccaccctctgagggactctaacatgtgactgccccatgatcccgcctgtgggaagtttccctcagctcccagctcatcaca

SEQ ID NO: 438387 - DNA, 201 bp, Homo sapiens
gcatgtgcatggcagccttactgctggggtgggaacagggttgctgtccatgataactgccccaggtagacagttttcaagctctaagaaacccacacttkggctcctttttctctgagggcagcctctcagcacactggggaggcagcctccctattgtgctgcactgtccattccccaagatgcaggacactgtgtgtg

SEQ ID NO: 438388 - DNA, 201 bp, Homo sapiens
gctcctagagagaagtgaccccagaacccctgaaaccagggctgcctcaacaatccggacttctggaagccacagatggacaagggccaggaggcagcctytgtgtggagggaggaagagaggggcccccatgaggtcctgatggcccaaatggaggacagtgctgtaacccccagctgtctgtaccttgaggaaccagca

SEQ ID NO: 438389 - DNA, 201 bp, Homo sapiens
cactgtgtgtgctagagtgctagggaggctctgctgggtccaactggcattgcactactgaagccctacaggtgaacacagggagatgtcagtgggactcyagagatgtggaaatgcaggggctgttggtttccagtgcaggatgcagtctggtggtggctgggctctccaaatggcagagagctacagctgcctaagacc

SEQ ID NO: 438390 - DNA, 201 bp, Homo sapiens
tgtgtgtgctagagtgctagggaggctctgctgggtccaactggcattgcactactgaagccctacaggtgaacacagggagatgtcagtgggactctagrgatgtggaaatgcaggggctgttggtttccagtgcaggatgcagtctggtggtggctgggctctccaaatggcagagagctacagctgcctaagacctgg

SEQ ID NO: 438391 - DNA, 201 bp, Homo sapiens
ggccaggaggcagcctctgtgtggagggaggaagagaggggcccccatgaggtcctgatggcccaaatggaggacagtgctgtaacccccagctgtctgtrccttgaggaaccagcatggatctcagcacatgtctggtgccttccccattccttcatctgtctttactgagctccagcttcccctgggccccatgctggg

SEQ ID NO: 438392 - DNA, 201 bp, Homo sapiens
ctccctctgaagcagtgctgttacatggtctctaggcaccttcctacgctagtctcagggcctatgagggttgaggggttttcctttggctatggttatamaatccatggtcagaatgtcaaccgctgtggatctctcactaacctttttcttgcactagggagccactctgggttcccagccaatcccagccaagcttgc

SEQ ID NO: 438393 - DNA, 201 bp, Homo sapiens
aaagtgaagtacaaacatctggattagttacaccttggcatttgccttatttgaacatggtttgaacaattggctccttatgagtggttgaagcatggctrctgtgattggctaagactcagctattgttacagaagcagacttctcatttagggtttcagtttgttaggttgcagttcatgtgtgagaactcaagtatgc

SEQ ID NO: 438394 - DNA, 201 bp, Homo sapiens
ctagtgagacacggtcctttgaatatacttttggttgtttttctgcttcacaaggaaacatttcagatatgacatgtatgaacaggaatctgttttgggcmtaactgtggagaagtgagaaacccctttggcatttccaagggtaatcatagaagaacatggctcagagtggtttagcttctccaactttcatctttcttg

SEQ ID NO: 438395 - DNA, 201 bp, Homo sapiens
ctggtcctttcattccccagatacacatctgggagtggccggcactgtgcccggtgctggctgaggcaatgacatcatacccttgctcttaagagttgtcygaaaagtcagcagaccattgtttcttaggagctagagcaggagataccatcatctccaccaccacaacctctgcctccactgcctctgcccccggctcct

SEQ ID NO: 438396 - DNA, 201 bp, Homo sapiens
ttggccccctttttaggggggaaatatattatcccattctctcctgtattatcccattctctcctggcctataaggttactgctgagaaattaactgttcktctgatcgggcttcctatatatgtgaccagagctttttcctttctcttactctttttagaattctctgtttgacttttgacagtttactataatgtgctg

SEQ ID NO: 438397 - DNA, 201 bp, Homo sapiens
gacagggtctgagggggcacaaggggaaagtcagcatcatcctggatggggactagcagggcaggggcaggagagggcagatcccaggatggggcctagakgggagaagggtccctctcagtaagagagagaccgtctccgtaagggaatccagcatttgaggcatttgccactcacatgcccaaggggaggctttctgca

SEQ ID NO: 438398 - DNA, 201 bp, Homo sapiens
cagccctccagccacaggtgctgaaggggatgcagttacagtcctcatgcttgcagagcagggacaggcacatctacaaggacatggcatttcccacaacrggctcagccttcagccaggagatgaccagaaagaccaagaagggtggtactttagctgggagcaaggataaggggcttcctggaggaggccactctggag

SEQ ID NO: 438399 - DNA, 201 bp, Homo sapiens
gcccccaagagaacagccttggggaaacctaacaattctctttgaaaaggccaggctttcaacttgctttcatgcttacaagatggcttctggagctccasccatcacactcatactccaggcagaaagaagaaggaaaaagggaaagcagccttctttaaagcaatgcccaacaattcctatttatactccattgccaga

SEQ ID NO: 438400 - DNA, 201 bp, Homo sapiens
agccaaaaactgagtgaacggccctggggagtccatgggggatgctgacaaaccaatcacaaagttggtgccattcgctcttaagaaggagaggcagggcstgggcaagaacagcagctggaaggtgaaatgcaggcctggctctcagtagcggtagtgatcagccttgaaggggcaatcaggggagatgccccaggtact

SEQ ID NO: 438401 - DNA, 201 bp, Homo sapiens
tgtccagtgttacatacaatggcatcatccttcatctgttcaaagtgccggccaaggatgatgttgacacaggctgtggtggtgataaagatgttgccctyctgacaggcttcatccatggtggtcacctcatagccctccatggcagcctgcagtgcattgatggggtcgatcttggtgatgatgacgtgggccccgaaa

SEQ ID NO: 438402 - DNA, 201 bp, Homo sapiens
cagcaggatggtgtggcgcccattcttcatccagtacccggccacctggggcttgatggccaccttctccaagggttctcactgagccacttgacattgayctccacctcaaagtgtccagtgttacatacaatggcatcatccttcatctgttcaaagtgccggccaaggatgatgttgacacaggctgtggtggtgata

SEQ ID NO: 438403 - DNA, 201 bp, Homo sapiens
tttgctccaggttgcttctcagagttaagccaacagactctgtaaatacagaacagctgggatggtgacaccaagcagtggtccctggtcatttaggacasggtcacaatggcatgagaccccatgcagggcccctcgctgcctgacccacttaccctttggtcatcattgctgagtttacctgcaagcgtttggggaatg

SEQ ID NO: 438404 - DNA, 201 bp, Homo sapiens
cccacaccaggggccataggcagtggtgagtagctgaggtaggaggccctgagcctgggatggggtgggaacaggcctccctggccaagggtggcctctgmggtgctgcagagtgggcccagggaggctgcatctgcaaccaggtggatgcggacagtcacctgcaaatgctgggaccattgcacagctcccagggcaggc

SEQ ID NO: 438405 - DNA, 201 bp, Homo sapiens
gcctcctccaacaaggctggccttgggagaaccaaggcgaccgggatgaagttgttagcatttaggggaagagccatgtctgcaaaccaggaggagtttgygtttttctcacgtgaaggatggtcccctgtggtgtgggcttcttactggtcctttcattccccagatacacatctgggagtggccggcactgtgcccggt

SEQ ID NO: 438406 - DNA, 201 bp, Homo sapiens
cctcctccaacaaggctggccttgggagaaccaaggcgaccgggatgaagttgttagcatttaggggaagagccatgtctgcaaaccaggaggagtttgtktttttctcacgtgaaggatggtcccctgtggtgtgggcttcttactggtcctttcattccccagatacacatctgggagtggccggcactgtgcccggtg

SEQ ID NO: 438407 - DNA, 201 bp, Homo sapiens
tggtcccctgtggtgtgggcttcttactggtcctttcattccccagatacacatctgggagtggccggcactgtgcccggtgctggctgaggcaatgacaycatacccttgctcttaagagttgtccgaaaagtcagcagaccattgtttcttaggagctagagcaggagataccatcatctccaccaccacaacctctgc

SEQ ID NO: 438408 - DNA, 201 bp, Homo sapiens
acatctgggagtggccggcactgtgcccggtgctggctgaggcaatgacatcatacccttgctcttaagagttgtccgaaaagtcagcagaccattgtttyttaggagctagagcaggagataccatcatctccaccaccacaacctctgcctccactgcctctgcccccggctcctgtaaacacctgccccactgtgatt

SEQ ID NO: 438409 - DNA, 201 bp, Homo sapiens
aggtggctcaggacagggtctgagggggcacaaggggaaagtcagcatcatcctggatggggactagcagggcaggggcaggagagggcagatcccaggayggggcctagaggggagaagggtccctctcagtaagagagagaccgtctccgtaagggaatccagcatttgaggcatttgccactcacatgcccaagggga

SEQ ID NO: 438410 - DNA, 201 bp, Homo sapiens
atgacatcatacccttgctcttaagagttgtccgaaaagtcagcagaccattgtttcttaggagctagagcaggagataccatcatctccaccaccacaamctctgcctccactgcctctgcccccggctcctgtaaacacctgccccactgtgattgtttgttgctgtaggtgtcaaggagtgttctggatgagaaggat

SEQ ID NO: 438411 - DNA, 201 bp, Homo sapiens
agggggcagatgggtcccactgtggagacctgggccctggaggaaggcaggctctacaggggctggactttagacacgtgatgccaagagcaaccagatgsccacctcaccctcgtgccccagtggcaggcatatatgagggctcctgtcccctgcaccaccaggtctgtccccacacattgaactccctctctagaagga

SEQ ID NO: 438412 - DNA, 201 bp, Homo sapiens
gctgaccaaggggcgcaggccacaggcccagttgctccctcccgggcacactgagctcaggtccgactggccagggccctttggacacctgagcaaggaaratgttgagaatgctgcctgatagcatcagatttggaagcagctgttgtctgccttagcggtaggagagcacccaatgcttaccctgagtggggccaggtc

SEQ ID NO: 438413 - DNA, 201 bp, Homo sapiens
atgggtcccactgtggagacctgggccctggaggaaggcaggctctacaggggctggactttagacacgtgatgccaagagcaaccagatgcccacctcascctcgtgccccagtggcaggcatatatgagggctcctgtcccctgcaccaccaggtctgtccccacacattgaactccctctctagaaggatccatgttt

SEQ ID NO: 438414 - DNA, 201 bp, Homo sapiens
atgtgatgcctccagatttgttctttttgcttagtcttgctttggctgtgtgggcttttttggttccatatgacttacagacacatggaaccaaaccaatrtcattgttcacagatattttaacccgggtatacagatcaaacaaatatttaattaggcatgcagaactaaaagtgaatttgccagaaaagacatgcctca

SEQ ID NO: 438415 - DNA, 201 bp, Homo sapiens
ctctacaggggctggactttagacacgtgatgccaagagcaaccagatgcccacctcaccctcgtgccccagtggcaggcatatatgagggctcctgtccyctgcaccaccaggtctgtccccacacattgaactccctctctagaaggatccatgtttctgtacagtggcagcttctgatgtctgaccagtccctggttt

SEQ ID NO: 438416 - DNA, 201 bp, Homo sapiens
cattgaactccctctctagaaggatccatgtttctgtacagtggcagcttctgatgtctgaccagtccctggtttccacaggggtgcctcagctctggcartggccctgggctttagaccacctgcctgcaggtgcatgggtcaggcaacctgagtcacaaaaggtcatgcagatcagaaagaaaaaaaatagaaatgacc

SEQ ID NO: 438417 - DNA, 201 bp, Homo sapiens
acgaacactgcaaggatgccaggggcacctgccagcccgggcagcaggatcttcaggcagtgaggaaaagctgtcactgagtgggcttgtcgcctgctgtratgggctgacaggtgctgcagggaggggaggaggtggaggcctgaaagcgccctcacaagacacctgtgcaggagcttgagccccggagccaacacaaca

SEQ ID NO: 438418 - DNA, 201 bp, Homo sapiens
tgtgcctctccgcaggagtggcttcagggtggaaattcttcactcagcccaatgcaggcagttgtatggctcgcctgttctccaatgtggtaatgccgccrccccatggagagagggagaatggctctgcctgtcagccatgtgggtgggagtcatggctagtgttggctgcttgggtgggcccaaactcaggtccagagg

SEQ ID NO: 438419 - DNA, 201 bp, Homo sapiens
acccctccacctggctggccagtggacccagctctgggctggggcgaggctccctcaccactgacggttaggtaaactgtcctcctggccggcctgggctrttcctgagcttgctgctcagcccctccctccaatcactcagctcaagtctccaagcctgggctaatggcttgggctctttgaagccaggagcctccccca

SEQ ID NO: 438420 - DNA, 201 bp, Homo sapiens
tggccagtggacccagctctgggctggggcgaggctccctcaccactgacggttaggtaaactgtcctcctggccggcctgggctattcctgagcttgctrctcagcccctccctccaatcactcagctcaagtctccaagcctgggctaatggcttgggctctttgaagccaggagcctcccccagactcccaccaggca

SEQ ID NO: 438421 - DNA, 201 bp, Homo sapiens
cagctgttggctgagttgtgcaaagctgccccacatggagggtgacagtcacaggagggaaaggccaaggcaggagcctggaactcaaatgcaacagaatragccctctcagcaggctgtcaccaagaaaccaggagggctccagggagcccaggaaggaggccagggagggaggcacacagcccagactccctcattcag

SEQ ID NO: 438422 - DNA, 201 bp, Homo sapiens
agttaagccaacagactctgtaaatacagaacagctgggatggtgacaccaagcagtggtccctggtcatttaggacacggtcacaatggcatgagacccmatgcagggcccctcgctgcctgacccacttaccctttggtcatcattgctgagtttacctgcaagcgtttggggaatgacctctcattacccacgctgtc

SEQ ID NO: 438423 - DNA, 201 bp, Homo sapiens
caagtctgcggtgagctggtgcagaaactctgagctgaggagctaacattacacccatctgcaactgagagaacctgccaggctccagcaaaaccaaacargacattctccccaggagacaccgtcctcatccaggggaaccaggattctcatggaaaatcatttcctactgaagacgaggtcagaggaaaaactcccagg

SEQ ID NO: 438424 - DNA, 201 bp, Homo sapiens
aaccacaggctcctcccgcctttggactttttgtatgaatctgcccctggcttttcttcttcctacaaccaaaatacttttttgtccagattccaaaactytctgtggccacagtgaccatgtctccaacatgcaaccctgccaggcccctcccccagggggaaatgggagctttgtctgcgtgtgttccttgggatagag

SEQ ID NO: 438425 - DNA, 201 bp, Homo sapiens
gtgcttcctttgctggtcccctggggtcagaagtgctggttgggatggctgacagcgttgtcggggcaacattggttctaacagggaataaggattccttmctgtatcattgccttgggaccatggggaggacgaaattgttaagattttctctttgtaacttattatgaatgaggactaataattactaacgaggcctca

SEQ ID NO: 438426 - DNA, 201 bp, Homo sapiens
tgcacacccctcttccaggatctcccctcagacagggattcactcaggccctcagcaggttgggggatcctgacagaaccagtgcatgcctctttctccayccatgcccggccttgtgaggaggctatttccaaactcctcttcctgacttggcattgtgggctgacctgggggtgtgataagctcgggaagttgagcctc

SEQ ID NO: 438427 - DNA, 201 bp, Homo sapiens
ccttgtgaggaggctatttccaaactcctcttcctgacttggcattgtgggctgacctgggggtgtgataagctcgggaagttgagcctcttcgactggartgtgctgtcgaatttagaggagctgctgccttttaaaaccttgtttagtttattgtttcagcaaatccaaacattttgcatttcagcacataataatgca

SEQ ID NO: 438428 - DNA, 201 bp, Homo sapiens
gcctcttcgactggagtgtgctgtcgaatttagaggagctgctgccttttaaaaccttgtttagtttattgtttcagcaaatccaaacattttgcatttcrgcacataataatgcaggaaattctccaaggctcagtttaccaaaaacctcagcatttttgtggcaaaagcagtcagtcttgtttaatttcaatttttttt

SEQ ID NO: 438429 - DNA, 201 bp, Homo sapiens
cagttccctgaataaattttttgatagtgtcctcttccaggccatccccactacacactcatacaaaatgaagcagcaagattcagaggctcttgagccaractctacctcccatccatgctgaggattctccttcaccttatcctgtggatgctcattatgttaatgggaaacaatattactcgatccatcaggaaagtc

SEQ ID NO: 438430 - DNA, 201 bp, Homo sapiens
ccaacagactctgtaaatacagaacagctgggatggtgacaccaagcagtggtccctggtcatttaggacacggtcacaatggcatgagaccccatgcagrgcccctcgctgcctgacccacttaccctttggtcatcattgctgagtttacctgcaagcgtttggggaatgacctctcattacccacgctgtccactggc

SEQ ID NO: 438431 - DNA, 201 bp, Homo sapiens
acacactcatacaaaatgaagcagcaagattcagaggctcttgagccagactctacctcccatccatgctgaggattctccttcaccttatcctgtggatrctcattatgttaatgggaaacaatattactcgatccatcaggaaagtcaggctaatagtgtgaaaccttactctctgtcaccaaatatagtgcccacaat

SEQ ID NO: 438432 - DNA, 201 bp, Homo sapiens
atacaaaatgaagcagcaagattcagaggctcttgagccagactctacctcccatccatgctgaggattctccttcaccttatcctgtggatgctcattaygttaatgggaaacaatattactcgatccatcaggaaagtcaggctaatagtgtgaaaccttactctctgtcaccaaatatagtgcccacaatgatataac

SEQ ID NO: 438433 - DNA, 201 bp, Homo sapiens
tcgatccatcaggaaagtcaggctaatagtgtgaaaccttactctctgtcaccaaatatagtgcccacaatgatataacagcctttccagtgagtttaatycgtgtgcgcaccacagcaggaggccctttagaaactggatctcatttcattctcacaacacccaggaaggctcatagctgccattcatatagatcttaag

SEQ ID NO: 438434 - DNA, 201 bp, Homo sapiens
agggacacacttgatggacagaaggccactgctttttccctgactgctgtcctctgggattgtggctcagagagccatgtcaggcgtctgccaaagaggayggcacaagacacacagaaacggtgcccatgggcctcccagcccgtttctggacttgggactatgtgcttcctttgctggtcccctggggtcagaagtgct

SEQ ID NO: 438435 - DNA, 201 bp, Homo sapiens
aaacacgtatgaggactgtccagagtccctgcactagaaggagatacaccctggggagcacagaaagggcagacagtttccaggcagtcccagaaagtagmgtgtgcagcaggcacctgaggctgctccaacccggcttccagctggcacaggtggttgaagctgggaggctgtctgccaggagcttagagtccagtacct

SEQ ID NO: 438436 - DNA, 201 bp, Homo sapiens
gaagagccatgtctgcaaaccaggaggagtttgtgtttttctcacgtgaaggatggtcccctgtggtgtgggcttcttactggtcctttcattccccagayacacatctgggagtggccggcactgtgcccggtgctggctgaggcaatgacatcatacccttgctcttaagagttgtccgaaaagtcagcagaccattgt

SEQ ID NO: 438437 - DNA, 201 bp, Homo sapiens
ccagggtgaggaagatgttgctgctggggcacccagggtgatgagggacccaatgtggatggccatctccatggtcatgtgcaggcagctggcactgtggktgccctctagtggcttggaggccgagtacagctcccacatgtgcatcaggcctggcatctcattctctacaatgttcagggccttgcatccccaggcggc

SEQ ID NO: 438438 - DNA, 201 bp, Homo sapiens
ttccccttgtgtgccccagcagcaaggctccttctccctgcccaggcccccatgctgggcccccaggcctaactcatgctccccttcaggacctctgcttrgaaccacaggctcctcccgcctttggactttttgtatgaatctgcccctggcttttcttcttcctacaaccaaaatacttttttgtccagattccaaaac

SEQ ID NO: 438439 - DNA, 201 bp, Homo sapiens
aggaagctagaggccctagaaagttaggtaacctacccagggtcacacagccaggaagcaataggaccagcatccaacagcctggctccaggtccttactstgtgcatggccacctctctgtcctgcaaggtagtcactactgtctacatttcgcagctgtggacaccgaggctctgatgtttagtgataggctcaacgtg

SEQ ID NO: 438440 - DNA, 201 bp, Homo sapiens
aaattcattcagccagattttatcttttaagtggaaaatttaatccatttacattcaaggttattattgatatatgaagacttatttctgtcattttgttwaatgttttctgattgttttgtatatttttcctttctttctctcttgtagtttatcattatggtgtgctggttttctatagtggtaacatttgagttcttt

SEQ ID NO: 438441 - DNA, 201 bp, Homo sapiens
aacaacggcaaaacattcaagagcaatgtcagcatcaccagcaccacatgtgtgagtaccagcatggggctgcaaacacgtatgaggactgtccagagtcyctgcactagaaggagatacaccctggggagcacagaaagggcagacagtttccaggcagtcccagaaagtagcgtgtgcagcaggcacctgaggctgctc

SEQ ID NO: 438442 - DNA, 201 bp, Homo sapiens
aaacattcaagagcaatgtcagcatcaccagcaccacatgtgtgagtaccagcatggggctgcaaacacgtatgaggactgtccagagtccctgcactagraggagatacaccctggggagcacagaaagggcagacagtttccaggcagtcccagaaagtagcgtgtgcagcaggcacctgaggctgctccaacccggct

SEQ ID NO: 438443 - DNA, 201 bp, Homo sapiens
ctgaacctgctcatgaccctggcccctgagcctgcctggttgtaacctgctgtcattgcccagatgccttgaacctcctttctgcctctcctccttgctcrggcccctgagatgtccctccctgctccctcaccaggtcctgcatttcgtcccctcctgctgctgaaggggaggctctgggcactgggacccgggctcagc

SEQ ID NO: 438444 - DNA, 201 bp, Homo sapiens
tagaatttttgaaaggtaagtacaagttaaaaatataacaggtttaggttttaaacagtattgactaatttggatggcaatgtccccgctccatgtttcgtttttttttttaggcttcaacacaatggcttgcctatatgtgtagggctttgggggctttctctaggttgcatgactttgaccttcaatgccgtcatcccg

SEQ ID NO: 438445 - DNA, 201 bp, Homo sapiens
ggcccctgagcctgcctggttgtaacctgctgtcattgcccagatgccttgaacctcctttctgcctctcctccttgctcgggcccctgagatgtccctcyctgctccctcaccaggtcctgcatttcgtcccctcctgctgctgaaggggaggctctgggcactgggacccgggctcagctccgagaggcccctgagaat

SEQ ID NO: 438446 - DNA, 201 bp, Homo sapiens
ctcctttctgcctctcctccttgctcgggcccctgagatgtccctccctgctccctcaccaggtcctgcatttcgtcccctcctgctgctgaaggggaggytctgggcactgggacccgggctcagctccgagaggcccctgagaatggaagtgctgtgcccccagtgcctgcttttcagagctccacatctttgggcagc

SEQ ID NO: 438447 - DNA, 201 bp, Homo sapiens
tctgggcactgggacccgggctcagctccgagaggcccctgagaatggaagtgctgtgcccccagtgcctgcttttcagagctccacatctttgggcagcrtggcccagggccgcatagggaggaggatgtgctggagggacaggcgggaggcctgagcccactccaccgccttgtgtccagtcttatttgtgaggacgca

SEQ ID NO: 438448 - DNA, 201 bp, Homo sapiens
tcattatacttatgacaccaggaaaagtgtggggaagctttcattaggcagaaagggaagtcaggcatggtggcttatgggaggcctttgggaggccaagrcaggcagattgcttgagtccaggagttcaagaccaacttggacaacatagcaaaaccccgtctctacccaaaatatgaaaattagccaggcatgatggcc

SEQ ID NO: 438449 - DNA, 201 bp, Homo sapiens
cagatactgaaaattgtttccaataggcagtctttcagccctcatccccctcccaccctcttatttcccaccttatttccatccttatgtcgatgtatacrtattgtttagttcccacttataagcgagaacatgcagtatttgattttttgtttctgagttagttcgcttcggataatggcctccacctccaccatgttg

SEQ ID NO: 438450 - DNA, 201 bp, Homo sapiens
tgcttttcagagctccacatctttgggcagcgtggcccagggccgcatagggaggaggatgtgctggagggacaggcgggaggcctgagcccactccaccrccttgtgtccagtcttatttgtgaggacgcaccagtgttgacagtcctccctctgggtctacccctgcctgtccctgcatatccacgcatggattagcag

SEQ ID NO: 438451 - DNA, 201 bp, Homo sapiens
aattacagtgactgctcgatgcaccatgggtactctgcgttcttttgcccttccaggtgtaaactggaatgccagccttggcaatggcagccaacacatgrtccagggtgaggaagatgttgctgctggggcacccagggtgatgagggacccaatgtggatggccatctccatggtcatgtgcaggcagctggcactgtg

SEQ ID NO: 438452 - DNA, 201 bp, Homo sapiens
ctggagggttttgacaggcatctccctctccagcctggcaggtgtctgaggctcttagcagaacccccaggccctccaggggccgctccctgttctgggcrccttgtgcagaggtgggaccaggtggagcacaggcactctgcaagccttgcctcacctcgaagggccgagcccacctgtccttcacagccctgttcatag

SEQ ID NO: 438453 - DNA, 201 bp, Homo sapiens
actcacatgcccaaggggaggctttctgcatgaatgacaggttcaagcaagctcaaagtctgcatgctctggggaacacctgtgaggaatagagggtttcyttgggaccatcaggctgagactggcctggcaggagacccctgggattccaggcagcctgggaagggtggccttgagtacagaaggagctgaacaggcccc

SEQ ID NO: 438454 - DNA, 201 bp, Homo sapiens
ggctggtgtctcagttcagatgcacactgtggtctatctgcaggccacagtgtggctgagagacgtggaaaatgcctgtcctgtgcctctccgcaggagtrgcttcagggtggaaattcttcactcagcccaatgcaggcagttgtatggctcgcctgttctccaatgtggtaatgccgccaccccatggagagagggaga

SEQ ID NO: 438455 - DNA, 201 bp, Homo sapiens
cttccccttgtgtgccccagcagcaaggctccttctccctgcccaggcccccatgctgggcccccaggcctaactcatgctccccttcaggacctctgctyggaaccacaggctcctcccgcctttggactttttgtatgaatctgcccctggcttttcttcttcctacaaccaaaatacttttttgtccagattccaaaa

SEQ ID NO: 438456 - DNA, 201 bp, Homo sapiens
ttagccagggatagccagagaaatagaaccaataggatatatacgggtatatgtatatgtaagaggagatttattattaagaattggctcatgtggttatkgagaccgagaagtcccatggtttgctatctgcaagctagagaaagaagaatgtcagtggtgtgactcagtctgagtccgaaggcccaagaattagagggg

SEQ ID NO: 438457 - DNA, 201 bp, Homo sapiens
agaattggctcatgtggttatggagaccgagaagtcccatggtttgctatctgcaagctagagaaagaagaatgtcagtggtgtgactcagtctgagtccraaggcccaagaattagaggggcgggggtgaggcaatggtgtaagtccaaatgctatgacctgaaagttagtgtcccctaaagattcatatgttgaaatcc

SEQ ID NO: 438458 - DNA, 201 bp, Homo sapiens
aagcccacaggacccctgcttggggtctccttcaggtttccctgctccctgggccatgcggcctcagctctgccccttctctccctctgcacctgctcccytctccccacctctgcctctctgtgtacttggctgctagtagccctgaagtctgcggttgctcatcctctgttcagatgaccccatggccacgttgctggg

SEQ ID NO: 438459 - DNA, 201 bp, Homo sapiens
ccacacactgggtgacaaaaaaacagacatttttttctcagaattctgcaggctgcaagtccaaggtcaaggtgtggggagggtcgtttcctccgagtcasccaccttcctcctgtgtcctcccatgctttaccctctgtgcatgtctgtttcctaaactgttcctataagcacaccagtcgtactggattagggcccacc

SEQ ID NO: 438460 - DNA, 201 bp, Homo sapiens
agcacagaggaaggccccctgccctgggcatctgtgggaaaccagggcccaagtctgcggtgagctggtgcagaaactctgagctgaggagctaacattayacccatctgcaactgagagaacctgccaggctccagcaaaaccaaacaggacattctccccaggagacaccgtcctcatccaggggaaccaggattctca

SEQ ID NO: 438461 - DNA, 201 bp, Homo sapiens
ggtggggatgtgagttgtaactcctccctggaggcagctgagtcgaggtgacaggtgccctctgcccaccagctcggccctctgcctctgcccaccagctyggccctctgcctctgcccatgtggcccgcagtcacagccctgacctgtcagctgttggctgagttgtgcaaagctgccccacatggagggtgacagtcac

SEQ ID NO: 438462 - DNA, 201 bp, Homo sapiens
tggggatgtgagttgtaactcctccctggaggcagctgagtcgaggtgacaggtgccctctgcccaccagctcggccctctgcctctgcccaccagcttgrccctctgcctctgcccatgtggcccgcagtcacagccctgacctgtcagctgttggctgagttgtgcaaagctgccccacatggagggtgacagtcacag

SEQ ID NO: 438463 - DNA, 201 bp, Homo sapiens
agccctctcagcaggctgtcaccaagaaaccaggagggctccagggagcccaggaaggaggccagggagggaggcacacagcccagactccctcattcagkcctgggcctcctatccagcctgggagaggcctctggtggcctcactgctccaggcccatcctgagcccatcccccacacatggctggagggttttgacag

SEQ ID NO: 438464 - DNA, 201 bp, Homo sapiens
aggaaggaggccagggagggaggcacacagcccagactccctcattcagtcctgggcctcctatccagcctgggagaggcctctggtggcctcactgctcyaggcccatcctgagcccatcccccacacatggctggagggttttgacaggcatctccctctccagcctggcaggtgtctgaggctcttagcagaaccccc

SEQ ID NO: 438465 - DNA, 201 bp, Homo sapiens
gagggaggcacacagcccagactccctcattcagtcctgggcctcctatccagcctgggagaggcctctggtggcctcactgctccaggcccatcctgagsccatcccccacacatggctggagggttttgacaggcatctccctctccagcctggcaggtgtctgaggctcttagcagaacccccaggccctccaggggc

SEQ ID NO: 438466 - DNA, 201 bp, Homo sapiens
gaggcctctggtggcctcactgctccaggcccatcctgagcccatcccccacacatggctggagggttttgacaggcatctccctctccagcctggcaggwgtctgaggctcttagcagaacccccaggccctccaggggccgctccctgttctgggcaccttgtgcagaggtgggaccaggtggagcacaggcactctgc

SEQ ID NO: 438467 - DNA, 201 bp, Homo sapiens
gggcacctcatcctggaagcctttcctgatgaccagcccctctgactccctgcaaccaagggcttggtctgtccctctcatcagtcacttgtcacccaggrtgtatcatgatttccggttgtctatgtccaagtataattttcttctttagttctttggttttcttccaacctttattgttgaaattttcaaacctatagg

SEQ ID NO: 438468 - DNA, 201 bp, Homo sapiens
cctggaagcctttcctgatgaccagcccctctgactccctgcaaccaagggcttggtctgtccctctcatcagtcacttgtcacccagggtgtatcatgayttccggttgtctatgtccaagtataattttcttctttagttctttggttttcttccaacctttattgttgaaattttcaaacctataggtgagtggaaag

SEQ ID NO: 438469 - DNA, 201 bp, Homo sapiens
gagcagttccaagaccattgagctcacagttccctgtggctgtctccctcatacttccaccatgaccaggcttgaggaggggactctcagttcccctgacwcacttggaatagtatgaggggtgcagcagaagccaaaaactgagtgaacggccctggggagtccatgggggatgctgacaaaccaatcacaaagttggtg

SEQ ID NO: 438470 - DNA, 201 bp, Homo sapiens
cagcccctccctccaatcactcagctcaagtctccaagcctgggctaatggcttgggctctttgaagccaggagcctcccccagactcccaccaggcatgrctgcaaaactcctcgcatgcacacatatacaaccacacatctacatgcctgtgttgaagcttgtgtgtctacacaaagctgtggtcttcatgcagttcct

SEQ ID NO: 438471 - DNA, 201 bp, Homo sapiens
gtcatcattgctgagtttacctgcaagcgtttggggaatgacctctcattacccacgctgtccactggccaaggtcaagaactgcatctctctgggctggytctcaccgtctgtgttttctgtgctttagggagtacttcattgaagtcagcttgaacaacggcaaaacattcaagagcaatgtcagcatcaccagcacca

SEQ ID NO: 438472 - DNA, 201 bp, Homo sapiens
gccaggtcatcactagagcctgaaggaacccctccacctggctggccagtggacccagctctgggctggggcgaggctccctcaccactgacggttaggtraactgtcctcctggccggcctgggctattcctgagcttgctgctcagcccctccctccaatcactcagctcaagtctccaagcctgggctaatggcttgg

SEQ ID NO: 438473 - DNA, 201 bp, Homo sapiens
gcagaagtgtactgggcactcggttcctgtccgcaagtgcagaatctgcaaccaggagtggggatatgggggaagtatccacctgcctctcacagaggctmacagcctagagcatgtccccagcttcctgccaggtcatcactagagcctgaaggaacccctccacctggctggccagtggacccagctctgggctggggc

SEQ ID NO: 438474 - DNA, 201 bp, Homo sapiens
tcctctgatgagtgaggagccagggtagaccatgtgggtgccctcatggttctggggcagtgaccccctgctcatgatccttgtggaggttctggggctcyagggacatccaggccagaatgcccagcagttcagctcataagtccaaaggtaacctgggagtctcaaactcacggatacaattattgcaaccagaaatcc

SEQ ID NO: 438475 - DNA, 201 bp, Homo sapiens
tcaccgtctgtgttttctgtgctttagggagtacttcattgaagtcagcttgaacaacggcaaaacattcaagagcaatgtcagcatcaccagcaccacaygtgtgagtaccagcatggggctgcaaacacgtatgaggactgtccagagtccctgcactagaaggagatacaccctggggagcacagaaagggcagacag

SEQ ID NO: 438476 - DNA, 201 bp, Homo sapiens
agcctttcctgatgaccagcccctctgactccctgcaaccaagggcttggtctgtccctctcatcagtcacttgtcacccagggtgtatcatgatttccgrttgtctatgtccaagtataattttcttctttagttctttggttttcttccaacctttattgttgaaattttcaaacctataggtgagtggaaaggattgt

SEQ ID NO: 438477 - DNA, 201 bp, Homo sapiens
tggggccaggtctggttgctcagcacagggcaccaagctggcctttcctgctctctcacagcctcagtgcccccaccaggcccagggttttctgaggacarcatagtatccatcaagtgggtgcccacaagggctgggctggcaccttgagcaggaggagcaggccaggcccagccggctgatgtcagcagtcagtgtgtg

SEQ ID NO: 438478 - DNA, 201 bp, Homo sapiens
agatgaggagttacctgtaggtctctggaatcgcagctaaaacaggacttctgtgatggattgccctgagcagggtcgtaggtgcctcacctgtcctaccygagtcctggccctgcccctgcccctgtgggtgtcctgcctgccacaggcacacagaaagacagggaggagagaccccgagtgttcagcagccctgaagga

SEQ ID NO: 438479 - DNA, 201 bp, Homo sapiens
ctggctgagtgcaccgcctgtacccctggggcctgagggagcaccacagatttcagggcaggaatagtactctgagcctgccctgtgcaaggaccaaggcmtttcctgagcgtgttggttcagggatggtagggagagggtccttgagtgtgctcaaggcccagctgcctccccctggaccctcagtgacaccagatgaag

SEQ ID NO: 438480 - DNA, 201 bp, Homo sapiens
acatttgatagattaggaaagtacaggtctgagaatttatagcaacttgcttaacatcccacaacttttaagtggaggaagcaggagtcaatgcagagcarctgtctgcagaagtgtactgggcactcggttcctgtccgcaagtgcagaatctgcaaccaggagtggggatatgggggaagtatccacctgcctctcaca

SEQ ID NO: 438481 - DNA, 201 bp, Homo sapiens
acagccagccaagcctcccagcccttgccaaccattccctgtggaccctgtggggttagaggccatgaagacaagtggaaggaggcactgggaaggccggycacccctcccttcatctgccaagtggggaagtaaaaaatccacctgtgcctcaagagcatcttagacgagggcttcccactcagtgaggctgggtttagg

SEQ ID NO: 438482 - DNA, 201 bp, Homo sapiens
aatggtgaagctgccttagtgcagcactctgatcatttatcattaaagtgggcagagccagaactcccagagctcaatggggccttgatacatcctaagcytctactctgtgctagacccttggtcctaggaggtggggacgtcacatcagaacaccggggagttttatcaactttcttttatcctccttgggtatgtgct

SEQ ID NO: 438483 - DNA, 201 bp, Homo sapiens
aggaggcactgggaaggccggtcacccctcccttcatctgccaagtggggaagtaaaaaatccacctgtgcctcaagagcatcttagacgagggcttcccmctcagtgaggctgggtttaggactgggtctgtgatcacagctgcatctgcccaccttagcctcagtttccccttcccttgagagcccaggacccaaagcc

SEQ ID NO: 438484 - DNA, 201 bp, Homo sapiens
gctctagtccagagccctgtgcacttccccaggttgcccccttccgcagttgggagctgaaccaccaggccctcccagatggctgcttaatggtgaagctrccttagtgcagcactctgatcatttatcattaaagtgggcagagccagaactcccagagctcaatggggccttgatacatcctaagcttctactctgtgc

SEQ ID NO: 438485 - DNA, 201 bp, Homo sapiens
tcatattatagatggtcagccacagttgtacctaactaagcaaaatcacatgtgtagagcagttggttcatggaaaggctatagcatttgtttgaaagtcycctattatttggcaataattaggcatcaggagacctctgtgatggtggaatggcctgaggaagcgcatagtccaggcagacactgtgccctgggtgctgg

SEQ ID NO: 438486 - DNA, 201 bp, Homo sapiens
cctctggggaacaccatggtgagggagagaataacggcaggaaccagacccacataggatgtgctaccgcaaccatctccaatcaatgggaaaataaatgsctatccgtttgcaggaatgtgttatttaaggcacttttcctggggtcctgaaacttcaactgtcaacccacaagccccagcaaaaaggcatggaggtgat

SEQ ID NO: 438487 - DNA, 201 bp, Homo sapiens
atcttcccaggtggccccttgatacattcatttgatctgatgatagtatgttcactgaaatctaattccagggccatatggtaatcccaggatgacttctsttcctccaagaggcttcttggccattttcctcctttctgtgggtacataggaaggggctgagcctgtcatccccacattcccactcatcagcattgtgtg

SEQ ID NO: 438488 - DNA, 201 bp, Homo sapiens
acacgtaggaggtttcttttgttagggagtcctctggggaacaccatggtgagggagagaataacggcaggaaccagacccacataggatgtgctaccgcraccatctccaatcaatgggaaaataaatggctatccgtttgcaggaatgtgttatttaaggcacttttcctggggtcctgaaacttcaactgtcaaccca

SEQ ID NO: 438489 - DNA, 201 bp, Homo sapiens
gttagattttacaggagatgtgagaaggattacataattgtttgagttagttcttcttggctactaagatcaataataatagaggtgaccccaatgtgagkttgcatgggcaattgcgggtcagatgtccttgcagaagtatttttgagtaaggttgcaatggtctttgcacaaggttgtagtttggtagagatttgtgat

SEQ ID NO: 438490 - DNA, 201 bp, Homo sapiens
cacacctgtattagctgaactcctcacaggggcttagaaacagactggagaggaaaatgtacacgtaggaggtttcttttgttagggagtcctctggggarcaccatggtgagggagagaataacggcaggaaccagacccacataggatgtgctaccgcaaccatctccaatcaatgggaaaataaatggctatccgttt

SEQ ID NO: 438491 - DNA, 201 bp, Homo sapiens
actaagatcaataataatagaggtgaccccaatgtgagtttgcatgggcaattgcgggtcagatgtccttgcagaagtatttttgagtaaggttgcaatgrtctttgcacaaggttgtagtttggtagagatttgtgatagtttttgttatcaggtatacaagcatgtgaatcttctcttcataaacttccccaattcagc

SEQ ID NO: 438492 - DNA, 201 bp, Homo sapiens
gaggcagatgtgcacacccagtctgcacacctgtattagctgaactcctcacaggggcttagaaacagactggagaggaaaatgtacacgtaggaggtttmttttgttagggagtcctctggggaacaccatggtgagggagagaataacggcaggaaccagacccacataggatgtgctaccgcaaccatctccaatcaa

SEQ ID NO: 438493 - DNA, 201 bp, Homo sapiens
gcgcatgggtgtatatctgacctttgctcactgaggtgctctctattgtttcagctgatggactggacagcagaatgccaggttccctgagcttcctgctmagagtaggttgggagggtggaagagaggttgcagctgggcagagctggaaccctggctttcccacaaataccccaaatgataagcgtaggcaccagccat

SEQ ID NO: 438494 - DNA, 201 bp, Homo sapiens
attctcactaactactggctgtggcataagcgcatgggtgtatatctgacctttgctcactgaggtgctctctattgtttcagctgatggactggacagcrgaatgccaggttccctgagcttcctgctaagagtaggttgggagggtggaagagaggttgcagctgggcagagctggaaccctggctttcccacaaatac

SEQ ID NO: 438495 - DNA, 201 bp, Homo sapiens
cttaaaggatctatttgaagtgttagtatttactcactattttgatgcctgagagattctcactaactactggctgtggcataagcgcatgggtgtatatytgacctttgctcactgaggtgctctctattgtttcagctgatggactggacagcagaatgccaggttccctgagcttcctgctaagagtaggttgggagg

SEQ ID NO: 438496 - DNA, 201 bp, Homo sapiens
tgtagacacaggtggctcaggacagggtctgagggggcacaaggggaaagtcagcatcatcctggatggggactagcagggcaggggcaggagagggcagrtcccaggatggggcctagaggggagaagggtccctctcagtaagagagagaccgtctccgtaagggaatccagcatttgaggcatttgccactcacatgc

SEQ ID NO: 438497 - DNA, 201 bp, Homo sapiens
tgttctggatcacctctttccctccttgacaaggtcagcgagtcactgcccagggcattggcacatgatctttgcctggctggctcctcatctttttaatytcagctgaaatgtcaccttttcagagagaatttattattcatggaagttttcaacagtatacaaaataacaagaattgtgccataaacctactttcaata

SEQ ID NO: 438498 - DNA, 201 bp, Homo sapiens
tgggctctggcttcccagttcctcactgcagggtgccctgtcagtaggctgtggggaccgacacacggtccatgtctgagctctgctctccatgggcacaygaccagagcaaatagtccaatgtcagcgagctccagaggtgcctcccatgaacagaaaggacgctgtcaggcctgtcgtgagtccctaggcactgggctg

SEQ ID NO: 438499 - DNA, 201 bp, Homo sapiens
ggtgactctcttccatggggacagcacgaggctgggtgccgctggccccagagcagcagctgggctctggcttcccagttcctcactgcagggtgccctgkcagtaggctgtggggaccgacacacggtccatgtctgagctctgctctccatgggcacacgaccagagcaaatagtccaatgtcagcgagctccagaggt

SEQ ID NO: 438500 - DNA, 201 bp, Homo sapiens
gggccccctgtaaggcagagcaggagccaaaagcagagatggaggctggggcggggagagtgtcaggggtgctggaagctggggtggaagaagccagcccrgagagctgcagacagaggacagagcagagggtggagaggacagagcttagccccatccccaggctccggatgcaggtgtggctccatttggcctctctgg

SEQ ID NO: 438501 - DNA, 201 bp, Homo sapiens
tgcctcaacaatccggacttctggaagccacagatggacaagggccaggaggcagcctctgtgtggagggaggaagagaggggcccccatgaggtcctgakggcccaaatggaggacagtgctgtaacccccagctgtctgtaccttgaggaaccagcatggatctcagcacatgtctggtgccttccccattccttcatc

SEQ ID NO: 438502 - DNA, 201 bp, Homo sapiens
gtgggtttgtcagacagtggaagcttccgggactttcttggcagggctcttgggcagagactttcagcggggccagaggaggggtttgtagttcccttggragcatcccttacccccggccccactgttgtgccttgaggtgggaccacctgtagagaagggagaatgggcagatgggcctccaagtggtgggcaccagga

SEQ ID NO: 438503 - DNA, 201 bp, Homo sapiens
attggcaacttggagtaagtgtcaatcccttttagtcacagttgacctttaaaggatgtttgaaaggagtgactctcgggctaagtctatcttgagtccaytattaagttcaattttgtgagttccatagtcttgctgttatctcaaagtgatgggctagcattatggttacaagttgtacttctgcaaaaatttaacaag

SEQ ID NO: 438504 - DNA, 201 bp, Homo sapiens
agaaaccccatataaaaccatcagatctcctaagacttattcactaccaccagagcagcatggaggaatccgcccccatgattcaattatcccccaccggrtctctcctataacaagtgggaattatgggagctacaattcaagatgagatttgggtagggacacagccaaaccacatcagtaacccactgaataaatcaa

SEQ ID NO: 438505 - DNA, 201 bp, Homo sapiens
gatttgcagtttgtctctggtcatggcatcaaatggtttggtaaactttattttttattttattttattttatttttttgagacagagtctagctctgtcrcccaggctggagtgcagtggcacgaccaggttcacgccattctcctgcctcagcctcctgagtagctgggactacaggtgcgtgccaccacacctggcta

SEQ ID NO: 438506 - DNA, 201 bp, Homo sapiens
tcagcatgctctcttaaaggatctatttgaagtgttagtatttactcactattttgatgcctgagagattctcactaactactggctgtggcataagcgcrtgggtgtatatctgacctttgctcactgaggtgctctctattgtttcagctgatggactggacagcagaatgccaggttccctgagcttcctgctaagag

SEQ ID NO: 438507 - DNA, 201 bp, Homo sapiens
acagggtttcaccatgttagccaggatggtttcgatctcctgacctcgtgattcacccgccttggcctcccaaagtgctgggattacaggcgtgagccacygtaaactttttatgtggcccatacatcaggcacaaggctgctttcttaaaattcatctagtttcagcttatagggcttttggaacagaacagttttccat

SEQ ID NO: 438508 - DNA, 201 bp, Homo sapiens
ttaatttagaattttgatccaggagaagcccaccaaaaatatcaagagattcaaagccatagatcaaaatagaatcacaggtcactgttaaataatagccrttcatttaactcgagtgattatcaggaaacttcaaaagcaatacagaaagttacaaatattttaaaaccttaacctgttcaaagctcagttttcttaagt

SEQ ID NO: 438509 - DNA, 201 bp, Homo sapiens
aggacagagcttagccccatccccaggctccggatgcaggtgtggctccatttggcctctctggatccctgtttcctggcagggacaagggtctggctggrgttagcttctagggactacagggctgaggggtgaaggaggcctggcgagcacccagctgggagggacaccagcccagtgaacacaggggccaggagtcgg

SEQ ID NO: 438510 - DNA, 201 bp, Homo sapiens
agggggcacaaggggaaagtcagcatcatcctggatggggactagcagggcaggggcaggagagggcagatcccaggatggggcctagaggggagaagggyccctctcagtaagagagagaccgtctccgtaagggaatccagcatttgaggcatttgccactcacatgcccaaggggaggctttctgcatgaatgacagg

SEQ ID NO: 438511 - DNA, 201 bp, Homo sapiens
tataaatatataaattgtttgtcttttaggtcagttaccaaaaggtaaaaaaaaatctcctgcaatgtaattgcttcttctcatgggaagcctgttcagtyttggaattgaacctgatgaaagggtccttaaattcaattagagataaaagaacatatccaagtgttatgaatgtacactcatattataggagagtataaa

SEQ ID NO: 438512 - DNA, 201 bp, Homo sapiens
atccccaggctccggatgcaggtgtggctccatttggcctctctggatccctgtttcctggcagggacaagggtctggctggagttagcttctagggactrcagggctgaggggtgaaggaggcctggcgagcacccagctgggagggacaccagcccagtgaacacaggggccaggagtcggggagcaggctgtggctca

SEQ ID NO: 438513 - DNA, 201 bp, Homo sapiens
cgtagaatttttgaaaggtaagtacaagttaaaaatataacaggtttaggttttaaacagtattgactaatttggatggcaatgtccccgctccatgtttygtttttttttttaggcttcaacacaatggcttgcctatatgtgtagggctttgggggctttctctaggttgcatgactttgaccttcaatgccgtcatcc

SEQ ID NO: 438514 - DNA, 201 bp, Homo sapiens
cctgttcagtcttggaattgaacctgatgaaagggtccttaaattcaattagagataaaagaacatatccaagtgttatgaatgtacactcatattatagragagtataaacaagaagactagtaccttgagcagaggaatgtagagctcttagataaagtaaaaccacgtgaagtttcttggtaacatggaacaattcag

SEQ ID NO: 438515 - DNA, 201 bp, Homo sapiens
actcatattataggagagtataaacaagaagactagtaccttgagcagaggaatgtagagctcttagataaagtaaaaccacgtgaagtttcttggtaacrtggaacaattcagacatatcaagaaaagccaagagtacataatctagttatattggcggaaaacattgcttttcttggccttcaagataaacattatagt

SEQ ID NO: 438516 - DNA, 201 bp, Homo sapiens
agcagctgatgaaaaagttggagaagagagttatcacctcagccaaccaaaaagctgtaacttttcggaggaagggagtaggagcgctacaggctatggtktatggcctgcagaccatgtgcagtgggatgcagcagaaattgaacttctgaaataagaacctgaggaaaataaataccttattaaataaataccatttat

SEQ ID NO: 438517 - DNA, 201 bp, Homo sapiens
tctttccttacactaattttgggtttggtttgctcttgcttttctaattccttgaagtacgtcattagattgcttacttgaattgtttctacttctttgaygtaggtctttattgctacaaacttctctcttaggcattgcttttgctgtataccatatgtttgggtatgttgtgtttccattttcatttgcttcaacaaa

SEQ ID NO: 438518 - DNA, 201 bp, Homo sapiens
gtcctacttctggacaccatttatgtcaacctgaacgacagagagtttctctctaaaagaaaacagtatttattcaggaacggtgcccggcactgggaatrtgtgtgccatagtaatgtgcataatcagggaggtaaagaagacaaaggcttttaaaggagaaatgaagattagggaattgttttgagaccattactcttg

SEQ ID NO: 438519 - DNA, 201 bp, Homo sapiens
aaaagcttttttttattttatcaaatactttttctgcatctgttgagatgatcatatggtttttgtccttcattctgttgatgtgatatatcatgtttatygatttgtgtacgttaaatcatccttgcatccccagagtaaatcccacttgatcatggcgggattatctttttgatgtgctgtttcactcaatttgctagt

SEQ ID NO: 438520 - DNA, 201 bp, Homo sapiens
gcctgtaggcctgggccctggaatcctggctcaggcacacattgcctgtgtcaccttgaccagatgagtgttctactctgagcctctattttctcaatttracatggagctaatatggtgctggttgtgtattctgtaactgaaatgcttgggaccacaaatattttagtttttagatttttttcaggttttggaatgtgt

SEQ ID NO: 438521 - DNA, 201 bp, Homo sapiens
atttcatatgatgttagctgtgagtttgtcatatgaggccgttattatgcctaatttgtcaagagtttttgtcaaaaagcttttttttattttatcaaatrctttttctgcatctgttgagatgatcatatggtttttgtccttcattctgttgatgtgatatatcatgtttattgatttgtgtacgttaaatcatccttg

SEQ ID NO: 438522 - DNA, 201 bp, Homo sapiens
gaggtagagaaggcagaggtcagggggttagagatgtagcttgcacatcactggaccaccaaggggtgtctagatggtgccaggcccagggacccagcctyaccatggcccctgggactgaagggcccatgcaggctggacactgggtgataggggaagccaagaggactgccgaccagggggcttctggacacaagactt

SEQ ID NO: 438523 - DNA, 201 bp, Homo sapiens
ggtgcagagcctggaattggggatagaggctgtggggatggacccgggtctcctgtccttgctcctgcgcctgcacctctcttggctgcagcacccccacycttgcccatcattgtacctggagattttgtggtcctcacagaagccctgtgctgcaggcgaggtgtgcagtgagggtgggtttgtcagacagtggaagct

SEQ ID NO: 438524 - DNA, 201 bp, Homo sapiens
agacacaggtggctcaggacagggtctgagggggcacaaggggaaagtcagcatcatcctggatggggactagcagggcaggggcaggagagggcagatcmcaggatggggcctagaggggagaagggtccctctcagtaagagagagaccgtctccgtaagggaatccagcatttgaggcatttgccactcacatgccca

SEQ ID NO: 438525 - DNA, 201 bp, Homo sapiens
tggcttacggtggccttatccaaatcagatgctgaatgaagtcaagagcttccacccaaaagtaggaggctcagcctgagagaagactctccagggcagaraaagcaagtcacagaaacagggagctccaagggctcaagtgaggactgcacaccaattccaagagtggctgatttcttcaagtagtggtcctactccagg

SEQ ID NO: 438526 - DNA, 201 bp, Homo sapiens
gtttgattcttttttctattatatctgtttctctggtgaatttttcattcatatcctcagttgatttctaactttttgtattgtttatgtcctcttgtgtmttactgagcttttataatatcatttttaaaaattatttttcccacgtttcataaattttttttccagtgaaatctgttgctaaagaattattgtaatctt

SEQ ID NO: 438527 - DNA, 201 bp, Homo sapiens
cttcatacattttggattggctttttcctgaagatatttccatggtttttattgggtaggacactttagctttgcttctaagtgtatgaagtaatgtagtstctctatgatttcttcacctctaagcagtatcagtggtgtgtgatttccctagtggcttaggctgtggttgttagtggaggctatgatgatgttttgctg

SEQ ID NO: 438528 - DNA, 201 bp, Homo sapiens
tctctatgatttcttcacctctaagcagtatcagtggtgtgtgatttccctagtggcttaggctgtggttgttagtggaggctatgatgatgttttgctgsggttggggatgttaggtgggtgtgccctcaaaccctgatggtggcagtggcagggtaaatgtacctctccttgtgaccccaggcagtgtacacaggcact

SEQ ID NO: 438529 - DNA, 201 bp, Homo sapiens
tgatgggctagcattatggttacaagttgtacttctgcaaaaatttaacaagtaacatataaaaagtttaaaaatggaaaatacaatttgcataatagttyttatccatgaacctaggcttaaaggcaactgtattagtttgttctcatgctgctaataaagacgtacttgagactgggtaagttacaaaggaaggaggtt

SEQ ID NO: 438530 - DNA, 201 bp, Homo sapiens
agagcctggaattggggatagaggctgtggggatggacccgggtctcctgtccttgctcctgcgcctgcacctctcttggctgcagcacccccacccttgmccatcattgtacctggagattttgtggtcctcacagaagccctgtgctgcaggcgaggtgtgcagtgagggtgggtttgtcagacagtggaagcttccgg

SEQ ID NO: 438531 - DNA, 201 bp, Homo sapiens
tggaagccacagatggacaagggccaggaggcagcctctgtgtggagggaggaagagaggggcccccatgaggtcctgatggcccaaatggaggacagtgytgtaacccccagctgtctgtaccttgaggaaccagcatggatctcagcacatgtctggtgccttccccattccttcatctgtctttactgagctccagct

SEQ ID NO: 438532 - DNA, 201 bp, Homo sapiens
gatagaggctgtggggatggacccgggtctcctgtccttgctcctgcgcctgcacctctcttggctgcagcacccccacccttgcccatcattgtacctgsagattttgtggtcctcacagaagccctgtgctgcaggcgaggtgtgcagtgagggtgggtttgtcagacagtggaagcttccgggactttcttggcaggg

SEQ ID NO: 438533 - DNA, 201 bp, Homo sapiens
catgccttatgtgcaggaaacgtgggtctgggctgttaacagcaaagccattgtattagtccactaggtggccaaaacaaagtcccacacactgggtgacmaaaaaacagacatttttttctcagaattctgcaggctgcaagtccaaggtcaaggtgtggggagggtcgtttcctccgagtcagccaccttcctcctgtg

SEQ ID NO: 438534 - DNA, 201 bp, Homo sapiens
gggaggaagagaggggcccccatgaggtcctgatggcccaaatggaggacagtgctgtaacccccagctgtctgtaccttgaggaaccagcatggatctcrgcacatgtctggtgccttccccattccttcatctgtctttactgagctccagcttcccctgggccccatgctgggctggtgagggacagaaatgaagctc

SEQ ID NO: 438535 - DNA, 201 bp, Homo sapiens
tgcagtgagggtgggtttgtcagacagtggaagcttccgggactttcttggcagggctcttgggcagagactttcagcggggccagaggaggggtttgtakttcccttggaagcatcccttacccccggccccactgttgtgccttgaggtgggaccacctgtagagaagggagaatgggcagatgggcctccaagtggtg

SEQ ID NO: 438536 - DNA, 201 bp, Homo sapiens
atccctctgccgccctcactgcctcagcatcgcccgttccatcaggccccactcctgcctgctgcctgcagcctacccagtgaactcagctcggagaccarggctgggcctgggcagaggggatgagtgagtcccatgccttatgtgcaggaaacgtgggtctgggctgttaacagcaaagccattgtattagtccactag

SEQ ID NO: 438537 - DNA, 201 bp, Homo sapiens
cccctccctgccctcccctgccttccccatctttctctctaaacagaactctggatttggggaaggcctgggcagcctgtattcccacggatgctgcccamgttccctttactgtgaagaacacccagagaagagttctggttgcttacaccccatgtggccctggttctgagccaggtctttctctgagctctctaaacc

SEQ ID NO: 438538 - DNA, 201 bp, Homo sapiens
gtgtggaagaggttggcaaggtcacccccatcctccagaataatgttgagagcccatccctgaattacagtgactgctcgatgcaccatgggtactctgcrttcttttgcccttccaggtgtaaactggaatgccagccttggcaatggcagccaacacatggtccagggtgaggaagatgttgctgctggggcacccagg

SEQ ID NO: 438539 - DNA, 201 bp, Homo sapiens
tttgtttcagtgctccggggtgctcatttttgtgtgaagcatctttgaaatctgagagtgtttttggtttgtagaccaactacgggtgtatggagcaggayaagtaaaggactaacctgttctggttattcttaatgataagcgtgcctcctgagacatatgagtgtctatatggatgtaataccactaagacattttttt

SEQ ID NO: 438540 - DNA, 201 bp, Homo sapiens
tttctacagggacaagcactggaaagtcctattttgccatcttgctgacacaactcttatatatatctatacatcacacaattatccttcttttgtaaatrtatgacacatatatgtatgtgcgtatatctgtgtgtatatgtgtgtttttgttctatttgctaatctgattctttcatccaaatagtatattatgaactt

SEQ ID NO: 438541 - DNA, 201 bp, Homo sapiens
gggtctctgggggccagcctggtgctggggtccattgggatgggcctggagcctgtgtcaatagggactggacttgaagtctgggtccatgagagccaacytgattcctggggtagatgtgtggggttaggccttcagcctgagtctgcaggagccaccctggtgctggaatgaacctggtgcctggatccattgggatag

SEQ ID NO: 438542 - DNA, 201 bp, Homo sapiens
gtatcaggctaataatggcctcataaactgaatttgcaggtgttccctcctcttcaattatgaaagagtttgagaaggatgggcattaatttttctttcattttttttttttttgagatagagtctcactcttgtcacccatgctggaatgcaatggcacgatctcagcttactgcaacttccacctcccaggttgaagca

SEQ ID NO: 438543 - DNA, 201 bp, Homo sapiens
actttatccattttatcttttcaaaaaaccaactcttagtttcatatttttttttatttttctatcatctatttcattatttttttctctaatatttattrtttacttccttttgttgacttcaggctttgttctttttctactcccacaggtataaagttaggttgtttgatgtctttattttttcttaaggtaggtgtt

SEQ ID NO: 438544 - DNA, 201 bp, Homo sapiens
cagagaagaaaaggattttcttgtgtcgttattcttcacatagcaggagtgcggagaaatccaaataaaatatttttggctaaccacaactgcagattgakccaaaccaactgtgaagggagctagatttgctttcccactcagtttaattacgaaaatagtaaaggcataaatagaaggcatgccttaattttaaaactg

SEQ ID NO: 438545 - DNA, 201 bp, Homo sapiens
ggcaaagcgtgatagaagctgttatcatatgatctaacaactctattccttggtatgtacccaagaaaaatggaaacatctgttcacacataaacttgtamacaaatgttcatagcagcattattcatgagagccacaaaatggaaacaacctaaatgcccatcaactgatacatggataaacaaaatgtggtatatacat

SEQ ID NO: 438546 - DNA, 201 bp, Homo sapiens
tggaagatttggattgtcagattcttcagtttcaaggcttttggtgtatttttgaaggcagtgtctgttaaatgggtcagaactttgatcttagagatttkggaataaataacctagatttgctaaagacagtgacctagaattacacagaagtgcacagatttaggacttgagcccagacaatgcattaagctgtctgac

SEQ ID NO: 438547 - DNA, 201 bp, Homo sapiens
gttgacaaggatgtggggaaattggaaccttcacacattactggtagaaatataagaaatataaaatggcacagctgctttggcaaagcgtgatagaagcwgttatcatatgatctaacaactctattccttggtatgtacccaagaaaaatggaaacatctgttcacacataaacttgtacacaaatgttcatagcagca

SEQ ID NO: 438548 - DNA, 201 bp, Homo sapiens
aactaatttgatggggccattactatactgtagtgagctctataggtaaattgtatttaaaaaatatcattccacataaaaatattacccgagtatatcayatacatgcgtatgtgtgtgtatgatatacttggataatacatatttggatacatagagtcatgtgctgcttaatgatatttttgttcaataacagaccac

SEQ ID NO: 438549 - DNA, 201 bp, Homo sapiens
caataataagtgttgacaaggatgtggggaaattggaaccttcacacattactggtagaaatataagaaatataaaatggcacagctgctttggcaaagcrtgatagaagctgttatcatatgatctaacaactctattccttggtatgtacccaagaaaaatggaaacatctgttcacacataaacttgtacacaaatgt

SEQ ID NO: 438550 - DNA, 201 bp, Homo sapiens
gacaataataagtgttgacaaggatgtggggaaattggaaccttcacacattactggtagaaatataagaaatataaaatggcacagctgctttggcaaarcgtgatagaagctgttatcatatgatctaacaactctattccttggtatgtacccaagaaaaatggaaacatctgttcacacataaacttgtacacaaat

SEQ ID NO: 438551 - DNA, 201 bp, Homo sapiens
ggtgatggtaagggatgtgatataaaataagtttggggtagatattgtattttattttgatgcttcctattcccttttcactttcttcctccatgaaaacmcatccccttgagcagaagtagatttatatttggaaatatggaataggtagggaacattactcagagttgaggaggaagtggccaatctctgctaagtgct

SEQ ID NO: 438552 - DNA, 201 bp, Homo sapiens
ggcctagagctcttgtttttaaaacaactcaggctcagaaggatagtggtaaaaactcctgaaaagtgtgccctttacaaaattggtgtccataggaattsaaagacatgtcaaatggtcttgaaattttcagctccagaaataacaaatgaagtttcctacccttaactgagtaaatattaattgatttcaactggcatt

SEQ ID NO: 438553 - DNA, 201 bp, Homo sapiens
tcattatttactagcctagatgatgctgcatttaccagctgtgtgaccttggggaaagttacttagcctttctgggcctcaagttccacatctgcaaagtrgtgagagtgatatctatggaatcatagggttgtttgatgatgaaatagaagataacatctgcaaagccctcagacttacatgacatatattatgtgtgtc

SEQ ID NO: 438554 - DNA, 201 bp, Homo sapiens
tcaaaattacaaatatgcatatttcaccagaaattccacttctaggaatatatcctacagatatactcacagtcatgcgttgcttagtgacatttcactargatgttgccatcgcacaacacagtcagagcagtgagttctgtggatccccacaaaggtatagagctcttgttttgttttgtgtcagtaaagatgaagtct

SEQ ID NO: 438555 - DNA, 201 bp, Homo sapiens
gcccagagtggagatgcttatcgtcccctgggaacttttcctactgaagggaataaaggaaaagacctagattgaagtcttcaagctgagtctgcgaggcrcccgcgagagaccccgtcgcccgagttcccagcagccctgggattgtgcccaaggagcgcgaattctcctcgtgtcggccttgaccccgcgcggccggta

SEQ ID NO: 438556 - DNA, 201 bp, Homo sapiens
gttcctgcttcctcctacctccgcctccccctcctcctgtggctgtgctgctttcctggactacactgccataatactacctactcccaaaaatacataarcaaggcacatgtgttaagtagcagatttataaaaattcttgatttttaattaaagtatattattttatttgtataaacttatgggttacaagtgagattg

SEQ ID NO: 438557 - DNA, 201 bp, Homo sapiens
aaacaatgtaacacttgtgttatacgatgcgttaggaaaaggtatgatcatgatactcatgctgccacttcagtggttggctcgtaaatatacatggggawtgtgattttttggggttcccctgaattttatttatgaatgttttttgagatgaggtcttactctggcagtgatgtgatcacagctcactgcagccttgag

SEQ ID NO: 438558 - DNA, 201 bp, Homo sapiens
aaatcaaagatttctcttttccttaccactgccttagaagagctttagtaattggaagactagactgagagtcaatgtgttttacatttccattgtttttkccagactagaaagacctaaaaatcactgcaatgagtaggggaaagacaccttaaagaactgatcagctcttgaatacattgtgtttttctttccaactgt

SEQ ID NO: 438559 - DNA, 201 bp, Homo sapiens
atgaaaacaaccataattttcatatgaatactcccaaatactttttatgaaacatttaaaacaagaagttattggctgggaaaatctaagaaaaaaagtaygtaagataaaaagaagagattaatgaaagtgggaaaatacacatgaagaacctcaacttaaaaaacacatggtatctatgcagtgggaaattacctccat

SEQ ID NO: 438560 - DNA, 201 bp, Homo sapiens
ctcctgacctcaaacaatcctcccacctctgcctcccaaagtgctggtattactgtcatgagtcactgtgcctggccctatctgcattatttattaatggkgtttattatatgtttcccccactggaatgtgagctctatgggagaaagggatcgttgttcattgatgcatcccaaacacctagaatggagcctggcacat

SEQ ID NO: 438561 - DNA, 201 bp, Homo sapiens
cagcatattagagacttttgcaggtttcctaaagttatttgaacatggaattcttctttagaacatctattaatatctgacagaataggtgtgtttctcaraaccagcttgagaaatgttgcattaggccatcatcatgaatagctgggactacaggcacctgacactacacctggctaacttaaaacttttttttttttt

SEQ ID NO: 438562 - DNA, 201 bp, Homo sapiens
gcccctttgcctataagagaatattattcaaactcaagatgaaagagaaaatctggacttatttttcagcaatgctagccaataattcttaaacagatgtkcttttggaattatccataaccatggaaagaggactttgggggttaaaattttagtttgcctttcctatatgcatgaatcttttttatttattcatttgct

SEQ ID NO: 438563 - DNA, 201 bp, Homo sapiens
gcttagctctccctattttgtttgtaggcagcatagcctccttccaggctccaaatgccaaacttcgactgatggttcttgcgcttggggtgtcttcctcwctgatagtgcaagctgtgacttggtggtcaggaagtcatttgcaaaggtatggttaatgtttcatgtacttatagacaaacaagtataaccagttaccaa

SEQ ID NO: 438564 - DNA, 201 bp, Homo sapiens
cctacctatttcatggggttcttgtgcccatattacctcatgcaaagtacatgaatgtagtaagtgctcaattaacactggccattactaaaccaaatcakacaactatgaatataaggtatattgggcagcttaaaaaataatccatttgtcaaacatgaatcaagcatctgacatgtcccaagcacacagctagactca

SEQ ID NO: 438565 - DNA, 201 bp, Homo sapiens
atctgagacgtagagcttgcagtgagctgagatcgcaccactacactccagcctgggtgacagagcgagactctgtctcaaaaaaatatataaataaattwaataaataaataaataataaataaataaaaattaaaaaaagaattgagagtaaaacaaaatgaaatgccacacagagagaatggctaattagccaacagg

SEQ ID NO: 438566 - DNA, 201 bp, Homo sapiens
  misc_feature (1)...(201): n = A,T,C or G
ctagactccatttgccattcaacaagtatcgatctagcagaatggatgccaggcaatagggataaagctgtaaacaaaacagagaaggatctctatgctgntggagggaggatggacaaaaatcatgataaataattgcaggatgatctattttagaagatgatgagagtggtgggaaaaactaagcaggggaaggagctt

SEQ ID NO: 438567 - DNA, 201 bp, Homo sapiens
ggaatcattacctgccttaaggccgaaggaacaggcagagaaaacagtgttcccagagcccagtgagacccagaaccaggacaagggaccacctggcatakaatgcagctactgccagagggactggggaaggaatccctgaatgttgctcttctcccaacgtttaatctcccattgatgcctccgattggccaaacctaa

SEQ ID NO: 438568 - DNA, 201 bp, Homo sapiens
ctgggtgacagagcgagactctgtctcaaaaaaatatataaataaattaaataaataaataaataataaataaataaaaattaaaaaaagaattgagagtraaacaaaatgaaatgccacacagagagaatggctaattagccaacagggccccagcagatgacactgaattactctaccttttcaggtctgaaacacttg

SEQ ID NO: 438569 - DNA, 201 bp, Homo sapiens
atatatatatatatatatatatatatatatatatactgatatatatatatactgatgtatatatatactgatatatatatactgatgtatatatatactgatatatatatatacacactgatatatatatatactgatatatatatacacttatatatatatatatatactataatgccaaatgaattaatttagaatgag

SEQ ID NO: 438570 - DNA, 201 bp, Homo sapiens
tatatatatatatatatatatatatatatatatactgatatatatatatactgatgtatatatatactgatatatatatactgatgtatatatatactgatatatatatatacacactgatatatatatatactgatatatatatacacttatatatatatatatatactataatgccaaatgaattaatttagaatgaga

SEQ ID NO: 438571 - DNA, 201 bp, Homo sapiens
caagagcatatgccagttcctctgaaggcaagtcccagaaactgatctgtaacacttctacttatatttcactggcagaaatttagtctaatggccatacyttgctgtacagaaagttgagaggtgcaatgtttagtcctgatggccatattcacagctaaaataccataattttggaagaagggtaaggcagatattagg

SEQ ID NO: 438572 - DNA, 201 bp, Homo sapiens
actgatgtatatatatactgatatatatatactgatgtatatatatactgatatatatatatacacactgatatatatatatactgatatatatatacacttatatatatatatatatactataatgccaaatgaattaatttagaatgagaaatatgattgttatgtttagttatgccctatgcagatgtcttggtccct

SEQ ID NO: 438573 - DNA, 201 bp, Homo sapiens
tgatgtatatatatactgatatatatatactgatgtatatatatactgatatatatatatacacactgatatatatatatactgatatatatatacacttrtatatatatatatatactataatgccaaatgaattaatttagaatgagaaatatgattgttatgtttagttatgccctatgcagatgtcttggtcccttt

SEQ ID NO: 438574 - DNA, 201 bp, Homo sapiens
ggccagagtcatgaagaagaatgaccagcccaagcggctggagtggagggacaggactgtcgttagaaacaatgttgaagttacactttctctctttaactttttttttttttgtaggatgtgtttcttggtctctctaccatgacctgggaccgatgatctattactttcctttgcaaacactagaactcactgggcttg

SEQ ID NO: 438575 - DNA, 201 bp, Homo sapiens
gatgtatatatatactgatatatatatactgatgtatatatatactgatatatatatatacacactgatatatatatatactgatatatatatacacttatatatatatatatatactataatgccaaatgaattaatttagaatgagaaatatgattgttatgtttagttatgccctatgcagatgtcttggtccctttc

SEQ ID NO: 438576 - DNA, 201 bp, Homo sapiens
tttcaatagtgaaaatcccaagagaaccagaaaaaatctgttttgctttgtatggcatagccttgtaagtcatatactgttacttccactgtcatcacaaktctgatcacattaaattcttgatgggaggaatatcaaaaacacaagataagaatactaatggaaagtgagattttgttgtagccatgtttagaaaacaca

SEQ ID NO: 438577 - DNA, 201 bp, Homo sapiens
tttgcatttctctgatggccagtgatgagcattttttcatgtgtcttttggctgcataaatgtcttcttttgagaagtgtctgttcatatccttggcccamtttttgatggggttgtttgtttttttcttgtaaatttgtttgagttcattgtagattctggatattagccctttgtcagatgagtaggttttgaaaattt

SEQ ID NO: 438578 - DNA, 201 bp, Homo sapiens
ttctactaaaatatattggattgaaaacactgcctgtggttagtagctttggaattttctggatctggatttgaatccttgttgtaggtatcagaaggaayagaattccctgcagacctaatgaaagaactacttaacaagatgctggagggacccatggaacaaataagagaggctgaggcactcagacactagttaaca

SEQ ID NO: 438579 - DNA, 201 bp, Homo sapiens
tgctttgggctgtggacccgggttcctcaccatgggctacttgggcctcctctctgccttgcagctgatttccaatagtgagtatcccaagagaacaagaraaagcctgtattgccttgtataacttagccttggagccacagatggatccctgatttctgggtctggtcagagggattatgatactgacatttattttta

SEQ ID NO: 438580 - DNA, 201 bp, Homo sapiens
acagctagactcattccttgctttaggaaccactgctctgagccactccccagaagtactgtctgggacactgtagcctcccaacaagcgacataggaaarttaacaccttgaataatttgtgacgtgatcacgacatgttttatttgtctttgttttctacagtactagatacacaaattcttactgtgaataaatattt

SEQ ID NO: 438581 - DNA, 201 bp, Homo sapiens
tctgattttttttgacccattaaccattgccacctccctccctgagttccccactaccctagtaggtaatcatttgagatggatacttagggttgggcagygcattatctgactcactcacgacctaagagaggaccttgtaaagggggctgtgctcctgggccttgacctttccagtacagcaagggtgttacatcattc

SEQ ID NO: 438582 - DNA, 201 bp, Homo sapiens
gtgggtggggccatggaactcccccaaaattatgtcctttttcttcagctaccagggccagtagagaaagaccatcaggtaggggcagggttaggtgtgtytgagctcagactctcgttgggctgggccggctgtagctgctgtgggagatgggtgtgtggatcctaggccaatggagttatgtttccaggagaattattg

SEQ ID NO: 438583 - DNA, 201 bp, Homo sapiens
agtcttgctggctacaaaattcttggctgataattttttggtttaaggaggctaaagataggaccctaatctattctagcttgtagggtttttgctgagawatctgctgttaatctgataggtttttctttataggttacctgatatttttgcctcatacctcttaagattctttttttttgtcttgattttagataacct

SEQ ID NO: 438584 - DNA, 201 bp, Homo sapiens
ataccactgcctgggccccaccccagaccaatttatcaggacctcctggggtggtatctgggctgtggaatttaaaaaattatttccaggttattctaatrtgcagttaggattgagactgtggatgatggataattcatttacatcacatgtgaaaaattcattaccatgtgaaatacaatttttttttgagatggagtc

SEQ ID NO: 438585 - DNA, 201 bp, Homo sapiens
actcctctcccagtggggatatggcttgtttggttatgaattatagtccagtgaaagcaaattgttagtttctcttgctctagactccatttgccattcarcaagtatcgatctagcagaatggatgccaggcaatagggataaagctgtaaacaaaacagagaaggatctctatgctggtggagggaggatggacaaaaa

SEQ ID NO: 438586 - DNA, 201 bp, Homo sapiens
gtagttgggtctactaggtgtgggccaccacactccactaatttaaaaaattttttgtagagacaggggtcttgctatgttgcacaggctggtcttgaackcctggcctcaagtgatcctcctgccttggcttcccaaagtgctaggattacaggtgtgagccaccacacctagactctattatttttatttaccatattt

SEQ ID NO: 438587 - DNA, 201 bp, Homo sapiens
  misc_feature (1)...(201): n = A,T,C or G
tcctaggacagacttccctgagccttagtcttttctccatatagagcagttcatcaccaaaaggcatcttggcattgcctgcctgaagataggggccgacnttaatggatctctttaagtaaccttatcttctaagatctgtggcctacatttatgagagaaaatggttgctttctgggatgatatagaatcatggattca

SEQ ID NO: 438588 - DNA, 201 bp, Homo sapiens
agagggattatgatactgacatttatttttatagagaatacaaaagaaagaaatgttttacaaggaagatgagttcagctttgggctgagtttgaggcatytgtgggacattaatggagatgtccaataggcaggtgcatatacagatctggaatccagaagggcagtgagaactagagttatagattaaggagtggccac

SEQ ID NO: 438589 - DNA, 201 bp, Homo sapiens
ctgcaatgagtaggggaaagacaccttaaagaactgatcagctcttgaatacattgtgtttttctttccaactgtgacataacactcaggagccatttaaraaagtttgttaaataataattcacaagaaatgtgaaaattatgatgaaaaacaccacagtaagcagtcaaacaagaaactaggaaaaatatttgcaactc

SEQ ID NO: 438590 - DNA, 201 bp, Homo sapiens
ttccttctgtcctgtagagggctggatggggtcacaaagcatctgcccaataggctctctctgtttctacgaagaagtcctcctgctggcatcttctccarttgttacagttttgtgtgtgaagtcattgctgtgatgaattggacctcttggttaaacagtaccaaagagctacactgcctaaactccaatcccaggttc

SEQ ID NO: 438591 - DNA, 201 bp, Homo sapiens
agaatattattcaaactcaagatgaaagagaaaatctggacttatttttcagcaatgctagccaataattcttaaacagatgtgcttttggaattatccayaaccatggaaagaggactttgggggttaaaattttagtttgcctttcctatatgcatgaatcttttttatttattcatttgctattttattttatgattg

SEQ ID NO: 438592 - DNA, 201 bp, Homo sapiens
tggctgcctggggcacagatctctattctcagcaaaggagggcagccccaggagatccctgcatcttctggtactttcttgttccagctgtgggacagggwcacacagggagttagtagtctggagtcaagtgttggtccttgtgtttggtcctttttaactctctctctgctcttcctgacacatcttttctcttgtaac

SEQ ID NO: 438593 - DNA, 201 bp, Homo sapiens
ttgcccgagtaggaatgactctgggcttcttcactatatgcagatagtctttggcaacttaggtacctaaggctttttaaagtttgttttacaaatacaayaaagggtcatatttttacattttttagagatgacctcgacaggaaactgcaggctattgctgtttcaaaactactgaaaagtagctctaatcaagtgata

SEQ ID NO: 438594 - DNA, 201 bp, Homo sapiens
ttttaaaattcaaatatgtagctgtataaatcagttttgaaggcagtatttgtatcaataaagcaaggaacagtttaatgccaaaaaagagggactaacchttcattcattcattcattcattcatttatccaataagtgtttactaaatcctctttatgtactgggtgttgttctcgggagtgggaatataataggaaaa

SEQ ID NO: 438595 - DNA, 201 bp, Homo sapiens
ttattgatttgcatatatttaactatccttgcatcccaaggaaaaatcccccttgatcagggtgtatgatccttttaaggtactgttgaattcagtttgcwggtattttgttaaggattttctacatgtgtgttcattagggatattggcttatcattttcttgtagcatccttgtctggctttggtatcaggctaataat

SEQ ID NO: 438596 - DNA, 201 bp, Homo sapiens
tatttcaagtatttgtttcaagatttagagctccttttagcagttcttgtagtgctggcttggtagtggcaaattctcttagcatttgtttgtctgtaaawgactgtatctttccttcatttatgaaagcttagtcttgctggctacaaaattcttggctgataattttttggtttaaggaggctaaagataggaccctaa

SEQ ID NO: 438597 - DNA, 201 bp, Homo sapiens
gtgtatttcaagtatttgtttcaagatttagagctccttttagcagttcttgtagtgctggcttggtagtggcaaattctcttagcatttgtttgtctgtwaaagactgtatctttccttcatttatgaaagcttagtcttgctggctacaaaattcttggctgataattttttggtttaaggaggctaaagataggaccc

SEQ ID NO: 438598 - DNA, 201 bp, Homo sapiens
atgtcatccaggaattctttttggaaggagttatttgaattggatttaatacctgttcttttggtcatttgctcattcattcatttggctaatgattaccraatgtttctttattacctggtgccagtgatacagatataaacaagttggacaagaacctgccctgccagagtttgcattctagtaggggagaattatagt

SEQ ID NO: 438599 - DNA, 201 bp, Homo sapiens
atttaacatatctgaactatgtgtattagtttgttcttgcactgccataaagaaatacttgagaccgggtaatttataaagaagaattttaattatcccayggttctacaggctgttcagaaagcatggaggtatctgttctacttctggggaggcctcaggaaacttgcaatcatagtgaaaggcaaacagggagctagt

SEQ ID NO: 438600 - DNA, 201 bp, Homo sapiens
atgatttaacatatctgaactatgtgtattagtttgttcttgcactgccataaagaaatacttgagaccgggtaatttataaagaagaattttaattatcscatggttctacaggctgttcagaaagcatggaggtatctgttctacttctggggaggcctcaggaaacttgcaatcatagtgaaaggcaaacagggagct

SEQ ID NO: 438601 - DNA, 201 bp, Homo sapiens
cacttatcaaatcgaggcatttggaacagtttatttacagttatttagtcatttttgtgtgattaaaaaaagacaagtttcttagagcaattttaggttcrtaggaaaattatatggaaagcgtggagatttttccatatgcctcatgcccccacatacatacagcaccccccactatcaaaattactcaccagaatgata

SEQ ID NO: 438602 - DNA, 201 bp, Homo sapiens
gcccgcaaaacaccaagcatatttccacctcaggacctttgcatttgtggttccccttccctaaacaccattcctccagtatctgtatggcttgatccctyccttcgttgaattttttgctatagtgtcactttattgcagaggtatgccctgaccatccaccataatatagcaacctctcctactcatcactgcctgtcc

SEQ ID NO: 438603 - DNA, 201 bp, Homo sapiens
tcttccgtcaccagagggcgagatcgcaccagccatcacattgaccgttaacatttcgggcaagctggtggattttgtcgtgacacactttgggaaccacsagtgggtttctttggcccacctaatattacacaaatgccaagaaatgttattaacaatgtactttgatttctatgaaatcacctttctcattttcttctt

SEQ ID NO: 438604 - DNA, 201 bp, Homo sapiens
aaaattgattcacataccaaaattataatttcataaacttagttcaattttaatattttaaaaattggcttctggcaataatacaattattggtgtatacyaggcatacataaatcgaatgttgtgaatcattttagtttacataattttagcttaagtaacatgtcaaatacttctacaaagtgtttgaaagatgaggag

SEQ ID NO: 438605 - DNA, 201 bp, Homo sapiens
aagctgtttgaagaaatgctttctttttttcccagtgattttcatgtagcaagtacaggcattcagaaatcattcccatgaccttatgttgtacttaacaytgggtttatctttaaaaaaaataatactttcatgtttaaaggttgcaagttctcaacctaagaaacagtttaactccttcccttttttcctttgcctttt

SEQ ID NO: 438606 - DNA, 201 bp, Homo sapiens
agaggagagaacacagaatccatagtctgacactatgtgacacagaacctatgttctagatttggttccgtggcggttaaccttggtaagttccagttctygtgtctctggaaatgggataaaattctcttttccagcttactttatagggttattggaccaacaaaatattaacagataagaaaacataaagcatatgtg

SEQ ID NO: 438607 - DNA, 201 bp, Homo sapiens
gtgaggagagatgagatgttgttaatacatgttaattaagttggtgattcagagtggtactctaggtgctgtgtgtgggtttgagagactgtatcagtaawagaagatttaggatgacaacatagcaagtgaatttctgtacaccgtaagtgccgtcacatttgcatggaaatgtatgtgtaatccagatacgtggctaaa

SEQ ID NO: 438608 - DNA, 201 bp, Homo sapiens
ttgaataatttgtgacgtgatcacgacatgttttatttgtctttgttttctacagtactagatacacaaattcttactgtgaataaatatttagagatttygttttccagtgattatggcatataaatgtgaaaatcctattaggaatgaataatttctaatgcttgtgcatgttattagctgattcaacaagattttaaa

SEQ ID NO: 438609 - DNA, 201 bp, Homo sapiens
gtcccagtgcatggtagaatgggactgacaatgatgcccatgtctcttttcattccaatacaggattatggctttgtcaagatacccaattgtgaaatctsagcatcaccttcttccgtcaccagagggcgagatcgcaccagccatcacattgaccgttaacatttcgggcaagctggtggattttgtcgtgacacactt

SEQ ID NO: 438610 - DNA, 201 bp, Homo sapiens
ttattaggatatcgacagcactgatcatgacagatggtgtgaatacattatgtatcgagggctgatcaggtgagcacaggggtttgattttgtttttaatytattattaatgtgatcttttgggtctgtctgagaaggaaaaagaactttatggaagcaattaatttttgttgctttttataaaaagcaatcaatgtttat

SEQ ID NO: 438611 - DNA, 201 bp, Homo sapiens
cgggaggacgcggcggcgggaacctgggggcgcagggctagggcagcgggcccgacccgcacggctttcctggaaagcgctgcccctcgccgcggcgatgmcctcgctgtggagagaaatcctcttggagtcgctgctgggtaagccgaagcccctcgccgcgagttcgcgggtgccagctccccgggccatgtccagagc

SEQ ID NO: 438612 - DNA, 201 bp, Homo sapiens
tactggtttgatctggtgggttacaggtatgtggaatttacctgcagatagaacacgactgagcttggttatccagtttgtttgcaagcatgcgcaactcractgaaagtagatacaaccatacaaatatgtactgtggccaaatgggctgttgtaaacagcaactataatgcagatgtcaccaaggtcaccggtgactac

SEQ ID NO: 438613 - DNA, 201 bp, Homo sapiens
cttccaggtcctccaagaagaacttcctggagggtgccatggcactggagctgaggcactgaaggtcagtgtcagcaaatttattttattttatttatttwaaaaaaacccaattatttcttttttctgtttagttctgtggctgcttgttggtgtgggattgttgggattaggactacggcataaagcctatgagagaaa

SEQ ID NO: 438614 - DNA, 201 bp, Homo sapiens
atcctcctttatgccacatactataatactttgagtcaatcaatttttatatatgtgttatatatgtgtacacacacacacacacacacacacacacacayatatatatatgtatctgttagaaactttatattctgtattacagattttaaaaaatgtttttcttcctgtctagacactaagtcccttgagggcagggaa

SEQ ID NO: 438615 - DNA, 201 bp, Homo sapiens
gtgtgtttctcagaaccagcttgagaaatgttgcattaggccatcatcatgaatagctgggactacaggcacctgacactacacctggctaacttaaaactttttttttttttttgtagaggcaaggtctcactattttttccaggctgctctcaaactcctgacctcaaacaatcctcccacctctgcctcccaaagtgc

SEQ ID NO: 438616 - DNA, 201 bp, Homo sapiens
ttattttcctataacagaattatgccagccctcctcctttcccttaaaaggcaatatttaatgattatagtcaggttttctgactctaagtaaaaaaaaamccactttattatatagcaaatactatatttggtttatgtgaggagagatgagatgttgttaatacatgttaattaagttggtgattcagagtggtactct

SEQ ID NO: 438617 - DNA, 201 bp, Homo sapiens
cttatgcttatttccccagacaagtaaggtcatatccttgagagtcaaacctaatctagttttgttgtctctctggagtattaaatagtagctttaaagactctaagaaaagcagatttaaggcttctagaaggctgcttgcagtagaagaaagcagggccataattcaccagcttcatcttcctttctgatcacttactc

SEQ ID NO: 438618 - DNA, 201 bp, Homo sapiens
ttatgcttatttccccagacaagtaaggtcatatccttgagagtcaaacctaatctagttttgttgtctctctggagtattaaatagtagctttaaagactctaagaaaagcagatttaaggcttctagaaggctgcttgcagtagaagaaagcagggccataattcaccagcttcatcttcctttctgatcacttactca

SEQ ID NO: 438619 - DNA, 201 bp, Homo sapiens
gaagtggggagaaataggcagtcaggcaggtggcattgccctgtgatggtgcaatggaatgtattgatgaacttattgagctatggggcattaagatgctractggggccactttctgcttcccactcctttctggagttcttggccgaagtagtgaagagcctgctctagctacccttgaagggtgggtcccaattatac

SEQ ID NO: 438620 - DNA, 201 bp, Homo sapiens
gaggatcttggcctcatggtgtaagaagggagaggatggtttatctcctgccttcactggggcctaggggacccaggagcaaattccaccctttccatctytcagccaaggagaagccaccttggtgacgtttagttccaaccattatagtaagcggagaagggattggcctggtctcaaccattacagggtgaagatata

SEQ ID NO: 438621 - DNA, 201 bp, Homo sapiens
ggatggctgggtcaaatggtatttctagttctagatccttgaggaatcaccacactgttttccacaatggttgaacttatttacactcccaccaacagtayaaaagcgttcctatttctccatatcctctccagcatctgttgtttcctgagtttttaatgatcaccattctaactggtgtgagatggtatcccattgtgg

SEQ ID NO: 438622 - DNA, 201 bp, Homo sapiens
gtgaagtgggaggatcttttgagcctgggaggtcaaggctgcagtgatggtgccactgcacttcagcatggatgacagaatgagactctgactcaaaaaaraaaaaaaaaagagagaagaaaagattctatttaaacttagggagaaatgagattttttttgtgtgttttcttatgttttggtatatcccttgaaacaaat

SEQ ID NO: 438623 - DNA, 201 bp, Homo sapiens
gtaaaggaagaactttaatggtaaatggtgagtcctggtaaccaggagaaactcaccattcaactctgggccaatcatattacatccctggccttgctttwctcacaagaagaatgtaactaaacttcagggggaaactttctcacatatataaaatcagcatttgcttttcagacatttcctaatcctgtatgttagaat

SEQ ID NO: 438624 - DNA, 201 bp, Homo sapiens
tgatccacctgccttggcctcccaaagtgctgggattacaggctcgagccactgcatctggccctgttttctaatttgtaaaataggattaatagtagagmctacctcataaagttgtgaaagttaaatgagttaatataaagttaatatacagggcttggaagaggggttggtgcacagtggctgcccagtcaatgcact

SEQ ID NO: 438625 - DNA, 201 bp, Homo sapiens
gctggcatcttctccaattgttacagttttgtgtgtgaagtcattgctgtgatgaattggacctcttggttaaacagtaccaaagagctacactgcctaarctccaatcccaggttcctaggttatctttactagctgtgtgaacttggaaaggctacctgatctctctgtgtctgttttcttgtttttgagatggagttt

SEQ ID NO: 438626 - DNA, 201 bp, Homo sapiens
gttcaccctgcaccttctcagcctatctgagcataccaagtattttttgtagtttcctttgaagatttgttgggtcctgggtgggggtggagtcacccackgtaatacactgcattttactcagcaaattcagtttagatggctctttttcctcaaaactctccgctgagcccccagacccctggcctcccttctgtcacc

SEQ ID NO: 438627 - DNA, 201 bp, Homo sapiens
cagagtttggatgacaggttaaagagcatggcatgatgagaattttctgcatgtgacagaaaataacagagagtgtatttctttttttttctgattttttwaaaattttattattattatactttaagttttagggtacatgtgcacaatgtgcaggtttgttacatatgtatacatgtgccatgttggtatgctgcaccc

SEQ ID NO: 438628 - DNA, 201 bp, Homo sapiens
agttatcagatgtccaacaaagtgatactgacattaagtgccatagccacacttgatcgtattggcacaggtaatactgtaacttaggaattttctctttkcagagcttacctttcctatgtgaatgttgcacatcttggaaagaaaatctataaaagtagtctttctgcattatatctatatttcagctttttcttcctc

SEQ ID NO: 438629 - DNA, 201 bp, Homo sapiens
tctcctgttaggacagaatctgtctggaggtatttgacctgagccctctaactgccatcttggggacaatgtggggagccctggtgtgggctcctaggacwgacttccctgagccttagtcttttctccatatagagcagttcatcaccaaaaggcatcttggcattgcctgcctgaagataggggccgacgttaatggat

SEQ ID NO: 438630 - DNA, 201 bp, Homo sapiens
tcagattcttttctcccatagggtgctcccctgatgtggtgctctccccttttccccagggatgggactttctgagagctgaactgcagtgattatttctyttctggatctagctacccagcagagctactgggctctgggctggtacttgggagtatctgcaaaaaatcctatgatgtgatccatcttcaaatctcttgg

SEQ ID NO: 438631 - DNA, 201 bp, Homo sapiens
tctttcactcttcaagattccttgcttttccgtgtttcaaaaatgccatttagagttccatgatgaagctccatttccctttctcctttacatgtaacagkggagctcccagccttccacccagctgtagggtccatgtctgcttactcaaagacctgacccatctcttcccagttacaccctttaggaccccagaagtat

SEQ ID NO: 438632 - DNA, 201 bp, Homo sapiens
ttttgagcttaatttatgtgacagctacttaaatgagtcctatattctagctattattgtttctgggtttccttctaaagtttagtcaaatttcttttttyctcctcttgcaactttttgccaaaatagcaacagaataaaatagtttgtggttgttttaaaagacacacagctatcagttatttatcaaactgacgctgg

SEQ ID NO: 438633 - DNA, 201 bp, Homo sapiens
attctcctctgcaaaatggggataatattagcatttatcttacaggcacatgagaattaaatgaataataattacaggggaaaatcttaaaatagtgcctrgtatgtagtgcatgctatggttttgagcttaatttatgtgacagctacttaaatgagtcctatattctagctattattgtttctgggtttccttctaaag

SEQ ID NO: 438634 - DNA, 201 bp, Homo sapiens
  misc_feature (1)...(201): n = A,T,C or G
cctttctgaatggtttttacatgccaataactttttatttattttttatttttttagatttggatcctacaaagaaggacacaattatgaaaacaaccatnattttcatatgaatactcccaaatactttttatgaaacatttaaaacaagaagttattggctgggaaaatctaagaaaaaaagtatgtaagataaaaaga

SEQ ID NO: 438635 - DNA, 201 bp, Homo sapiens
ttctatcatatcaaccagagctgtataattaaatagttattcatgtgcaaagagttaatctgcagcacattaacacatgtagacaatttagaagttctgcsaaaatagatttttatatgcataaatgtaacatgaatagcatttcaggcttaatggcccctttgcctataagagaatattattcaaactcaagatgaaaga

SEQ ID NO: 438636 - DNA, 201 bp, Homo sapiens; identical to SEQ ID NO: 218237

SEQ ID NO: 438637 - DNA, 201 bp, Homo sapiens
cccccagcccctcctgacctggtcctttggtttctctttagggctttctgtctcctcccacagggctgagaatggcagctcagggacaagtgggggctggrgactgcttagtctccccagtggctctcaggggatttgagggtttgacgccagctgccaccccgggctgtgcccctcctctgctcaggagcacatacaggg

SEQ ID NO: 438638 - DNA, 201 bp, Homo sapiens
ccagctgccaccccgggctgtgcccctcctctgctcaggagcacatacagggatgcgacacccacttaaactcgaagttgcaaagatgcaaatgagactgsggtctcaggcaccagagaccacccatgggcacgtggcttttgggagtggggacctgctgccacagatctctgaagagtctggacctgctgggtctcaccg

SEQ ID NO: 438639 - DNA, 201 bp, Homo sapiens; identical to SEQ ID NO: 218238

SEQ ID NO: 438640 - DNA, 201 bp, Homo sapiens
cgtgagctgagtgactgatacttggtgtcctggatgagggcgtggtggagaggggccacagtgggtgtttcctgaccctcttccaggaaggtgctgctgcygctgcagggaggacacatacaggatgccccttcctgccccctgcctcccattgggcccacaaaagccagggcaagcctcccctccctgccagccacctgg

SEQ ID NO: 438641 - DNA, 201 bp, Homo sapiens
tgggtactggcctgctggggtacacacaatgctgccatagccagtctgccccaacacccagcccggggccacatctcaggtctctcagtcctggggagccyggtgccccacccctcacatcctctctccctgagtcagggcctgggtctcgtgagctgagtgactgatacttggtgtcctggatgagggcgtggtggagag

SEQ ID NO: 438642 - DNA, 201 bp, Homo sapiens
gggcccacaaaagccagggcaagcctcccctccctgccagccacctggtctgcttcccagaaattctgtcttgcaggctgttgggaggatcccagtacttygtaaactaaagcaagggaggagtggccgttctctctctttgttcattcattcaccttttcattcattccttcttccctccattcccccatctgtccatcc

SEQ ID NO: 438643 - DNA, 201 bp, Homo sapiens
tgaaggggtttggaggctccctgcgtgggtactggcctgctggggtacacacaatgctgccatagccagtctgccccaacacccagcccggggccacatcycaggtctctcagtcctggggagcccggtgccccacccctcacatcctctctccctgagtcagggcctgggtctcgtgagctgagtgactgatacttggtg

SEQ ID NO: 438644 - DNA, 201 bp, Homo sapiens
aggaagtccaggaatccccttcctgtctttctggtttctctctgggcttcctgctcgggtcacaagcgccagaagcgccggcggctgcggggaaacggtakgcgggggatccagccccaagcaaatctcccgcgggcgcgtgggaggtggggccagtgctgggcgcagccgcgcctcgcgcctcccgccccccccggggct

SEQ ID NO: 438645 - DNA, 201 bp, Homo sapiens
ctgctcgggtcacaagcgccagaagcgccggcggctgcggggaaacggtaggcgggggatccagccccaagcaaatctcccgcgggcgcgtgggaggtggsgccagtgctgggcgcagccgcgcctcgcgcctcccgccccccccggggctgcggcggggacgcttctctggagggtgtggcggaaacttgaggcttggag

SEQ ID NO: 438646 - DNA, 201 bp, Homo sapiens
ctctacttgaaatgttttcaggcaaatcacctggccttaagagctggtatcttctacttaagcagattgagaatgcacgaaagtacagagaactgtatacrtaaaaaaatcatctcttgtatagaggtaataggtcctcagcattgctttgtcaagagaaagaagggctaatatgagggaggatatggaaaaatcatccgt

SEQ ID NO: 438647 - DNA, 201 bp, Homo sapiens
agaagacttggcattttatttggaagatagacatctatttgcaactgtcctgagcccctattttcctcccacctttcttggggaaacttgtttttaagggrtgccactgtttttgtaacatgttgctcctagctcttagcattcatggtactgttgtaaccgtccagtgggttcactttgtctgctagatagagccgattt

SEQ ID NO: 438648 - DNA, 201 bp, Homo sapiens
actatggaagtcgatgctatagaaattgatttccttgaaactgttagtgtcagtgtaaatttcagaaagtcaagggtgcagatacccagctggaaaccacyggactgacgattgttgtgcttaggataaggcactttgtgatgagttaggaaaacaacaatcagatatgtacacttcaaaattgacctcaggaaggtaagc

SEQ ID NO: 438649 - DNA, 201 bp, Homo sapiens
ggcattttatttggaagatagacatctatttgcaactgtcctgagcccctattttcctcccacctttcttggggaaacttgtttttaagggatgccactgyttttgtaacatgttgctcctagctcttagcattcatggtactgttgtaaccgtccagtgggttcactttgtctgctagatagagccgatttatcaagacg

SEQ ID NO: 438650 - DNA, 201 bp, Homo sapiens
tagccctctttgggccattattctcatttatgaaccaagcccttttgtgaaaggagttggcagtaggagaattgaagtacatctgatcttagtgttgattmtatgataaattttttctccctacgatattcctgagattgagattctgatgtttctattttacagataaaactctgcaaagacaatgtctagcacttatat

SEQ ID NO: 438651 - DNA, 201 bp, Homo sapiens
atacccagctggaaaccaccggactgacgattgttgtgcttaggataaggcactttgtgatgagttaggaaaacaacaatcagatatgtacacttcaaaaytgacctcaggaaggtaagcagaaaaatagataaaatgggtgagaaaatttctttattatgtttcattgtgattgtctcacttttagcaagaaaggaaaag

SEQ ID NO: 438652 - DNA, 201 bp, Homo sapiens
ggtacagttgtgaaacttgttttttaaaatgcatcctgtgatttaagtttttcagatcctgaaactgagttaaaatttgatcagtaataatgctttatttmtctgttcttctgagagataattcctaatgttgtttttccaactagaagtctgaagagttattgtgttcagtgtgtaccttaagagtggtatgaatttgcg

SEQ ID NO: 438653 - DNA, 201 bp, Homo sapiens
gatatgtacacttcaaaattgacctcaggaaggtaagcagaaaaatagataaaatgggtgagaaaatttctttattatgtttcattgtgattgtctcactwttagcaagaaaggaaaagccagtggtagagtcatctaaatacgctgcttgcccaaaaagctgaattagatttaggagtaaatgtttttatttttctgaag

SEQ ID NO: 438654 - DNA, 201 bp, Homo sapiens
acattccttcctgagaactgtctagtcctggtttgggatttatcttaaaggtctagaaaggcaacattttacttcagcaaaacttgattctatattgttgttttttcttaatgtgtcaaaattgttttgttactaggatttcctatgttgttattaaatgtattcccctgatcaaggtcactggcctagaaaacaaagatt

SEQ ID NO: 438655 - DNA, 201 bp, Homo sapiens
tactcatgttactaccataaaagtcaagatatagagccatacccacccactcgaaattccctcatgtccctttgtagaatgtctcttcctctaccgctagsccttggcaaccactcatctgttttctgatcttgcacttttgcttttccagaatgtcacatcgatggaatcttgcagtaggtaaatgtagaatctgacttc

SEQ ID NO: 438656 - DNA, 201 bp, Homo sapiens
agcagataaaatgtaggaacccagtcatatccattaatcaaagctaagccctttcaggaatttactagttttttttttttttttagttttcacacatttayaaaacaatttgggaggaggctggaaatcatcttgactgaagaccaccaatggcagcagttcatttgggtacagcagcaagcatcagttaaatacctatca

SEQ ID NO: 438657 - DNA, 201 bp, Homo sapiens
ggcatcttggtgcgcctaaagagaaaggaatgtgcttattaaggcccactgttttactggggcccatcgtgtaagtgtgaagcttggtgattacccgggaractctcggctgtccaccccagtccttctgtgtcccagctgtcttttctgtgttttactgtctgctctttcaggcctcttgttagaaaagtgatttctttg

SEQ ID NO: 438658 - DNA, 201 bp, Homo sapiens
cagtaataatgctttatttatctgttcttctgagagataattcctaatgttgtttttccaactagaagtctgaagagttattgtgttcagtgtgtaccttragagtggtatgaatttgcgggagtcaggacacactgtaagaaaggtagaagagaaataagtgagcaagagagaagtggaacaagatgcatgtgggaatat

SEQ ID NO: 438659 - DNA, 201 bp, Homo sapiens
atgtgtgtgagttgtgtttatgagataagaaatgtagtatcatggaaaacttactgcaatatgaggtaagaaatctaaaccctttttatgctcttcagttkgttagctgtgtctttgggaaagctttacctgtgatttcagttgaagtctttaatgtgacagtgacatttctcacaattttacactttcatccactgattt

SEQ ID NO: 438660 - DNA, 201 bp, Homo sapiens
acctcatctcttctaaaaacacaaaattagccaggcatcgtggcgcacgcctgtagtcccagctactcgagaggctgaggcatgagaatcgcttgaacccrggaggtggaggttgcagtgagtggaaatcccaccactgcactccagcctgggcgacagcgtgagactgtgtctcagaaaaaaaaaaaaagtgcgtaaaat

SEQ ID NO: 438661 - DNA, 201 bp, Homo sapiens
tgcaatatgaggtaagaaatctaaaccctttttatgctcttcagttggttagctgtgtctttgggaaagctttacctgtgatttcagttgaagtctttaaygtgacagtgacatttctcacaattttacactttcatccactgatttaaaactgctgaaatccctacttatagctgatgtgcaacaaaggttctacaatca

SEQ ID NO: 438662 - DNA, 201 bp, Homo sapiens
gcaatatgaggtaagaaatctaaaccctttttatgctcttcagttggttagctgtgtctttgggaaagctttacctgtgatttcagttgaagtctttaatrtgacagtgacatttctcacaattttacactttcatccactgatttaaaactgctgaaatccctacttatagctgatgtgcaacaaaggttctacaatcat

SEQ ID NO: 438663 - DNA, 201 bp, Homo sapiens
agggaactcatgggaatctctccctcctaaagctttatcaccagaaggaaactagtaacagttccttggactgtgaacatttcaaaggggtattttgaatrtaatcattacattgcagcagataaaatgtaggaacccagtcatatccattaatcaaagctaagccctttcaggaatttactagtttttttttttttttta

SEQ ID NO: 438664 - DNA, 201 bp, Homo sapiens
agcaagcatcagttaaatacctatcaacatagctgggcttggtatggatgaatgataagcttgtgattttcaagcaaggaccttgaggacataaaggacaytaaatacagaaatggtttatattactatgaagcaatattaatgacagacttttgcttttctcttattcacattgaaatatggaggggttgcagaagatga

SEQ ID NO: 438665 - DNA, 201 bp, Homo sapiens
tgcaggtgttgcatccatttacaataggaaagcatccagggaactcatgggaatctctccctcctaaagctttatcaccagaaggaaactagtaacagttmcttggactgtgaacatttcaaaggggtattttgaatataatcattacattgcagcagataaaatgtaggaacccagtcatatccattaatcaaagctaag

SEQ ID NO: 438666 - DNA, 201 bp, Homo sapiens
acataaaggacactaaatacagaaatggtttatattactatgaagcaatattaatgacagacttttgcttttctcttattcacattgaaatatggaggggktgcagaagatgatggggaggaacaaatgcaggtgtctaacttacaaatatttaatatttttgtgtttggatttaggcttgctatcagaggaagtggagaa

SEQ ID NO: 438667 - DNA, 201 bp, Homo sapiens
aatttaagctgaagctccctgttattcttgtagatgtatattaaacggacgaaagttggcagggacttttaaagtattataatttatattcagtaaaattyactcttttggtgtagatttctatggtaaacatatatactcatgttactaccataaaagtcaagatatagagccatacccacccactcgaaattccctcat

SEQ ID NO: 438668 - DNA, 201 bp, Homo sapiens
ggtctcctacattaaaacaatatgagtctcttaaaatattgatttgttcttagtaagattacaagaggctttgatttttaattctgcaatgtttccttaayagccattctgaattacaaactaattcctatttctgccacattccttcctgagaactgtctagtcctggtttgggatttatcttaaaggtctagaaaggca

SEQ ID NO: 438669 - DNA, 201 bp, Homo sapiens
tccaggggcatgagatgtgttttcatgtctaacatttgttgagggtgtgttctctgcctggaaccctgtcagacattttagatatatttccccatgtaatrctcatggtgagctggtaagatgagatgtattgttctcattctattaagaagtaaggtaattatataatttgtcatctagattaagacatatagggcatta

SEQ ID NO: 438670 - DNA, 201 bp, Homo sapiens
tcacaagctatctaccgtttgcaataatttgataaataatcctttgtgaacaaatatggaagcatttgctttttctctctacttgattccttcaaaattcrgaaactatttgtggatatttttagttttatttatacaacttcagtaaaaatccactctctctttataagcaggatccagttggaaacattatttatattg

SEQ ID NO: 438671 - DNA, 201 bp, Homo sapiens
gcaaccactcatctgttttctgatcttgcacttttgcttttccagaatgtcacatcgatggaatcttgcagtaggtaaatgtagaatctgacttcattcayttagcaataatgcattttcaagtcatctgtattatagtatgtatcatttgtcaaagaaaaacaagtctggacttagggagaaactttattcaaaaggact

SEQ ID NO: 438672 - DNA, 201 bp, Homo sapiens
ggctgaggcaggagaatggcatgaacccgggaggtggaagcttacagtgggccgagatcatgctcctgcactccagcgtgggcgacagagactctgtcttaaaaaaaaaaaaaaagttagtggtgtgggagagagcaggcaaagtctaggcgtttcagcaggaaatggtgcaatgtggtctgtggtcaggttaaggcagga

SEQ ID NO: 438673 - DNA, 201 bp, Homo sapiens
tatggtcagtaatgagatcttattggtcagtgactttttttttttttttaaatggagtctcactctgtcacccagagtggagtgcagtggcatgatctcakctcgctacaacctcccatctcccgagttcaagtgattctcatgcctcagcccctcaattagctggggttacaggcatgtgccaccacacctggctaattt

SEQ ID NO: 438674 - DNA, 201 bp, Homo sapiens
cttcaaaattgtttggctattctagttctttgctttttcatataattttaaaattaccttgcttatttctacaaaaaattcatactgcaatgtttatcagkattgcactgaatctctaaacctgtttgggtataattgacatccagcaatattgcatattccaatctatgaatatcttatatctctctcttgattcaagtc

SEQ ID NO: 438675 - DNA, 201 bp, Homo sapiens
catgtggtgaatttacatttaccataacaaactgcttaactgttttccaaaatgcccataacattttgcatttccagtgatgatgcatgaaaattccagtkgcatcctgtccattctctcactgctataaagaaatagcctgagactgagtaatttgtaaagaaaagaggtttaattggctgaccattccacaggctggcc

SEQ ID NO: 438676 - DNA, 201 bp, Homo sapiens
atttgggggaagttttaaggggagagttacacattaccctagtagcaatgaaaaagaattacggaagtcttagtattctgaacctttaagacaattttgcrttagtgtagaaccagaaagaataaaggttgatatttttatatgagccaaaatccaaacgatatttactgcttaagatcatccaatcttacccatctttcc

SEQ ID NO: 438677 - DNA, 201 bp, Homo sapiens
aaacttacaattcatggcagaaggcaaagggggagtccatacttcacttggccagagcaggaggaagagaggaagtgagggagggcaccacacagttttcraccgccagatctcacgagaactcactcttatcacgacacagtgccaagggggaaatctgcccccatgatccaatctccttccaccagaccccacctccaa

SEQ ID NO: 438678 - DNA, 201 bp, Homo sapiens
acttggccagagcaggaggaagagaggaagtgagggagggcaccacacagttttcaaccgccagatctcacgagaactcactcttatcacgacacagtgcsaagggggaaatctgcccccatgatccaatctccttccaccagaccccacctccaacgctggagattacaattcaacataagatttgggtggggacaaaga

SEQ ID NO: 438679 - DNA, 201 bp, Homo sapiens
ggtggggacaaagatccaaaccatatcacatcccttcctcaccagcagttgtttctttttctgttttgtttgccactctaataaccatgtagtagtcactsatggttttaatttgtatttctcaaatggctggttatttcaagcatgtttttatgcacttgtttgctattcatatatcctctttaatcaagtatatctcca

SEQ ID NO: 438680 - DNA, 201 bp, Homo sapiens
gttttgcattaggacactcaattgttccagcactacatgttcagaaaatattaccccttacctacctgattactttccacgtctgtcaaatgtcaattgaygatacacgtttagatttgtttctgaaaccttttttctgttccattgatttatgtgtctgttcttttgtcaatatcatactgtctttgtttctattacttt

SEQ ID NO: 438681 - DNA, 201 bp, Homo sapiens
tggaggggttgcagaagatgatggggaggaacaaatgcaggtgtctaacttacaaatatttaatatttttgtgtttggatttaggcttgctatcagaggargtggagaatgtgccttcctgaatgacaatggagtcaacagtggcagaatctacatgaacagaaaatggatttgtagcaagccaaacaattatgtctacag

SEQ ID NO: 438682 - DNA, 201 bp, Homo sapiens
gtttctgaaaccttttttctgttccattgatttatgtgtctgttcttttgtcaatatcatactgtctttgtttctattactttgtaaattacgaaagcagsttccctgatttccaaatttggccatttttttttccttcaaaattgtttggctattctagttctttgctttttcatataattttaaaattaccttgcttat

SEQ ID NO: 438683 - DNA, 201 bp, Homo sapiens
tagaaaggcaacattttacttcagcaaaacttgattctatattgttgttttttcttaatgtgtcaaaattgttttgttactaggatttcctatgttgttaytaaatgtattcccctgatcaaggtcactggcctagaaaacaaagattctgtgttttaccaagataattcccagtgcttcatggtgtctttattaggcttt

SEQ ID NO: 438684 - DNA, 201 bp, Homo sapiens
tatgtcactgggggaaagcatttattctttcatcgttaaggttgttgctagttgtagtttttctgtagatgccctttatcaggttgaagaaagttcttcartttctaatttgttgagtcttactatcgtggatgaatattaagcttttcacatcctcttgctgcatttattcagatgctcatatgttgtcccttgtctcat

SEQ ID NO: 438685 - DNA, 201 bp, Homo sapiens
ctctttgggccattattctcatttatgaaccaagcccttttgtgaaaggagttggcagtaggagaattgaagtacatctgatcttagtgttgattctatgmtaaattttttctccctacgatattcctgagattgagattctgatgtttctattttacagataaaactctgcaaagacaatgtctagcacttatatctcca

SEQ ID NO: 438686 - DNA, 201 bp, Homo sapiens
cccagtcatatccattaatcaaagctaagccctttcaggaatttactagttttttttttttttttagttttcacacatttataaaacaatttgggaggagrctggaaatcatcttgactgaagaccaccaatggcagcagttcatttgggtacagcagcaagcatcagttaaatacctatcaacatagctgggcttggtat

SEQ ID NO: 438687 - DNA, 201 bp, Homo sapiens
gcacttatatctccagtaactcctgtcaaggtttattgttgcttgttcatcattgcagtcctgactacaagtgtgattgcactttctattgttttgtcagrtaagttacttgttctccaaactgtacaatattctccatatgtttttgttgtcaataaatatttattaagctccattatgtgcctgtcactgtgtgaaatg

SEQ ID NO: 438688 - DNA, 201 bp, Homo sapiens
aattttctgtcacaagctatctaccgtttgcaataatttgataaataatcctttgtgaacaaatatggaagcatttgctttttctctctacttgattcctkcaaaattcagaaactatttgtggatatttttagttttatttatacaacttcagtaaaaatccactctctctttataagcaggatccagttggaaacatta

SEQ ID NO: 438689 - DNA, 201 bp, Homo sapiens
tatattgagactaggtaggggagggtggtcagactctggatattttgaaagctgagccaacagtattttatgtcaaattggataaaacgtctcagaggaaygtcaaaggtaagcctgtcttcttttgagccttggcaagaatgcatttgccgtccattgatatgagaaaggctatgggtataggaattccgcttacggaac

SEQ ID NO: 438690 - DNA, 201 bp, Homo sapiens
ggcaaccactcatctgttttctgatcttgcacttttgcttttccagaatgtcacatcgatggaatcttgcagtaggtaaatgtagaatctgacttcattcmcttagcaataatgcattttcaagtcatctgtattatagtatgtatcatttgtcaaagaaaaacaagtctggacttagggagaaactttattcaaaaggac

SEQ ID NO: 438691 - DNA, 201 bp, Homo sapiens
ttgtagttaagaatgtcagagtttttataaatgggctcttgaggagggggctcttgaggaggggcttgtgaggaggggatgtcttatctttctagggcccmagggtttagttgggaccaggtgtgccatctgtacagagcagatttttttatcatctcttaacccactccgtgaccacacaggccaactcttagtctgtgt

SEQ ID NO: 438692 - DNA, 201 bp, Homo sapiens
ttggaacttatattccagcagaaaaacacaagtaaaaataaataagggtggaggtataacaggttgcaataggttgacaaaactaagccttcttaggaagrtgacatttcagcaaccttttgaaagagatggaggaaccatgtgaaggaacctattccaggcagagaacaagtagaccaaaagcctgaaggaggactcttc

SEQ ID NO: 438693 - DNA, 201 bp, Homo sapiens
gttaaagctgaaatactaagaaggatcccattccaggggcatgagatgtgttttcatgtctaacatttgttgagggtgtgttctctgcctggaaccctgtsagacattttagatatatttccccatgtaatgctcatggtgagctggtaagatgagatgtattgttctcattctattaagaagtaaggtaattatataatt

SEQ ID NO: 438694 - DNA, 201 bp, Homo sapiens
attggattggccttagaagagaatcatcccatcgcatttggaaatggacagacaacatggaatataataacatgtatgttttgagacttctcatcttttgytgtgtttatgtatggttatgtgtgtgagttgtgtttatgagataagaaatgtagtatcatggaaaacttactgcaatatgaggtaagaaatctaaaccct

SEQ ID NO: 438695 - DNA, 201 bp, Homo sapiens
gaactgggaattagtctcactccagaatttatgctgcttaattataccacgctgccagtgaaaaagagaagggatagggaagagagactccagagtaataygaaagaaaggggctcatggtgttagtttctgttttattatagaatttcctgaaaagatacaaaggcccttctgaccattggattggccttagaagagaat

SEQ ID NO: 438696 - DNA, 201 bp, Homo sapiens
attatgtctacagttgccagttatgtccccactgggatactacctagtagagctgtgagaagagggccaccatcctccagactccagaatggtggaatcakcagcagcttccaccatgcccctggaaaaactgcaagtaacagacctgcacatgtatcccctacatctaaaataaaagttggaaaaaatggaactttgatg

SEQ ID NO: 438697 - DNA, 201 bp, Homo sapiens
gtttctttttcatcccaatttctactctttttccagtaactggaagattccctgggggtggggagaattcgatttttatctctagccctctttgggccatwattctcatttatgaaccaagcccttttgtgaaaggagttggcagtaggagaattgaagtacatctgatcttagtgttgattctatgataaattttttctc

SEQ ID NO: 438698 - DNA, 201 bp, Homo sapiens
ttctcactgtttgtgactctgtgattcaaatgttttcacaaaccttccctggcactgcgtattagatggattgaaagatgctgaaacgtaaggccgggcayggtagctcacgcctgtaatcccaacactttgggaggccgaggtgggaggattgctagagcccaggagatcgagaccagcctaggcaacatggtaaaaccc

SEQ ID NO: 438699 - DNA, 201 bp, Homo sapiens
tgtgaagggtctacacgttcaacctcttccttgtaagttaatgagttagctaccaagttttgaggaagctagcagaaaacaggagacccaggatcagatayagaggacttcgttactcatggcagagcaaacagcatgagctttatttctgcactgattcccattgccctggcccctagtcccacagggaggatgtggaac

SEQ ID NO: 438700 - DNA, 201 bp, Homo sapiens
acattcttcaaatctgatgcctgttatgtaaaatttccagatttcaaaatgtatcctttttcctgcatttatctcgctttccttcacacccggggggagtytgttaaactgcagtgaccactggcagagtcccaagccaagccaaaccgtgcaaacatgaaacggccccacaaatcatgcaaaccctacacgctgtccctg

SEQ ID NO: 438701 - DNA, 201 bp, Homo sapiens
gattttttttttttaactctgctccacttaatttaagagttacacaaaatcaatttgtggtctatctcccttcacctagtctctatcatgtaggagggaaytggaaaattccatctggtgtgtttcaatgtttcctcaagcgcaacttcctttatctcaccaagatcttgttaaattgcacatgactttagtcctggacgc

SEQ ID NO: 438702 - DNA, 201 bp, Homo sapiens
gactcagctgacgaaactccagttgcctggtgagaacagagtgattttgatgacttttgcagaggatcagaaagaggggaaacggattcatttgattcatytgtggtttcctgttttccataaggagatagttacaggattaaatttctcctcccttttccctatgcactcacacctgggtcccaggacagcaggaccaat

SEQ ID NO: 438703 - DNA, 201 bp, Homo sapiens
caacaataataataaattatatatttaaaaatttgttaaaagggtaggtctcatgttaagtgtttttaccacaataaaatatttgtttaatgtcctctacrtggctattatgattggaaaaggcataccttgaacagagatgaataaatctgcatatctgtgaaatgtcagttcagcatgttgatcgtcagtaatcttttc

SEQ ID NO: 438704 - DNA, 201 bp, Homo sapiens
cctgccccagtggctgggaggcgcagactctggaacacaggttacacctctcatttcagtgcttagaagagcagaggcagctgtacaggggaggcgcgggycacagcgtgacatgctcacaccccggacaggtctggagacagcctcctgaaaccgccctgggggccccagaagccctcaggtctccagggcttgtcactc

SEQ ID NO: 438705 - DNA, 201 bp, Homo sapiens
agcgaccacagagctgacagcagcagacttcgattgtgcacagaatgccagccactgttgcttggtggtttatcatctaaactctcacaaaagccctaagrggtaggaacaattacaaaccaaccaccttttacagatgagataattgaagttcagagaggttcagtacttggctagtgatcgcacaggtaggaattagct

SEQ ID NO: 438706 - DNA, 201 bp, Homo sapiens
gagggctgaggtccaggaagagacttcgggaggagatcagacttggaggatgacaggggtgggagtgcagacagcgaccacagagctgacagcagcagacwtcgattgtgcacagaatgccagccactgttgcttggtggtttatcatctaaactctcacaaaagccctaagaggtaggaacaattacaaaccaaccacct

SEQ ID NO: 438707 - DNA, 201 bp, Homo sapiens
ctatgaagatactacccgagactgggtaatgtataaaggaaagaggtttattgactcacagttccgcatggctagggaggcctcaggaaacttacaatcayggcagaaggcaaagcagaagcaagcaccttcttcgcaaagcagcaggaaagagaatgaaggccaggggaaacttccatttataaaactatcagatctcac

SEQ ID NO: 438708 - DNA, 201 bp, Homo sapiens
tttaattgacaagaatcagaaacaaattgagatggaatggtccacacagggcccatgctgagacaggcagtgtggctgacggatgagaccattggttagcsatgtgtttgtgtctctgttgtgccccttattcactgtcctgccaggagccagttagtggctcatctgtgaaatgggaataagaacagtcccaatatctca

SEQ ID NO: 438709 - DNA, 201 bp, Homo sapiens
agaaaaaaaaaagcaggagaagagtcctggtaaaatgtgaccacaaaagaaagacagagagatgcaatcttgctggctttgaaaaatgaagaggccatagmagaggaatgtgtcagcctctacgtcatgggaaaaggccaaggaacgaccttcccccagagcctccagaaagaaatgccaacaactacattttagcccaag

SEQ ID NO: 438710 - DNA, 201 bp, Homo sapiens
ggactgcttaaacccaggagtttgagcccagcctgggaaacatggcaaaatcccatttctacaaatatatatatataaacacacatgcacatacataaatrtaagtataaatcagccaggtatggtgacacacatctgcagtacaagctactcgggaggctgaggcaggaggatcgcttcagtctgggagttacaggctgc

SEQ ID NO: 438711 - DNA, 201 bp, Homo sapiens
tgtatctttaacaaacaaaagtggcagtttaaaaacaattagactcaaaaactctaatgaataaaaatcactgtccctacagatagcacgtaaacttacaygcgcaccgaagcgtgcttccacactgcacggcgcacactggccagggacattctgaaccagaaagggccctggccccaaagtcgtgctttccctactttg

SEQ ID NO: 438712 - DNA, 201 bp, Homo sapiens
aataaatgcaagcttctcagtggatatccttaatcctgattttagaatgagtccaaaaagaaattgccagagtgaataccaggtaacagaagaaatgatgrgcatgtttctctgtagaacaacctcccttccctagccgctaactatggtggtacttactcatcacattctagctcagaactgccattctggtcctttcat

SEQ ID NO: 438713 - DNA, 201 bp, Homo sapiens
cattgccctggcccctagtcccacagggaggatgtggaacagcccggtagatgccgtgctcatagtacgtttcagtcatggctgaggagccccaagcttasaaaccccaacctttatcaagcaaatctgccaaaccgttgtcctggaaggaggcactgtctttattatactggaaagaaagccatcctgtcctctgctcct

SEQ ID NO: 438714 - DNA, 201 bp, Homo sapiens
tcttccttgtaagttaatgagttagctaccaagttttgaggaagctagcagaaaacaggagacccaggatcagatacagaggacttcgttactcatggcasagcaaacagcatgagctttatttctgcactgattcccattgccctggcccctagtcccacagggaggatgtggaacagcccggtagatgccgtgctcata

SEQ ID NO: 438715 - DNA, 201 bp, Homo sapiens
tcatgcctcagcctcccaagtagctggaattacaggcgcacaccaccatacccagctaattttgttatttttagtagagatagggtttcaccatgttggcyaggctggtctcgaactcctgacctcaagtgatctgcctgcctcggcctcccaaagtgctaggattacaggcgtgagccactgtgcccggctggctttcat

SEQ ID NO: 438716 - DNA, 201 bp, Homo sapiens
gagcaaacagcatgagctttatttctgcactgattcccattgccctggcccctagtcccacagggaggatgtggaacagcccggtagatgccgtgctcatrgtacgtttcagtcatggctgaggagccccaagcttacaaaccccaacctttatcaagcaaatctgccaaaccgttgtcctggaaggaggcactgtcttta

SEQ ID NO: 438717 - DNA, 201 bp, Homo sapiens
ttaaagatattgcttaatgtccataaataaaaaactcataacctacgactttttctccattgtccagagattagtagatggcgcaaattaacaagaagagyaaaacactcaatgttcatctagattcatattaacatattaactaacttccttggagtaatctaacataggccaacttcaaatccagtgattttttttttt

SEQ ID NO: 438718 - DNA, 201 bp, Homo sapiens
actgtggggttgcatcaatttaaagtcatgttacattaaagagaaaaatgtctgggagagtctcttcctgtcactttagattagatttgttgttgttatcyggctgtgcattttgtcggcttcattttacattttaaagatattgcttaatgtccataaataaaaaactcataacctacgactttttctccattgtccaga

SEQ ID NO: 438719 - DNA, 201 bp, Homo sapiens
ggcgctccacagcgagcgggaagatcttttgtgagattacttatctggagcgcgtgtcacttcttcagcaccataaaactgaaatacttgaaatagatgtyactacatttgtcatgaactgacatggccaattaatattacaaattcaccatggagaaacgcttccagctcccaaggtataaactgctgaacatcacaatt

SEQ ID NO: 438720 - DNA, 201 bp, Homo sapiens
aaggaaagataaagttgatgccacctttggtctcttcctttctactgacaaatcatgtgtacttcagcagtcacttactccatctgggcctctgtttcctyatctataaaacaggaataatgacaacttccccaccttagacatatggattctatgaatatagtcttgacatgtaaatggctattttgttgtgctgctgtt

SEQ ID NO: 438721 - DNA, 201 bp, Homo sapiens
tcctcaatgaatttaatgatttcaaagtcaaacataggcacgttcaaccagtaagacatatgagtcaatataatgttaccatggagaaggatttttaaagsgtaacaattaaaagcagagatcatagaagacaggctgatagatttggttgcaatagaattaaaattaaaagacaaaagtaaaacaaaaattaaaaactta

SEQ ID NO: 438722 - DNA, 201 bp, Homo sapiens
aaaaatacaattagtactagaactatttttaaagtcctgagtgaaaacagacaatgcactatttagatgtagaatagaagggagtcaaattataaaaacasagaacagaatataattcaaagagaggtgctgcttggaaataaggaaaaaatactaaaacatgggatgccatgttttttccatgttaacctaatatttcat

SEQ ID NO: 438723 - DNA, 201 bp, Homo sapiens
gaaaggcaaggggtgcatttactggaagcgctatgaatctatctggatgaaatccttaggctgggagcagccctcagcaggtagggaaggctgggggaaaygtacttcctgcgtacgacacacttatcatgcacctgtaatagtgtgcccatcagcaggaaccacagcatagccatgccggcgtctattacctatccagtg

SEQ ID NO: 438724 - DNA, 201 bp, Homo sapiens
gaaacacctctttgtgtccaaagtaatttctttttcaactttgaaaggcaaggggtgcatttactggaagcgctatgaatctatctggatgaaatccttasgctgggagcagccctcagcaggtagggaaggctgggggaaacgtacttcctgcgtacgacacacttatcatgcacctgtaatagtgtgcccatcagcagg

SEQ ID NO: 438725 - DNA, 201 bp, Homo sapiens
atatttattaaatatcccatcacagagaaactttgctgactcttgcacaaaacttcgcattttgtcagccagtaatgaccctttcctcttaagctagtttraatttggagctttttgtgtgtaagaggaaactcctgatctactaaaagaaaaagctattcttagtccttcccagatatccctgaacctccacccacccag

SEQ ID NO: 438726 - DNA, 201 bp, Homo sapiens
tgaagtccagtggacacatacatttaaccacaaatcgaaacaaatgcttcccagtatacagtatgcaagaaaagagcagcattgattggaagaatgagagrtattttcagagatgaaaacattctttattccctcggtccccatgtgttccaatggaaaggaactacatcctatgggcggagagtctcaggtaacacatga

SEQ ID NO: 438727 - DNA, 201 bp, Homo sapiens
ggacattcttcaaatctgatgcctgttatgtaaaatttccagatttcaaaatgtatcctttttcctgcatttatctcgctttccttcacacccggggggartttgttaaactgcagtgaccactggcagagtcccaagccaagccaaaccgtgcaaacatgaaacggccccacaaatcatgcaaaccctacacgctgtccc

SEQ ID NO: 438728 - DNA, 201 bp, Homo sapiens
gggtttcaccatgttggccaggctggtctcaaactccaggcctcaagtgatccacccgcctaggcctcccaaagtgctgggattacaggtgtgagccaccrcatccggcccttgtatgtttctacctgaacaacttctcctgcggtccttcaaagggtggatactgaagtccagtggacacatacatttaaccacaaatcg

SEQ ID NO: 438729 - DNA, 201 bp, Homo sapiens
ccgaatttaacaaggttcgcaaatgaactagagtaagtttcccacagtgacacattaataataagttccttatcccatccatcccaagccatgaatatgtwatgttataaaatgagtccttttcacacaacggaatctcagacgtgaataaataaaaactatccatcacaagcctgtgaaaaattaatgagagttcggaga

SEQ ID NO: 438730 - DNA, 201 bp, Homo sapiens
caagcctgtgaaaaattaatgagagttcggagatgcaaagaaaaatggggacaaggagagatggcccagttcataaaagcctccctaaaactttcagacaktaaatatcctagcccccgtccctcaccaaattgccaggtgtgggtggaaagcaacagattttatttttaatgggctaaaattttacagtcttaaagcaca

SEQ ID NO: 438731 - DNA, 201 bp, Homo sapiens
atatttgtccccgctcaaatctcatgttgaaacatgtccgtaatgggaggtatttgaatcactggggcggagccctcatggcttggcgctgtcttcaccayagtgagtgagatctctggagatctggtcattttaacccttttcccatttgccccaagaatacttactggtgtgcagtgtttaccctgagatcgctttgcc

SEQ ID NO: 438732 - DNA, 201 bp, Homo sapiens
gacagataataaatacccctcatcagctgatcaattgctcgcacttccaggcaagcacccatcactccccaccaaacacaccgccccacgccacctgaacraggttaaaagaacggactcatgactgatggtcggggggaactggcttcagaagaggaagttgaaaatattaagaaatcaacacgggcatttaaaagcaaa

SEQ ID NO: 438733 - DNA, 201 bp, Homo sapiens
tccccgctcaaatctcatgttgaaacatgtccgtaatgggaggtatttgaatcactggggcggagccctcatggcttggcgctgtcttcaccacagtgagkgagatctctggagatctggtcattttaacccttttcccatttgccccaagaatacttactggtgtgcagtgtttaccctgagatcgctttgccatgaaat

SEQ ID NO: 438734 - DNA, 201 bp, Homo sapiens
acccagtctgctgggatcctgatatagtttggatatttgtccccgctcaaatctcatgttgaaacatgtccgtaatgggaggtatttgaatcactggggcrgagccctcatggcttggcgctgtcttcaccacagtgagtgagatctctggagatctggtcattttaacccttttcccatttgccccaagaatacttactg

SEQ ID NO: 438735 - DNA, 201 bp, Homo sapiens
tggaaaaactctgctttgtgcattgttccttgacatcgctgtggacacacagtgcctgattaaattgtatgtgtcgcttgggttataattattatcattgycaaaaccacttgctggatgctcactctctgcccagcattacactagtgctatgccctgcataaactctgattctcaccctctatgaccccatttgacaaa

SEQ ID NO: 438736 - DNA, 201 bp, Homo sapiens
ctggggtccaaggatttatttcctctctcgggagtcagggacagataataaatacccctcatcagctgatcaattgctcgcacttccaggcaagcacccakcactccccaccaaacacaccgccccacgccacctgaacaaggttaaaagaacggactcatgactgatggtcggggggaactggcttcagaagaggaagtt

SEQ ID NO: 438737 - DNA, 201 bp, Homo sapiens
gtttgctgccaaataaataccctgctgctctacaggttgcaaatatttcaatcattgtgcagatctgcacaaacttggaaagaaaactcatgcaatctcawggccttatttccccttcctacataagagaaacatacatgcctaaaccttcactttccaaatgtttactagaagattagaaaaacaacagatgacaggcaa

SEQ ID NO: 438738 - DNA, 201 bp, Homo sapiens
atgtaaaatttccagatttcaaaatgtatcctttttcctgcatttatctcgctttccttcacacccggggggagtttgttaaactgcagtgaccactggcmgagtcccaagccaagccaaaccgtgcaaacatgaaacggccccacaaatcatgcaaaccctacacgctgtccctgccagagagcagcgcctgtctttgca

SEQ ID NO: 438739 - DNA, 201 bp, Homo sapiens
atggctgcactggggttcaatagaaccagatctcccggtatgtttctttttgtttgttttttgagacagagtttcgctctgtcacccaggctggagtgcaytgacacgactcgactcactgcaacctccgcctcccgagttcaagcgattctcctgcctcagcctcccaagtagctgggattacaggtttgcgccaccgca

SEQ ID NO: 438740 - DNA, 201 bp, Homo sapiens
aaaactttatgacactgaaatcagaattccatatcattttcctccttcaagaaataatattctcctctttattcttttttgcagatgattgaaaatgtaaraactattctgagcctgcaggccatagccaaagaggtaccggctgtattttgtccatgggcaggagcttgtgactgctggtctaggtcattccaggtcaac

SEQ ID NO: 438741 - DNA, 201 bp, Homo sapiens
gccaaggtgggaggatcgcttgagcccgggagtttgagacctgcctgggcaatgtggtgaaaccctgtctctacaaaaaatacaaaagttagttgggcatrgtggcaagcacctgtggtcccagctgctcaggaggctgaggtgggaggatctcttgaacccaggaggtcaaggctgcagtgagctgagatcacaccactg

SEQ ID NO: 438742 - DNA, 201 bp, Homo sapiens
acccaggtagagtatttccacacctccaggaaggagagagtggtaaatgaagggtcttccagcagactctgaaatgaagaaggatgaaacttcaatgacayatctgtcaactaatgatgttcaccagaaagtttcaattttaaaagttctacaaggtgaatttttaagtcatctgaaatgtttcagtgaagagaatatgat

SEQ ID NO: 438743 - DNA, 201 bp, Homo sapiens
tcacccaggtagagtatttccacacctccaggaaggagagagtggtaaatgaagggtcttccagcagactctgaaatgaagaaggatgaaacttcaatgayatatctgtcaactaatgatgttcaccagaaagtttcaattttaaaagttctacaaggtgaatttttaagtcatctgaaatgtttcagtgaagagaatatg

SEQ ID NO: 438744 - DNA, 201 bp, Homo sapiens
gaagtttacggacacttggcacaaaaagccacgagagcctcacccaggtagagtatttccacacctccaggaaggagagagtggtaaatgaagggtcttcyagcagactctgaaatgaagaaggatgaaacttcaatgacatatctgtcaactaatgatgttcaccagaaagtttcaattttaaaagttctacaaggtgaa

SEQ ID NO: 438745 - DNA, 201 bp, Homo sapiens
ttattctttttatttattcctgttttttttttcatttcttgtatatacttcaaaaaggcaaaatatttataaagtccttctgagtatgaacactatgattygtaacctcatctttgcaatggaaaattcactagtatattaaattcaaccaatgggagaggttaggtagatgtatgatcacatgctggaagaagctacaga

SEQ ID NO: 438746 - DNA, 201 bp, Homo sapiens
tccctccaggtgaaggtaatgattaagaacacaggtctggagtgggtttgaatcactgtgtgttcagccgctcactggggacctggcctcagccctctgaytactgcagggctttattactttctgagttctctttgctatctcactcgccctttcctcccatttctccttctggtgccccttctccccttccaggccccc

SEQ ID NO: 438747 - DNA, 201 bp, Homo sapiens
attgctagagcccaggagatcgagaccagcctaggcaacatggtaaaaccccatctctacaaaaaatataaaaattagctgggtgtggtggcatgcacctrtagtcccagctactagggaggctgttgcagaaggatcgcttgagccccagaggtcgaggctgcagtgagccatggtcatgccactgcactccagcctggg

SEQ ID NO: 438748 - DNA, 201 bp, Homo sapiens
tcacgcctgtaatcccaacactttgggaggccgaggtgggaggattgctagagcccaggagatcgagaccagcctaggcaacatggtaaaaccccatctcyacaaaaaatataaaaattagctgggtgtggtggcatgcacctgtagtcccagctactagggaggctgttgcagaaggatcgcttgagccccagaggtcga

SEQ ID NO: 438749 - DNA, 201 bp, Homo sapiens
tgttcccaaagcatcggggttcagcggtaatgtttttgaatcttctcgggtgtaagtaaatatatttcagacagcttttagaatgaagttagctagaagarttttgcagcaatagaagctgatttgatgtagaccttcaggtttcttatctatttattggtgctgctcagttggatgggaaagagaggagaagctgagaga

SEQ ID NO: 438750 - DNA, 201 bp, Homo sapiens
tctgcttaagcaacaaagagagaagtaaccgcaaacgctaatttatccagcggaatttacatttctctttctcggcaatatagtttcttagtgtcttccamgtttttaaatcctttaggtttattcattatgttcctttttcctgcttctaaaaggtagctgttcttgcccactgttttggaagtaagaaaacctaggagc

SEQ ID NO: 438751 - DNA, 201 bp, Homo sapiens
atgttacctgtccatttccatcagagacatcatggacacagctgaaatactaggcctggccttttgtaagttcattagagcatcacaaacataactgcagmtattctcactgtttgtgactctgtgattcaaatgttttcacaaaccttccctggcactgcgtattagatggattgaaagatgctgaaacgtaaggccggg

SEQ ID NO: 438752 - DNA, 201 bp, Homo sapiens
cttttttttttttttttttttttttgagatggagtcttgctctgtcgcccaggatggagtacaatggtgcagtctaggctcactgcaacctctgcctcccrggttcgagtgattctcctgcctcagcctcctgagcagctgggactacaggcacatgccaccatgcccgactaatttatgtatttttaatagagatggggt

SEQ ID NO: 438753 - DNA, 201 bp, Homo sapiens
aaggatgagagaaaacctcccacctcagaggctccacctcactggggtgaacaagcactgaccttctatcatcctataaggaaaacaagaagaagagatgyttacttgaattactacataggctccctgcctacatccacatcttgaaaattctgagctgtgaagctcttgtggttggctcctgggaacttgagattccca

SEQ ID NO: 438754 - DNA, 201 bp, Homo sapiens
catcctataaggaaaacaagaagaagagatgtttacttgaattactacataggctccctgcctacatccacatcttgaaaattctgagctgtgaagctctygtggttggctcctgggaacttgagattcccagtgatattccaatgctgaaacagcccagcaaggtgatgcaggtaagcacgcttgtaggatgtaacaatg

SEQ ID NO: 438755 - DNA, 201 bp, Homo sapiens
ttctcaagagaagctggaaggtagggtcagagagattacagtgagaagtgaagcggtagaggccagtaggtttagaaaccagtgctgtgggctgacagggrgtgacaatttccagctttggttctcctcatttaggagagacatgaagtctcatggtgtggtagacaggccacacaagactggaagtctgaagtgtgctca

SEQ ID NO: 438756 - DNA, 201 bp, Homo sapiens
ggagacccaggatcagatacagaggacttcgttactcatggcagagcaaacagcatgagctttatttctgcactgattcccattgccctggcccctagtcmcacagggaggatgtggaacagcccggtagatgccgtgctcatagtacgtttcagtcatggctgaggagccccaagcttacaaaccccaacctttatcaag

SEQ ID NO: 438757 - DNA, 201 bp, Homo sapiens
ctggggccactcactaccactcatgagttaaggtgtatgaaaacggctttggtaacctccttcttgccatcatgaaactgcagcacgctaatactgtcagwctgtctcagaaacccctgccagccagaaggcttaactttgagatgaatgcaaagcagaatgaagcccaggaactttgggggtctgggctaaggctgatgc

SEQ ID NO: 438758 - DNA, 201 bp, Homo sapiens
cccttctccaccatccattccatgtgggcagaacacgtgactcatgggattactgggagcctgccatgctgttctgttttcaactcactacttttgtctgygctattctttcattcaggataccgccccaacctctccacctggctaaatcactcatcctttgagatgcagaagccaaagagatcctcagcacatacctcc

SEQ ID NO: 438759 - DNA, 201 bp, Homo sapiens
caagggctgcgcccgggaaatgtgggagcaaaggtgccagaccttccagttttttaagagaaaccaagaatccaggtttttatgcgaactttaaaaaaagrggatgtgggggtgggggcagcaaacacatgcctgcaggctgaattcaccacccccctccacgttttagatcttataattacatcttctctttaggatcct

SEQ ID NO: 438760 - DNA, 201 bp, Homo sapiens
acatcttctctttaggatccttaaagcataaaggcaagagccaagtctcagtaaactctgcatgggccacagctcggaaaagaaaaaaacctgttatatcrtgggagctcagtgcttgctgaactgaactgattcacatcatgacttgggattcatgaaccagaagcacaggaaattaataaaaactgaaaacgagccaaa

SEQ ID NO: 438761 - DNA, 201 bp, Homo sapiens
ttattgagtgaatgagttctctgcatacatgttgttctctgcctggtaccgtggaggtcaggctcgcacagaagcatacttatggtcagagttagtcaataaaaaaagtgatctattctgagttccataccaccccaaaacactgatcagcttggggaaacttagaaagttcaaccacctggggataaagtttggaaaact

SEQ ID NO: 438762 - DNA, 201 bp, Homo sapiens
ctaatgacaagcactcctaaaccttcaacatagctgctgttaaggatgttgtcttgtgggggtgaaaggcagaccaaaatgatactaccaccctactcctyaccgatgagtcctttctgattttaagcaaatggcatacagtgtggtgaattaaaaacagcattatcctgattttattactagtatcattactattagcat

SEQ ID NO: 438763 - DNA, 201 bp, Homo sapiens
accaaaatgatactaccaccctactccttaccgatgagtcctttctgattttaagcaaatggcatacagtgtggtgaattaaaaacagcattatcctgatyttattactagtatcattactattagcattattgctactgctgttataggtaaaaatgggaacgttgtgaacatttcccattgcctatccaaggtgcttgg

SEQ ID NO: 438764 - DNA, 201 bp, Homo sapiens
catacagtgtggtgaattaaaaacagcattatcctgattttattactagtatcattactattagcattattgctactgctgttataggtaaaaatgggaaygttgtgaacatttcccattgcctatccaaggtgcttggtactttacatgatatctcacttaatcatcagaaagtttggagttattctataggtaatgagg

SEQ ID NO: 438765 - DNA, 201 bp, Homo sapiens
acttctcctttttttttttttttttctattaagtcgtgtcacagccaaactctcacccctaatgaggcacagctgggcccttggccctgaagaaatacgcrttggaaatgaactggaaaacacttggcctccctcaaacttcccaggagacagcttagcccctcgtgccccctgggagttggcttcttttccagcggccat

SEQ ID NO: 438766 - DNA, 201 bp, Homo sapiens
aagagcatcctgagtgcacctccactccctgccaccaggggtcagatgagccggcctggcaggcttgtttccctccaccagacaacagcaaggaccaagaytggcaaagtgacacatcctctccaaaagaagaacatgcagaacaaatcaaagaacacaaaccacgactgacaaacacagccacactcgattttaaagtac

SEQ ID NO: 438767 - DNA, 201 bp, Homo sapiens
ctaagtcctagaaatacatctgaggttgcaaacagtccatttcattcattattatatatatatatatatatctctatatagatatagataaatatatatayagatatacatatagagagagagagataaaacagaaaaaatctaaatgtctaaaggaccagatataagttaatcataaaacgatgacaacaaaaacaaagg

SEQ ID NO: 438768 - DNA, 201 bp, Homo sapiens
gtcccagtcttcctgctctcttggcattgccaataaaatccagaaacaccagggatgactcagtaccacagtcagtgcgtaaataagggataaagataccygttaaatccattgcctcaaagcaatcatgggagtttcttaagaatactgaacctcctctccgttttctgcactaaagagataaggagtggcatggagaat

SEQ ID NO: 438769 - DNA, 201 bp, Homo sapiens
ctactccgatgccacgttaacaatgaaaaacaccataaagacaaaaagaaactgaatttaagcatttggattctgcagaggagtttattgaacagattaaytaaggaaaggcaaagctacacaattatggaaaacaggtagcaacactcaggctgactattttcgatggccacctgagagcggatttccaatgccctcatt

SEQ ID NO: 438770 - DNA, 201 bp, Homo sapiens
agagaggcaattgataataattatgttttctgccttctcttgggttatgaatttatcatgatgcaaaagtcgagctactccgatgccacgttaacaatgawaaacaccataaagacaaaaagaaactgaatttaagcatttggattctgcagaggagtttattgaacagattaactaaggaaaggcaaagctacacaatta

SEQ ID NO: 438771 - DNA, 201 bp, Homo sapiens
gacccgttcctaccctggatttctctgaatcagctactccttaagttcgtattttgttccactcagccaatggcaattccaggagagaggcaattgataayaattatgttttctgccttctcttgggttatgaatttatcatgatgcaaaagtcgagctactccgatgccacgttaacaatgaaaaacaccataaagacaa

SEQ ID NO: 438772 - DNA, 201 bp, Homo sapiens
tgggacccgttcctaccctggatttctctgaatcagctactccttaagttcgtattttgttccactcagccaatggcaattccaggagagaggcaattgayaataattatgttttctgccttctcttgggttatgaatttatcatgatgcaaaagtcgagctactccgatgccacgttaacaatgaaaaacaccataaaga

SEQ ID NO: 438773 - DNA, 201 bp, Homo sapiens
actgcactccagcccggtgacagagcgagactccatcttaaaaaaaaagaaaagaaaagaaaagaaagaaaaagaaaaacagctacagatattcattcctktttaatttcttgataaataatagaccagtaagaatcacataagaagcagtctacatttttcaaagagtttttacagatcccatttgatcttcaaaagggc

SEQ ID NO: 438774 - DNA, 201 bp, Homo sapiens
tccttttagaaacaaacaattacaaattagctgggcatggtggcgcacgcctgtagtcccagcaacttgggaggctgaggcaggagaattgcttgaacccrggaggcagagattgcagttagccgaaatagcaccactgcactccagcccggtgacagagcgagactccatcttaaaaaaaaagaaaagaaaagaaaagaa

SEQ ID NO: 438775 - DNA, 201 bp, Homo sapiens
ttccttctacagacttctaaaagacagtggaagcactgaatatccttttagaaacaaacaattacaaattagctgggcatggtggcgcacgcctgtagtcycagcaacttgggaggctgaggcaggagaattgcttgaacccgggaggcagagattgcagttagccgaaatagcaccactgcactccagcccggtgacaga

SEQ ID NO: 438776 - DNA, 201 bp, Homo sapiens
tggctcacgcctgtaatcctagcactttgggaggccaagacaggcggatcaccaggtcaggagatctagaccatcctggctaacacggtgaaaccccatcyctactaaaactacaaaaaaattagccaggtgtagtggcaggcgcctgtagtcccagctactcgggaggctgaggcagaagaatggcatgaacccgggagg

SEQ ID NO: 438777 - DNA, 201 bp, Homo sapiens
ctcagccctctgattactgcagggctttattactttctgagttctctttgctatctcactcgccctttcctcccatttctccttctggtgccccttctccycttccaggcccccagcccccagcccccaccccacagccatctctgtattaaatgtttgtggaatgttcaccgttcaaaagccacgttctagtttgaggct

SEQ ID NO: 438778 - DNA, 201 bp, Homo sapiens
aaatttaacttacacagtcaatttcttaatgcaagttatcagaattggtggagaaaaatgtgaattacaactgtgattcgagaacccaccacattataactatatatatatatatatatatatatatatatatatatatatatacatagatagatagatagacagacacacacacacacatggcaaatgggcccacataca

SEQ ID NO: 438779 - DNA, 201 bp, Homo sapiens
aagtgaagaaactgcatctccaagatcctgctatatcaacttcagttttttgaagttaaatttgatttttaaatcccttggctgatgagacctgtgtgggttttttttttgttgtttttttgttttgttttgttttgttttatcattgtacctctattttaaaaatagagacttgtggttctttttccaaaagcagtccaa

SEQ ID NO: 438780 - DNA, 201 bp, Homo sapiens
aatttaacttacacagtcaatttcttaatgcaagttatcagaattggtggagaaaaatgtgaattacaactgtgattcgagaacccaccacattataactatatatatatatatatatatatatatatatatatatatatatacatagatagatagatagacagacacacacacacacatggcaaatgggcccacatacaa

SEQ ID NO: 438781 - DNA, 201 bp, Homo sapiens
atatatatatatatatatatatatatatatatacatagatagatagatagacagacacacacacacacatggcaaatgggcccacatacaacatgttttaraaattgtgatattgcaagtggagcctcaagctgagatctgagattgttcttccatagtctccctgattcccaaacacgtagttgcaatcagacttttttt

SEQ ID NO: 438782 - DNA, 201 bp, Homo sapiens
atttataaaggctgtatattaacattcacaaaggtttttaaagatggaatagctatgtacacagtgaatttattctaaaatccagactcaaaaaaaaaaawgaatatgaactcctccccaccgtgttctggactaaaatcaataagttccctttaggtaattaaaatgctggtcccacgacctgccatcctattcccaggc

SEQ ID NO: 438783 - DNA, 201 bp, Homo sapiens
cttcacatcatatttgattaaaaccaaatatttatgaatcaataaaaatttcatactttcattattacttgtaatttatatttaaattttaatcaataacttttttttttttttttttttgagatggagtcttactctgtttcccaagctggagtgcagtggtgtgatctcggctcactgcaacctccacctcccgggttc

SEQ ID NO: 438784 - DNA, 201 bp, Homo sapiens
tttgggaggccaagacaggcggatcaccaggtcaggagatctagaccatcctggctaacacggtgaaaccccatccctactaaaactacaaaaaaattagmcaggtgtagtggcaggcgcctgtagtcccagctactcgggaggctgaggcagaagaatggcatgaacccgggaggcggagcttgcaatgagccgagatcg

SEQ ID NO: 438785 - DNA, 201 bp, Homo sapiens
gtagtttgctgggggtctactccagaccctgttcacctgggtccctcccacaccaggaggtgtcacctgtggaggctgcagcacagcaaggatggctgccygctccttcctctgggagtctctgtcctcaagaggcatcgagctgattccagcagaaacgctcctgtgtaagttctctggcaacccctgctgggaggtctc

SEQ ID NO: 438786 - DNA, 201 bp, Homo sapiens
ctcaactttgctggcatagtgcaaaagtagccacagatagcttataaatgaaggtgtgtagggctgtgttccaataaaactacttcagatctctctggaayttcaataaaagtttttaaaatttagttatgaacactgaaatttgaatttcatacaatttttacatgtaataaaacattattctattggttttttccccca

SEQ ID NO: 438787 - DNA, 201 bp, Homo sapiens
gaaagccttgtccaaaaggcacaacagtgactacactgaacccatcccatgcatccttttgagagttagaaggaggcaattgcaagccggctgcaaaagamaaaagacaccagagacttagaaaccagtgaagccacgctgaagatgcagacagagagctagagacaaggtcaggggcctctgttgcactccagacccggt

SEQ ID NO: 438788 - DNA, 201 bp, Homo sapiens
gcaggagaattgcttgaacccgggaggcagagattgcagttagccgaaatagcaccactgcactccagcccggtgacagagcgagactccatcttaaaaaaaaagaaaagaaaagaaaagaaagaaaaagaaaaacagctacagatattcattcctttttaatttcttgataaataatagaccagtaagaatcacataaga

SEQ ID NO: 438789 - DNA, 201 bp, Homo sapiens
ttctcaaccttgtgtattaatagtttaaacctaagttaattttacatttataaaaatggggtcgaacatggtggctcatgcctgtaatcccagcactttgsgaagccaaggtgggtggatcacttgagcccaggagttcaaaaccagcctggccaacatggtgaaactccatctctacaaaaattagctgggcatagtggc

SEQ ID NO: 438790 - DNA, 201 bp, Homo sapiens
gggacaaataagaagaacaaaggcagacgtggagatgatagtaggggttgccaagctttctggaaaggagcagagagtattttaggctttatgggccatayagtctccatcccaactactcaactttgctggcatagtgcaaaagtagccacagatagcttataaatgaaggtgtgtagggctgtgttccaataaaactac

SEQ ID NO: 438791 - DNA, 201 bp, Homo sapiens
caggagaattgcttgaacccgggaggcagagattgcagttagccgaaatagcaccactgcactccagcccggtgacagagcgagactccatcttaaaaaaaaagaaaagaaaagaaaagaaagaaaaagaaaaacagctacagatattcattcctttttaatttcttgataaataatagaccagtaagaatcacataagaa

SEQ ID NO: 438792 - DNA, 201 bp, Homo sapiens
ctacaaaaattagctgggcatagtggcgtgtgcctgtagtcccagctagtcggcagactgaggcaggagaattgcttgaacccgggaggcagaggttgcaktcagccgagattgtgccactgcactccaacctgggtgacagagcaagactctgtctcaaaaataaatataaataaaaataaaatggaatacagtctctct

SEQ ID NO: 438793 - DNA, 201 bp, Homo sapiens
gggcagcacgagcacagtcaaaccagaatggctgctgcaggagccatcagcatgactgtgtggcagctgctcacagagcagggactaacatgggaaccagrctagcttttgcgtccctttctgagtctccagtctatccgggtttgcagaacattaatcaaggttaattaggcccacctgtgacataaaaatttctaccta

SEQ ID NO: 438794 - DNA, 201 bp, Homo sapiens
aggagaattgcttgaacccgggaggcagagattgcagttagccgaaatagcaccactgcactccagcccggtgacagagcgagactccatcttaaaaaaaaagaaaagaaaagaaaagaaagaaaaagaaaaacagctacagatattcattcctttttaatttcttgataaataatagaccagtaagaatcacataagaag

SEQ ID NO: 438795 - DNA, 201 bp, Homo sapiens
tatttgtttgttttatttgagcttggtgatttgaaagagctgtttacttattaagcagatgaactatatgaacagacagttttttaaaactctatttctamctcaaacacatacttacagaactaattcaaaatggtgcttcttttattaacgtggtgctaaattactttatgagttcttaaagattcttatttttggcac

SEQ ID NO: 438796 - DNA, 201 bp, Homo sapiens
ctttttctatgaaccaatcaagcagatttatgtatttttttcagtgccgtaaaaaaaatttgatgattttgaggcttaacatcaaataccagtgagatcamaagttagatatgacatcatacacatcatttctgctgaaaaagtacctttagttaaaaacagaaaccaatttgtaaatgtgaattaaatgcatactccaca

SEQ ID NO: 438797 - DNA, 201 bp, Homo sapiens
gagacatgaagtctcatggtgtggtagacaggccacacaagactggaagtctgaagtgtgctcacttcatggagtaaatgtgtagccttgaatgagttacttttttttttttttttttttttttgagatggagtcttgctctgtcgcccaggatggagtacaatggtgcagtctaggctcactgcaacctctgcctcccgg

SEQ ID NO: 438798 - DNA, 201 bp, Homo sapiens
ccatcgcctcaagctaatcactctaagtcctagaaatacatctgaggttgcaaacagtccatttcattcattattatatatatatatatatatctctatayagatatagataaatatatatatagatatacatatagagagagagagataaaacagaaaaaatctaaatgtctaaaggaccagatataagttaatcataaa

SEQ ID NO: 438799 - DNA, 201 bp, Homo sapiens
tgatgcctctggggccaaacacaggggatacattttcccagtagaagaaatcagccctgatcctcaagaagaagaacatattggcatattttagtgagackgaggcatactgcatcttggggtaaaaactgaatcatcaggccaggcacggtggctcacgcctgtaatcctagcactttgggaggccaagacaggcggatc

SEQ ID NO: 438800 - DNA, 201 bp, Homo sapiens
caaaatgaatagtcataaaagtataataacctagactggaaaatttagggattagagcattttgaacattatacctcaaatttataaaggctgtatattarcattcacaaaggtttttaaagatggaatagctatgtacacagtgaatttattctaaaatccagactcaaaaaaaaaaaagaatatgaactcctccccacc

SEQ ID NO: 438801 - DNA, 201 bp, Homo sapiens
tgatatttccctccattaacatcacgaacatcattacgtgtgtgtgtgtatttttctcattttaaaaccagcagatgagagtaaaggatttctttttcctytcccccacctctttacaggacctactgttaagttttcaagaccacccagaaagaaatttgaagttgggtttatatccttaatccctcagttagaaaaaaa

SEQ ID NO: 438802 - DNA, 201 bp, Homo sapiens
gtaaactacttgaaggcaattcctgtgcttaaaatggccacgtgaaaggtgtccctgacatggaaaggacaaaccatgaaatgacccttgaagctcttaakgtgtctgtcaaaaaagcaaagccaactgtcaaactgaaaagccaaaatcatcacaaaaacacctattcttcagaggcctcaaatctcaaactatctccca

SEQ ID NO: 438803 - DNA, 201 bp, Homo sapiens
tcccatctcggcctcccaaagtgctgggattacaggtgtgagccaccgggcccagccgtaggaacacagatattatcatcatgggacaagtcatccattcycagattccatgaccctctctggtgtccactgtggatttcagcacatgtttaactatgaaactctagtcacgctttttgatatacaggttcatggttacta

SEQ ID NO: 438804 - DNA, 201 bp, Homo sapiens
cctgggttcaagtgattctcctgcctcagcctcctgagtagctgggattacaggcatgcaccaccacaccggctaacttttgtatttttagtagagatagsgtttcaccatattgatcaaggtggtcttcaactcctgacctcgtgatcctcccatctcggcctcccaaagtgctgggattacaggtgtgagccaccgggc

SEQ ID NO: 438805 - DNA, 201 bp, Homo sapiens
ctcggctcactgcaacctccgcctcctgggttcaagtgattctcctgcctcagcctcctgagtagctgggattacaggcatgcaccaccacaccggctaayttttgtatttttagtagagatagggtttcaccatattgatcaaggtggtcttcaactcctgacctcgtgatcctcccatctcggcctcccaaagtgctgg

SEQ ID NO: 438806 - DNA, 201 bp, Homo sapiens
gggtcattaattagcaacctcggttccagataccaaaatatgaggaaggctatagtactcgggtcctgcttcaatattgtgatttgtttttcttatctacktctctttttcttcccttattttgctcacaatgccttctgaggaaagacaagacctttcttataaaaggaaaaatatccatgtctctacccacagagtcca

SEQ ID NO: 438807 - DNA, 201 bp, Homo sapiens
tgggaccaagtgaaagcacttggctggatcagagggataggagcctggctgctcctaaaacaagacactacttgcctttgatgttcaagtcatttaagaaygcaattgcttcctactcaatttttcaaaaccaaaataacaaatacgatatgagccataacttagcaaaattacgtgttttaaacagtctctttcaaaaaa

SEQ ID NO: 438808 - DNA, 201 bp, Homo sapiens
tttatgacactgaaatcagaattccatatcattttcctccttcaagaaataatattctcctctttattcttttttgcagatgattgaaaatgtaagaactrttctgagcctgcaggccatagccaaagaggtaccggctgtattttgtccatgggcaggagcttgtgactgctggtctaggtcattccaggtcaaccaggg

SEQ ID NO: 438809 - DNA, 201 bp, Homo sapiens
tggagttagcctttgggccataattggttcattcctaccttttcataatctcagttattgatcaggtgatttttcaaactgtgaagggtctacacgttcamcctcttccttgtaagttaatgagttagctaccaagttttgaggaagctagcagaaaacaggagacccaggatcagatacagaggacttcgttactcatgg

SEQ ID NO: 438810 - DNA, 201 bp, Homo sapiens
tccatctcctgggttcaagtgattctcctgcctcagcctctcgagtagctgagattacaggcacgcaccatgtttcccccagcttctggcttgctacactrtggaatggaagacggatgcccaagaagaccaatgtaaggaaagcagagccaagggatggagacagagcatgccctgaaaaaataaggcaagcccatgaga

SEQ ID NO: 438811 - DNA, 201 bp, Homo sapiens
gggtttcaccatgttggccaggctggtctcgaactcctgacctcaagtgatctgcctgcctcggcctcccaaagtgctaggattacaggcgtgagccactrtgcccggctggctttcatatctcttattctttctgcttccgctctctcctgtcccctattagccatgggttccagagaggagagaaggctcgggagagca

SEQ ID NO: 438812 - DNA, 201 bp, Homo sapiens
ggagaattgcttgaacccgggaggcagagattgcagttagccgaaatagcaccactgcactccagcccggtgacagagcgagactccatcttaaaaaaaaagaaaagaaaagaaaagaaagaaaaagaaaaacagctacagatattcattcctttttaatttcttgataaataatagaccagtaagaatcacataagaagc

SEQ ID NO: 438813 - DNA, 201 bp, Homo sapiens
aaacgtgactcaagatggcacagaacagcgtccacagatgtattcttggttacttaaaaacacaatttaaagtaattagcttaatgttgatgtaattctaragatcgataaataaacctaaaaatcttaatttgatattgaatcgccccaaattaaacaacatattttcaaaccactaaatattgattcatttgtaagatg

SEQ ID NO: 438814 - DNA, 201 bp, Homo sapiens
gagaattgcttgaacccgggaggcagagattgcagttagccgaaatagcaccactgcactccagcccggtgacagagcgagactccatcttaaaaaaaaagaaaagaaaagaaaagaaagaaaaagaaaaacagctacagatattcattcctttttaatttcttgataaataatagaccagtaagaatcacataagaagca

SEQ ID NO: 438815 - DNA, 201 bp, Homo sapiens
ctgaagtgccagtccaattcatcctccagcatagcaccactgactgaccccagtcaacaccacaaggggcagaagagtcactccactgagccctaacttasagaaatcacaagataaaacaaaatggttgttgttttaagcctctaagttttggggtaatgtattatgcggctatacataaattggaacatccacgtttta

SEQ ID NO: 438816 - DNA, 201 bp, Homo sapiens
ctgcagctattctcactgtttgtgactctgtgattcaaatgttttcacaaaccttccctggcactgcgtattagatggattgaaagatgctgaaacgtaasgccgggcacggtagctcacgcctgtaatcccaacactttgggaggccgaggtgggaggattgctagagcccaggagatcgagaccagcctaggcaacatg

SEQ ID NO: 438817 - DNA, 201 bp, Homo sapiens
ggaccagctgaagtgccagtccaattcatcctccagcatagcaccactgactgaccccagtcaacaccacaaggggcagaagagtcactccactgagcccyaacttagagaaatcacaagataaaacaaaatggttgttgttttaagcctctaagttttggggtaatgtattatgcggctatacataaattggaacatcca

SEQ ID NO: 438818 - DNA, 201 bp, Homo sapiens
atctgtgccccatgcctgtcccgtggaacacaggccaaacagaggattgaggtcctgagtttggagttaaatgaagattgccaggtagaggttgttagggsgagggtgttaagtgaaggtgtgatataaaccacatgacatttgcaggtggttatggttttcctgcccagcccaccgccaccactggactgtagggaggtg

SEQ ID NO: 438819 - DNA, 201 bp, Homo sapiens
taatagaattcagaaagaaaaggaggtactcatcaaggcactctgctaaggtttgactaatgggattccacatggtctgcatgtttatggcttaaatgagstaccaacactgaaactgtccacttaattagcccccaaaacaagaagtacagactgtgagtctgagacctacagagactccaaaaacagaaactaccatcg

SEQ ID NO: 438820 - DNA, 201 bp, Homo sapiens
agaagtatccatcacataactggcctttaaaccatgtaaaactcattgatacccacatgggaggccaaagaaacgcaatttccaactcaagaaactatcamacaaaatcccaacatgttctagacaccactggataagaaatttgagggagtaccccgaataaacaaacattcacaatcattcacaatcattcagcattac

SEQ ID NO: 438821 - DNA, 201 bp, Homo sapiens
atatgattaagtatcaaatactgtcatatcagtagaactaaaatataccaagtagtatccctagtttccagcccagctccaaatttttaaacgacaaacctttttttttttttggtaatatttattcattgactattgatatttaactgttttcacaatgataaagtagctcattaagaaacaaataaagacataaaatca

SEQ ID NO: 438822 - DNA, 201 bp, Homo sapiens
aacctccacctcccgggttcgagtgattctcctgcctcagcctccccaatagctgggattacaggcacgccaccacacccagctaatttttgtatgtttgstacagacggggtttcaccatgttgcccaggctaggttcaaactcctgacctcaagtgatccacctgcctcagcctcccaaagggcagagataactaattt

SEQ ID NO: 438823 - DNA, 201 bp, Homo sapiens
tactttcttttggaatcctctgggagccctgagccaccatgtaagaaatctgatggccctatatctgccatgcaggaaaggccatgtgtagggctctgggyaagagtccctcagctgagccaagcatcccagtcatcctcgtgaaagtgccagacccatgggtgaccatcctggaccagctgaagtgccagtccaattcat

SEQ ID NO: 438824 - DNA, 201 bp, Homo sapiens
aatttatatttaaattttaatcaataacttttttttttttttttttttgagatggagtcttactctgtttcccaagctggagtgcagtggtgtgatctcgrctcactgcaacctccacctcccgggttcgagtgattctcctgcctcagcctccccaatagctgggattacaggcacgccaccacacccagctaatttttg

SEQ ID NO: 438825 - DNA, 201 bp, Homo sapiens
caataaaaaaagtgatctattctgagttccataccaccccaaaacactgatcagcttggggaaacttagaaagttcaaccacctggggataaagtttggamaactaggctagggccaattcagggtacaggtggaggctaggaagtttggcataggatatcattaaaggtcttctaaggatgaaggcaattggagctacac

SEQ ID NO: 438826 - DNA, 201 bp, Homo sapiens
gggacaggtcaaggaaggtattacctctgcatagttctaggtgtcctgcttaactcattcaggaatttcgggccagagggatatccaacaggaattctaamctgaagagtttagaaaccagtaggagaatcaggatgaattcagaaattactataatatgcattttcaagtgataaatcccatcaaaaacagaaaaagtgc

SEQ ID NO: 438827 - DNA, 201 bp, Homo sapiens
ttctgcactgattcccattgccctggcccctagtcccacagggaggatgtggaacagcccggtagatgccgtgctcatagtacgtttcagtcatggctgargagccccaagcttacaaaccccaacctttatcaagcaaatctgccaaaccgttgtcctggaaggaggcactgtctttattatactggaaagaaagccatc

SEQ ID NO: 438828 - DNA, 201 bp, Homo sapiens
aaactgacccagaaaagggacaggtcaaggaaggtattacctctgcatagttctaggtgtcctgcttaactcattcaggaatttcgggccagagggatatycaacaggaattctaacctgaagagtttagaaaccagtaggagaatcaggatgaattcagaaattactataatatgcattttcaagtgataaatcccatca

SEQ ID NO: 438829 - DNA, 201 bp, Homo sapiens
ctccttctctcttaaaaaagaaggaacatgatatgccacttgcaagattaggatattctgtttaaaaagaggggataatttaagcagggctggcggtgggrgcggggagacaatggaaaaggctgacatctcctgagcatggctcaagaaggcataattcttccgcatgtataagaataaaacctcttaactcatctccca

SEQ ID NO: 438830 - DNA, 201 bp, Homo sapiens
gaaatcatgaagggcaaactgacccagaaaagggacaggtcaaggaaggtattacctctgcatagttctaggtgtcctgcttaactcattcaggaatttcrggccagagggatatccaacaggaattctaacctgaagagtttagaaaccagtaggagaatcaggatgaattcagaaattactataatatgcattttcaag

SEQ ID NO: 438831 - DNA, 201 bp, Homo sapiens
aaagtttcagttagcctcagtccctgatgatctgcaggaatttctccttctctcttaaaaaagaaggaacatgatatgccacttgcaagattaggatattytgtttaaaaagaggggataatttaagcagggctggcggtgggggcggggagacaatggaaaaggctgacatctcctgagcatggctcaagaaggcataat

SEQ ID NO: 438832 - DNA, 201 bp, Homo sapiens
aactttcagacattaaatatcctagcccccgtccctcaccaaattgccaggtgtgggtggaaagcaacagattttatttttaatgggctaaaattttacartcttaaagcacaattcatgcaagcaactgagagatcacagctacaaacactggactttctattttctccatgcgatcccaatttcagctgcagagccaga

SEQ ID NO: 438833 - DNA, 201 bp, Homo sapiens
gagcacaggtcagaaggatgaatacacagagggagaaaactgcaacttccctcaaggagagaatgctagaaatggcaatgggcaggaaagaaaggatcctkacatcattttatagagagtcgttcatcccttacacaaacctggccaaaaatctacagaatgctgaggaaacacggctattcaacaagaaaatcggagctt

SEQ ID NO: 438834 - DNA, 201 bp, Homo sapiens
cgggctggggaatccaggagtgaccaacccagagatttgtcccttatatataacagacatctgtgccccatgcctgtcccgtggaacacaggccaaacagrggattgaggtcctgagtttggagttaaatgaagattgccaggtagaggttgttagggggagggtgttaagtgaaggtgtgatataaaccacatgacattt

SEQ ID NO: 438835 - DNA, 201 bp, Homo sapiens
cataaaatccttatctaccaagatttacctctgcaaacctctacagtccctggttgtgagcccctgatggaagaagctagcataaagaagttcacaactastggggagggaacgacctgacaagttgcaagcaagaaaggagtgaaaaactgagttaattgtacaagaatttgtgtatttataaatgcaggataaataaga

SEQ ID NO: 438836 - DNA, 201 bp, Homo sapiens
acaaggcttagctcttgggtcattaattagcaacctcggttccagataccaaaatatgaggaaggctatagtactcgggtcctgcttcaatattgtgattygtttttcttatctacgtctctttttcttcccttattttgctcacaatgccttctgaggaaagacaagacctttcttataaaaggaaaaatatccatgtct

SEQ ID NO: 438837 - DNA, 201 bp, Homo sapiens
ctctgagctgtgaacacactactgcactccagcctgggtgatgaagtgagaccttgcctcaaaaaaacaaacaaaacaaaatgaacattcacactagaaasgagaaacagggacgctaaagctgaagtcaaatttcaccaccaaataaatttgctataaatatacaataaatttgtttttgcttttcagatctctttgggt

SEQ ID NO: 438838 - DNA, 201 bp, Homo sapiens
gtggggaatgaggagagtaaacagcagtgcctcccacggagctccctgcaggttctccttgtaggagtgagattttgctggtgatttatattgtttgagasatacccaaagagtcttgtgtcactcaatccccagctccatccctggctcggaggagcctgcaccgcctcacgggagcctgtaactgtcaaatggcattcc

SEQ ID NO: 438839 - DNA, 201 bp, Homo sapiens
caggttaatgtcttgaacatttaaatagttcctgaacacataaaaattcttaccattcacaaacgtaaagacaccaagatagaaatcagtcacagaacatkaatagatcatttgcaaaagaaagaaattgttaacacatcaataaaaaataatgtttagcttcactaataatcaagaaaatgcacagtaaaattagattct

SEQ ID NO: 438840 - DNA, 201 bp, Homo sapiens
tacaaaattagccgggtgtggtggcacatgtctgtaatcccagctactcgggaggctgcggcaggagaatcgcttgaacctgggaggtagagatcacggcragccaagatcacaccactgcactccagcctgggcaacaagagcgaaactccatctcaacaacaacaaaaaaagtaatttagcacatatactgcatattac

SEQ ID NO: 438841 - DNA, 201 bp, Homo sapiens
ggaggtcaggacgttgagagatccccaaattgcaagttgtcatcctgagacaagcgataccttgctggacactaattcattcttggagtctctccctctcrgccctttggcttcatgttctggagagaatgaccagagagacccatttactcaacgcttctcaatgagacagggatcttctaaagggcactgtcttatata

SEQ ID NO: 438842 - DNA, 201 bp, Homo sapiens
agccgagatggcgccactgcactccagcctgggtgacaagagtaaaactccctctcaaaacaaacaaacaaaccaaaaaaacaaatagcaacagcaaccayaatcatcatcaccatcaaggctggaacaaggatgaggcaggcaggctctgatagcaacaggaggaagcagaccaaggagggagagaaaggaaggcagaga

SEQ ID NO: 438843 - DNA, 201 bp, Homo sapiens
tgaatctgagcaatgatgtcataataatcatcaatagcaacagtggctgcgcgtgaggggcgtggtggttcacgcctgtaatcccaacactttgggaagcygaggtgggcagatcatttgagctgaggagttcaagaccagcctggacaacatgctgaaaccccatctctactaaaactacaaagaattagccaggcatgg

SEQ ID NO: 438844 - DNA, 201 bp, Homo sapiens
aacccccatcgggaagagactattatcatctccttatcacccacagggatgctgaggttacgaggtatcaagggacctacccaccattgcacaggcagaamacaggagagccaagactgacacccccagcaggaggtgttccagccaccttggacaccttccaccacaggctgagccgcagtgaagggctttcagaggggc

SEQ ID NO: 438845 - DNA, 201 bp, Homo sapiens
tttgtcccttatatataacagacatctgtgccccatgcctgtcccgtggaacacaggccaaacagaggattgaggtcctgagtttggagttaaatgaagaytgccaggtagaggttgttagggggagggtgttaagtgaaggtgtgatataaaccacatgacatttgcaggtggttatggttttcctgcccagcccaccgc

SEQ ID NO: 438846 - DNA, 201 bp, Homo sapiens
taaaataaaggagaaactcattggagaggctaatgcggcgtgcactggaggtagctactatcactaagcattaagataaacaatacgagtggcattctggyccacgcctggcaaagtgcaggagtccctggaggaaaaggaatgagagtgcatcagcgacctcgtgaggcagtgcagctttgcattaatgcctgcagctct

SEQ ID NO: 438847 - DNA, 201 bp, Homo sapiens
actaaaagaaaaagctattcttagtccttcccagatatccctgaacctccacccacccagtctgctgggatcctgatatagtttggatatttgtccccgcycaaatctcatgttgaaacatgtccgtaatgggaggtatttgaatcactggggcggagccctcatggcttggcgctgtcttcaccacagtgagtgagatct

SEQ ID NO: 438848 - DNA, 201 bp, Homo sapiens
tctactaaaagaaaaagctattcttagtccttcccagatatccctgaacctccacccacccagtctgctgggatcctgatatagtttggatatttgtcccygctcaaatctcatgttgaaacatgtccgtaatgggaggtatttgaatcactggggcggagccctcatggcttggcgctgtcttcaccacagtgagtgaga

SEQ ID NO: 438849 - DNA, 201 bp, Homo sapiens
gtgacacatgaaaatgtatatgaaattcaaattccagtatccataaataaagtttctcgcagccatgcctgctcctttacatatcgtttatgcctgttttygcactatgagggcagagttgagtagttggcaacaaacactacaaggccccaaaatatttattaaatatcccatcacagagaaactttgctgactcttgca

SEQ ID NO: 438850 - DNA, 201 bp, Homo sapiens
gggaaagaataatattttgtgacacatgaaaatgtatatgaaattcaaattccagtatccataaataaagtttctcgcagccatgcctgctcctttacatrtcgtttatgcctgtttttgcactatgagggcagagttgagtagttggcaacaaacactacaaggccccaaaatatttattaaatatcccatcacagagaa

SEQ ID NO: 438851 - DNA, 201 bp, Homo sapiens
tatctgtagtctcctggctgatgaggtgtgcagcctggattagaacctccatctgcctgacctggctgcacacaatgcttgttaagttatcccggaaaacrtaaggccatacaggtgtggcagactaattaaattcaccatgctctttgggctgtgtgactgctaccaaaatgtcctaccctacctcacatattcccttgt

SEQ ID NO: 438852 - DNA, 201 bp, Homo sapiens
gccaagatgggacagtgctcgtctgccagtggcagccccattcggagagaattttccctttgaagaatataacccataaaagatcatcaaaactaagggawtaaataaagaggggacctcgatgacatatttaagctctgaataaagctagactctaagcaggggttggcaaactataaccgctgggccaaacacggctgt

SEQ ID NO: 438853 - DNA, 201 bp, Homo sapiens
acagaagacgttttgctattcatcttgttccctgactctgcttcaccaacttgatggaagatggtttaactgacataaaaaccagctatacatgaacagcrgtgattgatggaaccattccaaacatcagccaaaaatggcactgaaagatgccttgggcttcctgttaactgttttatgaggggaccaacaggtttcccc

SEQ ID NO: 438854 - DNA, 201 bp, Homo sapiens
ctgtggcttttgggccaagggtagtggggaaaacagcttcttgtcactgggggaacaagccaagatgggacagtgctcgtctgccagtggcagccccattyggagagaattttccctttgaagaatataacccataaaagatcatcaaaactaagggaataaataaagaggggacctcgatgacatatttaagctctgaat

SEQ ID NO: 438855 - DNA, 201 bp, Homo sapiens
ctaggccaatcctggttctccctgtggcttttgggccaagggtagtggggaaaacagcttcttgtcactgggggaacaagccaagatgggacagtgctcgyctgccagtggcagccccattcggagagaattttccctttgaagaatataacccataaaagatcatcaaaactaagggaataaataaagaggggacctcga

SEQ ID NO: 438856 - DNA, 201 bp, Homo sapiens
tagaagctatagatttgtgtgtccagaatgtttccccaggtgcctccttttgcaaaattggacctcatttttccattagggaacggggcctctcagactcygtggagaagcagagaattatctccagccttgactgcccaggctgcagagaaccgcatcatccggggacatgactgattcagggataggtgtctgcctaaa

SEQ ID NO: 438857 - DNA, 201 bp, Homo sapiens
accataaaaggatcatagcagattgacggtagaagctatagatttgtgtgtccagaatgtttccccaggtgcctccttttgcaaaattggacctcattttwccattagggaacggggcctctcagactctgtggagaagcagagaattatctccagccttgactgcccaggctgcagagaaccgcatcatccggggacatg

SEQ ID NO: 438858 - DNA, 201 bp, Homo sapiens
ttgctgaccactagtaagagaccatccaacaggctcctttctgaagccacatcccgaaaagatcccctcctgatgtctctagaaacatgcaaaaataaaaytgcaacgtcagaaccataaaaggatcatagcagattgacggtagaagctatagatttgtgtgtccagaatgtttccccaggtgcctccttttgcaaaatt

SEQ ID NO: 438859 - DNA, 201 bp, Homo sapiens
taagtattacttagcaaaacagctatgacccaaaatagcatctgttatatgtttgttattcacttcagtaatgactgaaagtgaataaataaaacttgctyggaaaaataaggttttgaaggaagataaaaactgtacatttaagtgtatgaaatcagaaagacataaggtaatagaagtatccatcacataactggcctt

SEQ ID NO: 438860 - DNA, 201 bp, Homo sapiens
ttgattcatttgtggtttcctgttttccataaggagatagttacaggattaaatttctcctcccttttccctatgcactcacacctgggtcccaggacagmaggaccaatcgtcaggaaaatacatccatactgcatcccctgatacttcatctcaggttgggcaggagggttagcagaagagttatttccctttgcgaag

SEQ ID NO: 438861 - DNA, 201 bp, Homo sapiens
ttctcctgcctcagcctcccaagtagctgggattacaggtttgcgccaccgcacctggctaatttttgtatttttagtagagacagggtttcaccatgttrgccaggctggtctcaaactccaggcctcaagtgatccacccgcctaggcctcccaaagtgctgggattacaggtgtgagccaccgcatccggcccttgta

SEQ ID NO: 438862 - DNA, 201 bp, Homo sapiens
acacgagagttgcttgaacctgggaggcagaggttgcagtgagctgaaatcgtgccactgcactccagcctgggcaaaatagactctgtctcaaaataaataaataaataaataaataaatagagaccacttggcaccttgtggcaccatctagagtagattaaggtgatctgaggatgttaccttttgttttaattaacc

SEQ ID NO: 438863 - DNA, 201 bp, Homo sapiens
ccactcctttgagatttggttgaataatctatgttccaaagtaattgttttgaagcaggagatataaaaaaaaaaacaagttttcttggaggctgactcamtgcaaggcccagcgatagacagggctctggaagggctttgataacactatctgcagagccagggccctcaagggatgggttccagagcctctccctgcca

SEQ ID NO: 438864 - DNA, 201 bp, Homo sapiens
aatgagaccatgtctcaaaaaataaataaataaatagatagataaataaataaataaacaaagagtctagggtaactggagtttagaggttctttcagtayaaataaggcctaaataagaattatctacatgaatactcaggttgaataatttatatttaaatgaaaaattgaagggaagccacatcctcagtaagagtac

SEQ ID NO: 438865 - DNA, 201 bp, Homo sapiens
attgaaatgtgggcagaagtgatacatgctacttctaggcctaaattcatgagatccttcataaatgcatttctcttcccctaaacacccccctctctctygtttcttgtcagctatctgatttcagaggatccaaccaggactcaggcttaggggagagcggggcctctgaatataaggatcctgagtctactacttaaa

SEQ ID NO: 438866 - DNA, 201 bp, Homo sapiens
ctgttaatattctcttttaacttaagtataactcaagttaaagttgcagcaactttaagaggatttaaaaatttctgttaccactactattaggttatagytgatttcattaattccttcttcatctttactatgtatttccagagagtgtgataccttttaacgtctaataagagacattcacaagtgttctctttgagg

SEQ ID NO: 438867 - DNA, 201 bp, Homo sapiens
accacttcggcaactccttggacactttccttcttgttaataatttgctttctccgcccctcaaaagcttgctgtttctgtaaatcattacctgtaagagkaaccgctgggagtcctgtaaactttagcccagagcttggctcctcctccagaatgtctccaccaatcaaggaaagtgttttgggccagtcttgctcctcc

SEQ ID NO: 438868 - DNA, 201 bp, Homo sapiens
aaacacccccctctctctcgtttcttgtcagctatctgatttcagaggatccaaccaggactcaggcttaggggagagcggggcctctgaatataaggatyctgagtctactacttaaagtgacagccacctaggaaaatccattaagcaaaaaattctgcatcagacttaagcctctgagctttagatttgtttatttct

SEQ ID NO: 438869 - DNA, 201 bp, Homo sapiens
tgcagtaggtgccagggaaaggcagtctcctaagagatagaaaacacctaaagctggtgatcagcagctttccaataagatctcaggaactgggcaagtgkgctcaagcatgcgtactaagaggcaaaatggcagattttaactggtatacaaccttcctctaggaacacttgactggtaagggaaaaacgcctcaaatga

SEQ ID NO: 438870 - DNA, 201 bp, Homo sapiens
aaaatcaaagaactggaagccagaatttactcaacctgaacaaaagaaagaaactagaatgggaaaaaaaagaaaaaaaagaacagagcctcagggacctrtgaaactatcataaaagatctaacatgggggctaaaaatttactccaagaaataatagctgaaaagttctcaaatttgtcaagagacataactatagaat

SEQ ID NO: 438871 - DNA, 201 bp, Homo sapiens
aaagaaagaaagaaaagaatgaaagaaagaaaaaaaagacagagaaagaaagaaattgatgatgcaagagagaggaagaataactgagggagtaatatccyggagtaagggagagggaatggtgtcaagtccacagtggaaaaggtgacccacgctaggaccttggacaatttttccatggtcattggaaggaatgcagaa

SEQ ID NO: 438872 - DNA, 201 bp, Homo sapiens
caaacctttaccaatcaagtaatttctttgctcagcttccacattcaccctataaacaccctccctttgtgccctgcaatagagccctgaattacttcccmtttggagctgcctgattcatggatcagtttgctcacatgtatgctttaaaattttaatgtgccttagtctatcttgtaacaagtgtaaccattgagttta

SEQ ID NO: 438873 - DNA, 201 bp, Homo sapiens
cttacgatatcaaatattagcatacagataacaagttaaaatatatatatttcaagtcccaagcatatttgagtactatatggaggcaaacttgaaaaacmaaaactcagttttgttaaaatatgtgaggaggcagctttaggctaaatttaagtttggcctaaatcaagcttgtccaacctgttggcccacagtcaacat

SEQ ID NO: 438874 - DNA, 201 bp, Homo sapiens
tattagcatacagataacaagttaaaatatatatatttcaagtcccaagcatatttgagtactatatggaggcaaacttgaaaaaccaaaactcagttttkttaaaatatgtgaggaggcagctttaggctaaatttaagtttggcctaaatcaagcttgtccaacctgttggcccacagtcaacatgtggcccaggacag

SEQ ID NO: 438875 - DNA, 201 bp, Homo sapiens
cctttcaaccaattgccaatcaggagatctttaaatccacctattacctgaaagcccagcctcttcctcctttgagatgtcccaactttccaggctgaacyaatgtatacacatttttttttttttgagacggagtctcactctgtcgcccaggctggagtgcccaggctggagtgcagtggcatgatctcagctcactgc

SEQ ID NO: 438876 - DNA, 201 bp, Homo sapiens
ctgtaagaggaaccgctgggagtcctgtaaactttagcccagagcttggctcctcctccagaatgtctccaccaatcaaggaaagtgttttgggccagtcytgctcctccggattgtcagactgctcctccctcttctttagactgccacgaggaaaaagcagatgtgagaactcaaggttcagggctgctcttctaagaa

SEQ ID NO: 438877 - DNA, 201 bp, Homo sapiens
taatcgcactctatgagccattgcactctagcctgggtgacaagagcgaaactccgtctccacaaaaaaagaaaaaagaaaagattttcaaagtgagataygtgtaatatgaactaacttatgttttaaaggggaatatctatatatctatgtgcacatagatatacacatatgtatatatatgtgtgttatattttaatc

SEQ ID NO: 438878 - DNA, 201 bp, Homo sapiens
cacctttcactagctttgtagcctcactggcagcacttgtcacatttgtgctttcattacacccagacgctgtgtgagaaactcacccaacagcctgatcrcccaggctggaacccaattttaaaccaatgtgaacttgagtctgcccctagaggagtcaaatttggcctggcctttgtacctactcagccctgctgagtg

SEQ ID NO: 438879 - DNA, 201 bp, Homo sapiens
cgagagttgcttgaacctgggaggcagaggttgcagtgagctgaaatcgtgccactgcactccagcctgggcaaaatagactctgtctcaaaataaataartaaataaataaataaatagagaccacttggcaccttgtggcaccatctagagtagattaaggtgatctgaggatgttaccttttgttttaattaacctat

SEQ ID NO: 438880 - DNA, 201 bp, Homo sapiens
atgaaatataagctcagccagtcacaggcagccaactgggctttagtatattgtcttgaacttcccaccagaacagtgcaaataaggcaattgttcaaacytttaccaatcaagtaatttctttgctcagcttccacattcaccctataaacaccctccctttgtgccctgcaatagagccctgaattacttcccatttgg

SEQ ID NO: 438881 - DNA, 201 bp, Homo sapiens
tactataaaatatatatttcatcttcattccagtttcctggtacatagccgctaaaacccttggaatttctgaagtggtaagtgctttttattattattaktattattattatactttaagttttagggtacatgtgcacaatgtgcaggttagttacatatgtatacatgtgccatgctggtgtgttgcacccattaact

SEQ ID NO: 438882 - DNA, 201 bp, Homo sapiens
atatctcctaatgctatccctcccccccccccaccccacagcagtccccagagtgtgatgttccccttcctgtgtccatgtgttctcattgttcaattccyacctatgagtgagaacatgcggtgtttggttttttgtccttgcgatagtttactgagaatgatgacttccaatttcatccgtgtccctacaaaggacatg

SEQ ID NO: 438883 - DNA, 201 bp, Homo sapiens
tgccattctaactggtgtgagatggtatctcattgtggttttgatttgcatttctctgatggccagtgatgatgagcattttttcatgtgtcttttggctrcataaatgtcttcttttgagaagtgtctgttcatatcctttgcccactttttgatggggttgtttgtttttttcttgtaaatctgtttgagttcattgta

SEQ ID NO: 438884 - DNA, 201 bp, Homo sapiens
tgaggcaggagaatggtgtaaacctgggaggtggagcttgcagtgagccgagatcacgccactgcactccagcctgggtgacacagcaagactccatctcaaaaaaaaaaaaaaaaaaagggctgggttcagggagcttctgggtagatgagcatgaggaagttctaggagggtagaacatctggtgaggacatggaagct

SEQ ID NO: 438885 - DNA, 201 bp, Homo sapiens
ctgaccaacattaacattgaaacagtgatcttaaaactgacaaaacagactctttgtagcaataagatccaaattctaaaatgactctagtacagcatcayataacagatagcaggccctgaagaaaatcaaagtcttttaccccaaaatatatttctttgacacattttgaaatggccctgcaaagctgtctcttgtggg

SEQ ID NO: 438886 - DNA, 201 bp, Homo sapiens
gtgaacttgagtctgcccctagaggagtcaaatttggcctggcctttgtacctactcagccctgctgagtgtcctatactgatccccatcacctctaattmatttcattccaccagtgcctgggtcccagttttgacagatatgtttctctatggcaaacttggcactttgagggcctatgttcttaagggcaaaagtcat

SEQ ID NO: 438887 - DNA, 201 bp, Homo sapiens
tccaccacattgctagttctgtgaccttggggaagttaattgttctaatcctcatgttcctcatcagtaaaatgagaatagccacagcatctatcttaaargtcattgtgagtattgaataaaatattcatgtcagttgcacatacaaatattcaataagtgttcactgctgctgttttgttgtagctgttgctaactgga

SEQ ID NO: 438888 - DNA, 201 bp, Homo sapiens
aaaccaaaactcagttttgttaaaatatgtgaggaggcagctttaggctaaatttaagtttggcctaaatcaagcttgtccaacctgttggcccacagtcracatgtggcccaggacagctttgaaattcaaccggcccaacacaaattaataaactttcttaaaacactctgaggtttttctgcaattaaaaaaaattca

SEQ ID NO: 438889 - DNA, 201 bp, Homo sapiens
tgaatctggaaacatgaaatttgaaaaattatattaatagaggattattatggctttttcaggtattaaatggtattgtgattaggttttaaaagagtccytatcttttagagatacataaggattttccacaataaggaagaaaaagagagaccaagagaagaggtacagatatacagacagagaataaagaagtaaaag

SEQ ID NO: 438890 - DNA, 201 bp, Homo sapiens
attctgctttggccatgacctggctgtgaaactctgagtaagttacccaagccaaggtttagattccctgttagatttaaaaataataataatggaaatartaatactcacatcatgggttattaggaaaatccagtaagatcagtcatgacaagtgcttagctctcagccactgttcagtcaacatgtgcttaaaaacag

SEQ ID NO: 438891 - DNA, 201 bp, Homo sapiens
aaaattcaatgagaaatcaaaagcttggtggatggtatgatactataaaatatatatttcatcttcattccagtttcctggtacatagccgctaaaacccytggaatttctgaagtggtaagtgctttttattattattattattattattatactttaagttttagggtacatgtgcacaatgtgcaggttagttacata

SEQ ID NO: 438892 - DNA, 201 bp, Homo sapiens
tgaccaatgatttaatcagtcaggcctgtgtaatgaagcctctaagaaacccaaaaggggctgggtgtggtggctcacgcctgtaatcccagcactttggraggctgaggtgggcggatcatgaggtcaggagatcgagaccatcttggctaacacacggtgaaaccccgtctctactaaaaatacaaaaaaattagccaa

SEQ ID NO: 438893 - DNA, 201 bp, Homo sapiens
aaggggctgggtgtggtggctcacgcctgtaatcccagcactttgggaggctgaggtgggcggatcatgaggtcaggagatcgagaccatcttggctaacrcacggtgaaaccccgtctctactaaaaatacaaaaaaattagccaagtgtggtggtgggcacctgtagtcccagctactcaggaggctgaggcaggagaa

SEQ ID NO: 438894 - DNA, 201 bp, Homo sapiens
gtgaagagcagtgtcatgacactggcattggccttcccccaaatctctctctcttctgctggctgggtttcagttgcccacactctgccacctgtccttasgatatcaaatattagcatacagataacaagttaaaatatatatatttcaagtcccaagcatatttgagtactatatggaggcaaacttgaaaaaccaaaa

SEQ ID NO: 438895 - DNA, 201 bp, Homo sapiens
acagactctttgtagcaataagatccaaattctaaaatgactctagtacagcatcacataacagatagcaggccctgaagaaaatcaaagtcttttacccsaaaatatatttctttgacacattttgaaatggccctgcaaagctgtctcttgtggggaaaagctgcattctgtaggaaaatctccttcctttgttgcggg

SEQ ID NO: 438896 - DNA, 201 bp, Homo sapiens
caggagagtttattaaggtgatcacaggctcagccagacatacatccagaaagtctgagccccaaactaaaggctttcctacttttaaacatcttaaggcrggaaccatgtgaggcaggaagtaagttacggaagagagaaacaaaggcagttaatcaagcattacaacatttcttacatcttgagaaaaacatgtcttcc

SEQ ID NO: 438897 - DNA, 201 bp, Homo sapiens
tagttatctaaatcacacactcatcctgtggcagctgccggggctgcgtccacttacttcctcttctgaaacaggccctcgtccagctctaaataactcakccttcatttattccttattattcttctttgttcttttttgcttattctttagactacatctattatttcatggctgtgtgaactttcacctccttaggtt

SEQ ID NO: 438898 - DNA, 201 bp, Homo sapiens
tgtgtttttgttctcgttggtttcaaagaacatctttatttctgccttcatttcattatgtacccagtagtcattcaggagcaggttgttcagtttccatgtagttgagcggttttgagtgagtttcttaatcctgagttctagtttgattgcactgtggtctgagagacagtttgttataatttctgttcttttacattt

SEQ ID NO: 438899 - DNA, 201 bp, Homo sapiens
acatccctggcctacaggtttctccatacatagtgaactataacctaattggatgtgtaaacagactgtaatggctgttgtaacaagtagccaaatctcarccaagcacagaagccatgctcaaccactcacaggtggctgattgttcaaaccatgttttttatttttatgttttttgagacggagtcttgctgtcgcaca

SEQ ID NO: 438900 - DNA, 201 bp, Homo sapiens
tattaggaaaatccagtaagatcagtcatgacaagtgcttagctctcagccactgttcagtcaacatgtgcttaaaaacagctgctttcagactcagtcgygaatcatggaagcctgtttttttctttttgatgtaagtatccatccctcagtctgatcacctaacctcattatttgtctattattctctaatttaatggt

SEQ ID NO: 438901 - DNA, 201 bp, Homo sapiens
tagagcaggggtggaggacagcagaggagaagcctgaagcataagatagggtgttgcaagtatatgtgcatatctggtacatcaaatggatcttcagaagktgcctgggcttgaccaggtagacccaacagacagaggatgaaagtcacacccagcatagtaagccctctaactccaatcttgtttcctcgccctcaacaa

SEQ ID NO: 438902 - DNA, 201 bp, Homo sapiens
attttttattgttgtttaaagtatttgaaaaaaaattcataacttcaagctattttacatttaagaaaagatgtagtcaaacttggctgatgagagatagwaacccaggagaaactgggaaaatattccaggtgccttttttccccattttgactgacttatgccaattctataaaacactgctcatcatccccctgccaa

SEQ ID NO: 438903 - DNA, 201 bp, Homo sapiens
gaagctgggcaggctgagcctcctgaaggccttctccagacatgaggaggagctgcagcactggtggcaggtgcgggccgcctggagagcaggcacgcagygggggacccgggcccaggagccacctaggctgcttaactaagaggcccaggccccaagtgtccctgctgcagccctgacctggggtgccccactccaggg

SEQ ID NO: 438904 - DNA, 201 bp, Homo sapiens
ccaagtgtccctgctgcagccctgacctggggtgccccactccaggggagcaggtgaggtgggtgggtcgttagcccccttgaaggcacaggtcaggtgcwgtctactgacagagggaggacccgtgacagaggccacagtgcctgggccactgttggtgaccttgccaggcagatgctctcccactccctggaccctgca

SEQ ID NO: 438905 - DNA, 201 bp, Homo sapiens
cagccctgacctggggtgccccactccaggggagcaggtgaggtgggtgggtcgttagcccccttgaaggcacaggtcaggtgcagtctactgacagaggkaggacccgtgacagaggccacagtgcctgggccactgttggtgaccttgccaggcagatgctctcccactccctggaccctgcagcagcctggaaggagg

SEQ ID NO: 438906 - DNA, 201 bp, Homo sapiens
gtgaggtgggtgggtcgttagcccccttgaaggcacaggtcaggtgcagtctactgacagagggaggacccgtgacagaggccacagtgcctgggccactsttggtgaccttgccaggcagatgctctcccactccctggaccctgcagcagcctggaaggaggcgccctccccggtgcccccgccatgagcattagagcc

SEQ ID NO: 438907 - DNA, 201 bp, Homo sapiens
ggatgggctggtctggaggcaggggagcttccgttcgacttttaggaggcacatttttaccgaaggaaagtagggtctgcccctccgggggaaagggggcrtcagctagagaaattcagccacacttgggtctgctgaggtggagacaccagggcaggcaggaggatgaagcccaccctttggttcagcccttgctcagtc

SEQ ID NO: 438908 - DNA, 201 bp, Homo sapiens
gcgccctccccggtgcccccgccatgagcattagagccctctgccctgggggtgccccgcagccctgcccagcccctgccctacccatcttacagatgcakgaggagtctgcggcaccggagaggggcaaggagcccgacctgggaggtggcgaggaggacgagggcctggaaggggagcccgatggggtggaggacacgg

SEQ ID NO: 438909 - DNA, 201 bp, Homo sapiens
caaagttactctggcctcattaaaatgaaagaaagaaaaggctggaaaacagttccttttttctttttatttattttctttttttattttattattattaktagtagtagtagtattttttgagacagggtctcactctgtcacccaggctggagtgtggtggtgtgatcccagctcactgaagccttgagctccctgagc

SEQ ID NO: 438910 - DNA, 201 bp, Homo sapiens
caggaggagtctgcggcaccggagaggggcaaggagcccgacctgggaggtggcgaggaggacgagggcctggaaggggagcccgatggggtggaggacaygggtgcctggggaggtgtgagccagatgggatccgtgcatgaggagggaagcgaggaggaggaagaggaggaaggggacagggatgaggactcagaggaa

SEQ ID NO: 438911 - DNA, 201 bp, Homo sapiens
ggaggtgtgagccagatgggatccgtgcatgaggagggaagcgaggaggaggaagaggaggaaggggacagggatgaggactcagaggaaagggagctgcyggaggaagaggagatccccaggagaagggcctcctccctggccgagtcgtttgaggaggagctgctggcccagctggaggagtacgagcaggtcatcctg

SEQ ID NO: 438912 - DNA, 201 bp, Homo sapiens
gacaacagctcggagacctggagaggcacccaggacctgttcttggccaggcggggctcagacacgaacgtggacggtgagggagcccctagggcctctgmctgcacctgctgggcccctgagctcgaggcctgcttcttgcagggtcgctgcttgtgccctgcggaattccctcccgggactgtctgcctcctgaggact

SEQ ID NO: 438913 - DNA, 201 bp, Homo sapiens
aatctctaaatagcatgctcatagtggccattctagattgttctccatcttaacattatttaatgcttccttttttttcctcccttgccaccgccccccarcacacacaagggcagcctttccatccaccctcctcctcgtatcattctatcacaatcaatgttgcactgacatcattaggacagttatttgtctcacaca

SEQ ID NO: 438914 - DNA, 201 bp, Homo sapiens
agacagggtttcaccatgttggtcaggctggtctcaatctcttaacctcgtgatccgcccaccgcagcttcccaaagtgctgggattacaggcgtgagccmctgcacctggccgccggccatcttttaggaaaaagtggatgggtgccacacatactcaggttgggcgaaatgaccccacctcttttttctccccggctgt

SEQ ID NO: 438915 - DNA, 201 bp, Homo sapiens
gagaaagctcaccaagcgggactgtgtcatctcagagttggacaccaaggtcagccagctgcaggagcaggtggaactggaccagaaccacctgcagaggwggaagcagctgcaggaggatttgcagagcaagaaggagatgattcagcaggcagagcagcacacccgcgtggccctggagagctcccagtccagggtatg

SEQ ID NO: 438916 - DNA, 201 bp, Homo sapiens
ggtcatgcgtatgaaccatccaagggaagggctgcaggcttggctgcctccaggagctccaaggggctcatcaggcttttctttatctcctctctgccttygtctgggctgtcatagataaactcttctcatttggtggcaagagagccacctgcagcaacaagtttgcagctggcattgtgtgaactcggcagctctaac

SEQ ID NO: 438917 - DNA, 201 bp, Homo sapiens
ctgcaggcttggctgcctccaggagctccaaggggctcatcaggcttttctttatctcctctctgccttcgtctgggctgtcatagataaactcttctcayttggtggcaagagagccacctgcagcaacaagtttgcagctggcattgtgtgaactcggcagctctaacaggaaatcggatctcccttccagcagtcctt

SEQ ID NO: 438918 - DNA, 201 bp, Homo sapiens
ttttctgcccaggatcactgcctgtctgagctggagatacaggttcagaagaaagacgaggagatcctgctgctccaggaggagagggaggccctgaagaygcagctgaaatgccttctgaaaggcaaaggccaagagacatccatgtccccaggcaggagggtgagccagccccagcggggcacagcgcagagctctaag

SEQ ID NO: 438919 - DNA, 201 bp, Homo sapiens
ctggaacgtggaccggttctcagggttctgatcaacaggcaggggagaggcgaacagaggcacgaaatgacaaatgagagccatgagctgatgcaacaggsgggggagagatgaatggaggcgcaaaatgacaaatgagagccgtgagccgatgtctaggcacctgcacctggcttctgacttgctttctgaatggggcaa

SEQ ID NO: 438920 - DNA, 201 bp, Homo sapiens
cacatcccccagccccttggcaggaggatgcaggtcccctccccagacatgagaggccgctgtcccttctaggacaggcagtggtctgtccctggggtgcygcaggaggggctggaaagctgagggtcccacgggcgtcttgcaggagcagctctcagacgcttcgctgaagctgggcaggctgagcctcctgaaggcctt

SEQ ID NO: 438921 - DNA, 201 bp, Homo sapiens
tcctcaaaatgagggtgacaagagttaggagacagattggagtctgtctgggcagataggggtttccgagggaagtctcggaagggtggatgtcgtcatcraagacgccagaggagctcggcagggaagggtctcatttctcacttggcctccgctgtcgccacagggtacctccttcccttcagtaagagcatctgcgag

SEQ ID NO: 438922 - DNA, 201 bp, Homo sapiens
cctggagagctcccagtccagggtatgcccagcccttcctcctgagggtctgtcccagcagctggcggccgagcacccaggcctctgcccaccgcccaccraggtagaaccggggtctgtgtacgctggggctcgggctggttctgccgtgtacaccagcatccacacagagttgacactcaagaaatgtgggtagaggac

SEQ ID NO: 438923 - DNA, 201 bp, Homo sapiens
tttttgtagagacggtctcactatgctgtccaggctggtcttgaactcctgggctccagcaatctgcctgccttggcctcccgaagtgttgggaatacagrtgtgagctaccgtgcctggccctgaccttgatttagaatccaaaattaagcaaaggtcaaggtcatgtatggaggcttttgaagtcaggttcccaccaga

SEQ ID NO: 438924 - DNA, 201 bp, Homo sapiens
gggaaaagccgggcctgtcctcattcaggtccacattcaggcaacaaagctcacttggtctttgcatcccacgcctcatgttacctaaggaggccagcccrtctcagaggcacagttcgatgtccagctcgatggccagggccctggtgctcctccagagcatggccagccgggacgcccggtgcccagaatggaaaccgc

SEQ ID NO: 438925 - DNA, 201 bp, Homo sapiens
aagccatgaaaagtgagggtgagctgttccttcctggtacataaaaaataaggtggtggggggtgcagcccactggccaggtgccttcttgggtaaaggcraatgatagtgttgtccctttgctcacagctcgagaggttaaggaataagatcatccaggccacctttagcatctccgggaccaagtccttggccaacgag

SEQ ID NO: 438926 - DNA, 201 bp, Homo sapiens
aaagccgggcctgtcctcattcaggtccacattcaggcaacaaagctcacttggtctttgcatcccacgcctcatgttacctaaggaggccagcccatctsagaggcacagttcgatgtccagctcgatggccagggccctggtgctcctccagagcatggccagccgggacgcccggtgcccagaatggaaaccgcacca

SEQ ID NO: 438927 - DNA, 201 bp, Homo sapiens
ataagactgatgtgatttcttccttgaattctgaagaatttgccattgaaggcttctgtgtctggggattcctcacaggagcactcttattttattaattwatttatttatttatttttgagacagagtctctctctgttgccaggctggagtgcagtggcgccattcagctcgctgccacctctgcctcccgggttcaag

SEQ ID NO: 438928 - DNA, 201 bp, Homo sapiens
aatcggatctcccttccagcagtccttgcactattttgagacgtgcaagtgtctcgggaccatggcttgggtgatgaaatgtgatttctgcactttttttyccctttaactttgtatttcaggcataaagtggtaagaatccatactacaaagattcccatgtacttttccattccccaaatgttaaatgtggccacgttt

SEQ ID NO: 438929 - DNA, 201 bp, Homo sapiens
ggggcagggaaaggtggccagccggcggcttccactctctgtcctccccaggctgctgggtgggtgtctgagggtgggccacccaggcaatgacatgcacrgtgggcgtgtgtaaggctggctggccttgtcctttactgcaaggccacttgctgggggctgctctgggggtgcctagagccccactgccccccagaactg

SEQ ID NO: 438930 - DNA, 201 bp, Homo sapiens
attcccaccacagaaactggcaacgccacaaagccgagggttgtttgttttttctccccctggagagccggttgtaagtattcaccagcacacccctgctrcagcaagcctctctggaggaggaggagagggtggcgtcccgggcagctggcacggactgtgcagaccggcctcaaggccaaggtgaggaactgggaaggc

SEQ ID NO: 438931 - DNA, 201 bp, Homo sapiens
ctgtttgcctgaaaacatctttatttttgtctttaattttgaagaattgagggagttgagattctgagaacaaaagtttgaggagctccccgacaggcccytagggaagcttggagggtgttgccggttaagtgtcggggctgcaaagaagactggtgtcctgtggtatagtggggtgcagggacacaccacgggccaggt

SEQ ID NO: 438932 - DNA, 201 bp, Homo sapiens
gggaaaggtggccagccggcggcttccactctctgtcctccccaggctgctgggtgggtgtctgagggtgggccacccaggcaatgacatgcacagtgggygtgtgtaaggctggctggccttgtcctttactgcaaggccacttgctgggggctgctctgggggtgcctagagccccactgccccccagaactgcccatc

SEQ ID NO: 438933 - DNA, 201 bp, Homo sapiens
gccgccagcctcaccggcttcatgtccaaaatggaacttcgaagggtcttccccacgcatcctgactgcccccagttcagcaccagggccacatccatgtyccactgtggtaagagccccccaccaggaccgcctgtgaaactgcctgtcagagtcgaggggccgggggaggccttcctgcacccttcagcctgcgagcag

SEQ ID NO: 438934 - DNA, 201 bp, Homo sapiens
ggaaggccacctcgacggctgtgtttcttgtgtagagaattatctcagagagaagcgactactataatcagctgaagcagaaaggcgtcaaagtgcccccsctgcaacagtcagaggccttcctgaccagcaaatccaagaaggggacctccaagtaggcccagccaggcccccaaatacggtcagcccagcagaggccgg

SEQ ID NO: 438935 - DNA, 201 bp, Homo sapiens
agctgctgcttttgaaatccgctctgtgctcagggagccagggcagcaatgaagctgggggtggaggggggcccacttctcctggccactatgattatgayttgtctccccagccttcttgcttttctattgtttcacccactaaaaattcagtagggtcaggggctaggggagtggaaatggttgaagattctggaagct

SEQ ID NO: 438936 - DNA, 201 bp, Homo sapiens
ggttgtgcggctgatagcggccccgctaggattccccaaggtgtgtgggaggctggagcccatgtgcccagccacagctctgccctgtccctgggctggargcaagtgtccctgtctcctgagccgctgtgctcttggccactcctcaagcatctcctggcccctgagtcctgggggtaagaacgccctatccgtgcttag

SEQ ID NO: 438937 - DNA, 201 bp, Homo sapiens
tctcactatgctgtccaggctggtcttgaactcctgggctccagcaatctgcctgccttggcctcccgaagtgttgggaatacaggtgtgagctaccgtgmctggccctgaccttgatttagaatccaaaattaagcaaaggtcaaggtcatgtatggaggcttttgaagtcaggttcccaccagaaatgccaactgcaac

SEQ ID NO: 438938 - DNA, 201 bp, Homo sapiens
gtccctgggctggaggcaagtgtccctgtctcctgagccgctgtgctcttggccactcctcaagcatctcctggcccctgagtcctgggggtaagaacgcyctatccgtgcttagagagactgctactccactgagcccactcttgtcgtttttgttaagcgttttaggtttttactcttatcaaagttattcatgcacat

SEQ ID NO: 438939 - DNA, 201 bp, Homo sapiens
caagagcaaaactccatctcaaaaaaaaaaaaaaaacgatgaacaggggtaaagttttggggacaggatatgttggcaaatgtccttactctataccctcrtaacatctgggttggatatagcattcctgtttgaaaaccattttccttcagcatcacagaggccttcctctgttgtcttccaggttggccgatgataagt

SEQ ID NO: 438940 - DNA, 201 bp, Homo sapiens
agggtatgcccagcccttcctcctgagggtctgtcccagcagctggcggccgagcacccaggcctctgcccaccgcccaccgaggtagaaccggggtctgwgtacgctggggctcgggctggttctgccgtgtacaccagcatccacacagagttgacactcaagaaatgtgggtagaggacggagtgagagtgcaacaga

SEQ ID NO: 438941 - DNA, 201 bp, Homo sapiens
agcatcacagaggccttcctctgttgtcttccaggttggccgatgataagtccaaagtcgttcatggttccttctgggttggttgttcctctctggaaagytgtaagatcctatctttgtcccaggtgatctgaaacctcccagagttgtgctttattgagggtgtgttttcatctgttgtattgggcactcagtggccat

SEQ ID NO: 438942 - DNA, 201 bp, Homo sapiens
gttttattgtttttttatggccttctctcacactattggacctcctgtcccgctcttgttttatctgttatctcaacctttttgtctctttgtctcttacmgatactttctagaagatttccttaactttatcaacagctcttttcattttgttataatattttactctgatgttctctgagtgttccatttttctttttt

SEQ ID NO: 438943 - DNA, 201 bp, Homo sapiens
gttcgtcaatggcagtggtgggcggagccccatgggcagggctgcgggtcttgggttgcattgtgaaggggttggatcactggctggaaaggaggagggcrcctggatagggaggcatggtgttgcccccctcatctctgagtcatagcgtgcttgctggaccaggcaccattctaagtaccttcttggtatcaaagtcat

SEQ ID NO: 438944 - DNA, 201 bp, Homo sapiens
gacggctgtgtttcttgtgtagagaattatctcagagagaagcgactactataatcagctgaagcagaaaggcgtcaaagtgccccccctgcaacagtcasaggccttcctgaccagcaaatccaagaaggggacctccaagtaggcccagccaggcccccaaatacggtcagcccagcagaggccggggcccagctccag

SEQ ID NO: 438945 - DNA, 201 bp, Homo sapiens
ttagtgcaggcttctgcgggctggtggtgtgcacctgcccccggctccgcattctgtgacttcacttccgtggctgaaaatcagccactgtgggaatattmccaccacagaaactggcaacgccacaaagccgagggttgtttgttttttctccccctggagagccggttgtaagtattcaccagcacacccctgctgcag

SEQ ID NO: 438946 - DNA, 201 bp, Homo sapiens
catctcagagctgcctgagaaagaggatgccctggtacctctcagtcatccacgagaaggtactggcggagggggtgcaaatcccggccccccacccctckctctgcgtccggctgggaggacagccctgctccctgacaggctctggttctagtatctggttagctgcatcaagcaggtccccatggcctaaaatgacct

SEQ ID NO: 438947 - DNA, 201 bp, Homo sapiens
cccagccccttggcaggaggatgcaggtcccctccccagacatgagaggccgctgtcccttctaggacaggcagtggtctgtccctggggtgctgcaggargggctggaaagctgagggtcccacgggcgtcttgcaggagcagctctcagacgcttcgctgaagctgggcaggctgagcctcctgaaggccttctccaga

SEQ ID NO: 438948 - DNA, 201 bp, Homo sapiens
aattttccctttaggaaactttttgccttcatctacactggggtctgagtctaggaacatctagtttttgtttttttgtttgtttgtttgttttgagacasagtctcgctctgtcgcccaggctggagtgcagtggtgcgatctcggctcactgcaagctctgcctcctgggttcacgccattctcctgcctcagcctccc

SEQ ID NO: 438949 - DNA, 201 bp, Homo sapiens
tttttttctctatgtctccaaagttgctgtgaccctaagtatccaaacacaaacaactcactttcttcaccttcccaggactcataacatgagcagttatmgagtaaacatttacatgtgcattcattcaacaaatttttttttcatttttgagacagggtcacactctgttgcccaggctggagtgcagtggtgcaatct

SEQ ID NO: 438950 - DNA, 201 bp, Homo sapiens
tgaggctgaggcaggagaatctcttgaacctgagaggtagaggttgcagtgagccgagattaaaaaaataaaataaaataaaattagccggatgtggtggmatgttctgtaatcccagctactgggggtgctgaggcaggagaatcactttaacctgggaggcagaggttgcagtgagctgagatcgtgccattgcactcc

SEQ ID NO: 438951 - DNA, 201 bp, Homo sapiens
gtaatcccagctactgggggtgctgaggcaggagaatcactttaacctgggaggcagaggttgcagtgagctgagatcgtgccattgcactccagcctggrcaacagagcaagactctgtctcaaaaaaaccaaccaaacaaaaacattaacttgaacaaagtctattcttagtttacttgagccattcagatgatttggt

SEQ ID NO: 438952 - DNA, 201 bp, Homo sapiens
tgatacctgctgtcaatcacattttcactttctcaaaccccagatccctaagtgtctcaaactgggattctgctgtgaagtaaagcagcacccaaagaaaatttggccacccaatttattctgccagccaggagtagtataacaatagccaacctgctgaaatattcatttgggccacatttgcttgaatgtagtgatatt

SEQ ID NO: 438953 - DNA, 201 bp, Homo sapiens
tgttggttgatcctgtccttgggcgagtcactttcttttgcaggacttcatcagtatctgcctattacagtgggtggactaaggaaagggagcaagttaayatttacaatataatttgaacacagtccctttttcagcaaagtacgatttttcttttcaagatgaaggctaagaagaaatacagtccgatctaaacaattg

SEQ ID NO: 438954 - DNA, 201 bp, Homo sapiens; identical to SEQ ID NO: 304463

SEQ ID NO: 438955 - DNA, 201 bp, Homo sapiens
ggggtgagggataaaagactatacattgggtatagtgtacactacttggatgatgggtgcaccaaaatctcagaaatcactattaaaaaaactcattcatrtaaccagacaccactcactccccaaaaacctattgaaataaaaaataaattctaaaaaacgggaaaaaaattcacagaactgcacacccaaaagaaaaaa

SEQ ID NO: 438956 - DNA, 201 bp, Homo sapiens
gagcccagctcccccagcaggccagggctggacaggtcagtggtgtggggagagaggctcgctcctgcgtcctagttaggctttgccagctattactgttkgttgatcctgtccttgggcgagtcactttcttttgcaggacttcatcagtatctgcctattacagtgggtggactaaggaaagggagcaagttaatattt

SEQ ID NO: 438957 - DNA, 201 bp, Homo sapiens
gtgcagtggtgcgatctcggctcactgcaagctctgcctcctgggttcacgccattctcctgcctcagcctcccgagtagctgggactacaggcgtgtgcyaccacgcctggctaattttttgtattttttagtagagacggggtttcaccgtgttagccaggatggtctcgatctcctgacctcgtgatccacccgcctc

SEQ ID NO: 438958 - DNA, 201 bp, Homo sapiens; identical to SEQ ID NO: 304451

SEQ ID NO: 438959 - DNA, 201 bp, Homo sapiens
gtttttgtttttttgtttgtttgtttgttttgagacacagtctcgctctgtcgcccaggctggagtgcagtggtgcgatctcggctcactgcaagctctgsctcctgggttcacgccattctcctgcctcagcctcccgagtagctgggactacaggcgtgtgctaccacgcctggctaattttttgtattttttagtaga

SEQ ID NO: 438960 - DNA, 201 bp, Homo sapiens
gaaactttttgccttcatctacactggggtctgagtctaggaacatctagtttttgtttttttgtttgtttgtttgttttgagacacagtctcgctctgtygcccaggctggagtgcagtggtgcgatctcggctcactgcaagctctgcctcctgggttcacgccattctcctgcctcagcctcccgagtagctgggact

SEQ ID NO: 438961 - DNA, 201 bp, Homo sapiens
aagccccctgtggaaaccaggagagtaagtactaaaatggagccttagtactaaaatggagccttcaaggctattagctattcctgttctgttacaagtcmggattccggttaccagcacatcttggtttttcgtgcagattgaattgactgaactcattcttgggtttcactgtctgcagaataacattcaactattatg

SEQ ID NO: 438962 - DNA, 201 bp, Homo sapiens
ccctttaggaaactttttgccttcatctacactggggtctgagtctaggaacatctagtttttgtttttttgtttgtttgtttgttttgagacacagtctygctctgtcgcccaggctggagtgcagtggtgcgatctcggctcactgcaagctctgcctcctgggttcacgccattctcctgcctcagcctcccgagtag

SEQ ID NO: 438963 - DNA, 201 bp, Homo sapiens
actcattcatgtaaccagacaccactcactccccaaaaacctattgaaataaaaaataaattctaaaaaacgggaaaaaaattcacagaactgcacacccmaaagaaaaaaaaaagaactcttcaccagcaaaacagcttgaggagctccatcactgctgggtaaagcccctaggttctgactgggtgaagagagtagtag

SEQ ID NO: 438964 - DNA, 201 bp, Homo sapiens
aggcaggaattggagaaaatttccctagagtacatcatgcgctgtctgcgggaagtcagcttctgctacccgcaaaacttcctgggcaaggaggtggtggrcaactgcatccaggagcacattaaacagctgcattgcaagggggccctgcgagacagccagctggctgggatgtgtgcagtgtctctaaagggtgaactg

SEQ ID NO: 438965 - DNA, 201 bp, Homo sapiens
tcctatggctattttcagaggagaaatcattcgtggcagatgtggaggccaattgtgaaaaagtcctgctctcctggtcagatcgcaggaagctacacgargtgctgtcttcctatgagaccagatgtgctatactgtttggtactttgataatgaagaaaggacagaagccaaaaagaaattcaggaatttaattaggaa

SEQ ID NO: 438966 - DNA, 201 bp, Homo sapiens
ggatcctatggctattttcagaggagaaatcattcgtggcagatgtggaggccaattgtgaaaaagtcctgctctcctggtcagatcgcaggaagctacasgaggtgctgtcttcctatgagaccagatgtgctatactgtttggtactttgataatgaagaaaggacagaagccaaaaagaaattcaggaatttaattag

SEQ ID NO: 438967 - DNA, 201 bp, Homo sapiens
ctgtccccagtactgactgcagtggcttgggaccatggccacactccccacaccttggcttcacatcacatacatcgttccctctctgggtgcacgctggrggtccccgacttctgcactatgcgtgaaatgcccctgggacacatcatgaggcaggaattggagaaaatttccctagagtacatcatgcgctgtctgcgg

SEQ ID NO: 438968 - DNA, 201 bp, Homo sapiens
gtggcttgctatcttaaaaatggaataggttacattcatcatgtggacacctcaacaacgatggctgctgcaccacctgcatctactatctgaacaagaaytgggataccaggctacacggtgggatcctatggctattttcagaggagaaatcattcgtggcagatgtggaggccaattgtgaaaaagtcctgctctcct

SEQ ID NO: 438969 - DNA, 201 bp, Homo sapiens
aagtcagcttctgctacccgcaaaacttcctgggcaaggaggtggtgggcaactgcatccaggagcacattaaacagctgcattgcaagggggccctgcgrgacagccagctggctgggatgtgtgcagtgtctctaaagggtgaactgtggggtgatcagttcaccccacagttctgggagcaacaagaagggccgcgag

SEQ ID NO: 438970 - DNA, 201 bp, Homo sapiens
ctgagagttgtgagcaactttcccctgtccccagtactgactgcagtggcttgggaccatggccacactccccacaccttggcttcacatcacatacatcrttccctctctgggtgcacgctggaggtccccgacttctgcactatgcgtgaaatgcccctgggacacatcatgaggcaggaattggagaaaatttcccta

SEQ ID NO: 438971 - DNA, 201 bp, Homo sapiens
tcttcttaccatgcctgaggcagacaatttaaggcttgattcctcaccctttcccttcatctgctgaaatcccatttagttttagtgcaccaggcatgcastggtatttcatcctatgcattccttccacagcctgacctataaagggctgacactgagtcctggcttgttcagatcagagagaattaacacttttatttc

SEQ ID NO: 438972 - DNA, 201 bp, Homo sapiens
gtaaatggatgatacaaattaatacaaccaattcattttatttggtttggttttggtttttgaatgggtttatgggtttaagagacattgctctctgttgwttatgtgtattcagtgtcagaaaggaaaagtgagcagtgtgaagtcttattagatggaagacaggtctaaggcacatggaaaactgatattcgtgatgga

SEQ ID NO: 438973 - DNA, 201 bp, Homo sapiens
tatttcatcctatgcattccttccacagcctgacctataaagggctgacactgagtcctggcttgttcagatcagagagaattaacacttttatttctttratttcaaaagcttctgaggtaacttttgagctcgtaaatgtcaataatttgttgtcaagacaattatattcttaacccagctgctacatacagggaacat

SEQ ID NO: 438974 - DNA, 201 bp, Homo sapiens
tgactatgcttctcaaaatgtaaatggatgatacaaattaatacaaccaattcattttatttggtttggttttggtttttgaatgggtttatgggtttaasagacattgctctctgttgtttatgtgtattcagtgtcagaaaggaaaagtgagcagtgtgaagtcttattagatggaagacaggtctaaggcacatggaa

SEQ ID NO: 438975 - DNA, 201 bp, Homo sapiens
tatttctttgatttcaaaagcttctgaggtaacttttgagctcgtaaatgtcaataatttgttgtcaagacaattatattcttaacccagctgctacatayagggaacatagagactgacagaaagtcagtgaatttagaattaaaacagtaagtttatctgattgactatgcttctcaaaatgtaaatggatgatacaaa

SEQ ID NO: 438976 - DNA, 201 bp, Homo sapiens
gcacccctggggatcctgtcctggggaacggagtggctggcgccagtgaagaagacccagctgcggccttcttggcactgcaagagagcaagactatgggkatcaagaacaacaaggtcgccttcgacatcctggatggtgtcacccccaggccccagccacaaggtgaacagctgggagtccagatgctgttgacggagt

SEQ ID NO: 438977 - DNA, 201 bp, Homo sapiens
aggaacaacatctcccagacactaccacagccacgattgccaggcatggtgttggtgggttggtgtctgtgtcgttaaattgcacgacatggctgagcaasatcccttcggtgtccctgctggcacccctggggatcctgtcctggggaacggagtggctggcgccagtgaagaagacccagctgcggccttcttggcact

SEQ ID NO: 438978 - DNA, 201 bp, Homo sapiens
agcagctacagaaaagaaaggcaaactacagggcagaagattttgtaaatgacattgacgagtcatccccctgcactgggtggtaacaggtggcccggttktttgactgtaaccccaagtcagcaagcagggcaaagaggtctcctgtatgcactcagtcctcaactccctcaagcaggcgacccctggtgcactgacaaa

SEQ ID NO: 438979 - DNA, 201 bp, Homo sapiens
ggtgaacagctgggagtccagatgctgttgacggagtgatgatggtgactactaccaggaaagtaatggtccaagagacaattatgcagctatttcacaartggatcgattcccatccagcctgaaaatatatgcagatgcaaagaagagaaaatggaatgcttagcagcccttgctgcttattctcagaagcaagaagca

SEQ ID NO: 438980 - DNA, 201 bp, Homo sapiens
catggtgttggtgggttggtgtctgtgtcgttaaattgcacgacatggctgagcaagatcccttcggtgtccctgctggcacccctggggatcctgtcctrgggaacggagtggctggcgccagtgaagaagacccagctgcggccttcttggcactgcaagagagcaagactatgggtatcaagaacaacaaggtcgcct

SEQ ID NO: 438981 - DNA, 201 bp, Homo sapiens
tgggttggtgtctgtgtcgttaaattgcacgacatggctgagcaagatcccttcggtgtccctgctggcacccctggggatcctgtcctggggaacggagyggctggcgccagtgaagaagacccagctgcggccttcttggcactgcaagagagcaagactatgggtatcaagaacaacaaggtcgccttcgacatcctg

SEQ ID NO: 438982 - DNA, 201 bp, Homo sapiens
gctggcacccctggggatcctgtcctggggaacggagtggctggcgccagtgaagaagacccagctgcggccttcttggcactgcaagagagcaagactaygggtatcaagaacaacaaggtcgccttcgacatcctggatggtgtcacccccaggccccagccacaaggtgaacagctgggagtccagatgctgttgacg

SEQ ID NO: 438983 - DNA, 201 bp, Homo sapiens
agctatttcacaagtggatcgattcccatccagcctgaaaatatatgcagatgcaaagaagagaaaatggaatgcttagcagcccttgctgcttattctcmgaagcaagaagcagagtggaaagaaaaagcgataaatgagctagaagaatggcgtgcaagacaagacgagcagctacagaaaagaaaggcaaactacagg

SEQ ID NO: 438984 - DNA, 201 bp, Homo sapiens
ccataccaatagttaactattttaactattaaaagttaaaaatttatcaaaacttaaacacacacataccaactgtacatggcaccattcacagttgagasaaacgtgagcataaagatgtggtattaaatcataactgcatacaattaattgcagtgcgtactgtcctgctgtgaataatttcctagccacctcctgttg

SEQ ID NO: 438985 - DNA, 201 bp, Homo sapiens
ttaagaaaagctttcgcttggattcatacacagttgacccttgaacaacacaggtttggactgcgcagagccacttacacctggattttttcaatacatayattggaaaattttttggagatttgtatcactttgaaaaaacttagatgaaactcggatgaacttttcaattaaaatattgaaaaaaatgaagaaaaaggt

SEQ ID NO: 438986 - DNA, 201 bp, Homo sapiens
ctccgggcagatggtaagtttgcatccatcagagataaggcccaaagtgtctactaaatcagaaatgtgcagactatatgaaccattaattccccttctaygcataaccaacagaaatacatgcatacacgcaccaaaagccacatactagggtgatcgcagtagcactacttacaacaggcaacattagaaagcactcaa

SEQ ID NO: 438987 - DNA, 201 bp, Homo sapiens
gagtcttgggcacgtgggtctcgggtcactggttttgactttagggctttgttacagatgtgtgaccaaggggaaaatgtgcatgacaacactagaggtakgggcgaagccagaaagaagggaagttttggctgaagtaggagtcttggtgagattttgctctgatgcatggtgtgaactttctgagcctcttgtttttcc

SEQ ID NO: 438988 - DNA, 201 bp, Homo sapiens
tgtggccatggggatcctaagaaccttctgtttggattagcaaacattcgaggtgggagtgtgagttcgctaaaggactggcccacaattacgctctcaayttgtgtcctcaaagaggatcacttttcacaggctagtgaattttaccccttgaattttgtagtaatcccctttaggattattagtccctagtgcccagtt

SEQ ID NO: 438989 - DNA, 201 bp, Homo sapiens
attgctaactaatgtagcattaactaacgattggaaactacatttacaacttcaaagctgttttatacatagaaatcaattacagttttaattgaaaactrtaaccattttgataatgcaacaataaagcatcttcagccaaacatctagtcttccatagaccatgcattgcagtgtacccagaactgtttagctaatatt

SEQ ID NO: 438990 - DNA, 201 bp, Homo sapiens
tgaaatataaaaaaaagtgtgtcaaggccggtaagtaaatacggcatttgcttttattatttgaagaaacttgtaacttgaggcagcatagctctcttcayctttgcacagaagaactgagccctaggggagagttgaatatccaagcacccccgatggtggtggcagaagcacctatggctcctgatctccagccagtac

SEQ ID NO: 438991 - DNA, 201 bp, Homo sapiens
tcaaagatactgttttgataaaggctgtatttaaattagactctggttatcacgtaatgggcagatgttctctgtttagcagtaaaatgttagagccccayaaaaaattagccgggcgtggtggcgggcgcctgtagtcccagctactcaggagcctgaggcaggagaatggcgtgaacctgggtggcagagctagcagtg

SEQ ID NO: 438992 - DNA, 201 bp, Homo sapiens
tggggcagagatacctttttctaaaatgtaaaaactttcattcaaatttccaggctgcctagaccacataatgaaatataaaaaaaagtgtgtcaaggccrgtaagtaaatacggcatttgcttttattatttgaagaaacttgtaacttgaggcagcatagctctcttcatctttgcacagaagaactgagccctagggg

SEQ ID NO: 438993 - DNA, 201 bp, Homo sapiens
tgtcttgggcagcaagtactttgagactttggaaacaatgataaaaagttcactatgtagcagcgtccctatctcttggacattgttcctgagaacttggrtttgtttccataaagccctgtggggaacttaaatgagggaagagttagcaagttcatctacatggttctctctcaactcacaggaagcctgtgggatccg

SEQ ID NO: 438994 - DNA, 201 bp, Homo sapiens
ggtttcactatgatggctaggctagtctcaaactcctaacctcgggtgatctgcctaccttggcctcccaaagtgctgggattacaggagtgagccaccgyacccagccttattttggaataattttagatttacagaaaagttgcaaagatagtacagtttccatatacctctcacccagcttctcctattaacgtcttg

SEQ ID NO: 438995 - DNA, 201 bp, Homo sapiens
tgtttttagcaaagcagcgatgtacggatccccaaactgtcttgggcagcaagtactttgagactttggaaacaatgataaaaagttcactatgtagcagygtccctatctcttggacattgttcctgagaacttgggtttgtttccataaagccctgtggggaacttaaatgagggaagagttagcaagttcatctacat

SEQ ID NO: 438996 - DNA, 201 bp, Homo sapiens
tgctgctcacacgggctggtaaatagctatgactcagagcttagagcaagatcccttggttcaaatcccattttcggctacttctctgttttgtgcctttygtaagtcagcatctctgggcctcagtttttccctaccagccaatggaagagaattggacttaaattatatcctggctttaaaactttatacttctctgat

SEQ ID NO: 438997 - DNA, 201 bp, Homo sapiens
acaaactaaaagggcaacacactaaggtatactgtttctgtactgcagtgttttgggaattgagagttccttgctttgcctttcagtggacattttcctayatcggcttccctgtagagctgaacacagtctatttcattggggcccataatattcctaatgcaaatatgaatgaagatggcccttccatgtctgtgaatt

SEQ ID NO: 438998 - DNA, 201 bp, Homo sapiens
ataaaattttcaaatattgctaactaatgtagcattaactaacgattggaaactacatttacaacttcaaagctgttttatacatagaaatcaattacagytttaattgaaaactataaccattttgataatgcaacaataaagcatcttcagccaaacatctagtcttccatagaccatgcattgcagtgtacccagaac

SEQ ID NO: 438999 - DNA, 201 bp, Homo sapiens
aatttttttaattaaaaaaaaaaagaagtgaggaattgtgaatgggggaaggtttggtgtgagtcactgagaggagatggcatggcatcagactgggctgsgaaagacagtgtcatggaagtcttgctttttcccagggccatctccagagtggatgctacaacatgatctaatcccgggagacttgagggacctccgagt

SEQ ID NO: 439000 - DNA, 201 bp, Homo sapiens
gcaaaagcaacttccagtcctacagctgtgtgaggtgcaattacacagaggccttccagactcagaccagaccctctggtggtaaagtaagcacttttttrttttttgttttgttttttgagatagcatcttgttctgtcacccaggctggagtgcagtggtgcgatcatggctcactgcgacctcaatcttctgggctca

SEQ ID NO: 439001 - DNA, 201 bp, Homo sapiens
acccagaatagtgcagagctatagccacctttgcaggcatcctatgaaattcaagctgacctatgaggaggagggagcttgggctttggaatctgaattcrtatctgctacttgctgatgagttttctaagtttaagcagagctccctgaaacttcctaagcctcacgaaccccatctgtaaactggagacagtggtgcct

SEQ ID NO: 439002 - DNA, 201 bp, Homo sapiens
aaaagagacccagaatagtgcagagctatagccacctttgcaggcatcctatgaaattcaagctgacctatgaggaggagggagcttgggctttggaatckgaattcgtatctgctacttgctgatgagttttctaagtttaagcagagctccctgaaacttcctaagcctcacgaaccccatctgtaaactggagacagt

SEQ ID NO: 439003 - DNA, 201 bp, Homo sapiens
tgcatgacaacactagaggtatgggcgaagccagaaagaagggaagttttggctgaagtaggagtcttggtgagattttgctctgatgcatggtgtgaacwttctgagcctcttgtttttcctcagctgactccatattttcctacttgtggcagcgactgcatccgacataaaggaacagttgtgctctgcccacaaaca

SEQ ID NO: 439004 - DNA, 201 bp, Homo sapiens
gtagataatgggaggaaaggaccttcagggagaagaatcagcatggataaaggtgcaatcggaacaggtgtggtttggtgatgacagtcttggagggtctytgtgggtctccctgaggccagcctcttcctcttaaaagagacccagaatagtgcagagctatagccacctttgcaggcatcctatgaaattcaagctgac

SEQ ID NO: 439005 - DNA, 201 bp, Homo sapiens
tcttgtttttcctcagctgactccatattttcctacttgtggcagcgactgcatccgacataaaggaacagttgtgctctgcccacaaacaggcgtccctytccctctggataacagtaagtgcccagtaacttcaaccagatgatcaaagtggctcacacacagtcactgccccccactcagtatgtggaagggttgtgt

SEQ ID NO: 439006 - DNA, 201 bp, Homo sapiens
actggcttagatagattacttttccacttcccagatgacgtcacgaagcttttggcatttccccaagattgtgctgcaaggcaccatatgagttctttcastgagctactcctgggatcctaatgcccatccttttggtttccatctgctaaattcagatcggaaaaaagtctacctggtcaagaatccatgagtgccagg

SEQ ID NO: 439007 - DNA, 201 bp, Homo sapiens
tctggataacagtaagtgcccagtaacttcaaccagatgatcaaagtggctcacacacagtcactgccccccactcagtatgtggaagggttgtgtgtatrtgggcagtgcaaggggtcgctgcctgtgtacactgaactggggtgcagagaaagccaacagtgctgtcccagagaacctagaatctgagtaagaacaggc

SEQ ID NO: 439008 - DNA, 201 bp, Homo sapiens
gcagcaggtgtcagcaggaaaaagatcacaagcctgccacgatggctgctgctccttgtagcccacccatgagaagcaagagaccttaaaggcttcctatsccaccaattacagggaaaaaacgtgtgatgatcctgaagcttactatgcagcctacaaacagccttagtaattaaaacattttataccaataaaattttc

SEQ ID NO: 439009 - DNA, 201 bp, Homo sapiens
acaggaagcctgtgggatccgaacatcactgcttgtaagaagaatgaggagacagtagaagtgaacttcacaaccactcccctgggaaacagatacatggytcttatccaacacagcactatcatcgggttttctcaggtgtttgaggtactttttctcttcgtccccttcacctcgtcctccagctttccttagtgtgtt

SEQ ID NO: 439010 - DNA, 201 bp, Homo sapiens
cactacaacctctgccttccgggttcacgccattctcctgcctcagcctcctgagtagctgggactacaggcacccaccaccacacccagctaactttttrtatttttagtagagacggggtttcaccctgttagccaggatggtcttgatctcctgacctcatgatccacccacctcagcctctcaaagtgcagggatta

SEQ ID NO: 439011 - DNA, 201 bp, Homo sapiens
gggaggctgaggcaggagaatggcgtgaacccaggaggcggaggttgtagtcagccgaggtcacgccactgcactccagcctgggcgacagagtgagactrtgtctccaaaaaaaaaaaagttaaggtttaagcatcagtgtgtttcaggtgatgtgttcaaaaggaacatcaggatgtttttccttgctgtcactaacaa

SEQ ID NO: 439012 - DNA, 201 bp, Homo sapiens
aaatgtgaagtgcagaggtcaagtgtccctgttcatatacagcactaaaagtactgaggttacaatcacacacctcaaagtatttttttttttttttttttgagacagggtctcactctgttgcccaggctggagtggaatggtgtgatcttggctcactgcaacctctgcctcctgagctcaagtgaacctcccacctta

SEQ ID NO: 439013 - DNA, 201 bp, Homo sapiens
ctgtactctctaagggctttgctaacttcaaaacatggagtatttgaatacagaaaccagagcatttacatactcagctcaaggcagagctattaaaaaaactcctcttctccatatgtaggaaaggaaatacaaatgcatcctttgagtcatttgtgatgttgtaaataaaatgagattaactccatgttctaagctaag

SEQ ID NO: 439014 - DNA, 201 bp, Homo sapiens
ttcaatgtggctctgaaactggtaggtgcattagagaatgggtatttggggctttacattgaaagcacagttggacttttaggaagcctaatataggcaayaggtcatcgaagaccagacacagggtgacccattgctttattggctgatgcagatgaagtctctgtctgctcgaagcagaactctggggctctgtgggaa

SEQ ID NO: 439015 - DNA, 201 bp, Homo sapiens
ggtccacttccatttaatgaattagtaaatatattttctcatgattttaattacatttttttctctagcttactttattataatacagcacataatacacmtaacatgcaaaatatgtgttaattggctgtttatgttattggtaagacttccagtcaacagtaggctattagaagttaagttgtgggaaaatcaaaggtt

SEQ ID NO: 439016 - DNA, 201 bp, Homo sapiens
gtaccacctcatgaaggatgccactgctttctgtgcagaacttctccatgtcaagcagcaggtgtcagcaggaaaaagatcacaagcctgccacgatggcygctgctccttgtagcccacccatgagaagcaagagaccttaaaggcttcctatcccaccaattacagggaaaaaacgtgtgatgatcctgaagcttacta

SEQ ID NO: 439017 - DNA, 201 bp, Homo sapiens
ttcaataacaccttaggacccatacgaagtgccactagtaatgctggcagtgctcccaagaagcagtgtcatgaaaaaaagcaaaaaaaacttttttttttcattacaagaaaaaaagccaaattgcttgatatgtaccataaattgagggtctgcagctgtgattgttcaccatttcaagataaatgaatccagcgtaag

SEQ ID NO: 439018 - DNA, 201 bp, Homo sapiens
cactgcgacctcaatcttctgggctcaagcgatcgttctacttcagcctcccaagcagctgggactacaggcatgagccaccagacctggctaatttttgyagtttttgtagaggggggtttcaccgtgttgctggtcttgaattccagtgctcaagcgatctgcctgcctcagcttcccaaagtgctgggattacaggta

SEQ ID NO: 439019 - DNA, 201 bp, Homo sapiens
atccaagcactttgggaggctgaggtgggaggatcatttgaggccaggagtttgagatcatcttaggcaacagagtgagaccccatctctacaaaaaacawtttttttaattaaaaaaaaaaagaagtgaggaattgtgaatgggggaaggtttggtgtgagtcactgagaggagatggcatggcatcagactgggctggg

SEQ ID NO: 439020 - DNA, 201 bp, Homo sapiens
ggtaaatagctatgactcagagcttagagcaagatcccttggttcaaatcccattttcggctacttctctgttttgtgccttttgtaagtcagcatctctrggcctcagtttttccctaccagccaatggaagagaattggacttaaattatatcctggctttaaaactttatacttctctgattctgtaaattgtttagt

SEQ ID NO: 439021 - DNA, 201 bp, Homo sapiens
gtgctctgcccacaaacaggcgtccctttccctctggataacagtaagtgcccagtaacttcaaccagatgatcaaagtggctcacacacagtcactgccycccactcagtatgtggaagggttgtgtgtatgtgggcagtgcaaggggtcgctgcctgtgtacactgaactggggtgcagagaaagccaacagtgctgtc

SEQ ID NO: 439022 - DNA, 201 bp, Homo sapiens
gtgagttcccggatgccattaagaaaatcactgaggagaaaggatacctgcctgaacaggttttcagtgcagatgaaagtgtcctcttctgggaaaaaaaygctacaaaggacattgattagtaaggaagagaagcatgcatcaggatttaaggcaggaagggacaggctaactggactgctttgtacaaatgcaattggg

SEQ ID NO: 439023 - DNA, 201 bp, Homo sapiens
tttgctggaagcctcgaaatctgctcactcctgtgcctcataatttttggggggcggaggttgacacagggtctcactctgtcatccaggctggaatgcastggcacaatcacagcttagtgcagcctccacctcccgggctcaagtgatcctcccacctcagcctccccagatagctgggattacaggcatgtgccacca

SEQ ID NO: 439024 - DNA, 201 bp, Homo sapiens
ccttccaaagcactttttattttcattttctgtcacagacactcagggatagcagtaccattttacttccgcaagcctttaactgcaagatgaagctgcawagggtttgaaatgggaaggtttgagttccaggcagcgtatgaactctggagaggggctgccagtcctctctgggccgcagcggacccagctggaacacag

SEQ ID NO: 439025 - DNA, 201 bp, Homo sapiens
cggaggttgtagtcagccgaggtcacgccactgcactccagcctgggcgacagagtgagactatgtctccaaaaaaaaaaaagttaaggtttaagcatcartgtgtttcaggtgatgtgttcaaaaggaacatcaggatgtttttccttgctgtcactaacaaggcccttggtgctcagctgacattctctagcaagggat

SEQ ID NO: 439026 - DNA, 201 bp, Homo sapiens
tcactgaatttcttcaaaaccattgcagaagtgaggtcatccttgaaaagtggcagaaaaagaaaatagcagagatgggtccagtgcagtggcttgccacycaaaagaaggcagcagacaaagtcgtcttccttctttccaatgacgtcaacagtgtgtgcgatggtacctgtggcaagagcgagggcagtcccagtgaga

SEQ ID NO: 439027 - DNA, 201 bp, Homo sapiens
tggcatggcatcagactgggctgggaaagacagtgtcatggaagtcttgctttttcccagggccatctccagagtggatgctacaacatgatctaatcccsggagacttgagggacctccgagtagaacctgttacaactagtgttgcaacaggggactattcaattttgatgaatgtaagctgggtactccgggcagatg

SEQ ID NO: 439028 - DNA, 201 bp, Homo sapiens
aactctcaagacctcttcccccttgcctttaaccttttctgcagtgatctaagaagccagattcatctgcacaaatacgtggtggtctactttagagagaytgatacaaaagacgattacaatgctctcagtgtctgccccaagtaccacctcatgaaggatgccactgctttctgtgcagaacttctccatgtcaagcag

SEQ ID NO: 439029 - DNA, 201 bp, Homo sapiens
cgaagaccagacacagggtgacccattgctttattggctgatgcagatgaagtctctgtctgctcgaagcagaactctggggctctgtgggaatgaggccstgtttcagacaggctagcctcttggccagtcaagatgggacttgccatacaaggtggaaagtgatgcctgccactctgcagagggagatcaaggccgtgg

SEQ ID NO: 439030 - DNA, 201 bp, Homo sapiens
gccagctggctggaatccagggccgaagcctgaggaaggcaggcctgactctaataaacatgtcaaatacactaaatatatacatgtgtacatacacaggyacctggagtggtcccacgtgctctgtaggtgaaagccaggaggttgagagtacttctgttagatcaaaattatctgggctataaatcagccagcgctaag

SEQ ID NO: 439031 - DNA, 201 bp, Homo sapiens
ccgccagcacctcttccctcatctcccggccctcgagcccagatcctgacgtcgtctgatccgccagtccaggctgccccgaaggcgtgcgcggactgccrgctcgaggggcatgcctgcaccctcagggcagccccggacatcggcgtcaggttgcttgagtcaggggcgtgggaatcagacagacccggtctcagatgc

SEQ ID NO: 439032 - DNA, 201 bp, Homo sapiens
atcttttctttgaaagtttgtcacttgtatatgcatttaaggggaaaatggtgttctgcctaatttggcaaaggaaagcttgtggtttgccggcttcaacrtgacgcttggtttttttctctcccacagaccgttcaatgtggctctgaaactggtaggtgcattagagaatgggtatttggggctttacattgaaagcac

SEQ ID NO: 439033 - DNA, 201 bp, Homo sapiens
ttttgttttttgagatagcatcttgttctgtcacccaggctggagtgcagtggtgcgatcatggctcactgcgacctcaatcttctgggctcaagcgatcrttctacttcagcctcccaagcagctgggactacaggcatgagccaccagacctggctaatttttgtagtttttgtagaggggggtttcaccgtgttgctg

SEQ ID NO: 439034 - DNA, 201 bp, Homo sapiens
agaaaatagcagagatgggtccagtgcagtggcttgccactcaaaagaaggcagcagacaaagtcgtcttccttctttccaatgacgtcaacagtgtgtgygatggtacctgtggcaagagcgagggcagtcccagtgagaactctcaagacctcttcccccttgcctttaaccttttctgcagtgatctaagaagccaga

SEQ ID NO: 439035 - DNA, 201 bp, Homo sapiens
agtagagacggtttcgccatgttgcccaggctggtctcaaaatactgggctcaagccatctgcctgccttggcctcccaaagtgttgggattacaggggtkagccagtgcacctggcacctcataattcttgactctctctctcttaagccacaccagaagaaacaaacgcgagcttcagtggtgattccagtgactgggg

SEQ ID NO: 439036 - DNA, 201 bp, Homo sapiens
cgccatgttgcccaggctggtctcaaaatactgggctcaagccatctgcctgccttggcctcccaaagtgttgggattacaggggtgagccagtgcacctsgcacctcataattcttgactctctctctcttaagccacaccagaagaaacaaacgcgagcttcagtggtgattccagtgactggggatagtgaaggtgct

SEQ ID NO: 439037 - DNA, 201 bp, Homo sapiens
gctgggcgcggtgacacatgcctgtaatcccagctactcaggaggctgaggcagcattgcttgaacccgggagacggaggctgcagtgaaccgagattgcrccactgcactccagcctaggcaacaaagcgagactctgtctcaaaactaaaaaataataaaaaataaataaacctctataaagtataccaagtcttagtt

SEQ ID NO: 439038 - DNA, 201 bp, Homo sapiens
ccttctattacatgcaaaaaatcattgtttttaagataacaaaagtagggaataaacaagctgaacccacttttactggaccaaatgatctattatatgtrtaaccacttgtatgatttggtatttgcataagaccttccctctacaaactagattcatatcttgattcttgtacaggtgccttttaacatgaacaacaaa

SEQ ID NO: 439039 - DNA, 201 bp, Homo sapiens
gctagtgaattttaccccttgaattttgtagtaatcccctttaggattattagtccctagtgcccagtttccaagggtttgtgtaaatttctgagtaatayagtgttggaatgctaatgaggctagtggtatttggatcagcccagaactcttaggcacccttcactgcacaaggcatccctggtaccctttcagacagcc

SEQ ID NO: 439040 - DNA, 201 bp, Homo sapiens
tgggtggcagagctagcagtgagctgagattgcgccactgcactccagcctaggcgacagagcaagactccggctcaaaaaaaaaaaaaaaaaaaaaaaaattagagccccatttgaatttgccatcttacatctggaatgttttggcaatttgttacaggtgtggtatgcgtatgtgtgtgtgcacttggcaaagggggt

SEQ ID NO: 439041 - DNA, 201 bp, Homo sapiens
ctgggtggcagagctagcagtgagctgagattgcgccactgcactccagcctaggcgacagagcaagactccggctcaaaaaaaaaaaaaaaaaaaaaaaaattagagccccatttgaatttgccatcttacatctggaatgttttggcaatttgttacaggtgtggtatgcgtatgtgtgtgtgcacttggcaaaggggg

SEQ ID NO: 439042 - DNA, 201 bp, Homo sapiens
cctgggtggcagagctagcagtgagctgagattgcgccactgcactccagcctaggcgacagagcaagactccggctcaaaaaaaaaaaaaaaaaaaaaaaaattagagccccatttgaatttgccatcttacatctggaatgttttggcaatttgttacaggtgtggtatgcgtatgtgtgtgtgcacttggcaaagggg

SEQ ID NO: 439043 - DNA, 201 bp, Homo sapiens
aactaacgattggaaactacatttacaacttcaaagctgttttatacatagaaatcaattacagttttaattgaaaactataaccattttgataatgcaayaataaagcatcttcagccaaacatctagtcttccatagaccatgcattgcagtgtacccagaactgtttagctaatattctatgtttaattaatgaatac

SEQ ID NO: 439044 - DNA, 201 bp, Homo sapiens
agtgagctgtgatcgcaccactgcactccagcagcctgggcaacagagtgaaactccgtctcaaaaaaaaaaaaaaaagcaaaagaccaggcgtggtggckcatgcctgtaatcccagcactttgggaggccaaggcgggtagattacttgaggtcaggagttcaagaccagcctggccaacatggtgaaactccatctct

SEQ ID NO: 439045 - DNA, 201 bp, Homo sapiens
agattcaaaagagtttgtacatttatatctgtgtgcatgcctgcaggcatacatgccatatgatcccatttacagaaagtgccaagcaaacaaaaccaatstagtgtttagaagtcaggatagtagccaggagcggtggctaacgcctgtaatcccagcactttgggaggccgaggtgggtggatcacttgaggccaggag

SEQ ID NO: 439046 - DNA, 201 bp, Homo sapiens
gattgatacaaaagacgattacaatgctctcagtgtctgccccaagtaccacctcatgaaggatgccactgctttctgtgcagaacttctccatgtcaagyagcaggtgtcagcaggaaaaagatcacaagcctgccacgatggctgctgctccttgtagcccacccatgagaagcaagagaccttaaaggcttcctatcc

SEQ ID NO: 439047 - DNA, 201 bp, Homo sapiens
gtcaagtgtccctgttcatatacagcactaaaagtactgaggttacaatcacacacctcaaagtatttttttttttttttttttgagacagggtctcactytgttgcccaggctggagtggaatggtgtgatcttggctcactgcaacctctgcctcctgagctcaagtgaacctcccaccttagccgcctgagtagctgg

SEQ ID NO: 439048 - DNA, 201 bp, Homo sapiens
aaccccttcctcctcttcctcgtcagcctactcaacaagatgatgacaagaataaagacctttctgatggtccacttccatttaatgaattagtaaatatmttttctcatgattttaattacatttttttctctagcttactttattataatacagcacataatacacataacatgcaaaatatgtgttaattggctgttt

SEQ ID NO: 439049 - DNA, 201 bp, Homo sapiens
ggcaggtttctgattagtcaagactgcttttcacttcttttgtaacacagacccttctatgatacaagcattaaacctaaagcaagtggtggaggaaggaytggtaccatatacaaatatttttagaaaaatgaaaaagcaaaaaagccagaaattatgatgtctttctgtaaagttacactgaggcgcccacctctcctg

SEQ ID NO: 439050 - DNA, 201 bp, Homo sapiens
gggtttcaagatacggatcttggagaaattcaagagctaacagataaccacactagaggaacaaagagaagacaacctgctggagacgagtgcttccccakcagtgtgaggtgatgatgaagacgacacagaagcagcagcatcagaaaacaaatcgacattaaacaatctggcaggtttctgattagtcaagactgcttt

SEQ ID NO: 439051 - DNA, 201 bp, Homo sapiens
tgcttgatatgtaccataaattgagggtctgcagctgtgattgttcaccatttcaagataaatgaatccagcgtaaggaccatagtcaaaaaagaaaaaamttcatgaagccatcactacagctacaccagcagacatgaaaaccttgcacattttgcagaataccttttaatcttgtattgaaaatgtagcttttatgtg

SEQ ID NO: 439052 - DNA, 201 bp, Homo sapiens
tcatcttttctttgaaagtttgtcacttgtatatgcatttaaggggaaaatggtgttctgcctaatttggcaaaggaaagcttgtggtttgccggcttcarcatgacgcttggtttttttctctcccacagaccgttcaatgtggctctgaaactggtaggtgcattagagaatgggtatttggggctttacattgaaagc

SEQ ID NO: 439053 - DNA, 201 bp, Homo sapiens
agattttaggactgttcttaacttcctgggtcccatatcccttttgagaatctaatgcaagacctgcacactctagggaaaaagatatgattggcagactmtctaaagagcttctgactgatggttttaaagggatctaaatctctacaaagtggctgggcgcggtgacacatgcctgtaatcccagctactcaggaggct

SEQ ID NO: 439054 - DNA, 201 bp, Homo sapiens
cttgcctttaaccttttctgcagtgatctaagaagccagattcatctgcacaaatacgtggtggtctactttagagagattgatacaaaagacgattacartgctctcagtgtctgccccaagtaccacctcatgaaggatgccactgctttctgtgcagaacttctccatgtcaagcagcaggtgtcagcaggaaaaaga

SEQ ID NO: 439055 - DNA, 201 bp, Homo sapiens
tgttagtaacgtgtacaaagtttaggttcagaccccgggagtcttgggcacgtgggtctcgggtcactggttttgactttagggctttgttacagatgtgygaccaaggggaaaatgtgcatgacaacactagaggtatgggcgaagccagaaagaagggaagttttggctgaagtaggagtcttggtgagattttgctct

SEQ ID NO: 439056 - DNA, 201 bp, Homo sapiens
agcacctcttccctcatctcccggccctcgagcccagatcctgacgtcgtctgatccgccagtccaggctgccccgaaggcgtgcgcggactgccggctcraggggcatgcctgcaccctcagggcagccccggacatcggcgtcaggttgcttgagtcaggggcgtgggaatcagacagacccggtctcagatgccaccc

SEQ ID NO: 439057 - DNA, 201 bp, Homo sapiens
tggcaatttgttacaggtgtggtatgcgtatgtgtgtgtgcacttggcaaagggggtggggcagagatacctttttctaaaatgtaaaaactttcattcamatttccaggctgcctagaccacataatgaaatataaaaaaaagtgtgtcaaggccggtaagtaaatacggcatttgcttttattatttgaagaaacttgt

SEQ ID NO: 439058 - DNA, 201 bp, Homo sapiens
ctgtagagctgaacacagtctatttcattggggcccataatattcctaatgcaaatatgaatgaagatggcccttccatgtctgtgaatttcacctcaccmggtaaacttcctcatttgtttattattctttgtcttgctgggatgcctgctttgcgatatgcacagagagagcccagggaaccctggataaggcttttgg

SEQ ID NO: 439059 - DNA, 201 bp, Homo sapiens
gcctcccaaagtgttgggattacaggggtgagccagtgcacctggcacctcataattcttgactctctctctcttaagccacaccagaagaaacaaacgcragcttcagtggtgattccagtgactggggatagtgaaggtgctacggtgcaggtaaagttcagtgagctgctctggggagggaagggacatagaagactg

SEQ ID NO: 439060 - DNA, 201 bp, Homo sapiens
aaagtgttgggattacaggggtgagccagtgcacctggcacctcataattcttgactctctctctcttaagccacaccagaagaaacaaacgcgagcttcrgtggtgattccagtgactggggatagtgaaggtgctacggtgcaggtaaagttcagtgagctgctctggggagggaagggacatagaagactgttccatc

SEQ ID NO: 439061 - DNA, 201 bp, Homo sapiens
caggggtgagccagtgcacctggcacctcataattcttgactctctctctcttaagccacaccagaagaaacaaacgcgagcttcagtggtgattccagtractggggatagtgaaggtgctacggtgcaggtaaagttcagtgagctgctctggggagggaagggacatagaagactgttccatcattcattgcttttaa

SEQ ID NO: 439062 - DNA, 201 bp, Homo sapiens
ttacacatggtctagtgaaaggagtccttttgggaagcaaagctgctttgctggaagcctcgaaatctgctcactcctgtgcctcataatttttggggggyggaggttgacacagggtctcactctgtcatccaggctggaatgcagtggcacaatcacagcttagtgcagcctccacctcccgggctcaagtgatcctcc

SEQ ID NO: 439063 - DNA, 201 bp, Homo sapiens
tttctcaggtgtttgaggtactttttctcttcgtccccttcacctcgtcctccagctttccttagtgtgttgaaggaaaatggggacagtgttgtccaaasgtgctgggctactttgatgaattcagcagataaaaacaagtccctgtgggcatcctgagaggtgtcactgtgaacctcaaaccatagaaagaaggaagtc

SEQ ID NO: 439064 - DNA, 201 bp, Homo sapiens
ctcttcgtccccttcacctcgtcctccagctttccttagtgtgttgaaggaaaatggggacagtgttgtccaaacgtgctgggctactttgatgaattcarcagataaaaacaagtccctgtgggcatcctgagaggtgtcactgtgaacctcaaaccatagaaagaaggaagtctccgaagcaggaaatgagcccttctt

SEQ ID NO: 439065 - DNA, 201 bp, Homo sapiens
ataataggtaagtcagtgaaatagaatgtaaaatccagaagtagccctaaaaattgtaggatgttagtaatgattgtgggcaaaatatatgttggtaagaygaataacaattagtcattttacaatgactaataaaattcaggaggtttaagcatttaaatatactaagtaaaaacaaatatactgatcgaaaacaggtga

SEQ ID NO: 439066 - DNA, 201 bp, Homo sapiens
tttacactctgaaaaattaaggaccctcaaaagctttctaaattttatatctattaatagttatgatattcaaaattaaaatgaaattttttaaaatattaattcattttaaaataataaacctattacatattaacatacataacattttcaaaaaattaatgagtgtcattgttttacattttgcaaatctttttaatg

SEQ ID NO: 439067 - DNA, 201 bp, Homo sapiens
cattgcatcacatacatacagtgatacatacatgtattcatttatgcatccaacaaatgtttattgtgctctaacaagttaaaaagttattgctgtagtcyaggcaagagataatgctcagcttggaatctgttgggcaacggggagaattcttggcacttatttgaatataggcaagggaaagaagtgccaaggattttc

SEQ ID NO: 439068 - DNA, 201 bp, Homo sapiens
ttaatagatttccaaaaatattctacaatggctatgtattacttttataattaagatgttaaagtcctgtggggtcatttcagaaaataatcattactgtratgatttttcagtctttccagtgtcagcctgcctttagctaagataattccaatagtaaacggacagatccattcagtttgcagtgaaacacctagtcat

SEQ ID NO: 439069 - DNA, 201 bp, Homo sapiens
tattaaatttgagtgcctcattttttaacaaattaaactctgttaaaccaacaacttcttcactagcagaagctccttcttggtttcagtattaaaacttrgagtcttccagaaactttgccactatattgaagtactttagttgtaattacctttctataagttgaattccaattattgtttttttttaactctttagaa

SEQ ID NO: 439070 - DNA, 201 bp, Homo sapiens
ttctgaggtgttggggctcccatggcaattcattttcttttttagtttagttagaatatcaaagtgtggctaactaactactctgtaatgttcacattctsatttcacgttcaggaaaatttcgcactcaggaaaactgacttcccctcagatatagaccaaatgtacacacttatatcatactgcctatgctgaaatgtg

SEQ ID NO: 439071 - DNA, 201 bp, Homo sapiens
cacacttaaaaacatctactggcaaacagagattaaaagtaacacaacctgttctgtaagcttattgaagtcccagtgttctgcccttgtttcatgctacygcagaactgcttataaaagatttacctgaagaaaatgcaacaatattctagctgtaggatttggttggctacctggttaactcagttgactaagaatcct

SEQ ID NO: 439072 - DNA, 201 bp, Homo sapiens
gggatcgggggaagagccagcaaaggagactgagtaggagctgccagcgaaagaaaagaaacaccaaaagaatgaggtattttggaagacaattgaagaartgtttcaaggagactgtgattgattgggtctaatgctcctgaaaggccaaaggagataaagacagagaaataacattagatggagttgttgattgatctt

SEQ ID NO: 439073 - DNA, 201 bp, Homo sapiens
taacataaagttacattctctgctgagaggttttttcaaaaaatcacagaacttggaactacatgtagagtatggtagagtgtcccatgagagtaataacrgaccatagcaaatgtgtaagtttggagtacctttctccgtgttgtagtccaacactgtgggactacattttagtccaggtgtattatagtggtcagttga

SEQ ID NO: 439074 - DNA, 201 bp, Homo sapiens
ttatctcaaagagatttttctaacacatggatggataaatagacttctgcctgactaactacctttctttcattgttccttttaaaatttttatcttatakttttaaaaagcattttgtgttcattgaagaaaatatagaggacaaaatgacctgttatcccaccattcagcaatgatcattgtttgttatattttagaaa

SEQ ID NO: 439075 - DNA, 201 bp, Homo sapiens
tgtgttttacatgatttggtcttcatttgaaagattttctgcctctgttcttctctcattagcacaagacagttaaagtaatgttacttaaagccaataakaacataaatataaacaaatgccctaaaatcaggaacaatagtaggttatatattttatcttctcaataatcaagagcgtgtttgagttttctttacattt

SEQ ID NO: 439076 - DNA, 201 bp, Homo sapiens
agtagtctaatcaagagacagttgcagtttgaactgggtggtagcagtggtggcaataacaagtggctaaataatagatttatttttaaggttgaaccagyagtacttgtggaattatttagtgtgggttatgaaagaggaggcaaggatgactcctaggtattggggctgagcatttgaggaaataggaactgccattta

SEQ ID NO: 439077 - DNA, 201 bp, Homo sapiens
tgcactacactttaattaaaatcgatataattgataataaaaacaaatgtttcaatatggtaaaaacgccattgatactaatgtttagtaaagttttttastgtaactggatgtatattaaatgtatatactagaccattgattgacaaggctattacaattatagtttaattttttaaactataatttctatgagttaaa

SEQ ID NO: 439078 - DNA, 201 bp, Homo sapiens
ctaatcccatgacagattcttattctccagcatttcttattccacatgtagagccataaataaactcctaaaaatcacatgaagtttttttcccatagatygctagtctcatttcatcttcacattattcctgggagtaagaaacaataacaaacaacagccactgacaaaactaaaactaaaactcagcaacttttagtt

SEQ ID NO: 439079 - DNA, 201 bp, Homo sapiens
gtctctcaagcgtcagtaacaacttctgtgttaccagatctgctggacattttccttctgctaggactctcggcagcagtcaacaccttcactctctcctytgttttgaacaccctgtcctaagctactgggaggcctgtcttaccaggcttccccagtctttctgtactttcctgtagtccttaaacaggctcatcctcc

SEQ ID NO: 439080 - DNA, 201 bp, Homo sapiens
actagtaatatctataattacagtaggaattctcttatggaatccagagaaatacttttcttggctctgtagtaatggcccttaactagtggctgatttcrtaatccattctattccagtcagcagttacaggtgtaagcagaagaaacaggattttagatagtagcctgttaagaaaagagtgtatataggatgtgttgt

SEQ ID NO: 439081 - DNA, 201 bp, Homo sapiens
agatgttgaaggattctaaaaacatgagtgatatgagatttatgttttagaaaatcactttgcatatataagataggttaaacaggtgtgtgaccagaaastgaagagttagggacctattgaaccagttcaagagcattaatttttagagtctaagtggtgacagtgataaagaagttgtagataattggcaagatttag

SEQ ID NO: 439082 - DNA, 201 bp, Homo sapiens
gtgtgcaccatcatgcttggctaatttttaattattttgtagagacaggggtctcactacattgctcagactggtcttgaactcctggcctcaagcaatcrtcctgcctcagcctcctaaagtgctggaattacaggcatgagccactgagcctggcataatttgaccagtttgtgaaaagactagagaattgactcccaa

SEQ ID NO: 439083 - DNA, 201 bp, Homo sapiens
tattttttaaggtatttagtaaatattttcattgttaatacataaagtcatagctacaaaagaaacattaaagctcatataatcccagtctttcatattgwggatgaagaaatttagacacagagggaggaagggactttctcaaaagtcacataactacttgataccagagccgtcaatatctcctgttttccaggctag

SEQ ID NO: 439084 - DNA, 201 bp, Homo sapiens
tcatataatcccagtctttcatattgaggatgaagaaatttagacacagagggaggaagggactttctcaaaagtcacataactacttgataccagagccrtcaatatctcctgttttccaggctaggctgccagtcgagtatatagatagtcatgagctccatgttttagctaatgaattacctgtcctcattcttattt

SEQ ID NO: 439085 - DNA, 201 bp, Homo sapiens
taatttaacctccagagctagaaacatagtcctgggagaatgccatcacaaaatcaacctgcccatatttgaagagaacagtgtgtcctaactggcataaytgaagaattagttctcaaatccatgcaaagcctgtttttcttttctattgtttaaagcttactcatttctctaacattctttcaagaacaattaatttag

SEQ ID NO: 439086 - DNA, 201 bp, Homo sapiens
gtgaggccgtgatgagataatgcctatacagtgcttgatgtatgataaatacttggtaaatgataactttttaaatttacatttagcattcaatatattgscactgcctaggacattttaatgaatttttagggaatggtccatttctgcttattatttgaattttcaaaaaataataaaatgggccaggcatggtggctc

SEQ ID NO: 439087 - DNA, 201 bp, Homo sapiens
cgtgattgcaccactgcactccagcctgggtgacagtgtgagattctgtctcaaaaagaaaaggaatgtggtggtcttcatattttttcattttgttatcrttacttttttagggtttagagactcattttacatttttatatgtgtattcctccatttctttttttctctaatcccatgacagattcttattctccagca

SEQ ID NO: 439088 - DNA, 201 bp, Homo sapiens
gagttaatatttttcagctattaatttacttatcccatagcatttttgttattatttcggaagagagagcatgctagtttaagtttcattttaattggtcrtgtacttggtgcttttttgttgttgttaacttgttcatttagtaaaaagcaaatagctttactttctgaaaaagaaataattcattatctctagtaatac

SEQ ID NO: 439089 - DNA, 201 bp, Homo sapiens
cttttgatttgaaattactatttgtaatttggtggggggagaagggtaatatccatttgaaaaatatttgcataaataagggcttgatcccttacaaagtrtcattaaataaggcctccaatcttatgactgcttttatattaattttatatgagactctggtctcatataagcctgttgagcaagtttttttttctttaa

SEQ ID NO: 439090 - DNA, 201 bp, Homo sapiens
agaaacagttgtaaatatgtttttaaaagtcatcttacaaaaaaataaccttaggatggttcatgattttacacatttgtattaatcacagtaccaaatgsttttcttttctctgtgaaggtttcacaagaagtactgtggctgtatacagtacctgtatgctggttgttcttttgcgggtccagttaaacataattggtg

SEQ ID NO: 439091 - DNA, 201 bp, Homo sapiens
caaaattaaaatgaaattttttaaaatattaattcattttaaaataataaacctattacatattaacatacataacattttcaaaaaattaatgagtgtcrttgttttacattttgcaaatctttttaatgtttggcttaattgaagaaagctggattctcatctctttctatattctgtcagttgtggtatcacacatca

SEQ ID NO: 439092 - DNA, 201 bp, Homo sapiens
ttcttagtgagggcagtcatatcacttgtgaccttttttattttttttgtttgtattacagtgctgtccatgcttccaacactgagagaggccttaatgcrgcaactgaattccgagagcctcacagctctgctaaaaaacaggtaaatgcaagttacagcattttctgtttaagcactacacttaaagtttatagaatga

SEQ ID NO: 439093 - DNA, 201 bp, Homo sapiens
agtaaaaacaaatatactgatcgaaaacaggtgactatgtgacctcaagatggagaaggtatttctaagaatgaaagtaaagaactttatataaaagaagkctaggtttgactgtataatttttaaaacttcaagatcaaacaagctttttataagcttttcatcaatattaaatgcaaataatatacaggaggaaatgtt

SEQ ID NO: 439094 - DNA, 201 bp, Homo sapiens
tgcccaagcacgacgacaatatcattttgaaagtaaccagaggacttgcaatatgacaggtaagacagagaaatatttatacatgtgtaaagttgtttgayggttgtattaatttgcatatcaccgggatcaaatttagaggaaaaggcaaagaaaagatggtaaatctagcaagtgtttgaatgatttaactgaattaca

SEQ ID NO: 439095 - DNA, 201 bp, Homo sapiens
cagagctcttactaagtataattttacttttactcatgtcttaaattctacttatttgcacacataaaccattacaggtttttattttggtgggggagggwctaactttttttattgttgatagaacatagacttagatttcctaaactctttatttatgaatgtgattagtttcatcataaccctgtgctaatgtttgaa

SEQ ID NO: 439096 - DNA, 201 bp, Homo sapiens
ctcttgaaaggtaagtgattgaaaagcatatatttcagtaattgaagtaaaacccattaatttagaaaaacagccattatgagtgatttctagtaagaagyacttaacaattttagatattcagtacatttttattatcaggtatgtgacagtagatactgtgatgtattctggagatgtaaaatgtgtaagacatgttca

SEQ ID NO: 439097 - DNA, 201 bp, Homo sapiens
gtgaatagcatttttatacaagcaacataatacagataaaataatcgtggtggcattcttccttcttggtgaatctgtttcctgcaaggccctatgttccrtgtgctttaggggatttaatagttaagatcaagtctctttaagaccttttcatccaaaggaggaagtagactaaataaattatcgtaattccggacatat

SEQ ID NO: 439098 - DNA, 201 bp, Homo sapiens
gttattgattactggaattaaaatttttttttaccgtattttgtgggcttgcttttctgcagttatgctgtgttgcttttaattttttttaaaaagtaaawatagatctataaaattcagagttttctattagattatctagattattattttcatatttttaaattttgttctttaggccttcaaacaagctagaaatat

SEQ ID NO: 439099 - DNA, 201 bp, Homo sapiens
gccacaaaaagaaatgcatcttcctgggcacggtccttggaggtgggtgacaacgtgcttgaaagggggcattgggagaagggggtgggagaggtgacttyttctaaaataaggacaggccgggcgatcctagtctgggatatgtagagggagttcgatcaaccatgggatgaaaagggaggtggccaacctccagggttc

SEQ ID NO: 439100 - DNA, 201 bp, Homo sapiens
tacttggagatggtaagattcttatttgtgacttttatactaattttaattcatttatttttattattgaggaatttttaaactaagcaaggcttttaggyttgttttttctttaataggcctgacagaattgatcactgtcattaaacaagctgtgcagaaggttttaggaaggtaaggcatttttctttgacttttctg

SEQ ID NO: 439101 - DNA, 201 bp, Homo sapiens
acctttgctttttaaaaaagttaatgatgaaagtacaaaaatggactgaggaggttatagtcatccacttgagaaacaatgtctaatccaaaaattatcarctatagtgttgctaaacactggtgtgtcctgggtagttgttacgtaagttattcattgattaaaaataatagaaatgccagattgcaggttatggctcat

SEQ ID NO: 439102 - DNA, 201 bp, Homo sapiens
gttgcaccattgcactccagactgggcaacaccaatctgtctcttaaaaaaaaaatgctttgggaggccaaggcaagaggatggcttgaggccaggaattygagaccagcctgggaagcataacaagaccctacccctacaaaaaaaaaaaaaatgaaaaattagtatggtggcccatgcctgtagtcctaactactactt

SEQ ID NO: 439103 - DNA, 201 bp, Homo sapiens
tttcctcagtaggattgtccacttttttgttattcagatttccacctcatcatttcatgaagctctggagaaggtcatcagtgatcttttgccatatccartgaacctgtaatgttcatcttacttgacctttctctgatatttgacactgcctttcttgaaattctttgctcacatgactttcatgacagtataatctat

SEQ ID NO: 439104 - DNA, 201 bp, Homo sapiens
gaatcctttgaactagcggctaaggatcccaggcaaaggtgaaggacttgcttgatttgtatattctagttcatatgaatattactaaaatgttttagctmgtccagtatcttgaaaaccattaatctatgaaaatccattcctgataatcattatgctaatcaaaaatatttggtgctaaatcagtgataaaagctagtt

SEQ ID NO: 439105 - DNA, 201 bp, Homo sapiens
tctaaatgctaggtcttcatccctactggaatgtgtatgttagtgggagagaaaaataatcaactaataaatttgatgtaatgtcaagtatgtataacttygttgatgaaacacaaagcagggtaaggggttagagagtgaccagggatgctgtttgtaataggttggtcagaaaaggcctctttgaggagatgtcatttg

SEQ ID NO: 439106 - DNA, 201 bp, Homo sapiens
gactgatctcattttactgaatgttaagcttcacatctatatcaatgtgagaaaaaggtcataacttggggcatttaaaccttacctttacctttgtcctsttctgtagaagtccctggcttggccagtaggctgttcattttgacagatgagtggaaattacaaccaagcataaagcatcatcagccttaatgcttaaat

SEQ ID NO: 439107 - DNA, 201 bp, Homo sapiens
tctatataagtttttctgtttcatctcaataaccaacttcatgctccatgattgaaccctagaaacatttccatcaagcctattgtcatcattgtttaatrtgttgtgaaagtctagccatcatagtaagtcaagaaaaaacaaatggctaaggcctgtaatcccagcaccttgggaggctgaggtgggtggattgcacga

SEQ ID NO: 439108 - DNA, 201 bp, Homo sapiens
gtcaaaagtgcaaaatgaaatccagaagtatattacaataataatagcagctaatactttttccatgtgctagtttgatgataggtatttttcagaatgtmtctcattgaattcttaaaataatcctaggaaatacgtactagtattcttcattttccaggtgaggagactaagacacagaaaaattaaataacttcaggt

SEQ ID NO: 439109 - DNA, 201 bp, Homo sapiens
aacatttctgggatcttattttatcacctaacagtataacatggatatttccttgagtcattatttagcaatgtggtttttaataactacataagatttcrttgtatggctagactatcatttatttaaacaattctccattgctggacatgtagaatatctctagtctactagtaaaggcactgccagactttttagatt

SEQ ID NO: 439110 - DNA, 201 bp, Homo sapiens
ctgcaggtttgttacatatgtatacatgtgccatgttggtgtgctgcacccattaactcgtcatttacattaggtatatctcctaatgctatccccccccycccccaccccacgacaggccccagtgtcgacaggccccagtgtgtgatgttccccaccctgtgttcaagtgttctcattgttcaattcccacctatgagt

SEQ ID NO: 439111 - DNA, 201 bp, Homo sapiens
cttgtgtcagtttgggtcccctgggaagcagatgctaggatgggattagatgtacaagagatctactagtagaaatgcctgtaaaggataaaggggaaggkaggcagaagaaggcaagcgaagcatttaggccacagtgcaggtctgacatttgtgaagggaaaaagacaaggaaggaagaaagattaggcaagaagagtc

SEQ ID NO: 439112 - DNA, 201 bp, Homo sapiens
ctagcctatgctttcttataatccttatgaccaagatttctacattccctttcttctcttcactccctcacgctttgatgtactacagccctgcagcctgkcttccacacctgtgtcttcacctaagcaggtctctcaagcgtcagtaacaacttctgtgttaccagatctgctggacattttccttctgctaggactctc

SEQ ID NO: 439113 - DNA, 201 bp, Homo sapiens
aagcagggatttcttagggtaactcagctactaactctactatctgaattcatcgagttccagtcttttgtttttcctcagtaggattgtccacttttttsttattcagatttccacctcatcatttcatgaagctctggagaaggtcatcagtgatcttttgccatatccaatgaacctgtaatgttcatcttacttgac

SEQ ID NO: 439114 - DNA, 201 bp, Homo sapiens
ataattgtaatggttattttaacataaatacttgattttgtacactgaagaattgtaaaaattatactacagccacaacagccatgatagtgtttcttttytgaactatagtaatcattatctgtactttcatgtacaacctacatgtgctaccttgaattggagttttattcctcagttacattttaagcctcctctcaa

SEQ ID NO: 439115 - DNA, 201 bp, Homo sapiens
ccctaggttgaaatgtatgagatgtcatatttaatgtaataagactaaatctacaaccccaacgcaaaaatgagtcttgttgtttaagtcattgcatcacrtacatacagtgatacatacatgtattcatttatgcatccaacaaatgtttattgtgctctaacaagttaaaaagttattgctgtagtccaggcaagagat

SEQ ID NO: 439116 - DNA, 201 bp, Homo sapiens
tttatacagacaattcttgctcccccagatgtccaacagcagtatttatcaagtattcagcacctacttggagatggtaagattcttatttgtgacttttrtactaattttaattcatttatttttattattgaggaatttttaaactaagcaaggcttttaggtttgttttttctttaataggcctgacagaattgatca

SEQ ID NO: 439117 - DNA, 201 bp, Homo sapiens
cgtgcaaatatcagaattgttaataatttgttacacatggacatttgttccaaactgactaaaaatcaatatagatattttatatacatatatatatatawaaatacaaaattcagtgtactttaccatattaatactgaggaaaaatctgttggagacataggtctaggatgtgtgaagtttggaaaaatatgctattta

SEQ ID NO: 439118 - DNA, 201 bp, Homo sapiens
aacagaagtgaatcagacttttctccagctacctttcaaaataataaattatttgtctcaaatataccttgatggaggacttttttattcttatggaaatrgtgaattccaacaactatgatgaactatgttctttgctatttcttcactatattttttaaggttttattaaaaagccttagaaagttacatattggttta

SEQ ID NO: 439119 - DNA, 201 bp, Homo sapiens
acactctgaaaaattaaggaccctcaaaagctttctaaattttatatctattaatagttatgatattcaaaattaaaatgaaattttttaaaatattaattcattttaaaataataaacctattacatattaacatacataacattttcaaaaaattaatgagtgtcattgttttacattttgcaaatctttttaatgttt

SEQ ID NO: 439120 - DNA, 201 bp, Homo sapiens
actgaagctgaccctccattcatccttctcgcctaacactgggggaaaagtgctaaaatcaagacaggatacaagtgggagcacattaacctgggctgcgrcgtggatttggacattgctgagccttcagtccgaggcactcttaagtgctgggttatgaggattggctggccagctaccaggtcaattttgagaccacaa

SEQ ID NO: 439121 - DNA, 201 bp, Homo sapiens
tacactctgaaaaattaaggaccctcaaaagctttctaaattttatatctattaatagttatgatattcaaaattaaaatgaaattttttaaaatattaattcattttaaaataataaacctattacatattaacatacataacattttcaaaaaattaatgagtgtcattgttttacattttgcaaatctttttaatgtt

SEQ ID NO: 439122 - DNA, 201 bp, Homo sapiens
tattgaagtcccagtgttctgcccttgtttcatgctaccgcagaactgcttataaaagatttacctgaagaaaatgcaacaatattctagctgtaggattyggttggctacctggttaactcagttgactaagaatcctttgaactagcggctaaggatcccaggcaaaggtgaaggacttgcttgatttgtatattctag

SEQ ID NO: 439123 - DNA, 201 bp, Homo sapiens
ttacactctgaaaaattaaggaccctcaaaagctttctaaattttatatctattaatagttatgatattcaaaattaaaatgaaattttttaaaatattaattcattttaaaataataaacctattacatattaacatacataacattttcaaaaaattaatgagtgtcattgttttacattttgcaaatctttttaatgt

SEQ ID NO: 439124 - DNA, 201 bp, Homo sapiens
atggctcaagcctgtaatcccagcactttgggaagctgaggtgggcagatcacctgaggtcaggagtttgagaccagcctgaccaacatggagaaaccccrtctctactaaaaatacaaaattagccaggcgtggtggtgcatgcctgttattccagctactcaggaggctgaggcaggagaatcgcttgaacccgggagg

SEQ ID NO: 439125 - DNA, 201 bp, Homo sapiens
catagagactgctatgccaccacgttccagctgcaatatgtgtggccaggcgcatggctcaagcctgtaatcccagcactttgggaagctgaggtgggcasatcacctgaggtcaggagtttgagaccagcctgaccaacatggagaaaccccgtctctactaaaaatacaaaattagccaggcgtggtggtgcatgcctg

SEQ ID NO: 439126 - DNA, 201 bp, Homo sapiens
gccagacgaaatattttttcaagggttatacaaaaccattaccattacaaaaatacttgcagttctataaatagatctgtcatcaattttctaaattaacrggctgaacctagtggcagatttgaggaataaaaaaaaaaaaaatcttgactctggaattgttcctttcctcagtgatttcttaatctgctaaaattaaac

SEQ ID NO: 439127 - DNA, 201 bp, Homo sapiens
ctgaattgccatccctggaatgtttgcaccctgtaactgatgaaatctttaaaataaaaagaaattaaaacataaaccgttaaagtatgcccccagctgawagacaaaacagactctgcatggccaactgaggtgctcaaagtaaatacagaaacaggcagcaatagctgtgagagggagtggtcaggtactctgttctca

SEQ ID NO: 439128 - DNA, 201 bp, Homo sapiens
ccaatcttgtattgagcttctactaagagcagggctctggcatacatctgtctaatgcaggctatgattaaggtacctaaaactcacaggccagtaaacarcttgcacataacaggtgctgaaaaatgtctgctgaattagcaaaggtaagttaaataaattgtaccattctatacactcagtgaggaccagagctaggat

SEQ ID NO: 439129 - DNA, 201 bp, Homo sapiens
ggttgcaataaaacagcctgggtatgctgatctactgccaatgtgagagaagaagtttgccctgtagaatatactggtatcaaggagtaaatttatatatataatataatatatatattatatatatgcacacatatgtatatatgagatatatgagtaacactaacattaaatttttattaggtttatgtccatgtctat

SEQ ID NO: 439130 - DNA, 201 bp, Homo sapiens
ctttattctttttgcttcggatagttttgacaattctgggtcttttgcggtttcatataaaatttaaaattgtttttttctgtttctgtgaagaatgtcayaggtatttttatagagattgcattgaatctgtagattgctttgggtagtatggacattttaataaaatcgattcttccaattcgtgaacataaaatatct

SEQ ID NO: 439131 - DNA, 201 bp, Homo sapiens
ttctttctttctttttgttttaatgtgtctttgtctggttttggtatcaggataatactggccttatagaatgaacttggaagtattctcttctcctttatttttttttgggaatagtttgagtaggattggtattagttcttcttgaaatgtctggtagaattcaagagtgaagccattgagtcctgggattttctttgc

SEQ ID NO: 439132 - DNA, 201 bp, Homo sapiens
gagaaaattcaaatccacagagaataagagggtcattctccagattctcattagacaatttgtggaaatggtgtctctcttctcacagtgaaccctgactsctccatgactgctggagaagaccaagcatcgctatttaggatgctcttttttctgctctttccagctctcaatttctagcatcaccaattccccttgctc

SEQ ID NO: 439133 - DNA, 201 bp, Homo sapiens
cattgggatggggggactttgatgagccctgtgagatgaggaggggtgagtgttctgggcagaggataccccctgagtgatggcacagaggggagcacagsatagtcaagatacagtggctcgttgttagggttaaggtggcctgagttggaatgaactggcaggtgatatcagggagccaggagggagccctctctgcag

SEQ ID NO: 439134 - DNA, 201 bp, Homo sapiens
ggcatatagttgcttattgtacccaccaatgatcctttgaatttcagtgatatcagttgtaatgtttccttttttatctctgattttatttatttgggtctttttttttttctaacttagatctggtctttattatttcttttctcctactaattttgggtttggtttactcttacttttctagttctttaagatgcattg

SEQ ID NO: 439135 - DNA, 201 bp, Homo sapiens
tgcataaactttctaccccatctctttctctgccttctttttaaggccaataactcttagattttccgctttggggctattttctagatcctgtaagtgtscttcattattttatattcttttttcttttgtctctcctgagtgtgtgttttccaatagcttgtcttcaagctcagtaattcttccttcggcatgatcaat

SEQ ID NO: 439136 - DNA, 201 bp, Homo sapiens
taaatttttattaggtttatgtccatgtctatacctaattgatcatttgggcatgcattaataatctctctcacaatggataatgatattaactattaggrcatagattagatattagctatcaggaaaccttgcctgaattaacatggttgtgatcaacgttattggattgacagtgaccaagaagtaaaatgcctgaac

SEQ ID NO: 439137 - DNA, 201 bp, Homo sapiens
caacccagtttccagaaatacaagggcagctaatcccagctcactgcctcacagtgagtttatacattttgctttgttttcatagatattagttagaattaaaaaaaaaaaaaacttctagtctgcttgctggtaatggtgaggttaatttttgcccctggatagagtcaaaattatactgggtatggtgtgaaaataaaa

SEQ ID NO: 439138 - DNA, 201 bp, Homo sapiens
tgaggcaggagaatcgcttgaacctgggaggcggaggttgcagtgaccagagatcatgccactgtactccagcctgggggacagagcgagactccatctcaaaaaaaaaaaaaaaaaaagctgggcgcagtagctcacacctgtaatcccagcactttgggaggccaaagtgggtggatcaagaggtcaggagatcaagac

SEQ ID NO: 439139 - DNA, 201 bp, Homo sapiens
aagaccatcctggctaacatggtgaaacccatctctactaaaaatataaaaaattagccgggcgtgttgacgggcgcctgtaatcccagctacttgggagsctgaggcagaagaatgggaggatgaggcaggtaactcaaataatagaaataacagagggtttctttgcagttgttcatggcttacattcattgattccct

SEQ ID NO: 439140 - DNA, 201 bp, Homo sapiens
ctgaggtgggaggatcgcatgaacccaggagccaaggcttcagtgaaccgtgatcgtgccactgcactccagcctgggtgacagagtgagaccctgtctcaaaaaaaaaaaaaaaagtcatctgtttcccatattataggcaagctgaacatccaacccttattttttcttagtgcaaagctcatgaacaccctgttatct

SEQ ID NO: 439141 - DNA, 201 bp, Homo sapiens
cccagcctaatttttgtatttctagtagagacagggttccaccatgttggccaggctggtctggaactcctgaccttaggtgatctacctgccacagcctyccaaagtgctgagtttatgggcatgagccactgtgcccggcccagttaaggcattctaagtcatgggatgagatagaaggtcaacacaagatacaggtca

SEQ ID NO: 439142 - DNA, 201 bp, Homo sapiens
ggctgctctgtcaatggagtagcgattctttattcctttactttcttaataaacttgcttttgctttgcactgtggactcactctgaattctttcttgcgygaggtccaagaaccctctcttggggtctggattaggaccccttccctgtaacatttttctggctaccataaagggacccaaaggctaactaggtaagtgg

SEQ ID NO: 439143 - DNA, 201 bp, Homo sapiens; identical to SEQ ID NO: 264704

SEQ ID NO: 439144 - DNA, 201 bp, Homo sapiens
cattggaatgttgacttatctaactggaaaagtggtttggagggtgttggctcttggagcatgaggttgcaattaagaaaagctggaaattggcatacacrtcctgaatcaaaatacaccttcagaaagagatgaggacattttcaccttataatgctgagaagtctatactgctaaagataaaaatggtgaaatgtaaat

SEQ ID NO: 439145 - DNA, 201 bp, Homo sapiens
attttttctatgtctgttaagatgttctccttattacttattttaagcaattggattataatgggccttggtgtcattttcttcatctttcttgtgtttgsgttttactgagcttcttagatctgtgggttcatagtttttaccaactttggacattttttggtcattatcttttcaattattttatctcccactcctctc

SEQ ID NO: 439146 - DNA, 201 bp, Homo sapiens
taaaggattacttgaagaaataaaaatttctggttccacaagatttcatcttgttcttagggaagactcaatattctaaatttgtaattttctcctaattmatctgtaaagtcaatatgattataagaaaactaataaaatatttgagaaatgtgaccaattgtttccaattcataagagtaaaatgtattaaaaatggca

SEQ ID NO: 439147 - DNA, 201 bp, Homo sapiens
tttccataacaaattttctctgaaatctcctttaggtaactcagcaaagttccccaaccaaataatgtaaataaaccagagaagtatgtaaagagtgacarttaaattaatcatttctataattattttaactttgtaataaagcatttgatgtttaaaaattgacttctagagaaagtgctatgttttaaaaagaaaaaa

SEQ ID NO: 439148 - DNA, 201 bp, Homo sapiens
gaaaagaggtttggtaagttcctgtcacattgttaaacaaagaaaataataaagctctactgaaggacataaaggattacttgaagaaataaaaatttctkgttccacaagatttcatcttgttcttagggaagactcaatattctaaatttgtaattttctcctaattaatctgtaaagtcaatatgattataagaaaac

SEQ ID NO: 439149 - DNA, 201 bp, Homo sapiens
tttaaaatctcttagtattaccattaaagttaatatttaaaatatttttcctaaaactttgcttccataaaagcttttgactaagtaatttcttgatttaygcaaactttgggataggaaactctgaattaagttaatatggtccatttttccataacaaattttctctgaaatctcctttaggtaactcagcaaagttcc

SEQ ID NO: 439150 - DNA, 201 bp, Homo sapiens
tcactgtttatctcctctgtaaagtttgattaatggaaaaaaggatttgtgaggctagtcttaagctgtagccaatctggtgtgctttatgtgtctttctktattgttctgtcataatgaggggtccctagggatagaacatgggcttaggacacctgtaagactgctgttcaaggtgacccagcaaactggtcagttcta

SEQ ID NO: 439151 - DNA, 201 bp, Homo sapiens
aaagtttgattaatggaaaaaaggatttgtgaggctagtcttaagctgtagccaatctggtgtgctttatgtgtctttctttattgttctgtcataatgaggggtccctagggatagaacatgggcttaggacacctgtaagactgctgttcaaggtgacccagcaaactggtcagttctaaactttgctacaggtccctg

SEQ ID NO: 439152 - DNA, 201 bp, Homo sapiens
aaagagtgatgaagtgttttagagaaaatgacagatgaagataggcagaagagactcaacatgcatatagccccaaacaagaagctcaaagcaacggaacagaatagtgctgacatattaaactcaagacaactccctccccaaaagactggacactacctactaaaaggataggccgtattactggagaatttaatcctg

SEQ ID NO: 439153 - DNA, 201 bp, Homo sapiens
atgagcatttttcatatgtttgttggctgcttgtatgtcttcttttgagaagtttctgtttatgtcctttgcccgctttttaatggggttatttgttttawgctcattcaattgtttaagttccttatagattctgggtattagacctttgttatgactgagtgcatatatacagagttcttttttctgtcatactgctgg

SEQ ID NO: 439154 - DNA, 201 bp, Homo sapiens
aagagtgatgaagtgttttagagaaaatgacagatgaagataggcagaagagactcaacatgcatatagccccaaacaagaagctcaaagcaacggaacagaatagtgctgacatattaaactcaagacaactccctccccaaaagactggacactacctactaaaaggataggccgtattactggagaatttaatcctga

SEQ ID NO: 439155 - DNA, 201 bp, Homo sapiens
gcaccttggtccaagccagaaccatctctctcctggatgaatgcacttatgtcccaaattgcctcctttttcctacacttgctcctctccaatttcttctmaactcaggagcccaagggatccttcaaaaatgtaagtcagatcatgttattccaatgctgaaaccctagactgcctcgccttatcactcagagtaaaagc

SEQ ID NO: 439156 - DNA, 201 bp, Homo sapiens
aatgacaaaagctttgatattctagtttccctgtcaaatatatgaaagatgaaaatgctctcatcctgtaactttcctgtgcttgcatatcataaaaaaamttactagctcatttagattcatttcgaccccatattcatctttggaaccattaattaatgggaagccagacgaaatattttttcaagggttatacaaaac

SEQ ID NO: 439157 - DNA, 201 bp, Homo sapiens
aaaccaaatagctaggccattggcaacagcctaagagttgggaagaatgtaacagggattaccaagggaagtagcagttatagctgagaatggccttgagwtctgcccactgggtggagaatcaggtccatctttggccctgtctcattggagctgagatggaatggctgcagcaagccagagagcactcccaggtctcag

SEQ ID NO: 439158 - DNA, 201 bp, Homo sapiens
aaacctgaaaaaatgctcatgtcagtaattattagagaaatgcaaatcaaaaccacgagataccatctcataccagtcagaatggctattattaagaagtaaaaaaaaaaaatacatgttggcaagactgcagaaaaaagggaacacttatacactgttggtgagaatgtaaattagttcagccactgtggaaaacagttt

SEQ ID NO: 439159 - DNA, 201 bp, Homo sapiens
aggttaagagggaaaatggaaaaatgttccatgtttttatactatatataaaatggtataatctcttttgacattctagtgtggtaagttaaaaatatgtrctgcaaactttaagacaaccactaaaattacacaacaaaaatttgaaacaaatacatgaaatacaagggaatcataaaaaatacttaacccaacagaaga

SEQ ID NO: 439160 - DNA, 201 bp, Homo sapiens
ttctggagagaagcattttggggttggagtgtgaaaatgttatcaatgtattgttcaaaatgataggcatttaagatggcagacaattataataacagcasttcttctaccacatttttctttaaccagcaatacactcttccagtttccacagtaacacaatcaatttctgattacaaatgcaagcacagcaatttaggc

SEQ ID NO: 439161 - DNA, 201 bp, Homo sapiens
caataaatgtaaaagaattttggataccccatttaccctgatgtgattattacacattgtatgcccatatcaaaatatctcatgtaacccatatatatacwtatatatatatgggatatatatatatatatgggtttatatatatgtatgttttatattatatataatatattatatataataatatataatatatatggg

SEQ ID NO: 439162 - DNA, 201 bp, Homo sapiens
gtataactacgttgtatatatataacacgtataactatgttgtatatatataacacgtataactatgttgtatatatataacacgtataactatgttgtakatatataacatgtataactacgttttatatatatataaaatttcagagctttcattgcatagttttctaatatttgaacatatatactaggtacccataa

SEQ ID NO: 439163 - DNA, 201 bp, Homo sapiens
ataacacgtataactatgttgtatatatataacacgtataactatgttgtatatatataacacgtataactatgttgtatatatataacatgtataactaygttttatatatatataaaatttcagagctttcattgcatagttttctaatatttgaacatatatactaggtacccataaaaattaaaaatagagataaac

SEQ ID NO: 439164 - DNA, 201 bp, Homo sapiens
acgacaatctaaaagatgtaattctgtctgttagataattcttgttccattttaaagagacaaaactgaggtcaaaaaagtctgatggtcgctctagtaadagcggggaaaaggccaggatttaaaaccacggctgtccaccttgaaagcccattggcctttcagggcggcctatcgcctctagttccaggctggatctag

SEQ ID NO: 439165 - DNA, 201 bp, Homo sapiens
ggcgcaccatgagattatatcccgcacctggctcggagggtcctacgcccacggagtctcgctggttgctagcacagcagtctgagatcaaactgcaaggyggcagcgaggctgggggaggggcgcccgccattgcccaggcttgcttaggtaaacaaagcagccgggaagctcgaactgggtggagcccaccacagctca

SEQ ID NO: 439166 - DNA, 201 bp, Homo sapiens
ctgggggcagggcacagacaaacaaaaagacagcagtaacctctgcagacttaaatgtccctgtctgacagctttgaagagagcagtggttctcccagcaygcagctggagatctgagaacgggcagactgcctcctcaagtgggtccctgacccctgacccccgagcagcctaactgggaggcaccccccagcaggggca

SEQ ID NO: 439167 - DNA, 201 bp, Homo sapiens
ctgccagaggaaaagaacaaatagttcctgcggagaatattctgggcctttcttgtttatcagagaaagctacatatcatcctttagaaatgtagcagttsaagtagaatttaatgtattcaaaaatgtgacccatctgagagaagaaattacttttggaaaaggttttaacgtggctcgggacgctacaccctccctgac

SEQ ID NO: 439168 - DNA, 201 bp, Homo sapiens
tctgacagctttgaagagagcagtggttctcccagcacgcagctggagatctgagaacgggcagactgcctcctcaagtgggtccctgacccctgaccccygagcagcctaactgggaggcaccccccagcaggggcacactgacacctcacacggcagggtattccaacagacctgcagctgagggtcctgtctgttaga

SEQ ID NO: 439169 - DNA, 201 bp, Homo sapiens
actagaactcagaattaagaatctcactcaaaaccgctcaactacatggaaactgaacaacctgctcctgaatgactactggatacataacgaaatgaagkcagaaataaagatgttctttgaaaccaacgagaacaaagatacaacataccagaatctctgggatgcattcaaagcagtgtgtagagggaaatttatagc

SEQ ID NO: 439170 - DNA, 201 bp, Homo sapiens
aaataaagatgttctttgaaaccaacgagaacaaagatacaacataccagaatctctgggatgcattcaaagcagtgtgtagagggaaatttatagcactraatgcccacaagagaaagcaggaaagatccaaaattgacaccctaacatcacaattaaaagaactagaaaagcaagagcaaacacattcaaaagctagca

SEQ ID NO: 439171 - DNA, 201 bp, Homo sapiens
tagttttcatctgttacttaagggccaaggtgatgtggttttgtaatttttcattcctagaatctaagaaggaggtaaataagtgttgctggtttgactayaaaaaggactaatataagcaaataaaccatactttggctttcttactttttcattagcatatgtcagatgcattccgacaatccaattatagtcagcaca

SEQ ID NO: 439172 - DNA, 201 bp, Homo sapiens
aatctctgggatgcattcaaagcagtgtgtagagggaaatttatagcactaaatgcccacaagagaaagcaggaaagatccaaaattgacaccctaacatyacaattaaaagaactagaaaagcaagagcaaacacattcaaaagctagcagaaggcaagaaataactaaaatcagagcagaactgaaggaaatagagaca

SEQ ID NO: 439173 - DNA, 201 bp, Homo sapiens
cacgagactatatcccacacctggctctgagggtcctacgcccatggaatctcgctgattgctagcacagcagtctgagatcaaactgcaaggcggcagcraggctgggggaggggcgcccgccattgcccaggcttgcttaggtaaacaaagcagccgggaagctcgaactgggtggagcccaccacagctcaaggaggc

SEQ ID NO: 439174 - DNA, 201 bp, Homo sapiens
aaaagaactagaaaagcaagagcaaacacattcaaaagctagcagaaggcaagaaataactaaaatcagagcagaactgaaggaaatagagacacaaaaamcctttcaaaaaattaatgaatccaggagctggttttttgaaaggttcaacaaaattgatagactgctagcaagactaataaagaaaaaaagagagaaaaa

SEQ ID NO: 439175 - DNA, 201 bp, Homo sapiens
tctggattgccaaataaaaaattcagaaggtttattattaagctactcaaagagataccagagaaagttgaaagccaactttaaaaaattgaaaaaaaatwcaggataagaatgaaaaattatccagggaaacagatatcataaagaaaaaacaatcacaacttctggaaataaaagacacacttaaagaaatatgaaatg

SEQ ID NO: 439176 - DNA, 201 bp, Homo sapiens
tgtttattgcagcattattcacaatagcaaagacttggaaccaacccaaatgtccaacaatgatagactggattaagaaaatgtggcacatatacaccatrgaatactatgcagccataaaaaatgatgagttcatgtcctttgtagggacatggatgaaattgcaaatcatcattctcagtaaactatcgcaagaacaaa

SEQ ID NO: 439177 - DNA, 201 bp, Homo sapiens
tttccccactttatgtttttgtttgctttgtctaagatcagtaggctgtaagtatttggctttatttctgggttctctattctgttccatcagtctatgtrccttttttataccagtacaatgctgttttggtgactatggccttatagtatagtttgaggttaagtaatgtgaggccttcagatttgttctttttgctta

SEQ ID NO: 439178 - DNA, 201 bp, Homo sapiens
tggtttagaatttatctggttttcttcctaatattcatgataatctttgaataaaattttacagcacaagttgtaagaatatgctaagaaaacactcttttaaatcaaatgaaaaatacaaaaaacaagaagggatgtgactaaaagagcaagattgaaggtataaaaaataatcaaatcgagggaaatgaagcagagaga

SEQ ID NO: 439179 - DNA, 201 bp, Homo sapiens
tgtcaactatgatttctttcagcagtgttttgtagttttccttgtagaggttttttatatccttggttaggtacattcctaagtattttattttattttatttttgcagctattgtgaaaggggttgagttcttgatttgattctcagatttgtcactgttggtgtatagcagagctactgacttgtgtacattaattttg

SEQ ID NO: 439180 - DNA, 201 bp, Homo sapiens
tggacatccttgtcttgttccagttctcaggaggaagctttcaaattttccccattcagtataatgttggctgtgggattgtcatacatggcttttattaygttaagatatgtctgttctatactgattttggtgagggttttaatcatagagggatgctggattttgtcaaaaagctttttctgcatctattgagatgat

SEQ ID NO: 439181 - DNA, 201 bp, Homo sapiens
gcatctattgagatgatcatgtgatttttgtttttaattccgtttatgtggtttatcacagttactgacttatgtacgttaaaccatccctgcatccctcrtatggaacccacttgatcatggtggattatctttttcatatgctgttggattcatttcactagtagtttgttgaggattttcgtgtctatgttcatcagg

SEQ ID NO: 439182 - DNA, 201 bp, Homo sapiens
ttttggtgacagtttttaaatgaccatttcaatctcactgcttgttattggcctgttcagagattctattccttccttaagcttctgcacagcaaaacaartaatcagcacagttaacagacaacccacagagtgggaagaaatcttcacaatctatacatccaacaaaggatgaatatccagaatccacaactcaaacaa

SEQ ID NO: 439183 - DNA, 201 bp, Homo sapiens
cagttaacagacaacccacagagtgggaagaaatcttcacaatctatacatccaacaaaggatgaatatccagaatccacaactcaaacaaatcagcaagaaaaaaaaaaaccaatcgcatcaaaaagtgggctaaggacatgaatagacaattctcaaaagaagatatacaaatggaaaaccaagcatatgaaaaattgc

SEQ ID NO: 439184 - DNA, 201 bp, Homo sapiens
ggtgaaaccctggctctactaaaaatacaaaattagctgggcgtggtggtgcatgcctgtgatcccagatacttgggagactgaggcaggagaatcgcttraacccgggaggcagaggttgcagtaagctgagattgtgctattgcactccagcctgggcaacaagagtgaaactcgatctaaaaaaaaaaaaaggaaaga

SEQ ID NO: 439185 - DNA, 201 bp, Homo sapiens
tgagcatcctacggagtctttaaaaataaggcactacaggcaacaagggctggcagggaaaacttcaatgtattaattcaacacatactgaggacatacartattatcagagcattcacacacttttggagctaagaggaactgcaaagaacacatcaactccttgttttcctcttggtgaactgaaattcaaacaggcta

SEQ ID NO: 439186 - DNA, 201 bp, Homo sapiens
tattgtctttctcaataagaaactatacttatgtttatgagaatgttcatggcagcagtatttgtaaaagacaacaaaaaagaacaacaacacaacaatcytgaataagtagaatgagtgaatactcacagcattttttgaaaatggactgtaaaatggtggtgaaatgaataaactacaaatttaccagtggaaaagtgt

SEQ ID NO: 439187 - DNA, 201 bp, Homo sapiens
gtaaactagtacaaccactatgaaaaacagtgtggagattcctcaaagaactaaaagtagatctgccatttgatccagaaatcccactactaggtatctayccaaaggaaaagaagttatacaaaaaagatacttgcacatgcatgttgacagcagcacaatttgcaattgtaaaaatatggaaccagcccatatgcccat

SEQ ID NO: 439188 - DNA, 201 bp, Homo sapiens
agaatgagtgaatactcacagcattttttgaaaatggactgtaaaatggtggtgaaatgaataaactacaaatttaccagtggaaaagtgtcttaagggakctctcgtgccaggaggaaaatcacctgcccttggactgccctccctctattgcaggactcaaggtccagctgagccccagcccactgttcctcctatact

SEQ ID NO: 439189 - DNA, 201 bp, Homo sapiens
gactacacattggacactgtgtacactgctcaggtgatgggtgcaccaaaatctcataagtcaccactaaagaaattattcatgtaaccaaacaccacccrtttcccaaaaacctattgaaataaaaaaaatttttaaagaaaaaagaattttaaaaatgaacaaaacctccaataaatttgggattatgttaaacaggta

SEQ ID NO: 439190 - DNA, 201 bp, Homo sapiens
aaagcccatcaaaaaacagaggcagataatgatggtaatccagcttctcaatttctacctgaaagtaaagaaagaagagacgccatgtgaaaacagcattygggcagagcacggcagacaagctatgcagctgtcacccactccagaggggcacgctctttagaacttcaggaagacttccttaacccatccccctaatga

SEQ ID NO: 439191 - DNA, 201 bp, Homo sapiens
aacttatgtccacatgaaaatctgcacacagatgtttacaacttcattcataattcccaaaacttggaaggaaccaagatgtccttcagtgggtgaatggataaataaactgtggtatatccaaataatggaatattattcagcactaaaaaacaaatgagctatcaagccatgaaaagacatggagagatcttaaatgca

SEQ ID NO: 439192 - DNA, 201 bp, Homo sapiens
cactgctcaggtgatgggtgcaccaaaatctcataagtcaccactaaagaaattattcatgtaaccaaacaccacccatttcccaaaaacctattgaaataaaaaaaatttttaaagaaaaaagaattttaaaaatgaacaaaacctccaataaatttgggattatgttaaacaggtaaacctaagaataattggtattcc

SEQ ID NO: 439193 - DNA, 201 bp, Homo sapiens
acttatgtccacatgaaaatctgcacacagatgtttacaacttcattcataattcccaaaacttggaaggaaccaagatgtccttcagtgggtgaatggataaataaactgtggtatatccaaataatggaatattattcagcactaaaaaacaaatgagctatcaagccatgaaaagacatggagagatcttaaatgcat

SEQ ID NO: 439194 - DNA, 201 bp, Homo sapiens
atgggtgcaccaaaatctcataagtcaccactaaagaaattattcatgtaaccaaacaccacccatttcccaaaaacctattgaaataaaaaaaatttttaaagaaaaaagaattttaaaaatgaacaaaacctccaataaatttgggattatgttaaacaggtaaacctaagaataattggtattcctgaggatgaagag

SEQ ID NO: 439195 - DNA, 201 bp, Homo sapiens
cttatgtccacatgaaaatctgcacacagatgtttacaacttcattcataattcccaaaacttggaaggaaccaagatgtccttcagtgggtgaatggataaataaactgtggtatatccaaataatggaatattattcagcactaaaaaacaaatgagctatcaagccatgaaaagacatggagagatcttaaatgcata

SEQ ID NO: 439196 - DNA, 201 bp, Homo sapiens
ggtacacagtcatcaggttacctaaagtcaagacaaaggaaataatcttaagagctgtgaagcgaaagcataggtaacctctaagggaaaaactatcagaytaacaacagacttcttagcagaaaccctacaagccagaagggattggggtcctatctttagcctcctcaaacaaaataattatcagccaagaatatcgta

SEQ ID NO: 439197 - DNA, 201 bp, Homo sapiens
aagcccatcaaaaaacagaggcagataatgatggtaatccagcttctcaatttctacctgaaagtaaagaaagaagagacgccatgtgaaaacagcattcrggcagagcacggcagacaagctatgcagctgtcacccactccagaggggcacgctctttagaacttcaggaagacttccttaacccatccccctaatgac

SEQ ID NO: 439198 - DNA, 201 bp, Homo sapiens
ttatgtccacatgaaaatctgcacacagatgtttacaacttcattcataattcccaaaacttggaaggaaccaagatgtccttcagtgggtgaatggataaataaactgtggtatatccaaataatggaatattattcagcactaaaaaacaaatgagctatcaagccatgaaaagacatggagagatcttaaatgcatat

SEQ ID NO: 439199 - DNA, 201 bp, Homo sapiens
aaaaggagttctaaatcttgaaacaaaaccttgaaataccccaaaatagaacctcctgaagcataaatctcacagggcctataaaacactaacacaatggaaaaaaaaataaggtatttaggcaacaattagcatgatgaataaaacagtacctcacatctcaatattaacagtgaatgtaaatggcctaaatgctccact

SEQ ID NO: 439200 - DNA, 201 bp, Homo sapiens
ctgtgaacctgaaactgctctaaaaaaataaagtctattaatttaaaaaatccaggttactagtccaacactggcattggactagctttaataatttttcaaaaaaaaattagaggacaggcattcttatgtctccccacttgaacttcagaatataagtttgtattccttctaaattggtgttttctgttcaaaaaatat

SEQ ID NO: 439201 - DNA, 201 bp, Homo sapiens
actaaccaagtatctgctgtcttcaagagactcacctaatgcataagcactcacataaactcctagagaaaggagtgcaaaatgatattccatgcaaatgkaaaccaaaagcaagcaggaggagctattcttaggtcagacaagacagactttaaggcaacaacagttaaaaaagagaaagagggacatcatataatgata

SEQ ID NO: 439202 - DNA, 201 bp, Homo sapiens
gaagaaatagaaaccgtgaacagaccaataacaagtaacaatagtaacaatattgaaacactaacagaaaaaaattgtcaaccaaaaaaaaaaaaaaaaawtccaggaccagatggattcacagctgacattcaaaaaagaattggtaccaatcttactggaccaagctgagaatcagcttaagaactcaacccctttcac

SEQ ID NO: 439203 - DNA, 201 bp, Homo sapiens
aagaaatagaaaccgtgaacagaccaataacaagtaacaatagtaacaatattgaaacactaacagaaaaaaattgtcaaccaaaaaaaaaaaaaaaaaatccaggaccagatggattcacagctgacattcaaaaaagaattggtaccaatcttactggaccaagctgagaatcagcttaagaactcaacccctttcaca

SEQ ID NO: 439204 - DNA, 201 bp, Homo sapiens
aagactaagcaaaaagcacaaatctggaggcatcacgttacctgacttcaaactatattataaggccatagtcatgaaaacagcatgtatatgtgtgtgcrtgtgtgtgtatatatacatatatatatcacattttctttatccaatcattggttgatgggaatttaggctggttctatatttttgccattgtaaatatat

SEQ ID NO: 439205 - DNA, 201 bp, Homo sapiens; identical to SEQ ID NO: 265257

SEQ ID NO: 439206 - DNA, 201 bp, Homo sapiens; identical to SEQ ID NO: 265258

SEQ ID NO: 439207 - DNA, 201 bp, Homo sapiens
ggcaagtctatgcaattcttctgcatgtgtgagcactcgatagagtttcgctgtgtccccacccagatctcatcttgaattgtagctcccatgattcccawgtgttgtgggagggacctgatgggagacaattgaatcatgggggtggtttccctcatactgttttcatggtagtgaataagtctcacaagatctgatggt

SEQ ID NO: 439208 - DNA, 201 bp, Homo sapiens
taataatagacaaatatataatatcagcttcagacatatgtctgcctagcaaaagagagaggacaaccatatatatatatatatatatatatatatatatmcacacacacacacacacacacacacaataaccatatatatatacacaaacacacacacacacatatacacacacaatagccatatacatatatataccat

SEQ ID NO: 439209 - DNA, 201 bp, Homo sapiens
catatatataccatatacatatataactatatacataatagagttatcatgtgtgtatatgtgtgtgtatatatatatgcctacacatatatgtgagaccycctgctagtttttttacatgtttggagaaattagaaccttaaaaaagagctcagtacaattccatcaatcaaacatagggtattaatctaaaatacttgc

SEQ ID NO: 439210 - DNA, 201 bp, Homo sapiens
aaagctgactgaaattgtaacaggaagtatctaaaggtagaatcactatgaagaaaaagaacaaactcaaaacctactaatgtattcaaaagaccattaamaaaacttcacaatttaattattggaagtttatagaactgcttcagcacttctgtactgagtaagtaagctgtacctgaggagtaataaatgaaattgtta

SEQ ID NO: 439211 - DNA, 201 bp, Homo sapiens
tggcaatagcaaagacatgaaatcaacccgaatgctcgttgacgacagactggataaagaaaatgtggtacatatacaccgtggaatactatgcagctataaaaaggaatgagagtatgtcctttgcagggaaacggatggagctggaagttggtatccttaacaaactaacgcaggaacagaaaaccaaacaccgcgtgt

SEQ ID NO: 439212 - DNA, 201 bp, Homo sapiens
acactgctcgggtgatgggtgcacccaaatctcagaaatcacctctaaagaacttttccatgcaaccaaacaccacctgttccccaaaaattattgaaataaaaaaaaagaaagtaatggctcccattcctgcttcctgttacgatgacacttaacttgtattgtagtaattaccatagtttcctgtagtatagtttatta

SEQ ID NO: 439213 - DNA, 201 bp, Homo sapiens
tttcaataggtttttagggagcaggtggtgtttggttacatgaataagttctttagtggtgatttctgagattcaggtgcacccagcacctgagcagtgtrcactgtacccaatgtgtagtcttttatccctcatccccctgccaccctttccccaaagtccaacgtatcattcttatgccttttaatgctagcttattaa

SEQ ID NO: 439214 - DNA, 201 bp, Homo sapiens
tcgggtgatgggtgcacccaaatctcagaaatcacctctaaagaacttttccatgcaaccaaacaccacctgttccccaaaaattattgaaataaaaaaaragaaagtaatggctcccattcctgcttcctgttacgatgacacttaacttgtattgtagtaattaccatagtttcctgtagtatagtttattacagataa

SEQ ID NO: 439215 - DNA, 201 bp, Homo sapiens
ttaaatattagtaggtacttgcatagataattcaaatagtctttacttggagcactctgaaaagacattctacccaagaatttaagttatgatgtaacttraatggcaataacaaggttatttcatcataaagtaactaaaatggtaataacaaggttatttcatcataagtaagaaatatttctaatcttactttcagag

SEQ ID NO: 439216 - DNA, 201 bp, Homo sapiens
caacgcagtgcaagaaaaataatccaataaagaaatgggcaaaagatccaaatagacttcttcagagaagaagacatacaaatggccatcaggtagatgamaaaatgctcaacatgtctaataatcagggaaatgcaagtcaaaaccacagtgagatgtcacctcaccccaggaggaagggagtggcaagcttaacagaag

SEQ ID NO: 439217 - DNA, 201 bp, Homo sapiens
cagttccctaaagaaatcccacaggcagaggcataaagatcttcaatacttgtaacgtcttttgagatgcctgtagtattgatgtacaggtaaacaccacrgaagaaagagctgtcatcacctgcacatgaagaagatcgtgagaaaactccatcaaaggcatattcatcagtgcttgatctatgcctgtcgtgatcacca

SEQ ID NO: 439218 - DNA, 201 bp, Homo sapiens
tgtgatgtgacctcaaggcctcttccaggaagctgcctccacatttaccatggtgggaaaagggagccctcagtttgcaatatagagttggattaagacaraaaaatgggcaattgtaagacacaggaagttaatcaacagggttaagcacagagtgctatacaaacaggaagtgtttataacagccatgaaaggtagcca

SEQ ID NO: 439219 - DNA, 201 bp, Homo sapiens
agtgcaagaaaaataatccaataaagaaatgggcaaaagatccaaatagacttcttcagagaagaagacatacaaatggccatcaggtagatgaaaaaatsctcaacatgtctaataatcagggaaatgcaagtcaaaaccacagtgagatgtcacctcaccccaggaggaagggagtggcaagcttaacagaagagtaaa

SEQ ID NO: 439220 - DNA, 201 bp, Homo sapiens
aatatgttaaattctccccaaattgtcagaatgtataagataaatgaaacccaacttattttctatttttaagacagccaccaaaaaaaatcacaaaaacaaaaaaaacacctaaggatatgaaaatattgaagtaaaagatgaaaaatatattccaagtaaacgttaaacaaaagaaagctgaaatagatatataaggca

SEQ ID NO: 439221 - DNA, 201 bp, Homo sapiens
gggtggcgaatatttatgaagtggaacattagtattttattggtgatacttagcttaccaggtaaatatcaatacagccgttgctaggacttattgctggttttttttttttaatttgaaattttaataaaagaaaatggtatcttgtttatatgtttaattttcactttcttaacttttagttcagaagaaggactttta

SEQ ID NO: 439222 - DNA, 201 bp, Homo sapiens
ttaacctgcaataccattatatttgttcttacttaacaaatatttctcatttactcaagtcctgcaagtttctcgctatatttttcttaggacttgtacastgttgttatttttgtggtattttaccctgctttcatttccaattggttatcaatactataaagaaaaccactttcattttgcgtatttttttatattcat

SEQ ID NO: 439223 - DNA, 201 bp, Homo sapiens
tcttcaggatagaccatgttaggccacaaaaccaaacttaacaaatttaagaggactgaaataatattaagtatttttttcagatcacaatggcatgaaayaagaaatggatgagaaaaaatcttgaaaaatacacaaatatgcagaaattaaacaatatgctccttgaacaccactgggtcacagaagaaataaaaaaag

SEQ ID NO: 439224 - DNA, 201 bp, Homo sapiens
acttaacaaatatttctcatttactcaagtcctgcaagtttctcgctatatttttcttaggacttgtacactgttgttatttttgtggtattttaccctgytttcatttccaattggttatcaatactataaagaaaaccactttcattttgcgtatttttttatattcatgcaccctactttcatttttatttgatactt

SEQ ID NO: 439225 - DNA, 201 bp, Homo sapiens
tcaaaatcgttttccttctctatttaaatctcaaacttacaatttaagttttaaaacacgctactcagtgcctctgttattctggagccaaacatcccttytcgccttgtctggtgtctcttgcttccatttctcactactcacggcctccgggtttcaggatttctcaaacatacactttattctgttcatcttcgtgtt

SEQ ID NO: 439226 - DNA, 201 bp, Homo sapiens
acgacgtcaactaggatataaacaaattgggggaactcatctcgctaaatacaaaatttgtaaagctacaacaataaaggcagtgtgatactggttcagasacagacaaagagactaatgggacataatacagagtactcagttagtattcatagatggtactgtcttggtggctctccatatggaaaagatcaaaagaaa

SEQ ID NO: 439227 - DNA, 201 bp, Homo sapiens
gggcagacaggggccaggaagagagattagggttttaaaataagtgcaatggtaagtccttgcagtggagtgatacaatctgagtgacatttgaaggtcayttttgcttcttgtggctatggaatagtggggggaggtgggtggcaagagagacagtggagcgacaagggggttggttgcagtatttcaggcaagagatga

SEQ ID NO: 439228 - DNA, 201 bp, Homo sapiens
aaaataagtgcaatggtaagtccttgcagtggagtgatacaatctgagtgacatttgaaggtcatttttgcttcttgtggctatggaatagtggggggagrtgggtggcaagagagacagtggagcgacaagggggttggttgcagtatttcaggcaagagatgatggggtagcaatggacagaagagatgatggggtagc

SEQ ID NO: 439229 - DNA, 201 bp, Homo sapiens
gtagttttaataattgtcagccaggtgctatgattcatgtctgtaattccaacaatttggaaggccaaggcaggaggattgcttgagcccaggaattagaraccagcctgggaaacagggagaacccttctctacaaaaaaatttaaaaatcagacgggcctggtgatatgcacctgtggtcccagctactcaggaggctg

SEQ ID NO: 439230 - DNA, 201 bp, Homo sapiens
cctcgccacttctgactcttccaaaacccagaacgtgtatctgaaatctttgggcacatccacttagaggcctcataaactgcatctcaaacagaacttayggcctataatcctggcctccgcacaagctctctgattccgacaatgtccatgtcgttctactgtcccaaatgctggaaacctatagccaaaacacatatt

SEQ ID NO: 439231 - DNA, 201 bp, Homo sapiens
tgttctatgtgtttcctattcccataggatatgcctttgcacccagctcagagagcccttcctgtcctctctagggagaattaaaccctctgtaacagcartgcctgttgcgtagagatctatgagggcatttattatgcttatgtatttgtttatattctgtcaccctcactaacttgtgagccctggatggcatattcc

SEQ ID NO: 439232 - DNA, 201 bp, Homo sapiens
gtgattgaattgcccactcatcaatcctaacttatttaggctcattgttctttgccaactgaaaggggcctttgatttcatttaggctcctgcactttcarttcatgaaatgtgtcaaacaaggcgcagcttattagttttattagatctggcctcattccagggttatgtgttatgatccacaatatgcagcctagcagt

SEQ ID NO: 439233 - DNA, 201 bp, Homo sapiens
actgtggactcactctgaattctttcttgcgcgaggtccaagaaccctctcttggggtctggattaggaccccttccctgtaacatttttctggctaccayaaagggacccaaaggctaactaggtaagtggtggtgtctggtgacatctttctggtgaacatggaagggacgatgctgaggagatcccccaacccaaagg

SEQ ID NO: 439234 - DNA, 201 bp, Homo sapiens
acagtccctgtataaggtttctgacctgtggtaagtaaagaatgtcactttctaacaggtccaggagccccaagttatcttgggatctcagaaaaaggaayttacccaactcagaggtatttgagggtagaaacccatggctgggctcagctttaaaaaagtcttatctaagatttcttctatggaatagagttccatcaa

SEQ ID NO: 439235 - DNA, 201 bp, Homo sapiens
aattagccgggcatggtggcgggtgcctgtaatcccagctactcaggaggctgaggcaggagaatcacttgaaccagggaggcagaggttgcagtgagccragattgcaccactgcactccaacctgggcaacagagcaagactctgtctcaaaaaatagaagaagaggaaaaggaagaagaaggaggaggaggaggaaga

SEQ ID NO: 439236 - DNA, 201 bp, Homo sapiens
gggaaactgcaaacaaaaaagttatgttgtaagaactatggtacacttcttattagattctagtctcatcagttgtttttaagtttgtttttgcaatttargctaaccgtgcttattcctgcaaaccaaccagtgatctctgactgctgctcagaagaaacaagagggatgggtaatgtaaaaatctaaatcagtgttcta

SEQ ID NO: 439237 - DNA, 201 bp, Homo sapiens
caggaaagagacagagagagagagagtgaaaaaagctacacacttttaagccatcagatctcatgagaactcactcactatcatgagaacagcatgggggaatgatcgaattatctcccatgatccaatcatctcccactaggttcctcctctgacacatggagattacaattcgagatgaatttgggtggggacacagag

SEQ ID NO: 439238 - DNA, 201 bp, Homo sapiens
gtcctcactgctacattcccaccagtgccacgacagtttacaaatgccatggcaacatcaggagttaccctatatggtctgaaagggggaggcatgaatartccaccccttgtataccatatcatcaagaaataaccataaaaatgggcaacaagcagccctcagggctactctgtctatggagtagccattcttttattc

SEQ ID NO: 439239 - DNA, 201 bp, Homo sapiens
atcgaagggtgcaaagtctcaggtagaaagaagaaacatattttgagatctactgcacagcaggatgactataatcaataataatgtgttatgtatttcaaagtaagagagtaaatttcaagtgtctccccataagaaatggtgagcaagatgatgaatatgtaattagcttgatttaatcatgccacattgtatacatat

SEQ ID NO: 439240 - DNA, 201 bp, Homo sapiens
tcgaagggtgcaaagtctcaggtagaaagaagaaacatattttgagatctactgcacagcaggatgactataatcaataataatgtgttatgtatttcaaagtaagagagtaaatttcaagtgtctccccataagaaatggtgagcaagatgatgaatatgtaattagcttgatttaatcatgccacattgtatacatata

SEQ ID NO: 439241 - DNA, 201 bp, Homo sapiens
ctgagtgacatttgaaggtcatttttgcttcttgtggctatggaatagtggggggaggtgggtggcaagagagacagtggagcgacaagggggttggttgyagtatttcaggcaagagatgatggggtagcaatggacagaagagatgatggggtagcagtggacaggagagagagagggcaggaatttgatgtatgtttg

SEQ ID NO: 439242 - DNA, 201 bp, Homo sapiens
taggcaatttttttttttttttttttttttaaagatggagcctcactctgttgccaggctggagtgcagtggcactatctcagctcactgcaatctctggytcccgggttcaagtgagtcccctgcctcagcctcctgagtagctgggactacagacacctgccaccacatgcagctaattttttgtattttagtagagat

SEQ ID NO: 439243 - DNA, 201 bp, Homo sapiens
cgaagggtgcaaagtctcaggtagaaagaagaaacatattttgagatctactgcacagcaggatgactataatcaataataatgtgttatgtatttcaaagtaagagagtaaatttcaagtgtctccccataagaaatggtgagcaagatgatgaatatgtaattagcttgatttaatcatgccacattgtatacatatat

SEQ ID NO: 439244 - DNA, 201 bp, Homo sapiens
catcaaaggttctcaccaatcccttgaaacgggaggatgaggtgaaatggaggaaatagaagtaactctccgttttctgtcttgaacctgagcagtaatawacagcagtcagcagtaagtaccattattttgacattcctaagatgaaaatctataccaagtactacataagtgaatacaattagttaccggacctctatt

SEQ ID NO: 439245 - DNA, 201 bp, Homo sapiens
ctgccaccacatgcagctaattttttgtattttagtagagatggagtttcaccatgttagccgggatggtctcaatctcctgacctcgtgattcacctgcrtcagcctcccaaagtgctgggattacaggcgtgagcaaccacgcctggccgacaaaaattttttaaaaacaccaaaaccataaaggaagaatgtgataag

SEQ ID NO: 439246 - DNA, 201 bp, Homo sapiens
gaagggtgcaaagtctcaggtagaaagaagaaacatattttgagatctactgcacagcaggatgactataatcaataataatgtgttatgtatttcaaagtaagagagtaaatttcaagtgtctccccataagaaatggtgagcaagatgatgaatatgtaattagcttgatttaatcatgccacattgtatacatatatc

SEQ ID NO: 439247 - DNA, 201 bp, Homo sapiens
cgggaggatgaggtgaaatggaggaaatagaagtaactctccgttttctgtcttgaacctgagcagtaataaacagcagtcagcagtaagtaccattattytgacattcctaagatgaaaatctataccaagtactacataagtgaatacaattagttaccggacctctattagtgtctaacttaaaattagggaaaaagt

SEQ ID NO: 439248 - DNA, 201 bp, Homo sapiens
tattgacaattaagattgagaataagaacttaaaaggaaaatttccaactgaatgtaaacttgattttatagaaaactcatactttttatcatgtcttacaaaaaaaaaagatttcagaactgctgctagatgaatggtatttaattacatcagttgaactgaattacagcagaaacaaatgacaattagacaccaatatg

SEQ ID NO: 439249 - DNA, 201 bp, Homo sapiens
agaaaactcatactttttatcatgtcttacaaaaaaaaaagatttcagaactgctgctagatgaatggtatttaattacatcagttgaactgaattacagyagaaacaaatgacaattagacaccaatatgtgagtgactaatgggaacatgaataatctcagtaggctctatttgtttggattaatgcacagttgccaaa

SEQ ID NO: 439250 - DNA, 201 bp, Homo sapiens
caagtactacataagtgaatacaattagttaccggacctctattagtgtctaacttaaaattagggaaaaagtaagacataggtaagactccagtctgttwctttttttttttttttttttttgtgatagagtctcgctctgttccccaggctggagggcagtggtgcgatctcggctcactgcaaccttcgcctcctggg

SEQ ID NO: 439251 - DNA, 201 bp, Homo sapiens
gaaaaagtaagacataggtaagactccagtctgttactttttttttttttttttttttgtgatagagtctcgctctgttccccaggctggagggcagtggygcgatctcggctcactgcaaccttcgcctcctgggttcaagcgattctcctgcctcagcctcctgagtagctgggattacaggcgcccgccaccacgccc

SEQ ID NO: 439252 - DNA, 201 bp, Homo sapiens
attaagtgcatttgtaaacgaaggtaaaggccaatgaagtcattagacaaacatgaatagtaccttactcactcataagcattcacatgccttcctgagcrcgtaactcacgaccactagtggctaaagcatcaagaaaaagattagaatcctataaaatccctaaaggtctggtttataggacaggacaattatatgtta

SEQ ID NO: 439253 - DNA, 201 bp, Homo sapiens
gtctgttactttttttttttttttttttttgtgatagagtctcgctctgttccccaggctggagggcagtggtgcgatctcggctcactgcaaccttcgcytcctgggttcaagcgattctcctgcctcagcctcctgagtagctgggattacaggcgcccgccaccacgcccagctaatttttgtatttttagtacagac

SEQ ID NO: 439254 - DNA, 201 bp, Homo sapiens
tttataggacaggacaattatatgttaatagatttgtgaaaaatacaaaactacctaccatctgagcacataatacctgtgacttccatattgctgagcamgtaccttgtacttcacaataacatttaatttaatctctctgaaaaccctctgaagttgtggcagtagtcttatttactgatgaaacccaatgtcacacac

SEQ ID NO: 439255 - DNA, 201 bp, Homo sapiens
atttttgtatttttagtacagacggggtttcgccatgttggccaggctgatctcgtactcctgaccttgtgatccacccacctcagcctcccaaagtgctrggattacaggcgtgacccaccgcgcccagcctatcaatttgctgtgaagattttgctttatgcatgacttcagactctcactttcttttctttgaatatt

SEQ ID NO: 439256 - DNA, 201 bp, Homo sapiens
gcggatcatgaggtcaggagattgagaccatcccggctaacatggtgaaaccccgtctctacaaaaaatacaaaaaaattagccgggcgtggtggcaggcrcctgtagtcccagctacttgggaggctgaggcaggagaatggcgtgaaaccgggaggcggagcttgcagtgagccgagatcgcaacactgcactccagcc

SEQ ID NO: 439257 - DNA, 201 bp, Homo sapiens
ctcttcctggcttgatgacagctgccttctccctgtgtcctcacctggtggtaagagagctcaggtctctcttcttcttcccataagaacacaaatcccaycatgggggccccactttcatgacctcagctaaacctaattaccccaaaacacaccacttccaaatgctatcacattggggtttggggcttcaaggtgtga

SEQ ID NO: 439258 - DNA, 201 bp, Homo sapiens
aaatggatatggagacagctgtcccctgactacaaggcagaagtccagagtgctgaccctactgaaccctgagagccctacttcctgcagaaggtgttgtmttttccagcccagaagcaggaccacttcctaagaatgtaaatctcccaaaattttagacagagttagagattggtggtggcaaaatgcactaaggatggc

SEQ ID NO: 439259 - DNA, 201 bp, Homo sapiens
tagaaattctcccctctttcttaataaagtctgctcttgaactcattctcagccagctatcaaccttctgtggcaccattccttgcaagtagtattcctaytatctctagtttctctttgcaaagcctcttaaacctattccagtaggctttcacccctaccataccagccacactgttccctgcaagatcaccattgacc

SEQ ID NO: 439260 - DNA, 201 bp, Homo sapiens
ctgctacattcccaccagtgccacgacagtttacaaatgccatggcaacatcaggagttaccctatatggtctgaaagggggaggcatgaatagtccaccmcttgtataccatatcatcaagaaataaccataaaaatgggcaacaagcagccctcagggctactctgtctatggagtagccattcttttattcctgtact

SEQ ID NO: 439261 - DNA, 201 bp, Homo sapiens
ttattcctgtactttcttaataaacttacttttgttttgcactgtggactcaccctgaattctttcttgtgtgagatccaagaaccctctcttggggtctkgaaggggacccctttcctgtgacataacaactggctctgggaaggggagctctgatgagcggtagctgctgatttttgtggtataaatttcaagcctcca

SEQ ID NO: 439262 - DNA, 201 bp, Homo sapiens
tcagcttgttcagcagcaagaatcaggaagtccctagagcagctctacagctggttggatgactgagtggttcagcaatggcatcaagtaccctctgctcygagacattccccatgtagtctgcagagggtctgcagctccccttccaatcacagaatggttgcaggggctccaggaatcacagctagacatgacaacatc

SEQ ID NO: 439263 - DNA, 201 bp, Homo sapiens
tttgtatggagccagttttactcattagcagaacagaaagcagtggtgccacctgagatccagaagcaagcccttgtggatggctatctctgtcctacagrgctgcatgatcttaaaggttgattgtgttagaacctgaatttgacactacccatccatggaggtgcaaaatgatcaaaatctaactttggaaggtgtgag

SEQ ID NO: 439264 - DNA, 201 bp, Homo sapiens
cgccttatttagtcattcaacaaaatatttgctaagtgctcccacgtgccacaaactagatgctcttggcacaggatgggcataatccctccctcaaggayctgacagtaaaatggagaacacaagttaatagattcttgcatgagagtgaggtcttatgggggaacctgggaggtgaccttagcggactccttgatgctt

SEQ ID NO: 439265 - DNA, 201 bp, Homo sapiens
acctcgtttgttagctgtatttctaggtatttcattttcttcacggtgactggaagtgagattgtgctcttgatatcactctcagcctgcgtgttgctggygtatagaaatgctactgatttttgtacattgggtttgcatcctgaaactttactaaagttgtttatcaattctaggggccttttagcagagtctttatga

SEQ ID NO: 439266 - DNA, 201 bp, Homo sapiens
ttcaatgatattcctattaaactttaatgtcattcttcacagaatcagaaaaaaaatctaaaattcatatggaaccaagaaagagcctgaatagccaaagygcttctaagcaaaaagaatataggtggaggcaccatattgcccagctttaaaccatactgtaagcctatagtaaccataacagcatggtactggtacaaa

SEQ ID NO: 439267 - DNA, 201 bp, Homo sapiens
caagtggtacctaattaaactaaagagattttgcacagcaaaagaaactaccaatagattaaacaagcaaactatagaatgggagagaatatttgtaaacmatgcattcaacaaaatgcagaatctctagggaacttaaacaattgaacaagcaaaaaagaaacagccccatttaaaaatgggcaaaaaacatgaacagac

SEQ ID NO: 439268 - DNA, 201 bp, Homo sapiens
gccattaataacttcatgtgccagccgaggaaaagctgacatggtggagttttgatcctctcaccttcttgacagtcggtgcagctagtccactttcagayatttagccaaatgagataaacatacatccatgcaaatacttgtacaacaatgttcagagtatgtacttgtttttaacaatcatgcactggacaccaccca

SEQ ID NO: 439269 - DNA, 201 bp, Homo sapiens
tgtgactgtgaggtagcaaagagctcagccagagacactgatgttctcttcctacacggcaattattacatcatgtgtttagctgtttttagagtacagcragggcagggactaaggctgccttatttctcatgaaactcccaattcaacaggtactgtatattattgagcacatagtaggtgctcaataaatccctgttg

SEQ ID NO: 439270 - DNA, 201 bp, Homo sapiens
taattacctcttttttcctgtaagttatgaatatgaaagaaatgtaaaacaggggatggacattctgagcggaatcactttcacacactaagctagaattwaaaaatccagaacacttcttactgagcatctcctatgtctatgacactgtgcaaagcaccgaggggaggggagaccaagacactggctatttatgcttca

SEQ ID NO: 439271 - DNA, 201 bp, Homo sapiens
gaaaccatggtgaatggtggccttggggaactgcagaattcgggacagctgaagctgggtctgaaggtggggcaacagcgagagatgaggctggacttcakggaaggagccaggtcaggagggaggctgtcaggagcttagagttcatcagaaaggaaatggaaagacgctaattgtgagaataagaaatgggatctgttt

SEQ ID NO: 439272 - DNA, 201 bp, Homo sapiens
acatcccccgaaaggcccctgtgtgtgttgttcccctccctgtgtccacgtgttctcattgttcaactcccacttatgagtgagaacatgcagtgtttggttttccgtgtctgtgttggtttgctgaggatgatggcttccagcttcatctgtgtccttgcaaaggatacaatctcattcctttttatggctattcagtag

SEQ ID NO: 439273 - DNA, 201 bp, Homo sapiens
tgggggtggtggtgggcgcctgtagtcccagctattcaggaggctgaggcaggagaatggcgtgaacccggaaggtggagcttgcagtgagctgagatcaygccactgcactccagcctgggtgacagagcaagactccgtctcaaaaaaaaaaaagatgattgatattgtcccacaaattgcaccttgaataaaattcta

SEQ ID NO: 439274 - DNA, 201 bp, Homo sapiens
taagagagctcaggtctctcttcttcttcccataagaacacaaatcccatcatgggggccccactttcatgacctcagctaaacctaattaccccaaaacrcaccacttccaaatgctatcacattggggtttggggcttcaaggtgtgaatctgggggcatttaattcagcccataacatggcccaatcacatcaactac

SEQ ID NO: 439275 - DNA, 201 bp, Homo sapiens
ttaaataattaacaatgtatgtgtgaacattataagaataaaacacatagaagaaaccttacaatattaggatcaaaaaaattcttttgaaactaggcaatttttttttttttttttttttttaaagatggagcctcactctgttgccaggctggagtgcagtggcactatctcagctcactgcaatctctggctcccggg

SEQ ID NO: 439276 - DNA, 201 bp, Homo sapiens
tgtgctgtgtcatgaataggttcacagggctatgagtgacagcaaaaattcaaacagcaaggtaagtatgcaatcctcatctggccaaaaagttattctayctctcatggccacaatatttgattctggcatgggcacatgacctaaaccaggttaacgcattacagtcttaactttggctcttaactattgggaaagaga

SEQ ID NO: 439277 - DNA, 201 bp, Homo sapiens
ccagaactgggagacgatacatttctgttgtttaagccattctgtgtatggtaatttgttacgtggctccaggaagctaagacacagccttcagagctggmttctgatttctttagacatcgccctaccaggttacagacaactcagaataatccttccctccgggcaggcgcaaccagggaggtctacagagaagagcac

SEQ ID NO: 439278 - DNA, 201 bp, Homo sapiens
ttcaaacagcaaggtaagtatgcaatcctcatctggccaaaaagttattctacctctcatggccacaatatttgattctggcatgggcacatgacctaaaycaggttaacgcattacagtcttaactttggctcttaactattgggaaagagaaaatgttttcctgatggtgctgttaaactagctgagaatgaagccaac

SEQ ID NO: 439279 - DNA, 201 bp, Homo sapiens
aagttattctacctctcatggccacaatatttgattctggcatgggcacatgacctaaaccaggttaacgcattacagtcttaactttggctcttaactaytgggaaagagaaaatgttttcctgatggtgctgttaaactagctgagaatgaagccaacaccaaagaaaatacatctgaataatgaaaaacaggctgaat

SEQ ID NO: 439280 - DNA, 201 bp, Homo sapiens
taacatacctggcctgtctctccagcaaatggctgagagtctatgtccagcttatttctatttgtgtctctaggtactggggttggggctagatatatgtyctttatggagttttaaaattcaagttagatttcctaactcagattaaattcgagttctgggcttcttaattttaaaaggaaaaccattccaaatgatcct

SEQ ID NO: 439281 - DNA, 201 bp, Homo sapiens
ttttaaaattcaagttagatttcctaactcagattaaattcgagttctgggcttcttaattttaaaaggaaaaccattccaaatgatccttttttatatgmatgtgagacaaaaaaaaagtaaacagtgaaataaaaataaaacaaacaaaatgttcctttgccctaggaaacgcacaggctcttccatggacgtcgttgt

SEQ ID NO: 439282 - DNA, 201 bp, Homo sapiens
tggggagcaaagagaaaacagcaggagaaaagcctccaggctcctgtgcttcccaccatgtccagaggctcctctcccaccaccaccatgtcgccaggctsctcccacctgccaatggagcccagctgtccccccaggcatgtgtacacgtacaaggctgttgccagccccggagaaagaagtccaaaaaggaaatggaag

SEQ ID NO: 439283 - DNA, 201 bp, Homo sapiens
gaaaggacctggggtgtgattcaggctgggccccacacatccatttccagtgccagacctgggcccttggacaccaagactgtaacaccccagctgctgcygactaggatcagaagggccttcagcctcctttctgccaaacaaagagaatatcaaaacgttgaggcaggatcagtatcatcaataaatcatacgctattt

SEQ ID NO: 439284 - DNA, 201 bp, Homo sapiens
acttagaaaaagataatttttttcacaaggattcataatgtgatttcttaattttttaaaaaacactaaaaattatttaaaaacaggtgtaaaatatgtamcattgcaaaatcaaaacttctttcaggatcaaagttgttcagagtttttatgtttcatctaatgcaatttcccttagagacatttgccagtctttcagtt

SEQ ID NO: 439285 - DNA, 201 bp, Homo sapiens
actatttttgtaattgttactttccataaaaatagttcaaaaagtcatcagagtttactctgtgatgaaaattttactgagcattatctcattttaccttyagaaaagctcacttgttttatagacaagaagagtaagttttaatgatattaagtaatttgccctaagttatctagtttgtaaatggcagagctgaaatgt

SEQ ID NO: 439286 - DNA, 201 bp, Homo sapiens
gggagagaatctgggctaaagtgatggctcaccatggagagtgttttggggagaaagaagaggtccaaggcccatccactgggctccacctgcccaggacrggcaggcacagggacacagcctctgaagagcaagataaggaggagatcgtgtcatgaagccatggagggaggtgcaggcagagggtgctgaggccgtggg

SEQ ID NO: 439287 - DNA, 201 bp, Homo sapiens
cgctcaaaccggtctgggtccctttctatttgtttgcaaccaaaaggacttttaacaaagcataacagcttttgcttcttaaactacttgcaaaaatcagrttgggaggggtctctgcgtgtttggttttatttttattgtttttatgagggtggcaaagaatggaggatagttcaacagcaattctaagtttgcttgttt

SEQ ID NO: 439288 - DNA, 201 bp, Homo sapiens
taggccgtattactggagaatttaatcctgaaagaccaacactggggcatattttagtaaagttactgaccttcactgaaaataaaaataaaatctgggcraaattaccaattcactcataaaggttgtcatcaggctttttgacaataatactttctaccagaagaaattgggcaacttgaggaaaaaaaatttgagcca

SEQ ID NO: 439289 - DNA, 201 bp, Homo sapiens
ttctttagacatcgccctaccaggttacagacaactcagaataatccttccctccgggcaggcgcaaccagggaggtctacagagaagagcacatagagaygtaatttacagtttgtgactgaccccactcccctgatgctttttataagtggatttgggttgaaaatagactcaaatgtagcagtctcagtgaagaggaa

SEQ ID NO: 439290 - DNA, 201 bp, Homo sapiens
ggttcaaatttaacacatttaaccatttcaaagggacttcgaagtaaatttctaaaatgtaaatcatgaacgcagaattgttcagaattccatgggggatkaacctgaattccaaaattaaatgtaaatctctgtgaggagaaataacatttacatacatcaactttgggacagaaaaactgaaagttttgttgctgctgt

SEQ ID NO: 439291 - DNA, 201 bp, Homo sapiens
gaattccatgggggattaacctgaattccaaaattaaatgtaaatctctgtgaggagaaataacatttacatacatcaactttgggacagaaaaactgaargttttgttgctgctgttgttgtttggtaatccattcccagaagttcatcaacgtttgaaaagagcatgagaattggtcccagagaattcacacgaatatc

SEQ ID NO: 439292 - DNA, 201 bp, Homo sapiens
cacacaacactttcagttgcctggttgtgttgttacataataattcatagagcatgatattcttctataatatatactattgtatgtatataatattggayatgtatataatgttgtgtaatcataatggctctctcattaatacccggtcatggacaggctccatgtgaaggtgccctgaacaccttgtctctaattatg

SEQ ID NO: 439293 - DNA, 201 bp, Homo sapiens
tgaaagtattcagttaccaaaatggtctccatgatgcagtccctagcatgatctatttgacactccccatattccagacacagagaatgaaacctgaagcrtcatgtcatccaacatactccttttcagtcttgttgcccaggttgggcctgcacttgcttacacacgtatgagcacgtctcacagaaactgagagtaaac

SEQ ID NO: 439294 - DNA, 201 bp, Homo sapiens
tccttatagggaggatacaggaatggttgaaaaagtaggctttttctttctttcttttttttttttttaactctgtgaacaattgtatccaagtaatacgyactaatgatttggtaccagcctgtacagccctgagtgggatacctcatgtatctatatttgatcgagtccagtttccatctaaagtttttactgtaactt

SEQ ID NO: 439295 - DNA, 201 bp, Homo sapiens
atccaaatctatcaattttttttgatgaccccaatttagaagtctgcagagacatgaccatgaaggaaaaccaaggatataaaaataatttattcttgatsgggcaccatgctaaatgttctatttgtataatctcattactccttacagtgtctctgggcaatcagttttctaatgctctgggacagttaaaagagtcag

SEQ ID NO: 439296 - DNA, 201 bp, Homo sapiens
attggtttgtttatttatttatttgagagtgggaaagggacagttaatgcacggcggattcggcttgaaaatgcatctagctggttctctctttaaacatrctgtgccttgctggcagggacagctaagctgtccattctctccatctctgccgcctccatcgtgggtgctggatcacccttcctcattcccctgttcata

SEQ ID NO: 439297 - DNA, 201 bp, Homo sapiens
gaaagaaatgttcctgttcacaagaaacatgaaaaacaagaaaacatgacacttccaaaggaacacaataattctccagtaacagtgaaaagaaaagaaawtctatgaaatgcctgaaaagaaatccaaaataatgatcttaagaaaactcaacaggttacagaagaaataaatcaggaaaataattcattatccaaatga

SEQ ID NO: 439298 - DNA, 201 bp, Homo sapiens
catactgtgccttgctggcagggacagctaagctgtccattctctccatctctgccgcctccatcgtgggtgctggatcacccttcctcattcccctgttmatacagggcgaggcctgatgttgattccttcctctggcgagtgaccaggcaaactttactgtctaagacaatttgaaaccactttctttctgtatctggt

SEQ ID NO: 439299 - DNA, 201 bp, Homo sapiens
gtgtttgagccatgggtgcagatccctcatgaagagtttaacgcccgccctcccaaccagggaagtgagttctcattctctttttttcatttatttatttwttttttttgagacagtctcgctgtgttggccaggctggagtgcagtggcatgatctcggctcactgcaacctccgcctcccagctcaagcaattctcctg

SEQ ID NO: 439300 - DNA, 201 bp, Homo sapiens
gtaatgcatttcaattgtacttgcttctttcttagtaaatagaattcccaaagtaatttttgtattgtgatatggattctcatatttcattcttactcggyggtgtttttccccactaggttttccttaacagaatattttgcttggtaaaatgttcttgctcaggtttcttccgctgtgtctgtgcacgcctgcccttta

SEQ ID NO: 439301 - DNA, 201 bp, Homo sapiens
actgtccagggtacctgtggcctgagctactgccagcaaggcggcagagctgaaggtgagagtgtacatggaaatgagcccacagactcagactgcaggtwtaatacatctacacagagcaagggatggggccttcccagcaagaggtgataatttccttggttttcaaatccttatgaatgcacccagcttctagttacc

SEQ ID NO: 439302 - DNA, 201 bp, Homo sapiens
ctctgtaaagtttgattaatggaaaaaaggatttgtgaggctagtcttaagctgtagccaatctggtgtgctttatgtgtctttctttattgttctgtcayaatgaggggtccctagggatagaacatgggcttaggacacctgtaagactgctgttcaaggtgacccagcaaactggtcagttctaaactttgctacagg

SEQ ID NO: 439303 - DNA, 201 bp, Homo sapiens
ctgattagatctttacaaattatatgaatgtattgaattatcacatgtacccagaaaatatgcaaatctattatgtatcaatacaaaaaatttaaaaatartttctttggagaatattttaaaattatgaaaaaaaccattagctagactagaagaaaatagagaagacccacatacatttaaatcagaaatgaaaaagga

SEQ ID NO: 439304 - DNA, 201 bp, Homo sapiens
acccagtttcagttttccgcatatggttagccagttctctcacagcatcacttgttaaatagggaatcctttccccatggcttgtttttgccaggtttgtygaacatcagatggttgtagatgtgtggtcttatttctgagatctctattctgtttcagtggtctatgcatctgctttggtaccagtgccatgttgttttg

SEQ ID NO: 439305 - DNA, 201 bp, Homo sapiens
gggacaaggaaatttcaagaaagaaatgcttaaggatgattttttttttttttttttttttgagatggagtctcgctctgtcacccaggctggagtgcagwggcgcgatcttggctcactgcaagctccgcctcctgggttcacgccattctcctgcctcagcctcccaagtagctgggactacaggtgccctccaccacg

SEQ ID NO: 439306 - DNA, 201 bp, Homo sapiens
taaattagtattgccattatgagaaatggtatgaagattctgccataaactaaaaacagaactaccatatgacccagtaatcccacttctgagtatacatmataaggaactgaaatcaatatgtcaaagagatatctgcactcccatgttcatagcaggattattcactgtagtagtctattttcacactgctataaagaa

SEQ ID NO: 439307 - DNA, 201 bp, Homo sapiens
gtcttgttccagttttcaaagggaatgcttccagcttttgtccattcagtatgacattggctgtgagtttgtcataaatagctcttattattttgagataygttctatcaacacctagtttattgagagtttttaacatgaaaggatgttgaattttattgaaggactttgcatctattgagataactgtagtttttgtca

SEQ ID NO: 439308 - DNA, 201 bp, Homo sapiens
tctaagacagggatgaaggatcataatgtctgcaagttgctctcaaatgattcagcaaacagtaataattattttatatatatacacacacacacacacayatgcacgtgtgcacgcacacacacacacatgcaagtcaactctcattatttgtggtaaagtcaccaggaacactgaattagccaatactgctcctcaagg

SEQ ID NO: 439309 - DNA, 201 bp, Homo sapiens
acagttttatggacctggagggtttagttgggggcgaggaaagggggtagagttgcactggaaaatagtactgggtactgagtcagagtagagtaaaatgytttcaagggtttccctctcccttgaataaggaggccttagcatgcgtgctggacatttattctacaattggcagacttacaaaaggccaagagtcaaatt

SEQ ID NO: 439310 - DNA, 201 bp, Homo sapiens
ggatgaaggatcataatgtctgcaagttgctctcaaatgattcagcaaacagtaataattattttatatatatacacacacacacacacacatgcacgtgwgcacgcacacacacacacatgcaagtcaactctcattatttgtggtaaagtcaccaggaacactgaattagccaatactgctcctcaaggaaatacaggg

SEQ ID NO: 439311 - DNA, 201 bp, Homo sapiens
attatattttctttctgtgaaaaatgacattggtattttgatagggatttcattcaatttgtagattgctttgggtaataaggtcattttaacaatattawttattccaatccatgagcatgggtgacctttgtttgtgtcctctttaattttttaaatcagtgttatgtagttttctttgtagaggtgtttcacctcctt

SEQ ID NO: 439312 - DNA, 201 bp, Homo sapiens
agtttggggtttggcttgttcttgactttctatttccttgagatacatcattagattgtttacttgaaatctatttttttgacacaggcatttatcactayaaactttcctttgaacagtgcttttgctgtatcccatagcttttggtatgttgcattttgactttcatttgtttcaagatattttttaatttcctcctta

SEQ ID NO: 439313 - DNA, 201 bp, Homo sapiens
tggtggtagtggcaggttgggtaagcctgtccttaggtccctgggagagatgctcaggtgcctatggtgcacagggcaggagaatcctcaggtacccagayggcgagctcaggcactggaggtggtggagccaggctaagtgagtctgtcctcaggctccccaagtggtgcctgcaggcactggctgtggtaggcagtgac

SEQ ID NO: 439314 - DNA, 201 bp, Homo sapiens
tgctcaggtttcttccgctgtgtctgtgcacgcctgccctttactgccggatgacctcacctcgttagagctctcctaatgaagccaccgtgttatggccmgtctatttgtaaagcagtgatatttccataattctttggcaaccagggtcacctctcctcctactaggccatctcacaaaagtatgttgctgcttatgat

SEQ ID NO: 439315 - DNA, 201 bp, Homo sapiens
gttatttaaaaatgaatgattaagtcgttttcaactatagtcaccctgttttgctagcaaatactaggtcgtactatttctaactattttttgtaccttckaaccatccccgcttactcccctcgcatctggtaaccatccttctactctctatctccatgagttaaattgttttaattttgagcaccccaaaataagtaa

SEQ ID NO: 439316 - DNA, 201 bp, Homo sapiens
aataggtcacaggcaaatgactagaaattcagatgcatcaagattttcaaagcaacataagactctggaggcgatagagacatgacctccctgttctgaaygaaaagggttttcaacaaagcaaactcataatcaagcttgatgatagaattttcagatatgcaagaactaaaaaatatacctttcatatgcttcccggaa

SEQ ID NO: 439317 - DNA, 201 bp, Homo sapiens
ccattttttggtgtcctcttcaatttcttgcatcaatgttttaagtttttattgtggagatctttcacttctttggttaattcttaggtacttagttttayctgtgggtattgtaaatgggactacattgtaaaatttctttttcagtttgttcactcttggtatatggaaatgctaatgatttttgtttgttgatttcgt

SEQ ID NO: 439318 - DNA, 201 bp, Homo sapiens
tctcaccaacagcatatgagggttcccttttcctcaccaacatttgctattgcctgtcttttggataaaagccatttcaactgggataagatatctcattrtagttttgatttgcatttctctgatgatcaattatgtcgagaaccttttcatatgcctatttgctatttgcatgtcttcctttgagaaatgtctattcag

SEQ ID NO: 439319 - DNA, 201 bp, Homo sapiens
gaacgaaaagggttttcaacaaagcaaactcataatcaagcttgatgatagaattttcagatatgcaagaactaaaaaatatacctttcatatgcttcccrgaaattactagaagatgcaaactctaacagtgatgaggaaaacaagacaaagagctaaggaaagaggttgaacataaaaaaggagtaacaggaagtgtca

SEQ ID NO: 439320 - DNA, 201 bp, Homo sapiens
caaaagttctatgtggaatgtggatttctgactgtgtgcccctaacccctgcattgttcaagagtcaactgtatgtgtgtatgcagatatatacatacatmcatacacacacacacacacacacacacacacagtttttgaaaaatcgtttgatgccttctgaaccacttgatgtttgctcctgctgaatataaatcatat

SEQ ID NO: 439321 - DNA, 201 bp, Homo sapiens
atggatggaggatggaagagtgaatgtctccagaaagggaaataaaattaatttcagatgaagtcagataaatctgggttatttaatgttctgaacatttygaaaataatattcttttgacagatcttgtaatacttgaagaaaattaggaagtatataaaaatcaagcatgcaaaatgagaggcaattatcaatgctgag

SEQ ID NO: 439322 - DNA, 201 bp, Homo sapiens
tttatagatcaattcatattggagctgggctttgaaggtcacttaatgtttaggcatctggggatgtgagaatgggcattccgaaaaatgagcgaagacamagaattagaaaagtgcaaggcaagttctacggcacaatcggtttggctagagcacagggtgaatgaagggaaatagtaagaaataaagtcaaaaacaaaa

SEQ ID NO: 439323 - DNA, 201 bp, Homo sapiens
acactggtgaagaacagacaggccctatcctgtagctgcctacagttcagtggtcctactttcatcagaaacctagtcttaggagggcaaaacttcactcyctttccagaacgttctgcactgcttctcctggagagttgggaaagtgtctgtgaatgtagacatggacaggggaacgtggagctagcttcagggctcttc

SEQ ID NO: 439324 - DNA, 201 bp, Homo sapiens
aagttctatgtggaatgtggatttctgactgtgtgcccctaacccctgcattgttcaagagtcaactgtatgtgtgtatgcagatatatacatacatacayacacacacacacacacacacacacacacagtttttgaaaaatcgtttgatgccttctgaaccacttgatgtttgctcctgctgaatataaatcatatgta

SEQ ID NO: 439325 - DNA, 201 bp, Homo sapiens
taaatctgggttatttaatgttctgaacatttcgaaaataatattcttttgacagatcttgtaatacttgaagaaaattaggaagtatataaaaatcaagyatgcaaaatgagaggcaattatcaatgctgagaaaaacaagttgtattagaaaagtaatcatagcagatgtgggacttgcagtgaacagtatttatgtga

SEQ ID NO: 439326 - DNA, 201 bp, Homo sapiens
aatcacgtgagagaatgtagatgaatcaacagaaatgtactctcaccacttaaataattctcccaataaatagaaagcactatatcattatacccttcatytgttgtttcatatgagagagtcttatgcgacagtttttatagaatatatagtacagtggcaggcccaaatggccacttcatgcttttgattacggcacct

SEQ ID NO: 439327 - DNA, 201 bp, Homo sapiens
acttgtacatagaggaacctctacaagggtaaggagaccaaaatttcatgcagaaaattatggtattatgacgatggtggcttttttaatgggcaagtgaygtgggtaacattgagcccacaacttcacctctaaagtgaagcagggtgctgaaaaaatgtatattgagagacccagagcagagaacttctgtctgtttaa

SEQ ID NO: 439328 - DNA, 201 bp, Homo sapiens
aaatttacaagaagaaacaaacaaccccaacaaaaagtgggcaaaagatatgaacagacacttctcaaaagaaggcatttatgcggccatcaaacatgaaraaaagctcatcatcactggtaattagagaaatgcaaatcaaagcctcctgaatattaaagtgatatcatgtaaacaataaagagagaaaagatctcccag

SEQ ID NO: 439329 - DNA, 201 bp, Homo sapiens
catgtgtgagtgtgaaagcatgtgtgaatatacatatgtgtgaatacatacatgtgtatgaatgtatgtgggcgtatgaatgtgtgtaaatgtgtgtgacyggaggcatgtgactgtgtgagtgtatgtgtgtgtgtatatgaatgtgtaactgtgtgaatgtttatgtaagtgtgttaatgggtgtgtgagtgtgagaat

SEQ ID NO: 439330 - DNA, 201 bp, Homo sapiens
tctgcgtgtgaatgtgcatgactatgtatgtgtgagtgtgcaaatgtgtgtgagcacatgaatgaatgtgtgagggtgtgaatgcatgtgtgagtgtgaawgcatgtgtgaatatacatatgtgtgaatacatacatgtgtatgaatgtatgtgggcgtatgaatgtgtgtaaatgtgtgtgactggaggcatgtgactgt

SEQ ID NO: 439331 - DNA, 201 bp, Homo sapiens
atgtgtgtgagcacatgaatgaatgtgtgagggtgtgaatgcatgtgtgagtgtgaaagcatgtgtgaatatacatatgtgtgaatacatacatgtgtatraatgtatgtgggcgtatgaatgtgtgtaaatgtgtgtgactggaggcatgtgactgtgtgagtgtatgtgtgtgtgtatatgaatgtgtaactgtgtgaa

SEQ ID NO: 439332 - DNA, 201 bp, Homo sapiens
ggaaagattaaaatagtttgtcttattaataaaagttctttaagccatctcagaatttggaggggaggaagtaaagttacaaaaaaactcaactatttgayaccctagccttcatctgagcatatatatacatatatatatatatatattttttttttttaactccctcatgtttttgcctgatctgtctggtttggaata

SEQ ID NO: 439333 - DNA, 201 bp, Homo sapiens
aaagttctttaagccatctcagaatttggaggggaggaagtaaagttacaaaaaaactcaactatttgataccctagccttcatctgagcatatatatacwtatatatatatatatattttttttttttaactccctcatgtttttgcctgatctgtctggtttggaatacaaaacaattgtaaaacaattcattccaata

SEQ ID NO: 439334 - DNA, 201 bp, Homo sapiens
aatttaaaaaattaccaggcatggtggcacactactgtagtcccagctactcgggaggctgaggtgggaggatctcttttgatcctagaagttcgaggccrcattgagctgtaatcacaccactgcactccagcctgggtgacagagccagaccaagtctctaaacacaacaataacaacaacaacaacaaaaccaaaact

SEQ ID NO: 439335 - DNA, 201 bp, Homo sapiens
tccacaaacattactgaatgcttactatgcgcaggatactatatatagtcaagaaaataaagatgaataaaacaaaatcattcaattaaaaaaaaaaaaaacagaaagaaaatggtctccttctcccagaactagcaggttaatgagaactaaatatataaggcaaatacaaaataaaaactatagtttaagtcaaaatat

SEQ ID NO: 439336 - DNA, 201 bp, Homo sapiens
acagtctcgctgtgttggccaggctggagtgcagtggcatgatctcggctcactgcaacctccgcctcccagctcaagcaattctcctgcctcagcccccygagtagctgcgattacaggagtgtgccaccatgcctggctatcttttgtatttttagtagagactgggtttcaccatgttagccaggctggtcttgaact

SEQ ID NO: 439337 - DNA, 201 bp, Homo sapiens
cattacaagtggctgactctttttcaatttttcaatagatcaaaatatattctttcatggctgtagaatataatttagtatttgttgaaagtgtttggccmttctctccatgacatactttgttttaaatgtagatacataattcatgctgtttgagtaaatgaaagtattcagttaccaaaatggtctccatgatgcagt

SEQ ID NO: 439338 - DNA, 201 bp, Homo sapiens
ctccttgatgtgaaacaaattattcagctcaaataaatttgcctacaagatttcaaaagtcaatatcagttttaccttaggggcaacagatatagcattatttttttaaaatccttaagaaattgaaacattaagaaattgaaggtaccaagggactaaattataactcaaaattacggaatcttgtgaatattctgatag

SEQ ID NO: 439339 - DNA, 201 bp, Homo sapiens
tggaaccaattaaggactctcgtatgaactttaaatgtcccacattgataaaatcttactagggatttattcttaaagtcaataattttctttgttaagtrtatgaacacctgtgagttaaaggtttaaagaaaaactataatgagaaagcagtagaaaccaattgttttgtttagtagtctagagctcccaacaagattt

SEQ ID NO: 439340 - DNA, 201 bp, Homo sapiens
ttctagcctttattgtgtgaccaacaaaagcattaaagcagtgttgcagtagctacctattcccagatactcaggcaagaaaggagaaatgtgttcaggcycatcttccaggatcatcaagtacagaataactgttcacatgggaggaaagctacaagaggcaacttctgcaacaattaaatggaaatagtaatagtacat

SEQ ID NO: 439341 - DNA, 201 bp, Homo sapiens
ttgccatacttctttaaacattttatatacataaaattttatatgaagtcgaaatatcctttgagcttatccccaatggtagctttccaatccaattttgttttttttttttttgtttgtttgttttggattttactacacatgtatttataagaatataatgtgtgggccgggtgcagtggctcatgcctgtaatcccag

SEQ ID NO: 439342 - DNA, 201 bp, Homo sapiens
caacagattatttggttttccttttgtcctcttgttgtatttctatttttttacaagttaccttggctttctttaaaaaaagattgccttactgaaagtgytttttctttcacttgtacctcatatgcatactatctattttaatccatgaatggttacatttaaggcctaaaatcttaaagttgtgtttctctaatcatg

SEQ ID NO: 439343 - DNA, 201 bp, Homo sapiens
agcaacagcatcgaccacgggcttgtcagagatgcagcatctcaggtccgttcgcatctgctgatctggagcctgcattttaccaaggtccgcggatgcayactgaagcttgggaagcggtgctacagcgggcaggctgttcacttgggttggtgaagatcctagatcttaaagtcaaaggtcaggaagtggaggaaggac

SEQ ID NO: 439344 - DNA, 201 bp, Homo sapiens
agatgcagcatctcaggtccgttcgcatctgctgatctggagcctgcattttaccaaggtccgcggatgcatactgaagcttgggaagcggtgctacagcrggcaggctgttcacttgggttggtgaagatcctagatcttaaagtcaaaggtcaggaagtggaggaaggacagggatctttttagctctcagtcaagaag

SEQ ID NO: 439345 - DNA, 201 bp, Homo sapiens
aggagaaatgtgttcaggctcatcttccaggatcatcaagtacagaataactgttcacatgggaggaaagctacaagaggcaacttctgcaacaattaaawggaaatagtaatagtacatgcatcataggtttgcatgaggattactgaggaaatattagtgaatcgcacacttcaaaaatgttaactaagacatttgggg

SEQ ID NO: 439346 - DNA, 201 bp, Homo sapiens
aaatttttgttgtgaatattttaatcattataaattgatcctctttatacacttgaaaactctttacaattaaattttacttttctaaaattaaaatcackacttctgcttttttatttattccaatatatctttgaacatatttaagtattattttgttttttagagagtttacatacagattttgttttttcagttgta

SEQ ID NO: 439347 - DNA, 201 bp, Homo sapiens
ttttttcagttgtaaagttaattttcgtagctgatctattggatgttacattcttcatcctattttgtgcttttggttcttagcccttccttgctgtctaytcagcttttgtccttttaatagacagactctgtttaactacctttatcttctgcattgactttgagggtgtagaccccagttttcctgggatttttaaga

SEQ ID NO: 439348 - DNA, 201 bp, Homo sapiens
ttactgcaaaattatgattcaacacttcatgtggctttgaaactcttttccctccactatttagacataaccctaggtttagtgctgactgcttttcacaytacactgtcctcctcacttggggactctcactgtgctttacttgctgtgagctggagcacagccccagtcaccttctggatgaaggacagagggatactg

SEQ ID NO: 439349 - DNA, 201 bp, Homo sapiens
accttctggatgaaggacagagggatactgcagtcactgcgtccacagtgtttttcttcacatgaccggggtaaaatcacgcccaagatgtttctccccawttctctaaaaggtgctctgttgtctggaatttactcttgcaaaaaatcttagcctcagtattatttgttgttgtattgctttttcccctgtccagacgtt

SEQ ID NO: 439350 - DNA, 201 bp, Homo sapiens
ctattcctgtcgctctgatagttcctcttgggaacactaacttttaactcttttgtgttctatgtcctccaatttaatatcttttctggccttatttttayacacttgtcttttctgagagagcgccttaacgttgcatttataattgatcttgtgcagttgattattctctatacttctatggagattttagttctacta

SEQ ID NO: 439351 - DNA, 201 bp, Homo sapiens
ctgctcccagcaatcaatgctccatcaccaaccctgagcactttatgtcagcatgattttggagtttctgacccaaaataactcaagatggaaatcagaarggtgggagggaaaagggagcagcagtagttgtgccagaaaacaacgtcagtgaaataggtgtccgagacccacggtgtgggttattccagaacttggggg

SEQ ID NO: 439352 - DNA, 201 bp, Homo sapiens
ctattgtagattaaaagtttcaggtatttaaaaacattcttcttttcacctatgcagctgggcttcccttccttaaaattatgaatggtactacctcaaayatactcaacataacggtgtttataatttaaaaattagagatgccatttacaaaaaaaagacttggaagttagcagcagcaggtaaagacctctggatgcg

SEQ ID NO: 439353 - DNA, 201 bp, Homo sapiens
ttctgactggcctccccccacactgatgtgataaaatctaatcgccacattggggggtgtccatcaggcagagatttgagggaaagaggcaaacagccttstggtgcaggtcacgtgcttccatctgcgacctcccaggagatctggctttgaagctgactaggcatttcccagtctggtgaattggctggcattctgttt

SEQ ID NO: 439354 - DNA, 201 bp, Homo sapiens
tttcttagataatctattcaaagtttgattatctactcactattttggttcttctttgtggaggaggcaagtaccagatacctccagttagctatcttgargccccctccatatacgatttctggcactgaatcaatcaaatattacaagtcatgccagaagccaaaaccaaatgactgaaacccaagaaaaaaataattc

SEQ ID NO: 439355 - DNA, 201 bp, Homo sapiens
ttgctgccagctgtgaagcccataaatattcttcttgcaaacaagaagcgcacagccttcatgagaagcagtttgcctccttgtccattgtttttctcccygataggccttgacagctgatttacaggaagaggcctcaccttatctgcatctgtattgatgtgtttggtgagcaaaaaagcaactaacagacttaatttt

SEQ ID NO: 439356 - DNA, 201 bp, Homo sapiens
tgtcttgtggttgcatttaattaaactgtgctctactggggaccaatgggcctttattattatagctttggatgacacattgcaaccctaatgttttaaawggaatcttgtctgattactgtttattctccccattggcactgatttctcaccagccctaggaatgcagctcattttcccctcgtagaagaggccggggct

SEQ ID NO: 439357 - DNA, 201 bp, Homo sapiens
gaggtttcttttggtgcgaaaggttagacagggagttttagactgtttatttagcaaagcttcaattttggttctgcaaaggtggcttagattctactctsaggtaagggttgaatagctcaagtgcttgacatggaaaagaatagcagcttgggatttgaatctggcagctagtgagagggtgagtggacatttattata

SEQ ID NO: 439358 - DNA, 201 bp, Homo sapiens
atttgtttagcttcttcttggcctttctgttcagggcaagacacctatcacttgagggtcttcaggggagaaaggagaaggtcagaaagtggcctttctargttttatggtttgctttggcaaagagaaattttggtttctatgaacctcctcaggggagaaaggaagatgaaggaaaggagggagggagaaggtgagaga

SEQ ID NO: 439359 - DNA, 201 bp, Homo sapiens; identical to SEQ ID NO: 267208

SEQ ID NO: 439360 - DNA, 201 bp, Homo sapiens
ctgtgtaatatccatataattttgatgtaattacacaaatttctcttccttatgagccagaaagagactatattccaataaagtaccatttgtcatttagyttaccagttttcttactaattaaagcaattcacaaaaccttacaagagaccatcaagtaacaaaatatataaaaatacatgtcggggccgggtgcggggg

SEQ ID NO: 439361 - DNA, 201 bp, Homo sapiens
gtgaggggtgcccttcctatacccggagaaaaagaacatccttatctctgaagagaaaaggcaacatatgttgctgaacgttccaatggctatgtcattgytaggtaatatgaatttttcagatctgttataatcttacggtcccaccatcgaatatgcagttcatcgttcaccaaaaccacattatgcagctcatgactg

SEQ ID NO: 439362 - DNA, 201 bp, Homo sapiens
atggcacaagctgtcagttgatctatttttctggtgcctggagaacagttgccctttcctgacaactccactaggcagtgccccagtggggactctgtatkggggctccaatgccacatttcccttctgcactgccttagcagaaattctccatgagggctctgcccttgcagcagacatctgcctggatatccagatgtt

SEQ ID NO: 439363 - DNA, 201 bp, Homo sapiens
gcccagcctaatttttgtatttctagtagagacagggttccaccatgttggccaggctggtctggaactcctgaccttaggtgatctacctgccacagcckcccaaagtgctgagtttatgggcatgagccactgtgcccggcccagttaaggcattctaagtcatgggatgagatagaaggtcaacacaagatacaggtc

SEQ ID NO: 439364 - DNA, 201 bp, Homo sapiens
gtaataaatataatttttataattaaaatgttttactatgtagaatgctaatcccctttaagaaaggaattctatgtgtcactaaaatgttaaggaaatayatagaaggccaagccagtcttgtttctgaattttttgtgtgtgtttaatccaatttaaattggttgagggtctgaagagttaggtgggcagcaactatcc

SEQ ID NO: 439365 - DNA, 201 bp, Homo sapiens
actatgttcattcattgaacatcacaaaatgacaaaggcctaaggctctaattgacttttggtaaacaaatgactgaatcattaaaatgttttagtttatyttataaaatctagtactaaacagttattaagagagacaacataatgtctccctggagtttaatgactacccatgacttatgccactataggattctccag

SEQ ID NO: 439366 - DNA, 201 bp, Homo sapiens
ctgcagttgctgttgtgacctagagcatcagtatctaaccagctgtagaagtcagagctgtagtgtcctttttgccttaggtctttcttatgcttatgtcyatgagaacaatgttccacctgaaatcttaatctgcccccttctctacattctcactgccattgcttggttcatgtcttgccagagtagtagcactggacg

SEQ ID NO: 439367 - DNA, 201 bp, Homo sapiens
taagaaaaccttccttggcctcacttcagttctagacatccaattacaagaagttcaaagaacagctgaaaaatttgtcacaaaaaagttgtcacctaggyacacagtcatcaggttacctaaagtcaagacaaaggaaataatcttaagagctgtgaagcgaaagcataggtaacctctaagggaaaaactatcagacta

SEQ ID NO: 439368 - DNA, 201 bp, Homo sapiens
tttctcttttgcttcaagctctggcaagtcagcagggcccttttcttctattttataattattacgttacttgcaataaattcttctccagaactttccaytaacatttcaaatgaaaaagggtacctgagaaaatttagaaaataatcacaaaggagtgtttaaacactgtgggtaaatttatagctttggggcttgttt

SEQ ID NO: 439369 - DNA, 201 bp, Homo sapiens
gattccagaacccactaggcctccactgatgccctcctggctggaaggggcaggagtgactcattactgctcccccattgtccacactgacatcataaacrgtgtggcctcattaccctgggcagtggtgaaattcctgactctctaggcagtcctctgacttaactccaatgggaaggagacaactctttcgtcactaag

SEQ ID NO: 439370 - DNA, 201 bp, Homo sapiens
gagtccaattaataactctacatggctcctaagtgttcgaatgaagggaagagtcacacatctcttcctctgaatcaaaagctagaaataattaagctcastgaagaaggcatattggacaccaggacaggctggaagacctcttgtaccaaatagttagccaagttgtgaatgcaaaggaaaagttcttgaaggaaataa

SEQ ID NO: 439371 - DNA, 201 bp, Homo sapiens
agactgttgacatgtctatttttccttggaattctattttttctttatatgttttggggcaataatactaatatcaacaacagcaacaataataacaccartgtttgtgatgccagacactgttgtgaacactgtgctagttcatttgatcctcaagcgactggaagaagtaggcattattaatatcctaattttcaatat

SEQ ID NO: 439372 - DNA, 201 bp, Homo sapiens
atggtttagaatttatctggttttcttcctaatattcatgataatctttgaataaaattttacagcacaagttgtaagaatatgctaagaaaacactcttwtaaatcaaatgaaaaatacaaaaaacaagaagggatgtgactaaaagagcaagattgaaggtataaaaaataatcaaatcgagggaaatgaagcagagag

SEQ ID NO: 439373 - DNA, 201 bp, Homo sapiens
tctatcatcaacttccattagaagtgatttccccttctcctggtcccccagagcagggtattttatcctgcttggaaatgtagtcatttgtgcagccgtcwcatctccctactattctccttaacaaggaggagctccacttacctccatccgagagaatgtttcatgcacagtaatgatcaacaaatatttaattaacag

SEQ ID NO: 439374 - DNA, 201 bp, Homo sapiens
ttagagatcacctggccttaggtgatccacccacctcggcctcccaaagtgatgggattacaggcatgaggaaccacggccagccttcattagttcttttyatgacctgtttgtacattatttgcaaatatctgttgtcattgcaaatatgttgccttactattagaacaacaggtagggatcaaacacctcgtctcactg

SEQ ID NO: 439375 - DNA, 201 bp, Homo sapiens
ttttatattcccaccagccatgtatgagggctccagtcactccacattctcgtcaacacttgttattttctgtagtcttcattgtggccatgctaatgtgygtgaaatggtatttcctgtggtttagattttcattttcctaacaagtaggatgtggagcatctgatacatgacacaacatgaatgaaccttgaaaacatt

SEQ ID NO: 439376 - DNA, 201 bp, Homo sapiens
tgtcttactcattcaaattcaaattgtctgtgagcatgaattttcgtggccatgggacaaaaaaccctgtcttcagccgaactaaggaaaagtcccgcagyagttcctccttagggactcttcgaacgcactgtcttagcccaggctgccttaacaaaataccatggacaaggtggcttgaaaaacacacatgtattttcc

SEQ ID NO: 439377 - DNA, 201 bp, Homo sapiens
tgtagacagtcaccttctcaaaatgtcctcacagggcccttcctctgtgtgcatgcggagagatcgctggtctttctcttcttataaagacaatgggcctrctgggttaaggccccaccattatgatctcacttcacgtttattacctccatacaggccccatctccaaatacggtcacgctgggatttgcccaacataat

SEQ ID NO: 439378 - DNA, 201 bp, Homo sapiens
cttctattagcaattaaaatttcattgaaaatatctgttcttatgactgctgttataattaccaaggatcttgctcagaaacacaaattaatctgaaaaartataattatctattaatatattatgacctcctttagacttattgtgacgtttctaaaataaagacttaacagtgtttctcaacccttgaggcagctattg

SEQ ID NO: 439379 - DNA, 201 bp, Homo sapiens
atgccacatctttaaaaatggaagaagcaggaagttctctcacacattctcccaccttgttttcctaaagccggtcataagaccctcatatgtgaggggtkcccttcctatacccggagaaaaagaacatccttatctctgaagagaaaaggcaacatatgttgctgaacgttccaatggctatgtcattgctaggtaata

SEQ ID NO: 439380 - DNA, 201 bp, Homo sapiens
atctattaatatattatgacctcctttagacttattgtgacgtttctaaaataaagacttaacagtgtttctcaacccttgaggcagctattgagttattrcaagaggtcttacaaattagacaggcattaatcactgtctacagaaaatatatataatatattttacaagtagatgtactattatttttcaaatacgtgt

SEQ ID NO: 439381 - DNA, 201 bp, Homo sapiens
tttaaaaatggaagaagcaggaagttctctcacacattctcccaccttgttttcctaaagccggtcataagaccctcatatgtgaggggtgcccttcctakacccggagaaaaagaacatccttatctctgaagagaaaaggcaacatatgttgctgaacgttccaatggctatgtcattgctaggtaatatgaatttttc

SEQ ID NO: 439382 - DNA, 201 bp, Homo sapiens
aatatacaactaaaatcatgtaatatagcacatgagattcttaatgctaaaattaagactttttaacatgaaaaatgctcttaagggcagaaatgaagcamatttcaggcaagatggcagacaagactgaaacggattcatccatcaactgctacagacttaaaaaacaaaatatgcccaatgcaaagctgagctcaggaa

SEQ ID NO: 439383 - DNA, 201 bp, Homo sapiens
tcttagtaagaccatgaaagtaaatgggtctctctataagccaaactaaaaaaaaaaaaattctgaacaattacagatatatacttttcaaatgaattatytgctttttatttaataccatgataattgttaaagcagtctattaacaacagaagcaatatttagaatgcatgcttaacaaagcaatatataatattaagt

SEQ ID NO: 439384 - DNA, 201 bp, Homo sapiens
aggtaatctgcccacctcagcctcccaaactgctgggattacaggcgtgagccaccgcgcccagttgtgagttctcattcttattcgtttatgtgaaggcyggttgttaaaaacagcttagcacctcccttccctctctcttgtttcccctctcactatgtaatctctgcacacacatgttcacctttgccttccaccatg

SEQ ID NO: 439385 - DNA, 201 bp, Homo sapiens
cttcaggatgatagtacagaatgtcaataacacatatcatatgcagatgacacaactaacacaaatcgagagagagatgagaaaaacatgtgaggtatcctttttttttttgcttcatctattatcattgggaggcaaaggacaggatttagagcatggaactatatttaaccagacaaaggtaagcactatgaaatatga

SEQ ID NO: 439386 - DNA, 201 bp, Homo sapiens
tgactctggaattgttcctttcctcagtgatttcttaatctgctaaaattaaacacacagaatttttgtatttttcccagagtagatctttcccatcagaytatatcttgtccatccctctttaaaaaattatatcttgcccatccctctttaaaaatcttttaaaaagctagtcaggcagggagaacccaactcacactg

SEQ ID NO: 439387 - DNA, 201 bp, Homo sapiens
ttcaaggacagtctgggcaacgtggtgaaacaccatctctacaaaaattagccaggtgtggtggcaggcccgtagtctcagctacttgggggacttaggcrggaggttgaggtgggaggatcgcttgagcccaggaggtcaaggcttcggtaagctacgattgcacattacactccagcttgggtgacagagtgagaccct

SEQ ID NO: 439388 - DNA, 201 bp, Homo sapiens
aagtatcagattaggtcacaaaactaggaataaggttttaatgtcttcagaaaaacagagcatttggtgagagaagggaactaatccgagactcccgcatwcaaccaggacacttgaagggctgcctcacctgtgaaaaagaaactggaaaaatctcttcaaatctgtctgtggaaacagaaagacagcctggtgtttgac

SEQ ID NO: 439389 - DNA, 201 bp, Homo sapiens
attctgtttcactggcctgtcttccttatttgtgaacagtatcattttgatctgattatcacgactgtttaaatgattttaatatttggtaggctggtccytttacattactttcctaggtttattattattattaccataatttgcttactttttcatataaagtttacacataaattttacatgtaagtttgactcagt

SEQ ID NO: 439390 - DNA, 201 bp, Homo sapiens
cttttacattactttcctaggtttattattattattaccataatttgcttactttttcatataaagtttacacataaattttacatgtaagtttgactcartggacctatatagaaccttgcattcaacagttagataaaacacattctttacaagcatataaggactattttggaaagctgaataagcactaagccagaa

SEQ ID NO: 439391 - DNA, 201 bp, Homo sapiens
tactttcctaggtttattattattattaccataatttgcttactttttcatataaagtttacacataaattttacatgtaagtttgactcagtggacctayatagaaccttgcattcaacagttagataaaacacattctttacaagcatataaggactattttggaaagctgaataagcactaagccagaaagcaagcct

SEQ ID NO: 439392 - DNA, 201 bp, Homo sapiens
gataagaagaaagttattatttttattcaaccctacgctggaggttctagctaatgtggtaacacaagaaaagtacatgcaaagattggaagggaaaaaamagaactgtttatatttgaggatgatatggctgtctacacagcacaccctgagagtctatagacatgctcaattaaaagctctgtaaaaacattgttgcat

SEQ ID NO: 439393 - DNA, 201 bp, Homo sapiens
ttaaactgtgctctactggggaccaatgggcctttattattatagctttggatgacacattgcaaccctaatgttttaaatggaatcttgtctgattactrtttattctccccattggcactgatttctcaccagccctaggaatgcagctcattttcccctcgtagaagaggccggggctctgagttggataagcagtat

SEQ ID NO: 439394 - DNA, 201 bp, Homo sapiens
accccgtctctactaaaaatacaaaaaggcgtggtagcgcacgcctgtagtcccagctactcgggaggctgaggcaggagaatcgcttgaacctgggaggyggaggttgcagtgaccagagatcatgccactgtactccagcctgggggacagagcgagactccatctcaaaaaaaaaaaaaaaaaaagctgggcgcagta

SEQ ID NO: 439395 - DNA, 201 bp, Homo sapiens
aggatatgcctgtttttactaacattgttactggatccattttgggtccctatggttttcatttctctcatctcttatttttgctgactttatagtttttytgtaagacaatttaaatccgttttgaaataatgtggggtataaatatataaatgacatatgtatgtcaacatttatttataaaaagtattaaatgtgtat

SEQ ID NO: 439396 - DNA, 201 bp, Homo sapiens
ctggctaacatggtgaaacccatctctactaaaaatataaaaaattagccgggcgtgttgacgggcgcctgtaatcccagctacttgggaggctgaggcaraagaatgggaggatgaggcaggtaactcaaataatagaaataacagagggtttctttgcagttgttcatggcttacattcattgattccctcctgttacc

SEQ ID NO: 439397 - DNA, 201 bp, Homo sapiens
tgtcctcttcatttctataattttgttatttcaagaatcatacaacatgtaaccctttggaattggcctttttcactccacataaatctctgtagaatcayataagttgttgtgtgtacagattgagtatcaaaatctgaaaagctccaaaatctgaaactttttgagcgctgacatggttgttcacaggaaatgcttatt

SEQ ID NO: 439398 - DNA, 201 bp, Homo sapiens
gaactaaaaccaattatactcaaactcttcaaaaaaaaattgtgtgtttttagaagctttattgaagtaaaattaatattgaaaaatgtactattaaagtrtacaatttaataagttttgacagatgtgtacacccatgaaacactatcacttcagtgaagaacatacccatcaaccccaaaagttttctcatgcttcttt

SEQ ID NO: 439399 - DNA, 201 bp, Homo sapiens
ggaaaattgatgatatggattttccactataaactgaatacaagttttttggtttgtttggtttggttttgtttttttgagatggagtctcactctgtcgygcaggctggagtgcagtggtccgatctcagtcactgcaacctccgcctcctggggttcaagcgattctcatgcctcagcctcccgagtagctgggataac

SEQ ID NO: 439400 - DNA, 201 bp, Homo sapiens
tttctataattttgttatttcaagaatcatacaacatgtaaccctttggaattggcctttttcactccacataaatctctgtagaatcatataagttgttstgtgtacagattgagtatcaaaatctgaaaagctccaaaatctgaaactttttgagcgctgacatggttgttcacaggaaatgcttattggagctgaaaa

SEQ ID NO: 439401 - DNA, 201 bp, Homo sapiens
agctaagaagagaataattcaaatctttctagcataaagaaaagacaaatctttaaggtgatggatatcacagtcacactgattagatctttacaaattayatgaatgtattgaattatcacatgtacccagaaaatatgcaaatctattatgtatcaatacaaaaaatttaaaaatagtttctttggagaatattttaaa

SEQ ID NO: 439402 - DNA, 201 bp, Homo sapiens
agggaagacctgagccagtgcccttgccaccctccaggtacctcccccttcctgagaacccacaacacaccttggcaccttccctacacacaccaaaagaygggcaacagagttgctggcatctccccaaaaccttcgcaacggctgctccctccacgcctacctccttgagatactccaggcaccaaaattacctctcct

SEQ ID NO: 439403 - DNA, 201 bp, Homo sapiens
aatactaacaagatggggaaagtcacatctgaacgtcttacgtacactgatagcattctgctattaatgaactgaatatgacctgaaggcattacagaaayctgcactgtaaccaaatagctcagatgaaaaagtaacctgaagaacagttcttgaatttctattatctctatatctctgcatctatctctgtatccatct

SEQ ID NO: 439404 - DNA, 201 bp, Homo sapiens
aaaatatgcaaatctattatgtatcaatacaaaaaatttaaaaatagtttctttggagaatattttaaaattatgaaaaaaaccattagctagactagaaraaaatagagaagacccacatacatttaaatcagaaatgaaaaaggagacataacaactgagaccacagaaatacaaaggatcattagggactattatgaa

SEQ ID NO: 439405 - DNA, 201 bp, Homo sapiens
gaagaacatgattaaaataaaatacatgcaattcagtgaaaacattggttagtgagatggcttggtataaaataaatataaaaatatttattaggaaaatrtatacctataagcatggaatgataaattatattactataagtgaagactgttatacaatgatcattatttgctagtgagttatatgatcatttccaactc

SEQ ID NO: 439406 - DNA, 201 bp, Homo sapiens
tttttgtaattgttactttccataaaaatagttcaaaaagtcatcagagtttactctgtgatgaaaattttactgagcattatctcattttaccttcagaraagctcacttgttttatagacaagaagagtaagttttaatgatattaagtaatttgccctaagttatctagtttgtaaatggcagagctgaaatgtgaaa

SEQ ID NO: 439407 - DNA, 201 bp, Homo sapiens
ggcagacttacaaaaggccaagagtcaaattcaaaatgcatcttagccttgttggctcagataggactaatattcaggcaagcaggtaggtaggtaagtasatacaaagatagataatagatttatgaatagataggtagagagaacaagatgatgatgatgatgatgataaataggtatgtatatatgaatataaatgta

SEQ ID NO: 439408 - DNA, 201 bp, Homo sapiens
atttccagctcctcctggcaagacatctcactagtctttatgggctgacaaagatgtattaggcaagagtcttctgcccaagggaataacaatctaggttraaatagtgctagaaaggtgattgtttctgtagcttcaacccatgatctaactgatatattgcaattgcaatgaaatagaatagcaaaataaaaatggtga

SEQ ID NO: 439409 - DNA, 201 bp, Homo sapiens
gaaagggggtagagttgcactggaaaatagtactgggtactgagtcagagtagagtaaaatgttttcaagggtttccctctcccttgaataaggaggcctyagcatgcgtgctggacatttattctacaattggcagacttacaaaaggccaagagtcaaattcaaaatgcatcttagccttgttggctcagataggacta

SEQ ID NO: 439410 - DNA, 201 bp, Homo sapiens
tttttaatggggttatttgttttatgctcattcaattgtttaagttccttatagattctgggtattagacctttgttatgactgagtgcatatatacagarttcttttttctgtcatactgctggcacattcatatgtccaggatccaaccacattccaccatctgtaccatctgcaccttggtccaagccagaaccatct

SEQ ID NO: 439411 - DNA, 201 bp, Homo sapiens
ctatcattgtggatttatatatttccccatgaaattgtgtcagtttctgcttagtatttagaattgttacatcttcttgataaactgattcctttattccratgtaatgatccttttcattcctagcaatattctctgttctgaaatccactgtttgatactcattagctatcgcagttgtcttttgattagtgttcacat

SEQ ID NO: 439412 - DNA, 201 bp, Homo sapiens
gactgagtgcatatatacagagttcttttttctgtcatactgctggcacattcatatgtccaggatccaaccacattccaccatctgtaccatctgcaccytggtccaagccagaaccatctctctcctggatgaatgcacttatgtcccaaattgcctcctttttcctacacttgctcctctccaatttcttctcaactc

SEQ ID NO: 439413 - DNA, 201 bp, Homo sapiens
atatctaacgtgcctttgatcccatccagtgtgcttttcatcttagatattgtagttcccaactctaaaaattgatttggatctttttatattttctatgwctctattaaaatgtaagatgtatcttctagctccttgaatatatgaagtatagtcataagaactattttaatgtcctatttctattatctgtaaattctg

SEQ ID NO: 439414 - DNA, 201 bp, Homo sapiens
attattacatgtcaactaaaagtaaatgggggtagggggaagaatttgcttacttttcacatggagcttttcaaagacaccaatgcctgggtcttaccccwcagcaagagtcagcctctctggcggtgtagcccaagcatctccatgtttcaaagttccctgggtaattttgatgaacaaaagtgtcaagaagaggaagca

SEQ ID NO: 439415 - DNA, 201 bp, Homo sapiens
gtcagcctctctggcggtgtagcccaagcatctccatgtttcaaagttccctgggtaattttgatgaacaaaagtgtcaagaagaggaagcaaaacacccscagaggtcagagaaatggaggaagccagaaaacaaatcagacagcctccggaggaaaccaagatggataaggatatagtgaggctttcagtactgacttc

SEQ ID NO: 439416 - DNA, 201 bp, Homo sapiens
gtgagcccaaatattaaagtcttgcctttaagctttgttaggtggtcctaaattagcatttttaccaaggttcatttttccctcttagtgtgggaggatcstttttagaactctactcaatgccccttgaaatattaagttttccactctggctattgggaaaaggaactatttcttactttgttgagccttgacccctgt

SEQ ID NO: 439417 - DNA, 201 bp, Homo sapiens
caattttgacagctcctaggtggtgccgaagcggtagccacacagatcctagaaaggtgagacgtcctctgggccctgactcattcctgggaggctgcttyccccccgtggtttctggttgttaccaagcctcatctatgccagctctcctgtcttcacactgcctggtgagagtgtactgcatctccctctaacctcctc

SEQ ID NO: 439418 - DNA, 201 bp, Homo sapiens
ttagaaagcattcctagaaaatgtctcttaaaatatcactttagagggaagagaaaactgatattatgtttgtgaaaaacattttaatagaggtgtcttasgcttagaatgttaaaacttttacaatttcaaatacttataaattctaatcttgggtctgatatactttatggaatactgaagtaatttaaaacatttcaa

SEQ ID NO: 439419 - DNA, 201 bp, Homo sapiens
tcaaagcaagtgcagtaaatgttgttcaaatcagctgcatttgaaccatatggcaggattcagttataaggctgtcttccttaagatgctccagaatatgytaatattaaactttaaatgcatctctacagtaaaagtataaaataaaatatttccttatgaaatcacaggcaccaaattaaaaaaatcccaaaactcaaa

SEQ ID NO: 439420 - DNA, 201 bp, Homo sapiens
tctagagtatgttaagtacagctatatgtcaataacaaaaggactgacaatgtaacagaaaaaatgggcaaaggctatgaatatgcacactaaagaggaaraaatctacatgataaaactcctataaaaaggaaacatgaccactagtaatcagagaaatgcaaaattaaaacaagatattatttcatatacttcagattg

SEQ ID NO: 439421 - DNA, 201 bp, Homo sapiens
gagtcaatctgtattttattaggaatctatgatggacagggcactattgtaggtactgaggaagatgtggcaagccagaaacgtaccccagttacctaaamacacacacacacacacacaaacagaaaaaccaaactactcttggaatttagtattcttatttatttcttgataaccacatctcatacgtataaataatac

SEQ ID NO: 439422 - DNA, 201 bp, Homo sapiens
ttcttgtttagtttgaaagtaaatacaaatgtaatgaaaagagacggctcagccttcactcagggaaccaacctaaatataaccatagaactcagcagcaygatggctcattacagcagcagttagacacactgcaggacaaaatctatctgctgaaaaacaactaaaattagaatgctatcatttagcttaagagctgga

SEQ ID NO: 439423 - DNA, 201 bp, Homo sapiens
ctttcaaagtctaccaactatgctcaacgggtttaggcttcaggactgcacagatatgtgcgtgattcacagcacctgtagctaacatgtagtgagcaccrccatgtgccaggaattaaaccgagcacttcacctgtattaacttacttagacttccctcaccaaatgtctattgagagtgcatgcattacatgcccatca

SEQ ID NO: 439424 - DNA, 201 bp, Homo sapiens
attatatatatgcacacatatgtatatatgagatatatgagtaacactaacattaaatttttattaggtttatgtccatgtctatacctaattgatcattkgggcatgcattaataatctctctcacaatggataatgatattaactattaggacatagattagatattagctatcaggaaaccttgcctgaattaacatg

SEQ ID NO: 439425 - DNA, 201 bp, Homo sapiens
ggtgtgatcatagcccactatagcttaatccacctgggcttaagtgatcctgtcacctcagcctcctgagtagctggaactacaggcacacaccaccatgsctggctaatttttttatatttgtagagatggggtctcactatgttgccgaagctagtctcaaacttctgggttcaagtgatctgccctccttggccttcc

SEQ ID NO: 439426 - DNA, 201 bp, Homo sapiens
caaatacattagctccaagatatatattattaggagaagagataaaaataccacccacaatctgcacttgaaataagaatatgagaaatgtcacaaaaaayatatagaattctgcaaactcagaagataaacctcttcgatctgaaggcattgttccttttcattagaaaatgttacttagcctttacagagtacctacag

SEQ ID NO: 439427 - DNA, 201 bp, Homo sapiens
tcagcttgtttccaaaataaagccaactaatccacatgcagattgaactcctgaccactctccatcaacaagtctgacttggccatttatctacccagtamcagccagacactcgcaattcaccaatccagaagctttgttaatagctttctttacattcagaagttattcttttttgcatagcgttatttactttgatgc

SEQ ID NO: 439428 - DNA, 201 bp, Homo sapiens
gatgcatgcatacgattacatgatttgaatagaattggtaagcagaatttgaaatatgttagatactaaaattttatataggcattccatatacttgtatragtaattcacacaacacacacacacaatctgactcagtgaggggtttcctaatacatctttcctttgaaatatgttactgtatttttgatttttaaatat

SEQ ID NO: 439429 - DNA, 201 bp, Homo sapiens
tggatactattcagccataaaaaaagaataaaatcctattattcacagcaacatggatgagcctggaggacattatgctaagggaaataagtcatgcacasaaagataaatatcacatgttctcattcatacataggagttaaaaaaatgagctcatagaagtagagagtggaattgtggtgactagaggctgggaaggct

SEQ ID NO: 439430 - DNA, 201 bp, Homo sapiens
tctttaaacattttatatacataaaattttatatgaagtcgaaatatcctttgagcttatccccaatggtagctttccaatccaattttgttttttttttktttgtttgtttgttttggattttactacacatgtatttataagaatataatgtgtgggccgggtgcagtggctcatgcctgtaatcccagcactttggga

SEQ ID NO: 439431 - DNA, 201 bp, Homo sapiens
gctgtggtgtgcctttgttactgccattcactgtcatttctttacgtcccaaggtatgaatgactgagttcgtgattgattgtgccactaagagtgagtcyggggcaatgctaccatccctgacaactctcgctggtgagtggaggctgacttgcttgccttccagggcaataccattgattacttcatttgaagtcaggg

SEQ ID NO: 439432 - DNA, 201 bp, Homo sapiens
ctgaacagtaaagaacatactatagaaaaaaagtgtgagaatcagtacttagaaggaaatttatagccttttatatttacattttttagaaaagaaaaacyactgagttagatgcccgacttaatttctatcacagatagatcagaaatttaaaatatgaacatattaaataattttatgcaaccaatttgaaaattcaga

SEQ ID NO: 439433 - DNA, 201 bp, Homo sapiens
aactgtttgaatctctgcctgttttccagttccaaagtcacttccatattttcaggttatctttatagcagtaccccactctgctggtaccaattttctgyattagtttgttctcacactgctataaagatactacttgaggctgggtaatttatgaaggaaagaggtttaattgactcacagttctccatcactgggaag

SEQ ID NO: 439434 - DNA, 201 bp, Homo sapiens
tgaggcaggagaaacgcttgaacccaggaagcagaggttgcactgagccgagatcatgccactgcactccagcctgggcaacagagcaagactctgtctcaaaaaaaaaaaaaagtttggattccagaggtttttttaatgtctgttcttacttgtatattaaacatatatttaaatataaaattctcagacatgaagaag

SEQ ID NO: 439435 - DNA, 201 bp, Homo sapiens
cagagcctgtgaatatcgttaaactctgctataatttaaggtaatattcaaaaagggttgtgactttatgataggaaatagtccttgacattcataattcttaagcactttcttttatcattttgctgatgtatgttctattttaaaatcagaaggataatggatgtgcttcttcaactgtaaattaggttttatatcaga

SEQ ID NO: 439436 - DNA, 201 bp, Homo sapiens
atttgtacaaaatgacaattatttttttcttcagctgtttggtacaactaaccagtgaagctatgtgagccttgagctattgttgtgtgggggattttaaytactgacttaatttcttcatttgttgtattagtgtttgtattttaacttattttctatttttcaggtgtcagttttggtaagttatattttccaccttga

SEQ ID NO: 439437 - DNA, 201 bp, Homo sapiens
ttacttgaagccatatccttgctcatcttctctctgccctcttgcttcacttgctccttgcacaaatctatgcacacaattcctgcttcaggctctatttmtggcaaccatagctaaggcacaatcataaatatttgaatatttattttcaagaaaaacagtcctaatatcggacttttagaacagtgtgtcaaacacaaa

SEQ ID NO: 439438 - DNA, 201 bp, Homo sapiens
ttaagaagcctttgaaacaggtaacacagttgcatttaagtgtgggcaacgagaacatattttatatcttagatctagtttattaaagagaccttaaattaaaaaaaaaaaaacagagcaaatggatcatctggagaattcagagctaaagtgattaattagaccttattttgtcttgaacagatttactaagcatttttc

SEQ ID NO: 439439 - DNA, 201 bp, Homo sapiens
ttgatgcttgacgtctgggcattgaaaagttaggtattgcggtcttcacagtctgggcttatttatagctatcctgttttggaaggcttttcagatattcraaaggacttgggtattgttgtctaagctgtatctgcactgggagcactgcaagcccagtaatgctgagattcttgcagagtcatagaggtactgccttgt

SEQ ID NO: 439440 - DNA, 201 bp, Homo sapiens
ataaatctcacttggtcatgatgaatgatctttttaatgtgttgttgaattcagtttgctagtattttgttgaggattttccatcaatatttattagtgayattagcttgggttttctttctttctttttgttttaatgtgtctttgtctggttttggtatcaggataatactggccttatagaatgaacttggaagtatt

SEQ ID NO: 439441 - DNA, 201 bp, Homo sapiens
tttttaatgtgttgttgaattcagtttgctagtattttgttgaggattttccatcaatatttattagtgacattagcttgggttttctttctttctttttkttttaatgtgtctttgtctggttttggtatcaggataatactggccttatagaatgaacttggaagtattctcttctcctttatttttttttgggaatag

SEQ ID NO: 439442 - DNA, 201 bp, Homo sapiens
aggattttccatcaatatttattagtgacattagcttgggttttctttctttctttttgttttaatgtgtctttgtctggttttggtatcaggataatacyggccttatagaatgaacttggaagtattctcttctcctttatttttttttgggaatagtttgagtaggattggtattagttcttcttgaaatgtctggta

SEQ ID NO: 439443 - DNA, 201 bp, Homo sapiens
tgcgagctcggctcactgcaagctctgcctcccgggttcacgcgattctcccacctcagcctcccgagtagctgggaccacaggtgcctgccaccacgccyggctaaattttttgtattttgtttagtagagacggggtttcaccgtgttagccaggagggtctcgatctcctgacctcatgatccgctcgccttggcctc

SEQ ID NO: 439444 - DNA, 201 bp, Homo sapiens
gcgagctcggctcactgcaagctctgcctcccgggttcacgcgattctcccacctcagcctcccgagtagctgggaccacaggtgcctgccaccacgcccrgctaaattttttgtattttgtttagtagagacggggtttcaccgtgttagccaggagggtctcgatctcctgacctcatgatccgctcgccttggcctcc

SEQ ID NO: 439445 - DNA, 201 bp, Homo sapiens
ctgggggaaaggattctgggaagtggctgcttattgggcatggggtttccatgtggggtgatgaaaaagttctggaactagatggtggtcatggtcacacygtatgagagtacttaatgccactgaagtgtacacttaaaaatggtaaaaatggtaagttttatgtgtattttacaatgataaaaatgccaaagaaaaaat

SEQ ID NO: 439446 - DNA, 201 bp, Homo sapiens
acaagacttaaaaattagaaaacacactattttgtgatagaaggattgcacatcattacacatcacaaaatggttaattttgcaaaattaatttataaacrtaatactatcgcaataaaaatacaactaggtttttctttttagaaattgagaagatgattctgtagtttacactgaattattttaaaaaattagtcagga

SEQ ID NO: 439447 - DNA, 201 bp, Homo sapiens
cacactattttgtgatagaaggattgcacatcattacacatcacaaaatggttaattttgcaaaattaatttataaacgtaatactatcgcaataaaaatrcaactaggtttttctttttagaaattgagaagatgattctgtagtttacactgaattattttaaaaaattagtcaggaaatctccaaaaaaaaaatcagt

SEQ ID NO: 439448 - DNA, 201 bp, Homo sapiens
tgggaagtggctgcttattgggcatggggtttccatgtggggtgatgaaaaagttctggaactagatggtggtcatggtcacaccgtatgagagtacttamtgccactgaagtgtacacttaaaaatggtaaaaatggtaagttttatgtgtattttacaatgataaaaatgccaaagaaaaaataaaacaataaaaaaca

SEQ ID NO: 439449 - DNA, 201 bp, Homo sapiens
tttctaggaagaagtcttgtatttggacctgtaagatttgctaaagagtccaaattgtacatttttgactaattattaaattccatagcctgacacattgscacccaaatgatggttcaattaatatttgtcaaacagctttatactaatgatgcctgctaaatgcagatgcacatgtcaattcctttcttccttcttctt

SEQ ID NO: 439450 - DNA, 201 bp, Homo sapiens
gtgataaaatggattatagcctctggaataggccatgcctgaaggcagtacaccactgggcttctgtatgtgtgccaatggatttcctgttttgtgcttargctaggttgggcttctttaagatgcaacctaaagagtcctaaacacgattatgataatccagttttgcagaaatgcatgcttttgaaatgagagatatcc

SEQ ID NO: 439451 - DNA, 201 bp, Homo sapiens
ccagcctgggggacagagcgagactccatctcaaaaaaaaaaaaaaaaaaagctgggcgcagtagctcacacctgtaatcccagcactttgggaggccaargtgggtggatcaagaggtcaggagatcaagaccatcctggctaacatggtgaaacccatctctactaaaaatataaaaaattagccgggcgtgttgacgg

SEQ ID NO: 439452 - DNA, 201 bp, Homo sapiens
atgtgaattaagacaacttggctgaagtttgagtttcaaaaccaaacattaatgtagtctttttattgtttctgtataaagagttataatttattcaatargaaaagtgtaaaattggtatatgactttatgtaagtattaatatatgcctatgacttaaaaatcacaagacagtgacatctggtggttacatacccaaat

SEQ ID NO: 439453 - DNA, 201 bp, Homo sapiens
tgaaccagagcaactccatcttgaataggagctgggtaaaatgaggctgagacctactgggctgcattcccaggcggttaaggcattctttgttttttttktttttttttttttgagacagagtctcactcttgtcacccaggctggagtgcaatggcatgatctcggctcacctccacctcccgagttcaagtgattctc

SEQ ID NO: 439454 - DNA, 201 bp, Homo sapiens
tcaataggaaaagtgtaaaattggtatatgactttatgtaagtattaatatatgcctatgacttaaaaatcacaagacagtgacatctggtggttacatasccaaattgcagtttcaatttatttgagaggcgtatgtataactctcaaaatttgcaggaaatgtcacttggttgtccttttgttgcaatatcacagctct

SEQ ID NO: 439455 - DNA, 201 bp, Homo sapiens
aatgagtgggttagaggcccctcttcataaaaggcacggatgcttgaccaaccttgggttagaagcccaatttaggagggttagagtgccttctaagattyaggggtttagaggcccctcttggtaaagtccctctcattaaagtccctctcagctaagaacgggtttggtactacaggatgttaactgctattctctttg

SEQ ID NO: 439456 - DNA, 201 bp, Homo sapiens
gtaaatatatatatatatatgttttatacataaaaatatataaatatattatagatatacaccatggaatactactcagccatcaaaaggaatgaaataayggcatttgcagcaacctggatagaattggagagtattattccaagtgaagtaattcaggaatggaaaaccaaacatcgtatgttatcactcataagtggg

SEQ ID NO: 439457 - DNA, 201 bp, Homo sapiens
cattcgtaacaagaacttttgatccttttctcttttggggcactcactccctcctttgctcagtaccagggaaattaacacccaacttcgtatctggaccytggacattgggaatcccatactgtctctttgtagttccttcccataaatcacaggcatgaactctacaaacccacaaaatattttcttaatcaaaaagat

SEQ ID NO: 439458 - DNA, 201 bp, Homo sapiens
tataaatatattatagatatacaccatggaatactactcagccatcaaaaggaatgaaataacggcatttgcagcaacctggatagaattggagagtattmttccaagtgaagtaattcaggaatggaaaaccaaacatcgtatgttatcactcataagtgggagtcaagctatgaggacacaaaggcatgagaatgatat

SEQ ID NO: 439459 - DNA, 201 bp, Homo sapiens
tcctagcaatattctctgttctgaaatccactgtttgatactcattagctatcgcagttgtcttttgattagtgttcacatattttatctttttccatgtraattttaacctgtatgcgcctttatagttgatgtgggtttcttgtaggcagaatacagttaggtcttgcttttaaattcaatctagcaattgcttccttt

SEQ ID NO: 439460 - DNA, 201 bp, Homo sapiens
gtagtaattaccatagtttcctgtagtatagtttattacagataaatttaatgagattcttaaaggcggggccatacattgccaatatttatatcaggcamatatgaaatatcttccacataagtgatggaaggtcgagaacatcagatcctaaatgagcaaattatccttctgcatttagctttgtctctgtaggttgag

SEQ ID NO: 439461 - DNA, 201 bp, Homo sapiens
tattattgtgttttatatccttttttggcttactagctataattatttatggttattttcgtggttcacttagggtttagagtaaacattttaaacttatyactgtctactttcaagtgatagtatactatacctcacacacacatataaaaaccttacaacaatatactttttttttccttcaggcctttatgctagtgt

SEQ ID NO: 439462 - DNA, 201 bp, Homo sapiens
aaatgccaaaaacaagagtattattgtaattctccaattctgccatatttatctgcttctgaaccttacttaatcctggtagaaaaacatcatggtagcasctaattaacattttttcttaatatatggcaagaaagacatgagatctcaactgcccctactgaaaagccagaggaataaacattttcacatttattttta

SEQ ID NO: 439463 - DNA, 201 bp, Homo sapiens
tcattgtttcatacgtcttgtctaaagttgtttcaggtcagaagaactgctgttccatcttgattagaaatggactacatactatttcgaggtcacattcrtattcattattgaattgacatgcacaaataaatactctcaatacttattctaagagaaggaagactggttttgctcatgactatcttttccctggcctcc

SEQ ID NO: 439464 - DNA, 201 bp, Homo sapiens
tagaaatggactacatactatttcgaggtcacattcgtattcattattgaattgacatgcacaaataaatactctcaatacttattctaagagaaggaagwctggttttgctcatgactatcttttccctggcctccaagctccaagactcatctgttataacattgttagatggtttaaaattttgaattctaggtgaag

SEQ ID NO: 439465 - DNA, 201 bp, Homo sapiens
gctataaaaaggaatgagagtatgtcctttgcagggaaacggatggagctggaagttggtatccttaacaaactaacgcaggaacagaaaaccaaacaccrcgtgttcttgcttataagtcggagccgaatgatgagaacacatggacacatggggtgggggaacaacatacaattgggcctgtcagtggagcagagggag

SEQ ID NO: 439466 - DNA, 201 bp, Homo sapiens
actataaactgggtcacttaaacaatagaaatttatttctcatcgtttcagaagctaagaagtccaagatttaggcaccagcagacttggtgtctgctgcrggtccactttctggttcatatgttataccttctcactgggtccccacatggtggaaggggagaacaaattctctggggcctcttttagaagagcactaat

SEQ ID NO: 439467 - DNA, 201 bp, Homo sapiens
ttgggggttaggattgtgatggggaacataaacactgaggccatcgttgggtaaaccctgagtcctgttatatgcagagcaccgtgctcactgactaccascaaaacaaagataggtgagaggcagctccagtcttcagggatttctagtcgggtagggcagatggtcatatagaattaaaatattacattctgatgtctg

SEQ ID NO: 439468 - DNA, 201 bp, Homo sapiens
ctacttatttacactaatcacatcatatatgaaaagtgtggtgctgcacacgctacagatctggtgctccttcaagacctttaccatttgtgtggagagatttttttcttcgagacgtgccgctcacctattaagatacctgtttagattatttgctaccagaagatgctccagggctgcaggagactcgggatgattctc

SEQ ID NO: 439469 - DNA, 201 bp, Homo sapiens
agaaacaaattagaaatgtgaccaaggcattttatgtcagatcgatacagaagactaatactgaccacaaagcagtgttctggagagaagcattttggggytggagtgtgaaaatgttatcaatgtattgttcaaaatgataggcatttaagatggcagacaattataataacagcacttcttctaccacatttttcttta

SEQ ID NO: 439470 - DNA, 201 bp, Homo sapiens
gcatttataattgatcttgtgcagttgattattctctatacttctatggagattttagttctactacggcattttcagtttgccttgtcctgttcaaaatrgacttctttttatttgagtctaatctcctcttctggatttctgcttctgtttctcagaggccacgtcttcctgaatcctgaggatgtcaaacaagtttct

SEQ ID NO: 439471 - DNA, 201 bp, Homo sapiens
caaattagaaatgtgaccaaggcattttatgtcagatcgatacagaagactaatactgaccacaaagcagtgttctggagagaagcattttggggttggartgtgaaaatgttatcaatgtattgttcaaaatgataggcatttaagatggcagacaattataataacagcacttcttctaccacatttttctttaaccag

SEQ ID NO: 439472 - DNA, 201 bp, Homo sapiens
ataagttcttatcatttagctcccacttataagggagaacatgtggtatttggttttctgttcctgtgttatctggtagtatagctttgtatgcatatttmtttctgtcttattaaggctgtgataaaaacaagaagattggctacaaggactgagaacaccacagttctgtgaataaaataataagaaaggatgattcga

SEQ ID NO: 439473 - DNA, 201 bp, Homo sapiens
gtcagtggttcaaccaggtattgcaaagaaaagcaaaagacagaattttctgcctgatctccaaggagatcaagccattctggagcagagatttttatacygggtacacaaagctttggcatacaaaggctttccaaggagcacccaaatgcaaataattttaaggagttcaatttccagattttaaacgttcagtgtact

SEQ ID NO: 439474 - DNA, 201 bp, Homo sapiens
caaccccagcatgttgaactatgagtcaattaaacatctttcttttataaattacccagtctcaggcagttctttacagcagtatgaaaacaaactaatamaatattatagctaatatactttatatataatgatatatatgttcatatacatatttgaaatatatatttattatagctaatattctgtatatataataat

SEQ ID NO: 439475 - DNA, 201 bp, Homo sapiens
gggaaaatgtccttcagttctgaattagtttataaagtgaacactcaaaatataatgacaatgaaaggtggaaaataaaggtgaagttttaaaaaaaaagyatcttgtaggataaattcctggaagaggaactgttttatcaatgggtatacatattggtcattttgatacatattgccaagtcgtgcttcacagagatgg

SEQ ID NO: 439476 - DNA, 201 bp, Homo sapiens
agcagcccaatgtagctggtgcagaacaagcgatttcaccacacttctctactccattcaattggccatgcacacagatggctattttatatatttcattytctcctcaaacctccaacacctcttctccagcctcattcacagctaatgttcttgctcctagtcattgaatagaaataacataaaggggacttcggaagg

SEQ ID NO: 439477 - DNA, 201 bp, Homo sapiens
aaacgttagacctaaaaccataaaaaccctagaagaaaacctaggcattaccattcaggacataggcatgggcaaggacttcatgtccaaaacaccaaaarcaatggcaaggaaagccaaaattgacaaatgggatctaattaaactaaagagcttctgcacagcaaaagaaactaccatcagagtgaacaggcaacctac

SEQ ID NO: 439478 - DNA, 201 bp, Homo sapiens
tggttaaatttatctctagattttatttatttatttttgtagctattgtaaatggattaccttcttgatttctttctcagttagtttattattggtgaatrgaaacactgctgatgtttgcatgttgattttgtatcctgcaactttactgaatttattatcagatctaggagatttttggtggaatctttgggtgtatat

SEQ ID NO: 439479 - DNA, 201 bp, Homo sapiens
cctaggaaaaaattttgtgaccttgggttaggcaaattttttttatatatgacatcaaaagcatgatccatgaaagaataaattgataaaactggacctcrtaaacattttaaaaatatcttttctttgaaaggcactgttaagagaacaaaaagacaacttgtgtgctggaagaaaatatttgcaaagcatacatctgat

SEQ ID NO: 439480 - DNA, 201 bp, Homo sapiens
gatgggtagattgcaaaaattttctcccattctgcaggttgcctgtttgctctgatgacagtttcctttgctgtgcagaagctctttagtttaattagatyccatttgctaatttttgcttttgttgcaattgcttttggtgatttcatcataaaacctttgatcatgcctatgtcctgaatggtattgcctaggttttct

SEQ ID NO: 439481 - DNA, 201 bp, Homo sapiens
tgatggggaacataaacactgaggccatcgttgggtaaaccctgagtcctgttatatgcagagcaccgtgctcactgactaccagcaaaacaaagataggkgagaggcagctccagtcttcagggatttctagtcgggtagggcagatggtcatatagaattaaaatattacattctgatgtctggaataataaaagaata

SEQ ID NO: 439482 - DNA, 201 bp, Homo sapiens
gagcttttcaaagacaccaatgcctgggtcttaccccacagcaagagtcagcctctctggcggtgtagcccaagcatctccatgtttcaaagttccctggrtaattttgatgaacaaaagtgtcaagaagaggaagcaaaacacccccagaggtcagagaaatggaggaagccagaaaacaaatcagacagcctccggagg

SEQ ID NO: 439483 - DNA, 201 bp, Homo sapiens
ggtggttacatacccaaattgcagtttcaatttatttgagaggcgtatgtataactctcaaaatttgcaggaaatgtcacttggttgtccttttgttgcartatcacagctcttaggttttcaaggcatatgagatttcagtcactgaaattatatggcaaataccttgaagatggcagtgtcataagtgtcataagtctg

SEQ ID NO: 439484 - DNA, 201 bp, Homo sapiens
tggtttgaaattaaattacttcaattgttttatgaataaaattgagcacttaaagatggagacagcaaagtaacaaaatattgaattttggtgcagtttayattttttgttcatttttttaaaagcagagctttacctggattaagaccacaagatgccatgaaaattatgtttcttaaaggattttccagcaagaagcca

SEQ ID NO: 439485 - DNA, 201 bp, Homo sapiens
taagagtcttaagaaagagtcacgcatacttcataggtctttatgttatttgaggttgtagattaaaataaatgaaatcatccttttctctattaagttaygcttgatgaagtcacaccagaaaaacctgcctgctgaggactaaaatctaatggctaaatgtgtaggaagcatttttctactctcttcccttccccttac

SEQ ID NO: 439486 - DNA, 201 bp, Homo sapiens
gggccttttcattgttgtctcttaggactctccctcctattgacttttcaaaatgtgttctaacctccttttcctgctttaaggataatttctttttcctyatttctccaagaaaattgtttcccaaattttattttactctttgcaaggatttttaaaacttttgtttgctttggtctttctctttgtgttagaggcttt

SEQ ID NO: 439487 - DNA, 201 bp, Homo sapiens
gtgttaacctattggttctgtttctctggaatgtcccaactgatacaggggcccaccctgaggcagggtgaatgtagtctttggttgacaaacccctcacratcacataaaggggtatttgggggcagtttcccaaattaagagaagtaggcagacaaaaaagtaagagacagtcataagtatatattccctgatacggtt

SEQ ID NO: 439488 - DNA, 201 bp, Homo sapiens
tactttgatattgatggttaattttaacatagtttgagaaacgtgtaccaaaaaaaaaagtacaaaatacacctggtcttcgtaaaaatgccattaactcygtagtggatgctgcactgaagactgtagaagccacctccactcccgccttccacttctatcgtcttgataatcacagcactcagaaccacagcaacatgg

SEQ ID NO: 439489 - DNA, 201 bp, Homo sapiens
aatcttactttcagagtttgtattctatgaatattaagaatactaatgtatttcattgtaattttattttgagttataacaggaatatttgaaaaagtgcyctgattataaactcctttatggtagggattgtcccctagaactaaaaaaaatcccttatataaaaccgtgacaacaaaaaatacctaaatttataaactt

SEQ ID NO: 439490 - DNA, 201 bp, Homo sapiens
tcattttcagagaacagagcctgtgaatatcgttaaactctgctataatttaaggtaatattcaaaaagggttgtgactttatgataggaaatagtccttsacattcataattcttaagcactttcttttatcattttgctgatgtatgttctattttaaaatcagaaggataatggatgtgcttcttcaactgtaaatta

SEQ ID NO: 439491 - DNA, 201 bp, Homo sapiens
tgatttgtgtgaggcaagtcctaaaatttagaaaaacacagaacctgccaggatcattaattgatttcatgcaaacataacccacgtgcatttgagtggawgtttttagttaaatgtattcctaaatgccattaaagtgaaaacctggcccattcagtgtcattaaagaaacaacatagtgcacatatatggtaaactagt

SEQ ID NO: 439492 - DNA, 201 bp, Homo sapiens
tatgtaaaattgatttttaaatctgatatatttagcatgcaacaagatacaaataaccacctattcacataatgtgaaatagcatgcataatgaaagaackcaaagtcaacatccatggttatccctgccatattaagtgctgttatgaccaaaatagacatcgttttctaaagccttttttaaaaatccctatacacttc

SEQ ID NO: 439493 - DNA, 201 bp, Homo sapiens
gtgtctctcttctcacagtgaaccctgactgctccatgactgctggagaagaccaagcatcgctatttaggatgctcttttttctgctctttccagctctmaatttctagcatcaccaattccccttgctcctggctctctggactttgtgccctgctgccctttgttgtgatcttccatggccacttacatagagactgc

SEQ ID NO: 439494 - DNA, 201 bp, Homo sapiens
tgtttaatgggcatagagtttcagtcttgcaagatgaaaaaacgtttggaaaattggttgcacaacgttaatgcacttaccacttaccacaacttgaactrtacagttacaaatggttatgatgttaaactttacatcatgggcctttaccacaattttaggaaagaaaagaaataagattgcatcaatacttataaaaat

SEQ ID NO: 439495 - DNA, 201 bp, Homo sapiens
ttgtgcagtgctgcacagagatctgggaagccagtgctgaaggtggttggtgggggacagtgtgggagagtcctggccccttattaccactggaaaagagmtgctctccaatcagaaacacccattttcatgggcgcatgaatgagaaataggctctgcttattctatgcagatgaaggagctgcaccctgttgggtgcca

SEQ ID NO: 439496 - DNA, 201 bp, Homo sapiens
ccttattaccactggaaaagagatgctctccaatcagaaacacccattttcatgggcgcatgaatgagaaataggctctgcttattctatgcagatgaagragctgcaccctgttgggtgccacttcctccccattctgttttatcatctcttgactggccatgaaagctgcaaaagagcctttatagaagtgcttctgta

SEQ ID NO: 439497 - DNA, 201 bp, Homo sapiens
ctatgcagatgaaggagctgcaccctgttgggtgccacttcctccccattctgttttatcatctcttgactggccatgaaagctgcaaaagagcctttatrgaagtgcttctgtattgctctctgccgaacctgacgtgatgtcttctggggttaaagccaggcaggcccctctgtatctgtggggttgggttattatatc

SEQ ID NO: 439498 - DNA, 201 bp, Homo sapiens
ggtgttctaaaacaccataataagatttttttctattcatgtgaggctaaaagtgtacattgagaatcaccttggaaatgctcccataacctagacaaagrgacattaaatgaattctagaaattcagttgacatttggaaacagcaattttaagagagaaatgtttccagattttagccaatacttttcaatttacttgc

SEQ ID NO: 439499 - DNA, 201 bp, Homo sapiens
agaagatccagataagctcaattggaaacaaaatgggagatattgtaaccgataccagagaaatacaaaagattgtttaaagctactgtagacacctttaygcacacaaattagaaaatctggaggagatagataaattcctggaaatatacaaccctcctagattaaatcaagaagaaatagaaaccgtgaacagaccaa

SEQ ID NO: 439500 - DNA, 201 bp, Homo sapiens
gttctatgtggaatgtggatttctgactgtgtgcccctaacccctgcattgttcaagagtcaactgtatgtgtgtatgcagatatatacatacatacatayacacacacacacacacacacacacacagtttttgaaaaatcgtttgatgccttctgaaccacttgatgtttgctcctgctgaatataaatcatatgtact

SEQ ID NO: 439501 - DNA, 201 bp, Homo sapiens
gttcagtgtgtactgcttgggtgatgggtgcaccaaaatctcacaaatcaccactaaagaccttactcatgtagccaaacaccacctgttccccaaaaacytatggaaataagaattttaaaaaagaagaaatgtacgtgtggtagcaagaaatcacactggtaagtgaatgaggagttataataaaaagtctcattggaa

SEQ ID NO: 439502 - DNA, 201 bp, Homo sapiens
tataaaggctgatttatgcatctaattaatttattcacagcatttcctttacttgggtgttcaagtgcaacatatattttcagtcctttagaaagggaagygaatttgtcattttgaaagcaaactttaagggatgagtagtcattggaaagcattcgtgtataacctaaagagcatcctcctggtaaaagttcaaccccc

SEQ ID NO: 439503 - DNA, 201 bp, Homo sapiens
aatctttcatgaaaagaaaaatcaatcaatgcagcaaatttcattgttgtcttattttaagaaatcatcacagccacaccagctttcagcaaccaccacaytgatcagtcagcagccatcagcctcaaagcaagaccctccaccagcaaaaagactaagactcactgaaggctcagatgattgttagcatattttagcagt

SEQ ID NO: 439504 - DNA, 201 bp, Homo sapiens
aaggctcacctgtgtggacagagatgaagtacaaactccttaacaaggaggtcaaggtcctaagccatccatcatagatgagctctctaatgtcaattccyaatgtttgttccacagaagagaaacatgccttacataactctttggcttttttcactgtgtattcttaccttggagtaaaaggatttccattctcaacct

SEQ ID NO: 439505 - DNA, 201 bp, Homo sapiens
aataatagacaaatatataatatcagcttcagacatatgtctgcctagcaaaagagagaggacaaccatatatatatatatatatatatatatatatatayacacacacacacacacacacacacaataaccatatatatatacacaaacacacacacacacatatacacacacaatagccatatacatatatataccata

SEQ ID NO: 439506 - DNA, 201 bp, Homo sapiens
ctgaactctttcttggttttagagagcccttgaaataccacatctaccaaagctccccatcaggattaagttctccttcctccatgtttccagtgccacayggacaatgcctcattcacttgatttattatttattgagaacctactaaagtccagttaatgtcatcaaggatggtgatacaatgaacatgacagcagagc

SEQ ID NO: 439507 - DNA, 201 bp, Homo sapiens
actggtctccctgtttcaccacagagcacaatggtatactctgggcggagtatctggagtgatcctttcaccatgtcactgccaccctaaaatccttcaayggcccgtcccacctggggaaaaagaggtaaaagccaaaggccttcccaagacctctacagcctcacactttctaaacgtcccactatctcatctcagttc

SEQ ID NO: 439508 - DNA, 201 bp, Homo sapiens
tacaggcgtgagccacagtgtgtggcccccatgttatatttatataatgtttctttaatcttctaatgccagttttattttcacagtagacagtgatattsaaaaagaataatatacaaataaaaattatagatcagtatcaattatgaacacaaatataaaattcacaaacaaaatattagcaaactgatgatcacctca

SEQ ID NO: 439509 - DNA, 201 bp, Homo sapiens
acaggcgtgagccacagtgtgtggcccccatgttatatttatataatgtttctttaatcttctaatgccagttttattttcacagtagacagtgatattcraaaagaataatatacaaataaaaattatagatcagtatcaattatgaacacaaatataaaattcacaaacaaaatattagcaaactgatgatcacctcaa

SEQ ID NO: 439510 - DNA, 201 bp, Homo sapiens
gtatttttttcagatcacaatggcatgaaacaagaaatggatgagaaaaaatcttgaaaaatacacaaatatgcagaaattaaacaatatgctccttgaayaccactgggtcacagaagaaataaaaaaaggaaattaaaaaaaaacattttgtgacaaatgtttgagacaaatgcaaatggaaatacaacacaccaaaac

SEQ ID NO: 439511 - DNA, 201 bp, Homo sapiens
ataaaaaaaaaaaaagcattaaagtatatccacataaaatttcatatcaccagagataaagattcaaaaatgttcagagattggaggccaataggtcacasgcaaatgactagaaattcagatgcatcaagattttcaaagcaacataagactctggaggcgatagagacatgacctccctgttctgaacgaaaagggttt

SEQ ID NO: 439512 - DNA, 201 bp, Homo sapiens
aaagtacatgggaaaaatgtaataaatgtacaagatctatttgaagaagttttgaaatatgatttaaagtataaacaagacttaaaaattagaaaacacaytattttgtgatagaaggattgcacatcattacacatcacaaaatggttaattttgcaaaattaatttataaacgtaatactatcgcaataaaaatacaac

SEQ ID NO: 439513 - DNA, 201 bp, Homo sapiens
taggacaggtcttgtgttgatgaaatccctcagcttctgtttttctgggaaagtcttcacttctccctcatatttgaaggatatttttgctggatatattmcaggttaaaagttttttccttcagcactgtaaatatgtcatgacaccctctcctggcctgtaaggtttctactgaatagtctactgccagatgtattagg

SEQ ID NO: 439514 - DNA, 201 bp, Homo sapiens
tcctgcctcagcctccccagtagctgggattacaggcatgtgccacacctggttaatttttgtatttttagtagagacggggggtcgccatgttggccagkctggtctcgaactcctgacctcagttgatctgcctgccttggcttcccaaagtgctgggattacaggcgtgagccactgtgcccagccagataaatagtt

SEQ ID NO: 439515 - DNA, 201 bp, Homo sapiens
atttatctacccagtaccagccagacactcgcaattcaccaatccagaagctttgttaatagctttctttacattcagaagttattcttttttgcatagcrttatttactttgatgcatgcatacgattacatgatttgaatagaattggtaagcagaatttgaaatatgttagatactaaaattttatataggcattcca

SEQ ID NO: 439516 - DNA, 201 bp, Homo sapiens
gctctattacttaacatctatctccatttcatagataccagattctttcaggtccacttgattttaaaaatgcttctgtaataactgtatgacataaggargtcccaaagattgctaagtaaattgtgagtatgtcattcaaaatttatagataaactgtggcacatttggaagcaatatttcatttcaaaaatgtctcta

SEQ ID NO: 439517 - DNA, 201 bp, Homo sapiens
gtatggtggttttctgtatgtattttaatttatttttgctttattttttgtaggtacatagtaggtatatatatttataggttacaatatgtattttgttacaggcatgcaatgtgtaataatcgcatcagggtaaatgaggtattcatcacttccagcatttattctttatgttactaataatccaattatgctctttta

SEQ ID NO: 439518 - DNA, 201 bp, Homo sapiens
gagtttgagaccagcctggccaacatggtgaaaccccatgtctactaaaaatacaaaaattagccgggcatggtggtacacacatgtaatcccagctactygggaggctgaggcaggagaattgcttgaactcaggaagtggagttgcagtgaggcaagatatcccccagcctgggcaacagagcgagactctgcctcaaa

SEQ ID NO: 439519 - DNA, 201 bp, Homo sapiens
acttatgatgcatttttttttctaatcggtgctatgagaaagatgcaatgctatcagtataagatagtaatatgtagaaaattagccaggcatggtggctyacgcctataatcccagcattttgggaggccaaggggggcggatcacctgaggtcaggagtttgagaccagcctggccaacatggtgaaaccccatgtcta

SEQ ID NO: 439520 - DNA, 201 bp, Homo sapiens
aacttatgatgcatttttttttctaatcggtgctatgagaaagatgcaatgctatcagtataagatagtaatatgtagaaaattagccaggcatggtggcytacgcctataatcccagcattttgggaggccaaggggggcggatcacctgaggtcaggagtttgagaccagcctggccaacatggtgaaaccccatgtct

SEQ ID NO: 439521 - DNA, 201 bp, Homo sapiens
gtagtaggcaataccatctaagtttgtgtaagtacactgtatgatgttcatgcaatgatgaaattgcctaacaacgcatgaatggatccccacatttaagsaatacatgactgtatttcaataaatattcaatatattggtaagcatcctatagagtctttaaaaataaggcactataggcaacaatggctggcagggaaa

SEQ ID NO: 439522 - DNA, 201 bp, Homo sapiens
attttctctaatgtgcttctagagtttgtaaatccagtacaacaacaataagaatattctatgtagtgcccaggtgggtcagataattgacatttaggaaktcttgagagaggggacttaaaatgaaaccaagtacgcagtggaaggctcagctgaggtcacactgtgaggatgctgctcttctatgacctgggaccaaaa

SEQ ID NO: 439523 - DNA, 201 bp, Homo sapiens
tttctgttatcttgttgttggcacctgttgattatatttttacattcactctgagatcttcctgattcttggtgtcattactgattttcttgtgaaaccartatgtttgatacattatattatgagatcttaaagcttccgttttagcttgcttattctgacatttctctggcaaaggttgggggaagggtgctaccttat

SEQ ID NO: 439524 - DNA, 201 bp, Homo sapiens
atttctgttatcttgttgttggcacctgttgattatatttttacattcactctgagatcttcctgattcttggtgtcattactgattttcttgtgaaaccwgtatgtttgatacattatattatgagatcttaaagcttccgttttagcttgcttattctgacatttctctggcaaaggttgggggaagggtgctacctta

SEQ ID NO: 439525 - DNA, 201 bp, Homo sapiens
cactagcctttgatgtaaagtccagatcactcaacatgtatataaaatacttgatggtcaggtttctttccacttctatcctcctcctgagccctgccccyagtagctccttgttcaggttattcagaactactgtgaatcttgcaatgcatgctgctgttggcccctttgtgccttcaaacatgctctatcttccctaag

SEQ ID NO: 439526 - DNA, 201 bp, Homo sapiens
caataccattgattacttcatttgaagtcagggacagattccatgccatctttctaactgggtgattcccatcatatctgactgcccacagggtgagggtragcacggcggctctgttttcgatctgcatagccgtcggagtgctgcacggtctatcgatggtgtcgacttccattctcaagagaatccataaggtgtaag

SEQ ID NO: 439527 - DNA, 201 bp, Homo sapiens
aatggtgcgccgagcttgggtcccttgctgtggtgtgcctttgttactgccattcactgtcatttctttacgtcccaaggtatgaatgactgagttcgtgwttgattgtgccactaagagtgagtctggggcaatgctaccatccctgacaactctcgctggtgagtggaggctgacttgcttgccttccagggcaatacc

SEQ ID NO: 439528 - DNA, 201 bp, Homo sapiens
ctcctgagtagctggaactacaggcacacaccaccatggctggctaatttttttatatttgtagagatggggtctcactatgttgccgaagctagtctcaracttctgggttcaagtgatctgccctccttggccttccaaagtgttgggattaacaggcgtgagccaccatgccttttcacctttttaaagtatacaatt

SEQ ID NO: 439529 - DNA, 201 bp, Homo sapiens
aaggtctgtggcaacctagcattgtgtaagactatcagtgccatttttccaacagcatcggctcacttcatgtctctgcatcatgttttggtaatcctggyactatttcaatttttcatcattattatatctgttatggtgacctgtgatcagtaatcttcaatgttactattgtgattttgggggagtaccacaaacaac

SEQ ID NO: 439530 - DNA, 201 bp, Homo sapiens
gctgtctcggtgcatcagtggcactgaattttatgcagatgctttgtcactactgctgaaataatatttttttctgttccaggtacatatgacatgtgtawccacctaagctttatagaaggacataccatttttatattctatacataatttattccatataatcctaaacatctgtacataaaaaaaatcaagcgaaat

SEQ ID NO: 439531 - DNA, 201 bp, Homo sapiens
ttggcccgttttatttaagtagttaaacttacaagtgtagaattgcttgtgttttttctgtattatccttctgatgtctggagggtctctcaagatatccrttcttcatttctgatatttggtaatttgtgtcttcggtttctcctttgtctgtcttactagaagttggccaattttattgatttcttctgcatttccaaa

SEQ ID NO: 439532 - DNA, 201 bp, Homo sapiens
ttattttattttatttttcttgtttaactttttgttaagataatcatagatccatatgcagttgtaagaaataacacacagagaacacacatagcctttakttgctttcccgaatgggaatatcctacaaactgtgatactatatcacaataggttattgacattgatacagacaagaacatttctaccaccacaaagttc

SEQ ID NO: 439533 - DNA, 201 bp, Homo sapiens
taaaagaactttctgtttttaaagatttcagtttgtataaatatgttggaagataaaaacacattatcaaataagggacaacagaaatctgttaatacaarcacctgggaaagaaaattattttataatcactattaaaagtctactttatttcaagctactttagaaagcattcctagaaaatgtctcttaaaatatcac

SEQ ID NO: 439534 - DNA, 201 bp, Homo sapiens
ctccgtatccagccaccagttccatcatttgatggactgcctgaaacaggccgggctgccaggttctcataaaaatagagatgaattgggcagcagacaaytctctaaggcaaagcaactctgtcattttcttctttgcaggctataatttaattgttagtcaaggtggatggctgacacaggggggctttctctaagagc

SEQ ID NO: 439535 - DNA, 201 bp, Homo sapiens
tacatgacatggacaaatttcttgaaacaaacaagctattcaagcatagtcaaaaagaaatagatgacctgaatatccctatatactcatttatttttcawataaagctggcattcttcatcttaatttaaaataagaagactgaaataaagataggcaagtagtttgagcaagaccttgtagttagtaaatggtaggatc

SEQ ID NO: 439536 - DNA, 201 bp, Homo sapiens
accagattgtcctttcatcaaatgtgccacgaaataaatatgaaactatggacagatggttcccaagcctatgtttaacaatcttaatgtcttggctgggygcggtggctcacgcctgtaatcccagcactttgggaagctgagacaggcggatcacgaggtcaggagatcgagaccatcctggctaacacagtgaaaccc

SEQ ID NO: 439537 - DNA, 201 bp, Homo sapiens
gctgcaatcttcagagatgccacaagaaagagacgaagctgcagagacgatgacacgcagcctgccacgttgttttggcatctggaactaatgaccacttycatgtgcatgaaactggtactgagagcagggcgtgggctgagaaacctaagcatgcaaagacatctgtctgtctctaactcttgcttctactttctgatg

SEQ ID NO: 439538 - DNA, 201 bp, Homo sapiens
tcaacagtcgtatttcccaaatgttagaggggtcaaggaaaatgtagcaaaagaaacagattaacattttttttgtttaagtattccttatgcttttttayaactacaaccattgataatcaagaattctttagtgatatttagaaaatgcatatttaaaaattaaaaaaaaagctattcctgggcttgccggtagatttc

SEQ ID NO: 439539 - DNA, 201 bp, Homo sapiens
ctttatgggctgaccacgcgtgggggcatcaggtgagggagggaggcctgagcccttcccaggaccatctgctgtcctgggctgccctctcacttagatcrctgcacaaccatctgtttctgtagaaatgagtcctccctccccatcctcaaagattttccaggctttgggagctctgcttatagagaatgcttggaagaa

SEQ ID NO: 439540 - DNA, 201 bp, Homo sapiens
tttggtaaattggagatactcttagaccaaaggacccctacacggatcttccaactttataatcccaggattctctgcagacaaatgagttaagtgtgcayggaggaagtgctcagagagactagatatatgcatgacaattccaaatctaactttcagaaatgtggggggcagtagttctaataatttcctcaaggaatt

SEQ ID NO: 439541 - DNA, 201 bp, Homo sapiens
catctcaccacctgctaaaattgctcagggccccctacccgcttccattggcctcagaatttgtggggtgctcagaagtgtttttataccacagcccctastttgttgctgaaagggatgaatcataccccactttatttttaaaaattttctagtgattccagaggaaatagctgcaaaaccactaaatgataccttatt

SEQ ID NO: 439542 - DNA, 201 bp, Homo sapiens
tggatgcatgagattcccctgggggattcaagagatagtagaaagataccctgactggatgtgtcactgggagtgtgtctttcttgggatcgtttggaagygctggagaggagtatggaggtgcatacaaaaggagggtgaggctgtagtgatttttcccaagctcaagaatccctgggtcccaccttgccttatcaacca

SEQ ID NO: 439543 - DNA, 201 bp, Homo sapiens
agatcctgggtttctttcttttctctttattcatctctccttcccatcccactccttaagaaggactcagagccacagctagctaaatatcttataaactscttagtgaggaaggattagacacagaacagaatcacatgggtgtgttgtttgcatttctgtatatattaaaagaaatgtatgactgagcacatacagtcc

SEQ ID NO: 439544 - DNA, 201 bp, Homo sapiens
tttctaaaaattaacagtgcctcaggtatttatcttcatctctttctctcgaggtctctattgaagagaccgtttcaaaaccacttgtatgcttctcttcrctctttatttacacagcagaggtagagacaatgggccatgtattttaccaattcatatagcatttcttccctccccaggtgcccatatggaaaaccttta

SEQ ID NO: 439545 - DNA, 201 bp, Homo sapiens
cctgcagttgctgttgtgacctagagcatcagtatctaaccagctgtagaagtcagagctgtagtgtcctttttgccttaggtctttcttatgcttatgtytatgagaacaatgttccacctgaaatcttaatctgcccccttctctacattctcactgccattgcttggttcatgtcttgccagagtagtagcactggac

SEQ ID NO: 439546 - DNA, 201 bp, Homo sapiens
aattttggataccccatttaccctgatgtgattattacacattgtatgcccatatcaaaatatctcatgtaacccatatatatacatatatatatatgggwtatatatatatatatgggtttatatatatgtatgttttatattatatataatatattatatataataatatataatatatatgggttttgtttctatata

SEQ ID NO: 439547 - DNA, 201 bp, Homo sapiens
gtgctgtgcgggcagtggggaaggattttggacaaaatacaagtccattttgagtttctccctttcaaatttgagaggtttgtgattttgttgcatgcatraaagggtggtattctatcctgattttcctagaggattacaggtttatctacgtcctattcaaatatctctgatacctgggacattcttacgcctggttat

SEQ ID NO: 439548 - DNA, 201 bp, Homo sapiens
gagtagaggccacctaagtccattctcacatatacctgctcatatgtatcagttctggttttattcatttcaatataggtggctatggaatatcatttacrtgtcaaagaagaaaaaacaagaacgcagaaaggcctctggcatgtctgctactctggacaaggaccatcatgacattgccgggtgtgggttgatcgggtg

SEQ ID NO: 439549 - DNA, 201 bp, Homo sapiens
tacagaaaaagaggaaaatgcaacggcaaatctgtataataacaaatgtgcaggcagaaaataaaaggaatttctacagaaaatgagatcaatggaattgkattggaaaaccacaattcatagtcaacttatgttttgcaaccagaggcaccaatccaaaggtaggtagtcagctttttcatctctcccacactttctgat

SEQ ID NO: 439550 - DNA, 201 bp, Homo sapiens
cagtgtttttaaatagcatcttgacacgaatctctgacacagtatctcccaacataccacaaaattatctatgaagatacagaaaaagaggaaaatgcaayggcaaatctgtataataacaaatgtgcaggcagaaaataaaaggaatttctacagaaaatgagatcaatggaattggattggaaaaccacaattcatagt

SEQ ID NO: 439551 - DNA, 201 bp, Homo sapiens
tttgtaaatggaagaactggagcccagatacagaaaatgacacaaggctccacaaatcaatatcagggcctctcggaacagagcttagctcctttgactcrttgtctgattctttattttgctaccttccctctctaaaacgcttgtcaagtgcaacttgcagataaaaagccttcacccagaatgctctgtgacagtgaa

SEQ ID NO: 439552 - DNA, 201 bp, Homo sapiens
gctggctctatatctataaaaactgacttcctggattacacaggttgacaatatggtccatgatccatattttgtaaatggaagaactggagcccagatasagaaaatgacacaaggctccacaaatcaatatcagggcctctcggaacagagcttagctcctttgactcattgtctgattctttattttgctaccttccc

SEQ ID NO: 439553 - DNA, 201 bp, Homo sapiens
ggcattcaagagaggccagcatggtacaggttcagagacaaaaagggaggcagcatggttggtaatctacatgcacagagatgtctgatgtataaagtacragacatcaagtgatgagaagaacaaagtgattatttaagaagccaaataatgatgctttacagtaatagcatgcaaaatttcttaccaaaaaggttttct

SEQ ID NO: 439554 - DNA, 201 bp, Homo sapiens
tccgtaagtgctcacttacagatcttcataatgccgctgtggttgtaagaggctgacacatttgatcagtgctggctctatatctataaaaactgacttcstggattacacaggttgacaatatggtccatgatccatattttgtaaatggaagaactggagcccagatacagaaaatgacacaaggctccacaaatcaat

SEQ ID NO: 439555 - DNA, 201 bp, Homo sapiens
aacacatagataagaatgcaatttaaatatgatcagatcactggggtttaaatgaacaaacacttttcttcagcaatcagcaatattcagtgagctgatastatacaggttttaaaagtactgcaaactacattctataagaaaacaaaaataaatagagctaccaaaagatctatgggacctgtaaagaaaatttaaaag

SEQ ID NO: 439556 - DNA, 201 bp, Homo sapiens
tactcaggtaatgcctagcaaatgaatgatgcttcttacaagttacatgagcaccaattggacagcacatatttaaagacaacacatagataagaatgcartttaaatatgatcagatcactggggtttaaatgaacaaacacttttcttcagcaatcagcaatattcagtgagctgatactatacaggttttaaaagtac

SEQ ID NO: 439557 - DNA, 201 bp, Homo sapiens
tgaaatgtgaaaagtacttttcacaaaggaaatatatatttgcataaactcacaaaatatttatgttgaaatgtacaaaacacagtcattcatgattcctyaattagggttttagtggaataaaaatttaattaaaatataatttgttaattcattagtgtcgggttataactcttacactgatttttagtactaggtcct

SEQ ID NO: 439558 - DNA, 201 bp, Homo sapiens
cgtgtttgttgaaagtaagaaaagtaagaaggttccagcagcagctagaagggatgtctcaggatgtctcagtcctctctccccaacttcgtctccttcarctgagccctccaccaaagccgcccaaataactaaatgcttgataagtaaacatcgttttaatgtaagacgtctaccccccaccatgcctgcacactttca

SEQ ID NO: 439559 - DNA, 201 bp, Homo sapiens
ggttaactcattattcatggaaagcattttctgttttctccctctttgtgactttgcacatgcccttccatcttatctttttatcaaatttaaaatatcakgcaaaagcctttcacaaattctttctatcatcaacttccattagaagtgatttccccttctcctggtcccccagagcagggtattttatcctgcttggaa

SEQ ID NO: 439560 - DNA, 201 bp, Homo sapiens
gaaaatgaaataacttcagctgttgtccaccacagagaagacaaggtttggggtctgtgtccaattaattgtctgccagaattagaatcaacactcttcasaggaagacaacagaatccaggggctgtaaaatgtattcataatgcccttgtaggattgcacgttgtggccctgttaaggttggatgggccctagactatg

SEQ ID NO: 439561 - DNA, 201 bp, Homo sapiens
cagcctcccactccagtagctgggactacaggcggcatcaccacatctggctaattaatttttttaattctaagtttaccaaatatttatcaatgttattsgtaatttaaaggaaccaaccaacatttggtttttggttctcttaattgtatggtggttttctgtatgtattttaatttatttttgctttattttttgtag

SEQ ID NO: 439562 - DNA, 201 bp, Homo sapiens
tgcagcatctcaggtccgttcgcatctgctgatctggagcctgcattttaccaaggtccgcggatgcatactgaagcttgggaagcggtgctacagcgggmaggctgttcacttgggttggtgaagatcctagatcttaaagtcaaaggtcaggaagtggaggaaggacagggatctttttagctctcagtcaagaagtct

SEQ ID NO: 439563 - DNA, 201 bp, Homo sapiens
aaccctaggtttagtgctgactgcttttcacattacactgtcctcctcacttggggactctcactgtgctttacttgctgtgagctggagcacagccccaktcaccttctggatgaaggacagagggatactgcagtcactgcgtccacagtgtttttcttcacatgaccggggtaaaatcacgcccaagatgtttctccc

SEQ ID NO: 439564 - DNA, 201 bp, Homo sapiens
gtcttcctgaatcctgaggatgtcaaacaagtttctacaagtttcttctggttcatatgccagatgttgttgaggtattcttttcctccgattgtgcacartacttccttccctgtgtgtagagatttttcccatggccccctgtggctgcagtgttgctactgttctcacttttattgaggagagagattgttagagttt

SEQ ID NO: 439565 - DNA, 201 bp, Homo sapiens
tggctgcagtgttgctactgttctcacttttattgaggagagagattgttagagtttgctggttgctcttggcccctctctgccctcttgaccgctgtttyggaagaatccccttctgaatttcgtatgcggagattccagacactgcctcctggtttcactctgatggattgagaaggatttgtcttttcctactggatg

SEQ ID NO: 439566 - DNA, 201 bp, Homo sapiens
attttgtattttactatggcctaagatgttgtattttaatacattaagtcattgacatttatggtctcatttaacttctgtcatcttattttttggtcttyggttgttgttttttatttacttttttctttgtattttgtagttttgttatgtacactatgttctatttacttttttgtaatgactttaagctaagacatc

SEQ ID NO: 439567 - DNA, 201 bp, Homo sapiens
agagctccagaggggaatcaaaagtgacaaaaagtgttggtaatatcttctctgaatgaggcagttactagaagaaagacaaccaaattaaactgaagtcwtcttaacagctagaaggaatattgcctaaatatggaagtattctcatttttccaagagagctgagatcaagttagcaacatggctatggttaggtaacaa

SEQ ID NO: 439568 - DNA, 201 bp, Homo sapiens
atgaaattcattatgtccatttcagagagacagaaagtaaagcggtggttagcaggggatgtggggagcagggagtgaggagctgtttaatgggcatagastttcagtcttgcaagatgaaaaaacgtttggaaaattggttgcacaacgttaatgcacttaccacttaccacaacttgaactgtacagttacaaatggtt

SEQ ID NO: 439569 - DNA, 201 bp, Homo sapiens
attttaacttaatatgccaaaataaaggggatttaatagtttacgtaaatcaggaaaacccctttggtttcaaattttattatcaagttttacattagaamcaaattttggtttggcattaggacatgataagccctgattatgctctttaacatgaaattgcaccttctgggtttcattacatcaaagtaacatacaaat

SEQ ID NO: 439570 - DNA, 201 bp, Homo sapiens
aatggtttagaatttatctggttttcttcctaatattcatgataatctttgaataaaattttacagcacaagttgtaagaatatgctaagaaaacactctwttaaatcaaatgaaaaatacaaaaaacaagaagggatgtgactaaaagagcaagattgaaggtataaaaaataatcaaatcgagggaaatgaagcagaga

SEQ ID NO: 439571 - DNA, 201 bp, Homo sapiens
aaatggtttagaatttatctggttttcttcctaatattcatgataatctttgaataaaattttacagcacaagttgtaagaatatgctaagaaaacactcwtttaaatcaaatgaaaaatacaaaaaacaagaagggatgtgactaaaagagcaagattgaaggtataaaaaataatcaaatcgagggaaatgaagcagag

SEQ ID NO: 439572 - DNA, 201 bp, Homo sapiens
agacctaggttctagctccattagggctactcactagctttgtaacattgtgaaaaatccccaaactaatatctgaatattagttttatacttgaagacaraaaaatggtttagaatttatctggttttcttcctaatattcatgataatctttgaataaaattttacagcacaagttgtaagaatatgctaagaaaacac

SEQ ID NO: 439573 - DNA, 201 bp, Homo sapiens
aggaatgctaacaatttcttgtttccttccaagtcattaatcctgtttccagatgcctttgatgactgtttacctttccttgctgttgtgtgaggcccctstagtttttaaaacatgtgctgaggtgtatgactggtcggtgtgtatgtactccttcagagataatttaaggttgtctcagttctatttcctttctaaaat

SEQ ID NO: 439574 - DNA, 201 bp, Homo sapiens
ggattcaggaaaagaatcaaagtaacttaggtccctgagtgactgcctggagcagaggcctgtccatgacccactggactgacagatgagtgacagatggycttactatgtcaagccacggagattcagaggattattttctacggcagttggcataaactcctatacctgaaaaaatacttacgttgaatataaaatgat

SEQ ID NO: 439575 - DNA, 201 bp, Homo sapiens
cttaataatatatctgacttctctttaagtactttttctgaaaagccactgctccatttccacactatccccagtcacggctccatttccacactgtcccyggtccccgctccatttccacattattcttcatagtaaagtttttcaagagaattctttatcatcactgtccttgcttcctcattcccgttccctctttaa

SEQ ID NO: 439576 - DNA, 201 bp, Homo sapiens
ctgccttaacaaaataccatggacaaggtggcttgaaaaacacacatgtattttcccacagttctggaggctggaagttggagatcagggtgtcagcataktcgagttctgtggagggagagatcgcttcctggcttgtagacagtcaccttctcaaaatgtcctcacagggcccttcctctgtgtgcatgcggagagatc

SEQ ID NO: 439577 - DNA, 201 bp, Homo sapiens
ttaaaaaaagatactgagaataatttaagattaaagccaaaatttgaagaagagataaatgaggaaatcccttatctatatgtatgtgtgtgtctgtcacrctgtgactgctattcctaagagttcttctcaattgctggctccttttgttaatttagattcacaaatagtcatttttaaggtttatgtgacaacaaacct

SEQ ID NO: 439578 - DNA, 201 bp, Homo sapiens
gtgtttgacaaagctctcggtgggacaaacctcctctgagaaatggaaacctaggaaatcaaaagcccagaaattaagggaaagcattagtctcagataaygaaaaggaaacccttggggcccgggccaaagcaaatgtaaaaacatgaacacttgcataatctcgtacatgggactcacagaaaacgcaacccctaatat

SEQ ID NO: 439579 - DNA, 201 bp, Homo sapiens
ttagtctcagataacgaaaaggaaacccttggggcccgggccaaagcaaatgtaaaaacatgaacacttgcataatctcgtacatgggactcacagaaaaygcaacccctaatatagatgagctcgcaatgaaaaattatccaccactgtggcaatgcagtcaccaaaaggaagactcaacagaccaatgagcatagacac

SEQ ID NO: 439580 - DNA, 201 bp, Homo sapiens
gcatttccatacacgattaaaaacaactttgaaaatattttttaaaagttcacaatagcaagagatgaagtaaaacaaacactttaagataataaaattarcaatcactatgtaagaccttatggagacaattacaaaagatgattgacaaatataaacggaagacagaaataattttttatgaataaatgcatatattga

SEQ ID NO: 439581 - DNA, 201 bp, Homo sapiens
tgctgatcgcattatgcctactaaataaaagtaaaggaatattactccaaatcagatgtagtggaaggagggaagggggaacatttagcattcctaaaagygtgcagaaaatgctaacatttttctaagagaaagggataaaaataaacacacacacatacacacacagtgacataaacacactggccctctcaagaatgt

SEQ ID NO: 439582 - DNA, 201 bp, Homo sapiens
tcactctccatcttcacctcctctcctctggtctcactctccaacctcacctcctctcctccagtgtcagtctctatcctcaccctctctgctccagtccyggtttccatcctcacctcctctcttctggtcctggcctccatcctcacctcctctcctctggtctcactctccatcctcacctcttctcctctgttcctg

SEQ ID NO: 439583 - DNA, 201 bp, Homo sapiens
gtatgtcttacatggtggcaacaaagagagaatgagagccaaatgaaaggggaaaccccttataaaaccatcagatattgtgagacttattcactaccacragaatagtatgagggaaaccactccccatgattcaattatgtcctgctgggtccctcccacaacatgtgagaattatggaagctaaaattcaagatgaga

SEQ ID NO: 439584 - DNA, 201 bp, Homo sapiens
gtgtggaattattaatagtttctctctctcttttggttaatttgcttttaagctcctgttaataacaactatgaattgaagaaggctgcaaaagagattcktaatatttttgtgactttgtaaaagggtacttcacgatgacctatgtcatcatcaacccttagaacctgtagattttgtaaatgatgttgctaatagctt

SEQ ID NO: 439585 - DNA, 201 bp, Homo sapiens
agggccgggcacagtggctcaagcctgtaatcccagcactttgggaggccgaggcgggcagatcatgaggtcaccagatcgagaccatcctggctaacacrgtgaaaccccgtctctactaaaaatacaaaaaattagccaggcgtggtggcgggcacctgtagtttcagctactaagggaggctgaggcaggagaatgga

SEQ ID NO: 439586 - DNA, 201 bp, Homo sapiens
gcaacctccgtctcccgggttcaagtgattctcctgcctcagcctcccaagtagctgggattacaggcacccgccaccatgcctggctaatttttgtatcyttttagtagagaaagggtttcaccatgttgaccgggctggttttgaacttctgacctcaggtgacccacccacctcggcctcccagagtgctgggattac

SEQ ID NO: 439587 - DNA, 201 bp, Homo sapiens
tgcctcagcctcccaagtagctgggattacaggcacccgccaccatgcctggctaatttttgtatccttttagtagagaaagggtttcaccatgttgaccrggctggttttgaacttctgacctcaggtgacccacccacctcggcctcccagagtgctgggattacaggtgtgagccactgcgcccggtcctattgcccc

SEQ ID NO: 439588 - DNA, 201 bp, Homo sapiens
gtttgagctcctaatacattctagctgttaatcccttgtcagatggatagtgtgcaattattttctcccattctgtgagatgtctcttcactttgttgatygtttcctttgctatgcaaaaggtttataacttgatgcgatcccatttgtccatttttgctttggttgcctgtgcttgtcaggtattgttcaagaaatttt

SEQ ID NO: 439589 - DNA, 201 bp, Homo sapiens
gccagtgggtgcacgcaccaggcgcgagccgaagcagggcaaggcattgcctcacgtgggaagcgcaaggggtcagggagttcgctttctgagtcaaagaraggggtgacggacgcacctggaaaatcgggtcactcccacccgaatactgcgcttttcagaccggcttaaaaaacggcgcaccacgagactatatcccac

SEQ ID NO: 439590 - DNA, 201 bp, Homo sapiens
tcccagcatttattgaagagattttcttttcccagtgtatgttcttggcacctttgtcaaaaatgagttcactgtagatgtatggacttatttctgacttmtctcttatctatgctgttccactggtctgtgcttctgttttttatgccataatgtagtataatttgaagtcagatgatgtgattcctccagctttattct

SEQ ID NO: 439591 - DNA, 201 bp, Homo sapiens
ttggtgtcctcttcaatttcttgcatcaatgttttaagtttttattgtggagatctttcacttctttggttaattcttaggtacttagttttacctgtggstattgtaaatgggactacattgtaaaatttctttttcagtttgttcactcttggtatatggaaatgctaatgatttttgtttgttgatttcgtatcctgc

SEQ ID NO: 439592 - DNA, 201 bp, Homo sapiens
agatggcgcaataggaacagctccggtctacagctcccagcgtgagcgacgcagaagacgggtgatttctgcatttccatcggaggtaccgggttcatctsactagggagtgccagaaagtgggcacaggtcagtgggtgcgcgcaccatgcgcgagccgaagcagggcgaggcattgcctcacttgggaagcgcaagggg

SEQ ID NO: 439593 - DNA, 201 bp, Homo sapiens
caaaacattaggtagtgtatgataacatacaaatgaaaattcagagattgaatgatgcaaactggcaattaattttaacagctggaggtaaattaaaacawttctatgaaactgtaaacatgtgattcaagaaaatacttttaatgaagctaagcagatcatataggctaaagtcctaagcttctgagcaggagaactggc

SEQ ID NO: 439594 - DNA, 201 bp, Homo sapiens
gttgtcaaggaagattctgagtttctggcttactcagaagaattacttgtaatatggtatagctttaagatagaatggtaggtgcataggtgcactaaagwtttttacaaagtgtgggggctatgagaatgcacttcccgtatctctgactgcagggaatgtaactgaccctggaccaagctctgcactgtaaaatctacc

SEQ ID NO: 439595 - DNA, 201 bp, Homo sapiens
aaaagtggatgaaaggggtagggataaatatggtggtgccttctgtcctaaattactctggcaatatgataaaacagccactggagggtggcacgggtgayctaaaaaggcaggatacgatgtggggatgggtgattattagagtctcctactaaagatgaatataaagtgtcagagctaagagagatgggagagaccaaa

SEQ ID NO: 439596 - DNA, 201 bp, Homo sapiens
ttctcttccctattcctgatggaatgatctttctgaaaggcaaatctgctcaggcctcttcctccttaaaacctttcagggcttctcactagcctttgatrtaaagtccagatcactcaacatgtatataaaatacttgatggtcaggtttctttccacttctatcctcctcctgagccctgcccccagtagctccttgtt

SEQ ID NO: 439597 - DNA, 201 bp, Homo sapiens
gaaggagtgtgcaagacctcgtgtgatattttgaacatgagtctattgtctgtgcccaccatggtgcactgatcagaggctgtgttttcctggccagctastcagatagatgttctcttttcctttcctgactgctgctcctaaagctgaaggacacatttcggtaaaaggtaaagaagtcattgtgtttccttgctggtg

SEQ ID NO: 439598 - DNA, 201 bp, Homo sapiens
aagacttttaaaggaaaatgaactatgaaatcttcaagttgtgtatctcatatctctttataggcaagcactataaaaatgtgaatttgaatattatttcrttgcagggcttttgtgatgcttgttttcttatagaatgcaacaaaaatttcatggaaagaaagtctagtttctattgaagaaaaatatttgacattgaga

SEQ ID NO: 439599 - DNA, 201 bp, Homo sapiens
tccttttttctttttaaccatcccttcactctttttgcacgccaatgtactaaattgctcacttgttccccaataatgtcaacttctttggtcttttcgtrttacggtaaacactgtttctcttgcctgaaaccctgcttcctctgcccccagcccttctcttgtgtttctctggtaaacctttagttaccatttggcatc

SEQ ID NO: 439600 - DNA, 201 bp, Homo sapiens
cttagaaagaggttaagtactttgcccaaggtttcatatctggtagtatagctttttaaaaaatgtttattttaggtttaggggtacatgtgaaggtttgytacatagacaaacacgcatcatgggcgtttgttgtacatactgttacatcccccagatgctaagttcagtgtgtgttgtttccgcctttgtgatcataag

SEQ ID NO: 439601 - DNA, 201 bp, Homo sapiens
tggaccttcatcatgttgaaatgactctcccaaggccacacagccggttgaatgtatcactattaaagtacccgataacaatacaattcagcacttccacrgctatatgcacaatgcagttttaggccaggtgcggtggctcatgcctataatcccagcactttgggaggccgaagtgggaagatagcttgaggccaggag

SEQ ID NO: 439602 - DNA, 201 bp, Homo sapiens
agccacagtttgagttaccgtgaacttcactgctccaggataaatgctccacttgcattatttcagaatttcttcatattacctcactgtataatggagayattattggcctgaatttaccaaagaagactctaagacagattaagcgagtttctcaaaataacatggataattggaggccagccttgaactcaggcatat

SEQ ID NO: 439603 - DNA, 201 bp, Homo sapiens
tagcctgccccccacacactgtggggcaccgtttgctacttgccaagtaactgccttttttggcaaagaccacccaggacatggctcagagtccatcctarggctggccaacctctgtaaatctcgtgtcccctgattcagagcgagtgcatttaattcaggaagatcacttacgactgagtttttcatcatggctttgac

SEQ ID NO: 439604 - DNA, 201 bp, Homo sapiens
ttattatttatacaacataattattatgtatgatattatcagtttacacttttttcccaaaatgacagtaactttgaaaaagaagcaaattcatgaataayaatatcttaaatttgtgtttaggctatgattcttccatatacacaaaaaacttaaaaataaatctctccctaagcagaacacttcttcactaccacagac

SEQ ID NO: 439605 - DNA, 201 bp, Homo sapiens
ctcttcagggaaaacctaggtaaacccgctggagtcactccagatgccttctcagccaaaaatgggaaaaacaaaattcagggggaaataagcttcagagwagtgctgtgtcttcagaagaaaactcaatccttccagcaaaactatggctaagtagcaggtgtaaagaattattcaaacggctatttgtaaaagaatcat

SEQ ID NO: 439606 - DNA, 201 bp, Homo sapiens
acactctatatgctctcaaaatatataaaatatatatgcaatctaaataatttttaacatgtatataatgaatagaacttacaacataattatttatggcaaaaaaaaaaaggcagaaaataagattgaaaaccacagtagctgggagcctggtctctctcagcctttgcacactcccctaggtccttctcaactgttata

SEQ ID NO: 439607 - DNA, 201 bp, Homo sapiens
gggttcagaacatgatactccaaaatatagcacctttgtgtactgttttaagctcaagaaaatggaaaacgccgcagaagcaggagggtctctgtgacttytcctgtcctctgtctcctgaagtaggcatggaaactagaattccctccaccccttcttccctgaaacaggccatgaccgcagggaaggccactctttgac

SEQ ID NO: 439608 - DNA, 201 bp, Homo sapiens
atgtttttatcattgtacatttcttgcaacaactctggccatttattagtctatttttaggtgagagaacaaaggtacaaaaatggcaaacgggaaaagaracaagcataaaacagcttcgcttcaatcatctactgaaaaaaaaaatgatagagaggcataagttcctatgtcatcattgtgccttcatggaggcctcca

SEQ ID NO: 439609 - DNA, 201 bp, Homo sapiens
aaactactagaagaggccttttaactttaaattactccattttagagacatgaaatgcacagctctatagatacaataggtatggaattacttcttccccygttacaagaatgttttctttagttatcctcttgaggaaactaataacgttaatatttgcttccctttatagatgatataaattagttaaaataagaaaat

SEQ ID NO: 439610 - DNA, 201 bp, Homo sapiens
caagactttctgccagcacctctgcatctccacgatgcgatggaaatagatgtgtataatgagaggtgggtggtgaggcagagggaggtgggttttgcttrgagcttccacgttccctctgtggtgctccttgtgttgacgacttcactcagggtctcagttgctttcgctttgataggtagctaagaacacctgccatac

SEQ ID NO: 439611 - DNA, 201 bp, Homo sapiens
ggcccttgagtggaagcccagcccaggctttttccactctatactgagtagtttcctgatgtgtttaagcctgtttttacttatgacatagacttgggctyataaacaggaccaacatgggcactgaatttcctgttaatcactgacctgctgagagtagcaagattaaatgatttcaaattaattttgaagccaaatcta

SEQ ID NO: 439612 - DNA, 201 bp, Homo sapiens
gttgcactgagctgagattgcgccactgcactccagcctgggtgatagagtaagactccatctcaaaaaaaaaaaaaaaaagaatataatatgtgacttaygtgtttaacatttacatgaatgtatcatagtgtatacaggaaacttcacttacacttactacagtggcagaagttacaaagctgctacatgctggcaagg

SEQ ID NO: 439613 - DNA, 201 bp, Homo sapiens
tacaatgaagtctttaccagaaatgattttccaaccaactaaagtattcttggagttaaatgtcaacacttgtagagactgaaagtttattttagtgaaamttaaactttctaaaatatatatacaacactgagagttcatttaaacgtgaaagcaagggctagaacaaaaggaagcattttgaggttttcaaaatcttga

SEQ ID NO: 439614 - DNA, 201 bp, Homo sapiens
gaaggcttactgtcaattatattaagatgctgtatccctatatcctaaaacagcaggtaatacagcaagactatcatagtcagtggaactatatcattttytcaacatactcatatacattaataattaaacttcttaattttatgggagccaaggcagattgcatacatagcccacaattttatatctcaaatagcattc

SEQ ID NO: 439615 - DNA, 201 bp, Homo sapiens
taaaaggctcattgttaaagagtgccaatattttgtagcttctccaataggtaataaaactataagtacagagtacatcagcagtcctaataaaattggtrggtcttctcagtctgacagggtgagaaataaagcacagaggagctacccataaatgaataacctaatatcaatcacttctctgctatcatgcaaaagctg

SEQ ID NO: 439616 - DNA, 201 bp, Homo sapiens
taccacactggtgcagggagcacacgggaactccctgtaccttttgttgcccaattttgctgtgaacctgaaactgctctaaaaaaataaagtctattaawttaaaaaatccaggttactagtccaacactggcattggactagctttaataatttttcaaaaaaaaattagaggacaggcattcttatgtctccccactt

SEQ ID NO: 439617 - DNA, 201 bp, Homo sapiens
taaataaactgtggtatatccaaataatggaatattattcagcactaaaaaacaaatgagctatcaagccatgaaaagacatggagagatcttaaatgcayatgactagctgaaagatgctcatcttcaaaggctacaaactgtatgattccaactgcatgacattctggaaaagaaaaaactatggatacagtaaaaaga

SEQ ID NO: 439618 - DNA, 201 bp, Homo sapiens
catgtgccccaggggagacctacaaagttgttcactgcatatctatctatatatccatatctatattctgtaagtatcctaaatgcagtagctatttcacycaatatatttttcaaaaacattggaaaagatactaccaattaaataacttcagttaagtaacttcaggccattggcccagaacattgcatttatttttgg

SEQ ID NO: 439619 - DNA, 201 bp, Homo sapiens
tttcttacgtatacacattcatttctggataaattcactgtctactccctggaggaataaatctctataccagctgggatcgcattacctcacctatcaaygagacttcagttctggaaagaacgcatcaggcacaggtacttgatgagtgcaaattcctcaggcttgaggcttgcacaattgggggtgctctttgaaaaa

SEQ ID NO: 439620 - DNA, 201 bp, Homo sapiens
aaaattgatgtctcagggcgagggaacgtcggcctctgtaagcagaggccagccctgccaggtcctgctgcgtgacatccgtgagcattgtgagtgcataygtgcgtgttggttcctttaccgatcctccctggataccagcgcatcagttctcgagggtgcattacgatgttccggcctgaccatgctctgataccagag

SEQ ID NO: 439621 - DNA, 201 bp, Homo sapiens
atatacaaccctcctagattaaatcaagaagaaatagaaaccgtgaacagaccaataacaagtaacaatagtaacaatattgaaacactaacagaaaaaawttgtcaaccaaaaaaaaaaaaaaaaaatccaggaccagatggattcacagctgacattcaaaaaagaattggtaccaatcttactggaccaagctgagaa

SEQ ID NO: 439622 - DNA, 201 bp, Homo sapiens
aggcaagagagtgtatgtagggaaattgccctttagaaaaccatcagatctcgtgggacttattcactgtcatgagaacagcatgggaaaaacccaccccygtgattcaattacctccctcccatgacatgtggagattatgggagctacaattcaagatgagatttgggtggggacatagccaaaccatatcatgctggt

SEQ ID NO: 439623 - DNA, 201 bp, Homo sapiens
tttgaaatatatatttattatagctaatattctgtatatataataatatatatgttcaaatattagaaaactatgcaatgaaagctctgaaattttaaaakcttttcatgagtttgtttgggaaagtaaagactaactgtggtttacattattggaagagaattttttttgtaaattctaattcaagatcaatgaactctg

SEQ ID NO: 439624 - DNA, 201 bp, Homo sapiens
ggggagattagttggtaaagaccggaagcacaggactctatatgctgcattcaataaatgtgtaacttcctttaaaattattttacatgagcaatttctcycaccaaaagtatcacctctgtttttctcccacaagtatttttcatccctcactcatgcatttgttaatccatttgattaattagaatgctctggtaaaaa

SEQ ID NO: 439625 - DNA, 201 bp, Homo sapiens
ccctctccttattcagtgagagatccagcttaaaatgcaaaagggtctggaataagaaaagtcataagaaaagtcaccctgaagggtaaatggcgcctgcmatacaaagctaagctttcttctctcccttttattgatgagaaaagtgaggctctgaaaagttctgagaatcgtccaagagccagcagcaaagtaatgggt

SEQ ID NO: 439626 - DNA, 201 bp, Homo sapiens
ttcaaaggtgtctgaaaatcctttgaagcaaccctctccttattcagtgagagatccagcttaaaatgcaaaagggtctggaataagaaaagtcataagaraagtcaccctgaagggtaaatggcgcctgcaatacaaagctaagctttcttctctcccttttattgatgagaaaagtgaggctctgaaaagttctgagaa

SEQ ID NO: 439627 - DNA, 201 bp, Homo sapiens
gtttgtgattgtgtaacaatcccaaacaattccccatctacaggaaagacagggcatcccgcggcagaccctgtgcgcatgtgcatggcgaaggagttgcstattctcctcccgcaggaagcaggtgatgagccggaaaggaggctgtgctctggcggctcgggtgcgccctaggctgtgagtagggatctcacctgcatg

SEQ ID NO: 439628 - DNA, 201 bp, Homo sapiens
acatactgttccctatcatccagcaatcacactccttggaatttgcccaaatgaattaaaaacttatgtccacatgaaaatctgcacacagatgtttacawcttcattcataattcccaaaacttggaaggaaccaagatgtccttcagtgggtgaatggataaataaactgtggtatatccaaataatggaatattattc

SEQ ID NO: 439629 - DNA, 201 bp, Homo sapiens
gttataataaaaagtctcattggaatatccctctgagtgaaaagttaaaaaagttagagtattgtaataatccatgcacaaagaataatactagtagaatrattctcttcattgaacgcttggtaatcattaagcagtgtgctagttgctttgtatgcattccctgcatgtgaaaaatacatctgtgaaaatgtgcttaag

SEQ ID NO: 439630 - DNA, 201 bp, Homo sapiens
ttgttcacagtcatattccagcattgaaaatggtgccccagtcaattttcaatgcatgaaagaaaagaaacaagagaaggagggaggaaggaagagattasagatcaggagagagctatcaacgcagctatttttgtgagtctggctgaagtaaaggtaataaatatgttacaactttggcctttattatatcagaaattt

SEQ ID NO: 439631 - DNA, 201 bp, Homo sapiens
aacacaaaaattgcctactatttgagatctagttctaaaatcagtacttggaaatggtaaaccaatagtgctaaatgtgattttatgatcaggtgttactycatatgcaggtagatatgcagacctggacgacatgattcaaatcatgctaaagtacaacagagatctactacaatactttgatatttttaaaagtggtct

SEQ ID NO: 439632 - DNA, 201 bp, Homo sapiens
tcatttcccactcccaaaacttaacattctatgataccacaggcctttacttttgttcacagtcatattccagcattgaaaatggtgccccagtcaatttycaatgcatgaaagaaaagaaacaagagaaggagggaggaaggaagagattagagatcaggagagagctatcaacgcagctatttttgtgagtctggctga

SEQ ID NO: 439633 - DNA, 201 bp, Homo sapiens
aagtaagttaaaagacttattcagttatcttccggctttaggttgtcctttgatacatagcgggatcaacgcagatctagataagaccagtcttagagacrttttaatgttaaagcactcttcttccaaaaagaaatttatatcttcagcctacttaggattatataataaattttgtgcagagggaaaatcaggtttaca

SEQ ID NO: 439634 - DNA, 201 bp, Homo sapiens
tctggagttagaagccctggctatgagtccacctccttaaaatctctcatgactgtggttttggcaagctctgaacttccctctctgttcttgagcctccktatctataagatggaaaacataatgtcacattttgtagttattgttagaatcaaaattaattcagctaaaaaatggtagttaatcttaaaacatatctta

SEQ ID NO: 439635 - DNA, 201 bp, Homo sapiens
aaattacctatggggtagagaaggaaaggagaatcaaaggtgacactaagattttgaacctggaacccaatctacagaaaaaggaaagttagcgcaaagcaaaaaaaaaaaaaacaaacaaacaaactaggagtcagagtggggaaaagagagcaaatgtacccacaaaaacccccattttcagcttggcttccaatcctt

SEQ ID NO: 439636 - DNA, 201 bp, Homo sapiens
tgtttgaaataacaagaaaatagcagataaaagaagccattgttctgacatattttaaaattacctatggggtagagaaggaaaggagaatcaaaggtgayactaagattttgaacctggaacccaatctacagaaaaaggaaagttagcgcaaagcaaaaaaaaaaaaaacaaacaaacaaactaggagtcagagtgggg

SEQ ID NO: 439637 - DNA, 201 bp, Homo sapiens
cttccatttgttgctgaatggtaggcaaaaatgtactggctaatcttattttcttttcatgcctagtgtcagggtagcatatcaaattaattttaagctgrcctgatgataagatgtgagtcactgaaagttttggtgccgaattggtttttcaagctagctagtttccaaaggaatctttaccacatttagtggtaaagt

SEQ ID NO: 439638 - DNA, 201 bp, Homo sapiens
cattctcaagagaatccataaggtgtaaggggaaaggaaagcacgttttggggaagaaaagcaacttagtacctgactccctcccatacaaggagtgtagrtctggggcacgcgtggtgcctctgaaaacagagtgtgggttacaattgctggcacccccaagttgggcttccttgactgttgggaccagtgtgaactgag

SEQ ID NO: 439639 - DNA, 201 bp, Homo sapiens
ctgttctatcacggtcttgacctgcatcctggccagccaggtttctgacaaataattgcagccactccaaaattccagacttcatatatcccactctaagrctaccatttcttatctttctagctcaatccctctgcaaccctaaccctgaaactttcgctataaaatcctgaaaatccaattatttcccttctcttccct

SEQ ID NO: 439640 - DNA, 201 bp, Homo sapiens
aaaagtgtcttaagggagctctcgtgccaggaggaaaatcacctgcccttggactgccctccctctattgcaggactcaaggtccagctgagccccagccyactgttcctcctatactcatggccaaccaatacctcagcactctccagaccaaactcaccatgccctttagtcccaataaagtgtaaacactaggtcacc

SEQ ID NO: 439641 - DNA, 201 bp, Homo sapiens
aatggatacactttggaaaccatttaccattgcctagtaaagctgcatatataaaaatgcatactttttaaatttaacttttattttaagttcaagggtayatgtgcaggtttgttacataggtaaacttgtgtcatgggagtctgttgtatagattctttcatcacccaggtattaagcccagtatccattagttatttt

SEQ ID NO: 439642 - DNA, 201 bp, Homo sapiens
attcaagatctcaagcactaccagggcaagaatttagatgctgtatgtacagcatctaatcaatgtctggcttatcataaatgctcaataagtacttgtcraatgaaatatttaataaaacaatgaaaagcaataaatataaattgaacatcactaaattttaatcacaaagacctatcttagaatgaataagtggtggtg

SEQ ID NO: 439643 - DNA, 201 bp, Homo sapiens
gtgtgtggtgtgtgtgtgcatgcacacacacgagtggtgagaagatttaatttattctcttagcaaattacaagtatacaaatatgaagtattgtaactaycatcaccatactgtatattagatctccagaaattattcttcttgcatagctaaaactttgtaccctttgaccaacatcacatgatccagcaatcaatccc

SEQ ID NO: 439644 - DNA, 201 bp, Homo sapiens
gtaatgacccctttttaaataacagctttaagatatcattgacacataaacattgtatatatttagggtatacagcttaatgtcttgatatatgtgtacaytgtgaaatgatcaccacaatcaacctaataaacatgtccattatctcacataattatctctgtgcatgtgtgtggtgtgtgtgtgcatgcacacacacga

SEQ ID NO: 439645 - DNA, 201 bp, Homo sapiens
tcataatttaattagccattcccctagtttggtggaatgtttcatttttctcagtttctgttttctctagctctaacctagagcatctttgtgtataatgrttttgggggggtctattttggatcaaagcacaaacgaattttctatatttgatttgaaggatgtgaacatattactaaattacttttatcacctccatta

SEQ ID NO: 439646 - DNA, 201 bp, Homo sapiens
gctgtatgtacagcatctaatcaatgtctggcttatcataaatgctcaataagtacttgtcgaatgaaatatttaataaaacaatgaaaagcaataaatayaaattgaacatcactaaattttaatcacaaagacctatcttagaatgaataagtggtggtgtatgcgttggctttgaaggcagtttcaaaacccttcagc

SEQ ID NO: 439647 - DNA, 201 bp, Homo sapiens
ggactcctagaggacagcacccttcaggaaaaggtgggttagaaaatcgttcacctgggtgggaggttgcaataatgttagtaacaacattgacagcctgyccctattatgacgcactaccagcggaacagagttccatgtgctccatatattaacccatttcatcttcacaattctttacggtaggtactattattatcc

SEQ ID NO: 439648 - DNA, 201 bp, Homo sapiens
ccacaatatgagagaaaacatttcatatgcttaacaaagaatgaattctcataaagaaaagaacaccatgctagagggaagaatggacaaagacttctacrttcatcaacatgacatactgagtagtttacaagcaacttctctcttaaaatttttgttaaagatgcagaaacattgcagaacaaaataacaaatacctgc

SEQ ID NO: 439649 - DNA, 201 bp, Homo sapiens
tatgttttatacataaaaatatataaatatattatagatatacaccatggaatactactcagccatcaaaaggaatgaaataacggcatttgcagcaaccyggatagaattggagagtattattccaagtgaagtaattcaggaatggaaaaccaaacatcgtatgttatcactcataagtgggagtcaagctatgaggac

SEQ ID NO: 439650 - DNA, 201 bp, Homo sapiens
gagccaaaatggtggcaccttgaccttgaacttcccagtctccagaaccatgagaaataaatgtttaagccacccagtctatggtattgtgttatgacagmcccagcctactaagacactaccctagcaataatacctgatcttgaagacactaactaccctagcaataacacacagttttgaaaagactaccctagcaat

SEQ ID NO: 439651 - DNA, 201 bp, Homo sapiens
aatccctaatgtgaagtattttaagatggggctttgggggtagtaattagggttagaataggtcttgagaatggggcctttaggccaggattagtggctcwacaagaaagagagagagagagagagagagatgctctcctcacaaacatgtatggaggaaagccatgtgaggacacagcaagaaggtggctatctgcaagc

SEQ ID NO: 439652 - DNA, 201 bp, Homo sapiens
ggctggttttgaactgtagcctcaagcaatcctcccacctcagcctcccaaagtgctgggattataggcgtgagccaccacacccagccaggaataatatstttatatagatgtctctgatatctttcccactgaaacaaatgatctgcatttaatgatccagaataactacagacaaaaaaagtctttttttcaagtttt

SEQ ID NO: 439653 - DNA, 201 bp, Homo sapiens
ccatagaaaatacatcctgtataatttgatttatgtaaactctacaaaatgcaaactcattgatagtaaaagaaagcagatcattggctaactggagaagsggggaaggagtgagtgtgagggattaaaaagaggggatgaatatattcattatcttgattgctgtcaaggcttatcacattctataatatatatggttta

SEQ ID NO: 439654 - DNA, 201 bp, Homo sapiens
cagatcatctgaggtcaggagttcgagaccagcctggccaacatggcgaaaccccatctctactgaaaatacaaaatcagttgggcatggtggtgcatgcytgtagtcccagatactcaggggactgaggcaggagaatcccttgaacccgggaggtggaggttgcagtgagctgagatcacgccattgcactccagcctg

SEQ ID NO: 439655 - DNA, 201 bp, Homo sapiens
ggcagtctggaatacagcttggcagaggaaaagataggtagtgtgtaactcactatgtaagtaatccacagtttgatgttagctgaacaaaaatattcttyaggaatatttgtgaatagcatccaatttttaaggtgaggaaatatagaatattttaaaatataaacaatgatttagctttcaaaatttgcatttatattt

SEQ ID NO: 439656 - DNA, 201 bp, Homo sapiens
gggctttgggaatattttaattaaactataaagtcacagataattttctgcatttgtccttgtcacaatcaggaaagcaatggaaacctccagaaaattcsaggaacttgatgttactggatactggtccaacagaatatgtgctggaaatctccaatcctaactcccccaactcttgcctctactgagggtcattttcct

SEQ ID NO: 439657 - DNA, 201 bp, Homo sapiens
catgatgtagaacaactggagatagacacacgagttcaagctccagggaaatagaaagaaaaattatttccaagactgaatggtcagtaagcatttagaakatcatactggaggaagaagacctccctggaaatacaactaatgaagactatttaaacataaaacttggagcattagtggaatgccaggttgataactcca

SEQ ID NO: 439658 - DNA, 201 bp, Homo sapiens
tgatatcatgtaaacaataaagagagaaaagatctcccagggatcctgctggcagttgctgatgccatattctctcctgtattattagaggacagcaggargagagtgatggtttccagtggaatcttgtggccttggcctcccttcccactcttgacctcctccttgtcagaagaaagcttcacagtagtgtaaagtctc

SEQ ID NO: 439659 - DNA, 201 bp, Homo sapiens
ggtgaccgttgctatctaatagtttggggataggaacttgttcattggtaactataattctataaagggaaagaccatgaatctacttttttaatggaaarcaaaatcccttctgatatgttataggcatattgactcttctgggcaggacaagaagagggatgccatttctgaaccaaggaacgttgcactatgtcttcc

SEQ ID NO: 439660 - DNA, 201 bp, Homo sapiens
aaactgagaagctttttaaaggcaaggaaggcatttagactgtattgaaacaccatgagattcctcctttgtatgcaattacaatacatattacagaaaargtaatatttagtgaataaaaatttaagtagtactgaaattgtattattacatacaaagagccattctataatagcaataatatttctagaagataaacta

SEQ ID NO: 439661 - DNA, 201 bp, Homo sapiens
attcatttccacagaagggggtgttggaggacccccatttacatgtctgttttctcccctgtgctcagcctctctctggttccaaggtgtggtttgacctygacacagaagtaaaaggagactgcccggtacttaccacatgccaggtgctctgctaagtacctaaaaaatatatcccctcacacattctcacagatgctt

SEQ ID NO: 439662 - DNA, 201 bp, Homo sapiens
ttttctatttttgttcacaaatacacagaaccttgactgcatgccaccatctacctcagatattcaaaacactacaaggaactcattcttctgcagtataytttgtgataggccctgttttgttgttgttgttcctttgctctttctataataagcagaaatacatgctagagttgcaatacatctaacaaaggtcctaag

SEQ ID NO: 439663 - DNA, 201 bp, Homo sapiens
tcgtgcaattctcacacctgtttcctccccccaaaacaccgaaaaaccttcattcatatggcaaacgatgacactattcacctgcagttgttgcaaatgcrtattttacacattcagactgtgtgctctgtgaggcctgaatagtgtcggttagctcacaactacatacttacgggccaaaacagtgtttggcccaaagga

SEQ ID NO: 439664 - DNA, 201 bp, Homo sapiens
gacagtagagcagactgagacatgcaaaaccaaaacttcctatgctttctaaagggaatagaatactccatactgacaagcaaataaatcgtgatcctgcscctttatatttaaaaagaattgtagtaagaaataaaaaagaaatataatttttacaacttctaccagctcagctcatctatattgctacagggttaagac

SEQ ID NO: 439665 - DNA, 201 bp, Homo sapiens
ccataaactaaaaacagaactaccatatgacccagtaatcccacttctgagtatacatcataaggaactgaaatcaatatgtcaaagagatatctgcactsccatgttcatagcaggattattcactgtagtagtctattttcacactgctataaagaactacctgagactgggtaatttataaagaaaagaggtttaatt

SEQ ID NO: 439666 - DNA, 201 bp, Homo sapiens
aaattgacaaacccttagttagatgaattagaaaaaaaagaaagctttctcaaataaataagatcacaagtgaaagaggagacatcacgaatgatactacraaaatacaaaggatcataagaaaccagtatgaaaaattatatgccaacacactgtataatctagaagaaacggataaattcctagacacatagaactttc

SEQ ID NO: 439667 - DNA, 201 bp, Homo sapiens
actacagctcagcctccacatgggagcaggagtgaagattctcagtctgaggctctagcccgggtgactaaaaaatgttgccgtaatttaggcagagaatsatgatgatgatgataatgatgacgatgataatgatgacaatgataacacttataaccttacatattagctcatttaatcactgaaatagcccaataaatt

SEQ ID NO: 439668 - DNA, 201 bp, Homo sapiens
tataaattttcattttatcttttctaaagcattcttgtttaatagtcatggctgatcttactatatataacttagtgttgcctgaaagatatgaagcgttmtatttttctatttttgttcacaaatacacagaaccttgactgcatgccaccatctacctcagatattcaaaacactacaaggaactcattcttctgcagt

SEQ ID NO: 439669 - DNA, 201 bp, Homo sapiens
cttggtggggagagcctcccggatctctgttctttgtggagagcaccccactgtctctggtcttggtggagagtgcacccccccacccccagtctctggtmttgttggagagtgtccctgggtctctggtcttggtgaagaattcccccaggtctctggtcttggtggagagcacccctgggtctctggtcttggtggaga

SEQ ID NO: 439670 - DNA, 201 bp, Homo sapiens
ctctggtcttggtggagagcaccccagggtctccaaccttggtggagagagccccctggatctgtattcttggtggaaagcaccccactgtctctggtctyggtggagagtgcgcccccccacccccagtctctggtcttggtggagagcgcccccgggtctctggtcttggtagagatcaccccttggtctctgttcttg

SEQ ID NO: 439671 - DNA, 201 bp, Homo sapiens
tgagagctgaaaggaaaactctttcctggatatttcatgtgccagacagtttacgtaacatcagtaaatatgcctttataattatgtgaaatcacattttwaaaaaaatctaacaaattggtagtcagctaaaaaaaaaaacctggtagtgacagaatgaaacatagactttaattctgatttttaatcatttaaaaatta

SEQ ID NO: 439672 - DNA, 201 bp, Homo sapiens
accataaacaccattgtgttcaaatttagtacaaagcatttactccacatactgcttgtaactaaaattcatgaagtagtcataagttgcttaattttttwaaaaaaatttgttaggaaataatttcatatttacaaaaatagttgagataatatccatatcccattcaccctttacccagatttacctactgttaacatt

SEQ ID NO: 439673 - DNA, 201 bp, Homo sapiens
tacataattcagttttatacatgtttctgttcaaagacaccttatttaggccaggcacggtggctcacacctgtaatcccagcactttgggaggccgaggmaggcagatggcttgaggtcaggagttcgagatcaacatggccaacatggtaaaaccttatctctaccaaaaaatacaaaaactatccaggtgttgtggca

SEQ ID NO: 439674 - DNA, 201 bp, Homo sapiens
tccttccaaatgagacatttttagaacagttataacactaagctcagactgcaaagtatcagtggagagcaatggacctttcagaatgaaacacatagaawggaggaaaaaaaagattttctcggtgatctgtcattccttagtaaataaaagtgaaaatatgacaaaattaagaaagattgctgtgtgtcgtcgcaggga

SEQ ID NO: 439675 - DNA, 201 bp, Homo sapiens
ccaacaaacctgaaaaaatgctcatgtcagtaattattagagaaatgcaaatcaaaaccacgagataccatctcataccagtcagaatggctattattaaraagtaaaaaaaaaaaatacatgttggcaagactgcagaaaaaagggaacacttatacactgttggtgagaatgtaaattagttcagccactgtggaaaac

SEQ ID NO: 439676 - DNA, 201 bp, Homo sapiens
gtctttattgctattgaaatcattaagtgtaatgaaccatgttaatgtaacgttgaatttgagatgctaacaggataaattgaagtgatgggaagttttayattttcaattctgagctctctttcctttaatatggcatatttttattttatggaataatatatagagtgaaagctttgcacaggatgaaaaactttgagc

SEQ ID NO: 439677 - DNA, 201 bp, Homo sapiens
cggaagatagagtcaaggacatttctcaggaaatagaactaagcgacagagtaggaaaaaatgaacaaaaagataaagaactaagagaatccactgggagrcattatagatgactggctggaattacatcagaaaaccaagagaaaacagagagaagatactgttaaagaagtaacacataaaaagtttttagtgcagaaa

SEQ ID NO: 439678 - DNA, 201 bp, Homo sapiens
tgttttctgattctattcctcatgttgctgctgccacatcaatgagagtcccactggagggggttaatgaacagacagatctctgaactttccaggagacrcgtgccatgtgattgtatgaagtcatgtaagatttcatcaagtccacaggatacataagaatgaaacaggtttttgaaaaggaaaaacccggaataaatg

SEQ ID NO: 439679 - DNA, 201 bp, Homo sapiens
ttcactccaatgagccaaatggctacaggaaatgttttctgattctattcctcatgttgctgctgccacatcaatgagagtcccactggagggggttaatraacagacagatctctgaactttccaggagacgcgtgccatgtgattgtatgaagtcatgtaagatttcatcaagtccacaggatacataagaatgaaaca

SEQ ID NO: 439680 - DNA, 201 bp, Homo sapiens
gttcctgcatgttttcctccaggaaaaagcaaatgaatgtgtctaatacttagaagagatactgacacactctcctctagatttgtgtaacaaaaataagrcctcaaaatcaatttcatctctgtgacataaaaataaatggtcaaaactttagaaaacagcataacttgaaaactgtaaaaaaaattccttcactccaat

SEQ ID NO: 439681 - DNA, 201 bp, Homo sapiens
caccactgtactccagcctgggcaacagggtgagactctgtctcaaaaataatactaataataataataactggagttgcataattattgtatggataacrtctcttttctcttagaaattatttaaatttaaaaaattaatgatatctagaattttgggttcttgttcctgcatgttttcctccaggaaaaagcaaatga

SEQ ID NO: 439682 - DNA, 201 bp, Homo sapiens
tcgcttgaacctgagaggcagaggttgcagtgagctgagatcacaccactgtactccagcctgggcaacagggtgagactctgtctcaaaaataatactamtaataataataactggagttgcataattattgtatggataacgtctcttttctcttagaaattatttaaatttaaaaaattaatgatatctagaattttg

SEQ ID NO: 439683 - DNA, 201 bp, Homo sapiens
acacacccacaagatggaaagcaaccattcaaacataactgggggccatgcgcagtggctcacacctataattgcagcactttgggaggccaaggtggacrgatcacctgaggtagggagttcaagaccagcctggccttatgatggtgagcacatggtggtgaggcctcatggtcaagacagacatggtgaaaccccgtc

SEQ ID NO: 439684 - DNA, 201 bp, Homo sapiens
atttaaggacggaggcagggcgaggtcaaaactttctgggattatctcaagattcaagttcaatttagacaagaaatgaatagttatacttcttaagactycatattgcatcctgagataatttcaccctgatatgttagttttttcactctgaattttggtgggaagttttacaagaacgtgtccacataagtattacta

SEQ ID NO: 439685 - DNA, 201 bp, Homo sapiens
aaagaattcaatcattgtataaaatattaaatagttatatgtgtttatctaaagaaatgcccaaaaatgctccagaaatgttctacataattagcatttaragaatccaatcactgtataaaatattaaatagttatacatgtttatctaaagaaatgccccccgaaatgctccagaaatgttctacaaaattttgagaaa

SEQ ID NO: 439686 - DNA, 201 bp, Homo sapiens
catgaagaccaaagaccggtctcttgcccagcctttgggactgggcactctgcaaaccagtctgatggctcaacctaactcaagggaatgtatttaaggasggaggcagggcgaggtcaaaactttctgggattatctcaagattcaagttcaatttagacaagaaatgaatagttatacttcttaagacttcatattgca

SEQ ID NO: 439687 - DNA, 201 bp, Homo sapiens
tcccatagcatttaaagaattcaatcattgtataaaatattaaatagttatatgtgtttatctaaagaaatgcccaaaaatgctccagaaatgttctacawaattagcatttagagaatccaatcactgtataaaatattaaatagttatacatgtttatctaaagaaatgccccccgaaatgctccagaaatgttctaca

SEQ ID NO: 439688 - DNA, 201 bp, Homo sapiens
gcagcccaccctcactgctacagaaaccccctagatgaggatgagaccaccccagcccaccctcaccagtacggacaccccagatgaggacgagaccccgmagcccatgctcaccagcatatgaggacacgacgttcatctcctcctgaggctgctgcaacaaggcaccatctttggaagcggagagtagccctcaccaca

SEQ ID NO: 439689 - DNA, 201 bp, Homo sapiens
gctatcttagactttattctaactctgccactcattatttatggtcacatgaaatctcaatggatgacctgttttattaatgaattagcctcaataaggtrtaaagaattaagtcaatggcttagattttgccagttatctggattttgttgttgttgtcacatggacccagtatattggtcatacacattttagtctgtt

SEQ ID NO: 439690 - DNA, 201 bp, Homo sapiens
atcctcaggacatgacatgtatggatgttctgtttagtagattagaagctcctttcacgttacccaattcaaacatttctcaggtcccaggtcagaacttragagccttcacgaagggaaaggaatacatagtcctcttaccatgtgaggtgctgagccgctatctcggatggcgagaataaagttcctggtggcccaggc

SEQ ID NO: 439691 - DNA, 201 bp, Homo sapiens
acaaaggaatttataaccagccaatctgcacttcaagaaatatgaaaggaagttatttaaggagaaggaaaatgacaccagatgaaagtctggagctacayaaaggaatgaagagcatcagaaatgtcaactatatgggaaaatagaaaaattttttcttattgtttaagtctccaaaagataattgttaaaagtaaaagt

SEQ ID NO: 439692 - DNA, 201 bp, Homo sapiens
tgagggttgtggccaagactccaggatgggaagtgctcaactcggtgatggccagcacggacatcccacagatgaggatgacaccccgcagcccaccctcwctgctacagaaaccccctagatgaggatgagaccaccccagcccaccctcaccagtacggacaccccagatgaggacgagaccccgcagcccatgctcac

SEQ ID NO: 439693 - DNA, 201 bp, Homo sapiens
aatatatgaagaaaaactaatagaattgcaaaaagaattaaaaaatctataactatagtcagatatttcaatgccattctctcaataactgatagaacaartatacaaaaaaatcagtaaacatatagaaaaattggacattatctatcaattgatctaaatgatattgtcaacttattgacctaaattgacatttataga

SEQ ID NO: 439694 - DNA, 201 bp, Homo sapiens
tcttaggttggcaccacgtgctgaaagagccgctggacccaaatggacttttgtctgtatgtgagggttgtggccaagactccaggatgggaagtgctcawctcggtgatggccagcacggacatcccacagatgaggatgacaccccgcagcccaccctcactgctacagaaaccccctagatgaggatgagaccacccc

SEQ ID NO: 439695 - DNA, 201 bp, Homo sapiens
tacgaaaatagaacatattcgtgttcataagactcaataaatgtaaaagaattttggataccccatttaccctgatgtgattattacacattgtatgcccrtatcaaaatatctcatgtaacccatatatatacatatatatatatgggatatatatatatatatgggtttatatatatgtatgttttatattatatataa

SEQ ID NO: 439696 - DNA, 201 bp, Homo sapiens
gaggcctcatgtcttaggttggcaccacgtgctgaaagagccgctggacccaaatggacttttgtctgtatgtgagggttgtggccaagactccaggatgsgaagtgctcaactcggtgatggccagcacggacatcccacagatgaggatgacaccccgcagcccaccctcactgctacagaaaccccctagatgaggat

SEQ ID NO: 439697 - DNA, 201 bp, Homo sapiens
ggcagcagttggagatgaaatgactgtgccttatctccaagcagacaagtccaaggtctctgaggattgccaagccccagcagcagcccagcgatcctacrgatgcaagaggagggcagagactagagtttcctggagctccagcaggaggcctcatgtcttaggttggcaccacgtgctgaaagagccgctggacccaaa

SEQ ID NO: 439698 - DNA, 201 bp, Homo sapiens
atcagcctaagagctgaaggatctgtaacctctgtcctgggaaaacccagggagagagagtccaaatgtcctgccagccagcagggcttggcagcagttgkagatgaaatgactgtgccttatctccaagcagacaagtccaaggtctctgaggattgccaagccccagcagcagcccagcgatcctacagatgcaagagg

SEQ ID NO: 439699 - DNA, 201 bp, Homo sapiens
tatataacatatataatgtatataacatataaatgttatacacagaacatgtataactgttatgaacaatgttatacacataacatgtataactgttatayatgttatatatatacatgttatatatataacacgtataactacgttgtatatatataacacgtataactatgttgtatatatataacacgtataactatg

SEQ ID NO: 439700 - DNA, 201 bp, Homo sapiens
ctgggtctggttgcctcagggaagggtttttcaggagaaaattaagagaaaagagtcctgccttttaaattcctggctattgggttttccaaagaggaagrttgcctaatgggagccagggcctgtatgaaaatgactgctatggaaatgcttctgacccctgcagacccaggcaggggaggaccaagtgtgtcttcagaa

SEQ ID NO: 439701 - DNA, 201 bp, Homo sapiens
tgaccttccttcctatttgggcagcagctgggtctggttgcctcagggaagggtttttcaggagaaaattaagagaaaagagtcctgccttttaaattccyggctattgggttttccaaagaggaaggttgcctaatgggagccagggcctgtatgaaaatgactgctatggaaatgcttctgacccctgcagacccaggc

SEQ ID NO: 439702 - DNA, 201 bp, Homo sapiens
tgaccaccttgatgaataacagcccaaaatatgcatcaaaagcctgagttataatggcttactgggtaagatgaatacttgatccaacccagttttctccstctcatagtgtcaggattgtgttgctaaaataatgctcattttttgacaattttacacttctctgtcacagagggattgagcctaatgccagaaattagc

SEQ ID NO: 439703 - DNA, 201 bp, Homo sapiens
cagcagtcatcctagttattaaaccttgatgtgcttttcaccaatataagaccactgtctggtcaagtatgtgtcctcacaactccctcaatgtcgcatasagatttttattttatttttatttttattttaaagttccaggatacatgtgcagaacaagcaggtttgttatataggtatatgtgtgtcatggtgatttgc

SEQ ID NO: 439704 - DNA, 201 bp, Homo sapiens
tcttttttgctttaacttgtttttgaggaccagtagaaaggtagaaagaacccatgggaagggttcatcacttgagtctcaaaactaggctgcattttatsttcaataacaaatggcaattgatggcaatagtctctcaatgtaatacattttaatctcccagtttaactggcctgagttcttaataactagtcatttctt

SEQ ID NO: 439705 - DNA, 201 bp, Homo sapiens
atggttccatgcatgatttgtttccatggtctacagccccccaaagaggtgccttttatctgcttgtctggttttttcaggtggcaaaccaaatagctagrccattggcaacagcctaagagttgggaagaatgtaacagggattaccaagggaagtagcagttatagctgagaatggccttgagttctgcccactgggtg

SEQ ID NO: 439706 - DNA, 201 bp, Homo sapiens
gcgtgtgctcatgagaaatgttcaaagcggcacagcaaacatagaatctagggtggactttgagcaggcattcgagacacctgctgtgtcctgtgctttgrtggcttaaggaataagccactagtaatagtgatgaagtggggtttcacggcaacttttgaagagcaaggggaggcactgcggtagtgctagtcctgacta

SEQ ID NO: 439707 - DNA, 201 bp, Homo sapiens
tggggagcatcacagtgtggggagcacagtggacagtgtggggagcacagtgggcagtgtggggagcatggcagtcagcatgaggagcacggcagtcagcrtgaggagcacggcagtgtggggggcatcacagtgtggggagcacagtgggcagtgtggggagcatggcagtcagcatgaggagcacggcagtcagtgtgg

SEQ ID NO: 439708 - DNA, 201 bp, Homo sapiens
tgaggctgaggtggttcttctccggggtgtgggccgaggctcttgaggctgaggtggttcttctctggggtgtgggccgaggctcctgaggctgaggtggytctctggggtgtgggccgaggctcctgaggctgaggtggttcttctccctccactggaataaaattagtgtgccctatgtcagtggctggagctttactt

SEQ ID NO: 439709 - DNA, 201 bp, Homo sapiens
tatggtcattatctttttaagcatgagttaatgatccagttggaatgattagccaactattaagcaagtccaagtggaaagagcatgcatagtgcgatcawgtggatctaatttgaatctctgttctgctctttttagctggggaagattacttaatcattgtaagctttggtcatgtcatctataagaatgggggtgcaa

SEQ ID NO: 439710 - DNA, 201 bp, Homo sapiens
catgttgtgatgggggatgtgctgcaatgcccagtatgaaggtaaactcaggcagcctggtggttatgtggccagtgccatctggatcagcagctcattcyagttggtctcatcgaaacaggtccacactgtgggcttgtacctgagtgacccacatggttccatgcatgatttgtttccatggtctacagccccccaaag

SEQ ID NO: 439711 - DNA, 201 bp, Homo sapiens
caaaacgtgaagacatttctttcattaactaaatgattaactgattcattcatttattcagtgactactttttgggtgtatatcatgatcaaggcactgtrggcaatgccaagataattaaggtatagttgctcttttcttaatcatttctgctctttttttaacctgaaaaagatagttttgaaattactctgttgtttg

SEQ ID NO: 439712 - DNA, 201 bp, Homo sapiens
catgtccaggaatgatcaggaaaggttatcaaattttcaaaatagatctagatgattccttgccccttcattctggtcattactcaagaagcagccaagaraagatggtccctttctggaacagctacattcagtgaacaacgtgtcttagtcaagcgtgtgaccaggaggagaccaaagtcagatgtctttgagtcagtt

SEQ ID NO: 439713 - DNA, 201 bp, Homo sapiens
ccacagttacatgcaacacacaggcaccagtattactttgctgtcaactagagaggcctagaatgtgttatatagatcaacctaagtaacattttaatgaraagttcttaagattcttacctccaaagaaatgtgtacaatattctgtcgttctgaaaaatttgccttcactcagttagagcagactgagtaaaaaatgtt

SEQ ID NO: 439714 - DNA, 201 bp, Homo sapiens
gtaaaaagtattgcaggttttattttcaaattgtacaggtcttaaaccaacatatttggagagattaaacaaacaactcaacactgacttgtttagtgttmggcattactgtcaagatcgggctgggtgaagaaggtatgctttcataagaaaccgttaaaacatacaaagaatttaagtaatagccccatttgatacaaa

SEQ ID NO: 439715 - DNA, 201 bp, Homo sapiens
tattctgtcgttctgaaaaatttgccttcactcagttagagcagactgagtaaaaaatgttctcaatacttttaatattatagccagggtgatttcatttmatttacaacttgctgcagtgaagaaagcaggttccctaactctttaaacacattattttatgcataatagggtaattatattagatgggtacactatcag

SEQ ID NO: 439716 - DNA, 201 bp, Homo sapiens
atcctgtgagtaataatcagataactccaattaagactgttggatgctctctgtgcagttattgctaaggtttcagacataagtaaattgctattcatatstaaaaagtattgcaggttttattttcaaattgtacaggtcttaaaccaacatatttggagagattaaacaaacaactcaacactgacttgtttagtgtta

SEQ ID NO: 439717 - DNA, 201 bp, Homo sapiens
ctgtttaccggctgccactcccacttcattataaaaaactcttggctcaccctggttcttatgggacgttctctggagctaggactgggagatacataaayatgaaagttgtgtgtacagtggagagagcaggtttattggatcctagagcactgatctccccgtggccagtagcaccactcaaaagctctttggagaatt

SEQ ID NO: 439718 - DNA, 201 bp, Homo sapiens
gtaagtcagcacagtccgcagtaagcgtgaaccacaaaatgtgtcattctaaactcatactcaatgtctttccaaatcaatgttcccccagctagatcccsaagctgccaagccccactccaattcctctaaacagcaggagaatgtgctggagggaagtcagggtagaaagaggcagcagtaacaaaggactgtggccaa

SEQ ID NO: 439719 - DNA, 201 bp, Homo sapiens
ggacgttctctggagctaggactgggagatacataaatatgaaagttgtgtgtacagtggagagagcaggtttattggatcctagagcactgatctccccrtggccagtagcaccactcaaaagctctttggagaattgtggtgtctgctattctcctcctggagacccatttcctccttgttcagatttcattaactctt

SEQ ID NO: 439720 - DNA, 201 bp, Homo sapiens
aaccttcctatcatagttttcccaggtagcctatacattttataattcttacacatccaagattttaccacggatttgcctgtgactccagacatttccartcttgtttctcctctaccaccctcgtgggtctgctgccagcaccgtgggatgcgttcttacggagaaattatccctggaccttcacataataactcctgg

SEQ ID NO: 439721 - DNA, 201 bp, Homo sapiens
gagagagcaggtttattggatcctagagcactgatctccccgtggccagtagcaccactcaaaagctctttggagaattgtggtgtctgctattctcctcstggagacccatttcctccttgttcagatttcattaactctttggacagtgcatcaaataggttattgaacagttcacaacccacccatttcagagtcttc

SEQ ID NO: 439722 - DNA, 201 bp, Homo sapiens
taatataccctgcattattgatgagaacacaaccttcctatcatagttttcccaggtagcctatacattttataattcttacacatccaagattttaccayggatttgcctgtgactccagacatttccaatcttgtttctcctctaccaccctcgtgggtctgctgccagcaccgtgggatgcgttcttacggagaaatt

SEQ ID NO: 439723 - DNA, 201 bp, Homo sapiens
gtgccctgcctcccgcagaagcaccagccttgacgacgcatcccagaatggtccagggctaaaccctttctgcagcctgaagcttataggaccagaagtcygtgcatgccaacaaactatacaccccactcactaatacagcactggtgctcagcgtgaaatgaagaaattccctgataacagatacacagaatagttgaa

SEQ ID NO: 439724 - DNA, 201 bp, Homo sapiens
atttacacagggctgtgacagccaaagaattgcaaaacccctcagcacacaaaaagaagtatctagagacttactcaagccctcatctcccagagttggtrtactacaatataaccttgatagctctttgtcctaggatataaccaccctcggaattaaacaggtatttatatttaacacctggtgaaatttaaactcact

SEQ ID NO: 439725 - DNA, 201 bp, Homo sapiens
tttccccccgtggtttctggttgttaccaagcctcatctatgccagctctcctgtcttcacactgcctggtgagagtgtactgcatctccctctaacctcytctttctcccctggcacaccacctggccactaccagcaaattgtcattaattttcaaaaatttacacagggctgtgacagccaaagaattgcaaaacccc

SEQ ID NO: 439726 - DNA, 201 bp, Homo sapiens
atagactcatttttgaagaacatatttgtgctgttaagtaaaatcacattttatgatgtaaaataatatcattaaaaaagagaaagttcaatcctagcackttgggaggccaagatgggcggatcatgaggtcaggagattgagaccatcccggctaacatggtgaaaccccgtctctacaaaaaatacaaaaaaattagc

SEQ ID NO: 439727 - DNA, 201 bp, Homo sapiens
tttgcatttatatttcattctgattttaatttatgaacgttttgtttgatagactcatttttgaagaacatatttgtgctgttaagtaaaatcacattttrtgatgtaaaataatatcattaaaaaagagaaagttcaatcctagcacgttgggaggccaagatgggcggatcatgaggtcaggagattgagaccatcccg

SEQ ID NO: 439728 - DNA, 201 bp, Homo sapiens
ttttctgaaggtaaaaccagatgtttactttcataataacctggagaagtgatagagacccaatttatttggtgttctaacacagtggaagagagaaactytctgaggagtatagaaacagacatacaacccatcagagattcattcacctacttaattaattatggcagtctggaatacagcttggcagaggaaaagata

SEQ ID NO: 439729 - DNA, 201 bp, Homo sapiens
ccttgaagatggcagtgtcataagtgtcataagtctggtccttaagattcagctacataaattctgaaagatagagggaactctcaaatcactagtttgctatgaggacagacgtaccctgaagactttaggacttgctttcaaaatatgttttatagcttccatagtatttatgagtctatttcaagtgtaaacgcattt

SEQ ID NO: 439730 - DNA, 201 bp, Homo sapiens
atgtatcttgttttgttttggggaaaattgctaatatctacacaaatagaaaggtttaatataatggtttttgtggttttttttcaattcaaatgaaaatrttggcatttatttctcaactatctatgttcaactatctgaaggtataaacaatacagcttagcagtagtgagcacaattatagcaatatctcaaagctac

SEQ ID NO: 439731 - DNA, 201 bp, Homo sapiens
aaattttaggctaatgtacacatgcatatctttaattttgaacaaccaatgctattttctgaaggtaaaaccagatgtttactttcataataacctggagwagtgatagagacccaatttatttggtgttctaacacagtggaagagagaaactttctgaggagtatagaaacagacatacaacccatcagagattcattc

SEQ ID NO: 439732 - DNA, 201 bp, Homo sapiens
gatttttttgtttgacaatattcttgcagaaggagttatataacaatcccattataatttcataaaataaattttaggctaatgtacacatgcatatcttkaattttgaacaaccaatgctattttctgaaggtaaaaccagatgtttactttcataataacctggagaagtgatagagacccaatttatttggtgttcta

SEQ ID NO: 439733 - DNA, 201 bp, Homo sapiens
tgagaaagaatgtggccactagatctgtgcacaggacactgggccagctccattcatcattgcgtctcttgactgacactgactcttgtgagatcttgctwtgtttgaggataagaaacaattaaaaatgccacctggagccaataaaaaagaactacaaacaaggagaagatagcatctggagtagactcagagacagca

SEQ ID NO: 439734 - DNA, 201 bp, Homo sapiens
acaaacccacaaaatattttcttaatcaaaaagatattgtttttctagaagcatacagtactattttgtctccatgaatttgttcatgctatgttcttcgwctaaaatatgcctcgtaaactgctacttgttacaactttatattctagaaagctcatcccaaatggtatttcttttggtagtgggagtggtctacctcta

SEQ ID NO: 439735 - DNA, 201 bp, Homo sapiens
gacagatacagatttttttgtttgacaatattcttgcagaaggagttatataacaatcccattataatttcataaaataaattttaggctaatgtacacaygcatatctttaattttgaacaaccaatgctattttctgaaggtaaaaccagatgtttactttcataataacctggagaagtgatagagacccaatttatt

SEQ ID NO: 439736 - DNA, 201 bp, Homo sapiens
agtaatcctatttacaatagttatacaaaaataacataattaggaataaatttaaccaggaaggtgaatgatctctatgatgaaaactacaaaatactggyggaagaaattgaagaagaccccactcccccaaaaaaagaaaagatatctcatgcttatgaatgggatgaattcatgttgtaaaaatgatcatacaaatca

SEQ ID NO: 439737 - DNA, 201 bp, Homo sapiens
aatgttcctctttacagagagcatgatcttatatatagaaaaacattaaaactctaccaaaaaattcatagaactgataagggaaatcagtaaaggcacasgatgcaaatccacatacaaacaacagtagtatttctatacacttaaaaacaaactaactgaaaaagaaaccaagaaagtaatcctatttacaatagttat

SEQ ID NO: 439738 - DNA, 201 bp, Homo sapiens
actgaagaggagagaattctcccaaacacattctatgaggccagcattaccctcataccaaaaccagacaaagacaacaaataaaggaaactacaagccartattagcaatgaacatagggaaattcatcaataaattcatcaacaaaatactggcaaatcaaattcaacagcacatgaaaaagatagtacaccacgatcc

SEQ ID NO: 439739 - DNA, 201 bp, Homo sapiens
acctatacagatttcagtacagacagcagttatgtaccttattaaattaatcttgcaaatattttgatgcatctcttgtgtactagccaggacattagatkctgtggggatgtattactttctaacattatgttctaagtgacatgagagaggagctataaagttatgtcggggagggaaggcagagtggggataggactg

SEQ ID NO: 439740 - DNA, 201 bp, Homo sapiens
gacctgggaccaaaatgcccagtgtccagtgagaaggccgctctgttctagctgggtggactgggaagaactctcaggaaaatccagttccatctagagcycagagatcccacctctgaccaaaatggagcaagagcgacctgattaattgttatgcctgaaacaactaaaaaacaggtaaaagagataaaatagtttctc

SEQ ID NO: 439741 - DNA, 201 bp, Homo sapiens
attatatttctattgaacagtgctgctcttcaaggttcatcaggattgtctaagctccacccatgccttttcagttattctgacaaatgacatcagtctaracctttcttttgaacttcaaatcaacttattccttttctactctggcactttcaaactcagtgtatttcaaattcaactcatttatctcgttctcatgag

SEQ ID NO: 439742 - DNA, 201 bp, Homo sapiens
aaaatggatatggagacagctgtcccctgactacaaggcagaagtccagagtgctgaccctactgaaccctgagagccctacttcctgcagaaggtgttgwattttccagcccagaagcaggaccacttcctaagaatgtaaatctcccaaaattttagacagagttagagattggtggtggcaaaatgcactaaggatgg

SEQ ID NO: 439743 - DNA, 201 bp, Homo sapiens
aattagaactgatgagaaacttccatctccaaaactgaaattttcattgaagaagaaatattccctatagagttatttacaatgaatacatcttttaaatytgtatttacattggaactaattcattagattacaaaattgaaagtagtaagtaaactatttagaaaataaatgtactattctgttccttacatatagtct

SEQ ID NO: 439744 - DNA, 201 bp, Homo sapiens
ttaactctcacaatatttcagtgagaaagacagatacagatttttttgtttgacaatattcttgcagaaggagttatataacaatcccattataatttcawaaaataaattttaggctaatgtacacatgcatatctttaattttgaacaaccaatgctattttctgaaggtaaaaccagatgtttactttcataataacc

SEQ ID NO: 439745 - DNA, 201 bp, Homo sapiens
taccagaggttggaaagagtggggagtagggggagaaaataaaaacatacatacatatagccatatacaatatgatagaagaataaggcctggagtttgayagatctgtagggtgactatagcatacaacgatctattgcatatttcaaaatagctaagaagagaataattcaaatctttctagcataaagaaaagacaaa

SEQ ID NO: 439746 - DNA, 201 bp, Homo sapiens
aataaatgtgatacatcatattaacagtaccaagaaaaaaaccatgtagatactgaaaaagcatttgacaaaattcaagattcctttatgataaaaacttycaacacactggtatagaaaaataaacttaaaaataacaaaggccacatatgaaagactcacagctaatataatactgaacagggaaaattgaaagccttt

SEQ ID NO: 439747 - DNA, 201 bp, Homo sapiens
ccaattatactcaaactcttcaaaaaaaaattgtgtgtttttagaagctttattgaagtaaaattaatattgaaaaatgtactattaaagtgtacaatttrataagttttgacagatgtgtacacccatgaaacactatcacttcagtgaagaacatacccatcaaccccaaaagttttctcatgcttctttacgattcct

SEQ ID NO: 439748 - DNA, 201 bp, Homo sapiens
aatatgaagtattgtaactaccatcaccatactgtatattagatctccagaaattattcttcttgcatagctaaaactttgtaccctttgaccaacatcayatgatccagcaatcaatcccaattctgggtatatattcaaaggaattgaaatcaggatcacgaagagatatctatcctcccatgttcattgtggcattat

SEQ ID NO: 439749 - DNA, 201 bp, Homo sapiens
aagaaccaaacaaaaatcttgtaactgaaacatataatgagggaaataaaaaaaaatacaattgagaacttcaacaacagactacatcaagcaggaataaraagaatttctcaactcaaagacaggtctttaaaattacgtagtcaaaaaaaaaaaaaaaaagaataaaacagaatgaagagagcctatccgacacatggg

SEQ ID NO: 439750 - DNA, 201 bp, Homo sapiens
tctgggtttgatttgcttcaataattttagaaaatataattaccagtatgaactaatttactgtatggttcttaatttaagaaaaagactgacagcaggcrctaaataaattttgcaaattagcaacttaaatgaaattatgaatttaaaatattgcttaaatcgaagtaaaataaaagcccagcaccaaaggcagtgttc

SEQ ID NO: 439751 - DNA, 201 bp, Homo sapiens
tcataatgtgatttcttaattttttaaaaaacactaaaaattatttaaaaacaggtgtaaaatatgtaccattgcaaaatcaaaacttctttcaggatcawagttgttcagagtttttatgtttcatctaatgcaatttcccttagagacatttgccagtctttcagttccacatcctaggagagaggcccagaaaccatg

SEQ ID NO: 439752 - DNA, 201 bp, Homo sapiens
aaacgggtttcgttaagagtaattagtctctgctagagtccaccaatctcttaaccaaatctccattttactcctctttttacatgtagattatagtcagycttcacagaagacccacaatcccacccaggcactgtttatacctcaaagctgaggctctctctgagccatctgtaatcaatcctcttcattagttcagat

SEQ ID NO: 439753 - DNA, 201 bp, Homo sapiens
gttagtcaggatggtctcgatctcctgacctcacgatccacccgtctcggcctcccaaagtgctgggattataggcgtgagccaccgtgcccagcctgttygactacttttaataattactgcatcatatcagtaaaagttaatacataaaaatcaaaatgttcaaagaaaaaatggaaacaaaaacttagaaaaagataa

SEQ ID NO: 439754 - DNA, 201 bp, Homo sapiens
gtagtatattataattacatgaataatcattaagtgggtacccaaatatttacctattcagtaaatcttcctttgtcttcctagttggagtagggaagccrgagggagtgcctcccagacaggaaggggcagcagaggcaggagagacagggtgagtggagagcaagcggccagcagtacagtcccagaccctcccctcca

SEQ ID NO: 439755 - DNA, 201 bp, Homo sapiens
aatacttattgagaggtgctcaatcaatatgatttacactgcagcacagggtttggcttgggcttcctcaggggtgggatgtgtgtgtttttgtgtgtgcrtataaacctcctaaaaattgggagcaaaattttgtggcatataaaccttcctggagagaaagtccctagctttcttgagattttctaaggaaagggactc

SEQ ID NO: 439756 - DNA, 201 bp, Homo sapiens
ccatccatctctagacccccccaaggctttctgtgtcgctgccccgggcgggtgtatccctcacagcacctcacgactgtgcctcaaagcctgcatcaatraatgaaaacggtctgcaccgctgcgggcgtgacgctcccggacgcgagtgggtgtggaattgctttcctcgggccaccgtgggggcacctctggcctccc

SEQ ID NO: 439757 - DNA, 201 bp, Homo sapiens
ccgagggtccccgggcacccaggtcggtcaagtctcggccctctcaggcccgcgtctctgcctggaggagactgtgtagggtccggcgtggggatcagccrggatgggctgcgcgtctccagcctctgcacacacattggcgggtggggtgcagggagggagaggcaggggagagagaatggcatctcgcgtggagggctg

SEQ ID NO: 439758 - DNA, 201 bp, Homo sapiens
ccgccgccggagaaggagcagccactgctgcctccaccgccctgtccagcgcagccgctgggcaggccccgatccccttcgccccccgagaaggctcagcygccttccccgcccacggcctcggccctggattatcccagcgagaacctggccttcatcgacgagtcctcggatacgcagagcgagcgcggctgcccgctg

SEQ ID NO: 439759 - DNA, 201 bp, Homo sapiens
caccactgcaccccagccgggatgacagagctagacttgtctcaaaaaaagaagaaaaaaaaaaaaaaaaaaaaagcatgtcccaaatattgcacgagatrtatttatactaaaattttatttgttgtttctctgaaattcacatttagccaggcgatttgtattttgccaccctgctgggagcacccagtggaggagccc

SEQ ID NO: 439760 - DNA, 201 bp, Homo sapiens
ggggggtcgcggagggggtctagacctctagtcgagggctgctttccctctccgtgcagatgggcggcctcacggctcaggctgccagctggactggcacrgtgacagcgcgcgtgacccagcgagccgggcccgccgccccgccgccggagaaggagcagccactgctgcctccaccgccctgtccagcgcagccgctgg

SEQ ID NO: 439761 - DNA, 201 bp, Homo sapiens
cccccaccaagctccacacatttcctcgctcgccccgcttccccctaggcaggcttaggctctctttcggcctcccactcgccttcctttcccttctcggwgccctcctctctttcctcacccggtagtcccagacaggggctgagggccgggcagcggaggtaaggggaaggctggagataggagggggactgggtgtgt

SEQ ID NO: 439762 - DNA, 201 bp, Homo sapiens
cccatcccgcagaagtggcacgtgccaccggagctagtaagagtgctgtcggcgatgcttttcctgctgatcggctgcctgctctttgtcctcacgcccaygttcgtgttctgctatatggaggactggagcaagctggaggccatctactttgtcatagtgacgcttaccaccgtgggctttggcgactatgtggccggt

SEQ ID NO: 439763 - DNA, 201 bp, Homo sapiens
aggctcctgggggcgggagtggggagtatgggagtggggattgttggtgtctcctgggtcctgcctactgccccatcccgcagaagtggcacgtgccaccrgagctagtaagagtgctgtcggcgatgcttttcctgctgatcggctgcctgctctttgtcctcacgcccacgttcgtgttctgctatatggaggactgga

SEQ ID NO: 439764 - DNA, 201 bp, Homo sapiens
ggcatcggtcacattgaagccatcttcttggtgagctgctccatgccctgcctgcccttgtgctgggctccggctacccttccccatgtccctggcacatragcgcgcccccaaagaccataagcctctcccacaggctcctgggggcgggagtggggagtatgggagtggggattgttggtgtctcctgggtcctgccta

SEQ ID NO: 439765 - DNA, 201 bp, Homo sapiens
gcatgctcacacatatattaaatgcacccctcgcatgtgtcacattcttgcacgggagcgccccttcttgcatgcttttatcttgcacactttcaactcakgcacaccactcattttcctgcctgcactcacacactcaagcacatacccattgccctagggagggcaggtcctctccaggaactgggaggggggcactga

SEQ ID NO: 439766 - DNA, 201 bp, Homo sapiens
gggaccggctgggctcctccctgcgccatggcatcggtcacattgaagccatcttcttggtgagctgctccatgccctgcctgcccttgtgctgggctccrgctacccttccccatgtccctggcacatgagcgcgcccccaaagaccataagcctctcccacaggctcctgggggcgggagtggggagtatgggagtggg

SEQ ID NO: 439767 - DNA, 201 bp, Homo sapiens
gaccatcatcaccaccatcggtgggggaggggattggcatgtggggggcggcaaggagcttcctcatgggggaaggtgcagggagacggaggggtcccagrtggcccctagacttcctgcatcgcccctctgcccaggctatggcaatgtggccctgcgcacagatgccgggcgcctcttctgcatcttttatgcgctggt

SEQ ID NO: 439768 - DNA, 201 bp, Homo sapiens
gccctcctctctttcctcacccggtagtcccagacaggggctgagggccgggcagcggaggtaaggggaaggctggagataggagggggactgggtgtgtmcagccagagggatgtctgtggacagtgcagctgggggctttatggatctttgggtgtgtaggggatagaggaggagggtgtgggtgtcaggccagctcag

SEQ ID NO: 439769 - DNA, 201 bp, Homo sapiens
ggcttacttcgcctcagtgctcaccaccatcgggaactggctgcgagtagtgtcccgccgcactcgggcagaggtaggcgccccagggttggcactgtgcstgcgcactgtggtgcaaatgtgctgttccctagcagggggttgatcaggctgtctcctatccagggcgtgggctcctgaggcaggggctgagtgagcctc

SEQ ID NO: 439770 - DNA, 201 bp, Homo sapiens
gagcctggcacaggactgtgcacctataatgtctccttcagggtgtgatggtggtgggatgagggggaaatgaatgaatgaatgaatgaatggccatagcrcatgggctatgttacatttgcacaggtctcactcaccggtctagattgccacacaaaatccaagactctcatttaaacatgaattacagttaaactgcaa

SEQ ID NO: 439771 - DNA, 201 bp, Homo sapiens
cagatttcttggtcccttctccactcccactgcttcacttgactagccttaaaataataataatacttattgagaggtgctcaatcaatatgatttacacwgcagcacagggtttggcttgggcttcctcaggggtgggatgtgtgtgtttttgtgtgtgcgtataaacctcctaaaaattgggagcaaaattttgtggca

SEQ ID NO: 439772 - DNA, 201 bp, Homo sapiens
acgctgtcccaggcacagctgaacatgccgctgtccgaggtctgcgagggcttcgacgaggagggccgcaacattagcaagacccgcgggtggcacagccyggggcggggctcgttggacgaggggtacaaggccagccacaagccggaggaactggacgagcacgcgctggtggagctggagttgcaccgcggcagctcc

SEQ ID NO: 439773 - DNA, 201 bp, Homo sapiens
ggctgcgcgtctccagcctctgcacacacattggcgggtggggtgcagggagggagaggcaggggagagagaatggcatctcgcgtggagggctgtcgttygaactctcccagcgcgagagaccctgccccgcccccttcctggagcgttgactcccttctcgtctcgaggcctgtggcgtctgggtccgttggggcagaa

SEQ ID NO: 439774 - DNA, 201 bp, Homo sapiens
ggccccaccgggtttcccccacccctttgtcccgcggagcccctccctcatgagtgctgagcccaagggccaggctgtccccaggggcggagagttgcggrcccttcccgatccggtaatgggcctgggagatgccagattagcgtggtgcctgtccggagagacgggccagctgatgcccaggtcggggccctgccgctg

SEQ ID NO: 439775 - DNA, 201 bp, Homo sapiens
gcagtctacacttcaggcatccatcttccacctgaacaaaaattagaactggctaagagaaaccatacacttaaggctagcagggtcaagatcacgcgtgkaaacgtaaaagcagcaactgttacttatgcagctcctacaccaaaggtatcaaatttaagggcaggaaaaggctgcaaagcgtttaatttacgccttttt

SEQ ID NO: 439776 - DNA, 201 bp, Homo sapiens
gtcgactcaccagactcagggtggccgcgttcccccgcccggcgcccctgcgtgagagaccacgcggccacagccaggcgccatcccagaggacccagagmaaaaaccacagcaagctcgcaccaaaaggaagaaaggacaggcttccgtcccacaatgcttttctacaagtggaaggacccactgtccgagagcgcgagg

SEQ ID NO: 439777 - DNA, 201 bp, Homo sapiens
tatgctcccagatggtattcagctagcagcagtctacacttcaggcatccatcttccacctgaacaaaaattagaactggctaagagaaaccatacacttmaggctagcagggtcaagatcacgcgtggaaacgtaaaagcagcaactgttacttatgcagctcctacaccaaaggtatcaaatttaagggcaggaaaagg

SEQ ID NO: 439778 - DNA, 201 bp, Homo sapiens
gcccggcgcccctgcgtgagagaccacgcggccacagccaggcgccatcccagaggacccagagcaaaaaccacagcaagctcgcaccaaaaggaagaaargacaggcttccgtcccacaatgcttttctacaagtggaaggacccactgtccgagagcgcgaggggggagcgggctgtaccatcggccgctgcgctatgg

SEQ ID NO: 439779 - DNA, 201 bp, Homo sapiens
tttttgacaccacattcactagtttccaaagtgaatgggcaacacaaaggctgacactgcgtgaggtaggctttatggcataaggttgctgactggctgasagtaatgccgattacagcctaaaaacggacaatacatttcagagaaattttctcacgatttaaaatccgacttaataatgaaaagtgaaatgcgatgcgt

SEQ ID NO: 439780 - DNA, 201 bp, Homo sapiens
catacgagtcatgtctctgcgcttgattaggaacatggagaggttctccattctctgctgaaaatcctcccattctagtgtgccttcaatgctcccagcaytgatggcctggaagatatgctcatcagtcagtgggtggagagaggccactgccacattcaggagaggcatcacccggtcaaaggaagactgggttgggaa

SEQ ID NO: 439781 - DNA, 201 bp, Homo sapiens
tgttctagacttattttgtattttccctgcctctgggatcatctacttctctaaaaagcctctgttctttttattggagaatgatattaagaaaaaagatstggacaccagttgtgattattgtattgatgtgtcattgtttttgggttctcactgaacagagctaagaaatacaagtacgtataaaggcataccttggag

SEQ ID NO: 439782 - DNA, 201 bp, Homo sapiens
ccaatggttcttaaactttttgccaccaaatacaatgttgcaccttccccaatgagatttgtatgaattccacagcatgttttataattatttctaaatgyattcattgatagtatatagttgtatatatttatattatgtgtctgtattgtttaaataaatgtatacttatcctgatttctggaagttgtcttattaaaa

SEQ ID NO: 439783 - DNA, 201 bp, Homo sapiens
cggagcactgtataactcttttgctgtaatttttctcagtgtaaaccagggcataatgccaagtacaagtcagtaagagaaatgtacaaagattcaaagamtggcttagaaaaagttggctttctaactctcctaataaaatgactatttaaaaaaaaatttcccacacaacacagatgtataaaatgactacatttaaat

SEQ ID NO: 439784 - DNA, 201 bp, Homo sapiens
tgcaaaagaggtgaagaatgcctttaatgggactattaatggactgtatgtggtctattaatagataaaaatcagagtaaagaatctctgattttgaggaygtatcaacagaaactttcaaaactgaaaaacgaagagaacgaagactgaaaaaaacccagaataaaatatccaatgactgtggaacaattacaaaaggtg

SEQ ID NO: 439785 - DNA, 201 bp, Homo sapiens
gccttggggagtatttatatttggatgagctcaacctattttataaggctaacataatccttgatagcaaaacctgacaattgcagaaccagagaggagamtttcaagcacatctcactcatggatatagattcaaaaatcctaaacaaagtgttagaaaataagttgatttatttaaaaatgtatcataactacacgtgg

SEQ ID NO: 439786 - DNA, 201 bp, Homo sapiens
cttaaaataaaatttaaaaaaaaaaaaaagattggaaagaagccaaagatgcccactttcaccattactatccaatataatacgagtgattgtgggtagcrctataaagaaaaagaaaagaaataggaagagcagagacttaaatggaaaagatagtttttattattaaaatatatagttatctatatagagaaaaacaag

SEQ ID NO: 439787 - DNA, 201 bp, Homo sapiens
ctgcaataaccaaaacagcatggtactggtacaaacagacgcatagaccaaccgaacataatagagaaccaggaaataagactgcaaacctacaactaccyggtcttcaataaaactgacaaaaacaagcaatagggaaaggactccctatttaataagtggtgctgggataactggctagccatatgcaaagactgaaac

SEQ ID NO: 439788 - DNA, 201 bp, Homo sapiens
ttgaactcctgagctcaggtgatccacctgcctcagcttcccaaagttgtgtaacctgtcccaaagttacaggtgtgagccacagtgcccggcctttttgytctcttgatagtatcatttgatgcacaaaagttttaaatttatgtcaagtccaatgtattattttcttctgttgcctgtgcttttggttcatatccaagg

SEQ ID NO: 439789 - DNA, 201 bp, Homo sapiens
aatgaacatgtatttattaaacacctgtaatgtgctgggtagtgtgcaacatgcttttcttgaattatggcttttattttaaagggaaacaaaaaaaaaacagaaagtgtaacaatgaagacattctgtctagtctcttaagagaaatgcatgggcttcttgcctggagagatgcttggaagatttctatgtctttgctaa

SEQ ID NO: 439790 - DNA, 201 bp, Homo sapiens
attgaaagcttcttattccttgataaaatgaaaaggcaaaactggtctcttcaaattaatgagtaacactttcctccctcctaaaggttaaactaactaaycttttgcaaatttttctcattgtagattccagacctctagatattctggggctctatttcactgtctcctacaaagttactctgataataagtgtttcct

SEQ ID NO: 439791 - DNA, 201 bp, Homo sapiens
tgaacatgtatttattaaacacctgtaatgtgctgggtagtgtgcaacatgcttttcttgaattatggcttttattttaaagggaaacaaaaaaaaaacasaaagtgtaacaatgaagacattctgtctagtctcttaagagaaatgcatgggcttcttgcctggagagatgcttggaagatttctatgtctttgctaaga

SEQ ID NO: 439792 - DNA, 201 bp, Homo sapiens
cctcaggtccacaggtggtaactacttcctgcagttgttaaatccatgatacctcaaggttttcttactaccttttcagttctttaaacctagttaatgattttttttttcttttttgagataaactagtcactctgccacccaggctggagtacagtggcacaatcacagcccactgcagtctcaatctcctgggctcaa

SEQ ID NO: 439793 - DNA, 201 bp, Homo sapiens
acatatttcaaaatatatattagagttcatgtaattcctcccgtttgtcatatcacaaaaccatgacattgggtcattacttcagatatgagtctcagatytactcttgatgccaatagggggttagaaagtggataataggaaaaaatattcattggcaaattagataaatccccaataatattacaggtcaatgaaata

SEQ ID NO: 439794 - DNA, 201 bp, Homo sapiens
gagatagggccttgccacattgcccaggctagtcttgaacccctggcctcaaatgatccttgtaacttggcctcccaaagtgctgggattacaggcataarccaccgtgaccagccaacaattatttatattatcaaattcaacccttattctgttaaaataagtatgcttttatgtctcctgactggcccctaaatgata

SEQ ID NO: 439795 - DNA, 201 bp, Homo sapiens
gattttactctaatcatagaaagccactggaggattttcaggaagaggttacatggtctgatttgtgtttttataagattgctctggctgctggtggagartggactcgaagagggcaagaagggagaccaagaggtgaaagtaatccatgtgagatcccaggatgtggtcattatgatcatgagagatggaaacaaacag

SEQ ID NO: 439796 - DNA, 201 bp, Homo sapiens
gaacctgggggaaagaggttgcaatgagctgggatcacaccactgcactccagccagggcaacagagtgagactgtctcaaaaaaaaaaaaaaaaaaaaargaaaagtcaaataaacaacttaatgatgcttcttaaagaacaaagtaaacagtaaactaaacccaaacttagtagaaggaaagaaataaagattagagca

SEQ ID NO: 439797 - DNA, 201 bp, Homo sapiens
gtctatgaatacaggattctattcagcattttcatcactgcatcccttgtgttcagaccaatgcctactactatagtcgtcaacaaatattaaatattaamcaaatattaaatatttcctttcaaagaaggaaaatatcagaataaaaggtagtggtaaagattagagatgtataatagtatatagtaagttactttcttc

SEQ ID NO: 439798 - DNA, 201 bp, Homo sapiens
aggtagagacagctctaggaagcgtggtatgttttaaagcatgacagagcacaactatgctttccctttataattaaagatgatgaggccaaggcacagtkgctctcacctgtagtctcggcactttgggaggctgaggcaggaggattgcttgggtccaggagtttgagaccagcctggataccatagcgagaccccatc

SEQ ID NO: 439799 - DNA, 201 bp, Homo sapiens
gggcatgtgaccataaaaattaagaaccactgaactaaagataagcaaaaattaagccagtttaaaaatgaaataaactaagttagaaaacaaaagaaaayaacattcactgtagtgtacccattaatgaacagattgtcatgtaaatgccaccaacccaaccacattttctgaaattttatacttgtagaacatacaata

SEQ ID NO: 439800 - DNA, 201 bp, Homo sapiens
agaggggagtatttagatgcctagctttagggtatagaatgggagctagcaataatgcaacttggttagaacactctaaatctttttttctttccttttcyttttttttttttttttttttttttgagacagagtctcactctgtcacccaggctgcagtgcagtggtgcgatctcggctcactgcaacctctgcctcctg

SEQ ID NO: 439801 - DNA, 201 bp, Homo sapiens
gttgcagaggggagtatttagatgcctagctttagggtatagaatgggagctagcaataatgcaacttggttagaacactctaaatctttttttctttccytttctttttttttttttttttttttttttgagacagagtctcactctgtcacccaggctgcagtgcagtggtgcgatctcggctcactgcaacctctgcc

SEQ ID NO: 439802 - DNA, 201 bp, Homo sapiens
ctcagaacagtctagaaaaattgactttcttttcatgctattttgaggaacattttattaaacctcatccagagcaacagaaatgggaatctgagagtcaygtataaagaatgtctttctagatcatatctctcaaaatattagattaattcttcgggaattattcttcataatgctctaggacatagtagaagtttatga

SEQ ID NO: 439803 - DNA, 201 bp, Homo sapiens
caacagaactcaatataaaggtttcccaaaaatttcactgctgaaatctgtcaaataattttgttttctatgtagtataacatctattattcaatgattaktaaagcagaaaataaagtcaacaatgtcagtatgttttttagtaataagatggaagatgatgccaatgtggcagattttcaatcaaatctgaaggtccat

SEQ ID NO: 439804 - DNA, 201 bp, Homo sapiens
ttgggagatgaaccaagtttgcagcaaaagaacttcagaaggcagggactacactgaaatagtctcttacataaagcatatgaaagtctgctagagatggsggaaaaatggttccaactgctttaattaccttaaaaatgtgtgctttgaggatgtgatgtcccagttcaatagtctgctgtcggtttagttttccctctt

SEQ ID NO: 439805 - DNA, 201 bp, Homo sapiens
gaatctatttgaccaacgtattagtcaaacttctattttaatactgtaaataaaatacacgattttaaaaattttcactatatatatttcttccatttatstcatatgtaagttaaaagcttagaaaaatatttttaaaaataattcaccataaatatttgcatacatgctgactccattctccccacaaaagtgtcacaa

SEQ ID NO: 439806 - DNA, 201 bp, Homo sapiens
gtcaaacttctattttaatactgtaaataaaatacacgattttaaaaattttcactatatatatttcttccatttatgtcatatgtaagttaaaagcttaraaaaatatttttaaaaataattcaccataaatatttgcatacatgctgactccattctccccacaaaagtgtcacaaaagccacaagtcatttctgttct

SEQ ID NO: 439807 - DNA, 201 bp, Homo sapiens
atttacattcctgctcatatccccttcccttgatgggattattttgaaaaatcccagatattttatcagttaatatttaattattttagtcagtgtctctmaacagatatgaactctttaaaacatacctaaaactaagaaggattctataatatgaaatatcccaacagtgttcaaattcccttgattagctaaaaaaag

SEQ ID NO: 439808 - DNA, 201 bp, Homo sapiens
tacattttaaacattaggtagaaaatataatgtgggaagctaaatatacaaatttcaagtaaaggggaaaaggcagggctagagataatttgggagttaasatagtatttaaataatgtgcagctagcaaaaccaataacctaaggagtgaggcttgaggacagcaccctggaacatctgaacttatccacacaatatata

SEQ ID NO: 439809 - DNA, 201 bp, Homo sapiens
ttaaaacttaagggtcaatttcagcttttttgtctctttcaaatccgtttagtgtctttgctatcttgtatcagtatagctgagtaacaatgtcctctcayggaatttttacacatttctgatgctctatgtaattcatgaagtcatgtgaaacacatcatgaaactttcataaagtctaaaacagtttctgtccctatgc

SEQ ID NO: 439810 - DNA, 201 bp, Homo sapiens
ctggagattctcctgaaggcaatggatgttagagaataacttagtgaactacctttaaagaatctctgctttggggagtacatgggctgttttctataaayttttgctcccccaggctcatagagagatccccaggtacctctgctttctgtgaaagcaactcttctcgtccttgggatttattttctgtcatgcatgatt

SEQ ID NO: 439811 - DNA, 201 bp, Homo sapiens
tttattaagcaacactaaaatagataattcagacaaagatcttgttatgtttcctaggactgctatttctataccaaagaaaagagaaaatccttctgcaragacaacaggcctacatacatataattttttttttttttttgagacagcgtctcactctgtatcccaggctggagtgcactggtgcaatcttggctcact

SEQ ID NO: 439812 - DNA, 201 bp, Homo sapiens
aattagtatcatcacccaaggattaagaaagccagtgaggttccaaatgacccatccaagcttaatatgataactcatattaagtttatatataataactyatattaagtttaatataataacttatattaataacttatattctgtaaaaaattaagccaaccctccatatacagacatcattcttactattagtgaaaa

SEQ ID NO: 439813 - DNA, 201 bp, Homo sapiens
aactattaattagtatcatcacccaaggattaagaaagccagtgaggttccaaatgacccatccaagcttaatatgataactcatattaagtttatatatrataacttatattaagtttaatataataacttatattaataacttatattctgtaaaaaattaagccaaccctccatatacagacatcattcttactatta

SEQ ID NO: 439814 - DNA, 201 bp, Homo sapiens
attttttaaaaattgatatatcacagtatttatacatttgctagtttgatggcatctgagttgtttcaagttttcagctgctatggtctgtatgcttgtgyctcctaaaactcatacattgaaattctaacccccaaggtgatggtattaggaggtagggcctttgggaagtgatttggtcctgagtggggttgatccacc

SEQ ID NO: 439815 - DNA, 201 bp, Homo sapiens
gagctgagggctgtgctatgggagccatccccaaagcttggccctgacagttctcaaggacagagatgtatttgggtacatatgccccagggtggccgacrctgccttggccaaattttcagaaaagagacctcttgctttcaccctctctctctctcctcacctgctgctgcgttttgcccttgctctcgcatagtaagc

SEQ ID NO: 439816 - DNA, 201 bp, Homo sapiens
aaatacctaggaatacagttaaccaggtaggtgaattatctctatcaggagaacttcaaaacactgctcaaagaaatcagagatgacacaaacaaataaaraaaatttcatgctcatgaataggaagaatcaatgtcgttaaaatggccatactgccaaaagtaattggtaagattcaatgttattcttatcaaactgcca

SEQ ID NO: 439817 - DNA, 201 bp, Homo sapiens
aatacacagagattaaacaatgcaaagagagagaacccagtcagaatctgacacattcccttacttgaggaggtggagctgagaatcccaggagaccaagrcagtgagaattcaagggacagagttctgggaagaagaaagctgtgcagaaataattctggagatctgtggaaattaacccttgagaaatcaatggagtac

SEQ ID NO: 439818 - DNA, 201 bp, Homo sapiens
gttgacaagctaaatctgtccattttttggtacttaaaaatgagaaacttagtcataactgcagtatgtccccagcctcaggcttaggtaagcagtacctyatatatcagcagtaccttttacattataacctttcagtaataagctttaaaaacaggtcaaaatcagcatgaagagagctatttctttcttttctaggca

SEQ ID NO: 439819 - DNA, 201 bp, Homo sapiens
ccttattattcagagcagcgatcacgaattcacattaatttggttggcaattttgtcttcgtgcaatcttttctcctggtttcctgggtccttcaatacakagcttgaaaaaacaatcctattgcctacttcttacctcagtataacccatgctggctgcagcaatgagggcctgttggatggcatggctcttcttaaata

SEQ ID NO: 439820 - DNA, 201 bp, Homo sapiens
aaaatactacaagaaaacctacagaaaacttttctggacattggtttaggtaaagaaattatgactaagacttcaaaagcacaggcaacaaaaacaaaaayaggcaaatgcaactaaaactaaaaagcttctgcacagccaaagaaataatcagcagagtgaaaagaacctgcagaatgggagaaaatatatgcaaactat

SEQ ID NO: 439821 - DNA, 201 bp, Homo sapiens
aatgtgaatgtatattattgtagctagagatatagtatatgtatacatttctgaaaacagactattagatatctgatttctctgtgatttatacaaatatraaggaaatataacatgtatgcagtgtggcaaaataaagatgactttgtttaccaatacaaatatcaattagtatgtggccactagttatctactatggac

SEQ ID NO: 439822 - DNA, 201 bp, Homo sapiens
ctagaagttgcacaataaataatatgatgtaattacctaggcttaaaagaaaagcaccattctaggaagaagtaatccactgcagtgtagcagtacagacygggtaatgggaaagacctacagaccgttataagaagggcagcagggagcttttaaaatgaaaaggctagagtatcagtagcactatggaacttttctgtt

SEQ ID NO: 439823 - DNA, 201 bp, Homo sapiens
tatataactattaaatgtaggtaagagtcacctatattttggtgactcttaaccccaaatatatatatgtgtgtagcctttagagatcctagcccctcttstgaggattatatatattaatgaattaaatcctcacaaccacttagtaagggctaatattattgccattttaaagattagtaagattagtggtggtaatcc

SEQ ID NO: 439824 - DNA, 201 bp, Homo sapiens
gttccttaactcttttgtagatgtaccttgcctcctttactacactgtacatttctggagagtagaaactatattttaagggttttttcatatttaaattaaaaaaaaaacttttagcacccagctctgtaatgcccacatgatgataggagagataaaacaaaggaaagcacagaggctaaagccctgctgttctctaca

SEQ ID NO: 439825 - DNA, 201 bp, Homo sapiens
cggtgctatgctattgttctcataaagcataaggaagccagttacatcacttaatttttttatatgaataagtctgattattattaaaaaatttattttgtgtatgtatgttcaagcatggaagtcatacatattcttagaacagtgtaattatgtgaaaagggcatgaagtgaagatcaccccaatattaacaggaaaag

SEQ ID NO: 439826 - DNA, 201 bp, Homo sapiens
aatagaccaataacaagttctgaaattgaggcagtaataaatagcctatagtaataaatagcctaccaaccaaaaaaaaaaaaaaaacccaggaccagacrgatttatagctgaattctatcagaggtataaagagttgctggtactgtttgttctgaaactattccaaacaactgaaaagaagggactcctccctaactc

SEQ ID NO: 439827 - DNA, 201 bp, Homo sapiens
gggcagccagagaagtgggaaatgacattaaaagtttactactggccgagcacggtggctcacgcctgtaatcccagcactttgggaggccaaggtgggtrgatcacctgaggtcaggagttcaagaccagcctggccaacatggtgaaaccccatctctactaaaaatacaaaaattagccaggcgtggtggtgtgcgcc

SEQ ID NO: 439828 - DNA, 201 bp, Homo sapiens
aacgtaattcatcacacaaagagaaggaaagacaaaaaccacatgatcatttcaatagacgtagaaaaggccttccataaaattcaacatcccttcatgtwgaaaactctcgataaactagctattgatggaacatatctcaaaatagtaagaaccatttatgcaaacccatggccaatatcataatgaatggggaagagc

SEQ ID NO: 439829 - DNA, 201 bp, Homo sapiens
gctgtgaggattcttcacttattctgaatagaactcttttatgagataagtgtttgaaaaattttctcttcatctataatttcccttttcattttctttcttttttttttttttttttgagatggagtctcactctgttgcccaggctagagtgcagtggcatgatcttggctcactgcaacctctgcctcccaggttcaa

SEQ ID NO: 439830 - DNA, 201 bp, Homo sapiens
cggacgcctgtatcagagcactcaggattctccgctttttaaggcatttatctttgtttcatctcttccctgccacattatagaccctttgagggcacagrttatagtgtattaattaaaaaaatcagaaccactcatagttcctagtatagtgttctgctaataacatagcctaaataaatctttgttgaattcattaag

SEQ ID NO: 439831 - DNA, 201 bp, Homo sapiens
gtatatatacatatacacgtatatatacatatatacacatacatgtatatatacacatacacgtatatacacatatatatatacatatatatatatatatwtttttttttttttttttgagactgattcttgctctgttgcccaggctggagtgcagtggcgcgatctcagctcactgcaacctccgcctcacgggttgaa

SEQ ID NO: 439832 - DNA, 201 bp, Homo sapiens
atatatacatatacacgtatatatacatatatacacatacatgtatatatacacatacacgtatatacacatatatatatacatatatatatatatatatwtttttttttttttttgagactgattcttgctctgttgcccaggctggagtgcagtggcgcgatctcagctcactgcaacctccgcctcacgggttgaagc

SEQ ID NO: 439833 - DNA, 201 bp, Homo sapiens
cacgggttgaagcaattcgcctgccacagcctcccaggtagctgggactagagacacgcgctaccacacctggctaatttttttgtatttttagtagagayggggtttcaccatgctggccaggctggtctcgaactcctgacctcaagtgatctgcccacctcagcctcccaaagtgctgagattacagacatgagccac

SEQ ID NO: 439834 - DNA, 201 bp, Homo sapiens
cattcctttagcccgagagcagtggctcacgcctgtaatcccagcactttgggaggccaaggcaggtggatcacgaggtcaggagttcgagaccagcctgrccaacatagggaaaccctgtctctactaaaaaaacaaaaaattagacaggcatggtggtgcgtgcctgtaatcccagccactcgggaggctgaggcagga

SEQ ID NO: 439835 - DNA, 201 bp, Homo sapiens
cttctctggagaaacgtctatgtaagtctttttcccatttttgaaatggtttgttgttgttgagttgtaggggttctttatatattttggatattaatccsttatcagatacattatttccaatatctgtgggttgtctttttgcttttttttctttttgagatgaagtcttgctctgtcactcaggttggagtgcagtgg

SEQ ID NO: 439836 - DNA, 201 bp, Homo sapiens
taggaactatctccatcctcctgcctctaagaagcttctcacagttcactgctacctcatcttaagtatgcttaacataagtcaacttattccattatttmtttttatgtatactatttgcatgtaataaattctcaatgagcattttcttctgcttctttttttttttttttttttttttttttttgagatggagtcttg

SEQ ID NO: 439837 - DNA, 201 bp, Homo sapiens
ttcccccttctagcagtccccagtgtctactgttaccatctttacgtcaatgagccatgagtactcattgtttagctcccacttataagtgaggacatgtrgaatttggttttttgttccttcctgtgttaattcacttaggataatgacctttagctgcatccatgatcctgcaaaggacatgattccattcttttttat

SEQ ID NO: 439838 - DNA, 201 bp, Homo sapiens
acacagatgatgtctcttctatgtgaaatgttcaatgaagaacacttctactttcaatactcacactccatgcaataaacagaaaacagactcagaattgyttatcacagatatatgtcttacctcggatcacagagaaatttggttttctctccttcttctctccagataagccattctcgaaaagaaggatgtacaaac

SEQ ID NO: 439839 - DNA, 201 bp, Homo sapiens
  misc_feature (1)...(201): n = A,T,C or G
tatttgcatacatgctgactccattctccccacaaaagtgtcacaaaagccacaagtcatttctgttctttttaaaatcaagaatcttggcattatggaanaatatatatagttttattcattacagttcaatccagtagcagcctcaaggattttaaataatcccctaaaaatttcctggtcatgccagaagatgtggtc

SEQ ID NO: 439840 - DNA, 201 bp, Homo sapiens
ccttttccaccacaatgatactcctgctcattcctctcatcaaacaaaggcaattttgcaagtttagatgggaaatccatcttacagtcttgatttggctytgacttttttgtttcttaatattaaaatctgtaaaaggcatgcatttttcttcagtttataatgtaaaaaagacttaattgacatggttaaattcccagg

SEQ ID NO: 439841 - DNA, 201 bp, Homo sapiens
tttatagcagtgtgaaaacggactaatacaattttttttaaccgagtttgctagtggtgttgcagaattattctttagaaatgtagccacctggtgattcktccatgaaatgatagccaggatattgtgaaaatactgaaactcacgggatgaggaaaagctgaattcttgtctgccttccacttttacaaactatggatg

SEQ ID NO: 439842 - DNA, 201 bp, Homo sapiens
gaatgttaactgtcgtattctcaattaaccagaatactcataacaaaggtccaagtcctcaaacctgatcactgctgggtaacccaaactttacttgtgaycattttgctctgtgcatcagaagtcctcacctagaactcagtcctgcctgagggactggaagtggtcgccctgcttacctgccagtggccctggcgcact

SEQ ID NO: 439843 - DNA, 201 bp, Homo sapiens
tttgataagtccaatgtctcagctgcctcagggatggcttctgtcaatttattttttccagtgaataggccaaactttcctatttctgtgtatgccttgtyattttgtatcaaaaactgtgccttctgaatattataatgtggtaagtctggatatcagattctgcctccttcacagggcttgctgttattgcttattttg

SEQ ID NO: 439844 - DNA, 201 bp, Homo sapiens
aaataaatacatgtaaatcaaagaaaaagtcaaaagacaaatttgaaagtattttgaatggaacgcaaatgaaatgctttaaaaaaaagtaaagaggaggkaatactttcccattaccatgatactaaaaccagacaaagacatcaaaaaaccctagaaaccagtatctctcatgaacataaatacagaacagtaaataca

SEQ ID NO: 439845 - DNA, 201 bp, Homo sapiens
ttttaagcaagatattctttcttctgtattagatcataagctttaatactagtaatcataataaattcatacttatcaccttataacctttaaattgtacmatgagatacagtaactcattcaattatcaacagaacactctaagcgggactgatattactatcttcattatgcagatgaggaaaccaaaccaatgtgcag

SEQ ID NO: 439846 - DNA, 201 bp, Homo sapiens
tctgttcctctcctatatccaatccatgaatacaggatgtctttctatttaagtcttaaaaatgtcttctgcaatgttttgtagttttcggtgtatgaggktttttttttttttttttttttttttttgcctccttggttaaattttgagcagttttacagtttttaactactatgtttaggtctttaatccattttaatt

SEQ ID NO: 439847 - DNA, 201 bp, Homo sapiens
gattatttactagacttttaaagtagttacgtagtaggtatatgcacatacaatctgtcaaaaacatctgttacttcctccaaattttctattaatattaygtataactttccctctgtataaaaatagaaaacaagcctgaaaatgtagatttttttcccttcagtttctcattagtaccagcgcgcttggtaagagata

SEQ ID NO: 439848 - DNA, 201 bp, Homo sapiens
gcaccactgtactctagtctgggtgacagagtgagaccctgtctcacactctgtccccaaccccccctccaaaaaaaaaaaaccgtattactgaacaaaasaagatagtttcaaaagaatacatagggctgggtgcagtggctcacacctgtaatcccagcactttgggaggccgaggtggggggatcatctgaccaacat

SEQ ID NO: 439849 - DNA, 201 bp, Homo sapiens
tacaatttactcaaagggataagtacaaaagtaattcttataaactgcaaagtgtatctggcatatggtaaatatttaataaatattaataataataattytaaattcttgttatacattatgtgttatgtaccataaatacatatatatattttgaaaaaggatctaatgttatttggaaggacatcatttctgactgga

SEQ ID NO: 439850 - DNA, 201 bp, Homo sapiens
ctcttgaccttaggggaaaaaagcattcaacatttcactacatgtatttttggagttgtcctttatcagactaaacttccttctactcctagtttgtgtastttttatcactaattggtgtacttcggagggactggtttcatggaagagaatttttctggggtggagggtggagaggatggtttagggatgaaactgttc

SEQ ID NO: 439851 - DNA, 201 bp, Homo sapiens
tgctgtcggtttagttttccctcttggcgggaaaaccagaaggcaagtaacgtgtgaccactcctgcaaaaaaagagaaattcattttaattaattaattwatttatttattgagatggagtctcactctgttgcccagactagagtgcggtggcgcaatctcggctcactgcagcctccacctcttgggtttaagtgatt

SEQ ID NO: 439852 - DNA, 201 bp, Homo sapiens
aataaaaaatgataaaagggatatcaccactgaccccacagaaatacaaacaactgggccaggtacggtggctcacaccagtaatcccatcactttgggargttgaggtgaaaggatcacttaaggtcaggagtttgagaccaggctggccaacatggcaaaatccagtctctgctaaaaatacaaaaaaattagctgggc

SEQ ID NO: 439853 - DNA, 201 bp, Homo sapiens
tttcctgagctagaaatatcctatgattttcatagcaagaggtgttgaatcataacaatacatataaatgatgatggcctatctcctgaacatgaatgagccctccaacagtccacgtctggctctgatgaaatgtttacctagagtctaccggagataataaattacataatgtcccaatcagcattgcctttatcagag

SEQ ID NO: 439854 - DNA, 201 bp, Homo sapiens
atctattaggctctatttgtttttgctttctcggataaggactttggggtctacaaattaatgtgaaacttgatgaacttaacattaacagagactgttgycagtttttctgcctacaaaatttccagtgacaagtaccctatcactgccattcattaatagaatagagaaattttttattaagcacaagttctccctgct

SEQ ID NO: 439855 - DNA, 201 bp, Homo sapiens
tcatgcttcaaaggataccatcaagagagtgaaaagacaacccactaaatgggagaaaatatatgtgaatcatgtgttcaagggacttgaacccagactayataaagaactcctactactcaaccataaaaaggcaaataaatgaattagaacataggcaaaatactggaatagacatttcaccaaagagggtatacaaat

SEQ ID NO: 439856 - DNA, 201 bp, Homo sapiens
tttccaaatttctctctgggatcttattcagactataggtggaagcagtcatgttttcatctactcgatacaaacaggagtccatgctggatttttgagaytgccaaggttttatgtttcctccagatcctaattctttactgctttccccagcatattttgtgcgttccacattttcagaatagcttgttaatgtagctg

SEQ ID NO: 439857 - DNA, 201 bp, Homo sapiens
ttcagtgacacgatcagcctcgaactcccaggtgggcccaagcaatcctcccacttcagcctcttgagtagctggtaccacaggcatgtgccaccacaccmaggcttttttttttttttttttttaaagagatgtagtctccctatgttgcccaggctggtcttgaattcctgaccctcttgcattgacctcccaaagagc

SEQ ID NO: 439858 - DNA, 201 bp, Homo sapiens
tgacacgatcagcctcgaactcccaggtgggcccaagcaatcctcccacttcagcctcttgagtagctggtaccacaggcatgtgccaccacaccaaggcttttttttttttttttttttaaagagatgtagtctccctatgttgcccaggctggtcttgaattcctgaccctcttgcattgacctcccaaagagctgaga

SEQ ID NO: 439859 - DNA, 201 bp, Homo sapiens
ccaaaactgagctcctagctgtgagaatcaatgcccactacttttcaagaatcaaagcaaccacctctagcttatgtgcgcccatagggcagttttttgtktttttttttgagacagagtcttgctctgtcgcccaggctggagtgcagtggcgcgatctcggctcactgcaagctccgcctcccgggttcacgccattct

SEQ ID NO: 439860 - DNA, 201 bp, Homo sapiens
tcttttatgactcacatttctcatgtcctatccaagaaatctttgcttgccccaaggttgcaaagattcagtcctagctcttacatttaggtctaaatcttttttttttttttttttttttggcgggggagacagggtctcactccgtcgcccaggtaagagtgcagtggcaccaacatagctcactgcagcctcaaacta

SEQ ID NO: 439861 - DNA, 201 bp, Homo sapiens
cttttatgactcacatttctcatgtcctatccaagaaatctttgcttgccccaaggttgcaaagattcagtcctagctcttacatttaggtctaaatcttttttttttttttttttttttggcgggggagacagggtctcactccgtcgcccaggtaagagtgcagtggcaccaacatagctcactgcagcctcaaactac

SEQ ID NO: 439862 - DNA, 201 bp, Homo sapiens
ttttatgactcacatttctcatgtcctatccaagaaatctttgcttgccccaaggttgcaaagattcagtcctagctcttacatttaggtctaaatcttttttttttttttttttttttggcgggggagacagggtctcactccgtcgcccaggtaagagtgcagtggcaccaacatagctcactgcagcctcaaactact

SEQ ID NO: 439863 - DNA, 201 bp, Homo sapiens
tcatgtcctatccaagaaatctttgcttgccccaaggttgcaaagattcagtcctagctcttacatttaggtctaaatctttttttttttttttttttttkggcgggggagacagggtctcactccgtcgcccaggtaagagtgcagtggcaccaacatagctcactgcagcctcaaactactgggctccagcaatcctct

SEQ ID NO: 439864 - DNA, 201 bp, Homo sapiens
atgcaaataaactagaaaatctagaaaaaatggataaattcctggacacatacaccctcccaagactgaaccaggaagatgttgaatccctgaatagaccrataacaagttctgaaattgaggcagtaataaatagcctatagtaataaatagcctaccaaccaaaaaaaaaaaaaaaacccaggaccagacggatttata

SEQ ID NO: 439865 - DNA, 201 bp, Homo sapiens
gtgaacattcaggagaccctcagcacagaaggacactgcagacattaacaatgaaatatcagaacgaaaataatcggcctcattcttcagggcattttttwctactacttacattaaaaatattgttaccaatgatatgagtgtatatgttatctgggaaattatttaagccaagaaactgcctacttttagggaaaaaat

SEQ ID NO: 439866 - DNA, 201 bp, Homo sapiens
aaaaagcttcctcaccctttccatcatgtgaggatgatgctgtctacgaaacaggaagttggccttcaccagacactgaatctgccttgatccaggacttyccattcttcagaactgtgagaaatatatttctattgtttataagctatccagtttatggaattttgttttatcagcccaaatggactaagacctcagcca

SEQ ID NO: 439867 - DNA, 201 bp, Homo sapiens
aaatgggaatctgagagtcacgtataaagaatgtctttctagatcatatctctcaaaatattagattaattcttcgggaattattcttcataatgctctasgacatagtagaagtttatgaaactaggacctagaactttttcagtctaagctctttccaagaggaatcatttatggtttaaaagcaaacaaacacatacc

SEQ ID NO: 439868 - DNA, 201 bp, Homo sapiens
atctactaagaagggaatacataatatttggccttttgtgtctggcttctttcacttagcatgtttctgagattcgccaatgttgcagtagcatgtatcartgtgtcataccttttcatcactgagtaagtttccattgtgtatatgccacatgtgtttatccattcatctgtgggtgggcatttggattgttgccacctt

SEQ ID NO: 439869 - DNA, 201 bp, Homo sapiens
aatattgttcccattttttattcacagagcagcacagcatattgacatagttacaatgtaaattgatttaaaaaatcatcagatctgacatcatgaaacayacattcttgtcataaggtaaaacaaccccacaactaaacatgtaatgtaatatcagttaatggtaagagctatgaaaaaataaagtagaagcataggggt

SEQ ID NO: 439870 - DNA, 201 bp, Homo sapiens
attagtttacaaatgcctgaattatttacaaactatgcttttcaaggttagttatcaaaagttcaagttattctctacaacagtcattaaaaaaaatcttyttttaaggtgaagtaaattaaaagattagaggtgtagggaactcatgcaggctaaaccaaagaggagaaggcaaagctgaccaagccatcagaccacgcc

SEQ ID NO: 439871 - DNA, 201 bp, Homo sapiens
aacaataattaagataacatgttactttttgagagaggattattgttcagggactctaaattctgaaaattctgaattaaagttattactagttttagtayactttacactgctaagtaaacaccttgctttttatggatcaatgtacccagctggatggcatgttctaaccgtttagactgctaaaaggaaagctcttga

SEQ ID NO: 439872 - DNA, 201 bp, Homo sapiens
gaggaactaatgcttccaaatgttgataattacacaatgcctgtctatgaggagtacaatgtatttgtgtttatctttctctagactcagcagaaatgaaytggtcacatgctaaaatggatcatttcacttcttagggaggtttaagtaagtatgggaataggagacaaagcaactttttggcttttgcccatttccatc

SEQ ID NO: 439873 - DNA, 201 bp, Homo sapiens
tatgtttaatctatagaatagtttaagaaaaaactgacatcttccaatcctcatttatgacatatctcttccacttactaagttctttaatttcactctgyaatatttttgctgtgctttcactaagtcttacacatctttcatacatttatttttaagtattatatattttttggtgccactgaaaatcgtatttattct

SEQ ID NO: 439874 - DNA, 201 bp, Homo sapiens
tacatggaaatggaaagatccaagaatagtatagaagactcgaagaaagcccgggtgcggtggctcacgcctgtaatcccagcactttgggaggctgaagsggggggtggatcacctgaggtcaggagtttgagaccagcctgaccaacatggtgaaacccgactctactaaaaatacaaaaaattagccgggtgtgctgg

SEQ ID NO: 439875 - DNA, 201 bp, Homo sapiens
acaatgaagtactattcagacataaaaaagagtaagatcctgtcattgccagcaacatggatagaaccagaggtcattatgttaagtgaaataagccaggmacagaaagacaaactttgtatgttctcagtcatatgtgagagctaaaaattaaaataactgaactcatggagacagagagtagaatgatggttaccagag

SEQ ID NO: 439876 - DNA, 201 bp, Homo sapiens
tgttttttttaaagataggtctatttttatcagtcacacagctagtaggtggaagagaaaaaaattaaacctagatctaactccagaacataagctcttaytcactaatacatgctgcccaagaaagaaaattaaaaccacctgtaatgccaccaaccagatataatctctgctaactaatattatctcacaacaatccta

SEQ ID NO: 439877 - DNA, 201 bp, Homo sapiens
tcacagaatgtagatgcaaaagaaatttttttttttttttgagacagggtctcattttgtcacccaggctagagtgcagtggtgtgattttggctcactgyaacctctgcttcccaggttcaagcgattctaccttagccttccgagtaggcgtgcaccaccactcctggctaattttttgtagagacagggtttcgctgt

SEQ ID NO: 439878 - DNA, 201 bp, Homo sapiens
acataggatcatgcagttgctattaagtgacagcatcatcatcaactatcattattggacagttactatgtactagaggctgttgtaagcatttttcctgyaaaaattcctttaattcttacaaatcctaagggagttgttatactcatttcacagatgaggaaactgaagcacagagaagttatacaacttgcccaacgt

SEQ ID NO: 439879 - DNA, 201 bp, Homo sapiens
tgtcctatccaagaaatctttgcttgccccaaggttgcaaagattcagtcctagctcttacatttaggtctaaatcttttttttttttttttttttttggsgggggagacagggtctcactccgtcgcccaggtaagagtgcagtggcaccaacatagctcactgcagcctcaaactactgggctccagcaatcctcttgc

SEQ ID NO: 439880 - DNA, 201 bp, Homo sapiens
tcacctgcaatatggctagggctgaatctggtccgcagtcacttctgaaatccaagatcttagaaaggttatttcccccattaccacagcccctttacatytgttttctttcagaatttcgaggaactaatgcttccaaatgttgataattacacaatgcctgtctatgaggagtacaatgtatttgtgtttatctttctc

SEQ ID NO: 439881 - DNA, 201 bp, Homo sapiens
atatttcaactttgcataactcttgttattagcaatatggttctatttctctacctcttaccctctctttctcttgatggtacagatgattcttctgcttwtatcaaaaagaagaaggaataatctttttaaaagtttattactaaggtgaaaagaactaaaaggaatgaacatgtatttattaaacacctgtaatgtgct

SEQ ID NO: 439882 - DNA, 201 bp, Homo sapiens
tgagacttgagcctgtttttaaaaatcattattacaaataaagatctcaagtgatttatatgtatatatgcaggctactaatagccaatattagaatctctttcattataatttcaccaacagatttaaaaataatgaaacagtttatttattcaatactgcttagtataggaaaaatgattatatagtaatttaatcctt

SEQ ID NO: 439883 - DNA, 201 bp, Homo sapiens
taatgatttttgccaccttttccataaagaaaagttctaaagaaaaataatgaataaagacacatttaaattgcctcacaatatttggagacaataataayaaatctattgaaaattcacctttaatcaaactcacttggtttcatttttcctaaccagactgtcttctctgctttggtctacctctcctttggtacctct

SEQ ID NO: 439884 - DNA, 201 bp, Homo sapiens
tctaaatatctatgcagatgttgagtcttaaggaaataacattgtaaaacaataaattagttaacctcattatagccttgccttgagaagaaacacagatratgtctcttctatgtgaaatgttcaatgaagaacacttctactttcaatactcacactccatgcaataaacagaaaacagactcagaattgtttatcaca

SEQ ID NO: 439885 - DNA, 201 bp, Homo sapiens
ataaagatctcaagtgatttatatgtatatatgcaggctactaatagccaatattagaatctctttcattataatttcaccaacagatttaaaaataatgaaacagtttatttattcaatactgcttagtataggaaaaatgattatatagtaatttaatccttaaggctcttaagtcctttactagaattttattaaagc

SEQ ID NO: 439886 - DNA, 201 bp, Homo sapiens
tggcaacagagagaccctgtttcaaacaacaacaacaataacaccacaaaaaaaggaagaaaatattagctaccaacttattactaacaactggtttgagytggtgagagggaaaaaaaacccctaagattatctttttatggctgctgggcctcaaatgttttgccaccaaatacttggggagtatatttctgtattgta

SEQ ID NO: 439887 - DNA, 201 bp, Homo sapiens
aagatctcaagtgatttatatgtatatatgcaggctactaatagccaatattagaatctctttcattataatttcaccaacagatttaaaaataatgaaacagtttatttattcaatactgcttagtataggaaaaatgattatatagtaatttaatccttaaggctcttaagtcctttactagaattttattaaagcatt

SEQ ID NO: 439888 - DNA, 201 bp, Homo sapiens
tataagagatccagagaccttggaggatggaggatgatacaccaacttttttactcaaaccctgaataagaaatacagacaattaaattagtagcccagcmaaaaaaagtagcatcagtggtgaattagtggcctctttgtttttggtactaatgaatgagagcggagtctcaccctaacaatgttcatgccaagcaaagc

SEQ ID NO: 439889 - DNA, 201 bp, Homo sapiens
tgctcacagcttatgtctttaaaaatttggaaagcacaaattaaaccccaaatcaggcagaaaaataaaaccataaagattaaagcagaactcaatgaaayagcaaataaacttatttgcttttcagaggaaaatgatgaaacgagaatttaattctttgaaaagataaacaaaatagaaaaaacttactctagactgaca

SEQ ID NO: 439890 - DNA, 201 bp, Homo sapiens
acaaaaactctccagtgttctcagttaactagatgcacaagaaagagcaagaatgttatgaaataccaatgataattactgacatacaaagaaatgacacsaagaatatgtcaaattgagagatttttcaagaacactttaaattttcatgttagtctacctcatcaaaacattaactaatttgaaaatcctatttaaaag

SEQ ID NO: 439891 - DNA, 201 bp, Homo sapiens
gcttggattccttgtctttaaaatgtgagccataatctgagttgttctgataattaaatttatagggtaaaatatagataagactaaaaaataattagtatttatttttctttggtaatagacagctgaagtataatgcattactcaaggccacagaccaagttaccctggaacagaaactaaaatatggatcttggactc

SEQ ID NO: 439892 - DNA, 201 bp, Homo sapiens
tggtcaataagtacatgaaaggatgtttgacataattagtcattaagggaaatgcaaatcaaaaccacaaggagatatcaagttatatccactaggatggktaaaacaaaaaagacaagcaataagaaatagtgaaatttattggaaccttcatacaataatggtagcaatgtaaaattgtgcagacactttgaaaatagt

SEQ ID NO: 439893 - DNA, 201 bp, Homo sapiens
ctgaatcttcactgatgctggttgactcttataaactctgctaaactcactttcccacaactctgaaggaataaagttaatgtgctttgtttttggattcytgaaaaacaaaatgtttattatccagggattttagtggtgtctttgcatatcaaggtaagatgcagtaaggtatgtatattaccacaagcagctctaaat

SEQ ID NO: 439894 - DNA, 201 bp, Homo sapiens
tacagcatggctaactataagcacaatgttgtacagcagacctctagaactttttcatctttcatgattgatactttatacccattgaacaggaactcccyatttcctctttcccccagctcctggcaaccactattctactttctattctgatggttactttagatgcctcatgtaagtggaatcatgtcatatttgtcc

SEQ ID NO: 439895 - DNA, 201 bp, Homo sapiens
atgcagtggtacaaccatggctcactgcagcctcgacctcctgggctcaagcaatcctcttgcctcagcctcctgagtagctagggctacaggtatgcacygccatgcctggataatttttttaaaaatttttttgtagagatggtgcctcattatgttgcccaggctggtcttgaactcctgggcttaagcaatcctccc

SEQ ID NO: 439896 - DNA, 201 bp, Homo sapiens
ataactttcatatcatccagattggcaaaatgaagcctgacaatatcaaacatgggaaagatctatagcaaatggaacattttatagtatattgctagtgrcagtataaactggtatagtttcataaaagatgaaattattttataaagttgaaagagacacatttctaataatctgacaatttcacttctaacattccga

SEQ ID NO: 439897 - DNA, 201 bp, Homo sapiens
agttaaacctacatagtatacatgatacagtgaacaaacaataacaaagagtacagctaattaactaaggagataaaaatatacaaataatcaaaatgtgrtagcaaaatagagaaaagcaggatgagaacaaggaatagataggataaatgaaaaacaaatagcaagaagataaatttaaacctcccctaattaaaaaaa

SEQ ID NO: 439898 - DNA, 201 bp, Homo sapiens
cagagttggaagactcacatttcctattttcaaaatttattacaacgcaacattaatcaaggcagtatggtactggcatcagaatagaccaatgaaataamgagtccagaaataatactcttacattatggtcaattgatctttttttttcttttctaggacagggtctcgctctgttgcccaggctggaatgcagtggta

SEQ ID NO: 439899 - DNA, 201 bp, Homo sapiens
ggtcctctcaaactcagcaccctcagcaccctcagcatgctgggaatacaggtgcatgtcaccctggccagcctgattttgtcagattttgcctgcactcrtttgttgtggttggggttttttgggtacattttgtgtatagttctgtgaatttccatgtggtatcatttttcttttgcctgaagaaatttcttagacatt

SEQ ID NO: 439900 - DNA, 201 bp, Homo sapiens
gaaaagtatactaataggtgcatcaaaagacacataacaaatgttcataaaactgttcatcatagcccaagttgaaaatgtccatcaaggccaagtgcagyggctcacgcctgtaattccagcactttgggaggccgaggcgggtggatcactttaggtcagaagttcaagactagcctggccaacatggtgaaacccttt

SEQ ID NO: 439901 - DNA, 201 bp, Homo sapiens
catcactagcctcaagctgggtgtgattttcgggaccatgtgcccctggccatagcagtgaacctgaagcagttctttcccatgcagctggggaggaggarggcaggaggcataagagacagtgacaagttacacaaagatcactgatggcaggttctaggttattctgggagcttttctgcccagtggccaaactaaagc

SEQ ID NO: 439902 - DNA, 201 bp, Homo sapiens
aaagtttcatgaaggaggaagtatttgagttcagcctgggaaggtggctaggaattagatggagatagtttggtagttgcctcaaagcttattactgtctrgtggttagtttcatgtggtcctgatggctttctgagaccaacagcaaaacattaaattaaccagcttgcttgttccattctctcttcccatagtctgttc

SEQ ID NO: 439903 - DNA, 201 bp, Homo sapiens
tctgctctatgcgtctacagaacacttttgtgtagctgaactgtaacacgtagcacaataactgggataacattcagttttaagctaagtggctacttctsatacaatgttataagctgaacaggattccatgtctaggtgcaactagattaatttatattttgcttaaggaagacacaatcatgaaatttaacatgtaat

SEQ ID NO: 439904 - DNA, 201 bp, Homo sapiens
ggtaggttatatgctcagacataacaactctgtgaccttttgcaaattacttaactcctctctccatcttgatttcttactctgtaaaaggggatacatayacctcatggggctgtcatgataatgtagttattagcatgaaacctggtacatagtaaatgctcagtaaatgctagtgatggtcatgctttcatcctgtct

SEQ ID NO: 439905 - DNA, 201 bp, Homo sapiens
aaaaaagtatcaacaaactaacaacagcaaagaacttccttaatctgatatggaacatctatggagaacatattgacatagctaatggtgaaagactgaawgctttccacctaagaccaagaaaaagcaagaatttccgctctctttgtttctactcaacattgtactagttctagtcagagtaataaggcaagaaaaaga

SEQ ID NO: 439906 - DNA, 201 bp, Homo sapiens
ttgtagagacaggatctcactatgttgcccaggcaactctcgaacttctggcctcaagtgatcctcctacctcgacctcccaaagtgctggtattacggcrtgagccaccgtgcctaaccaatgctgttttttttttgtatttatcagatgatcatacagtttttcttttttagtctgttattaatgattaactacactga

SEQ ID NO: 439907 - DNA, 201 bp, Homo sapiens
actctatacatctataagaagattactataaagaaaagataaggtggtgattataatttttttgatctaattggactcatcattaaaacaggtaaaatacygtatatatgaagccaactttcttgctcatagttgttcttacgtgttgttgtccataagtgtactttagtaaatctatcacatacttctataaaagttttc

SEQ ID NO: 439908 - DNA, 201 bp, Homo sapiens
actaacacatacatacatacacacactcacattttttgcagcatgtatggtgttagtaaaggtgatttagtaaactatggtgtatctaccaaaaattacayagacattaaaatagaaaggaatactttccagaatcatggaaatgtggaagtatttatgaaataaaatttagtaaaacagtagaataaaaaacaatatata

SEQ ID NO: 439909 - DNA, 201 bp, Homo sapiens
tagaaagcaaacatttaaaaatgtttatctttgacataaccaaataaatacaaattaaagcaaactatatctaccattagaaaaaaatacggttttttggyatgtaatcatattcaaaaccatcttttgaaaaaatattagtttcttcagttactggtagcactgtaaatgtgtccaacttttagagaaccgacattttgc

SEQ ID NO: 439910 - DNA, 201 bp, Homo sapiens
gtcttaacatataaacttttgtctcaggctctgttttctaagaaatatatgctaaggcagtcctggtgctgaaaatgttgggaaccaggggctagatattyttaaagctaatttaaatgttcaagtcattattaagttatcatattatttcagcatgttgccaaaactattcattttaatgaaaacttcatttcacatatt

SEQ ID NO: 439911 - DNA, 201 bp, Homo sapiens
tgtgtgtgtgtgtgtgtgtgtgtgtgtgtttaatcagttttattaaggtataatttacatacaataagattcatactttaagtaaaaaaatgcagttttgrcaaatgtatccagttatgctgtaatcaactttccatcatcccatacagttgcctcctaacattttgcggtcaatcctacacctttacccaccactctaca

SEQ ID NO: 439912 - DNA, 201 bp, Homo sapiens
cacctgtaatgaacctgatgattaaacacaggatgcagtaaagaaaatggcccaaatcagaagagggtgacgaagatgacctctgcttgccctcactgctygttattaaagacactccactgccgccatgacagtttacaaatgccatggcaacgcactagggcaatgacctgaaagttaccttctatggtttcaggaact

SEQ ID NO: 439913 - DNA, 201 bp, Homo sapiens
ataaacttaatcaaggaaacaaaggacttgtgcaccaaaaactatcaaacattgctgaaagaaattaaagaaggtacaaataaatgaaaaggcatccattsttcatggactgggggacaatattaagatggtacaccacccaagtgatctatagattcaatgcaatccctatcaaaatcccaacgactttcaatgactttt

SEQ ID NO: 439914 - DNA, 201 bp, Homo sapiens
atgcaaggagattttcccttttaattattcatttcctgcaaaatggtggggggatcaagaacaataaataaaaataaaataaagcacacacaaaaaaaaasagagagaaggaaaaaccagtagaatctgacattttggcacagggtagataaaagtgaaaaatggtgaagaggaaaaaaatgataattcatattccctgtt

SEQ ID NO: 439915 - DNA, 201 bp, Homo sapiens
taggaataaaaatggggccatcactattgactctgcagaaacgtaaaggactataagggcatattaataacaactttaagccaacaaatttgataacttasatgaaatgggcaaattcacagaaagacacaaattatcaaaactcattcattaagacatggaaaaatctgaatagatttataacaagtaaataaactgaat

SEQ ID NO: 439916 - DNA, 201 bp, Homo sapiens
ttgctgctttctccctttacctttaattccaaaccattttccatccttggccctcttctccaaaattgtcctttttaatcccagacaatttcttctactcmtaagacatcacacttatgaattcaactaagcattatatgcttttttcccaactattaaattaaagtaaaattgtgtctaagacctgtaacagttaccttt

SEQ ID NO: 439917 - DNA, 201 bp, Homo sapiens
atcccattaccagccaggatgtagccaaaaataatgcataattaaattctaagctcatggtttcttaaagagaattttatgttcgaatagcttgaaaaagygcctcttcagtatctgtaactattgctcaggtaagggatctttttgtcggcaataaatggtaatggagtcccttccttagaatctaaatttacaaaactg

SEQ ID NO: 439918 - DNA, 201 bp, Homo sapiens
tgaatttttgtatgtggggtagggtaaagacaaactgttttttcttttgtgtatggatatgcaaatattctgatgtatacgtacatatatacgtatatacrtatatacacacatatatacatatacacgtatatatacatatacacgtatatatacatatatacacatacatgtatatatacacatacacgtatatacaca

SEQ ID NO: 439919 - DNA, 201 bp, Homo sapiens
aagcttgctcaagatttttgaatacttaagaaaacagggaaagcatgaagaaacaagagcaatctcatcttagggatctttagctgtggctcaggtatctkaagatcatggcaaaaactaaccttgggggcttatccaatgagcttctttaaagcgggttatttacaaacatcacctttatgaatataaaaccagagaaat

SEQ ID NO: 439920 - DNA, 201 bp, Homo sapiens
tataaaaggctcccgggaccaaaaagtttgagaaacactgctcttaacagaatagtacaagattctgcctatatgaagttcccaatcaatgcatggcttgycacctcaaatgttctttggacatacatccagaggatattatttcagacactctctacacttgaaatcagtcagtcaataaacttagttatctactgggta

SEQ ID NO: 439921 - DNA, 201 bp, Homo sapiens
ttatgagtataaaaggctcccgggaccaaaaagtttgagaaacactgctcttaacagaatagtacaagattctgcctatatgaagttcccaatcaatgcakggcttgtcacctcaaatgttctttggacatacatccagaggatattatttcagacactctctacacttgaaatcagtcagtcaataaacttagttatcta

SEQ ID NO: 439922 - DNA, 201 bp, Homo sapiens
tgggtatagtgtgtgatgctgaggtttggggtatgaatgattctgtccctcaggtactaagcatagtacctaatagttttttgacccttgccccatcttcktcccccttctagcagtccccagtgtctactgttaccatctttacgtcaatgagccatgagtactcattgtttagctcccacttataagtgaggacatgta

SEQ ID NO: 439923 - DNA, 201 bp, Homo sapiens
tcctatgcattttttgttaggaagctactggaagatatgctccaccaaaatgaagaataaaatcgagaaagaatatgacatgagatgaaacacaaaagagragggacaggaactcccaggagaacaaggtggtaagccttcagagtgtcctaggtccagactgagctcgatggagggctctaggacggaggcctccagggt

SEQ ID NO: 439924 - DNA, 201 bp, Homo sapiens
tcaaaaaaagggcggatcatcttaatgttctatggtcaagctctctacacacacaagcttctaatcagttttttcagtgcctaagtaaagaatacattgcrtccataaaacaagaacaggatgctataaaaagaaggagacagctggagaaaaggaagaactgttacacattaaaactatgagagcaaaaataaatttttt

SEQ ID NO: 439925 - DNA, 201 bp, Homo sapiens
tgacagtctcactctatcacccaggctggagtgcagtggcatgattgtggctcactgcagcccatacctcttgggctcaagcaatccttccacctcagcaycctgagtagctgggactataagcacttgtcattacgctcagctaattttttttttcttcatagaaacagggtctcactatgttgcccaggctggtaaaat

SEQ ID NO: 439926 - DNA, 201 bp, Homo sapiens
aaacctaagtgtccatcaacagaagactgggtaattgcaccactgcactccagcctgggcaacagagcgagactccttccaaaaaaaccaaaacacaacaraacaaaaaacagacgactaggtaaaaaaaaatgtggtacatacacacaatgaagtactattcagacataaaaaagagtaagatcctgtcattgccagcaa

SEQ ID NO: 439927 - DNA, 201 bp, Homo sapiens
agaaagtccacggttcctagatggccttcggaagcagccatcatcaggggagtgcggccctgcttgtctgccatgttgacatcagctccatgggtgagtaraagatcaacaatctgcaagtgcagagaaacagggaccaattagcccaaagaagagctgctgagaagacacgtgcacactatctcttactctgtaggaatt

SEQ ID NO: 439928 - DNA, 201 bp, Homo sapiens
ttgccttattgcagtacaaggtgctggtgagcatcccctccttgaaactgccttctcctttgacttccatgaccttacttccttttgtttctctaattccyctctaaattactatttggctcatcatcttcttttagcatttaaatataactattctgtttcatgcttctaaactttctactttatattcttgggtgatct

SEQ ID NO: 439929 - DNA, 201 bp, Homo sapiens
aattgcttggggtttggtgtacagatgactgtcacccacagtgagcatagtacccgacaggtagtatcctcaccttcctcctactttccaccctcaagtgrgccccagtgtctgttattctctttcttgtgtccatgtgtactcaatgtttagctcccatttattagcaagaacatgcagtatttggtattctgttcctgt

SEQ ID NO: 439930 - DNA, 201 bp, Homo sapiens
cctatagacattattcaaattttacagtttttccactatgtcttttcctgttcctggattctatccaggaccccatactgtatttagttatttttctttagtcttctggagtctgtaagagatccttagtctttgtcttctatttccttgacactttttttttttttttgagaaagagtctcgcactgttgcctgggctag

SEQ ID NO: 439931 - DNA, 201 bp, Homo sapiens
ttggttttccactgttataatcacagctaacaatgaaatagcctttactatatgccagaaactatttctaagcatgctaactggcacaacagtctgatgayagttattactactttcattttatagataaaacagaggcaaaaagagattaagttatttgcctaaggtcttttaccaatctgaatcttatctactatgctc

SEQ ID NO: 439932 - DNA, 201 bp, Homo sapiens
tctacatgttgtgtgattccaactatatgacattctgggaaaagcaaaactacagaaacagtaaaaagatcagtggttgccaggggttgaggagggtaagrggagaggaatgaataggtggcggataaaggaattttagtgcaatgaaactatgctgagatacttaatggtggatacatgacattatgcatttggcaaaat

SEQ ID NO: 439933 - DNA, 201 bp, Homo sapiens
agatacagattgtacttagacttgatttctttcaaattgcaaatgtcagtgctctgtgaaggacaaccaagttccaaatggggcagaggaggatttcaggsgcctggtaaaagctagtgagtgacacaggctatcagctaccaggattgcagaaaggagttggggtgacagggacttacgttcattttcctgcgacaccga

SEQ ID NO: 439934 - DNA, 201 bp, Homo sapiens
aataaaaaagttgctgaatcctgatctattcagatcctctcattttatgattaggaaacagtggagtgacttgtctaaagtgattcagtcactggcagtasagcagcccatgaagccaggtatcctgactctcagtacaatgagtgcctccttccttcccactttaaagctaaacagatttaaatctctttttaaaagctt

SEQ ID NO: 439935 - DNA, 201 bp, Homo sapiens
aaattgactttcttttcatgctattttgaggaacattttattaaacctcatccagagcaacagaaatgggaatctgagagtcacgtataaagaatgtcttyctagatcatatctctcaaaatattagattaattcttcgggaattattcttcataatgctctaggacatagtagaagtttatgaaactaggacctagaact

SEQ ID NO: 439936 - DNA, 201 bp, Homo sapiens
taggtaagcagtaccttatatatcagcagtaccttttacattataacctttcagtaataagctttaaaaacaggtcaaaatcagcatgaagagagctattyctttcttttctaggcactataatactgttagagtcctaagaatcagtggggggtggggaggtaaaaggaacgtgactcatgtgtcatacttacttctagc

SEQ ID NO: 439937 - DNA, 201 bp, Homo sapiens
atcacttgaacctgggaggcggagattgcagtgagctgagatcatgccattgcactccagcctgggcgacaagagtgaaactcctctcaaaaaaaaaaaawaataataataataataatacttactgcagcaagaatcactgatggatcctaatattagtggacaaaagtatgacaagaaccaggatgtctgtctttctag

SEQ ID NO: 439938 - DNA, 201 bp, Homo sapiens
taaaaatggctacctaatttctacatagtccatattctctctggccttgaggaggctgggctctgttctgaatctgtctactatagtacccatgtaggcacccagagctgggtaaacagaaaacagtaggaaaggtgggtaagggcagcttctgattgctcattattacttcagaagctcttttaatttgtgcaagtaaca

SEQ ID NO: 439939 - DNA, 201 bp, Homo sapiens
caaactcactttttgaagttggagctttccctcaaaaccatctctctctcttttttttaaatattgccagttactcaggcataaaacgtagtagctatttcccccctctcctatattttctctcctgaaaagtcacaagtatctcattctcttcattttattcttgactgctcactccctggccatcccaataatctacat

SEQ ID NO: 439940 - DNA, 201 bp, Homo sapiens
ctagagaaatctctgttggagttaaattcacatatccaggaaaggccctgaatgagatctccctgtccctctactgtgattatgctttagaagaaatatgyaatgttaagtggagacacgctcgagagatgccaacctatcaaaatctttgcttcaaatggaaagtatttcttcaataaatgaaatagttctaaagttgtg

SEQ ID NO: 439941 - DNA, 201 bp, Homo sapiens
tgaagcagaaaaattgcctaagcccaggacgtcgaggctgcagtgtgctatgattacaccgttgcactccagcctgggcaacacagcgaggccctgactcaaaaaaaaaaaaaaaaaaaaaaaccaacaacaactgaaaaatcaaaatacttaataataataataattattttttgagacagagtctcacgccattgcctg

SEQ ID NO: 439942 - DNA, 201 bp, Homo sapiens
ttgggaggctgaggcaggaggattgcttgggtccaggagtttgagaccagcctggataccatagcgagaccccatctccacaaaaaatttaaaaaattagscgggtgtggtggcatgtgcctgtgctcctagctacttgggaggctgaggtgggaggatcacttgagcctgggaggttgaggctgcagcaaattgtgatcg

SEQ ID NO: 439943 - DNA, 201 bp, Homo sapiens
gctccactacatctggcaacagacttctcagtggaaaccttacaggccagtaaagaatggcatgacatatttaaagtgctgatgagaaaaaaaattctatkgtagaatagcgtatccagggaaaacatccttcaaacatgaaggagaaacaaaggctctcccagacaaacaaaagctaagagatttaattaacatcagacc

SEQ ID NO: 439944 - DNA, 201 bp, Homo sapiens
tgaggcaggagaaccacttgaacctgggaggcaggggctgccatgagctgagatcatgccactgcactctggcatgggcaacagagtgagaccccgtctcaaaaaaaaaaaaaaaaaagctgaaattattattcctttccacaagattgtcaaagcacactccatgagaagaaaaaaggaagaggagtccttgtgtcccgt

SEQ ID NO: 439945 - DNA, 201 bp, Homo sapiens
tgagtgacagagtgagatactgtattaaaaaaataaaaacaaaccccacaaaaatacacacataataacgcagtagtcttttaatctctggcaaaatcttmcacacacacacacacacacacacacacacaaatattaatctgagagccgttcctatggaagggaaagttagatatcatgaaaattgagaaaatgaggaat

SEQ ID NO: 439946 - DNA, 201 bp, Homo sapiens
atccaggtaagcaaggtcttccaagtgggcagagctggtggctgacaagaaagaaaagtttagttagaatatttaagttcagaaaatgtctttcagctagkctgtatctccggaactttggaatcagggcttactccagccaaaaaatatatatgcaaaatatgtaatatatataaaatacatgtattttatgcctttaaa

SEQ ID NO: 439947 - DNA, 201 bp, Homo sapiens
attgcatttagaataaaatcaaaactccctcccatagtgctcaaggctctagatgatttggaccctgcctacctacccctgcaggcatctcacatcacttycccctcagtctatgccccagctcttctggccttccagtttcttgtttcagcgtaaatgctactatgttagcggggcttcccctgataagcttttcaagtt

SEQ ID NO: 439948 - DNA, 201 bp, Homo sapiens
gttatccctccaccctattttgtttttcttcatagcactcaacactacctgtaattttagtatatgtttaactttttgctcatttgttttttgtgttcctkactaaaatataagctttaggaggatgggaatattgcctgtcttgttcattttgaatctccagcccctagaacagtccctgaaatactcttaagaaatgtt

SEQ ID NO: 439949 - DNA, 201 bp, Homo sapiens
aacttcacagaaaggactgaaagctctactatcttcaggacaaggaaaaggcattctatttggaaataagaataagaatttttataaagaaaagaggaagkagtagttactgctggatttttttttttgcaagtaaaatctcttgtctgttaactgtatcctacaggatatccagctatggaacatttagttttggcaatg

SEQ ID NO: 439950 - DNA, 201 bp, Homo sapiens
ccatcctagggggtgtaaaatagtatctcactgtgattttaatttgcattccctaatgactgatgatgttgaacatcttttcataagctagacatctgtayatcttctttgaaaaatgtctattcaagtcatttattcatttttaaattgggttgtctttttgttgttgacttgtaggagtttttttaatatattctggat

SEQ ID NO: 439951 - DNA, 201 bp, Homo sapiens
attatcttaggtacaaaactcactgtaacagtatagttcacagaccactgtaattgtgatttataaactactcatatcttgagtagaaagcctaaaagttkaacctatcaaatataataactacttttcaagacatagatagtataagatataaatagaaacaatacaaagttaaaaagcaggggagatgaagttaaagtg

SEQ ID NO: 439952 - DNA, 201 bp, Homo sapiens
atatagtattccatggtgcatatgcaccacattttctttatcctatccaccactgatgggcacctagggagattccatgtctttgttactgtcactagtaytttaatgaacatacgcatgcatatgtctttttggtagaacaaaaaaactactcttttaaaatccatacctataattattagaatttgatgaaaaataaac

SEQ ID NO: 439953 - DNA, 201 bp, Homo sapiens
tgtaaaacctagcagaacttacttaacctctctgggcctcagattacttacctgtgaaatgaagacaacctcattgagctggtaacaggatgtgatgaatyaatatttgtaaaaaagttaagagagtatctggcacatagtaagtaccatatgagtgttttaaaaataaatcagtaagatcctggtagtgattactgggct

SEQ ID NO: 439954 - DNA, 201 bp, Homo sapiens
tgctggatttttttttttgcaagtaaaatctcttgtctgttaactgtatcctacaggatatccagctatggaacatttagttttggcaatgtgataaaatyaatcatttttatagtatgacccgggtgaacttgggctctaaacctccatctttcccctcctttgggccttatctgtacctttatggagattttctagtgg

SEQ ID NO: 439955 - DNA, 201 bp, Homo sapiens
gaaaattgtggctatgtgttaggttaactatgtatgtgtgcttgaggtaaaatacacataacataaagctacccactttaaagttgaggtaggagatcagyacccacctgtaatgaacctgatgattaaacacaggatgcagtaaagaaaatggcccaaatcagaagagggtgacgaagatgacctctgcttgccctcact

SEQ ID NO: 439956 - DNA, 201 bp, Homo sapiens
attattttcttgtaaatatagaatctgaataggaatttgctgctttctcccactttgcctcacatcttcctactgcctttctgttctgttaatgcatctckagctctaggaaaatggtcatcttttctctgttccaacaagaagtctttaggtagctggcagggcttcatgaggcagaagagctatgactccactgaaatg

SEQ ID NO: 439957 - DNA, 201 bp, Homo sapiens
ctgcactgtactgtgatgtaaggagaaataaatctttgttaagtcattgagattttgcaggtttgtcaatagcagctagtgttcttcaccttaactaatayatcccaaaatgattacatatgcttatcctcaggaaaaaaacagcaatacaggcttgatttccatccgcaacaaattttctcctagtatcactggcacagg

SEQ ID NO: 439958 - DNA, 201 bp, Homo sapiens
aagcttagcattggctggactttaatggatttagtcactggaaactttaaaaatgataaggttttataaaagggcaataaaaactttgaaatgattctgcyctaaatcaaagagatttacaatatatcaattctttcttcatatcagaataataatactgaggaagtccattaaatggttaacttaattatagcctgtgaa

SEQ ID NO: 439959 - DNA, 201 bp, Homo sapiens
aactgcaaatctaaaagattcttcagtgatactctgcttacagtttgatacacacacacatacacacacacacacacacacacacacacacacacacatayctctctctctctctctctctcactctactcaccttgttactcatttatttctatgacaatgagacaacgatacatctatgtaacgttaggtcattctctc

SEQ ID NO: 439960 - DNA, 201 bp, Homo sapiens
aattcatttgctaataaaattacattttcatttgcataaattcttagtagattaagcccatgagtaaagtagatgatatattattttttatttttaaaagrgggtacttgccttcccccttaataaagctaattttattcttctaaattctgattattatttttttttgagatttcctgttttgaaggaattacttacaag

SEQ ID NO: 439961 - DNA, 201 bp, Homo sapiens
gctcttatctgtaggttaggttgttgattcattttgagttttctgtatggtgtgaggtagggtccaacttcattcttttgcaggtagatatccagttgtcycagtaccatttgctgaagagactattctttcctagacttagcacccttgttgaaaagcaattggctatagatgtatggggtttatttctggactttcaac

SEQ ID NO: 439962 - DNA, 201 bp, Homo sapiens
atggagacctaaatgagaggcagatatatcttgtagcaaaactataaaacatatgaattatgccagagctgactgcaagcatttggatagccttcttttcytttttttttgagacggagtctcactctgtcgcccaggctggagtgcagtggcactatcttggctcactgcaagctccgcctcccgggttcacgccattct

SEQ ID NO: 439963 - DNA, 201 bp, Homo sapiens
tgagcacaacacagtgtcttcctcactggaaagaaatattacaaatggtgagaatgtctgaataagagataacttgtaataataggcatattgctcatagyatgttaatctcaataatcttaacaaagcatgttgtaaacactaagtaaggtaatcgaatggaggttcttaagagacagataactgcaaccctttctacat

SEQ ID NO: 439964 - DNA, 201 bp, Homo sapiens
aataaaaatggagttttcctctggattacaagaaataggaagcaagtctgaaaataaagacttacattgatatcactaacatttattcagcatggagcagwataggaaatagtctaatctttaaacaaagcatgaggaataaaataatccaagaaaaatcatgttagtctcaacaaacacatatacttctatcaatttttg

SEQ ID NO: 439965 - DNA, 201 bp, Homo sapiens
taggttgacttaccgtccatatttattcaggctttgttctaaattcagagcatttaatctcaccttgtaacaatccacagtagcacagattttaaaggacwttacaaaaatctttttatggggtcagatatatccattagcattacaagcattaactgaagtgtcatacggtttgatgccaaaacaacagcatcacaaaac

SEQ ID NO: 439966 - DNA, 201 bp, Homo sapiens
cttctagcgcgtccaaaggtgcagttttctgctgtatcaaatctaagctaagctcctccccaggttctgacggctttctgtaacatggctcaattctgtcstgtccacgcctcacaccctgccaccatgtgctatctgaggcagacaaggcagtcttcacagagtaccctgacaaactgctccaatccagttcctgtgcct

SEQ ID NO: 439967 - DNA, 201 bp, Homo sapiens
ggctggagtgcagtggtgcgatctcagctcactgcaagctccacctcccaggttcacgccattctcctgcctcagcctcccgagtagctgggactacaggygcccgccaccacgcccggctaattttttgtatttttagtagagacggggcttcaccatgttagccaggatggtctcgatctcctgaccttgtggtccgcc

SEQ ID NO: 439968 - DNA, 201 bp, Homo sapiens
agtttctcattagtaccagcgcgcttggtaagagatattagatcactccctacacctttgagaaagtcatcatacatagtcactactattacagctccttrggaatggttcaggattagtctactcataataaatcagcaggtaaaacctttctccttggcgaattcttgtctttcaaagtaacttgtttaaatttcattt

SEQ ID NO: 439969 - DNA, 201 bp, Homo sapiens
tagttctcccatttattggctgtaaaacctagcagaacttacttaacctctctgggcctcagattacttacctgtgaaatgaagacaacctcattgagctggtaacaggatgtgatgaattaatatttgtaaaaaagttaagagagtatctggcacatagtaagtaccatatgagtgttttaaaaataaatcagtaagatc

SEQ ID NO: 439970 - DNA, 201 bp, Homo sapiens
cgtctctactaaaaatacaaaaaattagctgggcatggcagcgggcgcctgtagtcccagctattcgggaggctgaggcaggagaatggtgtgaacctggraggcagagattgcagtgagctgagatcgcgccactgcactcctgcctgggcaacagagcgagactctgtctcaaaaacaacaacaacaacaacaacaaca

SEQ ID NO: 439971 - DNA, 201 bp, Homo sapiens
gatattatccaggagaatctccacaacctagcaagacaggccaacattcaaattcaagaaatacagagaaccccagtaagatactccacgagacgatcaaccccaagacacataatcatcagattctccaaggttgaaatgaaggaagaaatgttaagggcaggcagagagaaaggccaggtcacctacaaagggaagccc

SEQ ID NO: 439972 - DNA, 201 bp, Homo sapiens
tgctggtgaggttgtggagaaaaaggaatgcttatacactgttggtgggagtgtaaattagttcaatcattgttgaaaagtgtagcgattcctcaaagacytaaaacagaactaccgttcaactcagcaatcccattactgggtataaatccaaagaaatacaaatcattctatcataaagacacatgcacacgtatgttc

SEQ ID NO: 439973 - DNA, 201 bp, Homo sapiens
gttgataggtgcagcaaaccaccatggcacatgtatacctatgtaacaaccctacaagttctgcacttgtatcctggaacttaaaataatataaaataaataaataaaaaaggaaatctcatgattgtaggtttttacatatattcttcacataagttttttaaaatcaaggtgaaattaatataaaattaaccactttaa

SEQ ID NO: 439974 - DNA, 201 bp, Homo sapiens
cacaactggcacagatgcacgaagaccccttccaggcctctgttgccttctcctgaacctctgagcccgcttgcctgttgccctggaagcagctcctctcycccgaggggatgccgctgttctttgctacaaaacaagcgcagtgcagagccacagtgacacctagtggtaaactatggtgaagcacaagtgacatccaca

SEQ ID NO: 439975 - DNA, 201 bp, Homo sapiens
ctcaggcaaccatgctgtctgcatcagtataagataaaactgtgctaatgacaggagggcatgtttaaatgtacgtttccatgtatgggataaaatacttygtcaaatgaagcttggtcaaatgaagcttcatgctacttctctgtgaatgtggtatttattttatggggcagcaaaggcagggattagcttcatttttgc

SEQ ID NO: 439976 - DNA, 201 bp, Homo sapiens
tgagagcccttgatggaaaagcagacattcagacagatgcactgagctctagctgagtagtcttaggcaggaaacaggaaatagaaagatcagctggctcyatgacttggggaggtaaaaagagggagataaacctcacccaggactgcctcagttgtgggctctcctgacaaacggaattatgggcccctcataaaattc

SEQ ID NO: 439977 - DNA, 201 bp, Homo sapiens
agatttcaaggttcctgactccaggccctggctcctggacagcatttctggatctgccttgggcattaaagaggagacagagactggggtagaatgtttaytcaaagggagaataacagagaactaagagaaatatattaacattcaagtaaaagaagctaatagaacaccaagcagatttaacccaaataagactatctc

SEQ ID NO: 439978 - DNA, 201 bp, Homo sapiens
tttcaaaactgaaaaacgaagagaacgaagactgaaaaaaacccagaataaaatatccaatgactgtggaacaattacaaaaggtgtaaatatgcataatrgggaataccagaaggagaaaaaagagaaaaaggaacagaataaatatttgaaacaataatgactgagaattttccccaaattaatatcagacagcaaacc

SEQ ID NO: 439979 - DNA, 201 bp, Homo sapiens
gactccttctacacgatggaaggtgaggaagagtgggaaggactttatcttgtggctttggtgcccgctccactgcactagtatggaacaccaagtagatwtcaaggttcctgactccaggccctggctcctggacagcatttctggatctgccttgggcattaaagaggagacagagactggggtagaatgtttattcaa

SEQ ID NO: 439980 - DNA, 201 bp, Homo sapiens
tgaattaaagttattactagttttagtatactttacactgctaagtaaacaccttgctttttatggatcaatgtacccagctggatggcatgttctaaccrtttagactgctaaaaggaaagctcttgaaaaataaagatgacttcaaggaactgaaatactaacatcatagcatcttcatcaatggacaaactccagcct

SEQ ID NO: 439981 - DNA, 201 bp, Homo sapiens
atttctccacgtccttgccaacacttgttatgttccactttctttttataattgtcatcctaatgggtataaagtagtgttttattgtggttttggtttgygtttccctaatgactagtaatgttgaatatcttttcatgtgtctattggccatttgtatatcttctctggagaaacgtctatgtaagtctttttcccatt

SEQ ID NO: 439982 - DNA, 201 bp, Homo sapiens
cctcctgagtagctaggattacaggcgcctgccaccatgtctggctaatttttctattttagtagagatggggtttcgccatgttggccaggctggtctcraactcctgacctcaggtaatccacctgccttggcctccaaaggcatgagctgctgcgtccagtctgattcattttaatagaaatgttaatgccccaattc

SEQ ID NO: 439983 - DNA, 201 bp, Homo sapiens
tctgtagggtttcaaacatgctttccctctgcctggaattctctttcctgtttagttcatcagaaaaacaatttctcattcttcaaatggcaactcacatsatctcctctgtgaagccttccctggtgccccccgataaactcaggggttccttccttaggttcctgttgtacctggtacacatctccattacagcaccca

SEQ ID NO: 439984 - DNA, 201 bp, Homo sapiens
aaggctgctaactagcttcaataggaagtcaataagtttggagggtcttcactgagttcctgttaagtttccagcactgtgctagaccctgtaactactaytatctcacacaaaccatttctagtggttgcagtctgaaagtctgtggtgggctagattattgatttggactaacaaagcaatagtttctttttttgttct

SEQ ID NO: 439985 - DNA, 201 bp, Homo sapiens
aaagtaacgcctactattaactaagattttacccagttgtatgttatatgaacaatattgaatagttttttttttttttttttttttttttttgagacagrgtctcatactgtcacccaggctggaatgcaatgaagtaatcacggctcactacaactttaccttcccagcctcaggcgattctcctacctaaacctccca

SEQ ID NO: 439986 - DNA, 201 bp, Homo sapiens
gatatttttctttctttttttttttttttttgagacagagtctcgctgtgtcgcccaggctggagtacagtgacgcaatcttggctcactgcagtctcccrctcccaggtccgagcaattcttctgcctcagcctcctgagtagctggggctacaggcgtgtgctgccgcgcctggctaatttttgtatttttagtagaga

SEQ ID NO: 439987 - DNA, 201 bp, Homo sapiens
tttgcgcagagtaaactgtgtcttggggtttccagtcggttattttgttccacttccacggaacttggggatgaggacagagcagcccctgtagcacctgytgttctaggccctgcatgattccgttcagtgcaatgtgaccaggaccgcggcccaccgcacagagcgccacctcacctcgcacacactctgctgcccatt

SEQ ID NO: 439988 - DNA, 201 bp, Homo sapiens
tgacagaatatctagatgtgtggttgattttaattttttatttcattttatttttgagaccgagtcctgctctgttgcccaggccggagtacagtagtgckatcttggctcactgcaacctccacctcctgggttcaagcgattctcttgcctcagtctcctgagtagctgggattacaggcacataccaccatgcccgcc

SEQ ID NO: 439989 - DNA, 201 bp, Homo sapiens
ggtccaatcatggctcactacagcctcaacttcccaggctcaggtgatcctctcctctcactcagcttacagagtagctgggattacaggcatgctccacyacgcctagttactgttttattttttgcagcgatggggtcttgccgtgttgcccaggctggtcccgaactcctaagctcaagtcatctgcccacctccgcc

SEQ ID NO: 439990 - DNA, 201 bp, Homo sapiens
gtctgcagtgagggtctgtgactgttagagagaggtggactcgggtctttgggagctttgatgtcccactgcctggcataatagaccataagtcctctttstctgaggctctgagttttacaaatgtttttcttttcttttgtaatgtgtgtgtgtgttttaagttttaatttctttttatcattatgagaatacacttct

SEQ ID NO: 439991 - DNA, 201 bp, Homo sapiens
actgttgtactctcagcattaaaaacggtgccaggcacagagcaaatgcttgatcagtgttggttgaattaaagaacatcggaagaggactaacagcttakgtaccaaagtcccagcactcaagcagaatttttgttcggattttcatgtttttcctttgtctatttttacttttatttttatttatttatttttttgaga

SEQ ID NO: 439992 - DNA, 201 bp, Homo sapiens
ctgaggcaggagaatgcatgaaccctgaaggtggagattgcagtaagctgagatctcaccaccgcactccagcctggctgacagagcgagactctgtctcaaaaaaaaaaagggggaaagagcaaatacatgcttgtgagacaggtaagggagatgaatactgctgctgccgcagccagagaccatgcagttagcagacgt

SEQ ID NO: 439993 - DNA, 201 bp, Homo sapiens
tgactcgggggtctttctcttagtctgcagtgagggtctgtgactgttagagagaggtggactcgggtctttgggagctttgatgtcccactgcctggcakaatagaccataagtcctctttgtctgaggctctgagttttacaaatgtttttcttttcttttgtaatgtgtgtgtgtgttttaagttttaatttcttttt

SEQ ID NO: 439994 - DNA, 201 bp, Homo sapiens
tgaggctgcagtgagccaagatctgcactctccagcctgggcaacagaggccctctcaaaaaaaataaacaaaaataaaacatagttaatgttgtatacaygatgattgagcgttagtagaatgttgaccatttttaataactttatttatttatttatttagagatggagtctcgctctgttgcccaggctggagtgcag

SEQ ID NO: 439995 - DNA, 201 bp, Homo sapiens
tctttttaaaagctgtggataatttgaataatcaccatgtttccttaatataataacatatagtaataaaagctgccatcaaacatcatatcattgatacrgtgatttttatattctaaaaattattattaggtattagaatttttctttttttttttttcctcgagatggagtcttgctctgttacccatggtggagtac

SEQ ID NO: 439996 - DNA, 201 bp, Homo sapiens
ctgggaggctgaggcaggagaatcacttgaactggcgaggtggaggttacagtgagccgagattgtgccactgcactccagcctggacaacagggtgagaytctgtctcaaaaaaaaaaaaaaatgctgggcgtggtggctcacgcctgtaatcccagcactttaggaggtcgaggctggtggatcacctgaggtcaggag

SEQ ID NO: 439997 - DNA, 201 bp, Homo sapiens
cctgaggtcaggagttaaagactagcctggccaacatggcaaaacccccatctctacaataaataaataaataataaataagcaggctgggtgcggtggtrtgcatctgtagtcccagctacctgggaggctgaggcaggagaatcacttgaactggcgaggtggaggttacagtgagccgagattgtgccactgcactcc

SEQ ID NO: 439998 - DNA, 201 bp, Homo sapiens
ccaaaccctttgagcgtgagccctttccccagccagtggaggaggctggctctcagtggatttgcatctcacagttatttccttgggctcttctctaaccwcctgtgacaatgaaaataatattactttcttagaaacagagtgaaaaaatccagttccaggtgatctgtgattgcataaactcttttctgcctcctatgt

SEQ ID NO: 439999 - DNA, 201 bp, Homo sapiens
agtattaactgttaacgttcggtagtttcattgctcaccacactcatttgatgtccttccttccccatgcctgagttctgactgcaatgtgtttctcagtktgaagaccctgaagacactctgtgatgatacattttcatgtccccaggtggagggaagctgtcacagcccgcaagaaactgaggcgccaaatgcgggctt

SEQ ID NO: 440000 - DNA, 201 bp, Homo sapiens
tcagtgcaaacattagggttcacccaaacctcaagtgttggacccttttctggacttgagcacacttccacctttgtggctacctctgggccttcaagttyatctgtgctgggaaacacaggatttagttttaaatcacccaccagtgttggggctttcccaagcacttctgcttttggacaagaagctggagaaatagtg

SEQ ID NO: 440001 - DNA, 201 bp, Homo sapiens
ctatgatgatctgaatttttctctttcagcttgttctaaagacgaaggggaactccctagtgctacaggctgtttcaggaagccaattaattttgtacacrtaatacttaattaccttctaataattggagcagaagatgaacccaactaatcctttcagtgggcagcagcctagtgctttttcggcgtcttctagtaatg

SEQ ID NO: 440002 - DNA, 201 bp, Homo sapiens
gcagttcaatctctgaacctgattttcctccaacctgccccttcctgctcataggatgtgtgtgctgctcctgcaagggtctcacacactggctaatccayggtggtctgttcctcccagtgatgtggcatgggcgtctctggacctgccatccctcgtggctgagcacctccctgggaggcaggagcatgtgttttggaa

SEQ ID NO: 440003 - DNA, 201 bp, Homo sapiens
cgcgatgaaggaatgtgagaaagtgcttagcgctccagccgctccgagggaagccaggtgggaggagatcccgaaacgctaaggttttgacagcgttacaktgaattctccggctgtagagattggaggaagtcgggagaaattcgtctctaagttgtaaggtggaacagcattcattttcttactgccaatggaggtttt

SEQ ID NO: 440004 - DNA, 201 bp, Homo sapiens
ggggtttcactgtgttggccagaatggtcttgatcttctgaccttgtgatccgcccacctcagcctcccaaagtgctgggattacaggcgtgagccaccgyacccggccttgactctgattttgaatgctatcccctttgctccgtttagtgtttctaatgctgctatggaggatttgttaacagctgcaaccacgggcat

SEQ ID NO: 440005 - DNA, 201 bp, Homo sapiens
tatgtacataattctcagagaatgtgcatgaggcgtgggcctgaattggtagcaaggaaaaaacagaggatggaacagggtctggttgggtagaggagaarcagaattcccggagaggagtgcaggggtgtagctggagacagtgtacttgagaggacatgatgaaagcgtggaggtaccagcttggttgtgtggccaggt

SEQ ID NO: 440006 - DNA, 201 bp, Homo sapiens
agtttgaggctgcagtaagctccgatcataccactgcgttccagcctgggtgaaaaatgactgacactggaaattgttcatgatagaatacaaaggcaaasagtctatatacagataccagctgaatgtacgagctaaatgaggctggaaggatatacaaaggataatttttttccctctgtaaaaataaatgactactca

SEQ ID NO: 440007 - DNA, 201 bp, Homo sapiens
ctcagggcctgtatgtgcaaaggaaacctgaaccattgaggttcagactaggttgttgacaggatacaatgctgtgaagatgtcagtactggtaagttctraaattcatcaggataaacaaatatgcatcaattgctgagaaagttttaaataagactaacatggtttgcttggcctgataccaagacatacagtaaagct

SEQ ID NO: 440008 - DNA, 201 bp, Homo sapiens
accttcccagagataggtcgtggtttattgacatcccaaaactgttcagtttcttttttattcaaatagagtgacatgatgagggagcaactgcagctgtyagaggcgacaggaacgtgtctaggcgaacgactaaagcacctggaaaggctgatccggagttcaagggaagaggaagttgcctctgagctccatctctct

SEQ ID NO: 440009 - DNA, 201 bp, Homo sapiens
agagtggtcacagaaacagaggctgcttgacgtagactggagatggctaggccagggcgctgtgtggccatccgcagggcgccttcctctccagatggcasctttccattcgctaggggacacctttcctgcaacagcctagccgaccccgtgtcaggggttgtgcttctgtcacgagacgcctgcagactgtccggtgac

SEQ ID NO: 440010 - DNA, 201 bp, Homo sapiens
gatctagtaccttcccagagataggtcgtggtttattgacatcccaaaactgttcagtttcttttttattcaaatagagtgacatgatgagggagcaactkcagctgtcagaggcgacaggaacgtgtctaggcgaacgactaaagcacctggaaaggctgatccggagttcaagggaagaggaagttgcctctgagctcc

SEQ ID NO: 440011 - DNA, 201 bp, Homo sapiens
gtgaggagcccatgtcctcctttgatgccaagatcaataatgagaacatgaccaagtgcctgcagagcctgaaggagatgtaccaggacctgagaaacaakggtgtcttctgtgccagcgaagcggagttccagggctacaatgttctgctcagtctcaacaagggagacatcctaaggtgaattttcacatccaaaagtt

SEQ ID NO: 440012 - DNA, 201 bp, Homo sapiens
tgtagtcccagctactcaggaggctgaggcaggagaatgcatgaaccctgaaggtggagattgcagtaagctgagatctcaccaccgcactccagcctggstgacagagcgagactctgtctcaaaaaaaaaaagggggaaagagcaaatacatgcttgtgagacaggtaagggagatgaatactgctgctgccgcagcca

SEQ ID NO: 440013 - DNA, 201 bp, Homo sapiens
ttagtggagagggggtttcaccacgttggccaggctggtctcgaactcctgacctcagtgttccacgcaccttggcctcccaaagtgctgggattacaggygtgagccaccatgcctggccttgtttttattatttattactactatttattttattgttattttattatttatttatttttttgagatgaagtttcacta

SEQ ID NO: 440014 - DNA, 201 bp, Homo sapiens
attgtgtgtgcaccaccatgcctggctaatttttgtagttttagtggagagggggtttcaccacgttggccaggctggtctcgaactcctgacctcagtgwtccacgcaccttggcctcccaaagtgctgggattacaggcgtgagccaccatgcctggccttgtttttattatttattactactatttattttattgtta

SEQ ID NO: 440015 - DNA, 201 bp, Homo sapiens
ctcatttttgttgttgttgtttttgagacggggccttgctctgtctcccagcctgtattgtagtggcgcaatcttggctcacttcaacctttacctttccrgttcaagcgattctcctccctcagcctcccaagtagctgggattgtgtgtgcaccaccatgcctggctaatttttgtagttttagtggagagggggtttc

SEQ ID NO: 440016 - DNA, 201 bp, Homo sapiens
aatatttccttatgatattaaagacttttttcatgctgagtttatttctttgaaatagaaatcagtaagtgttcattttagctgtttaaatgagcctatctttttttttttttcggggggtggtaagttagagtctcactctgtcacccaggctggagagcagcagtgtaataatctcagctcactgcaacctctgcctgc

SEQ ID NO: 440017 - DNA, 201 bp, Homo sapiens
atatttccttatgatattaaagacttttttcatgctgagtttatttctttgaaatagaaatcagtaagtgttcattttagctgtttaaatgagcctatctttttttttttttcggggggtggtaagttagagtctcactctgtcacccaggctggagagcagcagtgtaataatctcagctcactgcaacctctgcctgcc

SEQ ID NO: 440018 - DNA, 201 bp, Homo sapiens
tcctggtgcctttgaatggtctgttgtgcttactgcatttgagttttcaatcccatttcctttggtttcctgatatactcacacatggcggttgtggactrttttccaggcatctgcagccctggctagaaagaaggggaaaagtttgcataaagacatggctatcttttggcacaggaagaaaataagtgagttttcaat

SEQ ID NO: 440019 - DNA, 201 bp, Homo sapiens
aaataatgttattctcagatgcttgatgcactgttggaaatgtgattaatttaatcatgcagataaaccatttaaatgtcagtctcccagtttttcataakgaaaagttgtttcccctgtgtgacctcttcaatattctcctatattcatgacctcctcagattgtcacccaccagcatatgctctgaggcagtttagagc

SEQ ID NO: 440020 - DNA, 201 bp, Homo sapiens
tgaggcaggagaatcacttgaactggcgaggtggaggttacagtgagccgagattgtgccactgcactccagcctggacaacagggtgagattctgtctcaaaaaaaaaaaaaaatgctgggcgtggtggctcacgcctgtaatcccagcactttaggaggtcgaggctggtggatcacctgaggtcaggagttcgagacc

SEQ ID NO: 440021 - DNA, 201 bp, Homo sapiens
tcagactctagtgtctctttctcacactattgaacctgtgatgaaaacatctgtaactactagcccacaggtgagaagaacgtatacatttggcatttacrtaagaattaaagattgagagaatggctggggaaaaaagtaatatcacgatttatcctatgatgttttgatgaccgacaaattattagctcaaattagacc

SEQ ID NO: 440022 - DNA, 201 bp, Homo sapiens
tatttgggaggctgaggtgagatcatttgagcttgggaggtcaaggttgcagtgagccaagattgtaacactgcactccggcctggccaacagagcgagamcttgtcaaaaaaaaataataataaaattggccaagcacagtggctcactcctgtaatcccagcactttgggaggccgaggtgggtggatcacctgaggtc

SEQ ID NO: 440023 - DNA, 201 bp, Homo sapiens
ttagggtttttggggtctaagttttctttggttcacgtattatctggttcctcttttttttttttttcctctctgttactccagtttatctcttttatgtwggaggccctcctcagatgccttacccaaggctatctgtctatatctgagtgaggccctaaaaggctagccaagaagttctgtgtttggggtggggtggat

SEQ ID NO: 440024 - DNA, 201 bp, Homo sapiens
cttgttgctggaaacgaaccatgcagctcgtagtcagtcagcccttccctgggctgggatctcatctcccacctacccaaggacattcattcaatgagtawctctctcgtgctaccacccctccccatattaggtggtgcccatcagcagcacacagacatgaaacatgcctccctgtcttggtcccacttccctctttag

SEQ ID NO: 440025 - DNA, 201 bp, Homo sapiens
aacccctgtggtgactgtccactgcaggactgggtggggtcagcacagtgagatatgttagcaggtgtgctgacagcagaatgcaagtgaccttcatctaygtctgtcttaaaggtctgatgctacaggacttggtttcagctaagctgatttcagattacactgttaccgagatccctgataccattaatgatctacaag

SEQ ID NO: 440026 - DNA, 201 bp, Homo sapiens
tccaaatgtatccaagagctatctataaaaaaccttgccaatactagggaagaacagaatctggaaccctagggtgggaagcaagacatgaagcagagaarctccaaaaacctagctgcctcttgagagcagaagcttccaagaggaacaggcagtctcaatgcctctgtgcataagggtccctacagtgcaggggctgcc

SEQ ID NO: 440027 - DNA, 201 bp, Homo sapiens
cattactttcacttactcccagatatcactggaaccatgcaaatactgcttattccctaatgtggttttgaaagactgggaggctcagaagcaagtattaygtctgtccgtacatgtcgtttaaaaaatttttttaagccagtcaaattgagtagtgggcaccaagcccagcctgcttctttactttttctgttttaatac

SEQ ID NO: 440028 - DNA, 201 bp, Homo sapiens
tgaaccattgaggttcagactaggttgttgacaggatacaatgctgtgaagatgtcagtactggtaagttctaaaattcatcaggataaacaaatatgcaycaattgctgagaaagttttaaataagactaacatggtttgcttggcctgataccaagacatacagtaaagctccagtacttaaaaccatgtggggatgcc

SEQ ID NO: 440029 - DNA, 201 bp, Homo sapiens
agcatgtgttttggaagctggtgctggtgttgccggatgtagaggagcagtccccagagagttgtggcaggtcaggaagggttttcccctgtggggtttcyaagaggtggagtgggcagggcagggttgtgggccagggccgggtattcctcttatgtgtgatgggaactcggaagtgtaggtttatgttttaatgcttgg

SEQ ID NO: 440030 - DNA, 201 bp, Homo sapiens
ttaaagcatctcacttcatttatcaggcatacctgaccctgaaatcatacctaaccaggagagtacagctgacatttcatctcacttccaaatttggttcsaaagcacagtacctaaaaaagttcacaagtatgctttctcccaggataaacaataacagtgaaaatctattaatgtaatttgttgccataatagaaaaat

SEQ ID NO: 440031 - DNA, 201 bp, Homo sapiens
acaaggggcaaagagcatggggaccatgtagccctgtccccaagccgcagccatggcactcagtgctgatttaacattctttctttgtcaaagaggccttsttctatggctctggctgtgcccctgttcctggctgaggtctttgggctgttttgacacagatccgacaggccatctggctggctcaagcccagtatggca

SEQ ID NO: 440032 - DNA, 201 bp, Homo sapiens
cctgaagacactctgtgatgatacattttcatgtccccaggtggagggaagctgtcacagcccgcaagaaactgaggcgccaaatgcgggctttccctgcygcgccctgctgcgtggacgtgagcgaccggctgagggcgctggcgcccagcgcagagtgccccattgctgaagagaacctggccaggggcctcctggacc

SEQ ID NO: 440033 - DNA, 201 bp, Homo sapiens
acggcacatttcaccagtaagaccctccttctcagtatggttgaaatccagtatcattattacttgagacagggtcttgctctgtcacccaggctggagtrcagtgatgcgatcacagctcactgcagcctcaacctcctgggctcaaacgatcctcccaccttggcctccccacgttttgggattacaggtgtgagccac

SEQ ID NO: 440034 - DNA, 201 bp, Homo sapiens
gaagacactctgtgatgatacattttcatgtccccaggtggagggaagctgtcacagcccgcaagaaactgaggcgccaaatgcgggctttccctgctgcrccctgctgcgtggacgtgagcgaccggctgagggcgctggcgcccagcgcagagtgccccattgctgaagagaacctggccaggggcctcctggacctgg

SEQ ID NO: 440035 - DNA, 201 bp, Homo sapiens
gctggaaggatatacaaaggataatttttttccctctgtaaaaataaatgactactcagatgaggtttctaacatgatccagatctagtaccttcccagasataggtcgtggtttattgacatcccaaaactgttcagtttcttttttattcaaatagagtgacatgatgagggagcaactgcagctgtcagaggcgacag

SEQ ID NO: 440036 - DNA, 201 bp, Homo sapiens
tgtgttggccagaatggtcttgatcttctgaccttgtgatccgcccacctcagcctcccaaagtgctgggattacaggcgtgagccaccgcacccggcctkgactctgattttgaatgctatcccctttgctccgtttagtgtttctaatgctgctatggaggatttgttaacagctgcaaccacgggcattttgaggcac

SEQ ID NO: 440037 - DNA, 201 bp, Homo sapiens
ataatttgaataatcaccatgtttccttaatataataacatatagtaataaaagctgccatcaaacatcatatcattgatacagtgatttttatattctawaaattattattaggtattagaatttttctttttttttttttcctcgagatggagtcttgctctgttacccatggtggagtaccatgacagagtgagcgca

SEQ ID NO: 440038 - DNA, 201 bp, Homo sapiens
ttatttttctagggtaattgtcctctgaatatatgaagaaataatgttatttgatgtttcctttaaaaaggaagtctgaagctgggcgtggtggctcctcrcacctgtagtctctgctactcggaggctgaagcaggaggactgcttgagctcaggagtttgagaccagcctggccaacatagcaagacccccttctcaaa

SEQ ID NO: 440039 - DNA, 201 bp, Homo sapiens
taatcccagctactagggagggtgaggcaggagaattgcttgaatccaggaggcagaaattgcagggagctgagatcgtgccactgcaatccagcctgggygacagagtgagactccatctcaaaaaataaataaataaaaataaaataaaatatgaacatgccttatatctgaagggcagatatagaaattatttttcta

SEQ ID NO: 440040 - DNA, 201 bp, Homo sapiens
cttgaacctgggagttcgaggctgcagtgagccgtgatcgcaccactgcactccggtgttgacagaggaagaccccgtctcaaaagaaagaaaattatttkccttccagttttgctccactgtcacctagcatccattgttgctgtaccattcctgttcctttctgtgtggcctggttttctctgtggaagccttttctct

SEQ ID NO: 440041 - DNA, 201 bp, Homo sapiens
ggctgagggcgctggcgcccagcgcagagtgccccattgctgaagagaacctggccaggggcctcctggacctgggccatgcagggagattgggcatctcytgcaccaggtcagcatcagctgtcgcctgcctcgtcagggctcccctgcccccacttggttttaccaggagcggaattaatgtgtgtgtttggagggtga

SEQ ID NO: 440042 - DNA, 201 bp, Homo sapiens
agtacagatcgttgctccattttaaaacaacagcctgttttgtgcagatcagcttcatagtaagatgtggtatttgtggacctaggtctgtgtgatatttytctttcttcttttcctgaaagtctttataattcaaatatagaattagattcttcaagtgttttttttgttttttgttttttttaaatctgtagaattcta

SEQ ID NO: 440043 - DNA, 201 bp, Homo sapiens
acgttcggtagtttcattgctcaccacactcatttgatgtccttccttccccatgcctgagttctgactgcaatgtgtttctcagtttgaagaccctgaaracactctgtgatgatacattttcatgtccccaggtggagggaagctgtcacagcccgcaagaaactgaggcgccaaatgcgggctttccctgctgcgccc

SEQ ID NO: 440044 - DNA, 201 bp, Homo sapiens
tgcctgtaatcccagcaactggggaggctgtggagggaggattgcttgagcccaggagtttgaggccagcatgagcaacatagtgagaccctttgagtgasactctacaaaaaaaatggaaagattagctgggcatggtggcccgtgcctgtagtctcagctactgaggcaggtttgcttgctgcggtgagccaagtttgt

SEQ ID NO: 440045 - DNA, 201 bp, Homo sapiens
ggtgcttgatgatttattaatcttataactgggcatatatgtgttacgtatgttgtatgattcatttcataataaaatttaaaatcagtaatagtgtcctyggtagttggaacagtataaaagggagtatggggagaagtgagtcttccttctacaacagacccctgtccattgtgcgagcagcagctgcttgcgaaacca

SEQ ID NO: 440046 - DNA, 201 bp, Homo sapiens
atttgggtagggacacaaatccaaaccatattacttggcaacagtcttagaccaaaagcatttaagagttgattgttatttcaagctgtgttaaggtacaytgatagacctgcttcattttagactcttcagtaagatagtttatagtctgtttactatagttccatttttttccccttaaagaaacttttggcattttaa

SEQ ID NO: 440047 - DNA, 201 bp, Homo sapiens
acttaaccaggtctcgcgaggctcactttcatgagaacagcaagggggagtttccacacacttaaccagatctcctgagagctcactatcatgagaacagygagggtgagttgccacacacttaaccagatcttgttgagagctcactatcatgagaacagtgagggggagttgtcacacaaccacatctcgtgagagctc

SEQ ID NO: 440048 - DNA, 201 bp, Homo sapiens
aagtcttctaaaggcccaccaattcgagggagactcttttgactcagcctccgagggctccgagggcctcgggccatgtgtgctctccctcagtaccctgwtaggcactgtggctgagacatccaaggagaagtaccgcctgcttgaccagagagacaggatcatgcggcaaggtatggcacttggtggcagaggttctag

SEQ ID NO: 440049 - DNA, 201 bp, Homo sapiens
tcccttcccctctatcttcctcagactctagtgtctctttctcacactattgaacctgtgatgaaaacatctgtaactactagcccacaggtgagaagaamgtatacatttggcatttacataagaattaaagattgagagaatggctggggaaaaaagtaatatcacgatttatcctatgatgttttgatgaccgacaaa

SEQ ID NO: 440050 - DNA, 201 bp, Homo sapiens
cccttgtcaatgacttggcttttttctgatatttttctttctttttttttttttttttgagacagagtctcgctgtgtcgcccaggctggagtacagtgaygcaatcttggctcactgcagtctcccgctcccaggtccgagcaattcttctgcctcagcctcctgagtagctggggctacaggcgtgtgctgccgcgcct

SEQ ID NO: 440051 - DNA, 201 bp, Homo sapiens
tagtttctcagctttagaggaccagaaaatcttgaaagatgaggggacgtgttcagaaatgaaaatgctctgaaggccttcctgggacgagggccctcagygtggtgtttactttatagctctccagtgaagaagccaagtcttctaaaggcccaccaattcgagggagactcttttgactcagcctccgagggctccgag

SEQ ID NO: 440052 - DNA, 201 bp, Homo sapiens
atgtgtcctgagaaggagaggtacatgcgggagacccgtagccagctgagcgtgttcgaagtggtcccagggactgaccaggtagagccctgcatctcccygtggagtgtgggcaggggacggggctgcttttgtcatttctgtacatacttgatttgggtgtttgttttagacagtgttgggtatttgtgctattaacaa

SEQ ID NO: 440053 - DNA, 201 bp, Homo sapiens
taagctgttttgcattgtgagatgttcactctgtaattggtacctatacatgataaggtatagatgcaagttattttaaataaagttgtttttcaaattctttttttttttttttttttttgagacagggtctcactctgtcacctaggctgaagtgcagtggtccaatcatggctcactacagcctcaacttcccaggct

SEQ ID NO: 440054 - DNA, 201 bp, Homo sapiens
aagctgttttgcattgtgagatgttcactctgtaattggtacctatacatgataaggtatagatgcaagttattttaaataaagttgtttttcaaattctttttttttttttttttttttgagacagggtctcactctgtcacctaggctgaagtgcagtggtccaatcatggctcactacagcctcaacttcccaggctc

SEQ ID NO: 440055 - DNA, 201 bp, Homo sapiens
tttctgtggcagcatcttccagactccacctccaccctccattatttccctcttgaggccccttggtgtggccctggtcctccctgccactcctcctggtyaccccgagcagaaccggctcctcagggccatgccaggacccccctcagcctgcattcctggccatgctgggcttggcctttatttagaacccatgtaggt

SEQ ID NO: 440056 - DNA, 201 bp, Homo sapiens
acgctggcctgtgtcttccgatcccatccccgccccatccctctgttcctcccgccgtctccttcacacactgccccctttctgtggcagcatcttccagrctccacctccaccctccattatttccctcttgaggccccttggtgtggccctggtcctccctgccactcctcctggttaccccgagcagaaccggctcct

SEQ ID NO: 440057 - DNA, 201 bp, Homo sapiens
ttaatcttataactgggcatatatgtgttacgtatgttgtatgattcatttcataataaaatttaaaatcagtaatagtgtccttggtagttggaacagtrtaaaagggagtatggggagaagtgagtcttccttctacaacagacccctgtccattgtgcgagcagcagctgcttgcgaaaccatccagagactttctgt

SEQ ID NO: 440058 - DNA, 201 bp, Homo sapiens
tcccgagtagctgggactacaggtgcccgctacctcgcccggctaattttttgtatttttagtagagacagggtttcactgtgttagccaggatggtctcratctcctgacctcctgatccacccgcctcggcctcccaaagtgctgggattacaggcgtgagccaccgcgcccggcctcctttttatttctttattcctt

SEQ ID NO: 440059 - DNA, 201 bp, Homo sapiens
atgggaggtggtgcctctcatggccacaacttctcaactgggtgtaagtgcacaggtgcttgatgatttattaatcttataactgggcatatatgtgttaygtatgttgtatgattcatttcataataaaatttaaaatcagtaatagtgtccttggtagttggaacagtataaaagggagtatggggagaagtgagtctt

SEQ ID NO: 440060 - DNA, 201 bp, Homo sapiens
caagaactgaccctagccacgatgctcctgctattgtccactgtgctaccattccacccctgctgacccactcatgccctcctatgcttcagcccaggggrtggatggagctcctcaggccacacctacccgtgagcagtggcccttcccagccaggaaaggcaggggaagggaggtggtgtcaggggagctggagtaggg

SEQ ID NO: 440061 - DNA, 201 bp, Homo sapiens
ttttctggacttgagcacacttccacctttgtggctacctctgggccttcaagttcatctgtgctgggaaacacaggatttagttttaaatcacccaccastgttggggctttcccaagcacttctgcttttggacaagaagctggagaaatagtgaactctggttttgggaaaacagaattcagctttaaacctctggaa

SEQ ID NO: 440062 - DNA, 201 bp, Homo sapiens
atctgtaactactagcccacaggtgagaagaacgtatacatttggcatttacataagaattaaagattgagagaatggctggggaaaaaagtaatatcacratttatcctatgatgttttgatgaccgacaaattattagctcaaattagaccttttcttaaactttatccatatcattgttaaagagacccaactgattt

SEQ ID NO: 440063 - DNA, 201 bp, Homo sapiens
tgttgccctgttttataggggttatcactgttggtcaccatccggaaaggctgtgcaatggaaaatactgttccatggttcaaataagaaaaatctctttrggaaaacataggttgaattcagcactatcatcatccatgaaagctaactaaaaagcaaaaatctcatatcatatgcacaaaatctctgactttgaaatgc

SEQ ID NO: 440064 - DNA, 201 bp, Homo sapiens
catttatcatatatttgagacacttccaattgattgcacaagtcagatgttgctgatgagaagattttgtggttgtctgcatggtaatttacaaattctaygccaggcacctgtagtcccagcaactcaagagactgaggtgcaaagatcacttaagctcagaagttccaggtagtgtgctatgactgcacctgtggtggc

SEQ ID NO: 440065 - DNA, 201 bp, Homo sapiens
gtctttttctacgtgacaagcatttgttctccatcacgaataattcagtcaaaatcaattcatttctaaacaaaaagagttaagttttctgttttttagaytttaccatccagcacagctgacagtccattggcattactttaaagtaactttttgataactgattcctaaattgctttttgaatttgtttattctattca

SEQ ID NO: 440066 - DNA, 201 bp, Homo sapiens
gggagcaggagaggcagcgggctgaagaggaaaggtaagtgtgtcttgtccatgcagccgaataaggagctcagtgtggacacaggcaagaactgaccctrgccacgatgctcctgctattgtccactgtgctaccattccacccctgctgacccactcatgccctcctatgcttcagcccagggggtggatggagctcct

SEQ ID NO: 440067 - DNA, 201 bp, Homo sapiens
ggctcatgcaatcttcccacttcagtctcccaagtatatgggactactgtggtgtgccactgcgcctggcagcagttgtatgttttatacagataactttytaaaaacataagcagaaatcaaaataaaagataaaatttgcccacagtcctgctatctgcaaattaaattgttcatgtaaaattttttagtgtttttgtt

SEQ ID NO: 440068 - DNA, 201 bp, Homo sapiens
ttttgaaaggatttgaaaaagattggtggttagtttttcgttagtgtttaatagaatttaccagtgaaaccttctggtctcatacctttctttgtttggargtctccttactagttataggtctactcacatttttctgtttcttcatgagtcagttttggtagatggtgtgtttctaacagtgggcttaatttttctgct

SEQ ID NO: 440069 - DNA, 201 bp, Homo sapiens
gtgcagaagcacaatcacagctaaccacagccttgatcttctaggctcaagccatcctctcacctcagcctcccaagtagctaggaccacaggcgcatgcyaccatacccggctaattttttaattttttgtagagatggggtctctctatgttgcccaggttagtcttgaactcctgggctcaagcagtgctcccacctc

SEQ ID NO: 440070 - DNA, 201 bp, Homo sapiens
aagtgatctggtcacattttcttttaagaatggcatgtagggcaggaatcttgagaggtgggtgctgcagccatccaggtgaaattcaaagggaataagcstgagtttgttagcaattggtgtgaagagaggggataaaatttgagccatatacagaaagaggtattaatagacttggtgatgttgcgtatgaccaccaat

SEQ ID NO: 440071 - DNA, 201 bp, Homo sapiens
ttttatttaagtcactacaaagtcctattaaaatgtgcatcatgggctttgtttcaaattgaaaagtgagaaattgaggtcgtagcatgatccttctcacrgttgcctctttgcatgggaatgtgtgtgtgatcctccccctcgcctgtggccaggatatcacgcagcagcacctctgtgaccccctgacggtgtccctga

SEQ ID NO: 440072 - DNA, 201 bp, Homo sapiens
tacaatgttctgctcagtctcaacaagggagacatcctaaggtgaattttcacatccaaaagttgtcctaaggtggctgaaaaggcaggctttaaacaggrgaagagctttcaggagtggcagtagccaatagtgcagcattctgtctggtagcagatgttgggatgatagtagaggaccttggtctggctttgcagtcgg

SEQ ID NO: 440073 - DNA, 201 bp, Homo sapiens
ctgcccaagcctctgcaggtgctgtctggtggagatgctcatctggctcttgaggataaaatgagtgcaaacacagactgcacaggacagtgcctggcacwggccaggtgcttgctcagtgttgccattagcagcagctgcagtattttttcttggttcagccccttgttggatgttatatgtcatgcgaggggaattttc

SEQ ID NO: 440074 - DNA, 201 bp, Homo sapiens
ttctgaccttgtgatccgcccacctcagcctcccaaagtgctgggattacaggcgtgagccaccgcacccggccttgactctgattttgaatgctatcccytttgctccgtttagtgtttctaatgctgctatggaggatttgttaacagctgcaaccacgggcattttgaggcacattgcagctgaagaagtgtctaagg

SEQ ID NO: 440075 - DNA, 201 bp, Homo sapiens
gcccgctacctcgcccggctaattttttgtatttttagtagagacagggtttcactgtgttagccaggatggtctcaatctcctgacctcctgatccaccygcctcggcctcccaaagtgctgggattacaggcgtgagccaccgcgcccggcctcctttttatttctttattccttttttttttcttttttgagacaggg

SEQ ID NO: 440076 - DNA, 201 bp, Homo sapiens
attaagataaaggtttatttcttaactgttacgagggcccctatggacctataatttggcaccctgttccacttaattctttttaccctgtctttctaggtgtctgtagtttaagtattaaagcttcttttacaatgaagatagaattacattttaatactgaggatgcagactcttgcactttttttttttaaagacgga

SEQ ID NO: 440077 - DNA, 201 bp, Homo sapiens
gaaggaatcctctaacccgtttcattggcagaaaatgtgtttttcagtctcctgagtattccccaggggacactagccagtacttctcactaagctcctgyggggacactgtcattctgctttcctttgcaggttaaggcggctcagaaacaagacagctcaccagatgaaggttcagcacttctaccagcagctgctgag

SEQ ID NO: 440078 - DNA, 201 bp, Homo sapiens
aaaaaaaaaaaaaagaacgagtacagatcgttgctccattttaaaacaacagcctgttttgtgcagatcagcttcatagtaagatgtggtatttgtggacytaggtctgtgtgatatttttctttcttcttttcctgaaagtctttataattcaaatatagaattagattcttcaagtgttttttttgttttttgtttttt

SEQ ID NO: 440079 - DNA, 201 bp, Homo sapiens
catgctgagctgtccccgttgccagtggtcttgaggtcagtgcgataatgtaccataaatgaccttcctggtcttctgttgatggactttcatgtggctctttttttttttttttttgagatggagtctcactctgtcgcccaggctggagtgcagtggcgcaatcacagctcactgcaacctccacctcccaggttcaag

SEQ ID NO: 440080 - DNA, 201 bp, Homo sapiens
tggtcttctgttgatggactttcatgtggctctttttttttttttttttgagatggagtctcactctgtcgcccaggctggagtgcagtggcgcaatcacrgctcactgcaacctccacctcccaggttcaagtgattcttctgcctcagcctcctgagtagctgggactacaggcgtgcgccaccatgctcggctaattt

SEQ ID NO: 440081 - DNA, 201 bp, Homo sapiens
atgatttctgttaacgtgtgtataaaggtgaactataattactttgtgtttacttctgtgttttcattactttcacttactcccagatatcactggaaccrtgcaaatactgcttattccctaatgtggttttgaaagactgggaggctcagaagcaagtattatgtctgtccgtacatgtcgtttaaaaaatttttttaa

SEQ ID NO: 440082 - DNA, 201 bp, Homo sapiens
ttgcacacaggcacgtgtgtggagataaattcctatcagtggtggctgtgggtcaagggatatatgtatctttttttttttttttttttttttttgagacrgagccttgctgtgtcacccaggctggagtgcagtggtgtgatctcggctcactgcaacctccacctcctgggttcaagggattctcctgcctcagcctcc

SEQ ID NO: 440083 - DNA, 201 bp, Homo sapiens
gccgcggagctgcccgtcagcacccagagacccggctccgacacagtgggtgagtgaagctgcagtcgtagtgaggggactagctgcattttcccaccagracgcctcccaggagcctgggcatctgcattttctcgccaggacgcctcccaggagcctgagcacctgtcttgtcttggggcccaggggtgtggctcttcc

SEQ ID NO: 440084 - DNA, 201 bp, Homo sapiens
acgtgtgtggagataaattcctatcagtggtggctgtgggtcaagggatatatgtatctttttttttttttttttttttttttgagacagagccttgctgkgtcacccaggctggagtgcagtggtgtgatctcggctcactgcaacctccacctcctgggttcaagggattctcctgcctcagcctcccaagtagctggg

SEQ ID NO: 440085 - DNA, 201 bp, Homo sapiens
gattatccaagaccaggaagtcggtgtttattactaggaagctgacggtgtcagtcggggaaattgtgaacggagggccattgccccccgtccctcgtcayacccctgtgtgcagcttcaactcccagaacaagtacatcggggagagcctggccgcggagctgcccgtcagcacccagagacccggctccgacacagtgg

SEQ ID NO: 440086 - DNA, 201 bp, Homo sapiens
cgtgtgtggagataaattcctatcagtggtggctgtgggtcaagggatatatgtatctttttttttttttttttttttttttgagacagagccttgctgtktcacccaggctggagtgcagtggtgtgatctcggctcactgcaacctccacctcctgggttcaagggattctcctgcctcagcctcccaagtagctggga

SEQ ID NO: 440087 - DNA, 201 bp, Homo sapiens
acctacagaggctccagggtgggcggcagtgggacctggcgcctgtgctttctgttatttacacatggctgtggtgacacccaaggggcttgcagtactcrgcagggcactgagggcgaagctgtcttctcccctggtgacacccctcgggggtcttttgtggtctgggtagctgtgtggagctgaaccggtctgcattcc

SEQ ID NO: 440088 - DNA, 201 bp, Homo sapiens
gtgtgtggagataaattcctatcagtggtggctgtgggtcaagggatatatgtatctttttttttttttttttttttttttgagacagagccttgctgtgwcacccaggctggagtgcagtggtgtgatctcggctcactgcaacctccacctcctgggttcaagggattctcctgcctcagcctcccaagtagctgggac

SEQ ID NO: 440089 - DNA, 201 bp, Homo sapiens
gctgggcttagtggttctagggacctacagaggctccagggtgggcggcagtgggacctggcgcctgtgctttctgttatttacacatggctgtggtgacrcccaaggggcttgcagtactcggcagggcactgagggcgaagctgtcttctcccctggtgacacccctcgggggtcttttgtggtctgggtagctgtgtg

SEQ ID NO: 440090 - DNA, 201 bp, Homo sapiens
gtggagataaattcctatcagtggtggctgtgggtcaagggatatatgtatctttttttttttttttttttttttttgagacagagccttgctgtgtcacmcaggctggagtgcagtggtgtgatctcggctcactgcaacctccacctcctgggttcaagggattctcctgcctcagcctcccaagtagctgggaccaca

SEQ ID NO: 440091 - DNA, 201 bp, Homo sapiens
atgtcatgaacattttcctttgttagggtaaactatgagcatttaaaaatgacagcatattattttattagtagctctgtcaaaactctgcatttttaccrttagtagataggctgcttctaaatttttagttctattagtaatattgtttggcatcttgtatgtaatgcttctctggtatttagattattttcttcagat

SEQ ID NO: 440092 - DNA, 201 bp, Homo sapiens
cgacttcctcacctgccacggcctcaccgtttccgacgggtaagagctgagaatggaactgtggggcccctgtctccttttttcttgttaattctgatgargggctgtgaagggctggctgcttgcctgacttgaagaaggtgcattccctctgccatgcaggtgaacacacgagactcagaatggctgggggtgttccca

SEQ ID NO: 440093 - DNA, 201 bp, Homo sapiens
cactgcccctgagcagaccgcctatgatctctaagcttgggttccgtgttgccaaagcgccttctggtggactcagcccaggaggagcccatgtgccccaygctggccatggctgtggtcatgggctgactgcatgtgtctgactgggccttcgtctgagactgcagtgatttcgctcctcctctcagatccgcaaggatg

SEQ ID NO: 440094 - DNA, 201 bp, Homo sapiens
gatatttttctttcttcttttcctgaaagtctttataattcaaatatagaattagattcttcaagtgttttttttgttttttgttttttttaaatctgtaraattctagcaaattggttaaaagtcaagttcatgggagatgaaggctcagtggatgacacatccagcgatgctggtgggattcagacgctttcgcttttc

SEQ ID NO: 440095 - DNA, 201 bp, Homo sapiens
cagcttaaaataatgtctgttatcatggtatctgtgggtcaggaatccaggtgtagcttagcttgggtcttctggctcaaggtttctcatgggtggaaatsaaaatgttggctaggattgtggcctcatctgaaagcttgactgaagggtatctacttcccagctcactctagtgagcttgtgtcaggattcacttccttg

SEQ ID NO: 440096 - DNA, 201 bp, Homo sapiens
tgactgttgttgtacagacagacatctcacccgtttgcacacaggcacgtgtgtggagataaattcctatcagtggtggctgtgggtcaagggatatatgkatctttttttttttttttttttttttttgagacagagccttgctgtgtcacccaggctggagtgcagtggtgtgatctcggctcactgcaacctccacct

SEQ ID NO: 440097 - DNA, 201 bp, Homo sapiens
ctggaaccatgcaaatactgcttattccctaatgtggttttgaaagactgggaggctcagaagcaagtattatgtctgtccgtacatgtcgtttaaaaaawttttttaagccagtcaaattgagtagtgggcaccaagcccagcctgcttctttactttttctgttttaatactatatattggatttcctaaatgtaatat

SEQ ID NO: 440098 - DNA, 201 bp, Homo sapiens
ccgcgcatagtggcttatgcctgtaatcccagcactttgggaggccgaagtgagcggattgttttgagtgcaggagttcgagaccagcctgggcaacgcgktgaaaccctgtctctataaaaaatacaaaaattagctgggcatggtggtgtgtgcctgtagttctagtagcttgggaagctgaggtgggaagattgcttg

SEQ ID NO: 440099 - DNA, 201 bp, Homo sapiens
ttttggatgcatcatcttatctttccaaggaaattagggtttttggggtctaagttttctttggttcacgtattatctggttcctcttttttttttttttyctctctgttactccagtttatctcttttatgttggaggccctcctcagatgccttacccaaggctatctgtctatatctgagtgaggccctaaaaggcta

SEQ ID NO: 440100 - DNA, 201 bp, Homo sapiens
gagacagggttggccaggctggcctctttatctgtttttgtattgttttctcagaggcgctgagtgaagatggtcagatatgtgtgtatttttttaaaaaygatttgaaaaaatatgatgttcctttgtcgtgggaacaagccaggttgcagacgcagaaggagctacagctgagagagggacggtgaggttcatgttcag

SEQ ID NO: 440101 - DNA, 201 bp, Homo sapiens
cgtcccatggtgcatctctcctgatgatcttgatgctgttgcaggtggcccatggcgccctcagtgatggtgccattgatgctgtggagacacagaaggamctcctgggagccagtgggctcatgctgctgcttccccccaaaatgaagagtgaggacatggcagaggaggacgtgtactggctgtcggccttgctgcagc

SEQ ID NO: 440102 - DNA, 201 bp, Homo sapiens
ctgggagcctatttaacccaagtgtggaagtcacataattgtgtgactttaatcaaaggtcttgcacttaaatcagtgaatttaagcacatgccacctgtygctgtttaaatattatttgtacctgtttttgtttttttgtgtgtgttttttttttttttgagacagggttggccaggctggcctctttatctgtttttgt

SEQ ID NO: 440103 - DNA, 201 bp, Homo sapiens
gcaaatacatgcttgtgagacaggtaagggagatgaatactgctgctgccgcagccagagaccatgcagttagcagacgtgtgggtggagaaatcactgtygtgcaaaggacaggagctcctggtgcctttgaatggtctgttgtgcttactgcatttgagttttcaatcccatttcctttggtttcctgatatactcaca

SEQ ID NO: 440104 - DNA, 201 bp, Homo sapiens
ttttatcattatgagaatacacttctgtaggttcgtgctaaccatgtggtacattcttaccttttacttgacgtcatttagctcgggtgaagagaaccgayctggacaaagcgaggacttttgttggcacctgcctggatatgtgtcctgagaaggagaggtacatgcgggagacccgtagccagctgagcgtgttcgaag

SEQ ID NO: 440105 - DNA, 201 bp, Homo sapiens
gtattagaatttttcaacatgaaaacaataagtatatattttgagtgtgaagttgttgcatttccttttccttgcaagctacattgtaacttaagtgtaayagcagtttactcattcaggtaagaacccagttaacgtccattatatgattcttatattaaagtcatggtgaatactgagacagttttagaatagtgatat

SEQ ID NO: 440106 - DNA, 201 bp, Homo sapiens
tttccattcgctaggggacacctttcctgcaacagcctagccgaccccgtgtcaggggttgtgcttctgtcacgagacgcctgcagactgtccggtgacawcatgttacccagcatttctgccctgggtgggacgttccattacaccccatgctggtctctccacaggacctggcgcaggtggtggacgagctcatccagg

SEQ ID NO: 440107 - DNA, 201 bp, Homo sapiens
ctctaagaggaactccggcgcgtcagagtaacagaagcgagagcacagacagtcttgggggcttgtctccctctgaagtcacagccatccagtgcaagaayatccctgactacctcaacgacaggaccattctggagaaccattttggcaaaattgctaaagtgcagcgcatctttaccaggcgcagcaaaaagcttgcag

SEQ ID NO: 440108 - DNA, 201 bp, Homo sapiens
gtgtgctcaagaggggaggattcccagcacagaggatctgatgcgaggagcttctgctgaggagctcttggcgcagtgtttgtcgagcagtctgctgctgkagaaagaagagaacaagaggtgaagcccacttccttctaattcatgtgtgtttagtctgctttatgctgtgaggggagactggttattgcttgattaata

SEQ ID NO: 440109 - DNA, 201 bp, Homo sapiens
tcttgaccataaacatttcaaatcatgtacttacagtttggcaataaagccttttcatccttctgcaaacaattttcccataccattgcttcacatgcacygtaactggaagaggagcacagagtgtgctcaagaggggaggattcccagcacagaggatctgatgcgaggagcttctgctgaggagctcttggcgcagtg

SEQ ID NO: 440110 - DNA, 201 bp, Homo sapiens
tgttgttgtacagacagacatctcacccgtttgcacacaggcacgtgtgtggagataaattcctatcagtggtggctgtgggtcaagggatatatgtatcyttttttttttttttttttttttttgagacagagccttgctgtgtcacccaggctggagtgcagtggtgtgatctcggctcactgcaacctccacctcctg

SEQ ID NO: 440111 - DNA, 201 bp, Homo sapiens
ggcagcacacctcaatccctgtctgcgtggccagggagtaaaacaaacagcacttatttttattcttaaacattacccttgtgtattttttctcttccctrtaggttgaaacaagagagagagctggtgttaagtgagctgagccagggcctggccgtggagctgatggaacgcgtgatgatggagtttgtgagggaaacc

SEQ ID NO: 440112 - DNA, 201 bp, Homo sapiens
cccgtgtcaggggttgtgcttctgtcacgagacgcctgcagactgtccggtgacaacatgttacccagcatttctgccctgggtgggacgttccattacascccatgctggtctctccacaggacctggcgcaggtggtggacgagctcatccaggaggccctgcagagggactgtgaggaagttggctctgcgggtgctg

SEQ ID NO: 440113 - DNA, 201 bp, Homo sapiens
gcttctgcaagtatctacagcggtgagtcctgtgttcctacaggcaaaatccacacacacggggaagagtcttttaacaaattcaaaatatatgagctatyagtttctgtattcagtggtaaaaggatgagggaaaatgttatagcaatgaatacctaaaatagactaattggattatactgcatttcagaaatacttgat

SEQ ID NO: 440114 - DNA, 201 bp, Homo sapiens
tttagtagagacagggtttcaccatgttagccaggatggtctggatctcttgacctcatgatccacccgcttcggccttccaaagtgctgggattacaggygtgagccaccgcgcctgactgactcttgcacttttcaagcaagccctcagtgtctgtgggccccaagtgcagtgtcttccatgctgattgccctgtttct

SEQ ID NO: 440115 - DNA, 201 bp, Homo sapiens
ggcttttgcttttcacaccaggcctactttgacagatctccggctgaatccatcttttcatcttttggccaatgtattttcctcactttccgttttgtgaygagcagtttagttgctggtttgacataatctttgacattcaagttcagaaaatgatgaaagctagaaaatggggaagctgagagagaatgcctgattcct

SEQ ID NO: 440116 - DNA, 201 bp, Homo sapiens
ttttctatgggagaatctcatcacacagttgttatagctggtacagacctttcagctgcagctacaggagatccaggggaggctgctcacttaggacagcmgaacttctgtccttgcacagagtgcctgctctgtgggacacacgcaggctggcgccctgtggcgggtcgctgcctgcctcacaggattgtagtaggaaat

SEQ ID NO: 440117 - DNA, 201 bp, Homo sapiens
cttggcaaggccgcagggaggactggtgctagcagcctcctgaataaaaggtgggatcggtccctcctaatgaccttattccggaaggaccaggaaatagygccctatagcgacacctgagtcagggtgcaagactgtggggagtggtgaggagacaaaagccagttgctagggatggttgggggtggaggggcaggggct

SEQ ID NO: 440118 - DNA, 201 bp, Homo sapiens
tatgtatcttaaatctgtatccatattgccaagtcagcctccaaagctcattcagtattaactgttaacgttcggtagtttcattgctcaccacactcatwtgatgtccttccttccccatgcctgagttctgactgcaatgtgtttctcagtttgaagaccctgaagacactctgtgatgatacattttcatgtccccag

SEQ ID NO: 440119 - DNA, 201 bp, Homo sapiens
tccccagtccatggggcaggcccctcggtcatggagatcccatgggatgatcttatcgccttgtgtatcaaccacaagctgagagactggacgcccccccrgcttcctgttacatcaggtaattagagcttgatgcaatgggatcagctcctcacgagactttcctggtccagtttctgcaaaggaagatgtttagttgat

SEQ ID NO: 440120 - DNA, 201 bp, Homo sapiens
ggagaaattcgtctctaagttgtaaggtggaacagcattcattttcttactgccaatggaggtttttcatgaatttactaactcagtaaaaagattcggcttttttttttttaatcttaaaggatcacgctttaaacctctgtaacaaagtaattatttgtaccactctctaccccaccctccaacaaaataacctatcgg

SEQ ID NO: 440121 - DNA, 201 bp, Homo sapiens
agtttctgcctacgaaataaatgaagaatagaattgaaatattcttaagaactgaataagacctgtaactgtgtgctgatgtgtaattaagggcattaagrtgatgacagcagcttctgttggagcacatattgtctgagctttggcattacccagacctctcttctgggattaatttttcctgaggaaaactaatgaatg

SEQ ID NO: 440122 - DNA, 201 bp, Homo sapiens
tgtcctggcaccttcccggattccaggtgtgaataaagaggaagaaactgaaagtagagagaagaaagaaggtgagctctgaaaatgtagcacatagagtraatcctgcaggcaggttttcaatacgtttctctgggtgttagcttgatttttcagataaatctcccataaacattagggattctaacatgtcatcggagc

SEQ ID NO: 440123 - DNA, 201 bp, Homo sapiens
tgtactcagctgataacatgtttcagattgggaaaatgaggtaccttagtgtttgggatgttaaaggggaagtgctaattgatggtattagagattattgratggatctcaaaggttaaataaaaccaggaagaaaaggtatttctttaaatccacagcaatggggccagctgaagaaacattcattcattcattcattta

SEQ ID NO: 440124 - DNA, 201 bp, Homo sapiens
ccctttcaccaacctccttgacacacaccctccttgacacacacaccatcgaataactgcttctgggagaaccggttggttctcccttaccaaatcttacytccaggaatgaagctaagttagggatgtgacaccacaggactgaatcattaaaattactttcatcagctgcttttttaaacgtagctactagaaagtttt

SEQ ID NO: 440125 - DNA, 201 bp, Homo sapiens
agctactagaaagttttcaattatatatgtgacttgcatcataatgaattgcactggggagagttaggccagctgcactcagctcagctcttgcctcttaytgcgactttaaccaaggtgcttattaacccctctgcctccatgtcctcaagctgtaaaatgagggtcttcatatcaccccactgcaccagtttgatatga

SEQ ID NO: 440126 - DNA, 201 bp, Homo sapiens
taattgccactccctgaggatttatgtgtagcaggcgaagtgctaactacttttcatgtgtaaaacctcacagcactaccataaaattagtatttactccrttttatagatgattaaagaaaggagggaacaggccatcagactcaatcaacccttgttcttaactatttacctgctgaatcacagctagaactaggagtg

SEQ ID NO: 440127 - DNA, 201 bp, Homo sapiens; identical to SEQ ID NO: 256406

SEQ ID NO: 440128 - DNA, 201 bp, Homo sapiens
gattacaggcatgagccattgcgcacggcccattagtattatttcttaaatcattgagcatcttgagtttgtttttttgtttgttggtttgtttgttttgygacggagtcttgctctgtcacccaggctggagtacagtggcgcgatctcagctcactgcaagctctgcctcccaggttcatgccattctcctgcctcagc

SEQ ID NO: 440129 - DNA, 201 bp, Homo sapiens
attagaagacttggagtcaaaagcccagatttgaccaagggaccaagttgggttaggagaaaaggttttcaatacctagacaactgctgaaattgccctgwagccaggtggccttctttttctaaaagccatgagtgaggaggtggtaagagcaactttattcagggtctaggttaggactgctgggtttggtgttagggt

SEQ ID NO: 440130 - DNA, 201 bp, Homo sapiens
cttaaacccaggaggcggaggttgcagtgagctgagatcgtgtcactgcacttcagcatgggcgacagagcaagactttctcaaaaaaaaaaaaaaaaaaattaagtgataaggaatctgtggttccttcatcttgatgaagagcatgtttcatttaagttccagtttggaatattaccccccagccaccagcataaaata

SEQ ID NO: 440131 - DNA, 201 bp, Homo sapiens
ttggtgatatacataccccaaggaaggtgttttcttgttttgtttgtttgtttgtttgagcaaatggggacttgggcctcagcaggcttcaccttaggatstagagcaattgggaaactattggatggcatagagcaggcattgagtctacaccatgctgggtcagatgtgctggcttggaaatactctggattttaggct

SEQ ID NO: 440132 - DNA, 201 bp, Homo sapiens
cagtcacccaaattgctgggattacagttgtgagccaccatgcccgaccttacaaatctaactttaaactcagggtggttactgtgaaacagcgagagagrtattgcacccggcctgcaatatcatcttaaaacaaaaatttggccgggcatggtgtgtaatcccagcactttaggaggcatgaggtcaggagtttgagac

SEQ ID NO: 440133 - DNA, 201 bp, Homo sapiens
cccttccgggaacccctccggcttaccacgtgtctattacctctttcccctgggaaggggcagggggcagggaggtgaccccatgtggcagaaactaaggytgtattgtgcttgccggtggggggagggcgagcaggccggccagggaagcacatgccgggcctaagccgggagcccagctcctccaacgtctgaatggag

SEQ ID NO: 440134 - DNA, 201 bp, Homo sapiens
ctttcccattttctaatcattttttaacacaagctgactcttcccttcccttctcctttccctgggaaaatacaatgaataaataaagacttattggtackcaaactgtcatccccttgtcagatgtttttgcccttccgataactcccactttcttggattgggactcagaagtttttctgttcagccagtttgttagga

SEQ ID NO: 440135 - DNA, 201 bp, Homo sapiens
cgcccgcgccggggtcgcgctcgaccccccagtggatgtctttgtgcaccaggtgagactgattccggtaactttgcccagggaagggcgtctaggcgccyatatccacgggtgggctccgggctcgcagttgaattgagggccatcgggagccctcattatgcatccctgtctttgcttcggcaccccaattctgagtcc

SEQ ID NO: 440136 - DNA, 201 bp, Homo sapiens; identical to SEQ ID NO: 256414

SEQ ID NO: 440137 - DNA, 201 bp, Homo sapiens
cagcctattgaactacctcatttttgccaataagagctggcttttctgccatagtgtcctcttgaaaccccctctgccttgaaaatgttttatgggagacyaggttttaactgggtggccccatgacttgattgccttctactggaagattgggaattagtctaaacaggaaatggtggtacacagaggctaggagaggct

SEQ ID NO: 440138 - DNA, 201 bp, Homo sapiens
ggagctgtggagataaatctacccgaacacttgagttcacagctcagaccaggtagcgggccactcagtacctcctggtataggcgccctcgggcttacckttgggcagacaggctgagcagcgccatctggtggagaactccaggcaggagctacagggcctggctgtggctgagcagaggggatcagagggattggctg

SEQ ID NO: 440139 - DNA, 201 bp, Homo sapiens
ccaccacacccggctaatttttgtatttttagtagagacagggtttcaccatgttggccaggctggtctcgaactctggacctcgtgatccacctgcttcrgcctcccaaagtgctggggttaaaggcgtaagccaccgtgtgtggctgagccaccatgcccagctatttttacttttattttatttatttatttttgaga

SEQ ID NO: 440140 - DNA, 201 bp, Homo sapiens
taagtgataaggaatctgtggttccttcatcttgatgaagagcatgtttcatttaagttccagtttggaatattaccccccagccaccagcataaaatacraatgctacttactcatgttcccttgagccaggactaggtaagtgcacagtgatcccttttgcttctccattttctatgacgactactccttgttgacata

SEQ ID NO: 440141 - DNA, 201 bp, Homo sapiens
cagccaccagcataaaatacgaatgctacttactcatgttcccttgagccaggactaggtaagtgcacagtgatcccttttgcttctccattttctatgaygactactccttgttgacatatttgacactgttgttttactataatagatgaagctgtaatgaagtctattctgggtagggtctgagatgctgtcacctcc

SEQ ID NO: 440142 - DNA, 201 bp, Homo sapiens
cccaatcctgtcactttttgggtcacactgcaaaagacaaagggaagcctgtggtccctggcagcatctggaaggctgagcgcctgcaataggtgtgggcragggcagtaggtgaggaggccactgggggtgacttagtgctacttgggacaagtaagtttgctctgtggtctctaagcctcaattgttaagtgaggcagt

SEQ ID NO: 440143 - DNA, 201 bp, Homo sapiens
agcactattgacatgttttgagcaggataatttgttctggggagtctgtcctatgtattataggatgtacagcagtattcctggtctctacccactagaarccagttgcatcttaggtatgacaaccaaaaacatctccatacattgtcaaatgtccccttggagtcaaaaatctcatccctgcttgagaaacacagttat

SEQ ID NO: 440144 - DNA, 201 bp, Homo sapiens
ttttttttctgagacagggtctcactctgtcacccagcctggagcacagttgtgtgatctctgctcactgcaacctctgcctcctgggctcaagggatccwcccacctcagcctccccagtagttgggactacaggtgtgtaccactgtgcctggctcatttttgtattattttgtagagatgggtttttgccatattgcc

SEQ ID NO: 440145 - DNA, 201 bp, Homo sapiens
cgtttcagtacactaatcataatcaggaaattaaacactggtacatttatctatataccatatgcaaattttgtcaattgtcctattttttttttttttttcctgtttcaagatccaatctggaatcttggatttcattgaactgttcagttcttcaggctttgtctttttatgaccttgacatttttgaagtcctgtttt

SEQ ID NO: 440146 - DNA, 201 bp, Homo sapiens; identical to SEQ ID NO: 256401

SEQ ID NO: 440147 - DNA, 201 bp, Homo sapiens
ctctttgctcctgtccctcaatttttttgtaatttgacttttctgatcaatttgcaattggcttacaattcctgtaattatgatattggttacacttattrtacttctaagtgccagactctgttggtgcattacataactatctgtaatccttaacaacagtcttgaggtgtagctgtttatcctcatttttcgaatgaa

SEQ ID NO: 440148 - DNA, 201 bp, Homo sapiens
cctgggctcaagcaatcctcctgcttcagctggcctcccaaagtgctgggattacaggcgtgaaccaccatgcccggcctccaatggactttttaatgcaygtcactgttctaaattaatccctgctatcagcacttttcatattcccttttcttattccttcttgagggtaggtaccaccatgggctctggcatttacag

SEQ ID NO: 440149 - DNA, 201 bp, Homo sapiens
cagagccaaatttgttaaaacaaccctgaaattgtatacaaaacttagcaggatatgaactgaccagatactagttgagccccagttttgttttgttttgtttttttttgcaaattgtttatgtattattttttcttttttttttctggaattgtaagcattttgtcacttatcagatattctgtggtggggggttggata

SEQ ID NO: 440150 - DNA, 201 bp, Homo sapiens
tcctctctgtctaatccagtcctgatcctctgtcttctctaggccctgtctagaatctgtgtgctcttcactgggcccttttgatactccgagctcatttaaaaaaaaaaaaagaaaaagccttacattccttttattccttcccttaactcaaaattggtttccttttataaggctatagtttttgaaattcaccccact

SEQ ID NO: 440151 - DNA, 201 bp, Homo sapiens
ttgttttgttttgtttttttttgcaaattgtttatgtattattttttcttttttttttctggaattgtaagcattttgtcacttatcagatattctgtggyggggggttggataagaaaagcatatgatggggtgtggctgtaagatttgggggagggtgctgctttccaaagaaggggtgggaagaggaggcggtagctg

SEQ ID NO: 440152 - DNA, 201 bp, Homo sapiens
gaagaagttggctgttctctgtggtgaactgagacgcacatttgatgcattcgtattacttgacactagaaatattgagaagggtattaaaagatgtgttycacatcaattatagcaaatacatcatcctgagacactgactctccctgcggtatgttgtcagcagttagcaaccagcctgtactctgcatctcttctaca

SEQ ID NO: 440153 - DNA, 201 bp, Homo sapiens
gacctcgctaaggaactttaaacaatttttgcttggcaaatgagtaagtggctcagatgattcccgtgtttgtaaaggatggatagatttcacacatggakgccagtctgcagggtatggcactggttcaggggacgtgagaaggcttgaaaaacagggacagtggaattagaaaggttgagacagattttaacgtcatta

SEQ ID NO: 440154 - DNA, 201 bp, Homo sapiens
gtggctttcttttacaatgttcagttgttcaggtgcaggcaaagagaaagtggatggctgcgccgaaacaggtcgtggtttcacctgacaagcgtggtggwgggagagagggataagaaagctgaagtgtttgaagtatgtaattatagtgatagaacatggaatttaagccgctgcggaaggaagtgacacagcacgagt

SEQ ID NO: 440155 - DNA, 201 bp, Homo sapiens
cccagtgtaactataatagaagtttcatatgatctctatgctatttaatcccattaaatgactgttgaatgaatgaaccctttgaaacgggagctcagcayggtagaacgtttaggcaacatgtgatgccagcttcttttccatgcattttcctagattcccaacttacaaatataggaacattaagccatctgatttgta

SEQ ID NO: 440156 - DNA, 201 bp, Homo sapiens
tcaggactgcaaggttgccaaagggctctgcactccgggtatgctgctggggtgtggcagagcacccccagatgtcattatacacccacaccgctgaccamttgtgctgcagaaaaggcaaactgcataccagagtcaggaagaggacccccttcctctagcagtgcccctccatcacctcctactggcaaagcataacct

SEQ ID NO: 440157 - DNA, 201 bp, Homo sapiens
cgtagttttgtttctgaagtttcatagacaataaaagatattgtaaaatattaaaataaacatcaagttttatagccattatctaccatttagtgtccatstcttccatctaaaagataatgctacatttcctgttttctagtctctgctttctgtgttgtttgattttttttccccaaagtcactaaaagtgatgaatga

SEQ ID NO: 440158 - DNA, 201 bp, Homo sapiens
ggttttgtatgtgtgtattttaagtcactgaggttacaaaggagagaacagagagctcgtaataaacttcaccaaatcacctttaattccaaaagacatcraataaacttccccagatcaccttaattccacaagacatctaatactcacttctgtctttacctggagagaaagactcacagctcctaagctggcttttct

SEQ ID NO: 440159 - DNA, 201 bp, Homo sapiens
catgctactgtactccagtctgggtgacagagggatactccattgaaaaaaaaaaattaaaaattagggattagggactagttaaccatttcagaattgtkagcatggtgaagagtaaagactagaaatcaacaagtagatttgccagttaaaggaggactggtggctttttgtgactaaacacagaaagaggcagatgtg

SEQ ID NO: 440160 - DNA, 201 bp, Homo sapiens
aggaatttccacattcacacactcctcctgctcgactttaggatttcagcttcacacactacccctgttcccattagggggagtggagctttagaaaaatkgaaggtgtttcttctgcacttaaacattagcagccttagggcaaatggataatcaaagactattcctgagagatgagggaagagattgcctccacctaga

SEQ ID NO: 440161 - DNA, 201 bp, Homo sapiens
ggtttgcgtggacttctgctagagcctggatttttaagataatcaaaaacgtaaggagccaaaggcttccccatggctcagtcccaccatgacatgctccrggctaactctcacacctttgggcaaaggaatttccacattcacacactcctcctgctcgactttaggatttcagcttcacacactacccctgttcccatt

SEQ ID NO: 440162 - DNA, 201 bp, Homo sapiens
taatgcttctaacttacgtcatggtgccaatcctatttatataatagaatcaatctcatactctcagctgacaatgaggggtatttcattatttacttgtrtataagattccttttatataggatgaaatgcatacacactctgcatagaaattcttatgtgtttgtatattactccattcaatcatactatgattccaag

SEQ ID NO: 440163 - DNA, 201 bp, Homo sapiens
tgagagcatatggtaatgtctgccagcacgtgaacctgagggagaacgtggtgaatggctttgttctgtaccttgactctttgatttgttgacccattagraatgtttttcaagaaagtcatcaaccagagcttacacttttctttgtcttcactctgccatgagtagtgcctggcatatagttactacctgctccctgat

SEQ ID NO: 440164 - DNA, 201 bp, Homo sapiens
gggtcgctgcttgagcaaagccccgaaggaagcagccacagagtggggcttgcagattttgggaagaagagtgagtgcagtgctctgggcagaggcagtakccactgtggctttggcggccctatggaagaagcatgactggtgtgtgacaagacaagtaagctggccagggtggctggcctggtgagcaagttgggacag

SEQ ID NO: 440165 - DNA, 201 bp, Homo sapiens
ggctaaattggaaatgtcaaaatgaccataaagagtgactgctggccgagcacggtggctcatgcctgtcatcccagcactttgggaggccaaggcgggcrgatcacgaggtcaggagttcgagaccagcctggccaacatggtgaaaccccgtctgtaccaaaaaaaaaaaaaaaaaattagctgggtgtggtggcgggt

SEQ ID NO: 440166 - DNA, 201 bp, Homo sapiens
agcagctctcatggaaactgttcttatggtggtcaaatgaatccagattgacacaggcccttgtgtctcagctgtcaactcttcatgtcatctgccactaygtttgcttctttactctcctctgctatttttttacgggtgtcttggaaattaccagaggcttggggaacactggcattgtccttagggaaatttcttttt

SEQ ID NO: 440167 - DNA, 201 bp, Homo sapiens
atgcctgtcatcccagcactttgggaggccaaggcgggcggatcacgaggtcaggagttcgagaccagcctggccaacatggtgaaaccccgtctgtaccaaaaaaaaaaaaaaaaaattagctgggtgtggtggcgggtgcctgtaatcccagctattcgggaggctgaggcaggagaatcgcttgaacccaggaggcgg

SEQ ID NO: 440168 - DNA, 201 bp, Homo sapiens
ttacgcttgttcccataattgctggagaacctcagcacagtggccctgttgcctgtgcctacttctgggatgagctaggactaagcagagacaacatcccragaaactaatgtcatgctagaataccaatctatgaaattctatttctggaacctttgctgctctactaagcagatccatgcagagagaagcctgccactg

SEQ ID NO: 440169 - DNA, 201 bp, Homo sapiens
tgaggcaggagaatcgcttgaacccaggaggcggaggttgcagtgagccaagatcgcgccgttgcactccagcctgggtgaaagagcgaaactccatctcaaaaaaaaaaaaaaaaaaaagaaaagaaaaaaacaaaaccaaaaacagtgactgctgtaccttgtgtccagggtctggtctgcatgccagtcaggggtgca

SEQ ID NO: 440170 - DNA, 201 bp, Homo sapiens
ctcagcacagtggccctgttgcctgtgcctacttctgggatgagctaggactaagcagagacaacatcccgagaaactaatgtcatgctagaataccaatstatgaaattctatttctggaacctttgctgctctactaagcagatccatgcagagagaagcctgccactgtcttggcatttctcagcctttcaaccctgt

SEQ ID NO: 440171 - DNA, 201 bp, Homo sapiens
gaggcaggagaatcgcttgaacccaggaggcggaggttgcagtgagccaagatcgcgccgttgcactccagcctgggtgaaagagcgaaactccatctcaaaaaaaaaaaaaaaaaaaagaaaagaaaaaaacaaaaccaaaaacagtgactgctgtaccttgtgtccagggtctggtctgcatgccagtcaggggtgcaa

SEQ ID NO: 440172 - DNA, 201 bp, Homo sapiens
agagacaacatcccgagaaactaatgtcatgctagaataccaatctatgaaattctatttctggaacctttgctgctctactaagcagatccatgcagagagaagcctgccactgtcttggcatttctcagcctttcaaccctgtggagtgtctattttgcaagtcaccacctccttctcccttactcagagccatcagtg

SEQ ID NO: 440173 - DNA, 201 bp, Homo sapiens
gaacccaggaggcggaggttgcagtgagccaagatcgcgccgttgcactccagcctgggtgaaagagcgaaactccatctcaaaaaaaaaaaaaaaaaaargaaaagaaaaaaacaaaaccaaaaacagtgactgctgtaccttgtgtccagggtctggtctgcatgccagtcaggggtgcaacgcgacagtcaggagata

SEQ ID NO: 440174 - DNA, 201 bp, Homo sapiens
ggtttcacctgacaagcgtggtggagggagagagggataagaaagctgaagtgtttgaagtatgtaattatagtgatagaacatggaatttaagccgctgmggaaggaagtgacacagcacgagtgatggattgtgcaacagtagtagggacaactgattcaaggtcagcatgctggatggagcagtagaaggggttctag

SEQ ID NO: 440175 - DNA, 201 bp, Homo sapiens
cttatgtaagagaacattatagagtaagtgtggtggaatccccaggcgggtctgagtcatggctttgctgagtgattgctgtgtggcactggctggctcayttgtcctccgtgggcttggttcctagttgttaagatggagggttagtgatatttacaacgtgggctgtaaaggggctatggcaatgcccagcatagaacg

SEQ ID NO: 440176 - DNA, 201 bp, Homo sapiens
ttgccaacaaccacttgcattatgggctttgaatttctcatctgaaaggtgcagaggatggatgagattagtggtttttcaggctctgattcatggagcaygaggaattccttgaaggccctttcatttttatttttatcctaaaggcccttttatttttaaatttgcacacaagcttcacttagaagaaagtgccctctc

SEQ ID NO: 440177 - DNA, 201 bp, Homo sapiens
tcctgctgaccttattttttgtcatatacattatctgagcggtaggaaagaattagtcttagggctattttcagtaattcggtaacatgaatacaacaatmtactgttatgataattaatcacttgagaattgagggatgccatttcctagatatttagttccagttagatgcaggcaaactgaagttctgtaggggaaaa

SEQ ID NO: 440178 - DNA, 201 bp, Homo sapiens
tatattcatggcaggactttttcgggcaaaattcttatatcatctcatttaatctcactcggttctcaaaaagtacccattgagctggttgtatttacagttttttttttttttttttttgacaggcttgcagttgtacgatcatagctcactgcagccttaacctcctgggctgaagtgatctcccacctaaacctctct

SEQ ID NO: 440179 - DNA, 201 bp, Homo sapiens
aaactccccaaaaacgctcagatgctgtccagaaggtaagatgatcttattaggatgtcagattcccatctgtcttatttgtcttaagattgtgacagacyctgcgatttatctttccatctgcccggctggctaggatgcccttgttttccctaagcctgcagtggaatccagtcaggcagaaggggatgttttcttcca

SEQ ID NO: 440180 - DNA, 201 bp, Homo sapiens
aattaaaccagtgaaaaatatgcgacagagaccttacgtgtggctcataaagcctaagatacttactatttggccctttacataaaaagtttgatggtatrgactgataaatcatttccagttctgactatgatatgaatgaatctatcacagaatcatagcattgtatttattcagaaatcctgaaaatatttattgatg

SEQ ID NO: 440181 - DNA, 201 bp, Homo sapiens
atattcatggcaggactttttcgggcaaaattcttatatcatctcatttaatctcactcggttctcaaaaagtacccattgagctggttgtatttacagttttttttttttttttttttgacaggcttgcagttgtacgatcatagctcactgcagccttaacctcctgggctgaagtgatctcccacctaaacctctcta

SEQ ID NO: 440182 - DNA, 201 bp, Homo sapiens
tctttaaaaagaaatctgtcagagctttgctaaagtcaaataaggttcttattactttggtggatgaaacattaattagtatctgtttaatttccaggaarctattttttttctgttactgtattagtccgttttcacactgctgataagggtgtacccaagaatgggcaatttacaaaagaaagaggcttattggactta

SEQ ID NO: 440183 - DNA, 201 bp, Homo sapiens
gaggtaggcagatcatttgaggtcaggagttcaagaccagtctgaccaatatggtgaaaccccatttctactaaagctacaaaaaaaattagctggacatrgtggtgcatgcctgtagtcccagctacttgggaggctgaggcaggagaatcgcttgaacccgggaggcggaggttgcagtgagccgagaccgcgccactg

SEQ ID NO: 440184 - DNA, 201 bp, Homo sapiens
ctcaaaaagtacccattgagctggttgtatttacagttttttttttttttttttttgacaggcttgcagttgtacgatcatagctcactgcagccttaacytcctgggctgaagtgatctcccacctaaacctctctagtagctggtaccacaggtgcatgccaccatgcttggcaaatttatttatttatttttttgtag

SEQ ID NO: 440185 - DNA, 201 bp, Homo sapiens
gtggatgaaacattaattagtatctgtttaatttccaggaaactattttttttctgttactgtattagtccgttttcacactgctgataagggtgtacccragaatgggcaatttacaaaagaaagaggcttattggacttacacttccacatggctggggaggcctcacaagttcatggtggaaggcaaggagaagcaaa

SEQ ID NO: 440186 - DNA, 201 bp, Homo sapiens
ggcggaggttgcagtgagccgagaccgcgccactgcgcgggtgacagcgaaagtctatctcaaaaaaaaaaaaatgtgtcagaaaaaattaaggcctatakctatgactctgcactctcgctaacattagaaccaactgacaaccagtagaaaactgatgcctgagcccggcttccagcaattctgttctccccaggtgat

SEQ ID NO: 440187 - DNA, 201 bp, Homo sapiens
ttacagttttttttttttttttttttgacaggcttgcagttgtacgatcatagctcactgcagccttaacctcctgggctgaagtgatctcccacctaaasctctctagtagctggtaccacaggtgcatgccaccatgcttggcaaatttatttatttatttttttgtagagacgaggtctcactatgttgtccaggctg

SEQ ID NO: 440188 - DNA, 201 bp, Homo sapiens
tgggattataggcacccaccaccacggctggttatttatttatttatttatttatttatttgagatggagtttcgctcttgtctcccaggctagagtgcartggtgcgatctcggctcactgcaacctccgccacccagcttcaagctccgccacccaggttcaagcaattctcttgcctcagcctcccaagtaactggga

SEQ ID NO: 440189 - DNA, 201 bp, Homo sapiens
acagacaatgcatcaaagagaattctcagttcaaacacagtcaatgctgacacagatagtacagagtgctctgggaacacagatgaagcaataaacacccrtgtaagtggaggaaggccccattctagaaaggtggcatttgaagtggcacatgaaggttaagtaggagttttcaaggtggaaaagacaggttgttcttgg

SEQ ID NO: 440190 - DNA, 201 bp, Homo sapiens
tgaggcagatttgctgtggaaatagcagctacgatgtgtatctgcccagtcaccctataatttaaaaacaacatgtgattcaagcattttttttccttagstgctcaacagctcggtatgtctgtttgtacacaaaaaaaaaaaaaaaaaagaaagaaaaaaaactagcgtattaagtacatttgccaaacctccttttct

SEQ ID NO: 440191 - DNA, 201 bp, Homo sapiens
tttcttttcaacagggccttgtgctgtcgtccaggctggagtgcagtgttgtgatcatggctcactgcagcctcaacctttcagacttaagcaatcccccscccgaccttgacctcctgagtagctaggactagagttgcacaccaccacaccctgctaatttttgtatttcttgtaaagacagggtttcatcatgttgcc

SEQ ID NO: 440192 - DNA, 201 bp, Homo sapiens
gcattttttttccttagctgctcaacagctcggtatgtctgtttgtacacaaaaaaaaaaaaaaaaaagaaagaaaaaaaactagcgtattaagtacattygccaaacctccttttcttgacagatggtcactcaagagttctctagcctgctttaatcaacgatgattttaaaaattgatttctaaattatttttaattg

SEQ ID NO: 440193 - DNA, 201 bp, Homo sapiens
tctctttctgtctctatgaatctgactatgctaggtagctcatataagtggaattatacagtatttgtcctgtttgtggctgacttatttcacttagcatratgtccttgagattcatccatgttggagcatgtgtcagaatgtccttcccttttaaggctgaatcatattccattgtatgtatatgttgcattttgttta

SEQ ID NO: 440194 - DNA, 201 bp, Homo sapiens
tccttgagattcatccatgttggagcatgtgtcagaatgtccttcccttttaaggctgaatcatattccattgtatgtatatgttgcattttgtttatacrttcatccatcaatggacatgtgggttgtttccaccttttgctgtaatgctgctatgaatatgggttcataatgagtgaataatgccgctatgaacatgag

SEQ ID NO: 440195 - DNA, 201 bp, Homo sapiens
tttttttctatactcagaatcatttccggagctacctgccacacatcaaaaggtgctctcttaggttgtttagatatgcttctggttgtcgtagaataaayatgagacagtgcttatcattttctgaacaggatcatgaaagggtttaccctgatcaggaaagggtttctccttcttgaagcatatatttggtaagcagag

SEQ ID NO: 440196 - DNA, 201 bp, Homo sapiens
ttccaaaaattaaagttacttgtggaaggctttaactgaaaatagatcttcctcttgagattttagtttgttctgaagaataatattacaaaatccaacaytgcacaataaaaaacgcaaaagcaatggaagatttatgatgatgttcctttgcagttcgtttaaactggtatgctctcttggcctcgtctgtcatactga

SEQ ID NO: 440197 - DNA, 201 bp, Homo sapiens
ggtcacaattaccctgaaggtgtaagtaccacagttcttcatttcaagataaaagaaatgccagtttatcctcttaccattctgaattcctctgatttttycattgcctgcaacaaactgagtgttggcataaaaatatctttgtgctttttagaagacatggaggatccctcaaaggcttttttaataataagtgaaagg

SEQ ID NO: 440198 - DNA, 201 bp, Homo sapiens
gtacctgaaaatgtgtcacttagattttcaaacttctcttccaccttttgtatgaactaatacttgttcttgggttgaattacctttttttctaagagcarttggctgctctgaggtcacaattaccctgaaggtgtaagtaccacagttcttcatttcaagataaaagaaatgccagtttatcctcttaccattctgaat

SEQ ID NO: 440199 - DNA, 201 bp, Homo sapiens
agtcatggaagttgtagaagaacgaatctgccttcgcatttcctccagcgctggtcgatacagggatgtgtccttctccccgagtcattccacaagcatcwccagttcatcttgaagctgtttatcttcctcagacagctcctgttctttgtccttgtccccggcatcccgccgctccttgccgcttggcttctcatccat

SEQ ID NO: 440200 - DNA, 201 bp, Homo sapiens
ctcaaagttgtaagtgtagacatagttgcaaaagtcaattagtaccacaaggctgataacaaaaagcagcagcctcctgccctagccaaccctaccctctyttatatttttctcagctgttttctctgatactttctaccatggttttcagtaacatacttgtgctgatgtatcattatttatcaattaaggcattttctg

SEQ ID NO: 440201 - DNA, 201 bp, Homo sapiens
actggaggacagtggcaccatctcagctcactgcaacctccatctgccagattcagacaattctcattcctcagcctccccagtagctagaattacaagcrtgcactgccatacccagctaactttttttttcttgtatttttagtatagatggggttttgccatgttggccaggctggtctcaaactcttggcctcaagt

SEQ ID NO: 440202 - DNA, 201 bp, Homo sapiens
actcattccaaagaccagtccatggtggagaggtaggctcgttgtgattagaattgagaagctcagggtgttggctgggacttaatgtcccatagaatgtrgaagagtcaaccttgagaagcagagagaggaccatgtggtaaagtccttgacatgtgaaggctataccaaggaggtttgtcagggtctgtgatgaggagg

SEQ ID NO: 440203 - DNA, 201 bp, Homo sapiens
cgggcgctgtggctcacacatgtaatcctagcatttgggaggccaaggagggtggatcacctgagttcaggggttcgagaccagcctggccaacatggcamaaccctgcctctactgaaaatacaaaaatcagccaggtgtggtggtgcatgcctgtaatcacagctactccggaggcaggagaatctcttgaacccagga

SEQ ID NO: 440204 - DNA, 201 bp, Homo sapiens
tttaaagtaattctatttgatctctgtgaaacagatggaagtatttgttatacaaaccttatttagaatgtaatctttttttctctcctgattgcatatgkttggcagtgagctttctcttctagatgtgaatgaatcttggttagcctccaaatctaaacacaccctaatttcaaaaaccacaatcctgaggactcaatt

SEQ ID NO: 440205 - DNA, 201 bp, Homo sapiens
gccctggagacccaggttttgctttccttctcccgggcctccttggcctgcagcctgacagtgccttaacccagagcccagtcttatctggattactgcartattctcccgatgggtctctctgcttccagtcttaacccttctaatctctcctccacaatgcctccagagttatctttctaaaatccaaatttgctgatg

SEQ ID NO: 440206 - DNA, 201 bp, Homo sapiens
ctctagctagtgggcaggcatgcaggagttaggatgctacagtgaacgtgaagcccagagtgtacagtatctatgtagggagggcccaggaaacaaacctyagggcacaggcaagccttggctggtgcaggtgcacagtgcgtggtgtctgcattggaggcaaactggtcactgagtctaggtcaggactgcaaggttgcc

SEQ ID NO: 440207 - DNA, 201 bp, Homo sapiens
agagttctgtgggaagtacagggatgttcaggagaagcatcacagtggaatgagacttgaacattcctgtccactgaatagtcagagtttgtcattttgaaaatagaaaatagaagagaaatacattatcaggggccactaaatatctgttaaaaggggactgacaggatgaaggcagtacagaatgctgggctgagagca

SEQ ID NO: 440208 - DNA, 201 bp, Homo sapiens
agctggtcacgtctctgggcaagcaagaaaacacacttctgggggcaggtgaactctagctagtgggcaggcatgcaggagttaggatgctacagtgaacrtgaagcccagagtgtacagtatctatgtagggagggcccaggaaacaaacctcagggcacaggcaagccttggctggtgcaggtgcacagtgcgtggtgt

SEQ ID NO: 440209 - DNA, 201 bp, Homo sapiens
gagttctgtgggaagtacagggatgttcaggagaagcatcacagtggaatgagacttgaacattcctgtccactgaatagtcagagtttgtcattttgaaaatagaaaatagaagagaaatacattatcaggggccactaaatatctgttaaaaggggactgacaggatgaaggcagtacagaatgctgggctgagagcag

SEQ ID NO: 440210 - DNA, 201 bp, Homo sapiens
agttctgtgggaagtacagggatgttcaggagaagcatcacagtggaatgagacttgaacattcctgtccactgaatagtcagagtttgtcattttgaaaatagaaaatagaagagaaatacattatcaggggccactaaatatctgttaaaaggggactgacaggatgaaggcagtacagaatgctgggctgagagcagg

SEQ ID NO: 440211 - DNA, 201 bp, Homo sapiens
ggcagaaggcaaaaaagagcttgtgcagagaaactcccatttttaaaaccattagatctcgtgagacccattcactatcatgagaagagcatgggaaagaycagcccccatgattcagtcatctcccaccaggtccctcccacaacatgtgggaattatgggagctacaagatgagatttggctggggacacagagccaaa

SEQ ID NO: 440212 - DNA, 201 bp, Homo sapiens
ttctgtgggaagtacagggatgttcaggagaagcatcacagtggaatgagacttgaacattcctgtccactgaatagtcagagtttgtcattttgaaaatagaaaatagaagagaaatacattatcaggggccactaaatatctgttaaaaggggactgacaggatgaaggcagtacagaatgctgggctgagagcaggac

SEQ ID NO: 440213 - DNA, 201 bp, Homo sapiens
ttggcagccttgagttttcttaggcagtaatttaaagagcggtaggattatctttgggatgcagcctttagttggtagaaactatgttaatgtttgctcargcctttacaggccaaggctaaggcctagttgagaagagggctcagaggagcctggctagagcttgatcaagaagagaatctttgttagaatttaggaata

SEQ ID NO: 440214 - DNA, 201 bp, Homo sapiens
acctcctgttctatccgtgttgctgcaaatgacatgattttattctttttttatgcctggataatattctgttgtgtatgtatgtatatgttttatggattatatatatatatataacatacatgttattggatacattatagtacatacatgtgattggatatatatatatatatatatatatataacatacatgttata

SEQ ID NO: 440215 - DNA, 201 bp, Homo sapiens
agaagagaatctttgttagaatttaggaatagcattttactctgtgtgccttagttttctcatctataaaatgggtataataagaattcctatctctacattttttttgtgagttttaaatatatttatgtaaaatgctttggaggagttcctggcactcaaaatgttagctctttatcattattgttgttatagttgagc

SEQ ID NO: 440216 - DNA, 201 bp, Homo sapiens
cctcctgttctatccgtgttgctgcaaatgacatgattttattctttttttatgcctggataatattctgttgtgtatgtatgtatatgttttatggattatatatatatatataacatacatgttattggatacattatagtacatacatgtgattggatatatatatatatatatatatatataacatacatgttatat

SEQ ID NO: 440217 - DNA, 201 bp, Homo sapiens
tgagcaaccacacctggccactaatctttgctttcgatgaagatgattttctgcatagtggagagctagctaccaggatgtggtaatcatgaaagagactmtaaatcttgttttaatttttatttttttaaccaatctcattctgctgcccaggctggagtacagtggtgcaatcatggcttactgtagcttctaactcct

SEQ ID NO: 440218 - DNA, 201 bp, Homo sapiens
taaataaagtgtctttcagcaggaacacacatttaaaaaaggtaatgcattgattggttgacaaaaatgtgaccaggggcttgcaggaatctaaacctgtwttttttctagaagcaatattcagtattcactaatttgatgttcacaaagactttataggacaaaactactgtgaataacaagaattgactgtatcttttt

SEQ ID NO: 440219 - DNA, 201 bp, Homo sapiens
ttctgttgtgtatgtatgtatatgttttatggattatatatatatatataacatacatgttattggatacattatagtacatacatgtgattggatatatatatatatatatatatatataacatacatgttatatatatttaaaaatattttttctttatttgtccattgatggacacaggttgatttcatatctttgct

SEQ ID NO: 440220 - DNA, 201 bp, Homo sapiens
ctcaagtgttcctcctgccttggcctctcaaagtgctgggattatgtgagccactgtgcctggcctatcaaaatgtttttaaactagatttgagagcccaragtgattgagatgaataagaaacacattctacagacatatctgagatggaaataattcattttggtgacttactagatttagaaggtgtgaggttgtcaa

SEQ ID NO: 440221 - DNA, 201 bp, Homo sapiens
gttaggaccagctattaaactctcaaagtaattccattacttctcagctaaggtgctgatgtgatacaggaaaagtggcaaccaagaattgaaatgatggstttggtaaccatgtctagggtataaattaggctgtgtggtttgcagacttcagtatcaactgggagctggttagatatgcagattctcaggccctaccca

SEQ ID NO: 440222 - DNA, 201 bp, Homo sapiens
tctgttgtgtatgtatgtatatgttttatggattatatatatatatataacatacatgttattggatacattatagtacatacatgtgattggatatatatatatatatatatatatataacatacatgttatatatatttaaaaatattttttctttatttgtccattgatggacacaggttgatttcatatctttgcta

SEQ ID NO: 440223 - DNA, 201 bp, Homo sapiens
ctactaaaaaaaaaaaaaaaaaaaagtcagccaggcacagtggtacacacctatagtcccagctacttggaaggctgaggccttccaggatttaaaattawttttttaaattctaagagcatcccctaatccccataagatcctacctctctcatttttttttcttgcagctggataatgttagaagatgtgttaaatatt

SEQ ID NO: 440224 - DNA, 201 bp, Homo sapiens
tggggcccagcaatctgtgtgtgttttttggtttgtttgtttttgttttgatacagagttttgctcttgttgcccaggctggagtgcaatggcatgatctyggctcactgcaacctccgcctcccaggttcaagcaattctccttcctcagcctccctagtagctgggattacaggcacctgccaccatgcccagctaagt

SEQ ID NO: 440225 - DNA, 201 bp, Homo sapiens
tgctattgtgaacagtactgcagtaaacgtagggtgaagatatccttttaatatttattttccctttgggtacatacccaggagtgggattgctggatcayatggtagttctatttttagttttttgaaatatttccatattgttttccatagtgactgtactaatttaaatccccttttattcacatccttgccagaatc

SEQ ID NO: 440226 - DNA, 201 bp, Homo sapiens
tcccttttaaggctgaatcatattccattgtatgtatatgttgcattttgtttatacgttcatccatcaatggacatgtgggttgtttccaccttttgctrtaatgctgctatgaatatgggttcataatgagtgaataatgccgctatgaacatgaggtacaaatacctcttcaagaccctgtaatcagcgatgattcta

SEQ ID NO: 440227 - DNA, 201 bp, Homo sapiens
gagctgctttagcctcattagaaataaaaggtatcgtgttaatgtcttctagatgacctttagtaatttgagagatattctccatttttgtaggcttgacrctctattttttccctgctcttctaactcctgtattctgtggcttctgtatttgacagtagtagccccactcccagcaaacctgagccgtcacatctctct

SEQ ID NO: 440228 - DNA, 201 bp, Homo sapiens
gttttgctcttgttgcccaggctggagtgcaatggcatgatctcggctcactgcaacctccgcctcccaggttcaagcaattctccttcctcagcctcccwagtagctgggattacaggcacctgccaccatgcccagctaagtttttgtatttttagtagagacaatattttgctgtgttggccaggctggtctcaaact

SEQ ID NO: 440229 - DNA, 201 bp, Homo sapiens
ttgggccccaggccaggatgcagtctggtgggggctgacatttcaaaacagtgccctcctgtaactgcttgtgacacagcaggtgagtggaactcagtgckcgctccctctggaggggtgccgctgcctgatctccgggtggctcccaatgttagcctcagggcctgtgcaggccgcggggttctcccatggctacgattg

SEQ ID NO: 440230 - DNA, 201 bp, Homo sapiens
ccatcaatggacatgtgggttgtttccaccttttgctgtaatgctgctatgaatatgggttcataatgagtgaataatgccgctatgaacatgaggtacaratacctcttcaagaccctgtaatcagcgatgattctaaagtggctgtaagtccatatgtatgacttggctggtcgtaggcattccttcagaagcagctcc

SEQ ID NO: 440231 - DNA, 201 bp, Homo sapiens
aaaagcccaagtcatggtggtatgaatgtttttgctctctcttgagtgcttagattttcaatccctcttggagcatatgaattatttgcatacatggagakatatatatatatatctgtgtatatatatatatatatatatatatttgtgtatatatatatatatatctgtgtatatatatatatatacacacacacacac

SEQ ID NO: 440232 - DNA, 201 bp, Homo sapiens
cccaggctggagtgcaatggcatgatctcggctcactgcaacctccgcctcccaggttcaagcaattctccttcctcagcctccctagtagctgggattayaggcacctgccaccatgcccagctaagtttttgtatttttagtagagacaatattttgctgtgttggccaggctggtctcaaactcctgacctcaggcga

SEQ ID NO: 440233 - DNA, 201 bp, Homo sapiens
ggaactataattagtatagtgcaggcaaaggcaaacactagccatgtctagcacttgctttttgattcaaactgttcccaagttaacggcattttcctccyttaaagcccagaagtgaacagtcttgccagtcgataaatgtagaattggataaacagaaaagaatagggtaatcctatttctttctctctctctttttta

SEQ ID NO: 440234 - DNA, 201 bp, Homo sapiens
tatgaatgtttttgctctctcttgagtgcttagattttcaatccctcttggagcatatgaattatttgcatacatggagatatatatatatatatctgtgwatatatatatatatatatatatatttgtgtatatatatatatatatctgtgtatatatatatatatacacacacacacacacacacacatacacacatat

SEQ ID NO: 440235 - DNA, 201 bp, Homo sapiens
aggctggagtgcaatggcatgatctcggctcactgcaacctccgcctcccaggttcaagcaattctccttcctcagcctccctagtagctgggattacagrcacctgccaccatgcccagctaagtttttgtatttttagtagagacaatattttgctgtgttggccaggctggtctcaaactcctgacctcaggcgaacc

SEQ ID NO: 440236 - DNA, 201 bp, Homo sapiens
tccagccaaccacacttatcttacataattgttgattattcattaacaagctcttctaggatttctttaatcctaactgtggcatatattatatgatctacttacatcaccaagagttaagcaagtttacttgacccaaccatttttgcaggggtaggtgattctaaatctacttaatccttcatgagcttatctttaaat

SEQ ID NO: 440237 - DNA, 201 bp, Homo sapiens
ccctcttggagcatatgaattatttgcatacatggagatatatatatatatatctgtgtatatatatatatatatatatatatttgtgtatatatatatayatatctgtgtatatatatatatatacacacacacacacacacacacatacacacatattcttttggtcttcagtttgttcctcatcttagaatttttttt

SEQ ID NO: 440238 - DNA, 201 bp, Homo sapiens
gccaggctggtctcaaactcctgacctcaggcgaaccgccggcctcgacctcccaaataatctgtgttttaacaaaccctctaggcgattctggtgcacaytgagcttaagagacaatgaattagagaaatgatcgaaagatgttcccaagcctaggtaaactacaggacaggcaaaggagtattttgttggaggataaga

SEQ ID NO: 440239 - DNA, 201 bp, Homo sapiens
ctagcaggatatttttggatgcatgtttttggttgctggacttgtttgggtttggcagatctgctgattttgctaaacatgtggtgatcccttgctcaccrgatgggcaagagctccttgatatgtatgtaaatggacatcggtttggatgaatatgtgagcgaagctaaaattaaagacaaggaagacataacaattcag

SEQ ID NO: 440240 - DNA, 201 bp, Homo sapiens
tgcatacatggagatatatatatatatatctgtgtatatatatatatatatatatatatttgtgtatatatatatatatatctgtgtatatatatatatayacacacacacacacacacacacatacacacatattcttttggtcttcagtttgttcctcatcttagaattttttttttgttattaataaaataagagtgt

SEQ ID NO: 440241 - DNA, 201 bp, Homo sapiens
tgaagctgttaatcaaaaccaacagcagccagtcccggaaaactaatgaaatatgctctactcattgttaccgtagacaaaaagaagacttaagtggacaracagaaattattatgtgcatttgaattcatttttttttcttttttgagacagagtctcattatgctgcccaggatggagtgcagtggcgcgatcttggct

SEQ ID NO: 440242 - DNA, 201 bp, Homo sapiens
tatatacattgtatgtatatatacattatatataatgtatataatatatgtatataatgtgtatatatataatgattctccctagagattatcagaaaagygtttgataaactgtatcaccattcatgacagaaactcttaggaaacttagaaatagaaaacttgcttaccctgataaaggacaattataagaaatctaca

SEQ ID NO: 440243 - DNA, 201 bp, Homo sapiens
tagtttctgagtgagaggaaagtatggatacgaataaagcattttgcacactacaggcatatagtaagtgttcaatgccctttgcctgttaccatgggtcrcaatcgtgtttaggctccaagtggagatatttatagtacaaggagcaaaggggaaggtttttaactgggtctccttgataactcaggagataacacctgg

SEQ ID NO: 440244 - DNA, 201 bp, Homo sapiens
ccattatttatgatgatgtgattgtatatgtaaaaatttcaaatacatttacagataaataattagaaataaaatttacataattactgaacacaaaatcratatgtaaaaccaatgccatttctgtatcagcaaacaaaaattttaaaaatacttaaaaaataatacatttaagacagtattaaaaacatcaaataatct

SEQ ID NO: 440245 - DNA, 201 bp, Homo sapiens
ctccaagtggagatatttatagtacaaggagcaaaggggaaggtttttaactgggtctccttgataactcaggagataacacctggggcaagacctgaggmatgcgtaggagtttgctgtggggaacagccatgaaagaagtctataggtcgggtgcggtggctcacacgcctgtaatcccagcactttgggaggctgagg

SEQ ID NO: 440246 - DNA, 201 bp, Homo sapiens
catctgagtgatcagaagagtgtctgaactgaaacagaggcagtgggattggaaagagccagctatagggaatctttaggatttagaaccgacaggacttrccatttgattggatgtgaggaagtggagtagatgatttctttgagtttctggttcacatttctgggatactgtactaaagagttagaatactaaagacgg

SEQ ID NO: 440247 - DNA, 201 bp, Homo sapiens
tgctattcagagttagatgccattccttcccagacatcttctttagccatctcagtctgcattttctctctcaaaggatatattacacatattataattgyctatttaccctgtaacacctgaatgcaaattaaatattgtgtgaaggttccttgaacaatgtaatgctgtgtccttgtgtttacctgacagatctcccca

SEQ ID NO: 440248 - DNA, 201 bp, Homo sapiens
ttaccacaatcagattaacacatccatcaccacccacacttatatataagatctctagaagttattcatcttataactgaaagtttgtaccttttgaccartatctccctattttcctacctcccacccctgggcaaccaccgttatgctttctgtttctatgagttcaagttttttagattccttatttgtctttctgtg

SEQ ID NO: 440249 - DNA, 201 bp, Homo sapiens
agtcgcagacaaggatgggtgttactcagcatcttaaagcagcaaggaggaaatgagtgtgagatatctgacctccaatctgaaatgtaatcacattaacrccttgctgaatattagagaataaagtaatctgaactaaacatttatcactgaatattcttttaaattttggatttatctgaaatctagtcttctgcttaa

SEQ ID NO: 440250 - DNA, 201 bp, Homo sapiens
acatacaccttaaaattaatcacacccattattccaagcctttctgaattatttttctactatataattacttattttccccacatgataagcatatgctrtaaacgaaagttatcccacttgataaagtctcagagaagtttagtgtcttgatcaaagacacacagccatttggtatgaaagcctgaaagattactatgt

SEQ ID NO: 440251 - DNA, 201 bp, Homo sapiens
catgtaattatggagggaagggtctgtccatattgtctcacacgtctctgtatatctacagaacgtatctcatatgatctctatttatagaaatgatgagstttagctgatttgataggttatgcctaaaccagaagccagccttcctgactagtgcactttttctttccactgaatcatgatgcttctccatgtcttttg

SEQ ID NO: 440252 - DNA, 201 bp, Homo sapiens
acaatcagagtgatctcaaagaaaggtcagtttatccagtaaaattaaaggcagagttgattttcaggaattgctaacctcagcctgttttagcctttcarcattcgagaaagatgtttttccaagtcttttgtgtactgggttcttctagatagagaaaggatacaacagtgaatgaagcatgaccatgtaattatggag

SEQ ID NO: 440253 - DNA, 201 bp, Homo sapiens
ctatgatgtcagctagagtgaagttagttatttatgaaaggacaatcagagtgatctcaaagaaaggtcagtttatccagtaaaattaaaggcagagttgrttttcaggaattgctaacctcagcctgttttagcctttcagcattcgagaaagatgtttttccaagtcttttgtgtactgggttcttctagatagagaaa

SEQ ID NO: 440254 - DNA, 201 bp, Homo sapiens
taagtctcatgtaattctggagaaaaccacaacttttgagttattatattggtgagttaagacttctcagtaaacatgttactgtttaaactagagctttkaatcagaagagagtaataaaatttagaagtcttacaaatacaaggaatagaacgccactatttaaatttgggatcaaaagaagaatgctgttggtatatg

SEQ ID NO: 440255 - DNA, 201 bp, Homo sapiens
tgcctggaaaggggacagaatgctcagtgttgcctcattttctcatcaaacttgacactagttcactggggaaattgcatttccaagttgttttaaatcargaagttgttttaaaatcaggctgtgtgtttgtgtttgcactgttgccacttaatccttgatcctgttaaatgtttcttccatacagaggaacataaacaa

SEQ ID NO: 440256 - DNA, 201 bp, Homo sapiens
gaggaaagagcatgtgagggaaaacaaccaggcaactgcaaggatcctggggtgactgaaggatcagcacgatgtgagagtgcctggagagagcactcagsggggagagaattggagacgtgatttggataaacaatggggtctgcgggggagggagatcatgtagggctttgctgactttttaagaagtttggcttttac

SEQ ID NO: 440257 - DNA, 201 bp, Homo sapiens
ttttggaaaaaaacctatgtacatcaaatgtatgtagatcaagtgtgtcaacaatatgaaagaatagaagtctcactttaaacatagtcactctcaaagcygttttcaagaacatgtagggaaacagtggagttccgaatatgtttcctgttctagtccattttcacactgctataaagaattgcctgagactgggtaatt

SEQ ID NO: 440258 - DNA, 201 bp, Homo sapiens
ttctttagtttaaaatttacatgttatatctttttactttctagtaatcttaatcatttttataccttttcatttgtatcttcaataaagagcgtaggttkggagctcattttttatcttgacagtcttttgttttttactgaagtataactaagtccatttacatttaatacaattgtttaaatgcttggatttaaagta

SEQ ID NO: 440259 - DNA, 201 bp, Homo sapiens
cagtaaactagctgaaatgctttttaatactgggctgtacccatttctgatttttgagtacagataagtatgagaattatctaacagctcttagaagttgmgcatgactacatgtttggactgttttatctgcaaggaggacaacttgttttggaaacttgaaaggctaaaatctcccctaactgtgtggcttcttaaaca

SEQ ID NO: 440260 - DNA, 201 bp, Homo sapiens
ctattgtgtttgggaggatttggaagtgacgaaaaacaatagaaaatgagagcgttccggagtttggatttgctttaatattaactgttaactagctttgmtgttaaagatctttattaaaatttggctaactctggtgttaagttcagagtagagatttgtcaatataagagaaaagaatccatttttgattagctcaat

SEQ ID NO: 440261 - DNA, 201 bp, Homo sapiens
catattctagttttaacctcatctttctaggtggaatttagaaaaatgtttagttaacatttagaatcaaaatgtatatgttgctttttcttttgcaaaakcagcgccttttgggagatatcgtgccttaccaagaggctttcagaaatgatcagggcagggccaggcagcagtggtttatgcctgttatttcaacacttt

SEQ ID NO: 440262 - DNA, 201 bp, Homo sapiens
tgggcatggtggcatgcacctgtaatcccagctactcaggaggctgagtcacgagactcacttgaactcaggaggcggaggctgcagtgagccgagatcgygccactgcactccttcctgggtgacagagtgagactccatctcaaaacaaacaaacaaacaacgacaacaaaaaagatcagagtggttttcgtggttggt

SEQ ID NO: 440263 - DNA, 201 bp, Homo sapiens
tggtgcacattgagcttaagagacaatgaattagagaaatgatcgaaagatgttcccaagcctaggtaaactacaggacaggcaaaggagtattttgttgsaggataagatgcttgatattatgaaacatacatttggtcttaattgccatctcctggcatacaactcctaaaatccttggaatcttcgaagaggttaagt

SEQ ID NO: 440264 - DNA, 201 bp, Homo sapiens
gaactcaggaggcggaggctgcagtgagccgagatcgcgccactgcactccttcctgggtgacagagtgagactccatctcaaaacaaacaaacaaacaaygacaacaaaaaagatcagagtggttttcgtggttggtccttctgaaagtgttatgttttattcctcacccccatccgtgctggggcacccagagtgctat

SEQ ID NO: 440265 - DNA, 201 bp, Homo sapiens
ttgggtgttaatgcaagggaggcgattaggaggtaaaaaactgagctgcactttccatccatagatcattcaaggaaagtgaagctggaataaaatagtgytttccttccttgcattacttgagacaattaagggatagattgctttaaagtatggtccagtacctcctgcaactctagctcaaataagtagaaagaaact

SEQ ID NO: 440266 - DNA, 201 bp, Homo sapiens
gagtgagactccatctcaaaacaaacaaacaaacaacgacaacaaaaaagatcagagtggttttcgtggttggtccttctgaaagtgttatgttttattcstcacccccatccgtgctggggcacccagagtgctattattgctattaagaatattgttttactctgtgactttgtgtaacagttgggtatgattatttta

SEQ ID NO: 440267 - DNA, 201 bp, Homo sapiens
ttggttgttccaaaactaggatgtttcttaatttagaacatgacagcctggcgcggtggctcacacctgtaatcccagcactttgggaggccgaggtgggmgtatcacgatgtcaggagtttgagaccagcctggccaacatagtgaaaccccatctctactaaaaatacaaaaattagcccggcatggtggcttgtgcct

SEQ ID NO: 440268 - DNA, 201 bp, Homo sapiens
agttctccccaaaatgtgggtcaaatgcagaatgagaggaacttccagtaaaatagtgagctttctatgtgacccaagtgaaagcacttttttaaaaaaawttttcatgacacaaccaaactaatctagcagattctctatgtgtgtacttttattttgcgcttcacttgctgacgtgtttgaagtttcagtgtgtcaagg

SEQ ID NO: 440269 - DNA, 201 bp, Homo sapiens
aaccaatgccatttctgtatcagcaaacaaaaattttaaaaatacttaaaaaataatacatttaagacagtattaaaaacatcaaataatctaagaagacrctgaacagacatgtgcatggcctgtatgcagaagcctaataaacttcattgagaaaaatcagaaatgacaagtatatgaacagatttatcatgtttatgg

SEQ ID NO: 440270 - DNA, 201 bp, Homo sapiens
tgcccccaactctttttccatgttctcttctatcaaaatgatctgtacaaaaaagttctgtttataaaaattttagtctttcatctttgcagtctgttatmatctttatgaattttttgactcttccaccttcctggcaccacaaggctagcattgctatatttattaaagattcagatttggaattttgtcctcttatca

SEQ ID NO: 440271 - DNA, 201 bp, Homo sapiens
tggaatactaatgtctagccttcatttagatatgaaagacatacaacatggtaagtgtcaaaatgaaaatttagcttctgaatattaaaatttgggctgarggatatgatgtttgttggtaatgttatttcaaacttagagtttctgtgtaaaccgaggttagtatatatcccgtaagtgtgatcaagctatctcccatga

SEQ ID NO: 440272 - DNA, 201 bp, Homo sapiens
ctgcagcctcaacctcctgggctcaagtgatcctctagcctcagcctcccaagtagctgggactacaggtatggacaccacacctggctagattttaaaattttttgtagggacggggtctctctgtgttatctaggctggtctcaaactgctggactcaagcaatcctcccaactcgacctcccaaaagtgttggcatga

SEQ ID NO: 440273 - DNA, 201 bp, Homo sapiens
ctagcattgctatatttattaaagattcagatttggaattttgtcctcttatcactacttcctctgccatttgttagctctggttcttattgtatcttacrtttgaaaacctttgaagcttatggggtatatcaattctttattttctcaactttttattatctaagtaccctcaattatcaagttgtttaaaaaataaat

SEQ ID NO: 440274 - DNA, 201 bp, Homo sapiens
gtgtcaaaatgaaaatttagcttctgaatattaaaatttgggctgagggatatgatgtttgttggtaatgttatttcaaacttagagtttctgtgtaaacygaggttagtatatatcccgtaagtgtgatcaagctatctcccatgattgtttctggaaggattactattaatttgcctgtggtgttatttatatacctta

SEQ ID NO: 440275 - DNA, 201 bp, Homo sapiens
gctggagtgcaatggcacgatcttggctcactgcaaactctgcctcccgggttcaagcgattctcctgcttgaacctcccgagtaagtgagattgcaggcrccagccaccaagcccagctaatttttgtatttatagtagagatggggtttcaccacattggccaggctggtcttcaacttctgacctcaggcgatccacc

SEQ ID NO: 440276 - DNA, 201 bp, Homo sapiens
tacagtaagaatgatgatgtgacagatgtatttaaaaaatgaatttgcatattaggattgtcagaggcctttggggaaattaatgaggttctcaaatactmcaaaaaaggaccatcttttcataaaaggtgatatgatgtcatatatcatggcaccatatatttttgttaaaaattagcactgaaaataattttaatttta

SEQ ID NO: 440277 - DNA, 201 bp, Homo sapiens
gagaaatttatttctcacagttctaggaggctgaaagttcgagatcagggtgccagcatattcggttctggtgagggccgtctttcaggttgcagactgcyatcttctccatgtatcctcaattggcagaaagaaggaaagagagctctcttgtgtctgttttataaggggactgatcccacgcacgagaattctaccctt

SEQ ID NO: 440278 - DNA, 201 bp, Homo sapiens
caatggcacgatcttggctcactgcaaactctgcctcccgggttcaagcgattctcctgcttgaacctcccgagtaagtgagattgcaggcgccagccacmaagcccagctaatttttgtatttatagtagagatggggtttcaccacattggccaggctggtcttcaacttctgacctcaggcgatccacctgcctcagc

SEQ ID NO: 440279 - DNA, 201 bp, Homo sapiens
gttttaaattaaaatgacacccttacttaatttttaatttcttttttatggaaaaaaagtgaatctttttttcataatttattctgaagtattggtacctsggtatatcagtcagaccttttgcaggaactggaaactatgctaggtgcatgaaacagaagtgtttactataaaatcaggtgttttatgggaagtttggaa

SEQ ID NO: 440280 - DNA, 201 bp, Homo sapiens
ctaggatcctgtctccttgtaccttcacatgggagtgaggtttgcaacatatgaacagaaatattttctgtttggaattagagtggttcttaacattttayaaatggctttagtgtcaatattttaatacttggattctactgtacaattgacggccattcttatgccatatcctcctatgatatttatgctgagagatac

SEQ ID NO: 440281 - DNA, 201 bp, Homo sapiens
gccaaatactttcacttggcaacataccataaacagattttacatggcattcaatgagatgtgattttaatagctcttgattgtcccactatatgtacaamttaaattttttattcttactgctatttttggaaactctactttttttcttttgtaaaaatgcaagtaacattggaataaatatattctagtacataaata

SEQ ID NO: 440282 - DNA, 201 bp, Homo sapiens
gtggattctacttaagagatctttttctggtactgggtatcatgtgtaatgatgcagttacatttttgactggctatgtaaattagaaaggttaaaaaaartcccaggaatcttcacagtcactagtattatgacctctgttaccactaacttgggtgccatgtggaactagctggcctgtgatgtggggcagaaatccat

SEQ ID NO: 440283 - DNA, 201 bp, Homo sapiens
tacataaatatttttgcatatcactgatatattctccccttagagaagacttctatgagtggaattggtggttcaaaacagatgggttgactgggcgcagyggctcacgcctgtaatcccagaactttgggaggccgaggcaggcggataacctgaggtcaggagttcaagaccagcctggccaacatgatgaaacccaat

SEQ ID NO: 440284 - DNA, 201 bp, Homo sapiens
aaagacgtggagtcaacccagttgcccatcaatgataaactggataaggaaaatgtggatatatacaccatggaatactatgcagacacaaaaaggaatgmgatcatgtcctttgcagcgacatggatggagctggaagccgttatcctcagcaaactaacacaggaacagaaaatcaaacaccacatgttctcacttata

SEQ ID NO: 440285 - DNA, 201 bp, Homo sapiens
accaaaaatacaaaaattagctgggtatggtggtgcatgcctgtaatcccagctacttgggaggctgaggcaggagaatcaaaccaacttgggaggcagargttgcagtgagccaagattgtgccattgcacttgagcctgggtggcagagcaggactccatctcaaacaacaacaataacaaaaaacaaaaaaaaccaaa

SEQ ID NO: 440286 - DNA, 201 bp, Homo sapiens
cagttgcccatcaatgataaactggataaggaaaatgtggatatatacaccatggaatactatgcagacacaaaaaggaatgcgatcatgtcctttgcagsgacatggatggagctggaagccgttatcctcagcaaactaacacaggaacagaaaatcaaacaccacatgttctcacttataagtggaagctgaacagtg

SEQ ID NO: 440287 - DNA, 201 bp, Homo sapiens
gcttcttttaagcacagctaagaaaacactcctttgtcatttttattttattttgggtgggggggacagaattttgctctgacacccaggctgaagtacaktgatcacagctcactgcagcctcaaactcctgggctcaagtgaatttcccactttgtcctcccaaagtgcttggattataggtgggagccatagtgcctg

SEQ ID NO: 440288 - DNA, 201 bp, Homo sapiens
atggtagtttgtatttctgtgggatcagtggtgatatcccctttatcattttttattgtgtctatttgtttcttatctcttttcttctttattagtctggctagtggtctattttgttaatcttttaaaaaacaccagctcctggattcgttgatttttttgaagggctttccatgtctctatctccttcagttctgctct

SEQ ID NO: 440289 - DNA, 201 bp, Homo sapiens
ctgggcacagtggctcacgcctggaataccaacattttgggaggctgaggtggaggatcacttgagctcaagagtttgagaccagcctgggcaacatagcragactccatctctccaaaaaacaaaaacaaaaaagctaggcatcatggtactcacctgtagtcctggccacttgggaggctgaggtgggaggatggcttg

SEQ ID NO: 440290 - DNA, 201 bp, Homo sapiens
agtaataatgtgtttattgctacctagtccaaaaagtatttacaatgattaggaaaaaaagatatagtaagaaaataaaaaggtgctattttagtgaaaakattaaagaaaagaaaaaacaatactgaagtggaaccaggaatgagactaatcaaaaacacatattccagaatctccaaacatgtggcaggtgggccatat

SEQ ID NO: 440291 - DNA, 201 bp, Homo sapiens
cccctccccctcctcttcccggagcgggcatacctcctccgccgcctctacccggagcaggcatactccctctgccccctctacccggagcgggaataccycctccgccccctctacccggagcggcaataccccctccgccccctcttcccggggcaggcataccccttcctccccctcttcccggagcaggaatacctc

SEQ ID NO: 440292 - DNA, 201 bp, Homo sapiens
ggagagtatatagtctcaaaagagtaaagaagtggctcctaagtcagctcctgtaagagttctgtgggaagtacagggatgttcaggagaagcatcacagyggaatgagacttgaacattcctgtccactgaatagtcagagtttgtcattttgaaaatagaaaatagaagagaaatacattatcaggggccactaaatat

SEQ ID NO: 440293 - DNA, 201 bp, Homo sapiens
ccagctttagtatatctggaatgtcataatttttccctcatagtcaaaggatagttttactggatatagaattattggttgaaactttattttgtttcagyactttgaatatatcagaccactgccttctggtctcccaaatttgtgacaagaaatctgcagagattcttattgagcatttcttgtgtgtgaccagttact

SEQ ID NO: 440294 - DNA, 201 bp, Homo sapiens
cttgaaccatacccaaaatgcaaatgcaaagcagatgaatatattctcatcttcagatgatttcactgggcaagccaagccatcatattgtattacaagayggatttcggcagaatattgttaaggttggcttcatccccattgtgtgtgtttatgtcagcttctgcttctattttatttttaattagcatacacggcttt

SEQ ID NO: 440295 - DNA, 201 bp, Homo sapiens
gattctatttgttgggcttaaaatcttgtgtgggataattcataaatagcacaagcttggtatgccctgtcaattgatgagtaactcttaatcacaatttmagtttttattaaattgttttgatggggaggagacttcctcaagctgaaacatttggggtaatagtcatagaagagaaagccaaggctggcgccaggcagt

SEQ ID NO: 440296 - DNA, 201 bp, Homo sapiens
catgaaaggcagtagttgaagggtcatacagaatcatgcagaaactttatcccattaggatgtgaagtgattgctttagtccctttgaaaccctgtacacttttttttttttttttttaatatggtggccttccaagtctaaagcagcaagaggttgtgccctcctgcaggtaaagtcctattctgccttggtgtattgtc

SEQ ID NO: 440297 - DNA, 201 bp, Homo sapiens
aggatatgcctccactgagaagtccacagaagcataaacatcattgattttggatatagaagtggccacagaatttatctagacctccagcgtcatttttwaaaaatactttttatttccataggtttttggggaacaggtggtatttggttacatgagtaagttctttagtggtgatctgagattttggtgcacacatca

SEQ ID NO: 440298 - DNA, 201 bp, Homo sapiens
tggatggagctggaagccgttatcctcagcaaactaacacaggaacagaaaatcaaacaccacatgttctcacttataagtggaagctgaacagtgagaayacatagacacaggtggggaacaaggcacactggggccttttaggaggagtatggggagggagagcatcaggataagcagctaatgcatgctgggcataat

SEQ ID NO: 440299 - DNA, 201 bp, Homo sapiens
atttgctttgggttcttggtcatgaagtctttgcttaagccaatgtctagaagggttttcccaaagttatcttctagaatttttatagtttcaggtcttargtttaagtccttgacccatcttgaattgatttttgtataatgtgagagatgaggatccagtttcattctcctacagtgtcttgccaattatcccagcagc

SEQ ID NO: 440300 - DNA, 201 bp, Homo sapiens
tgtgtcatctatagcccgtgttgcctagtcattgagacaatgctgtgatacttggctgtggaatgtgtaggtggcagggaaaaacgcacactgtaaacctyactggggcttccttgttctaatgtttcatgattccttgaatttcctttgtgtgaatttcctttgtgtgatgtggcatgcatttagaaacagggtatttgc

SEQ ID NO: 440301 - DNA, 201 bp, Homo sapiens
aggtttaagtccttgacccatcttgaattgatttttgtataatgtgagagatgaggatccagtttcattctcctacagtgtcttgccaattatcccagcascatttgttgaataaagtgtcccttcctcactttatgtttttgtttgctttgtcaaagatcagttggctgtaagtatttcactttatttctgggttgtctg

SEQ ID NO: 440302 - DNA, 201 bp, Homo sapiens
gtggcagggaaaaacgcacactgtaaaccttactggggcttccttgttctaatgtttcatgattccttgaatttcctttgtgtgaatttcctttgtgtgatgtggcatgcatttagaaacagggtatttgccaggttcgttttcatttcttatatggatttttctactcactacaccatatcgggggcaagaatctgtata

SEQ ID NO: 440303 - DNA, 201 bp, Homo sapiens
aataatagatgtggagcattctcagcaacacatacattcaaaaggcagagaggagagaagaggtcaggttcctaagtttattaatgcggcaaatataaggrggcatccccaaataattacctgtgtgtgtgttagtatataaaagttataatgaaggcctgagctgctggctatttggtaatgttcaaactggcctacagt

SEQ ID NO: 440304 - DNA, 201 bp, Homo sapiens
agtggaaccaggaatgagactaatcaaaaacacatattccagaatctccaaacatgtggcaggtgggccatatgtgaatttcactgtttttttaaataacmaaaatgaaaagcacatctgatcaacacaatttatattgtccctgagattaaaaaaaagaaaacacaaatggccaggtgtggtggctcatgcctgtaatcc

SEQ ID NO: 440305 - DNA, 201 bp, Homo sapiens
ctgagaaaacaagggaatgtaggatttggtaactggtagctagaaactcatataccctattcgggaaaataacacatttgtgaaatattacacatacacayacacacacacacacacagaaaaagacatttatggatggttgaggaaatatcacagggcaattgttaattgaatgcaaaactggttgacaaacagcacaaa

SEQ ID NO: 440306 - DNA, 201 bp, Homo sapiens
gggtctcagcatataaacagtgcctctgtgttgagcatcatcatcttaagataatctcctcattctgtcattaaggcatttcataaattgtcggtaagagrctttgccaatatcctcatttgtgtttattgatagtgacgctactgttgaccttcagcttcaaacagggtttatgggacagtctccatcatgactccagat

SEQ ID NO: 440307 - DNA, 201 bp, Homo sapiens
atttaggaacaccttgaatcacactctgggggctgtaggagggtcccttcagccagtgctgtttgtccactgaatgggttggttcccctgccagtatagcmcttttttttaattattattatactttaagttctagggtacatgtgcacaaccagtatagtcctttgagtcccatttcattgtggggtatgtctaggatct

SEQ ID NO: 440308 - DNA, 201 bp, Homo sapiens
tttccatttttaaataagcccttttatttaaaagccaaccatagatgctttgggcaatcacatttatgtgttccatgtagagctgttttaatggctatgtyatagtgctgtgtgaagattgtggcagaaatagaaattataagtgtgaagatcatgcaattatttaaaaaatctgtattatttataaaaccatgtgcacta

SEQ ID NO: 440309 - DNA, 201 bp, Homo sapiens
caaacacaaactcaaaataccatccaactatttagttctttagacagagctgtgaaattataagatcaggaataaatgtgtcttcagagccctcctacacragatattctgtaatgggatgggcattttcagtagtcttctgtggacttggcagtcttgtctcagatatcacacccaagcccaattcagttgaggcaattc

SEQ ID NO: 440310 - DNA, 201 bp, Homo sapiens
gaggcaggagaatggcgtgaacccgggaagcagaggttgcagtgagccgagatcgcaccactgcactccagcctgggcaatagagtgagactccatctcaaaaaaaaaaaaaaaagaaaaagaaaaagaaaaagtgatctcttatgatgttcatgctttagcattcacacacattcacacttgcccaattttaaggaaggc

SEQ ID NO: 440311 - DNA, 201 bp, Homo sapiens
ttaggaacaccttgaatcacactctgggggctgtaggagggtcccttcagccagtgctgtttgtccactgaatgggttggttcccctgccagtatagcccttttttttaattattattatactttaagttctagggtacatgtgcacaaccagtatagtcctttgagtcccatttcattgtggggtatgtctaggatctct

SEQ ID NO: 440312 - DNA, 201 bp, Homo sapiens; identical to SEQ ID NO: 115110

SEQ ID NO: 440313 - DNA, 201 bp, Homo sapiens
ccacaagtcatattgtgtccattatttaccatgtaccagttactgttcttagcacttatatcagctcatataatgctcctacccctgtgagacaggcaccrttagcctcagttcatagtacagaaacctcaggtacagagatatagcggaattcaatgtttccaagctggtaaggggctgagctcgggttcagactccagc

SEQ ID NO: 440314 - DNA, 201 bp, Homo sapiens
gtggtagttcacttctgtgaaaattgattaaatattttatacaatgtttggtctgtatttcaggggtcagtgtgctcttcacagatcttaggtccattttyatagataacagtagctgcaaaagaatttgcaattccataagcttcagctttatcccccaacaatgtcacggttagatagaaatactaactgggatgcttt

SEQ ID NO: 440315 - DNA, 201 bp, Homo sapiens
caattcagttgaggcaattctttttgaggtcagtaggacaaggtgtagagccctctgctggcctgagatagatttatctacataatctagggatagatttkatttgatttgatttgatattgttttgttttgtttttgagacggtttcactgtgtcgcccaggctggagtacagtggtgcgatcacagctcactgcagcct

SEQ ID NO: 440316 - DNA, 201 bp, Homo sapiens
tggaatattttatatgagtgtaagtacagtattttatatggagaccagaatatatacttttaaaaatgaattaaatactttaaaaaaagaatttgaatgtrtattggtttttcatatatgtttggtatttaaatgactgtggttataaataaaattgtatgtgagacacttttaaaacctttaccatgttttagcagattt

SEQ ID NO: 440317 - DNA, 201 bp, Homo sapiens
tttcacctatatccctgcaaatgacatgaacttattcttttttatggctgcatagtattccatggtgtatatgtgccacgttttctttaacaggttacctrttctaagatcttttataatcatatctttttattagtatttgaagagatggaattagctattggtttgaactttgcttcttccgcctccttccctctgata

SEQ ID NO: 440318 - DNA, 201 bp, Homo sapiens
ctgcatacttcgaggcaatttttatttttaatatttttttccccttcatgcaaactgtggcatcaggtgggagatagtactttatggaatatctgggatayagttaccatattttgctactttaatatgggtctgctggccttgatagacaattgagctggggcagtgctgatagtttcttattaagagaggaacttaaac

SEQ ID NO: 440319 - DNA, 201 bp, Homo sapiens
gtttggtatttaaatgactgtggttataaataaaattgtatgtgagacacttttaaaacctttaccatgttttagcagatttctttctttcttttttttaratggagtctcactctgttgcccaagttggtgtgcagtggcatgatcttggctcactgcaacctccccctcccgggttcaagcgattctcctgcctcagcc

SEQ ID NO: 440320 - DNA, 201 bp, Homo sapiens; identical to SEQ ID NO: 19317

SEQ ID NO: 440321 - DNA, 201 bp, Homo sapiens
ctaaaaaagactttttaaaaatgttcgaggtcaggagtttgagaccagcctgacaacatggtgaaaccctgtctctactaaaaatacaaaaaaattagccrggagtggtggtggatgcctgtaatcccagctactcaggaggctgaggcaggagaattgcttgaacccgggaggcggaggttgcagtgagccgagatcgcg

SEQ ID NO: 440322 - DNA, 201 bp, Homo sapiens
tacatttccatttttaaataagcccttttatttaaaagccaaccatagatgctttgggcaatcacatttatgtgttccatgtagagctgttttaatggctwtgttatagtgctgtgtgaagattgtggcagaaatagaaattataagtgtgaagatcatgcaattatttaaaaaatctgtattatttataaaaccatgtgc

SEQ ID NO: 440323 - DNA, 201 bp, Homo sapiens
ctacctttgagcattgttattttctggtggacacactatgataaattatttgtggattatagctctgagttattttaggtgttgttatttataacctagtraaaagatggggaaatagctgctaaaagtaacttttctctttcttaagctagcaggcctgtagcctactttacgccacttttaggttgtgtttttaaagtt

SEQ ID NO: 440324 - DNA, 201 bp, Homo sapiens
ctaggtgggcggatcacaaggtcaagagatcgagaccatcctggccaacatggtgaaaccccatctctactaaaaatacaaaaattagctgggcgtgatgrcatgcgcctgtagtcccagatactcaggaggctgatgcaggaggattgcttgaacccaggaggtggatgttgcagtgagtcaagattgcaccattgcact

SEQ ID NO: 440325 - DNA, 201 bp, Homo sapiens
atttttcctgatttactgatgagaatattgaggctccaaaaggtgatgaggtttgcttaggggggagcaatgaatatatcttaggaattttatctattccrtgttttttctttaaatagttaattaccaataggtttagacataccagataacctgataccttcctttttccatatgatacccacaaagtttccttttggt

SEQ ID NO: 440326 - DNA, 201 bp, Homo sapiens
cacccttctcatcctgaagtcgtttgcagtcaatttgaggaaacatgatatacactcaggactaggggacaagccactgttttggatagtacaccattaagtgttgaaatgtggggtgacaggtgtgctgagttagctgtcccattcaggagtggcctttcagcagaggtgggtctgattcaggtgaaatgggacttcaac

SEQ ID NO: 440327 - DNA, 201 bp, Homo sapiens
agtggcctttcagcagaggtgggtctgattcaggtgaaatgggacttcaactagattttttaatgattgattagactccttgagtgggtagagctggagarggcattctagtggcatgaagcttggtttaggaaacaagaaatgaatctgggaaggaagatggtgggaatataggaacgttgaaatgatatttaagttgaa

SEQ ID NO: 440328 - DNA, 201 bp, Homo sapiens
ctccttccctctgatattattggtgatagttgtgtaaaattgtccagaagaggggagttaattcccactttatagtagggggaattcaggtttatagatgragtctgcctagttctttatctccatagggccagaatgggcatccaatttttttgagtcctagctcagggctctctgctctgggcagtgtgttagcttgtt

SEQ ID NO: 440329 - DNA, 201 bp, Homo sapiens
atgacctatgtctgtaggctttggaggtgtttgaaacttagggcaaccagtaagagagataacttaaaggggtttgtttttttttttttttccttttttcrttgccctgaacagactctgtgataagtctttgtccatgggacaaaaggagggtgtagaatccagaatctgttacttcctttttttttttttttaataaat

SEQ ID NO: 440330 - DNA, 201 bp, Homo sapiens
tctgggtatattgcatgatgctaaggttttgggtttgattgatcctctcacccaggtactaagaagagtactcaatagttagtttttcaatctttgtcccyttctcccccatctaggagtccccagtgtctattgttgccatctttatgtccatgtgtacccaatgtttagctcccagttataagttagagctagtggtga

SEQ ID NO: 440331 - DNA, 201 bp, Homo sapiens
aatttagagtggagccactattgcggagagccctctttagtttcactggaaaaactaaacagtgaacactttcactgttgcccccttttttgatccgatgrcagcacagttgatccatttcagcagggactgcagcagaggaaatgagctaaaataccagaaagggcacagaggttctctggagggctaatttattgtgga

SEQ ID NO: 440332 - DNA, 201 bp, Homo sapiens
tacaaatgggtagccacctagcaccatttattaaatagggagtcctttccccattgcttatttttattgaagattggatgacggtagatgtgtggctttayttttatttttggattctctattcttttccataggtcttttccatgtggtgtttgcttttctgttcctgccttaattcacttacatagcctccagctgcat

SEQ ID NO: 440333 - DNA, 201 bp, Homo sapiens
gaagcgtgagccaccatgcccagacaacgaaatggaagatgtttagtatttcacctttagtttttgttaatttatgaatctttaaaattactttgggacckgaaactgtctgaagtattactttagcaagctgtctggaggagagtcttctcgagatagtgaggaacttggtgaatcctctccccagtaaaacaacaactt

SEQ ID NO: 440334 - DNA, 201 bp, Homo sapiens
tgtggtgtttgcttttctgttcctgccttaattcacttacatagcctccagctgcatccatgttactgcaaaggacatgattttgtttgttttttggctgwgtaatgttccgtggtatatatgtaccatgttttccttatccaggccaccattgatgcacacctaggttgattctaaatctttgctattgtgtatagtgct

SEQ ID NO: 440335 - DNA, 201 bp, Homo sapiens
agagcaatcagagcaagatgtggtgtccccaggaaagcattcgctaacctcatacagacccaccaaaaccaagcggaagcttcactggcatgagtctgtgtttgtgtgtgtgtgtgtgtgtgtgtgtgtgttattaatcccattttatttatttattttcttttattatactttaagttctgggatacatgtgcagaacat

SEQ ID NO: 440336 - DNA, 201 bp, Homo sapiens
agaagaatgaaactggacccccaaaaaaccttcatcacatataaaaattaactcaagatggattaaagagttaaatgtaagacctcaaactgtaagagtcrtagaagaaaacctaggaaataccattcgggatattggctttggcaaataatttatgactaagtcctcaaaagtaattgcagcaggaacaaaaattgacaa

SEQ ID NO: 440337 - DNA, 201 bp, Homo sapiens
gcaatcagagcaagatgtggtgtccccaggaaagcattcgctaacctcatacagacccaccaaaaccaagcggaagcttcactggcatgagtctgtgtttgtgtgtgtgtgtgtgtgtgtgtgtgtgttattaatcccattttatttatttattttcttttattatactttaagttctgggatacatgtgcagaacatgca

SEQ ID NO: 440338 - DNA, 201 bp, Homo sapiens
agaatgaaactggacccccaaaaaaccttcatcacatataaaaattaactcaagatggattaaagagttaaatgtaagacctcaaactgtaagagtcgtasaagaaaacctaggaaataccattcgggatattggctttggcaaataatttatgactaagtcctcaaaagtaattgcagcaggaacaaaaattgacaagtg

SEQ ID NO: 440339 - DNA, 201 bp, Homo sapiens
cttcagcctcctgagtagctaggaataaaagtgtgtgccaccatccctggctaattttttaaaaatttttaaatattctgtagaggtggggtctcactgtrttgcccaggctggtcttgagctcctgggctcaagcaatttacctgactttgcctcccaaagtgctgggattataggcgggagccacatgcctggctacag

SEQ ID NO: 440340 - DNA, 201 bp, Homo sapiens
tgttctcattgttcaactctcacttatgagtgagaacatgcagtatttggttttctgtttgtgtgttagtttgctgagaatgatggtttccagcttcatcsatgtctctgcaaaggacacgaactcatccttttttatggctgcattgtattccatggtgtatatgtgccacattttctttatccagcctatcattgatgg

SEQ ID NO: 440341 - DNA, 201 bp, Homo sapiens
gttttgtcctttttgatcaagattactttggctatttggttttttttgtggtttcaaataaattttaggattattttttctatttctgtgaagaatgacaytggaattttgattgggattacattgaatctgtagattgctttaggtagtatggccattttaacaatattgagtcttccaatccataaacacagcatatct

SEQ ID NO: 440342 - DNA, 201 bp, Homo sapiens
tatcatgtgctgctcttgaataagtgcatcttagctatccccaacagccttgcatttactgtttttaaaaaaattattaaaaaaattttaactgttgcaamatacacagaacattaatttaccaccttaaccattttaagtgtccaattcagtgttgttatgtatattcacattgttgtgcaatcaacctccagaattttt

SEQ ID NO: 440343 - DNA, 201 bp, Homo sapiens
tcacttatgagtgagaacatgcagtatttggttttctgtttgtgtgttagtttgctgagaatgatggtttccagcttcatcgatgtctctgcaaaggacaygaactcatccttttttatggctgcattgtattccatggtgtatatgtgccacattttctttatccagcctatcattgatgggcattttgggtggttccaa

SEQ ID NO: 440344 - DNA, 201 bp, Homo sapiens
ttgtaaagagaatttctgaattgaggaagacattgaaatagattgtctgcaagattccgattaatgctatttttatggttccaaatttaagatagacaatwgctgatcataatagggaacacttacagacattactatgcaaagacttgcaacaactgtatgaggcaggtgtttttatctccatcttcaggatgaaagaac

SEQ ID NO: 440345 - DNA, 201 bp, Homo sapiens
attgttgtgcaatcaacctccagaattttttcttcttgcaaaactgaaagtctgtacccgttacattgcaacaacttcctatcccccatctctccaatccsggcaaccaccatttgactttctgacaatatgaatttgacaatgttatgtacctcatatgggtagaatcatacggtattcgtctgtttgtagcaggcttat

SEQ ID NO: 440346 - DNA, 201 bp, Homo sapiens
ctgggtcaaatggtatttctggttctagatccttgaggaatcaccacactgtcttccacaatggttgaactaatttacactcccaccaacagtgtaaaagygttcctatttctccacatcctctccagcatctgttatttcccaactttttaatgatcgccattctgactggcatgagatggtatctcattgtgtttttga

SEQ ID NO: 440347 - DNA, 201 bp, Homo sapiens
tgcaataaacatacctgtgcatgtgtgtttatagtagaatgatttataatcttttgggtatatacccagtaatgggattgctgggtcaaatggtatttctsgttctgggtccttgagaaattgccacactgtcctccacaatggttgaactaatttacactctcaccaacagtgtaaaagcattccttttctccacatcct

SEQ ID NO: 440348 - DNA, 201 bp, Homo sapiens
ggttcgagaccagcctggccaacatggcacaaccctgcctctactgaaaatacaaaaatcagccaggtgtggtggtgcatgcctgtaatcacagctactcsggaggcaggagaatctcttgaacccaggaggcggaggttgcagtgagccgagatcaggccactgcactccagcctgggcgacaaagtgagattccatcaa

SEQ ID NO: 440349 - DNA, 201 bp, Homo sapiens
tcatttagccaaatgtcctccaggttcatccatgtggtagcatgtatcagagtttccttctatttaaaggctaaataatttcccagtttgtatatatatcrcattttgtttatctgttcattcatggatggtcacttgggttgcttccacctttcggctgttgtgaacatgctgttatgaacataggtgtacagatgtttc

SEQ ID NO: 440350 - DNA, 201 bp, Homo sapiens
tatctcattgtgtttttgatttgcatttctctaatgaccagtgatgatgagctttttttcatatgtttattggccacataaatgtcttcttttgagaagtrtctgttcatatcctttgcccactttttgatgggattgtttgtttgttttttttcttgtaaatttgtttaagttctttgtagattctggtagattctggat

SEQ ID NO: 440351 - DNA, 201 bp, Homo sapiens
cattttacggtatcactaatagtacacaatgctttcaatttctccaatccttgccagcacttatgttctatcttgttgttgttgttttggatagggccttkctcttttgctgagctggagtgtagtggcgtgatcatggctcactgcagccttgacttccggggctcaagtgatcctcccaagtagctaggactacaggtg

SEQ ID NO: 440352 - DNA, 201 bp, Homo sapiens
tctgttcatatcctttgcccactttttgatgggattgtttgtttgttttttttcttgtaaatttgtttaagttctttgtagattctggtagattctggatrttagcccttttgtcagatggatagattgcaaaaattttctcccattctgtcggttgcctgttcactctgatgatagtttgttttgctgtgcagatgctct

SEQ ID NO: 440353 - DNA, 201 bp, Homo sapiens
tgttctatcttgttgttgttgttttggatagggccttgctcttttgctgagctggagtgtagtggcgtgatcatggctcactgcagccttgacttccgggrctcaagtgatcctcccaagtagctaggactacaggtgtgtgccactatacctggctaatttttatatttttgtagagatgaggttttgccatgttgccca

SEQ ID NO: 440354 - DNA, 201 bp, Homo sapiens
caggttggagtgcagtggcgcaatctcagctcactacaagctctgcctcctgggttcaagcaattctcctgcctcaacttcccaagtagctgggattatargtgcccaccaacacacccagctaattttttttttttttttgtatttttagtagagatggggtttcactatgatggccaggctggtctcgaactcctggcc

SEQ ID NO: 440355 - DNA, 201 bp, Homo sapiens
agtagctaggactacaggtgtgtgccactatacctggctaatttttatatttttgtagagatgaggttttgccatgttgcccaggctggtgctttattttkttgttgttgttgtttgtttgttttttaaatagccattctcttgggtgtgaggtgatttcattgtggttttgatttgcgtttccataatgattagtgatat

SEQ ID NO: 440356 - DNA, 201 bp, Homo sapiens
tttttatatttttgtagagatgaggttttgccatgttgcccaggctggtgctttattttgttgttgttgttgtttgtttgttttttaaatagccattctcytgggtgtgaggtgatttcattgtggttttgatttgcgtttccataatgattagtgatattgagcatcttttcatgtgcttgttgactattttgtgtatct

SEQ ID NO: 440357 - DNA, 201 bp, Homo sapiens
ggccagcttgccactctggtaggtgcttgacctcaccttgtgtgaaaggtccatgtgatacaaacaccaaggaataggattctgtgaccgactgttggcarcaggcaaagagacatcctcctaaactagaggtgggaggtagcactctccggctgtcacaccttgacatcatcccttgcctgagttttatcctttttaagt

SEQ ID NO: 440358 - DNA, 201 bp, Homo sapiens; identical to SEQ ID NO: 19316

SEQ ID NO: 440359 - DNA, 201 bp, Homo sapiens
tggttttgatttgcatttctccaatgaccagtaatgatgagcttttttccctatgtctgttggctgcatacatgtcttcttttgagaagtgtctgttcatrtcctttgcccactttttgatgggaaagggtattcttaagtagaaagtatagcctgtttgttatccatgcaaatgacctctaaggaatggaagaatccagc

SEQ ID NO: 440360 - DNA, 201 bp, Homo sapiens
ggcattagaataggtgaagaggtggttttaacaagggttgaggtcttgtcatttgcatatgatattttattatagaggaattaaagggtgtatatgaccckggaaggcatgaataatggtgcgtggttaagaatgtgtgttaggatgtaagggaagagtgtgagggataatataatttgaggagaagcttcatgtgtcctg

SEQ ID NO: 440361 - DNA, 201 bp, Homo sapiens
tattatagaggaattaaagggtgtatatgacccgggaaggcatgaataatggtgcgtggttaagaatgtgtgttaggatgtaagggaagagtgtgagggayaatataatttgaggagaagcttcatgtgtcctggtgaaactgatgagaacactttgaccctaccttgggggttaagtagaggataacaatgcacttgaga

SEQ ID NO: 440362 - DNA, 201 bp, Homo sapiens
caacacacccagctaattttttttttttttttgtatttttagtagagatggggtttcactatgatggccaggctggtctcgaactcctggcctcaagtcayccacctgcctcggcaggttttaggtcttgtgtttaagtctttaatccatcttgagttaattttcatataggatgtaaggaaaggggttcagtttcagttt

SEQ ID NO: 440363 - DNA, 201 bp, Homo sapiens
actatgttgcatgtagagtatttctagatgggtaagaatcagatcaagtggcaaggacgaagagagatgtattctatattgagcatattttctatttttcraggctctgcctggaaaggggacagaatgctcagtgttgcctcattttctcatcaaacttgacactagttcactggggaaattgcatttccaagttgtttt

SEQ ID NO: 440364 - DNA, 201 bp, Homo sapiens
cagatggttgtagatgtgtaacattatttctgaggcctctgctctgttccattggtctatatatctgttttggtaccagtaccatgctgttttggttactrtagccttgtagtagagtttgaagtcaggtggtgtgatgcttccagctttgttctttttgcttaggatgacttggctatatgggctcttttatggttctat

SEQ ID NO: 440365 - DNA, 201 bp, Homo sapiens
ctggtatgatcaatccgtttaagaccagcaggtctaaactctcccggactctaggactgccatgtttgaatacagttatattgaacctttctgccttttctttttttttttttcaaataaatggagggagaaggatgtgttttatgaagattatgccttacccaactttaagtacctgcatcttcttcttttttttttttt

SEQ ID NO: 440366 - DNA, 201 bp, Homo sapiens
agtggtctattttgttaatcttttaaaaaacaccagctcctggattcgttgatttttttgaagggctttccatgtctctatctccttcagttctgctctgrtcttagttatttcttatcttctgctagcttttgggtttgttggctcttgcttctctagttcttttaattttgatgttagagtgttgattttagatctttc

SEQ ID NO: 440367 - DNA, 201 bp, Homo sapiens
caggcacctgccaccatgcccggctaatttttttgtatttttagtagagacgaggtttcaccatgttggccagcctggttttgaactcccgacctcaagtsatccgcccgtcttggcctcccaaagtgctaggattacaggtgtgagccacagcgcctggcccgtacctacatcttctaacattgccttatttaccagagt

SEQ ID NO: 440368 - DNA, 201 bp, Homo sapiens
gtagttatgtggctttgactgagattcttaatcctgagttgtaatttgattgtactgtggtctgagagactgtttgttatgatttccattcttttgcattkgctgaggagtgttttacttccagttatgtgttcaattttagaataagtgcgatgtggtgctgagaagaatgtatattctgttgatttggggtggagagtt

SEQ ID NO: 440369 - DNA, 201 bp, Homo sapiens
ccagcctggttttgaactcccgacctcaagtgatccgcccgtcttggcctcccaaagtgctaggattacaggtgtgagccacagcgcctggcccgtacctrcatcttctaacattgccttatttaccagagtgaaggcttttgaaatatttagatgtctggtaaacaataaacttaaaaatattgagttcgttaaaaatgg

SEQ ID NO: 440370 - DNA, 201 bp, Homo sapiens
ttttagaataagtgcgatgtggtgctgagaagaatgtatattctgttgatttggggtggagagttctgtagatgtctattaggtccacttggtcctaatargaccaaagatttcaagttctgaatatccttgttaattttctgtctcgttgatctgtcaaatgttgacagtggggtgttaaaatctcccactattattgtg

SEQ ID NO: 440371 - DNA, 201 bp, Homo sapiens
aaggctcgaagtgttgaaatacgatgaagtctggggagttaacttttagcctcgactttaactcatttattctgtgccaaagaggaatttgggggagaggytgagttttcctttgtggtagcctggcaggtgaggacaaatccacttactctcctctttcctcagctagaagagacgaggaatggaaggagatttgatatt

SEQ ID NO: 440372 - DNA, 201 bp, Homo sapiens
agtttcaatacctctgttaaaacactgagcaaacaataagctattctgacacaggggcaattcctaagaaacgaggcttaaaaataatattgcagtcatckctggcagtctgaaagctgtgtacatacccaaggctgtaccctcacaggagcaactggagagggaaaagcccagtggctagtttccagatgaacatggtag

SEQ ID NO: 440373 - DNA, 201 bp, Homo sapiens
aatgagattcctggcctgtcaagccagtaggtgtgggactatggagaaagttcctaaattttagtccagttatttgaatggaatcttgaagagacatttaytattcatagagcaacctgagctcgaactgtaattttgttctagttgggcagtgggggaagagaagagacttgaaactagtgttatatgatggacacgtca

SEQ ID NO: 440374 - DNA, 201 bp, Homo sapiens
tctggaattgataaaatataatgcgtgaaatgtctagttttcaacaacaaattcaagtcatgtaaagaacaggaaagagtggcctatacacaggaaaacamacaggcaacagaaacattattcaaaaggacccagatgttagacttaacaaagaactcaacgcacccattaaaaatatcttcaaagaactccaggcaacta

SEQ ID NO: 440375 - DNA, 201 bp, Homo sapiens
gcaaaactgataatctcctttgtgaagacatcactgtaagaagcaggtggtacttactgaactctggagagaatggaaagtgtgaggacagcacagtaaayagaaggaaaattcccttagcagtccactttccaggcaccagtcacctctggaactttaattagaactcaaaaatgtgagtggaggaattagaacagaggc

SEQ ID NO: 440376 - DNA, 201 bp, Homo sapiens
tgctatcagcacttttcatattcccttttcttattccttcttgagggtaggtaccaccatgggctctggcatttacagaatacacataattctcctctctrtctaatccagtcctgatcctctgtcttctctaggccctgtctagaatctgtgtgctcttcactgggcccttttgatactccgagctcatttaaaaaaaaa

SEQ ID NO: 440377 - DNA, 201 bp, Homo sapiens
gatagtttgtggctgcagtgagctatgatcgtgccactgtactcctgcctgggtggtagaatgagaccttgtctctaaaaaagaaaaaagacaaaagtccrtgaacatctcaatagctgtagaatccgcagttaccaaatcgtatacactttagtgacacacacacacacacacacacacatacacacacacacacaaatg

SEQ ID NO: 440378 - DNA, 201 bp, Homo sapiens
gagctatgatcgtgccactgtactcctgcctgggtggtagaatgagaccttgtctctaaaaaagaaaaaagacaaaagtccgtgaacatctcaatagctgyagaatccgcagttaccaaatcgtatacactttagtgacacacacacacacacacacacacatacacacacacacacaaatgggactagaagggaacttcc

SEQ ID NO: 440379 - DNA, 201 bp, Homo sapiens
tgcgctgtcagtagccttggaaacggtgttgttccctggcagtgtttacccagccgctgtcccctggcgagttcagagccaggtgatcggcagtgctcgcycttaatgactgtgtttcatctgcagggcgaacgctgttggagaagctgttcagccagcaggagaacgggcctccagaagaagcagagaagttttgctccc

SEQ ID NO: 440380 - DNA, 201 bp, Homo sapiens
aatggtctcctgattggaatggaagcagcaaaacattttgcagatgacatgatcttgtatgtaagaagtcctaaggaattcattagaagaaactattagaygtaacaaggaatctaattgtatttctagacattagcaattatcattgtgaaaatgtaattaggaaaacaactccctttgcagtattattaaaaagaataa

SEQ ID NO: 440381 - DNA, 201 bp, Homo sapiens
aagcaactttttattaattaaaagcacatcagataaatcctaatatttgaaacacctccccatatttaactaattcctcattcttctagacaaggaaacattaaagtaatttttacacatcaacatatacttcagaagagaaaaaagaaaccttcattaactgaacaaataacaaaatatgactcaacatacacaaaaacc

SEQ ID NO: 440382 - DNA, 201 bp, Homo sapiens
gcaactttttattaattaaaagcacatcagataaatcctaatatttgaaacacctccccatatttaactaattcctcattcttctagacaaggaaacattaaagtaatttttacacatcaacatatacttcagaagagaaaaaagaaaccttcattaactgaacaaataacaaaatatgactcaacatacacaaaaaccag

SEQ ID NO: 440383 - DNA, 201 bp, Homo sapiens
caactttttattaattaaaagcacatcagataaatcctaatatttgaaacacctccccatatttaactaattcctcattcttctagacaaggaaacattaaagtaatttttacacatcaacatatacttcagaagagaaaaaagaaaccttcattaactgaacaaataacaaaatatgactcaacatacacaaaaaccagt

SEQ ID NO: 440384 - DNA, 201 bp, Homo sapiens
ccatcctttgaactggcaaggaaagacacagtaacttgttttgttttgaaagctagattgcagtattcccccagtgatgccagactgacttggctgttgtkttgtaagtaaaaactttcctattccagtaatgccagccttcttctcaatactgccacacacgaagcaggtagacacacagctattccaaaaacaagaaaa

SEQ ID NO: 440385 - DNA, 201 bp, Homo sapiens
aactttttattaattaaaagcacatcagataaatcctaatatttgaaacacctccccatatttaactaattcctcattcttctagacaaggaaacattaaagtaatttttacacatcaacatatacttcagaagagaaaaaagaaaccttcattaactgaacaaataacaaaatatgactcaacatacacaaaaaccagtg

SEQ ID NO: 440386 - DNA, 201 bp, Homo sapiens
acacagtttaaaagcaaattataccatcggctaaattagaatcatttatttaactaggaggaaaagcacagcttctgaatagtgatttgaaggcatagaartttgagggcctgaggtgtttaatctggcatgatttgtgaggggcttgtagtaggtacagtggtgacttgaaataataattaggtttgaactgattcagta

SEQ ID NO: 440387 - DNA, 201 bp, Homo sapiens
actttttattaattaaaagcacatcagataaatcctaatatttgaaacacctccccatatttaactaattcctcattcttctagacaaggaaacattaaagtaatttttacacatcaacatatacttcagaagagaaaaaagaaaccttcattaactgaacaaataacaaaatatgactcaacatacacaaaaaccagtgt

SEQ ID NO: 440388 - DNA, 201 bp, Homo sapiens
cttatgtaaggcaagcttctttgggtttatgttatttaataaatgtcttcaagcactagaaatagtggttttgaagaagtcctcttgtcacatctatccgrtcttatcatcctctgagtttatcccttttaaaaatccctctgttctccaaagcgtttgtaggcacttcttgaattcattgatcctcattgcttggtttcc

SEQ ID NO: 440389 - DNA, 201 bp, Homo sapiens
ctctgtagtacagtggaaggtattaccctaacatgtctaattttggtatgtgagctctgatcttctcagtcatatgttacaaattcacaactgagttttcttttttttatgaatttttaatttttagtgaccaaacttcttagttcttccccctacctcagcatgtctgccaatatataaatgtttacatatactaaagaa

SEQ ID NO: 440390 - DNA, 201 bp, Homo sapiens
gggattctcctgcctcagcctcccaagtagctggaactacaggcaccaggcacacaccaaccaccaggcccagctaatctttttttttttttttttttttwagtagagacagggtttcacaatgttggccaggatggtctcgatctcctgacctcgtgatccacccacattggcctcccaaagtgctggcattacaggcgt

SEQ ID NO: 440391 - DNA, 201 bp, Homo sapiens
ataatatccatttaaggggataataacattaccactgatatgtctatttcccatgtgaataaaccaaagctcatagagcttaccaagtctctccaagagaygcacagctggttagtcacagagccctgtttttagttcaggtctatctaaatccaaaacacaaggtctaagtctcatgtaattctggagaaaaccacaact

SEQ ID NO: 440392 - DNA, 201 bp, Homo sapiens
ttctcaaagcatgtaaaaccatctctcttgctaagactattctactgagttttaaatttaattccacagaagtcatctagaggaagtgacatactattgtkctgaagactcatgctgagtttaagagaaaaattcacatttgaaagatgttgcttattctgaaaaactcaatatataaatcttacaaagaataggaccacc

SEQ ID NO: 440393 - DNA, 201 bp, Homo sapiens
taacattaccactgatatgtctatttcccatgtgaataaaccaaagctcatagagcttaccaagtctctccaagagatgcacagctggttagtcacagagmcctgtttttagttcaggtctatctaaatccaaaacacaaggtctaagtctcatgtaattctggagaaaaccacaacttttgagttattatattggtgagt

SEQ ID NO: 440394 - DNA, 201 bp, Homo sapiens
agcttcaaactcctgggcttaggtgattcttctgcctcagcctcccaagtatctgggattataggtgcatgacaccatgcctggctaattaaaaatttttwattattttttttagaaatgggttctcactatgttgcccaggctggtttcaaaatcctgggctcaagtgatccacccacctcggcctcccaagttgctggc

SEQ ID NO: 440395 - DNA, 201 bp, Homo sapiens
ctttattgagtttcaaataaagattgagggatgatagttctaggcatttctgccaagctgtgtttttcttttttttcttcttccttcttacatcttctcakcagattaattagaacagtaattgaaataaataaaaattaaggcagccctgaaaataaaaatgagccttttgtatccaccacagattatagatgcagagga

SEQ ID NO: 440396 - DNA, 201 bp, Homo sapiens
tcaaactcctgggcttaggtgattcttctgcctcagcctcccaagtatctgggattataggtgcatgacaccatgcctggctaattaaaaattttttattattttttttagaaatgggttctcactatgttgcccaggctggtttcaaaatcctgggctcaagtgatccacccacctcggcctcccaagttgctggcatta

SEQ ID NO: 440397 - DNA, 201 bp, Homo sapiens
tcaaataaagattgagggatgatagttctaggcatttctgccaagctgtgtttttcttttttttcttcttccttcttacatcttctcagcagattaattaraacagtaattgaaataaataaaaattaaggcagccctgaaaataaaaatgagccttttgtatccaccacagattatagatgcagaggaggaaaaggaggc

SEQ ID NO: 440398 - DNA, 201 bp, Homo sapiens
gtgcatgacaccatgcctggctaattaaaaattttttattattttttttagaaatgggttctcactatgttgcccaggctggtttcaaaatcctgggctcragtgatccacccacctcggcctcccaagttgctggcattacaggcatgagccactgtgtccagaccccagattagttagttgtgtaatcttgcatcagtg

SEQ ID NO: 440399 - DNA, 201 bp, Homo sapiens
tttcagtatctttcccttctctggatttttcgaaatagactaattaaataccgcagctggtctttttatcttgggatggaatcacttacagaatgggacaygtcttcctctcagattgagtcatggtgtggtgacagaagggaatttcattggagcattaagataatcagagactccatgtggcattaattcactccatta

SEQ ID NO: 440400 - DNA, 201 bp, Homo sapiens
ccattataaacaaagtgtttccatttatgatgctcaagaacaggcagaagttatctgtgacgatagaagttagaaggagacttttgtgtgggggagtattraaggaggtataaatggagccttcaggagtgctgataatgtcctatacaatgatctgagtgatagttacaatgatgcatttgtaagcaataattaaatgaa

SEQ ID NO: 440401 - DNA, 201 bp, Homo sapiens
gagaggtaggtattttcatttgcacaatggcattttaaaactggtgttttattaggtgtggcaccactgggttgccaattttcgtagcctgaagaaaaaaktagatggccctcaacccggggtagcaagttgaagaggatgctgacatttggcaaaatttggagttttaataagaagagtcagcacagaagctgggatgct

SEQ ID NO: 440402 - DNA, 201 bp, Homo sapiens
aatgagccttttgtatccaccacagattatagatgcagaggaggaaaaggaggcttcttcccctagtaatgtctgtctgttgctcttttctttgcagttcytctcctcattactatttagaggctcatgcttgtattaccatttgcagcagggatttttgcctatgccagtatttatttggctttcactttctcaggcatt

SEQ ID NO: 440403 - DNA, 201 bp, Homo sapiens
aggaaaaggaaaaggcatgtgaagaccacttaaaaattttgggccctaacatattttatcccctgaatcaatggcaacctaccttagctttgttcaagtcwctatctactcagatattcttttacttactgctgaaaacaattttttaactgattcaaatgtatttagcactttggccatattgtcatgtgggtaattgtc

SEQ ID NO: 440404 - DNA, 201 bp, Homo sapiens
ggaatgactgacattttccccctcatctagaccctgtgttttcattttacttcctaataaactcaaagatattggaattcagtttttatttctctttaatyccactagaatacagatgatagcttctataaaagcactttcccttccccagctgtccactcttggaattctttgtccatctacacaacttttcctcaactt

SEQ ID NO: 440405 - DNA, 201 bp, Homo sapiens
agccttcaggagtgctgataatgtcctatacaatgatctgagtgatagttacaatgatgcatttgtaagcaataattaaatgaactctatacttgagtttygttcactttactatagaataacaatattttaaaaactaaaatttcttaatagtggccactttagaaaaactttttattgaacagcaaaacgctaatttga

SEQ ID NO: 440406 - DNA, 201 bp, Homo sapiens
gtaagaagagggaaatatttctactattagatgaaggattataaaagaaaggcagagaaactttctaagttgtaatctgtcttctagcttcagagtccctsaaatttttaaggaccttttctgggtccttaaaaacgtaaaaactaataggcaatgtagtgagtaagttctgtgaacagaaggatcaccagggacacagct

SEQ ID NO: 440407 - DNA, 201 bp, Homo sapiens
gctattgttggacgaggatgtgatagaattgtttgacacaatatgataaatttcttcaaatggatttgttaaagaaaggaaaaatgctaaatatatgatcyctgaaaatgatgccatcagaaagaagactatttggtctgtaaaggcttaaaatcacatgttgaaatttttattctctgaaaatgagcatcataaattaac

SEQ ID NO: 440408 - DNA, 201 bp, Homo sapiens
ttggctgtctgttcttgcttaagtctaaaaggtgatgagaagccctgagtcttcatgttgggctcttggactttgagttcagtgtagcattttcggtgtgkgttttttgtcgggtattcacccatgtctttatcttttggtcttttttcctgggatggagagatttcctggagacttcccatttctggcttggggtgtaaa

SEQ ID NO: 440409 - DNA, 201 bp, Homo sapiens
taaatatatgatctctgaaaatgatgccatcagaaagaagactatttggtctgtaaaggcttaaaatcacatgttgaaatttttattctctgaaaatgagyatcataaattaactcactgacatgccactgtttatctctctttaacttccaaactctaggaggtctttgaagaatcagccacttgcttattcagtatgtc

SEQ ID NO: 440410 - DNA, 201 bp, Homo sapiens
aagttgggaaggactttttcagaatgagcatgtaactgactgactggcagcattcatccagtgctccttgtttctgatattccttgctttaccctcagttrgacaagtgcctgttgccagttccttggccttcagggttggtgctcagttttctcagtgaaagttatggttttatcattttaaggtctacgaaactgagta

SEQ ID NO: 440411 - DNA, 201 bp, Homo sapiens
ttctctttatgttccgtctgcccatattaattatatttgataacacagggcgttaaggaaatagtggggaaaatgaggcatcgtgtgtctcattccttggyaggagtgtgctctccatatggctgaggggtagtgtggaatagtggtcaagggggtagagcctggaaccagactgcctggctcatttcctagctctgccac

SEQ ID NO: 440412 - DNA, 201 bp, Homo sapiens
atatcacagtgcaaatggaatgaagcaatctgaatgttaggtgatgctattaagatttagaccatctatttagtagtcgttcactttcaaactctgtcacwttgaggatcttttacacctgacaacgcagttctttctgctgtttgcacaagctctaccttgtgcttttattgtggtgtaattgttgtgtagttatttgtc

SEQ ID NO: 440413 - DNA, 201 bp, Homo sapiens
atatacctaatgccattttgtttcttcatcggtttgtttggaatcactttggtgtattttcaactctggattttttttttaattgtatttttttttttttkgtcaaggtcatcctaaatgtttcagctttttctaagaaaggaaaagttaatataaataagaaattgagtttctaattcttttaaacttatccctttaaag

SEQ ID NO: 440414 - DNA, 201 bp, Homo sapiens
tgagaccgtagcccccgccaacactgtgattgcagtcttatgggagaccttgaggcaaaggcccctagctgagctgcacctggatttgtgacccacagaamgtgtgagataatccatgtgtgctctgtaagcccctaagctttggtgtaacttgccctgcagaaatgaataacacacttggtaataaacactgtgagattt

SEQ ID NO: 440415 - DNA, 201 bp, Homo sapiens
tcatcggtttgtttggaatcactttggtgtattttcaactctggattttttttttaattgtattttttttttttttgtcaaggtcatcctaaatgtttcarctttttctaagaaaggaaaagttaatataaataagaaattgagtttctaattcttttaaacttatccctttaaagaaaaatatcaaaaagcctaagaagt

SEQ ID NO: 440416 - DNA, 201 bp, Homo sapiens
tctttaccaccagtttagcaggtcacacaggaaagattaaagtaggtgactgcagtggctgggataagtgttcatggcttatgaaaggaaggggccatcargcacagccctgagagactgctccagtcctgtctcatccaacagatccctgattttaaaaaatatcaatgtaaggcatgtactaacactgttccatagctt

SEQ ID NO: 440417 - DNA, 201 bp, Homo sapiens
cttgggtgcatttgatagctcttattccttgaatacattgcatacctctggatataccaccttgtgctctaatgtcgtttgagaaacaacagttttcacawtctgaggttctgctttgaaatttaccttaattcatctctatcgttgagtaatcttatctttttctcttcagagaaagatttgccttattggatctggcca

SEQ ID NO: 440418 - DNA, 201 bp, Homo sapiens
caggagttcaagaccggcctgggcaacatagcaagacctttttctctacaaaaaaattaaaaaaatagaaatattatctgggcatggtggcatgtacctgytgtccccgccacatggagaggctgagatgagaagattgcttgaacccaggagtctgaggctgcagtgagctatgatcataccactgcaccctagcatggg

SEQ ID NO: 440419 - DNA, 201 bp, Homo sapiens
cctgtaagagttctgtgggaagtacagggatgttcaggagaagcatcacagtggaatgagacttgaacattcctgtccactgaatagtcagagtttgtcattttgaaaatagaaaatagaagagaaatacattatcaggggccactaaatatctgttaaaaggggactgacaggatgaaggcagtacagaatgctgggctg

SEQ ID NO: 440420 - DNA, 201 bp, Homo sapiens
taagagttctgtgggaagtacagggatgttcaggagaagcatcacagtggaatgagacttgaacattcctgtccactgaatagtcagagtttgtcattttgaaaatagaaaatagaagagaaatacattatcaggggccactaaatatctgttaaaaggggactgacaggatgaaggcagtacagaatgctgggctgagag

SEQ ID NO: 440421 - DNA, 201 bp, Homo sapiens
aagagttctgtgggaagtacagggatgttcaggagaagcatcacagtggaatgagacttgaacattcctgtccactgaatagtcagagtttgtcattttgaaaatagaaaatagaagagaaatacattatcaggggccactaaatatctgttaaaaggggactgacaggatgaaggcagtacagaatgctgggctgagagc

SEQ ID NO: 440422 - DNA, 201 bp, Homo sapiens
aataaataaggagcttctgacttcaagaatctcctttttcttatgcctttaatcaggcccagaaggctaagagtcttgatattgattattcaaaacttaakaattgggctgggggtggtggctcatgcctgtaattccagcactttgggaggccgaggtgggcgggtcatgaggtcaggcgatcgaggccatcctgcccaa

SEQ ID NO: 440423 - DNA, 201 bp, Homo sapiens
tagagtgcagaggtgctgatcacagctcactgcagggcacgcaccaccatgcccggctaagtttttgtattttttgtggagtcagggtctcactctgttgyccatgctggtctggaactcctgggctcaagcaattcacccgccttggcatcccaaagtgctgggattgcaggcatgagctactccgccctggctgtgata

SEQ ID NO: 440424 - DNA, 201 bp, Homo sapiens
tcaagaccggcctgggcaacatagcaagacctttttctctacaaaaaaattaaaaaaatagaaatattatctgggcatggtggcatgtacctgttgtcccmgccacatggagaggctgagatgagaagattgcttgaacccaggagtctgaggctgcagtgagctatgatcataccactgcaccctagcatgggtgacaga

SEQ ID NO: 440425 - DNA, 201 bp, Homo sapiens
aatatcttaggttaaattgacgattggacttccaaaacaggccatttcatttttcattttttaacagcatgctttaacaacaatgacattggatcttagcragctcataccggtggagcaagttcgtaccggaggagttcatgatgagaatagctattgtgaaattaacttttaactattgaacgcaaatgtttagtcctg

SEQ ID NO: 440426 - DNA, 201 bp, Homo sapiens
ttaaattgacgattggacttccaaaacaggccatttcatttttcattttttaacagcatgctttaacaacaatgacattggatcttagcgagctcataccrgtggagcaagttcgtaccggaggagttcatgatgagaatagctattgtgaaattaacttttaactattgaacgcaaatgtttagtcctgaacctagtttt

SEQ ID NO: 440427 - DNA, 201 bp, Homo sapiens
ttcattttttaacagcatgctttaacaacaatgacattggatcttagcgagctcataccggtggagcaagttcgtaccggaggagttcatgatgagaatakctattgtgaaattaacttttaactattgaacgcaaatgtttagtcctgaacctagttttaatttagcacctagttttaatctaatttctgaaccaatgtg

SEQ ID NO: 440428 - DNA, 201 bp, Homo sapiens
cattaaccaactacatgtcagacccttttacttgttattgcctctaagccccacaaaaaccccaaaccaaaacttggctaatattttccattatttccttkcccctgccccataaaggaactgaaacttataaaaagtaacttacttgaagtaatgcagcagcaaataaaaatttaaatttaaacttagtttagttcgatt

SEQ ID NO: 440429 - DNA, 201 bp, Homo sapiens
caactacatgtcagacccttttacttgttattgcctctaagccccacaaaaaccccaaaccaaaacttggctaatattttccattatttccttgcccctgccccataaaggaactgaaacttataaaaagtaacttacttgaagtaatgcagcagcaaataaaaatttaaatttaaacttagtttagttcgattccatgtt

SEQ ID NO: 440430 - DNA, 201 bp, Homo sapiens
cctgccccataaaggaactgaaacttataaaaagtaacttacttgaagtaatgcagcagcaaataaaaatttaaatttaaacttagtttagttcgattccrtgttctatgtttgttccacatcaggaaacagcatcttgtaaaaataatattccctttggaggaactgtcaccttgatataatttcaatactcaggttctt

SEQ ID NO: 440431 - DNA, 201 bp, Homo sapiens
cataaaggaactgaaacttataaaaagtaacttacttgaagtaatgcagcagcaaataaaaatttaaatttaaacttagtttagttcgattccatgttctrtgtttgttccacatcaggaaacagcatcttgtaaaaataatattccctttggaggaactgtcaccttgatataatttcaatactcaggttctttcctccg

SEQ ID NO: 440432 - DNA, 201 bp, Homo sapiens
ctcgtctttgcacagtgtgtgtcagtattagggaagtgtttaccttcaaactcgggaaaattactgttgaatgtatttttaagcacaactctaaaactcgwctagatttttacatcaatatatagtgcagcagtttgctatttaaagctttaagcttttctccagaagtaccaaagatgtaaaataaatacatatacgtat

SEQ ID NO: 440433 - DNA, 201 bp, Homo sapiens
caggggtataaattagttcagccactgtggagaacagtgtggggatttctgaaaaaaacgtaaaacacaactctcattagacccagtgatctcattactgrgtatatatctaaaaggaactgttacttctgattgagttgggagtgagataagagggaagaaatgggagttaagttcaaggggaacatgtctgaggcagat

SEQ ID NO: 440434 - DNA, 201 bp, Homo sapiens
tgtttgtggaggaggcgagtaccaggtgcctctagtcagccatcttgaaactcccctctaacttttccttggatttttgataacttcccaggtgatgatgktgcccatttgtccaaggaacacactttgagaaccactggactagagtttgggagatcaatcagaaatcttttgcatttatctatgtaagataaagtatag

SEQ ID NO: 440435 - DNA, 201 bp, Homo sapiens
cactactctatttatgataacatttattgatacaaaatacttaggggtagatatagttgaattaatcagttgcatggagagcccttttatcccatgttttrcatcattgattgggtgatattttcatgttttctgttccctactgtatcattctcaacttttctaactgaaacatttatatgatattcttaaattttaggg

SEQ ID NO: 440436 - DNA, 201 bp, Homo sapiens
taagtacataagtaaataagtaaaaaataaaaaatgcattcagtcattcttagcatgatctagaactctgatcatggtattctcttctctgtgcattaccrgttgtctgcagactttcaaggctgggctattcagcatattcccacccaaatagctccaacttcaaatcattattactcaagtaactgttaacacttctag

SEQ ID NO: 440437 - DNA, 201 bp, Homo sapiens
gtagagaattactggattattagctagctgatgaattccaaaatcagaaacctttggattcactgtaagatattcttgaagagctagactctgcacaaatygaaagaagataattccatacataaatttactgtttttacttgggttttgtgccttttcttacatattatcacagcaaaattattagctaatcctttttaa

SEQ ID NO: 440438 - DNA, 201 bp, Homo sapiens
ttttaaatttaaataatagtactgatgtgggggctaacttgagccaagcattgttctgtgcacttcatacacacacacacacacacacacacacacacacwcactcacacacacttaaaattttaaaatatgtaactgaaaaagattgaatacattcattccaggtgtatgtattgaacatattcatgctgagttgatata

SEQ ID NO: 440439 - DNA, 201 bp, Homo sapiens
ctctggggagacccatgtggtgggcaggatgcagactctgttccttgatcactcccttgaggactgtgtattcaacctgctcatccactcttgagtttggttttttttttttaacatatgttatatggtggtctcatctgtgagattgagaccgatgtaagacaaaatatgtctcatggtgcattgtacagaatctgtggg

SEQ ID NO: 440440 - DNA, 201 bp, Homo sapiens
gtacagaatctgtgggccaagtgtagaattggtacccattaagcatggtgagcataagcattcagtgaaactgagtcagaaacaaagattgagagggaagstttcagtgatttattatacagttgtcactatgcaaagggaaaactggaaaaagtaaatcgtgtgtttagtatattcacattccaatgaaattggtattta

SEQ ID NO: 440441 - DNA, 201 bp, Homo sapiens
gggacaagggagctgcttggggtctcttctacaagggcactgatctcattcaagagggctctgctctcatggcctaattgcttccaaaaggccctaccttrataccatcatcctggggataaggtttcaacctatggaactgagggtggggcgtaaacattcagcatatagtatactagctggcactggttaaacttaatt

SEQ ID NO: 440442 - DNA, 201 bp, Homo sapiens
ctcatggcctaattgcttccaaaaggccctaccttgataccatcatcctggggataaggtttcaacctatggaactgagggtggggcgtaaacattcagcrtatagtatactagctggcactggttaaacttaattacaatttttattgctgctgttctcaaactttaaggttcagactttcattgtttcaggaaaacaat

SEQ ID NO: 440443 - DNA, 201 bp, Homo sapiens
agagggtgattcacaattattagtttaggtagtaccaggttagccctctgcagtacaggaacttgaaggatccgttatgaacaataacaggtcattgtgcrtattttatatgccaataatacatatatgcaaattcctgattaatatctattaaaaaataagtcttgggaaggcaaaaatagttgttttatccacagcaat

SEQ ID NO: 440444 - DNA, 201 bp, Homo sapiens
aatagttgttttatccacagcaatagctccagaacctagagttaagtagtatttggaacagttcttccctaaacgtcctgtatatcaggggtcctcaaccstcaggccaaggaccagtaccattctgtggcctgttaggaactgggccacacagcagaaggtgagccactggtgagcaagcattactgcctgagctccact

SEQ ID NO: 440445 - DNA, 201 bp, Homo sapiens
ccacacatggcctgagtttttatattccatattgaacaatatggtttgtataaaatattcataataattactacttaaacaatgacctgagaatagtaatrttttccttttggtattattttataattgacagaaatgaaaatggttaatgtcattatttacatttcaaatgctctgctttttttaaacatcagtataaaa

SEQ ID NO: 440446 - DNA, 201 bp, Homo sapiens
acgaggtcaggagttcgagaccagcctggccaacatggtgaaaccccgtctgtaccaaaaaaaaaaaaaaaaaattagctgggtgtggtggcgggtgcctrtaatcccagctattcgggaggctgaggcaggagaatcgcttgaacccaggaggcggaggttgcagtgagccaagatcgcgccgttgcactccagcctggg

SEQ ID NO: 440447 - DNA, 201 bp, Homo sapiens
tatgacctacagggacctcccttagctacctgctggctaggtcggcagcttcatcttatgctattctgtgttactgtgctgcctgggaatatttataaaaygcaaattcttgggctctgcttctggaaagtctgattgactagatctgagactgggctctgggaatatgaatttttgataagccagattcgggaaagtctt

SEQ ID NO: 440448 - DNA, 201 bp, Homo sapiens
gaacccagtgtaactataatagaagtttcatatgatctctatgctatttaatcccattaaatgactgttgaatgaatgaaccctttgaaacgggagctcarcatggtagaacgtttaggcaacatgtgatgccagcttcttttccatgcattttcctagattcccaacttacaaatataggaacattaagccatctgattt

SEQ ID NO: 440449 - DNA, 201 bp, Homo sapiens
ctttgaaacgggagctcagcatggtagaacgtttaggcaacatgtgatgccagcttcttttccatgcattttcctagattcccaacttacaaatataggarcattaagccatctgatttgtatttaccattgtttcctcatttgtcactactgttttctctttgtctaaaaaattctatgacaatctttgtacccccctct

SEQ ID NO: 440450 - DNA, 201 bp, Homo sapiens
atattcttcttcagtttagtaatactctttgtcttgacgtttttttaaactgatatttaaatagctattctattcttttgatacttactgtgtgcatgttttttttttttttccaactccatctgtgtactttcaactgccctgtgtctctgtgtttgaattgcatctctcatagacagcatgcatttgggtctgtgtttt

SEQ ID NO: 440451 - DNA, 201 bp, Homo sapiens
tcagttttattgtaatataagtaggcatggttttcttgtattctgattgagtttgatggacttcctgattataattgtgatttttcaccacatttgacagtttccatctctcgtccttcaacctgaaactattcttttgtactctgttctcccagtttctctcctctctggcttactaatgacatacatgttacatcttga

SEQ ID NO: 440452 - DNA, 201 bp, Homo sapiens
aatagaaagcaagaaaatggaaataagacatcagtaagatacttcttcatctccagtgaaaaagtttgacagtatcaaatgttgaagagcatttgaaaaawtagtaactattatatactatattaatataatttggtataatctcaatgggaagcaatttgcaatatctaatataattagtccagtaattacacccttagt

SEQ ID NO: 440453 - DNA, 201 bp, Homo sapiens
agtttccaacagattctgctagtacaattgtctagatggggaaatagatccctggcactttctactctgctatcttcccagaatcctttctggggtttctrattttttcattcattcttaatatatttttgttcatatcatggagcatagttataatagctgcttttctaaagacgttgtctgataatatgaacatctggg

SEQ ID NO: 440454 - DNA, 201 bp, Homo sapiens
gatattagtcctttgtcagatgcatagtttgcaaatattttctcccattctgttggttatctgtttattcttgtcaagagtttcttctgttgtgcagaagctctctttggtttaattgtgccatttctctatttttggttttgttgcatttgtttttagggtttcatcataaatgtttgcctagaccaatgtctaaaagag

SEQ ID NO: 440455 - DNA, 201 bp, Homo sapiens
atattagtcctttgtcagatgcatagtttgcaaatattttctcccattctgttggttatctgtttattcttgtcaagagtttcttctgttgtgcagaagctctctttggtttaattgtgccatttctctatttttggttttgttgcatttgtttttagggtttcatcataaatgtttgcctagaccaatgtctaaaagagt

SEQ ID NO: 440456 - DNA, 201 bp, Homo sapiens
attcttgtcaagagtttcttctgttgtgcagaagctctctttggtttaattgtgccatttctctatttttggttttgttgcatttgtttttagggtttcakcataaatgtttgcctagaccaatgtctaaaagagtatttcctagcttttctcccagagtttttatagtttgaggtcttacttttaagtttttaatgcatc

SEQ ID NO: 440457 - DNA, 201 bp, Homo sapiens
tttcttctgttgtgcagaagctctctttggtttaattgtgccatttctctatttttggttttgttgcatttgtttttagggtttcatcataaatgtttgcstagaccaatgtctaaaagagtatttcctagcttttctcccagagtttttatagtttgaggtcttacttttaagtttttaatgcatcttgagttaattttt

SEQ ID NO: 440458 - DNA, 201 bp, Homo sapiens
tagcattgaatcagtagattgcttcaggcagtatggatattttaatgatattcttccaacccatgagcatggaatgcttttccatttgtttgtgtcgtctrtgatttctttcagcagtgttttgtagttctccttatagagatcattcaccttcttggtattcctaggtatttaattaattaattaattattgtggctatt

SEQ ID NO: 440459 - DNA, 201 bp, Homo sapiens
aacagctggaagcccacacagctgaaatggcacaagggaggggaacattgtagaagttacttagagataaattggtggggactagcccctctagggacttrtagaactttgtaagacttgaactttttctctgagtaaaatgggaagttaacacacagttttggctagaggattcatgtttcaaagcttgtccaactcgct

SEQ ID NO: 440460 - DNA, 201 bp, Homo sapiens
tgttttgttttgtttcaggcttttagcagcctgaagccatggtgtttagtttcgtgtctagtgataagcagaaaagagggacgaggacggggctttactgrcccaaccagaaacagaaactaagaacccacgactgtattctgtcccttggacacccctgtaagaagttctgacaactaggaatagactgtgagaagcaag

SEQ ID NO: 440461 - DNA, 201 bp, Homo sapiens
cacttcctattgcaacatttgctttttagatgaccagttaccacttaccctttcttttgggaggtctttactaagtgagctgtctacaaaacgatgagtcrtcctggatgggtgttgttagagcaggccattagttctccattctacccatccgatgcttcctttttctcccatccaagtgggaaccactgatgcttcctt

SEQ ID NO: 440462 - DNA, 201 bp, Homo sapiens
aacccaagaggtggaggttgcagtgagccaagattgagccactgcacacttcagcctgggcaacagagcaagactctgtctcagaaaaaaaatagtgtatrttaacatcctgaaaaatatttaacgtgtacattttttttcaaattatgcttttgtacataaaaagctactaaggaagatgctggtatctattactgtcct

SEQ ID NO: 440463 - DNA, 201 bp, Homo sapiens
ctttaagtaccaaccttaaaaaagggggagtagatcataaagactgtggtgttttgggaggggaaatatggcatccatctgtagcaaggagtgcaaatatwgcttgaattgaaaggagagaaagggagaaagggagggttgctgtattacgtctatgccagattcacatttccctcagaaatgctaggttcaactactgac

SEQ ID NO: 440464 - DNA, 201 bp, Homo sapiens
tgcttgaattgaaaggagagaaagggagaaagggagggttgctgtattacgtctatgccagattcacatttccctcagaaatgctaggttcaactactgamctattttaaatcacaggcctgtcttcaatatgtactgacctgaaatgaaaaaatagtccaaatttctactttttaaaaagagagaggaaagaggagaagc

SEQ ID NO: 440465 - DNA, 201 bp, Homo sapiens
tgacacacatagagtaaacattttccagtaattttccttgatggcaggcaagcattagggaaatggtgcagttggctagcaaccccagtaaattttgccarcctgatgccataaatgttcactaggctgtcttcaaattcctttattctgctgatgttacaggaatggacttaagactaagcatattgtagtttatataca

SEQ ID NO: 440466 - DNA, 201 bp, Homo sapiens
aacctgatgccataaatgttcactaggctgtcttcaaattcctttattctgctgatgttacaggaatggacttaagactaagcatattgtagtttatatayaagactttcaggtttggcctgtgtggtcatataaggtagaggtttttgaatggtagcaaacataattgttctcatgcctgctaaaaaccttggttatgac

SEQ ID NO: 440467 - DNA, 201 bp, Homo sapiens
ttcttttgaaagttctcctcagtccttggcattttaaaatatgaaaattatttaatgtaacccggagaagaaagatctgtggagctgtagtgtgtgagtcrgtggaccataaaatgtagatctcttgaaaagctagttttcaagatgagacgagatcaacaagtagtatatagaccacccataaactcttgaatgtggaat

SEQ ID NO: 440468 - DNA, 201 bp, Homo sapiens
gtgctgggaagtccccagtccaacacacaaaaggccatttcatgcataacatatatatagggtttttacatactcaaataaaatgagagaaccaaaccacragatcttttttcccctccaataaatatttagagtgaacctactgtgtgccaggcactgttctaggtgttggtattacaaaaatgaatcttatattcacct

SEQ ID NO: 440469 - DNA, 201 bp, Homo sapiens
ctgttctaggtgttggtattacaaaaatgaatcttatattcacctctttgaagagctttggatgtaatgtggatgacaaacatgaaaccaaataattaaarcctattgttcttaagtgctagatagagttctttggaaagagtggggcagttgctgaaaaggcaacaaggacttgatcttcggggaggtagaaggatgttc

SEQ ID NO: 440470 - DNA, 201 bp, Homo sapiens
acatactaacatttgtttaatctttcacctactgaaaggcatttggggtgttttgagtttttgggtattacacacaaaactgttatgaacatgtatgtacrtaattttttgcatgtcgacttaagttttctttttttgtgtgataaatgcccaggactgcaattgttgtgttacaagttgtgtatatttacgttttaagaa

SEQ ID NO: 440471 - DNA, 201 bp, Homo sapiens
atcccttagaacactggttccttgggggatatctttctgtctgtctgtcttagacacacacaaatgcacacgttttgtgagaaattaagtataaggaatgmtcttaaacaaaactagtatttccaacagcataatttcaaagagtgtttagcatcgtgagtcttcacaacagatgtggtatacaacaattcctaagacatc

SEQ ID NO: 440472 - DNA, 201 bp, Homo sapiens
cccttagaacactggttccttgggggatatctttctgtctgtctgtcttagacacacacaaatgcacacgttttgtgagaaattaagtataaggaatgctsttaaacaaaactagtatttccaacagcataatttcaaagagtgtttagcatcgtgagtcttcacaacagatgtggtatacaacaattcctaagacatctc

SEQ ID NO: 440473 - DNA, 201 bp, Homo sapiens
gagaaattaagtataaggaatgctcttaaacaaaactagtatttccaacagcataatttcaaagagtgtttagcatcgtgagtcttcacaacagatgtggyatacaacaattcctaagacatctcagggatttaagttagtgtcctctgggagttagttcttgtagactgaaacgatgtcgtcttggaagggactttccct

SEQ ID NO: 440474 - DNA, 201 bp, Homo sapiens
atacaacaattcctaagacatctcagggatttaagttagtgtcctctgggagttagttcttgtagactgaaacgatgtcgtcttggaagggactttccctwatggaagtgaaaaagactgggcgagggaaggtttgttagttgaatgttcagaacctggaaattctttgatgtgattaactaatgtataagtgtggagcca

SEQ ID NO: 440475 - DNA, 201 bp, Homo sapiens
caggttagcagcaactggggtgtgtttcatttataggcaaacacagtaaatcttgagaaaggaatattctgctacagatctgcaaatgatcagggtgagaktgggaaggggtgaaaggaaggagcaaaaagacagtacttgtagactgaaacgatgtcatcttggaagggactttccctaatggaagtgaaaaagactggg

SEQ ID NO: 440476 - DNA, 201 bp, Homo sapiens
caagggaattagggttttgtttttgtgtttatttttggtgctgggataaacagcgtatgtgtcactgggtagaaatgatccagtaaaggaaaaattgtgamctttgttctctcttaatatgtgtgtttcgttgattcattcctgacttgtatctcccacatcttatcccttaattaagccattcttcctcttgcataattg

SEQ ID NO: 440477 - DNA, 201 bp, Homo sapiens
ttgaggaagaaccgtgcacactactgctagtgctagggtgagaaagatgaggactgagaactgacctggatttgggatcttgggtgaatgagtgacatccrcaagagtagtctctgttgactggttagggacagatgtctgattaactgggagcacaggaagctggggcagtgactctaggtaacacgctcttgaggcatt

SEQ ID NO: 440478 - DNA, 201 bp, Homo sapiens
tagaagatgaattcggagagggagcattggggccagactatgtagcctagtgggccaagtgaggtcaggcctttaagaaggagcgtattgaggaagaaccrtgcacactactgctagtgctagggtgagaaagatgaggactgagaactgacctggatttgggatcttgggtgaatgagtgacatccacaagagtagtctc

SEQ ID NO: 440479 - DNA, 201 bp, Homo sapiens
cagggaggccataattcgttcactcctactgctttctttccttccttgatttcttccaatgcttcagcattcactcaacattaactgtttgcctactctckgccaagctccactcctggcagtgggatacagaaataaagacagagagacaaaaatccatgtctgtgttcccatagaagaaaaacaattttaatatgtacc

SEQ ID NO: 440480 - DNA, 201 bp, Homo sapiens
taattttgattgaatgaatacatatttgaaacacttcttggtttaatacctaatatggtaaatatcagtagctatacagatactcctcaacttatgatggrgttatgtcccagtaaacccattataagttgaaaatatctttaataaacagtgcatttaatacacctagcttatctatcaaatatcacagctttccctagc

SEQ ID NO: 440481 - DNA, 201 bp, Homo sapiens
cgattttatataaagctaatataaaaattttgagtcaaaattcaaaatatgatttttactgaaagtctattgcttttcccaccccaacttactatggtttaaaaaaaaatcataaatcaaaccatagtaagttgaggaccctctgtaatcctcaaaaactaaagctccttggcatcttctataatttttaggagagtaaag

SEQ ID NO: 440482 - DNA, 201 bp, Homo sapiens
tataaagctaatataaaaattttgagtcaaaattcaaaatatgatttttactgaaagtctattgcttttcccaccccaacttactatggtttaaaaaaaartcataaatcaaaccatagtaagttgaggaccctctgtaatcctcaaaaactaaagctccttggcatcttctataatttttaggagagtaaagaatcttcg

SEQ ID NO: 440483 - DNA, 201 bp, Homo sapiens
cccccatgaagtgactgagcatgtatacgtaatgagcctttcagaccgaggaatccacacgtggaagggcactgtgggggatggaaagcactgttgttccrtgtcaccatgagagagggcttgtggctggcacacacgttcctggaaaagagtgaagctgaactgtggtccccttggtgttccatggcaagcatgttgcca

SEQ ID NO: 440484 - DNA, 201 bp, Homo sapiens
catcattgttgaattttagttccttttcttctctccccttgtttgcattcctcacacattgactcttcagacctttttcttttcttttttctttttctttycttccttccttttcctttcctttctctttctctttctctctttctctctcttttcttttctttctttctctctctctctcacactctcactctctctcac

SEQ ID NO: 440485 - DNA, 201 bp, Homo sapiens
aaagcaccaatttcaagcctgctttacattcctaacactttagagatctccccatctggacattccaactgggtaatttttcatttgctattgatttatayactattctggtgaagttaccttttccagagcactgtcggattgaataggagagggcattatttgaaaattggcacttgatgaaaacgatttttaaaaaat

SEQ ID NO: 440486 - DNA, 201 bp, Homo sapiens
aacacacacatacagatttgatcttcattatttgcagattctatatttgctaacttgcctagtgtcagttaactccaaaactgacacacatggggcttttrtagttatttgcagacatgtactgagtggtgaaaaatttgagtctcccaacacacatacatgttcttactgaaatcgaacaaggcaatgttctgccttttt

SEQ ID NO: 440487 - DNA, 201 bp, Homo sapiens
tgtttaagacccagggaaatttactgtgtccatggagtaggattctggtcattcaaccccacgttgagtctattcaacagctagattgagtgtatattaasgtgtctaaacaaaatcaaactaagaaacctaattatgtcaccaaactgtagcaagctggattttttttttttatatgaggttttgggtatagaaaggggt

SEQ ID NO: 440488 - DNA, 201 bp, Homo sapiens
cgttgagtctattcaacagctagattgagtgtatattaaggtgtctaaacaaaatcaaactaagaaacctaattatgtcaccaaactgtagcaagctggattttttttttttatatgaggttttgggtatagaaaggggttaggctcggagatagttgactaaccaactgctctggtagaaactctttcctttaagacaat

SEQ ID NO: 440489 - DNA, 201 bp, Homo sapiens
tgatctggctgtgtttgtttctatgaacacattgtctacagattctaggcattaagcagaatgaactagctggaaaaatccaacccagaaataaacattcrcctgtagtcatttccagcaaatgcttgtatacttatcgaaaattcaaatttacttttaactaaatacctttatgcagctgactgtagtgctttggggaag

SEQ ID NO: 440490 - DNA, 201 bp, Homo sapiens
aaacaaaatcaaactaagaaacctaattatgtcaccaaactgtagcaagctggattttttttttttatatgaggttttgggtatagaaaggggttaggctyggagatagttgactaaccaactgctctggtagaaactctttcctttaagacaataaagaggttatagggattggagacctttatgtgttatactttggtg

SEQ ID NO: 440491 - DNA, 201 bp, Homo sapiens
ccatgaggagggcacaaagccattcatgagcgatcctctcccatgacccagtcacctctcgctaggactcacctttaacagtggagaatcacatttcagtrtgagatttggaggggacaaacatccaaactatatcagccatataaaaattaaactcttccagggatttctttcagggattttgttttcctttttgctact

SEQ ID NO: 440492 - DNA, 201 bp, Homo sapiens
ttgaaaagacccctgtgttagttttgcactgttataaagaaatacctgggactgggtattttacaaagaaaagaggtttatttggctcatggttctgtagrccacacaagcaaggcacccacatctgctcagcttctgaggaggcctcatcaccttctgccatgaaggttttactcagggcagaaggtgaagaggggagca

SEQ ID NO: 440493 - DNA, 201 bp, Homo sapiens
atctttaagatctgttatcttagcaggttttaagtgtacaatacatattattattattataggtactgtgctgtacattaggtctttagacttgttcattytataactcaaagttataagtattctttgaccaatgtctccccatttctcatatacttattataatgtcacatcaaaattaaattctaaaattcttggtgt

SEQ ID NO: 440494 - DNA, 201 bp, Homo sapiens
aagtacttatcacaattaagcgttaatatatccattaactttttgcagtaagaatacttaagatctttaagatctgttatcttagcaggttttaagtgtayaatacatattattattattataggtactgtgctgtacattaggtctttagacttgttcattttataactcaaagttataagtattctttgaccaatgtct

SEQ ID NO: 440495 - DNA, 201 bp, Homo sapiens
aaaataaaactggcaaacaggcatactacttttggctaccagttgtttcatttttacagttgaaaataaatttatcagacttcatttattatgtgtcatayaatacaaattttgcagtttgcatattgactatgaaattttttcacatctgtgaattaaatgaggataaaattcttttaacaaaattattaacagagttcc

SEQ ID NO: 440496 - DNA, 201 bp, Homo sapiens
ctgcatcctaagggctggttttaccctcttttcattctgtatgtcctcccccacctgcctgtgaagctctcaaggtcctgccagctctacacgtccccaamtctgtttctcccctccctttatactaggggttcagaacttccagccagaagccactgcccttgtactaccttgtccccaacccctttgtcccctctgccc

SEQ ID NO: 440497 - DNA, 201 bp, Homo sapiens
atcctaagggctggttttaccctcttttcattctgtatgtcctcccccacctgcctgtgaagctctcaaggtcctgccagctctacacgtccccaactctktttctcccctccctttatactaggggttcagaacttccagccagaagccactgcccttgtactaccttgtccccaacccctttgtcccctctgcccccca

SEQ ID NO: 440498 - DNA, 201 bp, Homo sapiens
aaaaagaccatcatcaacttagataattagtcatttgcagtagtttgactctgtagtgatgaaataggctggtgctttccctgtgtaaacccacttcacgractctaagtcatgttttaaaaatatacacacatgcaaaaaatactatatgtatgcatatatatgtgtgtgtgtatgtgttttgaacaattattcatctat

SEQ ID NO: 440499 - DNA, 201 bp, Homo sapiens
tgcctgtgaagctctcaaggtcctgccagctctacacgtccccaactctgtttctcccctccctttatactaggggttcagaacttccagccagaagccaytgcccttgtactaccttgtccccaacccctttgtcccctctgccccccagcctgcttcctgcctgatggctcaggtgtccccatgctggtcatgctggct

SEQ ID NO: 440500 - DNA, 201 bp, Homo sapiens
ataaactttttcaaatctaatctccatgggaagagtcctattattcaagtttctgtaatacataggacctttattgctaatggaaagagataaatacttaraaaaaaagaatttggtcaggtgctgtggcacacgcttgtatccccagcactttgggaggctgagggaggacaattacttgagcccaggagttcaagaaca

SEQ ID NO: 440501 - DNA, 201 bp, Homo sapiens
ttttttatatgaggttttgggtatagaaaggggttaggctcggagatagttgactaaccaactgctctggtagaaactctttcctttaagacaataaagargttatagggattggagacctttatgtgttatactttggtggggacttgtgtgtcttaaaacaacccttgccttgtctgtattcttagctttaatgttctt

SEQ ID NO: 440502 - DNA, 201 bp, Homo sapiens
ccctccctttatactaggggttcagaacttccagccagaagccactgcccttgtactaccttgtccccaacccctttgtcccctctgccccccagcctgcytcctgcctgatggctcaggtgtccccatgctggtcatgctggctcaggctgcaggagcaagcctgggagacttccctgcctctgccactttgtgtgggta

SEQ ID NO: 440503 - DNA, 201 bp, Homo sapiens
acaaaaacaaacaaacaaaaattagcttggcatggtggtgcacacctgtggtcccagctacttgggaggctgaggcaggagaatcacttgagcatgggagrttgaggcagcagtgagccatgattgtgccactgcactcctgcgtggtcaacagagcaagaccctgtctcaaaaaaatagtaattcaatatgataaaaagt

SEQ ID NO: 440504 - DNA, 201 bp, Homo sapiens
cttcttttgagacacgtctttgttagttaatcctatcaactgaaaacctgcatctcaaaacaatcagtaaatacaaagcagaacctagctttgtttaggtrgtatctatcaattctcttgaaatttatcaggctgtagcttctatagcagttctcggctgagctgctcgtctatttaaacaaaaataatattgaaagaata

SEQ ID NO: 440505 - DNA, 201 bp, Homo sapiens
cagccagaagccactgcccttgtactaccttgtccccaacccctttgtcccctctgccccccagcctgcttcctgcctgatggctcaggtgtccccatgcyggtcatgctggctcaggctgcaggagcaagcctgggagacttccctgcctctgccactttgtgtgggtaattgtgctttaggggaaagtggggggttcag

SEQ ID NO: 440506 - DNA, 201 bp, Homo sapiens
gcatctcaaaacaatcagtaaatacaaagcagaacctagctttgtttaggtagtatctatcaattctcttgaaatttatcaggctgtagcttctatagcasttctcggctgagctgctcgtctatttaaacaaaaataatattgaaagaatattaacttctgaagacgactcagaaatcataatatagtggtctattctta

SEQ ID NO: 440507 - DNA, 201 bp, Homo sapiens
attattcatacactatttatgtgagacagccaattctcctcattttctatagttaggttttatagagtcactgcgaacactgaattagtgaatatggaacyattcttctatggggaaatacaagtttaggtgcctgcaagcctgtggtcatattcttgtcaactaattcactcataactttgtcttatgtgtgtttatgtt

SEQ ID NO: 440508 - DNA, 201 bp, Homo sapiens
cttttgtttaaggcagacaatactagagacagacctttgatatggtactttctagtgagcagatacccagtgaagattaaccatgctgatgctgaagaacyggctatagaattacagtgtggtcttggatattgacacttctagttcattcaagtttccatcgattaaaccacaatcatcatggcaaattaggatcatgta

SEQ ID NO: 440509 - DNA, 201 bp, Homo sapiens
ttgtttaggtagtatctatcaattctcttgaaatttatcaggctgtagcttctatagcagttctcggctgagctgctcgtctatttaaacaaaaataataytgaaagaatattaacttctgaagacgactcagaaatcataatatagtggtctattcttaatgcatgaagaaaatgtgatattttggctcttttaatacac

SEQ ID NO: 440510 - DNA, 201 bp, Homo sapiens
tatacattgttcattcattaatgttgaactcatggctggcaacactgttactcatgccttaatgaactttacttaacacatgtattttctccataaggtayatcacagccatcttgcacataggaacactagctaacaactgagcactctgcttgggggccatttaaaacagtgaaattaccaaaaatcccataaagatgt

SEQ ID NO: 440511 - DNA, 201 bp, Homo sapiens
tattgacacttctagttcattcaagtttccatcgattaaaccacaatcatcatggcaaattaggatcatgtagcttggagttcttcggtttgtgtgaaaakctattgtatacaatttgttcctccttaaagggacatgtaaattgtcatcatcattatttaaattattacatatatatgctatttcattttccagatttat

SEQ ID NO: 440512 - DNA, 201 bp, Homo sapiens
gtttgcgattataaagggtaacagaagacacttaagaagaaaataagcatggagtcatttttgtatcaaaaagaaaatccaggccaggcgcagtggctcaygcctgtaatcccagcagtttgggaggccgagatgggtggatcacctgaggtcaggagttcaagattagcctggccaacatggtgaaaccctgtctctact

SEQ ID NO: 440513 - DNA, 201 bp, Homo sapiens
ctgggaggcagaggttgcagtgagccgagatcacgccactgcactctagcctgggtgacagagcgagactcagtctcaaaaaaaaaaaaaaaaaaaaaaargaaatccttcccttctctaagttggtaaagataatgtcctttattttcccaagaaaattttatagttttgctttcacatttaatccttcagtctatttga

SEQ ID NO: 440514 - DNA, 201 bp, Homo sapiens
tcgattaaaccacaatcatcatggcaaattaggatcatgtagcttggagttcttcggtttgtgtgaaaagctattgtatacaatttgttcctccttaaagrgacatgtaaattgtcatcatcattatttaaattattacatatatatgctatttcattttccagatttattgaggcttaattgacaaataaaaattatatg

SEQ ID NO: 440515 - DNA, 201 bp, Homo sapiens
cactgcgaataatgacagttttatgtatgtatgtatttatttgctatgtagtttcttttttcttccttttttctggtcattttgcactgtgttgtaccttyagtataatatggacagaaagagtagaaatgtcatttcacaaaggggcataattagaggaatacaaataaatattttggccatctttgtaaacaaattaac

SEQ ID NO: 440516 - DNA, 201 bp, Homo sapiens
aataaaaattatatgcataaggttatacaaagtgatgtcttgatatacattgttaagtacttatcacaattaagcgttaatatatccattaactttttgcrgtaagaatacttaagatctttaagatctgttatcttagcaggttttaagtgtacaatacatattattattattataggtactgtgctgtacattaggtct

SEQ ID NO: 440517 - DNA, 201 bp, Homo sapiens
ataacattatttggaagatttggggataatctggtttgcattaaacatatttacactttattttatttatttatttatttatttatttatttatttatttragacaagagtcttgctctgtcacccaggctggagttcagtggtgcaatctaggctcactgcaacctcctcctcccaggttcaggtgattctcctgcctca

SEQ ID NO: 440518 - DNA, 201 bp, Homo sapiens
tcaagtgatattctgtatctttattcttttagtgcctatcttggatatattgacacagttctttttattgtgtatatttaaagtgtacaacacaatgtttwtatatatatatatataaacacagagtaaaattattcgtcaagcaaattaacatattttatcatttcacataggtaccgtgtgtgcacgcgcacgcaccct

SEQ ID NO: 440519 - DNA, 201 bp, Homo sapiens
cttaggttcctttatgaactgtcactaatccccaacttttcagagcgagtcttttgcatcctgttccagtccacattttcagaaagcatttgctcaattcrtcgcaaactggaattactacagaaattgtgtgaggtgagttctggtccaaagagagctgaacttgagtctcatttaattgtgctcagccatgttcttatt

SEQ ID NO: 440520 - DNA, 201 bp, Homo sapiens
ctgcagaatccctttgaatattgtcttatgtgaagcctatgagcattttcatttcatttcattctatttcgatttactttgcttttgtttcctaagatctrtaataaaacacctaggatcccagataccttgaatgtctttctaagtctgaacactttatgtaatcaacctcatctgtcattttatcttgttggtaatact

SEQ ID NO: 440521 - DNA, 201 bp, Homo sapiens
cccggccccagccacgttccacctccgattgattatagaggtcgctcccttcctttagggccagcagtgaggctggcacccgagcgtcacatgctctgtakctagatgaaagaacgtgctcctggccaatgtggctccgtagctcattgatctctctctggagaaaggctggtatgtctccttgcacatttcttctttgaa

SEQ ID NO: 440522 - DNA, 201 bp, Homo sapiens
tatttactctaagtactcaccaaatttgaaggatcgcagtcccacagaagggaacattttatgattgaccttcaagatcaaagtaaatgttccggcgggcscccagggctacaggaccacattgctagaatgtggccaatacatgttggcctccagagatttctctgccctctccttttgccaaaacaaaatcttcagttt

SEQ ID NO: 440523 - DNA, 201 bp, Homo sapiens
ctccagagatttctctgccctctccttttgccaaaacaaaatcttcagttttcacggtcctctcagacatcagacttccaaaggaatgtaatttgaaggcttttttttttactttctttcgttatctggaaggacctctccacaaactgttaataattattccagccaaataatttaggaacagccatatgactcaacaga

SEQ ID NO: 440524 - DNA, 201 bp, Homo sapiens
aatttgctagaggaagtacagacctgttgaatttgaataatatcaaattaacaaattgttaggtttgcgtggacttctgctagagcctggatttttaagawaatcaaaaacgtaaggagccaaaggcttccccatggctcagtcccaccatgacatgctccaggctaactctcacacctttgggcaaaggaatttccacat

SEQ ID NO: 440525 - DNA, 201 bp, Homo sapiens
acacagagtaaaattattcgtcaagcaaattaacatattttatcatttcacataggtaccgtgtgtgcacgcgcacgcaccctgtgtactgctgaatagayagatctctggacatatttatgctacatagctgcgattttgtacactttcacctccatctccccacttccctccacctcctgccttttctactctttgttt

SEQ ID NO: 440526 - DNA, 201 bp, Homo sapiens
acataggtaccgtgtgtgcacgcgcacgcaccctgtgtactgctgaatagacagatctctggacatatttatgctacatagctgcgattttgtacactttmacctccatctccccacttccctccacctcctgccttttctactctttgtttctaggcatgcaagttttttggttttgtttttagttgagatttcacatat

SEQ ID NO: 440527 - DNA, 201 bp, Homo sapiens
cccccaaagctactggtgaggtggatgcatttccttaatgcctgatttagtggggtgattcttttcaatttcttcttttaagatgtctctgtggttatgtmggacgatttgaggcctgttcaaaaatttcccatatggccttaaaaactaaagttctaggttgctaggtttagcgatgtcctgaggaagttctggcttgca

SEQ ID NO: 440528 - DNA, 201 bp, Homo sapiens
gccccagccacgttccacctccgattgattatagaggtcgctcccttcctttagggccagcagtgaggctggcacccgagcgtcacatgctctgtatctaratgaaagaacgtgctcctggccaatgtggctccgtagctcattgatctctctctggagaaaggctggtatgtctccttgcacatttcttctttgaatgat

SEQ ID NO: 440529 - DNA, 201 bp, Homo sapiens
gatgtctctgtggttatgtcggacgatttgaggcctgttcaaaaatttcccatatggccttaaaaactaaagttctaggttgctaggtttagcgatgtccygaggaagttctggcttgcacctctttggaatcctgctcctgtttgtttttatggcctcagagaattttccttattttctatccaactcagccatgcattc

SEQ ID NO: 440530 - DNA, 201 bp, Homo sapiens
agttttcacggtcctctcagacatcagacttccaaaggaatgtaatttgaaggcttttttttttactttctttcgttatctggaaggacctctccacaaaytgttaataattattccagccaaataatttaggaacagccatatgactcaacagaagacaaatattcttccgaaaacaaaaaataaatgcttggcagaaac

SEQ ID NO: 440531 - DNA, 201 bp, Homo sapiens
cgttccacctccgattgattatagaggtcgctcccttcctttagggccagcagtgaggctggcacccgagcgtcacatgctctgtatctagatgaaagaaygtgctcctggccaatgtggctccgtagctcattgatctctctctggagaaaggctggtatgtctccttgcacatttcttctttgaatgatttaaaacttg

SEQ ID NO: 440532 - DNA, 201 bp, Homo sapiens
ttttcttcataaagtttatgcttatatttttatagatggaatatattatatattttgtatatattatatatgctatgtttatatgtaagaaataggtatamaatctatagagatttattgtatgttaaaggaaaaccaaacctaaatcacttttggaggaagaatttctttttttttttttttttaaggctgttttgaaag

SEQ ID NO: 440533 - DNA, 201 bp, Homo sapiens
ctcaccccctcagaaggcaggttacgtcactgtaggagttctgtaaacactagccatccctgttaggtagaactaacatctctctctaacttctactcatkcaacttcctccttccttgagatcaacacagagaatgtcaacacccggtcattcatgagaccacacttcagctctttgaaaacagctactgtattttatct

SEQ ID NO: 440534 - DNA, 201 bp, Homo sapiens
atgactcaacagaagacaaatattcttccgaaaacaaaaaataaatgcttggcagaaacgaccaatgttaacatttaaaacaatttgtcaaatatcagtartaccatttgttctagttgcggtaaatcattttgaaaagtgaaaagatgtttttaaaggctcacattttcagaagaagtgacatgcaaagtcaagttaaac

SEQ ID NO: 440535 - DNA, 201 bp, Homo sapiens
aatgtggctccgtagctcattgatctctctctggagaaaggctggtatgtctccttgcacatttcttctttgaatgatttaaaacttgatgctgagctatrtaaagttctgtctggatagctgtgccttacagagggagggtcatcctgaaagatgccacttctgcctttacagaaagggcacgcagaccgttcctagggc

SEQ ID NO: 440536 - DNA, 201 bp, Homo sapiens
aagagtccatctcaaataaataaataattgctaacaatcatcttagccttcagcaagttgtgatcttttttctggtggagggtcttgcttccatgttgacrgctgctcgctgacaggtcagggtggtggttgctgaatattggggtagctgtggcagtttctgaaaataagtcaaaaatgaagtgtgctgaatcaattgat

SEQ ID NO: 440537 - DNA, 201 bp, Homo sapiens
ttgttcccatatagccttaatagttctcacacagccttgttttccttgcagttacatcacagaaatggcctaacatagcatcccccagcttacaaaggcawacctgaatgtttgtgggtggtgcaacttttactaactttcaggatactgctcttaaaatatacctaataattaggaatgataaagttcggttgtgaccca

SEQ ID NO: 440538 - DNA, 201 bp, Homo sapiens
cgcagaccgttcctagggcaagccacctccaccatggcgttgtgtggaattagctaatggttatacctggcaaagatgaaatgaaggttaacaggacaacrgaggtatccttgtgctactgtacggtcagaaaggaattcagccctatcccttggagttatatgcagattcaagttgtctggttttttgtaaggaaatatt

SEQ ID NO: 440539 - DNA, 201 bp, Homo sapiens
taaactctaccatgtatcagttggatgtccagatacattatagaggcaaataggtatattagttcacttatacattttgaagttttactagaactttgatrtgctaagttgtgttaattttactaactttagtgctttgttattatgtaaaaaaaattatttttcatggaaagtccttgctttttccttcttagtcactag

SEQ ID NO: 440540 - DNA, 201 bp, Homo sapiens
ttcacagcatctttaacaggaatagactccatctcaagaaatgacttcctttggtcattcataagaagcaactcctcatccgttcaaatttcatcatgagygatttgctgcgatttggtcacatcctcaggctccacttctcattctagttttcttgctgtttccaccatttcttcagttctttcctctgcggaagacttg

SEQ ID NO: 440541 - DNA, 201 bp, Homo sapiens
ttcccatgtctgctaatatttatccttttggaatctgaaggctaattattttctatgaattagacagtatatctttttttctttgtcatgttaagcaatgraggccaataggtccatattttgaaaataacacaatgatgagtaaaatggcttgtaaacaaaatataaaaggtgattctactctgctgcatatgattttct

SEQ ID NO: 440542 - DNA, 201 bp, Homo sapiens
gaccgttcctagggcaagccacctccaccatggcgttgtgtggaattagctaatggttatacctggcaaagatgaaatgaaggttaacaggacaacagagktatccttgtgctactgtacggtcagaaaggaattcagccctatcccttggagttatatgcagattcaagttgtctggttttttgtaaggaaatattaatt

SEQ ID NO: 440543 - DNA, 201 bp, Homo sapiens
tacttatactatgataaaaattatacttttacatgggtaatcacccgatgccaaaatcgtcagatgaatgagatgagattctaaatttattttattatatktaaactctaccatgtatcagttggatgtccagatacattatagaggcaaataggtatattagttcacttatacattttgaagttttactagaactttgat

SEQ ID NO: 440544 - DNA, 201 bp, Homo sapiens
ttaaaatgaccccttgatctaaatagatgttgtattagcaggcatgaaagcaaaatgaatctccttgtattaaaaacatctccatcagagcttttgggtgwccaggttcatggtcaatgtgctgtaatattttgaaaagaatctttttttctgagtagtaggtctcagcagtgggcctaaaacactcaataaaccatgctg

SEQ ID NO: 440545 - DNA, 201 bp, Homo sapiens
aaagtcattcaatacatctaacctagtaaacatcaaagcttagcctagcctgcctcaaacatgctcagaacacttacctcagcctacagttgggcaaatcrtctaacacaaagcctattttataataaagtgctgaatatctcatgtaatttattgaatactgtgctgcaagtgaaaaacagaatggttgtatgggtactc

SEQ ID NO: 440546 - DNA, 201 bp, Homo sapiens
cacctccaccatggcgttgtgtggaattagctaatggttatacctggcaaagatgaaatgaaggttaacaggacaacagaggtatccttgtgctactgtayggtcagaaaggaattcagccctatcccttggagttatatgcagattcaagttgtctggttttttgtaaggaaatattaatttttaaaagcatttgtcttg

SEQ ID NO: 440547 - DNA, 201 bp, Homo sapiens
caaaatgaatctccttgtattaaaaacatctccatcagagcttttgggtgaccaggttcatggtcaatgtgctgtaatattttgaaaagaatctttttttytgagtagtaggtctcagcagtgggcctaaaacactcaataaaccatgctgtaagcagatgtgctgtcatccaggctttgttcttccatttatagatcaca

SEQ ID NO: 440548 - DNA, 201 bp, Homo sapiens
tacctcagcctacagttgggcaaatcatctaacacaaagcctattttataataaagtgctgaatatctcatgtaatttattgaatactgtgctgcaagtgraaaacagaatggttgtatgggtactcgcagtacagtttctactgaatgcgtatcacttttgtaccattgtaaagtcaaaaaattgtaagatgaagcatcg

SEQ ID NO: 440549 - DNA, 201 bp, Homo sapiens
tgaggcaggggaatcacttgaacctgggaggtggagggtgcagtgagccgagatcacaacactgcactctagactgggtgacagagcaagactccatctcaaaaaaaaaaaaaattgtcttgaggaggacagaattgcaggtgtgttggctgagtctgtagctgttttgctgtgagcagaatagaaccagcgtcattaggt

SEQ ID NO: 440550 - DNA, 201 bp, Homo sapiens
aagataataatgggaaagtttgaaatacggcgagaattaccaaagtgatatgacacaaagtgagcacatgatgttgtaaaaatggtgccaatagtcattcractacagttgctgccgatcttcaatatgtaaaaaataaaaaataaaaataaaacaaaaattaatacctacaaagcacagtaaagcaaagcacaataaaag

SEQ ID NO: 440551 - DNA, 201 bp, Homo sapiens
atatgatttttttatttttataattgttcaaatgctcatgtgtatgatacacattttcatagaagtatctactatagagagctgataaattacatttgttaaaaaaaaaatgctgaagccgagtgcaatagcatgagcccgtaatcccagctacttgggaggacttttcaaggccaacctgggcaatacagtgagagccct

SEQ ID NO: 440552 - DNA, 201 bp, Homo sapiens
tccatctcaaaaaaaaaaaaaattgtcttgaggaggacagaattgcaggtgtgttggctgagtctgtagctgttttgctgtgagcagaatagaaccagcgwcattaggtcagtaccaactctttttgggctttacaatattctgcccctgcagtggttctggggatgagctgggaaatgagatgattggcgtgttccccag

SEQ ID NO: 440553 - DNA, 201 bp, Homo sapiens
agccgagtgcaatagcatgagcccgtaatcccagctacttgggaggacttttcaaggccaacctgggcaatacagtgagagcccttctcaaaaaaaaaaaraaagaaaagcccttttcttaacctatggtaattcttcaatactcagcaactgcttgttggagtgaaacaacttttgcaaataacattgaaatctatagca

SEQ ID NO: 440554 - DNA, 201 bp, Homo sapiens
ttttatcagaaataaaagtgtattcctagatcttaactttacgagacgggtttattttttaaaattaacctctaggttcaaattcctatggcctaaaggtaaaatatttttggaaagtgataaaattccatttggccactttaaatttttccaggtgttcaggggaagtaaataaaatgaggcataaaaaggaaaaagtat

SEQ ID NO: 440555 - DNA, 201 bp, Homo sapiens
gcaactgcttgttggagtgaaacaacttttgcaaataacattgaaatctatagcatcaatatcatatttaaattatagaaatgaactggaaatagattctrgtgatcatatataaataagagattatttgtgggacttttttggtatcagtttatatatcttattcaatcctctgttaggttaaatttcattaatttaaat

SEQ ID NO: 440556 - DNA, 201 bp, Homo sapiens
gctgagacaagagatttgcttgaacccaggaggcagaggccgcagtgagccaagatcacgccactgcactccagcctgggtgatggagcgagactgtctcaaaaataataataataataataataataataagttgcataatgatctcagaaaaggtaagagcgacatgttcatatccaaatattcttaatcactattagt

SEQ ID NO: 440557 - DNA, 201 bp, Homo sapiens
aatcattttacaagcaaatcctgtctaatgagggatatctctaatagctacattactgactcatgtcaaacttgattataaagaggttttgctctttttamaaatatagaaaaaatcgtggttatattaaacattccagagaatgtagtttgtatcatagggtttgtttttaaagtaaaatatatacttgagctctcaaat

SEQ ID NO: 440558 - DNA, 201 bp, Homo sapiens
cacaataaaaaacgcaaaagcaatggaagatttatgatgatgttcctttgcagttcgtttaaactggtatgctctcttggcctcgtctgtcatactgagakgctttatgatcttggttctgcctatatggattaaattaagttatacatgtgcaattctcattctgcctgtaaagtctcatttggtactcagccttttttg

SEQ ID NO: 440559 - DNA, 201 bp, Homo sapiens
tgttgctctaaccatcaaatgaaatatttacccttttgaactttcctattcccatccatttcccggcatgaaacttcagaggcattcttaactctagattrtctctcacatggctttctactttctatccacattatcataatagtttctcaattgatatgtctgtctccagcctccattccctgcagttcattccccagc

SEQ ID NO: 440560 - DNA, 201 bp, Homo sapiens
ttttaaaaatatcctctctgttcctttctctctttttcttctaggacttccataatgcatatttggtctgcttggtggtgtttcacggcttcctgaggctrtcttcacttttcttccatttttctttttctgttctttagagttgatactttctgatccatcttcaagttcatggattcattcttttgcttcctcaaatcc

SEQ ID NO: 440561 - DNA, 201 bp, Homo sapiens
tccaagctagccatggctggttgaggttttcttgtgatgtatcactctgtcgctaactctcctacctttctctttcacttacaaggacccagtgattgcaytgggacaacgaggtataatacaagatgagcttctcatcttaaggtcagctgattagcaaccttaattccatatgcaatttaattcccccttaatttatta

SEQ ID NO: 440562 - DNA, 201 bp, Homo sapiens
aatgcctacataaaaaacacagaatgatctcaaattaacaatgtaacattgcatctcaaggagctagaaaagcatgaacaaaccaaactcaaaactagttaaaaaaaaaaaaaagaaatggcaaagatcagagcagaactaaatgagattgagaccaaaaaaaatgataaaggatcaacaaaacaaaaagttacctctttg

SEQ ID NO: 440563 - DNA, 201 bp, Homo sapiens
ctgagacaagagatttgcttgaacccaggaggcagaggccgcagtgagccaagatcacgccactgcactccagcctgggtgatggagcgagactgtctcaaaaataataataataataataataataataagttgcataatgatctcagaaaaggtaagagcgacatgttcatatccaaatattcttaatcactattagtc

SEQ ID NO: 440564 - DNA, 201 bp, Homo sapiens
aataatttaccacacaaagagatttaaaaaaccatatgatcatcctttttcttttttttagacagattctcgctctgtcacccaggctggagtgcagtggygaggtcttggctcactgcagcccctgcctcacaggttcaagcggttctcctgcctcagccttctgagtagctgggattacagaaacacgccaccatgccc

SEQ ID NO: 440565 - DNA, 201 bp, Homo sapiens
gagtgttaactcctcaaatctcaattgctgatataacaaattataatattggaattgttaaaagctcccctttacttagtattggaatggttaaaagctcygctttacttaaaatgatacttagcttttttatttccctaatctatatgctaatgagcctcaatcaaacttactgttggagtggtatctgttagtccagct

SEQ ID NO: 440566 - DNA, 201 bp, Homo sapiens
gacaagagatttgcttgaacccaggaggcagaggccgcagtgagccaagatcacgccactgcactccagcctgggtgatggagcgagactgtctcaaaaataataataataataataataataataagttgcataatgatctcagaaaaggtaagagcgacatgttcatatccaaatattcttaatcactattagtcatgt

SEQ ID NO: 440567 - DNA, 201 bp, Homo sapiens
agtagacattgaaggaacatatctcaaaataggaaccatttacaacagactcccaggcaacattatatggaatggggaaaagattaaagcattttccctgrgaactggaacaagacaaggatgtctactctcaccactcctaatcaacatagtgctggaagttgtagccaaagcaatcaagcaagaaaaagaaattaaaga

SEQ ID NO: 440568 - DNA, 201 bp, Homo sapiens
tagttttaaaacataaaaaattatcaaacaaaaacaataaaaacacaaaataataaaatatacaagacatgagctaaatttctaattgaggggggtaacarttggaaagtatttacagttcagactttgcccctaaatagctgtgctaagattggaacactggggagaaaaatcttttaagccaccaaactccttagacac

SEQ ID NO: 440569 - DNA, 201 bp, Homo sapiens
tttgtggcaaatttatctgtcagcaacactcaactttcatgaggctatgtacagtctttactcattctatagtgtgagtgttcatatacttacagaaataycattgtgtttaatcaaacattgattccatgctatgtcagacccttttgatagtgttatgctccatattcctatctgaaactggaaacgttctgaattgtt

SEQ ID NO: 440570 - DNA, 201 bp, Homo sapiens
ttcatatgtttattacagcactattctcagtggcaaagtcatggaatcaacctgtatccatcaacagcatcacaacagatgactggagaaagaaaaaaaawatatatatatatattctttatatatggaatactactatactatgtgtactaccatatatatatggaataccactcagtcataaaaagaataaaattgtgt

SEQ ID NO: 440571 - DNA, 201 bp, Homo sapiens
atgtcattgttgtaatagaagataaatagtccttccccattttcccttggtgtacttgcccaggattttctggcttatgaactttcctgggaacaaaataycttctacttaaaaaccacatacatgtatattgttttattaccagtcaagctttacataaaattattttgaagaataataggccgaaatttttcaaatttc

SEQ ID NO: 440572 - DNA, 201 bp, Homo sapiens
tgatatttaaggttcgctatgaagattctaccaggttttctattgccctgacataaaccctttgtcctgttcattgttctggagtctcttggacttttctgattcatttagcttcccgctcaccctgggcctcatcatctgatagttcagctataccagcacttggtactatgatttatacaacagattacacctctcaac

SEQ ID NO: 440573 - DNA, 201 bp, Homo sapiens
aatatattctaggcaaaaataaataaaatgaacacagttcagcctcttttgctttgcctgttgtatgatcacaccatgagaggctggtgctgcctctgcayagcatttttgccagctcttttccattgtatttccagttttgtctcctttatctttcttcttgacatctcgaactatggtgcacctttgcttctgtgtctt

SEQ ID NO: 440574 - DNA, 201 bp, Homo sapiens
tacataaaattattttgaagaataataggccgaaatttttcaaatttctaaattaaaagtagcatttacaaaaaagcaaatagtttgcagatttttttatkttgtaagtaaaattcctgctatccccttttcttgatattcttattgagttgcgaacacctcagctgtctatttcagcttctttcttgctgtattacatac

SEQ ID NO: 440575 - DNA, 201 bp, Homo sapiens
cacttaactgtactcataactaatttgccagtgttaaggctttggagtcagactccatgagttggaatcctgtctcatttatttagtgtttctggaatctwaatcaagttttttaattgctaatttcctgattttaagtgggaataattataaaccctttcttacagggttttattatcttgggttattatatgtaaagaa

SEQ ID NO: 440576 - DNA, 201 bp, Homo sapiens
attgagttgcgaacacctcagctgtctatttcagcttctttcttgctgtattacatacagatgagaagtaaatacatttacccgagcttttgatttgataytgtgttactatatgagaagaaaaggcctggttacccctgtccagaaaccaaaaagatagaactttttaagagactcccaattttgagatgtgtttatcca

SEQ ID NO: 440577 - DNA, 201 bp, Homo sapiens
ggccttagtccttaggaagggggccctgtattacagcacattacaacagtgaagtgtccaatgatgaacatgggccatcaactaaaagttaaatcgttcctttttttttttttttgagacagagtctcactctattgcccaggctggagtgcaatggcatgatctcggctcactgcaacctccgcctcccagattcaagca

SEQ ID NO: 440578 - DNA, 201 bp, Homo sapiens
tggagtcagactccatgagttggaatcctgtctcatttatttagtgtttctggaatctaaatcaagttttttaattgctaatttcctgattttaagtgggrataattataaaccctttcttacagggttttattatcttgggttattatatgtaaagaattagaatagtaatatcaacatcattccatattaacattccca

SEQ ID NO: 440579 - DNA, 201 bp, Homo sapiens
ttatagttcttatgtattcaacaacatttattacggacctggttcatggcagacagttgctaggtgctgtggatccacaaaggttacagtaaccgctgttraagagggctgaaattctgtcattacatgtaccctgttggagccttacaagttggtgctcattgactgaggccaagaaagactgccttgacttgctctgtt

SEQ ID NO: 440580 - DNA, 201 bp, Homo sapiens
agtgcaatggcatgatctcggctcactgcaacctccgcctcccagattcaagcaattctccagcctccgggtagctgggattacaggcacccaccaccacrcctggctaatttttgtatttttagtagagatggggtttcaccatgttggccaggctggtctcaaactcctgaccttgtgatccaccctcctcagcctccc

SEQ ID NO: 440581 - DNA, 201 bp, Homo sapiens
tggcaagtaagattaggaagaaaagaaacacatcagaagtttttttggctttcttatttttgtttccagcagttttgtgttttgatagtttgaatccctamattgaaattaattggtattgctttcaatatggaaagctcagccctaatgcgtgtatttacttatttttagttaaaggctcaacgaggttttcgttttatc

SEQ ID NO: 440582 - DNA, 201 bp, Homo sapiens
cctgtaatcccagcactttgggaggccgagacaggcagatcacctgaggtcaggagttcgagaccagcctgaccaatatgaagaaaccccatctctactamaaatacaaaattagccaggcatggtggcacatatctgtaatcccagctacttgggagcctgaggcaggagaatcacttgaacctgggaggcagaggttgc

SEQ ID NO: 440583 - DNA, 201 bp, Homo sapiens
gaggcagaggttgcagtgagccaagattgtgctattgcactccagcctgagcaacaagagcgaaactccatctcaaaaataaataaataaataagtaaaawtaaagaaagaaaaagacaaacagccagcgcctctgaatactatttccgcatctgcatttgccacctacaagtgctaggtgcctacatttggtagcacaga

SEQ ID NO: 440584 - DNA, 201 bp, Homo sapiens
ccaagattgtgctattgcactccagcctgagcaacaagagcgaaactccatctcaaaaataaataaataaataagtaaaattaaagaaagaaaaagacaarcagccagcgcctctgaatactatttccgcatctgcatttgccacctacaagtgctaggtgcctacatttggtagcacagaagattagatattgaaggagc

SEQ ID NO: 440585 - DNA, 201 bp, Homo sapiens
ttaaattttagggaactttataaaacattatgaaacattttatgttgctggtatatatactggtggagcacttgactcgaagttaattgaatgtgataacytgaattttagtttggtaaaagatgatagttggaattgataccaggaagtttgtcacctggtttttgcttcatgatttgatgtagcttgcaaaatgctaga

SEQ ID NO: 440586 - DNA, 201 bp, Homo sapiens
aattgttgaaatggggagtttcatgaccaaatgaatgttaagttaaagttaaaaggacttcatggtattctccaaaaaaaaaaaaaaaaaaaaaaaaaaargggtggttgcaattgttttcccatttattacagagaacttttttcacagaatctctggtgtgttctgtagtcactgaaacatattttgagaaatgcaagg

SEQ ID NO: 440587 - DNA, 201 bp, Homo sapiens
cttagcaataaaaggcatttaactattgactttaaaaagtctaccgcacagcttacattatttaatatgacaaattattgtttcctctacagtgctgtgtyaatagctaatactttatatagctaccttctgaagctgtagagaggcttataactttaacgtttcatgctgacatttagttgatcctagtttatctggtat

SEQ ID NO: 440588 - DNA, 201 bp, Homo sapiens
ctcagagcagattttgtataaaacaatatgttcgtgctggagccttttcaaagtaaaatcataggatattcattctttttttaatatagttaacaattgayctgtaagtttatacaaacaatctgacatacaaaaagggaaagaaaagaaagaaaaaagtatctgctgccacctgaaatgatccctgtgaaatcctgaaaa

SEQ ID NO: 440589 - DNA, 201 bp, Homo sapiens
aggtagaaatgtggagtcggatatattagtgccgttggagaagatatcaccaaatgcaaaaatgctgtaacagaaccattaaatcactatttgtaatcagyttcatgttcagtggcacaggactgtctgagccgatggtctctttggtaggatcagacctaaaaggtaatcttatgcccttaactctagaataaatagatg

SEQ ID NO: 440590 - DNA, 201 bp, Homo sapiens
aacaattatgaagacacattgtaggcacttgttcttgaagactaagaggatcttcctgtaagagtgtctaaatcaaaggtgtacctggattcagtgaattwtgattcctccaggggtagtagagtttcactctgctttatgttggtccaaatccctttattagccatggtcatctttgcagatgagggcagggagttcatc

SEQ ID NO: 440591 - DNA, 201 bp, Homo sapiens
tcctgaccttttccttctccttacccacccatgcatcttgttctgaagtacaaggctcaatacagaaattaatcccttggaatttgctatgtcacttcctmttgcaacatttgctttttagatgaccagttaccacttaccctttcttttgggaggtctttactaagtgagctgtctacaaaacgatgagtcgtcctggat

SEQ ID NO: 440592 - DNA, 201 bp, Homo sapiens
accctcagtattaaataaaaggtagctgtaaattattgcaaaagtcaggttgacattttatgcctcaaatgctctctttcttcctcctaggagtattccayaacattgttttattgtcctaagaacatgcacagcatagagaaggaagatgcattgggacttagttatttctcttgcagtctaaggaaagatattctgaaa

SEQ ID NO: 440593 - DNA, 201 bp, Homo sapiens
agtcacatgcattttgggggttcccagtgcatataacagttacatttatgctatactgtactctattaagtgtgcagtagcattatacatttaaaaactaygtacataccttaatttaaaatatatttaaaaatgctaacaatcggctgggcgccgtggctcatgcctgtaatcccagcactctgggaggctgaggcggac

SEQ ID NO: 440594 - DNA, 201 bp, Homo sapiens
aacatgaactagcctaagccgtactattgtgttgtaagtagtgataaagacactgacagttctcgagtgaccatgggttttatttcatgcacagttcccattttttttataatcaatttgccctgctccactgtgtctcctaagttctccaaatggccccacatgtgacccaaagaggaatgataataaaaagacaacttc

SEQ ID NO: 440595 - DNA, 201 bp, Homo sapiens
tttttagttcaattttaattttcaagcataaaacaaaaataaatctaataaaatggtgtgctctaaatctacaatgaatttctgaattttatttttgttaytctgggtaacatataattctgttaaataccaaattattgtgaatagcttagcatcttctcttttacctgggatttagaactatggaaatacacaaaagaa

SEQ ID NO: 440596 - DNA, 201 bp, Homo sapiens
agaaaaaaagaacaaactggcgatacagatataaacacacacacacaggcatacctcattttattgcacttctctttgctgtgctttgcagataagtgtattttttttttttcacaaattgaaggtttgtggcaactctgcttctagcaagtctatcggtgccatgtttccaacagcatgtgcacacctcatgtctctgtg

SEQ ID NO: 440597 - DNA, 201 bp, Homo sapiens
atgttttatgacttgaggaaggaaatcttatggactgaaatataaattcagttactgggaaaaaaagatatacccaaatgtagaatttcgtatcaacaacrcatgaaatctgcctcatgtcctttttaggaacgagagggatataaatagatatgtacgtctatctgactaaatgggagtcaaacggaaaattattggatt

SEQ ID NO: 440598 - DNA, 201 bp, Homo sapiens
gaaaaaaagaacaaactggcgatacagatataaacacacacacacaggcatacctcattttattgcacttctctttgctgtgctttgcagataagtgtattttttttttttcacaaattgaaggtttgtggcaactctgcttctagcaagtctatcggtgccatgtttccaacagcatgtgcacacctcatgtctctgtgt

SEQ ID NO: 440599 - DNA, 201 bp, Homo sapiens
aaattcttctctgtatcctctttctttctgttcttcctccctgtactcacacactctctctcttttcaatatctgagttgaaaacaagtttaaaattcatyaactataccttcaagttgaagcaatgtccattttccagagatttataggaaaaaccagccctcaaactagtttagggtttattttggcttacaactacta

SEQ ID NO: 440600 - DNA, 201 bp, Homo sapiens
caattaattacccaacagtggcctctaagtattcaagtgaaagaaagagtcacacatctctcactttaaaacaaaagctagaaatggttaaccttaatgargaaggtatatccaaagccaagatatgcccaaagctagacgtctagtgccaaacagttagccaagttatgaatgcaaagaaaaagttcttgaaggaaatta

SEQ ID NO: 440601 - DNA, 201 bp, Homo sapiens
acaaccttgaaaaatgtagagaagaaaacatttgtatttccacagttccatgataaataatgtttatcttttgttctatctggtaggtaggtgtttattgmatgtgcatacatacatgaattatgcaactgggattatgatgcacataatttttgcaatttttgtccactcagtttctggtctatactaggataatttaat

SEQ ID NO: 440602 - DNA, 201 bp, Homo sapiens
gtttaaggtaagaaacctctgtaacaaaagagtgcaaggtgaagcaacaagtgctgatggacaagctacaagctatccagaagatctaagataattcatgraagtagctaaacaacatatttccaatgtagatgaaacatcttctgttggaagaagatgccatctaggattttcatagctagagagaagtcaatgcctgac

SEQ ID NO: 440603 - DNA, 201 bp, Homo sapiens
ggcctgcctttggtacccaagtcacaatcaaagcttctagcagcagcatagagctcctgccctgtgggcatattaggtttattgtagatccagtctccacrctagtgaatgacttggctggggtctgggctgggaagctgtggctacttactcttgctgccccaggcatagagttgcatgtgggctacagccctaggaagc

SEQ ID NO: 440604 - DNA, 201 bp, Homo sapiens
ataattcatggaagtagctaaacaacatatttccaatgtagatgaaacatcttctgttggaagaagatgccatctaggattttcatagctagagagaagtyaatgcctgactttaaagcttcagagaacagggtcgggcgtggtggctcaagcctgtaatcctagcactttcggagcccaagacgggtgaatcacctgagg

SEQ ID NO: 440605 - DNA, 201 bp, Homo sapiens
gttcctttccctcctgtctgttctctcccatccccagtcctcacataagccaagatctttatctattcctccacgatcatagttcgatgacttctacttcygccctgtttattaactttggcttctctactatttctggtccaaggagatatttacattttttaaaagcatactatgtctgcttagtttcctctttatatg

SEQ ID NO: 440606 - DNA, 201 bp, Homo sapiens
gagaatcgcttgaacccaggaggcagaggttgcagcgagctgagatcgcgccactgcactccagcctgggtgacagagtgagactcattctcaaaaataartaaataaataaattttttaaaaagtgaagcttcagaaaacaggatgactgtcttgttaggggataatgcagctggtaactttcagttgaagccagtgcac

SEQ ID NO: 440607 - DNA, 201 bp, Homo sapiens
atagaaactcaacaaacttctatactttataaggaattttcattttactctaaatgcaatatccagccattgaaatagtctattcagggaaatggagtgayatgatttatgtcttgaaagtactgctctggcaagaggagaatttgtgagaccagtttggaaacaattgtgattttgacaaaggagggagacagaggagct

SEQ ID NO: 440608 - DNA, 201 bp, Homo sapiens
tggagatgtacaaagagaatcacgtttcgatgcctgctaacacagcattcattttgtagctcatggatcaaggagtaattttgactttcaagtcttattakttaagaaatacatttggtaaggctatagctgccataggtagtgattcctttaagagatctgggtgaagtaaattgaaaccttctggaaaggattcaccat

SEQ ID NO: 440609 - DNA, 201 bp, Homo sapiens
aactgagtcatttctttttccatttttaattggcaaactgctcattcttctagatgattcagctaaaatgaatatacttagctaaaataattcttcttcarcaaggctgtctgatgaacttgccctacaggagaaccttgacaaagattcactgatagccacataaacagtgatttgcagcagtgcctgacaacatgttaa

SEQ ID NO: 440610 - DNA, 201 bp, Homo sapiens
ttgctggatcgaatgctagttcaactcttagttgtttaagaagtcttcaagctactctccacagtggctggactaatttacatcctcatcaacaatgtatwagcatttcatttcctctacagccttgccagtatatgttgttttttttactttttttttttttttggagatagagtctcactctgtcacccaggctagagt

SEQ ID NO: 440611 - DNA, 201 bp, Homo sapiens
ttaagaagtcttcaagctactctccacagtggctggactaatttacatcctcatcaacaatgtataagcatttcatttcctctacagccttgccagtatakgttgttttttttactttttttttttttttggagatagagtctcactctgtcacccaggctagagtgcaatggcatggtctcggctcactgcaacctctgc

SEQ ID NO: 440612 - DNA, 201 bp, Homo sapiens
actctccacagtggctggactaatttacatcctcatcaacaatgtataagcatttcatttcctctacagccttgccagtatatgttgttttttttactttktttttttttttggagatagagtctcactctgtcacccaggctagagtgcaatggcatggtctcggctcactgcaacctctgcctcccgggttcaagtgat

SEQ ID NO: 440613 - DNA, 201 bp, Homo sapiens
gaactttttttggtgtcatctgtttgcccagtgccagagttgaaacaagtttccttactgtccctttcagcatgggaatttctttctcattttcttttacrtgagtcctttggtatctcagtttatggtttgcatatgggagcaactcctctattaagactcttcatattggactatttgtctttcttagtggtacataaa

SEQ ID NO: 440614 - DNA, 201 bp, Homo sapiens
gctctactcattgttaccgtagacaaaaagaagacttaagtggacaaacagaaattattatgtgcatttgaattcatttttttttcttttttgagacagartctcattatgctgcccaggatggagtgcagtggcgcgatcttggcttactgcaacctccgcctcttgggttcaagggattcacctgcctcagcctcctaa

SEQ ID NO: 440615 - DNA, 201 bp, Homo sapiens
catcaacatcaaaaagatattaagtcactgaagactcagataattgttaacactttttagtaataaagtatttgctaataaagtatgcattttgtttttcwgatgtaattctgttgcatacttaatagactatagtataatgtaaacataacttttatatgcactaggaaaccagaaaattcgtgtaactctattacaata

SEQ ID NO: 440616 - DNA, 201 bp, Homo sapiens
atgctcagtgttgcctcattttctcatcaaacttgacactagttcactggggaaattgcatttccaagttgttttaaatcaggaagttgttttaaaatcargctgtgtgtttgtgtttgcactgttgccacttaatccttgatcctgttaaatgtttcttccatacagaggaacataaacaatagcggctttcttgatttc

SEQ ID NO: 440617 - DNA, 201 bp, Homo sapiens
atgcactaggaaaccagaaaattcgtgtaactctattacaatattcattcactttattgcagtggtctggaaccaaacccacaatatctccgaggttttcktgtgtgtgtgtgtgtgtgtgtgtgtgtgtgtgtgtgtgtgtaaagaaagatagagaattgactcatgcgattgtaaaattggcaagtctaaaattagcag

SEQ ID NO: 440618 - DNA, 201 bp, Homo sapiens
ggtcttcaactgattggaggaaacccagcatgttttaaagggaaatctacttttttcaatgcctagtaatttaagtgttaaccacacctaggccaggcacrgtggctcatgcctgtaatcccagcactttgggaggccgagacaggcagattacttgaggtcaggagtttgagaccagcctggtcaaccagcctggccaac

SEQ ID NO: 440619 - DNA, 201 bp, Homo sapiens
gaatctaaatggttctgtcatccaggtattgagcgtagtactcagtgggtggtttttgagcccgtgatccccctgcattgttgagtagccccagtgtctgytgttcccatgcttatgtctatgtgtggtcagtgtttagctcccacttataagtgagaataggcagtatttggttttccgttcttgcgttaattctcttag

SEQ ID NO: 440620 - DNA, 201 bp, Homo sapiens
ttatagttctgttttcagttctttgagaaatctccaaactgctttccacagtggctgaacaactttgcattcccaccaacagtgtacaaacattccctttyctgcacagcctcgccaacatctgttacgttttgactttaataattgccattctgactggtgtgagatagtatcccatggtgattttgatttgtatttctc

SEQ ID NO: 440621 - DNA, 201 bp, Homo sapiens
gttgaccaggttggtctcgaactcctgacctcaggttatccgcccaccttggcctcccaaagttctgggattacaggcatgagccaccgcgcccagcctattttttttttttttttgactttttaagaaaagccattctgactggcgtgagatggaaagagatcacttttcaaaatgacttaggttggagccctgtcaggt

SEQ ID NO: 440622 - DNA, 201 bp, Homo sapiens
atctttttttttttttttgagacataatcttgctctgtcacccagactggaggacagtggcaccatctcagctcactgcaacctccatctgccagattcaracaattctcattcctcagcctccccagtagctagaattacaagcgtgcactgccatacccagctaactttttttttcttgtatttttagtatagatgggg

SEQ ID NO: 440623 - DNA, 201 bp, Homo sapiens
ttgaccaggttggtctcgaactcctgacctcaggttatccgcccaccttggcctcccaaagttctgggattacaggcatgagccaccgcgcccagcctattttttttttttttttgactttttaagaaaagccattctgactggcgtgagatggaaagagatcacttttcaaaatgacttaggttggagccctgtcaggta

SEQ ID NO: 440624 - DNA, 201 bp, Homo sapiens
aacagatatcacatatttagtagttcttggcttgatataaaatattgtcttagcaaactagtaaacagaattctccagtttctgtgaaaagcaaaagctgmggtcaaaggcctgaaattataaaatcagaaatttcagtgagttgcatgaaaaaattactagcaaatgacaaaatcgttagtaaaagagccatcttttata

SEQ ID NO: 440625 - DNA, 201 bp, Homo sapiens
actggcgtgagatggaaagagatcacttttcaaaatgacttaggttggagccctgtcaggtacattctgaaaagagtccccagttgattctgaagtttacrtcttcatgaaggagcactgaccttccgttcaattaccaagctctgcaaattttaccccctaaatatttcttgtgtctgtatcttcccttgtctgaattta

SEQ ID NO: 440626 - DNA, 201 bp, Homo sapiens
ggattgcagccctgggcagtctcggatggttatggagcatagattttggaatcagctctgtattttggtacctgcaccaaactgctggcaccatggctccraggatttatctcaggttttgaatccatgtccttatctgtgagaaaaagaaaaacaatgtccacattataaatgtggtgatcagttcattacttaactgat

SEQ ID NO: 440627 - DNA, 201 bp, Homo sapiens
cagaataatgtacaaaccaggcttacgtgggaaacagttggattttagaagaaagctttctgatctgattacagttatttcttttcctttgtatctgttaygtgacttccttcctacttgctgaggctggtttgtagatgccaatgaaactttctggaagctcacagaaaagcagcaactctaagctgtgattaacattga

SEQ ID NO: 440628 - DNA, 201 bp, Homo sapiens
tctgatacgtctgttaaacaggtggcaggaagctctgtgtctgtgtatacatacataggtgtacatgagcaacatgtcatgaaatatgaaatagagtcatrtgaaagagtcaaaactaaaggatataatttctgattgtccatcttttatgtgattccagggaaaaagattatatttttatttccatataaataaaatgag

SEQ ID NO: 440629 - DNA, 201 bp, Homo sapiens
aaggcagattttgtttggaacagaacatgaagaatttcatacctaagagcttcgtctgaaagaatagaggtctagatggagagcagttgagagggcgttcrcagctccatgatacagcagcaacaagcaaaatggctaagcaatcagaagtttaacagagagatcaagggaagaagatagccaagaaggatccttttggga

SEQ ID NO: 440630 - DNA, 201 bp, Homo sapiens
aataatgtacaaaccaggcttacgtgggaaacagttggattttagaagaaagctttctgatctgattacagttatttcttttcctttgtatctgttatgtkacttccttcctacttgctgaggctggtttgtagatgccaatgaaactttctggaagctcacagaaaagcagcaactctaagctgtgattaacattgattg

SEQ ID NO: 440631 - DNA, 201 bp, Homo sapiens
tagctgggcaggtgcacaccaccacacctggcaaattttgtattttgtgtagagatgaggtcttgctatgttgctcaggctggtctcaaactcctggcttsaagtgatcctcttgccttggcatccttaagtgttgcaactgcagacatgagccactgcacctggctaaaatgttccatctttaagttcaccttgagtcct

SEQ ID NO: 440632 - DNA, 201 bp, Homo sapiens
atttctttagaacccaaagcctcagttttttatggagttcttcttttgcttgaattggccaagactttctttacttccccccgaccaccacacacacacamaattgaaacaaaatacatacacaggccgggggcggtggctcacacctttaatctcagcacttttggaggccgaggcaggcagatcacctgaggtcaggag

SEQ ID NO: 440633 - DNA, 201 bp, Homo sapiens
atgaaactttctggaagctcacagaaaagcagcaactctaagctgtgattaacattgattgaacttgtagacttgtataaattattccaattccctactcaaaaaaaaaatagccagactcttcatgatcatggttcattccagggagtggcatgtcatgtccttgctttaatctgacagtgataaactggtgtttgcccc

SEQ ID NO: 440634 - DNA, 201 bp, Homo sapiens
tataagtggaatcatatggcgtgtataattttggctctgcttttgtcacttatttttttagaggaacttcatattgatatatcagcaacttcttccttttwattgttaagtagcatttcatcatatttatagatcacagtgtatccattcccctgttcatggacatttgggtttccaatttggggttattattagcagggc

SEQ ID NO: 440635 - DNA, 201 bp, Homo sapiens
cagcacttttggaggccgaggcaggcagatcacctgaggtcaggagttcaacaacagcctggccaacatggtgaaatcccatctctactaataatataaaraaattagccaggtatggtggcatgcacctgtaatcccagctactccggaggctgaggcagaagaatcgcttgaacccgggggtcagaggtttcagtgagc

SEQ ID NO: 440636 - DNA, 201 bp, Homo sapiens
ctggtgtttgccccacaacgtgccactctgtggatggcatggatgtattggaacccattgtctggtgggaatgtctgacatttttctttctttcctctggmtgggttattctttgtatttggaaacctaatgcatgctttctgatactagcccttcaacatgatataaaatctttttgactcagagaagtctttaaattaa

SEQ ID NO: 440637 - DNA, 201 bp, Homo sapiens
gttcacttatttagttctgagtaaattcacttattggttctaacaggttttgttatgtttgtaaactccatagtgttttctgggtatacaaccatgttttwtatatatatatatatatacatatatatacacacatatatatgttttatttcttcctttccaattttttcctctattgactggctagagatttcagtacaa

SEQ ID NO: 440638 - DNA, 201 bp, Homo sapiens
tttgactgcaatgcaagttttccaggaactctatctttgttctgtttttaataatgtttctaaatgacccttcaagtttgtgagattgtagtgttcggtattttttttttttatttacatagtcacataccaattttgaggatgataagtaatagccaagatgatatgttgtgcaacttgatgtgctacagttaagagaag

SEQ ID NO: 440639 - DNA, 201 bp, Homo sapiens
ttttatttcttcctttccaattttttcctctattgactggctagagatttcagtacaatgttgaatagaattgggaagagcagacatccttgttttatttytgaactaaaaagaaaatatcaaataccattgcgtatgttaactgtaggtttttcatagatagtatttatcaaattgtgtaagtttacttctaggattagc

SEQ ID NO: 440640 - DNA, 201 bp, Homo sapiens
tttaagtagctagcccaagattacagagctaatagaagaactggacttgcatccagatccgtttaaccagtgctttgattctatcctatatcatttgtacrtgttctgtagaaaagggagatgcaaagttgaggggagattgaccctcttgtcttgaggtaacagttgaaccagactctgggaatggataagtagaagttc

SEQ ID NO: 440641 - DNA, 201 bp, Homo sapiens
ccacaccctgctaatttttttttttttttttgtatttttagtagagacggggtttcaccatgttagccaggatggtctcgatctcctgacctcgtgatccrctgcctcagcctcccaaaatgctgggattacaggctgcttgtttttttttttaaagtatttacactttctttcagggagtactagtgtacagctgagaca

SEQ ID NO: 440642 - DNA, 201 bp, Homo sapiens
tatcctatatcatttgtacatgttctgtagaaaagggagatgcaaagttgaggggagattgaccctcttgtcttgaggtaacagttgaaccagactctggkaatggataagtagaagttcaaaactggtcattaagtggtgagagtatgtctggtgggtgaatagcatggggaagggttggagaaatgtgcataagcaaga

SEQ ID NO: 440643 - DNA, 201 bp, Homo sapiens
aagtttctttttattgtgactcatgccaataataaggttcacatttgactttaaatcaattgttggatactcatttggctcacaggttcataaagttttaygcaaagaacatttttattgaaaaatttttgcctcttataaagtgaatacatatattactacttcagtttataacttgcaaggtacttttatttaatcttc

SEQ ID NO: 440644 - DNA, 201 bp, Homo sapiens
atcagaagcttttgtgcctactggtaactaaaaaaaaaaaaatcttcagagaacatgatcacatgagaatctgttaataaatcagccccaattgaattagwtataatttagagaatacttttaggaaatatatatttatatttatttaatatgcaatataaaatatatagcatatgtaatataacatatgtaatataaaat

SEQ ID NO: 440645 - DNA, 201 bp, Homo sapiens
tatatttatatttatttaatatgcaatataaaatatatagcatatgtaatataacatatgtaatataaaatacatttgttttgtgttgacacattcaacaracactttggcaattcatttttacccattggacttcagaacaactgttgatgataatctctgttttacagtagaaaagctgaggcacaatgatgttaaatg

SEQ ID NO: 440646 - DNA, 201 bp, Homo sapiens
atgccatctgtttctgtactaccacatcctcgcaggatgtgaagatgtcttctaccagctccatgtcattgcgcatcagtgccaatctcagagctttaggraagcggctaaactttcagaacacacccagggcacaacgcagtaggactgagttctcaggctcagacacataattcacacaactggtgagataaaggcaga

SEQ ID NO: 440647 - DNA, 201 bp, Homo sapiens
ctgaggcagaagaatcgcttgaacccgggggtcagaggtttcagtgagctgagatggagccactgcactccagcatggatgacagagtgacaccccatctaaaaaaaaaaaaaaaaacatagacatgcacatacacatatacagatcctcactgtattttatctctaaatatttcagttgtcttggcaaagcctagaggga

SEQ ID NO: 440648 - DNA, 201 bp, Homo sapiens
tgaggcagaagaatcgcttgaacccgggggtcagaggtttcagtgagctgagatggagccactgcactccagcatggatgacagagtgacaccccatctaaaaaaaaaaaaaaaaacatagacatgcacatacacatatacagatcctcactgtattttatctctaaatatttcagttgtcttggcaaagcctagagggag

SEQ ID NO: 440649 - DNA, 201 bp, Homo sapiens
acaccccatctaaaaaaaaaaaaaaaaacatagacatgcacatacacatatacagatcctcactgtattttatctctaaatatttcagttgtcttggcaargcctagagggagaggagagctaggagtatgaatttaggcatacatttttcctgtcttccatttctccttttatttttattatagattattcttatcatgt

SEQ ID NO: 440650 - DNA, 201 bp, Homo sapiens
ctagagggagaggagagctaggagtatgaatttaggcatacatttttcctgtcttccatttctccttttatttttattatagattattcttatcatgttcyatgtatcatattatcacaaaccagatgaaattcactttggaggcaagatttggaggtactcaaaaagttgttcttcattttccagccttccatttagccc

SEQ ID NO: 440651 - DNA, 201 bp, Homo sapiens
atatgttgagtctggagctatgaaatacatgggctatagatacaggttagaaattctccagcatccagcctgcaagaggctacctgggcacaggtgagggwtgagaagcagacgggcagagagaaccctggatctgcctacgctgatcttagattttactaagcccaaagtcatccacatttgctgggaaggatgtgcact

SEQ ID NO: 440652 - DNA, 201 bp, Homo sapiens
cagagcttttgaggcaatttggcattccatatgctcaccaaggttatcatgaaagaaggcagggctgcgtggtggacaggacgctgacatttcctcttagyctagctctgccactccagaattacaagtgagtaaaccacagaaagttccccaagttcccgggcctccacttcgtcatatgtaaaaaggaatataacctca

SEQ ID NO: 440653 - DNA, 201 bp, Homo sapiens
ttgttgtcgttgttgtttttttttgcatcagatgtgttctatccaaagttttgtgtttaaatatgtacttttcattgttgaattacttccttactggctcyggtttcttgctattaccaaaatggcagacatttcttcagaatcttcttagaggtacttctcaatattaacccaaatggaatctgtagactacctaagaca

SEQ ID NO: 440654 - DNA, 201 bp, Homo sapiens
ctcatttcaacctggtatttatttggcttgtcaaaacattgtacccagggaacaaactatattgatgttgttcggatcttcagagcattatttgcagtttytttaatgggatacgccaatacctctggatattcaacacctgtcttccagggagcttaaaaacattataaatattatctcatggactcttcctgcatttct

SEQ ID NO: 440655 - DNA, 201 bp, Homo sapiens
cagagcagattagtcatacattggtaacccacagtcaagagtagctgtgaatgtttgtttttacgtgtgaatgctctgactcttttatctcctgagcaaaytcaccttaaagatctcagtattttaaaaaattagccgggcatggtggcaggcacctgtaatcccagctatttgggaggctgaggcaggagaatcgcttgt

SEQ ID NO: 440656 - DNA, 201 bp, Homo sapiens
gtatttatttggcttgtcaaaacattgtacccagggaacaaactatattgatgttgttcggatcttcagagcattatttgcagtttttttaatgggatacrccaatacctctggatattcaacacctgtcttccagggagcttaaaaacattataaatattatctcatggactcttcctgcatttctaggagataggcagg

SEQ ID NO: 440657 - DNA, 201 bp, Homo sapiens
gcttattctgcttccaaatgcatcagtaacgtaaaatatgagagctttcagttacattatatgcaggtggggtagaagagataattgcttaaaaataagcrtatgcgaatcactgttcttttccttcagactaagtcatatattaagtgatatttaccaaaaacaggcttgctcagtttggaagattgtaaagaggaaact

SEQ ID NO: 440658 - DNA, 201 bp, Homo sapiens
agaagagataattgcttaaaaataagcgtatgcgaatcactgttcttttccttcagactaagtcatatattaagtgatatttaccaaaaacaggcttgctyagtttggaagattgtaaagaggaaactcttttttaactttagcacgtcacacagaacttcccttcatgcccttccctaagtccctacattcctcctttta

SEQ ID NO: 440659 - DNA, 201 bp, Homo sapiens
gcctcttcggcctcccaaagtgctgggattacaggcgtgggccaccgagcccagccaggaagatcttttaacctccttgttatgaaactcagatattaactttttttttaatacttctccatgttaaatgaaaacaatgttgtaaggatactaacctatatactgtattcttagaagtaggaaatgcttcacctttttgcc

SEQ ID NO: 440660 - DNA, 201 bp, Homo sapiens
tttcatcatgtctaggattagagtcctcaatggagtgtagatggtgtgattttagacatcagcaagatgggactgatgacgttgtcactttggagtagctkgtccgatgcacatcaggtaagcaagtgcatcgctgtcggagaatggcttggtcctgtcgtggaggtcccaggccaggatgctggacaccctccctgtcgc

SEQ ID NO: 440661 - DNA, 201 bp, Homo sapiens
cctcttcggcctcccaaagtgctgggattacaggcgtgggccaccgagcccagccaggaagatcttttaacctccttgttatgaaactcagatattaactttttttttaatacttctccatgttaaatgaaaacaatgttgtaaggatactaacctatatactgtattcttagaagtaggaaatgcttcacctttttgcca

SEQ ID NO: 440662 - DNA, 201 bp, Homo sapiens
gtatctcataaaatcagctagatccattttttttggttctttatcctgtgcttgtcatgtcctagaactatgtgatgggctttgggttcacacttggtgamcttacattcatgttagcagtgttgcgaattggcagtttacaagtgctcttgacttcagacttctcagttttctaaatcatttgcttttaataaagggcta

SEQ ID NO: 440663 - DNA, 201 bp, Homo sapiens
cagaaggcgaaggggaagcaaggcatcttctttacaaggtggcaggcaggagaagtgctgagggaagggggaagagccccttatgaaaccattagatctcrtgagaactcactccctatcataagaacggcatggagaaatggcccccatgattcaattacctccacctcgtctctcccatgacacatggattatggggat

SEQ ID NO: 440664 - DNA, 201 bp, Homo sapiens
gagaacgctgctttgcccattgacttgcaaaatctattaccctcttggcaattgataaccagtttgcttgaaaaggaaaaccattggttggagttgtttgmagaacaactctgttcctttccttagtgagggaccagctatgtacttcttaggaaacagtgaaaaatgaaaatgcacaatttcttgtataaaaattatttc

SEQ ID NO: 440665 - DNA, 201 bp, Homo sapiens
agttagccgggtgtggtggtgcacacctgtaatcccagctactcaggagactgaggcatgagaatcacttgcacccgggaggcagaggttgcagtgagccsagattgtgccactgcactccagcctgggcaacagagcaagactctgtctcaaaaatttaaaataaaggtaaatttttaagaagatagccaattcctttgc

SEQ ID NO: 440666 - DNA, 201 bp, Homo sapiens
cagcaaagcattaaagcaaccacagagcccttctaagggtggcgccccatctgacatctgactgcccaaatgcacacctatgccctgctttggtgtaaactttttttttttttttttttgagacatagtctcactctgtcgccacactggagtgcggtggcgcgatcttggctcactgcaacctctgcctcccaggttcaa

SEQ ID NO: 440667 - DNA, 201 bp, Homo sapiens
gactgaggcatgagaatcacttgcacccgggaggcagaggttgcagtgagccgagattgtgccactgcactccagcctgggcaacagagcaagactctgtytcaaaaatttaaaataaaggtaaatttttaagaagatagccaattcctttgcccccatgtttcttctagtttatcaggacatgattctaaaattaaaatt

SEQ ID NO: 440668 - DNA, 201 bp, Homo sapiens
atctgactgcccaaatgcacacctatgccctgctttggtgtaaactttttttttttttttttttgagacatagtctcactctgtcgccacactggagtgcrgtggcgcgatcttggctcactgcaacctctgcctcccaggttcaagcgattctcctgcctcagcctcctgagtagctgagactacaggtgcccgcctcca

SEQ ID NO: 440669 - DNA, 201 bp, Homo sapiens
ctatgcagccataaaaaaggatgagttcatggtcttcgtagggacgtggatgaagctggaaaccatcattctcagcaaactatcgcaaggacaaaaaatcwaacactgcatgttctcactcataggtggaaattgaacaatgagaactcttggacacaggaaggggaacatcacacaccagggcctgttgtggggtcggga

SEQ ID NO: 440670 - DNA, 201 bp, Homo sapiens
ctgttactcagtgattttcaaactgtgggtcacaaaccattagtgagtcatgaaatcagtttagcaggtcccaactaatgttttaaaatctgatagatagrctaaaaatatcagagagcattgcatgaaataagagtatcttcaaaactttcaggtcaaacatatattaatatgtatggaggtatggggaaatgggtgaag

SEQ ID NO: 440671 - DNA, 201 bp, Homo sapiens
tagaccagaatataagctggtgagatgcttcctcagagaaaatgttgagatggactaattcagatgctttgctccctaagcatcctcacagccccatctartacatgccccatgacagcctcctcagagtcccatctaacacatgctccatgagatagaattgtttctagatgacattatcaataacaacccactgtttgg

SEQ ID NO: 440672 - DNA, 201 bp, Homo sapiens
aatcctgtattaatctttcttatgccactatttctaatttgcgtctgattacagagtgataataataactctattttcttgcttcatcctgatgacgcatrtgatttggttgatatatttctcaaaatagtgaatttctacacatccgtgtcggatagggcttctgtctttctagtcaatgtgtttggatttttaagctct

SEQ ID NO: 440673 - DNA, 201 bp, Homo sapiens
attaatctttcttatgccactatttctaatttgcgtctgattacagagtgataataataactctattttcttgcttcatcctgatgacgcatgtgatttgrttgatatatttctcaaaatagtgaatttctacacatccgtgtcggatagggcttctgtctttctagtcaatgtgtttggatttttaagctctgccactta

SEQ ID NO: 440674 - DNA, 201 bp, Homo sapiens
ttatttggctcatggttctgtaggccacacaagcaaggcacccacatctgctcagcttctgaggaggcctcatcaccttctgccatgaaggttttactcasggcagaaggtgaagaggggagcagggatgtcacatggtgagagaggaagcaagagaaagaggaggaagtgccagcctctttttaacaatcacatctcgtg

SEQ ID NO: 440675 - DNA, 201 bp, Homo sapiens
ctgtttatctctctttaacttccaaactctaggaggtctttgaagaatcagccacttgcttattcagtatgtcatttctaggaataaagattgtagacttkcaaggaagctggacatgtcttcctccataggatagggtcaaatccagttttcatctttgtgtcttcacagtgctaaaagcaccagcatactctatggatg

SEQ ID NO: 440676 - DNA, 201 bp, Homo sapiens
aaagtttattatgtgattctagtcaataaacatatgctcagtgattcatttgttttctgaatatttaacattttctctatcaaacttttcatctaaatttmtcataggcattttgttgttgttataactacaaaggaagggaactattttggttgttatttgtttttcataatttccctgaaattgagcaatacataagac

SEQ ID NO: 440677 - DNA, 201 bp, Homo sapiens
ctccagcgctggtcgatacagggatgtgtccttctccccgagtcattccacaagcatctccagttcatcttgaagctgtttatcttcctcagacagctccwgttctttgtccttgtccccggcatcccgccgctccttgccgcttggcttctcatccatgccgctgagggccgccgctgggggctgctgggactgcaccag

SEQ ID NO: 440678 - DNA, 201 bp, Homo sapiens
cagaaataattcatttttaattcccaaggaaaagtcacagtaataaaaaataaattttacctgttagattattttccttgtcatagctcccctttttattaaaaaaaaaatccaatttacagatttcttactatttgtttaattaaaacaataataaattttatagccttttacaatgcataaagaactttttaaataaaa

SEQ ID NO: 440679 - DNA, 201 bp, Homo sapiens
ttaaactcaagtgcagacacagtttggaagccttttgaccatcttcagccccgctctggtttcctctctcaggacacacttccctcttcatggtgattgcrttctcactctatcaatgaggtattgtccctctttttactttctcctccttcccaaacaggacatattggtcattttaatttattgtttgaaatgttatct

SEQ ID NO: 440680 - DNA, 201 bp, Homo sapiens
gcagccataaaaaaggatgagttcatggtcttcgtagggacgtggatgaagctggaaaccatcattctcagcaaactatcgcaaggacaaaaaatcaaacrctgcatgttctcactcataggtggaaattgaacaatgagaactcttggacacaggaaggggaacatcacacaccagggcctgttgtggggtcgggagagg

SEQ ID NO: 440681 - DNA, 201 bp, Homo sapiens
ctgctcaagtatttattgcaagtgatttgtatgcatgagtgtgtgtggtataggaagttaatctgaaataattttaagtaagcatggcatgtaaattttcttttttttttttttgagacggagtctcgctctgtcacccaggctggagtgcagtggcacaagtgcagtggtgccatctcggctcactgcaagctcagcctc

SEQ ID NO: 440682 - DNA, 201 bp, Homo sapiens
ggtgcagcacaccaacatggcacatgtatacatatgtaacaaacctgcacattgtgcacatgtaccctagaacttaaagtataataataataaataaatatatgtgtatatatatatatatatatatatatatatatatatatatatataaaagagtttaaagaaggaaaaaaacacgacacgaagaaatggacacaagca

SEQ ID NO: 440683 - DNA, 201 bp, Homo sapiens
tttttttttttttgagacggagtctcgctctgtcacccaggctggagtgcagtggcacaagtgcagtggtgccatctcggctcactgcaagctcagcctcytgggttcacaccattctcctgcctcaacctccgagtacctgagactataggcacccgccaccacacccagctaattttttttgtatttttagtagagatg

SEQ ID NO: 440684 - DNA, 201 bp, Homo sapiens
caattagttttcaagagtcagtttcctaatctgtaaaagagaaatgataatacagtcttgcagtgttatcatgtagactaaatgacataacgtatttgaaktatatagcacagtatctaccttctgaatgcctatactgtttttccatcatttaataaaaatggtatcctggtcatggctccctacaaggtgacataacat

SEQ ID NO: 440685 - DNA, 201 bp, Homo sapiens
atacatatgtaacaaacctgcacattgtgcacatgtaccctagaacttaaagtataataataataaataaatatatgtgtatatatatatatatatatatatatatatatatatatatatataaaagagtttaaagaaggaaaaaaacacgacacgaagaaatggacacaagcaaattggtagttgcgtcgtgggagggag

SEQ ID NO: 440686 - DNA, 201 bp, Homo sapiens
cacccgccaccacacccagctaattttttttgtatttttagtagagatgggatttcaccgtgttagccaggatggtctcgatctcctgaccttgtgatccrcctgcctcagtctcccaaactgctgggattacaggcatgagccaccgcgcccagccggcatgtaaatttttatgtgacactttttttttggtggggggtg

SEQ ID NO: 440687 - DNA, 201 bp, Homo sapiens
gtccaaggatgaacttttgtttgaaaatgttcatgtaacctacccctccatatctacactaggtgatacaatagacacagatcaagtgatcttgtcacgartcagaaaaattattttttcatctacttggaactagacatgtacaattgttaataagaaatcctccttttttgaaaaaacaatctagacttgtcatcactg

SEQ ID NO: 440688 - DNA, 201 bp, Homo sapiens
tacatatgtaacaaacctgcacattgtgcacatgtaccctagaacttaaagtataataataataaataaatatatgtgtatatatatatatatatatatatatatatatatatatatatataaaagagtttaaagaaggaaaaaaacacgacacgaagaaatggacacaagcaaattggtagttgcgtcgtgggagggagt

SEQ ID NO: 440689 - DNA, 201 bp, Homo sapiens
attccagcactttgggaggccgaggtgggcgggtcatgaggtcaggcgatcgaggccatcctgcccaacgtgatgaaaccctgtctctactaaaatacaarcaattagccgggcatggtggtgtgtgcctgtagtcccagctacttgggaagctgaggcagaggaatcgcttgaacctgggaggtggagattgcagtgagc

SEQ ID NO: 440690 - DNA, 201 bp, Homo sapiens
aaacctggtcccctagaaaagggtttgaaacttatttacactaaggttcaaaatgaaaagagtcgtgtttccccttgcgcgattattttcatcatgtctargattagagtcctcaatggagtgtagatggtgtgattttagacatcagcaagatgggactgatgacgttgtcactttggagtagctggtccgatgcacatc

SEQ ID NO: 440691 - DNA, 201 bp, Homo sapiens
atttgtaggccaggcatggtggctcatacctgtaatgagcactttgggaggccagcactttgggaggccaagcactttgggaggccaaggtgggtggatcrcaaggtcaggagttcgagaccagcctggccaacatggtgaaaccctgtctccactaaaaatacaaaaattagccaggcgtgttggtgcatgcctgtaatc

SEQ ID NO: 440692 - DNA, 201 bp, Homo sapiens
acatatgtaacaaacctgcacattgtgcacatgtaccctagaacttaaagtataataataataaataaatatatgtgtatatatatatatatatatatatatatatatatatatatatataaaagagtttaaagaaggaaaaaaacacgacacgaagaaatggacacaagcaaattggtagttgcgtcgtgggagggagta

SEQ ID NO: 440693 - DNA, 201 bp, Homo sapiens
ttgtaggccaggcatggtggctcatacctgtaatgagcactttgggaggccagcactttgggaggccaagcactttgggaggccaaggtgggtggatcacraggtcaggagttcgagaccagcctggccaacatggtgaaaccctgtctccactaaaaatacaaaaattagccaggcgtgttggtgcatgcctgtaatccc

SEQ ID NO: 440694 - DNA, 201 bp, Homo sapiens
catatgtaacaaacctgcacattgtgcacatgtaccctagaacttaaagtataataataataaataaatatatgtgtatatatatatatatatatatatatatatatatatatatatataaaagagtttaaagaaggaaaaaaacacgacacgaagaaatggacacaagcaaattggtagttgcgtcgtgggagggagtag

SEQ ID NO: 440695 - DNA, 201 bp, Homo sapiens
acaaggtcaggagttcgagaccagcctggccaacatggtgaaaccctgtctccactaaaaatacaaaaattagccaggcgtgttggtgcatgcctgtaatsccagctactctggaggctgaggcagaagaattgcttgaacctgggaggcgtagggtgcagtgagctgagatcacgccactgcactccagcctgggtgaca

SEQ ID NO: 440696 - DNA, 201 bp, Homo sapiens
tatataaaagagtttaaagaaggaaaaaaacacgacacgaagaaatggacacaagcaaattggtagttgcgtcgtgggagggagtagcatgtgatgaggcygaacgtgtattcctggctgagggacttaggcttcatccagaagtcttggggagcagaagttgctcttggggagcaacagtttcccagtgatcaagggatc

SEQ ID NO: 440697 - DNA, 201 bp, Homo sapiens
gaattgcttgaacctgggaggcgtagggtgcagtgagctgagatcacgccactgcactccagcctgggtgacagagcaagactcagtctcaaaaaaaaaawtttttttttcaatttgtctgtattcaccagaagatgggaagggagactaacatttattctaccaagcatctccctaaggtctcacagagcacagttgtag

SEQ ID NO: 440698 - DNA, 201 bp, Homo sapiens
atggatgacctttatatatggatctgctcatgttgaagtcactgggagagaaatacaagcctggttctcctttgttggccttcagtgctcccttagtcatrtggtacattttgataagtgtgtattttaaaacttaagctcaactgtttttttggatgaatggcaatttctttaaaaaaaggagtgggggctctctccatg

SEQ ID NO: 440699 - DNA, 201 bp, Homo sapiens
ttttccagtaatgaaaacaggtatgtttgattttttggtgtaatctcccttcattgaccatttaatgttgaaaaagaagcaaattgtcttttaagcaaacygctttttaccattgtgaatttggtgtgatttgttgtagatttttaaattttaatgaatttggtgtgattttctgtagatttttaaatttcccttttggag

SEQ ID NO: 440700 - DNA, 201 bp, Homo sapiens
aatagtggccaatggaggccgagggtgtgagaagatttagctgtattcatgaattggagtaacgcatacacattaagacagtaagtaatgcattcaacaaytttttatgatatgtatgccctactatatgccaggcaacattcctggccatgtggatcttttctcttctcatgagagaaacagacaacaaaaagtaagcgc

SEQ ID NO: 440701 - DNA, 201 bp, Homo sapiens
ccaagcccttgcttggcccctcccagttttaagcttgaatgagggcaggtctctgggaccctgccccttgcagcaggagcatcttgtctcgtgtgcgtgcstgtgcatgcatgtgcaaatgttccctgagacccaggacagaggctgcatcctaagggctggttttaccctcttttcattctgtatgtcctcccccacctg

SEQ ID NO: 440702 - DNA, 201 bp, Homo sapiens
tagcatagaccagaatataagctggtgagatgcttcctcagagaaaatgttgagatggactaattcagatgctttgctccctaagcatcctcacagccccrtctaatacatgccccatgacagcctcctcagagtcccatctaacacatgctccatgagatagaattgtttctagatgacattatcaataacaacccactg

SEQ ID NO: 440703 - DNA, 201 bp, Homo sapiens
attccacattgttagtcctcagggaaatgcaaatcaaaaccaaagtgagatatacttcatactcactaggaaggctgtggtaaaaaacacagacagtaacragtgttgcagatgatgagaatgtacggaactctcatactttgctggtggaaatacaaaatggcttttgccattatttttatggcaaaaactgcaattact

SEQ ID NO: 440704 - DNA, 201 bp, Homo sapiens
agggaggaaaatggagagtgactactaatgaagtttctcttgcggggggtacaaaatgccctaaacttagatggttttagaggagtgcacaaacctacgcrtctactcaaaaaaagttgacgttcactttcagtgagtgaattgtacggcatgtgaatgatagctcagtcaggctgttctggaaggaagaagaattaagta

SEQ ID NO: 440705 - DNA, 201 bp, Homo sapiens
taaaaataaataaaaaaagtagagggccagccagccttttgaaggctgcgcttttatcgctctccgcattctgttgtccgtaacttagtcatatggctatmcctggataaaagtaggatgtaggctggcgctgtggaacatggctgtaatcccagccacttaggaggctgaggtgggagggatcacttgagcctgggagtt

SEQ ID NO: 440706 - DNA, 201 bp, Homo sapiens
agttgctgctgtctgtatccaaaactcttaaccttaaaccataagagagctactgttggtgcttgaagagcttgagtcctcttggtaataataattgtgcrtgaataaaatcagcatttggatagagaaagaatatcccatattggaaagtaatcatggcttttatgcttttgtgtgtgtatgatttgacagctttttgga

SEQ ID NO: 440707 - DNA, 201 bp, Homo sapiens
ggctttaggatgttggggtagcttttctccaacacattagaaagcaagtaggagaacctcacaatctgtgcaccagaagaactggcatcacccgaaagctygttagaaacaaagaacctcagtcccacccagatttagggatcagaatctgcattttaaaggatcccagatgattcaagtacacatgaagtttgagaaata

SEQ ID NO: 440708 - DNA, 201 bp, Homo sapiens
atagaattggtcaaggggtagttattagtatgtggaggattctcgtcagttgctgctgtctgtatccaaaactcttaaccttaaaccataagagagctacygttggtgcttgaagagcttgagtcctcttggtaataataattgtgcgtgaataaaatcagcatttggatagagaaagaatatcccatattggaaagtaat

SEQ ID NO: 440709 - DNA, 201 bp, Homo sapiens
tgcgacgaaaataagatatagagaacagaactctaggatacgcaaatatttaaggtgaaatcagaataattcatcttcaaaagaactgagaagaaatgttwggagccctggaagagaagttactacaagggtgtgatcaacatgtcaatactatagggaggtcgaatgatagatggattgaaacatgcctattgcattgag

SEQ ID NO: 440710 - DNA, 201 bp, Homo sapiens
gaaatgcatacacactctgcatagaaattcttatgtgtttgtatattactccattcaatcatactatgattccaagttaagaactcctagataaattagcstctgtagctgtaacagttgaggctttcaattcaaatgtcagataacattcttctgtgtattgtattattttctgcagtaattcaaatctttattgagttg

SEQ ID NO: 440711 - DNA, 201 bp, Homo sapiens
tgaaaatgagtcattgcaacgactttcacaaaattcagctgacctgagagtgggagggaaactaccgtcattctgctcatgtttcttcttgacctcttgcrtaatctttttgttttctagacagttcactaattgttgaattttactgtatattcatataaaaatgcaaacgtactagaccagtggagaatttgacacctt

SEQ ID NO: 440712 - DNA, 201 bp, Homo sapiens
tagacatatgactcaagtatttgggccttgatttctttacagtggaattagtggtttgaacgaaatgatctctaagatttcttctggctctaacatactgmagatgaacatactgaagtggattgtcactgagtcacttgatcgtcctcatgacaatgattagtctttggaatgagtaaaaccagaaaggttacatgcacc

SEQ ID NO: 440713 - DNA, 201 bp, Homo sapiens
tacacccggatctatttctgattagtgtgatgacaacaagcttagattacctgggacatagggttcttctctgtaaaattaaattattgctgatctctgakaactcatcaaataaagtaacttccctttagaaaagaatccctgtgttatacatgaaagttgtgctccccctggaggagaaattggggtacaacattggtt

SEQ ID NO: 440714 - DNA, 201 bp, Homo sapiens
gctcaggcctttacaggccaaggctaaggcctagttgagaagagggctcagaggagcctggctagagcttgatcaagaagagaatctttgttagaatttargaatagcattttactctgtgtgccttagttttctcatctataaaatgggtataataagaattcctatctctacattttttttgtgagttttaaatatatt

SEQ ID NO: 440715 - DNA, 201 bp, Homo sapiens
ttaattattctaatgcttctaacttacgtcatggtgccaatcctatttatataatagaatcaatctcatactctcagctgacaatgaggggtatttcattwtttacttgtatataagattccttttatataggatgaaatgcatacacactctgcatagaaattcttatgtgtttgtatattactccattcaatcatacta

SEQ ID NO: 440716 - DNA, 201 bp, Homo sapiens
ttcatttgtcatgctttaatataaactataacatcaatcttatagctgcaatactgagttgtttgtttgattctattgtttaaaaagaggaattgatttakttgtaaaggagatgaattctgtcattagattttttgccacagggatcaagaaatatatttataattcacttctttcaggaaattaggctataaggtctat

SEQ ID NO: 440717 - DNA, 201 bp, Homo sapiens
cgttgcactccagcctgggtgaaagagcgaaactccatctcaaaaaaaaaaaaaaaaaaaagaaaagaaaaaaacaaaaccaaaaacagtgactgctgtaycttgtgtccagggtctggtctgcatgccagtcaggggtgcaacgcgacagtcaggagatataaactctcgtcttcaccttgccaacaaccacttgcatta

SEQ ID NO: 440718 - DNA, 201 bp, Homo sapiens
aaaagatggagttatgatttaagcccagaagttgcctcatttaaatttcatgaactttttgttggattatgataaagctaacatgcagtaaggggttcaaraagtgtgaacaccagccgggcgctgtggctcacacatgtaatcctagcatttgggaggccaaggagggtggatcacctgagttcaggggttcgagaccag

SEQ ID NO: 440719 - DNA, 201 bp, Homo sapiens
acaaaaccaaaaacagtgactgctgtaccttgtgtccagggtctggtctgcatgccagtcaggggtgcaacgcgacagtcaggagatataaactctcgtcytcaccttgccaacaaccacttgcattatgggctttgaatttctcatctgaaaggtgcagaggatggatgagattagtggtttttcaggctctgattcatg

SEQ ID NO: 440720 - DNA, 201 bp, Homo sapiens
cctgcttcagctggcctcccaaagtgctgggattacaggcgtgaaccaccatgcccggcctccaatggactttttaatgcatgtcactgttctaaattaawccctgctatcagcacttttcatattcccttttcttattccttcttgagggtaggtaccaccatgggctctggcatttacagaatacacataattctcctc

SEQ ID NO: 440721 - DNA, 201 bp, Homo sapiens
tacattttaaaatcaaaaattctttgaggtaaatttttgaaattagagagtagcgaaagctttatagatttttcaagaaaatagcatttgtgttttttttyccctgagtacaggtgaaaacaaatatggttatagttaaggtatcaataacattagagaaaacaatctgatatgtataaatactaatgttgattaagtatt

SEQ ID NO: 440722 - DNA, 201 bp, Homo sapiens
tgcgcatcagtgccaatctcagagctttaggaaagcggctaaactttcagaacacacccagggcacaacgcagtaggactgagttctcaggctcagacacrtaattcacacaactggtgagataaaggcagacctttgtgtatgcattctcatcaatgtccttctccagcatgtccacctgctcaatttccataaggtcac

SEQ ID NO: 440723 - DNA, 201 bp, Homo sapiens
ccttgacatgtgaaggctataccaaggaggtttgtcagggtctgtgatgaggaggggtagatgctgatacccctgggtgatacgggctttggaagtggagygggttacgctcaggatggacgtggaatactctctagatgatcatggagggctagattagagggtcgcggtatgagggaggattgggaaaatcacctttca

SEQ ID NO: 440724 - DNA, 201 bp, Homo sapiens
cttttggaatcattaactctttgtcatacatttattttacgggctgattcttttcttagatgatatggatatgtttcatgacaggctaaagtaactggccrtaaaggggatagggaaaactcaaattaattgtcaacctactgtatacctgttcttttactctattaccttaagaaatcctcacaataatcctttaaagta

SEQ ID NO: 440725 - DNA, 201 bp, Homo sapiens
tttatcattattgttgttatagttgagcaatactctggttttgaaagttgctttcattgcataggtggtcctcattattcttggatttgcatgtatttgcraactcacctacttgctaacatttatttggagcccccaaatcatattcatatggtgctttcacggccaatcacaaacacgctccaagtggcaagaaatttg

SEQ ID NO: 440726 - DNA, 201 bp, Homo sapiens
tggcatttacagaatacacataattctcctctctgtctaatccagtcctgatcctctgtcttctctaggccctgtctagaatctgtgtgctcttcactggrcccttttgatactccgagctcatttaaaaaaaaaaaaagaaaaagccttacattccttttattccttcccttaactcaaaattggtttccttttataagg

SEQ ID NO: 440727 - DNA, 201 bp, Homo sapiens
aggtggtcctcattattcttggatttgcatgtatttgcgaactcacctacttgctaacatttatttggagcccccaaatcatattcatatggtgctttcayggccaatcacaaacacgctccaagtggcaagaaatttgagttgcttgacgtggactttcccagctgatgttgaatgaggtgaagctctgctttcttcttt

SEQ ID NO: 440728 - DNA, 201 bp, Homo sapiens
aaccttcctccatttataaggatgcatccattatataggttctgtacaaaattgccaagcttacttttctctttttctttttttacaacaaaatgtatttmaattttttgataggaaaagccattagctttcggtaaactgttgcacaatcactggaaatgctgagtgagagtctttctgaaaactgtagaaggctaaaga

SEQ ID NO: 440729 - DNA, 201 bp, Homo sapiens
atataggttctgtacaaaattgccaagcttacttttctctttttctttttttacaacaaaatgtatttaaattttttgataggaaaagccattagctttcsgtaaactgttgcacaatcactggaaatgctgagtgagagtctttctgaaaactgtagaaggctaaagataatgaaaagtgtatctcttcattgtcaagtc

SEQ ID NO: 440730 - DNA, 201 bp, Homo sapiens
gaggtgtggtctcttagacactccctctgcaaaaatatttgaaaatagattacagatctcatcacaaggaatacctaatatctatttagtagtctgacacrttaaacttacggaaacacgtttcaatatactgcagggatacccagcccagggtatgaatggctctgattccttcctgtcttttatatctgtcctgtctaa

SEQ ID NO: 440731 - DNA, 201 bp, Homo sapiens
gtagtctgacacgttaaacttacggaaacacgtttcaatatactgcagggatacccagcccagggtatgaatggctctgattccttcctgtcttttatatmtgtcctgtctaaagctaactggaattatgggcccttggcagtaaatgctatgttacctccttgctgaaatttctatcctgtttaaacatgatttatgaaa

SEQ ID NO: 440732 - DNA, 201 bp, Homo sapiens
gtgatggtggtcccataacattataatggggttgaaaaattgctatcaccaagctagtttgtagtgtatcacattactttttctaggtttagatatgtttmaatacacaaatgcttattattgtaagagagttctcaccagtgactgagtcagctggcaccttgatcttagacttcccagctttcagaattatgagaaaat

SEQ ID NO: 440733 - DNA, 201 bp, Homo sapiens
aatatagtgataactttaacagcaccctagggatgagtaagcatacccaagttcggataagcttggaagggggtcccctctctaagactggggtgcagatytcattggagaaggtgtgtttgcagcccactggtttgcctgggccatagctggtcacgtctctgggcaagcaagaaaacacacttctgggggcaggtgaac

SEQ ID NO: 440734 - DNA, 201 bp, Homo sapiens
tgatggtggtcccataacattataatggggttgaaaaattgctatcaccaagctagtttgtagtgtatcacattactttttctaggtttagatatgtttcratacacaaatgcttattattgtaagagagttctcaccagtgactgagtcagctggcaccttgatcttagacttcccagctttcagaattatgagaaaata

SEQ ID NO: 440735 - DNA, 201 bp, Homo sapiens
actggctggctgaataaacctgggcaaattactttatatctctagtcctcagttttctcattagttcaaaaggctattgagttctgattgtacacacaccygcacccatattaagcacttaatcaatgttagtttccttcgtgtgtttcttaggaaatgacctatgtctgtaggctttggaggtgtttgaaacttagggca

SEQ ID NO: 440736 - DNA, 201 bp, Homo sapiens
ttgtattcaagtgatttgtattcaagtgaactacatgttcagatttatgtatgatattattggagtaagtttaagaaggaagagaccattttcaaagaaaytgaaaatacatctgaagaatggagataaggaaagtttactcttatggaataacgtacttgctggatacgtaagtgaaactgcctcttggactgcaaggta

SEQ ID NO: 440737 - DNA, 201 bp, Homo sapiens
tgaaacctgtaattagaggaaaataatttgaatgtttatccttagaaggttatgcgttacattggcgagcccctcgtgccttgttaacatttctttttccrtaatttgtattcaagtgatttgtattcaagtgaactacatgttcagatttatgtatgatattattggagtaagtttaagaaggaagagaccattttcaaa

SEQ ID NO: 440738 - DNA, 201 bp, Homo sapiens
atggcattttaaaactggtgttttattaggtgtggcaccactgggttgccaattttcgtagcctgaagaaaaaattagatggccctcaacccggggtagcragttgaagaggatgctgacatttggcaaaatttggagttttaataagaagagtcagcacagaagctgggatgctacagagagtaactagggtgctggctt

SEQ ID NO: 440739 - DNA, 201 bp, Homo sapiens
tggaataacgtacttgctggatacgtaagtgaaactgcctcttggactgcaaggtagcattcttgcattgcatgataaatgaatttggccaaccattcackcttttcattcaggcatcaatttttagaaaaatgacccataaagaaatcctcttctcagtgccaactttctgtaaccaaaggtttggcagaagagtcgaca

SEQ ID NO: 440740 - DNA, 201 bp, Homo sapiens
atccttagaaggttatgcgttacattggcgagcccctcgtgccttgttaacatttctttttccgtaatttgtattcaagtgatttgtattcaagtgaactrcatgttcagatttatgtatgatattattggagtaagtttaagaaggaagagaccattttcaaagaaattgaaaatacatctgaagaatggagataaggaa

SEQ ID NO: 440741 - DNA, 201 bp, Homo sapiens
tagagagaagtcaatgcctgactttaaagcttcagagaacagggtcgggcgtggtggctcaagcctgtaatcctagcactttcggagcccaagacgggtgratcacctgaggtcaggaccttgagcccagcctggccaacacggtgaaaccccgtctctactaaaaatacaaaaattagccaggcatggtggtgcatgcct

SEQ ID NO: 440742 - DNA, 201 bp, Homo sapiens
aacaacccttgccttgtctgtattcttagctttaatgttcttttagaatattacctgagtctctcatttgccagaaagatgggtattgtcatttttaaaartctgtcttgtaatatggctttacatggtcttatgatattatttatgaggctgactctcataggtaactgacgaatgaagtagtatttgctcaagtagtaa

SEQ ID NO: 440743 - DNA, 201 bp, Homo sapiens
ctgatattaaattcctactttttaagctcttaagaggacaatgctatggatagaaatactttgctgtactaataggcccatattctagttttaacctcatytttctaggtggaatttagaaaaatgtttagttaacatttagaatcaaaatgtatatgttgctttttcttttgcaaaagcagcgccttttgggagatatcg

SEQ ID NO: 440744 - DNA, 201 bp, Homo sapiens
aaaggctcacattttcagaagaagtgacatgcaaagtcaagttaaacacagtgttttgaaagaaatgagtgtgagctctttgggggtaaacctaaatttaraaattaatctctgaatctgctttttggtttcctctgctgatgccaaacattggtattgttccagacgtaggcaccattaagacaatggcagtgatattag

SEQ ID NO: 440745 - DNA, 201 bp, Homo sapiens
acagtcaaagtgtccaggatttctcaactatgctgcaagcttaggtaaatggctggatttctgaaagtttatttcttcttgggtaaaatgaggaataaatrtagtagtttctgagtgagaggaaagtatggatacgaataaagcattttgcacactacaggcatatagtaagtgttcaatgccctttgcctgttaccatgg

SEQ ID NO: 440746 - DNA, 201 bp, Homo sapiens
cctctgggtggggcctctgggaacttccatggataatcctttgctcagtttttctggactcacacaatgcatgctggtgtgcctacttctctcagcttccrcattccttcctcttccatctgccagggcaaccccagcacacctactcctctttaaattggctatcactcagaagagacctataagagaagagcctcttcc

SEQ ID NO: 440747 - DNA, 201 bp, Homo sapiens
gcgtggtggtaggggcctgtaatcccagctattcagaaggctgaggcatgagaatcgcttgaacctgggaggcggaggttgcagtgagccaagatcgcacygctgcactccagcccaggcaacatagactccttctcaaaaaaaaaaaaaaaaaaaaaaaaagttaaccacacctaaaaactgctttcacaataccatcta

SEQ ID NO: 440748 - DNA, 201 bp, Homo sapiens
tttctgagatttgtttatatcatcccttctcaaacctttgcaatcttcctgttccatttaccgatgactctaatgataacctcaccttatacctcgatgakaaacagttacatgattatacagaagctcccacacttacccaccatcacatctgcaaaccaacagcatctgaatctgtattttctgtgcatctttcactgc

SEQ ID NO: 440749 - DNA, 201 bp, Homo sapiens
cccagctgaaacctgtaattagaggaaaataatttgaatgtttatccttagaaggttatgcgttacattggcgagcccctcgtgccttgttaacatttctktttccgtaatttgtattcaagtgatttgtattcaagtgaactacatgttcagatttatgtatgatattattggagtaagtttaagaaggaagagaccatt

SEQ ID NO: 440750 - DNA, 201 bp, Homo sapiens
ttgtttcagcccagctgaaacctgtaattagaggaaaataatttgaatgtttatccttagaaggttatgcgttacattggcgagcccctcgtgccttgttracatttctttttccgtaatttgtattcaagtgatttgtattcaagtgaactacatgttcagatttatgtatgatattattggagtaagtttaagaaggaa

SEQ ID NO: 440751 - DNA, 201 bp, Homo sapiens
tgcctagtcatgtttttttttttttaatcaatttatagtaatttgtccccagttactactcagtgaatgtttgtatgactggatcttgtagtaatcagtawccaagtttttatacatatgtgtttaagcatatgtatttttaagcatagttggagattattatgtttaagcctattttgagattattttatttttctgatc

SEQ ID NO: 440752 - DNA, 201 bp, Homo sapiens
catagttggagattattatgtttaagcctattttgagattattttatttttctgatccggtacgtgatttaataaatttctaatatgtgttgccatttatrtatcttatttcagagggcaaaacgggtgatgtttttcccccgttatgctcaattcaagtgcatcgttgcaaaagtagtaatgatagttattgttattccc

SEQ ID NO: 440753 - DNA, 201 bp, Homo sapiens
gtataaaattgggaatctggcctggtgcggtggctcacacctgtaatcccagcactttgggaggccaaggtgggcggagcacaaggtcaggagtttgagaycagcctgacccacatggtgaaaccctgtctctactacaaatacaaaaattagctgggcgtggtgtgggtgcctctaatcccagctactagggaggctgag

SEQ ID NO: 440754 - DNA, 201 bp, Homo sapiens
tgcggtggctcacacctgtaatcccagcactttgggaggccaaggtgggcggagcacaaggtcaggagtttgagatcagcctgacccacatggtgaaaccmtgtctctactacaaatacaaaaattagctgggcgtggtgtgggtgcctctaatcccagctactagggaggctgagggaagagaatcgcttgaacccaaga

SEQ ID NO: 440755 - DNA, 201 bp, Homo sapiens
tatgcaggaaggtccttaaaaggacaccgactagtatcacgttaaattcataaacccactgacaactcagtttttttcctcaacaatgttactagatttcycttgcaaatttagctttctctatttctgagatttgtttatatcatcccttctcaaacctttgcaatcttcctgttccatttaccgatgactctaatgata

SEQ ID NO: 440756 - DNA, 201 bp, Homo sapiens
gtaaaaagaaaagagaaatgctgcctgggacccagaggcatttgtgaaggcttctggaagaaacgtttaagaagtgaaccctattctcaggagcagtaggragccggtggagggtgttaggtggaggagtatgacgtggtcagtcgcgtgttttagagagagcattctgggtgttagaggagtagggactgaggggtgtgc

SEQ ID NO: 440757 - DNA, 201 bp, Homo sapiens
aatcactgaaacttataattatatcaaagcatttactactcaaaatatttcaactttggaatgttccatctcttctaaagatcagatttatatcatgccaygctctgggaaagttcttgctgtttcaggaattctcctagaggctgacatggcttgagactgaggccaagaacactctgaagattggctccatactttatt

SEQ ID NO: 440758 - DNA, 201 bp, Homo sapiens
gaaggcttctggaagaaacgtttaagaagtgaaccctattctcaggagcagtaggaagccggtggagggtgttaggtggaggagtatgacgtggtcagtcrcgtgttttagagagagcattctgggtgttagaggagtagggactgaggggtgtgctgtgtttgtggttaggatgctggaagaccctgaggaaaccgttgc

SEQ ID NO: 440759 - DNA, 201 bp, Homo sapiens
tgaatggtagaaaggaggggagccaagattctcaaggtctggaggctgagggggttcggataggatgcctacaggtattattgggtagataaattggtttyagttggtaagctgctggagggtgtggcctggtgagtggtctgctggctaagattgcgtgaaggtgagtgcttgcattggcttactctcactttctttctt

SEQ ID NO: 440760 - DNA, 201 bp, Homo sapiens
ctcacatggtgcttctgagggaagtcctcagaagttgggtggttgagttgggacattcggcctgggggaaccagatgctcaaagccaaatctgaattggarccacaatttctaaggtaatttagacttagttcccatgatgctatgtgtgaaaaacttggcaacactgattcattctgaagtcgctacatgagaggaggac

SEQ ID NO: 440761 - DNA, 201 bp, Homo sapiens
gacttagttcccatgatgctatgtgtgaaaaacttggcaacactgattcattctgaagtcgctacatgagaggaggacagttttgatcacagactgatggratgcactttggatgcagatcagaaatatatcagagtctccctgtagctttgaagttacaagggtgctgcatttaagcctgtaggtaggagtacggcggct

SEQ ID NO: 440762 - DNA, 201 bp, Homo sapiens
attttttggggggggataaaggtctttattgaacaaccttatctcactcagtaacaaaagagcaggaggcaacaattcccccggaagtctgcagctgtgtycacccttggcagcaggatgcatggcccactgatacatcagctgcagttcagagcccctggtggtcacttagagatcataattggggttcttccgaaggat

SEQ ID NO: 440763 - DNA, 201 bp, Homo sapiens
atcattgtgctgagtactacagtaagcaatatgacacagagtttgtctagaggtaattatactttagtgaaaattgcccccaaatcactttatcatgtatrtgttgcagtaggagagtatatagtctcaaaagagtaaagaagtggctcctaagtcagctcctgtaagagttctgtgggaagtacagggatgttcaggaga

SEQ ID NO: 440764 - DNA, 201 bp, Homo sapiens
tagtggtgagatgcagaaagaatgcaagtagtatttcctttcatcttatcatcgagtgtaaaatgttccgatgaatatggtagcaagtgtcttccttcctktgaaatatgagttttcatcagctgttggatatgctcacgtaactaagccaagcaaaatccaacacaaatttaaaagttgcttggctacctctttagaaaa

SEQ ID NO: 440765 - DNA, 201 bp, Homo sapiens
cagagcagggacacactcattccagaccccagagttcactatgccacaggcaagaagaattcctgacttaatgtagtcctcaaaggagtacaggttacttstcaatctgaatgaggccaccatccacatcccacagcagcagcatcccaacagatgcagctgcactcaacattccgtggtccttgttcttgtaaagccatt

SEQ ID NO: 440766 - DNA, 201 bp, Homo sapiens
acgatttccttcaccagagtgagcagtggctcctgctggaccttctttgcatcatccagctcctgccactccttagccacttctcctgccaggtgcctgayatactcatgactccatgatgccaattccttctgggagcctactagccgatacttgaggcactcgcactccccactcatggtcatggccaaaacagagatg

SEQ ID NO: 440767 - DNA, 201 bp, Homo sapiens
gatacttgaggcactcgcactccccactcatggtcatggccaaaacagagatgatgtcagcagcaaaatgctcattctccccaggggccatgttctcatasatttccttcagtttgccatagtgtggacgcagacatttgagagacttggtcaccaaagtcatggaagttgtagaagaacgaatctgccttcgcatttcct

SEQ ID NO: 440768 - DNA, 201 bp, Homo sapiens
actccccactcatggtcatggccaaaacagagatgatgtcagcagcaaaatgctcattctccccaggggccatgttctcatacatttccttcagtttgccrtagtgtggacgcagacatttgagagacttggtcaccaaagtcatggaagttgtagaagaacgaatctgccttcgcatttcctccagcgctggtcgataca

SEQ ID NO: 440769 - DNA, 201 bp, Homo sapiens
catggccaaaacagagatgatgtcagcagcaaaatgctcattctccccaggggccatgttctcatacatttccttcagtttgccatagtgtggacgcagamatttgagagacttggtcaccaaagtcatggaagttgtagaagaacgaatctgccttcgcatttcctccagcgctggtcgatacagggatgtgtccttctc

SEQ ID NO: 440770 - DNA, 201 bp, Homo sapiens
tttgccatagtgtggacgcagacatttgagagacttggtcaccaaagtcatggaagttgtagaagaacgaatctgccttcgcatttcctccagcgctggtygatacagggatgtgtccttctccccgagtcattccacaagcatctccagttcatcttgaagctgtttatcttcctcagacagctcctgttctttgtcctt

SEQ ID NO: 440771 - DNA, 201 bp, Homo sapiens
acacctgtaatcccagtactttgggaggccaaggtgggcagatcacgaggtcaggagatcgagaccatcctggctaacatggagaaaccccgtctctactaaaaaaaaaaaaaaaatacaaaaaattagccagacttggtggtatgtgcctatagtcccagttacttgggaggctgaggcaggagaattgcttgaacccag

SEQ ID NO: 440772 - DNA, 201 bp, Homo sapiens
gtggctcacacttgtaatcccagcactttgggaggccaaggcgggcagatcacttgaggtcaggagttcaagaccaggctggccaacatggtgaaaccccrtctctactaaaaatacaaaaaattagccgggcgtggtggcatgcaactctagtcccagttacttgagaggctgagatgggagaattgcttgaacccagga

SEQ ID NO: 440773 - DNA, 201 bp, Homo sapiens
tcaggagttcaagaccaggctggccaacatggtgaaaccccatctctactaaaaatacaaaaaattagccgggcgtggtggcatgcaactctagtcccagytacttgagaggctgagatgggagaattgcttgaacccaggaggtggatgttgcagtgagctgagactttgtctcaataaataaataaatgaataaataat

SEQ ID NO: 440774 - DNA, 201 bp, Homo sapiens
gttgttacagagtctgttctttaaagtggaatcttgatagaatgggaatttcagactcattttggagataagctgtaaagaactaatggtggatgatgttytcctcagggtaaggtggaagacggggcaattagaccccgtggtgaatgcagattaatgaatctaagtgagtctatttggttttttcagtttagttggccg

SEQ ID NO: 440775 - DNA, 201 bp, Homo sapiens
accctcccctgaggcttaccattaatctgagtaggagaatacggtagtgtaagtaagactgcagtcttccttggttgcgggagtagaccgaaaaaaaaaamcaaaaaacaaaaaaccctgataacctcttgctctgcaaaatctcatgcaagcattcttcacttttgagtgtagactagttaagatttaaaatgactgctg

SEQ ID NO: 440776 - DNA, 201 bp, Homo sapiens
aataaaacactagcacctggcatttgcaagacattttatgctttgaaaatattttatactttaccgaatttgtttatctcaagttatgggaatattgcatrtggattattaactgtattctacaggtaggaaaatttagatcttgaggccaaggagcttgtccaaagttacatggatgctaatttaggcaaagacatgtcc

SEQ ID NO: 440777 - DNA, 201 bp, Homo sapiens
aatttaggcaaagacatgtcctgaaatatggatctcctactctgatacagatcaaatcattggaaatcttgagtttgggaattgttctctttgcctttccytctattcttacatctcttgttcactttggatttactatttcgtatttacttatattctcctggtcattagggtattcttgggtgcatttgatagctctta

SEQ ID NO: 440778 - DNA, 201 bp, Homo sapiens
tgatacagatcaaatcattggaaatcttgagtttgggaattgttctctttgcctttccttctattcttacatctcttgttcactttggatttactatttcrtatttacttatattctcctggtcattagggtattcttgggtgcatttgatagctcttattccttgaatacattgcatacctctggatataccaccttgtg

SEQ ID NO: 440779 - DNA, 201 bp, Homo sapiens
atttacttatattctcctggtcattagggtattcttgggtgcatttgatagctcttattccttgaatacattgcatacctctggatataccaccttgtgcyctaatgtcgtttgagaaacaacagttttcacattctgaggttctgctttgaaatttaccttaattcatctctatcgttgagtaatcttatctttttctct

SEQ ID NO: 440780 - DNA, 201 bp, Homo sapiens
acattcctgtccactgaatagtcagagtttgtcattttgaaaatagaaaatagaagagaaatacattatcaggggccactaaatatctgttaaaaggggastgacaggatgaaggcagtacagaatgctgggctgagagcaggactgagatcctagaggcagaatcccagtctacccgtactctctgggaggaagtgatga

SEQ ID NO: 440781 - DNA, 201 bp, Homo sapiens
ggtggtagtgaaagagaagaatgaaagacaaggaagcatcagtggaacttgatgtgtggctggataccagaaatgcagaggaagttagtcaaaggttcccrtcctgatgactggagatcatggtatcactgactgagctctaggggttgtgaaatagagctcattaggcagaggatggtaagtgtctggtttttttatggt

SEQ ID NO: 440782 - DNA, 201 bp, Homo sapiens
aatacagcaactgtcttgttcatccttctaccattaaaaaatgcacagaaggggcctggtgcagtgacttacacctgtaatcccagcactttgggaggccraggcagatggatcatctgaggtcaggagttcaagatcagcctggccaacatggtgaaaccctgtctctactaccaatacaaaaattagcctggcgtggtg

SEQ ID NO: 440783 - DNA, 201 bp, Homo sapiens
gaatgggaatttcagactcattttggagataagctgtaaagaactaatggtggatgatgttctcctcagggtaaggtggaagacggggcaattagaccccrtggtgaatgcagattaatgaatctaagtgagtctatttggttttttcagtttagttggccggagtggaggagcaagtcatagaaaattggggcttttttt

SEQ ID NO: 440784 - DNA, 201 bp, Homo sapiens
ggtggaagacggggcaattagaccccgtggtgaatgcagattaatgaatctaagtgagtctatttggttttttcagtttagttggccggagtggaggagcragtcatagaaaattggggcttttttttcttgtttcttcatgccatgccattcagtactgactgagggtcaagcactgtgctaagtacttaacatgatctc

SEQ ID NO: 440785 - DNA, 201 bp, Homo sapiens
aaaattggggcttttttttcttgtttcttcatgccatgccattcagtactgactgagggtcaagcactgtgctaagtacttaacatgatctcttcaattarttggtcttaacttaaataactcagttaatctgacttccattttctgatgtgaaaactgagacttagggtaatttgcccagagtcagttgttttgtaagcg

SEQ ID NO: 440786 - DNA, 201 bp, Homo sapiens
ccacgaaggctgactctacatcttgtgccctttctccaccctccatagccaatctgttggccttttttctctttctgttgccatcactctggtctaagccrccttagtgttgaggctggtctcaagtggtagtcccctaattagtctccatgggtccactctgctctctttagttccttctccacaaaagagtgatttttt

SEQ ID NO: 440787 - DNA, 201 bp, Homo sapiens
ctccacaaaagagtgattttttttttctttttaaaagataggatttctctctgtcacccaggctggagtgcaatggaacaatcatagctcactgcagcctsgaatccctgcactcaagtgatcctcccacctgggccccccaaagtgctaggaatacaggtgtgagccattgcacctggccttgatttttaaaaaccaagt

SEQ ID NO: 440788 - DNA, 201 bp, Homo sapiens
acaaaagagtgattttttttttctttttaaaagataggatttctctctgtcacccaggctggagtgcaatggaacaatcatagctcactgcagcctggaayccctgcactcaagtgatcctcccacctgggccccccaaagtgctaggaatacaggtgtgagccattgcacctggccttgatttttaaaaaccaagtccaa

SEQ ID NO: 440789 - DNA, 201 bp, Homo sapiens
gaaatacaatatcgctagattaaacagtctacaatggtaatcatgtttgcatttaaagattttattccaaaaggatcacagtcttggtatccatttttttycctcctgcctagacaagacggcgacatactgactcaaacaaaatgcatttgttctctaacaatttaacttgtacagctcttataaacaaggcccataggt

SEQ ID NO: 440790 - DNA, 201 bp, Homo sapiens
caaaagagtgattttttttttctttttaaaagataggatttctctctgtcacccaggctggagtgcaatggaacaatcatagctcactgcagcctggaatycctgcactcaagtgatcctcccacctgggccccccaaagtgctaggaatacaggtgtgagccattgcacctggccttgatttttaaaaaccaagtccaat

SEQ ID NO: 440791 - DNA, 201 bp, Homo sapiens
gtacagtggaaggtattaccctaacatgtctaattttggtatgtgagctctgatcttctcagtcatatgttacaaattcacaactgagttttctttttttwatgaatttttaatttttagtgaccaaacttcttagttcttccccctacctcagcatgtctgccaatatataaatgtttacatatactaaagaagttgaat

SEQ ID NO: 440792 - DNA, 201 bp, Homo sapiens
agccagccttttgaaggctgcgcttttatcgctctccgcattctgttgtccgtaacttagtcatatggctatccctggataaaagtaggatgtaggctggygctgtggaacatggctgtaatcccagccacttaggaggctgaggtgggagggatcacttgagcctgggagttagaggctacaatcagctataaccatgcc

SEQ ID NO: 440793 - DNA, 201 bp, Homo sapiens
tataaaatgcaaattcttgggctctgcttctggaaagtctgattgactagatctgagactgggctctgggaatatgaatttttgataagccagattcgggraagtcttgctctagaaagtgtgttctgtgaatattagttgctacttcgccatggaagctgctcttgtcttttgttctttcactcacctttgaattctcaa

SEQ ID NO: 440794 - DNA, 201 bp, Homo sapiens
caggtatgttgctgaataaaaactctgtatattggccaggtgcagtggctcgcgcctgtaatcccagcactttgggaggccgaggcgggcggatcacgagrtcaggagatcgagaccatcctggctaacatggtgaaacccctaaaaatacaaaaaattagccgggcatggtgacgagtgcctgtagtcccagctactcag

SEQ ID NO: 440795 - DNA, 201 bp, Homo sapiens
ggaggctgaggcaggagaatggcgtgaacccgggaggcggagcttgcagtgagtctagatcgcgccactgcactccagcctgggtgacagagcgagactcygtctcaaaaaaaaaaaaaataaataaataaataaaaaactcgtatattaaatgtaatcttattcaatatatactgtactcataagcctaaaccccagggt

SEQ ID NO: 440796 - DNA, 201 bp, Homo sapiens
aagcagcaaggaggaaatgagtgtgagatatctgacctccaatctgaaatgtaatcacattaacgccttgctgaatattagagaataaagtaatctgaacwaaacatttatcactgaatattcttttaaattttggatttatctgaaatctagtcttctgcttaatcatttaaatgctaataaacaagacagagtataatg

SEQ ID NO: 440797 - DNA, 201 bp, Homo sapiens
ttttgtttttcttttttttggatacacggggaagctaaaacacaaattgaaaaaaagtcaactcgtttaaccttgggcttcatagcaaggctcacttgagyaggaaggatgttctaatagttgaatttatgtgaaaagttggcatggggaggtaacattaaccaactacatgtcagacccttttacttgttattgcctcta

SEQ ID NO: 440798 - DNA, 201 bp, Homo sapiens
ttagggaaatacaaccagttaagaaaaatgtcacaaatatagggcatgcatatattgagcatatgcatcctaaaatggttgaacacattgttattctgaartcctaatgagcagttttccaaggtgtttataggccatggagcaggcttccctgtgagatttgtagtttgtctcctggccctaggtatagtactagctgct

SEQ ID NO: 440799 - DNA, 201 bp, Homo sapiens
aaatcacagattttaaggaagggagaaatggaagatgctactaaacgtctagtaacatagacattttgatctaagtcctgatttctgaaatgttagcataygctttttaaactggggaggaagtatggcacttcgataattgtaatctttcccaaattgcttcttttacctttatttcctgtctagaatttctatcactgc

SEQ ID NO: 440800 - DNA, 201 bp, Homo sapiens
ataggccatggagcaggcttccctgtgagatttgtagtttgtctcctggccctaggtatagtactagctgctttctcattctgtccagattctgttggtcygtagctggcgaggtctttcttggccagaagatccctattcaattctttttttttttttttttcttagcaggttcattcactgtttcatggtttctctccc

SEQ ID NO: 440801 - DNA, 201 bp, Homo sapiens
tggccctaggtatagtactagctgctttctcattctgtccagattctgttggtctgtagctggcgaggtctttcttggccagaagatccctattcaattctttttttttttttttttcttagcaggttcattcactgtttcatggtttctctcccagtttccaacctggaccccagataagtcggtttcctgggccttttg

SEQ ID NO: 440802 - DNA, 201 bp, Homo sapiens
ggccctaggtatagtactagctgctttctcattctgtccagattctgttggtctgtagctggcgaggtctttcttggccagaagatccctattcaattctttttttttttttttttcttagcaggttcattcactgtttcatggtttctctcccagtttccaacctggaccccagataagtcggtttcctgggccttttgt

SEQ ID NO: 440803 - DNA, 201 bp, Homo sapiens
tgaggcaggagaatggcgtgaacccgggaggcggagcttgcagtgagtctagatcgcgccactgcactccagcctgggtgacagagcgagactctgtctcaaaaaaaaaaaaaataaataaataaataaaaaactcgtatattaaatgtaatcttattcaatatatactgtactcataagcctaaaccccagggtttttct

SEQ ID NO: 440804 - DNA, 201 bp, Homo sapiens
tgacattcccacaagtatataaacaattttaaaagggatatcatattcagatgaattaaagatgctagttcagggagttctctgattgactgtctggactrtctgattttataattccctgcagggctacatagcatctctccctccaaagaaagaggcgtaggttttactatagaaatgaagttgaggcaaatgtggtta

SEQ ID NO: 440805 - DNA, 201 bp, Homo sapiens
gaggcaggagaatggcgtgaacccgggaggcggagcttgcagtgagtctagatcgcgccactgcactccagcctgggtgacagagcgagactctgtctcaaaaaaaaaaaaaataaataaataaataaaaaactcgtatattaaatgtaatcttattcaatatatactgtactcataagcctaaaccccagggtttttctt

SEQ ID NO: 440806 - DNA, 201 bp, Homo sapiens
agggctacatagcatctctccctccaaagaaagaggcgtaggttttactatagaaatgaagttgaggcaaatgtggttataaagataaaatgactgcgtgaaaaaaatgtgtatcttaggaatctacactgaatagtataaaaatgctgttttaatgtttcatatatgtatgcatatataagtaatttacatagaaatgat

SEQ ID NO: 440807 - DNA, 201 bp, Homo sapiens
aggcaggagaatggcgtgaacccgggaggcggagcttgcagtgagtctagatcgcgccactgcactccagcctgggtgacagagcgagactctgtctcaaaaaaaaaaaaaataaataaataaataaaaaactcgtatattaaatgtaatcttattcaatatatactgtactcataagcctaaaccccagggtttttcttc

SEQ ID NO: 440808 - DNA, 201 bp, Homo sapiens
taaaggggtttgtttttttttttttttccttttttcattgccctgaacagactctgtgataagtctttgtccatgggacaaaaggagggtgtagaatccaraatctgttacttcctttttttttttttttaataaatcaactattatttttgattcaggggtacatgtgtaggtttgttatctgggtatattgcatgatgc

SEQ ID NO: 440809 - DNA, 201 bp, Homo sapiens
tataaagataaaatgactgcgtgaaaaaaatgtgtatcttaggaatctacactgaatagtataaaaatgctgttttaatgtttcatatatgtatgcatatrtaagtaatttacatagaaatgattttgcaatgtattagtcatggcttatttttttgtaactgaattaatagcatttcaacattttttatttttaaatata

SEQ ID NO: 440810 - DNA, 201 bp, Homo sapiens
gaatggcgtgaacccgggaggcggagcttgcagtgagtctagatcgcgccactgcactccagcctgggtgacagagcgagactctgtctcaaaaaaaaaawaaataaataaataaataaaaaactcgtatattaaatgtaatcttattcaatatatactgtactcataagcctaaaccccagggtttttcttcctttatat

SEQ ID NO: 440811 - DNA, 201 bp, Homo sapiens
tctacactgaatagtataaaaatgctgttttaatgtttcatatatgtatgcatatataagtaatttacatagaaatgattttgcaatgtattagtcatggyttatttttttgtaactgaattaatagcatttcaacattttttatttttaaatatagcaagatcaactttatacctgggctgcagttagtcaacccacaca

SEQ ID NO: 440812 - DNA, 201 bp, Homo sapiens
tgtactcataagcctaaaccccagggtttttcttcctttatatattaacatgtgttttgaaatgtgcttttgaaatacaaggggttgtaaaacattgaacytgcagaatgtggacaataaagtaaccatttttgtacttatcaaagtttcaaacaaccctagaaaaatttggaaaacttttgcaagaatcttgtctgtaag

SEQ ID NO: 440813 - DNA, 201 bp, Homo sapiens
tttttttgtaactgaattaatagcatttcaacattttttatttttaaatatagcaagatcaactttatacctgggctgcagttagtcaacccacacactcrttggactattcagaagggcagtttcctaggcgagttccatccatggggccaccatccaaacctcccgatgaggaacacaggctcgaggatgctgaaacag

SEQ ID NO: 440814 - DNA, 201 bp, Homo sapiens
tagcatttgtgtttttttttccctgagtacaggtgaaaacaaatatggttatagttaaggtatcaataacattagagaaaacaatctgatatgtataaatrctaatgttgattaagtattttttgtcctcttctgatacagcacttactccattaaagtctcttgattggttaaaataacacaacttccttttcagataaa

SEQ ID NO: 440815 - DNA, 201 bp, Homo sapiens
tgttttgtccttttttccccccttcttcttcttcttctttttttttttttttctggacaaggtctttctctgtcacccaggctagagtgcagtggagcatractcgctgcagtctcaacttccctggctcaagcgattctcccaactgagcctaccaagtagctgggactccagccatacaccaccacgtccagctaattt

SEQ ID NO: 440816 - DNA, 201 bp, Homo sapiens
ggtcagccagccatcagacatagtcaacaaatcacgcgggtggaaactgggtagtctcttctgtgtacagaaggaaaatgattattgatgaaacaagacatcagtccatcccatgtgctcattaattatgaacaagaaacaatgtctgtaaacacaaggaaagtttttacaacgcgagaccaagaaaaacagggaaggcat

SEQ ID NO: 440817 - DNA, 201 bp, Homo sapiens
gtcagccagccatcagacatagtcaacaaatcacgcgggtggaaactgggtagtctcttctgtgtacagaaggaaaatgattattgatgaaacaagacatcagtccatcccatgtgctcattaattatgaacaagaaacaatgtctgtaaacacaaggaaagtttttacaacgcgagaccaagaaaaacagggaaggcata

SEQ ID NO: 440818 - DNA, 201 bp, Homo sapiens
tcagccagccatcagacatagtcaacaaatcacgcgggtggaaactgggtagtctcttctgtgtacagaaggaaaatgattattgatgaaacaagacatcagtccatcccatgtgctcattaattatgaacaagaaacaatgtctgtaaacacaaggaaagtttttacaacgcgagaccaagaaaaacagggaaggcatat

SEQ ID NO: 440819 - DNA, 201 bp, Homo sapiens
cagccagccatcagacatagtcaacaaatcacgcgggtggaaactgggtagtctcttctgtgtacagaaggaaaatgattattgatgaaacaagacatcagtccatcccatgtgctcattaattatgaacaagaaacaatgtctgtaaacacaaggaaagtttttacaacgcgagaccaagaaaaacagggaaggcatatc

SEQ ID NO: 440820 - DNA, 201 bp, Homo sapiens
aagttttaattattcagtgctggtatatgggaaagcagttgagttttgtatattgacttgtgtcctgcaaccttgctatatttgtgtattagctccgggarttattttgtagattccttggcattttctacatagacgtattagtcttcaaatagggacagttgtatttctttctttccaatgtgtatatcttttatttcc

SEQ ID NO: 440821 - DNA, 201 bp, Homo sapiens
cagtgctggtatatgggaaagcagttgagttttgtatattgacttgtgtcctgcaaccttgctatatttgtgtattagctccgggagttattttgtagatyccttggcattttctacatagacgtattagtcttcaaatagggacagttgtatttctttctttccaatgtgtatatcttttatttccttttttgtcttatt

SEQ ID NO: 440822 - DNA, 201 bp, Homo sapiens
gccatgttcttatttcagaaaagcattcttttatttactctaagtactcaccaaatttgaaggatcgcagtcccacagaagggaacattttatgattgacyttcaagatcaaagtaaatgttccggcgggcgcccagggctacaggaccacattgctagaatgtggccaatacatgttggcctccagagatttctctgccc

SEQ ID NO: 440823 - DNA, 201 bp, Homo sapiens
ttttctacactactctatttatgataacatttattgatacaaaatacttaggggtagatatagttgaattaatcagttgcatggagagcccttttatcccrtgttttgcatcattgattgggtgatattttcatgttttctgttccctactgtatcattctcaacttttctaactgaaacatttatatgatattcttaaat

SEQ ID NO: 440824 - DNA, 201 bp, Homo sapiens
tgatctataaaccccagcagtcatatagcattttttcatcagagtgatctaatgggtctttctaaacttcttctgttgtgactccctgacgtaaatttggrgagacacttccatgagacagcctcgttcccagaaccataccacactctcttctaatcagtcagttgtaagagtgggcatgtcagtatcataggtaacctt

SEQ ID NO: 440825 - DNA, 201 bp, Homo sapiens
taattattaatagtaatgatctatttgtagttaactgataggtgcacattcttctgtagtgacatcttggttaaatccactgtatataacacatgacccctttttttttttttttttttttaatggattcttactctgtcacccaggctacagtgtaatggcgccatctcggctcactgcaacctccgcctcctgagttca

SEQ ID NO: 440826 - DNA, 201 bp, Homo sapiens
ttctctggaatctatcattttcgaaaggactttgtcatgtttcttttttttttttttttgagacagagtctcactctgtcacccagttggagtgcagtggygcgatctcggctcactgcagcctccgcctcctgggttcaagcgattctcgtgtctcagccttccgagtagctgggactacaggtacatgccaccatgcac

SEQ ID NO: 440827 - DNA, 201 bp, Homo sapiens
tcatttcttttcttttctttttttttttttttgagacagggtttaactctgtcacccaggctggtgtatggtggcatgatcccggctcactgtagccttcrtcacccgagctcaagtgatccttccacctcagcctcccaaagtgctgggattacaggtgtgagctaccactcccagctaatttttaaaattttttgtaga

SEQ ID NO: 440828 - DNA, 201 bp, Homo sapiens
aaagaatataataagtggatatgtatccagaagttcctactcgatttctttctttgaaggctatgcacttgttatatggtttgaaaaaaattgcctcgtayggggaacttttctttaccacaatattgattgtatagtgagttaaattatgtcccctctgtttgtagtcagatagttcagtgtgaagtagaaggctttcaa

SEQ ID NO: 440829 - DNA, 201 bp, Homo sapiens
atgctaatagtcaccactttttgagctttgctgagggttttacacatgtcatttgatctttaacaccccttggaggttttgttaggtgtattttttataawgagactggccataataattagtagagaagcattgagatctaggtatgataaactctgaaatgcctgctcttaactgctgtgtctattatgcagaagtccc

SEQ ID NO: 440830 - DNA, 201 bp, Homo sapiens
gtctgtttagagactacttcattcatttttagaaggcatattttgtatgtatattttaaagggaggtttattttccattcttagctgagaggcatatcccrctcattgtcttactgtcttctctctgtaaatacacagctcatccaagtatgttttgtttcgtgagtgaaaggcttattttgtgatggtaaagaggtcagt

SEQ ID NO: 440831 - DNA, 201 bp, Homo sapiens
gagatctaggtatgataaactctgaaatgcctgctcttaactgctgtgtctattatgcagaagtccctaaatctattttggaataatcattacaggctctrcatccacacatgttagcatttcacaggtatgttcaaaggcaaagagatgataggttttcacagtaaccttccctatatccatagcttcagaaaataagaa

SEQ ID NO: 440832 - DNA, 201 bp, Homo sapiens
tgtttagagactacttcattcatttttagaaggcatattttgtatgtatattttaaagggaggtttattttccattcttagctgagaggcatatcccgctyattgtcttactgtcttctctctgtaaatacacagctcatccaagtatgttttgtttcgtgagtgaaaggcttattttgtgatggtaaagaggtcagtcct

SEQ ID NO: 440833 - DNA, 201 bp, Homo sapiens
caaaggcaaagagatgataggttttcacagtaaccttccctatatccatagcttcagaaaataagaaatatatggtagaaattaaccatccttctatgggwctatacatagatattatggataaatatcctggtttctaagtcccaattgttatgttgatttaagggcacggtctttagaaatgacttgttcaaattctct

SEQ ID NO: 440834 - DNA, 201 bp, Homo sapiens
catttttagaaggcatattttgtatgtatattttaaagggaggtttattttccattcttagctgagaggcatatcccgctcattgtcttactgtcttctcyctgtaaatacacagctcatccaagtatgttttgtttcgtgagtgaaaggcttattttgtgatggtaaagaggtcagtcctgaaacatttggagtccatag

SEQ ID NO: 440835 - DNA, 201 bp, Homo sapiens
aaaaaaagaaagaaaaaaaactagcgtattaagtacatttgccaaacctccttttcttgacagatggtcactcaagagttctctagcctgctttaatcaaygatgattttaaaaattgatttctaaattatttttaattgtggtaaaatacagacaacataaaatttacctctgtaaccatttttaaatgtaccgtttagt

SEQ ID NO: 440836 - DNA, 201 bp, Homo sapiens
agagatgataggttttcacagtaaccttccctatatccatagcttcagaaaataagaaatatatggtagaaattaaccatccttctatgggactatacatrgatattatggataaatatcctggtttctaagtcccaattgttatgttgatttaagggcacggtctttagaaatgacttgttcaaattctctactttattc

SEQ ID NO: 440837 - DNA, 201 bp, Homo sapiens
aaagaggtcagtcctgaaacatttggagtccatagggagtccagaattttagattatgctcggaattttgaggtaactttttaaaatggaatatttaaccytttttttttttttttttttttttgagacttgctctgtcgcccaggctggagtgcagtggcgcgatctcggctcactgcaagctccgcctcccgggttcaa

SEQ ID NO: 440838 - DNA, 201 bp, Homo sapiens
atatggtagaaattaaccatccttctatgggactatacatagatattatggataaatatcctggtttctaagtcccaattgttatgttgatttaagggcayggtctttagaaatgacttgttcaaattctctactttattctattgaagtatatttgggctcagtagatcaaagcactgcacgtgaaggcctacctcattt

SEQ ID NO: 440839 - DNA, 201 bp, Homo sapiens
gcccaggctggagtgcagtggcgcgatctcggctcactgcaagctccgcctcccgggttcaagcgattctcctgcgtcagcctcccgagtagctgggactrcaggtgcccaccaccaggccggctcatttttgtatttttagtagagacggggtttcaccgtattggcctgaccttgtgatctgcccgcctcggcctcccg

SEQ ID NO: 440840 - DNA, 201 bp, Homo sapiens
gcacggtctttagaaatgacttgttcaaattctctactttattctattgaagtatatttgggctcagtagatcaaagcactgcacgtgaaggcctacctcrtttttaaatgatgataataataactgtagccataatggctatatagtctactaatgggtgagtcagtgcccattctaagcaccaacaagtcaccctagtc

SEQ ID NO: 440841 - DNA, 201 bp, Homo sapiens
tgcagtgagccgagatcgcgccactgcactccttcctgggtgacagagtgagactccatctcaaaacaaacaaacaaacaacgacaacaaaaaagatcagrgtggttttcgtggttggtccttctgaaagtgttatgttttattcctcacccccatccgtgctggggcacccagagtgctattattgctattaagaatatt

SEQ ID NO: 440842 - DNA, 201 bp, Homo sapiens
gatatgctatatttatctgggaaaatggttgtattttaaggccagttgtttattgccactgtgacacttactggtaagtgactgcatcatgctattctcartgagttttgttttaaaatatatactcctagctgagattcagaaaatagctaaaggcaaggcaatatctatattgtctcttgtaaaatccttactctctct

SEQ ID NO: 440843 - DNA, 201 bp, Homo sapiens
tccagcaggcgatccgcctgcagcagcagcagcagcagcagctccagctccagctccagcaacagcagcagcagcagcagctccagggcgccgaggagccygcagcgccccccactgccgtctcccctcagcccggggccttcctgggcctggaccggttcctgctggggccgagcggcggggctggggaggccccgggca

SEQ ID NO: 440844 - DNA, 201 bp, Homo sapiens
gaaggcctacctcatttttaaatgatgataataataactgtagccataatggctatatagtctactaatgggtgagtcagtgcccattctaagcaccaacragtcaccctagtctataagtagcagagcatgtcacagatcttaatctcagttccagcctgtttcctgtgctatccgtggttggtgacagatcttaaggct

SEQ ID NO: 440845 - DNA, 201 bp, Homo sapiens
cacgccattctcctgcctcagcctcctgagtagctgggactacaggcgcccaccaccatgcccagctaattttttgtatttttagtacagacggggtttcmccgtgttagccaggatggtcttgatctcctgacctcgtgatccgcccgcctcggccgcccaaagtgctgggattacaggcgtgagccaccgcgcccggct

SEQ ID NO: 440846 - DNA, 201 bp, Homo sapiens
ttaaggctgagcccttattttagcttttctttctgtgaaaagagacccaacaggcagctttcatatatgtgctacttctgcttggtatgcgctttcctggrgcgaattgttcaaacctcaccttcagctaacacctttgagaaaatgtaagctccggtgtgggcgaagtctggattctgagagacaggagtcttagaaaat

SEQ ID NO: 440847 - DNA, 201 bp, Homo sapiens
tgcctgatcttataacctacttgaaactttgctttaaagcctgtggaattcaggaatgcagagagagctaggggaaagtaagagttaactaaagttcatcwcagcactgttcacaatagcaaagacatggaattaacctaggtgtccatcagtggtggattggataaagaaaatgtggtacaggtacaccatggaatacta

SEQ ID NO: 440848 - DNA, 201 bp, Homo sapiens
cacccaccaccacacccagctaatttttgtatttttagtagagacagggtttcaccatgttggccaggctggtctccaactcctgacctcaggtgatctgyccgccttggcctcccaaagtgctgggattacaggcgtgagcgaccatgcccagcctcaaccctatgttttacacactataaaaactctcaggctagctcc

SEQ ID NO: 440849 - DNA, 201 bp, Homo sapiens
cttccaaaccacagactcacaacatgagtagttatacagatttttattatgatcttgaatattgacttttaattatgcactggttaacaaaacaaataagrctgtcacttccatcaagggagcattaaggatggagggtatccttttgacatctcttctatctttccatcccagtgctacttgctttaatatcacccatgc

SEQ ID NO: 440850 - DNA, 201 bp, Homo sapiens
gaaatgtgtgtaaacaagcaataaacatggtgtgataaatgctctgttctgagctcccttgagatgagatcagagtacagggagttccttaaagacttcgyggagcttcaaagagtatttacaaagaaaaacggcataatagcaacttaggggacaactttcacatgcacagttcttcattcagcattccccacatgcttc

SEQ ID NO: 440851 - DNA, 201 bp, Homo sapiens
ggaacataagattcatatcttatatattcatatcccagacatttgcatttgtgccacctgtcataataccctgcacactataaacaataaatgcctccttrgttttgctgttgctactgtacttacatcgctatatttaggataaattttcatgtttacacacacatcagtggatgtgcagggattatccaaagaccttag

SEQ ID NO: 440852 - DNA, 201 bp, Homo sapiens
cttaacctaaaatcaatgtaaagctgagagatgaagccgggtgggtcggttggggacttggagaacttctctgtctagctaaatgattgtaaatgcaccartcagcgctctgtgtctagctaaaggtttgtaaatacaccagccagccctctgtgtctagctaatcaggtggggacttggagaacttttctgttagctaaa

SEQ ID NO: 440853 - DNA, 201 bp, Homo sapiens
gcaggttttggaacataagattcatatcttatatattcatatcccagacatttgcatttgtgccacctgtcataataccctgcacactataaacaataaaygcctccttggttttgctgttgctactgtacttacatcgctatatttaggataaattttcatgtttacacacacatcagtggatgtgcagggattatccaa

SEQ ID NO: 440854 - DNA, 201 bp, Homo sapiens
ggaacaggattcattaggggttattactgttattatgtagtgatctgccccaagccccaagtgatatattttttgtgggaaagctcattctgacctacatrtgagtggcaggttttggaacataagattcatatcttatatattcatatcccagacatttgcatttgtgccacctgtcataataccctgcacactataaac

SEQ ID NO: 440855 - DNA, 201 bp, Homo sapiens
tagattaatggagacttgggtatcaggtgtctttgctcagactctgctgccagcttgggaagtccatctccagctcctccgcttggacacatctgtcttakccaagactcaggtcaaatgtaaccgtttctgtttaaccttatctaatagctagtcagatttatttactccttcccctacattttcacaacattttggtta

SEQ ID NO: 440856 - DNA, 201 bp, Homo sapiens
gttgccgtgagccaagactgcgacattgcactccagcctgggcaacaagagagcagaagttgccagcatcttaagaaggcctaagctttgggacatacacwaagtcacttcttccagcttctgttggtcaagggaagccataaggccagaccaaattcaagcaagtagagaaatacatttggcctcttgagagtggtggca

SEQ ID NO: 440857 - DNA, 201 bp, Homo sapiens
acctctttttgcgtgaaattattatttatttgtctgttttctaattgtcagtcttgcccctctctgccctcagatgtgagaatgtaaactttgtgggagargggacctttgtcaatgttcacctctgtttttccagtgccaattgatgggcacaaggttggcattgaatgaatagttgtgggtgaataaatgacagaaaca

SEQ ID NO: 440858 - DNA, 201 bp, Homo sapiens
gattaatagtttgcaaatattttttctcgttcaacacattgtctctctctcatgttgattgtttcctttggtgtacagaagctttttagtttgatatagtrccatttgtctttttttgtttctgttgcttgtgcttttgaaatcttagtcataagttttttgcctagaccaatgtcctcaagtgtttcccctatgttttct

SEQ ID NO: 440859 - DNA, 201 bp, Homo sapiens
ctctatgtattatatgtacacagcctagcatagtctactgacgtcattttaccagtttgaataaattatagaaaatttgtctttctttatttttattttgttttctttatttttatttatttatttatttttttatgttgcccaggttgatctcaaactcctagactcaagtgatcctcccaccttggcctcccaaaagta

SEQ ID NO: 440860 - DNA, 201 bp, Homo sapiens
ggccaaagcaggaggatcacttgaggccagcctgggcaaactagaaagacgcaatctctaaaaaatttaaatttaaatttaaaaaagagcaagagaaagtraaatgactttctaatcaggtaaacacaaaatatggaatgttccataggataattgactttttttttgtgctaatcaatggcatggaacaaggtgaaagtg

SEQ ID NO: 440861 - DNA, 201 bp, Homo sapiens
atgcagtagcaaatgccccctcctttacacttgtgacaatcaaaaatctttctagatactgtatctttctaaatgttgtaatgccaaatatcccctagaarcatgatatggttttggtgtgtccccacccaaatctcaccttgaattgtagctcccatatccccacttgttgtgggtagttactgaattataggggtgggt

SEQ ID NO: 440862 - DNA, 201 bp, Homo sapiens
tctatgtattatatgtacacagcctagcatagtctactgacgtcattttaccagtttgaataaattatagaaaatttgtctttctttatttttattttgttttctttatttttatttatttatttatttttttatgttgcccaggttgatctcaaactcctagactcaagtgatcctcccaccttggcctcccaaaagtat

SEQ ID NO: 440863 - DNA, 201 bp, Homo sapiens
tcatgcgttaatggattaatgaattattaagtgagtgggagtggtggctttataagatgaggaagagagatctgaggtagcacactcagctccctcaccaygtgatgccctacattgccttgggactctgcagagagtcccagctagcaagaaggcactcatcagatgccgtcccttgactccagacttctcagcctccat

SEQ ID NO: 440864 - DNA, 201 bp, Homo sapiens
ctatgtattatatgtacacagcctagcatagtctactgacgtcattttaccagtttgaataaattatagaaaatttgtctttctttatttttattttgttttctttatttttatttatttatttatttttttatgttgcccaggttgatctcaaactcctagactcaagtgatcctcccaccttggcctcccaaaagtatt

SEQ ID NO: 440865 - DNA, 201 bp, Homo sapiens
tcactgatattgtgtccagagcatgctcagttttcctgtctttcactgttcttagctcagttggttacatcttagggaatccctttcttatttgtgctctygcctttaatttaatcccggtccacaactctttcccttccaaatgcttcaaaaatctcagaatcatagttgcttcttatacaagtatgaggcaaagacctg

SEQ ID NO: 440866 - DNA, 201 bp, Homo sapiens
tactgattgagctgttacagaatgtttcctattctatcattacttaactagtaatgtgcttagggttttgggttatgacttatctatgatgtatgtgtgaytgtcatgaaatttaaagacatgaaatgcttgtaaactgaaataataattataggacacagtcaagaagagaaatagccacagaggcataaatattccatt

SEQ ID NO: 440867 - DNA, 201 bp, Homo sapiens
atgtattatatgtacacagcctagcatagtctactgacgtcattttaccagtttgaataaattatagaaaatttgtctttctttatttttattttgttttctttatttttatttatttatttatttttttatgttgcccaggttgatctcaaactcctagactcaagtgatcctcccaccttggcctcccaaaagtattgt

SEQ ID NO: 440868 - DNA, 201 bp, Homo sapiens
atactttattttattactacatctgcacattggttgtattagttttctgttccttctataataaattaccatgtacttggtggcttcaataaatacaaatktattatcttacagttttgcaagtctgaaacctgggttaaagccaagatgttggcagggctgtggtcttttctggaggctgtcagggagaatctgtttcca

SEQ ID NO: 440869 - DNA, 201 bp, Homo sapiens
cttagcaggtggaataggaaaaagtatgtctacatcttccctgatgtggaagtcccctgaattctatcatttaactgctcatgattttgcaattattccawtgtggattttggctgttctagatttgacacagacagtttttcttttcacatgcacatcacctgagccaagagagcaccctaggccacgtgtcaaacaccc

SEQ ID NO: 440870 - DNA, 201 bp, Homo sapiens
tgtaattgccttttggtagatcggaattgtttctaatttgggacttttactaatgaagctattatgagcatagtacctgatatactttattttattactayatctgcacattggttgtattagttttctgttccttctataataaattaccatgtacttggtggcttcaataaatacaaatgtattatcttacagttttgc

SEQ ID NO: 440871 - DNA, 201 bp, Homo sapiens
gtattctcatagaaaaaggtgaaaacatatactattagtcgatatttgttgtaaaacaaatgaagtcttttattctggttgaaagtgatggaaagacaataaaaaatcctgaaacataaagggaaaatttttggctcatgtatttatgaaacaagcttgaggcacaggtggatctaggtgttaaaaagttgaagtcaggaa

SEQ ID NO: 440872 - DNA, 201 bp, Homo sapiens
ttctgatttaattttctggagtgtgacctggcataattatttttaaaaattcatcagttctaatgtacagaaaaatttgagaaccaatggagtaatggttmaaggcttgcactttgaatctagacagatcttagtttcaatcccggctttaccactagaccacatgactttgggcaagttatttgacccctctgagctcca

SEQ ID NO: 440873 - DNA, 201 bp, Homo sapiens
acagccaaaatactttcgggttctgcatgtttcccagttggctttggccttagatttggatttgcatagagcagaagctaaattccatttcttccatataktcaacttattttgggccatacatatctacttcgattgtctgctttttggttactgaattttataagctctcctccattactatttttctttcctggtcta

SEQ ID NO: 440874 - DNA, 201 bp, Homo sapiens
ggtggttttctgtagtaatgacattctccaggtgtcaagatgatgttttactttgggacctcaattttctgatggatccaagaaaagccattgattttcartttgatcagctttttattgttgttttaaggatggaaatgattggaatgtgactaccactttacatatcagaactgaaatgggaagcttatacattaaagt

SEQ ID NO: 440875 - DNA, 201 bp, Homo sapiens
ttgtctctttggcacatggcaggcctgaagtctacttgagaagaacagatataaacccaacatctgtatcagatgcagtttcccagccttggcctcaaagraggatttctggactctctgttacagtgagtcctgactctccctactgcccgtggttgctcttcctatcacccaatgtctgctgcttaagggagtagtttt

SEQ ID NO: 440876 - DNA, 201 bp, Homo sapiens
tgattggtgatattgagcatttttttcatatacttcttggccatttgtatatcttcttttgagaagtgttttttcagatcctttgcccacttttaagtcaratctttttttgtatgaattgtttgagttccttgtatattctggatattagttccttttcagattaatagtttgcaaatattttttctcgttcaacacatt

SEQ ID NO: 440877 - DNA, 201 bp, Homo sapiens
ttgtatcttgaaccaacctctccctatccttccctgcctcctactcatcccagcctctataaccacaattttcctctgttcagttgttcaactcccacatrtgtgtgagaacacatagtatttatttttctttgatgacttatttcacttaacataataccttccagactttttcatgttgccacaaatgacaggatttta

SEQ ID NO: 440878 - DNA, 201 bp, Homo sapiens
tagtattgcccacatggagacaacaggccaaccgcacacacttgagcacagaatgcagtgcatgagggctaggagagagaagcaacaacacaccgggagawtgctgggagcttgcagagaatgtcaacaccagaagcagacagctctttcattccttgggcttagagccattcagggaaaatgagggtaaaactggcagga

SEQ ID NO: 440879 - DNA, 201 bp, Homo sapiens
atatgttgaagcccaaatcccccaatatgattgaatttggagataggacctttaaggagataattaaggctaaatgagctcataagagtggggccccaatrctatagaactaatgtcctttcaagaaggggaagaaacaccagatctttctccctttctctctgtctgtggatgtagaggaaaggccatgtgaggacacag

SEQ ID NO: 440880 - DNA, 201 bp, Homo sapiens
agccaagagagcaccctaggccacgtgtcaaacaccctgtggcaataagttaacattgtcaagtctccctaatgaagcatgttgacaaatatgttatacawacaattcggtgctggctttatatttctgcatttatatctatgcatattatatagttttatatactgagtagctttttaacatactaccagccacctattc

SEQ ID NO: 440881 - DNA, 201 bp, Homo sapiens
acatttctagatgtagtcctgggatttatgtgttaatattaccagttggatagtatatttgatattattttagtagataagaaatccttgatgataacagygagcaaaaattaccactcctcttcccgttaaaaaaaaaatctcattctattattttggggtgaaatgtaacccagtgcattttcattttattcactgctt

SEQ ID NO: 440882 - DNA, 201 bp, Homo sapiens
tctgccctctttttcctctcctcctgggactccaatgacgtgaaggttgactccttggttatagtcccatgacttcctgaagctctatttatttatttgtrtaatctatattcttttatttagattgggtaatttctattgctttatcttccagttgactgttctttcatctgttctacccattctaattttgagcccatg

SEQ ID NO: 440883 - DNA, 201 bp, Homo sapiens
attacaattcaattttcataatagctttatggctattcaaatgatctacttcatattggatattgggtgagttgtgggagtttatgttttttttaagaacrtgtccattttatataaattgtcaaatttatgtgtgtagagttgttcatagagttttcttattatgcttttgatgtctgcaggatctgtagtgatatcccc

SEQ ID NO: 440884 - DNA, 201 bp, Homo sapiens
gtggatctaggtgttaaaaagttgaagtcaggaattcattttttatattgcttagctttgccatcctgtattggtttaatttccaagtaggcttgtcattaaaaaaaaaaaatgtaagcagcacgaggtttgtgtcttacaaaattagagacccttggggaattaagatattttccccaatagtttcagtaaaagtcatgc

SEQ ID NO: 440885 - DNA, 201 bp, Homo sapiens
tttgtgtatgctttactctagcaaagttacaggctacataagtttggggactagactggaaacttaatcacattttaaaaccattttttcatggaaaaaamatttcaaatggtaataggatcctccgagccatgtgcaggatataatctcctggtgtgccgtttgttaagcccattggaaaagcgcagtattagggtggga

SEQ ID NO: 440886 - DNA, 201 bp, Homo sapiens
aagggatggtgtagtgaatgatattctaatttattcctagtctggctcttggatgtatctctttattttcaggtacagtctcaaaaaactctttaaatgcygttgtacattggggcccaacagcgctgctttcaggcttttgttctaagcagaaggacaggcgttcttcttgctttgtcactgaatactgagatctttgcc

SEQ ID NO: 440887 - DNA, 201 bp, Homo sapiens
tgtgaagtacaaatggccctaaatgaacaggtgagggcaaaatgaaaatttagtcaccaccctgagaatcactaattcaaacattttatttagaataatcttttttttttttttaaaggattttagtacttcaaaggctggaaaactgcctttttatcaaggctagacttgcaaggcccagtgcaaactgaaaacacagcg

SEQ ID NO: 440888 - DNA, 201 bp, Homo sapiens
ttctgatataagtacagctgtttctacatgcttttgatttccatttgtgtggaatacctttttatatcccttaactctaagtctatgtgtgtatttatggrcgaagtaccttctcacaggcaacatatggttgagttttttaaaacatctattcagccagtctgtatcttttaaccgggaattcaaactttacaatcaagg

SEQ ID NO: 440889 - DNA, 201 bp, Homo sapiens
attgtcaaatttatgtgtgtagagttgttcatagagttttcttattatgcttttgatgtctgcaggatctgtagtgatatcccctattttgttcttgataytggtaattggtgtcttctctctctctctctctctctctgtctctttttggtcagtcttattaaggtttgtcaatcatatcgatcctttgaaagaaccagg

SEQ ID NO: 440890 - DNA, 201 bp, Homo sapiens
ttttatttattagggtcttctccttttcttaatttagctaatggtatgttgattttgtttatcttttcaaaaaaacctgctttttgctttgttggcctttygtattttttttatctcaacgtcttttagttgtgctataatctttattatttttttccttctatcagttttgggtttggtttgttcttgcttgtctagttc

SEQ ID NO: 440891 - DNA, 201 bp, Homo sapiens
actccaccacatgtgtcttccagtgggatgcactgtgaagtacatagcctcatttgcaatctttccttgacagaaaagcttttctgtgtttaaccagaccrttggagcttataatcatttatagaaaatattggagatagagaaataaatgaaataatccaggcttagtggctagctcctgtaatcctagggctctaggag

SEQ ID NO: 440892 - DNA, 201 bp, Homo sapiens
attacgttaaaatttgaacaaaatgaaatatgtggtgaagccgtatagcatggttcatggcatcatgtataatgatatatggtaataatggtatatgacarggatcaggaatctacaacctaagggcccactaccagtttgtgtaaataaagttttattggaacactgctatgcccatttatttacatattgtctataaat

SEQ ID NO: 440893 - DNA, 201 bp, Homo sapiens
tctatgaaaaatttataacaaatgactactttggagttcaataagctgagtaactcagcctcagtcacacaactaactaaccccagagaagagacccaaatctctctggtcctctggacacattgctcagtgatcttgcctctgcatctttctaaggtctggtttcactctataattttctttcaaaccatggtatgactg

SEQ ID NO: 440894 - DNA, 201 bp, Homo sapiens
ctatgaaaaatttataacaaatgactactttggagttcaataagctgagtaactcagcctcagtcacacaactaactaaccccagagaagagacccaaatctctctggtcctctggacacattgctcagtgatcttgcctctgcatctttctaaggtctggtttcactctataattttctttcaaaccatggtatgactgt

SEQ ID NO: 440895 - DNA, 201 bp, Homo sapiens
aaggcacctaaaagtctgaactattaagaagctatactccaaaatcaatgttagttttgtctctcactccttcacagacaggctttttttttttttttttwtttttttaaatcaattcctgtttggggctaattgtttaaaagccatgacttcattttcaggttaaatacatgtctcttccattctgagaattaaaaaaaa

SEQ ID NO: 440896 - DNA, 201 bp, Homo sapiens
tatacaagtatgaggcaaagacctggagaaaatcaaatgtgattttgctaaaatatgtatattaatagtggaaagagagaataagatctcttgttctctawcaaaaaaaggtattcctgtctttgttacatttctgtaactctctctttctctctttgttatatttctgtaatctccctgggggcaaggaagggaaaaata

SEQ ID NO: 440897 - DNA, 201 bp, Homo sapiens
ctacggagcatttctctgcagctttgtctctttggcacatggcaggcctgaagtctacttgagaagaacagatataaacccaacatctgtatcagatgcastttcccagccttggcctcaaaggaggatttctggactctctgttacagtgagtcctgactctccctactgcccgtggttgctcttcctatcacccaatgt

SEQ ID NO: 440898 - DNA, 201 bp, Homo sapiens
caccagtgacttaaaatataaccatacctccagtgaatccgcattttataagccattaaatctctcttttttatgtgaacagaaggtgcatccaggacttytaattgttaagaattttccttttgtttcccagtgagggcaaaagctatattctttttgaaatgggtacaaccctgtaatggcatgctttcctatttggat

SEQ ID NO: 440899 - DNA, 201 bp, Homo sapiens
ttttttgctcatcaaatgtgatccatgcaacaggcacctttgaaaactcaccatgacgccgattttatttttaaatggagggactaaatggccattacagraagtcggcctgagtggagtgggggttggggggagagagtttattactgttgtttgaatcatttataataatgtacttttgtgtctctggataactacatg

SEQ ID NO: 440900 - DNA, 201 bp, Homo sapiens
ttagctgttcagtctaagacaaagaaaacccaaagtcggttagaggaaggggatagaagagctgtctttaaacatctaatgaagtataacatgaaaaggggtttatgctggttttggagaaagctaaagtagcaattttcaaacttcagttgttcatttgcatcgcttgggaagattctgaatgcagattcctagtctccg

SEQ ID NO: 440901 - DNA, 201 bp, Homo sapiens
tgaacagtacaatcagcgcctttataaatgcgttttttaaagagctaactttaaaatgttctgcttccttcagtccccattcccttctgaaaatggaccawctcccgtctctgagcccagaccagatgctatctctctacttcttccaaggtggccttatctttactaagagtcagtgttgaaacatgcatgaccagccca

SEQ ID NO: 440902 - DNA, 201 bp, Homo sapiens
tcagccccagggccacctatttatgaccccttgatgaaattttggaggaattgggtgaagaagataatagaaaagtaagaagactaaaacttacaggtatrcataccaaaatgtgctaaagaagtaaaggggagcatatgatttcctctccccgtcccccaagattagaggtatccctccacattgtggaggggttggaga

SEQ ID NO: 440903 - DNA, 201 bp, Homo sapiens
tatttccttcagctcaaataagaatatgctgtatacagtcatggcctgttttgtttttccatagtgaaggccacaggttggaaactcaaattacctagaargatgagacagggaacgtaaacaggtgaagtggactgggtgcaagagaaccaggagatgatgaggtctgtagtaaactgaagagccacttttcttctttaa

SEQ ID NO: 440904 - DNA, 201 bp, Homo sapiens
gatggttaattttatgtgtccacttgactgggctacgaggtgcccagatatttggtgaaatattatttcttggtgtatctgtgagggtatttctagatgakactgacatttgaattggtggactgagtaaagcagattgccctcattagtgtgggcaggcttcatcaaatctgttgagaaggcctaataaaataaaaggct

SEQ ID NO: 440905 - DNA, 201 bp, Homo sapiens
ttgggaaatgctgtgtttttatggcattcttttctccttcagagaaagactgatggttagacacagcctctgctaccaggaatggttggagctcgtgattmagagaagggatgcatgtccctttggtgaacctggtttccatgtgggatgaaggttgaagttgatgagttagtgaggtgaggttgacttgatggttggtag

SEQ ID NO: 440906 - DNA, 201 bp, Homo sapiens
agagacagggttttgccatgttgcccaggctggtcttgaacttctgagctcaaacaatctgcctcagcctcccaaagtgctgggattacagttatgagctwccgcacctggtccggtgtgggaattttaatcatggacagtctaacttcacagtgcaggccttttctgtttcagcatatcccaaaacatggatgacacaaa

SEQ ID NO: 440907 - DNA, 201 bp, Homo sapiens
gaggtgggtatttttattcttatttgatgaataaatgaagtctgaaaagttaagaaatttacccatgtttacactttatgtggcaaagtcaggtgccctgygcccccaagtgagtgaatcccaaccctatgttttgtatttttgtttttttggtttttttgagacagtcttgctctatcacccaggctggagtgcagtggt

SEQ ID NO: 440908 - DNA, 201 bp, Homo sapiens
tgactgaagaacaatagccatcacttttttgagctgttaccgtgtgtcaggaacttctttataattgcatgcagtgttcataacaacccttagtgttaggkttatgatcccctcattttatgaataaaaatctgacgatcagagaggtaagtcacttactattaggttgatgcaaaagtaattgcggtttttgccattact

SEQ ID NO: 440909 - DNA, 201 bp, Homo sapiens
aactggcctccgtgatttacttctaataaatagaatgcagcagaaattacactgtctgacatttgagcacaggtcagcggtcagcgcattttttctgcaartgctcacattgtaaatattttcagcttcacaggccatacccacatggcctctgtcacaactccatagctctgctattgtagcatgtagcagccatagata

SEQ ID NO: 440910 - DNA, 201 bp, Homo sapiens
ataaattaagtcttcaataaatgctatctaccattttaaaaaaatctttgaaggctttctactgcctacagaagaaagcctatccttgtcaacatgatatyccttcactgtgttttattactcagagcctcttctctgggatactgccctggttgccctgtgtccagtcctgcaggactggaccctttagattaatggaga

SEQ ID NO: 440911 - DNA, 201 bp, Homo sapiens
aacttactgttttcatgagtctatgggagcttataaaaatacatactgtttaaattttcctaaatgtgcatggaggcaaagatttttattctgaaatggaraacctcttgttttccattgttaaggaaagactttgttacagaaataagtctccctgtggaaaattatagttttcaggtgagctatccctactaatcagac

SEQ ID NO: 440912 - DNA, 201 bp, Homo sapiens
ctgtagctttgtagtacattttgaagtcaggtggtgtggtactttcagctttgttctttttgctcagcatagctttggctactcaaggtcttttatggttkcatacaaattttggaacagtttttaaaagttcctgtaaagaaggtcattgatattttgataggaattgcattgaatctgtagattgttttgggtgtataa

SEQ ID NO: 440913 - DNA, 201 bp, Homo sapiens
ggaagtttttggtaattatttcttcagatgctttttcagctctgccctctttttcctctcctcctgggactccaatgacgtgaaggttgactccttggttrtagtcccatgacttcctgaagctctatttatttatttgtataatctatattcttttatttagattgggtaatttctattgctttatcttccagttgactg

SEQ ID NO: 440914 - DNA, 201 bp, Homo sapiens
ctcatgttgattgtttcctttggtgtacagaagctttttagtttgatatagtgccatttgtctttttttgtttctgttgcttgtgcttttgaaatcttagycataagttttttgcctagaccaatgtcctcaagtgtttcccctatgttttcttctagtgattttatagtttcaggtcttatatttaagtcttcaattcat

SEQ ID NO: 440915 - DNA, 201 bp, Homo sapiens
ctaattaggaagtttttggtaattatttcttcagatgctttttcagctctgccctctttttcctctcctcctgggactccaatgacgtgaaggttgactcyttggttatagtcccatgacttcctgaagctctatttatttatttgtataatctatattcttttatttagattgggtaatttctattgctttatcttccag

SEQ ID NO: 440916 - DNA, 201 bp, Homo sapiens
gccatgtgaggacacagtgagaaggtagccatctgcaaaccaggaagaaaggcctcaccaggaacctaccctgccagctcattgatcttggacttgtgaaycccaaaaatctgagacagctttcagcgaatttagaaaatttattttgccaaggttgaggatgcactctactgacacagcctcaggaggtcctgatgacat

SEQ ID NO: 440917 - DNA, 201 bp, Homo sapiens
ggactacaggtgtgcatcactacacccagctaatttttttttgtatttttagtagagacagggttttgccatgttggccaggctggtctcgaactcctgayctcaggtaatccacctgtcgcggcctcccaaagtgatgggattataggtatgagccaacatgcccaacctacctcttaaatttaagtaatttttttagct

SEQ ID NO: 440918 - DNA, 201 bp, Homo sapiens
gtttaaatattaatcacaagttttgtcattttatacctttttaatcagtactgtacagacattcccctgcaggttagcctaaatgtcaaataatttctctstaatagttggtacttgttctgaaggcattaaatagcttgtgatttacattatgttgctgaaggttttacataatactttgcttgaattattataaaagga

SEQ ID NO: 440919 - DNA, 201 bp, Homo sapiens
gtaaattgactgaaagccaagtcaaagaggcagatcagcttctgaaggaggtctgctcacttcagcaaagaaagcagggcaaagaatcctaggcttttgasctagttaggcccccagttcctacaaccatgggctgaaataatgtggagaactcttgatattgtaggcaaaatgaatgttagcagagttccatcagagata

SEQ ID NO: 440920 - DNA, 201 bp, Homo sapiens
ggaagagtaaggaacatcattaacttagggaaggcccagctggagacaaggtcagtggaagagactaaaaacagagaacaagatgaaatggtggaaacaarggtgatgacattcttttggcaggaagtttggagctggatgaagaagatggtaaaagctgaggaaagaacatttacacaaaggactgtggaggttcttgaa

SEQ ID NO: 440921 - DNA, 201 bp, Homo sapiens
aaaactgtctcctttgccaacactgaagtgtgctcaagagaaattctcactgcatcctggagagaattcacaggaagcaagtttagagcagtggtgacagstcaaagttaagataagaaaggaggaagagtaaggaacatcattaacttagggaaggcccagctggagacaaggtcagtggaagagactaaaaacagagaa

SEQ ID NO: 440922 - DNA, 201 bp, Homo sapiens
tgatgaaataaagggcatctgtggatttcatctggttaattttttaatggataacagatttctggaatttacaggagactaaactttttggtctttcattrtatgcataggtaatatcactgttgctatttgtgatagccattttaaccagtgattcagttgtattgtttgccagtggcacagaaagaatggtcattgtgc

SEQ ID NO: 440923 - DNA, 201 bp, Homo sapiens
tagaggaaaaaagggaaatgacttacagaaatcagaagtgaggtacagaacagctggattggttacagcttggcatttgccttacacagtttgaacactcrgcaatgtataaatggttaaaatatggccactgggattgccaagacttagctgttgttttaggtccatacttctaagttaggttttcaatcttgtctacct

SEQ ID NO: 440924 - DNA, 201 bp, Homo sapiens
gttgaaatttaatccccaatgcggtatcattgagaagtaaggactttaagaagggattgggtcatgaaggtgttgccctcatgaatggattaatgtattcrtgaattcatagattcatgcgttaatggattaatgaattattaagtgagtgggagtggtggctttataagatgaggaagagagatctgaggtagcacactc

SEQ ID NO: 440925 - DNA, 201 bp, Homo sapiens
actctagctaggacttccaatactgtgttgagtagaagtggtgaaagtgggcatttttgtctttctccaccttttagagcgaaggctttcagctttgcccygttcagtataatgttagttatgggtttgtcctatatatggctgtttttgttttgaggtatgttccttctatatttaatttgtttaaagtttttaaaatca

SEQ ID NO: 440926 - DNA, 201 bp, Homo sapiens
agccaagtttctttaccctttctcttttataattgttttaaatattttctgtgcacacatttaatatcacatcagataatgttataatttttgttgcactyatcaaatgtaaatgagaaaattggagaggagaaggaaagtctatttatttatctgtatttttgtttgccatactcttttttcctgcttgatattctacag

SEQ ID NO: 440927 - DNA, 201 bp, Homo sapiens
gactaattttccagctattccctttccactcattctgatttctggctttgtaggacttttacttcctctgatgaccttttaccgtgatcacactttgacaytgaccatcactctctgctgtgcttatttttgctgtgtaataaagtcttactcattctcctccaagacccatttctaacattccctcctctatgaggcctt

SEQ ID NO: 440928 - DNA, 201 bp, Homo sapiens
aaagacagacgttaaccaccatggcacgtctatagcgtattgggttaaatattttatatacattaatccattcaatccccataatgaagataagaggtggrtatttttattcttatttgatgaataaatgaagtctgaaaagttaagaaatttacccatgtttacactttatgtggcaaagtcaggtgccctgcgccccca

SEQ ID NO: 440929 - DNA, 201 bp, Homo sapiens
gaagccaggagagagggacggaacagagtcctccctcgaagtcttcagaaggaatcaacccttgcagtacacgtgtattttggacttgtagcctgcagaaygatcagaaaataaatttccttatttatttattttttttgtagagacagggttttaacatgttgcctaggcaggtcttgaactcttgagctcaagtgacct

SEQ ID NO: 440930 - DNA, 201 bp, Homo sapiens
taccttagcacctttgcttctgggaaggggtaattctaaagctgttctactttgttttgagttcccccagtgagttgggttctgttacccacagcagtcasctgctcaataaatcaccctttattatcttccttctctgtctcatgtctcagtttttctccctctgtgtcttgggatcacttctcaaataaacttcttgca

SEQ ID NO: 440931 - DNA, 201 bp, Homo sapiens
ctcaaaaaactctttaaatgccgttgtacattggggcccaacagcgctgctttcaggcttttgttctaagcagaaggacaggcgttcttcttgctttgtcrctgaatactgagatctttgccttcttgatgggtggggtggccatggagaatgctggctttcagaggagaaattagatagagtctgatgtcccatttggcc

SEQ ID NO: 440932 - DNA, 201 bp, Homo sapiens
attaggctccaaattcccccactgtgatttcatctcatcagtctgtgcaaggggagagtttggtattccaaagaaaatcaattcaaactactaaaaacaaytgaaaagtgtgaaaaatattttttaaatatttgagtatgactcaaaatacatgctttatttattggtcagcgtgaacaaccccagaaggaaaaagagtgc

SEQ ID NO: 440933 - DNA, 201 bp, Homo sapiens
tctcattctgccttctctgcaggaaggtggtaggggagaagggacagaaggaagaaagagaaccatttatgtagcacctccagtgtctagcactggacttkgattagaaaaagtaatcaataaacatatgtggaatgaattgcattatagagttcctcgtaagatttctccctatttcatactccccgcttccaccctcca

SEQ ID NO: 440934 - DNA, 201 bp, Homo sapiens
ggttggggacttggagaacttctctgtctagctaaatgattgtaaatgcaccaatcagcgctctgtgtctagctaaaggtttgtaaatacaccagccagcmctctgtgtctagctaatcaggtggggacttggagaacttttctgttagctaaaggattgtaaatgcaccaatcagtgctctgtgtctggctaaaggtttg

SEQ ID NO: 440935 - DNA, 201 bp, Homo sapiens
aaaaaaaaagaggaacaatcagaaattaagctgttattttaaaaatacaaatacagatatatgacaaattttaccaacctgggtctaaggcccaagattcrtgtctcttatgtacattctggagttctacagaaaaattatctggaaataaactgaattcactgctgtgagtgaccaattacccctatttgccacggctct

SEQ ID NO: 440936 - DNA, 201 bp, Homo sapiens
tatctagctgtaattttgtatcttgaaccaacctctccctatccttccctgcctcctactcatcccagcctctataaccacaattttcctctgttcagttsttcaactcccacatatgtgtgagaacacatagtatttatttttctttgatgacttatttcacttaacataataccttccagactttttcatgttgccaca

SEQ ID NO: 440937 - DNA, 201 bp, Homo sapiens
tattaggtgactccacctctgtggtggtttataacagtactccccagccttttgggcaccaggcaccggttccatggaaagcactttttccacagatgggstgggggtgggggatggttttggaatgaaactgttccatctcagatcatcaaatattagattattataagaaatgtgcaacctagatcccttgcatgtgca

SEQ ID NO: 440938 - DNA, 201 bp, Homo sapiens
cagcatttccaacccacatttcagctgcctctctgggagtcatacaatcacagtgaatctcttcctgattataataatggccttcagcctcctccattatsctggagctgaagagatgatgtcagtgacatattcctgtaggaagaactcagtgactgcttaattttccatgtaggtttttaatgctttgtattttgttaa

SEQ ID NO: 440939 - DNA, 201 bp, Homo sapiens
aaactgttaaaattaaatatgtattaaatatgtggtctctcccaggctgagctatatatatatatataatatatacatacatacatacatacatatatatrtgtgtgtgtgtgtgtgtgtgtgtgtgtgtgtgcacgctccatctgcataaagataataattgaacctatgatcatgaatgagattatccaaggaggggga

SEQ ID NO: 440940 - DNA, 201 bp, Homo sapiens
aaaaaaaaactgttaaaattaaatatgtattaaatatgtggtctctcccaggctgagctatatatatatatataatatatacatacatacatacatacatwtatatgtgtgtgtgtgtgtgtgtgtgtgtgtgtgtgtgcacgctccatctgcataaagataataattgaacctatgatcatgaatgagattatccaagga

SEQ ID NO: 440941 - DNA, 201 bp, Homo sapiens
tgtctcagaacaacaacaacaaccaaaaaaaaaaaactgttaaaattaaatatgtattaaatatgtggtctctcccaggctgagctatatatatatatatwatatatacatacatacatacatacatatatatgtgtgtgtgtgtgtgtgtgtgtgtgtgtgtgtgcacgctccatctgcataaagataataattgaacct

SEQ ID NO: 440942 - DNA, 201 bp, Homo sapiens
ttaacctgtaccaacaaggcaatatgaaccgtatttgtgtatgctttactctagcaaagttacaggctacataagtttggggactagactggaaacttaaycacattttaaaaccattttttcatggaaaaaacatttcaaatggtaataggatcctccgagccatgtgcaggatataatctcctggtgtgccgtttgtta

SEQ ID NO: 440943 - DNA, 201 bp, Homo sapiens
gacagaacaagaccctgtctcagaacaacaacaacaaccaaaaaaaaaaaactgttaaaattaaatatgtattaaatatgtggtctctcccaggctgagctatatatatatatataatatatacatacatacatacatacatatatatgtgtgtgtgtgtgtgtgtgtgtgtgtgtgtgtgcacgctccatctgcataaag

SEQ ID NO: 440944 - DNA, 201 bp, Homo sapiens
caagtatcacccagaagaaagagatcattgttgattgagtgttgggtttgggatggggccgaagaatttgcattctaacatatttttctaacatgctgatstttagagcactttgaaagcaacctagagagataatagtcttgaaagtcaagtttactgagatagaacaaagatttataaattttagagtttccatttcca

SEQ ID NO: 440945 - DNA, 201 bp, Homo sapiens
gtttgaggatgcagtaagctgtgttcacaccacttcacttcagcctgtgtgacagaacaagaccctgtctcagaacaacaacaacaaccaaaaaaaaaaaactgttaaaattaaatatgtattaaatatgtggtctctcccaggctgagctatatatatatatataatatatacatacatacatacatacatatatatgtg

SEQ ID NO: 440946 - DNA, 201 bp, Homo sapiens
tcacccatcagatccatagccttcataggttaggaatgggcaagtatcacccagaagaaagagatcattgttgattgagtgttgggtttgggatggggccraagaatttgcattctaacatatttttctaacatgctgatctttagagcactttgaaagcaacctagagagataatagtcttgaaagtcaagtttactgag

SEQ ID NO: 440947 - DNA, 201 bp, Homo sapiens
taaagaaaacaacagtattctgggagaaggggcggtggtgctagggattacattttaaccctgtcatgttatttccaggacagatataattcagaggtaaytcaacatgttataaataatgtgattttcatatatttgtttaaaatgccacactcttgtaatcttcaccttttatttagttccaaaatttcaacaaatgac

SEQ ID NO: 440948 - DNA, 201 bp, Homo sapiens
gtactgttctttgaagcacaataatttccaattttgatgtattccaacttacctattttctctttcattgctgtcatatctaagaaacgattgcctaattyaaggtcatgaagtttttcacctatgttttcttttaagagttctatagttttagctctcatatttacatcctgatccatttagaggtttttttttaatata

SEQ ID NO: 440949 - DNA, 201 bp, Homo sapiens
aggattttaaaatctgcaatgacagggaccgtgttcttgcagtgttattattctgcccacagtacagtgcctggaagacaggaggtgcccaactgctattractggatgggtaaataaataaagatgaagctggtgcaaaaatctccctaataagaagatgcaaagattcatgagtgtctggaaatctgccagtagtcccc

SEQ ID NO: 440950 - DNA, 201 bp, Homo sapiens
catttctggaatacaacccacctggtatcaagctgaagaggaactgagtaggttctccttggtattctcatagaaaaaggtgaaaacatatactattagtygatatttgttgtaaaacaaatgaagtcttttattctggttgaaagtgatggaaagacaataaaaaatcctgaaacataaagggaaaatttttggctcatg

SEQ ID NO: 440951 - DNA, 201 bp, Homo sapiens
ctttcattccttgggcttagagccattcagggaaaatgagggtaaaactggcaggactgagcacccaaccccaaagctcttggtttacctgaatgtgactkttctaaattgggcaagcagaagtgtgtcttttcacaacaactcatcagaatgggagcgccaaagaaaaaggagggcagataaagaaaacaacagtattct

SEQ ID NO: 440952 - DNA, 201 bp, Homo sapiens
ctcttcaaactttccccagcccctctaaaacctaatttactacatgccagcaagaagtatggactgaggctccaaaagatgcctctatgctcttccctctrtctgaaacacccttccctgttgttcaccagcatgagtttctctcatcctttgagtttcagtcacccccttcaggaagcttccctgaagcgggagctaggg

SEQ ID NO: 440953 - DNA, 201 bp, Homo sapiens
tatttgacccctctgagctccaggtctttttgcaaatcagagataaaaatagtacctggcacttagggttattattaataatactaaatatatgcttagcrcagtgcctagcacacagtaagtactcagaagacactaaccaatattatttaatactagtaccagagtttcaatgttagaagaaggcttgacagtggtcaa

SEQ ID NO: 440954 - DNA, 201 bp, Homo sapiens
tctaatgtacagaaaaatttgagaaccaatggagtaatggttcaaggcttgcactttgaatctagacagatcttagtttcaatcccggctttaccactagwccacatgactttgggcaagttatttgacccctctgagctccaggtctttttgcaaatcagagataaaaatagtacctggcacttagggttattattaata

SEQ ID NO: 440955 - DNA, 201 bp, Homo sapiens
accttggctatactgtttcttattcagttaattgttgcaaaaagaaaaataaaaacatcagcaggcctatatgccttcgctttcatcttagcagtgcctgytaacagtgaaataatgtgctcattttcatattcgcactgattactctaggggcgcagatttaccagagagacatatcatgaaacccagcaaagggatact

SEQ ID NO: 440956 - DNA, 201 bp, Homo sapiens
ttctaatgtacagaaaaatttgagaaccaatggagtaatggttcaaggcttgcactttgaatctagacagatcttagtttcaatcccggctttaccactaraccacatgactttgggcaagttatttgacccctctgagctccaggtctttttgcaaatcagagataaaaatagtacctggcacttagggttattattaat

SEQ ID NO: 440957 - DNA, 201 bp, Homo sapiens
taacccccagtacctcagaatgtaattaccttgtagaggtaatcaagttaaaataggacattagaaggagttctaacttatgtccttataaaaagaagttyggatccagagacacacacaggatgaatgccatgtggacacaaagacagatattggggtgatgctaccacaggccaaggaataccaaggcaaacccgcaga

SEQ ID NO: 440958 - DNA, 201 bp, Homo sapiens
  misc_feature (1)...(201): n = A,T,C or G
attaatagcgtctttccctcatcagcgatgccagtagaagaaggcacatgttctagtttctttgtttgcaaattagagaatattggaaaattatcctgtantttaaagatcaaaaccaaaatggcctggccaatctgggttgatgcttcagtttcttttttttttcttttcctttcttttagagacggggtctcactcttt

SEQ ID NO: 440959 - DNA, 201 bp, Homo sapiens
aatattactttgtagaggaagggacacgtgcctcagtttgatccaatgagatgcagttccttgatcttgaggaagagtggaggaactctccttttgctatrtttctaaccagacaacctgaggctgctcgtggacattttgataccacatgggaagagcctgtccaagataataaccaacaaagaagaaaccagggcagat

SEQ ID NO: 440960 - DNA, 201 bp, Homo sapiens
aggaggagcagcgggaggaggggtcagaggagaagcgggcgcggggaggaaaaggaggaggaggcagaggcggtctgggccgggccgggcctgacccctgygtcccgggggcacaggcgttcttaaggctgcagagccctgggtcccccacccggccccggttcactttgagcggtcccaaggcctgagggcctactgtcc

SEQ ID NO: 440961 - DNA, 201 bp, Homo sapiens
gaaatgtgctttccctgctcctaccccatttttaactagaccctctcttttctgtatcttattgctccagtcctattcaatttggattctcttcccaggaktttctccatagtgtggaataggatcctgtcttgttagggggctttggttaaatgcttttaagaatttgtctggcccagattgatctagcaccataagacc

SEQ ID NO: 440962 - DNA, 201 bp, Homo sapiens
tgtaacaaacctgcacgttgtgcacatgtaccctagaacttaaagtataataaaaatgtatacatattaaaaaaaaaaaagaattgaatgaacatggaacyatttgaacttgcagaaaatgcaatccagacaggcaaaactttttaagtagaacaaaaaaggaagactgagaagaagggaaaaggagagaaggaaaagaaa

SEQ ID NO: 440963 - DNA, 201 bp, Homo sapiens
tgtaaatcactagatatgcaacatttggttatcctcacaacttcaagaaggctacactaaaatcatctcaaggcagtattcggccctgtgcttaaagatcyccagagaaggaacatttccaactgccaggtaccaggaagtttttcctaagcctaactataattctctcttctgtaatataagcccagatactacccagct

SEQ ID NO: 440964 - DNA, 201 bp, Homo sapiens
cacaagagagactagatagcatttctggggagagaactccttcccagggaggatgaaggtagacaaagttgaactattaacaaaactttaataattgttgygagtgatacttctgagaatatcattgtgcccatcacttgattcatgtactggacattcccccttaaaataccctgtgactcttatagggagataggcagg

SEQ ID NO: 440965 - DNA, 201 bp, Homo sapiens
aacatttacatttgattttttaaaaactggagtgcttactagggtgtagcattatttaagggtcaatgaaagagatgaaagtgtatgagatctgaagaccygacatgaaggagccttgagtattattacatagataagatacaactaaagcatgcagatattttgaatcaatgtcaaaattagtactaaaggcagtgatgg

SEQ ID NO: 440966 - DNA, 201 bp, Homo sapiens
gtgatacacacctacttcacttgtcatggcctgaataattattgactcttccagaactattttgcactttcaaagggaaaatatttgctttgctttcagayagtcaaccgattaagctgcattctctaaaagtaattccagaaggggactttcaaaatagttataatagtaacaacttgggtaaaatagtaacacttttga

SEQ ID NO: 440967 - DNA, 201 bp, Homo sapiens
caaggactgggataccagactagaaaagcaatttggagccagattttgagaaccttgaacgccattccaaagaatgtggaccttcagcttgataaaaacartttgccaaagttaataattattccaaaaagaaattagagctggtgctattttacattacctttcaaaattcattgtaagtgagatggagttggtggaagc

SEQ ID NO: 440968 - DNA, 201 bp, Homo sapiens
agcaggcactgatagggaagtccaaggatgccaggtagggatgaattcccactaaattagaaagaaagtaaaggaagagagctggaggacagtagaagacmgtcttggccattttgttcacttgaatggattcagtttgtgactactcacatcccctttattcatatatgcaattctgataatggggacatgattttgctt

SEQ ID NO: 440969 - DNA, 201 bp, Homo sapiens
cttcaagtagagtcacatcttatatgggaggtaaagttctaaagttgtcacataaaaagagtcatgtacattcaaaattaccttcaaagtttcttaaaacyacatgacattttagagaatgatgtaacatctttcagtaaattcagtacaactattttcccaacattcaatagatttctgtttctttggtgaagccagatt

SEQ ID NO: 440970 - DNA, 201 bp, Homo sapiens
aatcctgtcattctcatgaagattgactgtatgaatgaaagagcattagttgactcatttattctgacatttctttcatcatttttagttttatccattcwctgactcctattactaaatatatgcactataatggtgctggacactgttacattgttcatgactccttctaaaatctcacaatctgatcaaatacttcaa

SEQ ID NO: 440971 - DNA, 201 bp, Homo sapiens
atggccatgcctacctaagtaaggaaggtagagaatactgtgttgggcagagcagtagagtggtgaagtgtctagctgctactgccatgctttgtgagcarcaatggactcctccatgtgcataacacttttaatcacttcggcactgatcttctaagactaaggacattcccctgcataagcacactaccattgtcaaag

SEQ ID NO: 440972 - DNA, 201 bp, Homo sapiens
ttttcataaggtttagctgggactggaaaatctacttcctagctcactcacgtggttgctggcaggcttttgtttcttgctgtttagacttctccataggmtacctgagaatcctcaagacatggcagttggcttccctctctccagggctgctttctgacatggtagctatcttcctgtagaatatgatgagagagaaag

SEQ ID NO: 440973 - DNA, 201 bp, Homo sapiens
gacatgaccaaatttttaaaaagacaggaatccattgctaacagacctgtcttatgagaataccaaaggaagtctttcaggctaaaagtaagtgacaccaraagataactcaaattcacagaaaaaaaatgaaaagcaatggaaatggtagatatgtaggttaataatataaaaggctctgtatttttttctcacatagta

SEQ ID NO: 440974 - DNA, 201 bp, Homo sapiens
aaagttttcctgtatgcaaaagataaaaagaaaaaaaaacttctctctccctatattttcattttttgtttttaaagatttattgtgatcagagaatatgygcttttgatcattgggaaaaaacagatttgttattcttctgagaactatcaggttttctgggtcatcaggaagaacctcaggttcctaatgtgtagccct

SEQ ID NO: 440975 - DNA, 201 bp, Homo sapiens
ataatttttacaaaaatttgttttcggatttcatcttgtcaaagacttgatatgagttatagctgaagtattgtgttaccaagatatgacttttcagaatygtgtgttataataaattacgttattcacaagagcatcttcagtaagacataactaacactatgttatcttgggtacaataaataaagtgaatacatactg

SEQ ID NO: 440976 - DNA, 201 bp, Homo sapiens
atcctattggcatccccatttatctacagtgagaaccttgatacttaaaaaaataaaaatatctacacacacacacacacacacacacacacacacacacwctctgtctctctctctctaatttgctccaatacatacaaaatagattcagaattacagcaataatacttcaaccaacaataacaaaactactgagaaaat

SEQ ID NO: 440977 - DNA, 201 bp, Homo sapiens
aaccagtggtgcatttgcactttgctgcctttgctctggaagttcattttcttttgtcctgcttacagtgatacagaacagctgctggccacattggcaaratatttgaagattgttatttgcttttcagcttcttcttcttaggttaaataaatggtgtttcttttgtgtttctctttggggccaattttctcatcattt

SEQ ID NO: 440978 - DNA, 201 bp, Homo sapiens
catggatacagcaactacctaagggaaaaggtggatctacatacaaaattgatcctgtatatttcctcccacaatgccaccaaaatatggctggaaaatgkcaccaaggcctcctaattatcaaatctgatagtcatttgttttatttgatactcaatttgttatttgactctgttgaatacatctttcttgaatttcttt

SEQ ID NO: 440979 - DNA, 201 bp, Homo sapiens
gcttcctctgacttctccagacatggatacagcaactacctaagggaaaaggtggatctacatacaaaattgatcctgtatatttcctcccacaatgccaycaaaatatggctggaaaatggcaccaaggcctcctaattatcaaatctgatagtcatttgttttatttgatactcaatttgttatttgactctgttgaat

SEQ ID NO: 440980 - DNA, 201 bp, Homo sapiens
  misc_feature (1)...(201): n = A,T,C or G
tgataattcgataggaagataagggaatatattctgaaaggttaagtgacgttctctgggtagcactgcttgcaagtgatcaaatgatgaaaccaaaactnatactctagccatctctctctgaaccctcatggttataccacactgccttgcttccctagcaatgctcagaagaacaactctggactactggaatttttc

SEQ ID NO: 440981 - DNA, 201 bp, Homo sapiens
gatacggctagattaaaagtaaaaaggatgaataatatatgccatgctaacactaatcaaaagaaagctgaagtggctatataaacattagacaaagtagrttttagaacaaagaatattaaaagggttaaaggagataatttcataatgataagtgggctaattcaaaagaacaaaacagtcctaaatacatgtatacct

SEQ ID NO: 440982 - DNA, 201 bp, Homo sapiens
ggatctcagtgctaataaactaaaacatgacttgtatggtttctttacaccaattctttactcttcctgtcacacgtgtgcaaagcctgggaccaggctgygtagtgtacacaatggaatataatcagcaatccccacccagagattctacttaggagaagacaagacccctggagtgggagacagagtagaggtacatgt

SEQ ID NO: 440983 - DNA, 201 bp, Homo sapiens
ccaatgcatagtcctatttattgaaagcagatcaaccaacaaacaaggtttaacagataaatagcaagattgccaatatagtcagctttttataaatccartaagtaggctttgtaagcatttacataaaagcctcagtttgaaatctgagattgcatctgacaaatctattgcaagtataaattgtgctaatttcaggag

SEQ ID NO: 440984 - DNA, 201 bp, Homo sapiens
cagtcatcttctgatctgttggccttgccatgcccaaataatcttaaaaacatgtacgaaaacatggcttcattcttttttatgtagatatccagttgccycagaaccatttgtcaaaaagaccattatttcccccactgagtggtcttggtccccagtcaaaatcaatttactatagatatatgggtttatttctggact

SEQ ID NO: 440985 - DNA, 201 bp, Homo sapiens
gggacttggttattatgcccgctcagctcaggttgactgggcccttttaattggttgctgtggatttcctttttttttttttttttttttttttttttcaraaaacttactttctcccctaatctctcaggtcagaccttgcaagtaaacagcttaggttttggtttggtgatcaggaacattagcatgagtgactccagt

SEQ ID NO: 440986 - DNA, 201 bp, Homo sapiens
aaatttgtgctttcttttatatttactttttaggtatctttaccagttttctttatttcttcatatggattcaaattatagtctattgacctttcattttrgcctgaaggacttccttgagtagtttttgaagagcagatttgctgccaatgagttaccacagtttttttgcttatttgaaagtgtcttgatttctccttc

SEQ ID NO: 440987 - DNA, 201 bp, Homo sapiens
aatattcatctcattattttagtgttgtcatagaatatcatgtgatagtaatatcagatcttggggtggtctctcaggaagaaaaatatatatatatacayaatgtatatatgtacttatatacaatatgtgtatatacacatatatacatacgtaaaaataaatattttttgttatttaaattaataggcacaaattata

SEQ ID NO: 440988 - DNA, 201 bp, Homo sapiens
aggggacttggttattatgcccgctcagctcaggttgactgggcccttttaattggttgctgtggatttcctttttttttttttttttttttttttttttmagaaaacttactttctcccctaatctctcaggtcagaccttgcaagtaaacagcttaggttttggtttggtgatcaggaacattagcatgagtgactcca

SEQ ID NO: 440989 - DNA, 201 bp, Homo sapiens
gtgttaactataaatgaaaaaaataagttaggctatattaaaattaaaactctattcatcaaatcatactattaagagggttaaaaggcaggccacttagsaaggaagttttaagtaaattcatatttaagattcatatccacaatatataaagaactcctatatcacaataagaaaaagacagcccaaaagaaaaatggg

SEQ ID NO: 440990 - DNA, 201 bp, Homo sapiens
tccttctgccatgattataagtttctcgaggcctcctcagccatttggaactgtgagtcaattaaacctcttttctttataaattacccagtctcagggamgttcttaatagcagtgtgagaatgaactaatacatatcccttgctattagactattggttatcacattctgaaatcactaatatctagaatcctagccgt

SEQ ID NO: 440991 - DNA, 201 bp, Homo sapiens
tatcctatgggaacaaaagtcatgatctattaagtattattgtattttagaaacttcaagtgtctttatgttcttttctttccttttaaatgccacttaawgcattgattgttagggtcccacacaatttgggaagcattaagataactttatcttgctagatatgaactttattgtcctataacaccaatgctttccttc

SEQ ID NO: 440992 - DNA, 201 bp, Homo sapiens
gcttacccacaggccacacttgacattttaagtcgaagtcatttttggattatctgaatgcagggagaactctggaaaagattcttgtgagtcaaaacttytagtttgatagccaaataattagacctactttattaagtttttctctacccaaatttcaccagacttttatctaattgtattatgaatgtagtaagaaga

SEQ ID NO: 440993 - DNA, 201 bp, Homo sapiens
tttagactgatttctcctccaagatttagacctagggtttagactatttgtgggattctacttgtgtatggttactttagacatcactgtcctcaccaaayctgtttctctcttcatgttcagtgcagtgtcactccctgtcttgtcattctgtctgtcagaatcccctgcttcccttacctcttgcctgcacttctatag

SEQ ID NO: 440994 - DNA, 201 bp, Homo sapiens
actgagttaatacatgcaaagcatctagaacagtgccaggcaagtagtatgtgatctgtgagtgatagctatgattaaatgctagcaattagaaataacaraatttcttcatcttttttctcttctaaaaacatttgcttattaagggggcctgacttcctcttgtgaattttttttccctgtatctcctccttttctttt

SEQ ID NO: 440995 - DNA, 201 bp, Homo sapiens
aattgtttattttacaatgaaacatttcaaaacaaaacgagacaactaatgcatctctgccatctgttctgatgaagcgtggggaaagaatagatgggggygaaatattatatgcacagttcccttcctccccttcaaaactttcagtaacatgctgccaatggctgtggcatggatatcacccagttttacggtgtgtgg

SEQ ID NO: 440996 - DNA, 201 bp, Homo sapiens
taatagtttctaaatgcttagctgatttatactgactggaattgtcccatctcttcctagcaatcgaatctggcaaattaatcatttaaccttttctgcgmcatggacaagcctcactgtgaggtcaccagtgtcacaccaagtatggctgcccattgacagaaaaagtttgtgctggaattgtgaatgtgctcccccatc

SEQ ID NO: 440997 - DNA, 201 bp, Homo sapiens
agattctcctctaccccgatctattatctataggatttgttggaccctatctataatatttttaattttataattatatcccttttaaacattctttaagkccctttaacctttctattctataaatggtccacaaaaacattttggtttttccacactataagctaagacagtccctgaaatcagaatgacctggattcc

SEQ ID NO: 440998 - DNA, 201 bp, Homo sapiens
gcccagcttaccattgcatttactgcacaaattctgaattcaggtccctcacctcgtatatgtgaaactccttggaagcattcacttcactttaaaaagtytgcagcatgttgggactctcttctcttgtgttttgccataaaattcataaaccagggttccttgtgctgagtgcaaaggaaaaatgaagtactttcacaa

SEQ ID NO: 440999 - DNA, 201 bp, Homo sapiens
tgatccgtaaactcagtagtgaagtcatttaggggacaacgaagcaaagggcagatacaggagaaaaagcagtgagttgtccatttttttcctgggatttmtgagcttgttgacgaactgatttatcagccctattggttatccaagctgtgaagcctgtagaaaaagtggtgttgtgggaaattgcagttgattttgtat

SEQ ID NO: 441000 - DNA, 201 bp, Homo sapiens
cttccattcacattctttacttttgactctatccttttattcccctcccacctcttaaacaaggaagtctttgcccttttcaatacaaagtttccatttgrctccttcaggccttttccagctgattacctcagttacccatagtactgctaggagttaaaaggagtaagagagaaaaggggaaatgtgcaatggctgaag

SEQ ID NO: 441001 - DNA, 201 bp, Homo sapiens
aaccataagaaagctgtagtggctatactgttaccagataaaatagactttaagacaagaaatatgctatagagggctattttatgataaagggtcaataraccaggaatatacaaaaattataaatataaacacacctggcaatagagccccaaaatacatgaagcaaaaactgacaaaatcgaaaagagaaatagaaca

SEQ ID NO: 441002 - DNA, 201 bp, Homo sapiens
catatctgtaaaagcatttatcagtaaaaggctagtattcagaatatgcaaagaactctcacaaatcaataatttaaaaaacaaacagcacaattatctaraaaatgggcaaaagacttaaaagagtacttcactaaagaagagatgtgaatttactatggagttataagaattctacactgaaaactacaaaacattgct

SEQ ID NO: 441003 - DNA, 201 bp, Homo sapiens
acttactatttactttatgagaacagtgatgataaagccaagatgccatttaattaataactttactttggcagtgactatctccagggaccaaaaatatkggaaaccttaattgacctctccacatatagaacacaggcctctcttttttcttttttaaattgaaagtatagaaaaaacaaatcatttgctctcaagatg

SEQ ID NO: 441004 - DNA, 201 bp, Homo sapiens
tagttggtatgttgtgtatgcacatgtgtgtgctagcgtgggagaggggaggggaatggtgctgtccttgtgcaaacaatcaacatagcttctgtagcagkgtattctgttattgtgattttatcacctaccaatgacatgtaagcagggtttattgactgacattcttattttttcgatactttttaaattgaattgctc

SEQ ID NO: 441005 - DNA, 201 bp, Homo sapiens
gcgtttttaattttacagcatattgtatgtatttagaactttattcccccagggttgtatttttagtatttttccatgtcgatatacatagatatatttcrttgatttttactactgtacactcttccattttatgaatatatcacaatttatttgtccatttccctactgatagacatcaggttgctctaaatttttact

SEQ ID NO: 441006 - DNA, 201 bp, Homo sapiens
tacagaggcccatgtctttagaggttcaacagggaaataatagtaccatctcttttaaaaaagcaaatataacatataaataaaaaatatctatggcaaastttttctgctttaagaaaactgcaggctctgtaagccaggcatggtggcttatgcctgtaatcccaacactttgggaagccaagacaggagaatagcttg

SEQ ID NO: 441007 - DNA, 201 bp, Homo sapiens
aatgttgcatttttttcatgaggagagggactagatactcaaaaggatagatattatgttcttttcattggtagtgggctggcgtattccacatgcacacrgagtttgagaagtttttgatgttgactatttttttccataagttattgggattcaggaggtatttggttacatgagtaagttctttagtggtgatttgtg

SEQ ID NO: 441008 - DNA, 201 bp, Homo sapiens
gcatagccatagaaaaatgaatcacaaacctaaccaaactagcaacaaaaacaataaatgttgcatttttttcatgaggagagggactagatactcaaaargatagatattatgttcttttcattggtagtgggctggcgtattccacatgcacacagagtttgagaagtttttgatgttgactatttttttccataagtt

SEQ ID NO: 441009 - DNA, 201 bp, Homo sapiens
ttcttcacttattatcatttttcatgtggagtataaaatcaattttgtaattttgatagttacaacccatgctagaatggaaattcctcacaccttgcacyttccctacttttctgaattgctatgactactccttgttggaggaaaagtggtacttaaaaaataacaaacgactctctcaaaaaaattacattaaatcac

SEQ ID NO: 441010 - DNA, 201 bp, Homo sapiens
cagacacacacagtcttttgctgagggtcagaaatgcaagtgttcagttaaaaataacctccatcatcaaatttttcaggttcagcatttgcagtgacgtraatctcaggtgggaaataagggaaaatgattgaaacctatttcaatcacccattttcatattatggaaacaaaacaaagataataatatggaaacaaaga

SEQ ID NO: 441011 - DNA, 201 bp, Homo sapiens
tagctccattttaatgtccctgagaagacccatgtatcactcacaagtgtggggagaaaagtttgatctttggaatttgttctttaaataatggaatgacrtcccatatgtcacctcatcatcgagatcacgccctagcagatgtacacatttccctgcaaacaaagagtaaacaggtgtgtgaggtggatatgttagcgc

SEQ ID NO: 441012 - DNA, 201 bp, Homo sapiens
tctggcaaattagttatcaggaaaaggcatattaaatacctagaaaccacttacttaccacgtatcagactgataattcttcccaggttcattcattcatygggaaaaagagccagaggagtgacagaaaagaaagaaaaaaaaatcatttgaaattttagcactatttttccctattaaataaaaaacaccttggtctgg

SEQ ID NO: 441013 - DNA, 201 bp, Homo sapiens
ttggttactggtgagttgagaataatgtgatgagtgtttaacctagaaatgcctgtatatattgtatttttttagcatagccaaagtgtcatgcacaataracacaatgctttgccatctaatttgataacagtcatctacactccactgtacctgtcatttgaagtccacttttctcttcttttactgttttgagatgat

SEQ ID NO: 441014 - DNA, 201 bp, Homo sapiens
ctcagaaaattatttttgatgcagtgttatttgcactttttatttttgtgaaaaaattctactgtgatgatatattcaatttaattttttatttctatgaytattggttactggtgagttgagaataatgtgatgagtgtttaacctagaaatgcctgtatatattgtatttttttagcatagccaaagtgtcatgcacaa

SEQ ID NO: 441015 - DNA, 201 bp, Homo sapiens
ccatttgacttgtgttcgttatgtgcctggcactcaattgctaagaaacaaactttagttcgttttcattcccttgctgctgcactttcttcaaacacatygtcagatgggaatttagaactagagtaaataacaatagctccaacttatgagtacccattatgtgctagatattttactggttggtaacaattcttaaaa

SEQ ID NO: 441016 - DNA, 201 bp, Homo sapiens
gctttctggtaaatatttaggctgtatggggttgggagattgttttggtttttgctaatacaaacattgatgcatgtctattgttgacatgcttttggaarcatatctttatttaggatcaattcctcacagaagaatagctatgtcaaacgatatttgcatttttaacttagctaggttgtgctgtgtattaatcttaaa

SEQ ID NO: 441017 - DNA, 201 bp, Homo sapiens
tgtgtgtgtgtgtgtgtgtattttcacttttcatcctcctaacacctctgtgaaataagcagagcagagaattcttatttacatttaacaagtgaggaaamcaaggcacagatcttggccaaccagggtcacgtaatgttattccaggacaagagcccaagcccctcatgacccgtttctatttacaggcaccatgctgct

SEQ ID NO: 441018 - DNA, 201 bp, Homo sapiens
gtagaagtaaaatttaaaatatgttattaaataggaaaataggcctatgcaaattagatgaagttctggcaagccaagtacaatgcaaaaactcagtaatktaagaatatgatagaccaagactgagtaagtttaagtttcacagaaagagctcaaactaataggcaaacacttgatgaatgtgagcttgtgcagagaact

SEQ ID NO: 441019 - DNA, 201 bp, Homo sapiens
tggtggttgccaagggctgggagaagagggcaatggagagtgagtgtttagtgggtcagagttttagtttgggaaggtaaaaagttctggagatggatgayggttatgggtgctcaacagtgtgaatgtacttaatgccacagaactgcacatttaaatgtggttaaaatcatcacttttatgttatgtatatttaccaca

SEQ ID NO: 441020 - DNA, 201 bp, Homo sapiens
agaggatggcatgaaaaccaggttaagcattcttctatttacttcaagctgtgtagtcagttagagatggttcacatcacttcaggtcccacctgagcagktctgactgctgctcactaaaacctatttgtgggaaatcataggagaaacataaacttggattttctccttaaaatggaggaaggccagggataaaattga

SEQ ID NO: 441021 - DNA, 201 bp, Homo sapiens
tcaaggctgcagtaggccctgactgtgccactgccctctagcctgggtgacagagcaagaccttgtgtcaaaaaaaaaaaacaaaccaaaaaaaacaaacmaaaaaaagaatatacaacatattagatgtactattttaacaattttttaagtatacaatatgatattattaactatagttgctaggctatacaggggatc

SEQ ID NO: 441022 - DNA, 201 bp, Homo sapiens
ctttagaaacgatgtgccccatcagtatcattgtgcctctgcccaagacttaaatttcaagagagcatcctattgacctgacatgggtcttattcccaccycatggctagggaattgcagcatcttggattataatcctattgcattgcatgtaatcaatgggacaaagtaacacctcaaaataaatataggtactgccat

SEQ ID NO: 441023 - DNA, 201 bp, Homo sapiens
tgctgcagtttatttatttatttattttaatttttgtgggtacatagtatgtgtgtgtgtgtatatatatatatatatatatatatatatatatatatatrtatgtgtgtgccatatatatatatatatggcatacatggagtttaaatgatccttgccattaggttgccagactgggaaaataagctgaagcgtgatttt

SEQ ID NO: 441024 - DNA, 201 bp, Homo sapiens
ctgcagtttatttatttatttattttaatttttgtgggtacatagtatgtgtgtgtgtgtatatatatatatatatatatatatatatatatatatatgtrtgtgtgtgccatatatatatatatatggcatacatggagtttaaatgatccttgccattaggttgccagactgggaaaataagctgaagcgtgattttat

SEQ ID NO: 441025 - DNA, 201 bp, Homo sapiens
aaaaatgtgcagtgcctttgagaatgggtggagagtgatagtaaatcaggaaactggcagttgtatttaggcattaagctaacaatgagaatatttgacaytattggtgctaatgtttctttttttttccttaaatttttgcgtagttttcctctgtataaacagtgtctcaaagggacattcctaactggagtagaatat

SEQ ID NO: 441026 - DNA, 201 bp, Homo sapiens
taatttccgatctttttttttttttttttttttgagacggagttctgctcttgttgcctaggctggagtgcaatggcgcaatgtcagctcaccacaacctyggcctcccaggttcaagcaattctcctgcctcagactcccaagtagctgggattacaggcatgcaccaccatgtccagctaattttgtatttttagtaga

SEQ ID NO: 441027 - DNA, 201 bp, Homo sapiens
atcatccatgttatagcatgaatgagtacttcattgcttcttctgactgcataatattccattgtatggatataccgtaattgtttatccattcatcaatkaatgcacatttgggttgcttcaactttttggctattataaatattattgctataaaaattttacgaacattcatgtacaagtttctgtctgaacatttct

SEQ ID NO: 441028 - DNA, 201 bp, Homo sapiens
tctatgtagttggtatgttgtgtatgcacatgtgtgtgctagcgtgggagaggggaggggaatggtgctgtccttgtgcaaacaatcaacatagcttctgkagcagtgtattctgttattgtgattttatcacctaccaatgacatgtaagcagggtttattgactgacattcttattttttcgatactttttaaattgaa

SEQ ID NO: 441029 - DNA, 201 bp, Homo sapiens
tcataaaggaatctaagagagcatagccatagaaaaatgaatcacaaacctaaccaaactagcaacaaaaacaataaatgttgcatttttttcatgaggakagggactagatactcaaaaggatagatattatgttcttttcattggtagtgggctggcgtattccacatgcacacagagtttgagaagtttttgatgttg

SEQ ID NO: 441030 - DNA, 201 bp, Homo sapiens
cagagacctacttgaggaggcagtctgtccgttctcacatctcaaactccattctgggagaaccacaactctcttcaaagctgtcagacagggacatttargtctgcagaggtttctgctgccttttgttcggctatgccctgccctgagaggtggagtctacagaggcaggcaggcctccttgagctgcagtgggctcca

SEQ ID NO: 441031 - DNA, 201 bp, Homo sapiens
tgactgttttatttacccttttacttctggtactagtaagtatttcttgacctaccgaaggagttagagttgtcctttcttcatttctgctattttctctscctttttttctcatgataattagttaccttaattctcactcccttctctttctttgtactattgttaatttttttattaatttaatttattaaatttctc

SEQ ID NO: 441032 - DNA, 201 bp, Homo sapiens
cacatctcaaactccattctgggagaaccacaactctcttcaaagctgtcagacagggacatttaggtctgcagaggtttctgctgccttttgttcggctrtgccctgccctgagaggtggagtctacagaggcaggcaggcctccttgagctgcagtgggctccacccagttggagcttcctggctgctttgtttaccta

SEQ ID NO: 441033 - DNA, 201 bp, Homo sapiens
caggaggctgaggcaggatggttctctcttggggtgtcctcatgtggcagtgagggcaaggcagctccttttgacttcttttcattagggcactaaacttmttcattagggctcttctcaaaacgcatcacctcttactactatcatatttggtattaggttctaacatatgaattttggaggaacaccaacattcagacc

SEQ ID NO: 441034 - DNA, 201 bp, Homo sapiens
tactttcctgttaaaaccttaaatatctaaaacatctgtttcagttccttttcaggtctgtgaacaatatagctaaaacctgggttttgctttccttaacraaggttaaaacaaaagtttcttagaaaaattgcttggtaatagctattcccaagcctgacaaaaagaactagaagggtacaccatattatgttcacatca

SEQ ID NO: 441035 - DNA, 201 bp, Homo sapiens
agtttataaaaaaatagtatgccaaaaaaaattccaaataaataaattgcattatataaaacaccaaattgataatagttcatttgggtttctgtaacaarataccttagactgagtagtttatgaaaaaaaatttattggccgggtgcagtggcttacacctgtaacctcagtacttcaggaggctgaggcaggatggtt

SEQ ID NO: 441036 - DNA, 201 bp, Homo sapiens
tgacccccctgccttcaatctctcatggcttcattctactctccacctaggggctttccaaaatgcaaatctgatcatatcaccatccttcttaaaattcrtcagtggaatccagtgacctgtcagataaacggctcaaactcctaaacctgatgtgacccaggctcatctctgcccacattaaccacaaaagcttccttc

SEQ ID NO: 441037 - DNA, 201 bp, Homo sapiens
gagttccattttggttccccttttctctatctgcactactactgccataacttgaggccctcctctctgaattattgcagcggccttctcacctgaccccyctgccttcaatctctcatggcttcattctactctccacctaggggctttccaaaatgcaaatctgatcatatcaccatccttcttaaaattcatcagtgg

SEQ ID NO: 441038 - DNA, 201 bp, Homo sapiens
ccaaccctatagtgggaccaaaactgacagtacactgctcactttgaatttttttaaaaaattggtcaggtccctcaaatttaagaataatgagacaattrcaaggtttctggtgactgaagctgctgcattataggactcatgagagtccccacaaaggtcagttccaggcctggcccttgctgtatgttgcccattctg

SEQ ID NO: 441039 - DNA, 201 bp, Homo sapiens
tgggccaggacttccaatattatgttgaataggagtggtgagagagagcattcttgtcttttgctggttttcaaagggaatactcctagcttttgcccatycagtatgatgttggctgtggattgtcatggatggctcttattattttgaggtatgttccttcaatacctagtttatcgagagtttttcacatgaaagggt

SEQ ID NO: 441040 - DNA, 201 bp, Homo sapiens
gagagacacaaggctaagatatcaaactcccctgggagatgggagtcagcaccaggtagaacagtggccaaggtgtatgtatgttagccccacggggccamacatcatcacagtatttccaaacaagaacttttattaatcaagccagccaaggaaagctgttctgttttgaaaggagcgtattcaagtgagaaacggctt

SEQ ID NO: 441041 - DNA, 201 bp, Homo sapiens
cagggtttcaccatgttggccaggatggtctcaatctcctgacctcatgatccacccgtctcagcctcccaaagtgctgggattacaggtgtgagccaccrcgcttggccgaaaattgttattaaaagatgcagtgtgagtatcaaaatacaagggatggcttagacatctccatctgctgtcaaggctcatgcataccaa

SEQ ID NO: 441042 - DNA, 201 bp, Homo sapiens
cataggggatagtaacccggctgcctctgcctcaaagaaactattttcttccttgcacatagaattttcaagttgcctgcatgggtaaaggaaggcatcayagctaggagctgccctcctcaggaaccccattaagacctgtcaaggttttctacttcctttctatgtttattaatcctagaataaacacggtaacatttg

SEQ ID NO: 441043 - DNA, 201 bp, Homo sapiens
caacacataaatataacttctatgggttttatggtcctgctgtttctcaacaagaagtgcatagaatttccaccaatgttgtcttcaaattcaagcatctyaagacttacaaaccttgatattccgaggtcttctcttcagataaggcaggttatatctccaaatgcagctgtttctttggggtttttctagatcagtact

SEQ ID NO: 441044 - DNA, 201 bp, Homo sapiens
gaccctgccgtgttcattcagtagatggagaaaaatcttgctttatctatccatacttcttaggtcctgagaacagaactgatacctcattcattcatctmttcatccaagtattcaacaattattcattgcttaccaattgccaaaccccaaagtagttactattagaaatgtaaaattgcatttctaaaatttaatagt

SEQ ID NO: 441045 - DNA, 201 bp, Homo sapiens
acttatgaagcttagtttggctggatatgaaattctggcttgaaaattcttttctttacgaatgttgaatgttggtcctcactctcttctggcttgtagartttctgccaagtgatccactgttagtctgttgggcttccctttgtgggtaacccaacctttctctgtggctgcccttaacattttttcggtcatttcaac

SEQ ID NO: 441046 - DNA, 201 bp, Homo sapiens
gatattattgattgttctaactttattaaaactccaaccttccctggttttcatctcaatgatataatgagttctaaacatttatcaactgagtttggaamcacagagatattagtgtagatctcatctttgtcatcttgtgaacctgagcaaattacttaacccaagtcagtgagtttcttcatccataaaactaggtgc

SEQ ID NO: 441047 - DNA, 201 bp, Homo sapiens
gatggtctcggcctcttgaccttgtgatccaccggcctcggaactcccaaagtgctgggattacaggcatgagccactattcctggccagtacacattatyttaaaattactaatatgattgcctaattgtaatttaaagaagaagaaaggaatatcataataataattgaaaatgcttggggacaactacactggaagac

SEQ ID NO: 441048 - DNA, 201 bp, Homo sapiens
tattttccaactctgttatttgctttacttatcctccctttttgtatctctccccttttagcttttgcaaatcaccttcatcaagctatcttatttatttwtatttatttatttatgtatttggatcaacctactaaccaaaatcaaggcattataaatctttcagtgagggctactgtaatctgaagcctactttctagt

SEQ ID NO: 441049 - DNA, 201 bp, Homo sapiens
aaatctttattgacaaaaatggaaaatttgataataatagttaagtataattttctataatataggtctactgatgagaaaaattgaattcttttattgtrggagagtgataacatttcacttaattggggttcaaagttagtgcttcctatcatcagaatcaattgcccatgcccatctgttaatgctgattcataatga

SEQ ID NO: 441050 - DNA, 201 bp, Homo sapiens
tctttgatttagtatcgtcctgatatgcttgactattaggatgccacctctaaaggcttttttaaaacgtttctaaagtgtgatatacacatagacacccstgaaggcttttaaaatcaagtacggtcatgttggatttttgcaatacacttgttatgtgctaggtattgtgttaaacacttactattatcttgtttaatt

SEQ ID NO: 441051 - DNA, 201 bp, Homo sapiens
tgtgtgtttccatgggtaaaaggaaagggactcttgattctaaactttgggcaataagaaactattaatatatgttagaaatactactaattcatttatgmaaataaagagtacttgggttgtttcacttatagaaacagactatatataaatatatatgagatatacatatgtatatgtataagatactatatacatata

SEQ ID NO: 441052 - DNA, 201 bp, Homo sapiens
tctaatttcatggattttgtattttcttaattaaaaattttaaaaggctgaccaaatgctcaagaagacacaaagtcccaccccccaaaagccagagaccrtgtttttcctgtgatctctggatcctcacagagagtgtagagggaacagctgcagtttttaggaaggaaaataattgtgttgcaaaatacctcttgacat

SEQ ID NO: 441053 - DNA, 201 bp, Homo sapiens
ctccattctgggagaaccacaactctcttcaaagctgtcagacagggacatttaggtctgcagaggtttctgctgccttttgttcggctatgccctgcccygagaggtggagtctacagaggcaggcaggcctccttgagctgcagtgggctccacccagttggagcttcctggctgctttgtttacctactcaagcctca

SEQ ID NO: 441054 - DNA, 201 bp, Homo sapiens
tgagctgcagtgggctccacccagttggagcttcctggctgctttgtttacctactcaagcctcagcaatggcgggcgccccttccccagcctcactgccrcattgcagttggttctcagactgctgtgctagcaacaagagatgagcaacgctctgtgggcatgggaccctccaagccatgcacgggatataatctcctg

SEQ ID NO: 441055 - DNA, 201 bp, Homo sapiens
aaccactgaagatatctgaaaagagttatctgaaagaggaaggaagaggcctttaaaattaagtggaaaatacaacccccatcatttcacctcagtgatgsttaatagtttggacctagctacaaatagaacagcgagcatttggtcagctgcctggaggaagaccacaaacacaaagcagggatgacgtaagatccagtt

SEQ ID NO: 441056 - DNA, 201 bp, Homo sapiens
ttctccagttgttggacatggaggtatgtaggcctcatagaattatttgggaaatttttcctgtttctgttcaggggaagcattttaatacaagtttggtrttatttctttcctaaatgtttagaagaattcactggtaaaaccatttaggcctagagttttctttgtggtaaaattttaaattacagattccatttctta

SEQ ID NO: 441057 - DNA, 201 bp, Homo sapiens
tattatactcaaatgatgagtaggaagtattgacataggaaaacttcttcactgccctcaaaagtaatagagaataaaatagggcagatccactcataaaytgaaacatttctgagcagaaggattggagacaatgaaaacaaatcctatctgtcaaccaaagaaccactgaagatatctgaaaagagttatctgaaagag

SEQ ID NO: 441058 - DNA, 201 bp, Homo sapiens
agataaattagtataatgtgtaccaagcagctggcatatagtagctgcttaatgaaaagtagctatagttattatttttatttttatcactaattgtaggwgtagtttttgattcagagcaggcactgatagggaagtccaaggatgccaggtagggatgaattcccactaaattagaaagaaagtaaaggaagagagctg

SEQ ID NO: 441059 - DNA, 201 bp, Homo sapiens
gtaacaaccaccaaaacaaaaacaaaatgtaaatcctgtttcttcaacatattaatttgttctgtgagattttaataggcattccataaaaagcacatccrttccttagataggtttggaagggactgatataaaataaatcatgtaagttattgtcttctggactcccaggatctgcattgtgaacctccaagtgaaggc

SEQ ID NO: 441060 - DNA, 201 bp, Homo sapiens
gtctataaatgctcagctttttggaataatagaaagtagagtgtccttttacacttgcctgcaaatatacaatccagttattttctgaatggcacagtggratgcatggaaagcagacttatagctaaccaatagcattattttatttaaggaaaccgtttttatgatgaaggttcagaatcctccctttaaggaatcttg

SEQ ID NO: 441061 - DNA, 201 bp, Homo sapiens
ttaagtatggaaaaggtaagtagcttgcccaaagtcacagagcttataagtgactgagcctgagcgagggttccttcctaggccatctggctctacagacytaaactgctgtgccttggatttttcagacttaacagaaaatagattttctattttgaatatagtgttttctctgtagtcagattactaagatctcacaat

SEQ ID NO: 441062 - DNA, 201 bp, Homo sapiens
ttaaagtagggaattctaaatattagtgaaaagagaggaagggaaggataaaaaaaagaatgggaggaatactggcattcttcactggataagctttagtmcaaatttgttttttttcttcacaaatgtatcttatataagtagttttgtattatattgcctcagatttatgagacttgtttatacactgactggacattt

SEQ ID NO: 441063 - DNA, 201 bp, Homo sapiens
gcacccacctcataggaaggtcatggaaattaagggggatgatgcatgtgaagcctttagcctagtgtcaagcacacagaagatgatcagtgttatctgtyacataccactgttattgtcttccacagtcttcaaatttctgtcatccctgtcatcactatcatccttgtcatcgttgccatccttgtttcaccatcatcc

SEQ ID NO: 441064 - DNA, 201 bp, Homo sapiens
tcttagatgtgaaacaaagatcatgatagcacccacctcataggaaggtcatggaaattaagggggatgatgcatgtgaagcctttagcctagtgtcaagyacacagaagatgatcagtgttatctgtcacataccactgttattgtcttccacagtcttcaaatttctgtcatccctgtcatcactatcatccttgtcat

SEQ ID NO: 441065 - DNA, 201 bp, Homo sapiens
aattgtaaaatttgtatagcgagtggtaaaaacccaaataaagacagtggaatacaaaggaggggaagaaatagaagatgtttaacagattaaatcttcargcgttggatgtggaagttgagagggaaaatgagactgaagtttctaaagtcattgagcaattgtgaaaatactttcaatctctggaacagggaatgccaa

SEQ ID NO: 441066 - DNA, 201 bp, Homo sapiens
ttttttctactataccttttagaaagtaggaacttaaaaaaaaaaaaaaagaaaaaaagaaaagaaagtccagagaagaatggctgatatgaaaaagtcakgaatggaaaataggtccttcaaaagggcaaataaaaggaatttgggttacttttctgaaaatgggaaaggctaagagatggcagcataatttttaaaact

SEQ ID NO: 441067 - DNA, 201 bp, Homo sapiens
tgtataggaatgcaactgatttttttgtgcattatttttgtatcctgaaactgtactgaagtcatttatcaggtctaggagtcctttggagcagtcattargctttctaggtataggatcatgtcatcagctagcagagataattctacttcttcttttcctatttgtattacttttatatcttcttcacacctaattgct

SEQ ID NO: 441068 - DNA, 201 bp, Homo sapiens
tagtttcaggtttattttcctgtgcttatttttgataaaagtaaataaaaatataaacatttacccctatttattatacaaaagaggcgtattattcattrtacattctttggcacctttttttaaaaaaaagaaacctaatattatatcctgggaatcaccctagtatcaactcataaagatcttccttcttttttctca

SEQ ID NO: 441069 - DNA, 201 bp, Homo sapiens
tattccaggatgcagggaaaaatgtgcagtgcctttgagaatgggtggagagtgatagtaaatcaggaaactggcagttgtatttaggcattaagctaacratgagaatatttgacattattggtgctaatgtttctttttttttccttaaatttttgcgtagttttcctctgtataaacagtgtctcaaagggacattcc

SEQ ID NO: 441070 - DNA, 201 bp, Homo sapiens
gatttggttctcagcttgagtgttgctggtgtataggaatgcaactgatttttttgtgcattatttttgtatcctgaaactgtactgaagtcatttatcargtctaggagtcctttggagcagtcattaggctttctaggtataggatcatgtcatcagctagcagagataattctacttcttcttttcctatttgtatta

SEQ ID NO: 441071 - DNA, 201 bp, Homo sapiens
agtattagttttctcctttatgaaactaaaagctaaaggactatcttttctttctttagagatatacaagggtcaaatggaaagagtacagggatgtagtyctggactttactaatgaggagggtcacttaatctctttcttatcagtttcccagctgtctaatggaggctgtgatactttctctctagagctattgtatt

SEQ ID NO: 441072 - DNA, 201 bp, Homo sapiens
gtttcacagctctgcaggctagaagtcttcatagcattggtacggttagttccttctgaggattttggggaaaaatctactctatgcctttcccctagctyatggtagttttctggtaattgttggcattctttggcttgtagaagaatgactataacttctgcatttatcttcacatagcattctccttgtgtgcatatc

SEQ ID NO: 441073 - DNA, 201 bp, Homo sapiens
tcaatagtctcaaatggtagtttttaatcttcttcaagaatctgataagaggtatatatacacacacatagaaatactgcaataagatcccatcatgtgarcagttgtaaagaaaagaaatggaaactataccctaacaccagtctttaaataacagcctcatccttccaacctggtttcctcattcctaaaatgaagcca

SEQ ID NO: 441074 - DNA, 201 bp, Homo sapiens
tttcagatttcacataagagggcatcatagtccaagctgaactctaaaatcaatagtctcaaatggtagtttttaatcttcttcaagaatctgataagagktatatatacacacacatagaaatactgcaataagatcccatcatgtgaacagttgtaaagaaaagaaatggaaactataccctaacaccagtctttaaat

SEQ ID NO: 441075 - DNA, 201 bp, Homo sapiens
agatacccacaggctgacttcctgaatgctcctctcaaaagaattcctccctggccaagaccaaacttctatttattcattgcagtagatgtgagaggcasagaatcaatctggtgaacaaattataatcaatttaaaaaacaattttggttaactaaatgaatccctaatgggcaggttgatagaacggaccatttctgg

SEQ ID NO: 441076 - DNA, 201 bp, Homo sapiens
agcaccattttacaaatggcaaaacttaggcctaaagagatcaagtaatttgctcaatcacataaccaataaatgataatgaagttaacttttattttttkagtttttctatagatacacaaaccagtgtcactatattcactatattgaccagtttgttgaggggggaaaaaagtcatttaaaaaagcaccagtctaata

SEQ ID NO: 441077 - DNA, 201 bp, Homo sapiens
gtgagcactctagtctgggagcaagaacagacaggctttacagtgtgatggctaacactgactgagtacttactgtgtgccaaatactattctaagaagcrtacatgcatatctcatttcatcctaacagcaacccaatgagacgggactattattagcaccattttacaaatggcaaaacttaggcctaaagagatcaag

SEQ ID NO: 441078 - DNA, 201 bp, Homo sapiens
atatctccacctttccacagacacagggtgtcaccagatctttgatctgtacccacttacatgtcctgtactcaggcccagtatagacaggcctcttcccygagacgagagagaaacagtccaagtccttttgctacagagcaggagcaaagtcagctttcctctcctgcatcaactgaagttcagtgtaacatgatacag

SEQ ID NO: 441079 - DNA, 201 bp, Homo sapiens
gtaatttatccctttttttcaggtgcctccctttgagaatttttttttcatgttgaccttggatagtctgataattataggccttggtgactatcatcttmtgtagtatcttgcgagagttttctaaatttcttatatctggatgttgatgattctagcaaggttagtaagattttcctgaattactgtctccaatatgtt

SEQ ID NO: 441080 - DNA, 201 bp, Homo sapiens
ccttcctgtgtacatgtgttctcattgttcaattcccacctatgagtgagaacatgcggtgtttggttttttgtccttgcaatagtttgctgagaatgatkgtttccagtttcatccatgtccctacaaaggacatgaactcataatttttatggctgcatagtattccatggtgtttatgtaccacattttcttaatcca

SEQ ID NO: 441081 - DNA, 201 bp, Homo sapiens
tatatttgggaggctgaaaatggactgatttggtaggagctaggctttatggtggggaattttagaagataaaaccagagagatggatttggggcagattrtggtgagccttggaggggaacatctgttgaacaaatgacaggggtcttagttcatcaaaaatactgaatctatctttcaaaacctggctggatacattga

SEQ ID NO: 441082 - DNA, 201 bp, Homo sapiens
gactgaagtgccctgtttttaattccccaaccccgtggaacaagaattatataaaaagccctagctggcaacaatctggtgagaatatgacctttagaaamgatgtgccccatcagtatcattgtgcctctgcccaagacttaaatttcaagagagcatcctattgacctgacatgggtcttattcccacctcatggctag

SEQ ID NO: 441083 - DNA, 201 bp, Homo sapiens
atataatatgtgtgtgtgtgtgtatatatatatatatatatatatatatatatactttgcagaacaccttgtggccattgggatacattttcaaggcgttyatctggggcatgaagaattttctaggactgtgaacttaagtccccttaaacacacactcataccaccaacaataacagcatattgttctcttcaaaggaa

SEQ ID NO: 441084 - DNA, 201 bp, Homo sapiens
taattattttgaaaacttattttacatttagattttctttcaattcttccccattagaaatgaaatggtagaaatatctcctcctggaagccatcccagayggccataaaattcagctggccaggatgctctgagagacacaaggctaagatatcaaactcccctgggagatgggagtcagcaccaggtagaacagtggcc

SEQ ID NO: 441085 - DNA, 201 bp, Homo sapiens
gtgaggctttgtttggcaggaaaggatcacagagcaacctctcttatacttccaaacccacaatgtagttattttgaacaaattaaatctgcgttaccacyacattccacctgcttcttatttttaataaatgtgtctttgtctaatgaactaatatagctaatgaggcagctcttagccaccattaagtgaggattataa

SEQ ID NO: 441086 - DNA, 201 bp, Homo sapiens
tatatactagccctcctccaggatcttaatagacatgaactacatatctaggtagagccaagattggaccttctgactctaaatccaatgctcttattattttatttatttattcattcatttatttatttatttatttatttatttatttatttatttatttattttgagatggagtttcacacttgttgcccaggctgg

SEQ ID NO: 441087 - DNA, 201 bp, Homo sapiens
atatactagccctcctccaggatcttaatagacatgaactacatatctaggtagagccaagattggaccttctgactctaaatccaatgctcttattattttatttatttattcattcatttatttatttatttatttatttatttatttatttatttatttattttgagatggagtttcacacttgttgcccaggctgga

SEQ ID NO: 441088 - DNA, 201 bp, Homo sapiens
tatactagccctcctccaggatcttaatagacatgaactacatatctaggtagagccaagattggaccttctgactctaaatccaatgctcttattattttatttatttattcattcatttatttatttatttatttatttatttatttatttatttatttattttgagatggagtttcacacttgttgcccaggctggag

SEQ ID NO: 441089 - DNA, 201 bp, Homo sapiens
atactagccctcctccaggatcttaatagacatgaactacatatctaggtagagccaagattggaccttctgactctaaatccaatgctcttattattttatttatttattcattcatttatttatttatttatttatttatttatttatttatttatttattttgagatggagtttcacacttgttgcccaggctggagt

SEQ ID NO: 441090 - DNA, 201 bp, Homo sapiens
ctcctccaggatcttaatagacatgaactacatatctaggtagagccaagattggaccttctgactctaaatccaatgctcttattattttatttatttattcattcatttatttatttatttatttatttatttatttatttatttatttattttgagatggagtttcacacttgttgcccaggctggagtgcaagggca

SEQ ID NO: 441091 - DNA, 201 bp, Homo sapiens
taaacttagaaatgagtagcaatctctcaattaactgctttaggtattatttttctcagtgaagttgatattccagtactgtgtaaaatctagtttaaaawttccatgatccttcatcatgtttccaagaagaatttacagtttgtatgagtttgccagggatgctgtaacaaagtaccacagactgggtggcttaaacaa

SEQ ID NO: 441092 - DNA, 201 bp, Homo sapiens
cctccaggatcttaatagacatgaactacatatctaggtagagccaagattggaccttctgactctaaatccaatgctcttattattttatttatttattcattcatttatttatttatttatttatttatttatttatttatttatttattttgagatggagtttcacacttgttgcccaggctggagtgcaagggcatg

SEQ ID NO: 441093 - DNA, 201 bp, Homo sapiens
aggtaacttaagaacctaggatgaagagatataaaactgtattttattttttagccaaatactagactgacctgaagttaacattgaaaaaaattatttawtatatgtttgaatgccctgagttactacataaacttagaaatgagtagcaatctctcaattaactgctttaggtattatttttctcagtgaagttgatat

SEQ ID NO: 441094 - DNA, 201 bp, Homo sapiens
ctccaggatcttaatagacatgaactacatatctaggtagagccaagattggaccttctgactctaaatccaatgctcttattattttatttatttattcattcatttatttatttatttatttatttatttatttatttatttatttattttgagatggagtttcacacttgttgcccaggctggagtgcaagggcatga

SEQ ID NO: 441095 - DNA, 201 bp, Homo sapiens
caggatcttaatagacatgaactacatatctaggtagagccaagattggaccttctgactctaaatccaatgctcttattattttatttatttattcattcatttatttatttatttatttatttatttatttatttatttatttattttgagatggagtttcacacttgttgcccaggctggagtgcaagggcatgacct

SEQ ID NO: 441096 - DNA, 201 bp, Homo sapiens
taatagacatgaactacatatctaggtagagccaagattggaccttctgactctaaatccaatgctcttattattttatttatttattcattcatttattyatttatttatttatttatttatttatttatttatttattttgagatggagtttcacacttgttgcccaggctggagtgcaagggcatgacctcagctcat

SEQ ID NO: 441097 - DNA, 201 bp, Homo sapiens
catttagcacatataggcatgcagtaaaaaaattctgttgaatctttagcttcgatgaggcaaaaatgtggctgtttcttcctacatctccacctaggaatttaaaaaaaaaaaaaaaaagacaaaagctcactttttccatcctgaactttccattctggacattcttactaaaacttggcttcattttatgtgaatatt

SEQ ID NO: 441098 - DNA, 201 bp, Homo sapiens
ttggtgtgggactttttttcaatgatagctgtctccccatattcagaaaggaactgttgcttttctccagtttagcttgtccttctaatgggtatattggkcaggacaatcagacttcccacaatgtcacctaatatctctccctggcatcccatctgctcatagtgaatgtccttttctccctctttgtcttctccttct

SEQ ID NO: 441099 - DNA, 201 bp, Homo sapiens
taaggggcctatattgctgatctccaataacaactctggacaccaaggctcatgtgagcctttctggttggcaacattgagcatgtgttgtcatacattgytgctgggagaattagacacatccccatgagactccatggggaggggaccacaaaaaccttgcacctggtttcttctggacttccaaacatgtaccttctc

SEQ ID NO: 441100 - DNA, 201 bp, Homo sapiens
tcttgaaatattcttccagataagagtctttttgtatgcctgaggccttggaccatgctgtacagataaatttatcctgacgatgtgatttatggtgaagrcttttttttttcttttaggtagggggaggctggaatctcagtagctgaggtcagttaaggggcctatattgctgatctccaataacaactctggacacca

SEQ ID NO: 441101 - DNA, 201 bp, Homo sapiens
aaggctgaggactcaggtgggttgtctaaacgccaaaacctgggaaaagaggactgccgggcaggctgctgaggtggtgtgggcctgcacccaagaaagtytaaggcgaaaacgctataccctcagctccctgagcggccgtgtagcgcggcccatgcgccgagtggcgcgcctcgtcacgtgatcggggacttccgccgc

SEQ ID NO: 441102 - DNA, 201 bp, Homo sapiens
acttagaaagaaaggatgtcatcagtgattctaaaatgctagttaacagctttgttacgagagtagaaggagtaataccagcagagaacacataaataagragcaaatttctccacatgaatgatctgcagatactcagaaatagcatgtttgtcacaggttaggtttcccagaaagcaggctctggacaagatttgcatg

SEQ ID NO: 441103 - DNA, 201 bp, Homo sapiens
aagcctcagtttgaaatctgagattgcatctgacaaatctattgcaagtataaattgtgctaatttcaggagattcttaaacccataaactcagcaccacrctccttgttcagtaaagcaaatctcttggtcaatattccttcagatgtggtgaatactgagtaattaatcttaacaaagttaatctttgtccacttccat

SEQ ID NO: 441104 - DNA, 201 bp, Homo sapiens
ttgcaagtgtggctgaaaggaaaaaatgcacaaccaactgccctttccatcttgaatagaaatagattctgccttcacctttaatgacacattggcactgygtactcaggctgctgtaaattaatataattcccaaagtgactaccaaatgcccatggtgtaacctcttcacacagtaggatctgatctgatattcctctg

SEQ ID NO: 441105 - DNA, 201 bp, Homo sapiens
gaagtgttggggcttataatgccagcaataattagaaggttaaattaaattacaccagcaacatctggagcttaagattacatgttcttactgaatatccrctagcagccctttgagatttatttaaagcagccacagtaacaataactgtctaatcttttatgactgaaaagagtcttgagtttagtgttgtgcttttaa

SEQ ID NO: 441106 - DNA, 201 bp, Homo sapiens
catatgatctagcaatccaatcccgcttctgagtatatatcccaaaacaccctgaaatcaggctcttagagagatatcagcatttccatgtttattgcagygtttttcacaatagccaagatatggaagaaaatgtggtctatacaggcaacttaatattatttggtgttaaaaaagaaggaaatcttaccatgtgctgca

SEQ ID NO: 441107 - DNA, 201 bp, Homo sapiens
ttagcacatataggcatgcagtaaaaaaattctgttgaatctttagcttcgatgaggcaaaaatgtggctgtttcttcctacatctccacctaggaatttaaaaaaaaaaaaaaaaagacaaaagctcactttttccatcctgaactttccattctggacattcttactaaaacttggcttcattttatgtgaatattttt

SEQ ID NO: 441108 - DNA, 201 bp, Homo sapiens
gtgatatatatcagatatatatctatgtagctggcagtgcttattcaagagcacacataagataacccttggggatccataaatatttgtgaagggctttrtaggacattagagatactgcattttaataggtagggtcaggaagcagcacaaatagaatccttaagcttcttgggcttagtggaagccttttttctgttt

SEQ ID NO: 441109 - DNA, 201 bp, Homo sapiens
aaaagctattaacagagctgggacataagatcaagattagtgaagagcagagcataagaaaagatcaaagaaagaaagacatttactactagagcagaagkatatgggagcaaggtatctggaagcttttgagtgggaaccaggaaacctttgtctcaaccctccacctcgatgcattatatgacctcagacagttaatct

SEQ ID NO: 441110 - DNA, 201 bp, Homo sapiens
cacatttttggaaatgtgaaatgctctggaaagtctcagcaatagcattgaacaagtagaagaaagaaattcagaactcaaagacaaggtcttcgaattaycccaatccaagaaagacaaagaaaaaagaataagaaaatatgaacaaagcctctgagaagtctgggtttatgttaaacaaccaaatctaagaataatcaa

SEQ ID NO: 441111 - DNA, 201 bp, Homo sapiens
attttagtttttgtttgtatggtatatcttttcccaaccttttaccttcaacctaggatctaaagtgcacctcttatagagagcatagagttggatcaggttttttttttttaatccattatgccaaactaagccttaaatcagcgtttaattaatttacatttaatgtaattcctgataagataggatttgtgtctgcca

SEQ ID NO: 441112 - DNA, 201 bp, Homo sapiens
cagattctaaatgtgtcatagctttgtccagtactgctgaccctgccgtgttcattcagtagatggagaaaaatcttgctttatctatccatacttcttargtcctgagaacagaactgatacctcattcattcatctcttcatccaagtattcaacaattattcattgcttaccaattgccaaaccccaaagtagttact

SEQ ID NO: 441113 - DNA, 201 bp, Homo sapiens
taaatgataatgaagttaacttttattttttgagtttttctatagatacacaaaccagtgtcactatattcactatattgaccagtttgttgaggggggaraaaagtcatttaaaaaagcaccagtctaataaataggatggttgagattttgttttggataagaaatcatcagtctagccaattcagtcaaaattaataa

SEQ ID NO: 441114 - DNA, 201 bp, Homo sapiens
acacagatttataattattactttctaaagttgtctttcaaatccgataaagagctacaaacagaaagaaatttgtgctttcttttatatttactttttargtatctttaccagttttctttatttcttcatatggattcaaattatagtctattgacctttcattttagcctgaaggacttccttgagtagtttttgaag

SEQ ID NO: 441115 - DNA, 201 bp, Homo sapiens
ttccggaacaatgtttatgcatctctctattgagctacatggctgtctctatttatctataatatagatattatagatgtatatatatatatatatatatacacacacacacacatacatatatatttctttatatttattcttttaaaaatataaaagggaataattttgcataaatgattctataccttgtttgactca

SEQ ID NO: 441116 - DNA, 201 bp, Homo sapiens
tagtttgctgagaatgatggtttccagtttcatccatgtccctacaaaggacatgaactcataatttttatggctgcatagtattccatggtgtttatgtrccacattttcttaatccagtctatcattgttggacatttaggttggttccaagtctctgctattgtgaatagtgccgctataaacatacgtgtgcatgtg

SEQ ID NO: 441117 - DNA, 201 bp, Homo sapiens
tccggaacaatgtttatgcatctctctattgagctacatggctgtctctatttatctataatatagatattatagatgtatatatatatatatatatatayacacacacacacatacatatatatttctttatatttattcttttaaaaatataaaagggaataattttgcataaatgattctataccttgtttgactcat

SEQ ID NO: 441118 - DNA, 201 bp, Homo sapiens
aactcataatttttatggctgcatagtattccatggtgtttatgtaccacattttcttaatccagtctatcattgttggacatttaggttggttccaagtmtctgctattgtgaatagtgccgctataaacatacgtgtgcatgtgtctttatagcagcatgatttataatcctttgggtatatacccagtaatgggatgg

SEQ ID NO: 441119 - DNA, 201 bp, Homo sapiens
ccggaacaatgtttatgcatctctctattgagctacatggctgtctctatttatctataatatagatattatagatgtatatatatatatatatatatacacacacacacacatacatatatatttctttatatttattcttttaaaaatataaaagggaataattttgcataaatgattctataccttgtttgactcata

SEQ ID NO: 441120 - DNA, 201 bp, Homo sapiens
attctaactggcgtgagatggtatctcattgtggttttgatttgcatttttctgatggccagtgatgatgagcattttttcatgtgttttttggctgcatwaatgtcttcttttgagaagtgcctgttcatatcctttgcccactttttgatggggttgtttgtttttttcttgtaaattcgtttgagttcattgtagatt

SEQ ID NO: 441121 - DNA, 201 bp, Homo sapiens
cggaacaatgtttatgcatctctctattgagctacatggctgtctctatttatctataatatagatattatagatgtatatatatatatatatatatacayacacacacacatacatatatatttctttatatttattcttttaaaaatataaaagggaataattttgcataaatgattctataccttgtttgactcatat

SEQ ID NO: 441122 - DNA, 201 bp, Homo sapiens
agattgacttggcaatgcaggctcttttttggttccatatgaactttaaagtagttttttccaattctgtgaagaaagtcattggtagcttgatggggatrgcattgaatctataaattaccttgggcagtatggccattttcacgatattgattctgcctacccatgagcatggaatgttcttccatttgtttgtatcct

SEQ ID NO: 441123 - DNA, 201 bp, Homo sapiens
tagactaaaaactgctgtggctatttcacactcattaggatggctattattaaaaacaaaaacagaacaaacagcaaataagtattggtgaggatgtggaraaattggaacccttgtgcatttctggtgggaatgcaaatggtacagcctatggaaaatgatgtggttatcaaaaaattaaagatagatttcccatatgat

SEQ ID NO: 441124 - DNA, 201 bp, Homo sapiens
ttagcaagttggaaacacatttgactcttttgaattctgtgccttggctattcaggagtctgtcatgtctgggcttactaaattctaccatgtctaggctrccgggtttaataaatagaaatacctgacatccagttaaattggaattttgaataaacagtgaagaatttagtgagtgtaagtatatcccatgcaatgctt

SEQ ID NO: 441125 - DNA, 201 bp, Homo sapiens
ggttactctccttgtatggattaaagcagaggggacttggttattatgcccgctcagctcaggttgactgggcccttttaattggttgctgtggatttccyttttttttttttttttttttttttttttcagaaaacttactttctcccctaatctctcaggtcagaccttgcaagtaaacagcttaggttttggtttggt

SEQ ID NO: 441126 - DNA, 201 bp, Homo sapiens
ttaatgtttcattttcttaaggcttttcttattttatacctctgctaccctcaagattcttaggatgttgtttttatttaaagtactgaagtattctactrgttctactgtttacttataattttaatttttttggtctttttttatttttttaatgtttttggtttacccccaaatatttggtaatttgatttctgtctc

SEQ ID NO: 441127 - DNA, 201 bp, Homo sapiens
ctagcctaggtgtgtagtagactgttcatcaaggtttgtgttagtacactctatgatgtttgcaaaacaacaaaattgccttatatttcttagaacatatyctcacggttaagttatgcatgactagttaaattcccaacatagacgattttctgggacccataattaacagagaatttcagactttgtgggtgataagag

SEQ ID NO: 441128 - DNA, 201 bp, Homo sapiens
atttgctaagaccattggaaaagtgcagtattagggtgggagtgacctgattttccaggtgccgtctgtcacagctttgcttggctatgaaaggaaattcmctgaccccttgcacttcccgggtgaggtgatgcctcgccctgcttcggctcacgctcggtgtgctgcacccactgtcctgcacccactgtccgacaagcc

SEQ ID NO: 441129 - DNA, 201 bp, Homo sapiens
actgttatgcatagctcttccatgtgtacttgatcttcctctctaccatgcacagaaattcctcaaacccctgacccttaaacattagattcaggaattcstaatctctcctcctagttttacttctagttatagcactcatctccaccccccaccctctgattttcagggattcaccagtttaatccaccttaagatcct

SEQ ID NO: 441130 - DNA, 201 bp, Homo sapiens
tgtgccacgttggtgtgctgcacctattaactcttcatttacattaggtatatctcctaatcctatcccttccccctccccgcactgcacaacaggccccrgtgtgtgatgttccccttcctgtgtccaagtgttctcattgttcaattcccacctatgggtgagaacatgcagtgtttggctcttgtctttgccatagtt

SEQ ID NO: 441131 - DNA, 201 bp, Homo sapiens
ggtgtaagtactatagttttggaggtagaaatttaggcagtattccatggtatccactacggtgtactccttgcaaccattcatacccgcttgcttcttayaataagttctaggccttcaggtggattagtgagatgagctacagctcctgccactgcagctggtctcatggccttaacaaatactcattatccttctcct

SEQ ID NO: 441132 - DNA, 201 bp, Homo sapiens
aaagtcatttaaaaaagcaccagtctaataaataggatggttgagattttgttttggataagaaatcatcagtctagccaattcagtcaaaattaataatytgtcttttgaagtaaacacaacctcaatgcactcttgaatgccagttctttcaaatgccatatacctttcctaaccttcttaatgagctccagttattcc

SEQ ID NO: 441133 - DNA, 201 bp, Homo sapiens
ctttctgcttttgcaatttttccatgcacacagtgagcaaaatccataaatgtattttcagatttcacataagagggcatcatagtccaagctgaactctraaatcaatagtctcaaatggtagtttttaatcttcttcaagaatctgataagaggtatatatacacacacatagaaatactgcaataagatcccatcatg

SEQ ID NO: 441134 - DNA, 201 bp, Homo sapiens
tgatcctgtatatttcctcccacaatgccaccaaaatatggctggaaaatggcaccaaggcctcctaattatcaaatctgatagtcatttgttttatttgwtactcaatttgttatttgactctgttgaatacatctttcttgaatttctttctaccctaggcttccaggattatctcttctctcaccaaccattctttca

SEQ ID NO: 441135 - DNA, 201 bp, Homo sapiens
ttcccaagtacactgtatttcacttaatacctaagaataaacgaggtagaatttgggaagtgctgagtcaagtgtctgggtaacctcctggtttctctttkctgcagttctttattcatcttgtgttaccaagcttcatttttccacagtagcattattttgctacttcctcataagtttaggatccattcttatatttag

SEQ ID NO: 441136 - DNA, 201 bp, Homo sapiens
agaacattccacttgttaactaattgcccacttgtcagtacttttgtcaatatctcattcgtaactgcttgtctatagcttgtacttttagagattactcrgtaacggtgcaggaactcaggaacattctataagatagaattttctagaacattctataaaatagaatgtcatctttttacttaaatatcatttgggcta

SEQ ID NO: 441137 - DNA, 201 bp, Homo sapiens
tacctagaaaccacttacttaccacgtatcagactgataattcttcccaggttcattcattcattgggaaaaagagccagaggagtgacagaaaagaaagaaaaaaaaatcatttgaaattttagcactatttttccctattaaataaaaaacaccttggtctggggggaattttttttgttcaaaatattattaaactgg

SEQ ID NO: 441138 - DNA, 201 bp, Homo sapiens
gtggcaatgtatgagggttccaatgacactatattcctgccagtacttgttattgtctctttgattttagccatcctaggaggtatgaaatgatatgccaytgtggttttgatttccatttccctaatgactaatgatgttaagcatcttttcatgtgctttttggccatttgtttataatctttggaaaaaacatctatt

SEQ ID NO: 441139 - DNA, 201 bp, Homo sapiens
accctcctcccattcttccccccaagtccccaaagtccattgtatcattcttatgcctttgcgtccttatagcttagctcccacatatcagtgagaacacrcgatgtttggttttacattcctgagttacttcacttagaataatagtctccaatctcatccaggtcactgcagatgctgttaattcattcctttttatgg

SEQ ID NO: 441140 - DNA, 201 bp, Homo sapiens
attgcattttttccctgtagcttacagttgtcttctactgggagtcaaataaatacatttagaagatgagaagaaaataacaataaggatgtgtgcgtgtktgtgtgtgtgtatgtgtgtgtatgtggagataatgtgtgtgcatgcatgcgacacacacacacagagatgtggagaatacaccttatcttgtatttgagc

SEQ ID NO: 441141 - DNA, 201 bp, Homo sapiens
tatttatgtttttattattgaattataagagttctttgtgtattttagatagaagttccctattggatatatgatatgcaaatattttactattcaatgtrttgactttttaacttcttgtttctagtctctgaagcacaaagtttttaattttgatgaagtccaatttatctttttgcccccctttggttgtttgttctg

SEQ ID NO: 441142 - DNA, 201 bp, Homo sapiens
gagcttttcaaagaatatttctgacttatatgcaagaaagtaagaaactcaagtgtagctaaccttgtctgattttaggaagccatacaaatattatttcraagagaattttcccatataaaataattcactacgtttaatgaataatttataataaatggtttgatatttcttatgaagttaagtgttactctttttttg

SEQ ID NO: 441143 - DNA, 201 bp, Homo sapiens
aaattttactctaagcactgcttacctacatccagtaaggcttggtatattgtgttttcattttcatttatttcaaagtattttctaacgtcccttgttakatctttgtcctatttaggtgtgtgttgcttaattcacatgtatttgtaaattttccaaatttctgtctatgtttctgtctattattggtttctaatatca

SEQ ID NO: 441144 - DNA, 201 bp, Homo sapiens
tggagaatgtctcatgtacacttgagaagaatgtattattctgctgttattgagtgaaatattttgtatatgcatgtcaggtttaattggtttatagtgtkgttcaagtcctctatttctttattgatcttctgtctggctgttctatccattattgaaagtgggaaagtgatgtcttcaaatattatttttccattcact

SEQ ID NO: 441145 - DNA, 201 bp, Homo sapiens
ggctagctagaactatgtttcttctaacatttacatttgattttttaaaaactggagtgcttactagggtgtagcattatttaagggtcaatgaaagagawgaaagtgtatgagatctgaagacccgacatgaaggagccttgagtattattacatagataagatacaactaaagcatgcagatattttgaatcaatgtca

SEQ ID NO: 441146 - DNA, 201 bp, Homo sapiens
cctgaaggcttttaaaatcaagtacggtcatgttggatttttgcaatacacttgttatgtgctaggtattgtgttaaacacttactattatcttgtttaattttttttaacaatctttaaggcaggcagtattattactcttattttacaggaaaacagatgcttagagggattaagtagctcgtccaatgtcacacagat

SEQ ID NO: 441147 - DNA, 201 bp, Homo sapiens
gaagtcaaggctgcagtaggccctgactgtgccactgccctctagcctgggtgacagagcaagaccttgtgtcaaaaaaaaaaaacaaaccaaaaaaaacaaacaaaaaaaagaatatacaacatattagatgtactattttaacaattttttaagtatacaatatgatattattaactatagttgctaggctatacaggg

SEQ ID NO: 441148 - DNA, 201 bp, Homo sapiens
gtcacctcatcatcgagatcacgccctagcagatgtacacatttccctgcaaacaaagagtaaacaggtgtgtgaggtggatatgttagcgcaggaaagcraaaggaggaatttatgtttttgactctaaaaatgggaaaaccatgagtcttgaatatgtcataagaaagaagtaaaccacctgctatgttctaggcataa

SEQ ID NO: 441149 - DNA, 201 bp, Homo sapiens
gtcttctgcactgacaaccaggagcagaaaagactcatttacgaaaggaaaagaaggaggaaagagagaagcttggtgaagaagagaggagagaaaaatawatatatatggctttttatttaattagtcttatacactgagccctgacctgtcaattgcaatgtttccttcctctgaaacttcatttttaaaaaatctcct

SEQ ID NO: 441150 - DNA, 201 bp, Homo sapiens
tccagtgtgtctgggaagtccaatctaatatctatatgccctagaattgaaatattaaatctttgagagaacttccgatttctcacaactttgctgttacaaaaaaaaaaagtgacatcttggtttttaaattggaatactttcctgttaaaaccttaaatatctaaaacatctgtttcagttccttttcaggtctgtgaa

SEQ ID NO: 441151 - DNA, 201 bp, Homo sapiens
aatagccataatgacatagttttcaatatcttatcaaagaaaataatccaactcatcttaaaagaagaaaagcaaatgaacaaacttagaatgtattcatrgaatttatcctcacaagaattttattgttagaatctttgagtaacaaacactaatataatatataataccttcaatggctgttttgcaaaatatgcagaa

SEQ ID NO: 441152 - DNA, 201 bp, Homo sapiens
ctgtcttctgcactgacaaccaggagcagaaaagactcatttacgaaaggaaaagaaggaggaaagagagaagcttggtgaagaagagaggagagaaaaawatatatatatggctttttatttaattagtcttatacactgagccctgacctgtcaattgcaatgtttccttcctctgaaacttcatttttaaaaaatctc

SEQ ID NO: 441153 - DNA, 201 bp, Homo sapiens
ctccaccccccaccctctgattttcagggattcaccagtttaatccaccttaagatcctgcaagagaaagatgctttactttctcatgtgtgtgtgtgcatgtgtgtgtgtgtgtgtgtgtgtgtgtatttgcagtcatcacaacctttcaaaacacaatgttgagcttctctttcctagattggaggatggggaaaggag

SEQ ID NO: 441154 - DNA, 201 bp, Homo sapiens
ctccaaaggaatgcagctcctcaccagcaacggaacaaaacaggacagagaatgactttgacaagttgagagaagaaggcttcagatgatcaaacttctcsgagctaaaggaggaagttctaacccatggcgaagaagttaaaaaccttgaaaaaagattagacaaatggctaactagaataaccaatgcagagaagtcct

SEQ ID NO: 441155 - DNA, 201 bp, Homo sapiens
tccaccccccaccctctgattttcagggattcaccagtttaatccaccttaagatcctgcaagagaaagatgctttactttctcatgtgtgtgtgtgcatgtgtgtgtgtgtgtgtgtgtgtgtgtatttgcagtcatcacaacctttcaaaacacaatgttgagcttctctttcctagattggaggatggggaaaggagt

SEQ ID NO: 441156 - DNA, 201 bp, Homo sapiens
tccaaaggaatgcagctcctcaccagcaacggaacaaaacaggacagagaatgactttgacaagttgagagaagaaggcttcagatgatcaaacttctcgragctaaaggaggaagttctaacccatggcgaagaagttaaaaaccttgaaaaaagattagacaaatggctaactagaataaccaatgcagagaagtcctt

SEQ ID NO: 441157 - DNA, 201 bp, Homo sapiens
tgaagcgagaagagaagtttagagaaaaaagaataaatagaaacaaacaaagcctccaagaaatataggactatgtgaaaagaccaaatctacgtctgatkggtgtacccgaaagtgaaggggagaatggaaccaagttggaaaacactctgcaggatgttatccagagaatttcctgaacctagcaaagcaggccaacat

SEQ ID NO: 441158 - DNA, 201 bp, Homo sapiens
ccttcctgcaaaatggcactttcatctgctattatgacatacgataaaattagataaataagcagtttactgttgattcaggaattgatacaaatcagtgsaaataataactataaaatagccctttaatgtgataactgaatcaatacaaaaccaatgagaaagcaataattatttaacaaataatttgaggaaaattag

SEQ ID NO: 441159 - DNA, 201 bp, Homo sapiens
cacattagactgtgatcttcttgagtacaaagagccatattctaatttcattgtgtctacagcacctaatacacataccgctaaactgccatataacaaamtaaatgaatgaatgaagtcatattgaaagtatactattctagccctctgtccagcaacagagtaaacttccaagttagttttgggataattctggaactt

SEQ ID NO: 441160 - DNA, 201 bp, Homo sapiens
tgcatgtgtctttatagtagcatggtttataatcaacaaaggactatcgttaggatccagaatttatgcaaggaaatatttccaaaattttatggagtgayattttgaaacatttgaacaagggaggatataccatgtccctagagggaaattgcaaatattatgaattttttccattatcccctgattaatttataggtt

SEQ ID NO: 441161 - DNA, 201 bp, Homo sapiens
cataaatatggcattttataccaaggttttctaactgtaggaagcatataaaaggaaacaccaaatttaaaaaatttgtgaaatatcttctcaaaccacawgtacaaatccaagtttgaggctactaaacaatacaatagtgtttagaccctgctgttcaaaaggctttggaaatttcaaaacatataaaatcttgattca

SEQ ID NO: 441162 - DNA, 201 bp, Homo sapiens
tcttccaattctaaaatattttaaagattttttgaaaaattcatgtgtattatgatcacaagcactagatgttttcatttgagcacaaactccaaagtagragcagtagaagttttcacttgagcaccaattcaaatccatatgcccaatgatgtcattaacaagttaaaaatacagaaatacgcattttcataaataagt

SEQ ID NO: 441163 - DNA, 201 bp, Homo sapiens
atcacctaccaatgacatgtaagcagggtttattgactgacattcttattttttcgatactttttaaattgaattgctctaaaggtggcaagagttaggcmtagagttagttgcacccacttctgcaagacagttgccaacctcaaacttgcaccatatattttaaccattacaataagccatgtttatttatccttcgga

SEQ ID NO: 441164 - DNA, 201 bp, Homo sapiens
tgcctttgcgtccttatagcttagctcccacatatcagtgagaacacgcgatgtttggttttacattcctgagttacttcacttagaataatagtctccartctcatccaggtcactgcagatgctgttaattcattcctttttatggctgtgtagtatttcatcatataccacagtttctttatccacttgttgattgat

SEQ ID NO: 441165 - DNA, 201 bp, Homo sapiens
taaaaatacagaaatacgcattttcataaataagtgtgactattagtccatggacaggccgaagttccctaaatagttctcagatcttgccatccacattmgttgatttttctgtatcagctgaaagcagaattctttttaaagggggaagcagtggtttctttctttagacttttgaaaatattaaaaaattttagataa

SEQ ID NO: 441166 - DNA, 201 bp, Homo sapiens
acaagctttctgctgagctctttttcattttaatgcatggatattagctatttttgcaaatagtggatcataggcaatatcaaaagctgctctggcccgcrtttttcttgagctaatagctatttgaaaattaagcacttgtccaaggccacacagtttattaggaccaaaatgaggctagactcctggtttccagacatc

SEQ ID NO: 441167 - DNA, 201 bp, Homo sapiens
tgtattagtctagatgccacttaccaatccagggtcagttttattataaatcatgttgactagttgtcaacatagttgacatacattctcgttaggttacyggataactgaaagtcaaattctatgctcctggtccaggggagatacagagccaggaagtgggatgattagggagttgtggagcaacagtggctgaaatga

SEQ ID NO: 441168 - DNA, 201 bp, Homo sapiens
ttctgcagaatggatgtggcactacctagttggaagattgtggggaatgaccaatgagaacaatttgaaacctacttggctaacatgtcctgctagaaggsaaagctaacccagatgggagatggggtggcatccaacccatgatggatgtcctggaaggacaggttcattgaagaggaaaataatttgggtgaggaatca

SEQ ID NO: 441169 - DNA, 201 bp, Homo sapiens
ccacacatgttctgcagaatggatgtggcactacctagttggaagattgtggggaatgaccaatgagaacaatttgaaacctacttggctaacatgtcctkctagaagggaaagctaacccagatgggagatggggtggcatccaacccatgatggatgtcctggaaggacaggttcattgaagaggaaaataatttgggt

SEQ ID NO: 441170 - DNA, 201 bp, Homo sapiens
agcttatattcctaggaaattcttaccttttccttcccctcacctttgtccacctattttcggcaactcttgaagtcttgtttgggcagatcccttccatyttcatgcctatcgtgctgctttagcacctcctgtctcgggcttgttaacaggttccccaggctccagactcttttgacttcaactcatctttaaaaccac

SEQ ID NO: 441171 - DNA, 201 bp, Homo sapiens
gaccagagaatctgaggaggaaataaatgaagctacaaagggagatcaaaggaaaatagggattcctgtatgtcatgctaaagagactctatcttgtagaytggtaattttcaatcctatgaaaccccacaggttaataatgggccactcaaatatattaaattctattctctggaacttgtaaatgttaccttataagga

SEQ ID NO: 441172 - DNA, 201 bp, Homo sapiens
tggatcaggttttttttttttaatccattatgccaaactaagccttaaatcagcgtttaattaatttacatttaatgtaattcctgataagataggatttrtgtctgccattttgctatttgttttctatatgtcttaagtcattttttattcccctatttctccattactgccttctttggtattaagtagaattcttct

SEQ ID NO: 441173 - DNA, 201 bp, Homo sapiens
tttgtgtgtgtgtgtgtgtgtgttttactacccagaaaaataaaatggtagtttctgcttcacccaagtgcctacatttgaaacacatatcatgcaagacmaactctcatcttgagttgctggtaggaaaaaaaggatctttctttatgccatttttcttcttcctattttcaccgtttgagatatacagtcatgtgccac

SEQ ID NO: 441174 - DNA, 201 bp, Homo sapiens
gaatttgtcattataaaagatttagaattatgaaattggttaaattatctaataaagttggtttggtagctgttgagattaaaataagctattactaaaamcctcatgaatttttgtgttatgcatccttcatccttaagattaataatttttacaaaaatttgttttcggatttcatcttgtcaaagacttgatatgagt

SEQ ID NO: 441175 - DNA, 201 bp, Homo sapiens
tgcttatttgaaagtgtcttgatttctccttcatttctgaaggatagttttgctgaatgtagaattcttggtagatgtttttttctctcagctttttgcaygtcatgccactgcattctgaccaccatagtttctgatgagaaatcagctgctaatcctattgagaatccctggaacataatgagtcacttctttcttgct

SEQ ID NO: 441176 - DNA, 201 bp, Homo sapiens
cattgttttcaaggagtctgcctgacctcaaactctccaggaagaaaggtcagcacattgattgctcatgtttccaaggtaggacacgcttggcaccaacrggtggcatgtctcctctgtgctgcctgctgtctgtgacgtcaaatctagcttcaagacattcacagctgctacagaatgttctgtttgagagttcaggag

SEQ ID NO: 441177 - DNA, 201 bp, Homo sapiens
tcactttcacttcctgcctccatagagccacaaggttaggcagagatgagaatttagatctttctcaggtcttagctgagcatgcagatagcactgagtaygctcacatccctacacatgaacttgtacttctagtttcccagcattatgtctgtgcttttcaaatcatcctgtggacgtatctttccacagcttctcctt

SEQ ID NO: 441178 - DNA, 201 bp, Homo sapiens
agaacatatgttgtttatttttatgcttgtttttattctttcaatcttgtttctcagttcctagtatatctgttatctgcctgacagataacagtattcartaaatagctgttgaattgaataaaaatgagtatttatatagatcaaatagttccaattcaggaaatatgtccagacttgcttaactaactcttaggggaa

SEQ ID NO: 441179 - DNA, 201 bp, Homo sapiens
ctgacaatttttgccagtatttttattgcttgtatggaggagagggttttcagagtcccttattttgccattttcattatcaccccatgtcctcttttaawaacatatatttttaataacatctctaactattctaaaatgaaattcatggataacataacctaccaagacatttttttgttttttagacggagtctcgct

SEQ ID NO: 441180 - DNA, 201 bp, Homo sapiens
gcagtcatcttctgatctgttggccttgccatgcccaaataatcttaaaaacatgtacgaaaacatggcttcattcttttttatgtagatatccagttgcyccagaaccatttgtcaaaaagaccattatttcccccactgagtggtcttggtccccagtcaaaatcaatttactatagatatatgggtttatttctggac

SEQ ID NO: 441181 - DNA, 201 bp, Homo sapiens
tcgggttaccctcaaggggaagcccatcagactaacagctgatctctcggcagaaattacaagccagaagagagggggggccaatattcaacattcttaamggaaagaattttcaacccagaatttcatatccagccaaactaagcttcataagtgaaagagaattaaaatcctttacagacaagcaaatgctgagagatt

SEQ ID NO: 441182 - DNA, 201 bp, Homo sapiens
aatttttgccagtatttttattgcttgtatggaggagagggttttcagagtcccttattttgccattttcattatcaccccatgtcctcttttaaaaacawatatttttaataacatctctaactattctaaaatgaaattcatggataacataacctaccaagacatttttttgttttttagacggagtctcgctctgtc

SEQ ID NO: 441183 - DNA, 201 bp, Homo sapiens
tgtcatcatcttagtgtggagggcaacttgactgataaagagaccttccttcagattttcagaaagtataagattccacatgattttcccagccacacagkactttttaactttcaaacaaattccagtcctaatatgaaagataaaaattaaatagaaacagagagaaagtatatcgatccttaccttttgctatatttt

SEQ ID NO: 441184 - DNA, 201 bp, Homo sapiens
ttgtctattctgttctctacctagactgtctcagtttaaatgtcctttccacagagggcattcctgaagtcctaatttaattaaaatggtttctctatttyatttttatgatttattttatacttatattttaattttctgtaactatacattgatttatgtgattatgtgtttaatgcctgttttaccttcaagttgtaa

SEQ ID NO: 441185 - DNA, 201 bp, Homo sapiens
ttgggagttaatttataccatccctcaagtcccaacacaaacagattcccttttccagaactcatggtggcaagattccatagaactccccagatgatggyagctactatcagagctctcaactctgacaggaattaacaaataacaggttacaaacaggaaacacagtgtctcatatccatggctccactgatgcatggt

SEQ ID NO: 441186 - DNA, 201 bp, Homo sapiens
acctggggcatgccatttaacttctgggagccctgcaggtctttgtaaagacaatatcaatgattacatgtaaaagcactttgtaaactgtaagcagttaygtaaataggcttgttattctcatttttgtctcagtctccaccactgtaacaaataatcttcctttttttttttttttttttttgctctgttctcctcgct

SEQ ID NO: 441187 - DNA, 201 bp, Homo sapiens
tgcaggcacaaagaatctttcagataaagttcctaggagcatgagctcacaatagaaatatatatgtattataaataaacatatataaagaaatatatatmgagagagataatataaaattgtgtgtgtgtgtatatatatagtgtgtgtatatatatttatatttatatatatatatatatatatctcaaaacagacaga

SEQ ID NO: 441188 - DNA, 201 bp, Homo sapiens
agtggcagaaagccagaattctgtcagagacggcttagaaaagcttaatgattaacaaatgggtcactgccttcaggctctgacctttagaactaaccaaytttagccttttggttatgttccttcaactcgttttatatcaaggaaaaaaaaatactctctaatggcacagtaccacccatccaaaaaaaggattcttag

SEQ ID NO: 441189 - DNA, 201 bp, Homo sapiens
acaaaaatggaaaatttgataataatagttaagtataattttctataatataggtctactgatgagaaaaattgaattcttttattgtgggagagtgatawcatttcacttaattggggttcaaagttagtgcttcctatcatcagaatcaattgcccatgcccatctgttaatgctgattcataatgaggttttacatat

SEQ ID NO: 441190 - DNA, 201 bp, Homo sapiens
gctacatatatgtacacacaaatatatggccatatatatttaatatatatgtattaaatataatatatattatatataaatgtatatatgtattaaatattatatatatatatatatgtatattttgagacagagtctcgcttcgtcacccaggctggagtgcagtgttgtgatctaggttcactgcaacctccgcctctc

SEQ ID NO: 441191 - DNA, 201 bp, Homo sapiens
agaacagtgtcagcagctcagaagaaaacccaagaaaaaataattcagtggaacatccttgtaagaaatgccacattgccagtgttttagacagcacagakgacagactgcataggaagtgcatggatatcagacatcagcatgtctgagttaaagagtggttcggagaagtccatctctaaatgcgagcctttagaatgg

SEQ ID NO: 441192 - DNA, 201 bp, Homo sapiens
tgtattataaataaacatatataaagaaatatatatagagagagataatataaaattgtgtgtgtgtgtatatatatagtgtgtgtatatatatttatatktatatatatatatatatatatctcaaaacagacagaaaaccatgcaattatgagcaatagtcgtccaacaagaacaacaacaaaaaaagccagagccaac

SEQ ID NO: 441193 - DNA, 201 bp, Homo sapiens
aatctttattgacaaaaatggaaaatttgataataatagttaagtataattttctataatataggtctactgatgagaaaaattgaattcttttattgtgkgagagtgataacatttcacttaattggggttcaaagttagtgcttcctatcatcagaatcaattgcccatgcccatctgttaatgctgattcataatgag

SEQ ID NO: 441194 - DNA, 201 bp, Homo sapiens
ctacatatatgtacacacaaatatatggccatatatatttaatatatatgtattaaatataatatatattatatataaatgtatatatgtattaaatattatatatatatatatatgtatattttgagacagagtctcgcttcgtcacccaggctggagtgcagtgttgtgatctaggttcactgcaacctccgcctctcg

SEQ ID NO: 441195 - DNA, 201 bp, Homo sapiens
atggctggggaggcctcaaggaatttacaatcatggcggaaggcaaagaggaagcaagcttgggccttctcacatggcggcaggacagagaaaagagtgasgagcgaagtggggagaacctcttacaaaaccatcagatctcatgagaagtcactcactattacaagaacagcatgaagggaaaccaaccctatgatccaa

SEQ ID NO: 441196 - DNA, 201 bp, Homo sapiens
ctattacaagaacagcatgaagggaaaccaaccctatgatccaatcacctcacaccagttctctccctagacacatgaggattatagggattacaattcamgatgagatttgggtgaggacacagccaaaccatgtcaatcatagagagaccaacacaattgagatagaatttatttttaaaaatgcgtgttatgataagc

SEQ ID NO: 441197 - DNA, 201 bp, Homo sapiens
atttgtcaatttttgcttttgttgcaattgcttttggcgcaattgcttttggcatctttgccatgaaatctttgcctcttcctatgtccagaatggattgcctaggttgtcttccagggtgtttatagcgttgggtttttcacttaagtccttaattcattttgagttaatttttgcatatggtgtaaggaaggggtccag

SEQ ID NO: 441198 - DNA, 201 bp, Homo sapiens
ttctccttgaagagatcttccacctccctggttagctgtgttcctaggtgtttcattctttttgtggcaattgtgaatgggattgcattcctgatttggcycttggcttgactattgttggtacataggaatgttagtgatttagtgatttttgcacgttgattttgtatcctgagactttgctgaagttgtttattagct

SEQ ID NO: 441199 - DNA, 201 bp, Homo sapiens
tttaacagagacttctcaagggtgagaactggtagaagttgacattttttacataaaccatattttagaattttagtttcaagctagttaagaaatgtactttttttttttttttttggcagtaaggagggacttatgatgaccataatataacaaaatgtgactctgatcatggtgacatcgaaacctggagtttccaca

SEQ ID NO: 441200 - DNA, 201 bp, Homo sapiens
tgtaattattttagttttggtgttaattgttagcttgagatctttccaactttttcaggtggacatttagtactataaatttccctcttaacactgccttygctgtgttccagagatttggatatgttgtatcgttgttctcattaatttcaaataaattcctgatttctgtctttatttcattatttacccagatgttat

SEQ ID NO: 441201 - DNA, 201 bp, Homo sapiens
tgaattgctatgactactccttgttggaggaaaagtggtacttaaaaaataacaaacgactctctcaaaaaaattacattaaatcacaataacagtttgtrtgccaaaaacttgattatccttatgaaaatttcaattctgaataaagaataatcacattatcaaagccccatcttaagtcttcggatgtgtccttgaatc

SEQ ID NO: 441202 - DNA, 201 bp, Homo sapiens
ttaacagagacttctcaagggtgagaactggtagaagttgacattttttacataaaccatattttagaattttagtttcaagctagttaagaaatgtactttttttttttttttttggcagtaaggagggacttatgatgaccataatataacaaaatgtgactctgatcatggtgacatcgaaacctggagtttccacaa

SEQ ID NO: 441203 - DNA, 201 bp, Homo sapiens
cactcattctccttactgcaaatgcttattagccatcatccatccaaattttgagaatattttctccagaaaaacaatctctgtgtcttttttcatacttwcagatatgaaaataaaaagctgtttaaaaagactgctttggggtcagtctactctcaggactgaaatttccttaaggacaaggttgtgaaattttaaaat

SEQ ID NO: 441204 - DNA, 201 bp, Homo sapiens
atccattaactattcttcctgatgttctccctcccccaacccctcccccactacctggcttttaaaaccttctgtataataagtccttcttccctctcccrtttccaacctatacaactactcccagactgccttcttggtttcagtcaacctgattttatctctgctttgttcactaccctcctctcaccacacatactc

SEQ ID NO: 441205 - DNA, 201 bp, Homo sapiens
gctagctagaactatgtttcttctaacatttacatttgattttttaaaaactggagtgcttactagggtgtagcattatttaagggtcaatgaaagagatraaagtgtatgagatctgaagacccgacatgaaggagccttgagtattattacatagataagatacaactaaagcatgcagatattttgaatcaatgtcaa

SEQ ID NO: 441206 - DNA, 201 bp, Homo sapiens
gtaactgcactactacatacgcagggcccaggaagccattgcaagtttctgcagcactatttgtaaacatagttccatattaacaaaaataaataaaattaaaaataaaaatgaggtctgctaaaaacctgctttctgcttaaacaccttcccttagcattgaatggccttctgcattgctatagattctttcatctgaac

SEQ ID NO: 441207 - DNA, 201 bp, Homo sapiens
tattttttattttttatttttttagcttttattttaggtttggaggtacatgtgaaggtttgttacgtaggtgaacatgtgtcaatcttgttcatctggcwagccagttgtcccaacaccacttattaaatagggagtcttttccccattgcttgttttgcagtagaccttattttttaaaatactagttgtttatgctta

SEQ ID NO: 441208 - DNA, 201 bp, Homo sapiens
agaaattttcagtgtcaagatttccattcagtcggtgcgtactgatttaaaaattaatgtctctttctttatgtctctattttttagatacaagttattcwcacacagttataattaacctgcaaaatgagctcataccagaaaaagaatattgtgattagagcagtaatttatattgttaactgcaaatggctcatattc

SEQ ID NO: 441209 - DNA, 201 bp, Homo sapiens
gagaatttagctacagttaaagtaagtgcacactacatttgcctcttttaagataacctcagactatttgatattttataaacttataaatcacgtattasaaaataacgttgaggcactgcaaattaatttcactgattcagcttctaaaaggtaatgttttgctacagcttgctctaaaatcagcttaaattatgtcat

SEQ ID NO: 441210 - DNA, 201 bp, Homo sapiens
cgggaaggagcatgactttgggtaaggcggttttcttgagctgaacatatgacccttagagggaatgtcactaagagctgttggtttctaaaacttcctgmagctggaggtgtaagtactatagttttggaggtagaaatttaggcagtattccatggtatccactacggtgtactccttgcaaccattcatacccgcttg

SEQ ID NO: 441211 - DNA, 201 bp, Homo sapiens
aaataatcaactatcattttgtgaaaatactcagcctacttgtctgcctacctctttcctttcatctttaatttcattttcacaccaaaagcacttttttktgtgaacttttacaattagtaatcatgatgcaaagaaactattaggctgaaccatatacaaattgacaatattttcccatttttgaccgacggaatcagc

SEQ ID NO: 441212 - DNA, 201 bp, Homo sapiens
ttccaaaaagaaattagagctggtgctattttacattacctttcaaaattcattgtaagtgagatggagttggtggaagctgttgtaactggtttaaaggmattttatatttgatgtgctaaaaggaaagatggtatttttaagtttgatgccttttattttttcttccacagtaattagtgaatgccaaaggcagcaact

SEQ ID NO: 441213 - DNA, 201 bp, Homo sapiens
taggcccaactctaatcctcttctgatatatctccttcacactggtaatattactccttgaaaatagttcctccaccaggctggtttttgaatatgtaccrttcatattcagaaaaacttaacacataatttctgaataatcttgagtcaccttagaaacaatgcaatgaatattttctaaaagtaagtagaggttcaagt

SEQ ID NO: 441214 - DNA, 201 bp, Homo sapiens
accctgtagggacaggtagacaaggccccatttttcagagctgatagcatactgaactcaatacctctatatagaaaaagaaaattaaccacaccaagtastacgtccagtataagacagttaccagcacagttaccacaaatgccagtaagaattcagcagagaatgcagaaagaactgcaggctggtgcagctagggag

SEQ ID NO: 441215 - DNA, 201 bp, Homo sapiens
gatgagtaggagacagctatgcgaaaagtcaggcagaaggaactacaaatgtacagataacaagagctattctctttgtatttcacaacaaccacttgggkatgtcattattcttcatttaacaagcaagaaaacagaagttagaaaagaaggaaagtgtaatgatcagatttctctcctgtctaataaagagattttatg

SEQ ID NO: 441216 - DNA, 201 bp, Homo sapiens
ctgacctgaagttaacattgaaaaaaattatttattatatgtttgaatgccctgagttactacataaacttagaaatgagtagcaatctctcaattaactsctttaggtattatttttctcagtgaagttgatattccagtactgtgtaaaatctagtttaaaatttccatgatccttcatcatgtttccaagaagaattt

SEQ ID NO: 441217 - DNA, 201 bp, Homo sapiens
ttgcctgtctttgtttgccagtgtcaaagaccagcccatcacaaaatcataatcatacagttttttaaaaagtgatgagtccatctaggtttttattagcrtcataacattgaacttgaaagttctacattttgttcaacatcactttactgtgagccaaataagagccacagaggaattccattcaggaatgaaggaaga

SEQ ID NO: 441218 - DNA, 201 bp, Homo sapiens
tcagaaaaataccaactttatagatggactagaaattttagggacttctttgcagtctcaacaatgaaatatagccatgaatgcatatgccttcttaagcytgagtggcttattataatcagactaagttctcataccatgtaattccattgtagtttatgacttaattccgtaagaattataactgaaagagccttgcct

SEQ ID NO: 441219 - DNA, 201 bp, Homo sapiens
gttgggcagagcagtagagtggtgaagtgtctagctgctactgccatgctttgtgagcaacaatggactcctccatgtgcataacacttttaatcacttcrgcactgatcttctaagactaaggacattcccctgcataagcacactaccattgtcaaagttgagaaaaattataataattccataatttcatctcatatt

SEQ ID NO: 441220 - DNA, 201 bp, Homo sapiens
gcaatgtgacaagccactccaaactttagtgacataaaacaatcattatattatgccaagaactctgtgggtcagaattttggacaggttacaatgcagaygtttgtctctgtgccttggtgtctggggtctcggctggaaagactcaaaagctgggaggtgactggacagcggggggctgataccttcaggagccatctt

SEQ ID NO: 441221 - DNA, 201 bp, Homo sapiens
ttttctcctttgtaattaatgagttatctgtgggatttattctctgaaattaataaataatctttaagggaaaggtgatataaatttctgttccttaacamccaggttttaacatccagtgatgatccttgcctgaattaattgtcattattctttaaaaaacttttttttattattccttcttctctcccaccctctcct

SEQ ID NO: 441222 - DNA, 201 bp, Homo sapiens
ccagagcaaaatgcattgctcatatgtttgtggtgatgctgctgtaaataaacctattgctttgccagtcatataaaagtatagcacatacaaatatatayagtacataatactttatagtggtagtaaatgactatgttactggtttatgtatttatctatactattgtagggacccagggaaaacttctccttcaccct

SEQ ID NO: 441223 - DNA, 201 bp, Homo sapiens
cccattgtttatgttcttctgaacataaatttaattgcattttttccctgtagcttacagttgtcttctactgggagtcaaataaatacatttagaagatragaagaaaataacaataaggatgtgtgcgtgtgtgtgtgtgtgtatgtgtgtgtatgtggagataatgtgtgtgcatgcatgcgacacacacacacagag

SEQ ID NO: 441224 - DNA, 201 bp, Homo sapiens
tgctgatcgtgggcgccgggatgacaggaagcttgtgcgctgcgctgctgaggaggcagacgtccggtcccttgtaccttgctgtgtgggacaaggctgasgactcaggtgggttgtctaaacgccaaaacctgggaaaagaggactgccgggcaggctgctgaggtggtgtgggcctgcacccaagaaagtctaaggcga

SEQ ID NO: 441225 - DNA, 201 bp, Homo sapiens
caggagaatctcttggcctaggagttcaagagtgcagtgagctatgatcatgccatggcacttcagcctgggcaacagagcaagaccctatctctagaagaaaaaaaaaaaactgtaagggaatatactgactcagcctatctagaacaaagatctcagaaccataatttaaatagaatttattacatttcttgatttttt

SEQ ID NO: 441226 - DNA, 201 bp, Homo sapiens
ccttgttagatctttgtcctatttaggtgtgtgttgcttaattcacatgtatttgtaaattttccaaatttctgtctatgtttctgtctattattggtttstaatatcatttcattgctaccagggaacatgctttttatcattttaattcttttaaatttactgaaacttctttttatggcctaacacaggcttcatcct

SEQ ID NO: 441227 - DNA, 201 bp, Homo sapiens
atattatggaaacaaaacaaagataataatatggaaacaaagataaccaagaaaaatgaacaatattttactaatgtgtgaacaccagtacattaataaawttaacttttaaaacattgcaaagaaatggtaggctgatatgaagataaaagctaatttgcaaagaaatggtaggctgatatgaagatcaaaaataattgt

SEQ ID NO: 441228 - DNA, 201 bp, Homo sapiens
acagcagcctcaaattcctgggctcaagggatcctcctgcctcagcctcccgaatagctgggactacaggcacacacccctacattaggctaatttttttkttgttgttctaatgaggtattactatgttgcccaagtaagactcaaactcctgccgtcaagtgatcttcttgcctcagcctcccaaagtgctaggattac

SEQ ID NO: 441229 - DNA, 201 bp, Homo sapiens
tcctattggcatccccatttatctacagtgagaaccttgatacttaaaaaaataaaaatatctacacacacacacacacacacacacacacacacacacactctgtctctctctctctaatttgctccaatacatacaaaatagattcagaattacagcaataatacttcaaccaacaataacaaaactactgagaaaatt

SEQ ID NO: 441230 - DNA, 201 bp, Homo sapiens
acttctggtgggagcttaaaggctttgagcaccaagtatcaatgtgagcagcatttaacaataactataatattggtaataaataccttgatacacttttwaaaagtgtttattttactattaacattaaaatcttcataatcatgccctcaaagtcagtataatgtgaagagaaatgcatctgaaagcagtaccttattt

SEQ ID NO: 441231 - DNA, 201 bp, Homo sapiens
cactggaactgagaaattctgctttaaagccttctaacagtgttaaacaaatgggaagctttgcaccctgagagatcaagacaatcactagcagagaaatggccatgcctacctaagtaaggaaggtagagaatactgtgttgggcagagcagtagagtggtgaagtgtctagctgctactgccatgctttgtgagcaaca

SEQ ID NO: 441232 - DNA, 201 bp, Homo sapiens
agaaatagatggtatatgtgaaagagttttatgtaaagaatttaaggggctgggcacactggctcacacctgtaatcccaacactttgggaggccaaggcrggtggatcatttgaggtcaggagttcaaaaccagcctggccaacatggtgaaatcctgtctctgctaaaaatacacacccgcaaaattagccaggtgtgt

SEQ ID NO: 441233 - DNA, 201 bp, Homo sapiens
gtttctcatcaaactttcacctactggtttttggcatccattgattcttgcctgaatcatatccagataaattttatgctcttgactaggactttttgggttttttttttctcttcaataacctcttgaacactatttttataaatctactttactcaaagtttttttttccccaaaattatagctagttggcacaaactt

SEQ ID NO: 441234 - DNA, 201 bp, Homo sapiens
gctaggtatatacccagtaatgggattgctgggttgaatgatatttctgtttttaggtctttgaggaatcaccacactgtcttctacaatggttgaactartttacactcccaccaacaatgtataagtgttcccttttctctgcaacctcaccagcatctgttatttttttaactttttaatagtagccattctgactgg

SEQ ID NO: 441235 - DNA, 201 bp, Homo sapiens
caaaagagtctcagttactactaccaatttgtaaggttcttttgtaatgtaattttgagtaaaattacttccacagtacaaaatatgaagggtttttttartacaaaatatgtggtatgaggttattgattctctggaaagaagtgtgaacaaaatatagcaagcaaagaaatggaaaccagaaattgtcaagaaaaaatg

SEQ ID NO: 441236 - DNA, 201 bp, Homo sapiens
gtcaactaaaaaacataaaatatttggttgtcactagtcatatctttgtaaaataatattataccagacagatataaattccatttgtaatagaacacatmcacacacacacacacacacacacacacacacacacaaagacacaggaataaacagtactaatgcagttccataagaattttagaaaagtatgaatttggt

SEQ ID NO: 441237 - DNA, 201 bp, Homo sapiens
cctccatttcatatcatcactagctcttcaagatcttttatcagtgataattatagcaagtaatcacttcttcttccacatattctgcagatacttgggtrtgtggatagtcttcttagcattgtttgttcataatgaggaaatcttaacaaataatatagtaagctaataagaaattaattatacatttaatacagtttt

SEQ ID NO: 441238 - DNA, 201 bp, Homo sapiens
gtatcaggggattgccagtcttcagcatttagtttggcagccaccatactccttgtgaagtccattttcactgacgttcattttccttgtagtgtgcacatttttttttcagttctttgctgttagtgttttatgacttgaggagctttaagaggcagctgtattgttaatgtaagccgttaccacagaggtttctgctct

SEQ ID NO: 441239 - DNA, 201 bp, Homo sapiens
aaataaccgaaaaagattagtagtataaaatgtcagttggtgtaggtaacatccacaaatgttttgagttatagatatacttaaataatttcatacatttygtcattttcaaatattaaaaatttcatgttcagaactttatcctgggtagaaagtgaactgatgtaaacattgggagagaagaaaacatatcatgtctct

SEQ ID NO: 441240 - DNA, 201 bp, Homo sapiens
aaatggagacattcacaggtaatcaaagaatccagtggtctaagcacaacaattttcttaacaggctcacagaactgatgttacttctttatcctttgcaytctctagtgaaataaattaactatgtgatccttggagcaaatatgtgtttgcccaacacataaatataacttctatgggttttatggtcctgctgtttct

SEQ ID NO: 441241 - DNA, 201 bp, Homo sapiens
caaagttccataggctttgagtcatctgcccccaaatctgttttttccacaagccctgatatttttagcatacaattttgtagaactatggttgtagctaraacgcctgtattttattttcacacagcagccaaagcacctgtgtgacccagagaagggtagtgtcctggagaggggtcttagaaggttgttagaaggaat

SEQ ID NO: 441242 - DNA, 201 bp, Homo sapiens
ttcctctatcctgccccagtttttcaaatatgttctgtctttttttctttcaaaattcccacttgaagccgacacctgacactcaccaaaatcctgaaccraaagaaaaaaatgctgagatgcatattcctaaattcgctcatttccagtcatactgcctttaaccacggattccttgtcacttgggctttgccctagcta

SEQ ID NO: 441243 - DNA, 201 bp, Homo sapiens
agcaactgtcctccaagacccatatctcaaaggagaaacacaagccccaggatctaggctgcaaagagtgtaccactgtagctagatgcagaagctggaakaatgttaactgtactagccactttactatgatgtttattggttttgttagtgcttggttcaaagttccataggctttgagtcatctgcccccaaatctgt

SEQ ID NO: 441244 - DNA, 201 bp, Homo sapiens
cttctttaattcagtatttctttaattgtgcaactatataacacttctgccacctgactgtctgtacctgagcaccccatagaatgctgctgcttccctcrtcataggaacctgggcactggcagcaagtattttctcatctctctatccaaagatatttcaagagcctcaatttatatgtcccagtatttatacagtcaa

SEQ ID NO: 441245 - DNA, 201 bp, Homo sapiens
gaaataattcgttatctattaatgacaatattaatagaataatcccttaatagtaatattatggaatagatatattgatatagctccatgtactgagcacrttctgttccagccttgtgctaagtgctttacttaaatattttccttgaaaatcttccttgtaggtaggttacctttacttagacaaacattgaggtacct

SEQ ID NO: 441246 - DNA, 201 bp, Homo sapiens
ttagtgacaagtttgatcatttgggtgacatagtgactgctagatctctccgttgtaaagattcattttttctcctttgtaattaatgagttatctgtggratttattctctgaaattaataaataatctttaagggaaaggtgatataaatttctgttccttaacaaccaggttttaacatccagtgatgatccttgcct

SEQ ID NO: 441247 - DNA, 201 bp, Homo sapiens
tattttttcttgtcccattttcctaaatattttttctatctatagtagaaaaagttactatttaatgaacacttattatatgccaagcactgtgctatgcrttatttcatataatcctcacaacagactaatgcattctgtactattattgccagtatagacaagagaactataatcagagcaattaagtagtttgaccag

SEQ ID NO: 441248 - DNA, 201 bp, Homo sapiens
aacttaagggagacacaattcagcccatattgccctctatgtttcactcccactctctctccatcctttgctttttcttatttccttacttttttcttaarcacttattgagcacctgctttgtatgctagccagtgggctagaggctgaagatacaataattaatgaatgaaatatagttttttcccttaatgatctaag

SEQ ID NO: 441249 - DNA, 201 bp, Homo sapiens
gggtggatcaagaggtcaggagttcaagaccagactggccaatgtaatgaaaccctatctctactaaaaatacaaaaaactagctgggcatggtgacaagygcctgtaattccagctactcgggaggctgaggcaggagaatcactcttgaacccaggaggcagaggttgcagtgagcaaagatcgtgccactgcacacca

SEQ ID NO: 441250 - DNA, 201 bp, Homo sapiens
actgaggactccatagtccctaccgtcatgaaacacagtttcatgaagtctgctcaaatgagaaattctgaaggaagtaaggtgatgctctgttgcactcrtaatttgcagtcaagtaagagttctcatgaatataaaaagatgctcggatctatacaatatatagaatgctaactcacactcatgatcaaaaccaggaag

SEQ ID NO: 441251 - DNA, 201 bp, Homo sapiens
gcatagtctttatcagggaaacaaacatagctcaggtgtagtgggttaaagaattagagtgatgcaggtgtagacattacaggacttgatgaaatcacctrcattttatcatggtagaagcttctaccttcatggaaacttgagatttttagaaactcctaaaaggcagtatctttgaaagttgggacaaggtaaatagat

SEQ ID NO: 441252 - DNA, 201 bp, Homo sapiens
ttgcagtcaagtaagagttctcatgaatataaaaagatgctcggatctatacaatatatagaatgctaactcacactcatgatcaaaaccaggaagggccrtgttgccttgtgacaatattatgagctttcaaaggaaaagttatggtcttctgtcaacattaacccaataatctcttttctttaaggtgaggaaatgaaa

SEQ ID NO: 441253 - DNA, 201 bp, Homo sapiens
aagaattggttcagaatctaagagccagccagatgtggtggggactgagtatagtttctatccatcatttgtccgggggaaagcaggaatgagaatcagaygactgttcatgatgaataaatgtgtggatctgaaatttataggtcatagatgagatgagagcatcagaaaacatggacagaggccaccgtctctgctgcc

SEQ ID NO: 441254 - DNA, 201 bp, Homo sapiens
cattgtcacctttctatcttcttggatctcagcctcagtttcgccagtgtctactttccctctgccttcaaacatacatggcagtccactatcttgttgcsggggggagctgactactttctccaactactttttatatcctgtttttgtaaaacttctcaaacaaggcatcatatttctttgctacctgcttttccccag

SEQ ID NO: 441255 - DNA, 201 bp, Homo sapiens
acataggtgcatagtaaatgccaactttataattgttgtcacatacaaattattttatggttttggtccattagttatataaatttttattttgagagacrgaagagagaatgacacactaatagtgcaggtttagttaaaaatcaccctttgttaaaaataatacttatacttacacattaggaaggctaaacaatatct

SEQ ID NO: 441256 - DNA, 201 bp, Homo sapiens
ccaaaaaagtattaaaagtaatggtaaaaccacagttacttttgcaccaacctaatagttacatggctgcaactttcctgccaagtagactgggagtactyagggagcacctagaatatgtggtgagtagaaactatctttttgagagaatataaaaaatcttttaaatatatttcctaatattaaggaaaattggttata

SEQ ID NO: 441257 - DNA, 201 bp, Homo sapiens
cctgtgatgtcacaggcacaggacctgatttcctcacctgaattctattctcagctctgctcttaaattgctacttgacctttgacatttgtgtaactttsgttttgcgttatctgccagtaatcaccatggtccctacaatttctaacattttctcatactcatatttttaccttctatacaatataccctctattacat

SEQ ID NO: 441258 - DNA, 201 bp, Homo sapiens
tggtgagtagaaactatctttttgagagaatataaaaaatcttttaaatatatttcctaatattaaggaaaattggttatatgaaaatactataaacctcwcagattagtatgaaataggttatatcttttaccatttgtaaaaagcttttcttaagttttattttacaatttagtacatttaagctagcatctcacttgg

SEQ ID NO: 441259 - DNA, 201 bp, Homo sapiens
aggagtggaatcaatcttagcagttgtgtgatgtcatagggttgttgtgaagattagattagctgataaatggaacatagtaagggctcgataaatatcarttgctatgttggtgttatggaagaaggcaactagctgtgatgggagtcaatcttctgaaccaaatttaaaattgatatactaaatacatttgtttgtttt

SEQ ID NO: 441260 - DNA, 201 bp, Homo sapiens
atgattatttttaaaaaacagagagagagcaagaccattttcctcaaagcacaataattttggaattgagtcttattgacctgattggcctggctttagtyatgtacccattatccagccagtcactgtggccaggagggatggataaactgattagttgtaacctaggctactttcatcaaggctgaaagtagaggaggg

SEQ ID NO: 441261 - DNA, 201 bp, Homo sapiens
ttaagtttttcatgttattgattcaagactcccttccatccttttcttctctttcttttggttgatgatctgcattccaacaaagggattggcctgtaggcccccgttttcctcactgaccaatgacagttttatgtggtctgtaccactatgtattggtatctcctagtattcatagtcctcctttgacttccggtttta

SEQ ID NO: 441262 - DNA, 201 bp, Homo sapiens
ctgaattttgtcaaaggacttttctgcatttattgagataatcatgtggtttttgtgtttggttctgtgtatatgctggattatgttattgatttgcatawgttgaaccagccttgcatctcaggggtgaagcccacttgatcatggtgggtaagctttttgatgtgttgctggattcggtttgccagtatcttattgagg

SEQ ID NO: 441263 - DNA, 201 bp, Homo sapiens
cctactttctcttgtgggcatttagtgctataaatttccctctacacactgatttaaatgtgtcccagagattctggtatgttgtgtctttgttctcgttkgtttcaaagaacatctttatttctgccttcattttgttatgtagccagtagtcattcaggagcaggttgttcagtttccatgtagttgagcggttttgag

SEQ ID NO: 441264 - DNA, 201 bp, Homo sapiens
ctgttttatcagagactaggattgcaacccctgcctttttttgttttccatttgcttggtagatcttcctccatccctttattttgagcctatgtgtgtckctacatgtgagatgggtctcctgaatacagcacactgatgagtcttgactctatccaatttgccagtctgtgtcttttaattggagcatttagcccattt

SEQ ID NO: 441265 - DNA, 201 bp, Homo sapiens
gagtcttgactctatccaatttgccagtctgtgtcttttaattggagcatttagcccatttacatttaaggttaatattgttatgtgtgaatttgatcctktcattatgatgtgagctggttattttgctcgttacttgcagtttcttcctagcattgatggtctttacaatttgacatgtttttgcagtggctggtacca

SEQ ID NO: 441266 - DNA, 201 bp, Homo sapiens
gtcaaggctcatgcataccaaaagcttattaaaatgacctgcaggaaggtaatataacataagaaagtggtaaaattatctacagtcttttgcaactaggktttttttttttttttaatgtgagttaccttgtatgcagttgagaaataagagatcagtatcaggagactcatattggtttcaaactcatttatattttga

SEQ ID NO: 441267 - DNA, 201 bp, Homo sapiens
tattgttatgtgtgaatttgatcctgtcattatgatgtgagctggttattttgctcgttacttgcagtttcttcctagcattgatggtctttacaatttgrcatgtttttgcagtggctggtaccagttgttcctttccatgtttagtgcttccttcaggagctcttgtagggcaggcctggtggtaacagagtctctcag

SEQ ID NO: 441268 - DNA, 201 bp, Homo sapiens
cctgtagcttacagttgtcttctactgggagtcaaataaatacatttagaagatgagaagaaaataacaataaggatgtgtgcgtgtgtgtgtgtgtgtawgtgtgtgtatgtggagataatgtgtgtgcatgcatgcgacacacacacacagagatgtggagaatacaccttatcttgtatttgagcttttcaaagaata

SEQ ID NO: 441269 - DNA, 201 bp, Homo sapiens
cacattagctcctccctagccgccatctctccctttcatggaaaacattcttcagactgacagagactctgctttgagctgtgtcaagccttaccccagarcagtggttccaagcattttttttttcatggaccagtaaaatctctctagatgttttgggaactaaggtaatattgttatcttttaattcttcaattaaaa

SEQ ID NO: 441270 - DNA, 201 bp, Homo sapiens
actgacattttcaagtctctttatatttattgctaaaaatcaacccatagtgaggctttgtttggcaggaaaggatcacagagcaacctctcttatacttycaaacccacaatgtagttattttgaacaaattaaatctgcgttaccactacattccacctgcttcttatttttaataaatgtgtctttgtctaatgaact

SEQ ID NO: 441271 - DNA, 201 bp, Homo sapiens
agaatttctgccaagtgatccactgttagtctgttgggcttccctttgtgggtaacccaacctttctctgtggctgcccttaacattttttcggtcatttsaactttggtgaatctgacattatgtgtcttggagttgttcttctcgaggagtatctttatggcattctctgtatttcctgaatttgaatgttggcctgcc

SEQ ID NO: 441272 - DNA, 201 bp, Homo sapiens
gccaaaaatggagacattcacaggtaatcaaagaatccagtggtctaagcacaacaattttcttaacaggctcacagaactgatgttacttctttatcctytgcactctctagtgaaataaattaactatgtgatccttggagcaaatatgtgtttgcccaacacataaatataacttctatgggttttatggtcctgctg

SEQ ID NO: 441273 - DNA, 201 bp, Homo sapiens
ttcccccaatccctattttcctccaacccttagatggttactacctaaatatttaaccatgggtgaacaaacgaaccatgtgttactgtagattctagttytatctagagtaatatttgtataaaaaagagattgtgcagatttctgggaaacatgttttatacaagatttcattccatttttagaaattactcatccact

SEQ ID NO: 441274 - DNA, 201 bp, Homo sapiens
cactgtagactcagaattgactcctcaaataaataataactgagtggtatcagctatatctgtcaacccatcaagatgcaaggaaaaccactcaaaattayttgccttgtcttttaatcaacaattgccattgcttccagtattctcaactattcaagcaactgttctcaccaaaaagctaatagtcttaaacaggtttgt

SEQ ID NO: 441275 - DNA, 201 bp, Homo sapiens
ctgcataagcacactaccattgtcaaagttgagaaaaattataataattccataatttcatctcatattttatctataatcagattttcccacttctctcraaatgtctttcatagtggttttattccctgaaccaagatctaatcaaagttcatgagttgttttagtttgttctttccagataatttttagtttataatt

SEQ ID NO: 441276 - DNA, 201 bp, Homo sapiens
tctctgtggctgcccttaacattttttcggtcatttcaactttggtgaatctgacattatgtgtcttggagttgttcttctcgaggagtatctttatggcrttctctgtatttcctgaatttgaatgttggcctgccttgctaggttggggaagttctcctgaataatatcctgcagtgttttccaacttggttccattct

SEQ ID NO: 441277 - DNA, 201 bp, Homo sapiens
ccataccaataccaaagggttactgagaattaaatgattcgaacatatgaagactttgtgtggcatttagaaagtaagtatttatggtacgtattattatrattaacagttccagtcttcaatttggatattatagtctctgaagcaaagggcataaatataaaagtctaacttaggtgaatgcagcctctgttaccaata

SEQ ID NO: 441278 - DNA, 201 bp, Homo sapiens
aatgcaggctattcattaggctaattctttaatcactgtagactcagaattgactcctcaaataaataataactgagtggtatcagctatatctgtcaacycatcaagatgcaaggaaaaccactcaaaattatttgccttgtcttttaatcaacaattgccattgcttccagtattctcaactattcaagcaactgttct

SEQ ID NO: 441279 - DNA, 201 bp, Homo sapiens
gtatcagcagcagaggctgcagaacagcgaatattgctgatcagcaaatgttgctgcctgatcgttcttctggaagtttcatctcagaggggtacccagcygtgtgaggtgtcagtcttcccctactggggggtgcctcccagttaggctactcggggttcagagacctacttgaggaggcagtctgtccgttctcacatc

SEQ ID NO: 441280 - DNA, 201 bp, Homo sapiens
ttctaacaaaactttacaggactaatgatggttaagtccgcaaaagtaaatgaatatcaccattgacactactgtttcaattacacatgatagatttaaakatgttccacaaagcaccgctgatgaataatatgagtcactataggtttaagatgccttacattttgaaaagctatatgaatttgtacaattaaacccttt

SEQ ID NO: 441281 - DNA, 201 bp, Homo sapiens
ggttttaaaagatagaatagatctaaatagagtcaatgtagacctcagcaattgaatatacaatttcagcaaagtatgtcctttgcagtttgagcccactraagctgctacatggatcatataattgatttgtggcacattctgcctgcatctacccaatggtttattaaaatagaatagacaaatgccaataaaatgaaa

SEQ ID NO: 441282 - DNA, 201 bp, Homo sapiens
tcctgcctcagactcccaagtagctgggattacaggcatgcaccaccatgtccagctaattttgtatttttagtagagacggagtttctccatgttggtcmggctgatctcgaactcccaacctcaggtgatctgcctgccttggcctcccaaagtgctgggattacaggtgtaagccaccatgcccagcctctgatcatt

SEQ ID NO: 441283 - DNA, 201 bp, Homo sapiens
ctgatgccctcagctcctattaagagccagaaagttatttgcctctccatttaattgccccagtctgccaggattcttcccagtcttgtctgggttttgartttttatatagcatcccaatatggtttggctctgtgtccccatccaagtctcatcttgaactgtaatccccataattcccatgtgttgagggaggtacct

SEQ ID NO: 441284 - DNA, 201 bp, Homo sapiens
gataatagtttctaaatgcttagctgatttatactgactggaattgtcccatctcttcctagcaatcgaatctggcaaattaatcatttaaccttttctgygccatggacaagcctcactgtgaggtcaccagtgtcacaccaagtatggctgcccattgacagaaaaagtttgtgctggaattgtgaatgtgctccccca

SEQ ID NO: 441285 - DNA, 201 bp, Homo sapiens
atgtaggccttcaactgattggatgaggcctacccacattagggagggcaatctgcattacttgatctactgataataaatgttaatctcttctaaaaacrtgctcatagaaacacccagaatagtgtttgaccaaatatgtaggcatcctatggccaagtcaagttgacacataaaattgaccatcacagatggtgacac

SEQ ID NO: 441286 - DNA, 201 bp, Homo sapiens
caaaattcattgtaagtgagatggagttggtggaagctgttgtaactggtttaaaggaattttatatttgatgtgctaaaaggaaagatggtatttttaartttgatgccttttattttttcttccacagtaattagtgaatgccaaaggcagcaactggaggctgtgagctactcctctcgatatgctctgggcctcttt

SEQ ID NO: 441287 - DNA, 201 bp, Homo sapiens
cctaatgtgtcaggcttaatgacccctaagtcagccatttccactgatcgcttagtctattataaagtcttatctagtgtgatgatttaacacaacacctwgatgttacatctactccgctctcagggctttagaatgcaactacaatcagtaggaaattatccctagttgcccaacccagccccagctcttgccttccta

SEQ ID NO: 441288 - DNA, 201 bp, Homo sapiens
aatgacccctaagtcagccatttccactgatcgcttagtctattataaagtcttatctagtgtgatgatttaacacaacaccttgatgttacatctactcygctctcagggctttagaatgcaactacaatcagtaggaaattatccctagttgcccaacccagccccagctcttgccttcctaccctgtcccatagcctc

SEQ ID NO: 441289 - DNA, 201 bp, Homo sapiens
gagggttcactctctccttcagaggtggcgacttcttgctgcatcctcacacagtggaagggggaaacaagttccctcaagcctcttttgtaaggtcactrgtcccattcaagaagtcgtagccctcatgaccaaatcacctcctaacggccccacctctaaatacgaacacattggaaattagatttcacatacgaattt

SEQ ID NO: 441290 - DNA, 201 bp, Homo sapiens
ggaagggggaaacaagttccctcaagcctcttttgtaaggtcactagtcccattcaagaagtcgtagccctcatgaccaaatcacctcctaacggccccasctctaaatacgaacacattggaaattagatttcacatacgaattttggggagacacaaaccttcagaccataacagaataaatgtgtttgttgcagcatt

SEQ ID NO: 441291 - DNA, 201 bp, Homo sapiens
aaactggaaaaaaaatgaaattcccagctctgaaagactagtaaaccatggcaattcatgttattaaattaggtaggtccccatgaactgctagaaatctrtccaagatatgttgctttaacaaaagcaagatataaatgatagctatggtaagattgtgtttccgttattaaacgggaagtaaatatgcgggctcatttg

SEQ ID NO: 441292 - DNA, 201 bp, Homo sapiens
cagttctgataccaaagcagtacttttattttttcactttatacactttcatcatgtttgaataactttttaaaaagttttgtaattcagataaaagtagwtttaaaacaccaaaaataatttaataatatctttccattaaagatttacactgtacataaccatatcagggaccgagaagttccacttaattttatttaa

SEQ ID NO: 441293 - DNA, 201 bp, Homo sapiens
acttattcctttcacaaaaattacagttaaggctcttgttcacaattttcccttttcctctgcctcttgttgatcctggatctcccatgtgtggccttccrtggtgtggtgtgcctcttcttttgggatctatgagtataacaaactgtctttgcaatggcagtcatcttctgatctgttggccttgccatgcccaaataa

SEQ ID NO: 441294 - DNA, 201 bp, Homo sapiens
tttgcttataaacaataagatgtattctggaatcttggccccatttaagagattgttaattgccagcattcatttcatcttgaggtttcagcccattcatwgaatgcccctccaaaaattgaagacaaaatacataaccatagagtcttacagagagtcagatttgtatcttccttggcattttgttggaaaactttcact

SEQ ID NO: 441295 - DNA, 201 bp, Homo sapiens
caaagtcctaactaactcattccagcataaacccaaatgtccaagtccaaagtttcatctgagaaaaggcaagtcccttccacctacgagcctgtaaaatyaaaagcaggttagttacttcctagatacaatgggggtataggcattggataaatgctcccattccaaatgggagaaattggccaaaataaaggggttaca

SEQ ID NO: 441296 - DNA, 201 bp, Homo sapiens
ctggctgctttgtttacctactcaagcctcagcaatggcgggcgccccttccccagcctcactgccgcattgcagttggttctcagactgctgtgctagcwacaagagatgagcaacgctctgtgggcatgggaccctccaagccatgcacgggatataatctcctggtgtgccatttgctaagaccattggaaaagtgca

SEQ ID NO: 441297 - DNA, 201 bp, Homo sapiens
tagatacaatgggggtataggcattggataaatgctcccattccaaatgggagaaattggccaaaataaaggggttacagtccccatgcaagtctaaaacmcagcagggcagctattcaatcttaaagctctgaaatgatctcctttgactccatgtctcacatccaggtcacactgatgcaagaggtggactcacacagt

SEQ ID NO: 441298 - DNA, 201 bp, Homo sapiens
tactgttccttttctcctctctctaggtagacagtgatttttttccaaaacaagtgcttaagcatcccaggtttaccctggactttagctttccatctgtktgtatttgatcatgtgcctatcttgctagatactcaagattaagcttttgcagttcatagtataatgggagagatgaacagcaaaccaattatactgata

SEQ ID NO: 441299 - DNA, 201 bp, Homo sapiens
ttttaaattcttatttattttttaatttttgctcatttgttttatttttcctgaatcatttgaaagaaagttgctaagttgtagatattaagacattttaytccttagtacttcagcatgcatcacttaaaagtaaggatattctgttttataatcaaaatacattattacatctaagataggtaatgataaatgcacact

SEQ ID NO: 441300 - DNA, 201 bp, Homo sapiens
aattgtgacatatacatatggtggaatatcatttggccttaagaaggaaggaaaccctgacctactacaaaatatatgaactttgaggacatcatgctaastgaaataaaccagttacaaaaggacaaatactgtatgactccatttatacgaggtgcctagagtagtcaaattaatacagacagaaatagaatggtagtt

SEQ ID NO: 441301 - DNA, 201 bp, Homo sapiens
tcttagtgttaaatctgggattttgcagagagatcactcattgataccctttcattttactgataatataataattattataattgttataacattagtamccaggaatggagtatggagtatgactgtaacaacaacatggataacaacaataataataaaattgcttttattataaggtttccacatggtagccactgg

SEQ ID NO: 441302 - DNA, 201 bp, Homo sapiens
atataggtctactgatgagaaaaattgaattcttttattgtgggagagtgataacatttcacttaattggggttcaaagttagtgcttcctatcatcagartcaattgcccatgcccatctgttaatgctgattcataatgaggttttacatattttgtctttgaaaatatcttttcacacaaatagatactgtcaaatac

SEQ ID NO: 441303 - DNA, 201 bp, Homo sapiens
gaatgctgacctagtagttttctctgttgctgggaagatgtggtactgtatggaagaggggtggcattgataccccgtcactgtgaacaagcctccctgartttattaactgataacataaataaaacttcctaaggcaatatgcaatagatttctcactgtggtggtattctgtgaaagaaattgagattttccactcct

SEQ ID NO: 441304 - DNA, 201 bp, Homo sapiens
aattcaaatttgactggatgtactttcagagtctttttatccaccaacacccaattaacaaattggtttttatttgtttgggctttttaacttcattttgyttttatttagttttgctttgccttgcaagccttgggtcagtgtagaaaggctaatccaaggaaatgagctagcatttgctgagctcattcttaaatcagg

SEQ ID NO: 441305 - DNA, 201 bp, Homo sapiens
aacttccccgtgaccaaggaataatgattatgctgaatttatgctctagatcctattaacatatttgtggctttttatactgctctattttcaaactttgrtcacgtttaaattctgcttgactctttgtatttttagactttagcttctgaaaacacactctgatttagggttgggggagcttttccccaaaacttactg

SEQ ID NO: 441306 - DNA, 201 bp, Homo sapiens
caactacactggaagacataatcagacacacctgtttgtataatcactttgaattgggatgttacaaattattgcagttatattttcagaggattcaaatrtcatatgtgccatggatattgatattataattttcaaaaatgattaacaattctcagtaaggttcaaatgaaacaaagtatagtcttcagttagtttaca

SEQ ID NO: 441307 - DNA, 201 bp, Homo sapiens
tgagtccagaagtttgaggctgcaataaacaacaatcatgcctcatgcctctgcattccaccatggatgacagaatgagaccttgtgtcaaaaaaaaaaargggccatctaattggaaaaatggcaataactatataatggcaacaacacagacagaaaataatttcttccattgttctttttcttaatcttatcttttat

SEQ ID NO: 441308 - DNA, 201 bp, Homo sapiens
atctaaaaaacgccttctcataaaagctgtggaagaaagtgagccataaatcatgggctttaaatatggggagagtgtcttgctatggttagtacagttgytcaagaacaaatgattgtgaaaggaaaggtttaatactttattagcattaccttatcatagcactttcttattgatttgtttacagctgattggactcct

SEQ ID NO: 441309 - DNA, 201 bp, Homo sapiens
aaatcacgtattagaaaataacgttgaggcactgcaaattaatttcactgattcagcttctaaaaggtaatgttttgctacagcttgctctaaaatcagcytaaattatgtcatttggattactattaagtgaacaaattgaaattagcattttacagcatattttttccctgtaagacctagccaaaaatccatataaaa

SEQ ID NO: 441310 - DNA, 201 bp, Homo sapiens
tcctctcttcagtatgttttgcaatcagtcagagaagagtgagactggaaatcctggaaagaaacctagagtgtgaggtgctaaatatgaaccactagcastagcagtgttttctgaagcagactggttgttcccctctgcctcagttccctcaaaaaagggagataatgagacttgtcatccacaggtttgccatgacca

SEQ ID NO: 441311 - DNA, 201 bp, Homo sapiens
cttacactgccacattggggatcaaatttcaacatgagttttggtagagacaaaccatattcaagccatagcgtagccattataatttagaatatttggayagaataaagaaatctgcattttaaacaagtacccctgggtgtttctgatttcagtgatagatggaccctaatttgatatatcttgtatggatttatagca

SEQ ID NO: 441312 - DNA, 201 bp, Homo sapiens
gtggcattccagacagagaagtcagcctaagcaaaaggcacaaaggtgggagagtaaagtgctcgttgggcacctgtgagcagtgtagagtagttggagtrtaagatgcattgtggagagtaatgggagagaatgtagatgaaaactacaggccagactgtaaaggaaacttagacactacattatgaaatgtgtactctg

SEQ ID NO: 441313 - DNA, 201 bp, Homo sapiens
ctcacctctgcctccagagacacctggtgcctccagagacacctggtgcctccagttccttaacatttctgcagttctgcggctttactggtttcccactrctaacctcctttgcaaacttagaattgagctttctttagtgaagggcagttatcttttctactattcagtagcttccagattttttttttttttgagaca

SEQ ID NO: 441314 - DNA, 201 bp, Homo sapiens
atcttttaccttattagttaaatgcatttttagatatagtattttttgtggcaaatgtaagtgggattgagtgtttgatttggttctcagcttgagtgttkctggtgtataggaatgcaactgatttttttgtgcattatttttgtatcctgaaactgtactgaagtcatttatcaggtctaggagtcctttggagcagtc

SEQ ID NO: 441315 - DNA, 201 bp, Homo sapiens
ttggaatagtttcagcaggaatggtaccagctctttgtacatctgatagaattcaatggtgaatctgtttggtcctgagatttttttggttcgtaggctayttgttactgactcaacttcagagcttattattggtctgttcaggaaatccgtttcttcctggtttagtcttgggagggtgtatgtatccaggaatatatt

SEQ ID NO: 441316 - DNA, 201 bp, Homo sapiens
gttcttcattcctatccatattctgaattctatttccgtcattttggccatctcagccagttcagaactcttgctagagaggtaatgtggtcatttggagraaagaaggcactctggctttttgagttttcagggttcttgcactgattccttctcatctttgtgagcttatctatcttcaatctttgaggttgctgacct

SEQ ID NO: 441317 - DNA, 201 bp, Homo sapiens
cttacttaaaatacagagaccactcaagattaaaattcagactttcaaagaatggtgattcattttgcagctgcaactgctaactattaactaattaactsctctcactattgactgtttaccctattttaaggtggcagaaatatccagttaatcccactgttatcaattgtagagacattagatttacatgtaatcata

SEQ ID NO: 441318 - DNA, 201 bp, Homo sapiens
cagcatttactgagagtctactgtgtgctaaggcctggaatataaaggtacaaagtcaagaccctgagctcagagactactggctgtggccaagggatggkcttgaagatgcttttcccaaaaggggttgtaaagccagaaaaaactgacaaaaataaccatttaacagctatggaatcagacagaggcatatgataatct

SEQ ID NO: 441319 - DNA, 201 bp, Homo sapiens
taagatacaactaaagcatgcagatattttgaatcaatgtcaaaattagtactaaaggcagtgatggttgaagaatatcatagagaggaaggatcacactragctggagtggctacagaaaggaagctttgggatgaactttagctggatttttagtgactaggaacgtgagatttcccaggtaaagatgaacaggatctt

SEQ ID NO: 441320 - DNA, 201 bp, Homo sapiens
gatgacgggtgtggctgaagtaaatgccattgcctctgctgaaaaaacaggtttgatctaagtactcacttactcccttcattagttatgattgctaataytacattgcattcattacattcctactacctaacttctgttgttgtactaatgaaaagcaaaggaagtaaattaataggaacaatcatttacatttgaaac

SEQ ID NO: 441321 - DNA, 201 bp, Homo sapiens
tgagatctgaagacccgacatgaaggagccttgagtattattacatagataagatacaactaaagcatgcagatattttgaatcaatgtcaaaattagtastaaaggcagtgatggttgaagaatatcatagagaggaaggatcacactgagctggagtggctacagaaaggaagctttgggatgaactttagctggattt

SEQ ID NO: 441322 - DNA, 201 bp, Homo sapiens
ttacttataattttaatttttttggtctttttttatttttttaatgtttttggtttacccccaaatatttggtaatttgatttctgtctcttagcttttgraaatcttcttggtgggggtggtatggagaagatgtagattctaattattggtgctctaaaataaaaggaaaaggaaataagtatgctcattgcagtgtgc

SEQ ID NO: 441323 - DNA, 201 bp, Homo sapiens
gtgtatgagatctgaagacccgacatgaaggagccttgagtattattacatagataagatacaactaaagcatgcagatattttgaatcaatgtcaaaatkagtactaaaggcagtgatggttgaagaatatcatagagaggaaggatcacactgagctggagtggctacagaaaggaagctttgggatgaactttagctg

SEQ ID NO: 441324 - DNA, 201 bp, Homo sapiens
ctttgtagaaaactggtccactgggtaaaccttgaattggatttccccctaagacataaagcttggatacaatgattgtaataattcttattataagataratatcttggttctaaaataaattgtaccataaatttgtctggttttgagcaatattgttgatttaaaattctgccccatctatttggggcattaaatgca

SEQ ID NO: 441325 - DNA, 201 bp, Homo sapiens
ataagagtatctgagtgcttgttaaaaatgtagatttccaaaccctgtgctagagacttgaattcagtagctcttgggaagagtgaaatgctttgtcaacragctcccccaggtgatggggtgcctgtagttcatggaacacactatgaagacaaatagtttggtacttaataagcctctaataaatagttgttgaatata

SEQ ID NO: 441326 - DNA, 201 bp, Homo sapiens
acaactcatgtacaaagatatgatattctttaattatttttaactaaatatatctttgcacataaacctccatttctgctaatagtgttaatcctgtcaayttactgtaaacaagtcatttccagggtcagttaagtttttcatgttattgattcaagactcccttccatccttttcttctctttcttttggttgatgatc

SEQ ID NO: 441327 - DNA, 201 bp, Homo sapiens
tgtagcagcagccgaacctgtgcctgatgatccatgttggttatatttgccaggatgttgacccttctcacttcctgggtcttgtctcaagcaacatgacrtgacggggtggtagccatagcttgagatttaatgggcttcttattgtgttatctagatgaagcatttcccctttagaaaccaggatttctaagtcgcaga

SEQ ID NO: 441328 - DNA, 201 bp, Homo sapiens
ggaagtcaaggctgcagtaggccctgactgtgccactgccctctagcctgggtgacagagcaagaccttgtgtcaaaaaaaaaaaacaaaccaaaaaaaamaaacaaaaaaaagaatatacaacatattagatgtactattttaacaattttttaagtatacaatatgatattattaactatagttgctaggctatacagg

SEQ ID NO: 441329 - DNA, 201 bp, Homo sapiens
caccatcaactagcacctctgcctgtttaggtggcttacatatgggatgatctggacatggttttgagccccatgatcaccacattcttttcagaccatarcactgaacttgtatttttatcatcaaaattgagcaagagagtaccaagagacaccgaattacttgactggtgaacatatttcctgccctcattctgtagc

SEQ ID NO: 441330 - DNA, 201 bp, Homo sapiens
tgatccaccggcctcggaactcccaaagtgctgggattacaggcatgagccactattcctggccagtacacattatcttaaaattactaatatgattgccyaattgtaatttaaagaagaagaaaggaatatcataataataattgaaaatgcttggggacaactacactggaagacataatcagacacacctgtttgtat

SEQ ID NO: 441331 - DNA, 201 bp, Homo sapiens
atactgtgttgactatctgttcccagttttttctcatgaggaaaaagagaaaagggaggatttaaaattaattacaggccaggcgtggtggctcacgcctrtaattccagcactttcggaggtcgaggcaggcggatcacgagatcaagagatcaagaccatcctggctaacacggtgaaaccctgtctctactaaaaata

SEQ ID NO: 441332 - DNA, 201 bp, Homo sapiens
gaaagcagtagaggggaattatggtaaatgggcctccaccaaaagacaaggctgtagtcttttaactcttcactaaacaatgccaaaatttaaagaaacaytggcaccagtaatgtgaaatattctcattgtgggctgctacagccactgccaccatcattactaacaactcacaggcaactgataggaaaacactaataa

SEQ ID NO: 441333 - DNA, 201 bp, Homo sapiens
tttctgactccagttgctcaggccaaaagtcatgccattatcatgggctcttctctttgacatctcacattttggttacctagggagtgagagagctgctrtcatcgcctgtggcctgtacatcatagagaggtgattctcctgagaaatgaaggactgagtttctcagtgcagctgtagaaggcttggaacctaacaacg

SEQ ID NO: 441334 - DNA, 201 bp, Homo sapiens
gtgtgcatttggagcacaccttgaacactccagcaggcagtatgaaactctgccttcactttcacttcctgcctccatagagccacaaggttaggcagagwtgagaatttagatctttctcaggtcttagctgagcatgcagatagcactgagtatgctcacatccctacacatgaacttgtacttctagtttcccagcat

SEQ ID NO: 441335 - DNA, 201 bp, Homo sapiens
ggaattccacctgcttgtcaagtaagtgcaccatactgaacttatacaagataaacttctggttctttcctttacattctttcaacaatcttcactgtttsagaaaatggcaagtctttctgactccagttgctcaggccaaaagtcatgccattatcatgggctcttctctttgacatctcacattttggttacctaggg

SEQ ID NO: 441336 - DNA, 201 bp, Homo sapiens
gttagtaatctaaggctctagtattatttaggagaaggataaaggtatttgttcactttcaattttaatttaatatgtatgcttaaatatatcagtattcrctaaaaatataactatataatttccaagatagtagaaggggaaaatggaataaaatgtaaacatggtttaatcaaaaagaagacttttttgaatttaaaa

SEQ ID NO: 441337 - DNA, 201 bp, Homo sapiens
attttttttgttggacttactgatatgattggcttgctcttcattacaggtgctgctgagcctgggagccatataaaagagctaaattgtagtaactctcrtggctagagggcagttgagccagccagttccaaatggactggagaagggcaaacgtatcatcaacctccaccgccatgagaaaggagagcagaccaccac

SEQ ID NO: 441338 - DNA, 201 bp, Homo sapiens
tccagtcatactgcctttaaccacggattccttgtcacttgggctttgccctagctaaacccaaaccagttttccatatcccttccatttctcatcccatycctgccccactcttctttactcattcttatgctgccctcctctcaatacactgctctctctcatttccatttctatattctctccttctctgcaaatttt

SEQ ID NO: 441339 - DNA, 201 bp, Homo sapiens
tctttttttctttcaaaattcccacttgaagccgacacctgacactcaccaaaatcctgaaccaaaagaaaaaaatgctgagatgcatattcctaaattcrctcatttccagtcatactgcctttaaccacggattccttgtcacttgggctttgccctagctaaacccaaaccagttttccatatcccttccatttctca

SEQ ID NO: 441340 - DNA, 201 bp, Homo sapiens
attgagctgtgggtagattcagatgatactaatcacctgtggttgaaatgccttcaactcaataaaatcatgatttcaagggaaaaaaaagaaatgtaaamtaagacaatatccataaattcaggtacccctcaatctagaggggagacagacaaatagacaatgaaaatacaatgtgataaatactgtaagtgtggagag

SEQ ID NO: 441341 - DNA, 201 bp, Homo sapiens
ttttgttgttgttgttttaaatcatggcatttattttccaactctgttatttgctttacttatcctccctttttgtatctctccccttttagcttttgcaratcaccttcatcaagctatcttatttatttatatttatttatttatgtatttggatcaacctactaaccaaaatcaaggcattataaatctttcagtgag

SEQ ID NO: 441342 - DNA, 201 bp, Homo sapiens
ttttgaggtaggggtgctgctgtgaaggatagggtagtgaaggatggtctctgaagaggttacttctgagtggagacttgaggagggaggccatgttgcawggggggaagaatgtcccagacagagggaacaagtgccagggctctgagataacagcgtgtgtggtgtatttgggagtcggcaaggaagccagtgtgacgc

SEQ ID NO: 441343 - DNA, 201 bp, Homo sapiens
tttctgttgcatatatacttggctgtaggagattatacatattttaattttcagttttattagtgaaaaacttatataactcaataacttctgatcagcakgaatcaaccggagttactgtattgagttgatagtaatttttttctaaagcatagaagcttaacattttagttatattcttaattcttcttgtgagtaaag

SEQ ID NO: 441344 - DNA, 201 bp, Homo sapiens
tctgagatgtgaggttcaacgatttagagaggggcctggattattctgatatgatagcttttcattcactataacttgaagtttttatatcacagggatckatcttaaaacaagagatataattaaacagaaactcagtggaaaggggctcttacagtcatataactggtcctccaaggaaaatgcaaaggcgtcttttat

SEQ ID NO: 441345 - DNA, 201 bp, Homo sapiens
ctcctaatctttcattttttaagctaatgttcttaaagattcaacttaaccattttgtggcatttttaaaaaggcaatcaaatgctttatatattttaatytttcttcagaactgagattagaactgcccttctcccccgccctcctgtcccctccccctcctcctctcctcccctctcctctcctcttctctcctttttt

SEQ ID NO: 441346 - DNA, 201 bp, Homo sapiens
ctatattgttccaggcagatgagtatcactcttattgcttttaaggatatttgaggaagaaaggttatatgaccaattggtatcttattttggtatttaayaatcatagctgtgaggaaatctttccttaatctttctttataggtgttactatttaagccttccttctccccttccccccacccacctttttattatgtg

SEQ ID NO: 441347 - DNA, 201 bp, Homo sapiens
agagtagacatccttgtcttgctcccattcctagggagtgtattagtccatttttacactgctataaagaactgccagagataatttataaagtaaagaartttaattgactaacagttctgcatggctgggaaggccccaggaaacttataatcatggcagaaggggaagcaggcacttcttacatggcagcacatgaga

SEQ ID NO: 441348 - DNA, 201 bp, Homo sapiens
gaagtggcacgaggtgagattttaatggaagtaagatcctggttatgaagagctctccatgaggggctttggcgtttgcattttatataacaaaacacatygacatgggtttaaattgcttagaaataaaaccacttcttcagctttatttatatacccagtccagttatcgcctaagtttatagaaacattgcatttgct

SEQ ID NO: 441349 - DNA, 201 bp, Homo sapiens
gtacaaatgtttgttgagtacacttcagagagactcaacaaacatttatcacataaatcctgttaggacctataaagaaaataagattgaagatgaagatrtagcccttgccctcaaaaaatttataatctagtgggagtgacagatatgcacacagtgatataacaagcagttcatgaaggaatcaatgtgccatagaga

SEQ ID NO: 441350 - DNA, 201 bp, Homo sapiens
atgaaagaaaccatcaacattgtattaaacaaggaaagctgcatattctggaacatgctgtcttctgcactgacaaccaggagcagaaaagactcatttaygaaaggaaaagaaggaggaaagagagaagcttggtgaagaagagaggagagaaaaatatatatatatggctttttatttaattagtcttatacactgagc

SEQ ID NO: 441351 - DNA, 201 bp, Homo sapiens
atgttgcaactcttgaaatcagaatctcctacctccccagggtttgtgaaagttgctgtttgtagttggtgcttgttttgtttgagctaattatttaataygtgatttctttgtcataggtggccattggagtctctgatagctgacttagtgttcagctaatgattggacaaagattttcttaaattcctggagctcaca

SEQ ID NO: 441352 - DNA, 201 bp, Homo sapiens
cttttcccaaccttttaccttcaacctaggatctaaagtgcacctcttatagagagcatagagttggatcaggttttttttttttaatccattatgccaarctaagccttaaatcagcgtttaattaatttacatttaatgtaattcctgataagataggatttgtgtctgccattttgctatttgttttctatatgtctt

SEQ ID NO: 441353 - DNA, 201 bp, Homo sapiens
cttcaggcgttggatgtggaagttgagagggaaaatgagactgaagtttctaaagtcattgagcaattgtgaaaatactttcaatctctggaacagggaaygccaaatttaaggggaaataccaagttcagatctggctgtattaaatttgacatacccaagggacatgaaatagcaatgtctggtggagggcctcatgtt

SEQ ID NO: 441354 - DNA, 201 bp, Homo sapiens
ggcaagatgatcaatcaggaggactgtggcaaggaggagaagtcaaaggcagagggaaaaatcctagggaacgtggtgtaggcagaagaaaagaatcctcmggggcaagtaagaaggaactgttgagaggaaaggaggagagccaaggagatagggcacaaaatccaggggtgagagaggtaagaaaagtgtggtcagcag

SEQ ID NO: 441355 - DNA, 201 bp, Homo sapiens
ctacagctgcctggcatttctatagctataaacaagtccaaattacagatctatacagcatccatactaaaacgtgagtcttaaacattaaataccctaastcccatttgtgtcaacattacacctcatgttctgcctgccttgctctctgaaaatgatattttcccttgtggataggcctaaatgtgtggctgtcaggct

SEQ ID NO: 441356 - DNA, 201 bp, Homo sapiens
tccagtctgctcaggaattccacctgcttgtcaagtaagtgcaccatactgaacttatacaagataaacttctggttctttcctttacattctttcaacartcttcactgtttgagaaaatggcaagtctttctgactccagttgctcaggccaaaagtcatgccattatcatgggctcttctctttgacatctcacattt

SEQ ID NO: 441357 - DNA, 201 bp, Homo sapiens
aaactttttaagtagaacaaaaaaggaagactgagaagaagggaaaaggagagaaggaaaagaaaagaagaaccataatcatgaaaaactgtcaggtttcscgtttgggcttttgttttaaaatatcagacctctcagataaattagtaatcctcatcttaaaataataagcagtgactagtaatcatgacattttgtcat

SEQ ID NO: 441358 - DNA, 201 bp, Homo sapiens
aaaatggcacatcaataataaactcttaagtcattcattcaagatacatgtattttatatgtcaagccccgttcttaacacataaggaagttaatatgatrttatccctgcatttgacaaatatggtctagtagattaaccaggaatgtaaacagattcataaaatgtcatatgatatgtttcaaaatggaagcagcacac

SEQ ID NO: 441359 - DNA, 201 bp, Homo sapiens
ttcagagaacccagagcaactttaggtcttcggggactcaggttcactggccagaatgcaacaggagattgtggtatccataagacatgggcacaatgttyggcaaaggcagcagtatccagcaagttacagtggtaaattagtgatatgtcagctggaggcagcgctaaatacatttagacaacattgaagacctcagag

SEQ ID NO: 441360 - DNA, 201 bp, Homo sapiens
tcaataaattatattgaatagtacattaaggaatttgagttacatatctgtatttgtaaaaagttaaggtattcttctaaacaaatctaggtcacataggrgcattgaaaactctcaaaattgagaaacaaggcccataagcagcaaaagtcctaaataagtagaatttaataaatgcctgttcctgatgcttgggtactt

SEQ ID NO: 441361 - DNA, 201 bp, Homo sapiens
caataattatttaacaaataatttgaggaaaattagcaaggtatttagttttagaaaaaaatcaaatgtgattctaccgtatattactataatttccagayggattaaagggataaatataaacaaatatataatacatgcctcccccaaaaccatatagaggagaatatagataaatgtttaacctatttctaggttgca

SEQ ID NO: 441362 - DNA, 201 bp, Homo sapiens
ttatctgttacgaacacaggcctgaatctggggcaggttgtttggagggagctgggggaggaagaactataaagaaatgctcagaagccattttcactaarttttgagactcactggaactgagaaattctgctttaaagccttctaacagtgttaaacaaatgggaagctttgcaccctgagagatcaagacaatcacta

SEQ ID NO: 441363 - DNA, 201 bp, Homo sapiens
aatatagagtccactcaaacaggtacttgcttggacttacctgttcctgttttcccaggattcctttgtgagtgcctcgtatatgtaggctctcagtctgyattgaatgaatgaatgaatgaatgaatgaatgagtgaaacaatctgaaaacgtcttggaggacattcagtgggaaagggagagagtgctttagagagaag

SEQ ID NO: 441364 - DNA, 201 bp, Homo sapiens
gatgtgctgggtcagggctggcagaagttgattgcccaggtggtaggctagggagaagcactgaaaagcttcttgagaaatagctcaggcagcattcactkctggggttcacttcgatctggttactgtggggatggtccaaagaagtctattaaaagaacagctgagaaacatcccaagacaggggaggtgagaggggga

SEQ ID NO: 441365 - DNA, 201 bp, Homo sapiens
ggacaaggcttcagggctgtgggatggcagtgggtattgatatgcctgtagcttttgactttgttgcacagctaacattgaccttggatttgatagagaartggctttttatgccactaatagaaagaaaactggtaataaatatgttttatagatcttagatttagaactatagaagaaattgttttctgaggaagggta

SEQ ID NO: 441366 - DNA, 201 bp, Homo sapiens
gtagcttcagtatccttaaagtgatgggtttgtgtgccagaaaatggtacagagtatattataagttgtatgggaatgagcagagcatatttcgagtgaamggaagctggaaagggcagttgaggatggataagccctgtgtcttgtgggtttattttttatctggggggacagtggagagacttcaagtataccaacctg

SEQ ID NO: 441367 - DNA, 201 bp, Homo sapiens
gtctggtcgtggtggacaaggcttcagggctgtgggatggcagtgggtattgatatgcctgtagcttttgactttgttgcacagctaacattgaccttggwtttgatagagaaatggctttttatgccactaatagaaagaaaactggtaataaatatgttttatagatcttagatttagaactatagaagaaattgtttt

SEQ ID NO: 441368 - DNA, 201 bp, Homo sapiens
acaccaaaagataactcaaattcacagaaaaaaaatgaaaagcaatggaaatggtagatatgtaggttaataatataaaaggctctgtatttttttctcayatagtaacttctttaaaatacataggatttcataaagcagttattataattattactgagtatattatcgttaagtttacatacatatatgtaatttata

SEQ ID NO: 441369 - DNA, 201 bp, Homo sapiens
ttgttggttaggctttataactttcagtaaggagttgaccttgttggaggtttgaaggtcataatcatttacctgccatttataaattctaacagatacaragagccatgtggatatcacagcattattaatggaaccctgtggactcctaaagaacaaagcccctgctaaaatgggatgtgagaacatggcttaaacagg

SEQ ID NO: 441370 - DNA, 201 bp, Homo sapiens
gtttattccatcttttctcaaatctagttttgatttttctttttacctttctaaccttttattttaggctactgattttattttacccctaaaaaaaaaamaaaaaacaaaactctttttctccctaataccctttaacatattatgagaactaatactctcactttgggtgagaattgggttggaatctttacacttcat

SEQ ID NO: 441371 - DNA, 201 bp, Homo sapiens
ttttccaactctgttatttgctttacttatcctccctttttgtatctctccccttttagcttttgcaaatcaccttcatcaagctatcttatttatttatwtttatttatttatgtatttggatcaacctactaaccaaaatcaaggcattataaatctttcagtgagggctactgtaatctgaagcctactttctagtgg

SEQ ID NO: 441372 - DNA, 201 bp, Homo sapiens
tttacatttgattttttaaaaactggagtgcttactagggtgtagcattatttaagggtcaatgaaagagatgaaagtgtatgagatctgaagacccgacrtgaaggagccttgagtattattacatagataagatacaactaaagcatgcagatattttgaatcaatgtcaaaattagtactaaaggcagtgatggttga

SEQ ID NO: 441373 - DNA, 201 bp, Homo sapiens
ttaagttctagaacatggagcaataatcaattgcaattctgaaaattgcattttcagaaataggtctccactaaggttttgttctcaacatatcatttaaraaaacataatctcaatgtaatcaaatgctcacatgtaatcaataatgtgagccatggggttggctaattgactgtgcagtgaccaactcctgtagagctc

SEQ ID NO: 441374 - DNA, 201 bp, Homo sapiens
aggagttatggtaataatatttattgagtattcaattaggaggcactcttcgaaatgctttacctatactatctcatctaatcttcataacagcctatatygtgagcactgccattattcatattttacagataaagaaactagctacttgcccaagccatggctagtggtttgaacccagccattccagtttgaaccacc

SEQ ID NO: 441375 - DNA, 201 bp, Homo sapiens
atgtatagatatgaatatgtgtgaatgctttattctattgatgtgaattttccagatgcctaaagctaagtgactaatcaaaaatttttgttttgttttayttcatcgagtctttatggaaatatttctgaaagtgctggaaatgtaagttctggagtcagcctgctatgttcgaatccctgtttctttatctactgactt

SEQ ID NO: 441376 - DNA, 201 bp, Homo sapiens
ctgagtttcatctgtcactttgggcaaatcactgtgtactactctgcaccttggtttccttatttgtaaattgaggatttgagtgggtcacctgtaagggwtcttccaactccagcgtgtcatgattctacaaatgtctcaagagatgccaatgctatacacaaccatgaattttattctttggccaaaagttgaccctaa

SEQ ID NO: 441377 - DNA, 201 bp, Homo sapiens
ttggttatatttgccaggatgttgacccttctcacttcctgggtcttgtctcaagcaacatgacgtgacggggtggtagccatagcttgagatttaatggrcttcttattgtgttatctagatgaagcatttcccctttagaaaccaggatttctaagtcgcagagcccagagttgtaggaacagctgtgggtcacttagg

SEQ ID NO: 441378 - DNA, 201 bp, Homo sapiens
aacttattcatttatataacaagaagtctggagtgggggcagtctttaaaactgattgaatcagcagctcaataaagtcaccatgctccaggttctttctrttttctccttctgccatcgtcagagtgtcaattttgccctctgcctggattgactcatggctgcaaggtagatgcagcagtttcaggtatcacatccaga

SEQ ID NO: 441379 - DNA, 201 bp, Homo sapiens
taagcattacttgaaagaatcaggtgggagtaagattttctctgcctaaattttaaaattagcatttaaaaacaagttacacacatagttacatattaatrctatacaggaaattataaatattaggtgctctatttgctgatcaatagctagtccttccccaaagtaatcattgataagcttccagtgtatatttccgga

SEQ ID NO: 441380 - DNA, 201 bp, Homo sapiens; identical to SEQ ID NO: 365888

SEQ ID NO: 441381 - DNA, 201 bp, Homo sapiens
aacattcacaacctttattatgggtgagagcttcactacaactttagaaataaaaagtaaaattacaacataggtcctaggccttggcgagcctgaaaaaraagattgggaaggagggcacagggtccttccacctccctggaaaggtgcagaatgagccaggcctaactacagggccatgagcctctagaagcttagggg

SEQ ID NO: 441382 - DNA, 201 bp, Homo sapiens
tttagaaataaaaagtaaaattacaacataggtcctaggccttggcgagcctgaaaaagaagattgggaaggagggcacagggtccttccacctccctggmaaggtgcagaatgagccaggcctaactacagggccatgagcctctagaagcttaggggggaataagaaacactgtgaacttagatatataaatagagaga

SEQ ID NO: 441383 - DNA, 201 bp, Homo sapiens; identical to SEQ ID NO: 365886

SEQ ID NO: 441384 - DNA, 201 bp, Homo sapiens
ggtgggcacgtggaacttgaggaggaggtaaccagtcagctgatccaacctgagccaagagacccatgcctgggaccatcttgggtgtgggctgagggagrggcaagcaaaaggacttggaagagtcaggcactggcccctctgatgtgtcttctctgactcccagctgctggacggagggcttcgagaactttgggagga

SEQ ID NO: 441385 - DNA, 201 bp, Homo sapiens
cccaaatccataaccctcacccatgtccctgctgtgtcatctgtaccatccacgccctcagcttttggccaccattttgtttcaccctaaagctgtattarcaaagtctcaaaaagtgacacaaagggccgggtgcggtggctcacgcctgtaatcccaacactttgggaggctgaggtgggcggatcacctgaggtcaga

SEQ ID NO: 441386 - DNA, 201 bp, Homo sapiens
accatggcagaggacaaagagagagtcagcactggaaccaagtttgccctcaagctctggctgcaacatctgggcaggtaaaagtgaaaaaggactggagrgctccacagtactgggctggaatggtctagtttttacaggcacgggggaaagcaggaaaggacaacctctcttggaattcctccacagaacacccccacc

SEQ ID NO: 441387 - DNA, 201 bp, Homo sapiens
agcctgaaaaagaagattgggaaggagggcacagggtccttccacctccctggaaaggtgcagaatgagccaggcctaactacagggccatgagcctctaraagcttaggggggaataagaaacactgtgaacttagatatataaatagagagagacccaagcaataggccgggcctgactcccagacccctgcagatcat

SEQ ID NO: 441388 - DNA, 201 bp, Homo sapiens; identical to SEQ ID NO: 365874

SEQ ID NO: 441389 - DNA, 201 bp, Homo sapiens
cctggggtaggtgggaggacacaggggatgggcagtctccgaggctctgtctcttctctctcccacccctgggcagcttcactatgaggagggctctcccyggaacctgggtactcccacctcctccactccacgccccagcatcacacctaccaagaagattgagcttgaccggaccatcatgcccgatggcaccattgt

SEQ ID NO: 441390 - DNA, 201 bp, Homo sapiens
tgaccaagctaggagagacccggaccacggagacagagaccccggcatcgcgacccccgaggacctcctctcctcgccctgtggcacccactagtcctggrcactcagtcgcggagagcccccgaccccgcgcgcccagccccgggggagcccacctcctccccgcggcccgcccgggccatgctcccccggggcagcggc

SEQ ID NO: 441391 - DNA, 201 bp, Homo sapiens
gcactcagtcgcggagagcccccgaccccgcgcgcccagccccgggggagcccacctcctccccgcggcccgcccgggccatgctcccccggggcagcggmtgagccccagccgggaccgggatcggagcccgcgcggagcatggatccgggctgggggcagcgggacgtgggctgggcggccttgctgatcctcttcgcc

SEQ ID NO: 441392 - DNA, 201 bp, Homo sapiens
tctttggcatttatctgattcttttagggatttatgatcctgaaaacatgaagtccttaggaaaacggaagtggggaggggtctgctgaactattacaggscagttcaaagcagggtgagcacccttcccccacatctgacccacctcgccggtctcaggtgctgcgttgccagctctctgctgaggaggtgcggttccca

SEQ ID NO: 441393 - DNA, 201 bp, Homo sapiens
ttaggtaaagagaaggagcctgggagcccagctctagccaggggcccgggactgcagacccaaggcaggacagtgaaagaggagagagccttaattccaaytccccctgttttcagacattccattccagtcctaccacatcttcctcccaatctttgtctcttccaaactttcccttacctcctgccatttccccagcaa

SEQ ID NO: 441394 - DNA, 201 bp, Homo sapiens
ccttgtgattaatcaccctttaatcattcttgccctctgagtcacccaaagtctgcatctcaacaaagacagtaggggtgggggccactctgaagcacctsccagctcactgaccctcccccacccaccagactccccctcccgctccccgtccaaggtggaggtgaccgagaagacgacaactgtgctgagtgagagcag

SEQ ID NO: 441395 - DNA, 201 bp, Homo sapiens
tcagctactcagggggctgaggagggaggattccttgagcctgggaggttgaggttcaaggaggttgaagcagtgagccgtgattgtgccactgcactccrgcctgggtgacagagtgagaccctgtctcaaaaaaaattttttttttccatggctgggcacggtggttaatgcctgtaatcctagcactttgggaggcca

SEQ ID NO: 441396 - DNA, 201 bp, Homo sapiens
gttttcttttttctttttttcacgaagccttatggagaagtatgtttctgctttctttcctgaggaagcctggcttctgggccacgggactgatcctgtcyacatcctctttccctccattctccatcgtgtctctgcccccgtctcaccccaccccgtgcccctctctgcctcagcttcccctcttcccctgcagtgagt

SEQ ID NO: 441397 - DNA, 201 bp, Homo sapiens
agcctgggaggttgaggttcaaggaggttgaagcagtgagccgtgattgtgccactgcactccagcctgggtgacagagtgagaccctgtctcaaaaaaawttttttttttccatggctgggcacggtggttaatgcctgtaatcctagcactttgggaggccaaagcgggtggatcacaaggtcaggagttcaagaccag

SEQ ID NO: 441398 - DNA, 201 bp, Homo sapiens
aggctgtgacatggatggtgtgggaggatgagacaggggcccggataatgaggttgggtagatgacacacattgtggatctgctaagaagttcctgcaggraagaaggggtgtgcagagaaaggatggaagagacaggaggctctggagtatgaaattgtagcaaaaaactcaatcaactagtacaggttagtcttcattc

SEQ ID NO: 441399 - DNA, 201 bp, Homo sapiens
atgaagtgctgagtgttaactgttgcctcagaagaaactgggagggggaagtcttagaagtgtttcaacataataaaagctctctcattctgaaatgtggscaaatttcagggattgatagatcctagcaaactgtgtccctggttcccgtgcttgagatcttatacaggacttgaaccaggtaagctgctacaggatatt

SEQ ID NO: 441400 - DNA, 201 bp, Homo sapiens
cgcccaaatagtgaacatcatacccaataggtagtttttcaaccctcaccctcctcccaccttctcacctttcatagtctccgatgtcttttattccactytatatgtccatgtatacccattatttagctcccacttataaatgagaatatgccatatttgactttgtttctgagttatttcaccgaggataatggcgtc

SEQ ID NO: 441401 - DNA, 201 bp, Homo sapiens
aatagtgaacatcatacccaataggtagtttttcaaccctcaccctcctcccaccttctcacctttcatagtctccgatgtcttttattccactctatatktccatgtatacccattatttagctcccacttataaatgagaatatgccatatttgactttgtttctgagttatttcaccgaggataatggcgtccagttc

SEQ ID NO: 441402 - DNA, 201 bp, Homo sapiens
ctcaccctcctcccaccttctcacctttcatagtctccgatgtcttttattccactctatatgtccatgtatacccattatttagctcccacttataaatragaatatgccatatttgactttgtttctgagttatttcaccgaggataatggcgtccagttccacccatgttgctggaaaacacatgatttcattctttt

SEQ ID NO: 441403 - DNA, 201 bp, Homo sapiens
ctctatatgtccatgtatacccattatttagctcccacttataaatgagaatatgccatatttgactttgtttctgagttatttcaccgaggataatggcstccagttccacccatgttgctggaaaacacatgatttcattcttttttatggctgagtagtattccactgtgtgtgtgtgtgttgggcgatgataatgat

SEQ ID NO: 441404 - DNA, 201 bp, Homo sapiens
gaaagaaggccggcagcttttctcgccgccttatcaagcgcttttccttcaaatccaaacccaaggccaatggtaaccccagcccccagctctgaggaccyagctctgaaagggcacgagttctctcagcccattccccacctccccttccataccccttcctggatctccagtgcctgggccaggaaagccctctgggtt

SEQ ID NO: 441405 - DNA, 201 bp, Homo sapiens
ggtttgccaagcaaatgaaccctatggatttgtttcctccatctcaagacccaaggaagagttgccagccaattctgtgccccttcctcaattctgtgtcygcactgctctccaggtggggctgcggtaggttgcttccattactgtggacgaattagggagcagctcttttgagatctaagcagctttctgctctctaat

SEQ ID NO: 441406 - DNA, 201 bp, Homo sapiens
taaaaccgctccagttgaggtttatgtaatgtgccgtcagagtgcctaggtgggggggagattaattcccatgagggaataaggatcagagtaggcttcayagaggagatgacatttaaaccacactttagagcaagagtaggatttcatcagagtgtgaaagtattctcggcagagggaagagctggagcaaatgaaaga

SEQ ID NO: 441407 - DNA, 201 bp, Homo sapiens
aaacctttccagcacagtccttgcaggaatcagctctgttttcagtagcctttggcgtgagctcctattgtatgccaggccctggcgtgggtcttagggayacagacttgaccaagatacagcccccacccctgggtcaatgacaagcttgaggcagagacaggtgtacataaagaagatggtaaaaccgctccagttgag

SEQ ID NO: 441408 - DNA, 201 bp, Homo sapiens
aaaaccgctccagttgaggtttatgtaatgtgccgtcagagtgcctaggtgggggggagattaattcccatgagggaataaggatcagagtaggcttcacrgaggagatgacatttaaaccacactttagagcaagagtaggatttcatcagagtgtgaaagtattctcggcagagggaagagctggagcaaatgaaagag

SEQ ID NO: 441409 - DNA, 201 bp, Homo sapiens
ggtgggggggagattaattcccatgagggaataaggatcagagtaggcttcacagaggagatgacatttaaaccacactttagagcaagagtaggatttcwtcagagtgtgaaagtattctcggcagagggaagagctggagcaaatgaaagagggtggcttgcaactgagagactggcaagacaggaagagcaggaccag

SEQ ID NO: 441410 - DNA, 201 bp, Homo sapiens
ggataaagcacatgtttgtttctgctttcgttttcttttttctttttttcacgaagccttatggagaagtatgtttctgctttctttcctgaggaagcctrgcttctgggccacgggactgatcctgtccacatcctctttccctccattctccatcgtgtctctgcccccgtctcaccccaccccgtgcccctctctgcc

SEQ ID NO: 441411 - DNA, 201 bp, Homo sapiens
tactaaaaatacaataaattggctgggcgtagtggcacacacctgtaatctcagctactcagggggctgaggagggaggattccttgagcctgggaggttsaggttcaaggaggttgaagcagtgagccgtgattgtgccactgcactccagcctgggtgacagagtgagaccctgtctcaaaaaaaattttttttttcca

SEQ ID NO: 441412 - DNA, 201 bp, Homo sapiens
ttacctgagtccaggagttcaagactagcctgggcaacatggcgagaccccatctctactaaaaatacaataaattggctgggcgtagtggcacacacctktaatctcagctactcagggggctgaggagggaggattccttgagcctgggaggttgaggttcaaggaggttgaagcagtgagccgtgattgtgccactgc

SEQ ID NO: 441413 - DNA, 201 bp, Homo sapiens
ctcccctcctgctcctcatccctccctccccctttattaccgttttttgtacttgatgccttctctgtgagcagtggctctgtgggaaggagggagccggsagcctggtgggaagccttccccagagagatggctttaggggctttatttaaagactgtgatgatggagccacgcaaggctgcacctctgtgtgttgggag

SEQ ID NO: 441414 - DNA, 201 bp, Homo sapiens
cacccttgtgattaatcaccctttaatcattcttgccctctgagtcacccaaagtctgcatctcaacaaagacagtaggggtgggggccactctgaagcamctcccagctcactgaccctcccccacccaccagactccccctcccgctccccgtccaaggtggaggtgaccgagaagacgacaactgtgctgagtgagag

SEQ ID NO: 441415 - DNA, 201 bp, Homo sapiens
tcatagtctccgatgtcttttattccactctatatgtccatgtatacccattatttagctcccacttataaatgagaatatgccatatttgactttgtttytgagttatttcaccgaggataatggcgtccagttccacccatgttgctggaaaacacatgatttcattcttttttatggctgagtagtattccactgtgt

SEQ ID NO: 441416 - DNA, 201 bp, Homo sapiens
tgccatatttgactttgtttctgagttatttcaccgaggataatggcgtccagttccacccatgttgctggaaaacacatgatttcattcttttttatggstgagtagtattccactgtgtgtgtgtgtgttgggcgatgataatgatgtccattgctgtgtgacagcttggaatttaatttattaaagtcaagttggagt

SEQ ID NO: 441417 - DNA, 201 bp, Homo sapiens
cgggtgggggcggggcgccggcggtgttgtcagtgtcagctctgcgcacgcagccctcccggagccggtgccggcccgcgagccccagcgtctctgcagascagtcccctccagggtccggcggggcccgcgcggtgggaggagtcgggcactggccggcgactaacgggtccgactgctgaccaagctaggagagacccg

SEQ ID NO: 441418 - DNA, 201 bp, Homo sapiens
ttgtttctgagttatttcaccgaggataatggcgtccagttccacccatgttgctggaaaacacatgatttcattcttttttatggctgagtagtattccmctgtgtgtgtgtgtgttgggcgatgataatgatgtccattgctgtgtgacagcttggaatttaatttattaaagtcaagttggagtttataaactgcatt

SEQ ID NO: 441419 - DNA, 201 bp, Homo sapiens
gatctgagcatcttctaacttctggttcatcacaggcaccgaggaactgtgctgtgtagctgaactcgacaaccccatgcagcagaagtggaccaagcccrcgagggctggatccgaggtggagtggacagaagacctggcactgtaaggagtaaccctgccccgaccccatgctccagagcagagaggatcaaacctttc

SEQ ID NO: 441420 - DNA, 201 bp, Homo sapiens
agtccttaggaaaacggaagtggggaggggtctgctgaactattacagggcagttcaaagcagggtgagcacccttcccccacatctgacccacctcgccrgtctcaggtgctgcgttgccagctctctgctgaggaggtgcggttcccagtctctgtgacccagcagtcccccgctgccgtctccatggagacctaccac

SEQ ID NO: 441421 - DNA, 201 bp, Homo sapiens
tagatctgacatgcttgtgataggaagggatgccaaattatttccctttacctccattgttctttcttcctgagtctaagtgccatttttcctgccctttaaaaaaaattataaaaatttattcctaggcagggtgtggtggctcacaccggcactttgggaggccaaggcgggtggcttacctgagtccaggagttcaag

SEQ ID NO: 441422 - DNA, 201 bp, Homo sapiens
gtgtggtggctcacaccggcactttgggaggccaaggcgggtggcttacctgagtccaggagttcaagactagcctgggcaacatggcgagaccccatctytactaaaaatacaataaattggctgggcgtagtggcacacacctgtaatctcagctactcagggggctgaggagggaggattccttgagcctgggaggtt

SEQ ID NO: 441423 - DNA, 201 bp, Homo sapiens
tactcagggggctgaggagggaggattccttgagcctgggaggttgaggttcaaggaggttgaagcagtgagccgtgattgtgccactgcactccagcctsggtgacagagtgagaccctgtctcaaaaaaaattttttttttccatggctgggcacggtggttaatgcctgtaatcctagcactttgggaggccaaagcg

SEQ ID NO: 441424 - DNA, 201 bp, Homo sapiens
acccgcagcctcaaggatcacaaaggtagggggacgttggcagggtgcccctcatctcttcttttatacacatatcatgacctgggggacctcgagccagygtgccttctccttcctcccctaagagatagccggattcccagcctagttcagccaagctagcctagagggggatcttggtgccttggttcctggcctaga

SEQ ID NO: 441425 - DNA, 201 bp, Homo sapiens
gcactgccctctttggggtccaagaaggactgaccccaagggctccctttagtccagaggttcttaacctggagtctgtgaatgccttatggatctaaggrttggtttcaggaagtctgagaatcccattgaagttatgtgcaaaatgttggatgtgtgtttatatgcatttttctggggagaggagtctttggcatttat

SEQ ID NO: 441426 - DNA, 201 bp, Homo sapiens
ttgctcagtacttctccttgctgctgccatgtgaagaaggacatgtttgcttccccttccgccatgattgtaggtttcctgaggcctccccatccctgcasaactgtgaatcaattaaacttctttcctttataaattacccactctcaggtatgtgcttatagcagcatgagaatggactaatacactggcttactttta

SEQ ID NO: 441427 - DNA, 201 bp, Homo sapiens
gtagacggagccttataacaatgaggcaaaatcagcttagtctctgattaaattaaggctatctggccccatatgtgcctagtgatcatatatgtggcacrtacgtgtgatcatatatgtgtctggcccatatcacatatacgatctggccatatatgtctacccttcaagaatctattgctacatttgctggcccactgc

SEQ ID NO: 441428 - DNA, 201 bp, Homo sapiens
gtctggcccatatcacatatacgatctggccatatatgtctacccttcaagaatctattgctacatttgctggcccactgcctttagctgtcagatccttygggttttgcctcagctgtggaacactgaagagatctgcctcactcagtggcacactcttcccaggaaggaccacatccaatgactgattgaggtggagac

SEQ ID NO: 441429 - DNA, 201 bp, Homo sapiens
aacaccagcctttcaactcaaaaggcccccagctgccctgaggaagggctccacagacatccacaggatgtttttgcatttcattcattagcttccaagargaaaggcaatctagatggaatttctcagttataagtggaaaatttaagaaattaatcatcaaggataggggagtatcattatgaaaattaggtttccatg

SEQ ID NO: 441430 - DNA, 201 bp, Homo sapiens
tcagctgtggaacactgaagagatctgcctcactcagtggcacactcttcccaggaaggaccacatccaatgactgattgaggtggagacacatagactcractattttggatcaacatgagataactcttgtaggcttaatacattccagaactccccaaggatttagctgaggctttggtgggcctggatcatatttca

SEQ ID NO: 441431 - DNA, 201 bp, Homo sapiens
ctgcgatagaactacctatggacctcctaaatccaggtaaagccaaaagaagataaactttagattttgttatttaatcaggtcattcttaaatcaggtaktcatagggcaacaagatacttgcatggggagtgcaattaggagagagtgtgcactgatgctggataggaaaatcattgcaaggaacaccagcctttcaac

SEQ ID NO: 441432 - DNA, 201 bp, Homo sapiens
gcccaattctgctttctctccctcccttaacacaaaggctgaagcttaataaatactctgtacaccaaactccatctcagttactatttgcagaaaactcmacttttagcacctagtgtcagacatggtctaagaaagcaggtgataagatatggttattgatctagataacctcacaactacatcagctgtgaaaactag

SEQ ID NO: 441433 - DNA, 201 bp, Homo sapiens
tgcagaggcaaagtgagatggaaagtataaaagtcagaggccacacatactggtcatggtgtttctcctgataacctgcatcctgagaattcccttctgcsatagaactacctatggacctcctaaatccaggtaaagccaaaagaagataaactttagattttgttatttaatcaggtcattcttaaatcaggtattcat

SEQ ID NO: 441434 - DNA, 201 bp, Homo sapiens
aatttatttagaaatttgaattgactgttagattaccgaagatatcaaaaaaacctcttacaaaaataagaatttttctttttcttggccaaaatgaatcyggctctccatcaattccagaagttctgaatgcagaggcaaagtgagatggaaagtataaaagtcagaggccacacatactggtcatggtgtttctcctga

SEQ ID NO: 441435 - DNA, 201 bp, Homo sapiens
ccttccaatgataaatgtggtttgggcagctttgggggaatacagcagagaggctcccagctccctctctctgtttgcagtagatatgccacattccctgygtggagaggcaggcaagcaagtgtcctggtaaaattcgcccaggcagaccaaagactccatgccttattgagagtgattattcaaattaaatttaattat

SEQ ID NO: 441436 - DNA, 201 bp, Homo sapiens
tgtggagggaccgacacccaggcgctcgcagctggggaagggggcttacgtctggggcaggcaagactgctgcacagtccctccagccacccggcgcccgmgacgccggcgcagacaggaagctgtagatccccgaggggctggctccgacagctccacctgcagcctcccctgccgccagtgtgcagccaagtccactag

SEQ ID NO: 441437 - DNA, 201 bp, Homo sapiens
cactatgttaggcaatctgggattatttacatgggaatcctacttaagcaacttcaaatgtgttcctttgttcccaaggagaggaccaccagtaaaggaaygttctggggtggtgggacacacttactgacgctgcagttctcctcatcactcccatccttgcagtcctcgtcaccatcacattgaaacgtgctggggata

SEQ ID NO: 441438 - DNA, 201 bp, Homo sapiens
ccttgcagtcctcgtcaccatcacattgaaacgtgctggggatacattgtccatttctgcattccaccagaccctggctgtgacaggctaggaaggaccakaacaatattcactttatttattaattcttctctctcaatctgcacatcaaataagcaacagccatttatcaagcatcgctaagaaacaaggtgttctgca

SEQ ID NO: 441439 - DNA, 201 bp, Homo sapiens
cagataaaaatcttttttttttttttatactttaagttttaaggtacatgtgcacattgtgcaggttagttacatatgtatacatgtgccatgctggtgcrctgcacccactaactcgtcatctaacattaggtatatctcccaatgctatccctcccccctccccccaccccacaacagtccccagagtgtgatattccc

SEQ ID NO: 441440 - DNA, 201 bp, Homo sapiens
tgatgtggatgggccttacccattcagataaaaatcttttttttttttttatactttaagttttaaggtacatgtgcacattgtgcaggttagttacataygtatacatgtgccatgctggtgcactgcacccactaactcgtcatctaacattaggtatatctcccaatgctatccctcccccctccccccaccccacaa

SEQ ID NO: 441441 - DNA, 201 bp, Homo sapiens
atcagcggactttgagtaaagccgatgacattccatgatgtggatgggccttacccattcagataaaaatcttttttttttttttatactttaagttttarggtacatgtgcacattgtgcaggttagttacatatgtatacatgtgccatgctggtgcactgcacccactaactcgtcatctaacattaggtatatctcc

SEQ ID NO: 441442 - DNA, 201 bp, Homo sapiens
cctttgaattaggtggggcctgtgactgatggctctgggcaaccacataggagaagcaacattttgtgcttttggatgctgagtcaaaaaaggtaatacarcttcttcctggcttcctttttgggaagcttgctttggaggatgccagccaccatgaagtgagtctcatacagagaggaactgaggccccagccaacaggc

SEQ ID NO: 441443 - DNA, 201 bp, Homo sapiens
tagaatattatttggcttaaaaaaaatgagttagagctgcatcagttgacctggagagatgtccatgatatattgctacatgagaaaagcaactaacaaayggaattatagagtgttattccaaattgtaaaagtaaacaatgacggcttgtgaaaaagataggtgtttatgattgtgggagaatattcataatgcactaa

SEQ ID NO: 441444 - DNA, 201 bp, Homo sapiens
atatttataaggaggctgatgttggcctgattaaaaaaaaatgatgcatgaagtgcaatatgactctcagtttgctgaagaagacacaacactgaaaggcyggcataatcttgaggatgagtcagagtggagagaagactagacggaagaggtttggggttggtcggttcagtttatcctttcctgtgatttgtgaaggag

SEQ ID NO: 441445 - DNA, 201 bp, Homo sapiens
tttaagaacatttattgcagtattgttaaaatggcagcaaactggaactaaaccaaatgtccatcaagtggggaataattttaaaacttataataaatctrtagatagaatattatttggcttaaaaaaaatgagttagagctgcatcagttgacctggagagatgtccatgatatattgctacatgagaaaagcaactaa

SEQ ID NO: 441446 - DNA, 201 bp, Homo sapiens
ggagccaaggaaaaggaaaggattaagtaatgatcatatattattctgtagatctttattgaattcggtaaggtttattggatcttgagttttattccttyaaaggcattcttcacagaatgctaagcaagataaactctcaaaatacctgtcaaccccaaattctatgatttatgatatcaataagcttttttatcttaa

SEQ ID NO: 441447 - DNA, 201 bp, Homo sapiens
caatgtaaatgaaaaaggacaataaaaatccatattgggactttcaaaaatactatgatgtacttagaatcctagatctatcagattgaaaaaaaaaaatscaaccctaaatatataatttccacattcctttctgaagatttactgtattttcatttcttgctaaatttatgtaggggcaagtgcaattatttgcataca

SEQ ID NO: 441448 - DNA, 201 bp, Homo sapiens
tagctttctttaagaacatttattgcagtattgttaaaatggcagcaaactggaactaaaccaaatgtccatcaagtggggaataattttaaaacttatartaaatctatagatagaatattatttggcttaaaaaaaatgagttagagctgcatcagttgacctggagagatgtccatgatatattgctacatgagaaaa

SEQ ID NO: 441449 - DNA, 201 bp, Homo sapiens
actctagaaaagggatgaggctccatgtgagcagaactccttggctaacagagtccttaccccatggggtgagctagaggaggagggccggagggtgcctmtaaatcagggtttctcaccctaaatgctattgacaagttataccagttaattaattgctatgtagagtgattcctgtgcactgcaggatgttttgtaaca

SEQ ID NO: 441450 - DNA, 201 bp, Homo sapiens
tttgaaagcatcactctagaaaagggatgaggctccatgtgagcagaactccttggctaacagagtccttaccccatggggtgagctagaggaggagggcyggagggtgcctataaatcagggtttctcaccctaaatgctattgacaagttataccagttaattaattgctatgtagagtgattcctgtgcactgcagga

SEQ ID NO: 441451 - DNA, 201 bp, Homo sapiens
aaaatgcttccatagcatctatggattcatacacggagaaggaaattttagcaatgatctaatccagcagctagggcaagagtaccagtggaggcccaatygccatttgtctacatatttagaagttataaatcaagttatcaagctgttaaagaaaatttctctcctcctctcttgacaaacacatctgttaggttcaaa

SEQ ID NO: 441452 - DNA, 201 bp, Homo sapiens
tgtaaatcatcttacgtaaaaggtggctggaacttaagagctgctcaaattttgtttgatgattgggattgcttttgacttaaataattgaaaccgttttrtattatatgaaaagacaaaaaagtcctgttgtgtagaaagcaaaagagaaaatttaagcatcaaagtcactgtatcctaactgagtctgtgcaggtaata

SEQ ID NO: 441453 - DNA, 201 bp, Homo sapiens
ccccatgatccaaacacctcccatcaggccccaactccaacactggggattacatctcaacatgagatctgagcagggacaaatatccaaactatatcacyatgtaaagcaatctatagattaaatataatcccaatgacattcttcacagaaatgggaaaaaagtcctaaaattcatatggaatcacaaaagactcagaa

SEQ ID NO: 441454 - DNA, 201 bp, Homo sapiens
aaaatgttttactccatgcaaagtcttactgtgctctaaaatatgctctttatgactttgttggtatggatgaacgcaagaaaactgaaaaataaatttarttaaacgagggatgcaaattaattttctttttaaaaaattgcatctctcatctaaattctcttttgcaaagtttaatatccagttctttgccacataagt

SEQ ID NO: 441455 - DNA, 201 bp, Homo sapiens
tgaggcaggagaatcccttgaacccaggagttggaggttgcagtgagctgagatcacaccactgcactccagcctgggagacagagtgaaactccatctcaaaaaaaaaaaaaaaagaagaagaaagagattaaaattttgattgtgctgtatgcttttgtgtaagtgatgatctttaaatttgtaactttccaataccct

SEQ ID NO: 441456 - DNA, 201 bp, Homo sapiens
aatctaagcatccagcctcagtccttgacagttcatcttgacatataaatgcctttcacagtggataagataaattttttgcaattctaaatatcctgttycaaacttgaaacatttatactaaacattttgtatctgatttcaaaaatctcttcttgaatcttgtcatattctccctgtttgggtcccacagatttgaca

SEQ ID NO: 441457 - DNA, 201 bp, Homo sapiens
atcaatagaaatgcttaaagcagagcataagttctgagcttatttttctagttaactcagtattttaaaaacactttttattgcaatcctaactgacaatrgatgatagatagatagatagatagatagatagatagatagatagagatagatagttagatagattttttttttttgagatggagtctcactctgtcgccc

SEQ ID NO: 441458 - DNA, 201 bp, Homo sapiens
cgtttacactattgttttaataataaatgtacttcatagacaatattgagcttgtatgatttcaacttacaattcttcaattattaactctagagaaaaamaaaaactcagccacttacatatgtcagacacactatagcatccagaggaatttatacagaattgcaggcacaatgtctctggaggcaaaaatcagtctct

SEQ ID NO: 441459 - DNA, 201 bp, Homo sapiens
atgcttaaagcagagcataagttctgagcttatttttctagttaactcagtattttaaaaacactttttattgcaatcctaactgacaatagatgatagayagatagatagatagatagatagatagatagatagagatagatagttagatagattttttttttttgagatggagtctcactctgtcgcccaggctggagt

SEQ ID NO: 441460 - DNA, 201 bp, Homo sapiens
ataaattgcaattatttttctcattctgtaggttgtctattcaatatgatgatagcttcttttgctgtgcagaaactgtttaattagatcccatttgtcarcttttcctttcgttgcaattgctttcaatatttttgtcatgtaatctttccctgtgcctatgtcctgaatggtattccctaggttttcttctagggtttt

SEQ ID NO: 441461 - DNA, 201 bp, Homo sapiens
ttttctagttaactcagtattttaaaaacactttttattgcaatcctaactgacaatagatgatagatagatagatagatagatagatagatagatagatagagatagatagttagatagattttttttttttgagatggagtctcactctgtcgcccaggctggagtgcagtggcgtgatctcagcttactgcaacctcc

SEQ ID NO: 441462 - DNA, 201 bp, Homo sapiens
gatgatagcttcttttgctgtgcagaaactgtttaattagatcccatttgtcaacttttcctttcgttgcaattgctttcaatatttttgtcatgtaatckttccctgtgcctatgtcctgaatggtattccctaggttttcttctagggtttttgtagtttcgggttttacatctaagtctttaatccatcttgagttaa

SEQ ID NO: 441463 - DNA, 201 bp, Homo sapiens
tttctagttaactcagtattttaaaaacactttttattgcaatcctaactgacaatagatgatagatagatagatagatagatagatagatagatagatagagatagatagttagatagattttttttttttgagatggagtctcactctgtcgcccaggctggagtgcagtggcgtgatctcagcttactgcaacctcca

SEQ ID NO: 441464 - DNA, 201 bp, Homo sapiens
tcatgtttgttgaagatcagatggttgtaggtgtgtggccttatttctgggttctctattctgttccattggtctatgtgtctgttcttgtacagtagtamcatgcagtttttggttactgtagtcttgtagtatagtttgaagttgggtagggtgatgcctctagctttgttctttttgcttaggattgtcttggctata

SEQ ID NO: 441465 - DNA, 201 bp, Homo sapiens
ctcagtattttaaaaacactttttattgcaatcctaactgacaatagatgatagatagatagatagatagatagatagatagatagatagagatagatagwtagatagattttttttttttgagatggagtctcactctgtcgcccaggctggagtgcagtggcgtgatctcagcttactgcaacctccaccttccaggtt

SEQ ID NO: 441466 - DNA, 201 bp, Homo sapiens
ttaaaaacactttttattgcaatcctaactgacaatagatgatagatagatagatagatagatagatagatagatagatagagatagatagttagatagattttttttttttgagatggagtctcactctgtcgcccaggctggagtgcagtggcgtgatctcagcttactgcaacctccaccttccaggttcaagcaatt

SEQ ID NO: 441467 - DNA, 201 bp, Homo sapiens
tttctgccatcgtacagaatctgagcatctccataacttcaatttccctttcttttttttccagctttattgaggcattcttaacaaataaaaattgtacrtatttaaggggtgtaatgtaatgtttgatatatgtataccttgtgaaatggctaccacaatcaagctaagaagcatatctatcaccacatagttacgtgt

SEQ ID NO: 441468 - DNA, 201 bp, Homo sapiens
gactgttaaatatacattatcattctaatataaattagaaaacaaaattaataaaataaagcaccatttaaaataaacatcttattaaaagtgtaaaaataatcaatcataaacattttgaatgaaaatatcatttgaacatatataaaattcagtcttataaaataaacatgttgtaagaatatttttgagcagaagtgt

SEQ ID NO: 441469 - DNA, 201 bp, Homo sapiens
gtcattccggtcagatccctggccccggccaggccgtgaagtacatgaaggaagagactacatggcaaaaaaaatttgagtaccttccacccccttggctrgaacaatggctagcatgtagcaggccctcaacatgtgtgtgttttaagtagaacttcatttcatgtaaggaacaaaatgtctctggctctcaggaaaata

SEQ ID NO: 441470 - DNA, 201 bp, Homo sapiens
tttaatgctttatttcccccaaaatagcaatcaaataactggatatacacatttccattttataatcactatcacactgtaatctaattacttgtttaaawgtgtgtctcctcactagattagccccttagagaacaaaacatgtatccatctgtgtaacttccttatgaaactacaggtatgtgctggaactgtatcctc

SEQ ID NO: 441471 - DNA, 201 bp, Homo sapiens
ggggtagaaattttaatcactaagttctcttccaaccatgaaacatttacattacaacctcaatgtaaatgaaaaaggacaataaaaatccatattgggaytttcaaaaatactatgatgtacttagaatcctagatctatcagattgaaaaaaaaaaatgcaaccctaaatatataatttccacattcctttctgaagat

SEQ ID NO: 441472 - DNA, 201 bp, Homo sapiens
agggagtatggcatacaattagaagttcccaaaagtttgctactcccctggagatgttataaaatagaatcagggttattagcccacattcaagcaaaagyttgtttaaagtggggcattttctaacttcttctggatagactaggcctctcttcacagttttgttaaatttagtgtttcatgaaacttaccaaggccttt

SEQ ID NO: 441473 - DNA, 201 bp, Homo sapiens
gaaatggaatatttagactggaaaggagtcttaccaagactctcaaggttaaatttctgctatatgagaagttgacaagaggaaaagtagcttaaatttgyttcatataactttagacgacatgatcagaactagtaggtgcaatttacaagaattgtgggttcaggaaaagaattttctaaaatctaaattcaactttga

SEQ ID NO: 441474 - DNA, 201 bp, Homo sapiens
cagagcagaccaaacgccaatgcagaaggctcaagaaagaggcaaacagactagccactgctccaggatgactgtggctctttatgagtgaagagaaaggrtggagactgaagacagaactggggacagtgacaggcttggggaagaacagctgattcagcagtcccaaggtgagtcatcccatgtgttccacacccaggt

SEQ ID NO: 441475 - DNA, 201 bp, Homo sapiens
aattcaaactacagttctcaaggggagatgggagtactttttagagtcagtggtgaggaggcagcatgtcagatttttatgcttatacaaagtggtgtgtrctcaaaacaagttgagaaatactccaagatgagtaaaatatgacttcagaaatttgaagaacagattaagaaatggaatatttagactggaaaggagtct

SEQ ID NO: 441476 - DNA, 201 bp, Homo sapiens
tattaacagaaccaccctgtaagaagtactaaaggaagtcctttgggataaaataaaaggacagtatacagcaacttgaatccatatgaagaaataaaagrtattggtagaggtaattaaataggtaaaagtaagataaaagaaatgtattttttctataaatcttttattctatctgattcttaaaaacaactgcataaa

SEQ ID NO: 441477 - DNA, 201 bp, Homo sapiens
tcaaagttttaagtcagtatataactatatggatccattacaagataaattaattcaaaattcaaaaaaaattaaacaaatattgaattaactaaaaaatyggcattttaaaaatgcctaaaatagtgctggaatatatgagtatcaaaaagtggaaatgtaattgattactaaagagatgtggatggtcttcaggatgat

SEQ ID NO: 441478 - DNA, 201 bp, Homo sapiens
gcagggcaggtgggcaagcaagaacaaagattttgttcttgggaataggagagagagatgtttagaaataggtggaagattattgagtaatattaagggtccaactgatgttgaaagtcaggcatggcagtaatctgcattcttcagtaatgctctccctcagtcctgaagagcatagacataggattagaaaatgtgggc

SEQ ID NO: 441479 - DNA, 201 bp, Homo sapiens
cagggcaggtgggcaagcaagaacaaagattttgttcttgggaataggagagagagatgtttagaaataggtggaagattattgagtaatattaagggtccaactgatgttgaaagtcaggcatggcagtaatctgcattcttcagtaatgctctccctcagtcctgaagagcatagacataggattagaaaatgtgggct

SEQ ID NO: 441480 - DNA, 201 bp, Homo sapiens
agggcaggtgggcaagcaagaacaaagattttgttcttgggaataggagagagagatgtttagaaataggtggaagattattgagtaatattaagggtccaactgatgttgaaagtcaggcatggcagtaatctgcattcttcagtaatgctctccctcagtcctgaagagcatagacataggattagaaaatgtgggctg

SEQ ID NO: 441481 - DNA, 201 bp, Homo sapiens
gggcaggtgggcaagcaagaacaaagattttgttcttgggaataggagagagagatgtttagaaataggtggaagattattgagtaatattaagggtccaactgatgttgaaagtcaggcatggcagtaatctgcattcttcagtaatgctctccctcagtcctgaagagcatagacataggattagaaaatgtgggctga

SEQ ID NO: 441482 - DNA, 201 bp, Homo sapiens
ggcaggtgggcaagcaagaacaaagattttgttcttgggaataggagagagagatgtttagaaataggtggaagattattgagtaatattaagggtccaactgatgttgaaagtcaggcatggcagtaatctgcattcttcagtaatgctctccctcagtcctgaagagcatagacataggattagaaaatgtgggctgag

SEQ ID NO: 441483 - DNA, 201 bp, Homo sapiens
aaagtatccatttaattaagtaatagacctgtggattattttttgcctcgaatttttgctattatttaatattacttcatttaaataaagtaaaattactaaaaataaatacaataaaatggctagtatggtggttttcaaaacctgtcctcaagtcctttgatgtgggaggtctgtgtttcttccctttgaattaggtgg

SEQ ID NO: 441484 - DNA, 201 bp, Homo sapiens
ttgtctctgcagctcaagcctctctcctgaatttcagggacctgcaaccaactgatatgccaggaaatttacatctccaaattattctttatcataaactkttctattccttgtggtctctactttggcaagtagtatgacaaacatgtttcaccttttcccaaccaaccacctggtggtcatccttccttctaccttttg

SEQ ID NO: 441485 - DNA, 201 bp, Homo sapiens
tacatgtgcacattgtgcaggttagttacatatgtatacatgtgccatgctggtgcactgcacccactaactcgtcatctaacattaggtatatctcccartgctatccctcccccctccccccaccccacaacagtccccagagtgtgatattccccttcctgtgtccatgtgatctcattgttcaattcccacctatga

SEQ ID NO: 441486 - DNA, 201 bp, Homo sapiens
gtccccagagtgtgatattccccttcctgtgtccatgtgatctcattgttcaattcccacctatgagtgagaatatgcggtgtttggttttttgttcttgygatagtttactgagaatgatgatttccaatttcatccatgtccctacaaaggacatgaactcatcattttttatggctgcatagtattctatggtgtgta

SEQ ID NO: 441487 - DNA, 201 bp, Homo sapiens
cctggccccggccaggccgtgaagtacatgaaggaagagactacatggcaaaaaaaatttgagtaccttccacccccttggctagaacaatggctagcatrtagcaggccctcaacatgtgtgtgttttaagtagaacttcatttcatgtaaggaacaaaatgtctctggctctcaggaaaatataatttattttaaggtc

SEQ ID NO: 441488 - DNA, 201 bp, Homo sapiens
tgatttccaatttcatccatgtccctacaaaggacatgaactcatcattttttatggctgcatagtattctatggtgtgtatgtgctacattttcttaatycagtctatcattgttggacatttgggttggttccaagtccttgctattgtgaataatgccgcaataaacatacgtgtgcatgtgtctttatagcagcatg

SEQ ID NO: 441489 - DNA, 201 bp, Homo sapiens
agcacacagaagagaaatcttacttctgctatgacaaggctgcctagatttggaaacataaaatggcataacataacctctctctctctctctctctctcwctatatatatatatatatatatatacacacacacacacactctctctgaatagcacacatattacacacattatacctttaactctgcttcccaaactac

SEQ ID NO: 441490 - DNA, 201 bp, Homo sapiens
ttcatttagcgctaaggaggctcctgaatttgtgcaaatcttagaaacttaattgactcactaatcctataacaatggaaatgttgtgacttttaaaaatkgaaacagattgtcaaagtgagtagcgaattaaaagattgactttctacagctgaaaataatcagggaaagcatagaagacaaagtggattttatgctcta

SEQ ID NO: 441491 - DNA, 201 bp, Homo sapiens
ttatatatatataatattagaattattatttcagtcataatcaaataatttaccttccccgcttctttccactgatggttttaaatattttaaataatatkttaatacatacttataaaaaaaactgtctgaatgtttaatatttatgatcggagttcaaggtattaagaattatgtaacattttctaaaattataagaag

SEQ ID NO: 441492 - DNA, 201 bp, Homo sapiens
aaaaatgctttctaaaaatacgtgcatcacttttcacttcaaagttttaagtcagtatataactatatggatccattacaagataaattaattcaaaattmaaaaaaaattaaacaaatattgaattaactaaaaaatcggcattttaaaaatgcctaaaatagtgctggaatatatgagtatcaaaaagtggaaatgtaa

SEQ ID NO: 441493 - DNA, 201 bp, Homo sapiens
catttgaacatatataaaattcagtcttataaaataaacatgttgtaagaatatttttgagcagaagtgtctacctcttttggaatctatgccagtccagmtatttccttctggctattttattttcaaaaatctcatctccttttttcgagaacttgaccttttgggacaacacttttttttgagagacagaaatgcaac

SEQ ID NO: 441494 - DNA, 201 bp, Homo sapiens
tcataatcaataaacctatgttgagattatattatataaagatgtaatttgtatacataatggtacaaagaaggaaaaagaaacaaagctatacagaagcraagtgtagatattgttgaaattcggttaggattcatctgaactagactgttataacttaagacgttaattttaagttccagcacaaccaataagaataac

SEQ ID NO: 441495 - DNA, 201 bp, Homo sapiens
tataaattagaaaacaaaattaataaaataaagcaccatttaaaataaacatcttattaaaagtgtaaaaataatcaatcataaacattttgaatgaaaayatcatttgaacatatataaaattcagtcttataaaataaacatgttgtaagaatatttttgagcagaagtgtctacctcttttggaatctatgccagtcc

SEQ ID NO: 441496 - DNA, 201 bp, Homo sapiens
gaaaggcaagggacccaggatagctaaagtaatccttaaaaagttaaagtatgcacacttcataatttcaaaatgtattgcaaactgtggtaatcaagaargatagatagatcaataaaaaataattgaaagtccagaaataaacccatacatctatggccaattgttttttaacaaggggctccaagtccattcagtggg

SEQ ID NO: 441497 - DNA, 201 bp, Homo sapiens
catactaggacaactgaatttccatacgcaaatgaaagaagttggactcctacttcacaacatacagaaaagttaatttaaaatggatcaatgacttaaayataagagctaaatctattaaaatcttaaaagaaaacaaaggaataaataattagtcaccttgtattagccaatttttaaaatacatacactagaagcata

SEQ ID NO: 441498 - DNA, 201 bp, Homo sapiens
aagttttcttagttatcattacttcagttccctctgtttactagttctatgtagcatctgcaggaaatgcagacatgagggtttattttgaataagatatkaaaagtaatccaagattagaacccaagttcctctctcctcgccatgatagtttctgtaatcgtgaataaaagagaaaaaaaatctatgtctagaaagaag

SEQ ID NO: 441499 - DNA, 201 bp, Homo sapiens
aataaatcttgggccgggtgtggctcacgcctgtaatcccagcactttgggaggccaaagcaggtggatcacgtgaggtcgggagttcaagaccagcctgrtctacatggtgaaaccccatctctactaaaaatacaaaaattagccaggcatggtggtgagcgcctgtaatcccagctactcaggagtctgaggcaggag

SEQ ID NO: 441500 - DNA, 201 bp, Homo sapiens
ctcaagtgatccacatgcctcagcctcccagagtgctaggattataggcgtgagccactgcgcccagcctataattttattctttgactatgtgtttgtcyatctcagagatggagtgtagtaactgtattaggcaaggatctataggtacaaatgacaaaactatctcaaagcaaaggggggaggttaatggatcataaa

SEQ ID NO: 441501 - DNA, 201 bp, Homo sapiens
gggccgggtgtggctcacgcctgtaatcccagcactttgggaggccaaagcaggtggatcacgtgaggtcgggagttcaagaccagcctgatctacatggygaaaccccatctctactaaaaatacaaaaattagccaggcatggtggtgagcgcctgtaatcccagctactcaggagtctgaggcaggagaatcacttaa

SEQ ID NO: 441502 - DNA, 201 bp, Homo sapiens
cacgcccggctaatttttgtactttttggtggaggtggggtttcattatgttgcccaggctggtctcgaactcctgacctcaagtgatccacatgcctcarcctcccagagtgctaggattataggcgtgagccactgcgcccagcctataattttattctttgactatgtgtttgtctatctcagagatggagtgtagta

SEQ ID NO: 441503 - DNA, 201 bp, Homo sapiens
tgatctacatggtgaaaccccatctctactaaaaatacaaaaattagccaggcatggtggtgagcgcctgtaatcccagctactcaggagtctgaggcagsagaatcacttaaacctgggaggtggaggttgcagtgagccaagatcacaccattgcactccagcctgggtgacaaaagcgaaactctgtcttaaataaat

SEQ ID NO: 441504 - DNA, 201 bp, Homo sapiens
agcctcctgggtagctggggactacaggctcatgcgaccacgcccggctaatttttgtactttttggtggaggtggggtttcattatgttgcccaggctgrtctcgaactcctgacctcaagtgatccacatgcctcagcctcccagagtgctaggattataggcgtgagccactgcgcccagcctataattttattcttt

SEQ ID NO: 441505 - DNA, 201 bp, Homo sapiens
ttccaggttcaagcaattcttctgcctcagcctcctgggtagctggggactacaggctcatgcgaccacgcccggctaatttttgtactttttggtggagrtggggtttcattatgttgcccaggctggtctcgaactcctgacctcaagtgatccacatgcctcagcctcccagagtgctaggattataggcgtgagcca

SEQ ID NO: 441506 - DNA, 201 bp, Homo sapiens
tgcagtggcgtgatctcagcttactgcaacctccaccttccaggttcaagcaattcttctgcctcagcctcctgggtagctggggactacaggctcatgcsaccacgcccggctaatttttgtactttttggtggaggtggggtttcattatgttgcccaggctggtctcgaactcctgacctcaagtgatccacatgcct

SEQ ID NO: 441507 - DNA, 201 bp, Homo sapiens
gttctcacttatttgtgggagctgaaaattaacacaattgaagtcatggtgatagaaagtagaccaatggttgccagtgtctgcgaagggtagtggtgggrgaaagcagggttggttaattggtacagaaatatagttagatagaatgaataagatctagtatttgatagcacaacagagtgactacagtcaacaataatt

SEQ ID NO: 441508 - DNA, 201 bp, Homo sapiens
aagatttctttacttctttttttacttcttatggaaaaaaatatgatttttgtctcaatatattactaagaaattagttacacagttaaaaaaaaaactarccaaagtaagttcctaggccaatatactcttaatggactcaaataaactcttacttatcaaaagtttcaaattttatacactaattcaactaagttctca

SEQ ID NO: 441509 - DNA, 201 bp, Homo sapiens
gggactagaccttaataggctccaatgaaaagattttattcttgttataatgggaagccaatgtagggttttaagcaggggagtgacatggtgtgatttayattttagaaagttcactatcttactgtgtggataataggtaataagggaacaagagagtagtcaaaaaaagccaaataggaaactgtttcagtagtcatt

SEQ ID NO: 441510 - DNA, 201 bp, Homo sapiens
aaaaaactaaccaaagtaagttcctaggccaatatactcttaatggactcaaataaactcttacttatcaaaagtttcaaattttatacactaattcaacyaagttctcatttttaagataaaatgggagacagatcttccagaaaggccagctccagtcttgcccaaaactggtagagaaagtgtaacaatcaaatgagg

SEQ ID NO: 441511 - DNA, 201 bp, Homo sapiens
gttttatgactctatgaaagtattccaaactgcagaaacagcaaatacaaaagtcctgaggcaggaatgagcttggaggatttcaggagctgaatgaaagmtagcatggttagagcccagtgagtgatgggagactagaaggagacacagtcaaagtgctgggactagaccttaataggctccaatgaaaagattttattc

SEQ ID NO: 441512 - DNA, 201 bp, Homo sapiens
tcatccaacttcttagtggaaattgcagttatataagataacacttgtagttagtaaaccaggactagaaccaagtttaccaactcccaatctagaatgcrttatttatttatttatttacttgacctgaaaggttttttctggaattacaggtttggggaaacaaatcacttggttaaaagatttaggtcattgttttag

SEQ ID NO: 441513 - DNA, 201 bp, Homo sapiens
gcacacagaagagaaatcttacttctgctatgacaaggctgcctagatttggaaacataaaatggcataacataacctctctctctctctctctctctctmtatatatatatatatatatatatacacacacacacacactctctctgaatagcacacatattacacacattatacctttaactctgcttcccaaactact

SEQ ID NO: 441514 - DNA, 201 bp, Homo sapiens
tctagaaaagagactaatagtagcatagagtcagtcttctaaacttctttctctctcttaggacaaaaattggaagcaatatgcagccatttccaacaaawgagcagcccacatattagatggcaacatcaaggatagaaaactttaggaagataaaggcctgggaagtagattagctgtggctttcgcctggatgtggct

SEQ ID NO: 441515 - DNA, 201 bp, Homo sapiens
gagactaatagtagcatagagtcagtcttctaaacttctttctctctcttaggacaaaaattggaagcaatatgcagccatttccaacaaatgagcagccyacatattagatggcaacatcaaggatagaaaactttaggaagataaaggcctgggaagtagattagctgtggctttcgcctggatgtggcttcatggagt

SEQ ID NO: 441516 - DNA, 201 bp, Homo sapiens
agagaatcagtggccatttagcatttatttagacagcataaaagttgtaagaattgtaatatttctatgtttgtaggttgttgttgttgttgttgttgttktttttttgatgaagtcttgctctgttgcccaggctggggtacagtggtacaatctcggctcactgcaacgtctgcctcagggttcaagtgcttctcctgc

SEQ ID NO: 441517 - DNA, 201 bp, Homo sapiens
tacatatttaaggggtgtaatgtaatgtttgatatatgtataccttgtgaaatggctaccacaatcaagctaagaagcatatctatcaccacatagttacgtgtgtgtgtgtgtgtgtgtgtgtgtgtgtgtgtgttaagaacactaaggccaagaatcttagcaaatttcaagtatacaatttagcatcgttaactatag

SEQ ID NO: 441518 - DNA, 201 bp, Homo sapiens
tattccttgtggtctctactttggcaagtagtatgacaaacatgtttcaccttttcccaaccaaccacctggtggtcatccttccttctaccttttgctcytcccagtgaaccaccaaattctccatatgtgagtccttgagaacagggattttgccttatttgttcctcaaccccagtgactaaaacaatccccagcaca

SEQ ID NO: 441519 - DNA, 201 bp, Homo sapiens
acatatttaaggggtgtaatgtaatgtttgatatatgtataccttgtgaaatggctaccacaatcaagctaagaagcatatctatcaccacatagttacgtgtgtgtgtgtgtgtgtgtgtgtgtgtgtgtgtgttaagaacactaaggccaagaatcttagcaaatttcaagtatacaatttagcatcgttaactatagt

SEQ ID NO: 441520 - DNA, 201 bp, Homo sapiens
aggagcctaaagaactaagcagaaaacttcagaaaagtagaatggaaattacagaaattatactgctctgagcagaaaataaaataaaatttggaactacycaaggaggaagggaatatagtaagcctaccagtttctcagttgagactactggagaaccacactctcagaatggagaaaaaccagaggtagacggagcct

SEQ ID NO: 441521 - DNA, 201 bp, Homo sapiens
aatgtttgatatatgtataccttgtgaaatggctaccacaatcaagctaagaagcatatctatcaccacatagttacgtgtgtgtgtgtgtgtgtgtgtgygtgtgtgtgtgttaagaacactaaggccaagaatcttagcaaatttcaagtatacaatttagcatcgttaactatagtcaccatgttgtacattagatct

SEQ ID NO: 441522 - DNA, 201 bp, Homo sapiens
cccccaaaacaatgggattgcacgttaggccacctgctagctatatcctagacccagacattttccagtggagaggagagggtgacggaaaacatttccayagagggcagggcagtggggagtatgacgtaaggtcagagtcacctagggatttttaaatccacacttgctcactccccagtgatgctgagaaacagcacc

SEQ ID NO: 441523 - DNA, 201 bp, Homo sapiens
cacaacaatttaaaacgagagagctccaagtttctgaaagccccccaaaacaatgggattgcacgttaggccacctgctagctatatcctagacccagacrttttccagtggagaggagagggtgacggaaaacatttccatagagggcagggcagtggggagtatgacgtaaggtcagagtcacctagggatttttaaat

SEQ ID NO: 441524 - DNA, 201 bp, Homo sapiens
caatcagagtagaaaagtgactttactgtggaagtatattgaaagtgtctgattgtgttagatgctcatttggggtttatgatcatatattttatgtgacytcagttagcagacaggtgtatgatattctccaaagtgggtcaggtgttcaggtgcagatgcaacatacatgactagggagtgacaagactgaaagacaca

SEQ ID NO: 441525 - DNA, 201 bp, Homo sapiens
tcaaaagaatggggctcaagtttgtgatattaagacatggcatggttgctgaagggagtgatccaacaaaaaaagataaattaatgatgcaaaataaaaaygataactttaggagtaaagtctttgaaaagatgaaaggggatatgcttgttttaaaatgggagcaaagacatgtcctccaccatactcaagggaaagcag

SEQ ID NO: 441526 - DNA, 201 bp, Homo sapiens
taaaagttgtaagaattgtaatatttctatgtttgtaggttgttgttgttgttgttgttgttttttttttgatgaagtcttgctctgttgcccaggctggrgtacagtggtacaatctcggctcactgcaacgtctgcctcagggttcaagtgcttctcctgcctcagcctcccaagtagctgggatcacaggtacatgca

SEQ ID NO: 441527 - DNA, 201 bp, Homo sapiens
gagagggttccagtgggttgaaaactgaaaatacatcattggactgcaagatggaagtcattagagattttaacaagcgtcacttctgtaatgatcttgayaagaacgcaaccagagtgggctgaagagaatgtgggacatggagaggtgtagacagtgactgtaggaaactcttttaggaatttttctgtgaacagtggc

SEQ ID NO: 441528 - DNA, 201 bp, Homo sapiens
ttgtaggttgttgttgttgttgttgttgttttttttttgatgaagtcttgctctgttgcccaggctggggtacagtggtacaatctcggctcactgcaacstctgcctcagggttcaagtgcttctcctgcctcagcctcccaagtagctgggatcacaggtacatgcaatcacgcccagctaatttttatatttttagta

SEQ ID NO: 441529 - DNA, 201 bp, Homo sapiens
aggatgtagtgataaaatactggagagggttccagtgggttgaaaactgaaaatacatcattggactgcaagatggaagtcattagagattttaacaagcrtcacttctgtaatgatcttgacaagaacgcaaccagagtgggctgaagagaatgtgggacatggagaggtgtagacagtgactgtaggaaactcttttag

SEQ ID NO: 441530 - DNA, 201 bp, Homo sapiens
cccaaaaccagggcttttttcttacctctaacaacaagacagaagtgcaggaattacctagacatgtaacacacttcagttgaaggataaggtttgtcctyttccatctattgatgggggaaaataatctaagcatccagcctcagtccttgacagttcatcttgacatataaatgcctttcacagtggataagataaatt

SEQ ID NO: 441531 - DNA, 201 bp, Homo sapiens
gcatatatgaaccctgaaaatattttgctatgtgaaagaagtcagtcacaagagtcccatactgtatgatttaattcatattaaatgtccaaaatagtcaygtttatagaaacagaaagttaattagtgtttaccaggggctgaggagagggatagcaatttactgctaatgcgtgtaggtttctttctagggtgataaaa

SEQ ID NO: 441532 - DNA, 201 bp, Homo sapiens
aagtatgtggcctgccttttactttgtgtctatagtcaaatcaacttgcattgctttgcttcataaaaatagcataaaatgtgctacaaataaataaaagraaagtacattcatgcctgcatctgtgtttgacttgcaaaacaaaagacttcatgaaataaaaatattttgaggctcttttatttttatcactacttattc

SEQ ID NO: 441533 - DNA, 201 bp, Homo sapiens
cagagtacctggaatgatacgcagaaaagaaaaagtgctcaatcaatattgaatgaaaaaatgaaagaaaaactacattagttgtatttataaagtggctytatagcataatcccttatatgattaagactgtattatataataaacactttgctggttggcatacaatatattcttacactttttagtaactatgtctgt

SEQ ID NO: 441534 - DNA, 201 bp, Homo sapiens
ccccctgttctcacagttgtgacaaccaaaaatgtctacagacattgccaaatgttcccaaatgggggctgcaaaatcacccctagtgaagaaccaatgcrttaaacagatacagattaaaattatggtcatcataattacttttactttttcagagtacctggaatgatacgcagaaaagaaaaagtgctcaatcaatat

SEQ ID NO: 441535 - DNA, 201 bp, Homo sapiens
ctccttaaaggtaggaagtatgttaaactattattataattattactgttagaaagtactttgcaaaacatatagccctggaccacggtttctcaaaagcmgcactcctaacattttaggccatgtaattttttgttgtgggaggctgtcctgcatgtacattgtaggatgtttggcagcatatcttgcctctacctacta

SEQ ID NO: 441536 - DNA, 201 bp, Homo sapiens
gagaaattttacttctgctctcacaagactgcctggatttggaaacataaaatggtataacattaagttacatatttcttgttcaattcaaacactttacyagtgaaatacaagacagctccaactgttaccaccagaaatcacattctctgagcatttcctgtgttaccacaggaaagcacattcctcttggtgcaggaa

SEQ ID NO: 441537 - DNA, 201 bp, Homo sapiens
ctggtcaaccatctcatgattttaaattttcatttgggatttttatctacctcttcatagcagagcaaaacaaacttgtctttttcccataaatataattwaaaaagagacaggctgaggatacccaccaatgggtcactctaggccctatcaaagtatgggatcaggatatgaagtaaatcccattaattgctgtaattg

SEQ ID NO: 441538 - DNA, 201 bp, Homo sapiens
acttttgaaagcgaattgtcactaggacatatggggcttgatctggtcaaccatctcatgattttaaattttcatttgggatttttatctacctcttcatrgcagagcaaaacaaacttgtctttttcccataaatataattaaaaaagagacaggctgaggatacccaccaatgggtcactctaggccctatcaaagtat

SEQ ID NO: 441539 - DNA, 201 bp, Homo sapiens
taaaaaatgccttatagaatcttgaggttttgaggttgatgtgtttccacacccaaataaccccaaaatagttcatcctattgaaattcttggtgtcctgkaaagcattctatggaaaacctgcctggtcagccaagcccacacgtgagtctatgcagacatctcctctaacctcgcaagccccaggaacctcctctaacc

SEQ ID NO: 441540 - DNA, 201 bp, Homo sapiens
ttggaatcagatcagacaccaccacccctcattgcctgctccacatggattctttcatagcacaacttttgcatagcaaccgccaagaacccagctttgtsgagacaggacaatatcaaaaggaatatagcacaatctaatgttgaaactgtgagctacctcaagctagtatttcatgtgatgaccaataaatgtcaagta

SEQ ID NO: 441541 - DNA, 201 bp, Homo sapiens
tctttctttttcttcatttgtaatagtcatgatcctaccaggaaagaggtgagccactaaagcaggttcactgcagaatgtttaatgaagggctctgatcrcctacagaaggaaaaggtacaggcagggtttagataaaccaacaaggcgtagtacagtaggctgctgcagggagctgttagcaccctaggtttaagagac

SEQ ID NO: 441542 - DNA, 201 bp, Homo sapiens
tctaaaatctttaaagagctctaataattccttgataaatgctttattgcaatgttcatgtgtatgactttattttgtaataatctactaataacgtctamttcctgatgttgccaagcagtttctgtcccaaggttcaggctaaagcgttaatatttgtgtagatgccacagagacggactttggggacaaacagccagg

SEQ ID NO: 441543 - DNA, 201 bp, Homo sapiens
gctaaagcgttaatatttgtgtagatgccacagagacggactttggggacaaacagccaggctggcctcacaggggtaccagtgctgcccccctatagagytcctccttccccgcttgtccttggccgctgctaccatacctgctgcttctgctgttgccaatctgtgcccaggcactggcccggccaccttgttgccctg

SEQ ID NO: 441544 - DNA, 201 bp, Homo sapiens
ctagctacttctgaacatctgacccttcatgcttaaactaccccagaataatcagataacttccattctgaacactaccataattaagagaaaaaagttartggtgaggaaatgagttcataaacaccctgatatccacactaatactgaatctacagaccagaaaagaaactattcacaatcatgacctgagataggaaa

SEQ ID NO: 441545 - DNA, 201 bp, Homo sapiens
caaacctgaccccttgatcactgtacccatcttccacccacatctctcctgccacacccaccaaagtccatcctgcaggagccactctatagacaagggarccatgactataatgtggcagggactgccggttgtcatcagaatgcactccccgcgtttttcacagtaatggagtttaagatgcctccatgtacccagcca

SEQ ID NO: 441546 - DNA, 201 bp, Homo sapiens
agcactccgctggagcccctcctatactctccattcccttcactcaccacataaaccccacccaccagctcccatgcagcagccggtagtgacagcacatrttcactgggtcaaggtagaattgggaaaacctagctacttctgaacatctgacccttcatgcttaaactaccccagaataatcagataacttccattctg

SEQ ID NO: 441547 - DNA, 201 bp, Homo sapiens
agtaagcattaaaaataaccactgatacatgtaacaacatggatgaatattaaaggcattatcgtaagtgaaagaaacaggtttcaaaagggaatatactrtatgattccatgtgtgacattctagaaaagccaaaccagagatgtggagaacagatcagcagtttccagaggtttggagtgtggttttggccataaagga

SEQ ID NO: 441548 - DNA, 201 bp, Homo sapiens
acacccaccaaagtccatcctgcaggagccactctatagacaagggagccatgactataatgtggcagggactgccggttgtcatcagaatgcactccccrcgtttttcacagtaatggagtttaagatgcctccatgtacccagccaaagactacatttcccagttccctttgtgataggtgcagccatgttactaaggt

SEQ ID NO: 441549 - DNA, 201 bp, Homo sapiens
agaccatagtctagggattggtgaagcaagaaatagatggagcccaagtctttggataatttcatggggtaagcctgacttggcaaactgaaaagctcacyttggatctcttgcttaacagagaaaaaaaagttttatttaagccactctattttgggatctctattgttatggcagcttagtatttgcataatttgaatc

SEQ ID NO: 441550 - DNA, 201 bp, Homo sapiens
aagcactttcccacaaaggcattcatttactcacgttagctataaacgtgacagacttcagcaatccagtccagcctagggctgtacctacaacattgctwctacgagaaagcagctttcatatctgaaataaccaatttgtaaatataactttgaaatgcagccaatttattagctgaaatcttcctggaattctgtacc

SEQ ID NO: 441551 - DNA, 201 bp, Homo sapiens
ccaagaatcttagcaaatttcaagtatacaatttagcatcgttaactatagtcaccatgttgtacattagatctccggaacttattcattccacattaccraatctttgtaccctttgaccatctccccattttctccatcccctagtttttggcaactaacattctactctctgcatttacaagttgacttttttagatt

SEQ ID NO: 441552 - DNA, 201 bp, Homo sapiens
ttcaagtatacaatttagcatcgttaactatagtcaccatgttgtacattagatctccggaacttattcattccacattaccaaatctttgtaccctttgrccatctccccattttctccatcccctagtttttggcaactaacattctactctctgcatttacaagttgacttttttagattccacatataaatgagatc

SEQ ID NO: 441553 - DNA, 201 bp, Homo sapiens
ccagaacacactgtcctgagcggcacttgaaatgactaggtgagcattctattaaaaacaatattactgttaaagggctgaaaacccagaaacatcagctratttatgtatttacatgtaggatgttgtcaaggagcttttactgaagataagggtggtctcttgcaaaacgaaatagccattttgctttggcattcttct

SEQ ID NO: 441554 - DNA, 201 bp, Homo sapiens
atttcacttaatatgtcctccaagtttatccatgttgtctcaaatggcagaatttccttctaagaatactgagtagtgttctattgtgtaaagaaaatgtrgtgtgtgtatgtgtattctttgcataaaatttctattgtataaagaaatatatattctattgtgtaaagaaaatgtggcatcacattttctttatccatt

SEQ ID NO: 441555 - DNA, 201 bp, Homo sapiens
ttctattttaaattttttgaggaatctccatactgtttttcataagtactgtaccaattaacatttctaccaagaatatatagggtttccccttctccacwtctccccaacattttttatgttttctctttttgatgataaccattttaacagatatgaggtgacatttcattgtgattttaatttgcatttccctgatga

SEQ ID NO: 441556 - DNA, 201 bp, Homo sapiens
gttgaattattttagttccttatgtattttggatactaacctcattggatatatggtttttttaaataactttgaaaattataaaagtaatacttgtacayagaaaaatatatcgacaattataaaatgataaagttgttttcttctcctatcatatcaacaactataaaatgaaaaagttgtcttcttcctatcttagat

SEQ ID NO: 441557 - DNA, 201 bp, Homo sapiens
gaaagaaaaagaaaggaggcaagaaggagactctttggactgagatactagggcagaaagtgcagccaccaaccaaaaatcttgttggattgaagagctgstgtgaagggaatcaagacatgggtgacatggcaggagtatgggttgtggtcatatagtgggaggacagtttttcacgtgggtttcctggagaggaatcag

SEQ ID NO: 441558 - DNA, 201 bp, Homo sapiens
aaataactttgaaaattataaaagtaatacttgtacacagaaaaatatatcgacaattataaaatgataaagttgttttcttctcctatcatatcaacaaytataaaatgaaaaagttgtcttcttcctatcttagatgcatagaaacaaccactgtaaatagtgtttgagtatctttgtcaagctctttctacaattcat

SEQ ID NO: 441559 - DNA, 201 bp, Homo sapiens
tgagctgcagacttaatgttcaatggtctatttaacactctcagttggatgtttcagccaacatttattgagggcttaccatgtatgccacagtatttaakcattcaggattcagtttacaggaacttaatactataatcaacccaggtgaatcttctctttttcttacacccaacactgaatgcatcagcaagtctttgc

SEQ ID NO: 441560 - DNA, 201 bp, Homo sapiens
agttctgacaataagagtctcttgagatttgagaaagagcctgaagcctgtcctctgtgacccagctcccgccaaatggtacagtctgctcattctaccakagagcaaaagacatcaagaaagaggactcaacactccatgcatggtgctgacccttctccagggctgctcctctgctcacaaaacataccacttgctaat

SEQ ID NO: 441561 - DNA, 201 bp, Homo sapiens
agggaaaagactgacctatctatgcatctgtaatgggttgaatagtgtctccaaaatatatgttcaccgagaacctcaaaatgtgtccttcctttgcatayagggtctttgcagttgaagttagttaggacaaggtcatactggattagggtgaagcctaaatccaatatgactgatgttcttataataagagaacacaca

SEQ ID NO: 441562 - DNA, 201 bp, Homo sapiens
aaataaactcatttatcaagttgctagttttacaggcagctccatctatatcatgtatgctcaattacttaagcatacagtaattgacatcttaagcatcyttaagacaatgcagtacttctgtactgacacagtgcagattctgctcagcattcccctgtctcttagacttccttcccatatcggatttgcacaattcat

SEQ ID NO: 441563 - DNA, 201 bp, Homo sapiens
aaacattgtacttagtattatagtgctttcattcttgtaaaaaatggtacaacatgtaggagtacatatggagggagaagagcctccttctgttgtattartttctgctgtaaaaccaggaaaatcatcggccataaagctcatagggagggaaaagaacaatacataagcaaaatcatcaaggctgaaggggagaactca

SEQ ID NO: 441564 - DNA, 201 bp, Homo sapiens
aagagtatggaagttcctcaaaaaaattaaaaatagaactatcatatgatccagcatatgataccagcatacagtatagaactaacatatgatcccatttytagatatgtaaccaaagaatttaaaattgggatcttgaaaagacatctgcattcccatgtgcattgcagcattattcacaatagcaaaaacataggagca

SEQ ID NO: 441565 - DNA, 201 bp, Homo sapiens
gattcattctggagatcactgtaaggtttccccgaaagacaatagaagaaataagttttgcttttacaggattaactttatagtagataatacgcatagawcagggtaaggcagtttttaaaaactgagaggaaaaatgggcttctactctgaaaaaaattagaagaatagaaagaaaacaataaaactttcttcaaagct

SEQ ID NO: 441566 - DNA, 201 bp, Homo sapiens
tcttcaaagctatagggaataaaaagagataatggaaaaatcttaagacttaattaggtgtggagaaaaatctgccaagagatgaagccaagaagtcagaytgttaattgcttatttatttctagagcattgtcatcagaacgtgaataatgaataagacagtaacaaacaacagaaaagtaagaagtagttgaacatctg

SEQ ID NO: 441567 - DNA, 201 bp, Homo sapiens
agtcccaggatctgaggaccaatttttagcacaatctcacacaacaaacctattgggcacctaataatagaaacaagctaatgaatgttttgactgtgacaaaaaaaaatggtttaataactttttataaatgcattgtttcttctcattgtctcagggttatgccaaaattaatttcaaaactatctgcttaaatgtgtc

SEQ ID NO: 441568 - DNA, 201 bp, Homo sapiens
taatggaaaaatcttaagacttaattaggtgtggagaaaaatctgccaagagatgaagccaagaagtcagattgttaattgcttatttatttctagagcaytgtcatcagaacgtgaataatgaataagacagtaacaaacaacagaaaagtaagaagtagttgaacatctggggaaagatttcttaaataacctagactt

SEQ ID NO: 441569 - DNA, 201 bp, Homo sapiens
cacttccttttctcagtgcattaaaagactgacagagcagggcaggtgggcaagcaagaacaaagattttgttcttgggaataggagagagagatgtttasaaataggtggaagattattgagtaatattaagggtccaactgatgttgaaagtcaggcatggcagtaatctgcattcttcagtaatgctctccctcagtc

SEQ ID NO: 441570 - DNA, 201 bp, Homo sapiens
ataggtggaagattattgagtaatattaagggtccaactgatgttgaaagtcaggcatggcagtaatctgcattcttcagtaatgctctccctcagtcctraagagcatagacataggattagaaaatgtgggctgagcgcagtggctcatgcctgtaatcccagtactttgggaggccgaggtgggtggatcacttgagg

SEQ ID NO: 441571 - DNA, 201 bp, Homo sapiens
ctgcctcagcctgccaactagcttactagattacaggtgcccaccaccatgtctggtcaatttttgtatttttagtagagacagggattcaccgtgttgtycggactggtctcgaactcctgacctcagcaatctgccagcctcatcctcccaaagtgctaggattacaggtgtgagccactgaatccagccaaccattgc

SEQ ID NO: 441572 - DNA, 201 bp, Homo sapiens
aatcccagtactttgggaggccgaggtgggtggatcacttgaggtcaggagttcgagaccagcctgaccaacatggtgaaatcccgtctctactaaaaatrcaaaattagctgagcatggtggcaggcacctgtaatcccagctacttgggaggctgaggcaggagaatggcttgaactcgggaggcagaggttgcagtga

SEQ ID NO: 441573 - DNA, 201 bp, Homo sapiens
tgggtgatgttcatacaggcacctgggaagtaaagacatgcacatttaagagtggacacatcagaagtatatgtttgcaaactcatttaatatttgtttawaagataaagtatacttatcacaagaaaaaatttagatatgcaatcatacacataggtgcatgtaagtatgtgtatgtgtatgataatgaaatcaagctac

SEQ ID NO: 441574 - DNA, 201 bp, Homo sapiens
gaggcaggagaatggcatgaacccaggaggcggagcttgcagtgagccaagatcgcgcggctgcactctagcttgggcacagagcgagactctgtctcacaaaaaaaaaaaagaaagaaaaagaaaggaggcaagaaggagactctttggactgagatactagggcagaaagtgcagccaccaaccaaaaatcttgttgga

SEQ ID NO: 441575 - DNA, 201 bp, Homo sapiens
taaatgctattgacaagttataccagttaattaattgctatgtagagtgattcctgtgcactgcaggatgttttgtaacatccctggcttctacccactabcaagtaagaccccatcaaccctggatttacaatttaaaaaataatgtctacagacattccaaatgtcccctaggacaggggtccccagccccagggcccc

SEQ ID NO: 441576 - DNA, 201 bp, Homo sapiens
catcttgacatataaatgcctttcacagtggataagataaattttttgcaattctaaatatcctgttccaaacttgaaacatttatactaaacattttgtrtctgatttcaaaaatctcttcttgaatcttgtcatattctccctgtttgggtcccacagatttgacatactaataactgaaagttattgtgtcaagtaga

SEQ ID NO: 441577 - DNA, 201 bp, Homo sapiens
atatcctgttccaaacttgaaacatttatactaaacattttgtatctgatttcaaaaatctcttcttgaatcttgtcatattctccctgtttgggtcccayagatttgacatactaataactgaaagttattgtgtcaagtagaaattttaacaggcaggtactaataggtttcaaacaaaacatgaatgaactctgctac

SEQ ID NO: 441578 - DNA, 201 bp, Homo sapiens
accgtggtatccagattgaaatgaaattcttcacagctgtagaaaagttcttccgaaatttgttggtatcataagctctaaactgctctactctatggacyttcaagaaaactaccaacttttgcctttccgtctggcggcagccatcaggtaagccaagatgggtgcatacaagtatatccaggagctatggagaaagaa

SEQ ID NO: 441579 - DNA, 201 bp, Homo sapiens
tgccacgggagctcaggaactgggtcccagtaagatccgacaagacaccacctcccttccgcccgcacagcctgccctctctgcctgcagctagcgtcacsggtcggtccccgattcggagcagctgggaccctcgcggtagcaagcggattccggggccctaatgacaccgaaggagaggggcagccgcaaattagacct

SEQ ID NO: 441580 - DNA, 201 bp, Homo sapiens
atcatgaagtttcttcataagaattctggcatatccttagctctatcactacccaataatgacagctgtttcttacatagcttctcttcttcatctcattyttgaccactctccctagcatgttctatgtaacagccctacagacagtttctgacagctgattaaaagaactgaggggagatatctggggcaagaacgtcg

SEQ ID NO: 441581 - DNA, 201 bp, Homo sapiens
gagcttacgtagacaaactttagtattatttttatatctttgaatatgtatggacatttctatgtatgtctaatatactcacaagtgattaacacaaaccsaaaatttaatctgtaagaaaaaaaatctactttagattattttaggtaaaataagattcattagatttctggaattttacagctagaagagactggcaat

SEQ ID NO: 441582 - DNA, 201 bp, Homo sapiens
ctatcacatgaacattacaagataatgttacagaataatttctttttttttcttttcttgagtcagggtcttgctctgtcacccaggttggagtgcagtgrcatgatgatagctcactgcagtctcaatctcccaggctcaagcgatccactggcctcagccccccaccaagtagctgagactacagacacacaccaccat

SEQ ID NO: 441583 - DNA, 201 bp, Homo sapiens
ggatccaaaaaaatacctacccttgaacaagagaaattatatttaatttctttaaaggaaaagtcactttttatgttaaaactcaaaaatctcagaaccayagttttttctcttttattttccaatgtaacatcctccaggctttttcaagcaaccacatggatctaatagacaactcacgtatacgaaccagtacacact

SEQ ID NO: 441584 - DNA, 201 bp, Homo sapiens
taaacaattagattaaaatgcaggtagtactatcacatgaacattacaagataatgttacagaataatttctttttttttcttttcttgagtcagggtctygctctgtcacccaggttggagtgcagtggcatgatgatagctcactgcagtctcaatctcccaggctcaagcgatccactggcctcagccccccaccaag

SEQ ID NO: 441585 - DNA, 201 bp, Homo sapiens
cttaaaatagtgtttaataaacacaaatcttgacctcaagattattttattacttagtagcaattaggataatctaaaaaagaagctctaagaaagcaggwggagactcaaagaattggaattcaaaattatcttggctaaataataacagtgaagagaactaaaatagtagtacacatacaatgaagcaaaaactaaaac

SEQ ID NO: 441586 - DNA, 201 bp, Homo sapiens
ttttatgttaaaactcaaaaatctcagaaccacagttttttctcttttattttccaatgtaacatcctccaggctttttcaagcaaccacatggatctaayagacaactcacgtatacgaaccagtacacactcaattttaccaattggtaaaaattgttttctctcacccacagctttgaccaggtcacccctgccccca

SEQ ID NO: 441587 - DNA, 201 bp, Homo sapiens
caagactaagagattcctccaagaaagagcaagtgacttgaagaaatgccaggggaacctcctacagatttccagctcagggcttaaaaaggtcacccacracctccaatggtcattcccatactccactgtttttgaatacttgtcaacaatattttagtcgattcccaccttaaaacactttcttcacttggcttccag

SEQ ID NO: 441588 - DNA, 201 bp, Homo sapiens
gacactgctttacttttcttctcatactatccattgatatcaatgacattgatataaccatttgtctattctctgtcttggcccctagaatatagttatcwctgtgaaggcagggatttggctggtctttttcactgctttattcacagggcttggtacctggcctacagtaggtcctcaacaagtacctatttaatgatg

SEQ ID NO: 441589 - DNA, 201 bp, Homo sapiens
aatgtttttgactctaaccacaaagtcaaggtctgttcttcatcactccctccatcccttccttcactcccagtctctcctccaccagagtggtcaggatmaaaaatgtggacatttattggaccacattgttggggcaagggtagagctttaattgtgggcatttccttatactctggtaatgtgagtcagccacactac

SEQ ID NO: 441590 - DNA, 201 bp, Homo sapiens
tcacttctaaacagaagctcatggactggggcctgggagtctgtatttttaagagctctctagggaatcttaggcaaaaccccacccacaacccttctttycttggcacgcctttctttaccatcagcatgccaaagattcgaaaggctgagatttcaagggagttaggaaggaggagccaaggtaggcactcacttggtt

SEQ ID NO: 441591 - DNA, 201 bp, Homo sapiens
gacatcaatacatacaaagagcatttaaacagaattactatgttcaagtgactcaatgttctggttctaacaatcagactgaataaacagtactcacagcygcagaaataccaaagatcagagaacggggttaaaatctgcatgagcagagcatgagggatgaacagactgaagccgccttagatagaaaacaatctctgt

SEQ ID NO: 441592 - DNA, 201 bp, Homo sapiens
ttaacagattttttagctagaggaaacatgatggacataattccaaatcaacacatctttctgctttctatcgccagtgcactagaaaagctgtgtgacartgaaagaactcagaagaatgagacttaaatgttgctattatgactaacatcttaaaatagtgtttaataaacacaaatcttgacctcaagattattttat

SEQ ID NO: 441593 - DNA, 201 bp, Homo sapiens
ttttctctcacccacagctttgaccaggtcacccctgcccccactgtggcttctctattgttcttatcaaatgcagactcccgggatctcagcttcaaagrcctcctctagttttctcagctttcatttcctctgtaaccagtctgtattcttccagccaagaaatccttcattcagccctttgattcaccgtccccaatc

SEQ ID NO: 441594 - DNA, 201 bp, Homo sapiens
tccagaagaagttaacagattttttagctagaggaaacatgatggacataattccaaatcaacacatctttctgctttctatcgccagtgcactagaaaarctgtgtgacaatgaaagaactcagaagaatgagacttaaatgttgctattatgactaacatcttaaaatagtgtttaataaacacaaatcttgacctcaa

SEQ ID NO: 441595 - DNA, 201 bp, Homo sapiens
gacagttgtcattgtaacctaacgtgagctttaaactagaaaatttaatttttagactaaacaatatttatatgccttttctatcttcctatcaaatacartgaatcccactgtttttcagttttcctgaattcatgcaactcccttccaattctgaattcaacaggttgctggcctgtttcctagtcaacactacagagg

SEQ ID NO: 441596 - DNA, 201 bp, Homo sapiens
agtgtaccagtggtatttaaagccatgagcctgaattagatcaccaaaaggagagagatccaaggcctgaggcactccagtgtctacaggtgaaatgaggmgaaaacacaaaggagactagactaagtggccaaagaaagaggaaaacccaattggaagtcaggtgaagagtttatcaggtaggagggagtgattaaatgt

SEQ ID NO: 441597 - DNA, 201 bp, Homo sapiens
caaccaaagcaaaaatgaacagctgggatcccatcaagttacaaagctcctgcacagcaaaggaaacagtcaacaaagtgaagagacaacccacagaatgrgagaaaatattttcaaactacccatctgacaagagattcataatcagaatttataaggagctcaaacaactttcttttaaaaaatcgaataatcccactt

SEQ ID NO: 441598 - DNA, 201 bp, Homo sapiens
ttcccagcatggggttattcctaacattcatgattccaatgccttcctctgaccataccgctgatccttcccaaacattcattttgatgttatctaatgcrggacattgtctgatatcatttgtccagggtgtatcctcatcccagtttgcccttttgttcatgttgcaaagttcctacgtcactcaataatatgctacct

SEQ ID NO: 441599 - DNA, 201 bp, Homo sapiens
tagtttgctgacccctgatccagaagaagttaacagattttttagctagaggaaacatgatggacataattccaaatcaacacatctttctgctttctatygccagtgcactagaaaagctgtgtgacaatgaaagaactcagaagaatgagacttaaatgttgctattatgactaacatcttaaaatagtgtttaataaa

SEQ ID NO: 441600 - DNA, 201 bp, Homo sapiens
actcccttccaattctgaattcaacaggttgctggcctgtttcctagtcaacactacagaggaaaaacatgagcgaggaaggaaaagtactaaagcagaaratgtctattccttagtccgtgttgtagttaaaagatgagtctgttgagtcattacccacaactcctatgggtcccaagggaggacagttgtcatcagaac

SEQ ID NO: 441601 - DNA, 201 bp, Homo sapiens
ctctccatgtcttctcttttctcataaaagtttgcatagcataatacctcctttgtggagttacagtgagcacaaaagaagtaggataaaaagagagagakattagttacatgggagatagtattattttaagaagaaaccactttctttgtaaagtgacattttggtgcaattatgttttaaatgtatattctaaaagga

SEQ ID NO: 441602 - DNA, 201 bp, Homo sapiens
ccaattctgaattcaacaggttgctggcctgtttcctagtcaacactacagaggaaaaacatgagcgaggaaggaaaagtactaaagcagaagatgtctaytccttagtccgtgttgtagttaaaagatgagtctgttgagtcattacccacaactcctatgggtcccaagggaggacagttgtcatcagaactgcttttg

SEQ ID NO: 441603 - DNA, 201 bp, Homo sapiens
ctgtcatatgttgcccacgacttttgagtggttagcctcacttttcatttaaaacgtttttatttgaatcggttgtagtagtataggggtctaaaggacayatgtgcattcttgctagaaagtatgtggcctgccttttactttgtgtctatagtcaaatcaacttgcattgctttgcttcataaaaatagcataaaatgt

SEQ ID NO: 441604 - DNA, 201 bp, Homo sapiens
caccatttgattccaactttgaatgctattaagctaaatgtacacagaaatcctttttactccttttaagatgtgtacactatgtttatgacagtgaagtmctaggtctttgaaacactaacaggcccagattcaaaggggttcagatcacagctcagtcaagttccacctctatgatcttgagcaaatcacttaatctcc

SEQ ID NO: 441605 - DNA, 201 bp, Homo sapiens
tcttaaaatttgaagtgaaacgtgggattctaagattctaggtccagttaaaatggagtaaaaatgtcccaccttacctccccctgtgattgtaactaaawgttgtggacagaatacacaaagcaattgtctgtggtatccaaacagtaaagaccagtaagcggactaggaagggaaataaaaacttaaagaaagagtaat

SEQ ID NO: 441606 - DNA, 201 bp, Homo sapiens
aagaccagtaagcggactaggaagggaaataaaaacttaaagaaagagtaataaggaggtgagctttctggtgtttttctttttctactcatatttcccarcatagaatgaatgcaacaaaatcatggaactgtgcagcagtcttgaccaagagaaactctctccttggtcagacgaataagcaggaggggccctgcaaaa

SEQ ID NO: 441607 - DNA, 201 bp, Homo sapiens
agtcaaaaagtaataaatgtaatctctacattaataagctaaagaaaaactacgtgatcatgccaactcatacagaaaaagcatttgataaaattcaacakctttcataataaaaactcctagaaaatgagatttagtttatgggattacctgattaggtctactgaggatattctacctttcttaaagtcagctgtgcca

SEQ ID NO: 441608 - DNA, 201 bp, Homo sapiens
tgagccactaaagcaggttcactgcagaatgtttaatgaagggctctgatcgcctacagaaggaaaaggtacaggcagggtttagataaaccaacaaggcrtagtacagtaggctgctgcagggagctgttagcaccctaggtttaagagacaaggggaaaaagaattttctggaacttggagagagttgtatggggaagg

SEQ ID NO: 441609 - DNA, 201 bp, Homo sapiens
attatttagcactcattccctttcaaaaagaagcactaaatcatgtcaacatttcaagaggagaatttggactgttacaaattgttagagctgttttagtyattctccctgctgacctgtgtttgaactgcatgaggtgttaggattataatgtgtatgatacaaaagttccaacaggtaaaacataagaataactttagg

SEQ ID NO: 441610 - DNA, 201 bp, Homo sapiens
ttgaataagatattaaaagtaatccaagattagaacccaagttcctctctcctcgccatgatagtttctgtaatcgtgaataaaagagaaaaaaaatctaygtctagaaagaagaaataaaagcaaccaatgttgaaatgtaaaggcaatagtaaatctatggaaactctttactgatatgacaaatttggattatcttaa

SEQ ID NO: 441611 - DNA, 201 bp, Homo sapiens
ttaaacgagtcagtgtatataagattacctagctgtgtgcctataaagtaataagaacttagtaagtgtaaatttcctcaatttatcttcctcctacaccycacccatagacaagggaagcaaccctgtttaagatgcaatgattttttagggtaaacttaagtgtactttcaaggcaacttgattataatttcatttttg

SEQ ID NO: 441612 - DNA, 201 bp, Homo sapiens
cagggacattatttagagttttcagctagtagaggatccagacagcatctgaaaagttctgacaataagagtctcttgagatttgagaaagagcctgaagyctgtcctctgtgacccagctcccgccaaatggtacagtctgctcattctaccagagagcaaaagacatcaagaaagaggactcaacactccatgcatggt

SEQ ID NO: 441613 - DNA, 201 bp, Homo sapiens
gcatctgtgggctgtgagatttgagcaagttatttaaatattcaagctgtaaaatattggataatcatccatggttcacaaatctattatgaggtttaaaygagtcagtgtatataagattacctagctgtgtgcctataaagtaataagaacttagtaagtgtaaatttcctcaatttatcttcctcctacaccccaccc

SEQ ID NO: 441614 - DNA, 201 bp, Homo sapiens
gagtctcttgagatttgagaaagagcctgaagcctgtcctctgtgacccagctcccgccaaatggtacagtctgctcattctaccagagagcaaaagacawcaagaaagaggactcaacactccatgcatggtgctgacccttctccagggctgctcctctgctcacaaaacataccacttgctaatagagaatgaaataa

SEQ ID NO: 441615 - DNA, 201 bp, Homo sapiens
aaatgccattttaaagacatggctggtttggaatcagaattttctagttagaagcattcatagcaattatccggtgaaactcctttattttattaatgggkaaaccaaggcctagactggttaagtaagttggttcatccttaccatatgctacaaccaaaacaatagctactacaaagaaaagaaaaaaatcaagccaga

SEQ ID NO: 441616 - DNA, 201 bp, Homo sapiens
tttgcatagcataatacctcctttgtggagttacagtgagcacaaaagaagtaggataaaaagagagagatattagttacatgggagatagtattattttragaagaaaccactttctttgtaaagtgacattttggtgcaattatgttttaaatgtatattctaaaaggaaaaggatatgattccatcaaaaattaaaaa

SEQ ID NO: 441617 - DNA, 201 bp, Homo sapiens
gttatgaaaccaaataattgttgatgtcagaataataacctctccagcacagagacaatagcaacaaccaataattgaggatacagtgttccaaaaaagtsaccaactcaccccagtttgccagggatttaattgatttgagcacaaagtgtcccttgttccaaaagatccccatcagtcccaggcagatctggttgactg

SEQ ID NO: 441618 - DNA, 201 bp, Homo sapiens
tgtgagccagagacctcccccagcccatgctttagcctgacagaccagcccactctcttttgccataaacagctgtcagaaacaagactatgctagacagractccttccctcaagggagatggctggggcagcctttgaaaggaatcgcctcctgattttccaccaccacagcaggtgagttcccagttattagcttctg

SEQ ID NO: 441619 - DNA, 201 bp, Homo sapiens
ataatcataaccaaacaattctgtggatagatcttcaatcattttgctttcctcaaaaacactgtttattaaagaccattgtctgacttctattccctaayacattgtggttacaagtacaaagatttgcagggaaatataatgacaactaagtccactcaaattaccattggcatttatggcttttccactggcgatttt

SEQ ID NO: 441620 - DNA, 201 bp, Homo sapiens
cattttaaaaatgcctaaaatagtgctggaatatatgagtatcaaaaagtggaaatgtaattgattactaaagagatgtggatggtcttcaggatgattgwtgccagggaaccagtaccctcaaggctcttcagctcgtctccacttccttctgtgttgtggggaggagggcaaaggggatggcagcttgattggcttaaa

SEQ ID NO: 441621 - DNA, 201 bp, Homo sapiens
tggctccaataccttcaataacatttctacaataggtctggcccaattaaaatgccacgccctccccactcatgtgccccactgaccaccatcactgtggrgtaagatgggtctgtttttcagataagtaactactctagctgccccaggacccgtagtttgttcttattgttgttggcttttgttttctttagttgtcat

SEQ ID NO: 441622 - DNA, 201 bp, Homo sapiens
cccatcgaagagagtctgttccaatggctccaataccttcaataacatttctacaataggtctggcccaattaaaatgccacgccctccccactcatgtgmcccactgaccaccatcactgtggggtaagatgggtctgtttttcagataagtaactactctagctgccccaggacccgtagtttgttcttattgttgttg

SEQ ID NO: 441623 - DNA, 201 bp, Homo sapiens
ttaagtacagtcctcaaccttgagtacagcctaaagaaccagaaatggaaaaataagcaaaacaaacgtcctcagagcactcacagcagttgacctcgtcrgacttatccacacagtcgtggtcaccatcacacacccactccatggcgatgcagcgcccgtccccgcagcgatgctctgttgtgggattgcaatctggag

SEQ ID NO: 441624 - DNA, 201 bp, Homo sapiens
ctacaaggaatatgccagcatgcctggccttatatccaaaagaactgctaggtaagccatgcaaaatatttatgttatattcatgattctttttagcctgracttcaactttgtcccaatttatatattagtgaaaaagaactaagtgataagttcgctctcacaaagggcagaatccataggatgctttgccatgagagg

SEQ ID NO: 441625 - DNA, 201 bp, Homo sapiens
agttgggactacaaggaatatgccagcatgcctggccttatatccaaaagaactgctaggtaagccatgcaaaatatttatgttatattcatgattctttktagcctggacttcaactttgtcccaatttatatattagtgaaaaagaactaagtgataagttcgctctcacaaagggcagaatccataggatgctttgcc

SEQ ID NO: 441626 - DNA, 201 bp, Homo sapiens
ctaataacaaccaaaataaaagggagtcatttggataattttttttctcctaggacacttctgctataaccaactcttatcactgaataatctgggttccraaatacctgtcatcgccatcaatgatgcactcagggaaggcgagggtacagccaaacagcatgatatgttgatagcaactgaggcgatggagatatgtga

SEQ ID NO: 441627 - DNA, 201 bp, Homo sapiens
tacctgtctggcaaattgggaaggcacgtatctccttgtcatctctcctgatgctaagcttaagtttttaattgattatcttttttttgagacaaggtctytctctttctcccaggctggagtgcagtggtgtgatcatagctcactgcagcctcaacctcctaggatcaggtgatcctcccaccccagcctccaagtagt

SEQ ID NO: 441628 - DNA, 201 bp, Homo sapiens
gaggggtgggcatgtgcttccaggcaaagagttattaaatgccacagtcaatcctgtcagtctgggttaattagctgcctgcctacacccccttcccagcytccttttttcacccccttgagactctgtaacagttatagaggtactcactataagctctacagtgacccagaaaaattaggaccgcgaaactgcagcaaa

SEQ ID NO: 441629 - DNA, 201 bp, Homo sapiens
taagtgcaggtgttttaaatcaactgcctctatcatgaaagcatttcagtagaatccctgcaacccatgaaatttgggagacctgcattcttgataaattscctccaaaatataccccctgaagtagaagaatgatccacttggaattagggtatgctggttccggaccctacatacacactacaatgccgttctctataa

SEQ ID NO: 441630 - DNA, 201 bp, Homo sapiens
aaatcaactgcctctatcatgaaagcatttcagtagaatccctgcaacccatgaaatttgggagacctgcattcttgataaattccctccaaaatataccycctgaagtagaagaatgatccacttggaattagggtatgctggttccggaccctacatacacactacaatgccgttctctataaatgtttactgaatgaa

SEQ ID NO: 441631 - DNA, 201 bp, Homo sapiens
gttttaattctgtgtatgtggcatgtattgtgggtgtgtggatataaaagatgcacatatatatgataggtatttgggaaaccaaaatgagtaatatctcygcaaagagtatacattccagcaccacactttcaccaaaagaaactttattgcagaaataggtctaaagatgtttccaggacacagattcccttctctaca

SEQ ID NO: 441632 - DNA, 201 bp, Homo sapiens
aagtcctggcaagacaggcatgagccaccgctcccggtgaccatttaggatttacaggagtgatgtaacatatgcaaatcaatcaatgtgatacatcatawcaacagaatgaaggacaaaaatcatatgatcatttcagttgatgcatttgataaaattcaacatcccttcctgaaaaaaaatccctcaaaaaactgggta

SEQ ID NO: 441633 - DNA, 201 bp, Homo sapiens
aggccttagggtctgtgatgggaggggctgcctgggagatctctgaaatgccttcaaggcatttttcccattgtcttagctctttgctcccttttggttayacaaatttctccagcaattcagcctgcttgaattcctctactgaaaaagctttttgtttctttaccacataggtaggctgcaaattttccacacttttat

SEQ ID NO: 441634 - DNA, 201 bp, Homo sapiens
ctcttatgttttctttagagttgaagtctaggtttgtcagtagaaagcataaacataacaaataaaataagtcatttagattatggagttattatttcctytcacataaacattactgcttaagtcaattgagtgtttcataatgcaatcctcaaataagcaagtactgtccaaagactatggtggcaagatgagaagtgc

SEQ ID NO: 441635 - DNA, 201 bp, Homo sapiens
agttttaagaagacataggaaatgtaaaagattaggttgaaattagatttgacatgtttattaatgatacaatgggttaatcagtgagtgttcaagctgayataaagtgagttggagctcagaagaaacattatagtgacactttaaacaagtgacagagccagatagacaagggttaaaactgatgcttagaggttaatg

SEQ ID NO: 441636 - DNA, 201 bp, Homo sapiens
aaagtatgttgcattaaaaaattggtaaataaaatcatttgttctgtgaaagacactgtgaagagaatgaaaagacaaggtacagagagtgggaaaatatycccaaatcatatattgaacaaaagacttgtacccagaatatataaagaactctcaaaacccaacagtaagaaatcaaacaacatcaaacaaccccccact

SEQ ID NO: 441637 - DNA, 201 bp, Homo sapiens
gctttgcattgagctcagtgctgccctgtcacagcagaaagcagagggaacatttggacaggcccaggccaaagggtaattgcccatcccagtggtgagagcttgagttccagcgagcctcaccactgcaggctggaatgctctgggactttaaatgaacttgagggacagcctaggccacaaggactgcaattcctaggc

SEQ ID NO: 441638 - DNA, 201 bp, Homo sapiens
tcaagctgatataaagtgagttggagctcagaagaaacattatagtgacactttaaacaagtgacagagccagatagacaagggttaaaactgatgcttasaggttaatgaggtgggacagaaatggagacaacagattggtgttgtatcagatggagtccctctctgaggagctattattttagttagaggaacaaatta

SEQ ID NO: 441639 - DNA, 201 bp, Homo sapiens
gttgctataaagaaatatctgagactgggtaatttataaagaaaagaggtttaattgactcatggttctgcagcctttacaggaaccatggtgaagacatstgctcagcttctatgaaggccccaagaagcttacagtcacagtgaaaagcaaaagggaagtaggcacatcacatggtaaaggagcaagagagagagtagg

SEQ ID NO: 441640 - DNA, 201 bp, Homo sapiens
acttataaaaatatgtcataaagtttttaaaaagtatcagaactaattacctcaaaattgacctcattctaatttaagcttgacttatgactgtggaaagyacccaaaatggaataaagatcccccccacacacagtactgcaaacatattctaaaatatctattttcaagattcttgctttgtgaatgaatacattaagc

SEQ ID NO: 441641 - DNA, 201 bp, Homo sapiens
gacctccaaggatccttttgttcattcgggcagcagggcggcgcccacagtctaccaaggagcagaagacacagtttgtgagttgatgccaaaccttgctaaatgcttagctctttgctgtcacttacaagcgatcactcttcccctgagccaatccagttcaattaagttcatatcccattgccacacctctaattctct

SEQ ID NO: 441642 - DNA, 201 bp, Homo sapiens
agatagacaagggttaaaactgatgcttagaggttaatgaggtgggacagaaatggagacaacagattggtgttgtatcagatggagtccctctctgaggrgctattattttagttagaggaacaaattacaaacatgtaaaaaactattttggatactgataagttgttggaataagacaaaataaccaaatgtgataga

SEQ ID NO: 441643 - DNA, 201 bp, Homo sapiens
aatggatcatcaaaaatatagtttatttaaattgagttagtacttaagagcactgttgtatcttttcttcattactaaactgtagggagcaatttactccmaattaaaggtgcttcacagcagcatagtataataactgtcttccccagtttttgttacaagcttatttgagcacttgcacttttccctcctttcctggga

SEQ ID NO: 441644 - DNA, 201 bp, Homo sapiens
aacatgtaaaaaactattttggatactgataagttgttggaataagacaaaataaccaaatgtgatagagttacatgctgagactgaaagctgcctcaagkaggattgtcaaagaaagcctaagtcacagatgtatgagctgagacatgaatgatgaagccctagagttctgtattctatgcaaaaataacggtgaaggaa

SEQ ID NO: 441645 - DNA, 201 bp, Homo sapiens
aagaaagtaacctcatttacaaaagccacaaataaaataaaatacctggaaattaacttaatcaaagaaatgaaaggtctctgtgatgaaaaccataaaayactgatgaaacaaattaaagaggatataaagaatggaaagataatccatgttcatggattggaagaatcaatattgttaaactttccatattatgtgtat

SEQ ID NO: 441646 - DNA, 201 bp, Homo sapiens
cataaaagcatttttgccaaaatcatatgacccagacacactgtttcccgattatctaactttagataaagcttgtggagcccagagatataaagagtcayctttcccttagactaactcactcaaataccagatgtttcaactgagcatttggcaaatattagaaggcagtctaaactctgatttgtatcatcaattaaa

SEQ ID NO: 441647 - DNA, 201 bp, Homo sapiens
atggaactgtaagtccattaaacctctttttttcttcccagactcaggaatgtctttatcagcagtgtgaaaatggactaatacagtaaattggtaccagyagagtggggtgctgctgtagatacccaaaagtgtggaagcaactttggaagtgggtaacaggcagaatttggaaaagtttggagggctgagaagaagaca

SEQ ID NO: 441648 - DNA, 201 bp, Homo sapiens
aggaaaagctcatttgctttctaccctcccacagtctaaaatcctctcttccttactctctattacattattctaaatttatttgcagcacttaccaaagyctaaaattatttttactaatttataatctttattttcacccccatatagtgtatgttccctgagatgagggccttcgtttcccctcattcacttctacat

SEQ ID NO: 441649 - DNA, 201 bp, Homo sapiens
ccatgaaatttgggagacctgcattcttgataaattccctccaaaatataccccctgaagtagaagaatgatccacttggaattagggtatgctggttccrgaccctacatacacactacaatgccgttctctataaatgtttactgaatgaacggatgaatgaatgagtgatacaacaaatttatactatcaagataaga

SEQ ID NO: 441650 - DNA, 201 bp, Homo sapiens
tcaataaccttgttagaaattctgagggagctgcagattcatgacaatgaatagttaattgtccaattattcagtaaagctcaaacacttaataacacaayggacagaataagtcagaaaggcaagaagcttggggtgaaacccagctttgctggagctggtgcttgcattaccagatggtgtgcctatgcacatacgaaa

SEQ ID NO: 441651 - DNA, 201 bp, Homo sapiens
ctgaagtagaagaatgatccacttggaattagggtatgctggttccggaccctacatacacactacaatgccgttctctataaatgtttactgaatgaacrgatgaatgaatgagtgatacaacaaatttatactatcaagataagattaaagttttatgtttttcttgtataattttaatagaaatgccatgttctatgc

SEQ ID NO: 441652 - DNA, 201 bp, Homo sapiens
tacgttgtccaaactcaactaagtcttcaccccttggttctctctgaggcaaaataagggactggggtagatcccatcatattacctgcaaggagggataygctcgcctgtattcacatcacattttggtaccaaaatggtgcaagaaaagaacatgaggtatttataacagttggtttgaacaagtgcagggaaaagaga

SEQ ID NO: 441653 - DNA, 201 bp, Homo sapiens
tacccattaattatttttcctgatcctttttctcctcctaccctccaccttctggtagaccccagtatcagtcgttcccctctatgtgtctatgtattctyatcatttagctaagtgagaacatgccctaagagtctacaatctgtgtatgccttgtccttcatggaacttgccagttcttggcatggtgctacacatgtg

SEQ ID NO: 441654 - DNA, 201 bp, Homo sapiens
ggctgaccctgaattcaccgggactaagaggccatcacacctggctgcggtaggacagcgaatcatcgatcttaccggctttggggacccggctctgcggyagcgctcttccggagcgagggcaggagactgtttcatggataaaaagtctcgcttattcttctgtccacttttatcttggtcgcttttctctcctctacg

SEQ ID NO: 441655 - DNA, 201 bp, Homo sapiens
ttttctgaatatatagagctaaacaaagtgcctcaaagtgaaagagtaataaacagatatttgataaatcctggcaatattctcagaagtagagaccatgmatggctttactgactgggtaacaaattcatttgcaagtaaggtgctttccaagtctgtgctttcaaaaatggaaggagaatctaatcaagttgtcatcta

SEQ ID NO: 441656 - DNA, 201 bp, Homo sapiens
ggcctgaggcactccagtgtctacaggtgaaatgaggcgaaaacacaaaggagactagactaagtggccaaagaaagaggaaaacccaattggaagtcagstgaagagtttatcaggtaggagggagtgattaaatgtagcaaatgctggccgggcacggtggctcacgcctgtaaacccagtactttgggaggctgagac

SEQ ID NO: 441657 - DNA, 201 bp, Homo sapiens
tttctattaacttaattccgaagttaacacattaactctccatgatgctttctttgaatgtgcccatgggaccttgtctatacacttctatcttaaacacrtgttgccttgtgtgataatcatcacttcctctcaactgtgagctcctaagaaaggactaatttaaccatcctggagttctcaggaactttcaaaatgcct

SEQ ID NO: 441658 - DNA, 201 bp, Homo sapiens
agtagactaattctaaaccatatgttgtacactagttcccagattttcccatgggattgctccagttgcccactatggtagctggtttagtaatctactcttttttttttttttttgagatggagttttgctccatctcccaggctggagtgcagtggcacgacctcagctcactgcaacctccgcctcccaggctcaagc

SEQ ID NO: 441659 - DNA, 201 bp, Homo sapiens
tctatctctagcaaaatattgatgtaagtacctcaaagaaatagtattaaattatttcttccaaataaacccacaattcaataggagaaattcggactatrtgttttaccaggatcctgaaactatcattttgctgcttgtgcactgaaatggttgctagcagcaaccggagctaggcagagcaaataaggtgctatgaaa

SEQ ID NO: 441660 - DNA, 201 bp, Homo sapiens
atcatcaaaaatatagtttatttaaattgagttagtacttaagagcactgttgtatcttttcttcattactaaactgtagggagcaatttactcccaattmaaggtgcttcacagcagcatagtataataactgtcttccccagtttttgttacaagcttatttgagcacttgcacttttccctcctttcctgggagccag

SEQ ID NO: 441661 - DNA, 201 bp, Homo sapiens
cattttcataagggaagtagagcataaaagttaggaaaatttgcagcgtgacaatgcaatagaaaagaaaataccattttctgaggagaaattcaagctgrctgcagaagtaacgaggagcagaatgttaatccccaagacaatggggaaatgtctccaggacatgtcagaggtcttcatggcagcccctcccatcacagg

SEQ ID NO: 441662 - DNA, 201 bp, Homo sapiens
caacttgaatccatatgaagaaataaaagatattggtagaggtaattaaataggtaaaagtaagataaaagaaatgtattttttctataaatcttttatthtatctgattcttaaaaacaactgcataaataatttataatcataatcaataaacctatgttgagattatattatataaagatgtaatttgtatacataat

SEQ ID NO: 441663 - DNA, 201 bp, Homo sapiens
aaggggccaaggtacagctcaggatgttgcttcagagggtggaagccccaagcattggcagcttccacatggtgttgagcctgtgagtgcacagaagtcargaattgggatttgggaacctctgcctagatttcagaagatgtgtggaaatgcctggatgcctaggcagaagtttgctgcaggggtggggccctcatggag

SEQ ID NO: 441664 - DNA, 201 bp, Homo sapiens
gtagatgtaaaactgaatgtcaaaacaataaagattctagaagaaacataggagaaaaacttctatgtttgggggtgagcaaagatttcttaagacacagaaaaaaaaaacacaaaagaaaagattgatattatggacccattaaaattaagaccttctattccatcatagatgctaataagagtagaaaggcaagccata

SEQ ID NO: 441665 - DNA, 201 bp, Homo sapiens
agaaaagcatgattccctgcctatacaaacattgtaattgagtgaaggtagacaattaaataaacaattagattaaaatgcaggtagtactatcacatgarcattacaagataatgttacagaataatttctttttttttcttttcttgagtcagggtcttgctctgtcacccaggttggagtgcagtggcatgatgatag

SEQ ID NO: 441666 - DNA, 201 bp, Homo sapiens
tcaggatgttgcttcagagggtggaagccccaagcattggcagcttccacatggtgttgagcctgtgagtgcacagaagtcaggaattgggatttgggaamctctgcctagatttcagaagatgtgtggaaatgcctggatgcctaggcagaagtttgctgcaggggtggggccctcatggagaacctctgctaggcagtg

SEQ ID NO: 441667 - DNA, 201 bp, Homo sapiens
ggtggaagccccaagcattggcagcttccacatggtgttgagcctgtgagtgcacagaagtcaggaattgggatttgggaacctctgcctagatttcagargatgtgtggaaatgcctggatgcctaggcagaagtttgctgcaggggtggggccctcatggagaacctctgctaggcagtgtggaagggaaatgtggagt

SEQ ID NO: 441668 - DNA, 201 bp, Homo sapiens
ttgttgaagatcagatggttgtaggtgtgtggccttatttctgggttctctattctgttccattggtctatgtgtctgttcttgtacagtagtaccatgcwgtttttggttactgtagtcttgtagtatagtttgaagttgggtagggtgatgcctctagctttgttctttttgcttaggattgtcttggctatatgggct

SEQ ID NO: 441669 - DNA, 201 bp, Homo sapiens
gaagatgtgtggaaatgcctggatgcctaggcagaagtttgctgcaggggtggggccctcatggagaacctctgctaggcagtgtggaagggaaatgtggrgtcagagacccccacaaagaatccctactagggcattgcctagtggagctgtgagaagagggccaccatcctcaagaccccagaatggtagatccactga

SEQ ID NO: 441670 - DNA, 201 bp, Homo sapiens
aacgaaatagccattttgctttggcattcttctgcctgccaatcagcatctttctccttcattcttggcctcatccctctagatacgcggtttaacatctrtgtattccaatgattaattttctttccaaatgggacaacccaacaattgccagagcctgatatgccttgtgcagtcagtgctcctgactacctagcggct

SEQ ID NO: 441671 - DNA, 201 bp, Homo sapiens
ttaaaaaacaatttattggatctagtttttctttttgagattcacacgcagatatcaaatccttttaaagtgtattgctcggtaataagaggcattaaacygcttctctgaacatgattattttaggaagacattacatttcctttcagaagccaatttcttctcactggaatctaatctgatttaattggatgctataca

SEQ ID NO: 441672 - DNA, 201 bp, Homo sapiens
atttggaactactcaaggaggaagggaatatagtaagcctaccagtttctcagttgagactactggagaaccacactctcagaatggagaaaaaccagagrtagacggagccttataacaatgaggcaaaatcagcttagtctctgattaaattaaggctatctggccccatatgtgcctagtgatcatatatgtggcaca

SEQ ID NO: 441673 - DNA, 201 bp, Homo sapiens
ggttaacagaggctttcatcgttggtcctgtaagcctaccctgaaaggaactttctggaaagagtcccctcccccttaaaaaatgccttatagaatcttgrggttttgaggttgatgtgtttccacacccaaataaccccaaaatagttcatcctattgaaattcttggtgtcctggaaagcattctatggaaaacctgcc

SEQ ID NO: 441674 - DNA, 201 bp, Homo sapiens
ctgatgcctgccttctatgctgttgctattgtgatttctgcagcattatgaggaaggtttctgatggaatgaattttgcatcttttaagaaagtgtctctrtacctggatatgtgcttgataaggttaatagagcaattcttggtgtgtctttttaacccacaggaaggttaacagaggctttcatcgttggtcctgtaag

SEQ ID NO: 441675 - DNA, 201 bp, Homo sapiens
ccatgtgcattgcagcattattcacaatagcaaaaacataggagcagcctaatgtccactgatagatgaatggataaagaaaaatggggtatatataaacwgtatgtatatatacatacagtacaatattactcagccttaacaaagaaacaaatcctaccatttctgacagcagagatgaacctagaggacactatgcta

SEQ ID NO: 441676 - DNA, 201 bp, Homo sapiens
actgttaaatatacattatcattctaatataaattagaaaacaaaattaataaaataaagcaccatttaaaataaacatcttattaaaagtgtaaaaataatcaatcataaacattttgaatgaaaatatcatttgaacatatataaaattcagtcttataaaataaacatgttgtaagaatatttttgagcagaagtgtc

SEQ ID NO: 441677 - DNA, 201 bp, Homo sapiens
ctgttaaatatacattatcattctaatataaattagaaaacaaaattaataaaataaagcaccatttaaaataaacatcttattaaaagtgtaaaaataatcaatcataaacattttgaatgaaaatatcatttgaacatatataaaattcagtcttataaaataaacatgttgtaagaatatttttgagcagaagtgtct

SEQ ID NO: 441678 - DNA, 201 bp, Homo sapiens
agaatggcgtgaacccaggaggcagagcttgcagtgagccgagatcgcgccactgcactccagcctgggcaacacagcgagactccatctcaaaaaaaaawaataataataataataataataataatagagtataattggattataaaaaaaatagagtataattggattattgtgacaaagtataaatgcttgagggga

SEQ ID NO: 441679 - DNA, 201 bp, Homo sapiens
tgttaaatatacattatcattctaatataaattagaaaacaaaattaataaaataaagcaccatttaaaataaacatcttattaaaagtgtaaaaataatcaatcataaacattttgaatgaaaatatcatttgaacatatataaaattcagtcttataaaataaacatgttgtaagaatatttttgagcagaagtgtcta

SEQ ID NO: 441680 - DNA, 201 bp, Homo sapiens
atggcgtgaacccaggaggcagagcttgcagtgagccgagatcgcgccactgcactccagcctgggcaacacagcgagactccatctcaaaaaaaaaaaawaataataataataataataataatagagtataattggattataaaaaaaatagagtataattggattattgtgacaaagtataaatgcttgaggggatgg

SEQ ID NO: 441681 - DNA, 201 bp, Homo sapiens
ggtattttgcccctgccctagagatttgtggaactttgaacttgacagatgatttaggatatctggtagaagacatttctaagcagcaaagcattcaagakgtgacttgggtgctgttaaaggcattcattttcataagggaagtagagcataaaagttaggaaaatttgcagcgtgacaatgcaatagaaaagaaaatac

SEQ ID NO: 441682 - DNA, 201 bp, Homo sapiens
tataaaaaattagtgtcaataaaactgctgaacattaatttgtacccagtagtctcttgttacataagctactggccttatggtatagacaggcagatcasgaggtcaggagaccgagaccatcctggctaacgcggtgaaaccccgtctctactaaaaatacaaaaaattagcccggcatggtggcgggtgcctgtagtc

SEQ ID NO: 441683 - DNA, 201 bp, Homo sapiens
gacctgcattcttgataaattccctccaaaatataccccctgaagtagaagaatgatccacttggaattagggtatgctggttccggaccctacatacacactacaatgccgttctctataaatgtttactgaatgaacggatgaatgaatgagtgatacaacaaatttatactatcaagataagattaaagttttatgtt

SEQ ID NO: 441684 - DNA, 201 bp, Homo sapiens
acctgcattcttgataaattccctccaaaatataccccctgaagtagaagaatgatccacttggaattagggtatgctggttccggaccctacatacacactacaatgccgttctctataaatgtttactgaatgaacggatgaatgaatgagtgatacaacaaatttatactatcaagataagattaaagttttatgttt

SEQ ID NO: 441685 - DNA, 201 bp, Homo sapiens
caccatgattgtgaggcctccccagtcatgtggaactgtaagtccattaaacctctttcttttgtaaattgcccagtctcaggtatgtctttatcagcagygtgaaaacagactaacactccttccaatgataaatgtggtttgggcagctttgggggaatacagcagagaggctcccagctccctctctctgtttgcagt

SEQ ID NO: 441686 - DNA, 201 bp, Homo sapiens
tactgattgctaaattctaatgcatatattttaaaagtgtatttataagttaagtgctttggttatcatgtttctccattacaaaagtgccaaagaaacawgaagtaatttctcacacaatatttatttcataactgagttaaataagtattgttttgagtggaaactcaataaccttgttagaaattctgagggagctgc

SEQ ID NO: 441687 - DNA, 201 bp, Homo sapiens
acttcaaaggccaaaagaatgaaattatttcaaaagatgtactgccttacgtgcttgtcatgaaagtgtcaattcttcttaaacaggaaaggctaaataaycataaccaaacaattctgtggatagatcttcaatcattttgctttcctcaaaaacactgtttattaaagaccattgtctgacttctattccctaatacat

SEQ ID NO: 441688 - DNA, 201 bp, Homo sapiens
gaggctgagacattctcctgagaatgacgtgaacccgggaggcgaagcttgcagtgagcagagatcgcgtcactgcactccagcctgggcgacagagactycagcctgggcgacagagactccatcttaaaaaaaaaaaaaaaaaaaaaaaaagaggatactaataatgttattttgattttcaagaactgatatgttttg

SEQ ID NO: 441689 - DNA, 201 bp, Homo sapiens
atgaaccccagccaaaggggaatcacccatcccagtggtcagaatttaagttctggcaagccttaccaccacaggctaaagtgttttggggtccttaatawacttgaaaggcagtctagctcacaaggactgcaattcttgggcaagtcctgatgctgtgctgggcttggagacagtggacttgggggcatgcaacctagt

SEQ ID NO: 441690 - DNA, 201 bp, Homo sapiens
atatacaacctactaagattgaaccataaagaaatccaaaatctgaacagaacaataacaagtaatgctatttaagtaatacttaaaagtctttcagcagaaaaaaaaaaaaaaaagcctggtgcccagtggtttcactgctgaactttgccaaatatttaaagaagaactagtaccaattctgctcaaactactccaaac

SEQ ID NO: 441691 - DNA, 201 bp, Homo sapiens
caatattgattcttcctatccatgagcatggaatttttttccatttgtttgtgtcctctctgatttccttaaacagcggtttgtagttctccttgaagagrtcttcacttctcttgttagctgtattcttaggtattttattctgtttgtagcaattgtgaatgggagttcattcatgatttggctctgtgcttgcctgtt

SEQ ID NO: 441692 - DNA, 201 bp, Homo sapiens
tttcttgtctgttagctccctggaaactcagagcaaatgtgattatttgacctgaataagagcttactcagtgcaaaagccttttccccggggtgtttctaaaaaaaaaaattaataatcgattaacactgtaactgtctgaggtggggatatcacttggggcaaacaagaagctaaccagaaaaattaaaagaaaaatgt

SEQ ID NO: 441693 - DNA, 201 bp, Homo sapiens
agctaaaaatcatttctaaaattttaattaccaatgagaagaaaccagatattaaacatcttttgaggaaaattacaaaatgttttactccatgcaaagtyttactgtgctctaaaatatgctctttatgactttgttggtatggatgaacgcaagaaaactgaaaaataaatttaattaaacgagggatgcaaattaatt

SEQ ID NO: 441694 - DNA, 201 bp, Homo sapiens
tataattttattacctaagtgtgtaccacccctggatattgtaatttaggcttgcccattttttgaaacttgtcctgtcttttaagtctctcgtagtcttygggttcctcctccattcttttgtttttctttataatttaactatagaagaacccagacatttgacttgtagggtataccagcttttgaatcttgcttatc

SEQ ID NO: 441695 - DNA, 201 bp, Homo sapiens
ggctaagctgttctttcaccagaagccacatcattctgatttccctctttttgtgatgttagcagctgtagatgctccatgtcttcattcattaattcaaygtgttaccaaatggtaatattgtattcaatctttttttcacttattagaaaatgcacatggaaatgcttttgtaaatacatcattcctctcttctactat

SEQ ID NO: 441696 - DNA, 201 bp, Homo sapiens
ttggttttgaaatgtgaggacatgagatttgggaggggccaggggcagaatgatatggtttggctgtgtctccacccaaatctcatcttgaattgtaactyccataattcccacatatcatgggaggaaaccaatgggaggtgattcaattatgggggcaagtctttcctgtactgtcttcatgatagtgaataagtttca

SEQ ID NO: 441697 - DNA, 201 bp, Homo sapiens
agattgtcacggagtaactcacgcttcattatgtcctgttgatacaattaaggaaaataatatctgtcatataatagaggtctaagtagaaaaatttgctyctgatatagtaaaaagtaggttttgtttggttttctacctgaagttgtgttagagaatatctggtatgcatttagtatacccagtactaaatgaacttcc

SEQ ID NO: 441698 - DNA, 201 bp, Homo sapiens
gaaaaatgaactcatggctgggtgtggtggctcacgcctgtcatcccagctctttgggaggatgaggcaggcggatcatgaggttaggagttcaagcccarcctggccaatatggtgaaatcccgtctctgctaaaaatacaaaaattagccagatgtggtgacgtgtgcttgtagtaccagctgctcgggaggctgaggc

SEQ ID NO: 441699 - DNA, 201 bp, Homo sapiens
atttgccacactcagctctagtttagacatgaaatttttcactcaattcagctagtcaaatttaaagatttctatctttatcttttcttaggagtgaaaawtttcccttctctcaccctctctgactttgcttagaatatcttatatttaatatttttcctgtttaataaagttaatattataattaacaactatgataga

SEQ ID NO: 441700 - DNA, 201 bp, Homo sapiens
agtcaaatttaaagatttctatctttatcttttcttaggagtgaaaaatttcccttctctcaccctctctgactttgcttagaatatcttatatttaatatttttcctgtttaataaagttaatattataattaacaactatgatagaaatttatctattttacaagacttactccagaaatagcatagctaagtggtgat

SEQ ID NO: 441701 - DNA, 201 bp, Homo sapiens
aatttaatttcacatttgtgggaaaagaaactattttaacaaaatttcccacatcattttggctggtggaaccaccacaatgcaaattcaaactacagttytcaaggggagatgggagtactttttagagtcagtggtgaggaggcagcatgtcagatttttatgcttatacaaagtggtgtgtgctcaaaacaagttgag

SEQ ID NO: 441702 - DNA, 201 bp, Homo sapiens
tagaaatttatctattttacaagacttactccagaaatagcatagctaagtggtgatttggagatcatctgaaggttaccaaatctgcactaaataaagawataccacactatggcatcattgctgttctacaaatcttaggaatctcttacttttaatattgtgctctgtccttggcatttcatttttattatttattta

SEQ ID NO: 441703 - DNA, 201 bp, Homo sapiens
tgacagtggtatagctgaggaagctcctaccagacagatctgtccagggataataactataaactctggacaaaacacaaaaagacaactactgaagggcrctggagagggaggagaagcaggccaggtctggaagggtgttgactcttaagaagagagtggcagagacgagtttcaggacggtttactgtcttagcctga

SEQ ID NO: 441704 - DNA, 201 bp, Homo sapiens
atagcatagctaagtggtgatttggagatcatctgaaggttaccaaatctgcactaaataaagatataccacactatggcatcattgctgttctacaaatmttaggaatctcttacttttaatattgtgctctgtccttggcatttcatttttattatttatttattttttttgagatggagtttcactcttgtcaccccg

SEQ ID NO: 441705 - DNA, 201 bp, Homo sapiens
ttgctgttctacaaatcttaggaatctcttacttttaatattgtgctctgtccttggcatttcatttttattatttatttattttttttgagatggagttkcactcttgtcaccccggctgaagtgcaatggcgcaatctcagctcactgcaacctttgcctcagaggttcaagcgattctcctgcctcagcctcctaagt

SEQ ID NO: 441706 - DNA, 201 bp, Homo sapiens
atttgaatgtcaacatcaatcgaatatcaatcaaaaagaagtggcagaatgtattaagtcctttaaaacatatactactaactatatatatataacaaaawtatatatatataatatataactaacatatactactcttgaaccaggagtcttgagagagtatggagtggtactagggtagaacaacacacatggagtgat

SEQ ID NO: 441707 - DNA, 201 bp, Homo sapiens
ttgttactatcataatttacttagatcctcaatttgccctccatttggccaatggaagttcattaaagctggctgctgtgtccttgtgacatgccccatcwttctttgagcacttccttgctttttggaacaagatgctttgaattcatctgctactagccttgcatcacccttggaatcagccatttctccaaggatcct

SEQ ID NO: 441708 - DNA, 201 bp, Homo sapiens
ccactaaaaatacaaaaaattagccgggcatggtggtgggcgcctgtagtcccagctactcaggaggctgaggcaggagaatagcgtgaacccgggaggcrgagcttgcagtgagccgagatcgcgccactgcactccagcctgggtgacagggcgagactccgtctcaaaaaaaaaaaaaaaaaaaaaaaaaaaaggtga

SEQ ID NO: 441709 - DNA, 201 bp, Homo sapiens
ggctgaaggggagaactcagaggattatgtgactaatactcacttgtcagtgatttatacatcaatctggccatttactattcaacaaatgcctaggccaygtaagagacctcaacaaacggaagtgattctgctataggaaaccacttcttaaaagaaaaagaagcaaatagaggtgctttacaggaaaactttttcttt

SEQ ID NO: 441710 - DNA, 201 bp, Homo sapiens
acctcaaaatgtgtccttcctttgcatatagggtctttgcagttgaagttagttaggacaaggtcatactggattagggtgaagcctaaatccaatatgaytgatgttcttataataagagaacacacagaaacacacaccaggaaggccatggaagtaaaatatatagtttgtcaaatgaggatgagttcaagaaggggt

SEQ ID NO: 441711 - DNA, 201 bp, Homo sapiens
catgcacaaaaatcaagttaaaatggattaaagacttaaccataagacctgaaactgtaaaatttctgaaagaaaacataaaggaaaatcttgacattgayctcggcgataatttcttggatacgacaccaaaagcataggcaaaaaaaaaaaaaaaaaagcaataataaccaaataagattatgctaaactaaaaagctt

SEQ ID NO: 441712 - DNA, 201 bp, Homo sapiens
gagtctcagattaagatttcctggtactgtcaatctctatctatgacacttcagcagaatgacacttttgtggcttcagagacactgacacctactttcayagctgcataggactttaaaactcccccaaagtgctacaaacaaaaagtactcttcaagtgctgtcaacctaaaggttaacaggttgaagggaccctgggc

SEQ ID NO: 441713 - DNA, 201 bp, Homo sapiens
agttaaaatggattaaagacttaaccataagacctgaaactgtaaaatttctgaaagaaaacataaaggaaaatcttgacattgatctcggcgataatttyttggatacgacaccaaaagcataggcaaaaaaaaaaaaaaaaaagcaataataaccaaataagattatgctaaactaaaaagcttctgcatagcaaacga

SEQ ID NO: 441714 - DNA, 201 bp, Homo sapiens
ggacaaaaatcatatgatcatttcagttgatgcatttgataaaattcaacatcccttcctgaaaaaaaatccctcaaaaaactgggtaagaaggaacatasctcagcaaaataaaagccatatttcacagacccacagttagtatcaaactaaatggggaaaaactgaaagccttatctccaagatctggaacatgacaag

SEQ ID NO: 441715 - DNA, 201 bp, Homo sapiens
taagacctgaaactgtaaaatttctgaaagaaaacataaaggaaaatcttgacattgatctcggcgataatttcttggatacgacaccaaaagcataggcaaaaaaaaaaaaaaaaaagcaataataaccaaataagattatgctaaactaaaaagcttctgcatagcaaacgatatgatcaacaaaatgaaaaggcaatc

SEQ ID NO: 441716 - DNA, 201 bp, Homo sapiens
gctacagaactgataaacaaattcagtaaagttgcaagatacaaaatcaacatacaaaaattagtagcatttctatatgccaacaacaaaaaatgtgaaaragaaaccaagaaagtaacctcatttacaaaagccacaaataaaataaaatacctggaaattaacttaatcaaagaaatgaaaggtctctgtgatgaaaac

SEQ ID NO: 441717 - DNA, 201 bp, Homo sapiens
gtggcacgatctgggctcactgcaagctctgcctcctgggttcgcaccattctcctgcctcagcttcccgagtagctgggactacaggtgcccaccaccaygtccagctaatttttttgtatttttagtagagatggggtttcaccatgttagccaggatggtctcaatttcctgaccttgtgatctgcccgcctcggcct

SEQ ID NO: 441718 - DNA, 201 bp, Homo sapiens
tcacgtttctaggaattataacttacctgtctggcaaattgggaaggcacgtatctccttgtcatctctcctgatgctaagcttaagtttttaattgattatcttttttttgagacaaggtctctctctttctcccaggctggagtgcagtggtgtgatcatagctcactgcagcctcaacctcctaggatcaggtgatcc

SEQ ID NO: 441719 - DNA, 201 bp, Homo sapiens
cacgtttctaggaattataacttacctgtctggcaaattgggaaggcacgtatctccttgtcatctctcctgatgctaagcttaagtttttaattgattatcttttttttgagacaaggtctctctctttctcccaggctggagtgcagtggtgtgatcatagctcactgcagcctcaacctcctaggatcaggtgatcct

SEQ ID NO: 441720 - DNA, 201 bp, Homo sapiens
acgtttctaggaattataacttacctgtctggcaaattgggaaggcacgtatctccttgtcatctctcctgatgctaagcttaagtttttaattgattatcttttttttgagacaaggtctctctctttctcccaggctggagtgcagtggtgtgatcatagctcactgcagcctcaacctcctaggatcaggtgatcctc

SEQ ID NO: 441721 - DNA, 201 bp, Homo sapiens
atactagatgacgattcgttatccaaagcctttggcattgatcagttaaaacattaggcttgccaaaatatgacacttacatatacatgaatcataaattwctgtttcaaaaaagcactcttctaaaaaaaaaacaacttaaagtttttagaatcacatcattttaggaatggaatgggccttagaaatcacctgttcagt

SEQ ID NO: 441722 - DNA, 201 bp, Homo sapiens
gcttgatacaaaatgtttcttctgaaattcttgcatgttaatattgatttcagtttggcatctcatacgcacactattaattcttgtctctcaaaattatygttaaattagagcagaaaactaacacacagaaaggctttttctcaaaggcttctttcaactgtacagtctctatgactataaacatgaatgtgttgcctc

SEQ ID NO: 441723 - DNA, 201 bp, Homo sapiens
caatcctctgattctgaaatgaccagaggagttagacggtctgtccactgttgctcagctcatttacagcagaaccatgagaagaaccaggcttcttgackctctgagttctttctactattggcttccagctctagaaaagggtttctcaacggcagtatcatttgacattttggactgggtaattctttgttgttgggg

SEQ ID NO: 441724 - DNA, 201 bp, Homo sapiens
ccatacttgttattagtttgaagtataacaactgtctgaagattttcattcacacagaaacacaacagtttataaatttatattattactacgttctctcttttttttttttaaagatggagtttcaccctgtcacccaggctggagggcaatggcttgatcttgactcagtgtaatctccacctccctggttcatgccag

SEQ ID NO: 441725 - DNA, 201 bp, Homo sapiens
agaatcagcaatagcccgggaaataaggcttctcaacttgacgatcagtgcaaagtatacgcatgcattcgcccagaggatgggggacagtgtttcagcayaatttaaaccctaggagttaatttctttgtaagcactacactcactttttttgacagtaggactactagggaatcaaatacccctttcagaatctgatta

SEQ ID NO: 441726 - DNA, 201 bp, Homo sapiens
ctaaactagatagtaaaaaaaaagtacataaacaaataagattatctcgggcacttagaagtaaaaaaatatatttatggtaatgtaatagaagatttgayggggcaatcactttggctaggttggttagggaaggtctttgagaaagtgacactcaaattgagacttgaacaatgaaaaggaagtagttttatgactcta

SEQ ID NO: 441727 - DNA, 201 bp, Homo sapiens
cagaactgtgatttgtgtttcacaatgcggctagcggatttgatgtatctgtaacagctctctcacgtttctaggaattataacttacctgtctggcaaaytgggaaggcacgtatctccttgtcatctctcctgatgctaagcttaagtttttaattgattatcttttttttgagacaaggtctctctctttctcccagg

SEQ ID NO: 441728 - DNA, 201 bp, Homo sapiens
atacgcatgcattcgcccagaggatgggggacagtgtttcagcacaatttaaaccctaggagttaatttctttgtaagcactacactcactttttttgacrgtaggactactagggaatcaaatacccctttcagaatctgattaacctaagaacacaccaaaaatttccaaaagtttatttgtcttctatgaggcccatt

SEQ ID NO: 441729 - DNA, 201 bp, Homo sapiens
gtagaaagattattatagatacagtcatttttgatgattcaaacatcatttggaatatcaatttttattttgtgctgtttaggctgcctccattctaaaayagcttcacgtggtgctgcttttaaaattgttgtgcatattttgtgtttctctcttccttacatgtatcagctgacattatcagctgtccccacgacttcc

SEQ ID NO: 441730 - DNA, 201 bp, Homo sapiens
catggggtaagaaatccagctagggaaaagactgacctatctatgcatctgtaatgggttgaatagtgtctccaaaatatatgttcaccgagaacctcaamatgtgtccttcctttgcatatagggtctttgcagttgaagttagttaggacaaggtcatactggattagggtgaagcctaaatccaatatgactgatgtt

SEQ ID NO: 441731 - DNA, 201 bp, Homo sapiens
tttctctctaaacaaaagacaaatgtctgtcttgcagtgaattggatccagatgagatgacattccatgtcagttctactttttttgaacaccctgagagrgctcttatcaggtttctgtagagatttttctaccataaatatcactgtcttataacaatcattttccaacaggcttttgagtggccccttaggatgacaa

SEQ ID NO: 441732 - DNA, 201 bp, Homo sapiens
ctcttgtcaccccggctgaagtgcaatggcgcaatctcagctcactgcaacctttgcctcagaggttcaagcgattctcctgcctcagcctcctaagtagytgggattacaggcacccgccaccatgcctggctaatttttgtatttttagtagagacagggtttcaccatgttggcctatctggtgttgaactcctgacc

SEQ ID NO: 441733 - DNA, 201 bp, Homo sapiens
tgagccactcaagtcaactaaagagtaaacttcaaggcaactaaaaagttcaaaaactactagtactcatttctttggaggacttatcaccacttacccatttttcccattaaatcagtcaaataatggatatggttttccaaccacacctctatctcagattttcctagtccttctgtgaaataaaataatctaaaataa

SEQ ID NO: 441734 - DNA, 201 bp, Homo sapiens
gccagaagggtatggaggaggagggacaaagagagattgctgccaggtgcggtggctcatgcctgtaatcccagcactttgggaggccgaggcaggcaaakcatgagctcaggagttagagaccagcctgaccaacatgaagaaaccccatctctactaaaaatacaaaaattagctgagcgtggtggcacacacctgtag

SEQ ID NO: 441735 - DNA, 201 bp, Homo sapiens
accccatgggaggtatggagctaaaatggaaaatttttcttttagtggacattactattgatgggaatgggccaaatccttagagtagatggaatagaaaracaaattgtgagtgactggcacagttcatacactcctagaagataaagaagtaggcagaaggacacagcatgagctcagtaataaaaagtcaaaccaaac

SEQ ID NO: 441736 - DNA, 201 bp, Homo sapiens
taaagaagtaggcagaaggacacagcatgagctcagtaataaaaagtcaaaccaaacttctcacttccttttctcagtgcattaaaagactgacagagcarggcaggtgggcaagcaagaacaaagattttgttcttgggaataggagagagagatgtttagaaataggtggaagattattgagtaatattaagggtccaa

SEQ ID NO: 441737 - DNA, 201 bp, Homo sapiens
aaagtcccttttgacaattttgacatataaaataatattcacaggtctcagggattaagatgtgggtttattccaggggtcattgttcagaccatctcacwccatataaccctgtattctctcataccgcagacatttgctacatgtcgttattgagcatgtgcagtgtagctcatttgaatggagaaatgctgtaagggt

SEQ ID NO: 441738 - DNA, 201 bp, Homo sapiens
gcaacacaaatttattgtctcacagttctggaggttggaagtctgaaatcagtttcactggactaaagtcaaggtgttatcaaggctgcttccttctgaargctctcaggggaaaatctgtgtctttttcagcttatagtggctgtgtctattccctggcttgtggccccttcctgtatcttcaaagcacatttctcctcc

SEQ ID NO: 441739 - DNA, 201 bp, Homo sapiens
catctgcagcccagagagggtcctcaccagaacctgaccatgatggcaacctcatctcagatttccagcttccagaactgtgagaaataaatgtatgttgyttataagcaataatgatttgttatagcagtctgaactaagacaagaagtaacatttaaatattttgttacaagatttaaaaatgcatgtttttcataaca

SEQ ID NO: 441740 - DNA, 201 bp, Homo sapiens
ttcaattgaagaagttaggggaaagatatttcatttaagattaagttgtatattaacagtatactaaattgttcactactttcaaaaagaaaaaatgtccrtgactacaaataaagtttgtcttagggtagattttttaaaaatgcaaaagtgaaatatctcctgaaattattaaacaaaatgtatttacttttttccttt

SEQ ID NO: 441741 - DNA, 201 bp, Homo sapiens
gaagcaaatatactgaactatttcttgatttacatttactgccttacttagagtaaacagaaatgccagcaacttcagcttatttaaaaatgtgtgttgcwtaagaagaaattttcaataacctcttggggggaaattacaagatattttcatccagattcctcaaaggaaatgattgtaatgcttttataaataatgaaa

SEQ ID NO: 441742 - DNA, 201 bp, Homo sapiens
attaaaagccaattcctaaggactcctctatcttgcaactaaccaagatttccagaggctctccacaaaaggcacagtcctggacatggcaaaactacagraccttaagagatgaagccattatcagtgattaatacctcagcagatagcacttaatatattcatcttctttatttctactttttaaaagacattagagaa

SEQ ID NO: 441743 - DNA, 201 bp, Homo sapiens
atttgtcgttaacaacccaaatctctttgaaacctcaaaagagcaatatatttcaggacaaaaaataaggtaggagatgtcatattgttctgcagcagacatagaaaagacagcaaagaggcagttgcagaaagctgaacagatagataaatccttcagccagggctggctacataatttgcagtactttatttatttatt

SEQ ID NO: 441744 - DNA, 201 bp, Homo sapiens
tttgtcgttaacaacccaaatctctttgaaacctcaaaagagcaatatatttcaggacaaaaaataaggtaggagatgtcatattgttctgcagcagacatagaaaagacagcaaagaggcagttgcagaaagctgaacagatagataaatccttcagccagggctggctacataatttgcagtactttatttatttattt

SEQ ID NO: 441745 - DNA, 201 bp, Homo sapiens
acccaaatctctttgaaacctcaaaagagcaatatatttcaggacaaaaaataaggtaggagatgtcatattgttctgcagcagacatagaaaagacagcaaagaggcagttgcagaaagctgaacagatagataaatccttcagccagggctggctacataatttgcagtactttatttatttatttatttatttattta

SEQ ID NO: 441746 - DNA, 201 bp, Homo sapiens
cccaaatctctttgaaacctcaaaagagcaatatatttcaggacaaaaaataaggtaggagatgtcatattgttctgcagcagacatagaaaagacagcaaagaggcagttgcagaaagctgaacagatagataaatccttcagccagggctggctacataatttgcagtactttatttatttatttatttatttatttat

SEQ ID NO: 441747 - DNA, 201 bp, Homo sapiens
ttctgcagcagacatagaaaagacagcaaagaggcagttgcagaaagctgaacagatagataaatccttcagccagggctggctacataatttgcagtactttatttatttatttatttatttatttatttatttatttagacacaaggtctccctctgtcgcccatgcttgagtgcagtggcacaatcttggctcactgc

SEQ ID NO: 441748 - DNA, 201 bp, Homo sapiens
tctgcagcagacatagaaaagacagcaaagaggcagttgcagaaagctgaacagatagataaatccttcagccagggctggctacataatttgcagtactttatttatttatttatttatttatttatttatttatttagacacaaggtctccctctgtcgcccatgcttgagtgcagtggcacaatcttggctcactgca

SEQ ID NO: 441749 - DNA, 201 bp, Homo sapiens
gagaaacagaacacatttgaggagaggaaaaaaaactattaatgcattaacaacctttaccagtcttcccatcccacttcttaaacattttcttaatatgwttttttaggtattacatttacacataagacattactgaggacagtgactgaacaaacttcctccttctaaaaaacaagaaaccaatcattttgtaattta

SEQ ID NO: 441750 - DNA, 201 bp, Homo sapiens
tataaatggtcaaaagacttgaatagaaagtcttcatgaaagacataaaaacacatgaaaaggtgctcaacgttattagtcattaagcaaaggcagcgggrggtgagagggcaggacaaaacaaaagaaaaaaaaataagctaaggcaaattaaaaccacaagaagatataactacacatcccttaaaatggctacaatgg

SEQ ID NO: 441751 - DNA, 201 bp, Homo sapiens
aagtcttcatgaaagacataaaaacacatgaaaaggtgctcaacgttattagtcattaagcaaaggcagcgggaggtgagagggcaggacaaaacaaaagaaaaaaaaataagctaaggcaaattaaaaccacaagaagatataactacacatcccttaaaatggctacaatggaaaagatggataatagcaagtattggc

SEQ ID NO: 441752 - DNA, 201 bp, Homo sapiens
gatggatggagactcttgtgagtcataaggtgacagatagcaggaagatgtgtgctctttcctgaatgtatccctcaaatatgatagaaagctagccgtcrgtgataaaattacaggaaatgaacaattctattatgctaggttccaaaaaatgcaagagaagggtttagtcacatgcatattctagaccttcaagaatca

SEQ ID NO: 441753 - DNA, 201 bp, Homo sapiens
taaaataataatgccaccttggaaaactggcagtttcttatgaaggtaactgcaaccttaccatacaattaatttgtgaattccactcttaggaatctacycaagataaattaaacatatatccacatgaagatttatatatagatgttcacagcagcattattcataagccaaacactggaaaaaaatccaactactcac

SEQ ID NO: 441754 - DNA, 201 bp, Homo sapiens
cttacatatacatgaatcataaattactgtttcaaaaaagcactcttctaaaaaaaaaacaacttaaagtttttagaatcacatcattttaggaatggaaygggccttagaaatcacctgttcagtgtcttcattaggaaggtgtgtatgtgcacagacacacacacgcatatatacacgtaagtccatacttataagcat

SEQ ID NO: 441755 - DNA, 201 bp, Homo sapiens
tagttaggtttggtttggctgtagtgaaggaaaatggaatataacattgctttaagcagaacaaaatttctctgccccataaaagtctagatgagtggtcyaggacaggaattggatcccgtggtgccagaaacataggctctttatgtagccctaacttcatggcccaagatagtgaaatctacagtccagacagaaggg

SEQ ID NO: 441756 - DNA, 201 bp, Homo sapiens
tagctgcatagtgtttgttacatggatgttcatacatttacttaactaatctctgcacacataggtttgggggtatgataaaatagcagcagttaatatcrtaaacattcaccttcgcctacatgcaaaagtatgattttggaataaattcctagaaataaaatcattgaatcaaaatttgaatttttgattggtattatg

SEQ ID NO: 441757 - DNA, 201 bp, Homo sapiens
ccctttgtagtttacgaaccacttctacccttatcttttaaggttgtattagttaggtttggtttggctgtagtgaaggaaaatggaatataacattgctytaagcagaacaaaatttctctgccccataaaagtctagatgagtggtctaggacaggaattggatcccgtggtgccagaaacataggctctttatgtagc

SEQ ID NO: 441758 - DNA, 201 bp, Homo sapiens
tgcatgtttttcataacaataaaaacactacaaagatgcagaaagaaaaagttcaacatctctccactcccctttctgttaccttccctgcaagccaacasaaggctttgaatgcttccatgcctttccccgctcacatttatccatacatgcctttgcacacttagacagggatttctgtttgcttttgccaaagcagaa

SEQ ID NO: 441759 - DNA, 201 bp, Homo sapiens
caaaggtgggaataatccaaatgtctgaatggataaacaaaatgtatatccatttaatggcatattattcagtcacaagcaggaaagaagtactggtacaygctacaagacagatgattgaaaatgtgctaagtaaaagaaaccagatgaaaaggcctcatgttgtatatttccatttatattgaaatatccagaataggc

SEQ ID NO: 441760 - DNA, 201 bp, Homo sapiens
ggcaactaaaaagttcaaaaactactagtactcatttctttggaggacttatcaccacttacccatttttcccattaaatcagtcaaataatggatatggktttccaaccacacctctatctcagattttcctagtccttctgtgaaataaaataatctaaaataaaaagtatctgcatgtctatttgaattttatatatc

SEQ ID NO: 441761 - DNA, 201 bp, Homo sapiens
aatgtcaatgcagaagaaaaatgctgaatgcatgccctgacatggctattgcatttgtcagctgttgtacttactacagttattcagactgttgttcgggycacagagagagctaccaccacatgaatcaaggcagggattgtagaggcatctttggtctccttcttgacatgaagtctgaactacagagggaggaaaagg

SEQ ID NO: 441762 - DNA, 201 bp, Homo sapiens
ctgcagcagacatagaaaagacagcaaagaggcagttgcagaaagctgaacagatagataaatccttcagccagggctggctacataatttgcagtactttatttatttatttatttatttatttatttatttatttagacacaaggtctccctctgtcgcccatgcttgagtgcagtggcacaatcttggctcactgcag

SEQ ID NO: 441763 - DNA, 201 bp, Homo sapiens
ctttgatctggaggaaatgactgaaaggtgcagggtgacttagagtttatttgaggcatcggtggcagaatcatgaatttgcagcacagcagctggtctcragagacagtggtcacatggcagctgcctgagcctgttccctcagcaggaagatagcctcatcttgaccattaccatcattcccggcatagcctggctctc

SEQ ID NO: 441764 - DNA, 201 bp, Homo sapiens
tgcagcagacatagaaaagacagcaaagaggcagttgcagaaagctgaacagatagataaatccttcagccagggctggctacataatttgcagtactttatttatttatttatttatttatttatttatttatttagacacaaggtctccctctgtcgcccatgcttgagtgcagtggcacaatcttggctcactgcagc

SEQ ID NO: 441765 - DNA, 201 bp, Homo sapiens
taagaaggaacaccattcccacttccctccttgtgcagcataggccaatcatggccagacaaacccttctagcaagggctttgatctggaggaaatgactsaaaggtgcagggtgacttagagtttatttgaggcatcggtggcagaatcatgaatttgcagcacagcagctggtctcaagagacagtggtcacatggcag

SEQ ID NO: 441766 - DNA, 201 bp, Homo sapiens
tagtaaaggaaatttttcacttaatatttaaaggattatataacgatccaatacaatattaaagcacacagaataatgttgttcaaatatataatatatayagatgactttttctacttgtatatgttcacttagaatgcttttaaaatttatagctaaatccagctacaagaaaattttcatttcttcaatatagatcat

SEQ ID NO: 441767 - DNA, 201 bp, Homo sapiens
gtgcatcaacttttaaaaagacagcttcaactatcacataataatgttgacactttataaatattagtaaaaagtcaataaaaatgaagccactttcataytgttaaaaataacatgttaactaaaaaaaatactgttggaagacatgtatataccacattcattacaatggaaagtagagaaatacctgttagttgtaac

SEQ ID NO: 441768 - DNA, 201 bp, Homo sapiens
tgaaattgcagagtgaagatgacaagacagagtaagtgaacttatagctaaattaatagatattatctaatatgaacaaaagagaaaagttttcaaaaaaygaacataacttcaggtacctgctgtatattatcaaaaggtccaatattgatgtcattaaaaatataggaaggaaaggaaggagaatgagatttgtacaga

SEQ ID NO: 441769 - DNA, 201 bp, Homo sapiens
tgaggcagaagaattgcttgaacccaggaggcggaggttgcagtgagccaagattgcaccactgcactccagcctgggtgacagagcaagactccatctcaaaaaaaaaaaagaaaaaaaattagcaaatgttgttggaggtcaaaaactactgagaactactatgggatatagccacacaggtagagacccttggagatg

SEQ ID NO: 441770 - DNA, 201 bp, Homo sapiens
ccagttcctggtaaactgcctggtacatagaatatacttactacatgtctgttgaattgaaggatttacatttgcacagggcatgtggcttctctcaaataaagaagttatctgaaatacattatcccatttagcccataacacaattctaccacttaggtattattatttctattgtaaagttggagcaatagaggttta

SEQ ID NO: 441771 - DNA, 201 bp, Homo sapiens
cagttcctggtaaactgcctggtacatagaatatacttactacatgtctgttgaattgaaggatttacatttgcacagggcatgtggcttctctcaaataaagaagttatctgaaatacattatcccatttagcccataacacaattctaccacttaggtattattatttctattgtaaagttggagcaatagaggtttaa

SEQ ID NO: 441772 - DNA, 201 bp, Homo sapiens
gttcctggtaaactgcctggtacatagaatatacttactacatgtctgttgaattgaaggatttacatttgcacagggcatgtggcttctctcaaataaagaagttatctgaaatacattatcccatttagcccataacacaattctaccacttaggtattattatttctattgtaaagttggagcaatagaggtttaaag

SEQ ID NO: 441773 - DNA, 201 bp, Homo sapiens
atgaaggtgaaaaaataaattgaaaaaaattagtccaaaacaaacatgcaaatttgcagtgcacgattgagcatttctgtccatgaaaagtgcttctgtasagctctctgcaggcagctcttcacagtcaagaaggccattttcttttagtgtagctggcaaaagtctctgatcatccttataattagtttaggagaaagg

SEQ ID NO: 441774 - DNA, 201 bp, Homo sapiens
gggtaagaggttcaaagaggttgaagtttcaggagagactacaggggaagaaatgtacagaaaatatctggccttaagattagccctgagtcaagcagagwatggtctactttatccataaagagggaacgcattgagcagataacgggaagtcaaaaactgtgctcctattcctatgaactctcattgctgcaatttgag

SEQ ID NO: 441775 - DNA, 201 bp, Homo sapiens
gatcctactcctgtaatgagaatgttcaaaagactggggaataatactctaaaatgtaaataaatctgacatcaggccttggttcaaccaagtgttccctrtgcttttgtagctatcagctacaagtgcttgtgactttcccaggaagcaaaagctgagcaagaaacagaagagggcaatggcctgacgaggagcttagcc

SEQ ID NO: 441776 - DNA, 201 bp, Homo sapiens
ggagcagaagacacagtttgtgagttgatgccaaaccttgctaaatgcttagctctttgctgtcacttacaagcgatcactcttcccctgagccaatccarttcaattaagttcatatcccattgccacacctctaattctctcaccttgtttagtacacagaagagaaattttacttctgctctcacaagactgcctgga

SEQ ID NO: 441777 - DNA, 201 bp, Homo sapiens
aggaaagttattatctttatttaaatgaggagatatcttcagaggcaacaggagaatagtttagccttttaggtaaatcctattttcttcagagcactgtwggagggtcatatttctgtaatagttatagaagatgattttgggaagaaacagtaggctctcattatccagacaagatagataaataggatcctgtgtcct

SEQ ID NO: 441778 - DNA, 201 bp, Homo sapiens
cacgaatctaaagaaatgcagacactgagactctacttgcggctagatattcaacttggaactttgtcctgcacaatcattatgccaaaatgtgatttgtkttcttttttcagtcatagagatggagtttttccaacccatctccactctgtccgtagagcaaaaattagtcaattgttaccccctcatttaagatgaaaa

SEQ ID NO: 441779 - DNA, 201 bp, Homo sapiens
tgcatttttggagaattatctctacatgaaaaaaatattacaaccaagaattctaaaaaagattatctgacaagtagaggatctcagatgagtgtacttcrgaaatttctgttctatttaaacatacatttttaaatataaatgtttcatcaatctttctaagattttttccaagatcatcaatctcttccaagattagaa

SEQ ID NO: 441780 - DNA, 201 bp, Homo sapiens
ctaaaaaagattatctgacaagtagaggatctcagatgagtgtacttcggaaatttctgttctatttaaacatacatttttaaatataaatgtttcatcartctttctaagattttttccaagatcatcaatctcttccaagattagaatatttgcaatatcctctgatattagagagccaatgttttaagtggcatttta

SEQ ID NO: 441781 - DNA, 201 bp, Homo sapiens
attaattatttttcctgatcctttttctcctcctaccctccaccttctggtagaccccagtatcagtcgttcccctctatgtgtctatgtattcttatcatttagctaagtgagaacatgccctaagagtctacaatctgtgtatgccttgtccttcatggaacttgccagttcttggcatggtgctacacatgtgaccac

SEQ ID NO: 441782 - DNA, 201 bp, Homo sapiens
ttgaaaagctctaatacattgctgagaatctagaagatcccatgaatgtgcaggactatgcatatacctaagaaggacccagaaaggcccaaatatctcayctgtggcagacattgagaccctgtacaagcagaaatttaaggataaggcagagctgtaaactctgctatagtattgactgctatagcattgactctgcta

SEQ ID NO: 441783 - DNA, 201 bp, Homo sapiens
gtcatccaatggcccatttaaaaaagtcagtgaatttgtttggttgtatttctgccatcgtacagaatctgagcatctccataacttcaatttccctttcktttttttccagctttattgaggcattcttaacaaataaaaattgtacatatttaaggggtgtaatgtaatgtttgatatatgtataccttgtgaaatggc

SEQ ID NO: 441784 - DNA, 201 bp, Homo sapiens
ttcaactcaaaaggcccccagctgccctgaggaagggctccacagacatccacaggatgtttttgcatttcattcattagcttccaagaggaaaggcaatytagatggaatttctcagttataagtggaaaatttaagaaattaatcatcaaggataggggagtatcattatgaaaattaggtttccatgaaattcttgaa

SEQ ID NO: 441785 - DNA, 201 bp, Homo sapiens
gtttggggaaacaaatcacttggttaaaagatttaggtcattgttttagaggaagtacttcaattgacaaatattcagaaatttggctgcagagtttgttytatgaggaaaatgtcaagaactttttaagaggaaatggtccatttttagttttcctctttaaaattcttaagaagtagcaacatttatgagcttcagagt

SEQ ID NO: 441786 - DNA, 201 bp, Homo sapiens
atatctttgaatatgtatggacatttctatgtatgtctaatatactcacaagtgattaacacaaaccgaaaatttaatctgtaagaaaaaaaatctacttyagattattttaggtaaaataagattcattagatttctggaattttacagctagaagagactggcaatcaatcacacagtcctgcttccaatcccagaaat

SEQ ID NO: 441787 - DNA, 201 bp, Homo sapiens
aggtcacagtcacacagaggctgagcacgcccaatgccatgcccaatgccacccagtcttcccctgctgctgtttctgcctcgcctccctgtccttccccyaccctaccctagcgtgggcaggctttgtgtcccaaggtcaccagtgacatatgtcccaccacaggcagccgagcttaaccctatcactgagacctccttg

SEQ ID NO: 441788 - DNA, 201 bp, Homo sapiens
agtagccacagtatggaggtgcggatttgactttgcctgcggaagagctgtcctgctctggccagcactggaagggactctgcctcctctgttctgggagygtgcaagcaggaactctggactgggctttgcacaacttccaggagtcattgcttagaaatcagaatgaccaagatcttaaggtcttagaatcatctaggt

SEQ ID NO: 441789 - DNA, 201 bp, Homo sapiens
ggtgggaagctcctggagagcccccagctcctcccagttactgactggctctggaggagaggagctagaaggccgagatacctgaggagacaaacctgggscaccactgccacctgatgtcttcctatggccattgcagtggtcacagccccaagccccgtggcagcctggcagcagagtgaaacaagagggcaaagaaag

SEQ ID NO: 441790 - DNA, 201 bp, Homo sapiens
catttctgtgtaacttctctactcccctccgtctcctctcccctcatgagatggctggagcccgataaggccccggctggttcatcccactgtggctcagrgcagcttgacacggtgctcagaactgcattgtggcacagttctgatatggacggaggacgtctaacagggacagaagaggcgtagccagcaagatgccct

SEQ ID NO: 441791 - DNA, 201 bp, Homo sapiens
cagaggctgagcacgcccaatgccatgcccaatgccacccagtcttcccctgctgctgtttctgcctcgcctccctgtccttcccctaccctaccctagcrtgggcaggctttgtgtcccaaggtcaccagtgacatatgtcccaccacaggcagccgagcttaaccctatcactgagacctccttgtggctgctccctac

SEQ ID NO: 441792 - DNA, 201 bp, Homo sapiens
atctggagtgaacaaaaacagatgtgggttattgactaggtctcctattattccagtgtctaaccgaattgctctgaaactaagttttccttccttccttaaaaaaaaaaaaaaaaaaaagggggtgcaggtggtttggctcatgcctgtaatcccagcactttgggaggccaaggtgggttactcacttgagcccaggag

SEQ ID NO: 441793 - DNA, 201 bp, Homo sapiens
ggcaagcagatgcaaatctctataaagaccataaaatggcctagagaatgcacttatatataactccagttctgacaggggggaataaagggtaacttccytctataaaatctatcctcgttctttagacttgggatttaaatgctcagtttttaaacgaggaattactgtgtgccagatactacgatataatctttatac

SEQ ID NO: 441794 - DNA, 201 bp, Homo sapiens
cactccagcctgggtgacagactgaaactatctccagaaaaagagaaagaaacaaggggggttaaaactaggattaagtttagaaaaagtatgtcttaacttttttttttttttttttttaaaaagacagagtctcgctctgtcgctcaggctggagtgcagtggagtacaggagtggagtgcaggctggagtacagtgat

SEQ ID NO: 441795 - DNA, 201 bp, Homo sapiens
caggcccctgccaccacgcctggctagtttttgtatttttagtagagaaagggtttcgttgtgttggccaggctttttttgttttgttttgttttttgagrcaaagtgttgctcttgtcgcccaggctggagtgcaatggcgcaatctcagctcactgcaacctgcccctcccaggttcaagcaattctcctacctcagcc

SEQ ID NO: 441796 - DNA, 201 bp, Homo sapiens
gaattcccttatgccctttgtcaagagtcatacattttaacgttttcaaattttgctgcatttgctttcttccctttgactctgtctacttctctctcttacacacacacacacacacacacacacttaacctgtaatatttcagtgtattatttccttagaacaaggatgttctcatacataactgcagtataattatca

SEQ ID NO: 441797 - DNA, 201 bp, Homo sapiens
cagaatctcactctgtcgcccaagctggagtgcagtggcgcgatctcagctcactgcaacctctgcttcccaggttcaagtgattctcctgcctcagcctyccaagtagctgggattacaggcccctgccaccacgcctggctagtttttgtatttttagtagagaaagggtttcgttgtgttggccaggctttttttgtt

SEQ ID NO: 441798 - DNA, 201 bp, Homo sapiens
aattcccttatgccctttgtcaagagtcatacattttaacgttttcaaattttgctgcatttgctttcttccctttgactctgtctacttctctctcttacacacacacacacacacacacacacttaacctgtaatatttcagtgtattatttccttagaacaaggatgttctcatacataactgcagtataattatcaa

SEQ ID NO: 441799 - DNA, 201 bp, Homo sapiens
gtgctaggattacaggtgtgagccaccgtgcctggcccagttggatctaattctaaactgtagtttatcccatcgagttttacattccttttttccatacrgaatctcactctgtcgcccaagctggagtgcagtggcgcgatctcagctcactgcaacctctgcttcccaggttcaagtgattctcctgcctcagcctcc

SEQ ID NO: 441800 - DNA, 201 bp, Homo sapiens
attcccttatgccctttgtcaagagtcatacattttaacgttttcaaattttgctgcatttgctttcttccctttgactctgtctacttctctctcttacacacacacacacacacacacacacttaacctgtaatatttcagtgtattatttccttagaacaaggatgttctcatacataactgcagtataattatcaaa

SEQ ID NO: 441801 - DNA, 201 bp, Homo sapiens
ttcccttatgccctttgtcaagagtcatacattttaacgttttcaaattttgctgcatttgctttcttccctttgactctgtctacttctctctcttacacacacacacacacacacacacacttaacctgtaatatttcagtgtattatttccttagaacaaggatgttctcatacataactgcagtataattatcaaat

SEQ ID NO: 441802 - DNA, 201 bp, Homo sapiens
gctaataatccaaaccagccctcttcccttttttcccctttgggagcccttgcactgtggtgcatgaaacacatgcttcaactaggccattgggaactgcrgcttggacaaggaacagccacagcttttcctgtactcagagcaggcaaagtgccattaaatgcagctggaagccagggcaggggaaggggtgggaagctc

SEQ ID NO: 441803 - DNA, 201 bp, Homo sapiens
tcatcaagagtgatctttaagtccacaagaccagtttgtgatttttgcagttcttctagctgaatagcccagtagaccatttggcacctgtatctcaatgragctttgtgggtccgtacacgttcatcatacagtaatgcacatggggactggaaatgggcaattcaaatatgacaatggtacactttataggtagtttta

SEQ ID NO: 441804 - DNA, 201 bp, Homo sapiens
gccaccacactcagcttattttttaactttgtacagatagggtctcactatgttacccaggctgtcttgaactcctgacctcatgtgatcctcccacctcrgcctcccaaagtgctgggattacagccatgagccaccacacccagccagagatcattaaatcctggtttcctacttatgtatatcctttggtaaatcatc

SEQ ID NO: 441805 - DNA, 201 bp, Homo sapiens
gcatttattaaaaatacaaaatgctaataatccaaaccagccctcttcccttttttcccctttgggagcccttgcactgtggtgcatgaaacacatgcttsaactaggccattgggaactgcagcttggacaaggaacagccacagcttttcctgtactcagagcaggcaaagtgccattaaatgcagctggaagccaggg

SEQ ID NO: 441806 - DNA, 201 bp, Homo sapiens
acacagggaaggggagtcaaacagcttgcatcggttgtccttacaggaaaaaaaacagacagacccatctttcattaaaacctgttcacttgaatggtaaracaaataaaccgaaggtttcctgggatgatctaagatcaattctaaattagccaacagacactgccgattcatctagtcctagcaactctcacagggcct

SEQ ID NO: 441807 - DNA, 201 bp, Homo sapiens
ctgcaactccagcctgggcaacagtgagactgtctcagaaaaatatatgtatatataatataatcaaatatgcctgaacccctggttttccaacccatacmtaaaggaccatgtgttttctattctgggcgtccctctgtgcttcagcccaatatattttgtccccagtagcccccagcatcacattatgtgtgggcactg

SEQ ID NO: 441808 - DNA, 201 bp, Homo sapiens
ctttatgggggttgggtgcagctgaagagtttatgatgaagtcagggtaggcaaggggcttcagctaagctgttcattcttaagctggtgtgtgaaatatragtgttgattttttgtacatctttgcatactttaaatttttaaaatctgaatcagatcacaccttggatggaatagttttccccaaaatttaaagtgagt

SEQ ID NO: 441809 - DNA, 201 bp, Homo sapiens
gaaattccctggttcactgctatctctttcatttgaggaaagctgtaagacaaaattcatggattaataatgagagctctgatccactttcatttccttgratgggtcactagtttttatgatgaaaacatactatgttatacttgttatacaaagcaaaattttagccattactgattatatgaaaatgtatcccaagat

SEQ ID NO: 441810 - DNA, 201 bp, Homo sapiens
tgagacaagtccccacccaaggtgtcaatggagtttgtgctggggaacccggacttccacccatgcctttcttgcagtatcagaggaagcctgctaaaacrtaaaatttacatagaccggagactcacaaatatacaggagacaatggaagaatcaccggtcataccaagaaccagaaaaatcccaacttgaacaggaaaa

SEQ ID NO: 441811 - DNA, 201 bp, Homo sapiens
tttaccctcctggagtccatgagagtgcaggcagccacgagatacaggtcttactggcttcttaaactcaaaggcttcctgcaagacatagttgagacatytactgtccatgaaaaccaactcaggcctcagcttgggtgaaagaggcaagaaagtgggcactgatcacctttctgcctccaaattaaagtttcacctaat

SEQ ID NO: 441812 - DNA, 201 bp, Homo sapiens
taaaatggcaggccaggcgccgtggctcatgcctgtaatcctagcactttgggaggctgaggcgggcggtttgcctgagctcaggagtttgagaccagccsgggcaacatggtgaaaccccgtctctactaaaaaaaaaaaaaaattagccgggcgtggcagcgtgcacctgtagtcccagctacttggaaggctgaggca

SEQ ID NO: 441813 - DNA, 201 bp, Homo sapiens
acagaatcctgacctctcagtgaagcataaaatgagcagaggctaaggatgaggttgcatcttagcatacgggctaaagaggtcgtttcattttacaggcaaaaaaaaaaaaaaaattaaattctcaataatgggttgacttaatttgcaattttaggaaggatagatcagacaggaagccagctgacctttgcagcaatc

SEQ ID NO: 441814 - DNA, 201 bp, Homo sapiens
aatcccagcactttgggaggccgaggtgggtggatcacgaggtcaggagttcgagaccagcctgaccaagatggtgaaacccccatctctactaaaaatayaaaaattagctgggtgtggtggcgggtacctgtagtcccagctactcagggggctgagggaggagaatggcttgagcacaggaggcggaggttgcagtga

SEQ ID NO: 441815 - DNA, 201 bp, Homo sapiens
tgttggccaggatggtctcgacctcttgaccttgtgatccacctgccttggcctcccaaagtgttgggattacaggagttagccaccgcacccagtcaccttttttttttttttttgagatggagtctcactctgtcgcccaggctggagtgcactggcgcgatctcggctcactgcaacctctgcctcctgggttcaagg

SEQ ID NO: 441816 - DNA, 201 bp, Homo sapiens
agttgtactgtagttgcctgtgtgtagagcatgtacatacaaatgtgacaaaatgttaaaaattaataaaatcaggtgaagtgtgtgcaagtataacctttgtgtgtgtgtgtgtgtgtgtgtgtgtgtgtgtgagagagagacagaatctcactctgtcacctaggctggagtacagtggcatgatcatggctcaccaca

SEQ ID NO: 441817 - DNA, 201 bp, Homo sapiens
gttgtactgtagttgcctgtgtgtagagcatgtacatacaaatgtgacaaaatgttaaaaattaataaaatcaggtgaagtgtgtgcaagtataacctttgtgtgtgtgtgtgtgtgtgtgtgtgtgtgtgtgagagagagacagaatctcactctgtcacctaggctggagtacagtggcatgatcatggctcaccacag

SEQ ID NO: 441818 - DNA, 201 bp, Homo sapiens
ccaaccttgggagtgtgggaggtaggtttaaggcatggaagtcccaggccccctctccaaatgtcacacagctgtcccctttgcttaagtttctctgcagsaaagagggtaaagggggatggagggaagcttgggctgctgctggctggtcctgccgccctcagagcttcttcagacgactgtacatctccctcttgctct

SEQ ID NO: 441819 - DNA, 201 bp, Homo sapiens
ctgagccagaagaagcacttgaacccaggaggcagaggttgcagcaagtcaagactacaccactgcactgcaccccagcctgggcaacagagggagactcygtctcaaaaacaaaacaaaacaaacaaacaaaaaaactgtagctcatttgttctgtaattatagttcaggttattgagaattaaaaaatatgaacttatc

SEQ ID NO: 441820 - DNA, 201 bp, Homo sapiens
tgagaatctgctgaaatgagttagggcaagcagatgcaaatctctataaagaccataaaatggcctagagaatgcacttatatataactccagttctgacaggggggaataaagggtaacttccttctataaaatctatcctcgttctttagacttgggatttaaatgctcagtttttaaacgaggaattactgtgtgcca

SEQ ID NO: 441821 - DNA, 201 bp, Homo sapiens
gagaatctgctgaaatgagttagggcaagcagatgcaaatctctataaagaccataaaatggcctagagaatgcacttatatataactccagttctgacaggggggaataaagggtaacttccttctataaaatctatcctcgttctttagacttgggatttaaatgctcagtttttaaacgaggaattactgtgtgccag

SEQ ID NO: 441822 - DNA, 201 bp, Homo sapiens
acaggcatgagccaccgtgcctggccatgtatttcttgatttcttgctctgagtaccagtggtccagccactccctcaggtcaggagccaagagaccatcstgaatccatccctctccctcactcccatctacccatccatcaccagatcccagcacctaaagcccttccctcccatgccccagcttctgctatgactata

SEQ ID NO: 441823 - DNA, 201 bp, Homo sapiens
taatcccagcactttgggaggccgaggtgggtggatcacgaggtcaggagttcgagaccagcctgaccaagatggtgaaacccccatctctactaaaaatwcaaaaattagctgggtgtggtggcgggtacctgtagtcccagctactcagggggctgagggaggagaatggcttgagcacaggaggcggaggttgcagtg

SEQ ID NO: 441824 - DNA, 201 bp, Homo sapiens
aagcaagcaagcagttctgcagtggaaaatagctgggtgccgtccaattcaattctgacactatctacctgcagagcgtcagatcaggaagttgagggccyagtcctcaaaaccacaccacccttcagacaccagttgggcctctggatcttctgatctacgaccaccagctttaagtaggggttcccatgaccccttctt

SEQ ID NO: 441825 - DNA, 201 bp, Homo sapiens
tactaaaagcaatgaaaaaaaaaaaagccctactggtttactcaacgtggacgattcttacaagcataatgttttttaaagccagatatgatagaatacayatcgtatgattccactttatggaatgaaaacactcacaggtcccttgccctaaaatattcacttaagaactcataattaagtattaaaagcagtaatggc

SEQ ID NO: 441826 - DNA, 201 bp, Homo sapiens
cacccggcccagcccctttttaaaatgttttcttttgaaataatttaaagcttacagaaaagttgcaagaatagtacaaagaattcccttatgccctttgycaagagtcatacattttaacgttttcaaattttgctgcatttgctttcttccctttgactctgtctacttctctctcttacacacacacacacacacaca

SEQ ID NO: 441827 - DNA, 201 bp, Homo sapiens
gataggcttttttcaaactgactagatggtaaaagctaggaatgaccatggtccctcctaacccacactccttatacatcaggagacatgcagagagataycatgactaaaggtcataatttgtaggtagccaaagtgaggcctaaaacccagatccccaaatcctatcatgcatttcaatctttggctatactcaactaa

SEQ ID NO: 441828 - DNA, 201 bp, Homo sapiens
ccaggctggtctcaaactcgtggcctcaagtgatccacccacgctggcctcccaaagtgctgggattacaggcatgagccactgcacccggcccagccccyttttaaaatgttttcttttgaaataatttaaagcttacagaaaagttgcaagaatagtacaaagaattcccttatgccctttgtcaagagtcatacattt

SEQ ID NO: 441829 - DNA, 201 bp, Homo sapiens
cctaccctagcgtgggcaggctttgtgtcccaaggtcaccagtgacatatgtcccaccacaggcagccgagcttaaccctatcactgagacctccttgtgrctgctccctacccctccctgcctggcttcctggcatcctgcctctaacctctctctctgcttccctgtcttctacattggtagaactgccacttggatac

SEQ ID NO: 441830 - DNA, 201 bp, Homo sapiens; identical to SEQ ID NO: 117249

SEQ ID NO: 441831 - DNA, 201 bp, Homo sapiens
aagtggactgttctactcctgagatctctggcctcagttcccaggactcagaaactctgagagaacaaatagctcaccgctgggtctgcattttccagggmaaaaatggcttcagacagagaagacggtgattctgtttggccaggactggactcaaattctaagaaaagtaacagtcacaaaggagctcctattaattgg

SEQ ID NO: 441832 - DNA, 201 bp, Homo sapiens
gaaggcgcagaggtaaagtgggcttccggtcgcacggctgctggcagccgttccggatttccttcaggcttggggaattgtcgcggctgggggaagaggcrggagagggcacatgagtacaggcaccgttcatgatgcaccatgacccatcagactaaaggcctccctgaatcccaggatgaggccaaaatgtaatactat

SEQ ID NO: 441833 - DNA, 201 bp, Homo sapiens
aatttgatgttatgtgtatttcaccacaattgtcttgttttttgagacaggttcttgatctgtcaaccaggctggagtggagtagcaacatcatagctcaytgtagccttgaactaggcgatcctcccaccttggcctcctgagtagcggggaccacagatgtgcaccaccacgcctggctaattaaaaacattttttctg

SEQ ID NO: 441834 - DNA, 201 bp, Homo sapiens
ctggacttgaagtaagactcaacgggatttgagacccccgctcgaccatgtgcgggccgggcaccctggggaagtcgcttctcagagccccagtctccccrtctgtaacataagggtggcaaggcctaactcccgtcagggaaggaaacaaagaactaacagagcaagcacacagtaggtgctccaagaacactggccccg

SEQ ID NO: 441835 - DNA, 201 bp, Homo sapiens
aggtgctccaagaacactggccccgtccactcactgttaaaggccagatgcagagaagtaccgcttaggaatgactgcaggaaagaacccaaagtctcatktaatccaacctcgcacgcccccaccctaccccagcacatctgcaaggtggtgggggctctttccaagagcgaccgcgttcattcacagaaacagggcaag

SEQ ID NO: 441836 - DNA, 201 bp, Homo sapiens
ggcagggaccaatcatggaggtgtgtctgagacggagggggttcctgggaggcaggactgatgctggtgctaatgctggggaagtcccaggcaggctagcmgggtgggcaccaagctcgatgtgaaccgccgtcattctgcactcaaactgatttcacaaccagcctgagggaccttggcgccactgactctgggactgtg

SEQ ID NO: 441837 - DNA, 201 bp, Homo sapiens; identical to SEQ ID NO: 117253

SEQ ID NO: 441838 - DNA, 201 bp, Homo sapiens; identical to SEQ ID NO: 117254

SEQ ID NO: 441839 - DNA, 201 bp, Homo sapiens; identical to SEQ ID NO: 117255

SEQ ID NO: 441840 - DNA, 201 bp, Homo sapiens; identical to SEQ ID NO: 117256

SEQ ID NO: 441841 - DNA, 201 bp, Homo sapiens; identical to SEQ ID NO: 117257

SEQ ID NO: 441842 - DNA, 201 bp, Homo sapiens
agcttgttttctgccagggagagcaggaattttttggtcttgtaacaggagcccatgaggatgtgcacctgtgaggcaagaaggcccaggtgaagggacakagacacccagtgccagcctccagcgtgctggcaggaagtgagcccaagagccgttgaacagacctgcctacacgctgtccagacagccaggtgttctagg

SEQ ID NO: 441843 - DNA, 201 bp, Homo sapiens
ggtctgcattttccagggaaaaaatggcttcagacagagaagacggtgattctgtttggccaggactggactcaaattctaagaaaagtaacagtcacaawggagctcctattaattggacacttcctgtataccaaggtttacccctagctctcatgctcacagctctcccaggggtgggtattattatggatccatttt

SEQ ID NO: 441844 - DNA, 201 bp, Homo sapiens
cggtgttgccacactgggttgataggattccagctagaagcaaagatgtctgacatttcccttgtcttaggcagtggcagccttatcaagtgtgaatggasaagcagaaacctcatccgtctgcacttggctcctaaatatcagatttactcttaaattgtaacagcacctctgaaatcctgcttatacgcttttcttctc

SEQ ID NO: 441845 - DNA, 201 bp, Homo sapiens
aaaaaatggcttcagacagagaagacggtgattctgtttggccaggactggactcaaattctaagaaaagtaacagtcacaaaggagctcctattaattgsacacttcctgtataccaaggtttacccctagctctcatgctcacagctctcccaggggtgggtattattatggatccattttagagatgaggacactgag

SEQ ID NO: 441846 - DNA, 201 bp, Homo sapiens
caataaaatgtacagtagagcgaatgcacaagccagtaacttagttgtttaccatcaagtcttatgcactgtgcatactgtaggtgctgtgcttttgcacractggcagtgcgagaggtttacaccagcaccaccaccaacacctgagcaatgcattgcactatgacatctctacagctatggcatgagtaggtgacagga

SEQ ID NO: 441847 - DNA, 201 bp, Homo sapiens
gattttatcctccctctgctcaaaaccttccaaagctctccactccgcagaaaactcaaggccggggcaattgtctgcgaggccctctgtaattgctggtyctacctttcataccccagcccctgccaccctcttccccctcactctatagtagcccccagtggcttcctggtagttcttaaacctgaccagcctcactcc

SEQ ID NO: 441848 - DNA, 201 bp, Homo sapiens
ctgctagaagtcaggatagcagtggctgcccatggtggggaggaggggcccaggtgaatggtaactctttttgatttgtacccttttctagatgtattttmtccttcaatgagaagtttatttcgaaaacgtcctgtgtctcttccaaagatagctccagctgggcaaagtggcagctctgtgggctccaacggaagaggc

SEQ ID NO: 441849 - DNA, 201 bp, Homo sapiens
tacgctggtaaatgtctaacaaccaactctccaaagaaagaagccctgatctggctggatgtggtggctcacgcctgtaatcccagtactttgggaagccraggcgggcagatcacctgaggtcaggagttcgagaccagcctggccaacaaagtaaaaccccatctctactaaaaatacaaagattagccaggtgtggtg

SEQ ID NO: 441850 - DNA, 201 bp, Homo sapiens
aaaaattccacacatccactggcgttcattttcctagaaaatccttgaatctcgtggctgtggcaggaggtccacattgaaaagagatgtctgcagccackgccaactctgcgccctggctgcatctcccaagcctccagagaacgtcgaactccaaaaacggcattcccgaaggatgggatcatttcctaaacacaccca

SEQ ID NO: 441851 - DNA, 201 bp, Homo sapiens
ggacccccgtcacttactttgtgaaaaaattccacacatccactggcgttcattttcctagaaaatccttgaatctcgtggctgtggcaggaggtccacaktgaaaagagatgtctgcagccactgccaactctgcgccctggctgcatctcccaagcctccagagaacgtcgaactccaaaaacggcattcccgaaggat

SEQ ID NO: 441852 - DNA, 201 bp, Homo sapiens
cactcctcctgggtaaccctccaggcacagcatctttaactgcccagaggaacagaagcctgcacaaggtgttaacacatgttaacccagaaaggggctcyatggcattattaatctcacatttgttaggcaaacactgggcaaacaagatgaaattaggcctcttaatggcaggacttgtcagagccttgacctggttaa

SEQ ID NO: 441853 - DNA, 201 bp, Homo sapiens
gtttagaatactgtccatacagcagctgagggatgctttttaaagccagagtcagattttatcctccctctgctcaaaaccttccaaagctctccactccrcagaaaactcaaggccggggcaattgtctgcgaggccctctgtaattgctggtcctacctttcataccccagcccctgccaccctcttccccctcactct

SEQ ID NO: 441854 - DNA, 201 bp, Homo sapiens
tgcagggacccagcttgttttctgccagggagagcaggaattttttggtcttgtaacaggagcccatgaggatgtgcacctgtgaggcaagaaggcccagrtgaagggacagagacacccagtgccagcctccagcgtgctggcaggaagtgagcccaagagccgttgaacagacctgcctacacgctgtccagacagcca

SEQ ID NO: 441855 - DNA, 201 bp, Homo sapiens
ctctactgggcactgcatagaccctcagggagctctgggtgtgcttcagtggatggagcagcactgaagctgtgtccctcctgtgtcaatccaggtgtggycacctggcttagggctctgatgacagggcccaacccaccaatcacactccaggaaacccagtgacatcatcgatcgccaatgggagctcctgatcatcgt

SEQ ID NO: 441856 - DNA, 201 bp, Homo sapiens
actagcccaagtgcctagacacacccactgctgtgcatttaacacacacacacacacacacacacatccctacagagaaatccacaggcatgcccacaccyatctctcctataaacacacacactcggcagaccacgtgtgctgtcgcacccacatccacccatggccgttcaggcacacaaagacactcacaagctctaa

SEQ ID NO: 441857 - DNA, 201 bp, Homo sapiens
gcaccctgtatgcctgtactcacagccacacttgtgcttatgcacactcttgcacacaccagctcgtgtgcactcacacacaagccactctaccatgcccrgccctgcgtagctcgaaccaacaaacacagccgcacccagcagcaaagcccagtctcctcccaccggccccgggggcgggcacgcggggggggcactcac

SEQ ID NO: 441858 - DNA, 201 bp, Homo sapiens
tcagattggtgattttcaagagagccacgctaacctgggtcaagttgtctgttcttttcagtgtgagtacattgtgtacatttgcccaccgagagcactgkggacggcctggaggacatgacggactttatcttgaagggactggctgaggggggcgtcatggacctgagcccacgaaacgtgttggcagcatcgtgcttc

SEQ ID NO: 441859 - DNA, 201 bp, Homo sapiens
atcctggcttctcggggctcctctaggagcctggtgtgtgtctcctcacagcccagtagcctggacctgtcacctgggcctgttcacatggacagacttgyccctcacagctgtgcatacctgggtctctcaccttgaaaccctggacacagaaacaggccaatcttctcaatgctttgtaaacacacacggtcccctcac

SEQ ID NO: 441860 - DNA, 201 bp, Homo sapiens
agagtgagactgtttccaaaaaaacccaaaaaccaaaaacaaaaacactgtgacgaatggcaccttcacccatcactgccaggcctttccatgtggttctytccctgggtcaccctcttcctgcttcttgcctggagaacagccaggaggtattaacgtaaatatcacctccccaacgctccttccaaaaacagatgccag

SEQ ID NO: 441861 - DNA, 201 bp, Homo sapiens
gagaccactgtgttctgcatgtcacatcctctccaatgacaccagaggtcactgcagaaagttccccataaactaatggcatctgcattagtctgcatccygggagcagttctcagccagcgagggatgggagctggtgagtgactatcccagcaccgccagcctcggcggagcaactctcagcagagcaactctcagtgt

SEQ ID NO: 441862 - DNA, 201 bp, Homo sapiens
tgcctacagagaaaaatccagcccccttggccttgtattcagtagcctccataaggctttcagatgctctcgtctttcccagaaaccacttgggaaagggktatctagaagtgcctctgcaacgacagacagaggactttaggtccaaaggagaaacaaagtacccccaataagcctcggttggggctgacagtgagagga

SEQ ID NO: 441863 - DNA, 201 bp, Homo sapiens
taaactaatggcatctgcattagtctgcatcccgggagcagttctcagccagcgagggatgggagctggtgagtgactatcccagcaccgccagcctcggyggagcaactctcagcagagcaactctcagtgtgttacgcacggcctcctggggcacagtgggagtgcatgccagctgcctgaagtggtcacctgcttgct

SEQ ID NO: 441864 - DNA, 201 bp, Homo sapiens
acaattccttctttcactgcctgatcagacggccaaggtcagaggcaatgccagccagagcttaccctctgagtgccaaggccctttagagaaatttaaayaattttagatagaaacactccttctttcctcgctttaagcagatggcagggagtagcctttgccctttcttgctgatgcaattgtcccttggagcatctg

SEQ ID NO: 441865 - DNA, 201 bp, Homo sapiens
aaggcccctctgcagagaaggaaaagagcagggactaaagggttctggggatcaggctccctgggtcccaaccccagctctgccaccccagagctgtctgygtgaggaagtggttcccttgccctgtgcctcggttttccctctgtagcaacctcagggtgttatggtgaggaataaggatagcactattcctaaaatgcc

SEQ ID NO: 441866 - DNA, 201 bp, Homo sapiens
ttttctttttctaaaatttattattattatttgagacacagtcctactctgttgcccaggctggagtgcaatggcacgatctcagctcactgcaacctccwcctcctgggttcaagtgattctcgtgcctcagccttccgagcagctgggattataggcgtgcgccactatgcccagctaattttttgtatttctagtagg

SEQ ID NO: 441867 - DNA, 201 bp, Homo sapiens
cctcacagcccaggtgtgaggcaggctacaccatcgaggcttctgtgagcacactccaggatgttcgctcagtgactaaatcacctaactacgcgcttccyggaacgtatccccatcgtgaaacaatgcatgactacacttgtacaagaatgctcacggccgcttattcacgacagccaaaaaggtgaaaacaacacaaac

SEQ ID NO: 441868 - DNA, 201 bp, Homo sapiens
atgaatggataagaaagaaaaatgatacatacagacaatggagtatcattctgccatcaaaaggaaggcagtgctgacacatgctgcaacacggaagaacyctgacaacatgacgctgagggaaagaagccagtggaaaaagaccatgtactgtgtgattgtactgctatgaaaagtccagaagaggaaagcccaaaaaga

SEQ ID NO: 441869 - DNA, 201 bp, Homo sapiens
atttttctgagggaagatgtgcctccccaggggtcccacagctgaggacgtggctgagctggtaccgacgtctccagggtcttcccgctgtgacttcgctyccccataacatgactggccccccactaaggccttggtggacaactgaggtttgtctcacaggtgggagggctccggggatgcacacgggacttactcttt

SEQ ID NO: 441870 - DNA, 201 bp, Homo sapiens
tggggcaattactgcgtgtaatgtgcccttacagaggcagcatttcctaaacacgcttggtaatcggctccttcgagagccccagctgcctcccgaggctkgctccttccaacctcttgaaagagacctggaggcatttcagggcctggttattttgacaaagccttctcttcaggccattatccaccagacagcgttctc

SEQ ID NO: 441871 - DNA, 201 bp, Homo sapiens
gggacgtctagactttatgtctgattcaaagaatgaagaggaatgtgagtgaaatgccaacattttgtccccactcaaagctccaaaacaaaggccttctktgaggaggcggcagatcagagcaacatgaacacactgggccccccattcccgaaagttccctgtgcccacacctgtgaataagaggggctaagctgctgc

SEQ ID NO: 441872 - DNA, 201 bp, Homo sapiens
gatgcggcggcaggggggtctgccttttgaacaagctcctcaggtaatatagtttgagaacaagtactctagaacttctggaattacagcctgataaactrtgggttctgagtcagagagacctgccatggttggacatggcaagaccttggtgtccatgtgtcctcagattccttctcaaacaccatgctccaccctcca

SEQ ID NO: 441873 - DNA, 201 bp, Homo sapiens
tattcaacaaatatagcaaataattttaaaggaaacaactttggcttcatttaggaaggagaaggtagaagggaagggagaaagaagagtgaggaggaaamgggagagagaatcagcagagaaaagaaagaggcaaacaggagaacaagggcctgggtgtgggaccttggccaggggagctggctccttccagaccggcag

SEQ ID NO: 441874 - DNA, 201 bp, Homo sapiens
tggtggacctgcagtgccttccagaatccctggtcccgttgggcactcaatttcttgtaggaacataaccatggcaatgaactgtgtgaccttaggcagtracggcccaggctttagctgccttgggtataaaatggggcaatgacatgtgtcgtcttctcactgtgctgtgagagctgagtgcaactgggaaagccaagt

SEQ ID NO: 441875 - DNA, 201 bp, Homo sapiens
aggcacgccaccgaacctctgtgggcctctgtttcaacagaggtgtaattcagcaacaaggatgcagtacagataaaaaaggatagtgcatatgaagtgcyggatacagtgccgggcacaaagaaagttatcatggatgcagctattggtttggtgacctcagacccctcatgatagtgggaacaatccccctgaccgcga

SEQ ID NO: 441876 - DNA, 201 bp, Homo sapiens
aaggaagaacgggccagggagctgggcaaggcggtggatcagggacacgtgtctcaagagaactgccaagaggagccaccactgcctcccagaatgcatgsgccacggagggaagacctcaggacagaggccgtgcgtgccagaatggaatgagggcggtgcccagacactcacttggtgaacttctcatgtgcgagagct

SEQ ID NO: 441877 - DNA, 201 bp, Homo sapiens
aaccttctcaccattccgctcaaaccttcagactgccgggctgatggaaacattcccaaaatgtttttctgtgcaattgagatgccggcctggaaaatccmtgctgcaagcatttctttctcacaggaggctacacccaactgtttcgctgcaagattctgcgtcacaaaagggatatccccagctaatatgacattcaag

SEQ ID NO: 441878 - DNA, 201 bp, Homo sapiens
tggttagaaccttctcaccattccgctcaaaccttcagactgccgggctgatggaaacattcccaaaatgtttttctgtgcaattgagatgccggcctggmaaatccctgctgcaagcatttctttctcacaggaggctacacccaactgtttcgctgcaagattctgcgtcacaaaagggatatccccagctaatatgac

SEQ ID NO: 441879 - DNA, 201 bp, Homo sapiens
gccaggcagaggttcttgcccaggactctggatcttgggcaagtgctatggagatggggcagggagaattcacctgggaggagctgggtcctgccctgcaycttcctgcactggtggtgatgggactaccacctgcatgccccgaccccagctccaggccattctccaggctgccaccgttcttctagtacattcctttcc

SEQ ID NO: 441880 - DNA, 201 bp, Homo sapiens
aacagaccgagactctgtctcataacaaaaacaaacacacacacacacacacacacacacacacacacacacacactcaaaacaagacacatttaactggyttcaaagaagaggccaggccaggtgcagtggctcacgcctgtaatcccaacactttgggaggccgaggcaggagaggatcacttgagcccaggagttcaa

SEQ ID NO: 441881 - DNA, 201 bp, Homo sapiens
tgtgctccacgtctgacaaattcacaatgaagtgacactaaaaacgacctttcaaggtggctgagattactgtgcaaattagagaactactttcggcttcrttcactgccatcgtttgtttctgtcactcattcaccaataacatggtggtccctgctacatccaggcccagtgctcagggctgggggcagagttgtacac

SEQ ID NO: 441882 - DNA, 201 bp, Homo sapiens
acgctcaagggtcactttgttatggagccaactccagctctccttgcctttgtggtttctgtcttcttgaacagaacgagccaaggtttgaggctcttgckgatctgttaggttgattcctacttactgggttgaaagcgagaaacaaatgtaaaagtttccaccctcctcccccagcaagccaagggctgtcatgccggg

SEQ ID NO: 441883 - DNA, 201 bp, Homo sapiens
gagagaaccaggtgaggtcaccccaagagcatccaatttagaggagggcgattatgcacccagaagggaaagcattcataagggtgctacagatgccttcytcgtaaaatgtacgatcttatttaaacctctgcgagttctccaggtgaaaaactgcaccccctgttctaatttacatctctttgatttttgagaagctga

SEQ ID NO: 441884 - DNA, 201 bp, Homo sapiens
tcaagagaagccaggatcccctgaggcccagccagtgccatgtccctctgggagagccagggaccaaacagtggtggaaaataagcaaaaaaggagagcaygggcttgaggctggttaccctaggttcagatgccagctccattacctactggggtacctcgccgaagtcatttcatcattctgcgcctcagtttttgcct

SEQ ID NO: 441885 - DNA, 201 bp, Homo sapiens
tcaatttgtcatcgctgcacaaacatctctgctgagttcagtgtggacagccaaaccagccacccagcagagaggagaatcaccaccggcgtcatttccgmgcagcgactgtgccggcccgccgggcgccgtgcatctactgttgcatgcgatcgctgcggtaacctcgagaggccaatgcgaggctcccggacgaggggc

SEQ ID NO: 441886 - DNA, 201 bp, Homo sapiens
ggaagagctggcgtgttaagtactagggggtccttgtgccccgccctccatcacctcccatctcagcagcagacaccacctgccgttccccaacagagagraccaacccaccttctccatccagccccaaagagaaccaaaccaactcactgtggacttggagggcagtgttagcctggtgggcccgcctttcctttgctg

SEQ ID NO: 441887 - DNA, 201 bp, Homo sapiens
tgcacttcacaggtgtgcagtgaaggccccttcatctgccctgtgcagagtactgagcagtgcagttcacactgagctgggactcagcagccactggtgtyactataacaaaaagacccagaagcctcctgcgcagccccccgcaggccagcgaagcctggctcacgtctcagctctacctctcagaacctcaggactcgg

SEQ ID NO: 441888 - DNA, 201 bp, Homo sapiens
gtcaagaggctatgggctggccttactcattttttctattgcctctagaatataagctctctgaggttagggatatttttccctgtgttgttcctggcacwtggaatggtgcctggtccacagcaggtgtgcagtgaacacgtttgtgaatgaacgaatttctctatctgtgcatggtgcaaagtcagtgcttggccagtt

SEQ ID NO: 441889 - DNA, 201 bp, Homo sapiens
gaactcgacccctcagtggactgtgagtgtcaagaggctatgggctggccttactcattttttctattgcctctagaatataagctctctgaggttagggrtatttttccctgtgttgttcctggcacttggaatggtgcctggtccacagcaggtgtgcagtgaacacgtttgtgaatgaacgaatttctctatctgtgc

SEQ ID NO: 441890 - DNA, 201 bp, Homo sapiens
cagcacctccccgggaagccttttctgactcttcccactgagccacgggtcttcccgtctaaagcagtgggcctggaaaagggaaagctggtcaaatacaraatcccgggctcaatatccctgaggctagttcagtcacctggggtttggcacacaggaactggcctttctaggttccttgagaattctgtgcctccttct

SEQ ID NO: 441891 - DNA, 201 bp, Homo sapiens
cccttggccaactcccacaaatctgtcttcacacccagactcaacagcacctccccgggaagccttttctgactcttcccactgagccacgggtcttcccrtctaaagcagtgggcctggaaaagggaaagctggtcaaatacagaatcccgggctcaatatccctgaggctagttcagtcacctggggtttggcacacag

SEQ ID NO: 441892 - DNA, 201 bp, Homo sapiens
ctccttcaccctccttaaagtttcacatcaagtgttagcctggtagaggactggccacgccacaaacacctgctccctttgccctgtgtgggtcttgtctkcttcagggcccttattcccccgccatgctaggcatttggtttttcgtttttgagacagtctccctctgtcgcccaggctagagtgcgatggcgtaatccc

SEQ ID NO: 441893 - DNA, 201 bp, Homo sapiens
ggagggctccggggatgcacacgggacttactctttggggaatggaatgggttgaagcaaactggccagagacggtctccagtcatcatagtctgacctasaatgagagagggtgacagtcagctttggttgggacaaggaaggtttatggcactgtttttggtcccagatgggccaaaagatggggtgagagcctggcag

SEQ ID NO: 441894 - DNA, 201 bp, Homo sapiens
atgaaggtgtgaatcatacataggtgcccagcaggaaaagagctggactccaaatgactacaaatcccaaagctcttcttcgcctcccgaatccacgttcktttcatcacctcacccctcctgcgcctcatgcggtgatttttttcaccatcaacctcgacccgcatttggaatagttttccttttcaaggacctccagga

SEQ ID NO: 441895 - DNA, 201 bp, Homo sapiens
aatgaaggtgtgaatcatacataggtgcccagcaggaaaagagctggactccaaatgactacaaatcccaaagctcttcttcgcctcccgaatccacgttyttttcatcacctcacccctcctgcgcctcatgcggtgatttttttcaccatcaacctcgacccgcatttggaatagttttccttttcaaggacctccagg

SEQ ID NO: 441896 - DNA, 201 bp, Homo sapiens
ctagctcggggatttgaacccaggctgagaaacagtggctgttacccgcgaggccggaggacctcaggaaaattccctttctctccacctgtgcggtcatyccatcagggaccttcccaggccccacagcacatctgctggccttaaatgctccagggacctttgagtttctagagttatcatgtgctccaggaatgagca

SEQ ID NO: 441897 - DNA, 201 bp, Homo sapiens
aggtacaaagccatgcatgcaccccacgtgtgtatatacacacaccatatgctcacagatacacaaccagagccacatgtgcctcacccacttgtacatakgcaccctgtatgcctgtactcacagccacacttgtgcttatgcacactcttgcacacaccagctcgtgtgcactcacacacaagccactctaccatgccc

SEQ ID NO: 441898 - DNA, 201 bp, Homo sapiens
ctccatgaaggagggctttgaacttgtctctccctagcttcgagatgctgcctaggtggctttctcctgctgggtggacagtggaaggacagggctgggcygggggcaggctgcagggactgtccccagtttctcctctggaaaattagggtgagggtagaacctgcacttcacaggtgtgcagtgaaggccccttcatct

SEQ ID NO: 441899 - DNA, 201 bp, Homo sapiens
cagctggccctgcctctctactctgagaagcagctgatgccacttttgttctcccagcgtcaaaggctgggtttgaattaaggctcagttcccaggagaaytctgagacgctgtcttcacaggtggcaaggaaagacttaagtttaagaaaaatggagacactcactggtccctgacatttaaaagcaccatatccaccgt

SEQ ID NO: 441900 - DNA, 201 bp, Homo sapiens
agctcccagaagccaactgtgcccatcttttccaaactctgcatttaagcatctcactttggccatagtgtaagtatttacacagtagaaacgggcaagcrttgcaaatcgggacttccccggcacctgtcagaaagttgctgccgcctctctctggcccgcttgcctccttggcaggactgtcctgtggaatcagttcct

SEQ ID NO: 441901 - DNA, 201 bp, Homo sapiens
gaaataatattaaaacattttattgctaaagtccacagttgattcagagttcctcagtttttttctctaatgtcccttttctgtttcacgaccccatgggmcatttcatcatcacgtgtccgcaggctcctctgggctgtgatcatttctcagacttgtcccagtcacgcacctgggacacaggagggctctggaaacaga

SEQ ID NO: 441902 - DNA, 201 bp, Homo sapiens; identical to SEQ ID NO: 117284

SEQ ID NO: 441903 - DNA, 201 bp, Homo sapiens
ggtctcaaactcctggcctcaagcaatcctcccacctgagcctcccaaatgctgggattgtaggcatgagtcactgcacccgcctgtctttttttctttamcagattttatttttgagaatagcttcagatttacagaaaaactgctgagttagtacctagagttcccatacgcatacccacacctcattttccgactatt

SEQ ID NO: 441904 - DNA, 201 bp, Homo sapiens; identical to SEQ ID NO: 117285

SEQ ID NO: 441905 - DNA, 201 bp, Homo sapiens; identical to SEQ ID NO: 117287

SEQ ID NO: 441906 - DNA, 201 bp, Homo sapiens
tcccagctacttaggaggctgaggcatgagaattgcttgaacccaggaggtgaagattgcagtgaagcaagattgcaccacggcactccagcctgggtgayggagactgtctccaaaaagaacaaaaagtcatgcatctcttaacaatggggataggttctgagaaattgcattttcagcgattatgccattgtgtgaaca

SEQ ID NO: 441907 - DNA, 201 bp, Homo sapiens
tacctccaccctacccttccctccaccacacatctgctaagtgtctgcatagctgggtcccttgattcacagctctgttcaatgttgtccctgaacccagkaaaggacaccctaagtcctttgcacctcagatccctctgccctctttctctaaagcatctatgatcacctaaaatattaggtgatctatagtcatggcca

SEQ ID NO: 441908 - DNA, 201 bp, Homo sapiens
gccggggcaattgtctgcgaggccctctgtaattgctggtcctacctttcataccccagcccctgccaccctcttccccctcactctatagtagcccccastggcttcctggtagttcttaaacctgaccagcctcactcctgctgcagggccctctgcacatactgtgcctacctccaccctacccttccctccaccaca

SEQ ID NO: 441909 - DNA, 201 bp, Homo sapiens
gcctcagtgtgttctgctgcacaatgggggctgagggtcccaggagatccgagtttggctcagtacttggcacagaccacagctcactcaatgtaacttamaacggttggctgcatcctcatctcataaatgacctttctggccttccaatggctctgtccaacaaccatggaaccctcacttcccttccttgcacattta

SEQ ID NO: 441910 - DNA, 201 bp, Homo sapiens
ctcctacttggctgctgtgtgactttcagcaagtaagtgtacccttctgagcttcagtttccacatttgaaaaatgaaaaaaaatatttacgtccctcacyggatgggtatgtgatatgaacttggagcccttcggtgctggctctgtgccatctggcactggacagatgagtgaaccacccagcatgggatggagaaggt

SEQ ID NO: 441911 - DNA, 201 bp, Homo sapiens
acaaacacagccgcacccagcagcaaagcccagtctcctcccaccggccccgggggcgggcacgcggggggggcactcacagcagcttgaggatttccacrtagcagccgagcgtgcggtcggcctgggggcccagctcgatgctcatggtgctgcaggcggggctgaccatgaggcagtcgatgaggttgggctcgctgt

SEQ ID NO: 441912 - DNA, 201 bp, Homo sapiens
ctcaagtcctccaaagagcagcagcccacagctttggggtctcagccattcctcccacaaacataaaaagagaaggggcctggggtctctcagattagcasacacacctgcccaccctctgagaagtgggtctgtgaatttcactggcctgtggccagcagcagcaggcgaggttttaggcacagacatcaagctggacag

SEQ ID NO: 441913 - DNA, 201 bp, Homo sapiens
tgtctgaccccacagtcttccctccctgcaatccagccctggaacatgaagcaatgcatctgagctcctctggattcccaggacttgggttgggacatccrtgagcattatttctccatggtagctgccctactgatgaagcaggaggaggaaggatgtggcacgcaggagacctcaccttgaaactaagggaagcgccag

SEQ ID NO: 441914 - DNA, 201 bp, Homo sapiens
ctggtgccagggtcggggccaaggccgtcctggtgagcgactccaccaagggtctcatgatgcaactcttccgagacacccttcctccagtgaggctgaargctgagggcagctgggtgggggcagaggaaagggctggaagagagttgggatgaaccaggtaagaggtaatttaagcacagatccacccttgttagtgca

SEQ ID NO: 441915 - DNA, 201 bp, Homo sapiens
aacatgtgattgggaatgggccctggcctcaggctgcctgctccttagctcccaccaggaccacccacagctgctcatcagaccctgcctatcccgtcccrcctctctgggtcccagattcctcctatgcacaggtgtcatgggaatggcatgagggttaataacacaatacactcaaagagcaccacactcttgactcca

SEQ ID NO: 441916 - DNA, 201 bp, Homo sapiens
cgaggacgcggcagatcccagcagacaagggcaagggctttggattccaaaagccctgagttcaaatcctgcctctcctacttggctgctgtgtgactttsagcaagtaagtgtacccttctgagcttcagtttccacatttgaaaaatgaaaaaaaatatttacgtccctcaccggatgggtatgtgatatgaacttgga

SEQ ID NO: 441917 - DNA, 201 bp, Homo sapiens
ggcatggtgtggagacaggcaagctacatcacaagtgaaatgatgtgtggttaccctttttcagttgttttcacgtgctccaggagactctaaaatctaasgtggtggctggctcagtacaacatgtgattgggaatgggccctggcctcaggctgcctgctccttagctcccaccaggaccacccacagctgctcatcag

SEQ ID NO: 441918 - DNA, 201 bp, Homo sapiens
agcatgaatgagtcaaacccctcctgggtagggggcaggtggcagacagccgctgtctttgtgtcactccctgcccctctgaatctcccctgccccgctgmcatgaggatgccacggttaccacaggaggctgccatgtgtgtactaggaccccacctggcagccacagttgaccagtccagaagtcagcatctgcctgag

SEQ ID NO: 441919 - DNA, 201 bp, Homo sapiens
aatgatgtctgccatgagcatggaaggggtagaggagcacatgtgtcatgcacttccattcctgactggggaaggggctgtaggtgatatactattcttcaggggcatggtgtggagacaggcaagctacatcacaagtgaaatgatgtgtggttaccctttttcagttgttttcacgtgctccaggagactctaaaatct

SEQ ID NO: 441920 - DNA, 201 bp, Homo sapiens
aggaatgctcctgctttgttcctctctgttcaatcatctctgattcctccgttaagcatgggtggataggttggcattgcccaagtgggctctactaaaakcctgggaaaaccaaatgggaaataaaccaagaaaggcaaaaatcaccggatcagtccagctccagcaggctgggccagtgtcccaggcagcaatgggact

SEQ ID NO: 441921 - DNA, 201 bp, Homo sapiens
actgcggcactatactccagcctcggtgacagagtatctcaaaaaatgaaagggaggggagcacttaggtttttttttactttaaaaataaagcatattcyatgcagaaatgtcatgaaatgcagaactctaaggagatttgaaatcacccacaatcagaggaatcagggtccccacgggggactatgagccccagcagca

SEQ ID NO: 441922 - DNA, 201 bp, Homo sapiens
ctctatctcaccaaaaaaacaaaacaaaacaaaataaaggtttgtgatttgtgattttttttgttttaatgaaggaaaaaaaaacattggtcttggactgrtccatcacagtatctgagaaaggtggtagtgaagtgtaattttgaaaagacctggaatcgcacctccaggacttaaatcctggctttgtgcctggctggt

SEQ ID NO: 441923 - DNA, 201 bp, Homo sapiens
gtgggagactgtggcctgtctgaggcggggtctggacagaagcctcctcctctcggtctcccagcctggggctccgcttcctggcagctcccacaagaccragaggggtgcatgggaaggagggagagggcaagtggacttccttgcctcggcccagaccagcttggaagtctgtgaccccagtcggaccaggttggtgga

SEQ ID NO: 441924 - DNA, 201 bp, Homo sapiens
ccgcctcgggactgccctggctctgggcgggcctgttatcctaggatgggatgcctctggccactggggcagtctcccatttggccaaggctggcctgggrtgggaggacaggcaccaggcagggtgtgagcgacctgactgcccacctaggaaggagaaaagaaggctgggcccttcccagcttggacggaggggacgga

SEQ ID NO: 441925 - DNA, 201 bp, Homo sapiens
gaggtgggccccggccaagggctgccgggggattccctctaagtagcttccagagcacgaaggtgccagcgtggctcacgggtgccatctgtgccttctcrcctttgagcccagcccttctctcccaggatgctggccctctgccagtcccgcccgctccttctggggcagctggtacaggcccaggaggacggggtgaca

SEQ ID NO: 441926 - DNA, 201 bp, Homo sapiens
cattacagatgggctccactctgcgggaaagcaagagagcctcatcgatatccaaagccatcaaaatgttcatacccctgtggccgactaatctccctccygggaatttttccaaatgatctttcatcatcaaaaggaaaggataaaaacgctacaggcacgcagatattcactgtggcacactctattgaggaagaaaag

SEQ ID NO: 441927 - DNA, 201 bp, Homo sapiens
atctccctcctgggaatttttccaaatgatctttcatcatcaaaaggaaaggataaaaacgctacaggcacgcagatattcactgtggcacactctattgrggaagaaaagcaggaaacggccttagtatctaaccaaagggagatggtttcatgaaaaatggtgtgacacaaaagatgaccacgtggccactaaaaagct

SEQ ID NO: 441928 - DNA, 201 bp, Homo sapiens
tcacctcctccagaaagccctccctcacccctcaagtcagcctctgagtgcaccatcagcatctgtatgggcacatcgtacccctccttgcccgcctttcytcatgccaccagctagggatgtgagctccccaaggccttggaccagctgggccttcatgggtgcatctcctgtgcctgagagtatggccaggacaaagca

SEQ ID NO: 441929 - DNA, 201 bp, Homo sapiens
cggccctgccctcaaggccctacatcacagctgctgtaaagctggagattaggaatgggagctgagggagggtgtcaaggcagctaagcaggttaggaaayccctgcctccatcttaaggggagaatgaactcttgggagccccaagacactggttccattctactggaaatatccgttcttcagaaagacaagttgagcc

SEQ ID NO: 441930 - DNA, 201 bp, Homo sapiens
gcctgataaactgtgggttctgagtcagagagacctgccatggttggacatggcaagaccttggtgtccatgtgtcctcagattccttctcaaacaccatkctccaccctccagactaaggtccagtttgacccatttagctaagtccagccagttcagtaccaccttctccaggaagcctcctggggatggctctatgga

SEQ ID NO: 441931 - DNA, 201 bp, Homo sapiens
gacatttaaaagcaccatatccaccgtttctcctttttccctccatgcctgaggaacacttagggaaatcggtgtttagaattgcggtgttttggaactasagtcttcaagatccctccagaactcggtttttcagtgtggcctggagaccagcccctcagaaccacttgggatgcttgttcaaaacgcatcaaaacgcat

SEQ ID NO: 441932 - DNA, 201 bp, Homo sapiens
cagatattaaactgatcacaacccacacacgagcacacagaaaacaaaggcagtggcttttatttttccctctgagctggaagaatatcaagggttccctyatcgacttcaaagcaataaggacttaggagtgttgagatgctattcaacaaatatagcaaataattttaaaggaaacaactttggcttcatttaggaagg

SEQ ID NO: 441933 - DNA, 201 bp, Homo sapiens
taatggatgctgagtttcagtttcggaagataagaacgttctggagatgaacggtggtgatggttgtgttacaacatgaatgtcttcagtgtgactgaacrgtgtgcttacagatgcacacttttatatgatgtgtattttactgccaaaaacaaaaaagccccctcccctgctcccctcgggagtctgctgacagttgat

SEQ ID NO: 441934 - DNA, 201 bp, Homo sapiens
tctgactccacttacatgaggtacctggatagggaaattcagagacagaaaggaaaagtggctgccagggactgaggccgggaggaagggggagtcagtgygtaatggatgctgagtttcagtttcggaagataagaacgttctggagatgaacggtggtgatggttgtgttacaacatgaatgtcttcagtgtgactgaa

SEQ ID NO: 441935 - DNA, 201 bp, Homo sapiens
gcctgtgccgccaaacccactaatgagctgtgccaccgtgggcaagttacttcacctctctgacctcaatttcggcatctgcaaaatgagggccgtgatgkctgcagctgccataccttgggcaatgatgacgtgcctggcttggcgataagcattttgcagacactgtctcaccaagacttccagataaccccacgagct

SEQ ID NO: 441936 - DNA, 201 bp, Homo sapiens
agggttacagggggatgcaacgagactgtggtgtgtgtgtaatggaccaggcacaatgtcttctgcagggcaagcccctggtgagtggaaacgatgattgytattgttctgtccggaatgccgggtctcttcccacccgcctcggcctgacggccaagactctgcacccagggctctctccaccctctgtgagttccccga

SEQ ID NO: 441937 - DNA, 201 bp, Homo sapiens
cgattgccatgcaacagcatcatgctcaatatggaacccgaaccaccttgctcagtccacaccagtgtctcagctttaatgtgcacatgtatcgcctgggrgttttgtaaacatgcagactataatgcggtacgtgtcagtgtggccccagatgctgcatctctaacaaactcccaggtgaggctgacgctgctggtccat

SEQ ID NO: 441938 - DNA, 201 bp, Homo sapiens
gcctcacggtggcctgatgcttgggaaggcacggggcatgagaaggcccctgtgggggcacattcagaccactttgctcctgctatgcaacatccagaaayatctgctcccttgaaaggcaaaccagctagctcggggatttgaacccaggctgagaaacagtggctgttacccgcgaggccggaggacctcaggaaaatt

SEQ ID NO: 441939 - DNA, 201 bp, Homo sapiens
catggtggctcccatgcctgtaatcccagcactttgggaggctgaggagtgtggattgcttgaggccaggggttcaagatcagcctggccaacatggtgamaccccgtctctacaaaaaatacaaaaattatctgggcatggtactcgctactcgggaggctgaggcaggagaagcatttgaatccaaaaggcggaggctg

SEQ ID NO: 441940 - DNA, 201 bp, Homo sapiens
gatcgaagataatgtatgtaaaagagggtacgtgcctagcacacaaatgccacttagtgatgccaccttggatggatctggaggaggctcgaagctctgayactcggtgacatttccactacccggtgacacagaagcctcggaggtagcagccacgcgggcacccagctaagggagagatgtgggaggcgggcgggagag

SEQ ID NO: 441941 - DNA, 201 bp, Homo sapiens
gagccgagttcctgccactgcactctagcctgggtgacagagtgagactctgccttaaaaaaaaaaaagaaaaaagaaaaaagaaatacttgcaaaatgakattttaagtaaaattaaaagttctgtcacagctagtatggctggggtctgggtctgaactcgattctgaacttgaacctagattcagctcatgttcttca

SEQ ID NO: 441942 - DNA, 201 bp, Homo sapiens
gggggcccagctcgatgctcatggtgctgcaggcggggctgaccatgaggcagtcgatgaggttgggctcgctgtcgttgcctgcgctggccgtcagcgcyggcttggcagtgctggtgcgttccacctccacgtggatctcactggaggccacgaccaccgacttgagccgggcctcagacagcgtggcttcctgagaca

SEQ ID NO: 441943 - DNA, 201 bp, Homo sapiens
taccaaaaatacaaaaattaactgggtgtggtggtgtgcgcccctgtaatcccagctactcgggaggctgaggcaggagaatcacttgaacttaggaggcrgagttgcagtgagccgagttcctgccactgcactctagcctgggtgacagagtgagactctgccttaaaaaaaaaaaagaaaaaagaaaaaagaaatact

SEQ ID NO: 441944 - DNA, 201 bp, Homo sapiens
aggtgtttctaaagagggcactgggatgggatgaaatactcttttcctgatgaaaacatactcatactcatgaaatacttgcaaaattggctgggcgcagyggctcatgcctgtaatcccagcactttgggaggccaaggcaggtagatcacttgaggtcaggagttggagaccagcctggccaacatagggaaactccgt

SEQ ID NO: 441945 - DNA, 201 bp, Homo sapiens
ttactccgtgccaggcaccaaccaaacactttgcatgggttttttcctttaatcctcacacagaccctgtgagagtggtgcaaggaagccacagtttgcasataaagcaagctgaggctcagagtggttaagtgacttgcccagtgtcacagagctaggaaatgatatctgaactcagccgctctctgaccacaaagccca

SEQ ID NO: 441946 - DNA, 201 bp, Homo sapiens
ggctgtgtggtttggtctggggcctcgggagtggagcagtcagagccccactcggccctgaccacccaggtttgaagcgggttcctcaggacctcaggaayccaggtgccagctcgccgtgaccgcccgggacagccttgcttagcagaggccaccatttctcaagaagtcacgctggggctcccaggtagagcagtgagg

SEQ ID NO: 441947 - DNA, 201 bp, Homo sapiens
gaaagaaaagaaataaaaatgctccctgcagaacatgggaaggcgcagttactgtcaagaataggaacagcctcacttgtgactgacagctgagtcgctgkgtggctctgagcagggcctgtgccgccaaacccactaatgagctgtgccaccgtgggcaagttacttcacctctctgacctcaatttcggcatctgcaaa

SEQ ID NO: 441948 - DNA, 201 bp, Homo sapiens
tcaactccagatctcacagccacttcttgggaacctgaatatctctgagaaagcctggctgtgatggaaaagcctccctttcttcccctaagcccgttcaygtgagtctgacacaccagctcgctctggccagcaggcaatgaacgtgcaaaccaacacgccaagaacagagtgatggccttgcgtgtggcctttgggagc

SEQ ID NO: 441949 - DNA, 201 bp, Homo sapiens
gtagcagacaaaaaccaagaaaacacattcctttcaggtccaggcctgcctggcccgcgcgtgttgtctgaactgcaccatcaccctgtttgcaacttctycagaaaccaggccccaaactgcaaagctcacgccctgtgtgctcactcctgggaatccaaacaaactcaaaacatgtccaaagccatccaaggaactgag

SEQ ID NO: 441950 - DNA, 201 bp, Homo sapiens
acaacacacccaggaatctttctccacccatttcaaagtcgttcgcagtatttcttgacagatatgagctcacaaggagatggatggagaacatattatastaggaaaatttaggaacaacttaaatgtccatcaacaggaaagtagcttaatacattctggtatacatacgcaatagaatactccacagctattcaagca

SEQ ID NO: 441951 - DNA, 201 bp, Homo sapiens
ggtgacagctcttccctggcaccaggtgggtctcctggcttcgcctcccgctgcctcgggacctgggaaaggttctcccgactcagctgctgcgcaagccraggcctcctgtggtggcgagactgagcgagggcaacagcgctagtccctggggaggctcagggcgacccccgggattctaaaggtacttagagactgcga

SEQ ID NO: 441952 - DNA, 201 bp, Homo sapiens
agctcctcaagtaattccaatgcgcagctcaagttggaaactgctgctctaaactcgcccaagaaagccttggacagaaaaaaaaagaggttttcaggggyaggaggaggaaggcaggaggggagggagggaaagaggcagggaagagggtatatctgagcagaccccactcctaggaaggggataaggacagaggaataa

SEQ ID NO: 441953 - DNA, 201 bp, Homo sapiens
tgcgcaccaactgcagcagagagccggagatgattacccaatgaccccactacaaaaacccactcctgcctcaagtcccccaccctcgtggcccaaggggraagaggagatgcttgtactgggcggggaggttggttttgcagccaggtgatcgttctccaccagagtcaaaatggagcccaacctgcaacaccctgcgtt

SEQ ID NO: 441954 - DNA, 201 bp, Homo sapiens
actcttcctcgagctggcaagtggaactccacccagctgctgtggccttttcaccaaatctgactttgccagaaggaatgggaacgggcgaggtccgccasggaagggcgacttccacctggtgggcccctgagctgacctggagttggtggaaaaagatgatggccaaggacctgaaactatctcggtgacttggcaaaa

SEQ ID NO: 441955 - DNA, 201 bp, Homo sapiens
tacctccttgcattcctagaaaaaaaaccaggtaaattgctgccccagggcctttgcacatgctgtggatggctcctttacctcctttagccgctgccccrtggcctttgcacatgcacagcttcctcccttaccttttccaaacctgctcaagtgtcacctctcatccagattttctttggtcaccctattccaaaggcc

SEQ ID NO: 441956 - DNA, 201 bp, Homo sapiens
tgacttctgacaggagacaggagggaagcgagggagcgtgtggtgtgggtgtttagacaacaggcatcccaggcagaggaagcagtcagggcaaaggcctygaggcacagcaggcttggcgtgtccaaggaggcagcccagatcacaccatcagtaagggagggaggctttcacttgccatgctgtctgggcagagaggcg

SEQ ID NO: 441957 - DNA, 201 bp, Homo sapiens
aggcacagcaggcttggcgtgtccaaggaggcagcccagatcacaccatcagtaagggagggaggctttcacttgccatgctgtctgggcagagaggcgcrggaggcaacacggtgtgtccaaggtcacacagttaatcattgagagatcagccaagcatggcacactggagtcagggcacagagctgcatcccagggagt

SEQ ID NO: 441958 - DNA, 201 bp, Homo sapiens
ggggcccaagggcaggggtccccggtcaccggggctggggggaggcctcgacaccccattggctttcctccaacttcacacaatggcaaatgcccttggcrgtggagaaagcagcctcatcaaggggccggcttccaagccatgcatctccatggcaacaacacacttccatccagcggctgcctgcttccttccttgtgt

SEQ ID NO: 441959 - DNA, 201 bp, Homo sapiens
ctgcctctctactctgagaagcagctgatgccacttttgttctcccagcgtcaaaggctgggtttgaattaaggctcagttcccaggagaattctgagackctgtcttcacaggtggcaaggaaagacttaagtttaagaaaaatggagacactcactggtccctgacatttaaaagcaccatatccaccgtttctccttt

SEQ ID NO: 441960 - DNA, 201 bp, Homo sapiens
cccgtgagctggaaccgggaagggatgcggcggcaggggggtctgccttttgaacaagctcctcaggtaatatagtttgagaacaagtactctagaacttytggaattacagcctgataaactgtgggttctgagtcagagagacctgccatggttggacatggcaagaccttggtgtccatgtgtcctcagattccttct

SEQ ID NO: 441961 - DNA, 201 bp, Homo sapiens
ggcatgtgccaccacgcccggctgattttttgttttgtatttagtagagacagggttttgccatgttggtcaggctggtctcaaactcctgacctcaggtratccacctgccttggcctcccaaagtgctgggattacaggcatgagccaccgtgcccagcctgttcctgatttaaaccagccactctttcactgaggaga

SEQ ID NO: 441962 - DNA, 201 bp, Homo sapiens
gcctcctggggatggctctatggagaggaactccccctgtcctctgctcatccttccccctgttctgccgggagcacgagtctaggtctgtcctcaactgkgagttagggcgctaccacacccagaactcatgcacacagagaagcaggctgtgagcatctcagagcacagcacacagtgcagtgagatggttatcagcac

SEQ ID NO: 441963 - DNA, 201 bp, Homo sapiens
acacagcagctccttccccctccccccaggaaaaaccctgtccggtcaatagcagaactaaagagctggtgcacactttcacttcccactcgagtgcctgmggacccggcttctcctaggcgtccagcaaagcccagacttaaaggtggcaggtgctgtcctctcaccctgcttcgggtgaggacgggtctccaactgagc

SEQ ID NO: 441964 - DNA, 201 bp, Homo sapiens
tcactgaccgtgaccacagggctgtgatacagccaggccacagcagggaagcaatagcttcgggagtttcctgaggcccaacaggctgcttcccgaccacytaccagcacagcttcataaagagggagttttttggccaactcttgcccccaaaagctgggagcgtccagagaactcgccggcgtctcagtctgagtacag

SEQ ID NO: 441965 - DNA, 201 bp, Homo sapiens; identical to SEQ ID NO: 117364

SEQ ID NO: 441966 - DNA, 201 bp, Homo sapiens
accctctggcttccgttttctcctctttttgcctcaccgtgctgtcagctccagaacatgcccttgggaatgagcagcctcccatctccacattctggccyctggagtccctgcacttccttctgatcagggaagtgattcaaggtgggacatgatcccctttgaacatcgggacctgaggctgagggcattaaaagagtc

SEQ ID NO: 441967 - DNA, 201 bp, Homo sapiens
agagcatagaatggtaggtgtcaggggctcggggaggggaatggggagttagtgtttaacagggacagagtctctgtctgataagatgaaaagagttctgragatggagggtagtgatggttgcacaatgggaatgtacttaatgccaccgaactgtatgttaaaaacacctccgatttggtgaatttgatgttatgtgta

SEQ ID NO: 441968 - DNA, 201 bp, Homo sapiens
aggttcttgatctgtcaaccaggctggagtggagtagcaacatcatagctcactgtagccttgaactaggcgatcctcccaccttggcctcctgagtagckgggaccacagatgtgcaccaccacgcctggctaattaaaaacattttttctgtagaaacgaggtctcactgtgttgcctagtcctcccatttttatttat

SEQ ID NO: 441969 - DNA, 201 bp, Homo sapiens
ggttttgtaaacatgcagactataatgcggtacgtgtcagtgtggccccagatgctgcatctctaacaaactcccaggtgaggctgacgctgctggtccayagaccgcaccttggatggaaagaagtattgctattatcatcattcccattttaccaggaaggaaaccgcagcagcgcgcagagtttgtgacttgcctgga

SEQ ID NO: 441970 - DNA, 201 bp, Homo sapiens
ccccattcataccaatacttctgtcctccctcgtctgatggtttcctccacagcacttagtggcagcagacaagattctatatttccgtgttcattttccyctcctccagtagaatgggggctccaagtaggccaggatgatgcctgctttgctccgtgcctgcaatggtgcctggtgcacagtggacgcgccaccgccat

SEQ ID NO: 441971 - DNA, 201 bp, Homo sapiens; identical to SEQ ID NO: 117373

SEQ ID NO: 441972 - DNA, 201 bp, Homo sapiens; identical to SEQ ID NO: 117374

SEQ ID NO: 441973 - DNA, 201 bp, Homo sapiens
agcagtcagggcaaaggcctcgaggcacagcaggcttggcgtgtccaaggaggcagcccagatcacaccatcagtaagggagggaggctttcacttgccaygctgtctgggcagagaggcgcaggaggcaacacggtgtgtccaaggtcacacagttaatcattgagagatcagccaagcatggcacactggagtcagggc

SEQ ID NO: 441974 - DNA, 201 bp, Homo sapiens
tcaaagtgaaactgcttagaagccagaaggcaggttcataataagtatgtaaagaaacagacctttcaagagtcctaatctgtgccaggcagccttttagragtaacacgtatatgatttcagtgcttctcaaactaagttcccaaggaacatgaagttccgtgagtgggcccgagatgttttagctgaattcaaattcta

SEQ ID NO: 441975 - DNA, 201 bp, Homo sapiens
aacgtaagtcagggaacgagaaataaaaaattgtgggagtgggtgccaactttttggatggatggaatgatcaaggacagcccaaggaggtgacttctgasaggagacaggagggaagcgagggagcgtgtggtgtgggtgtttagacaacaggcatcccaggcagaggaagcagtcagggcaaaggcctcgaggcacagc

SEQ ID NO: 441976 - DNA, 201 bp, Homo sapiens
gtatatccactcagcagaagcctacatgatgagaatgtatggtctacaactatgcacaacacatagatgacctacacaaactgagcatggagcaaaagcarctggacagaagcatgtcatcaatgtacatcaccatgtgcttccacccatacaaacttcagaaagaggtgcacctgagtctgtgctgtgggaagtcagggt

SEQ ID NO: 441977 - DNA, 201 bp, Homo sapiens
ttccctgagcattaggtagcccaaactagaaactacccaaatgaccatcaagagaagaatgaataaagaaatcctggtatatccactcagcagaagcctamatgatgagaatgtatggtctacaactatgcacaacacatagatgacctacacaaactgagcatggagcaaaagcaactggacagaagcatgtcatcaatg

SEQ ID NO: 441978 - DNA, 201 bp, Homo sapiens
gaagtctgcagctgccctgagagcagcacaagctcccgtggtgcggggtttccgccaggcggcaaagcctcggacttcgatgtgggaattcctcccagccrgacacatggctccgaagacccagtgagcatccacagaaactgtatggctgaaggatgcttgtctctgggtgcaggaggtacgagaagtcgctcatacata

SEQ ID NO: 441979 - DNA, 201 bp, Homo sapiens
ccactgtcggcctccagagctttctcatcttcccaaactcaaactctgtccccatcgaacaccaactcccggctccccttccttctacctgtggttaccakgattccaccttctgtctctggagacactgcctcatgcccattaggagggccactgataaaacaacggaaaatagtaatcgttggcacattgtggagaaat

SEQ ID NO: 441980 - DNA, 201 bp, Homo sapiens; identical to SEQ ID NO: 117392

SEQ ID NO: 441981 - DNA, 201 bp, Homo sapiens
tgcagccaagttactatatgatccatcaattttactcctagctatatatgcagaagaatgaaaaatagggacttttaaaagggacaccagcgcacccgtgwtcagagaagcattactctaagtagccaaaaggtggaagcaacctagtgcccgccgccacctccttctgcagcagaaggcattcccccataataaccagtc

SEQ ID NO: 441982 - DNA, 201 bp, Homo sapiens
ctcccggctccccttccttctacctgtggttaccatgattccaccttctgtctctggagacactgcctcatgcccattaggagggccactgataaaacaayggaaaatagtaatcgttggcacattgtggagaaatcacaaccttcacgcattgttggcgcgaatataaaagggtgcagccaagttactatatgatccatc

SEQ ID NO: 441983 - DNA, 201 bp, Homo sapiens; identical to SEQ ID NO: 117394

SEQ ID NO: 441984 - DNA, 201 bp, Homo sapiens
ctgtgagtacttgaacaaggaaagagacggctgtgccataaacaaggaatcacaggaaaactcagaagtgcccgcccttctttcttgctagtttcgtggtrtgttctgctttgcttgtctgttttggtggacacacagtggtgccaattcgtatttcctaaaagagccacattggctgcttgtaaagagacctctcatttg

SEQ ID NO: 441985 - DNA, 201 bp, Homo sapiens
accaggctggagtggagtagcaacatcatagctcactgtagccttgaactaggcgatcctcccaccttggcctcctgagtagcggggaccacagatgtgcrccaccacgcctggctaattaaaaacattttttctgtagaaacgaggtctcactgtgttgcctagtcctcccatttttatttatttttattttatttttgg

SEQ ID NO: 441986 - DNA, 201 bp, Homo sapiens
aaggcccaggtgacagctcttccctggcaccaggtgggtctcctggcttcgcctcccgctgcctcgggacctgggaaaggttctcccgactcagctgctgsgcaagccgaggcctcctgtggtggcgagactgagcgagggcaacagcgctagtccctggggaggctcagggcgacccccgggattctaaaggtacttaga

SEQ ID NO: 441987 - DNA, 201 bp, Homo sapiens
atctgaatgccacaggcaacaactgcgagttgctgggcaggaccggagctgccgcccccaaaactgtttcagattcagagggcgctgctgggtaaaggagrggtaaaggactggacggggaagctgagtctcctccaccacttctcaggaagcctttggggagccacctctgctccccgggcagaggccacatgccagccc

SEQ ID NO: 441988 - DNA, 201 bp, Homo sapiens
agaagcgtaccgattgccatgcaacagcatcatgctcaatatggaacccgaaccaccttgctcagtccacaccagtgtctcagctttaatgtgcacatgtrtcgcctgggggttttgtaaacatgcagactataatgcggtacgtgtcagtgtggccccagatgctgcatctctaacaaactcccaggtgaggctgacgct

SEQ ID NO: 441989 - DNA, 201 bp, Homo sapiens
ggctaattaaaaacattttttctgtagaaacgaggtctcactgtgttgcctagtcctcccatttttatttatttttattttatttttggatttgttagcawgatttaatcaattattccacattataaacatatattaaattatcacattatactccataaatatgtaatacatacaactattgtttgtcaattagaaaaa

SEQ ID NO: 441990 - DNA, 201 bp, Homo sapiens
tcctatgacaatgaaaatgtggccatgtatcaaaggcccttgcaagttaggcacagtgccaagcactttatgcatatgagaggatcgcatcttcaattctrtgaaataggtactcgtctcagacccaatttacagaaaacaactgggcacagaaaggcctagcaacttgtccaaggccacccagctactgagggcaggaca

SEQ ID NO: 441991 - DNA, 201 bp, Homo sapiens
gtaatacatacaactattgtttgtcaattagaaaaaaagaacgaagaggctgccaacaagatggtaagtacacagtaataagtgaattcaaccaacatgartgaattcaaccaacatcagtaaattcaaccaacatcagtaaattcaaccaacatcagtaaattcaaccaacacgagtgaattcaaccaacatgcatttgg

SEQ ID NO: 441992 - DNA, 201 bp, Homo sapiens
attagaaaaaaagaacgaagaggctgccaacaagatggtaagtacacagtaataagtgaattcaaccaacatgagtgaattcaaccaacatcagtaaattsaaccaacatcagtaaattcaaccaacatcagtaaattcaaccaacacgagtgaattcaaccaacatgcatttggcattgacatggccttggccttcatgg

SEQ ID NO: 441993 - DNA, 201 bp, Homo sapiens
caaccaacatcagtaaattcaaccaacatcagtaaattcaaccaacacgagtgaattcaaccaacatgcatttggcattgacatggccttggccttcatgsagcttcatgatctcgtgggggaggtggcttctcatttttaaattaaacttttcatttgaaagtacttttggatttaccgaaaagctgaaaagacagtaga

SEQ ID NO: 441994 - DNA, 201 bp, Homo sapiens
ggcaatgtcctggccaggccccaatgagctgtgtgactctggggattgctttgcttctctttgattacctgaaaagtggcaggtggtaataccaatttctkgggtttggaggagaattcaacgagattgaggtccactcaggtccaagtactagctgccccgcatcccgccctggccccccctggcctgctgggcagggga

SEQ ID NO: 441995 - DNA, 201 bp, Homo sapiens
gtgagcagtagctctcacggggccctctcctgccctgcctggaaccagatggtggagagaagaaaatgctcatctctgcgcccttccttcccatctgcggycacctcagctgcccagaagatgctcaaggtgatggagatggaaggaaagggcaggagaggttcactgcctccttctgactagtgttccctgcggccctgc

SEQ ID NO: 441996 - DNA, 201 bp, Homo sapiens
ggaggatcatctgagcctgggaagttgaagctgcagtgagccacgatcatgcaactgtactccagcctgagcaacagagtgagaccttgtgtaaaaacaarctaggaattcacaaggtatgcaggaaatctacaggaaatacagggaacagaggaatgtgttaaatgacaccatgaggaagcaatcagcaaaactcagaat

SEQ ID NO: 441997 - DNA, 201 bp, Homo sapiens
gcacctgagcagtgattgctggtgcccactggaacatgagcaggaaaggtgatgggggtggtgatggatagatcaggcagccagcaccagaacctgcccaycaaccacagcaagaaagacccccaccaaggcatgagggaccctggagtgaggcaactggaagtgcacagaaacacctacctagagaggaatcatgccgaa

SEQ ID NO: 441998 - DNA, 201 bp, Homo sapiens
gttatgtgttgggcggtcttttgttctggtgcatgggcgatgggggcccaagggcaggggtccccggtcaccggggctggggggaggcctcgacaccccaytggctttcctccaacttcacacaatggcaaatgcccttggcggtggagaaagcagcctcatcaaggggccggcttccaagccatgcatctccatggcaac

SEQ ID NO: 441999 - DNA, 201 bp, Homo sapiens
acctgtagtcccagctacttgggagtctgaggtgggaggattctttgagcctggcagttcgaggctgcagtgacctgtaactgcggcactatactccagcstcggtgacagagtatctcaaaaaatgaaagggaggggagcacttaggtttttttttactttaaaaataaagcatattccatgcagaaatgtcatgaaatg

SEQ ID NO: 442000 - DNA, 201 bp, Homo sapiens
aatcacaaccttcacgcattgttggcgcgaatataaaagggtgcagccaagttactatatgatccatcaattttactcctagctatatatgcagaagaatkaaaaatagggacttttaaaagggacaccagcgcacccgtgttcagagaagcattactctaagtagccaaaaggtggaagcaacctagtgcccgccgccac

SEQ ID NO: 442001 - DNA, 201 bp, Homo sapiens
cctcacttgacttaaacaccattgaaacctccctgcctccgggagcccaggcatggctcggccatcccacatctgtgtgcccacatcccagcccagactgycctgtactgtcacagaatatgtgccggtctttaataccgcaaggctgtgcactcccgggggagtggcctttgcagcccagcaccatccagggagctctcg

SEQ ID NO: 442002 - DNA, 201 bp, Homo sapiens
ctcccacaaacataaaaagagaaggggcctggggtctctcagattagcagacacacctgcccaccctctgagaagtgggtctgtgaatttcactggcctgyggccagcagcagcaggcgaggttttaggcacagacatcaagctggacagagtcgttccccacatgggactgtacctcagcagcctgtcccatccttcccc

SEQ ID NO: 442003 - DNA, 201 bp, Homo sapiens
acacctcgatgaccaccatggaccggggccgctctctgcagtgctggggacagagtggggtacagttactgcggccctaagaatgttctgaacacagcccrtggctgctagcagggctggggacagtcagcccagctgtgggtgcctgggttcccttgatgaacacggctgcactgctttctaaaaatgagtttattttgg

SEQ ID NO: 442004 - DNA, 201 bp, Homo sapiens
tcccagcacttctggaggctaaggggggcatttcacttgaggccaggagtttgagaccagcctggccaacatggcgaaaccccatctctactaaaaatacaaaaaaaaaaaaaaaaaaaattagccaggtgtggcagtgcacacctgtaatcccagctacttgggtggctgaggcatgagaattgcttgaagacaggaggc

SEQ ID NO: 442005 - DNA, 201 bp, Homo sapiens; identical to SEQ ID NO: 117434

SEQ ID NO: 442006 - DNA, 201 bp, Homo sapiens
agcacgatgaaatatctgtgcaaaacccaacatgtctgaagcaagaaccctacccgctccagaggatgaatgctcctttgagcctcagagtctgtggtttyagtttgtacccagagaattgtttaatttttaaaagaccatgaaatgatctcacaaaatccaccctatatcaagccccaaagcaaaccacagcgatccaca

SEQ ID NO: 442007 - DNA, 201 bp, Homo sapiens
ctccagcgctgtcctcaccctctctgcttgtcaaggaagggacgttacctgggcaacacttgccatcgctctggcaactgtcagcagaggcaagcacataygccagggttctcaggccagggaaagcagagcctgttgctcctccacgggagacaagtcgtcagcaggaatgtgccccttgccaggagaggagtgactcag

SEQ ID NO: 442008 - DNA, 201 bp, Homo sapiens
tcagaaacggcacacctgggcacctgcatcatcagtgaggtcagagggagccacctggggacccaggaggctacaggaggaacttccaggagaattcgggyagggacgtcagcatggggctcgcacagggtccctggcaaagaggagccatgggggaggattccggccccaagctgtcctctcacacaaagctgtacatca

SEQ ID NO: 442009 - DNA, 201 bp, Homo sapiens
ggagccgcattcaaaagtcaagtccagataaatcagccaagagtcacaaaaaggaacgctgagactgaatctgtctcttgaaaaactgaaggagatgaaaygtaaaacctaggccaatacggcatcccatcttcctcctctccattattttcccgcaccccatgattttctggggcctctgatatactcattgccactggt

SEQ ID NO: 442010 - DNA, 201 bp, Homo sapiens
ctttacacgcaactcaacaaaggcctgggagggtggggacagccagctttgctttgctggtggacggacagttctttctcggaactgttttgcgtccttarcagctccctccacgatgcccctctgcctgctccctccagatccttccaccttctggttggtctggtgatgcctggaacctctccagaggaggccttgcaa

SEQ ID NO: 442011 - DNA, 201 bp, Homo sapiens
ggtgagcgacaaggctgcctggaccccacaatctaggggaggaggcagctgcgttcatcctgtcctttccaccactgcatcgctcacccctcagaggaccycctggcccccaatcccggcggctgccatgtgtcacccaagaaggttctctttatgcagcgtgcctcaaagtcacactcgtgggcctgcccttcactgttc

SEQ ID NO: 442012 - DNA, 201 bp, Homo sapiens
cagaccccacggccagtgcaaaggctcagaggtgggaacagctgggagtgttcaaggaggagcagaaggtgaaacggagggagggctgggtaagcgatgcrttggagagaagggtgggtcactcctggagaggctggtaggtccacctaggggctcagggattcctcccaggggtttgcaggagctttagccaaggttcac

SEQ ID NO: 442013 - DNA, 201 bp, Homo sapiens; identical to SEQ ID NO: 117452

SEQ ID NO: 442014 - DNA, 201 bp, Homo sapiens
ctgtgggcaaggctgctactccaggcagcaggcctcaatgggcccaatcaatccccacaaaacagtgggcagctgggggagggtcagggagagggagaggragaggaagaggaagaggaagaggaagaggaagaggctgcgggagggagagaggcaagccaggaggcacttcggtcttcagagctgccactttcctgaatg

SEQ ID NO: 442015 - DNA, 201 bp, Homo sapiens
ctagaagcctcacccctgcagggcctgttctggttctcagggccccccatgaccagaggccaagcacagcccagcaggcgtccccttctgtttctccgagscctggtgtccagagaaacgaagctgcgccagctgcccccaccccagtcccacgctccctccagaagcttccctcacggcgctcaacgcccagtgcggtta

SEQ ID NO: 442016 - DNA, 201 bp, Homo sapiens
ctggaggagctcaatgcaggtgccaggccccctgttaggagatggggctggggagggaggtttcgtagacacagccagggtaggtggcccactagacaccraaagtctatttcaggcacgtgctggtctgaacagagccttcgttttcttcccaccctctgagcctccctcccttctggtccctctgtcgtgtgcccccac

SEQ ID NO: 442017 - DNA, 201 bp, Homo sapiens
ttttcttcccaccctctgagcctccctcccttctggtccctctgtcgtgtgcccccactgcctggacctgatgtccccagagcttgcctgccacaccccaratcaggcccgaggcctccccactaagggaaccccggatggtccccccgtcgtcattgactcggtgctgcttcttgaaagcaagcctcaacctctggtttg

SEQ ID NO: 442018 - DNA, 201 bp, Homo sapiens
ttcttagaatctccttgtttttgatgaccttgaccgtggggagtactggccaggtactttgtagactgtccccttgttgggatttgtctgatgtttttctyatgattggaatggggtgatgggttactgggaggaagaccatagaggtcaagtgtcgtttttatacgtcctatgaagggaatattctgtctaactggcttg

SEQ ID NO: 442019 - DNA, 201 bp, Homo sapiens
gctggtctcgaactcctgacctcaagtgatcctcccgcctcggcctccgaaagtgctgggattacaggtatgagccatcacgcgcagccaattcacataamcctagtggtgatgggagacttagggaaaagtggaaagctctcacgcaagcctcaggcaccagcaacacccaggctctacccagatgtgccacgagaacag

SEQ ID NO: 442020 - DNA, 201 bp, Homo sapiens
aggtggagaggcaccaggagctccagctcccatagcaggtgcatcctggcttctcggggctcctctaggagcctggtgtgtgtctcctcacagcccagtarcctggacctgtcacctgggcctgttcacatggacagacttgtccctcacagctgtgcatacctgggtctctcaccttgaaaccctggacacagaaacagg

SEQ ID NO: 442021 - DNA, 201 bp, Homo sapiens
gggcctaggtctgtcttggttcccactctttccccagtgcctggctcatggcaagtgctcaatagcatgtgttgaaaagaatgagaaaggctattagtatyggtcattgttgggagtaggggcggggcaagagaaatccacagccacccaccactctctgagtgagtcttgctgtcccgagaaggcaccaggtgaccgagg

SEQ ID NO: 442022 - DNA, 201 bp, Homo sapiens
tccatgaagtcagggcctaggtctgtcttggttcccactctttccccagtgcctggctcatggcaagtgctcaatagcatgtgttgaaaagaatgagaaasgctattagtatcggtcattgttgggagtaggggcggggcaagagaaatccacagccacccaccactctctgagtgagtcttgctgtcccgagaaggcacc

SEQ ID NO: 442023 - DNA, 201 bp, Homo sapiens
ttgggctaagagaaggtttccctggaaaaacaagttaggaataaaatgatcccaaaagaaaaagcaaggcaggtcttcttcccactgataagagagtaaaytttctctagatgaggggtttcagactcggggttccttctgaaaattggctggctcccctgacatgatgtaacatgtcttatgtatgtgtgaccgtggtcg

SEQ ID NO: 442024 - DNA, 201 bp, Homo sapiens
ctatttgcctcggcctcccgagtttctcacctggagtctccgggctggctatgagtgttcgggaaactctctggctctggtcctgaaaggtgaaggagggygcaggggcatgtccccccgtgacatctgtgcccgctccccaagcgccagcccaacacagggctgggaaaagctgggtgagagtcggcacatcctgaagga

SEQ ID NO: 442025 - DNA, 201 bp, Homo sapiens
tagcacattttatagactaaaaaaatacaccgaggctcagaacggagcagtggtttgcccaaggcagtccactgagaagcagccaagccaggttcaccgcsagtgtgcttcccccgcacagcactggccccacgacagccatcccggaagtctactgccagttcccaggccactgcctctaaactgacaacacggggtgct

SEQ ID NO: 442026 - DNA, 201 bp, Homo sapiens
tgtgcttatgcacactcttgcacacaccagctcgtgtgcactcacacacaagccactctaccatgcccggccctgcgtagctcgaaccaacaaacacagcygcacccagcagcaaagcccagtctcctcccaccggccccgggggcgggcacgcggggggggcactcacagcagcttgaggatttccacgtagcagccgag

SEQ ID NO: 442027 - DNA, 201 bp, Homo sapiens
aagagccaggagctgtggggagagttcccgaagaggagtacagaggttctgtgccctcccaaggctctcctgaaagtcacaggagcctccctggtgctgcrgtaaagcaaggaagctgatgactgcccaggagtgccaccaaggagaaggggcacacagagaggggatgggggaaggaacaggcatgtcacccttatagca

SEQ ID NO: 442028 - DNA, 201 bp, Homo sapiens
attgctaggctcaaaaagtacaaaagattgatcaattcatttttcattcattccttcattcatctgacagacatttactgaacttccgttatgctgcaggygccatgctaggtgctggagattcagcagtgaataagacaggagcttagtgggcaaacagacaacaaacaaaatatctaaataaataaactattggagagt

SEQ ID NO: 442029 - DNA, 201 bp, Homo sapiens
ggaagcggcttgaattatcacacaggggacacccatgctgcacagtcgggttccacgtggcaccaccccactgtaaggaaggatttgctggacctgcacasacaccctggggccccaaaggagaaacgagaagttggatggcagccctgcttagacagtcaacagcaacaacaccaacaacactaatgatgaggctgccat

SEQ ID NO: 442030 - DNA, 201 bp, Homo sapiens
tgccagccaggttgtggctcgcctgtagacaccttttcaagaactggaagacaaagccccctcttggcagatgatagcagccatggccagccagctggggsaggctttgtgcaaaacaagatggtttttcctctggcgggtcagcgccttgccagggcacgtgagattcctgcccactggaccccacaccatgatgaggtc

SEQ ID NO: 442031 - DNA, 201 bp, Homo sapiens
caagaaaaaataaacaaataaaataaaaataaaaaataaatgaataatttaaagaaataaaaataggggccaggcatggtggctcatgcctgtaatcccastactttgggaggccgaggtgggcggatcacttgaggttaggagtttgagaacagcctgtccaacatggtgtaaccccatctctactaaaaatacaattat

SEQ ID NO: 442032 - DNA, 201 bp, Homo sapiens
caagaacctgcagtggcatttcagggaggcagccgaccttggcggtcaccggtggttctacagagcagaacgacagcgggggcagctcgtgtttgctattyggggggggtggcaaatgcgaagccaccagataactaaaacctctgctgtcttcctgccactgccgaccatcaccataggaaccacatcctgctgctacca

SEQ ID NO: 442033 - DNA, 201 bp, Homo sapiens
caccgcatgttctcactcataggtgggaactgaaaaatgagaacacttggccacggggtggggaacatcacacaccggggcctgttgtggggttgggggargagggagggatagcattaggagatatatctaatgtaaatgatgagttaatgggtgcagcacatcaacatggtacatgtatacatatgtaacaaacctgca

SEQ ID NO: 442034 - DNA, 201 bp, Homo sapiens
atctctatctggcaccttagctggtgtccagagtaatgtgacttgattaaagacctcatgtgtgccagatactgggtcaactgctcagacatctccccackaatgacccatgccaggggtaccattatgatcccattttatagatgagaaaactgaggcccacagaagagaaataacttttcttaagtgatgctgctagtt

SEQ ID NO: 442035 - DNA, 201 bp, Homo sapiens
ccatggctatgccagaagacacccctctggcctctggctacttcaagtgagaaggagaactctactgggcactgcatagaccctcagggagctctgggtgkgcttcagtggatggagcagcactgaagctgtgtccctcctgtgtcaatccaggtgtggccacctggcttagggctctgatgacagggcccaacccaccaa
